United States Patent Application Publication US 2006/0123505 A1 - sequence listing, part 18

SEQ ID NO: 28420 - DNA, 1774 bp, Oryza sativa
  ref <308>: DATABASE ACCESSION NUMBER: AK103862
  ref <309>: DATABASE ENTRY DATE: 2002-08-28
gagctagagctaagctaattaagcaagctaatgggttggtaataacaatggcggcggccggacgaacacttggatgcatatatgcagggacgctggtgacggcgagcgcgcacataataacggcggtgatcggctccggcgtgctgtcgctggcgtgggcgatagcgcagctggggtgggtgatcgggccggccgtgctggtggcgttctcggtcataacctggttctgctccagcctcctcgccgactgctaccgatctcccgaccccgtccatggcaagcgcaactacacctacggccaagccgtcagggccaacctaggtgtggccaagtacaggctctgctcggtggcacagtacgtcaatctcgtcggcgtcaccattggctacaccatcactacggccatcagcatgggtgcgatcaaacggtccaactggttccatcgcaacggccacgacgcagcctgcttggcatctgacacgaccaacatgatcatatttgctggcatccaaatcctcctctcgcagctgccgaattttcacaaaatttggtggctctccattgtcgctgctgtcatgtcactggcctactcaaccattggccttggcctctccattgcaaaaattgcaggtggggcccaccccgaggcaaccctcacaggggtgactgttggagtggatgtgtctgcaagtgagaaaatctggagaacttttcagtcacttggtgacattgcctttgcatactcctactccaatgtcctcatagaaattcaggacacgatgcggtcgagcccggcggagaacgaggtgatgaagaaggcgtcgttcatcggagtctcgacgacgacgacgttctacatgctgtgcggcgtgctcggctacgcggcgttcggcaaccgcgcgccggggaacttcctcaccggcttcggcttctacgagcccttctggctcgtcgacgtcggcaacgtctgcatcgtcgtccacctcgtcggcgcctaccaggtcttctgccagcccatctaccagttcgccgaggcctgggcgcgctcgcggtggccggacagcgccttcgtcaacggcgagcgcgtgctccggctgccgctcggcgccggcgacttccccgtcagcgcgctccgcctcgtctggcgcacggcctacgtcgtgctcaccgccgtcgccgccatggcgttccccttcttcaacgacttcctcggcctcatcggcgccgtctccttctggccgctcaccgtctacttccccgtccagatgtacatgtctcaggccaaggtccggcgattctcgccgacgtggacgtggatgaacgtgctcagcctcgcctgcctcgtcgtctccctcctcgccgccgccggctccatccagggcctcatcaaatccgtcgcacattacaagccattcagcgtctcctcatgatcaaattaataattatttgttaatactgatgatgatgatgatatgatccatcgatcgatgaagaacaaatatatatatatagcgagatcgatcgatcgatcaagatcgtgaatgatatatataatacatagttaatcaatcagatgttaattaagtcgtgttcgtgcgtgtctttcagagttcagatcgacaggttgatttgagatgagtgctcaagtgtttcgtcagatgtaattaactatgtaagtggtaaatttagcctgatgatgatgatgatcagtctgaatggatgtcatgtaagtggtaaatttgacatgaatgtaacaaagtagtagcttagttgc

SEQ ID NO: 28421 - DNA, 896 bp, Oryza sativa
  ref <308>: DATABASE ACCESSION NUMBER: AK103863
  ref <309>: DATABASE ENTRY DATE: 2002-08-28
gtcaaagaggcagacgcgcagctgaggaggagaagcgcacgcagccaccgcgagatctcctcacctccatctccatctccatctccatctccggcggcgagatccccaccgaatcggatcggatcggatcatgggggggaaggagctgagcgaggagcaggtggcgtcgatgcgggaggcgttctccctcttcgacaccgacggcgacggccggatcgcgccgtcggagctcggcgtcctgatgcgctccctcggcgggaaccccacccaggcgcagctccgcgacatcgccgcgcaggagaagctcaccgcgcccttcgacttcccgcgcttcctcgacctcatgcgcgcccacctccgccccgagcccttcgaccgcccgctccgcgacgccttccgcgtcctcgacaaggacgcctccggcaccgtctccgtcgccgatctccgccacgtcctcacctccatcggcgagaagctcgagccccacgagttcgacgagtggatccgcgaggtcgacgtcgcccccgacggcaccatccgctacgacgacttcatccgccgcatcgtcgccaaataatttgtcatttctggttttctcccctctctccctctctctccccctctcaggatccacagtttgacacataataactctctcttgcttgtcgtttccttacctatcatgtgatctctcctgatttgtgctttgcttgctctctattttgtgttttcattccggtgtgatttggacaacctagggtttggataatggtgtgattaatcgattgatggatggatctgattaatgatgctttgcgtttcgctctgttcaatactgcaatgtaaattgtggatctatctatcattcaaaatatgtggatctggcttattatcgg

SEQ ID NO: 28422 - DNA, 2875 bp, Oryza sativa
  ref <308>: DATABASE ACCESSION NUMBER: AK103864
  ref <309>: DATABASE ENTRY DATE: 2002-08-28
ggtcttccaccttgagtcgcgtaaaagaaaaagaaaaatctcccgtctcgttctcgtcgtctcctccgctccgctcgttgcgccgccgccaagacgagcaggggagggccgggcggcgatctccatccggcgagcagcggaggggaggggatcctgatggatgccgcagctcttcagtatgagaaccagaagctggtgcagcaattggaggcacagaagtccaaaatgcgtgcattggaaggcaagttcaaggagctgagggatgagcaatgttcttacgacaatacattgatttgtttgaataaaatgtggaatcagctgattgatgatttagtgctgcttggggttcgagctggtggggatttaaacggtttgcaagcgcttgatcatgaagagatgtcagaagaatctcttgagtcatgtccttctgaggagatatttctcttcagactcttgaattccaggaatttcagaaataatgatgacagtagcctgtcaaaattagttgaggaagctcttgccttgcgctattcaacaacagttactctgatgaagtccctgcaagaggcttttgctgtacagcaggctagaagtgaatctttatcattagctttaaatggacagaactccagtgaagacgttattgtggcccttgaaaaccataatgattacttgaaagaagtggttgacaatttacgtcaagctgtgtctatcatcaacaggaagcacgaaaagtatctggatgagattgaggctttcaaaaacaatcaatcaagagaactacatgaagtaaagtgtctttcaggtgagctagaggaaagcatggcagagcttgaggaaagccgtcgaaagttggctgttctccagttgcaaacgggtggaggctcactgatgaacacatctgctcctaacggtgtgaacggtagtgtttcaactgataaatcttcagacaagggtatgggctggcgagatctgaaagatgctgttgaggaggctaagactcttgctgcaaaccgcctatttgaactccatgagactcaagaggataatctgatactatccaagcagttggaagatattcaggatcaattaaaagatgagaactatattgttacatcaaaaccatatacgattctcagtgaccagttacaccatctgaatgctgagatagagcgatacagggggttagttgaagtgctacagaatgaaaaggaccagctcatgcaaaaggaagaagaaatgcttgcaaaggcagaatcagtggacgctgttcaacaatccattaccacttacaaggccaaaattgaggacctggaacatgaaatccagaaacttatggctgaaaagaatgatcttgagatcaaggctgaggaagccttgcaagattcagggaaaaaagacttcaaggacgagattcatgttatggctgcatcactctccaaagagatggaattgttggacaatcaaatgaatagatccaaggatgcggcttctgaagcacttgcactacgtgaggaagctgactatttaagaactttgctagctaagaagattgatgaacaaaaggagatatctgatagatacaacacacaagtcaccgagatcaaatccctcaaagcattgattgagacactggaccaggaaaagcaggagttacaatttatagtggatatgctcggtaaagaatgttctgagtcgagggcaatttcagagattgaagaatcagaaaaccgagctcgcaagcaagctgaatatttgagaaaatgtttagaagagcataatcttgaacttcgagtaaaagcagcaaatgaagcggaaactgcatgccaacaaaggctttcaattgctgaagcagaactggaagacttaagggccaaagtggatgcatcggaaagagatgttatgaaactcaaggagtcaataagaattaaagaagctgaagtagatggccatatttctgaaattgagacaattggtcaagcatatgaagacatgcaaacccaaaatcagcaccttcttcaacaggttgctgatagagatgattttaacataaagctagtatcagatagtgtaaagatgaagcaagcctatggttcccttcttgctgaaaagaatatgctacagaagcaacttcagcatgtcaacagttcactggagtcatctaaactaaaaatcaccagtggtgaagagcagatgaagacctatgtagcacaagctatgaaatcttcttcagagaataggcatcttgcaattagccttgaaaggactatgctggaggtatcagatgcagagaaggagctcaagtggcttcggtccgctactggatctgctgagaaagaatatgagataaatcagaaaaaaatagctgagctaaaaatggagctagagcgtgagagaaatgagaggataaagcttgaggaagaatacgaagaggtgaaaaacgaagtcagtgagctaacctcagaaactgaagagactactatacagaagctccaagatgaaataaaagaatgcaaggctattctcaagtgtggggtgtgcttcgaccggccgaaagaggtcgtgatcaccaaatgcttccacttattctgctcgccatgtatccagaggaaccttgagatccgccaccgcaaatgcccaggttgtggcaccccctttggacagagtgacgttcgggaggtgaagatctgaagcgtcagcaaaacagcttgaatgactgacttggtagcgagcatgtaaatatatagtagtagtgctagtttctgttttcttggaggacagatattagatcgaattgtcttggtgtgcctctgccaagactgccatgtagaaactattattattatcacctaaaaatagtgcaattgcggggatc

SEQ ID NO: 28423 - DNA, 860 bp, Oryza sativa
  ref <308>: DATABASE ACCESSION NUMBER: AK103865
  ref <309>: DATABASE ENTRY DATE: 2002-08-28
ggcttgtttttttctcaactcgatccatctctctctctctctcgatctctccattaatttctacgtaagcattcgtagctatggaggagtgcaagggcggtggcatgtcgccgtcctcctccatggatagcagcacccacccggcgctgtccacgacgtcgtcggcggcgacggcgaggcgggacctcagcaccgatctccggctagggcttagcctctcgacgtcgtcgtcgtcctccctccggcggcgctcgccgacggcgaacgctgttcgtgaaggtgtacatggagggcgtcccgatcggccggaagctcgacctgctcttgctggatgggtatgacagcctcctcatcaagctctgccacatgttcaagacgcccatcacctatgctgatgttatggagtgccatcaacaagttcctggccagaaggctgcccatgtcctcacctatgaagaccaggacggggactggatgatggttggggacgtcccatgggaactcttcctgagcagcgtaaagaagctcaggattgcaaggatggataaatgctaaaacagttgcatttgaatttctctttgtttcttcttttttttttcccattggagggagggcccttattatatgtaggttagttgaaaaagatttttgctgaagctgagattatacttactagcagtgtacattatagtaaagaagtgtagcattatcagctacctaccgtatagcagaactgattattatttttcctctacttctttaactggtttgtaaatatcatgtattcgttaaagagagtagagaagttgataacacaaaggttccattttacctcagtggaatcaaattttgtggccttt

SEQ ID NO: 28424 - DNA, 3872 bp, Oryza sativa
  ref <308>: DATABASE ACCESSION NUMBER: AK103866
  ref <309>: DATABASE ENTRY DATE: 2002-08-28
gactatcttacagaaagctgggctacgagagaccaccaccaccgccacggcccgcgctgcgtcagccgacgaacccaccgtggccacgcccccggaggcatcgagggcagcacagttgcgccgcgccgacggtgccggacgagcagccgaccggccgtcgaccagtggctcccaccgagtccaggttcctcccgcggcgccacccaaaggcgcagccgcgcgaggtaccccgggcggcggctgcggcaagtgaggtgagcagtatgaaagcattgaaaaaaaaactcctttgctgggccggtggaaaaaagaacaagtacattgagatgttcttgactccagaggatgcatttgagctggctacaaaagagctacagcatactgctgtgtccaggtaaccttttattcctctgtccttttctagttctgtcatattttatatcttcagttatcattagtgactcagtaaatctgcatccacatattttattttgtattctgtatatgtctcaacatgtccatccggagtatcttttcatatttatgaactgacatttctaataatgtatgaattactattttgtcctgtagtcaaattcacctctaggctctaagctaactacagttggtgatgaagtcactagctcctgcaccaatttgtatagtgacctcggtgtaagtgtgtagcatgatatccaccgtgagacctttcaagagacatgactcttcttttgaccatcttcctattccaagtgcttaacgtctttgacttaaccagagtgatcttgtacctgtgagcatgtcacgacaggaggagatttggaggctcaagaagagtccaaaactctgcttacatccatctcatagtttgtcatgcatgaatgcagtattatcacacggttgtctctagaggtcagctatttttctcattgcaaaatgctattttcactgatcgctgtcatcctccaccaacctactaaggtcgttagtggggaagcttcacgctcgacatctttcaaattgagggagaatgagctgtctgtccttgcctccaagcttcttttcttatattattctagtggttgacacatttcactgagagtcaacttggagtaaacaaagctactccttcaattgcctgtcattaagttcaccgtacacagagcctcctcctggtgtgcttttcctcttctattagaatatgtgatgcgcgtgcttaatgctgcctatccttgttttgtctctctccctttcctaaaggtggagggtccgtgtgtagtcattcctttagatattatatataaccacttgaaaaactttatgtgtaggcgtgatgcccctgcaatgcttgtttatggtcttcttaaatcttaagcatgttgtaaatacatggataggatacgactggttattcttcctgtctcttgtcaaagctcaagttgaaaactttgccaccgcacttgggttgacatctcaacctaattgctatttgacactgctagctttgagcacgcgaaaggaaatttctccagtccatgcttgtgtagttagctacccagagtgcagacttggtgtactgcacgaatggagacagggtggcggcattggaaaccatattctttgttcgatgatatccaaagttagtcatccccttataaacaagaacctgacgaaaagtgcctgctgttcctttcacaacattcctttagctcgatgagacaaccaatttcagtcagctgatcccagatgacaattaggttactgagtattattagggcacgcttcctcctcctcttaatttaactgctaagattaccagtttttttgggtcagatcaggcaagtgatcagggatgagttttctgagaattaaatagtggaagtggagttcacataattgtcagcaggaaccaccgctgtggcaagtctaaagcacaggaaataaattatttgtatttatttagtgttactgattggaggccatttgctcaaccatttgagtgtggaccagatgatcatatgctgacaagtgttatgagcaatcccagtttccactgaagtcctgttattaaatttcaagctcgtctttattttgttctataatctgtgcgggtccccaggatattattgatttgaagaaaggctatttgaggcatgctgcttgtgatgggacacattttaagcttatactccactatgccccttttacacgtgccaaggtgtgatccattgtgagttcttgtcaatagctaatttgagtatttattcatatcatgggctcattgctaatcttagttttgaatatgagtgctatttttcatgtattcctttttaaatttgcactagcctagtgcttataaccttctcatatccatgattatgtattaaaaaaactgtgccagcagcccagcattttgtacagcagtaattctcagtccaagctaacaatttgctgacttgaatatagtgtgaaatcactctgttattggggcgctcctgtagctgtaagtgccactttcttctcttgctggaacatgtaaactactgctttgcgaaggaaagaaaatcacagagtacatattgagttacatcagtatgctatatatttgctcatatgttactttctgtatttgagatatctgttatactacatatgatgcccgttttgttaccctgataaaaaaaaaactgtctgctttagtcaccggtctcattctgtagctttccctttcagttttgtcttggaaatttcatctccctaggtttcttagcatattaccctatagttctacatctatttgtcatgctaatgaagatactaaagtattttaatcaacagtttatttgcatttttaccggagtacctcactgggaagagatgccttatcctcaattaagatttcaggctgatactttcctggcattcacacatcatcttatgtgacgcaaagcgtcaggaagcaatgaattgcattattgaagcctttgtccccaagcccactaccaccaaagccatcaccgtcactcaccaaccctagggcgagctctttgttcaatggccctgcaaatgcagtctctgctccattgttggccgagcagcaagagaacaaagagtaaacaagacaaggtggtgcagtaagcagggaactaaacagcagagggattcatgacactgagacacagtcaactgacccactcaagtggaagaagaccatggagcaaagtagctcttcttactgtttctgagaatattcctccctcgtcggccatagctgtgtgatttcccatggcttcattttgtaatgataagttacctgacatggtcatggtaaagtaaagttgatgaaaaaagtcagcttagatcttcaccatctggaagacatactatcagcagactaagcagcacgtccatatcatttccagaatcatatcaagcaggctgctgagcgtgcgacgggttttgcagaagcacaaggctggtacacagagatgctcgagtttccggtgtttgcgtgtttaccactacgaaagaacactattaggacagagtgatgctcttgatgcgcaagaagccgggtgctgcttactccgtgcgagttgtgacaggcacctttcatggaccaatcgcccatcaccgaataacgtggcagcagtctcagtgagaaggttggcaggttatcaccgtgtctcgtactgacaattcaagtttctgaattaacctatgcccatttcttctgcatctataaaaccttgtaattaagaagcttttgtcctgcctctaatttttacctttagaagtaaaactatatatatgcacatcatgttatcttaagtgatgtactgtctccttcccaaaatatagctatttttagc

SEQ ID NO: 28425 - DNA, 1718 bp, Oryza sativa
  ref <308>: DATABASE ACCESSION NUMBER: AK103867
  ref <309>: DATABASE ENTRY DATE: 2002-08-28
gggcgccgcctccattcttctcatcctctccactgcggcgcggcggcgcggcctcttagcgccatttcctcctccacttggaagcagcagaagcggaagcccgtcgcccgcctggctcgagctcaaggccatggagtattatgatcagtcacttgctctgacgattcggagggaggatgaatagcggatcacaaaacgagatgattgattcattttcagagcggcaaggagccaaggatgcagcagcactagggtcctagtccaaattgtcagctgggggatcaatggcaatggcggagacggtgaggctgcccgaacagcagcgtcgcaggcctctcaccattgccagcctccctgaagaaattatgtcggagattctgctcctgctgccgccaaaatccatcctccagtgccgtgccgtctgcaaggcctggcgggacgtcacctccgaccgcgccttcctcctcacccaccaccgccgccagcctccacagcgcctcctcaccttcatccgcgacgtgggcagtcaccacgatgacctggatatcctggactactgtgttgaagccgttgacttccgcacacaccagttccagtctctggcccggttcactggccaagattacgactgctcactcgaagacagcccattcaccgtccacgcttcttgcgatggtctcctgctcatgtcctacaacaactatttgcatctctgcaaccccactacacgtcaatggctttgggtctcccccccggcgcttcaacatgacaaggtcgtggggctctatgcacatggacatccttccgaataccgagtattgtactatcgagaatttggtttgggacgtacattctacatcaccactgttggctccaggaaggagaggcgcatttggccacattcatcatcagaatccctgagaaagtggttgacaaaagggacagaggatactgaattcaacaagcctttcctgtttcatggaaacctgcactggttgccacagtcaggtcgacaaaacaagatagtggtgttcgatacactggatgaggcgtttcggtggttgcatgtacctttcaagatgcacaatgtgtcctcattactcgagattgagggtagccttgccatgtcaaacagccatattggatcatcaaaggtggatctttggcttctgcaagattataagcatatggtatgggtccacaagtatcgaattgaattgccagtgatagagattcgccgtttagtagaagatgatgtttggtttcttcatattgtttcccaagagggtgatgtcttggttgatggatcttattggcagtttcactacgacatgaagggtaatttgctggagaaatttcaatgtagtggccgcatgctgaacattactccacatattctccaagaaagtctcgttccacacgaagtgttccaaattctagataatgaaagtagacatgcaccacatttcttcagggggttgtagagcatactttctgtactgtgaggctatttcacacttttgggcgtctattcattggatactgcaattttagcgatggaacttaattttgtagtgaatggtcaatgatctgttgttgcaaagggcagcattcactctgatcagtatttctgtacctccacatgttcatctttaacatcgagggtatcatttcagtactgtacgtgggaaatttaaatgcctgagactgttttttcc

SEQ ID NO: 28426 - DNA, 1862 bp, Oryza sativa
  ref <308>: DATABASE ACCESSION NUMBER: AK103868
  ref <309>: DATABASE ENTRY DATE: 2002-08-28
ggcatcctcccgccgccgcccatttcgaaccctccgatgggcaccgacatcgccggcgacggcgaacccagctcgcccccgcccctgcccgtcccggacgggctggacgacaacggcttccccctcccctcctctcccactgccgccaccgccgccaccagcttcgccgacgacttctaccgtagcggcaccgactggtcctccctgctcgccgccccctcgccgccgccgtcgtccgaggagtccgggaagaacaagtccggcgactccctcgtccagaggagcctcttccaggcgtggggaatcgacaggcggccgcggcgggaggaggaggtcgcgggggtcgcgggcggggctggggctggggcttcgtccgctccttctggctcatggcccgggaggaagcggcggcgaggaggcgaggtggaggccgcggcggacaggaagcctctcgcctgccccttctacaagaagattcccggaactccattcacggtggatgcatttcggtatggagcggttgagggttgcaatgcctatttcctcagccattttcaccatgatcattatggtggattaaccaagaaatggtgccatggtcctatctactgtactgccctaactgctcgcttggttaagatgtgcttgtcagtaaatcccgagtatatttgtccgttggagcttgataaggagtatgttatagagggagtttcagtgaccttgttagaggccaaccattgtcctggtgcagcactaattcacttccgtcttggtgatgggaagaaatatctccatactggggattttagagcatcaaaatcaatgcagttgtatccacttctccaaagaggccagataaatttgctttacctggacacaacttattgtaatccaaaatacaagttccctcccaaggaagatgttattgattttgctgtgaggacagctaaaagatatctacagaaggaaccaaaaacactcattgttgttggagcatatagcattgggaaagaaaatgtatatctagcgatttcgaaagctttacaggttcctatctacactgatgcatcaagaaggcgcattcttcacgcatttggctggtcggatttatccaaaatgatatgttcagacagtcaaagttcatcacttcatgttctgcccctttcttctttacgacatgagaacttgcagaagtatttggagactcttaaacaaagatttctagctgtgctggcttttcgaccaacaggttggactttctctgaggaaactggaaatcagcttgacctaattaaacctagctccaggggcaaaattactatctatggtgttccttatagcgagcactcaagtttcagtgagcttagagaatttgtgatgtttctgagaccccaaaaggtaattcccactgttaatgttgggaacgcggcaagtcgagacaatgcaagcacattttcgggaatggctgaagggcttgtgagagatgaagcctaatcactttatccatgtcaaccttagctgttggatattcagtgtgacacgacgattgtgcctccagtcccgaagtctgaggagcagccaagatcttcagtgaaggtgaagatcggtatactctgttctgatgctgtaagttaggaatttccaaagttgtactggttgttaaaactctgttgtatattcagtgaaatagtaacattacagactccagttattgttcaaccaaatacattgctctgatactatttcaacaggcgtcattgcaaagcatgtagccacactgggtacagcactaaggtttcttagatgtagttgagatttaacagtgccttcaaaatttcatgcacatgtgtgcttatggaccc

SEQ ID NO: 28427 - DNA, 3832 bp, Oryza sativa
  ref <308>: DATABASE ACCESSION NUMBER: AK103869
  ref <309>: DATABASE ENTRY DATE: 2002-08-28
gggtccgtccaccgtattccccctccggctagtccgaaaaaccaatccgaatacttcctctcggacgccgatgcggcggacccgtaggaggcggcggaggtggaggccctctccggcgataggaatgcaggcgatgccctggagcccggcttgagcgagcaggcggcaaagagccgacgggtttcgtggttcttggcgacgggcaaaccaccggaggaagatcagatggcatcgaggttggaaagcgaaaggatgaatcctatcattcaaaagagtactgctgaagtgatgcagcgccgaattattggctgcttttcagtgtctgtatcgccttcccacttgacaatttatcttggaaggtttcccatgaatgttaagagtgtagttcttggatgcatcttcatgaaaagaacattgaccaaagactggtgcgagacaaccagtgacttgttgtctagaaaaataaaaccaatgactgacaaagcgacagcttcctaatttgtcagagtttcagacataaatatacacatatgcaacgatatgaaaaatggagcagcagcaatgccactgccgacgagctcgctctcctctccttcaagtcgatgttcgcatccgatggctcgttggcatcatggaacaagtcaatccactactgcagctggccaggagtcgtttgcagccgtcggcaccctgagagggttatctcactgagattgggatcttctagactctctgggctcctctcaccattcttgggcaacctgtcctttctcaagattcttgatcttcatgaaaccgcctagttgggtcgatacctccagagcttggtcgcctcagcaggctgcggctgcttaacctgagcacaaattctctccaaggtaacattcctgttgctctggtaggatgtaccaatctctccttgctccacctaagcgataaccaatttcaaggcgagttccctaccgagataggagccagtctgaaaaatcttgtgcttttgaacgtcgagaaaaatggtttctctggtgagatccctcggtcattggccgatttgcctttgctcgaagagctgaatcttagagtcaatagattctctggtgagataccacccgctttgggcaatctcaccaacctctggattcttggtctcgattacaacaggctatctggtgcatcccttcatccttaggcaagatgtctggtttatctaggctcacattaagctctaacaatttaactggggctgatacccagttctatttggaacaacatgtcagcactaatggcgttcactgtccagcaaaattcgttaagtggaaccattcctccaaatgcattcagtaattttcccagtctccagcttataggaatggaccacaacaagtttcatggtagtatccctacgtcgattgccaatgcttcccatctgtggttggttcagcttggtgctaacttcttaagcggtatcgttcctccagagattggaggcttaagaaatctcaaaattctacagctttcagaaacatttcttgaagctagaagccccaacgattggaaattcataaccgcattaacaaattgttcccagtttagcgtgttgtacttggctagttgcagctttggaggagttcttcctgattcactttccaatttgtcctctctgacaaatcttttccttgacacaaacaaaatttcgggaagcatacctgaagatattgataacctcatcaatctgcaagcatttaatctcgataacaacaatttcacagggcatcttccctcctccattggtaggcttcaaaatctgcatcttctctccatagggaacaacaaaattggtgggccaattccattgacattaggaaacctaacagaactatatattttacaactcagatcaaatgcttttagcggtagcataccaagcatttttagaaaccttacaaacttattaggactaagcctagacagcaataactttactggtcaaatcccaacagaggtagtcagcattgtcagtctctctgaaggtttgaacctgtcgaataacaacttggagggatcaataccacaacaaatcgggaatctgaaaaatcttgtaaacttagatgccagatcaaataaattatcaggtgaaatccctactacccttggtgaatgccaacttctccagaatatctatctccaaaataacatgttaactggtagtcttccatcactcctgagtcaattgaaaggcctacaaactcttgatctttcgagtaacaatttgtctggtcaaatacccacattcctatcaaaccttaccatgctcggttatctcaacctttcattcaatgattttgttggagaagtacctacacttggtgtctttttgaatgcttctgcaatttcaattcaagggaatggcaaactttgtggtggcgtgcctgatctacatttgcctagatgtacatcacaagcaccgcacagaaggcagaaatttctggtaattcctattgttgtgtctcttgtggcaacattactcctgcttttattattctacaagcttctgggctcggtacaagaaaataaaatcaaagataccatcaaccacatgcatggaaggccatcctttgatctcttactctcagcctggcaagggcaacagacagtttctcagcgacccaatttgttgggatcaggatcatttggttctgtgtataaaggagaattagataaacaatctggtcaaagtaaagatattattgctgtcaaagtgctaaaactccaaactcctggagcgctcaagagtttcacagctgaatgtgaagcactgcgaaatctacgacaccggaatcttgtcaagataattacagcttgctcaagcattgataacagcggcaatgacttcaaagcaattgtgtttgacttcatgcctagtggtaatttagaaggctggttgcatcctgccacaaacaacccaaagtacttaaatcttcttcagagagttggcatactacttgatgtggctaatgcgctggattatctacattgccatggaccaacacctgttgtacattgtgatctcaaaccgagcaatgtgcttttagatgctgagatggtagcacatgttggagactttggacttgctaagattctttttgaaggcaactcattgctccaacagtctacaagctcgatgggacttagagggacaatcggttatgctcccccagagtatggtgctggaaatacggtatcgactcaaggagatatttacagctatggtattcttgtgctagaaacggtaactgggaagaggcccacagataagaaattcatacaaggattgagcctccgtgagtatgttgagctgggtctacatggtaaaatgatggatgttgtcgacactcagctatctttgcaccttgagaatgaacttcgtaccacggatgaatacaaagtcatgattgattgcctggtttcattgcttaggcttggattgtattgctctcaggaaataccgtcgaatagaatgtcaactggagatattattaaggaattgaatgccataaaacaaaccctcttgtagggaatagataacatccttgaaccccttgtcagattttggagctcatccctggagtgttcatttcctacccttcccttgttggattatgcatggcactgaagtatgtctcacttgtaatttggacatctgagagcaaaaactgattgttatgctgttgtaattatgtctataaacgtatccaagattatgttttttcacttgtagtatgcaactttgtactttgtgatcgttataacgagtatatcatgtgtctctaac

SEQ ID NO: 28428 - DNA, 3125 bp, Oryza sativa
  ref <308>: DATABASE ACCESSION NUMBER: AK103870
  ref <309>: DATABASE ENTRY DATE: 2002-08-28
gacgcgcccacgcccaccaccaccaccacctccatgactgcatcctcctccaaaaacccaaggcacaaatcctaaccaccggacgcgagccgacgcgacgcgacgcgagtccccatccacatcgctcgcggcccttccaccgcacgccagatcggtggcggcggcggctgctcggggttggatccaatgcgagcggtgattgatagctgttgatgcgaaggacgacgatctgaggtggtggtggagttggggggatggctgcggcgacggcgccggtggcgggtgcggcggagcggcagcagcaacagcagcagcagcagcgcggcggggcggcgtcggcgagcggcaacgcggtatttaagagtggccctctcttcatatcatccaaaggaattggatggaaatcatggaaaaagcgttggttcatcctcactcgaacatcacttgttttcttcaagagcgaccctaataccttgccccagagaggtggtgaagtgaatgttactttggggggaattgacttgaacaattctgggagtgtagtggtcagggaagacaagaaattgttaactgtcctttttccagatggtcgtgacggccgtgcttttaccttgaaggcagagacatcggaagatttgtttgagtggaaaacagcattggaagaagctcttgcacaggccccaaatgcagctcttgtgatgggacataatgggatatttcgtaatgacacaacagatccatatgaaggagctgttccaaactggcgagagaagaggcctatcaaatcattggttgttggtaggccgattcttcttgcactggaagatattgatggcagcccttctttcctagaaaaagctttgcgttttcttgagagacatggaataaaggtggagggaattttgcgccaggctgcagatgtggaggaggttgacaaaagaatgcaagaatatgagcaaggaaggacggagtttgcacaggatgaggatgctcatgttattggtgactgtgtaaagcatgttctacgtgaactaccatcttctccagtacctgcttcctgctgcacagccttattggaagcttttcgtctggagagcaaggaatctcggataaattctatgcgtgcggcaatatctgagacatttcctgagcctaataggcggctgctacagagaattttgagaatgatgcacactgttgcttctcatactgctgagaatcgaatgactgcatcagcagttgctgcctgtatggctcctctcttgttgcgtccacttctggctggtgagtgtgagatggaagatgacttggacatgaatggtgacagttctgcccagctcattgctgcggcaaatgctgccaacagtgctcaaggcattgtcactactctcttggaggaatatgagggtattttttatgatgagcacctgaggtgttccctatcacctgattctcaaattgaagatagcggaagtgaagagtcaacagatgatgaaactgtggatatcaaggacagtggatttcatgatgcagagaatgatgcagatcaagaattagatgactctgagcgcatattgagtggaaaattaagtgaaaccagtgcatgcactgctggtgacctctatgactacaaggtagctgatgatgattcagacggtgaaccttctacagaagataaggctttggaaacaaaggtggatgtaaatgatgcccagcatagtcatttagctgaaaatgtttcagtgaatgtccagagatcaccgaatgaaaaagatccaccaaatatggtgtccagtcaggattccccgttgtcgatgggagatattctttcttctttggatgctggaatttccttacctggtcctggacctgaatattctgtagacaggcagtccatcaaatccaatggaactcagatgcatgtgaagcgctccaacttttggggacggaacaatggaagaaaaagtcaacagtcagaattggctgattcatcgggtgaagaagagcttgctatccaaagactggagatcacaaagaatgacctccagatcagaatcgcgaaagaggctagaggaaatgcaatcttacaagcaagtttggaaagaagaaaacaagcactacatgagcgccgtttggctctggagcaggatgtttcaaggttgcaagagcagctacaagctgaaagagatcttagagctgcattggaggttggattaagcatgtcttctgcacatatttctagttcacgttctatggattcaaagacgaaggcagagcttgaggagattgctcttgcggaggctgatgttgcaaggttaaagcagaaggttgcggagctccatctccaactcaaccagcagcgtcaacatcagtatggctctttggcagatgcaaatgatcgttatcaacatcttccaaaccatctcccacagaactttgttcaatcaggttttgatatgaaccttgctttctgtaatcaggagaagaagcaaaggaatgagggccccgcaggtgcatcgcattggagaagcatcaagcagcacgtgctacctcatggttcttcaaggcccttctcccggaagcactccatggacgcctcgtcgagtgattcgagggaggcatcaacgagcatgccagcggatggcaattccatgtccgtgaacatcccgaaggcaaccgagggcgtcgagtacgggaggcaagctcccgtggcatcgtccactctggtcgaactgacgaccaggctagatttcttcaaagaacggcggtcacaattaatggagcaactccacagcctggatttaggaaatggatcagctaatcatggtttcccatacaagtcttcgtcaccttggaacagtccaaggtaggaggagacttccttttttttgcgacattctgtttgtatattcttggtaaagaatcctctcgttttctttcgtagaagctgctagtgagaatgaatgtatatccctttcctgttcgtcttccatttgtttttgttttgttgttgcatgcggcagcctcttttgggtgtgattttgtaatatgctttttgtaatctattgtatgtaacacgagttggggggatcataatcattgccacttgtttctggtgtctttcc

SEQ ID NO: 28429 - DNA, 1849 bp, Oryza sativa
  ref <308>: DATABASE ACCESSION NUMBER: AK103871
  ref <309>: DATABASE ENTRY DATE: 2002-08-28
gttaagagatgttcctccagactcagcaaaggactatctgcttagtatacgtggattggggctcaaaagtgttgagtgtgtccgccttttgacattacatcatcttgcattcccagttgatactaatgttggtcgtatatgtgtacgattgggatgggtgccaattcaacccctccctgaatctcttcagttacaccttctggagctataccctgtcttggagactatacaaaagtacctctggcctcgtctgtgtaaacttgatcaacaaacactgtatgagttacattatcagatgattacttttggaaaggtgttctgtaccaaaagcaagccgaattgcaatgcatgtccaatgaggagtgaatgcaggcattttgcaagtgcctttgcaagtgcaagacttgcacttccttctcctcaggacaaaaggttggtgaatctgagcaatcaatttgctttccataatggcacaatgcccacaccaaattcaactcctctgcctcagctcgaggggagtatccatgcaagggatgttcatgctaacaacacaaatccaataattgaggagccagcaagtccaagagaggaagaatgccgagaacttttagagaatgatattgaagattttgatgaagatactgatgaaatcccaataataaaacttaacatggaagctttttctcaaaacttggaaaattgcataaaaggaagcaataaggatttccaatctgatgatattacaaaagcattggttgctatcagcaatgaagcagcttcaattcctgtacctaaactaaagaatgtgcatagacttcggacagaacactatgtttacgaacttccagattcacatcccctcatgcaacagctagcactcgaccaacgggagcctgatgatccaagtccttacctgttggccatatggacaccagatgaactaaaggacacaagggaggcaccaaaaccgtgctgcaatcctcaaactgaaggtggcttatgcagcaatgagatgtgccacaactgtgtatctgaacgagaaaaccaatatagatacgtcagaggcacggttctggttccttgccgaacagccatgagaggtagttttccacttaatggcacttactttcaagttaatgaggtttttgctgatcacagttctagccacaatcccataaatatcccaagggagcagttatggaacttgcataggcgtatggtttactttgggacttcagtgccaaccatattcaaaggtctaacaactgaagaaatacagcactgcttctggagaggatttgtctgtgtgagaggattcaacatggaaactagggcaccaaggcctctatgcccccatttccaccttgcagcaagcaaactgcgaagatcctctaaaaaagcagcaactgagcaaacacactgatttcaacagggacatatcaattctataaaataatgttgatggtgattacatcagttctcgatctgtgcatgggtcatattagttcctgcaggacgatagccattcttctaggaaataaacagtggagttggaaacagttaactttaagatgtgggagccaattgggcacgagaaagcaccaatatttcatatgcacctctggggcaggtcggatgcggatcatcatcatcagttaacatgggcgtagaatatcattccgttttttttttttctgtggctttggtgtatcttattcacttttcatttgttttatccattcaactagcttgccaagagaccttaccatctgttctcatgacatgttagtttttcagaacttatagcaggtagtaccttcatattgatgatatgactttgattttcatt

SEQ ID NO: 28430 - DNA, 3350 bp, Oryza sativa
  ref <308>: DATABASE ACCESSION NUMBER: AK103872
  ref <309>: DATABASE ENTRY DATE: 2002-08-28
gactcgcgtggctgcccacccgccgccgtcgccgacaacggcggcgcgaagccgcatcctctccgccgacgagcacgctggcccggagtcgtcgccgcttcaaccgccggccgtcctgtcctcggagatacggcagcgcgtggcggcccccggtggctgtgctacggcggccaaaatcgaccgccggatttcctgtgctccaccgcacggcggcctgacggtggctgcttctcctccgcgcacaaatccactcccgccccccaccatgcacggcggcagcgcttgacggtgagttcttcacatgttttccttgctgacctcgattcggaatatggatccgtgtgagccagtatgattcagagtggattcccgggaacaagtctgatccggagtcggatttctcttttgaggacaacaaattccgtttcagttttccttgggtaacttcaggtatataccttgcgtctcttgcttcatcacatgttccaactctgcaagtattcaagcaggcgacgaatttcaccttgcaagaggggctcgatctgctccaattatccaatggcgccctgtagtactatagccaggtttatgaacttaggggatctagcgagatgtcccaagaatttgtgcaacctactcttcagagtagtacaatccaagctcctagcgccccttcacagtagtttactgaaggaagtgcaaaaagatgatggtgatcagccatcaatggcagagagtgttgtggcaaatttaccagagctgtctcaggacatcttaatggagatatttgccctcctggagatccctgacctcgtgcgtgcaggatcggtctgtaactcctggctctcggcctacaacgaattgcgcagcctaggtatctataaactgtcccagacgccgtgcctgctatacacctctgaatctgctggcgatagcgtcgtgtgtctctatagtcttgtcgagaagagggagtacaagattactctcccggagccacccatacgcagtaggtttctgattgggtcctcacttggttggttgattacagctgatgacttatccgagatgcacctggtcaatccgatcacaggggaacagatagctctcccttctgttaccacaatggagcatgtgaatcccatcttcaatgagtctggtgctctccacaagtatgagttctcactgcacactgcaacgagggttagttatgcagagccatcaatttttgcccttggcgagctgcgggattacatatatagtaaggcttttgtgtttactgatactttcacagggggatgcattgtggttctgatccacgagccagctggtcaaatttcatttgcaagggttggggatgataagtggacatggcatccatcacactctcactattctgactgcatctacattgatggtctactgtatgcactgactgcacagggagaaatccatacacttgatctcagtggccccacgatcacgatgaagatgataattggaagtttgtcttacagtaggtacattgtgcaagctccatggggtggtcttctgctagtttggaggtcagttgaggacattgaggaggattacgaggctgacttgcctgctgaccatgcaacatttgtgcggtatactagggaaattaaaatatatagtgttgatactatggggaaaaaacatgtagagatcaataacctggatggtcatgtgttgtttcttggtcataaccaatcactttgtctcagcacggaacaatatccacatctcaaggaaaattatacctattttactgatgatgacgaagcttggttatttggattcaagaataagcgtcgtgatattggattatttgatttgaaacataacagcagagaggaactcgtgtctcctcagctttggtccaactttcccgctcctgtttggattacacctagtttcacaaagttgaacttcgcctagaagaagcacttttaagttttcttgtttatggatataatagttgtgtatatttcttcttgttctgtacaatttatatgtaaaattatgattggagaactgaaaggtgaatgagaaggttaggttgctccatatttgtttatttgtaccgacctttcttatgtttatttaaatttctaccgtcttaagggcaaacagcaggtcttgtgtgatagccactttctagggaattagtggaatatacaaggctaatgtgaccaatgttattagaaaatggcaaagctgtaagtgcttcttagagtctaaaataacttaactctgagactctgactgcaatcggcaggatgcctgggctaatttggagaagccttgtggaagcatgttttttagtatcttgaaggacaccatgtacttcatattttacaactacagggatagaagattgagagggtctgtctaggaaggattatgagaaggaattggagcttgcggacagtgagaaaacaaaaaagcttgaacagaagttgtttcgtggtctttaagattcactagtcctcaaggagaaaggagttaaggatggaccatcttagcttgtttcatcaagcatgattttgctcttgtttcatcgtggcagagcgcatgtgctcttatcaaatatggcaactagaattatgttaaggtcttaaggaggtgaggagagtaatgtaagtccaggggacgttgaaggagaaaggatgcagttggatggagctgaatggcagtgttcaccattttgcagctggagctggaaaacattcaggaaatgatagcatccttctgaagcttgatgagataattgcaaaaataaaggtgtttgactatgctcctaaggttaccaatgcttcggctgatttgttttgtgtaaggaaaatatcagagaagctgtctggcgtctgctgttcattgggaagcttgcccctttcatttagactggtcagttgagaaagttttgcttcaactgcaaagactagaagggtgtttgagggctgagattcttccgtgaagtctatggaatttgtacaaaatacaggttaattgccttgccaattgaaacccaccatgctgaaaaatgatcaacacagtcgattcatgacgagtgctacttgcgtgcatttgatgcgatggtcgtccaaaagaaaaaagatcttgtgtgccagggcagaacagaacaagctgggcgggtgtgccctatcatctccaactccaaaattctgaacaagcagaacaagcagggcgtggcgggggtactcaaactcaaataaattctgatggtgtgtaatatacacattgtgtatattctatattctgttctgtgacttccattcagccatgttgctacaatcttggttgttgcc

SEQ ID NO: 28431 - DNA, 1201 bp, Oryza sativa
  ref <308>: DATABASE ACCESSION NUMBER: AK103873
  ref <309>: DATABASE ENTRY DATE: 2002-08-28
gaatctctaatccgccaaaaaacccaccacagaaaaaaaaaaaaggttctcgactctcctctcgtctcgagagcagcaacagcagcagaagaagagaagagcaagaggaggaggaggagatgttccccggcctgatccaccaccaccgcctcctcgacgccgatgtcggcggcggcggcggggggagcagcgccggcctggtactgacggccgaccccaagccccgcctgcggtggacggccgacctccacgaccgcttcgtcgacgccgtcgcccagctcggcgggcccgacaaagcaacacccaaaactatcatgaggacaatgggtgtgaagggtctcaccctttttcacttgaaaagccaccttcagaaatacagattaggaaagcaatctggcaaagagatggcagagcaatcaaaagacgcttcttatattttgggagctcaaagtggaacaaatctatctcctacagttccaactccagatttgaaagagagtcaagaactaaaagaagcactcagagcacagatggaagtgcaacgaaaattgcatgaacaagtggaggtccagaggcatgtacagatccgaatggaagcgtaccagaactacatcgacacgctactggagaaggcatgcaacatagtatctgagcaactgaatggcttcagcatatctgaccatgatctaacctctgctggtgtcatgttgagctcttcagacaccttgagcccctccatcttccaccagctctctgtcagctcgatcagcctgcacagtcccggaggcaaatcctccccttttgcagctgatgctgacctgttctttcagaaggcgcctgaaaaacgcaagtcatattgagatacagataggtgaagatccatgacctgcttccttctggaaaagccagggggaattctgatgatatcttgcaggacgcccagcaattgtcctgtttctagtagctagactagcactgaacaaggctctcttaccttgatctatttcagttaatctagactgacctttgttaatatcctgtggctagtagtcgtagactgatcaagaacctttatcgatgcgtaagtatcttgtaattcagagtcctagctcccaaattaacacacttcggttatttgtatgcttttaaccctatataattgggaatactgaaagtgcaactcatattacatggatgtctc

SEQ ID NO: 28432 - DNA, 1451 bp, Oryza sativa
  ref <308>: DATABASE ACCESSION NUMBER: AK103874
  ref <309>: DATABASE ENTRY DATE: 2002-08-28
gggatctggatctgatccaactcccacccaactctccaagtacggcagcagcactggctactgcggaggaggcgttgcgacttgcgagtggcggaggactaggaagtcgcctccgcctccgctgcagacacactggcgatggcttcctccttcgccgccgtcttcttcagcagcgccttcgctgcctgcttcgctgaggtgtgcaccattcctctcgacacagccaaagtgcggcttcagctgcaaaagaaagcagccctagctacaggcggaggaggagggaccactggaggaatgctgggcacaataatgtgcatcgcaagggaggaaggggtggccgcgctttggaacggcatcatccctggccttcaccgccagtgcgtctatggcggactccgcatcgccttgtatgagcctgtgaaagccttctttatccgagacggagatactgttgctggtggtgtcagtttatttgctaagatccttgctgctcttatgacagccaaccagtttacatccaaatttcatgtgttaaggacttaaggtaggtgcactatgcacaagtaaatatactcttatattaattaccgttctatatattcataggtgtcatagcaattgttgtggcaaatccaactgatcttgtcaaagtgagattgcaagctgatggaaaggccaccactgtcaagaggcactattctggagccctcaatgcgtatgctaccataatcagacaggaaggtattggagctttgtggactggcctcggtccaaacatagcacgcaatgctataattaatgctaccgagttggccagctacgaccaactcaaacagctggacttggtgctggattttttgctgtttgcattggctctccagtggatgtggtgaaatcaagaatgatgggtgacgcaacgtacaagagtacactagactgttttgcaaagacattaaagaatgatggacttcctgctttttataaagggttcattgcaaacttttgccgcattgggtcatggaatgtgataatgtttttaacactggagcaggtaagaagatcaattctgtaagtctgctgcactgcactgcaagccaaggatctatcatgcaagtgaacagcgggagcaggactgaatcgatgcttgatttagctgtagctcctgagtccactttatagtgctgtttgctgaaggccacatatgtctaggattagatttgttttgtacaggacaatgcgttctaattaaacccatcaattcagcagaggacaacatcaacagagtcatttgtgcagagatgattggccataacatgtcattgtactgtctgagcaattttttaattttaccaaaaatgaaactcacaaaatctaatgcaaatataggttactcttggtagtaatttcatgtatccgaggtttgtaaacaatatgaaaggaagttgtgactt

SEQ ID NO: 28433 - DNA, 1064 bp, Oryza sativa
  ref <308>: DATABASE ACCESSION NUMBER: AK103875
  ref <309>: DATABASE ENTRY DATE: 2002-08-28
ttggtgatgtttgcatgtttggatggctattgttctcattgcaggcaggatggtgtgatagtcaaggcactgcggatgacgtgagatcgaagatacacatgaggcatgagggtgcaatcaagagagaaagggcacgtacttatgctcaatcccaccagaggtgttcaaaccacggtggaagacccagctcccctgctgtatctctcaagcaccatgggaatggtgctactaggagcaaccatagttggagctatctggaagggtggatggccacaaaaccttgggagagccgactgatggagcaaacccacaccgaaaactccaccaattcgcggtgttcagagagcgtcgaggaagtaagcgttggcggcccgaagctttctgatgcaagctcggtcaagatcagaaggaacaatgttacaacaagggtggcagcaaagcctccctccatgatctcggctacctcttctgatttcgtgtgcgatgagagctccccatctacatcttctgtgactccactgtcagccaacaattccctggcaacagagagaagatctgattgtggtcaggttggtggaccgagctacatgagcctgaccaaatcagccaaggcaaggctgagtggctatggctctcacaagccacctcttcaaaggcaaaggtccggtgatctcctccatcacaacaacaggatggcattctcttccatagatgttcagagcactgctggctcggaggtctcagtaacttcaaagaggttaaacagtttggctcttaaaggtcgagccacaagaagtttagacaaggagaatgagagacggcctagttccttgctttaggatacgcaccctaattggtccctcaagatattttagcggagtctttagatgttttacctgtacgtatctgctggtttcaatgtctcattgcttattttgctctctatatttatggtgtacaaatgtgaaactccacaaatgttgaactgttatgtcgatctgctgcattgtaaaatcttgggcttgcaaacttctgaagcattatgcatgatgctgcattgttgg

SEQ ID NO: 28434 - DNA, 1575 bp, Oryza sativa
  ref <308>: DATABASE ACCESSION NUMBER: AK103876
  ref <309>: DATABASE ENTRY DATE: 2002-08-28
gcacttctcccaccgccgccgccgccgccgccgaggaagaagctctgctccgccatggccggcgacgcgctgcgtgcggccgatctccccggccgaggacgcgggctcctcgcggcgcgcagcatccgggagggggaggtcatcctcaccgagcagccgctgctcctctacccggcctcgctcgcctccctcccctccttctgctccgcctgcttccgctccctctccgccgccgcatccccctgcccctcctgccgcgccgcgggattctgctccccgtcctgcgccgccgcctcccacccgcgcctcctctgcaccgcgctctccggcggcggtggcaacggaaacctcgcgtccgccgccgagccgcaccaggagccgctcctcttccttctctccgcctactccctcccggagccctcactccgcatgctcctctccctctcctccgccgcaacgccgcccccgagcgaccaggacccggggagcctgcacgccatggtggcggcgctggtgccgccgcagatgcttccgccagggttctcgccggacctcacggcggcgctcctctccaaggaccggaccaacagcttctccatcatggagccctaccgccccgaggtgccgcagcctctccggaaggcgagggcctacgccgtgtacccgcgggcgtcgctgctgaaccatgattgcctccccaatgcttgccatttcgattacgccgataggccgggtcccgggaacaccgacattgtggtgcgagctcttcacgacatcaccgaggggagggaggtgtgcctcagctacttcgcggccaattggcagtacaaggatcggcagcagaggttgctggaggactatgggttccgatgcgagtgtgagcggtgtcaggtggagagcaagtggaagcaagatgatgatagcgatggcggcgatggggatgacaccatggaagaggaggaagaggatggtaatggtggagaaggtggtgatgatgggatggagcaggaggagggggatggtggtagcgatagcgatgatgatttcccgcactcatacttctttgtaaggtatctgtgtaaccatggtgaatgctatggcatgcttgcgccacttccgcccttgccaaacggtgagccgtcccatgtgtttgagtgcaatgtctgtgggaacctgaagaacgaagatgaaattgatgctcctgatggtggtgattccagcatggcggattaggatgagctaagcataaccgatctgcttgctgcttcttttggtgggagctcataacactttggtggtaggacttgggagtacttctgtaaactggttggagttttgacaaaaacgggagtttaatacacctaaatatggagagatgtatgaacagaacaacattcattgactgaatgtggaactagcaatccttcttgtactcagcaacgtatatatgaatgtgtatccgttgtagggagtcctgcttgttctgtacaatttctaatgctccccctttatctagaatggtgatttagacttgagaaatttatgcagtcagaagctgatctcctgtgatacttg

SEQ ID NO: 28435 - DNA, 1978 bp, Oryza sativa
  ref <308>: DATABASE ACCESSION NUMBER: AK103877
  ref <309>: DATABASE ENTRY DATE: 2002-08-28
gtagctagcgttgcccctgtctccttgcgccctttgcgatctctccccatcgtcgtctcctccgctcgccccgccgcctgcgccgatctccgcccatcccgcgagcgagcagcggtggcgctgccccctgctgcttcctcgccgccccccgccggttcttggatcaatatatgggttcaacttcaaggccagttgatgatgaagttcttgatgccgccaccggggtacactactctgcgctccgtttggaagagcttaacatgaatggctccgtgtcaggggaggaccaaccgacaacctcgggcgtggagaatgggcaccaggagccatttgtcattggtgtcgctgggggtgcatcttcaggtaaaagtactgtatgcaagatgataattgatcagctacgtgatcagcgtgtggttgttgttactcaggagtccttttattatgggttatctgatgaggaattggtccatgttcatgattataactttgatcatccagatgcatttgatacggagttactactctcttgtatggagaacttgaaacatggcaaggctgtggacattcctaattataacttcaaaacatataagagtgtagcaagcgcaagaaaggtcaatccttcatatgtaattattttggaaggtattctggttttccatgattcacgtgtccgggacttgatgaacatgaagatatttgttgatacagatgctgatgtgcgattaacaaggaggattcgacgtgacaccattgagaagggtagagatatcaaaactgtgctagatcagtattcaaagtttgttaagcctgcttttgaagacttcatcctcccaaccaagaagtatgctgatattatcatcccacgaggtggagataatgatgttgcgattgacttaatcgttcagcatattcgcactaagcttggtcaacatgatctctgtaaagtacaccccaatttgtatgtcattcagactacttatcagatacgaggtatgcacacaataatacgcgatgctgccacaacaacacatgatttcatattctatgccgatcggttgattcgattggttgtcgagcatggtcttggtcatcttccattcaaggaaaaacaggtcataactccaactggttctgtttacactggggtagagttctctaaaagattgtgcggtatctcagtgattagaagtggtgagagtatggagaatgcattgcgggcatgctgtaaaggtataaaaattgggaagattcttattcacagagaaggagacaatggcaaacagctaatctatcacaatgtaccaaaagatatagcaaacaggcatgttctattgttggatcccatactgggaacaggaaattcagctgttcaagctatatccctactcttgaagaagggtgtacaggaaacaaacattatctttctgaatcttatatcagctccccaaggagtgcatgtcgttagcaagagatttccgagagtcaagatcgtgacatcagaaattgactttggtctgaacgatgatttccgcgtcatccctggaatgggtgagtttggagataggtacttcggaacagatgattatcagtcatcaacaccattcttttgcgacgagaaaaatcgtgtcaggcttttgtgaacaatgcagagacacagatcctgccggctgcatctccattttttgagaaacttattttttacatttcgaaagtcagatcccaatattaatgtattcattaccagaaactctgtatcggttaacattacagaccgcctcataaatcgagcaaattccaattttgtttttctgatatcgtctgacttctgcgcttgcagtttgctgtgatttcatctgtatgtgatccgctacttctctttcctagaattggagatgattggcttgtatcagggccaaattttgtaatctctgatttgttatctttcagattagcaatgcaatgcttatttcgg

SEQ ID NO: 28436 - DNA, 613 bp, Oryza sativa
  ref <308>: DATABASE ACCESSION NUMBER: AK103878
  ref <309>: DATABASE ENTRY DATE: 2002-08-28
ggcggcgacactgacagtctcctcttccaccactggcctagggcaagagatcgacgagaggagcggagggaggaggaggagatgggcggagtggagcaggagcagctgctcagcctgggcgtcctcatcgacatcgtcgacgagcagtggatgcgcgacaccctcccagccgacgatgtccccgtgccgcccgccatggccgtgaagacggaggaggcggaggatccagcacccgccaatcaggaaagccaaccagcacaaggggatgtgtggcgtgatttcacattggagaatctctgatcacttgtgacctacaagtgcttccagagatgaatataccatgctgggaatctaggagctacgtggtcattgcaatttctgagcttcatataactataaggtcatctgaacttagcgtactatctggttttgtttcagctgtagttcgtcgaacccatgctttaaaccgatgtaaatgctccagatattggtagcacattgctgcatgatgacaccgaaccttgtgatgagaaattatatgttgtgaactatgatggtgatgagaacagtcattcagatctggaacatatcaaatcactggtagtttgcagtc

SEQ ID NO: 28437 - DNA, 1364 bp, Oryza sativa
  ref <308>: DATABASE ACCESSION NUMBER: AK103879
  ref <309>: DATABASE ENTRY DATE: 2002-08-28
gatgcgccgccgccgccgccgccgactgctcggcgatcatggtcggcgaccgaaagcgcccggctcccttcgccggattctccccgttcgctcgctccctcctcttctccgcctcctcctctaaaccactacctccccccgaggatccacccgccgctgccgccgacgaaatcccttcaggaatcgccggctccagtcgcgatatgccgccgcccaagcgcgccaagcgggccgagccttccagcgacgaggagcgctacagcagtgacgacgagagctacagcagcgactccgacgacagcgacgacgcgtcggaggagctcgatacggtgcaagcggacttcgccttctacgaccccaagcccggcgacttccatggcgtcaagctgctgctcaagacctacctcgactccaagccgtgggatctcactggcttcgtcgacctcatccttgagcagaccacggtgggtacggttgtcaagattgctgacgatgaagaggatggtgaaggaaatggtgctgatggaagcagcactggtggcaatgacgatctgtttggtctcattagcgtgcttaatcttggaagatacagtgagcaccgctgtatgaaggatcttaaggattacctgcttgctgtttgtggtgacaaggataccaagaagaagctcaagcaaatgctgggggacaaagcacctgatgtgggtctgcttgtgtgccgccgttttgtgaatttcccatatgaacttgtgcccaagatgtatgaatcgttatttgacgaagtttcatgggccacagaagacgagccaacacaagaactccgggactccttccggttcaagcagtacctaatggttgtcagagtacttgagaggaaaactccagcaaagcaaaaggcaaagaacagtacagaagaggatgagcctattatctatcctaagttagaagacgaaatttttcgcgagctttcttcatggtcgttcactttcccaatacgttctgaacaatcggctcagcaagagatgaagaattacaaggagatgggcttagtgatggccgtcaaagctgaagcaattccgaagttccgaaagaagttggaggatctactatctgaatagttctctccacgcattgtaggtcgtgtggaattttgctgctgtccacatgatattggaacctccatatcttctcttgctattgcttgttagtgtccctagtaagcgcggacgctaagtttgtgagtgcaaagccctaattgaattgctagcattgccatagtagaagagaaattcatgtgtaagaggaaatcaattatgaacttcccttgtactgatatcaagagattttgaaggacttttttggttgcc

SEQ ID NO: 28438 - DNA, 653 bp, Oryza sativa
  ref <308>: DATABASE ACCESSION NUMBER: AK103880
  ref <309>: DATABASE ENTRY DATE: 2002-08-28
ttggtgtgcgagacccgaaataaaaataaattaaaaaaaaatctgcttcaacgagagaacccagaaaaaaaccagcagagagaagtctccagattctagggttggggaatcgcggcgagaggaagtagcagcggcggcggcggagggaggggaggtgaaccagcagcctgagcaggagcggcggcgtcggcggcggcggattccaagttttgttgcaatgggtttcttcaggaccagcttcacattaatgtttggaatgggatgtggtgtctatgtagctcagaattatgacgtcccaaatgtcaagaagctattcaacacgtacatgttcctagccaagcatattgaggaaacatatcgtaagccaaagagagacgactgatagattgcaaagttttttcttgcatcacccttggattgtgaagtatatctctgacatgatacagaaaatgtaatctcttcagaagtttcataggaagtttctatttctcgacaactgttgaactatgatcttggttagctgtgagattctaccgatgtaacagttttgcggataatttaccggatgtctagttgagcacttcttttttgtttgattgccaattgtaggcaaatggaaagtttatgctaatttttttcaaatttttgtggcc

SEQ ID NO: 28439 - DNA, 900 bp, Oryza sativa
  ref <308>: DATABASE ACCESSION NUMBER: AK103881
  ref <309>: DATABASE ENTRY DATE: 2002-08-28
gagccggtgtcctcgcttctctcctcgccacttcccctattcggtcaggcacatctccccaccccccaacaatcatcgaggaagaagagggagggacgacgatgtcgatgccggaggcggggcgctcggagagggacgggcgggagcaggacgacgactacgagcagcagcaggccagggtgctcatggcactgatgcagggcttctgcgccgcacgctaccggaaggccgacaacatcccgtgccccatcgtccaggggctatacttgggatctgttggggcagcaatgaacaaggatgctttaaagagcttgaacataacccatatcttgattgttgccagatcattaaatccagcctttgcagctgaatttaactacaagaagattgaagtacttgacagcccagacattgatttggcaaagcattttgatgaatgctttagtttcattgatgaatctatcagctctggtggcaatgttctggttcattgctttgctggacggtcaagaagtgtcacgattattgttgcatatctgatgaagaagcatcaaatgagccttgagaacgcgttgtcgctagttagaagcaaacgacctcaagtggctcctaatgagggattcatgtctcagctggagaactttgagaaatccatgcaagtggagcaggagaggaaacttatgcaacctgtgcagaactaactataggcgtaaatgcatgtgttgagaatacactgctaatagcttgcggagcagtctagagatcaaggccgtagtgcaaaatgttatgaattctagctgcggtattattagcagtcgtctaattgatgctgtaagcttcaagtgaaattggtggtcaatgcaatgaaatactctgggatccagttctgtgagggtaacc

SEQ ID NO: 28440 - DNA, 2459 bp, Oryza sativa
  ref <308>: DATABASE ACCESSION NUMBER: AK103882
  ref <309>: DATABASE ENTRY DATE: 2002-08-28
ggtgtgaacagggagaaacggttgttgagactgaaagcacttgacagtcagagtttgccagagaatataggcgaaacacaaaaaccactctctgctactgttgaacatacaaaacaaggagatatcattggtggacgtattcaaaagattctacctggtgttggtgggcttgtcatccagattggacctcatcttcatggaagggttcattatactgaaattgttgattcatgggtgcaagaacccatatctggatttcatgaaggtcagtttgtgaagtgtaaggtcctggatgtaagccgttcatcagaagggtctgtcagagttgatctatcacttcgctcatcaatgtgcgcaaattctaaccagtcaagaagattgtttgatgattcgagaattcgtacctcccgatttgagaagatcaatgacctgtgcccgggaacaggggttaagggctatgtgaagagcgtgaattcgaaaggatgtttcattatggtttctcggactattgaggctaggattattctgtcaaatttatctgatgaatatgtggaaaatcctcaaaacgatttcccagttggactgcttgtacatggaagggtcttgtcctcagaaccacaatcagggaaagttgaggtatcacttagggagaatactggtagcaaatctcaaaaatcagatgatattagttacagcgatctgcatgttggggacataattgctggtcaagttaagagggtagaatcctttggactatttgtgacaattcagggcagtgaattggtggcattgtgccatgtatcagaactttctgatgaaccagtccttgatattcattcttgccacaaagctggtgataaggttaaagccaaaattttgaagattgatgaggaacgtcatcgagtatccattggaatgaagaaatcttacatcggacctgattctacgggtgatacaagtgatgatgaggatgacgaaatagttcctgaggaaatcagtcgtaatcctgtgatgggtagagatcggaaccatgcgttagttcttccgaaaccagaatccagggcttcagtgctgccactccaggtctccttggatgaatctgaaggttcagaccaagagaatgataataaaggtcaagaaattgctaatggaactgaagtagatgataaaaagagcaacaaaaggttgaaggagaaggcgagaaaacaaagagaattagaaatcagtgccttggaggaaagggctttacaaagagatataccccagactccagatgaattcgagaagttggttaggagctctccaaacagtagcttcgtctggataaactacatggcatttttgttagacctagcagatgttgataaggcccgtgcagtggcggaaagggctttgagaacaataaacatcagagaagaggaggagaaacttaatgtttgggtagcatattttaatctggaaaatgaatatggcagtccaagggaggatgctgtcaagaagatattccaaagagccttgcagtattgtgatcccaaaaaggtgcacttggctcttcttgcaatgtatgagaggacagaacaatacacactagcagatgaacttcttgatagaatgacgaagagattcaaaacttcctgcaagatttggttgcgctgtattcaattgtccctcaagcaaagcaaggatgttgagtgcatcaaattgatagtgaagcgtgcacttctaagtctacctcagagcaagcgtagaaagttcctatcgcagactgctatcctggagttcaagtgtggagtgcctgaggaagggagatccagatttgaactgatcttaagagagtaccctaaaagaacagatctttggagtgtttacctagaccaagaaattcgccttggtgatacggaaattatacgggcattatttgagagagtaacatgccttagtcttcctccaaaaaagatgaagtttttattcaagaagtacctggaatatgagaagtcgcaaggtgatgaggaaagaatcgagcatgtaaagcagaaggcactggagtacgttcagagttcactggcctgatattcgcaagaccaataatccctctgaacctaagctgttgctgctgctatccgctattcggagtcgtggctgcagaaattgcgatcagcaacctgatgcgacgactcctgataggtttctgcgaggatcggcggtgtaactgtctgaatagctgaaggtcaagtccttggtcgatgcagaaactgaagagtgctaatcatagaaacggtgataggtctgatgtattttgtgcgttagtgctatggttgcatatttttgattagtggtgcgaacacgaacgttgttaagagggaaatgcagcccattcagttttgtaggaataagtgttctacgcttggaattgtcaaaagtttttaccaaaatatgatgtatacaaaccttttcttacc

SEQ ID NO: 28441 - DNA, 1117 bp, Oryza sativa
  ref <308>: DATABASE ACCESSION NUMBER: AK103883
  ref <309>: DATABASE ENTRY DATE: 2002-08-28
gtgcggaaggatggagagggctaccacctccggaggcggcggcggcggcagccagccgccgcggggggtagggctgccgttggtggaggtgcaggcggcggcggcgtcgctgcggcggtcggaggtgttctacgtcgtgaaggagctcctcggcttcgtcctctacatgcaccaccagatccccgcggtattgcagaatcttgaaaatgaatttgcaagtttaaaggaggaaatgacagagatggcattgccaccaggagaaatgaaaccatctgatcagagaaagtacaatacacggaaaagggaagtaagacggaggatcaagaagcaggagaagttaatgaatggcctctccagcgtattttctgctcttcagaaagcactcgatgaagttcctagcattgaaggagttctcctgatcctcggtggtagccttgtcaggcctctgtttgtctatgacattacaatttctcatggtagatttgatgctggaagtgccaatgagcgtggtgcaagcaaattagcgcagtccgtttctcgaaaggccattcgtgctcttatatcaagtggtgcagggagtttatcttatacaggccctaccaagctgtttgttctagtcagatgtccctgtacattgaacttaccactggacttcctgccgaaacgtgattttcgttacagcaaaaaggttgtacccctccagatgtgtataaaatgcaatatagcaggcatccaaatagataatcaacaaataacatcaattgttgatgcttcaagatgcacttcagaatctactatttctgaggttatctggttccagtgtaagcatacgataagaggcctaccttgcaaggcgtcattagaagagtgatatggcccaagcatgttgaagacgcccagaaaacagtggatgatgtagcgatataactcctgttctgactttgtaaatgcatacggcattccgcgaaggatcatcattctgtatgttcgttccatttgtacagtgctatgaagttcagttcgctccattgcctaacaaagaagaatgaaaaacaagagcacaattaaagtttagtgaacctgaagtattgaattgaatctccacaccattttactt

SEQ ID NO: 28442 - DNA, 1822 bp, Oryza sativa
  ref <308>: DATABASE ACCESSION NUMBER: AK103884
  ref <309>: DATABASE ENTRY DATE: 2002-08-28
gattggcactgtaccgctcgacatgaacggcgaggaggctccggccgggagcggcggcggcggcggtggaagggcggagatcgacacgtcggcgcccttcgagtcggtgcgcgaagccgtcgaccacttcggcggcggcgccgccgccgtctggagctcctgcctcgtcaaccgcatgctcactcccccgaaggaacatgaccagatgaatgggcagaccttgcagctagagaaggagctcatcatcaaggaaagccagacgcttgatgtgcccaaagaattagagtcctccaaaaggatcatttcggacttgaagctaaaagtgcagaatgattcagccatcactggacacccgggccaaactgaagcaccaggtgcagggcctgaggagaggcgctcttctgaaaatgttgaaactgatggggaattgggtggcctggattcacagaatctgcagcctccaagttcagtgctaatgcagcttgagcaggcaaaagcgtacttgaccagaaccacagctgatctagccgagataagagcctccgttgagtcgctgtgcaatgagatagcaaaagagaaaatcttggtggagagaagtcgagagaaggtttgctccaacacatccttgatctcttcgctggagggtgaattggatcgcactacacataagctgcaaacgctgaatgataggcaaagaaggcgcgaggattcgtcacacattctgatggagatcaagaaggtgacatcagagatagagcagctcaagagcgcatcaaatgcatcgaaatctgaagctacgatgttggctgccgaaattgagcagacaaaggcaagcattgcaaccgctgaggtgaggtgtcttgcagccaagaagatggaagatgcagcaagagcagcagaagctcttgcacttgctgagatcaaggccctacttagcggtgaagcttcagctggagatctccagggtactgatggagtgaacttgtccttggaaaagtattttgagcttgcttcaaaagctcaagagtgtgacgtcagctcgaggaagaagattgaagcggcaatgttgcaggtggaagaagccaaccgatcaaaatccaactcgctcaacaagctggaggaagctaaattggaatttgagaaatgcaaaattgcactgcaggatgctctgaagagggcacacgctgccaatcgggggaagctcgcagtggaagagtctgttcgtagatggctatctgagagtggctacaagaggcactcatttcatgattcttccaagttaaaaaatgcagcagatatcactgacgtttcaaagagcttcttgaagccaacactgtcaattgggcagatattgaatctgaagctaatgggacctgatgggtatgacaaaagcgtttgggatgatacaactgaagcttcaaatgtttcacttggtcagatcctgaaccggaggaatgctgttttctgtaacagtgatataacttctcagaagatattgtcaggaaaaaggaagaaatttgccttcacagggctttcagttttgttggcaaaacaagccaagaggcaagagcaagagaaatagaggatcagattagagcctatctgcccaaggtttacctaagcctgaaacagtaggtgatgaatgttgtgaccactatttccatgttcatgtatgttagttggttctggccctgcgtcctctgaatctgttattgccctctcacacatgatttctctaggatgactggttgcggattaggaacgtaaaactgacggtattgcagtcctttctataaatttgcaactatgcttaacatgagcg

SEQ ID NO: 28443 - DNA, 1215 bp, Oryza sativa
  ref <308>: DATABASE ACCESSION NUMBER: AK103885
  ref <309>: DATABASE ENTRY DATE: 2002-08-28
gaatcactcctccccgatccaatccattatccatcgtcccatctcgccgtctcttggcaatccatggcggcggcggtgcccaccggctgctacaagtgcggccgtccgggccactggtcccgcgactgcccctccgagcccgccggcgccggcgctgcatccaccgacaaccctaaccctaaccccaaccccaaacccagcgcctcccgcttcgccccttacccgaggccgaggttcgggaagagtgccgcggcggcggcggcggcagaaggggaggacgggagtggcggccaggcgcagggtaagaagaagaagaaggagagggcgacgcggcccaagctcactccggacttgctgctctccgatgacggccttggcttcgtcctccgctacttccccaaggccttcaaaccccgcgcccgccccggccacgaggtagaggatcttggtaatctgatcaagctatacacagactggcactctcgcttgattccttattactcctttgatcagtttgtgcgaaaagtcgagaaagtgggggctagtaaccgtgttaggagatgcgtttctgaactgagggacagggttgccagagggggagatcctaccctactgcatgaaccgccggtcgaagtcatcccagagggcgaaccagatggagccacagctgaagacccaatttttgggactgaagttccggcgaccgaaaaccatggcgtggaccaggtgcaagaagatatagacataccggtcgaaagcaacgatgtggatcccatgcaagaagatctccttaatgaaatctacaataaggaagctgatgagccacaaatcccagctgttggaggaacagccgaggaaaccacaccggccatggctccaaaggaagcgaaaccacaagatgatccaccacgagaagcgcagaaccaaccgggcaagattcagctgaccgaagagcagagggcgcgcatggaggcaaaccggctcagggccttggagagggcagcagcggcgcgtgctcgcgcctcgcagccggcatagctagcaagcaaccagctacatactcaactcagttacctgcatcttcgcttgttattcccttgcattgcattgcacctgtcgacccctgtgatggatgtattacatggcacagtaatcagcacaactctgttgttattgtgctactgcctgaatagcatgtgcaatggtgttttgctg

SEQ ID NO: 28444 - DNA, 3329 bp, Oryza sativa
  ref <308>: DATABASE ACCESSION NUMBER: AK103886
  ref <309>: DATABASE ENTRY DATE: 2002-08-28
gagcatcgcctccgccactccggcgagccatctccgccgccggcggcgacggccgcctctccctccctcctccttcccctatactcttctcctcctacctccaccaacggaagtacgactgtacccaaaacccttcccgtcccctcacctgcgccgccgtgacagccgcgatggtcgccggcggagaaggccggccggggacccccaaagaaaggaagggggtgttccagtgtggttgtccgggatgtttctttgattccgcgagactgaacttgccagccacgttttgggcttcgtcttgtagatggcgatttcttcctcaggcgctgcggttccattggccggtctcttgcagagcacaccatacccacaaacagagagggggatgaaagctgttgtatgcgcatcacatggagctgtagggtccctgctatggaagctaagtgccttgctctctgatgaatataaccttctcactggtgttaagagtaatattatgttccttaaagctgagcttgagagcatagatgttttcctcaagaagatgtatgagtttgaggaccccgatgagcaatctttgttctggatgaaggagttcagggagctgtcctatgacattgaagacatcattgatgcttccatgttctcccttggtcatgagtccaatcgcagaccccgtggcttcaaggggtttgctggcaggtgcatggacttcttgacaaatgtcaagacacgccattggattgccaagaaaatccattgtctcaaatgctgtgttatagaagctagcaatcggcgtgcaaggtacaaggtcgatggttctgtctccaaactgagtaggacaagcttagaccctcgcttaccagcattctacacagagacgacaaggcttgttggaattgatggcccaagggataaactcatcaagatgctagtggaaggggacgacgcattggtgcatcagctgaaggtggtctccattgttggatttggaggccttggaaagactactcttgcaaatgaagtgtgccggaagcttgaaggacaatttaagtatcaagcttttgtgtcagtgtcccaaaaaccagacattaagaagattctgagacatatactctctcagatctgctggcgagagtgtatcagtgatgaagcatgggatgagcagcagctcatccacacaataagacaattccttaaggataagaggtattttattgttatcgatgatatatggagcacatcagcatggagaacaatcaaatgtgcttttcccgaaaataactgttccagtagaatattgacgacgacacgtatcatcgcagttgctaagtattgttgctcacctcaccatgacaatgtatatgaaataaagcctcttggtgcaattcactctaaaagcttatttttcaaacgaacttttggttctgaagataaatgccctcttcatctgaaagaagtttctaatgcaatcttgagaaaatgtggtggcttgccactgggaattatcacagtagctagcttattggctaataaagctagtacaaaagaagaatgggagagcatacataattctattggttcagctcttgaaaaagatacagatatggaagaaatgaaaaggatattgctccttagttatgatgatcttccttaccatttgaagacatgtttgctatatctaagtattattccagaagattacgagatcaagagagatcggttaataaggagatggattgctgaaggtttcatccctacagaaggggtgcatgatatggaggaagtaggcgaatgctatttcaacgatcttatcaacaggagtatgattctaccagttaatatccaatatgatggtcgagctgatgcttgtcgtgtgcatgatatgattcttgatctcatcatatccatatctgtcaaagaaaattttgtaaccttgcacggtgaccaaaactacaaaatagtgcaacaaaataaggttcgtcgcctatccctcaactatcatgctcgagaagatataatgataccatcaagtatgattgtttctcatgtccgatccctcactatctttggatatgctgaacatatgccctgctctgtcaaaattgcaatttatgcgagtgttagatgtagaaaataaaatggtgttggatcacagttttctcaagcatatacacaggctttctcaattgaagtacctgcgactcaatgtaagaagaatcactgcacttcctgaacaactaggagaattgcagaatttgcagaccttagacttaagatggacacaaataaagaaattgccatctagtatcgttcgactgcagaaattagtatgcctaagggtaaacagtttagaattgcctgaagggattggaaatctgcaagctctacaggaattatcagagattgaaatcaaccacaatacatcagtgtattctctgcaggagctgggaaatctgaagaaactaagaattcttgggctgaattggagcatcagtgattcaaattgtgacatcaaaatttacgcagataacttagtcacgtccctctgtaaactaggcatgttcaatcttcgatctatacaaattcaaggttatcatattatttcccttgatttcttactggattcttggtttcctcctcctcatctcctccagaaatttgagatgtccataagctactttttccccagaatcccaaagtggatagagtcacttgagtacctcagttacctagacatctacatcaacccagtggatgaggaaacattccaaattcttgcgggcttgccgtctttaatatttctttggatatcctctagagcagcaacccctaaaaaagggttaattatcagctataatgggttccagtgtctgagggagctctacttcacctgttgggaaagcaagacaggtatgatgtttgaagcaggagccatgccaaaacttgaaaagcttcgggttccatataatgcatgtgatatatgctctttgaatggtggtatggattttggcatccaacacctctgttccctgaaacatctccatgttgagattatttgccgtggtgcaaagcttcaggaggtggaggccttggagaatgctatcaaaagcgcagctggcctcctttctgatgagctcacttttgaagtaagtagatgggatgaagaagagattattgatatggaccaagaactggcagaagatgattttgatacaattaattgaaagcatagcacaatactgaggtatattatttgttctgttaagccacaatttgacatatttttattattaaattttatgggtaatgcgttttggtcgtctttt

SEQ ID NO: 28445 - DNA, 1956 bp, Oryza sativa
  ref <308>: DATABASE ACCESSION NUMBER: AK103887
  ref <309>: DATABASE ENTRY DATE: 2002-08-28
gagaagatcaacggcagtttagctcttcttcgtcggtcctctgcgcaggtgaccaccggagcgaggcggccaagggaagtgggctgcgcagcagcagcctgcaagcgtgggcgcgcagcgcgtggccgtgcaggcgtgcaggtgtgccggccggacaaaccagtaggcaggagccaaggaagagctgctaccagcttgctcgttgccccaacttgactcattgcctgccacattgcttcttgcggcatgaggcttgcttgcatccagcgccaactctgaatccttagtttctttgggtaaaccatttccctgaagcccgttggattgagcttctagacaagcctgctgccctgcagcttgtctggtcctgttatggagacaagggctaaaggatccaagcaccaatccaccagtcgtgtagacgctgcagcttcggaagatccgctcttcgtggaggttgaagccgacgtttgggaaagcgagcaaggtaccttggtgtgctgaagtcatatgtgcgtaatagagctcatccgaagggatcaatggctgaagcatatttggcagataagtgcatggttttttgttcacgatatcttgatggttttgagactaagcataaccgtccttcgaggaatgatgatacacatgagctagatagttatcctattgtgaaacaaggatcatcaatattttctcatgttggaaaaccacttggaaagcctagcaactatgttataaggggtatggctaaagtacaagcacatcgatatgtgttgttcaattgttcagatgttaataagtacttgcgagctcatgctgatcagattgcaagtacgtatcctcgacgtggtgtcaatccaaaaactattgagcgtgtacaaaatgagaaattccatgaatggtttagagcacatataatggatctggagcggaagaatggcttgcacattgtcaacgaagatgttagatggctagcccgtggtccacttgatgcagccaaacgatatcgtgcttttaacactcgtggtttcagatttaggcctaaacgcttggatggagtgacacaaaatagtggggttgtgctaactgcaaaaaaatctagctacactaaagcaagtgacgctaatccaattttaggtgatgttacatattatgggaggataatagatattattgagctgaactactctggaaaattttcagtggtcttatttaaatgtgaatgggtggatgttatttctggaaaaggaattaaaaaggacaaatatgattatacacttgtcaacttctcacatcttatacatacaggagaaaaaattgagcatgagccttttattcttcctaaccaagctgatcaagtgttttatgtggatgacccaatgaacccagggtggtctgtagtaaggaaaatgaaacccatggacatatatgatactggcaaagaggaatggatagatgagatggaagctgagccttttcatgtttcacacctcggggagttattcgatcaatcaaacaatcaacactgggttagagctgatgttgaaggaacaatggttgatgctaataatggacttggcactgaggtactttggtactttgttagctccattcaaggaaattaaaaccgcgttgtcatgcacatgctcctacaggtatggaaaggaataaacaatacaagatgctggaagagaatggtaaaaacttaatagttatccaagtcagtagagaacaaatgaagttttcacatgtggcaaggcctacgtcaagcagtctattggttacctagttgtagctgtgattttgcaaggcttgtactgttgcaatgcctcatgttattccccctttacctgtaggctgtagctttgttctagttctatttaagtcttttggactgtgcattcctagactgtgaacatggactttgagaaatgagcaattatattgtctgatggt

SEQ ID NO: 28446 - DNA, 2163 bp, Oryza sativa
  ref <308>: DATABASE ACCESSION NUMBER: AK103888
  ref <309>: DATABASE ENTRY DATE: 2002-08-28
gcctatccctcttattctcgcaaccacgctgatcccaaaccccattccgcctctctcggccggtctctcctcgcgggataggagaaagtcagcggcgggcgcgaggtcggtcgagtggagcggccggcaagaagagcgaggagatttaggagggggagatgaagcccgtcgagcgcgccaagctggtgcggagcctccggcaggagtcgcggcggctgcgcctgctcgtcctcgtcatcggcttcttcctcgtcacactcaccttcgtcgtcatctccaagcccgacgccctcctcttcaacctgaacggccggctgtcggtggatcatgcgccgcgctcgctcctgatccgccagcggatccacgccgactccaggagatccgccgataccttccccgccgccgaggatcccaaggtggtggacgaagacgaaggcgccgaggacgccaccgccaaagggactagtgaggaggagaagaggctactcagtagtgagcccgagcaaggcaagaacgaggaggcggccactgcatctgaggtgttaggtggtggaggcgaagaggataataagaacggcgaggaagaggggcacacacagcatagcgaggtgaccctcccgactgtttccaattataccatccgtgatgctgaagacactgacaatggcaagcaagaagatggcaaaccgaatgaaaaatatgaatttgagatggacgcggacaagggagacaatgtggaaccagaaactgataatgaggagtggaacaagaaaccactatgtgatttctcaaacttcagagcaaatgtctgtgagatgcggggcaacattaggattcatcccaatgcaagttctgtcatgtacatggaacctgccagttcaaagagagaggagatatggaaagttaagccttaccctcgtaaaggtgacgagctctgcctcggccatattacagagataaccgtgaaatcaagcaaagtggcacctgagtgtagcaagtatcacaatgtgcctgcagtggtctttgctctgactggatacactggaaatctattccatgacttcaccgacgtgcttgtccctcttttcacaaccgcaagcgaattcaatggcgaagttcaattcctaatcacagacatggctatttggtggacaaggaagcataaggtggtgtttgataagctatccaagtaccccttgattgacttcaacaatgacgatcaagtgcattgcttcaagcatgcaattgttggccttcatgcttacatggagttcacaattgactcatcaaaagctccacataactactcaatggtggattttaataggttcatgcgcaggacctactcactgcctagggattttgtaactgcgcttggtgagattcccaaagccaagccaagactgctcattatatccaggcagaggacaagaatgtttctcaatcttaacgagatagtggcgatggctgaggagataggttacgaggtggtggttgaagaggccaatgtgagctctgatctctcccattttggcaaggttgtcaactctgttgatgtgatgatgggtgtccatggtgctggactcaccaactgtgtgttcttgccacaaaacgctacattgattcagattgtgccatggggtggactagactggatatcaagaattgatttcggcaacccagcggaacaaatgggcctgcgttacaagcagtatagcattggtgtacatgaaagcagccttactgatcaatatcccctagatcatgagatcttcacaaatcctctttcgttccacaaacatggatttgaattcatcaggcagaccttcatggataagcaaaacgtcaagcttgattgcaaccgattcaagcctgtactcttggaggttcttgatcaattgaatcaatagaaaccactaatatattgcaagctggggcactgtttttgtccacaaatttttggtttcaccgttctttatttagtaaaatttgttggccatcttctgattacatgagcaaggcaggaattaatttatttgtctaatgtgtagaaaattatgctgccacatggatttaaactcagatatccatgatgtgtcatctagatcatatttctcgattggaaatagaaaataatttattttttacttgtaaatttttgtc

SEQ ID NO: 28447 - DNA, 1752 bp, Oryza sativa
  ref <308>: DATABASE ACCESSION NUMBER: AK103889
  ref <309>: DATABASE ENTRY DATE: 2002-08-28
gtttggtcgcgtggcttgagcggtggtgacaccgctcgcctccgtccgcctcgcctccaccgagaggttctctctgccgccgattcagatttacagggagattatcttgtgatctgtaaacatgtttgggcgtgtaccgaggagtaacaacaccaagtactatgaggttcttggagttcctaaaactgcaagcaaggatgagctaaagaaggcataccggaaggctgccataaaaaaccatcctgacaagggaggggatccagaaaagtttaaagaattatcacaagcgtatgaggttctcactgatcctgagaagagagacatatatgaccaatatggggaggatgctcttaaggatggaatgggaggaggcagtgacttccataatccatttgacatatttgagcagtttttcgggggtggtgcctttggggggagtagctcaagagtacgcagacagagacgtggtgaagatgtggcgcatactttgaaggtgtctttagaagatgtgtataatggatctatgaagaaactatcattatcacgaaatattctgtgcccaaagtgcaaaggaaaaggccacccacgtcgcgctccagcagcagctcatcgcggcccagcacgagctccgggtggtgtccatcgccgccacgagggcgcgtgccgagcgcgaggatgaggtccgcgcccttgcggagcaggccgcgcgcatagaggccgaggctcgggccgccgtcgccgcgcgcgcggaggtcgaccaggtccacgcggacgttcaggtgctcgccggcgcgcgcactgaactcgtggaccggttgcaggacctccgcgggcagctcgcgcgcttccaggccgaggcgggtaagactgagtccgtccgtgcccaggttgaaaccatgcgccgggagatccagaagggcagggctgcggttgaatttgaaaagaaggcacatgctgataaccttgaacaaagtaaagcaatggagaaaaatatgattgctgtagccagtgagattgagaagctaagaggagatcttgcaaatgctgaaaagcgggccactgctgtcaccgcaacagcacctgtagctaatcctgggttccctacaacatatggcaattctgaggcaacatatccagcacctgcagcatatggtaactctgagacaacatatgcaccaacgtatggtaatactgaggcagcatatgcatcaacatatggaagttctgaggcagcatatgcagcagcatatggaaattctgatgcttatagcactaatcaggctcatacccgcaccgatggcaatcctcattacatggctccacctgttcattatgcgcagtatgacagccagcacaccaatgtgcaaaggtgaatgatgagtcagggtagctttgaccttgggtgtaatcctggcatttgtcaatgtagttgctgggttcaccaaatttaaggttatctgcaggaattcattccatggaagtgatggatacactgtttttcccctatcttttcattaaccagttccggaatgctcgagccagttgcctgaagtcaaaatctttctgcaaattgtcgatgtatcaccctgatgaaccatggattagtgagaccgcagctcagtctttttagtcagggattgtgattattcgcaaatgtagtgctgcagcattttcctttgtaaatatatagtggataatggtccaatggtaacaagccgttctcatgcatgatgcgttacattttgtttgcct

SEQ ID NO: 28448 - DNA, 783 bp, Oryza sativa
  ref <308>: DATABASE ACCESSION NUMBER: AK103890
  ref <309>: DATABASE ENTRY DATE: 2002-08-28
ggcggcgcaccactccaccaccaccaccaccactccaccgatcggcgagagcgcggggagatcgttcgacggcggcaagatgcagatcttcgtgaagacgctgacggggaagacgatcacgctggaggtggagagcagcgacaccatcgacaacgtcaaggccaagatccaggacaaggaaggtatcccgccggaccagcagcgcctcatcttcgccgggaagcagctggatgacggccgcaccctggccgactacaacatccagaaggagtcgacgctgcacctggtgctccgcctccgcggcggcagcaggggcggctacaccatccaggagcccaccctccgggctcttgcgctcaagtacagagagaagaagaaggtctgccgcaagtgctatgcacgccttcccatcaggtctcaccactgccgcaagaagaagtgtggccacagcaaggagctgaggttgaagaagaagttcatcaactcgctttcgatagcgtgaggcactggaaagtgttcaccagctgaatcaatctcttggatctccgtgtgcgcagctaccatgttatgtccagtttagaagtactccgtagttgttaatctcttggaacttcgtatgcccagctaccatgttatgtccgtagtctagaagtagttgtggtacttagtacgcttgagagctctgggttgttgcttaaagaagttgtaaccctgcgaagctgcgactgggatgttgaaccctctatcatcactctgaatgaagaagttatcgttactagtagc

SEQ ID NO: 28449 - DNA, 2587 bp, Oryza sativa
  ref <308>: DATABASE ACCESSION NUMBER: AK103891
  ref <309>: DATABASE ENTRY DATE: 2002-08-28
gatcgtcttcctccctcttcctcgcgtcgcaaaccctagctcgcgcgctcccccgcccgctgcctccgcctctccctacctaccgccccccgcccgcccggccatgtcgaagcggcccaagctcgggggattcagcatccctcgccccacttcctacagcttcgagcgctcccagcctccccagcgcctctacgtccccgccgacgaccccgacctcgacgacatcgccttctccgacgacgcggcggccccgtcggacgcgccccccgcggggggaggcggggcggcgggggatgaggaggagatcgacccgctcgacgccttcatggccgagatccaggaggagattcgcgcgccgccgccggcgcccaagcccgaggcgctccggcgcgcggactccgacgacgaggacgaccccgtggagagcttcctccgggccaagaaggattccgggctcgcgctcgccgccgacgccatgcacgccgggtacgactccgacgaggaggtctacgctgcggccaaggccgtggacgccggcatgatggagtacgactccgacgacaaccccatagtggtggacaagaagaagatcgagcctattccgccgctcgaccattccaccatcgagtatgaacccttcaacaaggatttctacgaggagaagccctcggtttcagggatgagtgagcaagaggtggctgattatatgaaaagtttggcaattcgagtttcaggttttgatgtgccaagaccaatcaaaagctttgcagattgtgggtttcctgtacaactaatgaatgccattgccaagcagggttatgaaaaaccaactacaatccagtgccaggctttaccaattgtactttcaggcagagatatcattggtattgctaaaactggttctggcaaaactgcagcttttgtactccccatgattgttcacattatggatcagcctgagcttgagaaagaagaagggccaataggtgtggtatgtgctccaacaagagaattggcacatcagatataccttgaagctaagaagtttgccaaaccttacaatcttcgagttgctgctgtatatggtggggtttccaaatttgatcaattcaaagaactgaaggcaggctgtgaaatagtcattgctaccccagggagattaatagacttgcttaagatgaaggcattgaagatgtttagggcaacttatttggttcttgatgaagctgatcgcatgttcgatcttggatttgagcctcagataagatccatcgttggtcaaattagaccagaccgacaaaccttgcttttctcagcaacaatgccatacaaagtggaacgtttggctagagaaattttgactgaccctattagagttacagtaggtcaggttggcagtgctaatgaagacattaagcaagttgtaaatgtactcccttctgatgctgagaagatgccttggcttctggaaaaacttcctgggatgattgatgatggagacgttcttgtatttgcagctaagaaggccagagttgatgagattgagagccagttaaatcagagaggtttcagaattgcagcacttcatggtgacaaggatcaagcttctcgcatggagacattgcagaagttcaaatccggggtttatcacgtcctagtagcaactgatgttgctgcacgtggtctggacattaagtcgattaaaacagttgttaatttcgatattgcaaaagaaatggatatgcatattcaccggataggaagaactggccgtgctggtgataaagatggaactgcatatactctgattacacagaaggaggtgcgctttgcaggtgaattggttcattgtttgattgctgcaggacaggatgtgccaaatgaactaatggatctggcaatgaaggatggaagattcagagcaaaccgggattcaagaaaaggtgggaagaaaagtggcaaaggaaaaggtggaggaggcgggggtggcggcggtagcggtgcccgtggtcgtgggcgtggtgtacgtggggttgactttggccttggcatagggtacaatgctgaatcaggatcggtgcctgctccaagatctgctgcattaaattcattgaagacagggatgatgcaaaattttaagagcagctttgtctctgcctcttcatcaaatacaccaagcaacagcgcaccttcaagaggtgctccttcctcctttgtgagaccggcactccgtggttttgtttctggtggcaccataggaggagacgcaaaccaagcacgggcagtactgcctgcgccctcctttgtccctgcttccagacctgcagaaaacactgttgaaaatgcgaacccaaaccctgaaagctcgagggatcgcacgagggagagaaagcggccgtcggggtgggatcgctaggccttgggggaacccaatgtaccaaaattctctccatttttgttcttctgccctgatgaaacatatattgactgtaacatgtagattacatgatgtgaatgatacaatttcctggtgagcttgcacgcttgttgtatatctatgcgaccatgccccatttgctcgctgttt

SEQ ID NO: 28450 - DNA, 1450 bp, Oryza sativa
  ref <308>: DATABASE ACCESSION NUMBER: AK103892
  ref <309>: DATABASE ENTRY DATE: 2002-08-28
gtccttgtaattcctaaatccgtctcttcttccgccggcgccggcgaggcaaaccagtccaaaaccctaacagccccgctctattcgtttgccaagatgaggtcaatccgagcggcgcaagctctggcctcccgctcgctgctcctctcctcgcgcgctctccatggggacgccgcctccacggcggcggccgcggcgggcggcgggagattgggcgtccagccgtcgcccccatcccaggcatcatcatcatcatcctcgcgggccatgccagctggaatcgctggggcggtctccttctccctgaccttcgcgacgatggcggcggcggaggccaaggaaaggccgcccatggatctgctgccgcagaacgtggtgctgtaccagtaccaggcctgccccttctgcaacaaagtcagagccttcctagactatcatgatataccctacaaggttgtggaagttaatccattgagcaagaaggaaatcaagtggtctgagtacaagaaggtcccaatactgatggtagatggtgaacagctggttgattcatcagatataatcaatatattacagcaaagggtccgccctgatgataaagccactaatgaagaggaagaaaaatggcgcaggtgggttgatgagcaccttgtgcatgtcttgtcgccaaatatatatcggacaacttcagaggccttggaatcttttgattatatttcaaaacatggcaacttcagttttactgagcggtttgctgtgaagtatgctggtgctgcagcaatgtacatggtgtctaagaagctaaagaagaagtacaatataactgatgcgcgtgcttcattatacgatgctgccaacacatggatggaagcccttgatggaagggattttctaggtggctccaagcctaacttggcagatcttgcagtatttggtgttttgagacctatccgatacttgacagctggaaaagatatggttgagcatacacaaattggtgactggtaccaacgtatggaagatgcaattggagaaccatcaagaatccaggagtagaacgaaattagtagaatttctttttgcctcttcaagtctttgaccatttcaaacggaaggaagtatatgctttagacattgaaattattgaagttttgcagaatgtgtgacaatgtaataatgtgacatcatatatttagtacacagagaattgaacatgaaaaagaaggaactcgaacttcctgttttggttttaaatcattgtacggctgtttgtatctaacttttccaagtcgcgacgtcattatttcgttcctggtttaggagtatatgagaaatttttgggggggtcagtcgtgaagtattaacttgtgatcgtgttgatggataaactgcaagatttacattctccatcgatattttgtgatgttctaatacagcttgattgtgcttt

SEQ ID NO: 28451 - DNA, 943 bp, Oryza sativa
  ref <308>: DATABASE ACCESSION NUMBER: AK103893
  ref <309>: DATABASE ENTRY DATE: 2002-08-28
gattccgcctccacccccgccgcccgtccaaaccctagctccgccgcctccgccgcctccaggagaggagaggtaagtcgaagatggtgtccggctccggcgtgtgcgcgccgcgcgtggtggtggacgcgcgccaccacatgctcggccgcctggcctccatcatcgccaaggagctcctcaacgggcagcgcgtggtggtcgtccgctgcgaggagatctgcatgtccggcggcctcgtccgccagaagatgaagtacctccgcttcctccgcaagaggatgaacaccaagccctcccatggccccatccacttccgctcccccgccaagatcctctggcgcaccgtccgcggcatgatcccgcacaagaccaagaggggagaggcggcgctggcaaggctgaaggcgtacgagggcgtgccgccgccgtacgacaggaccaagcgcatggtcatccccgacgcgctcaaggttctgaggctgcagcctgggcacaagtactgcctcctcggccagctctccaaggaggttggctggaactactatgacaccatcagggagcttgaggagaagaggaaggagaaggccaaggttgcctatgacaggaggaagcaactggcgaagctgcgtgtcaaggctgagaaggcagccgaggagaagctgggtcctcagctggagattcttgctccgatcaaatactgagaagctttgctttcgtgcatcatcagttttgtgaaacatgtgcccccttattcctagtagtatggtgactcatgatagtacaatcaaggtgtttaaaccgttgttatgcatcccagttctgctactcctatttgaaattttctagtcgatgaactgtttctgtttgtcaaatgtgtgcatttggagattctaccgatggctgtcatagtcccatattgacaaagcggtttttcttaacc

SEQ ID NO: 28452 - DNA, 1453 bp, Oryza sativa
  ref <308>: DATABASE ACCESSION NUMBER: AK103894
  ref <309>: DATABASE ENTRY DATE: 2002-08-28
ttggcgctgtggaagaaaagactagagaagattgacaagtgatcatatgagagagatgtcaaccctaagccaccagcaccaccatgttctcgtcctccaactcatcctacttctgccctttctccacctcgttgtccccggaacgccagccgccgcccgcaagttctccgacgtgttggcgagcggccgcaacgtgagcgacggcgacgtgctcgtctcccccggcgggtccttcaccctcggcttcttctcccccgccgccaccaggaggaggtatctcgggatttggttctccgtctcgccggacgccgccgtccactgggtggccaaccgtgaccacgctctcaacgacacctccggcgcactgatgctgaccgacgccggcgtcctcctcctcctcgacggctccggcaaggtggtgtggtcctcttccgccaccgcgctgccttccgcgactacctccgccgcggcgcggctgctcgattccggcaacttggtggtgcaagggcagggctccggcaccgccctgtggcagtcgttcgactaccccaccaacaccctgctgcccggcatgaagatcggcaagaaccggtggaccggcgccgagtggtacctgctgtcgtggcgctcccccgccgatccttctccggggagctacaggtacgtcaccgacggcgacgaggcgctgccggagaacgtcgtgctcgacggcaatggcaccgaggtgtaccggaccggggtgtggaacggcaggaggttcaacggcgtcccggagatggcgtcgttcgcggacatgttcagcttccagctcacggtcagcccgggcgaggtcacctacggctacgtcgccaaggccggggcgccgttctcccgcgtggtggtgaccgacgacggcgtggtccggcggctggtgtgggacgcggcgacgcgggcgtggaagacgttcttccaggcgccgggggactcctgcgacagctacgccaagtgcggcgcgttcggcctgtgcgacagcaacgccggcgcgacgtcgatttgccggtgcgtgaaggggttcagcccggcgtcgccggcggagtggtcgatgagggagtactccggcgggtgccgccgggacgtggcgctcgactgcggcacggacgggttcgccgtgctgcgcggggtgaagctccctgacacgcgcaacgcgtcggtggacatgggcgtcaagctggacgagtgcagggcgaggtgcgttgccaactgctcgtgcgtggcgtatgccgcggcggacttgagcggcggtgggtgcattatgtggacaaagcctttcgtcgatttacgtttcatcgacaatggccaggacatctaccagcggctagcgaaatctgaaataggtaatttaacctaattttgatttgttggtgttccataaatgtggtggctttatatatccttagggaaattgaatttcttt

SEQ ID NO: 28453 - DNA, 1716 bp, Oryza sativa
  ref <308>: DATABASE ACCESSION NUMBER: AK103895
  ref <309>: DATABASE ENTRY DATE: 2002-08-28
gttcctctcactctctcactgtttcgttctctctctcccattctgtctctccctgtccctctctctttactctccaagcgttgctcctcagtgctcaactgctcacgctcttgttcaacagggagaagatgccgttcaacgcatcggcagcggcgacggctcctccggccaagcacctggtcggcgttcggctcaacgcgatggcgtcaaggttgaggagctgatccgccgtcgacggcgacgggtgctcactctgtcgttctctctctcccatccggcgcgacgccaagggcggctactgggcggcactcaactgggagaagatgcagttcaacgcgccggcggcggcgacggctcctccgaccaagctcctggtcggcgttcggctcaacggcgatggcgtcaaggttgaggagctgatccgccgtcgacagcgacgggagcagtcgatccggcgacctcttcccctccttcacggatcccatggtctctccgctccctcttgcgcggatccgtcgtcggctgcgatgggaggggttagatccggcgacctcttcctctcccgctcggatcccgtcgtctctcagcgccccgctcacgctgatccgtggccggcgacgacgggagggtccagatccggtgtgtccactgtggtcgcggcttccctgccaccgccgcttctgcacgcgcggcccatacaccgcaccctgccgtctccttcttccccgtgttagtatgcctttcatatgtttttaatgtatttgtgctgttcttataatgtagttttgcacttatgatagcgtgttacttgtgcttgcaaggttgggtgggttgtcactgtggttggagctggttgttgagctgattggagtcagagatggtggccaagatggagaggagatgtcacccgaagttgtctcggaagccgcaatgaaggcggagatggaggcggcaaggtggggctgctggcgttggatgttgcactcgcgttcccgcaggccacgacgtcccagttcccgcccgccggtgagacctcctctcttgctttcccggtgttctcaggttctcggtttcccattattttaaataatgagatattatgattgggtgaaactgtcttggccatctaattggagtatttgagagaggtgtgtgcactgtgcagtcggcctttgttgattcgtagttatcttcagtcttgggcagcttaatctggctccaagttggcagcaagcagtccctgttctgaaaactgctctcttacttaagtttgctgaagggatactccttacatcgaagttcattagctacacttctttggttagaaattgctctgttgctgttcaatatgtaccagcaaaataaatatgagaaatcactctagtgcttctaatagggagtcatctttcagcttctattaaacacggaacatttaagaattaccttccatcgtcgtataaatgtagtaaacgcagatgtgtcatgcccaacagggaattgagtagcgtcaagcgggagattgagtatccacaccaattattaggtgtatatatgagtcttgtttgtattttcagtttttttatataggttgagaagatgtttgcatcctacttagccatgtaattcttattcttggattctgtatgtaattcctgggttgtaattattgagccatgtaattgtatatgactctatttgggattcaatcttggtggg

SEQ ID NO: 28454 - DNA, 1844 bp, Oryza sativa
  ref <308>: DATABASE ACCESSION NUMBER: AK103896
  ref <309>: DATABASE ENTRY DATE: 2002-08-28
ggcgttctcctccctccaatccgccatggcggcgcccaagccactgtccccgcgcctcgccgtcccgctcgccattgctctcctcctcgccctcggcctcgtcgccgacttcctctggtcatcatcttcctcctctggcacctccggccgcggccagctcgcctccgcttccaggacggcaacggcgaagaagagcggtagggcgcgcgggaagaagccggcggcggagggctacctcaatgcgacgtacgccgacataccggcgccgcggtgggactgggaggagatgccggcggcgcccgtgccccgcctcgacggctactccgtccagatcggcgacctgctctacgtcttcgcagggtacgagaacctcgaccatgtgcattctcatgttgatgtgtacaatttcacttccaacacatggacggggaggtttgatatgcccaaggagatggcaaattcacatctaggaatagcaacagatgggaggtacatttacgcgctgaccgggcaattcggtccccagtgccgatcacctataaaccgcaacttcgttgtagacacagtgacaaaagagtggcatgaactgccccctttgccagttcctaggtatgcacccgctactcaactttggcgtggacggctccatgtgatgggtggtggaaaagaagatcgccatgaacctggattagagcactggagcttagctgtcaaggatggcaaagcattggagaatgagtggcgaactgagatagccataccccgtggtggacctcatagggcatgcattgttgctaatgataaactctttgtcattggcggtcaagagggagacttcatggcaaaaccaggctcgccgatatttaaatgtgtacggaggcatgaggttgtgtacggtgatgtgtatatgctagatgatggaaataaatggaagcaactatctccactgccaaagccaaattcccacatagagtgtgcatgggttatagttaataactctgtaataattgttggtggaactacggaaaagcatcctattaccaaaaagatgattcttgtcggtgaagttttccggttcgatttggatacactgacatggtcagtcattggccgcatgcctttccgaatcaagacggccctagctggttactgggatggttggctctatttcacttctgggcagcgagatagggggcctgataatcctgctccaaagaaagttgttggttgcacgtggagaacaaaactacacctttgatgtggaaagttttagctgttgttactgtagattatagatcatgaccagctgttgggtgattactgatgacactctctgctggatgattgtgactcagtcatttcttcttcttcctttgtgtagcttaaactttgccggcattgacaggggacctgtcacaattaacaatggctaatcatcaccgcatggaactgacttggtcttatcgtcttatttagtaggatttaattaggcccaacttctccgtggacgcccggtctggcggtggcggatgggcggccggcgatgagctcgccgtcgttgtcgccgctgaggcgagctgctcgcccggtcaccgactaccacctcaaatccatgcatgccgatatatattttctgaaagctcacatcatcgtatgatactaagtagggtcaaaaattaaatttggttcgagttaaaaaatgtagctgttcttgttactgaaaattagatatcatagaactgttgtgttgtatatgaaaactttttagtaatcatggcttctaagctacatcataatcatgtagcctcattatttttactaatgaattcctggtctcctggact

SEQ ID NO: 28455 - DNA, 1306 bp, Oryza sativa
  ref <308>: DATABASE ACCESSION NUMBER: AK103897
  ref <309>: DATABASE ENTRY DATE: 2002-08-28
ggcttctgacagccgccgcatccgcgccgcccccgacctaggatttcgccgccattctcctccaaggagatgccgcgctatgatgatcgttatggaagcacgcgcttgtatgttggtagactgtcttcccgcactcgttctcgtgacctagaataccatttcagcagatatggaagaatacgtgaagtggagttgaagcgcgactacgcatttattgagttcagtgatccccgtgatgctgaggaagcaaggtacagccttgatggcagggatgttgatggaagccgcattcttgttgagtttgctaaaggggttccacgtggtcctggtggttcacgtgaatatatggggagaggacctcctcctggaacaggtcggtgttttaactgtgggattgatggtcactgggcaagagactgcaaggctggtgactggaagaacaaatgttaccgctgtggggagagaggtcacatagaaagaaactgtcaaaacagcccaagaaatctcaggcgtgagagaagttattcatgctctccatcgccacgccgtggacgtggtcgcagtcggagctatagccggagccggagccggagccgcagttacagccggtctaggtccagatccctgtctggatctcccagggcacgcagagagcttgaaagatcaaggagtcttagttacagcaggagtcccaggcgatccatctccccagcagcaaatgaaaagaagcgcagccccacccctgatggtagccgtagtccaaggagtccacaggaccaggtgagcccaccacccaaggataatgctgagcgtaatggctcagatcacggtgacagcccccggggcagggagaacagcaggagcccgtctgatggctaccgtagccctgcagctgccaacgggcgcagcccaagcccaaggaacaatggaagccctagcccaatggacaacggtagccgaagtcctagggatggaaatggtgacggtggtagccgtggtggctcacgctcacctagaccgagcgagtctcctgaagcctgaaatttaatcgcagtctatggcgttcgtcatgctatggttgtaatggttacattcccggtttaagacgagatgagtgtatttgctcttttctcaaaaacgacagcgtattttgttactttgtgaatgtcatgctatggttgtaatagtcacagtcctgttttaagacgagataagtgtatttggttcttttctcaaaacgacagcgtattttgctattggtgtacgatggatggtccgttgaacttccaaatcacattgtttttgc

SEQ ID NO: 28456 - DNA, 2967 bp, Oryza sativa; identical to SEQ ID NO: 26341
  ref <308>: DATABASE ACCESSION NUMBER: AK103898
  ref <309>: DATABASE ENTRY DATE: 2002-08-28

SEQ ID NO: 28457 - DNA, 1893 bp, Oryza sativa
  ref <308>: DATABASE ACCESSION NUMBER: AK103899
  ref <309>: DATABASE ENTRY DATE: 2002-08-28
ggccttcttcgctgggggtggggcgacgaaacttgcgcgatctcccctctcctctcctccgctcgaatctgcgcaggcttcttctacaatctcaaacatggttgttgcaaatggtaatgtcgacacggaggaaggaactcttgagattgggatggagtacaggacagtctctggagttgctggtcctctagtcattcttgataaagtgaagggtcctaaataccaagaaattgtcaatatacgattaggagatggcacaactaggcgtggtcaagtgcttgaagtcgatggggagaaagctgttgttcaggttttcgaaggaacatctggtattgacaacaaatacacaactgtacaattcaccggtgaggttctaaaaactccagtgtcactggatatgcttggacgtgtcttcaatggttctgggaaacctatagataatggcccaccgattttaccagaggcttacttggatatttctggaagttctatcaatcccagtgaacgaacataccctgaagaaatgattcagactgggatatctacaattgatgttatgaattctattgcccgtggtcagaagatccctctgttttccgctgctggtctcccacacaatgaaattgctgctcagatttgccgtcaggctggtctggtaaagcgtttagagaagagtgacaatatcttggagagttccgaggatgaaaattttgcgattgtctttgctgctatgggagtaaacatggagacagcacaatttttcaagcgtgattttgaggaaaatggttcaatggagagagttaccttatttcttaatctggcaaatgatccaactatcgagcgtattatcaccccaagaattgctctcaccacagcagaatacttggcatatgagtgcgggaagcatgttcttgtcatcctgactgacatgagctcatatgccgatgcacttcgtgaagtttctgcagctcgagaggaagtacctggacggcgtggttatcctggttatatgtatactgatttggcaactatctatgagcgtgctggtcgcatagaaggaagaaaaggatcaattacgcagatacccattttaaccatgcctaatgatgatattacacatccaactcctgatcttactggttatatcactgagggacagatctacattgacaggcaactacataatcgacagatctatccaccgattaatgtccttccttcactctcccggctcatgaagagtgctattggtgaaggcatgactcgcagggatcattctgatgtctcgaaccagctgtatgccaattacgccataggcaaggacgtacaggcgatgaaggcagtggttggagaggaagcgctgtcatcagaggacctgctgtacctcgagtttcttgacaagttcgagcggaagttcgtgacacaaggagcatatgacacacgcaacatcttccagtcgcttgacctcgcctggtcactactgcgcatctttcaccgagagctgcttcaccgtataccagcgaaaacccttgaccagtattatagccgtgatgcctcccactgatctgcaaagggtcgtgtgtaataagaaaaaaaaccatcccggactcccacttcttctctttcatttttgccaccaatgcattcattattttttgtgtaaaaaacacgaattatctagtgatgtgggcttccatcattgttgtcccaagcacaccatgtatcatatttatcttcttttttggaagaaaatgtattattttcttgccgtggaaaaatgaataagtgaggacgagtgagctagggatttggttaatgtaagaacacaatgaaataagccatttgcctcatggttttcgcctgtcaattgagtttcagaccctcttggcttcg

SEQ ID NO: 28458 - DNA, 1314 bp, Oryza sativa
  ref <308>: DATABASE ACCESSION NUMBER: AK103900
  ref <309>: DATABASE ENTRY DATE: 2002-08-28
gagctaagagccgtcgctttatctcttttctcttcttcttcttcccttgtactcctccgatccccaatctcatctatcaccacctgacctgatctttccctgcagatctcattgagaaagagaagagaagagatattcttttttccaaagaagaaaatcttggccgcgcgcgcgagatctttgcgcaaaagatgatatatgatgcctgatcgatcttctcgtttcggatcttattattgctcggctaattagtattattaacgctgctagccagggcctttgatccgcgtggtcgtggtcgtcggtgaggcagccgggcaggccgactcccatgcatggaagctcgcttcagggtcaagtcaactgattatgtttttcattaatttgttggtaattaatttttttatatgtacgtacatatatatatagctcggatggtttggtatttctttctcagatctatatatattgcaaggggatcggagtgtcgttagttacacggtatttattatagagtttttgggatagagagagatttctgactattagctagactagactgaaggcttttgtttcttttcttctttgatttgatctgatctgttcaatggagaacatttttatggaagccgagggcaggggatagctagccggaggtgctcctagtccgtgatatggaaggggctatatattcaactgcaacgctattggtcctccaatccattttatctcggcccctgaaactcaagttgttttgatacaattacaattaataatcaacaactgggtggttgtggtgaaaactctcagcattgcaagaccaatgcccctcagcctggacagcacaaaggcacattacaccatgatgatggcgcccactaaataaatttgttaccacctaccatttttcatcgttgtgtgtttggattactgagcgtgaacaaaggggtcctatatatctgttggactgagcagggaaagatagatagtacttgagggggatggtgctctatctttgttggattgtactgtcttactgattagcgatttctattcatgtgtcggttagctcaatagctgttaaactttatatttgataactattttatatatattttgggctgataatactaggacttctttgggaggagggcttagctattcctcaagtttagagttagttttgttaagatcacagtagttggattttcttgacgatggctcattgactactgtattttattacaactagctttctcatgtaacttgagttggatcattgatgatattctgtttgtttgatttttgacaatg

SEQ ID NO: 28459 - DNA, 1708 bp, Oryza sativa
  ref <308>: DATABASE ACCESSION NUMBER: AK103901
  ref <309>: DATABASE ENTRY DATE: 2002-08-28
ggctgctacttccactagggtttcgtcttgcttctcccgctgctcgcctcgcctcctcgacgatctgagatcatcgagatcgattgagtggagctaggcggcggctagggcgagatggcgctcgtattgcatgctggcagtggaaacaagaatgcattcaaggcactcattgctgccgagtactctggtgtcaaggttgagttggtgaagaactttcagatgggtgtctccaacaagacacctgagtttctcaagatgaatcctattgggaagattcctgttctagagactcctgatggtcctgtttttgagagcaatgcgattgcacgatatgttacccgctcgaaggctgacaacccactctatgggtcttcactgattgaatatgcccacatcgagcagtggaatgacttttcggccacagaggttgatgctaatattggaaaatggctctacccacggctaggaattgctccctatgttgctgtgagtgaggaagcagctattgctgctttgaagagatcattgggtgccctcaacacacaccttgcatcaaacacataccttgttggccattcggtgactcttgctgatattgtgatgacctgtaacctctacatgggctttgctcggatcatgaccaagagttttacttctgagttccctcatgttgagaggtacttctggaccatggttaatcagccaaactttaagaaagtcttgggtgatgtgaagcaggcagagtctgtcccaccagttcaaaagaaggctccaccaccaaaggagcagaagccgaaggaagccaagaaagaggctccaaaacctaaggcagttgagaaaccagaggaggaagaggaggcaccaaagccaaagccaaagaaccctcttgatttgctccctccaagcaagatgatccttgatgagtggaagaggttatactcaaacacaaaaacaaatttccgtgaggttgctatcaagggtttctgggatatgtatgacccagaaggttactccctgtggttttgtgactacaaatacaatgacgagaacactgtgtccttcgtgaccatgaacaaggttggtgggttcctgcagcgaatggacctgtgccgcaaatatgctttcgggaagatgcttgtgatcggctctgagccgccattcaaggtgaagggtctttggctcttccgtggccccgagatccccaagttcgtcatggatgaagtctatgacatggagctctatgagtggaccaaggttgacatctcagatgaggcccagaaggagcgcgtcagcgccatgattgaggacctggagccatttgagggcgagtcgttgctggatgcgaaatgcttcaagtgaggcgtcgttggagcaaggataccgtggaaaatgagctatttaggttttggatttacccttctacaatagttcatgattatgaaaaaaaaaatactatcaccatgtggctatattagtcaatattgagtgtgctggtcttttctttttgtactgtttgctagagttttggccctttttaaccttgtagttaagttgttaagacacttatccatcgaatcatcgtcagaaacacaccattcgaatctgctgttgctcatgtgttaaacttgccattctgataatgttttggaaataggcaacaaaacgagttatggtgctgggttattttatgtattttattctgttgtcc

SEQ ID NO: 28460 - DNA, 1197 bp, Oryza sativa
  ref <308>: DATABASE ACCESSION NUMBER: AK103902
  ref <309>: DATABASE ENTRY DATE: 2002-08-28
gacgggagagggaagagacagaaaccccgaaaccccccaaaggttcccacttcctcccacccgcccaaacccatcctccgccgccaacgcgccgagagcaaaaaaagagaagcaccgggatgctgtacatcgtggggctcggcctcggcgacgagcgcgacatcaccgtgcgggggctcgacgccgtccgccgctgcgccaaggtctacatggaggcctacacctccctcctttccctcggcctcgacccctccgcgctctccaacctcgagaagatgtatgggaaggagatcacggtggcggaccgcgagatggtggaggagcgcgccgaccagatgctccgcgaggccgccgacgcggacgtcgccttcctcgtcgtcggcgaccccttcggcgcaactacacacactgatctggtggttcgcgccaagaacatgggggtggaagtgaaggtgatccacaatgcgtccgtcatgaatgcagttggagtttgcggattgcaactttaccgctacggggagaccatctctatacctttcttcacggagacatggaggccggacagtttctatgagaagattcagaacaatcgacggcttggactgcacacactttgcttactagatattcgtgttaaggaaccaacgcttgagtctttatgcaggggaaagaaagtgtatgaaccaccaaggttcatgtctgtaaacaccgcaataagtcagcttttggaggtggaggaactgcgtgggggatctgcatatggcgcagattcactatgcataggtgttgctcgccttggaagtgatgatcagaagatcgtcgctggacctatgaagaaactactagatgtcgatttcggcccaccccttcactgccttatcatagtgggagagacgcatcctgtggaagaagagatgatagaattccacatgatcaagtcatgatgaatgaaagtgcttttatggccttgtagctggatacatgatcccaggcttatagctcccttgaaacgatacttcgatgcttccgcccgccgtgaaaggtccaccagtagtagtttactgctccaattgttgctcatttttaagttaaactgggatcagctgttgttctttttttggcctgataccgaatactctcaaaccagtattgaaccttgtttacattgtgtgagctcatatttgaatgtgttcgtgc

SEQ ID NO: 28461 - DNA, 2571 bp, Oryza sativa
  ref <308>: DATABASE ACCESSION NUMBER: AK103903
  ref <309>: DATABASE ENTRY DATE: 2002-08-28
gagcttaagcctcgaagagatggctatggcaatggcggcttcgctcgcggcgcaccaccacctcgccggcggcggcctcctccccacgccacgagcgagcgggaggaacggccgcagcggcatcaccatatccatgagagcgcagagcggtgactctgggagtgggaagggagacggcggagacgggcgagtcagcggtcggcggcgagtgtggcgtcgccggaaactggtatgctctctggccgaactaagggagtaggtctcctcctatatctccgcgtggttgattgttttggacggaactaggacggcatggacgacgttctcgctgaataatctgcgagcctccgttttggaatgcgcatgccatttgcctttctttttacatgagattgggaaggtagagcggggtcagttgtgttcaggagagagaagcgtcggatgtgtccattactccattatcatgtggtatcaaacctcggaaacccttttttgagttgcgaggattatgtgatgcgatatttcatttgcacctgttttggttcattatggagctcttgcttgcatagattttcgtttaaaggaatcctgaggcttcatgggggtgggatagatgaaagcatcattttttttttggccaaataaggcaattattttaggttgtttctaaacaataagtcacaaattgttggtacaagaaacttcctttgcccttgtagtgtttttctcatgtgattccatgacatttgctattcagtattatgctcaaaatatgaagtcacagattgttagtatgatgcagcatgctctggttgtccttcatctttgtagtgtggctcttgtggttacattggtggctgctagcagtgtcagagcatgagacaaacacaaaaaagtattcaattatccaaatcattttaaagttttaaataaacatcaactgataattagaattggacattgttgttgttcatcgttagttcacatatatcatatcagagtaactgtacgtatgtattaactctattaagtattccaaaaccactgtaaacacagtactagcataaaaggggagcatgaaaaattgaagggcttatttggtttggtaccctaccaaaattttagtagtgccaaaacctaggcaagttttggcactaccaagattttggtagggtagcacagtaaatatgagtgtttggattagtgccaatgaagtgccaaatttttatgggtcaatttccatttggattggtaccaatgaaggatcaccaaattttttttttgtgctgtaatagctttggtactatttgctgcagaataagcagagcggtgaggcggccagccgaggagacgagtagtggctgggtatttattgaagtagagaaaagatgaagccctagcttttttttttttgaacagaagtgcgtgaactagtttgggctgagccaagttgtgtagcctgcttctgggcgcttccggcgggtgacggatggctgccaattccagcctatgccttgctaccaaattaagcctaggcactaccagtgatttggtcacaatccaaactctcagtggtactgttctgataaccaaaatattggtatggcccagttttgatagcaaaccaaaacggcccgaaaagtagcgctgattgaaggcacgctattcttttggtcagattattaaaatccacaattatgtttttgtaactataggttgctaccttctatgtgtattagcaagctataggcaagacagacatcttcacatcttttgtaagggaccttttcttgaacttgaaactagaaaacacatgatcaccactagctcgaccaaaaaaatgagctagtttgttacacatggaaagtgcctcatgtggaagaatgaaataaagagctgtagaattcagtaatttaaataggacaataataatgcatagattcaagaatacatgtctacgttcaaccttttgagcaagggagactggaactgtgccccaccacttgctattagcttgtcagccttcgtttattttatgtcaaccaagtatcatattcagcatggcatgaccatgcccaacagttaagcaggctgccaggcagttgtatgccagccatgtcttcattgtttgcatcactattgagcatgtcaccacataaaaacattcgaaaaggtgacattgggtgttgttgccatgctttacttcacattcttttctgatttccatgtatataattgatatatgcgtccttgcagaccaaagaggatgacatgttgcggtacaagttgaaacgtgtccctttcttagaagagaaagtgagaaaagttagggaaaatgggaagatcatatgcttggacatcaaccagctgatgttatctgaagagaatagatttgctttcacaatagaggtggctgaggaagctaactcttatcttgaaaagaacaggcatgagtatggactgaaaaaacctatactacatgtgctcagtgaccgcatgaatgaagctgggttttctcggccggaaggctacctttatccttatcctattaagcctggtccttattttatt

SEQ ID NO: 28462 - DNA, 1238 bp, Oryza sativa
  ref <308>: DATABASE ACCESSION NUMBER: AK103904
  ref <309>: DATABASE ENTRY DATE: 2002-08-28
ggggctcatctctctctctctcactcttctccctcttctcaccaccagacgccatcaaacccctacctcccgcggcggcggcggcggcggcggccggcggcgagctccggacagacagaggagggcgcgagcggagagggcgaggagggaaggagggagggaggcgacaggcatggggaccctcgggcgcgcgatctacacggtggggaagtggatccgcggcacggggcaggccatggaccgcctcggatccaccatccagggcggcctccgcgtcgaggagcagctttcaaggcatcgcacgatcatgaacatatttgagaaagagcccagagtccacaaggatgtttttgttgctcccagtgcagctgtgattggcgatgttgagatcggacatggatcctcaatctggtacggctccattttaagaggtgatgtcaacagcattcatattggatctggatcaaatatacaagacaattcccttgtacatgttgcaaaagctaacatcagcgggaaggttctcccaaccataattggaaacaatgttacaataggtcatagtgctgttctgcacgcatgcaccgtcgaggatgaagcttttgttggtatgggtgccactctgcttgatggagtggtcgttgaaaagcacagcatggttggtgcaggatcgcttgttaagcagaacacaaggattccttctggagaggtctgggtcggtaatcctgccaagttcctaagaaagcttactgaagaggagatagcgttcattgctcagtcagcaacgaactacatcaatctggcccaagtccatgctgccgagaattccaagaccttcgacgagatcgagctcgagaagatgctgaggaaaaagtatgcccacaaagacgaggagtatgattcgatgctcggcgtggtccgtgagatcccgccggagctcatcctcccggacaacatcctcccaaacaaggctcagaaggctgttgctcactgaatgttttgtcaagctcccgcttgggaaaagcttggtttttttgttacgtgttttgacctggaacaacatttgacacatgtcttttgatctcattgtctgtttttcaagcccaataagaatttgggtcgagcattgttttaggatcgaccatatacagtacctctctttgcattacaatgaagagcagttaatttgggtcactttttacatctttactgaagtagaaacgcgtcctctgtctgtg

SEQ ID NO: 28463 - DNA, 2453 bp, Oryza sativa
  ref <308>: DATABASE ACCESSION NUMBER: AK103905
  ref <309>: DATABASE ENTRY DATE: 2002-08-28
gcttcctcactaccaccttctcgttgatcctcctccccgttcttggctcccctcgcattcgtcctcacttcccttcttccatgggggttcgccgccgtgagtgaggaggaggaggagtagtactaggaggaggtgaggccatggagagggtggaggatccggacctggaggacccgaacccggacgtgggggagctgttcagccactacgacgggctctacttccgcggcgcgctcgccggcgccggcttctccgtccagtggagctcgccgccgtcgcggatggccggttcttttggatcgtgtaccttcggaaaaccggataataccataacattgtctgaaactgtgctgaaatatcgctcaagtattgatatgaagaatgcattgctgcatcagatgatccatgcaatcttatttgtaaagcatcataggaaggactgccggggtcatggtcctatttttcgtgcttggatgactgctattaacacctgttctattgacgatcaccagagaccacctgatgggtacaatatcaccaccagacatgatttttctccggacaagtccacccgcagcctaagtggttttttgtggaagtgtgaatattgtgggaatacacttgtgagagccacaaacatcggtgctccatctgatgcctgctgcattgagaatgttgacaactgctcaacctgtggcaacatgctttgccactggcataaccacaagatgaactgtggtggcacatacacaaagatgggcacatcaacatcggcagaagttcaaaacaatgttcaaggtacaaaaagatgcccaactgacatgaaaatggccaagtcacaaagaaccatacggaaaccagagtcaccagattcagatggattgcaggagaaagctactgtcatgaaacaaaaagcagaaggcgagcttctcgcacttgtggctggcagcaatttaaaattaacaggaagtaactcttcaaagaagggagtgaagaggcataggcctgaagacactcaagacacaaatgctatgctttctacccctctgaaaaacctgaagctgggcctagacttggtttcatctgggaagcacagggtgtcatctatagttggtagcaataacacaaaatcatcaagaggtagtgcttcaaggaagcaacgcaaacgacattcacctgagaatgttcagaagtccagtgttctgcctgctctctctcaaaagaagctgaaactgaaggaagacctggttgtatcagggaagaacgagcctttatccctagtgaatttcagcaatggaaaatcagcaggaagtaactcatcaaaaaaggtaagcaagcagcatgaacttgaaggagttcagaaatcctgtgttcagcctgctagccctccgagaaaaccgaggcaagatcttgttgcatcggtcaaaaccgagatttcttgtctagccagtcgcagcgatgctaaagtgttgagaggcagctcctcaaaatgtgcaggcaatcagcatgagcctgcagacattcagaaaagcatcgctctgccttctgcctctgaaagtaaactcaagcgacagaatgaaattagctcctcaactaaggcagggatgcaggacaagcctagaggcactcagaaaaccattgatctgcctgcttcccctcaaacaaaactgaagcaatcagtgttgcagaagcaaaagagacagtgcggaactaggaagtcagctaatgagcaatttgccgtgattagtgcttggctgaactactacgagtcagaaggatcaagtggatcaactgagccccttgtaaacaaaagaacagagcggagaaggatagcgaggaataggataacttatacacggtcaaggaagcaaaatgccaggggaaatgcttccatcaagtcccaaccttctgaagatgactcgtctcaagcaaaagctgcagctccatgcttggagattgttgttagcaccccttctgagcaggtggtaaatcaatcccccggatgccagtcccagtcaccagctccatacttggcgatcgttcctttcgacgctgctcatgatatggttccacttcagtcagcagatccacccggtttaactgatgatccaaccattacttctggcataattgatatttcagatgatgactgattttattttcgaattggcattgatcctgcaacaggcaatgctttcgatggatgaacaacatactggatgctaacaaactattggtgttaggctcgcatcattttggaaattgacattgtttttgcatagtgcctaatatagaacagtagctgcttatgagcataggattgcaaattttgcaactcatgttcgaaccacagtagcataaattcttatagtcccagcaggatctcagaagtagactcttatatcttgggcacaaacctctgaattatgatatgtaaaatgcaatttcaatat

SEQ ID NO: 28464 - DNA, 1749 bp, Oryza sativa
  ref <308>: DATABASE ACCESSION NUMBER: AK103906
  ref <309>: DATABASE ENTRY DATE: 2002-08-28
gtgtgtgcatttctacaatcttttgttgcccattcatctgggttttcttctgcttctttttttttcctagagagtacggttttctttgtaattctttaatttgttgcaaccatgaatgtattggcatctaagatcttcccttcccgctccaatgttgccagcgagcaacaacaatcgaagcgcgagaaagcaactattgatgacgctaagaactcgtccaagaacaaaaatcttgaccgcagtgtcgatgagagtgtgcttggaatcattcttggaggtggtgcagggactagattgtatcccctcaccaagaagcgtgccaagcctgccgtgcctctgggtgccaactacaggcttattgatatccctgtcagcaactgtttgaacagcaacatatccaagatctatgtgctgacacaattcaactctgcctctctgaaccgtcacctgtcaagagcctatgggaacaacattggcgggtacaagaatgaagggttcgttgaagtcctcgctgcacagcagagcccagataatcctaactggtttcagggtactgcagatgctgtaagacagtacttatggctatttgaggagcataatgttatggagtttctaattctggctggagatcacctttaccgcatggactatgaaaagttcattcaggcacacagagaaacagattctgatattactgttgctgccctgccaatggatgagaaacgtgcaactgcattcggcctcatgaaaattgacgaggaagggagaatagttgaatttgcagagaaaccaaaaggagaacaattgaaagcaatgatggttgacactaccatacttggccttgacgacgtgagggcaaaagaaatgccttatattgctagcatgggtatctatgtgattagtaaaaatgtaatgcttcagctcctccgtgaacaatttcctggagctaatgactttggaagtgaagtcattccaggtgcaacaaacatcggaatgagggtacaagcttacttgtatgatggttactgggaagacattggtaccattgaggcattctataatgcaaatctgggaataacgaaaaagcctgtaccagatttcagtttctatgaccggtctgctccaatttatacacaacctcgacacttgcctccttcgaaggttcttgatgctgatgtgacagacagtgtcattggtgaaggttgtgttattaaaaactgtaagatacaccattcagtagttggactccggtcctgcatttctgaaggcgcaataatagaggactcattactcatgggagctgactactacgagactgaagcagacaagaaactccttggtgaaaaaggtggcattcccattggtattgggaagaattgccacattagaagggcaatcatcgacaagaatgctcgtattggagataatgtgaagataatcaatgttgacaatgtccaagaagctgcaagagagactgatggatactttatcaaaagtggcattgttaccgtgatcaaggatgctttgctccctagcggaacagttatatgaagtagctgcgtaatatgtgatggggcatcggcgacgagcaccaggcgggcattataagaagaataaaagcagttcaaggcactttattccctttttttttcttctgttcttcctctattgtgttaggataaatgtaatggtagaagcaactgtttttcagatgttttgggagtgaatgataccgtgcttgaattttcc

SEQ ID NO: 28465 - DNA, 1700 bp, Oryza sativa
  ref <308>: DATABASE ACCESSION NUMBER: AK103907
  ref <309>: DATABASE ENTRY DATE: 2002-08-28
ttggcagctgtcaggatcagaatgggggagcattgcaaagcgtctccctgagcctgagctttcagcccctggtggttccaggcccaggcagacgtgtcccaacagttggttcttcttccttgtacatgtctccatcggcttgctcaaccccaccaaatccgccgcgccggcccacggtctccttggctgagatagagattgcaagcgtgctgtgtgttgtgtgttgtcgctggcatggagcttgtggccgaacggatagaccactatgttggcctgtcattggtcacccaagggcaaggggcagcatgccttctgcctttaccaactctcagatgctgcatcccctttctttgggcagactcaatgtggaccagttggtttcttctccttttcttatttataacagcagtgaaccacttcattttaagtccatccatgacaatagttttggataacagttgcagcattttggctcaatgcgtggtttcacatcgtgcagttcgatcgattaaaaatgcacacaatatgctggcaaagaaagagacagaaagatagggcgtgtttgtgttatttttctcaagaacgataggaactgtttgctggaaaatgttttgttaacaatcagggaaggcaggggcatgtcgaagatttcaattaagttgaagttatccttttaaatattgtgcaactaactacgcacttttggatagtgcagttctagttactccatctgattccaaagataggtcgttttttggaaaaaaaaagacaggtcgttttagcttaaatgattttgtgcccttcaattgtactagtaccatattaaaggggatggagcatttatttctgagagagataacatttaagaataataaaaaaatatgcatagaagttctaaattaatttttatttgggaagaactagccttagtctcatcggttgcctatattccctaaagccaaaaaaacttattaggaaataaaaattaacttattttttttatgaaggaagcaaataggtaaaacttattaggaaaaattaacttataggtaaaacttttatatatttgtttgtaacaacttaaaagataacgctaaaaagaaattacgttaaaaatatcttaaaatcgttcggaaatttaaattttggtttttgttttggcttattaggctaaccgatagtgctctaaaactacttgaatttggaatcggagagagtgcaatggcatactttgtacctcaggatggtggtgaagagttttcagttcagtcgtaacacgcaatgtgcgaaaaagcgagatgacaccctctaagtgtcaagtgatatcctcaatctcttttggaaactcaaatgatatcttcactttcatttaacaattccatggtacaagaaaggatgagcagatgtgcatgctcactcaagtaaagttgctggagatgaagaagatgaagaaagagagatcagatcagctttgggagtttgatgcaactagcctagttggtattgggcctgcctcttaaaactaatccaagaactaactcctcaactcgcccacgctgcaaaatgattccgtcaccaaataaaactatatatgcgtaatgcatgctgatcaaagtgccatttgcttttcttttgtcagggaagagattttgtaaaatatgcagtgattgatttgccaaatcaagaccagatgtccatgc

SEQ ID NO: 28466 - DNA, 1938 bp, Oryza sativa
  ref <308>: DATABASE ACCESSION NUMBER: AK103908
  ref <309>: DATABASE ENTRY DATE: 2002-08-28
gaggcgtagctagctagcttcgttagttcagccacagagagagtacatcgtaagtgttcatatagatcagctggcagagaacaacatggccggcagagtgatcgcacaaggatatagggtggtggatgaggagcgccacgctgtaaactataggtcgagtgtgtggggtgactacttcattaggaacccaatactgcctcataactatcgaaatcactggagtggatgacggaaagatgtgatgacctaatagttgaaacaagggaaatgtttgtagacatcctcaatccatttgcaaaaatgaagcttatcgatgcacttcaacgtcttggagtatcttatcattttaaagaagaaatagataactccctagaaagtctagtttctgtgaagtttgcgaatgatgatttccatgcgatctcccttcaattccggttgctaagacagcagcggcgctacatgccatgcgatgcatttaaagaattcattgataaacaaggaaacttaaacggaaccctatgtagtgatacaagagcattacttgctctatatgaggcagcacatcttggaactcctaatgaagaaattctccgagaagcacaggatgaagaggttagaggccagactttacataccattgtatgaagaagataaggaggagtgcaacgagatgatacttgagctagcaaaacttgacttttatttattgcagcgacttcaccgggaagaagtcaaagaaatatgcgagtggtatcatgggctagagtccccacgtgaactattctatgcaaggcataggcctgcagaagcatatttttgggcgttgggtgtgtattatgaaccagaatatgcaaagcctaggaagttgctagcgaaattcatagcaactattacaccatatgatgatacttttgacaattatggactctggaaagagcttcaaccatttgctgacgtgatgcaacggttttgttccacatcccgatcacactttgagaaaataatattaagcaagtttcagctttatacttatcaaatataatttaaagttaggattgatttaagttgtaattttcatggtccacacatatgcattgacataactaagtcaatgatatctctatgaatatcttgtacatgtttccccatgataatttcttataggtgggatgaaaagggtgctgagcaacttggaagatgttacaaggaatatgctcaatttatgtttggcaccatgaatgagattgagggtgcactcccaaaaggaacaccaaggaagaatgttaatgttatcaaagatatagtgttacagaggaggttatgatatggatgtcaggatttcctcaaattgtcaaggattcatgtattgtttctcgactaatggatgacattgttgctcatgcgtttgagaccgaaaggaacaatgttgctaccgctgtaacttgctatatgaaagagtatgacagcacaaaggaggaggccattaaagcactgtggaatgatgtggaaaatgcatggaaagatatgaacgaggagtacctaaaattgacctcaattccgtcttccttgcttatccaggttattaaccttgcacgcatgatggaaacaatgtacaagaaaattgatggatatactgattctgcaatactgaaagaatggatatccttgttgcttgttcagccaataacactctaggtttccatcatatgacttcgctttaatttgattttgatcagagtgtctctattatgaataatcgtgtatccaagcttgcttcggatgatcctatgtaagcagctcattgctgctttattgtcattttccttgtagtgatgtttgtatttcttcatttcaatctcgacattgctgccttatgcagaggagtgtttgtagcatgaattgctaaaaataatatttggcatttgatgtgatcttatt

SEQ ID NO: 28467 - DNA, 1434 bp, Oryza sativa
  ref <308>: DATABASE ACCESSION NUMBER: AK103909
  ref <309>: DATABASE ENTRY DATE: 2002-08-28
ggtacggcgacaccgagccggccgccgccgccgccgcggagcgcacggcgttccggcgagccgagaagcagtacaagctctacaagccgctgaagcccaagggcgggagggcaaggagcaagccaggaggcggcggcggcggcggaggattggaggacctgtccgcggtggtcgacttccacgcgctgctcgctgccgccggcggcggcgggggggagctgcccgccgggatcgggaggcgcgacgtcgccgggttcgacctcttctgcttcttggaccgacctggattctatttcatacctggtgctctatctattgaggaacaatgctattggatcagggaaagcttgaaaaccttcccacagcctcctaatagaactaacctgacagctttgtatggtccaatttttgacttactcactgctgccaaaagtggaaagattttagtcgaagtgggaaatcccaatgaccaagaaagatccgagcagaacagtgatggaagaaaatccaatagcttcaaatttcttgaagacacagagatacacaagggggaggtatgcaggtcaactgcagcaactacccttgttcggaaactccaatggagtacccttggtctgcaatttgattggtcaaaacgcaactatgatgtatcacttccacataacaagattccagacctcctatctgctcttgcaaaaaagatggccattccagccatgccatctggagaggaattcaagccagaggccgccatagtgaactattatggcccaagtgacatgcttggtggccacgttgatgacatggaagcagattggagtaaacctattgtaagcataagtttggggtgcaagtgcatttttcttcttggaggcaaaacgagagatgaagttccaacagcaatgtttctgcgaagtggtgatatcgtattgatggctggggaggcacgggaatgcttccatggtaatgcattttactgaactaaagttgtttttagtggtaatgctaattcaaacaccatatttatcatgttcctatttttatctttcccgtcctcttatcgcaggtgttccacgaatcttcacaggaagtgatcaggcagaaatctctgcgctggttccgcagctatctgctgaagatgactcttttatcttaaactacattcaaaattcaaggataaatatcaacatcagacaagtctactgatcagtcaattcttttgttacagttaagagaatgtgttgtaaaatgctgcctttctgctgcctccccagatcaactcacatagtgcgatagtctgattgattgcctctggagttggagtagaccggttgtggaaagataggaaagttttggatccattttacagtttaatcccttatgtccaaactaaccatgaaaaagattctttgaccatcaaaagggtctcttagg

SEQ ID NO: 28468 - DNA, 1711 bp, Oryza sativa
  ref <308>: DATABASE ACCESSION NUMBER: AK103910
  ref <309>: DATABASE ENTRY DATE: 2002-08-28
gcggtgtcatcaaacttgagtcccacggattgttttgtcctgcaatctggaaattcaatgtttacatggattggcaatgccagttcgtatgaacagcaacaatgggctgcaaaagttgctgaattcttgaagcctggtgttgctgtcaaacattgcaaggagggaactgagagctctgccttttggtttgctcttggtggaaagcagaattacacaagcagaaatgccacacatgatgttgttagagagcctcacttgtatacattctcattgaggaatgggaaactggaggtcactgaaattttcaacttttcacaagatgatttgctgactgaagacatgatggttcttgatacacatggggaagtctttgtttggatgggtcagtgtgtggatgctaaagagaagcagaaggcatttgaaattggccagaaatatgcagaacatgcggcggccttcgaatctctttctcctgatgtgcctctgtacaaagtcgttgaagggaatgaaccatgcttcttcagaacttacttctcctgggataacacaagatctgtgattcatggaaattcatttcagaagaagctttcacttcttttcggaatgcgctcagagagtggatctaagagttcaggtgatggtggaccaactcagagggcatcagcattggctgctctttcatctgcattcaacccatcttcccaaaagaataagggtaatgataggcctaaaagctctgatggtggacccactcagcgcgcttcagcaatggctgccttaacatcagcattcaatccatcagcaaaacccaaaagcccaccacaacgtgcaggtcaaggttctcagcgagcagctgctgttgctgcgctgtctaatgttttgactgctgagggttcatctcaaagcccacgcataggtgatgcagatacagctgaactaactccgtctgctgcatcccctctgtctgaaggagcatcagaattttccgctgataaagatgccccaggagatggggcattatctgagggagggcgaactgagcctgacgtatcagtggaacagactgctaatgaaaatggaggtgaaacaaccttcagctatgatcggctgatatcaaaatctaccaaccctgttcgtgggatagattacaaacgcagagagacatatttgtcggacagcgaattccagactgtatttggtataacgaaggaagagttctaccagcagccagggtggaaacaagaactacagaaaaggaagcatgatcttttctgaagtatgaatctctttcccactacaaaggctgcatgtttactagttttgcttgattggtgacatggtacgtgagaggccatgtttgccagcaatcttggtcatgtttcgaagacgattggccggtggcttactctgccgttatcccaagttttacagggtattctttatttgtacatggtctgctctatgcagcaccaagggcgtcactacattgttccgagctttgttctggttcttgtccatccatgtgtatattatttttaccctcaatttggcacaagcggttatttctagcgaggttttggaatgtattatgcacattgatgttcagacttccacttttttgtttctcttgtattgagattcctggtactgtcatactgtataaatcttcttattgttgagtggtgattatgcatggttctattcttattgc

SEQ ID NO: 28469 - DNA, 1593 bp, Oryza sativa
  ref <308>: DATABASE ACCESSION NUMBER: AK103911
  ref <309>: DATABASE ENTRY DATE: 2002-08-28
gagaggagaggagtagcggacgcggtgccctgttcgcgtacgcaaggaggaattcgccgcggagtcctctccaaacttcgcggggaaaaaaattcggagccgccgagcggcggcggcgcggcggggatggagtaccgcgacaagctggtgctcgcgcccatggttcgcgtgggtaccctgccgtttaggctactggctgctgaatatggtgctgatatcacttacggagaagaaataatagatcataagtttttgaagtgtgaacgtgttacaaatgaatctcttggtactactgattttttggagagagggactgatactgtagtattccgtacttgcccacaagaaagggatagggttgtattccaaatgggaacatctgatgctgtgagggcactgaaagctgctcagcttgtgtgtaacgatgttgctgctatagatatcaacatgggttgtcccaaatctttctctcttagtggtggaatgggagccgcattactctccaaacctgagcttattcatgatattttgaccacattgcggaggaacttggacactaccgtgacatgtaaaatccgtcttctgaacacacgccaggacactgtggagttggctcgccgagttgagaagattggtgttccagcccttgctgtccatggaagaaaggtcaaagacagaccaagagatcctgctaagtgggatgagattgcagatgttgtgtctgcactgtcaattccagttatagctaatggagatgtatttgaatatgaggattttaaaagaattaaagatgctacaggtgccgcttctgtaatggttgccagaggtgccatgtggaatgcctcaattttttgtcccaaaggaaaaacaccttgggaggatgtcaaaagagagtacgtgagaaagagtattttgtgggacaatgatttgaagagcacaaaacaaaccataaaagaaatgataatgcactattcttgccttgaattccctgaaggaaaaggtgtgaacaagtgtgatacaatagctgatttagcgaaactatatggggaagagtactacaatttcgttctttcaaataggaattgaacaccttgattttttctaacatccatgttacacagcccctgcctggaatccataccagttttatgaattggtttggaaggatctaccatattacgaaacaaatactttgcagttttgactgaacttgtactttgtgatctataatgaccaagttattgttatcgttgggtctggagcgccctacatttttgggaagttgttatgacagatgttgttgatgtaagagcactaaagagcttctctgaagcattttgggacatgtatttttggctggattgataatatatatttgatccatgccaggaactaagaacaccattgctttttgttgcttacatattatcactgctaattcagatgccaaggctggggcatgtattatttgttgaaacaatgtactttttattttaaaaaggttcaagtagtcagtagaccttatgatctattgattgtattactcggacgatatcccaaatgctttaattcgtcatggcaaattggcatacc

SEQ ID NO: 28470 - protein, 86 aa, Oryza sativa
MQLLLLTCLLQLIMVTNKAIASQISQIKHFFHCILVVVCPNSSMYLIMSGSPGTELELIPLPLPRSLTRCARSFGCGERYQLTQRR

SEQ ID NO: 28471 - protein, 242 aa, Oryza sativa
MVLVGVGVVVSSYGEIHFNIIGTLYQVTGIFAEALRLVLTQVLLQKRGLTLNPITSLYYIAPCSFIFLFVPWFLLEKPEMDVSQIQFNYWIFFFNAVAAFALNISIFLVIGRTGAVTIRVAGVLKDWILIALSTIIFPESIITSLNIIGYAVALSGVVMYNYLKMKDVRANQLPADIAPDRATKDKKISNIYKPDNFMDSNDETTVGSLASEGAGVDEEAPLIPSSRLSYVTRTQTGSFNSR

SEQ ID NO: 28472 - protein, 44 aa, Oryza sativa
MRMSRPKKRNRRRKARNKKTTRMSKLGWKRQNRLSLTNLRPWTH

SEQ ID NO: 28473 - protein, 162 aa, Oryza sativa
MSDSEEHHFESKADAGASKTYPQQAGTIRKNGYIVIKNRPCKVVEVSTSKTGKHGHAKCHFVGIDIFNGKKLEDIVPSSHNCDVPHVDRTDYQLIDISEDGFVSLLTESGNTKDDLRLPTDDTLTNQIKNGFGEEGKDMILTVMSAMGEEQICAVKEIGAKN

SEQ ID NO: 28474 - protein, 208 aa, Oryza sativa
MATAYAPMASQLMKSSLVCSKPRGLSGASLTRRPRFTAKAIQSEKPTYQVVQPINGDPFIGSLETPVTSSPLVAWYLSNLPAYRTAVSPLLRGIEVGLAHGYLLVGPFALTGPLRNTPVHGQAGALGAAGLVAILSVCLTMYGVASFGEGEPSTAPTLTLTGRKKEADKLQTADGWAKFTGGFFFGGISGVLWAYFLLYVLDLPYFFK

SEQ ID NO: 28475 - protein, 65 aa, Oryza sativa
MDTQVKLAVLVKVMGRTGSRGQVTQVRVKFLDDQNRLIMRNVKGPVREGDILTLLESEREARRLR

SEQ ID NO: 28476 - protein, 264 aa, Oryza sativa
MCWKLIAKHVQTAIWIKPEDQSCRQKNADTKLLNICDSYDNSPPSWKIPLMNCVRLNKDQSNMQKLPSRPDRLSFYSRSLEMIGVTPEKFAKNNKFWRDQVSMYWSFLGVEKTSIRNVMDMNANIGGFAVALSNDPVWIMNVVPHTMSNTLPVIYDRGLIGSYHDWCEPFSTYPRTYDLLHAFHIFSHYQSRKEDCSLEDIMLEMDRIIRPEGFIIIRDENAILSGINDLAPKFLWDVTTHMLENEESKPEKVLVCRKKFWSIV

SEQ ID NO: 28477 - protein, 205 aa, Oryza sativa
MGEESPAAGGGAAAAAAGKPSGTALPRRGKSCKGCLYYSSMLRSRGFNPVCVGIPRSIPQVPSYVVDEPREEAAAQGHDLRQFKYACAGYSMFVVDNKDGRSGEKEGKTLLPYCQGLELLVDSRLVEKKSPNNEPATASYRKEAATSSRQQGQRPGQLTGQDFYARFRKSAGLVASGVAKNLNKTAIYIKENVADILYPDRRPPK

SEQ ID NO: 28478 - protein, 338 aa, Oryza sativa
MVKDTAYYDTLGVSVDASPAEIKKAYYLKAKQVHPDKNPGNPDAAQKFQELGEAYQVLSDPSKREAYDKHGKEGLPQDNMVDPAAVFGMLFGSDYFEDYVGQLALASIASVEVEENLNSQEARGKVQEKIKELQKEREQKLIQSLKDRLQPFVDERKDEFVNWANGEAQRLSHAAFGEAMLTTIGYIYVRQAARELGKSKLYMGVPFIAEWVRDKGHCIKSQVNAASGAIALMQLQEGMKKMEESDNKEDQIMKSFEEKKDAMLSYLWKINVVDIESTLTHVCQAVLKDASVPKDVLKLRARALKKLGTIFQGAKSLYHRENSLQVETSPRQGAATSN

SEQ ID NO: 28479 - protein, 282 aa, Oryza sativa
MLAHSLAINPSRAARCPVTSRASSAPLGLVSSLAFSRGRKESVKLFINVDRYTKYSTPFCYAPRNARITPLATASFGDTADSSTPIFPRIHVKDPYQRLGISREASEEEIRAARNFLINKYAGHKPSVDAIESAHDRIIMQSFSDRKKPKVDLKKKYRELTQSRPVKAIQGRFQTPSSKVIWQTAITFVLLGVLTLVFPTEEGPTLQVAISCAANIYFIYQRLKSGWRTFFYGFGSFFASWFLATFLMVSVIPPILPGPRNLEVSTACVTYALLFVSSAFLK

SEQ ID NO: 28480 - protein, 358 aa, Oryza sativa
MSGRGIPSKDQISRLISRIQEEVEVVRTHGHLLARVLQEIGKVLLLLAQRAEYQISTGTEARQVTGTVTPAQLKNFALCLHLQDVHTRISSIVSTLPNVTSEKLSKSLEAIYTVACDSVSPLFKEMFDRLGSCILKMHEQDFGTHGMDATMDNNASAYMEELQKCAVHFRSEFLSKLLPSSSSRSETICTIMVRSMASRVLILFIRHASLVRPLSEAGKLRMTRDMAELELAVGQNLFPVEQLGAPYRALRAFRPVLFLETSQLEKSPLLQDLPPSVILHHLYSRGPDELQSPLQRNRLTPLQYSLWLDSQGEDQIWKGVKATLDDYEMKVRSRGDKEFSPVYPLMLQIGSALSQAKG

SEQ ID NO: 28481 - protein, 109 aa, Oryza sativa
MYSGIVRGKLDQLRRCFEVQFATGRDLTPDQLNNMIDTLSDWLGTSDNLLHQIQEKIKWADTMSEVNKKHQKEFEDKVEEAKKSIKLNNLSRQTSTYGGMTTFSLNLEE

SEQ ID NO: 28482 - protein, 329 aa, Oryza sativa
MSAPSDPAVATHPQAGAAAAASSSSGLTFKLHPLVIVNVSDHHTRVKAQAACSGDGASSAAAGGQPPRVFGCVIGVQRGRTVEIFNSFELVLDPVSGTLDRAFLEKKQELYKKVFPDFYVLGWYSTGSDVRDTDMQIHKALMDINESPVYLLLNPAINLSQKDLPVTIYESELHVIDGSPQLIFVRANYTIETVEAERISVDHVAHLKPSDGGSAATQLAAHLTGIHSAIKMLNSRVRVIHQYLVSMQKGDMPLDNSLLRQVSSLVRRLPAMESEKFQDDFLMEYNDTLLMTYLAMFTNCSSTMNELVEKFNATYERSTARRGGRGAFM

SEQ ID NO: 28483 - protein, 372 aa, Oryza sativa
MTNRKDLLDEALLRPGRLEVHIEINLPDENGRLQILQIHTNKMKESSFLSPNVNLQELAARTKNYSGAELEGVVKSAVSYALNRQISMDDLTKPLDEESIKVTMDDFVNALHEITPAFGASTDDLERCRLRGMVDCGKAHRHLYERGMLLVEQVKVSKGSPLVTCLLEGPAGSGKSALAATVGIDSDFAYVKIISAETMIGFSESSKCAQICKVFEDAYKSQFGIIILDDIERLLEYVAIGPRFSNIISQTLLVLLKRVPPKGKNLLVIGTTSEVGFLESIGMCDVFSVTYHVPKLKKEDATKVLRHLNVFDEADIDAAAEALDDMPIKKLYTLVEMAAQGPSGGSAEAVYGGEEKIDINHFFSILSDIIRY

SEQ ID NO: 28484 - protein, 46 aa, Oryza sativa
MSCPMLNHEGFSKRTGSCPTEPGSQVVEMVKSMEKLQSSCLLLHYD

SEQ ID NO: 28485 - protein, 128 aa, Oryza sativa
MASRAFLLVALNLVLFFTVASACGKYCPTPSTPSTTPSTPSYNTKCPKNALKFAACADVLGLVSAEVGQPPYEPCCGVLGGLADLEAAVCLCTAIKANVLGITLDIPVKLSLLVNYCGKNVPSGFICA

SEQ ID NO: 28486 - protein, 115 aa, Oryza sativa
MSDLDVQLPSAFDPFAEANAEDSGAGPGAKDYVHVCIQQRNGRKSLTTVQGLKKEYSYNKILKDLKKEFCCNGTVVQDPELGQVIQLQGDQRKNVATFLVQAGIAKKDNIKIHGF

SEQ ID NO: 28487 - protein, 70 aa, Oryza sativa
MLLKSRAHLLARERNAWDATRQSIQLKGLLSITPCITKAASSAVMEDAPLAPQITSHTKGSSIASTTIFS

SEQ ID NO: 28488 - protein, 305 aa, Oryza sativa
MVENSVEFGSPDKRSGGLLNSALVALVYVVLIAVVLQRLPISFSQHSAGQLRNRKNSNSGGAKVSESTDIVTFADVAGVDEAKEELEEIVEFLRNPERYIRLGARPPRGVLLVGLPGTGKTLLAKAVAGEAEVPFISCSASEFVELYVGMGAARVRDLFARAKKESPSIIFIDEIDAVAKSRDGRYRIVSNDEREQTLNQLLTEMDGFDTNSAVIVLGATNRADVLDPALRRPGRFDRVVMVEAPDRFGRESILKVHVSRKELPLGKDNTSSSNSLNCTSSEVRNSRPSQDPCDAVYIYVPLHDP

SEQ ID NO: 28489 - protein, 52 aa, Oryza sativa
MPAHIKSSMFGCALTIPITDGHLNMGTWQGIWLCEHRDNASSRKIVITLNGV

SEQ ID NO: 28490 - protein, 242 aa, Oryza sativa
MMAASFVALVESTGAFIAVSRYASATPCPPSVMSRGIGWQGVGILLGGLFGTANGSSVSVENAGLLGLTRVGSRRVVQISAGFMIFFSILGKFGAVFASIPGPIIAAIYCLLFAYVGMAGVGFLQFCNLNSFRTKFIVGFSVFMGLSVPQYFNEYTSVAGYGPVHTHARWFNDMINVVFSSKAFVGGAVAYLLDNTLQRHDSTARKDRGHHFWDRFRSFRTDPRSEEFYSLPFNLNKFFPSF

SEQ ID NO: 28491 - protein, 40 aa, Oryza sativa
MATYSRDGSASIAKGLGSRAVLAVARKGSHRSREVKDRTN

SEQ ID NO: 28492 - protein, 364 aa, Oryza sativa
MLYNGAEAALLEATTDGMPSSGVDSEIDYDIAVLTNVRHAGDEAGMTYEEYMNSMASLFSRMVDPERHRKVVNIDDPSAPFFAAQGGQDVPVVTYSFENKKADVHTLKYQLSLFETEVLVQTPHGILEISSGLLGRDNIYNILASVAVGVAVGAPLEDIVKGIEEVDAIPGRCELIDEEQAFGVIVDHARTPESLSRLLDGVKELGPRRIVTVIGCCGERERGKRPVMTKVAAEKSDVVMLTSDNPANEDPLDILDDMLAGVGWTMEEYLKHGTNDYYPPLPNGHRIFLHDIRRVAVRAAVAMGEQGDVVVITGKGNDTYQIEVDKKEFFDDREECREALQYVDQLHRAGIDTSEFPWRLPESH

SEQ ID NO: 28493 - protein, 107 aa, Oryza sativa
MNNMVDFAFPYLLQFIREYTSKVDELVKDRIESQNEVRAKEKEEKDLVAQQNMYAQLLPLALPAPPGMGGPPPPMGMPGMPPMGGMGMPPMGPGPMPAYGTPPMGSY

SEQ ID NO: 28494 - protein, 292 aa, Oryza sativa
MYLGAAGGMLFFPSLVKHMGAQSVFFVEAVLGVAWSVIWLKFSSEPPRTDLPKVSMPKVASREKIKAQAGGVVAPRTVKIPWRRIIFSLPVWAIVVNNFTFHYALYVLMNWLPTYFELGLQLSLQDMGSSKMLPYFNMFIFSNIGGVVADHLITRRILSITKTRKLLNTIGFVVSAVALMALPLFRTPSGTVLCSSISLGFLALGRAGFAVNHMDVAPKFAGIVMGVSNTAGTLAGIVGVGLTGSILEGAKASNMDLTNSETWKTVFFVPGYLCIFSSIIFLIFSTGEKIFE

SEQ ID NO: 28495 - protein, 130 aa, Oryza sativa
MEMEAATPVPRSDGRKLARCPRLQMDAKTVTAIEQSTGAAIADAAAAGAEGAGGGMRVKIVLSKQQLKQVAAAVAGGGAFALPPALEQLVSVLKRQHAKKQVAAAADVVVGRRRCRWSPALQSIPEECFS

SEQ ID NO: 28496 - protein, 184 aa, Oryza sativa
MGAWMSRVWFLMFPAKEYKIVVVGLDNAGKTTTLYKLHLGEAVTAAPTIGSNVEEVVFKNIRFEVWDLGGQESLRTSWATYYRGTHAVIVVIDSTDRARINIIKDELFRLLQHGDLEGAVVLVFANKQDLKDAMSPAEITDALSLHSIKNHDWHIQASCAITGEGLYDGLGWIAQKVAGKATTS

SEQ ID NO: 28497 - protein, 262 aa, Oryza sativa
MLGDYKKLGDTIVTVLQECMQQYANSRNSISTHTKEQIDELLSSKQSFKLEKNMPKEDLHIKQAAALVVKLEGNSLFSSGNIAGAAAKYSEALALCPMKSKKERVVLYSNRAQCYLLLQQPLAAISDATRALCLHSPLNRHAKSLWRRAQAYDMLGLAKESLLDAILFINECSQSNDPDLSLKQNKVPDYAERLVKKQMRTAWLFREAALKHGGIHCEGEASDAFGQEADDSEWETASESDAENDATGEADDETEWKNDNQV

SEQ ID NO: 28498 - protein, 310 aa, Oryza sativa
MADDVVEAAASSSPSTQGGGGGGIHVVAKNAMNSSKQFSSALAPVAVLLAVAVGAVSLLPSLAQAVWEVPHLFLLGLVVSYGVFAQKISTGGSGGGGGGGGGDDGARAWNSRYLSDDPLVVVADNAASDDGGGGGASGRPLSLPVRRLKPPPPAPTMPGIESEAGDASDDGIGAETDSSASTAGFWGAAPSPPSVLDAVCRSRKPAATATAAAPSAMSKGFPSYISPAPRCDQSFSDDGEVTDWDDDDDEKADVQDEMAASPQRSYVDHDDYNGDGDELSELAAEVEDEVDRKADEFIAKFREQIRLQRL

SEQ ID NO: 28499 - protein, 250 aa, Oryza sativa
MSYFTCKPNSGLIVDRPVAGLGRTGRLLSHPQYSLTTHSVRFPKLQKQVYPRLVLVAASQKKLPPLCASSGKVNPEAENDPFMESLKKAMDDAKKPRPIQDLLKEQIAKLREQGSGGGGGNRNRRGGSGDSGGPEDESFKESLDELVQVILATVAFILVYIHIIRGEELYRLARDYTRYLVTGKRTARLKRAMQKWRNFSESFMQSEGSQEDQYERAATSKPTWWQQPQKFVHLMEELCRGNWRPHAQES

SEQ ID NO: 28500 - protein, 35 aa, Oryza sativa
MNLCLCLESVCLCVRWSLAMRAVFFFSYVTMRLRR

SEQ ID NO: 28501 - protein, 120 aa, Oryza sativa
MWEMMTAHLIQNHENIKRGEDDKFSLAFARIENHYFVNKGFLPSDSHLLDNVDKIRHIKAFIVQGRYDVCCPMMSAWDLHKAWPEAEFKMVPDAGHSANEVGVAAELVSANEKLKSMFTK

SEQ ID NO: 28502 - protein, 21 aa, Oryza sativa
MYNTLRPFFYYLLSYSQYTNL

SEQ ID NO: 28503 - protein, 46 aa, Oryza sativa
MALCSDLQTYCCAWKDVYPGRVDVSSTSMDETSVGTSFSLHCNSTC

SEQ ID NO: 28504 - protein, 61 aa, Oryza sativa
MSPPPPVAAEVAAAAASRRICTCRLTGSAGAASLCSPVPAPPPFLPRCTTSAQPSLLPTAR

SEQ ID NO: 28505 - protein, 115 aa, Oryza sativa
MGQSMEMGTIHAGDFLRRFCSTLGMNNQAVKAAQEAVQRSEELDIRRSPISIAAAVIYMITQLSDDKKPLKDISLATGVAEGTIRNSYKDLYPYASRLIPNTYAKEEDLKNLCTP

SEQ ID NO: 28506 - protein, 177 aa, Oryza sativa
MFFHIVLERNMQLHPRHFGPHLRDKLVSKLIKDVEGTCSGRHGFVVAITGVEDVGKGLIREGTGYVTFPAKYQCVVFRPFKGEILEAVVTMVNKMGFFAEAGPVQIFVSNHLIPDDMEFQSGDVPNYTTSDGSVKIQKDSEVRLKIIGTRVDATEIFCIGTIKDDFLGVISDPGAAV

SEQ ID NO: 28507 - protein, 32 aa, Oryza sativa
MKEILRLGCSSWSELLHVLLSSISMYGWVLAY

SEQ ID NO: 28508 - protein, 110 aa, Oryza sativa
MSSSEVACTLAALILHDDGIPITSEKIATLVKAANIKVEAYWPGLFAKLLEHRSVDDLILSVGSGGGAAPVAAAAAPAAGGGAAAAPAAEEKKEEAKEESDDDMGFSLFD

SEQ ID NO: 28509 - protein, 84 aa, Oryza sativa
MLRRKVPVTGLKTPFRDGYVRDLAEEILQLSKNGLERRGYKEVGFLREVDAVISSGVTPAERLLNLYETKWQRSVDPVFQELLY

SEQ ID NO: 28510 - protein, 217 aa, Oryza sativa
MTKKLRFTMPFPMLAFPLYLFARSPGKKGSHFNPSSDLFQPNEKKDVITSTASWLAMVGILAGLTFVMGPLKMLKLYAVPYVIFVMWLDFVTYLHHHGHEDKLPWYRGKEWSYLRGGLTTLDRDYGWINNVHHDIGTHVIHHLFPQIPHYHLVEATEAAKPVLGKYYKEPEKSAPLPFHLLGVLAKSLNSDHYVSDTGDVVYYQTDLKTSSSAQSSD

SEQ ID NO: 28511 - protein, 113 aa, Oryza sativa
MGEVKHLCLVKFKEEVLVDDILQGMTKLVSEMDMVKSFEWGKDVLNQEMLTQGFTHVFSLTFASSEDLTTYMSHERHQEFAGTFMAAIDKVVVVDFPVVASKPAPPAAPAAAA

SEQ ID NO: 28512 - protein, 44 aa, Oryza sativa
MKQKIRAEYEGFGGSPDKPLQSNYFLNIMLLIGGLAFLTSLLGS

SEQ ID NO: 28513 - protein, 130 aa, Oryza sativa
MARGVAVAAKGGAGGKKKGSVSFVIDCSKPVEDKIMEIASLEKFLQERIKVAGGKAGNLGDSVTVTRDKTKVTVTSDGAFSKRYLKYLTKKYLKKHNVRDWLRVIAANKDRNVYELRYFNIAENEGEEED

SEQ ID NO: 28514 - protein, 85 aa, Oryza sativa
MGADYYETEADKKLLGEKGGIPIGIGKNCHIRRAIIDKNARIGDNVKIINVDNVQEAARETDGYFIKSGIVTVIKDALLPSGTVI

SEQ ID NO: 28515 - protein, 50 aa, Oryza sativa
MFDTAVLSFPIKIHILSRFSLCVRAIYFVLKIHILSWFSFFKWFDRGVQF

SEQ ID NO: 28516 - protein, 138 aa, Oryza sativa
MADTKTAPAVTLRTRKFMTNRLLSRKQFVLEVLHPGRANVSKADLKEKLAKLYEVKDSNCIFVFKFRTHLGGGKSTGFGLIYDNLDAAKKYEPKYRLIRNGLATKVEKSRKQMKERKNRAKKIRGVKKTKAGDAGKKK

SEQ ID NO: 28517 - protein, 210 aa, Oryza sativa
MMSIVSTASDLMQDFKTGYLTLASPRSMFISQVIGTGMGCVIAPCVFWLFYKAFSNIGTSGTEYPAPYAIVYRNMAILGVDGFNSLPENCLTLCYIFFAAAIAINLIRDLAPHKVSRFIPLPMAMAIPFYIGSYFAIDMFLGSVILFVWEKLNKAKADAFGPAVASGLICGDGIWTLPQSILALAKVKPPICMKFLSRAANAKVDSFLAG

SEQ ID NO: 28518 - protein, 29 aa, Oryza sativa
MINFRSSDALFSWRGAEAIWRPELRRQID

SEQ ID NO: 28519 - protein, 270 aa, Oryza sativa
MLQSGDDAVKESVLSALKGVVRHAGKSVSPVVRSRGCDLLKDLLQADADDVRSSAAKAIGTLCQYMEENETSDLVQTLLNMGTLPDWCTRHGALLTFCSISMHCSSKLCRSMSFPSIVDLLKDSLKDDKFPVREASTKTLGRLLCYQLQSEASTLQLIQLLALALRDDSSEVRRRSLSRLKAAAKINNPALATHLSILGPAIAEALKDTNTPVRVAAERCALHVFQLTKGADNVTIAQKHLNMTGLEVRKIAKLPEESDGSESSDDDKRK

SEQ ID NO: 28520 - protein, 31 aa, Oryza sativa
MTGDGNGIGPGPQETSEAAVIRFSLFVFSFL

SEQ ID NO: 28521 - protein, 247 aa, Oryza sativa
MLALLQRRVLGMVSTGDEPETQTPLKASIASIPPYQKPLKQSVRPPLIPNEDESEKQEVEEGFFTSIGKLIVGAKSSVAEIVGAAFSRKKRLNIHQQQARVRSWPVQESYAIPRDETPPPLDTRTPTPRKNYAFMSKEPEKIHHIRHGRSQFNGWNGDAPQQQQQQQQQQQIHHQQYLQHHRQYSSGPQTFYEPSCEATNEIVFGAVQEVDSKRRAVEIKPMNHGDPQYDQDGLRHRSSYTGYSNNW

SEQ ID NO: 28522 - protein, 161 aa, Oryza sativa
MSNPTTKAECTPEDVFKYVGDNAVFASGSPFSNVTLGNGRQGYANQANNMYLFPGIGLGALLSGARHITDGMLQSAAECLASYITDDEIRKGILFPSISSIRHITARVGAAVVRAAVDEDLAEGRCDVDARDLKSMTEADTVDFVARKMWYPIYSPLVNDK

SEQ ID NO: 28523 - protein, 27 aa, Oryza sativa
MCYRLVVLLWRAMNLDCKVGTLAVASS

SEQ ID NO: 28524 - protein, 22 aa, Oryza sativa
MTLKRISVSVVLLSCPTSLGLS

SEQ ID NO: 28525 - protein, 37 aa, Oryza sativa
MAGILSFPICLGNCSDDPACPAGASRIIQLVASEKDS

SEQ ID NO: 28526 - protein, 143 aa, Oryza sativa
MALAAIYSLFIINKSGGLIYYKDYGSAGRTDTNDSLRLASLWHSMHAISQQLSPTPGCEGIDLLQAHNFDLHCFQSLTGTKFFAVCETGAQNIETLLKVIYELYTDFVLKNPFYEMEMPIRCELFDLNLAQVIQKDRVTLLGR

SEQ ID NO: 28527 - protein, 41 aa, Oryza sativa
MVVRLSGSCKGWYHYLYRLCDKKACRHFACTLCRSGWRWQP

SEQ ID NO: 28528 - protein, 32 aa, Oryza sativa
MYFLSCLFSFNFMYRAAIAVSCEKGNIYYVQT

SEQ ID NO: 28529 - protein, 44 aa, Oryza sativa
MRIAHIIDIRCRAWEMPMWIGLCVTTDKHVLCNCEYWSCTSGIL

SEQ ID NO: 28530 - protein, 336 aa, Oryza sativa
MYRGRLGNGTLVAIRSLKVKRNQSSLSFSRHIETISRLRHRNLVSALGHCFEYDLDDSTVTQLYLVFEYVQNGNLRSRISQGTEGRKLTWAQRISAAIGIANGIQFLHAGMMPGLFGNNLKINNILLDQNHVAKISSYNIPILGEAMKSEKGGPGGKHHTESPLLNDKTDIFDFGVILLEIVSGKPITSLYEVEIMKELMLWAVADEDLVRRRSFADQEVSKGCSDESLRTIMQICLRCLAKEAVQRPSIEDVLWNLQFAAQVQDDWEGDNRSSDGSMVSSSSRITKSSRFQNEQTRSGREKECEDSSARGSVWLQAATEDGNFETGRRQAEDERY

SEQ ID NO: 28531 - protein, 69 aa, Oryza sativa
MPKQIHEIKDFLLTARRKDARSVRIKRTKDAVKFKVRCSKYLYTLCVFDADKADKLKQSLPPGLTVQEV

SEQ ID NO: 28532 - protein, 59 aa, Oryza sativa
MVNRTTVIVAHRLSTIQNADLIAVVKNGVIIEKGKHDTLMNIKDGAYASLVALHSAASS

SEQ ID NO: 28533 - protein, 517 aa, Oryza sativa
MTKDDAVPVAVAPAKRPPINKYAFGCALLASMNSVLLGYDISVMSGAQIFMKEDLKITDTQIEILAGVINIYSLFGSLAAGMTSDWLGRRYTMVLAAAIFFTGALLMGLAPNYAFLMAGRFVAGIGVGYALMIAPVYTAEVAPTSARGFLTSFPEVFNNSGILLGYVSNFAFARLPVHLSWRAMFLVGAVPPIFLGIAVLAMPESPRWLVMRGRIEDARRVLLKTSDSPDEAEDRLLDIKKAVGIPEDASDGEDVVAIVRANKASQGEGVWKELLLNPTRPVRRMLVAGLGLMFIQQATGVDCVVMYSPRVFERAGIKSKTNSLGASMAVGVCKTFFIPIATLLLDRVGRRPLLLASGGGMAIFLFTLATSLLMMDRRPEGEAKALGAISIAAMLSFVASFASGLGPVAWVYTSGIYPVRLRAQAAAIGTGLNRLMSGATTMSFLSLSNAITIAGSFYLYASIAAAGWVFMYFFLPETKGKSLEDTVKLFGKDTDDDDDVDTSRHERKRSTELSAQH

SEQ ID NO: 28534 - protein, 39 aa, Oryza sativa
MPIYWMGGMPYLDMSPRTRTTWQTSRLGMSLNRFKLSQA

SEQ ID NO: 28535 - protein, 287 aa, Oryza sativa
MARSLAALLLLLVAAAGASHAASPAEMYWKIALPTSPMPGAIRDLISPASSAASASKDKEDTVGSVFFLEKDLFPGSKMALHFTRATAGAALLPRGRADSVPFASEKLPEILSQLSIPAGSPTADAMRSTLAVCEAARIASETAPKHKHYCATSLESMVELVASSLGTRDVHAVSTEVVNRAGPTPRQAYRVEAVRPVPVPGGDMVACHRMPYAYAVFGVHGIKGAAYTVTLAGADGTMAEAVAACHGDVDGHGVAVAEAYKRLGVAPGKVAVCHFLPQDDMLWVRN

SEQ ID NO: 28536 - protein, 280 aa, Oryza sativa
MIVGEVANFAAYAFAPAILVTPLGALSIIISAVLADIMLKEKLHIFGILGCVLCVVGSTTIVLHAPQEREIDSVAEVWALATEPAFLFYAVTVLAATFVLIFRFIPQYGQTHIMVYIGVCSLVGSLSVMSVKALGIALKLTFSGMNQLIYPQTWMFTIVVVACILTQMNYLNKALDTFNTAVVSPIYYTMFTSLTILASVIMFKDWDRQNPTQIVTEMCGFVTILSGTFLLHKTKDMVDGLPPTLPIRIPKHDEDGYAAEGIPLRSAAEGLPLRSPRAAE

SEQ ID NO: 28537 - protein, 365 aa, Oryza sativa
MFVVVVLVVCNSKRKGKKESGVDYKGKGTGVRSEKPKQEFSSGVQIAEKNKLVFLEGCSYTFDLEDLLRASAEVLGKGSYGTAYKAILEDGTVVVVKRLKDVVAGKKEFEQQMELIGRLGKHANLVPLRAYYYSKDEKLIVYDYLTNGSFSTKLHGIRGVTEKTPLDWSTRVKIILGTAYGIAHVHAEGGAKLTHGNIKSTNILLDQDYSSYVSDYGLTALMSVPANASRVVVGYRAPETIENRKITQKSDVYSFGVLLMEMLTGKAPLQSQGNDDVVDLPRWVHSVVREEWTAEVFDVELIKQQNIEEELVQMLQIAMACTSRSPDRRPSMEDVIRMIEGLRHSASESRASSDEKMKDSNPPPV

SEQ ID NO: 28538 - protein, 174 aa, Oryza sativa
MAMSPLTTILLLAAAVGATCATSATASAAPLHGIANDLLPEYGLPRGLIPETIASYTFDNDTGDFEIRLTSTCYIWFGSHLAYFEDAIRGRIAYGTITGLSGIQAQKFFVWVSITTIVAHPDQGTAEFRAGFISEALPESDFAEVPVCGAGARLRGAAGLARQLGLQLPTVAEV

SEQ ID NO: 28539 - protein, 199 aa, Oryza sativa
MAEVELPQQEVKLFSRWSFEDVQVNDISLADYLAVNPTKHATYLPHTAGRYSAKRFRKAQCPIVERLTNSLMMHGRNNGKKIMAVRIVKHAMEIIHLLTDANPIQVIVDAIINSGPREDATRIGSAGAVRRQAVDISPLRRVNQAIYLLTTGARESAFRNIKTIAECLADELINAAKGSSNSYAIKKKDEIERVAKANR

SEQ ID NO: 28540 - protein, 480 aa, Oryza sativa
MVKICCIGAGYVGGPTMAVIALKCPAIEVVVVDISKPRVDAWNSDQLPIYEPGLDEVVKECRGRNLFFSTDVEKHVAEADIIFVSVNTPTKTRGLGAGKAADLTYWESAARMIADVSKSDKIVVEKSTVPVKTAEAIEKILTHNSKGINYQILSNPEFLAEGTAIEDLFKPDRVLIGGRETPEGKKAVQALKEVYAHWVPEDRIITTNLWSAELSKLAANAFLAQRISSVNAISALCEATGANVSEVAYAVGKDTRIGPKFLNASVGFGGSCFQKDILNLVYICECNGLPEVANYWKQVIKINDYQKSRFVNRVVASMFNTVSGKKIAVLGFAFKKDTGDTRETPAIDVCHGLLGDKAQISIYDPQVTEDQIQRDLSMAKFDWDHPRHLQPTSPTAFKQVSVVWDAYEATKGAHGLCILTEWDEFKTLDYQRIFDNMQKPAFVFDGRNVVDPEKLREIGFIVYSIGKPLDAWLKDMPAVA

SEQ ID NO: 28541 - protein, 293 aa, Oryza sativa
MLLSWAAKQGWKPTYVDLDIGQGSITIPGCISATPIEKPIDIVDGIPLEMPLAYFYGHPSPSVSPDVYRALMKELAQTLDKQFSGNSESRAAGMIINTMGWVENLGLELLHNSIEIFKANVILVLGQEKLWKMLKDAAKNKPNIDVVKLHKSEGVVPRNPKYRQKTRSFRIKEYFYGIANDLAPHSNVVNFSDVSVYKIGTHQAPKSALPIGAEPVADPTRLVAVNISTDMVHTVLAVSYAKEPDEIVSSNVAGFIHVTDVDIQRKKLTYIAPCPGDLPSKLLIASSLTWYEA

SEQ ID NO: 28542 - protein, 50 aa, Oryza sativa
MAKEKDPMSGIMDLMKNMYEEGDEDMKRTIAKAWSDARSGKTADSVRGLP

SEQ ID NO: 28543 - protein, 360 aa, Oryza sativa
MCSQSPNASYIIPIDPAASGGMNGFLCLSERNCYSIVVTSPVKGFNGIAQNRVLNATYLNPQYHKHIPEPPEGVIIPAKILKPSDFKPFPILWHEDNSRRQPRERPQVSGALSGSVLGEAAHRLVKNSLQIKSGYSAGLLDMPYRGAPYGPGNRPRPAGPLGYERGFVENSYNGHMSRSVPNSHPQFFGDAQANRQNVRILERPNYRNNDSAIHSGMSQLTIQDGPRMHQNNRMQNSGFSPNQPHPNQYAGFPPQRPMQNSGFTPQRPAQYSGFPHQRPVQIGLQHQPAVNGIQPPLPPSAWIGRPISGVPAGVPAKQDPRMAMDRQPKQDNSRSQHDKRQQATKVVYRVKGQGPNGLSE

SEQ ID NO: 28544 - protein, 333 aa, Oryza sativa
MAASLQAAATLMQPAKLGGRASSAALPSRPSSHVARAFGVDTGAAGRITCSLQSDIREVANKCADAAKLAGFALATSALLVSGASAEGVPRRLTFDEIQSKTYMEVKGTGTANQCPTVEGGVDSFAFKAGKYNMKKFCLEPTSFTVKAEGVAKNAPPEFQKTKLMTRLTYTLDEIEGPLEVSSDGTIKFEEKDGIDYAAVTVQLPGGERVPFLFTIKNLVATGKPESFGGPFLVPSYRGSSFLDPKGRGGSTGYDNAVALPAGGRGDEEELAKENVKNASSSTGNITLSVTKSKPETGEVIGVFESVQPSDTDLGAKVPKDVKIQGVWYAQLE

SEQ ID NO: 28545 - protein, 149 aa, Oryza sativa
MEATCFSKTVFGGQPTKPDYRDVPCAVFSIPPLSVVGLSEQQALEEAKSDVLVYTSSFNPMKNSISKRQEKTVMKLVVDSETDKVLGASMCGPDAPEIIQGMAVALKCGATKATFDSTVGIHPSAAEEFVTMRTLTRRVSPSSKPKTNL

SEQ ID NO: 28546 - protein, 244 aa, Oryza sativa
MASVTARTPVAALRSSASLKSTFLGQSSTRLARAPTTRRNVRAEAKGEWLPGLPSPTYLNGSLPGDNGFDPLGLAEDPENLRWFVQAELVNGRWAMLGVAGMLLPEVLTKIGLIDAPQWYDTGKATYFASSSTLFVIEFIPFHYVEIRRWQDIKDPGCVNQDPIFKSYSLPPHECGYPGSVFNPLNFEPTLEAKEKELANGRLAMLAFLGFLVQHNVTQKGPFDNLLQHLSDPWHNTIIQTLSG

SEQ ID NO: 28547 - protein, 41 aa, Oryza sativa
MELVGLGYTGWFVYRYLLFKESRKELADDVDSLKKRIAGTE

SEQ ID NO: 28548 - protein, 506 aa, Oryza sativa
MALYVASHYKNSPNDLQLMADAPAHHLFVLLGPVDESKNQLPDILCVVQVCLEGQISRKSAMKSLSEGRSPSGDQIPWKFCEQFQDNVFPSLSGARIVRIAVHPSAVRLGYGSAAVDLLTRYYEGQMTLFAEDEEENEEPEVRITEAAEKASLLEETVKPRANLPPLLVHLRERRPEKLHYLGVSFGLTQELFRFWRKHNFYPFYVGQIPSAVTGEHTCMVLRPLNSDDIEVNESSKCGFLDPFYQDFRQRFRRLLGTSFRHLNFKLAMSVLASKIDFSDHEPSDYYTNITSKILGDMLSPHDMKRLEAYSNNLVDYHLILDLVPILAHQYFSEKLPVTLHGAQAAVLFCMGLQDKDIGATKEELGIEREQVLSNFIKTMKKLYGYLHNIAGKEIEATLPRLKEIDTAPLKSLDEDLDEAAREVKEQRRAIDEDDVDPKFLQKYAIDADDDEIEKALNGGKISASGVISVKSNKTKADKQEKRKEMKKSKRKGNDGEKSESKKKRS

SEQ ID NO: 28549 - protein, 402 aa, Oryza sativa
MASPMLSAATVPLQGGGLSEFSGLRSSSSLPLRRNATSDDFMNAVSFRTHAVGTSGGARRAPTEAKLKVAINGFGRIGRNFLRCWHGRGDSSPLDVIAINDTGGVKQASHLLKYDSTLGIFDADVKPVGDNAISVDGKVIKVVSDRNPSNLPWGELGIDLVIEGTGVFVDRDGAGKHIQAGAKKVLITAPGKGDIPTYVVGVNADQYSPDEPIISNASCTTNCLAPFVKILDQKFGIIKGTMTTTHSYTGDQRLLDASHRDLRRARAAALNIVPTSTGAAKAVALVLPNLKGKLNGIALRVPTPNVSVVDLVVQVSKKTLAEEVNQAFRDSAANELKGILEVCDVPLVSVDFRCSDVSCTIDASLSMVMGDDMVKVIAWYDNEWGYSQRVVDLADIVANQWK

SEQ ID NO: 28550 - protein, 389 aa, Oryza sativa
METKTNSEGSFFAGPLYDDIGYTVEASKAGYHLKQTGPYTFSCQKLGQILVRIYGEQDAELLPSVLLSLSGEEGYRNNSISGSGGTFSFGNLFPGSFYLRPLLKEYKFTPSAVAIDLNSGESREVEFRATRVAYSAMGSVTLLTGQPKEGVFVEARSESRGYYEEATTDPFGRFRLRGLVPGSIYSVRVVAKDDHRFAAVERASPEYVSIDVGQDDISGIDFVVFERPESTILSGHVEGDDLDMLQPQLSVEIRSAADPSRIESVLPVPLSYYFEVQNLPKGKHLVQLRSGLPSHTHRFESEIVEVDLDKQPQIHVGPLKYKTEERHHKQELTPAPVFPLIVGVSVIALVISMPRLKDLYQSAVGMTTLGSAAAPIKKEPRKTIMRKRA

SEQ ID NO: 28551 - protein, 37 aa, Oryza sativa
MRLENEKMRLENKRLELEVRHKELELELKQKGSGNHA

SEQ ID NO: 28552 - protein, 22 aa, Oryza sativa
MRTCVPAPPVREENKMSLVPSN

SEQ ID NO: 28553 - protein, 411 aa, Oryza sativa
MASVGVVRSSLGFQNETSTSGDADRLPNEMSNMSIRDDNKDIDDIVVNGNGTEPGHVIVTSIDGRNGQAKQTISYMAERVVGHGSFGTVFQAKCLETGETVAIKKVLQDKRYKNRELQTMRVLDHPNVVSLKHCFFSKTEKEELYLNLVLEYVPETAHRVIKHYNKMNQRMPLIYAKLYMYQICRALAYIHNTIGVCHRDIKPQNLLVNPHTHQLKLCDFGSAKVLVKGEPNISYICSRYYRAPELIFGATEYTTAIDVWSAGCVLAELLLGQPLFPGDSGVDQLVEIIKVLGTPTREEIKCMNPNYTEFKFPQIKAHPWHKIFHKRMPAEAVDLVSRLLQYSPYLRSTASEALIHPFFDELRDPNTRLPNGRFLPPLFNFKPHELKGMPMEFLVKLIPEHARKQCAFVGW

SEQ ID NO: 28554 - protein, 395 aa, Oryza sativa
MLAAVRRRRLLLLPLPLRFFSAAAAAASTTTDPKVVSYLISSCGLTPAAAARAAATSPWLPLASPDFASNADAVVALLRRYGFTDADISATVRAFSRILASDPARTLQPKLDYLRSVGITAPLLPRVVSLSPVILHRSIESHLAPLIASLREVLGSDSRIVTALRQMPFAMRCSPKATFLRTLPVLRDVHGLTPSELSKLVASQPGVILLGPGRAGEIVQAVKDAGVEPGSPMFVYIFAAFSKLKAPTLENKFAIYRSLGFGKDDIAVMLRRLPNAAGISEERLKRTVGFLTGKAGLRREDIVAYPNLLSRSLDSHARRCAVLAVLRREGKPEGQHRVPHVLVASLARFMKAYVRRYEGEVPDVLRAINGEIPFEGFGLGELEKKKPQRQEKIRR

SEQ ID NO: 28555 - protein, 106 aa, Oryza sativa
MRAACNCNTCLLLGRSNRRCWSWSRGCCFLSFARVNVGALLFGANCYNIKHTTCIRHFFGYGKKGYPDGGSLMRYLGEKLWFAVKLSLSMSGLLFYFLTATRTGRR

SEQ ID NO: 28556 - protein, 91 aa, Oryza sativa
MHDLLRRHNPCSRIHRRSSPRTVAIGLATDHCLISVHGSGVFFCSSSLLGCSVHLLWISLVSLLHSLPSFIPFLHPSLVNYISGCKPARWS

SEQ ID NO: 28557 - protein, 94 aa, Oryza sativa
MGKGTGSFGKRRNKTHTLCVRCGRRSFHLQKSTCSSCGYPAARIRKYNWSVKAIRRKTTGTGRMRYMRHVPRRFKSNFREGTEATPRKRAAAAN

SEQ ID NO: 28558 - protein, 52 aa, Oryza sativa
MFLPLHSKTHVTLGHSGHHLPVQINWTLLERGCGHCSAVHHSAYNLCNSVTL

SEQ ID NO: 28559 - protein, 290 aa, Oryza sativa
MASSVAAAASTFLGTRLADPAPQSGRIVARFGFGGGKKAAAKKAARPSAPTTDRPLWFPGAVAPDYLDGSLVGDYGFDPFGLGKPAEYLQFELDSLDQNLAKNNAGEIIGTRFETGEVKSTPFQPYTEVFGLQRFRECELIHGRWAMLATLGALSVEWLTGVTWQDAGKVELVDGSSYLGQPLPFSISTLIWIEVLVIGYIEFQRNAELDPEKRLYPGGSYFDPLGLASDPEKKERLQLAEIKHARLAMVAFLGFAVQAAATGKGPLNNWATHLSDPLHTTIFDTFSSSS

SEQ ID NO: 28560 - protein, 478 aa, Oryza sativa
MASAAVAVAPVVSDLVDFLNASPTAFHAVDEAKRRLKAAGFSQLSEREEWAGLQPGRKYFFTRNHSTIVAFAIGAKYAAGNGFHIIGAHTDSPSLKLKPVSKVTKGGYLEVGVQTYGGGLWYTWFDRDLTVAGRVIVREKKDGAVSYAHKLVRVQEPVMRIPTLAIHLDRNISSEGLKINNQNHLVPVLATSVKNEMQKLVAENGSESSESKNTKHHPLLLQLIAKEANCKPDEICDFELQLCDTQPSTVAGAMKEFIFSGRLDNLCMSFCSLKALIESTSSEESLAHESGVRMVALFDHEEVGSDSAQGAGSPAMLDALSRITGSFNSSNSRLLEKAIQRSFLVSADMAHALHPNYMDKHEENHQPKLHGGLVIKHNANQRYATNAVAAFIFREIAERHHLPIQDFVVRNDMGCGSTIGPILASGVGIRTVDIGAPQLSMHSIREMCAVDDIKHSYEHFKAYFEEFTELDSKVKVDC

SEQ ID NO: 28561 - protein, 266 aa, Oryza sativa
MASTIMAPTSRVLAAKTPFLGHPRPSNAPVRDIAAAATGRITMSKELWYGPDRVKYLGPFSAQTPSYLRGEFPGDYGWDTAGLSADPEAFARNRALEVIHGRWAMLGALGCITPEVLEKWVRVDFKEPVWFKAGAQIFSDGGLDYLGNPNLVHAQSILAVLGFQVVLMGLVEGYRINGLPGVGDGNDLYPGGQYFDPLGLADDPVTFAELKVKEIKNGRLAMFSMFGFFVQAIVTGKGPLENLLDHLADPVANNAWVYATKFTPGS

SEQ ID NO: 28562 - protein, 221 aa, Oryza sativa
MAGEGRKLRVYGMALSANVVRVATVLNEKGLDFDLVPVDLRTAAHKQPHFLALNPFGQIPVLQDGDEVLYESRAINRYIATKYKAEGADLLPAEASPAKLEVWLEVESHHFYPAISGLVFQLLIKPLLGGATDTAAVDEHAAALAQVLDVYDAHLAGSRYLAGNRFSLADANHMSYLLFLSKTPMAELVASRPHVKAWWDDISSRPAWKKTAAAIPFPPAA

SEQ ID NO: 28563 - protein, 331 aa, Oryza sativa
MAEYRISIYGRKQSEWDNLASWIVNNELSSENVVWLVQIPRLYNVYKEMGIVTSFQTLLDNIFLPLFEVTIDPASHPQLHVFLKQVVGLDLVDDESKPERRPTKHMPTPEQWTNVFNPAFSYYAYYCYANLYTLNKLRESKGMTTIKFRPHAGEAGDIDHLAATFLLCHNISHGINLRKSPVLQYLYYLGQIGLAMSPLSNNSLFLDYHRNPFPMFFQRGLNVSLSTDDPLQIHLTKEPLVEEYSIAASLWKLSSCDLCEIARNSVYQSGFSHALKAHWIGKNYYKRGPTGNDIHKTNVPHIRVQFRDLIWRDEMRLVYLNNVILPDEVDQ

SEQ ID NO: 28564 - protein, 149 aa, Oryza sativa
MSINPSGEKAESFPAGSRGPRNADKKDYRRDTDRSDVYRPTRREDNRRVARDVEKPEQQRPEPETWRKPVEPPKPEVVAPRFGKGASALELAQAFSKSMSDTVPQSRLTSVPSPKVPQSPGTRDQVGFSRLTDNRALHSSPSQRKINGY

SEQ ID NO: 28565 - protein, 15 aa, Oryza sativa
MIFPCGVNSLSVISV

SEQ ID NO: 28566 - protein, 268 aa, Oryza sativa
MAQSMLVSGANGTVAAASTSRLQPVRPTPFSRLVLSQPSSSLGRAVSVKTVALFGRSKTKAAPARKAEPKPKFKTEDGIFGTSGGIGFTKENELFVGRVAMLGFAASILGEAITGKGILAQLNLETGIPIYEAEPLLLFFILFTLLGAIGALGDRGSFVDDQPVTGLDKAVIAPGKGFRSALGLSEGGPLFGFTKANELFVGRLAQLGIAFSIIGEIITGKGALAQLNIETGVPINEIEPLVLFNVVFFFIAAINPGTGKFVSDDDEE

SEQ ID NO: 28567 - protein, 416 aa, Oryza sativa
MALVLHCGSGNKNAFKALIAAEYTGVKVELTKNFEMGVSNKTPEFLKMNPLGKIPVLETPEGAVFESNAIARYVARLKDNSSLCGSSLIDYSHIEQWMDFSATEVDANIGRWLYPRLGFGPYVPVLEEFAITSLKRSLGALNTHLASNTYLVGHSVTLADIVMTCNLYYGFVRILIKSFTSEFPHVERYFWTMVNQPNFKKVIGDFKQAESVPPVQKKAAPPKESKAKEAKKEAPKEAPKPKVEASEEEEAPKPKPKNPLDLLPPSKMILDEWKRLYSNTKTNFREIAIKGFWDMYDPEGYSLWFCDYKYNDENTVSFVTMNKVGGFLQRMDLCRKYAFGKMLVIGSTPPFKVKGLWLFRGQDIPKFVMDEVYDMELYEWTKVDLSDEAQKERVNAMIEDQEPFEGEDLLDAKCFK

SEQ ID NO: 28568 - protein, 286 aa, Oryza sativa
MGSLSSLAAAAVFLSLLAVGHCAAADFNATDADADFAGNGVDFNSSDAAVYWGPWTKARATWYGQPNGAGPDDNGGACGFKHTNQYPFMSMTSCGNQPLFKDGKGCGSCYKIRCTKDQSCSGRSETVIITDMNYYPVAPFHFDLSGTAFGRLAKPGLNDKLRHSGIIDIEFTRVPCEFPGLKIGFHVEEYSNPVYFAVLVEYEDGDGDVVQVDLMESKTAHGPPTGGWTPMRESWGSIWRLDTNHRLQAPFSIRIRNESGKTLVANNVIPANWRPNTFYRSFVQYS

SEQ ID NO: 28569 - protein, 26 aa, Oryza sativa
MFLMMVLYSSYWWICQKYSAYCQCVW

SEQ ID NO: 28570 - protein, 343 aa, Oryza sativa
MLLHRHRHRLLCCGGGVATAPGRFAGDAIADHQQAAAGAKNAAATSSARQLSWAQVEAMTRGFTSAVVGEGGFSTVYLGRVAGSLAAVKVHRSSERLQRAFRQELDALLRVRHPHIVRLLAFCDQRDEGVLVLEFAPNGNLHEQLHGGGGGGAMPWARRVAVALQVARALEYLHDRCEPQVVHGDVKSSNVLLDAAMGARLCDFGSARAGFSAAVHCPRPRPSALAVLGSPGYVDPHYLRSGVVTKKSDVYSFGVLLLELLTGTQAFRDGMLLTAAVAPKLKGAAAGDVEKLVDERLGCQYNAAEAATVAALAAACIGDNPSLRPSMADVVRTLEKPAQKAGR

SEQ ID NO: 28571 - protein, 408 aa, Oryza sativa
MASSAMELSLLNPAAMRGLSAAKPRVVSSRRIVRFRVASSAAAPPAAKPGTPKKRGKTEIQETLLTPRFYTTDFDEMERLFNAEINEQLNQEEFDALLQEFKTDYNQTHFVRNPEFKAAADKMEGPLRQIFVEFLERSCTAEFSGFLLYKELGRRLKKTNPVVAEIFSLMSRDEARHAGFLNKGLSDFNLALDLGFLTKARKYTFFKPKFIFYATYLSEKIGYWRYITIFRHLKANPEYQVYPIFKYFENWCQDENRHGDFFSALLKAQPQFLNDWKAKLWSRFFCLSVYVTMYLNDCQRTTFYEGIGLDTKEFDMHVIIETNRTTARIFPAVLDVENPEFKRKLDRMVEINKKIIAIGESDDIPLVKNLKRIPHVAALVSEIIAAYLMPPIESGSVDFAEFEPQLVY

SEQ ID NO: 28572 - protein, 469 aa, Oryza sativa
MAVTADVKLEGLRAATDKLDQISENEKSGFISLVSRYLSGEAEQIEWSKIQTPTDEVVVPYDTLSAAPEDLNETKKLLDKLVVLKLNGGLGTTMGCTGPKSVIEVRNGFTFLDLIVIQIESLNKKYGCNVPLLLMNSFNTRDDTQKIVEKYSNSNIEIHTFNQSQYPRIVTEDFLPLPSKGKTGKDGWYPPGHGDVFPSLNNSGKLDTLLAQGKEYVFVANSDNLGAIVDIKILNHLIHNQNEYCMEVTPKTLADVKGGTLISYEGRVQLLEIAQVPDEHVNEFKSIEKFKIFNTNNLWVNLKAIKRLVEAEALKMEIIPNPKEVDGVKVLQLETAAGAAIRFFEKAIGINVPRSRFLPVKATSDLLLVQSDLYTLVDGFVIRNPARTNPSNPSIELGPEFKKVANFLARFKSIPSIVELDTLKVSGDVWFGSGVTLKGKVTITAKSGKLEIPDGAVLENKDINGPEDL

SEQ ID NO: 28573 - protein, 358 aa, Oryza sativa
MSAFVGKYADELIKTAKYIATPGKGILAADESTGTIGKRLASINVENVEPNRQALRELLFTTPGAFQYLSGVILFEETLYQSTAAGTPFVDVLKAGGVVPGIKVDKGTVDIAGTNGETTTQGLDSLGARCAKYYEAGARFAKWRAVLKIGAAGEPSELAVKQNAEGLARYALICQENGLVPIVEPEILTDGAHDIKTCAAVTERVLAAVYKSLNDHKVLLEGTLLKPNMVTPGSDSPKVGAEVIGEYTVAALRRTVPPAVPGIVFLSGGQSEEEASQNLNAMNKLEVLKPWTLTFSFGRALQQSTIKKWGGKKENVAAAQAAFLARCKANSEATLGKYGGAAGDAATSESLYVKGYTY

SEQ ID NO: 28574 - protein, 297 aa, Oryza sativa
MAAAGSLGLLQAPSSFTAAAASRPASRRAPRALFAVRASAAADATKDAVLKAFREKRALKIISGLQNFDRSSVASVVSAADKGGATHVDIACDQDLVKLALELTSLPICVSSVDPSAFRSAVEAGAKMIEIGNYDSFYDTGIEFSSEKILKLTKETREMLPDITLSVTVPHTLSLLDQVRLAELLEEEGADIIQTEGGKCSSPTKPGVLGLIEKATPTLAAAYSISRAVTIPVMCASGLSSVTAPMAVTAGAAGVGVGSAVNKLNDIVAMVAEVKSIAEALGLPSRNVSSNLRTVHH

SEQ ID NO: 28575 - protein, 265 aa, Oryza sativa
MAASTMALSSPAALAGKAVANAKVFGEGRVTMRKSAAKPKPAAASGSPWYGADRVLYLGPLSGEPPSYLTGEFPGDYGWDTAGLSADPETFAKNRELEVIHCRWAMLGALGCVFPELLARNGVKFGEAVWFKAGSQIFSEGGLDYLGNPSLIHAQSILAIWGCQVVLMGAVEGYRVAGGPLGEVVDPLYPGGSFDPLGLADDPEAFAELKVKEIKNGRLAMFSMFGFFVQAIVTGKGPLENLADHLADPVNNNAWAYATNFVPGK

SEQ ID NO: 28576 - protein, 148 aa, Oryza sativa
MGKDSKPKDKGKGKQAAGSSGGDDAGGGGKGGKGKGGKSADGLGTCTYVKARHVLCEKQGKINEAYKKLQDGWLDNGDKVPPAEFAKIAQEYSECPSGKKGGDLGWFPRGKMAGPFQDVAFSTPVGATSAPFKSTHGYHFILCEGRKN

SEQ ID NO: 28577 - protein, 105 aa, Oryza sativa
MRTVALGIVAMACLVAIAHGGNFFQDAEVSWGQGRGKIVDGGRGLDLTLDRSSGSGFQSKSEYLFGKIDMSYRRMRWVQRKFMIYNYCTDAKRFPQGTPAECKLR

SEQ ID NO: 28578 - protein, 402 aa, Oryza sativa; identical to SEQ ID NO: 28549

SEQ ID NO: 28579 - protein, 369 aa, Oryza sativa
MGEITNVTEYQAIAKQKLPKMIYDYYASGAEDEWTLQENREAFARILFRPRILIDVSKIDMATTVLGFKISMPIMIAPSAMQKMAHPDGEYATARAASAAGTIMTLSSWATSSVEEVASTGPGIRFFQLYVYKDRRVVEQLVRRAERAGFKAIALTVDTPRLGRREADIKNRFVLPPFLTLKNFEGLELGKMDQASDSGLASYVAGQIDRTLSWKDVKWLQTITTLPILVKGVITAEDTRLAVENGAAGIIVSNHGARQLDYVPATISALEEVVKAARGQLPVFLDGGVRRGTDVFKALALGAAGVFIGRPVVFSLAAAGEAGVRNVLQMLRDEFELTMALSGCTSLADITRNHVITEADKLGVMPSRL

SEQ ID NO: 28580 - protein, 95 aa, Oryza sativa
MALRALISEIRGMKVREVPGYLKPRLSWENVKKSSDQAVDRYIDKYIETSSPEPLFHVIYGLMAFSYLINLPKERRHLAHLEELERQGAAGAAHH

SEQ ID NO: 28581 - protein, 290 aa, Oryza sativa; identical to SEQ ID NO: 28559

SEQ ID NO: 28582 - protein, 683 aa, Oryza sativa
MPQSVLVDRATSESLIGPDWSLNLEICDILNHDPSQAKDVVKSIKKRIGHKNSKIQLLALTLLETLIKNCGDFVHMHVAERDILHEMVKIAKKKPDYHVKEKILILIDTWQEAFGGSRARYPQYYVAYQELLRAGAVFPQRPDSSVPIYTPPQTQPLRNLPPALRNTERQQEAPESSSTPEVPTLSLTEIQNARGVMDVLSEMLNAIDPGNREGLRQEVIVDLVDQCRSYKQRVVQLVNSTTDEELLSQGLSLNDDLQRVLAKHDAIAAGIAVRVEKPKSVQARGDKSPSIKPEGAKQPDQRSSEAASTVTPFEQLALPAPASSSSSKPPVEPAVGPSIDLLSGDDYFKPEPVNSQALVSVGNPPAASANNTLDLVDMFAQSNVGNNPNPAVTSSMLNSNPSLSEPQLYPSQQTVPPQQPSPYSNGLTSNTMAPYDQPSDINATGSWNSQFAHGMLPPQLPPQLPPQQPPNYGQGQDQSGDLPPPPWETQPAESDQFQPGQPRGLAMPSGQIGGTQSQPVQVQPGQVAPLQPMLTGQPTGMQFQQGFGDQLGAQQTQPLHTQYGGMYPTMQGNQSAGMYPQQMAGDFYQQQMYGGQMAGYGYGQQSGGYYAPNAAYGYGGANELSQGMNGLAVQDNSLYGTSASSSFQQPMRPSRPEDSLFGDLVSIAKTKPSKTAANKAGGL

SEQ ID NO: 28583 - protein, 322 aa, Oryza sativa
MMHAKSESDVTSLAPSSPPRSPKRGGGVGVGGANYYVQSPSRESHDGGYKSSSMQATPVYNSPNESPSHPSYGRHSRSSSVSRFSGTLRDGSRKAGGERKALNDKGWPECNVIEEEGPYEDLAGDTGLSRRCQIVLGFLCFVLLFTVFCLIIWGAARPYEPDVVVKSLTMDDFYAGEGTDHSGVPTKLVTLNCSLHIAVYNPASMFGIHVTTGPIRLLYSEISIGVGQVRRYYQPRKSHRLVTAVVHGNKVPLYGAGGGLMLSSSGGAVPLTLDFDLTSRGYVIGRLVRVTHKVHVTCPIVVDAKKTKPIKFSKKACAVYKI

SEQ ID NO: 28584 - protein, 322 aa, Oryza sativa
MAPTSTFPVINMELLAGEERPAAMEQLDDACENWGFFEILNHGISTELMDEVEKMTKDHYKRVREQRFLEFASKTLKEGCDDVNKAEKLDWESTFFVRHLPESNIADIPDLDDDYRRLMKRFAAELETLAERLLDLLCENLGLEKGYLTKAFRGPAGAPTFGTKVSSYPPCPRPDLVEGLRAHTDAGGIILLFQDDRVGGLQLLKDGEWVDVPPMRHSIVVNLGDQLEVITNGRYKSVIHRVVAQTDGNRMSIASFYNPGSDAVISPAPALVKEEEAVVAYPKFVFEDYMKLYVRHKFEAKEPRFEAFKSMETETSNRIAIA

SEQ ID NO: 28585 - protein, 280 aa, Oryza sativa
MGSVSSLPSKKNSMQPHNTEMMVRTASTQQQSIKGDFQAVPKQGMPTPAKVMPRVDVPPSMRASKERIGLRPAEMLANVGPSPPKAKQIVNPAAAKVTQRVDPPPAKASQRIDPLLPSKVHIDATRSFTKVSQTEIKPEVQPPILKVPVAMPTINRQQIDTSQPKEEPCSSGRNAEAASVSVEKQSKSDRKKSRKAEKKEKKFKDLFVTWDPPSMEMDDMDLGDQDWLLDSTRKPDAGIGNCREIVDPLTSQSAEQFSLQPRAIHLPDLHVYQLPYVVPF

SEQ ID NO: 28586 - protein, 270 aa, Oryza sativa
MARSLAAVLLLLVAAAGASHAASPAEMYWKIALPTSPMPGAIRDLISPASSVGSASKEDTVGNVFFLEKDLFPGSKMTLHFTRATAGAALLPRGRAESVPFASERLPEILSQLSIPAVSPTADAMWSTLAECEAARLAGETTKHKHYCATSLESMVEFVASSLGTRDVHAVSTEVISTLTPTPRQAYRVEAVRPVAVPGGDMVACHGMPYAYAVFGLHGLKGAGGGRVPRGRGRARRGGGGIQEARRGARERGHLPLPASGRHDLGAQLN

SEQ ID NO: 28587 - protein, 21 aa, Oryza sativa
MLPSFPQLCLSCIPACFFGNI

SEQ ID NO: 28588 - protein, 516 aa, Oryza sativa
MASPASRCVLLDPGVPDYVFSIGPTEQGWASIDLKKKRYQGCGRYGPLLAESVKLYVRLAEEHPALSRLAICADKNIIRNIVAEELKKKKASKAAESSSPGLMVPDLAIRAIEFDKIDEISGVTARVEVADKNLMVLSLSFVFTSSKHYLLYDAIHASMSMIPIPNWCCDIYLPSNPLPVRYGDEYALVLFAKNYPYKREGRSTCIDLLYLWTPPKSSSPPTLLPPPPPPPREKMYPNPSGEPWHTRKPRFSKETPASFCHHVKFTSSSHAFWADLTKGVLCCRIKDLLDSFFVHFDFIELPPGCKSDALDDSDTGPAEMFRTMGCSTGDLIKFVSISFDDSVPEDDKTVTEWTLDMGTLQWTKGEELRFGTLWELDDFKKDGLPETEPVYPLLSMEEGDGGDLYFILSRPIMRWEDPAVHHVCRFNMTSKKLVSNPLSWRPDKIVPSGLLGCEFFRHLDSQRLVPDNRKMDAGKVQSWVEMESALEEVDESMQREISRKQMVWSGSQLDLFCQAN

SEQ ID NO: 28589 - protein, 15 aa, Oryza sativa
MRSRLLLSCLVVRVL

SEQ ID NO: 28590 - protein, 350 aa, Oryza sativa
MIEQRSAYLQEQINQPDASPEEYSRANKELHKLESTMDMIEELRSKQEEIEGLKSLMTNSVEEKDFREMAAQELLQALEEEKQLQHKLFRSLLPKDEADERDCILEVRAGTGGEEASLFAMDIFKMYEKYSQKNGWKFDAIDIMESALKGYKEASGTISGPGAYGKLKFESGIHRVQRVPVTEKSGRVHTSAVSVAILPQADEVDVQLRNEDLRIDTYRSGGSGGQSVNTTDSAVRITHVPTGTVVAIQDERSQHQNKAKALKVLRARLYEIERHRLHMDRSKLRSEQIGSGDRSERIRTYNFPQGRVTDHRVGITHHSIEDVMEGESLDIFIDALLLRYEMDAIASFAS

SEQ ID NO: 28591 - protein, 59 aa, Oryza sativa
MVRRQEELAVGHPDDKVLDPEWLEVGEDINTVGKQIAKMLHGDLLDEIILEFLSGCVAS

SEQ ID NO: 28592 - protein, 429 aa, Oryza sativa
MSSPPPAAAAAMAVDDADDDQLASMSTEDIVRATRLLDNETRVLKDELQRTNLEVESYKEKIKENQEKIKLNKQLPYLVGNIVEILEMNPEDEAEEDGANIDLDSQRKGKCVVLKTSTRQTIFLPVIGLVDPEKLKPGDLVGVNKDSYLILDTLPSEYDSRVKAMEVDEKPTEDYNDIGGLEKQIQELVEAIVLPMTHKDRFQKLGIRPPKGVLLYGPPGTGKTLMARACAAQTNATFLKLAGPQLVQMFIGDGAKLVRDAFQLAKEKSPCIIFIDEIDAIGTKRFDSEVSGDREVQRTMLELLNQLDGFSSDERIKVIAATNRADILDPALMRSGRLDRKIEFPHPSEEARARILQIHSRKMNVNPDVNFEELARSTDDFNGAQLKAVCVEAGMLALRRDATEVTHEDFNEGIIQVQAKKKSSLNYYA

SEQ ID NO: 28593 - protein, 333 aa, Oryza sativa
MAASLQAAATLMQPAKLGGRASSAALPSRPSSHVARAFGVDTGAAGRITCSLQSDIREVANKCADAAKLAGFALATSALLVSGASAEGVPRRLTFDEIQSKTYMEVKGTGTANQCPTVEGGVDSFAFKAGKYSMKKFCLEPTSFTVKAEGVAKNAPPEFQKTKLMTRLTYTLDEIEGPLEVSSDGTIKFEEKDGIDYAAVTVQLLGGERVPFLFTIKNLVATGKPESFGGPFLVPSYRGSSFLDPKGRGGSTGYDNAVALPAGGRGDEEELAKENVKNASSSTGNITLSVTKSKPETGEVIGVFESVQPSDTDLGAKVPKDVKIQGVWYAQLE

SEQ ID NO: 28594 - protein, 290 aa, Oryza sativa
MGKDEVMESGGAAGEFAAKDYTDPPPAPLIDAAELGSWSLYRAVIAEFIATLLFLYITVATVIGYKHQTDASASGADAACGGVGVLGIAWAFGGMIFILVYCTAGISGGHINPAVTFGLFLARKVSLVRAILYIVAQCLGAICGVGLVKAFQSAYFNRYGGGANTLAAGYSKGTGLAAEIIGTFVLVYTVFSATDPKRNARDSHVPVLAPLPIGFAVFMVHLATIPITGTGINPARSIGAAVIFNNEKAWHNHWIFWVGPFVGAAIAAFYHQYILRAGAIKALGSLRSNA

SEQ ID NO: 28595 - protein, 358 aa, Oryza sativa; identical to SEQ ID NO: 28573

SEQ ID NO: 28596 - protein, 312 aa, Oryza sativa
MAEEWVYVFKRDREGKISWHAFDPLHQLWKSLPPVPAEYSEALGFGCAVLSGCYLYLFGGKDPLRGSMRRVVFYNARTNKWHRAPDMLRKRHFFGSCVINNCLYVAGGECEGIQRTLPSAEVYDPNRNRWACVAEMNNGMVPFIGVVYDGKWFLKGLDSHRQVTSEVYLPSSNLWSTIDDEMVTGWRNPSITFNGKLYSSDCRDGCKLRVYDPNTGTWAKFMDSKHHLGSSRAFEAAALVTLNGKLCIVRNNMSITLVDISDPTMSIETDSARMWETVARKGQHRSFVANLWSTIAGRNLKSHIIHCQVLQV

SEQ ID NO: 28597 - protein, 438 aa, Oryza sativa
MACHLRLFPFTQLLVLVLYKIAAVGADPANAELSTKITQHSPLYNPQPQDFPNEELYRNYLVIQRFKKTITSDPKNITATWTGHDICGNTTYLGFYCAALPGRTKKPTVTVVIFNGYGLRAPKLEGFIDHLPDLALFHAASNDFGGDIPYLTGLAYNYKINVDSNLQIQDDFSRDMVGSHVTTKVHGYCVNLDLDITFHLRPGKDDKKGRSIPGATDSKALLLNYNHLSGPLPVNIGFSKLSYLALANNRLTGAIPPSILHLQDSLLEVLLLNNQLSGCLPHELGMLTKAAVFDAGMNQLTGPIPSSFSCLTSVEQLNLGGNRLYGEIPDALCKLAAVPAGRLANLTLSSNYFTSVGPACLSLIKDGVLNVRNNCIPGFANQRRPAECASFHSQPKACPAASATHVACPAGAANAAAAPADRVVKDYSSYVTYATLHE

SEQ ID NO: 28598 - protein, 387 aa, Oryza sativa
MALQVQAALLPSALSVPKKGNLSAVVKEPGFLSVSQKAKKPSLVVRAVATPAAPVASPGAGTSKADGKKTLRQGVVVITGASSGLGLAAAKALAETGKWHVVMACRDFLKAATAAKAAGMAAGSYTVMHLDLASLDSVRQFVDNFRRSGMPLDALVCNAAIYRPTARQPTFTADGYEMSVGVNHLGHFLLARLMLDDLKKSDYPSRRLIILGSITGNTNTLAGNVPPKAGLGDLRGLAGGLRGQNGSAMIDGAESFDGAKAYKDSKICNMLTMQEFHRRFHEETGITFASLYPGCIATTGLFREHIPLFRLLFPPFQRFVTKGFVSEAESGKRLAQVVGDPSLTKSGVYWSWNKDSASFENQLSQEASDPEKARKLWDLSEKLVGLV

SEQ ID NO: 28599 - protein, 540 aa, Oryza sativa
MSSPSSAHWLSLVGSIWLQTINGPNSDFPVYSSQLKELKSISQVQLNFLAFASDAGKLFGWFSGVAALYLPLWVVAFVGAAFGLVGYGIQYMFLDSSGLRYWHLFLLTALAGNGICWINTVSYLLCINNFASNSRVAVSLATSYLGLSAKVYTSLAETFPGLANSKTKTYLLLNAVVPLFVTVMVAPSLRVFDLKSAAASSDAAFLVMFAITLATGACAVVGSIGSTANGLSSKEHMISLGVLLATPILIPVGLKIRETLTKIRETQRENRIHDLGTDESESVESVVVIDVAADANAEVAKEEDAVVKKPQEEVGGLRLLKSPDFWLYFFSYMFSGTLGLVFLNNLGQIAESRGIGQTSTLVSLSSSFGFFGRLLPAFMDYYSAKSGYSISRTGSMASLMAPMAGAFFLLLNQRDFFLYLATAVIGTCTGAITSVAVSATRELFGTKNFGVNHNVVVANIPVGSLCFGYFAAFLYQREAGARGTLTCSGAGCYRETFAIWGTTCAVGTLLCAALYARSRNFAGRLPVRIPSCLARLANLV

SEQ ID NO: 28600 - protein, 346 aa, Oryza sativa
MARPRGRKRAAAAAAVAEEDSSKPEAAEAKKPAARGRGKRAKASPKPKPETEYFPEKRNLEDLWLSAFPVGTEWENIDKIKEFNWNFENLEKALEEGGELYGKTVYLFGSTEPQLLEVNGESKIVLIPIVVAVDCPFPPSDKIGINSVQRENEEIVPMKAMKMAWVPYVPLEDRLSRIDSLKTKIFTLGCTQRRSALRHLKTERVKLFDYCMPYYMPLNPPEDEDDTVVNIIYPLEPPIVCDFDWEMDDYEDFADEKVKDEVLPEDEKEKFKEFIKERVRERKRELKQAKEARKKAIDDMDPKVKEAFENIKFYKFYPVKTPDTPDVSNVKAKYINRYYRHAHHLM

SEQ ID NO: 28601 - protein, 387 aa, Oryza sativa
MALQVQAALLPSALSVPKKGNLSAVVKEPGFLSVSQKAKKPSLVVRAVATPAAPVASPGAGTSKADGKKTLRQGVVVITGASSGLGLAAAKALAETGKWHVVVACRDFLKAATAAKAAGMAAGSYTVMHLDLASLDSVRQFVDNFRRSGMPLDALVCNAAIYRPTARQPTFTADGYEMSVGVNHLGHFLLARLMLDDLKKSDYPSRRLIILGSITGNTNTLAGNVPPKAGLGDLRGLAGGLRGQNGSAMIDGAESFDGAKAYKDSKICNMLTMQEFHRRFHEETGITFASLYPGCIATTGLFREHIPLFRLLFPPFQRFVTKGFVSEAESGKRLAQVVGDPSLTKSGVCWSWNKDSASFENQLSQEASDPEKARKLWDLSEKLVGLV

SEQ ID NO: 28602 - protein, 487 aa, Oryza sativa
MAKDVEMAVRNGDDGGGGGYYATHPHGGAGGEDVDDDGKQRRTGNVWTASAHIITAVIGSGVLSLAWATAQLGWVVGPVTLMLFALITYYASGLLADCYRTGDPVSGKRNYTYMDAVAAYLGGWQVWSCGVFQYVNLVGTAIGYTITASISAAAVHKANCYHKNGHDADCGVYDTTYMIVFGVVQIFFSMLPNFSDLSWLSILAAVMSFSYSTIAVGLSLARTISGATGKTTLTGVEVGVDVTSAQKIWLAFQALGDIAFAYSYSTILIEIQDTVKSPPAENKTMKKATLLGVSTTTAFYMLCGCLGYAAFGNAAPGSMLTGFGFYEPYWLIDFANVCIVVHLVGAYQVFCQPIFAAVETFAARRWPGSEFITRERPVVAGRSFSVNMFRLTWRTAFVVVSTVLAIVMPFFNDILGFLGAVGFWPLTVYYPVEMYIRQRRIQRYTSRWVALQTLSLLCFLVSLASAVASIEGVSESLKHYVPFKTKS

SEQ ID NO: 28603 - protein, 265 aa, Oryza sativa
MAAATMALSSPVMARAAPSTSSALFGEARITMRKTAAKPKPAASSGSPWYGADRVLYLGPLSGEPPSYLTGEFPGDYGWDTAGLSADPETLAKNRELEVIHSRWAMLGALGCVFPELLARNGVKFGEAVWFKAGSQIFSEGGLDYLGNPSLIHAQSILAIWAVQVVLMGAVEGYRIAGGPLGEVVDPLYPGGAFDPLGLADDPEAFAELKVKEIKNGRLAMFSMFGFFVQAIVTGKGPLENLADHLADPVNNNAWAYATNFVPGK

SEQ ID NO: 28604 - protein, 306 aa, Oryza sativa
MDNARLAIANIGKLMFAQFSELVNEFYNNGLTSNLAGSRNPSLDYGFKGTEIAMASYCSELQYLANPITNHVQSAEQHNQDVNSLGLVSARKTLEAVDILKLMTSTYIVALCQAVDLRHLEENIKSSVKNCVTQVAKKVLTMNPTGDLSSARFSEKNLLTAIDREAVFSYADDPCSANYPLMQKLRAVLVEHALTSGDAEPEASVFSKITKFEEELRSALPREIEAARVAVANGTAPVANRIVESRSFPLYRFVREELGCVFLTGEKLKSPGEECNKVFLGISQGKLIDPMLDCLKEWNGEPLPIN

SEQ ID NO: 28605 - protein, 333 aa, Oryza sativa
MITLKCAACGFVSDVDMRDKLTTFILKNPPEQKKGAGKDKKAMRRAEKERLKEGEAADEEMKKLKKEAKKKGASKESTSSKSGAGKKKAAAGSDEDHSNSPTRSHDGDNVAADEDDDDGVQWQTDTSLEAAKQRMQEQLSAATAEMVMLSTEEPEKKKKHEASHKEGASNGSTKHVVEEAKSSPYDDLVKEMKDNLSKGANAVQLKGLMTSSALPPQDAMNALFDALFGGLGKGFAKEVVKKKKFLAAAVPDEASQMVLLQALVAFGAKSSPEAVKEVPIVLKALYDGDVLDEEVITQWYNESVAGGKESQVVKNAKPFVEWLQSADSESEEE

SEQ ID NO: 28606 - protein, 305 aa, Oryza sativa
MAAEGGAAARALSQREQDIQMMLAADVHLGTKNCDFQMERYVYKRRTDGIYIINLGKTWEKLQLAARVIVAIENPQDIIVQSARPYGQRAVLKFAQYTGAHAIAGRHTPGTFTNQLQTSFSEPRLLILTDPRTDHQPIKESALGNIPTIAFCDTDSPMRYVDIGIPANNKGKQSIGCLFWLLARMVLQMRGTILPGHKWDVMVDLFFYRDPEEAKEQEEEEAALVAPDYGAVAEYAAPAADTWGGEWGTDAAAQPAAIPAQAGADWTAAPAPAAGGWDTAAAPAPGWEQGSAPVPAAAPTPNWGE

SEQ ID NO: 28607 - protein, 251 aa, Oryza sativa
MDGRVALVPWADMLNHSPEVETFLDYDKSSGGIVFTTDRSYQPGEQVFISYGKKSSGELLLSYGFVPKEGTNPNDSVELLVSLNKSDKCYKEKLQALKRNGLSEFESFPLRVTGWPVELMAYAFLVVSPPEMSQRFEEMAVAASNKSPSKPGLNYPELEEQALQFILDCCESNIAKYTKFLEGSSGSLQLSTNSKQANRTLLLKQLARDLCISERRILYRTQYILRRRLRDMRGGELKALSLFNGLRKLFK

SEQ ID NO: 28608 - protein, 14 aa, Oryza sativa
MFSLCSVYQIAPKP

SEQ ID NO: 28609 - protein, 448 aa, Oryza sativa
MGQGTPGGMGKQGGAPGDRKPGGDGDKKDRKFEPPAAPSRVGRKQRKQKGPEAAARLPNVAPLSKCRLRLLKLERVKDYLLMEEEFVAAQERLRPTEDKTEEDRSKVDDLRGTPMSVGSLEEIIDESHAIVSSSVGPEYYVGILSFVDKDQLEPGCSILMHNKVLSVVGILQDEVDPMVSVMKVEKAPLESYADIGGLDAQIQEIKEAVELPLTHPELYEDIGIRPPKGVILYGEPGTGKTLLAKAVANSTSATFLRVVGSELIQKYLGDGPKLVRELFRVADELSPSIVFIDEIDAVGTKRYDAHSGGEREIQRTMLELLNQLDGFDSRGDVKVILATNRIESLDPALLRPGRIDRKIEFPLPDIKTRRRIFQIHTSKMTLADDVNLEEFVMTKDEFSGADIKAICTEAGLLALRERRMKVTHADFKKAKEKVMFKKKEGVPEGLYM

SEQ ID NO: 28610 - protein, 266 aa, Oryza sativa
MASTIMAPTSRVLAAKTPFLGHPRPSNAPVRDIAAAATGRITMSKELWYGPDRVKYLGPFSAQTPSYLRGEFPGDYGWDTAGLSADPEAFARNRALEVIHGRWAMLGALGCITPEVLEKWVRVDFKEPVWFKAGAQIFSDGGLDYLGNPNLVHAQSILAVLGFQVVLMGLVEGYRINGLPGVGDGNDLYPGGQYFDPLGLADDPVTFAELKVKEIKNGRLAMFSMFGFFVQAIVTGKGPLENLLDHLADPVNNNAWAYATNFVPGK

SEQ ID NO: 28611 - protein, 366 aa, Oryza sativa
MATPQISRKALASLLLLVAAAAAVSTASADDVLALTESTFEKEVGQDRAALVEFYAPWCGHCKKLAPEYEKLGASFKKAKSVLIAKVDCDEHKSVCSKYGVSGYPTIQWFPKGSLEPKKYEGQRTAEALAEYVNSEAATNVKIAAVPSSVVVLTPETFDSVVLDETKDVLVEFYAPWCGHCKHLAPIYEKLASVYKQDEGVVIANLDADKHTALAEKYGVSGFPTLKFFPKGNKAGEDYDGGRELDDFVKFINEKCGTSRDSKGQLTSEAGIVESLAPLVKEFLGAANDKRKEALSKMEEDVAKLTGPAAKYGKIYVNSAKKIMEKGSEYTKKESERLQRMLEKSISPSKADEFVIKKNILSTFSS

SEQ ID NO: 28612 - protein, 62 aa, Oryza sativa
MSDKCGNCDCADKSQCVKKGTSYGVVIVEAEKSHFEEVAAGEENGGCKCGTSCSCTDCKCGK

SEQ ID NO: 28613 - protein, 309 aa, Oryza sativa
MRDSNGVSRGSGFVAFKSAEDASRALAEMNSKMVGSKPLYVALAQRKEDRKARLQAQFSQLRPVPLAPSVGPRMPMFPPGVPGVGQQLFYGQPPPAFINTQPGFGFQQPLMPGMRPGAGPMPNFIMPMVQQGQQPQRPAGRRAGAGGMQQPMPMGQQQMMARGGRGYRYPTGRGMPDPAMHGVGGGVMPSPYEMGGMPMRDAAASQPVPIGALATALANAAPDQQRMMLGENLYPLVDQLEHEQAAKVTGMLLEMDQTEVLHLLESPEALKAKVAEAMEVLRTAQQIQTNATPEQQLASLSLNDGVVSS

SEQ ID NO: 28614 - protein, 216 aa, Oryza sativa
MERYEVIKDIGSGNFGVAKLVRDVRTKELFAVKFIERGQKIDENVQREIMNHRSLRHPNIVRFKEVVLTPTHLAIVMEYAAGGELFERICSAGRFSEDEARFFFQQLISGVSYCHSMQICHRDLKLENTLLDGSIAPRLKICDFGYSKSSLLHSQPKSTVGTPAYIAPEVLARKEYDGKVADVWSCGVTLYVMLLVRTPLRTLTNQETSARQLLGY

SEQ ID NO: 28615 - protein, 98 aa, Oryza sativa
MGFVEGYRVGGGPLGEGLDKVYPGGAFDPLGLADDPDTFAELKVKELKNGRLAMFSMFGFFVQAIVTGKGPIENLFDHVADPVANNAWAYATNFVPGK

SEQ ID NO: 28616 - protein, 361 aa, Oryza sativa
MELKEKFEKNLQEAADKYQNTNLYLKNLDDSVDDDKLRELFAEYGTITSCKVMRDSNGVSRGSGFVAFKSAEDASRALAEMNSKMVGSKPLYVALAQRKEDRKARLQAQFSQLRPVPLAPSVGPRMPMFPPGVPGVGQQLFYGQPPPAFINTQPGFGFQQPLMPGMRPGAGPMPNFIMPMVQQGQQPQRPAGRRAGAGGMQQPMPMGQQQMMARGGRGYRYPTGRGMPDPAMHGVGGGVMPSPYEMGGMPMRDAAASQPVPIGALATALANAAPDQQRMMLGENLYPLVDQLEHEQAAKVTGMLLEMDQTEVLHLLESPEALKAKVAEAMEVLRTAQQIQTNATPEQQLASLSLNDGVVSS

SEQ ID NO: 28617 - protein, 225 aa, Oryza sativa
MSPPVSSGAPVQERRLGVLLSHLRPCAPPAARRGNHHHHHHDLRVREAEGTGGLAASPCAADGSGETSGGQRCVFCEIVKGNKPAYKLYEDDVCLCILDTKPLSTGHSLIIPKRHFPSLQATPPSVIAAICCKLPLISSAIVKATQCDAFNVLVNNGKVAGQVIFHTHVHLIPRRKGDNLWSSETYERNSIKHNQETKDLVSGIKELLFPPQDDSAEGSTIPKEL

SEQ ID NO: 28618 - protein, 229 aa, Oryza sativa
MASLRHGHLSPSGATAPPSSFAQLRRPSSCLAGPRPLRSRLTRVYALSSNDIRVGSNLEVDGAPWKVLEFLHVKPGKGAAFVRTKMRNYITGNTVDKTFRAGSTIPEASISKETKQFTYKDGAQFVFMDLTTFEESRLNESDVGDRQKWLKEGMDCNLLYWNGRIIDFDLPITVRLTVTDTDPGQGDSAQGGTKPATVETGAVVTVPSFVNVGDDILIDSRTGQYMNRA

SEQ ID NO: 28619 - protein, 381 aa, Oryza sativa
MQIFVKTLTGKTITLEVEFSDTIDNVKAKIQDKEGIPPDQQRLIFAGKQLEDGRTLADYNIQKESTLHLVLRLRGGMQIFVKTLTGKTITLEVESSDTIDNVKAKIQDKEGIPPDQQRLIFAGKQLEDGRTLADYNIQKESTLHLVLRLRGGMQIFVKTLTGKTITLEVESSDTIDNVKAKIQDKEGIPPDQQRLIFAGKQLEDGRTLADYNIQKESTLHLVLRLRGGMQIFVKTLTGKTITLGVESSDTIDNVKAKIQDKEGIPPDQQRLIFAGKQLEDGRTLADYNIQKESTLHLVLRLRGGMQIFVKTLTGKTITLEVESSDTIDNVKAKIQDKEGIPPDQQRLIFAGKQLEDGRTLADYNIQKESTLHLVLRLRGGL

SEQ ID NO: 28620 - protein, 359 aa, Oryza sativa
MASVDLTPRQARKAYGGDGGTYYEWSPADLPMLELANIGGAKLSLNAGGLALPSFSDSGKVAYVLQGKGTCGIVLPEASKEKVIAVKEGDSLALPFGVVTWWHNLPESPIELVILFLGDTSKAHKAGQFTNMQLTGATGIFTGFSTEFVGRAWDLAESDAVKLVSSQPASGIVKIKSGQKLPEPSAADREGMALNCLEAPLDVDIKNGGRVVVLNTANLPMVKEVGLGADLVRIDGHSMCSPGFSCDSAYQVTYFIRGSGRVQVVGADGKRVLDTHVEGGNLFIVPRFCVVSKIADASGLQWFSIITTPNPIFSHLAGKTSVWKAISPEVLEASFNATPEMEKLFRSKRIDSEIFFAPN

SEQ ID NO: 28621 - protein, 93 aa, Oryza sativa
MSNVIYDLYSLIMQIEGSFIQGIGFFIYEEHQTNSDGLVISNSTWDYKIPSVDTIPKQFNLEVLNTGYHRTVCFLQKLLGNLPWFLEHLCIVR

SEQ ID NO: 28622 - protein, 265 aa, Oryza sativa; identical to SEQ ID NO: 28575

SEQ ID NO: 28623 - protein, 206 aa, Oryza sativa
MAEEEAKKVEVEVTEAPPAAAAAAETEPAAKDVAEEKAVIPAPAPPAEEEKPPVDDSKALAIVEKVADEPPAEKPAQGGSNDRDVALARVETEKRNSLIKAWEENEKTKAENKASKKLSAILSWENTKKANIEAQLKKIEEQLEKKKAEYAEKMKNKVAIVHKEAEEKRAMVEAKRGEEVLKAEEMAAKYRATGHAPKKLIGCFGA

SEQ ID NO: 28624 - protein, 121 aa, Oryza sativa
MEAQSESKWKQLGELAMSTGKLDMAEECLVQAKDLSGLLLLYSSLGDAEGIEKLASQAKEHGKNNVAFLCLFMLGKLEDCIQLLIDSNRIPEAALMARSYLPSKVSEIVAIWRNDLSKVIS

SEQ ID NO: 28625 - protein, 250 aa, Oryza sativa
MPIRNIAVGSHQEVYHPGALKAALAEFISTLIFVFAGQGSGMAFSKLTGGGATTPAGLIAAAVAHAFALFVAVSVGANISGGHVNPAVTFGAFVGGNITLFRGLLYWIAQLLGSTVACFLLRFSTGGLATGTFGLTGVSVWEALVLEIVMTFGLVYTVYATAVDPKKGSLGTIAPIAIGFIVGANILVGGAFDGASMNPAVSFGPALVSWSWESQWVYWVGPLIGGGLAGVIYEVLFISHTHEQLPTTDY

SEQ ID NO: 28626 - protein, 288 aa, Oryza sativa
MEGKEEDVRLGANKFSERQPIGTAAQGSDDKDYKEPPPAPLFEPGELKSWSFYRAGIAEFMATFLFLYITVLTVMGVNNSTSKCATVGIQGIAWSFGGMIFALVYCTAGISGGHINPAVTFGLFLARKLSLTRALFYMVMQCLGAICGAGVVKGFQKGLYETTGGGANVVAPGYTKGDGLGAEIVGTFILVYTVFSATDAKRNARDSHVPILAPLPIGFAVFLVHLATIPITGTGINPARSLGAAIIYNRGHAWDDHWIFWVGPFIGAALAAIYHQVVIRAIPFKSRS

SEQ ID NO: 28627 - protein, 59 aa, Oryza sativa
MPLEPRASWFSPKCVEAQQLTGHLGVKHCFGAGCASGTKSRQTLNTRYDPKITGVKVGQ

SEQ ID NO: 28628 - protein, 265 aa, Oryza sativa
MARGLKKHLKRLNAPKHWMLDKLGGAFAPKPSSGPHKSRECLPLILIIRNRLKYALTYREVISILMQRHVLVDGKVRTDKTYPAGFMDVISIPKTGENYRLLYDTKGRFRLQSVKDEDAKFKLCKVRSVQFGQKGIPYLNTYDGRTIRYPDPIIKANDTIKIDLETNKIVDFIKFDVGNVVMVTGGRNTGRVGVIKNREKHKGSFETIHVEDALGHQFATRLGNVFTIGKGNKPWVSLPKGKGIKLSIIEEQRKRDAAAQAAANA

SEQ ID NO: 28629 - protein, 399 aa, Oryza sativa
MALSISTPPTSSSLLPASLQVGRWSSSAAMSAGPVAFSLRRPVLAARVAAGGNAPSSSVDEVVTELDAVASFSEIVPDTVVFDDFEKFAPTAATVSSSLLLGIAGLPDTKFKSAIDTALADGECNTMEKPEDRMSCFLTKALANVGAEMAHLVPGRVSTEIDARLAYDTQGIIQRVHELLKLYSDHDVLSERLLFKIPATWQGIEASRLLESEGIQTHLTFVYSFAQAAAAAQAGASVVQIFVGRVRDWARTHSGDPEIDEALKKGEDAGLALVKKVYAYIHKNGYKTKLMAAAIRNKQDVFSLLGIDYIIAPLKILQSLEESVTDTDVKYGYVPRLTPALGKTYNFTEEELVKWDQLSLAAAMGPAAEELLASGLEGYVNQARRVEELFGKIWPPPNV

SEQ ID NO: 28630 - protein, 244 aa, Oryza sativa
MVAAAGTMELEILGINFGCVLAALADAKIPEKDCLLPLASKLLGYAIVAASTTVKLPQILKILKHGSVRGLSVASFELEVVGYTIALAYCIHKGLPFSAYGELAFLLIQAIILVAIIYYYSPPMGTKTWMKALLYCGLAPTVLGGKIDPALFEVLYASQHAIFFFARLPQIWKNFMNKGTGELSFLTCFMNFAGSIVRVFTSIQEKTPLSVILGSAIGIVMNGTLLGQIVLYQKPAPKKEKKRD

SEQ ID NO: 28631 - protein, 367 aa, Oryza sativa
MAMERLISSPLLPRRPPRAAFSRPPPSLAAAPPHHRAGGAASGYGSRPPLASLLLSRHHHHHQPPVLAANPAADVAAGEAVPPATATASRRFLQKVASAAAATLLATIALTLIQPAWAPPALASFHSAAKAGGGIFKSELLSSAWTGFLAGCLHTLSGPDHLAALAPLSIGRSRVESAAVGALWGCGHDAGQVIFGLLFLSLKDRLHIEVIRTWGTRVVGLTLLVIGALGIREATEVPTPCVALENGGGGGGAHRGPLDALPATRKKITFATFATGIVHGLQPGALMMVLPALALPSRVAGAAFLGMFLVGTVVAMGSYTVLVGSCTEALKERVPRITEKLTWAASLVAISMGLGILISQSLGFSLY

SEQ ID NO: 28632 - protein, 26 aa, Oryza sativa
MFLTASSELSCWVPDLSKLGSFTVSK

SEQ ID NO: 28633 - protein, 324 aa, Oryza sativa
MAAAAAAASAPRLLLPPAASTFPHQHEHVRRNWHRPRRQVISARAGASVAARGLDADDFRHPLDKQNTLLLRAVPGLNDMGKALLGPVSEQVMVLQNIGSSVLVSENQLSDLHQTLTEAAKLLNTDAPDLYIRQNPVPNAYTLAISGKKPFIVVHTSLVELLTRKELQAVLAHELGHLKCDHGVWLTFANILTMGAYSVPGFGMVAGFLEEQLYRWLRAAELTCDRAALLVVQDPKVVISVLMKLAGGCPSLADQLNVDAFLEQARSYDKAASNPVGWNAQTRELSHPLPVMRAREIDEWSRSREYKTVQQKVIQLQLNDHDAS

SEQ ID NO: 28634 - protein, 128 aa, Oryza sativa
MADPELEAIRQRRMQELMAQHGAANPQNAGQQKAQEDAKQEAEERRQMMLAQILSSEARERLSRIALVKPDKARGVEDVLLRAAQSGGISEKVSEERLISLLEQINTHTSKQTKVTIQRRRSVLDDDD

SEQ ID NO: 28635 - protein, 258 aa, Oryza sativa
MFPRLLLAHRLLAGAAAPLPRRRTAAAMSAAAPGTRLLRGVVFDMDGTLTVPVIDFPAMYREVLGGDEAYAAARAAGGGSVDILHCIEGWAPDEQRRAYEVIARFEQDGLDRLQIMPGASELCGFLDAKQIRRGLITRNVKTAVDLFHQRFGMMFSPALSREFRPYKPDPAPLLHICSTWNIPPNEVVMVGDSLKDDVVCGKRAGAFTCLLDETGRYGPHDSLPEGVRPDFKVSSLSEVFSVLEEHFDLAPVVSESRI

SEQ ID NO: 28636 - protein, 306 aa, Oryza sativa
MESTEPLQDIMCEFRAGKMSLDGTRVIPDTRKGLVRIGRGEEGLVHFQWLDRGQNLVEVDQIVFPEEAVFEKVTQSSGRVYILKFRHDSRKFFFWMQEPSADDDSQICRQVNAYINRPLDGEAVSIEAEMSHEDTADDDISSRAGNLVDQSMTADLAGEVTSAAGPVRLEDLQRILSAIQPSDAVADPDAGLGLGDILKPDLVLPLMETLPIEQLASYLPEGPWTAGDILELLQSPPLRQQVEAFTHVLRTGQIDLAQFGVDPSKYKFTVASFLEALEDSVAKASGAGDKDSESQRGGGNDPMDES

SEQ ID NO: 28637 - protein, 247 aa, Oryza sativa
MIGLVLYSTWYEPLRDVPEDRLATERALAFETPWFLDPLVYGDYPPEMRQILGGRLPSFSPEDRRKLRYKLDFIGVNHYTTLYARDCMFSDCPQGQETQHALAAVTGESNGLPIGTPTAMPTFYVVPDGIEKMVKYFMRRYNNLPMFITENGYAQGGDSYTDAEDWIDDEDRIEYLEGYLTKLAKVIRDGADVRGYFAWSVVDNFEWLFGYTLRFGLYYIDYRTQERSPKLSALWYKEFLQNLHENQ

SEQ ID NO: 28638 - protein, 45 aa, Oryza sativa
MALYHLLSVPTFRIKTGSGFEQQSSHTEQKSVFLEDVCQVHHLHM

SEQ ID NO: 28639 - protein, 259 aa, Oryza sativa
MDDYAREMMELKTLVTRTLEKKGVLVKIRAELRASVFEAIEEEDRVVENDDGGNPALLGSCNDRAKQLHASPSGRLLTALVSEYLEWAQLSHTMKVYLPECNLPKDFWKNELKDFSNKSGAEGSRSAESGPMLLDVLEGYLKYENLSQTRMAGTGRRIINSESDPALNAEHRNTRRPPSSSSVTGLPPMGRPMPSSQMSDRRGGSSASNARKDEYNWRYDADDISEEVLRASSALENVQLDRKARNLTTSWRHPGDGAE

SEQ ID NO: 28640 - protein, 53 aa, Oryza sativa
MSTDQLGLMMSMPGMTEALTNQFPDLKLSAPVAFNPFTSVFDTLKKLVELYFK

SEQ ID NO: 28641 - protein, 301 aa, Oryza sativa
MASVTYIDDSGSEVIDPPKTEVLDVTELAGDPVPHSPKPNVVVSSSVRELLECPVCLSAMYPPIHQCSNGHTLCSGCKPRVHNRCPTCRHELGNIRCLALEKVAASLELPCKYQNFGCVGIYPYYCKLKHESQCQYRPYSCPYAGSECTVAGDIPYLVNHLKDDHKVDMHNGCTFNHRYVKSNPHEVENATWMLTVFSCFGQYFCLHFEAFQLGMAPVYIAFLRFMGDDLEAKNYSYSLEVGGTGRKMIWQGVPRSIRDSHRKVRDSYDGLIIQRNMALFFSGGERKELKLRVTGRIWKEQ

SEQ ID NO: 28642 - protein, 233 aa, Oryza sativa
MPLWGTGSSAASAAAEGSAAGGDGAARSSSGGAAVIRSLLPTRRRLRLDPPSKLFFPYEPGKQVRSAVKIKNISKSHVAFKFQTTAPKSCFMRPPGGILAPGESIIATVFKFVEHPENNEKPLDQKCKVKFKIVSLKVKGPMEYVPELFDEQKNQVAVEQILRVVFLDAERQTPQMDKLKRQLAEAEAALEARKKPPEDTGPRIVGEGLVIDEWKERRERYLARQQIEGVDSA

SEQ ID NO: 28643 - protein, 81 aa, Oryza sativa
MASKTMVVLFVVAASLLLLSQDVAFAARELADASGEASKGGDKKDDISISIGVTVGATPVVTINTKPKHHGKTPSYGHSHP

SEQ ID NO: 28644 - protein, 237 aa, Oryza sativa
MRKQELLAQLAAEEQRGHELTKIVKELLPTPKKNMNSERQPRYRRRSNDRARVSRRLTEEAEQYFEDFLSNVEDTDFSSFDGERSDTSSSRRDVVQNTKIETPITLPKVASPVEADGVVLPWLQWETSNDLQTSPCKPKTQGASTACSTSSRTMSSRGSWSPGDHDSAAGSKDTLLTRFEEAASRRSSCPDNTQRSSFHTDDYMHLRRSHDLLLERWRQKERIGDGGLILCSRSSIM

SEQ ID NO: 28645 - protein, 298 aa, Oryza sativa
MYGHRGAMMGGGGVSDGYEGSKRPRMIESNPYFAVTAGSPLDVSKRARMMEPAPPYFGAMGSSAAGGTSAFYQPYGANLPGAGANSAIQNFPGVRLRGLPFDCDDLDIFKFFVGLDIVDCLLVHKNGRFTGEAFVVFPSAMQAEFALHRNRQNMGRRYVEVFRCKKQEYYSAIAAEVNQGGFFDSEYRHSPPPRPKKPAEDKSSMEYTEVLKLRGLPYSATTEDIIKFFVEYELTEENVHIAYRPDGKATGEAFVEFPTAEVAKTAMCKDKMTIGTRYVELFPSTPEEASRAKSRARQ

SEQ ID NO: 28646 - protein, 188 aa, Oryza sativa
MSKIYIIGGLVDRNRWKGITLKKAVDQGIQCAKLPIGNYLKMSSSQVLTVNQVFEIMLKFVETRDWKTSFFHVIPQRKRGEAEAENDGVDISMNNVDAAEGAENQGDLTKVFDEDVDDDDVVDEELQEEDTDMAKKKQCIRHENGEAEDASTRPAEDHSPGAAAETTTPTGGALPQAEQSKESNGADD

SEQ ID NO: 28647 - protein, 72 aa, Oryza sativa
MAIFHQLYVVIRIQQQITCSSSWWHNLKKFEDCQEFVCHTVHAVKRKMAISQIQSSISVNLALSRSFVDPGY

SEQ ID NO: 28648 - protein, 46 aa, Oryza sativa
MQGGVLALSSAHLLRLSPGDHLRGLCYHQVVVTSHLYYTSKVIEAS

SEQ ID NO: 28649 - protein, 236 aa, Oryza sativa
MDDSGSSSPPAPAPSFRNRYWILRHGRSVPNERGIIVSSLENGTKPEFGLAPQGVEQARLAGESLRKELEELGVPLDSVQIRYSPFSRTMEAAREVARVLGVPFDTPSCIPAVELRERYFGPSHELLSHEKYAEVWAVDEVDPLMAPDGGESVADVATRFSQFLSAAEMELHGSAILIVSHGDPLQIFQAVLKETKENPSSLDEVSDLKKRGMITLSVLSQHRQFALLTGELRRLV

SEQ ID NO: 28650 - protein, 164 aa, Oryza sativa
MEAKIGKLVESVGSFFSGGDTIPWCTRDIIAGCEREVAEAANEEQKSDSIMRLSWALVHSKNQEDVNRGIGMLEASLGQSNSPLQTREKLYLLAVGHYRNGDYPRSRQLVDRCLEIQPDWRQALSLRKAIEDKIAKDGLIGIGIATTAVGLLVGGIAAIAARKK

SEQ ID NO: 28651 - protein, 343 aa, Oryza sativa
MAMELSNLTKCHLPLLLLFLLAGSSSMALPVHPAMDRVRWQVDKVNRRGHSIGLVMSYIDEATALESSGYFRPWHVLPFVDLYGRRYHIGSIRGVNVIYALTGQRRLNAAVTVQTLIDVFTVSGIVHYGTAGSSNDSMSFGDVSVPKFVAYTSAWTWKKFKSPKESDTELSFGDFTVPNGGENLLGALKFRNEELYSVGKPMKEVFWLPVDSAWFKIAEGLKVSLERCNDTFCLPTTPKVVCGLKGSSADMFLDNAEYRKFLFREFGVSTVDEESAAVVMTTTSPGIPVIVFRGVSDLAGGEPTWSSTSLMNLASINALKVAVEFIATVGKQKSTMSAGSANN

SEQ ID NO: 28652 - protein, 410 aa, Oryza sativa
MEVISSGFQAAFMVPTEVLALQHYEHLTSLLEKFDGDECKPNIALLTGSTSTRESRIIRNGLKTGEIAMVIGTHSLIGDKTEFSALRISVIDEQQRFGVVQRGRFNSKLYTPSTKSSDDDTISDENSASEIFMAPHVLAMSATPIPRTLALALYGDMSLTQITDLPPGRQPIETLALEGNDAGFESVFQMMSDELVDGGKVYLVYPIIEESEQLPQLHAAKAEFDSIKQKFEGYPCGLLHGRMRSDEKDGALSSFRSGETRILLSTQVIEIGVDVPDASMMVVMNAERFGMSQLHQLRGRVGRGERKSRCVFLCSTPSALPRLKVLEKSSDGFYLANADLLLRGPGDLLGKKQSGHLPEFPIARLEIDGSILQEAHLAALNVLGTSNDLAQFPGLKVELSMRQPLCILGD

SEQ ID NO: 28653 - protein, 130 aa, Oryza sativa
MVRVSVLNDALKTMYNAEKRGKRQVMIRPSSKVIIKFLIVMQKHGYIGEFEFVDDHRSGKIVVELNGRLNKCGVISPRFDVGVKEIESWTARLLPSGQFGYIVLTTSAGIMDHEEARRKNVGGKVLGFFY

SEQ ID NO: 28654 - protein, 255 aa, Oryza sativa
MQMGSETYHHLKDIILEKYGSNSCNIGDDGGFAPNISSITEGLDLVIEAINRAGYNGRIKLAIDVAATDFCMGNKYDMEFKFAEKSGQGFKTADDLIEIYSQLCSEYPLVSIEQPFDKDDWEHSKKFTTLELCQVVGDDLLMSDPERIKRAVNEYTCNALVLKANQVGTVTEAIEVVRQAKDAHWGVMVSHRSGDTDDSFIADLAVGAAAGQIKAGAPCRGECLSKYNQLLRIEEELGSDGVYAGENWRTTASTS

SEQ ID NO: 28655 - protein, 21 aa, Oryza sativa
MGLWSFDDGCCLVDVEASLSF

SEQ ID NO: 28656 - protein, 176 aa, Oryza sativa
MHPAQWNAHFGHPVPKIVSGKHIKKKPKVVQPLTCEVCKIQCDTPEVLRIHKTGKKHKKNLERLQDSITPKPVKPPSTPNTVALAANMAPDPVTTSVTTSVIPAAQTKKKKSAAATPEELEVKRRRVLDAGAAQGEVKICTVCNVVVNSQKVYEFHIIGQKHKAMVQKQQAQPPIA

SEQ ID NO: 28657 - protein, 57 aa, Oryza sativa
MFSFIFHHTNVYCMTFVTVCSIACNVPMRVIRKQLLILRKNLSALASSLIGNVHRSS

SEQ ID NO: 28658 - protein, 144 aa, Oryza sativa
MVKSLSPRLVTLVEQESNTNTRPFFPRYLETLDYYTAMFESIDVALPRDDKRRMSAEQHCVARDIVNLIACEGAERVERHEVFGKWKARLTMAGFRPYPLSSVVNSTIKTLLHTYNSFYRLEERDGVLYLGWKNRVLVVSSAWC

SEQ ID NO: 28659 - protein, 387 aa, Oryza sativa
MRDNRKSLEAGTYHEVLDLKQLLDLADREHKVAVYSRSKRNSDSSSVSSMSSVSSSSTISISSASSSGGASPEPGLSSKRRLLPWRRKSRDFDKRSSESLSQELPMKYMDDDLAGSWETREFTSRDSETKLRTPVFFASIDQRDDSAGGESACTALVAVLAAALHANHPTMPTRPELDALIRDGSSEWRRLCDDEAHMAAFPNRHFDLETVLAARARPIAVQHDRAFVGFFQPESFASLSGAMSFDDIWREIAAAAGGEPGRADVYIVSWNDHFFVLKVEGDCYHVVDTLGERLFEGCDKAYMLRFDATSEMRSVSPPPSSPSPEEEVIVTGKECCREFIKRFLAAIPLREELEMERKGCADAPHRRLQIEFHFTVLKEEEQDQARR

SEQ ID NO: 28660 - protein, 229 aa, Oryza sativa
MVLIGVLRYFVAKLMRSPSASPSPDPKLVKEGQVVIRARNLRINSQYIPAKAFKSRKVYYTNEENGLLHVPKEEAQKAQAAMFSDPNMAMDMMKENLSMIVPQTLTFAWVNFFFSGFVAAKIPFPLTPRFRGMLQNGIDLSTVDVSYVSSRSWYFLNLFGLRGLFSLILGEENANDDAQKMMQMGGGFGGNPTMGLAAEKDNLDIIQHDWALPKMEHHAEEVLRKLLKK

SEQ ID NO: 28661 - protein, 316 aa, Oryza sativa
MFMLWHSRQTQEMVDILSRPRRESKELTFATKYSQPFFAQYAACLWKQNLSYWRNPQYTAVRFFYTVIISLMFGTICWKFGSRRETQHDIFNAMGAMYAAVLFIGITNATSVQPVISIERFVSYRERAAGMYSALPFAFSLVTVEFPYILVQSLIYGTIFYSLGSFEWTAVKFLWYLFFMYFTLLYFTFYGMMTTAITPNHTVAPIIAAPFYTLWNLFCGFMIPRKRIPAWWRWYYWANPVSWTLYGLLTSQFGDLDQPLLLADGITTTTAVDFLRDHFGFRHDFLGVVAGMVAGFCVLFAVVFALAIKYLNFQRR

SEQ ID NO: 28662 - protein, 354 aa, Oryza sativa
METLASAMRRENRRFKPPSSSSASASAALSSGRVPLVMAFLSCLAWLYVAGRLWQDAQTRMILSGLLEKSSGNLPKVLSVEDKLRNLGCIGIGRKIAEAEMDLTKAKSEGYLWGNGTATGSSDKKKLLAVIGVYTGFGSRLKRNTFRGSWMPRGDALKKLEEKGVVIRFVIGRSANRGDSLDRNIDDENRRTKDFLILESHEEAAEELPSKVKFFFSAAIEAWDAEFYVKVDDNINLDLAGLIEMLEARRGSQGLYMGCMKSGGVVSEEGQQWYEPEWWKFGDSKTYFRHASGALFILSNNLARYININSASLQSYAHDDISVGSWMMGLNTTYVDDDRLCCGSSRQEKVCSHA

SEQ ID NO: 28663 - protein, 22 aa, Oryza sativa
MHLADLVGNFDFGSSRCEVEWT

SEQ ID NO: 28664 - protein, 517 aa, Oryza sativa
MLRQGVIQPSSSPFSSPVLLVLKKDLTWRFCIDYRHLNAITVKNRYPLPVIDELLDDLAGATIFTSLDLRAGYHKIRMRPEDEHKTAFKTHHGHYEFRVMSYGLTGAPATFQGVMNTVLSPLLRKGVLVFIDDILIYSATLTERVQLLRQVFQLLTEHQLKVKRSKCSFAQSSLIYLGHVISHAGVSTDPKNILAVQRWPVPTNVKEVRGFLGLAGYYRKFVRHFGVISRPLTDLLKKNVVFVWTISHQQAFEALKSALTSAPVLAIPDFSKPFEIETDASDKGVGAVLMQAGHPLAFLSKALGPRNRGLSIYEKECLAILLAVDRWRSYLQFGEFVIRTDQRSLIHLGDQKLATPWQQKAMTKLLGLNYRLVYKRGLDNRAADALSRCSTDDHIQACALSVCIPDWLTEVQEGYLSDPYSADLLSKVTLQASAVPNFSLRDGILHYKNKIWIGNNTTLQHRILSALHSGAIGGHSGVQVTYSRIKKLFAWQGLKKSVLEFIDQCSVCKQAKAERVH

SEQ ID NO: 28665 - protein, 185 aa, Oryza sativa
MHRDVKPHNVMIDHELRKLRLIDWGLAEFYFPEKEYNVRVASRYFKGPELLVDFQSYDYSLDMWSLGCMFAGMIFRKEPFFYGHDNHDQLVKIAKVLGTDQLNAYLNKYRIALDPQLEALIGRHTRKPWSKFINPENRHLVSPEAIDFLDKLIRFDHHDRLTAREAMAHPYFEQVRAAEDCRMRT

SEQ ID NO: 28666 - protein, 38 aa, Oryza sativa
MGHYFLRFVAASRVCQIHVASCLVAPTSTYDHCPSIMR

SEQ ID NO: 28667 - protein, 294 aa, Oryza sativa
MLGVQVTFLSCGGVALGTVLHHVAIDALSAFHFFQTWSSSCRDGEAAMLELPCHERTLLRTRSPPIVHPDVHSMFSLKLNFCEPSDPISTKIFVISKNQLDALKQICGGLSTFCAMSALVWQCMCIARQLPLDAETRVIFPVNIRRRVKPPLPDRYFGNALVDLKVASTVRDIVLGTLDVTAAQIKNALGRLDDEMLQSAIDYNEMAGMPNKHTKGNLPDTELRMVSWLGMPVYDADFGWGKPEMMSRAESVRGGFVYMMDGIDNDGGGVRVLMCMEARKMEEFERLFYAKFAQ

SEQ ID NO: 28668 - protein, 14 aa, Oryza sativa
MQREFVKGRHCTFL

SEQ ID NO: 28669 - protein, 305 aa, Oryza sativa; identical to SEQ ID NO: 28606

SEQ ID NO: 28670 - protein, 145 aa, Oryza sativa
MKSYQQRKKTKINLKTKLKKRVEESPSWVKALLGYFEVPQMDIISRRLFFFAFIAGWSIATSAENGPAFQLAISLFSCIYFLNDKMKNLMRASTTGFGVLVGGWIIGSLLVPLIPTFIIPPSWSLELLTSLVAYVFLFLGCTLLK

SEQ ID NO: 28671 - protein, 343 aa, Oryza sativa
MESGRLIFSTAGSGAGQMLFLDCGAGGGGVGGGATFHRGARPVLGMEEGGRGVKRPFFTTPDELLEEEYYDEQLPEKKRRLTPEQVHLLERSFEEENKLEPERKTELARKLGLQPRQVAVWFQNRRARWKTKQLERDFDRLKASFDALRADHDALLQDNHRLHSQVMSLTEKLQEKETTTEGSAGAAVDVPGLPAAADVKVAVPDAEEPALEEAAAAFEEQQEQQVKAEDRLSTGSGGSAVVDTDAQLVVGCGRQHLAAVDSSVESYFPGGDEYHDCVMGPMDHAAGGIQSEEDDGAGSDEGCSYYADDAGVLFADHGHHHHHQHADDDEEDGQQISCWWMWN

SEQ ID NO: 28672 - protein, 293 aa, Oryza sativa
MATATATAAAAAPAAVPALVSPLSRRAFFPLPRRAGPKSLRVFASAARRRGLVVAAADAAAAAGGAEFSDEENPYEILGITPLDSFDHMKLAYKRKHKEADENGDQYYLSKLEKAYDTVMMQQLQYRKKGVTYGSVQVSKDIKYADDQPIVPWGPRSSKSTVKDMRINLGISAAIVVWIAIMGNADWKPLQFLCFAFFYRILQKLRATEPPITPIYNEYGEVEGRGIRMAKRVVRALGLIFGCVFAASLGYTAAVNVIEFSWQYTPRIVYYYQELIVTAATAALLYITASYYR

SEQ ID NO: 28673 - protein, 346 aa, Oryza sativa
MNYEDFCHIATVCTEQIGQKCKRFFSPSNFMKFEKDDSGRIAILPFYLYVMRTVSLTQARIDMSELDEDSDGFLQPHEMEAYIRGLIPNLAQLRDMPSAFVQMYCRIAARKFFFFCDPHRRGKACIKKVLLSNCLQELMELHQESEEEVTDTEQAENWFSLTSAQRICDMFLALDKDTNGTLSKQELKEYADGTLTDIFIERVFDEHVRRSKVGGGNSREMDFESFLDFVLALENKDTPEGLTYLFRCLDLNGRGFLTTADIHTLFRDVHQKWIEGGNYELCIEDVRDEIWDMVKPADPLRIALTDLLSCKQGGTIASMLIDVRGFWAHDNRENLLQEEEEQVEEA

SEQ ID NO: 28674 - protein, 36 aa, Oryza sativa
MFVVTQLWFLSFSEFSNLLVMWLRSNIMRGYLHWFL

SEQ ID NO: 28675 - protein, 257 aa, Oryza sativa
MADSMVSSFWGPVTSTTELCEENYAHSSYIAEFYNTVSNVPCVLLALVGLVNALRQGFEKRFSVLHISNMILAIGSMIFHATLQHVLQQSDETPMVWEILLYLYVLYSPDWHYRSTMPTFLFLYGAAFAVVHFLVRFQVVFKLHYVGLCLLCIPRMYKYYIQTKDMAAKRLAKLWVLTLSLATLCWLFDRMFCKKLSHWYVNPQGHAWWHILMGFNSYFANTFLMFCRAQQRGWEPKITHLFGFLPYVKIQKPQKRE

SEQ ID NO: 28676 - protein, 463 aa, Oryza sativa
MGMLRWGAHLLLLLLAAATWTCAGAGAGVTSEYRRKLEATVDMPLDADVFRVPPGYNAPQQVHITLGDQTGTAMTVSWVTANELGSNTVRYGSSPEKLDRAAEGSHTRYDYFNYTSGFIHHCTLTGLTHATKYYYAMGFDHTVRTFSFTTPPKPAPDAPFKFGLIGDLGQTFDSNSTLAHYEANGGDAVLFVGDLSYADNYPLHDNNRWDTWARFVERSVAYQPWIWTAGNHELDYAPELGETVPFKPFTHRYPTPYRAAGSTEPFWYSVKIASAHVIVLASYSAYGKYTPQWTWLQEELATRVDRKLTPWLIVLMHSPWYNSNNYHYMEGETMRVQFERWLVDAKVDVVLAGHVHSYERSRRFANIDYNIVNGKATPAANVDAPVYITIGDGGNIEGIANNFTVPQPAYSAFREASFGHATLEIKNRTHAHYAWHRNHDGAKAVADAVWLTNRYWMPTNDDV

SEQ ID NO: 28677 - protein, 187 aa, Oryza sativa
MASTLAWSSAASSSAPSSRLPPRRSPSLVVVAQGKVKKYRQVILTDDIAEVGKKGDTLKVRAGFYRNFLLPKGKATLLTPEVLKEMQVEQERIDAEKKRVKEEAQQLARVFETIGAFKVPRKGGKGKQIFGSVTAQDLVDIIKSQLNRDVDKRLVTVPEIREIGEYIAEIKLHPEVTAQVRLTVYAK

SEQ ID NO: 28678 - protein, 28 aa, Oryza sativa
MTDFRFVTRFHTFLVCMMRAVHTKFSRC

SEQ ID NO: 28679 - protein, 65 aa, Oryza sativa
MSWLATPLTRTIKFADVRPPETNRPFVTFRAEGNFYFVDAEHFPNKALLARLTLKHPNESAFKNL

SEQ ID NO: 28680 - protein, 312 aa, Oryza sativa
MNPMRPDCLKNDYTKGSKILHEAYTSLFENFVAIVQSCMGKQNTEPALEKPATAVTSPNDSKTKRECNHDSERTKKHKLVQPNTSSNQAREGDSKRSGVTTTKTWGSWAQALYELAMHPENYKNSDSLLEISDDFVVLNDLYPKAKRHVLVVSRKDGLDSLADVKKEHLPLLRRMHSAGVKWAQKFLEEDSSLVFRLGYHSVPSMRQLHLHIISQDFNSASLKNKKHWNSFTTTFFLDSVDVIEEIDQRGSTTISSDDRVLAMELRCHRCRSAHPNIPKLKSHIASCKSSFPSHLLQKDRLLSSSTMHMDCT

SEQ ID NO: 28681 - protein, 110 aa, Oryza sativa
MSQQTKNILSNSEVIAVNQDSLGVQGKKVQSDNGLEVWAGPLSNNRKAVVLWNRQSYQATITAHWSNIGLAGSVAVTARDLWAHSSFAAQGQISASVAPHDCKMSVLTPN

SEQ ID NO: 28682 - protein, 26 aa, Oryza sativa
MTMIFRLAGHFFGTLGCQIAMLSWLI

SEQ ID NO: 28683 - protein, 164 aa, Oryza sativa
MEALLSSPRALFSVTPTACWPASARRRRRVASPVKAAAAAAEPAGEEKKPATGGAAAAAGDGQAAAPAPKKILKKKPVYSMKKGQIVRVDKEKYLNSINYLSVGHPPFFKGLDYIYEDRGEVLDIRIFETGEYALIAWVGIPTPPAWLPTYMLIKSDKLDYERI

SEQ ID NO: 28684 - protein, 384 aa, Oryza sativa
MSTAGKTITCKAAVAWEAGKPLSIEDIEVAPPKANEVRIQIYYTGVCHTDAYTLSGKDPEGAFPIVLGHEGAGIVESIGEGVTNVKVGDHVVALYTPECKECKFCKSGKTNLCGKIRATQGKGLMPDGTSRFKCKGKDLLHFMGTSTFSQYTVVADISVVAIEHDAPMDRTCLLGCGITTGYGAATITANVQAGDNVAIFGAGCVGLSVVQGAAARKAGKIIVVDVNPSKKEWGEKFGATDFVNPPELGDQSIQDKLIEMTDGGCDYTFDCTGNVGVMRAALEACHKGWGESIVIGVAAAGQEISTRPFQLVTGRVWRGCAFGGVKGRSQLNDLVADYKKGDLKVDEFITHRKTLGEINNAFDTMKQGDCIRAVVDMQKLEPKI

SEQ ID NO: 28685 - protein, 25 aa, Oryza sativa
MAGPLPCGTSNPLRSYSLSAAGEQI

SEQ ID NO: 28686 - protein, 446 aa, Oryza sativa
MDSAISTSSSFSPLRLSQNHGSIMSGSTRAQVLPVGRQQQQPPAGGATRLRAVSPSPSPTPPAPQPAETFGFDALKEAFSVDVVAAEARPLNVPLAAPFTIASSRLDAVSNVAVRVELRGGAVGWGEAPVLPSVTAEDQPGALAAATRACGALAGAPAAPLGAVLQNVASALPGHDFASARAGVEMALIDAIANSIRIPLWRLFGGASDSVTTDITIPIVTPNEAAQLAAKYRGQGFQTLKLKVGKNLNSDIEVLKAIRLAHPDCSFILDANEGYTANQAIEALDRLNEMGVTPVLFEQPVHRDDWEGLRDVSIVAKEKYRVAVAADESCRSLLDAQKIMDGNLAHVINIKLAKLGILGALEVIDAARKARIALMIGGMVETRIAMGFAGHLAAGLGCFSFVDLDTPLLLSEDPVFGGYEVSGPVYKFTNARGHGGFLHLDNNGLK

SEQ ID NO: 28687 - protein, 318 aa, Oryza sativa
MAGEDAAAAASAGAAAVQRRPKVVEEDDDEDDFVPLSHARGRKKASGAAAPKYKEEEEEDEDDDEEDNVPLAVSRAKKAGNAGASKAKKDEDDSGDDDDDYHVPLSRSNKGKEKQKSTVKAKVKKEETDSDDERKPKAQKKSSAVTKTSKVKKIKDEDLEIDTKKIKKGAATRKGDAEKVKKEKKVYDLPGQKHDPPQERDPLRIFYESLYEQVPTSEMAAIWLMEWGLLPVDVAQKVFEKKQGQKLKSPVKTTSAKRRPDTPTKKPQLSSATKTNSAVKDSGKTTAQKKRRASSDTDDDDDDFIVSKTKTKMQKMNS

SEQ ID NO: 28688 - protein, 493 aa, Oryza sativa
MAVVAPPSLALPQPPQNPTPKPRRRPPRDVASWTSAIARPAKQGDLPAAAAALSAMLSSPAAPVPNDVTLLTVLSACADSPSSPLARRLALSVHARVLKLFPSHLLLSTCLVRFYFASRLPHLALQLFDAMPVRSAVTYNTVISGLMRNGLVAAAFEVFDGMPAPDKVSWTALIDGCVKNGRHDEAIDCFRAMLLDGVEPDYVTLIAVISACAEVGALGLGMWVHRLVVRQGLERNVRIANSLIDMYARCGQVELARQVFSGMRKRTVVSWNSMIVGFAANGRCADAVEHFEAMRREGFKPDAVTFTGVLTACSHGGLTDEGLRYYDLMRAEYGIAARMEHYGCVVDLLGRSGQLEEAMRVVTTMPMRPNEVVLGALLAGCRMHGDVGMAEQLMQHLLELDPGGDANYVLLSNIYAAVGKWDGAGKVRSLMKARGLRKRPGYSAVEIDGDVHEFVSGDRSHPQAEEISQMLGLLMHEMAGHDYDHVIDCLDGG

SEQ ID NO: 28689 - protein, 331 aa, Oryza sativa
MSWCTIESDPGVFTELIQEMQVKGVQVEELYSLDVDSISELRPVYGLIFLFKWMAGEKDERPVVKDPNPNLFFASQVIPNACATQAILSILMNRPEIDIGPELSNLKEFTGAFAPDMKGLAINNSDSIRTAHNSFARPEPFVSDEQRAAGKDDEVYHFISYLPFEGVLYELDGLKEGPISLGQCSGGPDDLDWLRMVQPVIQKRIERYSQSEIRFNLMAIIKNRKDVYTAELKELEKRRDQLLQEMNESSAAESLNSELAEVTSAIETVSEKIIMEEEKFKKWRTENIRRKHNYIPFLFNFLKMLAEKKQLKPLVEKAKQQKASSTSTSAR

SEQ ID NO: 28690 - protein, 240 aa, Oryza sativa
MFPTEDSKVRYVLSRTKDKANQVLLPWVLENKERTTVGLWEHMDTHFQDVHQQQRALNKLRHLKQGRRPIRDYVSEFNQLRVESRQTFSPVVAREMFSEGLGEELQKLMLYTPKNGSLKEYMDKAIELSDDLYRIQLHGRNRRNAAYSYAQAPPKATQRETSLEAMDWEPSRVNRAREKMNRPRRPPRDCYSCGELGHLARNCPNNIRVKRARALPKNEERKQLEEAEDLADSDSGKDEL

SEQ ID NO: 28691 - protein, 61 aa, Oryza sativa
MAASVAPASSSGWDFTCDFEIDYGSEERASIVYKTLAVDKELVEKRTRILWYLSCSCNLTR

SEQ ID NO: 28692 - protein, 95 aa, Oryza sativa
MEQIKDVDSLKHQEISVFWVGIAENVQIMGPFDGWSQGEAMSMEYSGYQARFSATLNLRPGRYEIKFLVDGEWRLSLEYPIDGEGSMQNNILVVN

SEQ ID NO: 28693 - protein, 407 aa, Oryza sativa
METTHERQSELPSGSMQERSAETRANLVQRSCTTETCDLQPQLDLSSTIQTVQLEGIRSEDMNQIGVQSNSALSSEQPTQPLPVAPLVFNYQRFSDEPLKNELERLKHTSNVLSKVHEQKRKQLLVEYNQEMEKLKQKYDSLLQKEDSFYAQKEAELDTIYRKVFINQSLAENFRRKFLPLSAAQGGSTRPTIGQLVQSSQEPSARIVAEQVTASPVTLSSAVRPQVLHSSGPYVQPSLVVQPSSQATQPQSILPGNMYRAMSSSPFSSTPMPMPHGTYRAAGAQPHAPSPHLQQLRMPSPYATSHGNQHQRPSILASLLPFVLPSSSNPSLTAPLSLNTVVHRTSGPLNAGAGSQHAGSQISGVNPSGSSASASLNTWLTARLALTSEARGTVSSTEVVCLSDDES

SEQ ID NO: 28694 - protein, 129 aa, Oryza sativa
MINNLPTIFEVVTGAAKKQAKEKTPNSSSKSNKPSSKVQSKAESRSKSKLSAPKDEEGSGDDEGEEEEDDHDNTLCGTCGTNDGKDEFWICCDNCEKWYHGKCVKITPARAEHIKQYKCPDCTNKRARA

SEQ ID NO: 28695 - protein, 39 aa, Oryza sativa
MQLWSMKEVKKNTPNNEETTDMLLFYWPGEFYVSVLCYL

SEQ ID NO: 28696 - protein, 145 aa, Oryza sativa
MSTEDGKDIYINTVDAFQGQERDVIIMSCVRASNHGVGFVADIRRMNVALTRARRALWVVGNAGALMQSEDWALLIADAKARKCFMDLDTIPKDFLAMKISNSVPRNGSYRNLDDLGRPGDRSRDNLPFGMPRRPNSSNGSRREV

SEQ ID NO: 28697 - protein, 433 aa, Oryza sativa
MLFLLSSGKTVYFGQASQACEFFAQTGFPCPPLRNPSDHFLRCVNSDFDKVKATLKGSMKARIERSDDPLDRMTTSEAIRKLVASYSRSQYYYAARERVNDISRLKGTVLDSGGSQASFLMQAGTLTKRSFINMSRDFGYYWLRLLIYLLVTVCIGTIYYDVGTKYTSILARAACTAFVFGFVTFMSIGGFPSFVEEMKVFQRERLNGHYGVAAFVISNTISALPFLVLICFLSGTICYFMVRLHPGFSHYIFFVLNLYASVTVVESLMMAIASVIPNFLMGIIIGAGIQGIFMLVSGYFRLPYDIPKPVWRYPMQYISFHYWALQGQCQNDMDGLVFDNQYPDQPKIPGDFILKYIFQINVHRSKWIDLSVIFSMIFIYRILFFLMIKVNEDALPWIRGYIARKRLQKKEPLGKTPSLRGYVVDPELGPNES

SEQ ID NO: 28698 - protein, 143 aa, Oryza sativa
MIKPDGVQRGLVGEIISRFEKKGFVLKGLKLFQCPKDLAQEHYKDLKEKPFFPGLIEYITSGPVVCMAWEGNGVVASARKLIGATNPLQAEPGTIRGDLAVQTGRNVVHGSDSPDNGKREIALWFKEGELCEWESVLTPWLVE

SEQ ID NO: 28699 - protein, 370 aa, Oryza sativa
MIRRFLYIADHCFTGPSLSHRLRRVNPSHLSYPDGHPLATKPERATVEVEDARLPPPAMAFCSPGTTATAMGMEFMRRNDGSIVGIDHTGRAVLYDPAARAVRTLPALAAPKLMPVSAAVGDDLYVMETTPLPDGAGCFEALVRLEDNPAESDSDKWEVGDNYLWQPLPPPPPPPSPCVNAYAAGFEGSSRGMICGYAVAGDGDGGTRILVSTTTNGTYSFDTASSAWSKAGDWELPFRGQAEHVPEHGLWFGISDMDHTILGAWNLSSTIQQPQPPVASLQLKGFSVESHSDDRRRELEVYTSQVVHLGGGKLCVAKMFSVNRRERGKINFAMLTGVEVVRCRGGKLRIVKHKSCRYNFGEDYTPDYLL

SEQ ID NO: 28700 - protein, 396 aa, Oryza sativa
MKRRHLPPVLVLLLLSILSLSFRRRLLVLQGPPSSSSSSRHPVGDPLLRRLAADDGAGSSQILAEAAALFANASISTFPSLGNHHRLLYLRMPYAFSPRAPPRPKTVARLRVPVDALPPDGKLLASFRASLGSFLAGRRRRGRGGNVAGVMRDLAGVLGRRYRTCAVVGNSGVLLGSGRGPQIDAHDLVIRLNNARVAGFAADVGVKTSLSFVNSNILHICAARNAITRAACGCHPYGGEVPMAMYVCQPAHLLDALICNATATPSSPFPLLVTDARLDALCARIAKYYSLRRFVSATGEPAANWTRRHDERYFHYSSGMQAVVMALGVCDEVSLFGFGKSPGAKHHYHTNQKKELDLHDYEAEYDFYGDLQARPAAVPFLDDAHGFTVPPVRLHW

SEQ ID NO: 28701 - protein, 419 aa, Oryza sativa
MQCITGRNLKSLPNELVSQVEPWELWYEPGTGSSVADDNNSPSSSITGTLVALRSTQMITTVLPNANITPNNLGTLDSAVSCFLHLSESASSVETIAVMEAVLEEWEQLFSSKEEYVPPQESPKETNDWSDDWDDGWEALPEELESPTKKHGRTSLSVDPLHTCWMEIIRKLVELGEPHKVIELLDRASSRNSMLIEDDEANRLLELISAMEPLMALKIMLLLPYETTRLRCLQMVEAKMREGTVSTSSNADDHELLALVLSSGVLQRIVTEVEYSKLFSHICHLVGHLARSSQNDLLVKWNDEANAPGTSKTNKSLLFARVLFPSFISELVLRGQYLLAGFVISRWMHTHPSLGLMDVAEASVRRYLNGQIVQAQQLGGTDVFLTDNELSVSHALSTLRSNLVSLVQAALATLPNQDL

SEQ ID NO: 28702 - protein, 405 aa, Oryza sativa
MLGISSNNSKITNLNSSIDSDKSNGGSSICSANQKSAPTKFKQESKPQERPNTPSRSPAKIVSAKQEINKDTRKTSASSPSQNGSAVVKKQMSKDSKKESASEKNSPPKLYKTSPPTPTPTPPPPAMTSPPKLNLAAKPNGTSGTVTSTPTVKRRVTETVSWDSLPTSLIKSVKVVARRKTIALVVAAEAQREATAAASLLKGLGIFAEIRKSAEEDPHAAITKFFQLNRLIIQQSVFWKDYSSEPVKESRPEKEKPSRKASASQNKAVAGSTAKNSDDAYTSEKIDWAREDGFKEISRSWIILKKESQSWFLSFLEDALEAGFKFEGQNKNTRERVRGHSKGGDGQIAVRLSQLKETSNWLDQLHSEVDKSQDALVETIEQLKQKVYTCLLGTVETAASALEAR

SEQ ID NO: 28703 - protein, 110 aa, Oryza sativa
MLQTSTRPNLRTWSLLISGLSRNGMHPEVMNLCCKMQEVEPAPSPTIFSAALLAVKSAASVQYGKAMHACIVKKGLLLSKSVVQSLLNMYGSFNDRGTVESLLRFLAAAQ

SEQ ID NO: 28704 - protein, 333 aa, Oryza sativa
MMGGFLSRVLLLAFGYAYPAYECYKTVELNKPEIEQLIFWCQYWILVALMTVMERFGDFTISWLPFYSEAKLMFFIYLWYPKTKGTTYIYGTFFRPYISQHENEIDRNLLELRARATDVVVLYFQKAATVGQNTFFGVLKYVASQSPSQRSSQQPSQEPQQPKQQQAPVQQQPTQKQAPTVLRRSASIAARQAAMAQQSQDAKTVPSSPKIKRQASTKAAPVASTKLTGAAAPSTPKSDADAPKKNEAAPASLQVATPATKADVPASEPSAPLPEAEEADKMAIDEADDAVEGTEEGDPVPGETVEERPMEETIRVTRSKLRRRTASEDPAGN

SEQ ID NO: 28705 - protein, 42 aa, Oryza sativa
MMNGRGGYAGKASRGRRVSASADGRRWCQRRARRGEFWSKST

SEQ ID NO: 28706 - protein, 86 aa, Oryza sativa
MKVVKPCVDIVRDFLSDDTILASRDGSSVTGSPRMSSRELWTQYVCEACDNRVLRGTHEWEQHKQGRCHRKRVQRLKQKASTVISL

SEQ ID NO: 28707 - protein, 198 aa, Oryza sativa
MASALLRKATVGGSAAAAAARWASRGLASVGSGSDIVSAAPGVSLQKARSWDEGVATNFSTTPLKDIFHGKKVVIFGLPGAYTGVCSQAHVPSYKNNIDKLKAKGVDSVICVSVNDPYALNGWAEKLQAKDAIEFYGDFDGSFHKSLDLEVDLSAALLGRRSHRWSAFVDDGKIKAFNVEVAPSDFKVSGAEVILDQI

SEQ ID NO: 28708 - protein, 148 aa, Oryza sativa
MLVRRHGLFCGRHCGGACVGDTKTSAKALPCLWPVRRRRRPWAPFSFLEALSWRFFHIPHKSPGENLVPASDERRRRSYDVVSSFGASLRRSSNTLTTVDGPFRFKSSHTLCSARPSPSWVRFVSRGGCHALWLLLQMKSELLADGVR

SEQ ID NO: 28709 - protein, 481 aa, Oryza sativa
MLPSTAMAFHVFLIAALLLLPLPAAFSKAVRTQSLLANPLSPDPITQEQQLSLAAPRTNASTLHFRLAHREHFALNATASDLLAHLLARDAARAAALLAAPNNATRPRRRGGFAAPLLSGLPQGSGEYFAQVGVGTPATTALMVLDTGSDVVWLQCAPCRHCYAQSGRVFDPRRSRSYAAVDCVAPICRRLDSAGCDRRRNSCLYQVAYGDGSVTAGDFASETLTFARGARVQRVAIGCGHDNEGLFIAASGLLGLGRGRLSFPSQIARSFGRSFSYCLVDRTSSVRPSSTRSSTVTFGAGAVAAAAGASFTPMGRNPRMATFYYVHLLGFSVGGARVKGVSQSDLRLNPTTGRGGVILDSGTSVTRLARPVYEAVRDAFRAAAVGLRVSPGGFSLFDTCYNLSGRRVVKVPTVSMHLAGGASVALPPENYLIPVGTSGTFCFAMAGTDGGVSIIGNIQQQGFRVVFDGDAQRVGFVPKSC

SEQ ID NO: 28710 - protein, 58 aa, Oryza sativa
MGTSTLERCATSWGMLTHGKTGKEGETNQKKYWTNKLLVYLSHYLYLVLCIMRRVSAI

SEQ ID NO: 28711 - protein, 4 aa, Oryza sativa
MKSC

SEQ ID NO: 28712 - protein, 103 aa, Oryza sativa
MMWGVKYYNDLLMVAGPDGNVQSELLFRKDRSTFTFDKGWAFPRRIYFNGESCVMPSPDLYPWLPPSSTPRFRTVFLLMSFLVCGTLAFLHNHLVLDKNCGKC

SEQ ID NO: 28713 - protein, 294 aa, Oryza sativa
MLESPPAEEDEKESPKSFEFVPSNAKSDVASSTPKIQRPPPVKAVTTVPTCPKLTVKTEAFTPKVQATNSSRGLAPLTGSRAHPSALKQSMSVKRSVIKCPRELLAGKAATAANEIAQENQAVKRQKLDDGRTRQILNVKTRTLPHKGRGGGLAGSTEMSLSAMRKHRDDSHSLKEVTHYISAAEMVKKFESGTRELAIPHNRSLSHEDAATALQRRTKLMLTRPKEPEFQTSHRVRAVRVKSSAELEEEMLAKIPKFRARPFNKKIAEAPSFPPLPRKAPQLPEFNEFHLKTI

SEQ ID NO: 28714 - protein, 387 aa, Oryza sativa
MDKVGFMCKIAGQNNNLMGQFHNALYLGDAMKRVEILENAGQLPLAYITAATHGLTEIADRLAAELGENIPSLPEGKTRSLLIPPAPLTASGDWPLLRVMRGIFEGGLDATGKAELEEDDEAAGADWGDEDLDMVDASEAMANGGDGFDAEEGEANEEDGEEGGWDLEDLELPPEAETPKNAGNALSVVFVAPPPGMPVSQIWTQKSSLAGEHAAAGNFDTAMRLLSRQLGIKNFAPLKPLFLDLHMGSHSYLRALATAPIIPVAVEKGWSESASPNVRGPPALVFTFSQMEDRLKAAYKATTEGKFPEALRQFLNILHTIPLIVVDSRREVDEVKELLWVCATSKRTLLLQSTLQGCCWRTTLMRAKQRGPDRCSNSAVERRIAVS

SEQ ID NO: 28715 - protein, 47 aa, Oryza sativa
MKPPEGQDIGLCFISSLQRPNGSSDHLLKNISLHIGLRTKAGATRKM

SEQ ID NO: 28716 - protein, 467 aa, Oryza sativa
MVSLAGSQIPSPGQSPCAAARSQRRGAGYSMRTIRSALLQPDSCPGSPHVAAAYDAAGADSDMENLTDSVIDFHLSELAATAGPAHPAAVAKSSSANAAATEMLELSRDFSDYSSFNSDISGELERLAAAAAAVVTPRSDAPQVGAVDLNELESMDLSVEAAPLERVEPFVLACVRALGPDAAPDARRTAAARIRLLAKHRSDIRELIGVSGAIPALVPLLRSTDPVAQESAVTALLNLSLEERNRSAITAAGAIKPLVYALRTGTASAKQNAACALLSLSGIEENRATIGACGAIPPLVALLSAGSTRGKKDALTTLYRLCSARRNKERAVSAGAVVPLIHLVGERGSGTSEKAMVVLASLAGIVEGRDAVVEAGGIPALVETIEDGPAREREFAVVALLQLCSECPRNRALLVREGAIPPLVALSQSGSARAKHKAETLLGYLREQRQGGGGCRVEPVAASSLAR

SEQ ID NO: 28717 - protein, 515 aa, Oryza sativa
MAPKKRKADPAESPVASSEAGAGTNHHQETPSSELKPRGTIYFPITDDPPEPSAEGGAEGEDGAGGDDDEEDIAKLLEPLSREQLVALLRTAAETTPATMAAVRRAAEADPASRKLFVHGLGWGAGADDLRSAFSRFGELEDCRVISDKQSGRSKGYGFVLFRSRRSALRALRRPQLQIGGRLAFCHLAASGPAPPTSQSQNPSSNTNANSGAANNAGSASSSQPDNMQRKIFVGNVHADVDVDRLYEYFSQFGEIEEGPLGFDKTTGKPKGFALFVYKSVESARRALEEPTRNFDGKMLNVQKAIDGRTKNTPGMNANSNPSGTAASAAAAAAAAQMTAPATAAITPYDASAYGATAVPDLGYAQQAAMLGLGAQQQAFAQPNAAMLAMMAAAMQNPAMLATLNPAFAAAALGAGGQQVHAAGIPGFGAQGFGTQGFAAGAAAFPNAAGVQAPPGFQGPPGFQTSAGFQVGQAASQAGTAAAAAAGAAGYQAAAAGQGQVPGTQIGGAGFQGGF

SEQ ID NO: 28718 - protein, 98 aa, Oryza sativa
MEQCRQGKSAKRIRNFGKRIGSEGWARGSRPRTRRLPADCSSCSRGESGPPRAGRGTDRERPPRGPSPGVEQPTQNWYGQGESDCLIKTKHCDGPRGC

SEQ ID NO: 28719 - protein, 373 aa, Oryza sativa
MDYVKVPEILWEYTTPQVLTMEYVPGIKINRIKQLDKLGVDRKRLGRYAVESYLEQILSHGFFHADPHPGNIAVDDVNGGRLIFYDFGMMGSISPNIREGLLEAFYGVYEKDPDKVLQSMIQMGVLVPTGDMTAVRRTAQFFLDSFEERLAAQRKEREMATEELGFKKQLTKEEKFEKKKQRLAAIGEDLLSIAADQPFRFPATFTFVVRAFSVLDGIGKGLDPRFDITEIAKPYAMELLRFNEAGVEVIVKDARKRWERQSRAFYNLFRQPDRVEKLAQIIERLEQGDLKLRVRTLESERAFQRVAAVQKTIGYGVAAGSLVNLATVLYLNSIRLPATIAYSLCAFFGLQVLVGLLKVKKLDQQERLITGTA

SEQ ID NO: 28720 - protein, 341 aa, Oryza sativa
MAPPQLAGKMTAKAAAAVKPATRAYVTFLAGDGDYWKGVVGLAKGLRKVGSAYPLVVAVLPDVPESHRRILISQGCIVREIEPVYPPENQTQFAMAYYVINYSKLRIWEFVEYERMVYLDADIQVFDNIDELLELPKGHFYAVMDCFCEKTWSHTPQYQIGYCQQCPDKVAWPTAELGPPPALYFNAGMFVHEPSMATAKSLLDTLRVTTPTPFAEQDFLNMFFREQYKPIPLIYNLVLAMLWRHPENVQLEKVKVVHYCAAGSKPWRYTGKEANMDREDIKMLVKKWWDVYNDGSLDFKGLPPIAAADDADEVEAAAKKPLRAALAEARTVKYVTAPSAA

SEQ ID NO: 28721 - protein, 326 aa, Oryza sativa
MTSSMSPAPAPAYAQVMEDMEKGKELAAQLQGLLRDSPEAGRFVDQILHTFSRAMRALDKAAVSAAGGEGSEVQSEVTCGGGASAGGKRKAPAADRKANCRRRTQQSSGNSVVVKNLDDGQAWRKYGQKEIQNSKHPKAYFRCTHKYDQLCTAQRQVQRCDDDPASYRVTYIGEHTCRDPATAPIIAAHVIHQVAAGDNDDGCGGLQAGSRLISFVAAPAAPVDAAAAPTTSTITTVTAPGPLLQPLKVEGGVGSSDQEEVLSSLTPGSSAARGGGGGGGVAGPFGPDQGDVTSSLHWSYDAVAGMEFFKNDEVVFDLDDIMGLSF

SEQ ID NO: 28722 - protein, 357 aa, Oryza sativa
MYKNQLQELAQRSCFSLPSYVCTREGPDHAPRFKATVTFNGETFDGPSNCTTLRQAEHAAAEVALARLSLRGPSSSLTARVLDETGVYKNLLQETAHRAGLKLPVYTTVRSGPGHSPVFSSTVELAGMSFAGDPAKTKKHAEKNAAMAAWSSLKQMPEARKEPGGGGGEEQEHVVVARVLAALKPRDDCGGGGGEGKAAAASLPKKHLAGASCSSATSLYRHQWGRPSPPPPAAGPKILPPLHLLQQQQAAASGSRAAAAELEQERRKAAELVHMLHAVMLRDRAADAMPPPMPCYYAPYYHHGGGVAPTRPFAGAAGFHAPPAVSVRSVIPVCAAPPSPRPPPRKEDDPATSSKRA

SEQ ID NO: 28723 - protein, 195 aa, Oryza sativa
MALYNLSTVTDNLQTILSVQPIPSLIELLKGGKRSSKTADKCCALLESLLSFDQGRAALISEEGGVLTIVEVLEEGSLQGREHAVGALLTMCESDRNKYRDIILNEGAIPGLLELTVHGTPKSRVKAHVLLDLLRNSPYSRSKLPADTLENIVSNIASQIDGEDRGGKAKKMLAEMVKVSMEQSLRHLQRRASFA

SEQ ID NO: 28724 - protein, 149 aa, Oryza sativa
MEGRISSATLVVAAVLAMLVLVPAAARAERFVVGDAARWTWGYNYTDWVIKKGPFFQNDSLVFMYDPPNATTHAHSVYMMRNAADYQSCNLKAAKLVANVMQGAGSGYEFVLRKRKPHYFVCGERGGIHCTMGQMKFIVKPKSSACRDD

SEQ ID NO: 28725 - protein, 15 aa, Oryza sativa
MTASSYRYYILQSCL

SEQ ID NO: 28726 - protein, 348 aa, Oryza sativa
MADGGGYDLLTALPDDVLRLLLARLPSTAEAARTSVLSRRWRSLWTNLPQLRFADVTDLARVAAVLRHHSAPVLLLRIESSDPAPEKIAAVLDLVAPRLQGKLHFDIITPGNQNSAAGAAGIGAAIRIPCFEKATEVTIRLLRGIGIRLPPPSGVFARLTALSLSHCRLDDQSQRDLGGAVSSEGCPSLRELRIRDADVVSNLAIRSESLRLVQLSRLEGIRQLTISAPALTELDLYACLLWGMPMVDIFAPALGTLRWVDFFRSSSVRFRAMPNVHTLAVFVMVYGYVSHSLPLLQYFTEARDVRLSLVYSSISSNDKLLVEAVKDELPAIEILFLRLLTEGHTFGP

SEQ ID NO: 28727 - protein, 41 aa, Oryza sativa
MYMKDRKNQRLMKNRAIKTRMRGQVHQLLMARRWKSPMMKI

SEQ ID NO: 28728 - protein, 197 aa, Oryza sativa
MSTARFIKCVTVGDGAVGKTCMLISYTSNTFPTDYVPTVFDNFSANVVVDGNTVNLGLWDTAGQEDYNRLRPLSYRGADVFLLAFSLISKASYENIHKKWIPELRHYAPNVPIVLVGTKLDLREDKQFFLDHPGLAPISTAQGEELKRMIGAAAYIECSSKTQQNVKSVFDSAIKVVLCPPKPKKKNTRKQGSCWIL

SEQ ID NO: 28729 - protein, 101 aa, Oryza sativa
MGSSSIECLSFRPCRLSSSSSLSRSRGSENMSPFIVKRVSQQSARNMSIFHGHQRHLQSLHKCTTLSSSNGAHCPPRLLSNVSLQTLSIATTTASTITCVP

SEQ ID NO: 28730 - protein, 52 aa, Oryza sativa
MSRRWRGRFLATTTRRTASPSCSSTGPSCDPPSMVSSFQLVLLLLCHCGKLN

SEQ ID NO: 28731 - protein, 46 aa, Oryza sativa
MYVVWRKHHWCGDGVMKCMTECFNYFICPKKKDTYILFITVVRICY

SEQ ID NO: 28732 - protein, 323 aa, Oryza sativa
MLIKINVEPDQRPEVMVLVDIFRAKVVDISENTLTIEVTGDPGKIVAVQRNLSKFGIKEICRTGKIALRREKIGATARFWGFSAASYPDLIEALPKNSLLTSVNKTVNGSFDQPSNAGGDVYPVEPYEGSSMNQVLDAHWGVLGDEDSSGLRSHTLSILVNDCPGVLNIVTGVFARRGYNIQSLAVGPAEKSGLSRITTVAPGTDESIEKLVQQLNKLVDVHEVQDITHLPFAERELMLIKVSVNTAARRDILDIAEIFRAKSVDVSDHTVTLQLTGDLDKMVALQRLLEPYGICEVARTGRVALVRESGVDSKYLRGYSFPL

SEQ ID NO: 28733 - protein, 546 aa, Oryza sativa
MGPIQVRYADGERERHGAIEHKLFVASLNKQATAKEIEEIFAPYGHVEDVYIMKDGMRQSRGCGFVKFSSREPALAAMSALSGNYVMRGCEQPLIIRFADPKRPRPGESRGGPAFGGPGFSPRSDAALVIRPTANLDEPRGRHMPPDSWHPSSPRSAPHQFNNFGSDNPMAPKGSTVTSTTDTATFRPQMFSGNGSLSSQTAVPSSSHMGMNPPPMAQGHHLGGQQIPPLQKLPGLPQNFPVQLQNNQLGQPLQGPAQQIGQLQVPQSMGPGSFGQNRLSGQLPVSQPLMQQNASVSAVQVPSAVSNSMQAIPGQQHLPSNVAPQMLQQPVQQMPSQAPQLLLQQQAALQSSYQSSQQAIYQLQQQLQLMQQQQQSNLNHQQPTQGQPVQSSNPGAPNAIIPSNINTIPQQATSPAVPLTCNWTEHTSPEGFKYYYNSITRESKWDKPEEYVLYEQQQQQQQQQKLLLLQQHQQKLAMQQLQSPPQAQTHPAMQPVQQIPQAQQGQQQMQMKQQELNYTQLQTPGAIDPSRIQQGIQSAQERAWKS

SEQ ID NO: 28734 - protein, 73 aa, Oryza sativa
MRSLWMSSCNVTLKGCQVLASKMPMLNVEVINERDGSNEMEENHGDLPKVEKLYVYRTTAGARDDAPNLVKIL

SEQ ID NO: 28735 - protein, 258 aa, Oryza sativa
MAVSSTLRRARSHPSWAAAARGLLATWGAGSGGRVRHPRHGAASASLFSSLSSSQTSAADAQLLRVINMEISYAQKDCKNRNWSKELGEGFPFEIQDKDGTNMMTLKRSDHKEQIEVEVFLPSAVNEAEENGEPEDQCEDGKHRTHIGNGVPAQYCIPLIVRVRKEAASYLKISCSSYPNELIIESLSFEPNDESGDSASLEAKLSNLPEEFQKAVYSYLKSRCISTDITDFLHAYMINKECHEYLSWLRKVKGLIKS

SEQ ID NO: 28736 - protein, 377 aa, Oryza sativa
MADAEDIQPLVCDNGTGMVKAGFAGDDAPRAVFPSIVGRPRHTGVMVGMGQKDAYVGDEAQSKRGILTLKYPIEHGIVSNWDDMEKIWHHTFYNELRVAPEERPVLLTEAPLNPKANREKMTQIMFETFNTPAMYVAIQAVLSLYASGRTTGIVLDSGDGVSHTVPIYEGYALPHAILRLDLAGRDLTDYLMKILTERGYSFTTTAEREIVRDMKEKLSYIALDYDQEMETAKTSSSVEKSYELPDGQVITIGAERFRCPEVLFQPSFIGMEAAGIHETTYNSIMKCDVDIRKDLYGNIVLSGGTTMFPGIADRMSKEITALAPSSMKIKVVAPPERKYSVWIGGSILASLSTFQQMWIAKAEYDESGPSIVHRKCF

SEQ ID NO: 28737 - protein, 163 aa, Oryza sativa
MFPEQPQRRRKSLPNYWNFWSPLASLEMLFSLMIRKGRNVEGDLKEMARRLLKALLMGRKGERVESNQLKLLKRMTMKTMRVLLILRMHQWVRKMMRILKQKIMLGVMKNLMSLQQRKRQQMINKQKRQKKRMRLPRRLLQDLQKVCLSLLKTLKKMMSQKLS

SEQ ID NO: 28738 - protein, 483 aa, Oryza sativa
MTPRQAAPSVTQRASASIQERISGARGASDDMFGKTSSADQSNTPAIPKQTTVQGATPDVRGTSYADREMKLPADEKATANKQKPVSSSQQTIEPIRGGTPTSYGSTDDDLAKTSRANERQTPPSKAQAPASNRQSASTALQGGTPDARGENTAVKPSVTSPTGMPTSSRRQEPTPSVTSPTGVPTSPRRQEPTPDTQRRRAADQMPSQAPLPSSFSTRNKENGISEAGQTNTVAPDGLPGPGVPKDAGPQVAGPSVVKSQKNMNEAYNDGPSTQQLPNDQYRSQPREAKEEQGADAALINEIGKAQKDDLLANPNQSSTGRVQPTSTEETSKQQLQSGLNKPISSKDGKETVSYGSSATSREMLPSIPDKSMRVQQPQGDKSSYSSISQEDNVKQGSQAALQGSGNEQPKKRDLLANADEKIRGTTGEALQKSDEGRISSNTEQMKSNRNNSKPDGSTEPTSFDGNEGNLPESQRRGSSSNP

SEQ ID NO: 28739 - protein, 213 aa, Oryza sativa
MACRRPLLPVHLPASPRRPPPPPPGSLAAEAARRRPPRPRRGRQAAPHVPPPRRPLRRPHVPPLRHGAPRDRLHPGRPARGVRRRRRRRRRRRGRQEGGWHRGPPEPRRAQRHGPPRAHHLRAPEPGRQVARAPQVRRRRDARAAADLVRGGRRAAADQDRGGAPPRGVRARGAGRRRGVQARGARLHPEPPPRRALLHRPGARGARHVQGPH

SEQ ID NO: 28740 - protein, 442 aa, Oryza sativa
MTTSVLPLLLLHIFILSSMGSHDHGHGDGGAENREHYIAVETSSLLKPKAICSGLKAMPSSNGTWVALHRPYGPCSPSPTTTSPPLLVDMLRWDKLHTDAIRRKATAGGDVVLEPDKPIVDVQQSDYKMQASFGIGTGGRSGSSSSSSSRISRPSAIDDPILAQPMSIDTSIDLPWIQCAPCPMPECYPQQNALFDPRRSRTSAAVPCGSAACGELGRYGAGCSNNQCQYFVDYGDGRATSGTYMVDALTLNPSTVVMNFRFGRSHAVRGNFSASTSGTMFARTPLVRNPSIIPTLYLVRLRGIEVGGRRLNVPPVVFAGGAVMDSSVIITQLPPTAYRALRLAFRSAMAAYPRVAGGRAGLDTCYDFVRFTSVTVPAVSLVFDGGAVVRLDAMGVMVEGCLAFVPTPGDFALGFIGNVQQQTHEVLYDVVGGSVGFRRGAC

SEQ ID NO: 28741 - protein, 87 aa, Oryza sativa
MRLLSINQIDAALAQLGGSRSRSYWRWLRTRICSSTTPRNQNWFLAEMPQLPRNWIVEAQSFLHPQNHWSSRALKRGPWSHQADEMK

SEQ ID NO: 28742 - protein, 521 aa, Oryza sativa
MGEDLVTTLSMENGGGGGGGGHHSLCTLLSMDPAGHLDDRAAGVMVQPRIGDGAGRAHAVSLSGAHPPDINQPWQTDLCDMLDVSLGPQIQVYDAEALAVLSSAPKAGNRKAAKRGDSIWGAWFFFTFYFKPLLADKCKGKVTRDANGVSGFDKTDLRLDMFMVQHDMENMYMWVFKERPENALGKMQLRSYMNGHSRPGEPQFPFSVDRGFVRSHRMQRKHYRGLSNPQCIHGIEVVRSPNLASITEVDRRRWVELTGRELNFAIPQEACDFGTWRTMPNTEIELDRPHPVMKGNVHQHPKKLLNGSGLNLSSPSNHSGEDGMDLSPVSSKRRKEVFPHAMDEECFLPLNSCGERTQQGVEMHSVVQPSWQHEFSGVMKKARGPVTAAKSIYEDDQGYLIMVSLPFVDQQKVKVSWRNSLTHGIVKILCVSTAQTPYIRRHDRVFKLADPMPEHCPHGEFVREIPLATRIPEDAKLEAYFDEAAAVLEIMVPKRGNEPEEHEVRVSMRPPHLAANDLLLT

SEQ ID NO: 28743 - protein, 70 aa, Oryza sativa
MAASTKALALLFAVLVALVAATAAVRVLEEEAVELGGLAPAPAPANAAGAVAPGAWAVAAVVSLLAFLAH

SEQ ID NO: 28744 - protein, 312 aa, Oryza sativa
MSPSPLLARPPAPSSPSTYPSLPPRRCAPAVASAALRVAPATASRAPFSRLVTKRNFAASDIREDYSTPIDVVADVKTEKIVVLGGSGFVGSAICKAAVSKGIEVVSLSRSGRPSYSDPWVDQVTWLAGDVFYARWDEVLVGATAVVSTLGGFGNEEQMKRINGEANVTAVDAAKEFGIPKFILISVHDYNLPSFLLNSGYFTGKRKAESEVLSKYPTSGVVLRPGFIYGKRKVDGFEIPLDVVGQPLEKLFSSVENFTKPLSSLPASDLLLAPPVSVDDVAYAVINGVIDDSFFGVFTIEQIKEAAAKVRV

SEQ ID NO: 28745 - protein, 397 aa, Oryza sativa
MQHSPSNEMTLLLLLFLLGCTHYGHAGSDRPKIDSIFSFGNSYADTGNFVKLAAPVFPGIPFNNLPYGETFFGHPTGRASNGRLNVDFIAEGLGVPLLAPYHGESQDFSHGANFAVVGATALDLAFFQKNNITSVPPFNTSLSVQVEWFQKLKPTLCSTTQGCKDYFERSLFFMGEIGGNDYVFLYAAGKTVDEAMSYVPKVVQAISAGVEAVIKEGARYVVVPGQLPTGCLPIILTLYASPAAADYDAGTGCLWRFNALARYHNAVLFAAVSLLRAKHPSVAIVFADYYRPVIKFVQNPDEFGFSESSKLRACCGGGGGAYNYDVAAACGFPGAAACPDPDAAINWDGIHLTEAAYGQVAAGWLRGPYAHPPILAAVQRSDEGNPIQMATSMPASF

SEQ ID NO: 28746 - protein, 40 aa, Oryza sativa
MVRPNDSNVGQVSPSLQLASMFASLNCNADMVISVGGDSL

SEQ ID NO: 28747 - protein, 51 aa, Oryza sativa
MLWSLINERMVGRFRMPYLTWLAGELFLKFLSMGSTWVALMILLKHMRVAS

SEQ ID NO: 28748 - protein, 235 aa, Oryza sativa
MDTSKDMKTREKELLAKEAELNRREKEIKRREEAAARAGIVLEDKNWPPFFPIIHNDIGNEIPVHLQRTQYVAFASLLGLVLCLFWNIICVTAAWIKGEGPKIWFLAVIYFILGCPGAYYLWYRPLYRAMRNESALKFGWFFLFYLVHIAFCVYAAVSPSILFVGKSLTGIFPAISLIGNTVIVGVFYFLGFAMFCLESLLSMWVIQRVYLYFRGSGKEAEMKREAARSAARAAF

SEQ ID NO: 28749 - protein, 53 aa, Oryza sativa
MNRGRLPALVGGGGSSVVGKRETRLYEPEERLHCFRKGVKTGAFCSASRNASE

SEQ ID NO: 28750 - protein, 422 aa, Oryza sativa
MLHHSNSRHQRNRGSRVKTLLQATLLLGVVVWLMYQVKHSYDKKNEYLEDAENQPAHDDRSMFQGRKERGGSYGDGILEKGGENPDVVSKPDEENIGETVFEKDNTDSHDDDIRNTDRSKAGEGHGSSADGNTEANSNDEDGTTNHSEGEKSDAESNSSDAESKGEDHSTGDDMPQSNTVLEESSAETNRMPHEEVAHGDESTNEDQSNVKSDGSNEEEAEKKEAVDSQNASESLSDDAKGGTDDEHSSGTLPDETGNLPSGQNENSQSDATSTTSDASSEAVHIETGSENEDAAKSSGTASGDDDKGSANEASDSNETKSDEGNVAAEVSNDQAANTEAGNSQEASAAEAANGSSEETKPVENQNDGNTESSNNGEQVDIKMETSASTNAEQKESQVGDGSSGSNGSNDSGAKQTGTTETQ

SEQ ID NO: 28751 - protein, 151 aa, Oryza sativa
MAALQLQALRAPAAAAAPLRSSSFCTPLSLPAPAPPRRGARASTASARITMRFGVASKQAYICRDCGYIYSDRTPFDKLPDKYFCPVCGAPKRRFKPYEPKVAKNANATDARKARKEQLKKDEAVGQALPIGIAVGILALAGLFFYLNSVY

SEQ ID NO: 28752 - protein, 123 aa, Oryza sativa
MLSSLSAWLVNPRRNPLARLHMNAVASRLRKYGLRYDDLYDPYHDLDIKEALARLPREVVDARNQRLKRAMDLSMKHQYLPADAQAKQTPFRGYLSDMLALVKKESAEREALGALPLYQRTIP

SEQ ID NO: 28753 - protein, 382 aa, Oryza sativa
MFVVSAGALAVVKYPSVRARSAITSKFITTTQQEEEHSMQVKVTVGMPVTQQVNMTFLPSGYTLSAPYRLSPTGNMFTAVGCVTMAKLYGSVENSSSSSSTGATTTTAAAAGGQMIGERAYAYDAGCITYCPSLSDAAADGAPCKDLGCCESPITPGLTQFAVGWGRWPGASDDDYGELDPEQYYQYAFVAQDWYTFKQDHLTHWDIDNISVPFVLHWDIKDGPACRPETNYDSPFGACHSNHSKCANVTSGLDGYFCNCSEGYIGNPYIPDGCKDVNECENNSICGAGSTCKNTEGSYRCDCNFGQRRDNSSDNMGNCEPIFSRAAIAVIGEVQYMNAMLIEICSMPYIPHIIYNALITCSSAFHVYTIFALHYIQLEAQH

SEQ ID NO: 28754 - protein, 194 aa, Oryza sativa
MFAPLLASTTLGANLLCCVSCRELCSLEVRNGELMMNSLLTTTESFPKIPNPPSLSPPASERGGHVGARQGRQGARQGRREEASQGAPRQHPGHHQAGDPEAGEEGRREAHLRADLRGDPRRAQDLPRERHPRRRHLHGARPPQDRHRHGRRLRAQAPGPHPLRLRRLRSAAASAWPWGQVLARGQEIREDISN

SEQ ID NO: 28755 - protein, 71 aa, Oryza sativa
MEAAAAAEAEAGTGGGGGRDGTATKKKAAACDVAALRKCLEENKGDRSKCQDHIDAFRSSCSTNPPPPRRS

SEQ ID NO: 28756 - protein, 559 aa, Oryza sativa
MASAGGEVVVVDPAAAAVAPDVEHHAPAPRLTPAGSGGRLMAELLGVFNGLTERMGDDVATSSSWTLLFRALKLALPALRDAAGGRSLARALIVAASLADLQMDAEVISAGIVRQAMDAGAVAMADAEAQLGPGAAALLLESLDVKNAPSRVDVADEEAASAVRNRILSGYDVRAVILELAIRLDAMKHLDGVPKHQQRTTSLEVLKVFAPLAHAVGAGALSKELEDLSFWRLYPQAYAQVDQWLSGQEDDCKRVLATCKDDLLQALAADDELRHTVAGFDVKGRYKSRFSAMKKLVKDGRRPEDVHDILGMRVILDHRAGAGDGHRACIRTHEVIKGMWKDVPARTKDYIARPKGDGYRSLHIAVDMSEPGPEGKKRPLMEVQIRTKEMNDAAVFGHALYKGCLADPEEAKRLKDIMLAAAEVAAQHLRDEPATGDQTGVPAAAAAAASAGNIERAFRLLDKNGDGRISMEELTELMEDLGAGGKDAEELMRLLDDNNDGSLSSDEFALFQKRVELKAKLEDKDDEYKEILRQKLQKVDDTGLIHVYRKNLSDKLVSG

SEQ ID NO: 28757 - protein, 193 aa, Oryza sativa
MGGPGASSTMSFEQAFLKNLLLSLQDCSTTKPLDAMSLHERKRAVKSSAGFAMATARGGGARWPKAIVLQQQPASTTARARRCGRIVRRCCGRKTRSGAGGGGEMARRLQVRRRAMALRKVIPGGGDAMDEAALLREAMDYVVHLRAQVDVLRRVSEAVQLQRRYTSSTSLRDYSWSKCALKGEEDSSMNMKR

SEQ ID NO: 28758 - protein, 198 aa, Oryza sativa
MAPNIYCCGAGTAADTEAVTDMVSSQLQLHRYATGRESRVVTSLTLLKSHLFSYQGHVSAALVLGGVDVTGPHLHTVYPHGSTDTLPFATMGSGSLAAMSVFESKYKEGLTREEGIQLVAEAIRGGIFNDLGSGSNVDVCVITKGKTEYLRNHQLPNPRTYVSSKGYNFTKGQTVVLSTKITQLKPKVEVTEGDAMEE

SEQ ID NO: 28759 - protein, 279 aa, Oryza sativa
MDLLHGESVQTTVAIAVAVVAVAAGGAFLLLRSRKPKGCLDPENFKKFKLVEKKQISHNVARFKFALPTPTSVLGLPIGQHISCRGQDATGEEVIKPYTPTTLDSDLGHFELVIKMYPQGRMSHHFREMKVGDYMSVKGPKGRFRYQVGQVRAFGMLAGGSGITPMFQVARAILENPNDITKVHLVYANVTHDDILLKEELDNMAKTYPDRFKIYYVLNQPPEVWNGGVGFVSQDMIKAHLPAPAEDIQILRCGPPPMNKAMAAHLDELGYTKEMQFQF

SEQ ID NO: 28760 - protein, 354 aa, Oryza sativa
MAFFLPLAFSLFLAVISAYVLQLLADARRRLPPGPWPLPLIGNLHQLDHLPHRSLARLAARHGPLMSLRLGTVRAVVASSPEMAREVLQRHNADIAARSFGDSMRAGGHCENSVVCLPPRRRWRALRRLSTVGLFSPRRLDAMRALLEEKVAELVRRVSGHAARGEAVDVGHAAHVAALGVLSRTMFSVDLDPEAAREVSDIVDEASVLGTGPNVSDFFPAIAPADLQGVRRRMARLVKRMYAIIDEQIERRMHGRTAGEPRKNDLLDVMLEEGESKEDSNEINRDAIRGLFTDLFTGGETTSHTMECAMAELLQCPNSMRRVHELKSVIGSKQQMDEHDITKLPYHHTRPKPR

SEQ ID NO: 28761 - protein, 391 aa, Oryza sativa
MATRPARLSAPAVAAILVAALALCAATASAANVTTTTATAPSGGCYSHLFTFGNSLIDTGNFIHYSTSPGPVARSPYGETFFRRPTGRWSDGRLIVDFIVERLGFPYWTPYLAGKSREDFRYGANFAVASGTALNQLLFKKKHLSVAGITPYSLAVQVGWFKKVLAMLASTEQERKEAMARSVFMVGEFGGNDYLHPLFQNKTLEWVRPLVPRVVRYIAGAVEELVGLGATTVYVPGLFPLGCVPRLLFLFRDGGAGDRDPATGCLRGLNDGLAALHNALLRRRLAELRAAHPGVTIAYADYYGEVMELVSNPAASGFDDALTACCAGGGPYNGNFTVHCSDPGATQCADPSRRISWDGLHMTEAVYRIMARGVLDGPFADPPIMSRCHGY

SEQ ID NO: 28762 - protein, 205 aa, Oryza sativa
MADVEEYRCFIGNLSWSTTDESLKDAFGKFGNLTEAKVVFDKYSGRSRGFGFVTFDEKKAMEDAIEGMNGLDLDGRAITVDKAQPQGPGRDRNGDRDYDRDRGSRYDRGRDFGGGGRAPRGSGGGGDCYKCGKPGHFARECPSGDGGGRGDRYGGRDDRYGGGGGGGGRYGSDRGGDRYSGRSRDGGGYGGGGGDRYSRDRSGPY

SEQ ID NO: 28763 - protein, 62 aa, Oryza sativa
MQDYFIGELDPTPNIPEMEVFRKEQDVNFASKLMANAAQYWPIPATVVGISVVIAVLYARQK

SEQ ID NO: 28764 - protein, 179 aa, Oryza sativa
MFSFGGGSSLTSVVPDATPAPAAPPGTGTGANAQVLYVFNRGGVCLLYREWHRPLRTLDPTQDQKLMFGLLFSLRSFTAKIDPTTAEKGNLGVPLLPGQGCSFYSFKTNTYKLNFLESPSGIKLILITHPRTGDQRDTLKHIYNLYVEYVVKNPLYAPGTPIKCELFNKHLDQYVKTLI

SEQ ID NO: 28765 - protein, 387 aa, Oryza sativa
MRFRVCYESEDANERSAGLISGISEVDPIRWPGSRWKCLLVRWDDSTDSSHQNRVSPWEIERVGGSVSVTHSLSSGSKRTKLHFPQGSLDTPFLNGNGHPDSMGTENFHRVLQGQEFRGSRSHGVVCSESPGVPNFQSPDNRRFSADMRGYMMPASGPPQRNTEFTYQPIGFSESLGFPEVLQGQEMSQVVPLFRGATFGARTQNDRVVSANSVHRSAAQSGLLASTLGHPISQFTLSSSKVSSPSSVLMFNQATAPNHETVSGTNNKGMHVSQFASQEMLSETVTWPGTQRQTPSEITSNQFALARIPAPPSGAESGLPKRDAGRSSCRLFGFSLTGNMLGEDGEGLDDGAIEAGCENPPVLELFGHSHSTPGALHALCAAAPLGM

SEQ ID NO: 28766 - protein, 51 aa, Oryza sativa
MPKSSCWNSFKALLTWSPGGFSRDAKILAGMAGAIVLAVSLWRYSRSTLRS

SEQ ID NO: 28767 - protein, 358 aa, Oryza sativa
MIEYFEAIPGVPKIKDKYNPATWMLEVSSVAAEVRLNMDFAEYYKTSDLYKQNKVLVNQLSQPEPGTSDLHFPTKYSQSTIGQFRACLWKQWLTYWRSPDYNLVRFSFTLFTALLLGTIFWKIGTKMGNANSLRMVIGAMYTAVMFIGINNCATVQPIVSIERTVFYRERAAGMYSAMPYAIAQVVMEIPYVFVQTAYYTLIVYAMMSFQWTAAKFFWFFFVSYFSFLYFTYYGMMTVAISPNHEVAAIFAAAFYSLFNLFSGFFIPRPRIPKWWIWYYWLCPLAWTVYGLIVTQYGDLEQIISVPGQSNQTIGYYVTHHFGYHRKFMPVVAPVLVLFAVFFAFMYAICIKKLNFRHR

SEQ ID NO: 28768 - protein, 444 aa, Oryza sativa
MAMAGGEPTLMPVSAMCTPAFVARVVRSRWFVVFASMVVMAASGSTYIFALYSKELRSTLGYNQQTLNTLSFFKDLGTNVGVVSGLVQQVAPTWAVLLIGAAMNLAGYLMVYLALDRRTAAPPVWLMCVYICVGANALTFSNTGALVSCVKNFPLAVDRRRAPHAHERSRRRAGDVVRGEDVQAAGVGGGLQHHAGAGERGDGRAVRCVGVWHRRDADGDRQHGADRAVAGLPGEEHQHVRVAHQHLELRRPRRRRLPVGDAPRPVQVPAAAGAHRRAPRLLRRPPPHRVRRPGLALRRLRHHRLLLRRAVAAAVRHHLRGVRPQVLLHALQLRLRREPHRRLRAQRAGGGADVRRRGGQAARRRRRRRRQDLQGGDVLQALLPHHHRRHLRRRARLAAARVEDEELLQGGYLRQVQGGAGDGRDVGGGGGGGELAGGGGEEGH

SEQ ID NO: 28769 - protein, 378 aa, Oryza sativa
MATAVASQVAVSAPAGSDRGLRSSGIQGSNNISFSNKSWVGTTLAWESKATRPRHANKVLCMSVQQASESKVAVKPLDLESANEPPLNTYKPKEPYTATIVSVERIVGPKAPGETCHIVIDHGGNVPYWEGQSYGIIPPGENPKKPGAPHNVRLYSIASTRYGDSFDGRTTSLCVRRAVYYDPETGKEDPSKNGVCSNFLCNSKPGDKVKVTGPSGKIMLLPEEDPNATHIMIATGTGVAPFRGYLRRMFMEDVPKYRFGGLAWLFLGVANTDSLLYDEEFTSYLKQYPDNFRYDKALSREQKNKNAGKMYVQDKIEEYSDEIFKLLDGGAHIYFCGLKGMMPGIQDTLKKVAEQRGESWEQKLSQLKKNKQWHVEVY

SEQ ID NO: 28770 - protein, 366 aa, Oryza sativa
MHVQNGLHKKAKLMVTEHELRCRMNSSTEGDLFDIANSRRFPRSYQDVNTVQAHEHTEKSNRSRLIGRINFGDIERNQLQVRDVIRQKSSPNLPARSVPLQSQNEFISEVKSSVTAVSESACHVSKSTKGQVPGSSKLGQLATRRNLETEVLQSQQVSSPAQSKTGSSVHEDGGNCCNKPMKNEMLDVKLKLKQVELDVLKLRSKQAQINNVKQGFLSSGPHANLDEDADSRTVLVTNVHFAATKEALSGHFMKCGTVLKINILTDAISGHPKGAAFVTFTDKESVEKAVSLSGSSFFSRVLTVMRKAEAPPGFLASVQPIGRPLQSWNSPPIQKGVSPRQIPGYHLQWKREQSVLEKSPASCPTN

SEQ ID NO: 28771 - protein, 324 aa, Oryza sativa
MEKGTTHPIGRAVLDHSVGKDLPLVAVESFECLPGRGVVATLSGVKAGNNEDELSKASIGSVEYISSLYRSSGESEQIKEAVKASAFGPEFVQAALTVDKKVTLFHFEDEPRSGVCEVISTLRDKAKLRIMMLTGDHESSALRVAKAVCIDEVHCCLKPEDKLNKVKAVSREGGGGLIMVGDGINDAPALAAATVGIVLAQRASATAVAVADVLLLQDNICGVPFCIAKARQTTSLVKQSVALALSCIVFAALPSVLGFLPLWLTVLLHEGGTLLVCLNSIRALNSPTWSWVDDIRQLINSLRKYISSKLQSTSSNYVVDAVPL

SEQ ID NO: 28772 - protein, 263 aa, Oryza sativa
MALVSASSSTTAVAALPGAARASSFLGGAGRSGRLLLRQAESSSARASFAVRAAAPDRPIWFPGSTPPPWLDGSLPGDFGFDPLGLGSDPESLRWNVQAELVHCRWAMLGAAGIFIPEFLTKIGILNTPSWYTAGEQQYFTDTTTLFIIELILIGWAEGRRWADIIKPGCVNTDPIFPNNKLTGTDVGYPGGLWFDPLGWGTGSPEKIKELRTKEIKNGRLAMLAVMGAWFQAEYTGTGPIDNLFAHLADPGHATIFQAFTPK

SEQ ID NO: 28773 - protein, 190 aa, Oryza sativa
MTRGVAMAHARLLLARYYAMAAPSWPTVSKNLPLLGHGRSHHPMYASQDEIKMSSRRWCHGSPDNQELAKKICVPCNSKDIHAMPEDSAKKMLEQVGGWELATEGDILKLHRAWKVKNFVKGLEFLQLVAAVAEEEGHHPDLHLVGWNNVKIDVWTHSVRGLTDNDFILAAKINNLNLEGLLSKKATVQK

SEQ ID NO: 28774 - protein, 308 aa, Oryza sativa
MSLIHGNGLQDVVITGDNGTIDGQGSAWWDMWKKGTLPFTRPHLLELMNSSDVVVSNVVFQDSPFWNIHPVYCSNVVIRNVTVLAPHDSPNTDGIDPDSSSNVCIEDCYISTGDDLIAIKSGWDEYGMAYGRPSSHITIRRITGSSPFAGFAVGSETSGGVEHVLAEHLNFFSSGFGIHIKTNTGRGGFIRNVTVSDVTLDSVRYGLRIAGDVGGHPDDRYDRNALPVVDGLTIKNVQGQNIREAGSIKGIATSAFSRICLSNVKLNGGAAVRPWKCEAVSGAALDVQPSPCTELTSTSGMSFCANSL

SEQ ID NO: 28775 - protein, 2 aa, Oryza sativa
ML

SEQ ID NO: 28776 - protein, 21 aa, Oryza sativa
MDLEYCITQGLHGLGSDIQVH

SEQ ID NO: 28777 - protein, 238 aa, Oryza sativa
MPSRTAPFISRLRLLRTAAALSPFSSSAPPRHSPRILRAIPVGAPHPPRVSAAVSPLVRPVAAGFALFSMATAASSAASVHDFTVKDASGKDVDLSTFKGKVLLIVNVASQCGLTNSNYTELSQLYEKYKDQGFEILAFPCNQFGGQEPGTNEEIVQFACTRFKAEYPIFDKVDVNGDNTAPIYKFLKSSKGGLFGDNIKWNFSKFLVDKEGRVVERYAPTTSPLSMEKDIKKLLGSS

SEQ ID NO: 28778 - protein, 300 aa, Oryza sativa
MSVERDGRDQPNIDSFSQLPFIRQAAREKPPSSSSGGSVVVPPAPIRLFGFDVPPDASTTADVLGENKESAAAVVAAEGSKQTASGLDAIGGGGGSRKFECHYCCRNFPTSQALGGHQNAHKRERQRAKHAQFQTAMAMHHGHGQYYPLPDPYAAAFAAYPGHHHHHRFAATAAAAMPPPPHYPSWAAGSRYYSGPGSISQPINGSPVAPAGMWRLPAAASCVGLATTTTTAAPLPARRQERPAATIPSLLGGGEEPVVLGGAGSTSFSPSTSSSSSSASPHERRAQPARKENVSLDLSL

SEQ ID NO: 28779 - protein, 140 aa, Oryza sativa
MGIQWMGQVLPDILPVKPDEGPDHVSRERGAIMIGAAPLPLNYNVPVLSKDIPTIRRITRRVTGRGGGLPTVQALALSHGDDCTEIACFLDPDHVSADQVQQQVEQIAAEQGLEVEKGYFTDFSKDAMLEKYFKIVLSVD

SEQ ID NO: 28780 - protein, 232 aa, Oryza sativa
MAAAASTLASLSATAAAAAGKRLLLSSPSRSLSLSLASRGRIAVMPHLRAGILSAAPRRAVSASAPAAATIAVGDKLPDATLSYFDSPDGELKTVTVRDLTAGKKVVLFAVPGAFTPTCTQKHVPGFVAKAGELRAKGVDAVACVSVNDAFVMRAWKESLGVGDEVLLLSDGNGELARAMGVELDLSDKPAGLGVRSRRYALLAEDGVVKVLNLEEGGAFTTSSAEEMLKAL

SEQ ID NO: 28781 - protein, 278 aa, Oryza sativa
MIAIAIDRMMGYRLLSNLAIVKWVFSPANVDQFHVSDRPWEILRNAVSKTYNRIFDLRKEIQTLRKGLQAAKEASEKAARELEEAKSIIEIVDGQPVPSENPGRLRRLQARADKAKEGEVTTEESLEAKEALLARGLEESKELLRLLFKSFVEVLTERLPPISADGDVPNLRAGDPNVNSSARDPEATTMEIDNENGGDNDSQLNGQNKKISHNVGELEQWCLCTLGYLKSFSRQYATEIWSHIAMLDQEIFVGNIHPLIRKAAFSGLCRPTSEGSHL

SEQ ID NO: 28782 - protein, 58 aa, Oryza sativa
MLSDGHIGEILVALISEFFSLCLVRYCTRLFKDALLEIGRCNRSILGKTYASPVQHEQ

SEQ ID NO: 28783 - protein, 98 aa, Oryza sativa
MATATALNRGLRSGIRLLATGAEASKTDSRGFHATGVKRMGGHGHDEPYYLHAKHMYNLHRMKHQKPKVYLSVLGAVGIGIAVPVYAVVFQQKKTASG

SEQ ID NO: 28784 - protein, 345 aa, Oryza sativa
MAYGGWSLSLNYLYHSTQVIAVLIGGISIMAGKLTAEQLTKFILYAEWLILSTWWIGDNWSSLMQSVGASEKVFRLMDLLPSRQLSSEGHRLQKLEGRIQYADVSFSYPSRPTVPILGGLNLTLHPNEVVAIVGLSGSGKSTVVNLLLRLYEPTDGQILVDGVPLSELDIRWFRERIGFVGQEPRLFRMDISSNIRYGCPREVSNEEVEWAAKQAYAHDFIMSLPDGYNTIVDDALLSGGQKQRVAIARALLRDPSILVLDEATSALDAESEHYVKNVITKFSTDPKARRTVIIIAHRLSTIQAADRIIVMENGNIVEDGNHSELINKHDGLYSRLARRQNDALD

SEQ ID NO: 28785 - protein, 435 aa, Oryza sativa
MAMAGGGRGDYGAFMERFVLPPPPSQQLPLHGLTFAIKDIFDIAGRVTGFGNPDWARTHAPAAATSPVVLAALAAGATSLGTTIMDEMAYSINGENTHYGTPTNPCAPGRVPGGSSSGSAVAVAANLVDFSLGTDTGGSVRVPAAYCGIFGLRPSHGLVSAENVIPMAQMFDTVGWFSRDLSTLSRVTKVLLPLPDDIVKQPTQVTIPMDCFQILGSLDDRTYQIINASVAKRFDSQILDNRNLGDFISDNVPSIGKFITDFSESELPSVPALSVISHVMRGLQRSQSKANHAEWVNTVKPNLGPGLRERILEAIASGDNESLEDFQAIRAEFKSALAALLRDHGILAIPTVPGPPPKVGMEAAPLENFRARAFSLLSIAGLSGFCQVSIPLGMRNGLPVSVSLVARHGADHFLLNVVEELYQTLIDEATKTWSS

SEQ ID NO: 28786 - protein, 272 aa, Oryza sativa
MDDGDLDFSNPDTFLCPAVGGADPDGSCSMDSYFDDILKDTEHHACTHTHTCNPPVHDLSHTHTCVHVHTKIVSAPSDTPSDAAETAESPTENNASKKRPSGNRAAVRKYREKKKAHTASLEEEVVHLRALNQQLMKKLQNHATLEAEVSRLRCLLVDIRGRIEGEIGAFPYQRPVKNIDLVSSVDQGSYLGGAQVMNSCDFRCADQMYCSPGMQVRTMGEDGAVSGQVLGQGACDIASIQCQGAKSGSAKLPVCGAMGTMPVGCMPNSEKK

SEQ ID NO: 28787 - protein, 376 aa, Oryza sativa
MAFVVRYGTGIVCVSMKEEDLERLNLPLMVATKENEEKLCTAFTVTVDAKEGTTTGVSAKDRAKTVMTLASPDSKPEDFNRPGHIFPLKYREGGVLKRAGHTEASVDLAMLAGLPPAAVLCEIVDEDGSMARLPKLRVFAERENLKIVSIADLIRYRRKRDRLVERSSVARLPLRWGNVRAYCYRSVIDGIEHIAMVKGEIGDGQGVLVRVHSECLTGDIFGSARCDCGDQLAMAMEMIEKAGRGVLVYLRGHEGRGIGLGHKLRAYNLQDDGRDTVEANEDLGLPVDSREYGIGAQILRDLGVRSMKLMTNNPAKYGGLKGYGLSIVGRVPLVTPITSENRRYLETKRTKMGHVYGLANGQASHQTGSNGAKGEH

SEQ ID NO: 28788 - protein, 39 aa, Oryza sativa
MFAICMCKIILGSASAFLLCRSLFFSLLYYHGLYTGVVS

SEQ ID NO: 28789 - protein, 356 aa, Oryza sativa
MAHERGGAASSAAAPATEEDALFIDLLHEAPLSGHREPRSIVGGTLYCILLAGYAAVAVSAPWIFYLVPDMIPPLLCSSNVIILILTGIFQQYWVHQVRKVRLQGYYDFSEKLKRLAQLPFATVASGVASMLLIIVWQPLVHILSVSLLLRIAIVVEAICAGCFMSLYLWHIHKYNSLNGHPDILRSLYSALQLQPSSSLEERRYYDGRFSDQQMALLQYQRENIHYLSEEVLRLQECLSKYQRTDVGSTPQADLAHLLASRDQELRALSAEMNQVHSELQLARSLIDEKDSEIQRIRVSNNQYIEENDRLRAILGEWSARAAKLERALEAEQISSIELRKNIAKLRGQTYKDQNT

SEQ ID NO: 28790 - protein, 321 aa, Oryza sativa
MASVASFPVINMENLETEERGAAMEVIRDACENWGFFEMLNHGIAHELMDEVERVSKAHYANCREEKFKEFARRMLEAGEKGADVKGIDWESTFFVRHRPVSNLADLPDVDDHYRQVMKQFASEIEKLSERVLDLLCENLGLEKGYLKKAFAGSNGPTFGTKVSSYPPCPRPDLVDGLRAHTDAGGIILLFQDDQVSGLQLLKDGEWVDVPPMRHAIVANIGDQLEVITNGRYKSVMHRVLTRPDGNRMSIASFYNPGADAVIFPAPALAAADAAAAAYPRFVFEDYMNLYVRHKFEAKEPRFEAMKSAAEVVHAAPIATA

SEQ ID NO: 28791 - protein, 142 aa, Oryza sativa
MKLMAWTKLRISRTMTMLRYIIRQFMCLSHTGCRRMTNSPFLFHLYLNLNLTMKCFSLAVSVKVNFYSLMVGTVNLNLTMKCFSLAVSVKCPIWMEMHRSCLFRGLSRIGESSYPSHGLVLLTCYEAAVRVRPIRARSGYGN

SEQ ID NO: 28792 - protein, 290 aa, Oryza sativa
MGKDEVMESGGAAGEFAAKDYTDPPPAPLIDAAELGSWSLYRAVIAEFIATLLFLYITVATVIGYKHQTDASASGADAACGGVGVLGIAWAFGGMIFILVYCTAGISGGHINPAVTFGLFLARKVSLVRAILYIVAQCLGAICGVGLVKAFQSAYFNRYGGGANTLAAGYSKGTGLAAEIIGTFVLVYTVFSATDPKRNARDSHVPVLAPLPIGFAVFMVHLATIPITGTGINPARSIGAAVIFNNEKAWHNHWIFWVGPFVGAAIAAFYHQYILRAGAIKALGSFRSNA

SEQ ID NO: 28793 - protein, 490 aa, Oryza sativa
MATASSIRPPRAALVLLLLALSFSLTLAAHFEGFGSDDLHSAHADAASADDEDDEGLDVELPPPPRISLSTSTPSPPVTTTTTTTSAPNPNPDPNPTLTPPNPTPTLDLWDEDEFEGIPVPEAASSDESSTPAEAAPSDPAADAAAEAAPAPPRRPAELLRAYTVEIACVSFLICFLLNHFTGKRQNEAIALAWATRFATRDSIFDKNFSLLGTGDGKDTPLLMKEGQDVFKFYASGRRYCQGMLATMEMRARHDLLSKLVELVFPRKDTITFEVVMNEEAMDHVMLAVARKKAAKTMQKEERDLQKFAGVLTSAPAGRRWVADELAVVAESKEVAGDMITEAVLDQVLGDKAFEKFGKWFISLHFSDQLAGSYKKVLSFKFVLPDASNMAEMTRLVALVPYYIDLVGRYKLSNHARSKTEAARTKASQEAFREQQGLRQEALQRKRAEKKKLMEEAEAKLSAEALRKKEEKERARQMKKSMPKVKMLRS

SEQ ID NO: 28794 - protein, 266 aa, Oryza sativa
MTAATFSSDGSVLAVAAENVVTLWDPDNNTLVGVIAEALSPITKLSFIGTSPFLMSLSQSSKPQVAMWNVPNLSMQWSYSLFAEAACCSSSRSEFAVLALLSCPDGETLAEQDGVILLFDAENPKPVSSWSVKKARGGSVAFLKGDSSLDANRKDRIDGEASSLVYVNGSHEYVIFDPRSNGELHIGKSAHKNIQTEEPGPIGYASIFGELPKLESKKDVPEILFIPSERPWETIFSGSTHVLPPLTKLCPAFLASLLEKRPVANE

SEQ ID NO: 28795 - protein, 487 aa, Oryza sativa
MATTASVRPPLLRQAAGSEKASLLCKPKQRASVRRRSFTARASSNPVSIPKQWYNLVADLPVKPPPPLHPQTHQPLNPSDLSPLFPDELIRQEVTEERFIDIPEEVAEVYKLWRPTPLIRARRLEKLLGTPAKIYYKYEGTSPAGSHKPNTAVPQAWYNAAAGVRSVVTETGAGQWGSALSFASSLFGLTCEVWQVRASYDQKPYRRLMMETWGATVHPSPSAATESGRRILERDPASPGSLGIAISEAVEVAARDADTKYCLGSVLNHVLLHQTVIGEECLEQLAAAGDVPDVVIGCTGGGSNFGGLVFPFMREKLAGRMSPAFKAVEPAACPTLTKGVYAYDFGDTAGLTPLMKMHTLGHGFVPDPIHAGGLRYHGMAPLISHVYELGFMEAIAIQQTECFDAALKFARTEGIIPAPEPTHAIAAAIREAMECKRTGEKKVILMAMCGHGHFDLASYEKYLRGDMVDLSHSDEKLQEALAAVPKI

SEQ ID NO: 28796 - protein, 328 aa, Oryza sativa
MAADYRTPDRLLSAAAPGEEQAQDPPKPVLAVAATHDGLRFWQYMLAGSVAGVVEHTAMFPVDTLKTHMQAGAPPCRPVLSLGAVLRAAVSGEGGVRALYRGLPAMALGAGPAHAVYFSVYEFAKSRLSERLGPNNPAAHAASGVLATIASDAVFTPMDTVKQRLQLTSSPYTGVSHCVRTVLRDEGLGAFFASYRTTVVMNAPYTAVHFATYEAAKRMLGDMATNEDSLAVHATAGAAAGALAAAVTTPLDVVKTQLQCQGVCGCERFSSSSIGDVFRTIIKRDGYAGLMRGWKPRMLFHAPAAAICWSTYEASKSFFERFNEKRRK

SEQ ID NO: 28797 - protein, 330 aa, Oryza sativa
MSLAYPLLRLPCRCSLAAAAVPAPPRASPGPTISVSMSVDGGEGELTGRERRKQRGERRGLRARDWKEEVQERLIHEPARRRKKPPKRTWRENLNLDFLAEHGPQWWLVRVSMAPGTDYVDLLTKAISRRYPELSFKIYNPSIQVKKRLKNGSISTKSKPLHPGLVFLYCTLNKEVHDFIRDTEGCYGFIGATVGSIKRQIKKPKPIPVEEVESIIREEKEEQERVDREFEEMENGGIVESFNKPVEDSELMLMNKIKRQFKKPISKGGSNHNAFTPGASVHVLSGPFEGFTGSLLEVNRKNKKATLQLTLFGKESFVDLDFDQIEAVDT

SEQ ID NO: 28798 - protein, 552 aa, Oryza sativa
MATSLTLIATPCTAPRSSSSFALAPRLPPRCSNATAARRRAVRATTLQSDQEPAGSGDSGATTTKLSASTSVRQERWEGDLPIEGCLPPWLNGTYIRNGPGMWDVGEHAFHHLFDGYATLVRVSFRGGGGARATGAHRQIESEAYRAAVARGRPVLREFSHCPAPAKSLLHRFGDLVGLVTGAALTDNPNSAVLPLGDGRVMCLTETTKSSVLIDPDTLETVGRFRYTDRLGGMVQSAHPIVTDTEFLTLLPDLVRPGHLVVRMEAGSNERKVIGRMDCRGGPSPGWLHSFAVTEKYAVVPEMPLRYSSASLLASELAPFYAFDWVPASGSYMHVMCKSTGKTVASVEVPPFMAIHFINAYEEEGDEAAVVVDCCEHYGDPAIIETLVLSRLRLLRGKDVLPNARVGRFRIPLDGSPFGELETALDPEEHGRGMDMCSINPARLGRKYQYAYACGARRPCNFPNTLTKIDLVEKKAKSWHEEGSVPSEPFFVARPGATDEDDGVVISIVSSDDGEGYALVLDATTFEEIARVRFPYGLPYGFHGCWIPATEE

SEQ ID NO: 28799 - protein, 473 aa, Oryza sativa
MRSIRMASLMAGEWVPETQENEAVFDALRESYRLLVSKHLVTVQEWISVLVRVNLADNRFRDSALKEFIDVKNEIRAVRNRCSELGLNLDNVHRRKGVQEEEDDDFWVEGNIEVPSPGRVGTSADVASSSKDTRKGKKPVGGTDTDDGKAPNAGNSPQELDPERAKLHAEAPVLPWSSVLDRWGSNRDALVNQRGLELESHWGRVDNDAVIPAAKIAELNVHSSIYREDPVEILPCLAPLKKGGLCQRRDLKICPFHGPIVPRDAEGNPIHQSDGHCDAEGNPVGQTDGHYDAAVSPIDPNEDSSDVRENMIMPDGSSDGECIYESSPSRTANINNDISDSDVGHDLGKITVEQLARQAVQNVRKRDRDDKKALEKAQRARIRQHNQDVLREAALASTSRSAADYDLPSPAVSRRGRRGKTKGPTLASMLKKKVTSKDRIAERLLNARARDATIREVSHTEDMSYREAFPNQW

SEQ ID NO: 28800 - protein, 106 aa, Oryza sativa
MPSPQEEEAAIKKKYGGIVPRKPALIAKDHERAYFDSADWALGKQGGHPQKPKGPLEALRPKLQPTQQQARSRRFLHASVDNEEGLNSPTEDASQNQESNEVKDDK

SEQ ID NO: 28801 - protein, 208 aa, Oryza sativa
MAAAAADSADPVITTATCAHCHREIPSPNIALHSAHCARNLQKCEHCGYMVPKKLMDEHYDENHAPMICSLCQKTVQRGLWDLHKGLQCPQRMLACQYCDFELPAADIYEHQDVCGNRTEYCQPCRKYVRLREQIGHDIQFHSQPIVASESSSDRSTLEEEESYPAEEQPVRPKHTHGLQRKQFLVTIVIAGISILVGSVLLKKGWLS

SEQ ID NO: 28802 - protein, 380 aa, Oryza sativa
MASLPNGAASASASAAGGGPAVVDKEVDFANYFCTYSYLYHQKEMLCDRVRMDAYHSAVFRNAHHFRGKVVLDVGTGSGILAIWSAQAGARKVYAVEATNMAEHARELARANDVADIVEVIQGSMEDVVLPEKVDVIISEWMGYFLLRESMFDSVICARDRWLKPDGVMYPSHARMWLAPIRSDLAENKMEDLEIAMHDWNLFVEDTESYYGVNMNVLTKAYRAEHEKYYLKSAIWNNLHPNQVIGQAAVIKEIDCLTATVDEIREVRAQVTMPIKLDMTRLAALAGWFDVHFRGSKQNPATQEVELSTAPDVNGGTHWGQQVFLLTPPLKVNEGDNVKVSFTMVRSKENHRLMDMEFTYELHESSGKQLPAITTKIYLE

SEQ ID NO: 28803 - protein, 301 aa, Oryza sativa
MSPLVSELHLYDIANVKGVAADLSHCNTPSQVLDFTGPSELANCLKGVDVVVIPAGVPRKPGMTRDDLFNINASIVKSLVEAVADNCPEAFIHIISNPVNSTVPIAAEVLKQKGVYNPKKLFGVTTLDVVRANTFVAQKKNLKLIDVDVPVVGGHAGITILPLLSKTMPSVTFTDEETEQLTKRIQNAGTEVVEAKAGAGSATLSMAYAAARFVESSLRALAGDPDVYECTFVQSELTELPFFASRVKLGKNGVESIISADLEGVTEYEAKALEALKSELKASIEKGIEFVHKQQTAAASV

SEQ ID NO: 28804 - protein, 48 aa, Oryza sativa
MSDIDNRWNVRLRESTLIFFPELFILTFARISQSIVKSEHTDLDHTEV

SEQ ID NO: 28805 - protein, 397 aa, Oryza sativa
MMESARFVYELDHGGEGEEEEEEDACFLDIYVHGARGIHNICIYAAQDVYARLALTSSPDDAPALDTRVAAGGGANPRFDERLPPLRVRRARLGTDVLKCEIWMRSCARRLLDDQLLGFALVPLAAVAAADGARLAQDFSLSSTDLFHSPAGTIRLSLALHSGPPGDACPPPERAAAEPSITSEVVILEPAPPVDYARIEFPDLNAVKENDDMAVQYLPFLHLADAQAMDDDDCEMATSPREEKPASSDDGSKNASTSTTTAVSDDNRAVTRKARPDADDAATAPMSCRSPDTPTSNGGKPSSSDKEKGAAEDVFDSPPLRDIDMEAEQSAMQRQIMEMYMKSMQQFTESLSKMKLPMELDGDNGVVVQKEEKPEAEVKLQPKKDGARVFYGSRAFF

SEQ ID NO: 28806 - protein, 144 aa, Oryza sativa
MLKFLSKVVVEYCPLDPRKAAVVELLAQCNGRKAKDSNPACSVELRRLPSPPPADAAAAGEKNAHPPPRVLVTYFNGVEESFVAAEGATAQGIRDQILDRGRLLDTEQLFRDGGEKWPVLIPEEELTMSFPGIKPKKAEEKPQA

SEQ ID NO: 28807 - protein, 289 aa, Oryza sativa
MQQRARMKAVDRFRESENSILVATDGFARGMDFDDVRTVIHYQLPHSTDVYIHRSGRTARKSMAGCSIALISPADKAKFYSLCKSLSKENLQQFPVDHAYMPAVMNRLTLARQIDKITRKNSQENANKSWLQRNAESMGLLLETSDSEEERVQGHKQRKATSANLQKLQQDLSELLQRPLQPKTFSRRYLAGAGVSPLLQKQLEELSKRNVKGSASVNANKGSRFVVIGQDQIEPLQALQNSGQEVCVSIDKQREKRRLAENWRRKKQKEKKSTREQKRKEKRIAKERD

SEQ ID NO: 28808 - protein, 325 aa, Oryza sativa
MEFIDDDWDYQPRARVIHSRSNANSNGATTASSSQPTRSLPHTAACAAAAVALLAAAYYLLPDYQVLASVVVWVASSLLLAPFAPSSATGGDVSVGRGDPLPEQEPVEEPVSDPAPTSRRGRRQSSSSNPTPPPPKPSDPIAPPPPRHAAAAAAAAATAVSDGGEAVEDAGEWTDQEMDILRRQMVKHPAGEPQRWEKIAAAFGGRRTPESVIRAAKSGGGAAAAGASFDQFLRKRKPLDPRSEATDAGSGNAGGGGGESGDGSWSAGDDRALLNALKEFPKDTAMRWEKVAVAVPGKTKAACMKRVTELKRDFRSSKAASEAAP

SEQ ID NO: 28809 - protein, 284 aa, Oryza sativa
MAGGPAAVSFLTNIAKAAAGLGAAASLLSASLYTVDGGERAVIFDRFRGVLPETVGEGTHFLVPWLQKPFVFDIRTRPHNFSSNSGTKDLQMVNLTLRLLSRPDVVHLPTIFTSLGLEYDDKVLPSIGNEVLKAVVAQFNADQLLTERPHVSALVRDALIRRAREFNIILDDVAITHLSYGIEFSQAVEKKQVAQQEAERSKFLVAKAEQERRAAIVRAEGESESARLISEATAAAGTGLIELRRIEAAREIAAELARSPNVAYVPAGDNGRMLLGLNAAGFGR

SEQ ID NO: 28810 - protein, 129 aa, Oryza sativa
MEKYQSKARFAPLSDAPFALRGALGSSNSSFNNIDHLRQSSSSGQARSYTSSPLGALRPKMFPSGNRLLHTSRPLSAPVANRPLSPHLPLKKPQLSATFSISHRIFGAALGAVIISIPLATKFSLMFDV

SEQ ID NO: 28811 - protein, 86 aa, Oryza sativa
MAGLAAEGLEYDKVVGQSADLFTLQRFINRTKPPLTKDQQQNLTRWAVLFSASLLKNNKAAHEALMSAMSQKASVLGCIEAIENAS

SEQ ID NO: 28812 - protein, 258 aa, Oryza sativa
MGFTEMPTNNYVESSFWNFDALFQPQQHPARDSHDTFFLEAPAATKQLPEDYLEKVKEVHQRGGYGSKGYGYDWKRDEAEKNLLRTHTTAVSTRMLYKLAQEKPFAPKRYYSIDRVFRNEAVDRTHLAEFHQIEGLICDYGLTLGDLIGVLEDFFSSLGMSKLRFKPAYNPYTEPSMEIFSYHEGLKKWVEVGNSGMFRPEMLLPMGLPEGVNVIAWGLSLERPTMILYGIDNIRDLFGPKVDFNLIKSNPLCRLGLQ

SEQ ID NO: 28813 - protein, 198 aa, Oryza sativa
MASKLFLMAAMLGLLAVVALADSGPCKGGFWPDGNGCCPQIIKGSPYYRDSNNKCYPKEIKYGVYYADANGCYPDEHGSYAAAGKSCPKEQKCYSFCVKPDGKYESTTSEVHHSQAGDDHEREAHHAQAGDHHAQGVHHAQVRDHYAQGVHHRAAHHAQAGDHHAQGVHHAQVRDHYSQGVHHREAHYAQVRDHHVQA

SEQ ID NO: 28814 - protein, 30 aa, Oryza sativa
MAGNRCLSTTSTLQRNWSKPVQKPGASSVC

SEQ ID NO: 28815 - protein, 101 aa, Oryza sativa
MSSGGEKSGSGGGGGGGGGGAVKTPSDFLKSIRGRPVVVKLNSGVDYRGILACLDGYMNIAMEQTEEYVNGQLKNKYGDAFIRGNNVLYISTSKRTLTDGA

SEQ ID NO: 28816 - protein, 73 aa, Oryza sativa
MGNLFFIPKHPPPPPPPSHVHSIHHPLSNAPSFMNGPNGFMMAHTLCTETRLPLDEEQMRELMKTIDKKKSEQ

SEQ ID NO: 28817 - protein, 123 aa, Oryza sativa
MGFKGFVEGGIASIVAGCSTHPLDLIKVRMQLQGEASAALLRRHRLRAQDGAVGGRHGAVQGVHPHRVAPGPLHRRALRHARAGAQGLQRRRVLKATATMMTTNNPPLVLLLLVLPLLLMLLL

SEQ ID NO: 28818 - protein, 248 aa, Oryza sativa
MMAEEGTQQLPYVRETVLKKRKVNEDWAVKNRERKAAKRQRRRDDGKGAIKRPEDFVREFRNKELDFVRMKTRLKVRKLPPAETLNSKLVFAIRIPGTMDLHPHMRRILRKLRLTQVLTGVFLKATDATMKRLLVVEPFITYGFPNLKNVKDLIYKKGRGFLDKEPFPLTSNDLIEKALGEYGIICLEDLVHEIASVGPHFREASNFLMPFKLKCPERRLQMKKKPFKDGGDSGNREDKINELIEKLN

SEQ ID NO: 28819 - protein, 95 aa, Oryza sativa
MQRLGDFRLPPFFNYPPYFTLQPVRETREKQVQLWKDLILDYCRSQKLYIISLEEDFPLFSNPKIERSLSHEAKEVFLAALVYEGRAEWMDKGKG

SEQ ID NO: 28820 - protein, 193 aa, Oryza sativa
MWPGMILKSGNRITVPSLVEKEESTDDESNYEFEYEVLSHGSDEQWEFIGESSTSRDLEGLNEDTATHDKTNQVVDADANSVASNPLPNGRMTETAEEKLVPQSHKSEVSNDMDNTQADASEKLQAGIPEGNKLFEDEHYGLDDLERLMSEIGNMRSNLRLMPDFQRKEMAAKLAMKMATMFGDNDEEGSEDI

SEQ ID NO: 28821 - protein, 6 aa, Oryza sativa
MYKHVA

SEQ ID NO: 28822 - protein, 237 aa, Oryza sativa
MLEPDPKLRLTAKQVLEHPWLQNAKKAPNVPLGDIVKSRLKQFSRMNRFKRRALRVIADHLSAEEVEDIKEMFKAMDTDNDGIVSYEELKSGIAKFGSHLAESEVQMLIEAVDTNGKDALDYGEFLAVSLHLQRMANDEHLRRAFLFFDKDGNGYIEPEELREALVDDGAGDSMEVVNDILQEVDTDKDGKISYDEFVAMMKTGTDWRKASRHYSRGRFNSLSMKLIKDGSVKLVNE

SEQ ID NO: 28823 - protein, 336 aa, Oryza sativa
MAAALMRRAARAPPAACGLRRFMQEQTAFRPAAVPVVPPERRGFIPLADRIRDLGAAFPRINLDGLVPPAPPQTHPTVAREERASASAVAGLTVEEARKVLRATQMEAARARLRASGAGTVPYAEFLRLCCDAAGAESGASVARALDESGSVIVLGKTVFLRPEMVVKAIEKAIPIPRAQPIALDGPAREELKAMEAQKVEIDRTAALQVRRELWLGLAYLVVQTAGFMRLTFWELSWDVMEPICFYVASMYFMAGYTFFLRTKKEPSFEGFFESRFAAKQKRLMHARDFDLRRYDELRRACGLPVVRTPTSPCRPSSSSSSSTQESHCHSYCHCQ

SEQ ID NO: 28824 - protein, 308 aa, Oryza sativa
MASAASAPAFERLAGIRALAESGRFKAWFLDQFGVLHDGKKPYPGAVLALEKLAEKGAKMVIISNSSRRSSVTMEKLESLGFDPSCFLRAITSGELTHQYLQKRDDPWFAALGRKCVHLTWGNRGAISLEGLGLQVVSNVEEAEFILAHGTEALGLPSGDPLPKSLEELEQVLMLCLEKRLPMVVANPDYVTVEARDLRVMPGTLAAKYESLGGEVKWMGKPDKVIYTSAMSLAGVNPHECITVGDSLHHDIKGANASRVASAFITGGIHATELGLNEIGEIAGEDAIDSLCRKHGSYPTYVLPSFTW

SEQ ID NO: 28825 - protein, 367 aa, Oryza sativa
MHPKLSRFAHRVLCCGRKGSGEDLSDEGSGSLRWVFSLRELRSATNSFNYDNKIGEGPFGSVYWGQVWDGSQIAVKKLKCAKNGTETEFASDVEILGRVRHKNLLSFRGYCADGPERVLVYDFMPNSSLYAHLHGTHSTECLLDWRRRTFIAIGAARALAYLHHHATPQIIHGSVKATNVLLDSNFQAHLGDFGLIRFIPDGVDHDKIISENQRGYLAPEYIMFGKPTIGCDVYSFGIILLELSSGRRPVERSGSAKMCGVRNWVLPLAKDGRYDEIVDSKLNDKYSESELKRVVLVGLACTHREPEKRPTMLEVVSMLKGESKEMLSRLENDELFRPDSTVSSHGMSTPEGSSDCVPKNDQELAAA

SEQ ID NO: 28826 - protein, 48 aa, Oryza sativa
MARTSSGSVAITARSGIMGSASRSHPLVPSISSSTSARTAPTRGPGHE

SEQ ID NO: 28827 - protein, 266 aa, Oryza sativa
MALSSSISMSRRLFKGLTINPALASGMTCQHHQLQQHAPVSGTAKGKAKLKSGQQLKRNTIGAKKGGAPSTGGGGGGGRGRREAIERITQIAESCLNASTPLRHLSPKERLREAKREELGLISKERQRELDLAKAKAKSKGTREGDGGRVLMGPPGLDYISLGLVDEDAIPKYELTVEDGRRLAKQYSQVLMRRHRARQTAESSLLSLKKEAIAALPEKLRAAAMIPDMTPFPANRYMATLTPPIEGYIEKVRDAAKKYSVKEKLR

SEQ ID NO: 28828 - protein, 109 aa, Oryza sativa
MPYIKDYSSTGSKDDARPLADIVETSPQMLLECLKAFYGLVTGTEGSLPEFEQLQVPRLRSDACYGLARALAEAYELIYKAVVDPKNCYPDPRSLVKHSPEQIRTILEI

SEQ ID NO: 28829 - protein, 44 aa, Oryza sativa
MIERRKRNKKDIGFQYVWSMNYIIKSNVIKHQYNKNNREFEIVI

SEQ ID NO: 28830 - protein, 306 aa, Oryza sativa
MARHLAPPGSFHRLLASRHYPPSSPAPPPRPLLLLPKTLIPPAAAAMEFPRRGRRDVAAASAPASSSPETEVAPGAWGKVSAVLFDMDGVLCNSEELSRLAGVDLFAEMGVDVTGDDFVPYMGTGEANFLGGVAKLKGVKDFNAESAKKRFFEIYLDKYAKPNAGIGFPGALDLVTECKNAGLKVAVASSADRIKVDANLAAAGLPLSLFDAIVSADAFENLKPAPDIFLAASKTLGVDTDECIVIEDALAGVQAAKAAEMRCIAVMTTLEEDALQQASPSLIRKNIGDISIRDILYGGSNAYHSM

SEQ ID NO: 28831 - protein, 256 aa, Oryza sativa
MAWQQPMDGSHASGSKAAAAVADGPGTQRTQYPYVTGSSIIALKYKDGVIMASDTGASYGSTLRYKSVERIKAVGKHSLIGASGEFSDFQEILRYLDELTLSDHMWDDGNSLGPKEVHSYLTRVMYNRRNKFDPLWNSLVIGGVKKGPKGEEKYLGMVNMIGTHFEENHIATGFGNHMAIPILRTEWREDMTFEEAVKLVEKCLLVLLYRDRSSINKFQIAKITTEGATIYPPYSLKTYWGFAAFENPAQGAVGSW

SEQ ID NO: 28832 - protein, 229 aa, Oryza sativa
MAAAARATARVGLALLLAVVGVGAQDYDFFFLVLQWPGSYCDTKQSCCYPRSGKPAADFGIHGLRPNRDDGSYPQNCDPDSEFDPSKVSDLLGSMRSEWPTLACPSNDGIRFWAHEWEKHGTCAAAALGDEHGYFEAALRLRSRLPVLAALRDGGVSPDGGYYTLSQIKGAIQRGVGAEPFVECNRDESGNSQLYQLYFCVDAAGERFVDCPASPGGRPCGNRIEFPAF

SEQ ID NO: 28833 - protein, 75 aa, Oryza sativa
MMRGEGSREYLPKKDDFAIASLPWHPAKKDGFAMSSSPWHPARRRTASPCPVRPRKGRRSLFGPSSLGAIGPTVA

SEQ ID NO: 28834 - protein, 369 aa, Oryza sativa
MSDPSTPRKIEDAKNISIYNDVIDFTLFELETITKSFRADYVLGEGGFGTVYKGYIDENVRVGLKSLPVAVKVLNKDGHQGHREWLTEVRFLGQLRHPNLVKLIGYCCEDDHRLLVYEFMFRGSLENHLFRRTATPLSWATRMSIALGAAKGLACLHNAERPIIYRDFKTSNILLDSDYTAKLSDFGLAKAGPEGDQTHVSTRVMGTYGYAAPEYVMTGHLTARSDVYSFGVVLLELLTGRKSIDKSRPSREHSLVDWALLKLNDKRRLLQIIDPKLEGQYSVRAAHKACSLAYYCLSQNPKARPLMSDVVETLEPLQGSGGSDGAVQSVLGSGLPSYRVNRRLTTNSVHCRAIPNPKCSPAVPACRVR

SEQ ID NO: 28835 - protein, 305 aa, Oryza sativa
MMTSRMFSAMQMLIMVVVALAGLAAGARAGDIAIYWGQNGNEGTLAQTCATGNYRFVIVAFLPVFGKGQTPVLNLAGHCDPASNGCTGVGADIKSCQSLGIKVMFSIGGGVGNYGLSSRDDAKQVAAYLWNNYLGGTSPSRPLGDAVMDGIDFDIESGGGMYWDDLARYLKAYSRQGSSKKPVYLTAAPQCPFPDASLGVALSTGLFDYVWVQFYNNPPCQYSSSNGVGNLASAWKQWTSIPAGRVFLGLPAAAEAAGSGFVETSDLVSKVLPVVKKSPKYGGIMLWLRYYDGLTGYSDKVKSSV

SEQ ID NO: 28836 - protein, 70 aa, Oryza sativa
MRVLGLGGHHYCRLYKASAAFLQLSACLYWTPLYQSKLLLFLLPFSWSVWTKQLPLDANSYSKHFSRTCL

SEQ ID NO: 28837 - protein, 162 aa, Oryza sativa
MESTLITITRSPILPCPFSRRPASPARCFAGARRSRCAAASASFFSPAGGRGGGDAGAGSSLSSAAAAAALGEAAAAGGGGSDSEAILLSVQGMMCDGCAASVKRILESQPEVTSATVDFKEAKAVVLTTAEAKAAEDWQKQCGEKLANHLGTCGFESRLQE

SEQ ID NO: 28838 - protein, 308 aa, Oryza sativa
MTITIEQPHLDAIADRKVAGGGGGDNAAELVLDGGFVVPDSNAFGNAFRNYEAESERKETVEEFYRVNHINQTYDFVRRMREEYGRVDKTEMGIWECIELLNEFIDDSDPDLDMPQIEHLLQTAEAIRKDFPDEDWLHLTGLIHDLGKVLLHPSFGELPQWSVVGDTFPVGCAFDECNVHFKYFKENPDYLNPKLNTKFGAYSEGCGLDNVLMSWGHDDYMYLVAKENKTTLPSAGLFIIRYHSFYPLHKHGAYMHLMNDEDKENLKWLRVFNKYDLYSKSNERIDVEKVKPYYMSLIEKYFPAKLRW

SEQ ID NO: 28839 - protein, 196 aa, Oryza sativa
MFSGTQQKCKVCTKTVYPMDQLSTDGVVFHRSCFKCQHCKSTLSLGNYSSIEGVPYCKPHFEQLFKETGSYNKSFQSPAKPASEKLTPELTRSPSKAARMFSGTQEKCATCSKTAYPLEKVTVEGQAYHKSCFKCSHGGCAISPSNYAALEGILYCKHHFSQLFKEKGSYNHLIKCASVKRAEAQPAPPPAAADSS

SEQ ID NO: 28840 - protein, 28 aa, Oryza sativa
MILGELCVFSCSLVRADIVKQRKFVLES

SEQ ID NO: 28841 - protein, 162 aa, Oryza sativa
MAPVAVGDTLPDGQLGWFDGEDKLQQVSVHGLAAGKKVVLFGVPGAFTPTCSNQHVPGFINQAEQLKAKGVDDILLVSVNDPFVMKAWAKSYPENKHVKFLADGLGTYTKALGLELDLSEKGLGIRSRRFALLADNLKVTVANIEEGGQFTISGAEEILKAL

SEQ ID NO: 28842 - protein, 368 aa, Oryza sativa
MVKAETESGEVGPLVTEADIQHIVSSWTGIPVEKVSSDESDRLLKMEETLHTRIIGQDEAVKAISRAIRRARVGLKNPNRPIASFIFSGPTGVGKSELAKALAAYYFGSEEAMIRLDMSEFMERHTVSKLIGSPPGYVGYTEGGQLTEAVRRRPYTVVLFDEIEKAHPDVFNMMLQILEDGRLTDSKGRTVDFKNTLLIMTSNVGSSVIEKGGRKIGFDLDYDEKDTSYNRIKSLVTEELKQYFRPEFLNRLDEMIVFRQLTKLEVKEIADIMLKEVFDRLKAKDIDLQVTEKFRDRVVDEGYNPSYGARPLRRAIMRLLEDSLAEKMLAGEVKEGDSAIVDVDSEGKVIVLNGGSGVPEPLAPALSV

SEQ ID NO: 28843 - protein, 309 aa, Oryza sativa
MAEAKQQQQQPQAATAAAASGVWKTVKPFANGGASGMLATCVIQPIDMVKVRIQLGEGSAASVTKKMLANEGISAFYKGLSAGLLRQATYTTARLGSFRVLTNKAVEANDGKPLPLVQKAGIGLTAGAIGACVGSPADLALIRMQADSTLPAAQSRNYKNAFHALYRIAADEGVLALWKGAGPTVVRAMSLNMGMLASYDQSVELFRDTLGAGEVTTVLGASAVSGLCASACSLPFDYVKTQIQKMQPDASGKYPYTGSLDCAMKTLKSGGPFKFYTGFPVYCVRIAPHAMMTWIFLNEIQKLEKRLGL

SEQ ID NO: 28844 - protein, 500 aa, Oryza sativa
MAETSSARSPLLDVDESSGASEELLRREPVPRSVLSRLAAWEAGNLWRISWASILITLLSFTLSLVTQMFVGHLGELELAGASITNIGIQGLAYGIMIGMASAVQTVCGQAYGARKFRAMGIVCQRALVLQFATAIVIAFLYWYAGPFLRLIGQAADVAAAGQLYARGLVPQLLAFALFCPMQRFLQAQNIVNPVAYITMAVLIFHILISWLTVFVLGFGLLGAALTLSFSWWVLVALTWGLMVWTPACKETWTGLSVLAFRGLWGYAKLAFASAVMLALEIWYVQGFVLLTGFLPDPEIALDSLSICINYWNWDFQIMLGLSYAASIRVGNELGAGHPNVARFSVFVVITASVAFSILATILVLVLRYPLSTLYTSSTTVIEAVIKLTPLLSISIFLNGIQPILSGVAVGSGWQVVVAYVNVGAYYLIGLPIGCVLGYKTSLGAAGIWWGLIIGVSVQTVALIIITARTNWDNEVMKAIQRLRQTAVDDGTVPIVDDIE

SEQ ID NO: 28845 - protein, 269 aa, Oryza sativa
MGSYLGVAAASANPPHFIHLCYKPPGGNAKRKLAIVGKGLTFDSGGYNIKTGPGCSIELMKFDMGGSAAVFGAAKALGQIKPPGVEVHFIVAACENMISGTGMRPGDIVTASNGKTIEVNNTDAEGRLTLADALVYACNQGVDKIIDLATLTGACVVALGPSIAGIFTPSDELAKEVAAASEISGEKFWRMPLEESYWESMKSGVADMVNTGGRQGGSITAALFLKQFVDEKVQWMHIDMAGPVWNDKKRAATGFGVSTLVEWVLKNSS

SEQ ID NO: 28846 - protein, 463 aa, Oryza sativa
MEVDNDNVECKYGNAGDSTSPENGKHIEDQIIDCRMTALKDHEINTDVRIRDVNLNSCLDAMSPPVSGANYETSNAIDDNNRSSIIAQCFGANSADDNACKEENFVNNQSSVSKAESFNQNNDMIYQPNLTMDPISPAQINVDCFTSCSMTSEIKNNSNRREDNAKEQLVNPRNITSNDAGFDVEAYSNIFNGAITESSLAQLNNAINMKADYSSCYSLSDLNTLTGGPATDEIDIHSMRNSFVNSSTSRNEPNEHCTLDFDIKGSMLEALEKSDNDLENQYNGSTRPCGSLPTAGTSGSIDDFMSLQTNFGSLTSLVRSVEDGPMSRIIQDQCDLQLGFGVQKPQMYPTFEEQLRMASAGAPQFGTMNRHNHVPVPEPTLMLGYAPHIGSCPPVQLGWDMSMSKMVGGCVLQSSMCVWCNTQFQHFGTVADQQADSLGFICPACKEKISGHLSMLNNSSSQL

SEQ ID NO: 28847 - protein, 506 aa, Oryza sativa
MVSQHGILLAVAIISDHFGPLVSKVCRCLLRHGALPLQEIVRRLELSPGQVKNSLLVLIQHNCVQAFNAPRGNGDKTVTHYLAIFDNIVHRQRFSKFLSIIRADIPESEALLEGLLQNGRLTFGQLVERTISKVPEGSITPAREEIRMNFNKLVFAHYVERCPKPEPFFDPLVDEQSTSSRKRAPKTVEIALSIDKKVVNTAALSDAERFSEIPYIMEDASNANDSPRSSISGAKRKHNALEGDAELDSTIAENEVLWRANFEKFTFCLKKKFCADRKKPKLKVGTHPIWEAFFEASLMERDNNSVTSPINGIMERLGQKEGGTSMTLDHITRVLEELNCSPSSEDPDSFILDLSRIVEASRNEEIESLVRKKYGQEAFTIFRLLVRERGPVETDKIIDTTILDKQIVHGTLYKLWKDDYIDTERILSGTGTGNTQYFVWRVKNTFREQFIDNLCHAALNLRQMVNYIAELLLEGSKDDTKLRNRKNILILALTRHDDSLMLFQDF

SEQ ID NO: 28848 - protein, 29 aa, Oryza sativa
MDLPVLIVTKADAITSSPLLGRIINISLM

SEQ ID NO: 28849 - protein, 212 aa, Oryza sativa
MNSGMPAKMPKPVMNKLSTPAKEKKSTTGNNWMSVLGLSPSKASTNDQGSKNGQKQAQQETSEDAKKLAASALAAVRDAASAAAGRGKVEITEVRDFAGKDIEIKKLVDADSTEAIEKAKAAGAAPSALDHILEQIKKKQKLSVLDKTKKDWGEFKEENKGMEEELDQYKKSSNKYLDKVSFLQRADYREFERERDARLSMMSKRKSDTRED

SEQ ID NO: 28850 - protein, 70 aa, Oryza sativa
MWRVARQAKCPARRRCQLLKWCLSAAAAVQAMKRTLSISQLVAISKPLIVQSSVGIKSALVQTMMYFHFD

SEQ ID NO: 28851 - protein, 373 aa, Oryza sativa
MADLGLVDDLEKLPYVSTALEQLEERMKYWSEYRNFSVSPPLKDSFSPVTSSKSRNPNNAQSSRQNSEHKLSPLSDEDMIAGVSELCISPESNKIFNKGMPSKTEERCMAPIDSNENDTYNFYQVSDGQHLILHPLNMKCLINHYGSSDMLPPRIHGKILELETVTQSEATRKRYRYLSHFSLTTTFQFCEIDLGDMLPPSSLAPFMDEIKKREKQRKRTAKKEESDRVKAEVAAAAQASAMLFEHTSFSPSSGPHGDFMFSLDDFEALGNNAGPSTSPPASERKLFSDVARLGFASAQDSPPLRVESGDLTGKSESTGEQGPAATPALSFASIISSTRASDNSLDTHKPNVVGKKGKKPTKVLLSTGGGRRY

SEQ ID NO: 28852 - protein, 252 aa, Oryza sativa
MMSRDRRYDSFKTWSGKLERQLAHLAGAGPEFPEEEEDGCDAISSHHTKSMPQVDRFFAALECPELDKLRSSEELVLPLDKTWPFLLRFPVSAFGICLGVSTQAILWKTVATSAPTRFLHVTTKTVVLKVGMSCQGCAGAVRRVLTKMEGVETFDIDMEQQKVTVKGNVKPEDVFQTVSKTGKKTSFWEAAEAASDSAAAAAPAPAPATAEAEAEAEAAPPTTTAAEAPAIAAAAAPPAPAAPEAAPAKADA

SEQ ID NO: 28853 - protein, 525 aa, Oryza sativa
MALLRAHHLLLMRPRAAFSSRPPPLSSSPCRRALPTTAIASRLLCSHHASSPPEDASASASPSIVADLLDYLNESWTQFHATAEAKRQLLDAGFTLLSENDDWDLQPGGRYFFTRNMSCLIAFAVGEKYKLGNGFNIIAAHTDSPCLKLKPRSASFKSGHQMVNVQTYGGGLWHTWFDRDLTLAGRVILKDADGSFKHELVKVSRPLIRVPTLAIHLDRTVNSDGFKPNLENHLVPLLATKHEETTANSSEKNSSSSTKVVHHPLLLQVLSDEIGCKSGEIIGIELNVCDTQPSCLGGGNNEFIYSGRLDNLASCYCALRSLMDSSKMPEELSNEKAIRMIALFDNEEVGSNSMQGAGAPTMFHAMRRIVDSLMHQSMGEGALERAINSSFLVSADMAHALHPNYPDKHEEHHRPELQKGLVIKHNANQRYATSAVTAFLFKEIARLHNLPVQEFVVRNDMGCGSTIGPILASGVGIRTVDCGIPQLSMHSVREMCGKEDVDTTYKHFKALFEMFSDIDRKLNVD

SEQ ID NO: 28854 - protein, 330 aa, Oryza sativa
MERAAGGVSYQRFPRVRIRELKDDYAKFELRDTDASMANALRRVMIAEVPTVAIDLVEIEVNSSVLNDEFIAHRLGPIPLTSAAAMAMRFSRDCDACDGDGSCEYCSVEFHLAARATDSDQTLEVTSNDLRSTDPKVCPVDQARAYQHALGGTEPFDTAAAADQRGILIVKLRRGQELRLRAIARKGIGKDHAKWSPAATVTFMYEPEIRINEELMETLTLEEKRNLVESSPTKVFNIDPNTQQVVVEDAEAYTYDDEVIKKADAMGKPGLIEINAKEDSFIFTVETTGAITAYELIMNAITVLRQKLDAVRLQDDDADLGELGAHLVGG

SEQ ID NO: 28855 - protein, 397 aa, Oryza sativa
MKTKDGRGTTDAYCVAKYGQKWVRTRTIIDSFTPKWNEQYTWEVYDPCTVITIGVFDNCHLNGGEKANGARDTRIGKVRIRLSTLETDRVYTHAYPLIVLTPAGVKKMGEVQLAVRFTCSSLLNMVHLYSQPLLPKMHYVHPLSVMQVDNLRRQATNIVSTRLSRAEPPLRKEIVEYMLDVDSHMWSMRKSKANFFRIMGVLSPLIAVAKWFDQICHWRNPLTTILIHILFVILVLYPELILPTIFLYLFLIGVWYYRWRPRQPPHMDTRLSHAESAHPDELDEEFDTFPTSRPPDIVRMRYDRLRSVAGRIQTVVGDLATQGERLQSLLSWRDPRATALFVTFCFVAAIVLYVTPFRVVVFLAGLYTLRHPRFRHKMPSVPLNFFRRLPARTDSML

SEQ ID NO: 28856 - protein, 42 aa, Oryza sativa
MSNCSALDIGLVFFGGRSEIKETNDMKCSGQHCFVPLLPIFG

SEQ ID NO: 28857 - protein, 418 aa, Oryza sativa
MSLEVAGAGAPQAQGKFLGILVCWVLGNGSLFAWNSMLTIEDYYSILFPTYHPTRVLTIAYQPFAFGITCILTYHEAKLNTRKRNLIGFALFLISSFALIMLDIGTKGRGGLGPFIGVCIISALFGTADASVQGGLVGDLSFMCPEFIQSFLAGLAASGVLTSALRLITKAAFENSQNGLRNGAILFFSITCFFELVCLLLYAYVFPKLPIVKHYRSKAAAEGSKTVASDLAAAGISNEHSIQAEEDPKKCDRLSTKDLLIQNIDYAFDIFLIYVLTLSIFPGFLSEDTGAHSLGTWYALTLIAMYNVWDLIGRYLPLIKCIKLTSRKGLTGAILARFLFIPAFYFTAKYGDQGYMIFLTSFLGLTNGFLTVCVLTEAPKGYKGPEQNALGNVLVVCLLGGIFSGVVLDWLWLIGKGW

SEQ ID NO: 28858 - protein, 14 aa, Oryza sativa
MGKKVRVFMYPSSI

SEQ ID NO: 28859 - protein, 390 aa, Oryza sativa
MAIATESQQAQVQAAATDAVAAAAVGRKVVDEVSGWLRVFDDGTVDRTWTGPPEVLPLMQPVPAYAEPRDGHTLHDLPGEPNLRVYLPEVALAERRLPVVVQLHGGGFCISHPSWLMYHHFYARLACALPAVVVAVELPLAPERRLPAHIDTGVDGLRRLRSIALSDAAALGDPAAELLRDGRRLLAGVPHRGQLGRQPRPPRRRARRRGRGGQLGAPPRRRRHPAPPGVRARHPEQVGAGAEARLGVLHPRHARQVPRHGAPRGRHQGPPVHVPDGAERAAAGVRPAAAAAGRRRRARPHPGHQPRVLRRAAHRRQGRGGAGQPRHEPLLLPQQVRRRHGPGHRREDPGARRRHQELRRPPLDVEIREAHLLHRTCSTFQVVIVSRLVS

SEQ ID NO: 28860 - protein, 594 aa, Oryza sativa
MQSLALTSPSLPAPATASGRRRRRLERIRATAVSDEPKLNKYSARITEPKSQGASQAVLYGVGLTDADLRKPQVGVSSVWYEGNTCNMHLLRLAEAVRDGVREAGMVAFRFNAVGVSDAISMGTRGMCYSLQSRDLIADSIETVMGAQHYDANISIPGCDKNMPGTIMAMGRLNRPSIMIYGGTIKPGHFQGNSYDIVSAFQCYGEFVTGSISDEQRKNVLRNSCPGAGACGGMYTANTMASAIETMGMSLPYSSSTPAEDPLKLEECRLAGKYLLELLKMDLKPKDIITEKSLRNAMVIVMALGGSTNAVLHLIAIARSVGLQLTLDDFQKVSDQVPSLADLKPSGKYVMEDLHKIGGTPAVIHYLLEQGLLDGDCMTVTGKTLAENAKIFPPLSEGQQIIRPLDNPIKSTGHIQILYGNLAPEGSVAKITGKEGMFFSGPALVFEGEESMITAISENPANFKGKVVVIRGEGPKGGPGMPEMLTPTSAIMGAGLGKECALLTDGRFSGGSHGFVVGHICPEAQEGGPIGLVQNGDKITIDVVKRVIDVELTEAELEERRRKWTPPPHKAARGALWKYTKLVSPASRGCVTDE

SEQ ID NO: 28861 - protein, 324 aa, Oryza sativa
MAAAAVRHREVEVASGVRLHVAESGPEGGPVALLVHGFPELWYSWRHQMRALAARGFRAVAPDLRGYGDSDAPQGRDSYTVLHLVGDLVALIADLGRPQVFVAGHDWGAVVAWQLCLLRADLVTAHVSLSVEYQPRHPRMSVLQAVRVLCGDDHYVCRFQKPGVAEAEFARLDLNHLFKMVFGMRKPATIILPQDKTFFDAIDSDGTCPPWLSEEDISYYADKFGKTGFTGGFNYYRCIDLDWELTAPWTGALINVPIKFIVGDLDLTYNTPGVKDYIHKGGFKANVPNLEDVVVLEGVGHFINQEKPDEVSEHICEFFSKFLM

SEQ ID NO: 28862 - protein, 84 aa, Oryza sativa
MSCCGGNCGCGSGCQCGGGCGGCKMFPDVEATATTKTFVLAAPSNKASSGGMEMAVESGENGGCGCNTCKCGTSCSGCSCCSCN

SEQ ID NO: 28863 - protein, 435 aa, Oryza sativa
MREEDGFYYPHNLDFRGRAYPMHAHLSHLGSDLCRGVLEYAEGRPLGKSGLRWLKIHLANKYGGGIEKLSHEDKVAFVENQLPDIFDSATNPVDGNCWWMNAEDPFQCLAACMDLSDALKSSSPQCAVSHLPIHQDGSCNGLQHYAALGRDYMGAAAVNLVPGDKPADIYSEIAARVLDVVREDSMEDPATNPTASLARVLVDQVDRKLVKQTVMTSVYGVTYIGARQQITKRLQEKGLITDDKLLYEVSCYATRVTLDALGQMFQSARGIMAWLGDCAKMIASENHPVKWTSPVGLPVVQPYKKYKNYMIRTSLQCLALRREGDAIALQRQKAAFPPNFVHSLDSSHMMMTAIACKKAGLHFAGVHDSFWVHACDVDKMNQILREQFVELYSMPILENLLKEFQTSFPTLEFPPCPSQGDFDVREVLASTYFFN

SEQ ID NO: 28864 - protein, 417 aa, Oryza sativa
MASNGEATTGSETAAPAPVPEPTPPPCQGRLITVLSIDGGGIRGLIPATILACLEAKLQELDGPEARIADYFDVIAGTSTGALITSMLAAPDDDRRPLFAAGDLTNFYLENGPKIFPQRRVGFLTPVANLIGVVRGPKYDGSFLHDKIKSLTHDVTISNTVTNIVVPAFDVKYLQPIIFSTYEAKNEPLKNAHLSDICISTSAAPTYFPAHFFKTTDVSSGKSREFHLIDGGVAANNPTMVAMSMISKEVLRENQDFKLGKPADYKHYLVISIGTGTAKMAEKYTAPACAKWGVLRWLYDGGFTPLIDIFTHASADMVDIHASVLFQSLCCEKSYLRIQDDSLEGHTSSVDIATKENMEALIKIGKDLLTKRVARVNIDTGVYEPVDGEGTNEEALARFAKKLSEERRLRRNNLSSS

SEQ ID NO: 28865 - protein, 47 aa, Oryza sativa
MNSQLLTYSTSYCVTSRLCHYYQATYHFFSCFAPILSIWTVRENIAK

SEQ ID NO: 28866 - protein, 31 aa, Oryza sativa
MLVEVFICTFAASLAELCIEENARNHVSYPL

SEQ ID NO: 28867 - protein, 314 aa, Oryza sativa
MLANKWMVDEKELRVIHYTLGPLKPWDWWTAWLVKPVAVWQDIRKNLEESLPGTGGGRNPHDQSVVKILFSLPLFMLICGYYGSCFQTNKELLCIRSLCAFARRARYKYKSEEALPSYSTIGAASSSFGISHQKSHNGAHLKLPSYFGAITVLVCFISALISLAFAFIIIPRQVMPWTGLLLMYEWTSVTFFLLFGSYLRVVYNWGSSSANHVGHNNLDSSENHAGAGLQRNTSDCDTDAAFYWSGMAILSSIALLSPTVLGITALFAKLGLMVAGGVVLASFMTYASEHLAISAFVKGQRDRNASRGSICFMC

SEQ ID NO: 28868 - protein, 185 aa, Oryza sativa
MAVSTSASSTLPLLSLHRAAGNPNPAALSFPPPLRAPPLRSRAAAAAASAAAPPAETIPDMPEETEGTGIPMPSSIGDDGEQLAPKQKIRIKLRSYWVPLIEDSCKKIIEAAKTTNAKTMGPVPLPTKRRVYCVLNSPHVHKDSRFHFEIRTHQRLIDIMYPTAQTIDSLMQLQLPAGVDVEVKL

SEQ ID NO: 28869 - protein, 332 aa, Oryza sativa
MEAVEDKAMVGVGGAVAAGYSSSSWRLGTRACDSCGGEAARLYCRADGAFLCARCDARAHGAGSRHARVWLCEVCEHAPAAVTCRADAAALCAACDADIHSANPLARRHERLPVAPFFGPLADAPQPFPFSQAAADAAAAREEDADDDRSNEAEAASWLLPEPDDNSHEDSAAAADAFFADTGAYLGVDLDFARSMDGIKAIGVPVAPPELDLTAGSLFYPEHSMAHSLSSSEVAIVPDALSAGSAAPPMVVVVASKGKEREARLMRYREKRKNRRFDKTIRYASRKAYAETRPRIKGRFAKRTADADDDDEAPCSPAFSALAASDGVVPSF

SEQ ID NO: 28870 - protein, 8 aa, Oryza sativa
MTVLQMFL

SEQ ID NO: 28871 - protein, 303 aa, Oryza sativa
MKALFTQIKPHAVIHTASPHFDLKPEIHEKVNVGGTKVLLQAAQEAGVKAFVYTSSASVILDHQTELINADERWPLVTGDDQPEYYTTTKAYAETAVLQANRNPENFLTCAIRPTGIFGEGDVQLLPKMVSACRKGQTKFQVGDNTNMFDFTYVENVAHGHVLAVLALLHTHKVLPTIPLDTERVDGEAFFITNGQPVYFWDFARKVWHEAGDRVPLSSVWHLSADFARAIGAVLENVFWLMGKKPNLTRAQVKYSSMSKYHSINKARQRLGYEPLVDLDEGIKRGVQYILEQEKKAGEKKGQ

SEQ ID NO: 28872 - protein, 228 aa, Oryza sativa
MDIERQVQETFSNHYKSVVLIRRGSDGIGTGFIIGKTRKSYVAMTCYHVISGNPSGALKVRLPRDTKDYVAELLYEHQGYDLAIIKVNGVSGECPILQFGDLEGVAHRANVVQLGYILGSQFALNLDPSVSPGSVIRPANQNGMMGSQDVVYSAAARHGASGSAVMFDDKVIGVLYSMSTNSQVAYARSSTTVHMALKNWLHPNDAAITTEKMIELVVKPLNDSELDD

SEQ ID NO: 28873 - protein, 115 aa, Oryza sativa
MSTETRLLIEQEVKSLLENAYNNAKTILTKHSKEHHVLAQALLEHETLTGAQIKKILAQANSTQQQQEHAVEAPRKTPAAPSSPAASAAAAAAATAAAAAKQAAAKAKGVAGIGS

SEQ ID NO: 28874 - protein, 297 aa, Oryza sativa
MSPVRFDAAYMPLFGGDNLVPSPHARTVLLKLDRFTGSGFVSKSAYHHGFFSASIKLPHDYTAGVVVAFYLSNGDVFPGQHDELDFELLGNRRGHAWHVQTNMYGNGSTGRGREERYLLPFDPTAAPHSYAIAWTPAAVIFYIDAIPIRELVRCSSGDYPAKPMSVYATIWDGSAWATDGGRHKVDYAYAPFTAVFSDLVVTGGTDDDHCAAMGLMTSEVAVMTPAKRGSMRRFRSRHLTYSACYDTVRYNGTGVVFPECDESEQDNFHAWGESKRVINSRSSSSATYATGSGVRID

SEQ ID NO: 28875 - protein, 393 aa, Oryza sativa
MAFFPNIPEAKQEIQSLYRNYAHLFDMSSDNAGVDSRIMRRQPAMLIDRSVFLTGSAIWTIALHYKAHIYRWLLQKFSAIQGAPIYCAMILRSLCRRSSLPFFVGISVLTARIYNYVTIHNHIYSPQLCAGHDANLRRDLFIQDTELCNKQTLDSGFLGSKHDCIRLALHFICSTANLKVYTTPKQIGFDGKCKQKNTERGRFWRILSTNEQYLTYIGALVTLQLFLQLSRANITTLLLPMLYQTTSSQRNAAVVGNIVIVLVNSFGILGSDFTTKHHGREVTFTVSAILMVFCQITIPLLVEAQIGLGGGTRILTGYTTATFLLTCVVSYGLSWSWGSLFCTIPGMKIQSAGQVIGMGLCFGLCFVQMQYFLLMLCRLKNAILAYYAMWIWS

SEQ ID NO: 28876 - protein, 34 aa, Oryza sativa
MTDMDRLDLFCSHSYWWCRSLSDVRCSSSEVRHI

SEQ ID NO: 28877 - protein, 87 aa, Oryza sativa
MKNQETLQVNSIISSSGTAQPLLSSSSDTAVQPLAIMPSASVSCLQSAPAASETSIESRMDTATGKSTSAEQAPMTPTTYPIKPPSD

SEQ ID NO: 28878 - protein, 466 aa, Oryza sativa
MPPAIPTATMPASPKEAQSRAGAGVRMISSEELRAHASRDDLWISISGDVYDVTAWVPHHPGGDIPLLTLAGQDATDAFAAYHPPSARPLLGRFLVGRLEDYTVSPASADFRRLLAQLSSAGLFERVGPTPKVQVAGMLLLLCAALYCVLACASAWAHLLAGGLIGFIWIQSGWMGHDSGHHRITGHAALDRLLQVLSGNCLTGLSIAWWKCNHNTHHIACNSLDHDPDLQHMPLFAVSSKLFGLWSYFYQRTLVFDAASKFLISYQHWTFYPVMCFARINLLIQSAVFLLSSRKVPQRGLEIAGVAAFWVWYPMVVSCLPNWWERVAFVVASFVITGIQHVQFCLNHFSSEVYVGPPKGNDWFEKQTAGTLDIQCSPWMDWFHGGLQFQIEHHLFPRLPRCHLRKVSPFVRDLCKKHGLPYAAASFWQANVLTWKTLRAAALQARKATSGAAPKNLVWEAVNTHG

SEQ ID NO: 28879 - protein, 228 aa, Oryza sativa
MGGIVGRGDSPRHTSPASKLERKMVEAMQQRAQKGTSVKSFNSVIMKFPKIDESLRNCRIIFQQFDEDSNGEIDQQELKHCFQKLDISFTDEEIKDLFQACDIYENMGMKFNEFIVFLCLVYLLNDPLVSEARKRMGLGSLEPTFETLVDSFVFLDKNKDGYVSKNEMIQAINETIGGERSSGRIGMKRFEEMDWDKNGTVTFKEFLFAFTRWVGIDDNEDDDDEEGV

SEQ ID NO: 28880 - protein, 36 aa, Oryza sativa
MITRRIARPSCRRRIIQISALSTFDGRIGAYHGGDG

SEQ ID NO: 28881 - protein, 282 aa, Oryza sativa
MTTYTAWYLAIAALLNGQAEGITHTGPTKLVLYFTGATNILYTFGGHAVTVEIMHAMWKPAKFKYIYLLATLYVFTLTLPSASAMYWAFGDELLTHSNAFSLLPKTGWRDAAVILMLIHQFITFGFACTPLYFVWEKVIGMHDTKSICLRALARLPIVVPIWFLAIIFPFFGPINSAVGALLVSFTVYIIPALAHILTYRTASARMNAAEKPPFFLPSWTGMFVLNMFIVVWVLVVGFGLGGWASMVNFIRQIDTFGLFAKCYQCPKPAPALAQSPVPLPHH

SEQ ID NO: 28882 - protein, 152 aa, Oryza sativa
MGWQGTDPSTDFRGGGFISLENLIFFARNYPGSFQALLNKVQGQRADWEYPFAVAGINISFMLIQMLDLQSSVPSSKSGVRFVELLGRDENAFDHLYCIAFRLLDAQWLVKRASYMEFNEVLKSTRTQLERELVLEDVLEVKDLPSYTMLDK

SEQ ID NO: 28883 - protein, 100 aa, Oryza sativa
MMPLRADEGLRCIYNAGCWIMRKRGNGVKNLYFYIWKRNSSYILRGAFVSCNLLLCGVNQRTRKVIYKHLLLLFTQNRDVVMVKTNETPFRSNSYTIFKF

SEQ ID NO: 28884 - protein, 33 aa, Oryza sativa
MGCFEGDGLFDEREGEGVEVPWLQHLMCEPFLR

SEQ ID NO: 28885 - protein, 271 aa, Oryza sativa
MRRPELFSHGNLLRPCKGILLFGPPGTGKTLLAKALATEAGANFISITGSNLTSKWFGDAEKLTKALFSFASRLAPVIIFVDEVDSLLGARGGAFEHEATRRMRNEFMAAWDGLRSKENQRILILGATNRPFDLDDAVIRRLPRRIYVDLPDSQNRMKILKILLAKENLESDFRFDELANATEGYSGSDLKNLCIAAAYRPVHELLEEEKGGVSGTKISLRPLKLEDFVQAKAKVSPSVAFDATSMNELRKWNEQYGEGGSRSKSPFGFGS

SEQ ID NO: 28886 - protein, 172 aa, Oryza sativa
MVKIPSPRRLFRSRSKSIGGAGGGVGADICAMVAEHEKIEWEVRPGGMLVQKRRAPEEQDDGSSSMSAHSGADAIVVRVSTGWQWHDVSIDSTATFGDLKVMLSLVTGLWPRDQRLLYKGKERDDGDHLHMVGVQDKDKVLLLEDPAVKERKLRSTTLAQLMGVPCHSFIEV

SEQ ID NO: 28887 - protein, 51 aa, Oryza sativa
MGHRRRAPGGHYKKNKSSSRHFIPFFFLLFFLYCVRINVMVEATVFQMFWE

SEQ ID NO: 28888 - protein, 293 aa, Oryza sativa
MVSTSGGVEEQNHGDEVTSGTNTHEESVILVHTTDNVEKKMNKDLTSEPADNVEEEVQSEDIATDPTSHESSTLHITDGAESKKQDAKVAADLAAGKIDVPRSADDAEEQKHEATVSTDDDLKGDDPSESNSPQIIDGAGDKEQDAETAADPPPGKTDAPPSTDDAEETKPKEEELETVGTVVDDPKEEGKEEIADKEVIVNSDKNHVSLKPLLSEKAAETKESKKPSTKDRVPSFRRRVSKDGGSPAKPGSPKAAVSGQQQDWNSPARLPVEKKPKGKKQQWVPFICCPSMS

SEQ ID NO: 28889 - protein, 474 aa, Oryza sativa
MGRGLLCLLLLQLVGLVVAGGGRWRWQEEFLRLPSSDETTRWAVLIAGSNGFYNYRHQADVCHAYQIMRKGGVEEQNIVVMMYDDIAHNPDNPRPGLIFNHPSGPDVYAGVPKDYTGDDVNVNNFLAVLLGNRSALTGSGSGKVVASGPNDHVFVYYADHGGPGVLSMPADGEYLYADDLVKALKKKHAGGGYKSLVVYVEACESGSIFEGLLPSDISVYATTASNAEESSWGTYCPGDDHDAPAAEFDTCLGDLYSVAWMEDAEAHQEGRLAETLRQQYRTVKNRTSDEGTYTLGSHVMQYGDMALAPQSLDLYYMDTSPATANDHKLAAAGAKGSHSYTVSVNQRDADLLYLWRKYRRAGEGTAEKVEARERLVQEMGRRSRVDRSVEMIGGLLLGGAKHKQQVVRERAALVEDWECLRSMVRTFEDQCGSLGQYGIKHMRSFANICNAGVPHHAMAKAASLACPSPPPLHL

SEQ ID NO: 28890 - protein, 31 aa, Oryza sativa
MEEFHQLQMPKPCRLRLILYLFRGKNLQLKA

SEQ ID NO: 28891 - protein, 24 aa, Oryza sativa
MLQLTLHRVQWLNIFCGQMAMLAP

SEQ ID NO: 28892 - protein, 150 aa, Oryza sativa
MAMISAKRIAQLAKKWRRMAALGRKRLTMSSTAMATEEAQGCSTAVAGKGHCAIYTADGARFEVPLAYLGTAVLGELLTMSREEYGFSGDGKITLPCDAMVMEYVLCLLGRNASAEVEKAFLSSMVMPCHYASCVTPSLGACQQVAVCSN

SEQ ID NO: 28893 - protein, 228 aa, Oryza sativa
MGGSRALPLSSLLAAATKSPLLHHRPLPLRLAASMSSSSPSPSPAAPASASAIDFLTLCYRLKTTKRAGWVRRGVQGPESVADHMYRMGVMALVAADLPSGVNRDRCVKMAIVHDIAEAIVGDITPSDGVPKEEKSRREQEALDHMCSLLGGGPRAEEIRELWMEYEQNATLEAKVVKDFDKVEMILQALEYEKEQGLDLEEFFQSTAGKFQTDVGKAWAAEVASRRK

SEQ ID NO: 28894 - protein, 127 aa, Oryza sativa
MLTDWMRNLEVGIPALLEDGINVLIYAGEYDLICNWLGNSRWVHSMEWSGQKDFVSSHESPFVVDGAEAGVLKSHGPLSFLKVHNAGHMVPMDQPKASLEMLRRFTQGKLKEEWLAELPEQPMYAAM

SEQ ID NO: 28895 - protein, 113 aa, Oryza sativa
MLPEDISSAGRPPDRELYDRLRRDKLVMPSHTQQFVPFCHDMAMPPSCDSSARNWRRELFSCSTQAMAEVATMRSSSNNAAVARPEYGIASLLLHGECGVICMNSLIPASVWS

SEQ ID NO: 28896 - protein, 440 aa, Oryza sativa
MKVEVVETTLVAPSEATPQHALWLSNLDLAVPKTHTPLVYYYPAPSPPPADAGAEAEAEGFFAPERLREALARALVPFYPLAGRLAAGPGGRLEIDCNGEGALFVVARADFTGDEMFTDFEPSPEARRLLVPFAASGEPPCVLAMVQVTFLKCGGVAVGTGMHHVTMDGAGAFQFIRTWTGLSRGLDAAAASPSPPSHDRTLLRARSPPHVPFEHPVYPPSYLNGLPRPFVTRVYSVPPKLLADIKAACAPGVSTYGAVTAHLWRAMCVARGLPHDAESRLRVPANIRQRVRPPLPSPYFGNAIVRDLVTVPVRDILSQPLGFVAERIKHAVARVDDAFVRSVIDFLELESEKGNQAARGQFMPETDLWVVSWLGMPIYDADFGWGRPAFVAPAQMFGSGTAYVTQAPDKDDGSGGGVSVLFALEPEYIQCFEKAFYGTE

SEQ ID NO: 28897 - protein, 318 aa, Oryza sativa
MNAFFTSLARGLDDLSSGGGLSSLPALLRAAALLRGLHSQLTLLVGQLHLPPGGRWLDEYMDETARLWEACLAVKVGLAAVERYCAAASCAAAAMDDWLQDPSPLSTRQVMRAISASRREAMAAEEENRALSEARIAPLSLQLDERLLLRAADARLSGFNGFRGLLYALHNASSLLLLVLASGAVSCAAAAAGPCSADGAADAGGFVASIAMLQQRMAEEADADGSAGAARGGIRMYEFRCARAAVEAAHEEVERAVAAGPRKQQCEDGDGGVKDKVDELKARLDVLRTGTDGLVCQLDDFLDDIVEGRKELSDLCSH

SEQ ID NO: 28898 - protein, 25 aa, Oryza sativa
MQLSPIPFLTSKRTPQFLSVRNTPS

SEQ ID NO: 28899 - protein, 382 aa, Oryza sativa
MSSSTAALAAAAAASAALLVLAAFAGGVEARERESAWLPAAKKMAAAPKKVAAAAAAKVPAVIVFGDSTVDTGNNNVVATMLKSNFPPYGRDLGAATGRFCDGRLPPDFMSEALGLPPLVPAYLDPAYGIADFARGVCFASAGTGLDNATAGVLAVIPLWKEVEYFKEYQRRLRRHAGRAAARRIVRDALYVVSIGTNDFLENYFLLVTGRFKQFTVGEFEDFLVAQAAGFLAAIHRLGARRVAFAGLSAIGCLPLERTLNALRGGCVEEYNQVARDYNVKLNAMIAGLQSSLPGLKIAYVPVYDDMLNLINNPSTLGLENVEQGCCATGMFEMSYLCNEKNPLTCPDADKYFFWDSFHPTEKVNRFFANSTLQICLRELLS

SEQ ID NO: 28900 - protein, 145 aa, Oryza sativa
MLSLSRALGRRLFSSSSAAASDATAAAAAVVRKAQNPLEEFFEVERSTEEDKPPPHYGRSWKASELRLKSWDDLQKLWYVLLKEKNMLMSQRQMLHSENMRFPNPERVSKVKKSMCRIKHVLTERAIAEPDPRRSAEMKRMINAL

SEQ ID NO: 28901 - protein, 197 aa, Oryza sativa
MTMEASMSRTVSMLFSARRCIVASAAKDIEIAQGGRRRRSNDVKQQRGSHGQLAVAAATTAAAMTGQCHAAAAAAAPERQWQEVAEWVCRAVAVVGELDPATAKAAIGVAGPALSAFGFLFIARIVMSWYPRLPVREFPYVVAYAPTEPLLAVTRKVIPPLGGVDVTPVVWFGLVSFASEILVGPQGLLVLLSQQKP

SEQ ID NO: 28902 - protein, 426 aa, Oryza sativa
METVETLVAHIQGLSGSGEELAHLHNLLRQADGEPLRAHSAALLPFLAQLHPSAHSLGFLYLLEAFASSASNLRAQGGGDFLVTTADFLVSCSAEQIRLAPDKFLSVCRVFKNEVMQLNAPIRGIAPLRAAIRKIQTSSEELTPIHADYLLLCLLAKQYKAGLSVLEDDILEVDQPKDLFLYCYYGGMIYIGLKKFTIALDFLHNAVTVPMSSLNAIAVEAYKKYILVSLIQNGQVPSFPKYTSSTAQRNLKNHAQVYVDLSTCYSKGNYSELEEYIQLNAEKFQSDNNLGLVKQVLSSMYKRNIQRLTQTYLTLSLEDIASSVQLKTPKEAEMHVLRMIEDGEIHATINQKDGMVSFHEDPEQYKSCEMVEHIDSSIQRLMALSKKLSSIDENISCDPAYLMKTGRERGGRFDYDDFDSVPHKYF

SEQ ID NO: 28903 - protein, 10 aa, Oryza sativa
MSKELGKMTP

SEQ ID NO: 28904 - protein, 235 aa, Oryza sativa
MGDSQYSFSLTTFSPSGKLVQIEHALTAVGSGQTSLGIKAANGVVIATEKKLPSILVDETSVQKIQSLTPNIGVVYSGMGPDFRVLVRKSRKQAQQYYRLYKETIPVTQLVRETAAVMQEFTQSGGVRPFGVSLLIAGYDDNGPQLYQVDPSGSYFSWKASAMGKNVSNAKTFLEKRYTEDMELDDAIHTAILTLKEGYEGQISANNIEIGIIRSDREFKVLSPAEIKDFLEEVE

SEQ ID NO: 28905 - protein, 39 aa, Oryza sativa
MRLRSSGVQQPSRIFIVCSRRHLVVVRCRRDLLAKSIEL

SEQ ID NO: 28906 - protein, 328 aa, Oryza sativa
MANNDVVPMISPSSGVHIVLPDYYSPDGMGLIVPKTKDGRVVFMLPWLGRTVAGTTDSSTAITMLPEPHEDEIQFILDAICDYLNVQVRRSDVLSAWSGIRPLAMDPSAKNTESISRDHVVFEDYPGLITITGGKWTTYRSMAEDAVNAAIRSGNLKPANGCVTDHLHILGGYGWDPASFTVLAQNYKRMKRTYGGKIIPGAMDSAVSKHLSHAYGTLATQVASIAQNEGLGKRLAHGYPFLEAEVAYCARHEYCESAVDFIARRCRLAFLDTDAAGRALPRIIEILALERKWDKARQKLELQKGKDFLETFKSSKNAQFRDGKHNGQ

SEQ ID NO: 28907 - protein, 270 aa, Oryza sativa
MRNAKAAIDELPDRAEAPPPPAAASAEQPEATEQATSTSYGFGNTTSGTMTSAASAAAGSFLPHSLGADRVSDSVKSLFPSSSTASGAASAGHDEYRGSPPDLLSRTTSNQQPQELCLTLQSNQHQIFSHVSSNHHGMISSAGVPGWPDHSQRMQAWHAPENSTGDGRGGGNGDGYMFAMPSRQGLDQSQLFSHGEPLQSSGRGWASARAWLDPLAVAAIHHQPSTMAAGQVGFGHLVGGAGGGGGFMGFLAPAAQRLEGEEEHGSEVIR

SEQ ID NO: 28908 - protein, 488 aa, Oryza sativa
MALPGRLRALILAVALPLLFLSASEAGTVGINYGRVANDLPNPAAVVQLMKQQGIAQVKLYDTEPTVLRALANTGIKVVVALPNEQLLAAASRPSYALAWVRRNVAAYYPATQIQGIAVGNEVFASAKNLTAQLVPAMTNVHAALARLSLDKPVKVSSPIALTALAGSYPPSAGVFREDLAQAVMKPMLDFLAQTGSYLMVNAYPFFAYSGNADVISLDYALFRPNAGVLDSGSGLKYYSLLDAQLDAVFTAVSKLGNYNAVRVVVSETGWPSKGDAKETGAAAANAAAYNGNLVRRVLSGNAGTPRRPDADMDVYLFALFNENQKPGPTSERNYGVFYPNQQKVYDVEFVLGGNSAGGGGSSGKDNGGLGWQDNGGVNAGNAPAGAGGGVKATSTGEAWCVANAMAGEERLQKALDYACGPGGADCKAIQPGAACFEPNTMVAHASYAFNDYYQRKGRTIGTCDFAGAAYVVNQAPKMGKCELPSTV

SEQ ID NO: 28909 - protein, 190 aa, Oryza sativa
MLCGVLGYAAFGNRAPGNFLTGFGFYEPFWLVDVGNVCIVVHLVGAYQVFCQPIYQSAEAWARSRWPDSAFVNGERVLRLPLGAGDFPVSALRLVWRTAYVVLTAVAAMAFPFFNDFLGLIGAVSFWPLTVYFPVQMYMSQAKVRRFSPTWTWMNVLSLACLVVSLLAAAGSIQGLIKSVAHYKPFSVSS

SEQ ID NO: 28910 - protein, 623 aa, Oryza sativa
MAKKNYGQVYNILGWGDPYFTVNSHGHLAVKPHGRDTMSGQDIDVHSVIHRALATTITTNDGDKKPQFPMILRFPDVLKNRLDSLHAAFHGAVDSTGYASRYQGVFPIKVNQNKAVVQDLVTFGHGYSYGLEAGSKPELLIAMSCLAKAKPGAYLVCNGYKDADYVALALSARAMGLNAIIVLEMEEELDIVVEQSARLGVEPVIGVRAKLLTKIPGHFGSTAGKHGKFGMLADKIYEVAGKLKKMGKLHWLKLLHYHVGSMIPTTDIVYNAAAEAAGIYCALVKEHGATGMTTLDCGGGLGVDYDGTRSGSSDMSVAYGLEQYASSIVQAVRLTCDDNGVPHPVLCTESGRAMASHHSMIILEALSAIPEPQDEEDTHHRLLSKIQDLSSKQPRTAHTVNGGGGVDAMHSHAVELKKHGIEMYKLAKKLSKRVTGDANGIYNYHMNLSVFSLVPDFWGIGQLFPMMPVSRLNEKPTINGTLVDITCDSDGKVEKFIRDAVTLPLHPLDDAAAEHGGYYVAALLSGAYQEALACKHNLFSGPTLVRVESAGGGGAFKIVSVELGPTAEEVIGTMRYDVKNDISDVIEKVATENGVWPMVEPLMKKGLTTMPYLNDYKPPKTTF

SEQ ID NO: 28911 - protein, 363 aa, Oryza sativa
MAAHSHVIPFLSPAATSARCSPYGHRRRGRAGLLRCAAAAGQAGFFTRLGRLIQEKAKSDVEKLFSGFSKTRESLSVVDELLTYWNLADTDRVLDELEEALLVSDFGPKISFRIVDTLREEIRDGKLKSGAEIKEALKRCILELLTSKGGNPELQLGFRKPAVIMIVGVNGGGKTTSLGKLAYRFKNEGVKVLMAAGDTFRAAARDQLEVWAERTGSEIVIDNDKKAKPASVLSQAVKRGKREGFDLVLCDTSGRLHTNYGLMEELVSCKKVIAKALPGAPNEILLVLDGTTGLNMLQQAREFNDVVGVTGFVLTKLDGTARGGCVVSVVDELGIPVKFIGVGEGMEDLQPFDAEAFVEAIFP

SEQ ID NO: 28912 - protein, 227 aa, Oryza sativa
MQQQHLMQMNQGMMGGYASPTTVTTDLIQQYLDENKQLILAILDNQNNGKVEECARNQAKLQHNLMYLAAIADSQPPQTAAMSQYPSNLMMQSGARYMPQQSAQMMAPQSLMAARSSMMYAQPALSPLQQQQQQQAAAAHGQLGMGSGGTTSGFSILHGEASMGGGGGGGGAGNSMMNAGVFSDFGRGGGGGGKEGSTSLSVDVRGANSGAQSGDGEYLKGTEEEGS

SEQ ID NO: 28913 - protein, 557 aa, Oryza sativa
MEATSSTTLALSSPPTAAARRSPAKAIVASHHLRHSSVPALHLRAVPGPSFRALPSPGFPGWRRKRGSGLVVRAEMFGQLTTGLESAWNKLRGTDQLTKDNIAEPMRDIRRALLEADVSLPVVRSFIESVTEKAVGTDVIRGVKPEQQLVKVVNDELVQLMGGEVSDLVFAKTAPTVILLAGLQGVGKTTVCAKLAYYLKKMGKSCMLIAADVYRPAAIDQLTILGKQVGVPVYSEGTEAKPSQIAKNGIKEAKSKKTDVIIVDTAGRLQVDKAMMSELKEVKRAVNPTEVLLVVDAMTGQEAASLVSTFNVEIGITGAILTKLDGDSRGGAALSIKEVSGKPIKFVGRGERMEDLEPFYPDRMAQRILGMGDVLSFVEKAQEVMRQEDAEELQKKILSAKFNFNDFLKQTQAIAQMGSFSRIIGMIPGMNKVTPAQIREAEKNLKFMESMINVMTPEERERPELLAESRERRIRVAKESGKNERQVSQLVAQLFRMRAQMQKMMGAMQGQDTPDMEGLMDSIKAEEQAAAGTGKRRRKYGNLRRRDLDAMRGFRRR

SEQ ID NO: 28914 - protein, 65 aa, Oryza sativa
MEGPAGVVARLALAKCFAKEEKKSCVGNGGGRRTRLRSPAHSRFYNLSFSNGDDMMINQKDYIAT

SEQ ID NO: 28915 - protein, 353 aa, Oryza sativa
MAHRRIALAVLVTLLLSAFRPCLAQQSNDDTSKHHRSATAGGFTPTTVVVLVALITAFVLLTVFSVLINRCAQARAPPRRAFRSTASHQPVGGAAAASRASRGLDKEVVEAFPTAVYGDVKARMAAKSGPLECAVCLAEFADSDELRVLPACCHVFHPDCIDPWLAAAVTCPLCRANLTAPPVSLAAAESSDLTAPEEAVQEEESEELDEASLMATFTPESVIDFGATHDHEFDRAGYPHYRRTQSAMDAAPDRHTLRLPEHVMKELAADRRHRRAASLAGYPDSVERTPRWLTSLWRSVSWQRQSRADWDAGEEHGGSKRVHPVAGAQDETPSGSGSDGSKENSDSDALNRV

SEQ ID NO: 28916 - protein, 24 aa, Oryza sativa
MLVCSFYYCTPIWRKGKLMRLMRD

SEQ ID NO: 28917 - protein, 515 aa, Oryza sativa
MVKMNKAEDVFNVKRKIGGEVSGYTHCELDLSFLLGLSCGIIPFANHNFARRVLYQSEKHSQQAIGYSTTNPHIRVDTLSHQLYYPQRPLFKTVIADCIGRSEYTFGRKDDFARPEYFNGQNAIVAVNVHQGFNQEDSLVMNRASLERGMFRTEHFRNYKAEVENKGGPGGNKRLKMKDKIDFGKMQSKRGRVDNLDDDGLPYVGASLQSGDIVIGKVSESGEDHSIKLKHTEKGMVQRVLLSANDEGKNFAVVTLRQVRSPCLGDKFSSMHGQKGVVGFLESQENFPFTYQGIVPDIVINPHAFPTRQTPGQLLEAALGKGIALGGTMRYATPFTTASFDVITDQLHKAGFSRWGAESVLNGRTGERMHSLIFMGPTFYQRLIHMAEDKVKFRNTGPVHPLTRQPVADRKRFGGVKFGEMERDCLLAHGAAANLHERLFMLSDFSQMHVCQTCERVANVIMRPVPGGKKIRGPYCGFCRSSENIVRINVPYGAKLLYQELFSMGICLRFETEVC

SEQ ID NO: 28918 - protein, 392 aa, Oryza sativa
MQKHETSGENIDTILEEITRALDQSANNQKGDDLNGSYDWSIMKEMVFSLTEKITSVIGISEEGNVASSQKLLLDRSEFCARLEHLVHVCHDLLHGKTDLEKFVHEVCLVLEYIINQYKNISFQEQPDTVNNNTENLDGEESFGNMNGGCDIKSPKSSSAPDIQTEALEESIQSVEGRKTDHILVNQEESQLDEELTRVILDQDEKISQENSASCEIESPHDHPSAETLAEKEEKHLASSSEISAAAEKLAECQETITNLSRQLRALKSPAVSGNLDSPMSNSRPSSSDYKPQSLACILAEGEDSSTEDAISPATKEVHSKKEPDAASRKSVAQDGSVNAALKAVEEELTQTVVHPIFPEPSQEIISADLKKKRRSPSLLGRIMFRKKVEGS

SEQ ID NO: 28919 - protein, 219 aa, Oryza sativa
MRPFSPHLRQAAAAAAAAATGAPPLAAALLKNSSAPLIHGRLSFSHTSLQSPNNRGKRTGWAVRVLPLTEENVEMVLDQVRPSLMADGGNVALHEIDGLVVVLKLQGACGSCPSSTMTLKMGIETRLRDKIPEILAVEQIVDTETGLELNHDNVDKVLDEIRPYLSGTGGGSLDLVQIDESVVKVRLTGPAAGVMTVRVAVTQKLREKIPSILAVQLTE

SEQ ID NO: 28920 - protein, 390 aa, Oryza sativa
MHLLHQARKKNETSKPTTDEHKEVASNVLCKWTKEDIDRAETAMLKVLRVVQPGQWVSWRALRGAASKAVDSQELLDYSLRGLGGKLMDDGHFIAVRCNAETSAIEYRLEDNSNQSVDAAAFGPSVDHLLHDLKFLYNALLNPETMLASQPEVIGASSHSAAAKILDCKQFIKHYDQHTPRAPLNPFLLSVRCSIELLDHPKDYTAPPVELVLLPASATLAELKIQATRAFQETYLMFQSYQVEQLPDFPNFSDTTLVKHVLGSSQLVRVRGRCTGDNRRIVQFRMERGLENWTVDCTCGAKDDDGERMLACDVCGVWQHTRCSGISDFDDVPEKFICRKCASPRRGKGRGGGGGNGGSRMDVSAAGRCKDEIGSSVGGAGKFGRMVTVG

SEQ ID NO: 28921 - protein, 164 aa, Oryza sativa
MKLTMKLSIALACFLFFLAAATTASAQCTFEILVKTDGRRNAGTDARVSLQVRAASGPTLTITNLESWGQMAAGHDYFEKGNLDRFRGAGACMPSEPCNMVLTSDGSGNKPGWYVSYVMVTQLGQGSLPSMTHRWAVDQWLAIDEAPHMLTAERRGCGIGAAAP

SEQ ID NO: 28922 - protein, 124 aa, Oryza sativa
MSVLGGCRILQDTPSPFHVHRGQGHLAQALFPHFDNACWCCVVACVQVLDKQHHERFHSPGITSSFDMFCSLSPVPLSFLHFFHAHGFRSDQNHGCMIRSIDSVVFTMQSAPPSLLPSEFSFDS

SEQ ID NO: 28923 - protein, 201 aa, Oryza sativa
MAVAIEAPFHVLAVDDSLPDRKLIERLLKTSSFQVTTVDSGSKALEFLGLHDHEDSPISTQSDQQEVAVNLIITDYCMPGMTGYDLLKKIKESSYLRDIPVVIMSSDNIPSRINRCLEEGADEFFLKPVRLSDMSKLKPHILKSRCKEHYQQEQNLQSNSESNNSSNPTSENSSSSTSSNSHKRKAVDEEILPHTIRPRHS

SEQ ID NO: 28924 - protein, 43 aa, Oryza sativa
MHQGKEKCLCYTSLVNVQIDVCKCCSRVWCSTGFLCFYLMLLQ

SEQ ID NO: 28925 - protein, 436 aa, Oryza sativa
MKSGGRRPRGRGLEQNEEGIRSGRRSSSVNPVMLSSMAASPAANGAVKGLPTIVDEFTYEQLHNVTGGFGDDNLVKHGHSGAIYLGELESGFNVVVKKVDLKSSNKNLGELGFLAKNSHGRIVPLLGHLATDEEELLVYKYMAKGDLTSALHRKSVDAEEGLRSLDWITRLKIAIGVAEALCFLHDECSPPLVHRDIQASSVLLDDKFEVCLGSLSDVCTQQSEGSRSFFSRMLRSSKSLDKNASGPPASCSYDVYCFGKVLLELITGNFGVSGSNDTGSEEWLARTLDFIDAHDKEGLSNIVDPSLVVDEDHLEEVWAVSIVAKTCLNPKPSRRPLARYILKALENPLRVVREELQSNSSLTSTSSRSSWHFAFHGDSRRSSELRPTLGQSARKQSVKSQGSDEDEDEEEDSFSFKRASREILPDPVELEKDAVV

SEQ ID NO: 28926 - protein, 200 aa, Oryza sativa
MAFSQQGPRTVCILSANGAISNVTLRQPATSGGLVTYEGRFEIISLSGSFLLAEDGDTRSRTGGLSVALAGSDGRVLGGCVAGMLMAATPVQVVVASFIAEGKKSKPVETRKVEPMSAPPQMATYVPAPVASPPSEGTSSGSSDDSGSPINHSGMPYNHSGQQQQHQQHQHMPPAYASGGWSLSAHHQNRHDSDMKMMSN

SEQ ID NO: 28927 - protein, 342 aa, Oryza sativa
MASSPRHSTHHPTLLLRRHYPNFCALAPLRPTRQLPSLPQQQLQQKQHVGHDPSPSEPTTAAASPATAAAAGALRVGIVGFGNFGQFIAGGIQRQGHAVLATSRSDYSGYCARHGIRFFATADELCEAGPDVLLVCSSILSTEAVVRAIPFRKLRPGTLVADVLSVKQFPRNLLLEILPPGFGIVCTHPMFGPESGKHGWSGLPFVYDKVRVAKEGDQAAKCEQFLSIFEREGCRMVEMLCEEHDRYAAGSQFITHTIGRILSQLNLESTPINTKGYETLLQLTKNTISDSFDLYYGLFMYNVNATEQIDNLDRAFEKVKQMLYGRLHNVLRKQIEERVPIP

SEQ ID NO: 28928 - protein, 214 aa, Oryza sativa
MAGEADGKAPLGSRYPPAALNERILSSMSQKHVAAHPWHDLEIGPGAPAVFNCVVEIPRGSKVKYELDKATGLIKVDRVLYSSVVYPHNYGFIPRTLCEDGDPMDVLVLMQEQVVPGCFLRARAIGLMPMIDQGEKDDKIIAVCADDPEYRHFRDIKEIPPHRLQEIRRFFEDYKKNENKEVAVNEFLPAEDAINAIKYSMDLYGAYIIESLRK

SEQ ID NO: 28929 - protein, 189 aa, Oryza sativa
MAMAAAASLLPASAAPTLPGRAFRPPRNSTPTASLSCDGGSRCRGVGLGVILGGCRAQGVRRNAAAETYVPGSGKYIAPDYLVKKVTAKELEELVRGERKVPLIVDFYATWCGPCVLMAQDIEMLAVEYENNALFVKVDTDDEYELARDMQVRGLPTLYFFSPDQSKDALRTEGLIPIDMIRNIIDNEL

SEQ ID NO: 28930 - protein, 696 aa, Oryza sativa
MKVNNENIVQKLTLSQAIDTRDALAKSLYASLFEWLVEQINKSLSVGKRRTGRSISILDIYGFESFDRNSFEQFCINYANERLQQHFNRHLFKLEQEEYVEDGIDWAKVEFEDNQNCLNLFEKKPLGLLSLLDEESTFPNATDLTFANKLKQHLNNNSCFRGERGKAFAVRHHAGEVAYDTSGFLEKNRDLLHMDSIQFLAKCKSSLPQMFASKMLSQSDNPLPVPYRNSAADSQKLSVAMKFKGQLFQLMQRLESTTPHFIRCIKPNNLQLPAIYEQGLVLQQLKCCGVLEVVRISRSGYPTRMTHQKFARRYGFLLLEDVASQDPLSVSVAILHQFNILPEMYQVGYTKLFFRTGQIGKLEDTRNRTLHGILRVQSCFRGHQARRHARERIRGVLTLQSFIRGENARKMYSSLARKHRAAIILQRNLKCWLARRYFVNIRKASVVIQSGIRGCLVRRCAGNVDLLNVLREFESKKEAEGDQILIKASFLAELQRRILKAEATVREKDEENEMLQQRLQQYENRWSEYEQKMKAMEEMWQKQMRSLQSSLSVAKKSLALDETPRMSDSSVDQSWESNGVHIGSASQLVPRTVGREMNASISVISRLAEEFEQRSQVFADDAKFLVEVKSGQADASLNPDMELRRLKQNFDSWKKDFGSRIRETKVILNKLGSGNESSPNSVKRKWWGRLNTSKFS

SEQ ID NO: 28931 - protein, 279 aa, Oryza sativa
MAKPQDMRSVDSFSQLPFIRPAPPPQQQARDTIRLFGCEFSNDLQLRPTEAGAGSPDAANGSTVTSEGSNGGDGGTKNGGAATAAAERKFECHYCCRNFPTSQALGGHQNAHKRERQHAKRAHLQASLAMHRYMPGHMYGLFNYHHHIGGRFDHHPPPPPPPPPPAHYPMWTSAAPGAFAGPGSMAQPINGSPVQAGLWSVPPPTENFGSTAGRQGADKLATTVAGTPAAGEVACKDEMVPMSLLSSSPSLSSCSSTSPEMLGRCELGQKEGVSLDLHL

SEQ ID NO: 28932 - protein, 133 aa, Oryza sativa
MEIQQQKGVGNSKVVKVEKEESWDLFVNQASNEGHPVVAHFGASWCVTSLSMNYKFEELAQTHPEILFLYVDVDDVQSVSSKLGVKAMPTFFLIKDKEVVNKIVGANPDEVKKMVDASAESFGVTAPPDIVVE

SEQ ID NO: 28933 - protein, 51 aa, Oryza sativa
MTATSVSEDAVGVSVEDLLYPGTIEPQLVKQNQHPAVHRLFLFFREDILPC

SEQ ID NO: 28934 - protein, 279 aa, Oryza sativa; identical to SEQ ID NO: 28759

SEQ ID NO: 28935 - protein, 231 aa, Oryza sativa
MESHRMRVGALAWNSSLLSSGSRDKSILHHDIRAQDDYISRLAGHKSEVCGLKWSYDNRQLASGGNDNRLYVWNQHSAHPVLKYTEHTAAVKAIAWSPHLHGLLASGGGTADRCIRFWNTTTNMHLNCVDTGSQVCNLVWSKNVNELVSTHGYSQNQIIVWRYPTMSKLATLTGHTYRVLYLAISPDGQTIVTGAGDETLRFWNVFPSPKSQSSDSLSSIGATSFVRSYIR

SEQ ID NO: 28936 - protein, 83 aa, Oryza sativa
MEEFEKALECLKEMKEDGMEPNMDEYNKLVQSLCLKALDWRTAENLLKEMEDGGLCLKGTTRSLIAAVKELEMDELSKASQEA

SEQ ID NO: 28937 - protein, 43 aa, Oryza sativa
MFILNLDIHLRQHTQERRFNWTKRHLDFGMTGPMISGNKLHRM

SEQ ID NO: 28938 - protein, 118 aa, Oryza sativa
MWRLPYVSIRDDLSVTVRHIQFRLVTLMKEQEEEKEVSVADRDSSNPGRQLHAHFTQKSTLQTAPCAAAASSRPAASLVRFFHLVQFHRVQFTELSTATSVQALFRRPIGPLTDVLAC

SEQ ID NO: 28939 - protein, 329 aa, Oryza sativa
MQRSDAVRALDIYKRATNQAERLSEFYEVCKTIHIGRGEKFLKIEQPPASFLVTMEEYVTEAPTVAQKDKVLAIEYKKEAEEEEKPASPPPAPEPEPEQEPEPEPEPVKEEAPKEEPTDLLGLNEPNPAAAEIEEKNALALAIVPIDDVPKVAPAQNGVTGWELALVTTPSSNETAITSSKKLAGGLDLLTLDSLYDDANRRASQPTSYNPWDVNPGVAGAGAAPMMQQPMMHDPFYASSGYAAPHNVQMTAMAQQRQAFMLQQQMMMAAAAAAAAAPPPQVFHHHQQQQQHLQANPANPFGNPFAAAAAAHHPYGAAAAAGNGYTGLI

SEQ ID NO: 28940 - protein, 249 aa, Oryza sativa
MENPDLRKAMGMKSDQKGVRVRRVEPTAPESGCLQPSDIILSFDGIDIANDGTVPFRHGERIGFSYLISQKYTGEKAHVKILRNSKVLEFNIKLATHKRLIPAHIKGRPPSYYIVAGFVFMVVSVPYLRSEYGKDYEYDAPVKLLDKHLHAMAQSPDEQLVVVSQVLVADINIGYEEIVNIQVLSFNGKPVKNLKHLATMVEDCNEEYLKFDMDYDQLVVLEAKTARAATQDILTTHCIPSAMSEDLRT

SEQ ID NO: 28941 - protein, 155 aa, Oryza sativa
MRSSMDVWSPQVFSNGTIKWPKSPSEKVMKARKPSSPFGTAESSSGSRNSDAARAGNNHSTKKIVDRKNDSVRMNNPGKGSIRWPVPIEDGASPVKSERGLVLDMRQNHVNAARHPNQVSSQAKEYENQQKLRKATLTSSLGSAGDWNRDRNKRM

SEQ ID NO: 28942 - protein, 86 aa, Oryza sativa
MEKKIEHLEQKLQAKDSVESTSRDFSLDSSTLPSKQRDRSLAPETTPPNPTQQQELREPSGIMAFKFILGVALLSVLIGVFLGKRY

SEQ ID NO: 28943 - protein, 343 aa, Oryza sativa
MDPRSSQAQEDGFFHPRDGACPADSSGKTECKTQGSIATRKVQKADREKMRRDRLNEQFQELGSTLDPDRPRNDKATILSDAIQMLKDLTSQVNKLKAEYTSLSEEARELTQEKNELRDEKVSLKFEVDNLNTQYQQRMRVLYPWTGMEPSVVIGPPLPYPFSVPVPVPVPIPSGAVPMHPQLQAYPYFRNQTSGTVSNPCTPYMAYTQPIHPPTDQLSNQFSAPVQHSSSNRSHSMAQDSRSKSSALQQVSCRGKHDDFDDVATDLELKTPGSSAPLQSEIANKDSSSDLKKKQQFIQETKGSSLTEGSSSSSRCSSSGPPDVSNSIEGGSVADDQRSTVQT

SEQ ID NO: 28944 - protein, 549 aa, Oryza sativa
MPLRPPPPPQGFLTAYPSAAFPPVKRPHEDDLGAGDVLTFRFHSLAVLKLFDRIREYRLHDYRYQATRGWYSSGTAPEDALLPCAVARPPRMYGCVIGVQRGRTVEVVDTSDILLDTDPGTLDRDLLKKKLETYKKAFPGLAILGWYSIDTHVTNTDMETNQALMDASGTTFYLLFNPAMNLSLKDLPVTIYEKVHSTNRSPTPLIFVQGKYKTETVEAERISLDHTCPVVSDVSVPPLVGKGQHANIMQTSGFKLMLFEIPSGFAMFEVSQELIARPKDIWARFAYQDDITNVIVTLGSIQIHNKSVARDIIVGPGDELKEFILSFCTHNYLIVQDVELKDVIEKKLNIYCYCNPTVVGELTWGLNYVLHKLLPQEQSLTHEPYLPLSKAMSKQIKEYGFKISPREIDREFLRAMSFLNYLGYMSERYSLLLDHLFGQYRKNNMSDIEFAKSIASHLHSSEGIVPRDERYTRAEIMEFIDFIIAAPENRSRTLSFLRRIEAASIDDSPPPPSLPGGMGVSLLKRLRLDWITVCCLGCAVALYPFYRRV

SEQ ID NO: 28945 - protein, 439 aa, Oryza sativa
MVSTKLAVLTSMQHCLAAFLAEVYFEVDKCRKGLTESSDKSLHTLFIVLNSVFSKLEVSFRNAVEGQTLLCTHDGKSPELIFERLPEVDVESSEWTEVLSANAITLIYQNLQKFDDFISDQFSNHKRPRNTTIYWLPYTCGALGLSACSLWLLRHSSLMGSSDIDNWIQDAKESMVGFWDVHVGQPIISIRDELFETFKQRSKHEMEKQEVQQTEESLRRMLLDFCGNTSNEKPPQDMSELAMMEIVMKRYEKEAMHPFKGLSSGKLTCALSIQIEKHKLALLEAMLELDQILRANEINFAILAALPAFGVSLLLLFAVRAWATHGRGAEGRGRTARRQRRLLLADVEKRLMEFQNCMANGMEEEAYCKFGLTLYTLDRLYKAVESQARETGEWSSLREDMFDLAKPGVGMEDKLVLLSRLKGMYDCLLPSPSGVLPRL

SEQ ID NO: 28946 - protein, 293 aa, Oryza sativa
MTRHAGARRRGGAGVVSLIVVVVAVLSAAAIAAEGVDAAVFDDAHLLPRPLVIELPTTTSSSSPALAEEGEGEAVPAEVRCASWRLAGEANNLAPWKSLPEECAAYVREYLTGVAYRSDLEVVAREASAYARTARVGDDGRDAWVFDVDETLLSNLPYYADHGYGLELFDHREFDKWVERGEAPAIPSSLKLYNEVRDLGFKTFLLTGRSEGHHGVTVDNLKKQGFHDWDKLILRAPADRKKTATIYKSEKRKEMEEEGYRILGNSGDQWSDLLGFSTSARSFKLPNPMYYIP

SEQ ID NO: 28947 - protein, 279 aa, Oryza sativa
MMETWGATVHPSPSAATESGRRILERDPASPGSLGIAISEAVEVAARDADTKYCLGSVLNHVLLHQTVIGEECLEQLAAAGDVPDVVIGCTGGGSNFGGLVFPFMREKLAGRMSPAFKAVEPAACPTLTKGVYAYDFGDTAGLTPLMKMHTLGHGFVPDPIHAGGLRYHGMAPLISHVYELGFMEAIAIQQTECFDAALKFARTEGIIPAPEPTHAIAAAIREAMECKRTGEKKVILMAMCGHGHFDLASYEKYLRGDMVDLSHSDEKLQEALAAVPKI

SEQ ID NO: 28948 - protein, 160 aa, Oryza sativa
MAAAAAASRALWACRTASYLRISSFPRAFSTVLKDLKYADTHEWVKVEGDSATIGVTDHAQDHLGDVVYVELPEVGSTVSQGTNFGAVESVKATSDINAPVSGEIIQVNDELSEKPGFINGSPYEKGWIIKVKISDPSELNSLMDDEKYKKFCEEEDGKH

SEQ ID NO: 28949 - protein, 122 aa, Oryza sativa
MLNYLLSVTPVGIGEYMLASWLGMMPITLALVYVGTTLKDLSDVTHGWSEISTTRWILIISGFILSVVLIVCVTRIAKSSLEKALAENGDAGIPQLPVVASPSDLQQPLVIRIDTSNEDHEK

SEQ ID NO: 28950 - protein, 311 aa, Oryza sativa
MAPSWFERYGNHRNGQNLSMFNLQKTPVPPYNVQKPSWNMDNNSAEQRIDSGQSVKPGHYISSKKMEVSVPSSIMQRRPKKRKSAESDLVSWHKLIEHPKTLRNMSTTEMDWAWAANRLMEKAEDDAENLEDVPVNYLWRKRLRLTTRLIQQILPAIPAKVLKAQAASAYEGVTYNIAMFTLGDACNMASYNSRTLTDHENNSSEQTNAKKMEDRLSKVVEVFTGRIKKMENDFVSLNKRSSMLDVQLECQDLERISIVNRLGRFHGRNHAAGVEASSASEMIPRRIFPERHVMSFAVPGNLPEGVYCLSL

SEQ ID NO: 28951 - protein, 228 aa, Oryza sativa
MLLACDCDNDAQTADTINGDAPMLSSYRAPPLADHLLDKPHWLSQLKPWRRHAHGDDHLSAGIAINWSSVRSATKDWITNPMNIAMLLWLLCVAVSGAMLVLLLLGLLDGAFPTPAARNHWIEINNQVLNALFTLMSLYQHPVLCHHLFLLCRRRAALRVRAALRRLLEDPDERTVRASGERGVLRLAVGDGLRPVALLLAVRAGAGGAHGEPLPHRWRDVLQEASCC

SEQ ID NO: 28952 - protein, 316 aa, Oryza sativa
MGDVAKDLTAGTVGGAAQLVVGHPFDTIKVKLQSQPTPPPGQPPKFAGAMDAVKQTLAAEGPRGLYKGMGAPLATVAAFNALLFTVRGQMEAVLRSEPGAPLTVSQQVVAGAGAGVAVSFLACPTELIKCRLQAQSALASAAPAAAAAAASPVGGGAATATASVAAVKYGGPVDVAKQVLRSEGGVGGLFKGLGPTLAREVPGNALMFGVYEAIKQYLAGGQDTSSLGRGSLVVAGGLAGASFWGSVYPTDVVKSVIQVDDYKNPKYSGSMDAFRKILAADGVKGLYKGFGPAMARSVPANAACFLAYEVTRSALG

SEQ ID NO: 28953 - protein, 36 aa, Oryza sativa
MSSSEERKCLLRCLLPQLWEQTFCVVFLVVSYALWK

SEQ ID NO: 28954 - protein, 317 aa, Oryza sativa
MEIRAPPTSLRLAPPPPASASFRRTALRTSFLNGSVSLRLIQVRQSNVNRFKCNGIRSNLLDRFSRVVKSYANAVLSSFEDPEKILDQAVLEMNDDLTKMRQATAQVLASQKRLENKYKAAEQASDDWYRRAQLALQKGDEDLAREALKRRKSYADNASSLKAQLDQQKGVVENLVSNTRVLESKIAEAKQKKDTLKARAQSAKTSTKVSEMLGNVNTSGALSAFEKMEEKVMAMESQAEALGQLATDDLEGKFALLETSSVDDDLAQMKKEISGSSSKGELPPGRTAVSNSGAARPFRDIEIENELNELRKKANEY

SEQ ID NO: 28955 - protein, 162 aa, Oryza sativa
MVLKTELCRFSGQKIYPGKGIRFIRADSQVFLFANSKCKRYFHNRLKPAKLTWTAMYRKQHKKDIHAEAVKKRRRTTKKPYSRSIVGATLEVIQKKRSEKPEVRDAAREAALREIKERIKKTKDEKKAKKAEVAKSQKTQSKGGATQRGAKGPKIGGGGGKR

SEQ ID NO: 28956 - protein, 232 aa, Oryza sativa
MDYWKTKVLPKIKVVFAKGGNAKKAAAAELIKSFDESKEGINGEFEEKKADLQPKVVEIYEAAPAPLKVLIKDRAKVSGIKKNSAAVTKFVDDLAKIEFPGAKQLSEGIAKVGPALLSGPVFATFEKVSTLLPADEEEIKPKEATAAAAEEEKKEEAAAAAAATDAAGEEKKEEAEEKKEEEAAAPADEPAAAAGESAPAAAEAEPPVEAAATPAAAEAAPAKAEEEEAPKA

SEQ ID NO: 28957 - protein, 252 aa, Oryza sativa
MATNENLPPNVVRQLAKELKSLDESPPEGIKVIVNDDDFTTIFADIEGPAGTPYENGVFRMKLLLSRDSPQSPPKGFFLTKIFHPNIATSGEICVNTLKKDWNPSLGLRHVLLVVRCLLIEPFPESALNEQAGKLLLENYEEYARHARLYTSIHALKPKNKTKSGTISESTTALNVDQSNNAVSKNTPLGPAALSTSTANKAFGSNLQDQNAAPSDPALGASAVPKKDGLHAVKAPVEKKKIDARKKSLKRL

SEQ ID NO: 28958 - protein, 41 aa, Oryza sativa
MHTRYGCSLSYVRFGLLYPGFWISSPSGPQSTVKLTWIGWL

SEQ ID NO: 28959 - protein, 128 aa, Oryza sativa
MIRDWKTASEMIEYLDSSLSSISVGTLNHVLNFLGKCGKTENMMKLFYKMVTSCSTVGLSTYAVVLRNLLVVGKWRKYIEVLQWMEDSGVHPTLYMFQNVLPYIWRENGMDFAATMQEKISSLRDKQT

SEQ ID NO: 28960 - protein, 33 aa, Oryza sativa
MDFHPKFMGRLLGLLPIIIEKFMRNNTGFPVLQ

SEQ ID NO: 28961 - protein, 178 aa, Oryza sativa
MFASRPAVHPVEAPPPPDPAEQPRGVLMKDLPGMPGTAGGLGLRLAQFAFAAVALAVMASTNDFPSVTSFCFLVAAAILQCLWSFSLAIVDIYALLVKRCLRNRRAVCLFAIGDGITAALTFSAACASSGITVLIDNDLDLCSENHCASFESATAMAFLSWFALSPSFLLNFWSMASG

SEQ ID NO: 28962 - protein, 47 aa, Oryza sativa
MRSDFSFCFSSFCTCKCGITSTKKSSCPVLYLTCLTCKSSAQMDDKT

SEQ ID NO: 28963 - protein, 410 aa, Oryza sativa
MYIIEDKGGAIALMLASLFFLGTWPAVLTLLERRGRLPQHTYLDYSITNLLAAVLIALTFGQLGDSKPNMPNFFTQLSQDNWPSVLFAMAGGVVLSIGNLSTQYAWAYVGLSVTEVISSSMVVVIGTTLNYFLDNRINRAEILFPGVACFLVAVILGSAVHASNAADNEEKLNGSTNIYKLGENGSVEPNKEVIEKDAPKDLENGASATKYVAKAEAGTAEYLIELEERRSIKVFGSSTFIGLGIVFFSGVCFSLFSPAFNLATNDQWHTLKQGVPHLVVYTAFFYFSISCFVTGIGLNILFLYRPMAGVPKSSFKAYLNDWEGRQWALLAGFLCGFGNGFQFMGGQAAGYAAADAVQALPLVSTFWGILLFGEYRKSSRKTYILLGFMLFMFIVAVAVLMASSGHRSTK

SEQ ID NO: 28964 - protein, 46 aa, Oryza sativa
MFSACLFRDVLSSRPRAVGYDPGHLRSTESVSVMHSENKSEYVRPC

SEQ ID NO: 28965 - protein, 281 aa, Oryza sativa
MEHAVVEGESFSPDCSTLLMPALSIGNVGQLAVDLLVSSSRARRVAYLDEPSVLPCAGNDAFGPDAVGDLALALEAYESPSHRLAFIQQRSPIITGMVVSFAKNVANFISSIEKDHVVILSSLDSGKRRIIDASSDMQVYYLSSCNEDGSDPKCENLGWKKLEEYDPSQQRWKCLASLVEGGHLSEDMTGDPEEMTINDYYSSLPFAALFSACKAKGLKVTCVLCYCSEGDNMPESFQLAEAACKLVAQGPEQFHGNGSNGWTIPLSWKSVYGPPPDLSIF

SEQ ID NO: 28966 - protein, 287 aa, Oryza sativa
MKAMGINDLLSFDFMDPPAPQSLITAMEQLYNLGALDEEGLLTRVGRRMAEFPQEPPLSKMLLASVDLGCSDEILTIIAMIQTGNIFYRPREKQAQADRKRGNFFQPEGDHLTLLTVYQAWKAKQFSGPWCYENFVQLTSLRRAQDVRKQLLEIMDKYKLNVVSAGNDLTKVRKAITAGFFFHAARKDPQGGYRTIADHQQVYIHPASALFQQQPEWVIYHEVVMTTKEYMREVTAIDPRWLVELAPRFYRSADPTKISKRKRQERIEPLYDRYNEPNSWRLSKRRG

SEQ ID NO: 28967 - protein, 166 aa, Oryza sativa
MQADSTLPIAQRRNYKNAFHALYRIIADGGVLALWKGAGPTVVRAMALNMGMLASYDQSVELFRDKLGAGEVSTVLGASAVSGFFASACSLPFDYVKTQIQKMQPDASGKYPYTGSLDCAMKTFKSGGPFKFYTGFPVYCARIAPHVMMTWIFLNQIQKFEKQIGI

SEQ ID NO: 28968 - protein, 362 aa, Oryza sativa
MFTSIVGNVFGFKALRALRLEDLRIPPTYSKTFQGPPHGIQVERDKLNKYGRPLLGCTIKPKLGLSAKNYGRACYECLRGGLDFTKDDENVNSQPFMRWRDRFVFCAEAIYKSQAETGEIKGHYLNATAGTCEEMIKRAVFARELGVPIVMHDYLTGGFTANTSLAHYCRDNGLLLHIHRAMHAVIDRQKNHGMHFRVLAKALRMSGGDHIHAGTVVGKLEGEREMTLGFVDLLRDDFIEKDRARGIFFTQDWVSMPGVIPVASGGIHVWHMPALTEIFGDDSVLQFGGGTLGHPWGNAPGAAANRVALEACVQARNEGRDLAREGNEIIRSACKWSPELAAACEIWKAIKFEFEPVDKLDS

SEQ ID NO: 28969 - protein, 192 aa, Oryza sativa
MQAFENFIRAAKSGGGENLKGSMAELAEIGTLPSTSLVPAFPMAISQPEQPVKARAALSFLLSERGDFFREFILDEIVKAIDAVSREQLIQIAASFGLGNATPVFSMVPVRARALLPTITEEDRVILNNVEKVVKFLTAGNNPTTIDGDVNVVYLVQELLPVLPSISSKILPEVMSRLSSRVFARLIREAFL

SEQ ID NO: 28970 - protein, 35 aa, Oryza sativa
MPRAEVRVPSAAALKYEPRGLAIASPRGSYQALRR

SEQ ID NO: 28971 - protein, 386 aa, Oryza sativa
MDFKGFWESRFGGKKEQEPEQNGHANGVANGSVRKRTSDLAVYEQFEQQARQTEVRAAAIRDGNADAIQKPLLPSFGSAEMRNLAETLLRDIIRGSPDVKWESIKGLENAKRLLKEAVVMPIKYPKYFTGLLSPWKGILLFGPPGTGKTMLAKAVATECKTTFFNISASSIVSKWRGDSEKLVKVLFELARHHAPSTIFLDEIDAIISQRGEARSEHEASRRLKTELLIQMDGLTKTNDLVFVLAATNLPWELDAAMLRRLEKRILVPLPEAEARHAMFEELLPSTTSKLEVPYDTLVEKTEGYSGSDIRLVCKEAAMQPLRRLMSVLEARDELVPEEELPEVGPLKPEDIEVALRNTRPSAHLHAHRYEKFNQDYGSQILSQEQA

SEQ ID NO: 28972 - protein, 76 aa, Oryza sativa
MADQSNNMIIEEVNKGLNPGTIVLLVVATLLILFFVGNYALYMYAQKTLPPREKKPVSKKKLKREKLKQGVSAPGE

SEQ ID NO: 28973 - protein, 243 aa, Oryza sativa
MDRSMARRRRGTSFTASWQLGLAVVVAAIMASSAQPQQQQQQPPQPPGQPANAPSCPPVQASLSPCVSYFIGNSSTPSDACCEQMRAMFQSQAPCLCAAVASAPSPLAPVLGGVQSLLPTACNLPPNACAGKPFVRAVPILTCGLNSRTHGVIAVAGVVFADATGSTSGSAPAGGSSATPSTGATAAAPAMEPAGMDPAMTAGGGSKSVPGMPYSAAAGVHGGGASAAVAVLISSMLAYACMI

SEQ ID NO: 28974 - protein, 24 aa, Oryza sativa
MIIHNYMMQTSGTICFSFDSGQKT

SEQ ID NO: 28975 - protein, 421 aa, Oryza sativa
MPWLEMWLPPAGSGGGGEGMAAGLFLDGEAAHGALLAAMPGISASFGVRQRRPGFVSLTMSVKGGRGFVSGPVGLLASGEEKGARAEEAEALVAGRRATEEEVAEASEGKVVEEVKEARAGAGAMNMTKHLWSGAVAAMVSRTVVAPLERLKLEYIVRAEQRNLFELIHAIATTQGLKGFWKGNFVNILRTAPFKAVNFYAYGTYRKQLLKWSGNDETTNFERFIAGAAAGVTATILCIPMDTIRTRMVAPGGEALGGVIGVARHMIQTEGFFSLYKGLVPSLISMAPSGAVFYGVYDILKMGYLHSPEGKRRVSTMKQQGQEANALDQLELGTVRTLLYGAIAGCCAEAATYPFEVVRRQLQMQVKATRMNAFATCLKIVDQGGVPALYAGLIPSLLQVLPSASISYFVYELMKIVLKVE

SEQ ID NO: 28976 - protein, 100 aa, Oryza sativa
MQDPNFLEEAQLIDVREPDEVDKASLEGFKVLPLRQFGTWGPVMTDEFDPQKDTYVLCHHGMRSMQVAKWLQSQGFRKVYNVAGGIHAYAVKADSSIPTY

SEQ ID NO: 28977 - protein, 108 aa, Oryza sativa
MAPKKDKAPPPSSKPAKSGGGKQKKKKWSKGKQKEKVNNSVLFDKATYDKLLSEVPKYKQITPSVLSERLRINGSLARQAIKDLESRGAIRVVSVHSSQLIYTRATNA

SEQ ID NO: 28978 - protein, 396 aa, Oryza sativa
MAPCKKVLMLCGDYMEDYEAAVPFYALAAFGVAVDCVAPGKKPPGDACLTAVHEFLGHDLYTELPGHRFAVTADFAAAAAADASRYDALVVPGGRFVERLSVDPLAVSLVAAFAGEGETATRRRPVVVTCHSQLLLAAAGAMRGVRCTAFFSMRRVVELAGGTWVEPDPLGLCVADGNVLSAIGWPAHGEIIRELLRAMGARVAGGRGQAVLFLCADYVDDYEANVPFRALAGVGCRVEAACLTKRKGEVCVTAIYDATPAAASDERRGHNFAVTADWGDVDADRYACVVVPGGRAPELLATRGEAVALVREFAGKEKVVASIDQGHLLLAAVGLLDGRSCASGVATRVVAGLAGAASVRHGGAVADGKLVTAASWPDLAEFIAHIISLLGITVSF

SEQ ID NO: 28979 - protein, 25 aa, Oryza sativa
MFVTEGCFYSFVYQLFIRIIRVRIR

SEQ ID NO: 28980 - protein, 55 aa, Oryza sativa
MQLSDRQLRLSSNESSGSRQNSLSGTVKNQNGQPTLESEKRSPDNNSQSKSLEEQ

SEQ ID NO: 28981 - protein, 396 aa, Oryza sativa
MAASSGEWLSRAAMVLVLGLVVASSAKAGDVDMVFLKSAVSTGAVCLDGSPPVYHFSPGSGSGANNWLVHMEGGGWCRNAQECSVRQGNFRGSSKFMRPLSFSGIIGGNQRNNPDFYNWNRIKVRYCDGSSFTGDVETVETSTNLHFRGARVWNAIIEDLLAKGMSKAQNALLSGCSAGGLAAILHCDQFRDLLPATANVKCFSDAGFFVDGKDITGNDFVRTFYKDVVNLHGSAKNLPSSCTSKMSPDLCFFPQNVVPTLRTPLFILNAAYDAWQIKNVLAPSAADKKKTWAKCKLDITACSSSQLTTLQNFRTDFLAALPKPEQSPANLSIFIDSCYAHCQSGSQDTWLAQGSPVVEKTQIGKAVGDWFHDREVSRRIDCPYPCNPTCKNRDDD

SEQ ID NO: 28982 - protein, 48 aa, Oryza sativa
MSQPVEGFYRQQGKLLEFDLPGGIPESWPKLLHVLNLEDQEEMKLATA

SEQ ID NO: 28983 - protein, 236 aa, Oryza sativa
MALKSSSTMELVSRMSKSMSVANNILAVHVPRLHALRAALDGIQDEPSRADLSSSSAATDACRLIRDTAAGLTHATIHLHNAAYYLSSVLRIALRHADADASTDFSSKLPSLAANPFPRLAAHLLASIPTPPPQPTACTLDDALLAVSVVHNTLALLLDYNLERCILYLRLLGRRNDPNLHRHNRLPLARDRLRAACVMLDFAAAYCNVAANAINAHYIKLQNEASLIFGYTWNLP

SEQ ID NO: 28984 - protein, 232 aa, Oryza sativa
MAPSLATSSTLALFLLVAVSIADAATFAITNRCQYTVWPAAVPSGGGTKLDPGQTWTINVPAGTTGGRVWARTGCGFDGSGNGQCQTGDCGGKLRCTAYGAAPNTLAEFALNQWNNLDFFDISLIDGFNVPMAFLPAGSGAGCPKGGPRCATAITPQCPSELRAPGGCNNACTVFRQDRYCCTGSAANSCGPTNYSEFFKRLCPDAYSYPKDDASSTYTCPAGTNYQVVFCP

SEQ ID NO: 28985 - protein, 215 aa, Oryza sativa
MTKVHPNVAVVAPAVVEGEKGEAVSLTVWRRSLLFNGKGFTVFDGKGNLVFRVESYAGGSPREVVLMDADGRALLTIRRKKLSFADEWLIYDGDAASPAAPGPKRFTARRHVSLRPTKSLAHLSPARASSSAAAGGGSATAPSGACRYDVEGSYAARCLDVFASASAGEQRRRVAAVCSKEAAVGPDVFRLVVEPGFEPALAMAVVILLDQMHAS

SEQ ID NO: 28986 - protein, 390 aa, Oryza sativa
MAVMLVPIPLLLLHQHHNHEHEHPSPVAPQPTMASYYTLLLALLCPLLLLLIKLCRAKTRDDELFDKLPSPPGRLPVIGHLHLIGSLPYVSFRELAIKHGPDLMLLRLGTVPTLVVSSARAAQAILRTNDHVFASRTYSAVTDILFYGSSDVAFSPYGEYWRQVKKIATTHLLTNKKVRSYSRARQQEVRLVMARINEAAVARTTVDLSELLNWFTNDIVCHAVSGKFFREEGQNQMFWELIQANSLLLGGFNLEDYFPNLARVTTVRRLLCAKAHNVNKRWDQLLDKLIDDHATKRSSSVLDLDNEESDFIDVLLSIQHEYGLTRDNVKAILVIMFEGGTDTAYIELEYAMAELIRKPQLMAKLQAEVRSVVPRGQEIVTEEQLGRMPY

SEQ ID NO: 28987 - protein, 202 aa, Oryza sativa
MASHLDFRYLDEGLGGERGKRKRREAEEAAAADSMDLDADADAPRPSKLRAVPSLSDPSKPASFGQPTYDGVIAGRVSGRRWKEARTRRASALAASRKPTPLEQRARDKSLKRAYQARVAELKEEIRQSKAAKRKQREEREKRKKENVLRSGTKLQRVTNPKTIQKIAKSKKRKQLKVVPDEFLGGKKSDANRRMQVPGLDN

SEQ ID NO: 28988 - protein, 134 aa, Oryza sativa
MFKKILDHGEAGDNVGLLLRGLKRGDVQRGQVVCKPGTVKTYQKFEAEIYVLTKDEGGRHTAFLSNYSPQFYFRTADVTGKVVLPDGVEMVMPGDNVTAGFELISPVPLEPGQRFALREGGRTVGAGVVSKVYS

SEQ ID NO: 28989 - protein, 224 aa, Oryza sativa
MVPAVEGTLNVLRAAKDAGGVRRVVVTSSISAIVPSPGWPAGEVRDERCWTDLDYCEKNGVWYPASKTLAEKAAWRFAEENGLDVVVVNPGTVMGLVIPPTINASMAMLVRLLEGCTEEYADFYMGPVHVEDVALAHILLYENPSASGRHLCVQSIAHWSDFASKVAELYPEYKVPKLPKETQPGLVRAEAASKKLIALGLQFSPMEKIIRDSVESLKSRGFIS

SEQ ID NO: 28990 - protein, 273 aa, Oryza sativa
MHHDPNPFDEGNADDNPFSNGGGGGGGGGSRQQYGFRPTEPAGFGAGRGDATVDVPLDTMGDSKSKARELSSWETDLKRREADIKRREEALRNAGVPMEDKNWPPFFPIIHHDIANEIPANLQKLQYLAFASWLGIVLCLSWNFIAVIVCWIKEGDSKLFFLATIYALLGIPLSYLIWYRPLYRAMRTNSAFSFGWFFLCYLIHIGFCIIAAIAPPIVFHGKSLTGILAAIDTFSEHVIIGIFYFVGFALFCLETLLSIGVLQRVYMYFRGNK

SEQ ID NO: 28991 - protein, 98 aa, Oryza sativa
MSYYGQQPPVGAPPPQGYPGKDAYPPPGYPPAGYPPPAQGYPPQGYPPQQGYPPQQGYPPPYAQPPPPQQQQHHSSGPSFMEGCLAALCCCCLLEACF

SEQ ID NO: 28992 - protein, 347 aa, Oryza sativa
MSLEIQDSEVDIVIAALQPNLTTFFEAWRPFFSRFHIIVVKDPDMAEELQIPTGFDLKVYTKSDMGVLGATSIDFSGHSCRYFGYLVSRKKYVISIDDNCLPAKDNGGLTVDAVAQHMSNLKTPATPFFFNTLYDPFRKGADFVRGYPFSLREGVECMLSCGLWLHNADYDPMTHVVKRNQRNTTYVDAVMTVPLGAMMPVSGINVAFNREVLGPVMFPALRLRKEGKHRWDTLEDVWNGLCAKVVCDRLRYGVKTGLPYVMRSDAEAGKALESLKEWEGVKVMDVVLPFFESLKLSSTSVTVEDCVKELTSIVKEKLGPQNAIFAKAADAMEEWTKLWKSHGAQSA

SEQ ID NO: 28993 - protein, 351 aa, Oryza sativa
MDPNQMMGRSFPMWAAADDPSAQPPPFLPPPNRGWKRKNPSTAAGGYQPPALGDLQVQNRAKARRWFKNQSGGGGGGGGPRKHFFPRPKAAAPRNTTSFIIRAKRAGGIASLVSPSPVTPAVLPTPRLSPSREGLSDMAQAQWGVDGYGSMKGLIRLRTSPHPANPSDDDDDANSSSSDVEEHVEVERRLDHDLSRFEMVYPARGDGVFFEEEDDYEYDQEAHVARLEEENLTLKERLFLMEQELGDMRRRLEALESRFAGTDGMPIENSDAVAVDHDKEMAHPILVQRDDLRTEIAADAAGSDKASAQDNAEEVADAAVSEKIVQDNADVVVAGSERTGEEIGVDASEMD

SEQ ID NO: 28994 - protein, 149 aa, Oryza sativa
MADQLTDDQIAEFKEAFSLFDKDGDGCITTKELGTVMRSLGQNPTEAELQDMINEVDADGNGTIDFPEFLNLMARKMKDTDSEEELKEAFRVFDKDQNGFISAAELRHVMTNLGEKLTDEEVEEMIREADVDGDGQINYDEFVKVMMAK

SEQ ID NO: 28995 - protein, 45 aa, Oryza sativa
MIMFRMGSIWHPMCNIILVEVYKQGGRQVHRCAFFLRGLIRFQVV

SEQ ID NO: 28996 - protein, 342 aa, Oryza sativa
MSNADVEAGGPAGREATTGIKPPPGRYNPSGNGPNAVAPAPPPFYYYDQAAAQERHHRTWVVPLVVIANVAMFVVVMYYNNCPANGGRRDCVGRSFLRRLSFQPLRENPVLGPSAATLRKYGALDWYGVVHGNQAWRLETSTWLHAGLIHLAANMISLLIIGIRLGQQFGFWKVGLVYLVSGFGGSVLSVLFISRNGITVGASGALFGLLGAMLSELITNWTIYSNRCAAMVNLIIIAAINLALGILPRVDNFAHIGGFATGFLLGFVLLIQPQFGWSEQVSSAKSKYNAFQIILLTLSVALLIAGFAAGLVSVFKGVDGNAHCSWCHYLTCVPASSWKCDK

SEQ ID NO: 28997 - protein, 70 aa, Oryza sativa
MSALFNFNSFLTVVLLVICTCTYIKIQFPAILNDRTGFRGFFWKAARIGERLSPWVALGCFAMGISTIFF

SEQ ID NO: 28998 - protein, 402 aa, Oryza sativa
MKPNILDKYSDGILSEEIESYGILSDEAELDGDTQDIPSIAVKSARQTERRARRTRAAIKAATIVRTSPKPATSSKKKRSKGASSGTNPLGSLWKMTGRRLLTAKEEVEFSEGIQDLLKLEAIQAELAEYNGGQPTFAQWATAAGVDERTLRKRLDHGIYCKNRMVTSNVRLVISIAREFEGPGMELYDLIQEGMQGLIRGAEKFDASKGFRFSTYSHWWIKQAMRKSVSEQSQIFRLPAHMVEASYRVKECIKRLRRKLKRRPTNEEIAADTGMPIKRVEAAVNLPKYSVSLDSKIGSTDMTYQEVTADPTAETAEEMLNRLSMKRDVHKALDTLTTRERQVVTLRFGLEDGRIRTLQEIGNTMGVSRERIRQIESAAFRKLRSKKRVNALKDYLVPVGNW

SEQ ID NO: 28999 - protein, 557 aa, Oryza sativa
MASMCSRSIPQLILLLSLTVFLLANAHPMAPPSPPRKAAAPPTAAKGVTGISPVLVSTLRETLDAIKNVASIISSFPIGGILGGGDLRLSSAIADCLDLLDLSSDELSWSMSTTSSSSYQPTNAGAATSSHVGTGDARSDLRSWLGGALSNQDTCKEGLDDTGSVLGSLVGTALQTVTSLLTDGLGQVAAGEASIAWSSSRRGLAEGGGAPHWLGARERRLLQMPLGPGGMPVDAVVAKDGSGNYTTVSAAVDAAPTESASRYVIYVKKGVYKETVDIKKKKWNLMLVGDGMGVTVISGHRNYVDGYTTFRSATVAVNGKGFMARDVTFENTAGPSKHQAVALRCDSDLSVFYRCGFEGYQDTLYAHSLRQFYRDCRVSGTVDFVFGNAAAVFQNCTLAARLPLPDQKNSVTAQGRLDGNMTTGFAFQFCNVTADDDLQRALAGGGNQSSAAAVTQTYLGRPWKQYSRVVFMQSYIGAVVRPEGWLAWDGQFALDTLYYGEYMNTGPGAGVGGRVKWPGFHVMTSPAQAGNFTVAQFIEGNMWLPPTGVKYTAGLTS

SEQ ID NO: 29000 - protein, 504 aa, Oryza sativa
MDKVGFMCKIAGQNNNLMGQFHNALYLGDAMKRVEILENAGQLPLAYITATTHGLTEIADRLAAELGENIPSLPEGKARSLLIPPAPLTASGDWPLLRVMRGIFEGGLDATGKAELEEDDEAAGADWGDEGLDIVDASEAMANGGDGFDAEEGEANEEDGEEGGWDLEDLELLPEAETPKNAGNARSAVFVAPPPGMPVSLIWTQKSSLAGEHAAAGNFDTAMRLLSRQLGIKNFAPLKPLFLDLHMGSHSYLHALATAPIIPVAVEKGWSESASPNVRGPPALVFTFPQMEDRLKAAYKATTDGKFPEALRQFLSILHTIPLIVVDSRREVDEVKELIEIVREYVLGLRMELKRKELRDDVNRQQELAAYFTNCKLQRVHMRLVLGSAMGLCYKQKNFATAEHFARMLLENNPNEAQARRARQVQQQCSGKKDSSELNYDYRNPFVVCGATYVPIYRGQKGVSCPYCGSRFVPSIEGQLCTICELAVVGADASGLVCSPTQLR

SEQ ID NO: 29001 - protein, 148 aa, Oryza sativa
MVMKGISTYIQEIEELCTDYPKTTVIFDHMAFCKPPMNIEEEKAFTSFLELSRFPQIYVKYSALFRISREAYPYEDTSQLLSRVISSYGANRIMWGSDFPFVVPECGYKGAKEAISHVAGKIPVSSSDLEWILGKTVTQLFQGAWVSA

SEQ ID NO: 29002 - protein, 372 aa, Oryza sativa
MIYIDYCTGRKKKKKKSPPSSSQLLSSRLKALAMDAAAMESLILELHAIEAVKFGAFVLKSGITSPIYLDLRMLVAHPRLLSTVASLLGSLPATRPYDLLCGVPYTALPIASVLSAAASVPMLLRRYHVTPHAAAECLDGSFRAGDAVLIVEDLVTTGSSVLETVAPLREVGLVVANAVVVIDREQGGRENLAANGVALHSLMTLTEVLAVLVKRGKLGEEKAQEVKRFLDANRKMAVPGLPVKPKVVRKAFSERAGLATNPMGRKLFELMEAKQSNLCVAADVGTATELLDLADKIGPEICMLKTHVDILSDFTPDFGHKLRSIAERHSFLIFEDRKFADIGNTVTMQYEGGIFRILDWADIVNAHIDLYQ

SEQ ID NO: 29003 - protein, 402 aa, Oryza sativa
MASPMLSAATVPLQGGGLSEFSGLRSSSSLPLRRNATSDDFMNAVSFRTHAVGTSGGARRAPTEAKLKVAINGFGRIGRNFLRCWHGRGDSSPLDVIAINDTGGVKQASHLLKYDSTLGIFDADVKPVGDNAISVDGKVIKVVSDRNPSNLPWGELGIDLVIEGTGVFVDRDGAGKHIQAGAKKVLITAPGKGDIPTYVVGVNADQYSPDEPIISNASCTTNCLAPFVKILDQKFGIIKGTMTTTHSYTGDQRLLDASHRDLRRARAAALNIVPTSTGAAKAVALVLPNLKGKLNGIALRVPTPNVSVVDLVVQVSKKTLAEEVNQAFRDSAANELKGILEVCDVPLVSVDFRCSDVSCTIDASLSMVMGDDMVKVIAWYDNEWGYSRRVVDLADIVANQWK

SEQ ID NO: 29004 - protein, 269 aa, Oryza sativa
MAEAVASGAAGRWTLRGKTALVTGGTRGIGHAVVDELAALGAAVHTCSRKEAELGERLREWEGKGFRVTGSVCDVSVREQRERMLREVAGLYGGKLDILVNNVGTNFSKQTTEYSADDYSFIMATNLESAYHLCQLAHPLLKSSGSGSVVFISSVSGVVAVSSGSVYAMTKGAMNQLAKNLACEWAKDNIRTNSVAPWYMKTSLVEDELARKDFADSVVRRTALKRVGEPEEVSSLVAFLCMPGASYITGQTISVDGGMTINGLYPTQD

SEQ ID NO: 29005 - protein, 240 aa, Oryza sativa
MAASCDLVDVDPPELQFPFELDKQISCPLRIANKTERTVAFKVKTTSPKKYCVRPNNGVVRPRSASVVVVTMQAQIVAPPDLQCKDKFLVQSVVVDDGLSAKDITSQMFLRDENNMVEEVKLKVSYVMPPEPAMEIAEESDIPKRILVPMRRILDNGRSGSELSSGNVSLRSAEMGTELGSPLGRFVRNEDMLKTASPVVETRVHAGPDEQYLELSALVAKLTEEKKSALEQNRKLREEL

SEQ ID NO: 29006 - protein, 106 aa, Oryza sativa
MGGLDLGGGETTGGWRRSSTSLPSPPARSIRRHRYRRGSGLVFVLILGGLSMASTTKGKEDGGGDREEEEAAASRSSVGPKTMCGMHRERRSGAGDTLDLQCEFDM

SEQ ID NO: 29007 - protein, 126 aa, Oryza sativa
MALLAVHAMAASPATFPSSHHHAAVSSYCALPAAAAFSRSRSRVAAAAAATLSAPLTPVLEVYCGRGDKKTKRGKRFNHSYGNARPRNKKKGTGPARLFAPPAPPRKDQFDDGEVTPIDIDDDILE

SEQ ID NO: 29008 - protein, 426 aa, Oryza sativa
MFADFSAAAMELGEVLGLQGLTVPSTKEGDLSLIKRAAAGSFTQAAAASYPSPFLDEQKMLRFAKAAHTLPSGLDFGRENEQRFLLSRTKRPFTPSQWMELEHQALIYKYLNAKAPIPSSLLISISKSFRSSANRMSWRPLYQGFPNADSDPEPGRCRRTDGKKWRCSKEAMADHKYCERHINRNRHRSRKPVENQSRKTVKETPCAGSLPSSVGQGSFKKAKVNEMKPRSISYWTDSLNRTMANKEKGNKAAEENNGPLLNLTNQQPTLSLFSQLKQQNKPEKFNTAGDSESISSNTMLKPWESSNQQNNKSIPFTKMHDRGCLQSVLQNFSLPKDEKMEFQKSKDSNVMTVPSTFYSSPEDPRVSCHAPNMAQMQEDSISSSWEMPQGGPLGEILTNSKNPDDSIMKPEARPYGWLLNLEDHAM

SEQ ID NO: 29009 - protein, 172 aa, Oryza sativa
MTPTVATTTPAAAAATTAAAAEVKPAKRSVGLGLPALPPLLPGLASRGQPRVASFCKRLARNVVAMAAGEAPAAPLAANAEITEFINALKQEWDRIEDKYAVTTLAVAASLGMWSAGGVVSAIDRLPIVPGLMEAVGIGYSGWFAYRNLLFKPDREAFFAKVREVYEDIISG

SEQ ID NO: 29010 - protein, 82 aa, Oryza sativa
MLVLKFIWMEKNIGIALDQLVPGYGSIPLSPYYFWPRKDAWEELRAKLEEKEWISQKQMIILLNQATDIINLWQQGGGSLST

SEQ ID NO: 29011 - protein, 339 aa, Oryza sativa
MDAVRLNTTVTRVAMAPPRRDGSLRWAVRSKRHGEAETEEVFDAVVVAIGHYSQPRLPTIDGMDRWRRKQLHSHSYRVPDSFAGEVVVIVGCSVSGAELALELRRVAKEVHLSTKSTEETITSAMSKSVARYENLHLRPQVEHLREDGTVVFDDGSFVVADAVIYCTGYNYSFPFLDTNGKVTVDDNRVGPLYEHVFPPELAPSLSFVGIPGKVVLPVFIEVQARWVAQVLSGRRTLPSPEEMQRAVEEHTRGMEAAGLPKRWTHDMFLNLERCDDYGERICGFPRMEQWKKEIFVSSLSDMVDDIENFRDGYHDSDLVRDALRRHGWTPAEEDDDAHK

SEQ ID NO: 29012 - protein, 9 aa, Oryza sativa
MVSVKFVAM

SEQ ID NO: 29013 - protein, 404 aa, Oryza sativa
MYKNQLQELAQRSCFSLPSYVCTREGPDHAPRFKATVTFNGETFDGPSNCTTLRQAEHAAAEVALARLSLRGPSSSLTARVLDETGVYKNLLQETAHRAGLKLPVYTTVRSGPGHSPVFSSTVELAGMSFAGDPAKTKKHAEKNAAMAAWSSLKQSNIRTTVSPLVFDLVWIVCHGGDVFVVVWCSAGGAQGARRRRRRGAGACGRRQGARRAEAAGRLRRRRWRREGGGGVSTEEASRRRVLFVRHVAVQTSMGASVAAAAGGRTQDTASPAPAAAAASGGVRLPSRRRRAGARAEEGRRAGAHAARRHAARQGGRRNAAADAVLLRAVLPPRRRRRPDEALRRRRRVPRAAGGERPFSDPGLRRATVAAAAAAQGGRSSDLIQEGVVVVKTSIQSIAQPAPI

SEQ ID NO: 29014 - protein, 173 aa, Oryza sativa
MCPGGRYAGLDVPACAAAGDLRPAFDVLDADRDGRISREDLKSFYASGAATSERFDDEDIAAMIAAADVDNDGFVQYDEFERLLGRAAAGAGCRPAMEDVLRVMDRDGDGKVGFDDLKAYLGWAGMPAADEEIRAMIRVAGGGDGDGCVGLEELAIVLGCSPTNWTASSQTLH

SEQ ID NO: 29015 - protein, 343 aa, Oryza sativa
MAAAAAAPSSSTSGSPGAAAAAARPTMPYRSRFGDTTLTKVFVGGLAWETPSEGLRRHFEQYGEILEAVVIADRLTGRSKGYGFVTFREAEAARRAVQDPNPMIAGRRANCNIASLGPPRPAQPPRGRASPGAQFQAPPPAFQGPPYIARGTPPPPAQMMPQPQHHGPPATIYHPSQSWYWYPPDYQYQQGLMNSQVLQSYYAAALQAQAQAQAQLYGMAASPTAPSPYQYLGYMPAPAPAVTPTAVLPPAQQQITGPPPPFVQQPAQHVTAPPPFVHHPTAAAQIQGSFVPLPSLPHNFRLQLPPNAMSILPPTPTALQPADLQAAPAATGATNPNNTPTGA

SEQ ID NO: 29016 - protein, 561 aa, Oryza sativa
MTDSVRGSPKDIDDEVAKEWEHTMLQDSMGKELNELNRQLEQKESEMKMYGSDTVALKQHFGKKLLELEEEKRAVQQERDRLLAEVESLNADGQTHKLRDAQLQKLKTLEAQILDLKKKQENQVQLLKEKQKSDEAAKKLQEEIHSIKAQKVQLQHKIKQEAEQFRQWKATREKELLQLRKEGRRNEYERHKLQALNQRQKLVLQRKTEEAAMATKRLKELLEARKSSGRDSSGMNGTSPGSHMTEKSLQKWLEQDLEVMVHVHEVRNEYEKQSQLRAALGEELAILKQEDVMSGAASPPRGKNGNSRANTLSPNARQARIASLESMVTISSNTLVAMASQLSEAEERERAFSGRGRWNQLRSMAEAKSLLQYIFNVAADARCQVREKEMEIKEMKEQMTELVTILRHSESRRRETEKQLKQREQAAVTATTSPGNGNGSVKHSADDSNTPLSPVAVPAQKQLKYSAGIVNSPSKGVPAFNKQHLKMVPMAQLPVGKKVSIAGQSGKLWRWKRSHHQWLLQFKWKWQKPWKLSEMIRHSDETMTRTRPRPQLLPHRPQRVM

SEQ ID NO: 29017 - protein, 319 aa, Oryza sativa
MTCIIAVKVPNPEFEGQTKTRLGNPEVRRIVEQSVQENLTEYLELHPDVLDSILSKSLNALKAALAAKRARELVRTKSVLKSSSLPGKLADCASSDPEESEIFIVEGDSAGGSAKQGRDRKFQAILPLRGKILNIERRDEAALYKNEEIQNLIVALGLGVKGEDFNKEALRYHKIVILTDADVDGAHIRTLLLTFFFRYQKALFDEGCIYVGVPPLYKVERGKQAHYCYDDADLKELVNTFPTNASYHIQRFKGLGEMMPAQLWETTMDPERRMLKQLKVEDAAEANVVFSSLMGTRVDVRKQLIQNAASMVNLEHLDI

SEQ ID NO: 29018 - protein, 69 aa, Oryza sativa
MFFLDKQVVIPLHQLRAANPSVSKVNPAEKYIQVVSVEGHEFWFMGFLMYDKAVCSLQEAMNSAREMQP

SEQ ID NO: 29019 - protein, 17 aa, Oryza sativa
MPICHAGEKEHYVKRPA

SEQ ID NO: 29020 - protein, 235 aa, Oryza sativa
MQSLIESTLQNVLGCNVEVKFKLVPRPVRKDARSRRQSFSLLSCSGRKQELSDSAVTDEDETVRHGARETPSKGYSSQQQSPFIMQRTDSKPTVHGCEDDARSTLTSNRSMTDDMTRTCRSETNYSKGVSEQGRFDSIQEPDLQPNCFSRTLKLQKRFFSSDAAHTICLKIQPHNKMDFLPKKEFDTYFCAYEPYEQCSRSNSHATCSSRDDNLWNKNSRFGSHLLCWRGPKQAI

SEQ ID NO: 29021 - protein, 4 aa, Oryza sativa
MNNL

SEQ ID NO: 29022 - protein, 23 aa, Oryza sativa
MNCIMIMNNGCCHIVVPILSHVF

SEQ ID NO: 29023 - protein, 549 aa, Oryza sativa
MVGIATFDSAIHFYSLKRAQQQPLMLIVPDVQDVYTPLQKDLILPVSECRENLEQLLESIPSMFENNRVADSAFGAAMKAGFLAMKSTGGKLLVFQSVLPSLGVGSLSAREAEGRANVSTGDKEPHKLLQPVDKTLKTMALEFAEYQVCVDVFLTTQSYVDIASISVVPNTTGGRVYYYYPFSARSDPAKLFNDLRWNISRPQGFEAVMRVRCSQGLQVQDYFGNFCKRVPTDIDLPSIDSDKTIMVTFKHDDKLQENSECGFQCALLYTTVYGQRRIRVMNLSLPCTNMLSNLFRYADLETQFTCFLKQAANGIPTSTLLHLREEVTNTCINILQSYRKYCASVSSSGQLILPEALKLLPLYTLALIKSIGLRNEGRLDDRSYWISLVSSVSVLLAVPLVFPRLIPIHDLTSRGDDESLIPSPLMLNSENIREDGVYLLENGEDGLIYVGNVVEPTILEQIFGVSSLAALPSQAVLEQFDNELSRKVNEVINEIRRQRCSYLRLRLCRRGEPSGDFFRSFLTEDKAPGGLSYVEFLVHVHRQIQSKMT

SEQ ID NO: 29024 - protein, 344 aa, Oryza sativa
MGTRAAFVVAFLIRSLYGGMQIVTKFAFNEGMSTSVFVFYRHVIAILFLVPVAFVLERKTAPPLTFKVSLKLFLHALYGISGAINIYSLGLSYASATSSSAIFNLLPAVAFILALLMKMESLNLKRINGIAKVSGIVLCIVGVIILAFYQGPELKSFNHHHLFRTSTVYAAATSHPATTWILGIFLTTLSTTCWALWTVLQGPMLEVYPSKLLNTTIQIVFATIQCFFIALAIERDFSRWKLHLDMGLIAVIYSGVLVSGVAYYMQVWVIDKSGPVFLAMTMPITLLVTIMLSSFVLGEAVTLGSIISGVVMVGGLYCVLWAKKSEQAAISKQQMVVPVQTTRV

SEQ ID NO: 29025 - protein, 541 aa, Oryza sativa
MLVKHIPSVKDAAPRKIEHIYTGPQDSTIVDAMKKCDPHAPLMVNVTKLYPKSDCSVFDAFGRVYSGTIQTGQTVRVLGEGYSPDDEEDMTVKEVTKLWVYQARYRVPISKAPAGSWVLIEGVDASIMKTATICPMKMDEDVYIFRPLRFNTLPVVKIAAEPLNPSELPKMVEGLRKISKSYPLAVTKVEESGEHTILGTGELYLDSIMKDLRELYSEVEVKVADPVVTFCETVVDTSSMKCFAETPNKRNKITMVAEPLEKGLAEDIENGLVSLDSRQKEITDFFRQRYQWDVLAARSIWAFGPEKQGPNILLDDTLSVEVDKNLLNAVKDSIVQGFQWGAREGPLCDEPIRNVKFKILNANIAPEPLHRGGGQIIPTARRVVYSAFLMANPRLMEPVYYIEIQTPIDCVSAIYTVLSRRRGHVTADVPKPGTPIYVVKAFLPVIESFGFETDLRYHTQGQAFCLSVFDHWAIVPGDPLDKNIVLRPLEPAPIQHLAREFMVKTRRRKGMSEDVSINKFFDEAMMNELAQQAADLHLQMM

SEQ ID NO: 29026 - protein, 138 aa, Oryza sativa
MALLAVHAMAASPATFPSSHHHAAVSSYCALPAAAAFSRSRSRVAAAAAATLSAPLTPVLEVYCGRGDKKTKRGKRFNHSYGNTCHLLTAVCSSQARPRNKKKGTGPARLFAPPAPPRKDQFDDGEVTPIDIDDDILE

SEQ ID NO: 29027 - protein, 327 aa, Oryza sativa
MSAAPIPREWVGLQQFPAATQTKLHELLGKLKEENVSTLTILVMGKGGVGKSSTVNSIVGERVATVSAFQSEGLRPMMCSRTRAGFTLNIIDTPGLIEGGYTNEQAVEIIKRFLLGKTIDVLLYVDRLDAYRMDTLDDQVIRAVTNSFGKAIWRRTLVVLTHAQLSPPDGLDYNDFFTKRSESLLRYIRAGAGVSKRELGDFPLPIALVENSGRCKTNENGEKVLPDGTPWIPNLMKEITTVVSNGSKSIHVDQKLIDGPNPNNRWKMFIPLILMVEYFLVVKGIRRAIHADISNGKLDDWEQRYRDLVGSKDPVDQKGSSSGNRKA

SEQ ID NO: 29028 - protein, 31 aa, Oryza sativa
MGQYRGLLSMAHGPWLRGSQPNFHQQGQHMP

SEQ ID NO: 29029 - protein, 116 aa, Oryza sativa
MTAGLQPFLQVRESLNHHHSTSETLPPGSSGSLPLRDHQHHEQQQQQIRSINQHNATAPSATGGITMYRPADESSSGDGEARRSSPAANRSCSLSLSSASRIQSYLQRPYASSTGT

SEQ ID NO: 29030 - protein, 301 aa, Oryza sativa
MFSSKGSTARTAAWAMSNLIKGPDPKAANELITIDGVLNAIIASLEKEDEELATEVAWVVVYLSALSDRGISLIVRSSVPQLLIGRLFSSENLQLLIPVLRGLGNLIAADDYMVDSVLTVGHNIIDQALSGLIKCLKSDNRVLRKESSWALSNIAAGSFEHKKLIFASEATPVLIRLVTSMQFDIRREAAYTLGNLCVVPTGNCELPKIIVEHLVAIVDGGALPGFIHLVRSADVDTAGLGLQFLELVMRGYPNKQGPKLVEMEDGIEAMERFQFHENEQMRNMANGLVDEYFGEDYGLDE

SEQ ID NO: 29031 - protein, 138 aa, Oryza sativa
MAEETPVETPAAPVLGEPMDLMTALQLVMKKSSAHDGLVKGLREAAKAIEKHAAQLCVLAEDCDQPDYVKLVKALCAEHNVHLVTVPSAKTLGEWAGLCKIDSEGKARKVVGCSCVVVKDYGEESEGLNIVQDYVKSH

SEQ ID NO: 29032 - protein, 343 aa, Oryza sativa
MNMNEKYPSFFESRLGDGLQMSFRFFESTISNHDMVATNMKSSPIAFVKPGISRIYRLIRANRNSRNKFVHSIVRKFEGDNRSYPTISFLMYCAEVLASLPFTSPDEPLYLIYDINRVIQLRAGAVEANLKNWTSMYQQQEMVGMPRDTGDVMHEPGGCSDQNLVDVSQMMLGNTCSTPVVNMAKLQEDCHGAIALQLLLKLKRHLKTVYSLTDARCQAFSLKDPPKSGETISKQNIPLNISNTNTSLPSCPQDAARVYQDFKTVLREDTVDYGMYTVSAQKKRPTPRSSSRVRRPAAVTRGRGGGGGGGDEDTDDEDWTGGGARVLDFSAQGGRVTRQRVQV

SEQ ID NO: 29033 - protein, 366 aa, Oryza sativa
MTIVEIVDAHQGFKLVTDNISTRNPRTLLWVIGFVTFFLSSILDNLTSTIVMVSLLRKLVPPSGYRKLLGAVVVISANAGGAWTPIGDVTTTMLWIHGQITTLNTMQGLFLPSVVSLAVPLALMSLTSEANGSSQKSSSLLSSEQMAPRGQLVFAVGLGALVFVPVFKALTGLPPFMGMMLGLAILWILTDAIHYGDSGRQRLKVPQALSRIDTQGVLFFLGILMSVGSLESAGILRQLANYLDANIPNADLIASAIGVASAIIDNVPLVAATMGMYDLTSFPQDADFWQLIAFCAGTGGSMLIIGSAAGVAFMGMEKVDFFWYFRKVSGFALAGYAAGIITYLAAQNLPLSLPTSLAEIPFISGS

SEQ ID NO: 29034 - protein, 511 aa, Oryza sativa
MATFFRSANLASRVFDRQFLSPRPGATVNTVRQFYENLVPSYTICDIDCPDYSFRKFTDDGNYLVAFSRNHQDLIVYRPIWPTFSCNEPCDSHDLPPKAKKFDSFFKQLYSISLASSNEYICKDFFLYMECHQFGLFATSTAQSNDSSATEGAIHGVPSIEKITFYLVRLDDGAILDEKAFRNDFINLAHSIGAYLYEDLLCIVSLRYQTIHVLQIRDSGNLVEVRKIGAFCQEDDELFLHSHGQAARGVSFLPGIKQRLLSFIFRKTWNEESDQTLRVQHLKKKFYFHFQDYVDLIIWKVQFLDRHHLFIKFGSVDGGVSRSTEQNSAFFAVYNMETTDIVSLYQNSSEELYSLFEYFYDHFHTNPQNSSHGNFISSHSNNVHALDQLRTIKNKANSTSQFVKKMMASLPYTCQSQSPSPYFDLSLFRYDEKLISAIDRHRHCTEHPIKFISVKQPNVVKFKIKPGSDSGASDSRAKRISSFLFHPFFPLALSIQQTYMQPTVVNLHFRR

SEQ ID NO: 29035 - protein, 51 aa, Oryza sativa
MKTKVVVWVKVASISLESFRSDKICFIAGVKKLRQKDAYEVPREGIAVEEF

SEQ ID NO: 29036 - protein, 198 aa, Oryza sativa
MGDFQLQVPSFGSSTTYGQDVFALARDENMCLMVRHGKISWLECPMLLNNHYMFLSCDIPEGGSGGPVIDHDGNIIGIVFDNNPGPVVTSITTIRTCVEMWHQFSRVARPILGMQLKAVELLDVSKLEELCLDNNITSGFIVNLVKVDSIAERLGIRRGDVIVFQDSCCSTLPQLEDYLLSLGWGYLQGKSLTVDLKS

SEQ ID NO: 29037 - protein, 103 aa, Oryza sativa
MSGRGKGGKGLGKGGAKRHRKVLRDNIQGITKPAIRRLARRGGVKRISGLIYEETRGVLKIFLENVIRDAVTYTEHARRKTVTAMDVVYALKRQGRTLYGFGG

SEQ ID NO: 29038 - protein, 195 aa, Oryza sativa
MATPFSLSKDGIELQFATNHVGHFLLTHLLLETMKKTSRESNVEGRIVNVSSEGHRFAYREGIRFAKINDESEYNSIGAYGQSKLANILHANELARRFKDEGVNITANSLHPGSIITNLLRHHSILDVLHRTLGKLVLKNAQQGAATTCYVALHPQVKGVSGKYFSDSNVNEASEKGNDMELAKRLWEYSIELIT

SEQ ID NO: 29039 - protein, 93 aa, Oryza sativa
MDASLAPRLAAPVLFVCGDGDPLCGVETVRALEARARGARAAVYAGRGHGFAHRPQSLEDDGDAEDAFALMRGWLHDHLLALIILVPFQTVRS

SEQ ID NO: 29040 - protein, 111 aa, Oryza sativa
MKGRQGQRVRLYVRGTILGYKRSKSNQYENTSLLQIEGVNTKEEVGWYAGKRIAYVYKAKTKSNDSTIRCIWGKVTRPHGNSGVVRAKFRSNLPPTSMGKKVRVFMYPSSI

SEQ ID NO: 29041 - protein, 251 aa, Oryza sativa
MGVAVTMASYAAVLRPHASSTRTPRGPRRPAGAVPPTPRRAALRATTRSPPAVAATPPPRERVQQQQQPGDGQTTTRLYSLAPCPLLLAALLPGAEPVRAVFEPFVELVKTWGLPGWLVHWGHPGNMAVVLFAMGGYGTYLGFRIKLSDDPEEKAKAKDLHPKLLAGMFFFFAAGATGGVTALLTSDKPIFESPHAVTGIIGLALLTIQSILPTLFEGNPSLRNAHGLLGSGIMTLFLIHAAFGLQLGLSF

SEQ ID NO: 29042 - protein, 37 aa, Oryza sativa
MRKENRGTYWRTLYLQNRCFYLSGFLFLSPRLCGFTV

SEQ ID NO: 29043 - protein, 353 aa, Oryza sativa
MAIRITMSYSGYVAQSLASPFGLRCTAAAAASSGAAPGAGARFLQDALSRPFCLFASSRHSEYHHDADDHNHPKPKPKPKAKALPAASAIAANGGGHSLLLSRSCATKAPVNDPPSSLAIGLLMVFTSGMGSATGRVGASSLSASPSISSAFNPAALLPFLQATKWLPCSDLITSAAPSRKSARPVDVAKAPTAAPAATPVSRTKPAPAPSPRPAHVPSPAVAAPSKVGVKALVGSGVINSGVINSSGASSNVGVGVKPLVGSGAINSGAAGMVRKSSPALGAAAEVSRRNWLSRWVSSCSDDAKTVFAAVTVPLLYRSSLAEPRSIPSKSMYPTFDVGDRILADKVKSISCC

SEQ ID NO: 29044 - protein, 56 aa, Oryza sativa
MLMDATAAMLMRPDGHPSRYGHLPNQKVQLYNDCIHWCLPGPTDIWNDMLFQMLLV

SEQ ID NO: 29045 - protein, 305 aa, Oryza sativa
MDSSAASAAAAAAAPVVLVTNDDGIDAPGLRFLVGQLVAARRYRVLVCAPDTDRSGVSHSITWRPALRCKRVDIDGATAFAASGTPADCASLGISGKLFDGLVPDLVVSGINVGNNCGCHVIYSGTVGGAREAFLYGIPSLAMSYDWVASQSSVNDLKVAAEVVMPLINNVMAEIKNGTYPQGSFLNIDIPTDAAHHKGYKITKQGRYMARIGWEQTVYKKPAVESYQTANMDVDSEKDSEVDTSSENDLLFKRVLVRRSYDEEEGDDIDHKCLVDGYITVTPLGALSRAEADVIPYYKACLSRL

SEQ ID NO: 29046 - protein, 177 aa, Oryza sativa
MSPKEKLLILEKRQEAGKLQGDQHKFLEELRSIKAIMKDSKMCPRCKMAIHKIEGCNKMSCSNCGQYFCYQCNSAIEGYEHFRGSCKLFPQEELDRWNMQMNPRVQRQNVAQVQAEMFRQFAHPCPTCRQPCPKMGNNNHVFCWACQKHFCALCRKTVHKTSQHFGPKGCKQYTADP

SEQ ID NO: 29047 - protein, 259 aa, Oryza sativa
MAPMAISTPLALRASPTRLLSRRRSGAKSGVALPGPQFVPPGISSKLDERIHCHSSLRKNTIVASENENPPLMPAIMTPAGALDLATVLLGNRIIFIGQYINSQVAQRVISQLVTLAAVDEEADILIYLNCPGGSLYSILAIYDCMSWIKPKVGTVCFGVVASQAAIILAGGEKGMRYAMPNARVMIHQPQGVSEGNVEEVRRQVGETIYARDKVDKMFAAFTGQTLDMVQQWTERDRFMSSSEAMDFGLVDALLETRY

SEQ ID NO: 29048 - protein, 149 aa, Oryza sativa
MAAALTRPPPGTVQCFGRKKTAVAVSYCKPGRGLIKVNGVPIELIRPEMLRLKAFEPILLAGRSRFKDIDMRIRVRGGGKTSQIYAIRQAIAKALVAYYQKYVDEASKKEVKDIFARYDRTLLVADPRRCEPKKFGGRGARARFQKSYR

SEQ ID NO: 29049 - protein, 240 aa, Oryza sativa
MADEYGRGGYGRSGAGAGDDYESGGYNRSSSGGADEYGRRPGGGAGGYNKPGGTDDYDSGYNKSAGGDDDDYGRTGGGGYNKSGTDDDYDSGYNNRSGANEKYGRNKSGDDEYSGGGGAEADEEYVDGLSSRDDPEKYRKEEKEHKNKERLGEVGALAAGAFAMYERHQAKKDPENAQRHRIEEGVAAAAALGSGGFAFHEHHDKKEAKQAAKDAEEEAEEESGSGARGGEGKKKHHLFG

SEQ ID NO: 29050 - protein, 335 aa, Oryza sativa
MSTTAKLAGLLRDEQGPVAFNDAVDEDAVPVEPLTEHDDAISAMSAAHCNNMQFRCYRGFWISEMWAPGVVAVHRSFAPRADDVLVASLQKSGTTWLKALTFATMARGAWPPSSHDHPLRRLNPHLCVPSLEVLYTLGRDALLDMLPSPRLLSTHMPLSLLPPSTCKIVYIYRDQKDTAVSLWHFMKRRHPDLTFSEVHEAFCNGICMGGPAWDNILEFWYASNAEPTRVLFLTYEKVLQDPCDAVKKLAQFLGQPFSGAEEEAGVVTEIADLCSIDNLRNQKANKYGSIGGKISHESFFRKGMAGDWTNHMTLEMAERLDSILREKLDGSGLIV

SEQ ID NO: 29051 - protein, 23 aa, Oryza sativa
MEIKVFKVQTLSPSSYYVVKCVI

SEQ ID NO: 29052 - protein, 38 aa, Oryza sativa
MQCCLQVGTEYFPSCISVRKLNCHLNSITTFVKCCMIM

SEQ ID NO: 29053 - protein, 32 aa, Oryza sativa
MLIIDKLARILNSHICRTGYKFIGSGSWRSKP

SEQ ID NO: 29054 - protein, 348 aa, Oryza sativa
MAMASSAYAPAGGVGTHSAPGRIRPPRGLGFSTTTTKSRPLVLTRRGGGGGNISVARLRCAASSSSAAARPMSQPRFIQHKKEAFWFYRFLSIVYDHVINPGHWTEDMRDDALEPADLYSRKLRVVDVGGGTGFTTLGIVKRVDPENVTLLDQSPHQLEKAREKEALKGVTIMEGDAEDLPFPTDTFDRYVSAGSIEYWPDPQRGIKEAYRVLRLGGVVCMIGPVHPTFWLSRFFADMWMLFPKEEEYIEWFKKAGFKDVKLKRIGPKWYRGVRRHGLIMGCSVTGVKREHGDSPLQLGPKVEDVSKPVNPITFLFRFLMGTICAAYYVLVPIYMWIKDQIVPKGMPI

SEQ ID NO: 29055 - protein, 72 aa, Oryza sativa
MQACLLLEKEIRGCRQNWFFSLHVHIPYSKNMKPIGRFDSMEGWWCHFAVDRSTGLVANCREKIDEERQCNW

SEQ ID NO: 29056 - protein, 339 aa, Oryza sativa
MDRNSRRSKGVGYIEFYDAMSVPMAIALTGQVLLGQQVMVKPSEAEKNLVQSNVASGGIASGGARKLYVGNLHSNITEDQLRQVFEPFGQVELVQLPVDPLTGLCKGFGFIQFARLEDAKAAQSLNGQLDIAGRVIKVSAVTEQAGLQVGGATTGDLDDDEGGGLALNASSRAMLMRKLDRSGTATSITGGIGIPGVNTSVELPSASVTGAPLPTTSLIQPTIPAIGTVPGIQIPGTQSADIGSPTEFLLLKNMFDPAVETDPDFDLDIKDDVQDECSKFGAVNHIFVDKNTAGFVYLHFDSVAAATAAQRALHGRWFAGKMITATFMTAQQYKMKFPN

SEQ ID NO: 29057 - protein, 314 aa, Oryza sativa
MAERVTKALMRPLLCYIIVVAVAPAGCAAFNPRMLFLVKPDPIVLKDHHGVVLSGNVTVNVLYYGRFTPAQRAVVAGFVRSASAAQHPRVPSVAAWWSTTSLYRGGGARLRLGMQVMDERMSLGRSLSLDNVTALTRAAGHHRGAVTAVLTAPDVLVAPFCMSRCGVHGHGGGVGAHGRARYAYLWAGNPAQQCPGQCAWPFHQPVYGPQAPPLVPPNGDVGVDGMVISLAALLAGTVTNPFGDGYYQGDAGAGMEAATACAGVFGSGAFPGYPGKLLKDPVTGASYNAVGLAGRKYLLPALWDPTTSQCKTLV

SEQ ID NO: 29058 - protein, 17 aa, Oryza sativa
MPNQSLVKYTSVHLEFF

SEQ ID NO: 29059 - protein, 6 aa, Oryza sativa
MLRVFC

SEQ ID NO: 29060 - protein, 69 aa, Oryza sativa
MENAKWPLEIQCSYSKPFCQRFRFLRSMYDDHSHERFGFFCCHQNPSLRHLHHLCISHILEERRSPTQL

SEQ ID NO: 29061 - protein, 207 aa, Oryza sativa
MAAKLASELMPSDVAKALWGTTKSSSKINKEVQELLKLTLSKARVKLTENTIFNRIITDSNGSDPFSGLYVGAFSPYGPEVVQLRRKFGHWNSTDEVEFFEYVEAVKLTGDLSVPAGQITFRAKIGKGKRLENRGAYPEEFGVIASYKGQGRIAQPGFKNPRWVDGELLVLNGKSTIPHLGGAELGFLYSVPEQSFLVLFDRLKLPE

SEQ ID NO: 29062 - protein, 58 aa, Oryza sativa
MWVRWRRRKEERAGMKAKKHSRHGYPKLRPDRVACEPWFPSCYHRGGGDGVDTSQRRG

SEQ ID NO: 29063 - protein, 322 aa, Oryza sativa
MTAKGGAAPSPGGAGGLPNGRFFTVGLVTAWYSSNIGVLLLNKYLLSNYGFKYPIFLTMCHMSACALLSYAAIAWLRVVPMQLVRSRVQLAKIAALSLVFCGSVVSGNVSLRYLPVSFNQAVGATTPFFTAVFAYIMTVKRESWVTYLTLVPVVTGVMIASGGEPSFRLFGFIMCIGATAARALKTVLQGILLSSEGEKLNSMNLLLYMAPIAVILLLPATIFMEDNVVGITIELAKKDTTIVWLLLFNSCLAYFVNLTNFLVTKHTSALTLQVLGNAKGAVAVVVSILIFRNPVSVTGMLGYTLTVIGVILYSESKKRNKP

SEQ ID NO: 29064 - protein, 318 aa, Oryza sativa
MFDTDNDDALLPAELDDLFSTAPENPWSNNPYVDCAERNVLGGLSLEGFLSKWALMTLLDPANSFANLIYVGYSGDFGSAFTTMRKRRVDRKKQQTQRNVFQCYVFGPRGAGKTALLQSFLGRQPSDALPMNGERFAANTVELSGSRKTLVFREIPEDDVRPLLADRESLAPCDVAVFVYDSCDEFSWQRTRDLLVEVATHGENTGYEVPCLIVAAKDDLDQSPLALQESTRVSQDMGIEMPIPISVRLRDLNNIFCRIVHAAQQPHLSIPETEAGKTRRQYRQLLNRSLMVVSVGAAVAVVGIAAYRVYAARKNTSS

SEQ ID NO: 29065 - protein, 304 aa, Oryza sativa
MAAPSSLASSHLSRLADLRRAGVAAAAPAHPQQLRLGCSRRRAQRVVAMAGSGKFFVGGNWKCNGTKDSVSKLVTELNAATLEPDVDVVVAPPFIYIDQVKNSLTDRIEVSAQNVWIGKGGAYTGEISAEQLVDIGCQWVILGHSERRHVIGEDDQFIGKKAAYALSQNVKVIACIGELLEEREAGKTFDVCFKQMKAFADSITNWADVVIAHEPVWAIGTGKVATPEQAQEVHAAVRDWLKTNVSPEVASGIRIIYGGSVNAANCAELAKKEDIDGFLVGGASLKGPDFATIINSVTSKKVAA

SEQ ID NO: 29066 - protein, 353 aa, Oryza sativa
MMALKDFVNKMGSDKVLCEGNGPSPPADLRSNYLMNTSIAGLEKADVFLLVGTQPRVEAAMVNARIRKTVRATQAKVAYIGPPTDFNYDHEHLGTGPQTLVEIAEGRHPFCSTLQSAKNPVIIAGAGLSDREDQDALFSTIETVAKKFNVVRPDWNGLNVLLLHAAQAAALDLGLVANPTESIKSTKFLYLMGADDVDLDKVPDDAFVVYQGHHGDKAVYRANVILPSSAFSEKEGTYENTEGCTQWTIPAVPTVGDARDDWKILRALSEVAGAQLPYDSLSGVRDRISMVAPNLVHVDEREPCTISSEVKPPVKQQVSSTPFKTVVENFYMTDAITRASKIMAQCSATLLKK

SEQ ID NO: 29067 - protein, 266 aa, Oryza sativa; identical to SEQ ID NO: 28561

SEQ ID NO: 29068 - protein, 390 aa, Oryza sativa
MSVLGVFLASLLLAAVAPARAAGGGCAAERFSSNRVYAACSDLPHLGASVHWTYDAAASASLSVAFVAAPPSPGGWVAWGLNPTGGGMAGTQALVALPKGGGGGYEVQTFDIEGYSLSAPGKLKYPATDLAAEVAADGRVSVFGKLALQNGTAEVNQVWQVGPVSSGSMVPHAMSSDNKAAMGKLNLLTGAATSSGGGGSNLRKKNTHGILNAVSWGLLLPMGAIFARYLKTFKSADPAWFYLHVACQLIGYGVGVSGWATGIHLGNLSKGITYSLHRNIGITVFALGTLQIFALFLRPKKDHKYRIYWNAYHHSVGYTIIILGIVNIFKGMSILNVEQKWKTGYIITISILGGIAVILEAVTWSIVLKRRKEENKSYNGASNGHLPLSM

SEQ ID NO: 29069 - protein, 403 aa, Oryza sativa
MGDRDLVKPCLASMGKIHFEKIRMKPGKPLTFAEIVTEDSSKPSKKVLAFGLPGNPVSCVVCFNLFVVPAIRSLSGWSNPHLPRVHARLLHPLRGDPHRQEFHRAVIRWVPDDGSGRPGYVAESTGQQASSRLLSMKSANALLEVPLVGQMLEAGTSMQAILISDMTSSPFDKLPTASNPLPSHLFPSAKSVSTDLSQVPASQNTEVKVAILTVSDTVSLGAGPDRSGPRAISVVNSSSEKLGGATVVATAVVPDDVEKIKNILVKWSDIDRVSLILTLGGTGFTPRDVTPEATKSVIEKEAPGLTYVMLQESLKVTPFAMLSRATAGIRGSTLIINMPGNPNAVAECMEALLPALKHALKQIKGDKREKHPRHVPHAEAAPVDQWDRSFRAASSGRGCSCEP

SEQ ID NO: 29070 - protein, 18 aa, Oryza sativa
MADPLELRKAEKYIGSLF

SEQ ID NO: 29071 - protein, 72 aa, Oryza sativa
MPKRDHKVRQPQQKKHGNKTYGHYAEAYIASRWLTPLVQLTRDVVGVRDFFSRLSILFPGKTIVSSVMAPLG

SEQ ID NO: 29072 - protein, 198 aa, Oryza sativa
MASSLALVALLLVSCAVVAAAATKYTVGDTSGWAMGADYTTWASDKKFKMGDTLVFNYAGGAHSVDEVSAADYAACTASNALQSDSSGTTTVTLKTAGKHYFICGIAGHCSNGMKLVVDVAAASPAPAPKAPSTTPTTPSTTPATPASPGTSSGLTPTTPATVLAPPAKQSAGAAGLRARSWAMLGLAGLAAVQLGLF

SEQ ID NO: 29073 - protein, 207 aa, Oryza sativa
MTPPPIHTPSRLSHDSPGGSPWRSPMQFQAPMSGYRGPPPGAPPPWSPHSGVPPPWNPHSAPPSQGLYPHPPSYGPRNYNPGQGGGRMNYGPRGRPDSPYGRGRGQNNYNNPGSRGRGGRDGSGTQNYSGWQDGRVRYHKSMTDDPWRDLQPIVGNIMIPRDGSKSWLPESLRAKKDTSDRGQVKPPSGLSLAEYLDLSFNEASNDT

SEQ ID NO: 29074 - protein, 257 aa, Oryza sativa
MAILREFGTIEGMENLLPEDVLSNIIHRLAPRYLAISRCVCKTWCTIIEAHNLLHVDLLPRPLCGIFINFNELSMSEFFSRPSKGPTVSGNFDYLPCSSCIIDHCNGLLLFHKYVVNPATRQSAPLPPCPYMVVEHIFHREYLVFDPTLSPHFEVFMIPEIRRSNVWYNMLNSDDKLDPAIEELEWPPSPCILHVFSSRTKVWEERSFVREGEAAGNVSDMRLDHPYVPDTSVYVPDTSVYCRGVLYVYCQNKYVMR

SEQ ID NO: 29075 - protein, 547 aa, Oryza sativa
MAKKKEFLDEEDLDKLEDRPPIVTIMGHVDHGKTTLLDYIRKSKVVASEAGGITQGIGAYQVIVQVDGNPHACVFLDTPGHEAFGAMRARGARVTDICIIVVSADDGVRPQTNEAIAHAKAAGVPIVIAINKIDKEGANAERVMQGLSQIGLMPEAWGGDIPMIQISALNGEGVDELLETIILVAELQELKANPHRNAKGTVIEACLDKAKGSLATLVVQNGTLNKGDIVVCGEAFGKIRAMYDDGGKLIDKAGPSNAVQVIGLNNVPLAGDEFESVDNLDVARERANARAEALRIERISSKAGEGKVTLSSIAASVSSGKQVGIDTHELNIILKVDFQGSVEAIRQAIQVLPQENVSLRFLLQAPGDVSVSDVDLAVASEGIIFGFNVKAPGSVKSYAKKKSVEIRLYKVIYDLIDDLRNAMEGLLELAEEEVPIGSAKVRAVFSSGSGKVAGCMITTGKVVHDCNVRVLRKGKEVYMGTLDSLRRVKETVKEVGAGLECGIGVDDFDEWEEGDVVEAFNTVKKTRTLEEASASVTAALKDAGVQL

SEQ ID NO: 29076 - protein, 149 aa, Oryza sativa
MLGASLTPGGGGQDCFPSAGEKYLAKDLCTHLATMCRMYNDLGSAVRDLDEGNLNSIEFPEFERHESLNAKMSELLVLGEYERSCMFKAFTELRNYGTVDARTGNDAEARRLAERRFRIWNMFCDEVDLYGQVYVVRDISARLENQSKP

SEQ ID NO: 29077 - protein, 304 aa, Oryza sativa
MNNLYLVTDLALGGELFDRICRKGNYYESDAGDLIRATLSAVAYLHDHGIVHRDLKPENLLFRTPEDNADLLIADFGLSRIMDEEQFHVLTTTCGTPGYMAPEIFRKTGHGKPVDIWAIGVITYFLLCGYTPFDRDSNLEEMQAILVADYSFTPLEYWRGVSLTAREFIRRCLTVDPAARMTAHEALSHPWITELGKNNADGEEDLLPTVKKNFNARRTLHAAIDTIRAINQLRAGGAAGMMDGQRSAEPRRGAPHARIPQPADEPDDPMEIDSRGNGHGQTEEMIQEQERRIRETQQGLWGKR

SEQ ID NO: 29078 - protein, 53 aa, Oryza sativa
MKSERSLPKEAIHQEIHIYIVQRSGFKLPSDAILKDLVLLVDSDIIVSLSAII

SEQ ID NO: 29079 - protein, 594 aa, Oryza sativa
MTSTSPQMQMRRNKLSSHFQGDIDDDGGVGVVDIRGSPMGSAELARTGGWVAAVFIFGNEMAERMAYYGLSLNMVIFMFNVMHRPFAASANAVNNFLGISQASSLLGGFLADAYLGRYWTIAAFTTLYLLGLVALTLCATMPALQAPGQDECDGFAKLLGKCQQPHPWQMAYLYAALYTTALGAAGIRPCVSSFGADQFEERSPVLDRFFNLFYLAVTVGAIAAFTLLVYVQRNHGWAAAFGALALAMAASNALFFMGTPLYRHRVPGGSPLTRVAQVLVAAYRKRHIKHTTELLYEVGGAKSAVRGSGKIEHTEELRWLDKAAVRVEGQEEINNPWRLCTVTQVEEVKILVRLAPVSACTVMLSVVLTEFLTLSVQQAYTLNTRGLPVACMPVFPCLAILLLLALYYRAFAPLARRLTGHPHGASQLQRLGLGLLLSTLSVAWAGLFERYRRAYAIRHGFLPLFLTPMPGLSAYWLLIQYCLIGLAEVFCLVALLEFLYQEAPDAMRSLASAYAALAGGLGCFLATAINTAVDSITGDIDAGRPSWLAQNINVGKFDYFYWLLAVLSTINLIVFIYFAKAYKYRIKPPTTPHN

SEQ ID NO: 29080 - protein, 27 aa, Oryza sativa
MRPRQAPTSSWRILDHSISRDRSWMPS

SEQ ID NO: 29081 - protein, 73 aa, Oryza sativa
MIEVVLNDRLGKKVRVKCNEDDTIGDLKKLVAAQTGTRAEKIRIQKWYNIYKDHITLADYEIHDGMGLELYYD

SEQ ID NO: 29082 - protein, 169 aa, Oryza sativa
MVTSQDYVLIDVRTEKDKAKTGVPQLPSNAKNKLISIPLEELPSKTKSMVRNAKQAEAEIAALKISYLKRIGKGSNVIIMDSYCDSSKIVAKTLNSVGFKNCWVMAGGFSGRKGWAQSRLGTDSYNLSVVEVVTPSRVIPAAADRLVTASSSASRTTTSRKLLPGSVDG

SEQ ID NO: 29083 - protein, 383 aa, Oryza sativa
MGEFSGMATTGALYSGQVMPITSRDGSGTKPKGTRLERAIRDLQKIAAEYRPPAIDINEVDPNGQVAVKRRLPPEVKQKLAKVARLSANHGKIQEHELMDRLMGIVGHLVQRRTLRRNMKEMVESGLSAKQEKADKFQRVKMEINEMIKSRVAAKAKVNEHHSGSADDFQIANDEKRYLKGKSVMDAALEDRICDLYDLYVEGMDEDKGPQSRKLYVELAELWPEGSMDNVGIKDAINRSKERRRSLYNQQKVRNEERMKRKRLAAAAKLQDGYPIVMQSALIQQVAQPPITNPVATYPVTDQGSKSFDRVREISASANPDDINRNTGEMKKKKRKPESDLVDTQANAMKGPSQHVEKNKPPKRADEAVETVLCLPFYDQQPS

SEQ ID NO: 29084 - protein, 330 aa, Oryza sativa
MAGDGVDWESVAEATSGAVGALVSTTVLYPLDTCKTKFQAELQTQPGAHKYRNLSDVFWEAVQKRQILSLYQGLKTKNIQSFISQFVYFYGYSYFKRLYLEKSGAKSIGTKANLLVAAAAGACTVVVTQPLDTASSRMQTSAFGKSKGLRATLAEGTWLEAFDGLGISLILTCNPSIQYTVFDQLKQKLIQRQRRKNAEAGGGSSPVALSAFSAFLLGAISKSVATILTYPLIRCKVMIQAADPDEDDDDESERPGKSKSPKTMLGALHAMWSKEGIPGFFKGLHAQILKTVLSSALLLMIKEKISRFTWISLLALRRYLFVSQKRIKSA

SEQ ID NO: 29085 - protein, 299 aa, Oryza sativa
MSLTDRLISFLRISERPLFQRIMGFSFMVFVLWSPVVIPLLPTLVQSWTISSSTGIVGYACIVGLYVSIMILVILWGKRIRGYENPVEQYGMNLASVSRVQEFLQGLAGGITVVGLVHSVSILLGFAALRAGSYSFVTRPLDLLKSSSNVLLLALRGFVTATSIAVVEEVVFRSWLPEEVAVDLGYYSAILISGVAFSLIHRSLPSVPGFLLLSLVLFGLKQRTQGKLAAPIGLRSGIMTASYLIQTSGIIQSKPGTPFWMISTYHLHPFDGVIGLSVCALLAILFFPQEPVQKDSFVS

SEQ ID NO: 29086 - protein, 37 aa, Oryza sativa
MMTWVSACLTKYLRLHIYPRSPQYLSALLALSLCVQK

SEQ ID NO: 29087 - protein, 449 aa, Oryza sativa
MSTDSCCEIRVSKDKLPLCALPRDELCQITGELDSVRKGLNTVAQLLFTHPPKESDVLGAHNSGSSRSFFNQPDVLPPGMQPNLHLPFQGPNVAHLPNFPEALMHGHGSVPPEPLTFRLLCSSDKVGGIIGKGGNNIKSIQNDTGCEIKVLDTVPKSEDRIVFISGPAHPGDGISPAQNAILHVQRKIVPTSNTKEGPAICRLIVSPNQVGCLLGKGGSIIAEMRKLSGAHIIVLSKDKIPKGVPENDEVVQISGASEAIQEALMQITARLRNHLFRDRMASTVPNVQPPFGLVDPQFGSYAGNHDSISPRIFPNVPQFHKDFIGRPLDEMSAPWTMKGMQVVGDPISLPDIPGMAHRGMGGFPGPGQPSIVSTITADVMVPKLVLPSLCGEDGGCLNRIREFSGAKITVADPMGNAMDTAILISGTPDQMHAARSLIQAFVLSEPLAP

SEQ ID NO: 29088 - protein, 15 aa, Oryza sativa
MIFPCGVNSLSVISV

SEQ ID NO: 29089 - protein, 184 aa, Oryza sativa
MLKLAKEANSILFDYRIPLSGSETCGAQAVSSDNSHGNGMVMNGLPISIYAPETVGCAVVDSSGHTAAATSTGGLMNKMTGRIGDSPLIGSGTYACGACAVSCTGEGEAIIRSTLARDVAAVMGYRGAGLQEAVDYCVKKRLDEGFAGLIAVSSTGEVAYGFNCTGMFRGCATEDGFMEVGIWE

SEQ ID NO: 29090 - protein, 252 aa, Oryza sativa
MLDSLGDKEYKPNPRLARVLDILFILHAEHEMNCSTAAARHLASSGVDVFTALSGAVGALYGPLHGGANEAVLKMLNEIGSVENIPDFIEGVKNRKRKMSGFGHRVYKNYDPRAKVIRKLAEEVFSIVGRDPLIEVAVALEKAALSDDYFVKRKLYPNVDFYSGLIYRAMGFPTEFFPVLFAIPRMAGWLAHWKESLDDPDTKIMRPQQVYTGVWLRHYTPVRERVPASQGEQLGQIATSNATRRRRAGSAL

SEQ ID NO: 29091 - protein, 411 aa, Oryza sativa
MVESVIGIAPLPELKKSKRERQGSHNGGMGLSAFESSKPSKSTDLLARLRIFSTGVSIGIISSTLSNKNELDALKGTVKRMENLIQDLHDELEMREGLTVKELPNEMSVKIDDDESKAHVTDSEPMSKIEEELEAELARLELNITSNCLKEQTFDFSEVEQDLIGDIVQGELKIDTTHCDLADHSSESAHGRDSRESSPDYTHDANYPVSPRDLSLRLHKVIQQRLEERIKELETTLAQSEMQTQVQVMATEQILCERTCSDSDSGSPNQESPVYIQETNSLVEPFCLNLAGDALEAYDEAYEEFMRIADSPCTTSTNGKPQVHEDYSVDRGLIWGLEDGSARKLKKVPTWERILKSREPNRTQESDGDDEDEFEDDDQDSKMLIQQIIERTKQGSPVLIHAQRMLFSVDD

SEQ ID NO: 29092 - protein, 145 aa, Oryza sativa
MGRGRGRGRKLTNGRSHEDKGSSGEEVVPARKRRGRPQKRIVDKVVDQAEAKNLTEGDDGDADYQQGEGEDGGAKPKVSRTEKSSAGKGNKRNRLPKEEESSNLDLEENSSSTRSSNDESTRSNGFRQNGSRRKSTPRRAAEAGI

SEQ ID NO: 29093 - protein, 131 aa, Oryza sativa
MARGVAAAAGGKGGAGKKKGSVTFVIDCAKPVDDKIMEIASLEKFLQERIKVAGGKAGNLGESVTVSRDKTKVTVTSDGPFSKRYLKYLTKKYLKKHNVRDWLRVIASNKDRNVYELRYFNIAENEGEEED

SEQ ID NO: 29094 - protein, 674 aa, Oryza sativa
MAAAVSAPLLRFHHHHRCLLRHSSSPRRYPAGFSRGLSSVSFGLPRSTTTAARSTASPSAPSAAAAEATDAASAQAGSDGKGDGIGEEERVVLPTNESSDRLLRIRHTCAHVMAMAVQKLFPNSKVTIGPWIDNGFYYDFDMEPLTDKDLKRIKKEMDRIIRKNLPLVREEVSREEAQKRIEALNEPYKLEILEGIKEDPITIYHIGEEWWDLCAGPHVESTGKIDRRAVELESVAGAYWRGDESNQMLQRIYGTAWETEDQLKAYIHFKEEAKRRDHRRLGLDLDLFSIQEDAGGGLVFWHPKGAIIRHVLEDSWKQIHLQRGYDLLYTPHVAKAELWKVSGHIDFYKENMYNQMDVEDELYQLRPMNCPYHILVYKRKLHSYRDFPIRVAELGTVYRYELSGSLHGLFRVRGFTQDDAHIFCLEDQIKDEIRGVLDLTEQILGQFGFRYYEINLSTRPEKSVGSDDIWEKATLALKDALEDKGWEYKVDEGGGAFYGPKIDLKIEDALGRKWQCSTVQVDFNLPERFDITYVNSNSEKKRPIMIHRAILGSLERFFGVLIEHYAGDFPLWLAPIQARILPVTDNELQYCNEVASELKSKGIRAEVCHGERLPKLIRNAETKKVPLMAVVGPKEVQARTLTIRSRHSGEIGTMPVDEFFRRIQLAIANKSSSL

SEQ ID NO: 29095 - protein, 68 aa, Oryza sativa
MSSGGEEGKTSWPEVVGLRAEEAKKVILKDMPDADIVVVPVGTPVTMDFRPNRVRIFVDTVAGTPTIG

SEQ ID NO: 29096 - protein, 43 aa, Oryza sativa
MKVKVMCHRSSGTSIMSGHTLPLCLEGLRVLKCARWPSNGCEN

SEQ ID NO: 29097 - protein, 103 aa, Oryza sativa; identical to SEQ ID NO: 29037

SEQ ID NO: 29098 - protein, 227 aa, Oryza sativa
MNQMTQAIDLIDVSYEQIDRDMLMSGFIQPIPDLSPVIPSVDEMPSVDPGVSPYETNIISFYKTWDTFGAFSNFSPHPIHMPDENGDYFTWPTVEHYYQAHKFIGVDDPQAREIVQEIKLAKSPEEAARIGRTRQREFQELVRPDWDSIKIEVMYRATKRKFSTYSHLTDMLLSTAGSVLVEASPHDLFWGGGREGEGMNYLGRLLMQLRSEILGTIQTAVEVGEPA

SEQ ID NO: 29099 - protein, 261 aa, Oryza sativa
MDLESVNPELAEIDGQIGDILRALQNGFQKLDKIKDANRRSRQLEELTDKMRDCKRLIKDFERVVKDMAGSTDPETARMLHDRKQSMIKELNSYVALKKQYASENKRVDLFDGPSVEDGFGEENVLLASNMTNQQLMDQGNQLMDETDQAIARSKQTVQETINVGTETAAALKSQTEQMSRIVNELDSIHFSIKKASQMVKEIGRQVATDRCIMALLFLIVAGVIAIIVVKIVNPQNKTIRDIPGLAPPVSRRLLSIVEDI

SEQ ID NO: 29100 - protein, 329 aa, Oryza sativa
MAFALKASTASAAAASTASASASSLSVAAAAPGRRGGAAGRVSFRGVPAPMVAIRAEAAAVGEDERVISGTFAKLKEQGKTAFIPFITAGDPDLATTAKALKILDACGSDLIELGVPYSDPLADGPVIQASATRALSKGTTFEDVISMVKEVIPELSCPVALFTYYNPILKRGIANFMTVVKEAGVHGLVVPDVPLEETNILRSEAAKNNLELVLLTTPTTPTERMEKITKASEGFIYLVSTVGVTGARANVSGKVQSLLQDIKQVTDKAVAVGFGISTPEHVKQIAGWGADGVIIGSAMVRQLGEAASPEEGLKKLEELAKSLKAALP

SEQ ID NO: 29101 - protein, 496 aa, Oryza sativa
MWRSNTQMDFLCLTCHYIDHANDEWKVRKKILNFVHVEAPFTDDQIASLILEKLREWGIDRKLAAIVLDNCASGEIVARELLVVLQPRRLLLLNGNLFQVRSCAHILNLTVQESLEQTSDIITRVREMIQNVKFSQERFEKFQDTAKLLQMDQKLLVLDSPNNWPSTYLMFDSACYYHDVLMRLAEQEAHYGAFLTAKEWADVKALTEILDALYHKMEKFPVENPTANLYFNDMCEVHVLLNTWRNSPSPVVAQVADRMLTKFEGYWDLTRPVMAFASILDPRYKMKSVEYFCRLIYAADQFRAKTTIDDIRQSFTNLCSEYEQSGNSFKNPSALFYSATSNSCMSSVYSNGDDFKTFSRITLSDARRGLDQYIQETSSGQSFKSDLDMYLEEPVYRQKEGHLDNFDILGWWKSFAAKYPVLSQMARDILAVPVSIIPLDSDARTLNEYLSTMDPSTVQGLVCAQDWLREDTEVASSDGHADDKAARGDELIVLPK

SEQ ID NO: 29102 - protein, 580 aa, Oryza sativa
MGEVAEDIYTQDGTVDVKGNPATKKNTGNWRACPYILANECCERLAYYGMSTNLVNYMKTRLGQESAIAANNVTNWSGTCYITPLLGAFLADAYMGRFWTIASFMIIYILGLALLTMASSVKGLVPACDGGACHPTEAQTGVVFLALYLIALGTGGIKPCVSSFGADQFDENDEGEKRSKSSFFNWFYFSINIGALVASSVLVYVQTHVGWGWGFGIPAVVMAVAVASFFVGTPLYRHQRPGGSPLTRIAQVLVASARKWGVEVPADGSRLHETLDRESGIEGSRKLEHTGQFACLDRAAVETPEDRSAANASAWRLCTVTQVEELKSVVRLLPIWASGIVFATVYGQMSTMFVLQGNTLDASMGPHFSIPAASLSIFDTLSVIVWVPVYDRLIVPAVRAVTGRPRGFTQLQRMGIGLVISVFSMLAAGVLDVVRLRAIARHGLYGDKDVVPISIFWQVPQYFIIGAAEVFTFVGQLEFFYDQAPDAMRSMCSALSLTTVALGNYLSTLLVTIVTHVTTRNGAVGWIPDNLNRGHLDYFFWLLAVLSLINFGVYLVIASWYTYKKTADSPDDKAEHAGAN

SEQ ID NO: 29103 - protein, 255 aa, Oryza sativa
MYVSSWHICFHSNVFSKQIKVMLPLRDIDEIRRSQHAVINPAITIFLRMGAGGHGVPPLGSPDGRVRYKFASFWNRNHTFRALQRAVKNFHTMIEAEKQERAQSALRAHSSSRKSSMKEINVPEDCADLTGQLQPFVKEEVLVTVFNGSFPCTAEEFFNTLLSDDSSYITEFRTARKDKDINLGQWHHADEYDGQVRELNCKSICHSPMCPPYSAMTEWQHMVLSADKTDLVFETVQQVHDVPFGSFLRYTVDGL

SEQ ID NO: 29104 - protein, 172 aa, Oryza sativa
MNEYRVPELNVQNGVLKSLSFLFEYIGEMGKDYIYAVTPLLEDALMDRDLVHRQTAASAVKHMALGVAGLGCEDALVHLLNYVWPNIFETSPHVINAVMEAIEGMRVALGPAVILNYCLQGLFHPARKVREVYWKIYNSLYIGAQDALVAAYPALDDDGDNIYSRPELAMFV

SEQ ID NO: 29105 - protein, 192 aa, Oryza sativa
MIYAYFHPNVERWMEKLEESETKVRLFIKGAIVTLSLTAGYLWYEYIYRLDKITYNKYHPYTSWIPITVYICLRNCTQQLRSASLALFAWLGKITLETYISQIHIWLRSSTPNGQPKWLLSFVPDYPLLNFMLTTAIYLLLSYRVFEITGVLKGAFIPSRDNNRLYQNFIAGIAISACLYFCSLILVKITIV

SEQ ID NO: 29106 - protein, 375 aa, Oryza sativa
MENACEAGLPLSVAVSVPPVMVDGETVPKEVEECEDEEEEEEYAGDAPPPWKVMGSDDEGETEAGEEEEIAEADGEEEAADVEEVEYEFYDSDGSEDEGDGEEVDPAVASAAQFVPEGQFLGSAQFAAYGCAAGFMRVAAVEADPADGQEILVLYRYTLLKRAWSDPAGVELSMWAKVSKIHRLRFIVPASGDPASSLPFAGLSLSPLIYHNDYVEELETLWSKLAAQVRVPPVATRVQVIVDVGILRAGDNTPERREYMRAELEAKKEMPWPGKLLGMELHVPEPVVAAAASCKRDSSEEVFDDAPAPPAKRRKVFDAGEECPVCLDELEDGVVAWPGCSVAHVFHGQCLETTLKGSQMCPICRRDLGLKTLQE

SEQ ID NO: 29107 - protein, 510 aa, Oryza sativa
MFIESFRVESPHVRYGAAEIESDYQYDTTELVHESHDGASRWIVRPKSVRYNFRTTTTVPKLGVMLVGWGGNNGSTLTAGVIANREGISWATKDKVQQANYYGSLTQASTIRVGSYNGEEIYAPFKSLLPMVNPDDLVFGGWDISNMNLADAMTRAKVLDIDLQKQLRPYMESMVPLPGIYDPDFIAANQGSRANNVIKGTKKEQMEQIIKDIREFKEKSKVDKVVVLWTANTERYSNVCVGLNDTMENLLASVDKNEAEISPSTLYAIACVMEGIPFINGSPQNTFVPGLIDLAIKNNCLIGGDDFKSGQTKMKSVLVDFLVGAGIKPTSIVSYNHLGNNDGMNLSAPQTFRSKEISKSNVVDDMVSSNAILYELGEHPDHVVVIKYVPYVGDSKRAMDEYTSEIFMGGKSTIVLHNTCEDSLLAAPIILDLVLLAELSTRIQLKAEGEEKFHSFHPVATILSYLTKAPLVPPGTPVVNALAKQRAMLENIMRACVGLAPENNMILEYK

SEQ ID NO: 29108 - protein, 149 aa, Oryza sativa
MCSEVFQFDISTASSNPGGIIPASPVVNSSSVNATEKIPAHSAAYHGKLKNRRVMYNEAIPLTGKTANNTEPFNRTSESSSKLPDSKPASSVVVSVLADPREAGNGDGDPRVSPKPLSKIFVVVLVDGVRYVTYSCTLPFKSSSPHLVN

SEQ ID NO: 29109 - protein, 38 aa, Oryza sativa
MALLLPRLRSSRRQMIITTSSRGVSWLNYLLLCVSSLM

SEQ ID NO: 29110 - protein, 480 aa, Oryza sativa
MVKICCIGAGYVGGPTMAVIALKCPAIEVVVVDISKPRIDAWNSEQLPIYEPGLDEVVKECRGRNLFFSTDVEKHVAEANIIFVSVNTPTKTRGLGAGKAADLTYWESAARMIADVSKSDKIVVEKSTVPVKTAEAIEKILTHNSKGINYQILSNPEFLAEGTAIEDLFKPDRVLIGGRETPEGKKAVQALKEVYAHWVPEDRIITTNLWSAELSKLAANAFLAQRISSVNAISALCEATGANVAEVAYSVGKDSRIGPKFLNASVGFGGSCFQKDILNLVYICECNGLPEVANYWKQVIKINDYQKSRFVNRVVSSMFNTVSGKKIAVLGFAFKKDTGDTRETPAIDVCHGLLGDKAQISIYDPQVTEDQIQRDLAMSKFDWDHSMHLQPTSPTAFKQVSVVWDAYEATKGAHGVCILTEWDEFKTLDYQKIFDNMQKPAFVFDGRNVVDAEKLREIGFIVYSIGKPLDAWLKDMPAVA

SEQ ID NO: 29111 - protein, 396 aa, Oryza sativa
MASTVAINLIGAQAGIISKLRNCDITSYSGLKARSSISFESRSSFLGQNASLRSSISPRIVPKANSGSHISPEASYKVAVLGAAGGIGQPLGLLIKMSPLVSALHLYDIANVKGVAADLSHCNTPSQVLDFTGPSELANCLKGVDVVVIPAGVPRKPGMTRDDLFNINASIVKTLVEAVADNCPEAFIHIISNPVNSTVPIAAEVLKQKGVYNPKKLFGVTTLDVVRANTFIAQKKNLKLIDVDVPVVGGHAGITILPLLSKTRPSVTFTNEETEELTRRIQNAGTEVVEAKAGAGSATLSMAYAAARFVESSLRALAGDPDVYECTFVQSELTELLFFASRVKLGKNGVESIISSDLEGVTEYEAKALESLKPELKASIEKGIEFVHKQQAAATS

SEQ ID NO: 29112 - protein, 31 aa, Oryza sativa
MIVASSLPPLFSFVFSILLFVFEMMVVVLHF

SEQ ID NO: 29113 - protein, 22 aa, Oryza sativa
MPNGCPACYHMHANVKDRFGLV

SEQ ID NO: 29114 - protein, 30 aa, Oryza sativa
MLKQSMGNSCALHVTGKLNAAAIEGFNKLR

SEQ ID NO: 29115 - protein, 83 aa, Oryza sativa
MCKQFPLLAKEIKVLMEGQPAIMELFPRLDGDQVVAIEKKLENLRWIDMKRKKKMAVKMAKIRKGLIYKLEGAAILADGNMIH

SEQ ID NO: 29116 - protein, 11 aa, Oryza sativa
MLFQWRCTLVS

SEQ ID NO: 29117 - protein, 117 aa, Oryza sativa
MIRAIPSNASDNVYCTLLAHSVVHGAMAGYTGFTVGQVNGRHCYIPFYRITEKQNKVSITDRMWARLLSSTNQPSFLSKKDVEDAKMEEERASKFFDGPPPNPKVEDKVASNGKAVK

SEQ ID NO: 29118 - protein, 162 aa, Oryza sativa
MRCQRCNEAGHSTQFCSVDKLSLSAVKPMSERNMKDSSAKRNKTFEATNVIAAEKAASRPADQSEHIVKCGPSHNPMCRPKDLLSTSFGHVKKPSQLYGQTNEQDMRNTSSNKASTDGSKLKPNECQTVSVKTGRLVDGSLTMPDALMDKSSTVPELDFIWQ

SEQ ID NO: 29119 - protein, 217 aa, Oryza sativa
MAASVLALAVAFLLGASGYGVDRGAAAASPAAEGVEVAYGSTIKLMHEKTKHRLHSHDVPYGSGSGQQSVTGFPEVDDSNSYWIVRPSPDSSAKQGDAIETGSIIRLQHMRTRKWLHSHLHASPLSGNLEVSCFGGDGQSDTGDYWRLEIEGGGKLWKQDQKVRLRHVDTGGYLHSHNKKYNRLGGGQQEVCGVREKRAENIWLATEGVYLPVNKSK

SEQ ID NO: 29120 - protein, 66 aa, Oryza sativa
MRIAFDQHPFHVKLNSLQKQNYRLQTFPRSVRHAILGRRSFKCSNFSHDSGSSHNFANEACARGLS

SEQ ID NO: 29121 - protein, 391 aa, Oryza sativa
MKLVRHPNIVQLYEVMATKSKIYFVLEYVKGGELFNKVAKGRLKEDAARKYFQQLVSAVDFCHSRGVYHRDLKPENLLVDENGNLKITDFGLSALAESRRQDGLLHTTCGTPAYVAPEVISRKGYDGVKVDTWSCGVILFVLMAGYLPFQDSNLMEMYRKIGKAEFKCPAWFSSDVRKLVSRILDPNPRSRMPITKIMETYWFKKGLDSKLILKNVETNEPVTALADVNVVFSSMGSSSSKKTEEKQDAGKLTNLNAFDIISLSEGFDLSGLFEETDKKKEARFTSSQSASAIISKLEDVASCSKLTVKKKEGGVLKMEGASEGRKGVLAIDAEIFEVTPSFHLVEIKKNNGDTLEYQHLWKEDMKPALKDIVWAWQGERQDQQPEDHGQP

SEQ ID NO: 29122 - protein, 64 aa, Oryza sativa
MCSYSLWGSSTSNLTLTPTSPRSQLPHLAARTLVPSPLQMRCLGRSHQSPMMFWPRHSRSKRGQ

SEQ ID NO: 29123 - protein, 59 aa, Oryza sativa
MVYAVARRRASYDGNCEQGWPSNPFFSPDEYVISICCWNRLKSICNSTVSFPHHICIHC

SEQ ID NO: 29124 - protein, 56 aa, Oryza sativa
MPARELVLLGKEAEARSFEPQPKHRSTNLVIFRSRKLASEAKLLCKDIGGHVEFFP

SEQ ID NO: 29125 - protein, 61 aa, Oryza sativa
MAGNASGVRRLYLSLYNWIVFIGWVQVSWFMASFATVYPVLFRYLIALRKKALAKAKPHNY

SEQ ID NO: 29126 - protein, 35 aa, Oryza sativa
MTASCPDNSVFVAGLFFLHSPCKNLGTETMWYSVL

SEQ ID NO: 29127 - protein, 23 aa, Oryza sativa
MTSSLLPYRCYFPCTVLESLKYR

SEQ ID NO: 29128 - protein, 24 aa, Oryza sativa
MIWNAYCLNRCVLPESYYFSGIAA

SEQ ID NO: 29129 - protein, 423 aa, Oryza sativa
MEYERIHGPPLQRQSGGFSPAKLRAMLLGLEKNQHNGEDTSPGANDSGELDDQRSMECSTSTEMSSNSGHRSRNRAQDDDSFDSESSSSGPPTVKRPAAVTALLPPFSRPTPSKWDDAEKWISSPTANRGGRVGSAAGAAPKKSALAFPEHVSRPPAVAKVVAEVPINTGTLVKNSVALAQPISFNPAQSASIVDEPAPAVRSVSMRDMGTEMTPIASQEPSRTGTPIIASSPTSSRTPTPQRNAEISIGEFGPNKMEMSEEELQMNTRKEIMDLGRRLGKTTIAAWASKEEKSTTSFANVITDKAVEIDREARAADWEEAEKAKYLARFQREEVKIQAWENHQKAKIEAEMKRMEAKIEIKRAREQDRLSSKLAAARHKAEARREAAESRKNQEAARTEEQAAQIRKTGHIPSSISCWCWCL

SEQ ID NO: 29130 - protein, 85 aa, Oryza sativa
MTLVVVGLVFLGAIAAGVFYVAYHPQLPTFAVTSLRLAALNVSDSDAVTSRIEFTVTARNPNDKIAGEVGRQGLLLLLEHDGRQV

SEQ ID NO: 29131 - protein, 35 aa, Oryza sativa
MAIAILSCLCLSVLGGASKNTIDAVSIHGGVRSID

SEQ ID NO: 29132 - protein, 56 aa, Oryza sativa
MPSKRESSARVDYVPALCTHRPSLLPIEWSGEVFGSRRRGRFAAPDVARSPLNLII

SEQ ID NO: 29133 - protein, 193 aa, Oryza sativa
MGFLHRKTSKQTSKLKTLLGLAVLRIATARRPHLARKSIATDDVRQLLTLDHLDRAIHRAEQVIAEDNMLEAFEMIEMYCKRLIEHAAKLDKPGECTDEIREAAASVMFAAGWCSELPELLFARTILADKFGSDFTEAAKDGTGIVDPMLVWKLSSDAKSMELKRKVTKEIAMENNIIVDFSELQDAIKDEED

SEQ ID NO: 29134 - protein, 25 aa, Oryza sativa
MRSADHLINLLPVHQRDPPFLLLLS

SEQ ID NO: 29135 - protein, 19 aa, Oryza sativa
MNCCSPYFDLSSCSWIYNK

SEQ ID NO: 29136 - protein, 382 aa, Oryza sativa
MTDPFVGSLTFVRIYSGKLVAGSYVLNANKDKKERIGRLLEMHANSKEDITVAVAGDIVALAGLKDTITGETLSDPDKPVVLERMEFPDPVIKVAIEPKTKADADKMATGLIKLAQEDPSFHFSRDEETNQTVIEGMGELHLDIIVDRLKREFRVEANVGAPQVNYRESISKISEVQYVHKKQSGGSGQFADIIVRFEPLEAGSGYEFKSEIKGGAVPKEYVPGVMKGIEESLPNGVLAGYPVVDLRAVLVDGSYHDVDSSVLAFQIAARGAFREGLRKAGPRLLEPIMKVEVITPEEHLGDVIGDLNSRRGQVNSFGDKPGGLKVVDAFVPLAEMFQYVSTLRGMTKGRASYTMQLAKFDVVPQHIQNELSAAKQEEASTA

SEQ ID NO: 29137 - protein, 132 aa, Oryza sativa
MLELLNQLDGFDSRGDVKVILATNRIESLDPALLRPGRIDRKIEFPLPDIKTRRRIFQIHTSKMTLADDVNLEEFVMTKDEFSGADIKAICTEAGLLALRERRMKVTHADFKKAKEKVMFKKKEGVPEGLYM

SEQ ID NO: 29138 - protein, 248 aa, Oryza sativa
MAARKNAGVLALFDVDGTLTAPRKVVTPEMLQFMKQLREHVTVGVVGGSDLVKISEQLGKSVTTDYDYCFSENGLVAHKNGELIGTQSLKSFLGDDQLKEFINFTLHYIADLDIPIKRGTFIEFRSGMLNVSPIGRNCSQEERDEFEKYDKVHNIRPKMVSVLREKFAHLNLTFSIGGQISFDVFPQGWDKTYCLRYLEEFQEIHFFGDKTYKGGNDYEIFESDRTIGHTVTSPDDTAEQCRSLFMSK

SEQ ID NO: 29139 - protein, 98 aa, Oryza sativa
MDEHPGGDEVLLAVTGKDATNDFEDIGHSESAREMMEKYLIGEIDASTIPVKRTHVTPQQAPGNPDKGDDMLIKILQFLVPILILGLAFAIRQYTKSE

SEQ ID NO: 29140 - protein, 87 aa, Oryza sativa
MTASSIMPHLVLLPYWMLWQGRVYYCVLLGQELFMNSWPGRSPPRSLAPAGVVAHRLGDVFVFFSSFFRVFLCEALCCTYLFFSLMK

SEQ ID NO: 29141 - protein, 168 aa, Oryza sativa
MAALPLATAELCDANAHLIMNGELRALQPVFQVYGRRQVFAGPIVTLKVYEDNVLVREFLEEKGQGRVLVVDGGGSLRCAILGGNPVQQAQNNGWAGIVVNGCIRDVDEINGCDIGVRALNSHPMKANKKGIGEKHVPVTIAGTRICDGEWLYADTDGILISRTELTV

SEQ ID NO: 29142 - protein, 41 aa, Oryza sativa
MSSSWFFLFLKCSLYTPPGLQILYHCLFCVLDRTSQSATCM

SEQ ID NO: 29143 - protein, 40 aa, Oryza sativa
MMKLFILRTAVCRSLSLTMRKRSQLLFNEHCLSLRWKLSR

SEQ ID NO: 29144 - protein, 264 aa, Oryza sativa
MTAMLLIWVLMGLFAGYASSRLYKMFKGSEWKSITLKTAFLFPGIAFGIFFVLNALIWGEKSSGAVPFSTMFALVLLWFGISVPLVFVGSYLGFKKPAIEAPVKTNKIPRQVPEQAWYMNPAFTILIGGILPFGAVFIELFFILTSIWLHQFYYIFGFLFLVFIILIITCAEIAIVLCYFQLCSEDYMWWWRSYLTSGSSAIYLFLYAGFYFFTKLQITKLVSGILFFGYMLLASFSFFVLTGTIGFCACLWFTRLIYSSVKID

SEQ ID NO: 29145 - protein, 147 aa, Oryza sativa
MILAVLFSNSDGNILIERFHGVPAEERLHWRSFLVKLGADNLKGAKNEELLVASHKSVSIVYTMIGDVCLYIVGKDEYDELALAEVIFAITSAVKDVCGKPPTERLFLDKYGRICLCLDEIVWKGLLENTEKDRVRRLIRLKPPVEP

SEQ ID NO: 29146 - protein, 274 aa, Oryza sativa
MGISGTEVAKESSDIIILDDNFTSVVKVVRWGRSVYANIQKFIQFQLTVNVAALVINVVAAVSSGDVPLNAVELLWVNLIMDTLGALALATEPPTDNLMKRQPVGRREPLVTNIMWRNLFVQAIYQIAILLIFDFSGRSILRLQNDSREDAEKTQNTFIFNTFVFCQIFNEFNARKPEERNVFKGITKNHLFMGIIAITTVFQILIIEFLGKFFKTARLNWRLWLVSVAIGIISWPLAYLGKFIPVPVRPLQDYFKPTCWRRASRRDEEESGQS

SEQ ID NO: 29147 - protein, 133 aa, Oryza sativa
MASQLSAATSVPQFHGLRTYSSPRSMVTLPSLRMSKKRSQGIRCDYIGSATNVIMVTTTTLMLFAGRFGLAPSANRKSTAGLKLEARDSGLQTGDPAGFTLADTLACGAVGHIMGVGVVLGLKNIGVLDQIIG

SEQ ID NO: 29148 - protein, 142 aa, Oryza sativa
MNRKSKELNEQIRQVALEVQSWQSVALHNQSVANSMKSKLMQMVAHSSNLTREGSGDSEVDNTASSQNVNAVPGVFFQSGLLGINSMADGGLGACRLCRMKEAAVLVMPCRHLCLCADCEKNADVCPVCRFPKSCSVEINMS

SEQ ID NO: 29149 - protein, 299 aa, Oryza sativa
METLLSPSTLLSPLRGSKKKPASPAASASSSSSSPARSVVSCALRRQQPPPQAAAAWRGDGGRGGGVGSWATFLQHGLAAAALSLAISMAPAPAPAVASEFDVLNGGPPEDTYVVDDAGVLSRVTKSDVKRLVRDLESRKNIRINFITVRKLTSKADAFEYADQVLEKWYPTVEEGNNKGIVVLVTSQKEGAITGGPALVQAVGDEILDSTVSENLPVLATDEKYNEAIYTTAKRLAAAIDGLPDPGGPTFKDNKRESNFKTKEETEEKRGQFTLVVGGLLVIAFVVPMAQYYAYISKK

SEQ ID NO: 29150 - protein, 121 aa, Oryza sativa
MAGARRTMALVALVAVVAAAVVAERASAAVSCGDVTSSIAPCLSYVMGRESSPSSSCCSGVRTLNGKASSSADRRTACSCLKNMASSFRNLNMGNAASIPSKCGVSVAFPISTSVDCSKIN

SEQ ID NO: 29151 - protein, 308 aa, Oryza sativa
MSNLKQGDEIVLTIAEHHSAIVPWKFVSQKTGATLKYVGLTKEGVPDIEQLKGLLSNKTKIVVVHHVSNVLGSMLPIEDIVTWSNRIGAKVLVDACQSVPHMPVDVQRLGADFLVASSHKMCGPTGVGFLHGKFDLLSSMEPFLGGGEMIADVFQDKSTCAEPPSRFEAGTPAIGEAIGLGTAIDYLSQIGMQKIHEYENELATYLYESLIAVPNVRIYGPAPCQTVHRAPLCSFNVENVHPTDIAEILDLQHGVAIRSGHHCAQILHRTLGINASARASLHFYNTKEEVDVFVDALKDTIDFLTSEH

SEQ ID NO: 29152 - protein, 58 aa, Oryza sativa
MPVDCETNWWSSQQSHGTSEPAPAPRRLFGQWIGVGRSSPENRSPEGSSYRQMHTPRM

SEQ ID NO: 29153 - protein, 38 aa, Oryza sativa
METMATSPAGFKDPGLGRRMLVFCCTCTQTISLAGSLA

SEQ ID NO: 29154 - protein, 42 aa, Oryza sativa
MVGSLEDVLKKMEMNERNSGWDDLIFIPPGKSLNQHINEVSA

SEQ ID NO: 29155 - protein, 54 aa, Oryza sativa
MAQAMASRPAAAPCSASSPPGSPAAPSRRRRSPRPPSPSSSAPRHRPPVDSLGR

SEQ ID NO: 29156 - protein, 73 aa, Oryza sativa
MANHHNVSDDPASDGNCDDQGNIDSKMIDLNMRPVRTHGQGSNSQTQGVDVSVNNHDSPGVVPTCNFEREANK

SEQ ID NO: 29157 - protein, 212 aa, Oryza sativa
MRAMPSPPPHGPMSLMASRCYCCSSPPSPSPKQRRDAESKQQQQQHIRGARLAVTTRRALLAAAIVVVGSGTAGRARATEEGGGGEGEGVVGAIKSIFDPNERTKSGKVLPKAYLKAAREVVRTLRESLGEDDGGDVAKFRRGADAAKESIREFLGGWRGQQAVAAEESYVALEKAIRSLAEFYSKAGPFASLPKDVKDKILANLNTADAFL

SEQ ID NO: 29158 - protein, 149 aa, Oryza sativa
MVFGGFLAPILELKLGVGGTSYADFIRSVHLPMQLSQVDPIVASFSGGAVGVISALMVVEINNVKQQEHKRCKYCLGTGYLACARCSSLGTLVLTEPVSTFSDGDQPLSTPRTERCPNCSGAGKVMCPTCLCTGMAMASEHDPRIDPFD

SEQ ID NO: 29159 - protein, 289 aa, Oryza sativa
MPNGSLDDRLACKDNSKPLSWQLRTRIASNICSALIFLHSNKPHSIVHSDLKASNILLDGNNVAKLSGFGVCRMLTDEFKATTTLYRHTHPKGTFVYIDPEYAISGDLTPLSDVYSFGIILLRLLTGRSGFGLLKDVQRAVAKGCLQAILDSSAGDWPLMHAEQLSRVGLRCCEIRRKNRPDLQTEVWTVLEPMLRSASSMLCSLSFKSVSEDFGNVPSYFICPIQQDVMRDPLIAADGFTYEAEAIREWFDSGHYTSPMTNPDLPHRDLLPNHALRSAIQEWLQSNAD

SEQ ID NO: 29160 - protein, 131 aa, Oryza sativa
MSWQAYVDDHLMCEIDGNHLTAAAIVGHDGSVWAQSPNFPQYKPEEITGIMKDFDEPGSLAPTGLFLGGTKYMVIQGEPGVVIRGKKGTGGICVKKTGLSLILGIYDEPMTPGQCNMIVERLGDYLIEQGC

SEQ ID NO: 29161 - protein, 70 aa, Oryza sativa
MSSYGSGFITLCLPSREQHSMDLMEEITRNQQLHRTTMDHRKAPQEECLRSNIQITSPRLQTSSPTTITA

SEQ ID NO: 29162 - protein, 17 aa, Oryza sativa
MLVLHIYNIVGKKYIHC

SEQ ID NO: 29163 - protein, 104 aa, Oryza sativa
MSVPFESANPDLVCYFSLLKLDVICSTIGAEAWVKKLKWDGLKNFLSLPRQPLKCGSSKGTKAFVRSYKNLHFYWILGAGHFVPADQPCIALSMISSITQSPAS

SEQ ID NO: 29164 - protein, 204 aa, Oryza sativa
MKLSIQSFARKLSLPSPKRTWSSGGGSSKRDGGMSKNGSGVKRTISRSEASSFASASSESESSSDDALMARSTPRSVLPAEISRRELEAVLRRLGHGEPDDEELDAVAAIAAEAEAGGGEDELMEAFKVFDADGDGRITAEELRGVMVAILGGDGDGCSLDDCRRMIGGVDADGDGFVGFQDFARMMMAATATATATADGPRSW

SEQ ID NO: 29165 - protein, 115 aa, Oryza sativa
MEEFWGFYLTQHSKPGTRRWHFLGTLAALACALLAAVSGRAAPLLAAPVLGYGMAWYSHFFVEGNRPATFGHPVWSFLCDLRMFALILTGRIDAELARLRLQPPHDAAAASAHRD

SEQ ID NO: 29166 - protein, 156 aa, Oryza sativa
MEIGQSNRAVGSTALNERSSRSHSILTVHVRGLDVKNGSTSRGCLHLIDLAGSERVERSEATGDRLKEAQHINKSLSALGDVIFSLAQKNAHVPYRNSKLTQVLQSSLGGQAKTLMFVQINPDIESYSETISTLKFAERVSGVELGAARVTERGKT

SEQ ID NO: 29167 - protein, 32 aa, Oryza sativa
MHTEARRWVDVWSRSNSVSNISSICTYSGIKR

SEQ ID NO: 29168 - protein, 272 aa, Oryza sativa
MLVSLTAPKLCAKKFTGPHHFLGGRFVPPPIVSKYKLHLPPYPGTSMCVRIGKAPSVDISSLRENYISPELLENQVMPDPFDQFVRWFDEAVTAGLREPNAMALTTADKEGKPSSRMVLLKGVDKQGFVWYTNYGSQKAHDLSENPNAALLFYWNEMNRQVRVEGSVQKVPEEESEKYFHSRPRGSQLGAIVSKQSTIIPGREVLQQAYKELEQKYSDGSVIPKPDYWGGYRLTPKPFEFWQGQQSRLHDRLQYSLREVDRSTVWHIERLSP

SEQ ID NO: 29169 - protein, 29 aa, Oryza sativa
MKLPIDLRRFPSAARKNLNMEFLFGSFTI

SEQ ID NO: 29170 - protein, 130 aa, Oryza sativa
MAANSSNDTVNVASEVSSILSKLNDHLAGADEAKEPAGTSIITLAGENNGATMEVAGDVEDLVVVEAGGDEDDDEEEESVVSAYTNSNYQALNNSVLVAGSCAVKDPGVHVVIVEHVDEIRDYDDDVRDE

SEQ ID NO: 29171 - protein, 19 aa, Oryza sativa
MELDRTNCVSHDLPSQVLH

SEQ ID NO: 29172 - protein, 328 aa, Oryza sativa
MALEAVVYSHGGHFGGYGGGLMGGAPAAPWDVFAAAGGGGSWDDPGLFAAEASLDVIQGVDEWEVDQDQHASSSSKVAARPPVKAAAAAGKRKRRRAKAAKNREEIESQRMTHIAVERNRRRQMNEYLAVLRSLMPPSYAQRGDQASIVGGAINYVRELEQLLQTLEARRTIKDHIDGGAGESPSPFAGFFAFPQYSTATSGHGGGGDAHSRIVVKPAETTTTAAGGGAGAAIADIEASMVESHASVKVQARRRPRQLLKLVAGLHQLGLTTLHLNVTTVAAMAMYSFSLKVEDGCKLGSVEEIATAVHEILERMQEEQAFADAKTSL

SEQ ID NO: 29173 - protein, 109 aa, Oryza sativa
MSAEQPEQAAPAAQEATVQIVYLDRPADADPEEFHIRTLAPVLGSEEKAKEAVLYHYKHAASGFSAKLTPQQVEELKKQPGVLQVVPSQTYQLHGPGAGTGTMNTFSLV

SEQ ID NO: 29174 - protein, 44 aa, Oryza sativa
MLRLLISTRLDVFLLWTSSNNDWTGPPSSSVVVVVKGSTKLSTT

SEQ ID NO: 29175 - protein, 177 aa, Oryza sativa
MAAAGVSGLAVGCLVAATAALLVAGASAQTGCTAALINLYPCLNYISGNETSPTRTCCSQLATVVQSQPQCLCAAISGDSSSSIGGVTIDKTRALELPKACNVVTPPASRCNSAGGNTPGAATTTSPATQTPGATGAGTGVGSKTTPTAPYLINGGASLRGATGLVLALAAVAVYAV

SEQ ID NO: 29176 - protein, 45 aa, Oryza sativa
MARTLETFLRIALRPRSMLPLVVDLPWATSLVETEGVILVHCSTG

SEQ ID NO: 29177 - protein, 52 aa, Oryza sativa
MHYNCVQIPVYCIVKSAFMRIEIRQNKMPFQGLFRKYNFALMCITKLCLPVF

SEQ ID NO: 29178 - protein, 114 aa, Oryza sativa
MKFISAYLMAYLAGNSSPTAEDLTTILESVGCEIDNAKMELLLSQVSGKDITELIACGREKFASVPSGGGGVAVAAAAPAAGGAGGAPAAEAKKEDKVEEKEESDDDMGFSLFD

SEQ ID NO: 29179 - protein, 21 aa, Oryza sativa
MVLYICRHSVTRDLKDLSACK

SEQ ID NO: 29180 - protein, 235 aa, Oryza sativa
MYAERTAKGNVLEPEGLVEIKFRPKELEECMLRLDPELIKLSTRLREMKKENAGLSEMDTTRRSIIARMKQLMPIYTQVATRFAELHDTSARMAAKGVIGKVVDWEESRSFFYRRLRRRVTEDALAKEIREAAGEQLSQKSALDYIKKWYLSSNGSDGNSEKWNNDEAFFAWKDDPTNYENQLEELKAERVSKWLSRLAESPDVKALPNGLSIVLNKMNPSKREQVIDGLRQLLG

SEQ ID NO: 29181 - protein, 261 aa, Oryza sativa
MAATASSSSTATASPLLLPSARRPLPSSKPWLPDGRAFRGSRALSSAARRCFCCCCRCEAAGEAGTAPPPQQRGVDDGGVVCTSATRSRRRSVLGVAVGVSSALALGLAAFDDALAAGLPPEEKPKLCDAACEKDLENVPMVTTESGLQYRDIKVGEGPSPPIGFQVAANYVAMVPNGQIFDSSLEKGQPYIFRVGSGQVIKGLDEGILSMKVGGLRRLYIPGPLAFPKGLTSAPGRPRVAPSSPVMFDVNLLYIPGLDDE

SEQ ID NO: 29182 - protein, 42 aa, Oryza sativa
MRITVACQIILCCSFGLMVLFFFRVYAIMHLMSFHRYYNCIG

SEQ ID NO: 29183 - protein, 356 aa, Oryza sativa
MDQIKREISVMKLVRHPNIVQLYEVMATKTKIYFVLEHVKGGELFNKVQRGRLKEDAARKYFQQLICAVDFCHSRGVYHRDLKPENLLLDENSNLKVSDFGLSALADCKRQDGLLHTTCGTPAYVAPEVINRRGYDGAKADIWSCGVILFVLLAGYLPFHDKNLMDMYKKIGKAEFKCPSWFNTDVRRLLLRILDPNPSTRISMDKIMENPWFRKGLDAKLLRYNLQPKDAIPVDMSTDFDSFNSAPTLEKKPSNLNAFDIISLSTGLDLSGMFEESDKKESKFTSTSTASTIISKIEDIAKGLRLKLTKKDGGLLKMEGSKPGRKGVMGIDAEIFEVTPNFHLVELKKHLNTVRS

SEQ ID NO: 29184 - protein, 64 aa, Oryza sativa
MEKLSEENIGLFTRREELRQRDTQLRQTVGELEQQLAETKKKCAQLADDLRIRKSQQQQQPPYI

SEQ ID NO: 29185 - protein, 79 aa, Oryza sativa
MRRRRRPRWTCSRTTTSSRSLRSTKNGMTRKKATRQFSNGRMTGMTMMSMTTSLCSSGKSWRASHRRTRTCGLVFSTFR

SEQ ID NO: 29186 - protein, 151 aa, Oryza sativa
MGRMHSRGKGISSSALPYKRTPPSWLKTAASDVEEMIMKAAKKGQMPSQIGVVLRDQHGIPLVKSVTGSKILRILKAHGLAPEIPEDLYFLIKKAVAIRKHLERNRKDKDSKFRLILVESRIHRLARYYKRTKKLPPTWKYESTTASTLVA

SEQ ID NO: 29187 - protein, 68 aa, Oryza sativa
MLILEVGIWLLPFTLLVAPVRRMVRLVQELQRIMLVVACDRSRRGGRPPTFGEVLSRLDRLDSATVIV

SEQ ID NO: 29188 - protein, 8 aa, Oryza sativa
MYHSKSVI

SEQ ID NO: 29189 - protein, 14 aa, Oryza sativa
MNIHFDAYLGQVLF

SEQ ID NO: 29190 - protein, 231 aa, Oryza sativa
MEIAPDFFDYFEAAAKLLDNDKTIMAVSSWNDNGQKQFVYDPKALYRSDFFPGLGWMLTKPTWIELSPKWPKAYWDDWVRLKEVHRDRQFIRPEVCRTYNFGEHGSSMGQFFRQYLEPIKLNDAHIKWNSEDLSYLKEDKFLIQFGKDVASATPLHGSDAALKAHNMDADVRIQYNDQEDFERIARQFGIFEEWKDGIPRTAYKGVVVFRYKSSRRRIYLVGPDSLSQLRV

SEQ ID NO: 29191 - protein, 356 aa, Oryza sativa
MDEDSKLIEELRAICDQQRAHIVQLERALKFEMAKQEESKKIISEEHQRSNEQITDLKYKLANCMNALESKNLELLNLQTALGQYYAESEAKERLGGDLAMAREELAKLSESLKVANQAIEISRREKEEVAARLSQVEGMLADGKRSMQKLENDNSRLRRALEQSMTTLNRMSLDSDNSVDRRIVIKLLVTYFQRNHSKEVLDLMVRMLGFSEEDKQRIGFAQSNAGKGVVRGVLGLPGRLVGGIVGGNSAGKPTQASQDNQSFADLWVDFLLKETEEREKREASETARLSQEENQTASTSNASSAQPSGHISNQAPGPSTSHHMFGRQDTEFATVPLTSSTYTSTQTPFSRPPQR

SEQ ID NO: 29192 - protein, 183 aa, Oryza sativa
MSSSSSRGPGQLSTAPSQIQPSLIPDSPIPTAPSQRRGGAVAREMTGGESEEGEADGNHPSVTLALQSPFTVEPCVVAFPRRCHHIKAPHAWSSFPEAGCNGRSLAKAPSRSGQLPQQQRVHGPLRCSVRGSGLFCQRGHCLIHHRRGFFPFPKCTTYLPLRKLSFSNEIDRIPMAVVTRRED

SEQ ID NO: 29193 - protein, 142 aa, Oryza sativa
MGKTRGMGAGRKLKTHRRNQRWADKAYKRSHLGNEWKKPFAGSSHAKGIVLEKIGIEAKQPNSAIRKCARVQLVKNGKKIAAFVPNDGCLNFIEENDEVLIAGFGRKGHAVGDIPGVRFKVVKVSGVSLLALFKEKKEKPRS

SEQ ID NO: 29194 - protein, 52 aa, Oryza sativa
MPKLQALLPAPHQEVQAFRDWWRQEGQGNISFLNYLLDTEVVGLLCFILQCY

SEQ ID NO: 29195 - protein, 219 aa, Oryza sativa
MVRPYHVHSKDPCSFDAGSIVDAWWNSGWWEGIVLQQGNDRRLQVYFPGEKQIADFCEDDLRHSREWAGGKWNSLGERKDITHLLPPTSVHEEGGLLSKPVSQEGNPSSKLESDKRCDDKSLGTKISHDQKHQKRVLADLTNALKFDNLKWRPRKRSRRSGSKRQSDTSSGSGSSSQGDMEESSPCGSFAVLNSAPDEEVCKSSGEPLFMRVSNLVMSR

SEQ ID NO: 29196 - protein, 105 aa, Oryza sativa
MKVKAVLVGRGPRRREREERGCVRRRREGGRRAPDPARGRVVGRRIGVGVGRRLLDPASRPPEGAAVRGGARRRPPRAVAHTCRCPLLPSPSHMPATASMAGIEE

SEQ ID NO: 29197 - protein, 91 aa, Oryza sativa
MGLQEEFEEFAEKAKTLPDTISNEDKLLLYGLYKQATVGPVTTGRPGIFNLKDRYKWDAWKAVEGKSKEEAMADYITKVKQLLEEASASTS

SEQ ID NO: 29198 - protein, 98 aa, Oryza sativa
MIEATLGKVSPPPNRHADPGSSPATVPLTPSPPPSAADADHRAPRSSPPPAAGFPPPPSFLLLHPHRPAPPPLPPHASPPLVSPPALHLRRHRYALVC

SEQ ID NO: 29199 - protein, 127 aa, Oryza sativa
MHLKGDAYLDPTESMTCPGNRLIIARRRRTPEEEEYLRGFNPRAPNFLPLELDPESEKVDLKHQMMDERKNAEEWMIDYALRRAVNNLGPARKKKVELLVQAFETVLPHDEEEKKGITPTRPVQACN

SEQ ID NO: 29200 - protein, 171 aa, Oryza sativa
MEEEEAGVRERRGVLKVVVASGTNLAVRDFTSSDPYVVVRLAAMNKKTKVINSCLNPVWNEEMSFSIEEPAGVIKFEVFDWDRFKYDDKMGHAFLELQPVAAAAKLRRALRLTTGETKLRKVAASVDNCLMCDSFVTYADGEIVLDARLRLRDVESGELFVTVKWIDANAK

SEQ ID NO: 29201 - protein, 272 aa, Oryza sativa
MASSRLLLLATLLATAAVLAASQKPKAATPTKATPASPGPAAAAADGPAPTNVTAVLEKSGKYTTFLRLLHESRVDTQINSQLMDSYNGLTMFAPTDAAFAALKPGTLNSLSSQDQIQLMLYCVLPRFYSLAMLTTLGGPVNTQASGADGPYKYKIKPSNSNVNISTGVNWALLSTVVSKDFPLAVYSVDKVPLPYELFGPKPPTPAPAPAPAPSKSKTKKHKKSAGIAEPPVADDASADDTTKKAAAPATAVSRWVVAAAGVLAGAILAAL

SEQ ID NO: 29202 - protein, 106 aa, Oryza sativa
MDTSGPAAFVNGEILKMFVGRRVRTVVQAQREEGGLLIGQSTDGHQLTIKGASGAPMSHYVEIIGIAEPNQAIRAEVCTDFGENFDPAPFNGLCKLANGQMKDLFL

SEQ ID NO: 29203 - protein, 33 aa, Oryza sativa
MNRLADFVGNHRSQKFFCCFIRKKGKKKEDRKI

SEQ ID NO: 29204 - protein, 26 aa, Oryza sativa
MPSSHSSACRVQFQAVEYYRAFGGRT

SEQ ID NO: 29205 - protein, 113 aa, Oryza sativa
MMKRLVVLRRREPAVRFSCCGVRYGECRRNHAASTGGHAVDGCREFIAAEDGGGGNSTSAVGVAAAALKCAACGCHRSFHRRVQVYEVAWDDDCASGDTSSSSPSSSSSLSSE

SEQ ID NO: 29206 - protein, 74 aa, Oryza sativa
MASSSFGVGGGLKLMRARGLLVFSEMMALLLICLVMMSSSVNTCQGRSLLAVSVGEKKVPHFEQPVGCFEPPCR

SEQ ID NO: 29207 - protein, 219 aa, Oryza sativa
MARPSQLYLLSYNSVQALGWFVALLRLLPCLAPPSSVHSSYAVAGDLVCLLQTWAILETIHAAIGLVHTSPLLAFLQWGGRTHFVLAVVRQIPEVQSSPSVFITFMAWSISEVIRYSHYALTTLKVCPPWLTYLRYTAFIPLYPIGVGPGEMWTMYQALPFVKERKLYSGFFGKFSMSYHSFLVAVLAVYPFLWMKLYLHVFKQRRSKLGKSGGATKRA

SEQ ID NO: 29208 - protein, 39 aa, Oryza sativa
MIARERSMIKLRVIEHEVVCVALQFVTVSSCFGHRSIGY

SEQ ID NO: 29209 - protein, 215 aa, Oryza sativa
MYPQLLEPSILPTYKAAPRDPSSSSHSPRQLAAAAMFGVVFPDHSFPLDVTAFAQVAPNSWALDLSTLSLAAAPRSAVVFLLPAAAAALPPGKAVAVYFQPAANRPFASLGALGPGRPSASLPLPEAGDEPEPPLGPAKLGVAVEDAAALPPPPDGQRAERVAPRVGENLFNFMQSFCGADGGKLVVPTDILDRWFHKFQERAKKDPSYLKTFDF

SEQ ID NO: 29210 - protein, 200 aa, Oryza sativa
MADGVLTRQIQLVTANLIEAIDGADGFQNTHQPQHYESAKFSIEQVVFILEKIHIMWESILPRSIYKRSMCYIPGSVFSRITKDMLLIDDMAAEETLQLQGLIHLALENLSSLFLSLVENEFLDHQTWIELDEIIRPLKKFRKLAELLDMSLKSITAAWESGELTNCGFTSSEVQNFVKAIFADSPLRKECLLWISRTPS

SEQ ID NO: 29211 - protein, 90 aa, Oryza sativa
MNIENNNVRQLSKPQVDAELDKMKSMSKEEAASFAARAVAEAEAAIAEAEEAARAAEAAEAEADAAKAFLDAVVTTMQNRNHASAMLRAC

SEQ ID NO: 29212 - protein, 75 aa, Oryza sativa
MAGHRNKDDLFVSWGEFARGLFCLAPGSPPNLVSRCPLVVLRSHCDYIVQRSRVNLNVELQRNNQGTKDNLHVQY

SEQ ID NO: 29213 - protein, 142 aa, Oryza sativa
MAASTVSGLAGATLARRPAFSTGFTTGARVSARNPLLTRNLERNGRITCMTFPQDWLRRDLNVIGFGLIGWIAPSSVPAINGNSLTGLFFSSIGQELSHFPSPPALDSPFWLWLVTWHLGLFLALTFGQIGFKGRTEGYFDK

SEQ ID NO: 29214 - protein, 82 aa, Oryza sativa
MAHFMDLRAFILRARVLKLYRQALRMTRRAPVHARDELRQTVRAEIEKNRRCDDKQKIKFLISEGLQRLKGLDEMLDMTGNS

SEQ ID NO: 29215 - protein, 25 aa, Oryza sativa
MMRLVLLTLFGLYQQMYLVMLMHRF

SEQ ID NO: 29216 - protein, 200 aa, Oryza sativa
MEHKDRQRHAAAAVAKPRQRSASFHGRGEAEQRHSLLKQRPRTQPDLLAGLRGQSFRRGGGEGRAPAGPSRVLLTVAVRQSMWPLHVMARAEWSVADLVAAAVELYIREGRRPLLPSADPAAFGLHFSQFSLQSLNPEEKLMELGSRSFFLCPKAAAAAVAAVSSGEDTGGLSGEDEANSAKKPSVLAPWLGFLHFWPLL

SEQ ID NO: 29217 - protein, 64 aa, Oryza sativa
MSGDIGRGATRETVSFAVHLSSMSNRPPGFYQLAGGTNSYTIESLKKAGLFQSTTFPGILFTFF

SEQ ID NO: 29218 - protein, 113 aa, Oryza sativa
MASSSNPDTMDTDPPGGGGTLSIAVERNPPESRLLQLGVKSWPKWGCPTGKFPVKFDARETCYLVKGKVRAHIKGSSECVEFGAGDLVVFPKGLSCTWDVLAAVDKYYKFDSS

SEQ ID NO: 29219 - protein, 116 aa, Oryza sativa
MEIESQFLVQMEYAEELANTIGQTVDATEMPDAIEIIFQTALNLGRHGGVDEMMGKSASAMVLYSKAVSMLRFLLTEAPSLALNPALSLTRDDRRRLRTYIEAVNARLVPLQYQRH

SEQ ID NO: 29220 - protein, 124 aa, Oryza sativa
MRRRVVPAAAAVSAQLAAALLLLLLLHAVTVVVVAGGGGSEVAVDRYAAAGAMLLLPRRRRQQLEDEVVFPAAMAVVGAEQLQQGGSFSGLTANKQACLQGHSCAAFAMPYTGHGCIYRNNCKQ

SEQ ID NO: 29221 - protein, 43 aa, Oryza sativa
METLSAFLHALRLHWVEFQNKFYEGDGYKFVPFAFASIIEEED

SEQ ID NO: 29222 - protein, 57 aa, Oryza sativa
MLELMTDNGMMKLFKTLDVDDDDGISKDDLMASLRKLPFMIALFAGRINGEVYIEIV

SEQ ID NO: 29223 - protein, 135 aa, Oryza sativa
MPATLLFLLHRQEPPRAMASLSMATTLPSLAGAAPAARKRSGVTYVEGMNACSGLKALNKVTLLGVRKTADYSFAKVVAKLSPAGGKSRGGAFGAQCNAAGEIFRIAVIMNGLVLVGVAVGFVLLRVEAAVEESE

SEQ ID NO: 29224 - protein, 144 aa, Oryza sativa
MAKRLLAHPKVTVHFNTVPTEAKGDGELLKAVRVKDTKTSEERDMDANGLFYAIGHLPATSLVKGQVDLDSDGYIITTPGTAQTSVKGVFAAGDVADKKYRQAITSAGTGCIAALEAERLLAEEEVLDPVDAAQANHYTGTDKE

SEQ ID NO: 29225 - protein, 7 aa, Oryza sativa
MLMVYLP

SEQ ID NO: 29226 - protein, 34 aa, Oryza sativa
MEVNILAFIATALFILVPTAFLLIIYVKTVSQND

SEQ ID NO: 29227 - protein, 38 aa, Oryza sativa
MFLSWASSSLCPLRRKHPRYGFLRIPLNTNSLSVISVI

SEQ ID NO: 29228 - protein, 51 aa, Oryza sativa
MMSQAMMGLALKGFLSPLEGCQLHHHRHVRASLLHRHNVRAHLLHQQNTIG

SEQ ID NO: 29229 - protein, 13 aa, Oryza sativa
MFFLLLCIQCIQC

SEQ ID NO: 29230 - protein, 123 aa, Oryza sativa
MAGGGTRSVPVAATCAPGRRTPSHLCLLLRLIYQLGFRGVVIRVAEENGGAACAWPSSAGWLRTSSRCASSRWAHLPIQRAVYCWPAPCTSQEGHGFATMNSSVQISISGPRRKFFMNWCLSI

SEQ ID NO: 29231 - protein, 41 aa, Oryza sativa
MSYTCFSFLESGKRERIQNALPAFFPKRSRLPVKKEYKLYM

SEQ ID NO: 29232 - protein, 194 aa, Oryza sativa
MALTSAQRIALTVSFFGLLSFLLGVIAENKKPPYGTPIKGKDVVICKFPSDPTIAMGSLSVVSLVLTTIVGHAAIFYPYKSKSVPRGALFRSASLSAFFVIAELVSALAFAMLLWATVTEGLHRSNNIHHDLDTQCPTAKTGLFGGAAFLALDAALFWLVCQMLALNARSDYLDEDDKGDYGQVFASDVDGTKV

SEQ ID NO: 29233 - protein, 129 aa, Oryza sativa
MKRNPRVTSSRRKCRKAHFTAPSSVRRVLMSAALSSELRHKYNVRSIPIRKDDEVQVVRGSYKGVPPPPAPRSRRSIRLVGRICWCSYCSPPPYLAFVSLSTASARSSCYLNTACCFIVENVSMRVLDP

SEQ ID NO: 29234 - protein, 100 aa, Oryza sativa
MSAAGEEDKKPAGGEGGGAHINLKVKGQDGNEVFFRIKRSTQLKKLMNAYCDRQSVDMNAIAFLFDGRRLRGEQTPDELEMEDGDEIDAMLHQTGGCLPA

SEQ ID NO: 29235 - protein, 107 aa, Oryza sativa
MSTAVKAFLNSPVGPKTTHFWGPVANWGFVLAGLVDMNKPPEMISGNMTAAMCVYSGLFMRFAWMVQPRNYLLLACHASNESVQLYQMSRWARAQGYLEKKEPEAQQ

SEQ ID NO: 29236 - protein, 340 aa, Oryza sativa
MPKRRRGVRPPPPDPSPAPATIDYSLTYKEIAASGAPGAVDFVKNHGLYLLLLETPSGFSIFSLCGVYIHLPDAIQNIWAMFGTYRSSHDVIWLKEFQKFDDKSSAINVDTGVNKQLTEMIMKWRRPRQKLVVGKPEYKSIIENTLGIPCLCDEVVMDVMWAMKRLIRYFVPTETPELAEEDSLTMSQGLRMFLSRYGFEIKPEMVYNDIVRAASIVFRCDAVEDLYEHLQHLGRHLKNVSGIDYENWGTVKLATAFKIICSRKIDKSDEMFSDDVRSKLLDDADKYKDLVFSTGCIANYKKILGLNVLRNDKMDQLAELVKVARIKAEHVRVPENVPEN

SEQ ID NO: 29237 - protein, 170 aa, Oryza sativa
MDQVLNKVGSYWFSKRASKEIDSIGDDISSISTSIGTGAKWMVNKIKGKMQKALPDLLKEYDMPAGLFPRDATNYEFNEETKKLTVYIPSACDVGYKDSSVLRFFTCVTGYLEKGKLSDIEGLKTKVLVWTKVTAIKTEGSKVHFTAGVKKTRSRDAYEVVRDGIPIDKF

SEQ ID NO: 29238 - protein, 363 aa, Oryza sativa
MYPNYTSYDPVLTGKCHVNFSALSYMMDKTASDCSIPLAPLVADVICCPQVNSLMNIFQATYGAGNNTLVLNQASANACFSDVMSILASKGANTNIPELCTLRPSNLTDASCPVKDISTFEKIVNVSKLLDACSDVDPLKECCRPVCQPAIVEAAVHISSGGANMFGSSSISGSDAGINVVSDCKGVVHSWLSMKLSSEESNTAFRVLSGCKVNKVCPLEFDDPSSVVKACGKASSSTPSCCGALHSYIATRQKQIFVTNLQAINCATMFGSMLQKAGVSNDIYELCDIDLKDFSLQAFGQQGCLLRSLPTDIVFDNATGISFTCDLSDNIAAPWPSSSSVQSLSLCAPEMSLPALPVAPTSG

SEQ ID NO: 29239 - protein, 99 aa, Oryza sativa
MAAPGSGSGGIPIKADQDSDGSAQSTADMTAFVQNLLMQMQTRFQSMSENIISKIDEMGARIDELEQSINDLKVEMGTEGITPTKPKDEESKPAGSSAE

SEQ ID NO: 29240 - protein, 28 aa, Oryza sativa
MLMIYQYIICYIFLFYSLVMYHLNGLCS

SEQ ID NO: 29241 - protein, 63 aa, Oryza sativa
MTSYSLQPLVSEFLSLSSVIASTTIGQLSSKAFAHVISKDSSSLIFRDLYRFYWIHPTYINKK

SEQ ID NO: 29242 - protein, 151 aa, Oryza sativa
MPDLGGDGDEVEKAPTLSPAAVACARGWMRRRATATDCGNGERRARQGCPPLESGDDGRPPPGSSGGGRPSPDLGRIHRRRWEESSVRQATLQSSPPLPPPASSCPLPSSWLSSTSSPRGRRRPPMDVDSDLADKGKPTQMDLEDQTTGML

SEQ ID NO: 29243 - protein, 305 aa, Oryza sativa
MMTSRMFSAMQMLIMVVVALAGLAAGARAGDIAIYWGQNGNEGTLAQTCATGNYRFVIVAFLPVFGKGQTPVLNLAGHCDPASNGCTGVGADIKSCQSLGIKVMFSIGGGVGNYGLSSRDDAKQVAAYLWNNYLGGTSPSRPLGDAVMDGIDFDIESGGGMYWDDLARYLKAYSRQGSSKKPVYLTAAPQCPFPDASLGVALSTGLFDYVWVQFYNNPPCQYSSSNGVGNLASAWKQWTSIPAGRVFLGLPAAAEAAGSGFVETSDLVSKVLPVVKKSPKYGGIMLWSRYYDGLTGYSDKVKSSV

SEQ ID NO: 29244 - protein, 243 aa, Oryza sativa
MDYSKPHSIHVPESDIGYHFGTLLDNQEGVDVICNVAGEKFHAHQLVLAARSSFFRSELFEHESDEEKNEVDTSNEIKEIVIDDMEPKVFKAVLHFMYRDNLVGDDELSASSSDCSIFDTLAGKLLAAADRYELPRLRLLCESYLCKHISVNSVATTLALADRHHAMELKSVCLKFAAENLSAVIRTDGFDYLKDNCPALQSEILRTVAGCEEECSSGGKSQSVWGQLSDGGDTSGRRVRPRV

SEQ ID NO: 29245 - protein, 349 aa, Oryza sativa
MAVDRDIFGISGPTYLNPVNWNCEHNRRSVAACLVQAVYVLERDRQLGRQSVEALGPPWWEFFHFELIRKLVDDADLSIFGAIFEFNPPSSKESSADNAPRFVIAFRGTITEKETISRDIALDLHLVQNGLHRTSRFTIAMQAVQNVASVFPGSNIWLAGHSLGAGMAILTGRNMVKKGVLLESYLFNPPFVAAPIERISDERVKHGFRIARSVITAGLAIAMKGKGEGSSQRSVAEDSFHILSSWTPYLFVNPGDHICSEYIGYFQHRKNMEDLGAGFIEKLATQNSIGDLFYKALGWESEPLHLLPSADLIVNVSPSPDFKYAHGISQWWQPELNLQCSKYRYSVGA

SEQ ID NO: 29246 - protein, 152 aa, Oryza sativa
MSLIAGEDFQHILRLLNTNVDGKQKIMFALTSIKGVGRRFSNIACKKADIDMNKRAGELTPEELERLMTVVANPRQFKVPDWFLNRKKDYKDGRFSQVVSNALDMKLRDDLERLKKIRNHRGLRHYWGLRVRGQHTKTTGRRGKTVGVSKKR

SEQ ID NO: 29247 - protein, 165 aa, Oryza sativa
MSSVFSGDETAPFFGFLGAASALVFSCMGAAYGTAKSGVGVASMGVMRPELVMKSIVPVVMAGVLGIYGLIIAVIISTGINPKAKPYYLFDGYAHLSSGLACGLAGLAAGMAIGIVGDAGVRANAQQPKLFVGMILILIFAEALALYGLIVGIILSSRAGQSRAD

SEQ ID NO: 29248 - protein, 284 aa, Oryza sativa
MKMKALLPVAAMLLLVSGQLAAPVTADGYVGQLAVFWGRHKEEGSLREACDTGRYNIVVITFYNVFGYQRGRYGLDFSGHPVAAVGADIKHCQSKGVQVLLSIGGQGGEYSLPSSQSASDVADNLWNAYLGGRRAGVPRPFGDAVVDGIDFFIDQGGADHYEQLARQLHGRGVLLTATVRCAYPDSRMEAALATGVFARIHVRIFGDDQCTMFPKDAWEKWAAAYPRCTVFLTVVASPEQDEGYMFQKDLYYGVQQFIDKEPNYGGIAIWDRYYDKKANYSGEG

SEQ ID NO: 29249 - protein, 168 aa, Oryza sativa
MVVLSGAHTVGRSFCSSFLDRIWNNTTAIVDTGLSPGYAALLRALCPSNANASTPITTAIDVSTPATLDNNYYKLLPLDLGLFFSDNQLRVNATMNALVTRFAANETEWKQRFADAMVKMGNIEVLTGGAGQIRLNCNVVNPSSSSSSPVVQLAGEEEAAAAGAVAAS

SEQ ID NO: 29250 - protein, 277 aa, Oryza sativa
MQATIRTIGSTVRLFFHDCFVDGCDGSVLITSTAGNTAERDAPDNLSLAFEGFETVRSAKAAVEAACPDQVSCTDVLAIATRDAIALSGGPFFPVELGRLDGMRSSASNVAGKLPQPNNTLSELVAIFKSNGLNMSDMVALSAAHSVGLAHCSKFSDRLYRYNPPSQPTDPTLNEKYAAFLKGKCPDGGPDMMVLMDQATPALFDNQYYRNLQDGGGLLASDELLYTDNRTRPTVDSLAASTPDFYKAFADAIVKLGRVGVKSGGKGNIRKQCDVFN

SEQ ID NO: 29251 - protein, 253 aa, Oryza sativa
MPEAEAAAVVTGGGSRAAGPADYERFITLFSPEGRLCQLDYAFNAVKLAGITSVGVRGDDSVYVLTHRKEDKLHDPTTITNLFAITDRIGLLATGMPGDGRAIAQEARNAAAEFRFKWGYKMSPCMLAQWIADRAQIRTQHAQIRPYGVVSMIFGIDEEKGTPELFTCDPAGQFFAHKATSAGPKEKEVMNFLEERMKSKPSLSSGTTKGLAKSALKHVLEGDFYAREFELGFIKKGDPTVTLHPVKFKRTRR

SEQ ID NO: 29252 - protein, 332 aa, Oryza sativa
MARAAHGGGGMGLLVAFVALVGVGGGARAQLRQNYYGSTCPNAESTVRSVISQHLQQSFAVGPGTLRLFFHDCFVRGCDASVMLMAPNGDDESHSGADATLSPDAVEAINKAKAAVEALPGCAGKVSCADILAMAARDVVSLTGGPSYSVELGRLDGKTFNRAIVKHVLPGPGFNLDQLNSLFASNGLTQTDMIALSGAHTIGVTHCDKFVRRIYTFKQRLGYNPPMNLDFLRSMRRVCPINYSPTAFAMLDVSTPRAFDNAYFNNLRYNKGLLASDQILFTDRRSRPTVNLFAANSTAFFDAFVAAMAKLGRIGVKTGSDGEIRRVCTAVN

SEQ ID NO: 29253 - protein, 229 aa, Oryza sativa
MAGAPRGLVLLGVCAVLMVLAVSGEAASVVIGTAKCADCTRKNMKAEDAFKNLQVAIKCKNGNGEYESKAAGKLDGSGAFSVPLDTDLHSSDCIAQLHSATNEPCPGQEPSKIVPLSEGTFVTVAGKTSYPSALCASATICGPIKKKIIDHFHKKPVPPKPDPKPEPPKPKPEPEHPILDHFHKKEKDFFDHFHKKPVPPKPEPKSEPKPQPKPQPAPEYHNPSPPAKH

SEQ ID NO: 29254 - protein, 395 aa, Oryza sativa
MGLHKEASSSSSRLDAAPLLPHHGHGGGGAGHHLSSQPKTFANVFIAVVGSGVLGLPYTFSRTGWVAGSVLLLAVAALTFHCMMLLVACRRRLAYDHPKIASFGDLGAAVCGPAGRHVVDAMLVLSQASFCVGYLIFISNTMAHLYPVGDSSPSSPLLTAKAIFIWVMLPFQLGLNSIKTLTLLAPLSIFAGPTEILYGLGVAVYAFEGIGMVLPLEAEAADKRKFGGTLALSMAFIAVMYGLFGAMGYLAFGAATRDIITTNLGTGWLSVTVQLGLCINLFFTMPVMMNPVYEVAERLLCRKRYAWWLRWLLVMVVGLMAMLVPNFADFLSLVGSSVCVLLGFVLPAAFHLKVFGAEVGWPGLAGDVAVIVVGTALAVSGTWTSLAQIFSSSDV

SEQ ID NO: 29255 - protein, 256 aa, Oryza sativa
MASPEGSTWVFDCPLMDDLAAAAGFDAAPAGGFYWTTPAPPQAALQPPPPQQQPVAPATAAPNACAEINGSVDCEHGKEQPTNKRPRSESGTRPSSKACREKVRRDKLNERFLELGAVLEPGKTPKMDKSSILNDAIRVMAELRSEAQKLKESNESLQEKIKELKAEKNELRDEKQKLKAEKESLEQQIKFLNARPSFVPHPPVIPASAFTAPQGQAAGQKLMMPVIGYPGFPMWQFMPPSDVDTTDDTKSCPPVA

SEQ ID NO: 29256 - protein, 214 aa, Oryza sativa
MKITALLVLKSPGDGDSSSGGGGGEQEQEQQAAVVVANATDVSHFGYFQRNPAREFILFVARTVAARTPAGRRQSVQHEEYKVHCYNQNGLCAIAFTDDHYPVRSAFSLLNTVLEEYHKTFGERWRTAKTDNTQPWQYLDDALTKYQDPAEADKLLKIQRDLDETKIILHKTIDSVLSRGERLDSLVEKSSDLSAASQMFYKQAKKTNSCCTIL

SEQ ID NO: 29257 - protein, 127 aa, Oryza sativa
MRARSAMGGFEFLAPPPPNYYDGVRRRAGDVLSEEQINECQELGVLVDRDDQGVLLQIFTKPVGDRPTFFLEMIQRIGCMEKDESGQEYQKGGCGGFGKGNFSELFKSIEEYEKSLEAKQAPTVQGS

SEQ ID NO: 29258 - protein, 311 aa, Oryza sativa
MRIYSADREALDALRGSGIDLALDVGERNDVGQLAANADSWVQDNVKAYYPDVKIKYIVVGNELTGTGDAASILPAMQNVQAALASAGLADSIKVTTAIKMDTLAASSPPSAGVFTNPSVMEPIVRFLTGNGAPLLANVYPYFAYRDSQDIDLSYALFQPSSTTVSDPNGGGLSYTNLFDAMVDAVRAAVEKVSGGGSSVVDVVVSESGWPSDGGKGATVENARAYNQNLIDHVAQGTPKKPGQMEVYVFALFNENRKEGDATEKKFGLFNPRQDTGLPNHFLKNYSNTEYVLRRTVYIMCLIWCLRIKIC

SEQ ID NO: 29259 - protein, 211 aa, Oryza sativa
MQAILAAAMAAQTLLFSATAPPASLFQSPSSARPFHSLRLAAGPAGAAAARALVVADATKKAVAVLKGTSQVEGVVTLTQDDQGPTTVNVRVTGLTPGLHGFHLHEFGDTTNGCISTGPHFNPNNLTHGAPEDEVRHAGDLGNIVANAEGVAEATIVDKQIPLSGPNSVVGRAFVVHELEDDLGKGGHELSLSTGNAGGRLACGVVGLTPL

SEQ ID NO: 29260 - protein, 232 aa, Oryza sativa
MLRRDPRQRLTAKQVLEHSWIQDHADQSQDSCGHCHEINLRGEDAGSCSFSTPLASCSRDVSFNTGGPVACQSMSEEACSPTFACRSSFSAFVAENAPSCALSGFSFGGVCEPCNAVFPSPVASMPSFSFFCGQEPGEPESSPDGDALGEKAHCDATVVALVSSSAPRTAEVLRAAVRANPSRAIGMNSRRNHTIGAGEREHLDVAVAESVIRWASCTNLSTTHSLRASLVC

SEQ ID NO: 29261 - protein, 171 aa, Oryza sativa
MKKTGWRTYRRPDDKSGGHGVGWSPIIPYSFKVRDGWEEVPVSIADLGGTEIDLRFANSKQGRLFVVVAPVRRFAELDDATIEKIGTPEKVIDAFGPEVIGENVEGKVLSMATAEYSGRTYYQFELEPPHIFITATAAGNRLYLFNVTANGLQWKRNYNDLKQIAESFRVV

SEQ ID NO: 29262 - protein, 215 aa, Oryza sativa
MAPMKLYGSTLSWNVTRCVAVLEEAGAEYEIVPLDFSKGEHKAPDHLARNPFGQVPALQDGDLFLWESRAICKYVCRKNKPELLKDGDLKESAMVDVWLEVESNQYTPALNPILFQCLIRPMMFGAPPDEKVVEENLEKLKKVLEVYEARLTKCKYLAGDYISVADLSHVAGTVCLGATPHASVLDAYPHVKAWWTDLMARPSSQKVASLMKPPA

SEQ ID NO: 29263 - protein, 220 aa, Oryza sativa
MECVVQGIIETQHVDALEVLLQGLSGVPKERVRVHELCLKSGPNLGVVPSEVRLLCDLAQSTPSWTIRHVGGAMRGAGAEQISVLVRSIVESKASNNVLRYFYGIGYKLDHEVLKGGFAFRFHRGAQITVTVTSVSKMTKLHATNEAVPITPAIQLVEITAPAAADNYNDVVSAVTSFCEYLAPLLHLSKPGNSTGIVPTAGAAAASLMSSGGGGGGKTL

SEQ ID NO: 29264 - protein, 230 aa, Oryza sativa
MEAAVATPSLLFSSPTPRRPSSCLPPPPPCSSSSSSYASHGFKLLQPQLLFINRLTSRNSNGSSRRSISILSLRCSSSGTDSASSSATSERWVLEPAGDGDWRHIGYRVARPGGFQIASEAAVTVGRVPEQADIVLSVATVSGTHARLEKKEGSLLVTDLESTNGTYINERRLTPGFPTPIDPGSLLIFGDIHLAMFRVSKMIVDVSSDTNEAEQEAETAQVSAATQQTN

SEQ ID NO: 29265 - protein, 261 aa, Oryza sativa
MAGASAKVVAMLLSVLATYGFAAGVVYTNDWLPAKATWYGQPNGAGPDDNGGACGFKNTNQYPFMSMTSCGNEPLFQDGKGCGACYQIRCTNNPSCSGQPRTVIITDMNYYPVARYHFDLSGTAFGAMARPGLNDQLRHAGIIDIQFRRVPCYHRGLYVNFHVEAGSNPVYLAVLVEFANKDDTVVQLDVMESLPSGKPTRVWTPMRRSWGSIWRLDANHRLQGPFSLRMVSESGQTVIAHQVIPANWRANTNYGSKVQFR

SEQ ID NO: 29266 - protein, 263 aa, Oryza sativa
MALVSASSSTTAVAALPGAARASSFLGGAGRSGRLLLRQAESSSARASFAVRAAAPDRPIWFPGSTPPPWLDGSLPGDFGFDPLGLGSDPESLRWNVQAELVHCRWAMLGAAGIFIPEFLTKIGFLNTPSWYTAGEQQYFTDTTTLFIIELILIGWAEGRRWADIIKPGCVNTDPIFPNNKLTGTDVGYPGGLWFDPLGWGTGSPEKIKELRTKEIKNGRLAMLAVMGAWFQAEYTGTGPIDNLFAHLADPGHATIFQAFTPK

SEQ ID NO: 29267 - protein, 255 aa, Oryza sativa
MAARKFFVGGNWKCNGTGEDVKKIVTVLNEAEVPSEDVVEVVVSPPFVFLPQVKGLLRPDFSVAAQNCWVRKGGAFTGEISAEMLVNLQVPWVILGHSERRALMGESSDFVADKIAYALSQGIKVIACIGETLEQREAGTTMEVVAAQTKAIAEKISDWTNVVLAYEPVWAIGTGKVATPAQAQEVHDGLRKWLVTNVSPAVAESTRIIYRGSVNGANCKELAAKPDVDGFLVGGASLKPEFVDIIKSATVKSSA

SEQ ID NO: 29268 - protein, 118 aa, Oryza sativa
MARAQLVLVALVAAALLLAGPHTTMAAISCGQVNSAVSPCLSYARGGSGPSAACCSGVRSLNSAASTTADRRTACNCLKNVAGSISGLNAGNAASIPSKCGVSIPYTISPSIDCSSVN

SEQ ID NO: 29269 - protein, 236 aa, Oryza sativa
MAMATSISAGFGGEPGAVLAPSASVLPAPRRRNPATSSKAQFSSFPRGRSCNIMLTPKHLGIEHQSCSKSSIQTFALSRNDFSPIAQEVEGFLHNIVNMGFLDRLKLAWKIIFPAPSIKENSNANIAKQRLKMILFSDRCEVSDEAKKKIVENIVEALSEFVEIESRDNVQVDISTDAGLGTVYSVTVPVRRVKPEYQESEEQYRGKIVGVDFKDTGETSGSVDVTFDFFVPNKNY

SEQ ID NO: 29270 - protein, 181 aa, Oryza sativa
MAPAASSKSNPRVFLDIAIGGEWVGRVVIELLADKVPDTAENFRRLCTGERAGRSGKSRLHYKGSAFHRVVPGFMCQGGDITAGNGTGGESALDGAARHFPDEGFAVKHDGPGVVSMANAGPNTNGSQFFITVDKAPWLDGRHVAFGRVVAGMGAVRAIDRTGTWSGKTVKPVVITDCGVL

SEQ ID NO: 29271 - protein, 281 aa, Oryza sativa
MPPPLEARDYIGLAASPASSSSSCCASTPVAEVVGAHLALRLGLPGSESPARAEAEAVVVDAALTLGPAPPPRGGAKRGFVDSLDRSEGRRAAATAGDDERGVREEEEEEKGLGEAAAGAPRAAKAQVVGWPPVRSYRKNTLAASATKTKGEDQGKSEVGCCYVKVSMDGAPYLRKVDLKTYSSYEDLSLALEKMFSCFITGRSSSHKTSKRDRLTDGSRADALKDQEYVLTYEDKDADWMLVGDLPWDLFTTSCRKLRIMRGSDAAGMAPRSLEQTGQNK

SEQ ID NO: 29272 - protein, 45 aa, Oryza sativa
MLGLVGVLPQPETPMLPAAGVFVSGVRLRWPVTGRLLRPWRPLLF

SEQ ID NO: 29273 - protein, 219 aa, Oryza sativa
MTPVKVFGPAQSTNVARVLLCLEEVGAEYEVVNVDFTVMEHKSPEHLKRNPFGQIPAFQDGDLYLFESRAIGKYILRKYKTREADLLREGNLREAAMVDVWTEVETHQYNSAISPIVYECIINPAMRGIPTNQKVVDESAEKLKKVLEVYEARLSQSTYLAGDFVSFADLNHFPYTFYFMGTPYASLFDSYPHVKAWWERLMARPSVKKLAAVMAPQGA

SEQ ID NO: 29274 - protein, 301 aa, Oryza sativa
MVSKVGLFSSNETKDDISTANLKYLLVPYYLGEMTERVAQEDRIPVLKASQDHLKEFISICEALELISEDELEISRQKQPDTMANRRAQKVARFKRQKAAETKLLEIKERKERRRRSLRAAALSAPIEAGEEDAFEDDGEEEREAWLATISLALCKAFDLLDMLKKEEEMLPAVKERKAKDGNAFAREMLDERTKRAEAWHHNAANRAPYSKPADPITCATFAQDVIEGRASVSQAHEHKHQPLIFGPASLVGGGLTSERERMAAQVFQPSYRLPTMSIEEADWKDDNPRGAGNKKLTPCG

SEQ ID NO: 29275 - protein, 105 aa, Oryza sativa
MAEAAGTRASQQQEEAAGIENGGGKDQLPEDTSKLNITVLWLAIYFRLMDGFGKLALAWATVVLLGGFSTLIKPKDFWFVTIIVVMQITRCVSIRHPYIYKVEVN

SEQ ID NO: 29276 - protein, 53 aa, Oryza sativa
MNQARSQLRQWRMLLSSSTRLFLMQSKLNFVGIMCQLSKRLNCCCCSMSIFLC

SEQ ID NO: 29277 - protein, 18 aa, Oryza sativa
MQTALGFTYFLKPVILSH

SEQ ID NO: 29278 - protein, 323 aa, Oryza sativa
MRALAVVVVATAFAVVAVRGEQCGSQAGGALCPNCLCCSQYGWCGSTSAYCGSGCQSQCSGSCGGGGPTPPSGGGGSGVASIVSRSLFDQMLLHRNDAACPAKNFYTYDAFVAAANAFPSFATTGDAATRKREVAAFLAQTSHETTGGWATAPDGPYSWGYCFKEENNGNVGSDYCVQSSQWPCAAGKKYYGRGPIQISYNYNYGPAGQAIGSNLLSNPDLVASDATVSFKTAFWFWMTPQSPKPSCHAVMTGQWTPNGNDQAAGRVPGYGVVTNIINGGVECGHGADSRVADRIGFYKRYCDMLGVSYGANLDCYNQRPFNS

SEQ ID NO: 29279 - protein, 48 aa, Oryza sativa
MMYSRETVFEPHREFSSVVCDFSSRQRDMSMLEHQKSNMLYCTCNAVS

SEQ ID NO: 29280 - protein, 133 aa, Oryza sativa
MAIVTCLIGLQFGHIIIHFEKHKGRIINWLIPSFSMLALAFSMDFIGIRMNKPLYTISYALATSGAAGLLFAGIYTLVDVYGFRKLTIPMEWMGKHALMIYVLVACNILPIFIHGFYWREPKNNLLKFIGVGA

SEQ ID NO: 29281 - protein, 120 aa, Oryza sativa
MMGGTEVGWQTGRWGDDLDDGDTCGLGAIAIFSPRLDNMSVLLAIRPAREEGSSLRTKVHRGERSRVVVPSARAVVLKISGGAGGGKVGLPVLDGALAFPQATTASQFLSAGDFVHLNEP

SEQ ID NO: 29282 - protein, 205 aa, Oryza sativa
MTAAEIGKQEEELRAQIEEQKLNEGDEPVVVEDDDDDEDDDDEDDKDDDDAEGGDASGRSKQSRSEKKSRKAMVKLGMKSITGVSRVTVKKSKNILFVISKPDVFKSPTSDTYVIFGEAKIEDLSSQLQTQAAEQFKAPDLSSMLSKPEASTAAQEDDEAVDETGVEPKDIELVMTQATVSRSKAVKALKAANGDIVTAIMELTT

SEQ ID NO: 29283 - protein, 150 aa, Oryza sativa
MSKRKTREPKEENVTLGPTVREGEYVFGVAHIFASFNDTFIHVTDLSGRETLVRITGGMKVKADRDESSPYAAMLASQDVAQRCKELGITALHIKLRATGGNKTKTPGPGAQSALRALARSGMKIGRIEDVTPVPTDSTRRKGGRRGRRL

SEQ ID NO: 29284 - protein, 195 aa, Oryza sativa
MDGMNAKKTVFIIGATNRPDIIDPALLRPGRLDQLIYIPLPDEQSRLQIFKACLRKSPVAKDVDLNALAKYTQGFSGADITEICQRACKYAIRENIEKDIERERRSKENPEAMEEDEVDDIAEIKAAHFEESMKYARRSVSDADIRKYQAFAQTLQQSRGFGSEFRFERTEAGAGAAADPFASAAAVADDDDLYS

SEQ ID NO: 29285 - protein, 246 aa, Oryza sativa
MMMENSREQQPESSPANNNSKKKKKKKTASRFRRVCVFCGSSPGKKASYQVAAVQLGQQLVERGIDLVYGGGSVGLMGLVSRAVHGGGGHVVGVVPNGVLPRELIGETLGEVRAVGSMHQRKAEMARESDAFIALPGGYGTLEELLEVITWAQLRIHHKPVGLLNVDGYYDSLLAFIDKAVHEGFVSPPARRIIVAAPTASDLLCKLEEYVPPPHDATALKLTWEMSTVSEQHAGSIYSPKPDMAR

SEQ ID NO: 29286 - protein, 198 aa, Oryza sativa
MAIPTILGSLKLTPSPPSATPVRSSASSSLHFHLANAGAAALVAASLLVADPALAFKGGGPYGQQVTRGQDLTGKDFSGQTLIRQDFKTSILRQANFKGAKLLGASFFDADLTGADLSDADLRGADFSLANVSKVNLTNANLEGALATGNTTFKGSNIYGADFTDVPLRDDQREYLCKIADGVNTTTGNATKETLFCK

SEQ ID NO: 29287 - protein, 64 aa, Oryza sativa
MILSENCNFICLACFGPACYTDMQYVCWCKPGPHVIHMGGGGGGSVVKAVRRFKATHHCLSAEA

SEQ ID NO: 29288 - protein, 180 aa, Oryza sativa
MGFIGDTIESIRSMQVRQVLAQIISLGMIVTSALIIWKGLIVVTGSESPVVVVLSGSMEPGFKRGDILFLHMSKDPIRTGEIVVFNVDGREIPIVHRVIKVHERQESAEVDILTKGDNNFGDDRLLYAHGQLWLQQHHIMGRAVGFLPYVGWVTIIMTEKPIIKYLLIGALGLLVITSKE

SEQ ID NO: 29289 - protein, 158 aa, Oryza sativa
MAMAASRLLWASRAASYLKISTFPRAFSTVLKDLKYADTHEWVKVEGDSATVGITDHAQHHLGDVVYVELPEVGSSVSQGKNFGAVESVKATSDIYSPVSGEVVAVNDGLGDEPGLVNTSPYESGWIIKVKVSDSGELNSLMDDAKYSKFCEEEDSKH

SEQ ID NO: 29290 - protein, 135 aa, Oryza sativa
MAGRGKAIGAGAAKKATSRSSKAGLQFPVGRIARFLKAGKYAERVGAGAPVYLAAVLEYLAAEVLELAGNAARDNKKTRIVPRHIQLAVRNDEELTKLLGGATIASGGVMPNIHQHLLPKKAGSSKASHADDDDN

SEQ ID NO: 29291 - protein, 240 aa, Oryza sativa
MDASSSASAGGEADAMALVQGYNADELAIAGEFLTTWLPFLSAGLCASCADSLRSRVSSLLPPQAEESPSSPPPRIDQIEPSGWESDPATAHPQHLPFEPSGWDSDPPQLPPEQEQQKQKPQPAEKPRKSWADMAQEDELAAAAEEDAAAAAADDGEEGSEAGRPGVQLTREQRELRRFRNVVRRKDFICFERVNGRLVNILAGLELHCGVFSAAEQKRIVDYVYDLQEMGKHGELGGEI

SEQ ID NO: 29292 - protein, 242 aa, Oryza sativa
MDGPSATRTLDLASALEVGPGGASRASVEASGTCNRSVLTIAFQFSYENHLRESVAAMAKSYVRAVMASVQRVAVAIAPSRLGPQIGMKHPPASPEALTLASWIGRSYRAHTGADIRWSDTEDADSPLALLWKHSDAILCCSLKPAPMFTFANNAGLDILETTLVNLQDISLEMILDDEGRKTLCSEFPKIMQQGFTYLPGGVCKSSMGRQASYEQAVAWKVLSDDDAPHCLAFMLVNWTFM

SEQ ID NO: 29293 - protein, 38 aa, Oryza sativa
MVATQVGVQKISGITLYAVQEKKLYEPLSDIEIFVDAE

SEQ ID NO: 29294 - protein, 111 aa, Oryza sativa
MVAAKKTKKSTDNINNKLQLVMKSGKYTLGYKTVLRTLRNSKAKLVIISNNCPPLRKSEIEYYAMLAKVTVHHFHGNNVDLGTACGKYFRVCCLSIIDPGDSDIIKTTGEQ

SEQ ID NO: 29295 - protein, 113 aa, Oryza sativa
MAPSQPKSGLFVGINKGHVVTKRELPPRPSDRKGKSTKRVTFVRNLIREVAGFAPYEKRITELLKVGKDKRALKVAKRKLGTHKRAKKKREEMAGVLRKMRSGGGHAHTEKKK

SEQ ID NO: 29296 - protein, 168 aa, Oryza sativa
MAVIAAAGGEGDAGVIAHVVVDVDESCAAAADDDDRSRRPSTGCRICHLGGGGDGEMAAESGSGRLVRLGCGCRGELAAAHRRCAEAWFSVRGNRRCEICGETAENITGWGGGGKEFMKRWHATAGVDVEGSSKACSGFCKSHSLCNLLIACLIIVIVLPWLLHNHVL

SEQ ID NO: 29297 - protein, 89 aa, Oryza sativa
MCGSPFSESELQNLESTKHKAQKKIDLYTAHCCQSCYFQILPAGENLNEHFFSLLPKLWTGKMDTISDSHSLLRDQIEEYLLEENDDGN

SEQ ID NO: 29298 - protein, 49 aa, Oryza sativa
MTLWHMSCTESSYKLMVHPLNIAQHLVMKAAKVLLIGTQSLALMAFGKI

SEQ ID NO: 29299 - protein, 62 aa, Oryza sativa
MHTWLIARPVTTLSVSLIYSSIDYTYLRARDQFLYHMHMYFCMYMEYYLYYVRVRCGLYIDI

SEQ ID NO: 29300 - protein, 47 aa, Oryza sativa
MLEAEEHYRLIASHLIISLGRYDNYPYLCSRYVILYYKVVSSVGSLL

SEQ ID NO: 29301 - protein, 91 aa, Oryza sativa
MILANTTAIGMHPNVNETPLSKQALKSYAVAFDAVYTPKETRLLREAAECGATVVSGLEMFIRQAMGQFEHFTGMPAPDSLMRDIVLTKIQ

SEQ ID NO: 29302 - protein, 52 aa, Oryza sativa; identical to SEQ ID NO: 29194

SEQ ID NO: 29303 - protein, 98 aa, Oryza sativa; identical to SEQ ID NO: 28783

SEQ ID NO: 29304 - protein, 66 aa, Oryza sativa
MSQLKSNRDAYDGYVPMAYDDYLEKVSQNGEWGDHVTLQAAADKVFIQISLPAVSFMALQIRADKD

SEQ ID NO: 29305 - protein, 23 aa, Oryza sativa
MSSVEDCFFIGSCIIYVVIYSAI

SEQ ID NO: 29306 - protein, 53 aa, Oryza sativa
MVSIELLSGFQNLSRNYKRRPSMSLLSCIIKYTFFCLDLMFSYKNEGLFTCQW

SEQ ID NO: 29307 - protein, 124 aa, Oryza sativa
MASTLTNVGLSTPAAAASSLVRPVAGAGRVVFPRVGRGGFAAVRASGPATPPDISDKMSESIDKAKEACAEDTASGECAAAWDEVEELSAAASHARDKLKETSDPLEAYCKDNPETDECRTYDN

SEQ ID NO: 29308 - protein, 42 aa, Oryza sativa
MFYKEILLDYVHHDITRKWVFIYFKILLIIMAKETVVYFDLF

SEQ ID NO: 29309 - protein, 61 aa, Oryza sativa
MRSTRSKALRYWLSRAISLGGRNPAPMRRLSSLLALASRLSIPFLTRLMSTVTMLHPCTSI

SEQ ID NO: 29310 - protein, 331 aa, Oryza sativa
MIREALSEAQVVLSTNTGAADPLIRRTCCFDLVIIDEAGQAIEPSCWIPILQGKRCILAGDHCQLAPVILSRKALDGGLGKSLLERASSLHNGLLTTRLTVQHRMNDSIASWASKEMYHGLLKSSHSVASQTLADSPVVKATWITRCPLLLLDTRMPYGALDTGCGEQIDLSGTGSFYNDGEADIVTQHVLNLVHCGVSPTAIAVQSPYIAQVQLLRERLEEYPGLSGVEVSTIDSFQGREADAVVISMVRSNPLGAVGFLGDSRRMNVAITRACRHVTVVCDTSTICHSTFLARLLRHIRRYGQVKHVVPGSLDGVSGLGFSQPTLPSIS

SEQ ID NO: 29311 - protein, 31 aa, Oryza sativa
MIWLEEILLEARFFSLKLLLCFMQLKKLLAC

SEQ ID NO: 29312 - protein, 44 aa, Oryza sativa; identical to SEQ ID NO: 28829

SEQ ID NO: 29313 - protein, 25 aa, Oryza sativa
MFIVMNIEGVYCDLPINQHKRVYVI

SEQ ID NO: 29314 - protein, 41 aa, Oryza sativa
MGVVLSSKETNGHQPSGCMSVSTKLELSEVVITKDGPYIKH

SEQ ID NO: 29315 - protein, 20 aa, Oryza sativa
MQLCICLNFESVCSCVHGPD

SEQ ID NO: 29316 - protein, 42 aa, Oryza sativa
MPSRSKTRLLPRCSSCLNPQSTNIIMFPYNNNCSAASPSTLL

SEQ ID NO: 29317 - protein, 97 aa, Oryza sativa
MNVTFGVQIKLQSVKLAMKYLKRVSSELEAIKGGPDEEELMLQGVRFAFRVHQFAGGFDVDTMRAFQELKEKASMCRIQRQEQNRHLRRQQKLVARA

SEQ ID NO: 29318 - protein, 160 aa, Oryza sativa
MCRFLISTPFSRRRGERKAEAGRMARSVSYVSAAKLLAMARSNPRVAIIDVRDEERSYQAHIGGSHHFSSRSFAARLPELARATGDKDTVVFHCALSKVRGPSCAKMFSDYLSETKEESGTKNIMVLERGFNGWELSGQPVCRCTDAPCKGTCSPEEPEL

SEQ ID NO: 29319 - protein, 143 aa, Oryza sativa
MTKVRLPPQTRPTTDRRLLSAAHHGLAKNKRERVRERLRERVREREKKLLSRSHRRGGARSGKREGGREAERARCTTSASRSPTASPSWPAACWATPAAAAPPPWPAARAPARSSSSRASSASRPSRSAATPTSPSPSRPYVH

SEQ ID NO: 29320 - protein, 69 aa, Oryza sativa
MPAISVTNYQASATGRDHHAHKVNISSNMEFSGKDTNNKDYIMKLGSGCSTGTGDTQSTSFIRWVSVWP

SEQ ID NO: 29321 - protein, 139 aa, Oryza sativa
MANSSSGVAIHDDCKLKFNELQSKRMHRFITFMMDNKGKEIIVDKIGDRTTSYEDFTSSLPEGDCRFAIYDFDFLTAEDVPKSRIFYILWSPDNAKVRSKMLYASSNERFKKELNGIQLEVQATDAGEISLDALKDRVK

SEQ ID NO: 29322 - protein, 49 aa, Oryza sativa
MTISRNKLGGGGSIAGELGGGRRSVANKLRGGGSSSAGSGEADYSSACL

SEQ ID NO: 29323 - protein, 277 aa, Oryza sativa
MWSKDIIVANITLKNSPFWHFHPYDCTNITVSNVTILAPISSAPNTDGIDPDSCQDVLIENCYISVGDDAIAVKSGWDQYGIAYGRPSRNIVIRNVMARSLVSAGISIGSEMSGGIANVTVEDVRIWESRRGLRIKTAIGRGGYIRDISYRNMTFDNVRAGIVIKVDYNEHADDGYDRDAFPDITNISFKEIHGRGVRVPVRAHGSSDIPIKDISFQDMSIGISYKKKHIFQCSFIEGRVIGSVFPKPCENLDLYNEQGQLVKRAAMVNSTEVDYDI

SEQ ID NO: 29324 - protein, 174 aa, Oryza sativa
MEALQRQHTADASQLVARYKGPDEIEEINKWISQIIKDGDTREIPYFTSKVPDLVPEETSKEWIKSTKSIRSAGNSVKQRIQSSGFHFGDYLTDPRIGPALLMSACISMGIIWYKSNQRTQTTEDGAPPKDKTKKRRPRPKLSTSLFGQPEYPADADPEPKDARQWEMTDSDSD

SEQ ID NO: 29325 - protein, 105 aa, Oryza sativa
MQKTWFGVCFSFCIAAARDKVTLQTSSCSDLSGSVSSRPMTVLQVGVCYAILLETHGLAVAYSNIFWFFGKLGTKRSEVNFIALYTLFSQPVRCTKHSSVFCLKF

SEQ ID NO: 29326 - protein, 330 aa, Oryza sativa
MAAATEAASTSEAEAEGRGKPIVVRVKRKPSQTRPDAFWLEINERPVKKAMLDFSSLSVSDPSSAPNKASEEPRVKKLLVQHIETVHHSEAVQDVLHSLLHSDLDAKEIKSKTKEWNNRTKQDKKQDQLRSAARQRHEDLGRNARFAQIWRSRKGDRNEVDESLREICHLYDAVQVDSDEEKHPTEPRITSFEEGAILCNFLPLIREHLPSAAEEIESDIISLAQSEDSDVYDIYTVTEVDDDTTMEGTSSAPYPLLQVDNDDDVCYDDDDPYGTDDSNAEDNPLYDYPEELSEDEDDDSNSENPFSELDGSDPEYEKEEVEEERDEDGR

SEQ ID NO: 29327 - protein, 229 aa, Oryza sativa
MVDQWGYGSKGKTDFSAPKHKQQSMILVDVKTPGVQIRRPLLVFGFDDAPHGHAEITFENVRVPATNILLGEGRGFEIAQGRLGPGRLHHCMRLIGAAERGMNLMVERALSRTTFGKKIAQHGSFLADLAKCRVELEQARLLVLEAADQLDRHGNKKARGILAMAKVAAPNMALKVLDMAMQVHGGAGLSSDTVLSHLWATARTLRIADGPDEVHLGTIAKLELQRARM

SEQ ID NO: 29328 - protein, 154 aa, Oryza sativa
MAAKAAFPAPAGDEPAIGIPYHPAAAGAQGGYYYAPDPYAAGMPPPNAIYAGAPKGVPLQQTMFRDTPAPFHCQACGAAAVSSLRSKPSLASVVACMMPFMMGVCFLCPSMDCLWHKYHYCPSCGEKVAEFKKSDPCLVVDPTRWSEPSFAVPA

SEQ ID NO: 29329 - protein, 153 aa, Oryza sativa
MRELAGSPETWSGLSLRVGQLVFAAASVCATASALGFAAYTAFCYLIASMGLQALWSLGLACLDCYALKFKKDLHSAVLLSLFVVGDWVTAILSFAASCSAAGVVVLFDRDIYACRNPQLPCGRFELAIACAFLSWAFSATSALVMFWLLASL

SEQ ID NO: 29330 - protein, 269 aa, Oryza sativa
MRCIFGDPKNAPPPLVRLTGRSLVSAIWKGEGSLVDELLESMEPHVEEDVLTDLKAKIRAHDPSGSEDIEGEIRSSLLWLRDELRTLSCTYKCRHDAAADLIHMYAYTKCFFRVRDYKTVKSPPVLISPLDLGPKYADKLGPGFQEYCKTYPENYCLGQLIYWYSQNAEPESRLTRARKGCMSLPDVSSFYVKSVKPTQERVYGSRTVRFMLARMENQAQRPWPKDRIWVFKSDPRFFGTPMMDAVLNNSPLDKEMVHWLKTRSNVFLG

SEQ ID NO: 29331 - protein, 27 aa, Oryza sativa
MLDLELLLFLKGCQKLYSFKYVYLFFW

SEQ ID NO: 29332 - protein, 305 aa, Oryza sativa
MALTTFSISRGGFVGALPQEGHFAPAAAELSLHKLQSRPHKARRRSSSSISASLSTEREAAEYHSQRPPTPLLDTVNYPIHMKNLSLKELQQLADELRSDVIFHVSKTGGHLGSSLGVVELTVALHYVFNTPQDKILWDVGHQSYPHKILTGRRDKMPTMRQTNGLSGFTKRSESEYDSFGTGHSSTTISAALGMAVGRDLKGGKNNVVAVIGDGAMTAGQAYEAMNNAGYLDSDMIVILNDNKQVSLPTATLDGPAPPVGALSSALSKLQSSRPLRELREVAKVRPHKRSTLTLDCPLPRKARE

SEQ ID NO: 29333 - protein, 58 aa, Oryza sativa
MNTNFLVELFSRRVHASGQMTTCRATYLRCCFPTMMRLPIPVTFPSTTLRKFCRPIWC

SEQ ID NO: 29334 - protein, 39 aa, Oryza sativa
MDAMSTPTSLLSMFWSVVYHTSSHYSSKFEPWYDWQYLG

SEQ ID NO: 29335 - protein, 340 aa, Oryza sativa
MASESLQCKVLALRVSIHCEGCKKKVKKVLQRVEGVYRCDVDGRSNKATVTVTGKVSADTLVRKLRRAGKHAEQWPEEQQQQQPNGGQCQEETKNQAAEPGMSGEPAEPEKPASGDAAEPSDPKVTHEEPKKVAGEGAAAVAPAEDGGTEITDANVSESAGDGGGGGGGVETVKAQQPSEPKRRRKQQPPQQQKEEKAGEATMATAAAAAASTQGNHTSHHFPAAPLQQQPVHVMSYNVARPSSSAAYYAAARPASAARPPPPLPPAPPQEHSYAYSPYYSQSQPSPYRYGGYYSYYYYGGGGGGGGGGQRTPQRSAASPARNSYGDLFSDDNANSCSVM

SEQ ID NO: 29336 - protein, 524 aa, Oryza sativa
MATRVKDVARRSSKKYVDEALYRRLFRRGSTPQAVREEVDGFLDSRKRAFKWEVGVCVRRLRKQALYRPALKLSEVMARRGMNPTVSDQAIRLDLVAKSRGIAAAEKYFLDLPETSKTHLTYGALLNCYCKDLMTEKAEALMGKMKELNFAFTAMCYNSLMTLYTKVNQHEKVPSVIQDMKADDVLPDIYTYNVWMRAPAARVDIKGVERVIEEMKRDGRVTPDWTTYSNLASIYVDAGLFEKAEAALKELEKWNTSNDLEAYQFLITLYARTQNLVEVHRVWRSLKRNQPRRANMSYLNMIQALANLKDLPGAEACFKEWEAQYINPPKTNTKAPGTAETSSNESDVKATKDKGTDGELKHPKYDIRVANAMIKAYITEGMFDKAVAVKKRAKMRGGRLNAKTWEIFMEHYLKEGDLKMVHWCADRAIKKGHSAGRIWVPPHEVTETLMDYFEKNKDVDGAEKFVEVLKKVQKDLGTVVFEPLVRTYAAAGKKLPGMRHRLKIENVEVSEETAKLLDSVCIDQ

SEQ ID NO: 29337 - protein, 67 aa, Oryza sativa
MTEAPFVPREKLFKQQQYFQNLTKHTYLKGRYDVITSVAIPLALAGTSLFMIGRGVYNMSHGIGKKE

SEQ ID NO: 29338 - protein, 47 aa, Oryza sativa
MLLLRRGIYSSVAFLSFVLLCEGRLVAGIVFELVDRFSKIGPHVGIL

SEQ ID NO: 29339 - protein, 7 aa, Oryza sativa
MCNHSRV

SEQ ID NO: 29340 - protein, 65 aa, Oryza sativa
MAMEKMVEGRLRKYFEEVVLLEQKYVVNDSTNIKSALNDLSKEVGSKVTVGNFARMEVGEGVSEA

SEQ ID NO: 29341 - protein, 40 aa, Oryza sativa
MIQEELTRLSKEDDDEDEDEDGNEDAEKKKPQHQAKEVVA

SEQ ID NO: 29342 - protein, 373 aa, Oryza sativa
MRYTLQNRFAEAEVETVAAEKKKVERETLAEKMLNEQELILDATKERSKMLEQQVRENAKLRELLMDRGQIVDALQGEMLGIFDKISQLQLRVDKQLPEPLLSSMSSSVNSADNIAQLQCRVDDPQHSVDDSLQLASPRLSSSFKSTDSTAQAHCRVDEPQISVDESLLPVDECEQLKLILPRLSSSVMSAQSQYRVDEPLLPVDEVLQLASSSLSSSLKSGDNIAQLLGVLDVHLPVDELLQLPSLILSSSVKSSDSIAQFQQKADADEMLQSSSLASSEKPATFKNWSSASDTITQFQQRANADESLPLPSSSLASSEKPATFKSTWSSAAESNSVFSGDEEIDDASFHDSIDLDDSWDLVDDEAIYMCAN

SEQ ID NO: 29343 - protein, 359 aa, Oryza sativa
MAANGEGGGDPAARRRWDLTNKGAESIPMVKEAVEMSTDEESDGVVICPPDGNNDDREEAISSNNHDNCQEGEVTCVKDPVIDSETQEDKCVNQDSVKLIDQEKSGPPKSPSKPGISGSDRSKRTVPQPFALSSQRKSHGGNSKAAHPSGNGENSGDKSNSSPASLTKKTAPITPKKIAQPDHMLHHQEEDSCSVTSSTTTSTRAGKTKATVGVAPSFVCADRADKRKEFYTKLEEKHKALEAEKNEAEARKKEEQETALKQLRKSLVIRAKPMPSFYQEGPPPKAELKKVPPTRAKSPKFTRRRSCSDAPPTPEAANTTAASSRSHRHSIANPKDANRVQCSPKNGVAAKTRAVKPVS

SEQ ID NO: 29344 - protein, 69 aa, Oryza sativa
MSIVEVLNDAMVLHTVLRWHMSKGIEMLVQNGRFAFYMLKFPKYLHAGGRATAKVSKILKIVKDCYIML

SEQ ID NO: 29345 - protein, 138 aa, Oryza sativa
MKTLHLRVQCQNNTAMRMAQFLEEHPKIARVYYPGLPSHPEHHIAKSQMTGFGGVISSEVAGDFDATRRFIDSVKIPYHAPSFGGCESIIDQPAIMSYWDSKEQREIYGIKDNLIRFSIGVEDFEDLKNDVVQALDKI

SEQ ID NO: 29346 - protein, 231 aa, Oryza sativa
MALRTLASRKTLAAAALPLAAAAAARGVTTVALPDLPYDYGALEPAISGEIMRLHHQKHHATYVANYNKALEQLDAAVAKGDAPAIVHLQSAIKFNGGGHVNHSIFWNNLKPISEGGGDPPHAKLGWAIDEDFGSFEALVKKMSAEGAALQGSGWVWLALDKEAKKLSVETTANQDPLVTKGANLVPLLGIDVWEHAYYLQYKNVRPDYLSNIWKVMNWKYAGEVYENATA

SEQ ID NO: 29347 - protein, 10 aa, Oryza sativa
MINFVKYVNL

SEQ ID NO: 29348 - protein, 43 aa, Oryza sativa
MLETPGPYLLDIIVPHQEHVLPMIPSGGAFKDMILDGDGRTVY

SEQ ID NO: 29349 - protein, 18 aa, Oryza sativa
MVIGILSILLFFKIILIC

SEQ ID NO: 29350 - protein, 357 aa, Oryza sativa
MALAPASSGSGPVVTEVEMNAGADQGATGTVRATVVQACTVFYDTPATLDKAEKLVAEAAGYGSQIVLFPEVFVGGYPHGSTFGLTIGNRSAKGKEDFHKYHAAAIDVPGPEVTRLAALAGKYKIFLVMGVVERVGYTLYNTVLFFDPLGKYLGKHRKVMPTGLERVFWGFGDGSTIPVYDTPIGKIGAVICWENRMPLLRTAMYAKGVQIYCAPTADFSPSWQASMTHIAVEGGCFVLSANQFCRRKNYPPAPEYTFGGLDEEPSPESVIWPGGSSIVSPSGTVLAGPNYEGEGLLTADLDLGEIARAKFDFDVVGHYARPEVLSLTVKTESKLPVSFTSAAEKNSAAKSDGISRT

SEQ ID NO: 29351 - protein, 264 aa, Oryza sativa
MSDDVIWHCIRHNHCSFMAKITTGIFCRNPYNATGICNRSSCPLANSRYATIRDHDGIFYLYMKTAERAHLPNKLWERVKLPRNYEKAMEVINKHLEFWPKLLVHKIKQRLTKMTQYRIRMRKLQLKVREKVMTMPRKETQRHLRRMDKAEKAAQLEKNIESELKERLKKGVYGDIYNYPFKEFDTILEMEKDDVAPTEEEEEEEVEYVEGDDEMDDMEDIEDFGGLPDDDEDDDNDGETDEDDLLDEPVAKKPKGRGSDLRSK

SEQ ID NO: 29352 - protein, 362 aa, Oryza sativa
MVSSQDSPLSMGDILSSLDAGISLPGPGPEYSVDRQSIKSNGTQMHVKRSNFWGRNNGRKSQQSELADSSGEEELAIQRLEITKNDLQIRIAKEARGNAILQASLERRKQALHERRLALEQDVSRLQEQLQAERDLRAALEVGLSMSSAHISSSRSMDSKTKAELEEIALAEADVARLKQKVAELHLQLNQQRQHQYGSLADANDRYQHLPNHLPQNFVQSGFDMNLAFCNQEKKQRNEQGPAGASHWRSIKQHVLPHGSSRPFSRKHSMDASSSDSREASTSMPADGNSMSVNIPKATEGVEYGRQAPVASSTLVELTTRLDFFKERRSQLMEQLHSLDLGNGSANHGFPYKSSSPWNSPR

SEQ ID NO: 29353 - protein, 314 aa, Oryza sativa
MQAVMASDFAIAQFRFLERLLLIHGHWCYRRISVMICYFFYKNVTFGVTIFLYEAFASFSGKPAYNDWFLSLYNVIFTSLPVIALGVFDQDVSQRLCLQYPGLYQEGVQNILFSWRRILGWMANGVINAILIFYFCTTAFGIQAFRQDGQVAGLDALGVLMYTCVVWVVNCQMALSVNYFTIIQHIFIWGSIAVWYLFLLAYGAVDPRFSKSAYMVFIEQVAPALSYWLVTLFAVMATLIPYFCYAAIQIRFFPMFHNKIQWKRHLGKAEDPEVARQLSSRHRTSSHQRMVGISARRDGKAMQVTKETELQVQG

SEQ ID NO: 29354 - protein, 362 aa, Oryza sativa
MVRGRKTQGDIISWVDEKIIPVNGAKFALDVVSQTLLDIGSKSFTHLITVLERYGQIISKLCPNEEMQLLLMDEVSAYWKNSTQMIAIAIDRMMGYRLLSNLAIVKWVFSPANVDQFHVSDRPWEILRNAVSKTYNRIFDLRKEIQTLRKGLQAAKEASEKAARELEEAKSIIEIVDGQPVPSENPGRLRRLQARADKAKEGEVTTEESLEAKEALLARGLEESKELLRLLFKSFVEVLTERLPPISADGDVPNLRAGDPNVNSSARDPEATTMEIDNENGGDNDSQLNGQNKKISHNVGELEQWCLCTLGYLESFSRQYATEIWSHIAMLDQEIFVGNIHPLIRKAAFSGLCRPTSEGSHL

SEQ ID NO: 29355 - protein, 14 aa, Oryza sativa
MRTMRCICSMQYPL

SEQ ID NO: 29356 - protein, 271 aa, Oryza sativa
MVNGIRVYNVFLQVDPGKYRDISSGFGVLLQEQGLGGFFKGWMATLVGYSSQGACKFGFYEFFKKCYSDIAGPEHAEKWKTFIYLAASASAEMIADVALCPMEAVKVRVQTQPGFARCLTDGFPKIVQSEGAFGLYKGLLPLWGRQVPLYKHAVPKPKDECSKPLQLAVSFAGGYIAGVFCAAISHPADNLVSFLNNAKGGTMADAVRTLGVWGLLTRGLPLRIIMVGTLTGAQWATYDAFKVFVGLPTSGGFIPSPAATDLRQVDHEKRS

SEQ ID NO: 29357 - protein, 585 aa, Oryza sativa
MEGLRGGGHGEAAVDGGDERWVEDSSVDYQGRPPLRAATGSWKAAMFIILIEFSERLSYFGLATSLMIYLTKVLQEEMKFAAKNVNYWTSVTTLMPLVGGFLADGYLGRFSTVLFSTLIYLSGLILLAISQLSPRLKPERNLHLHETLFFVAIYLVSVGTGGHKPALESFGADQFDDGHAAERVQKMSYFNWWNCALCAGVLLGVTVIVYLQEKVGWGAAAVVLAAVMAASLAVFLAGWRHYRYRVPEGSPLTPLVRVLVAAARKRHLHLPADANELYEVKPQNIKRRLLCHTDQLRFLDKAAVVEHDGGEERRGAWRLATVTQVEETKLVLAMVPIWVATLPFGITAAQVSTFFIKQGSVMDRRMGPHFTLPPASTFAMAAIGMIVAVAVYDKVLEPYLRRLTGGERGLSILKRIGVGIAFTIVAMAVAATVERQRLRSASPASMSVFWLVPQFLLMGIGDGFALVGLQEYFYDQVPDSMRSLGIGLYLSVIGAGSFLSSQLITAVDRVTSHGGAAAGWFGKDLNSSRLDLFYWLLACIGVANLVFYVVIATRYSYKTVMAGGKVVDDKAGDIECAAAAAAAAY

SEQ ID NO: 29358 - protein, 150 aa, Oryza sativa
MGSDTEAEKKKTPVALAPIAKPLAGKKLCKRTLKLVRRASEAKCLKRGVKEVVKSIRRGQKGLCIIAGNISPIDVITHVPILCEEANIPYVYVPSKEDLATAGTTKRPTCCVLVLTKPAKGELEEDVKEKLKTDYDQVMSEVAEVTSSMF

SEQ ID NO: 29359 - protein, 273 aa, Oryza sativa
MGTLGRAIYTVGKWIRGTGQAMDRLGSTIQGGLRVEEQLSRHRTIMNIFEKEPRVHKDVFVAPSAAVIGDVEIGHGSSIWYGSILRGDVNSIHIGSGSNIQDNSLVHVAKANISGKVLPTIIGNNVTIGHSAVLHACTVEDEAFVGMGATLLDGVVVEKHSMVGAGSLVKQNTRIPSGEVWVGSPAKFLRKLTEEEIAFIAQSATNYINLAQVHAAENSKTFDEIELEKMLRKKYAHKDEEYDSMLGVVREIPPELILPDNILPNKAQKAVAH

SEQ ID NO: 29360 - protein, 251 aa, Oryza sativa
MQHNKCTLSENCHKVRLKNWKDEKEKESGNFLSISELLSQSKLHGVGVYASISKMVLTGSLASHFNRKFSVIERFSLKEHDDIFRDLVTAGCTLCGSPLYPKNLHGENTYPIDCPKSPKYLHVIGQIYKPFMIYVRDQSGQIPVLVRNKAAEILFANIIADDVSECYKNHHPMLLDTCDCGSLNTSGGETGIIKRKRTKEKPDWHLIWLIIIKCLLNQHKNSPFCLQISVNTDKSVEDGRFELVSLTMTIP

SEQ ID NO: 29361 - protein, 36 aa, Oryza sativa
MYFILFLQSSLMYFSNSFPICCGVSRWDVIFLFIFW

SEQ ID NO: 29362 - protein, 99 aa, Oryza sativa
MFIVGILLIQLTILASIRWRASVSSLQMNGQILAWMGQHMQLQTSRKHWKAWQNISLVLWKCDGLTHTSHSLTRPLNSRYIFRMIGWKFWDVESLSRKF

SEQ ID NO: 29363 - protein, 10 aa, Oryza sativa
MATKLWRMGT

SEQ ID NO: 29364 - protein, 400 aa, Oryza sativa
MASRMALRPNDVTLRLTPPLAAAARRNRRAAAGGVRVYAVASGAVSTKVENKKPFAPPREVHVQVTHSMPPQKIEIFKSLDDWARDNILSHLKPVEKCWQPQDFLPDPASDGFHDEVKELRERAKEIPDDYFVCLVGDMITEEALPTYQTMLNTLDGVRDETGASPTAWAVWTRAWTAEENRHGDLLNKYLYLTGRVDMRQIEKTIQYLIGSGMDPRTENNPYLGFIYTSFQERATFISHGNTARHAKDFGDLKLAQICGIIASDEKRHETAYTKIVEKLFEIDPDGTVLAFADMMKKKISMPAHLMFDGEDDKLFEHFSMVAQRLGVYTAKDYADILEFLVSRWKISDLTGLSSEGNKAQDYLCTLAARIRRLDERAQSRAKKAGTLPFSWVYGREVQL

SEQ ID NO: 29365 - protein, 113 aa, Oryza sativa
MRSLGQNPTEAELQDMINEVDADGNGTIDFPEFLNLMARKMKDTDSEEELKEAFRVFDKDQNGFISAAELRHVMTNLGEKLTDEEVDEMIREADVDGDGQINYEEFVKVMMAK

SEQ ID NO: 29366 - protein, 369 aa, Oryza sativa
MARVSAAAVAVLVVAFAAAAAAQESCNTELPGVLVGNYSGLNCQPVWNNFVLRYHQDKNNVLRVVLSTMYSTGWVGMGFSRDGLMVGSSAMVGWIGRKGLPHVKQFALRGKTSGKVVVNRGFLVSNSNNHDHTVVVQQARIYLAFQLQFSYRLTHQHIILAFGSSIPVNNKLTKHQDKTSFTFDFTTGKAFVDGSFPYGLRRAHGALNLFAWGVLMPIGAILARYFRRMDPLWFYLHVGVQFVAFIIGLAGVVAGVALYNKIQADIPAHRGLGIFILVLGILQILAFFLRPNTDSKYRKYWNWYHHWSGRLVLFFAAVNIVLGIHVGGGDNSWKIGYGFNLAIILLAVIGLEFMLRTRWSKESEPTPTY

SEQ ID NO: 29367 - protein, 423 aa, Oryza sativa
MDEPTSGLDARAAAIVMRTVRNTVNTGRTVVCTIHQPSIDIFEAFDELFLMKRGGEEIYAGPLGHHSSELIKYFESIPGVSKIKDGYNPATWMLEVTTIGQEQALGVDFSDIYKKSELYQRNKALIKDLSQPAPDSSDLYFPTQYSQSSLTQCMACLWRQNLSYWRNPPYNAVRFFFTTVIALLFGTIFWDLGGKVTKSQDLFNAMGSMYAAVLFIGVMNCTSVQPVVAVERTVFYRERAAGMYSAFPYAFGQVVIEIPYTLVQATVYGIIVYAMIGFEWTAAKFFWYLFFMVFTLLYFTFYGMMAVGLTPNYHIASIVSSAFYAIWNLFSGFVIPRPRVPIWWRWYCWACPVAWTLYGLVVSQFGDIETPMEDGTPVKVFVENYFGFKHSWLGWVATVVAAFAFLFASLFGFAIMKFNFQKR

SEQ ID NO: 29368 - protein, 85 aa, Oryza sativa
MNKHSDPVLRHHVSRSQAVLVADLVVASRRGSSLSPHSHWPVAALSSSPPAPSSSHVSRPAFRPPPARVTICIVAAQVKVLVLLV

SEQ ID NO: 29369 - protein, 257 aa, Oryza sativa
MKQPSDPFDFSTQTKQPSALPFDFSTQQPKPSSAIPQVTPATISPAPSLPSLQSLAPSSGPQTSGSCVPVDIEWPPRKNTSSDFNAPLSVSEQSKSGGLSSDGLADIDPFADWPPKASSGASILAVGHLSSTSQSISGLSTGNIGFSGNSGSLEQMKTNQMSWSAKPNTTNLMAVNSTGNYLNQGNSALGFGNPIGGRSTGSLSSSTTQGPPRLAPPPSASVGRGRGRNQGQSALSRASRTPHSNVSSEQPPILDLL

SEQ ID NO: 29370 - protein, 315 aa, Oryza sativa
MCAAPMASTAQPQQQPQQQQEQQPVAAAAVPTPAPPASEARPQKPTRVSLSYEEISKLFSLPIAEAASILGVCTSVLKRICRSHGIVRWPYRKLVSGKSGDDTKNAEREKAKGLLEISKVAKQKALSASGLSTVSPGAFQGVAKSQQGSSKAGQVSPPGKQNVLGGSAILSYGTQTKGIPTYMDDFKYGFPSSGLSLQTMKWWGTDSHTETTPAKDDNGEAPESANEASKGMTDDELDWGADEAEAEADADSAITTEPSAQLCSLRRKAVDDGRKLLTGKSCGGLELCRLNKRQKMALAQVFGASLPEQLRSKLG

SEQ ID NO: 29371 - protein, 442 aa, Oryza sativa
MRLPGDARLALLLARRRALPSSSPAASASPFHGSRAHGARWGDAFRAAAPAWRSPFSSPTSARLFHGTRPVAARDYYDVLGVSRNASQGEIKKAYYALAKKLHPDTNKGDSDAERKFQEVQRAYETLKDDQKRSLYDQVGPDQYEKASAGGGPGGAYEGGFGNPFEDIFGGGGGGGGMNDFFRNIFREREFSGHDAKVALEISFMEAVQGCTKTINFQTAVTCDTCKGAGVPPGTKPETCLACRGSGFIFMQTGPFRMQSTCTQCGGSGKTVKEFCKSCKGRKVVPGTKNIRLNIVPGTDDGDVIKLVRSGGADPDGGSPGDLYVTLKVREDPVFRREKGDIHVDAVLNVTQAILGGTVQVPTLSGDVVLKVKPGTQPGQKVVLRGKGIKTRNSSYYGDQYVHFNVNIPANLTPRQRVLIEEFAKEEQAEEEKDAKAAGASG

SEQ ID NO: 29372 - protein, 281 aa, Oryza sativa
MGQNFTSEHLPVSAPGATPPGPYIAYFQPLQSSASSSSSHVTERTMDGTTYHDHWNPLPGPSDGRPLATVHPIDFHHNHWTHLPNSYSQPNSNNGVAEQMAIPVVPMRVGGLDSDSQQRGSLPSVYGNGSGSRSRIPSVPPMAPQFMRPHGNINEQYQQNSSSLYAAPQRRTAVQAVQDSMNFTLFPQAPTGPNSMETEDAGGNQFYAWERDRFAPYPLMPVDSEANWWGSTPQSHGVTDHSAAPGRRLFGQWIGAGRSPPPPPPPPADNSSYRQMHIPRM

SEQ ID NO: 29373 - protein, 219 aa, Oryza sativa
MLLIYSRKKGCIPLDILSIEDGKRLKSFKHLLHRNKKVDFIEQFNEKLLIKQEGENLQILDVRNFQSIEVSRSEFVTPSAFIFLYEMQLFLTFRSRSVSVWNFRGELVTSFEDHMLWHPDCNTNSIYITSNQDLIISYCKADPNDPSSEENACSINISEILTGKCLAKIKAGNLNKQRVSKFQSTPSEALGDITALYYDEEREEIYTGNRLGLVHVWSN

SEQ ID NO: 29374 - protein, 144 aa, Oryza sativa
MTARSLLAGRMVAAARRAFRSWPLHTITTTTTTDAATAIATKEQHKVVSRLDVMEDISFPYMTREMAAVLRRSRVAAVEHNNFNIRQLANPYHGPADGDILYDRAWINNLALLFTLSTLFGAFSTLAKLKQTRTVDQCVQTQTS

SEQ ID NO: 29375 - protein, 187 aa, Oryza sativa
MHFDVSAMKNKPGKISAASTTHSVLPVPVPAVPYAAPSPSYALPPAGYPAVPPYQSYPASHVPAPYPTSAYPHPPPSLLARDVEHAAYPPTSTTYPPQPYPPQPQGQTYPPQPQGETYQPQPQRETYPPQPQVQPYPPKPQGQPYPPQPQGQPYPPQPYGQTYPPPPKGQPTYPPAPYPSTYPPAPY

SEQ ID NO: 29376 - protein, 522 aa, Oryza sativa
MLHFLQMQIEDRFHGDEDINQNIQENTEQASAEKGAAEIPDKMEVEEKAEGKDTAGEKTPEKAEGNSVEAQTEDGNAIENKDANNSGGTDSVKSLNTDEPKKSSDADPPKSSSDAEPVVKENSVDVDTSRENASNFAIDTLKSAFEAVGYFPEHEGSFADAGNPVMALASFLAGLVEDDTATNSCRSSLKAISEVSPALQLATRHCFILEDPPSDVKDMSGNASTTSTDGDKRKDKDKTQDSIDSEVEGINKKGETVLSVEGKKSSPISPKGQDTDKKDECDEDPSVDPKHNNGKESDDPVSLDKSVSNNKKGNTMETSNPEMIEDKASSEVNPADDSSLEGKVEMKKTKDAVANATTAQEQKQSQILENGKMEEPKSTEDVAADEENSSRVTANLTDSITRLKRAAATAISAAAVKAKLLADHEEEQVRQLAALMIDKLYRKVEAKVSFLTEVEHLVQRTREYTEKTRKKLLMERNAIIAARMGSLPSRPNQPGAAGNRLPAGYGGPIVRPPPNAMPRPSS

SEQ ID NO: 29377 - protein, 50 aa, Oryza sativa
MAVADVAFKALTAGLGVATLYLAGTFSVNVYRGLSWHSEQSKLEKEKRED

SEQ ID NO: 29378 - protein, 29 aa, Oryza sativa
MKPKLVQAVDDMLAYDIPELLKNFRNPYE

SEQ ID NO: 29379 - protein, 172 aa, Oryza sativa
MEEDCSNSNSDKVQDMEVSHTFEPSWMNDFTGVMRHASGPVTAAKTIYEDSKGYLIIISLPFADIQRVKVSWKNTLTNGIVKVSCTSVGRMPFLKRHDRTFKLVDPTPEHCPPGEFIREIPLPTRIPEDATLEAYCDESGTGLEIIVPKYRVGPEEHEVHVSMRPPSSWCQS

SEQ ID NO: 29380 - protein, 362 aa, Oryza sativa
MAMVPSGSGGGPPVIAEVEMNGGADSGAATVRATVVQASTVFYDTPATLDKAERLIEEAAGYGSQLVVFPEAFVGGYPRGSTFGFGANISIGNPKDKGKEEFRKYHAAAIEVPGPEVTRLAAMAGKYKVFLVMGVIEREGYTLYCSVLFFDPLGRYLGKHRKLMPTALERIIWGFGDGSTIPVYDTPLGKIGALICWENKMPLLRTALYGKGIEIYCAPTADSRQVWQASMTHIALEGGCFVLSANQFCRRKDYPPPPEYVFSGLGEEPSPDTVVCPGGSVIISPSGEVLAGPNYEGEALITADLDLGEIVRAKFDFDVVGHYARPEVLSLVVNDQPHLPVSFTSAAEKTTAAKSDSTAKPY

SEQ ID NO: 29381 - protein, 41 aa, Oryza sativa
MVTGGLIGVMGGFMYAYQNSAGRLMGFFPNDSEVARYKYKL

SEQ ID NO: 29382 - protein, 308 aa, Oryza sativa
MARPVIAKAMVDVAKEVGADAVAHGCTGKGNDQVRFELTFYALNPELKVVAPWREWDITGREDAIEYAKKHNVPIPVTKKSIYSRDRNLWHLSHEGDILEDPANEPKEDMYMMSVAPENAPSKPEYLEIGIIAGVPVSINGKDLSPASLLAKLNEIGGKHGIGRIDMVENRLVGMKSRGVYETPGGTIMAAAVRELESLTLDRETMQWKDMLALKYAELVYAGRWFDPLRQSIDAFMENITATTTGSVTLKLYKGSVNVASRKSPYSLYREDISSFENGEIYNQADAEGFIRLYGLPTRVRAMLEKGI

SEQ ID NO: 29383 - protein, 90 aa, Oryza sativa
MQAARRCHYSRRRATGWLDPASAAGGVAGSGISSRRGWLDPASAAGGVAGSDVSICSRGGSALTAGMVQRQRRWAPSSASYRGSGGRHPR

SEQ ID NO: 29384 - protein, 310 aa, Oryza sativa
MAGNDYWGLAGWRVAFIMVALVSLIIGILVYLYATDPRKIPGNHLLDDDDYERLHLASKDVLPPPSIWRDSLVATRSVMKVRTFQIIVLQGIIGSLPWTAIVFFTMWFELIGFDNNSSAALNSLFAIGCATGAFLGGVIADRLSRHFPDSARVMCAQFSAFMGIPFSWILLTVIPQSVDYWSAYAVTLFFMGITISWCATSANNPMFAEVVPPKHRTMIYAFDRAFEGSFASLAAPAVGLVTEKIYGYDSKTVNLANGSAEGAYALSRGLLTMMIVPFGVCVLFYSPLYLVFKRDRENAKLSSFKDQELV

SEQ ID NO: 29385 - protein, 312 aa, Oryza sativa
MDKAIEKVEFLVGREIEVGRTYKGVVSSIKEYGAFVEFNGGQQGLLHISELSHDKVSKVSDVVSVGQVLSLTCIGQDLRGNIKLSLKATLPHAHEKKDLASNHTDPLPSQEVVGWTAVENMPSKDANAEPSISKDEDNMIEETPGCSTPAVIIRSAAECDAQDVTNDPKKKRPKVAKSSPKLSKPASERQEVKRTSAKKTSGASTTAKKNKKEKADSSNDVLDAIPEQNKSNIMNYSSPSNFRSGSMKLGDVVTAKVYQIRAYGLVLELSDGVRGMHKFAENGHKDFEVGEELLVKCSSFNAKGIPVFSLLD

SEQ ID NO: 29386 - protein, 332 aa, Oryza sativa
MGAYRCVSELWRRKQSDVMTFVQRVRCWDHRRQPAIGRPTRPDKARRLGDKAKQVPCPHRFLPMAAAAATRPLLRPTCSVARFNTRRLLSSTSSPPPTNRSSNTNSPVAFDWSDDDDNPSPPPMEAKSPNLPLPYDPFSKKPAVMEPSDPTNLQEVFHRMRTEGLTDYAIKMFDGLSKDGLTHEALELFAIIKDKGAMPDVVAHTAVLEAYANAGPAHWRDVVRTYDRMLASGVTPNAYTLAVLVKGLAASDRFMEAGKYIVEMLDRGMRPNAATYLAVFEAYVRMEKVEEGRVLLETMKSKGFTPSEEAVRSGTVKRGHVFRGIMNMLFDK

SEQ ID NO: 29387 - protein, 165 aa, Oryza sativa
MAEENKSGSGDLMASGKVVAEATMSVFQQKSVEGVDKKEVAGAAADLLHSASTYGKLDDKPVGQYIDKAEGYLKDFSSGSGGAAPPPPAAGDAAAPKPAAEEPPKEPAPAEKEEGKPPSSSEGFGLDDVMKGAESLMEKKGGGEESAGSGGAAGGLFKMAQGFMK

SEQ ID NO: 29388 - protein, 425 aa, Oryza sativa
MDFSVRARIQSPHRSAAHFVAGEGGRRRPATSRVSFRSMASAASVEEPAAAAAAAAETKRGPSGASFIREHLRSLAPYQPILPFEVLSARLGRKPEDIIKLDANENPYGPPPEVAKALGNLKFPYVYPDPESRQLRAALAEDSGLESEYILAGCGADELIDLIMRCVLEPGDKIVDCPPTFTMYEFDASVNGALVIKVPRLPDFSLDVAQIVKVVEQEKPKSIFLTSPNNPDGSIINDEDLLKILDLPILVVLDEAYIEFSSLQTRMSWVKKHDNLIVLRTFSKRAGLAGLRVGYGAFPLSIIEYLWRAKQPYNVSVAAEVSACAALQNPTYLEEVKNLLLQERDRLYDLLKEIPFLKPFPSHSNFILCEVTSGKDAKKIKEDLAKMGVMIRHYDKKELKGYIRISVGKPEHTDALMKGLKALQL

SEQ ID NO: 29389 - protein, 339 aa, Oryza sativa
MLTTSSHSRHHHAFERSPNHSMMKNIADRNKHDLLQSAMNHAASKYMQRIYPLGIQRSSSNLTLSSLSLSQNSNDSSLSSSNSSWEPKVPLLYGGTFSPWGDVLVSLERRREEDDDKVSDHDVEGGEEDFDCSEPGSLHRCSWITKNSDEAYVQFHDECWGVPVYSDNRLFELLALSGMLIDHNWTEILKRRDMYREAFADFDPSTVAKMDENDVAEISGNKELKLAECRVRCIIENAKCIQKVAKEFGSFSGYIWGHVNHRPTVGRYKHHKYIPFRTPKSEAVSKDLVRRGFRLVGPVIVYSFMQASGIVIDHLVDCFRFPECLHLADRSWGITNVAA

SEQ ID NO: 29390 - protein, 232 aa, Oryza sativa
MFGCANDYPRDDVKEIKCYVCNQKGHLCCADFSDICPKEVSCYNCAQPGHTGLGCAKQRREASTAATPTLCYKCGEGGHFARGCTKNTKSDRMNGESSAYSRKKGKGKKDFGTRSAPHDARKTSKRKSPLFEERRNSSHFKSKARGGWIADDADDQPYKKCKPNVWASPSTPKKQYNNHQFSSGGDYSTPQSSRWQKHGFASPSATYSPNTRKHSFSSSRFASNTHVRFGRS

SEQ ID NO: 29391 - protein, 301 aa, Oryza sativa
MSMSLFPGMDLTKMDAPTLTLLGAACCVMLSMHFTVQLVSQHLFYWKNPKEQKAILIIVLMAPLYAINSFVGLLDIKGSKTFFTFLDAVKECYEALAIAKFMALMYSYLNISISKNIVPDEIKGRVLHHSFPVSLFLPRNVRLEHKTLKLLKYWTWQFVVVRPICAILMITLQLLGLYPSWVSWTFTIILNFSVSMALYALVIFYHLFAKELAPHKPLAKFLCIKGIVFFSFWQGFALEVLAAVGIIQSHHFWLDVEHIQEAIQNVLVIIEMVSFSVLQQYAYHVAPYSGADRAKFEKKNE

SEQ ID NO: 29392 - protein, 106 aa, Oryza sativa
MVRRFDVLGVAIFFSTALRLTNIQIGESSRRTWLGEEADPQYSDRLLRAYKRPVEVAGDQQDSRWFISKDAIVSGLGLLGIKQGGTEAALSKPRRKRVVRKKVAST

SEQ ID NO: 29393 - protein, 190 aa, Oryza sativa
MTNAAVIAISQNCVDLKVFRLCIMGRHQPDHVTGEPMDEGFGAIVRNCSKLTRLSTSGHLTDRAFEYIGKYAKSLRTLSVAFAGDSNLALQHILQGCSKLEKLEIRDCPFGDAGLLSGMHHFYNMRFLWMSGCNLTLQGCKEVARRLPRLVVELINSQPENERTDSVDILYMYRSLEGPREDVPPFVKIL

SEQ ID NO: 29394 - protein, 20 aa, Oryza sativa
MSSFSVLETLVGCSAETVKL

SEQ ID NO: 29395 - protein, 155 aa, Oryza sativa
MDTVGARLSRSSTRYGPVGNTASSFSGPVRKWRKAWVPIAAGGAGYAGMMGPMGVSRGNKVVLFRWAPVNGGAAGGGGGSGDGDESAAVAATRRRFVPASGVAQNSTKKSGSTELNLNLGLEDPDDDSDADLSAEEQRDSGSNQRSDNRLKRKAF

SEQ ID NO: 29396 - protein, 146 aa, Oryza sativa
MKDWRGGRGAAQNIIPSSTGAAKAVGKVLPELNGKLTGMAFRVPTPNVSVVDLTCRIEKSASYDDVKAAIKAASEGALKGILGYTDEDVVSNDFVGDARSSIFDAKAGIGLSSSFMKLVSWYDNEWGYSNRVLDLIAHMALVNAKH

SEQ ID NO: 29397 - protein, 303 aa, Oryza sativa
MATAGDEQQQQAAAAQTAEVTEAAAKEVVSVEMPAPEGWTKKFTPQRGGRFEIVFVSPTGEEIKNKRQLSQYLKAHPGGPASSEFDWGTGDTPRRSARISEKVKAFDSPEGEKIPKRSRNSSGRKGKQEKKEATENEEAKDAEADKEAPSEDAPKETDVETKPAEEAKEAPSEDAPKDTDVEMKTAEDASKTADADTPAPAPAGTEKEDAKPAESEAAPPAPSEGGEKKEDAKPAEPEAAAAPPSNPTEPSAPKAAAAAPVENSADKGPHQDSQPPSAAAPAKESSPVNNGQLPAGASAVKCT

SEQ ID NO: 29398 - protein, 66 aa, Oryza sativa
MAGKGLNATGEFFRRRDDWRRHPMVGNQLRHATPGLGIAIVAFGIYLVGEAAYNRLYRPSGDHHHH

SEQ ID NO: 29399 - protein, 55 aa, Oryza sativa
MYPWKGYTLVEEDGCLKLGWKDLSLLTASSWEPTDGDADADVAVAGDTHHESHDS

SEQ ID NO: 29400 - protein, 23 aa, Oryza sativa
MGAAARRVAIRAVPADAYAEVDR

SEQ ID NO: 29401 - protein, 501 aa, Oryza sativa
METRELWVLAAALAVSLLYYLAALMRYAGGGCSRSSRPPLPPGPTPLPLIGNLLSLRGVLHHRLASLARVHGPVMALRLGLTTAVVVSSRDAAAEAFTKHDRRLAARVVPDSNRAHGFSDRSIIWLPSSDPRWKALRGIQATHLFSPRGLAAVRSVRESKVRDIVAYFRSRAGEEVVFGEAIYSGVLNLVSSSFFSVNMAGVGSEEAHGLRELVEDLVEAIAKPNVSDLFPFLRQLDLQGLRRRTEERMARAFGILDGIIDRRLANRTHGDRHGDFLDALLDLVSEGKMARDHVTTMLFEVFGAGSDTMSVSLEWAMAELLRNPRAMRKARAELEDAAAVVEESDAARLPYLQAVVKEAMRLHPVGPILLPHRAVEDGVEIGGYAVPRGAMVIFNAWAIMRDPAAWERPDEFVPERFMETTTAIDFRGKEYEYLPFGSGRRLCPGLPLAERVVPFVLASLLRAFEWRLPDGVSAEDLDVSERFNTANVLAVPLKVVPVIVN

SEQ ID NO: 29402 - protein, 36 aa, Oryza sativa
MICRKCYARLHPRAVNCRKKKCGHSNQLRPKKKIKN

SEQ ID NO: 29403 - protein, 165 aa, Oryza sativa
MATMSLAAASPLASTPRGPAVSTPRTAFLGLLTGGASLAPFPGLAAAAAPPRLPAGRGDAAVARMAKREQELEEIRAMPTEKIEEEVVDLKGELFMLRLKRSARQEFKSSEFGRMRKRIARMLTVKREREIEQGINKRLSRKLDRKWKQSIVVRPPPSLRENKEE

SEQ ID NO: 29404 - protein, 245 aa, Oryza sativa
MRVDREMERGDEASVNRGWLELRLGVNGGGGVETVPVTAADSSASSEAGEADTVTPSQQQQQQQQGSPSSPAASSAPNKVFSCNFCMRKFFSSQALGGHQNAHKRERSAAKRTPSSSPYHLHHHRMMMAGAGLPLEAHAAFMRAALRVNPAGSAIHKQQQQHQPPPPITQDATAPRFHDGAAVAAAAAVTPWAPVAPLAYDEVLSSSASSWPGSFRFRTQPEPPPSSEQEPPSEQSKKIDLSLRL

SEQ ID NO: 29405 - protein, 191 aa, Oryza sativa
MTTTHSYTGDQRLLDASHRDLRRARAAALNIVPTSTGAAKAVALVLPQLKGKLNGIALRVPTPNVSVVDLVINTVKTGITADDVNAAFRKAAAGPLSGILDVCDVPLVSVDFRCSDVSSTIDASLTMVMGDDMVKVVAWCDNEWGYSQRVVDLAHLVASKWPGAAVQGSGDPLEDFCKDNPETDECKVYEN

SEQ ID NO: 29406 - protein, 41 aa, Oryza sativa
MGIVARMMMKVEILGAWAVLIFLSFFFFVDTTLRLHWFGLC

SEQ ID NO: 29407 - protein, 474 aa, Oryza sativa
MAIPTLVLLPTWGTGHLMSLLDAGKRLLGCRGGGGLSLTVLVMQPPRKEYASAVAATVRREEASGLDIRFRHLPAVEPPTGCAGVEGFVSRFVQLHADHVRAAVSGLDCPVAGLVIDFFCTTLLDVARELAVPAYVYFTSNAACLALLLRLPALEGEVTVEFEEMDGEVDIPGLPPVPPSSLPMPVMDKKNPNYTWFVYHGRRFMEANGIIVNTVREIERSVLAAIADGRVTPGVRAPVIHPVGPVISFTPPSDDPPHECVRWLDAQPPASVVFLCFGSMGSLAPPQVLEVAHGLERSGHRFLWVLRGAPAAGGSMNPTDADLDELLPEGFLERTTGRALVWPTWAPQKEILAHAAVGGFVTHGGWNSTLESLWFGVPMVPWPLYAEQHLNAFTLVAAMGVAVAMKVDRKRNNFVEASEVERAVRSLMGGSEEGRKAREKAAEMKAVCRKAVEEGGSSDMAVHKLYEELSTQTA

SEQ ID NO: 29408 - protein, 187 aa, Oryza sativa
MQKGMKAALAPYFELTNAVRVGDLELFRAVAEKFASTFSADRTRNLIVRLRHNVIRTGLRNISISYSRISLADIAKKLRLDSENPVADAESIVAKAIRDGAIDATIDHANGWMVSKETGDVYSTNEPQIAFNSRIAFCLNMHNEAVKALRFPPNSHKEKESAEKRRERLQQEEELAKHMAEEDDDDF

SEQ ID NO: 29409 - protein, 264 aa, Oryza sativa
MGNMMDNLLVRSLTSKSKGRTDDIVPPSPVKAPDADGADKTDDEENPMMETVRSKCITQLLLLGAIDSIQKRYWSRLKTTQQTAIMDILLSLLEFASSYNSTSNLRTRMHHIPPERPPLNLLRQELAGTAIYLEILQKSTVEHDGNDPSEDTNGHVIESDEHEKLKSLAEGKLVSFCGQILKDASDLQPSTGEAASADIHRVLDLRAPVIVKVLNGMCIMDAQIFKKHIREFYPLITKLICCDQMDVRGALGDLFSKQLTPLMP

SEQ ID NO: 29410 - protein, 103 aa, Oryza sativa; identical to SEQ ID NO: 29037

SEQ ID NO: 29411 - protein, 46 aa, Oryza sativa
MILCNQCPMRIFIAWFCSCPKVVCRKASLDFGRLASARIVSLCLYV

SEQ ID NO: 29412 - protein, 34 aa, Oryza sativa
MCWPWQWLGLNYVRLPPTEADQTSNEMELSEPLI

SEQ ID NO: 29413 - protein, 504 aa, Oryza sativa
MDEMQMEMEAQAQAHVLLFPWPQQGHINPMLHLASALLDAGLHVTFLHTDHNLRHRFARPHHPTRLRLLSIPDGLPDDHPRAVGGLIELLDSMRTASSAAYRALLLTESSRSRPDSLDDAPPPVTCVVVDGVMPFAITVAEEIGVPALAFRTESAFAFLAYLSVPRLLELGETPVPSDEQVRGVPGMEGLLRRRDLPRVVPTKQDDVGAEEADPVPVLLTVADTAAHCRNSRALILNTAASMEGPAIARIAPHMRDVFAVGPLHARVATNTIALEKHEDDDEDDDDYGCKAWLDGQDDRSVVYVNLGSLTVLSSEQLAEFLHGLVAAGYAFLFVLQPDMVASSSAVLQEAVEAAGERALVVEWVPRDVHYVLRHRAVGCFLMHGGWNSMLEAAVEGVPVVCWPFFADQPVVSRFVAAVWKTGLDMKDVCDRAVVERMVREAMESPEIRASAQAMARQLRLDVAAGGSSSSELQRLVGFINELSAVHVRSRDADENSSPAVSLLT

SEQ ID NO: 29414 - protein, 359 aa, Oryza sativa
MSRSGIFRVPHGVAVEMTERVYKLPSFNDVLEGEIFLQNLPSVVAARVLDPQPGERILDMCAAPGGKTTAIAILMKDQGEIIALDRSHNKVMDILKLAAEMDLNCIKAYKLDALKSVRKTNEAKYIGEAGSRTDAIVTLAEDSEPCINKVDAGTTNASEDSSTTSVVQTDNKKTDDKRYVSKADLRKNLRRMRNGPGRNNCSGGRVENSKGFLPNSFDRVLLDAPCSALGLRPRLFAGEETLESLRNHATYQRRMFDQAVKLVHPGGVIVYSTCTINPGENEALVRYALDKYKFLSLGSQHPKVGGPGIVGSFERSTKKYTEEWLTKHESQLVQRFDPSSTLDTIGFFIAKFDVGQKDD

SEQ ID NO: 29415 - protein, 64 aa, Oryza sativa
MYLQYYINEKGDKVYTTKKESPLGVPTQSAHPARFSPDDKYSRQRYLLKKRFGLLPTQKPAPKY

SEQ ID NO: 29416 - protein, 394 aa, Oryza sativa
MIISWVTTIEPGSSTVLYGTSEDNLNFSADGKHTQYTFYNYTSGYIHHCTIKKLEFDTKYYYAVGIGQTVRKFWFRTPPKSGPDVPYTFGLIGDLGQSYDSNITLAHYESNSKAQAVLFVGDLCYADNYPYHDNVRWDTWARFVERNVAYQPWIWTAGNHEIDFAPELGETKPFKPYSYRYPTPYKASGSTAPFWYSVKRASAYIIVLASYSSYGKYTPQYKWLEAEFPKVNRSETPWLIVLLHAPWYNSYNYHYMEGESMRVMYEPWFVKYKVDLVFAGHVHAYERTHRISNVAYNIVNGQCTPVHDQSAPVYITIGDGGNQEGLATNMTAPQPGYSAFRESSFGHAILDIKNRTHAYYTWHRNQDGNAVAADSMWFTNRYWQPTDESLDDSQ

SEQ ID NO: 29417 - protein, 115 aa, Oryza sativa
MMMARRSMHLPRKVRKRSLKLKLTAKQWTWTSLPMWLMKLSLELRRRKRRRSTSWRRSHRSRRRAWRMPMATPRRTVLPRRRRRRTVKSRRTLSLRRPLKGRRKRRSPRRRTATE

SEQ ID NO: 29418 - protein, 146 aa, Oryza sativa
MFPREQQLTGKSAMKLNIGQAVSEGTVNNETLGYFIGRVYLFLTQLGIDKDRLRFRQHLPNEMAHYAADCWDAEIECSFGWIECVGIADRSAYDLRAHSDKSGVALEAHEKFAEPREANFFDSVQYMQLCICLNFESVCSCVHGPD

SEQ ID NO: 29419 - protein, 379 aa, Oryza sativa
MAPPLAAPRFHAAALPLRLRLRTRPQKLPCWRRAARPNDEDYYLIDAPESIGDGFSFSGGKYTDGPSKSDEWFAQGRMVKAHPVYGNKGKAKDPIFGLTMGAESQSSNDVFRWFCVEAGSSSNPPVLFIHGFPSQAYSYRNVLPVVSDNYHAIAFDWLGFGFSDKPQPDYGFDYTLDEYTSSLESLINAVAPDKLSIVVQGYFAPIVIKYANEHQDKLNHLILVNPPITDKHAKLPSTLACFSNFLLGEIFSQDPLRASDKALTSSGPYMMKEEDAMVYRRPYLVSGSSGFALNAISRAMKKDLKVYIESMRNILSSDSWKTKTTVCWGLRDRWLNYDGVEDFCGSANYKILELPMAGHHVQEDRGEELGKLVKRILSG

SEQ ID NO: 29420 - protein, 383 aa, Oryza sativa
MMNTIEYRVDCQLLQHLHSENKLSERFPIGLEEQIHKWDPDKIRRFHERWYYPANATLYLVGEIDDIPRAMREIEAVFEHTLPEGEAAPMSTASPFGAMASLFAPKLPGGLAASLTGERSPAADKIKPVKRERQAIRPPVEHKWSLPGVAQDAKPPAIFQHELIQSFSINMFCKIPVNQVQTYKDLRSVLMKRIFLSALHFRINTRYKSSNPPFTSVELDHSDSGREGCTVTTLTVTAEPQNWRSAIKVAVHEVRRLKEFGVTMGEMTRYMDALIKDSEQLAMMIDSVPSVDNLDFIMESDALRHTVMDQLQGHESLLAVAETVTLEEVNTVGAEVLEFISDYGKPDAPLPAAIVACVPKKVHMDGVGETDFEIHPRININVP

SEQ ID NO: 29421 - protein, 90 aa, Oryza sativa
MINGSKVIYRWQQAVSNPVFHAILVFVNFSYTLMVLNYSCIGFQVLSFKETLASYQSVYYIGTIVPIVVVLLGYVIKPARPVKPKARKAE

SEQ ID NO: 29422 - protein, 492 aa, Oryza sativa
MPSDGSFRIVLFPFPAQGHFSAFLSLAAHLHDAQPTADITIVSTPRNVEDLRRRSSSQTRYLRFHALPFAPAEHGLPGDIESTDAVPLLHFITLFEATESRSLQDSFDSFVRDLITDAGADGARVCVIADPFLAWTTDVARRRGAAHAIFVSCGAFGSVVFHSLWNHLPHLRAPGDDAFCLPDHPEVTVHRSQLPPYLLHADGTDRWSAHHRRQTSAGYDTDAILISTMEELETTGLRMLRKTMGVPVYPIGPLVRRRTEHSDHIGDHNDDDVKRWLDTREERSVLYISFGSNNSLRPDQMVDLAMALELTGRPFIWAIRPPFGFDIETTNGREFSAEWLPEGFEERMRAKNIGLLIHGWAPQVSILAHASTGAFLSHCGWNSVLESMAHGVPIIAWPLTADQFFNAQMLEEWGACVEVSRGNWPDSPALERERVVEVVEMVMGITAKADKIRQSVKQIQGMIGRTLEDGGSSKTALEEFLKLHGHIMLMKC

SEQ ID NO: 29423 - protein, 110 aa, Oryza sativa
MDANRRQSGIQQLLAAEQGAQQIVNAARAAKSARLRQAKEEAEREIAEYRAQMEAEFQRKVAESSGDSGANVKRLEQETAEKIAQLKQQAASISPEVIQMLLRHVTTVKN

SEQ ID NO: 29424 - protein, 398 aa, Oryza sativa
MISEGVDPNEFALSIVLGACGSIGLGRQLHCSAIKHDLITDIRVSNALLSMYGRTGLVEELEAMLNKIENPDLVSWTTAISANFQNGFGEKAIALLCQMHSEGFTPNGYAFSSVLSSCADVASLDQGMQFHCLALKLGCDSEICTGNALINMYSKCGQMGSARLAFDVMHTHDVTSWNSLIHGHAQHGDANKALEVFSKMRSNGIKPDDSTFLGVLMGCNHSGMVEEGELFFRLMIDQYSFTPAPSHYACMIDMLGRNGRFDEALRMINDMPFEPDALIWKTLLASCKLHRNLDIGKLAADRLMELSDRDSASYVLMSNIYAMHGEWEDARKVRRRMDETGVKKDAGCSWIEINNEVHTFASRDMSHPNSDSIYQMLGELVAVMQDFDELEPFDVHIC

SEQ ID NO: 29425 - protein, 339 aa, Oryza sativa
MVNFVEAQKPLLKRLMRMAGLRPVDVEIEPGTTMHIWVPKHHVSKKTGTIRPVVEHGGVDGDGEKAGAAKRKKSAAESRPNVVLVHGFAAEGIVTWQFNFGVLVSRYNLYIPDLLFFGKSATASADRSPELQARCVAAALARLGVARCDVVGFSYGGMVAFKLAETRPDLVRSLAVSGSVVAMTDAVNSATMTRLGATSSAELLMPETLKGLKQLLSISMYKKMWFPDRFYKDYLKAMFNNRKERMELLQGLITSNMDAKIPTFQQKIMLIWGEEDKIFDIELAKKMKEQLGDGCFLHGIPKAGHLLHVERPCAYNRQLQRFLSYVNSEEKEAAGGGAN

SEQ ID NO: 29426 - protein, 207 aa, Oryza sativa
MLKEYIMKSKGENKSEVGPSERLVAGGLAGAVAQTAIYPVDLVKTRLQTYSCVDGKVPSLGALSRDILMHEGPRAFYRGLVPSLLGIVPYAGIDLAVYETLKDVSKTYILKDSDPGPLVQLGCGTVSGALGATCVYPLQVIRTRLQAQRANSESAYRGMSDVFWRTLQHEGVSGFYKGILPNLLKVVPAASITYLVYEAMKKNLSLD

SEQ ID NO: 29427 - protein, 366 aa, Oryza sativa
MDSDYVAGLLMSAAAAGLDLGVLDGGGGAFLETLCGGPGFAERAARLCGGGAGLFGLPAVGNAERGGCSREGSSVSDPAWAHATGGGGDNARKRKAPASAAAGKDKDAVVGGGSSPCEVGEAKAPDSKKCKAEVNPKVEEAASDGSVGDRVQKQGKGKNSSKPAAEPPKDYVHVRARRGQATDSHSLAERVRREKISQRMKVLQDLVPGCNKVVGKALMLDEIINYVQSLQQQVEFLSMKLATVNPQLDFGNLSTLLQKDMFQSCGPSVNSVFPLESAGTAFPFCDQADFFQSFGLGAMENQCSLDLANTALPHTGSTQYAFQKQQRDLWEDNTFQYNDEQSQEDAVSAPNFDGQLQAADHTEIEF

SEQ ID NO: 29428 - protein, 149 aa, Oryza sativa
MAGVSTSVVGLKPAAAVPQSAASPVPKRVHVAVPPKEEQGGGRRAALLGLAAVFAATAAGQAKAGVFDEYLEKSKANKELNDKKRLATSGANFARAYTVEFGSCQFPYNFTGCQDLAKQKKVPFISDDLEIECEGKEKYKCGSNVFWKW

SEQ ID NO: 29429 - protein, 51 aa, Oryza sativa
MGPCKRNKCSLLSRLVSRNSIWTRYVQQNEIRIFFWRTIYGCKFGCDRLNN

SEQ ID NO: 29430 - protein, 328 aa, Oryza sativa
MLQCHPYPHEYADPSRQCAHCAFFMGLSRKEGAKIQEGQQFDIRGTVDEFRHDIGMYGYWRPGMELAVSHVRRKQIPSYVFPEGYKRPRPSRHINHPQQSNKNDVEDGTANRSPDGQPKRKHDTAGVYDSEPGRSVKRASISPSISPVHQKTSSPPSGNIADASGASGGSPVSLANGNLEQANCLNSPLASEKSLDSVTSGSKCVGVEAVCPSDATKEHDNCGSNMKNCTTTTVAVSLKRVAEKVVSELVGSESLGGNKSGELLERAEDMGSALVENVHFGGNGVVQTGLPEELEPNNGIEVVSKAHAGVNSDAPQKASLRVSLTSTA

SEQ ID NO: 29431 - protein, 196 aa, Oryza sativa
MCQKGVKPNATTFTTAIAGFYKEERFDDVGKVIELMKKHGCGESLPVFNVRVQGLCKLGRSGDAKALLNEMVKKGTKPSWLTYNHLIHGFCKEGDLEEAKRLYKEMAKKGLVGDSSFYYMLIYYLCKGGDFDTAVGVYNEIAARNWVPCFSTMKMLVNGLAGSSRVDEAKGIIEKMKEKFPDKAEGWKEVEDALPQ

SEQ ID NO: 29432 - protein, 143 aa, Oryza sativa
MRMLQALVPGCDKVTGKALILDEIINYVQSLQNQVEFLSMRIASMSPVLYGFGMDSDGLHDQKIGGMFQEALAMPNPVLNQSSPAPSQAIMDTTSTTSYSLQSQHGAISFSQDNGSYLMQAVGEPRQQEMLNQLVFNNMCSFQ

SEQ ID NO: 29433 - protein, 246 aa, Oryza sativa
MVVAIHNISGFVEVDKDGNWTCPSDKKNKHGVIPNPVLQVNRLAANLQSYLEKRGAKLPDGHITGKIVLPNPNCRPSYAITLQPEVILYDQWKDLKADSKGGLSTWIKGAFSGSKGDMQDSLLQNLHFILSTSPMWDRLELKGDRNILGEFIEFKGRHDDIQALKCLKRSKVCRFIVQKSTLFGGFGRSRVQILYSPRDYRAEGTSSSEWKEISVKQYTEILFQPLHSKKVKKFKLSSVASVTLSA

SEQ ID NO: 29434 - protein, 99 aa, Oryza sativa
MDEHQSGNFKIQDIKDCTAVTSAEAARQFFTAQLEDIRMKKGTRKEKGTRQKNDAAAAKEERAIEVGASSSVEAVAAQVQAAEETKAIPQGLLAHDAKE

SEQ ID NO: 29435 - protein, 359 aa, Oryza sativa
MPAIADCAADPPLADSYYTLLRLGGDDDDDACTKVTTTPQPVSECELPMIDVGCLTAPTGAAAAAAVGQQHQAEERAACAAAIAAAAAEWGFFQVVNHGVAQELLEAMRREQARLFRLPFEAKSSAGLLNDSYRWGTPTATSLRQLSWSEAFHLPLAGISGKSCNYGDLTSLRDVTREVADAMSRLARALARVLAESLLGHAAGERFPEGCDDATCFLRLNRYPPCPFPPDDAFGLVPHTDSDFLTVLCQDHVGGLQLMKGSRWVAVKPIPGALIVNIGDLFQAWSNNRYKSVEHRVMTNATTERYSVAYFLCPSYDSPIGTCREPSPYKAFTFGEYRRRVQEDVKKTGKKTGLSNFLV

SEQ ID NO: 29436 - protein, 13 aa, Oryza sativa
MMHGENSTLILFY

SEQ ID NO: 29437 - protein, 360 aa, Oryza sativa
MWRAGCMEQWMPTVSMVATNVVIAIMTALIKQALNQGMNRLVLITFRQMVATVFLGPIAYFKERKTRPKFTTEIFVYMFLSGMLGPVLLQYTLFVGLEFTTATFAATFGNLLPVVTFLISLVFRFEALNVKSRSGSAKISGTLVSLSGAMMLTFYKGSALTHTPSSSSSPASSSSHSQAEEHDTAHWVLGSVSLLANVVGFALWLMLQRKFTRKYPAIYSATAFMSLFSCLQAGALALSIQRSSISIWALKGKIEIATVVYCGVVASGFGYLMLTYCVEKRGPVFTAAFSPLSQIFVAGIDLFILHEPLYLGSVLGSVLVIVGLYLVLWGKREETAAVSKDAIASPEKPVQDVEQQQEKV

SEQ ID NO: 29438 - protein, 255 aa, Oryza sativa
MGLMLDQATLDDLLVSGDDGGVYDVNLVMRLVRVFVGSEEEADLPSQRMRKVGRLVDKYLGEISPDHGLRVSKFLAVAESLPDSARECYDGVYRALDIYLESHPTLTIEERTTLCRCLNYEKLTLEACKDLAKNRRIPPGIAVQALASQQSKLQIRPAAAAAKGTGGCRPDPSQTPRKIIVSGSRARSVDLDAMDEKELLKLNLQKMQNRVVELERACKEMRGQMSKMAKGGRPSSSFGAAACHQTGGRGLPRLC

SEQ ID NO: 29439 - protein, 31 aa, Oryza sativa
MTSTSPSNLENLTLRAYWLKQNSMSVIGVNH

SEQ ID NO: 29440 - protein, 404 aa, Oryza sativa
MEIGRLVRKQTQPGWAPTTRGGGRRRPLALALGRLSSRRPVRCRCLAAMQTSPPPPSVRTVSIPFSDLKERDRDLSGKIEEGLGPNGLGIISIADVPGFPVLRKTLLRLAPKFANLPEDVKKELEDPDSRFNFGWSHGKEKLESGKLDTFKGSFYANPILDAPTTDDVLVRRYPSYCRTNIWPASHLPELEIAFKALGKLMLEVGLMLAHHCDRYVMQQGVGPYDGESLEQTIASSRCHKGRLLYYYPRQFSKQEEGGSVSSWCGWHTDHGSLTGLTCALFTKNSMEIPCPDSAAGLYIRTRDDKVVKVTFEENELAYQVGETTEILSRGRLCATPHCVKAPSSENASNVDRSTFAMFMQPDWDEKLKFPSEIPYHQELIPPNGTLTFGEYSERLVNKYYQGKT

SEQ ID NO: 29441 - protein, 413 aa, Oryza sativa
MQAAAGRARRLLTSPAASGILSAPRPGCAALAGSGALLPRLDGVPSSPSPSPAPPLLARSFSATSSSRLPRNLLSPSISSQWRNEKSVCYHMAATHYSTEASDIDQPTEAVVELYQKMLKSVEAETMPPNAWLWSMISSCSNKEDIKLLIQILQKLRVFRLSNLRIDANFNDHLCMKVAEACARVGALDYGLKVLWKHNVYGITPTIGSAHYLLKHAKEKNDTKLMGSIMQVLQRNSMPLQPGTADIVFSICYNADRWDLLSKYARRFVKSEVKLHGASFDIWMDFAAKVGDSQSIWNINSLRGKSVKRYNLATGFACVKGFLLERKPESAAAMIKLLHKHSPDEKKQLVTDELQKLVAEWPAEVIKRQKKDDRKALEEALITDIPQMISSMSKLRLDISVNLEKLTSQPETA

SEQ ID NO: 29442 - protein, 311 aa, Oryza sativa
MAAAARLLARISRQGVASAAAARRQAEAAALLGASAGRHLAPPCSSIKALPLLNQPRLYSTSTFQRFGFSSSAPQQDDKAANKQTEDGVNKSTQSEASNETNSSPGTENASQADTEDLDLSKEDLTKLVLEKEELLKSKDEEVKDMKDKVLRSYAEMENVIARTKRESDNAKKYAVQGFSKSLLDVADNLSRASSVVKESFSKIDTSNESAEAVKLLNTLLEGVEMTEKQLGEVFKKFGVEKFDPLNEKFDPNKHAALFQIPDPSKPSGTVAAVVKVGYMLHDRVLRPAEVGVTEGGPIEEEPEEKSDKSD

SEQ ID NO: 29443 - protein, 146 aa, Oryza sativa
MPYSKSMSAIAGSYGYIAPEYAYTMKVTEKSDIYSYGVVLLELLTGRAPVQPLELGGDLVTWVKNYIRDNSLGPGILDKNLNLEDKTSVDHMIEVLKIALLCTSMSPYDRPPMRNVVVMLSESRDRARMSSSSSPASDHSSKKDNL

SEQ ID NO: 29444 - protein, 69 aa, Oryza sativa
MLSRSLGGPWLSHTYCSHQFVCPVELAIWLWRWTSKERANCTSNRVMCGLHLFGCWFLYTLPCNRQSEM

SEQ ID NO: 29445 - protein, 155 aa, Oryza sativa
MTTTTMTTTTTTTSTATRCSTRSSSSISTTTSSRRSTATSRASSDRTPPPPRPPAATRPAPPPPPRRRPQRRPPDLSWQWSSDPSIHPVTLSPSYTCIPPCASMASSSSSSSISCTICIYLPVASSMARPYLNTIKKLKNLKPQEFSSSSGIFLH

SEQ ID NO: 29446 - protein, 429 aa, Oryza sativa
MDRLLACLLGFLLIASVGSHAARTPEQYWKSALPNSPIPSSLSQLLSTAGGGTSVNVGGGGVHVDAGHGKPGGTTVDVGKGGVGVNVKPGYGKPGGTTVGVGKGGVGVNVKPGYGKPGGTSVGVGKGGVGVNVQPGYGKPGGTTVGVGKGGVGVNVQPGYGKPGGTTVGVGKGGVGVNVKPRGKPVHVSVAPFIYNYAATETQLHDDPNVALFFLEKDLHPGKTMAVHFTATTAGEKFLPRSEADAMPFSSEKVPEILSRFSVKPGSVEAAEMAQTLRDCEAPPAQGERKACATSLESMVDFATSSLGTSHVRAASTVVGKEGSPEQEYTVTAVKRAAAGGDQDQLVACHAEPYAYAVFACHLTRATRAYAVSMAGRDGTGVEAVAVCHADTAGWNPKHVAFQVLKVKPGTVPVCHFLPQDHVVWTRSG

SEQ ID NO: 29447 - protein, 293 aa, Oryza sativa
MDLPGPRWKKGKDGKDFASLAAANPMSAIVSELKASFISSKPVAILSGPGGSAVLGVGPEQAVILNRAAFGHAIENATAQKHWFQLSPEEVFYLCHALNCIRVDSLDNKQMSEIELWDYFRSGSESFPEMYKAYAHLRLKNWVVRSGLQYGADFVAYRHHPALVHSEFAVVVVPEGAEFGNRCGRLEVWSDLLCALRASGSVAKTLLVLTISSSSKCELSSPDCLEQLVVHERTITRWILQQCREQRCEPSRDEVNREELIIEKESVVFNHWGVILGFTVLSGLLVYRLKFRQ

SEQ ID NO: 29448 - protein, 298 aa, Oryza sativa
MASTTAPSRTNSRVNYSNEIHDLSTVQSVSAVPSVYYPEKSFADIFPPNLLKKVISEVVATFLLVFVTCGAASIYGEDMKRISQLGQSVVGGLIVTVMIYATGHISGAHMNPAVTLSFAFFRHFPWIQVPFYWAAQFTGAMCAAFVLRAVLYPIEVLGTTTPTGPHWHALVIEIVVTFNMMFVTCAVATDSRAVGELAGLAVGSAVCITSIFAGPVSGGSMNPARTLAPAVASNVYTGLWIYFLGPVVGTLSGAWVYTYIRFEEAPAAAGGAAPQKLSSFKLRRLQSQSMAADEFDNV

SEQ ID NO: 29449 - protein, 317 aa, Oryza sativa
MGSGNLMMKKVVRPSSFDFDIQLDKSWTEDVTCPICLDYPHNAVLLRCTSYEKGCRPFVCDTDQTRSNCLERFKGAYELPANMKVSTIAVAPLDSIHIVAPNVNNRPSCPLCRGDVIGWIVIGEARLHLNQKKRCCEEDCCSFVGDFNELQKHTQQKHPDSRPSEIDPARQVDWENFQQSSDIVDVLSTIHAQVPNGIVLGDYVIEYGDDETGEEYEVFRRVRRHWWSFMFFRGFSRSSRRRRRARARERRGSGRRNSNQAHLESFNLEVPTQSVDLREIRFDEIDGEYIVTGAIPSIATPGRMASFHYRSVETVYC

SEQ ID NO: 29450 - protein, 54 aa, Oryza sativa
MAAAAAAVEKVKALWDSQVNDEEAWAFNYKLMKAGGLFVASIFVMRNFGDLMAI

SEQ ID NO: 29451 - protein, 470 aa, Oryza sativa
MWTEAWTGWFTSFGGGVPHRPVEDLAFAVARFIQKGGSFVNYYMYHGGTNFGRTAGGPFIATSYDYDAPIDEFGLLRQPKWGHLRDLHRAIKQAEPVLVSADPTIESIGSYEKAYVFKAKNGACAAFLSNYHMNTAVKVRFNGQQYNLPAWSISILPDCKTAVFNTATVKEPTLMPKMNPVVRFAWQSYSEDTNSLSDSAFTKDGLVEQLSMTWDKSDYLWYTTYVNIGTNDLRSGQSPQLTVYSAGHSMQVFVNGKSYGSVYGGYDNPKLTYNGRVKMWQGSNKISILSSAVGLPNVGNHFENWNVGVLGPVTLSSLNGGTKDLSHQKWTYQVGLKGETLGLHTVTGSSAVEWGGPGGYQPLTWHKAFFNAPAGNDPVALDMGSMGKGQLWVNGHHVGRYWSYKASGGCGGCSYAGTYHEDKCRSNCGDLSQRWYHVPRSWLKPGGNLLVVLEEYGGDLAGVSLATRTT

SEQ ID NO: 29452 - protein, 51 aa, Oryza sativa
MTLYIMQAVSDGGMLYFVSSSNTNSCSSSFHPYGGTTHCKKLLQLGNYIMV

SEQ ID NO: 29453 - protein, 237 aa, Oryza sativa
MEGVGFLDPTSYKIYDGGHVGKNCTDINKAQFSYNSGVFLQGAAFMYNHTDGEQKWEQRLDKLVDATISNFFPKDIAVEIACENHDTCTTDMYSFKGYVHRWMSQATHLAPFIRPKILPVLEKSAQAAIAQCTGGDTGRVCGFKWASGKYDGKTGAGQQMNVLAAVSSLLMENTPPPVTAKKGGTSKGNPNAGNVGDGKIDKTYGPLTTADKAGAGILTFLVLSFACGMFGWMSLGK

SEQ ID NO: 29454 - protein, 458 aa, Oryza sativa
MAASTSATSFSTPTKPASSSSSSSSPNSVCFARASGRCRMASVVVRAEAVDATISPTVSALRPSKTMAITDQATALRQAGVPVIGLAAGEPDFDTPHVIAEAGMNAIKDGYTRYTPNAGTLELRKAICNKLQEENGISYSPDQVLVSNGAKQCITQAVLAVCSPGDEVLIPAPYWVSYPEMATLAGATPVILPTSISENFLLRPELLASKINEKSRLLILCSPSNPTGSVYPKELLEEIADIVKKYPRLLVLSDEIYEHIIYQPAKHTSFASLPGMWDRTLTVNGFSKAFAMTGWRLGYLAAPKHFVAACGKIQSQFTSGASSISQKAGLAALNLGYAGGEAVSTMVKAFQERRDYLVKSFKELPGVKISEPQGAFYLFIDFSSYYGSEVEGFGTIKDSESLCMFLLEKAQVALVPGDAFGDDKCIRMSYAAALSTLQTAMEKIKEAVALIKPRVAAK

SEQ ID NO: 29455 - protein, 136 aa, Oryza sativa
MNPPKAGDASYASYKAEKDGIPQSLARRAKALENAFNSLEGITCNKTEGAMYLFPQLSLPQKAIDAAKAANKAPDAFYALRLLEATGIVVVPGSGFGQVPGTWHIRCTILPQEEKIPAIISRFKAFHEGFMAAYRD

SEQ ID NO: 29456 - protein, 374 aa, Oryza sativa
MVNQAAMPLLTPYKQAGGKIDLSHRVVLSPMTRCRSYGNVPQPHAALYYTQRATSGGLLITEATGVSDTAQGYPETPGVWTREHVEAWKPIVDAVHRKGALFICQLWHVGRVSTNDYQPNGQAPISSSDIQITPDGSGIVYSKPRRLRVDEIPQIVDDFRLAARNAIEAGFDGVEIHGANGYLLEQFMKDSSNDRTDEYGGSLENRCRFAVEVIDAVVGEIGAHRVGIRLSPFLDFMDCVDSDPEALGSYMVEQLNKHEGFLYCHMVEPRMAIVDGRRQIQHGLLPFRKAFKGTFIAAGGYDREEGNKVIENGYTDLVSFGRLFLANPDLPKRFELDAPLNKYDRNTFYTQDPIVGYTDYPFLDEDQNNSVADA

SEQ ID NO: 29457 - protein, 439 aa, Oryza sativa
MERCYDLLEPKAREIMVLDDKDGNLQLKGLAWVPVRSLEEFHEIYSIGVQRRKVAHTGLNDVSSRSHAVLSIRITTDVVKGKLNLIDLAGNEDNRRTCNEGIRLQESAKINQSLFALSNVISALNKKEPRIPYRESKLTRILQDSLGGNSHAVMIACLNPVEYQEAVHTVSLAARSRHVTNHMSSASKQETPKDKVDMEAKLRAWLESKGKTKSIQRMDGLLSPNAIKTPLSMSHKKQSASGRVSGRGKAMDQDGGKIKKVLFDSAARIPAENFHREGTQDIVNTTKKVVLPSLTPCKEDKTGSSLRKALSPISSNMDPQKQRTADDSNCLMLLELRTPMGSCNIVGKVTGATPLDKFIALGSNLKESLIQQYLDFLNVANKEELQKLKGIGERRAEYILELREDSPRPFKSLSDLGNIGLSSKQIQDILCKTATGIFK

SEQ ID NO: 29458 - protein, 49 aa, Oryza sativa
MMIKYDANIVGSSMQERDTDRSETGGEDSANKTMQRKHIVLFYCPFTLL

SEQ ID NO: 29459 - protein, 321 aa, Oryza sativa
MGGVSESTFQIQPTGSETDGPTGLFKGTVSTSNNGGFTSIRTKNFTVPEDLSAYDGIELRVKGDGRRYKLIVRTSFEWDTVGYIASFDTTKGEWQSVKLPFSSLNPVFRARTMPDAAPFDASNVTSLQLMFSKFEYDGKLNPTFTEGSFELPFSSIRAYINEPITPRFVHVSSAGVTRPERPGLDLSKQPPAVRMNKELGSILTYKLKGEDLIRESGIPYTIVRPCALTEEPAGADLIFDQGDNITGKISREEIAFICVAALASPNAVEKTFEVKSTVPFSEPFVVDPSNPPPEKDYDVYFKELKAGITGKEALEGTPAQV

SEQ ID NO: 29460 - protein, 255 aa, Oryza sativa
MDSCNGQAILEDMPGPKSPEDYQDDSVSGSVGDMFEPSPTERAEQETTLVSPAEMLVFKFGQHNNPNLVSVGGHNDSCDEDTADMFSTEPVASNNQHEQELPNDVSAPVSLKESAICQEDISVHTESCPGKSLPVPEDISAPKSPEERAIHQDDSVPRSAVLCQTSGRRRIDEISTKLLSFKISSTVKPSHIAMNAPSTKQVDNLSESAIALLRNRENTLAIKTDRPVKPNPDRSVAKNSSRRPLQPIGRRPEGH

SEQ ID NO: 29461 - protein, 114 aa, Oryza sativa
MKLVRFLMKLNNETVTIELKNGTTVHGTITGVDISMNTHLKTVKLTLKGKNPVTFDHLSVRGNNIRYYTLPDSLNLETLLVEDTPRVKAKKPTAGKPLGRGRGRGRGRGRGRGR

SEQ ID NO: 29462 - protein, 111 aa, Oryza sativa
MEGLTSSEIAGFGVGALLVCATIAAQRVDGFIASSQRTSLGMCKKCGDLRIVACSQCKGVGSVRKGGLFTFGMLDDIYESLGAETKTSNLVPCTNCRSKGRLLCPECSKVR

SEQ ID NO: 29463 - protein, 343 aa, Oryza sativa
MAAAFATHRLLYPSQAFDLIHCSRCRINWTHDDGILLLEVNRMLRAGGYFAWAAQPVYKHEEAQQEAWKEMEDFTARLCWELVKKEGYIAMWRKPLNNSCYMNRDPGVKPALCDPDDNPDDVWYVNLKACISRLPENGDGLTPFPWPARLMEPPKRLEGVEMDAHSSKKELFKAETKFWDDIVEGYIRVFKWRKFKLRNVLDMRAGFGGFAAALINRKLDCWVMNVVPVSEPNTLPVIYDRGLLGVAHDWCEPFDTYPRTYDLLHAFSLFSKEQKRCNISSILLEMDRILRPGGRAYIRDLKQVVQDVKEITTAMGWRSIMRDTAEGPYASRKVLMCDKPMVR

SEQ ID NO: 29464 - protein, 75 aa, Oryza sativa
MTTTLQAPLLPLPSVVISLHRHREFAWDNQPPFVHHINKKKPKIKPQETRSHTWRSWCEEQTILPAAFSCDVEPY

SEQ ID NO: 29465 - protein, 74 aa, Oryza sativa
MIEESDSRLPPGYIRLDEIASRAKVNSPPLGTLINSLRKEGYAACRSHIGANAIKTNCPTECCLDVAQEIRNLR

SEQ ID NO: 29466 - protein, 77 aa, Oryza sativa
MNSSSSAATPSRSMPWEDYSAGSLTSCKKSATPFLSGHLKPIASKNSRMFSRGPWYTIWPSERRTMSSKRSYVSGAG

SEQ ID NO: 29467 - protein, 112 aa, Oryza sativa
MALAGRLLVLFAIALLAISIAEHKALAKGSTSEHDDNVYQVSKGGQGSLKSYQCSPQCAYRCSQTQYKKPCLFFCNKCCNACLCVPSGLYGNKGECPCYNNWKTKRGGPKCP

SEQ ID NO: 29468 - protein, 384 aa, Oryza sativa
MAWQLLAGVLLLQLAASAAGQQQCLSATFQNGQTFLKCNPLPVLGASLHWTHHAENGTADVAFRAPQQSSGWVAWGINTRGTTMPGSSVFIASQDGSGSVSVLMTVLENTSPSLTNGSLSFDVLSPPTADYTNGVYTIFATIALPNNSTTQNTVWQAGPGSTGNVGQHATSGPNVQSMLRLDFSSGQSTGTASNSRLHRRNIHGILNAVSWGILIPMGAMIARYLRVFEAADPAWFYLHITCQLSGYILGVAGWALGLKLGSESKGITYSAHRNIGIAIFCLATLQVFALLLRPDKKNKYRFYWNIYHHSVGYSAIVLAAVNIFKGLDILKPASGWKRSYIAILATLAGVALLLEAITWVIVLRRKKSDKSSSPYGATNGNGRA

SEQ ID NO: 29469 - protein, 354 aa, Oryza sativa
METEGWPALQPLLCLAWIATTLPIIVAALPIPAAAGGHLLRRLLSAFSSRGKTVRPSPASSSGSSSSKAKFTVPQKYFMHFYVVGVLATTILLLAIWFYAYMKMTPLLPESSSYSTIASHLVGSNSFSFGRVHSRTMGHKYHVWRTVFVLLLMEIQVLRRLYETEHVFHYSPSARMHIVGYLTGLFYYVAAPLSLASSCIPEAAEYLQGQVAEFIVKGRARMPDLVIDSSSLLQPLLKLGWTQWIGAVIFIWGSLHQIRCHAILGTLREHKDSDEYVIPCGDWFNRVSCPHYLAELVIYFGMLVASGGEDIPVWFLFVFVITNLSFAAVETHKWYLQKFEDYPRSRYAIIPFVC

SEQ ID NO: 29470 - protein, 74 aa, Oryza sativa
MVSCSWASLPSFLVFMRLELLTIPREGHQDTPLHLFQIINLPLSHQGTVTIEHGQKLESSIRMQESNELLFYYH

SEQ ID NO: 29471 - protein, 607 aa, Oryza sativa
MENGAGAGDDEYTRDGSVDLRGNPVLRSKRGGWKACSFIVVYELFERMAYYGIASNLVIYLTEKLHQGTVEAANNVTNWSGTVFITPLIGAVVADAWLGRYWTFVAGSAVYLMGMLLLTLAVSVPALKPPPCDGGGGAACPRASALQLGVYFGGLYTIALGHGGTKPNISTIGADQFDDFHPPEKLHKLSFFNWWMFTIFLGILFSTTVLVYLQDNVSWTVGYGIPTLGLMVSVAVFLSGTPLYRHKVPQGSPLATMGRVVAAAVWKWRVPLPADSKELHELELEHCTTRRGFRMDATVSMAFLNKAAVKPGEGGGGSVARLPGWTLCTVTQVEETKQIVKLVPLLATMVVPCTLVAQAGTLFVKQGVTLDRRIGKFHVPPASLGAFVTATMLICIVLYDRFLVPAVRRRTKNPRGITLLQRISLGMLLQIVTMVVTSVVESQRLGYARRHGLVATGGQLPVTIFILLPQFVLLGVADAFLVVGQIEFFYDQAPESMKSLGTAMSLTAYGAGNLLSSAILAAVERVTGGGKGRTPWVTNNLNASRLDYYYAFLATLAAANLLAFVVLSCKYSYRVESTETIDVDVAMDNVAQGGGVVTVKSEAAPMA

SEQ ID NO: 29472 - protein, 37 aa, Oryza sativa
MIFETAFSKSWRVYPCKLATMKYKEKTGISVGHGHGC

SEQ ID NO: 29473 - protein, 151 aa, Oryza sativa
MVAFQNLSPGAPSSLLQVAVKNNQQPVWYSNDKIPMHAFFGEDGKMERTSFLEAWKSLPDDNEFSKEFPSSVVSSIDATVEHLAASNVFFIAKRKNSNKDVLYMSAKIPRGIPFLIELTAAVGVPGVKCAVKTPNKEMVALFFEAMESLLK

SEQ ID NO: 29474 - protein, 285 aa, Oryza sativa
MMDKKSSDTRSSDPPRTFDYNVISDNTVESPRKEGTDIKRFEESNESELNITVRNRNVILNSCQDHGPSISRTYHQDEMSQMEEVPEINGPSVSIKNLQQMSSSLLEMLDDPEESTRELALTLLVEILEKQRKAMENCIDTLIVKLLHATKDAALKVVNQAHICLTTVVTQFDPLTCLRAIASQLANQDEKVLIVSINSLSKLVIRLSQDNLMAHLSIFLPALLDAFENHSPYVRKAVVLCLVDTYLKLGPAFLPYLERLDSAQLQLVTTYASRLSQTSFIAVDA

SEQ ID NO: 29475 - protein, 175 aa, Oryza sativa
MIANQGCHLGVTMTGLAGRELTVMRMVEKVVKKVIGTEGFVSTRTTTVTINLVNGALVDTMIVATASTRAGANIGMAMMITDDNREVAVDMAGISMKVNGATEKMMAMEGVTVTREMKVITGKEAQILVSIEEKTVVTVRQASTGKGGREMIDRSLHHRQFCLACFSSYIEFCHS

SEQ ID NO: 29476 - protein, 24 aa, Oryza sativa
MRDFPFPCTDMHEHLDTEVKECTA

SEQ ID NO: 29477 - protein, 141 aa, Oryza sativa
MGSSSKVVRPEEVLDSLTNDGTIDALRMKIIAQLKANEDMKKNTMMMVEQSRVLNTPGAEKKTKRELFDALRQELENPVLEKASREVWDLILENGGLGKEITDTIESVFCRLSGIDMMPPPPSTSIPSHQERERNMAADGG

SEQ ID NO: 29478 - protein, 351 aa, Oryza sativa
MGAVTSLLYGAEDSSIAGMVLDSAFTNLYGLMMELVDVYKIRVPKFTVKMAVQYMRKIIQKRAKFDIMDLNVLQFAPKTFIPALFGHASNDMFIQPHHCDRIHQAYGGDKSIIKFEGDHNSPRPQSYYDSVSMFFYNTLHPPQLPVKCSNNLGAFKVGTVTNESFIFEIISGLRGAGTNSCSSSIDASKFPNATTPVVELLSESVNQLSIKNDSDLDFLLDENRTLSEIDGDSAGSRLQDKSSGHNEESCSCTSSNRESWGRCSSLGGASDDSFPGDISDKQENMTVKALATPLRQKDSKSTTPKTKEKKKSLWKKLNRERAGVGDSLSQRLKMCLSHSSRHKRVKSSGIV

SEQ ID NO: 29479 - protein, 72 aa, Oryza sativa
MTCPWLELLAWLLPIRNCDWKKCLRWVTIHLVLLPVVKYASEETSSPDTIKILSSRMRSWLMDGFTQVTLER

SEQ ID NO: 29480 - protein, 69 aa, Oryza sativa
MDAIDSVVDPLREFAKDSVRLVKRCHKPDRKEFSKVALRTAIGFVVMGFVGFFVKLIFIPINNIIVGSG

SEQ ID NO: 29481 - protein, 133 aa, Oryza sativa
MSGLSILLEKKARRAELALYVLPRAGDSLWYILINRHLLPNIKNAEVALFCMCMGGIMYFLEYEPDTMAPFLRGLIRRFLASKISNPSPPPNPNASYSYLQKLNVLEQPRTQQGPENGLTSSEKYNLEAIPGL

SEQ ID NO: 29482 - protein, 192 aa, Oryza sativa
MKRVQKATINFDNTLSPAHTLLQINCADQKGLLYDILRTMKDCSIQVTYGRFWSDKKGFREVDLFIKQADGKKIIDPEKQDVLSSRLRSEVLHPLRVMIVNRGPDVELLVANPVELSGKGRPRVFYDATFALKALGICIFSAEIGRQAASERQWEVYRFLLDDSSEFPLSNSLVNRNRIVDRVRKTLLGCYN

SEQ ID NO: 29483 - protein, 389 aa, Oryza sativa
MGCCGGMSSTSRAPRGIREETLLRVPGASVHLLDGAEGPVELARGDLAVVRIAKDGVAVATVARVGRGLGWPITRDEPVVRLDRLHYLFTLPDSTGGGGGGGGGALFLNYGVSFAAPDDALLASLDAFLKANACFSTPSSPAPSRSSATTTTRPAPTTTATADGYWNDFAPRMDSYNNVLAKAIAAGTGQLVRGIFMCSEAYATQVQRGADLIRPQATGSVTKRSGGAGGGGASRTTGQPDAKRGGVNKSLKRVRKLSEMTEKMSQSLLDTVIAVTGSMAAPLLRSKQGKAFLATVPGEVILASLDAINKVMDAVEAAERRSLAATSNVVSGAVSRRYGESAGEATEDAFATAGHAVGTAWNLFKIRKAVTPSSSLPGNMVKSAVRNRK

SEQ ID NO: 29484 - protein, 378 aa, Oryza sativa
MSRAMAASRRVSVFVAALVCCSLVRLSRCGGGGGGQRAQNYTSMFSFGDSLTDTGNLVVSSPLSFSIVGKYPYGMTYFHRPTGRCSDGRLVVDFLAQAFGLPLLQPYLSRGEDVTRGVNFAVGGATAMDPPFFEEIGASDKLWTNLSLSVQLGWFEQLKPSLCSSPKDCKEFFSKSLFLVGEIGGNDYNYAFFKGKSLDDAKSYVPTVAGAVADATERLIKAGAVHLVVPGNLPIGCSSAYLTLHPSSNRSDYDSTGCLKTYNDFAQHHNAVLQDKLRLLRRSYPEARIMYADYYGAAMSFAQNPKQFGFRHGALRTCCGGGGPYNFNPKASCGVRGSSVCTDPSAYANWDGVHLTEAGYHAIANSILNGPYTSPRLL

SEQ ID NO: 29485 - protein, 518 aa, Oryza sativa
MAASSFLVECLSWLVVVLFSLYIFQLLRDARRRLPPGPWPPKPLVGDLLDLGEDGKQHRTFLRLAGRYGGLMCLRFGMVPHVIVSTPDALRAVFAAAGAGGGGGGEGKKVDGIAGLPSLDVLSAMGHRAHTIFALPSQDGKWRALRKSAAAEMLAPRRISSAAAGAQLQTKIVEALRREVSGHAARGAAVVFRHAVLDSILSLLLGVLYSTDLEREERAMFRDLIEEIVGMLGTANVSDVFPPVAALDLQGLRRRMTDLLTIMYRHFDDQVALRRRSRDAGEARKNDVLDTVLDKEESEWKQEGSLLSHDVMRVLLSDLYGAGASTTAALIEWGMVDLIQNPEVMTKVREELTNVLGDKLVMDESDIARLPYLQAVVKETLRLRTVVPLVPRKAEVDIEVNGYRIPKGTNVILNAWAINRSADAWSEPDKFIPERFLGGETRGYLGQDFEMIPFGLGRRICPGMPLAQKLIPLIIGTLLHRFEWELPADAKEGGIDMTEKCGVVLSLVNPLKAIPKEI

SEQ ID NO: 29486 - protein, 138 aa, Oryza sativa
MAEETPVEAPPAPVLGEPMDLMTALQLVMKKSSAHDGLVKGLREAAKAIEKHAAQLCVLAEDCDQPDYVKLVKALCAEHNVHLVTVPSAKTLGEWAGLCKIDSEGKARKVVGCSCVVVKDFGEESEGLNIVQDYVKSH

SEQ ID NO: 29487 - protein, 61 aa, Oryza sativa
MYLMKRRMKELIKSQNPPNFVMAGLQVCSILQKCILRCPPKVCKRSLAHIQRLKHSRNLQG

SEQ ID NO: 29488 - protein, 291 aa, Oryza sativa
MKIVTVKRDDIADTPTVATPFREPRYPLGGETPMHPSRTPLHPYQTPMRDPGATPIHDGMRTPMRRGWAPMSPPRDNWEEGNPATWGSSPAYQPGTPPARPYEAPTPGSGWANTPGVSYNDAPTPRESNYGNAPSPYVPSTPVGQPMTPNSASYLPGTPGGQPMTPGNVGMDIMSPIIGGEGEGNWLLPDVLVNVLRAGDDGPGVVREVLADGSCRVALGSSGNGEIVTVLPTELEVIRPKKSDKIKIMNGNFRGYSGKLIGIDGSDGIVKLDDTYEVKILDMVILAKLAS

SEQ ID NO: 29489 - protein, 376 aa, Oryza sativa
MEWIEGVKLNQQAAIEKQGLKVLDLVNIGIQCSLRQLLEYGYFHADPHPGNILATPEGKLAFLDFGMMSETPEDARVAIIGHVVHMVNRDYEAMARDYYALDFLEPDVDVSPIVPALKSFFDDALNSTVSELNFKTIVDGLGAVLYQYPFNVPAYYALILRSLTVLEGLALYADPNFKVLAASYPYFAKRLLTDPNPYLRDALIELLFKDGKFRWNRLENLLVQGSQDREFAAKDALQPVLKLLLGPDGEELRVLVVKEAVRVTEAITFGTLIDSYNAAPEFLKPLISSGNPAGPFKISDTEREQMIELRDRVFRIWGLLRSSDGFDPTILQPIVQVLQEPEARVLGSRVAGGVTQRLAARLLQQLLRTPPAPGSP

SEQ ID NO: 29490 - protein, 237 aa, Oryza sativa
MNEAEDEKAQVTIKFKKNIKWTIHYESTGLNFEVHYALQEQPHILLAQIAQRTARSVFVKACKNIDRCEVNKPKKIDNNTINTPITLQTAGVNFEVFHKLVDYLDINEVRSNDIHAMLNTYGVEAARATIIGEVKGVFGAYGIHVDMRHLNLIADFMTFDGGYRPMSRLGMGQFSTSPFGKMTFETATKFIVEAASHGESDTLDGPSASVCLGKPVKVGTGSFGLLQNFSLEQPVAM

SEQ ID NO: 29491 - protein, 187 aa, Oryza sativa
MMPIFFCRESQIKDEVKAVLDFINYVYEIFGFKYELELSTRPEKYLGDIETWNKAEQQLTEALNEFGKPWQINEGDGAFYGPKIDIGVFDALKRKFQCATLQLDFQLPLRFKLTYSAEDEAKLERPVMIHRAILGSVERMFAILLEHYNGKWPLWLSPRQAIVCSISPIQWNTLNRSVLGYMKLVFM

SEQ ID NO: 29492 - protein, 82 aa, Oryza sativa
MAMRLAAAAAFVRRLVPARNPVISAEAEAVTCGRGDKKTKRGKRFKGSYGNARPKREKKIERIKDRVEVPRSTPWPLPFKLI

SEQ ID NO: 29493 - protein, 388 aa, Oryza sativa
MAMLTAKLTSPPAATTWLPGGGRRSAPPRRATVIRAAAVSYADELVSTAKSVASPGRGILAIDESNATCGKRLASIGLDNTEVNRQAYRQLLLTTAGLGEYISGAILFEETLYQSTTDGKKFVDCLKDQNIMPGIKVDKGLVPLPGSNNESWCQGLDGLASRCAEYYKQGARFAKWRTVVSIPCGPSALAVKEAAWGLARYAAIAQDNGLVPIVEPEILLDGDHAIERTLEVAEKVWSEVFFYLAQNNVLFEGILLKPSMVTPGAEHKQKATPEAIAKHTLTMLRRRVPPAVPGIMFLSGGQSEVEATLNLNAMNQEPNPWHVSFSYARALQNSVLKTWQGRPENVEAAQKALLVRAKANSLAQLGRYTGEGESDEAKKGMFQKGYTY

SEQ ID NO: 29494 - protein, 103 aa, Oryza sativa; identical to SEQ ID NO: 29037

SEQ ID NO: 29495 - protein, 318 aa, Oryza sativa
MATAEQRQIEHVHLPVRGLTLHVAQAGKGELGTVVFLHGFPEIWYSWRHQMLAVAAAGYRAVAPDWRGYGLSDQPPEPEAAVYDDLIEDLLAILDALAVPKAFLVGKDFGAMPAYDFALRHPNRTCGVMCLGIPLGTAGLSFDTLPEGFYILRWAQPGRAEADFGKYDVKRVVRTIYILFSRSEIPIAKENQEIMDLADLSTPLPEWFSEEDLDVYSSLYENSGFRYPLQMPYRSLHQRKPIGDAKFQVPVFIVMGEKDYVFKFPGIESAMKDGTMEKHAPNIKITYIPEGGHFVQEQFRDYVNELLLGFLKDHPVVI

SEQ ID NO: 29496 - protein, 548 aa, Oryza sativa
MADALVIAHAGGSALWESTRNQYLKNTVSPYLKVVSAMVGNDLMSFVSTWPLNAWKETLALLCTFARKEEWNVLCDTLASRLLGVGDTLAATLCYICAGNIDKAVEIWSRDLKSEDGGKTYVDLLQDLMEKTITLALATGHKSFSASLSKLVENYAELLASQGLLKTAMEYLKLLGSDEHSHELAILRDRIAFSTEENHAASTSVHAGSINSSAYPTIQPSYSTPDPSQNLYQGTSQYAVPSNQYQDYQQQSNTAYGTYNSTYSQQPTQMFVPSNTTPVISQPNATPAPVPQQPVKAFTPTNLPGLKNPEQYQQPTLGSQLYAGANPPYTSGQSTPYQGVPPTTYHQPRPPTQFQTVPTAPPAVSSATVPGTTPSQMFPGPVANNPTSRFMPSNNPGFVQRPGLSPVQPSSPTQAQGQPQPVVAPPAPPATVQTADTSKVSAELKPVIATLTRLFDETSKAMGGSQVKKREIEDNSRKIGTLFAKLNSGDISPNVSSKLIQLCSALDSGDFATAMHLQVLLTTSDWDECNFWLAALKRMIKTRQNFRM

SEQ ID NO: 29497 - protein, 307 aa, Oryza sativa
MMVLGGGWALQGPPTPEKYDQATHEGVPKHGRSGSLKVLLRLFVQIFMCSTLRQPWRLMAWRFVLQGSSSKTPGSERLTRERSESCGRNWLDKWVEERYLDDEKNAKILEVDTGKPGRHASRRRSGSHHHHSSCSSMTSEQKSRSYATMPESPSKDSTTAQQSVPSPPSVGMAEALSPLLMAVDIAELCDSPQFFSATSRPGSSRSRAFTPTKSECSRSLFGGYSDYPNYMANTESFRAKARSQSAPKQRPQYEKSSSLRKASAHAFGPGSCAPVAQRTTASLHSKFTNKAYPGSGRLDRLGMPVKY

SEQ ID NO: 29498 - protein, 111 aa, Oryza sativa
MQDTSILGIESHPLHLHGFNFFVIGQGFGNYDAVNDPAKFNLVDPVERNTVGVPAGGWVAIRFLADNPGVWFMHCHLEAHTTWGLRMAWLVLDGSHPNQKLLPPPSDLPKC

SEQ ID NO: 29499 - protein, 273 aa, Oryza sativa
MPAEQRNPLQEYQVAHIPGALFFDVDGISDRTSSLPHMLPSEKAFSAAVSSLGIYNKDGIVVYDGKGLFSAARVWWMLRVFGHDKVWVLDGGLPQWRASGYDVESSASSDAILKASAAREAIEKVYQGQLVGPSTFEAKLQPHLIWNLDQVKENIDAKTHQLIDARGKPRFDGAVPEPRKGIRSGHVPGSKCVPFPQLLDSSQKLLPPEELRKRFEQEGISLDQPLVSSCGTGVTACILALGLHRLGKTDVPVYDGSWTEWGAHPDTPVATAA

SEQ ID NO: 29500 - protein, 412 aa, Oryza sativa
MPMVRRAAASNLGKFAATVEQNYLKTEVMSIFDDLTQDDQDSVRLLAVEGCAALGKLLEPQDCVAHILPVIVNFSQDKSWRVRYMVANQLYELCEAVGPEHSREQLVPAYVRLLRDNEAEVRIAAAGKVTKFCRILSPQLAIQHILPCVKELSSDSSQHVRSALASVIMGMAPVLGKEATIEQLLPIFLSLLKDEFPDVRLNIISKLDQVNQVIGIDLLSQSLLPAIVELAEDRHWRVRLAIIEYIPLLASQLGVGFFDDKLGALCMQWLEDKVFSIRDAAANNLKRLAEEFGPEWAMQHIIPQVLEKINNPHYLYRMTILQAISLLAPVMGAEITCQQLLPVVVNSSKDRVPNIKFNVAKVLQALIPILDQSVVEKNVKPCLVELSEDPDVDVRYYANQALQACDQIMMSS

SEQ ID NO: 29501 - protein, 106 aa, Oryza sativa
MGIGHVLGVLGGALLAHAAYATIQYRAVLKITEEEFSSPPMDVMMQLLLGLALCMWAGLAVPAKFLSVLPHSEENRIVSLPANLDFMIFNHRGRALPSDPDLKLKT

SEQ ID NO: 29502 - protein, 416 aa, Oryza sativa
MLMDMFYGATEGLIKHRRRFHFHEAMLEIHDHMHDVWKRRDEDKSIESSAFSWISSLPFDGKIKEWLIGEEKYKQNTQQNHILLAVADKFLVDRQANKSGASILCFDEIQTIDVFAVVALSGILSRLLSTGTVLVSTSNKAPEDLNQDGMQREIFLDLLSKLDENCNKILVGTETDYRRLIPTDGLTQIHYFWPLTSDIRSMYEAMWHDITRQTGGNIISVTIPVMFGRYLEIPKSCNGVARFDFEYLCGRPVGAADYIAIARNYHTIFISDIPAMSMKIRDKARRFITLIDELYNHHCRLVCLAASSIDDLFQGTDEGPLFDLESFQFEGEAEGAKLRRDVLAEGNVGAAPSPTGLVAILSGQEEMFAFRRAISRLIEMQTSLYLERVERVHSSLQQQSSVLTKSSTVSQSAPSV

SEQ ID NO: 29503 - protein, 102 aa, Oryza sativa
MKGLEGTSGKQLVKEICPTCGDHDPKEDTWLMFPGSDIFARVPFHVAHTVLDKDQERLDYDTKKLQSFVKEKSFVISEKGALADRISPGIVKSLVSLTDKPK

SEQ ID NO: 29504 - protein, 198 aa, Oryza sativa
MIGVQLLKDLEKTSVSSKKSKRVPEIDDDEDWFPEDPIEAFKVMRETRLFDVSDMYTTADAWGWTWEREIKNKMPRKWSQEWEVELAIKIMHKVIDLGGTPTIGDCAIILRAAMRVPLPSAFMTILQTTHSLGYKFGSPLYDEAILLCLDLEEIDAAIAVVAEMETNGIKVPDETLDKVLAAKQSGGNSALQPPPAEE

SEQ ID NO: 29505 - protein, 241 aa, Oryza sativa
MSSHDFARRVPKRRRTNKLLSQLLPDLNSLPAEGADDGGSPSSSVLVSHAQTSAVAVAGTSQYLVPAVVAGPHIGMSSCPIIVDDINDDVVIYSASSFPQVRQQAPRTEPVVTIEDDSETTPGQAGDAVDEHVDILLSLTLGRYPRHGHQRSSNISTSPVIHIIDTPSNALPEPEKAVPKEPTFNCPVCMNELVEPSSTICGHIFCKQCIKASIQAQKKCPTCRRKLTMNNFHRVYLPSAE

SEQ ID NO: 29506 - protein, 269 aa, Oryza sativa
MLMSAGISVPDAVFGHGFLTKDGMKMGKSLGNTLEPKDLVNRFGVDSVRYFFLREVEFGNDGDYSEERFINIVNAHLANTIGNLLNRTLGLLKKNCKSTLAFDSIAAADGISLKDNVENLVDKAKDQFENLLLSSACETLMEIGNLGNLYIDEQAPWSCFKQGGESAEKAAKDLVIILETMRIIAIALSPITPSLSLRIYTQLGFTEDQFRTLRWKDTKWGGLKAGQVMMEPKPVFARIETETDEKDQSSSKATKGGKKKARSQGLVEA

SEQ ID NO: 29507 - protein, 34 aa, Oryza sativa
MNGLTRFPLSLSTIQRNHSQGNGLGGISGERRPC

SEQ ID NO: 29508 - protein, 439 aa, Oryza sativa
MAAPRHHHLALAVALALLVVTAAAADEGGPRGRRVLVLVDDLAVRSSHSAFFASLQGRGFDLDFRLADDPKLSLHRYGQYLYDGLVLFAPSTPRFGGSVDQNSILEFIDAGHDMILAADSSASDLIRGIATECGVDFDEDPEAMVIDHINYAATDAEGDHTLIAGDDLIQSDVILGSKKIEAPVLFRGIGHAVNPSNSLVLKVLSASPSAYSANPKSKLASPPSLTGSAISLVSVMQARNNARVLISGSLDLFSNRFLKSGVQKAGSKIRHEKAGNEQFVTETSKWVFHERGHLKAVNVKHNKVGETNEPGMYRINDDLEYSVEIYEWSGTSWKPYVADDVQVQFYMMSPYVLKTLSTDKKGVFSTSFKVPDVYGVFQFKVEYQRLGYTGLSLSKQIPVRPYRHNEYERFITSAYPYYAASFSTMGAFFIFSFVYLYHK

SEQ ID NO: 29509 - protein, 30 aa, Oryza sativa
MLHVVVSNQSRFFVPGLFILFISSLTVKQC

SEQ ID NO: 29510 - protein, 257 aa, Oryza sativa
MLVFCVPVFFVQALLVFVGPTFVKDENNTHGRKKIAKYFIRTSMPVGDTNICTYPLFGTIFLGLIDAILMSYVSYVGSRVLSLVINKALRRRVSLLMLSVLFFLPIRVLLLGFSVLPQPGDVAFEVIIFLSFLMMISCTTVGVLLLVYYPVADSLALREIGQREITEMVPYDDYYYEGASLVANQSFREIERNSDTSTKRGSISFRTMIREDQLQQDGVDEIGFSSRSGAHIGSPSPSGSSPSAAMPMLPLKEVPRY

SEQ ID NO: 29511 - protein, 428 aa, Oryza sativa
MPKATAAEEEEFRAEVEERLINEEYKIWKKNTPFLYDLVITHALEWPSLTVQWLPDRAEPAGKDHSVQKMVLGTHTSDNEPNYLMLAQVQLPLDDAEADARHYDDDHAEIGGFGAASGKVQIVQQINHDGEVNRARYMPQNSFIIATKTVSAEVYVFDYSKHPSKPPLDGACNPDLRLKGHNSEGYGLSWSIFKEGHLLSGSDDAQICLWDIKANSKNKTLDALQIFKYHDGVVEDVAWHLRHEYLFGSVGDDHNLLIWDLRSPVSTKPVQSVAAHQGEVNCLAFNPFNEWVVATGSTDKTVKLFDLRKIDASLHTFDCHKEEVFQVGWSPKNETILASCCLGRRLMVWDLSRIDQEQTPEDAEDGPPELLFIHGGHTSKISDFSWNPCEDWVIASVAEDNILQIWQMAENIYHDEDDVPTDDPAKAP

SEQ ID NO: 29512 - protein, 158 aa, Oryza sativa
MAKPKQPPPHAPPPPPPPPPVEGKPKPPPHAPPPPPPEAKKSFMRRMFPFLLAANVFVGAYMLMRTYQKDSGKKDTENDPTSSTPTSSPAAAEKPAEPIVAPIKVLTPISQDDQRQLYKWMLEEKRKIKPRDAAEKKKINGEKALLKEFIRAGSLPSL

SEQ ID NO: 29513 - protein, 256 aa, Oryza sativa
MERQGLDLGLSLGLGLTTAATWPAAGFCLNSGMAEQEVIRRDDVVAATAAEDERFACSPGSPVSSGSGKRGSGSGSGDEVDDAGCDVGGGGARKKLRLSKDQAAVLEECFKTHHTLTPKQKVALAKSLNLRPRQVEVWFQNRRARTKLKQTEVDCEHLKRWCDQLADDNRRLHKELAELRALKATPTPPAAAPPLTTLTMCLSCKRVANAGVPSPAAAIFPGHPQFLCGFRDHAGAASSSYGGASSGLAKAVRAAR

SEQ ID NO: 29514 - protein, 277 aa, Oryza sativa
MPVIDEASYLAKRAASTQATISSDKLAAAATPGSSLKLPNGVAKPPPAPLADLLDLSSDDAPATTSAPTTAPNDFLQDLLGIGLTDTSTAGGAPSASTDILMDLLSIGSSPVQNGPPTVSNFSLPGQAETKVAPVTPQVVDLLDGLSSSTSLSDENTAYPPITAFQSAALKITFNFKKQSGKPQETTIHASFTNLTSNTFTDFIFQAAVPKFIQLRLDPASSNTLPASGNDSVTQSLSVTNNQHGQKPLAMRIRITYKVNGEDRLEQGQINDFPAGL

SEQ ID NO: 29515 - protein, 102 aa, Oryza sativa
MLLLTYATLMWVGFSSHFAAKSPQEGKKVNESGSVVRKNSFIGWISFSYLLGIVAIELWSQVFHHYVFGSRFPFLPLIMVSLYCGVGMMYSWMWQLAWIVRH

SEQ ID NO: 29516 - protein, 319 aa, Oryza sativa
MASGNSGEPSTAPQPNRWYELRLGSSCRDPSPTAKFCTLRYEFKPASIDKTQAGSLQKTKDNRVTVEFHNNQPGKPKVTFEGSQEEYKDNDGVLFFDGETFRLERLHRAVKRLRHVRVPGESSAATSATTGMGESHSPPLPKVGKSPAMSKPAVHSVPVEVERIDIGEPENPGLRNNNRSTTYQPVTTNPFSFSPDPNDQEENLDILGDDDNGSPNNMSSGQGASVRGFDINIPNQLDIDDEIADVDVSDEADEGLNAAEALRAQVNAEGQQDEQETSSSSGSSSSSSSSGSGSGSGSSSSDSDGSDGDSASSGGDVDI

SEQ ID NO: 29517 - protein, 160 aa, Oryza sativa
MGHSYGKRAGTRYAFSRDFRKKGMIALNTYLRQYRVGDIVDIKANGAVQKGMPFKVYHGKTGVIYNVTKSAVGVIIYKQVKHRYIEKRINVRIEHISQSRSREDFLKRVKANAEAKREAKATGTVVQVKRQPLGPRGAHTLSLSENPPMTVTPLAYETTI

SEQ ID NO: 29518 - protein, 116 aa, Oryza sativa
MGCAGSTPMGAPESDATKKIRKPKPWKHPQPITMVQLTKMREEFWDTAPHYGGRKEIWGALRVAAESEVSLAQAIVESAAIIVSNTDLTLCYDERGAKYELPKYVLSEPTNLIQDS

SEQ ID NO: 29519 - protein, 160 aa, Oryza sativa; identical to SEQ ID NO: 29517

SEQ ID NO: 29520 - protein, 529 aa, Oryza sativa
MSPTISPVLVFLLLSLHQSICSSAHDAASASSFSSCLATHGVSNFSLPASPSYNTTLNFSIRNLRFTLPDVTRPAAIVLPWSKEDLRRAILCARNSSLAIRVRSGGHSYEGLSYTTENHVPFVVIDLMNLNRVQVDSVSATAWAEAGATLGELYYAVGRSSQSLAFSGGSCSTIGLGGVISGGGFGLLSRKFGLAADSVLDAVLVDPNGRVLDRNSMGEDIFWAICGGGGGSWGVVYAWKLRLVPVPHNVTVFIVDRTGPVEYVAGLVHWWQHVGPNLPDEFYLSVYFPTGSSDGNVSVSFEGQVLGTKQQTLSVLSQSFPMLGVTESDLSEMSWVESTAKFANVGTVSDLSNRSPGTNSYTKSKSDYVKAPISRHDMVEIARYLSAGPPGSIILDPYGGAMARIGSDATPFPHRAGILYSIQYTVYWGQSDQARANEYIIWLRSLYTYMTPHVSKDPRGAYVNYLDLDLGANNWTHPIGGSSMEAVARARSSWGAAYFGNNFNRLVSTKTTIDPSNVFNNAQSIPPLN

SEQ ID NO: 29521 - protein, 103 aa, Oryza sativa
MANGEHLRRAFLFFDKDGNGYIEPEELQEALVEDGATDIMEVVKDILQEVDTDKDGKISYEEFVAMMKTGTDWRKASRHYSRGRFNSLSIRLIKDGSVKLGNE

SEQ ID NO: 29522 - protein, 56 aa, Oryza sativa
MGHSNVWNSHPKNYGPGSRVCRVCGNPHGLIRKYGLMCCRQCFRSNAKDIGFIKYR

SEQ ID NO: 29523 - protein, 81 aa, Oryza sativa
MPATPTIIGALLGLGTQMYSNALRKLPYMRHPWEHVVGMGLGAVFVNQLVKWDEKLKEDLDKMLERAKQANERRYFDDDDD

SEQ ID NO: 29524 - protein, 448 aa, Oryza sativa
MRSLIRSASSRLLRARARAMATPSAARFSPSSNPARPPPPRLPLPRFLPPTPPQALLRARPLRTSAAVAAAAAVVEVGGVKIAREDVVKEEDPTNNVPDTIYSKIGLQLHRRDNHPLGILKNTIYDYFDKNFSGNFNKFDDLCPLVSIKQNFDDVLVPADHVSRSYNDTYYVDAQTVLRCHTSAHQAELLRDGHTHFLVTGDVYRRDSIDSTHYPCFHQMEGFRVFTPDEWSDSGMDGTAYAAADLKKTLEGLAKHLFGAVEMRWVDTYFPFTNPSFELEIYFQGDWLEVLGCGVTEQEILKNNGRIDNVAWAFGLGLERLAMVLFDIPDIRLFWSNDKRFTSQFSEGKLGVKFKPFSKFPPCYKDMSFWINEEFTENNLCEVVRGIAGDLVEEVKLIDNFTNKKGMTSHCYRIAYRSMERSLTDEEINDMQWNVREEVQNKLKVELR

SEQ ID NO: 29525 - protein, 114 aa, Oryza sativa
MMPSLLTIVHFLALGGHGVSCSLGQLEISNSQRLGNINSLTLSSSQEYIVFHTSRLGMPSMVNFFSRGNGPGPPQKSSSIFTTLFILSRHNSSRLGNWPSGGSLTHLGICAMVI

SEQ ID NO: 29526 - protein, 337 aa, Oryza sativa
MVAIVAATTTTGAGPAVPKEGSLERPAWSGETPLSRLVGALIAFKPLYSLMKLASREVIIRTAEKSNVPWREMTKQVLESDVYEVFDRIRDLNLVYPDYYLNPFHAYDEGNLSWLAAAEAEPATMSIAKRAIPDAGSIEEANQIVRGNWLNAIEEHHLKYSGNCQINDILDIGCSVGVSTRYLAEKFPSARTVGLDLSPYFLAVAAHKEEKLSRQNPIRWVHANGEATGLPSNSFDLVSLAYVCHECPARAITGLVNEAFRLLRPGGTIALTDNSPKSKVLQELSPVLFTLMKSTEPFLDEYYMLDLEETMRQAGFVNVHSILTDPRHRTVTATVPF

SEQ ID NO: 29527 - protein, 308 aa, Oryza sativa
MMWDKIAKSEYGSLLCMDGSLDTWSRSLNVPVLNSLSEDDEVERFSQEHQDAVECHKQQRKKVSQLKKTIRSTKGFKEFQKIIDMRNFTKEKIERLEARSRRLTRRIRQIEPTGWKEFLQISKVIQEARALDINTQVIYPLGETAAAIRGENELWLAMVLRNKVLLDLKPSQLAAICGSLVSEGIKLRPWKNSSYVYEPSSVVTGVINYLEEQRNSLVDLQEKHSVKIPCEIDAQFAGMVEAWASGLTWREIMMDSAMDDGDLARLLRRTIDLLAQIPKLPDIDPVLQKNAQIACNIMDRVPISELAG

SEQ ID NO: 29528 - protein, 35 aa, Oryza sativa
MLCCCQIQTCSLHLFSSRRDTVVGKFLQHSYGGNL

SEQ ID NO: 29529 - protein, 282 aa, Oryza sativa
MDGLHGTDGCFSPGRAMSPQVRPPVPPDAASGGQYLAELLQEHQKLGPFMQVLPICSRLLNQEIMRVSGMFRQPGVGDFERSQPASPNQMHPSHIVPNFRGNAFGPWNGMRPERVSFSQGPGWQGAPQSPSSYIVKKILRLEIPTDAYPNFNFIGRLLGPRGNSLKRIEASTGCRVFIRGKGSIKDPNKEEQLKGRAGYEHLDDPLHILIEAELPANVIDARLAKAQEILEELLKPVDESQDYYKRQQLRELALLNSPLREESPHPGSASPFSNGGMKRMKQ

SEQ ID NO: 29530 - protein, 676 aa, Oryza sativa
MAAGVLMTKPFMAAAAAALVSLLVMLRCLPSVVATTVSFNYSSFSNASKNITLQGSAALAGAEWIELTKGKGNNLSSGGTMGRMVYTPPVQLWDAATGEVASFTTRFSFNITPKNKSNKGDGMTFFLVSYPSRMPYMGYGGALGLTSQTFDNATAGDRFVAVEFDTYNNSFLDPDATYDHIGIDVNALRSVKTESLPSYILIGNMTAIVDYNSNSSIMSVKLWANGSTTPYNLSSKVDLKSALPEKVAVGFSAATGSSFEQHQLRSWYFNLTLEQKQPTGQHSRGGVVAGATVGAILFIVLLFTMVAILVRRRQRKKMREEEEDDSEGDPIVEIEMGTGPRRFPYHILVNATKSFAAEEKLGQGGFGAVYRGNLRELGLDVAIKRFAKDSSKQGRKEYKSEIKVISRLRHRNLVQLIGWCHGRDELLLVYELVPNRSLDVHLHGNGTFLTWPMRINIVLGLGNALLYLHEEWEQCVVHRDIKPSNIMLDESFNAKLGDFGLARLIDHNVGVQTMTHPSGTPGYLDPECVITGKASAESDVYSFGVVLLEVACGRRPMSLLDNQNNSLFRLVEWVWDLYGQGVVLKAADERLNSDYDATSMECVMAVGLWCAHPDRYARPSIRAAMTVLQSNGPLPVLPSKMPVPIYAPPMASSEGQLSSSTGMSSSSLTITSITPR

SEQ ID NO: 29531 - protein, 128 aa, Oryza sativa
MDTLSGNILRLEADLEKVKLVLQLKETCSDQGASENFFQAMVVFLRRAEAEIKNMKTAEEPHPLRIFVVVDEFLLILDRVCRDVGRTPERVMMGSGKSFRVPAGTSLPPHRNENRRVLSSSDEDSSSS

SEQ ID NO: 29532 - protein, 170 aa, Oryza sativa
MLASPALAGARAFAATVSGSLGIPIPAISAPSPSQARRRASLVVVAKVKVSTPQADRIARHVRLRKKVSGTTERPRLSVFRSNKHLYAQVIDDTKSCTLVSASTMHKSLSKDLEYSAGPTVEVAQKIGEVIAKSCLEKGITKVVFDRGGFLYHGRIKALADAARENGLDF

SEQ ID NO: 29533 - protein, 74 aa, Oryza sativa
MCFGAVHLSRIKRLVYGAKAEAAIAIGFDDFIADALRGTGFYQKANMEIKKADGNGALIAEQVFEKTKEKFQMY

SEQ ID NO: 29534 - protein, 366 aa, Oryza sativa
MAPTAASAAAGEEQQAVGLAARDSSGHLSPFAISRRSTGDDDVAIKILFCGICHSDLHCIKNEWKHSIYPLVPGHEIAGVVTEVGKNVTRFKAGDRVGVGCMVNSCRSCEGCNNGFENHCPEGVFTYNSVDKDGTVTYGGYSSMVVVHERFVVMFPEAMPLDVGAPLLCAGITVYTPMKYHGLNAPGKHVGVLGLGGLGHVAVKFARAFGLKVTVISSSPGKKREALERLGADAFVVSSSAEEMEAARSTMDGVINTVSANTPMAPYLALLKPNGKMILVGLPENPLEVPPFSLVHGNRTLAGSNIGGMADTQEMIELAAKHGVTADIEVIGADDVNTAMERLAKADVRYRFVIDVGNTLHAAAAE

SEQ ID NO: 29535 - protein, 470 aa, Oryza sativa
MGRRRLLLSDLLLLLLIAIAVAGAAAAIAIPRAAPAFGVETGWPPEHCLRCFAPPDAPFVLGAAAAIHLGNTNSCIAGYDDDDAPLGAKRSYYQFCIPSWVALAHDNGTVISGEAAMNRAALSPSTAVSAFMRLLHRRVEDDVVKREIELVPYKFTKMLGWVSVQLDTDAEFSVDHLAGILISHLKHTAEAHLGRHINNAVITLPSRLSYSADGRQVLSSAAKEYSGFRAVKVVDEHIAAAAAYGHHTKQGDRKAILVFHLGGRTSHATIFKFVDGTARLIATRAHHFLGGDDFTARIVDHMVEHIKEQHGRDVRQEEKAMVRLRVACEHAKKALSEQQETLVQMDSLLDDGAVFSATLTRAKFEELNHDLLDRAMALVKEVVVTTGGVEVVDEVLVVGGSARIPKVRQLVKDYFNGNGNGTHPNSRGCKGPVDVEPEDAVLHGAALLSRPLPVAEGTAAARSIGSVGGI

SEQ ID NO: 29536 - protein, 189 aa, Oryza sativa
MITNYGKARLREKAECVLDKMTEMGFKPNYVTQECLIMMYAYCDCVSRARQIFDELVSSQNNVHLSSVNAMLDAYCMNGLPMEADQLLDSVIKKGAVPSASTYKLLYKAYTKANDKKLIQKLLKRMNSQGIVPNKKFFLDALEAFGNTDKKPRTVPSKNSASKPDVESANNSGTDTSSKPNLSVWQVAA

SEQ ID NO: 29537 - protein, 86 aa, Oryza sativa
MQKAMRTILMILILVDLLQMVQLIQTPVAWIFLPQTYWMISSMCLQQQLMKQTTLQTLRLICLLMQISNQQYQVQKQLRVQMSRAM

SEQ ID NO: 29538 - protein, 20 aa, Oryza sativa
MWRYPAHTASAAEEEEASET

SEQ ID NO: 29539 - protein, 150 aa, Oryza sativa
MCLQNFPCQEVERHNKPEVELKTSPELLLNPVLICRNEAEKCLIETSINSIRISMKVKQADELENILAKKFLRFLSMRAEAFQVLRRKPVQGYDISFLITNYHCEDMHKHKLIDFIVQFMEDIDKEISELKLSVNTRGRLVATEFLKQFI

SEQ ID NO: 29540 - protein, 44 aa, Oryza sativa
MCYCWRDFHCCWHHRFFCLPWSSCYKEKDGDRKTWIIPYLAYTL

SEQ ID NO: 29541 - protein, 24 aa, Oryza sativa
MDFSLEMDGMLVSLYSVSRLELLC

SEQ ID NO: 29542 - protein, 282 aa, Oryza sativa
MAGKHGRNGFEDDDVNPFAGGSVPPANNSRLPPLSHEPADFYNVDIPLDSSKDLKKKEKELQAMEAELNKRERELKRKEEAAAQAGIVIEDKNWPPFFPLIHHNISNEIPIHLQRMQYLAFSSFLGLAACLFWNIIATTTAWVKGEGVIIWLLAIIYFISGVPGAYVLWYRPLYNAMRTESALKFGWFFLFYLIHIIFCVWAAVAPPFPFKGKSLAGILPAIDVIGRSAIVGIFYFVGFGLFCLESLLSIGVIQQVYMYFRGSGKAAEMKREAARGALSSAF

SEQ ID NO: 29543 - protein, 24 aa, Oryza sativa
MINDTDHSFQLVPNVLLYYNWVMW

SEQ ID NO: 29544 - protein, 316 aa, Oryza sativa
MGSGNLMMKKVVRPSSFDFDIQLDKSWTEDVTCPICLDYPHNAVLLRCTSYEKGCRPFVCDTDQTRSNCLERFKGAYELPANMKVSTIAVAPLDSIHIVAPNVNNRPSCPLCRGDVIGWIVIGEARLHLNQKKRCCEEDCCSFVGNFNELQKHTQQKHPDSRPSEIDPARQVDWENFQQSSDIVDVLSTIHAQVPNGIVLGDYVIEYGDDETGEEYEVFRRVRRHWWSFMFFRGFSRSSRRRRRARARERRGSGRRNSNQAHLESFNLEVPTQSVDLREIRFDEIDDEYIVTGAIPSIATPGRMASFHYRDTRYGR

SEQ ID NO: 29545 - protein, 118 aa, Oryza sativa
MLWDVLMEAVQWSGKNQQQNSNSALRQVKAWAGLLNAFCTSGRLELELIYKVQTQCYEDAKLMKLFPEIIRTLYDQDVLAEDTILLWFRKGSNPKGRQSFVKALEPFVKWLEEAEEEE

SEQ ID NO: 29546 - protein, 21 aa, Oryza sativa
MLEKGSCHASINGAVKAYHYS

SEQ ID NO: 29547 - protein, 50 aa, Oryza sativa
MNLVDPFRRPSMTIDRTYPIFTVRWLAVHGLAVPTVFFLGSISAMQFIQR

SEQ ID NO: 29548 - protein, 121 aa, Oryza sativa
MLTWSAVNMNPQPSKLEEAGPVSPFASSLAAGFSGVVAAAASHTFDTAKSRSECTVIPKYIAMERRLLKWKVPGNWIERKTGISPADRNVLFRGIGQRMARSGFASFLLVGSYYFVIDQFL

SEQ ID NO: 29549 - protein, 454 aa, Oryza sativa
MFFMGYMRGRRHPMTFWPEMLKLKDWPPSSMFDQRLPRHGAEFITALPFPEYTDPRYGPLNLAVRLPAGVLKPDLGPKTYIAYGCYEELGRGDSVTKLHCDMSDAVNILMHTAEVSYDTEQLDKIAKIKMKMREQDLHELFGVSESGTKGKADDEASKISCNMENKHTSNQSTKGLDINALPPDDSGSDIGDKPSFCQSEVESELTQCSKHNHEVNSSVKMHAGAHCTSDNQGYIDRSGFKRKDSDCSDQQKTGGALWDIFRREDSEKLQDYLRKHASEFRHIHCNPVKNVSHPIHDQTFYLTVEHKRKLKEEHGVEPWTFEQKLGDAVFIPAGCPHQVRNLKSCIKVALDFVSPENVGECVKLTGEFRRLPSDHRAKEDKLEIKKIALNALKEVINFLDPLPKGSKNRDEVVEVTKPKRKYGNRRGDLKSGEDQPIDESIEERKPKKRGRSKR

SEQ ID NO: 29550 - protein, 115 aa, Oryza sativa
MSYLLSYISKMLCIKIPSEARQASEDGGSGGLTECSVCLSRIRVGEATRRLPCRHAFHRDCVDRWLLSCRRTCPLCRVYVVVDGNKPGVAAKHTGEPPLAEDMVIWFSAMLVPGF

SEQ ID NO: 29551 - protein, 409 aa, Oryza sativa
MGLSRRAKNLIVDVPFQGAKWLRCVDLAGQLFGNTATPPPPTTIAHGSESAAVQEDYTSQTLVSDSCNPKKKAAGLKMERIRLPRPILKFRPALNEACRIDCFPFVDHKMFWVDHLGRPFLFEAETRLMDMLPCLHKPKSMPFSVFVPNADADNDYEHLRPGSSLFVMERIPKPEVNSSTQWSDQFEAFVYCKHKRTSTNFSKTWQWQLLPPPPYVREPKYWHSCSRPEISSYTSLTVNGDPHICISIDGVGTYCLNTASHTWIKVGNWTLPFHGRVEYVPEFNLWFGFSSDESPHYLAASNLSAMDSQPQLVGRWEELYLPEDLKECKNPQLVNLGSGRFCITRFFHSRSHNSDSRGDVDQNVAVFTGVEVKPCFQDANGGSGKVELQMIPHKSLFHKSNHTTIDAVF

SEQ ID NO: 29552 - protein, 198 aa, Oryza sativa; identical to SEQ ID NO: 29286

SEQ ID NO: 29553 - protein, 342 aa, Oryza sativa
MAGDEPLPGDGQRRRYLIGYALAPKKQQSFIQPSLVSRAAGRGMDLVPVDPSRPLPEQGPFHLLIHKLYGEEWRGQLDAFSAAHPAVPVVDPPHAIDRLHNRISMLQVVSELDVPLHAHHHHTFGIPSQVVVYDAAALSDSGLLAALRFPLIAKPLVADGTAKSHKMSLVYHREGLRKLRPPLVLQEFVNHGGVIFKVYVVGAHVTCVKRRSLPDVSSDVLQDASAEGSLSFSQVSNLPNERTAQEYYDDMRLEDAIMPPTAFINDIAAALRRALGLHLFNFDMIRDARAGDRYLVIDINYFPGYAKMPGYETVLTDFFWEMVHKDDDTPNLNPNPNDEDVK

SEQ ID NO: 29554 - protein, 401 aa, Oryza sativa
MKITVASGSLQPFTSDQWSMHQKDTIRKRRKRMATIHVADQQGGRVVGASVSVRQTAKDFPFGSAIASTILGNQAYQKWFVDRFNAAVFEDELKWYSTEPMSGQLRFDVPDQMLAFVRSHRVMVRGHNIFWENQDATPSWVKGLSPDDLRAAVNGRIQNLMTRYRGEFAHWDVNNEMLHYNFYEQRLGANASVEFFSVAQDADPLATLFMNEFNVIETCDDVSSTVDTYVAKLKDLRAGGAVLEGIGLEGHFLKPNIPLMRAVLDKLATLGLPIWFTEIDISNRYDAQTQAVYLEQVLREAYSHPAVTGVMLWTALHPNGCYQMCLTDWNLNNLPVGDVVDRLLQEWQTGQAAGPTDAHGAYSFSGFLGEYIVSVTYANSTSQATFSLSPGDETRHINIQI

SEQ ID NO: 29555 - protein, 92 aa, Oryza sativa
MAGIIHKIEEKLHMGGGEHKKEDEHKKEGEHHKKDGEHKEGVVEKIKDKITGDHGDGGEHKEKKDKKKKKEKKHGEEGHHHDGHSSSSSDSD

SEQ ID NO: 29556 - protein, 88 aa, Oryza sativa
MIRHLASLAEKRVLISFAPRTLYFDFLKRVGELFPGPSKATRAYLHSERDIEDALRDAGWRVANRGFISTQFYFAKLFEAVPIAAASQ

SEQ ID NO: 29557 - protein, 121 aa, Oryza sativa
MKSLPDRWLLQNSASLKSLHIRKVKSLESLQPSMRDLTSLQKLTLSGVGQLLGSLPDFPTSLLELDISECGSELKKKFRKHGSPERSKIAHILRVRIDTDYNYINITGSSLFIMGKECYGE

SEQ ID NO: 29558 - protein, 94 aa, Oryza sativa
MANIALQPDFFHDVTLVEECVFFLNLFRPHLVQTRSPAAELLKCHKYSEKSFSNRCFECTCIEFFPEAFFFFLFYLPFPPISTFLPWIWREPAE

SEQ ID NO: 29559 - protein, 37 aa, Oryza sativa
MVDSKSSLLLKKSTFSSESMTSWAPLWTDLDRHERHQ

SEQ ID NO: 29560 - protein, 225 aa, Oryza sativa
MDLPNQDRKDSQGICFLGKVKFSEFVERQIGEMEGVLLEAETGDYLGTHRGFWFYTIGQRQGLRLPGGPWYVVEKGVQNNVVFVSRNYYSLDKRRRTFRVGSLNWFSNSGPTNNEQLKCKVRHSPEFHDCTVTQEQTSEHGVILVVRLSEDDQGLAAGQFAAFYRDNLCLGSGIILDSWDEMNFPVCARALEIARMEDKSRLGKPVKIMNLEHIVKSEKEAIEVA

SEQ ID NO: 29561 - protein, 61 aa, Oryza sativa
MVWIIAKTLRRVMLMLARTILVILVLQQKCSLMVLVSRKIQTCYVHQPSTLIIGLLSCWMR

SEQ ID NO: 29562 - protein, 191 aa, Oryza sativa
MSTVSGTRRAPRRQSQDGPGDKVVVNLDAISSPVVGSRRAVPTSTGARASPIDVEALDDEVQTLSASQVPPPRRNRRTRRQPVAVVDLEVDASREGNKRQRVAPVIHCLSPERGEGSSLKTSNEPPKAKEPVFNCPVCWNKLEEPSTTICGHIFCTTCIKQAIQIQKKCPTCRKSLRANNFHRIYLPNSDS

SEQ ID NO: 29563 - protein, 39 aa, Oryza sativa
MQLLAIQNQNSVLSAHGLSFQYHLFFEQVIYLRHFVLFS

SEQ ID NO: 29564 - protein, 105 aa, Oryza sativa
MAPGKLAVFALLASLLLLNTIKAADYPPAPPLGPPPHKIVDPGKDCVGACDARCSEHSHKKRCSRSCLTCCSACRCVPAGTAGNRETCGRCYTDWVSHNNMTKCP

SEQ ID NO: 29565 - protein, 11 aa, Oryza sativa
MLNCWFGSHWL

SEQ ID NO: 29566 - protein, 77 aa, Oryza sativa
MTAGYIAGSLVGSFAIAYLCDTFVSDKKAFGGSIPKTVSDKEWWQATDTKFQAWPRTAGPPVIMNPISRQNFIVKST

SEQ ID NO: 29567 - protein, 388 aa, Oryza sativa
MERNQHRDGDGDGEGRHHHVVQVPASAVEVAAMEETSSEAADRSLRQKAAAMVASSMETYRSKPMSFWLLLVLSAGAMLTAFPASSLLSRLYYNNGGQSKWILSWSAVAGWPLPALLLLPCYLAGKAAPTPLSPKLCAWYALLGLLSAADNLMYAWAYAYLPASTASLVAASSLAFSALFGCAIAKNRLRLSSLNAVVVITAGVVIIALDSGSDRYPGITGRQYALGLVWDVLGSALHGLIFALSELVFVRVLGRRSFHVVLEQQAMVSLCAFAFTTVGLAVSGGGFPAMRREAAAFRHGEASYAMVMVWSAVTFQLGVLGGTGVLFLASTVLAGVLNAVRVPVTSIAAVIWFHDPMSGFKILSLLITVWGFGSYMVGHSSTKKASTN

SEQ ID NO: 29568 - protein, 51 aa, Oryza sativa
MLVVLTSYRMMAELHSRRITWRTYLTQLIDLLKANDGGLELRIHSNALQCA

SEQ ID NO: 29569 - protein, 83 aa, Oryza sativa
MAAKPEPTQLEKEQMFGMMEKEMEYRVDLFNRLTQTCFDKCIEKRYKEAELNMGENSCIDRCVSKYWQVTNMVGQMLGNRPQM

SEQ ID NO: 29570 - protein, 142 aa, Oryza sativa
MAAPDVEYRCFVGGLAWATDDRSLEAAFSTYGEILDSKIINDRETGRSRGFGFVTFSSEQSMRDAIEGMNGKELDGRNITVNEAQSRRSGGGGGGYGGGGGGYGGGRGGGGYGGGGGGGYGRREGGYGGGGYGGDSGGNWRN

SEQ ID NO: 29571 - protein, 102 aa, Oryza sativa
MAAAGGGGAGAAGGGKVSFKIILTSDPKLPFKVFSVPEAAPFTAVLKFAAEEFKVPPQTSAIITNDGVGINPQQSAGNVFLKHGSELRLIPRDRVGALAAPF

SEQ ID NO: 29572 - protein, 178 aa, Oryza sativa
MEKGKGLARRWAVELHDASSSSSSHSSIPDPPGFTRSAPDADDAAGARQRKDSETAWKAQKAWEVAQAPFKNLMMMGFMMWMAGSTVHLFSIGITFSALWQPISALRSVGKVFEPFKDPRVDTLAPKLVFIALNLAAMGLGVWKLNTLGLLPTNASDWVFSLAPAREVEYAGGGIPLH

SEQ ID NO: 29573 - protein, 45 aa, Oryza sativa
MLLSSVGVVEMHHKQGCLVSSLAICCIEYLQIHCTEFVRVAAVLL

SEQ ID NO: 29574 - protein, 367 aa, Oryza sativa
MAARVILLLILLIACVAVPAAAAFETVYAFGDSFTDTGNTHSTTGPYSFGYVSSPPYGATFFHRSTNRYSDGRLVVDFLADRLALPGFLPPYLSPAAANATHGVNFAVAGATAIEHEFFARNNLSVDITPQSIMTELAWFEAHLRRSPAAARAVGDALFWVGEIGANDYAYSFMAATTIPQDQIRNMAVDRLTTFIEALLKKGAKYIIVQGLPLTGCLPLTMTLARPEDRDNISCAATVNQQSHAHNRRLQASLRRLRRQHPAAVIAYADYYAAHLAVMAAPARYGFTEPFKTCCGAGGGAYNFEIFSTCGSPEVTTACAQPAKYVNWDGVHMTEAMYRVVAGMFFQDGRYCHPPFSTLLARRNKGN

SEQ ID NO: 29575 - protein, 370 aa, Oryza sativa
MSSGPPQRSKRWLYAIVISSIALLFIGIACMFLLCRNKSVATIGPWKTGLSGQLQKAFVTGVPKLQRSELEGACEDFSNIVASYPHYTVYKGTLSSGVEIAVVSTVIATNKDWSKHSEGRFRKKIDLLSRINHKNFINLLGYCEEENPFMRMMVLEYAPNGTLYEHLHVEGFDHIDWNGRMRVIMGVAYCIQHMHELNPSITHPDLHSSAILLSEDGAAKVADMSVWQEVISKGKMPKNDDIVDHHEPVSADPAGNVCSFGLLMLEIISGRPPYSEHKGSLANLAMECIKDDRNISCLLDPTLKTHKENELEIICELIQECIQSDPKKRPGMREVTTRLREVLAISPEAATPRLSPLWWAELEILSVEAT

SEQ ID NO: 29576 - protein, 246 aa, Oryza sativa
MAAALATVVSFLLVVLVSVAHGWNKDCPPPGSGSSGGGHHGKPPGSGSGGGGHHGKPPEHHHHHKPPPSPRCPSCHPPYTPPTPRPPPTPPYVPSPPPYVPPYIPPPTPPYVPPYIPPPTPPYVPPPTPPSPPPYVPPPTPPSPPPYVPPPSPPATKTCPIDALKLNACVDVLGGLIHLVIGQKARAKCCPLVQGVADLDAALCLCTTIRARLLNINIYLPVALELLITCGKHPPPGFKCPPLYGA

SEQ ID NO: 29577 - protein, 458 aa, Oryza sativa
MALSRRLLPLLLRRGSTPSLSPARALSTAAVTADAPAAAAAAAGEEAMTIKGVRISGRPLYMDMQATTPVDPRVLDAMLPFYLSRYGNPHSRTHLYGWESDAAVEEARARVASLVGADPREIFFTSGATECNNIAVKGVMRFYRDRRRHVVTTQTEHKCVLDSCRYLQQEGFEVTYLPVRPDGLVDVAQLADAIRPDTGLVSVMAVNNEIGVVQPLEEIGRICKEKGVPFHTDAAQALGKIPIDVNQMGIGLMSLSAHKIYGPKGVGALYLRRRPRIRVEPQMSGGGQERGIRSGTVPTPLVVGFGAACEIAAKEMDYDHRRASVLQQRLLDGIRGQVDDIVINGSMEHRYPGNLNLSFAYVEGESLLMGLKEVAVSSGSACTSASLEPSYVLRALGVEEDMAHTSIRFGIGRFTTEEEVDRAIELTVHQVKKLRDMSPLYEMAKAGIDLKSIQWAQH

SEQ ID NO: 29578 - protein, 48 aa, Oryza sativa
MNQQNWAVYVCCVTLAPLIAFGLLKISHLLVKSVFLRVGMLEPFAAYY

SEQ ID NO: 29579 - protein, 23 aa, Oryza sativa
MSFWVAVKSLSGPWQMIQCIVWF

SEQ ID NO: 29580 - protein, 392 aa, Oryza sativa
MIESGEGIDWAVAEALAFATLIVEGNHVRLSGQDVERGTFSHRHAVLHDQENGRKHCPLDHVVMNQNEELFTVSNSSLSEFAVLGFEMGYSMENPNSLVLWEAQFGDFSNGAQVMFDQFLSSGEAKWLRQTGLVVLLPHGYDGQGPEHSSARLERFLQMSDDNPFVIPEMEPTLRKQIQECNWQVVNVTTPANYFHVLRRQIHREFRKPLIVMAPKNLLRHKDCKSNLSEFDDVEGHPGFDKQGTRFKRLIKDRNDHKQVEEGIKRLVLCSGKVYYELDEERKKTERSDVAICRVEQLCPFPYDLIQRELKRYPNAEIVWCQEEPMNMGAYSYISPRLYASMKTLGRGSFDDIKYVGRAPSAATATGFLSVHAQEQTELVKKALQAEPIKFP

SEQ ID NO: 29581 - protein, 459 aa, Oryza sativa
MAGAGKGKGEVEGMEQKLEKLMSAFHDHQEGNKAVRHQKELEELFSFLREHEAAFSQLPGDKKDDLDALLRNIEGVLELCKNQEEKKKKTTNKMGDCIPFKSSSRPPADHTSSTSVVAPLLMQARDILGDSSSSAPAAAGPNKKEVLYEWTTSYVDEKRLYGWDDEATEVADALAGPEEDDDELFRAAGIFGIHGSGKTALAQKVFVHDRIKDTFLLRLWVCVGPTPPDDDKQQQYEVKFSLLYRMLDNLGLDTYKVEEVVNGSEAVKKHSGDSDAAKESKIGVLLFILHVALAKTSYLIVLDDIRAYDPWYTNLALPPPPHGEWSDRLAYGLPKLNKSAVLVTCRKEEHARAMVRTGRVFHPPLLAVADAWKLFEREYLQEAEKKQVGYNVKDDVLYNDLKVVQEGMVGKCLGLPVAILEAAKGFAQYCTYVDDDDAKTTQPTTAKGADAGDPAHAAA

SEQ ID NO: 29582 - protein, 60 aa, Oryza sativa
MSYVENIWAESEDVRVIFTYWAFTCYYLFVCVWFLLRVAGWLLDQVCSDLAFIENTKCSP

SEQ ID NO: 29583 - protein, 393 aa, Oryza sativa
MSRTLLSHILHRPPPLLASRGGGRGGALPSRLRTLRLNCSVAEATASGDEAPAPPARKKRVVSGVQPTGLVHLGNYLGAIKNWVPLQDLYETLFFIVDLHAITLPYEAPQLSKATRSTAAIYLACGIDSSKSHVRAHVELMWLLSSSTPIGWLNRMIQFKEKSRKAGDENVGVALLTYPVLMASDILLYQSDLVPVGEDQTQHLELTREIAERVNNLYGGRKWKKMGGRGGSLFKVPEALIPPAGARVMSLTDGLSKMSKSAPSDQSRINLLDPKDVIMNKIKRCKTDSFPGLEFDNPERPECNNLLSIYQIITGKTKEEVIRECENMNWGSFKTTLTDALIDHLQPIQVRYEEIMSDPGYLDGVLLEGSGKAAEIADITLNNVYQAMGFLRR

SEQ ID NO: 29584 - protein, 148 aa, Oryza sativa
MSYSVNDNLRPTAEYFQSIGADAASLIQKSPQAFGLNIEAKLKPITEFFLERDFTMEEIGTMANRFGIIHTLSMEDNLLPKYEYFLTMGYPRNELVKFPQYFGYSLEQRIKPRYARMIDCGVRLILNQLLSVSDSRFEDILRKRMDGI

SEQ ID NO: 29585 - protein, 251 aa, Oryza sativa
MAASTASAPFTPLLHRRRASVHGRRGSGRAFVAVVVAAAAGGAPETEPSPATAAGAAAQGKKKTVDTRIHWSDPDEGWVGGNAKKDGGGRKKEPLGGRFADLINNPSESHYQFLGVEPKADIEEIKAAYRRLSKEYHPDTTSLPLREASERFIRLREAYNVLSREESRRFYDWTLAQEAESRRLQQLRSRLEDPYQQDLDSYQSVPDMVDRLGGRNMDLSDQAMTALTIDIGIIIFCVFCLIYAVFFKEQY

SEQ ID NO: 29586 - protein, 62 aa, Oryza sativa
MQRVLSSLMRWRRRRGVAGARSNDPQAWDQHSVKGDGEDGATTARTVAPRRRRCRAAAARSK

SEQ ID NO: 29587 - protein, 311 aa, Oryza sativa
MVLLAAAAVGPHKTLNPTLSPPSSGGRRPRLRFPLPLPRGGHLRCSAGYREAAAAAASTSSTTTTPRPTEIPWSRELCNSVRLIGTVGTEVELRQLPSGGSVARGRLAIWKSATETTWVTLAFWDDLAVVASEHVKKGDRIFVSGRLVSDTVDEGPEKRQVYYKVVVQQFNFIESFQQVQLYEPEAGLDTLGGKHGDYVGSTSGSSEGKSRDHVDSSSRSTEQLWQAFFANPFDWWDNRTNKKNPRYPDFKHKHTGEALWVDGRNNPNWVISQLAILDSRMGSLQGNDRKPVAFMYADDFMTPDTDTEAHM

SEQ ID NO: 29588 - protein, 244 aa, Oryza sativa
MVKTVVGEEAQLKALEETLSASASPAQVGLVVGKLSASSDRALAYSLIPTPPTDSGAPACSLLRAAPNPKAAKAASSDASSSLDFDVDWVAEHARQVSRMLLGGMTVIGIYIWASEASFKATSPAVLSQVLRAVSQVAPLYGTGVDERLLIHISYSPRRWACRICDMSSGRLRPCDFKYTKLLASLQTFRCTYNFEIRLPVVQAEPFKKVISKAISHLTKQVQNAKALIDGVLGDHYRQWLHWE

SEQ ID NO: 29589 - protein, 260 aa, Oryza sativa
MGRSPCCEKAHTNKGAWTKEEDQRLIAYIRAHGEGCWRSLPKAAGLLRCGKSCRLRWMNYLRPDLKRGNFTDDEDELIIRLHSLLGNKWSLIAGQLPGRTDNEIKNYWNTHIKRKLLARGIDPQTHRPLLSGGDGIAASNKAAPPPPHPISVPAKAAAAAIFAVAKPPPPPRPVDSSDDGCRSSSGTTSTGEPRCPDLNLELSVGPTPSSPPAETPTSARPVCLCYHLGFRGGEACSCQADSKGPHEFRYFRPLEQGQYI

SEQ ID NO: 29590 - protein, 133 aa, Oryza sativa
MIPPDQTIRHPSPPKKINKLKSLIFRKKTKDHPNKLTKQLSAAGMVEELFEEGSAMLSERLGNDSSGRRTSSSLFTCAICQVDLEPSEGISVHAGSIFSSSSSKPWEGPFLCSDCRDKKDAMEGKRPSGVKVL

SEQ ID NO: 29591 - protein, 67 aa, Oryza sativa
MTNHNARILYPSFSLHPCLVLSSYGESSNQWYCCCTLCMLIRTIRLLIIMFDTQLHAHTDSEIILNA

SEQ ID NO: 29592 - protein, 153 aa, Oryza sativa
MLDSIWQSLAVFFIPYLAYRKSTIDGASLGDLWTLAVVILVDIHLAIDVIRWNWITHAAIWGSIVATLICVMVIDSIPILPGFWAIYKVMGTGLFWALLLAVIVVGMIPHFVAKAIREHFLPNDIQIAREMEKSQDSHDVTHPEIQMSTVARA

SEQ ID NO: 29593 - protein, 118 aa, Oryza sativa
MPKGRDVEDKDEFVFNEEFSAPLYRIKVNAIQMKETVEENTSTTERVFQDRQYQVDAAIVRIMKTRKTLSHTLLITELFQQLKFPIKPSDIKKRIESLIDREYLERDRSNPQIYNYLA

SEQ ID NO: 29594 - protein, 263 aa, Oryza sativa
MPVEERATLLTQVAGLSDEGAQDVELVLEMIPSIEVDIKCETEGEEGIQEGDVVTMYAWVSLHRRNGLTAALPHAPSFPFHKEENFWLLLADAASNEVWLSQKVSFMDETTAITAASKAIQETQEALGASAKEIGIAIREAVDRVKKGSRLVMGKFQAPAEGTHNLTSFCLCDAWIGCDTKTSLKLKVLKRSRAGTRGHVAEEGPVAEDGIEEEEEEEEEEYDDYESEYSDDEEDEKSKGKGKVANGVAHQKANSDIDSGSDD

SEQ ID NO: 29595 - protein, 296 aa, Oryza sativa
MYDELASKGNVEYIAGGATQNSIRVAQWMLQTPGATSYMGCIGKDKFGEEMKKNAQAAGVTAHYYEDEAAPTGTCAVCVVGGERSLVANLSAANCYKSEHLKKPENWALVEKAKYIYIAGFFLTVSPDSIQLVAEHAAANNKVFLMNLSAPFICEFFRDAQEKVLPFVDYIFGNETEARIFAKVRGWETENVEEIALKISQLPLASGKQKRIAVITQGADPVVVAEDGQVKTFPVILLPKEKLVDTNGAGDAFVGGFLSQLVQQKSIEDSVKAGCYAANVIIQRSGCTYPEKPDFN

SEQ ID NO: 29596 - protein, 177 aa, Oryza sativa
MESCPSVKNILLLDSEGKRVAVKYYTDDWPTLSAKLAFEKSVFVKTQKATAGAEAEIVMFDGHIVVYKFIQDLHFFVTGGEEENELILASVLQGFTDAVDIILRNNVDKRTALENLDLILLCLDEIVDGGIVLETEGSVIAEKVSAHGIEGATSLAEQTIVQALTTAREHLTKSLLM

SEQ ID NO: 29597 - protein, 89 aa, Oryza sativa
MSQNNPSQLLPSELIDRCIGSKIWVIMKGDKELVGTLCGFDVYVNMVLEDVTEYEYTAEGRRITKLDQILLNGNNIAILVPGGSPPDVA

SEQ ID NO: 29598 - protein, 468 aa, Oryza sativa
MARRSKGGGAEGDGMRMQVVWRKGAVRLVLVSAIAWALLVILALAFHLWSCNSDVPFLSALCKKDSKVLYALDSIRSSSKPLHRCPIPVADDPDSITIPKRTPNTIVKRLSYITVDKQDKDPSPLFGGRQSWKQREDSFKLNATMKVHCGFMKNSGADMDDVDVKYIQKCKFVVASGIFDGYDIPHQPSNISIRSQKLFCFLMVVDEVSLDFIEKNTTVKFDKAGGKWVGIWRLITLHRLPFDEPRRNGKVPKILTHRLFPQAWYSIWIDGKMELIVDPLLILERYLWRGKYTFAVAVHKHHKSIYEEGDAIKRRKRYARPLVDLQMKMYYHEGMEPWNPKKRMPSDVPEGAVLIREHTTMSDLFSCLWFNEVNLFTPRDQLSFGYVVYRLGDALKFFMFPNCEYNSLFILHRHTREHSSKVEWAKTIDEIVKKGLKESKGGLGLWTPYPADLSSVELPSVKRTSPAG

SEQ ID NO: 29599 - protein, 192 aa, Oryza sativa
MYTARKKIQKEKGLEPSEFEDSVAQAFFDLENGNQELKSELKDLYINNAVQMDIAGNRKAVVIHVPYRLRKAFKKIHVRLVRELEKKFSGKDVVIVATRRIVRPPKKGSAVQRPRTRTLTAVHDGILEDVVYPAEIVGKRIRYRLDGAKVIKIFLDPKERNNTEYKLETFSAVYRRLCGKDVAFEYPMTETA

SEQ ID NO: 29600 - protein, 16 aa, Oryza sativa
MAAAEPSPLPNPARSR

SEQ ID NO: 29601 - protein, 83 aa, Oryza sativa
MSSDVPGYFVGRPMNQAEPAKEQQQGADEQRPATNAQIPGDYFVGRPANPQQPPSQPPRAQERSSFLAKWYSNLFFENRTIIV

SEQ ID NO: 29602 - protein, 356 aa, Oryza sativa
MAKYGEGDARWIVQERADGTNVHNWHWAERDCLEWSRSRLTSLLAGLPVLSGEGGLALRTTALDKLDGEAYVNIRKGKVIPGYELSLTLAWEAEATTESGVVKVSGAAEVPYLADENADEDPELRVTVRGDDGPVARRAKDAFLTKGKPLVLEKIREYVAAMAKGGPAKDELDSKKTPTKAAAVEAGGAATAPAPAAEKKEEAPAVKEKKAKAKDKEGFKTIEMTEKFYCRAKDMYEILMDENRWKGFTQSNARISREVGGQFSLFDGSISGVNEELQEGKLIVQKWRFGSWPDGVHSTVRLVFDEPESGVTVISLKQTDVPEEDRYGNSTVVENTERGWRELIFQRIRGVFGFGI

SEQ ID NO: 29603 - protein, 55 aa, Oryza sativa
MLVTLMFGMKGGARSMMAAEVVQNTLTNGLNDQRVTGGQSGAISGMSISTRMAME

SEQ ID NO: 29604 - protein, 122 aa, Oryza sativa
MAAEEGVVIACHNKDEFDAQMTKAKEAGKVVIIDFTASWCGPCRFIAPVFAEYAKKFPGAVFLKVDVDELKEVAEKYNVEAMPTFLFIKDGAEADKVVGARKDDLQNTIVKHVGATAASASA

SEQ ID NO: 29605 - protein, 53 aa, Oryza sativa
MKELVDPSLDVGYDPEEMAHILAVASMCIHHSSSSRPSMKSVSAMNTLTIRPL

SEQ ID NO: 29606 - protein, 268 aa, Oryza sativa
MAVLSSSSHGLLHPPLRLLAAASASSGSSYSIPHARLRLAVTTPSRLPSPISSSPDPPPDVAHDEDEQEGQHHKEERDERYGFEIQVRKLPKRNRRLVRARVRVDAPLDAVWATLTDYEGLAGFIPGLSECRLLDQSDCFARLYQVGEQDLALGFKFNARGTIDCYEGELQLLPAGARRREIAFNMIDGDFKVFEGNWSVQEEVDGGEISADQEFQTILSYVVELEPKLWVPVRLLEGRICNEIKTNLFSIREEAQRIQRLQDKRNPC

SEQ ID NO: 29607 - protein, 238 aa, Oryza sativa
MEHPHIVRLMGVCPESCGLVYEHLPNGTLLDILSNSKSLSWKDRVRILGEQRSALAYLHSCRPHAIIHADLKLTNILLDAANSSRLGDFGTARAVHVKPLQDQADTICRRTNPMGTTGYMDPVFFVTGELTAESDVYAFGVVVLQVLTGLLDLNIADQVREALKMDAVHSVLDASAGSWPEVQAEKLLRLALRCCSLERKRRPAITCDAEWRSLDIMLRMANSPSKSRKWTSISIHAT

SEQ ID NO: 29608 - protein, 27 aa, Oryza sativa
MPNSVELADDHVRNLGLVTLILFICQL

SEQ ID NO: 29609 - protein, 91 aa, Oryza sativa
MASRLVAAAAASSSSSPLARLVSRRGLAGAADHHGPPKVNIWQEPMNPANWKEEQFVLASLAMWGGIFYGVGRLFSGKKEDKTTEAAPAQA

SEQ ID NO: 29610 - protein, 88 aa, Oryza sativa
MASTKMAVVAILAALLLMAAVEPALATPPSLLPARKLQMPRLMDVVSAESKLACLPAGGFCMFRPMDCCGNCGCLYPVGVCYGSRCEE

SEQ ID NO: 29611 - protein, 321 aa, Oryza sativa
MARPLGQQQVGAAAALVIVVACCVVAGCSGARGRGFREEFDVIWGEDHVRVTDEDDAATRQVVALTLDQASGSGFQSKDQFLFGEFSMEMKLVPGESPGTVATFYLTSEGDAHDEIDFEFLGNVSGEPYVMHTNVFAQGRGNREQQFYLWFDPTADFHNYTILWNPLNIIFSVDGKAVRVFKNHEAAGVPYPSGQAMRVHASLWNGDFWATRGGQVKINWTAAPFVASYRTYAYSACAVPAAGGGGGGPCTSGQLPNSTSSPSTCDCGGAWMDRQLGADGERDVAWARANYMIYDYCGDQWRFPQGLPAECSLDQSSGHRT

SEQ ID NO: 29612 - protein, 58 aa, Oryza sativa
MRIMIIMFARWFGSDSSKMCRCGVEGVSGCRCVACHQPSNIGRCFTVLNFIHSSINWE

SEQ ID NO: 29613 - protein, 156 aa, Oryza sativa
MACSPRVFLSASATPPPPSAAASSSSPFLSTGHVSSAPSTSRWTVQYKQPGHTFYRRTHVQSFLAFASTDASEGKRSSGDNVVTVDPLEAKRLAAQQMQQIQAREKLKRRRRAEAINGALAMIGLTVGLVLEGQTGKGILAQLAGYLTALSSLFGQ

SEQ ID NO: 29614 - protein, 182 aa, Oryza sativa
MDPWHMFTSFPQYLLIMSSYINILNVYAFSNWHDVSWGTKGSDKADLLPSAKTEKGSDGKHNVIEEPDLPQADIDSAFEATVKRALAPYVPPEEKDEKTLEDSYKSFRTHLCTAWIGSNATLAVVITQDNFDRFGFSSNASARTAHFFQALLWSTAVLALIRFIGCLWFLGRTGLFFCVRKR

SEQ ID NO: 29615 - protein, 47 aa, Oryza sativa
MARAKPLAGERINTIHVQNSHMFISSLISSHLCVCIDEYGCMRNNAK

SEQ ID NO: 29616 - protein, 68 aa, Oryza sativa
MNGAKRSAEAVGCQNASVGERSALEGSNRESGGRRSGSENVGLSNENIGENPMPRKPKVSSARFVHGG

SEQ ID NO: 29617 - protein, 232 aa, Oryza sativa
MIRGKKNFLPPHPLVMGFGILFRLDESSLASHLNERRVRGEDEEALPDVESQKLESNAELDGELDSDSETGKEKHDDESSLDNINVKKIDNPIPSNAPYVKDNADSSEQLSEIRTVVNSTTSTSKGQTSDRTVSSQLEDLLDKNLGLGPTKVLGRSSLLSSNSASVADDIDDLDTKKTSVRDKPYISKADRRKLKKGQNVGDSTSDSPNGEAAKKPVNSQQEKGPVSVWTWQ

SEQ ID NO: 29618 - protein, 275 aa, Oryza sativa
MAPGLYTDIGKKTRDLLYRDYGTHHKFTLTTCTPEGVTITAAGTRNNESVFGELQTQLKNKKLTVDVKANSESDLLTTVTVDEFGTPGLKSILSLVVPDQRSGKLELQYLHEYAGINASVGLNSNPMVNLSGVFGSKELSVGVDVAFDTATSNFTKYNAALSLTNSDLIASLHLNNHGDTLIASYYHLVKHHSNTAVGAELSHSFSRNESTLIFGSQHSLDPHTTVKARFNNYGMASALVQHEWRPKSLITISGEVDTKAIEKSTKVGLSLVLKH

SEQ ID NO: 29619 - protein, 500 aa, Oryza sativa
MDRRLLLSALLFIALACSSNRVHGALNRHSFPEGFLFGTGTSAHQYEGAVDKRGQNIWDTFSRIPGKIADGSNADIANDFYHRYKEDLNLITAMNMDSFRFSIAWSRILPNGTISGGINKEGVEFYNSLINEVIAKGLKPFVTIFHFDTPQALEDKYGGFLSENIVKDYVDYADLCFSLFGDRVKLWNTFNEPTIFCMNGYATGIMAPGRCSPYASASCAAGGDSGRESYVAGHHLLVAHAEAVRLYRARYRAAHGGEVGITQVSHWFEPYDAGSAADRRARRRALDFMLGWFMHPVAHGEYPPAMRRLVGGRLPAFTAEQSEMLRGSFDFIGLNYYTSNYAVAAPPPNKLHPSYLTDNWVNATGYRNSIPIGPPAYTPIFFNYPPGLRELLLYVKRRYNNPTIYITENGTDEANNSTIPISEALKDETRIGFHYKHLQFVRKAIQEGVKVKGYFTWTFMDCFEFGDGFKDRFGLIYVDRATLARFRKKSSYWFADFLRR

SEQ ID NO: 29620 - protein, 34 aa, Oryza sativa
MFTRGKLTRPPTLGISLSRRWMTRRLSWPDFYLL

SEQ ID NO: 29621 - protein, 31 aa, Oryza sativa
MRQYKVCGFCTGKLEVIVPIGKLRCKLYICT

SEQ ID NO: 29622 - protein, 143 aa, Oryza sativa
MAMAYKMATEGMNVKEECQRWFMEMKWKKVHRFVVYKIDERSRAVLVDKVGGPGEGYEELVAALPTDDCRYAVFDFDFVTVDNCQKSKIFFIAWSPTASRIRAKILYATSKQGLRRVLDGVHYEVQATDSSEMGYDVIRGRAQ

SEQ ID NO: 29623 - protein, 488 aa, Oryza sativa
MDGGGQGVARRHGAVAEEDPDRRRGDRSGKEGDDDGVDVDEKAPPPRRTSRRVASLDVFRGLTVALMILVDGAGGEWPVIGHAPWNGCNLADFVMPFFLFIVGMAIPLSLKRIPDRGRAVRRVVLRTLKLLFWGILLQGGYSHAPDDLSYGVDMKHVRWCGILQRIALAYLVVAVLEIVTKNAKVQDQSSSGFSIFRMYFSQWIVACCILVIYLSLVYGIYVPDWDFRVSDVKNPNFGKILTVTCGTRGKLSPPCNAVGYIDRKVLGINHMYHRPAWRRHKDCTDDSPHEGPFKTDSPAWCYAPFEPEGLLSSLSAVLSTIIGVHYGHVLVHMKSHTDRLKQWSIMGITLLILGLTLHFSHAIPLNKQLYTFSYICVTAGAAGIVFYMFYFLVDILNLHYPFAPLKWTGMNAMLVYVMAAAGIFEGFLNGWYYEGTNNTLVYWVRKHVFVKVWHSTRVGILLYVLFAQILFWALVAGLLHRARLYWKL

SEQ ID NO: 29624 - protein, 38 aa, Oryza sativa
MNKMSITPNRSFFHQIMANSDTGLTMPARIRPSISPPS

SEQ ID NO: 29625 - protein, 140 aa, Oryza sativa
MAAIKAAIEGAEGQDTAHKEFAKCHIMGNHKRPLLLSSESRKLIAYHESGHAIVALHTQGAHPIHQATVLPHGLSLGMVTQVASPGNTSISKQKILARIDVCFGGAVAEELLFGEHTVTAGAKNDLFTAKELAQKLVLYC

SEQ ID NO: 29626 - protein, 67 aa, Oryza sativa
MEGVAAQFAGPILTIVAAAAVTFYAVSFMELRDKSFEELDEKYSELDDAGGQQRRARRRAERKSRKK

SEQ ID NO: 29627 - protein, 197 aa, Oryza sativa
MLSGDKKSAAMNVASLVGIQADKVIAEVKPHEKKSFISELQKEHKLVAMVGDGINDAAALASADVGIAMGGGVGAASDVSSVVLMGNRLSQLVDALELSKETMRTVKQNLWWAFLYNIVGLPIAAGALLPVTGTVLTPSIAGALMGFSSVGVMANSLFLRMRLSSRQQPIHKPQATISDVLPNAAESEKSYPSKWSA

SEQ ID NO: 29628 - protein, 282 aa, Oryza sativa
MRLLSRQLGIKNFAPLKPLFVDLHMGSHSYLRALATAPIIPIAVEKGWSESASPNVRGPPALVFTFPQMEDRLKAAYKATTDGKFPEALRQFLSILHTIPLIVVDSRREVDEVKELIEIVREYVLGLRMELKRKELRDDVNRQQELAAYFTNCKLQRVHMRLVLGSAMGLCYKQKNFATAEHFARMLLENNPNEAQARRARQVQQQCSGKKDSSELNYDYRNPFVVCGATYVPIYRGQKDVSCPYCGSRFVPSIEGQLCTICELAVVGADASGLLCSPTQSR

SEQ ID NO: 29629 - protein, 209 aa, Oryza sativa
MSKCIGRGAFRLRGKKASHDTTLLPPLGLRTAAAGATARETHPPPPPPPAMGTREVYEEKLRSGAHLHRDPTMNPGLGSARCPRCLSLLTPNSSGEGDWAITSVLHDATAVAGSGAGAMLSAVHGFNTGIPFVQKHVKGPKWLQLLVGVPPLLLFSGTSALFGAYALPTFAQLTVTSYYAASSASHYAVSQITRQIERSHLSDTNGNSR

SEQ ID NO: 29630 - protein, 273 aa, Oryza sativa
MGDEKSPLSQMGSRDRDRELLIPVSGGGSAPGDGDGDGDRAASSSASAALSSSSREAFHKVVRSWASKKFMTGCVILFPIAITFYITWWFIHFVDGFFSPIYAQLGINMFGLGFITSVTFIFVVGVFMSSWVGASVLSLGEWIIKRMPLVRHIYNASKQISAAISPDQNKQAFKEVVIIRHPRIGEYAFGFITSSVSLQSYTGQEELYCVYVPTNHLYIGDIFMVNSKDVIRPNLSVREGIEIVVSGGMSMPQILSTLDPQTILGDRTGASRS

SEQ ID NO: 29631 - protein, 192 aa, Oryza sativa
MKVQTVLQPRKHLVPFHVEGGQPSYLIVAGLVFTPLTEPFIEEECEETLGLKLLAKARYSLSTFEGEQIVIVSQVLAHEVNIGYEHMGNQQVIKLNGTVVKNIHHLAHLVDNCKDKFLTFEFEDDFLVVLDREEATTASSDILKEHAIPSVRSSDLSEPYVDTEQEIQKPNDDFGDSPVTNYEMGVDCLLWA

SEQ ID NO: 29632 - protein, 427 aa, Oryza sativa
MQISDYSVPVGLRLLKLLLATVEASVPAEALEPFWTDVYRKSWGVKLYSTSSTKEVFEMLTILEGAIRRDFLSSDFETTTELLNLSTQDSASRNTVPRSGSADVLPWVPDTVAAVVLRLLDLDSAISYTLRQKVGSNKERGAGEFMKLPPRYTPAKTKQETEPMGTGFDRQETWLTPSNGRGGRGGRGRGSRGGSRGGRSRSRGGKVPRGISSSPKIEFRGYSASAVSSEKAPRKYARRGRNRGRGRGLRTVRPRQPSDIGARSIPKPNLLGSFSMLRNAKHTTAMESPQSSGAEEWGLERRPSYVKDDEDNSASQSEESSEENSEPMNEEYDELLPDYSRDNSGSSPLQMMDDGSDDNEEDAEGDEDGEEDGEDYDAEQHVDEDNDDAEMGEDDVEDNDDGDGGGGGAENGDEDEDGTSYSSEYSE

SEQ ID NO: 29633 - protein, 283 aa, Oryza sativa
MEFEDRCHKVQEPKFDCLLFDLDDTLYPLSSGIASHVKKNIGDYMVEKLGIEESKIENLGNLLYKNYGTTMAGLRAIGYSFDYDEYHSFVHGRLPYENIKPDPVLKHILKNLRIRKLIFTNGDKDHAVRALKRLGLEDCFEGIICFETLNPPCPSPPCDGEASIFDIAGHFSMPGAAADELPRTPVLCKPNVDAMEEALRIANVNPHKAIFFDDSVRNIQAGKRIGLHTVLVGTPQRVKGADHALESIHNIREALPELWEEAEKAEDVLIYSDRVAIETSVTA

SEQ ID NO: 29634 - protein, 219 aa, Oryza sativa
MAQSVLLYVFENILKLLHPFMPFVTEELWQALPYRKQAIIVAHWPATDLPKNSLSIKRFQNLQSLIRGIRNVRAEYSVEPAKRISSSVVAAADVLDYISKEKQVLALLSKLDMQSIHFSELPPGDANQSVHIVADEGLEAYLPLADMVDVSEEVKRLSKRLSKMQSEYDSLLARLNSGSFVEKAPEEIVRGVREKASEAEEKISLTKNRLAFLQSTVSS

SEQ ID NO: 29635 - protein, 285 aa, Oryza sativa
MKDKHTKMPRGFGFVTFSDPSVIDKVLQDEHTIDGRTVEVKRTVPREEMSSKDGPKTRKIFVGGIPPSLTEDKLKEHFSSYGKVVEHQIMLDHGTGRSRGFGFVTFENEDAVERVMSEGRMHDLAGKQVEIKKAEPKKPGGGDSSSNGRHSHGSGGGHRSSYRGSGGGNSGSSSSGGYGGYGGGYRSAAAAYYGSTGYAGYGRGYGYGGNPAFGSGFGSGYGGSMYGGPYGAYGAYGGAYGGGGAYGAPGGYGAGGYGAYGGAGGMGGGGSTSGRGSSRYHPYGK

SEQ ID NO: 29636 - protein, 57 aa, Oryza sativa
MWQGGTTKSQSARHGSRWSRCRGSIRVHSSNGLIYCPSSSCPLSIDLASAVLCCHRR

SEQ ID NO: 29637 - protein, 382 aa, Oryza sativa
MESEQVKRRFGRCPYCRAMIYQDPNAIIYYCSKCRTPIRGKNPEPTDDAEYALSQLEILSADTASVFSDDPDTLSRTSSVAYGGGEQPPVRTSSAPYAAFDRGSVRAGSRSGEQSGEERGGSPMHSRVSELRPTSRRTRRPMSGDMGAFRDDGSSYGSDNDVPTSAAASYRRRASPLTSQELEASSSSMGSSGYQPSGVSSSSMGSSSVYEPSGAARSPLTDPAFQRDLLQALDNLRRVIAAVEQPYGVDAHLQQAGMPPKSASCNDAATGGSGGGGGAYAAAATRRNSRLMRRLESQLVQALPRDGLRRDRSTSSSSSASSSRPGGDRARAAGRKHHCRAVLGGTPFVVCDKCSEILQLPAAVSANRAARLECGGGVVLGA

SEQ ID NO: 29638 - protein, 135 aa, Oryza sativa
MAGRGKAIGSGAAKKAMSRSSKAGLQFPVGRIARFLKAGKYAERVGAGAPVYLAAVLEYLAAEVLELAGNAARDNKKTRIVPRHIQLAVRNDEELSRLLGTVTIASGGVMPNIHNLLLPKKAGGSAKAAAGDDDN

SEQ ID NO: 29639 - protein, 392 aa, Oryza sativa
MAFSSTAAAASTAFVSGHRRRGGACHLLSSSFLIAFPRAVAARRCGEAAAAPRRVGAVTVRAQAAAGAGKKSVLIVNTNGGGHAVIGFYLAKDLLAAGHAVTVLTVGDEGSDKMKKPPFSRFSELTSAGATTVWGDPADVGAAVGGGASFDVVLDNNGKDLDAVKPVVDWAKAAGVAQFLFVSSAGIYTPSDEPPHVEGDAVKESAGHVGVEKYIAEQFGSWASFRPQYMIGSGNNKDCEEWFFDRIVRGRPVPIPGSGMQVTNISHVRDLASMVALAVESPGAAAGRIFNCVSDRAVTFNGLVKMCAAAAGAQPEILHYDPAAVGVDAKKAFPFRNMHFYAEPRAAKEVLGWRSSTNLPEDLKERFAEYASSGRGQEEMSFDLDDKIIAAA

SEQ ID NO: 29640 - protein, 426 aa, Oryza sativa
MITGSEVYQVVEAMAPLYTAAALGYGSVRWLKAFSNEQCAGINHFVALYAVPVLIFDMVSTNNVYKMNGRLIAADTLQKAVLLLGLMAWALWERSRARGAGAKAKAAVSSPLQWVITCFSVASLPNTIIMGVPLLNGMYGPVSKDLMKQIVVMQFCIWYNVIIFLYEYMAARRSASAPPPASSEGSAKISPSSPVKAAAAAADTNGNAVAADRPQEVAVNIEITEMAASTARDGVSGETTAAAKEVSSGEVAPVEEEEASAPAPSMKHVIWMAVKKLLQIPNTYASFLGLIWSLIAFKCGFSMPKIVEDSLFTIRTTAVGLSMFSSGTFIARQSRFAPCGYKIASFSMVIKFLIGPVVMLFASLVIGMHGTLLHIAVVQAALPLAVTSFVYAEEYKVHADIMSTGVILGIFISLPVTIVYYILLGL

SEQ ID NO: 29641 - protein, 290 aa, Oryza sativa
METQKRTMNLKDMSGRSVEVTMWGDFCNREGSQLQGMVERGIFPVLAVKAGKVSDFSGKSVGTISSTQLFINPDSAEAHSLRQWFDSGGRDASTQSISRDITPGASRNEIRKTVAQIKDEGLGMGDKPDWITVKATVIFFKNESFFYTACPNMIGDRQCNKKVTKSTNGNWTCDKCDREFEECDYRYLLQFQIQDHSGTAWVTAFQEAGQELLGCSATELNALKEREDPRFADTMLNCLFQEYLLRLKVKEESYGDERKVKNTAVKVEKVDPSGESKFLLDLISKSSALH

SEQ ID NO: 29642 - protein, 157 aa, Oryza sativa
MASKVELVVEVKSPADKLWTALRDSTELFPKIFPEQYKSIETVEGDGKSAGTVRLLKYTEGVPMVTFAKEKVEVADDEKKVVSYSVVDGELVSFYKNFRVTLQVTPKGGAAAPAADGAVVSWTMDFDKASEEVPDPDVIKETAAKTFHDLDDYLLKN

SEQ ID NO: 29643 - protein, 220 aa, Oryza sativa
MKFAKSPHPPQDKTMVVATLAEVAQGMGAPISAYVDKIMPLVLKELASSEATNRRNAAFCVGEMCKNGGAAALKYYGDILHGLHRLFADSEPDDAVRDNAAGAIARMIMVQPQSIPLNQVLPVFIKALPLKEDHEESMVVYSCVCNLLLSSHPQILPLVPDVINAFAQVVVSPNESDEVKTVVAKAVSHLISVYGQQMQPILSALPPAHANALASFANRR

SEQ ID NO: 29644 - protein, 446 aa, Oryza sativa
MAAAGAGSSEVAARVLLQRYQPFAPPPGEYHQFGSGGAAAAGDMTEAVLIRTPLKRKHDREENEAAESNDWTMSPGYTNPAGSPVPTPLSGKGSKAFAKSKAAKGQKSCPQTPLCASSPGNPVTPVGGCRYDSSLGLLTKKFLNLLKGAPGGIVDLNNAAETLEVQKRRIYDITNVLEGIGLIEKKLKNNIRWKGIDDSRPGEVSDDMSILQADIEALSLQEHSVDQQISEMRDKLRGLTEDENNQKWLYVTEDDIKSLPCFQNQTLIAIKAPHGTTLEVPDPDEVNDYPQRRYRIVLRSTMGPIDVYLVSQFEEMSGMETPPRTVQPVSMDSLENPRTPLAAEPNKAAESQPNIQDGLLMPSDAPSSSQDIGGMMKIVPSELDTDADYWLLSDAGVSITDMWKTAPEVEWEGIEKFNAEDFLEVSTPRQQDKPSSDIMDGDSCIS

SEQ ID NO: 29645 - protein, 108 aa, Oryza sativa
MAPKKDKAPPPSSKPAKSGGGKQKKKKWSKGKQKEKVNNSVLFDQATYDKLLSEVPKYKQITPSVLSERLRINGSLARRAMKDLMDRGLIRMVSVHCSQQIYTRATNT

SEQ ID NO: 29646 - protein, 243 aa, Oryza sativa
MHGHGHKCEDILDVLLRFHRDGGLGITLTKEIVSAVLFDLFAAGSETTSTTIIWAMSELVRTPHVMERAQSEIRQVLQGKTVVSEADIEGRLHYLQLVIRETLRLHPPVPFLIPRLCSEANSKIMRYNIPQGAMVLVNISAIGRDEKIWKNANEFRPERFKDDMVDFSGTDFRFIPGGAGRRMCPGLTFGLSNIEIALASLLYHFDWKLPNDASSCKLDMRETHGVTARRRTELLLKATPLYT

SEQ ID NO: 29647 - protein, 287 aa, Oryza sativa
MVPFAIGSETAGSITYPAARCGVTALRTTFGTVARTGVMSISESLDKLGPFCRSAIDCAVVLDAIRGKDAGDPSSREVAIEDPFHVDIRQLTVGYLDSAEMEVVHVLSAKGVKLVPFKLNYTVQSVQSILNITMDVDMLAHFDNWQRERHDDDYEAQDQWPVELRRARLIPAVDYIQAQRARGKLIREVRESFTVDAFIGNVTDWELVCLGNLVGMPVAVVPTGLKSIKNPPEGGTRRRTTVTTGIYAPPDHDHVALALAMAYQSVTDHHKQRPAIGDLGPGDDIQR

SEQ ID NO: 29648 - protein, 326 aa, Oryza sativa
MEMVDGNNGIVGSTTGSNYYVRILSTINRELLKPSASVALHRHSNALVDVLPPEADSSISLLGSSEKPNVTYTDIGGCDIQKQEIREAVELPLTHHELYKQIGIDPPRGVLLYGPPGTGKTMLAKAVAHHTTAAFIRVVGSEFVQKYLGEGPRMVRDVFRLAKENAPAIIFIDEVDAIATARFDAQTGADRGVQRILMELLNQMDGFDQTVNVKVIMATNRADTLDPALLRPGRLDRKIEFPLPDRRQKRLVFQVCTAKMNLSDEVDLEDYVSRPDKISAADIAAICQEAGMHAVRKNRYVILPKDFEKGYRTNVKKPETDFDFYK

SEQ ID NO: 29649 - protein, 210 aa, Oryza sativa
MYLELKTDDLLWECDPSPSLPFQALFVKLRQLASVAGDVLLGKEKIQKVLLSRLTETVVMWLSNEQEFWDVFEDQSIQLRPSGLQQLILDMHFVVEIAVCGRYPHRPVQQLVSVIITRAIAAFSVRNVDPQSSLPEDEWFLDMAKVAINKQLGTSGSESELEEPVVVHDEISDSEESSISSPSTIGSEDSFASANNDDLETPVYFTDPEA

SEQ ID NO: 29650 - protein, 100 aa, Oryza sativa
MKSSTLLVILAVQAALIMGIFAAVAKENAVGESKAIDINPGQLKCCSNCNFSFSGLYTCDDIVKKCDPVCKKCAVVKTYPVKMFKCTDTFLGMCGPPCKH

SEQ ID NO: 29651 - protein, 41 aa, Oryza sativa
MSGCLQHKAFFWRLLRLSSYMALNWEAPRSAADYGAFGSSK

SEQ ID NO: 29652 - protein, 126 aa, Oryza sativa
MRAACELTARVLEYAGTLVKPLATTDEIDRAVHQMIIDAGAYPSPLGYGGFPKSVCTSVNECICHGIPDSRVLQNGDIINIDVTVYLNGYHGDTSRTYLCGEVDESTMQLVKPANTVLVLRQLVRE

SEQ ID NO: 29653 - protein, 400 aa, Oryza sativa
MRSAMATASVVTYLQRPRELPVPEFRAPPPSPVTGVLTSSSSGSLAYGECPDSNEDDEIGRFLRRSARVPVLRLPERAVPRKKKAAWAPPVIDVRLLALPEAGGPVAEALRSAAVAFGCFQVVGHGVDRSLVSAALRHVAAATARAAAPEPEEVEVNGDDENGEEMWWSPGDGGQEMAGNWALQSGASHFRNTADALFIQLEQTATKIMDVPQRGGAVATQSIAGADTNGSLLCIRKHRRRQDDRSGGASGPIRHDDILRMLVRSSRCSRALALHLCPGASAFHIFSRRGWSRFRPMDGAVVVTVGDQLQACNGGLYKSVAGKPAYSNDDLRGNGGDTGVASAELFYCFPSAGTAAGKASEVLSADAGKIIPLNLQFMVAACLVLGYHFLLSSLHSTWLL

SEQ ID NO: 29654 - protein, 155 aa, Oryza sativa
MQIFVKTLTGKTITLEVESSDTIDNVKAKIQDKEGIPPDQQRLIFAGKQLEDGRTLADYNIQKESTLHLVLRLRGGAKKRKKKTYTKPKKQKHKHKKVKLAVLQFYKVDDATGKVTRLRKECPNAECGAGTFMANHFDRHYCGKCGLTYVYNQQA

SEQ ID NO: 29655 - protein, 54 aa, Oryza sativa
MYNPPSAQEMTYKDHVQRRHEEKGCLYACLFTLCCCFCCYETCECCLETLCCCC

SEQ ID NO: 29656 - protein, 374 aa, Oryza sativa
MIEIETYGSDVEHVGGTDASKTSSSSTDTRKVEKVPIEDGKIKIPDWASDVTTLVWFPVRAIDDTIARGASPASPQKQSIVDGMRMIALKLEFGVFLNQVFERTIAVHFTNPFHVSTRVVDKCYDGTLLLQVILHSEVKATLHVKDIWLDLQSGFEHTGKGDGRPTSNLFPLVIAPSSRAGILFVIRLSALGDMDELEKADSMLNIKYGISGDRTTGAHSPVPVKPDDSEELVFKIAVKMKRPVLDPCVAVGFLPFSSDCLRVGQLVNMRWRVERLKNPEDASLLADEILYQVDANPQNWMVAGRKCGHVSLSNKQGSRIEITVTCVPLVSGYVHPPQLGLPHVGEANISCNPAGPHLVCVLPPTLSTSYCIPA

SEQ ID NO: 29657 - protein, 212 aa, Oryza sativa
MEQKPPAVAANNNQLLLMMIMVVVACSNYMISGAGAQPSPGYYPSKTIRSMAFGEGYDNLWGGQHQTLSADQTALTVWMDRSSGSGFKSKRSYRNGYFGASIKVPSGYTAGVNTAFYLSNNELYPGQHDEIDIELLGTVPGEPWTLQTNVYVHGTGDGAIIGREMWFHLWFDPTADFHHYAILWNPDHIVFLVDDVPVRRYPRAAGNTFPDR

SEQ ID NO: 29658 - protein, 57 aa, Oryza sativa
MLPLWMLDMPACKSALLVTRRDNSRSCRVHMTGPLVGGTSMKSCLSTLQRNSRMSTR

SEQ ID NO: 29659 - protein, 355 aa, Oryza sativa
MSTMALALIAVLGFLWICLLSRKKSIGGSYVKMDKQTIPDGAKLVTYQWNLPYSSGEIIRRLELLDEEDVVGCGGFGTVYKMVMDDGTAFAVKRIDLNREGRDRTFEKELEILGSIRHINLVNLRGYCRLPTAKLLIYDFLELGSLDCYLHGDAQDDQPLNWNARMKIALGSARGLAYLHHDCSPVIVHRDIKASNILLDRSLEPRVSDFGLARLLVDNDAHVTTVVAGTFGYLAPEYLQNGHATEKSDVYSFGVLLLELVTGKRPTDACFLKKGLNIVGWLNTLTGEHRLEEIIDENCGDVEVEAVEAILDIAAMCTDADPGQRPSMSAVLKMLEEEILSPCMSELYYEQHLEL

SEQ ID NO: 29660 - protein, 310 aa, Oryza sativa
MERAVPVRKTHASTAGLLSWSESPGPDNAAAAAGAAAPPSSRPSLKPAGGITPAMFGAPVTDLEAEDLTKRKMCSGSKMKEMTGSGIFSAQGANGDSETGSGDSNPPSKTSLRMYQQTVTGTSQISFSAEGSVSPKKPSSLPEVAKQRELSGTLESEADAKLKKQNSEAKSKELSGSDIFGPPPEIPSRPLAARNLELQGNLDFALPQPRSIHTSVKVSNPAGGPSNIMFGEEPAVKTAKKIHNQKFHELTGNNIFKEEAPPGSAEKSLSTAKLKEMSGSNIFADGKVASRDYFGGVRKPPGGGSSIALV

SEQ ID NO: 29661 - protein, 408 aa, Oryza sativa
MGRAFLLQGGDCAESFKEFNGNNIRDTFRVLLQMSAVLTFGGQMPVIKVGRMAGQFAKPRSEAFEERDGVKLPSYRGDNINGDAFNEKSRIPDPQRMVRAYAQSAATLNLLRAFATGGYAAMQRVTQWNLDFTQHSEQGDRYRELAHRVDEALGFMSAAGLTVDHPLMTSTDFWTSHECLLLPYEQSLTRQDSTTGHFYDCSAHMLWVGERTRQLDGAHVEFLRGVANPLGIKVSDKMNPIELVKLIEILNPSNKPGRITIITRMGAENMRVKLPHLIRAVRHAGQIVTWITDPMHGNTIKAPCGLKTRPFDSILAEVRAFFDVHDQEGSHPGGVHLEMTGQNVTECIGGSRTVTFDDLGDRYHTHCDPRLNASQSLELSFIIAERLRRKRIRSSKLNNILPLPPFGV

SEQ ID NO: 29662 - protein, 352 aa, Oryza sativa
MMSSNSLFQRLAKWCPWLLRDEPKKPVKVLVTGAAGQIGYAIVAMIARGLMLGADQPVVLHLLDLPVAANALNGVRMELIDAALPLLRGVVATSDEAEAFKGVNVAIVIGGWPRRDGMERKDLISKNVTIYKSQASALHQHAAPNCKVLVVVNPANTNALVLKEFAPAIPAKNITCLTRLDHNRALGQVAEKLNVHVGDVKNAIIWGNHSSTQFPDASHATVSTDRGERPVRELIADEIWLREEFVTDVQQRGAAVIKARKQSSSLSAASAACDHMRDWILGTPKGTWVSMGVYSDGSYGVPEGVLFSFPVTCEKGEWSVVQGLEIDDFARSKMETSATELKEEKSIAYEFL

SEQ ID NO: 29663 - protein, 421 aa, Oryza sativa
MLIVITGASHVIYGSRGIGVPARVSKKMPKKDQVVVLLDPERQSIRREGEIPVADFLWYSAAKPCSRNCFDRAEIARVMNAAGRRPEALPQDLQKGIDLGVVSPEILQNFFDLEKYPVMSELIHRFQGFRERLLADPKFLQRLAIEEAISITTTLLAQYERRKGRFFEEIDYVLTDTIRGSVVDFFTVWLPAPTISVLSYADDGSGESLEFVKGLLGSLPDNAFQKNVLGQNWNMKQRVAAVLVGGLKLASVGFISSVGAGASSDLLYAARGVLKSSVNAEAGRKRSPIWKSAAVYSCFLGTSANLRYQIIAGLVEHRLGESLATSYNQPLLASLLSFVARTVNSYWGTQQWVDLARYTGLQKTKEVPPVEATAPPAETSQLATPPAETSQLAAPPAETSQLEDGRTEVQNLDDNSNQSSG

SEQ ID NO: 29664 - protein, 337 aa, Oryza sativa
MASAAAAAAAEWEEAERKVLVARKAAFGLPTACPTCLPVLLYLRMCNVPFDIHVDSSFPDADHIPYVEFGECVAFNNEKGGVIEYLKEEKIVDLNSKHPSVSYSDVLSTKAMVMTWLSDALQYELWLASDGSIPHDIYFSDLSWPIGKILYWKKTREVKQQLGITKLNAAEKEEEIYQKANAAYDALSTRLGDQIFLFDNSPTDVDALFLGHALFVLNVLPDTSVLRSCLQKYDNLVNFTKHLKVQLLEADSDSSATGLGSTDPSSSSTPRKRASSGRSYKPKPRAKKERTEEEKKFRRKAKYFLATQLVAVLLFLSLMGGADSSELDDEDGVDYED

SEQ ID NO: 29665 - protein, 186 aa, Oryza sativa
MLGTDLFQSAGTKMKGGQLTILGNGPNSSVSCSVHVQQRNSGGNSSQGLKANVHMGAPPPWLEASERDQENESLSGYARPSSRKGKSGKLNPKRVGAAWAERRRAEMEMEKRGELVPETSDSSWLPNFGGVWQSGTRKESRKEFEKNHKPHEEKSNKLSLEMKPYISKRMRVGSNKGEQSDIDVEQ

SEQ ID NO: 29666 - protein, 104 aa, Oryza sativa
MVAHAGRSAVTLFRFGEVAMSHTKTRMEEAWSIEEVAFNVPGLSIDCFIPPTDIKSGSISETVELPHGEKSKVGLLQCHSAKVAALEKADDNVAWSGALQRDFK

SEQ ID NO: 29667 - protein, 349 aa, Oryza sativa
MEMGSLQEDLTAANARKDKAHESLVQLRHARDAYNASFHQNRQLLSKARDLASRSELAQVQELYKTQVDKFVAEWCNSKAFREDYEKRILSSLNSRQLSRDGRMRNPDEKPIFIETEAAAPPVEQEPIQSKMPAKQAKEAPAPQAEVSPKDESRVKAIAKPSKAKSSLDADDDYEAESPKEKPKPKEVDVAKLKEIKRQEEMEKNRLALERKKKLAEKQAAKAAARAQKEAEKKLKREEMRARRRAGAADTEASTESDNRSDGAAEAQAEDDSAPASAPVMREQRESVRYSRNVVTKSKAPLPKAILRRKKAQSYWSWAGPAAAVAAALVALLAVLGYYQYYLPASASN

SEQ ID NO: 29668 - protein, 32 aa, Oryza sativa
MKVVRELGLERRETVRFLSTVGVKGRTARSQP

SEQ ID NO: 29669 - protein, 550 aa, Oryza sativa
MAEHEEQPYEGNGNGGDPAPASAYAEYPAPEGSPPAAAAKPTGFSDGATDGGRSQHETQPHDGRSPKSRERERERDKDKERDRDRDRDRRDRDRGDKDRDRDRHREHRDRSERREHHDRERSDDRDRRRGHDSERRRDRDRDGHRRHRSRSRSPSKGRDRRSRSRSRSRSSKRVSGFDQGPQAAIPALAAGAAPGQVPVVAPAISGMLPNMFNLTQTPFTPLVIQPQAMTQQATRHARRVYVGGLPPTANEHTVAVYFNQVMAAVGGNTAGPGDAVLNVYINHDKKFAFVEMRSVEEASNAMALDGIMFEGAPVKVRRPTDYNPSLAAALGPSQPNPNLNLAAVGLTPGSAGGLEGPDRIFVGGLPYYFTEAQVRELLESFGPLRGFDLVKDRETGNSKGYAFCVYQDLNVTDIACAALNGIKMGDKTLTVRRANQGASQPRPEQESMLLHVQQQAQMQKLMFQVGGGALPTKVVCLTQVVSPDELRDDEEYEDIVQDMREEGCRYVPHSAIAESFIVRPYAILAVGHSLQKTHNSNFTLLYQLYDYDII

SEQ ID NO: 29670 - protein, 431 aa, Oryza sativa
MAGIAKERRLPPALPLATLIGRELRAGGSERPSLRYGHAGFAKRGEDYFLVKPDCLRVPGDTSTAFSVFAVFDGHNGVSAAVYSKEHLLEHVMSALPPDIGRDDWLQALPRALVAGFVKADIDFQRKGEVSGTTATLVVVDGFTVTVASVGDSRCILDTQGGEVQLLTVDHRLEENAEERERVTASGGEVGRLNLFGGQEVGPLRCWPGGLCLSRSIGDMDVGEFIVPIPHVKQVKLSNIGGRLIIASDGIWDALPSEAAAKACRGLPAELAAKLVVKQALKKSGLKDDTTCVVVDIIPSDYRLTSPQLSPKRNQSKFKSLLFGRRSHSSIGKLGGKSASFGSVEELFEEGSAMLEERLGRNLSLKATSAPLRCAICQVDQEPFESMMTEKGGSYCSSPCAPWGGPYLCLECRKKKDAMEGKRSSHSTACR

SEQ ID NO: 29671 - protein, 203 aa, Oryza sativa
MVTPGSESKKVSPQLIAEYTVRALQRTVPAAVPAIVFLSGGQSEEEATVNLNAMNKLSTKKPWALSFSFGRALQQSTLKAWGGKTENVVKAQKAFITRCKANSEATLGTYQGDAVLGEGASESLHVKDYKNSYGGCDGRDEAAAGAWRAGSRNGESARFACGGVAEAVRVPRLWSQQHGWVGGGGGGQLKMALAGWLLYIDKA

SEQ ID NO: 29672 - protein, 259 aa, Oryza sativa
MGRWAAGICAVALVWLAAAAAGDLEPDELERAFPIVEPDYGHTKLRLSQQGLDAIRRIETPIAVVGVIGPYRSGKSFLLNQLLSLSCEKGFGVGHMRDTKTKGIWIWGTPVEMDIDGSKVSVLYLDTEGFESVGKSNVYDDRIFALATVLSSVLIYNLPETVREADISRLSFAVEIAEEFYGRGKMLLLNQQSFFGLSRGISCKENLFSKWSMKPSNGYLTKVGTNILMRLIKLEILWQLWATTALLLACPRHIRTSSK

SEQ ID NO: 29673 - protein, 167 aa, Oryza sativa
MAVDRGLLLLVVSAAVLVGLASASPFISDSVFLGSVGSTGRSLLQAKKNCPVNFEFQNYTIITSKCKGPRFPAKQCCDAFKEFACPFNEYINDESNDCASTMFSYINLYGKYPPGLFANECREGKLGLSCEGVSQKDSVVSSAGQQAQSSLLAFIMLTFGLAALWFH

SEQ ID NO: 29674 - protein, 343 aa, Oryza sativa
MQYGDNEENNCPITRLLDIVLYLCERGHVEGGMVFQLLEDLTEMSTIKDCKDVFGYIESKQDVLGKQELFGRGKLVMLRTCNQLLRRLSKANDVVFCGRIIMFLAHFFPLSERSALNIKGVFNTSNETKYEKDATDGISVDFNFYNTLWSLQEHFSNPALTAANLTRWQKFVSNLTVVLSTFEAQPLSDDDGKLNNLDQEEDAAFNIKYLTSSKLMGLELKDPSFRRHILVQCLIFFDFLKAPGKTDKEGPTGSMKEEIDSCEERVKKLLEIIPPKGKDFLQSIEHILEREKNWVWWKRDGCLAFEKQPFEKKPGQAGVRKRKPRWRLGNKELAQLGRFFLVL

SEQ ID NO: 29675 - protein, 342 aa, Oryza sativa
MVLALLLGSSSSSLAAPHPACSSRRKCRPAGRNNFRCSLHDKVPLNAHGVLSTKLLSCLAASLVFISPPCQAIPAETFVQPKLCQVAVVAAIDKAAVPLKFDSPSDDGGTGLMMKGMTAKNFDPIRYSGRWFEVASLKRGFAGQGQEDCHCTQGVYSFDEKSRSIQVDTFCVHGGPDGYITGIRGRVQCLSEEDMASAETDLERQEMIKGKCFLRFPTLPFIPKEPYDVLATDYDNYAVVSGAKDTSFIQIYSRTPNPGPEFIEKYKSYAANFGYDPSKIKDTPQDCEVMSTDQLGLMMSMPGMTEALTNQFPDLKLSAPVAFNPFTSVFDTLKKLVELYFK

SEQ ID NO: 29676 - protein, 366 aa, Oryza sativa
MEVDSGRNGTGHGQIAGPDEEIPAGGDAKRSREEGGRNTTTTCQEDEDEDNDYYNDDSNFLDSYRTTWATNYGKNDGSSFEDETAIRPMQHTDGPVLPISSWPMDVLQIFSVKVTEVMGNLEWPLRVYGIVAVRDSLDHKRNVLFRRDRDDCQTLTSPQDSSLTLTGPSRAVVLINPVMFEVDLKVITHNNSGLPLSESEEDDKVLSYNAFFYDGVAHMNNTGFARRSVESTEHSTMEFVFAHLIFAVEATIAVRVIEGSTDFRARLTARTAGIDEDVVLLDSGDGKVAVVNDDDDSGPLVVLQRRVVVVEEKGSLILGVEAAEIGSEEIVTRQVDIRPRHALRSRCGFNLGFCRMSVMIAWSVLP

SEQ ID NO: 29677 - protein, 159 aa, Oryza sativa
MPLYTQIAIRFAELHDTSLRMAAKGVIKKVVDWEESRSFFYKRLRRRISEDVLAKEIRAVAGEQFSHQPAIELIKKWYSASHAAEWDDDDAFVAWMDNPENYKDYIQYLKAQRVSQSLSSLSDSSSDLQALPQGLSMLLDKMDPSRRAQLVEEIRKVLG

SEQ ID NO: 29678 - protein, 123 aa, Oryza sativa
MARIKVDELRGKNKAELQAQLKDLKAELSLLRVAKVTGGAPNKLSKIKVVRTSIARVLTVISQKQRAALREAYKKKSLLPLDLRPKKTRAIRRRLTKHQLSLKTEREKKREKYFPMRKYAIKA

SEQ ID NO: 29679 - protein, 371 aa, Oryza sativa
MEALAGTAAASLPALPSHQPRSRLAPRSLALPGGRSCCGPLRAAAAGGGGGAKDDAQAGVTPNGSPVIKPKSDSALSSQNGVLGSTKTDKPHTTLSTHTTTDSSGSRAGLFRTPISGGVQSAAFAHGLPPPALAVRNLMEQARFAHLCTVMSGMHHRRTGYPFGSLVDFSNDSMGHPIFSLSPLAIHTRNLLSDPRCTLVVQVPGWSGLSNARVTIFGDVYPLPEDQQEWAHKQYVAKHQQWASQQWGNFYYYRMQNISDIYFIGGFGTVAWVDVKEYEAIQPDKIAVDGGEQSLKELNAIFSKPLREFLSSEGEVDDAALISVDSKGIDIRVRQGAQFNIQRLAFDVPHKVETLEEAKRALHKIIKTTSK

SEQ ID NO: 29680 - protein, 81 aa, Oryza sativa
MMHPNVEDYWDGIQGCHHLPPTSDKSMGYTKQRYGKRPNYPPTIIRKRSGPSTSNLTINGHKKCSGRTRDGSVRPVFHRGH

SEQ ID NO: 29681 - protein, 33 aa, Oryza sativa
MMMRENGNVVVLDHLCSWLSALLILAFSCLIPD

SEQ ID NO: 29682 - protein, 415 aa, Oryza sativa
MILRIRSRDGTDRITVPDPAAATVGDLQRLIAARVTVPVPLQRLSLDPALLLPSSASAALLADPAAPLSSLRLSNGSFVYLSYPPDARSSQPPPPKALSAAGSFGKKMTMDDLIARQIRVTRQEAPLCAAASFDRDSANAFQLHVAESLAFATKRAGFLYGRVDADTKEVFVDFIYEPPQVGTEDVVQLMRDAQEEARVDAIAHGLGMRRVGLVFTQAVGRKTSDTGEYTMSNREVLQATELQAEGGIPEWVTAIVKLEVGDDGSGDVHFEAFQMSEICVKLFKDGVLETEIGDKDDPRLSKMRKGVVAGGKDTMEVDNDFFLVPVKISDHQGPLSTGFPIENRGNPVAMSALKSHLDRAKHLPFVKRISDFHLLLLVAAFLDIKADVPALTACVKNQSVVPEGYQLLIESLAGA

SEQ ID NO: 29683 - protein, 242 aa, Oryza sativa
MLAKGRKVAGRGGDMSAHYAFGPQEDDAIIKHRLLTRTTTTRGEPPLKKLQKKFMSFATEVEKDADNISDCERLYKAFLQEINTFELPLLKSKAVVDANLREKESFNELQDEIQRQILQAQTDIEDLKKQLEQSKIERQHKEECEAIRKMISLQPPRSETEKLIADLEKEIANLEAENTACIRTLELRKKQFALLLHVVEELQISIDDEQRSIADELRAATEEQKMSIEEVSGGASDAMAVD

SEQ ID NO: 29684 - protein, 55 aa, Oryza sativa
MGWSLRNGSTKISVRACCKFVIVVSHHLAGDFAHHCQVGFCVMLFVAFPYCKLSV

SEQ ID NO: 29685 - protein, 132 aa, Oryza sativa
MALEWVVLGYAAGAEAIMLLLLTLPGLDGLRRGMISVVRSALKPMMSVVPFCLFLLMDIYWKYETRPTCDDEHHCTPSEHLRHQKSIMKSQRNALLIAAALLLYWILFSITSLVVRLDQLQQRVDKLKKRDD

SEQ ID NO: 29686 - protein, 246 aa, Oryza sativa
MEAFNKKGGDVKWHVHDERSLLALQGPLAAPTLQLLTKEDLSKMYFSDFKMIDINGYACFLTRTGYTGEDGFEISVPSENAVDLAKALLEKSEGKVRLTGLGARDSLRLEAGLCLYGNDMGQHITPVEAGLSWAIGKRRKAEGGFLGADVILKQLQEGPKIRRVGLLSQGPPPRSHSEIVSNSGENIGEVTSGGFSPCLKKNIAMGYVKSGLHKAGTEFKVVVRGKSYDAVVTKMPFVPTKYYKPS

SEQ ID NO: 29687 - protein, 472 aa, Oryza sativa
MRNLHPPMMKMLLAALVVVAAASFRAAEAALPSMAVGVNYGANADNLPPPKDVAAFLAAHTTIDRVKLFDANPAFISAFANTPISLAVSLPNSDLPSLADKQTGLDTARAWVRANLSPYVPATNVTLLLAGNEILLSPDPNLVLSLLPAMRRLAQALRLEGLTGVRVTTPHYLGILAPSDGIPSNARFRPGYDTKLFPPMLQFHRDTGSPFMVNPYPYFSYNNQTLDYALFRPNRGVYDPNTKLNYTSMFDAQMDAIYTAMKRLGYGDVDIAVGEAGWPTQADPGQVGVGVEEARDFNEGMLRVVSSGKGTPLMPNRKFETYIFSLFDENQKPGPIAEKHFGILNPDFTPIYDLGLLRQSSDSGAPNPSPNPSPNPSPKPAPSGGGKWCVPKAGASDTDLQNNINYACGYVDCKPIQSGGACFDPNNVQSHAAFVMNAFYQANGRHDYDCDFKGTGAVTSNDPSYGSCKYVS

SEQ ID NO: 29688 - protein, 117 aa, Oryza sativa
MATAARRLLLPALRKSLPAANGAARGVSTERAVGAAAVVGSHTAKWMQDTSKKSPMELINAVPPIKVEGRIAACDGRQDKGRETGSLGHPIEYICLDLDQPAVCKYCGLRFVQDHHH

SEQ ID NO: 29689 - protein, 156 aa, Oryza sativa
MMMTEVANHSKRNHNESYFTGKAAVTSSSEEFGSMTSKKPRNTSPRDAPVSPKEKKDKIGERVAALQQLVSPFGKTDTASVLQEASGYIKFLHQQLEVLSSPYMRAPPVPGAAPEDPDHYSLRNRGLCLVPVDQTLQLTQSNGADLWAPANTTRRR

SEQ ID NO: 29690 - protein, 71 aa, Oryza sativa
MKGDGRKSRIGYIQSSIPSKSRCSNWCGSMVNVGNMDFTDLFCFEMCDTTSICTYIHLPNVDPDPSICMYW

SEQ ID NO: 29691 - protein, 131 aa, Oryza sativa
MAFTMRAVKVPPNSASLEEARHRVFDFFRQACRAIPSIMEIYNLDDVVTPSQLRSTIAKEIRKNQGVTNPKVIDMLLFKGMEELGNITEHAKQRHHVIGQYVVGQKGLVQDMEKDQGSSDFLKKFYTSNYS

SEQ ID NO: 29692 - protein, 17 aa, Oryza sativa
MADRGLDSQHSCGSVLH

SEQ ID NO: 29693 - protein, 328 aa, Oryza sativa
MASLAVVVVVVAVVCAAGVAAAGKFDDVVEPSWANDHVVYEGDLLKLRLDSSSGGGFASKSKFLYGKATADLKLVAGDSAGVVTAFYVTVVRRGQAQRVRLRVPGQRHRRAVPGADQPVHRRRRQPGAAHRPVVRPHRRLPHLRRALEPQPGRLPRRRHPHPRLREQERHRRRQGPPPPRRRRQWHQQRHIGGGVRAAVPVAAADVGVQLHLERGRLGDAGRAGEDGLVARAVRGHVPRRPRRGLRVGGERHGLGRRRGGAVHGELVGQGGEVLVEGEGHGGAHRAPEPPARVGARAPPRLRLLRRHRPLPRPAAGVRRTVTVDLVAG

SEQ ID NO: 29694 - protein, 292 aa, Oryza sativa
MAGYPPNPGSGYPYGGAGGYGAPPPPYGSSPAPSAPPYGAKPPKEGKTSSSSAPYYGGGGGYGAPPSTQPYGSGGGYGAPPSSQPYGAPYGAPPPSSAPYGAPGGYGSPFASLVPSAFPPGTDPNVVACFQAADRDGSGMIDDKELQSALSGYSQSFSLRTVHLLMYLFTNTNVRKIGPKEFTSVFYSLQNWRSIFERFDRDRSGKIDATELRDALLSLGYSVSPTVLDLLVSKFDKTGGKNKAIEYDNFIECCLTVKGLTEKFKEKDTAFSGSATFTYEAFMLTVLPFLIA

SEQ ID NO: 29695 - protein, 325 aa, Oryza sativa
MTIYIAREASKVWRKVTTETSVELSLLREKWGLLLAGIVFQYIHGLAARGVHYLHRPGPLLQDLGFMALPEFGQDKGYLSESIFASIFASFVLWTFHPFIYHSKRFYTVLIWRRVLAFLVASQVLRIITFYSTQLPGPNYHCREGSKLATLPPPNNVFEVLLINFPRGVLFGCGDLIFSSHMIFTLVFVRTYHKYGSKRFVKLLAWFMAIVQSLLIIASRKHYSVDVVVAWYTVNLVVFFVDNKLPEMPDRTNGVPLLPLSTREKDGRLKEEKDSRLKEEFHKLLNGNHGDPTDRRQRAQMNGRHDEDINHAHSTLSDAAVNGGT

SEQ ID NO: 29696 - protein, 158 aa, Oryza sativa
MGFLSFAGGVLFAAAFLLSAYQEFSEFGVDGGPAAKALQPKFNTIVANISTRTGLVVPHIELKHIVAAMISLKGLGGLLFILSSSLGAYLLLFHLAFITPVVHDFYNYDIESAEFVQLFTKFAQNCALVGALLFFLAMKNSIPKRQPNRKKAPKPKST

SEQ ID NO: 29697 - protein, 335 aa, Oryza sativa
MAAAAAAPRFLPVRPLFLLLLLLVLAGVASGKTVKRDVKALNEIKSSLGWRVVYSWVGDDPCGHGDLPPWSGVTCSQQGDYRVVTELEVYAVSIVGPFPTAVTNLLDLKRLDLHNNKLTGPIPPQIGRLKHLRILNLRWNKLQDVLPPEIGELKKLTHLYLSFNNFKGEIPVELANLPELRYLYLHENRFTGRIPPELGTLKNLRHLDVGNNHLIGTLRDLIGNGNGFPSLRNLYLNNNDLTGVLPDQIANLTNLEILHLSNNRLIGSISPKLVHIPRLTYLYLDNNNFIGRIPEGLYKHPFLKELYIEGNQFRPGSKSKGTHKVLELPDADILV

SEQ ID NO: 29698 - protein, 333 aa, Oryza sativa
MNFCYDLVKANKRSLIGGLDNIKNQYDNPECIAYSIASCLEIADRIKTVLQGKNPDSVKEIDPTAIVDMFDGKCLANCSDGTSGIGKLVTMALAVQTDGIQSTDHSRLYTAVAVETIDKYDFEGICATLADGIPLVGAFYCGSRLEKLEYCQIYRVPKLSKFLDRNLIPTGHAAVIIGAGMRCGIQYLYFLNSWGNFFCPRYDKDGNLVKAGVGKLRFYDLLCNPIMFITDSAKRVGLNRQLLPMGTGKLSDHNKSMLMGRKQTDVIPEDLSIGVTSEFVGNQPQISSKRKMANATLDGDGQTQKRNKCRTFGRSSVDLNEANNKRNAKEDEM

SEQ ID NO: 29699 - protein, 356 aa, Oryza sativa
MLLILSEKGYVKRMKPNTFNLQNRGTIGKSVGKMRMNDNTSDFIVCQTHDHVLYFSDKGIVYSARAYKIPECTRAATGTPLVQLLSLSDGERITSIVPVNEFGEDQYLVMLTVNGYIKKVPLNAFSAIRTSGIISIQLAPGDELKWVRRCGDDDLVALASQNGMVIVNTCNKLRALGRKTRGVLAMKLKEGDKMASMDIIPATSHNMPETYSRVRDLSPPWLLFIADNGIGKRVPLNAFRQGNFNRVGLQGYKLPPDCSLAAVFVVGFSLTDDGESDEQVVLVSQSGTVNRIKVKDISIRSRSARGVILMRLEHAGKIQSASLISAAEEEEEQDPESASLISEAEEPEKQDPEVSA

SEQ ID NO: 29700 - protein, 454 aa, Oryza sativa
MVKGGREALLGGYEMGRTLGEGNFGKVKYARHLATGGHFAVKILDRGRVVSLRAGDQIRRETATLKLLRHPHVVRLHEVAASKTKIYMVLEFVNGGELFERIAVKGKLSEKEGRRLFQQLIDGVSYCHDRGVYHRDLKPENVLVDQKGNIKISDFGLSALPQHLGNDGLLHTTCGSPNYIAPEVLQNKGYDGSLSDIWSCGVILYVMLIGYLPFDDRNIVVLYQKIFKGDTQIPKWLSHSAQNLLRRILEPNPMKRIDMAGIKSHEWFQKDYIPVLPYDDDDEDVQFGARLPAKEQINDEPGDKNSHQINAFQLIGMASSLDLSGLFEDEEVSQRRIRFTSTHPPKDAFDKIESSATELGFQVQRGHSKLKLMRNCKGSKNPESFMVSAEVFELGPSVNVVELRKSNGDPALYRQLCERISSDMGARNTEQIFATASLEDDLQNSNAGTPLFAL

SEQ ID NO: 29701 - protein, 260 aa, Oryza sativa
MPEEKEYAPVPLGQAPEAVDPEDPVKSPPRPTSPANSTRKACFAVLQSWVSRKFMTGCVVLFPVAVTFFITWWFVKFVDGFFSPLYAKLGFDIFGLGFLTSLLFIFLVGIFVSSWVGSTVFWIGEWFIKKMPFVRHIYSASKQVSTAVSPDQNTTAFKEVAIISHPRIGEYAFGFITSTMILQTDKGDEELCSVYVPTNHLYIGDIFLVRSEEIIRPNLSIREGIEIIVSGGMTMPQVIAAPGQTPHKGQSTRLNRMMSA

SEQ ID NO: 29702 - protein, 29 aa, Oryza sativa
MKMLGDNDEELSCISFGFSIGFAASEATI

SEQ ID NO: 29703 - protein, 17 aa, Oryza sativa
MAPKGHGLNCSCKSKAL

SEQ ID NO: 29704 - protein, 393 aa, Oryza sativa
MELPRGALLLVLLAVAAAASSAGATLAVKAPVPVPVPAPAPAHAPPQPKDAEGLLINGNFETAPRKVNKTLIVGRHSLPGWTLRGHVEYVSGGPQPGGMFFAVPHGVHALRLGGRASASQNVSVRPGALYALTFAATRTCAQDEALRVAVAPSLSPPADVAVRTLYSADTADTWAWGFRASSAAAQVTFSNPGVQEDASCGPLLDAVAIKELPTPYPTKDNLIKNEGFEIGPQVFKNSTVGVLLPPKQKDATSPLPGWIIESLKAVRFIDAAHFSVPAGQYAVELVAGRESAIAQVIRTVANRAYNLSFVVGDAKNGCHGSMLVEAFAGNVTQKVPFESVGNGGFKPASFRFVAAGVRTRVTFYSSYYHTKVSDGVSLCGPVLDQVKVQPLKA

SEQ ID NO: 29705 - protein, 256 aa, Oryza sativa
MAAAATAAGDEELESLLRNFHRFSQGYKDALVEAQALRVNCSSESERRQALESHVADLKSDNERLRRLYTETLFKFTNQMKFHTESRNLKEELEKANTRLLSMEEEYKREIEQLKLGSVMNSNDLENKLSCAVVQQATNEAVIKQLNLELEAHKAHIDMLNSRLEQVTADVHQQYKNEIQDLKDVVIVEQEEKNDMHRKLQNTENELRIMKMKQAEQQRDSISVQHVETLKQKVMKFRKENESLKRRLAISELDCS

SEQ ID NO: 29706 - protein, 130 aa, Oryza sativa
MAAVSLRKSNARLPPEVNRVLYVRNLPFNISSEEMYDIFGKYGAIRQIRLGNAKDTRGTAFVVYEDIYDAKNAVDHLSGFNVANRYLIVLYYQPAKMSKKSDVKKKEEEITRLQEKYGLGSKTPSSAPDA

SEQ ID NO: 29707 - protein, 290 aa, Oryza sativa
MNFKGAKMPSPPPAAAAGRLVKVGLLGGAAIYAAFNSLYNVEGGHRAIVFNRLEGIKDKVYPEGTHFMIPWFERPIIYDVRARPNLVESTSGSRDLQMVRIGLRVLTRPLPEKLPTIYRSLGENFNERVLPSIIHETLKAVVAQYNASQLITQREAVSREIRKILTERASNFNIALDDVSITSLSFGKEFTHAIEAKQVAAQEAERAKFIVEKAEQDKRSAIIRAQGEAKSAQLIGEAINNNPAFLALRQIEAAREISHTMASSNNKVYLDSKDLLLGLQQLNVDNKNKK

SEQ ID NO: 29708 - protein, 336 aa, Oryza sativa
MEKKILDEQSLDQKDELQRLKSSLESCEKAMEDCNIQNELEKDSILSELLTLQKEVVYLSSSSLMKEKESIRKELDRTKTKLKETENKLKNSIQEKIKLESEKAEAQREIKKLQSQRTLLERDLRKRDSFTVDKRHEQSVKSKELAGIYDQAVQIQEDYGKLEMHAFDMEAEIASLQEALVTTIAEKEEALSRVELLTSAVEDLESRLNSAESETSSLLEETAVLTRKLDASESISKKLEASISSLSREKEDMGIELTDVLLEMESERSTWTAKEKAYLEAKQKLNICNKNNCKLSEDLIKVRQELACCREQYSILEAKMIFSKNDTNEEKYWLVL

SEQ ID NO: 29709 - protein, 317 aa, Oryza sativa
MQLPEEVPDKNEIIRLRRVASSVGVGDKHDAEWVHSILAEIGSANDNSWTLLPYLCAAFMASNMWSATAYDVNTGGFSNNLHCLARCVSAVVGGSEYTRMEREHRRSSLSNGHMDELQEPELLSRVSAEANIKSAMQLYVKLSAGLVLDSWNDTSRPYIVPKLIFLDQLCEMSPYLPRSTLEVHIPYTILRSIYHQLYGASLMATEPMEPSPRQSPLISLAHASPSMKQNRADTTPRSHTFEPGYHSSSGSQYDEGYEGDRRTGERQLRSMRRSGPLDYTGTRKVKFVEGSSSGSHGAGSGSLQRFAVSRSGPLSYK

SEQ ID NO: 29710 - protein, 132 aa, Oryza sativa
MSRSLGIPVKLLHEAAGHVVTVELKTGEVYRGAMVECEDNWNCQLDNITFTAKDGKVSQLEHVFIRGSRVRFMIIPDMLKNAPMFKRLEARIRGKGSAIGVGRGRAVAMRARAAAGRGGGPVGRGGAPPVRR

SEQ ID NO: 29711 - protein, 472 aa, Oryza sativa
MQALVSSNRRPLAIVVAAPVLQMLLIAALLHLGSCNGGDRIERLPGQPEVSFGQYAGYVGVDDKGRRALFYYFVEAELDPATKPLVLWLNGGPGCSSLGVGAFSENGPFRPSGQVLVKNEYSWNKEANVIYLETPAGVGYSYSADAAYYQGVDDKMTAMDNMVFLQRWLEKFPQYKGRELYISGESYAGHYIPQLADVMVEFNKKNKIFNLKGIALGNPVLEFTTDFNSRAEYFWSHGLISDSTYRIFTSVCNYSRYVTEYYGGSLTPLCARVMNQVTRETSRFVDKYDVTLDVCLSSVLSQSKILTPHQQVGQRIDVCVEDETVNYLNRKDVQEALHAKLIGVKNWAVCSSVLEYELLNLQIPTINIVGSLVKSGIRVLVYSGDQDSVIPLTGSRTLVQNLARDLGLKTSVPYRVWFEGQQVGGWTQVYGDMLSFATIRGASHEAPFSQPERSLVLFRAFLQGRPLPETFS

SEQ ID NO: 29712 - protein, 103 aa, Oryza sativa
MEAKVFRFLKLVGVGFKARTEREGRELFLKLGYSHEVQFTAPPAVRVFCFKPNLICCTGIDKNRVHNFAGAVRNCKPPEVYKGKGILYIDEVIKLKPGKKQKK

SEQ ID NO: 29713 - protein, 61 aa, Oryza sativa
MPGSRVDQRGERGCPIRTTLVREDFGGVSGAVGGRQSDDVGAGQRSAASWWRRAGLVRAAW

SEQ ID NO: 29714 - protein, 240 aa, Oryza sativa
MGAAWRETIGRKTNFNQILEYVKDIRGMGMEVCCTLGMLEKQQAEELKKAGLTAYNHNLDTSREYYPNIISTRSYDDRLQTLEHVREAGISICSGGIIGLGEAEEDRVGLLHTLATLPAHPESVPINALVAVKGTPLQDQKPVEIWEMIRMIATARIVMPKAMVRLSAGRVRFSMPEQALCFLAGANSIFAGEKLLTTTNNDFDADQAMFKILGLIPKAPSFGDEAPAADTERCEEAASM

SEQ ID NO: 29715 - protein, 171 aa, Oryza sativa
MARSPAAPPLLEGEELMDIPVEKRARKSMVVVRAANGEYCSGCVLKSKGKYTYVLTQSSFASGREDTLKICFFDQIEREASAFASGDTFCLLGRKGTQTADQSRRCVVRLCPNLLSFLPLLQQPLHTTSQALSYQNQPLHSTFDATISMVLSATSWERATMPRRVSMGIAD

SEQ ID NO: 29716 - protein, 191 aa, Oryza sativa
MGELYDMNLKGRPLAYTPFCDNNKEMDGYRFWKQGFWKDHLRGRPYHISALYVVDLAKFRQTASGDTLRVFYETLSKDPNSLSNLDQDLPNYAQHTVPIFSLPQEWLWCESWCGNATKARAKTIDLCNNPMTKEPKLQGAKRIVPEWVDLDSEARQFTARILGDNPESPGTTSPPSDTPKSDDKGAKHDEL

SEQ ID NO: 29717 - protein, 186 aa, Oryza sativa
MAVVRQLLVHRLSCSGLPASRCKTSCWSSGERLPGLKSRVRLLAVAIKPPRAAAGKDEIVRADDDDDGVSLGTVKLPANIDIARFETLLFQWGNSLCQGATLPLPVPLRVDKVEGGVRLGFMAVDDGVTQVLVYIDCLVSPATAASGPVFRAIRNGPMKDQEPPGEPRIMRSLLEALQKCIQYAQV

SEQ ID NO: 29718 - protein, 126 aa, Oryza sativa
MSAMETDINAPPPPAPAPAGAGEGSSSAAGPSSRKPNKRFEIKKWNAVALWAWDIVVDNCAICRNHIMDLCIECQANQASATSEECTVAWGVCNHAFHFHCISRWLKTRQVCPLDNSEWEFQKYGH

SEQ ID NO: 29719 - protein, 377 aa, Oryza sativa
MASRRSAAASPAMAAAAAVVAVSVYLLVCSAPAAATAAAVAKKPSYPPVAKGLSFDHYKKSCPQAEAIVFSFLRDAIGKDVGLAAALIRLHFHDCFVQGCDASILLTKTPGGPDGEQQAIPNESLRPAAFKAVNDIRALLDRACGRVVSCSDIVTLAARDSVKLAGGPSYKVPLGRRDGLTSATPSQVLGALPPPTSHVPELIAALAKLNLDAADLIALSGAHTVGIAHCTSFTGRLYPKQDGTMDKWFAGQLKLTCPKNDTANTTVNDIRTPNAFDNKYYVDLQNRQGLFTSDQDLFVNATTRPLVAEFAVDQSAFFHQFVFSVVKMGQIQVLTGSQGQIRANCSVRNPGAASADEELPWSAAVETVVEAAESIVL

SEQ ID NO: 29720 - protein, 425 aa, Oryza sativa
MERDTSSSDVSASHVGRARQRRRPTEATADGNRTNGPALLVNDQNKYKSMLIRTYSTVWMIGGFVLIVYMGHLYIWAMVVVIQIFMAKELFNLLRKSSEEKQLPGFRLLNWHFFFTAMLFTYGRFLSRQLVNTVTSDHLLYKVVSGLIKYQMFICYFLYIAGFVWFILTLKKKTYKYQFKQYAWTHMILLTVFAQSSFTVANIFEGMFWFLLPASLIVINDIAAYLFGFFLGRTPLIKLSPKKTWEGFIGASVTTIISAFVLANVMGRFQWLTCPRKDLSTGWLRCDPGPMFKPEHYSLGEWVPKGFPWKEVVLLPVQWHALALGLFASIIAPFGGFFASGFKRAFKIKDFGDSIPGHGGITDRMDCQMVMAVFAYIYHQSFISPQNYSVELILEQILRNLTFEEQKFLYQQLGEIYRERQLMQS

SEQ ID NO: 29721 - protein, 242 aa, Oryza sativa
MGYLSSVIPTDGSPVSGGGLSQNGHGGAKVAEYVKQNLFSHLLRHPKFISDTKVAIDDAYKSTDSEFLESDSSQNQCGSTASTAVLVGDRLFVANVGDSRAIICRGGNAIAVSKDHKPDQTDERQRIEDAGGFVMWAGTWRVGGVLAVSRAFGDKLLKQYVVVDPEIREEVIDHSLEFLILASDGLWDVVTNEEAVDMTRSIHDPEEAAKKLLQEAYKRESSDNITCVVVRFLHGQGSSGYA

SEQ ID NO: 29722 - protein, 204 aa, Oryza sativa
MVEVGGGAAEAAAGRRWRLADERCDLRAAETEYVRRFHRHEPRDHQCSSAVAKHIKAPVHLVWSLVRRFDQPQLFKPFVSRCEMKGNIEIGSVREVNVKSGLPATRSTERLELLDDNEHILSVRFVGGDHRLKNYSSILTVHPEVIDGRPGTLVIESFVVDVPEGNTKDETCYFVEALLKCNLKSLAEVSERLVVKDQTEPLDR

SEQ ID NO: 29723 - protein, 388 aa, Oryza sativa
MSPPADTAALASTSGAPLAPLVAAQLNFVLSQANLPIRVGQIWSGCRDGRYADRFTLAIPFCLDYVYWDFLYNALSPKVAPDVVFGPDDEGFQPLVDFDETGSGEKSCLANWDCRDTSALLSLIKELREFYIEYQKKRAAEVDDARLKFEISTVLSKEGIEVCTVSSNGRPDEVKFAVPLLDLDLAKLVPGCPWKLPQKIHLQAVFPISRSYSSVPSAPRLKLVSTPDLKSFFSVDDVKLPPWLDGMCMAEYLPNLEENLKIQVVEASASIGSRRRFIEALAPTFGRPLEADPIFCRKATILSISGIFTFLVHFVIPLQFPKHQPVLTLESSQHFNAQGLPIMSAPVNDYPWSPRWDPTEMVERIYDFLVDECQTFKKFCSDSIPQQK

SEQ ID NO: 29724 - protein, 336 aa, Oryza sativa
MSSESEAAPGTGKLVCVTGASGYIASWLVRLLLARGYTVRATIRDTSDPKKTLHLRALDGANERLHLFEANLLEEGSFDAAVNGCDCVFHTASPFYHNVKDPKAELLDPAVKGTLNVLGSCKKASIRRVIVTSSMAAVAYNGKPRTPDVVVDETWFSVPEICEKHQQWYVLSKTLAEEAAWKFSKDNGFEIVTVNPAMVIGPLLQPSLNTSAEAILKLINGSSSTYPNFSFGWINVKDVALAHILAYEVPSANGRYCMVERVAHYSELVQIIREMYPNIPLPDKCADDKPSVPIYQVSKEKIKSLGLELTPLHTSIKETIESLKEKGFVTFDSSNL

SEQ ID NO: 29725 - protein, 472 aa, Oryza sativa
MAPPLLPRGAALLLLLRSAARRPAAASSRGFLSSAAAGGREGALAAAAVAVVGSGLGLWLVPPSLADSGEAVADAPAVQISVGSGSGAVGAVEERGRKRRFLLGDSFRRRVFFNYEKRIRLLSPPEKIFEYFASVRNPEGEVFMLPADLMRAVVPVFPPSESNIVREGRLRGERNPGELHCAPSEFFMLFDTNGDRLISFAEYIFFVTLLSIPESSFSAAFEMFDVDHSGEIDKEEFKKVMALMRSYNRQGANHRDGLRTGLKVGQPVENGGVVEYFFGNDGNEPLHYDKFTNFLKGLHDEIIRLEFSHYDVKSSNTIPAKDFALSMVASADMNHINKLLDRVDNLGNDPDLKGVRITFEEFKSFADLRRRLEPLAMAIFTYGKVNGLLTKQDLKRAAHHVCGVDLTDRVVDIIFHVFDTNHDGNLSSEEFVRALQRRETDVRQPATPGSMGLLSYWLNFNKCSSLTQMLLK

SEQ ID NO: 29726 - protein, 201 aa, Oryza sativa
MPSRLLPPSPWQASVHQLPGTTLLQAKNARISCAAAAGGGGGKGGRQAAGATQEPLPAGAQGRAVHHLLQLLQAGPGARRLRRLDQDGAQAALRLVLRRPQLLLPGPRQEEARRSVQRRRLTGGAARPRAARRQVRVPGRLRPRRRELLHGGRAAAARVEELVVQHRRRDGGGGDAAAWLQPAPADGVRLGERPAVPAALA

SEQ ID NO: 29727 - protein, 61 aa, Oryza sativa
MRRLQPGRLHLQPARLHFHRRMPPPADPPPSPSPCAASSQPAASRPRWWSWWKMTAMAMRS

SEQ ID NO: 29728 - protein, 208 aa, Oryza sativa
MVSLKLQKRLAASVLKCGKGKVWLDPNEVNEISMANSRQNIRKLVKDGFIIKKPQKIHSRSRARRAHEAKQKGRHSGYGKRRGTREARLPTKILWMRRMRVLRRLLRKYREAKKIDKHMYHDMYMKVKGNMFKNKRVLMESIHKSKAEKAREKTLSDQFEAKRAKSKASRERKIARREERLAQGPREPAAPAAAAPAQTAAAPKKAKK

SEQ ID NO: 29729 - protein, 63 aa, Oryza sativa
MRPRKPPPRRRLLNSPVAAHRGRWRALVRMAVEETTARLSFAPCLLAASRLISAVCVCVCVSM

SEQ ID NO: 29730 - protein, 258 aa, Oryza sativa
MDGGSGGPYTSRTAEEVFRDFRGRRAGMIKALTTDVEKFYQLCDPEKENLCLYGYPNETWEVTLPAEEVPPEIPEPALGINFARDGMNEKDWLALVAVHSDSWLLAVAFYFAARFGFDKEARRRLFNMINNLPTIFEVVTGAAKKQTKEKAPNSTNKPNKPSSKMQPRPESHSKAPKPPAPPKDDDESGDEYADEEEEERDNTLCGSCGTNDGKDEFWICCDSCERWYHGKCVKITPARAEHIKHYKCPDCGNKRARA

SEQ ID NO: 29731 - protein, 111 aa, Oryza sativa
MPSLRPILLAAAAAVAVVSLWPAARVVADIDPSSGMPSPPATTSPFPFCPTTPAGISTQPFPWAEPSPTTTTTMFPQDPGFLASAACHARTAALAWIPVVFVFSAFLVFLQ

SEQ ID NO: 29732 - protein, 452 aa, Oryza sativa
MFILGDQGNSLYCYKAVLLDARKRTETFVYHCGVFIVPKVRAHEWLFASEEGQWHVVESAKAARLIMVFLDSRHANADMDVIKNDLSPLVKDLEPGNPEEEARIPFMMAGDGVKQREILQEVTSEITGPMVVEDVVYENNDEDQSSMTEKMFRRLIFKRNSGLVQSEALLVKDSTSDKADENNKKSPSASKKRRNQKKGPSGSKTVLRIDHSYLGSSYHSSIISGFSLIASALDSAAVAGTKVSTTVIGLGAGTLPMFLRGCLPFLDIKVVELDPLVEEVANKYFGFSTDEQLQVHLGDGIKFIDDIAVANSRATTQQLMSTGNENNAVKILIVDVDSSDVSSGLSCPHANFVEDSFLLAVKKFLDEGGLFIINLVSRSSAVREMVVSRLKAAFEHLYSLHLEEDLNEVLFATPSERCLDNNNMDEAVAKLKAMLKFPVNVESDMKKLQKLQ

SEQ ID NO: 29733 - protein, 34 aa, Oryza sativa
MQCLVAGDSSGWVVVLEMHCCHLLPCVVYGSFVV

SEQ ID NO: 29734 - protein, 24 aa, Oryza sativa
MNSISEMKKRTCPRDTHKWFFNEQ

SEQ ID NO: 29735 - protein, 292 aa, Oryza sativa
MGGAHFPGEGEVVAGEGDAVVPLRDVGKMEHGCEHYRRRCKIVAPCCGEVFACRHCHNDATASGDRHTICRQDVEKVVCLLCDTEQPVSQVCINCGVNMGEYFCDVCKFYDDDTEKGQFHCYDCGICRVGGKENYFHCAKCGSCYAVALRDNHQCVENSMRQNCPICYEYLFDSLKGTRVLDCGHTMHMECFSEMVEHNKYTCPICSKTALDMTHHWALLDQEIEATIMPPVYRYKVWVLCNDCNKVSEVDFHVIGHKCSHCNSYNTRSTSRPADLSGSSSPSTSDSSENNP

SEQ ID NO: 29736 - protein, 29 aa, Oryza sativa
MQCLGIELFDASQLLSSCSVMLYFSFAIT

SEQ ID NO: 29737 - protein, 304 aa, Oryza sativa
MMQKYLWIQIFVLLSSFSFSVETDYASIFSFGDSFSDTGNIVLIYGPARTDLVMTKPPYGMTFFDHPSGRLSDGRLIIDFIAEALGLPLLPPSFAANRSFEHGANFATAGGTALDRAFFVANNFTVMSPFNISLGDQLGWLDGMKPSLCGCKPGGCEGYFSESLFFVGELGWNDYSAVLLAGRGVDEARSLTPRVVGTIRAATQKLIDGGARTVFVSGITPMGCSSANLVLFAGSSEADYEPDTGCLRSLNLLSMEHNRQLRHALAQLGGARIIYGDFYTPLVELAATPRRFGEPRHSSDLRAN

SEQ ID NO: 29738 - protein, 173 aa, Oryza sativa
MGQAAAKAKQGGDQAENKTGKDEKVAKPKDAKDLTDFMEKNYDSIKDVTSFEDFYHAFYELIEKFCEERGQLQYRIPEKAELQKQYERVNKSPQKGQNLSRKQFMELAGQVIKVNSFTFGKATMDVLVVLFGAPVCALLAKRVVPGLKSFSDDVVIPVATSGAVVYLAKTNKL

SEQ ID NO: 29739 - protein, 50 aa, Oryza sativa
MESCKDSRDLTIMKPVHLRLMLECADHPAGTTNKETISSESSFEINISLD

SEQ ID NO: 29740 - protein, 228 aa, Oryza sativa
MEAAVATPSLLFSSPTPRRPSSCLSLPPPCSSSYASNGAKLQQPRLQFVSQLTSRNSNGSGRRSISILSLRCSSSGTDSASSSATSERWVLEPAGDGDWRHIGYRVARPGGFQIASEAAVTVGRVPEQADIVLSVATVSGTHARLEKKEGSLLVTDLESTNGTYINERRLSPGFPTPIDPGSLLIFGDIHLAMFRVSKMVVDVPSDASGAEQEAAETAQVSAAAQQTN

SEQ ID NO: 29741 - protein, 343 aa, Oryza sativa
MFDSVHARTCLHHAAYYGHVDCLQAILAAAQTTPVADSWGFARFVNVRDDHGATPLHLAARQGRPGCVQVLLENGAIVSALTGSYGFPGSTSLHLAARSGNLDCIRKLLAWGADRLQRDSAGRIPYSVALKRNHGACAALLNPTSAEPMVWPSPLKFISELEPEAKALLEAALMEANREREKKILNGTKYSLPSPSPGDDSADDDACSEVSDTELCCICFDQACTIEVQDCGHQMCAPCTLALCCHNKPNPTTLTPPSPACPFCRGSISRLVVAQTRSACDPDKPSSLQLTRKRSRRSHNLSEGSSSFKGLPSAMGSFSKLGRGSSRMADSDSSNLDKPEHDL

SEQ ID NO: 29742 - protein, 119 aa, Oryza sativa
MEIIVILSLVVLLVLGALFVLPKSRNKGKAKEASSNAKSVTFRSYTKEEISAHNTRTDCWVIIKDKVYDVTSYVEEYPGGDAILNNAGGDSTEGFFGPQHGFRVFEIIEDFCIGELKHS

SEQ ID NO: 29743 - protein, 260 aa, Oryza sativa
MQMISKEDYLVSLRRKSSAFSRGLPKYRGLPRQLHNSRWDASLGHLLGNDYMSLGKDITLDGKFAGTFGLERKIDLTNYIRWWLPKKTRQSDTSKMEEVTDEIRAIESSMQRTEPYKFPSLGLHSNSKPSSVVLSACDILSQSDAFKSFSEKSTKLSEECTFSKEMDEGKTVTPVPATGHDTTAVNMNVNGLLVQRAPYTLPSVTAQMKNTWNPADPSADPLFWTNFILPASQPVTMATIATTTFAKNEVSSSDPFHGQE

SEQ ID NO: 29744 - protein, 488 aa, Oryza sativa
MGENVVGTYYYPPSAAAMDGVELGHAAAGSKLFDDDGRPRRNGTMWTASAHIITAVIGSGVLSLGWAIAQLGWVAGPAVMVLFSLVTYYTSSLLSDCYRSGDPVTGKRNYTYMDAVNANLSGFKVKICGFLQYANIVGVAIGYTIAASISMLAIGRANCFHRKGHGDPCNVSSVPYMIVFGVAEVFFSQIPDFDQISWLSMLAAVMSFTYSVIGLSLGTVQVVANGGLKGSLTGISIGVVTPMDKVWRSLQAFGDIAFAYSYSLILIEIQDTIRAPPPSESAVMKRATVVSVAVTTVFYMLCGSMGYAAFGDDAPGNLLTGFGFYEPFWLLDIANAAIVVHLVGAYQVFCQPLFAFVEKWAAQRWPESPYITGEVELRLSPSSRRCRVNLFRSTWRTAFVVATTVVSMLLPFFNDVVGFLGALGFWPLTVYFPVEMYVVQKKVPRWSTRWVCLQMLSVGCLVISIAAAAGSIAGVMSDLKVYRPFKGY

SEQ ID NO: 29745 - protein, 183 aa, Oryza sativa
MEEEPISVVFQVSANGVGLLDPGAERNSVEKGAKVDLPFWLAHGLLSLEQAVSINVPPCFTQKTRKEIQADAACVDLRIRCPYFYELGCKIVPLVNDRSIGLFLRYAFTSRYKEILSKSHSSSMMTVPKFVPRLTKEEAQVFESARDSMTAFKKWRAGGVRLQKASILGRKRKTKLPDGPSAP

SEQ ID NO: 29746 - protein, 43 aa, Oryza sativa
MRTFGSLLRSVLVRVVLCLSLALQQVWLSWEWKRWISFGISAR

SEQ ID NO: 29747 - protein, 54 aa, Oryza sativa
MQRLQAEQRAAMQAAEKLHREKLAAEKEGEKEEETDTNADPMAAAEAQALKQSS

SEQ ID NO: 29748 - protein, 68 aa, Oryza sativa
MTDDTKICGAKVTAHATAKLGQRRDDRRCCSPQRRLADGRDREVAMAQALETGKEGAARRGREVYAGR

SEQ ID NO: 29749 - protein, 42 aa, Oryza sativa
MCAWLGDRWPLSVVVTRLTWEAAICFAVIAADLCPIMADHFT

SEQ ID NO: 29750 - protein, 89 aa, Oryza sativa
MHARRRRSRSRSRESASLVLAWMSTTAEEEEEDQAARWERMKASILGRRGERIMAGRTRESMAPRMARWRGPCTAAMLFRPRMSSIDCG

SEQ ID NO: 29751 - protein, 205 aa, Oryza sativa
MRAAFPVSSARVKATERFEAAYPTIKELALAGPPGSKTVKQAAQQLLPLCVKAMQENNADLTGESAGVFIWCLTQNAESYKLWERLHPENVEASVVVLSTIVTKWSELSHKLSAESLKVTLKNLRTKNEAALEAATDSGKQASIKAADKYSKEILGRLSRGGACLKGSLLVITLAVAAGFVLSPNLEIPSDWDKLQAMVASHLSF

SEQ ID NO: 29752 - protein, 215 aa, Oryza sativa
MGDVASIISCWFRFNRRKLEALEAGIHELRPGQGDSPMFVDILVKDLRSPTHETGLSANYRGFYKNCSALRSCSAHMNLFTSLDIRKDFMVGSADWGNFVKALGDIKLPGWYRTAMRSPEMRKVLFFEFNDPHTGELRGKRYRALSVFSWLEFARIFIKHMKKGLCTDKQATALLCVIFSNIVPVVEKKLTYSYRPPAKEKSNESFTVEEILDPS

SEQ ID NO: 29753 - protein, 44 aa, Oryza sativa
MKELNCWLFLMPTRQKEELQNHWSMLQWLSKGNLLCQLLMNLLH

SEQ ID NO: 29754 - protein, 502 aa, Oryza sativa
MAHSLPLDVWGWITNLPPFSQWRSNAMSLCICPTPSASESSQPSVNLSVVKTPPTQPSFVTFSIFANYRVPISLWTSKPVHLKSYTQQSLDEQEMLELFVDIVDWVLRSGPNKKLSFQFPRAQIHGNLKDVFNIVFLSLAFLVCIYEAPHALRCRCLESLRTQLTGPKCKDAAKTFVRMLGANLEEQWMQTMNLAVTNWIVEQRSSHHSFGVPSPLFSYALSASGLWKVQLYCPLIAMSMEDPAVPTQDERLLFSLTYQQLEGVIQLAYKTIRRDNWIDVEIKVDNIRCDVDSLVSEILMTERGHGSEEKHFPSRVMLQITPMQQSDVLSVSVSKSSDNPTHEFGLEKGIEGSFDPPNTFGLKASVSESLTLTMKPWKFEQSVHGNTTTLNWFLHDGVNGREVYSSKPSKLSLLQPRAWFRDRYSTVYRPFTKKGGVIFARDEYGDSVWWKICGAALGKTMDWEIRGWIWLTYWPNKQKTFHSETRRLEFRECLQLPLMKSP

SEQ ID NO: 29755 - protein, 524 aa, Oryza sativa
MMFDALRRRLMQLDEVKQGAKQQHNLKAGSIMMSAELRANKNKRIGEVPGVEVGDMFYFRIEMCLVGLNSQSMSGIDYMSAKFGNEEDPVAISIVSAGVYENTEDDPDVLVYTGQGMSGKDDQKLERGNLALERSLHRGNQIRVVRSVRDLTCPTGKIYIYDGLYKIREAWVEKGKTGFNVFKHKLLREPGQPDGIAVWKKTEKWRENPSSRDHVILRDISYGAESKPVCLVNEVDDEKGPSHFNYTTKLNYRNSLSSMRKMRGCNCASVCLPGDNNCSCTHRNAGDLPYSASGILVSRMPMLYECNDSCTCSHNCRNRVVQKGSQIHFEVFKTGDRGWGLRSWDPIRAGTFICEYAGEVIDRNSIIGEDDYIFETPSSEQNLRWNYAPELLGEPSLSDSSETPKQLPIIISAKRTGNIARFMNHSCSPNVFWQPVLYDHGDEGYPHIAFFAIKHIPPMTELTYDYGQSQGNVQLGITMKQQGAFSVSRCHVIRLAFVWMRMQKRVFIAESIGIVPNFIGITSI

SEQ ID NO: 29756 - protein, 16 aa, Oryza sativa
MDPFFLYVNTVKPSTC

SEQ ID NO: 29757 - protein, 224 aa, Oryza sativa
MASSSSLYLLAALLALASWQAIAFDPSPLQDFCVADMKSPVRVNGFPCKNPMEVNSDDFFNAAKFDMPRSTMNKVGSNVTNLNVLNFPGLNTLGISLARIDYAPLGVNPPHIHPRATELLTVLEGTLYVGFVTSNPNRLFSKVVHKGDTFVFPKAMIHFQMNLDHNKPAVAQSSLNSQNPGVITIASAVFGSKPPISDDVLTKAFQVEKKVIDWLKSQFWESNY

SEQ ID NO: 29758 - protein, 365 aa, Oryza sativa
MSSILVLPKLMFIIQNKDSIHWSSLQSLKHQRSRGQGVLGVLALANAIVYTLKVHTAMKCLPQQSQKQRINLGSTVLNMKAMGINDLLSFDFMDPPAPQALISAMEQLYSLGALDEEGLLTKLGRKMAEFPLDPPLSKMLLASVDLGCSDEILTIIAMIQTGNIFYRPREKQAQADQKRAKFFQPEGDHLTLLAVYEAWKAKNFSGPWCFENFVQSRSLRRAQDVRKQLLTIMDRYKLDVVSAGRNFTKIRKAITAGFFFHAARKDPQEGYRTLVENQPVYIHPSSALFQRQPDWVIYHELVMTTKEYMREVTVIDPKWLTELAPRFYKSADPTKMSKRKRQERIEPLYDRYHEPNSWRLSKRRA

SEQ ID NO: 29759 - protein, 342 aa, Oryza sativa
MGEEEEDPDWLRAFQPPTTSTVMLSSGSDDSPENSPTRTTPSGEEQKGENKASSDHAGDGDAAALNKGKKATPTRRKTPTSQEDAFDKDEKPTMESNQDKPPKRSTPKKKLVKPPSGSNASKVTGPKAGPDQIDDTLEHQEEGVAEEEMQDKLTEHSVSQRLPLIIPDKIQRSKALIECDGDSIDLSGDVGAVGRIIISNSPNGNQELLLDLKGTIYKSTIVPSRTFCVVSVGQTEAKIESIMDDFIQLEPQSNLFEAETMMEGTLDGFTFDSDEEGDKLPEPHASQNDQNNEDGDQPKAKTKRKAEKPAGKGQKKAKVAGKATKKGTRKTQTTKRTKKAKK

SEQ ID NO: 29760 - protein, 81 aa, Oryza sativa
MKHQLLRLKRRPSKKKPLLKKAHSKKRERRPNQKAPPTIYQMMNRQAKKASRVRSPQSISPSQKTFRLRHQRMMPQWQARH

SEQ ID NO: 29761 - protein, 31 aa, Oryza sativa
MTMPRPVLMVDQRRRLQWWASIDHHSHPPIK

SEQ ID NO: 29762 - protein, 56 aa, Oryza sativa
MFRYKLKAIEAHKAWMKSPEVLENCSTGLHFPAEQIENSEEQVIPLKSVAFYAADG

SEQ ID NO: 29763 - protein, 268 aa, Oryza sativa
MTVSSPSAEEPFRVFVGYDPREDEAYEVCRRSLLRHASIPVDVRPIWQPDLRAAGLYWRERGPTESTEFSFTRFLTPYLAGYRGWALFVDCDFLYLADIAGLLACLPSSDPDHRLAVACVKHEYAPAEATKMDGAIQTVYPRKNWSSMVLYNCGHPKNVAALTPDAVSTQTGAFLHRFAWLDDDEIGEIPFAWNFLVGHNKVDPADPSTQPKAIHYTSGGPWFERYRNCDFAELWIKEADELKADKEKQKQQQIVMANGEKEKDEEGN

SEQ ID NO: 29764 - protein, 103 aa, Oryza sativa
MAPSVSSRLSLDEIIEISCDLDAVSALPPAKPLPPQPPTQVRYEPQPPGGVNGVLGAGDGVRMPRRTELRDLVPIERDDKLARLLEQCSKLQDRIDGTLSIYF

SEQ ID NO: 29765 - protein, 300 aa, Oryza sativa
MLSLRPPCTLSPAPWRRRRTLHGAAGTPQRVSVAAPSAIVEAVSPPARFSFPILVNGCTGKMGLSVAEAVTSSGLHLVPISFSSRDTLDRTVRVGHTDVRIYGPSAREDVLSSVIDEFPDVVVVDYTAPDSVNANAELYCKLGLPFVMGTTGGDRQLLYKSVQDSNNYALISPQMGKQVLESHQAGKLDISGTAKAVIACFEKLGVSYDMNRMVKIRDPEQQLEMVGVPEEHIEGHAFHLYHLTSPDDSVSFEFQHNVCGRSIYAEGSVDAAMFLHRKVRSNDSKRIYDMIDVLREGSMR

SEQ ID NO: 29766 - protein, 368 aa, Oryza sativa
MAGDLAEAEDLAECGITHKLHILSRIGLLIVKELDKHCKMSDSPRHFPLPSSYFRVSGSARKTDRILGAHGPVHPDDTKCSDNAERVSTEVAPDKEARSSLSNIGEQNASCHDKGKRNKKQDQTTNHSLEKEKVSSCGSAGTKLSSPASLGLAKEADSIDSISLLENQNRPESRSSTGETRASETDHNYSNRRETVMKDTGTVLVGCRIRLWSARDMCYICGTVETYDQSNGFHKIIYENGDKELVRLECQKWEFISDTISTVKDIPNSHPRCCSFKRVRGKGSADSQNKRQEMLLPGSSIVCDPDEDGDIDDNFVKQPFSNNRTGVAGLKKNSKRALDSSNAQTSSGLTAFNPVDNVRCTRSRKVQL

SEQ ID NO: 29767 - protein, 251 aa, Oryza sativa
MQYAVTVDVLHTVFSAFGTVQKIAMFEKNGGMQALIQYPDITTAAVAKQALEGHCIYDGGYCKLHLSYSRHTDLNVKAHDERSRDYTVSSDPSAQMQAAAQAPGPSTPGVAWQNTAPSASFYGSTAAATPVGQVPAWNPNMQAGAFGSASSAYPTQPMMPGSVPHYQELDPVPEHCQYRSRPHIRCHSMVYPQLLHTMLHRLANQCISRNNLSLSDVQAIRAIANVACNTRVWVSSLQILGCNSSMQLFIL

SEQ ID NO: 29768 - protein, 35 aa, Oryza sativa
MMRMRMRMKGKMKKWSILAYKVTERSVYLTVFRRT

SEQ ID NO: 29769 - protein, 348 aa, Oryza sativa
MAMERNAAPRVSASSSAAASPSTVGALLSKASVAAAPAREIPSPRSLLSRILHRSGGGGGFGCRLRLPRYCSSGAAAKEDAAAEYVEVEVEAEAAAPKVVGRQAVDRESPRSSLGKKAAEEVSPASLGLGASLMLLLSKSAAELNRMAELRAQMERLVLDTKGEEEARSSNHPNASDDHADITKEEPTAFSGGALSRCSRTAAAPGNAGHHAAVPMDQMEAELEAELTLLQCATPRRDRQLEIGDDEEESTDTHAATFADADDDTDGADDEEEEEEESGAAAQGGVSARELERRLHELLQWRHEERIAELETALERARKRLQEKEREVCWWRNTAKLVTRHKDDSRLR

SEQ ID NO: 29770 - protein, 536 aa, Oryza sativa
MATASVSFKSREDHRKQLELEEARKAGLAPAEVDEDGKEINPHIPQYMSSAPWYLNADKPSLKHQRNWKSDPNYTKSWYDRGAKLFQANKYRKGACENCGAMTHDKKSCMERPRSVGAKWTNINIAPDEKVESFELDYDGKRDRWNGYDPSTYTRVIADYEAREEARKKYLKEQQLKKLEEKDGEEGDENVASEEEDEEDGLKIDEAKVDESAQMDFAKVEKRVRTTGGGSTGTVRNLRIREDTAKYLLNLDVNSAYYDPKTRSMREDPLPDADPNDKFYVGDNQNRLSGQALEFKQLNIHAWEAFDKGQDIHMQAAPSQAELLFKSFKIKKEKLKSENKDKIMEKYGNAASEEPIPRELLLGQSEKEIEYDRTGRIIKGQDVALPKSKYEEDVFINNHTTVWGSWWKDHQWGYKCCKQTIRNSYCTGLAGIEAAEASADLMKANMARKEAAEDEPVRHEEKRLATWGTDVPNDIVLDKKLLDEALKKEGARRKEEMDERKRKYNVKWNDEVTAEDMEAYRMKRIHHDDPMRDFLH

SEQ ID NO: 29771 - protein, 90 aa, Oryza sativa
MCCSATTTPRRPSPSSARTGSRTARSSASSSRAARRRRIRSLPRSPELSRRWPTSRLSRRKDSTSLPKSEPLYAHAFHFVDAVMLPSFRF

SEQ ID NO: 29772 - protein, 105 aa, Oryza sativa
MKSNRRLTPKSDIYAFGILLLELISGKPPLQHSVLVATNLQTYVQSARDDGVDVERLSMIVDIASACVRSSPESRPTAWQVLKMIQEVKEADTAGDNDSDLTSNS

SEQ ID NO: 29773 - protein, 79 aa, Oryza sativa
MAGKYIAAGLVGSFAISYVCDHFIAEKKIFGGTTPHTVSDKEWWQATDKKFQAWPRTAGPPVVMNPISRQNFIVKDLES

SEQ ID NO: 29774 - protein, 251 aa, Oryza sativa
MLPPRVAPAAAAAAPTYLAAAASTPASVWLPVPRGAGPGAVCRAAGKGKEVLSGVVFQPFEELKGELSLVPQAKDQSLARQKFVDECEAAINEQINVEYNASYAYHSLFAYFDRDNVALKGFAKFFKESSDEERDHAEKLIKYQNMRGGRVRLQSIVTPLTEFDHPEKGDALYAMELALALEKLVNEKLHNLHSVASRCNDPQLTDFVESEFLEEQVEAIKKISEYVAQLRRVGKGHGVWHFDQKLLEEEA

SEQ ID NO: 29775 - protein, 149 aa, Oryza sativa
MDCSTYPNYLSYFWANSNNTRENLGIKKGTVDEWVRCHDDGLPYSQDIESSIKYHQNLTSRGYRVLVYSGDHDSVVPFLGTQAWVRSLNYPIVDDWRAWHIDGQSAGFTITYANDLTFATVKGGGHTAPEYQPERCLAMFGRWISEKSL

SEQ ID NO: 29776 - protein, 163 aa, Oryza sativa
MDGLVGLLKIRVVRGINLAYRDTRGSDPYVVLRLGEQKVKTSVKKKSVNPIWHEELTLSIMNPIAPIKLGVFDKDTFSRDDPMGDAEIDLEPFMEVLNMDPENIRNGSIIKTIRPSNQNCLADESHLFWRNGKFVQDIILRLRNVESGELQVQLQWVKIPGRH

SEQ ID NO: 29777 - protein, 219 aa, Oryza sativa
MNSLKDVPWREFFKSKAVWAMIYAHFCGSWGHYTCLSWLPTFFSEELDLNLTEASWVSVLPPLGSMIITSIAAPFADNLISNGVDTTKVRKICQTIAFLSPATFMMLSSVDLGVPPWEIVAFLTSGLALSSFALSGLYCTHQDISREYASILLGITNTVGAVPGIVGVALTGYLLDTTHSWSISLFAPSIFFYLTGTAVWLAFASSEPQEFSKSEPESS

SEQ ID NO: 29778 - protein, 385 aa, Oryza sativa
MESLLAASSSLPAAAFSPPSSLSSTSSSPHALRSAVAGAARAVRCSAAKDSILYALEHDEMFNSAEVIQWESGKSINSIAAAQGIRIRRRCRPRYPSEGSGADKAVPRNMLEQIIWDKEVEVSQRKAKKPLQKVIESSQHAPPARDFVGALTAAYSRNVAPALIAEVKKASPSRGVLREDFNPVEIAQSYEKNGAACLSILTDEKHFQGSFENLETVRNSGVKCPLLCKEFVIDIWQIYYARSKGADAILLIAAVLPDLDIKYMLRICKNLGMTALIEVHDERELDRVLKIDGVQLIGINNRSLETFKVDTSNTKTLLEKRGDLIRDKGILVVGESGLFTPDDVAYVQNAGVSAVSLLITRFQLSWSYMCFKFPAEILYGTSEMD

SEQ ID NO: 29779 - protein, 198 aa, Oryza sativa
MDLSDDEYDDPDYMQDRGDVAQPVDHPRAVKTGDSFFTNLIKKSFKINNGMGNGRAKVFINGYPISDRAVRKAEKIAGPIYPGEYWYDYRAGFWGVMGQSCLGMIPPYIPELNYPMPKKCAAGNTGVFVNGRELHQKDLDLLVGRGLPDSPGRSYRVEMSGKVSDEVSGEELYCLGKLAPTVEKMKRGFGMRVPRIIP

SEQ ID NO: 29780 - protein, 77 aa, Oryza sativa
MHVAAGVPRVLSALALAFNTNLFGALTHYSSGQAAVYFGAGYLELPDVFRMGFVTALINILIWGVVGTFWWKLLGLY

SEQ ID NO: 29781 - protein, 33 aa, Oryza sativa
MCEGYQMHIRINELLIVILALRPVTFCDVVVIQ

SEQ ID NO: 29782 - protein, 35 aa, Oryza sativa
MAIGNNLDAMVICDLQFPCRDPLGHFVESKEEQTI

SEQ ID NO: 29783 - protein, 293 aa, Oryza sativa
MYEAVRDLLPDLDPVFADPYSAALRAEVTAVCNTLGSSIKGIFMELENLIRRDPARVAAQGGGIHPITRYVMNYLRAACGSRQTLEEVMEGDFGAVGGAAAAVDPDRPTSSLAVHIAWIMDVLHKNLDIKSKIYRDPSLACVFLMNNGKYIIQKVNDSELGVLLGDEWIKQMTNRVRRWSMDYQRVTWGKVTTVLQTGGPGVGGLPATAMKQKLRMFNTYFQEIYEVQSEWVIADEQLRVDVRAAVAEAVMPVYTALISRLKSSPEARHDLYIKYTPEDVEACIQHLFEGAAK

SEQ ID NO: 29784 - protein, 292 aa, Oryza sativa
MAGGEDEGWRRSGIEVSALQFDYDGQPPLFARFNLRIAPGSRCLLIGANGSGKTTLLKILAGKHMVGGRDVVRVLNGSAFHDTQLVCNGDLSYLGGSWSRAIGSAGDVPLQGDFSAEHMIFGVDGVDPVRREKLVDLLDIDLQWRMHKVSDGQRRRVQICMGLLHPYKVLLLDEITVDLDVVTRMDLLDFFKEECEQREATIVYATHIFDGLESWATDIAYIQEGELRKSAKYSDVEELKSAKNLLSVVESWLRSETKLPKKEHPRPETQPRRSSPFDASPFRSSRHMAYYR

SEQ ID NO: 29785 - protein, 553 aa, Oryza sativa
MLLACDCDDDAQTAENGNAPMLSNYRAQPAPPLAEPLLLDKPQRAHWLRQLKPWRRNAADDHLSAGIAINWSSVRSATKDWITNPMNIAMLLWLLCVAVSGAMLVLLLLGLLDGAFPTPAARNHWIEINNQVLNALFTLMSLYQHPVLCHHLFLLCRWRPADAADLRAAYFKDGAGPRHGERAHMAVVVALLHLTVACQYVLCGLYWGYTKKTRPELVENGFFVLGVVAPVVAVVYTVCSPLGKDNYGELACPNAFDSVSQHKCTGHAVVEPEWAGGMFDCGGDATAWWLSLSCTFCAFGWNMERLEFGSMFVHTATFVLLCFAPLWVMGVSALHIHDVVIGDMVGGAGALLCVCGLLYGGYWRIQMRERFGLPASTACCGSPSVTDYARWLFCWPCALAQEVRTESLYHIDCETFYKKLPVVDDVEDEKRLPLLASHHVQFHEPPDTMIMAASEGSNDHVVIVHEEMVPPAVQVVVEQVVVEGDKSEEECSAVHDEKIMGSPLPESVVIVDDDEIPASLSDGSWTVEKVKRLINVVTLVSLLILLYTRGFIR

SEQ ID NO: 29786 - protein, 267 aa, Oryza sativa
MRLQTVDGLSAYLASVQDDVASVIIGKRTVLRARTASDAIDMRLTIDERVKDLALKFGTQVPKSKLYRFPKELASLPGCLFHLRRGPLLGSIVGHEDERSVLRNLFLNASFDLSFRMLAPRCIMHREGGTFEELPAYDLAMQSNAAVVLDHGTDIFIWLGAELAAQEGQSAAALAACRTLAEELSELRFPAPRILSFKEGSSQARYFVSRLIPAHKDPTYEQESRFPQLRTLTPEQRSRLKSSFIHFDDHSFCEWMRSLKLVPPEPS

SEQ ID NO: 29787 - protein, 149 aa, Oryza sativa
MLDADFQPRISDFGLYLLLNPAAAQQMLEASAMQGYKAPELIKMREATRESDIYSLGVILLEMLAQKEAANSSSPNARDIHLPSSFKDLVLERKISDAFSSELVKQSKNSGKEQNLNAFFELATACCNPSPSLRPDTKRILKMLEEISR

SEQ ID NO: 29788 - protein, 125 aa, Oryza sativa
MATPVGAVFLVEGIVLCSTRFLRVKTLFRFSDGRCLRFDALFPPWRLRLEDPALRCLWSVHRKSEFLALMSYVLLQLCRRKFFLCSPCGFCPVSPLNRAYVRFLGPVSPQNLGQVSSSLMKTGSP

SEQ ID NO: 29789 - protein, 361 aa, Oryza sativa
MFWVGCVYGRNDESRFGFFCHSALEFLRQNGSSPDIIHCHDWSSAPVAWLFKEQYAQNGLSNGRVVFTIHNLEFGAHHIGKAMARCDKATTVSYTYSREVSGHGAIAPHFSKFHGIRNGIDPDIWDPYSDNFIPVHYTSENVVEGKSAAKKALQQRLGLQQTDTPVVGIISRLTVQKGIHLIKHAIYRTLERNGQVVLLGSAPDHRIQGDFTNLASKLHGEYHGRVKLCLTYDEPLSHLIYAGADFILVPSMFEPCGLTQLTAMRYGSIPIVRKTGGLYDTVFDVDDDKDRAREQGLEPNGFSFEGADSNGVDYALDRAITTWYDARDWFHSLCKRVMEQDWTWNRPALDYMELYHSARKN

SEQ ID NO: 29790 - protein, 254 aa, Oryza sativa
MAPAASASASAVVTPSSFRCVPTASCGLGARGKAPAPRRLLHDHAQGKKRAAATWSLKAGLWDSLRSGFLKSNNSTETVEPPSAPIEEEEPLPEELVLLERTLADGSTEQIIFSSAGDVNVYDLQALCDKVGWPRRPLTKIAASLRNSYLVATLHSVTMPSKAEGEERKQLIGMARATSDHAFNATIWDVLVDPSYQGQGLGKALMEKVIRTLLQRDISNITLFADNKVVDFYKNLGFEADPQGIKGMFWYPRF

SEQ ID NO: 29791 - protein, 141 aa, Oryza sativa
MRPPGAILAPGETIIATVFKFVEHPENNENVLQKCKVKFKILSLKVKGPMDYAPEMFDEQRDQAVVEKILRVVFLNVENPGPQLEKLNNQLAEAEAALEARKKPPEENGPKIVGEGLVIDEWKERRERYLAQQQVEVVDSV

SEQ ID NO: 29792 - protein, 110 aa, Oryza sativa
MQSDAVARSPRQTVRVGGRRPTADPSRGSSEAYGFVGSIAAVAAAAAYLAWAYLPEPWLRFLGVTYYPARHWALAMPSLLLEAAAQGMVLYMASNFLLAPAPTLLGHYLR

SEQ ID NO: 29793 - protein, 38 aa, Oryza sativa
MCWLCMILSLPSAGGVHIIVAPVDCVHVYMVTFNHRLI

SEQ ID NO: 29794 - protein, 344 aa, Oryza sativa
MQFQLCSVFFTFSLGTRTHYFGRTILHGGAKYRATGRGFVVRHIKFAENYRLYSRSHFVKGLEVALLLVIFLAYGFNNGGAVGYILLSISSWFMAVSWLFAPYIFNPSGFEWQKVVEDFRDWTNWLFYRGGIGVKGEESWEAWWDEELAHIHNVGGRILETVLSLRFFIFQYGVVYHMDASESSKALLIYWISWAVLGGLFVLLLVFGLNPKAMVHFQLFLRLIKSIALLMVLAGLVVAVVFTSLSVKDVFAAILAFVPTGWGVLSIAVAWKPIVKKLGLWKTVRSLARLYDAGTGMIIFVPIAIFSWFPFISTFQTRLLFNQAFSRGLEISLILAGNNPNAGV

SEQ ID NO: 29795 - protein, 330 aa, Oryza sativa
MQLMLGPTRYTYTDIIAMTSHFRDKLGQGGYGSVFKGVILPGDVYVAIKMLDNYNCNGEEFISEVSTIGSIHHVNVVRLVGFCAEEMRRALVYEYMPHGSLDKFIFAPEKSFSWDKLNEIALGIARGINYLHQGCDMQILHFDIKPHNILLDSNFVPKVADFGLAKLCPRDNNYVPVSAARGTVGYIAPEMISRSFGVISSKSDVYSFGMLLLEMAGGRRNSKQNMSSSTQVYYPSLVYNQLIQQEMGEITNTLNMHELERKLCVVGPHCIQVKPPDRPTMSEVIEMLEGDVDGLQLPSRPFFCDDEPLPLLVDSYRFSSELTEISEEDG

SEQ ID NO: 29796 - protein, 232 aa, Oryza sativa
MPKRTTHTYSSEDALPEGPESDLFVYYCKHCASHVLITDTQLQKMPKRKTDRAHVLDKKKHLSRLNVKEAGKVLLKRGEGKLEKQFRMSCLGCGLFVCYRSEEELELAPFIYVVDGALSSVAAETNPHDAPVPPCITQLEGGLVQVAIEVEDRAQRSAITRVNADDVRVTVAAPAARGEANNELLEFMGKVLGLRLSQMTLQRGWNNKSKLLIVEDLSARQVYEKLLEAVQP

SEQ ID NO: 29797 - protein, 186 aa, Oryza sativa
MEEARVVESKDGTISVASAFAGHQEAVQDRDHKFLSKAVEEAYQGVDCGHGGPFGAVVVRNDEIVVSCHNMVLDYTDPTAHAEVTAIREACKKLGKIELSDCEMYASCEPCPMCFGAVHLSRIKRLVYGAKAEAAIAIGFDDFIADALRGTAYYQKANLEIRRADGNGALIAEQVFENTKEKFRMY

SEQ ID NO: 29798 - protein, 187 aa, Oryza sativa
MALTVRLHTAVAAVAVAVVVAMGMAAAQMSPAGAPAPAGGISPAFMDAVLNMSDCLTYVMNGSTARKPDEPCCPELAGLLESKPVCLCQLLAGGASSYDISVDYKRAMALPGICGLAAPPVTACALLGVPVPMAPSASPMAGLGPSTEPQMPEKSPSASPSESSNHAPGRFTALAAVVLAVAAAGMV

SEQ ID NO: 29799 - protein, 61 aa, Oryza sativa
MDWYGADGFDLLVATPAVTTVISSCSSLHMVCSAACVPCGILKPPECWKHGMECGNVDEGQ

SEQ ID NO: 29800 - protein, 379 aa, Oryza sativa
MDSFQHGMDADKHHIFGERGNMIQLNMCASDGRSVVGQRCQRLGCNNVVEGQTLLCKSHSIGQRCQMLGCPHIVPDGSVLCMSHGGGRPLGEPGSSTVACSKSEISIKYEGESGFRVTQNAGNDLGSAGIYNPDGDVVMCKYQGCSKRAQGNAMYCKIHRGGSKGCMVQGCTKGAHGGTPLCIAHGGGKRCAVTGCPNAACGSSQGLTDRCVRHGGGRRCRFDGCVKGAQGNTDFCIGHGGGRRCKFEGCGKSAQGRSDYCIKHGGGRRCKFQGCATSAKWGMDFCSLHRKSLMSGSNSSHEMLPAPPPKRRAKKTKTAVGPSGLSSDPKSAESVMIKHASNAGHQQQPIHSMKSSPSSGLTASTEGDVAARSHALFGL

SEQ ID NO: 29801 - protein, 27 aa, Oryza sativa
MLISEPLYIADVTIWSRSGCGSSHLFL

SEQ ID NO: 29802 - protein, 29 aa, Oryza sativa
MWGVFFLWCAWALFLSPYHIGCLDTNYKY

SEQ ID NO: 29803 - protein, 254 aa, Oryza sativa
MLVYEYVNNGNLEQWLHGAMSHRGSLTWEARVKILLGTAKALAYLHEAIEPKVVHRDIKSSNILIDDDFDAKVSDFGLAKLLGAGKSHVTTRVMGTFGYVAPEYANTGLLNEKSDIYSFGVVLLEAITGRDPVDYGRPANEVNLVDWLKMMVASRRSEEVVDPTIETRPSTRALKRALLTALRCVDPDSEKRPKMGQVVRMLESDDPIPRGDRRSKHNRGGSTEMDSQRDNNSDTDKSDNPDSKPSRSRASSSK

SEQ ID NO: 29804 - protein, 141 aa, Oryza sativa
MNTMIGPAPSPAAAAAAAVSPSCYASPAASSVRRRGVVGVVRCAPDSGRGGDGGGGGGKGKLRVGSPIVIVEAPVMLKTAASVPSLRHNAGQVKAGDVGRVMARKPKDVWAVRLAIGTYLLDGKYFKTLDVDDDDTASPDE

SEQ ID NO: 29805 - protein, 529 aa, Oryza sativa
MAEEVYVASIDQGTTSTRFIVYDRHAKPVASHQLEFKQHYPEAGWVEHDPMEIMESVKICMAKALDKAAADGHNMDVGLKAIGITNQRETTVMWSKSTGLPLYNAIVWMDARTSPICRRLESDLSGGRTHFVETCGLPISTYFSALKVLWLIENVDAVKNAVRAGDALFGTIDTWLIWNLTGGIGGTDRDGNKVFGHHVTDCSNASRTMLMNLKALDWDKPTLETLGIPAEILPKIISNSERIGVVANGFPLAGVPIAGCLGDQHAAMLGQLCQKGEAKSTYGTGAFILLNTGEEPTQSSHGLLSTIAYKLGPSAPTNYALEGSIAIAGAAVQWLRDSLGIISTAADIEKLADTVQDSGGIYFVPAFNGLFAPWWRDDARGICIGITRFTNKGHIARAVLESMCFQVNDVLSSMHKDAGEAGEVKSAEGEFLLRVDGGATVNNLLMQIQADLLGSPVVRPADIETTALGAAYAAGLAVGVWSKEQIFAGLHKENTRVFRPKLDEAHRRKRADSWYKAVSRSFDLADLSL

SEQ ID NO: 29806 - protein, 26 aa, Oryza sativa
MKERKNRAKKIRGVKKTKAGDAGKKK

SEQ ID NO: 29807 - protein, 74 aa, Oryza sativa
MTKLEEAVRNVKMEGLLWGASKLVPVGYGIKKLQIMMTIVDDLVSVDSLIEDYFYTEPANEYIQSCDIVAFNKI

SEQ ID NO: 29808 - protein, 121 aa, Oryza sativa
MAAASAAAQAEGTVIAIHSLDEWTIQIEEANSAKKLVVIDFTASWCGPCRIIAPVFADLAKKHTNAVFLKVDVDELKPIAEQFSVEAMPTFLFMKEGDVKDRVVGAMKDELASKLELHMAM

SEQ ID NO: 29809 - protein, 35 aa, Oryza sativa
MLGLACLARKLVSFANVMPVVPSCIIGTVVLHLFS

SEQ ID NO: 29810 - protein, 304 aa, Oryza sativa
MVWFQCEDCGDDLKKPKLAGHFRSCSAYRLSCIDCGEFFTQETVQGHTQCISEAEKYGPKGQDKASNNAQGKQDKPKPNADVDINVGLSTYPPWFCSLCKTTTTSKQTLLSHADGKKHRAKAKAYHASQKQANGVEQTPKETVGAPVTESAQVNNERSTENERGVDNDAAKRKRANDTTSEEPDNTKRQNNLSVNSGEVVQSSNEEAETKAKSKGTKDELVSSANLKGSKKQKIKWKKIITKVLQTNPDGVLKLKKLQKLVTKELLECGLTEDKEQMHAILMDKISSSSRFSVDGKRIRLVAKD

SEQ ID NO: 29811 - protein, 198 aa, Oryza sativa
MFSYLEHILETQDKAEVERILKKIEQCKKTLADLGYIEFTFEDFFSIFIDQLESVLQGHESSIGAEELLERTRDQMVSDYVVMFFRFVTSGEIQRRAEFFEPFISGLTNSTVVQFCKASVEPMGEGSDHVHIIALSDALGVPIRVMYLDRSSCDAGNISVNHHDFSPEANSSDGAAAAEKPYITLLYRPGHYDILYPK

SEQ ID NO: 29812 - protein, 23 aa, Oryza sativa
MSERACVYMVGSTLCVSHILYRC

SEQ ID NO: 29813 - protein, 343 aa, Oryza sativa
MQFSVMPGGYSSSGMNVGVSRLKIEEVLVNGLLDAMKSSSPRRRLNVAFGEDNSSEEEDPAYSAWMAKCPSALASFKQIVASAQGKKIAVFLDYDGTLSPIVDDPDKAVMSPVMRAAVRNVAKYFPTAIVSGRSRNKVFEFVKLKELYYAGSHGMDIMAPSANHEHSAEKSKQANLFQPAHDFLPMIDEVTKSLLQVVSGIEGATVENNKFCVSVHYRNVAEKDWKLVARLVNEVLEAFPRLKVTNGRMVLEVRPVIDWDKGKAVEFLLQSLGLNDSENVIPIYIGDDRTDEDAFKVLRQRNCGYGILVSQVPKETEAFYSLRDPSEVMEFLNFLVRWKKHSV

SEQ ID NO: 29814 - protein, 68 aa, Oryza sativa
MQVTALLSFAASCSAGGVMVLFKRDVLFCRRYPQLPCGRFELAVALAFLSWALSATSAIIMFCLLAAF

SEQ ID NO: 29815 - protein, 82 aa, Oryza sativa
MHDRLQVWCCFRRIRDGGGERQLRLQHLQVRHQLRLLLLQLQLEETYLHPIHHLINELPVPLHMPCTSYLACMQVLNLLLAS

SEQ ID NO: 29816 - protein, 322 aa, Oryza sativa
MRLLNLVFFSGIVAAAPGTTLHARAAANDPCDIGYCTQNGGTTGGGSAAQVTVKTLGELTTAANAAGPAVIFVQGSISGAAKVQVGSDKTIIGKTGSFLTGIGLTINGKKNVIIRNMKISKVEATYGDAITIQKSTNVWVDHCDLSAVRGDDKDFYDGLVDLSHAADWVTISHTYFHDHSKGSLVGHSDKNAAEDVGTLHVTYANNHFNNVRSRGPLLRFGTAHIFNGYYDTMDTGLNSRMNAQALIQSSVFTNVGKKAIFSESSSEVGYVVAEDVVLNGESQNTAPKGSLSASKIPYKFTLLGSGKVASTVPGQAGQKLSF

SEQ ID NO: 29817 - protein, 468 aa, Oryza sativa
MGFRQDPQFAPLINLFPGTSSELTVPQKPAKAPVLRLDAQGREIDEHGNVINMTKPTNLSTLKVNINKQKKEAFQIIKPDLDSLAKSSAHFDERMGINQNKLLRPRRPGFQFIEEGKLSRQAELQRIKNQFGEAQAKELKVKQAQLAKAKAEVVMNPNLIEVAPGRPPKQKQKEEIPEIEPWDAKILPSTTYDDFSMEKVNMEKITIYVEHPEPLEPPAEPAPPPPQPLKLTKKEQKKLRTQRRLAKEKDRQEMIRQGLLEPPKPKVKMSNLMKVLGAEATQDPTRMELEIRTAAAEREQAHVDRNIARKLTPSERREKKERKLFEDPNTLETIVCVYRIRDLSHPQTRFKVDVNAQENRLTGAAVIADGISVVVVEGGKKSIKRYNKLMLNRIDWAAAVDDDDDADEESDKPVNSCALVWQGSVAKPCFTRFSVHNCRSEAAAKRVFADASVPHYWDLAVNFSEDSS

SEQ ID NO: 29818 - protein, 92 aa, Oryza sativa
MTKRTKKAGIVGKYGTRYGASLRKQIKKMEVSQHSKYFCEFCGKFAVKRKAVGIWGCKDCGKVKAGGAYTMNTASAVTVRSTIRRLREQTEA

SEQ ID NO: 29819 - protein, 546 aa, Oryza sativa
MKWGPMTEHVLDNLHCKIDAFQANQVLKLLHDHTIALGFFQWLKRQPGFKHDGHSYTTMIGILGQARQFGTMRKLLDEMNSVHCKPTVVTYNRIIHAYGRANYLREAVKVFEEMQKAGYEPDRVTYCTLIDIHAKGGYLEFAMDLYTRMQEVGLSPDTFTYSAMVNCLGKGGHLAAAYKLFCGMVENGCTPNLVTYNIMIALQAKARNYENVVKLYKDMQVAGFRPDKITYSIVMEVLGHCGHLDEAEAVFIEMRHDWAPDEPVYGLLVDLWGKAGNVDKALGWYHAMLQDGLQPNVPTCNSLLSAFLKINRFQDAYSVLQNMLAQGLVPSLQTYTLLLSCCTEAQAQMGLCCQLMAITGHPAHMFLLYLPDAEPGGQNVRDHTRYFLDMMHSEDRESKRGLMDAVIDFLHKSGLKEEAGFIWEVAAQRNVYPDSVREKDPSYWLINLHLMSEGTAVTALSRTLAWFHRQILTMGKCPERIDIVTGWGRRSRVTGSSLVRQSVQKLLHLFEFPFVTTRGNTGCFVGCGEPLNRWLHNPYVERMHLL

SEQ ID NO: 29820 - protein, 254 aa, Oryza sativa
MMKALSPSARVIAVDLPGHGESEILQHDVENSNQISFSVQSVADLLLKLIRNITDGAVVVVGYSMGARIALHMALNQNHKISGAVIISGSPGLRDEASKRRRSAIDRSRAHFLSSCGLENFLETWYSAKMWASLREHPKFDSLVRTRMKHNNIKALSKVLADSSIGTQKSLWEDLKHLKSPLLIVAGEKDPKFKEISQQMCREIRKHKDRESDGLCEMIIIPDSGHAVHVENPLPLVRAIRKFLVRDIPDVISK

SEQ ID NO: 29821 - protein, 161 aa, Oryza sativa
MKKELHDLRRKNSALQMQQFVGEEKNDLLDYLRSLTPEKVAELSESTSPGVQEAIHSVVHGLLATLSPKIHSKAPPPLGNASGGVLNLGGEDDDCAELVENASLPFQPLISVPRDYLARLLFWCMLLGHYIRGLEYRLELAQLLRISTDVESFPSGDDLII

SEQ ID NO: 29822 - protein, 32 aa, Oryza sativa
MTHLSLYSISEEVFSVGTDTNHVNCGLAFLAA

SEQ ID NO: 29823 - protein, 300 aa, Oryza sativa
MLLGSARILQEHRDELKGTVVLVFQPAEEGGGGAKKMIDDGAVENIEAIFGVHVADVVPIGVVASRPGPVMAGSGFFEAVISGKGGHAALPHHTIDPILAASNVIVSLQQLVSREADPLDSQVVTVGKFQGGGAFNVIPDSVTIGGTFRAFLKESFNQLKQRIEEVIVSQASVQRCNAVVDFLDKDRPFFPPTINSAGLHDFFVKVASEMVGPKNVRDKQPLMGAEDFAFYADAIPATYYYFLGMYNETRGPQAPHHSPYFTINEDALPYGAALQASLAARYLLEHQPPTTGKAKAHDEL

SEQ ID NO: 29824 - protein, 58 aa, Oryza sativa
MKEMLGFSKDVLSWLEDMTSSEDLQEAFDVMGALPDVFSGGHTTCEDFVRAIIHGAKS

SEQ ID NO: 29825 - protein, 11 aa, Oryza sativa
MVMINGLASSS

SEQ ID NO: 29826 - protein, 91 aa, Oryza sativa
MPEMFLDCERRNFVIQGYHRELLEQMIASGWKPPPTASEPSRKLRLGSRKAPPSKKSSMKRKRVKKSSSRRRLPKPITRMTDTTTWQKLGA

SEQ ID NO: 29827 - protein, 212 aa, Oryza sativa
MNPFAKKPTPREAIRSSKRELTNATRGIERDIGTLQLEEKRLVAEIKRTAKTGNEAATRILARQLIRLRQQISNLQGSRAQIRGIATHTQAMHANTSVAAGMQSASKAMGALNKQMDPAKQMKVMQEFQKQSAQMDMTNEMMSDSIDNILDDDQAEEETEDLANQVLDEIGVDIASQLSSAPKGRITGKKVQADESSELDELEKRLAALKNP

SEQ ID NO: 29828 - protein, 112 aa, Oryza sativa
MWAVFYYTAGQADVIQVDAAGYNTCDATNAISNYSKGRTYAFELNETKTYYFICSYGYCFGGMRLQIKTEKLPPPSPPAAAKDKSAAAFTASRASLFYAAAAAVLAAILRMF

SEQ ID NO: 29829 - protein, 123 aa, Oryza sativa
MEGSEELENYFIFNDRYRGMRMDIDGMSYEELLALGDRIGTVSTGLSEDALSKCLDRSMYMATTSGTHEDCERKCSICQEEYSDGEEVGKMVCKHYYHFSCIKNWLRQKNWCPICKSVALNTN

SEQ ID NO: 29830 - protein, 165 aa, Oryza sativa
MIAFAVIPTIGSNIHNVYKVVEARKGSMLLALAMLFPFGLLLAGVLVWSYLSPSDIMRNQPHPLVIGTGFAFGFLVGRMILAHLCDEPKGLKTGMCMSLAYFPFAIANALTARLDDGNPLVDEQLVLLMYCLFTVALYMHFATSVIHEITNALGIHCFRITRKKA

SEQ ID NO: 29831 - protein, 91 aa, Oryza sativa
MGLQEDFEQYAEKAKTLPESTSNENKLILYGLYKQATVGDVNTARPGIFAQRDRAKWDAWKAVEGKSKEEAMSDYITKVKQLLEEAAAAAS

SEQ ID NO: 29832 - protein, 101 aa, Oryza sativa
MEKSSTAAGGRSSTPPPPMYTDEFALEGKKPVKNPFVPIGALVTAGVLTAGLISFRYGNSKLGQKLMRARVVAQGATVALMIGSAYYYGDQIKLFKKGSSP

SEQ ID NO: 29833 - protein, 321 aa, Oryza sativa
MASLSVPPVPTDPRRDAIDLHRAFKGFGCDATAVTAILAHRDASQRALIRRHYAAVYHQDLLHRLAAELSGHHKRAVLLWVLDPASRDAAVLHQALNGDVTDMRAATEVVCSRTPSQLLVVRQAYLARFGGGGGGGLEHDVAVRASGDHQRLLLAYLRSPRYEGPEVVDMAAAARDARELYRAGERRLGTDERTFIRVFSERSAAHMAAVAAAYHHMYDRSLEKAVKSETSGNFGFGLLTILRCAESPAKYFAKVLHEAMKGLGTNDTTLIRVVTTRAEVDMQYIKAEYHRSYKRSLADAVHSETSGNYRTFLLSLIGRDR

SEQ ID NO: 29834 - protein, 251 aa, Oryza sativa
MGTRLVPRETAALLGAFVALLAVSFGAVAAPAPLVVGSIKCLDCSPDDVKAEDAFRGLQVGIMCNSGAGEAYETKMLSGLDENGGFSIPLAADLLRDDGELDKDCFAQLHSAPETPCAGQTPPRIAKAGPGNDTIAAAAADAAPTYLAVSDDTLFSPVACKCGKYKKKFMFAPPPPPPPRPPAPEYKPPTPTLTPIPTPEPSYGPPAPKPPAPPVEDEPQPFFHKHPKLKFMHKKKPCPPLVDVDIPRPNN

SEQ ID NO: 29835 - protein, 318 aa, Oryza sativa
MDATAPLLSPASDDRFWDRLRTRVDTILEDRRLVAPPAATCGVESERGKRLREDSLMLVRGLDSVAAPLAQLSDTLTAAQKGVNALATCSSQARECERGDEEEEPKAKRRCSLAETVSFDGETPVAGADSGEGSEKEELAADAKLRQENGGIQATSEVAKSTNLKRARNLAVSMAGRAAALARELKNIKSELHFMQERCGLLEEENKRLREGYDNGVPPEEDDLVRLQLEALLAEKSRLAQENANLSRENQSLIQLVEYHQLTSQDLAESYEDVMEGMRLDFSSPLGKIDSDEEGERENRRVAVTPSDKLEALESSDE

SEQ ID NO: 29836 - protein, 460 aa, Oryza sativa
MKHHHVARGRAEPRRMGNAAMVITMLLSLCVLTYIKARYCSTPFPKAAEEMEVVEIDEDYDSTRYKMTGPIGEEDFDPTRPTCYVTSKRSERCAAVGDIRVDGNHSKIYINPLDKEWRTKPYARLHDAVAMDDVREFTLVPFGGANHTAVPPLCTRNHSVPAFLFSSGGFAGNLYHDYTDVLVPLFTSTNHFGGEVQFLLSGIKDWWLDKFTPLFRQLSRYDVIDVDNDQEVHCFPRIFIGATFHRAMGIDPARSPGGVTVADFKRLLRRTFRLERAVASRTGAPRRDKPRLLIISRKSSRRFLNERAMAHAAALARFDVRIAEPDNHTDMPNFARLVNSADVMMGVHGAGLTNMVFLPSRAVLIQVVPFGGLEWLTRVTFKDPAKDMDVNYMEYNVSFDESSLRELYPRDHFYIQHPYDVHKKGWDAIKTVYLDKQNVELNLTKLTNTLERARDFLPEP

SEQ ID NO: 29837 - protein, 311 aa, Oryza sativa
MAIPKVDLRGLEPGTPGWEAARAAVTASMVSHGCVVVAHGALGPELREALFSRAARELFALPAEAKRRNVSTVGPYRGYITNTPGMNWESLHVGAAADAGRVPEFAGLLWPDGNPEFCDTIVSFAKKMTELERAVERMTLEGLGVGEDHIASHLDAHDDAVRLSRYGPPPDAASAMSMGEHRDDTVITIIVQHEVEGLEVQASDGSWHTIPPEPDTVAFMAGELFTVVTNGRVPACVHRVRTPSHRERLVALFTTRCKGGTVVSAMDELVDGDHPLAYRPCNEDEYVQFRHSEEGGRFSEPLKAFCGVDVR

SEQ ID NO: 29838 - protein, 270 aa, Oryza sativa
MAAAADFRRPTPKFVAALSRTSSAFLFFSVVVVGLVSSARWITRFTLQASPPATAAIPAAVAATTRAGVPAAPPHPTYSISCSTPPRPPLNLSGGGGARTPQTSQTLALALSSSSSSCRSSPDPATASASVSASNSSSCPSYFRFIHEDLRPWRDAGGITRAMLARARVTASFRLLVLGGRAFVHRFRPAFQTRDLFTIWGVLQLLRRYPGRVPDLDLMSTAPTGPSSARTSTAGSTLPSCLHCSATAGMTGLWISSSRTGHFGAGQRST

SEQ ID NO: 29839 - protein, 307 aa, Oryza sativa
MASIVTATVAAASAWWATQGLLPLFPPPIAFPFVPAPSAPFSTADVQRAQEKDIDCPMDNAQKELQETRKQDNFEAMKVIVSSETDESGKGEVSLHTELKISPADKADTKPAAGAETSDVFGNKKKQDRSSCGSNTPSSSDIEADNAPENQEKANDKAKQASCSNSSAGDNNHRRFRSSASTSDSWKEVSEEGRLAFDALFSRERLPQSFSPPQVEGSKEISKEEEDEVTTVTVDLNKNAAIIDQELDTADEPRASFPNELSNLKLKSRRTGFKPYKRCSVEAKENRVPASDEVGTKRIRLESEAST

SEQ ID NO: 29840 - protein, 163 aa, Oryza sativa
MGIKDMGRTATVLVRGSNQLVIDEAERSLHDALCVIRCLVNKRFLIAGGGAPEIEMSMQLAAWAKELQGMESYCIKEFAEALEVIPYTLAENAGLNPISIVTELRNRHAKGEKNAGINVRKGQITNILEENVVQPLLVSTSAITLACECVRMILKIDDIVTVR

SEQ ID NO: 29841 - protein, 299 aa, Oryza sativa
MGKIPGSAVAMATPPEPSSWLSLKVFFLRVSRCEVNESMLDSVTVTHAPLTPDTVLEVSGGSVASNGHVSLRLDRAGGVGAAATEGGDSCTFVSTADVRVSGSARFDVQCRGERLVVGILDTRDAGAGGGGWVMKCQVAAQRGSGLVRRGSKEAKPPVVEVYVAGLARGAPVVFTRAMQLRFRRRRHVKAFMEPIPEHGEPAEDSKETLPPKHETEVSEYRCYKPEQDAGDADYDGFYVKPAGEEDDDGDFSWFTAGVRVGVGISVGICLGIGIGAGLLARSYHSTSRSLRSRLISSLF

SEQ ID NO: 29842 - protein, 435 aa, Oryza sativa
MAAAATAAVPLDEAKAKEVLRQVEFYFSDSNLPRDNFLRKTVEESEDGLVSLALICSFSRMKKHLGLDLDVKQETMPEETVLAVAEVLRRSSALRVTEDGKKVGRSIELSKLDEIMEQVDSRTIAASPFPYNVKLEDVQSFFAQYGKVNSVRLPRHIADKRHFCGTALVEFSEEEEANAVLKNTLVFAEADLEIKPKKEFDTEREAKKEAYEKSQPTKNGHDEGYPKGLIVAFKLKIIQIDGGMAENGGDKEGETDDANKSRTGHDEKIPENSDIKEDLSDDVEKSKEAAAQSVKKGESPSENADDPISREDFKEEFGKFGTVRYVDFSIGEDSGYIRFEDSKAAEKARALAAISDEGGLIMKGHLVTLEPVSGQAEKDYWSAIKGGQGKYRDNRSNRGRDWKNNRGGRHFGGKRGRHSDGHERANKARKVDAAA

SEQ ID NO: 29843 - protein, 105 aa, Oryza sativa
MQEEAASSSSSSASPVMDGGKAMAVLLAVAAAVLLLLPLVLPSLLLLLPVVLLLLVVSLAFFPAAGSDGVVAAAAVAGTYQPPPPPPARSSPPPSSSSSSSSRQL

SEQ ID NO: 29844 - protein, 76 aa, Oryza sativa
MPRTSPAGSDGVQCEDKATSSQHVSAAPIASRRRRTRADAPLMVPASSRRQQPLLLLPVAPPCRPMPCGTRYGRGR

SEQ ID NO: 29845 - protein, 336 aa, Oryza sativa
MATKTKIYFVLEHVKGGELFNKVQRGRLKEDAARKYFQQLICAVDFCHSRGVYHRDLKPENLLLDENSNLKVSDFGLSALADCKRQDGLLHTTCGTPAYVAPEVINRRGYDGAKADIWSCGVILFVLLAGYLPFHDKNLMDMYKKIGKAEFKCPSWFNTDVRRLLLRILDPNPSTRISMDKIMENPWFRKGLDAKLLRYNLQPKDAGLLALSTGLDLSGMFEESDKKESKFTSTSTASTIISKIEDIAKGLRLKLTKKDGGLLKMEGSKPGRKGVMGIDAEIFEVTPNFHLVELKKTNGDTLEYRKVLNQEMRPALKDIVWAWQGEQPKQQQQPTC

SEQ ID NO: 29846 - protein, 129 aa, Oryza sativa
MGERVDTLRKPAGSVAALKELCTVEGYNLVFQEQPSRPRGSSGKEAYAQVEIGGQILGKGVGATWEQAKLQAADEALGNLKSMLGIFAHKSSGFQRSSVSNFNRFKPDFQRSLQTIPSGWDSRNNGRVL

SEQ ID NO: 29847 - protein, 244 aa, Oryza sativa
MQERESSGGIKPLRLMERSVFSDRMVFVRAVHEANWMNEMEISIYDSWFDPVVSSLPGLIPDGFIYLRASPDTCHKRMMLRKRAEEGGVTLDYLQGLHEKHESWLLPSKGGGTGVLSVSQLPTHLEGSLLPAIRDRVFYLEGDHMHSSIQKVPALVLDCEPDIDFNKDIEAKRQYAQQVAEFFQFVKKKKEAPSEQTSTDKNRINPQIMLPHKGGLWVPDGRNPFSGSAMNLNFRRAMSSYLST

SEQ ID NO: 29848 - protein, 369 aa, Oryza sativa
MDEQDQMGHMYDGYERKRRRSSERSMERPFHSERRFLQRDRDRVEMDGSDLRHRLRRRRINESSLAISPERNGEQRRRDERYRERAHGHRSHRDHHQSSRGSTLSSRLQGRIKLPGRSPDRVDTRSEKERDRRRLRDRLSPVRRTEFQGTRHREAGQHEEQTQRRSSELALGSRNADGQHLTKDVPDSHNFPHRKNSRDSSKANGSVEPEASLDFEGPKPLSVILQRKREAAWANGTSACSPKQDKSAEVSHRQASLAEAEKEGDNIISSDEYKSGSGDEEFRDEGHIPVEGHGQSSSHGDKLEAEDIIEVDPVENQDADNYDQREGESYYEPIEGQDYKSDDENAYEDDDEEYDDDDDFARKVGVVFS

SEQ ID NO: 29849 - protein, 145 aa, Oryza sativa
MLLTTPFVSSPVRVQGNGGSGASPWAGAATALRIQAAKQLTGRVVTTKADKTVGVEVVRLAPHPKYKRRERIKKKYQAHDPDNQFKVGDVVELRRSRPISKTKHFLAVPLPPRDTRRKSQLLPPLQSQSQSQDQDQPPTPPPSSD

SEQ ID NO: 29850 - protein, 510 aa, Oryza sativa
MASAALPEAVAPKKKGNVRFAFACAILASMTSILLGYDIGVMSGASLYIKKDFNISDGKVEVLMGILNLYSLIGSFAAGRTSDWIGRRYTIVFAAVIFFAGAFLMGFAVNYAMLMFGRFVAGIGVGYALMIAPVYTAEVSPASARGFLTSFPEVFINFGILLGYVSNYAFSRLPLNLGWRIMLGIGAAPSVLLALMGLGMPESPRWLVMKGRLADAKVVLEKTSDTAEEAAERLADIKAAAGIPEELDGDVVTVPKRGSGNEKRVWKELILSPTPAMRRILLSGIGTHFFQQASGIDSVVLYSPRVFKSAGITDDKHLLGTTCAVGVTKTLFILVATFFLDRVGRRPLLLSSTGGMILSLIGLGAGLTVVGQHPDAKIPWAIGLSIASTLAYVAFFSIGLGPITWVYSSGIFPLQVRALGCSLGVAANRVTSGVISMTFLSLSKAITIGGSFFLYSGIAALAWVFFYTYLPETRGRTLEEMSKLFGDTAAASESDEPAKEKKKVEMAATN

SEQ ID NO: 29851 - protein, 28 aa, Oryza sativa
MNLHTAILNNGKKSKNLFHNVCVCRIKV

SEQ ID NO: 29852 - protein, 168 aa, Oryza sativa
MAATAAASVAAISPLPGASLPRPVSARVPLLPRASPPTWRLSVGSARARSTRCLAAAGGGGLAPEMRATLDKVVGSHKVVLFMKGTKDFPQCGFSHTVVQILRSLDVPFETLDVLANEALRQGLKEYSSWPTFPQLYIDGEFFGGCDITVDAYKSGELQETLEKAMLS

SEQ ID NO: 29853 - protein, 17 aa, Oryza sativa
MCTLLNSKTCELVMYCM

SEQ ID NO: 29854 - protein, 142 aa, Oryza sativa
MSGMPSDEATGQVRLEGDVSDKKEEKTQEQSEASGMPSPQEEEAAIKKKYGGILPKRTPHITKDHDRAYFDSADWALGKQGGSHKPKGPLEALRPKLQPTQQHARARRTPYASADNDECMNLPPEDLIQNGDPIEDKNKEEQ

SEQ ID NO: 29855 - protein, 312 aa, Oryza sativa
MAAAGKEPSRVLVIGGTGYIGRYIVAASAREDHLTSVLVRDPAPADPAKAADLQGFRDSGATLVKGDLYGHQSLVAAIKSADVVISAVGYAQLADQTRIISAIKEAGNVKRFFPSEYGNDVDHVHAVEPVKSVYATKARIRRVIEAEGIPYTYVSSNFFAGRFLPSLAQAWIKGLPTDKVIILGDGNVKGVFATEEDVGTYTIKAVDDPRTLNKILYLRPSSNILSHNELVSLWEKKVGKTFDRVYIPEDEVLKKIQESPAPLNVVLSINHSVWVKGDHTNFEIEPSFGVEATELYPDVKYTTVDEYLNRFL

SEQ ID NO: 29856 - protein, 474 aa, Oryza sativa
MDAGETSTSDSLVLATGAAQGPKRKPPPKRFVHTPIPPSILSDPTLAAAATGLLPAAYNFELPKTAHRIRSSGARRTALQLPEGLLLFSLPLSHLLAPFLEPDPSNDVLILADPTYGACCLADRPAKALAADVLVHYGHSCLVPVTSSLLPVLYVFVEIRVDAQRLADAVRAAFPDPADAPRLAIAGTVQFISAVHAAREILSHDGYQGIVVPQAKPLSAGEVLGCTAPALKRSEGVGAVVFVADGRFHLEAFMIANPGVKAYRFDPFLGVLVLEEYDHVGMKQARKEAVLAARKAKSWGVILGTLGRQGSVKVLDRVVEHLEEKGLEHTVVLMSELSPARMELFGDSVDAWVQIACPRLSIDWGEGFKKPMLTTFEFDVALGYVPGWWEKGSRECGSGDATGCCSGSGTSTDCGCSNGGCADKDFGGEYPMDYYSQDGGDWNSCYMKKKPSTGERKLRVRIGSKVQVEDKQQS

SEQ ID NO: 29857 - protein, 161 aa, Oryza sativa
MVLKTELCRFSGQKIYPGKGIRFIRADSQVFLFANSKCKRYFHNRLKPAKLTWTAMYRKQHKKDIHAEAVKKRRRTTKKPYSRSIVGASLEVIQKKRAEKPEVRDAAREAALREIKERIKKTKDEKKAKKAEVTKSQKSQSKGAAPRGSKGPKIGGGGGKR

SEQ ID NO: 29858 - protein, 49 aa, Oryza sativa
MMIIIRISSLMTTMMTGTKRRKHMKTTMIRATVYKSCPISSFVSVHFSL

SEQ ID NO: 29859 - protein, 182 aa, Oryza sativa
MARYLANKCSIASRIDCYSESATAVFGQKLREQVEERLDFYDKGVAPRKNLDVMKAAIDSMVNDATNDVDDGEKVDASAKKSKKKKSKAEADGEAMDLDKPSNVADEAEPGTEKKKKKKKHKLEEEPQEQEKSVAHANGDAEENGTPKKKKKKNREVSEDAEPKTATEGKKKKKKSKTEDSD

SEQ ID NO: 29860 - protein, 88 aa, Oryza sativa
MVLAASNEDHTKVELVEPPESAAVGERVTFAGYSGEPEASLNAKSKTWEKLSADLHSNGELVACYKDVPFTTSAGVCKVKSIASGEIR

SEQ ID NO: 29861 - protein, 92 aa, Oryza sativa
MGGALATLTTTVTTEGLVDIDGARWTATSGSGTTSSIHRATSISAPSHLVALPRLAPPAREGTVARGSAASRPRERRRRMNPAASVLGSALA

SEQ ID NO: 29862 - protein, 141 aa, Oryza sativa
MGRVRTKTVKKTSRQVIEKYYSRMTLDFHTNKKVFEEVSILPSKRLRNKVAGFTTHLMRRIQRGPVRGISLKLQEEERERRMDFVPEKSALEVEEIRVDKETMEMLAALGMADLPGVERQQEVSAPTYSRPPYGGPRRDRV

SEQ ID NO: 29863 - protein, 408 aa, Oryza sativa
MASSAMELSLLNPAAMRGLSAAKPRVVSSRRIVRFRVASSAAAPPAAKPGTPKKRGKTEIQETLLTPRFYTTDFDEMERLFNAEINKQLNQEEFDALLQEFKTDYNQTHFVRNPEFKAAADKMEGPLRQIFVEFLERSCTAEFSGFLLYKELGRRLKKTNPVVAEIFSLMSRDEARHAGFLNKGLSDFNLALDLGFLTKARKYTFFKPKFIFYATYLSEKIGYWRYITIFRHLKANPEYQVYPIFKYFENWCQDENRHGDFFSALLKAQPQFLNDWKAKLWSRFFCLSVYVTMYLNDCQRTTFYEGIGLDTKEFDMHVIIETNRTTARIFPAVLDVENPEFKRKLDRMVEINKKIIAIGESDDIPLVKNLKRIPHVAALVSEIIAAYLMPPIESGSVDFAEFEPQLVY

SEQ ID NO: 29864 - protein, 88 aa, Oryza sativa
MNITDEWSTEEKQWETCRSRTKTCADKYAEESAKLACKAYEGVEQESTLEDDYFFAALPVVQKRIAQGGVRLAAILNRIFSGNKVQSS

SEQ ID NO: 29865 - protein, 202 aa, Oryza sativa
MTAAETQEELLRKHLEEQKIEGDEPILEDDDDDEDDDDDEDDKDDDVEGAGGDASGRSKQSRSEKKSRKAMQKLGMKTITGVSRVTIKKSKNILFVISKPDVFKSPNSDTYVIFGEAKIEDLSSQLQTQAAEQFKAPDLSNVISKAEPSAAAQDDEEVDESGVEPKDIELVMTQATVSRSRAVKALKAANGDIVTAIMELTS

SEQ ID NO: 29866 - protein, 101 aa, Oryza sativa
MTFGLVYTVYATAVDPKKGSLGTIAPIAIGFIVGANILVGGAFDGASMNPAVSFGPALVSWSWESQWVYWVGPLIGGGLAGVIYEVLFISHTHEQLPTTDY

SEQ ID NO: 29867 - protein, 205 aa, Oryza sativa
MIICIVCYNVADKLPVVIYYKNIKKRAQKAEEDGGMSGSAWRSTLWSIVGRVKWHGIGIALIYAITLSIFPGYITEDVHSEALKDWYPIMLITAYNVFDLVGKSLPAFYFLENANIAVAGSFARLLFYPLFYGCLHGPSFFRTEIPVTILTCLLGFTNGYLTCILMTLAPKAVPIQHSETAGIVIVLFLVAGLVVGSFVAWFWVI

SEQ ID NO: 29868 - protein, 39 aa, Oryza sativa
MNLVLDDAEEINVKKDTRKSLGRILLKGDNITLMMNTGK

SEQ ID NO: 29869 - protein, 153 aa, Oryza sativa
MSSPPPNPSQLTIFYGGSVCVYDSVPPEKAQAIMLIAAAAAAAASATKSNAAIAVKPPVMPAANATQAAVSPVLTRSLSLQSTSVATGQPQVAADPSSICKLQADLPIARRHSLQRFLEKRRDRLVSKAPYPTKSSEGMEASGMEVTAEGKAQ

SEQ ID NO: 29870 - protein, 81 aa, Oryza sativa
MEHEKLEKLAHKGPNPGEQASTAGAAANAVKTGSGSTESRSAGVSTDKNRNYAVLAGTVAALSGLGWYLLSKPKKSEDIVD

SEQ ID NO: 29871 - protein, 57 aa, Oryza sativa
MEGDDKSAVVGGAYWGLTASCRPSDRSQPKPLCTLALLPHWAVILLHAFRARGKCFL

SEQ ID NO: 29872 - protein, 414 aa, Oryza sativa
MAKVKTAFVGNLPANVTEEYLRKLFEHCGEVVRVAVSRKGQYPVGFVHFASRTELDNAIKEMDGETVRGPDRGATFRIQVSVARPVVENDKKRIREEVKTRRSNVSTDKPDHSYGRRGHDSYDRQAKAPRLYNEVSDTDPYEAAVVSLPSAVKELLLRILRLRIGTRYDIDIHCIRSLNELPEKAAVAVLNQFLISGADKHNKGDYFASLIAKYQAETFSSALRLQGSTYLPRNPGIQNKRFPHQDYEYTASGSSRYSSLGDYPSSSYVDDPASSQSRNRRYDEYRPDLVRYPDSRSRQEEIVRIERYPEPRFAHEPRQDTGRHLDLGYVQERNSNIERSAQVAFSSREGGYLSASRYNTNIVPEFSSRSSAEYSTARQQVRFDPFTGEPYKFDPYTGEPIRPESNPRRSGSLY

SEQ ID NO: 29873 - protein, 379 aa, Oryza sativa
MSCLSWEPPDMWSKVHGTGTSPEMKNVKAIDCLSCCEVEICTQDFFNGYYEGRMYQNLWPEMLKLKDWPTSNHFEELLPSHGVKYMNSLPFQPYTNLKSGLLNVSTLLPDDILKLDMGPKSYIAYGYAQELGRGDSVTKLHCDLSDAVNVLMHTAEVDPSEEQIDAIKSLKRRHTAQNEKECSGNADGNYTSPKICGDANELSCPINSETNKGGALWDIFRREDVPKLKLYLDKHSKEFRHIYCSAVQKVCNPVHDETFYLTEEHKRKLKEEHGIEPWTFVQKLGEAVFIPAGCPHQVRNLKSCTKIALDFVSPENVKECLSLTEDFRRLPKNHRAKEDKLELGVVQNGPKPTYPRETILNSQWDILLFAYHPNSYDKV

SEQ ID NO: 29874 - protein, 150 aa, Oryza sativa
MAAFNKLGSFLRHSGLTSSASAGSSPAMFNAARLMSTKLFVGGLSWNTNDDSLKEAFTSFGDVTEARVINDRESGRSRGFGFVSFANGDDAKSAMDAMDGKELEGRSIRVNFANERPPGNRGGGGYGGGGGGYGNQGGYGDGNRGYGGQY

SEQ ID NO: 29875 - protein, 282 aa, Oryza sativa
MAARALGPPPLHALAATRQAPRCPPAAAAPPTHGYRRGAAVLSGRRGRHTLSSIQLMHAVRGGNLQVEPNMLHSPKPLMSTKRGCVASPTIANVDDCTEGEGALGYTMTQICDKFIEFFMYKKPQTKDWRKVLVFREEWERYRPYFYKHCQARIDMENDSSMKQKLVVLARKVKKIDNEIEKHMELFTQLRENPTDINAIVARRRKDFTGGFFQHLNFLVNAYNGLDERDAIARLGAKCLSAIHAYDCTLEQLDLDSAQSKFDDILNSSSLDDACDKIKRRS

SEQ ID NO: 29876 - protein, 288 aa, Oryza sativa
MFEGMERAGYGVGVGGAGAVGAGVVLSRDPKPRLRWTPDLHERFVEAVTKLGGPDKATPKSVLRLMGMKGLTLYHLKSHLQKYRLGKQNKKDTGLEASRGAFAAHGISFASAAPPTIPSAENNNAGETPLADALRYQIEVQRKLHEQLEVQKKLQMRIEAQGKYLQTILEKAQNNLSYDATGTANLEATRTQLTDFNLALSGFMNNVSQVCEQNNGELAKAISEDNLRTTNLGFQLYHGIQDSDDVKCSQDEGLLLLDLNIKGGGYDHLSSNAMRGGESGLKISQHRR

SEQ ID NO: 29877 - protein, 356 aa, Oryza sativa
MPSTTTAPETDPSKTVVEEVTGWLRLYSDGTVERLTPPDAEPFTVIVPPYTEPRNGVTVHDVTTARGVDVRLYLPAEPPAAAPRPRRRRPLLLHLHGGGFCLSRPSWALYHNFYAPLAAKLDVAGIVSVFLPLAPEYRLPAAIDAGHAALLWLRDVACGDEGNLDPAVERLRDEADFSRVFLIGDSSGGNLVHLVAAHAAAKDDGAGADLHAVRLAGGVLLNPGFAREEKSRSELENPPSLFLTEDMVDKLLALGVPLGMNKDSPYTSPSLVAEAVARLHMPPMLLVVAEKDLLHDPQVEYGEAMARVGKTVETVVSRGAVAHVFYLNFFAVESDPLTAERTRELIDTIKTFIDRY

SEQ ID NO: 29878 - protein, 52 aa, Oryza sativa
MPAHIKSSMFGCALTIPITDGRLNMGTWQGIWLCEHRDYATPRQIVITLNGI

SEQ ID NO: 29879 - protein, 80 aa, Oryza sativa
MSCCGGNCGCGSSCQCGNGCGGCKYSEVEPTTTTTFLADATNKGSGAASGGSEMGAENGSCGCNTCKCGTSCGCSCCNCN

SEQ ID NO: 29880 - protein, 60 aa, Oryza sativa
MGGYTYLCSMLCRRRYNHQISCMLLLRHHPPKISYQPYYPSPVPCYRKTMDLLLAIPGST

SEQ ID NO: 29881 - protein, 639 aa, Oryza sativa
MVLMWNRVFLGSCLFALFIDPFFYYLPLVHVLDESTNRSCIAKDRRLSITITVLRTFADLFYMLNIMVKFHTAYVDPKSRVLGKGELVLDLKKIQRRYLRTDFFIDLLATIPLPQVTVWIIMPSIKNSDYNIRNTTFALVIMIQYIFRMYLIVPLSNQIIKAAGVVAKSAWLGAAYNLLYYMLASHITGAIYYLLSIERQITCWNQQCLNESCSFNFISCDNTGSSSYLTWGKNTSIFDNCDPNRNSSANPPPFNYGMFSTALSKGAVSAPFLEKYFFCLWWGLLQLSSSGNPLQTSAYIAENTFAIAIGALSLVLFAQLIGNMQTYLQSISKRLEEWRLRQRDMEEWMRHHQLPDELQDRVRRFVQVKWLATRGVEEESILQALPADIRRDVQRHLCLDLVRRVPFFSEMDYQLLDAICERLVSFLCPERTYISREGDPVNEMLFVIRGKLESSTTNGGRSNFFNSIILRPGDFAGEELLTWALLPKTNVHFPLSTRTVQSLTEVEAFALRAEDLKFVANQFRRLHSKKLQHTFRFYSHHWRTWAACFIQAAWRQHQRRKLAESLSRWESYSWWPEEHPPADKPKQEGTSSSTKTIAESAIAQMHKFASASRRFRADDTAIRRLQKPDEPDFSADHFD

SEQ ID NO: 29882 - protein, 182 aa, Oryza sativa
MLRGFSGKYIYNGEQYDATAAPQGADYHKCRDDVVKALNLDAPCETNNCSFNGVWNGGGGAGQDELYVATSFYYMASDIGLIDSEAPSAKSTPAAYKVAAEKVCSLSVEEAKAAYPRACDHAYLCMDLVYQYTLLVDGFGLEATKEMTLVEKVKHGEYYIEAAWPLGTAIEAVSPKKKHQET

SEQ ID NO: 29883 - protein, 382 aa, Oryza sativa
MLMVSGFEKYYQIARCFRDEDLRADRQPEFTQLDMEIAFTSMEDMLKLNEELMRHIFQEVGDIKLPNPFPRLTYTEAMNRYGTDRPDLRFDWQLKDVSDAFLGSSFKIFADTLENGGVIKALCVPGGAKEFSNTDLKKGTVYTEASKAGAKGLPFLKVMDNGELEGIGPLVASLKPEKKEQLLKHLDAKSGDLILFALGEQSAANRILGRLRLFIAHKLEVIDTSAHSILWVTDFPMFEWNSDEQRYEALHHPFTAPNPEDMNDLPSARALAYDMIYNGVEIGGGSLRIYKSDVQQRIFEIIGISPEQAEEKFGYLLECFDMGAPPHGGIAYGLDRLVMLLAGENSIRDVIAFPKTTTAQCSLTKAPSPVDPQQLKDLGFRT

SEQ ID NO: 29884 - protein, 254 aa, Oryza sativa
MDARVVSLEAELKAAVAKRGELEADAVAKKGEFDMVKGKNDRLRSEVATAVKKHRASEAEVERLCAELGVLTKEKEAAAKAFDAEKAGIMREFGELKQKVEEIQASKGAAEEAGREKDAQAVKLRNELKELHVSMSQLQASCDELDTKRSLLNDEKNSVQEALDAEKAEACKLKSKIEAIENCNVEKDGEIGKLKVALMEKRAKIDVLIKDIEQLNLEVAEAHRKRKGGIWAWLYAATTTMVAAISFIYATKSR

SEQ ID NO: 29885 - protein, 430 aa, Oryza sativa
MSWRWALARRVAALGATSGGGDGATAQAQRLFSSAAALLGRHPPPPSPPHYQIRSKVVGCRGATFVSSRWLHDAQYQVRQDGLSRSEEQQDPFELVADELSLLANRLRSMVAAEVPKLASAAEYFFKVGAEGKRFRPTVLLLMASALKFPLSDSTEVGVLTILANKLRTRQQNIAEITEMIHVASLLHDDVLDDADTRRGVSSLNCIMGNKLSVLAGDFLLSRACVALAALGNTEVVSLMATAVEHLVTGETMQISTSREQRRSMDYYLQKTYYKTASLISNSCKAVAILAGHTADVSMLAYEYGRNLGLAFQLIDDVLDFTGTSASLGKGSLTDIRHGIITAPMLYAMEEFPQLHEVVDRGFDNPANVELALDYLQKSRGIEKTKELAREHANRAIKAIEALPDSDDEDVLTSRRALIDITERVITRTK

SEQ ID NO: 29886 - protein, 322 aa, Oryza sativa
MTKWQIFLQMEQSFQVHRSYGSMLEGEADELKRVFLEGNPYFLGLTMIVSLFHSLFDFLAFKNDIQFWNKNKSMEGLSAKSVVLNFVCQLIIFLYLLDNETSWMILGSSGIGVCIEFWKIGKAMHVEIDRSGKIPMLRFRDRESYAQNKTKEYDAIAMRYLTYVLLFLVFCFSIYSLKYEKHKSWYSWILSSLTSCVYMFGFIMMCPQLFINYKLKSVAHMPWRQMTYKFLNTIIDDLFAFVIKMPMLHRLSVFRDDVIFLIYLYQRWVYPVDKKRVNEYGFGGEDEPQAPQTLEGSDLAAASQQAGAEAEAETSTEDKKTK

SEQ ID NO: 29887 - protein, 275 aa, Oryza sativa
MAHSHSAASLHAARLLPQQRTPTAPRTLLPAGGGLLLRRPHPPLHQQRRSRSSSRPDLRCRRRLLTARGDYDFYENYADEEGDEEEESEVIGGSFDAAVALFNGGEFHACHDVVEELWYTAEEPTRTLLHAILQCAVAFHHLFNQNHRGAMMELGEGLCKLRKLRLDDDTTSPFSRFQEEVAAALNFIYRTQKELAACTDDLCLTMDGSATSYQLLGNFAAGQKLYRLETTTSADGDGVPTIIFSASSRLVRVKLPTLSATEHHLAALQCTSEYI

SEQ ID NO: 29888 - protein, 16 aa, Oryza sativa
MAEQTKKIVLFDKVMN

SEQ ID NO: 29889 - protein, 310 aa, Oryza sativa
MDVVKAAQLSGRTLEKVVVHPLVLLSIVDHYNRVARDTRKRVVGVLLGTSSRGSVDVTNSYAVPFEEDDKDPRIWFLDHNYHESMFSMFKRINAKEHVVGWYSTGPKLRENDLDIHALFNNYVPNPVLVIIDVQPKELGIPTKAYYAVEEVKENATQKSQKVFVHVPSEIAAHEVEEIGVEHLLRDVKDTTISTLATEVTSKLAALKGLDARLREIRGYLDLVIEGKLPLNHEILYHLQDVFNLLPNLNVNELIKAFAVKTNDMMLVIYLSSLIRSVIALHNLINNKMLNKEHEKAEDSKPTAIPSAAGS

SEQ ID NO: 29890 - protein, 40 aa, Oryza sativa
MHFVFSVSFFLFQCAGPLLCGSKACYDLVFPFFHFFSVYY

SEQ ID NO: 29891 - protein, 355 aa, Oryza sativa
MRGKKPHKELKLSVPAQETPVDKFLTASGTFKDGELRLNQRGLQLISEETADEPQSTNLKVEDVQLSMDDLEMIQVIGKGSGGIVQLVRHKWVGTLYALKGIQMNIQEAVRKQIVQELKINQATQNAHIVLCHQSFYHNGVIYLVLEYMDRGSLADIIKQVKTILEPYLAVLCKQVLEGLLYLHHERHVIHRDIKPSNLLVNRKGEVKITDFGVSAVLASSMGQRDTFVGTYNYVAPERISGSSYDYKSDIWSLGLVILECAIGRFPYIPSEGEGWLSFYELLEAIVDQPPPSAPADQFSPEFCAFISSCIQKDPAERMSASELLNHPFIKKFEDKDLDLRILVESLEPPMNISE

SEQ ID NO: 29892 - protein, 201 aa, Oryza sativa
MSSAAVNGLAGAGGGIIAQIITYPLQTVNTRQQTERSAKKKKANGAAIANTSTLFQMLQLFQTEGWGGLYSGLKPSLIGTAASQGIYYYFYQILKNKVEDLAVARGKKGLGDGTVGMFSWLGIAAVAGSINVLLTNPIWVLVTRMQTHTQAEKKIMESSHAPPPPPPPLSSVERRRRPTHSVRRPHRPQVRLRLEVGVALR

SEQ ID NO: 29893 - protein, 212 aa, Oryza sativa
MGTEIATVEVEGIPFPQEITVSKPLSLLANGITDIEIHFLQIKYNAIGVYLEKDNVLAHLESWKGKKAEELVQDDGFFQALVSAPVEKLLRIVVIKEIKGSQYGVQLESSVRDRLVSVDKYEEDEEEALEKVTEFFQSKYFKPNSVITFHFPTTPGIAEISFVTEGKGEAKLTVENKNVAEMIQKWYLGGESAVSPTTVKSLADQFAALLSA

SEQ ID NO: 29894 - protein, 168 aa, Oryza sativa
MYMTAGWAQFIEATGLQVQEPAVFRVLSTSKMHFIIFAKDGYLRCPVPDKPRDSEPTRQSFRTSSPQGKATTITSPIQCCIKGKLKHDGTSTSASTHGNNRRTISEMCFCTKDIRLSAEVKNYIKDIAPFLQPSDKFYVTAINATFMKEGRVYLVKEFSKKYIAPLAR

SEQ ID NO: 29895 - protein, 95 aa, Oryza sativa
MPRIPLIKFPKRNLKIPSPPPPAAQPADQHASLLSRLGVKSEAPSSSGEIKNYRFRSDVPSPPSYTAVGGPASLLPKRKPLSEEEIEAIMQGGIY

SEQ ID NO: 29896 - protein, 68 aa, Oryza sativa
MLAKQSRSGTGELLMRAFDAGIILVTWLIWKQRNARVFEGHAVLSVNLCAAIEDEWKSWQEAGLTSSL

SEQ ID NO: 29897 - protein, 267 aa, Oryza sativa
MWSIGVIVYILLCGSRPFWARTESGIFRAVLKADPSFEEAPWPTLSAEAKDFVRRLLNKDYRKRMTAAQALCHPWIRGTEEVKLPLDMIIYRLMRAYISSSSLRRAALRALAKTLTTDQIYYLREQFELIGPNKSDLITLQNLKTALMKNSTNAMKDSRVVDFVNTISNIQYRKLDFEEFSAAAISVYQMEGLETWEQHARQAYEFFDKEGNRPIVIDELASELGLGPSVPLHVVLQDWIRHPDGKLSFLGFMKLLHGVSSRTIPKT

SEQ ID NO: 29898 - protein, 39 aa, Oryza sativa
MFIMKAHSLKMVKFSTPLMKTTLFSHLKLGKELSLKHGI

SEQ ID NO: 29899 - protein, 239 aa, Oryza sativa
MGIDPVTHKAINGTLNNTAGDKSAKVTASLSHMAQWESARLEAEARLARESKMRIAASTPSKLHAQSTNPPASTPSPCFDVLNAWQSAKIDLESPTSTLTFAGSNASMLPFSTTTALELSESNSNVWQQRSDELEGEESEWKFVSKQQLQGMHGKETEEHFIGCEESWFPGTANIGAGFTGMLLDGSNMHDTSECWDESSNGQDEQRSQVSEDAENKNYWNGIFSMVNSEQPPLQPPLL

SEQ ID NO: 29900 - protein, 258 aa, Oryza sativa
MEKLSHIYEAKMDGNHTLHIIPDSRQVNADELQPGVCYLQITAVDPVMEDEDLGSRRERIFSLSTGTVRARVFDRFLFDTPFTKNGKTQGGLEDQWKRRTVLQTEGSFPALVNRLLVIKSESLEFSPVENAIGMIETRTAALRNELEEPRSSEGDQLPRLQSLQRILQGSVAVQVNSGVLSVCTAFLSGEPATRLRSQELQQLIAALLEFMAVCKRAIRVHFRLIGEEDQEFHTQLVNGFQSLTAELSHYIPAILSEL

SEQ ID NO: 29901 - protein, 34 aa, Oryza sativa
MVQRLTYRKRHSYATKSNQTRVVKTPGCLGTAEL

SEQ ID NO: 29902 - protein, 258 aa, Oryza sativa
MGNLSFNLNQDQVKEFFQEVGEVISVRLATHEDGSSRGFGHVQFASSEEAKKALELHGCDLDGRPVRLDLAHERGAYTPHSRNDTGSFQKQNRGSSQSIFVKGFDSSLEESKIRESLEGHFADCGEITRVSVPMDRETGASKGIAYIDFKDQASFSKALELSGSDLGGYNLYVDEAKPKGDSRDGGGRRGGRSGDRFGGRSGDRFGGRSGGRFGGRDGGRRGGRGGRDGGRRGGRGGFQSRQSAGTASTGKKTTFGDE

SEQ ID NO: 29903 - protein, 315 aa, Oryza sativa
MSSKKIELDHKDMVHDSAIDYYGKRLATASSDSTVKISSIGGKSAPSQLLATLSGHYGPVWRVAWAHPKYGTILASCSYDGRVIIWKEGAGGHWSQAHVFTDHKSSVNSIAWAPYEVGLCLACGSSDGTISVMTMRADGGWDTARIERAHPVGVTAISWAPATALGSLAGSGELVYKLVSGGFDSVVKVWGFVNGGWKLESALPSDVHTDCVRDVAWAPVLGLAKATIACASQDGKVVIWSRGKVGDKWEGKVMHDFGSPVWRVSWSLTGNILSVAAGENNITLWKQASDGQWEEVMKVEPTKPESSEEVKKAEQ

SEQ ID NO: 29904 - protein, 296 aa, Oryza sativa
MFDEWCRVLQASFWYGLIVHFRIYPIIYAIPFVIVLGKNYAGPAGRPILTQWTSKQHLQSDKSSPSVERATSLLTNLWNFLTSLITRNTILFGLLSGSMFFLWTGVFFYLYGWEFLNEALLYHLSRTDPRHNFSIYFYHIYLHHQQGFSSIQKLASFLPQLIVQLALILRFSRDLPFCLFLQTVAFVAFNKVMTAQYFVWFFCLLPLILPWTTMKLKWKGLACILVWMGSQLHWLMWAYMLEFKGQNVFIPLWAAGLMFLAANIFVMLMVINHHKFTPLFSSSTVKSASKIAAKKE

SEQ ID NO: 29905 - protein, 329 aa, Oryza sativa
MQEPKHTDPAAMRGAHHRRARSEVAFRLPDDLDLGGGGAGAFDEIGSEDDLFSTFMDIEKISSGPAAAGGSDRDRAAETSSPPRPKHRHSSSVDGSGFFAAARKDAAASLAEVMEAKKAMTPEQLSELAAIDPKRAKRILANRQSAARSKERKARYITELERKVQTLQTEATTLSAQLTLFQRDTTGLSAENAELKIRLQAMEQQAQLRDALNDALKQELERLKLATGEMTNSNETYSMGLQHVPYNTPFFPLAQHNAARQNGGTQLPPQFQPPRPNVPNHMLSHPNGLQDIMQQDPLGRLQGLDISKGPLVVKSESSSISASESSSTF

SEQ ID NO: 29906 - protein, 55 aa, Oryza sativa
MPQTQPPPPAPTMLQQQMPMNVGPPMQFALQQSGAPSFRPLQPPPGMQFFHPQSQ

SEQ ID NO: 29907 - protein, 346 aa, Oryza sativa
MGKGGELWDDSALVDAFDHAVATFKAMHSKNTQATTSENEEPGDPAVAAPAGEENISAEVADELIEKDGSQTEPCEASETPYQTHEERKSTEQAPLQEKDLDKEAHFSEPKIHASDVADAEQKDTSNQQTWDYNELVKKYYELEEQSRKVLEQLHQTNYWNYQVPGQSSVYQQPQVPAYSATAPDPHSSTIQSPCCCANVPLVSVSCCSTGQTSGVSSCMQPSGGCSISLTCDQCPGTSATDSTGATCVQQAEKVSTDSDQVAKAAMMTAEGAMNFMRSTISGDLGSFPRTDAASGKESMPMGMNPNFDTMGADSDLAVVLNAWYAAGFYTGRYLMQQSMKNTRQG

SEQ ID NO: 29908 - protein, 33 aa, Oryza sativa
MDEDDPKALLPPQVQTNTKMNSRRYRSSRTDDE

SEQ ID NO: 29909 - protein, 150 aa, Oryza sativa
MGNALPLTDMPLGTAIHNIEITRGRGGQLARAAGAVAKLIAKEGKSATLRLPSGEVRLVSQNCLATVGQVGNVGVNQKSLGRAGSKCWLGKRPVVRGVVMNPVDHPHGGGEGKAPIGRKKPTTPWGYPALGRRTRKRKKYSDSFILRRRK

SEQ ID NO: 29910 - protein, 143 aa, Oryza sativa
MKKGFLALSLFLLLTLASQATWCDAERGHAINGARLRPHLQFEELHVTDGKKLGQAADTDTDTDTESHKHHDEVKVPMRMAIAHKGGGDAGSGEGDGVRPGTGLRMCHCSLGFQLLIEAVCVWWYSCKKGRSIILVYVCLVVW

SEQ ID NO: 29911 - protein, 401 aa, Oryza sativa
MPPPLLLLLLLAAAAAAVAPARSKSTLESCSSSTACPALLSYTLYADLKLAELAALFSADPLAILAANSIDFAVPDPADRILPAGLPLRVPVPCACSDGIRRVTTVRYVARPGDTLASVASSVYGGLTTPDWISDSNGILGAKPDAAVDAGTTLFVPLHCACFGGVDNGLPAVYLTYVAGKGDTVAAVAQRYRTTATDLMSVNDMATPELAAGDIIVVPLPACTSSFPAFTADYGLAVANGTYAVTANRCVQCSCGPGNLDLFCVPAPLADSTCSSMQCANSSMMLGNFTLLMTSSGCSVTSCSYGGFVNGTILTTLTTALKPQCPGPHQYPPLIPPPTSSFFETYLGPSPTPMASEGGVMAGMAPTSTPAASSGPPPAGRHVVGDVLGAFALCLVGNLLW

SEQ ID NO: 29912 - protein, 42 aa, Oryza sativa
MLSAPWGASEGCNFSFHSSVVEAGFSMIIQSPSYLVFFFPHF

SEQ ID NO: 29913 - protein, 114 aa, Oryza sativa
MKDPLQNQQIQNFGDPFYLAIREGETLAEVKERIQKKLQVPDEEFCKWKFAFISMNRPDYLQDSDVVSARFQRRDVYGAWEQYLGLEHADTAPKRAYTANQNRHTYEKPVRIYN

SEQ ID NO: 29914 - protein, 74 aa, Oryza sativa
MRRRQSSIWLLPAILQPLFIYFRFILLRFLVSLLFNSFDSIEVSIGSASISCFFASFDLLWDDFFASVHRIRIS

SEQ ID NO: 29915 - protein, 43 aa, Oryza sativa
MLHTFLLGTMAGCCSASTLPGSAGDPSLQFYPFSCPGIRSVLH

SEQ ID NO: 29916 - protein, 344 aa, Oryza sativa
MSPVGWLVLLLPALLRRGSSGVAAAGKVPAVIVFGDSSVDTGNNNFIPTIARSNFWPYGRDYADGLPTGRFSNGRLATDFISEAFGLPPCIPAYLDTNLTIDQLASGVSFASAATGLDNATAGVLLQYFREYKERLRIAKGEAEAGEIIGEALYIWSIGTNDFIENYYNLPERRMQYTVAEYEAYLLGLAESAIRDVHSLGGRKMDFTGLTPMGCLPAERIGNRDNPGECNEDYNAVARSFNGKLQGLAARLNKDLPGLQLVYADTYKILASVVDKPADYGFENAVQGCCGTGLFEAGYFCSLSTSLLCQNANKYVFFDAIHPTEKMYKIIADTVMNTTLNVFL

SEQ ID NO: 29917 - protein, 192 aa, Oryza sativa
MNNMGFITHSHKISDLAASVEDNGGCVFVTAFSGLFAPYWIDDAKGTIFGITQFTERGHIARATLEATCFQTRAILDAMELDSGHKLNMLAVDGGMSNSNLCMQTQANIIGIPVDRPAMRETTALGAAIAAGFAVGVWKEFEELKEINQKDRMIFKPNVDKEVGEKMFKKWGRAVEMCRGWLDAGEANGEFS

SEQ ID NO: 29918 - protein, 308 aa, Oryza sativa
MSAVGRLGNEPSASAPSYIPRSYRNAMMERSSVGASSFTHQTSSEQRVAQSQSMFSLSPSILSPEHLIGNDRSSLRQGLTFGTVKPETLNQWREESSQQASSSSSSSSNDHGAVSSSNGGEFEKFYLFGKPRSKQLSEISARSTPFQPQGLVSDEFPHLDIINDLLNDEQCERRTLKVLQRSQQAFARQYSMPNNSSTPDYGMFAQSDPYLFDQPEQYYDEEIPRFYNSLNGTSRGLRERSYSHFDLPSYSNGQFDDMMMNQWPYGQTDLSLPNFGADMNGYPYQSSDYPNSANGLSRYPPYRPANGH

SEQ ID NO: 29919 - protein, 353 aa, Oryza sativa
MLQVLEGVAACHSAGVVHRDLKPANLLISEDGVLKVADLGQARILQETGTYQGMHPYEQSSGVEPWVSQQRAVLHGVKENHPSHDSETQTGQEPERLTAADYLHEMDQLRAKSTHGDVDKMSLQDGNASCLATCSTADIDDDPFRASYSYDAEEGMLEEESGAFTSCVGTRWFRAPELLYGSTNYGQEVDLWSLGCILAELFNLEPIFPGTSDIDQIGRIISVLGNITEETFPGCSNLPDYNKIFFNKVEKPIGLEACLPDRSASEVSIIKRLLCYDPTKRASAADLLNDPYFAEEPLPVPIEGLQVPESKDEDDDSTEEWANFRGGDSDSDFDEFGSMDVTKTDKGFSIRFS

SEQ ID NO: 29920 - protein, 36 aa, Oryza sativa
MVPMDQPKVALEMLMRWTSGNLSNASSSFQRLDFTM

SEQ ID NO: 29921 - protein, 120 aa, Oryza sativa
MAPRCATLAVVVVLVAAVVAPPTAVRAAISCSAVYNTLMPCLPYVQAGGTVPRACCGGIQSLLAAANNTPDRRTICGCLKNVANGASGGPYITRAAALPSKCNVSLPYKISTSVNCNAIN

SEQ ID NO: 29922 - protein, 349 aa, Oryza sativa
MSRELELLLFLLALRASGEVVAGSAEAAAAAAAWPALQVGFYHAKCPVAEDVVLGEMRMILEEDPTLAPSLLRMHYHDCFVQGCDGSIMLRSRSGKGERDATPNRSMRGYDAINRIKARLETVCPLTVSCADIIAMAARDAVYLSKGPWYDVETGRRDGDVSVAEYAENDLAPPDSNIVDVKTFFSVKSLNAKDIAVLFGCHSIGTSHCGAFQKRLYNFTGRMDQDPSLDAGYAAKLKKLCPPGHGHDHDHDGHGGAGGAAKVPMDPGSGFTFDLSYYRHVLATGGLFQSDGSLRDDPVTRGYVEKLANASSSEEYFADFAAAMVKMGRTDVLTGDLGAVRPTCDSLVD

SEQ ID NO: 29923 - protein, 481 aa, Oryza sativa
MTSAVLAGRNEVHHHHHHHWADARVPLMPKHATNPNPRRHHRPSPSIPPPPPPQRPPAATVAPSVPDPSPSGHVTIRPSELSRREAQVLRARLTGELSRVRALLSDIDGWEARRRRPAEPPRQRGHVSPPPALQAAMRKRCTQILTRLRKQKISVWFNSPVDVERLKLHDYHAIIRNPMDLGTVKENLAFGRYPSHEAFATDVRLTFSNALRYNPADHHVHRYASNLLATFEGLYKEALSWFEQECQRLEPPMPLALPPPPQPPVPMPMQAPPRIGGGGRRPKPKAREPNKREMSDEEKHKLRVEIGNLPEEKMGNVLQIVQKRNTDPALMGEVVELDFDEMDVETLWELDRFVVNCKKALSKSRRTVAMNGDAVDATAIVPTEDDTVQVNVHHQPSVVEIGDSENDTPEKRVSEVDMVDEYVDIGDEMPTANYQSVEIERDAQVASSSSGSDSGSSASSDSDSRSSGDSDSDGDDAQSPD

SEQ ID NO: 29924 - protein, 198 aa, Oryza sativa
MAAALRFAARKVSGRALQQATAFVPPPPAVREEQRRLLPRLIPGAGGRMPLLRSFSSAGAAPNNKKHDHLPQSKHIVDVELELSRIPASIRPQVKTWYDRHFPHAEPTVNGESGISNKEPASLRAQVEEKKIELFHLLSQLEYSGENSNLEDERILRQLPPYRELKHLVNGYGIKLVVKRIAIASVLSAIFITAMVKM

SEQ ID NO: 29925 - protein, 324 aa, Oryza sativa
MDAMAPRLSINGNSSINGNSFTISSSVNKQRFVIEKSKDEYIRDVQSCLDYIRDGESYELCLTTQMKRRTDYMDALKLYLKLRKQNPAPYAAWLNFSSENLSICCSSPERFLRLDRNAILEAKPIKGTIARGRTPEEDECLRLQLKYSEKDQAENLMIVDLLRNDLGKVCEPGSVHVPRLMDVESYKTVHTMVSTIRGTKMSDLSPVDCVKAAFPGGSMTGAPKVRSMEILDSLETSPRGIYSGSVGFFSYNKTFDLNIVIRTVVLHNGEASIGAGGAIVALSDPEAEYNEMLLKAKAPTKVVEECSQQIYNPDRSDSMQTTVS

SEQ ID NO: 29926 - protein, 154 aa, Oryza sativa
MASSGCHLLVLLLAFSAFHCSYAARHLLDTAAAAAAPEAAPAQPSMPTVPTTLPPIPSIPAVPKLTVPPMPSVPIPKVTIPPTAAGTIPSLPIPAIPTTIPTIPTVPVTLPPMPSIPTTIPSIPTTIPTTIPTIPGFQMPPIPFMSSPPKTTSP

SEQ ID NO: 29927 - protein, 495 aa, Oryza sativa
MLENQRQAEVLWPRLVANKLFRKPSGSHAFVADFPMAVDDDFDGEAVPAAVESFDDDGCSPDADACRSVKRPRPRPQQRASNKTLKYRLFASTWNVGGVAPPDDLDLSDWLDTRNAAYDIYVLGFQEVVPLSARNVLGADKKRVGMRWNELVRAALNRSSPSAPNSSRDQREAKGTGGGAAAAAAGGGEIKQQAAQQKVHPVRGGIGGGGGELACRDYRCVVSKQMVGILLTVWVRADLARFVRRASVSCVGCGVMGCLGNKGAVSVRFWLHDTSFCVACCHLASGGRDGDEAHRNADATEILSRTTFPRGHSLNLPQKILDHDRVILLGDLNYRISLPEAKTRLLVERQDWKTLLENDQLRSEVESEGGAFHGWNEGAIAFSPTYKYYPNSDTYYGCASHGRKGEKRRAPAWCDRILWRGAGLKQKRYDRCESRLSDHRPVRALFEVEVGAPRRNLNSLRSFFLSERFDGGRSAAADLLREDGTASSARFGDTI

SEQ ID NO: 29928 - protein, 357 aa, Oryza sativa
MAFGGRYVILLMALFSIYCGLIYNEFFSVPFHIFGKSAYECREKTCSDAHTAGLIKVRDPYPFGVDPSWRGSRSELPFLNSLKMKMSILMGVTQMNLGIVLSYFDAKFHGNALDIRYQFIPQMIFLNSLFGYLALLILIKWCTGSQADLYHVMIYMFLDPSGNLGENQLFWGQKELQILLLLMAIVAVPWMLFPKPFILKKLHKERFQGHTYRFLGTSEMDPDSEPDSARSRHDDFNFSEVFVHQMIHSIEFVLGAVSNTASYLRLWALSLAHSELSTVFYEKLLVLAWGYDNLVVKLVGLVIFSFATAFILLGMESLSAFLHALRLHWVEFMNKFYHGDGYKFRPFSFALLADDED

SEQ ID NO: 29929 - protein, 484 aa, Oryza sativa
MASSGSSTVVGEMESSLERVRRQLSSTSSRHLLQGPLLKRSDTLRKWNERWVILDPATGKMEYKIRRSDAAVRGIIVFDSTSTVTLSPMNFHGLPKYDGCCFYIGTPQKKEYFLCAETPSAARAWVSTLHASQLVLQAHKEAVNSLGGNGPTKLGKVATVVAVANATAIEASKEVEAAMKVSLRAALGSTTNKLSKGQLDDLTIMMETLRVKDDELHQLLQDIRARDATIREITDKLQETAEAAETAASAAHSIDEQRRFLSSELERLKQDQEKQIEFSLLRLRESEEKAKLLSEEREHLLKERDSALQEAQMWRSELGKARGNAVILEAAVVRAEEKARVSAADADMRINDAASRLDSATKEKEELVALVDALQLQIRSQDTSTKQVCEERSELCSTSSKHVDMEDDNVDKACLSDTDPIPITENIVDLDDDGVDIPTIGVTEWNNPHSSEVSDVREVTTEPEDNSLDIPVDSQPVSENAFHG

SEQ ID NO: 29930 - protein, 210 aa, Oryza sativa
MVHAFECMYYNNLNATKQQKVRSCGGPCHRKLPNCPHLCSEICHPGQCPSVDQCMKKVNVRCACNNLKKEWICQDVLKEYRQSGRDPKQIPKNQYAVGLLACGEDCVKKVKAADSELHLRKIQEIKTPAVEVENVPKRRKRRNRGQESVESSKFQEIKAVALKFLLVIFLCIIVVAGLYLLWKGVYRLSDWMNDMEEQRARQRHLKPGRL

SEQ ID NO: 29931 - protein, 421 aa, Oryza sativa
MGGDGVEDVVIACNSTKKIRSNSNAGIAFGAPGGIICAKASMLLQSVPPAVLVRFLREHRSEWADYNIDAYLASTLKTSACSLTGLRPMRFSGSQIIIPLAHTVENEEILEVVRLEGQPLTHDEALLSRDIHLLQLCTGIDEKSVGSSFQLVFAPIDDFPDETPLISSGFRVIPLDMKTDGASSGRTLDLASSLEVGSATAQASGDASADDCNLRSVLTIAFQFPYELHLQDSVAAMARQYVRSIVSAVQRVSMAISPSQTGLNAGQRIISGFPEAATLARWVCQSYHYHLGVELLSQSDGDAEQLLKMLWHYQDAILCCSFKEKPVFTFANKAGLDMLETSLVALQDLTLDRIFDEPGKEALFSNIPKLMEQGHVYLPSGVCMSGMGRHVSFDQAVAWKVLAEDSNVHCLAFCFVNWSFV

SEQ ID NO: 29932 - protein, 296 aa, Oryza sativa
MYSLYAKFWMGVLFADTEDSISLFHGGEFDASGFTSCILKVYQNAESSGCLTEDLACQYVSLYLRLGGLEEAPGRLEEARNLAKKLCNGPLSHAADLWNLRASIEMKSLATSTGISSFSKENLSSLFDLFNVALPKLPIPEAEELWHTAMKLFSHEKVYFEKLVKCAMLSLSSAGGNDCGASVSSAIVGWILQRDGIKQARKMYKRFLALPRPSFKFFQYCIELETNLASIGNQDSLVNARKLYDAALDLYPQERELWRNYYNMELKLGTSETANAIYWRARKVLGDSSALDIPHS

SEQ ID NO: 29933 - protein, 59 aa, Oryza sativa
MIIKLREESRTTTQERDKLQQEMMFLRKKGTPRNQVGFPLLFVVYVALLGTSLGYLLRL

SEQ ID NO: 29934 - protein, 166 aa, Oryza sativa
MACIVYMRTDMSISKNSPSYLAKVQWDEVQSIIQQIQAIFNQCLAAHDKLETSLHELSRSGDVKSCKVARKTADAQFKELAKELKPLLTSLQSSSQSYQIWPKVEELVAKERELQDKLMTRHSTVVDSFEKKLRGQDVENRIAAQQQKVAALRQEVESLLEYISEI

SEQ ID NO: 29935 - protein, 133 aa, Oryza sativa
MASSGSKSKTNNGFFVPSPATAMAPCFLLLLIFFFLHVDASAAAASSSSHPQLVQQMQVKRARSLLQAPKIDCQGTCSGRCANNWKKEMCNKMCNVCCNRCNCVPPGSGQDTRHLCPCYDTMVNPHNGKLKCP

SEQ ID NO: 29936 - protein, 333 aa, Oryza sativa; identical to SEQ ID NO: 28544

SEQ ID NO: 29937 - protein, 207 aa, Oryza sativa
MCMTGLDKKKASAFFKTSADGHTTYAKEMTKLSGISDIIPEMEVCDFDFEPCGYSMNAIHGPAFSTIHVTPEDGFSYASYEVMGFNPASLAYGDLVKRVLRCFGPLEFSVAVTIFGGRNHAGTWAKGLDVGAYSCSNMVEQELPSGGLLIYQSFTATAEIATGSPRSVLHCFADENTEKAGKMEALYWEDDAVEEIDGTEGKKMRSC

SEQ ID NO: 29938 - protein, 429 aa, Oryza sativa
MGQGHPTGLTPNLLKLFEPRPPLDFKPPVEKRKLPAYTGMAQFVSQFAEPGDPEYAPPVPTCETKAEKKDRIRKSKLDQGAAKVAEELQKYDPQSDPNATGDPYKTLFVARLNYETSEHRVKREFEAYGPIKRVRLVTDKETNKPRGYAFIEYMHTRDMKNAYKQADGRKVDNRRVLVDVERGRTVPNWRPRRLGGGLGSSRIGGENAEQKLSTRDQQHAGRPRSEEPRRDERRADRDREKSRERPRERDRDERTRERSHDRTRERDSKEDRHHHRDRDRTRDRERGRDRERDHGRDRDRERDRRDRDRDRDRGRDYERDRDRGHDRHRERGRDRERDYERASHERDRGHMHERDAEFANGEPKHDQEYGYNYEQHKSHDAYETERSKRHEHEYYQMQPNNTEPEGPEEGEAYDEGDYQYHQAADEHNN

SEQ ID NO: 29939 - protein, 151 aa, Oryza sativa
MGRMHSRGKGISSSALPYKRTPPSWLKTAASDVEEMIMKAAKKGQMPSQIGVVLRDQHGIPLVKSVTGSKILRILKAHGLAPEIPEDLYFLIKKAVAIRKHLERNRKDKDSKFRLILVESRIHRLARYYKRTKRLPPTWKYESTTASTLVA

SEQ ID NO: 29940 - protein, 77 aa, Oryza sativa
MGKFVSSRRWFCRVVWPVAFVKFWFSGKTSQLRMLPGWRWMIFGPGTQIFSLRTSCFSREGEMSCGTSIPAPPPQVS

SEQ ID NO: 29941 - protein, 275 aa, Oryza sativa
MLLSPPAPPPLKPPVRLNRLPQRQPGGGGRFLLPRRRPRTPRSFGVVVCMAEMARVGTGSSWEEELGVPEESDAILGGGGGDGQRRQATRWELVEARLNQTSKWLVAGCYTSAAIWKHDALIMWAMIGAVLNSMFSNLLKRIFNHERPVSALRSDPGMPSSHAQSFLYSAVFLILSLFYWLGRTYLSVILGVAILAMCCYLSWLRVSQHLHTLNQVLVGAIVGSAFGAMWFALFNLLVQEAFASSVPVQIAVTIGTAILCIGFVIHVVRHWFKDE

SEQ ID NO: 29942 - protein, 70 aa, Oryza sativa
MPSLHQSGPSESEKKAFQETRSSDWTVTMRANSGLIFAVMILIMCGASAASSDNDELVAPFDTSNGLRTL

SEQ ID NO: 29943 - protein, 42 aa, Oryza sativa
MEVRQFHEMGAGGFHQGTSFCMICSCQIQDNNLGDYLDNPHL

SEQ ID NO: 29944 - protein, 524 aa, Oryza sativa
MSESALDKHIVVKIPDHFLPDAFIGESVGKGKEDGATVDNMDPSRPFLVIKKSDLDKAGEWVKIKYAWMAKSLTNDIIIPDPTPQVVRDAFFDISPRLDSVLRKDSVRCFFRLFAECTAAMAFKCNITSETLSCIVRHNALRCAKTVLEGKAPQLSCMHANPNCINPYGIFPLHGAAERFSVDMIKLLFCHGASANLHTVNDAGIPGLLPLHVAVGNTCLHKYLEDNLSPVQYHEDYIYKLIHLLCLPEMKVFLDTVRLLAEKTDNLADELWNYMKNDKLVESAVLLLAARKHIREGKPDGFDIIAQRIYEDYDSLVCDKGDTAEGQKLLEERRALLKCKCLIVTIISQAGEVLDNYIQAHSEVPNVEVLARVSYILKEFGFCPNEEYIDTMILCPYNKISYSDIVHKDVTKAVAQMSTSLPAAEKKAARKKALKGWDPTFIKRNFFPYWRSVLGAQLSVSNGAADEKSMLHRPQFRNSVVSNESSSLNHNISFLGRIQQLSGTHESRRYSTAAFRMLTKVLKT

SEQ ID NO: 29945 - protein, 361 aa, Oryza sativa
MAALLLLAAAMVVVVFAHAAAAQRYNAIYSFGDSISDTGNLCVGGCPSWLTTGQPPYGKTFFGRPTGRCSDGRVVVDFLAEHFGLPLSPASKGGGDFKKGANMAIIGATSMDAAFFKSIGLSDKIWNNGPLDTQIQWFRQLLPSVCGNDCRSYLSKSLFVVGEFGGNDYNAPLFAGRAMTEVRDYVPQVVSKIIRGLETLIRMGAVDVVVPGVLPIGCFPIYLTLYGTSNGADYDRNGCLKSYNSLSSYHNTLLKRSLSNLQRTYPHARVMYADFYSQVTAMVRSPQNFGLKYGLKVCCGAGGQGTYNYNNKARCGMSGSSACADPANYLIWDGIHLTEAAYRSIADGWLKGPYCNPPILH

SEQ ID NO: 29946 - protein, 270 aa, Oryza sativa
MVEILGISVLPCIPIALRQLLVDNEAKDMSEFLYLINQIICKFKSSANALLEDVFPAIASHLSVILSHDAFSNGFASNTEEMRELQELEKRFYAFLLHIATHDLSTVLLTPSCRHYLENIMQLLLITSCSHKEISHRKTCVQTFVNLIKDWCSSSEIEDKLPGFRVFMIEKFATGCCLQSVLDKSFNFRDGISIALFGEIMMAQKVMYERFGENFVVNFVTKLREAHCPPDLAEQYYQKLQGNDIKAFKSFYESLVMKIRQQQNGSLVFR

SEQ ID NO: 29947 - protein, 226 aa, Oryza sativa
MFSSTTLKSFVIHNAEDIEHLPKQIEYLVIEMPNLVTLHIEEIPRRNIHLVDLSSVKEATIYFFEHSFRNSAVDCNILSALSNATSLKLICDSVYDEVSKVLMRDLPRCKAFDNLKRLKLGEWFLRNGCYPLLFLLRYSPHIEKLRLQLTKLGAEEYEKFPTAAAAIDPPCKEAARTFHCEKLTEIEIVYPQGDKRVHIIVRILIANISPLPEIKIKPFPKSGLSW

SEQ ID NO: 29948 - protein, 176 aa, Oryza sativa
MHAGRSSSTLGRSSGTDQNAQRFYTSQIAAAEMSTATGGQRGNATKLSSNLGESARRQYLREHRSSSRYSQLAAAEPSDRPEWTHQFQERPSSSHRKDDGAANKEPTVVNGAKKSRIHYSGPLMPPGVNMEEILREHERQIQQAVRRARLDMGKGKNHVERDQSESLLYTTQNGRP

SEQ ID NO: 29949 - protein, 54 aa, Oryza sativa
MNLRTYGSMCGDGATAPVAVEVKVAFRHKSVPNQKVGMNPIITMAAMTMMTTMV

SEQ ID NO: 29950 - protein, 323 aa, Oryza sativa
MPIVAALWTQKVKRWSDFLVFSASRTVFHHNNDAVFQLLRSCFTATLGMSSTTSVCSCGGIASLLGHGFGSHCSGGLSPVAPGILYLRIFRCIKDCSILAEDILRLLMLSVKDIAETTVSRHRSDKVRKTKYVMRHGQVSLSSALTQVKVAASLGATLVWLSGGTALVQSLFQEMLPSWFLSVQDLGRGGAASGGTVYKLGGHALAYLAVYAGMFAWRIDPTPVSRRRERVMWSHFEFLASALDGKISLGCDLSLWRAYVSGFLGLVVECTPCWAHEVDLRVLRRLSAGLRQWKEDELAVALLRRAGPEAMAAAAELIIGGDW

SEQ ID NO: 29951 - protein, 410 aa, Oryza sativa
MAMAARARCSRQPNSHRLLAVVVLAAILLLPVASAAAAVVAAVAEGDGVENRSAARQWATGKDEGELVSGEESRGGGSVVEDEFAGGFGSLDSMLQWAIGNSDPDKLKEQAEGVQKLSADELLKRRMEIKELMEKLKMPSDADLMKIAIADLNNSSISLEDRQRALQELLILVEPIDNANDLDKLGGLVAVIQDLNNANEEIRTTSAWVLGKASQNNALVQNQILGYGALARLVKMGYATSAEEATKALYAISALVRDNINGQEAFHSENGSAMLQHILASNSVDVRLQKKAVFLVTDLADFQLNSGNSGLPFLSDRIFLKSLVDMLSRFDLDLQEKVLLAIKSLLKLSSTEATDFESCDLSSVLYRLGVQLEELPSEEQKEYAGEVDDLRREVQILFQDKLKEGTKTAL

SEQ ID NO: 29952 - protein, 250 aa, Oryza sativa
MRDIVKERLPTFTPEQAKLVKGSADYFGINQYTANYMADQPAPQQAATSYSSDWHVSFIFQRNGVPIGQQANSNWLYIVPTGMYGAVNYIKEKYNNPTIIISENGMDQSGNLTREEFLHDTERIEFYKNYLTELKKAIDDGANVVAYFAWSLLDNFEWLSGYTSKFGIVYVDFTTLKRYPKDSANWFKNMLQASGPGSKSGSGTSDSQVGSATSASHPVGSAISSSHRLLLPLLVSLHFLFPSFFMFLSL

SEQ ID NO: 29953 - protein, 475 aa, Oryza sativa
MARSAVLLHAVLLVLAVAVSSWRGVVSGDAAVVLGRKAAGMSSAAASSSADDDLPALQISARKDGAGNDKYAVIFDAGSTGSRVHVFRFDKQMDLVKIGDDMELFAKVKPGLSSYAGKPQEAANSIAPLLEKAKGVVPKQLQKRTPLKLGATAGLRLIGDEKSEQILEAVRDLVHSKSNFQYKPEWISVLGGSQEGSNLWVALNYLLGKLGGDYSKTVGVIDLGGGSVQMAYAISSDAAENSPPVPVGKDPYVTKEYLKGKDYNLYVHSYLHYGLQASRVEILKTKNGQFSSCMLREFNGTYKYNGEEYDAAASPEGADHGKCGEEAAAALGLDAPCESRNCSFNGVWNGGGGAGMADLYVASYFYDRAVHGGFVVDDAPSAVTTPAAFAEAASKACSLSSGEAAAAYPEAFDVQFICMDLTYQYTLLTKGFGLKPTREMTLVKQVKYGDCYVESAWPLGTAIEALSSQKSHQSA

SEQ ID NO: 29954 - protein, 346 aa, Oryza sativa
MSAVERKTACVTGGSGYIASALIKMLLQKGYAVKTTVRNPDDMEKNSHFKELQALGPLKIFRADLEEEGSFDEAVAGCDYAFLVAAPMNLKSQNPEKELLEAGVQGTLNVLRSCVKAGTVKRVILTSSAAAVSGQPLQGDGNGSSHVLDESSWSDLDYLRSTNGISPAQAYAIAKVLSEKEASKLAEENGISLVAVCPVATVGASPAPVANESVANVLSLLSGNEEINTLRMIDQYSGGLKLVHVDDLCRAEIFLAEKASPSPSGRYICCALNTTMRQIARSLAAKYPHHNVDIDALGGGLPEKPTILLSSEKLTSEGFEFMYKTVDEMYDDAFVEYGMALGILHY

SEQ ID NO: 29955 - protein, 278 aa, Oryza sativa
MLRVAGRRLSSSLSWRPAATAAAAAGGPRGGPLAGKNDDDDNNGNGRVQPRFSIESPFFAAARGFSSSETLVPRNQDTGLAELPATVAALKNPNPKVVYDEYNHERHAPGDPSKRAFAYFVLSGGRFIYASLLRLLVLKFVLSMSASKDVLALASLEVDLSSIEPGTTVTVKWRGKPVFIRRRTEDDIALANSVDVGSLRHPQQDAERVKNPEWLVVIGVCTHLGCIPLPNAGDFGGWFCPCHGSHYDISGRIRKGPAPFNLEVPTYSFLEENKLLIG

SEQ ID NO: 29956 - protein, 585 aa, Oryza sativa
MLGKVTIDSDAVSVLRGVYNSLLKFRDILAWEAAVAMAVIEMDSSIEKPQACEENEAGSSTENPHASGEKPKGDKKSKKKKTLGKGTSAVLMLLRDLVTNGKEVLSVNSALLAEWGTELSLLFDPKCPRLVSLVDKVKEIVETNEVRRLPKIPKGTRDFGKEQMAIREHAFSIITGVFKMHGAVSLDTPVFELRETLMGKYGEDSKLIYDLADQGGELCSLRYDLTVPFARYVAMNNISSLKRYQIAKVYRRDSPSKGRYREFYQCDFDIAGVYETMEPDFEVIKVLTELLDQLDIGTYEIKLNHRKLLDGMLEICGVPPEKFRTVCSSIDKLDKQTFEQVKKELVDEKGISNETADKIGDLVKTRGPPLEVLLELRKEGSKFMGNAGSVTALNELEILFKALDKANAIGKIVFDLSLARGLDYYTGVIYEAVFKGTTQVGSIAAGGRYDNLVGMFSGKQVPAVGVSLGIERVFAIMEQQEMEKNQIRATETEVLVSIIGKDLILAAELVSELWNAGIKAEFKLTTRIQNHLKYATQSGIPWMVLVGESEISSGKVKLKNLAASQEEEVDRTEFAQVLKQKLRNP

SEQ ID NO: 29957 - protein, 237 aa, Oryza sativa
MFLTRTEYDRGVNTFSPEGRLFQVEYAIEAIKLGSTAIGLKTKDGVVLAVEKRVTSPLLEPSSVEKIMEIDEHIGCAMSGLIADARTLVEHARVETQNHRFSYGEPMTVESTTQAICDLALRFGEGDEESMSRPFGVSLLIAGHDENGPSLYYTDPSGTFWQCNAKAIGSGSEGADSSLQEQYNKELTLQEAETIALSILKQVMEEKVTPNNVDIAKVSPNYHLYTPAEVEAVIARL

SEQ ID NO: 29958 - protein, 445 aa, Oryza sativa
MLDINLFRTEKGGDPELIRKSQRNRSASVELVDEVIALDDQWRQRQFELDKIRQELNKTSKEIGKLKAKKEDASALIQSTEEIKKRLAAKETEVQEAKGTLDAKLVTIGNIVHESVPVSDDEANNLIVRTWGEKRMEGNLKNHVDLCKMLDIVALEKGVDVAGGRGYYLKDEGVLLNLALINFGLAFLRKRGFKPMQTPFFMRKETMGKCAQLAQFDEELYKLTGDGEEKYLIATSEQPLCAYHLGDRIYPAELPIRYAGYSTCFRKEAGSHGRDTAGIFRVHQFEKIEQFCVTSPNDNESWEMHEEMIKNSEDFYKEIGLPYQLVSIVSGALNDAAAKKYDLEAWFPASKTYRELVSCSNCTDFQARRLGIGYGQKKNDEQSKQFVHMLNSTLTATERTLCCILENFQRENGVEVPKALQPYMGGIDFLPFKLDSKQVAQLQIK

SEQ ID NO: 29959 - protein, 400 aa, Oryza sativa
MAAAASAAPRVLSAEPRRRDPVAVGVPPWRLSPGSRVRAASRARQENVRRGQLISTNIKSRPLLCPPCRCVQMALANTRIAYQPDVQKHSGVLAYEPVQGSLVQWNSFMDKSVPDPPTAVLLHGILGSRKNWGSFAKRLAQEFPMWQFLLVDLRCHGDSASIKKRGPHTVASTALDVLKLIVQLRLTPRVLVGHSFGGKVALSMVEQAAKPLARPVRVWVLDATPGKVRAGGDGEDHPAELIESLRRMPMQVSSKQEVVDALVKEQFSVDVARWVATNLRRSSPLGSLSSSSFSWIFDLNGISDMYKSYEETNLWGIVENVPRGVHINFLKAERSLHRWALDDLQRIHTAEELAADEGGGVEMHVLEDAGHWVHADNPDGLFRILSSTFRIEATIRGMQN

SEQ ID NO: 29960 - protein, 98 aa, Oryza sativa
MRGRELRDVVGGSGGLGTGGGGLPSPTSHAWRRHPFPDGGGHGDDDGGGWRSAAVPLSPCRYRRRAGTVGLSHGCHRLCARVQVISEITLAAAISMHG

SEQ ID NO: 29961 - protein, 360 aa, Oryza sativa
MKIQCNACGAAEARVLCCADEAALCTACDEEVHAANKLAGKHQRVPLLSDDGGAAPAAAAPAVPKCDICQEASGYFFCLEDRALLCRDCDVSIHTVNSFVSVHQRFLLTGVQVGLDPADPVPPVADKHVKSAGGSVDSATKHLQRNPTDLSGENSASLPSQNVINGNYSRQSSVTMAKTGQVNWTMSNNTIRSIDPPPKYSSEESPALLLASHTSTMAAYSSQISKDSDRIYNLPFTGGNGSDSLHDWHVDEFFSNSEFGFAEHGSSKGDNAKPGSAGGSPQCRLAEGLFVEGLLGQVPDNPWTVPEVPSPPTASGLYWQNNLLCPSYDSTMFVPEISSLENSQNNFTVSAGLKRRRRQF

SEQ ID NO: 29962 - protein, 278 aa, Oryza sativa
MAASHGNAIFVLLLCTLFLPSLACDSGGVKFGYTGSIGPDFWGNLSADFTRCSNGKQQSPIDIDTNNLVHELNMEPLHRNYTAANATLVDNIFNVALRYEEAAGVLSINGVKYTLKQMHWHSPSEHTINGFRFPLELHMVHTNENGNITVLAFLYRFGRPDPFFEQIQDKLAALNAEGCKAEKGSPVPAGSVSLLTMRQHVHIYYRYVGSLTTPPCAENVIWNIPAMPREMTPQQAADLMAPLDEGYRRNSRPTQQMNGRTVQLYHRFWGKKKRRSSP

SEQ ID NO: 29963 - protein, 381 aa, Oryza sativa
MQVVGTVRVSGCGAVVAPSRRQCRVSAAVLTAAETATATRRRVTHSMPPEKAEVFRSLEGWARSSLLPLLKPVEECWQPTDFLPDSSSEMFEHQVHELRARAAGLPDEYFVVLVGDMITEEALPTYQTMINTLDGVRDETGASACPWAVWTRTWTAEENRHGDILGKYMYLSGRVDMRMVEKTVQYLIGSGMDPGTENNPYLGFVYTSFQERATAVSHGNTARLARAHGDDVLARTCGTIAADEKRHETAYGRIVEQLLRLDPDGAMLAIADMMHKRITMPAHLMHDGRDMNLFDHFAAVAQRLNVYTARDYADIVEFLVKRWKLETLETGLSGEGRRARDFVCGLAKRMRRAAERAEDRAKKDEQRKVKFSWIYDREVIV

SEQ ID NO: 29964 - protein, 371 aa, Oryza sativa
MVTVEYQSILLQVIAMANANAAINQSAVVVGLDALKNNDVEFALLEEAFGPASLGIIVVKDLPSRFHDLRHRLLSYASALGNLSQDELAKLESPASKWLVGWSCGKETLKDGKYDTLKGSYYVNCAPGFEEQQKAVAEKYPSFPEYTAPNVWPSEEVLPGFEETFRELCTLIIDIAALVARACDKYAEANIEGYQRGYLEHVVKTSVSTKARLLHYFPSPASGSEISNGDEDDWCATHLDHGYLTGLTSAMFVDEGANVPRAGASFAPLEELERSPDPKAGLYIHSRTGAVTKVSIPRDCLAFQTGEALEIITQGKFKAVPHFVRGAGAGAGGGKVARNTLAVFTQPNLWEKVDDKRDFAAFAKEIVEKNH

SEQ ID NO: 29965 - protein, 365 aa, Oryza sativa
MAASMNSKLPLALVLLLLCGGACVAVAMPSELSIVGYSEEDLASHERLMELFEKFMAKYRKAYSSLEEKLRRFEVFKDNLNHIDEENKKITGYWLGLNEFADLTHDEFKAAYLGLTLTPARRNSNDQLFRYEEVEAASLPKEVDWRKKGAVTEVKNQGQCGSCWAFSTVAAVEGINAIVTGNLTRLSEQELIDCDTDGNNGCSGGLMDYAFSYIAANGGLHTEESYPYLMEEGTCRRGSTEGDDDGEAAAAVTISGYEDVPRNNEQALLKALAHQPVSVAIEASGRNFQFYSGGVFDGPCGTRLDHGVTAVGYGTASKGHDYIIVKNSWGSHWGEKGYIRMRRGTGKHDGLCGINKMASYPTKNA

SEQ ID NO: 29966 - protein, 150 aa, Oryza sativa
MSSVSPRKQPLVQREASTSMNDNEGGFSWLTALGFGFLTFNSGMAIYRSDGDRGSVAFVLTSYIDLVLLFACLRLFEKAPRDSARREWLKVFVWGLTTLLTVVFSYKVAAIMPPVVAVIVWAMAFATIGGGFYAFFVHQDKAAQLEQANR

SEQ ID NO: 29967 - protein, 197 aa, Oryza sativa
MAKKSKGAILKVNTHMNGAQSSSCSPGKGKVLERSPRDMSDCDMDDAAMPESALSSYGEANDMDIFESTMSLLSAEVPHQMGEFHQSSEDVLIDNQAAEEGYQNFEVISHPCKRLRVSVKRESGAHSEDESVAPTVSVKKEAQEEATTSFGLQAAFFKPGYTGKRRRRMPKIQRRGGSSASPFSSWISSRIRKKRQF

SEQ ID NO: 29968 - protein, 231 aa, Oryza sativa
MSKQVQQFAAVQRNISARISQQAADTVLSRSLFLISTGGNDIFAFFSANSTPSSAEMQRFVTNLVSLYTNHVKDLYVLGARKFAVIDVPPIGCCPYPRSLQPLGACIDVLNELARGLNKGVKDAMHGLSVSFSGFKYSIGSSHAVVQSIMKHPQRLGFKEVTTACCGSGKFNGESGCTPNATLCDNRHDYLLWDLLHPTHATSKIAAAAIYNGSVRFAAPINFRQLVDDQH

SEQ ID NO: 29969 - protein, 58 aa, Oryza sativa
MCNREGQGTDCFDRDITGLEESPRVMDELLAISLRCILPVNERPNMKTVCDDLCSITV

SEQ ID NO: 29970 - protein, 352 aa, Oryza sativa
MDDDSADEVDEGQDDLKESVAHESKDGDGAEVTKDGDDSDDSDGMDDDAMFRIDPYIARIFKERNLPGSETKQSQLMRFKLRVLTLLEIYLQRNTGNNLVLEVYSFLMQAFVKSHSADGSEQFKQRIGGILQKRIFKAKDYPKGDGVEISTLESLLEKALKLASRSRYTTVASVAQNAAFWLLKIINSKSHSKQELASVVEKFQYILTDYFNNKKSRLKLGFVKEAVRRNPWVGEELFGFVLQKIGCTKAEYRRVQTLELVDCILKSWAGDDSSASKVLKKHLSQLCELIQEVLTKIPENKSRRQEVRRFCTRVLQTVTKLNLKDRFQKKLNPETLSLCEAQLGAAFVRFQK

SEQ ID NO: 29971 - protein, 149 aa, Oryza sativa
MADQLTDEQIAEFKEAFSLFDKDGDGCITTKELGTVMRSLGQNPTEAELQDMINEVDADGNGTIDFPEFLNLMAKKMKDTDSEEELKEAFRVFDKDQNGFISAAELRHVMTNLGEKLTDEEVDEMIREADVDGDGQINYEEFVKVMMAK

SEQ ID NO: 29972 - protein, 123 aa, Oryza sativa
MYCYYVAGTVGLMSVPVMGIAPESKATTESVYSAALALGIANQLTNILRDVGEDARRGRIYLPQDELAEAGLSDEDIFNGVVTNKWRSFMKGQIKRARMFFEEAERGVTELSQASRWPVRRVT

SEQ ID NO: 29973 - protein, 190 aa, Oryza sativa; identical to SEQ ID NO: 29393

SEQ ID NO: 29974 - protein, 265 aa, Oryza sativa
MVEITNNLKLLPLIMLVLLISKAVGDFFNEGLYEVQAQLRGIPLLDSRPKQVMRNMSAKDACKNQKVVSLPRVSRIVDIISVLRSNKHNGFPVVDRGQNGESLVIGLILRSHLLVLLQSKVDFQNSPFPCGPGILNRHNTSDFVKPASSKGKSIDDIHLTEDELGLYLDLAPFLNPSPYIVPEDMSLAKVYNLFRQLGLRHIFVVPRPSRVVGLITRQDLLLEENGNNVTTELQSTSVRGQLNGKMLSGSTHLGHPLLDSIVVEE

SEQ ID NO: 29975 - protein, 232 aa, Oryza sativa
MLFLNFSTGPFESFKSVYYGAAEEFKDKEIKFLIGDIEASQGAFQYFGLREDQVPLIIIQDGESKKFLKAHVEPDQIVSWLKEYFDGKLSPFRKSEPIPEVNDEPVKVVVADNVHDFVFKSGKNVLVEFYAPWCEHCKKLAPILDEAATTLKSDKDVVIAKMDATANDVPSEFDVQGYPTLYFVTPSGKMVPYESGRTADEIIDFIKKNKETAGQAKEKAESAPAEPLKDEL

SEQ ID NO: 29976 - protein, 82 aa, Oryza sativa
MQNEEGQMVDLYVPRKCSATNRIITAKDHASVQINIGHVDENGLYDGRFTTFALSGFIRAQGDADSALDRLWQKRKAEVKQQ

SEQ ID NO: 29977 - protein, 381 aa, Oryza sativa
MYRRLTKNPNYYNLQGVSHRHLSDHLSELVETVLNDLESSKCVAIEEDMYLKPLNLGLIASYYYISYTTIERFSSMLTQKTKMKGLLEILASASEYAELPSRPGEEDFIEKLVRHQRFSIEKPKYGDPHVKANALLQAHFSRHTILGNLAADQREILLSAHRLLQAMVDVISSNGWLTLALNAMELSQMVTQGMWDRDSVLLQLPHFTKELARRCQENEGRPIESIFDLAEMSIDEMRDLLQQSNPQLQDIIEFFKRFPNVDMAYEVREGDDIRAGDNVTVQVTLERDMTNLPSEVGPVHAPRYPKPKEEGWWLVIGDSSTNQLLAIKRVALQKRARVKLEFTAASEAGRKEYMIYLMSDSYLGCDQEYEFTVDVMDAGGD

SEQ ID NO: 29978 - protein, 137 aa, Oryza sativa
MTPQKLPDLVEHNPLIAVEILSKLMNSPDIDGYLDVLVHMEMSLHSMEVVNRLTTAVELPTEFVHEYISNCIQSCQNVKDKYMQNRLVRLVCVFLQSLIRNKIINVQDLFIEVQAFCIEFSRIREAAGLFRLLKSLE

SEQ ID NO: 29979 - protein, 286 aa, Oryza sativa
MYPYRFSNVMIGYLNLATLLASIPVIGAGLWMAKGSTATCSSMLQTPLLVIGFVVLLVSLAGFVGACFHVAWALWLYLLAMMLLIAFLLGLTAFGFAVTAGGGGTQVPGRPYREYHTSDYSSWLQKHIQDAKYWRPALACVVGSKACPKIANWSPMDYLQHDLTPIQSGCCKPPTACAYSGGVAVGAQDEDCFRWNNAAGILCYGCESCRAGVMEKVREDWHKISVLNVMVLVVLICICACGCCAFRNARRSVSEYPYGVNRMHKIHPRWDYYWWRWWRDRREQLY

SEQ ID NO: 29980 - protein, 93 aa, Oryza sativa
MASLSKRGGGGGEGEGILASFSRSSVAAHGREAATMAKKLLRSTGKAAWIAGTTFLVLVVPLIIEMDREQQLNDLELQQQALLGGPPPPAPLK

SEQ ID NO: 29981 - protein, 48 aa, Oryza sativa
MDTRGRLCWSAQKPPFISLLHYSDYCLCCSLVDVLILCMFLWPCYPLV

SEQ ID NO: 29982 - protein, 291 aa, Oryza sativa
MHPRYMHGAATSPEVKVYAYGAAQVKKALEVTHYLGGENYVFWGGREGYQTLLNTDMKRELDHLASFLQAAVDYKKKIGFNGTLLIEPKPQEPTKHQYDWDVATTFSFLQKYGLTGEFKINVECNHATLSGHSCHHELETARINGLLGNIDANTGDPQIGWDTDQFLTDISEATLVMSSVVKNGGLAPGGFNFDAKLRRESTDVEDMFLAHISGMDTLARGLRNVVKLIEDGSLDELVRKRYQSFDSEIGALIEAGKGDFETLEKKVLEWGEPIVPSGKQELAEILFQAAL

SEQ ID NO: 29983 - protein, 278 aa, Oryza sativa
MATEEVVPEVPVTEVEAAAAEEAVEETTAAEEKAAKPAKEKKKAGRPPKEKKEAKPAKEKKVKEAKAKKPRVAAAHPPYAEMIMEAIVALKERTGSSSQAIGKHIHANHGANLPPNFRKLLSGNLKKLTAAGKLAKVKNSFKLSSTRPAAPAAADAKPKAAPATKPKVKTTKAAKPAAKAKAPATTKAAKPATKTKIKVAAAPAAKPKASPKAKAKTATSPVKPRGRPAKSAKTSAKDSPAKKAAPVAAKKKAAATKKKASVAAAPAARKGAARKSMK

SEQ ID NO: 29984 - protein, 379 aa, Oryza sativa
MNAFKPAPAGTRKVVLATNIAETSVTIPGIKYVIDPGMVKARAYNPVTGMESLIIIPVSKAQALQRSGRAGREGPGKCYRLFQESEFDKLVDSTVPEIKRCNLANVVLQLKALGIDDIIGFDFMEKPSRTAILKSLEQLILLGALTDDYKLSDPVGRQMARLPLDPMYSKALIVASEFKCLEEMLIVVSMLSVESIFFSPREKLEEARAARKSFESSEGDHITLVNVYRAAKECLEKSKNANAKEKTMEKALNRWCRENFINYRSLRHACDVHSQIQGHVQQMGLNVSSCGDDMVLFRRCLTAAFFLNAAMRQPDGSYRALATSQSVQIHPSSVLFQKKPDCAIFNELVRTSQNYVKDLTRIDPVWLAELAPQYYATED

SEQ ID NO: 29985 - protein, 295 aa, Oryza sativa
MQLIAEAYDVLRRVGGLSNSEIADVFAEWNRGELESFLVEITADIFTVADPLDGSGGGGLVDKILDKTGMKGTGKWTVQQAAELAIAAPTIAASLDGRYLSGLKDERVAAAGVLEAEGMPSGLLETINVDKKMLVDRVRQALYASKICSYAQGMNLLRAKSVEKGWNLNLAELARIWKGGCIIRAKFLDRIKKAYDRNPELANLIVDREFAREMVQRQNAWRWVVARAVEAGISTPGMSASLSYFDTYRCSRLPANLIQAQRDLFGAHTYERIDRPGSFHTEWTKLARKSNGAAI

SEQ ID NO: 29986 - protein, 73 aa, Oryza sativa
MPNKHSVRLAVVFGLISSEIGSPILVKKNVRICNHCHHALKLISRYSGRRIVVGDSKIYHEFSDGSCCCGDYW

SEQ ID NO: 29987 - protein, 142 aa, Oryza sativa
MIRFILLQNRQGKTRLAKYYVPLEDSEKHKVEYEVHRLVVNRDPKFTNFAEFRTHKVIYRRYAGLFFSMCGDITDNELAYLECIHLFVEILDHFFSNVCELDLVFNFHKVYLILDEFILAGELQETSKRAIIERMGELEKLE

SEQ ID NO: 29988 - protein, 152 aa, Oryza sativa; identical to SEQ ID NO: 29246

SEQ ID NO: 29989 - protein, 373 aa, Oryza sativa
MREMRLSARLSNSSSNGVSRLMSIGSNEAGPRRGMVLPFTPLSMSFDDVNYYVDMPAEMKQQGVVDDRLQLLRDVTGSFRPAVLTALMGVSGAGKTTLMDVLAGRKTGGYIEGDMRISGYPKNQETFARISGYCEQNDIHSPQVTVRESLIYSAFLRLPEKIGDQEITDDIKIQFVDEVMELVELDNLKDALVGLPGITGLSTEQRKRLTIAVELVANPSIIFMDEPTSGLDARAAAIVMRTVRNTVDTGRTVVCTIHQPSIDIFEAFDELLLLKRGGQVIYSGQLGRNSQKMIEYFEAIPGVPKIKDKYNPATWMLEVSSVAAEVRLNMDFAEYYKTSDLYKQNKVLVNQLSQPEPGTSDLHLSTSAALHMI

SEQ ID NO: 29990 - protein, 149 aa, Oryza sativa; identical to SEQ ID NO: 29048

SEQ ID NO: 29991 - protein, 185 aa, Oryza sativa
MEGWDKGTKSVVGEIPLLSTRAGPRDGEAWRQRLKEEYRALIAYTSVNKSKDNDWFRISAANPEGTRWEGTCWYVHNLRRYEFPLQFDIPVAYPQVAPEIELPTLDGKTHKMYRGGKICLTVHFKPLWAKNCPRFGIAHALCLGLAPWLAAEVPILVDSGMVKHKDDEAAPADAAAAASGSAAAS

SEQ ID NO: 29992 - protein, 384 aa, Oryza sativa
MEEYPMCPHILVFSARLHRKYGSCPGLKGFDELLLGWPKEVQGIQYLWNQCAEHALADNIELAEKLLTRWFEEYGKDGDIQSGGATRPMEISNEESVRSSVSSIQEVGSGTSTSEDQIFWLLNLSLYRTIENNLQEAKVAMDKALKLAHGESYEHCIKEHAAIHTLEKTSSSTDVQTQATFSLISGYLVDQRNLPVRDLLSRRFMKNVKKHRLKRLIDETIGPTSANPALINSVLEVCYGPSLLPETIGEVKYLVDFVESVMEVLPANYRLALAVGKFMVKHCTGDDSISMGTRFWASSILINAIFRAVPVAPESVWLEGASLLEKLQAAETVKRFYQQATSVYPFSFKLWHSYLNSCKASGSITESIAEAARQRGIELSVTPP

SEQ ID NO: 29993 - protein, 380 aa, Oryza sativa
MARPAPLLLLLAAVCLVAAASAGGADAAERKATTVGVYELRKGDFSIRVTNWGAVIMSVVLPDSRGKLDDVVLGYDTIAEYVNSSTYFGALVGRVANRIAKARFVLDGKAYHLYPNDGKNTLHGGHRGFSNVTWTVKEHVGGGDAPYITLYYHSFDGEQGFPGALDVYVTYQLSGPYVLSVHMNATAAGKATPVNLAQHSYWNLGGTGSGDILGNTVQLFASRYTPVDAELIPTGQVAPVTGTPYDLRAPTPVGARVHLVTGGLSKTGATIYGFDTNYAVDGGDDVDAHAHALRRVAVVRDGKSGRSLELWANQPGVQFYTGNFLTADVKGKGGKAYGQYGALCLETQGFPDAVNHPNFPSVIVRPGQVYKHEMVYKFSF

SEQ ID NO: 29994 - protein, 192 aa, Oryza sativa
MALLRALRRALPPLSSAAAGVLLRGATRHAAPLPLRPPPLLRLLDPIGLRPFSAAAATASQAPSMGAGLFSGLMDTRFPKRRPGFKSRRKRASLRPKGPYYWVKCKPGEPIPANQPNEGSVQGRKEKKRIKQRKAFIMAEKKKRKAQYSAAVKRKEAERTERKMAAVARERAWTERLADLKRIEEEMKPATA

SEQ ID NO: 29995 - protein, 247 aa, Oryza sativa
MAVAGLLLRPPPCVAMCTPSPSPFPSSQRRRRRRLTLAQPYCTLGLSFVSGRHHRFLLRRRRRTESKRTSRGTGVYASLFGVGAPEALVIGVVALLVFGPKGLAEVARNLGKTLRAFQPTIRELQDVSREFRSTLEREIGLDEVPPSMNYRPPTMNNSQQPAIDQSSDDKPEAAPYTSEELIKVTEEQLAASAAAAWNTQEPPPSQQKEAAAASESNDGAISRGSDGAGAAMSEPNRNISEKTETER

SEQ ID NO: 29996 - protein, 224 aa, Oryza sativa
MAAEAASPYFRLGYNSLGAFATINHLHFQAYYLTVPFPVEKAATKRIFLAEGTMNSGVKVSKLMNYPVRGLVFEGGNSLSDLANVVSSACIWLQDNNVPYNVLISDCGKKIFLFPQCYAEKQALGEVGQELLDTQVNPAVWEISGHIVLKRRSDYEEASEASAWRLLAEVSLSEERFEEVKAYIFDAAGLVQSDEEEVSEDEDATYTPVSIAPPAVAEGCLVLQ

SEQ ID NO: 29997 - protein, 279 aa, Oryza sativa
MAATAVTLPSSPAPFPVTTTASSSRNVRLLLRSPPPRRALRVAASAAADAPPKPAPPPTSPSGIVLVDPTEAQKVHRLKAVYDQKVVPLITEEFGYTNVHQVPKVEKIVVNCGLGAEAGNSKGLESAMKDLAMITGQWPVKTKAKKSVASFKIREGNTIGIAVTLRGRVMFNFLDRLINLGLPRTMDFLGVNPNSFDGHGNFTIGLRDQGVFPEIPYEVGGKKNGMDVCIVTTAKTDNEALRLLTLLGMPFAEHIKSSVVIRKKRLKRHHFMSKGRGRR

SEQ ID NO: 29998 - protein, 199 aa, Oryza sativa; identical to SEQ ID NO: 28539

SEQ ID NO: 29999 - protein, 354 aa, Oryza sativa
MLWVDKYRPKTLDKVTVHDQVAQNLKKLVAEQDCPHLLFYGPSGSGKKTLVMALIKQMFGAGADKVKMENKTWKIDTGSRNIEIELAMLSSAHHVEMNPSDAGFQDRYVVQEVIKEMAKNRPIDAKGKRAFKVLVLNEVDKLSREAQHSLRRTMEKYSASCRLILCCNSSSKVTEAVRSRCLNVRVNAPSEDQIVQVLEFIGKKENLQLPFGFAARIAAQSNRNLRRAILFFETCKVQQYPFTSNQVAPPLDWEQYVSEIAADIMKEQSPKRLFAVRQKFYELLVNCIPPESILKKLLAELLKKLDSDLKHEICHWAAHYEHKMRLGSKAIFHLEAFVAKFMSIYKEFLVSTFG

SEQ ID NO: 30000 - protein, 265 aa, Oryza sativa
MVPRDRVNAAAAGGGGEGRLVQSGIVNKKCDKKAPKRIHKSEREKLKRDKQNDLFNELGNLLEPDRQNNGKACVLGETTRILKDLLSQVESLRKENSSLKNESHYVALERNELHDDNSMLRTEILELQNELRTRMEGNPVWSHVNTRPALRVPYPTTGVFPVQHLPHLPVTTTAAFPQQLPVIIEQHYAATPRELQLFPESATSEDSEPSQEHGTSDHVTRPQPRYPTPTATLPVNLFPVFPGRQDQQCSSGTSGTNEEDRIGRS

SEQ ID NO: 30001 - protein, 467 aa, Oryza sativa; identical to SEQ ID NO: 28716

SEQ ID NO: 30002 - protein, 112 aa, Oryza sativa
MAATATLAAPSFLAHQSILSHKPLRKLGLSLELPRTRSVKIRAAKLPAGVEVPRKQPKLSEPFLGFTRTAEIWNSRACMIGLIGTFIVELVLNKGILQMIGVEVGKGLDLPL

SEQ ID NO: 30003 - protein, 151 aa, Oryza sativa
MRASSLFAESVFTTSAAAGRRRCPRLAAVPVTLFFSTGRGSPAMAEEAQQPRGVKVGGIHDAPAGRENDLTTVELARFAVAEHNSKANAMLELERVVKVRQQVVGGFMHYLTVEVKEPGGANKLYEAKVWERAWENFKQLQDFKPLDDATA

SEQ ID NO: 30004 - protein, 305 aa, Oryza sativa
MDLAAMLERDVLDSTPGVRWDDVAGLSEAKRLLEEAVVLPLWMPEYFQGIRRPWKGVLMFGPPGTGKTLLAKAVATECGTTFFNVSSATLASKWRGESERMVRCLFDLARFYAPSTIFIDEIDSLCTSRGASGEHESSRRVKSELLVQIDGVNNSSTTEDGQPKIVMVLAATNFPWDIDEALRRRLEKRIYIPLPNFESRKALININLKTVEVATDVDIDEVARRTEGYSGDDLTNVCRDASMNGMRRKIAGKTRDEIKNMSKDEISKDPVAMCDFEEALAKVQKSVSPADIEKHEKWQAEFGSA

SEQ ID NO: 30005 - protein, 232 aa, Oryza sativa
MAARSLHHLLLLLFLAGFHSLSLSPAAALRFDLQSGHTKCISDDIKVGAMAVGKYHVVVPEGGGSTSSSSSSSSSAQPLLPESHRVSLRVTSPYGNSLHYSENVQSGNFAFTTSEAGDYLACFWAPDHRPTATVGFEFDWRSGVSARDWTNVAKKGQVDMMEVELKKLEDTINSIHEEMFYLRAREEEMQELNRRTNSRMAWLGFFSLAICLSVAGLQLWHLKNFFERKKLL

SEQ ID NO: 30006 - protein, 95 aa, Oryza sativa
MRIMCSERGGRLFATDDRYCIDNGAMIAYTGLLAYAHGMTTPLEESTFTQRFRTDEVHAIWREKEMPVLTNIRAHAMAEVSKDEASVPTPIAVDS

SEQ ID NO: 30007 - protein, 41 aa, Oryza sativa
MMQFIVEYYSMHSSVVVAGFVSLNFLLSRVAAASPARIVCY

SEQ ID NO: 30008 - protein, 223 aa, Oryza sativa
MAAPPAPGIDSNSYERRNMSRSDVKHSGTVPQPRSHWKPKTIPQSQGNSHGNNAKDGHVDSATPQDSSNNNLAENIGWNDENHAHSEEVKGEKRHVDDYQKSESHENAEQQQQLSHAPRRQGHHNGGRYHRGGGTNRGRGYDVGKPSHVTNAERRRGGTHLEYQPVGSYNKTADFQQNPGTDERTEGAPVHRERVHNRGPRPAGQFVKRNPASTPAANSYRDE

SEQ ID NO: 30009 - protein, 113 aa, Oryza sativa
MIAGIALLIALTKFTIADLFASALAFVATGWCVLCLAVTWKRLVKFVGLWDSVREIARMYDAGMGALIFVPIVFFSWFPFVSTFQSRFLFNQAFSRGLEISLILAGNKANQEA

SEQ ID NO: 30010 - protein, 404 aa, Oryza sativa
MASAAMSTLNLSSSPLTKQQLRFGASTLSAEHVSGFSSARPAPSLCCSSSHWRAVKLRPRRRPWRRAGNRVVAQAGGYKVAILGAAGGIGQPLSLLVKMSPLVSALHLYDIANVDGVTADLGHCNTPAKVAGFTGKEELAGCLAGVDVVVIPAGVPRKPGMTRDDLFGINAGIVRELVEAVADHAPAALVHVISNPVNSTVPIAAEVLKRKGVYDPRKLFGVTTLDVVRANTFVAEMKGLPLADVDVPVVGGHAAATILPLLSKARPKTAFTDEEVEALTRRIQNAGTEVVEAKAKAGGGSATLSMAYAAARFLEASLRGLDGDADVYECSYVQCQAVPELPFFACRVKLGRDGVEEVAAAGAELRGLTEFEARALEALKPQLKKSIDKGVAYAQQQPATVAMG

SEQ ID NO: 30011 - protein, 315 aa, Oryza sativa
MLANKWMVDEKELRVIHYTLGPLKPWDWWTAWLVKPVGVWQDVRQTLEESLPGTGGGRSPHDQLVVKVLFILPVLLLSFGYYQSCFQTNKELLNIRSLCAFARRDRYKYKSEEAFPSYSVMGVSSSAFSNSNQRFSNGMHSKLPSYFGALTVLACFMSAGVSFAFAFAIIPKQIMPWTGLLLMFEWTFVSFFLLFGSYLRFVYRWGSLDANHVGHSRFDSSENHMVTGRHHNMSDCDIDATFYWTGMAIIAIVTVLLPTLLGVTALFAKLGLMVAGGVVLASFMTYASEHIAISAFYKGQRDRNVSRSRSICFLF

SEQ ID NO: 30012 - protein, 155 aa, Oryza sativa
MDGQGAWRGGASASSRISYKNATVAVCAINLLACALLFRNYYSSWPRIAGDHQFDSAQLRFIWESEELRRAMEPVDLIRRVKEIEQEAYGEHGMMTQEDAKQAAAVDASKRLQDLRAGNDGSSQKALEEWRKRKMERARQRAIEKNGTSSAAKTR

SEQ ID NO: 30013 - protein, 79 aa, Oryza sativa
MITCEIQWSRLMTGMSSHFNLILTEMMGNILLLMQIEALETFTLFTVFLFIAEEYMAVTTMLSYGLRYQTSGINLMMNE

SEQ ID NO: 30014 - protein, 45 aa, Oryza sativa
MMEVTAHLMWCCTTPSSMASSKRGIRTKLTLHTMKCLTRGFCQML

SEQ ID NO: 30015 - protein, 31 aa, Oryza sativa
MALQEEEEDDEDDEEGEKEEEEDGVRVRGEL

SEQ ID NO: 30016 - protein, 98 aa, Oryza sativa
MASAAARSGLRSLAARAKATAAPAARRRMSSSAHDDAHETAKWEKITYAGIVTCTLLAAYNLSKGHPHFDEPPAYPYLHIRNKEFPWGPDGLFENKHH

SEQ ID NO: 30017 - protein, 250 aa, Oryza sativa
MFVWSSSASPVSERAAAAAAAGAVHVFGGGGADHGDAKGAQAYDEYSFGNKNEKDGPTLSKLGSNSTAQLRPKDDGEGRAAAMPPASVMTRLILIMVWRKLIRNPNTYSSLLGVIWSLVSYRWGIEMPAIIARSISILSDAGLGMAMFSLGLFMALQPRIIACGNSLASYAMAVRFLVGPAVMAAASIAVGLRGVLLHIAIVQAALPQGIVPFVFAKEYNVHPNILSTAVIFGMLIALPITLVYYILLGL

SEQ ID NO: 30018 - protein, 252 aa, Oryza sativa
MTAPADKGKKAKTDADGGAAEENEQIDGALVLSIEKLQEIQDELEKVNEEASDKVLEVEQKYSEIRRPVYLRRSDVIQTIPDFWLTAFLSHPLLSELLTEEDQKMFKYLESVDVDDSKDVKSGYSITLTFSENPYFEDKELTKTYAFADDGTTTINATSIKWKEGMEIANGNAKKKGSKRPLVEESFFTWFTDTEHKSLADGVQDEVAEIIKEDLWPNPLKYFNNEAEELGEDDDEEGSDADEGEEDEEEEN

SEQ ID NO: 30019 - protein, 303 aa, Oryza sativa
MIALSFVRKGSDLVEVRKVLGKHAKSIMLMSKVENQEGVANFDDILAQSDAFMVARGDLGMEIPIEKIFYAQKVMIFKCNIQGKPVVTATQMLESMIKSPRPTRAEATDVANAVLDGTDCVMLSGETAAGAYPELAVRTMAKICLQAESCVDHAAVFKSITASAPIPMSPLESLASSAVRTANSAKAALILVLTRGGTTARLVAKYRPSMPILSVVVPELKQTDSFDWTCSDEAPARHSLIVRGVIPMLSAATAKAFDNEATEEALGFAISNAKAMGLCNSGESVVALHRIGTASVIKLLTAN

SEQ ID NO: 30020 - protein, 355 aa, Oryza sativa
MKHGYVRECEYVAIFDADFQPDPDFLRRTIPFLVHNSDIALVQARWRFVNADECLMTRMQEMSLDYHFTVEQEVSSSVCAFFGFNGTAGVWRVSAVNEAGGWKDRTTVEDMDLAIRASLKGWKFVYLGDVQVKSELPSTFKAFRFQQHRWSCGPANLFRKMLMEIVRNKKVTIWKKIHVIYNFFLIRKIIAHIVTFAFYCLIIPATIFVPEVRIPKWGCVYIPTIITLLNSVGTPRSFHLLFFWILFENVMSLHRTKATLIGLLEAGRANEWVVTEKLGNALKMKSSSKSSAKKSFMRVWDRLNVTELGVAAFLFSCGWYDLAFGKDHFFIYLFFQGAAFFIVGIGYVGTIVPQS

SEQ ID NO: 30021 - protein, 101 aa, Oryza sativa
MQPLSTKKGNDEIFIKLGSDKDKKKENAERDERAKKSVSINEFLKPAEGERYYGGRGRGRGRGDRGGRGYGGGYQRGPYSTSAPSIEDQAQFPTLGGKPRA

SEQ ID NO: 30022 - protein, 108 aa, Oryza sativa
MAPKKDKAPPPSSKPAKSGGGKQKKKKWSKGKQKEKVNNSVLFDQATYDKLLSEVPKYKQITPSVLSERLRINGSLARRAINDLMTRGLIRMVSVHSSQQIYTRATNT

SEQ ID NO: 30023 - protein, 40 aa, Oryza sativa
MNRKPGYGAELRANLEPTKGVGRLRQQDGGHGSRNPLRSV

SEQ ID NO: 30024 - protein, 258 aa, Oryza sativa
MIQTSQQIGDAPYGDHFTVEGIWDVEQDSLDESSCYLRVYINVAFSKKTIFRGKIDQSTKDECRDVFGLWVKLGHDLLKQDSSCHSRGPSSSTNVDDPSGTTLSSENPLENTDPGSSSAPDEPVVRSIVPSIHDHQQSIVWDSIISTSQELWRSLLSYIQSSQLGPVLALTLVAIIVLLQVTIIVLLLRSPKVYMVNQETSPSGFSYSKESIEWVQKRLNLLGEEMRMAESHLEMMQHEFAWLKSHLERLQRLRSSSS

SEQ ID NO: 30025 - protein, 274 aa, Oryza sativa
MGLLSNRIGKETLKAGDHIYSWRAAWVYAHHGIYVGDDKVIHFTRGRGQEVGTGTFIDLLLMSSGPNTNTPCSICNNEGATTNTETNGVVSSCLNCFLSGGALYRFEYAVNPALFLAKARGGTCTLAPTDPDEVVVRRANHLLSNGFRCYSLFKSNCEDFAIYCKTGLLVAEQGVVGQSGQAISIIGGPLAAVISTPFRLVTTNIYGMAVMAVGVYCASRYAADIGNRRDVLKVEVEDLTAGLASGRIRAVENISQLVAPAEAQGLAVTAPVAA

SEQ ID NO: 30026 - protein, 431 aa, Oryza sativa
MTGAVSKLAAPRPAAAAPLPPASVRSAFLASAPSPRRFSVSIAAGRARSPIIAMASAKEGNGAPTKRTTLHDLYDLQGQSPWYDNLCRPVTDLLPLIGSGVRGVTSNPSISQKAISTSNAYDDQFKQLILAGKDAESAYWELVIKDIQDACKLFEPIYDQTDGADGYVSVEVSPRLANDTQGTVEAAKWLHKVVDRPNVYIKIPATAECVPSIKEVIANGISVNVTLIFSIARYEAVIDAYIDGLEASGLSDLSRVTSVASFFVSRVDTLIDKMLEKIGTPEALALRGKAAVAQAKLANQLYQKKFSGPRWEALVKKGAKKQRLLWASTSVKNPAYPDTLVDPLIGPDTVSTMPDQALLAFIDHGTVSRTIDANVSDAEGVYSALEKLGIDWDEVGKQLELEGVDSFKKAFDSLLGSLEEKGNSLKKTVSL

SEQ ID NO: 30027 - protein, 209 aa, Oryza sativa
MPSGSYNIAQVTYELNVLGTRGPRRMHCVVHSIPASSVEPGGIVPGQPEQIVPRAFEESFRSTTSFSKSSIMDRSMDFSSSRDFSSARFSDIAGGTINGDEEGQNKERPLVLRNKAPRWHEQLQCWCLNFRGRVTIASVKNFQLIAAPAQPPAGAPTPSQPAPPEQDKIILQFGKVAKDMFTMDYRYPLSAFQAFAICLSSFDTKLACE

SEQ ID NO: 30028 - protein, 72 aa, Oryza sativa
MSCSCGSSCGCGSNCTCGKMYPDLEEKSSSAQATVVLGVAPEKAHFEAAAESGETAHGCGCGSSCKCNPCNC

SEQ ID NO: 30029 - protein, 451 aa, Oryza sativa
MISQFFVLSQRGDHIVFRDYRGEVPKGSAEIFFRKVKFWNDDEAEEAPPVFNVDGVNYIHVKVAGLFFVVTTMVNVSPSLLLELLQRIARVTKDYLGVLNEDSLRKNFILVYELLDEVIDFGYPQTTSTEVLKSYIFNEPIMVDAGRLPPLGPAAMFMQGTKRMPGTAVTKSVVATEPGGKKREEIFVDIIERISVTFSSSGYILTSEIDGTIQMKSYLTGNPEIRLALNEDLSIGRTGSSSYDYRSSSGGGAVILDDCNFHESVHLDSFDIDRTLHLIPPDGEFAVMNYRITQEFKPPFRVTALIEEAGPSRAEVLLKIRADFSANVTANTIVVQMPVPSYTMRASFELEAGAVGQTTDFKEGSRRIEWNLKKIVGGSEHTLRAKLTFSQESHGNLTKEAGPVNMNFTIPMYNTSKLQVRYLQIAKKSKTYNPYRWVRYVTQANSYVARL

SEQ ID NO: 30030 - protein, 31 aa, Oryza sativa
MEAAEEAPAAEAESSSMQEEDKGTDAAPMDI

SEQ ID NO: 30031 - protein, 35 aa, Oryza sativa
MMSRKANQKFRPQFRPCCTLLFGLHLLFSFLLIVY

SEQ ID NO: 30032 - protein, 117 aa, Oryza sativa
MSFFLLAPVAFLTEGIKITPTVLQSAGLNVKQVLTRSLLAALCFHAYQQVSYMILARVSPVTHSVGNCVKRVVVIVTSVLFFRTPVSPINSLGTAIALAGVFLYSQLKRLKPKPKAA

SEQ ID NO: 30033 - protein, 65 aa, Oryza sativa
MKAWQGRILCFLACVSWQLSGIGYIGTSKYSVMSGRENLLWICPRSLEFIYFLQGWLALALAHFM

SEQ ID NO: 30034 - protein, 301 aa, Oryza sativa
MRLIWLGANSELQLKILSAFHCSAVGGHSGIQVTYSRVRRLFAWPGLKQAVRQFVSNCSICKQAKAERVRYPGLLQPLPVPEHAWVTVSLDFIEGLPSSAGFDCILVVVDKFSKYAHFLALVHPFTAFDVALAYLNNVYKLYGLPHHIISDRVRIFTSALWTELFQLTDTRLKLSTAYHLQTDGQTERVNQCLETFLRCFVHACPKKWFRWWALAEFWYNTAYHSALERSPFEVLYGHPPRHFGVSSTAECAVPDLDKWLKERAVISSLLRQHLLRAQQRMKFQVDKKRSDREFATGDWVF

SEQ ID NO: 30035 - protein, 372 aa, Oryza sativa
MAPRNRSSARRPLWIVILIAFVCAVGIGAYLYTPQHYTPCYLVSSNSCSSRPPPEPARVYTDDEIAARIVIRDIILAQPVQSKNPKIAFMFLTPSSLPFEKLWEKFFMGHEDRYTIYVHASRERPVHASPIFNGRDIRSEKVVWGTISMIDAERRLLANALQDPDNQHFVLLSESCVPLHNFDYVYSYLMETNISFVDCFDDPGPHGAGRYSDHMLPEIVKRDWRKGAQWFTVKRQHAVLILSDFLYYAKFKRYCKPGNEWHNCYSDEHYLPTLFNMVDPTGIANWSVTHVDWSEGKWHPKAYRAVDTSFELLKNISSIDESIHVTSNAKHQVMRRPCLWNGMKRPCYLFARKFYPEALDNLMNIFSNFTII

SEQ ID NO: 30036 - protein, 324 aa, Oryza sativa
MAAAAPALPAFASLLLPSSSSPPRRIPWPRPLPSRRGALRPVKLLPAISAVEKGKGAAAEAKEVELEGMPPEYYDEEWQARQREKTKEWNAYRKKEEAEEERLTNEYREIGMRLKAYPQEEVRKARILVSSFIRAGEDIEEEIEKAAERGELTELVLMVIWNRLDVARRDDERDAIRSLDLLYRRVETEILRSEATPAMRLLNDLLNLHDGSDDDKWLKKCKKHMLEVFPREDPFTMVFPAGFNMEEHQGQIKLPPQDDDVLLRVDFIREVDELLKEVQAAHENNKVPTGNDPEAVATKLKYQEKLRTIRQVESLLELASSLKW

SEQ ID NO: 30037 - protein, 443 aa, Oryza sativa
MAALHGHGFAVTVLLVVLLVQCDAAEATTCAGAVPARPRPETVSIAEFGGVGDGRTVNTWAFHKAVYRIQHQRRRGGTTLLVPAGTWLTGSFNLTSHMTLFLARGAVLKATQETRSWPLAEPLPSYGRGRELPGARYTSFIHGDGLRDIVITGDKGIIDGQGDVWWNMWRQRTLQHTRPNLLEFMHSSGIHISNIVLKNSPFWNIHPVYCDNVVITNMMIIAPHDSPNTDGVDPDSSTNVCIEDSYISTGDDLVAIKSGWDEYGIAYGRPSSGITIRRVRGSSPFSGIAIGSEASGGVSNVLVEDCSIFNSGYGIHIKTNIGRGGFIRNITVDNVRMNSVRNGLRIAGDVGDHPDEHFSQLALPTVDAVSIKNVWGVNVQQPGSIEGIRNSPFTRICLANVKLFGWRNNAAWKCRDVHGAALGVQPGPCAELTTSLSSGFCSY

SEQ ID NO: 30038 - protein, 362 aa, Oryza sativa
MALRRLLQGSVLPRMAGRAAAAPFSTASGETVRATLFPGDGIGPEIAESVKQVFNVAGVPIEWEEHYVGTEVDPRTESFLTWESLESVRRNKVGLKGPMATPIGKGHRSLNLTLRKELGLYANVRPCNSLPGYKTRYDDVNLVTIRENTEGEYSGLEHQVVRGVVESLKIITRQASLRVAEYAFHYAKTNGRERVSAIHKANIMRKTDGLFLKCCREVAEKYPEIVYEEVIIDNCCMTLVKNPGLFDVLVMPNLYGDIISDLCAGLIGGLGLTPSCNIGEGGICLAEAVHGSAPDIAGKNLANPTALMLSAVMMLRHLQFNNQADRIHNAILQTISEGKFRTADLGGKASTSDFTKAVCDHI

SEQ ID NO: 30039 - protein, 220 aa, Oryza sativa
MPGLTLGDVVPDLELDTTHGKIRLHDFVGDAYVIIFSHPADFTPVCTTELSEMAGYAGEFDKRGVKLLGFSCDDVESHKDWIKDIEAYKPGRRVGFPIVADPDREAIRQLNMIDADEKDTAGGELPNRALHIVGPDKKVKLSFLFPACTGRNMAEVLRATDALLTAARHRVATPVNWKPGERVVIPPGVSDEEAKARFPAGFETAQLPSNKCYLRFTQVD

SEQ ID NO: 30040 - protein, 338 aa, Oryza sativa
MAPLSWRHHTLLQALLSRGPLSERDFHALFSAISGGKNPATHRQLFDDTLLKINKELTYLQFELRAGINQYDGTVYYGVVNNIADEESKLGSKFSVPQIAFYKGLLEAIVHEAGNDGSITNIDALNTRIENQVVIAGASQGSQSRLPTSITNFSLSQKEKTLNELIQDRWLSYTPTGKIGLGIRSFLDLRSWLRSNDIPSCEVCNEACIKASCCPNEECNVRIHGYCLKKKFSQRKASRACGCGTEWPRLEGEDDGAEDEDVNEPEEDQVPSANQHSRTRRRGVKSELVEENERAGPSARMTRRALRSSKAEAVEAAQEVPSAAGPSQSTRASKRRKN

SEQ ID NO: 30041 - protein, 77 aa, Oryza sativa
MSASSFSFSLQGHRGLSSLESYLWGLYGFDSARLGIADDAAIWWGAPKSTAADRWLLPAASSSSSQKIMLSLFFGGS

SEQ ID NO: 30042 - protein, 131 aa, Oryza sativa; identical to SEQ ID NO: 29093

SEQ ID NO: 30043 - protein, 84 aa, Oryza sativa
MLMLRRLCRPCRSAGICPESWLTARRRTPSLVRFPMEAGMTPERALLPRSRSSRRCSLPISSGIEPVRFVMVRSRTERKDRLPM

SEQ ID NO: 30044 - protein, 268 aa, Oryza sativa
MDASSPFSFHELRRQASSYLTDKIRSARLALTDVTPTQLMTEEATSGDASPPNVKTMSLIARQAFEIDEYVRISDILHKRFARFDRRQWREAYKALLLLEHLLTHGPRSVALEFQRDREVIEQMVSFQHIDEKGFNWGMTVKSKSERVLRLLERGPFLEDERERARKIAHEIKGFGSFNLSSAHASGSAAAALRAGAMEHQCYGRSNSRYEGRWRREACVDDGDKENLLVVSMAEAKAEAAAEEPHHYHHPFYGFGQQRPEAMLLLSQ

SEQ ID NO: 30045 - protein, 196 aa, Oryza sativa
MTRHVSMISITLSPRDLDKNSPGYQTPVYVEQPRQQPRLQQAPPPPQRQVRQPPPDYEDSYVRGRGRGRGRGRGRGWGRGGYGGYGGYGNNQGGYNQGGGYYDNQGGYGGCDNQGGYGGYDNQGGYGGGGYGYNQGRYGNYQENGGYNRGRGGMRGRGNWNYRGGYERGRGGGFPGGRGYGGRGRGRMGGRGGRGN

SEQ ID NO: 30046 - protein, 395 aa, Oryza sativa
MGGAAAAAAVALLAATRRRPAAGPLAFLLPRAARAGLHEAAAPAAEEEKGRTRRRRRRRSSSSRLLGPDIPDTWDSPPRAAARPSPPSGAGVDYDSTATIIDGKSVAEDIRFQIAEEVRQMKNAVGHVPGLAVVLVGDRRDSESYVRYKIKGCEEVGIKSLLAELPGNCTEDVVVDSVSRFNEDPSVHGILVQLPLPQHMDEERILSAISLEKDVDGFHPLNVGNLALRSRKPLFVPCAAKACLELLLQSGIELMGKHVTVIGRSKVVGLPTSLLLQRHHATVSIIHAFTTNPEEITRQSDIVISAAGVANLVRGSWLKKGAVVIDVGTNPIEDPTSDYGYRLTGDVCFEEAVKLASAITPVPGGVGPVTIAMLLANTLDSAKLAYGLATESPEL

SEQ ID NO: 30047 - protein, 436 aa, Oryza sativa
MQITSVDRYIKYHVQEFERAFRERFPACTLAAKRHIDSTTTILDVQGVGFKNFSKTARELINRMQKIDSDYYPETLHQMFVVNAGSGFKLIWNSVKGFLDPKTSSKIHVLGSNYQSRLLEVIDSSELPDFLGGSCSCSDKGGCLGSNKGPWNDPFILKLIHNLEAGCVREIKPVSDGEERSSSSLRLEQPKWQGMISDISNAESGSDVDDFGSFFQKGVDYGYLTPVHEEVRGTDSLTYYSCDDQTRRDIAPESCKGVQATGMVQNQLPDNRQPSTNRNPHDSGNNGHLDGAFARRSLQNYIQVVVTTFIKLLSFLRLFISRPVRRLENVHSCTVPVPSEEKPEPRSIRDDDMTMCLQRLDSLESLCNHLASRPPEIPREKEHMLLNSFERIKCIEADLERTKRVLHATVVKQKALVETLEAVQESSRARKRLFCS

SEQ ID NO: 30048 - protein, 163 aa, Oryza sativa
MDVSQIQFNYWIFFFNAVAAFALNISIFLVIGRTGAVTIRVAGVLKDWILIALSTIIFPESIITSLNIIGYAVALSGVVMYNYLKMKDVRANQLPADIAPDRATKDKKISNIYKPDNFMDSNDETTVGSLAPEGAGVDEEAPLIPSSRLSYVTRTQTGSFNSR

SEQ ID NO: 30049 - protein, 78 aa, Oryza sativa
MLTCIACSKQPGGGGGEPLHEPPEDEDAVDGGGGGGGATPSTRLAIKALTAQVGFSVLHSRESRLSLCVLEALLFLSC

SEQ ID NO: 30050 - protein, 229 aa, Oryza sativa
MKLHVVAAILLAVAASSSPPPAAAVTYEVSNEAASTAGGQRFDREYGAGYAKQVLAAASSFTWSIFSQPSAADRRPVDAVVLAVRDVDGIASTSGNTITLGAGYVAGVTGNDFKTQVTGVLYHEVVHVWQWGLQDYGAHSWVYEGIADFVRLRAGYPAAGWVQPGQGNSWEDSYSVTARFFDYCDSVKPGFVADLNAKLKNGYNVDYFVQITGKTVQQLWQDYKAKYGN

SEQ ID NO: 30051 - protein, 308 aa, Oryza sativa
MALAAPLLRLRLLPLAAFVSVVSLTAAPRRAEAWGKQGHIIVCKIAEKYLSEKAAAAVEELLPESAGGELSTVCPWADEVRFHYYWSRPLHYANTPQVCNFKYSRDCHNSRHQQGMCVVGAINNYTDQLYSYGDSKSSYNLTESLMFLAHFVGDVHQPLHVGFEEDEGGNTIKVHWYRRKENLHHVWDNSIIETAMKDFYNRSLDTMVEALKMNLTDGWSEDISHWENCGNKKETCANDYAIESIHLSCNYAYKDVEQDITLGDDYFYSRYPIVEKRLAQAGIRLALILNRIFGEDKPDGNVIPLQVQ

SEQ ID NO: 30052 - protein, 146 aa, Oryza sativa
MPSDPYERAVARFWAAYVDDKVRPAWLAILFGSKTEEERAAAVAQAVAALETLEGAFGECSKGKPFFGGDGVGFVDVVLGGYLGWFTAIDKLIGRRLIDPARTPALAAWEERFRATDAAKGVVPDDADKLLEFRQTLLRWSASKAK

SEQ ID NO: 30053 - protein, 359 aa, Oryza sativa
MVTELRWKEGSLESGRQHLLRTIDSYIADERVGLVKPADGVELYLCPSQGKAAQILAEHLPKEQSSSLTVTGTSAIGVVVWRRPHVSPRIPARNDGSRNQSISRKQHAVIASAVPLSSKPTNERQHHGQDVVTDDVPPGFGPGVVREDDDLPEYDFVTVPNAAANVVPSRQAHRSQQQHSQAASRRPVDHVREMVRKYGSRSAAAAQPWEDDDDDDIPEWDPNQSNLNLQQTRHAIPQPPLPPPGPVHQQMHAYHQQHQQQQQHYQSIQQYHATQESQNTLSQAYYVQSHSQQHSVPVQQLTHLQPGWQTTAQWLAAGAAHSGLPANNVVQQYCTSATPDGSGQGYATGNQGSMPWNLQ

SEQ ID NO: 30054 - protein, 110 aa, Oryza sativa
MEFCPGCGMLLQIQPATGGNRLRFYCPTCPYVCPVKNKIVKKARLVKKEVEPIFSDSDAMKNAPKTTTTCPRCQNGEAYYRQMQIRSADEPMSTFYKCCREECQFDWRED

SEQ ID NO: 30055 - protein, 306 aa, Oryza sativa
MADAKQQQQQQTAAAATGVWKTVKPFVNGGASGMLATCVIQPIDMVKVKIQLGEGSAAQVTKNMLANEGIGSFYKGLSAGLLRQATYTTARLGSFRVLTNKAIEKNDGKPLPLVQKAFIGLTAGAIGACVGSPADLALIRMQADSTLPIAQRRNYKNAFHALYRIIADEGVLALWKGAGPTVVRAMALNMGMLASYDQSVELFRDKLGAGEVSTVLGASAVSGFFASACSLPFDYVKTQIQKMQPDASGKYPYTGSLDCAMKTFKSGGPFKFYTGFPVYCVRIAPHVMMTWIFLNQIQKFEKQIGI

SEQ ID NO: 30056 - protein, 67 aa, Oryza sativa
MMLEAGTVVLEERSLGIVTMTVIVTMTAIVEEKGLMITEIEDQNIEAVPTEMVGILKETDTDIGVMT

SEQ ID NO: 30057 - protein, 223 aa, Oryza sativa
MYAAMYPETFGFSAYPQQQQPPPDAASCIYTTALPLIADPPDILGNMAQPSFLSEYDLGGEGDLFKAPEPIIEEPVLSLDPVAAAISMMSGSENVMDETIEVADISDIQNDSLLSEVLYECEKELMEKSAIEETISELLDVKIPMLQVEEFPRETQVQLPAMEKEKPSVPECCSLQKSVSSGCLNSADWINGPARPNFLDFQGLDFETAFGLRRAYSEGDIQV

SEQ ID NO: 30058 - protein, 447 aa, Oryza sativa
MVAASNDGIASTTSASTAPFTFSSSGNNTFGFNSPAQPAGFSTSVDGSTTQPSATSTIFGSKLPQSEGTMSQPSKSSPVQFSSPFQTVTTTTGASSSGSGSVAFGVGTASTGSGITSFGTGASSSWPSTVSFGLGASSSGTGALLFGAGASSSGTGALPFGAGASSSGTGALSLGAGAGTSSSGPGTVSFGAGTSSGPGTVSFGVTTSSSGSLFGNSPFGSGTTFSGPGSGFAFSSPSSSAGSSLTMASTSMFSTSSTASSSPAFSNPFGSSSSPPSMFTFGQSASSGGGFSFGAQSSPAFSSQAPVFSFTSASMNSSTPQPAFGMTNANTSFGMGSPGNDQMNVEDSMADDTNQAAPAPAPIFGSSPFGQPASSPAAPVFGAPAVPSAGVFQFGGQQGSMQQNAAFPPAGGSLEFQGGNFSLGSGGGGGDKSSRRVIKVKRNPKKR

SEQ ID NO: 30059 - protein, 98 aa, Oryza sativa
MLLDDTSSSGKPPDNELRDKFSLSKPVRSPRDGEMLPSRPLDAREITSTTAPFPLQVMPSQVQQSVPFCHDTPRPPSFDSPERNWRRDSLSCSVHEPA

SEQ ID NO: 30060 - protein, 28 aa, Oryza sativa
MVPLSARVAFMSSCAIFWNFYLSTTMSK

SEQ ID NO: 30061 - protein, 275 aa, Oryza sativa
MAALGQLLLTVFLAAALLPLAMAATTTTYPIGSFCWEPGMNYGDLNGSDAVVRRRSINFVVSDLVAKARTGGGFATSKAGRGYDAFYGLAQCRGDVSGGDCDACLAQAAKQMVSYCNYTSDSRLWYEYCFMRYDNYNFLGEVDTREDASVTMRQWPDMDNPKAFQKAAGKAMGKATAQAVAVGSSGLGRAKEQYTPFVSVYALAQCTRDLSPPSCAQCLSAAVSKFDKACGSGPGCQIDYSSCWARYEIYPFYFPLAAAGRATIDMTKYTKVTVH

SEQ ID NO: 30062 - protein, 195 aa, Oryza sativa
MAAESIDAELRLGLPGSGGGDGVAAKKRRSASSTVKSEASGTACCGGAGARDVEDGASPASKVQVVGWPPVGSYRRSTFQSSSSSTAAAAKGKGGGETDQGRKNKGGGLYVKVSMDGAPYLRKVDLRMYGGYRELRDALDALFGCFSADASASAAHFAVAYEDKDGDLMLAGDVPWDMFISSCKKLRIMRGSEAR

SEQ ID NO: 30063 - protein, 82 aa, Oryza sativa
MGQESIHGAEERAETPPPAMRKLQGPWLSSPEGACACAGRRLHAFLNPTSPARRRSVWRFGAWTMSRRSLMVTGGTGCGGAR

SEQ ID NO: 30064 - protein, 83 aa, Oryza sativa
MWLFIYLLTRNGSRAGLKKDLRVSRVGPGGSLNAFLFLPIGVISQGLAMVRGRRGRSTLEERSTTESCMLRSGRMNRSRKGVY

SEQ ID NO: 30065 - protein, 215 aa, Oryza sativa
MESSRGKPGLNGSGGGAAAFDYSSRRGYYTGAGAALPPLAAGSGAPPVDPCCVVLRVFVLLGTLASAVVMAADRQSTTVQIAAGEELAPPLRVPVTAKWTYSSAFVYFVVANAMVFAFSAAALAAVRRRSAVVPVMVGDLVAMALLFSAVGAAAQFGLLGERGNAHVRWAKVCDVYGPFCERAMAAVVVALIAAFADLVLLMLTILTIHKASSYY

SEQ ID NO: 30066 - protein, 309 aa, Oryza sativa
MEYERIPSKILVYQASDDPLYSGYRAAVEASAQEETLLGFAIWEPPHGAYKMMKYPWRNFTKVGGALRHCSFAVMALHGCILSEIQAPPESRKVFSAEIQRVGIEGAKVLRELGDKVKTMTKLSSSDILAEVHLAAEQLQKRIDEKSYLLVNTERWDTSKQAEGIKEVLNGTGIMGKENKIEVKEPTIVEQTTAHHSKSFAVNSFLSRHDSSSTVDFKLLSWPARRSFHPNLPLEDEETKTYESASALSLATFASLLIEFVARLQNVVNAFQELSDKANFKEPVQEPVAVSTSDGGFLHKICKFVGIKS

SEQ ID NO: 30067 - protein, 109 aa, Oryza sativa
MEAAAAAGVQLGTSKPQIATQAEMSEARLPLPYRDQCAHLLIPLNKCRVAEYYLPWKCEPERHAYEKCQYELVMERMIQMQKIREAQEAKSKGAATIGVPLIPSTAKLS

SEQ ID NO: 30068 - protein, 152 aa, Oryza sativa
MNEILALVSSEAPSTQPTLIVPFMTRSPNYYHGAKTGQLATLHGAEIGATTEFTQMLVDGTTKLPQSLQVRSEPILCLLEMVRVLNIPTVILFASGGQHQGKSSTDVDLEVLQCVGDHLAKHINLEFSKETVLQRGIEKSPVFQEPWRELYQ

SEQ ID NO: 30069 - protein, 63 aa, Oryza sativa
MEACMHPFFDELRDPNTRPPNGRPLPPLFNFRTQELNGIPPEAIERLVPEHARRQSLFMALRT

SEQ ID NO: 30070 - protein, 148 aa, Oryza sativa
MASKRIQKELMDLRKDPPTSCSAGPAGEDLFHWQATIMGPSDSPYAGGVFFVNIHFPPDYPFKPPKVNFQTKVYHPNINSNGSICLDILKEQWSPALTISKVLLSISSLLTDPNPDDPLVPEIAHVYKSQRPRYEETARAWTQKYAMG

SEQ ID NO: 30071 - protein, 491 aa, Oryza sativa
MAAVREVGSKAELEAAAGGARAAAVHFWAAWCEASKQMDEVFAHLAVDFSHAVFLRVEAEEQPEISEAYGVTAVPYFVFLKEGKTVDTLEGANPASLANKVAKLAGPASVAESAVPASLGVAAGPAVLEKVQEMAQQNGASATSSAEDALNKRLEQLVNSHPVFLFMKGTPEQPRCGFSRKVVDVLKQEGVEFGSFDILTDNDVREGMKKFSNWPTFPQLYCKGELLGGCDIVIAMHESGELKDVFKEHNIPLQPQGSKNEEAVKAKPDTEKSGAVSEPALLTAAQKERLESLVNFSTVMAFIKGTPEEPKCGFSGKLVHILKQEKIPFSSFDILTDDEVRQGLKLLSNWPSYPQLYINGELVGGSDIVMEMHKSGELKKVLSEKGIVAKESLEDRLKALISSAPVMLFMKGTPDAPRCGFSSKVVNALKQAGVSFGAFDILSDEEVRQGLKTYSNWPTFPQLYYKSELIGGCDIVLELEKSGELKSTLSE

SEQ ID NO: 30072 - protein, 28 aa, Oryza sativa
MDLRSQSTLRGIEDCSYFVNLLKFLFLW

SEQ ID NO: 30073 - protein, 436 aa, Oryza sativa
MAAPPATASAPSLRPSAASPRAAAARSVAVPSGPRTVGPRRDGGRFLGVRAAKAVSGVQSGTVVDDGVQRPWKLSDARLVLEDGSVWKAKSFGASGTQVGEVVFNTSLTGYQEILTDPSYAGQFVLMTNPHIGNTGVNPDDEESNRCFLAGLIIRNLSICTSNWRCTETLEEYLMKRNIMGIYDVDTRAITRRLREDGSLIGVLSTDQSRTDDELLEMAKNWKIVGVDLISGVTCDAPYEWSDKTDSEWEFKKGQSTESFHVVAYDFGIKHNILRRLTSYGCKITVVPANWPASEVLNLKPDGVFFSNGPGDPAAVPYAVKTVQEIIGKVPVFGICMGHQLIGQALGGKTFKMKFGHHGGNHPVCDLRSGRVDISAQAFRITGVGRGAGLLAVTLPDENLELLRNHNYAVDPESLPEGVKVTHINLNDKLCRPSVP

SEQ ID NO: 30074 - protein, 214 aa, Oryza sativa
MGLREKKRNQRRVLARRSAAPRSGEGKDFLPLEERPGKKRAREEQPEEPENTSTVLYIGHIPHGFYEEQMQGFFQQFGTVKRLRIARNRKTGKSKHYGFIEFENPEVAKIVADEMNNYLLFEHTLQIAIVPPEKIHPKLWKGVRRGFIPIDRVAIERRRLNKDKTIEEHKKLVDKIVKRDEKRRKRIKAAGIDYECPPLIGSVQPSAKKIKFED

SEQ ID NO: 30075 - protein, 289 aa, Oryza sativa
MELQHLDDAIARQQVKDKDSAVLQALTSRRQVILDNIRDNDEAGAGYRKDIELNESRKRQLQDMIEEATSNNGNRTYLHILSQYRLLGMTNAELQIEMAMRDQVIYNQRESLRSLWNIIYGTGLNQKQISKLAAKQGLTIEGCPLPVSSPDVTTPPSFSPHGRLSPFMSFPSPQSQPYSPSACFVQHGFSTMSYLRNQHETPTVCRQEHLSSYYMMSECSPFDGDGKQKTNGRSMPYFSTPGKPKEMYNFSPGTESERTPCSKEYPTSYSRNGDSLVQIKDSWYTEERQ

SEQ ID NO: 30076 - protein, 55 aa, Oryza sativa
MPRHLISDAHEWINEIPTVPVYYPAKPQPRERAWRNQRGKKTLLSLTLVRLCEMT

SEQ ID NO: 30077 - protein, 147 aa, Oryza sativa
MKQSAIGYIARSSLLSKGVSSFVSFIGSLQASVTRGIMRRLLGPSWSVTAVEATCGHLLWYHTMRNVLFMAMTEFTKLSEEPDWNFISAKQDQIAFLFDVDDHWGPLAHLEEISKRAPGVALSVETEGHTHGYCCTEAGSFWAADCG

SEQ ID NO: 30078 - protein, 193 aa, Oryza sativa
MCDVRVTDSPVSSQLSPIVCQVVDDAKLPVSEQLKSCNALEAADENKENNASGQDGLLEVYIKWESGHLIKGLKLLSNSCLSDLRKLLEDHFEEAGSKQQQQFTFLLLGDPSGAPVSREKEAGVPISKLPSCNNQPNSYLACLRAVKKQPATEQMPFSPLESKLNSALNDVHLAALSPKVNPMSPNYIRELRA

SEQ ID NO: 30079 - protein, 51 aa, Oryza sativa
MGTAPFPYTFCDQLMYGPYMYINCCIPIHLFKTRRHVHEKWLLPWYTYIGP

SEQ ID NO: 30080 - protein, 389 aa, Oryza sativa
MRGGGGGDAGTSSRGGGSGGAPARPRRFPEAAQPEIMRAAEKDDGYAAHVTEACRDAFRHLFGTRVAVAYQNEIKLLGQSLYYLLTTGSGQQTLGEEYCDISQVATSHGLPPTPARRILFILYQTTVPYLAERISSRIVARGIALEDSQLDDHSESDSSSIGTAAQPSPIRNSPSRSLSFSHLSRLRGRVHTLWEWVLRKWPSMLPFAQDFIQLTIRTNLMFFYFEGLYYHLPKRAAGIRYVFIGKPLNQRPRYQILGIFLLIQLCILGAERLRRSNLSTIASSINQISSGGYPSSRGRGVPVLNEDGNIISDIRHGKTADLATSSEASSGKSKCTLCLSTRQNPTATTCGHVFCWSCIMEWCNEKPECPLCRTPITHSSLICIYHSDF

SEQ ID NO: 30081 - protein, 292 aa, Oryza sativa
MAKSCTLVLLLVALVGLSLLVSPIACSRKLSKPKPKPKPSMKKPVVRAHNNYTGSPSVTVTTGWAAAGATYYGAPNGDGSDGGACGYQTAVGQRPFSSMIAAGSPSLYKGGKGCGACYEVKCTTNAACSGQPATVVITDECPGGICLAGAAHFDMSGTSMGAMAKPGMADKLRAAGILQVQYRRVPCKYSGVNIAFRVDQGANPFYFEVLIEFEDGDGDLNAVDLMEAGCGWTPMVQNWGALWRYNSNTGKALKAPFSLRLTSDSGKVLVANNVIPASWKPGVTYRSLVNYS

SEQ ID NO: 30082 - protein, 154 aa, Oryza sativa
MADVEVEAEVAAAGAPKKRTFRKYSYRGVDLDALLDMSTDDLVQLFPARARRRFQRGLKRKPMALIKKLRKAKKDAPAGEKPEPVRTHLRNMIIVPEMIGSIVGVYNGKTFNQVEIKPEMIGHYLAEFSISYKPVKHGRPGIGATHSSRFIPLK

SEQ ID NO: 30083 - protein, 301 aa, Oryza sativa
MPEHGSKPDISFASRFTASAIAACFAEVCTIPLDTAKVRLQLQKNVAADAAPKYRGLLGTAATIAREEGAAALWKGIVPGLHRQCIYGGLRIGLYEPVKSFYVGKDHVGDVPLTKKIAAGFTTGAIAISIANPTDLVKVRLQAEGKLAPGAPRRYAGAMDAYAKIVRQEGFAALWTGIGPNVARNAIINAAELASYDQVKQTILKLPGFKDDVVTHLLSGLGAGFFAVCVGSPVDVVKSRMMGDSAYTSTIDCFVKTLKNDGPLAFYKGFLPNFARLGSWNVIMFLTLEQVQKLFVRKPGS

SEQ ID NO: 30084 - protein, 305 aa, Oryza sativa
MDSCKRHLETMRRCRTDASNAWRTAAWVRVPYPFQWGPPTFHFKTSIIMVIVSLVASVDSLSSYHATSLLVNLSPPTRGVVSRGIGFEGISTLIAGVWGTGTGSTTLTENIHTLENTKMASRRALQFGAVLLVIFSFFGKIGALLASIPVALAASVLCFTWALIVALGLSTLRYTQAASSRNMIIVGFTLFISMSVPAYFQQYEPSTNLILPSYLLPYAAASSGPVRSGSNGLNFAVNALLSINVVVALLVALILDNTVPGSRQERGVYIWSDPNSLEMDPASLEPYRLPEKISCWFRWAKCVGI

SEQ ID NO: 30085 - protein, 65 aa, Oryza sativa
MSRNAMKRRASSMPACSCCAAASAATKPASTASSASAAAARRTTDRDQDRFPGFVSELFVEIIKG

SEQ ID NO: 30086 - protein, 340 aa, Oryza sativa
MIGTEKEGIPEGAIELDPAALPLNFGVAFASVVPESCCSVKVQGSGAEHIGSSSGNNCHKGSVDVGESQHATCANTGFATRTTKAEINEHNARSAVEGTDDDEEPDDFAQAEVLYPESEFFEFSEIRSIHKFQPGQIWALYSDVDKFPNYYACIKTVDVKNNELQVRWLDACPQSEEERRLVREDLTVACGTFKISSFHGIQTYNGTEYLSHPVQAKPGRRNEYEIVPCQGDIWAVFKNWRTGWTAKDYKKCDYELVEIFGHTDSSIQVQLLRKVDGYRAVFMPDRREGAVKTIRKDEYPKFSHQIPCFHLTNERGGKLRGFLELDPLSVPEMFLFTESI

SEQ ID NO: 30087 - protein, 22 aa, Oryza sativa
MNTASAVTVRSTIRRLREQTEA

SEQ ID NO: 30088 - protein, 246 aa, Oryza sativa
MFPGLIHHHRLLDADVGGGGGGSSAGLVLTADPKPRLRWTADLHDRFVDAVAQLGGPDKATPKTIMRTMGVKGLTLFHLKSHLQKYRLGKQSGKEMAEQSKDASYILGAQSGTNLSPTVPTPDLKESQELKEALRAQMEVQRKLHEQVEVQRHVQIRMEAYQNYIDTLLEKACNIVSEQLNGFSISDHDLTSAGVMLSSSDTLSPPIFHQLSVSSISLHSPGGKSSPFAADADLFFQKAPEKRKSY

SEQ ID NO: 30089 - protein, 442 aa, Oryza sativa
MAPVNSFNTLFHTPAFWGLMMPVSVSSMASDVIRGYWAQRILWEIGGYVAFYPPTIYRKDHIQAYPFAEEKDLHVNVGRLIKFLNEWRSNKRTLFERILDLSYAMAEEGFWTEQDVRLTAAWLQDLLAVGYRQPRLMSLETDRQRATIGEGDMKEFVPKKLPSVHLGVDEIGTVNYEIGNLIKWRKNFGNVVLIMHVSGPVDRTALEWRLLYGRIFKTVIILAEQSNTELAVERCALSHAYKFLPKVFARYGGADGFLFLQDHMILNYWNLLQADKEKLWITNKIAHSWVTVPLENNKEEWFVKQGSMVKQVIGSSPVHFQTNYKESMGEDKIAFCGSELFYIPRQFVEDFGDLVGLVGDLELHHKVAVPMFFLAMDSPKNFDSDALAGTVFRSNLVGNETFSSIYTAHAPAVFPVKVQNEIDFIKLIRVMSTGDPLLMELV

SEQ ID NO: 30090 - protein, 102 aa, Oryza sativa
MMSSRGTSAMLSRAARMRQKLQSALEASALDIEDVSYQHAGHAAVKDNANETHFNIRVISPKFEGQSLVKRHRMVYDLLTDELNSGLHAISIVAKTPKESGS

SEQ ID NO: 30091 - protein, 261 aa, Oryza sativa
MAVGKNKRISKGRKGSKKKTVDPFSKKDWYDIKAPTVFSVRNIGKTLVSRTQGTKIASEGLKHRVFEVSLADLQNDEDQAYRKVRLRAEDVQGRNVLTNFWGMSFTTDKLRSLVKKWQTLIEAHVDVKTTDNYMLRLFCIGFTKRRPNQVKRTCYAQASQIRQILRKMVEIMANQASTCDLKELVSKFIPEVIGKEIEKSTSSIFPLQNVFIRKVKILKAPKFDLGKLMEVHGDYKEDVGMKLDRPAETDEAVAGEVAAAE

SEQ ID NO: 30092 - protein, 303 aa, Oryza sativa
MANGLPNPLLTADAARSLVDSVDAFLFDCDGVIWKGDQLIEGVPETLDLLRKMGKKLVFVTNNSRKSRRQYAKKFRALGLEVTEEEIFTSSFAAAMFLKLNNFSPEKKVYVVGEDGILEELRLAGFECLGGPEDGKKNILLEANFYFEHDKSVGAVIVGLDQYFNYYKMQYASLCIRENPGCLFIATNRDPTGHMTSVQEWPGAGTMVAAVSCSVQKEPIVVGKPSSFLMDFLLKSFNLETSRMCMVGDRLDTDILFGQNTGCKTLLVLSGVTTLPELQDASNTIHPDLYTNSVYDLVGLLQQ

SEQ ID NO: 30093 - protein, 185 aa, Oryza sativa
MSLFICIFVTGILEMRWSGVAIDDWWRNEQFWVIGGVSSHLFAVFQGLLKVLAGVDTSFTVTSKAGDDEEFSELYTFKWTTLLIPPTTLLLLNFIGVVAGVSNAINNGYESWGPLFGKLFFAFWVIVHLYPFLKGLVGRQNRTPTIVIVWSILLASIFSLLWVRIDPFLAKNNGPLLEECGLDCN

SEQ ID NO: 30094 - protein, 106 aa, Oryza sativa
MLHHVIAGKELKCYFHSHPQIPNVPNWSVDGIISHAKVNHTKPTDQHQESRKAILKSHADLAFRQKNYDCAAKVYDLFCTQTRAFVDCSWVMVKVLCLMEMPNDAA

SEQ ID NO: 30095 - protein, 486 aa, Oryza sativa
MLPLNAAMPRHDHFGKPVEPRWYSLARPSDDPDKKEGKFASKIQLRMSLDFGYHVLDESTYYSSDLQPSSKHTRKPSIGILELGILGARNLIPMKGKDGRTTDAYCVAKYGPKWVRTRTILNTLNPQWNEQYTWEVFDPCTVITVVVFDNNQIGKNGDARDESIGKVRIRLSTLETDRVYTHFYPLLALKPSGLKKTGELHLAVRFTCTAWVNMIALYGRPLLPKMHYTQPISVMQLDYLRHQAMQIVAARLSRAEPPLRREVVEYMLDVGSHMFSLRRSKANFYRITSLFCGFAATAKWYDGIRSWRNPITTVLVHMLFLILICYPELILPTIFLYMFMIGLWNYRYKPRHPPYMDTKLCHAEFTNPDELDEEFDSFPSSRPADIVRMRYDRLRSVGGRVQTVVGDLATQGERAHALLSWRDPRATAIFIFLSLVVAIVLYVTPFQVLLVIAMLYLLRHPRFRSRMPSVPFNFYRRLPAKSDMLL

SEQ ID NO: 30096 - protein, 372 aa, Oryza sativa
MVTNVVDLRSDTVTKPSDAMRAAMAAADVDDDVLGADPTAHRFEMEMARITGKEAALFVPSGTMANLISVLVHCDTRGSEVILGDNSHIHIYENGGISTIGGVHPKTVRNNPDGTMDIDKIVVAIRHPDGALYYPTTRLICLENTHANCGGKCLSAEYTDEVGEVAKSHGLKLHIDGARIFNASVALGVPVHRLVKAADSVSVCISKGLGAPVGSVIVGSTAFIEKAKILRKTLGGGMRQVGILCAAAYVAVRDTVGKLADDHRRAKVLADGLKKIKHFRVDTTSVETNMVFFDIVDSRISPDKLCQVLEQRNVLAMPAGSKSMRLVIHYQISDSDVQYALTCVEKAAEEILTGSKKFEHLTNGTTRNSYGH

SEQ ID NO: 30097 - protein, 110 aa, Oryza sativa
MGHQLIGQALGGKTFKMKFGHHGGNHPVCDLRSGRVDISAQNHNYAVDPESLPEGVKVTHINLNDNSCAGLRYPKMKLLSLQYHPESSPGPHDSDLAFGEFIEMMKNNRL

SEQ ID NO: 30098 - protein, 381 aa, Oryza sativa
MGGFLGALSSLSATKLGSIAIEAALKRANVDPALVQEVFFGNVLSANLGQAPARQAALGAGIPNTVVCSAVNKVCASGMKATMFAAQSILLGINDIVVAGGMESMSNAPKYIAEARKGSRFGHDTLVDGMLKDGLWDVYGDFAMGNCAELCADNHALTREDQDAYAIQSNERGIAARNSGAFAWEIVPIEVPVGRGKPPVLVDKDEGLDKFDPVKLKKLRPSFKENGGTVTAGNASSISDGAAALVLVSGQKAQELGLQVIARIKGFADAAQAPELFTTSPALAIPKALANAGLESSRVDYYEINEAFSAVALANQKLLGIPSEKINVHGGAVSLGHPLGCSGARILVTLLGVLREKGGKIGVAGVCNGGGGASALVLELA

SEQ ID NO: 30099 - protein, 340 aa, Oryza sativa
MGGVAAGTRWIHHVRRLSAAKVSADALERGQSRVIDASLTLIRERAKLKAELLRALGGVKASACLLGVPLGHNSSFLQGPAFAPPRIREAIWCGSTNSSTEEGKELNDPRVLTDVGDVPIQEIRDCGVEDDRLMNVVSESVKTVMEEDPLRPLVLGGDHSISYPVVRAVSEKLGGPVDILHLDAHPDIYDAFEGNIYSHASSFARIMEGGYARRLLQVGIRSITKEGREQGKRFGVEQYEMRTFSKDREKLESLKLGEGVKGVYISVDVDCLDPAFAPGVSHIEPGGLSFRDVLNILHNLQGDVVAGDVVEFNPQRDTVDGMTAMVAAKLVRELTAKISK

SEQ ID NO: 30100 - protein, 147 aa, Oryza sativa
MASKAGGDGKEAINEQIIANTYGNMRSEMTQLYTKITELEMEVSEHSLVIGAIEPLDHSRRCYRMVGGVLVERTIREVLPAVHRNKEGLEEVIARMHEALEKKKKEITEFELKYKIRIRKADSNADEEEGSKKEGSAQGVLVGPAGQ

SEQ ID NO: 30101 - protein, 144 aa, Oryza sativa
MASSTLWLRPRGEGGGGTRPSCRRCSPPPSPSTCGDGGGGGGGRADPAPDAGGSAVVPPPFPCGGSGEGTYVGGRAGRASAADALPSWRRRTGRRRRTAIRLPPSPRCLSVLSSAASQLFPSQLSTSPLYAEHHDRRRRGRRIP

SEQ ID NO: 30102 - protein, 417 aa, Oryza sativa
MQPPGLAPPAGPAIPNAAVDLFGTNALVEPQASSGATGPVIGGMGVTAGPIPEDFFQNTIPSQQLAARLPPPGIILSRIAQPAPGMSAVRPVHNQNMMANVGLPDGGVPPQAPMQQAQFPQQPGMPMDPISLPDGGVPPQSQPLPSQPQALPPQPHGFQPAIPAMSQPIDLSALEGPGQGKQAPRPPAPTAVRPGQVPRGAPAAECYKMGLAHLEQNQLTDALSCLDEAFLALAKDQSREADIKAQATICAQYKIAVALLQEIARLQRVQGAGALSAKEEMARLSRHLASLPIQAKHRINCIRTAIKRNMEVQNFAYAKQMLDLLYSKAPPSKQDELKSLIDMCVQRGLTNKSIDPFEDPSQFCAVTLSRLSTIGHDVCDLCGAKFSALSAPGCVICGMGSIKRSDALAGPVPSPFG

SEQ ID NO: 30103 - protein, 418 aa, Oryza sativa
MTPLHAAPHHAAAAAAVVSSPSSAPLLLRAKPYHPKAAACSFTVTATTPSRKAFLSCPDHGQAAAGAAPPRSAPASSPALISSVQDLYDFICSGPLVDRIGYTKEKIAGSIDRWLRCGVQVARLFRLNELHLSEAEKARIYHFYIPVFLWCEDQVTEHRAKYKDGDEIPPLVIGVSAPQGSGKTTLVFALDYLFRVAGRNAATLSIDDFYLTAAEQGKLRERNPGNALLELRGNAGSHDLPFSVETLESLLKLTKEGLKMKLPRYDKSAFGGRGDRADPSTWPEVEGPLEVVLFEGWMLGFKPLPNEVVKAVDPQLEVVNKNLEAYYDAWDRFIGSWMVIKIKEPSCVYQWRLQAEIAMRADGKPGMSDEEVMDFVSRYLPAYHAYLPTLYKEGPNGSNPDHLLVVDIDEKRNPMWGR

SEQ ID NO: 30104 - protein, 40 aa, Oryza sativa
MRQVLVDLQENPRASQEHLKNPGVMQKIQKLVSAGIVQMR

SEQ ID NO: 30105 - protein, 83 aa, Oryza sativa
MLIIAIAAHAAPRPSPPRRHHPRHRRLIPLSPSRAAADLHRRAADALHLSADTAHSSAPTQPAPPRIALRLAITAAVDCLHPL

SEQ ID NO: 30106 - protein, 508 aa, Oryza sativa
MDQMRRQRRRECIGVLCSALFFSVLAVAVAAGSGSSSQPPSSSPAPAASSATPAARAPSQRTPPTPATPAKAASPPATNSSSSPRTPAAPAPRPPQPPPATSPAPTKPSSPPAPKPPSPPAPSPSTTPSSPPAPKPSSPPPAATPTTKPSPPPSSPPAPRPSPPLPPRTPPPPPPAAAPKPSPSPPPAPTNSTTNSSSPSTSTPVQLSPNFYAQSCPSVELAVRDVVRSASTLDSTIPGKLLRMLFHDCFVEGCDASVMIEGSGTERTDPANLSLGGFNVIDAAKRLLEAVCPVTVSCSDILVLAARDAVTFTGGPLVPVSLGRLDGLVSLASNVRANIIDTGFSVDAMARSFSAKGLTLDDLVTLSGGHTIGSAHCTTFGERFRVDANGSTVPADAAMNADYAGGLIRACSAVNNTVSSTAAVDCDEGSASRFDNAYFANLLAGRGLLRTDAVLVQNATTRATVEAFARSEGSFFASWAASFARLTSLGVRTGADGEVRRTCSRVNG

SEQ ID NO: 30107 - protein, 211 aa, Oryza sativa
MVSLLTGSLTLSGAAIVTFFYSLGEHGLQTALLYYLKAQFGYSKDEFANLLLIAGAAGMLSQLTVMPVLARFVGEDILLIIGLLGGCTHVFLYGIAWSYWVPYLSAVFIILSAFVHPSIRTNVSKSVGSNEQGIAQGCISGISSFASILAPLIFTPLTAWVLSETAPFKFKGFSIMCAGFCTLIAFIISMRMRAGQSGASEMLAIVQHEQA

SEQ ID NO: 30108 - protein, 289 aa, Oryza sativa
MDTDKVKIYGARVRVDSMAKVAEIEAAEKQKMREKVQKIIGHGINCFVNRQLIYNFPEELFADAGILAIEHADFEGIERLALVTGGDIASTFDNPESVKLGHCKVIEEIMIGEDRLIHFSGVEMGQACTIVLRGASEHVLDEAERSLHDALCVLSQTVNDTRVLYGGGWPEMVMAKEVDGLARKTPGKKSHAIEAFSRALQSIPTIIADNAGLDSADLISQLRAEHHKEQSTAGIDVISGGVGDMEKLGISESFKAKQAVLMSATEAAEMILRVDEIVTCAPRRREDRM

SEQ ID NO: 30109 - protein, 143 aa, Oryza sativa
MGRKRKELLSSAPWRTGEAAEDDDEAARLSREGKVSVTSNPGETPTMHVPRNKRQDLDLAVDDFDEDEIDPELRYSFQRNSRFLRRVFSVDTLVKPLPPVMAYSVSRNVNFFFKIFTQFWDEEGIANAQKSLGLGNEDGSRRR

SEQ ID NO: 30110 - protein, 34 aa, Oryza sativa
MGPTDIEIADEGHGAISLRDTSPILDTMESGRRG

SEQ ID NO: 30111 - protein, 271 aa, Oryza sativa
MGALPRALVLGVCAAVLLVNVLAVAADGDAAAAASMVVGLAKCADCTRKNMKAEAVFKGVRVAIKCKNSNGEYETKATGEVGKSGAFAVPLAADLLGDDGELRQQCFAQLHSAASNQPCPGQEPSWIVNAAADKKKTFVAVAGDTHFPSSECASAFLCDPFHKKDFFFHYKNPSPPAPAAYHKPPPSYTHPAPPVYSYPTPAYSHPTPVYKQPLPTPSPPIYHPPAEEKKVAMQDDAEADPELFKKLLPLIKKNPFLKFPKLPPVEVEAKP

SEQ ID NO: 30112 - protein, 319 aa, Oryza sativa
MEIFRPQKELASSQSGLKGKFKITTRCLWLDNGRLLDALYKAAYAALSSCPVNCPLSHMERMVSEILRKMVRKYSGKRPDVIAVATENTTVSFVEDSETKSSGKFGSFSAPRHSSRSSGRGLEESDKSCPENTEGEAKENLPDVLGTTRDDATTSSNGEAFFSSDLHKPKTLEHFWDSFKSPTAVKIARIVNGSAQGSKSKIGKISIVGKDSSDPSSAPVKSSKKNKWKPEEIKSLIQMRGEMNEQFQTVKGRMVLWEEISSSMLSQGISRTPAQCKSLWTSLVQKYEESKKDEESVKTWPYFLDMDRVLSSQGEMATQ

SEQ ID NO: 30113 - protein, 585 aa, Oryza sativa
MGFDVGVVAFNPEGWGPPDTAPAPASLGGGAAAASIPFAPFSRSDKLGRIADWTRNPAGPAALAAASRDSVFDFTSVDDSLAAAAEDSSFRLVDAKPPPRHPRFGPKWRFNQRPQLPQRRDEEVEARRREAEKERARRERHFQNNRSHHHPGFRGNQSSSAKSSVDIQPDWTMREQIPFANFTKLSFSVADQPEDLLLCGAVEYYDRAFDRVNPKAARRLERFKSRNFFKVTTTDDPVIRRLAEEDKATVFATDAILAALMCTPRSIHSWDIVVQRVGNKLFFDKRDGSQLDLLSVNETAQEQLPENKDDINSAHSLAVEATYINQNFSQQVLLRDGEKVTFDEPNPFASEGEEAASVGYRYRRWKLDDEISIVARCEVHAVNADPGGGRQFLTLNALNEFDPKITGVDWRQKLETQRGAVLATELKNNANKLARWTCQALLAGADMMKLGYVSRVHPRDHYNHAILTVMGYKPRDFATQINLNTSNMWGIVKSIVDICMKFEEGKYVLVKDPAKPQVRIYEVPSDAFENDYVEEPLPEEEQVRPPSDDVDATAEEMDAAAEAEANNAAASAGGEGEKSAEAAAA

SEQ ID NO: 30114 - protein, 173 aa, Oryza sativa
MGLRSTLPLPHWTVVVSQVLFFFVLEDFIFYWGHRALHTKWLYQHVHSVHHEYATPFGLTSEYAHPAEILFLGFATVAGPALTGPHLFTLWVWMVLRVLETVEAHSGYHFPWSPSNFLPLYGGAEFHDYHHRVLYTKSGNYSSTFIYMDWLFGTDKDYRKTKALEEKERTKHL

SEQ ID NO: 30115 - protein, 60 aa, Oryza sativa
MRAGFDKICRTTPMGTASKDANSGKPLMLLVGPALLGRRIPIGRTRISSAEMLPIDEEID

SEQ ID NO: 30116 - protein, 205 aa, Oryza sativa
MKHMPGDEDSALKNKIDELSEELQEKMDELDAMESLNQTLVIKERKSNTEMQDARKELENGLLDLLDGQSHIGIKRMGELDLEAFSKACRKMSSEEDAEITAAILCSKWQAEIKNPDWHPFRFVLVDGQEKEIIEDDAKLQELKEEHGEDIYRLVRDALCEINEYNPSGRFPVGELWNFKDKRKATLKETVQFVLRQWRANRRKR

SEQ ID NO: 30117 - protein, 99 aa, Oryza sativa
MKYHQYDLSGTDTELGKPGKIKVPDPDAGSDALNDMELSTTSQDQEEEGAEVNKERPPLLSPSRNNGSDGRRFLDLNEVAPVGGFDETQSRNGERRPPG

SEQ ID NO: 30118 - protein, 445 aa, Oryza sativa
MATGRRLSMILLLLLLGLASGDKILFQGFNWESWRQSGGWYNLLMGKVDDIVAAGVTHVWLPPPSHSVSTQGYMPGRLYDLDASRYGTSMELKSLISALHGKGIQAIADVVINHRCADYKDSRGIYCIFEGGTPDGRLDWGPHMICRDDTQFSDGTGNLDTGADFAAAPDIDHLNGVVQRELTDWLLWLKSDEVGFDAWRLDFARGYSPEVAKVYIEGTTPVGLAVAELWDSMAYGGDGKPEYNQDAHRQALVDWVDRVGGTASAGMVFDFTTKGIMNTAVEGELWRLIDQQGKAPGVIGWWPAKAVTFVDNHDTGSTQQMWPFPSDKVMQGYAYILTHPGNPCIFYDHFFDWGLKEQIAALVAVRQRNGVTATSSLKIMLHDADAYVAEIDGKVVMKIGSRYDVSSLIPPGFHLAAHGNGYAVWEKIAAAAAAADHRTSSSASL

SEQ ID NO: 30119 - protein, 185 aa, Oryza sativa
MVKIKMPALFRRRSGSKSPPLPQADPASGGGSPAPTPEEEMERVFRKFDANGDGRISRSELGALFESLGHAATDDELARMMAEADADGDGFISLDEFAALNATASGDAAAVEEDLRHAFRVFDADGNGTISAAELARVLHGLGEKATVQQCRRMIEGVDQNGDGLISFEEFKVMMAGGGSFAKIA

SEQ ID NO: 30120 - protein, 85 aa, Oryza sativa
MSFFHDHVIRVSTGTGTSNLSINSTKLPNVLLNISPVCLQLLDCPLVAICRTVVIELISHILPIILSLFVISICRINRVAQPSTN

SEQ ID NO: 30121 - protein, 135 aa, Oryza sativa
MAGARSLLLRHLRVAVAPSSSSPAASLRPVVALREALCARRWMSSEEAKGSFLDKAEVTERIVKVVRNFQKIDDPAKVTPDAHFKNDLGLDSLDAVEVVMALEEEFGFEIPDNEADKIDSIKVAVDFIASHPQAK

SEQ ID NO: 30122 - protein, 41 aa, Oryza sativa
MGSARLPQGLHGLLRSARWTRRGRPRVHVDHLRAAWCIHRS

SEQ ID NO: 30123 - protein, 15 aa, Oryza sativa
MSDLVLQHLFHQVKP

SEQ ID NO: 30124 - protein, 294 aa, Oryza sativa
MVTFCTLHVAQRMRFFEPKAIDGQTVILFGLLNGTSIGLLNLSLGFNSIGFYQMTKLAIIPFTVMLETIFLKKRFSESIKFSLLILLLGVGIASVTDLKLNLLGSVLSGLAIATTCVGQILTNTIQKRLKVSSTQLLYQSAPYQAAILFATGPFVDQLLTSRSVFAHKYTAPVVGFIVLSCLIAVSVNFSTFLVIGTTSPVTYQVLGHLKTCLVLSFGYTLLHDPFTMRNILGILVAIFGMALYSYFSVRESKKKSAGDPLPVSQMPEKEVEPLLATKDVNGDTKKANGVTHDC

SEQ ID NO: 30125 - protein, 177 aa, Oryza sativa
MLRCGAVYAGIRGSRGGGVLRRLRSRRRDARHGATARARRHLALSSGSEEGIRCFTLLHGREQVEGSYFDRFYKQTADMDPARRASFLEEDEEMEKAHSVAVSAGDTEAKDGVIEHYVCFSCVDDEIFELDGGNSQPISHGPSSPDSLLQDAAKVIKARIAQYPGSLNFNVMALSKQ

SEQ ID NO: 30126 - protein, 39 aa, Oryza sativa
MVLEIGSSISSMRMEKNGCAVPSPPPSQELFSLSMPFMA

SEQ ID NO: 30127 - protein, 69 aa, Oryza sativa
MPKQIHEIKDFLLTARRKDARSVRIKRTKDAVKFKVRCSKYLYTLCVFDADKANKLKQSLPPGLTVQEV

SEQ ID NO: 30128 - protein, 184 aa, Oryza sativa
MEAAAAVTRLSFVPLAAAARPLLAGFMRPRVFASISSSSSSSPFSGGGGGHFFGGGGGRGRGGGGGGGGEEYGAGAAAAASAAAAVVLGETETADADVILLRVGGMSCGGCAASVKRILESQPEVTSATVDFEKKTAAVWTTPEAKATKDWRKQLGEKLSHHLSTCGFQSHLLDEEEPDSGSQQ

SEQ ID NO: 30129 - protein, 121 aa, Oryza sativa
MARGAQPSASLLLFSLGLVLLYFSSGSTIRLAEGQKTWCVAKPSADDKVLTANLNYACSQVNCGVIQQGGPCFNPNNLVSHAAVAMNLYYAAHGRNAWNCYFQNSALVVQSDPSYGSCTYY

SEQ ID NO: 30130 - protein, 326 aa, Oryza sativa
MAALHHQAAAAPVTTTTDGGELRAMDLYGKLEKVGEGTYGKVYKAREKATGRIVALKKTRLPEDDEGVPPTALREVSLLRMLSQDSHVVRLLDLKQGQNKEGQTILYLVFEYMDTDLKKFIRAHRQNLQKIPVPTVKILMYQLCKGVAFCHGRGVLHRDLKPHNLLMDRKTMALKIADLGLSRSFTVPLKKYTHEILTLWYRAPEVLLGAAHYSTPVDIWSVGCIFAELATNQPLFAGDSEVQQLLHIFKLLGTPNEQVWPGVSKLPNWHEYPQWNPSKVSDLVHGLDADALDLLEKMLQYEPSKRISAKKAMEHPYFNDVNKELY

SEQ ID NO: 30131 - protein, 22 aa, Oryza sativa
MLGMNELIFLVTLVSLFCSYPS

SEQ ID NO: 30132 - protein, 225 aa, Oryza sativa
MVKYMNNYLGIGCDAKVALDIHNLREENPEKFYSQFLNKVLYAREGAKSMIDRTFVDLPWQVRLEVDGTEIEIPEDSEGVLVANIPSYMGGVDLWKSEDDNPDNFDPQSIHDKMVEVVSISGTWHLGTLQVGLSRARRIAQGQSIKIQIFAPFPVQVDGEPWTQNPCTLKISHHGQAFMLRRTIEESLGHAAAIVTDVLENAESSHLITASQKRALLQEMALRLS

SEQ ID NO: 30133 - protein, 312 aa, Oryza sativa
MGAIKVLQNLFSEPGRLQFIYADLGDPKAVNRIFAENAFDAVMHFAAVAYVGESTLEPLRYYHNITSNTLVVLEALAAHNVRTLIYSSTCATYGEPEKMPITEGTPQFPINPYGKAKKMAEDIILDFSKSKKADMAVMILRYFNVIGSDPEGRLGEAPKPELREHGRISGACFDAALGIIPGLKVKGTDYETPDGTCVRDYIDVTDLVDAHVKALNKAERGKVGIYNVGTGKGRSVKEFVEACKKATGVDIKVDYFPRRPGDYAEVYSDPAKINSELNWTAQHTDLLESLRVAWTWQKKHRSGYGPPQAMVL

SEQ ID NO: 30134 - protein, 340 aa, Oryza sativa
MEPGMRIHLPVSVAEGEIKKRYETIPTATLHPNKDEIEYLRRLVIHKDSAILVLNKPPKVPMKGNLPVHNSMDVLAAAALSYGNEEGPKLVHRLDRESSGLLLFGRTKESFTRLHWLFTSVNLAKTNSQVWNAACEAYMQRYWALVIGTPKEREGIISAPLSKVLLDDGKAERVILAHPSGIDGAQEAVTAYRVMGPTIHGCSWIELRPLTGRKHQLRVHCAEALGTPIVGDYKYGWFVHQRWKQNPQPDFEPFTGEPYKLRRPEGLEIQKGSVLSKVPLLHLHCREMVIPNIAKFLSSNGEWHENGAPWSKEKPNLLRFIAPMPAHMKISWNIMSSYLV

SEQ ID NO: 30135 - protein, 378 aa, Oryza sativa
MKGASERLNRDTAVNCVMEVLLNNKFEEWLFSKYEQNSEGNHFLPRQYHGVIHTIAALGYNWALKLLLNSGVLVNYRDANGWTALHWAARFGREETVVLLLDAGAAAGVLSDPTAQDPAAKTPASVASAYGFKGLSAYLSEAELIAHLHSLESKENGSSGDQISRVVGRISDTSAHAQSGSDDQLALKESLGAMRYAVQAAGRIQTAFRIFSFRKKQQAGLQNRGNHIISIREVGAASHGMLEKAALSIQKNFRCWKKRKEFLKIRKNVIKIQARVRAHQQHNKYKELLRSVGILEKVMLRWYRKGVGLRGFHPGAIAMPIDEEDEDDVAKVFRKQRVETALNKAVSRVSSIIDSPVARQQYRRMLKMHKQNKDDDEK

SEQ ID NO: 30136 - protein, 219 aa, Oryza sativa
MEWDKLWTINKKIIDPVCARHTAVLKDQRVIFRLTNGPEKSFVQILPRHKKFDGAGKKATTFTNRIWLDYADASAISKGEEVTLMDWGNAIIKEIKMENGVITELIGELHLEGSVKTTKLKVTWLPDIDDLVPLSLVEFDYLISKKKLEEDENFLDNLNPCTRKETLALGDANMRNLLRGEVIQLERKGYYRCDAPFVRSSKPVVLFAIPDGRQQASLN

SEQ ID NO: 30137 - protein, 44 aa, Oryza sativa
MPSVKNTTLQDAVINASSAALQSIKFWLTKYLVSQTVLVPVILY

SEQ ID NO: 30138 - protein, 245 aa, Oryza sativa
MLSMDGTTEKEAESSSNDDSAWEGFQSAEPVPSSDKKDSAKPVESKPQSTSGIEDLFKDSPAVTVSSAPAAPQVNVKNDIMSLFEKSSMVSPYAVQQQQLAFMTPQQLALLSQQQALLMAALKAGNAPQMIPGNASLLNGNGSNPANGGLPSQSWTNLAYQNPGLAPVAAQNGATKVANNNQEFSFGNFNFSTPGAYNTSSSVPANGAASAAANKSTSPTSSSLPSQSGKEYDFSSLTQGLFSKR

SEQ ID NO: 30139 - protein, 119 aa, Oryza sativa
MGSDGHVASLFPNHPSLELKDDWITYITDSPQPPPERITFTLPVINSASNIAIVTTGDDKSEAVHLAISDNADGPEAPSSLPARMVQPTDGKLVWFLDKSAASSLDAENDDAFEQHREY

SEQ ID NO: 30140 - protein, 473 aa, Oryza sativa
MALKVVSFPGDLAAVSFLDSNRGGAFNQLKVDLPFQTRDRRAVSLRRTCCSMQQAPPPAWPGRAVVELGRRSWDGPKPISIVGSTGSIGTQTLDIVAENPDKFRVVALAAGSNVTLLADQVKTFKPKLVAVRNESLVDELKEALADCDWKPEIIPGEQGVIEVARHPDAVTVVTGIVGCAGLKPTVAAIEAGKDIALANKETLIAGGPFVLPLAQKHKVKILPADSEHSAIFQCIQGLPEGALRRIILTASGGAFRDWPVDKLKEVKVADALKRPNWNMGKKITVDSATLFNKGLEVIEAHYLFGAEYDDIEIVIHPQSIIHSMIETQDSSVLAQLGWPDMRIPILYTMSWPDRIYCSEVTWPRLDLCKLGSLTFKAPDNVKYPSMDLAYAAGRAGGTMTGVLSAANEKTVELFIDEKIGYLDIFKVVELTCDAHRNELVTRPSLEEIIHYDLWAREYAASLQPSTGLSPVPV

SEQ ID NO: 30141 - protein, 548 aa, Oryza sativa
MAEVTVVRAEREEESTLEQGLLAIPEESNQLTYTGDGSVDFSGNPVVKERTGRWRACPFILGNECCERLAYYGISTNLVTYLTKKLHDGNASAASNVTAWQGTCYLTPLIGAILADAYWGRYWTIATFSTIYFIGMAVLTLSASVPTFMPPPCEGSFCPPANPLQYTVFFLGLYLIALGTGGIKPCVSSFGADQFDDTDPVERIQKGSFFNWFYFSINIGALISSSFLVWVQDNIGWGIGFGIPTIFMGLAIISFFSGTSLYRFQKPGGSPITRVCQVVVASFRKWNVHVPEDSSRLYELPDGASAIEGSRQLEHTDELRCLDKAAVYAQMSTMFVEQGMMLDTSVGPFKIPPASLSTFDVVSVIIWVPLYDSILVPIARRFTGNPRGFTELQRMGIGLVISIFSMAAAAVLEIKRLDIARAEHLVDQNVPVPLNICWQIPQYFLVGASEVFTFVGSLEFFYDQSPDAMRSLCSALQLVTTALGNYLSAFILTLVAYFTTRGGNPGWIPDNLNQGHLDYFFWLLAGLSFLNFVIYVICANKYKSKKAA

SEQ ID NO: 30142 - protein, 157 aa, Oryza sativa
MQASRARLFKEYKEVQREKSADPDIQLICDDSNIFKWTALIKGPSETPFEGGVFQLAFSIPEQYPLLPPQVRFLTKIFHPNVHFKTGEICLDILKNAWSPAWTLQSVCRAIIALMAHPEPDSPLNCDSGNLLRSGDIRGYQSMARMYTRLAAMPKKG

SEQ ID NO: 30143 - protein, 50 aa, Oryza sativa
MGVELGGALSQNELERWSLGLGSSTTPLRTQLLELNFRSWSSTKHALHTY

SEQ ID NO: 30144 - protein, 300 aa, Oryza sativa
MMNKHVEKLVHCDPRLYSLSQQNDINLDNPYFESKSSIFEDAEGIKGQDFEHKDDGDQLAPQRFTELLPPHSASGRIDTEARQLSGTPDKLLQHFPCSVSGTQVIKQDAASGDCERQESIYNWNGIKVPGIRRSMSKSEIANHIGNHIYRQMYSGNLPAVHRGDSTSSKVTLDGITRFLLGSTQIIGDGDGDGSMGKLTFDELTRQLLNDSQITNAADERMLMSRVNSLCSLIQRDSGSGQTNPSSSIHGDNEMQERKPQPYALPVSADSGSNTSLPPRQESFGDLLTHLPRISSFPHFL

SEQ ID NO: 30145 - protein, 358 aa, Oryza sativa
MGMPLLLLLLILVAAGPQAGRAAKPIPNLQLMTKEGGSSRIIQDDIIKAINKHPNAGWTAARNPYFANYTTAQFKHILGVKPTPHSVLNDVPVKTYPRSLMLPKEFDARSAWSQCNTIGTILDQGHCGSCWAFGAVECLQDRFCIHFNMNISLSVNDLVACCGFMCGDGCDGGYPIMAWRYFVRNGVVTDECDPYFDQVGCKHPGCEPAYPTPVCEKKCKVQNQVWLEKKHFSVNAYRVNSDPHDIMAEVYQNGPVEVAFTVYEDFAHYKSGVYKHITGGMMGGHAVKLIGWGTTDAGEDYWLLANQWNRGWGDDGYFKIIRGTNECGIEEDVVAGMPSTKNMVRNYDSAFGVGTAIV

SEQ ID NO: 30146 - protein, 301 aa, Oryza sativa
MNDGSIAVEVGGVEIGQGLWTKVKQMTAFALGQLCDDGGEGLIDKVRVIQADTLSMIQGGFTGGSTTSETSCEAVRKSCAALVERLKPIKEKAGTPPWKSLIAQASMASVKLTEHAYWTPDPTFTSYLNYGAAISEVEVDVLTGETTILRSDLVYDCGQSLNPAVDLGQVEGAFVQGIGFFTNEEYTTNSDGLVINDGTWTYKIPTVDTIPKQFNVELINSARDHKRVLSSKASGEPPLLLASSVHCAMREAIRAARKEFAGAGGSPLTFQMDVPATMPIVKELCGLDVVERYLESFAAKA

SEQ ID NO: 30147 - protein, 406 aa, Oryza sativa
MLVKAGAPVDQTIATLAAHLEQGDCIIDGGNEWYENTERREKAMEERGLLYLGMGVSGGEEGARNGPSLMPGGSFEAYKYIEDILLKVAAQVPDSGPCVTYIGKGGSGNFVKMVHNGIEYGDMQLISEAYDVLKSVGKLTNSELQQVFSEWNKGELLSFLIEITADIFSIKDDQGSGHLVDKVLDKTGMKGTGKWTVQQAAELSVAAPTIEASLDSRFLSGLKDERVEAAKVFQGDFSSDLPVDKAQLIEDVRQALYASKICSYAQGMNIIKAKSMEKGWSLNLGELARIWKGGCIIRAIFLDRIKKAYDRNSDLANLLVDPEFAQEIMDRQAAWRRVVCLAINNGVSTPGMSASLAYFDSYRRDRLPANLVQAQRDYFGAHTYERVDMPGSFHTEWFKIARAAKM

SEQ ID NO: 30148 - protein, 99 aa, Oryza sativa
MTPRTSIFFFSFATIKTVDDHCGLWLPGNILHALFNNNSAYHDIHHQLYGNKYNFSQPFFVIWDKILGTYMPYSIEHRKGGGFESRPVKLNIAEQTKTD

SEQ ID NO: 30149 - protein, 262 aa, Oryza sativa
MHFYERMGDTLAVQYSGSAAHNKIFSAKRGHLKLFIRSQEFFRTLQRHYSNTCIDANKQAAINLFLGYFQPQEGKPALWELESSSVDHIAVHARTIKRVRSDGSILYGSNTSISGCSGCHNEDKELLNAAPLDVKSGSQFPVLESDSVHGNEISLTCESEVSNLRYTPMIPQTHHVPGGVETESSIHSGDSNFLDLEWLSTSGNSSDERSIAISTPDVNLSAENVISGINSETMENQDADIYTQNLPEHFVQWVNHGDTFWY

SEQ ID NO: 30150 - protein, 404 aa, Oryza sativa
MKELDAKMTLLQEKESEIEALQDKVRSLEDEVAKQKEDFHTADKEADELRLEIEDLRLKLEAAEEDLNNDKIASSEMETLIEQKNMLAKELEASKAEVEKIKKAMEGQASALHEMSAQLRVAQEKYLDKQEEIDRARAQVEELNVSLQNTKESYEVMLDEANYEKVCLKKSVERMEAETKSASEEWQSKELSFVNSIKKSEEEIINARAQMDKTLEAVKGKESENAELQEKLKHLEAQLMEANKTCEEAKAETFQWKEKLLDKENELQNIKQENDDLQAKELVASEKIKELSVLANAKDGATNGSHKEESNVKGDSEDDEPVMVVAKMWENSKVTDDASSKEKGNDGESEVDLESNTGDSIVDGNGLHSTTASNGNASPPKQQPQKKKPLLKKFGGLLKKKTQP

SEQ ID NO: 30151 - protein, 621 aa, Oryza sativa
MGLEEGGAMRALMRRKQVDSDRVRAAGGHQLAKELSVTQLVAIGVGSTIGAGVYVLVGTVAREHAGPALTLSFLIAGVAAALSAFCYAELASRCPSAGSAYHYSYICVGEGVAWLIGWALILEYTIGGSAVARGISPNLALFFGGQDSLPWFLARHELPWFDVVVDPCAAFLVLVVTALLCKGIKESSFVQGVVTVLNCFVMLFVIIAGSYIGFQTGWVGYKVAGGFFPYGANGMLAGSATVFFAYIGFDSVASTAEEVKNPQRDLPLGIGTALSVCCSLYMLVSVVIVGLVPYFAMDPDTPISSAFARHGMHWAMYLVTTGAVLALCSTLMGSILPQPRILMAMARDGLLPSFFSDVNQRTQVPVKSTIVTGICAACLAFFMDVSQLAGMVSVGTLLAFTIVAVSILILRYAPPDEVPLPSSLEASFRLSQEYDEEKVRGPPVDANHEQLSSVVESINDTLIEKKQDTSVEESKRRKAAVCSISSVCVGVVVLTTSASFTFLPFLLRCFFCVFGGLLLLAGLGVLCYIDQDDGRHSFGHSGGFICPFVPLLPVMCILVNTYLLVNLGGGTWMRVGVWLVMGVFVYIFYGRTHSSLTDVVYVPVAQAEEIYGSSSSSGFVA

SEQ ID NO: 30152 - protein, 129 aa, Oryza sativa
MERLMRAQSMGDMSSLDFMRSRKVFEINPEHEIIKGLNAACRANPDDPEALKAVDILFETSMISSGFTPDNPAELSGKIYEMMSTAMASKWASHAQPAEMNLQRDSPVSSEPIEAEVIEPELVDDSQKK

SEQ ID NO: 30153 - protein, 280 aa, Oryza sativa
MLGVLSIPSLIYFALTIFYLPESPRWLVSKGRMAEAKRVLQGLRGREDVSGEMALLVEGLGVGKDTKIEEYIIGPDDELADEGLAPDPEKIKLYGPEEGLSWVARPVHGQSALGSALGLISRHGSMVSQGKPLVDPVVTLFGSVHEKMPEIMGSMRSTLFPNFGSMFSVAEQQQAKGDWDAESQREGEDYGSDHGGDDIEDSLQSPLISRQATSVEGKEIAAPHGSIMGAVGRSSSLMQGGEAVSSMGIGGGWQLAWKWTEREGADGEKEGFFSLQQSLS

SEQ ID NO: 30154 - protein, 36 aa, Oryza sativa
MATRLLLSFSAKRIAIMLLMLRKLGLVLLRAHQISS

SEQ ID NO: 30155 - protein, 194 aa, Oryza sativa
MSGNRRSLDAYSSETKSLALCLFEFMAKAVGAKPEALLGIFEEQPRGLRMTYYPPCLQSDKVMGISPHSDVVGLTLLLQVNDVQGLQIKKDGKWLSVDAPNGALIANIGDTLEILSNGKFRSVEHRAVINPNKERISAALFHYPSENMVISPLPEFVKDGKVKYRSISYLDFMKQIFTQQLDGKNRVEVLKLDQ

SEQ ID NO: 30156 - protein, 265 aa, Oryza sativa
MNKFWPAYSLLFCCPYLLLVIFREIDKEEFKKVMALMRSYNRQGANHRDGLRTGLKVGQPVENGGVVEYFFGNDGNEPLHYDKFTNFLKGLHDEIIRLEFSHYDVKSSNTIPAKDFALSMVASADMNHINKLLDRVDNLGNDPDLKGVRITFEEFKSFADLRRRLEPLAMAIFTYGKVNGLLTKQDLKRAAHHVCGVDLTDRVVDIIFHVFDTNHDGNLSSEEFVRALQRRETDVRQPATPGSMGLLSYWLNFNKCSSLTQMLLK

SEQ ID NO: 30157 - protein, 476 aa, Oryza sativa
MDDLAAASPPHPPPPPPESHVPPPPQTPEKDSCEDTGDMRISEEKPCTDQELDADQMNSSSFNSSSECENQTPSNDEMTGSESKSEAAQTEGGGSSEEKVLKKPDKILPCPRCNSMDTKFCYYNNYNINQPRHFCKSCQRYWTAGGSMRNLPVGAGRRKSKSSTANYRSILITGSNLAAPAGDAPLYQLSIKGDQTATAVKFAPDSPLCNSMASVLKIGEQSKNAKPTSTAQPRNGETQTCPASGTTSDSPRNEPVNGAVSGHQNGIVGHSGVPPMHPIPCFPGPPFVYPWSPAWNGIPAMAPPVCTAPAEPANSSDNGSTASVQWSMPPVMPVPGYFPVIPSSVWPFISPWPNGAWSSPWIQPNCSVSASSPTSTSTCSDNGSPVLGKHSRDSKPQGDDKAEKNLWIPKTLRIDDPDEAAKSSIWTTLGIEPGDRSMFRSFQSKPESREQISGAARVLQANPAALSRSQSFQETT

SEQ ID NO: 30158 - protein, 14 aa, Oryza sativa
MLLWPEHGTRSGKV

SEQ ID NO: 30159 - protein, 290 aa, Oryza sativa
MPSNRVESFTRVDPTSRAGNEVKYGAYNNQLPNSYVPILVHYENNRPFAVVEEFVRKVEISHWGNVQITEQYKLKHGGAQHKGVFSRLEYQSRPSISGVSSFKNLLARLPPRVHSVYYRDEIGNISSSHLRSDSHKSELEIEPRYPLFGGWHCTFTIGYGLPLQDFLFESDDGRRYINLTFGCPLLDTEVDDLTIKVVLPEGSTSPQAVVPFLMEQYLETSYSYLDVVGRTTVVLKKRNVVGEHNVPFQVYYEFNPIFMLAEPLMLISAVFLFFVACIAYLHMDLSIGKS

SEQ ID NO: 30160 - protein, 285 aa, Oryza sativa
MAGGDSAAVSAVEGRLSELSTNSDEKGLPRRGKSLSGRTLNTAQIQLVASHPEVYEPCDDSFALVDALLSDKAQLLTLKPRLCMEIGCGSGYVITSLAIMLRQLGSGTQYLATDINQHAVETTQATLEAHGVHADVIATDIVSGLEKRLHGLVDVVVVNPPYVPTPEEEIESNGIASSWAGGINGRQVIDRILPAVRELLSERGWLYMIALEDNDPLDICHLMNEKGYASRVLLKRCTEEESLYVLKFWQDASTGTNASHAARSPRSESSWLSQLPFRSLWHKNA

SEQ ID NO: 30161 - protein, 270 aa, Oryza sativa
MQETGALLFPAINVNDSVTKSKFDNLYGCRHSLPDGLMRATDVMIAGKVAVVCGYGDVGKGCAAALKQAGARVIVTEVDPICALQALMEGLQVLTLEDVVSEADIFVTTTGNKDIIMVDHMRKMKNNAIVCNIGHFDNEIDMLGLETYPGVKRITIKPQTDRWVFPETNTGIIVLAEGRLMNLGCATGHPSFVMSCSFTNQVIAQLELWKEKSTGKYEKKVYVLPKHLDEKVAALHLGKLGARLTKLSKSQADYISVPVEGPYKPAHYRY

SEQ ID NO: 30162 - protein, 140 aa, Oryza sativa
MVVSGSLYPTSNLYFHEMWKIKLVLDKEHSNNDTEVASMVQKMKDKFDKYWLKSYKYLCIPVIFDPRFKFNFVEFRLGQAFGENAKERIDKVKKRMNMLFKEYSDKLKDSNANPLRQAEHVMAISENDPMADWVQHISEQ

SEQ ID NO: 30163 - protein, 118 aa, Oryza sativa
MAALNGKVVVAVMVVAMVVAAPGASAAITCGQVGSAIAPCISYVTGRGGLTQGCCNGVKGLNNAARTTADRQAACRCLKTLAGTIKSLNLGAAAGIPGKCGVNVGFPISLSTDCSKVS

SEQ ID NO: 30164 - protein, 43 aa, Oryza sativa
MRAKLCLTSRFGYHSSPSMPKLSYGSVFLRLSSSLFKSNLATY

SEQ ID NO: 30165 - protein, 235 aa, Oryza sativa
MFLIKMTLTGVPWTEEEHRRFLLGLQKLGKGDWRGISRNFVVSRTPTQVASHAQKYFIRQSNMTRRKRRSSLFDMVPDESMDLPPLPGGQEPETQVLNQPALPPPREEEEVDSMESDTSAVAESSSASAIMPDNLQSTYPVIVPAYFSPFLQFSVPFWQNQKDEDGPVQETHEIVKPVPVHSKSPINVDELVGMSKLSIGESNQETVSTSLSLNLVGGQNRQSAFHANPPTRAQA

SEQ ID NO: 30166 - protein, 167 aa, Oryza sativa
MNNIHYIVKSVRRSEAKDLLGDDWIQRHRRIVQQNANHYRRIAWSKVLQCLSGQGLTSSGGSGQVGSEGGNSSGASRAAVKERFRSFNVLFEEIYQKQCGWSVPDTELRESLRLAVAEILLPAYRSFLKRFGPLIENSKAPGKYVKHTPEQVELLLANLFEGKQERT

SEQ ID NO: 30167 - protein, 315 aa, Oryza sativa
MWTSVPYNPPSTFDMLAMDHAKKVEIMDDLRAFQKGKEYHSKVGKAWKRGYLLYGPPGTGKTTMIGAMANFLDYDVYDLDLTSVKDNAELRKLFLDTTDKSIIVIEDIDAIEVELTTKRKGKKMDNSDEVDNNHVLVELSNKTDDKSKVTLSGLLSFVDGLWSACGSERVFVFTTNHVDRLDPALIRPGRMDKHIEMSYCRLDAFKVLAKSYLDITEHSLFGEIGRLLDETDTTPADVADNLMPRGKRNGEISRLIDEIDAPADVAGNHMLRCKRKRDADECLAGLVETLKKAKMESATPPMDTIEEEANKEEQT

SEQ ID NO: 30168 - protein, 197 aa, Oryza sativa
MSAAAVEATERGEPSGGGGEVAYVSYGGEHHLPLVMSLVDEELSEPYSIFTYRYFVYLWPQLTFLAFDPKDGKCVGTVVCKMGEHRGAFRGYIAMLVVLKPYRGRGIATELVTRSIRVMMESGCEEVTLEAEVTNKGALALYGRLGFIRAKRLYRYYLNGVDAFRLKLLFPRPDPGMHPMMMLGNERDDQHMDSPYL

SEQ ID NO: 30169 - protein, 338 aa, Oryza sativa
MVLPGSKESQNYDSNNQKVHPQPIDENMNQNLLKTYEVMVKKFQSQIQTRDTEITHLQQQIDEAKLRKSKLEKKLKQRGLLNKESEESDDEDNYFSIELTPSLFTSAVDNAYQSIHDFSKPLINMMKAAGWDLDAAANAIEPAVVYTRRAHKKYAFESYICQRMFGGFQEESFSVKAANITVSNEAFFHQFLAVRAVDPLDVLSQNPDSVFGKFCRSKYLLLVHPKMEGSFFGNMDQRNYVMSGGHPRTPFYQAFLKLAKSIWLLHRLAYSFDPKVKVFQVKKGSDFSEIHMESVVKNIILDEGAERPKVGLMVMPGFLIGTSVIQSRVYLSGVKSAD

SEQ ID NO: 30170 - protein, 89 aa, Oryza sativa
MIQAVVIFVSLLLLFTVSAYISPCAIPVFYPLGSYFIFLTFSLMVAGLFILGAVLHLLVPPKEKNIRKRGKEKEIFSSTSSYRLVESSV

SEQ ID NO: 30171 - protein, 267 aa, Oryza sativa
MRSHPSAASFLKEAINVKVSDICDLNPHEALGNSYVVNIIIRDLVPAEPWWYIACSTYKRGTAREGNAYKCPRCSTDAIETRYRVVIMGIDPSDLANDQAKAAEFTFFGEIGEQLIGRPVLNLVASVHGARDIVPPEIKAIFGRQYVIRTSVSRGSLQRNRVSYQVDSLMLPHPDPSHAICLPSHDTCMGSSGHGSTSANAVEPHAIVLSSTQSMPPSTPFVLPDTKDTRDSHGDQHEATPPTPQASNIFYTHINYMHMSLSDLPNH

SEQ ID NO: 30172 - protein, 202 aa, Oryza sativa
MRVPIDESPVFLLYQDWALGLIFLKIWTRLVMLDQMAPLVDESWRTKFERVREDGFSRLRGLWVLHEIIMPIVTKLLTALCVPYVLARGVFPVLGYPLIVNSAVYRFAWLGCLIFSALFFCGKRFHVWFTNLHNSIRDDRYLIGRRLHNFGEDSLHSSEPGTTTASDDDEHEQALIPRDQEGELGLRFRRHIMRGNQPRMAA

SEQ ID NO: 30173 - protein, 83 aa, Oryza sativa
MANRRSSDRRGVPEDTPPAATMRAPEDTQPHRHLRPAGFLSPVSTEPGPRGFNGLWKLMDVQMKDLVIDDSMNLDESMKRMDL

SEQ ID NO: 30174 - protein, 269 aa, Oryza sativa
MAAQALLSGRQLLGRPLQSSVSRSSSSRKAPFMVRAEATPPAKQGADRQLWFASKQSLSYLDGTLPGDFGFDPLGLSDPEGTGGFIEPRWLAYGEVFNGRTAMMGVVGMVAPELLGKLGLVPAETAIPWFQTGVIPPAGTYTYWADPYTLFVFELALVGFAEHRRFQDWYTPGSMGKQYFLGLEKYLAGSGEPAYPGGPLFNPLGFGTKSEAEMKELKLKEIKNGRLAMLAFLGFSVQALFTGVGPVQNLLDHLADPVHNNILTSLKFH

SEQ ID NO: 30175 - protein, 286 aa, Oryza sativa
MATAATASATAATRFTRLAGVGLRRTARLPTAVRFQRRVLATTALLRTAELRPKEQGLPETLDYRVFLVDGGGRKVSPWHDVPLRAGDGVFHFVVEIPKESSAKMEVATDESFTPIKQDTKKGNLRYYPYNINWNYGLFPQTWEDPTLANTDVEGAFGDNDPVDVVEIGERRANIGDVLKVKPLAALAMIDEGELDWKIVAISLDDPKASLVNDVDDVEKHFPGTLTAIRDWFRDYKIPDGKPANRFGLGNKPTSKEYALKVIEETNESWEKLVKRNIPAGELSLA

SEQ ID NO: 30176 - protein, 231 aa, Oryza sativa
MAGEGDDQLKLLGLWVSPYTHRVKLALSFKGLSYEYVEEDLSNKSELLLSTNPVHKKVPVLIHNGKPICESQVIVQYLDEEFPNSGVSLLPSDSYDRAIARFWAAYINDKLMPSWLQSSMGKTEEERAEALKQTLEAVANLETAFKECSKGKPFFGGDTVGYLDVSLGAMIGWMRAGEALHGRRTFDATRSPLLNAWMERFAALDAAKAAMPDNNKLVEFVRVRRAAAANN

SEQ ID NO: 30177 - protein, 178 aa, Oryza sativa
MRPLYLRSSGSFKKLLLSISHRGAKNGNGDAAAKERYTPAAAAAAPESPRKPAWRCFSYEEIHRATNAFHEGNLVGKGGSSEVYRGELPDGRAVAVKRLMGAWACERRERDFLAELGTVGHARHPNVCALLGCCVDRDLYLVFHFSGRGSVSANLHGTSDTNATPNSNSTNAPPLMAF

SEQ ID NO: 30178 - protein, 210 aa, Oryza sativa
MAASSWWVVAACVVLAAAAAADPRDGFTAVSLGDGNFQLQWPYDVESSSRYSFDGTVRRLWVFSDDKPFKPQSGTNPRTEIRMTGYDYSSGVWQFEGTGYVPSGTTGVSIMQVFGGGTATTLMLHVYGGDLWYYHQQVVETNIYDRWFRLNVIHDVAASQLTVFIDGRERLRVAGKGGDSHYFKFGVYMQTNPSNRMESRWKGISILNKT

SEQ ID NO: 30179 - protein, 268 aa, Oryza sativa
MASSPSTVFLVLSLTLATVSVVVVSGAGEAPSPAPTGPLNLTEILTKAGHYNTFVRLLKDTEVTSQVSSLLNNDRNGDGLTVLAPTDAAFGRLRPGTLNQMDAQAQAELVLYHVLPRYYGFVTFETTTNPVRTQASGQRGVCTVNVTTAGEDRVRVSSGVVEAELGRPLRDGHPLAVYSLDAVLLPPDMFGPGAKKDYGAADAPAAAGKHGKPQTASSSSVAAAPDEAPSKEVDATATAAAGRMAPAGWAAAFAGVVTAVVAVSLLSY

SEQ ID NO: 30180 - protein, 249 aa, Oryza sativa
MYSTTSRRRRYDFIVTDGASLCCTMDDYYQLTCFNSCFSLLQAQELMFLASRGSLPSAPTTVARMPEAHVFPPAKVTVPEVSPTKPMMLQKPQLVSSPVPAISKPISVVSQATSLPRSASSSNVDSNVTKSSGPLVVPPTSLPPPAQPETLATTTAAAIMPRGMPINCLHELYCDVMIVVRTSDELLQCMIYFSFFHCSCPSSAEGIPCPILGEAKGKVEIIYLRDNCSFDPVSKPNYQSDLTFFSLLI

SEQ ID NO: 30181 - protein, 270 aa, Oryza sativa; identical to SEQ ID NO: 28586

SEQ ID NO: 30182 - protein, 287 aa, Oryza sativa
MARSLAALLLLLVAAAGASHAASPAEMYWKIALPTSPMPGAIRDLISPASSAASASKDKEDTVGSVFFLEKDLFPGSKMTLHFTRATAGAALLPRGRADSVPFASEKLPEILSQLSIPAGSPTADAMRSTLAVCEAARIASETAPKHKHYCATSLESMVELVASSLGTRDVHAVSTEVVNRAGPTPRQAYRVEAVRPVPVPGGDMVACHRMPYAYAVFGVHGIKGAAYTVTLAGADGTMAEAVAAYHGDVDGHGVAVAEAYKRLGVAPGKVAVCHFLPQDDMLWVRN

SEQ ID NO: 30183 - protein, 252 aa, Oryza sativa
MAAATDGGGLPLLADKAASHSHHHHPERHFTSGEVVRDVIMGVSDGLTVPFALAAGLSGASAPSSLVLTAGLAEVAAGAISMGLGGYLAAKSEADHYQREMKREQEEIIAVPDTEAAEIGEIMSQYGLEPHEYGPVVDGLRRNPQAWLDFMMRFELGLEKPDPKRAIQSALTIALSYVIGGLVPLLPYMFISTAQNAMLTSVGVTLVALLFFGYIKGRFTGNRPFLSAVQTAIIGALASAAAYGMAKAVQTR

SEQ ID NO: 30184 - protein, 160 aa, Oryza sativa
MEKRRRPAAAAMLLVLIPAASRPPHGIVAATESSVQNSEQSFGFNLTLAKTIVEYASAVYMTDLTELYTWTCSKCNDLIQGFEMRRLIVDVQNCLQAFVGVDHNLNAIIVSIRGTQENSVQNWIKDMLWKQSDLNYPDMPDAKPSQTPFTRRGSYMEILA

SEQ ID NO: 30185 - protein, 286 aa, Oryza sativa
MVNGYLFREYIGAQFTGVRFSDVPVNPGLSFHFILAFAIDYFMATQSSKPAPANGVFAPYWDTANLSPAAVAAAKAAHPNLSVILALGGDTVQNTGVNATFAPTSSVDAWVRNAADSVSGLIDAYGLDGVDVDYEHFAAGVDTFVECIGRLLTELKARHPNIATSIAPFEHPVVQRYYQPLWRRYAGVIDYVNFQFYGYGANTDVATYVMFYDEQAANYPGSKLLASFKTGNVTGLLSPEQGIAGAKELQRQGKLPGLFIWSADSSMVSSYKFEYETKAQEIVANH

SEQ ID NO: 30186 - protein, 375 aa, Oryza sativa
MADGQEDAAGLDDDLVLEDELRGREEGEDGGGGGGEEEEEDDVDGLASFLESEILSGSSGDDPTGREEGDEKEKQLGDDAKNNKRKQESESDGDSGSGEEQNKRVRRAKGKEKDVASVAPQIDSGMFCNIPPELFLQIFKFLSSEDLISCALVCRFMNVVASDETLWRRLYCMRWGLSCNTKLRECAWKKLYIQQDREDMVEFVRNTPTEFKEYYIQMQASKRSQAPLPSEVNDDKVILDKTIADQVSSWKSSRGLTDDAVKGHSCSGNTCSYTQIGDAYICEKTGRVHVCDDACREFVLDQSSGLLLCTISGHCFERWLCPDDEWDADDDTDLQQAGMTDEAEPFMGSGRFARAYQLGYSCADEKELEYALRFC

SEQ ID NO: 30187 - protein, 232 aa, Oryza sativa
MKKIFGAKKNQEPPPSIQDATDRISKRGDSVDDKIKKLDAELARYKDQIKKTRPGPAQEAIKARAMRVLKQRRMYEGQRDMLYNQTYNLDQVAFASEGLKDAQQTMTAMKAANKELKGMMKTVKLEDIDSLQDEMMDLMDVSNEIQETLGRSYNVPDDIDEEELMGELDALEADMDFESNSVPSYLQPDKESDLDSELNLPAAPTGHTPAPPNRQQEDELGLPTVPQASIRS

SEQ ID NO: 30188 - protein, 318 aa, Oryza sativa; identical to SEQ ID NO: 29495

SEQ ID NO: 30189 - protein, 170 aa, Oryza sativa
MAAAAQAPAAAKVVVATSPRAGGGGGGGGDRKVVPVVVAAAAGDEAQSEMHVLAVDDSSVDRAVIAKILRSSKYRVTTVESATRALELLCLGLVPNVNMIITDYWMPGMTGYELLKRVKESSQLKEIPVVIMSSENVPNRISRCLEEGAEDFLLKPVRPSDVSRLCSRIR

SEQ ID NO: 30190 - protein, 170 aa, Oryza sativa
MAAFLRSKCSSVGRTLMGGLGNNLFGAVNSSVETVSRPSHCDPIFQQIRTFIQMRTNLKVVDNSGAKRVMCIQSLRGKKGARLGDTIIGSVKEAQPRGKVKKGDVVYGVVVRAAMKRGRNDGSEIQFDDNAIVLVNNKGELIGTRVFGPVPHELRKKKHLKILALAEHIV

SEQ ID NO: 30191 - protein, 238 aa, Oryza sativa
MLGVFSGDVVEVPAELVAAGSRTPSPKTRASELVSRFLGGAEPAVSVQLGDLGHLAYSHANQALLRPRSFAAKDDIFCLFEGVLDNLGNLNQQYGLSKGANEVLLVIEAYKTLRDRAPYPASFMLSQLAGSYAFVLFDKSTSTLLVASDPEGKVSLYWGITADGSVAFSDNIDLLKGSCGKSLAPFPQGCFYSNALGVGGLKCYENPKHKVTAVPAKEEEICGATFKVEGSTILTALH

SEQ ID NO: 30192 - protein, 212 aa, Oryza sativa
MACINTFQSCSVLKGAKINGTKIGGGRGSPTFRCRASTFMDGSLRLEIDENPEAIISGEWPENFSLLSYDDLRAYLQSQEAAAQADNQRVALLSEAMSAPVLVATAEQTLEEVECHFETVSGLPVIDASLRCVGVIVKSDRARASHGSKTKIAEVMTSPAITLPSDKTVMDAAALMLKKKIHRLPIVNQDRQVIGIVTRADVLRELEALLEV

SEQ ID NO: 30193 - protein, 305 aa, Oryza sativa
MVALLRSCRRLIPHLSACAAAAPSSSSSCAPRARPISRGLRLLPVVLAMAGYSSGSAAEGRRLLFRQLFEKESSTYTYLLADVGDPEKPAVLIDPVDRTVDRDLNLIKELGLKLVYAMNTHVHADHVTGTGLIKTKLPGVKSVIAKVSKAKADHFIEHGDKIYFGNLFLEVRSTPGHTAGCVTYVTGEGDDQPSPRMAFTGDALLIRACGRTDFQGGSSDELYESVHSQIFTLPKDTLLYPGHDYKGFTVSTVEEEVAYNARLTKDKETFKKIMDNLNLAYPKMIDVAVPANLLCGIQDPPPSKV

SEQ ID NO: 30194 - protein, 230 aa, Oryza sativa
MAASLRSPPPFPAAAFRRRRAVVRASSSSSSSSSAVSSAPKARFVARRSESTFVQQLARPLAEYMSLPASQYSVLDAERIERVDESTFRCYVYRFRFFALEVCPVLLVRVDEEPNGCCISLLSCKLEGSPLVEAQNDKFSASMVNKVFCNSSMSDSTSQQLTSDTTIEVTIDIPFPFRALPVEAIESSGKQVLEQLLRVMLPRFLKQLVKDYQAWASGDSSRKPLGTGEI

SEQ ID NO: 30195 - protein, 229 aa, Oryza sativa
MGSRLGRRVIHFANLPLKLMLPPAPLSSVQEFAVKTVPSASKVDIRRCLESMYGFSVAEVRTLNMEGKKLRRGPFLAAKPDYKKAYVTLRAPLPVSPDLFPIGLVLGERERKASAAAARRKAVEGAEVEGESKGKHWMEDEKVGFSRAGRGKVVYGNPGRLGKKRNGGTKVKDRAGEEVGKFPWSGTRLATEKKPARKQQYAPKKKGIVLKQKSWKGSVHRQPKKKVEA

SEQ ID NO: 30196 - protein, 240 aa, Oryza sativa
MLREDGSHELQSECGHHGHILALYTQTRGDFIVVGDLMKSISLLVYKHEESAIEELARDYNANWMSAVEMLDDEIYIGAENNYNIFTVRKNSDAATDEERGRLEVVGEYHLGEFVNRLRHGSLVMRLPDSEMGQIPTVIFGTINGVIGIIASLPHEQYVFLEKLQSTLVKFIKGVGNLSHEQWRSFHNDKKTSEARNFLDGDLIESFLDLSRNKMEEVAKGMGVPVEELSKRVEELTRLH

SEQ ID NO: 30197 - protein, 118 aa, Oryza sativa
MAALNFKAVAAVMVMAMVVAAPGASAAITCGQVGSAIAPCISYVTGRGGLTQGCCNGVKGLNNAARTTADRQAACRCLKTLAGTIKSLNLGAAAGIPGKCGVNVGFPISLSTDCSKVS

SEQ ID NO: 30198 - protein, 240 aa, Oryza sativa
MTSPPPPPSSLLRRLPTTRCCCFASASSGWSASASVRLGSLGGKQRRGHRGVAVMAAAAAGGGGFEARVARIASTIRVIPDFPKPGIMFQDITTMLLKPDAFRDTIELFVERYKDKGITVIAGVEARGFIFGPPIALALGAKFVPLRKPKKLPGEVISEEYSLEYGTDKIEMHVGAVEPNGRAVVVDDLIATGGTLSAAVKLIERAGAEVVECACVIELPELKGRDKLGNKPVFVLVKAD

SEQ ID NO: 30199 - protein, 351 aa, Oryza sativa
MSHVRSASAAADAASDWQKVRAEWFARFKEEYERKVAEHPDVDWSDELAVDARHYRESWERIYARAYGPFDKSTSIPPMRYTAEPVPFDASEQYTLQIFCVKIKELRRGLQWPIHVFGLIAARDTIDHNRNMVFDRTRDDCQTLTQEDPYLLLTGPTRAVVVCDPVYLEAVLRVKGSTESEDEDLSFFTVPLTDVNRPRETCLITREYTSKLSTLELTFGYVVRSVEATIKARIVDGSWPEEDGSSARFTACTSSLKHNGVLLLDSGDKRRKMRVDADGVVGLSRRVVSVEFEGELEVSVVTFDGSNICSKMEAEIRFVPEEVGESCVELDVGFCKMEITVAWSCLSLSCR

SEQ ID NO: 30200 - protein, 276 aa, Oryza sativa
MQTKPITMAPTSMLHRSLLCLAVLAAAAGGGAAGSPRLQCLENPPELTAAGDGEAGVVVQNLGGFAAYVTGGAAHSGRAIVLASDVFGFEAPLLRKIADKVGEAGYYVVVPDFFQRRPYNGDPSINITKWIMAHSPVKAAEDSKPIFAALKREGKYVVGVGGYCWGGKLAVEVAKTNEVGAIVISHPSSVTADDMKDVKCPIEILGAENDAVTPPRLVYQFVNALRQRPEVDYFARIFPGVAHGFACRYNASNPFAVRTAEQSLALMLDWFEKHLK

SEQ ID NO: 30201 - protein, 218 aa, Oryza sativa
MPVRVVDTATPSSQPTSGQDANAGHPSPPSCSLLSAGRCYAGTQNVSTIQKEEAWKVNVRINDCDLEQGYLCGTMEAVNVPLADTPVVTFWEGEIVDAKNYTFFTGKWEASPEDDIRHWSKFPSFTPLLSQIETDGGKSVDFSNYAYIFMRWKEQYFVNVGVDCGLTIAGFYYVCFSCSDGSISGYYYDPNSSPFQKLELKCTNEKDSGFTFSSYELQ

SEQ ID NO: 30202 - protein, 185 aa, Oryza sativa; identical to SEQ ID NO: 28868

SEQ ID NO: 30203 - protein, 85 aa, Oryza sativa
MGKGQAWVNGHLIGRYWSYKASGNCGGCSYAGTYSEKKCQANCGDASQRWYHVPRSWLNPSGNLVVLLEEFGGDLSGVTLMTRTT

SEQ ID NO: 30204 - protein, 223 aa, Oryza sativa
MALAAQLYGSAAAAAYRRLPLYGVPSSCRWPRTPLAALPKLSISTGGMGMNPFGVGAKVSIKCTNGTTQVDELNFRSNQTEELVEGDADTVTQKRSAKIHDFCLGIPFGGLLFCMGLLGYIFSRSTISLVLGVAPGLTTLFLGTLSLKFWRSGKSSFIFILGQAAISAVLAWKYSHAYILTNRILPWAFYASLSTAMACFYAYVLLSGGNPPPKKKMAATPSS

SEQ ID NO: 30205 - protein, 154 aa, Oryza sativa
MATSSSPLTALYSSFLSYTPSTPSMAALPRRRRAGCRYPRIQAVDLDQNTIVAISVGVVSVAIGIGIPVFYETQIDNAAKRDNTQPCFPCSGSGAQVCRFCTGKGTVTVVIGGGETEVSNCVNCDGVGSLTCTTCQGSGIQPRYLDRREFKDDD

SEQ ID NO: 30206 - protein, 251 aa, Oryza sativa
MSNTTMAISTILLFLLAGLVAAHGDGDTMIRLPSDGAEAPPRPPKPWDCCDNIEMSPLEIFPPLYRCNDEVKQCSAACKECVEAPGDFPRGAFVCRDWYSTVDPGHMCTAPDQPTTKRPWKCCDSIVQLPQRIFPPFWRCDDELEPGKCTAACKSCREAPGPFPGPLICEDVYWGADPGPLCTPRPWGKCCDKAFCNKMNPPTCRCMDEVNKCAAACKDCQRVESSEPPRYVCKDRFTGQPGPMCKPRAEN

SEQ ID NO: 30207 - protein, 51 aa, Oryza sativa
MVVRPQSSAIVATSIQSIISTVCELELEMRCFPISCESFGPCESQLPKCPG

SEQ ID NO: 30208 - protein, 195 aa, Oryza sativa
MVHVSFYRNYGKTFKKPRRPYEKERLDAELKLVGEYGLRCKRELWRVQYALSRIRNNARHLLTLDEKNPRRIFEGEALLRRMNRYGLLADGQNKLDYVLALTVENFLARRLQTLVFKAGMAKSIHHARVLIRQRHIRVGRQIVNIPSFMVRVESEKHIDFSLTSPFGGGPPGRVKRKNQKKASGGGGDGEEEDEE

SEQ ID NO: 30209 - protein, 174 aa, Oryza sativa
MATPNTYSVHISSETHRIEAWLASDEALARQLQEEENAHDAIATREFAGNASLEPSSPAVEYRPPNNAAQVATEDNVDPDNMSYEQLQALGEAVGNQSRGLSDDLICYLVPFKNKCSFFSRKKNDEECVICKSTYKSRQKLIRLPCSHCYHADCITRWLKINKACPVCNEEVFG

SEQ ID NO: 30210 - protein, 245 aa, Oryza sativa
MAWGTVSCPKVEKIFGPGNQYVTAAKMILQNSEAMVSIDMPAGPSEVLVIADKYANPVHVAADLLSQAEHGPDSQVVLVVAGDGVDLGAIEAEVSKQCSALPRGEFASKALGHSFTVFAKDMVEAISFSNMYAPEHLIINVKDAEQWEDLVENAGSVFLGQWTPESVGDYASGTNHVLPTYGYARMYSGVSLNSFLKYITVQSLSEEGLRSLGPHVAKMAEVEGLEAHRRAVTLRLQDIEATVTV

SEQ ID NO: 30211 - protein, 205 aa, Oryza sativa
MSGAAAAAARALPKAVTFVTGNAKKLEEVRAILGSSIPFQSLKLDLPELQGEPEDISKEKARMAASQVNGPVLVEDTCLCFNALKGLPGPYIKWFLEKTGHEGLNNLLLAYEDKSAFAMCIFSLALGPGEEPMTFVGKTAGKIVPARGPADFGWDPVFQPDGFDQTYAEMPKSVKNQISHRGKALALVKEHFAAANYKVQNDGSA

SEQ ID NO: 30212 - protein, 234 aa, Oryza sativa
MSLLEENGHDEIVIKAMGRAINKTVMVVELIKRRIGGLHQITSTESIDITDTWEPLEEGLLPLETTRHVSMIAITLSKKALDTLSPGYQPPIPAEEVRPAFDYEHEESFPTNRGRGRGGGRRGRGRAMSNGPPAYDYGEEWEEEGDYYNYRGRGRGRFRGRGRGRGRGGYYGGGRRGGYGYDYGYGGRGDYCEDQGEYFEEPEDYPPPGRGRGRGRRGGGPGPFRGRGRGRGRF

SEQ ID NO: 30213 - protein, 214 aa, Oryza sativa
MGWATRFLAAVCFFAAGVVFAPDVLLGARSGSGSGGGAAAAAKVAHLLCFATSWGAALWATFIGGIIMFKNLPRHQFGNLQGKLFPAYFMLISACAAVSVAAFAYLHPWKTASTVERYQLGFLLAALGFDLSNLLVFTPMTIEMMKKRHKIERDLSIGEEVGWSKNVQVAKNNPTLAAINKKFGMIHGLSSLANIMSFGSLAMHSWYLASKLEM

SEQ ID NO: 30214 - protein, 269 aa, Oryza sativa
MNVVFSRSRVLARNGSPVRFPVAHMVCNQTPPVGDKPSLMTFREVETVFHEFGHALQHMLTKQDEGFVSGIRGVEWDAVELPSQFMENWCYHKNTLLSIAKHYETGELLPEEIYAKLVAAKNFRAGTFSLRQIRFASVDMELHTTYDPNGSLSIYDVDRRVAERTQVLAPLPEDKFLCSFSHIFAGGYAAGYYSYKWAEVLSADAFSAFEDVGLDNEKAIEETGRRFRETVLALGGGKSPLEVFVSFRGREPSPEALLRHNGLLPVAAL

SEQ ID NO: 30215 - protein, 251 aa, Oryza sativa; identical to SEQ ID NO: 29041

SEQ ID NO: 30216 - protein, 323 aa, Oryza sativa
MAASSVASTLLLSLSSSSSPFLSPTSVSFLPSAAAAASSSPRVAVAAGKQKAAISVLRALRAEAATLPVLSFTGEKVGEVALDLKSAPPSTARAVVHRAIITDRQNKRRGTASTLTRGEVRGGGRKPYQQKKTGKARRGSMRTPLRPGGGVIFGPKPRDWSIKINRKEKRLAISTALASAAVADDAFVVEEFDEEFAAGPKTRDFVAALQRWGLDPKEKAMFFATDFADNVRLSGRNIGSLKMLTPRTLNLYDILDARKLFFTPAAINYLNSRYGATVFDEYEDDTNGEDDGEEEAEELQEGEGSAEEAAQDEAAETEADSNS

SEQ ID NO: 30217 - protein, 194 aa, Oryza sativa
MEAAVATPSLLFSSPTPRRPSSCLSLPPPCSSSYASNGAKLQQPRLQFVSQLTSRNSNGSGRRSISILSLRCSSSGTDSASSSATSERWVLEPAGDGDWRHIGYRVARPGGFQIASEAVVTDLESTNGTYINERRLSPGFPTPIDPGSLLIFGDIHLAMFRVSKMVVDVPSDASGAEQEAAETAQVSAAAQQTN

SEQ ID NO: 30218 - protein, 240 aa, Oryza sativa
MAAPNPSATMATAAASTPARAWWRAAAPASASTAAVSCFRVGAKSLTGLQMTSTRANKVRTVHVKSGEAEGSPSTESITRDEETLQRDLQTAIQEENYAQAAKLRDELRVLQEDSRSAVLAANARFYNAFKNGDLVAMHSAWAKGDHVYVVHPSAGRISGYDMVMQSWEMVCDADYEFPLQIDLQDVEVHVRGDLGYVTCLELVKTKGSSSWGRQVATNVFEKVDGKWFICIHHASHFDE

SEQ ID NO: 30219 - protein, 220 aa, Oryza sativa
MASSAPTPPPLLPVTNPAAAGSSPAATAVGSDAPIATPAFRLFLSKLSDSARRSLSDRRPWTELVDRSAFSRPDSLSDATSRLRRNLAYFRVNYAAVVAFALGASLLAHPFSLLVLLGLLAAWCFLYLFRGSDQPVVLFGRTFSDRETLLGLVVASFVAFFFTSVASLIISGLLVGGAIVAVHGACRMPEDLFLDDADAASGNSAAQGLLSFLGAPGSRV

SEQ ID NO: 30220 - protein, 299 aa, Oryza sativa
MAAIGVSHTSNLTSDSSKAKSAVSSIFAIVDRKSRIDPSDDAGVSLEPLRGDIEFQHVSFRYPTRPDVQIFEDLCLTIQSGKTVALVGESGSGKSTAISLLQRFYDPDAGHILLDGVDIQKFQLRWLRQQMGLVSQEPALFNDTIRANIAYGKEGDATESDIVSSAQLANAHKFISSLHQGYETMVGERGAQLSGGQKQRIAIARAIVKDPKILLLDEATSALDAESERVVQDALDRVMMNRTTVIVAHRLSTIQGADMIAVVKNGMIIEKGKHDALIGIKDGAYASLVALHVSAAAIS

SEQ ID NO: 30221 - protein, 257 aa, Oryza sativa
MAATRVWLSALLLAFLLAAAPVVQVARAQSMEEAATAEVVDGADLGIVSDDTQVSSDGPLSPAPGVETVCVFPKNAGKIVLAGEETELLVGLQNEGESTLNVVAIHSTLHLPFDHKMYGQNLTVQNFFNASVPVSVQATFPYTFAVSKFLQPGAYDLVGYIVYEIDQNPYQNVFYNGTVEVVEAGGLLSVESVFLITLGVALLGLFGLWAYGQVQQLSKKTKKAPKVELGTGTTDANMDEWLEGTAFAQGSKSKKKK

SEQ ID NO: 30222 - protein, 208 aa, Oryza sativa
MATAYAPMASQLMKSSLVCSKPRGLSGASLTRRPRFTVKAIQSEKPTYQVVQPINGDPFIGSLETPVTSSPLVAWYLSNLPAYRTAVSPLLRGIEVGLAHGYLLVGPFALTGPLRNTPVHGQAGALGAAGLVAILSVCLTMYGVASFGEGEPSTAPTLTLTGRKKEADKLQTADGWAKFTGGFFFGGISGVLWAYFLLYVLDLPYFFK

SEQ ID NO: 30223 - protein, 246 aa, Oryza sativa
MKKSWSCSWICPLEVIVQIRKLFFSSKEKMAPSSPPAMNMACARQGRLRQRYEGCYRLVSGCIPYMIKEDGENSSSSLQDDDHVLERLQVLMISTPKRSDLIFPKGGWEDDESIGEAACREAFEEAGVKGVLSGTPLGEWIFKSKSKQNSCGLQGACKGYMFALQVTELLESWPEQTTHGRRWVPVEEAYGLCRYDWMREALDKLKEQLLFAAGDDLRASPSPELDSSAGLYMVMPPVAEGAVALC

SEQ ID NO: 30224 - protein, 154 aa, Oryza sativa
MSSQGYDLAIIKVNGVSGECPILQFGDLEGVAHRANVVQLGYILGSQFALNLDPSVSPGSVIRPANQNGMMGSQDVVYSAAARHGASGSAVMFDDKVIGVLYSMSTNSQVAYARSSTTVHMALKNWLHPNDAAITTEKMIELVVKPLNDSELDD

SEQ ID NO: 30225 - protein, 263 aa, Oryza sativa
MAPALLYPTILFLAAAAVGAAAPPHSQCLDNPPDLTTAGGGGEAGVVVHDLGGFEAYVTGAVHSRRTILLATDIFGFEAPLLRKIADKVGLAGYYVVVPDLFHGQPYTFDQNRTEWLSAHSPVKAAEDAKPIFAALSKEGKSIVGVGGYCWGGKFAVEVAKTNEVEAIVISHPAAVTADDMKEVKWPIEILGAQNDTVTPPRLVYQFVHALRQRTDQIDYFAKVFQGVNHGFACRYNASNPFEVKKAEQALALMLDWFHKHLK

SEQ ID NO: 30226 - protein, 241 aa, Oryza sativa
MAANLEDVPSMELMTELLRRMKCSSKPDKRVILVGPPGCGKGTQSPLIKDEFCLCHLATGDMLRAAVAAKTPLGIKAKEAMDKGELVSDDLVVGIIDEAMKKTSCQKGFILDGFPRTVVQAQKLDEMLAKQGTKIDKVLNFAIDDAILEERITGRWIHPSSGRSYHTKFAPPKTPGLDDVTGEPLIQRKDDTAAVLKSRLEAFHVQTKPVIDYYTKKGIVANLHAEKPPKEVTVEVQKALS

SEQ ID NO: 30227 - protein, 321 aa, Oryza sativa; identical to SEQ ID NO: 29833

SEQ ID NO: 30228 - protein, 305 aa, Oryza sativa; identical to SEQ ID NO: 29243

SEQ ID NO: 30229 - protein, 249 aa, Oryza sativa
MDGEEDSEWMMMDVGGKGGKGGGGGGAADRKKRFSEEQIKSLESMFATQTKLEPRQKLQLARELGLQPRQVAIWFQNKRARWKSKQLEREYSALRDDYDALLCSYESLKKEKLALIKQLEKLAEMLQEPRGKYGDNAGDDARSGGVAGMKKEEFVGAGGAATLYSSAEGGGTTTTTTAKLMPHFGSDDVDAGLFLRPSSQHHPPPPHAGAGFTSSEPAADHQSFNFHSSWPSSTEQTCSSTPWWEFESE

SEQ ID NO: 30230 - protein, 149 aa, Oryza sativa
MADQLTDDQIAEFKEAFSLFDKDGDGCITTKELGTVMRSLGQNPTEAELQDMINEVDADGNGTIDFPEFLNLMARKMKDTDSEEELKEAFRVFDKDQNGFISAAELRHVMTNLGEKLTDEEVDEMIREADVDGDGQINYEEFVKVMVAK

SEQ ID NO: 30231 - protein, 265 aa, Oryza sativa
MQLYHHPYSLDSQKVRMALEEKGIDYTSYHVNPLTGKNMNVAFFRMNPSAKLPVFQNGAHVIYRAFDIIQYLDRLSVHLSGEIVPVNTEVYQWMQKVDSWNPKMFTLTHTPIKYRTFVSKFIRRVLIARMAEAPDLASMYHAKLREAYETEDKLKDPDIMKQSEEELSKLLDDVEAQLNNGKYLAGDEFSPADSVFIPILARITLLDLDEEYINCRPRLLEYYTLVKQRPSYKVAIGKFFGGWKKYRTLFKTSFFLCVRTLFRKY

SEQ ID NO: 30232 - protein, 212 aa, Oryza sativa
MGFPVGYSELLLPRLLLQVLLLLGHLHRFLLWAFHAVGLGDLIDNPPGLAATEQDLMLQGRGGGMAEGWASSSALQHRRPEFRAIPPMAIEEALPVVRFDELVASAPAAVCGGGDCAVCLSGICGRDEVRRLSNCRHVFHRGCLDRWMAHEQRTCPLCRAPLIPDELLPAASGLPDPSDYDLSYYPSPLPLAPTPTLLRPHELLLNGLGGFQ

SEQ ID NO: 30233 - protein, 250 aa, Oryza sativa; identical to SEQ ID NO: 28625

SEQ ID NO: 30234 - protein, 285 aa, Oryza sativa
MSVTPTNDVVMTGPVAGAGDVQAAETFRVFVGYDSREDIAYRVCRRSLLQRSSVPVAVIPIVQQELRSAGLYWRERGPTESTEFSFTRFLTPHLAGYRGWALFVDCDFLFVADVAELARMADPRYAVLCVHHDYAPKEATKMDGAVQTVYPRKNWSSMVLFNCAHPKNRAALTPEAVSTQSGAYLHRFMWLDDADIGEVPFVWNFLVGHNRVDPADTAGTAPRAIHYTSGGPWFEQYKNCEFAELWVQERDAYEAEAEEDEEKEEHEPKAILHAPAAPSAVPVDA

SEQ ID NO: 30235 - protein, 259 aa, Oryza sativa
MASGRIALLCLLGLLLVAASPAAIAAKDDKIFYQITFMWPGAYCAQTKAGCCMPKTDVAPASDFYVAGFTVYNATTNSSLSSCSNTPFDMNQIGDVTRLMQYWNNIRCPSKSGQKGWKNAWETSGVCSDLTESAYFDTALALRDKINPLSRLVSNGIKPDFGLYSVKKIKEVIEEGIGAPALIQCSKGPFNKFQLYQIYVCVAEDAKTFVECPSPRKPYTCGDDILFHPFKKWMLKTNSTKSYAAADAIDQLLEAVMEI

SEQ ID NO: 30236 - protein, 227 aa, Oryza sativa
MEATGTRLTRSASLSPRLRRSPTALCVSPRSMHHHHQQQQQSLRRATSDADIARSAPATASSPLPLLLRDILEEDVVVVVDGAGRGKGNDDDDKTSGRGGGGGGHMDMGEYYRRVLRVEPENPLVLRNYGRYLQEVEGDLGGAEECYARALLASPDDGDLLSLYGQLLWETSQDKDRAAAYLERAVQAAPDDCYVLGSYASFLWDAEEDEDDEAEDEMKPPLVPASC

SEQ ID NO: 30237 - protein, 218 aa, Oryza sativa
MLAKRLKRCSILLFAFLLADASGSLLESSGGQAEAIGPQISPATEGEGKRRSLATGMFCVALPNADPTALQEGLNWACGQGHANCAAIQPGGPCYKANNLPALASYAYNDYYQRNSGAGATCSFNGTATTTATDPSSGQCVFSGSSMAGGTTPAANAPSAVGPFTPGFGNGSSPTFPGTGSPGGALTPFDAADSVMSGARRALCALLLASPIFLSLVL

SEQ ID NO: 30238 - protein, 173 aa, Oryza sativa
MPDINYVVVPDLFHGDPATTSVNFTEWLESHSPVKEAEKAKSIFAFLRNEGKSVVGVGGYCWGGKFAVTVAKTNEVEAVVISHPYAVTADDMKEVKWPIEILGGQNDTVTPPRLVYQYVHALRQRNDIDFYAKIFPGVSHGFAGRYNTSDPFAVETGKQALALMLDWFQKHLK

SEQ ID NO: 30239 - protein, 263 aa, Oryza sativa; identical to SEQ ID NO: 28772

SEQ ID NO: 30240 - protein, 299 aa, Oryza sativa
MAPLRTLVIFLLLLLALVPALSRPDGGGGGFYDPARVTQLSWRPRAFLYSGFLSHDECDHLVNLAKGRMEKSMVADNDSGKSIMSQVRTSSGTFLSKHEDDIVSGIEKRVAAWTFLPEENAESIQILHYELGQKYDAHFDYFHDKNNLKRGGHRVATVLMYLTDVKKGGETVFPNAAGRHLQLKDETWSDCARSGLAVKPKKGDALLFFSLHVNATTDPASLHGSCPVIEGEKWSATKWIHVRSFDNPPDVSLDLPCSDENERCTRWAAVGECYRNPKYMVGTKDSLGFCRKSCGVCDA

SEQ ID NO: 30241 - protein, 236 aa, Oryza sativa
MAGSGELKLLGVWSSPYAIRVRVVLNLKSLPYEYVEENLGDKSDLLLASNPVHKSVPVLLHAGRPVNESQVIVQYIDEVWPGGAGGRPSVMPSDPYERAVARFWAAYVDDKVRPAWLAILFGSKTEEERAAAVAQAVAALETLEGAFGECSKGKPFFGGDGVGFVDVVLGGYLGWFTAIDKLIGRRLIDPARTPALAAWEERFRATDAAKGVVPDDADKLLEFRQTLLRWSASKAK

SEQ ID NO: 30242 - protein, 261 aa, Oryza sativa
MAGASAKVVAMLLSVLATYGFAAGVVYTNDWLPAKATWYGQPNGAGPDDNGGACGFKNTNQYPFMSMTSCGNEPLFQDGKGCGACYQIRCTNNPSCSGQPRTVIITDMNYYPVARYHFDLSGTAFGAMARPGLNDQLRHAGIIDIQFRRVPCYHRGLYVNFHVEAGSNPVYLAVLVEFANKDGTVVQLDVMESLPSGKPTRVWTPMRRSWGSIWRLDANHRLQGPFSLRMVSESGQTVIAHQVIPANWRANTNYGSKVQFR

SEQ ID NO: 30243 - protein, 149 aa, Oryza sativa
MMAGLQRSATTFRRSGSSGLVWDERFLTEDAEAAKAGDGDGGGGTEEPQPELRHSKSVGSIGMMRRVAADDGDDSEKTTKQQRKKKKKKKKDGQKEDDNRSQQVFRTKDIAPDVDPPSPRVSGCILCSIFSGSGSSSSATSRRAKPRKK

SEQ ID NO: 30244 - protein, 245 aa, Oryza sativa
MMMENSREQQPESSPANNNSKKKKKKTASRFRRVCVFCGSSPGKKASYQVAAVQLGQQLVERGIDLVYGGGSVGLMGLVSRAVHGGGGHVVGVVPNGVLPRELIGETLGEVRAVGSMHQRKAEMARESDAFIALPGGYGTLEELLEVITWAQLRIHHKPVGLLNVDGYYDSLLAFIDKAVHEGFVSPPARRIIVAAPTASDLLCKLEEYVPPPHDATALKLTWEMSTVSEQHAGSIYSPKPDMAR

SEQ ID NO: 30245 - protein, 349 aa, Oryza sativa
MAAPAHNMKYRFLGDSGLLVSTLSFGSWVTFDNQLDVEKAYSIMEHAYKSGINFFDNAEAYAAGKSEEIMGQVIKMGVERGVWTREDLVLSTKIFFGTKPGPNNCGLSRKHIIEGTKAALKRFDQSYVDLVFCHRPDPRTPIEEIVRAMNFTISQGWAFYWGTSEWSSAEIIEACEIADRLHLARPVMDQPEYHMLERSRVDYDYVNLYKKYKYGLTTWSPLASGVLTGKYNKGIPEGSRLSLPAYKDMLSRGLDEKVAKCIKFEEIAKEIGCSMAQLAIAWVASNENVSTVILGATSIAQLDENLKAMEFIDKITPEIKARIDEIAQFKPKAWITPESFVYTMREKWL

SEQ ID NO: 30246 - protein, 161 aa, Oryza sativa
MSLIRRSNVFDPFSLDLWDPFDGFPFGSGGSSSGSIFPSFPRGASSETAAFAGARIDWKETPEAHVFKADVPGLKKEEVKVEVDDGNILQISGERNKEQEEKTDQWHRVERSSGKFLRRFRLPDNAKPEQIKASMENGVLTVTVPKEEAKKPDVKSIQISG

SEQ ID NO: 30247 - protein, 245 aa, Oryza sativa
MDSDHWISRLMAAKRQYALQRAQNHHHATATATATAASHSHLDRYGYDDVEPEDEVRPDFPCPYCYEDHDITSLCAHLEDEHPFESKVVACPVCSARISKDLLDHITLQHSYLFRLQRHHRLRRVAVPSNHALSLGGRDLQETYLKVLLGNSSRSSGTNAASSVTDSLLSSLVLNLSSSEAEDTAKFSALAVVENNWFKRTLPSKTWKASSDSNLSQEERERRRRRAAVRSSFVQHLLVSTLFDD

SEQ ID NO: 30248 - protein, 252 aa, Oryza sativa
MLRRTFRLPVIPIGPLVRASTKTTSPETDATAGAITSFLDSHPPSSVLYVSFGSQFSIQAEHMAELAAALEATGRPFVWAVKPPDGHNINGEIQPKWLPDGFEERVTATKKGLLLHGWAPQVGILAHHSTGAFLSHCGWNSVLESMTHGVPIIGWPLAGDQYYNAKMLDEEWGVCLRVEGARGDMDMSAIIVDKATLVAVVETVMSPTAKAAEMRQRARAIKEIMEAAREGGHGSSANQALEEFFKTMKLNG

SEQ ID NO: 30249 - protein, 352 aa, Oryza sativa
MSPVGWLVLLLPALLRRGSSGVAAAGKVPAVIVFGDSSVDTGNNNFIPTIARSNFWPYGRDYADGLPTGRFSNGRLATDFISEAFGLPPCIPAYLDTNLTIDQLASGVSFASAATGLDNATAGVLSVITIGEQLQYFREYKERLRIAKGEAEAGEIIGEALYIWSIGTNDFIENYYNLPERRMQYTVAEYEAYLLGLAESAIRDVHSLGGRKMDFTGLTPMGCLPAERIGNRDNPGECNEDYNAVARSFNGKLQGLAARLNKDLPGLQLVYADTYKILASVVDKPADYGFENAVQGCCGTGLFEAGYFCSLSTSLLCQNANKYVFFDAIHPTEKMYKIIADTVMNTTLNVFL

SEQ ID NO: 30250 - protein, 286 aa, Oryza sativa; identical to SEQ ID NO: 30185

SEQ ID NO: 30251 - protein, 226 aa, Oryza sativa
MQFPLQMMTASNVAVRDIGLVNVLIPVEVGVVELEGTHPLPDMAVELVVDVVTALEDQTVLLTAMLMTDMMVGAMLMIAMVVVDVIDMPLIAIHQLPIVLQVTDMVVLIVMHQVDLPGKEAMKEMEDGPVEVTIVMNLEALVVMTEVACAWGVVTDTGPVDLLALLGVTEIGLPHMIVPAGQQHALMMTATDGGYFGALQKTRITNICSSSQFLLYLPSCISTSTL

SEQ ID NO: 30252 - protein, 235 aa, Oryza sativa
MGDSQYSFSLTTFSPSGKLVQIEHALTAVGSGQTSLGIKAANGVVIATEKKLPSILVDETSVQKIQSLTPNIGVVYSGMGPDFRVLVRKSRKQAQQYYRLYKETIPVTQLVRETAAVMQEFTQSGGVRPFGVSLLIAGYDDNGPQLYQVDPSGSYFSWKASAMGKNVSNAKTFLEKRYTEDMELDDAIHTAILTLKEGYEGQISANNIEIGVIRSDREFKVLTPAEIKDFLEEVE

SEQ ID NO: 30253 - protein, 368 aa, Oryza sativa
MADQANTIEVPTDAELLQAQADLWRHSLYYLTSTGLRCAIKLGIPTAIHRLGGAASVPGLMTKLSLPASKQPFLRRLMRVLVTNGVFAAEHNDGEVERYCLTPLSRILVDGVVADEHHSQTSFVLAATSRHYLEAALGLDEWFRKDVAPPLPSPFEDVHGASLFDESTALLDPELDAVVNEGLAAHDNLGIGTILRECRDLFRGLRSLTDCCGGDGTTARAIAKAYPHVKCTVLDLPKVIDKAPNDGVVNYVAGDLFHTVPPAQAVMLKLVLHHWSDDDCVKILTQCRKAIPSREEGGKVIIIEILVGPSLGPVMFEAQLMMDMLMLVNTRGRQRDERDWRDLFLKAGFNDYKIVKMLGARGVFEVYP

SEQ ID NO: 30254 - protein, 341 aa, Oryza sativa
MASEGVLLGMGNPLLDISAVVDDAFLTKYDVKLNNAILAEEKHLPMYDELASKGNVEYIAGGATQNSIRVAQWMLQTPGATSYMGCIGKDKFGEEMKKNAQAAGVTAHYYEDEAAPTGTCAVCVVGGERSLVANLSAANCYKSEHLKKPENWALVEKAKYIYIAGFFLTVSPDSIQLVAEHAAANNKVFLMNLSAPFICEFFRDAQEKVLPFVDYIFGNETEARIFAKVRGWETENVEEIALKISQLPLASGKQKRIAVITQGADPVVVAEDGQVKTFPVILLPKEKLVDTNGAGDAFVGGFLSQLVQQKSIEDSVKAGCYAANVIIQRSGCTYPEKPDFN

SEQ ID NO: 30255 - protein, 232 aa, Oryza sativa; identical to SEQ ID NO: 28780

SEQ ID NO: 30256 - protein, 139 aa, Oryza sativa
MLRRSAEANLAGVKAAAVATIASAVPTVSSLSSFSNASSFLCQLILYQKSRFSNLAAYACVCCLFQLASVRMVPWAKANINPTGQALIICTAAGMAYFVAADKKILSLARRHSFENAPEHLKNTSFQGTGRPHPAFFRP

SEQ ID NO: 30257 - protein, 275 aa, Oryza sativa
MGSTRLLVLLAAASLLLATAVPAARAQEETDHEKEFTYISGDEKGPEHWGKLKPEWAQCGAGEMQSPIDLSHERVKLVRDLGYLDDSYRAAEASIVNRGHDIMVRFDGDAGSVVINGTAYYLRQLHWHSPTEHSVDGRRYDMELHMVHESAEKKAAVIGLLYEVGRPDRFLQKMEPYLKMIADKEDREEKVGMIDPRGARGRASVYYRYMGSLTTPPCTQGVVWTIVKRVRTVSRYQLDLLREAVHDEMENNARPLQAVNNRDISIFRPYPHKRY

SEQ ID NO: 30258 - protein, 385 aa, Oryza sativa
MSARPTVSVYSGSQDKVVGSSPLPAVFTSPIRSDIVQFVHKEMAKNGRQAYGVNRLSGMKHSAESWGTGRAVARIPRVKGSGTHAAAAGAFGNQCRNGRMFAPTKTYRRWHRRINLHQKRYAVTSALAATAVPALLLARGHKIENIAEVPLVVEDAIQAYQKTKDAVAFLEAIRANDDVNRVNDSKTLRAGRGKARNRRFVQRRGPLLVLPDNKGVRAFRNIFGLDIGNVNALNLLTLAPGGHLGRFVIWTQGAFAQLDKIFGTFTQESAVKKGFVLPPLQLTNSDVTRIMRSDEVRRALTPKKLQAKKPTRYAKPSNGMKNRRLRLRLNPFEVKRSIASKGLRNPKTVRARRQARNERLRKAKKGVRAMVAANKSKPAKKTAKK

SEQ ID NO: 30259 - protein, 72 aa, Oryza sativa
MAMAAAWSPALAAVLLAAAVASASNSEGDALYALRRALADPRGVLQSWDPTLVNPCTWFHVTCDRAGRVTRL

SEQ ID NO: 30260 - protein, 230 aa, Oryza sativa; identical to SEQ ID NO: 30194

SEQ ID NO: 30261 - protein, 205 aa, Oryza sativa
MAARLLLLVLFAVVAARVGAAAAYQPGSAEGHTIAGRIKIDAASAIAKGFGLPAKTSNTKVILNGGQRVTFARPDGYFAFHNVPAGTHLIEVSSLGYLFSPVRVDISARNPGHIQAALTENRRVLNELVLEPLREEQYYEKREPFSIMSLLKSPMGMMLGFMVIMVFVMPKMMENIDPEEIKQAQEQMRNSPVPSFSGLLARANS

SEQ ID NO: 30262 - protein, 316 aa, Oryza sativa
MDSLGVLLVAPMNAYLEQELDRRCRLFRLWESPADRRDDYLRAHASSIRAVVPYALQGVDAAMIDALPSLEIVSSFSVGIDRVDLDACLRRGVRVTNTPDVLTDDVADLAVGLAIAALRKIPQADRYVRAGKWKSKGDFTLTTRFSGKRVGIIGLGRIGLAVAKRVEAFDCPVNYYQRTKQDHPGYTYYPSVVELAASSDVLVVACPLNEHTRHIVNREVMEALGPRGVLINIGRGPHVDEAAMVAALADGRLGGAGLDVFEDEPNVPEALLGMDNVVLVPHVGSATHETRTAMADLVLGNLEAHVAGKPLLTQVV

SEQ ID NO: 30263 - protein, 185 aa, Oryza sativa
MEKVSHLMNGGCGGVGKRRGLPAAGVGLGLQKQNSWSPDMERDEAWERRRGMNKGSSSSSALRRVRSVTDDDLDELRGCMDLGFGFEAAGCPLCGAGRSRLVETLPALDLYYAVHGNAGGGGGGAGEVCAAASPCSCGASSSDVSEESPLGSPMSILSPGDTPETVKMRLKQWAQVVALSVRNRC

SEQ ID NO: 30264 - protein, 160 aa, Oryza sativa
MAVLVARQGRELQRYTSAGGRIVVGCIPYRVRSGGEMEVLVITSQKGHGMMFPKGGWELDESMDEAARREALEEAGVRGDTETSLGCWYYKSRRYDTTYEGFMFPLRVTDELLQWPEMSSRKRTWATVQQAMDGCQHGWMREALERLVSRHATNKLQSAL

SEQ ID NO: 30265 - protein, 225 aa, Oryza sativa
MASSSLFLLASLLVLASWQQAIAFDPSPLQDFCVADMASPVRVNGFPCKNPMNVTSDDFFNAAKFDMPRNTMNKVGSNVTNLNVINFPGLNTLGISLARIDYAPMGVNPPHVHPRATELLTVLEGTLYVGFVTSNPNRLFSKVVHKGDVFVFPKAMIHFQMNLDHNKPAVAQSALSSQNPGVITIASAIFGSTPPISDDVLVKAFQVEKKVIDWLKSQFSENNHY

SEQ ID NO: 30266 - protein, 209 aa, Oryza sativa
MFTCRPLVSPPLPRRLAVASPLAPARPPPSSASSLRVVRCMAKERRVRMVAKQIQRELADMLTRDPVLQRAVLPEAALGADQYLSSLTTIADVELSNDLQVCKVYVSVFGDERGKKVAIAGLKAKTKYVRSQIGKRMKLRLTPEIRFIEDESMERGSRILAILDKLKEEREQQEGNEEEEDGEGANLSEEEEGDWDADEPDEEDIIYVK

SEQ ID NO: 30267 - protein, 56 aa, Oryza sativa; identical to SEQ ID NO: 29132

SEQ ID NO: 30268 - protein, 131 aa, Oryza sativa
MFPAYFMLISVCSAISVAAFAYLHPWKTASTIERYQLGFLISALGFDLSNLLVFTPMTTEMMMRRHKIEKDLGIGSEVGFSKNAEVARTNPTLAAMNKKFGMIHGLSSLANIMAFGSLAMHSWYLASKLQI

SEQ ID NO: 30269 - protein, 98 aa, Oryza sativa
MLVGNKSDLEDERAVSTEDAKEFAEKENLFFLETSALQATNVENAFQTVLSEIFKIHSKKNMAADPKANGAAPSLAGKKVVVPGPAQEIPKSKCCSSM

SEQ ID NO: 30270 - protein, 124 aa, Oryza sativa
MSFITRLGLFPGLTVYPFEAQLIYSSVLFFLIFLNQYTTSTRCVICRIHKRAGVLLREPERAVRQGRVHRVRGPIDVRLVGRDAPNGGGVQANRRRGAPRPARLPCPSRQDLPAHLTKPLLLHR

SEQ ID NO: 30271 - protein, 379 aa, Oryza sativa
MIGQGGSTMGGKKAKTVERNDHRLLCSDVLTEVFHRLPARTLASCRLVCKSWMSELTDPHFVHEHLKRSQQKLLLFANDKANDRSLAMVLADDTGATYQLTRPMASRSLFVHNSCNGLLCLGDSTGAVQLLNPTTGESATLPMPMYTAGSSQFSSCNWHCLGFCPSTKEHKVVHFYLGAHFDSFNVCCEIFTIGDKSWRQIGSFHGAPTDRGVHVNGAVYYLTKFRYIASSRINCLNLESENFDVMMLPPRKSYGGHCSLAELEGKLCLLVVEGGHDNPPRTMDILMLDSGDKTTWTHRYHISLPWLMPSCYFTPKHTLFHEGKIWVQLLARNLYCYDPSSSSTELKMACPESEFPFSTHTFIESIVPLRKDYFIKQIQ

SEQ ID NO: 30272 - protein, 276 aa, Oryza sativa
MGNACGGSLRSKYLSFKQTASQRHDTDDNNNAAAADSPKKPSRPPAAAKTDDHPVSASAPAAAMRRGQAPADLGSVLGHPTPNLRDLYAMGRKLGQGQFGTTYLCTELSTGVDYACKSISKRKLITKEDIEDVRREIQIMHHLSGHKNVVAIKGAYEDQLYVHIVMELCAGGELFDRIIQRGHYSERKAAELTRIIVGVVEACHSLGVMHRDLKPENFLLANKDDDLSLKAIDFGLSVFFKPGKLLMQNTKALNCVLIHYSDAKLVLRFANIVASH

SEQ ID NO: 30273 - protein, 171 aa, Oryza sativa
MSPQALLLAAAAAAIVVAGAASAAGGGVQPNGAANDLLPKYGLPRGLIPDSVASYSFDEATGEFEIHLAGTCYVWFGSHLVYYERSVRGRLSYGAISDLSGIQAKKLFLWVSVTGIVAHPDQGTVEFQVGFVSEALPASQFDAVPACGAGAQLRGAAGVIRELGLLPVAEA

SEQ ID NO: 30274 - protein, 404 aa, Oryza sativa
MAAARALLPVGGAAAVAVPRRLRSGEASSTSLSGPVSDGARLVRRMQLRPAPLLGSSTCALPSLRGKRLIRTPAASSSSSSLDSTGEAKPVGFAERYPALVTGFFFFMWYFLNVIFNILNKKIFDYFPYPYFVSVSHLLVGVLYCLVGWSFGLPKRAPINSTVLKLLFPVAVCHAIGHVTSTVSFAAVAVSFAHTIKALEPFFNAAASQFILGQQVPLTLWLSLAPVVIGVSMASLTELSFNWTGFVNAMISNISFTLRSVYSKKAMTDMDSTNLYAYISIIALLVCIPPAIIIEGPQLVQHGFKDAIAKVGLAKLVSNLLVVGLFYHLYNQVATNTLERVTPLTHAVGNVLKRVFVIGFSIIAFGNKITTQTGIGTCIAIAGVALYSYIKAKIEEEKTQMKSA

SEQ ID NO: 30275 - protein, 350 aa, Oryza sativa
MAAAALLRRSPAARALLSPALSSRLVASKPHSSSPAPPPPPSKAGANTKTFSIYRWDPDSPSTKPHLKDYKVDLSDCGPMVLDVLLKIKNEQDPSLTFRRSCREGICGSCAMNIDGDNGLACLTKISSASSASTISPLPHMFVIKDLVVDMTNFYNQYKSVEPWLKRKDAPPQPGKEIPQTKADRAKLDGMYECILCACCSTSCPSYWWNPEEYLGPAALLHANRLPLLGTLIKPKPNMFMHIQARGYHGVSEKRNLLDHKRRLLAAKYELKGKLYKAVCRDPDLPADMQDQFRYKLSKLPRNSSMTRLRNRCIFTGRSRAVYKKFRMSRIVFRSLANKGELLGVKKASW

SEQ ID NO: 30276 - protein, 289 aa, Oryza sativa
MNIKGGGRVPVPPAGAGTLVKLVVLGGTAVYAAVNSLYNVEGGHRAIVFNRIQGIKDKVYPEGTHFMIPWFERPIIYDVRARPNLVESTSGSRDLQMVKIGLRVLTRPMPEKLPTIYRTLGENFNERVLPSIIHETLKAVVAQYNASQLITQRETVSREIRKILTERARNFNIALDDVSITSLSFGKEFTHAIEAKQVAAQEAERAKFIVEKAEQDKRSAIIRAQGEAKSAELIGQAIANNPAFLALRQIEAAREISHTMSSSANKVFLDSNDLLLNLQQLTVANKSKK

SEQ ID NO: 30277 - protein, 150 aa, Oryza sativa
MADPYRAYAPPSSLGRDPQGDFPRHPPSEGSYYASRMAALHGTSDILRHDVPLQPRAYGLDGAAGASHPALAGLGGLAAGTTARGPSPLEDPALVRRSSSLGKTASIPDVEHPRPLLNLDGPREDESNILFVDGLPTDCTRREVARILPT

SEQ ID NO: 30278 - protein, 246 aa, Oryza sativa
MKKEIIIRISVKTDKCQKKAMKEAATVSGVQSVTLAGGDRNLLLVIGEGVDTNKLTKKLKRKVGSGEIVELRTVDTFEAAAAMFPGGMIMPPPAPGSKDAAAARAMATTRASPYHYQPSPYGPYHQQQQWQPPYAMAPSPYAYPYQYHPSPMAMAAGGGGYGYGGSSYSRAVALSHPAIYSPLVEKHDYHPMNHSTTTKKKTTTTTTTTGAGTGRAAAAAAGGKTFKAVSRSRRHHESDSNACCIL

SEQ ID NO: 30279 - protein, 187 aa, Oryza sativa
MAMWVFGYGSLVWNPGFAHDARLVGFVRDYRRVFYQGSTDHRGTPEFPGRTVTLEHQPGATCWGVAYKISTEQDKQTALEHLEVREKQYDEKIYLDLYMDSSPKTPAVKNVMVYLATTNKQSNQNYLGPAPLEEMAKQIYLAEGPSGPNKEYLFKLEDALNKIGVVDPHVQDLANAVRKYPDTAVSC

SEQ ID NO: 30280 - protein, 260 aa, Oryza sativa
MVPAQPANAPLPNPSSASSLPSVISTPSKEDAELAMAINASILSAIAEGVPDVQPITTTTATNDWGNPPSNSLNGWGPPDTSAPSKTSGQVPVVTSSSSTYNGWDVPGTSSGQSSSKHNKSQNSTFVVPQEALPSLPVPTAPPLAVGTFYDGPIQYPSIDSTPVDVTMPSADGGTAVSSAKPAENEGDAKPAESDANASNSGNTPPGTCVICLDAPVEGACIPCGHMAGCMSCLKDIESKKWGCPICRAKINQIIRLYAV

SEQ ID NO: 30281 - protein, 136 aa, Oryza sativa
MEEIAGGGSPPAMEEEERYVEVASRFYRVKPGAGGGGGGRRLHFLESCFLCKSSIAGDRDIFMYRGDAAFCSDDCRQEQMDMDEALQAVARRHRLRSSAAPASAEAAAAAPARSPMMHRRPTIANFAARTPVAATS

SEQ ID NO: 30282 - protein, 259 aa, Oryza sativa
MTWDKSDYLWYTTYVNIGTNDLRSGQSPQLTVYSAGHSMQVFVNGKSYGSVYGGYDNPKLTYNGRVKMWQGSNKISILSSAVGLPNVGNHFENWNVGVLGPVTLSSLNGGTKDLSHQKWTYQVGLKGETLGLHTVTGSSAVEWGGPGGYQPLTWHKAFFNAPAGNDPVALDMGSMGKGQLWVNGHHVGRYWSYKASGGCGGCSYAGTYHEDKCRSNCGDLSQRWYHVPRSWLKPGGNLLVVLEEYGGDLAGVSLATRTT

SEQ ID NO: 30283 - protein, 68 aa, Oryza sativa; identical to SEQ ID NO: 29616

SEQ ID NO: 30284 - protein, 281 aa, Oryza sativa
MKPLKDADAQEKAAPPPTEWYDPLSSPGRPVRVYADGIYDLFHFGHARALEQAKKSFPNTYLLVGCCSDEITNLYKGKTVMTEDERYESLRHCKWVDEVIPDAPWVINQEFLDKHRIDYVAHDALPYADTSGAANDVYEFVKAVGKFKETKRTEGVSTSDIIMRILKDYNQYIMRNLTRGYSRKDLGVSYVKEKQLRVNMGISKLREKVKEHQEKFHSAAKIAGSNPVEWMENADRWIVGFLEKFEEGCHMMETAIKDRIQEGLKRQSRSDPNLSGEDSDS

SEQ ID NO: 30285 - protein, 328 aa, Oryza sativa
MQYKNLGRSGLRVSQLSYGAWVTFGNQLDVKEAKALLQACRDAGVNFFDNAEVYANGRAEEIMGQAMRDLGWRRSDVVVSTKLFWGGQGPNDKGLSRKHIVEGLRGSLKRLDMDYVDVVYCHRPDATTPVEETVRAMNWVIDHGMAFYWGTSEWSAQQITEAWSVANRLDLVGPIVEQPEYNLFSRHKVESEFLPLYSTYGLGLTTWSPLASGVLTGKYAKGNIPADSRFALENYKNLANRSLVDDTLRKVNGLKPIASELGVSLAQLAIAWCASNPNVSSVITGATKENQIVENMKALDVIPLLTPEVVDKIEAVVQSKPKRTESYR

SEQ ID NO: 30286 - protein, 194 aa, Oryza sativa
MYRCIVRYGYKDVQKDDENFENHLVMSIAKFIQMEAEEAASSGSYESSEGRMAVIHTEDTTGTGLVMRDSNNEASGTSLTRSSRSETLRSLQSIYEQESGSLSRRRRVRFEIAEEERIDPQVRDELADLLDAKEAGVTYIIGHSYVKARKNSNFLKTFAIDYAYSFLRKNCRGPAVALHIPHISLVEVGMIYYV

SEQ ID NO: 30287 - protein, 209 aa, Oryza sativa
MDWSSVTAEDLVDALREVDWSTPPRPVSEFFSRFTAPRSYSKWTSRLKCNLYYYRTNYFILIMFILGMGFLRKPVSILAAFSTGLSIAFLNDSFAVTFNEKVTRTVRQFSPHLAAKMRPPLRPVIRGRPSSKRSIHICGRPRWVFVVLFSVVSCFLWMTSCSLLTVLWALIVGLLATLLHASFRTPNLKARLNTFREEFRAVWRNYSEF

SEQ ID NO: 30288 - protein, 211 aa, Oryza sativa
MSYAYLFKYIIIGDTGVGKSCLLLQFTDKRFQPVHDLTIGVEFGARMITVDSRPVKLQIWDTAGQESFRSITRSYYRGAAGALLVYDITRRETFNHLASWLEDARQHANANMTIMLVGNKSDLSHRRAVSYEEGEQFAKEHGLIFMEASAKTAQNVEEAFVKTAGAIYKKIQDGVFDLSNEANGIKLGYTVPGQSGGAGSSSSQGGGCCSS

SEQ ID NO: 30289 - protein, 352 aa, Oryza sativa
MDPFFRRASSDPLCLEDNSVQHGIERCPFLRNINEPTSFSFSSVNFPVPARGDKGPIFEDGPNFDMAFRVFHGQDGVVPLSHGSFERFEKPMPKPNPEFNPLAAKAATISLSAFGGFFSFGDFSNKRNKKNSNQKKPNNLPQNGGQPNNHEALSNEWLEMGQCPLAKSYRALSGVVPLVAKMMTPPAGMKLRCPPAVVAARAALSRTAFAKGLRPQPLPTKILVMALLGMAANVPLGIWREHTEKFSVQWFAAVHAAVPFIGMLRKSVLMPKTAMALTIAASILGQTIGSRAERIRLKRAAKVAAGSQGDASTRMSLKTGRYTDDVQFWDPLALRVESTIGTGTPVLVPTFH

SEQ ID NO: 30290 - protein, 257 aa, Oryza sativa
MEYAAGGELFEQICTAGRFSEDEARYFFQQLISGVSYCHSLEICHRDLKLENTLLDGSPTPRVKICDFGYSKSALLHSKPKSTVGTPAYIAPEVLSRKEYDGKVADVWSCGVTLYVMLVGSYPFEDPGDPRNFRKTISRILGVQYSIPDYVRVSSDCRRLLSQIFVADPSKRITIPEIKKHTWFLKNLPKEISEREKADYKDTDAAPPTQAVEEIMRIIQEAKVPGDMAAADPALLAELAELKSDDEEEAADEYDTY

SEQ ID NO: 30291 - protein, 166 aa, Oryza sativa
MDASAGSGNASGGAGAGASACCYYSLLGIRKNASATDVRAAYRRLAMKWHPDRCVSDPGEANRRFQRIQEAYSVLSDKGKRAMYDAGLFDPLDDDDQDFSDFMQEMLVMMDNVKNEKPDTLEDLQKMLQDIVSGDGGSRGGGVGGRVPSDGTRRTRVAPYPAQSRR

SEQ ID NO: 30292 - protein, 229 aa, Oryza sativa
MAAAARATARVGLALLLAVVGVGAQDYDFFFLVLQWPGSYCDTKQSCCYPRSGKPAADFGIHGLWPNRDDGSYPQNCDPDSEFDPSKVSDLLGSMRSEWPTLACPSNDGIRFWAHEWEKHGTCAAAALGDEHGYFEAALRLRSRLPVLAALRDGGVSPDGGYYTLSQIKGAIQRGVGAEPFVECNRDESGNSQLYQLYFCVDAAGERFVDCPASPGGRPCGNRIEFPAF

SEQ ID NO: 30293 - protein, 292 aa, Oryza sativa
MAAAAPSPPPVAALEQMSRTKMFGGHNLRFRHHSATLGCPMTFSVFLPPSPASDLPVLYWLSGLTCNDENFVTKAGAQRAAAAHGIALVAPDTSPRGLNIEGEADSWDFGVGAGFYLNATNEKWKNWRMYDYVVKELPKVLSDNFEQLNTSRASIFGHSMGGHGALTIYLKNTDKYKSVSAFSPVVNPINCPWGQKAFSNYLGPAKSDWKEYDATCLIKKCNKISTPILIDQGEDDKFLAKQLLPRNFEEACKAVGAPLTLRMQPGYDHSYFFIATFIDDHIAHHSQFLKSA

SEQ ID NO: 30294 - protein, 299 aa, Oryza sativa
MVPGHEVVGEVVEVGPEVTKYSAGDVVGVGVIVGCCRECHPCKANVEQYCNKRIWSYNDVYTDGRPTQGGFASAMVVDQKFVVKIPAGLAPEQAAPLLCAGLTVYSPLKHFGLMSPGLRGGVLGLGGVGHMGVKVAKSMGHHVTVISSSARKRGEAMDDLGADAYLVSSDAAAMAAAGDSLDYIIDTVPVHHPLEPYLALLKLDGKLILMGVINQPLSFISPMVMLGRKAITGSFIGSMAETEEVLNFCVDKGLTSQIEVVKMDYVNQALERLERNDVRYRFVVDVAGSNIDDADAPPA

SEQ ID NO: 30295 - protein, 255 aa, Oryza sativa; identical to SEQ ID NO: 29267

SEQ ID NO: 30296 - protein, 289 aa, Oryza sativa
MRSAIQYISHKWPFWNRTDGADHFYVVPHDFGACFHYQEEKAIERGILPLLQRATLVQTFGQENHVCLKEGSITIPPYAPPQKMQAHLIPPDTPRSIFVYFRGLFYDTGNDPEGGYYARGARASLWENFKNNPLFDISTDHPPTYYEDMQRAVFCLCPLGWAPWSPRLVEAVVFGCIPVIIADDIVLPFADAIPWEEIGVFVEEKDVPKLDTILTSMPIDDILRKQRLLANPSMKQAMLFPQPAQPRDAFHQILNGLARKLPHPEGVYLQPSDKRLNWTAGPVGDLKAW

SEQ ID NO: 30297 - protein, 279 aa, Oryza sativa; identical to SEQ ID NO: 29997

SEQ ID NO: 30298 - protein, 318 aa, Oryza sativa
MAAMAMVSVQLTVAARPLRSRRALSVFTCAAPPRQRPPPGPTKHRRLRHDADAQPPRKRGHPPPPPRRTRTRGPPARPQQSYTDDDEEEDDQDEEEGSFGGGTRAAAMPKPPAGFVLDDQGRCIAAASKRIVTIIDDTNNRPLECIIRRVFRSTLDHDCMLLCPVDMPVQVLKSANFSGWIAVDDDQIKEIIPSVAYALARVHMHFVESGFCYTARGGFCFPEDAIQEFHDSGDGGDSVPFEGVEICCFNLDGAHYMIYTPVDPLLFVAVKDKDGVLRIAEDELMDDPAVVGAIDEETEFTALVEEEEALLESVLGER

SEQ ID NO: 30299 - protein, 271 aa, Oryza sativa
MGIVEEAHNLRVVGEGKRGVIVLAHGFGTDQSVWKHLVPHLVADYRVVLFDTMGAGPTNPDYFDFSRYATLEGYALDLLAILQELRVASCIYVGHSVSAVIGAIASISRPDLFSKLVLLSASPRYLNDVDYYGGFEQEDLDELFEAMGSNYKAWCSGFAPLCVGGDMESVAVQEFSRTLFNIRPDIALSVAQTIFQSDVRSLLPLVTVPCHIVQSTKDLAVPVVVSEYLHKHLGGDSIVEVMPSEGHLPQLSSPDIVIPVLLRHIQHDIAV

SEQ ID NO: 30300 - protein, 116 aa, Oryza sativa
MARAQLVLVALVAALLLAAPHAAVAITCGQVNSAVGPCLTYARGGAGPSAACCSGVRSLKAAASTTADRRTACNCLKNAARGIKGLNAGNAASIPSKCGVSVPYTISASIDCSRVS

SEQ ID NO: 30301 - protein, 210 aa, Oryza sativa; identical to SEQ ID NO: 30178

SEQ ID NO: 30302 - protein, 176 aa, Oryza sativa
MSSDSSSWARALVQISPYTFSAIGIAVSIGVSVLGAAWGIFITGSSLIGAAIKAPRITSKNLISVIFCEAVAIYGVIVAIILQTKLESVPTALVHHPESLRAGYAIFASGLIVGFANLVCGVCVGIIGSSCALSDAQNSSLFVKILVIEIFGSALGLFGVIVGIIMSSQATWPAKA

SEQ ID NO: 30303 - protein, 208 aa, Oryza sativa
MLAARLLQWRFANARMEKAMARATAAAENKLFYTWLRVAELRNIQAAKRIVAQRRRQKLKLARLLRPQLSLLASWDSLAKPHADAVDDLGAVLAAACTALPLADGAQGDMESLHEAMFACVGTVNDIEANADMFFATAGVTSSTLEELSTTIKQEVEGLQEAMKLARIVTSLQVQEVSLRANLIQIQAKQKVDMGASVPAIATSGWCF

SEQ ID NO: 30304 - protein, 224 aa, Oryza sativa
MASSSLFLLGALLVLASWQAIVAYDPSPLQDFCVADMNSPVRVNGFACKNPMDVSSEDFFNAAKFDMPRNTFNKLGSNVTNLNVMEFPGLNTLGISLARIDYAPMGVNPPHIHPRATELLTVLEGTLYVGFVTSNPNKLFSKVVCKGDVFVFPKAMIHFQMNLDHDKPAVAQSALSSQNPGVITIASAVFGSQPPISDDVLTKAFQVEKKLIDWLQSQFWENNY

SEQ ID NO: 30305 - protein, 270 aa, Oryza sativa
MHAIMARRCSGDYSTAGQRAGEEGGGGGGAGLRLFGVQLHAAAASSPASYLHKSYSMDCLRLQVSSPSSLQSSSSSPSPLTSSLLLSIDEGCERPAADGYLSDGPHGAAATMRERKKGVPWSEQEHRLFLAGLEKLGKGDWRGISRSFVTTRTPTQVASHAQKFFLRHNSAAKKTNNKRRSSLFDMVQDCDSGGRSLASSDPATRCNNNISASLSLQVSHHKSGDSAWPSSETPSVSEAQQGHGYGTSHHCSPLDLELGMSLSTTPSIGT

SEQ ID NO: 30306 - protein, 266 aa, Oryza sativa
MASDFLADYIFLAVGRVGSSTDLIVQRVEFVLDADKRSYLMDLLHAQRANGTHGKQALTLVFVETKRGADALENWLYNNGFPATSIHGDRTQQEREYALRSFKSGATPILVATDVAARGLDIPHVAHVINFDLPNDIDDYVHRIGRTGRAGKSGLATAFFNESNTPLARPLSELMQEANQEVPQWLERYAARSSFGGGGGRNRRSGGGARFGGRDFRRDRGSGGGGYGGGGGGYGGGGYGGGGGGGGYGGGSSYGGGGQGFSSAWD

SEQ ID NO: 30307 - protein, 281 aa, Oryza sativa
MAAAALLRRSPAARALLSPALSSRLVASKPHSSSPAPPPPPSKAGANTKTFSIYRWDPDSPSTKPHLKDYKVDLSDCGPMVLDVLLKIKNEQDPSLTFRRSCREGICGSCAMNIDGDNGLACLTKISSASSASTISPLPHMFVIKDLVVDMTNFYNQYKSVEPWLKRKDAPPQPGKEIPQTKADRAKLDGMYECILCACCSTSCPSYWWNPEEYLGPAALLHANRWIQDSRDQFTKERLDSINDEFKLYRCHTIKNCTHACPKGLNPAKHIDTIKKLQLEA

SEQ ID NO: 30308 - protein, 183 aa, Oryza sativa
MATILENIQKARFLPTRPLKDELPTFQGGGGGGGGGGGKESHLMGLRKRLSSFSDKIQPISSASAEWAFRRSKSAPSLGAFAGGPLKRWWDWGVGWLMSKKPGFATDLEMNEEEVAALGRGSRGSWGHILYKMRSGVRRLVTSHSLPTTHRAAAAASASAQCKPAATFNYTQSFHSGQTAMAY

SEQ ID NO: 30309 - protein, 229 aa, Oryza sativa
MAHRRRCLLLLLAVLLPAMAARGDPDAVQDFCVPDAGRGRPVELAMLPAYPCRSPANLTAGDFAFSGVRAAGNFSPETGFAGVSVTPAQFPGLHTLGMSFARADLSAAGGVNPPHYHPRATETALVLAGRVYAGFVDSGGRLFAKVLEQGEVMVFPRAMVHFQLNVGDTPATVYGAFNSENPGIVRIPATVFGSGIREAVLERAFGLTPAELRRLEKRFGPPKKAEMED

SEQ ID NO: 30310 - protein, 318 aa, Oryza sativa
MGGVHGVCYGMNGDNLPSQSEVVQLYKSNGIGAMRIYSPDQKALDALRGSGIAVIIDVGGIGAVANLANNPSAAADWVRDNVQAYWPNVIIRYIAVGNELGPGDMGTILPAMQNVYDALVSAGLSNSIKVSTAVRMDAITDSFPPSHGVFRPDLQQFMVPIAQFLANTMSPLLANVYPYFAYRDNPRDIPLNYATFQPGTTVRDNDSGLTYTNLFSAMVDAVYAALEKAGEPGVRVVVSESGWPSAGGFAANVENARNHNQGVIDNVKNGTPKRPGQLETYVFAMFNENQKPGDETERHFGLFYPDKTPVYPITFPPN

SEQ ID NO: 30311 - protein, 215 aa, Oryza sativa; identical to SEQ ID NO: 29262

SEQ ID NO: 30312 - protein, 117 aa, Oryza sativa
MARAQLVLVALVAALLLAGPHTTMAAISCGQVNSAVSPCLSYARGGSGPSAACCSGVRSLNSAATTTADRRTACNCLKNVAGSISGLNAGNAASIPSKCGVSIPYTISPSIDCSSVN

SEQ ID NO: 30313 - protein, 169 aa, Oryza sativa
MERGASFAVVMAAMAVVLATTSTAQAQTTATDIVNIHNAARSAVGVPALSWDDNLAAYAQGYANQRAGDCALRHSDRNNYQYGENLSWNPSVQAWTAASSVDQWVAEKGSYDYASNSCVGGAMCGHYTQVVWRDTTAVGCAAVACNANRGVFFICTYFPAGNVQNQRPY

SEQ ID NO: 30314 - protein, 203 aa, Oryza sativa
MAVKVYVVYYSMYGHVAKLAEEIKKGASSIEGVEAKIWQVPETLHEEVLGKMGAPPKPDVPTITPQELTEADGILFGFPTRFGMMAAQMKAFFDATGGLWSEQSLAGKPAGIFFSTGTQGGGQETTPLTAITQLTHHGMVFVPVGYTFGAKMFNMGEVQGGSPYGAGTFAADGSRWPTEMELEHAFHQGKYFAGIAKKLKGSA

SEQ ID NO: 30315 - protein, 305 aa, Oryza sativa; identical to SEQ ID NO: 29332

SEQ ID NO: 30316 - protein, 328 aa, Oryza sativa
MRAVVIARAGGPEVLEERDVGEGLPPPGEGEVLVGVSAAGVNRADTVQRQGRYPAPPGASPYPGLECSGTILALGPNVPSRWAVGDQVCALLSSGGYAEKVVVPAGQLLPVPEGVSLTDAAGLPEVACTVWSTVFVTSHLSPSESFLIHGGSSGIGTFAIQIAKHLGIKVFVTAGSEEKLAACKGLGADVCINYKTEDFVARVKEETNGKGVDVILDNIGGLYLQRNLNSLAVDGRLFIIGFQGGAVTEVNLQPMLARRLTIQAAGLRNRSLDNKALIVSEVEKNVWPAVVQGKVKPVIYKTFPLSEAAEAHKLMEESSHIGKILLIP

SEQ ID NO: 30317 - protein, 190 aa, Oryza sativa
MGDTERSSILVHILVIALCLTAFGFAIAAERRRSTGSIVTDSFNSTFCVYDSDIATGYGVGAFLFLLSGQSLLMVVTKCMCFGKPLAPGGSRAWSIIYFASSWVTFMIAESCLIAGATKNAYHTRYRHMVYVGSWTCESLRKGVFIAGAVFVVFTMILNVYFYMYYTKSTSQAAKKINKTTPNVGMTGYA

SEQ ID NO: 30318 - protein, 199 aa, Oryza sativa; identical to SEQ ID NO: 28539

SEQ ID NO: 30319 - protein, 149 aa, Oryza sativa
MGRIAQISKVIAEGGYDKVFHQTFECLPDEKLKKAYACYLSTSHGPIMGVLYISTAKIAFCSDSPVAYVTEDNKNQSSIYKVVVPVAQLRSVTPTASQQNPAERYIQVVSVDNHDFWFMGFVNYDGAVKSLQEAVRGGKASLHHHMYFL

SEQ ID NO: 30320 - protein, 340 aa, Oryza sativa
MATTQLLSTVEHRETLPEGYARPESDRPRLAEVATDSNIPLIDLASPDKPRVIAEIAQACRTYGFFQVTNHGIAEELLEKVMAVALEFFRLPPEEKEKLYSDEPSKKIRLSTSFNVRKETVHNWRDYLRLHCHPLEEFVPEWPSNPAQFKEIMSTYCREVRQLGLRLLGAISVSLGLEEDYIEKVLGEQEQHMAVNYYPRCPEPDLTYGLPKHTDPNALTILLPDPHVAGLQVLRDGDQWIVVNPRPNALVVNLGDQIQALSNDAYKSVWHRAVVNAVQERMSVASFMCPCNSAVISPARKLVADGDAPVYRSFTYDEYYKKFWSRNLDQEHCLELFKGQ

SEQ ID NO: 30321 - protein, 178 aa, Oryza sativa
MVTAARLLPLILFLTAVAVGCSAWEMNIRLPTERLAYGGGEAVVAPIIHALRPLLGSGRQLAARAGVACDSWRLGVEAHNVIDWRTVPAECEGYIGHYMLGEHYRRDFAVVVDEAVAYAETLKLAGNGKEIWVFDIDETSLSNLPYYAKHGFGATPYNATSFREYVAEGSAPALPETR

SEQ ID NO: 30322 - protein, 93 aa, Oryza sativa
MRRSLRHPRAVADDAAADHPLVSSLKALRRLVFSPAAVLRPFLYAVRSEDAGAAVTSASLAALHEVMALMGPSLTSAALREWACRQLPVRGRG

SEQ ID NO: 30323 - protein, 243 aa, Oryza sativa
MMNALGLSVAATSTGSPFHDVCCYGAGIAGNIFALVLFISPLPTFKRIVRNGSTEQFSAMPYIYSLLNCLICLWYGLPFVSYGVVLVATVNSIGALFQLAYTATFIAFADAKNRVKVSSLLVMVFGVFALIVYVSLALFDHQTRQLFVGYLSVASLIFMFASPLSIINLVIRTKSVEYMPFYLSLSMFLMSVSFFAYGVLLHDFFIYIPNGIGTVLGVIQLVLYGYFRKGSREDSLPLLVTHT

SEQ ID NO: 30324 - protein, 232 aa, Oryza sativa
MAEPEVVVAAGGEAMEAEAAEPAAANPSQKREREEGDDSAAGAAGEEAAEGAAAKKQKVEGEGEAKGAEDEAKGEEEEGAKEEEAKPVKLGPKEFATGVEMFDYFFALLHSWAPQLEINKYEHMVLEDLLKKGHAESDRKIGAGIEAFEIRNHPVFQSRCFFVRRVDGSSDDFSFRKCVDSILPLPEDMKIGNKSNGKKGGGHFKGGGGRGGGRGGGRGGGRGFRGRGRRGN

SEQ ID NO: 30325 - protein, 66 aa, Oryza sativa
MDLHAASRRSGEASQALATTGHCTGRHHHAASRCSGLRWPHRPCVVLPDAAIVDLAAAGLDLPPPC

SEQ ID NO: 30326 - protein, 140 aa, Oryza sativa
MVSFEMNDLKKIGLGLTGFGVFFSFLGIIFFFDKGLIAMGNILFLSGLGLTIGLKSTMQFFTKPKNYKGTISFGAGFFLVLIGWPFFGMLLEAYGFVVLFSGFWPTLVVFLQRIPIIGWIFQQPFVTSFLDRYRGKRVPV

SEQ ID NO: 30327 - protein, 227 aa, Oryza sativa
MKDGVAGGGGERPCMCYFHPREEVVGVCSQCLRERLLLLLASKTSPAAAHLLADRPLHRKNSSISLPKVFALGSSFLQRLDSSRHHLRPAPHDSDANSDADTASIASLDDSFISIKFEDNGKATWDSQKAAAGEKKTDTTTTAVVEHVKRGGVTRWRKQVVGRLLQLARWKRSGNGKAAACHQLGIDGKKTAERSSSKGTTVRGRGRGRSWIRTLTITRRPPAMPLS

SEQ ID NO: 30328 - protein, 212 aa, Oryza sativa
MDRSMARRRRGTSFTASWQLGLAVVVAAIMASSAQPQQQQQQPPQPPGQPANAPSCPPVQASLSPCVSYFIGNSSTPSDACCEQMRAMFQSQAPCLCAAVASAPSPLAPVLGGVQSLLPTACNLPPNACADATGSTSGSAPAGGSSATPSTGATAAAPAMEPAGMDPAMTAGGGSKSVPGMPYSAAAGVHGGGASAAVAVLISSMLAYACMI

SEQ ID NO: 30329 - protein, 103 aa, Oryza sativa
MERILDDESGEKVLSALSEAGLFTNSGLIKDKVLFCSTENGRTSFVRQLEPDWHIDTSPEIVHQLARFIKYQLHISPQRAERVASNVFSSTSLEQFFGGLDQR

SEQ ID NO: 30330 - protein, 228 aa, Oryza sativa; identical to SEQ ID NO: 29740

SEQ ID NO: 30331 - protein, 229 aa, Oryza sativa
MASLRLRHLSPSGATAPPSSFAQLRRPSSCLAGPRPLRSRLTRVYALSSNDIRVGSNLEVDGAPWKVIEFLHVKPGKGAAFVRTKMRNYITGNTVDKTFRAGSTIPEASISKETKQFTYKDGAQFVFMDLTTFEESRLNESDVGDRQKWLKEGMDCNLLYWNGRIIDFDLPITVRLTVTDTDPGQGDSAQGGTKPATVETGAVVTVPSFVNVGDDILIDSRTGQYMNRA

SEQ ID NO: 30332 - protein, 209 aa, Oryza sativa
MASALSSLRYGDSLSVVAISGATAVLCEAISWLLIYRTATYNSLRATIERHSRKLDAMKAGASNSSSSSSAGAGASGSSQPAGSSSSRAKKMDRVETSLKDAARELSLSKLKSGAVVAAVLFVVFGLLNSLFEGRAVAKLPFAPVPLVQRMSHRGVPGNDPTDCSMVFLYFLCSISIRTNLQKLLGFAPPRAAAAAGGGLFPMPDPKVN

SEQ ID NO: 30333 - protein, 356 aa, Oryza sativa; identical to SEQ ID NO: 29877

SEQ ID NO: 30334 - protein, 130 aa, Oryza sativa
MVRVSVLNDALKTMYNAEKRGKRQVMIRPSSKVIIKFLIVMQKHGYIGEFEFVDDHRSGKIVVELNGRLNKCGVISPRFDVGVKEIESWTARLLPSRQFGYIVLTTSAGIMDHEEARRKNVGGKVLGFFY

SEQ ID NO: 30335 - protein, 267 aa, Oryza sativa
MAAMNNDLGGLGGRPATSQANPFESALYGAGPGLIRSGLGAYGEKFLGSSSEFMQSNITQYLSNPQYYFQVNSQYVRNKLKVILFPFLHRGHWTRITEPVGGRLSYKPPIQDINAPDLYIPLMAFGTYVVIAGYALGVLGRFTPEALTLQFTKGLLGWFLQVILIRVLLYTLGSGEAPLLDIVAYAGYGFAGTSLAMLVRVFWSPSYYFVLPWFSICTGVFLVKTMKRVLLGAPRSYERHPSRNHYFLLFLAVVQFPMLFWLGNISG

SEQ ID NO: 30336 - protein, 246 aa, Oryza sativa
MDASLMGAPSAAAGDNPTSGEHRMGTTIVGVCYDGGVVLAADSRTSTGMYVANRASDKITQLTDNVYICRSGSAADTQVISDYVRYFLHQHTIQLGQPATVKVAANLIRLLAYQNKNMLQAGMIVGGWDKYEGGQIFSVPLGGTILRQPFAIGGSGSSYLYGLLDHEWKEGMSQEEAEKFVVKVVSLAIARDGASGGVVRTVTINADGVSRKFHPGDKLQLWHEELEPQNSLLDILAAGNPDPMVQ

SEQ ID NO: 30337 - protein, 236 aa, Oryza sativa
MAGADVDVGTELRLGLPGGGGGAAEAAAKAAKRGFEETIDLKLKLPTAGMEEAAAGKAEAPAAEKAKRPAEAAAADAEKPPAPKAQAVGWPPVRSFRRNIMTVQSVKSKKEEEADKQQQQPAANASGSNSSAFVKVSMDGAPYLRKVDLKMYNSYKDLSLALQKMFGTFTATGNNMNEVNGSDAVTTYEDKDGDWMLVGDVPWQMFVESCKRLRIMKGSEAIGLAPRAKDKYKNKS

SEQ ID NO: 30338 - protein, 220 aa, Oryza sativa
MTAALQALLDPTALSLGLPTPAINKEEYLAICLAALACTRAGKALVGVGGQQQVQACNKWLCPAPAAPEELRFRCTVCGKAFASYQALGGHKSSHRKPPSPGDHYGAAAAAQQLASAGDSKEDSASSAAGSTGPHRCTICRRSFATGQALGGHKRCHYWDGTSVSVSVSASASAASSAVRNFDLNLMPLPESTAAAGIKRWAEEEEVQSPLPVKKLRMSN

SEQ ID NO: 30339 - protein, 330 aa, Oryza sativa
MSLDGNEDAIVGALKQSLRQLESLGAQRAGLEDMLKEMKRKDDILPKLMAGVGSHDDLFKKEISKYDPVCAEIADNIVAQEQLLLQIQAQNEQFAAVFNLEDYKVARERCYKQIAAAVAKYRDIKKNINEGLNFYVTLQEAIGKIKQQCSDFIMTRNIQCREMIEDVQKKLAGFSFSSSSSQASMQRNTSVPPDQNSPSPPPPSSHAPHAQGPYGVPPGGDSRPGYSQPEQRPAYSQPYPPYGAPPQQPPYGAPSQQPPYGAPHPGHYQQPPHQQPPNHDYGQQAYPGGWRGQYYNPHQPQPQPQPPYPQPPYNAQGSYPPHQSSYYRPQ

SEQ ID NO: 30340 - protein, 211 aa, Oryza sativa; identical to SEQ ID NO: 29259

SEQ ID NO: 30341 - protein, 184 aa, Oryza sativa
MSYGCQVSDDEPNGSKAVSLLLRLSTLALALTSAVVMATASECTVVQLNGVVATITYKDFPPFVYLVGFNIAAAMLEAAAIYLRLSTGGGDDDDEGFKGKLPGILLVVIDVAVQALVYTATGGAFAAVSAYGPQINACGAGAGRFCGQVHQSKLLSFAGSAAVGLAVVFRDVSLPFSLWPTSSD

SEQ ID NO: 30342 - protein, 175 aa, Oryza sativa
MGSTSSMLTQYDIEEVQDHCDHAFSQQEIVSLYHRFCQLDRNGGGFVSAEEFMTVPEFAVNPLSQRLLRMLDGLNFKEFVAFLSAFSPRASLQQKIEFIFRVYDTDCNGKVAFDDILSILRDLSGSFMTEQQRQKVLIHVLEEAGYTKDSNFTLPDFMKILDNSDVKMEVEVPID

SEQ ID NO: 30343 - protein, 200 aa, Oryza sativa
MAVVEQPQQQVVKLFNCWSFEDVQVNDISLADYLAVSSTKHATYLPHTAGRYSAKRFRKAQCPLVERLTNSLMMHGRNNGKKIMAVRIVKHAMEIIHLLTDANPIQVIVDAIINSGPREDATRIGSAGAVRRQAVDISPLRRVNQAIYLLTTGARESAFRNIKTIAECLADELINAAKGSSNSYAIKKKDEIERVAKANR

SEQ ID NO: 30344 - protein, 217 aa, Oryza sativa
MAFAVSTACRPSLLLPPRQRSSPPRPRPLLCTPSTAAFRRGALSATTTPTPARAALPSTTGRNRIVCGKVSKGSAAPNFTLRDQDGRAVSLSKFKGRPVVVYFYPADETPGCTKQACAFRDSYEKFKKAGAEVIGISGDDAASHKEFKKKYKLPFTLLSDEGNKVRKEWGVPADLFGTLPGRQTYVLDKNGVVQYIYNNQFQPEKHIGETLKILQSL

SEQ ID NO: 30345 - protein, 269 aa, Oryza sativa
MASKCLGELMLRSSSTARMPYAHMGKQTWPWICHRGFSHTPTRPAQPTRNDGNDQSYASEGESNRPIIRYISDKVAPEAQSPQQAQPQPTQDETTRTIDSLFSGMPTNRTPPPYMQQNAAPGSKNNRIFGAEFSNATRLRPSRPPGLAFDSMALPDSMLNPNLSNKPSDASSLAVQQEETFSSYPRLNPTYGRTVELDASRGRDIVRGIGMLGSLVARNKVKADFNRQRFHERGGLKRKRLASERWRARFKQGFRDVTGRVTELTRKGW

SEQ ID NO: 30346 - protein, 218 aa, Oryza sativa
MATSTPCRLAISVILLCCFSLLPLAHARLLLSDKNTLNDSKAFSIKGGDGAGGGRGFGVSISHGGHDISIGIGGGFGGGAGTTRGGGASVGGGAGGGVGIDVGHGGVDVGIGGGGGAAVNGGGVHAGGGGGGGVGVHIGHGGVSISTGGGGGAGGGESAGSSGGGFGGGNGVGRAGNAVGGGGGSGSVIGSSGSGGGSGVGSTSSAIGGGSGSGGGQG

SEQ ID NO: 30347 - protein, 219 aa, Oryza sativa
MGHPHPHPYAPAELHLPGFVPLQLSQAQILVPYLATSLFLLLAVWLISGRCSRRLSDTDRWLMCWWAFTGLTHIIIEGTFVFAPNFFSNQNPSYFDEVWKEYSKGDSRYVARDPATVTVEGITAVLEGPASLLAVYAIASGKSYSHILQFTVCLGQLYGCLVYFITAYLDGFNFWTSPFYFWAYFIGANSSWVVIPTMIAIRSWKKICAAFQGEKVKTK

SEQ ID NO: 30348 - protein, 260 aa, Oryza sativa
MATARLRSASSLRGVLLRHCSVGTTSPPQVFSRVSDLQAPGCIAWKHFSTFKPNPLPKLDGLGSVTCLYSQARWASQAAAVKETENSGSKISIGPKSKQIKEDDKDDRLVYQGPISSTIRKVKLLSLSTCCLSVSLGPVITFMTSPDMNVILKGAVASTVIFLSATTTAALHWFVSPYIHKLRWRPGSDSFEAEIMSWLATPLTRTIKFADVRPPETNRPFVTFRAEGNFYFVDAEHFPNKALLARLTPKHPNESAFKNL

SEQ ID NO: 30349 - protein, 47 aa, Oryza sativa
MLWSRVSSCGLLALEEVVSVPDICNVLSRLFLGGQTKIRKRRTEPIR

SEQ ID NO: 30350 - protein, 342 aa, Oryza sativa; identical to SEQ ID NO: 29675

SEQ ID NO: 30351 - protein, 340 aa, Oryza sativa
MLLARAPPPPAMPSAVSSPPQRESILRPYCVPWTRGSVATAAVAKAAPFRGEQNHKQVASVANPLVKHCVRLRLSSAYRRSCRRILLVGLIPILEMCSFEFSTIETLLLLDGIELPEELYGFSGNVVYVSAAVMKKVSGMQSVDSTEAIAIIHMPKYFRDLDSDQGGAVLDEWLGSAKRILVLDGIQDPGNLGTLIRSACAFRWDGVFLLPACCDPFNEKALRAARGASLQLPVVSGNWSDLHALMAKSDMKMLAGHPESSSNGSERTHVLSKELADSLMSESVCLVLGSEGNGLSADTLQACELVNIPMQGTFESLNVSVAGGIFLFMLQTKQQKMAER

SEQ ID NO: 30352 - protein, 199 aa, Oryza sativa
MDDESINPGEQIFEKTISGMYLGEIVRRVLVKMAEVSDLFGHSFPKKLAEPFVLRTPHLCAMQQDTSDNLGEVESILSDVIGVSQASLLARRVTVEVSDCIIRRGGRLAGAGIVGILEKMENDSRGHIFGRRTVVAMDGGLYEKYPQYRRYMKEAVAELLGPERSNRIAIEHTKDGSGIGAALLAAANSKYAAAQISTR

SEQ ID NO: 30353 - protein, 205 aa, Oryza sativa
MELFVSTVASARATAPLCFASSFHHRRAAPPAVAAAATLRRSNRHLPTRGWRCASAAAPDPVPSEEPASASASTVVVTEDKPDPPPAEEKSEEVAAVSNGGSLETVAAAPVSSGAAEEDGGLDDILSKLDIQVTPTLVLYGSGALVVLWVLSSVVSAIDSIPLVPKVLELIGTGYSIWFTSRYLLFKESRDKLFAKFEDLKERII

SEQ ID NO: 30354 - protein, 168 aa, Oryza sativa
MSSLRREAPPISDYEALDGSGKCTDEPSCSSDPSKDSSSCTSAFAFTILAINCGAAIYHSRRDPWSVAFVLAAFLMLISLFCALRLFESLPRSSPRRSHVKAGVWVLSTVLTILFTYRVAALMPFPVAVVVWAMSVFTILAGFYMFFVCSDEVKAAPEERPAKVSDMA

SEQ ID NO: 30355 - protein, 102 aa, Oryza sativa
MGNGRILGGKPIKCSWGNKPTPPGTTSAPLPPPAAPSVTAADLLEYQRSLALSKMVSSQALMQAQAQQHLKQAMGMGAGVSQAMYDASFPNVGPSQQQLMYY

SEQ ID NO: 30356 - protein, 318 aa, Oryza sativa
MHAGLSPQRQHRPENRNFDDTFGPRYAHGYQGGGRGVARFRDGSPPYGRGGRSYGRGSGAPGKEFINIDGEYVHRNDPNLSPREGDWICQNPNCGNLNFARRTHCNNCNKYRYSREVCEPGHSPHRDYVNPPRGPARNLGPSDRAPPREMARYGSPPRGWGSDPKGYPARSPPDHAGRYADPVQRERMGFRGDCQLRDRVKHDWSSAEDYNPRERPHDMYLERSRRRSVSPRDNWGHNMRDRSRSPAGGRLKGSFTGGGRPDLYADPYAGRGRPNNLDDVRGRGRGRGRGYIPGGATYLGKGRGDRRAAPSSRNDGSY

SEQ ID NO: 30357 - protein, 359 aa, Oryza sativa
MEHDGTAALGWAARDASGHLSPFSFTRRVQEEDDVTIKVLYCGICHTDLHTIKNEWGNAMYPVVPGHEIVGVVAGVGAGVTRFKAGDTVGVGYFVDSCRACDSCGKGDENYCPTMVITSNGTDYGGATTQGGFSDVMVVRQDYVLRVPASLPPDGAAPLLCAGVTVYSPMVEYGLNAPGKHLGVVGLGGLGHLGVKFGKAFGMKVTVISSSPAKREEALERLGADAFLSSRDGEGMAAAAATMDGIIDTVSAGHPLVPLLSLLKPKGQMVVVGAPAAPLQLPAIAIIDGGKRVAGSGGGSVAECQAMLDFAGEHGIAADVEVVAMGDVNAALGRLERNDVRYRFVIDVAGTLHAAAAPS

SEQ ID NO: 30358 - protein, 244 aa, Oryza sativa
MVSFFSTLTIAAVAFVGAAHGLTEGEYYRPTGAEVSSQVGATTAYVRSPCPALNALANHGYLPRDGKDITRAQYTEALAKGYNIGWDVAALLVNNIPAVISLSGLSEHDLIEHDGSLAHADSYYKKEPSALDATLWADLLSRAKDGKFGVVELAGARKNRMALCKAKPTGCDFGPKQRFLAFGEAALLLHGMGGNNDESCSVEFAKSFFEEERIPANYVKSKSAVNLPELLATMAKIQVLAPFQ

SEQ ID NO: 30359 - protein, 102 aa, Oryza sativa
MRPTGRRSSPPVAAALALLLLLVFFFFSHCASAARPLPASAAAELVLQDGATGNGDEVSELMGAAEEEAAGLCEEGNEECVERRMLRDAHLDYIYTQKRNRP

SEQ ID NO: 30360 - protein, 271 aa, Oryza sativa
MSPEIALNTGQTTSILSPLIHKEIKKRTKKARHCISLPLLSSEHKSQTQMEAAVATPSLLFSSPTPRRPSSCLSLPPPCSSSYASNGAKLQQPRLQFVSQLTSRNSNGSGRRSISILSLRCSSSGTDSASSSATSERWVLEPAGDGDWRHIGYRVARPGGFQIASEAAVTVGRVPEQADIVLSVATVSGTHARLEKKEGSLLVTDLESTNGTYINERRLSPGFPTPIDPGDIHLAMFRVSKMVVDVPSDASGAEQEAAETAQVSAAAQQTN

SEQ ID NO: 30361 - protein, 214 aa, Oryza sativa
MAGLAHLVLALLLPLALLPPAARGTEETPQYTTVHAESDFEVRRYRDTVWMSAPSDDISFHVATKLGFHRLFQYLMGANLNSSRIRMTTPILTSIVPGAGPLHSSAYFVRLYLPAKFQASPPVPLPELNLHPDRWPSHCIAVRSFSGYARDNNVVEEAEKLALSLSRSPWANSTNYPSKSAYSIAQYNNPFRIIGRLNEVWFDVDCKSTGVEAY

SEQ ID NO: 30362 - protein, 174 aa, Oryza sativa
MILRSLCRRSSLPFFVGISVLTARIYNYVTIHNHIYSPQLCAGHDANLRRDLFIQDTELCNKQTLDSGFLGSKHDCIRLALHFICSTANLKVYTTPKQIGFDGKCKQKNTERGRFWRILSTNEQYLTYIGALVTLQLFLQLSRANITTLLLPMLYQTTSSQRNAAVVGNIVIVF

SEQ ID NO: 30363 - protein, 250 aa, Oryza sativa
MKLADDLLASFAGGIAATGGGTWTVVIGAGTEKDIRVAYRRTTEGSSSYNAILSVTASLRLPLPMRKTFDLLRNLTHRCKWDVLVHGSVVKEEVTIARGVGNDDTVTVLHCKRAGREDRGRTMILQNNGYDASGSFMVYSQIDSELMNTMVLSPSDLPPGRGGPSLYPTGFSLLPDVEAAQDSSGIALGEVGGTLMTMGFQIPVKLASGDRMYSRSAASAIRLMTDTIALVKKTLMNEHSGIYGVSPFHP

SEQ ID NO: 30364 - protein, 233 aa, Oryza sativa
MATAIAASAFLSSAFARDRPLPRQRRAARPATRRAAAGGLSVRCEQSEKQKRQPLSALVPREQRFMFEGDELCGPDIWNTTWYPKAADHVTTEKTWYVVDATDKILGRLASTIAVHIRGKNEATYTPSVDMGAFVVVVNAEKVAVSGKKRSQKLYRRHSGRPGGMKEETFDQLQKRIPERIIEHAVRGMLPKGRLGRRLFTHLKVYKGAEHPHEAQKPVPLPIKDKRIQKSEK

SEQ ID NO: 30365 - protein, 194 aa, Oryza sativa
MGQALRRLFDAFFSTREMRVVMLGLDAAGKTTILYRLHMGEVLSTVPTVGFNVEKVQYKNVVFTVWDVGGQEKLRPLWKMYLSNSDALIYVVDSLDRERIIDARQEFQTIIKDPLMANSIILVFANKQDLRGAMSPDEVSEGLGLHDLRNRIWHIQGTCALRGEGLYDGLDWLASTLKQLQETGHATSVAGPSI

SEQ ID NO: 30366 - protein, 151 aa, Oryza sativa; identical to SEQ ID NO: 29186

SEQ ID NO: 30367 - protein, 268 aa, Oryza sativa
MMRARWAAGMLRRASSGEASLAARAVFARGFLGLNMKASKETIEKKEKDKARLMDEMSRGYFADIAEIRKNGGKLATANKIIIPEIAAVKFPDLSVKSPDGRTVNLPLVAPPRNDDPQTGNTVDTQNDDCKAGDMVVPDASLVCLSFRASSQKMAETWSLPFLDAFSSAGNIQVYEVSFIDSWLLSSSPVRQVFLKVMTKSNNPQRHAVYAFGDHYYFRKKLHILNLLTGYIYLVDRLGRVRWQGFGSATQEELSSLTACTSILLDGK

SEQ ID NO: 30368 - protein, 246 aa, Oryza sativa
MPGESRKYGTTIAPGLYAPVHQHFFVARMDMAVDCKPNEAHNQVVEVNVKVENAGTHNVHNNAFYAEEKLLKSELQAMRDCDPSSARHWIVRNTRAVNRTGQPTGYRLVPGSNCLPLALPEAKFLRRAGFLKHNLWVTQYKSDEVFPGGEFPNQNPRIHEGLATWVKKDRPLEETDIVLWYVFGLTHIPRLEDWPVMPVERIGFMLMPHGFFNCSPAVDVPPGSSDADIKEAESPKAIQNGLISKL

SEQ ID NO: 30369 - protein, 214 aa, Oryza sativa
MAPPDTSRAPAQGEEAASTSPWPLRKLQSFTPGLCSQYKAYENAFVDMAKGTISDAMVLVNEHQTEAIGCATVAGFILLRGPRRFLYRNTLGRFKTEKDLLNDAEQSMMEYKTSIEQLKKDSKYTLDKIAVGESDLQRGQTDLRSTGKQIRSLIGSIYKAESTATGLMDRLRTIPTRQSLELRAEVASMASDLKNQRCVLQERINKISEYGVRV

SEQ ID NO: 30370 - protein, 202 aa, Oryza sativa
MSSNPVGVDNTFRRKFDKEEYLERARQREREEKEEARKGKEKGPPVQRQPLKHRDYEVDLESRLGKTQVVTPIAPLSQQAGYYCKVCECVVKDSANYLDHINGKKHQRALGMSMRVERASLEQVQKRFESLKKRKDPGSFSEQDLDERILKQQQEDEERKRQRKEKKKEKKKELAAQNEPEEDIDPDVAAMMGFGGFRSSKK

SEQ ID NO: 30371 - protein, 213 aa, Oryza sativa
MEVKLWNDKRERELLESLADLYAIIKATEKLERAYVRDLVSAADYEAECLKLISQFNSLSSSLAGVVTIPRFVEAYRLDCPAALNRLVQSGVPATVELRAAASSSAPASSAASAAAIAQCVQSFITAMDAVKLNMLANDQVRPLLHDLSTSMGKLGPVLPPDFEGKVKVSEWLAKLNKMGAGDELTEQQARQLNFDLDSAYSAFMASLPSTGL

SEQ ID NO: 30372 - protein, 256 aa, Oryza sativa
MRRLLPLAGATLLIAAAGGASGQQAGVGSIITRAMFESMLSHRGDQGCQGAFYTYDAFIKAAGDFPRFGTTGNDETRRRELAAFFGQTSHETTGGWATAPDGPFAWGYCRVNEITPSDPPYYGRGPIQLTHKYNYQLAGDALGLDLVNNPDLVSSDPVVAFRTAIWFWMTAQSPKPSCHDVITNQWTPSGDDRSSGRLPGYGMATNIINGGEECGKGYSTDNAKDRVGYYKRYCDMFRVGYGDNIACRDQKPYGGG

SEQ ID NO: 30373 - protein, 229 aa, Oryza sativa
MEHSFKTIAAGVVIVVLLLQQAPVLIRATDADPLQDFCVADLDSKVTVNGHACKPASAAGDEFLFSSKIATGGDVNANPNGSNVTELDVAEWPGVNTLGVSMNRVDFAPGGTNPPHVHPRATEVGIVLRGELLVGIIGTLDTGNRYYSKVVRAGETFVIPRGLMHFQFNVGKTEATMVVSFNSQNPGIVFVPLTLFGSNPPIPTPVLVKALRVDAGVVELLKSKFTGGY

SEQ ID NO: 30374 - protein, 198 aa, Oryza sativa
MDYGDGEVRLVRRKGKKRLAPPPPPPPAAERGERDRLDELRRDYRDVLKDNEMKRRKLESINKRKLVLLSEVKFLQKKLNSFKKNDSQQVRLKKKAPRVPSHVGINDASAFYGASTEVPSTSKRTDLDLNQDSAMNDELSDFPGHHNHLELKKAEQAGVDEDIMTADVNLSACRDTGNSPASDDKRSVSWQDRVALKV

SEQ ID NO: 30375 - protein, 237 aa, Oryza sativa
MVVQEFTVDLNKPLVFQVGHLEERYQEWVHQPIVSKEGPRFFGNDVLEFLTRTKWFAVPTIWLPVVCWLLVKSIRMGHTIQEVGLMALFGIFIWTLIEYTLHRFLFHIETKTYWANTAHYLLHGCHHKHPMDSLRLVFPPTATAILCVPFWKLVAFFATPTITPALFGGGLLGYVMYDCTHYYLHHGQPSKEPAKNLKRYHLNHHFRIQNKGFGITSSLWDYVFGTLPPSKTTGKNN

SEQ ID NO: 30376 - protein, 216 aa, Oryza sativa
MKITALLVLKPSSSGGGASSSGGGGGSGGPEAVVLANATDVSHFGFFQRGAAREFIVFVARTVAQRTQPGQRQSVQHEEYKVHSHNRNGLCAVAFMDDHYPVRSAFSLLNKVLDEYQKAFGDSWKAATKDATDAAQQWPFLTDALTKFQDPAEADKLMKIQRDLDETKIILHKTIESVLQRGERLDSLVEKSSDLSAASQMFYKQAKKTNQCCTIL

SEQ ID NO: 30377 - protein, 189 aa, Oryza sativa
MRWWPALPLLLLAVAVAGAGDAAPVCTRPSAAEAIVGSPEACRSPLRRPLGVTEGDDAILARAVNLLHANKEDFAAVLFYASWCPFSQECRLRFEKLACIFPTIRHLAIEESTVRLRTRYRYGIHGYPTLFLINSTVRVRYHGPRTVKSLAAFYNDVSGINPSMDPAVGDDNIEPKRDCEQEKCLFWSA

SEQ ID NO: 30378 - protein, 246 aa, Oryza sativa
MPEHSENAAANIVDSIVDAIADNLPKQKSVRFEDGSISDQAKRLFGGQKSVHHVLGGGKSADVLLWRNKKISSSVLAVATAVWVFFEWLDYHFLTIACFVLVLGMVVQFAWSTFAGMLNGSPSKVPRVELPDELFANIGSAIGTQVNKFLGTLQDVSCGRDLKNFLLVIAGFFAAAIIGSWCNLLTVIYIGFVCAHTLPVLYEKNQEKVDEFLYNTLGLLQNQYQKLDKGVLGKVPKGIIKLKKSD

SEQ ID NO: 30379 - protein, 201 aa, Oryza sativa
MVDFRLFVREAYGLPAAEVDIPYKADKDDPDKKPRIMLIDRGKSRRFVNVAHVVQGLDWFGFEVVKADPKIDSNLDEFVRLVDSCDAIMGVHGAGLTNMVFLRSGGVVVHIVPYGIKFMADGFYGAPARDMGLRHVEYSISPEESTLLEKYGWNHTVINDPETIRKGGWEKVAEFYMSKQDIVLNMTRFGPSLLNAIEFIM

SEQ ID NO: 30380 - protein, 188 aa, Oryza sativa
MDPISIEKIRAMSKCSNCKRQHPMILPALAISMVATFVLLLLVTSPVWVPRLCSLMAFFFLTTLPDLAMAFLLSPKCLFVVGNLIVAFLVGESRLAPRGEPASSSVNEIHDEHVKRNAAISAKAVTAVVAIDQNAHVGELGEEEEEEEEEEEEEEGEEEELHQRVEDFIARVKKQRRMEDKSMFDTDR

SEQ ID NO: 30381 - protein, 233 aa, Oryza sativa
MMSSSSSLVSAISASPSATAKARLRHDDAATATGAAAAAAVAARQLKTEHGGCCCCRSRGRAVVARAGPGPLTEIEPDLNEDPIDKWRTNGVSPDDFEYGVYDGHHTYNETQDKKGFWEDVSEWYQEAEPPQGFQALISWLFPPAIILGMAFNVPGEYLYIGAAVFVVVFCVIEMDKPDKPHNFEPEIYMMERSARDKLIADYNTMDIWDFNEKYGELWDFTVDRRDEIVKSS

SEQ ID NO: 30382 - protein, 135 aa, Oryza sativa
MAEKEEGKVAAEGGAEAEADEEVEVKFRLFDGSDIGPLRCNAVATTVAALKDRVVADWPKDKTIVPKTANDVKLISGGKILENDKNIAQCRAPFGDLPSTAITMHVVVQPSSAKSKPDKKTNKLPKTTRCSCTIL

SEQ ID NO: 30383 - protein, 243 aa, Oryza sativa
MAAGGGGGDELKLLGLWASPYVLRAKFALSFKGLSYENVEEDLHNKSELLLSSNPVHKKVPVLIHNGKPICESQIIVEYVDEAFPDAGESLLPSDPYDRAVARFWAAYINDKFMPAWQKASLGLTEEEKAEAVKQMLAAIENLETAFKELSKGKPFFGGDTAGYLDVTLGAVVGWARAGEVLFGRKLFDATRSPLLAAWMERFVALDAVKAVLPDNAELIEYGKMRMAHYAKLAAALAAANKK

SEQ ID NO: 30384 - protein, 229 aa, Oryza sativa
MELNAIIAGGNMMADDDGGGFTFAEVPPLAGGRCVGPPLYPVFGRPRSPPPTPPPHRQAPEKASRLPLWRFLMVDHGPPPPPPPTTQPAADDDLDLDLDGEPAESTFLYCPLCPALPVAAAASPARCRKSGSTGSSLLRWRQRSIGRSHSDGKEKFVFLNASSSSSGSEHKGGRGGEVGHDGALSYYANGGSRGGGGGGGRRRSFLPYRQDIVGLFANATAFRRSYHPF

SEQ ID NO: 30385 - protein, 219 aa, Oryza sativa
MSASAAPTHIRFSSAAPPSAAALRRPRRRCATPVRCSLAAAPGLRAPPELIDSILSKVKGTDRGVLLPKDGHQEVADVALQLAKYCIDDPVKSPLIFGEWEVVYCSVPTSPGGLYRTPLGRLIFKTDEMAQVVQAPDVVKNKVSFSVFGFDSAVSLKGKLNVLDGKWIQVIFEPPEVKVGSLGFQYGGESEVKLEITYVDEKIRLGKGSRGSLFVFMRR

SEQ ID NO: 30386 - protein, 190 aa, Oryza sativa
MVMDAARAVAMPSLSPATVAARPSSRRLHKVAAMATQKPTSGTRRGTTVYFPVGEPGPRQTTSGKAAAPPVKLLTNVEKLRLLTKAEKAGLLSAAERAGLSLSAVERLGLLSKAEELEVLSAATDPGTPGALLGVALLLLAAGPAVVYLVPEEYPWEVAVQAVVALACVVGGSTAFAASSFVSKLQSSSS

SEQ ID NO: 30387 - protein, 169 aa, Oryza sativa
MAATISQASLLLQKQLKDLAKHPVDGFSAGLVDDSNVFEWQVTIIGPPDTLYDGGYFNAIMSFPQNYPNSPPTVRFTSEMWHPNVYPDGRVCISILHPPGDDPNGYELASERWTPVHTVESIVLSIISMLSGPNDESPANIEAAKEWREKRDDFKKKVRRLVRKSQEML

SEQ ID NO: 30388 - protein, 198 aa, Oryza sativa
MSEPASPPPAMPEDAAPPQPQPEPAVPAGEEAAPSLERKEELLPVEEKISELDESQSQLMGRLRGLKEDLLNWRSSLDTQVTKYKSELSDIKTALNSEIEQLRSDFQELRTTLKKQQEDVSNSLKNLGLQDATDNDGNKGSGEENASEGVSDTLGNLKLDDTPKNHDESSDANDEKNETIAEDGTVDKTVKAESASDE

SEQ ID NO: 30389 - protein, 365 aa, Oryza sativa
MEAKIPLLTPHTMGRFHLAHRVVHAPLTRSRCYNNLPQEHVQLYYSQRATNGGLLIAEATGVSETAQGYPNTPGIWTKEQVEAWRTVVDAVHQKGGVFFCQIWHVGRASTNDYQPNGQTPIPCTDKKITPTVLKDGTVEEFSAPRRLREDEIPQIVDDFRIAARNCIEAGFDGVEIHCAFGYLIEQFMKDGVNDRTDKYGGSIANRCRFALEVIQAAIDEIGSDRVGVRLSPYSNCLDCWDSDPDALGLYMIQAMSKLGVLYCSMVEPEVVKVDGKVQIPYKLWHFRKVFAGTFIVAGGYNREEGNRAVSQGYTDLVAYGKWFLANPDLPRRFELNAPLNKYDRSTFYTSDPVIGYTDYPFLSPL

SEQ ID NO: 30390 - protein, 203 aa, Oryza sativa
MNPEYDYLFKLLLIGDSGVGKSCLLLRFADDSYLDSYISTIGVDFKIRTVEQDGKTIKLQIWDTAGQERFRTITSSYYRGAHGIIIVYDVTDQESFNNVKQWLNEIDRYASDNVNKLLVGNKSDLTANKVVSSETAKAFADEMGIPFMETSAKNATNVEQAFMAMAASIKDRMASQPAASNARPPTVQIRGQPVNQKTSCCSS

SEQ ID NO: 30391 - protein, 205 aa, Oryza sativa
MAVKVYVVYYSMYGHVAKLAEEIKKGASSVEGVEVKIWQVPETLSEEVLGKMGAPPRSDAPVIAPQELAEADGVLFGFPTRFGMMAAQMKAFFDATGGLWREQSLAGKPAGVFFSTGTQGGGQETTPLTAVTQLAHHGMVFVPVGYTFGAKMFDMAAVHGGSPYGAGTFAGDGSRWPSEAELEHAFHQGKYFAGIAKKLKGASSA

SEQ ID NO: 30392 - protein, 236 aa, Oryza sativa
MAALAAASTAFAAKPRLARAPSSPAARFSVSCSASGNNGGAGEMAQSLAASAKTFSAALALSSVLLSSAATSPPPAAADIAGLTPCKESKAFAKREKQSIKKLQSSLKKYAPDSAPALAINATIEKTKRRFENYGKFGLLCGADGLPHLIVSGDQRHWGEFITPGLLFLYIAGWIGWVGRSYLIAISGEKKPAMREIIIDVELAVKLLPRGFIWPVAAYRELITGNLVVDDADIGY

SEQ ID NO: 30393 - protein, 339 aa, Oryza sativa
MPNLECRMYEPRFPEVDAAVMIQVKHIADMGAYVSLLEYNNIEGMILFSELSRRRIRSISSLIKVGRQEPAIVLRVDRDKGYIDLSKRRVSEEEAHACEDRYNKSKLVHSIMRHVAETLGIDLEPLYQRIGWPLYRKYGHAFEAFKLIVADPDAILDSLTYEEKETGADGQEVTKVVPAVTPEVKDALVKNIRRRMTPQPLKIRADVEMKCFQFDGVLHIKQAMRKAEAAGNDNCPVKIKLVAPPLYVLTTQTLDKDQGISVLTDAIKACTAEIEKHKGKLIVKEAPRAVSEREDKLFNEHIETLNEQNAEVDGDADSEEEEDTGMGDIDLTNSGVNAD

SEQ ID NO: 30394 - protein, 148 aa, Oryza sativa
MGGKELSEEQVASMREAFSLFDTDGDGRIAPSELGVLMRSLGGNPTQAQLRDIAAQEKLTAPFDFPRFLDLMRAHLRPEPFDRPLRDAFRVLDKDASGTVSVADLRHVLTSIGEKLEPHEFDEWIREVDVAPDGTIRYDDFIRRIVAK

SEQ ID NO: 30395 - protein, 269 aa, Oryza sativa; identical to SEQ ID NO: 28845

SEQ ID NO: 30396 - protein, 125 aa, Oryza sativa
MLARGYVLSKDALARARAFDESHQVTATAAAKAAELSKRIGLTDRVSGLTDRVSAGVGAIRSVDETYHVSETTKTVATATGRTAVKVVNGIMTSSYFSAGAMMLSDALHRAAQAAADLAAHGRHN

SEQ ID NO: 30397 - protein, 240 aa, Oryza sativa
MAAAGEASGGRDKYRSFMYGEGEKDTVWRLGSPPNYDVVNKLFEEERTKEWPEGSLEEKVQRLLKTWEMELIHKVRPEDQKSVHSQKFCASTNGMRFLSRKEVMAIGGYNAFLQTKLPPEHRIYDPDNETLESGMATFLTAFPRGFAIEVLDVYSGPPRIVFKFRHWGYMEGPFKEHPPHGKRVEFFGICIFHVDEEMKVEKTEYFYERGNFLASFLSTPAAAAAAEAASGSGCPVMGGN

SEQ ID NO: 30398 - protein, 142 aa, Oryza sativa
MEEAGERDADETHAWSGTASPAALWKTVASSAAMLKLALAMISAAFRTTPFSMSMQLCPNATMSLHSPSIFDVVSSITPIMSCIINNRLVAEKAGATMQRWRAHSSPSAMTRPLPNMGMRLSSYDIVCQLAHLHFSHVCCLV

SEQ ID NO: 30399 - protein, 346 aa, Oryza sativa
MDKAYIAVFSIAILFLLVDYFRCRRRRGSGSNNGENKGMLQLPPSPPAIPFFGHLHLIDKPLHAALSRLAERHGPVFSLRLGSRNAVVVSSPECARECFTDNDVCFANRPQFPSQMPATFYGAGFGFANYGAHWRNLRRIATVHLLSAHRVRGMAGVVSGEIRPMVQRMYRAAAAAGVGVARVQLKRRLFELSLSVLMEAIAQTKTTRPEADDADTDMSVEAQEFKNVLDELNPLLGAANLWDYLPALRVFDVLGVKRKIATLANRRDAFVRRLIDAERQRMDNGVDGGDDGEKKSVISVLLSLQKTEPEVYKDIVIVNLCAVSEYVLSPGFKSSHLFFLLPSITN

SEQ ID NO: 30400 - protein, 257 aa, Oryza sativa
MADSSAARPTVLVTGAGGRTGNIVYNKLKERSDQFVVRGLVRTEESKQKIGGGNDVYIADIRDRDHLVPAVQGVDALIILTSAVPKMKPGFDPSKGGRPEFYYEDGMYPEQVDWIGQKNQIDTAKAAGVKHIVLVGSMGGTNPNHPLNSLGNGNILVWKRKSEQYLADSGVPYTIIRPGGLQDKDGGVRELIVGNDDELLQTDTKSIPRADVAEVCVQALQYEETKFKAFDLASKPEGTGTPTKDFKSLFSQVTARF

SEQ ID NO: 30401 - protein, 183 aa, Oryza sativa
MAPCPAATTTRIGAPPFAATTARRPARGATTTTKARASGLRQVEGPVSERAYSSSSPAPTHKVTVHDRQRGVVHEFVVPQDQYILHTAEAQDITLPFACRHGCCTSCAVRIKSGQIRQPEALGISAELKDKGYALLCVGFPTSDVEVETQDEDEVYWLQFGRYFARGPVERDDYALELAMGDE

SEQ ID NO: 30402 - protein, 306 aa, Oryza sativa
MAFAPRLLLPSRCPPPASSPARHGGRTAPELSGPTPRVVVVTSGKGGVGKTTTTANLAASLARLSLSAVAVDADAGLRNLDLLLGLENRVHLTAADVLAGDCRLDQALVRHRALHDLQLLCLSKPRSKLPLAFGSKTLTWVADALRRAANPPAFILIDCPAGVDAGFVTAIAPAEEAVLVTTPDITALRDADRVAGLLECDGIKDIKIIVNRVRPDLVKGEDMMSALDVQEMLGLPLLGVVPEDAEVIRSTNRGVPLVLNDPPTPAGLALEQATWRLVERDAMTAVMVEEQERPKKKAGFFSFFGG

SEQ ID NO: 30403 - protein, 375 aa, Oryza sativa
MARPRRRGGAGAWVAAVLAAALQVLAVSAAGKYRAVFNFGDSLVDAGNLVTDGIPDYLATARPPYGQTYFGYPTGRCSDGRLVVDFIAQEFGLPLLPPSKAKNASFARGANFAITGATALDTDFFERRGLGKTVWNSGSLFTQIQWLRDIKPSFCSSTQDCKDFFAKSLFVVGEFGGNDYNAPLFAGKDLREAYNLMPHVVQGISDGVEQLIAEGARDLIVPGVMPSGCFPVYLTMYKEPKEGYGSRSSCLKRFNTFSWVHNSMLKRALAKLRAKHPGVRIIYGDYFTPVVQFLLQPEKFGFYKQLPRACCGAPGTGPYNFNLTAKCGEPGATACADPKTHWSWDGIHLTEAAYGHIARGWLHGPFGDQPIVQNS

SEQ ID NO: 30404 - protein, 120 aa, Oryza sativa
MATSPAPLLLLSSISLRSPFLMRARRLEATAAATRSSRLVPPPATASTGDDGRPSRRIHRRGGLGPSDLAASDLHGDGLTATAGCRCDKCPSSPLLSLGGLAGGSIGVEVGDRRIWEMRW

SEQ ID NO: 30405 - protein, 327 aa, Oryza sativa
MESLPVETRFTEFPLRQYGGFWLLEVMLNGVAAAETSFQPRPSDILLSSFPKCGTTWLKALAFATLNRSTYPPSDEHHPLLEHNPHDLVGFLEIYPKLELYESLPSPRLLSTHLPYSMLPHRIREQETGCRLVYIYRDPKDAMVSMWHQNKKEKKNRLTFEEMFDMFCEGRCVVGPQWCHAGEYWDESQARPEKVLFLMYEDLLQDTVGNLRTLAEFMGCGFSRQEEDDGIVQQIVELCSLNNLKNLNVNKSGTTLLGISKDGFFRKGGTGDWSNHMSPEMAARLDKIVKERLEGSGHPIISRINAKATTSIGSSNHGASEAKYIKE

SEQ ID NO: 30406 - protein, 271 aa, Oryza sativa
MATLSSCSRLSTGGGAVQRRPRRPASAATITCHRSSSSSSSARVVRTGAAAAPAAATAPAVPQTNECSLPTWAEFELGKAPVYWKTMNGLPPSAGEGLILFYNPAATKMTPNAQFGIAFNGGFNQPIMCGGEPRQMTLQERGSADPPIYTIRIRVPQHAMTLVFSFTNGVDWDGPYTLKFRVPKPWLNKPLSFFNEGLADELNREGACDRAIFPDENVVITSCEMGSYYEEGGDRCKLDIVSGCMDPNSHMFDPLATVDDGSCPMDSDSEE

SEQ ID NO: 30407 - protein, 248 aa, Oryza sativa
MASPPGKKGEGGGDGGGGKAEWLIYAFVARGTAVLAEYTEFTGNFPALAAQCLQRLPASGGGGSGGGAPARFSYACDGHTFNFLLHRGYAYCVVAKESVPKNVSVAFLERLKDDFMKRYGGGKADTALAKSLNKEYGPVIKQHMQYVLDHSEEIEKTLKVQAQVSEVKNIMLENIEKTLGRGEKLSELQDKTSDLQSQAQEFKKKGVKIRRKTWLQNMKIKLVVLGILLLLVIIVWVSVCQGFDCTKH

SEQ ID NO: 30408 - protein, 193 aa, Oryza sativa
MKPDGETQLRPTAAGHPDPGLGTSSAEYVASLGPATAPVSYPYISTYYGGTYGAYSGQPLVNAALMAMPPHSVPLVTDAVVEPIYVNARQYHGILRRRQSRAKAESENKANKIRKPYLHESRHLHALKRARGSGGRFLNSKAVEGKQDTKSVDKKDGAVPSEEKRDKKLANSIIKLENSSPTTQPGADASDVV

SEQ ID NO: 30409 - protein, 235 aa, Oryza sativa
MAALLRHAAAAAAAVVLLIAAAASTDGATSFYASDPNLGSARVVFQTTHGDIEFGFFPHVAPKTVEHIYKLVRLGCYNTNHFFRVDKGFVAQVASVVGGRTAPMNDEQQEEAEKSVVGEFSTVKHVRGILSMGRHSDPNSGGSSFSILLGDAPHLDGQYAVFGRLTKGDDTLRKLEQLPTRREGIFVMPIERISILSTYYYDVDLESCEAEKSILRRRLSESASEVERWRRKCFA

SEQ ID NO: 30410 - protein, 262 aa, Oryza sativa
MALMFRRQMFVDDGFSDKPHGCASPEPEATEPESGLTTEDGQYDGWDDQQSAGGSSNWNSRANRSFGLADIPEWTGKPSLPYEDPDMLRFLGEPILTPKNNEVFDDTIGKGRPDKCNCEVPGSTSCVRFHVAEKKTELKREMGSSYYAMKFDEIGQDAALTWQKDEEKKFETIVQQNLPSSKYNFWDKLRAAFRYKGERALVSYYNNVFQPRRRAFQNRVAQHANGVDSDDDSIEPAFLRLRQDGGKSRSRSSASSRNQNQS

SEQ ID NO: 30411 - protein, 249 aa, Oryza sativa
MLASWATRIAEAPATDLDFWKALSPVAIAHTIGHVAATVSMAKVAVSFTHIIKSGEPAFSVLVSRFFLGEHFPAPVYFSLLPIIGGCALAAITELNFNMIGFMGAMISNLAFVFRNIFSKKGMKGKSVSGMNYYACLSMLSLVILLPFAFAMEGPKVWAAGWQKAVAEIGPNFVWWVAAQSVFYHLYNQVSYMSLDEISPLTFSIGNTMKRISVIVASIIIFHTPVQPINALGAAIAILGTFIYSQAKQ

SEQ ID NO: 30412 - protein, 113 aa, Oryza sativa
MESTSTTVPSIVVYVTVPNKEAGKRLAGSIISEKLAACVNIVPGIESVYWWEGKVQTDAEELLIIKTRESLLDALTEHVKANHEYDVPEVIALPIKGGNLKYLEWLKNSTRES

SEQ ID NO: 30413 - protein, 117 aa, Oryza sativa
MVRGGDAAAAAAAWPRDLLVAGVVDASRRPGGEGLYCLWIVRGLFVGWYGQIILLGPYLDRLRSWPIAYGWAGLWRLSWICNSAFSGLRVLTSTFFSLFSFCPISSGHSIFTHGLYL

SEQ ID NO: 30414 - protein, 183 aa, Oryza sativa
MFINTASFVAGAVVASPEQPAKLVRDQRRVVPGSCRARRGAASNGFRTYCMQTWNPFTNRRYEAMSYLPPLSAKSISKEIEFIMSKGWVPCLEFDKEGEIHRSNSRMPGYYDGRYWTLWKLPMFGCSDAAAVLREVEECRREYPDAFIRLIAFDSSRQCQCMSFVVHKPPSAAASPATVAGAE

SEQ ID NO: 30415 - protein, 246 aa, Oryza sativa
MDASLMGSPSPAAGDAPTSGEHRMGTTIVGVCYDGGVVLAADSRTSTGMYVANRASDKITQLTDNVYVCRSGSAADTQVISEYVRYFLHQHTIQLGQPATVKVAANLIRLLAYQNKNMLQAGMIVGGWDKYEGGQIFSVPLGGTILRQPFAIGGSGSSYLYGLLDHEWKEGMSQEEAEKFVVKVVSLAIARDGASGGVVRTVTINADGVSRKFHPGDKLPLWHEEMEPQNSLLDILAAGNPDPMVQ

SEQ ID NO: 30416 - protein, 267 aa, Oryza sativa
MEWDKAKASSGEAVDDRGGGEGGLGYVKVMTDEQMEVLRKQISIYATICEQLVEMHRALTAQQDSIAGMRLGNLYCDPLMVPGGHKITARQRWTPTPMQLQILENIFDQGNGTPSKQKIKDITAELSQHGQISETNVYNWFQNRRARSKRKQAALPNNNAESEAEADEESPTDKKPKSDRPLHQNIAMRDHNSERISEIHHFDTEHEQIRRMMYASNDSSSRSSGSLGQMSFYDNVMSNPRIDHFLGKVESPGSFPHMRSGESFDMY

SEQ ID NO: 30417 - protein, 139 aa, Oryza sativa
MLAARTRFAGGGGAAVVLLLIVASTVATRAAVADDFFSPLSPLLAPVIGSMCKTVACGKGNCTAASGFPGYRCECEPGWKQMHVGDQASFLPCVIPNCSIDRACSNTIAPAPAPLPSPKNFSLPTDRNYCNWLLFRFSF

SEQ ID NO: 30418 - protein, 352 aa, Oryza sativa
MGWNSWNHFYCGINEQIIRETADALVNTGLAKLGYQYVNIDDCWAEYSRDSQGNFVPNRQTFPSGIKALADYVHAKGLKLGIYSDAGSQTCSNKMPGSLDHEEQDVKTFASWGVDYLKYDNCNDAGRSVMERYTRMSNAMKTYGKNIFFSLCEWGKENPATWAGRMGNSWRTTGDIADNWGSMTSRADENDQWAAYAGPGGWNDPDMLEVGNGGMSEAEYRSHFSIWALAKAPLLIGCDVRSMSQQTKNILSNSEVIAVNQDSLGVQGKKVQSDNGLEVWAGPLSNNRKAVVLWNRQSYQATITAHWSNIGLAGSVAVTARDLWAHSSFAAQGQISASVAPHDCKMYVLTPN

SEQ ID NO: 30419 - protein, 218 aa, Oryza sativa
MPVRVVDTATPSSQPSSGQDANAGHPSPPSCSLLSAGRCYAGTQNVSNIQKEEAWKVNVRIHGCDLEQGYLCGTMEALNVPLADTPVVTFWEGEIVDAKNYTFFTGKWEASPEDDIRHWSKFPSFTPLLSQIETDGGKSVDLSNYAYIFMRWKEQYFVNVGVDCGLTIAGFYYVCFSCSDGSISGYYYDPNSSPFQKLELKCTNEKDSGFTFSSYELQ

SEQ ID NO: 30420 - protein, 226 aa, Oryza sativa
MAITLSNVNSEAGLQKLDEYLLTRSYISGYQASKDDMTVFTSLPSAPAASYVNVTRWYDHISALLRSSGVTAEGEGVKVESTACSVSPTADQKAPAADEEDDDDVDLFGEETEEEKKAAEERAAAVKASGKKKESGKSSVLLDVKPWDDETDMAKLEEAVRNVKMEGLLWGASKLVPVGYGIKKLQIMMTIVDDLVSVDSLIEDYFYTEPANEFIQSCDIVAFNKI

SEQ ID NO: 30421 - protein, 136 aa, Oryza sativa
MDGGDLRSSIKKWNVIYPVYLNSKKTVAEGRRIASGKACPDPTCVEIADCCSHLKIPHAIELDKAYPRDFFQVGRVRVQLKKDDGSPVNPAIKTKKQLMIQIAELVPKHHGRTKKQEPAASSTAGTSKGKGGKKKK

SEQ ID NO: 30422 - protein, 339 aa, Oryza sativa
MESVVVAGDLAAAPAPATPMWFVALVAVGLHAAVVWAGTFLAWLRRAFLRPGKGLCRRYGEWAVVTGATDGIGRAVALELARRGLHLVLVGRNPGKLSGVCKEVRAAAPACKVRTVVFDLAAPGDDDVGGGELSRGVARVAAAVEGLDVGLLVNNAGATYPCAAYFHEVPDAVWGAVLRVNVVAATRIARALVPAMAAKGRGAVVNVGSGSSVVVPAFPLYAVYAATKAYVDQLSRSLHVEYKHHGVDVQCQIPLYVATKMSPVQGNSPFIPSPEEYAKAAVRCIGYEPRCVPYWRHSIQWFFASLLPDSVLNLWRLQVGIRKRNQMKVLLGESDHGFS

SEQ ID NO: 30423 - protein, 231 aa, Oryza sativa
MEHRLWSSGASDKNKAMVEQLQRYGIIKSSKVAQVMETIDRGLFVPPGASPYFDSPMPIGYNATISAPHMHASCLELLEKHLQPGMRALDVGSGTGYLTACFAIMVGPEGRAVGVEHIPELVTSSIENIKKSAAAPQLTDGSLSIHITDGREGWPELAPYDAIHVGAAAPQIPQALIEQLKPGGRMVIPVGTMFQELKVVDKNQDGKVSIRDETAVRYVPLTSKDAQLQAN

SEQ ID NO: 30424 - protein, 432 aa, Oryza sativa
MATQLPRLLPLLLFLPFFHIAASTSPSGLHPVVLLPDTTCSQLEARLTDAYVPPSPQCAAHHKDHDGRWFRLWKNTTELDDPAVAPCVADQLRLVFDHVAGDYRNVPGVETRVLDFGSTRGFLADEPANRNRCMGRLVEALEELGYRDGENLFGAPYDFRQSPVALGQPCRAFSRYRQRLRALVEHASRANGDRPVVLVSHSEGGYFALEFLNRSPLPWRRRHIKHFVMASTGAGGFVRFMEVVASCVSDVSPLARVRRSVPSKFTPLPSPKVFDRDTPLVVTRDKNYTAHDMPAFLAAAGLPEFEVTLYETRELPMAMNFRAPVVPTTCINGIGVPTAEKLVYWDGNFGEAPEIVYGDGDGLVNSASILALDTVIGDDPMQQYYKSIKIAGMYHAGVISDGVALERLISEILRESFVQDSKKVDYRRVAQL

SEQ ID NO: 30425 - protein, 115 aa, Oryza sativa
MSLPHRILFWGEGGGHLCLPQLLLTELRGQPLPRRGFAARRAIHIAPSTSPHPLVVLVLSASASLPNIFVLHCSCTYSELEWHHILPIPSSASASHMASQRRLLLRHQVNSVAHC

SEQ ID NO: 30426 - protein, 234 aa, Oryza sativa
MAAAAAAAASATAAISGALLPHAVACHRLPPRPQLLAVSSSFRRLSLTASPRRASRLVPRADASAEAGEPEPAAEAEAEAVAASTDAEVEEGEAEAAVAVAEEEQEEEDEPPPPSKPPVKFGEIIGILNKQFIEEAEKVKTLPDLRPGDIIELRMQRPNKRRLSLFKGIIIAKHKSGVHTTIRVRRIIAGVGVEITFPIYSPRIKEIKVIRHKKVRRAKLYYLKHKLPRFSTFK

SEQ ID NO: 30427 - protein, 328 aa, Oryza sativa
MADLFTEYADFCFKTFGNRVKHWFTFNEPRIVALLGYDQGTNPPKRCTKCAAGGNSATEPYIVAHNFLLSHAAAVARYRTKYQAAQQGKVGIVLDFNWYEALSNSTEDQAAAQRARDFHIGWYLDPLINGHYPQIMQDLVKDRLPKFTPEQARLVKGSADYIGINQYTASYMKGQQLMQQTPTSYSADWQVTYVFAKNGKPIGPQANSNWLYIVPWGMYGCVNYIKQKYGNPTVVITENGMDQPANLSRDQYLRDTTRVHFYRSYLTQLKKAIDEGANVAGYFAWSLLDNFEWLSGYTSKFGIVYVDFNTLERHPKASAYWFRDMLKH

SEQ ID NO: 30428 - protein, 230 aa, Oryza sativa
MAEPAGEAAPQADGVSEEAAARPRGFRLLGGDKSVHQALGGGKAADVLLWKDKKISAAVIGGATVLWVLFEVVDYHFLTLISHVLIGVLAILFLWSKATIFIKKSPPNIPEVKISEDLAVNVALALRTDINQALHLLREISLGHDLMKFLGVIVALWILSEIGSLCDFLTLFYVAVLMLHTVPILYHKYQDKVDHFAGKAHVELSRQYSVLDAKVLSKIPRGPAKDKKQN

SEQ ID NO: 30429 - protein, 136 aa, Oryza sativa
MEQLNKQAYRSLDPHKMVESNRGGRNHAKSARSKPAPNNTEEEKACTICLETFLAGEQVVATPCNHIFHQECITPWVKGHGNCPVCRFALCERNTVSDNSQSGVGEVEVDLDLLEMMRAMEEIFSRVTFSNFMPYN

SEQ ID NO: 30430 - protein, 168 aa, Oryza sativa
MAALPLATAEVCDANSNPIIAGELRALPPIFKIYGRRQVFAGPVATVKVFEDNVLVRELLQEKGHGRVLVVDGGGSVRCALLGGNLAQLAQINGWVGIVVNGCIRDVDEINGCDVGVRALNSHPMKSGKKGAGEKRVPVTIEGTRICDGEWLYADADGILISRTELTV

SEQ ID NO: 30431 - protein, 302 aa, Oryza sativa
MEGFLCDRLLDAAQPIAERFRALFSLRNLRGDAPRRALLQAARDSSNLLAHEAAFALGQMQDAEAIPALEAVLKDLSLHPIVRHEAAEALGAIGLEKSISLLEESLAVDPAVEVQETCELAIRRIEEQKNTSGVESATVSPFLSVDPALPAKQGLPVEQLRELLLNEQESMYERYAALFALRNDSGDAAVSAIVAALGVKSALLRHEVAYVLGQLQNKAASDALSTVLKNVDEHPMVRHEAAEALGSIADQESIALLEEFAKDPEPIVSQSCEVALSMLEYERSGKAFEFLFPQTPQVQQES

SEQ ID NO: 30432 - protein, 250 aa, Oryza sativa
MMGSAQDWAFGWQPWTGPALEDLLPQLSHEEQLRLHNHLREHERILKWHNKNSPPISSLHSEGERDFFIIIHVRYALHHYNAKHPDEEFDAVKPLMESSVRFRGQVWFHINFWARSRKSKKIKRFFAEVHYKPPSSSSSVCSYLPFPVPGAERPPSSSSVSSDLLLPLPIPVVEACTIIEEPLGQYRKSCAFCRGHLDILHPMGRKFVCGNDKDRFEQQLLPCGSIGLEMPFTCRLGPASVNSSHGEKED

SEQ ID NO: 30433 - protein, 239 aa, Oryza sativa
MPGAGSPLLPCRRPPLLPPPARFNECTAEWPASSRRRGWRLGVADELPAAGLNAGADGDELGADLAASTPPHRHGLGRRLPPPSAGMSSAGVPLLPPPAPAGLFPTSATSSGPSSAGSPLLPSPAAARIWAHPPSANDEPLVVVVFLASSPLPAGDKVLEAAARSGARERRRGRRRGAGGREVTASRRHALHNAGSSRFSATRGLALARNRASLCGGEELWWGARPSATHAQIRAGDVR

SEQ ID NO: 30434 - protein, 292 aa, Oryza sativa
MLAFGTPEKQILIEPIFAQWIQSAHGKTTYGFDILLSSTSGPAFNAGRTLWLPGWLNAVNENSNSLFLTIGPGDFLVHHAIALGLHTTTLILVKGALDARGSKLMPDKKDFGYSFPCDGPGRGGTCDISAWDAFYLAVFWMLNTIGWVTFYWHWKHITLWQGNVSQFNESSTYLMGWLRDYLWLNSSQLINGYNPFGMNSLSVWAWMFLFGHLVWATGFMFLISWRGYWQELIETLAWAHERTPLANLIRWRDKPVALSIVQARLVGLAHFSVGYIFTYAAFLIASTSGKFG

SEQ ID NO: 30435 - protein, 315 aa, Oryza sativa
MAAAAVTVKLGGWSSYCYCPTTTRRSKPAAVKMMMALCPTSFRIELPRRTIRAAILNKRHTVPCYQRQEGASSPAPQIEAKSMEEVYDALAEHLFSVLKNIEHLDSKYIVGIAGPPGAGKSTVASEVVQRVNKRWSQKHENGSSLISTEEIATMLPMDGFHLYRSQLDAMEDPKEAHARRGAPWTFDPSRFLKCLQTLREEGSVYAPSFDHGVGDPVENDIFVKPQHKIVIVEGNYLLLEEDAWRDIRALFDEKWFIDIDIDVSMQRVLQRHVATGKEPDVAAWRISYNDRPNAELIMKSKKSADLVIRSVDLSR

SEQ ID NO: 30436 - protein, 246 aa, Oryza sativa
MSRGTGAGYDRHITIFSPEGRLYQVEYAFKAVKSAGVTSIGVRGKDSVCVVTQKKVPDKLLDHTSVTHLFPITKYIGLLATGLTADARSLVYQARNEAAEFRFKWGYEMPVDVLAKWIADKAQVYTQHAYMRPLGVVAMVLGYDEEKNAQLFKCDPAGHFFGHKATSAGLKEQEAINFLEKKMKDDPQFSYEETVQIAISALQSVLQEDFKATEIEVGVVRKDDRVFRALTTEEIDQHLTAISERD

SEQ ID NO: 30437 - protein, 152 aa, Oryza sativa
MAVSSAVLVGLLVVSCAAVAAATRYTVGDGEGWTTGVNYNNWANGKFFRQGDELVFNYQARAHTVTEVSQTNFDSCNGNSPLSNDNGGSTTIRLSYPGMHYFICTIPGHCSSGMKLAVNVNGDPSYSAASSPAAASAVAAAAAGALIKLALF

SEQ ID NO: 30438 - protein, 342 aa, Oryza sativa
MKPLLLTPAARLAAAAPSTLSRLLRLQSGRHHAHASSSSNRLLPPLLRPPRDGFRGGRLIASSSSSSSQMAAPADAPGGSADAFEVIRAHQEKAARLPPVEEIRTILDQSVRGVLATHSQGHVGYPSGSMVDFACDQDGSPILAVSSLAIHSKNLSENPKCSLLVAKDPEDRTDTVITVYGDATPVSDQEKDAVRSAYLRRHPEAFWVDFGDFRFLHIKPKAVRYVSGVATAILGSGEFSAAEFKEAKVDPISQFSTPITSHMNKDHSDDTKLIVQYSTTVKVDFAYMLDVDSLGFNVKAGYDGSVLKLRIPFPRRAQDRKDVKTLIVEMLQAAKASSSSAE

SEQ ID NO: 30439 - protein, 208 aa, Oryza sativa
MAGHVLGGAHDAPSAANSVETDALARFAVDEHNKRENALLEFVRVVEAKEQVVAGTLHHLTLEALEAGRKKVYEAKVWVKPWLDFKELQEFRNTGDATTFTNADLGAKKGGHEPGWRDVPVHDPVVKDAADHAVKSIQQRSNSLFPYELLEIVRAKAEVVEDFAKFDILMKLKRGNKEEKFKAEVHKNLEGAFVLNQMQQEHDESSSQ

SEQ ID NO: 30440 - protein, 162 aa, Oryza sativa
MYSKPEDVGGGVTTAFAMQGKVPLAAWSTGLFNCFDDCGNCCVTCLCPCITFGQIAEIIDRGSSSCGTSGALYALVMLLTGCNCVYSCFYRAKMRSQYGLQEKPCADCPVHFFCEPCALPQEYRELKKRGFDMNLGWHANMERQGHKPAMTMPPHMFPGMTR

SEQ ID NO: 30441 - protein, 268 aa, Oryza sativa
MHTDAGDDFSESCRSTEHFVLVHGAGHGAWCWFRLLRLLQDSGHRVSAVDLAGAAGSLVDPNHVRSFDDYNAPLLDLMASLPAGDKVILIGHSAGGLSVVHAMHLFGDRIKQAIFIAATMLQFGYQTEQDIKDGVPDLSEHGDVYDLTFGLGADHPPTAVALRKEFQRIILYQQSPQEDSALASILLRPWPTALSTARFTGDDGGVESFIDRVRRVYIKTENDRMVQPEQQEAMIRRWPPSKVMVMDTDHSPFFSAPELLFNLILKSL

SEQ ID NO: 30442 - protein, 320 aa, Oryza sativa
MGYSYSSAAVAVSVLVVALAAAASGQLSTTFYASSCPTALSTIRSAVNAAVAREPRMGASLLRLHFHDCFVQGCDASILLADNATFRGEQGAFPNVNSLRGFEVISSIKMQLEASCRQTVSCADILAVAARDSVVALGGPSYPVELGRRDGMTTNQTMANTNLHPPTTDLGNFVTSFAGKGLSPTDLVVLTGAHTVGVAQCTNFRSRLYGESNINAPFAASLRASCPQAGGDTNLAPLDSTPNAFDNAFFTDLIAGRGLLHSDQELYRGDGSGTDALVRVYAANPARFNADFAAAMVRMGAIRPLTGTQGEIRLNCSRVN

SEQ ID NO: 30443 - protein, 301 aa, Oryza sativa
MSPPPSDSKKGSGAARFIGSTAAGVTELFLFHPVDTVAKRLMTNKENVSGMSGFSKVIFRDAVDKPLLQRYRSLFPGLGFAAGYKITQRIYKFGGQPIVRDYIKKNHSEIFTNTFSEKNAKVMMQATAGSLVGIGEIFLLPLDVLKIRAQANPQAIAGRGIVDIVKAEGFALYRGAGWTAARNAPGSFALFGCNALMMEYVFKLENHSDASFLQFALSSVAGASSSIIVSQPLDVIKTRVQARPFDSPESGATVIKNLLKNEGAGALFKGLVPKLSVVGPKLVFSYTIAQYLIAHFEKAFA

SEQ ID NO: 30444 - protein, 158 aa, Oryza sativa
MNKERLMKMAGAVRTGGKGTVRRKKKAVHKTGTTDDKRLQSTLKRVGVNTIPAIEEVNIFKDDLVIQFVNPKVQASIAANTWVVSGSPQTKKLQDVLPGIINQLGPDNMEHLKRIAEEMQKQVAAAGATAQAKEENDDDVPELVPGENFEEVAQETKA

SEQ ID NO: 30445 - protein, 132 aa, Oryza sativa
MPTGDNVLNTPVWGLHITPRAPEQGHTQHTYDEYGSASTHHGVPAYSPRTAFIEDFFFTDPPQGEVGMDYWHAAPQVTQPTQETEAGQGPDVTPQQAARDRHPPDNLTYPTEQIRRRKKGGPSKRAKGTDRP

SEQ ID NO: 30446 - protein, 257 aa, Oryza sativa
MEVMVHRRLLMDDEKGVNEHLNETETLYNPTTKTSTTAGLIVRGSLFLNVDNAGDDGIRSLRSKMEQQFFTPLAVFRKSVADEVDAKLPWLTLNEFPENVGLTTLVELGKESLLVRLTHLYALDEHSSLSKTVDFDFAKYFVVAGSSLSEVTELTLSGTMPVAESRRANNLKWRVEGEDDDDVPVRFPIPVKGTSVQLQAMEVRAFRISFTKSEKQSASASKSEGKAIEMMEDAWVKQLDAAIALAPTQVEQVIALE

SEQ ID NO: 30447 - protein, 184 aa, Oryza sativa
MDEETQKKVESTVLEILRGSDMESLTEFKVRTAAADRLGIDLSIPDRKRFVRRVVEGYLESLSQEDEQEQQQEQAGGAGEEGKDEQAEEEEEEEEEEEEERGGGTKREYDDEGDLILCRLSARRRVTLQEFKGKTLLSIREYYFKDGKELPAKGISLTVEQWEAFRDSVPAIEDAIKKLGESSD

SEQ ID NO: 30448 - protein, 281 aa, Oryza sativa
MAAMLLRLHPCPLLFPPPPPHPHLRRQLAVYSIPKSSFRSAAAAARARNPPRLASVGGAERRRVGDDYDEEEEDLGQALERTRQLVECAMFASVAGLAYFLSNSLAIENYFSCFFPLPIVISSLRWGLEAGRKTAVATVLLLFTLSGPVKASTYLLMHGVVGLAMGTMWRLETNWIVSIILCSITRALGACGYVLLSSFLIRENILGLITVNIHASLTYILAAAGVNTIPSMDAIYVLFGTLLLLNCGFFIFLLHIMYTIFLTKLGIKPSLRPPRWLDKAI

SEQ ID NO: 30449 - protein, 292 aa, Oryza sativa
MRSAMTRLIRSSSPVVSPSRLSAANLLKNNNGKAFLSEDASKRVEEPFKVEEAETVKVPPPSPDKLLVLGGNGFVGSHVCKEALDKGFTVASLNRSGKPSISESWADKVIWNKGNLLEPDSLKDIMEGVSAVVSCVGGFGSNSYMYKINGTANINAISVAAEKGIKRFVYVSAADFGFVNYLLQGYYEGKRATEAELLSKFTYGGVILRPGFIHGTRRVGSVKIPLGLVGSPMQMVLQSAKPLTRLPLVGPLLTPPVSVASVAKVAVRAATDPVFPPGIVDVYGIMRYSDQK

SEQ ID NO: 30450 - protein, 119 aa, Oryza sativa
MARTSFKLEHPLERRQAESARIREKYSDRIPVIVEKADKTDVPEIDKKKYLVPADLTVGQFVYVVRKRIKLSPEKAIFVFVKNTLPPTASLMSAIYEENKDEDGFLYMTYSGENTFGSA

SEQ ID NO: 30451 - protein, 138 aa, Oryza sativa
MPHARYAPAAPRTMVGLSEGEKHFIRGGIAQDLRTDGRRRLQFRAISVETGVIPQANGSARVRLGATEVIATVKAELGKPSILHPDKGKVSIFVDCSPTAAPMFEGRGSEEFSAELCVALQRCLLGGKSGAGLLGSLH

SEQ ID NO: 30452 - protein, 195 aa, Oryza sativa
MAEAAPIGLSWAPKLPSLPTTSGGKKDTGASSSRAQGSLWKPASELVDGLFVPPRDPRKANKLARKNVKDTSGKGWFDMPAPTITPELKKDLEILQLRHVMDPKRHFKRAGKSKALPKYFQVGTVIEPASEFFSSRLTKRERKTTLVDELLSDQHLKNYRMRKVREIQESRTPGGSQKWRNKGKKTLKRAKDRRK

SEQ ID NO: 30453 - protein, 305 aa, Oryza sativa
MPRIGMGTAAFPFTSSEETTAALLRAIELGYRHFDTARLYATEGCVSEAVAEAVRRGLVASRADVFVTSKLWCSDLHAGRVVPAARETLRNLGMDYVDLLLVHWPATVAPGSYDFPFPKEEMAPAFDMEGVWRGMEECHRLGLARAIGVSNFSAKKLEQLLSFAVVRPAANQVEMNPMWQQRTLREVCRREGVQLCGYSPLGAKGTPWGSAAVMDSGVLHDIAQTKGKTLAQICLRWMYEQGDVLLVKTYNENRMKENLDIFDWELTEEERDKISKLPQQRGLTGMQFVCDNGPYKCVEDLWDGA

SEQ ID NO: 30454 - protein, 226 aa, Oryza sativa
MEARHRVMSLLLVLVIGCCAWGCRPGAAQVPVPARTDGFVYGGKAPALEETVVVEAYFDPVCPDSRDAWPELKKAVEHYASRVTVVVHLFPLPYHSNAFISCRSIHAVNKINPSFVYPLLERFFKYQEGYYNQPTYGKTRATVDAEVAKNLVAPVIGEANLAAYKAGFNDSKSDQATRISFKYGCARGVTGTPYFFVNGIPLISDSGSPLEYNKWKSILDPLVGKM

SEQ ID NO: 30455 - protein, 196 aa, Oryza sativa
MPLRRGGALPLSAPRAAAGGLRGGGGRGAALLHPTCLSPPGTTGRALGLSCQMKRTRWKPVFALETGGPSNADNQDFEDDGGFLGRTRLGRLIQAAARELLEKLNSARNKSPTKIFLVLLGFYTANALATVLGQTGDWDVFVAAIVVATIEGIGMLMYRKPASRPPGRFWSMITMVNYWKAGVCLGFFVDAFKVGS

SEQ ID NO: 30456 - protein, 216 aa, Oryza sativa
MLFANKLHAFVEYETLEDAEKAILELNDEKNWRNGLRVRLLNTCMTKGAGKGKKGVHEADGNGEEDVSTSNQSNEKQLEEPSQLSDMLPDHLFDDSSNDKEGPRRGRGRGRGGRGRGRGYHQHNNNHFNNQNYHNGQHHNHHANNHHHQGGNRGGAHHVGTPPNQQQTKPEQHPQLPIGATKQPPGPRMPDGTRGFTLGRGKPQPFLPVLCAAVEP

SEQ ID NO: 30457 - protein, 201 aa, Oryza sativa
MGSTDNGQPQRVRKGRGFTQQYAFARRYRTPSPERSPVRSRYNDGRNDRWNHFNRYGRNGPYGARSPVRRYRGSPRASSPSRYPRRDRSRSRSRSPLRYRERGGYRRPSPRHSRSRSPAEHQRRDVRNRLRSGRDGGGPDHRNSSPPVNRGRSRSRSKSRDPSKSRSPDAPAKKGSSKYNRRRSSSSRSSSPAGSKGLVSY

SEQ ID NO: 30458 - protein, 125 aa, Oryza sativa
MNFEVTIRPDEGYYVGGKFIFTFQVPPAYPHEPPKVKCKTKVYHPNIDLEGNVCLNILREDWKPVLNVNTIVYGLNLLFSQPNDEDPLNHEAAAVLRDNPEKFERNVQRAMAGGYVGETHFPRCM

SEQ ID NO: 30459 - protein, 106 aa, Oryza sativa
MASASSSSSSFFDIEPLDGGEACLSGHAMDACSLCRKPLTRNCDIFMYRGNTPFCSEECRDHQMEMDEAAVRVSATNARERAARNEQRHRLDAGSVAVAANVPVLS

SEQ ID NO: 30460 - protein, 230 aa, Oryza sativa
MTTMSSRLASRAARLAAVAASRAARLAAASASRTGAGDPSARATATAASRAARLAAAAASHAGGPTARAIAAAVSRAARSISSKLLDDDIAARLSFRYSTEPPDDGKCVTAKDLESDQAVWALYERWCKSYNKKRDHAEMIRRFDIFKLKASLVHSWNNYVHEDKEELARAKKRRDLGKPVDPWYLQEELGPSADGGDTVNQYWRGMLKENDQGMDLPDIQGGKKMSTED

SEQ ID NO: 30461 - protein, 185 aa, Oryza sativa; identical to SEQ ID NO: 30119

SEQ ID NO: 30462 - protein, 249 aa, Oryza sativa
MAIVAVTAGGRRPPCRRVPPAASPPARLSCRCATHTVPRRNVLSTMLSTSTVFLFGPKQITLAETTGGTFREYIDTFDGYSFLYPKSWIQVRGAGADIFFRDPFFLDENMSVEISSPSSSKYMTVEDLGPPEKAAERVLQQYLTEFMSTRLGVRRTSNILSASSKVADDGKLYYEVEVNIKSFASNNELAVMPQDRVQRLEWDRRYLSVLGVENKRLYELRLQSPEKVFKEEEGDLRRVMDSFRVNKTA

SEQ ID NO: 30463 - protein, 260 aa, Oryza sativa
MELDDASRHGFGRMGFGCKHYRRRCRIRAPCCNDVFHCRHCHNESTKDGHELDRHAVESVICLVCDTEQPVAQVCYNCGVCMGEYFCSACKFFDDDVDREHFHCQDCGICRVGGKDNFFHCEKCGSCYSVSLRDKHCCIENSMKNNCPICYEYLFDSLRETSVLRCGHTMHLQCFHEMLKHDKFSCPICSMPIFDMDKFLRALDAEIEANMLHIDYMGKGWIVCNDCRDTTQVYARVAGHKCCHCQSHNTCRVAAPVLPA

SEQ ID NO: 30464 - protein, 224 aa, Oryza sativa
MSSENGENGHGAADEVVEPYQQTPRPGPKLNERILSSLSRRSVAAHPWHDLEIGPDAPAVFNVVVEITKGSKVKYELDKKTGLIKVDRILYSSVVYPHNYGFIPRTLCEDNDPMDVLVLMQEPVLPGSFLRARAIGLMPMIDQGEKDDKIIAVCADDPEYRHFNNLSELSPHRLQEIRRFFEDYKKNENKEVAVNDFLPAPTAREAIQYSMDLYAQYILQSLKR

SEQ ID NO: 30465 - protein, 202 aa, Oryza sativa
MFVLSQIEHNLPMPPHLLSRPLVDAIKAELERLFLDKVVANLGLCVSVYDIRSVEGGFIFPGEGCSTYKVSFRLLMFRPFVGEVLVGKISGYDEKGLHVSLDFFSDISIPGHLMQYGTARALDGRWMLKTEDGDELYLDLDDEIRFLVSSIKYPPIPVEQKETDRAFAPMQIIGSIKGDGLGLLAWWAADEEEGEAEAEAEE

SEQ ID NO: 30466 - protein, 192 aa, Oryza sativa
MASDGAAATPAKASPKKANLLDPHSIKHLLDETISDVVKSKGYAEDTRLGNWKLAIGAAVIAIALLAQFYPKKFPQNREFLLGCIALYVVLNVVLLILSYTKEKDAIMFTHPPAGSFNSTGLVISSKLPRFSDMYTITIASADPQSISANKPVHFTKSVTKWFTKEGVLVEGLFWKDVERLIDDYNTERKGK

SEQ ID NO: 30467 - protein, 234 aa, Oryza sativa
MITAGEVDGENIDNLLSQSLFITCTGGNDYNAFTDGIVPVSDAPAFIAHMVATYIKHIKTLYNLGARRLGILDVLPLGCLPISRVPIENGSCSGTDNWQARLFNRLLRREMTAAATASMPDLVYSIGSIYYTFYDMIKNPSSAGVREVARACCGDGKLNAEADCSATTHLCPDRDNYIFWDKVHGTQAAYHNCVHAFFHGSPRYAEPISFTQLVASPAVDLGRPSPGTNRTARI

SEQ ID NO: 30468 - protein, 225 aa, Oryza sativa
MAAGLQVFGQPASTDVARVLTCLFEKNLEFELIRIDTFKKEHKLPEFIKLRDPTGQVTFKHGDKTLVDSRAICRYLSTQFPDDGNRTIYGTGSLERASIEQWLQAEAQSFDAPSSELVFHLAFAPQLNIPADEARIAENERKLQQMLNVYDEILAKNKYLAGDEFTLADLSHLPNSHYIVNARSPRGKKLFTSKKHVARWYEEISNRASWKQVVKMQSEHPGAFE

SEQ ID NO: 30469 - protein, 168 aa, Oryza sativa; identical to SEQ ID NO: 29141

SEQ ID NO: 30470 - protein, 52 aa, Oryza sativa
MMLRGGRLAGLASRMVGAKPFSTEIFVSRLSFYTTEEELKNVFSPFGAVEEA

SEQ ID NO: 30471 - protein, 207 aa, Oryza sativa
MASRRRMLLKVIILGDSGVGKTSLMNQYVNKKFSNQYKATIGADFLTKEVQIDDRLFTLQIWDTAGQERFQSLGVAFYRGADCCVLVYDVNVTKSFERLNSWREEFLIQASPSDPENFPFVVLGNKIDVDGGNSRTVSEKKAKAWCASKGNIPYFETSAKEGFNVEAAFECIARNAIKNEPEEEIYLPDTIDVGGAGRQQRSSGCEC

SEQ ID NO: 30472 - protein, 231 aa, Oryza sativa; identical to SEQ ID NO: 29346

SEQ ID NO: 30473 - protein, 259 aa, Oryza sativa
MAAAADDDELRRRAAALREVFGDSSDSEADDLPVGGAGREQWRWEAVEGVRGLWLCAAFLSADEQSRLLTAIRREGWFSDARNQAMRFGDLPSWAVELSALIHEAICFGDVRVGCGLELKNEDEDACPLPSDLLWRKPLFDQMIANRYEPGEGICAHVDLMRFDDGIAIVSLESPCVMHFSRAEQEVPICETLESVHAEPTKIPVYLNPGSLVLMSGDARYLWKHEINRKPGAQQWGGRELEQQIRTSITLRKLLPSPN

SEQ ID NO: 30474 - protein, 112 aa, Oryza sativa
MGRDEMLRRSLVALAAAVVVTGVVTASVRKAAATYGFGILAIAGVLLPDWEFFDRDYSQWLTPMPASRRTAAEAAADREHDVWKFKPYPLRMAMLTTIYGFGLYKWWMYVSS

SEQ ID NO: 30475 - protein, 197 aa, Oryza sativa
MSGVIGHKAPAFSTEALMPDGSFKKVSLSDYAGKWLVLFFYPLDFTFVCPTEIIQYSERVEEFNTIGAEVVAASVDSVFSHLAWTKQPRKAGGLGPMKIPILGDITKEVSKAYGVLNEGGVAFRGVFIIDPEQNIRQITINDLPVGRNVDETLRLLQAFQFVAQHGEVCPAGWKPGAKTMKADPKGSQEYFAAAAAQ

SEQ ID NO: 30476 - protein, 221 aa, Oryza sativa
MSEVFEGYERQYCEVSASLFRKCTTASALDGEKKKQKLSEIQSGVEEAESLIRKMDLEARSLQPSVKAGLLAKLREYKSDLNNLKSELKRISAPNARQATREELLESGLADTLAASTDQRGRLMMTTERLNQSNDKIKESRRTILETEELGVSILQDLHQQRQSLLHAHTTLHGVDDNVGKSKKILAAMSKRMDRNKWIIGGIIAALVLAILLILYFKLAY

SEQ ID NO: 30477 - protein, 210 aa, Oryza sativa
MSAGLVTEEVMVGRLVRIRRTVMQMLRDRGYLVVEHELAMGRRDFLRKYGESFHREDLLINKYKKNDPSDQIYVFFPNDDKVGMKHIKKYVEMMKAENVSRAVLVLQQNLTPFARSFLQELEPKIHLEIFQEAELLINIKEHVLVPEHQVLNNEEKKTLLERYTLKETQLPRIQITDPIARYYGLRRGQVVKIIRPSETAGRYVTYRYVV

SEQ ID NO: 30478 - protein, 185 aa, Oryza sativa
MASIIVLASVLLLDVIAFGLAVAAEQRRSKATVTPDSEKLYDYCVYDSDIATGYGVGALLLLAAAQAVVMLASKCFCCGRGLKPGGSRACALILFLFAWLTFLIAEACLMAGSIRNAYHTRYRGMFVGESVSCETVRKGVFAAGAAFTFFTAILSEFYYVSYSKSRDAAGGAPYGGSNIGMGTYS

SEQ ID NO: 30479 - protein, 230 aa, Oryza sativa
MDSLYDISCFAAGLAGNIFALALFLSPVTTFKRILKAKSTERFDGLPYLFSLLNCLICLWYGLPWVADGRLLVATVNGIGAVFQLAYICLFIFYADSRKTRMKIIGLLVLVVCGFALVSHASVFFFDQPLRQQFVGAVSMASLISMFASPLAVMGVVIRSESVEFMPFYLSLSTFLMSASFALYGLLLRDFFIYFPNGLGLILGAMQLALYAYYSRKWRGQDSSAPLLLA

SEQ ID NO: 30480 - protein, 327 aa, Oryza sativa
MDAAWRGGVGCSPVCLDLCVGLSPVREPSAARHELLDRPAGCRGGGDSKSMTNDEAKIVEAKVTQMSEENRRLTEVIARLYGGQIPRLGLDGSASPPRPVSPLSGKKRSRESMETANSCDANSNRHQGGDADHAESFAADDGTCRRIKVSRVCRRIDPSDTSLVVKDGYQWRKYGQKVTRDNPSPRAYFRCAFAPSCPVKKKVQRSAEDSSLLVATYEGEHNHPHPSPRAGELPAAAGGAGGSLPCSISINSSGPTITLDLTKNGGAVQVVEAAHPPPPPDLKEVCREVASPEFRTALVEQMASALTSDPKFTGALAAAILQKLPEF

SEQ ID NO: 30481 - protein, 375 aa, Oryza sativa
MGDEVQALVIDNGTGMCKAGFAGDDAPRAVFPSIVGRPRHTGVMVGMGQKDSYVGDEAQSKRGILTLKYPIEHGIVTNWDDMEKIWHHTFYNELRVAPEEHPVLLTEAPLNPKANREKMTQIMFETFNTPAMYVAIQAVLSLYASGRTTGIVLDSGDGVTHTVPIYEGYALPHAILRLDLAGRDLTDYLMKILTERGYSFTTTAEREIVRDIKEKLCYVALDFEQEMHTAASSSALEKSYELPDGQVITIGNERFRAPEALFQPSFLGMESAGIHETTYNSIMKCDVDIRKDLYGNVVLSGGTTMFPGIADRMQKELTALAPSTMKIKIIAPPERKYSVWIGGSILASLSTFQQMWISKEEYDESGPSIVHRKCF

SEQ ID NO: 30482 - protein, 252 aa, Oryza sativa
MEAAMDLMRRMPPGRAETALNALLSLIPDHSLDLLSQVDLPLQVCMDKESVKEYILCEYNRDADSYRSPWSNKYDPPLEDGTVPSEEMRNLEVEANDVFSVYRDQYYEGGISSVYIWEDEDESFIACFLIKKDGEGKRGHMQIGSWDAIHVIQVGPEEEGAAHYCLNSTVMLSLTTDNKQSGTFNLSGSIRRQMSMTLAVADGHLVNMGKMIEEMEGKLRNSLDQVYFGKTREMVCTLRPPPEVLNRRLPDS

SEQ ID NO: 30483 - protein, 94 aa, Oryza sativa
MPWRPTGCAGWAKQFCKVHVGWPARKFAGFFVGRDCGPKKKPAPLASLDILSDAAKKVMENRPWLAKQQNEYMRAPIHYAALWGMVRVTSIAGT

SEQ ID NO: 30484 - protein, 229 aa, Oryza sativa
MEAAVATPSLLFSSSTPRRPSSCLPPPPPCSSSSSYASHGFKLLQPQLLFINRLTSRNSNGSSRRSISILSLRCSSSGTDSASSSATSERWVLEPAGDGDWRHIGYRVARPGGFQIASEAAVTVGRVPEQADIVLSVATVSGTHARLEKKEGSLLVTDLESTNGTYINERRLTPGFPTPIDPGSLLIFGDIHLAMFRVSKMIVDVSSDTNEAEQEAETAQVSAATQQTN

SEQ ID NO: 30485 - protein, 214 aa, Oryza sativa
MASSASRFIKCVTVGDGAVGKTCMLICYTSNKFPTDYIPTVFDNFSANVVVDSTTVNLGLWDTAGQEDYNRLRPLSYRGADVFVLAFSLVSRASYENIMKKWIPELQHYAPGVPIVLVGTKLDLREDKHYLLDHLGMIPVTTAQGEELRKQIGAAYYIECSSKTQQNVKGVFDAAIKVVIQPPTKQREKKKKKSRQGCSMMNMFRGRKMSCFKS

SEQ ID NO: 30486 - protein, 242 aa, Oryza sativa
MRAISALLLRPLPPLDSSMASSSLPSRTFYRHSLPSSAPPPPSRGACAAACCCLRAAVSRRRAAAQLLSAAGFLIAVSPPSLAARRGRMVVSLEDYVTSPDGLKYYDLVEGKGPTAEKGSTVQVHFDCIYRGITAVSSREAKLLAGNRSIAQPYEFSVGSLPGKERKREFVDSANGLYSAQASPKPPAAMYTITEGMKVGGKRRVIVPPELGYGKKGMNEIPPDAPFELDIELLEVVPPAEK

SEQ ID NO: 30487 - protein, 196 aa, Oryza sativa
MAAAAASSSSSSAAATPQGVTERRGIPAASFVEDVETYLRQAGLDVNSGLAFLQERLQQYKIVEMKLLAQQRDLQAKIPDIEKCLDIVATLQAKKALGEALTADFELSEGIYSRAKIEDTDSVCLWLGANVMLEYSCDEANALLKKNLENAKASLEVLVADLQFLRDQQTITQVTIARVFNWDVHQRRSKQAIKET

SEQ ID NO: 30488 - protein, 224 aa, Oryza sativa
MAATSAAAQLFIHKVCPYAHRAYLAATEKGLIAKGAIELVEVSLPTPDWYNKDVNPRETVPALRLANGQVVPESLIVVQYLDDAFPEVPLLPKDPKDRADVRVFVADFDSAIGGLYKIIFEKDEKVRAELVKSALDDIAYIERALVAKSAGPFFLGEQFSYADIAALPFIDRFRHTLLELRGVDILANAPRLTALIAAAEKRPSFQATAQTKDYYVSHYKKYVE

SEQ ID NO: 30489 - protein, 117 aa, Oryza sativa
MATAGDEQQQQAAAAQTAEVTEAAAKEVVSVEMPAPEGWTKKFTPQRGGRFEIVFVSPSNPTEPSAPKAAAAAPVENSADKGPHQDSQPPSAAAPAKESSPVNNGQLPAGASAVKCT

SEQ ID NO: 30490 - protein, 202 aa, Oryza sativa
MHQWPLPRAASSSSTTNPPPPPLRLLRVRGNPSPRCSPFLSSSSSSSASSLSSSSATSSTSSPSASAAAASSFATGRIMTPPPSPCSPQPRRLMPRRRASRRAWTPPSSRPSPRCASRPPPPRRSAPCASPTSPPATPSACSPSAATPSTRPALTPGSAPTPRAPSAAPTSTPRPRRRLATRTPPPLPSTWNATGGAAPADR

SEQ ID NO: 30491 - protein, 233 aa, Oryza sativa; identical to SEQ ID NO: 30381

SEQ ID NO: 30492 - protein, 212 aa, Oryza sativa
MKELPASRAWGEESSAGHAQGRSLPSSTARGEKLPAGRAYGEESLTGCARRSCSPAGHTGVGRGGSSPTGRVLRRRSRPATRGRGARWPAVHGEIVVGQPCVGGAARLPVTPGERCRRPATRRGRSSPTGAAQGDDFPASRAREEESSAGHRDPPRPWYRLQRPSTWLSTPDLPEKEIRKKRRLRWLTGRAYCFLFLPLSLTCGTVFYFQLL

SEQ ID NO: 30493 - protein, 166 aa, Oryza sativa
MVILSGSHTIGRSHCASFLFKNRERLANGTISPAYQALLEALCPPTTGRFTPITTEIDVSTPATLDNNYYKLLPLNLGLHFSDDQLIRNATLLPFVDAFAANETLWKEKFVAAMIKMGNIDVLTGARGEIRLNCSAVNPSSSSSSSSAGRMIETVFPGAGGEVAAS

SEQ ID NO: 30494 - protein, 281 aa, Oryza sativa
MKVSSANRNRGYGFVEYYNHACAEYARQEMSSPTFKLDSNAPTVSWADPKNNDSASTSQVKSVYVKNLPKNVTQAQLKRLFEHHGEIEKVVLPPSRGGHDNRYGFVHFKDRSMAMRALQNTERYELDGQVLDCSLAKPPAADKKDDRVPLPSSNGAPLLPSYPPLGYGIMSVPGAYGAAPASTAQPMLYAPRAPPGAAMVPMMLPDGRLVYVVQQPGGQLPLASPPPQQAGHRSGSGGRHGDSGGRYGGGGGSSGSSRPGAKRQRGDDNSSSRHKGRRRPY

SEQ ID NO: 30495 - protein, 217 aa, Oryza sativa
MAGRVVRSCVQTGLKAVNSVLGLAGMAVILYALWMLRAWYRDVADLHYRLPVPWFIYTFIGLGVFMCLLTCSGHIAAETANSHCLSCYMIFVFIIIILEGAITTDVFLNSNWEEDFPDDPSGKFEEFKDFIRSNFEICEWIGLSVVAAQVLSIVLGMVLRALGPDRESDYDSDDDPSVPARLPLLRNQYQHGINYSEHTLPQSSDSWSLRILDKANK

SEQ ID NO: 30496 - protein, 303 aa, Oryza sativa
MLSVARRPLSAAVPVGNLLGIHLFQCPDTVGIVARLSECIASRGGNIHSVDVFVPDDKPVFYSRSEFTYNPMLWPRDVLRTDFLNLSQHFSAQRSTVRVPDLDPKYKISVLASKQDHCLFDLLYRWQEGRLPVDINCVISNHDRLKDNHVRRFLERHGIPYHYLPTSPGNKREQEILELVQGTDFVVLARYMQILSEGFLKAYGKDIINIHHGLLPSFKGGNPSRQAFNAGVKLIGATSHFVTPELDAGPIIEQMVERVSHRDTLQSFVVKSENLEKQCLAEAIKSYCELRVLPYELKKTVVF

SEQ ID NO: 30497 - protein, 165 aa, Oryza sativa
MLGHLVGLVKVRVVRGVNLAVRDLRSSDPYVIVRMGKQKLKTRVIKKTTNPEWNDELTLSIEDPAVPVRLEVYDKDTFIDDAMGNAELDIRPLVEVVKMKIEGVADNTVVKKVVPNRQNCLAEESTIYISEGKVKQDVVLRLRDVECGEIELQLQWVDIPGSKGV

SEQ ID NO: 30498 - protein, 177 aa, Oryza sativa; identical to SEQ ID NO: 29596

SEQ ID NO: 30499 - protein, 320 aa, Oryza sativa
MDADRDPIFPVQQMPSLLFPPPPPRPLALDSTSSASSSFVPHHPSITSFPILVLTVLGILTTSVLLLTYYIFVIRCCLNWNSSSSSDTRTAGLISRRRRGAASSSLPAVAEPRGLEEAAIQSLPAFRYRKAIKDTTADSSKCAVCISEFQEEERVRLLPSCLHVFHVDCIDTWLQGNANCPLCRAAIATNDSQLPLDQFVRPEVVVIQVITGAEEEGAQAPQQEANTAASDPAVDATSTNQQVSSKKTKNQNAWHVSISKGDECIAVRRDRNVLPLRRSFSMDSLGGAGEVHLQIQNILQRSTHFHRDISDSSSSSTGTL

SEQ ID NO: 30500 - protein, 84 aa, Oryza sativa
MGDKLHRREGNSPDHQLRPLNDRSVIKEVGVRVGGGCVGLLPQPTPPRSGRRGEEAVAAAATPCNGGVHRRRCLLLSLHIVHCC

SEQ ID NO: 30501 - protein, 233 aa, Oryza sativa
MASTTATAAGNGSGSILPTHTTTAPPFRAHKDADLESTTRRRRRRCLCCCLLVTLVVLLVLAITLLVLFLTVLRVRDPTTHLVSTRLTGLSPRLSFPATSVQLNVTLLITVAVHNPNPASFTYATGGHTDLTYRGAHVGDAEIDPGRIPSRGDANVTMALTLQADRFAGDLTQLVSDVMGGSVALDASTRIPGRVAILGVFKRHAVAYSDCHFVFGVTEMAVRSQQCSDRTKL

SEQ ID NO: 30502 - protein, 310 aa, Oryza sativa
MATAASFRPEAARSPPAVQPPAPPLSKFKVALCQLSVTADKARNIARAREAIEAAAAGGAKLVLLPEIWNGPYSNDSFPEYAEDIEAGGDAAPSFSMMSEVARSLQITLVGGSISERSGNKLYNTCCVFGSDGELKGKHRKIHLFDIDIPGKITFKESKTLTAGQDLTVVDTDVGRIGIGICYDIRFQELAMLYAARGAHLLCYPGAFNMTTGPLHWELLQRARAADNQLFVATCAPARDTSAGYIAWGHSTLVGPFGEVIATAEHEETTIMAEIDYSLIDQRRQFLPLQYQRRGDLYQLVDVQRSGSDE

SEQ ID NO: 30503 - protein, 293 aa, Oryza sativa
MEVGFLGLGIMGKAMAANLLRHGFRVTVWNRTLSKCQELVALGAAVGETPAAVVAKCRYTIAMLSDPSAALSVVFDKDGVLEQIGEGKGYVDMSTVDAATSCKISEAIKQKGGAFVEAPVSGSKKPAEDGQLVILAAGDKVLYDDMVPAFDVLGKKSFFLGEIGNGAKMKLVVNMIMGSMMNALSEGLSLADNSGLSPQTLLDVLDLGAIANPMFKLKGPSMLQGSYNPAFPLKHQQKDMRLALALGDENAVSMPVAAASNEAFKKARSLGLGDLDFSAVYEVLKGAGGSGKA

SEQ ID NO: 30504 - protein, 145 aa, Oryza sativa
MVSEQTAPVATAEAELESSAAPPVKPDEAAAKAQPEDDAPVVEDAKDDDDDEEDDDDDEDEDEDGEQGAIGNEGSKQSRSEKKSRKAMMKLGMKPVTGVSRITIKRAKNILFVVSKPDVFKSPTSETYVIFGEAKIEDLSSQLQA

SEQ ID NO: 30505 - protein, 229 aa, Oryza sativa
MGVQHLLKLRMASPHPHPHPGAPLAARPLSALASFFLARPSSTAAAPPPRHVTLSCSRPHCNHNQWAASRCRGTAGRRRLQVVVAMSSSAPPPPPGSVQKSEEEWEAILSPEQFRILRLKGTEYPGTGEYDKLFAEGVYECAGCGTPLYKSSTKFNSGCGWPAFYEGFPGAIARTPDPDGRRIEITCAACGGHLGHVFKGEGFNTPTDERHCVNSISLKFIPASEDSKL

SEQ ID NO: 30506 - protein, 292 aa, Oryza sativa
MGGAHFPDEGEVVAGEGDAVVPLRDVGKMEHGCEHYRRRCKIVAPCCGEVFACRHCHNDATASGDRHTICRQDVEKVVCLLCDTEQPVSQVCINCGVNMGEYFCDVCKFYDDDTEKGQFHCYDCGICRVGGKENYFHCAKCGSCYAVALRDNHQCVENSMRQNCPICYEYLFDSLKGTRVLDCGHTMHMECLSEMVEHNKYTCPICSKTALDMTHHWALLDQEIEATIMPPVYRYKVWVLCNDCNKVSEVDFHVIGHKCSHCNSYNTRSTSRPADLSGSSSPSTSDSSENNP

SEQ ID NO: 30507 - protein, 210 aa, Oryza sativa
MAVGWRPAMLVVVVAVAAWRGEALSVTVTDTECIHEFVPYEGDTVSGNFVVVDHDIFWSSDHPGIDLTVTSPGGNTVYTLKGKSGDKFEFKAPRGGMYKFCFHNPYGAPETVSFYIHVGHIPNEHNLAKDEHLDPINVKIAELKEALESVTAEQKYLKAREARHRHTNESTRRRVMFYTIAEYLAFMGASALQVVYIRRLFSKNVAYNRV

SEQ ID NO: 30508 - protein, 250 aa, Oryza sativa
MSRRYDSRTTIFSPEGRLYQVEYAMEAIGNAGSALGVLAADGVVLVGEKKVTSKLLQTSRSAEKMYKIDSHLACAVAGIMSDANILLNTARLHAQRYALSYQEPIPVEQLVQSLCDTKQGYTQFGGLRPFGVSFLFAGWDKHHGFQLYMSDPSGNYSGWKAAAVGANSQAAQSMLKQDYRDGMTREEAVALALKVLSKTMDSTSLTAEKLELAEVFLLPGTGEVQYQVCSPEAMGKLLAKAGLSQPAPEA

SEQ ID NO: 30509 - protein, 221 aa, Oryza sativa; identical to SEQ ID NO: 28562

SEQ ID NO: 30510 - protein, 199 aa, Oryza sativa
MGRAKSKGPKFAAVKKIITKKTIQKYKEDVLNPKKKDNEKEKLGRNVPQVSSALFFSYNTALGPPYRVIVDTNFINFSIQNKLDLEKGMMDCLYAKCTPCITDCVMAELEKLGQKYRVALRIAKDPRFQRLACTHKGTYADDCIVERVTQHKCYIVATCDRDLKRRIRKVPGVPIMYITRHRYSIERLPEATIGGAPRI

SEQ ID NO: 30511 - protein, 354 aa, Oryza sativa
MAGGGGAGGMSESVLRKVLLSYCYVGVWIFLSFAVIVYNKYILDPKMYNWPFPISLTMVHMAFCSSLAVALVRLLRVVEPPSSPAMTPQLYTSSVVPIGALYAMSLWFSNSAYIYLSVSFIQMLKALMPVAVYSIGVLFKKETFRSSSMLNMLSISFGVAIAAYGEARFDVRGVALQLAAVAFEATRLVLIQILLTSKGISLNPITSLYYVAPCCLGFLLVPWVFVELPRLRAVGTFRPDFFVFGTNSLCAFALNLAVFLLVGKTSALTMNVAGVVKDWLLIAFSWSVIRDTVTPINLFGYGIAFLGVAYYNHVKLQALKAKEAQKKISQADEEAGSLLQERDGHSDRKSDNQA

SEQ ID NO: 30512 - protein, 323 aa, Oryza sativa
MASNGGEEKSRVAAGYGGGGYGYGGYEGRDDRKWWPWLVPTVIVACIAVFIVEMYVNNCPKHGSALGGCVAGFLRRFSFQPLRENPLLGPSSATLQKMGALDWNKVVHQHQGWRLISCIWLHAGLIHLVVNMLSLLFIGIRLEQQFGFVRIGAIYLLSGFGGSVLSALFLRNNYISVGASGALFGLLGSMLSELIMNWTIYSNKAAAIITLLFIIAINLAIGILPHADNFAHIGGFVTGFLLGFVLLARPQFGWMERHELPQTNQPPKYKAYQYVLWVVAFVLLLVGFVVSLVMLFKGKNGNDGCHWCHYLNCVPTSKWKCNT

SEQ ID NO: 30513 - protein, 227 aa, Oryza sativa
MEPAAEKREAEQEELQQQHDEPAVPSADDDEAEAEENERRNRELKAGFHPLRRRFVLWYTRRTPGARSQSYEDNIKKIVDFSTVESFWVCYCHLTRPVSLPSPTDLHLFKEGIRPLWEDPANRSGGKWIIRFKKTVSGRFWEDLVLVLVGDQLDYSDDVCGVVLSVRFNEDILSVWNRNASDHQAVMTLRDSIKRHLKLPHSYLMEYKPHDASLRDNSSYRNTWLRG

SEQ ID NO: 30514 - protein, 175 aa, Oryza sativa
MSSTRTEISCGNGDNTRSSPTRDRERPSASLAAMAASTVSGLAGATLARRPAFSTGFTTGARVSARNPLLTRNLERNGRITCMTFPQDWLRRDLNVIGFGLIGWIAPSSVPAINGNSLTGLFFSSIGQELSHFPSPPALDSPFWLWLVTWHLGLFLALTFGQIGFKGRTEGYFDK

SEQ ID NO: 30515 - protein, 270 aa, Oryza sativa; identical to SEQ ID NO: 28586

SEQ ID NO: 30516 - protein, 359 aa, Oryza sativa
MAVTNDHFKTALGTSNPSALRETVVEVPNVSWEDIGGLENVKRELQETVQYPVEHPEKFEKFGMSPSKGVLFYGPPGCGKTLLAKAIANECQANFISVKGPELLTMWFGESEANVREIFDKARQSAPCVLFFDELDSIATQRGSSVGDAGGAADRVLNQLLTEMDGMNAKKTMFIIGATNRPDIIDPALLRPGRLDQLIYIPLPDDQSRLQIFKACLRKSPVAKDVDLNALAKYTQGFSGADITEICQRACKYAIRENIEKDIEMEKRRKDNPEAMEEDEVDDIAEIKAAHFEESMKYARRSVSDADIRKYQAFAQTLQQSRGFGTEFRFADQPASGAGAAADPFASAAAAADDDDLYS

SEQ ID NO: 30517 - protein, 239 aa, Oryza sativa
MYSPLGSGCAFAAAASSAFPPATVPGGIFAGRRRRRPARLVLAWASSDGSDGGGAAAGAVAAEASAVGESKEGEVASGGGSSAESSAEKKPAPVDPKIEKELKKAVQKTAATFAPRASTATKNPAVPGTALYTIFEVQGYASMLLGGALSFNLVFPSNEPDIWRLMGMWSIWMFTIPSLRARDCSSKEKEALNYLFLLVPLINVIIPFFVKSFAVVWSADTVAFFVMYAWKLGWLQRSE

SEQ ID NO: 30518 - protein, 275 aa, Oryza sativa
MTGPVAGAGDVQAAETFRVFVGYDSREDIAYRVCRRSLLQRSSVPVAVIPIVQQELRSAGLYWRERGPTESTEFSFTRFLTPHLAGYRGWALFVDCDFLFVADVAELARMADPRYAVLCVHHDYAPKEATKMDGAVQTVYPRKNWSSMVLFNCAHPKNRAALTPEAVSTQSGAYLHRFMWLDDADIGEVPFVWNFLVGHNRVDPADTAGTAPRAIHYTSGGPWFEQYKNCEFAELWVQERDAYEAEAEEDEEKEEHEPKAILHAPAAPSAVPVDA

SEQ ID NO: 30519 - protein, 243 aa, Oryza sativa
MASSAAPFHMVQIQRDDTTFDAYVVGKENAPGIVVLQEWWGVDYEIKNHAVHISQIGEGYRALIPDLYRGKVALDVAEAQHLMEGLDWPGAVKDIQASVKWLKANGSPKVGVTGYCMGGALSIASGVSVPEVDAVVAFYGTPPSELADASKAQAPIQAHFGELDSFVGFADVTAAKSLEEKLKSSGVPHEVHIYPGCSHAFMNTSPEAVKRRKEMGLTDENQAAIDLAWSRFSTWMGRFLGSA

SEQ ID NO: 30520 - protein, 114 aa, Oryza sativa
MDGDTLSAAAAEDGKVLHAFQTSFVQVQSLLDQNRVLINEINQNHESKVPGDLSRNVGLIRELNNNIRRVVDLYADLSSLFAASSPGPAASEGASVGTAVRHAGHKRVRSTHLD

SEQ ID NO: 30521 - protein, 171 aa, Oryza sativa
MEHKETGCQQPEGPILCINNCGFFGSAATMNMCSKCHKEMIMKQEQAKLAASSIDSIVNGGDSGKEPIIAGHAEVAVAQVEVKTLVAQPAEIAGPSEGVTVNPKGREGPNRCSTCRKRVGLTGFNCRCGNLYCAMHRYSDKHDCQFDYRTAARDAIAKANPVVKAEKLDKI

SEQ ID NO: 30522 - protein, 265 aa, Oryza sativa; identical to SEQ ID NO: 28575

SEQ ID NO: 30523 - protein, 263 aa, Oryza sativa; identical to SEQ ID NO: 28772

SEQ ID NO: 30524 - protein, 226 aa, Oryza sativa
MKTVSQLASGKQPVGTTAYMGNIQYLMQCKCGVNTAEDWLNPAAIREVFEARALRMAVNCAQNINKAPSQEEGFYELSPDLLEVAVAHIQLIIVTKFIEKLEQDIPGEGVKEQLCILCNVYALYLVHKHLGDFLSTGSITARQGALANEQLGKLYAQVRPNAVALVDAFNYTDHYLGSVLGRYDGNVYPALYEEAWKDPLNDTDVPDGYQEHLRPLLKQQLKLSRL

SEQ ID NO: 30525 - protein, 270 aa, Oryza sativa; identical to SEQ ID NO: 28586

SEQ ID NO: 30526 - protein, 272 aa, Oryza sativa
MVLCQGLSAGHAQLLAFPAAKHNVSFARTSCLGTPAGSWSVKRARLHAERKSFSMGALRVGTGFVQNDMLASFGRDDSIKGIPSLAARHSQHRRLEVGCRASSLASFSYPELTSKPRWWWRTVACVPYLLPLHNMWSYADVIYQLHTYLQGFSLVYTFIDTMTLFPGWLLLVIFMTVYFFVVRRKWSPHFLRFHVILAILLDTGSQAVATMCTWMPSIVYQGTPMQYFWMAIAFIQIFTVLECMRCALAGMYPNVPFISHTAFIHSDLNLFR

SEQ ID NO: 30527 - protein, 285 aa, Oryza sativa
MQVDATSNPTLTPRTPNFSTGDFPALPTVEDQNGFSKGNADILSIFNGRSSPSVSTGTGDFVSAVRKLASQNSGHWKYKKGPEYGNGVSTVSVPKQYSSTTKTSSGNKFQSVSSARAAPWLETGDAVANMYSESRGEARDFARIRNACFEQARQAYLIGNKALAKELSMKGQTYNTQMKASHEKAREAIYRQRNPSSQRGSDRLIDLHGLHVNEAIHILKVELGTLKSTARATGERMQVMICVGTGHHTKGSRTARLPIAVEQFLLEEGLHYTQAQPGLLRVVVF

SEQ ID NO: 30528 - protein, 229 aa, Oryza sativa
MAGAPRGLVLLGVCAVLMAVAVGGEAASVVVGTAKCADCTRKNMKAEDAFKNLQVAIKCKNTNGEYESKAAGKLDGTGAFSVPLDADLDSSDCIAQLHSANNEPCPGQEPSKIVPMSEGTFVAIAGKTHYPSALCASATICGPIKKKIIDHFHKKPVPPKPEPKPEPPKPKPEPEHPFLDHIHKKEKHFFDHFHKKPVPPKPEPKPEPKPEPKPQPAPEYHNPSPPAKN

SEQ ID NO: 30529 - protein, 79 aa, Oryza sativa
MSTAAAISSPSPSHADLVLQDLCRIEHPQARGNQKVKLDAWSYFWKHKRKDHIYYPIITLTTLDHTFGGCCMQLLLSKP

SEQ ID NO: 30530 - protein, 170 aa, Oryza sativa
MPHQRRAAQPGRQPPLRRDPRRALQARRRPSRPPRQPHAVEQLLHVGRTGVLVADQGRRPQRQEQLHSGLRQPAAAGGVRVVPQPAEGVPGGERHPRGVPRRSCQRCGGAGGQGGQGLLQLRDVRHPARVSPAPRHGRTTCVHACSRGQLEASVSGWYLLLYSCVRLLCS

SEQ ID NO: 30531 - protein, 230 aa, Oryza sativa; identical to SEQ ID NO: 29264

SEQ ID NO: 30532 - protein, 224 aa, Oryza sativa
MAGAPRGLVLLGVCAVLMAVAVGGEAASVVVGTAKCADCTRKNMKAEDAFKNLQVAIKCKNGNGEYESKATGKLDGTGAFSVPLDADLHSSDCIAQLHSATNEPCPGQEPSKIVPMSEGTFAAVAGKTHYRSALCASVTICGPIKKKIIDHFHKKPVPPKPEPKPEPPKPKPEPEHPFLDHIHKKEKHFFDHFHKKPVPPKPEPKPEPKPQPAPEYHNPSPPAN

SEQ ID NO: 30533 - protein, 210 aa, Oryza sativa
MGKGFMSYLAMKTDAAGGEAAQAALIDADLQELGVAARKLANHALVLGGGLGFGTTFLKWLAFFAAVYLLILDRTNWKTNMLTALLVPYIFFTLPGGLFSLLRGEIGKWIAIIAVILRLFFPRHFPDWLELPGAVILLIAVAPNLFASTFRGDLVGIFICLIIGCYLLQEHIRASGGFRNAFRKGNGVSNSIGILLLFIYPVWALVLNFL

SEQ ID NO: 30534 - protein, 224 aa, Oryza sativa
MSKEKHHKREHHLRRCCGGMAACILALVLVVGFIALVVYLALRPSKPSFYLQDLQLRSVDLGDPSLSATAQVTLASRNPNDHVGVHYRRLDVFVTYRDEPVTVPVSLPPTYQGHRDVTIWSPVLSGESVPVAGFVADALRQDVAAGYVALQVKVDGRVKWKVGSWVSGSYHLFVSCPAMLASAGPGGVGPMPLGGASAAVVNGTGAGAVASLRFTQPTGCSVEV

SEQ ID NO: 30535 - protein, 243 aa, Oryza sativa
MATARLLLVLTVVAAAGSCFCSAQEAKPPPYCGSVRTAIEAHNIIGWKTFTADCAKYLADYLTGDRYPRDADVVINEAIAYAESLKLSGSGKEIWVFDVDETALSTLPYQANHGYGVQPYDQASFIQYVSEGSAPALQGTLRLYQRLLQLGVKPVFLTDRTEDQRTVTTNNLLSQGYCSWEKLLFQPVGLQTTTQAFKTDERQKLVDAGYVIVGNIGDQWTDILGSPEGCRTFKYPNPMYYVA

SEQ ID NO: 30536 - protein, 260 aa, Oryza sativa
MPPRKRPPPPAKAPEAPPETKPKISPPAKPIAAAPPPPKAVLSDTVLAALSQHERPIYKLVFAGGDKGMSQTEIRIKTGMPTSTLTKHLRGLTSKGVLKVVNSVHKRAEKIYMDVRIDPSPEITGGTWYRNGQLDSDAVASARRRCLDQIDKLGVATAESIHEGISRECSNLAYSTEQVRDILRTMALDREVEEVRSTGAGEFGDLRAGRVCYRRGGPVQGGMMERIPCGVCPRIDECSPDGVISPSTCVYYKKWLQMDF

SEQ ID NO: 30537 - protein, 222 aa, Oryza sativa
MQSLLRRVYLAGSHGSAAKLLDRAASGVAQSGANLLSIKHLSSCSWIRPFGNSIVSGDSVHSHGFCVNTMPMRGLSTVGSAEVSVEEESSDSPGVEHPPRIKFKRPDKTARHIMNILNKEAVDKVRGEREIPDVQPGCIIQMRLQVPENKRRESTLKGIVIGRRNAGINTTFRLRRLVAGVGVESVFPLYSPNIKEIKVLDRKKVRRAKLYYLRDRMNALKK

SEQ ID NO: 30538 - protein, 195 aa, Oryza sativa
MAKLHQWPVLLLAAVIVLAASFAVPASAARRRAVRLHLYMHDIAGETAVQVVKGTGPLHPSMPPGNRHFGDTTVMDDLLTEGPSLDSNPVGRAQGSYVLAGLVDPVVVVTATFKLTHGPYNGSTLVIAGRDEVLAEVRELAVVGGTGKLRRASGHVLWRTLEVLEGAHYVLELDVYASLPATAAAAASALALATN

SEQ ID NO: 30539 - protein, 169 aa, Oryza sativa; identical to SEQ ID NO: 30313

SEQ ID NO: 30540 - protein, 220 aa, Oryza sativa; identical to SEQ ID NO: 30219

SEQ ID NO: 30541 - protein, 267 aa, Oryza sativa
MASHTTLILLLPLLAAAAVAAADVAPAPAPPAAQTINLTGILEKGGQYNTLLRLLNATRVGEQLGSQLKTTYDGLTFFAPTDAAFAALRPGTLNGLSDQEQVQLVLYHVLPRYYTLATFQTASNPLRTQATGPAGVYTVNVTTTTGQSLVNVSTGVAAVPLGTTLSADFPLAVYSVDGVLLPEQMFGKAKAPAPAAAPASAAGKGANKEHKKGGAMPKNEVAATAPTAGAGGEDSDDSATTNAVAVAGAAGVVWTAALVGIANLVIA

SEQ ID NO: 30542 - protein, 255 aa, Oryza sativa
MAEPNPQVEREVEVEEVRRPKLRYLEFVQVAAAQATICLAGLYALAKDHAGPLRPGVDAVESAVKGVVGPVYGRFHGVPLDVLAFVDRKVDDTVQELDRHLPPTLKAASAKACAVARGVPDVARELTAEVQQSGVTGAARVAYAKVEPVAKGVYGRIQPAAKDLYVRYEPAAEHLAVSTWRSLNNLPLFPQVAQIAVPTAAYWAEKYNKVIAAAADKGYTGAQYLPAIPTERIAKVFGELSPEAQPSKSESAKTQ

SEQ ID NO: 30543 - protein, 334 aa, Oryza sativa
MHAKRFNKMARPSSSWWMALLVVAAVAQLGASDLRTDYYNSTCPNVESIVLGVVKDKMQATIRTIGSTVRLFFHDCFVDGCDGSVLITSTAGNTAERDAPDNLSLAFEGFETVRSAKAAVEAACPDQVSCTDVLAIATRDAIALSGGPFFPVELGRLDGMRSSASNVAGKLPQPNNTLSELVAIFKSNGLNMSDMVALSAAHSVGLAHCSKFSDRLYRYNPPSQPTDPTLNEKYAAFLKGKCPDGGPDMMVLMDQATPALFDNQYYRNLQDGGGLLASDELLYTDNRTRPTVDSLAASTPDFYKAFADAIVKLGRVGVKSGGKGNIRKQCDVFN

SEQ ID NO: 30544 - protein, 171 aa, Oryza sativa; identical to SEQ ID NO: 30521

SEQ ID NO: 30545 - protein, 303 aa, Oryza sativa
MAPKRLVCFLAVAAALATTCHGWGAGAGDVVSSSAAALSFVDRLRQMMIPAAVGDGDYCDSWRVGVEANNVRGWTAAPRKCDNYVENYMRGHHYRRDSKVVVDEAAAYAEAAVLSGDPAADANATWVFDVDETALSHVKFYKKHGFGYHRTDEPAFMEWLIAGRASALPNTVTLYKKLLLLGVKIVFLSDRPDTPELRNATATNLIKEGFDCWDELILRSENSTATGSVVEYKSGERKKLEEEKGMVIIGNIGDQWSDLLGSPEGRRTFKLPNPAYYIDNYKRAGAAVRAAVAITASSSSSSS

SEQ ID NO: 30546 - protein, 194 aa, Oryza sativa
MSSYMEAAAAARAAEAKTEGLLRGACALLAAAAALLVGLNTQTETVLFIRKKATVKDVQALWVLAMAAAAAAGYHLLQLLRCFYLSRFADGKPCRHRRAIAWLCFLLDKGCAFITFATTVAAAQACVVALYGTHALQWTKLCNIYTRFCEQVAGSLVCAMLAAVGTALLSVVSARNLFRLYPSMLSPPPSSFVG

SEQ ID NO: 30547 - protein, 172 aa, Oryza sativa
MEGPWAATATTGIFLAAAVTDWLDGYIARKMQLGTPFGAFLDPVADKLMVAATLVLLCTKPLEISLLRDGPWLLTVPAIAIIGREITMSAVREWAASQNTKVLEAVAVNNLGKWKTATQMTALTILLASRDKSLPAQDALVTSGIALLYVSAGLAIWSLVVYMRKIWRILLK

SEQ ID NO: 30548 - protein, 212 aa, Oryza sativa
MGKDCGKHGDDDFRQGCRRFITVLVVLAILVGIIALIVYLVLRPTHPRFYLQDATLRQLDLSNSSSTAGGVLSTTIQVTVASRNPNDRVGVYYDRLDVYASYKYQQITVAASLPPVYQGHGDVDVWSPVLAGPSVPFAPYLADAISQDCQAGYLILQVKIDGRVRWKVGSWISGHYHLFVTCPAFLVTAGGNGSPGASGFRFQTTTYCHVEV

SEQ ID NO: 30549 - protein, 280 aa, Oryza sativa
MSAAAAAASSPAPRLESKVALVTGGASGIGEAIVRLFREHGAKVCIADIQDEAGQKLRDSLGGDQDVLFVHCDVSVEEDVARAVDATAEKFGTLDIMVNNAGFTGQKITDIRNIDFSEVRKVIDINLVGVFHGMKHAARIMIPNKKGSIISLGSVSSVIGGLGPHSYTATKHAVVGLTKNVAGELGKHGIRVNCVSPYAVPTALSMPYLPQGERKDDALKDFFAFVGGEANLKGVDLLPKDVAQAVLYLASDEARYISALNLMVDGGFTSVNHNLRAFED

SEQ ID NO: 30550 - protein, 397 aa, Oryza sativa
MRMAAPQQVHVRAAPLARALRTRVAAAAASASSPERALLGLSEPDLRQLAVDLGQQSYRGKQLHDLLYKSRAKQIQEFSHVPKVFREALVGAGWKVGRSPVHHAVTASDGTTKILLKLEDNRLIETVGIPVDDDKGPSRLTACVSSQVGCPLRCSFCATGKGGFARNLHAHEIVEQVLAIEETFQHRVTNVVFMGMGEPMLNLKSVLEAHRCLNKELKIGQRMITISTVGVPSTIKKLASHKLQSTLAVSLHAPNQKLRETIVPSAKSYPLEALMDDCKNYFLETGRRVSFEYTLLAGINDAKEHAEELAELLHTCGGGYHVNLIPYNPIQGSEYKRPYRKVVQAFVDALEARKITVSVRQTRGLDANAACGQLRNEFQKNPLLESSPSSEPNLVPA

SEQ ID NO: 30551 - protein, 173 aa, Oryza sativa
MSLAATFVFLLVSALQMLDQVLDLVKKRGSITDDQLKLRLEITQILKEASALSTPSTFAQAAKLKRLAAAKEKELAKLQQQDIKGKQSLYNQYGRVMLFSKVLIYGLLILWFWSAPVTTVPKHLLQPFGRMFSWRGVDAATGRVVVGIIPWLLLTSRVSKLLCQKLAPIFLHP

SEQ ID NO: 30552 - protein, 166 aa, Oryza sativa; identical to SEQ ID NO: 30291

SEQ ID NO: 30553 - protein, 238 aa, Oryza sativa
MASRNADPPRHHPSTPPLLLAMRHLPFPGVHRPRALPAPDLAPLAARLEELAAAAAAHPLLKPLFAFHSHLAAFSQSRRRAMATMRRRRTTGECPLSGEHCFAAVLGDSVAGVVVSSGINNFLSLYNTVLVVRLVLTWFPNTPPAIVAPLSTICDPYLNIFRGIIPPLGGTLDLSPILAFLVLNALSSTAAALPAELPDPAPPTSRGATSSSSVLTANRRKWMRRIRPVKSQEGEEEM

SEQ ID NO: 30554 - protein, 119 aa, Oryza sativa
MCRDRQEAAAVAALRACGGRRRHGRPRPARPHAGGRHAGREVPAARAAAGGAVARSPEGGLLLRHTVKRWNVDPALLHTLHEQDGRRQRRRRQQRCSVKRRLLKLKKNFRFVLKPQCNL

SEQ ID NO: 30555 - protein, 38 aa, Oryza sativa
MPPWLIGLALTVVIERSMTMMLATANCVISYHSFSHNC

SEQ ID NO: 30556 - protein, 261 aa, Oryza sativa
MDKLPSEVNAVESRVQIDGNCVTSRGPGTAMEYSVVLVEQLYGKEKADEVAGPMVMRPQHGVEFSLKELNSTSWNVGETPQILVPIANGTEEMEATMIIDILRRAKANVVVASLEETLEIVASRKVKMVADVLLDDALKQQYDLILLPGGLGGAQAYAKSDKLIGLIKKQAEANKLYGAICASPAIALEPHGLLKGKKATSFPGMWNKLSDQSECKNRVVVDGNLITSQGPGTSMEFSLAIVEKLFGRERAVELAKTMVFM

SEQ ID NO: 30557 - protein, 232 aa, Oryza sativa
MDRVQLVLLGLPILLFCSDLVTLFGPEQLPTPQPDLPPHPSPDAASDAVQPDDIAADAAASAQIAEPQVDGPASGTTVELKFCASCSYRGNAVTVKKMLETSFPGIHVVLENYPPPFPKRALSKAVPFLQVGAMATLMAGDQIFPRFGMVPPPWYYSLRANRFGTMATIWLFGNFAQSFLQSSGAFEVYCNGQLVFSKLSEQRFPSEFELRELIGNRLPDSQFGKNLEKVWS

SEQ ID NO: 30558 - protein, 156 aa, Oryza sativa
MAAGEEVMDRSTSAEDGYCSAGTDSPRAESVDEQGAAEESSPRGGQKRELPSPSASPSSPLPPAAKRSRRSVEKRVVSVPIAECGDRPKGAGEGPPPSDSWAWRKYGQKPIKGSPYPRGYYRCSSSKGCPARKQVERSRADPTVLLVTYSFDGAKA

SEQ ID NO: 30559 - protein, 216 aa, Oryza sativa
MVLWVFGYGSLIWNPGFDFDEKILGFVKGYKRTFNLACIDHRGTPEHPARTCTLESDEEAICWGIAYCVKGGLKKEQEAMKYLERRECEYDQKISVDFYKEGDSLKPAVTGVLVFVSTPDPVGNKYYLGPAPLEDMARQIATANGPNGNNRDYLFSMEKALSNICHEDDSIIELANEVRKVLSRPKEKITGSDSPQKSHALVHLSALPEGTVVDSR

SEQ ID NO: 30560 - protein, 169 aa, Oryza sativa
MYGKVTDKVDVYAFGVVLLELLTGRKPISDGSPKGQESLVMWASPILDSGDISDLLDADLDVKHDDAEVKRMALAASLCLRRSARLRPKISQVLSVLRGESEVSLDDLKAEPADCVDDETYPAANVRTHLGLALLDVEDAESISSTEHSNLSPLEEYLRERCSRSSSFD

SEQ ID NO: 30561 - protein, 252 aa, Oryza sativa
MFHGGRPLSLRGSLKALEADIHHANTLAHAIHRAYGGACVQMRLSYSSMAPIILNLIQWMDCSCSLSYTLPSYLGLLEVLVYKVYVDEDASISTNIERRASLKEFYAVIYPFLQQLEGNLMEKDCNEKGWCKEAASGGGGRKLYADDKDDEREDECGICLETCTKMVLPNCNHAMCINCYRDWYTRSQSCPFCRGSLKRVRSRDLWVLTGDDDVIDTVTLEKENVRHFHSFIDSLPLIVPDNLLLVYYDYLV

SEQ ID NO: 30562 - protein, 258 aa, Oryza sativa; identical to SEQ ID NO: 28635

SEQ ID NO: 30563 - protein, 273 aa, Oryza sativa
MANASLQSFLLHHHHSFLSNGIHEGSSPSIILKLTTNSNSSISFKLFSNTTSSSSSSVTTTASTPNSPVTPAPVTASSPPPPSLELLGAQLAERDYRQADETTRALLIELAGEPARRRGYVFFSEVQFISADDLRAIDALWQEHSGGRFGYSVQRRLWEKSRRDFTRFFIRVGWMKKLDTEVEQFNYRAFPDEFIWELNDDTPEGHLPLTNALRGTQLLGNIFTHPAFEEEQEDELAAEENDTPDNTGQSKDGSKGKERPKFMRDFFKPDYSF

SEQ ID NO: 30564 - protein, 447 aa, Oryza sativa
MAGHGTQEMECCFVVPSEKTPKHVLWLSPLDIVLANRGALTPLVHFYRRRHDAAGGGGGFFDVGRLKEALAKALVAFYPLAGRFRVGGDGRPEIDCNADGVFFAVARSELAVDDILTDLKPSPELKRLFIPRTEPPSAVLAVQVTFLRWGGIVLGTAMHHAAVDGHSMFHFLQTWAAFCRDGDAAVVELPCHDRALLRARPRLAIHPDASSVFCPKLNLRPPSASGSGLISAKIFSISNDQIATLKRICGGGASTFSAVTALVWQCACVARRLPLCSQTLVRFPVNIRRRMRPPLPDRYFGNALVEVFAAAAVEDIVSGTLAAIAARIKGVIGRLNDDEMLRSAIDYNEMAGMPDRPDNGSLPETELRVVSWLGIPLYDAVDFGWGKPWAMSRAESLRGGFFYVMDGGAADGDGGDAAAVRVLMCMEAANVEEFERLLRAKFVYPRI

SEQ ID NO: 30565 - protein, 190 aa, Oryza sativa
MAGVAALQGAMASLSISAPGAASTSSFWGHPLSTFAAAPAGVKFMIKTCPIQMRLKRWERKKCKPNSLPVLHKMHVRIGDTVQVIAGREKGKVGEVTRLFKHNSTVIVKDLNLKSKHKKGTEDEPGEIVMIEGPIHSSNVMLYSKEKNVASRVGHKFLEDGTKVRYLVKTGEIIDSAENWVKVFKEGSSE

SEQ ID NO: 30566 - protein, 236 aa, Oryza sativa
MDGGGDPVDEFLIGGGGEDGDLGVFCDGVPTLPCDGGLGIDDVSGDTCCLDQSVLGKRGRDESSSSGPKSKACREKIRRDRLNDRFLELSSVINPDKQAKLDKANILSDAARLLAELRGEAEKLKESNEKLRETIKDLKVEKNELRDEKVTLKAEKERLEQQVKALSVAPTGFVPHLPHPAAFHPAAFPPFIPPYQALGNKNAPTPAAFQGMAMWQWLPPTAVDTTQDPKLWPPNA

SEQ ID NO: 30567 - protein, 240 aa, Oryza sativa
MAAAAPSRVSVRAAAPGQTGGFAKIRPQVVVAAAARSAGVSGRRARSVRASLFSPKPATPKDARPAKVQEMFVYEINERDRESPAYLRLSAKQTENALGDLVPFTNKLYSGSLDKRLGISAGICILIQHVPERNGDRYEAIYSFYFGDYGHISVQGPYLTYEESYLAVTGGSGVFEGAYGQVKLNQIVFPFKIFYTFYLKGIPDLPRELLCTPVPPSPTVEPTPAAKATEPHACLNNFTN

SEQ ID NO: 30568 - protein, 246 aa, Oryza sativa; identical to SEQ ID NO: 30436

SEQ ID NO: 30569 - protein, 318 aa, Oryza sativa
MASGGDQTTTKSRILVVGGTGYIGRHVVAASARLGHPTTALVRDLAPSDPAKAQLLHTFRDAGVTLLHGDLHDHASLLRAVRDADVVISAVRATQVPDQTRLIDAIKEAGGGRVRRFIPSEFGMDPGRGASAAVEPVRSMYGSKVGIRRAVEAAGIPHTYVACNYFAGFALPSIGQFMPKAAPVDSVVILGEGHTKVVFVEEGDIGTYTVLAAVDPRAENKTLHIRPPANTMSHDELVSMWEKKTGKKLERVYVPEDAVLTKIKELEYPKNVLVSIAHAAYCRGEMSSPLDDPQDVEATQLYPEIQYTTVDEYLNTLL

SEQ ID NO: 30570 - protein, 214 aa, Oryza sativa; identical to SEQ ID NO: 29256

SEQ ID NO: 30571 - protein, 192 aa, Oryza sativa
MYTARRKIQKDKGLEPTEFEDTVAQAFFDLENGNQELKSDLKDLYINGAVQMDLPGNRKAVIIYVPYRLRKAYKKIHVRLVRELEKKFSGKDVVLVATRRIVRPPKKGSAVVRPRTRTLTAVHDGILEDVVYPAEIVGKRVRYHLDGRKIMKIFLDPKERNNTEYKLDTFSSVYRRLCGKDVVFDYPMTETA

SEQ ID NO: 30572 - protein, 188 aa, Oryza sativa
MVLVLALGDLHVPHRAADLPAKFKSMLVPGKIQHIICTGNLCIKEVHDYLKSLCPDLHITRGEYDEDARYPETKTLTIGQFKLGLCHGHQVVPWGDLDSLAMLQRQLDVDILVTGHTHQFKAYKHEGGVVINPGSATGAYSSITYDVNPSFVLMDIDGLRVVVYVYELIDGEVKVDKIDFKKTATMHA

SEQ ID NO: 30573 - protein, 184 aa, Oryza sativa; identical to SEQ ID NO: 30447

SEQ ID NO: 30574 - protein, 374 aa, Oryza sativa; identical to SEQ ID NO: 29456

SEQ ID NO: 30575 - protein, 271 aa, Oryza sativa
MAAGLVRLHFHDCFVRGCDASVLLDSTQGNRAEKDAPPNTSLRGFEVIDSAKSRLETACFGVVSCADVLAFAARDALALVGGNAYQVPGGRRDGNVSVAQETNGNLPPPSANVAQLNQMFGAKGLTQAEMVALSGAHTIGVSHCSSFSNRLYSSGPNAGQDPSMDPSYVAALTTQCPQQQGQPAAGMVPMDAVTPNAFDTNYYAAIVANRGLLSSDQALLADQTTAAQVVGYTNNPDSFQTDFAAAMVKMGSIGVLTGNAGTIRTNCRVAS

SEQ ID NO: 30576 - protein, 354 aa, Oryza sativa
MELDEESFLDELMSLRRDGSAPWQAPPYPGGGGGGGGGGMMMSDLLFYGGDGGSAEARGGMDASPFQELASMAAPPPQHPHEEFNFDCLSEVCNPYRSCGAQLVPSEAASQTQTQLTPLRDAMVAEEETSGDKALLHGGGGSSSPTFMFGGGAGESSEMMAGIRGVGGGVHPRSKLHGTPSKNLMAERRRRKRLNDRLSMLRSIVPKISKMDRTSILGDTIDYVKELTERIKTLEEEIGVTPEELDLLNTMKDSSSGNNNEMLVRNSTKFDVENRGSGNTRIEICCPANPGVLLSTVSALEVLGLEIEQCVVSCFSDFGMQASCLQEDGKRQVVSTDEIKQTLFRSAGYGGRCL

SEQ ID NO: 30577 - protein, 244 aa, Oryza sativa
MSSTNNSSGEPPPAVRVLGGWASPFTNRVVVALKLKGVEHEMLQETVGKKSELLLRSNPVHKKFPVLLHHSKPLPESLVIVEYIDEVWPASNGGAPAILPRDPHGRAVERFWARYVDDKILPGLRVLRGSVAGDKDQTAGEMSTTLQRLEEAFVKCSQGKEYFGGDSIGYLDIALGSFLGWIKAVEKIAGVELLNETKLPILAVWADRFCAHPAVVDVVPDADKLVEFTVQYGSVLNTVNVLPK

SEQ ID NO: 30578 - protein, 224 aa, Oryza sativa
MKATVKGRYEGDKATAAATLAFTPSATDLRFKASATDAAFARGPSLEGLILTLEKPGSFLLDLKPHSKDVRFQFMNSALLLDRRVSLTYTHSTTLSPGPAKLPARTALDGSLTFDPANKLSLSHTLGSSGCRVKYSYAHGQDRLTTIEPCFDTANNAWDFAVTRKFQGGDAIKATYQASTKLLALDWTRDSKIGASFKVAASFDLSDQSKAPKLIAESTWNYEI

SEQ ID NO: 30579 - protein, 250 aa, Oryza sativa
MAVATSFATLAIARPAAERALLASKTPSPLLSIRTGTGTARLPSSAVFGGFTPALSAAHSRARFVSSATADPKEVDLQSKITNKVYFDISIGNPVGKNVGRVVIGLYGDDVPQTAENFRALCTGEKGFGYKGSSFHRVIKDFMIQGGDFDKGNGTGGKSIYGRTFKDENFKLVHTGPGVVSMANAGPNTNGSQFFICTVKTPWLDGRHVVFGQVIEGMDIVKMIESQETDRGDRPKKKVVISECGELPVV

SEQ ID NO: 30580 - protein, 350 aa, Oryza sativa
MAQKEANGSSNGEHTTRPPPTPSPLRFSKFFQANLRILVTGGAGFIGSHLVDKLMENEKHEVIVADNFFTGSKDNLKKWIGHPRFELIRHDVTQPLLVEVDQIYHLACPASPIFYKHNPVKTIKTNVIGTLNMLGLAKRVGARILLTSTSEVYGDPLEHPQTEAYWGNVNPIGVRSCYDEGKRVAETLMFDYHRQHGIEIRIARIFNTYGPRMNIDDGRVVSNFIAQAVRGEPLTVQKPGTQTRSFCYVADMVNGLIKLMNGDNTGPINLGNPGEFTMLELAENVKELINPEVTVTMTENTPDDPRQRKPDITKAKEVLGWEPKIVLRDGLVLMEDDFRERLQVPKKNQA

SEQ ID NO: 30581 - protein, 230 aa, Oryza sativa; identical to SEQ ID NO: 30428

SEQ ID NO: 30582 - protein, 166 aa, Oryza sativa
MQTVNKSNRAGYESLLKIYKETDLSQEKVRILGSLASCPDPDVVRDTLDFMLSPEVRNQDSIFLLRGVGAAGHEVAWTWLKEKWDYISDTFSGTLLTYFVSTTVSPLRTDEMGDDAEEFFKSRTKANIARTVKQSIERVRINAKWVESTRAEANLGNVLKEISHDH

SEQ ID NO: 30583 - protein, 288 aa, Oryza sativa
MTNGYLFREYIGAQFTGVRFSDVPINPNLSFNFILSFAIDYTSPAGGATPAPTNGVFSPYWDTANLSPADVAAVKAAHPNVSVMVGLGGDSVQDTAKVFFSPTSVDSWVANAVASVSGIIDAYGLDGVDVDYEHFNDDGGAGVDTFVECIGRLLTELKARHPNITTSIAPFEDAVVQRYYQPLWRRYAGVIDLVNFQFYGYGDNTDVPTYVMFYDEQAANYPGGKVLASFKTGDVAGLLWPEQGIAGAKELQRQGKLPGLFIWSADSSKVSSYGFEYEIKAQEIIANH

SEQ ID NO: 30584 - protein, 382 aa, Oryza sativa
MQRLQKQLLPALRAAFPLLASHFSSRLLSASTATLSPTRFVDEDALVAACGLTGAEALKASKRLQKVPSNLDAALTFLAFLADFRLSKDDIAAASSRYPRFLHLKVDETLTSQVARLRDIGLSTPEIGRLITIAPCILSNPRTISRLEFYLSFLGSYPRVHSALRNNSSLLRRNNIESEVKPNIAFLEQCGLTTCDIAKILMSGSRILIMQPEHVKEIVACADKFGMPRESAGFRYALMAVTGISPVRVSAKLDFLRMVIGCSDAQLHIAVSRFPLILTYSEVKLSRSLEFLKAEVGLEPQYIVLRPALLGYSIQKRLMPRYHVMKVLNEKGLLKKDTDFYSMVKIVEESFFKKFLLPYHRSVPGLEKAYLAAREGKMFPEI

SEQ ID NO: 30585 - protein, 275 aa, Oryza sativa
MAARMGSKVAAILAILSVLVVHGSCKGHPVNYNVSDASAYGSGWLPARATWYGAPTGAGPDDNGGACGFKNVNQYPFSSMTSCGNEPIFKDGKGCGSCYQIRCNKDPSCSGNIETVIITDMNYYPVARYHFDLSGTAFGAMAKPGLNDKLRHSGIIDIQFRRVPCNYPGLKINFHVEEGSNPVYFAVLVEYEDLDGDVVQVDLMESKSAYGGATGVWTPMRESWGSIWRLDSNHRLQAPFSLRIRSDSGKTLVANNVIPANWSPNSNYRSIVQFS

SEQ ID NO: 30586 - protein, 210 aa, Oryza sativa
MAAFATATPSPAISVSPWSMSSLRAALPSPTRASPAGKLRSSFSPAAAATAASVGCLSSFSGLTPISPLLSLGEETSSFEHRLFGIDARGRIVAMRHGRRVPKLSRPPDQRKALLRGLTTQLLKYGRIKTTRPRAKAMRKYVEKMITLAKDGSLHKRRQALAFIYEKHIVHALFAEVADRYGEREGGYTRIIPTFPRRGDNAPMAYIELV

SEQ ID NO: 30587 - protein, 264 aa, Oryza sativa
MASAAEMQPLAPAGYRRAPEMKEKVGASAVDLEAGTGETLYPGISRGESALRWGFVRKVYGILAAQLLLTTAVSALTVLHPTLNATLSSSPTLALVLAVLPFVLMVPLYHYQHKHPHNFVYLGLFTLCLSFSIGVACANTQGKIVLEALILTSAVVASLTAYTFWASKKGKEFGYLGPILFSALVLLVVISFIQVFFPLGSGPVALFGGLGALVFSGFIIYDTENLIKRHTYDDYIWASVELYLDILNLFLYILNMIRSMQSDN

SEQ ID NO: 30588 - protein, 221 aa, Oryza sativa
MAGVGSAVRRLYLSVYNWAVFFGWAQVLYYAVTTLLESGHEAVYAAVERPLQFAQTAAFLEILHGLVGLVRSPVSATLPQIGSRLFLTWGILWSFPETHSHILVTSLVISWSITEIIRYSFFGMKEAFGFAPSWLLWLRYSTFMVLYPTGISSEVGLIYIALPYMKASEKYCLRMPNKWNFSFDFFYASILSLAIYVPGSPHMFTYMLAQRKKALAKAKAA

SEQ ID NO: 30589 - protein, 251 aa, Oryza sativa
MASGRIALLCLLGLLLVAASPAAIAAKDDKIFYQITFMWPGAYCAQTKAGCCMPKTDVAGFTVYNATTNSSLSSCSNTPFDMNQIGDVTRLMQYWNNIRCPSKSGQKGWKNAWETSGVCSDLTESAYFDTALALRDKINPLSRLVSNGIKPDFGLYSVKKIKEVIEEGIGAPALIQCSKGPFNKFQLYQIYVCVAEDAKTFVECPSPRKPYTCGDDILFHPFKKWMLKTNSTKSYAAADAIDQLLEAVMEI

SEQ ID NO: 30590 - protein, 180 aa, Oryza sativa
MMGCDEYQSLPVDERDAGDLSLHRLAQNNRWRRCQRCRRMIELTQGCFHMNCWCGHEFCYSCGAEYTNGIQTCQCVFWDEESIEAASAAHSTQASEIWAWDTFDCMPTAIEGYSEQERAQLALIQRFLSGGFNLGEPPSQSPPRCADSYIIDTMKDLHQLPWLERFVSVISDSYNEDYIQ

SEQ ID NO: 30591 - protein, 284 aa, Oryza sativa
MASHDHDHDHHHHHSHDDGDHHHSHHQDGSHGGGGGSWVGEDGRVWHSHDGLAPHSHEPIYSPGDFSKRAPPLISRRFAERAFTVGIGGPVGTGKTALMLALCRSLREKYSLAAVTNDIFTKEDGEFLIKHGALPEERIRAVETGGCPHAAIREDISINLGPLEELSNLCKADLLLCESGGDNLAANFSRELADYIIYIIDVSGGDKIPRKGGPGITQADLLIINKTDLAPAVGADLAVMERDALRMREGGPFVFAQVKHGVGVEEIVNHILQAWEIATGNKRR

SEQ ID NO: 30592 - protein, 260 aa, Oryza sativa
MTETFTFGDDAAAFPGIAFGCTLRSEGGFGTGSGLVGLGRGKLSLVTQLNVEAFGYRLSSDLSAPSPISFGSLADVTGGNGDSFMSTPLLTNPVVQDLPFYYVGLTGISVGGKLVQIPSGTFSFDRSTGAGGVIFDSGTTLTMLPDPAYTLVRDELLSQMGFQKPPPAANDDDLICFTGGSSTTTFPSMVLHFDGGADMDLSTENYLPQMQGQNGETARCWSVVKSSQALTIIGNIMQMDFHVVFDLSGNARMLFQPPTA

SEQ ID NO: 30593 - protein, 135 aa, Oryza sativa; identical to SEQ ID NO: 30382

SEQ ID NO: 30594 - protein, 185 aa, Oryza sativa
MGSTRLLVLLAAASLLLATAVPAARAQEETDHEEEFTYISGDEKGPEHWGKLKPEWAQCGAGEMQSPIDLSHERVKLVRDLGYLDDSYRAAEASIVNRGHDIMVRFDGDAGSVVINGTAYYLRQLHWHSPTEHSVDGRRYDMELHMVHESAEKKAAVIGLLYEVGRPDRFLQKMEPYLKMIADKG

SEQ ID NO: 30595 - protein, 296 aa, Oryza sativa
MWESVALTLAGAAGNNVGKVLQKKGTHILPPLSFKLKVIRAYALNRLWISGFLMDMCGAALMLTALSQAPVSVVQPIAGCGLAILCVFSHFYLKESMNGLDWVAITLAGLGTIGVGVGGEEQKVDKIPLFNIPWLVLSIVILFVLLNTWLHIYKRQRREQELTGPEVIEEIIYGLESGILFGISSVISKTGFVMSEMGFPKIVVPAAISCSVGCSAVGFVYQTRGLKHGRAIVVSTCTSVASIVSGVVAGMIALDEHLPTAPTGRFFLLLGWFFIITGVILLVSSTRIIARLLQIL

SEQ ID NO: 30596 - protein, 286 aa, Oryza sativa; identical to SEQ ID NO: 30185

SEQ ID NO: 30597 - protein, 209 aa, Oryza sativa
MGWATRFLAAVCFFAAGVVFAPDVLLGARSGSGSGGGAAAAAKVAHLLCFATSWGAALWATFIGGIIMFKNLPRHQFGNLQGKLFPAYFMLISACAAVSVAAFAYLHPWKTASTVERYQLGFLLAALGFDLSNLLVFTPMTIEMMKKRHKIERDLSIGEEVGWSKNVQVAKKQPYPCRNQQEVWDDPRALVFGQHHVIRQPSHAFLVPC

SEQ ID NO: 30598 - protein, 251 aa, Oryza sativa
MRRPIMATTTARLLLLLTVAGFCLCHTTCQEAAPPPPPYCGSLRTAVEARNIIGWKTVPPPCAKYVADYITGERYGRDADVVINEAIAYAESLKLSGTGKEIWVFDVDDTALSTVPYQANHGYGVQPFDNQSFLKYVVQGSAPALQSTLRLYRRLLQLGIKPVFLTDRTEDQRTVTTNNLIKQGYCNWEKLVLQPVRLQTSTLAFKTCERQKLVNDGYIIVGNIGDQWNDIRRSPDGCRTFKFPNPMYYVD

SEQ ID NO: 30599 - protein, 241 aa, Oryza sativa
MAASFLRPLLPPKPFLSATPKPHIPAATPSAIVRCTAAPKPATGSIAKPSQEEANNNQEQEPNAAAAATPDEAGANPHRIPDDETPPSATATTSFAVARRVPSAISPDRRRRTALTQGEPPNYEIGWKRTKKLPLEKPKGWAIADFMEKLEGLMARGRYGSGELLGTVAGVVTERAREEAEILVAEGGVEERVATELFRVLRLVEMDVAMVKAAVKEETVKERVEMARARCRQAILVALSL

SEQ ID NO: 30600 - protein, 182 aa, Oryza sativa
MKLALLLFAMARCGNFVTLWTLAKLVFFGVFIIPKVCSSYSTQLARYGRFWLERFRDGWESCSHKKAVVAAVFTLVWNVSSTVARVWAVFMLVVAMKCYQQRMMEYGWSSTVEDSQEATAAATGDDESPQEETPARSSPAKAHDHEPAQGFGAAAPARHRRTPVSGEFARERLRVRGGIQPR

SEQ ID NO: 30601 - protein, 272 aa, Oryza sativa
MRGSRRPVAVVLSWVRRQPPKVKAFLAVVAGMAALVFIRFIVHDHDNLFVAAEAAHALGLGVLIYKLTKEKTCAGLSLKSQDLTALFLAVRLYCSFVMEYDIHTILDTATLAATLFVIYMIRFKLRSTYMLDKDNFALYYVVLPCAGLALLVHPSTSHNIINRISWAFCVYLEAVSVLPQLRLMQNTKIVEPFTAHYVFALGVARFLSCAHWVLQVLDTRGRLLTALGYGLWPSMVLLSEIVQTFILADFCYYYVKSVFGGQLVLRLPSGVV

SEQ ID NO: 30602 - protein, 263 aa, Oryza sativa
MAGLGKAFYAVGFWIRETGQALDRLGCRLQGNYYFHEQLSRHRTLMNIFDKTPHVHRDAFVAPSASLIGDIQVGQGASIWYGCVLRGDANNVQIGSGTNIQDNSLVHVAKSNLSGKVFPTIIGDNVTVGHSAVLQGCTVEDEAFVGMGATLLDGVVVEKHGMVAAGALVRQNTRIPCGEVWGGNPAKFLRKLTDDEITFIKESASNYSTLAKAHAAENAKPVEKTEFEKLFRKKSAHQDEEHDSMIGATREVTPELTPSSSAQ

SEQ ID NO: 30603 - protein, 181 aa, Oryza sativa
MASSSVLIKLLVVVGCAAAASAATLTVGGSSGWTLSQNYDTWASGQTFAVGDKLVFSFVGAHTVTEVNKNDYDNCAVASNSISSTSTSPATLDLAAAGMHYYICTISGHCAGGMKLAINVGSGSGSGSGSGTPPSTTPGSSGTPPATPSSPSKPTGGASAGLQASAAVAAAAGVLVKLALF

SEQ ID NO: 30604 - protein, 201 aa, Oryza sativa
MRSGEGSTAAAAAAEEEKVKVAAPFRLAELGLRVCAVPLAVASVWEMATNKQVDETYGEVRFSDLSGFRYLVWINAITAAYSVASILLSSCRFITRFDWLIFLLDQASAYLLLTSASAAAEVVYLAREGDREVSWGEVCSYFGRFCGAATVSVALNAAALLCFMALSLISAFRVFTKFNPPSQSNSKQQLSQEQGKPVVSG

SEQ ID NO: 30605 - protein, 159 aa, Oryza sativa
MAGMVAAAAPPASLCRPIAVPRAPMRRRRLTPRVKTTPSLRCEDSPKIALLQVQAMRSSEESSSDEDDEILSELKEKWDAIENKSSVLFYGGGAIIAVWLSSIVVKAVDSVPVLPNILELVGLGYSGWFVYRYLLFKENREELANGFDALKKRITGNEE

SEQ ID NO: 30606 - protein, 114 aa, Oryza sativa
MILRVASAGPGHRFQAVGQARRQDLGDGKLIYFSSLQLCLAIRNSLLGCGLQPYSEWVRAHPPFSTWICHSSSLKEIGGGWPTFTFYCRSLVIDCVPWCCLAIAAAACLDLFTS

SEQ ID NO: 30607 - protein, 90 aa, Oryza sativa
MPRAVPQARKASLARFLEKRKERVSSVAPYPSSKSPLESSDTIGSPSTPSKSSCTDITPSTNNCEDSLCLGQPRNISFSSQEPPSTKLQI

SEQ ID NO: 30608 - protein, 268 aa, Oryza sativa
MGLLSNRVERSEIRPGDHIYTWRAVYAYSHHGIYVGGSKVVHFTRKKEAEGSDSSNSTSSLLLEPSSECPTFPDCGFQLPDSGVVLTCLDCFLRNGSLYCFEYGVPSAVFLAKLRGGTCTIAQSDPSEVVVHRAMYLLQNGFGNYDIFENNCEDFALYCKTGLLPVEEPGIGTSGQASSAIGVPLAALLSTPLKLFAAGPLGMATVTAGMYCAGRYITDIGVRKDVAKIEVENLSSHLGRRLIEDEGSVNVRSEKPKTLLPMKRKRER

SEQ ID NO: 30609 - protein, 266 aa, Oryza sativa
MAASALDSAWEGLTGSFTEFQLATVVTFLLHETVFFLSGLPSLLFERFGLFAKYKIQKKSNTPSYQNRCVLRLILYHVCVNLPVMVLSYPAFKFMGLRSSLPLPHWTVIVSQVLFYFVLEDFIFYWGHRALHTKWLYKHVHSVHHEYATPFGLTSEYAHPAEILFLGFATIVGPALTGPHLFTLWLWMVLRVLETVEAHSGYHFPWSPSNFLPLYGGSDFHDYHHRVLYTKSGNYASTFVYMDWLFGTDKDYRNAKAIEEKDGKHL

SEQ ID NO: 30610 - protein, 233 aa, Oryza sativa
MSGAGGTADFFYREAQRLGYVARSAFKLIQIQKQHKLIAPGAAVLDLGCAPGAWLQVACQNLGPLEKGGVIVGVDVKKVKVPSAHCDSRVRTVCADVMALMKQQARAMSPQERGFSVILSDMCPVVSGITTKDAAISCELGMRALSLAVGKMKAKDSDCIAILEKFQSSTEPDPDEDGILRRGGSLVIKFLENEDIPGFGKFCKEKFKKVSLLRPKATRSSSREIFMVCEGLR

SEQ ID NO: 30611 - protein, 209 aa, Oryza sativa
MSLLLLPLPMVLTRRLPVLVRRTSSSSTLVVVPLMSLFSPLRREVKATAGDTHLGGEDFDNRMVKHFVQEFKRKSKKDITGNPRPVGRLRTACEWAKRTLSPPLPRPPTIEIDSLYEGIDFYSNITCARFEELTMDLFRKCMRGYQDGQRAACTMFILVGGSTRIPRVQQLLQDFFNGKELCKNINPDEAVAYGAAVQAPILVWRRPEE

SEQ ID NO: 30612 - protein, 226 aa, Oryza sativa
MEARHRVMSLLLVLVIGCCAWGCRPGAAQVPVPARTDGFVYGGKAPALGETVVVEAYFDPVCPDSRDAWPELKKAVEHYASRVTVVVHLFPLPYHSNAFISCRSIHAVNKINPSFVYPLLERFFKYQEGYYNQPTYGKTRATVDAEVAKNLVAPVIGEANLAAYKAGFNDSKSDQATRISFKYGCARGVTGTPYFFVNGIPLISDSGSPLEYNKWKSILDPLVGKM

SEQ ID NO: 30613 - protein, 284 aa, Oryza sativa
MAAAEGPVLLFPSTSSTSARVEAVVVFNICDSYVRRPDQAERVIGTLLGSVLPDGTVHVRNSYVVPHNESPDQVALDIEYHHNMYASHHKVNPKEVIVGWFSTGFGVSGGSTLIHDFYSREVQSPIHLTVDTGFTRGDASIKAYISSNLSLGDRHLAAQFQEIPLDLRMLEAGKVGFDILKSTIVEKLPNDLEGMESSMEKLYVLIDEIYKYVDDVVEGRVAPDNKIGRFISDAVASMPKLSPAAFDKLFNDRIQDNLALVYLSSITRTQISIAEKLNTAAQIL

SEQ ID NO: 30614 - protein, 227 aa, Oryza sativa
MSGRRPDGSYGPEYGPQPPEHEYGLYHHWPSRGRAPWPLYHGRDYPWRSLEQRVRREPFVFSSRIRHINGGGNPRPRQEDPGLTDAEFKKAMEQLNKQAYRSLDPHKMVESNRGGRNHAKSARSKPAPNNTEEEKACTICLETFLAGEQVVATPCNHIFHQECITPWVKGHGNCPVCRFALCERNTVSDNSQSGVGEVEVDLDLLEMMRAMEEIFSRVTFSNFMPYN

SEQ ID NO: 30615 - protein, 319 aa, Oryza sativa
MADEIQHLTRAFSGLGGLGVDEPAMVSALAKWRRQPEKLSGFRKSFNGFFKDHGGVIEKCEEEYMLHLAAEFSRFKNLMVMWAMHPWERDARLAHHVLHQAHPAAIVVEIACTRTAEELLGARKAYQALFHHSLEEDVAYRARDKPYCGLLVGLVSAYRYEGPRVSEETARAEAKALVAAVKSAGHAAAKLVENDDVVRILTTRSKPHLVETFKHYKEIHGRHIEEDLGHEETLREAALCLATPARYFSEVVAAAVSDGADHHAKEALTRVAVTRADVDMDAIRAAYHEQFGGRLEDAVAGKAHGYYRDALLSLVAGGK

SEQ ID NO: 30616 - protein, 255 aa, Oryza sativa
MLQAQFSQVRPVPMTPSMAPRLPMYPPMAPLGQQLFYGQAPPAIMPPQPGFGFQQQLVPGMRPGGAHMPNYFVPVVQQGQQGPRPGIRRSGAGSAQGQQSAQPFQQQMLPRGRVYRYPPAHNMPDVPPMPGVAGGMIQSYDMGGFPVRDAGLSPAPIGTLTSALANANPEQQRTILGESLYPLVELLEQNHAAKVTGMLLEMDQTEVLHLLESPEALKSKVAEAMDVLRNVAQQHNANTPTSQLAALSLGDAIIS

SEQ ID NO: 30617 - protein, 257 aa, Oryza sativa; identical to SEQ ID NO: 30400

SEQ ID NO: 30618 - protein, 341 aa, Oryza sativa
MERGQKKKLATLVGCNYAGTPNELQGCINDVAAMRDALVARFGFAPADVTVLTDDRGSPVLPTGANIKRALADMVARAAPGDVLFFHYSGHGTLVPPVKGRRHGHGECDEAIVPCDFNLITDVDFRRLVDRVPRGASFTMVSDSCHSGGLIDLEKEQIGPSVLAAGAAPAAAAASTTATRATAARFLPYAAVVEHLSGVSGVDAAHHVADHLLALFGADASAKFHRDAEQPVRTDDDGILLSGCQTDETSADVPGDDEVAAGGKACGAFSNAIQTVLASHLAPVSNRQLVSMARAVLSDQGFEQHPCLYCSDGNAETPFLWQEEDKKKTVTAAAEQAMTAL

SEQ ID NO: 30619 - protein, 238 aa, Oryza sativa
MAMKAVIKGGDGGGGCMVVVAHVLAVAATAMVLVWCVHFRGGLALRSHNKQLIFNTHPVLMVLGLVVLAAEAILSYRSLSIIVSSRDARKKVHLGLHAVGLALGGVGIYAVFKYHAEADIPNLYSLHSWIGIATISLYALHWLLAFLTFFFPGASHDTRRSAVPWHALLGLLVFALAVGNAQLGFLEKLTFLQAPPLRLSRYGAEALLVNFTALVVLLLGVAVVLATANVDSTKYTAM

SEQ ID NO: 30620 - protein, 232 aa, Oryza sativa
MASSSDPWVREYSEASRLADDVTSMIADRGSLPQSGPEIMRHTSAIRRKITILGTRLDSLEALLSRIPPKSITDKELHKRQDMLSNLKSRAKQMATSFNMSNFANREDLLGQSKKAADDMSRVAGLDNQGIVSLQRQVMKEQDEGLEKLEETVLSTKHIALAVNEELTLHTRLIDDLDDYVDVTNSRLQRVQKRLAILNKRVKGGCSCMALLISVVAIVFLAVIAWLLIKHL

SEQ ID NO: 30621 - protein, 256 aa, Oryza sativa; identical to SEQ ID NO: 28831

SEQ ID NO: 30622 - protein, 80 aa, Oryza sativa
MQIGRHHSVNRPNYSLLAALDRPCLQLFAVMPVLEGHAVVPHVHRLRTWLSAASGCGLLRDVAVGRVAMRQMNGLKQQYV

SEQ ID NO: 30623 - protein, 179 aa, Oryza sativa
METPKISGVALAAAIAVVLAMATTPAVAQNSPQDFVDLHNAARRVEGVGEVVWDDAVAAYAENYAAERAGDCALIHSGSWEKAGYGENLFGGSGSEWTAADAVNSWVGEKDLYDYDSNSCLGSWDSCLHYTQVMWSRTTAIGCARVDCDNGGVFITCNYNPAGNFQGERPFERGLTLSA

SEQ ID NO: 30624 - protein, 173 aa, Oryza sativa
MEVARGGGKLNPWAEPFVPAGWSATYWRCGGVAAVEPAVAEVEDFSPEWWRLVGSSPAFRDRWLRDYSALGLLDDNDNGDGYDLEGFLLPDDLFSSTPHLVGEPADEKEGKGFGGAGGKKVKGGSAEVVAWGIDKWWRAHSSPPEVPRYADKAPRRVAAAAARVNPRPIQQPR

SEQ ID NO: 30625 - protein, 193 aa, Oryza sativa
MAAPPARSVSVADRALRGVADLIKLLPSGTVFLFQFLSPLVTNNGHCAAAYSRVLSAALLALCGAFCAFSSFTDSYVGSDGRVYYGVVTARGLRTFAADPDAAARDLSGYRLRAGDFVHAALSLLVFATIALLDADTVACLYPALEVSERTMMAVLPPVVGGVASYAFMVFPNNRHGIGYQPTRATEDFEHKH

SEQ ID NO: 30626 - protein, 241 aa, Oryza sativa
MAGKDDDVKVLGLVMSPFAIRVCIALKLKGVSYEYIEEDLANKSELLLSSNPVHKKIPVLIHGGKPVSESLVIVQYVDEAWAPSPTSPSILPADPYDRAVARFWAAYVDDKMVPGMVGVLRAATEEERAAKADETLAAMAQLEKAFAEVAAKNGKPFFGGDTVGYVDLALGCNLHFLEAIRRLHGVALVDAGKTPLLAAWAERFVEVEAAKGVVPDADDAVEFARKVQARVAAAAASTAAK

SEQ ID NO: 30627 - protein, 434 aa, Oryza sativa
MSIVVSKSAPVVVRPSEPATSTADKILLSTLDKPVATIPVTVLLAFDHPIHDATAETIKTALAQSLVHYYPIAGRISCDNDDGGHFYIDCTGEDLGVTFVAASANCTMEELMCLVDDQAPDDETAVVQQLAFNCTPDDLHHRLLWVQVTTLNCGGFVVGVTWSHGVADGPGIAQFIQAVGELARGLPSPSVVPVRLDDKIATQAVPPFTMAVHRFISGLKPVSNLDVRNVTVSSSLINHIIVGARRRATVFEAVAAVLWQCRTRVVMTDPEAPAVLLFAVNARKYLGAKDGYYGCCTAMHMAVSKSGTVANGDIMKLVGIIRRAKEQIPEQLKADDGEMMLRTMVGEKQVNGYESLLYLTSWRNIGFEDVDFGSGKTARVMTYPPRMLSMMPRIAPICFMLKATEEGVRVMSDCVTADHADAFYQEIAKLKATT

SEQ ID NO: 30628 - protein, 266 aa, Oryza sativa
MAALAVVHGWLAPALSRRAETGGGRAALPCRRPRLVAVACAASSVNTATTTGESPLGSDGSAAAAMSLERAFAGGDGGGGGGIGPAVESTVEKLIFDFRFLALLAVAGSLLCFLSGCVYIKEAYHVYWTSCVRGVHTGQMVLRLVEAIDVYLAGTVMLIFGMGLYGLFISNDFPDVPASDRALKGSSLFGMFALKERPRWMRISSLDELKTKLGHIIVMILLVKMFERSKMVHITTGMDLLSYAVCIFLSSASLYILHNLHRPEHE

SEQ ID NO: 30629 - protein, 156 aa, Oryza sativa
MSSKLVTSPLKSMEQGHLEQPLRDPQAPAEQHDMGLSPLTLLGFAFLTFNSGMAVYRSDRDLATIFFVVFSYVDLVSLFYFLRLFEKTPPESPRRHHIKTAVWLLTTMLTAVFSYKVAAIMPFPVQVLVWAMAAATVLGGFYAFFLHSDEKKPIEG

SEQ ID NO: 30630 - protein, 247 aa, Oryza sativa
MPAGPPTPHLQALSLPAGSPSSPRGGIWSCTSATAQLEQSTGWSGLGSGTDWTRRRWYTSGQSLVRIYFRQASRPDLGPCSGNHWIWGLRGWMPSPASSLRWQSPDLGPLRLDSVDGSFGARMEVCLRIITPRLLTRPHRPTGPRGSRQHASRRLGMEGAQCWGSATAASWCSLPAVGCFVLWIVGVDQKLIMCFHRAKLDPRVGMVMQMAWYQHQACVMELCIYIVIGTQKLQLPRQEIKMSRMAL

SEQ ID NO: 30631 - protein, 101 aa, Oryza sativa
MGRGVSSGGGQSSLGYLFGGGEAPKSAEKPAPVQKPAPSSSAEKLKEIPAGIQSSKANNYMRAEGQNCGNFLTDRPSTKVQAAPGGGSSLDYLFSGNKDGK

SEQ ID NO: 30632 - protein, 220 aa, Oryza sativa
MPREPAAMRVYTVCDESKYLIVRNVPSLGCGDDLANLFATYGPVDECTPMDAEDCDPYTDVFFIKFSQVSNARFAKRKLDESVFLGNRLQVSYAPQFESLLDTKEKLEVRRKEVLGRMKSSSGRPEGLSHHSPGQGSSAANSHRQMSSNKREYTKTLHASQFEDPRFTHVSSNKDYFPSESMNATVNLVREKLDKIQSSSDNSSAIVAPKKPRTDNRRRI

SEQ ID NO: 30633 - protein, 269 aa, Oryza sativa; identical to SEQ ID NO: 30174

SEQ ID NO: 30634 - protein, 355 aa, Oryza sativa
MGRTLDVLLGRTTKQTARLKSMLGLAVTRLGVLRGHRQVRCAQARGDVEQLLRLGHPDRALLRAEQVIREQNTLDAFLMLESYCNLITERAALVDSHRECPEELREAAAGLIYAAARCGDVPELQEVKRLMAAKFGREFVSSAAELRSGCGINAKIVQKLSTKQPSLESRQMVLQEIAAEKGIAGVVVHVVHEPSSHDEDSGLSHRRRRCDGERRHRVHQPQVDLEEDGSSRYRNVEAAAQAAFESAATAAAAAKAAMELSRGESGGRDDDRRRPGGAQFDRADEETLAGGEVSGDGKKSGRIRRASLGRNYSSEIEDSAEDDEVVRHEITAESEVKPRGLTRSVPVSVRTKRVS

SEQ ID NO: 30635 - protein, 230 aa, Oryza sativa
MAARRPGSPAPRWAPWPLLAAAAVLLLLSAAPRTARALRFDLESGHTKCISDEIKVNSMVVGKYHVVGPDPNFPDNPLPDSHRISLRVTSPYGNSVHYAENVPSGNFAFTATEAGDYLACFWAPDHKPPVSIGFEFDWRSGVAAKDWSNVAKKGQVDVMEMELKKLEETIKSIHEEMFYLREREEEMQNLNKQTNSRMAWLGFLSLGICLSVAGLQLWHLKTFFERKKLL

SEQ ID NO: 30636 - protein, 268 aa, Oryza sativa
MAGAAAASSAACSSPAPNPTTRYPVRRRVPRPPLVAASRHCTASPFPTTISISSSGLGQARPRDPFLNPRLRFAAAAAAAEGEMAAEASAAAAEGAQAKPFSVLFVCLGNICRSPAAEAVFRNLVSKRGLESKFLIDSAGTIGYHEGNKADSRMRSASKKRGIEVTSISRPVKPSDFRDFDLILAMDRQNYEDLLSSFERWRHREPLPDSGPKKVKLMCSYCKRHTESEVPDPYYGGPQGFEKVLDLLEDACESLLDSIVAENASVSA

SEQ ID NO: 30637 - protein, 354 aa, Oryza sativa
MLAILPTAITLLLMYFVDVHRSDHQRYNKKFMDAFSLIAITVAGYLMIIIICDQVLKIISSAVQTVCFVILLLLVLSPVAIAVKAQKTESMKQEEETRDQAERIGLLQEQISTNASSSSDERCQELSTGKENMNLVQAMCKLNFWLLFLAMSCGMGSGLATVNNISQIGGSLGYSTKETSTLVSLWSIWNFSGRFGAGYISDHFLRSRGVGRPFFIGVTLLVMSLGHAIIASGILASLYVGSVLVGLCYGCQWALMPSITSEIFGLNHFGTIFNVVAVASPVGSYILSVRVVGYIYDMESPPGARACSGNHCFVLSFVIMACVCVVGSAVAFMLFVRTRRFYKRVVYARLQSFL

SEQ ID NO: 30638 - protein, 216 aa, Oryza sativa
MGSEGPSVVTVHVTGFKKFHGVAENPTEKIVTNLKSFVEKKGLPKNLVLGSCTVLETAGQGALGTLYKVLESSIAERENGSSAQGQVIWIHFGVNSGATRFALENQAVNEATFRCPDELGWKPQRAPIVPSDGGISRTRETTLPVNELTKSLRKTGYDVMPSDDAGRFVCNYVYYHSFRFAEQHGIKSLFVHVPLFLTIDEEVQMHFVASLLEALS

SEQ ID NO: 30639 - protein, 175 aa, Oryza sativa
MKALKDLGLDVTKGSVSTESAVTQTKFHIMRSGRKVEDPDTLEKIRLTVINNLLQYHPESSENLAMGEFFGIKAPEKKVDVDVVTHVIVEDDGPKRSMLYIETADRPGLLLEIVKIITDVNVDVESAEIDTEGLVAKDKFHVSYRGAKLNSSLSQVLVNCLRYYLRRPETDEDSY

SEQ ID NO: 30640 - protein, 252 aa, Oryza sativa
MAEEGYKVVLNVYDLSNGLARQLSTSFLGKPIEAIWHTGVVVYGNEYFFGGGIQSLAAGRTPYGRPVRVVEMGETHIPREVFEDYLRDISPRYTAETYRLLSHNCNNFSNEVAQFLVGAGIPDYILNLPAEVMSSPMGPLIMPMIQNLESTLRTNAAPQATQFVPSSVPPPPPPQNKPGEGSSSSKQEDKAAKAKQGSAADPLGGARGKVQEEVMREFAAIMASGTLRASEAAALAMRRVMERHGNATMQQS

SEQ ID NO: 30641 - protein, 190 aa, Oryza sativa; identical to SEQ ID NO: 28773

SEQ ID NO: 30642 - protein, 270 aa, Oryza sativa; identical to SEQ ID NO: 28586

SEQ ID NO: 30643 - protein, 184 aa, Oryza sativa
MEAIQKVPPDPSAVAVVETTPDGTRKILGDISAYKLWKCDYVAAAWALINLSAGQFVIGADDNESTPISAIPVPPISSSLVEEIGPGRSPRAKKFSSRSIGFLNSQAHQMAFGRMRSMYRGRSAPLMCKSTSSLAAVMAQMLSHRATHVWVTDAESEEDGVLVGVVGYTDIFNAVTKSVYPAAS

SEQ ID NO: 30644 - protein, 228 aa, Oryza sativa
MQTAAAAAVAWAPSPSPSTSTSSPPPFKVGIASPCGTAAHASSAPRLVAAATHRGRRRQQQVVKAIANPDPAVELPLTAENVEIVLDEVRPYLMADGGNVALHEIDGNVVRLKLQGACGSCPASVTTMKMGIERRLMEKIPEIVAVEPIADEETGLELNQENIEKVLDEIRPYLSGTGGGELEFVAIEEPIVKVRLTGPAAGVMTVRVALTQKLREKIPKIAAVQLLS

SEQ ID NO: 30645 - protein, 98 aa, Oryza sativa
MLNKFSCIALAGVATEYLLYGYAEGGLADIGQLDGLLKGLGFTQKKADSQVRWAVLNTVPALRRHKKARSQLAEAMSSGKSVGSCIGVIEENINSEDI

SEQ ID NO: 30646 - protein, 120 aa, Oryza sativa
MVSSLRLAEISRKWSGSGSSKVTSPTAAAAACPRGHFAAYTRDGSRFFVPIACLASDTFRELLSTAEEEFGSPGGRPIVLPCSADRLHQILAAFRSASGKNKCSPPSGSGGRAGGRTKIW

SEQ ID NO: 30647 - protein, 185 aa, Oryza sativa
MEAKGVVVITLVVTLAAVARAARPEETRPGLARRGSASSPTTHLHFYFHDKVSKPSPTAVRVVDPVDPSSRSFFGMINVMDDPLTEGPEPESKPMGRAQGLYMGSDQAKLGFLQAMNLVFTDGTYNGSVVTVLGRNCPFDDVREMPVIGGTGAFRFARGYAQARTHTLDLKTGDAIVEYNVYVMH

SEQ ID NO: 30648 - protein, 182 aa, Oryza sativa
MASSVPEDGASAAAAAATADPAAAAAEAPGRRIVVAVDESEESTHALTWCLANVVSSSGGDTLVLLHARRPRPVYAAMDSSGYMMTSDVMASMDKYAAAVSAAAVGKAKHICAAFPHVTVETMVESGDPRDVICDATEKMAADLLVMGTHGYGLIQRAFLGSVSNHCAQNCKCPVLIVKRPK

SEQ ID NO: 30649 - protein, 189 aa, Oryza sativa
MFFILLFASIFATGILELRWSGVGIEDWWRNEQFWVIGGTSAHLFAVFQGLLKVLAGIDTNFTVTSKASDEDGDFAELYVFKWTSLLIPPTTVLVINLVGMVAGISYAINSGYQSWGPLFGKLFFSIWVILHLYPFLKGLMGRQNRTPTIVIVWSILLASIFSLLWVKIDPFISPTQKAVALGQCGVNC

SEQ ID NO: 30650 - protein, 210 aa, Oryza sativa
MGKDCGNHGDDDIRQACRRLLTILFGLALIVAIIALIVYLVLRPTHPRFFLQDATLRQLDLSNSSTSGVLSTALQVTVASRNPNDRVGVYYDRLDVYASYKYQQITLAASLPPVYQGHGDVDVWSPVLSGPDVPFAPYLGDALAKDVAAEYLILQVKIDGRVRWKVGSWISGHYHLFVTCPAFFIASGGNGYPGANGLKFQTATYCRVEV

SEQ ID NO: 30651 - protein, 316 aa, Oryza sativa
MRTSRAAAAAASLPLLLLVALLVAAEGRRHKDGSGDEEAKACDKGWECSGSRFCCNDTITDYFKAYQFEELFAHRNDRSLAHAAGFWDYHAFITAAALFEPRGFGTTGGKEVGMKEVAAFLGHVGAKTSCGYSVATGGPLAWGLCYNHELSPSQSYCDNSNELYPCVEGVEYYGRGALPVYWNYNYGIIGQGIKQDLLNHPELLEQNATLAFEAAIWRWMTPMKRKQPSAHDVFVGNWKPTKNDTLSKRYPGFGATMNILYGDLICGQGSIDKMNVIVSHYQHYLDLMGVGSDKAGDNLDCADQVAFNPSSKNLDS

SEQ ID NO: 30652 - protein, 156 aa, Oryza sativa; identical to SEQ ID NO: 30629

SEQ ID NO: 30653 - protein, 275 aa, Oryza sativa
MDCCVCSPMASMYRLPRNAICAACYEGAKAIIAFFNDDDDEHADADQGSVKPSRLTKLNSTIKGLRDAWEEVKQMRCREEETKQRASFLQEGFAAAWKDGIHTDIAIRPGTGPPIQAHKAILATRSEVFRHILAGDDDCKAPAGDSLSLPELTHDELSHLLAFLYTGSLATCAEERHLHALLVAGDKYDVPFLRRACEARLAAGVEAGNVLRTLEVAELSSSAALKERAMGTVVEHAEEVVFSPEYEEFAVRNAALCVQITRTLLANKSLPAKTP

SEQ ID NO: 30654 - protein, 344 aa, Oryza sativa
MAVSSPAPSSLHVPMAAAALLGMLMMMSSAPEMKVEAAGGLSVGFYAESCPKAEAIVRDTVTKAFEKAPGTPADLIRLFFHDCFVRGCDASVLLESTPGNKAERDNKANNPSLDGFDVVDDAKDLLEKECPHTVSCADILSLVARDSAYLAGGLDFEIPTGRRDGFVSKEDEVLSNVPHPEFGAKDLLKNFTAKGFTAEEMVTLSGAHSIGTSHCSSFTNRLYKYYGTYGTDPSMPAAYAADMKSKCPPETAAQQDATMVQLDDVTPFKMDNQYYRNVLAGNVTFASDVALLDTPETAALVRLYAAGDPAAWLARFAAALVKVSKLDVLTGGEGEIRLNCSRIN

SEQ ID NO: 30655 - protein, 327 aa, Oryza sativa
MAPAAEPYVVEDCRGAVQLMSDGTVRRSAEPAFHVDLPDDADAAVEWKDVTYDAEHDLNARLYRPRHLGAANDARVPVVAYFHGGGFCIGSGRWPNFHAWCLRLAAELPAVVLSFDYRLAPEHRLPAAQEDGATAMAWVRDSAARDPWLADAADFSRVFVAGDSAGGNITHHMAVRFGKAGLGPQVRLRGHVLLMPAMAGETRTRAELECRPGAFLTAEMSDRYARLILPGGATRDYPVLNPAGPEAPGLEAVAMAPSLVVAAEHDILRDRNEHYARRMREEWGKEVAFVEFAGEQHGFFEVDPWSERADELVRLIRSFVVEHMDSE

SEQ ID NO: 30656 - protein, 230 aa, Oryza sativa; identical to SEQ ID NO: 30194

SEQ ID NO: 30657 - protein, 252 aa, Oryza sativa
MEQRKFLLCLILGLLATSGPAKTVNADSPFDFYYLILMWPGAYCTDSEYGCCVPKYGYPSEDFFVKSFMTFDSSENTAVVRCNSDNPFDINKLDSIENNLNHYWSNIKCPRTDGVNSWKSEWNSYGVCSGLKELDYFKAGLQLRKNADVLSALAEQGIKPDYQLYNTAFIKWAVNQKLGVTPGVQCRDGPFGKKQLYEIYLCVDKDAKSFIDCPVLPNLSCPAEVLFHPFHTWMLNTTSAANIVMPTETVLA

SEQ ID NO: 30658 - protein, 288 aa, Oryza sativa; identical to SEQ ID NO: 30583

SEQ ID NO: 30659 - protein, 137 aa, Oryza sativa
MKYLERRECEYDQKISVDFYKEGDSLKPAVTGVLVFVSTPDPVGNKYYLGPAPLEDMARQIATANGPNGNNRDYLFSMEKALSNICHEDDSIIELANEVRKVLSRPKEKITGSDSPQKSHALVHLSALPEGTVVDSR

SEQ ID NO: 30660 - protein, 266 aa, Oryza sativa; identical to SEQ ID NO: 28561

SEQ ID NO: 30661 - protein, 326 aa, Oryza sativa
MASAMASSQSHLDLVQLLIVVVMTMTMLVGGGEALSLDYYAKSCPKAEAAVAAAVKQAMAKDRTVPAGLLRLHFHDCFVRGCDGSVLLDSSGNMSAEKDGPPNASLHAFYVIDNAKAAVEALCPGVVSCADILALAARDAVAMSGGPSWQVPVGRRDGRVSLASETTTALPGPTASFDQLKQAFHGRGMSTKDLVVLSGGHTLGFAHCSSFQNRIQPQGVDPALHPSFAATLRRSCPPNNTARSAGSSLDPTSSAFDNFYYRMLLSGRGLLSSDEALLTHPKTRAQVTLYAASQPAFFRDFVDSMLRMSSLNNVAGEVRANCRRVN

SEQ ID NO: 30662 - protein, 82 aa, Oryza sativa
MTAIGAGDGAAEADRCGTIFAFIACRPCTGRHVCVGVGAPLPLLLLLADPVFSVLGNGLAGAGAPAARGSGRLRPRERRRRA

SEQ ID NO: 30663 - protein, 250 aa, Oryza sativa; identical to SEQ ID NO: 28499

SEQ ID NO: 30664 - protein, 251 aa, Oryza sativa
MLRSRLLVASLVALVPVAVSGANPVMRFTFDPDYSGVSGNIEFSYYGDDRGGAAVSANLGFKRFDMKALKALDGNCTADKITDFTWHIHTMWKPPQDSTSSSMSFAKCGKAFTGNHYDPYKICGPASEYVDTPACAPKVKDYKCTPDEYKKNFAACESGDLSGKIGNFQPDAEALVNIHTSDPRFPFSSEATKEWSIVIHAVCGKASPRVACAVGHILDSKSTSLKKAKKHGKNEADFTVGNKVHVRVHEN

SEQ ID NO: 30665 - protein, 256 aa, Oryza sativa
MPPKRKRAAAMETAGGDAAPPPQQQRRNKSSAANKGKKGGASGGGGGGRWPPVKPKKDLQVNRLKGTHLLTVPNFFTSAEAKAFVDIAENIGFTHQGSLGPLKGEAYRDNDRISVTDPLLAQTIWESGINKIFEDISISGKVATSLNPNIRFYRYTEGQRFGRHIDESVDLGDGSRTLYTLLIYLSGKGSAKESSGQALVGGETVFYDHRGGVVAEVAPVQGLALLHLHGAKCMLHEARVVKKNIKYVLRSDVVFA

SEQ ID NO: 30666 - protein, 262 aa, Oryza sativa
MITEEALPTYQTMLNTLDGVRDETGASPTAWAVWTRAWTAEENRHGDLLNKYLYLTGRVDMRQIEKTIQYLIGSGMDPRTENNPYLGFIYTSFQERATFISHGNTARHAKDFGDLKLAQICGIIASDEKRHETAYTKIVEKLFEIDPDGTVLAFADMMKKKISMPAHLMFDGEDDKLFEHFSMVAQRLGVYTAKDYADILEFLVSRWKISDLTGLSSEGNKAQDYLCTLAARIRRLDERAQSRAKKAGTLPFSWVYGREVQL

SEQ ID NO: 30667 - protein, 200 aa, Oryza sativa
MARVYVGNLDPRVTAREIEDEFRVFGVLRSVWVARKPPGFAFIDFDDRRDAEDAIRDLDGKNGWRVELSTKAGSGRGRDRSGGSDMKCYECGEPGHFARECRLRIGSGGLGSGRRRSRSRSRSPRYRGRSRSRSPRYRRSPSYGRSPRDRSPKRRSYSRSPPPARARSYSRSPPPPRERSYSRSPAQPANREESPYANNA

SEQ ID NO: 30668 - protein, 217 aa, Oryza sativa
MALAMAPRLVHHPCCMMLSKNPRTPPPPPAMHHHHAHKPLITALTSTSSFLLRSVDVSKDDKPLETATTTTPPTPAPAAAAPETEQAEAVASPELELELEEGPKVDPRRLEEKFAVLNTGVYECRSCGYRYDQAAGDPSYPVPPGLPFEQLPDDWRCPTCGAAQSFFESKSVEIAGFAQNQQFGLGGNSLTGDQKALLIYGSLLVGFLFFLSGYFLQ

SEQ ID NO: 30669 - protein, 127 aa, Oryza sativa
MARYHPTSIHDDIEAGFSGHSASPVKPAASPRRPGGRLFCDPCDDADDLLGHHHYLDICFRCRRPLGGNRDIFMYRGDMPFCSEECRQEQIEIDEAREQRSKQTGRAEQERQRQQKASHPRIPVWAW

SEQ ID NO: 30670 - protein, 42 aa, Oryza sativa
MTFVMIIKAPHCGVKQSFGKLALPCRNKSAFLFFSFHWTPIR

SEQ ID NO: 30671 - protein, 226 aa, Oryza sativa; identical to SEQ ID NO: 30612

SEQ ID NO: 30672 - protein, 215 aa, Oryza sativa
MVFYYKARPDAGDYTIYMGADKNENEELIKYGLPEDVWFHVDKVSSAHVYLRLKKGESIDSICDGLLEDCAQLVKAHSIQGNKMNNVEVVYTPWSNLKKSPSMDVGQVGFHNTRMVRVVIVEKRVNEIINRLNKTRVERRPDLKAEKDASNAAEKAERKMQLKEKRRREEMERLEKERRAEIRSYKGLMVAEKMTSNRQIASAGNSMQEMEDDFV

SEQ ID NO: 30673 - protein, 199 aa, Oryza sativa
MSVETERSSTESSAASGLDFEDTALTLRLPGSLAAAAAPDPDRKRSSPSSSDAADAADNSSPLAAAADAPPAPKARVVGWPPVRSFRKNALAAKFVKVAVDGAPYLRKVDLEAYSGYDQLLRALQDKFFSHFTIRKFADDERKLVDAVNGTEYVPTYEDKDGDWMLVGDVPWKMFVETCQRLRLMKSSEAVNLAPRAAQ

SEQ ID NO: 30674 - protein, 170 aa, Oryza sativa
MECLAEMPRAPLADRRPRKRQRLGWDVGPEIHQVQIGLCGQEVANVISAVTLGLSSQEIPRFASPPLREDDKDGHFVFAVGDNLTPRYRINAKMGEGTFGQVLECWDRERKEMVAIKIIRGIKKYRDAAMIEIGMLEQLGKYEKSRSRFHPVLQRKVPISSSCPSPVLLR

SEQ ID NO: 30675 - protein, 220 aa, Oryza sativa
MEVAAAEDALEESGVAVYLPRLLAGVISGALTGLFALAGALTGAVTGALAGRASDSGVLRGAGLGAFAGAVLSIEVLEASRAYWCSDRLGSHGTSSMADFIEQLLQARFVQEQIVPSGYATHRWQVSISDFGHDDLYDIFGDCSSKGLSRESLNKLPHYVVTDQTRNSFGEDLSCTICLQDIVTGETARRLPNCSHTFHQPCVDKWLVGHGSCPVCRQCV

SEQ ID NO: 30676 - protein, 119 aa, Oryza sativa
MAGGKEPIEVKFRLFDGTDIGPSKYDPSTTVSALKEFILARWPQDKEITPKTVNDLKLINAGRILENNRTLAESRVPVGEVPGGVITMHVVVRPPQPDKNSEKQLANSPKQNRCGCTIL

SEQ ID NO: 30677 - protein, 235 aa, Oryza sativa; identical to SEQ ID NO: 30409

SEQ ID NO: 30678 - protein, 226 aa, Oryza sativa
MAIVYAVVARGTVVLAEFSAVSGNAGAVARRILEKLPPDAESRLCFAQDRYIFHVLRSPPPAAADGLTFLCMANDTFGRRIPFLYLEDIQMRFIKNYGRIAHNALAYAMNDEFSRVLHQQMEYFSSNPSADTLNRLRGEVSEIHTVMVDNIEKILDRGERISLLVDKTSTMQDSAFHFRKQSRRLRRALWMKNAKLLAVLTAVIVLLLYLIIAAFCGGLSLPSCRS

SEQ ID NO: 30679 - protein, 287 aa, Oryza sativa
MARSLAALLLLLVAAAGASHAASPAEMYWKIALPTSPMPGAIRDLISPASSAASASKDKEDTVGSVFFLEKDLFPGSKMTLHFTRATAGAALLPRGRADSVPFASEKLPEILSQLSIPAGSPTADAMRSTLAVCEAARIASETAPKHKHYCATSLESMVELVASSLGTRDVHAVSTEVVNRAGPTPRQAYRVEAVRPVPVPGGDMVACHRMPYAYAVFGVHGIKGAAYTVTLAGADGTMAEAVAACHGDVDGHGVAVAEAYKRLGVAPGKVAVCHFLPQDDMLWVRN

SEQ ID NO: 30680 - protein, 230 aa, Oryza sativa
MDSSVLPSSFPGQHDELDFELLGNRRGHAWHVQTNMYGNGSTGRGREERYLLPFDPTAAPHSYAIAWTPAAVIFYIDAIPIRELVRCSSGDYPAKPMSVYATIWDGFAWATDGGRHKVDYAYAPFTAVFSDLVVTGGTDDDHCAAMGLMTSEVAVMTPAKRGSMRRFRSRHLTYSACYDTVRYNGTGVVFPECDESEQDNFHAWGESKRVINSRSSSSATYATGSGVRID

SEQ ID NO: 30681 - protein, 221 aa, Oryza sativa
MAAGGGGGYRAEDDYDYLFKTVLIGDSGVGKSNLLSRFTKNEFCLESKSTIGVEFATRSIQVDGKVVKAQIWDTAGQERYRAITSAYYRGAVGALLVYDVTRRATFDNVARWLKELRDHTDPSIVVMLVGNKSDLRHLVAVSTEDGKEYAEAESLYFMETSALDATNVENAFAEVLTQIYQTVSKKTVEASDDGSNAPIKGEKINVKDDVSALKRIGCCSN

SEQ ID NO: 30682 - protein, 287 aa, Oryza sativa; identical to SEQ ID NO: 30679

SEQ ID NO: 30683 - protein, 287 aa, Oryza sativa; identical to SEQ ID NO: 30679

SEQ ID NO: 30684 - protein, 229 aa, Oryza sativa; identical to SEQ ID NO: 30528

SEQ ID NO: 30685 - protein, 286 aa, Oryza sativa
MGSLSSLAAAAVFLSLLAVGHCAAADFNATDADADFAGNGVDFNSSDAAVYWGPWTKARATWYGQPNGAGPDDNGGACGFKHTNQYPFMSMTSCGNQPLFKDGKGCGSCYKIRCTKDQSCSGRSETVIITDMNYYPVAPFHFDLSGTAFGRLAKPGLNDKLRHSGIIDIEFTRVPCEFPGLKIGFHVEEYSNPVYFAVLVEYEDGDGDVVQMDLMESKTAHGPPTGRWTPMRESWGSIWRLDTNHRLQAPFSIRIRNESGKTLVANNVIPANWRPNTFYRSFVQYS

SEQ ID NO: 30686 - protein, 224 aa, Oryza sativa; identical to SEQ ID NO: 30532

SEQ ID NO: 30687 - protein, 220 aa, Oryza sativa
MSGVFGKVFGKSKAQSQATALASIDKLSETLEMLEKKENLLVKKANLEVEKAKTFTKAKNKRAAIQCLKRKRLYEQQIEQLGNFQLRIHDQMIMLEGAKATTETVDALRTGASAMKAMHKATNIDDVDKTMDEINDNMENMRQIQDLLSAPIGAAADFDEDELEAELADLEGEELEAELLAPTTTAPTAPVRVQQPTRPSAQSSKTEDDELAALQAEMAM

SEQ ID NO: 30688 - protein, 228 aa, Oryza sativa; identical to SEQ ID NO: 29740

SEQ ID NO: 30689 - protein, 167 aa, Oryza sativa
MGSQAIEAHREGAEVYHGAALCAEKAVELLAEIHMPLGLLPLAEMEEVGYNRATGFVWLRQKKAITHTFKQISRQVSFAAEVTAFVEDRRMKRVTGAKTKELLIWVSLSDMFIDKDDPSKITFKTPTGLGRTYPVDAFAKEDDGKGKVPAAAAAANGKETAVNGKAK

SEQ ID NO: 30690 - protein, 259 aa, Oryza sativa; identical to SEQ ID NO: 30235

SEQ ID NO: 30691 - protein, 259 aa, Oryza sativa
MPQGDHIELHQKRHGRRLDYEERKRKRAAREVHKRSRDARQLLGAKGKRFAKKRYAEKAQMKKTLKMHDESTSRQKVDDVQEGALPPYLLDRDQTQRAKVLSNTIKQKRMEKAGKWEVPLPKVRPVAEEEMFKVLRTGKRKTKQWKRMVTKATFVGPGFTRKPPKYERFIRPTGLRFTKAHVTHPELKCTFNLDIISVKKNPNGQMYSTLGVLTRGTIIEVNVSELGLVTPAGKVVWGKYAQVTNNPENDGCINAVLLV

SEQ ID NO: 30692 - protein, 318 aa, Oryza sativa; identical to SEQ ID NO: 30569

SEQ ID NO: 30693 - protein, 224 aa, Oryza sativa
MAVQLTVDLKPNIPSEAQRIRQRRGRIFALPEEPEVARVWLPKYNSPGLAMARAFGDFCLKDYGLISMPEVSYHRITEKDEFVVLATDGVWDVLSNTEVVSIVNRATSRASAARLLVESAHRAWRARFPTSKIDDCAVVCLFLDTDELSETSSSMARDMTNAVEVSSGQHSNTIQLSTGVSSDVVTAVLTDGDDLSAVDAVAKLVTLTDLPNNASGATQSITTK

SEQ ID NO: 30694 - protein, 177 aa, Oryza sativa
MTRNIQCREMIEDVQKKLAGFSFSSSSSQASMQRNTSVPPDQNSPSPPPPSSHAPHAQGPYGVPPGGDSRPGYSQPEQRPAYSQPYPPYGAPPQQPPYGAPSQQPPYGAPHPGHYQQPPHQQPPNHDYGQQAYPGGWRGQYYNPHQPQPQPQPPYPQPPYNAQGSYPPHQSSYYRPQ

SEQ ID NO: 30695 - protein, 204 aa, Oryza sativa
MCEGEKKKDSSSGALYCVNLALRIVVLGLAVAAAALMATASQCTIFLYYGGPLHTITYKDFGPFVYLVVASSIGAFMEAIAIFLTICKKKDGTPAKVLLPLLDAAVPVLLYSATAAAFAAGDMSYCAVGKRVGVCTTAAAGNFCNQVHIAMYVSLAAGVALLIAEIVKHWPDSGKKKEGGGGGCGSDSDSDKSTPCHHGCHSKH

SEQ ID NO: 30696 - protein, 287 aa, Oryza sativa; identical to SEQ ID NO: 30679

SEQ ID NO: 30697 - protein, 211 aa, Oryza sativa
MQAILAAAMAAQTLLFSAIAPPASLFQSPSSARPFHSLRLAAGPAGAAAARALVVADATKKAVAVLKGTSQVEGVVTLTQDDQGPTTVNVRVTGLTPGLHGFHLHEFGDTTNGCISTGPHFNPNNLTHGAPEDEVRHAGDLGNIVANAEGVAEATIVDKQIPLSGPNSVVGRAFVVHELEDDLGKGGHELSLSTGNAGGRLACGVVGLTPL

SEQ ID NO: 30698 - protein, 165 aa, Oryza sativa
MTPAEAYEHVRLRRPRVLLASAQRQAVEQFYQLRVKKSGKSICLDSPIMKPPLFLATRNLIAFDEKTFVMVSKSDLEGYDADTLAVNVGSGLWEISLVYRVQFASQAAFAGFSYLWVRCRAPRKNKEALPVPESNNSVGSESCSLEAEQLAKPHPCLLQGVMVNP

SEQ ID NO: 30699 - protein, 221 aa, Oryza sativa
MVAAQSFVSTQDSASDTVVDYSVNEDEFHKIRLLHCDFFIRKVPDPDDDVFDFREMYVTPPDTDIYSIPRVLAPMPQKYVRCMKKNFGRYHVSEPPVEHLRDPLYKTEREIMKVFLTKHYRNRRCNDPDFFLDFEEIYVIDSKARSITRAKVVVSVPEGKKRDRRNDLLLIRDGGESFRIIDKTKRDDATTVIQREEWAKSRQDVEKHFRKLRDFDYSNWF

SEQ ID NO: 30700 - protein, 216 aa, Oryza sativa; identical to SEQ ID NO: 30559

SEQ ID NO: 30701 - protein, 45 aa, Oryza sativa
MADDCCAKFSSSSSPQLSMRKWRRIRQHLTCCCACATVNNRFHLP

SEQ ID NO: 30702 - protein, 288 aa, Oryza sativa
MAVGGEEEKPFNFLQILCEGVIAGGTAGVVVETALYPIDTIKTRLQAARGGSQIQWKGLYSGLAGNIAGVLPASAVFVGIYEPTKRKLLETFPENLSAVAHFTAGAIGGIAASLIRVPTEVVKQRMQTGQFRSAPDAVRLIVGKEGFRGLYAGYGSFLLRDLPFDAIQFCIYEQLRIGYKVVAKRELNDPENALIGAFAGAITGAITTPLDVMKTRLMVQGSANQYSGIVSCAQTILREEGPGAFLKGIEPRVLWIGIGGSIFFGVLEKTKSMLAERRSREPPAGKDE

SEQ ID NO: 30703 - protein, 288 aa, Oryza sativa
MANSPTPTMLAFLALGLALLLSATGQASAQNCGCQSNMCCSKWGYCGTGKDYCGDGCRSGPCYGGGGGGGGGGGGGGGGGGGSGVSVESVVTEAFFNGIKNQAPNGCAGKNFYTRQSFLNAAHSYSGFARDRTNDDSKREIAAFFAHVTHETGHMCYINEINGASMDYCDKNNKQWPCQPGKKYYGRGPLQISWNYNYGPAGQNIGFDGLRDPDRVAQDPTISFKTALWFWMNNVHQVMLQGFGATIRAINGALECNGKNPGAVNARVNYYKDYCRQFGVDPGGNLYC

SEQ ID NO: 30704 - protein, 233 aa, Oryza sativa
MLQRSEGAEQRRPHHRRPPGGLPLPQEPRRQHQVAQPRHRRRRPRQVRRQRRLPHQPLHRLQQPAMRRLGDVVEAPALVLTPASMQQAGGRGSSGALDASMVVILAALLCVVICALGLTSLIRCALHCARGLSPTTATPTPSVSTAATAGLKKTELRRIPVEVYGAKQAGVPDGECAICLGDFADGDKVRVLPRCHHGFHVRCIDTWLAAHTSCPTCRDSILSVHGVVAGGQT

SEQ ID NO: 30705 - protein, 217 aa, Oryza sativa
MLSLATRLRRVAGKLARCLATCVFATGVQAGMMLGAIAGVIAGFVSEDGLLQGTLIGAISGAFIAMEVVDSLAKIWCYEEYSIATRAHLMLLVFWNLVIDRLTVRTSVFPTLTTVLDSQLNAVPSRHRRAEVSGDLTGRSYPVVMGMRLAAVDQLPVIKLTAAQTDATGACPICLHDFKAGEIARRLPACCHIFHLGCIDNWLLWHALCPMCRRPVN

SEQ ID NO: 30706 - protein, 262 aa, Oryza sativa
MAVGKNKRISKGKKGSKKKTVDPFAKKDWYDIKAPSVFNVRNIGKTLVSRTQGTKIASEGLKHRVFEVSLADLQNDEDQAYRKIRLRAEDVQGKNVLTNFWGMSFTTDKLRSLVKKWQTLIEAHVDVKTTDGYMLRLFCIGFTKRRPNQVKRTCYAQASQIRQIRRKMVEIMANQASSCDLKELVSKFIPEVIGKEIEKATSSIFPLQNVFVRKVKILKAPKFDLGKLMEVHGDYAKEDIGTKLDRPAEDEAMAGQEVAAAE

SEQ ID NO: 30707 - protein, 198 aa, Oryza sativa
MVCIRQATIDDLLAMQACNLMCLPENYQMKYYLYHMLSWPQLLFVAEDYGGRIVGYVLAKMEEDPSEPCHGHITSLAVLRSHRKLGLATKLMSAAQAAMDQVFGAEYVSLHVRRSNRAAFNLYTSTLGYQIHDVEAKYYADGEDAYDMRKPLRQPQPKKHHHHHHHHHGPGGCCSHDAPPAASGSSPPSSNSPEKTDS

SEQ ID NO: 30708 - protein, 133 aa, Oryza sativa
MGLLDKLWDDTVAGPRPDTGLGRLRKHAAARPAAVKINDPTGDAAMVAVPPTTPAGAEEAPVKVTRSIMIKRPAGYPASPRSAASTPPASPAGSTPPISPFAGAGGRFRRKSSSDAYERATPGTTSHPPPFEV

SEQ ID NO: 30709 - protein, 234 aa, Oryza sativa
MASLLPPTHLLTPPPLCCCSYALLFPRARRAPPRFSNGAFSAAESLVRGEFLGKVGTLARRMEGRRRLAVASAGRGPLFGGGGGGGGQRGSGRVVGNLAFAALLTFLATIGQLRWVLDAIVSLWLLTILLPILGLAAFFFFAGQDILQSNCPNCGKSFQILKSSLKDGPQLCPYCTQPFSVQGNKFVRESARFSSGRTTTGAQAFSESFKRGSEGKKTPSGTVVDIEAEVKDAE

SEQ ID NO: 30710 - protein, 251 aa, Oryza sativa
MAEHKEEESLVESVMDKISDKLHGRGGSSSSSSDSDGERTADLKAKIYRLFGREKPVHSVLGGGKPADLFLWRNKKISVGVLAGATAIWLLFEVMDYHLLTLLCHCIILTLAMLFLWSNASTFINKSPPNIPEVKIPEDLAVNVARSLRFEINRGFATLREIGQGHDLKKFLIVVVGLWVLSVLGSCCNFLTLFYIVFMVLYTVPVLYEKYEDQIDAFGEKAMIELKKYYAIFDEKCLSKIPKGPLKNKKH

SEQ ID NO: 30711 - protein, 264 aa, Oryza sativa
MRCLLLLVLALLAAAAADAEPVLRTVTGVPTGVSSGGGGGGGESSDELYCDGWRLSVETGNAGPWTAIPPRCLEFVRAYMEGERYASDSAVAAADSLAFAARALASGGGGARPAWVFDVDETLLTNAPYYAVNGWGSLEFNETSFDEWVDVAKAPALPASLKLYNELQGLGIHIILLTGRSEFQRNATQVNLLFAGYHSWEKLILRQSPDIGKTAVQYKSERRAALEAEGFKILGNSGDQWSDLLGLPMATRSFKLPNPMYFIS

SEQ ID NO: 30712 - protein, 338 aa, Oryza sativa
MAKMGFAPMLSVAVLLGTLAAFPAAVHSIGVCYGVVANNLPGPSEVVQLYRSKGIDSMRIYFADAAALNALSGSNIGLIMDVGNGNLSSLASSPSAAAGWVRDNIQAYPGVSFRYIAVGNEVQGSDTANILPAMRNVNSALVAAGLGNIKVSTSVRFDAFADTFPPSSGRFRDDYMTPIARFLATTGAPLLANVYPYFAYKDDQESGQKNIMLNYATFQPGTTVVDNGNRLTYTCLFDAMVDSIYAALEKAGTPSVSVVVSESGWPSAGGKVGASVNNAQTYNQGLINHVRGGTPKKRRALETYIFAMFDENGKPGDEIEKHFGLFNPNKSPSYSISF

SEQ ID NO: 30713 - protein, 196 aa, Oryza sativa
MAGRKRKAEAARAAEEEADRALYGAFRGAANSLSQLYALAGAHQRLSFHAGERHALEKLYQWMVRQHEIGLRLTVSDIASHIQHEIEYGGDNALTSPRSQHAFQNLQAPMHIPNTSTQQPPSCSITPSNPSKDSMIFSKALSSPVRQNLQLYHVQQCGDTGCFADGIFCPGNGDSDPAASNDSSVDMHSDSPGHDS

SEQ ID NO: 30714 - protein, 265 aa, Oryza sativa
MATARLILLLTVAAAAAGSCCFCSAQEVIVGGVGEQLATAPPAAPAPSPPPPYCGSVRTAVEAHNIIGWKTVPADCAEYVSDYLTGERYGRDSDVVINEAIAYAESLKLSGHGKEIWVFDVDETALSTLPYQAKHGYGTKPYDHASFVQYVAGGSAPALQGTLRLYRRLLQLGIKPVFLTDRTEDQRAVTTHNLLSQGYYSWEKLLLQPVGLQTTTQAFKTGERQKLVSAGYVIVGNIGDQWSDILGSPEGYRTFKYPNPIYYVA

SEQ ID NO: 30715 - protein, 171 aa, Oryza sativa
MHVRLGSTHCVVASSAEVAAELIRSLRRPRQRQPHRQLLLPGPRRPPRRQRLHRHRRLHAPRAKPHGDAARRRLQAQEPDRRSRTGSRRRRSRSEGSGDLPRLPYLQAAYKETLRLRPAARAWSRAGSTSSSCRSGAAGAGAPGWGLRCSRCRRWWRRCCSASIGSAWTIS

SEQ ID NO: 30716 - protein, 259 aa, Oryza sativa
MSTAVADVPPAAAYGFPGSAKRGKPEEVVVLMGKRRNEGFFIEEEEEEEEVLTESSSIGAPSPASSSIGENSGEEEGGDDEEEVESKLKAEDEQVGLGCLDALEESLPIKRGLSNFYAGKSKSFTSLAEATASPAAAANELAKPENPFNKRRRILATWSRRASCSSLATATYLPPLLAPDHAVAEGDEGEEEDDDSDDDERQHRGKNGGRRESAAPPLPLPPPRLTLHTQMGGMVRRNGTFRSPRSLSLSDLQNSGGSC

SEQ ID NO: 30717 - protein, 55 aa, Oryza sativa
MAAGIIDPTKVVRCCLEHAASVAKTFLTSDVVVVEIKEPEPAPVTNPMDNSGYGY

SEQ ID NO: 30718 - protein, 241 aa, Oryza sativa
MASSARDLSGDPPESTRLRIGDDIAWSDVGGVYDRDDSLKENTNPKCILKNHLPGAHNGGSQRFSGNLKPTAAPIIGISGKLGQGGKNRHHPPAMFPKKVAVTGGGGRNPKAAVPEHEPTSPKVSCIGKVLSDRERARRGRRPAGRMVPAGGCCPGLGGLFRRSHSRKKNAVECVDQSPPPLPPWASRRGEPKEVKEATPAAAAAMAPGLGGMMRFASGRRAADWATEMEPDGRVARSGPL

SEQ ID NO: 30719 - protein, 281 aa, Oryza sativa
MEQKDEAEMEEVDEEEEEEVDEDMAGGHAAQSPSPSCGLGEKKRRLALEQVRALERSFDTDNKLDPDRKARIARDLGLQPRQVAVWFQNRRARWKTKQLERDFAALRARHDALRADCDALRRDKDALAAEIRELREKLPTKPADTAASVKVEAGNDAAAGAAAATVCKDGSSDDSDSSVVFNDEASPYSGAAFIGFGPSFLVDDASAATVGCSSSLPALESKWHGPYSDDSCKGGVYGFTEEWLAACSGEMAGNDAAGFFSDEHASNLNFGWCASGNEGWE

SEQ ID NO: 30720 - protein, 394 aa, Oryza sativa
MRLSVSVAAVLVVLAALRPPRVAVAQKYAAIFNFGDSLVDAGNLVVDGIPDYLATARLPYGMTYFGYPTGRCSDGRLVVDFIAQEVGLPLLPPSKAKNATFHRGANFAITGATSLDTPYFQGRGLGHTVWNSGSLHTQIKWFQDMKASICKSPQECRDLFRRSLFIVELVVPGVLPIGCFPVYLSIFRKQPEMYGRRSGCIRDLNTLSWVHNAALQRKIAELRLKHPGVRIMYADYYTPAIQFVLHAEKYGFLRQTPRACCGAPGVGEYNFNLTSKCGDPGSYACDDPSNHWSWDGIHLTEASYGHIAKGWLYGPFADPPILETSPPLIDRKHDRFVIHSFVCIYDKQTHTTYTHTFICTGDVKDSERGRTGRRTENVMVNLFRLIRWLVGDVL

SEQ ID NO: 30721 - protein, 271 aa, Oryza sativa
MDLPLMAAKAYKYKAELLVKDYLLADSYVPYASVLGGILMCKLSYDFTRFISSFYFKGYGSLTKMQKVEWNNRGMSTVHAIFITLMSAYLVFFSGLFSDQQDGPVTFRSSSLSNFTLGVSVGYFIADLAMILWFYPSLGGMEYLVHHVLSLTAVTYTMLSGEGQLYTYMSLISETTTPGINLRWFLDVAGMKRSKRYVVNGVAMFLTWLVARIILFMYLFYQIFLHYDQIKQMETFGYLLVCVVPAILFVMNMIWFSKILRGLKKTLAKRH

SEQ ID NO: 30722 - protein, 260 aa, Oryza sativa
MAATLSSAPAPSKHCSIVRAQHSPPPSILSSSTKTAFHGLSLVDRRWAASVGGGSGRRRRVLQVNARTAGAAKNIEVEVDKPLGLTLGQKTGGGVVITAVDSGGNAARAGLKSGDQVLYTSSFFGDELWPADKLGFTKTAIQAKPDSVYFVVSRGAQVDVKRLPKRPAPPRFGRKLTESQKARATHICLDCGYIYFLPKPFEEQPDEYGCPQCNAPKKRFAKYDAETGRAIGGALPPITVIVSLIIGIAGVGALLVYGLQ

SEQ ID NO: 30723 - protein, 155 aa, Oryza sativa
MACASKTISIGFANSGLYGEARLLSPSYKNYPRRSSYKFIKVRAVQGNDGRRRLVDIIRTIPELSRNYFRSRSRRALFGGISLLGGFYVAQTISLSFGALGVNDVIAAVVCVLLTEYVTKFYYSRPKVTFPFALLNNFKMGFTYGLFIDAFKLAS

SEQ ID NO: 30724 - protein, 277 aa, Oryza sativa
MEGYDEREFWQFSDQLRLHNFSSLSIADSIWSSPSPAAVDHSSNKLALANNSNNNATAKTYFNKSVGRPANNNFNFNYNSNSVVVDAFNGKKKAAVDAPAGGGGGGRNNNKKNSSSNDNKMSSRLKKSQLPASESVPKEEAIGGYIFVCNNETMEENLKRQLFGLPSRYRDSVRAIRPGLPLFLYNYSTHQLHGIFEATSFGGSNIDPGAWEDSKCPGGESRFPAQVRVATRKICEPLEEDAFRPVLHHYDGPKFRLELTVAEALSLLDIFAEKLFA

SEQ ID NO: 30725 - protein, 258 aa, Oryza sativa
MLAIFQKQVAHAPAELNSPRSSAAKPKNPDEILRDFHALHPIEAFSTSFGGGAALACVAGHARNGLSGYERMFCGLDDIYCVFMGRLDNLSSLIRQYGLCSRSTNEALLVIEAYRTLRDRGPYPADQVVKDLSGSFAFVVFDNKSGAVFAALSTDGEVPLYWGIAADGSVVICDEREIVKGGCGKSYAPFPVGCMFHSEGGLKSFEHPMNRLKAMPRVDSEGVMCGATFKVDTFTKINSMPRVGSATNWAATWDDAAA

SEQ ID NO: 30726 - protein, 194 aa, Oryza sativa
MSSYMEAAAAARAAEAKTEGLLRGACALLAAAAALLVGLNTQTETVLFIRKKATVKDVQALWVLAMAAAAAAGYHLLQLLRCFYLSRFADGKPCRHRRAIAWLCFLLDKGCAYITFATTVAAAQACVVALYGTHALQWTKLCNIYTRFCEQVAGSLVCAMLAAVGTALLSVVSARNLFRLYPSMLSPPPSSFVG

SEQ ID NO: 30727 - protein, 288 aa, Oryza sativa
MTSQQLGYCWVLLIALLSCSAATASEVPAIIVFGDSTVDAGNNNYILTVAKGNFPPYGRDFDGGVATGRFSNGRLVTDFVSEALGLPSSVPAYLDSTYTIDQLATGVSFASGGTGLDSLTARVVSVIPLSQQLEYFKEYIEKLKQAKGEDVANEIITEALYVFSIGTNDFIINYFNLPLRRAVYTTAEYTAYLVGEAAAAVRDTHELGAHKIIFAGLAPIGCLPSARTLNHDAPGECNEEHSQVAVAFNTALTEAIGKLNDELTGLRVVYSDTYSVLSAILSNPSYYG

SEQ ID NO: 30728 - protein, 230 aa, Oryza sativa; identical to SEQ ID NO: 29264

SEQ ID NO: 30729 - protein, 265 aa, Oryza sativa; identical to SEQ ID NO: 30231

SEQ ID NO: 30730 - protein, 53 aa, Oryza sativa
MSAESAYLAVQEGLLTDRVKHIESRVPTSSVYDDGINQRNMVRTAESLNHSEI

SEQ ID NO: 30731 - protein, 194 aa, Oryza sativa; identical to SEQ ID NO: 30726

SEQ ID NO: 30732 - protein, 178 aa, Oryza sativa
MAAWRGLALAAVVAWCVAAAAAAPDAALQSKCQQDFTKLTDCMDYATGHEEAPSSTCCGDMSATQQARPECLCYIIQQVHGGRNEVQSLGLRFDRLLAMPTACKLPNANVSLCINLLHLTPSSPDYAVFANASKAATTPSSTTPGAAAATAGGFKVQAGLSYGVVAAAMVSAVFSSIF

SEQ ID NO: 30733 - protein, 166 aa, Oryza sativa
MNRKPGDWDCRACQHLNFSRRDLCQRCGEPRGAADRGSGGGGDYANFGGRGGSSFGGGFGTGSDVRPGDWYCNCGAHNFASRSSCFKCAAFKDDAAVNSGGAGAFDGGDMSRSRGYGFGSGAVRASRPGWKSGDWICTRSGCNEHNFASRMECFRCNAPRDSGTEV

SEQ ID NO: 30734 - protein, 243 aa, Oryza sativa; identical to SEQ ID NO: 30535

SEQ ID NO: 30735 - protein, 242 aa, Oryza sativa
MPTRRRGIAEGGHATRAAVVRCIVAAILAAIVVAGLVALVFWLVVRPKPIEYTVTSAAVRHLNVTPRDRGPGCSAPTVNATFYLNVTPRDRRPGCSGPTVNATFYLALAIDNPNRRVSMRYEDSVALRVLYGGSELELAAGYVVPGFHQPHRNETTLPVRAVARSAPFPVPVTDLVAWELEHDLAAGELSVDVEVTTGVRFIVGGVASRYYQVNVTCSPVNIGLSPSAARSFNSVPCDVEIS

SEQ ID NO: 30736 - protein, 187 aa, Oryza sativa
MSRNPGCTVFIGNLDEKVPERVLYEILIQVGRVVDLHIPRDKETNRSKGYAFAEYETEEIAQYAVKLFSGLVRLHNRTLRFAISGQDKQSSNGNIPVTPKVNPIPPPKPAQLMRSSDTPASQHTVVNGRIAGISPNHSYSAHSEAPSGISSRGLSNGTYEYSRRVFGSVLNDVSRRTDRQPIPYPSY

SEQ ID NO: 30737 - protein, 158 aa, Oryza sativa
MASKQAMNSALFSALVVVVLASAVNGQLNPCQAPAPTPTGTPAPAPAPVVTPTPAPTPVPTPSPAPTPSPTVAPVNPPSPTPPPKCPLALINLNACISVGLGNPLLNQACCSQLSSLPSDTAAVCLCEAIKVNALVNLKVKIPDILKVCGKVSAVVCV

SEQ ID NO: 30738 - protein, 202 aa, Oryza sativa
MTSEQVIAYIPDLMERLTNIIQNVYGLGGRYFWIHNTGPIGCLPYAMVHRPDLAVVKDGSGCSVAYNEVAQLFNQRLKETVGHLRKTHADAAFTYVDVYSAKYKLISDAKKLGMDDPMLTCCGYGGGRYNFDDRVGCGGKVKVNGTWVVAGKSCDDPLKRVSWDGVHFTEAANKFVFDQIAGGKLSDPPVPLRQACQISRGQ

SEQ ID NO: 30739 - protein, 268 aa, Oryza sativa
MEFPHRHHHHGHRGDDDDDDRRRHPAPAPAYGHDSAPPPGPYGQAPPPADPYARHPPSHDYAHPPPAYGGGGYGNVVHVSHEVSDHQRPTPHYGGSEYISPVQETRPYHGGGGAPPVTHRIYCKAGEDNYSLAVRDGKVCLVRSDRDDHTQHWVKDMKYSTRVKDEEGYPAMALVNKATGDALKHSIGQSHPVRLVRYNPEYMDESVLWTESRDVGSGFRCIRMVNNIYLNFDALHGDKDHGGVRDGTTLVLWEWCEGDNQRWKIVPW

SEQ ID NO: 30740 - protein, 251 aa, Oryza sativa
MASSSSSLGLGAIFQSGCPLLPPRPAVRRAPTRRRAVATKISCIGWDPEGVLGPPQGGHIVRLEFRRRLERDSDAREAFERQVREEHERRRQEREARVIPDTDAGLVEFFLDTEAREIEVEIGRLRPRLNQPFFDYIQREIAQIKFSITRTAEMEDRLIELEAMQKVLLEGVEAYDKLQNDLVSAKERLTKILQSSDKKSTLLEMVERNELNMSILTLLDENIASAKTNNQEEAVAFMENVRSSILKYITV

SEQ ID NO: 30741 - protein, 150 aa, Oryza sativa
MAEDEAASAKKLFSASDVVGHASRKDCWVVIHGKVYDVTKFLEDHPGGEDVLLHASASGDATEAFEDVGHSTSAISMMNNYLIGSIKDYVPPSASEATTIGGNDVPPNFRRMPQKKGPPAPNTFLDFLLPLFVLGLAFAAWYYLTFIAKA

SEQ ID NO: 30742 - protein, 270 aa, Oryza sativa; identical to SEQ ID NO: 28586

SEQ ID NO: 30743 - protein, 273 aa, Oryza sativa
MLLAEMMNSSVLFLPSSSLFLTKQLVPATKGRASAAAAVRCSSGPNLSEAHEEEDGVASLMGRRHAMASAAAACGVSVFGFAGESMAVKQGLLAGRIPGLSDPDEKGWRTYRRPDDKSGGHGVGWSPIIPYSFKVRDGWEEVPVSIADLGGTEIDLRFANSKQGRLFVVVAPVRRFAELDDATIEKIGTPEKVIDAFGPEVIGENVEGKVLSMATAEYSGRTYYQFELEPPHIFITATAAGNRLYLFNVTANGLQWKRNYNDLKQIAESFRVV

SEQ ID NO: 30744 - protein, 243 aa, Oryza sativa; identical to SEQ ID NO: 30323

SEQ ID NO: 30745 - protein, 133 aa, Oryza sativa; identical to SEQ ID NO: 30708

SEQ ID NO: 30746 - protein, 374 aa, Oryza sativa; identical to SEQ ID NO: 29456

SEQ ID NO: 30747 - protein, 257 aa, Oryza sativa; identical to SEQ ID NO: 30221

SEQ ID NO: 30748 - protein, 190 aa, Oryza sativa
MPPAGSLTDEQLRFFDANGYLVLGSFSSAEEVRAMRDRMAELVDGFDGAGDVFSTKDHRQVKNDFFFKSAENISFFFEEKAFGDDGCLKQAKELSINKVGHALHELDPVFKKFSFGANVSSLFSSLRYKRPAVIQSMYIFKALVARWYHTRIIHSYIQTLHRAQGCGLHSKMRQKRMVAFGQFLDHIKMA

SEQ ID NO: 30749 - protein, 153 aa, Oryza sativa
MQLRHPNERTIKSPTHLHLVSLSRQESTASSSSSSSMATTASLSAVAARPLSVAWLKKPLCASFQPVPRARPAAAARMAVRASASMKERATAGLTAAAMAAAMVLPDVAEAAQGSLTPSLKNFLLSIVSGGVVLVAIVGAVVAVSNFDPVKRT

SEQ ID NO: 30750 - protein, 229 aa, Oryza sativa; identical to SEQ ID NO: 29253

SEQ ID NO: 30751 - protein, 270 aa, Oryza sativa; identical to SEQ ID NO: 28586

SEQ ID NO: 30752 - protein, 152 aa, Oryza sativa
MVDKNDGSEGLKFNTSHLMQTTEEVARAFIAAASAATVQSTRPSVVYSSREESGSPMQKLQQQFSKILKGFSTSPEVSGSYNPEVLTTQKRQWSRFQLKSLVIAWSQDKITVASTSMLFHLHELCVFFDQHFLSSFTYRKYQNSFNIACQAQ

SEQ ID NO: 30753 - protein, 211 aa, Oryza sativa
MSKRQAILKSIWSPLTAVFRTKNCAATSSNLVVVNAGGEIIAGGGREDAIVTRKSRSSLEDLLKIESSSNPGTMAADEPLPNHMASPKNSSMESELQVVLAGYPENSHGGVIAGRPPESLDGGGGAVVVRAQTVRVKVNRLVVPVPSALRARSRAAKMVDAAALPAKRGSYWRIAGRGRGGDKSELFYQRPIPLGRRCRVQHLEEVTLSDN

SEQ ID NO: 30754 - protein, 208 aa, Oryza sativa
MVKHNNVIPNGHFKKHWQNYVKTWFNQPARKQRRRIARQKKAVKIFPRPTSGPLRPIVQCQTLKYNMKSRAGRGFTLEELKAAGIPKKYAPTIGISVDHRRKNRSLEGLQANVQRLKTYKAKLVIFPRRARKVKAGDSTAEELATATQVQGDYMPIARGEKRSVEVVKVTDEMKAFKAYAKLRVERMNQRHVGARQKRAAEAEKEEKK

SEQ ID NO: 30755 - protein, 198 aa, Oryza sativa; identical to SEQ ID NO: 29072

SEQ ID NO: 30756 - protein, 184 aa, Oryza sativa
MEGRSQLNPDASPFIPSSLSLFTYNDSKRQAESSSMNDPSARACRPSMCEENDMDPLALTKSVLLMFPNISEEFIDELLQANEFDICLTVDMLHELNSQNMLHGDAIMGFPTFPDVKKFHGNLGLPDGDLSESNSSLDQSLQKGMSLTTSGAKSASAMIPDNISLHDKLGVQKDDKPAIASTTN

SEQ ID NO: 30757 - protein, 269 aa, Oryza sativa; identical to SEQ ID NO: 30174

SEQ ID NO: 30758 - protein, 225 aa, Oryza sativa
MGQEGGLEVRRDAGAVRQGVVVDVLLRRLPLAAGVPHRHLPPHVRHPLHHPAMGRLGRRGNNGMPRRHRHRPLRRHAAAQVRDHQREAEEGRRAHGADHGGRAVAVLAASQLLRGAAVVVGAVPVRLEHRAAMDGGRAACEQPVPWLCHRAGGAANGEAGAPSRGLQAVPEEDLRLDPLVQEARPSTLQPQGQLKPKFAQNFALLIVHLYVFDHFDCSFLSVVLL

SEQ ID NO: 30759 - protein, 151 aa, Oryza sativa
MGVLDSLSDMCSLTETKEALKLRKKRPLQTVNIKVKMDCEGCERRVKNAVKSMRGVTSVAVNPKQSRCTVTGYVEASKVLERVKSTGKAAEMWPYVPYTMTTYPYVGGAYDKKAPAGFVRGNPAAMADPSAPEVRYMTMFSDENVDSCSIM

SEQ ID NO: 30760 - protein, 286 aa, Oryza sativa
MGATTLLNALVCHHHHRLNPLSHAGVSHHLLHSAGEVLLRDHARLLVGDGWEPDTPDVADVRPVDELVGEVGPRHERHAVPDALHDRVPPAVRYEARHRRVSQHPLLRRPRHDLATAAVIAGGDDAVQEAVRVLVRVAMDDVWAHHPQERPAGELEPQGELLELAPVEHGEAAEGDVHDGPRRLHVEPRHARAVLGAPEVADRLAWALAGEERADGEDLGEPRERGRLRVAEGVAEDVITLVDGTDASEDATEQQLLPLVVADAVPRQVRRLHHRHVRRQLEGLLR

SEQ ID NO: 30761 - protein, 259 aa, Oryza sativa; identical to SEQ ID NO: 30235

SEQ ID NO: 30762 - protein, 338 aa, Oryza sativa
MIDGSTVLLLAEVVVVALVVVAFVAARKYSTTKPDPAKVFTKFQCKPTQGPTLSIVVPCYNEEERLPPMLQQTLDFCLDAKKRCVDDATSRAEGLFADFEIVVVDDCSRDKTADVVTKFAKDHPEAIIKLVRVNPNRGKGFAVRRGFFEASGDYVLMADGDNATQISDVTKLFKALRKPLSSSGQPASNMPPVIAIGSRAHLEEKAIARRTFFRTVLMKVFHFVVSVTYFFGTRGSLCKLRDTQCGFKLFDRRVTEILFLNNRLERWAFDVEILLTARRRGLKVAEVPVRWEEIPGSKVRLRGMVQMGLECLLMCFTYSLGVWSIVKPPSKPKSSSSS

SEQ ID NO: 30763 - protein, 276 aa, Oryza sativa
MSKGPAPFLNIGKRAKDLLYKDYNFDQKFSLTTTSNSGLGLTATGVKIDELFIGDIQTQHKSGKTTVDVKIDSESRVSTTVTVDEALTGLKTSFSFRVPDQKSGKLDLQYLHDHFALNSTIGLTSTPLIELAATIGTNELSAGAEVGFDSTSASVTKYNSGICYNKHDFSAAVLLADKGETLKASYIHTFNETNGATVAAEVTHKLKTKENYFTIGSSHAIDSSTLLKTRFSNGGKVGVLCQHEWRPKSTVSISAEYDPKVVSSPSRFGVAIALKP

SEQ ID NO: 30764 - protein, 229 aa, Oryza sativa; identical to SEQ ID NO: 30528

SEQ ID NO: 30765 - protein, 270 aa, Oryza sativa; identical to SEQ ID NO: 28586

SEQ ID NO: 30766 - protein, 263 aa, Oryza sativa
MAVIASTLDSLLDLLSGFILWFTAHAMKKPNKYSYPIGKRRMQPVGIIVFASVMGTLGFQVLIESGRQLITNEHQVFDHRKELWMIGSMSSVAVVKFFLMLYCRSFKNEIVRAYAQDHFFDVITNSVGLVSALLAVRYKWWMDPVGAILIAVYTITTWARTVVENVGTLIGRSAPAEYLTKLTYLIWNHHEEIRHIDTVRAYTFGTHYFVEVDIVLPGDMPLSHAHDIGESLQEKLEQLPEVERAFVHVDFEFTHRPEHKAEV

SEQ ID NO: 30767 - protein, 259 aa, Oryza sativa; identical to SEQ ID NO: 30235

SEQ ID NO: 30768 - protein, 240 aa, Oryza sativa; identical to SEQ ID NO: 29049

SEQ ID NO: 30769 - protein, 86 aa, Oryza sativa
MEKFLVAAPPPSGDAPAAPVPPRRHRWSRVAAELDGRIDARFRHRESVRLRDSFSEVTEISEKSICFVSVLVITKLFSLLGLLHMS

SEQ ID NO: 30770 - protein, 209 aa, Oryza sativa
MDWSAVTAEDLVDALREVDWSTPPRPVPEFFSRFTVPRSYSKWTSRLKCNLYYYRTNYFILIMFILGIGFIWKPVAILAAFMTGISIAFLNDSFAVTFNEKVTRTVRQFSPHLAAKMRPPITPVLRGRPSSKRSIHICGRPRWLFVLLFSAVSCMLWLTSCSLLTVLWALLIAIFATLLHASFRTPNLKARLNTFREEFRAVWRNYSEL

SEQ ID NO: 30771 - protein, 261 aa, Oryza sativa
MSLISKLRLITVDVTGTLLAYKGQLGDYYCMAAKAAGKPCPDYQRMHEGFKLAYTEMARQYPCFGFAAKMPNIDWWRMCVKDSFVKAGYEYDEETFEKIFKRIYSSFGSSAPYSVFPDAQPFMRWLRGKGLTVGIVSNAEYRYKDVILPALGLNQGSEWDFGVFSGIVGVEKPDPSIYRIALEMAGKVAPEEALHIGDSMRKDYTPARSIGMHALLLDRFKTADAESWRKSGATVLPDLVAAQEWLSKNLKDEPVAAEQNV

SEQ ID NO: 30772 - protein, 260 aa, Oryza sativa
MPKGAKKRAKLKKKQQGDHPAGSDDGGNNNNNKNNAAENGSNDSSRRRDAASDGNHHLPSRPNVPHVDVSEDSMESSEEMVTPRAAASEADEEERKAATSEVPVEVVEAGEEVMVDALPPEAAAGAQEQQGKAEALVVVQEPEVKREELVAKVHPMHDPEPQGEEVLIVEAAAVSAVQEPEVKRDEVVVMETAAPPAVQESETKSGGVLVKDVVEVSRSLGAADTTEVARGPAVAVAAAGQRATWWNCCGVFDAFSGSER

SEQ ID NO: 30773 - protein, 177 aa, Oryza sativa
MEKDTSVADRLARMKVNYMKEGMRTSVEAILLVQEHNHPHILLLQIGNTFCKLPGGRLKPGENEIEGLKRKLCSKLAVNSPSFPPNWQVGECVAVWWRPNFETVMYPYCPPHITKPKECKKLFIVHLSEREYFAVPRNLKLLAVPLFELYDNVQRYGPVISTIPQQLSRFQFNMVSS

SEQ ID NO: 30774 - protein, 215 aa, Oryza sativa
MNAFRLAGDMTHLLSVVVLLLKIHTIKSCAGISLKTQELYALVFAARYLDLFIHFISLYNTVMKLVFLASSFSIVWYMRRHKIVRRTYDKDHDTFRHHFLVLPCLALALLINERFTFREVMWAFSIYLEAVAILPQLVLLQRTRNIDNLTGQYVFFLGAYRVLYILNWIYRYFTEPHFVHWISWVAGIVQTLLYADFFYYYIMSWKNNVKLELPA

SEQ ID NO: 30775 - protein, 195 aa, Oryza sativa; identical to SEQ ID NO: 30208

SEQ ID NO: 30776 - protein, 239 aa, Oryza sativa
MVVAIATEAWALAGCGAAAKSAAAAAQEAPVQLQQHSLSAARAKKPISFRAVAAAAVSSQCHQERRAVVVGRRSGMASCLLAAVAASLSGAGEARAAVLEADDDIELLERVKEDRKKRLQKQGVISSSGTETGYLQDLIYKLSKVGQAIDKNDLPAASSVLGPNSDAQWVQNINVAFTKFSSSPEEKNMVDSFNSSLASLITSVNKSDVDSSKSAFVSSATTLEKWIASAGLSGQLKGF

SEQ ID NO: 30777 - protein, 273 aa, Oryza sativa
MGTLGRAIYTAGKWIRGTGQAMDRLGSTIQGGLRVDEQLPRHRTIMNIFEKEPRIHKDVFVAPSAAVIGDIEIGHGSSIWYGSILRGDVNSIHIGVGTNIQDNSLVHVSKANISGKVLPTIIGNSVTIGHSAVLHACIVEDEAFVGMGATLLDGVVVEKHSMVGAGSLVKQNTRIPSGEVWVGNPAKFLRKLTEEEMAFIAQSATNYINLAQVHAAENAKTFDEIELEKMLRKKFAHKDEEYDSMLGVVREIPPELILPDSILPNKAQKAVAH

SEQ ID NO: 30778 - protein, 205 aa, Oryza sativa
MGNPEKLMTQIFDLKFTSKSLQRQARKCEKEEKEQKLKVKKAIEKGNMDGARIYAENAIRKRTEHMNYLRLASRLDAVVARLDTQAKMQVIGKSMANIVKSLDSALATGNLQKMSETMDNFERQFVNMEVQAEFMEGAMAGSTSLSTPETEVNSLMQQVADDYGLEVSVGLPQAAAHAIPAAKEKEKAVDEDDLSRRLAELKARG

SEQ ID NO: 30779 - protein, 249 aa, Oryza sativa
MTVAAGLGYALVALGPAFSLFAGVVARKPFLVLTLLTSTLFWLISLIILSGIWRVFLPIRSGAWWPYAILILTSVAFQEGIRLVFWRLYKKMEEMLDSFADRISKPRLCLTDKMLISLAGGLGHGVAHAVFFCLSLLTPAFGRATFYVEKCSRMPFFLVSAIISLGFLVIHTFSMIIAFNGYDERKRSDQVFVPVVHLIASVMTLINLAPGGCVIGTPLLCVMGAVTLQYCWQMVWRRLSEQQHRQFSS

SEQ ID NO: 30780 - protein, 301 aa, Oryza sativa
MSIARSRLIAARLAPRTSVVPVRFASARAFRHAAAPLAAPHPTAAPVAALALALSGSIALTAATKKKMTDSPVAVLAEEHFQDKSYDRTKLYEDLKAAHAADPEDVGVMWRLARAAYDVSNLKKTPADETKRLIYSAYEVIQQALAKTEEIAEVHNWYGIILSRIGDFEGTKVAIANSYKIKSHWEKAIELKPSFPTTYHLLGRWCMTISDLSWLERKAAAVLFGSPPESSYDEALKFLLKCDELDPGSWKKNTMLIAQVYYKQRNWAVAKEWTEKTLAAPIQTEEDQTVHEEATALLKKF

SEQ ID NO: 30781 - protein, 257 aa, Oryza sativa
MPNTDRAFKLNWASYSMGEKRAELASDHSIFVGDLAVDVTDEMLMDLFAKKYRSVKGAKVIIDANTGRSRGYGFVRFGDDNDKTHAMTEMNGAYCSTRPIRIGPATPRRSSGDSGSSPPRQSDSDSTNRTIYVGGLDPNATEDELRKAFAKYGDLASVKIPVGKQCGFVQFVNRPDAEEALQGLNGSTIGKQAVRLSWGRSPASKQSRGDSGHRRNGMYYGTPFYGGYGYASPLPHPNMYAAAYGAYPYYGNQQLVS

SEQ ID NO: 30782 - protein, 243 aa, Oryza sativa; identical to SEQ ID NO: 30535

SEQ ID NO: 30783 - protein, 158 aa, Oryza sativa
MSGRSRPWPGDPSPAPPQPPVVAAAADAGGEASTSLRDFGTSMDAISFGFAATAILVSMFLLMAIFEHLIKPHVFPPLASAALRPARRRHGVSPAGKLRSPPMVETVLQAADLSVLMPGQRYPTYLAQPAPLPPAPCPREGVHWPPHDHDVHHSYMPP

SEQ ID NO: 30784 - protein, 125 aa, Oryza sativa
MHFIEHLAITLSPPLEITIVRLPGRSWRLDGVEEEPCCRRRHGGSRVAAGHPETPSSTLRRRRLPLSCTASSSTSPRFAISPSRVDNRKPFAMVPGIPQCCQPDSWSMVPGFKLLCPNCLPSELT

SEQ ID NO: 30785 - protein, 200 aa, Oryza sativa
MTTMSSRLASRAARLAAVAASRAARLAAASASRTGAGDPSARATATAASRAARLAAAAASHAGGPTARAIAAAVSRAARSISSKLLDDDIAARLSFRYSTEPPDDGKCVTAKDLESDQAVWALYERWCKSYNKKRDHAEMIRRFDIFKLKASLVHSWNNYVHEDKEELARAKKEKGFRQTCRSLVPTRGIRPIRRWGRHC

SEQ ID NO: 30786 - protein, 270 aa, Oryza sativa
MTTPGSCPSSTSAAHSPVCLAPSAAAGESQEMVRPRMVLFGDSITEQSFRPGGWGAALADTYSRKADVVVRGYGGYNTRWALFLLHQIFPLVGIVPPLATTVFFGANDAALLGRTGERQHVPVAEYKENLKKIVNHLKDCSKSMLIVLITPPPIDEDGRERFARSLYGEEARKLPERTNEMAGVYASQCIELAREMNIHCIDIWSKMQETAGWQKLYLSDGLHLTPEGNAVVHKEVVQTLRSVGLKAEEMPYDFPHHSRIDGSCPEKAFQ

SEQ ID NO: 30787 - protein, 212 aa, Oryza sativa
MLDVALEREAEGDLLLADMGQGLGLRPGVIDGAISISAVQWLCNADKSCHNPRLRLKAFFGSLYRCLARGARAVLQFYADNVKQSEMIVTAAMRAGFAGGVVVDWPHSSKAKKSYLVLTCGPPSLNSSLPKGKGQDGAMCSDDDESDDGSGDEDGAQTVGIYERNRPKKRQKTKKNGKGKAWLLNKKEQLRRRGREVPADTKYTGRKRKSYF

SEQ ID NO: 30788 - protein, 246 aa, Oryza sativa
MQPLLKVYADRRSQPSRAIIIFCRVNRIDFEEVTVDLFKREHLSPEFKKINPMGQVPAIVDGRFRLFESHAILRYLATVFPGVADHWYPADLFTRAKLEAILDWHHSNLRRGAATFILNTVLAPSLGLPSSPQAAKEAEKVLFRSLGLIESMWLKGNAKFLLGNPQLSIADLSLVCEIMQLEVLGDSERDRILGPHEKIRSWVQNVKKATSPHFDEVHELIFKMKERMAAKRQSEPSKDLKTASKL

SEQ ID NO: 30789 - protein, 265 aa, Oryza sativa
MATCSAACARPAVVVFASPAAARRRAASSVYLPGRPLRGGGVVRCSAGPVSGGMISKKVAELWAAARSASPVAVIAAVAGAAVVYKVGSSLLAPPPPPARPREEPSEEAPPPPEPVQVGEITAEELLQYDGSDPEKPLLMAIKGQIYDVSQSRLFYGPGGPYALFAGKDASRALAKMSFEPQDLTDDISGLSLLELSALQDWEYKFSSKYVKVGTIKKVLVEQGGDSTADAIEEAAVDGEDSILTAKMSNQLLYEEEMEVGSDDP

SEQ ID NO: 30790 - protein, 223 aa, Oryza sativa
MEDADAPKDSGGVTSTGTVASVLIATVTFAAALTVPGGYVADDHPNAGTAASAGRFAFRAFAVSDTMAFLCSIVGTCLLVVGEAREVRPSRGRLRAYQGSAWALVTAGAQFMVAAFAFGLQVALGGGADSRWLVVFVHALCSASVLLCFPGIWAPFCLGKVIWRRAGWRGLTNLHRCPSSLEEFLWCFVTSFLAKTLLRTFLPVLIAVTLVVAIVLNIAKPNC

SEQ ID NO: 30791 - protein, 196 aa, Oryza sativa
MAVSPWSCRCGVSRSPGKSRGAPAPSSPDKRSKYSAQSVRAMPMRVLTVGKKRSRGAQLIVEEYKEKLGYYCDIEDTLIKSNPKLTSDVKVQVEAEDMAMMLQLKPEDFVVVLDENGKDVTSEQVADLVGDAGNTGSSRLTFCIGGPYGFGLQVRERADATIRLSSMVLNHQVALIVLMEQLYRAWTIIKGQKYHH

SEQ ID NO: 30792 - protein, 171 aa, Oryza sativa
MDGIMEGESDASYLPAGDEAEAGEGAPPPRRERAAAAEAPSRHHDHRLPCRQQHQRPDAVPRRRVGAVDAVRPRVLVDVHVRRLHHPINTHLLDRQHAADDRSASSPATAMATTHVCINAFESSHRVPAFLGADGEDEGEDVEDEHDGQDDYGRHGHRIAARISHLAKLRI

SEQ ID NO: 30793 - protein, 272 aa, Oryza sativa
MASSSVFSPLLRALRPSTSCSGRSSATHDNSAAAVVAAGGAAPRPAPLAAVVSHRRELLLGAALGAAFLKAPLPAEAREVEVGAVLPPAASNPGFVFFRATSKDTPALRAGNVQPYEFILPPTWKQTRVANILSGNYCQPKCAEPWVEVKFEDDKQGKVQVVASPLIRLTNRPNATIEDIGSPERLIASLGPFVTGNTFDSDELVDTSVEKIDGQTYYSYVLETPLALTGSHNLAKATAKGNTVVLFVASASDKQWQSSEKVLKTIVDSFKV

SEQ ID NO: 30794 - protein, 248 aa, Oryza sativa
MSGNIAFGRFDDSFSAASLKAYVAEFISTLVFVFAGVGSAIAYTKLTGGAPLDPAGLVAVAVCHGFGLFVAVAIGANISGGHVNPAVTFGLALGGQITILTGVFYWIAQLLGAIVGAVLVQFCTGVATPTHGLSGVGAFEGVVMEIIVTFGLVYTVYATAADPKKGSLGTIAPIAIGFIVGANILVAGPFSGGSMNPARSFGPAVASGDYTNIWIYWVGPLVGGGLAGLVYRYVYMCGDHAPVASSEF

SEQ ID NO: 30795 - protein, 324 aa, Oryza sativa
MPRYDDRDRYDDRYGGNTRLYVGRLSSRTRTRDLEDLFGRYGRVRYVDMKHEFAFVEFSDARDADEARYNLDGRDFDGSRMIVEFAKGVPRGPGGSREYMGRGPPPGSGRCFNCGIDGHWARDCKAGDWKNRCYRCGDRGHIERDCRNSPKNLKRGRSYSRSPSPRRGRSRGRSYSRSRSRSYSRSQSPRRDSRNERRSRSPRDSRSPRGSPRDSRSPRGSPRDSRSPKGSPRDTQSPRGSPRDSRSPRRSASPPNGRNRSPTPNASRSPAPRDSRSPMRADSRSPADHERRDMSTAANGRSPSPRDYEDNGNHRASPRGSASP

SEQ ID NO: 30796 - protein, 192 aa, Oryza sativa
MRFRFRNKAAAAGDGSRPASSPPNAGKFAAPVAGGGGAADVAGESPDQDSTRNGSKDESFFEARPWLDSDSEDDFHSVRGDFTPSRGTTPDHQRQSPFAGRISVDRSEPSLIEKKQRLLELLQEKQQYDDDSVADVGSEIENGAVHAEEYLKSSRKGAKANRASKSRGGCFPSSFWKIKFRSCRKKRKEQND

SEQ ID NO: 30797 - protein, 256 aa, Oryza sativa
MEGLVGTLVRLTATLYNPDVLKAAMDHDFASVLTALLAGAAGSGEVQRLAAVGLENLSYHSIKLSRPPPPPEDEPRPKKMTILKRLKDARVHNHSSSKNPPLNVCPVHRGVCTPATTFCLLEAGAVEGLLACLENDDARVVDAALGALCTLVDDRVDVEKAVVALAGQGAARRVLAALRQHRGNSLWHRCFSVVEKLLVHGDDVCVREVTGDRMLPTALVSAFHRGDANAKQAAESILRRLHKMPDYSATYMSVEF

SEQ ID NO: 30798 - protein, 208 aa, Oryza sativa
MHQLLVECPSIYEMLPNPHFKWKKAPVVQVWRKKPEKDGIAELVLYEATDCLSLFQEALRNNELKYNGKTIALPFNMSVFKWATETRRILEDAELPDTVSFYNIYGTSYDTPYDVCYGSESSPIGDLSEVCHTMPVYTYVDGDGTVPIESTMADGFAAKERVGIEADHRGLLCDENVFELLKKWLGVKEESTRRRRLSKSKVTDFAPS

SEQ ID NO: 30799 - protein, 212 aa, Oryza sativa
MHSLIDVIAGICFGVVILAFWLAVHNHVDAFVVSGQNVTTFWASLSLLLCFAYPKPEFPTPSFEYHTAFNGVAFGIVYGIQQTYFHFHNPDVPLIFSPQLPLIVFVGRVLVGIPTILVVKFCSKALSKWLLPVMCNTLGIPIVSTCYVPALKASEKCKVKSDAKQGGYLQKVFSLFPQKAYDVDTGIRFVQYASLAWSVVDLVPAIFTHLSL

SEQ ID NO: 30800 - protein, 351 aa, Oryza sativa
MEVKCLLLLALFLLLGTHGGEAQPLVPAVMTFGDSSVDVGNNDYLKTIIKANFPPYGRDFKNQVPTGRFCNGKLATDITAETLGFESYAPAYLSPDASGKNLLIGANFASAGSGYYDHTALLYHAIPLSQQLEYFKEYQSKLAAVAGSSQAQSIINGSLYIISAGASDFVQNYYINPFLYKTQTADQFSDRLVGIFKNTVAQLYSMGARRIGVTSLPPLGCLPAAITLFGYGSSGCVSRLNSDAQNFNGKMNVTVDSLSKTYSDLKIAVFDIYTPLYDLVTSPQSQGFTEARRGCCGTGTVETTVLLCNPKSIGTCPNATTYVFWDAVHPSEAANQVLADSLLAEGINLVT

SEQ ID NO: 30801 - protein, 16 aa, Oryza sativa
MIINIEKLDRSSAGRS

SEQ ID NO: 30802 - protein, 276 aa, Oryza sativa
MVATARMHAWQLLLVAVVISCFHCHLAAHHGGKNVRQPPSSVVVVVGSVHSGSDATKAAVSGAPVAVRCHDGNGRDVFRQQALTDRRGEFRVHLPPEAKSRLASVTSCSVKLLASNAARPCDDAAATSAATARGFRLAATKHNGGDGARVFNAGAFAVHPELCDDKGIFFPPLPLVPEPPNIGGVPIPPNPITPAPPSLVPPVFPTPSPPSILPPLTPQPPPSSLIPPVLPLPLLNPPPPPPPPPSLLPPVPLLPPLIPGVPPASASRSGRPVSTP

SEQ ID NO: 30803 - protein, 42 aa, Oryza sativa
MYHKAQYVSLHPRLQIFVRVILVPHYKIKKVLNGSPMMLSMY

SEQ ID NO: 30804 - protein, 293 aa, Oryza sativa
MEMTRSLTLVPLPATLRPASAACRRRRRRRGLPFGALFSPSPPSNQQQQEMHIRALQPRQDWVGEWVRSNDTLVRGLPILGGGASLLAVLLNRAVSGIAAVADASSSQSRADILTLALSVTDILAGLVWLSIRPKSISPVVPRGVECKRVGTGVLDSALRELLWTWDSLTTATCCKSLVVVYGGNCVLQIGVAAGSPEDGNAVMVDAQKFMQGSLYRSAMESKKQSYLANLALYPGRTELPFLPANTQALILQPIGDKGIAVIGGDTIRGFTNLDQAWIAMIADKLDATLSKS

SEQ ID NO: 30805 - protein, 362 aa, Oryza sativa
MGKAEARSREHGGGGGGGSGSAGKIFVGGLPRDTTEADFVKHFGQYGEIVDSVIMRDKHTSQPRGFGFITYSNPAVVDRVMDDIHEFNGKQVEIKRTIPKDSVQSKDFKTKKIFVGGLPQALTEDDFKHFFQKYGPVVDHQIMRDHQTKRSRGFGFIVFSSDQVVDDLLANGNMIDLAGAKVEIKKAEPKKSSNPPPSSHGSASRSAYGRDSRGHSSGNDYGGLANAYSNYNSGGFGPYRNHGVYGGGSLSGYGGIGEYGVQYGRYYPGLGGSGSMPSFGYASRVGPYGGGFDGPYAGGNLSGYRRGGDESFGGLSSSSFGGAMYGGAAYDPALGGYASGSTPERSRGNLAGGSGRYNPYGR

SEQ ID NO: 30806 - protein, 434 aa, Oryza sativa
MAKKLGKSPVAKEEDKEGLFASCSFTDLGLHPTLCAHLQDKMGFQAPTRIQAQAIPVAMSGQHMLVKAATGTGKTLAYLAPIVHLLQMREPRVERTDGTFALVLVPTRELCLQVYGIAQQLVHRFHWLVPGYIMGGENRAKEKARLRKGISILIATPGRLLDHLQHTSSFVYPNMRWIVFDEADSILELGFGKALEDILEHLGSRNDTSNQNKNKMEPMKRQNLLLSATLNEKVNRLAKISLKNPVMIGLDEQNSSAHGKNHTSLLSDDEEEILEKHNVTVEQAVDDFKLPAQLVQRYVKVSCGSRLAILLTILKSLFERQLSHKVVVFLSTCDSVDFHHTVLSQLEWSPGLQLDTDKKQKFISCKVFRLHGNMDQDDRKKSFLGFSSEKSAILVSTDVAARGLDFPKVKCIIQYDSPGEASEYVHRYLKHLPV

SEQ ID NO: 30807 - protein, 370 aa, Oryza sativa
MITTQRPYIKCIVNAGPGFRLLWNTVKSFLDPKTTSKIHVLGNKYQSKLLEVIDASELPEFLGGACTCPEYGGCLKAEKGPWKDQNILNIVLSGEAQCARQIVTVSNGEEKIISYAKSKHHTIRGSDTSTAESGSEAEDVTSPKVLRSYISHPKLTPVREEVKMVRATSFSTRMPEYDVPVVDKAVDATWKREVTRKTAFSSKDSSLTSTESSSNGSLDRIVAVLLAVFMAIITLVRSVKDLAAKRLPDKNESEQKYSTLYPDSMPKEEFRPPSPTPGFVEAELFSSVLQRLGDLEEKFLMLQDKPSEMPCEKEELLNAAVRRVDALEAELIVTKKALHEALIRQEELLAYIDSKEVAKAQKKKKAMFCY

SEQ ID NO: 30808 - protein, 340 aa, Oryza sativa
MSVFAAGMIQAELKGKRFLCRTAASFVSARIAIKPKPPIRPTDLGLKRALTGGLIVVGSYVPKTTKQVDELRSQCEQSLRIIEVSVEMISMKSAEDRDHEISRVIELGNAYIQSRKDTLVVTSRQLITGKTPEESLEINYKVSSALVEIVRGIGSRPRYILAKGGITSSDLATKALEARRAKVMGQALAGVPLWQLGPESRHPGVPYIVFPGNVGDNSALAKVVQNWACPSRSSAKELLLNAENGGYAIGAFNVYNLEGIDAVVSAAEAEKSPAILQVHPSALKQGGVPLVSCCIAAAEHASVPITVHYDHGTSKSDLLQALEMVCMVLIQSWWTDHIYL

SEQ ID NO: 30809 - protein, 393 aa, Oryza sativa
MPYTNDQTIVTCAADGEVRLAKIGDGGDVPTTLLGDHDGRAHKLAIEPGSPYIFYSCGEDGLVQHFDLRTNTATKLFQCRNSLSKSGHSSNIHLNAITIDPRNPNLLAVGGSNCYARVYDIRKYKWDGSSDYPSDCYCPPHLIGNRFVGITGLAFSHQSELLISYNNENIYLFPKNGGLGPDPKSSVKIEANKGSKSTIVSSGEDVDRPAPLMYAGHRNCETVKGVTFIGPNHEYVASGSDCGRLFIWRKKDGKFLRAMEGDECVVNCIEPHPHTMTIASSGIDNDAKIWTPSATERAPVVNIEELKPRKRRTKLWHFSLPEELIFHVLASRRRQQAAGDDDSSEDLEDSTGLLNLVLRAAERDVLSDEDEESSEDSGDCSLNLSMAQPWKHC

SEQ ID NO: 30810 - protein, 280 aa, Oryza sativa
MSFVFRGSRGDIEAGGFPGFAPERRAMRIHAGGRPVNSNLAFLVTVLMLFMVLNSHQMSPNFLVWLVLGVFLMATSLRMYATCQQLQAQAQAHAAAANGFLGHTELRVHVPPTIALATRGRLQSLRLQLALLDREFDDLDYDALRALDADNSPHAPSMSEEEINALPVFKYKVQAHQGSASFRKSDGPSQPSVSSTESGNEKKQDRFKADATDNTLEDELTCSVCLEQVVVGDLLRSLPCLHQFHANCIDPWLRQQGTCPVCKHRVSDGWHGEADASNMV

SEQ ID NO: 30811 - protein, 86 aa, Oryza sativa
MASSSPGMCNCGECYVEQDAAPASSQVVPLRHQLAKPFHERSSEPDDHSASAYEAAEYKERKSRYHPSSRDGPSNTHHRNYRRQGR

SEQ ID NO: 30812 - protein, 36 aa, Oryza sativa
MSALSSDFPRASGSTAETATGSPPIRGWSDRSMEIG

SEQ ID NO: 30813 - protein, 233 aa, Oryza sativa
MSSLESARADLALLILYLNKAEARDKICRAIQYGSKFVSNGQPGPAQNVDKSTSLARKVFRLFKFVNDLHALISPPAKGTPLPLILLGKSKNALLSTFLFLDQIVWAGRTGIYKNKERAEFLSKIAFYCFLGSNTCTSIIEVAELQRLSKSMKKLEKELKHQELLKNEQYQMKLQKCNERRLALIKSSLDIVVAIGLLQLAPKKVTPRVTGAFGFASSLIACYQLLPAPAKSK

SEQ ID NO: 30814 - protein, 399 aa, Oryza sativa
MFKRDAPSTDMISGLPEGVLHRIMSFLTLREAVQTCVLSRRWRNLWLSMPLINADYKQFFEMTDTKAGYDEALAVAVPMFKRFVNRLLELRDPVASIDKFCLWYSISDDNEDDTESQDAAANRWISQALQKKARVVEVYGDLVFADLYPLVIDHSVFTSSYLTKVVFSSVLLEDGFFKQLESGCPALEDLSLDDCVISGDEISSQTLKVLTIKDTKFSMEHKTSINTPSVTSLTLWRPAHGIVVLKDMASVVTASVKPSEFIDEFDARGLRQYLWALSGVKNLEFYYLGELTIEGNLQLCPKFNNLVNLTLGRWCLDANFYALILFMQNTPRLEKLTLKLHPFRYQQQRIIGELTERSFTCGHLKIVEVICSENDPLINHLVDFFVSSGMTTAQIHIKH

SEQ ID NO: 30815 - protein, 283 aa, Oryza sativa
MGRPGYLTLPILSVLAAIGYVYYTTVFVAVARWLGLATAAGAANAAAITALAAACVATYAVAVCRDPGRVPPSFAPDVEDAESPLHEIKRKGGDLRYCQKCGHYKPPRAHHCHACKRCVLKMDHHCIWINNCVGHENYKIFFIFVLYAVTACFYAMILIIGSAMYSVPVDEHSSNDSSRTSIIICGIILCPLTLALTVLFGWHIYLILQNKTTIEYHEGVRAMWLAEKGGNLYHHPYHLGVYENLISVLGPNIFCWLCPVSTNTGNGLRFRTSHDIPLSTPSM

SEQ ID NO: 30816 - protein, 321 aa, Oryza sativa
MKGRGREEHVTSGTFVVGGLHWAILLFPDTHVILLDDGEDNVTALLELQSQGGSKVRACCDVRLVDQTTGLASSAAPAQPDAKTFKVFNADESNRVSCLKMKRTEFEAPPYLVDDRITLECVVTVKKEPRVSRARPVPRIKVPPSNMMQQLGDLLESKEGADVVFDVAGETFPAHKLVLAMRSPVFKAELCGPMRESGTEPISIVDMQPVVFKALLQFIYTDWLPSIRDLGGDDNSEMIRHLLVAADRYAVDRLKLLCQSILCKNLRVGNVATTLALADQHHCGMLKDACIEFMSCPNMLDDVVASQGFVDLENTAPSLVA

SEQ ID NO: 30817 - protein, 453 aa, Oryza sativa
MGTPVNTTELSGKDNMASLIVPDDFRCPISLDLMKDPVIVATGQTYERGCIERWLEAGHDTCPKTQQKLPNKSLTPNYVLRSLIAQWCEANGMEPPKRAAQHHNAPASCTAAEHSNVVELLQKLLSQNLEDQREAAGMLRQLAKRSPENRACIGDAGAIPILVSLLSITDVSTQEHVVTALLNLSIYEENKARIITSGAVPGVVHVLKRGSMEARENSAATLFSLSLVDENKITIGASGAIPALVLLLSNGSQRGKRDAATALFNLCIYQGNKGKAVRAGLIPVLLGLVTETESGMMDEALAILAILSSHPEGKTAISSANAIPMLVGVIRNGSARNKENAAAVLVHLCNGEQQQQHLAEAQEQGIVTLLEELAKSGTDRGKRKAIQLLERMNRFLMQQSQAQAQAEAMAQAHAHAQSQAQVQALNEAQSQVEMQVEQLLLPTTSHLSDRRDG

SEQ ID NO: 30818 - protein, 203 aa, Oryza sativa
MQYAPLARSASARPPYSVYYYLALTAITVGGKNVQLPERAFVAGGAGGGAIVDSGTTFSYFDRTVFEPVAAAVVAAVGGRYSRSKVVEEGLGLSPCFAMPPGTKTMELPEMSLHFKGGSVMNLPVENYFVVAGPAPSGGAPAMAEAICLAVVSDVPTSSGGAGVSSGGPAIILGSFQQQNYYIEYDLEKERLGFRRQQCASSS

SEQ ID NO: 30819 - protein, 31 aa, Oryza sativa
MMMRVQLHWRSSLQLRQQVWLQPLQDHLFRR

SEQ ID NO: 30820 - protein, 251 aa, Oryza sativa
MAKEVDPCDHGEVVDAGCVRAVLAELVLTFVFVFTGVAATMAAGVPEVAGAAMPMAALAGVAIATALAAGVLVTAGFHVSGGHLNPAVTVALLARGHITAFRSALYVAAQLLASSLACILLRYLTGGMATPVHTLGSGIGPMQGLVMEIILTFSLLFVVYATILDPRSSVPGLGPLLTGLIVGANTIAGGNFSGASMNPARSFGPALATGVWTHHWIYWLGPLIGGPLAGLVYESLFLVKRTHEPLLDNSF

SEQ ID NO: 30821 - protein, 253 aa, Oryza sativa
MHGNREILEAGERNFNRFGGWLGKYSTTNKNIRLLEDAHSHILASQQANLDRESLRLDYLTLLLRQLTDPLKTMPKDEAVQKVVGFMDTYSLSQEDFDTIVELSKFKGHPNPMDGIQPAVKSALTKAYKQGSSSRVVRAADLVNIPGMKKPLKKRVAAILEPVGESLPEENGVASSEGDEEDSSDAENNDELVPGDTKPKLDLQSDKKKGIQVQLDLKSNGNGLNSKKMPAGRSKASGSAGKAAGGSGGKRKR

SEQ ID NO: 30822 - protein, 166 aa, Oryza sativa
MVYIHRVFNYIFTDSRERLALCAYWIFVIYVSIRRFYSISKQSKTERILLRKYYHLVAVLIFSPAVIFRPDFLDLAFGAAFAVFLILEMVRVWEIYPLGHIVHQFMSAFTDHRDSEILIVSHFSLLLGCALPKWMSSGFNDRPLTPFAGILSLGIGDTMVGSMSSA

SEQ ID NO: 30823 - protein, 464 aa, Oryza sativa
MPNDRELTCGICFENCPRTSMSAAACGHPFCSACWRGYISTSINDGPGCLMLRCPDPSCTAAVGQDMINSLADDEDREKYGRYLRRSYIEDNRKTKWCPAPGCEYAVEFVMGSGSYDVNCNCSYGFCWNCTEEAHRPVDCATVSKWILKNSAESENMNWILANSKPCPKCKRPIEKNQGCMHITCTPPCKFEFCWLCLGPWSEHGERTGGFYACNRYEAARQEGAYDESERRREMAKNSLERYTHYYERWAANQSSRQKALGDLLSLQNDKLEKLSDIQSQPESQLKFIIEAWLQIVECRRVLKWTYAYGFYLPEHEHAKRQFFEYLQGEAESGLERLHQCAEKELQVYLEAESPSKDFNDFRTKLAGLTSVTRNYFENLVRALETGLNDVGPSTSHGTCSKSATSKSLGSKSKSSKSRASSTSSKTGGSSRGVDESNIWTCDQCTYANPRSARNCQACNNQHR

SEQ ID NO: 30824 - protein, 247 aa, Oryza sativa
MRALSRVGVGLAVVSALLLLALAAELYYLFVYKRRRSAAISDAASSPSSSSRELLQLFCFKKPPALASTYAQEPHAGEAVVAVAVDDDDDTVEAQLMRLGSLVGPTRLLFTIKEETKEDLESEDGRSRCGRSRSLAELLHSSETPFMTPASSPLPMDKSFNPLFEPTVAAAVTVSPPPKFQFLKDAEEKMYRRAPAEEAMRARRSPQTRSPAAAGEEDGGYITIMVGKNNKVIPLPSPPSNGDGDLQ

SEQ ID NO: 30825 - protein, 47 aa, Oryza sativa; identical to SEQ ID NO: 29338

SEQ ID NO: 30826 - protein, 189 aa, Oryza sativa
MKEEDQLSGDEDDTEELDEDQDISDNDSEENDDELELDSDMDEENDVSESDDDEELSEKLDDSDEGSDQDDDSDQDDKSKNSSRKANKRKLSDYIGQLNAADASLRALKKLAGAKKAEASCDEAGKILSDEDFKRIKELKAKKEAKLALAQHGLGKGHDTKSVTFKMPSSDQLSLKRVDPSKLEAHIKR

SEQ ID NO: 30827 - protein, 470 aa, Oryza sativa
MEERAGARRRPPMAVPPLLLFLLLLSSFSSCAAAASGAPVGEDYVRPPAAARRCGLHHRKALLSLFPWSKKKDSSSASDPQQVHISLAGEKHMRVTFVTDDNSVPSVVDYGTEAGTYTSTSQGESTSYSYLMYSSGKIHHVVIGPLNDNTVYYYRCGGHGPEFQFKTPPSQFPLSLAVVGDLGQTSWTTSTLNHIKQCAHDMLLLPGDLSYADYMQHLWDSFGTLVEPLASTRPWMVTEGNHEKERIPFFKSGFRSYNARWEVPYEESESTSNLYYSFKVAGVHAIMLGSYTDYDESSDQYAWLKADLAKVDRKRTPWLIVLLHAPWYNSNWAHQGEGDSMMAAMEPLLYAAHVDMVIAGHVHAYERAERVYKGGLDPCGAVHITIGDGGNREGLAHRYRNPKPAWSVFREASFGHGELKIVNATHAHWTWHRNDDEEPVRTDDVWITSLAGSGCIQDGSHEYRKILMSP

SEQ ID NO: 30828 - protein, 402 aa, Oryza sativa
MAGERRWSTAAAAAGWLRVAAVVVAAASAASSAAGEGVGRQTVPAMYVFGDSLVDVGNNDFLPPPAPRPPEPPCGIDLPPEAAAADGGGGGRFTNGFNLADVIAQHVGFKKSPPAYLSLTTPGRDGELRRGLVGANYASSGSGILDFIGNGTISLGEQVKLFTKTKEAMITAGEVDGENIDNLLSQSLFITCTGGNDYNAFTDGIVPVSDAPAFIAHMVATYIKHIKTLYNLGARRLGILDVLPLGCLPISRVPIENGSCSGTDNWQARLFNRLLRREMTAAATASMPDLVYSIGSIYYTFYDMIKNPSSAGVREVARACCGDGKLNAEADCSATTLLCPDRDNYIFWDKVHGTQAAYHNCVHAFFHGSPRYAEPISFTQLVASPAVDLGRPSPGTNRTARI

SEQ ID NO: 30829 - protein, 436 aa, Oryza sativa
MVIGAEIKDEMEEAPPLLLDEAARPRRVALFVEPSPFAYISGYKNRFQNFIKHLREMGDEVIVVTNHEGVPQEFHGAKVIGSWSFPCPMYGKVPLSLALSPRIISEVAKFKPDIIHASSPGIMVFGALAIAKLLGVPLVMSYHTHVPVYIPRYTFSWLVEPMWQVIRFLHRAADLTLVPSVAISKDFETAHVISANRIRLWNKGVDSASFHPKFRSHEMRVRLSDGEPEKPLIIHVGRFGREKNLDFLKTVMDRLPGVRIAFIGDGPYRSELEKMFEGMPAVFTGMMQGEELSQAYASGDVFVMPSESETLGQVVLESMSSGVPVVAARAGGVPDIIPEDQEGKTSFLFTPGDLEDCLGKIQLLLTDKEFRDNMGMTARAEMEKCDWRAASKKIRNEFYNAAIWYWRKKRAELIKPLQWLAQMFLPAPEVNRITQH

SEQ ID NO: 30830 - protein, 213 aa, Oryza sativa; identical to SEQ ID NO: 30371

SEQ ID NO: 30831 - protein, 386 aa, Oryza sativa
MADDINKLFAFFSECKMQNSKFYWDMQLDEDGVVKNIFWSHASSQAEYADFGDAVTLDTTYKTNIYGMSLAMFVGASHHIQDTLFGCALLRDKKIESFEWLFKTFKNCMEDCPSPRCVLTDQDNVIAVAITNVFPKTIHRLCRWLILKNHSEALNILYARDDRIESELLLCVNQTYTPQEFENAWSWFIDEFDLQDSVTLQNLYEIRHRWIPALFKKDYCGRMTSTQQSESVNKLAKRNFVDHQTNLHSFARRMLDIIISREAKEAAETRACLGMPITKTRWSFVVQMSRVYTRAVFKLFEEALDDCTAFRIDMDIGNTNRWIVLDMEHSEKHDWCQLQFKVLADVQKGRYECECKQWEHTGLLCTHLLRTFIHAQVEKIPPQYVL

SEQ ID NO: 30832 - protein, 366 aa, Oryza sativa
MCPEILADIPYGYKSDIWSLGCCMFEILAHRPAFKAADMASLINKINRSSISPMPPIYSSSLKQIVRSMLRKNPEHRPTAGELLRHPYLQPYLAESCSCSPIYLPVKPTKSNLGDKQQSRKPGSGRKRIIKTNGSSEALETAAEQAVDTRDNSTYISDVSTVGTQDACISQVSVDPQARNKAYQDIDDLTLFQQIEENLMSITDRQIDEAIFLKAVRTSSTVDVVPVSGAIQKPNEAPIPKEELTIGVVQEQRKEVKAHTHQGSKPGTGDVPIVTEESSPKSAVKLAHSDSTPAEWDHLNIVQQRADALESLLELCAKLLKQERLEELAGVLRPFGGGAVSSRETAIWLTKSLMTPPKLEGSPKLT

SEQ ID NO: 30833 - protein, 259 aa, Oryza sativa
MGAQDMERQALNVFRMKLLGAEVRAVHSGTATLKDATSEAIRDWVTNVENTHYILGSVAGPHPYPMMVREFHKVIGKETRRQAMEKWGGKPDVLVACVGGGSNAMGLFHEFVDDQDIRMIGVEAAGYGVDTDKHAATLTKGEVGVLHGSLSYVLQDDDGQVIEPHSISAGLDYPGVGPEHSFLKDIGRAEYDSVTDQEALDAFKRVSRLEGIIPALETSHALAYLEKLCPTLPDGVRVVVNCSGRGDKDVHTASKYLDV

SEQ ID NO: 30834 - protein, 229 aa, Oryza sativa
MASSLSKSDKKKVLDFAAWSFNITTSVGIIMVNKALMATHGFSFATTLTGLHFVTTTLMTIVFRWLGLSQPSHLPLPDLIKFVIFSNLSIVGMNVSLMWNSVGFYQIAKLCMIPASCLLEVVFDHVHYSRDTKLSIMVVLIGVAVCTVTDVSVNAKGLAAAVIAVWSTALQQYYVHFLQRKYSLNSFNLLGHTAPAQAGSLLLVGPFVDFLLTGKRVDHFGFNRLLCFS

SEQ ID NO: 30835 - protein, 183 aa, Oryza sativa; identical to SEQ ID NO: 29192

SEQ ID NO: 30836 - protein, 200 aa, Oryza sativa
MSEGAAGTTRLPEWLETLLSTRFFLACGAHPASPRNECNMFCLDCPSPSPPFCYYCRSHRHQSYRVIQIRRSSYHDVVRVTEVEDVLDISGVQTYVINSAKVLFLNERPQPRGAGAAAGKAAASPYNCQICARALLDPFRFCSLGCKLVDTKTGGRGATVQPGDATNDDAAAAGGSSKNGGARPQGRRRKGIPQRAPFGS

SEQ ID NO: 30837 - protein, 231 aa, Oryza sativa
MTPIPSQDPSRTGTPLGSMTPTRSPNCSIPSTPVGGRSTASPGDDNTDDGPYFNRKGGTNEISDDEMRLKTRKEIAALGIQLGKMNIATWASKEELELVSASPSIADLERMKKEYAARAAAYEEAENFKHTARFKKEELKIEAWESLQKAKIESEMKRIEEHAEKLRSEAMAKMAEKLEMTRRLAEEKRASANARMNQQAAKAVHKAELIRQTGRVPGSCILCCSGCFCQH

SEQ ID NO: 30838 - protein, 334 aa, Oryza sativa
MERFGHNLSNVFNFKIKAWSSIRYYKEAVLPKLIEERLIRISPFANRLSFDAPSAVQRLRCLANFEALKFSKPITTLSDILVSRMREKSAENNGKYVAVHLRFEEDMVAFSCCVFDGGEKEKKELDAARERGWRGKFTRPGRVIRPGAIRMNGKCPLTPLEVGLMLRGMGFSNNTAIYLASGRIYKSEKNMAPLLEMFPLLQTKETLASDEELAPFKNFSSRMAAIDYTVCVHSEVFVTTQGGNFPHFLLGHRRYIYGGHSKTIKPDKRRLAILFDSPRIGWKSLKRQLVNMRTHSDAKGIEMKRANESIYTFPCPDCMCRSNKSEHSKSIQAR

SEQ ID NO: 30839 - protein, 343 aa, Oryza sativa
MKGTAFKIFTEEELQKATNNFDEKKILGHGGHGTVYKGFLNGNTEVAIKRCKTIDEQQKKEFGKEMVILSQVNHKNIVKLLGCCLEVEVPILVYEFIANGTLFHLIHDGHGRHISISTRLQIAHQSAEALAYLHSWASPPILHGDVKSSNILLDGDFTAKVSDFGASILSPTDDAQFVTFVQGTRGYLDPEYMQTWKLTDKSDVYSFGVVVLELLTRKKPLNFDGLEDEKSLSVRFLSAVKENKLEEILDDQIKSEENMEILEEIAELARRCLEMCGENRPSMKEVAEKLDSLRKVLHHPWALHNLEEAESLLGESSIVSSEVVSTGNFSIEKKSLIGLESGR

SEQ ID NO: 30840 - protein, 274 aa, Oryza sativa
MHSLSSRLSTSEPLYSRERPSFPSYSPIPRLSVSEISDDHGGGVVSPQRKLNHLLSDHHPSNGQMFSLDPDRSNDDAGPPLTPKYVEPAGSEGFMRGRSYNIRIDDQVLLRFSPKNSDSTYYFGDMIGGALTFFHGSGTRRCLEVSVTLETSETVNPRVIHPSRRSSPSITKVHSEHYEVVADLHQTSFLFSVPIDGPMSFSTSKVSVQWSLRFEFFTTPEGIDSSRYEHPLLVEKREKGDWVLPITVYAPPLRRQAIHGRNGRSVLVGNLFNS

SEQ ID NO: 30841 - protein, 268 aa, Oryza sativa; identical to SEQ ID NO: 28566

SEQ ID NO: 30842 - protein, 528 aa, Oryza sativa
MEIVDGASPPLHPWSLLLYALGALAALWWAWRALDRFWLRPRRLGRALRSQGLRGTDYRFPSGYLKEFARLLAAALAAPMPPLSHDVASRALPFELAAIKQHGNVCVTWFGPEVRVIVSDPKLFREILANKNGRFGKQKSILWVQNLLADGLTSHQGEKWVAHRRIMNHAFHLEKLKRMLPAFAACSSELISRWQDSVGADGAQEIDVWPEFQNLTGDVISRSAFGSSFSEGRRIFQLQSEQARNVMKMAKALYFPGYRFLPTELNRRTKANAREVRELLKGIITKRESAMKDGHAVNDDLLGLLLETNIKESQEAGSSKPTMTTKDIIEELKLLYFAGSDTTAVLLTWTMVLLSMHPEWQDRAREEVLRVFGKNSPDFEGINHLKVVTMILHEVLRLYPPILLLGREAYEETELGGVTYPPGVTFALPIAGIHHDPDVWGEDVGEFKPERFAEGVSRASKDSPALVPFSWGPRICVGQNFALLEAKMALSMILQRFSFGLSPSYTHAPFPIPTLQPQHGAQIKLTKL

SEQ ID NO: 30843 - protein, 222 aa, Oryza sativa
MLLAISHLKLFLEVYTGCWNATPHVKQWLHERNMTTKDAYKYFVLKAQEIAINLNWIPVNWEETFNSFKENLNPLTVVHNWLGPGVCPKVVEKGFRCIMSNQGVWYLDHLDVPWQDFYTSEPLAGINNTAQQKLVLGGEVCVWGETADTSDVQQTIWPRAAAAAERMWSQLEAISAQDLETTVLARLHYFRCLLNHRGIAAAPVTNSYARRPPIGPGSCFIQ

SEQ ID NO: 30844 - protein, 75 aa, Oryza sativa
MSPYEDSDEEDGGDLEHKEKVRRRQKHIPPWTRKEILDEILLSNRTLDPREIFERKCSFSLSDVLAPPIPQRRLN

SEQ ID NO: 30845 - protein, 65 aa, Oryza sativa
MVDVWLEVESNQYTPALNPILFQCLIRPMMFGAPPDEKVVEENLERLKKVLEVYEARLTKCKPPA

SEQ ID NO: 30846 - protein, 507 aa, Oryza sativa
MQTIHPSSTSYGGAYTAALAQQVFSVVAQALSDSVEVFGDESCYASELVTWATKQVMSFALLVKRHVLSSCAAAGGLRAAAECVQISLGHCSLLEARGLSVAAVLLRQFRPSLEQALYSNIRRIEESTAALAAADDWILTYPPTGIRPLARSSAANLALQPKLSNSAHRFNSMVQESFEDVAPLLSLQLGGSTMDDITKIFNSYVNLLISALPGSMEDEANIDGLGNKIVRMAESEEQQLALLANASLLAEELLPRAAMKLSSMNHSSMDDLRKRGSDKQNRMPEQREWKRKLQRMVDRLRDSFCRQHALELIFTDEGETHLSADMYISMDNTVEEPEWAPSLIFQELYAKLNRMASIAADMFVGRERFATLLMMRLTETVILWLSEDQAFWEEIEQGPKPLGPLGLQQFYLDMQFVIIFGQGRFLSRHVHQVILDIIDRAMAAFSATGMNPDSVLPGDDWFMDVSQEVVSMISGKGRAANGDREINSPTASVSAHSMSSFRSHGSS

SEQ ID NO: 30847 - protein, 320 aa, Oryza sativa
MPSLNKMTGQPRPFFQPAEAAITQQMRKSETPKSSHPLEMAHQRLECAKGASGVHDMPSLNNTSGQPKPFFQSQEAAVPQPRNENTWVYHGRPGDGKYGTTDESRPMSSMGFITKNQQVNAASFAMNLNGQKNVNDNVKSVGSTVMPVQVNTTNRGPDSSRNIFSAFPPAVRENQSIPSAPVAQSWISFGASSESKPTIVSPTFHDSNSGWKMPFANARPDEAKMTAVPQFFRQPVQMVRESPGQNKGLVIFPQLVQTDFSRSQGQPQWQGLVPPMQQKPNKDMLRPDLNIGFPSPGSPPARQSSGINLEAQQPDLALQL

SEQ ID NO: 30848 - protein, 31 aa, Oryza sativa
MTTDNHEFWFMGFVSYDKALKNLYEALQRRA

SEQ ID NO: 30849 - protein, 241 aa, Oryza sativa
MYRDFAQEVYIMRKVRHRNVVQFIGACTRQPNLYIVTDFMSGGSLHDYLHKKNNSFKLSEILRVATDISKGMNYLHQNNIIHRDLKTANLLMDENKVVKVADFGVARVKDQSGVMTAETGTYRWMAPEVIEHKPYDHKADVFSFGIVLWELLTGKIPYEYLTPLQAAIGVVQKGLRPTIPKDTHPKLSELLQKCWHRDPAERPDFSQILEILQRLPKEVRADTEGRQKSKAGFLSALKRNH

SEQ ID NO: 30850 - protein, 365 aa, Oryza sativa
MELITNVSEYEQLAKQKLPKMIYDYYASGAEDQWTLKENREAFSRILFRPRILIDVSRINMATNVLGFNISMPIMIAPSAMQKMAHPEGELATARAASAAGTIMTLSSWSTSSVEEVNSAAPGIRFFQLYVYKDRNIVRQLVRRAELAGFKAIALTVDTPRLGRREADIKNRFNLPPHLVLKNFEALDLGKMDKTNDSGLASYVASQVDRSLSWTDVKWLQTITSLPILVKGVMTAEDTRLAVESGAAGIIVSNHGARQLDYVPATISCLEEVVREAKGRLPVFLDGGVRRGTDVFKALALGASGIGRPVLFSLAVDGEAGVRKVLQMLRDELELTMALSGCTSLAEITRNHVITDSDRIRRSRL

SEQ ID NO: 30851 - protein, 244 aa, Oryza sativa
MASVTARTPVAALRSSASLKSTFLGQSSTRLARAPTTRRNVRAEAKGEWLPGLPSPTYLNGSLPGDNGFDPLGLAEDPENLRWFVQAELVNGRWAMLGVAGMLLPEVLTKIGLIDAPQWYDAGKATYFASSSTLFVIEFILFHYVEIRRWQDIKNPGCVNQDPIFKSYSLPPHECGYPGSVFNPLNFEPTLEAKEKELANGRLAMLAFLGFLVQHNVTQKGPFDNLLQHLSDPWHNTIIQTLSG

SEQ ID NO: 30852 - protein, 223 aa, Oryza sativa
MAADKGVKVFGMWASPMAIRVEWALRLKGVDYEYVDEDLANKSEALLRHNPVTKKVPVLVHDGKPLAESTVIVEYIDEAWKHGYPIMPSDPFDRAQARFWARFAEEKCNAALYPIFMTTGEEQRKLVHEAQQCLKTLETALEGKKFFGGDAFGYLDIVTGWFAYWLPVIEEACGVEVVTDEALPLMKAWFDRVLAVDAVKAVLPPRDKLVALNKARREQILSA

SEQ ID NO: 30853 - protein, 430 aa, Oryza sativa
MVQKEVLKEEITRRNSYVDELKDKLNAVEIENRRLKVDLNGDFTVLGSLQNEVSALEKQTLSLANDCLQSNKLRMEENALSTQVLKTNMRSSGDQNTVRTVKDMELQKLHGTIKALQKVVTDTAVLLDQERLDFNANLQEARKQIEVLKLKEILDDDLIEMNYEQMLKDIQLDLIQISSGNKTGSLGQANKTVAQANEKMLDSHGIVGASSSHVRNDLRPPQSESFERDNYKRPPSELMVVKELSIDKQELPRSITTEPHQEWKNKVIERLASDAQRLNALQSSIQELKTNTEASEGLELESVRYQIREAEGFITQLIDSNGKLSKKAEEFTSEDGLDGDNIDLRSRHQRKITERARKMAEKIGRLEVEMQKVQEALLKYEEQTSTRTSKTMHRRSKVQLVDFLYGRRRDSRKQQRCSPCGCMKANAIDD

SEQ ID NO: 30854 - protein, 219 aa, Oryza sativa
MPDSDNDSGGPSNYAGGELSSPREQDRFLPIANVSRIMKKALPANAKISKDAKETVQECVSEFISFITGEASDKCQREKRKTINGDDLLWAMTTLGFEDYVDPLKHYLHKFREIEGERAAASTTGAGTSAASTTPPQQQHTANAAGGYAGYAAPGAGPGGMMMMMGQPMYGSPPPPPQQQQQQHHHMAMGGRGGFGHHPGGGGGGSSSSSGHGRQNRGA

SEQ ID NO: 30855 - protein, 475 aa, Oryza sativa
MPSLLFAPRSGSSAVNETHEAETQDSLDLTHSDNDNTQHVQHHLQLSPEPSAMTDTSFGVSSDVVTATTTSEQRNHPRHPKKCRFKGCSKGARGASGLCIAHGGGQRCHKPGCHKGAESSTAYCKAHGGGRRCEELGCTKSAEGKTDYCIAHGGGRRCEHDGCPKAARGKSGRCIKHGGGKRCTVQGCIRSAEGKAGLCISHGGGRRCQFPDCSKGAQGSTLYCKGHGGGKRCIFDGCSKGAEGSTPLCKAHGGGKRCMFEGGGVCPKSVHGGTEYCVAHGGGKRCSVAGCTKSARGRTDCCVKHGGGKRCKVDNCSKSAQGSTDFCKAHGGGKRCTWGTGCEKFARGRSGLCAAHGTLAAKQQERDAANNGAGMIPPGLFSGIVTVAATSSMTNEYSSSGISTASDCDGTVRSQAMMIPPQVLVPRSMMPSSSSEPTVHGGREGGCAVPEGRVHGGGLLSLLGGSFRNADMDKL

SEQ ID NO: 30856 - protein, 202 aa, Oryza sativa
MEKWSRGLSCRAAICGIVVLLCATAFSCSLAAEFRKVKEKDMKLDGSLCSLPKSSAFELGVAAIAFLSVAQLVGTTAAATTMCAASKRSKSSTTRRRAASVAILVLSWVSFALAVVLLATAASMNHGQRYGRGWMDGDCYVARNGVFGGAAALVVVTALLILGLTSTTKSSSCATSAASATTTIRLDAAATDAEQASGRSKQ

SEQ ID NO: 30857 - protein, 445 aa, Oryza sativa
MAAAAAAAHVLVFPFPAQGHINCMMHFAGDLLEHMESIRTKGSVAYRRVLLASLVRAGDDGSTGVQFPPVTCVVADGIMPLAIDIAEEIGVPALGFRTVSACSFLAYLSIPRLFELGELPFPAGGDLDEPVRGVPGMETFLRRRDLPSFCRGGGGGDSQNDPMLQTVNEVTAHSRKARALVLNTSASMEGPALAHIAPHMRDVFAIGPLHTMFPAPAAAGSLWRADDGCMAWLDGQPDRSVVYVSLGSFTVISLEQFTEFLHGLVAAGHAFLWVLRPDMVGASQSAALREAAAAAGDSRARVVEWAPQLDVLRHRAVGCFLTHAGWNSTLEAAGEGVPTVCWPFFADQQINSRFVGGVWRTGLDMKDVCDAAVVERMVREAMESAEIRASAQALARQLRRDIADDGGSSAAEFQRLVGFIKELSQSMADSKSDDLLTAGIRNALN

SEQ ID NO: 30858 - protein, 85 aa, Oryza sativa
MSKMAEEKVLAAPATVDGGMQSSGDLQASSAAAARVRPVETLLRAAPLGLCVAAMAIMLRNSVTNEYEEEDDHPDDHHHHDIPSY

SEQ ID NO: 30859 - protein, 292 aa, Oryza sativa
MIDDTVNSIVSDMLKWPHRLVVPLGVNVDTSELELKPQGRLTVTVVKATSLKNKELIGKSDPYVILYVRPMFKVKTKVIDDNLNPEWNETFPLIVEDKETQSVIFEVYDEDRLQQDKKLGVAKLAVNSLQPEATSEITLKLQQSLDSLKIKDTKDRGTLHLQVTYHPFSKEEQMEALESEKRAIEERKRLKEAGVIGSTMDALGGAASLVGSGVGLVGTGIVGGVGLVGSGIGAGVGLVGSGVGLVGSGIGAVGSGLGKAGKFMGKTVAGPFSMSRKNGSSSTAPQAEQPSA

SEQ ID NO: 30860 - protein, 432 aa, Oryza sativa
MLAIFPKLPKRFPFQLLFLPSQHARRRSHMADPSRSSPTAAAAGDALLAAAAAPGDAPDATALAVAADADAEFGFQRAELGTEKLAGTVQFHERHVFLCYKGPEVWPSHVEAAESDRLPRLLAAAIKTHKSDLKKKTKLTICEGEDGTESSNGDVLIFPDMIRYRGLTHFDVDNFVQEVLVKDTEWLPGSPEAIKGSYVFVCCHASRDKRCGVCGPALIKRFKEEIGVQGLADQVSVSACSHVGGHKYAGNVIVFSADAKGEVTGHWYGYVSPDDVPVLLHKHIGQGEIVDHLWRGQMGLSEEEQRKALESKHVTNGVTEDGAHESPEETTNGSACNPVAAGGCCQGNGGFTCCQSDLPKEDKSITAEQNQKSSEKGADKECAAGSKKRHMKMCSMPTWFETWETADTYAALGIVAAAASVFVAFRIYKNLN

SEQ ID NO: 30861 - protein, 30 aa, Oryza sativa
MLHRKIPASFLDKAEEFFCSENDTAANITN

SEQ ID NO: 30862 - protein, 346 aa, Oryza sativa
MFCVRLMQLEEEAKRDPTCALNMERLLEARILSAVDLRRSLGLPSVHTNAYRLINSEGDRLSGLIVDIFADVAVVASSAAWVEKYRHEIQFLVNKVSDVNHIKWRSSTDILKEEGLDVSEQKDPESSSHCGTVEVMENDVLYLVSLEGQKTGFYADQRENRHFISTLSKDQRVLDLCCYSGGFALNAAKGGANNVIGIDSSASALDLANKNIILNKLDTQRISFVKEDATAFMKGAISRNEVWDLVILDPPKLAPRKKVLQSASGMYRSLNALAMQVVKPGGLLMTCSCSGAMTQSGLFLRTIQGAASMTGRKVTVLRQAGAACDHPVDPAYPGGRYLSNYLLRVT

SEQ ID NO: 30863 - protein, 356 aa, Oryza sativa
MASRTSATAGMLLLAAAAALVCSSAAARMPPLAKGLSLGYYDASCPQAEAVVFEFLQDAIAKDVGLAAALIRLHFHDCFVQGYDASILLDSTPTEKSEKLAPPNKTLRKSAFDAIDDLRDLLDRECGDTVVSCSDIVTLAARDSVLLAGGPWYDVPLGRHDGSSFASEDAVLSALPSPDSNVTTLLEALGKLKLDAHDLVALSGAHTVGIAHCTSFDKRLFPQVDPTMDKWFAGHLKVTCLVLNTNDTTVNDIRTPNTFDNKYYVDLQNRQGLFTSDQGLFFNATTKPIVTKFAVDQSAFFDQYVYSVVKMGMIEVLTGSQGQIRKRCSVSNAAAAGDRAWSVVETVAEAAESLVL

SEQ ID NO: 30864 - protein, 174 aa, Oryza sativa
MFDLGQRAYGRGMYGRSIEFLEAALTIIRPSSLLGGEIQIWLAMAYEANRRHKDCIALYKELESTHPMISIRRQAAELRYISEAPKLKISNDEVVTIPQIGSSWDWYAGTWSDKIKEQEDKKRKMVAASSQVEPSPNIFGDLSFLRPPTEWTRSAWVIVTLWIVLIGTAIYLQR

SEQ ID NO: 30865 - protein, 148 aa, Oryza sativa
MRGSLEVHAIGRHAASPCALRLKALPALDMMRYQRLSPDCLPLANGGGGGSGSVTRKPASRSCKDDDGGMAVAADSSRLSSYLPSSQLDSKPLRARAPQPSSSSAAAWSPARDHAHAHHNHHHHHHPSDSSDTASPSSNGAGAPSAWD

SEQ ID NO: 30866 - protein, 25 aa, Oryza sativa
MPNHSFLPTRLAMLGYSVYYDLLLL

SEQ ID NO: 30867 - protein, 42 aa, Oryza sativa
MFTIFVNFLIWVTCLLIERNSRNINNVCLQAWCQRVMVKINV

SEQ ID NO: 30868 - protein, 423 aa, Oryza sativa
MDEPTSGLDARAAAIVMRAIRNTVDTGRTVVCTIHQPSIDIFESFDELFLMKRGGEEIYVGPVGQHSCELIRYFESIEGVSKIKHGYNPSTWMLEVTSTVQEQITGVNFSEIYKNSELYRRNKSMIKELSSPPDGSSDLSFPTEYSQTFITQCLACLWKQSLSYWRNPPYTAVKYFYTIVIALLFGTMFWGVGRKRSNQQDLFNAMGSMYASVLFMGVQNSSSVQPVVSVERTVFYRERAAHMYSPLPYALGQVAIELPYILVQSLIYGVLVYAMIGFEWTAAKFFWYLFFMYFTLSYYTFYGMMSVGLTPSYNVASVVSTAFYAIWNLFSGFIIPRTRIPIWWRWYYWVCPVAWTLYGLVTSQFGDVTDTFDNGVRISDFVESYFGYHRDFLWVVAVMVVSFAVLFAFLFGLSIKIFNFQKR

SEQ ID NO: 30869 - protein, 275 aa, Oryza sativa
MLVSPSPYRKYFGASGARKKTAGFLSIPQPKKPPNKTAKLARSLRAISPRDDAMATASSLFLASPVATAPTARARSTPSASPARPSLRLRRPSTLAAAAVQAEHQPAVAAAPKPPALPFRVGHGFDLHRLEPGLPLIIGGIDIPHDRGCDAHSDGDVLLHCVVDAILGALGLPDIGQIFPDSDPRWKGADSSVFMREAVKLMHEAGYELGNLDATLILQKPKISPFKETIRSNLCDLLGADPSVVNLKAKTHEKVDSLGENRSIAAHTVVLLMRK

SEQ ID NO: 30870 - protein, 58 aa, Oryza sativa
MDSSSGSQGKNSKTSDGCETKGLHILNFCLFPVSLFTFASLNNRYIAFSFPNSYHHVQ

SEQ ID NO: 30871 - protein, 339 aa, Oryza sativa
MFMVLCGQTVATLLGRLYYNSGGNSKWMATLTQSAGSPLLAILLLFTPAPAADEPRPAAAKMAPIYVGLGIIIGFDNLMYSYALQYLPVSTFSLVAATQLGFNSVTSRLINAQRFTVLIANSVVVLTFSAALLGIGASSDETASSVPRGKYPAGFALTLAASAVFALILSLFEATFEKVVRTRTLRWVLRAQLWTNVVASTVSAVGLLASGDWRTIPAEMAAFKDGRARYVATLVGTAVSWQVMAVGSLRLIVRVSSLFANVTGTLSLPLVPVFAVALFGDRMTGIKAVSMLMAVWGFLSYAYQQYIDGRRAAGAGKGRAAAECRVCAARAGSDPDSPA

SEQ ID NO: 30872 - protein, 431 aa, Oryza sativa
MKRGTKVHITGAGDFSLSGVTSLADPCPLPSAAKKRGLRDKEKLFYAPMSGLGDLLYDTDAVYININPHLVQFSKTGENDASKKQGKGQDVGVTLVKTLQNPRYSLNEKLDQSFINLFGRKPAAQSEDISGNQNDQGDANILEEADGNNICNANTLESNDHSYSECSSDSEHDNDEATQQNDHEVGLREEVEFCNGRMRRKAVSANFKDDDDDEGAEEDDVDSENSGDDQLSEGSADDSEESLDSDDETENNSKWKESLLARTLSRRSANLMQLVYGQASKKLDEGNDSSAEESSDEEFFVPKGQKKQAKNESTSFDDMDAEDYSKFFKTELRDWSDEDLIKSIRDRFVTGNWSKAALRGQEINENDVDDEEVDGDFEDLETGEVHTSKAYENTSGNGGTHKQDDLAMEERRLKKLALKAKFDAEYPFLHF

SEQ ID NO: 30873 - protein, 369 aa, Oryza sativa
MASSSSSWLVLLSAALCIGALPASHAARAFFVFGDSLVDNGNNNYLITSARADSPPYGIDTPDHRATGRFSNGKNMPDIISEHLGAEPVLPYLSPELDGDRLLVGANFASAGIGILNDTGVQFANIIHIEKQIRYFEQYQDRLRAVVGDEQAKKVVAGSLALITLGGNDFVNNYYLIPYSPRSREFSLPDYIRYILSEYKQVLRHIHALGARRVLVTGVGPIGCVPAELALHSLDGGCDAELQRAADAYNPQLVAMLAELNAEVGGDVFVGVNTKRAHDDFIEDPRAHGFETSTEACCGQGRFNGMGLCTLVSNLCADRDSYVFWDAFHPTERANRLIVQQFMHGSLDYITPMNLSTILKLDQQAQLRN

SEQ ID NO: 30874 - protein, 143 aa, Oryza sativa
MIVCVAVVGHQNNPLYLQSFTEADDALKLHHVVHCSLDVIDERVNNPKRNAPALNETFLGLLYPTENYKVYGYLTNTKVKFIMVTTDLDVKDADARNFFRKFHAAYVDAVSNPFHVPGKKIASRSFGARVSTIVKSFGSGTTA

SEQ ID NO: 30875 - protein, 139 aa, Oryza sativa
MQVQIMWMTTGIVPMMFPGTHQLMPPMGMGLNTACMPGAQAQGLNQMQRTTYYMNNSLPNQMPQIPSPAMNAPSVPDDMQNDNRIRGPRNPFLHCNDTLTATAQVPGLFTYGSQIAEQNEIQELLSGAVIPSSSDGTIK

SEQ ID NO: 30876 - protein, 460 aa, Oryza sativa
MDFELRKAREKLEREQRERVQRAKDKADRERRAKAEAARRRDALEASHRERRLDAARAQEEAQQKMEEVMQLGKGISFLHMFEALRYDGPGDKIKLPPSSFKELSDEGALDKGPMYFRLSKVRDSVPGAPQDNDADEATCCGVLEFTAREGSAELTPHVWNNLFRGDSPDVPLIEVRYVSLPKGTYAKLKPEGVGFSDLPNHRAVLETALRNHATLSENDFVVVNYGQLQYKLKVLELKPASSVSVLETDVEVDIEGPDSVLDNVENQHVLVPLETGKVESGVVEEGKFRYYKFLVDEGMGEKVASRHANIEVKIETYTSGGDTDIYVSRHPLVFPTQHRHEWSSHEMGSKVLILKPRDASLSSGTYSIGVYGFKGTTKYQLSVAIKDVLNGQRIGEQASASSSVDVDSVVCKNCKRYISNRTSLLHEAYCVRHNVVCMHDGCGVVLRKEEATDHVHCNK

SEQ ID NO: 30877 - protein, 220 aa, Oryza sativa
MSAAAGGYRAEDDYDYLFKVVLIGDSGVGKSNLLSRFTKNEFSLESKSTIGVEFATRSLQVDGKVIKAQIWDTAGQERYRAITSAYYRGAVGALLVYDVTRRAAFDNVGRWLRELRDHTDPSIVCMLIGNKSDLRHLVAVSTEDGKEFAEAESMYFMETSALDATNVDNAFAEVLTQMYQIVNKKPVEAPEDGSAGPGKGEKINVKDDVSAMKRVGCCSN

SEQ ID NO: 30878 - protein, 156 aa, Oryza sativa
MSRRGTAEKRTAKSDPIFRNRLVNMVVNRIMKDGKKSLAYQILYRAVKKIQQKTETNPLLVLRQAIRRVTPNIGVKTRRNKKGSTRKVPIEIGSKQGRALAIRWLLEASQKRPGRNMAFKLSSELVDAAKGGGGAIRKKEATHRMAEANRALAHFR

SEQ ID NO: 30879 - protein, 188 aa, Oryza sativa
MVFLPIYDRIFIPVARRYTKNPSGITTLQRIGVGLVLSIITMIVAAMVEMRRLRIARGFGLVDKPEAVVPMSFLWIVPQNILAAISDMFAVIGLQESFYGEAPESLRSFSMALFLSIIGVGNFISSFIVYAIDRVTSSFGDSWFSNNPNRGHVDYFYLLITVLNALSLACFLYFAKMYEHRKKVISVQ

SEQ ID NO: 30880 - protein, 123 aa, Oryza sativa
MTRLNARVQKVRDELEQLLDDDDDMADLYLSRKLAGAASPVSGSGGPNWFPASPTIGSKISRASRASAPTIHGNENDVEELEMLLEAYFMQIDGTLNKLTTLREYIDEQKITLISSLTTTVIS

SEQ ID NO: 30881 - protein, 453 aa, Oryza sativa
MHSTGMEMEVEVAGDDEAVPEAPERSVVLISAGASHSVALLSGGVVCSWGRGEDGQLGHGDAEDRPVPTVLTAAFDDAPGGVASVVICGADHTTAYSDEELQLYSWGWGDFGRLGHGNSSDVFNPRPIQALQGVRITQIACGDSHCLAVTVAGHVHSWGRNQNGQLGLGNTEDSLLPQKIQAFEGVRVKMIAAGAEHTAAVTEDGDLYGWGWGRYGNLGLGDRDDRLIPEKVSSVNGQKMVLVACGWRHTITVSSSGSVYTYGWSKYGQLGHGDFEDHLVPHKLEALKDTTISQISGGWRHTMALAADGKLYGWGWNKFGQVGVGDNEDRCSPVQVNFPNEQKVVQVACGWRHTLALTEAKNVFSWGRGTSGQLGHGEIVDRNIPKMIDALSSDGSACKQLESSKAVPMSAKVWVSPSERYAIVPDEKAGKGIPAGNGTETHVPQGDVKRMRV

SEQ ID NO: 30882 - protein, 155 aa, Oryza sativa
MHDDPRIKLSYRYSSLCKMFVKIACRVAKSEETYSMSTNCAEKLAEDIENFLKIRGDPDLDSSPSPQVAKGNQIMASKPKGIELKRKEICGSARPIGGLEKSSQNGKKKKNDDSPVEVVELQPVTEMQPQPYATVLGNLEVPNDQAFLHVSQSAF

SEQ ID NO: 30883 - protein, 482 aa, Oryza sativa
MGSRFPSHQLSNGLYVSGRPEQPKEKAPVICSTAMPYTGGDIKKSGELGKMFDLHVEKSRKSGPLGNQPSRNTSFGGAGSNSGPVSNALGRSNYSGSISSSVPGAGGSARAKSNSGPLNKHGEPGKKSSGPQSGGVTPMARQNSGPLPPVLPTTGLITSGPISSGPLNSSGAPRKVSGPLDPSVSMKMRATSFAHNPAVTNLNADDGYSIKGSIPKTILWMVILLFLMGFIAGGFILGAVHNPILLVVVVVIFCFVAALVIWNICWGTRGVTGFVSRYPDADLRTAKNGQYVKVTGVVTCGNFPLESSFQRVPRCVYTSTCLYEYRGWDSEAANTEHRQFTWGLRSMERHAVGFYISDFQSGLRALVKTGYGARVTPYVDESVVIDINPDNKDMSPEFLRWLRERNLSSDDRIMRLKEGYIKEGSTVSVMGVVQRNDNVLMIVPPSEPISTGCQWAKCILPTSLDGLVLRCEDTSNIDVIPV

SEQ ID NO: 30884 - protein, 438 aa, Oryza sativa
MIHQLLSLRDAARASLLTRKWLRVWRFYPNLEFTTKALGLKKRIHKVQRRAKFVSCVNTVIRHHAGTGVKSFIIKKNLNNQKYTHYLDRWMYFAVSSGAKELTLDLRPQRFIHYRNIQYNFPSSNFATPMPTSVEHLKLLFCYLRPSPTFFGLSNLKTLELSFVRITKEDLESLLSYTFSLQELKLSQCPNIDHLRIPDVPSKLNYLDIDLCWIRALEIHIQNLVIFNYHGSVRFRIIQGEGSLFKEARFQFSCGDAIEYAITEMAPALPNLETLFLIGFSKMVIPTRDPRHRFHCLKHLQLKMIMLSKKYNNLCLVSFLDAAPFLESLIVHVCNGSLYYPGKKTDLRRLEKREPHKNLKFAKMTGFDGERSSIELALHILESSTNLECLILDPRKYKSEWKYIYEENLRDVQWRVHNFTISEYIAEAVPSHVKLLFS

SEQ ID NO: 30885 - protein, 142 aa, Oryza sativa
MASLVAVQPVAVKGLAGSSISGRKLAVRPSPRALCRTTRRPRAAVVAKYGEKSVYFDLEDIGNTTGQWDLYGSDAPSPYNPLQSKFFETFAGPFTKRGLLLKFLLLGGGSLVAYVSASASPDLLPIKKGPQLPPTPGPRGKI

SEQ ID NO: 30886 - protein, 387 aa, Oryza sativa
MKVPFVQLMRVQHRIRWSLMKMGARTHYKADIDATVLCGICRRDCYVAHIMCNCRIDAICLCHEEEIRRCPCSCDRVVFVRKDIFELETLSKKFEEESGILDAVKKQMARRDGASQHSNFFDCTDHEAEYYPYCNIHIDPSPEIYSISETNFVGYDLNNPHPAASTVTFSFVPHEYSTQSDECTSSNRRALSSSCLENTITPENAISNACQLSTPDQTCLSDKLAAHDTDDSDCEIFRVKRRSGLTPEKRHMEDGTTNFTGNQVLKRLKKINAHDRQEHKLPELSCGARSEPVHTDDCIHCVDFISEDGDDFIAPTKLKMIHQLDANIVEDEVASSQKYNSCNYQSPSIELGPKRLKIRGPSFPSRISELEVSCRFQDNDLGSQHAR

SEQ ID NO: 30887 - protein, 399 aa, Oryza sativa
MDQMAERQHKKRKPEKMAGARTSGHDKEEEKKVKAPSVYLVVGHEVSWATYSVFKVDPYTAAKRGGGGGDEEDPAPVPIPRRLARISAKFCMSFAPVPVRSWIVGVGGDSADEDYAPETIVFDTETRAVIRGPNLLSTKLHPVVLTIGHKIYALARYPSVTGQLDFVPWFEVLDLSQARVVDGHLESCEWKPLPRPPFFPWDLTPLQYLSPPMVTVESYVALASCILVSLSQQEGTHMFDVDKEQWSKLDDNSLPFVRGAVPHGPIFLGLSRAKKIITAYNITVVCQPRSGGTAPSLSIVEFPVVSDMEEEILSTPIFLSLGSPGFCSLKSWSDHPTTDDPCTRARIKLMAYHTEEPISQEYIESSHGLLIPNQWKQVYEICDSSRELIWQCLITAMSL

SEQ ID NO: 30888 - protein, 501 aa, Oryza sativa
MAAAALLLLAAAAAAVVVAMALRWLLLLGGPAAGRLGKRARMPPGSTGLPLIGETLRLISAYKTPNPEPFIDERVARHGGVFTTHVFGERTVFSADPAFNRLLLAAEGRAVHSSYPSSIATLLGARSLLLTRGAAHKRLHSLTLTRLGRPASPPLLAHIDRLVLATMRQWEPAATVRLMDEAKKITFNLTVKQLVSIEPGPWTESLRREYVKLIDGFFSIPFPLAYFLPFTTYGQALKARKKVAGALREVIKKRMEEKAENGGSIGDDEGKKEKKDMVEELLQAEGGSFSEEEMVDFCLSLLVAGYETTSVLMTLAVKFLTETPAALAELKEEHANIRDMKGKNQPLEWSDYKSMPFTQCVINETLRVGNIISGVFRRANTDIHYKDYTIPKGCKIFASFRAVHLNNEHYENARTFNPWRWQINNKLQNAVGANIFTPFGGGPRLCPGYELARVVVSIFLHHLVTRFSWEETEEDRLVFFPTTRTLKGYPINLRLLSESIC

SEQ ID NO: 30889 - protein, 77 aa, Oryza sativa
MREYDCSCSHPSKHLHSDRGALQSLLFSLSSRMYIFHGRGVVDVSCWPHCCIDLSASNCDCYCCFVALVVELAFHVC

SEQ ID NO: 30890 - protein, 11 aa, Oryza sativa
MCKCKCNELYE

SEQ ID NO: 30891 - protein, 262 aa, Oryza sativa
MAVVASRCTGLLLPDLGASLAGFRRRRSTPASSLSFRPRRARRRLGSLSCIAPPDSAEPQTDEPAAKDDSTEDKAEASSASQDAGNPTFPNKDLSRRIALASTIGAVGLFAYQRLDFGGVSLKDLAANATPYEEALSNGKPTVVEFYADWCEVCRELAPDVYKVEQQYKDRVNFVMLNVDNTKWEQELDEFGVEGIPHFAFLDKEGNEEGNVVGRLPKQYFLDNVVALASGEPTVPHARVVGQFSSAESRKVHQVADPRSHG

SEQ ID NO: 30892 - protein, 392 aa, Oryza sativa
MILAAACWPHWAQVPKDVSLCKPDIHALPSSNVPPKLVILHMNMAFLVYEDIMRMTENLSEKYIIGYGASSTVYKCVLKNCKPVAIKKLYAHYPQSLKEFETELETVGSIKHRNLVSLQGYSLSPAGNLLFYDYLENGSLWDVLHAGSSKKQKLDWEARLRIALGAAQGLAYLHHDCNPRIIHRDVKSKNILLDKDYEAHLADFGIAKSLCTSKTHTSTYVMGTIGYIDPEYACTSRLNEKSDVYSYGIVLLELLTGKKPVDNECNLHHLILSKAADNTVMEMVDPDIADTCKDLGEVKKVFQLALLCSKRQPSDRPTMHEVVRVLDCLVYPDPPSKPALPPALPQSSTVPSYVNEYVSLRGGSTLSCENSSSASDAELFLKFGEVISQNTE

SEQ ID NO: 30893 - protein, 71 aa, Oryza sativa
MAEEKKHHHLFHHKKDGEEESSGVVDYDKEKKHHKHLEPRWAPRGSPSTSTTRRRTPRSTPPTNTRSIPIE

SEQ ID NO: 30894 - protein, 31 aa, Oryza sativa
MPRRISGVTLKVMLKMRSHPASHPPCNQHLE

SEQ ID NO: 30895 - protein, 592 aa, Oryza sativa
MVELLGVKLIAVMVGYCWTELQENDLHFVFHTVQKWIESAVLLVEEMTDAINDAVINQKSNEDTLEKLKLVVSSIDELTLSFGEFALVTLCHLNHLVDIQETENFQSLQIIKSGDFADRNNNMMESMLRLFLASGVSEAIAKSSCEEASSIIASSRVAYMHFWELVASFVIYASPQTRRCALESMELWGLAKGSVSGLYSILFSSQPISHLQFAAYSLLLSEPLCQFSLIKECSLGSNRPLTQESCMGQSIELMPDSEKTLDLREELSSLIEMPTSELLQTDLLAHDRVDAFIAWSLLLSHLQLLPPASITRERVLQYIQDKISPCILDCIFQHIPLRTGAPCGKKKDAELMPEAEVAAQASKNAIITCSLLPCIESLWPVGTWQMASLAGGLYGMMIRLLPSYVRTWFTSLRDRSLSSSIESFTRAWCSPPLLLDEFSQVKDSLYADDNFSVSVNRSAYEIVATYKKEETGIDLVIRLPSCYPLRHVDVECTRSLGISEVKCRKWLLSLTAFVRNQNGAIAEAIHTWKSNFDKEFEGVEECPICYSILHTSNHSLPRLACKTCRHKFHGACLYKWFSTSNKSTCPLCQTPF

SEQ ID NO: 30896 - protein, 398 aa, Oryza sativa
MSASSRFDLRASSHPHQHAIGGGGGGGGMSDGGGGAAAAFADAGNLEHCARYLNQTLVTFGFPASLDLFATDPVSIARTCNCIYALLQQRQRDIEFRESTNDLRQRMQSDISRLVAKIERMDAQLAAKDRELATLTRTEAKNTATLKAQIDKLQQERDEFQKMVIGNQQVRTQQIHEMKKKEKEYIKLQEKLNQVLMEKKKESSRSGMEIMNLLQKEGRQRGTWSGKKNDNDYYKMIVDAYEVKKQELMQENADLRALLRSMQMDMREFLNAPNGVPQPAVVGNGRQEAGSPQSPLGGKTDVFDLPFHMARDQIEESLRTKMASIKARMTQLQDAQKGAEVTSEATERELELEAQLVEARSIIQEQASLMSKHFTKSDKPRRLSGLDAEREAVAAQEV

SEQ ID NO: 30897 - protein, 30 aa, Oryza sativa
MDVMRFRLTVCVVVIVSCMHGSGCMGEGVS

SEQ ID NO: 30898 - protein, 358 aa, Oryza sativa
MVNVLEGLKLYKGYVDLTEIGKVLSFVNEAKTMRRKPGLEGQTVVVAKRPMKGHGREIIQLGLPITEGPPEDEHLREVKVDPIPGVLQNLFDSLVHQKVVPSSPDYCVIDIFNEGDYSHPHHHPPWYGRPICTLCLTDCDMVFGHVIAADSRGDHAGPLKLSLSTGSVLVFEGKSADIAKRALPATSKQRILLSFGKSVSRKHVQSESSLLITPPLTPPPMPWAAPLRPGNIAIHPSSPKQLVYNPSNRVPAVSTPGLHHIPSNGIQTVFVAPLPITPKAVPFASAVTLPNSTAAWIAEAAPRPASPRLPLQGTGVFLPPGSGNPPPAQKLGVKHADAKPFFSTRIICLFIWCKCSCT

SEQ ID NO: 30899 - protein, 112 aa, Oryza sativa
MASFSEAPPGNPKAGEKIFKTKCAQCHTVDKGAGHKQGPNLNGLFGRQSGTTPGYSYSTANKNMAVIWEENTLYDYLLNPKKYIPGTKMVFPGLKKPQERADLISYLKEATS

SEQ ID NO: 30900 - protein, 99 aa, Oryza sativa
MKVSTVAVLVMVAMLMMSVAVYSDDASSHGVTEKQVAAAANAHGSNGGSVVTEAASTDSTAGASGTSSAGASGTNIDSNYYVTMKGYMEYMRKYGGKQP

SEQ ID NO: 30901 - protein, 58 aa, Oryza sativa
MMHFAAHLILYKSHVFLVSNISSFLPLTIPFPTYRLNIMLFVRLFILESSLVLMLLAR

SEQ ID NO: 30902 - protein, 500 aa, Oryza sativa
MAMMAMGAASWAPIPAPARAAAAFYPGRDLAAARRRRGAAARRPFVFTPRAVSDSRSSQTCLDPDASTSVLGIILGGGAGTRLYPLTKKRAKPAVPLGANYRLIDIPVSNCLNSNVSKIYVLTQFNSASLNRHLSRAYGNNIGGYKNEGFVEVLAAQQSPENPNWFQGTADAVRQYLWLFEEHNVMEFLILAGDHLYRMDYQKFIQAHRETNADITVAALPMDEERATAFGLMKIDDEGRIIEFAEKPKGEKLKSMMVDTTILGLDTERAKELPYIASMGIYVFSKDVMLKLLRQNFPAANDFGSEVIPGATEIGMRVQAYLYDGYWEDIGTIEAFYNANLGITKKPVPDFSFYDRSAAIYTQPRYLPPSKVLDADVTDSVIGEGCVIRHCTINHSVVGLRSCISEGAVIEDSLLMGADYYETETDKKALSETGGIPIGIGKNAHIRKAIIDKNARIGENVKIINVDNIQEASRETDGYFIKSGIVTVIKDALIPSGTVI

SEQ ID NO: 30903 - protein, 484 aa, Oryza sativa
MVMDMLGPSLWDVWNNNSHSMSVEMVACIGIEAISILEKMHAKGYVHGDVKPENFLLGPPDTPEGKKLFLVDLGLATKWKDAGTGKHVEYDQRPDIFRGTVRYASVHAHLGRTGCRRDDLESLAYTLIFLLRGRLPWQGFQGENKGFLVCKKKMATSPESLCGIGPPPFRQFVEYVVNLKFDEEPNYAKCIALFDGIVGPNPDGRPLNTDGAQKLVYQVGQKRGRLTAAEDEEQPKKKIRMGMPATQWISVYNARRPMKQRYHYNVADDRLAPHIQKGNEDGLFISSVSSCSDLWALIMDAGTGFTAQVHELSHYFLHKEWIMEQWERNYYITSLAGSNNGSSVVIMSTGTPYAQQSYKVSDSFPFKWINKKWKEGFYVTALATAGSRWAVVMSRNAGFTHQVVELDFLYPSEGIHQRWDSGYRITATAATCDQVALILSIPRRKPNDETQETLRTSAFPGQHVKEKWAKNLYLGSICYGRSVS

SEQ ID NO: 30904 - protein, 120 aa, Oryza sativa
MHERKAEMARQSDAFIALPGGYGTMEELLEMITWSQLGIHDKPVGLLNVDGYYDPLLALFDKGAAEGFIKADCRQIIVSAPTAHELLRKMEQYTRSHQEVAPRTSWEMSELGYGKTPEES

SEQ ID NO: 30905 - protein, 228 aa, Oryza sativa
MLAKDKTVEERRIAICIFDDVAEHCREAAVRYYDTYLPSLLEACTSENPDIRQAAVYGIGICAEFGGSAFRPHTGEALSRLYNVIKHPNALDLDNAMAYDNAVSALGKICQFHRDGIDASQVVPAWLSCLPIKNDLIEAKIVHEQLCTMLEKSDRELLGHNNQYLPKIVSIFAEILCAGKDLATEQTFSKMVNLLRQLQTTLPPSVLASTWSSLQPQQQLALQSVLSS

SEQ ID NO: 30906 - protein, 358 aa, Oryza sativa
MVTARKGRGGRGPPRPRVVDGGGGSMVSRVAVLAFCVAGIWSAYITQGVLQETLSTKRFGPEARRSDHLAFLNFAQNVVCFVWSFIMIKLWSSGGSSSAGRAPLRKYWGVSITNTVGPAMGIEALKFISYPAQVLAKSSKMIPVMLMGTILYGVKYTFPEYICTFLVAGGVSSFALLKTSSKTIKKLANPNAPLGYTLCFLNLAFDGYTNSTQDLIKSRYPKTNPWDIMLGMNLWGTIYNAVIMFVAPLLFSNWPYANGFEAVRFCQENPEVAWDILLFCLCGAVGQNFIFLTISRFGSLTNTTITTTRKFMSIVISSVISGNPLSLKQWGSVVMVFSGLSLQIFLKWKRKKVRDHKE

SEQ ID NO: 30907 - protein, 122 aa, Oryza sativa
MKRPGSSTAPAHSACRSPPTSAAPTAWLSSTARRNITRHAPVRSRRGSCSCRREPSLPSPARPTARRRCARRRPSASPSASRVVDQAGAQAAPWPAAAPNADADAVVRNAEPVPLAGEELIN

SEQ ID NO: 30908 - protein, 58 aa, Oryza sativa
MIVRAPELQRRRGGLCFGCSLGLQKECKCSGGGAGAGAGNNFLGLRAGMLDFRSLPMK

SEQ ID NO: 30909 - protein, 123 aa, Oryza sativa
MREVYQIEPRVEHYSCLVNLLGRAGLLDEAERLIGDVPINKDAMPLFGALLTACKAHGNVEMSERLTKRICEQDSQITDVNLLMSNVYATASRWEDVIRVRGKMAHPTVKKNAGCSLIEVKGY

SEQ ID NO: 30910 - protein, 358 aa, Oryza sativa
MWKMSQVDEWKPMIAMLFFDLISAVTTALLKKALAEGLDRLVLITLRQLVATIFLAPIAYFKERGKRPKLTLEILVYLFFSAALGAALSQYTFFYGLQYTTATFAITFTNMSPVITFLIAALLRVESLNMKNKAGAAKIIGTLMSFAGVMLLTLYKGVALTHQVVSSVSSDHHHAEIEEPSKKSWTLGTVALLANCLCFSFWLLLQTKLTKKYPALYSSTAYMFLISSLQGGALTASIQRRASVWVLTRTVEIVAVLYTGIMGSGVGYVLMTWCVEKRGPVFTSAFIPIIQIMVAIIDFFYLHENLYLGSVVGSILMILGLYILLWGKNRDTSAAASAKEAKEEEEDKEKQVKPLGPN

SEQ ID NO: 30911 - protein, 258 aa, Oryza sativa
MNEQPVVSLKASTCGLDVLDDILLGYKVDWPVNIVITEEALKAYAEIFRYLVQVRLAVFSLTEVWRFLKELTQLISRSSHNRPDVLKELSSVMKLRHQVYHFLSTLQQYLHCHLSDISWRRFQHSLQHQVRDMLDLEYVHLCYVTDALHICFLSAETKPIAAIINSILQQALELRSCFKSLNYISESTVKQLNLDSLINFSQVDAIRTKFEGNIKDLYILHLKSSKYGEIGLYRFWGYLNYNEYHSLMINKDMGCFYF

SEQ ID NO: 30912 - protein, 273 aa, Oryza sativa
MAETLDMTLDDIIKNNKKANPSSGRGRRGSAAGGGGGGGGGVGGGGGGGVGPTRRPFKRSGNRAGPYQPPKAPESAWQHDMYSDVAAGGGGGSGGGGRVSAIETGTKLYISNLDFGVSTEDIKELFSELGDLKKYVIHYDRSGRSKGTAEVVFARRGDAVAAVKKYNNVQLDGKPMKIEILGTNTPTAAAALPANNGGYVRNVAKSAPRGGPAGLPQGRPRPRGGGRRRGGGGGSGGPGGSGGRRGKERSQPKSAEELDADLEKYHADAMQTN

SEQ ID NO: 30913 - protein, 363 aa, Oryza sativa
MSSLCPFAKLASAGATCPVKSSSDNKTTINHTDDDDDDNEKTGNANTDPRVVPPKCPFGYDSNTFKLGPLSCMVCHALLHQSSKCTPCSHKFCKACILRFKDCPLCGADIQGIEPDDELQGLVDRFIDGHARIKRSHAAGDGEAASDNKTKVIYEDVSMERGAFLVQQAMRAFRAQNIESAKSRLSMCAQDIREELKSKQDNQELCSQLGAVLGMLGDCCRTLGDAPSAITYYEESAEFLSKLPKKDLELVHTLSVSLNKIGDLRYYDGDLHSARSYYARSLDVRRSAAKEHSAVASQVIDVATSLAKVADVDRNLGNESMAVEGFEEAIKCLENLKLESGEASLEQRRLSVLDFLQKQLDDK

SEQ ID NO: 30914 - protein, 64 aa, Oryza sativa
MKWNYFQACGGVCIGFLSPSYIKFGFQRRTYICFTTKKSSEKGSSVVHRFIYLMHVYKLLSNAL

SEQ ID NO: 30915 - protein, 418 aa, Oryza sativa
MRMRWWAAPLAAVLAVILLPSSTATLSPAGINYEVVALMAIKTELQDPYNVLDNRDINSVDPCSWRMVTCSADGYVSALGLPSQSLSGKLSPGIGNLTRLQSVLLQNNAISGTIPASIGRLGMLQTLDMSDNQITGSIPSSIGDLKNLNYLKLNNNSLSGVLPDSLAAINGLALVDLSFNNLSGPLPKISSRTFNIVGNPMICGVKSGDNCSSVSMDPLSYPPDDLKTQPQQGIARSHRIAIICGVTVGSVAFATIIVSMLLWWRHRRNQQIFFDVNDQYDPEVCLGHLKRYAFKELRAATNNFNSKNILGEGGYGIVYKGFLRDGAIVAVKRLKDYNAVGGEVQFQTEVEVISLAVHRNLLRLIGFCTTENERLLVYPYMPNGSVASQLRELVNGKPALDWSRRRRMFLGLEFCWLS

SEQ ID NO: 30916 - protein, 95 aa, Oryza sativa
MNSTCQPTHQKMSILEDVIHKMKTPVVYLNITRMTDYRKDAHPSIYRKRNLTEDERRSPERYQDCSHWCLPGVPDSWNELLYAQLLIKQHQMLQQ

SEQ ID NO: 30917 - protein, 178 aa, Oryza sativa
MTNYIGVGCDAKVAYDFHTTREEKPDKFCSQFVNKLIYAREGAKDIMDRSCSDLPWHVSLEVDGKNVEIPEDAEGVIVLNIPSYMGGVDLWQNDNEHDDDFGLQSMHDKMLEVVCISGTWHLGKLQVGLSRAHRLAQGKVIRLHLHSSFPVQVDGEPWIQPPGCLEISHRGQVLYLSR

SEQ ID NO: 30918 - protein, 330 aa, Oryza sativa
MARKLFEKAVQASPKNRFSWHVWALFEAEQGSIDKARKLLKIGHAVNPRDPVILQSLALLEYNYSSPNTARVLFRKASQIDPRHQPVWIAWGWMEWKEGNARTARTLYQRALSVNSTNECAARCLQAWGVLEQRAGNYTAARRLLRSSLNINSQSEVTWMTWAALEDEQGDPVRAEEIRNIYFQQRTEVVDDASWVMGFLDIIDPALDSVKKLLNIDQPSGPATRDNPKSTGEPSNTATVRTSADAEFSGGSRAEGSDASDLANADDKESDDAAETPESDFDVDGFIRRRLALDPAELDAVLEGSDPRGVVSRRRTQRLPRKPLPLLPVP

SEQ ID NO: 30919 - protein, 441 aa, Oryza sativa
MCLLLGFDDEISCAFVQTPQKFYGALKDDPFGNQLEVSLMKVGRGIAGLQGIFYCGTGCFHRRKVIYGMRTGREGTTGYSSNKELHSKFGSSNNFKESARDVIYGNLSTEPIVDISSCVDVAKEVAACNYEIGTCWGQEVGWVYGSLTEDVLTGQRIHAAGWRSTLMEIEPPAFMGCAPNGGPACLTQLKRWASGFLEILISRNNPILTTTFKSLQFRQCLAYLHSYVWPVRAPFELCYALLGPYCLLSNQSFLPKTSEDGFYIALALFIAYNTYMFMEFIECGQSARACWNNHRMQRITSASAWLLAFLTVILKTLGFSETVFEVTRKDKSTSDGDSNTDEPEPGRFTFDESTVFIPVTALAMLSVIAIAVGAWRVVLVTTEGLPGGPGISEFISCGWLVLCFMPLLRGLVGSGRYGIPWSIKMKACLLVAIFLLFCKRN

SEQ ID NO: 30920 - protein, 191 aa, Oryza sativa
MATQATAREIAVVGVIGAGQMGSGIAQLAAAAGCGVLLLDSDTAALSRAVDSISSSLRRLVAKGQLSQASCEHSIEQIKCVSSVQELRDADLVIEAIVESEDIKKKLFVELDKITKPSAILASNTSSISITRLASATNRPCQVSLISTLSFNAASSFLDSIANHMLTCYFCVGITYCFGATSWIEKENALV

SEQ ID NO: 30921 - protein, 75 aa, Oryza sativa
MAPPAASTDWGPIIVAVILFVVLSPGLLFQLPARARVVEFGNMATSAIAILVHAVIFFCLLTIFVVAIGVHVYAA

SEQ ID NO: 30922 - protein, 422 aa, Oryza sativa
MRQEELVAELEMKMETAVEAIKESLEAQLCAANTEVERLNSIVQALENDIEKEKALHKELTAQLEVKFEEEKARSVQTVKESMEAQLCSSNTEVLKLRDIVKALENEVEKEKALHEDLSAQLEAKIEAERTFSVEAIKESFQSELQSVNSEVVELRGMVTALEHEVVKEKTFSAELQMQLEALEAIKRVLESEIESAHQDNRKLNDKVKSFEAKLKKQVSSAVDFTAKEEAMQSERRAMKQQLEAAKMEVGKLTNKVSLLQGEVLQERLLSEEFEQEYHKLEARLSRDSRDAKLWRLANSNGGLKAKQEKELANAAGKLAECQKTIASLGRQLKSLTDIDNTIVEPERLEPREIREMPLDFRNSDADFAVFADELYDFDLPKVNSSCFSPLPSIQPSSPPSEMSVFAGGLSSLSSFRSKRRK

SEQ ID NO: 30923 - protein, 265 aa, Oryza sativa
MAAATMALSSPVMARAAPSTSSALFGEARITMRKTAAKPKPAASSGSPWYGADRVLYLGPLSGEPPSYLTGEFPGDYGWDTAGLSADPETFAKNRELEVIHSRWAMLGALGCVFPELLARNGVKFGEAVWFKAGSQIFSEGGLDYLGNPSLIHAQSILAIWAVQVVLMGAVEGYRIAGGPLGEVVDPLYPGGAFDPLGLADDPEAFAELKVKEIKNGRLAMFSMFGFFVQAIVTGKGPLENLADHLADPVNNNAWAYATNFVPGK

SEQ ID NO: 30924 - protein, 116 aa, Oryza sativa
MFKEGDLVDISGKSIGKGFQGGIKRHNFKRGLMTHGSKSHRALGSIGAGTTPGRVYKGKKMPGRMGGTKTKIRKLKIVKIDNDLKVVMIKGAVPGKPGNLLRIAPAKIVGKNIPKN

SEQ ID NO: 30925 - protein, 370 aa, Oryza sativa
MGRPPSTGGPAFRFTQAEVAEMEARLQQLNNAIPHRSVIQALADKFTSSPARSGKVAVQPKQVWNWFQNRRYSHRSRSSRGPPTLMQTKMLPTGSDEHKSPPFRAMPSASAHSGSPSGKGSLESGQVEFEAKSARDGAWYDVAAFLSHRLFESGDPEVRVRFSGFGAEEDEWINVRKCVRQRSLPCESTECVAVLPGDLILCFQEGKEQALYFDACVLDAQRRRHDVRGCRCRFLVRYDHDHSEEIVPLRKVCRRPETDYRLQILHAARAAGMAKEAVVDLVSHNDKSSAEQKPPKQHKMMDVNTDEVTMVSNQDQEEPTGKPAATLPAAPVKTLNDSASASASDVQMGEAQAAPKVESSDEVEDKMKEG

SEQ ID NO: 30926 - protein, 24 aa, Oryza sativa
MCHQLKALPSRCCQADSNSYIHLT

SEQ ID NO: 30927 - protein, 484 aa, Oryza sativa
MEESEIFVGAHSYAAICAFTLIIGWLAHWVYRRINPPCNGRLPPGSMGFPIVGETFQFFRTSPSIDMPIYYKRRLERYGPIFKTNIGGQHVVISLDPEVNQFIFQQEGKLFQSWFPETTLNIFGKKTLTTYNRTAHKLIRSFVCKLYGPENVKKSLLPELENSMRESLASWIGKPSVEVNDGVSNMIFGLAAKHLIGLDITNSGELKKNFQEIFQVMVSIPFPIYFPGTSFYRCMQGRRNVWTTLTNVMKKRLSAPGNKFGDLVDLIVEELRSENPTIDESFAIDTLSGLLFASFAPLSCTLTTTFKFLNDNPEVFDKLKEEHEMILKKREGANSGFTWEEYKSLKFSTQVVNEINRITTVIPGGFRKALTDVQVNGYTIPSGWLVMISPMGVHLNPKLFEGPLKFDPWRWTEEKRISMQRNFMPFGGGIRMCPAAEFNKLFITLFLHIVVTEYRWKDIDGGNVKRISEVLVAQEYHIQLVPQT

SEQ ID NO: 30928 - protein, 303 aa, Oryza sativa
MVQFQKPKKIYNDRRLFLGGGQGVMQGASFGAAGTNPVADKRSGRGKGHSFVPFGPPNGAHKPGVHPSGYPLPRMPFPPFAGAHSQPYAIPTRGSLHGPIGAVPPVPQPGNRNFGPRGNTGGPIGGHLAHQQSSQQAMGGMGSAFNFPGLENPSSQPSGGGPMSQTGLMTQDFFGDDFKSQGSHVAYNIADFSTQASQGGYGVDYSQGPQSGYPGNYLNQNAHPGYSHMGAANDIVSQDHMAHGSHGMFTQAGYNDSSQDESSQMHFGMAGPGLQSQPMMNPLYSQSYAHYNTQPQSLQPPPQ

SEQ ID NO: 30929 - protein, 294 aa, Oryza sativa
MGGDLYALDFDGVLCDSCGESSLSAVKAAKVRWPWVFEQVDAAMEEWIVEQMYTLRPVVETGYENLLLVRLLIEIRIPSARRSSVADGLSIQEILENWLKLKPTIMSEWNEDRDSLVDLFGSIRDDWIENDLSGWIGANRFYPGTADALKFSSSEVYIVTTKQGRFAEALLKELAGIEFPSERIYGLGTGLVQYFFYFLFSPVNHFIESVSLCSSPKVKVLQQLQQMPQHQGLTLHSCACAGELATSPVPTAADLRLILHKLHSVCELLRMAMEGNYVAAMGMRRLENSMTLMP

SEQ ID NO: 30930 - protein, 334 aa, Oryza sativa
MATGVLCSREFALCLACVLLAVPLLVAQDPSSLSLEHYSKTCPNYEHVVRTEMECAVRADSRNAALMLRLHFHDCFVQGCDGSVLLDDTATLIGEKKAEQNVNSLKGFELVDKIKQKLEAECPGTVSCADLLAIAARDAVVLVGGPYWDVPVGRLDSKKASLDLANRDIPTAQQGLVTLIAKFWEKGLDATDMVALVGSHTIGFARCANFRDRIYGDYEMTTKYSPISQPYLSKLKDICPLDGGDDNISAMDSHTAAAFDNAYFGTLVNGEGLLNSDQEMWSSVLGYSTADTVSKYWADADAFFKQFSDSMVKMGNITNPAGGEVRKNCRFVNT

SEQ ID NO: 30931 - protein, 90 aa, Oryza sativa
MLQLQSKNIILHTQFTYGKSNSLAAAELHRCHRFCLGGVRLNATQPIWFLFIPNHCLIYFIVHRSIYLLTVEGYIVGLGLTACGLFTIQL

SEQ ID NO: 30932 - protein, 29 aa, Oryza sativa
MSETFGLALPKAVPLRALVTPRLAPAAYA

SEQ ID NO: 30933 - protein, 353 aa, Oryza sativa
MFIVDSTSKCDATEQLCPGRCQLEKRLKAEIIAHQDARRKIECLTMEASCKDEEVRQYKEHIAELVLHSEAQSLLFQEKYQEMEHMISKQKFGLHESNSDTGHTKFEKPSGRTRGSGSPFRCISSIVQQMNSEKDQEISVARQRIEELEGLVCNKQKEICMLTSRLAAVDSMTHDIIRELLGVKLDMTNYANMLDQEELQKLLMASQQQIEQSKAKDVELDMLKEQFDHLIQERDSLFDDMDQRKADLLESQLLIEQLEQREQMLEAQNGILQMEKDNLQQRIMEMDEEIQLLVGSNQAIAETTFQMGSNHRSANSEFSRRLAQSDMLLSHARHEHSRLQAAKSSRTRRGSHQ

SEQ ID NO: 30934 - protein, 233 aa, Oryza sativa
MRATDVMIAGKVAVVCGYGDVGKGCAAALKQAGARVIVTEIDPICALQALMEGLQVLTLEDVVSEADIFVTTTGNKDIIMVDHMRKMKNNAIVCNIGHFDNEIDMLGLETYPGVKRITIKPQTDRWVFPETNTGIIVLAEGRLMNLGCATGHPSFVMSCSFTNQVIAQLELWKEKSTGKYEKKVYVLPKHLDEKVAALHLGKLGARLTKLSKSQADYISVPVEGPYKPAHYRY

SEQ ID NO: 30935 - protein, 234 aa, Oryza sativa
MANIRTVSSLGEVNGALQEMGINTIDQAHQVQFRLHKQTSLKEATEIKMMIQTGRHGFRLVNPELLDCKFDARVKLEEWYNTMLDACMAQCDHELFSLEASIAELKDLMLSTDDQIPHIGPEVHHRNRGVQQMLYPNPPFPIDPDYEFGTPQQRVPYQAAYTTDAERNDAVSRDKRAQRAVWNTNLRLLEVKKSALEKKKTELERRLKAEFKKVNEQQSDLGVGYANYQSPYQA

SEQ ID NO: 30936 - protein, 72 aa, Oryza sativa
MVAAKHVYADSLFLFFLLHKTCFYRAINCLTVYICYQNFCKVCKRSIGSRLSCTVLLCLIREELCICLFLYF

SEQ ID NO: 30937 - protein, 263 aa, Oryza sativa; identical to SEQ ID NO: 28772

SEQ ID NO: 30938 - protein, 174 aa, Oryza sativa
MEPQKCKGIFLLNISLRMLHISKQPWFGRPFIKSFQSLLRNTVIGKLFFSAVATPESVKNILCQCYHDTSAVTDELVQFILQPGLDPGAVDVFLEFICYSGGPLPEELLPRVKCPVLVAWGEKDPWEPVELGRAYASFDTVEDFVVLPNVGHCPQDEAPDLVNPLVESFVTRHS

SEQ ID NO: 30939 - protein, 288 aa, Oryza sativa
MVSAFFLLCGCVDQASVAVVEKWGRFLRLAEPGLHFFNPFAGEFVAGTLSTRVQSLDVRVETKTKDNVFVQLICTIQYRVVKEHADDAFYELQNPQQQIQAYVFDVVRAIVPRMNLDDLFEQKNDVAKAVLQELEKVMGDYGYSIEHILMVDIIPDAAVRRAMNEINAAQRLQLASVYKGEAEKILLVKKAEAEAEAKHLSGVGIARQRQAITDGLRENILNFSHSVSGTSAKEVMDLIMVTQYFDTIKELGDGSKNTTVFIPHGPGHVRDISEQIRNGMMEASCSNV

SEQ ID NO: 30940 - protein, 438 aa, Oryza sativa; identical to SEQ ID NO: 28597

SEQ ID NO: 30941 - protein, 182 aa, Oryza sativa
MEVATDESFTPIKQDTKKGNLRYYPYNINWNYGLFPQTWEDPTLANTDVEGAFGDNDPVDVVEIGERRANIGDVLKVKPLAALAMIDEGELDWKIVAISLDDPKASLVNDVDDVEKHFPGTLTAIRDWFRDYKIPDGKPANRFGLGNKPTSKEYALKVIEETNESWEKLVKRNIPAGELSLA

SEQ ID NO: 30942 - protein, 337 aa, Oryza sativa
MSGHAAPAPHVVEDYRGVIQLLSDGTVVRSDAGSGAGALLPPEDFPDVPGVQWKDLVYDATHGLKLRVYRPPTAGDAERLPVLVCFHGGGYCLGTFEKPSFHCCCQRLASELRAVVLSADYRLGPEHRLPAAIDDGAAVLSWLRDQAMSGPGADSWLAESADFARVFVAGESAGGNMSHHVAVLIGSGQLTVDPLRVAGYMLLTPFFGGVERAPSEAEPPAGAFFTPDMSDKLWRLSLPEGATRDHPVANPFGPDSPSLAAVAFPPVLVVVAGRDILHDRTVHYAARLKEMEKPVELVTFEEEKHLFLSLQPWSEPANELIRVMKRFIHKDEGSNNF

SEQ ID NO: 30943 - protein, 180 aa, Oryza sativa
MGDYTIQISTKLIDQLARDDEKIKKKTRKPKPKKTVKQHQQEPQDNSRELPASEPKAPPGWPLQPPMYLPVTPAPPPPPPAFSELEAIRAVLEESEKVQEKLDKQHAGMRDELIKKSKDLRDKEFKLPYQNPTPCTEERSNCRQCYVSNAQDPLKCAEAVKRFEACVRLARQRGNTKVAQ

SEQ ID NO: 30944 - protein, 130 aa, Oryza sativa
MHQYHLGSDEEEKDGELVVSKVFYQTQPRQCGGGSAATAKDLSVDLVAGNNIKASNAAAEHHHNDGVGGGGHGGNNSSMLKEAAGIVDFYNPAAALIGYSQAAPNNRAAASAHLTMPNFEVHTGGAGFGP

SEQ ID NO: 30945 - protein, 98 aa, Oryza sativa
MGQRASAAVVGFAGSATSGGPAATDEEVAGSGRAGGAMAPPPLPPLSSCADLAATPPYMCGSGGGAADLARAMVGGAAGEREVRRLHLLLHCLPSARI

SEQ ID NO: 30946 - protein, 263 aa, Oryza sativa
MKVMTLRRGGAGAGIRIKKKARGFMCGGRGGSKAVSVSDGSDKQSPMATPPPNTSSTTTTTTTGSAGNKTTAAAGSSSFSPSYDYDYVDTDADTSVGSTPSVAALLRQLGELERSVRSLQGAVAEGRGAKNDGRGGGRRHRRTVSDGGGGGSGRVEESVAVVKESADPLFDFRRSMLQMIVEKEIVGGAELRELLHRFLPLNSPHHHHVILRAFAEIWEEVFAGYERTPDFLVSSRHRRPTKKKLPASYTAADDDDDDSWNAA

SEQ ID NO: 30947 - protein, 384 aa, Oryza sativa
MVLGAFKKLVVLATVAVASASAATPNAPFYNEKGILVLGADELLNITANAAANNEHIISHPGASYISVKFENVNLPEGDVLIVRSPDSSDGYVYTGKGRGDLGTFASSPVRGTTAIVEYFALNSAAQKSTVSYKIGGYVRGFSSALESICGAADQTRPAKCYQGSSTLPQAYTKAQAVARLLIGGKFFCTGWLLGNSGHMVTNEHCIEKAADAAQMDIEFNAEGGSCSTLCNTQLSCKGTMEATSATFVTNSNPIDYAVVKLPAALATKYGFLQFRSSGPKNGEKIYIPQHPDGWGKRIVDTVDGGAAATIRGVGLDNTGCGNNQIGYLADTQGGSSGSPVLSAVDNTVIALHHCGGCNNLAVDPRDVLADLKKKGITVPSSTV

SEQ ID NO: 30948 - protein, 134 aa, Oryza sativa
MITSIFSTTSLEYVAANLQLIKRRGGRRRRREGERRHGGGGGGGGVLWHRGHRRAAADQGDQEPVPDFRHVRRRGGRRRGEGDGDRVPDRRAARRPHRVGRHEQGRRHGERLLPPILPLPPTARDGHGSSSCLN

SEQ ID NO: 30949 - protein, 268 aa, Oryza sativa
MATHPASPVAGGEKATPPSTPPPVRLAGGAAAAIQPNSPRFFFSSLAAASASASSPHRRIAIAVDLSDESAFAVKWSVQNYLRPGDAVVLLHVRPTSVLYGADWGSIPVSVDDDDSAPDAAQHANAHAATRDEPEEAKKKREEDFDAFTSTKAQDLAQPLVAAQIPFKIHIVKDHDMKERLCLEAERLGLSAMIMGSRGFGASRRAGKGRLGSVSDYCVHHCVCPVVVVRYPDDGAAAGGGEAVGDELRTVPEDEPVYHEAPEGQKEN

SEQ ID NO: 30950 - protein, 255 aa, Oryza sativa
MLSGMEKQPAMLLVLVTLCAFACKRSVAQSAFATFYGGKDGSGTMGGACGYGNLYNAGYGLYNAALSSALFNDGAMCGACYTITCDTSQTKWCKPGGNSITITATNLCPPNWALPSNSGGWCNPPRQHFDMSQPAWENIAVYQAGIVPVNYKRVPCQRSGGIRFAISGHDYFELVTVTNVGGSGVVAQMSIKGSNTGWMAMSRNWGANWQSNAYLAGQSLSFIVQLDDGRKVTAWNVAPSNWFFGATYSTSWVQF

SEQ ID NO: 30951 - protein, 139 aa, Oryza sativa
MEGESMRVMYEPWFVKYKVDLVFAGHVHAYERTHRISNVAYNIVNGQCTPVHDQSAPVYITIGDGGNQEGLATNMTAPQPGYSAFRESSFGHAILDIKNRTHAYYTWHRNQDGNAVAADSMWFTNRYWQPTDESLDDSQ

SEQ ID NO: 30952 - protein, 125 aa, Oryza sativa
MVAAMEVMEARVMEVLTKLAGKVEGMDVITNHLGEIDAKLVTQGERLDRVQAKMDLSITLLGQVQQEQSRPEGGSGCSRAGGAINSIASPAAVAGDSARGICGVYFDGTTSATAAASSAVSASVA

SEQ ID NO: 30953 - protein, 270 aa, Oryza sativa; identical to SEQ ID NO: 28586

SEQ ID NO: 30954 - protein, 305 aa, Oryza sativa
MAAVAGGAARALSQAEQDVQMMLAADVHLGTKNCDFQMERYVYKRRSDGIYIINLGKTWEKLQLAARVIVAIENPQDIIVQSARPYGQRAVLKFAQYTGAHAIAGRHTPGTFTNQLQTSFSEPRLLILTDPRTDHQPIKESALGNIPTIAFCDTDSPMRYVDIGIPANNKGRNSIGCLFWLLARMVLQMRGTILPGHKWDVMVDLFFYRDPEEAKEQEEEAPAQDFAAITDYTAPEQWSADQWTSDVAAPPAATVGDWGAAPAPVAAAEGWDQAGAPVATEAAVVPPVAPTGWDPAAQPAAQGWD

SEQ ID NO: 30955 - protein, 292 aa, Oryza sativa
MGGAHFPGEGEVVAGEGDAVVPLRDMGKMEHGCEHYRRRCKIVAPCCGEVFACRHCHNDATASGDRHTICRQDVEKVVCLLCDTEQPVSQVCINCGVNMGEYFCDVCKFYDDDTEKGQFHCYDCGICRVGGKENYFHCAKCGSCYAVALRDNHQCVENSMRQNCPICYEYLFDSLKGTRVLDCGHTMHMECFSEMVEHNKYTCPICSKTALDMTHHWALLDQEIEATIMPPVYRYKVWVLCNDCNKVSEVDFHVIGHKCSHCNSYNTRSTSRPADLSGSSSPSTSDSSENNP

SEQ ID NO: 30956 - protein, 191 aa, Oryza sativa
MMLLCSFREQLQQHVRVHAVEAVMACREIEQSLQDLTGATLEEGTGATMSEDEDETAPMLEGPMDMGSDGHDLMGFGPLMPTDSERSLMERVRQELKIELKQGFKSRIEDVREEILRKRRAGKLPGDTTTILKQWWQQHSKWPYPTEDDKAKLVEETGLQLKQINNWFINQRKRNWHNNSQTSTLKSKRKR

SEQ ID NO: 30957 - protein, 265 aa, Oryza sativa; identical to SEQ ID NO: 30923

SEQ ID NO: 30958 - protein, 158 aa, Oryza sativa; identical to SEQ ID NO: 30783

SEQ ID NO: 30959 - protein, 227 aa, Oryza sativa; identical to SEQ ID NO: 30327

SEQ ID NO: 30960 - protein, 238 aa, Oryza sativa
MAGGVVIGVAPPAAAEEPEPHVERLPADLLAHVLSLLPSFHDLSMAGGVSRRWRRAVERSLAGRRRMSFAGQRTGDDSTARFVRAAVNLRDLDISRSCWGCQITDQGLIRISTADCVKNLTSISLWGLAGITDNGVIQLVSRAHSLQHLNIGGTFITDESLYAVAKSCINLKSIIVWSCRHVTEAGLVALVGGCRRLECINVGGMRVPPESFAGLLAIRPALQIRSIPQILNANVQVS

SEQ ID NO: 30961 - protein, 340 aa, Oryza sativa
MEKLLSSSGAAAAVASQGQLPDCFVFPADRRPPASTAAVSLPVIDLSGPRDAVRRAVLDAGKELGFFQVVNHGVPPETMREMAAVCEEFFRLPAEDKAAFYSDAEENPNRLFSSTIYEVGDQRYWRDCLRLACGFPVADDTNTHWPDKPHHLRDVTEKFFVATRGLGIELLRLLCEGMGLRPDYFERDLTAGDVIINVNHYPPCPDPSLTLGLPPHCDRNLITLLLQGDVFGLQVSYNGDWINVDPVPDAFVVNFGHLLEIATNGVLKSIEHRAMTNSAVARTSVATFMMPPMDCLVGPAKELVGDGGQPQYRTVTFREFMRIYKTVGARRDSVEKAFKI

SEQ ID NO: 30962 - protein, 67 aa, Oryza sativa
MEWYCGFSAMAMWRASSSSGPPLLFSPPPPTPVLSLPGDELWLMASHCWYQVIHFAAFNCEMRNTCK

SEQ ID NO: 30963 - protein, 520 aa, Oryza sativa
MHLIISSIHTYTIMALSLTPSLQDLVSSLMILLVLLYISYWRSKYQSLFPVDWPIVGLLPTLVANLHRLHDKITEYLAASGHSFTGNGPAASNMRLFVTCDPDNVRHIFTTNHDNYPKGHEFAEIFDIMAGAFFTMDGDLYRRQRAKTHSILSDPRMVASMASSCVDKVRDGLLPLLTSMASTRTPFELQDLATRLMFDVTAMTVFGVDPGRLSPDMPSMHVSAAMDTIMEVGLFRHTVPPSCWKAMRRLKIGPERKLAAAHAALHVFVSEMMEKARKQEAAPSSMSMDVLSSYINDPDYVGLLHSILITYMVAGRDTVGTTLPWFFYNLAMNPRVVSGIREELAHNIATSTCNGDGVPVMFSPEDTKSLVYLHAALFETLRLYPPGWIERKTVVADDVMPSGHEVRAGDAVLISIYSMGRMESLWGEDCRVYRPERWLYDSRGGRKMRHVPSHKFLSFNSGPRMCPGKNIAVMQMKIIAAAVVWNFDLEVVEGQAVVPKLSCLLQMKNGVMVKVKKRAV

SEQ ID NO: 30964 - protein, 288 aa, Oryza sativa; identical to SEQ ID NO: 30583

SEQ ID NO: 30965 - protein, 256 aa, Oryza sativa
MKLAVVAVAALLLAAGVASADEFDFFYLVQQWPGSFCDTQAGCCFPDTGKPAAEFGIHGLWPNYAKCRPAAGAVADDDDGVVEMVVDGGAAVERHHRRRQKCWPEYCDDGNKLRPWEIKDLVAELDANWPTLSCKGGKSFEFWSYEWKKHGTCSGMGQHGYFAAALELKKRHDLAAVLAGAGIVPSDDESYSLGSIRDAIAAATGAVPNLECNRDAAGETQLFQVYQCVDRSGKKLVDCQLPMQGKCRDKVKLPTF

SEQ ID NO: 30966 - protein, 103 aa, Oryza sativa
MSGGARPPLLTAVADSPAFHPDHRLTSLLAARLAALWSPVVSPHSGASTLLELILSRPCLCTDDSIFNRTHAGSAWRRSGTAHPSHARHDQRATSGRVRRWCQ

SEQ ID NO: 30967 - protein, 313 aa, Oryza sativa
MAAAAAGGGGGGAPRALSQREQDIQMMLAADVHLGTKNCDFQMERYVYKRRSDGIFIINLGKTWEKLQLAARVIVAIENPQDIIVQSARPYGQRAVLKFAQYTGAHAIAGRHTPGTFTNQLQTSFSEPRLLILTDPRTDHQPIKESALGNIPTIAFCDTDSPMRYVDIGIPANNKGKQSIGCLFWLLARMVLQMRGTILPGHKWDVMVDLFFYRDPEEAKEQEEEEAAVGPEYAAVAEYGAAPTDNWGDQQWGGEVQPPALPAAPTGEWGAAPAPVAAEGWDAVAVPPAAAAAVAPPAAPGWEEGSAPAPTGW

SEQ ID NO: 30968 - protein, 271 aa, Oryza sativa
MKIQCDACESAAAAVVCCADEAALCAACDVEVHAANKLAGKHQRLPLEALSARLPRCDVCQEKAAFIFCVEDRALFCRDCDEPIHVPGTLSGNHQRYLATGIRVGFASASPCDGGSDAHDSDHHAPPMGSSEHHHHHQQPAPTVAVDTPSPQFLPQGWAVDELLQFSDYETGDKLQKESSPPLGFQELEWFADIDLFHNQAPKGGAAAGRTTAEVPELFASQAANDVAYYRPPTRTAAAAFTAATGFRQSKKARVELPDDEEDYLIVPDLG

SEQ ID NO: 30969 - protein, 313 aa, Oryza sativa
MASDGTDVVALYGGANGLSHKSGSFSVKVGLAQMLRGGVIMDVVTPEQARIAEEAGACAVMALERVPADIRAQGGVARMSDPGLIRDIKRSVTIPVMAKARIGHLVEAQILEAIGVDYVDESEVLTLADDAHHINKNNFRVPFVCGCRDLGEALRRIREGAAMIRTKGEAGTGNVVEAVRHVRSVMGDIRALRSMDDDEVFSYAKRIAAPYDLVMQTKQLGRLPVVQFAAGGVATPADAALMMQLGCDGVFVGSGIFKSGDPALRARAIVQAVTHYSDPKILAEVSSGLGEAMVGINLSDPKIHVERFAARSD

SEQ ID NO: 30970 - protein, 250 aa, Oryza sativa
MLRVPEQLSHRSSCNLRAETHLHPVAGLPPPPPPLALLRLTRPPAPPDPPAMGCSSSLPANNAGGVGTISNENSGTDLKNLRVKLVLLGDSGVGKSCIVLRFVRGQFDPTSKVTVGASFLSQTLALEDSTTVKFEIWDTAGQERYAALAPLYYRGAGAAIVVYDITSSESFNKAQYWVKELQKHGSPDMIMALVGNKADLHDNRSVSSQDAQEYAERNTMFFIETSAKTADNINQLFEEIAKRLPRPTPS

SEQ ID NO: 30971 - protein, 261 aa, Oryza sativa
MICLRAAFPLTSSPLRRLALKPSSSRAAAAAMSSAIAAPVEHIVLIKVRPEAASSGAAAAMVSSLQALSTAVPGLSYIHVGPVLRLRSPAAEALGPTHVLHSRYATKPDLAAYAAHPAHVAAVQGHVLPNALDSTAIDWVNAALVPSPVNPGSAVRLSLAKLKEGVEAHQLAEKLAAATAAAGEAKGAKVSFGENFSPARAKGYQFGMVAVFDSVEGLDAVDGDGKVEAAKAIVRPLLDDVLELEFVVGPAAAEAPAPANL

SEQ ID NO: 30972 - protein, 247 aa, Oryza sativa
MKLRPKRPGWKSLMPLQLSRKSALRFFLFPKVQAAGQSPDDTPVYLNVYDLTPMNGYVYWAGLGIFHSGIEVHGVEYAFGAHDYPSSGVFEVEPRQCPGFRFRKSIFLGTTCLDPIQVRQFMELQSVNYNGDTYHLITKNCNHFCKDMCYKLTGNKIPKWVNRLARIGAICNCLLPESLKISPVGHDPNSRPEDCEKRRLRNPLSCFSSISSQRQLPPSSPFPTSPVKEPLAYSSSRKSSAPSLRNR

SEQ ID NO: 30973 - protein, 374 aa, Oryza sativa
MGELGALQSIVYHRGSLRLLDQRKLPLEVDYIDVKCSGDGWNAIRDMVVRGAPAIAIAAALALAVEVSGLEDFTGTPAEAAVFVSEKLEYLVSSRPTAVNLSDAATKLRSLVSRTAETEKDAKAIFQAYIDAAETMLVDDVSDNKAIGSHGAEFLKQKLEVSKDISVLTHCNTGSLATAGYGTALGVIRALHSGGILEKAFCTETRPFNQGSRLTAFELVHDKVPATLIADSAAAALMKSGCIQAVIVGADRIAANGDTANKIGTYNLAISAKHHGVQFYVAAPITSIDLSLPSGEQIVIEERSPNELLNSEGGLGKQVAASGISVWNPAFDVTPANLITAIITEKGVITKSDADETFNIKDFIQSAKLYSTMQ

SEQ ID NO: 30974 - protein, 40 aa, Oryza sativa
MMSIPKTPSTSIGSCASTRDSSSSCLILIRWRWLFGWFIS

SEQ ID NO: 30975 - protein, 322 aa, Oryza sativa
MMHAKSESDVTSLAPSSPPRSPKRGGGVGVGGANYYVQSPSRESHDGGYKSSSMQATPVYNSPNESPSHPSYGRHSRSSSVSRFSGTLRDGSRKAGGERKALNDKGWPECNVIEEEGPYEDLAGDTGLSRRCQIVLGFLCFVLLFTVFCLIIWGAARPYEPDVVVKSLTMDDFYAGEGTDHSGVPTKLVTLNCSLHIAVYNPASMFGIHVTTGPIRLLYSEISIGVGQVRRYYQPRKSHRLVTAVVHGNKVPLYGAGGGLMLSSSGGAVPLTLDFDLTSRGYVIGKLVRVTHKVHVTCPIVVDAKKTKPIKFSKKACAVYKI

SEQ ID NO: 30976 - protein, 303 aa, Oryza sativa; identical to SEQ ID NO: 30496

SEQ ID NO: 30977 - protein, 246 aa, Oryza sativa
MSAAQPTYKPLATDAISFLQDLAAGGVAGAISKTAVAPIERVKLLLQVQAASTQIKPEDQYKGIVDCFARVSREQGVGSFWRGNLANVIRYFPTQALNFAFKDKYKQIFLGGVKKDQFWRFFMGNLASGGAAGATSLLFVYPLDFARTRLAADVGKGKSRMYTGLGNCITTIYKSDGFKGLYQGFGVSVGGIIVYRAAFFGGYDTLRDVMLKDPKTPRCGRSGSWPRRSRRSLVLCRTRSIRSVVA

SEQ ID NO: 30978 - protein, 332 aa, Oryza sativa
MSSSSGGDGGGYNYSEDWVVNSRGMRLFTCAWIPKESSRGVVCLCHGYAVECSVTMRGTAERLARAGYAVHGIDYEGHGHSDGLQGYVPDLDALVRDCDSFFSTATASFPRRRFLLGESMGGAVALLLHRLRPDFWTGAILVAPMCKIAEEMRPHPMVVSVLKVMTSIIPTWRVVPTNDVIDLAYRMQGKRDEIRGNPLCYKGRPRLKTAYELLRVSILIESTILPHVSLPFLILHGAADRVTDPSVSDLLYRSASTTDKTFHLYTGMWHALTSGELPHNIDAVFRDIIDWLHHRTSPTSASHVQDHDLSTSFEAERKAKHDDTIHCGKQTS

SEQ ID NO: 30979 - protein, 193 aa, Oryza sativa
MFLVDWFYGVLASLGLWQKEAKILFLGLDNAGKTTLLHMLKDERLVQHQPTQYPTSEELSIGKIKFKAFDLGGHQIARRVWKDYYAKVDAVVYLVDAYDKERFSESKKELDALLSDDSLATVPFLILGNKIDIPYAASEEELRYHMGLSNFTTGKGRVSLGESNVRPLEVFMCSIVRKMGYGDGFKWVSQYIK

SEQ ID NO: 30980 - protein, 211 aa, Oryza sativa
MENGDETFASPTAGGGGGEFEQPLTNGGGGGGGGGVYPAAKAYDAGELDALREAKRDLEDKLAAVEHENRFLGAEAYRLEGIVSQAREDIATAEHAIAASEGEAALLRDEVKRVKELLAAEKSNHEAERRRAADLDAELKGVQKEVAALEEEIKALKASAAAADAEDEDEAAAPATPSKEAEVGYHGLMAAAAAGAAATAVVAVVILHLKR

SEQ ID NO: 30981 - protein, 148 aa, Oryza sativa
MVHLYPAAVPPHELQTPLRTFRAWSGSPAGPFTVNTRPEATPNATALPCHRKPIMFYLDRVTAMSTSTTNWTLTEYVPEVLSGERCNTTGFDAATKVQMIQVIALKMNPAIWKRAPRRQCCKMQNANEGDKLIVKIHECKPDEATTSV

SEQ ID NO: 30982 - protein, 456 aa, Oryza sativa
MHNSAIAVQVLNRTHSKLKLLKFDIASGKREVILEEEHDTWITLHDCFTPLDKGVNSKHPGGFIWASEKTGFRHLYLHDKNGVCLGPLTQGDWMIDQIAGVNESSGVIYFTGTLDGPLETNLYSTNLFPDWSLPLQVPKRLTHGTGRHSVILDHQLLRFIDVYDSIKSPPVILLCSLLDGSVIMPLYEQPLAVQPLKKFQQLSPEIVQIEGKDGTALYGTLYLPDEKKYGPPPYKTLVNVYGGPSVQLVSDSWISTVDMRAQFLRSKGILVWKMDNRGTARRGLQFEGQLKYNIGRVDAEDQLAGAEWLIKKGLAKPGHIGLYGWSYGGFLSAMCLARFPDTFSCAVSGAPVTAWDGYDTFYTEKYMGLPSEQRDAYRYGSIMHHVKNLRGRLLLIHGMIDENVHFRHTARLINSLMAEGKPYDILLFPDERHMPRRLGDRIYMEERIWDFVERNL

SEQ ID NO: 30983 - protein, 293 aa, Oryza sativa
MAAAARSLALLSTASASLGLGVARSSARPRSPFGRGLALRGLSSSSSSFAATAAVMGKAGTAEAADAGMDAVQQRLMFEDECILVDEQDNVIGHDSKYNCHLMEKINSGHVLHRAFSVFLFNSKYELLLQQRSATKVTFPLVWTNTCCSHPLYRESELIEDKSLGVRNAAQRKLFDELGIQAEELPVDQFIPLGRMLYKAPSDGKWGEHELDYLLFMVRDVELSPNPEEVADVKYVNRDELKELLKKADAGEGGIKLSPWFRLVVDNFLMRWWDHVEQGTLEEAIDMKTIHKL

SEQ ID NO: 30984 - protein, 223 aa, Oryza sativa
MYMMNLRILPYIRTDFVQISLRNSVKKKCVRRTLRVTSIHGLRAPLPFLRSVEVSFPERPDMKPVVLKEQPFSLQRETSMNRPFVMLLTFNFSDGCGCSSSSIEWPVDFLKQKDSFVRDRSLVLQELQHAAEHRSRAGQHAILEREGVPRAETSIHALVTNIVRYDTEDSKAAVPMATWMNSNGSLSKRHMDAIGCNPASSKKQKLVATRHRRKGLNPATQKV

SEQ ID NO: 30985 - protein, 268 aa, Oryza sativa
MLAVAAAGYRAVAPDWRGYGLSDQPPEPEAAEYDDLVEDLLAILDALAVPKAFLVGKDFGAMPAYSFALCHPNRTCGVMCLGIPFGVNSSSLNTLPEGFYILRWAQPGRAEADFGKYDIRRVVRTIYILFSRNEIPIAKEDQEIMDLADLSTPLPEWFSEEDLDVYSSLYEKSGFRYPLQMPYRSMHQNKPIGDAKFQVPVFVVMGEKDYVFKIPGIESVMKDGSMEKHAPDLKITYIPEGSHFVQEQFPEFVNELLLSFLKDHPMAV

SEQ ID NO: 30986 - protein, 449 aa, Oryza sativa
MRKMQKVTGYIFGTIWWGFGLNLFAYFIASHIAGGCWYVLAIQRVASCLQEECKIKNTCNLTSLACSKEMCFHLPWSDKNGLACNLTSFGQQNIPDCLSGNGPFAYGIYKGALPVISSNSLAVKILYPIFWGLMTLSTFGNDLEPISNWLEVIFSIINVLSGLMLFTLLIGNIQVFLHAVLARKRKMQLRFRDMEWWMRRRQLPSRLRQRVRKYERERWAAITGDEEMEMIKDLPEGLRRDIKRYLCLELVKQVPLFHGMDDLILDNICDRLRPLVFSSGEKVIREGDPVQRMVFVLQGKLRSTQPLAKGVVATCMLGAGNFLGDELLSWCLRRPSLDRLPASSATFECVETAQAFCLDAPDLRFITEQFRYKFANEKLKQTARYYSSNWRTWAAVNIQLAWRRYKARTTTDLASAAQPPSAGGPDDGDRRLRHYAAMFMSLRPHDHLE

SEQ ID NO: 30987 - protein, 121 aa, Oryza sativa; identical to SEQ ID NO: 29150

SEQ ID NO: 30988 - protein, 86 aa, Oryza sativa
MEKSSKMMAVAAVLVLAVVGAAGARNIKAAPTSRPRSHERPRRRRRRRRCCAGNVLYVAHGVACNMDGYMTRARYIFICAVSLHCV

SEQ ID NO: 30989 - protein, 212 aa, Oryza sativa
MGPVTRNEWIMVATMILAVSLWIFGDTIGVSSVVAAMIGLSILLLLGVLNWEDCLNEKSAWDTLAWFAILVGMAGQLTNLGIVSWMSNCVAKVLQSFSLSWPAAFGVLQASYFFIHYLFASQTAHVGALYSAFLAMHLAAGVPAILSALALTYNSNLFGALTHYSSGQSAVYYGAGYVDLPDVFKLGFTTAAINAVIWGVVGTFWWKFLGLY

SEQ ID NO: 30990 - protein, 393 aa, Oryza sativa
MQRAAAASRATAWSTARHGAARVTASASFSDGGGIVAGAALPLRVRGGQLMSLPLLSGGRAVTARVAAAEAPLPADDADAAAGRERGALAETAQLGAMIVAWYLLNIYFNIYNKQVLQPLPFPYTITAFQLAFGSFVIFLMWALKLHPAPRISISQLAKIAPLAAGHMLGTVFTNMSLSKVAVSFTHTIKASEPFFTVLLSAFFLGETPSLLVLGSLVPIVGGVALASLTELSFNWIGFWSAMASNLLYQSRNVLSKKLLGGEEEALDDINLFSILTILSFLLSLPLMLFSEGVKFSPGYLRSTGLNLQELCVRAALAGFCFHGYQKLSYLILARVSPVTHSVANCVKRVVVIVASVLFFRTPISPVNALGTGVALGGVFLYSRLKRTKPKNA

SEQ ID NO: 30991 - protein, 79 aa, Oryza sativa
MSVKMRTTCTWTERPYEALLFPGIGFGPFLRSLGGRRRRPPSGGARAISEIPLWKSSDSNLVSDPRAKGQSQVDSFYGA

SEQ ID NO: 30992 - protein, 246 aa, Oryza sativa
MGFSDSRVNWPLFFGCILIAFGPLATLFFLVVSKRAQLLIISLFGAFIWLVSILLTATFWRVIPPLKDSIEATIPLGVVLQEASRFVFFHFYVRTEGAVQKVTTATHQLPLNDVTSSIAAGVGYSLMHGLMMFGSVVGASTGRRGAAFSPSCESVPLVFASSLSALALTVLDVALMVVAFRGYRTRSIPLIGGVAVLHMVVAVSALANKSTNGCYVSIPVHYGGALLACGAAITCIKRSRATAAAS

SEQ ID NO: 30993 - protein, 354 aa, Oryza sativa
MSASSSTAALVGDAQTRTQAYVARIDPTDVLTATSLASVAAEIPSFRHIVGKVRDIYVFADKVLLISTDRQSAFDRALASIPYKGRVLTLTSVWWFHATQHIVPNHLISAPHPAAMLCKKCTVFPVEFVVRGYITGSTSTSMWTNYAKGVRDFCGHTLSDGWTQHQKLPHNMVTPTTKDDVHDELISGQEVVASGRMTQQQWDYCHAKALELFAFGQQQAATRGLILVDTKYEFGVDDNGQILLIDEIHTPDSSRYWLAHSYEERMAQGLSPENIDKEFLRLWFKDHCDPYKDAVLPDAPTELVVELSRRYILLYELITGDRFVFPSAASSGAEQTHDPQAQLIESVRAALASK

SEQ ID NO: 30994 - protein, 245 aa, Oryza sativa
MVKSQEKLTVKPGTMCYMSGNIQTDNNYLPENDGGVWQWIFGKSISSSVFFNPGSDDGDVGISAPFPGRILPMDLANFGGELLCQADAFLCSVNDVSVTSTVEQRPRNIEIGAEVILKQKLRGQGMAFLVGGGSVMQKILAPREVITVDAACIVAMTTTINFQLKTPNQPRRVVFSGGNQLTASLTGPGVVFIQSLPFHRLSQRIASRSVAAPSLRDNPKFFIQIVMFFFLAYVMIVSSIILTDV

SEQ ID NO: 30995 - protein, 411 aa, Oryza sativa
MAPRLLLALALVLLASGASAASVGDTCSSEGDCGAGLHCSDCGGGGGGDKTCTRAKPIDPLTHGTDLPFNNYSWLTTHNSYALAGSSSATGSALITQTNQEDTITAQLKNGVRGLMLDTYDFNNDVWLCHSFQGKCFNFTAFQPAINVLKEIRTFLDGNPSEVITIFLEDYTASGSLPKVFNASGLMKYWFPVAKMPKSGGDWPLLKDMISQNERLLVFTSKKSKEASEGIAYEWSYVVENQYGNEGMVEGKCPNRAESPAMDSKSQSLVLMNFFTTDPSQTGVCANNSAPLVSMLKTCHDLSGNRWPNYIAVDFYMRSDGGGAPLATDIANGHLVCGCDNIAYCKANSTFGTCVIPPPSPPPSPRKAPSGGKGTSAGGSSSSSGAMARVVLPKLSFFFGVALLILVILSY

SEQ ID NO: 30996 - protein, 188 aa, Oryza sativa
MRALDEKETKMVFEKLFKFTGPNLKHLLERPAVEGPDPQAGRYCLRLHKNRVYYASEALVRRATAVARPRLAGVGTPIGKFTHGGAFHLTVHALDLLAAHARCRVWLKPDTERSFLFGNSVPKSSLARITENTKANDGVVVMSMADVPLGFGIAARSAQDCRKADTNAVVVLHQSDAGEYLRREEELM

SEQ ID NO: 30997 - protein, 256 aa, Oryza sativa
MGRVIRGQRKGAGGIFKSHTKHRKGAAQFRALDYVERHGYIKGVVKEIIHDAGRGAPLARVTYRDPYRFKLKHELLVAAEGMYTGMFIYSGKKATMTVGNILPLSALPEGTIVCNVEAKVGDRGVFARASGDYAVIVSHDEDKGKTKLRLPSGSKKTVPSACRAMIGVIAGGGRTDKPMLKAGRAWHKYHAKRNEWPRVRGVAMNPVEHPHGGGNHQHIGHPSTVRRDAPAGKKVGLIAARRTGRLRGIKKVEKDN

SEQ ID NO: 30998 - protein, 348 aa, Oryza sativa
MAMASSAYAPAGGVGTHSAPGRIRPPRGLGFSTTTTKSRPLVLTRRGGGGGNISVARLRCAASSSSAAARPMSQPRFIQHKKEAFWFYRFLSIVYDHVINPGHWTEDMRDDALEPADLYSRKLRVVDVGGGTGFTTLGIVKRVDPENVTLLDQSPHQLEKAREKEALKGVTIMEGDAEDLPFPTDTFDRYVSAGSIEYWPDPQRGIKEAYRVLRLGGVACMIGPVHPTFWLSRFFADMWMLFPKEEEYIEWFKKAGFKDVKLKRIGPKWYRGVRRHGLIMGCSVTGVKREHGDSPLQLGPKVEDVSKPVNPITFLFRFLMGTICAAYYVLVPIYMWIKDQIVPKGMPI

SEQ ID NO: 30999 - protein, 289 aa, Oryza sativa
MAVEVATQKIRWGELEEDDEGDLDFLLPPRVVSGPDENGFKKVVEYRFDDKGNKVKVTRTFRVRKIARARLSKSAIERRSWPKFGDAVQEDVGARLTMVSTEEIVLERPRAPGSKAEEPSASGDPLASKSGAVLMVCRTCGKKGDHWTSKCPYKDLAPQTEAFVDRPPTADGSGPPGGAVKGAYVPPSMRSGAVDRVGHDMRRRNDENSVRVTNLSEDTREPDLLELFRTFGPVSRVYVAVDQKTGASRGFGFVNFVHREDAEKAISKLNGYGYDNLILRVEWATPRPN

SEQ ID NO: 31000 - protein, 181 aa, Oryza sativa
MEVLLPLLLACSLLFTIATPIRDITDVCASQISDFQPLLAGAAPLRPPLLRRRHPRRRPHRPPRLAPRQQPPDIAVVIVSPPRPPQEEGRRRRRLAGVVVVRAADAGRVGGRRQLRDPPGPRHAGDLLRDGGRHGVVAHPLRRRRLQLRTQTAAGRLKLGKRAMLLLLLLPPPPISAQAQK

SEQ ID NO: 31001 - protein, 72 aa, Oryza sativa
MFLASPTVSLLVNPRPSKVTHGSRSHPHRRLLPPPPILASFSTLFLTFTSMPDLALGSPDLVREGHRSVGAE

SEQ ID NO: 31002 - protein, 262 aa, Oryza sativa
MSVKFEKETVERTTSATAAAVGKGKDDFLHEVGEAITKGGGPNGYLAAYLKQLQSNPLRTKILTSGTLSGLQEFLASWIAHDRSKSGHYFTSRVPKMALYGALISAPLGHVLISILQKVFQGRKSLKAKILQILASNLIISPIQNSVYLVSMAIIAGARTFHQVRATVKAGFWPVMKVSWIVSPISLAFAQQFLPESTWVPFFNIIGFIIGTYINAHTKKKRLAALRRKHYGDGRDGRDDRRSVGPSGRPDEYGRPDDRPRY

SEQ ID NO: 31003 - protein, 247 aa, Oryza sativa
MRALSRVGVGLAVVSALLLLALAAELYYLFVYKRRRSAAISDAASSPSSSSRELLQLFCFKKPPALASTYAQEPHAGEAVVAVAVDDDDDTVEAQLMRLGSLVGPTRLLFTIKEETKEDLESEDGRSRCGRSRSLAELLHSSETPFMTPASSPLPMDKSFNPLFEPTVAAAVTVSPPPKFQFLKDAEEKMYRRALAEEAMRARRSPQTRSPAAAGEEDGGYITIMVGKNNKVIPLPSPPSNGDGDLQ

SEQ ID NO: 31004 - protein, 215 aa, Oryza sativa
MESSRGKPGLNGSGGGAAAFDYSSRRGYYTGAGAALPPLAAGSRAPPVDPCCVVLRVFVLLGTLASAVVMAADRQSTTVQIAAGEELAPPLRVPVTAKWTYSSAFVYFVVANAMVFAFSAAALAAVRRRSAVVPVMVGDLVAMALLFSAVGAAAQFGLLGERGNAHVRWAKVCDVYGPFCERAMAAVVVALIAAFADLVLLMLTILTIHKASSYY

SEQ ID NO: 31005 - protein, 137 aa, Oryza sativa
MRVDPELGEAGDVEVRDGRPRAPDVPLDDGHQAPREPWDDLRLVRDWGRLVVAPVFAAFAGVRSVIRGVHCGWVPRVVQVNFYLLCSGEMLRKKTLVLAESTFWSTQLAHVPSAWLNASSPPISTGFPSASRWSHLQ

SEQ ID NO: 31006 - protein, 366 aa, Oryza sativa
MAGNNSLLAMDSKLSMLFLLLGFVACSATASHHDPSVVGYSQEDLALPNKLVGLFTSWSVKHSKIYASPKEKVKRYEIFKRNLRHIVETNRRNGSYWLGLNHFADIAHEEFKASYLGLKPGLARRDAQPHGSTTFRYANAVNLPWAVDWRKKGAVTPVKNQGECGSCWAFSTVAAVEGINQIVTGKLVSLSEQELMDCDNTFNHGCRGGLMDFAFAYIMGNQGIYTEEDYPYLMEEGYCREKQPHSKVITITGYEDVPANSETSLLKALAHQPVSVGIAAGSRDFQFYKGGIFDGECGIQPDHALTAVGYGSYYGQDYIIMKNSWGKNWGEQGYFRIRRGTGKPEGVCDIYKIASYPTKNVTGWGS

SEQ ID NO: 31007 - protein, 330 aa, Oryza sativa
MEEFMSAVKQIYGEKVLIQFEDFANHNAFDLLAKYSKSHLVFNDDIQGTASVVLAGLLSSLKVVGGTLAEHTYLFLGAGEAGTGIAELIALEISKQTKAPIEECRKKVWLLDSKGLIVNSRKESLQAFKKPWAHEHEPVTTLLDAVQSIKPTVLIGTSGVGKTFTKEVIEAMASFNERPVIFSLSNPTSHSECTAEEAYNWSQGRAVFASGSPFDPVEYNGKIHVPGQSNNAYIFPGFGLGVVISGAVRVHEDMLLAASETLADQATQENFEKGSIFPPFTNIRKISARIAASVAAKAYELGLATRLPQPRDLEKYAESCMYTPVYRSYR

SEQ ID NO: 31008 - protein, 234 aa, Oryza sativa
MASTTAAAGNGSGSILPTHTIAATAPPFRTHKDADLESRRRRRRRRCLCCCLLVTLVVLLVLAITLLVLFLTVLRVRDPTTRLVSTRLIGLSPRLSFPAMSVQLNVTLLITVAVHNPNPASFTYATGGHTDLTYRGAHVGDAEIDPGRIPSRGDANVTMALTLQADRFAGDLTQLVTDVMGGSVALEASTRIPGRVAILGVFKRHAVAYSDCHFVFGVTEMAVRSQQCSDRTKL

SEQ ID NO: 31009 - protein, 203 aa, Oryza sativa
MDWDARMRAALSAARGVAHLHAAHSLAHGNLKSSNLLLRPDPDATALSDYCLHQLFAPLSARPNAGGYRAPELVDARRPTFKSDVYSLGVLFLELLTGKSPGNASVDGDGAVDLPRWVQSVVREEWTAEVFDVELVRLGGSAEEEMVALLQVAMACVATAPDARPDTADVVKMIEEIGSGHGRTTTVESEDRSRGTPPAGTTP

SEQ ID NO: 31010 - protein, 434 aa, Oryza sativa; identical to SEQ ID NO: 30627

SEQ ID NO: 31011 - protein, 287 aa, Oryza sativa
MLARPYTTTQGTFDNTTVAGVLEYDDPCPTTAAGKIVPIFSPTLPQINDTNAVSNFTAKLRSLASAGYPAAVPQQVDHRFFFTVGLGTHPCAVNGTCQGPNGSRFAASINNVSFVLPATALLQSHFAGKSKGVYASNFPYYPLNPFNYTGTPPNNTNVMNGTKVLVLPYGANVELVMQDTSILGAESHPLHLHGFNFFVVGQGFGNFDPINDPAKFNLYDPVERNTVGVPAGGWVAIRFHADNPGVWFMHCHLEVHMSWGLKMAWLVLDGSRPDQKLPPPPLDLPKC

SEQ ID NO: 31012 - protein, 229 aa, Oryza sativa
MANSPTLTMLVFLAIGLSLVLSAAGVSVESVVTEAFFNGIKNQAPNGCAGKSFYTRQSFLNAARSYSGFANDRTNDDSKREIAAFFAHVTHETGHMCYINEINGANMDYCDKSNKQWPCQPGKKYYGRGPLQISWNFNYGPAGKNIGFDGLRDPDKVAQDPTISFKTALWFWMNNVHQVMSQGFGATIRAINGALECNGKNPGAVNARVNYYKDYCRQFGVSPGGNLYC

SEQ ID NO: 31013 - protein, 266 aa, Oryza sativa
MDTFFLSHGAPTLSIDDTIAAQGFFKSWLPAAVAGAELPRAILVVSGHWEAAAPTVNVIRGNNDTIHDFYGFPKAMYKLKYPAPGAPDLAMKTKELLEQAGFGPVKENHSRGLDHGAWVPLMFMYPEANVPVCQLSLQSGRDGAYHYELGRALAPLRDDGVLVLGSGSATHNLRRMGPEGTPVPQWAAEFDGWLQEALLGGRHDDVKRYEEKAPHGRVAHPSPDHFLPLHVALGAAGEGAKAELIHRSWSNASLSYASYRFTTAKN

SEQ ID NO: 31014 - protein, 332 aa, Oryza sativa
MIYRTLEVHTKSTDFRKATRIVEVTELPAAAEGHVVVKNHYVGINATDVIITNGLYDRPLPFSCGLEGVGEVVTVGEGVENFKIGDAIAYQKMGAFTEYIAVPAATAHKVPAIDPSVLPVLVQGISAAVALEQVGEMKSGETVLVTAAAGGAGQFVVQLAKLAGNHVIGTTSSDEKAEVLKELGCDRVINYNKEDIDTVLKTEYPKGVDLVFDTVGGETFKAAVQNIAVRGRLIVFGNISGYLEDHKAAEPLLSSQVNAILLDRASSVRGFNLSKFADRIPVNLAKLFQLINEGKLKPGVDKTEFRGLEGIADAIEYMFARKNVGKLAIKLV

SEQ ID NO: 31015 - protein, 324 aa, Oryza sativa
MDLAWWFAVAVVVCGLVGGGSAGLLETNPGLAYNFYQKSCPNVDSIVRSVTWAQVAANPALPGRLLRLHFHDCFVQGCDASILLDNAGSEKTAGPNLSVGGYEVIDAIKTQLEQACPGVVSCADIVALAARDAVSYQFKASLWQVETGRRDGPVSLASNTGALPSPFAGFSTLLQSFANRGLNLTDLVALSGAHTIGKASCSSVTPRLYQGNTTSLDPLLDSAYAKALMSSCPNPSPSSSTIDLDVATPLKFDSGYYANLQKKQGALASDAALTQNAAAAQMVADLTNPIKFYAAFSMSMKKMGRIDVLTGSKGNIRKQCRSAS

SEQ ID NO: 31016 - protein, 251 aa, Oryza sativa
MLAVFDPTVAKCPEGLRSPPVAGGAVAAGGAGALMKGFAGAHADAVTVSLGPAGALAYSAANQSPLVPRLFGAVNDIFCLFQGHIENIASLKQHYGLSKTATEVTILIEAYRTLRDRGPLPASQVVRDLSGKFTFILYDTLSKSTFVAADADGSIPFFWGVDSENHLVFSDNVDLLKASCGNSFAPFPKGCFYTTSGGLQSFEHPLNELKPVPRVDSQGQMCGSNYKVDSEAKKDSGIPRVGSAADWSNHF

SEQ ID NO: 31017 - protein, 123 aa, Oryza sativa
MVLRLYGVDNLQSYIRKHIHLAEHFEQLLLSDSRFEVVTPRTFSLVCFRLVPPTSDHENGRKLNYDMMDGVNSSGKIFLSHTVLSGKFVLRFAVGAPLTEERHVDAAWKLLRDEATKVLGKMV

SEQ ID NO: 31018 - protein, 302 aa, Oryza sativa
MATASPPPAQAVASSSATPKANGATAKKVIKVDITSDGICPFCMLGLQNLRKAISCSRTAQLGLDFIIEYHPFLLDPTLGEEPVCKRTRYMQKFGKDRFPVMERVMHERFKAAGLEVTMSGMLSQTTTYHRLLTYAYATGGQDLQLPLVDLLNKGYFQEGKDLGDKQFLAREAVSVGVFKSEEEAVEWLSGDDKLEEVQRGYKKAQDLGISGAPFFVFGNKYAISGAQPPEAFFEVFQEIAKGEVLHCPCAGADSEARKDGERATTPKEMPRELVANAREGETVGVKCDSAATIQARQACVA

SEQ ID NO: 31019 - protein, 194 aa, Oryza sativa
MEATGTRLTRSASLSPRLRRSPTALCVSPRSMHHHHQQQQQSLRRATSDADIARSAPATASSPLPLLLRDILEEDVVVVVDGAGRGKGNDDDDKTSGRGGGGGGHMDMGEYYRRVLRVEPENPLVLRNYGRYLQEVEGDLGGAEECYARALLASPDDGDLLSLYGQLLWETSQDKDRAAAYLERAVQAAPDDWY

SEQ ID NO: 31020 - protein, 232 aa, Oryza sativa
MLQASSELQQQPAAAAAAAGMWVPGMSPQAVDAGLSARAQEIARRREEMLGMLHDLPESEYELSLTDLVEKAGGVGVAPPSPSPSEGKAEPGPARTASGRQSEQQQQAAAAAGRPERRGSARRWDSAGGSSFRSSSDGVLLNFYMPRSFTRSFTAPRTTGPGRPPSVSGGRTASVCSDRDKRERDGETVRCWSLLWDRRWRKSSRGDHGNESAIRAAILKAAKHNASSPKKI

SEQ ID NO: 31021 - protein, 58 aa, Oryza sativa
MAASPSDSSSTSCMGPAAVLSPHPDRCLEDRHVRNCSWVRDINARNDCSQCHAEDGSP

SEQ ID NO: 31022 - protein, 211 aa, Oryza sativa
MTDTLKDSNDKSIHGQGSVVSLTNLWQEWHYDYGVLTVLTAPLFLCSTMGEDCSINKECSPPDEHTYLQLFNRRKVFSVRCSPESFIVQVGETADILSGGKLRSTLHAVSRPYGSTNISRETFVVFLQPSWDKKLPYSGHCFAGDDEPSEGDDSTFSDGSDMFSSEHTLMQDILKKIPPLSSRVKEGMTFAEFSRQTTKQYYGGGGIQQNN

SEQ ID NO: 31023 - protein, 170 aa, Oryza sativa
MASHAHCAPAANLSPSPGPCLPLRLRRRDRELPRPARAALQRRHAVGIVRTNRRRGAVACRRRRVRHEEEDEEEYGHNEEMARLERYNEGARDQALLVKARVDDEVEVVLVFKGFSSRLSGRTAADPAMSVLPERAIIQTVDVVRGPFNPTNIEYLEKDLPWDDFKSRLH

SEQ ID NO: 31024 - protein, 110 aa, Oryza sativa
MWRSSENGCGHAWRNTRCSKLSQRKRQKQTQLSSYCLLPLKKVRRLQEMEVRLSRPSLDASPCKSRQLLNLLACSAIAPIVWILCHLYKFMLHEFCCLRCTSYSYHSNDV

SEQ ID NO: 31025 - protein, 209 aa, Oryza sativa
MNILNQPINPGGHPAFPAARGTGQLMPASVRFDGLSTQQSTAAAVGRAHAGQSPRWQAQTLRRPSSYVGVEHDEPADAAAAAALAPFQPLTLDFLRSLLDRNAAVAADQGGGADVAPPPPPLHALRVVVSSAVELDARQTELIARKMRRITGFASLTIENVVDPSLIAGFVVCYGPGESHVIDLSVKGKLAMLKNRVDSFDQTIAHPHQ

SEQ ID NO: 31026 - protein, 451 aa, Oryza sativa
MEQARVGSAMIFLLLAFLSEVSASISQQQQQQCGGASSAGVRAGFWLPSSSHYSPLGSIDTSLYSHLYYSSLSIDETRCAVAPPSSGEESSILSNFSSSIKSSGGGFAVKTILSIGTDEFREDVSNAAFSRMASEKNLRRAFINSSIELARANGFDGLDLAWRFPATQLDMENLGDLLAEWRAEIMEDSTTRSTEPLLLTATVYFSNHLFGMADTNLNYPIDDMSSSLDWVNIITFSLHKNSNVTTADAPLYDKDSHFSASYGVISWLDAGLPPCKLVMGIPLFGRSWFLRNKDKNGLGAPTAAAGTKQRKSNQIGVIAYAEIEEYLKSQSVFVTHDNQSVADYFYSGDLWVSFDSAVVVQEKVEFVAKSQLLGYFLSTISFDDSNYTLSKQASQSWNQYHVSSYAQGSFGIMQEGAIIQDLHASTGSPSSWYSKTLSYLLLSIILVLEVL

SEQ ID NO: 31027 - protein, 236 aa, Oryza sativa
MPKGSLYDQLHQQTSEKKALEWPLRLKIAIGSAKGLAWLHHSCNPRILHRNISSKCILLDDDYDPKISDFGLARLMNPIDTHLSTFVNGEFGDLGYVAPEYARTLVATPKGDVYSFGVVLLELVTGEEPTQVKNAPENFKGSLVDWITYLSNNAILQDAVDKSLIGKDHDAELLQFMKVACSCVLSAPKERPTMFEVYQLMRAIGEKYHFSAADDELTMQPQNAEAEKLDELIVAN

SEQ ID NO: 31028 - protein, 412 aa, Oryza sativa
MAGLPFLLALHIALLLLLPCSCQVGDSCSSARDCGAGLYCGNCAATGKTRPSCIRDLAIQPTSIVKGLPFNRYSWLVTHNSFSIIGEPSHTGVERVTFYNQEDTVTNQLRNGVRGLMLDMYDFNDDIWLCHSLQGQCYNFTAFQPAIDTLKEVEAFLSENPTEIITIFIEDYVHSTMGLSKLFTAADLTKYWYPISEMPTNGKDWPSVTDMVAKNHRLLVFTSDSSKEASEGIAYQWSYLLENESGDPGITGSCPNRKESQPLNSRSASLFMQNYFPTIPVENEACKENSVGLPQMVQTCYTAAGNRIPNFIAVNYYMRSDGGGVFDVQDRINGVTLCGCNTIAACQAGAPAGACKDTGAPNRTSSSVNGNVYSGTIEFKSPASAASISNANIPSKFVSLLLLGLVLIIKPF

SEQ ID NO: 31029 - protein, 243 aa, Oryza sativa
MADDAGGGRREYSIIVPTYNERLNVALIVYLIFKHLPDVNFEIIVVDDGSPDGTQDIVKQLQQIYGENRVLLRARPRKLGLGTAYLHGLKHASGDFVVIMDADLSHHPKYLPSFIRKQKETGADVVTGTRYVQNGGVHGWNLMRKLTSRGANVLAQTLLQPGASDLTGSFRLYKRNVLEDLISSCVSKGYVFQMEMIVRATRKGYHIEEVPITFVDRVFGTSKLGGSEIVEYLKGLVYLLLTT

SEQ ID NO: 31030 - protein, 175 aa, Oryza sativa
MAEEAKKVEVTKDIAEEKAVVPLPTPPATEHDDSKAIVLVKEAEATGGSAERDAYLAKIVSEKRLVLINAWEESEKARAENRAAKKLSYITSWENAKKAEMEAELKRIEQELEKKKAAYEEKLKNKLALLHKTAEEKRALTTAKRGEELIMAEEMAAKYRAKGEAPTKLFGLLKA

SEQ ID NO: 31031 - protein, 473 aa, Oryza sativa
MPSPDQSLSNSPDIDRIINSICPSSSPRHMTPEKVSNEFDNVQLTTPPPSDIDMSDPEHFACNYVPQEVRKALAKLRSSNSSFERAMSQASSGDVHALSDSEDCDERWNVGTKRNQGCGRGRGLTLCLKVWNLPKGVRIPVLLNASGEPVGKEAGTLSTFLGALARDGILAPLTHQDWRRVPEKNKDVMYHIVKLKFDIAPAAEFWIMKCIGRKWKSWKALLKQKHYDTHETVEECLADQNPRVLKEQWQYLVAYWGTEKAKAVSSRNKACRANVTATHTAGTKSFARIIEEEKQKRPNNEEPTAADLFLLTHTHRNGKPMKKEKADIIARVREQSHKQAECSGSDSAAHKVGLESCSIGLRGKRGHRRKAVLQASFKEAEEAKRKAEDEAATLRKKMVAMEESQKKLQEDLANMKSTVSAMQKATSTGDLSDGQTQNFPQVQNSRSAHEILQPYLDYSALYDPSASPSPRFR

SEQ ID NO: 31032 - protein, 480 aa, Oryza sativa
MDVQKSLETDEELKRNTCDLEAPVYQDNAQDEISSKLISAKAADPIKKMEARDFELDEESFDTVCQENVEAATEIEDGSLNRDQDDITSPKASQEDALEEVGTELPHESLHENRHGAKDEQTLSLIEPDTGNAEKLPNEADSVQSPPCTEQEESIESSYVEVRSTTEGQVESEVIETNEEDQHTTAGGHTEEQIENLHDDKSKETCSEEISDEQAPEITEPVSHTDRNFAYEKEIPASSTCMDKKESMISNNEVSNFEKALETHSDSPNLHVNQDKKDETADNQTVVDHNTVLDKLEDSNRQEEQETAAQKLPKETEGNQEFMAITEPVIKEENVHETVEGNTQAVKIKSNEEKELFDSQVQERGLNVVSPKATSEADEKFVEITKPEFSTDEEHSPKADESNKPDENTCDEKTKAEEETNNITDEATVKIEERGAEQKVSHKKHNILSGVGSKVKHQLAKVKKAIIGKPGHTKSESPKS

SEQ ID NO: 31033 - protein, 166 aa, Oryza sativa
MDSGSSSEVITHIEIQKEIDTIHVIIHIGFPNLLKKKGAIEELEKDLQKEVNSVNQRLNIGIEKVKEPYRQPNILAEYIAFQLKNRVSFRKAMKKAIELTKKTDIKGVKVKIAGRLAGKEIARAECIKKGRLPLQTIRAKIDYCCYPIRTIYGVLGVKIWIFVDEE

SEQ ID NO: 31034 - protein, 258 aa, Oryza sativa
MISCISPSSGSCEHTLNTLRYADRVKSLSKGSNTKKDLSLAAAPLRESSPSLLASAVPSFSSAEVMNDITERSNFGWTKQQYVKEHQAPTFVDRMQKVKEDTEFSLSNGGYFKEQRTKGSVPVGIAEVPDTVYQQGRQPTRKARDLTSDNNMRNSIAYPIIRRVVPDEDEHLNELLQEEEDLVSAHRKQVEETLDMIKEEMNLLVEADQPGNQLDDYITRLSGILSQKAAGIVDLQARLAQFQRRLNENNVLLYAQCP

SEQ ID NO: 31035 - protein, 246 aa, Oryza sativa
MFLSRIVLRDLDSIDSPAASMASSKKLVTRDEWERKLRDVKIRKEDMNRLVMNFLVTEGFVDAADKFRVESGTQPDIDLATITDRMEVKRAVQSGNVQEAIEKINDLNPTILDTNPQLYFHLQQQKLIELIRAGKINEALEFAQEELAPRGEENQVFLEEIEKTVALLVFEDIKNCPYGELLDVSQRLKTASEVNAAILTSQSHEKDPKLPSLLKMLIWTQNQLDEKAAYPRINNFSTAALEDPAI

SEQ ID NO: 31036 - protein, 383 aa, Oryza sativa
MLNAGIQPDSVALVGILGAIAGLSSLTKGKEIHGFLIRGKFPVEGAVVSSLVDMYSGCGSMNYALKVFDEAKCKDVVLWTAMINATGMHGHGKQAIYIFKRMLETGVSPDHVSFLALLYACSHSKLVDEGKFYLDMMVSKYKLQPWQEHYACVVDLLGRSGQTEEAYKFIKSMPLEPKSVVWCALLGACRIHKNHELAMIATDKLLELEPDNPGNYVLVSNVFAEMGKWNNVKEIRTKMTEQGLRKDPACSWIEIGNTVHTFTARDHSHRDSQAIHLKLAEITEKLRRESQYVEDTSFVLHDVSEEEKIDLLHRHSERLAISFGLISTASGTPLRIAKNLRVCGDCHEFTKLVSKLFEREIVVRDANRFHHFSGGTCSCGDFW

SEQ ID NO: 31037 - protein, 62 aa, Oryza sativa
MKETALNYNADEQIKFNIRAFLSCSLVKILFPSLECSGVVGNHSLVASFIMPNKKEIGLCFC

SEQ ID NO: 31038 - protein, 161 aa, Oryza sativa
MSDSEEHHFESKADAGASKTYPQQAGTIRKNGHIVIKNRPCKVVEVSTSKTGKHGHAKCHFVAIDIFNGKKLEDIVPSSHNCDVPHVNRTDYQLIDISEDGFVSLLTESGGTKDDLRLPSDEALLTQIKDGFAEGKDLIVTVMSAMGEEQICALKDIGPKN

SEQ ID NO: 31039 - protein, 455 aa, Oryza sativa
MAAAGASALRPHLALLPAGGGGGGGGGTRSYALQALSFVSPLLPHCGRRRRCVLRSKASSSPSPPPSPGKEAVAVPTAESCVNLGLELFSKGRVKDALEQFENALELNPNPVEAQAALYNKACCHAFREESNKAADCLRTALRDYNLKFGTILNDPDLAPFRASPEFKELQEEALRGGEDIGSGFRRDLKLISEVQAPFRGVRRFFYVALTAAAGISTFFTIPRLILAVQGGDGAPDLLETVGNAAINIGGIVVLVALYFWENKKEEQQITQISRNETLSRLPVRLSTNRIIELVQLRDITRPVILAGSKASITRAMQRAERYRTELLKRGVLLIPVIFGASQKAQSKPRGFGSSRSAASAPSVGDDFEKRTESIAAKSRLKAEERFKADIVSPEQWESWIRDQQESEGVTPGEDVYIILRLDGRVRRSGRGMPNWNDILQELPRLEELLSKLER

SEQ ID NO: 31040 - protein, 415 aa, Oryza sativa
MASAFSPATAAPAASPALFSASTSRPLSLTAAAAAVSARIPSRRGFRRGRFTVCNVAAPSATRQEAKAAGAKESQRPVYPFAAIVGQDEMKLCLLLNVIDPKIGGVMIMGDRGTGKSTTVRSLVDLLPDIRVVVGDPFNSDPDDPEVMGPEVRERVLEGEKLPVVTAKITMVDLPLGATEDRVCGTIDIEKALTDGVKAFEPGLLAKANRGILYVDEVNLLDDHLVDVLLDSAASGWNTVEREGISISHPARFILIGSGNPEEGELRPQLLDRFGMHAQVGTVRDAELRVKIVEERARFDRDPKAFRESYLEEQDKLQQQISSARSNLGAVQIDHDLRVKISKVCAELNVDGLRGDIVTNRAAKALAALKGRDTVTVEDIATVIPNCLRHRLRKDPLESIDSGLLVVEKFYEVFT

SEQ ID NO: 31041 - protein, 216 aa, Oryza sativa
MMDLDPRLYENVSVSDNDVRNIVLSYLMHNCFKETAETFLSSTGLELPVDYTVDVDKRKAIFSFVLEGNALKAIDLTEELAPNLLENDMDLHFDLLSLHFIELVRSRKCTEALEFGQKKLTPFGKVPKYVEKLEDFMALLAYEEPEKSPMFHLLSPEYRQNVADSLNRAVLAHANRPAYSSLERVIQQATVVRQYLQQEVGKDSYPPFSLKAFLNK

SEQ ID NO: 31042 - protein, 410 aa, Oryza sativa
MAIFFLVLQARGWSSHPFSFPSQPPDIKNWFSSYEYESPEVPELVGGNGGNSGSETQDPLENIQVGVPVDSLLEPTTHDGDGDGDGDSALRGNQCGQQHEHEVSAIREFIPISKSKVERGTKRKQSLRSLFGDGFLDNIGETSETETQAVLSVQRNEAEPLPDRNAMGLPDDDDTQGGQEGAIECSELPVDCNGIDVGDTQEGSQVDQEKEQSKLLIGDGMSSCHADKITPKDGNEQSKLSVDCTRTCKDRTKRRFDGNGIKSSLPSIGCNDIIIPNTEENSPGEETCHGNPAMDDKEQEETVAADGFVAIKRKEKLEQTFNTNKIPKPPTRRAKSTTLQENRDIVEQKVVVQERTSRSPLADMTNVSEVAAAPTTTEIRGKWKCPRKGKHYVGPPLKQQRLGQWLRRLD

SEQ ID NO: 31043 - protein, 357 aa, Oryza sativa
MQPQQGRFFGREEMSNGVEYDAAYAATVAAVAYAIAAKEEEKQATEETRVKKKLTSEKKPVANDEPSTTPTLKLPPNRQGILKRPRQTEGSRITRRFSGKEIVPDEEDDGLEANVSVRRPVRTAQKIPEGGISGQNMVGKVLDSVPSIRKAPSFAKPLPEKKGSMKFEQEQAIPTVPPNVRPTALFPREKKESKKFDQDQAIPRVPPDVRPTASFSREKKESKKFEQDKANQMPSLASAPTSSYSSEAEAMADTWEKEKMAKIKKQYNMTMDTIVEWEAEKKAKAKRQMELKEGDNSERKREKALEEYNDEITRINKVAAASRLTAEEKRRSAERKVREKAERIRVTGKLPGACGCF

SEQ ID NO: 31044 - protein, 377 aa, Oryza sativa
MATLLRRSVGPARQLLLRPRPLPLPHAASSTRSFSRYYSRDDVSRYEALSTPVNWGVSIVPEKKAFVVERFGKYVKTLGSGIHVLVPLVDRIAYVHSLKEEAIPIPDQSAITKDNVSIQIDGVLYVKIVDPYLASYGVENPIFAVIQLAQTTMRSELGKITLDKTFEERDTLNEQIVRSINEAATDWGLKCLRYEIRDISPPRGVKVAMEMQAEAERKKRAQILESEGAMLDQANRAKGEAEAILAKSEATARGIRLVSEAMRTKGSTEAANLRVAEQYMKAFANLAKKSNTILLPSDAGNPSSLIAQSLQIYKHICQTNSLKSGKYLTDALEETEPEEEELDSTDLPSLSSGMPSPDMPDDHDKTFSLQRRNKDKH

SEQ ID NO: 31045 - protein, 204 aa, Oryza sativa
MGTERKSMFISDESKKLTAYHESGHAIVALNTQGAHPIHKATILPRGSALGMVTQLPSQDETSISKKQLLARLDVCMGGRVAEELIFGEDNVTTGARNDLHTATELAQYMVSNCGMSDAIGPVHVKERPSVEMQSRIDAEVVKLLREAYGRVKRLLKKHEKQLHALANALLERETLTADEINKVVHPYQEEPQLSFQEEDFALT

SEQ ID NO: 31046 - protein, 52 aa, Oryza sativa
MPFTPGPYSGVSTLALVARASALGVGVVYGAVKLSILKATKPNKKEAANAHH

SEQ ID NO: 31047 - protein, 69 aa, Oryza sativa
MADEEPVDPKKYLEERCKPQCVKPLYEYEKCVKRVEKDDTGHKHCTGQYFDYWSCIDKCVAPKLLEKLK

SEQ ID NO: 31048 - protein, 209 aa, Oryza sativa
MLEAAMFGGIPEGPMYPFSMPSHRSPSLYPHVEHAPSPALTEQRLLREQQDDEYLASLQADQEKELKALQEAELRRLEETAAREAALEKQKQEEEERRKKQLEEEELESSLASKQASLPSEPAADEEGAVTLVVRMPDGSRQGRRFLKSHKLQFLFDFLDIGRTYKPGTYRLVRSYPRRAFTTGEGDMSFSDLGLTSKQEALFLEKITE

SEQ ID NO: 31049 - protein, 278 aa, Oryza sativa
MAAASVLLLLPSPFLRPSSPAHRARCGIATTTTTSTSGRRGLFLFASRCRPGPRRRAASAAVPPEHGLSQPQPQARAVGSYEAALGDAKDALYAALEGMNRGIFGMTSEKRSEIHALVELLESKNPTPEPTDKLQDKVDGCWRLVYSTISILGKKRTKLGLRDFISLGDFFQMIDVKEEKAVNVIKFSARALKILSGQLTIEASYKITTKTKVDITLDSSTITPDQLMNIFQKNYDMLLAIFNPEGWLEITYVDESLRIGRDDKANIFVLERADPSEV

SEQ ID NO: 31050 - protein, 395 aa, Oryza sativa
MMQQIAWEASPALESSERYDLLDNHTMDALAGGIGNATFGKSKKGRCTDLSSSLGRESTSEYVSLEDLAPLAMEKIEALSIEGLRIQSGMSEEDAPSNISAQPIGEFSSLQGKCAGNTLSLGLEGTAGLQLLDVKQSGGDVDGLMGLSITLDEWMRLDSGIVDEDEQFTDRTSKILAAHHAKSMELVAENQNVDKKNRRSGRRWGLLGNNFTVALMVQLRDPLRNYEPVGTPMLALIQVERVFVPPKPKIYSTVTDKGNSEHDDEEPKTEEVLEKALVKEEKIEEEEDSVPQFKVAEVHVAGFKSEPEKTKSWGNQTQQQSGSRWLLAAGMGKGNKHPLMKSKAIAKPTKEAAGQSEDTLWSISSRVHGAGTRWGELAGPKRNPNILLQKEKRFR

SEQ ID NO: 31051 - protein, 217 aa, Oryza sativa
MIQLLFLVVLAEAAVALLLMVKVGPLREVAMRGVEQAKTGKGPATVKTLACTLSVILMSSVASILKIQNRGLKLGTVSPMDQVLWRTHLLEASLIGFTLFLAFVIDRLHHYLRKLITLRKAANTSREEVEKLQMENRLFREKEEKSSSEIKKLHQEIAKLNESMKKLKSESEDHERKVLEAEAHVNALQKQSEELLLEYDRLLEDNQILQSQLHYKG

SEQ ID NO: 31052 - protein, 128 aa, Oryza sativa
MNFEIQAKYINDFKTLLDKDERIIRHLVMKRDEAITEDCSPPPEFHTLRAQQQYMDDEYIDDEDDGKEEQEPEEDWDDKGEMENAGYEDDDEPEIILVDEVERDNNENIRRRNRTMKVEKYAAEKVLR

SEQ ID NO: 31053 - protein, 89 aa, Oryza sativa
MAMRSALTSLPLRLRSPAPVAAACGGMRLMSDGKGRVLSEEERAKENVYVQKMERERMEKRKKKLEKEKAEADKGNPAASDKNTEGGSN

SEQ ID NO: 31054 - protein, 261 aa, Oryza sativa
MSGVGFSKIDGNSQQEEEEKEADDLDRDLGMMREELGREVLNTWLWGKDMDSILNEESEWQGTLPGWACPREDNYQSESEFSVDPDECDSFDGYWYEFRYEDGNPYYAAEREERWENQVMEQMKFTVSIAKQRQNDFFCPIFEGSLHVEGPCHLDPDILSTEHLLPQLPKWKNRWVNGYNHRNEPCRRAIQVYDLNVSSPHDEPMEIYGIFAFRDVRNNQQRNHVFQYSRDKPYKLRPVRDFMTKFVLFIPFVLKGSPPFL

SEQ ID NO: 31055 - protein, 368 aa, Oryza sativa
MESSLVDTAAATLCLAAAVGGRRRAGSFLNCSCSSKEYRVSASYSIGRMLSGVRSAARKKLFRSEPADLLGISWSPDSPPSNGTDGGHHHHWWTALENNFVLESSEDEYGGVVVDADRLPSDKAAFARSLAASLSYWKSVGKKGVWLKLPVDRSEFVPIAVKEGFKYHHAEEAYVMLTYWIPHEEPCMLPANASHQVGVGGFVINDQMEVLVVQEKYCGSSLDGAWKLPTGFILASEEIFTGATREVKEETGVDTEFVDVVAFRHAHNVAFQKSDLFFICMLRPTSNNIKIDETEIQAAKWMPLEEFVKQPFIQGDHMFQKIMDICIQRLRKCYCGLTAHNVISRFDGRRSTLYYNVSEPEDVNCNAS

SEQ ID NO: 31056 - protein, 226 aa, Oryza sativa
MQVCHRDLKLENTLLDGSPAPRLKICDFGYSKSSVLHSQPKSTVGTPAYIAPEVLLKKEYDGKTADVWSCGVTLYVMVVGAYPFEDPEEPKNFRKTIQRILNVQYSIPENVDISPECRHLISRIFVGDPSLRITIPEIRSHGWFLKNLPADLMDDDSMSSQYEEPDQPMQTMDQIMQILTEATIPPACSRINHILTDGLDLDDDMDDLDSDSDIDVDSSGEIVYAM

SEQ ID NO: 31057 - protein, 152 aa, Oryza sativa
MMKLGKAESARGKVAPAGSGGRARMLVTVTVLGSAGPLRFLIDEGETVAGLIRAALRCYAREGRMPLLGADAAGFLLYTANGGSDALSADEKIYFNGCRSFLLWQKAARDTMAKGGRPELANVATCNPCKKRGGGGWKGGLNKFLLSFSFKV

SEQ ID NO: 31058 - protein, 51 aa, Oryza sativa
MARLPSTGSASRRHLCESAPPGARLVASSSRPPRSSPQSIPRSSLWETECL

SEQ ID NO: 31059 - protein, 469 aa, Oryza sativa
MFEAKVASGNGEQTLSRDVYRLGHRLDFFRMLPFFYTTIGFYFNTMMVVLTVYAFVWGRFYLALSGLEAFISSNTNSTNNAALGAVLNQQFVIQLGIFTALPMIIENSLEHGFLTAVWDFIKMQLQFASVFYTFSMGTKTHYYGRTILHGGAKYRATGRGFVVEHKKFAENYRLYARSHFIKAIELGVILTLYASYGSSSGNTLVYILLTISSWFLVLSWILAPFIFNPSGLDWLKNFNDFEDFLNWIWFRGGISVKSDQSWEKWWEEETDHLRTTGLFGSILEIILDLRFFFFQYAIVYRLHIAGTSKSVLVYLLSWACVLLAFVALVTVAYFRDKYSAKKHIRYRLVQAIIVGATVAAIVLLLEFTKFQFIDTFTSLLAFLPTGWGIISIALVFKPYLRRSEMVWRSVVTLARLYDIMFGVIVMAPVAVLSWLPGLQEMQTRILFNEAFSRGLHISQIITGKKSHGV

SEQ ID NO: 31060 - protein, 420 aa, Oryza sativa
MSLTEVRIGEEVWLTCLSHALTTETEEVMGLLFGDIKHSSRGGVTALIWGASPQMRCERKKDRVEVNPELLAAATAQAESLSATIGEKTRVIGWYHSHPHITVLPSHVDVRTQAMFQLMEPGFVGLIFSCFSEDAQKVGKIQVIAFQSLGGNQQSVVPVNDPVINLESSWSSLDDTSHPALIEGIEQDTGDSKSSRNSKVWAKSSDVDFYPHFDANHSAKHQSKENAIVAYDPNNAPETPVDLDESDMTPSIQEALHRSNMDISGAEYVRKEVPLYVFPTRHLLKLDTTLTSYCDMQHVVSEEEKSAYNQAMHQNIRDGKIHPLTSIHHASTYNSSLCKLMEYCLSPAITVLQDRLKENELRLSMLMEEAKQLEAENQSMRNDSPRRLMYHGTSGTSSLMAQDKQMSPRSPSGTGRRKAS

SEQ ID NO: 31061 - protein, 226 aa, Oryza sativa
MAATTTIPARPLLAAVLAALLLSAASAADSKNNPADQLVALINSNRTASKASTLDDNQGLGCIALQYIKAYEGQCNQVGESKKPPETSFAETFAPNCGVQAATLTKITGRLLACQSNYATPDQAFNFLVNDAKSIQVLHSKNHTEVGAAVSGTSGGGPYFWCVLFSSGEPTTSFKVDGGVPKSVRPGCFSGNNDDCMGANAAVSIGAGTWRLVAALLFSAACVFAL

SEQ ID NO: 31062 - protein, 376 aa, Oryza sativa
MELSSLTQTNISLPFITATADGPKHIETTLTRAKFEELCSDLLDRLRTPVDNALRDAKLSFKDIDEVILVGGSTRIPAVQDLVKKMTGKDPNVTVNPDEVVALGAAVQAGVLSGDVSDIVLLDVTPLSLGLETLGGVMTKIIPRNTTLPTSKSEVFSTAADGQTSVEINVLQGEREFVRDNKSLGSFRLDGIPPAPRGVPQIEVKFDIDANGILSVSAVDKGTGKKQDITITGASTLPKDEVEKMVEEAEKFAKEDKEKRDAIDTKNQAESVIYQTEKQLKELGDKVPGDVKGKVEAKLTELKDAVAGGSTQTMKDALAAPNQEVMQLGQALYSQQGAPGAGPTPGADAAAGSAGPSEKPGGEEGDVIDADFTDSQ

SEQ ID NO: 31063 - protein, 275 aa, Oryza sativa; identical to SEQ ID NO: 30518

SEQ ID NO: 31064 - protein, 426 aa, Oryza sativa
MERISTNQLYNSGIPVTVPSPLPAILATLDENIPRIPDGQNVPRERELRSTPMPPHQNQSTVAPLHGHFQSSTGSVGPLRSSQAIRFSSVSSNEQYTNANPYNSQPPSSGSSSTLNYGSQYGGFEPSLTDFPRDAGPTWCPDPVDGLLGYTDDVPAGNNLTENSSIAAGDELAKQSEWWNDFMNYDWKDIDNTACTETQPQVGPAAQSSVAVHQSAAQQSVSSQSGEPSAVAIPSPSGASNTSNFKTRMRWTPELHERFVDAVNLLGGSEKATPKGVLKLMKADNLTIYHVKSHLQKYRTARYRPELSEGSSEKKAASKEDIPSIDLKGGNFDLTEALRLQLELQKRLHEQLEIQRSLQLRIEEQGKCLQMMLEQQCIPGTDKAVDASTSAEGTKPSSDLPESSAVKDVPENSQNGIAKQTESGDR

SEQ ID NO: 31065 - protein, 178 aa, Oryza sativa
MADPMLQGRFPMRGLYQALAVAAMCLQEQATTRPHIGDVVTALSYLASQTYDPNAPVQHSRSNSSTPRARNLAGWNEDRRSVRSPNHHSPDLRREAARSSRAEVSRTSSTGDSGRRSGLDDLDMTGSQMGSPAQTGRKRETPRTADRQRAIAEAKTWGENSRERKHPNGHGSFDSTNE

SEQ ID NO: 31066 - protein, 171 aa, Oryza sativa
MVVALGPGRFYGSSLPRPRFFSGGDRVEPPVAVTDPLMAWAHEAHWSMGGLSSKRLRLQGRIEGSIDKLRRRGQEEAGEEAQRRVRPRRDHAGGGGQEAEARSNLYTGEDFTEEEGRRGGSHPGAGEGVTEGEGCCRGGYCCTGEGVAEEEGRGKEDIAEDEALREVACLM

SEQ ID NO: 31067 - protein, 363 aa, Oryza sativa
MEVKVCTPDDACRISKISELFVYQNFSRVPVDNVSAGDICAVCGINDIMIGETIADKVSGTPLPTIKIEEPTVRMSFSINTSPFVGKEGKYVTSRNLRDRLYRELERNLAMKVEDGETADTFLVSGRGTLHLTILIENMRREGFEFMIGPPKVINKTVDGKLQEPYEIAAVEVPEEYMGSVVELLGKRRGQMVDMQPSGPEGTTLLKYKIPTRGLIGLRNAVLTASRGTAILNTIFDSYGPWAGDLSSRDQGSLVAFEDGSTTSYALLNAQERGILFVSPGQDVYKGQIVGIHQRPGDLAINVCKKKAATNVRSNKETTVVLDEALSYSLDDCIEFIQEDELVEVTPASIRMCKNPKVSKKNR

SEQ ID NO: 31068 - protein, 183 aa, Oryza sativa
MDANGSRSKAIARLLKKLGVQRPYLVKGGFQSWAKNLRVKELKPETALTVINEDAEEILEDIKPTPTLVLGSLLGLSAAAYALLEWETTLQYIGVLSLGLTIYLRFSTYEGSEDLEQDLKLLLSPLRVGAEAFSWAAKKLEPSKIGLATSPSTTAVQDRVLQAAAKHESQPSDAEAGSLVSEA

SEQ ID NO: 31069 - protein, 100 aa, Oryza sativa
MDDDCLTKAIIGTIGDVDSYQLPDAKGYSSLMRYLLGITVEERQQRREEILSTSLKDFKEFADAVETINDNGVVVAVASPEDVEAANKENPLFSDVKKCL

SEQ ID NO: 31070 - protein, 274 aa, Oryza sativa
MFDTVLRNFTPDVPAGTASRPRQEDAQEFLSFAMDRMHDELVKLNGNGSNSKEGMIVSSNDDDAWETVGKKNKSAIMRSQSFVPSELTAIFGGQLQSCVKATGNKASVTVQPFRLIHLDIFPDAVQKLDDALRLFAAPESLEGYRTAAGKAGLVTARKSVKIHSLSKIMILHLKRFSYGSHGCTKLFKPIHFPLELVLSRDLLSSPSSEHMQSRRYELVATITHLGANPSRGHYTADAKSASGQWLRFDDDNVTPVSLNKVLHDQAYVLFYKQL

SEQ ID NO: 31071 - protein, 344 aa, Oryza sativa; identical to SEQ ID NO: 30654

SEQ ID NO: 31072 - protein, 369 aa, Oryza sativa
MEQGQGDRYWCHHCEEVIEPVEPDMKCPSCDSGFVEEMGSAGFEPSTNLRSDRISLWAPLLLGMMGGSSRRARRLRRQIMEDDDDDDDDEDDEDDSDHELEDLFRRQRRGSSLVRLLQTLRDDLRGLDDIGRDSDRDRERERRERERLRERERERERMRERERERRRERTESLILINSNNEAIILQGTFGPDDNQDDSSNTSSGVSLGDYFLGPGLDILLQHLAESDLNRSGTPPAKKEAVEALPTVNIQEVLGCSVCLEDFEMGTEAKEMPCQHKFHSQCILPWLELHSSCPICRFQLPTEESKNPCESAGGIVSVNDDGDDAGTSSDVDSANQPGSPIFSALSALFSNPSSSSSSSSDDNAPHSSES

SEQ ID NO: 31073 - protein, 126 aa, Oryza sativa
MALLAVHAMAASPATFPSSHHHAAVSSYCALPAAAAFSRSRSRVAAAAAATLSAPLTPVLEVYCGRGDKKTKRGKRFNHSYGNARPRNKKKGTGPTRLFAPPAPPRKDQFDDGEVTPIDIDDDILE

SEQ ID NO: 31074 - protein, 220 aa, Oryza sativa
MCHSKGALLCIDSTFASPINQKALTLGADLVIHSATKYIAGHNDVIGGCISGRDELVSKVRIYHHVVGGVLNPNAAYLILRGMKTLHLRVQCQNNTAMRMAQFLEEHPKIARVYYPGLPSHPEHHIAKSQMTGFGGVISFEVAGDFDATRRFIDSVKIPYHAPSFGGCESIIDQPAIMSYWDSKEQREIYGIKDNLIRFSIGVEDFEDLKNDVVQALDKI

SEQ ID NO: 31075 - protein, 396 aa, Oryza sativa
MPLSYSAAAAAAPSPLAARSRGLLRRPPRSSPVVVRCKKIDQLRAVNGIPPYAPVSNRSLLSPVTLPIIRDANIKNDTRLRIFSGTANPSLSQEIASYLGLELGKINIKRFADGEIYVQLQESVRGCDVFLVQPTCPPANENLMELLIMIDACRRASAKNITAVIPYFGYARADRKSQGRESIAAKLVANMITEAGANRVLVCDLHSSQAMGYFDIPVDHVYGQPVILDYLASKTICSDDLVVVSPDVGGVARARAFAKKLSDAPLAIVDKRRHGHNVAEVMNLIGDVRGKVAVMMDDMIDTAGTIAKGAELLHQEGAREVYACCTHAVFSPPAIERLSSGLFQEVIITNTIPLKEDKSFPQLTILSVANLLGETIWRVHDDCSVGHEPYSSLDID

SEQ ID NO: 31076 - protein, 391 aa, Oryza sativa
MQYLFDEDGRRYLDAFGGIATVCCGHCHPDVVEAMVNQAKRIQHSTVLYLNHAIADFAEALAAKMPGDLKVVFFTNSGTEANELALMIARLYTGCHDIISLRNGYHGNAAGTMGATAQCNWKFNVVQTGVHHALNPDPYRGAFGSDGEKYARDVQEIIDFGTTGRVGGFISEAIQGVGGIVELAPGYLPAVYNMVRKAGGLCIADEVQAGVARTGSHFWGFESHGVIPDIVTMAKGIGNGIPIGAVVTTPEIAQVLTRRSYFNTFGGNPVSTAGGHAVLKVLEKEKLQENAFVVGSYLKERLNKLKEKHDIIGDVRGKGFLLGVELVTDRQKKTPAKVEIGHVMNHMKDMGVLVGKGGFYGNVFRVTPPLCFTKEDSDFFIEAMDISLSKL

SEQ ID NO: 31077 - protein, 194 aa, Oryza sativa
MPRSSSSSKPILGRAMAILALPLTPISKAKGPIARNLLLFKKRGAAGKARRMLSSYGYKPHRHYNYDYVGEYQFSPSSSPLIAYPPGVSSWRRATKKRRSKARMILASLLCGGDGDLDVAVLDGLPRADEPRAAVEWEECRRDGGGAYGEGDQYEEEEEEEDDEGVDGRAERFIERFYEEMRLQRQRSLVQRLL

SEQ ID NO: 31078 - protein, 96 aa, Oryza sativa
MQNRFSLLKEQCKILAKEGNTLRKKALRYKEISETRASNLQKAELEVDLLGDEVEALTDLLAKIYIALDHYSPVLQYYTGVMEILNMIKKHLNMSK

SEQ ID NO: 31079 - protein, 45 aa, Oryza sativa
MTNIEAALSVGMVGLQFKNAEVLKKDLCSLGVEFAPVHEGEIQVQ

SEQ ID NO: 31080 - protein, 49 aa, Oryza sativa
MQASDPARFQSLMQTLDFRYQALANGLAQHAEERKVEIEKEKLEKANAQ

SEQ ID NO: 31081 - protein, 334 aa, Oryza sativa
MAGAQESLVLAGVMHGHNDVVTAIATPIDNSPFIVSSSRDKSLLVWDLTNPVQNVGEGAGASEYGVPFRRLTGHSHFVQDVVLSSDGQFALSGSWDGELRLWDLSTGVTTRRFVGHDKDVLSVAFSVDNRQIVSASRDRTIKLWNTLGECKYTIGGDLGGGEGHNGWVSCVRFSPNTFQPTIVSGSWDRTVKVWNLTNCKLRCNLEGHGGYVNAVAVSPDGSLCASGGKDGVTLLWDLAEGKRLYSLDAGSIIHSLCFSPNRYWLCAATQDSIKIWDLESKHIVQDLKPEIPVSKNQMLYCTSLNWSADGSTLYAGYTDGTIRIYKISGFSYAG

SEQ ID NO: 31082 - protein, 204 aa, Oryza sativa
MADEEHEVYGQEIPLDGEDVDMGAPGDEAAKMQELDEMKRRLKEMEEEANALREMQTKVAKEMQGLDPNASSSESKEEMDARSVYVGNVDYACTPEEVQQHFNSCGTVNRVTILTDKFGQPKGFAYVEFLEVEAVQEAVKLNESELHGRQIKVAPKRTNVPGMKQPRGGRGFGGHPYMRPYGAPFYNPYGYGYPRFRRPRRPYF

SEQ ID NO: 31083 - protein, 261 aa, Oryza sativa
MDVKPVRTVKVTNVSLSATVQDIKEFFSFSGDIEHVEMQSGDEWSQVAYVTFKDPQGAETALLLSGATIVDLSVIIAPAPEYQPPPTSSAPPMYSATSVPVSEDNNVVHKAEDVVSTMLAKGFTLGKDAVGKAKAFDEKHGFTSTAGAKVASIDRKIGLSEKFTIGTSIVNEKVKEMDQKFQVSDKTKSAFAAAEQKVSTAGSAIMKNRYVFTGASWVTNAFNKVAKAATDVGTMTKEKMAAEDQHKGSGPSGGHSYTPIQ

SEQ ID NO: 31084 - protein, 157 aa, Oryza sativa
MKKRTAESRPIVPRKFDKDRTFTTNRMGRQLSSMGFDPRAALDRARSRSRGRKRERSLSRAASDGDDMDIDGQQSSKKLRALSRSRSRSKSRPPEEVVPGEGFKDSAQKKKAIKKAKDSVRNRNKEARRGEADRVIPTLKPKHLFSGKRSIGKTSRR

SEQ ID NO: 31085 - protein, 316 aa, Oryza sativa
MELRELGATGLRVSPVGFGASPLGHVFGDVPRDVARAAVRRALDLGINFFDTSPYYGGTVSESVLGDCLRAAGVPRDRFVVATKCGRYREGFDFSAARVTRSVDESLARLGLDYVDILHCHDIEFTDLDQIVNETIPVLQKIKESGKARFIGITGLPLSIYTYVLDQVPPGSVDVILSYCHYGINDTALVDLLPYLKSKGVGVISASPLAMGLLTDNGPPEWHPAPKELKLACRAAADHCKKKGKNITKLAMQYSLMNNEISTVLVGMNSPEQVEENVAAAIELSTSGIDKELLHEVEAILEPVKNMTWSSGIEQA

SEQ ID NO: 31086 - protein, 19 aa, Oryza sativa
MKVTNSDLYMLGTFYFIGL

SEQ ID NO: 31087 - protein, 42 aa, Oryza sativa
MTWVSACSTKQSTDVSQSAYALQDYLMLCLLGSLKVLSSFEF

SEQ ID NO: 31088 - protein, 246 aa, Oryza sativa
MVLYMSTMKGGKPEKTNWVMHQYHLGTGEDEVEGQYVVSKLLFQQQFKPGEKNAQDLTSADALESIVAEDLPNIPPLPLEEHVFTNQELEVLEKSETITDQGKETSEINNEDNAVEDVAHMATEKPEDGDNPSSQDPKWWEGESQFLLDSQQLAENLAICDEFLQSQSQTSCGGGDDETDKIKPRLAVYAQLPVEDLKKDLEECQRLDPSDGTNLELENASEFRLSQIEFSQDSFTTAWAGGKVID

SEQ ID NO: 31089 - protein, 79 aa, Oryza sativa
MILYYIKKFLSWVHPDRSLIIAIKWMCFRCSCSLMMPLKLPLNLPLKLPFKLPLKLPFKLPLKLPFNLPLKLLPSTQHV

SEQ ID NO: 31090 - protein, 337 aa, Oryza sativa
MEVDGGAVPGDVLERARRHHPGPGDDVRPARRPHGPPRPRRVRHRHDPRRPPLRARPAPRPLPPLRRQGPHRHPVPARHAPQHPRPDDGGVQLPEGVHPLLAQRRRRRLPPVLRRLRRAGVLRRRHPDRLLPVPPRRARGDHVGAHEAAAVRHHEERQLPPQRAVHHGRRGPRRVRVGVGGRRGQRRRGAHGERGVRHGRRRAGAPGVRQDPRRVHRQAAARAGAEAGGVRPPQGRHHPPHRRRRGQALLRRDGVRRQRPPRPAHRRVGRPAHRRREGGEDDDGAVGSALGGHEIGAGQDRSPVQVMDYWSWVRLLGRTSERGVLPTCGFMTVSFTC

SEQ ID NO: 31091 - protein, 397 aa, Oryza sativa
MEARARTYGSSGASPGNLGDRYDNYANYSSYLNDEPMPDAASEKEQGNEYFKQKKFAQAIECYSRSIGLSPSAVAFANRAMAYLKLRRFEEAENDCTEALNLDDRYVKAYSRRITARKELGKLKEAMDDAEFAVSIDPNNPELRKQYSEIKELHMKEVANRSKPTKHTVFKFDKSGDKKDTSHAPSSSQKDSFMEVDPPSRVAVEIREKADGTSKGGSGVIFKDSTVQPSRDAKQKPGPEASIQDLASRAASRYMASTVKSVKTPKTAYDFEVSWRALSNDTAKQTQLLKSIPPSSLPEIFKNALSAAFLIDIVKCTTSIFREDTMLAVSILENLAKVPRFDLIIMCLSSMHKSELRKVWDQIFLAETASADQVEALRQLRAKYIQEGLQDNMFTSN

SEQ ID NO: 31092 - protein, 231 aa, Oryza sativa
MGRGPPPGTGRCFNCGIDGHWARDCKAGDWKNKCYRCGERGHIERNCQNSPRNLRRERSYSCSPSPRRGRGRSRSYSRSRSRSRSYSRSRSRSLSGSPRARRELERSRSLSYSRSPRRSISPAANEKKRSPTPDGSRSPRSPQDQVSPPPKDNAERNGSDHGDSPRGRENSRSPSDGYRSPAAANGRSPSPRNNGSPSPMDNGSRSPRDGNGDGGSRGGSRSPRPSESPEA

SEQ ID NO: 31093 - protein, 124 aa, Oryza sativa
MATVSAAAATSVVARAVLAGPLGLPQMRARRSERVRCNYSKEAATPAAAVKGAGASLLAMAATAAPAMALVDERMSTEGTGLSLGLSNNLLGWILLGVFGLIWSLYTIYTSDLEEDEESGGLSL

SEQ ID NO: 31094 - protein, 131 aa, Oryza sativa
MAATSSLTATAASPPLLLKPAPSPLAASFLRPVSRFSRFQSVKTKATENDQTEKSPPKGSSLVCQDCEGNGAIVCNQCKGDGVNSVDHFNGRFKAGALCWLCRGKREILCGSCNGAGFLGGFMSTSDSTAE

SEQ ID NO: 31095 - protein, 408 aa, Oryza sativa
MAAAAEAVTEVDATNEEGEEEEQVVNPWEVSAGKGGIDYDKLVDQFGCQRLDDALVARVVRLTARPPHRFLRRGLFFAHRDLNEILDLYEKGEKFYLYTGRGPSSEALHLGHLIPFMFTKYLQDAFKVPLVIQLTDDEKFLWKNLTVEETKRLARENAKDIIACGFDVERTFIFSDFNYVGGAFYENMVKVARCVTYNKVVGIFGFTPEDHIGKVSFPPVQAVPSFPSSFPHLFSGNDQLRCLIPCAIDQDPYFRMTRDVAPRIGYQKPSLIESRFFPALQGENTKMSASDPNSAIYVTDSAKEIKTKVNKYAFSGGRDSIELHRKLGANLDVDVPIKYLNFFLEDDNELEHIKKEYKEGRMLTGEVKQRLVAVLSELVARHQRARALVTEEMVDVFMAARPLPNMFG

SEQ ID NO: 31096 - protein, 230 aa, Oryza sativa
MAPPPISSSLSLMASNPIPSPPVAKPGRPLTVAACSNSSSSSSSSSPSSTSCSAAWSLPVATSAGRRGLLALGAGFLASPGLLCPAGDAGATRIEYYATVGDKLCDMNVVKSGLGYCDVEVGTGAQPPRGQLINVHYTARFTDGIVFDSTYKRGRPLTMRLGAGKILRGLEQGISGGGGVPPMLVGGKRKLMIPATLAYGPEPAGCFSGDCNIPGNTTLLYDIFLVGFYK

SEQ ID NO: 31097 - protein, 131 aa, Oryza sativa
MAAAALRPAILRRIRPSPSPAAAAGAAAASQPHALARWLARPMSSHDAHLTRDEVVDRLLDVLKCHPKVDPSKVSPEAHFEKDLGLDSLDTVEVVMAIEEEFKLEIPDQEADKIDSLPLAIEYVANHPMAA

SEQ ID NO: 31098 - protein, 413 aa, Oryza sativa
MDSSNGERPPQGEDAPAAAAGSIGGYESLHRLLQSNLSPELFKEASRLLLGLNCGRALEAISLPEATSALAKAHNFDVQAFRFDADKEYLRQPRVIRVGLIQNSIAIPTTSHFADQKKAIMEKVKPMIDAAGDAGVNILCLQEAWTMPFAFCTREKRWCEFAEPVDGESTQFLQQLAKKYNMVIVSPILERDVNHGEIVWNTAVVIGNHGNIIGIHRKNHIPRVGDFNESTYYMEGNTGHPVFETAYGKIGVNICYGRHHPLNWLAFGLNGAEIVFNPSATVGELSEPMWPIEARNAAIANSYFVGSINRVGTEVFPNPFTSGDGKPQHADFGHFYGSSHFSAPDASCTPSLSRYRDGLMISDMDLNLCRQIKDKWGFRMTARYDTYASLLSEYLKPDFKPQVIVDPLINKSA

SEQ ID NO: 31099 - protein, 176 aa, Oryza sativa
MKSTCPALLVFFSKTARVQDRWNIIWGLFQGREHVRMVTKFRRFSWNVTEQSACTSTLASSKSNPAVYYQERFLIIRSEGSKANGDALFFLVEYSGSGACSMSKRLYTLVFSSSVGDLVLWLAYESTRGQILFISRMMYRGRSERRRSRLESRTEGPNFVLFRITIWLFCTIQRKI

SEQ ID NO: 31100 - protein, 23 aa, Oryza sativa
MPNFLFILLYVNLGYAGEYSSLF

SEQ ID NO: 31101 - protein, 265 aa, Oryza sativa
MESTITSNSFRDKLVKNDGSEETVTDHSFSKRNGVHAETSIEERTVGEHHISVSKDGNTTFFQESINNEIDKAQSSDLISVSSKHLIAETPHVDNIVCPELRASPDGASSPQETLIGNCDKMVCIAAETLVSIFSSSACTTDCPGTDSQTAAEDVNDEPQHSLDSYEEIVLNVEEIRDDGESIPVIPPDKDGPSCGIKLRRGRGLRNFLREIMPRLVSLSRHEICDDLHAIGYEPRKTRSRKTFGAQGSSSTRGRPPKHRPTARK

SEQ ID NO: 31102 - protein, 281 aa, Oryza sativa; identical to SEQ ID NO: 30307

SEQ ID NO: 31103 - protein, 510 aa, Oryza sativa
MLEEYDFRNDTVNPDLEMELKPQARPRPYQEKSLSKMFGNGRARSGIIVLPCGAGKSLVGVSAACRIKKSCLCLATNAVSVDQWAFQFKLWSTIKDEHISRFTSDNKEKFRGMAGVVVTTYNMVAFGGKRSEDSEEIIEEIRNREWGLLLMDEVHVVPAHMFRKVISITKSHCKLGLTATLVREDERITDLNFLIGPKLYEANWLDLVKGGFIANVQCAEVWCPMTKEFFAEYLKKENSKKKQVLYAMNPNKFRACEFLIRFHEQQRGDKIIVFADNLFALTSYAMKLRKPMIYGSTSHVERTRILHQFKNSSDVNTIFLSKVGDNSIDIPEANVIIQISSHAGSRRQEAQRLGRILRAKGKHQDRMAGGKEEYNAFFYSLVSTDTQEMYYSTKRQQFLIDQGYSFKVITSLPPPEELPNLKYYTLNDQLELLAQLLSARDDMIGIEHLEEDSDGKALMKARRSAGSMSAFSGSGGMVYMEYSTGKGKAGASKKPKDPSKRHYLFKKRYQ

SEQ ID NO: 31104 - protein, 268 aa, Oryza sativa
MQRNLSSISSSAASPSPLSPADGFLCVKDGVDEMIKYVANEPSVGLYFVQQHAQASMPLLLDVKGKVAEKIHEVTLHTEDIEDSICAVRSMAEFGLPIADDMIKDINKSLKIMSKTQPKRGLIQNPTWGFQSGKSSGTWEEDLGTTDGGSSRNYFSSMFNTAKQKASTLRWPQPDFGTKDDTTEESESSAAPESSQAGGHGASTPSDTEKDDLPVSSQLLDNNTATMKESSSTDISKSVENYNKFKEEQELKLQEWLRQSEEADDNKE

SEQ ID NO: 31105 - protein, 162 aa, Oryza sativa
MAIGWPLIILKSGIAGWFKFWFMPWMVYHFWMSTFTMVHHTAPHIPFKTSEEWNAAQAQLNGTVHCDYPRWIEILCHDINVHVPHHISPRIPSYNLRAAYDSIKQNWGKYINEASWNWRLMKTILTKCHVYDKDRYYVPFDEVAPEESQPIKFLKKVMPDYA

SEQ ID NO: 31106 - protein, 81 aa, Oryza sativa
MRRRVLVLIEMVGGLLFSEHGLLDFDGCVPRPSVLEPSVMVLSCVLKPNIVVLVGTDLVSCMVKLATTTTILDPSYIWGRV

SEQ ID NO: 31107 - protein, 280 aa, Oryza sativa
MASSMGNIDAPVDETVFDIEKEIDDLLPIEVKEQRLSNLLQATMVGGCVAAMPLLKKIPTSVLWGYFAFMAIESLPGNQFWERILLLFTAPSRRYKVLEEYHTTFVETVPFKTIAMFTLFQTMYLLVCFGITWIPIAGVLFPLMIMLLVPVRQYILPKLFKGAHLTDLDAAEYEESPAIPFIAAQDIDVALARTQSAEILDDIVTRSRGEIKRLNSPKITSSGGTPVAELKGIRSPCISERAYSPCITELRHDRSPLGGRGSPRTGETRSSKLGEGSTPK

SEQ ID NO: 31108 - protein, 270 aa, Oryza sativa
MPLLRRPPAAPHRTPIHHDKRLHLFSTHNTRHRATVSSLPVTCLRIRYSSSNPVRHLCGIPSSRCHAAADPAPSKIPGGGSGALEAGVVGWRDLLLQVGEVLSLGFPVWVASACAVALWRPPAFLWVSPMAQIVGISFTMLGMGMTLTLDDLKTALLMPKELASGFLLQYSVMPLSGFLISKLLNLPSYYAAGLILVSCCPGGTASNIVTYLARGNVALSVLMTAASTFAAAFLTPLLTSKLAGQYVAVDPMGLFVSTSQVLEINLMLYC

SEQ ID NO: 31109 - protein, 346 aa, Oryza sativa
MAATASNKRVILKRYVTGLLSEDDMEVVTTEVPPLAVVPAGSGAVVVKNLYVSCDPYMRNRMTRHEVPSYVSDFIPGEVLANFGVMRVISSGHPDFKAGDLVWGITGWEEYTVINNPESLFRINHPKLPLSYYTGILGMPGLTAYAGFFEVSKPKKGEYVFISAASGAVGQIVGQLAKIIGCYVVGSAGSDEKVSLLKTKFGFNDAFNYKKEPDLEAALRRYFPEGIDIYFENVGGETLDAVLPNMRLGGRIAACGMISQYNLERPEGVKNLFYIVTKRLRMEGFLVFDFYDRYYQFEDEMARYLKEGKVAYVEDVVEGLDAAPAALIKLFTGRNVGKQLVAIARE

SEQ ID NO: 31110 - protein, 59 aa, Oryza sativa; identical to SEQ ID NO: 28627

SEQ ID NO: 31111 - protein, 156 aa, Oryza sativa
MAAATAYTVALLGATGARVPAAPRSAALLPRRGGVLQPLRLQDAPRLSLLRVRAASDDTSTSASGDELVADLKAKWEAIEDKPTFLLYSGGAVVALWLTTVVVGAINSVPLLPKILELVGLGYTGWFVYRYLLFKESRKELATDIETLKKKIAGTE

SEQ ID NO: 31112 - protein, 135 aa, Oryza sativa
MKQEQTMLSLEAHGHANAVPELSKMVGAVQALVVQCEDLKLKYYEEMAKRKKLHNIVGRPKVQDCRELLYRSTPRIWAARMVFLCWRGHRLVLQAWPLQGVPAPSAGPSCPCSQGTTMTVAAIVVPTLCKAVNVN

SEQ ID NO: 31113 - protein, 38 aa, Oryza sativa
MVVQKVGSGEGEAIPIRGQSTDTTWPCNPTLGMGGGDI

SEQ ID NO: 31114 - protein, 91 aa, Oryza sativa
MSRAFGNRLLKPFVVAEPEIQEELVNEDLECLVLASDGLWDVVENEEAVSLAKTEDLPESVARKLTEIAYSRGSADNITCIVVQFHHDKTE

SEQ ID NO: 31115 - protein, 104 aa, Oryza sativa
MAAAAAAAAAEEEIAVKEPLDLIRLSLDERIYVKLRSDRELRGKLHAYDQHLNMILGDVEEIVTTVEIDDETYEEIVRTTKRTIPFLFVRGDGVILVSPPLRTA

SEQ ID NO: 31116 - protein, 50 aa, Oryza sativa
MRESWNCVLAFYAADKLLEFKPKGIETYIHPAVERAHFHKEDRMWQEYEN

SEQ ID NO: 31117 - protein, 364 aa, Oryza sativa
MENFKCYLRKEPIGVVGLITPWNYPLLMATWKVAPALAAGCTAVLKPSELASVTCLELADVCKEVGLPSGVLNIVTGLGSEAGAPLSSHPGVDKVAFTGSYETGKKIMASAAPMVKPVSLELGGKSPIVVFDDVDVEKAVEWTLFGCFWTNGQICSATSRLILHKKIAKEFQERMVAWAKNIKVSDPLEEGCRLGPVVSEGQYEKIKQFVSTAKSQGATILTGGVRPKHLEKGFYIEPTIITDVDTSMQIWREEVFGPVLCVKEFSTEEEAIELANDTHYGLAGAVLSGDRERCQRLTEEIDAGIIWVNCSQPCFCQAPWGGNKRSGFGRELGEGGIDNYLSVKQVTEYASDEPWGWYKSPSKL

SEQ ID NO: 31118 - protein, 174 aa, Oryza sativa
MAMSPLTTILLLAAAVGATCATSATASAAPLHGIANDLLPEYGLPRGLIPETIASYTFDNDTGDFEIRLTSTCYIWFGSHLAYFEDAIRGRIAYGTITGLSGIQAQKFFVWVSITTIVAHPDQGTVEFRAGFISEALPESDFAEVPVCGAGARLRGAAGLARQLGLQLPTVAEA

SEQ ID NO: 31119 - protein, 55 aa, Oryza sativa
MKMTVKRQKKTRATTLKMAGDMVTRMPMMRKQNMKINQTILFCPLLTSCCNICTN

SEQ ID NO: 31120 - protein, 53 aa, Oryza sativa
MVELDGAPFKKFASLRDEWSLKNHYISPGPIQFSGPGSNDANHTLMLELGAEA

SEQ ID NO: 31121 - protein, 396 aa, Oryza sativa
MMLKVPRLIDFDNKRAYFRSRIRQQHDQHLSAPLRISVRRAYVLEDSYNQLRLRRSQDLKGRLTVQFQGEEGIDAGGLTREWYQLLSRVIFDKGALLFTTVGNNATFQPNPNSVYQTEHLSYFKFVGRVVAKALFDGQLLDVHFTRSFYKHILGVKVTYHDIEAVDPDYYKNLKWMLENDVSDIPDLTFSMDPDEEKHILYEKNEVTDYELKPGGRNIRVTEETKHEYVDLVAEHILTTAIRPQINAFLEGFTELVPRELISLFHDKELELLISGLPEIDFDDLKANAEYIGYSPASPVILWFWEVVNGFSKEDMARFLQFVTGTSKVPLEGFKALQGISGPQRFQIHKAYGAPERLPSAHTCFNQLDLPEYSSKEQLEERLLLAIHEASEGFGFG

SEQ ID NO: 31122 - protein, 474 aa, Oryza sativa
MAVARFDFSWVDASYHQETLNNLRKAAQNVNKLCPVMLDTLGPEIQVHNSTGGPIELKAGNHVTIAPDLSKAPSSEILPIKFGGLAKAVKKGDTLFIGQYLFTGSETTSSWLEVVETSGENVECLVTNTATLAGPMFTLHVSKAHVSLPTLSDYDKEVISTWGLHNSVDIISLSHTRSAEDVRELRSFLQSHGLQDTQIYAKVENTEGLDHFDEILQEADGVIISRGDLGIDLPPEDVFISQKTAIKKCNLAGKPVIITRVVDSMIDNLRPTRAEATDVANAVLDGTDGILLGAETHRGPYPVDAVSTVGRICAEAESVYNQLVHFKKLVKHVGDPMPHEESVASSAVRTAMKVKAAAIVVFTFSGRAARLVAKYKPPMPVLAVVFPREGSDPTKWRSYGTTQARQCFAARGVYPLMASTEEAETGGLTREEYGIKLAQNYGRSVGMLKPYDRLIIFQKIGDSSVVKIIECDSS

SEQ ID NO: 31123 - protein, 281 aa, Oryza sativa; identical to SEQ ID NO: 30307

SEQ ID NO: 31124 - protein, 173 aa, Oryza sativa
MSTVDFNLEEALNTVLMQAMPQSKEKQISIDRDWPAEVSCMHLCGDNLRLQQVLADFLACMLQFTQPAEGPIVLQVIPRMENIGSGMQIAHLEFRLVHPAPGVPEALIQEMFRHSPGASREGLGLYISQKLMKTMSGTVQYLRESESSSFIVLVEFPVAQLSTKRCKASTSKF

SEQ ID NO: 31125 - protein, 54 aa, Oryza sativa
MIQPVGSILKMGVKNRTLMARTMWKVKTAKGSLSKPKLPKVMEMVQLPRKMVQP

SEQ ID NO: 31126 - protein, 328 aa, Oryza sativa; identical to SEQ ID NO: 28906

SEQ ID NO: 31127 - protein, 402 aa, Oryza sativa
MGKTVSVCERSKEHRVPTMGKGWSDSTIVEDHPSSTSCHFPQKRLFPCQDSVTPSVHVKGSLDILQRIPSVTLPEARATIGNVQNRRLQPINTVSSSVRDCIWNSGSQSVRQAEIKRATTINVNSRARHINLHQPPQVISTSQNQHCQLSTPSILRGKDCSFLGPAVTQSSSFPQWTLNTGIQEKYQKSTFSYDDPTSAPIYQSCQVPGAKLSSTSMISFLDYGTDNAEFSRSLPQACPSLATSLPINFVSTVSPTCTVKPTNTGCRKGVVFTNQRKRPAYINNVAHEPAKKLMANKQDLVAPVFEETKNRSLGWSLDDAIGPRILDFGSKVAGHGLEMSTNESNCVRASSGPVPVLETRSMTGRLATAARTMLKPDQTLNDHSKLLYSTFSVDNSINSAVL

SEQ ID NO: 31128 - protein, 274 aa, Oryza sativa
MSEGFRSIVQTMGLGNLKPNIIVMRYPEIWRRENLIQIPSTFVSIINDCIIANKAVVIVKGLDEWPNEYQRQYGTIDLYWIVRDGGLMLLLSQLLLTKETFESCKIQVFCIAEEDTDAEELKADVKKFLYDLRMHAEVIVVTMKSWEPHMESSSSGAPQDDSQEAYTSAQRRISTYLSEMKETAQREGHPLMEDGKQVVVNEQKIEKFLYTMFKLNSTILRYSRMAAVVLVSLPPPPLNHPAYFYMEYMDLLVENVPRMLIVRGYRRDVVTFFT

SEQ ID NO: 31129 - protein, 227 aa, Oryza sativa
MAALLLRRLAGTHRGRVPLAAAAAVTGGAALFCASSPPTIALMEEKGEDAAAKVALNPDKWLEFKLQEKATVSHNSQLFRFSFDPSTKLGLDVASCLITRAPIGEEVEGGRKFVIRPYTPISDPDSKGYFDLLIKVYPDGKMSQYFASLKPGDVVEVKGPIEKPRYSPNMKKQIGMIAGGTGITPMLQVVRAILKNPDDNTQVSLIYANVSPDDILLKRELDRLASS

SEQ ID NO: 31130 - protein, 138 aa, Oryza sativa
MAEEAKNLETARADRSVWLMKCPTVVSRAWQEAATAAASSSSSSDAAAGANSNSNANPNPVVAKVIVSLDPLRSEDQQLQFKMEMAQTGNGNTPKSYSLNMFKDFVPMCVFSESNQGKLSCEGKVGHKFDMEPHSDEN

SEQ ID NO: 31131 - protein, 438 aa, Oryza sativa; identical to SEQ ID NO: 28597

SEQ ID NO: 31132 - protein, 100 aa, Oryza sativa
MSIRSRPSQLRFKICCSAKKETVDKVCNIVKTQLALPEGTAVTGESKFSELGADSLDTVEIVMGLEEEFNITVDETSAQDIATVQDAANLIEKLVLEKAA

SEQ ID NO: 31133 - protein, 74 aa, Oryza sativa
MPDANVFSSFWISNSGTLSLREFHERYWSPDFKIGRSFRGCHFNCRSHELLWTHGRSCIHLIGDHVNAIFSCWP

SEQ ID NO: 31134 - protein, 255 aa, Oryza sativa
MAPVQFSAAGVGAVAFATKGMASRDALRLPPPAAVRVLRQAPRPSRGLVVRAAAASVAPKYTTLKPLADRVLVKIKSAEQKTTGGILLPSAAQSKPQGGEVVAIGEGRTVGDNKVEVSIQVGSQVVYSKYAGTEVELNDSNHLILKEDDIIGILETDDAKDMKPLSDRVLIKVAEAEDKTPGGLLLTETTKEKPSIGTVVAVGPGPLDEEGKRIPLSVSAGSTVLYSKYAGSEFKGSDGTSYIVLRVSDLMAVLS

SEQ ID NO: 31135 - protein, 152 aa, Oryza sativa
MATKQSLLLLLALLAAAAAVASAVTDVEYCNKGKKYPVKVSGVEIVPDPVARGEPATFKISASTDKTIGKGKLVIDVKYFFFYVHSETRELCDVTSCPASGDFLVAHQQTLPSYTPPGSYTITMKMLGDNDEELSCISFGFSIGFAASEATI

SEQ ID NO: 31136 - protein, 124 aa, Oryza sativa
MATVSAAAATSVVARAVLAGPLGLPQMRARRSERVRCNYSKEAATPAAAVKGAGASLLAMAATAAPAMALVDERMSTEGTGLSLGLSNNLLGWILLGVFGLIWSLYTIYTSDLEEDEESGGLPL

SEQ ID NO: 31137 - protein, 236 aa, Oryza sativa
MDFDLFNSYPESQLDLMSTMLQLEQLTALSDQSLFMAAPTSPPVSPMGTPSPQFSPPPQMSVTTTTAGGGYQDQYNSMPATYGAGAGVHQLDFAMSSPGSDSGAPQGSSSSSSSEAMREMIFHIAALQPVEIDPEAVRPPKRRNVRISKDPQSVAARLRRERISERIRILQRLVPGGTKMDTASMLDEAIHYVKFLKSQVQSLERAAAATGAAAHRAAAFGAAYPAALPMQHHAPW

SEQ ID NO: 31138 - protein, 134 aa, Oryza sativa
MHEVTRVFLGASSILSNGTVYSRVGTASVAMVAHAFGIPVLVCCEAYKFHERVQLDSICANELGDPDVILKVPGKADLGHLKNLADNENLQLLNLTYDATPSDYVSMIITDYGMLPPTSVPVIVREYRKEQLWI

SEQ ID NO: 31139 - protein, 266 aa, Oryza sativa
MEYASGGELFERICKNVRFSEDEARYFFQQLISGVSYCHSMQVCHRDLKLENTLLDGSPAPRLKICDFGYSKSSVLHSQPKSTVGTPAYIAPEVLLKKEYDGKTADVWSCGVTLYVMVVGAYPFEDPEEPKNFRKTIQRILNVQYSIPENVDISPECRHLISRIFVGDPSLRITIPEIRSHGWFLKNLPADLMDDDSMSSQYEEPDQPMQTMDQIMQILTEATIPPACSRINHILTDGLDLDDDMDDLDSDSDIDVDSSGEIVYAM

SEQ ID NO: 31140 - protein, 352 aa, Oryza sativa
MGAPMPGLHDSTVPPFAPEYVGQPHPLGTKKNNSVGNGPHGGSRALFEGGFNSSQKHSKSCAANPGRNNVSHKDFEDNMKQFPVPTHLDGEGHQRGPRPFEGGLGRPDGFADILPGRPPLTNHPGPFPIGFGEDYPRKPNSTVSYPDFISPGAEFGHRGIDGIPTLRNAGPFLQGMTGGPGGLHKDQLGSSNFPGSGHHDFDNSELPRTRFHPGDAFVPRNLHGGGWGGGQLHGIEPSDYGYRGHMHADDPNIPIDYSRHGFPKESAHFGSGGHLRDGDVSWCRICNISCGTVENLNIHVETREHHQHAMDIVLKMKQDVAKGRKNSFRNSGGPKSFKKKVPGKGSFRGNRR

SEQ ID NO: 31141 - protein, 329 aa, Oryza sativa
MMMQLLIRSENDGILCPIPQYPLYSASIALHGGSLVPYFLDEETGWGLEVDELKKQLEEAQSKGITVRALVVINPGNPTGQVLAEENQKKIVEFCKNEGLVLLADEVYQENIYVEDKKFHSFKKIARSMGYTDDDLPLVSFQSVSKGYYGECGKRGGYMEVTGFSADVREQIYKVASVNLCSNVSGQILASLIMNPPKAGDESYESFMVEIDGILSSLARRAKALEEAFNSLEGITCNKAEGAMYLFPRIYLPQKAIGAAQAAGTAPDAYYARRLLEATGIVVVPGSGFGQVPGTWHFRCTILPQEDKIPAIISKFKEFHEKFMDEFRD

SEQ ID NO: 31142 - protein, 348 aa, Oryza sativa
MPRDEFDINGYTSDLHRLESRTTSERLLSVTETGKVPDFEGVQPLVLKGLMSSVSHGSAIEVLSRITIPTCDSIFGSPETRLLMHITGLLPWLGLQLTKDASSLGSSSPIQEQNQKAYYVASNISVWCRVKSLDDLAEVFRAYSFGEIISLEDLFARASPPICSEWFPKHSSLAFGHLLRLLERGPLDYQRVVLLMLKSLLQQSPVDPSQIPQVYNVVSQLVESALCAEALNVLEALLRSCSGVTGGQGDDIGFGENGHGMGEKVHQSMLLPQSSFKARSGPLQYAAAGSGFGTLMGQGGGSAADTGVATRDVALQNTRLLLGRVLDTCALGRKRDHKRLVPFVANIG

SEQ ID NO: 31143 - protein, 342 aa, Oryza sativa
MEPLLLTPAARLAAAAPSTLSRLLRLQSGRHHAHASSSSNRLLPPLLRPPRDGFRGGRLIASSSSSSSQMAAPADAPGGSADAFEVIRAHQEKAARLPPVEEIRTILDQSVRGVLATHSQGHVGYPSGSMVDFACDQDGSPILAVSSLAIHSKNLSENPKCSLLVAKDPEDRTDTVITVYGDATPVSDQEKDAVRSAYLRRHPEAFWVDFGDFRFLHIKPKAVRYVSGVATAILGSGEFSAAEFKEAKVDPISQFSTPITSHMNKDHSDDTKLIVQYSTTVKVDFAYMLDVDSLGFNVKAGYDGSVLKLRIPFPRRAQDRKDVKTLIVEMLQAAKASSSSAE

SEQ ID NO: 31144 - protein, 332 aa, Oryza sativa
MQRRVKLGKLPIEMNLNHTKLSDPLAENSGDFESSKPNKLPHWLQEAVRAPPSKPPECELPATVSAIAQSVCLLLGEQKPAIPPFPIPGPRLSLPKDPRSAPKRRRVHKVQQASSLVDHSKTTVGQGDHNSTPSAPLSMEAAPASPAVIKSSDTPSLNLNSPSSSSAGSRGPDASTPSTFEEPERTMEVSEPASVAAATCPSRPEPPETGTHRIEFSAVDNMDTGSCRSPVRDTPDPDNQKSELSGSGNTPTELSVLPLVDAPGTSSEPAVVPVSSDEESTQEGVPGKAVSTGDQEKRTPPDESENSGAANPVSAAQTADEDKVDEMITDEH

SEQ ID NO: 31145 - protein, 8 aa, Oryza sativa
MYCYTYYY

SEQ ID NO: 31146 - protein, 290 aa, Oryza sativa
MASSVAAAASTFLGTRLADPAPQSGRIVARFGFGGGKKAAAKKAARPSAPTTDRPLWFPGAVAPDYLDGSLVGDYGFDPFGLGKPAEYLQFELDSLDQNLAKNNAGEIIGTRFETGEVKSTPFQPYTEVFGLQRFRECELIHGRWAMLATLGALSVEWLTGVTWQDAGKVELVDGSSYLGQPLPFSISTLIWIEVLVIGYTEFQRNAELDPEKRLYPGGSYFDPLGLASDPEKKERLQLAEIKHARLAMVAFLGFAVQAAATGKGPLNNWATHLSDPLHTTIFDTFSSSS

SEQ ID NO: 31147 - protein, 334 aa, Oryza sativa
MMRAKAKGTFPPAAAAMKESSAPPPPAAAAAAAREDEWEVRPGGMLVQKRSPDGDAPAAPVPTIRVKVKFNGVYHEIYINSQASFGELKKQLSAPTGLHPEDQKIVYKDKERDSKAFLDMAGVKDRSKMVLLEDPTAQAKRLLEQRRTDKAERAAKSISRISLDVDKLATKVTALEAIVGKGGRVVDADVVTLTEALMNELVKLDAIAAEGEVKVQRRMQEKRVQKYVESLDAIRAKNAASHNKASGNGHAKPRAPHLPPPVSQRRQFQAPPPAAPTTTKTAAAPAPPPTASWESFDLLSSMPSTSSSTVTTTMAAATTTTTTSPIPRFDWELF

SEQ ID NO: 31148 - protein, 528 aa, Oryza sativa
MAHDAKMADVLSQGYVYLAMALVALLGVLLTKCSRTATAQRRLPPGPWQLPVIGSLHHLIGKLPHHAMRDLTRRHGPVMMLRLGEVPTLVVSSPEAAQEVMRTHDAVFATRALSATVRAGTMGGRDIAFAPYGDYWRQLRKIAATELLSAPRVASFRAIREEEVAATLRTVAAAAADGRAVELRAALCALVTDSTSRAVVGDRCKESDALIRAFDRSMELASGFNPAADLWPSSRLAGLLSGGVREIEANLHTVFGILDRLIEKRLQQKKTAPSSAAGEDILDALLRIHKEGGGLQFPLDMDSIKLIIADLFSGGGETVATLLVWAMAELIRNPMAMQKATTEVRRAFALAGAVSEGKGALGELRYLHLVIKEASRLHPPAPLLLPRECSEPCQVLGYDVPRGTQVLVNAWAIGRDERCWTGGSGDGSSPEEFRPERFEDGAEAVDLRGNNFELLPFGAGRRMCPGMAFALANIELTLASLLFHFDWEVPDMADPAKLDMTETLGITARRKGDLLLRPVLRMPVPGVY

SEQ ID NO: 31149 - protein, 438 aa, Oryza sativa; identical to SEQ ID NO: 28597

SEQ ID NO: 31150 - protein, 490 aa, Oryza sativa
MMDLADPNHRLIAGAALLVATLAFIKLLLSSAGGGKKRLPPTIPAAPLVGGLLRFMRGPIPMIREEYARLGSVFTVPILSRKITFLIGPEVSAHFFKGNEAEMSQQEVYKFNVPTFGPGVVFDVDYSVRQEQFRFFTEALRANKLRSYVDQMVVEAEEYFSKWGESGTVDLKYELEHLIILTASRCLLGREVREKLFDDVSSLFHDLDNGMQPVSVIFPYLPIPAHRRRDRARQRLKEIFATIIKSRKASGRAEEDMLQCFIDSKYKSGRSTTEGEITGLLIAALFAGQHTSSITSTWTGAYMLRFKQYFAAAEEEQKEVMKRHGDKIDHDILAEMDVLYRCIKEALRLHPPLIMLLRQSHNDFSVTTKDGKEFDIPKGHIVATSPAFANRLPHIFKNPDSYDPDRYAPGREEDKAAGAFSYISFGGGRHGCLGEPFAYLQIKAIWTHLLRNFEFELVSPFPETNWKAMVVGIKDEVMVNFKRRKLVVDN

SEQ ID NO: 31151 - protein, 190 aa, Oryza sativa
MIKNGAASLMVRLLHLPRAASAPTYPRRRHHLALLPSLRLRVPAPAAAAAMSSAAAAQEVADQKRALRSEVRRALRALTPEQRASEDQAIQNAILNSSWFKESKRLCAYISCAQLREVDTSKVLSEVLSPNSEHGHAKDLYVPRVEDKNRNMRMLKITTMDDLVKNSMNILEPSPLDASGNAREEGMKFI

SEQ ID NO: 31152 - protein, 376 aa, Oryza sativa
MDVAEAASPGVGAWAAIRGYFTPATLFLVVNIVIGTIALTSRTHQRRRRQVYQYHHDGEILHHDQLQPPPPLLHQQYYGGGEHQQMMMQETLYAPPPAPAPLARTSSVLDRLRSFGLYRFRSGDFPPEYATAAAAATSQLHHQRTEEVVSSSPVDEVKLQGHYARSRSEPAAAPAQEERKAASRLRNSSSEVRRAEVVRAPARVVEAFPEEAAAAVDATAEDDFTPKQQRDLPLQQEYVPPPAPAPAPLARTSSVLDRLRSFTLYSFRSGDLATDDIPADAAAAATPAQAHYGRTRSEPAREQDKKAKKQAASEAKTMTKSSSEARKDTAAEDADDGGVDARADDFINKFRQQLQLQRLNSLLNYKEMLNRGSSKQ

SEQ ID NO: 31153 - protein, 215 aa, Oryza sativa
MEAAGYYNCKKNDGGICGGVCGGSEHGSKAILSMSRLKCALRGFDLRALLILLIGVPALIFIIYVHGQKVTYFLRPIWEKPPKPFNVLPHYYHENVSMANLCKLHGWKVRETPRRVFDAVLFSNELDILDIRWHELSPYVSEFVLLESNSTFTGLKKDLHFKENRQRFEFAESRLTYGMIGGRFVKGGTHLSRSHIKGLLLTSLSKLLESQMMTF

SEQ ID NO: 31154 - protein, 303 aa, Oryza sativa
MSSSSSTAATRNPGSVVADADGLARKVAAIRAAGPAKLQVIADFDGTLTRYWYDGSRGQSSHGLLRQGNEEYDAKREELFEHYHPIEICPDIPLPEKAKLMEEWWEKTHALLIEGGLTYEAIRQSVADAKITFRDGVVKLFEFLEERDIPVLVFSAGLADIIEEVFRQKLHRSFKNIKVVSNRMVFNEEGRLVSFKGKTIHVLNKNEHALDMAAPVHDNLGDPNGYTDDYSLVRKRTNVLLLGDHIGDLGMSDGLNYENRIAVGFLNNNIEKSLKDYSEAFDIVYLNDAPMVGVVELVSELCP

SEQ ID NO: 31155 - protein, 362 aa, Oryza sativa
MRQSFLSNLAKLKDTLTVLRLDGLEVSSSVLLAIGGCNNLVEIGLSKCNGVTDEGISSLVTQCSHLRVIDLTCCNLLTNNALDSIAENCKMVEHLRLESCSSISEKGLEQIATSCPNLKEIDLTDCGVNDAALQHLAKCSELLVLKLGLCSSISDKGLAFISSSCGKLIELDLYRCNSITDDGLAALANGCKKIKMLNLCYCNKITDSGLGHLGSLEELTNLELRCLVRITGIGISSVAIGCKNLIEIDLKRCYSVDDAGLWALARYALNLRQLTISYCQVTGLGLCHLLSSLRCLQDVKMVHLSWVSIEGFEMALRAACGRLKKLKMLSGLKSVLSPELLQMLQACGCRIRWVNKPLVYKD

SEQ ID NO: 31156 - protein, 236 aa, Oryza sativa; identical to SEQ ID NO: 30392

SEQ ID NO: 31157 - protein, 401 aa, Oryza sativa
MEVCAARAPGKIILAGEHAVVHGSAAVAAAIDLYTRCSLCLMPLADDEAAATLELDLKDPGLTFSWPCGRLREVLLTDEAAGAREARPCSPDRLASIARLLEEHEIPEAKIWLSAGLSAFLFLYTSILGCRPGKVTVSSDLPMGSGLGSSAAFCVSMSGVLLTAAGVVTAVGGISGEGMGWELVGKDDLELVNRWAFQGEKIIHGKPSGIDNAVSTFGSMIKFKKGELTNLKSSNPVKMLITDTRVGRNTKALVAGVSERASRHSDAMASVFNAVNSISEEVSSIVELAANDEIAITSKEEKLAELMEMNQGLLQCMGVSHSSIETVLRTTLKFNLVSKLTGAGGGGCVLTLIPTMLSNLVLEKVIAELESHSFRCFKVEVGGQGLQVCQGGCSYFNGDVV

SEQ ID NO: 31158 - protein, 218 aa, Oryza sativa
MVVVVAMPPALSLLVLLVLALHGGAGDATPPPPLRLVRGARRVAFDEGYTRMFGDGNLAVLRDGRRVRLTLDESTGAGFASQDVFLHGFFSAAVKLPAYYAAGVVVAFYLSNGDTYEKTHDEVDFEFLGNVRGREWRVQTNVYGNGSTAAGREERYDLPFDPTDELHHYSILWTRRRIMSAISKTFQRRVDLGWNILKILRGEFLLDSTWTRRRSGRW

SEQ ID NO: 31159 - protein, 158 aa, Oryza sativa; identical to SEQ ID NO: 30444

SEQ ID NO: 31160 - protein, 557 aa, Oryza sativa
MRNLLLLPLLVAVAATVPLAAALSADGVALLAFKTAVTDDPSGALSSWSDADDDPCRWAGVTCANTSSSGPRVVGVAVAGKNLSGYVPSVLGSLALLRRLNLHGNRLSGTVPPALANATSLHSLFLYGNSLTGGLPPELCDLPRLQNLDLSDNSLTGSLPPELRRCKQLQRLMLSGNGFSGEIPAGVWPEMVSLQLLDLSDNSLTGAIPPELGKLAALAGTLNLSRNHLSGGVPPELGHLPATVTLDLRFNNLSGEIPQSGSLASQGPTAFLNNPGLCGFPLQVPCRAAPPSSSTPPPPSAAGSISGAGGPRQPVKTSLIVLISVADAAGVALIGVIVVYIYWKLRDRRGDGCGGDGDDDEERKRGLFPFPCMRADDSSDDGSDAGDDVKRNNTTTTTTASGGGGGGEEGQLVAIDKGFKMELDELLRSSAYVLGKGGKGIVYKVVVGNGTTPVAVRRLGGGAAAAERYKEFAAEAGAIGRVRHPNVVRLRAYYWSADEKLVVTDFVNNGNLATALRGEHTPSPSPSPSQFVNLFGKRETYFLKKWSKLWLDYNKLW

SEQ ID NO: 31161 - protein, 485 aa, Oryza sativa
MGERRRRASAVAGGRAEDEKAASAPAAAAPAPTVWFALKRSLHCRSEPSEVHVPRPKAVAAAAAGGGGHLSAIVTKRAAPRSGCSRSIANLRDVIHGSKRHPERPPSCSPRSIGSSEFLNPIAHEVVLSTNSRCELKITGFGGCGGLAAAAAAGGGVLASPHEADGDGAVVSSFVGTLRPGTPGPGWSHGLQYSGSCRGSMRCTPPRSPNVLLDSRDAAAAGVTAHRASCEDAVKSFGKGGGLSCHRCGEQFSKWEALEAHHLSKHAVTELVEGDSSRKIVEIICRTSLLKSESSCVRIERVFKVHNTQRTLARFEEYREAVKLKASKLPKKHPRCLADGNELLRFHGATLSCALGGAAGSSSLCASDKCAVCRIIRHGFSAKKEGKAGVGVFTTSTSGRAYESIEASAGAVVGGDDPAATRKALLVCRVIAGRVHKPLENLKEFAGQTGFDSLAGKVGPYSNIEELYLLNPRALLPCFVVICKA

SEQ ID NO: 31162 - protein, 310 aa, Oryza sativa
MIWSQITDLPFSLYSTFVIEAKHGFNKQTIWLFIRDMIKGILLSILLGPPIVAAIIIIVQNGGPYLAIYLWGFMFALSLVMMTIYPIVIAPLFNKFTPLPEGVLREKIEKLAASLSFPLKKLFVVDGSTRSSHSNAYMYGFFKNKRIVLYDTLIQQCSSEDEIVSVIAHELGHWKLNHTVYSFVAVQLLMFLQFGGYTLVRNSKDLFESFGFEDQPVIIGLIIFQHTIIPVQHLLSFCLNLVSRAFEFQADAFAKNLGYAPQLRAALVKLQEENLSAMNTDPWYSAYHYSHPPLVERLSALEDADSKKEN

SEQ ID NO: 31163 - protein, 398 aa, Oryza sativa
MAAAMATTAAAAAEEAVVALDKETLMLMGCGDAPPAAPCAEWETFKENVRPLKRGRNVGLLNRALKAHADPAQRAALLAARRKMIEAIDEYSGEDPLQPWIDCIKWVQESFPTGGDCSGLVVIYEQCVRAFWHDDRYKNDLRYLKVWLEYAGNCADSEVIFRFLEANQIGQSHTNYYLSYASVMESKNKLKKANEIFNLGIARKAKPVEKLETTYRAFLQRSSKKKAHPEDDTTTDDHPVRNFGTVLNRGEIRGQHAENSHLVKTLQRVDVNRPLAVYTDENSLPSHGLARTRSNNTAWQTLGSQADRNKENNMRPAKWTSHKIPQKVGSRAAVQPTRVSSIEVFVDDECAEEPVPQVPKSTKPSILKLRQATSRNLKQETELLMENPLRNFPLTSLR

SEQ ID NO: 31164 - protein, 323 aa, Oryza sativa
MAGRSELVVSFGEMLIDFVPTVAGVSLAEAPAFVKAPGGAPANVAIAVARLGGGAAFVGKLGDDEFGRMLAAILRDNGVDDGGVVFDAGARTALAFVTLRADGEREFMFYRNPSADMLLTHAELNVELIKRAAVFHYGSISLIAEPCRSAHLRAMEIAKEAGALLSYDPNLREALWPSREEARTKILSIWDQADIVKVSEVELEFLTGIDSVEDDVVMKLWRPTMKLLLVTLGDQGCKYYARDFRGAVPSYKVQQVDTTGAGDAFVGALLRRIVQDPSSLQDQKKLEEAIKFANACGAITATKKGAIPSLPTEVEVLKLMESA

SEQ ID NO: 31165 - protein, 330 aa, Oryza sativa
MASHVFMIRQETAPAQWWFLSLAFVGAAYAATVTLRFVAYLALCRCHRPKDDLRRRYGEWAVVTGPTSGIGRAMALELARHGLNLVLVGRDPAILREISGTVRSLHKVKTKTVVFDLSLVWTPDGDEPLRRLREAVEGLDVGVVVNNAGVAKPGAVYLHEADVEAWVRMVRVNMSAVTEVTAVVLPGMVSRGRGAIVNIGSAGSEYIPTLPLYTMYAATKRYVAQFSRSLHVEYASKGIHVQCQAPFFVDTRLMFRFEEAAGGVSLFTVTPDAYARAAVAWIGRGGALCTPAVRHQLLRRMAAAAPDSVHDWILLRLATWNRKRCFSGSE

SEQ ID NO: 31166 - protein, 446 aa, Oryza sativa
MPHLRRRHRRRLLAAVVFLLLSAVVARPAAGAFTELESAQIGRFQDYLRIRTAHPSPDYAGAAAFLLPYAASLGLRAATLHFTPCKSKPLLLLTWPGTDPSLPSLLLNSHLDSVPAEPEQWLHPPFAAHRDAATGRVYARGAQDDKCLPIQYLEAIRGLRDAGFAPTRTLHISLVPDEEIGGADGFEKFAQSEEFRDLNVGFMLDEGQASLTDEFRVFYGDRLVWRLIVKATGAPGHGSKLFDGAAVENLMDCVETIAGFREAQFGMVKSGKRGPGEVVSVNPVYMKAGTPSPTGFVMNMQPSEAEVGFDFRLPPTEDVEHIIRRIKEEWAPAHKNLTYKLMQKGPTRDLAGRPMVTPTNASNPWWSVFEQAIISAGGKLAKPEILSSTTDSRFIRQLGIPALGFSPMTNTPILLHDNNEFLEDKVFLRGIKVYEHIIRALSSFKG

SEQ ID NO: 31167 - protein, 13 aa, Oryza sativa
MCSSPQTCNLRSL

SEQ ID NO: 31168 - protein, 404 aa, Oryza sativa
MAFAAEPMDLEVSPDSSPAAAAAAAVCSICLDAVACGDGVAARSTARLQCGHEFHLDCIGSAFNAKGVMQCPNCRNIEKGHWLYGNESQPCSHSDTGDWLNGETFDYPFSFEFGWCPFNTPLTSVFGESESEPNPFLEYIGSLHGFHHPMYAPSSSTASTESIPFHQRPTGTEGHATTDLRNTQVFNESEPRNHEREQLYLGSVQMPGTLNHSTAPFGIGMPRYDGGNQQRLRPHMHDNSLFHRPTARRASNLAHLRSLTAASETRGHGHGMTSHAVQQTIPSSMASNPQPPATRRVRPRALSITSFIAASSSAEIGAPHDFPLTETASTTNGNIRNGVGAPRHANQSYSWSSETFWPQTGEPHWWSPMAPVHNRSYDNFSGRSATELLSIYGAQNGLPTPRFL

SEQ ID NO: 31169 - protein, 404 aa, Oryza sativa
MKLHFVLRFLFGPVPVYFSALAILILLTNAQYFGLVGVTVPRATKLASSAPVVSVMKYCDIFRGEWVPDSDAPYYNHKTCYMIQEHQNCLKYGRPDLEFLKWRWRPSGCELPRFDPVQFLQFNRHKSLAFVGDSLARNHMQSLLCLLSQVAYPKDMSANPTTQNKVYHYRGYNFTVSMFWSPFLVKAREPDHDGPAHTGHWSLYLDEPDQSWVSEISRFDYVLVSAANWFSRPSLFYEKRRLVGCSFCSRQYGVPDLTLYYSQRRAWRVALKAINDLESLRGRVIVRMLSPMSHFENGTWDQGGNCKRTQPLRSNETVMEGRDLHFYTAQMEEYRAAEKVAEAKGRRMMLMDATAAMLMRPDGHPSRYGHLPNQKVQLYNDCIHWCLPGPIDIWNDMLFQMLLV

SEQ ID NO: 31170 - protein, 307 aa, Oryza sativa
MNQFVPDWSNMGDASRTLGEDDNLIELLWCNGHVVMQSQNHHRKLPPRPPEKAAAAAVQEDEAGLWFPFALADSLEKDIFSDLFYEAPVAATAEAAPAGPGAGADGEGKTCKGDAAMAEEERGGPGAASEAPRELMPPPKSTNASCSRQQTMSLADGGDNAGDLSELVRARRSSGGAARRKAEAGGGGGGASSSMLSAIGSSICGSNQVQVQQRTASEPGRRGAPPSAVGSANAIPCGGRDHGHGHEATTVASSSGRSNCCFGTTTTTEPTSTSNRSSKRKRLDTTEDSESPSEVGVLPSNTNRDAH

SEQ ID NO: 31171 - protein, 33 aa, Oryza sativa
MAWEQLHDDRRAALRALGMGLIMGGDLLCTELE

SEQ ID NO: 31172 - protein, 468 aa, Oryza sativa
MTLGPLIHPVTVLEQCHVSPSPAPAAGQPRSLPLTFFDLVFLDFPPVQRLFFYDNADLRDAHDFLLRELPLFRESLAAALHHFYPLVGKLPCGIRERMSPPEVAYSDGYSVCLTVAVSSDDFQDLAGDHPRDTARLRPLLPPLPKHGSSQDVLAVQVTVFPRAGICVGTTLHHAVADGSSYVHFLKTWAAIHRLGDERRKAVVVDHTPPLFDRGVVQDGDGLREAFIRDHRDLVESGDKRLDDWDLSRRPDTVLATFRFTDELLRKLGRHVEAETSARCSPYALACGAAWAGIVRARGVGGGDVARFGFVTGCKPRVSPPIPSSYFGNCLGLCFVEAKRRHLTAASASAAIWRVIAGLAEQGRALRDAHGWVRGAREYAAARAVTVAGSPKLGVYAAADLGATWGGRPRKVEIASVERTGALALAESGRRGDRDGGGIEVGVALPRAEMEAFRAFHVELVRLLDATTH

SEQ ID NO: 31173 - protein, 448 aa, Oryza sativa
MGCISSKLLPPGPGDARGGSGARATVRGRVDHVVSLTSTTYGVLDLHPKHGAAAAAAAAAAAAAAVACQEKVQETQAQPPQEDKPISREWKRARPPPLVVPSAKKPAPAGKLDSGLEVINAWEIMAGLEDADAADASPAKKPAKQPSRWSPARVIAMALPSPKKSATKRRNTPGKENSPLQRCSGNNNSSNINKTGDVNVDRVLRPYNSIDNSKLSRMSKRFSPVSARIVRKPGPPETGGGMSSSRRSLSPLFDPELLASIERELSEEGAHIKRMVGSEKPKHPKAAPPAMVAEGKCPPGGADAVVLYTTTLRGIRRTFEECNAVRAAIEAHDVKLIERDVSMDSGYREELRLLLGGREVRVPAVFVRGRHVGGAAEVTKLEEEGKLKALLQGLPRARVWCAGCAGVRFVMCRDCNGSRKVRVDGERKETVQCGECNENGLVRCPICS

SEQ ID NO: 31174 - protein, 247 aa, Oryza sativa
MATPGQQLPPGFRFHPTDEELVVQYLRRRALCRPLPAAVIPDVHDATVLDPWDLPGAGDGEAYFFSFRQLAAASGGGGWRRRRAGSGYWKATGAEKPVFLRGFGCGGGGGGGGQHLVGVKTTLLFLRAKPPSRTHWVMHEYRLAAAGAVAVAAAGQTKRGNHSCMAQPGEWVVCRIFLKNNRSSRRRAGDADGETPVTGVHGHRRRQPSPSPSSSSCVTAEVSDGEGEEEVSSGSINGAPSASQREA

SEQ ID NO: 31175 - protein, 25 aa, Oryza sativa
MNVWAGPYHFFLGLKRAHRKPKIAP

SEQ ID NO: 31176 - protein, 453 aa, Oryza sativa
MATKVVDKLTVAASPPADGGVLPLTFFDVPWIFTGPVERVFLYTYPHAVEHLAAHLLPSLASSLSAALHRFYPLLGRVRPCSSGGGGGGYEFCSTGGDADRVELTVAESGDDFEELAGGGPMDVGRLYSLVPRLPRPEEGSSELAAVQVTVFPGKGLAVGVSIHHVACDDSSFMHFVKTWAANCRVASGGDVDAVPPPPPPFLDRGVVADPDGLAAKTLDQMRQLANSGPPPPPPSGPPPKLFMASFTLTRDSIDKLKQRVTASGGGGVHCSAFTVACAYAWTCLARVDATSAARERAHLLFSVECRRRLTPPVPQEYLGNCLRPCFVEVDTAGLLGSGADGVVTAAVAIGAAIRGLDDGVLDGADGWFQKIVSLMPHRPMSIGGSPRYGVYDTDFGLGRPAKVELLSIDKTPGTVSMAEARDGHGGIEIGVALPEADMARFSSCFADGLKQL

SEQ ID NO: 31177 - protein, 318 aa, Oryza sativa
MDALSAQPAWALALAGVGLMVAATASARLARWLYAAFLRPGKPLRRRYGEWAVVTGATDGIGRALAFRFAGAGMSLVLVGRSPDKLAAVSGEIRGKHPRAEVRTFVLDFAAEGLAAKVAALGDSIRGLDVGVLVNSAGMSYPYARYFHEVDEELMRNLIRLNVEALTRVTHAVLPGMVERKRGAIVNIGSGASSILPSYPLYSVYAATKAYVDQFSRCLYVEYKNKGIDVQCQVPLYAATKMASIKKASFFAPSPETYARAAVRYIGYEPRCTPYWPHAVLWFLISAFPEPIVDRLLLNMSVGIRKRGMAKDARKKTQ

SEQ ID NO: 31178 - protein, 493 aa, Oryza sativa
MAMEKSPPPAPHFLFVVSGIQGHINPARRLAARLMASAPAARVTFSTAVSAHRLMFPSLPSPAGEDVDDTGVAYVPHSDGYDDGYKPGVHARDDYMARTRAAGTESLSAIVAALAARGRPVTCIVYTFLVVWAPAVARALGIPSAIYWIQPAAAFAVYYHYFHGHGEALASCANDPARGAVVRLPGMPFLRSDELPSAVSIVSPEHKHYLLLAMLRDLFEDLDELKPRVLVNTFDALEPDALRAVPDLEVVAVGPVVPDGEASLSSSSTDMFRRDDASACVDWLDTKPARSVVYVSFGTLLSMSKRQEEEMRRGLEATGRPYLWVARQGAVDGGATLDSAPTPAADAGGGGGEGDAQGMVVGWCDQMKVLSHPAVGCFVTHCGWNSALESITRGVPMVAVPQWTDQPTVAWLVEARMGAGVRARLDGEGVVERGELQRCVELAMAGGGDGGVRARAERWRERAAEAVAAGGSSERNLRAFASGAVTQAVCSSR

SEQ ID NO: 31179 - protein, 404 aa, Oryza sativa
MALPLHDATTSPSDPDDLGGGGEEEEERLASKPLLSSPSTYPSAGTEEGVEELELDRRYAPYARRDAYGAMGRGPLGAAGAGRLAVGAAVLFPLRLAAGVLVLVAYYLVCRVCTLRVEEEEREGGGGGAAGEVEGDGYARLEGWRREGVVRCGRALARAMLFVFGFYWIREYDCRFPDAEDEHQEQSKELGRPGAVVSNHVSYVDILYHMSSSFPSFVAKRSVARLPMVGLISKCLGCIFVQRESKTSDFKGVSGAVTERIQRTHQQKNSPMMLLFPEGTTTNGDYLLPFKTGAFLAKAPVKPVILRYPYKRFSPAWDSMSGARHVFLLLCQFVNNLEVIHLPVYYPSEQEKEDPKLYANNVRKLMAVEGNLILSDLGLAEKRVYHAALNGNNSLPRALHQKDD

SEQ ID NO: 31180 - protein, 465 aa, Oryza sativa
MQSLLLPTFAAASAAPPRRGRVPPAGRASVSVRASASAAAVAPRRETDPRKRVVITGMGLVSVFGNDVDAYYDRLLAGESGIGPIDRFDASNFPTRFAGQIRGFSSEGYIDGKNDRRLDDCLRYCIVSGKKALESAGLALGSKSMDKIEKTRAGVLVGTGMGGLTVFSDGVQNLIEKGHRKITPFFIPYAITNMGSALLGMDIGFMGPNYSISTACATSNYCFYAAANHIRRGEADVMIAGGTEAAIIPIGVGGFVACRALSQRNDDPKTASRPWDQDRDGFVMGEGAGVLVMESLEHAMKRDAPIIAEYLGGAVNCDAYHMTDPRSDGLGVSSCIKQSLADAGVAPEEVNYINAHATSTLAGDLAEVNAIRQVFKDPSEIKINATKSMIGHCLGAAGGLEAIATVKAITTGWVHPSINQFNPEPAVEFDTVPNVKKQHEVNVGISNSFGFGGHNSVVVFAPFKP

SEQ ID NO: 31181 - protein, 357 aa, Oryza sativa
MTAMAAAAAVLVSLLLVAAAAGQQAALVPGVMIFGDSVVDAGNNNRLATLVRADFPPYGRDFPETHGAPTGRFCNGKLATDYTVDNLGLTSYPPPYLGQLAQSDNRSLLHGANFASGASGYLDTTASLYGAISLSRQLGYFKEYKTKVEAVAGGKKAAALTSEPIYVVSAGTSDFVQNYYVNPMLGATYTPDQFSDVLMQPFTTFIEELYGQGARRIGVTSLPPMGCLPASVTLFGGGSGGGCVERLNNDSRTFNAKLEAASDSIRKQHSDLKLVVFDIYNPLLDLVTNPTAAGFFESRRACCGTGTIETSVQCNQGAVGTCANATGYVFWDGFHPTDAANKVLADALLLQGLQLIS

SEQ ID NO: 31182 - protein, 264 aa, Oryza sativa
MKTDSYLVPGLFLVPSLRGELERMFPEKDAVFHHLSRYLLHPANAVWHAITAYHRDHLAGAGHLVGIQIRVYHEETPPVSQVVLDQVLSCARRENLLPAAGNTSSSDQAVLVTSLSSWYYEKIRDELGGGGGGVHQPSHEGLQRMGDTAHDMRALSEMYLLSTCDALLTTGFSTFGYVAQGLAGLRPWIMPRRPWWEKEAATAVPDPPCARVATPEPCFHSPSYYECAARRNYDDIGKVVPYVRRCEDVSWGIQLVNGSSQSQW

SEQ ID NO: 31183 - protein, 282 aa, Oryza sativa
MATTTTTPSSSLTAPLLRPSSNANPAPRSLPLLRSRRCARAVATAAAAAGHGAAHQRSGIWSIRDDLVVPRSPYFPVEYASGQERGPSPMVMERFQSVVSQLFQHRIIRCGGPVEDDMANIIVAQLLYLDAIDPNKDIIMYVNSPGGSVTAGMAIFDTMKHIRPDVSTVCIGLAASMGAFLLSAGTKGKRYSLPNSRIMIHQPLGGAQGQETDLEIQANEMLHHKANLNGYLAYHTGQPLDKINVDTDRDYFMSAKEAKEYGLIDGVIMNPLKALQPLPASS

SEQ ID NO: 31184 - protein, 378 aa, Oryza sativa
MAAAAAAAAAPSPAPCFPSTRHTLPGLVSVRVSRRVKVAVAIADPAPAFNSVTAFAPATVANLGPGFDFLGCAVADASLSLGDTVTATLDPSLPPGTVAIASVTSPSRPTLADRLSRDPLRNCAGVAAIAALRALDVKSHAVSIHLTKGLPLGSGLGSSAASAAAAAKAVDALFGSLLHQDDLVLAGLESEKAVSGFHADNIAPAILGGFVLVRSYDPFHLIPLSSPPALRLHFVLVTPDFEAPTSKMRAALPKQVAVHQHVRNSSQAAALVAAVLQGDATLIGSAMSSDGIVEPTRAPLIPGMAAVKAAALEAGALGCTISGAGPTAVAVIDGEEKGEEVGRRMVEAFANAGNLKATATVAQLDRVGARVISTSTLE

SEQ ID NO: 31185 - protein, 510 aa, Oryza sativa
MDKVGKNGGRGQQRALPRSGKSLGVLNHTGALGQAAAGDGAARRGDFSMFRTKSTLSKQNSLLPSRIREPDLELPPHVEGPSVGRQGGEDPLNKSVPAGRYFAALRGPELDEVRDYEDILLPKDEVWPFLLRFPVGCFGVCLGLGSQAILWGALAASPAMRFLHVTPMINVALWLLALAVLVAVSVTYALKCVFYFEAIRREYFHPVRVNFFFAPSIAAMFLTIGLPRAVAPERLHPAVWCAFVAPLFGLELKIYGQWLSGGKRRLCKVANPSSHLSVVGNFVGAILAARVGWAEAGKFLWAIGVAHYIVVFVTLYQRLPTNEALPKELHPVYSMFIATPSAASLAWAAIYGSFDAVARTFFFMALFLYMSLVVRINFFRGFRFSIAWWSYTFPMTTASLATVKYAEAEPCFTSRALALSLSLMSTTMVSLLLVSTLLHAFVWRSLFPNDLAIAITKDRQNGAFKPHGKGRKAGKRVYDIKRWAKQAPLSLVSSITKSNSADKEEEEKTE

SEQ ID NO: 31186 - protein, 408 aa, Oryza sativa
MWSLSSPTPTLQPSGIGADTKGASCAIEEVIVAQGNSGVVEPSPALEKKRIEKVPSASIDRGVPEQVKPKSDAALSPEESRKPSGLQLSSTYLQGSTKSSGLPPSGTSLDGGIEPSGLLPSGTSLEWGTKISGVQSSASSLEGSKKAFVRQPSGSSLEGNTKASGRQPSGSSIEGSKKPSDRQPSGASQEGNTKPSGWQQSVSSLEGGTKPSGWKPSISIDTNTKASGWLRSSSSPDVGRKASAWQSSGSSPVAGSSKASGWQPSPRESSKSKPNSTWGAGQSRNSSSHQSTTPTAKYSSETPRRQGNNNTNSAGWGDSLGNKSWHSPSGNASSRGSHSSHHHDRHNQSSEPWRGGSNHSRRSDHRQEHGNGGSSRSSSSRGQSQRGICRYYENGYCRKGTSCQFLHR

SEQ ID NO: 31187 - protein, 317 aa, Oryza sativa
MEMAIVMARDAAMDWIIHLDTDELLYPGGGAEYSVRHLLADVPGDVDMVIFPNYESSVERDDIKDPFSEVSMFKKNYDHLPKDTYFGMYKEATRGNPNYFLTYGNGKSAARVQDHLRPNGAHRWHNYAKSPNEIKLEEAAVLHYTYTKFSDLTSRRDRCGCKPTKDDVKRCFMLDFDRAAFIIASTASEEEMLRWYNERVVWNDKQLNLKLLRKGVLTRIYTPMAIVQGLRESGVFTSSIAAAQSLVNDKVSLKENNVQNKNHTKLEKVSRKFIRANSQASARKILHAVEPASHDSNVSAVPPLSPPSLDNHLLELS

SEQ ID NO: 31188 - protein, 166 aa, Oryza sativa
MVQFRSSLSMSRARTRHGDGDDRGWNQLHVASRKGDLNQVRRLLDDGMDVNAPAWGPKSPGATPLHLAAQGGHVKIMDELLERGANIDARTKGACGWTPLHIAAKERNKRAVRFLIENGAFLPPDMNDHRFNPPLHYCSGLEWAYEMKRMQDESDSTGETSLGSES

SEQ ID NO: 31189 - protein, 41 aa, Oryza sativa
MQAAVRRATFSSFRVPEYLLRSFRLCKTMLSGWLMKEVQWT

SEQ ID NO: 31190 - protein, 363 aa, Oryza sativa
MERETPGGVSALQPSSRKRLIPSPQTRDDASQGETTDANPPLKKPKEGSSQCTSELKTEQSPHEDVMAPVPVLPSTELDEQQPGEEMDTDQSSLPVEEVEETREDDLGDKDDMETHIDASMDIQGQDAETGIDNDATTVEDVPVKSEAVMESLEEDLKTEDGKEEGQFTATTDVEDEREEGELPDEPEQPDSTPPVLDVGEQAGDSFRAASPAGPTEKSDVDMPEETGEGDGTMESDQSPVPQSGGADASPSQMADASPSPAREPSPNPVQAGAPPEQQNPTPPNPVQAGASSEQQNPATAAEGVETRSTRTINLTERARQNRQARILRSATQQNARGRGNQSLTYRKDGGRGTRGRGGRGQS

SEQ ID NO: 31191 - protein, 10 aa, Oryza sativa
MFVYLCWILL

SEQ ID NO: 31192 - protein, 334 aa, Oryza sativa
MCGGAILAEFIPAPSRAAAATKRVTASHLWPAGSKNAARGKSKSKRQQRSFADVDDFEAAFEQFDDDSDFDDAEEEDEGHFVFASKSRVVAGHDGRAAARAASKKKRGRHFRGIRQRPWGKWAAEIRDPHKGTRVWLGTFNTPEEAARAYDVEARRLRGSKAKVNFPATPAAARPRRGNTRATAVPPPATAPAAAPPRGLKREFSPPAETALPFFTNGFVDLTTAAAPPPAMMMTSSFTDSVATSESGGSPAKKARSDDVDSSEGSVGGGSDTLGFTDELEFDPFMLFQLPYSDGYESIDSLFAAGDANSANTDMNAGVNLWSFDDFPIDGALF

SEQ ID NO: 31193 - protein, 167 aa, Oryza sativa
MVLTFIQVLHGCRQLVHTHTHTHTHPTHSSSPGVVQIIRGDVSRFDHGHQDVPRRRRRRRCRGVLPRRGCSGCRWARAEPDVRRRRRLVLGRRRRSLPGRGAPLRQPALLSWLRSSQRARVHEAGSMNDSVLLCLITRLVCLLYPPGSYLYLASSFRCARLTVLAFL

SEQ ID NO: 31194 - protein, 337 aa, Oryza sativa
MDAVLVTAAIFGLLLCGCSVSGVEGIGVNYGMIGNNLPSPDKVIALYRASNITDIRLFHPDTTVLAALRGSGLGVVLGTLNEDLARLATDASFAASWVQSYVQPFAGAVRFRYINAGNEVIPGDEAASVLPAMRNLQSALRAAGLGVPVTTVVATSVLGSSYPPSQGAFSEAALPTVAPIVSFLASSGTPLLVNVYPYFAYSADPSSVRLDYALLSPSTSAAVTDGGVTYTNMFDAILDAVYAALEKAGGQGLEVVVSETGWPSGGGGAGASVENAAAYSNNLVRHVGRGTPRRPGKAVETYIFAMFNENQKPEGVEQNFGLFHPDMSAVYHVDFSA

SEQ ID NO: 31195 - protein, 150 aa, Oryza sativa
MRGEANGEEEQQPPRRNHLRDDAEEEEEVERRAARPVSGQQQQQQRRRPTDVGGGAAMRSVGYVGKHRLSAAIARLDQELQSLQDELNELETMEPASAACQGVITSTEGKSDPLLPVTIGPENASWERWFQRVRSSCSNKWWASKGSDFP

SEQ ID NO: 31196 - protein, 20 aa, Oryza sativa
MPGVHTPTVHRKLQHQKLQL

SEQ ID NO: 31197 - protein, 290 aa, Oryza sativa
MERPAPVRKSHTSTADLLAWPQQQHQPDGHAASTPSPARRPHQPSEALRKVVFGGQVTEEEAESLNKRKPCSAPKWKEMTGSGIFAAGADGEAEEPGSAAAPGRAAPRNYQPVTVSHISFAEDGSVPPKKPTSVAEVAKQRELSGTLQSEADSKMKKQISNAKSKELSGHGLFDPQDVRPNGARNTANGTGASHTPVRNANVSSFSFGEANTDSVTKTAKKITGKKFTDLTGNNIFKGDEAPASAEKHLSTAKLKEMTGSNIFAEGQAPTREYHSGNRKPPGGESSIALV

SEQ ID NO: 31198 - protein, 211 aa, Oryza sativa
MAAASIPASSQPFKLILGSSSVARKHILTEMGLEFEVMTADIDEKSIRRENPDELVTVLAEAKADAIMSRLNISDYQKEGDRPTLLITSDIVVVHEGIIREKPTTKEEARQFLKGYSGSHVSTVGSVVVTNLTTGKRLESLDKAEVYFHDIPDEIIENLIDERVVFRVAGGLLLEHPLTLPFVEAVVGSSDSVMGISKDLANKLIQDALSA

SEQ ID NO: 31199 - protein, 364 aa, Oryza sativa
MTMHLLSGQRLLLPIPCGACYRSPPSPAIKPSPLGLRPFTKSSSSLPLHLHAVSPATVATDGSSTSAQPDSWAEFASRVSGEWDGFGAEFTAAGDAVELPENVVPEAYRDWGVQVFDWQTQCPTLADPAAPCDLHYRLVRLLPTVGCEADAATVHTSHQRHASSASAFAYSAAGSYVAAWPRGPAPVLEVEHCVVHPDNREVRVRLVQTVALAKEARLRGVKVFSEQWYGPYRNGDQLGGCALREAAFAAGEKLAASDVTGQWQSDAASAARFSGELDPETGKFAGLTPDEPGERLSRDDGDGIVTLPKQLWSSFKENGKDEFVCEVGWVLGHGSAITSRCVLSRDGDVKEIVVSRESRVSEGT

SEQ ID NO: 31200 - protein, 366 aa, Oryza sativa; identical to SEQ ID NO: 31006

SEQ ID NO: 31201 - protein, 66 aa, Oryza sativa
MIHHLLTNSLEALQMFLEEILGKLSRFYPMKKTGNLIFIHHTFSFVAALHSHASYGKYEASIPNIV

SEQ ID NO: 31202 - protein, 373 aa, Oryza sativa
MEAQAQDKAEEGEEEGTRQQHAQAGPVGAAGGGGGGGAAAVAMSAIPMNSWLVPKPEPVEFFGGMAMVRKPPPRNRDRHTKVEGRGRRIRMPAACAARIFQLTRELGHKSDGETIRWLLQQSEPAIIAATGTGTVPAIATTVDGVLRIPTQSSSSSGPASSAVVDGEESSAKRRRKLQPTRAVAGASPLATAAPAAYYPVIADPLLQGSGGAAISVPSGLAPITATGAPQGLVPVFAVPATGSPAVAGGNRMIPQATAVWMVPQPAGAAGAGNQPTQFWAIQSAPQLVNFAGAQFPTAINVADFQQQQQQQPVSTTIVQNSNSGEHMHFSGADSHEQQRRGRKEGNSGGVVDHPEEDEDDDDDEPVSDSSPEE

SEQ ID NO: 31203 - protein, 439 aa, Oryza sativa
MEGVGGGKRRGDDGAEATPRWRFSRPSSQGGPLAAAGLTSIRAVLNRVNSSVDAAAAGGPRPVLRLGNGDPTASACYRTAPAAEDAVVDALRSGAHNGYSLTVGVLSARRAIAEYLSRDLPYELSANDIYLTSGCVQAIEVMISVLAQPGSNILLPKPGFPLYESRTTFSNLEVRHFDLIPERGWEVDLEGVQAIADENTVAIVVINPSNPCGSVYSYDHLAKIAETARKLGLLIIADEVYDHLAFGNNPFIPIGVFGKTVPVITLGSISKRWLVPGWRLGWIATCDPNGILKEAKVNQSIENYINISTDPATFVQGAIPQIIANTKEDYFNKILDQLRNAADLCYDKIKDIKGITCPHKPEGSMFVMVKLDLSYLDGFHDDMDFCCRLAKEESVIVLPGSALGLKNWVRITFAIDIPSLVDAFERIKSFCQRHGKLET

SEQ ID NO: 31204 - protein, 557 aa, Oryza sativa
MGAAVGKAAPAKARLDIAENTIFQRNRGIWDAAAACTNERLLDAVDEILDLAEAQPFPAASAAAARLDSALRAAMSLMMDEFMCLRVWNASSHDLRLAVDRLAVGASANALWQHTFPSTGDRSSSASTVGRASAGSPSSAPGDLVGFLDGEFLDELQLLCPASLLVLHEIAHRVIRAGYTKELVQKFTNSPCDVLDRFLSIFQGECSRRTTVDLIKRWSLATHLVGKALVVMQRQLYTHNSPGAFDALKDEYFLAITKNRILNLLKFADDFTSITSHEKLIYILGMYQALSEAASGLLLMFTGPHKELVAERSEEILAKLAMSIRSMVASLIAKVRDGVSNTKNIVGVGVHPLTKYAVLCIVRPAPHRDTLDLILASGGDDVASLSDLASRVVGSLEEKPVLPCDDDATAAATGSRHHLFHANNANFVLQSCKPLLGDEWAAARESIVERHVAGYAEACWAPVVACLEPAGRKPAAKVVAKFSAAFDRAYESQARCEVRDPALRDALRRAVSDKVVTAYGVYLKTHPKLEKKLRYTAGELGERLSELFEGEAAEHNK

SEQ ID NO: 31205 - protein, 328 aa, Oryza sativa
MAASLVHAAAASASPAPAARVGAFHPLASSSPFLRLACATASSPSTRRRRCLDAPLRALSAGSRLAAGWGAPRTRRVIATFAGEESVGSESGDDKEKGKGEMKPEEAQEVWKEMLKQFKDEAQRMHGLTLQAYGVYSQRAREVLLEASEKLKIHADKAQKDLSVIATEVGEEGQEYLKLAAQNSLDSIKDIIETFNSLGKLKISEYEDYHVGIPFGTFLTVGGFLNFMLTGRTSAIRFGIILGFALLAMGISSLRSQRAGGRRPRLLLKGQAAIASVIFFRELLIFFHYGWFPNIFVVLLSGAVTAFYTHRIMTGGHKGPSSESTAEN

SEQ ID NO: 31206 - protein, 432 aa, Oryza sativa
MKPPLERNPTKKRHSWWWDSHISPKNSKWLAENLEEMDKQVKEMLQLIEEDGDSFAKKAQMYYQRRPMLITHVENFYRMYRALAERYDNVTGELRKNIPTRLQYQGSLAGSDSELQRSPSPSPEPQKSWTREQSPRAAGFDVFLSNKSNGSPSPASRKEPEDLASQSESDAKSEDGEDDGIAYTLHQRVLELEDELNTVNQKLHDANEKLEVLEEKSLRCHCDSKENGNGADQSAINEKLQSSQEEINNIKNSLEVLSEEHSRLLGQNKKLEAEIVNLKEEIASDRQQYEEKLSRSDAEIDKCRQELADASEKLLQEKLSNSSVTAELQETIESIRIKLEEVSEEKLLVENKFKQLEEANSEAEKYNQELSHATEKLSEEKFRHEAEILALNQAIENLKSKLESIAKEKSLLKSWFADLEQVVERGRRIFPE

SEQ ID NO: 31207 - protein, 19 aa, Oryza sativa
MFRCVHYLCINLSVSQLNY

SEQ ID NO: 31208 - protein, 25 aa, Oryza sativa
MSWGKNCGNYIAKFWCAMAAMMYCN

SEQ ID NO: 31209 - protein, 23 aa, Oryza sativa
MLCPPVWKKLAGPEGPIIRNYYR

SEQ ID NO: 31210 - protein, 239 aa, Oryza sativa
MDAPVQVDNKTGTATLHYANTVSSSMASLTLVKPPPQNATHIVSKFTDSLHSLNSKEYPANVPQTVDHSLLLTVGVGVNPCPSCINGTRVVGTINNVTFIMPSTPILQAHYYNIPGVFTEDFPATPLHKFNYTGSGPKNLQTMNGTRVYRLPYNASVQVVLQDTGIISPESHPIHLHGFNFFVVGKGVGNYNPRTSPSTFNLIDPIERNTIGVPTGGWTAIRFRSDNPGIDFKTYVFLR

SEQ ID NO: 31211 - protein, 419 aa, Oryza sativa
MPEEDEEIVSSVVAGKVPSYVLETKLGDCRRAAGIRREAVRRITGRQIEGLPLDGFDYASILGQCCELPVGYVQLPVGIAGPLLLDGQRFYVPMATTEGCLVASTNRGCKAIAESGGAVSVVLRDGMTRAPVARLPTARRAAELKAFLEDSVNFNTLSMVFNRSSRFARLQGVQCAMAGRNLYMRFSCCTGDAMGMNMVSKGVQNVLDYLQDDFPDMDVISISGNFCSDKKPAAVNWIEGRGKSVVCEAVIKEDVVKKVLKTNVQSLVELNVIKNLAGSAVAGALGGFNAHASNIVTAIFIATGQDPAQNVESSHCITMLEAVNDGRDLHISVTMPSIEVGTVGGGTQLASQAACLDLLGVKGANRESPGSNARLLATVVAGGVLAGELSLLSALAAGQLVKSHMKYNRSSKDMSKVIS

SEQ ID NO: 31212 - protein, 105 aa, Oryza sativa
MEGVGARQRRNPLIPRPNGSKRHLQHQHQPNAAEKKTAATSNYFSIEAFLVLVFLTMSLLILPLVLPPLPPPPSLLLLLPVCLLILLVVLAFMPTDVRSMASSYL

SEQ ID NO: 31213 - protein, 406 aa, Oryza sativa
MASAVASTMPSPPPPAVSFGWLAPTRVSPPPALPAVAVAAEQAVSKEFIDFEFSLGGSATMLPADELFADGKLLPLRPHPVAAEKAVAMEAEKAVPELVKAVRPAAAVAAEVFDPYVFSPKAPTCSSRWRELLRLKKVQTPTKPSASTSASPSTATAATPSRSSNSSAARSLKLLLLQRNGGRASGAAASDLSVAPLLRDSSDSEASLSLASSRFSLSSSSSSSCHEHDDFPRHSLDSVDPTPRPRLRLVRSQPQPHPPAAAAAAAAAVAKPRAAIQSPARRRPSPPPPPPPQVASVDSPRMNSSGKIVFQGLERSSSSPAGSVHSSLRSRSRVMDRSYSAGVRAATPVVLNVPVCSRPVFGFFKDRKDAAAKDSSASRPRSALGRKTAPHAGNAGGASRDLGTSN

SEQ ID NO: 31214 - protein, 105 aa, Oryza sativa
MQSPLFSQCAAPPVELRPTAFISSPPAPAPASASSFLGSPQSLMLPASTSTGPSPDSSAATKFIRMSSQLRSRSTTARAAASSGEQEYSRRRPAPRTRSLVSTMG

SEQ ID NO: 31215 - protein, 374 aa, Oryza sativa; identical to SEQ ID NO: 30973

SEQ ID NO: 31216 - protein, 224 aa, Oryza sativa
MDVSAALSSDYSSGTPSPVAADADDGSSAYMTVSSAPPKRRAGRTKFKETRHPVFKGVRRRNPGRWVCEVREPHGKQRIWLGTFETAEMAARAHDVAALALRGRAACLNFADSPRRLRVPPIGASHDDIRRAAAEAAEAFRPPPDESNAATEVAAAASGATNSNAEQFASHPYYEVMDDGLDLGMQGYLDMAQGMLIDPPPMAGDPAVGSGEDDNDGEVQLWSY

SEQ ID NO: 31217 - protein, 43 aa, Oryza sativa
MHTTFPFPDRVCSLNPLNLRNAFICFFFFSFFFVFRRTIICAF

SEQ ID NO: 31218 - protein, 166 aa, Oryza sativa
MTVAAEMVAELDITDHEVTRIAQLIDGKVAALVPGWRPGPATDDDDDDDLVGGGDDPDAPGGAAAACCKNCRPAASSSSSCGSLVDFMSSAAAAERHGCRRCAELHGRFEEITFQADDDEEEQHLQGSSSDTGGSNHEQHAMGKDKEVMNINGIAQDGTVQGSEQP

SEQ ID NO: 31219 - protein, 216 aa, Oryza sativa
MAATATATAAPEEEEGKRVMTRALEWEGCVVSPVPTATADEAWALLSDFLAFHRWHPRVAKCRPASPSAAASTAAAPPGSVVRYCEGTPRGDGAPPDWAHETLLEHDAARRFFRYEMNDNNMGFGVFVATFRVVPDAGGGDADAPGCELRWEFEGDPVRGTPKEALVARLQAGLDGMAARVQEHLMSARAADAAVIAAGGVEAADELNRDKYSIAV

SEQ ID NO: 31220 - protein, 355 aa, Oryza sativa
MTTRIAPGVGANLLGQHSAERNQDATTYVGNLDPQVSEELLWELFVQAGPVVNVYVPKDRVTNLHQGYGFVEFRSEEDADYAIKILNMIKLYGKPIRVNKASQGKKSLDVGANLFIGNLDPDVDEKLLYDTFSAFGVIVTNPKIMRDPETGNSRGFGFVSYDSFESSDQAIEAMNNQHLCNRPITVSYAYKKDTKGERHGTPAERLLAANNPGSQKNRPHTMFASGPPTQGLANGAPVPRPFSNGAVPPQIQHVRPPPPPMQQFPPMQMNGQPVWPPQNTQLPPHMPPQMHYRPAVRPPPPNMMPPPPLGMVRPPPPPSSMPAPPMWRPPPPPQQAGGMPPPPMSMPPPPPPPSG

SEQ ID NO: 31221 - protein, 8 aa, Oryza sativa
MYHFAKLC

SEQ ID NO: 31222 - protein, 320 aa, Oryza sativa
MSGRRDDSAKMAKLKELLHRSENRICADCSAPDPKWASANIGVFICLKCSGVHRSLGTHISKVLSVTLDQWSDNEIDNVIEVGGNSHANAIYETFLPQNHSKPHPDSTQEEREKFIRSKYELQEFLEPSLRIVSHQSSDSGKHAGSASHSVSSKSEVGMIEFIGILNVKVKGGTNLAIRDMSSSDPYVVLTLGQQKAQTSVIKANLNPVWNEELKLSVPQQYGPLKLQVFDHDMLSKDDLMGEAEIDLQPMINAAAAFGDPGLLGDRQIGRWLKSGDNALVRDSAVVVAGGEVRQELALKLQFTESGEVELEMQWFPLNM

SEQ ID NO: 31223 - protein, 452 aa, Oryza sativa
MAPTAEVAAAPVQEQEKCNGGGGGGFRGAAVRCHPALSTEKKASIRGVVGELLGAAAAAAGAGEERRRSLISLGVGDASSHACFRRGGEFAADAVADAARSGVFDCYAPSCGFPAARRAVADHLSAGARHRTRDADVFMTAGGTGAITAIATVLGGAPGANVLLPRPGFAPYEAACELAGAEPRFYDLLPRRGWEADLAGVRAMADGATAAIVVINPNNPCGAVYSAQHLFQIAETARELGIPIIADEVYAHMVFGGSKFVPMATFAHITPVITIGALSKKFMLPGWRLGWLAFCDPNGALKHVRNATEMLLNVTSGPASIVQAAVPKILSNEHNEFHRNVVNLLESAADALYRRVNQIEALQCYSKPHGSMFMMVEVNTSLLFGVEDDMDFARELIKEESVLVLPGSVIGLKNWIRIFFGAPTSVILEACDRIEAFCQKRAVQVKLLKKKF

SEQ ID NO: 31224 - protein, 609 aa, Oryza sativa
MSGDPTEFLSVASSLFGAVIDVHYYNLYNSMFDNYTVEQNINFVRNNRSSDINTVTKQNVPLTFVGEWVAEWYVDNASKEDYQNFAQAQLDLYGKATFGWSYWTFKNVKNHWSMEWMIKNGYISLNNLPPSSPPIRSVNLGGWLVTEGWILPSLFDGIPNNDLLDGTTLHIKSVIQDKYLAAEQGGGQTIVANRVVASDWESFTLWRVDETTFNLRVFKKQFMGIDSNGTVIATATTPGLSETFQIVRSDTDKNRVRIRAPNGSFLQAKTANSVTADYGESTNWGNDDPSVFIVDMVGGPQGEYQICNGYGAEKASQVLREHWSTYIVESDFEFISSSGLNAVRIPVGWWIASDPNPPAPFVGGSLQALDNAFKWAENYNIGVIVDLHAAPGSQNHWEHSATRDGSLEWGTTDTSITQTVQIIDFLASRYANSPSLLAIELLNEPWGPDVPLEKLKKYYEDAYNVVRKYTAKAYVIMSNRLAGESNTELLDFASRFPGVVIDVHYYNLFNDDTFKNLNVEQNIEFVKNSRKAEFSNITKQKSPLTFVGEWAAEWKVNGASKEEYQRFAQAQLDVYGRATFGWAYWNFKNVNNHWSLEWMIKNGYISLKI

SEQ ID NO: 31225 - protein, 309 aa, Oryza sativa
MATGLSGGAMTSFAVKKPLLAAAVRRRSWPPPSGRALPFSPLTRTPRSRGLGTVTCFVPQGTESQQAPAPSPPPTVPVPVPSLEEEAAAAAARRIAERKARKLSERRTYLVAAVMSSLGFTSMAVAAVYYRFHWQLEGGDVPMTEMFGTFALSVGAAVGMEFWAQWAHRSLWHASLWHMHESHHRAREGPFELNDVFAITNAVPAISLLAYGFFHRGIVPGLCFGAGLGITLFGMAYMFVHDGLVHRRFPVGPIANVPYFRRVAAAHKIHHTDKFEGVPYGLFLGPKELEEVGGLEELEKELARINRSL

SEQ ID NO: 31226 - protein, 439 aa, Oryza sativa
MDPQIFVRLSVGQLGLKLPGANARKAARSFHCEIRLRGFPVQIAPVPLINYSEFNLDPHTNAAVFSLDESELKALSAPGCFGAHGSYLEVAVYVGRRGGHCGIVTGMKRLVGVVRMDIGPEWRDGKPVMLHHGWVGIGNGEAKPELHLRVKMEADPRYIFEFDDEVALNPQVVQLHGRNRQPIFSCKFIRDRRGSHSDQLYWSSSGGEEKEAEMMRRRERKGWKVVIHDLSGSAVAAAFMATPFVAASGCDTVARSNPGAWLIARAGATAPGSTSSSAAVESWQPWGRLEAWRDQGGAARQDTVCLRLRLLPDGQDACMLVAETPLRSDRGGEFAIDMDRQAPALAAGAEHCAASLGEACAGGGFVMSCRVEGESRSSRPLVQLAMRHVTCMEDAAMFVALAAAVDLSVKACRPFRRKTTATKKTASASSSPDPLELDT

SEQ ID NO: 31227 - protein, 470 aa, Oryza sativa
MSPKPRKSVAALSGPKSSPARSTRSKSKPDSDIAEHDDSPKSSSGRLTRSRAKAIEQVGNRTVEESAGVSSNKKKRRIEEETAGESPATGAPEGHGTLASRPLPPTHPPPTPRVRKSSCIVRLEVARLQKLTLRRDKKDDPSTAAALPTPSDKNMVLGMSRSIVRVSSPPSEGKLISPRTGFVISWDGATKRAMIVTLFTYFKKKPHEPQPELQVHLPDKSIVQGRLIFMNRHYNLSILEITSDLPLQVPAFGSAPKYGQKILALSRDENMSLVARRGAITWSDGSFMWRNHYMFVDCDVPEGGVGGPVVDSCGSSIAMVYRAGPGAVIISISIICTFFEMWKQFSCVARPVFDVDLRSVELAGVSLREELSVKHNINGGFMVKRIADDSALEHLGVRQGDVIFFEDECGTNLPEIEDYLLSLGWRYLQGMKSMVLKLLVHDIEGPCKETITLPLEFSVDSGKVARWRMA

SEQ ID NO: 31228 - protein, 596 aa, Oryza sativa
MEMSGAGAGGVPTKLEHDDAAAVAAEREPCGGGAPRREEKERWRRVLVVGCLVALLLFAFFVLGRESASEVLQIASSKLSAMNGGFTTKNPSHGGGAAKHADELLGGLLAPGMDRRSCRSRYQAAHYYKHFPYAPSPHLLDKLRAYEARHRRCAPGTPLYNRSVEQLRSGRSAGGVECNYVVWLPFDGLGNRMLSMVSGFLYALLTDRVLLVDLPHDSSDLFCEPFPGATWLLPPDFPVANLFGLGPRPEQSYTTLLNKKKITAVVNNDDDPASKNATAALPPPPAYVYLSLGYQMADKLFFCGDDQRALAKVNWLLLYSDLYFVPSLYSVAEFNGELRRLFPAKESACHLLARYLLHPTNAVWGMVTRYYNSYLAQASRRIGVQIRMFNFASIPVDDLYNQILTCSRQEHVLPETTTDNDNDDDLATAYDSNSSNGSGGGNYSAILIASLYPDYYERIRATYYEHATRGRVRVGVFQPTHEERQATQRLFHNQKALAEILLLGFSDELVTSGMSTFGYVGSSLAGVRPTILMPAHGHRVPAPPCRRAVSMEPCNLTPPRVGEAECREMAAVVDKEDVARHVKVCEDFDRGVKFFD

SEQ ID NO: 31229 - protein, 331 aa, Oryza sativa
MAAAADNEVAVITHRTVDANGLRMHVAEAGPPGAPPVLLLHGFPQVWYAWRHQMRALADAGYRAVAPDLRGYGDSDAPAAELQYTAMHVVGDLVALLDAVVGAGKPVFVVAHDWGALTAWNLCLFRPDRVRALVSLSVAFTPRSPARRPVDGLRALYGDDYYICRIQEPGAIEAEFARLGTELVLRKFLAYRTPGPLMMPKSGWGSPDDEVPLPSWITEEDIKYYASKFDKTNFTGGLNYYRALNKTWELTAPWTGAEIKVPVKFIVGDLDLTYHTPGIQDFIHKGGFKKYVPLLDDVVVMKGVGHFISEEKPKEVSEHVISFIRKLSAEM

SEQ ID NO: 31230 - protein, 353 aa, Oryza sativa
MAAPQIPEKQWAQVFEKTAGPIEYKQIPVQKPGPDEVLVNVKFSGVCHTDLHAWQGDWPLDTKLPLVGGHEGAGVVVARGDLVKDVKIGEKVGIKWLNGSCLSCSYCQNADESLCAEALLSGYTVDGSFQQYAIAKAIHVARIPEECDLESISPILCAGITVYKGLKESGVKAGQSIAIVGAGGGLGSIAVQYCKAMGIHAIAIDGGEEKGKLTKELGATAYVDFTTTKNLVADVKATTSDGLGPHAALLVATNEKPFQQATQYIRSRGTVVCIGLPANAQFSAPVFDTVVRMISIKGSYVGNRADTAEAIDFFRRGLIKVPFKTVGLSELNEVYKLMKAGQIVGRYVVDTSR

SEQ ID NO: 31231 - protein, 674 aa, Oryza sativa
MLVLLLLLAAAAAVSSPAPVAGDGGGALPVLNPISSFCNTTAARRTYLPNSTFEANLNGLFAVLSRNASASGYAAGAFGAAPDTAYGLLLCRGDFTGNDCSAARLASSFQQAASSCLYSKDVAVYYDQYQLRYSDQDFLAGAGAGAANEPETAAFNMNNVSDAGDVAAFDALVAELVNAVADRASNATRRYAAGKAGFAPEAMTVYAIAQCTPDLSPPQCRGCLAGIIDQMPKWFSGRVGGRILGVRCDFRYEKDPFFKIPNDMVVLSPLPDPSSQGSSSSGGLWIVAIVVPVAVLLLGFLGCFLWIRRRRRRGTVSVPTMSMEMEQVLKLWRIEESGSEFSLYDFDQIADATDNFSDACKLGQGGFGPVYKGQLPDGLEIAIKRLSSCSVQGLMEFKTEIQLIAKLQHTNLVRLLGCCVQADEKMLIYEYMHNKSLDCFIFDTEKGAMLNWDKRFRIIDGIAQGLLYLHKHSRLRVIHRDLKASNILLDREMNPKISDFGMARIFCSNVTEANTTRVVGTHGYIAPEYASEGLFSIKSDVFSFGVLLLEIISGKRTAGFYQYGKFFNLTGYAYQLWQEGQWHELVDQALGEDFPAMEVMKCVQVALLCVQDSADDRPNMSDVIAMLGSEGVTMPEPRQPAYFNVRISSLAVSSSSFGESYCMSNVTLMEEDGR

SEQ ID NO: 31232 - protein, 109 aa, Oryza sativa
MQAVRTLVLRHLRLACRRAPPSAAACGGARPAVYRVVGVAPGHRGMAASAGQEGGPPRDFSEGAVRARVVELVKKFDRIDADKCVLIDLKWCKMKWEEEGRGVHPDEGN

SEQ ID NO: 31233 - protein, 343 aa, Oryza sativa; identical to SEQ ID NO: 28570

SEQ ID NO: 31234 - protein, 4 aa, Oryza sativa
MKIL

SEQ ID NO: 31235 - protein, 8 aa, Oryza sativa
MATSYCIL

SEQ ID NO: 31236 - protein, 403 aa, Oryza sativa
MFGTPASSPLFGTPSTTPAFGAPSSTPAFGTPSTNPAFGTPSSTPAFGAPSSTPSFGTPSTAPAFGTPSSTPAFGAPSSTPAFGAPFSTPAFGVAPSPSPSPFGFQQQMTPSPSPFGFAGGGGGQITTQMAPVAPLPLSPSDRDIQAIVDAYKEDPGNPRYAFRHLLFSVTEPSQRVKPVAASDIMWAEAMGKLEGMDSSDRERLWPQLVQGFKDLSYRLKLQDGVLVSDSDRLSMTRDNVKKLQRHFQADTYPWIQRLKQQELVIERRLLRIMRIVEALENRGYRIPLTKEEADLYERLAVIAKQLKGPTGDLHRRVYNLLSTSRLLASAGGTAGPIYIPSSAKVDEQSVAELLEALQQQTEAVAKLGNVMKRDTRDLEIILSEDTDMAEDSVGRRALKMYN

SEQ ID NO: 31237 - protein, 307 aa, Oryza sativa
MAIGNLEDIFPAASREYAPMVEELWKDPAIQATYNRRSELPFLPSAASYFLDKAVDISRTEYELSDMDILYADGITSSDGLASTDFSFPQLALDGRGFDEPDPQDTLLRYQLIRINNKGLHENCKWLQMFDDVRLVIFCVAVSDYDEYYEDANGNVVNKMMETRQLFESIALHPIFEQMDFLLLLTKFDILEQKIGKSPLTSCDWFSDFTPLVSRNLINGTSKSSRGSSTGSTLAQMAGHYIAVKFKSVFQSFTERKLYVSYVNALDQESVRSAIRYGREIIKWEDEKPVFGSSETTYSEEPSSYSH

SEQ ID NO: 31238 - protein, 344 aa, Oryza sativa
MADEYGRGGYGRSGAGAGDDYESGGYNRSSSGGADEYGRRPGGGAGGYNKPGGTDDYDSGYNKSAGGDDDDYGRTGGGGYNKSGTDDDYDSGYNNRSGANEKYGRNKSGDDEYSGGGGAEADEEYVDGLSSRDDPEKYRKGEKEHKNKERLGEVGALAAGAFAMTTSPLPSYAFFPHRRAAAAAAMSIPGNGHLPASTDLPDHSSSASDPEADYRPISAAATDSDTDTDPDPAPHHRLGSIGNGVSELDLDSGGDDDHCEGADGEDTVAEEEEGLGLGEEAARAFSEDERRRRAPLPAGAAARIVDAMRGVEFPGAPPPWAGSVPEDQWLDRLRSLRAGAGHPH

SEQ ID NO: 31239 - protein, 467 aa, Oryza sativa
MKNPNPPHPKHSSSSAAAAAMAPRKSRWGPPPPAGEKGAGAASTSARTPTPTPSTAGDPRRHPPPPGPGARNPAASSAAAFRPPPQPQQQPRVETPPPPSYGFHNLDRRTMLLADGSVRTYFALPPDYPFELTPLPQLPHLPRGAGHEVWPPHHPPPPPQQQQLQLAQHDAKRKHLAEHDEGFHSRHPKQPRFEAAPPQQQQLPPHAAVDRHALRRAFLKYAKMLNESAAQRRSYLEGGRVPCLACGRSSKDFADVHGLVMHAYNPPNVDSFIDHLGLHKALCVLMGWDYTKVPENSKAYQSLLPDLVQASREDLIIWPPTVIIHNTATGRKKDGRAEGLGNKEMDKKISELGFAGGKSKSLYGKEGHLGLTLIKFANSPAGLKEAERLADFLERQDHGRIGWLHARANQSVGSDNSPLLVETDNRTGEKRRILYGYLAISSDMDELDSDSRKRASLKSKREFDPSD

SEQ ID NO: 31240 - protein, 328 aa, Oryza sativa
MESPVGQFLSQILATHPHLLPAAAEQQLEQLQTDRDAAKDNGGDKPAPSDGDIVLYRRIAEVKEKERKRALEEILYALVVQKFVEAGVSLVPALSHSISSSGRVDQWAESVEGKLEKMHSQEAYEMIENHLALILGQRQADATVAAISKLRVGQVYAASVMYGYFLKRVDQRFQLEKSMKTLPWGSEEEDKLNQVMTTDSRPSPQTSTSHPEMASWTSPNFSAGGPSQSVKPCRLRSYVMSFDSETLQSYATIRSKEAFGIIEKHTEALFGKPEIVITPEGTVDSSKDEHVRISFAGLRRLILEAVTFGSFLWDVESFVDTRYHFVAN

SEQ ID NO: 31241 - protein, 390 aa, Oryza sativa
MPSYAHHHSSLDGKMDALKSSCRSEEAADEGAAAAPSAWGMVERDGFSVEDLLDLEEFCEAEKDAAEENEQALALVAAPEEEKSKDDSQPSSVVTYELVAPPPPPPEIVDLPAHDVEELEWVSRIMDDSLSELPPPPQPPASVVASLAARPPQPRQLQRRPQDGAYRALPPASYPVRTPTICALSTEALVPVKAKRSKRSRATAWSLSGAPPFSDSTSSSSTTTTSSCSSSASFSSFSPLLKFEWHPLGGTSDLPDDHLLPPGKKSKHGKNGKNKPKKRGRKPKQLPPHPSGAAASAPAPGDRRCSHCGVQKTPQWRAGPEGAKTLCNACGVRYKSGRLLPEYRPACSPTFVSAIHSNSHRKVLEMRRKKEVGSGLLTAAAAAAPAVASF

SEQ ID NO: 31242 - protein, 353 aa, Oryza sativa
MRHISSLLQGLARSLSVGKERKGGDGDDGKAAAATATAVLRTSGTLWGEGSETFAAVCSRRGEKGINQDCSIVCEGFGCEEGSVLCGIFDGHGQWGHYVAKVVRESLPPALLRRWREAVTLAALIDGGEKRLCECRPDLWRQSYLAACAAVDAELRASRRLDAVHSGCTALSLVKHGDLLVVANVGDSRAVLATASPDDGGGARLAAVQLTVDFKPNLPQERERIMECNGRVQCLADEPGVHRVWRPDREGPGLAMSRAFGDYCVKDYGVISAPEVTHRRITAQDHFVILATDGVWDVVSNEEAVQIVASAPEREKAAKRLVEFAVRAWRRKRRGIAVDDCSAICLFFHSPPS

SEQ ID NO: 31243 - protein, 53 aa, Oryza sativa
MKKFVCSYCVDNPAYYGTAVYAIFAVNLLLFGVSSCNITYLGALGLQLSDYVL

SEQ ID NO: 31244 - protein, 417 aa, Oryza sativa
MFGRAPKKSDNTRYYEVLGVPKDASQDDLKKAYRKAAIKNHPDKGGDPEKFKELAQAYEVLSDPEKREIYDQYGEDALKEGMGPGGGMHDPFDIFSSFFGGGFGGGSSRGRRQRRGEDVVHPLKVSLEELYNGTSKKLSLSRNVLCSKCNGKGSKSGASMKCSGCQGSGMKVQIRQLGPGMIQQMQHPCNECKGTGETISDKDRCPGCKGEKVAQEKKVLEVVVEKGMQNGQKITFPGEADEAPDTVTGDIIFVLQQKEHPKFKRKGDDLFYEHTLNLTEALCGFQFVLTHLDNRQLLIKSKPGEVVKPDSFKAVNDEGMPMYQRPFMKGKLYIHFSVEFPDSLNPDQCKALETVLPPRPVSQYTDMELDECEETMPYDVNIEEEMRRRQQQQQQEAYDEDEDMHGGGAQRVQCAQQ

SEQ ID NO: 31245 - protein, 387 aa, Oryza sativa
MLPAVKLSPGPVAFAGTNLRSRSASVSSVSSLKPSKFVVSSLRPLYLAPLDGPRAAGQKAQRQPLEFRCAASAADDKESKTEVVPVRSEAAQKLKISIYFATWWALNVIFNIYNKKVLNAFPYPWLTSTLSLACGSAMMLVSWATRLVEAPKTDLDFWKVLFPVAVAHTIGHVAATVSMSKVAVSFTHIIKSAEPAFSVLVSRFLLGETFPVPVYLSLLPIIGGCALAAVTELNFNMVGFMGAMISNLAFVFRNIFSKRGMKGKSVSGMNYYACLSIMSLVILTPFAIAMEGPQMWAAGWQKALAEVGPNVVWWVAAQSVFYHLYNQVSYMSLDEISPLTFSIGNTMKRISVIVSSIIIFHTPVRPVNALGAAIAILGTFLYSQAKQ

SEQ ID NO: 31246 - protein, 234 aa, Oryza sativa; identical to SEQ ID NO: 30426

SEQ ID NO: 31247 - protein, 578 aa, Oryza sativa
MGARCLALLLLYGTLLLLLLLPQLPLAGAATRYYTFNVKLQNVTRLCNTRAIPTVNGKFPGPKIVTREGDRVVVKVVNNIKDNITIHWHGVRQMRTGWSDGPAYVTQCPIQTGQSYVYNFTINGQRGTLFWHAHVSWLRSTLYGPIIILPKAGLPLPFTEPHKDVPIIFGEWFNADPEAIVAQALQTGGGPNVSDAYTINGLPGPLYNCSSKDTFRLKVQPGKMYLLRLINAALNDELFFSVANHTLTVVDVDASYVKPFDTDVVLITPGQTTNVLLRAKPTAEAAGATHLMMARPYATGRPGTYDNTTVAAVLEYAPPGHIKSLPLLRPSLPALNDTAFAAGFAAKLRSLACPDYPSNVPRRVDKPFFFAVGLGTTPCPGSNNQTCQGPTNTTKFTASINNVSFDMPTTALLQAHYTGQSAGVYTADFPASPLEPFNYTGTPPNNTNVSNGTRVVVLPYNASVEVVLQDTSILGAESHPLHLHGFDFFVVGQGTGNYDPSKHPAEFNLVDPVQRNTVGVPAGGWVAIRFFADNPGVWFMHCHLEVHTTWGLKMAWVVNDGPLPEQKLMPPPSDLPMC

SEQ ID NO: 31248 - protein, 241 aa, Oryza sativa
MACPAQSMLSASTTSCCAFLRSSAAAKPQAAASAAASLARGGRLFLLSCNASSSSSSPSPSSPPPPAPAAEDCNEEECAPEKEVGSLSAEWLAEERTKVVGTFPPKKKGWTGYVEKDTAGQTNIYSVEPTVYVAESAISSGAAGAAADGSENTAAIAGGLALVFVAGVSSILIQVGKNQPPPQATVYSGPPLSYYVAKFQPSLAAVALQQQPAVDAPATEDASSPAPASPAAAAAEDQLSS

SEQ ID NO: 31249 - protein, 409 aa, Oryza sativa
MSHMEAFQNVVLLHKANSNSTLEDISSLSAASCCSLDQLLACVEGEAQKIFGDIQNLLADHRSEVAHFTQELRESFRISLDRTKDMSSFILGLFDKYVEETSKLQSHSNHTHEAQVKSLEDFQKAYEEQSKSEEQKLLADITSLVSKHVTRQRELVGGRLNSLGDAARGNKAFLDEHTSAMEVVTKDAKRKWEMFAGQAENDCKVGSNFSAAKHCRMETILQECACTVDTAAQQWKASHATVNDLCRKQIAEVEALVRSAIETNEQHEAEIASSRATAEEHASNSSKDLLQDVDNMLQEARNSSSRVVSTVEAHLGESQHLQESHSSHTAGINTHADNAFQSSYKDYEPTGETPVRSEPEVPSKDAIESLRAMPMESLMDEFRENHPYEPSKDRRPSLIPRSPLATINN

SEQ ID NO: 31250 - protein, 630 aa, Oryza sativa
MDSDAAPSVTPGAVAFVLENASPDAATGVPVPEIVLQVVDLKPIGTRFTFLASDGKDKIKTMLLTQLAPEVRSGNIQNLGVIRVLDYTCNTIGEKQEKVLIITKLEVVFKALDSEIKCEAEKQEEKPAILLSPKEESVVLSKPTNAPPLPPVVLKPKQEVKSASQIVNEQRGNAAPAARLAMTRRVHPLISLNPYQGNWIIKVRVTSKGNLRTYKNARGEGCVFNVELTDVDGTQIQATMFNEAAKKFYPMFELGKVYYISKGSLRVANKQFKTVHNDYEMTLNENAVVEEAEGETFIPQIQYNFVKIDQLGPYVGGRELVDVIGVVQSVSPTLSVRRKIDNETIPKRDIVVADDSSKTVTISLWNDLATTTGQELLDMVDSAPIIAIKSLKVSDFQGLSLSTVGRSTIVVNPDLPEAEQLRAWYDSEGKGTSMASIGSDMGASRVGGARSMYSDGVFLSHITSDPNLGQDKPVFFSLNAYISLIKPDQTMWYRACKTCNKKVTEAIGSGYWCEGCQKNDAECSLRYIMVIKVSDPTGEAWLSLFNDQAERIVGCSADELDRIRKEEGDDSYLLKLKEATWVPHLFRVSVTQNEYMNEKRQRITVRSEAPVDHAAEAKYMLEEIAKLTGC

SEQ ID NO: 31251 - protein, 62 aa, Oryza sativa
MGKVHGSLARAGKVRGQTPKVAKQDKKKKPRGRAHKRMQYNRRFVTAAVGFGKKRGPNSSEK

SEQ ID NO: 31252 - protein, 347 aa, Oryza sativa; identical to SEQ ID NO: 28992

SEQ ID NO: 31253 - protein, 513 aa, Oryza sativa
MIHIVDHVDLDAWSVPEVLRPLYESPKILAQKMTIAALRHIRQIAHESSGEMPYGGGRQPAVLRTFSQRLSRGFNDAVNGFPDDGWSLMSSDGAEDVTIAFNSSPNKLVGSHVNSSQLFSAIGGGILCAKASMLLQNVPPALLVRFLREHRSEWADPGVDAYSAAALRASPYAVPGLRAGGFMGSQVILPLAHTLEHEEFLEVIRLEGHSLCHDEVVLSRDMYLLQLCSGVDENAAGACAQLVFAPIDESFADDAPLLPSGFRVIPLDGKTDAPSATRTLDLASTLEVGSGGTTRASSDTSSTCNTRSVLTIAFQFSYENHLRESVAAMARQYVRTVVASVQRVAMAIAPSRLGGQIETKNPPGSPEAHTLARWIGRSYRFHTGADLLRTDSQSTDSSLKAMWQHSDSIMCCSLKAAPVFTFANQAGLDMLETTLIALQDISLEKILDDDGRKALCTEFPKIMQQGFAYLPGGVCVSSMGRPVSYEQAVAWKVLSDDDTPHCLAFMFVNWSFV

SEQ ID NO: 31254 - protein, 492 aa, Oryza sativa
MRLQLCFLCFGLLLVSSSLQCHGLLLPLTNTLSSLRPANDTATIHRLLRSSSLRSAARHRGRRHGTRRAPPPPRHRQLSLPLAPGSDYTLSLSVGPPSTASSVSLFLDTGSDLVWFPCAPFTCMLCEGKATPGGNHSSPLPPPIDSRRISCASPLCSAAHSSAPTSDLCAAARCPLDAIETDSCASHACPPLYYAYGDGSLVANLRRGRVGLAASMAVENFTFACAHTALAEPVGVAGFGRGPLSLPAQLAPSLSGRFSYCLVAHSFRADRLIRSSPLILGRSTDAAAIGASETDFVYTPLLHNPKHPYFYSVALEAVSVGGKRIQAQPELGDVDRDGNGGMVVDSGTTFTMLPSDTFARVADEFARAMAAARFTRAEGAEAQTGLAPCYHYSPSDRAVPPVALHFRGNATVALPRRNYFMGFKSEEGRSVGCLMLMNVGGNNDDGEDGGGPAGTLGNFQQQGFEVVYDVDAGRVGFARRRCTDLWDTLSRR

SEQ ID NO: 31255 - protein, 25 aa, Oryza sativa
MCSGERVVDWISSRKYRMAIYPANL

SEQ ID NO: 31256 - protein, 406 aa, Oryza sativa
MSFRSVIQEVKGEIGAISRRGFRSRPGRVRRVAAAAEEPPDESSAAALVMRESCWTQLPPELLREVLARVEESEGWWPRRRDVVACAGVCRSWRGIVREIVRTPEASGNLTFPISLKQPGPRDAPMKCFIVRNRTTQTYYLYIGLTDALTDDGKFLLAARKCRRTTCTEYLISLDMNDISKRTDSYVGKLRSNFLGTKFTIYDAHPPYAGDVISKGQSARVIGSNHLSPRIPAGNYPVSHISYELNVLGSRGPRRMHCAMDSIPVSAIEQGGTAPTQTEFPLSYHESFTSIPFFKSKSVRANNSTASLLTQNGSKLVLKNKSPRWHEHLQCWCLNFHGRVTVASVKNFQLVASDESNPTNQEHDDVILQFGKVGKDMFTMDYRYPISAFQAFAICLSSFDTKIACE

SEQ ID NO: 31257 - protein, 337 aa, Oryza sativa
MIKSIAKACQIQQKMPSSYACDFEPSFDLEKPETEESLALKRCVVSSRDSALTRSRSCRASFMVIPNSWFDDSASTTPSSETFRYSTRRPEKVRKSLSPDEIADKSTGNAEEDKSTCNAEEETAVNDIGCVTEVKQKTEMNHAPQSSEQHQPKIAKEVATVSLSKWHIDFERKQQEIIELWHDCNVSIVHRTYFFLLFKGDQTDSIYMEVEHRRLSFIKNSLIADGELHATTASSLRNLRHERDMLYRQMVRKLHLAEKERLYGKWGIDMSTKQRRLQLSRRIWTQTGMDHVRESAALVAKLVEHLEKGQAIREMFGLSFSFKPRRSFSWVGVYSRD

SEQ ID NO: 31258 - protein, 331 aa, Oryza sativa
MEGSAGAPLRTRVCIIGSGPSAHTAAIYAARAELKPVLFEGWLANDIAAGGQLTTTTDVENFPGFPEGILGGELMDRCRAQSLRFGTSIISETVTAVDFSACPFRVASDSTTVLADAVVVATGAVARRLHFAGSDAYWNRGISACAVCDGAAPIFRNKPIAVIGGGDSAMEESNFLTKYGSHVYIIHRRNTFRASKIMQARALPNPKIQVFWDSEVVEAYGGEGGGPLAGVKVKNLVTGKISDLQVSGLFFAIGHEPATKFLGGQLELDADGYVATKPGSTHTSVKGVFAAGDVQDKKYRQAITAAGSGCMAALDAEHYLQEVGAQEGKAD

SEQ ID NO: 31259 - protein, 292 aa, Oryza sativa
MGPNDIEILGAIPSLCFLKLKTMCGINGRIIICSNKGFRSLTYFSLRIKRCGTLLEFEPESMPKLDNFQVEFRLHGMDCLNGASDFGIQHLSALTKVKIGIWGNICSDGIYDPEQDMNNSITRSVVSLIKAAIEKLPNHPTSRFHLEYDHGSCLLGETSQEFEGQGPDEAYPRQHKIFSLRELEDATNCFSDSNVLQRGRFDGSMYKGRLGDGSLVAVKKDYISRALSMGYPNIDWRTWHFQTQVEMPVHRNLMRLHGFCITPTKRFLVYPYMSNGTVASRLRVTLPFFFLV

SEQ ID NO: 31260 - protein, 390 aa, Oryza sativa
MQSLLSSSVLANPCTTGSPLFPPTAAKLAAAASVPVAAAARSGAIAAVSRRSASGGRCVVAAASSSSPAVTTAEAGEVPATMKAWAYDDYGDGSVLKLNDAAAVPDIADDQVLVRVAAAALNPVDAKRRAGKFKATDSPLPTVPGYDVAGVVVKAGRKVKGLKEGDEVYGNISEKALEGPKQSGSLAEYTAVEEKLLALKPKSLGFAQAAGLPLAIETAHEGLERAGFSAGKSILILGGAGGVGSLAIQLAKHVYGASKVAATASTPKLELLKSLGADVAIDYTKENFEDLPDKYDVVLDAVGQGEKAVKVVKEGGSVVVLTGAVVPPGFRFVVTSDGSVLEKLNPYLESGKVKPLVDPKGPFAFSQVVEAFSYLETGRATGKVVISPIP

SEQ ID NO: 31261 - protein, 68 aa, Oryza sativa
MFSNFGNNTCLDWPLPSPFKCSERGITDRRIFLDSIFGRPYNNCCSAKWCWHFLALAFCGWPSSIRLA

SEQ ID NO: 31262 - protein, 20 aa, Oryza sativa
MKSFQMIGAHFVNFMIASQA

SEQ ID NO: 31263 - protein, 39 aa, Oryza sativa
MCHCLNLSSILHGLYDNLLARGGGTSTCKVNKKFAAAVL

SEQ ID NO: 31264 - protein, 15 aa, Oryza sativa
MCAVCCPNNCHVHGK

SEQ ID NO: 31265 - protein, 312 aa, Oryza sativa
MDHSSMNGQEETDEYTFESAEGLDVNERIDKIADFLSFGMGFSAKTNAWAGPEHWKYRKAKDLDPVPTKPDDSDAPKKTKKKRGKDEPDIDFSKALEHDMPNIFAPPKNSKSLLLPANRATSNNKLPEDCHYRPESLVKLFLLPDVLCLARRRKKPLGGSRENTDDFIPSEPWDGDDFCNDHVDEGNGDTDVEDAVDLITKPRQVNKIDIQYDKVSKQVDVHALKEVLWNHINTSADTDDLQEDKDTESPLCLSKVLQDLPSCNPDAAATEISPHLYFICLLHLANEHSLTLRDRPTLDEIDIYIPASSLVK

SEQ ID NO: 31266 - protein, 435 aa, Oryza sativa
MLRKLREKGIVQPTPIQVQGLPVVLSGRDMIGIAFTGSGKTLVFVLPLIMVALQEEMMMPIVPGEGPFGMIICPSRELAKQTYDVIEQFLVPLKEAGYPEIRPLLCIGGVDMRAQLDVVKKGVHIVVATPGRLKDLLAKKKMNLDNCRYLTLDEADRLVDLGFEDDIREVFDHFKAQRQTLLFSATMPKKIQNFAKSALVKPVIVNVGRAGAANLDVIQEVEYVKEDARIIYLLECLQKTPPPVLVFCENKADVDYIHEYLLLKGVEAVAIHGGKDQEERENAIEFFKNGKKDVLVATDVASKGLDFPDIQHVINYDMPAEIENYVHRIGRTGRCGKTGIATTFINKNQTETTLLDLKHLLKEAKQRIPPVLAELNDPLEDEETMAKESGVKGCAYCGGLGHRVTDCPKLEHQKSMAIAGSRRDYYGGGGYRGEI

SEQ ID NO: 31267 - protein, 278 aa, Oryza sativa
MPPPPHRGGGGGRDTSAFFAATLVLWAVSVGFEIGARGRRELAPVAAGFAFFQAASAAVRAAVSRDPLFVNTAVSLLHSSLTSASVIFVLVNRWHNKDLKNMFEHEELFGGSWVGAYSALCFSCGYFAYDQLDMLRYRLYSGRIPGILMHHLILLICFTLALYRNVTINYLILTLVCELHSVFLHIRKLRRMAGFRDYNRKIVKLEWVLNWTTFVSARVACHILITYKLIIDAHKFDSGIELPLALFGMAGMNLLNIFLGLDLLKAYTLERNQQTHQD

SEQ ID NO: 31268 - protein, 345 aa, Oryza sativa
MGSPAPHAQGGGGGQEENKTIWVGDLHYWMDENYLHSCFGYTGEVVAIKVIRNKQTGQSEGYGFVEFYSHAAAEKVLEGFAGHIMPNTDQPFRINWASFSMGDRRSDIASDHSIFVGDLASDVNDTTLLETFSKRYSSVKGAKVVIDANTGRSKGYGFVRFGDDNEKTHAMTEMNGVYCSTRPMRIGPATPRKTSGTSGPTGSAARSDGDLTNTTVFVGGLDPNVSEDDLRQTFSQYGEISSVKIPVGKQCGFVQFVQRKNAEDALQGLNGSTIGKQTVRLSWGRNPANKQLRSDNGSQWNNGMYYAASPFYSGYGYPAPFPADPGMYAAAYGAYPFYGNQQQVS

SEQ ID NO: 31269 - protein, 512 aa, Oryza sativa
MSSEVTSVPPTPTPPPVSTPPSQIQSPAAPASSRASPLRGMGTPNIASPVRKAVASVSGYLGEVGQMTRLADPRDAWLPITESRSGNAYYAAFHSLSSGIGFQALVLPVAFSLLGWTWAIICLTVAFAWQLYTLWLLVKLHEPVAGGTRYSRYMYLATTVFGEKWGKILALLPVMYLSAGTCTALVIVGGGSMKLLFNIACGEVCLARPLTTVEWYLVFVCVAALLSQLPNLNSIAGVSLVGATAAVAYCTMIWVVSVAKGRVAGVSYDPVRTTDEEDGAIGILNGLGIIAFAFRGHNLVLEIQATMPSTLKHPSHVPMWKGVKAAYVIIALCLYPVAVGGFWAYGDQIPPNGILSALYKFHSQDVSRVVLGTATLLVIVNCLTTYQIYAMPVFDNMETGYVHKKNRPCPWWMRAGFRALFGAINLLIAVALPFLSELAGLLGGISLPVTLAYPCFMWVAIMRPAKGTAMWYTNWGLGSLGMGLSFVLIVGNLWGLVEKGLHVKFFKPADFQ

SEQ ID NO: 31270 - protein, 387 aa, Oryza sativa
MSSCFNGGAGWPEPVVRVQAVSDSCGATIPERYVKAPSERPSSLDGGGGLNNIPVVDMSMPDGEETARAVAAACREWGFFQAVNHGVRPELLRRARAAWRGFFARPAEAREAYANSPATYEGYGSRLGTAKGGPLDWGDYYFLHLLPAALKSHDKWPTSSVPAGGGGLREATEEYAEEVVRLCRRVMRLLSRGLGLDDGRLQAAFGGVGGEGACLRVNFYPRCPQPELTLGVASHSDPGGMTMLLVDDHVRGLQVKNAGHWITVDPVPDAFIVNIGDQIQVLSNAVYKSVEHRVTVSAAEERLSLAFFYNPRSDLPLAPMPELVAPPARPALYPPMTFDEYREHIRRCGLSGKAQLQSQQMATAICGAPPAATAFSSSSSSASSLAR

SEQ ID NO: 31271 - protein, 362 aa, Oryza sativa
MLRQTHDSYGFERSHRGSAEKLLSESRFSQREPMPLTADSSDLRQRLLKQRRLNNPRSGQVSDRHNVYPEDERHDRHRQRGEEQASNDGVSSSRLRGRIRLPAETTFDRLGLQPEKERDRGPRARLSPPSQTDLRGKLHDRLKAKPNEDVSGNVQSSLSKANEDAESLNFAGPKSLAELKAKKVAGSLMKSSRSLTGPVRMTSEIVTIKDSSDPVLFDGPKPLNAILKRKREADSGNATDFGSKREEHSGGDEEGSQNDFRNIEDDIVGMNTEGNGEEAFQPEDDVVYGDSLSPADDIAAEAADDASRELEEQQDVETAEEYDYEMDDVNAAEENDYQEYEDEDDDLEDDDDFARKVGVMIT

SEQ ID NO: 31272 - protein, 568 aa, Oryza sativa
MFNLRPQMKLNQPGVSYPMHESVDRFSTHMRPFGWPNPLDESCPPHLQVWNGGSGVFASVPYMYGRQEWDQNRQHSVSRGWETTGDALKGQNELHEREPSVTKKEPDCSATPVPETSTGQYNLNSRIEQKEMDQTLEKNGTKDDLKSSFRNTGGSGGAPLMTSMPSNSGTAIFSKSYLSKISVSRDLVESELYKRCISLLADFGIANTPEVVGTGLVQNNGSFGKINRKLGTPNLLGSHNLKNKSDIFQRALALHKNQTAKIVSPTHSILETDRKTYLPEDNHDDTEMTDHTVSKELLVDNSEPHHGADTMEKELPLRQELAGGIGVTSPASIEPGNVGAPPVIIEPDVGMEDVAPPKIVEPDEGMEDAAPPKIVEPDEGMEDAAPPKIVEPDQGMEEVASPTIKEPDEDIEVMPLGTAEPGKGMEEVAPGGISEPEKGPAAGLGDGVPEVTVELADSAQEKPPAMGELGDGMEVMPPPVTETSLGKEDSPAVPSSPEVQEIVSGMHAGIEKGMEGETDNLIDDNPGDGEVNASSLELDVASGADDCEALVESRVNLSRIPNSPESTH

SEQ ID NO: 31273 - protein, 205 aa, Oryza sativa
MATTIAAMAMLKPSKIVARSSPAPSGSGRVPSISLKSLAKKGMSVSSSSAAAAPVAAAAMAGAFFSALASTDAALAAQQIADVAAAAAGADDNRGLALLLPIAPAIAWVLYNILQPALNQLNRMRSEQVLVAGLGLGAAAGAGLAFPPEASAAQEVARLAAEAAAAEGGDNRGLLLLFVVAPAIAWVLYNILQPALNQLNRMRSD

SEQ ID NO: 31274 - protein, 360 aa, Oryza sativa
MARVHHKNGRGGGGGGGGGKGKGKGKWKMPASVARKQQAAMANVDQVTGDKIPKSFVFSRGKLPSTLRHLQQDLRKVMLPYTALNLKEKKRNNLKDFVNVSGPLGVTHFFILTNPKSSPHLRMAKTPQGPTYTFQIKEYALAADIANSQKRPRCPPEIFKNSPLTVLSGFGGLGEPFKSLVEYFRHMTPAIDPVTVKLSTCQRILLIHFDREKEMINFRHYSIKLQPVGVTRKIRKLMQNNQVPDLRDLNDVSDYVTKAGYGSESEVDDEAATVSLASDVDKLNRASRKSAIRLQEIGPRMKLHLVKVEAGLCSGDVLYPQPVGKEGLGKKGKEVEEETEGQEDEDLMESDDDPEDESEE

SEQ ID NO: 31275 - protein, 112 aa, Oryza sativa
MNHDIELEKTEHARLDEVEQDQMPPVQETLHNPEPESIDIEPPKENTADDNERYVGSSSPVHLEDQKGENAGRSSSSGSSSSDSGSSSSAYADTDTDSSSADGSDAAQSPRT

SEQ ID NO: 31276 - protein, 43 aa, Oryza sativa
MVFRNGGSHLLDAAAETVQKIRTTPKKSRVAKLQDESLQNKEL

SEQ ID NO: 31277 - protein, 501 aa, Oryza sativa
MLLPPLVVGSTMASLASLSLPVSTASQGRARGAGPVTAAPRRRRVSVVRAKVREIFMPALSSTMTEGRIVSWTAAEGDRVAKGDPVVVVESDKADMDVETFYDGIVAVVLVPAGESAPVGAPIALLAESEEEVAVAQARAQALPRGPGQEPPPPHVPKAAPPPPPPPPPHAPPGPPPTKGVATPHAKKLAKQHRVDISMVVGTGPHGRVTGADVEAAAGIKPKLKGPKGAPPPPPPPPPSPHRHPAAHPPPPPHHPAPRPPPPMAAAPRQPAALPPVPGATVVPFTTMQAAVSRNMMESLSVPTFRVGYAVCTDKLDALCEKVKSKGVTKTLLLVKAAAMALTQHPVVNASCRDGKSFSYNSSINIAVAVAIEGGLLTPVLEDVDKLDVYLLAQKWRGLLKKARMKQLQPDEYSSGTFTLSNLGMFGVDRFDAILPPGQGAIMAVGGSRPTLVANKDGFFSIKNEMLVNVTADHRIIYGADLAAFLQTFAKIIEDPESLTL

SEQ ID NO: 31278 - protein, 121 aa, Oryza sativa
MTITMASVMHTIRTNLIRRGRLKAPLVLKKNWRASSVAQLNSRTVSIVEKPPRMTTVAHVNTSVPRPLPALSMNAMMRTKRFRCFSGGAGAALHRRPVAAATAAGRAIFLQRFFCSLPRGG

SEQ ID NO: 31279 - protein, 468 aa, Oryza sativa
MTMEAERDGEEQRRPLLSSSSPPPPSPAAEHQHQHQQQYQYLGRSSSSALRGGGGGGGGGAGWGVGPEVSAAEVRSAASISSASYYPPPPALHHGVYPPDIHSPSPSPAAPTAPHPHGGLAIVPQGPYPYGGEYQPSHDGRRDVLDEVEIRQLLIDHVGHRCCWGSRPARTWKITSIEDCNVYVGTLETFIEERDTVTNKEPYDGGKIDGRDKGPVLAVWELDLRSEFPLLFVPEKEVMVKIPHSEVIEKCLDCESRGEIPCPICNAGQEHGFYKANQMTRCSACHGRGLLAHQDGSDTVCGMCSGKGMLPCIACGSRGLVTCKTCSGYGSLLAKSTAHVRWKTLSARKVSATRGAASVPDEVFHRAQGIQLCNIQAYQCTPAFFADSYQLNQFSSEVVASRLPVPPSARVISERHIISVVPVIRVTMAHRKQCFSFYVVGYNRDVFIRDYPSKFCWGLCCCFEWLRN

SEQ ID NO: 31280 - protein, 102 aa, Oryza sativa
MYAIGGSAEPTINSRGNRYLAPTNPFAKEVTKRVETAQTIWKGWNWRSEGDLLLNGAFFTPSGAGASASYSRASSLGAKSSSMVGTITSGAGALSCRGGSAC

SEQ ID NO: 31281 - protein, 301 aa, Oryza sativa
MPSLATAAAAGAGAPLRRGPCAPRRQSAHASSSSSSSLPSPALATSTRFAATAPILRLVQRRPRAPLTAARAASPDAATGARSPSSGGQMLVFVPPHPLIKHWVSVLRNEQTPCAIFKSAMAELGRLLIYEASRDWLPTITGEIQTPVAVSSVEFIDPREPVMVVPILRAGLAMAENASSVLPATKTYHLGLRRDEETLQPSIYLNNLPDKIPEGTRVLVVDPMLATGGTIVAAIDLLVERGVTSKQIKVVSAVAAPPALQKLSNKFPGLHVYTGTIDSEVDERGFIVPGLGDAGDRSFAT

SEQ ID NO: 31282 - protein, 442 aa, Oryza sativa
MKINVRGSTMVRPAEETPRVRLWNSSLDLVVPRFHTPSVYFFRRGEAAAAEGGSYFDGERMRRALAEALVPFYPMAGRLAHDEDGRVEIDCNGEGVLFVEADAPGATVDDFGDFAPTMDLKRLIPTVDYTDGISSFPILVLQVTHFKCGGVALGVGMQHHVADGFSGLHFINSWADLCRGVPIAVMPFIDRTLVRARDPPAPSHPHVEYQPAPAMLAPEPPQALTAKPAPPPTAVDIFKLSRSDLGRLRSQLPRGEGAPRYSTYAVLAAHVWRCASLARGLPAEQPTKLYCATDGRQRLQPSLPDGYFGNVIFTATPLAEAGRVTGSLADGAATIQSALDRMDSGYCRSALDYLELQPDLSALVRGAHTFRCPNLGLTSWVRLPIHDADFGWGRPVFMGPGGIAYEGLAFVLPSASGDGSLSVAISLQAEHMEKFRKMIFDF

SEQ ID NO: 31283 - protein, 331 aa, Oryza sativa
MAKKRKRSSDAAAAVEKPDEFAPQRPERTLFGFKEKPADDEEAEAEAASEGEEDAAAAAAAAPFRNKEKVLVTCSRRINYRYRHLMQNVVSLLPHAKKDSKVESKQSKGNALNELLELRNCSSCLFFECRKQKDLYLWMVKSPGGPSVKFLVNAVHTMEELKLTGNHLKGSRPLITFSTNFDEQPHWQLVKEMLTQIFATPKDHRKAKPFHDHVFVFSIVDDHVWFRNYQISVPHNEIDKVDKGGLDKMTLVEVGPRSCLNPIKIFGGSFGGPTLYENPFYVSPNQIRALEKRKKAGKYAKKVKAKVRRKMHEMENTLEPDEFAELWKGED

SEQ ID NO: 31284 - protein, 581 aa, Oryza sativa
MEIESRLLPCGLHVIGEPPSAIEAVATLVNIASLDRPEDEIYSLPNILAQTVGRNIEDVYRGSDKGILADVELLRQITEASRGAITTFVERTTNNKGQVVDVTNKLSTMLGFGLSEPWVQHLSKTKFIRADREKLRTLFTFLGECLKLIVADNELGSLKLALEGSYVEPGPGGDPIRNPKVLPTGKNIHALDPQAIPTTAALKSAKIIVDRLLERQKVDNGGKYPETIALVLWGTDNIKTYGESLAQVLWMIGVRPVADTFGRVNRVEPVSLEELGRPRIDVVINCSGVFRDLFINQMNLLDRAVKMVAELDEPEEMNYVRKHAQEQARELGVSLREAATRVFSNASGSYSSNVNLAVENASWTDEKQLQDMYLSRKSFAFDCDAPGAGMREQRKTFELALATADATFQNLDSSEISLTDVSHYFDSDPTKLVQGLRKDGRAPSSYIADTTTANAQVRTLSETVRLDARTKLLNPKWYEGMMKSGYEGVREIEKRLTNTVGWSATSGQVDNWVYEEANATFIEDEAMRKRLMDTNPNSFRKLVQTFLEASGRGYWETSEENLEKLRELYSEVEDKIEGIDR

SEQ ID NO: 31285 - protein, 385 aa, Oryza sativa
MSSPSSAHWLSLVGSIWLQTINGPNSDFPVYSSQLKELKSISQVQLNFLAFASDAGKLFGWFSGVAALYLPLWVVAFVGAAFGLVGYGIQYMFLDSSGLRYWHLFLLTALAGNGICWINTVSYLLCINNFASNSRVAVSLATSYLGLSAKVYTSLAETFPGLANSKTKTYLLLNAVVPLFVTVMVAPSLRVFDLKSAAASSDAAFLVMFAITLATGACAVVGSIGSTANGLSSKEHMISLGVLLATPILIPVGLKIRETLTKIRETQRENRIHDLGTDESESVESVVVIDVAADANAEVAKEEDAVVKKPQEEVGGLRLLKSPDFWLYFFSYMFSGTLGLVFLNNLGQIAESRGIGQTSTLVSLSSSFGFFGRLLPAFMDYYSAK

SEQ ID NO: 31286 - protein, 382 aa, Oryza sativa
MICASPTGGGAVMDPSPEFRDWANLPELPLSEVLRGLLPCLRSVYAFAAACQPWRRLLRDSAADLVRPRIPPLLLLCPTYRVVPFSQLVVAALLSSYPVPGDATLLSSSRGHLVLLRRRDPFHGLHLVDALTGATRHALPLPSPHFAYHYAALAPSRRLLLFHSKHAFFSLPVGDAGHNPRLDWTKHSLPRAASFVRSILEFRGRVLGLTDRAQLLEFHLDANPPNKSAQMLHAAGLPEVSTFDRWHFGPHLVAAGDRLLLVLFMMGPKLGHMFETLVSVKKVGVYALDMVKMRWEEVDNIGAYSLFVDCAGRSTAACVDVENCGVEANRIYIAAPGCRDWYAWRPGREVPLGGQGLGPLSIQAMNHLPWPSQIWIYPRLLF

SEQ ID NO: 31287 - protein, 533 aa, Oryza sativa
MAPPAMAFQALALGPLPLPLPAARRRRRVRVLAVAADHTPPPPPSPSSPPEPANSPSRLLRELAERKKAVSPKKKHPPRRFILKPPLDDERLTQRFLSSPQLSLKALPLLSSCLPSAPLSAADRTWMDEYLLEAEQALGYPLAPSETLGDGDDDGCPARHFDVLLYLAFQHLDTSCERTRTRHVRSGHSRLWFLGQYVLELAFCEFFLQRYPRESPGPMRERVFALIGKRAIPKWIKAASLHNLVFPYDDLDKMIRKDREPPAKAVFWALFGAIYLCFGMPEVYRVLFEAFGMDPEDESCQPKLRRQLEDVDYVSVEFEKRQLTWQDVAAYRPPPDALFAHPRLFRACVPPGMHRFRGNIWDFDNRPKVMNTLGYPLPMNDRIPEITEARNIELGLGLQLCFLHPSKHKFEHPRFCLERLEYVGQKIQDLVMAERLLMKHLDAPGRWLAEKHRRLLMNKYCGRYLRDKHLHHYIIYGESVQDRFEHNRRLRNPSTTAVQQAIHGLAYCVYGKPDVRRLMFEVFDFEQVQPKAV

SEQ ID NO: 31288 - protein, 110 aa, Oryza sativa
MAVRSPHRAFLVAMILVSFLLGAAAGIRSTTLSSSQSLAEDKSRLGSTPPSCHNRCNACNPCTPVQVAALPGVSRPASAADRVDVAGFAQYSNYKPLGWKCRCAGRLFDP

SEQ ID NO: 31289 - protein, 398 aa, Oryza sativa
MESMEPKDIDWSRVVSRYVRDETYEGIEAPHWADLTDPEAGVAAVDDEAWFCRPDYRHPKTVEDFLKMSPSPKGKLLRSVSAMMMPFGERDTNLRDGNNNLKRRGAVAGSGIAATFTPPKPKAAAKKRFQGDSENQDPALATPPPPPPAASRPPFGAARWAKNAKDAIKSSAEKRPGNAEKEALLSKNAAPRQLKSTLSARNLFSGKDILGQISDFYNELKRMAGGNGSRPGSEAMEELSSNPINEGDVAEKKVDCGCGTGDQVPSEEAIKEKSRQETAEKSPSTMKGKKMGLKVEAAKPTRSSVLKEVKATPPTPQRFPSPSTNRVKNVKAGGMSMASSPLKKPLKEKGTPSKDLENSKDAKRQPFGVKDMNNTKACDAEGSSSMFWFLKPCTFLVE

SEQ ID NO: 31290 - protein, 274 aa, Oryza sativa
MQAAAAPWRAVLRTTHLLVDPTRLAASSFHSTPVSSAKWKDKFDCRHEHGARKLSKNYERYVVRQKRAEGKKALKDYLLFGKSSPHLQGGSTGSFANSHDIPRFKTFRKGSQSHGSTKSRQGVHHHRKCKKDRERFYNFFREEYYVHPDKIFEDMFGENHRFTWSHISWESFSFRDSSSRFRRTGESKRERVCSDSDDENEDETTNIGSHAHRAILGLPACGPLTLDAVKTAFRASALRWHPDKHPGSSQAVAEEKFKLCVNAYNSICNVLKAA

SEQ ID NO: 31291 - protein, 160 aa, Oryza sativa
MAAAAAAAQWCGAAGLDRWVGRWRCTLSPAALPVPSRRTRRKGGVVGCVSVPREVAAAAAVEPAAPPEAEAETEVSYLACSLSSPALCRSSVWCNRAILTPTGRAHGSARQQWCPVVVLSRKSNRLPFVTVLTLTSLRRPIYHRRFRSLGARLDPGQGSP

SEQ ID NO: 31292 - protein, 28 aa, Oryza sativa
MLMIYQYIICYIFLFYSLVMYHLNGLCS

SEQ ID NO: 31293 - protein, 318 aa, Oryza sativa; identical to SEQ ID NO: 30310

SEQ ID NO: 31294 - protein, 394 aa, Oryza sativa
MPMVPSGVHPQQHRLQEQLSGNLARLDRHWSDANGQLQNTLMEPSRISQMQMEAQKQRRNVEMNLAVDNSHAWASLRNNERSTEQDLSDLFHQKLVQSQQSRGYPDVPVPASFGRKDPSSLFAQPAADNPLRSPADRLSFDDPLAERSLFAKAGQAGQEGAANLESLTSSIENSGKLGLRSSSGSMLDMQRGDFSGIMGGGASGNQLVGLANEVPRGKRQGSSASLVGDDTNFAEEAGSNWPEATMPKGGTHSLLKRPPSQHGSATQALSTDISSTIRLKKAGHASSDDHKLESGGVTSAAQPVDIPVSTNKEAGSFISPSGTSVDGPSFREMVKSTKKPALQQYDASESADGGPGGKGAKKKTKKGKQIDPSLLGFKVHSNRIMMGEIHRLDD

SEQ ID NO: 31295 - protein, 335 aa, Oryza sativa
MAEEAAQEQQTDPAASRPVRCIVKLGGAAITNKGELESIDAASLRSACAQLRQAMSHGGAAGKVVGMDWSRRPGDPTGPVVDVEGLSEMGGLGLDSNFVVVHGAGSFGHFQASRSGVHKGGLHSTLVKAGFVATRISVTSLNQEIVRALAREGIPSVGMSPFACGWSTKQRNLESVDASQIMLSLHVGFVPVLHGDAVLDELLDCTILSGDVIIRHLAQLLSPKYVVFLTDVHGVFDRPPSDPNAVLLREIAVDENGSWSIVKPALKGNKKGVEISVAAHDTTGGMETKILEAAAIARLGVDVYITKVGTEHSLRALKGDTSSEDWLGTVIRSSR

SEQ ID NO: 31296 - protein, 203 aa, Oryza sativa
MLPVTLGRVPPSHLVLKDSEVSGKHAQIDWNANKLKWEIVDMGSLNGTFLNSRSVNHPDVGSRRWGEPAELADGDIITLGSSSKVSVQIELQNQQPVGVGIASDPMTARRTGKKLHMEDVSCCQYPLIGVEKFGLFGIFDGHGGDGAAIAASRILPQNIANILSQQETKERVLSCHSASDVLRHAFALTEAALHHQAAQQLSF

SEQ ID NO: 31297 - protein, 380 aa, Oryza sativa
MGIKGLTKLLADNAPKAMKEQKFESYFGRRIAVDASMSIYQFLIVVGRTGMETLTNEAGEVTSHLQGMFNRTIRLLEAGIKPVYVFDGKPPDLKKQELAKRYSKREDATKELTEAVEEGDKDAIEKFSKRTVKVTKQHNEECKRLLRLMGVPVVEAPCEAEAECAALCINDMVYAVASEDMDSLTFGAPRFLRHLMDPSSKKIPVMEFEVAKVLKELELTMDQFIDLCILSGCDYCDSIKGIGGQTALKLIRQHGSIESILENINKDRYQIPEDWPYQEARRLFKEPNVTLDIPELKWNAPDEEGLVEFLVKENGFNQDRVTKAIEKIKFAKNKSSQGRLESFFKPVVSTSVPLKRKDTSEKPTKAVANKKTKGAGGKKK

SEQ ID NO: 31298 - protein, 26 aa, Oryza sativa
MSPRTRTTWQTSRLGMSLNRFKLSQA

SEQ ID NO: 31299 - protein, 367 aa, Oryza sativa
MVLIRLTMLIFIAILLAGRTCVLVVAGGGMPATFVFGDSLVDAGNNNYLVSLSKANYPPNGIDFDGHQPTGRYTNGRTIVDILGQEMSGGFVPPYLAPETAGDVLLKGVNYASGGGGILNQTGSIFGGRINLDAQIDNYANNRHELIKRHGELEAVTLLRGALFSVTMGSNDFINNYLTPIFGVPERAVTPPEVFVDALISKYREQLIRLYLLDARKIVVANVGPIGCIPYLRDTTPTVGTACAKFPNQLARNFNRKLRGLVDELSANLTGSRFLYADVYRVFSDIIANYKSHGFEVADSACCYVSGRFGGLLPCGPTSQYCADRSKYVFWDPYHPSDAANALIARRITDGEPADIFPINVRQLITS

SEQ ID NO: 31300 - protein, 15 aa, Oryza sativa
MIFVLLLFDTILLSN

SEQ ID NO: 31301 - protein, 19 aa, Oryza sativa
MPGAHLRKKLRQTWQLFSI

SEQ ID NO: 31302 - protein, 443 aa, Oryza sativa
MPSSPVPNSEVSPANCHSPPTRPSMNGVAGAKQTPRKPSPSAAVAQDDRSGAGKENQSCSNTPARNCRHSPLLQKASKSRLPTAAAPEKRRATAQTISTVPDRKRLADTVSNNSEKASQDDSSVPNRLSEELLRCLLAIFSQMGGSSASGQDEEQAALSPSVSGSCESSEDAYPQDPYGILEFGTRDVGSYKRFHVIDATSFDQTAMENDTMLTRKLKALIRRLPSVDLTGLSHQQKLAFWINIYNSCMMNAFLEQGIPTTPHMLVAMMPKATINVGGRTHSAMSIEHFILRLPYNVKHVNPGGVTKGAADDVTMRGVFGLEWPEPLVTFALSCGSWSSPAVRVYTARGVEEELEAAKRDYLQSAVVVSAPAKVAIPKLLHWYLLDFAKDVDSLMDWVCLQLPSELRQKAMRIVEDGRRGVAAESRRVQVLPYEFRFRYLLAS

SEQ ID NO: 31303 - protein, 12 aa, Oryza sativa
MLGASAQLLMVG

SEQ ID NO: 31304 - protein, 389 aa, Oryza sativa
MLSGCTVSSLAARFAFFPPEPATYAVRKDEACGGGGRLVASGVPRDAAVDVLLVDTRKGSKVVAFYLRNPAARLTVLYSHGNAADLGQLYDLFVQLKVNLKVNLMGYDYSGYGASTGKPSEENTYADIEAVYQCLETEYGISQEDLILYGQSVGSGPTLHLASRLPRLRGVVLHSAILSGLRVVCHVNFTFCFDIYKNVKKIKKVKSPVLVIHGTDDDVVNWSHGNELWKLAREPYDPLWIKGGGHCNLELYPDFIRHLSKFIREMENITTKTRLKKIRQSLQPAPKKVHHRASTGTTTTFTTNCCCRIRVRKPSCRCPGCNLSCGCCSGLMSCFSSRLFKCSTCFSSCSCRGCFKCPTCFSFSCSCCRSCLKCPTFKCCCCGSCRDEQ

SEQ ID NO: 31305 - protein, 218 aa, Oryza sativa
MARRSGLMLLLLAAAAVASAAVPPSCERIECPSYEVVDSANGFEIRRYSDAMWASTAPIEDISFVAATRTGFLQLFNYIQGKNAYNETIEMTAPVLTQVAPSDGPFCVSSFVVSFYVPAKNQPDPPPAEGLHVQRWAGARYAAVRRFGGFVADSDVGEQAALLDASLQGTRWAAAVSDGRRADPTSSYTVAQYNSPFEFSGRVNEIWMLFDAKDASDM

SEQ ID NO: 31306 - protein, 289 aa, Oryza sativa
MARVSHSRKRTRAPSNSNSKPTSQTQPPPPELTDRPVRVYADGIFDLFHFGHARALEQAKLLFPNTYLLVGCCNDELTNRYKGKTVMTQDERYESLRHCKWVDEVIPDAPWVLTQEFIDKHQIDYVAHDALPYADTSGAANDVYEFVKKIGKFKETKRTDGVSTSDLIMRILKDYNQYVMRNLARGYTRKDLGVSYVKEKQLQVNMKINKLRETVKAHQEKLQTVAKTAGINHEKWLANADRWVAGFLEKFEEHCHNMETAIKGRIQEKLRRQTSRGIIGGLMQQPVAA

SEQ ID NO: 31307 - protein, 23 aa, Oryza sativa
MVRNSMPLMILYLYSSYAIRLRP

SEQ ID NO: 31308 - protein, 353 aa, Oryza sativa
MSRPPSPMLSVPEKKTAATELFRDRHFFNSAFFTDLREARASLSAPSSQATTQDAASRRALLLRYHRLLASARDDPCDFDDDLAFTWHDAFRPHLRRTAASLRFEKAAVVFNVGAASSRIAAAVDRAAVGGVKAACGEFQRAAGAFRAAGEMMEGEEEDTEDTVDMGPEASAMLERLMLAQAQECCFERALAAGTSSAACSKVAKQAALYYEEAYASLVIPPLQNHFERSWVAHILLKAALFNAEASYHYAIELHEKTEIGEEIARLQFGINAIVDAKKAVRGAPGSLYDAASRLEQDMNQNLERALNENNRIYLLRVPAAKLLAPLPAASLVRSASLSEILDVKTETGNQSS

SEQ ID NO: 31309 - protein, 346 aa, Oryza sativa
MASAETPNPDAEIPNTDAAAAADPAAAAPAAAATDPAAAGSPSPPLPPRKRRLSPTPSPTRRSSRSRSRSPRRGRSRSRSRSRSRGRSASPRYPDGKRRRHNDLNVEVCRDFLRDRRARADIECKYAHPHPTVAVDRDSKVTACADSLRNNCFRGRTCRYYHPPPHIQESLLRSIGVEDPKVKMQVCRDFTRGRCSRSANECRFLHHSPLEDCAIVCQDFLRGRCDRKSCRYSHVMAHPMPPPMRDIPMQYPDMVYMPPPAPLGVPMMMPPPSAPAAFSGNNYGVEVCRDYLKNMCNRESCRFAHPDLNNEVMNTQVEVCRDFKRGECNRPACRFYHPPASSNSIG

SEQ ID NO: 31310 - protein, 490 aa, Oryza sativa
MQQRGDSLLIMGSPFGILSPVHFFNSISVGVVANCLPPGTARGSLLMADVHCLPGMEGAPVFDKNSCLVGMLMKPLRQRGSSTEVQLVITWDAICNAWNSDKLERIGHPPSELVDDKSSDCKYKESCVADKHRRFVPNSANNLNQYDVSPSLTEAISSVVLVTVSETSWASGIILNKNGLIMTNAHLLEPWRFGRTSPLGLQNKIASFSEHICGGENNLLQPQQCKVSNEDAVKHELSLFNFGLKKDRAISVRLDHGERKTWCNASVVFISKGPLDVALLQMEKTPIELCAIRPEFVCPTAGSSVYVVGHGLLGPRSGLSSSLSSGVVSKIVKIPSTQHSQLSSVVEVNNMDIPVMLQTTAAVHPGASGGVLLDSLGRMVGLITSNAKHGGGSTIPHLNFSIPCKSLEMVFKYSAKGDFKILEQLDKPNEVLSSVWALAPTSSPFFSTSPENGRGGKVLEFSKFLADKQEGLKSIKDIEAFLRDRIPSKI

SEQ ID NO: 31311 - protein, 19 aa, Oryza sativa
MVNMLLRGPFVIHGVGVYK

SEQ ID NO: 31312 - protein, 654 aa, Oryza sativa
MGALIAGAKYRGEFEDRLKAVLKEVTDSDGQTILFIDEIHTVVGAGATNGAMDAGNLLKPMLGRGELRCIGATTLDEYRKYTEKDPALERRFQQVYVDQPSVEDTISILRGLRERYELHHGVRISDSALVAAALLSDRYISGRFLPDKAIDLVDESAAKLKMEITSKPTALDEIDRAVIKLEMERLSLTNDTDKASRDRLSRIEAELSLLKEKQKDLTEQWEREKSVMTKIQSIKEEIDRVNVEIQQAEREYDLNRAAELKYGSLSALQRQLQTTEKELDEYQSSGKSMLREEVTQDDIAEIVSRWTGIPVSKLKQSDREKLLYLEEELHKRVVGQDPAVKAVSEAIQRSRAGLSDPNRPIASFMFMSPTGVGKTELAKALAAFMLNTEEAVVRIDMSEYMEKHSVSRLIGAPPGYVGYEEGGQLTEAVRRRPYSIILFDEIEKAHGDVFNVFLQILDDGRVTDSQGRKVSFTNSIIIMTSNVGSQFILNMDEEGGSTDSAYENIKKRVMDAARSVFRPEFMNRIDEYIVFKPLEREQINSIVKLQLARVQKRIADRKIKLEVSPGAVEFLGSLGYDPNYGARPVKRVIQQYVENELAKGILRGDFKDEDSILVDTQVTVPSNGQLPQQKLVFHKMSEESAPAAAEDEKFLPAV

SEQ ID NO: 31313 - protein, 319 aa, Oryza sativa
MSSHHRYAHLLDDPFFPFPPPSSSSCPFLSPPAASSTCPFFALDSPFAADPFHLHPFLPTPPTSSLLDPFLLHTLTDRVSQLELALAARAPHPRPTSRKCTYVTESTGRKVKWTTEDKPRAGERVLKWEAELDSPYDDGFDRKWKWEAKAKTASAAATKLKWATHLKGKGCLEPWSHSYTWEEDFSATDDDDDEEIEDQLHHKALQDHSKLKTKAKDDKKKKKKDNNTVVVNKEQKKCPFSVKIEEIPPEEDNTAGCVAIRKAFALGNGKAKKKELSPQDAALLIQLNYRAHLAHRSQVLRCLRDLAVAKAKLKEIRCA

SEQ ID NO: 31314 - protein, 214 aa, Oryza sativa
MARSLSLLLLLVACFLVAGATAARPAPSTSGAAAISSFVRSWCAGTKYPALCDATLAPYSAAVGASPAKLAWAALTVTLSAARNATSAVRSIAARSSSSHLPPVAAEAAGDCASELGDGVDALRRCVDAMARVAVGEESSSTAAAVRRKVRFEVDNVRTWASAALTDDNMCMEGFKGEAAGGGGAREAVRGHIMGLLHLTANALGILNAMAKQI

SEQ ID NO: 31315 - protein, 327 aa, Oryza sativa
MAAALLSLLILVPPIGLLAALAFLARPRAARIPLKGRHVLITGGSSGIGLAMATAAAREGARVSILARNAARLEEARGAIRAATGRDVGVHAADVRDADAVARALAEAGPVDVLVCNHGVFVPQELEKQEMEEVKWMVDINLMGTFHLVKAALPAMKERTKETRLPASIAIMSSQAGQVGVYGYTAYSASKFALRGLGEALQHEVIADNIHVSLIFPPDTETPGFAEENKRRPELTNIIAGSSGGMKADDVARKALDGIKSGKFIVPCNFEGAMLAVATAGLSPQSSPLTAFLEIIGAGVMRFAAICFQFNWFMTIENWYAKNKKHA

SEQ ID NO: 31316 - protein, 182 aa, Oryza sativa
MLVNEAKNVLKLCDFGNAMLAGMNEVTPYLVSRFYRAPEIILGLPYDHPLDMWSVGCCLYELYTGKVLFPGPSNNDMLRLHMELKGPFPKKMLRKGAFTMQHFDQDLNFHATEEDPVTKKAVTRMILNIKPKDIGSLISNFPGEDPKMLSNFKDLLEKIFVLDPEKRITISQALSHPFITGK

SEQ ID NO: 31317 - protein, 523 aa, Oryza sativa
MLPGSAAPAAGSGMFVPTQTVGTVLCCICGVAMQPNPANMCARCIRARVDITEGVPRHAAVVYCPDCTSYLQPPRSWLRAGPESPELMQILLRRLNRPLARLRVSLSAAEFVFSEPHSKRLRLKLRLRREVFNAVVLEQTHPVEFTVHDRLCDACARAQSNPDQWVAVVQLRQHVPHRRTFLYLEQLLLKHGQASLALRVAAAPGGLDFFFGSRSHAARLVDFLATVAPVQTQTAKQLVSHDTKSNVYNYKHTFSVEICPICREDLIALSPQVSRDLGGLGPIVLCIKVTNAIALLDPLTLRVHHLEEKKYRVYNFKAALTSKQLVEYIVLDIEHESPEITIDGSRYQLAYAQVARVSDFGKNDTMFTVRTHLGHLLNPGDLALGYDLYGANLNDDDMDTAMMRHSLPEVILVKKSFAKRPRTRRWKLKRLPMEEDAVNKAKGELEKRADEYEEFLRDLEHNSDIRFQIDLYKDEDYRSEMASTIGDDVPTVPIEELIEDLSLGDDEEEDEGGEGNQHAVMVG

SEQ ID NO: 31318 - protein, 52 aa, Oryza sativa
MGKVVCSSAVRKEWEQNSVDNPYGIRGRHGCKSNGSCKRLLDIRRTGRRRKY

SEQ ID NO: 31319 - protein, 426 aa, Oryza sativa
MATAKPASPSPPPSTAVVPAANTAAAADKPAVEQLLEVAEDEVVIDFKPNAKCRADLRLRSLHPSLPVAFKVQTSSPLKFLVSPPRGAVQPLSSASLRVVLRPQQHAPASFPRSRGDRFLVLSSLSAAHLDSSASSSAATGGTTAIRLRVFFGGPYLLRLAAEAGDAAAVRLILRRQPHLLPLLEPEAAVPDGAEQWAPLHAVAARGDTGEVRRLGPDSMGARDREGRTALHVAAAAGEAEAAAALVDMGADAAATDARGRTPLDVAREKGYQEVVDVLERWELVMTAARRGDLQSLESLLSKRAGVRGRDQYGLTALHLAAIKGHCDVIALLAGSGCMDIECEDVEGHRPLHLAVEGGSAEAVELLLDMGAEVHAATRRGATPLQMAVTMGYEAIALLLRGRGADEAAAPALCIASSSSSSISCA

SEQ ID NO: 31320 - protein, 269 aa, Oryza sativa
MNLNSLEGSGSVEWMQGSLVAQNQQPLAWYRAYFDTPSGDEPLALDMGSMGKGQIWINGQSIGRYWTAYAEGDCKGCHYTGSYRAPKCQAGCGQPTQRWYHVPRSWLQPTRNLLVVFEELGGDSSKIALAKRTVSGVCADVSEYHPNIKNWQIESYGEPEFHTAKVHLKCAPGQTISAIKFASFGTPLGTCGTFQQGECHSINSNSVLEKKCIGLQRCVVAISPSNFGGDPCPEVMKRVAVEAVCSTAAWGNFFAETNLEMAPNRWACA

SEQ ID NO: 31321 - protein, 212 aa, Oryza sativa
MDQPHEPAGSEPSENVQNIEEDNEYLNNKRGWLMAVATLFVGMAFQAAIQLPAWFPDDWPQAFSSHNMKHSGIIFRATVASAPSPISPQQHAATTLTEGQMRGIRWYIMFNTVTFTIALALLITLVAVGRSLASHSMRLMNAILFTVIISTSCTFVLAISSDWTVIRWMLPVLLVLGSYTLFISLVWPKIIEYRKEKKRQREAQSNTASPPP

SEQ ID NO: 31322 - protein, 278 aa, Oryza sativa
MAADGGALRRLFEKPLPVPENPTLLEALSACNHVHHRKKLVDTASFTEIFGELHFQEKPVDVAAAARFLPPPPPPVRAASWIDVADDKSKDGSSLDALLRPKSSAVKRSASFCLKSSESSLLLCTEGLGTESTVDADDMVKDGDGDGEAIRRGEEETDGVEEDDGAGREKRGTPTLAPTPPTFPPPIRSIGRGGKPCVCFRSFRAEGRFVLMEVVIPGKELLQATREGGRLTLRFANAAAVGGGGEADDDVNDDDVDGGETKNACAARDDMLANNCTC

SEQ ID NO: 31323 - protein, 445 aa, Oryza sativa
MEDLALPAAPPAPTLSFTLLAAAAAVAEAMEEALGAALPPLTAPVPAPGDDSACGSPCSVASDCSSVASADFEGFAELGTSLLAGPAVLFDDLTAASVAVAEAAEPRAVGATARSVFAMDCVPLWGLESICGRRPEMEDDYAVVPRFFDLPLWMVAGDAAVDGLDRASFRLPAHFFAVYDGHGGVQVANYCRKRIHAVLTEELRRAEDDACGSDLSGLEPKKLWEKAFVDCFSRVDAEVGGNAASGAPPVAPDTVGSTAVVAVVCSSHVIVANCGDSRAVLCRGKQPLPLSLDHKPNREDEYARIEALGGKVIQWNGYRVLGVLAMSRSIGDKYLKPYIIPVPEVTVVARAKDDDCLILASDGLWDVMSNEEVCDAARKRILLWHKKNAATASTSSAQISGDSSDPAAQAAADYLSKLALQKGSKDNITVVVIDLKAHRKFKSKA

SEQ ID NO: 31324 - protein, 246 aa, Oryza sativa
MSRGTGAGYDRHITIFSPEGRLYQVEYAFKAVKSAGVTSIGVRGKDSVCVVTQKKVPDKLLDHTSVTHLFPITKYIGLLATGLTADARSLVYQARNEAAEFRFKWGYEMPVDVLAKWIADKAQVYTQHAYMRPLGVVAMVLGYDEEKNAQLFKCDPAGHFFGHKATSASLKEQEAINFLEKKMKDDPQFSYEETVQIAISALQSVLQEDFKATEIEVGVVRKDDRVFRALTTEEIDQHLTAISERD

SEQ ID NO: 31325 - protein, 479 aa, Oryza sativa
MSSQSVVAVKQITAPDKIVETCPSTKHSAHKLFDVKPDFQGLIDDNLSSSSQSSSIKIELIRSSSLPNILPFQKRSSEPEPESPLSHVSHPNVSEPVYSNSSTFCTSLFSSSSMETEPCRQLGTLPFLPHPPKCEQQVSAGHSSSSSLLVPGGDGDIGNAHDEPEQSDDLKDFLNLSGGDASDGSFHGENNAMAFAEQMEFQFLSEQLGIAITDNEESPRLDDIYGTPPQLSSLPVSSCSNQSVQKAGSPVKVQLSSPRSSSGSATTNKARLRWTLELHERFVEAVNKLDGPEKATPKGVLKLMKVEGLTIYHVKSHLQKYRLAKYLPETKEDKKASSEDKKSQSGSSGNDSVKKKNLQVAEALRMQMEVQKQLHEQLEVQRQLQLRIEEHARYLQRILEEQHKVSISSNSLSLKPPAESQPESPKPTSEKKEAESEAGAATSAQPSSEDKSPDAECKSSPPVGSKRARVHVGDEHQCS

SEQ ID NO: 31326 - protein, 305 aa, Oryza sativa
MTMMGGQPQQTPPPPQVVQVQQAAAAFGDTTLTKVFVGGLAWETHKDTLREHFERFGDILEAVIISDKLTGRSKGYGFVTFKEADAAKKACEDATPVINGRRANCNLASLGAKPRAQPPHLLRPSPPATPGPHAPALPSPHHHQPAPAIAVGSRGVSPVPWYYHPSTTPPPPPPPAAHYAAHGGHHQQYHGVLPFYPAATTYGYSPNYVADLSYNAKLGQAAAAHGTNGAYLQGHFSYPAAAQGGMLAANGMIPVYPYYQYHYHGAQGLGVPAAHFFPPVRPQPSPPCPPSSPSPPSWPLPKWSR

SEQ ID NO: 31327 - protein, 277 aa, Oryza sativa
MLLRSSSTPFLHSFLPPSSAAAAPSSLQLRRAFSDGHLPSLHPPSDGGGGSKNNTTGLRTELSFSIYNTFNKMAPPPPPVQEQEEAEQQQAPGEPKLPLFLARGLGIDRIASGLFTAGGGGDGDGGNGGAGRMSAVEEEHAEKVAALDAQYKRMMDEQPGDALFLRNYAQFLHEVKGDARRAEEYYSRAMLADPSDGEIMSQYAKLVWEVHRDLDRSLTYFHKSVQAAPHNSNVLAAYASFLWEQDDDDNDDLGEGEQDVAVAAQPGHVRQLASVAV

SEQ ID NO: 31328 - protein, 365 aa, Oryza sativa
MVETVAEAQEEVSVPGPEEEEQEMKGRRSSNCCSPSTALKEDRKLRRLSSRRRVGSSSRASSGSDRVGRRHSFSAETEARRSSFSSLKDSRRASFSIDRDGRRWSFSIEQEHLVAEPKVLMGSRKGQKISSEPESEKDCAVHAAPNSAEETLESHDDGKEEATLDGQEEGTTQETQVDEKGEKVEVGGVEAQDVVEEQKQRRKKSGELPDCLLLMMYEPKLSMEVSKETWVCSTDFVHWKSYQGQNRRNRRQQKAGCNAAPAEELKDTDNAEGTSDAKNTEESVAPASANLVSMPPPVVQKSPLKEAAEQKFKIELPLVTGAATYAPFVLKRCKSEPMRSSARLAPDACFWKDRHRPLNATGVGF

SEQ ID NO: 31329 - protein, 274 aa, Oryza sativa
MVGPGLYPEIGKKARDLLYRDYQTDHKFTLTTYTSNGVAITATSTKKADLIFGEIQSQIKNKNITVDVKANSDSNVVTTVTVDELTPGLKSILSFAVPDQRSGKFELQYSHDYAGVSASIGLTASPVVNLSSVFGTKALAVGADVSLDTATGNLTKYNAGLSFSNDDLIASLNLNNKGDSLTASYYHIVNHSATAVGAELTHSFSSNENSLTFGTQHTLDPLTVVKARFNNSGKASALLQHEWRPKSVWTISAEVDTKAIDKSSKVGIAVALKP

SEQ ID NO: 31330 - protein, 387 aa, Oryza sativa
MLRCPPPRRLCLRLGSPVSTMASTLAFLRPSAPAPLAASRGAARGVPAAVRVPCRSRVSAAGVSLGSEVAVGSDALFADYKPTTAFLFPGQGAQTVGMGAEAVNVPAAAKLFDKANDILGYDLLDFCTNGPKEKLDSTVISQPAIYVTSLAAVEVLRSRDGGQNVIDSVDVTCGLSLGEYTALAFAGAFSFEDGLKLVKLRGEAMQDASDAASSAMVSVIGLDSEKVQQLCDAANEEVDEKERVQIANFLCPGNYAVSGGVKGIEAVEAKAKSFKARMTVRLAVAGAFHTSFMQPAVSRLESALAETEIKTPRIPVISNVDASPHSDPDTIKKILARQVTSPVQWESTVKTLMGKGLEKSYELGPGKVIAGILKRIDKGASIENIGA

SEQ ID NO: 31331 - protein, 469 aa, Oryza sativa
MQTPTMSTSMATPAKLPSPPSLPIARQCCCHLLQLGRRGGAGVARASAKKKNPWLDPFDDGPDDEFDYRGAFSGGKQEEDPRPPEDPANPYGFLRFPAGYNPELDSLASKVRRDVRRACCVVSGGVYENVLFFPVVQLLRDRYPGVVVDVVASARGKQVYEMCKNVRYADVYDPDDDWPEPAEYTHQLGVLKNRYYDLIISTKLAGIGHALFLFMSSARDKVGYVYPNVNSAGAGLFLTEMFRPPTTNLADSGYNMYQDMLEWIGRPAKGVPEHPVPPLRVSISKKLRAFVEDKYSRAGVEKGKFVVVHGIASDSFANMRSRGDDDCLLPLEHWAEIAKEISSEDNGLKPLFVIPHQKHREEVEETVGKDTNILFITTPGQLTCLINDSVGVVATNTAAVQLANARDKPCVALFSSKEKARLFLPYLEEKKGCTVVASETGKLIDIDVEAVKKAVKEFKAAPSVALAQT

SEQ ID NO: 31332 - protein, 290 aa, Oryza sativa
MAKHLALSVAAAVAVSWLAASSAAAAGFYEKFDVVGAGDHVRVVSDDGKTQQVALTLDRSSGSGFTSKDTYLFGEFSVQMKLVGGNSAGTVTSFYLSSGEGDGHDEIDIEFMGNLSGNPYVMNTNVWANGDGKKEHQFYLWFDPTADFHTYKIIWNPQNIIFQVDDVPVRTFKKYDDLAYPQSKPMRLHATLWDGSYWATRHGDVKIDWSGAPFVVSYRGYSTNACVNNNPAGGWSSSWCPEGTSAWIHRELDGAELGTVAWAERNYMSYNYCADGWRFPQGFPAECYRK

SEQ ID NO: 31333 - protein, 247 aa, Oryza sativa
MASAKLLLLVATSLLSCGVILADYAPMTLTIVNNCPYPVWPGIQANSGHDVLEGGGFFLPALSHRSFAAPAHPWSGRIWARTGCTGAGAQLHCATGDCGGRLQCAGLGGAAPATLAQVSLHHGNDQTSYGVSVVDGFNVGLSVTPHEGRGNCPVLACRKNLTETCPSELQLRTPAGSVVACKSGCEAFRTDELCCRNMYNSPRTCRSSKYSEFFKRECPQAFTYAHDSPSLTHECAAPRELKVIFCH

SEQ ID NO: 31334 - protein, 435 aa, Oryza sativa
MAVAVEITRSEVLRPSEASAAGGGGGKRSPLTVFDRAATDWYIPAVFAWYGAAAPSNDEVKGGLAAVLARYPHLAGRFDVDERGRRCFNLNDAGVRVLEATVAADLADALAHDVAAHVNELYPKADMENGDEAVFQVQLTRYACGGLVIGTACNHQVSDGQSMSFFYVAWAAAVRSAGATLPTPFVDRAAIAVPRGPPAPAFDHRNIEFKGENSWTHSYGSLPLERIRNLAVHFPDEFVAGLKSHVGTRCSTFQCLLAHAWKKITAARGLSPEEYTQVRVAVNCRGRASPAVPMDYFGNMVLWAFPRMRVRDLLSASYATVVGVIREAVARVDEQYIQSFVDFGEVAVGDELTPTAAPPGTVFCPDLEVDSWLGFRFHDLDFGRGPPCAFLPPDLPVEGMLIFVPSCAAKGGVEMYMALDDLHVDAFRQICYSMD

SEQ ID NO: 31335 - protein, 411 aa, Oryza sativa
MAESTAATAPPGDEPEAKGRSNSILLPILGILLVYLLYRYLRPRLRGLRLDRLTSRLPACLRRSRTANTMLPYFAPIADRLGALQPYLAPIADRLGVGAQGGVGAGAYGRADALVKFPGGEALSVAAILEAPGEVVAKSSHSTLYRAAMRSGEAAVLLRFVRPACALTSDEASAAARRIGAVSHPNLVPLRAFYVGPRGEKLLVHPFYAAGSLRRFLQEGIVDSQRWNIICKLSISIVKGLDYLHTGLEKPIIHGNIKTNSILLDANYECKISDFGLYLLLNPAGAQEMLETSAAQGYKAPELIKMRDATRETDIYSLGVVLLEMLAQKESAKDNTPNPRDILLPVSFKNLVLERKISDAFSSDLVRQSKKSGKEKNLNAFFELATACCSPSPSLRPNTKFILKKLEEIAK

SEQ ID NO: 31336 - protein, 110 aa, Oryza sativa
MAVEVGSAREARAAEMEAGLAREARPMEGGQIGARDASGGGGRLGARGAAGGGGGDLGEWRSCWWVWCGLRRTKASRWRAPVQGSHMSAEVDWRWSIGVSAVVSQVVSGR

SEQ ID NO: 31337 - protein, 363 aa, Oryza sativa
MEEMLMAANAAAGANPNPAATAPSSVTGGALRGGGGGGAPPVAGGAGAGSTERRARPQKEKALNCPRCNSTNTKFCYYNNYSLQQPRYFCKTCRRYWTEGGSLRNVPVGGGSRKNKRSSSSAASASPASASTANSVVTSASMSMSMASTGGGASKNPKLVHEGAQDLNLASPHHGGLQAPGEFPAFPSLESSSVCNPGGPMGTNGRGGGALSAMELLRSTGCYMPLQVPMQMPAEYATPGFALGEFRAPPPPPQSSQSLLGFSLDAHGSVGGPSAAGFGSSAGLQGVPESTGRLLFPFEDLKPTVSSGTGGGGASGGGAGVDGGHQFDHGKEQQAGGGGGGPGGHDTPGFWNGMIGGGSGTSW

SEQ ID NO: 31338 - protein, 29 aa, Oryza sativa
MDIVPASTCKFSVELWYSRLHECNKMYIV

SEQ ID NO: 31339 - protein, 33 aa, Oryza sativa
MAFNRLPISSQVFDCVTRSSADCWCTLLSSKKF

SEQ ID NO: 31340 - protein, 248 aa, Oryza sativa
MVLCSMRKSFKDSLKVLEADIQHANTLASDFSRDYDGACLQMRMSYSPAAQFFLFLVQWTDCSLAGALGLLRILIYKVYVDGTTTLSTHERKASIREFYAVIFPSLMQLHKGISDVDDRRQKAICTERYRRRDEDESKRHVSEIDVEREEECGICMEMNNKVVLPNCSHAMCMKCYRQWRSRSQSCPFCRDSLKRVNSGDLWMLTDDRDVIDMATITRENLRRLFMYIEKLPLVAPDNIFYAYDSHVK

SEQ ID NO: 31341 - protein, 360 aa, Oryza sativa
MARKNRDGRVAVWLMMVFLLLSGSYQCEARALMRRSRRNTLLNALYKLNFIRTVEPMQLPSSSPSPAKPDGDAASLADATGDGSSSPYCVNPPNAPPSSSTPTTTPTPTPPFASTPFAPDDQPPPLPPIGGFTPPSFEPSPPASSTPGFTPSTPGSAPPSPIFVVPSPPETGPGGGGLGGGSGGEGGGGVGGGSGGEGGGGGGVGGGPGGGGSGGEGGGGGGSSGGGGSNGGGGSSGGGGNSGGGGGGGGFLPPIVYPPPLAPPAAPGAGEALWCVAKPTVPDPIMQEAMDYACGSGAECGSIQPSGACYTPDTVLAHASYAFNSYWQMTKAAGGTCDFGGTATIVTRDPSYEKCQFDLL

SEQ ID NO: 31342 - protein, 373 aa, Oryza sativa
MTAAMAPPQLVSVLVALLCVAAASPAGVGAARFVCNATAPRASTCQALVAYAPPNATTLAAVRALFQLRSHRALLASNGLPLSTPPSAPAPSPLRVRLPCLCSGGAGATFQRPTYRIRAGDTLDAIARGVFAGLVTYQDIAAANNVSDPNKIAVGQELWIPVPCSCDPVAGQPVVHYTYVVPPGASVAAIAQDFATTEATVLALNRMPDAKSLLAGQVLDVPLRACSSAISSTAIDRNLLVPNGSYILTANNCIMCGCSSYTWQLDCQPTQGISSSFCPASKCGDMFLGNTTTSPTSSCESTACSYAGYTNSTSFTILANLTTSSTCNAAAMSPMAQQAHSSAFRLASTWLRWTELIVRLHVIFLCVSFLNHV

SEQ ID NO: 31343 - protein, 195 aa, Oryza sativa
MVALVAEASKRWRWRRPRLQRWRRPRRRSGGGGVPNVDELGVDLAKAPAGRRRWGSRSGRRLILGGRRARSPSLQPLTAAGCIPGGCGWRAGGRRPRLLRRRRPPLPAPPLLLPVRRASSPPTPRGGGSKKAPHPLHAAARRRRRRSRFGGWPPPPASPSRRLPRAVTPRRGPRPAAGTSPAGRRFRRFHLPRVR

SEQ ID NO: 31344 - protein, 327 aa, Oryza sativa
MVVLAGPPAVDHIPLLRSPDPGDVFSGVPVVDLGSPGAARAVVDACERYGFFKVVNHGVATDTMDKAESEAVRFFSQTQPDKDRSGPAYPFGYGSKRIGFNGDMGWLEYLLLALDDASLADACTVPSCAVFRAALNEYISGVRKVAVRVMEAMSEGLGIAQADALSALVTAEGSDQVFRVNHYPPCRALQGLGCSVTGFGEHTDPQLVSVLRSNGTSGLQIALRDGQWVSVPSDRDSFFVNVGDSLQVLTNGRFKSVKHRVVANSLKSRVSFIYFGGPPLAQRIAPLPQLLGEGEQSLYKEFTWDEYKKAAYKSRLGDNRLAQFEKK

SEQ ID NO: 31345 - protein, 338 aa, Oryza sativa
MASAGGCKKKTGNSRSRSPRSPVVLRRAMLHSSLCFLVGLLAGLAAPSDWPAAAGAAVFLRTLRASNVIFSRSSNRPQQPQLVVVVTTTEQSDDSERRAAGLTRTAHALRLVSPPLLWLVVEEAPAEKHAAPPTARLLRRTGVVHRHLLMKQGDDDFSMQISMRREQQRNVALRHIEDHRIAGVVLFGGLADIYDLRLLHHLRDIRTFGAWPVATVSAYERKVMVQGPLCINTSSSSVITRGWFDMDMDMAAGGERRAAADRPPPETLMEVGGFAFSSWMLWDPHRWDRFPLSDPDASQESVKFVQRVAVEEYNQSTTRGMPDSDCSQIMLWRIQTTL

SEQ ID NO: 31346 - protein, 248 aa, Oryza sativa
MLLRSPARSSPHLRSLLRARGFISSASPSAATAAEGDDGKIVASVLFERLPVVIPKIHPVVYAFQEFSFRWRQQYRRKYPDDVLGKADARGKGDYQIDYVPAPRITDADKTNDRKSLQRALDNRLYLLLYGKAYGAPDDKPVWHFPEKVYDNEDTLRLCAESALKSVLGGLNNTYFVGNAPMAHMVVDQKEDSSISSFKRFFFKSQVVGATKYDIGKCQDHVWVTKDELLEYFPEHKAFFNKMIIHIR

SEQ ID NO: 31347 - protein, 252 aa, Oryza sativa
MTTGNGDAPVIKNAHSDIDSTNKTLLKSDALYKYVLDTTVLPREPECMRDLRLITDKHQWGFMQSSADEAQLLGMLLKMAGAKRTIEVGVFTGYSLLATALALPEDGKVVAIDPDRESYEIGRPFLEKAGVAHKVDFREGKGLEKLDELLAEEAAAGREAAFDFAFVDADKPNYVKYHEQLLQLVRVGGHIVYDNTLWAGTVALPPDTPLSDLDRRFSVAIRDLNSRLAADPRIDVCQLAIADGITICRRLV

SEQ ID NO: 31348 - protein, 389 aa, Oryza sativa
MDGGVGEEGKQQPHLVLAHKLFLLSHPDVDDLAKVDLRADVLAAVKSDDMASLYESLGAGGVLETDAALLAEMRGRIEEEIRKLDEKIADAEENLGESEVREAHLAKSLYFIRVGEKEKALEQLKVTEGKTVAVGQKMDLVFHTLQIGFFYMDFDLISKSIDKAKKLFEEGGDWERKNRLKVYEGLYCMATRNFKKAASLFLDSISTFTTYELFPYDTFIFYTVLTSVISLDRVSLKAKVVDAPEILAVIGKVPHLSEFLNSLYNCQYKSFFAAFSGLTEQIKLDRYLQPHFRYYMREVRTVVYSQFLESYKSVTMEAMASAFGVTVDFIDLELSRFIAAGKLHCKIDKVACVLETNRPDARNAFYQATIKQGDFLLNRIQKLSRVIDL

SEQ ID NO: 31349 - protein, 434 aa, Oryza sativa
MDLLRRVAVVAVLLSLPSRGRSGGGGSDLHPVVLVPGYGSNRLYARLTAAYEPAAPRCGAREGKDEWFQLWPIDAAASEPAQAPCLAEKMSLVYDPVADDYRNVAGVVTRVPSFASTRALVGWDPLVRQLEAMGHRDGGSLFAAPYDFRYAVAPRGHPSAVGERYFARLTRLIERASRLNGGRPAVVVAHSFGCALTYQFLRARPLAWRQRFVKHAVLLAAALGGFAEGMDGLASGAGSGLPNLAPPARARLARSQQSALWRLPTPMVFGDRPVVVTKNSTYSANNITEFLDAIGFTEGVQPYVTRVLPMWRALPAPMVPVTSMYGVGVRTPETFVYGEAGFEGTPEVVYGDGDGNMNIVSLMAAEEWSGVEGQILKVVRLPGVSHVGFFSDLALKKVVAEIQKAVSSIEVHRKEKIFSFLNNFEFTIPVPLGW

SEQ ID NO: 31350 - protein, 380 aa, Oryza sativa
MASSPAPSPAAPPLLLAALAALAVVASASAAACSAGDRDALLAIRAALSEAHLGVFSSWTGTDCCTSWYGVSCDPTTGRVADLTLRGEADDPVMAPAGRPASGVMSGYISDAVCRLGRLSSLILADWKQISGPIPPCVATALPYLRILELPGNRLTGEIPRSIGSLSRLTVLNLADNLIAGEIPSSITSLASLKHLDLTNNQLTGGIPDDVGDLTMLSRALLGRNKLTGAIPTSVGSLTRLADLDLAENGLTGGIPDSLGGAHVLTSLYLGGNRVSGRIPASLLQNKGLGILNLSRNAVEGAIPDVFTAESYFMVLDLSRNRLTGAVPRSLSAAAYVGHLDLSHNRLCGSIPAGPPFDHLDAASFASNSCLCGGPLGKCT

SEQ ID NO: 31351 - protein, 114 aa, Oryza sativa
MASNYVDTTGDEGRFHGHHSTNTTPTGAAASSPRTMRRSFSNASSGSHGGGGGAKCVCAPATHAGSFKCRLHRTNSQGHGHGHPHPSPPTSPAAGGASAAPRPSSASSRTVEAQ

SEQ ID NO: 31352 - protein, 192 aa, Oryza sativa
MAFSQQGPRTTCIISANGALCTATLRQPATSGGIVTYEGHFDILSLSGSFLLAEDGDTRSRTGGLSVALAGSDGRIVGGCVAGMLMAATPVQVVVGSFIAEGKKGKEEHLKREPTSAPTPNHAAGFGAATAASPPSDGSSSDHSDDPGSPMGPNGSTFNNSGHPMHSSYAPVSWSLSGNQGRYDPDLKMMTD

SEQ ID NO: 31353 - protein, 429 aa, Oryza sativa
MAIRARSSSYAAAAVALALALASVAAVAGEVFFQEKFEDGWESRWVKSEWKKDENMAGEWNHTSGKWNGDPEDKGIQTSEDYRFYAISAEYPEFSNKDKTLVLQFSVKHEQKLDCGGGYVKLLGGDVDQKKFGGDTPYSIMFGPDICGYSTKKVHTIFTKNDKNHLIKKDVPCETDQLSHVYTLIIHPDATYTILIDNVEKQSGSIYEHWDILPPKQIKDPEAKKPEDWDDKEYIPDPEDKKPEGYDDIPKEIPDPDAKKPEDWDDEEDGEWTAPTIPNPEYKGPWKQKKIKNPNYQGKWKAPMIDNPDFKDDPYIYAFDSLKYIGIELWQVKSGTLFDNFLITDDPELAKTFAEETWGKHKDAEKAAFDEAEKKKEEEEAAKAGEDDDDLDDEDAEDEDKADEKADSDAEDGKDSDDEKHVCNTPAFS

SEQ ID NO: 31354 - protein, 513 aa, Oryza sativa
MAMATALRKLSSDALRRQPLSRITPLYYMASLPATEERSGVTWPKQLNAPLEEVDPEIADIIEHEKARQWKGLELIPSENFTSVSVMQAVGSVMTNKYSEGYPGARYYGGNEYIDMAESLCQKRALEAFRLDPAKWGVNVQPLSGSPANFHVYTALLKPHERIMALDLPHGGHLSHGYQTDTKKISAVSIFFETMPYRLDESTGLIDYDQMEKSAVLFRPKLIVAGASAYARLYDYDRMRKVCDKQKAILLADMAHISGLVAAGVVPSPFDYADVVTTTTHKSLRGPRGAMIFYRKGVKGVNKQGKEVMYDFEDKINAAVFPGLQGGPHNHTITGLAVALKQATTPEYRAYQEQVMSNCAKFAQSLTAKGYELVSGGTDNHLVLVNLKSKGIDGSRVEKVLENVHIAANKNTVPGDVSAMVPGGIRMGTPALTSRGFVEEDFAKVADFFDAAVNLALKVKAAAGGTKLKDFVATLQSDSNIQSEIAKLRHDVEEYAKQFPTIGFEKETMKYKN

SEQ ID NO: 31355 - protein, 354 aa, Oryza sativa
MATDGDALESQAAAAAEAARELREAAASLVARRSADEDALRRRATALDADLRRLQASLSTLAPTTLDKVEEELERARVTISDSDVAAFLPSKRNGKFLKTFVGPVNVRVARKEDKLRVKDEYNNYRDRATYMFLLFPSILLLLRWWIWDGCLPALAVQMYQAWLLFLYTSFALRENVLIVNGSDIRPWWIYHHYLAMLMALVSLTWEIKGQPDCSSKQRGVQLFLRWAIMQGIAMHLQNRYQRQRLRTRIALGKAKRMDVVAGETAGVEGQLLLLYPVLFTLQVFEGYVGVLLLKTALHGLASEWQVVVCGILLVVMAVGNFVNTMETLMLKLRFKAKMKRAKSRQDLSRQHQN

SEQ ID NO: 31356 - protein, 24 aa, Oryza sativa
MGFNGLKQPQDRADLIAYLKNATA

SEQ ID NO: 31357 - protein, 285 aa, Oryza sativa
MAAAAAAATTPNSLLLRRPAAPKPASAAASPLRLPTRAARISCAAVATPAQSSSSPAAAAADRGVYNFAAGPATLPLSVLQRAQAELVDYRGSGMSIMEMSHRGKEFDAAIKKAEADLRALLAVPDTHEVLFLQGGATSQFAAAPLNLCASPSDPADFVVSGSWSDKAFKEAKKFSAASVAWSGKDGKYTSLPPFDAIEQNPEARFLHICSNETIHGVEFKDYPEPKNKSGILVADMSSNFCSKPVDVSRFGLIYAGAQKNVGPPASPSPSSARTSSAARSPSPR

SEQ ID NO: 31358 - protein, 253 aa, Oryza sativa
MAPAVLLRLAPSPPYPQNPPPRRRSPASACGASRRDFAIHTAIASASAAVAVSVRPATAAAADEEAPPGEPSQNKKGSPLLGGIANTKSWSQYYGSGFSIRVPPSFDDILEPEEFNVGVTYYGDKAKPRTYAARFASPDRSELVSVVIKPSNQLKITFLEAKDVTDLGTLKEASKIFVPGGAKLYSARTIKVKDEDDIRTYYFYEFGVDKEHVAVMATVNSGKTYIAGATAPETKWDDDGVKLRSAAVSLSVL

SEQ ID NO: 31359 - protein, 457 aa, Oryza sativa
MATPPHDASPAPPNPNPVSDDPPPPPPVTETKPEPEPPLPTTSIDPTPSGDEESGDDSSSSVSSASSTSPTAAAAAAAAGGGGGGGGERAAPHPAAKDLLHISFNQDYGCFAAGTKSGFRIYNCDPFREIFRRDLGAAGDNGVGGGGGGIGVVEMLFRCNILALVGGGDAPHYPPNKVMIWDDHQSRCIGELSFRSPVRGVRLRRDRIIVVLENKIFVYNFADLKLVHQIETAPNPKGLCAVSQQPGSIVLVCPGAQKGQVRVEHYGARKTKFINAHTSRVACFALSQDGRLIATASTKGTLVRIYNAAEGNLLQEVRRGADRAEIYSLAFSNNLQYLAVSSDKGTIHVFNLKINVGLTTNDKPLPAPDPDVPHISPSLSFIKGVLPKYFHSEWSVAQFRLHEGEQYIVAFGHEKNTVAVVGMDGSFYRCQFDPVNGGEMLQLECYNFLKPSSDQPQ

SEQ ID NO: 31360 - protein, 244 aa, Oryza sativa
MAATTFSSSPSKVTTAKLGGGVTRSSSPYTQLTFCSRHHFQKAATTAAAFHHKPPPAELSLLLSPARSKHARTCPAADNDRAAPAAQEATNTPPPPAAPSANGSPPQEPPKRAPLTARERLRAARVLGKYAEPGGSSPKGKASAASAAAGAAGKKPEFGSRVLDALRETDGKAGKKRSSRLPEAPSNMFDDSKRGLPKEGWTFEALPFGTDVIVIAASFTLITVVMFGTTYLVWKLGAIHFNEF

SEQ ID NO: 31361 - protein, 412 aa, Oryza sativa
MASAVASNLPAAAPAAVMPFGGWHAPRVSFSRDAAGAEEAAAVVVCSSPLAAAAAVATTTTPEPAISKDFIDFEFSLGGSATMLPADELFADGKLLPLRKAAAVPEMDAAAPRPPQPEAMPAPSEPMKPLRAATAAVDAADPYVFSPKAPSCSSRWRELLGLKRAAAQSPKPSPSSAPARTPGRAMNSTAARSLKLLLQRNNGRSSGASASELASAPLLRDSSDSEASLSLASSRFSLSSSSSSSGHDHDDIPRLSLDSAADPNPPRIRLVRSSHRHSTSSSSSSRAGRSPARRRPSPPPPPRCLSVDSPRMNSSGKIVFQGLERSSSSPCTLRAAAKPRSRAVDRSYSSGVRVAPVVLNVPVCSRPVFGFFKDKKDAAAKDAMAARTRSSLGRKTTAAPQGWSGELGRSCG

SEQ ID NO: 31362 - protein, 373 aa, Oryza sativa
MRRVTVLVLLLACAAARAAAAVVTDGLLPNGNFEEGPPKSDLVNGTVVRGANAIPRWETSGFVEYIESGHKQGDMLLVVPQGAHAVRLGNEASIRQRLAVTRGAYYAVTFSAARTCAQAEQLNVSVSPEWGVLPMQTIYGSNGWDSYAWAFKAKMDEVALVIHNPGVEEDPACGPLIDGVAIRALYPPTLAKGNMLKNGGFEEGPYFLPNASWGVLVPPNIEDDHSPLPAWMIMSSKAVKYVDAAHFAVPQGARAVELVGGKESALVQEVRTVPGWTYRLSFAVGDARDGCAGSMVAEAYAARASIKVPYESKGTGGYKRAVLEFAAIANRTRVVFQSTFYHTMTDGSLCGPVIDDASLVGLRKKTAGRRLLL

SEQ ID NO: 31363 - protein, 254 aa, Oryza sativa
MLNIYKLHGLPQTIISDRDKIFTSQLWEQLFTRSGTQLHLSTAYHPQSDGQTERVNQCLEIYLRCFTHATPSKWAVWLHLAEFWYNTAFHSALNTSPFEVLYGHPPRYFGIHSEDCAIPELQVWLKERRLMHSLIQQHLNRAQQHMKIWLTRNAVSDLLNWVTGFILSYSPMFSLLSQLGLIISLHSDILALSKLFRSLALWHTSSNFPLLVLSTLCSMCPSLRQPRVSKEHCTPLCLLLMMLSSILSCSWITG

SEQ ID NO: 31364 - protein, 293 aa, Oryza sativa
MLREGAHEQGGVDEGGGPAADRLHQGARRGLLAVAAQGGGAPPLRQELPPPLDELPPPRPQARQLHRRRRRAHHQAPRPSRQQVVVDCGAAAGEDGQRDQELLEHAHQAQAPEPGHRPADAPAGQRREQRRRGERADHDGQHRRLSVPCAGAAAAAAQATQPGARRGAEQCELRQVRGVPAVGGRPQQQRRQLGRAAVPRPQPRPRPRPVHEPAELAAQDAGRRVVHDRVAPPSPPAAEDHLPLLPPRRPQRRRLQLQGGRAIAGRPTRVPVSQATGGGPVHIAQQALGKKNL

SEQ ID NO: 31365 - protein, 518 aa, Oryza sativa
MLPRSRTLPPRIHDGVVVVERDVRRYQQLPQQVEMEMTTTKRQQDHQVETMTTKKIDEEDEEVDDDGRAKRRGTVWTAASHIITAVIGSGVLSLAWAIAQLGWVVGPTVMLLFAAVTYFTSNLLADCYRTGDPATGRRNYTYMDAVKANLGGAKVKVCGCIQYLNLLGVAIGYTIAASISMMAIQRSNCFHARGEQDPCHASSNVYMIMFGIVQVFFSQIPDFDQVWWLSILAAVMSFTYSAVGLALGAAQVAQNRTFAGSAMGVAVGFVTKTGDVVTPAQKVWRNLQALGDIAFAYSYSIILIEIQDTLRSPPAEARTMRKATGISVVVTSVFYLLCGCMGYAAFGDDAPGNLLTGFGFYKPYWLLDVANMAIVVHLVGAYQVYCQPLFAFVERRAERRWPNGLPGGDYDLGWIKVSVFRLAWRTCFVAVTTVVAMLLPFFNDVVGILGALGFWPLTVYFPVEMYIAHRRIRRWTTTWVGLQALSLACLLVSLAAAVGSIAGVLLDLKSYRPFRSTY

SEQ ID NO: 31366 - protein, 497 aa, Oryza sativa
MAAAGGAVLLLVLATATSVTGQHDYSDALHKSILFFEGQRSGRLPPDQRLRWRRDSALNDGATAGVDLTGGYYDAGDNVKFGFPMAFTATLMSWGLIDFGRSFGAHAAEAREAVRWATDYLMKATATPNTVYVQVGDAFRDHSCWERPEDMDTPRTVYKVDPSHPGSDVAAETAAALAAASIVFRDADPDYSNRLLDRAIQVFEFADKYRGPYSSSLHAAVCPCYCDYSGYKDELLWGAAWLHKASRRREYRDYIKRNEVVLGASEAINEFGWDNKHAGINVLISKEVLMGKDEYFQSFRVNADNFICTLLPGISNHPQIQYSPGGLLFKAGNSNMQHVTSLSFLLLAYSNYLSHANVRVPCGTSSASPVQLRRVAKRQVDYILGDNPLRMSYMVGYGSRYPLRIHHRGSSLPSVAAHPAQIGCKAGATYYASAAPNPNLLVGAVVGGPSNTSDAFPDARAVFQQSEPTTYINAPLLGLLAYFSAHPNLAQSDLLYD

SEQ ID NO: 31367 - protein, 327 aa, Oryza sativa
MGWSSSRAMLVARAVALAVVFLAAEAQLSPGYYNATCPGVVSIVRRGMAQAVQKESRMGASILRLFFHDCFVNGCDASILLDDTANFTGEKNAGPNANSVRGYEVIDAIKAQLEASCKATVSCADIITLAARDAVNLLGGPNWTVPLGRRDARTTSQSAANTNLPPPGASLASLLSMFSAKGLDARDLTALSGAHTVGWARCSTFRTHIYNDTGVNATFASQLRTKSCPTTGGDGNLAPLELQAPNTFDNAYFTDLLSRRVLLRSDQELFGSGAGNGTTDAFVRAYAANATTFAADFAAAMVRLGNLSPLTGKNGEVRINCRRVNSS

SEQ ID NO: 31368 - protein, 253 aa, Oryza sativa
MKKGLSSNGGAEQNGVDLREKLSRKPKNIRRYDARGHVSESRSRYDGRDKIPELRSRYGMRERLPEPRTSALPSRIPSARSMDDLLKLDSSREAYSSWSGNLRHRSPEKLKSARRDMSPSRTYDHIRSMPPIRSAGTSRTSGLITRDAPDALRTQPYAGKSTISIDTTQPANGVASSATVMPTAPVMPEVPLTVTGLLNSLGLEKYVFLFHAEEVDMAALSQMGDSDLKEIGVPMGPRKKILQAVAPYSKRRR

SEQ ID NO: 31369 - protein, 439 aa, Oryza sativa
MGFAVVRTNREFVRPSAATPPSSGELLELSIIDRVVGLRHLVRSLHIFSAAAPSGGDAKPSPARVIKEALGKALVDYYPFAGRFVDGGGGPGSARVECTGEGAWFVEAAAGCSLDDVNGLDHPLMIPEDDLLPDAAPGVHPLDLPLMMQVTEFSCGGFVVGLISVHTMADGLGAGQFINAVGDYARGLDRPRVSPVWAREAIPSPPKLPPGPPPELKMFQLRHVTADLSLDSINKAKSAYFAATGHRCSTFDVAIAKTWQARTRALRLPEPTSRVNLCFFANTRHLMAGAAAWPAPAAGGNGGNGFYGNCFYPVSVVAESGAVEAADVAGVVGMIREAKARLPADFARWAVADFREDPYELSFTYDSLFVSDWTRLGFLEADYGWGPPSHVIPFAYYPFMAVAIIGAPPVPKTGARIMTQCVEDDHLPAFKEEIKAFDK

SEQ ID NO: 31370 - protein, 372 aa, Oryza sativa
MARAGAVLVVVLAAASVLLAPWAATAQTSSCDDALPPALAGNYSGLACRPVWNNFVLRYAQGKDNVLRVVISSMYSTGWVGMGFSKDGMMVGSSAMVGWVGKTGLSHVKQFSLRGKTPSQVVADEGFLQSKDHDHTVVVQQAKIYLAFQLRFQSPLRRQQVLLAFGNAIPVNDRLTEHQGKTSFTFDFTTGSSSGSSYPDGLKRAHGALNLFAWGVLLPIGAIIARYCRRWDPLWFYLHAGIQLVGFILGLAGIVAGVSLYNKIQADVPAHRGLGIFVLVLGILQILAFFLRPHKDSKYRKYWNWYHHWVGRLALFFAAINIVLGIKVGAAGNSWKIGYGFNLAILLITIITLEVLLWTRWKNNNSSSMPTY

SEQ ID NO: 31371 - protein, 364 aa, Oryza sativa
MASPLVRLLLLLLLVVAAASRGAASAAKAKAARVTAVIVFGDSTVDTGNNNQIGTPLRSDFPPYGRDMPGGARATGRFGNGRLAPDFMSESLGLPPLVPAYLDPAYGIADFARGVCFASAGTGLDNATAGVLSVIPLWKEVEYYREYQRRLRAHAGAAAARDVVRGALHVVSIGTNDFLENYYMLATGRFARYSVGEYEDYLVAAARAFLAAIHRLGARRVTFAGLSPMGCLPLERTAGALLGGGGGGCVEEYNRVAREYNGKVEAMVRSLRAELPRLKVAFIPVYDNMLDLITHPEKYGLENVEEGCCATGRFEMGFMCNDESPLTCDDASKYLFWDAFHPTEKVNRIMAQHTLDVCYQQGVL

SEQ ID NO: 31372 - protein, 55 aa, Oryza sativa
MPENIISLAGKSFADRGQEESSNNVYCTTQACGNLQVVIGLGILPSHLKCKLTIC

SEQ ID NO: 31373 - protein, 263 aa, Oryza sativa
MSKAAAAASLPPPPPEVAHLVDQLQRHHLAPDASLLSSCAHSDLLQAREEVASERARYLEALAVYAEAIAMVEEYQHAISTGVANAGKKLNCSPQVYESLEHHLAVAEAAQRLRLPLLSQDGDVHEEEIEKLSTLSRSSFDSTMTSAAPSSSSISTSYNNYSSTASAATVAAAPGTGGSEPVEPGVGGVPDRFLGITSDYLYQVQQEQPAMTVVCIIFCNQIYRVNQLLVGSSFILVLDILSYVSWGIRQLLLHCFLSLFTIY

SEQ ID NO: 31374 - protein, 290 aa, Oryza sativa
MVNQYVHLGKIGSGSYGKVVLYRSMKDGKLYAVKVLNKSYMMKVRVVRSETAMTDVLREVSIMKMLDHPNIVNLIEVIDDPNADKFYMVLEYVEGKMVCDNGLGEATSRNYLRDIISGVMYLHSHNIIHGDIKPDNLLVTSTGSVKIGDFSVSQIFEDDDDLLWRSPGTPVFTAPECCQGSAYHGRAADTWAVGVTLYCMITGHYPFLGDTLQETYDKIVNDPVQIPDNMNPQLADLLERLLCKDPANRITLQAVGEHPWVAGDQGPVVEYFCRCGFGRRKRDDLKGEVQ

SEQ ID NO: 31375 - protein, 373 aa, Oryza sativa
MSTLVDALCAPCSDTALIYDTFNASAAASFLFDNAAAFCDADILGATATGEKEATSSAAAAAAEAAPPRKKRRRRAKSCKSREETETQRMTHIAVERNRRRQMNEYLAILRSLMPEPYVQRGDQASIVGGAIEFVKELEQQLQSLEAQKRTLLPHHKARCDDATPMHNASGSNVGAGGCMEPTTITSNCSSSVTEDAPSADAPPFAQFFAYPQYVWCHSPRDSTTTTTAASASASASASSSSPATVAAALQSEHRSGLADIEVSLVETHASVRVMSPRRPGQLLKMIAGLQALRLTVLHLNVTTLDSLVLYTLSVKVEEGCSLTTVDDIAAAVHHVLCIVDAEAAASEHLLAAGQLATTATAVAKRELATYMY

SEQ ID NO: 31376 - protein, 211 aa, Oryza sativa
MEDGCSKVVSGGGSGSCGGGAKKPFHFARSLTYHHHQGHRVLPPAAKWRRHQLADEPRARPKDVVLYTTSLRGVRRTFADCSSVRAILRGFRVAVDERDVSMDAAFRRELRSLLDARGRAFSLPQLLVGGRLVGGADEVKQLHESGQLRRLLDGAAGQDPAYVCDGCGGVRFVPCTACGGGRKVFVEEEDRVQRCGDCNENGLVRCPNCCS

SEQ ID NO: 31377 - protein, 203 aa, Oryza sativa
MDHHQHHEQQQQRMVEMRMGMAMGEAYVGGGEVVAREAAAQALGAVVQLHFDKTLEKKRAADAQKQELWRLFLAFFLFLAILLSAVAQSPPSRLQCRHLWAPAGLLSLAHLAFYAAVAHHLRCLNGFRYQRRCHKLTLALAADRLRMLKSGGDVVAAADVEVPYQEPPESYLAKFKRSWAIHFAFLITTFAFSVAAAVAILCF

SEQ ID NO: 31378 - protein, 440 aa, Oryza sativa
MGDFNVALAIVAAVVSVLVLLVSVYLLINYQHPDDANQAYFPKLVVVLGITVALLSILMLPADVANRQACRRAIYSGACSLTLPMKTLWLAVYIADAVLVFLVIPFAMFYYEGDQDKSVGKRLTSALLWVAVSAVVCGLILGILYGLVGKVDFTVRHLSSAVETFPNSFTSFSTGQPCISTSPKQEATELGKKARELKKAAEALHQEEKSGKKGRKWRKNVKALGKELVLLEDDMKALEEMCPQGEQAEATWALTVLGYIGKLLFGAVGLIISIAWVAHIVIYLLIDPPLSSFLNEIFVKLDGVWGLLGTAAFAFFCFYLLIAVIAGEMMLGLKLVFITIHPMKWGGTLMNSFLFNVGLILLCSISVIQFCATAFAYYAQATAAQEIFGHTLQSLRGIKYLYKYNVFQYGFVALAILTLFYYAIFGWRKRKPTGRFQLSN

SEQ ID NO: 31379 - protein, 625 aa, Oryza sativa
MAMAGAAGRCLMLTRPSPLLRLRLLRAALATTTTTTTAAGASAVTAPTEPETTAREAPSRHELLLERLRQRHLKGVPAATPRPAQREKGRGGGGGGAQELQQKRRVEVVDSFEELGLGEEVMAALGEMGISKPTEIQCVGVPAVLAGTSVVLGSHTGSGKTLAYLLPLVQLLRRDEAMLGMSMKPRRPRAVVLCPTRELTEQVFRVAKSISHHARFRSTMVSGGSRIRPQEDSLNMPVDMVVGTPGRILDHIKDGNMVYGDIKYLVLDEADTMFDQGFGPDIRKFLAPLKNRAAKPGDQGFQTVLVTATMTKAVQKLIGEEFEGIVHLRTTTFQKRVATARHDFIKLSGSENKLEALLQVLEPSLAKGNKVMVFCNTLNSSRAVDHFLTENQISTVNYHGEVPAEERVENLNKFRNEEGDCPTLVCTDLAARGLDLDVDHVIMFDFPSNSIDYLHRTGRTARMGAKGKVTSLVAKKDVTLATRIEEAMKKNESLEALTTNNVRRAAVNPQYTSTKGRPSALKVVNQKGRRGVALQTKSSRIVKDTTSSRRRSPIRSQPRSKSTSSGKAKPVRSAKPSKSSSPSPKVAKSRPRPEGRKGDALNKLGSKLSVVGFRGRSSGKSAQAS

SEQ ID NO: 31380 - protein, 262 aa, Oryza sativa
MEESNDQGLAQKSTAPTGFFRVPGLFVRLSSKGLNAVDPDSAWSPTSPLDFKNLSSSTGSTNLKSSGLLGVEADQKFRTNPPRVGLGLVDALTADESSSCLGVTSSFLDSIRPFLELGLPKAASDAAMQKNGSGSVTLDEIADFALSEEYTCVIEHGPNPRTTHILGDETLEVCKGVPRSSKKSIFTIEPIGELPSTLACAVSRSCCYCRKRLQQDRDIYMYLGEKAFCSNECRRDYIDEEIEEVEELMMLDSAGSSALLAW

SEQ ID NO: 31381 - protein, 375 aa, Oryza sativa
MQAAAAAVHRPHLLGAYPGGGRARRPSSTVRMALREDGPSVAIVGATGAVGQEFLRVISSRGFPYRSLRLLASERSAGKRLPFEGQEYTVQDLAAPGAFDGVDIALFSAGGGVSRAHAPAAVASGAVVVDNSSAFRMDPEVPLVIPEVNPEAMAHVRLGKGAIVANPNCSTIICLMAATPLHRHAKVVRMVVSTYQAASGAGAAAMEELKLQTQEVLAGKAPTCNIFSQQYAFNIFSHNAPIVENGYNEEEMKMVKETRKIWNDKDVKVTATCIRVPVMRAHAESVNLQFEKPLDEDTAREILRAAEGVTIIDDRASNRFPTPLEVSDKDDVAVGRIRQDLSQDGNKGLDIFVCGDQIRKGAALNAVQIAEMLLK

SEQ ID NO: 31382 - protein, 306 aa, Oryza sativa
MQQKPAAEAMEEELKGEAVGPRRPGLGLWLAARRRLAPDDPFFAAGDMERELLAKQVALDLSEDERYQLERMEVASANALLCPISGCGAHLDCLENFEDHYRTRHTASCSVCWRVYPTSRLLSIHISEAHDSFFQAKVARGFPMYECLVEGCGVKLKSYKSRQQHLLDKHQFPKSFEFFKKARPSQRQRNKNQKQRQTVHKGDDTSETLMDVDGKKSSRYMNSRYRPKQHDGKESKENEHSSCKEAKNNEMEVDKQVDELASAVSRLSTADSTPSSISFGHRRSRGLAFVPRSIRQNKQVSQTEPK

SEQ ID NO: 31383 - protein, 25 aa, Oryza sativa
MNFCHGVASLLYVGRLVFHEYLYSL

SEQ ID NO: 31384 - protein, 34 aa, Oryza sativa
MLNCACTDAKTKKVHLCMMDRGISCSVIRYLCSI

SEQ ID NO: 31385 - protein, 444 aa, Oryza sativa
MKINVRGSTMVRPAEETPRVRLWNSSLDLVVPRFHTPSVYFFRRGEAAAAEGGSYFDGERMRRALAEALVPFYPMAGRLAHDEDGRVERLQRGRRAVRRGRRAGRHRRRLRRLRAHHGPQAPHPHRRLHRRHLLLPHPRAPGDPLQVRRRRPRRGHAAPRRRRLLRPALHQLVGGPLPRRPDRRHAVHRPHPRPRPRPAGAVAPARRVPAGARHAGPRAAAGADRQAGAAAHRRGHLQAVPLRPRPPPVPAAPRRGRAAVQHVRGARGARVAVRVAGAGAPRGAAHQAVLRHGRTPAAAAVAARRLLRQRDLHGDAARRGREGDRVAGGRRGDDPVGAGQDGQRLLPVGAGLPGAAARPVGAGPRRAHVPVPQPRPHQLGPTADPRRRLRLGAAGVHGPRRHRVRGARLRAPQRQRRRQPVGGHLAAGRAHGEVPQDDLRLLIL

SEQ ID NO: 31386 - protein, 327 aa, Oryza sativa
MDAAPTAPPAASADDEIVYESMPCIRIYKNRVERYFGSEFVAASTDAATGVASHDRVISSNVSARLYLPRLDDSAAAKAKLPVLVYYHGGGFCLGSAFNPTFHAYFNTFAALANALVVSVEYRLAPEHPVPAAYADSWEALAWVAGHAAGDGDEAWLVDHADFSRLYLGGESAGSNIAHHIAMRVAEEGLPHGAKIRGLVMIHPYFLGTNRVASDDLDPAVRESLGSLWRVMCPATTGEDDPLINPLVDGAPALDALACDRVLVCIGEGDVLRDRGRAYYDRLTSSGWRGEAEIWQAPEKGHTFHLLEPHCDAAIAQDKVISGFLNR

SEQ ID NO: 31387 - protein, 287 aa, Oryza sativa
MASPDLLFNLRNLFYLGAYQAAINNSDVPGLDADAAAERDAIVFRSYVALGSYQLVISEIDSSAATSLQAVKLLALYLSGDKESAIVSLKEWLSDSAVGSNPVLRLIAGIIFMHEQDYTEALKHTHSGGTLDLHALNVQIFIKMHRSDYAEKQLKIMQQIDEDHTLTQLANAWLDIAVGGSKIREAYLIFQDFAEKYPMTGMVLNGKAVCCMHMGSFDEAETLLLEALNKDAKDPETLANLIVCNLHLGKPSSRYLSQLKLSHPDHVLVKRAVSAEDNFERALQAVA

SEQ ID NO: 31388 - protein, 372 aa, Oryza sativa
MDPAAAARGQAEQWMRVAEKLLVARDLEGCKEFVSQALGTDPHVPGANDLLAAADVLLAAQRRRIPNGHPDPYAVLGLDPSTPASRRPDAIHAQYRRLSFLLNRSHPDRPCSLSFAEAARLVADSWAFLSDPILKSALDAELDAAAAAAAAAAARAYHPPAPMQQPQPQPPPQPTPPRAAPLPTPPRAPPQSTPPRAAPQSTPPQRVAPQPPATAAAPPIEPVAPPSPTFWTVCMSCCHIHQYDRLYEARKVLCPSCRQPFVAEEMAEPPPIVPGTDMYYCTWGFFPVGFPGCPGFEKLISSQQHGTDQPNTPWLGTTGGAEADGVAGAENGAPVSAAVEVQSVPKPAKPVRVKVGAKKRGRPKGSKNKKNL

SEQ ID NO: 31389 - protein, 250 aa, Oryza sativa
MLLIESDSWGPQMDVSLHARLQEMKQSDRIHVLPKVFLLSAAESDKVKKIHAVDSVIPKPLKASALAACLFQALGITQPSHEKRDDSGSLHGRDGSGSLHGLLLGKNILVVDDNKVNLRVAAGTLKKYGAKVECVESGKDALSLLQVPHKFDLCLMDIQMPEMDGFEATRQIRAMEGKANEQADDSESGSEIAAKTAKWHLPILAMTADVIQATHEECTKCGMDGYVSKPFEEKQLFQAVQKFLGPCVSS

SEQ ID NO: 31390 - protein, 381 aa, Oryza sativa
MFGEDHKDLRRRIAPNFTPRALSTYAAIQQRVILSHLRRWLDRSAANGGKAEPIRVPCRDMNLETSQTVFAGPYLTKEAREKFERDYNFFNVGLMALPVDLPGFAFRSARLGVARLVRTLGECARASKARMRAGGEPECLVDFWMQETVREIDEAKAAGKPPPAHTDDEELGGFLFDFLFAAQDASTSSLCWAVSALDSHPDVLAGVRAEVASLWSPESGEPITAEKIAEMKYTQAVAREVVRHRPPATLVPHIAGEEFQLTEWYTIPKGTIVFPSVYESSFQGFPEPDTFDPERFFSEARREDVVYKRNFLAFGAGPHQCVGQRYALNHLVLFMALFVSVVDFRRDRTEGCDEPVYMPTIVPRDSCTVYLKQRCAKFPSF

SEQ ID NO: 31391 - protein, 405 aa, Oryza sativa
MATQTRPLVSVKALEGDMATDNSSSLALAEVFRAPLRPDVVRFVHRLLSCNKRQPYAVSRRAGHQTSAESWGTGRAVSRIPRVPGGGTHRAGQGAFGNMCRGGRMFAPTKTWRKWHRRVNVHLRRVAVASALAATSVPSLVLARGHRIETVPELPLVISDSAESIEKTSQAIKILKQVGAYADAEKAKDSVGIRPGKGKMRNRRYINRKGPLIVYGTEGSKIVKAFRNLPGVDVANVERLNLLDLAPGGHLGRFVIWTESAFKKLEEVYGTFEAPSLKKKGFILPRPKMANADLGRIINSDEVQSVVKPLNKEVKRREKRKNPLKNVAAVLKLNPYFGTARKMATLAEAARIKARKEKLDSKRTKLSPEEAAKVKAAGKAWYKTMISDSDYAEFDNFSKWLGVTQ

SEQ ID NO: 31392 - protein, 12 aa, Oryza sativa
MSHVFSLYSHLI

SEQ ID NO: 31393 - protein, 305 aa, Oryza sativa
MQLPLQLSGSFIRAPVKHELVKPTQSGSFQVLSREQNGTVNTAKESTSNPASPVLGRSYSVEPLRKPIVNQKLKGVANGLPLQLQGSFGERKSSAKDKHKFFELLRSKSLNGSCTSTVSSSTLLDEQNNSCLELFDSGVKCMEHGSSSCEEANSCEGSQQHLSDNEEINPPWEPHDVFDEGMQEVLSDNRDFNSSSEIADTQDVYMKPHTNNAGSSPSIIPAEIYDGSMGSNCSDDETVMLFEPIGTGEEESYPAQDRPSPEEMAFLVSLGWKEDEIVPPLKQEEIADCLRHNVRLQQKLEECRG

SEQ ID NO: 31394 - protein, 327 aa, Oryza sativa; identical to SEQ ID NO: 31344

SEQ ID NO: 31395 - protein, 242 aa, Oryza sativa
MLFYGPPGTGKTMAARELARKSGLDYALMTGGDVAPLGSQAVTKIHQLFDWAKKSNRGLLLFIDEADAFLCERNKTYMSEAQRSALNALLFRTGDQSKDIVLALATNRPGDLDSAVADRIDEVLEFPLPGEDERSKLFKLYLDKYIMKAGEKHEKSWLRFFRGQPQKIEVKGVTDDLIREAAAKTEGFSGREIAKLMASVQAAVYGSKECVLTPDLFREVVDYKVAEHQQRRRLAGYEQKNA

SEQ ID NO: 31396 - protein, 239 aa, Oryza sativa
MKQSFDIRQVIARIVDGSEFDEFKKLYGTTLVTGFARICGQPVGIIGNNGILFTESALKGSHFIELCAQRNIPLIFLQNITGFMVGSKSEASGIAKAGAKMVMAVSCSKVPKITIIVGGSFGAGNYGMCGRAYSPNFLFMWPTARISVMGGIQAAGVLAQIEKNNRKRQGVEWTKDEEEAFKAKVVEAYDKEGSPYYSTARLWDDGIIDPADTRRVLSLCLSAAAKPVPEDTKYGVFRM

SEQ ID NO: 31397 - protein, 326 aa, Oryza sativa
MIQSQRPPVAAGKQQQAAAPYVHPLVRRSSSLLSQKSLEICTESLGSETGSDGFSDADGSTDRSCPASDDDSDGGAEEVAARASPPRAFPPPLPSLARRTVGAVQMTQDRRDGRLVVKAVPVPSATLFRAQRCGGRLLLSFADTAAPSSDEDDENNDQEEPEQQADEVAHDEEEEEDDEDDEEEVEVVDRGTIVEVKVSTQPQARSNGGGSVGPRVHRSSLVINKFVNAEPAIAASDISDTAATAPNPPRRPTGSTTTAAAALVAASSLSATSAPSGSDNPGGESKLLMTTCRRRRSKEELMNHMRRCGQLSGKLFIWEPRIATSS

SEQ ID NO: 31398 - protein, 310 aa, Oryza sativa
MEEVEGQYEEVIFDHLHATAFQYTSLGRPILGSAENVKSITQEDLQKYIETHYTAPRMVITAAGAVKHDDIVEMATKLFNDLPTDPTTTSMLVSTQPACFTGSEVRIIDGDMPLAQFAVAFNGASWIDPDSIALMVMQSMLGSWNKSAGGGKHMGSELVQRVAINDIAESIMAFNTNYKDTGLFGVYAVAKPDCLDDLAFAIMQEISKLSYRVTEEDVIRARNQLKSSIQLHLDGSTAVVEDIGRQLLIYGRRIPIPELFARIDAVDASTVKRVANRFIFDQDIAIAAMGPIQGLPDYNWFRRRTYMLRY

SEQ ID NO: 31399 - protein, 112 aa, Oryza sativa
MNAYVASNCASLQSISPPRREMSFLALRESTHGPQTNRACVVGVEPPSRRLLAPHRKTYSQNHPPGHGLIPPMPPIPPLPHKPRHPLRRNARRPTEHRRCEVDPRLRRWRAR

SEQ ID NO: 31400 - protein, 485 aa, Oryza sativa
MAGATAAAVSSSFLALALLSLCAAAAGGSPQLDAEAARQQEADRVTRLPGQPAVRFAQYAGYVTVNETHGRALFYWFFEATAAADKKPLVLWLNGGPGCSSVGYGEAEELGPFLVQKGKPELKWNKYSWNKEANLMFLESPVGVGFSYTNTSSDLQQLGDKITADDAYIFLLNWFKRFPQYKSHDFYIAGESYAGHYVPQLSEKIFDGNKQGPKENYINFKGFMIGNALMDDETDQTGMIDYAWDHAVISDRVYADVKKYCNFSMENVTDACDSALTEYFAVYRLIDMYSLYTPVCTEVSSSAAFGQRQVAVHGAAPKIFSKYHGWYMRPAGYDPCTSDHAEVYFNRADVQEALHANVTNIGYNWTHCSDVIGKWRDAPFSTLPIIRKLVAGGIRVWVFSGDTDGRIPVTSTRLTLNKLGLKTVQEWTPWYDHQQVGGWTILYEGLTFVTIRGAGHEVPLHAPRQALSLFSHFLADKKMPPTAFP

SEQ ID NO: 31401 - protein, 268 aa, Oryza sativa
MQNPPSHPVDLPLAAAPPPVKAPTPRPPTPASLQPESPGVFFTAAAAAAPVGSSHRRIAIAVDLSDESAYAVRWAVANYLRPGDAVILLHVRPTSVLYGADWGSVDLSLPAANPNPSGDPPSAEDDAEAAARKMEDDFDAFTASKADDLAKPLKDAGIPYKIHIVKDHDMKERLCLEVERLGLSAVIMGSKGFGASRRTSKGRLGSVSDYCVHHCVCPVVVVRFPDDGVAEGGEAGGASELAVGEEVLHPVPEEDAEYHDATEEHKGN

SEQ ID NO: 31402 - protein, 309 aa, Oryza sativa
MMLPRLLLLVVASALPLASVAAGAVGVGEGFCSAEPSAASGGCSGVRPPLYWKATNPTLAPAHLQDLPGFTRSVYKRDHALITPESHVFSPLPDWINTLGAYLISPAIGAHFTMYLAKMHDGSKSALPPKGVERLIFVLQGSILLSEESGNTHTLLVDSYAYLPANMKHSVISDEVTTLVIFERRYTTIEGYHPDLIVGSTDKQPLLETPGEVFELRKLLPTSLPYDFNIHIMDFQPGEYLNVKEVHYNQHGLLLLEGQGIYRLGDSWYPVQSGDTIWMAPFVPQWYAALGKTKTRYLLYKDVNRDPLI

SEQ ID NO: 31403 - protein, 383 aa, Oryza sativa
MVFIPSSDPQWKALRGIHASHVFTPRVLAAVRPIRERKVGDLIAYLRAHAGEEVLVGHAMYTGILNMVSFSYFSVDIVDMGSQMARELREVVDDIILVVGKPNVSDFYPFLRPLDLQGLRRWTTKRFNRVFSIMGDIIDRRLAHIRDNKPRHDDFLDSILELMAAGKIDRVNVLNMLFEAFVAGADTMALTLEWVMAELLKNPSVMAKARAELRDVLGDKEIVEEADAARLPYLQAVLKEAMRLHPVGALLLPHFAMEDGVEVSGYAVPKGSTVLFNAWAIMRDAAAWERPDEFVPERFVERTPQLDFRGKDVEFMPFGSGRRLCPGLPLAERVVPFILASMLHTFEWELPGGMTAEELDVSEKFKTANVLAVPLKAVPVLIK

SEQ ID NO: 31404 - protein, 16 aa, Oryza sativa
MYKKNFSVGSLLNTKI

SEQ ID NO: 31405 - protein, 13 aa, Oryza sativa
MAAKQAAFLRYCR

SEQ ID NO: 31406 - protein, 395 aa, Oryza sativa
MLPTQSVGAMPMEIVTRRDKEGLRCNGADGEKLPQLLDSPLPTPRRSCASADAASVRCRREASPLRTQVPFSWESSPGVPKRSSACMHMAQEIMPPPKPPPGRWKQCPGSNWCGYGNSTAASSDDDDASFSDALDRVSTPDQRVGSFDRITSKRFEDIFLGRATSFVNDRSSRRAPAEASLATPSSSSGRGPKHWRRRTTRRDHDGQQPTARQSNDHPVQVQLLPRININGRDEQMSPRACGLMVFFPWSAKPAVCGFRSPPAQYAPSPLAGASNPSSSQSRRFVTLRDAMQEENKTGSGGRDLPRPRGEKRSREEWQAASRGWGVSSLLDASKKYCTDARKALSKLSIGLGTDSGSGSGSPRVGSRERKCGKQDPSSTMPAMATKLTQLRTSRN

SEQ ID NO: 31407 - protein, 3 aa, Oryza sativa
MLS

SEQ ID NO: 31408 - protein, 7 aa, Oryza sativa
MYSSIIV

SEQ ID NO: 31409 - protein, 35 aa, Oryza sativa
MARRQSGGRRLGRLVAVLLGPNIGISTHFLMKTFI

SEQ ID NO: 31410 - protein, 339 aa, Oryza sativa
MIMATVYVTIIMLLIWETSIVKVLSFVITFLSLELVFFSSSLSSVGDGGWALIIFASGILMVMFIWNYGSKLKYDSEVKKKLSKDLMRKLGPNLGTIRAPGLGLVYSEIVKGVPAIFGHFLIALPAIHSIIVFVCIRNVPVPVVPQTERFLFQRVCTRGYHMFRCIARYGYKDKNQESQSTFERLLIEGLEKFIQREAVELSLQSGDDIDSDEEPPTPSRTIVAPNGSLYSLDVPLLADFVPSAEVIPEASCSTPQHDPVVDYTQNLELELAFIRQAKQSGAVYLIDNPIVKARKNSWFFKKLIINYFFAFLRNNCRRAMMSMSIPHTNVMQVRLTSYV

SEQ ID NO: 31411 - protein, 157 aa, Oryza sativa
MSSKLVTSPLKSMEQGHLEQPLRDPQAPAEQHDMGLSPLTLLGFAFLTFNSGMAVYRSDRDLATIFFVVFSYVDLVSLFYFLRLFEKTPPESPRRHHIKTAVWLLTTMLTAVFSYKVAAIMPFPVQVLVWAMAAATVLGGFYAFFLHSDEKKPIEVT

SEQ ID NO: 31412 - protein, 438 aa, Oryza sativa
MDAKDILGLPKTAFPSVQEKKPRAPKEPQRKPDGVSREVYALTGGVGMAPLMPTIEASHLKRRPAVEKEKIAWQWLPFTSSARTDNLQLYHWVRVVNGTPPTGDYHFAKYNKKADVLKYTDEEYEKYLTDPAWSREETDKLFELCERFDLRFIVIVDRFPTDRSMEDLKSRYYSVTRALLIARARSFDEVAGNPLVKETFNAAHETERKRALSALLSQTKQQERKDAEILAEAKRIMETRAASKHTEEAGALAHFDNVDGVSPLSNTHPLSTATLPAAAVNNSIPASLRMLRVYLRTQALDQMVQAASASAGFRVIKRVDQTLQDLGVNLKPKVPTKAVCVEHLELRNEILTLLNLQKQLQNKEAEVSANRENSFTEAPSTPKRANRDVDRPFVPDTVGFAGERAGKRDHKRKTTGRFIDAPPSPPQSKRPRKLKASD

SEQ ID NO: 31413 - protein, 486 aa, Oryza sativa
MAPWRAAAMASSQLARRAARRLLSSQHRRHCAAPACPWLLGSAPPVLAPSPVAAAAAGDRRGFCSVRRFTGGSNAAAAVEEAENGLVAGGDQAIDFPGGKVSFVAEMNFLPESQRDRINCYRVLDDDGRTISGSRFQEVSKELALKMYNEMATLQVMDTIFFEAQRQGRISFYLTSHGEEAINIASAAALTIDDIVLPQYREPGVLLWRGFTLQEFANQCFGNKLDYGKGRQMPIHYGSNRLNYFTVSSPIATQLPHAVGAAYSLKMDKKDACAITYFGDGGTSEGDFHAALNFAAVMEAPVIFFCRNNGWAISTPTSEQFRSDGAVIRGQAYGMRSIRVDGNDALAVYSAVHTAREMAIKEGRPILVEALTYRVGHHSTSDDSTKYRPVDEIEHWRTARDPISRYRKWVQGNGWWCDEDESELRNNVRQELLKAIQVAERMPKPPLAELFTDVYDEVPSNLREQERLLRDTIKKHPADYPADVHI

SEQ ID NO: 31414 - protein, 735 aa, Oryza sativa
MEGVRLMLARVLLVLQLVVLVVILSPLAVFYLFGLLITAGLSLWRLLQRGYGAGEEAANLAPALNVLYSLALVQGALFFYYFTSRLLGRRLANLVAGVYSFGGEGEEDDGGRTSVVEYMRQTRNGCEKDPSSVRGRNLVTFAVTMMKESSSSSLSSGDYSSGARILDKLLSQAWLREQHELIRQLVGSSTDLMDKLLQTLRCTGTRDRGVREHAARIVAHLAGEITLARFPQGIRCIYSLLTTPRNQQQDDDNDDDDDDSAQSSDHYKKLMVQGLVILHKLAAAEHNRRIIINSTQGRQLLSMAMAPVSADLLHRIDHEAWNDIVACSLQLMCRLVTAPGETGDKLRSQVLNDKDAIGTMERILNCDGCNEKRLYILAINILTQLPMAAKNKVVDEASSMSVESRRKFTKLLLLIYTDEEKDAFMRQMAGEALAMLSERSKSDATIILKASDSTLKDLTAMLLDVNSNRGYRICAAEILEHLYIRYTKQDGYLNNLTEAMKDVLPKVLGEIFLVSWTHKEKQPGMTEQGTEGVNFSAQKADIESQDPVACQHEKVKEENEKVKEENEKVKEQDEKVKEQTVDMKLYAALLSLSEAIFQRLVNDDKDLAELTDKIAPGGGTAFSFAGKLKEMVEGNSEQATANCLRMLKITTRMIISLINLNGAKVGADLESLMHSLLKASEKMLELEGFMIFSSSDRTESANPANILASLVKEAQELLEKKRQAQTTPAPSMETS

SEQ ID NO: 31415 - protein, 407 aa, Oryza sativa
MATPKLSPVSPVRPEDKQRASSSSSSGAVAAPLRVQDDTAVEEYEQYLRLPELARLWKDRCCPEWADEGLVKPALQALEITFRFISVALSDPRGYASRRELARRLEALAAREVELVAALCEGEQCPPLAELSASKGVLPRERSASEVWKIPGSAAAVVCQVSEASLLPRLAAWDKSETVAARIKYAIESQMQGCVFTRLNNRIEARNWEAAASDCWILERVWKLLADVEDLHLLMDPDDFLRLKSQLAIRAAPGSDASSCFRSRALLHVANATRDLKKRVPCVLGVEVDPNGGPRVQEAAMRLFHSRRRGEGEEAGKVELLQAFQAVEAAVRRFFFAYRQLVAAVMGTAESSTNRALFSPAEEMDPLAQMFLEPPYFPSLDAAKTFLADYWVRRMAGDGDSASSRRS

SEQ ID NO: 31416 - protein, 370 aa, Oryza sativa
MATTKSFLPPPFIALSSNPRPTTLAPTPNPRPRRRNSLAICSASASGDPSPTPEAEGGGNPLLALWRRTLHPLGDYGFGKRSVWEGGVGLFMVSGAALLALALAWLRGFQLRARFRKYQAVFEFTQACGICVGTPVRIRGVTVGNVVRVDSSLKSIDAYVEVEDDKIIVPRNSVVEVNQSGLLMETLIDITPKDPLPTPSVGPLDPDCSKEGLILCDKERMKGQQGVSLDALVGIFTRLGRDMEEIGVHKSYKLAEKVASIMEEAQPLLSRIEALAEEIQPLLSEVRDSDLVKDVEIIAKGLADASGDLRRLKSSMLTPENTDLIKQSIFTLIFTLKNIESISSDISGFTGDDATRRNIKLLIKSLSRLL

SEQ ID NO: 31417 - protein, 531 aa, Oryza sativa
MNVNAHSFSYNFSVYKHMQNLGVPPDLTSYNILLKTCCNAKEYKLAQEIYEEIKKKEQNGLLKLDVFTYSTMMKVFADAKMWKLASDIKQDMQSAGVRLNLVTWSSLINAYANSGLVDRAIEILEEMTRDGCQPTAPCFNIILTGCVKSCQYDRAFRLFYDWKEYGVKISLSPEQKGCFGDNFSYCEEHTSNSSTLLVVPFRPTVTTYNILMKACGTNGERAKSVMNEMRRNGLCPDLISWSILMDIYGSSQNRDGAIQALRRMQRVGMKLNVTAYTVAIKACVENKDLKLALHLFEEMKAHQLKPNLVTYKTLLTARNKYGSLQEVQQCLAIYQEMRKAGYQANDYYLKNLIVEWCEGVLSSGNGNREYYQLDQRKESFKLVLEKVTTFLQKDVDQNQTVDVRGLSKVESRVVVLSVLRKIKEKYLLGRAVQDDVVIITGHGKASSAKAETSVVEVEHAIVAVLTDELGLEVLIGPGSRPASSKPTVPARSRSHLDLASKHFSRRPQGMIKIPINSLNHWLKRKAVRTVQ

SEQ ID NO: 31418 - protein, 594 aa, Oryza sativa
MEHFQKNGHDNLDYSEAPVISRHLSDEINWSAQDMCHQHDESFRGCMQSNMFIRDRVYYGYAEEEGSSFSDSEIGSPTSRHSWEYIYRFSNPYFGSTLSHASCSPDSLVTREAKKHTSDRWPTVSSNEISQEKVLVRRSLSTLGEMLAMSDMKKKGAAEQVVTNTSNQLCSNEPRLAVPSKCSVDGDGESSLRKISRSKSVPVSSAAFDSLRLDDGCSNPEHEEPTSSKEEIKPKNGKSSLKGKISSFFLKRKKSGKDKLAPSPLGALGTRVPLASNASIVSSDVSQTEWTSLQDDVASENLEKFDIAPTVVPVNEPEATSSSKPPIITLEKALSFEIRNSHFDQPSPTSVLDASFEDASEKSPNSSEHAIIAKQEPLSRSLPIGSIARTLSWDDSSQEATLCSAKGDSHEQDQHEFVEKILSSVGFDNEKTSDIFVRWHSHDFPLGTGVLDQFLERKVEDAKCRERRSNQRLLIDSVNAALLDIGQSKLWGAYPCTDPQVNNARRVATGEVLVVDEVWRLVKGWLSDDDGEKHMVNAEDNAGLVADWVVGKEIQGRSWPEALRLEVDEISTEICGEVLDELVGEAFSELVGCH

SEQ ID NO: 31419 - protein, 340 aa, Oryza sativa
MAAAMALQVVAGGGCCCQRPVLGAGRRRLAAARAVASDAAAAKVSEEEGKVRLGGSEVAVSKLGIGAWSWGDTTYWNDSEWDDRRLQEAKAAFDTSIDNGMTLFDTAEVYGTALMGAVNSESLLGGFIKERQEKEQIDVAVATKFAALPWRFGRGSVLSALKKSLDRLGLSSVELYQLHWPGLWGNEGYLDGLADAYEQGLVKAVGVSNYNEKRLRDAYARMKKRGVPLAANQVNYSLIYRTPELNGVKAACDELGITLIAYSPIAQGVLSGKYTPEKPPTGPRANTYTPEFLTKLQPLMNRIKEIGESYGKNPTQVSLNWLTCQGNVVPIPGAKNAGQA

SEQ ID NO: 31420 - protein, 522 aa, Oryza sativa
MGACFSSHTATAAADGGSGKRQQRKGDHKGKLPDGGGGEKEKEAARVEFGYERDFEGRYQVGRLLGHGQFGYTFAATDRASGDRVAVKRIDKAKMVRPVAVEDVKREVKILKELKGHENIVHFYNAFEDDSYVYIVMELCEGGELLDRILAKKNSRYSEKDAAVVVRQMLKVAAECHLHGLVHRDMKPENFLFKSTKEDSPLKATDFGLSDFIKPGKKFHDIVGSAYYVAPEVLKRRSGPESDVWSIGVITYILLCGRRPFWNKTEDGIFREVLRNKPDFRKKPWPGISSGAKDFVKKLLVKNPRARLTAAQALSHPWVREGGEASEIPVDISVLSNMRQFVKYSRFKQFALRALASTLKEEELADLKDQFDAIDVDKSGSISIEEMRHALAKDLPWRLKGPRVLEIIQAIDSNTDGLVDFEEFVAATLHIHQMAELDSERWGLRCQAAFSKFDLDGDGYITPDELRMVQHTGLKGSIEPLLEEADIDKDGRISLSEFRKLLRTASMSNLPSPRGPPNPQPL

SEQ ID NO: 31421 - protein, 439 aa, Oryza sativa
MFLRLGTSLPVLVASSPCAAEAILRTHGDVFASRPRTVLADIIFYGSRDIGFAPYGEDWRQARKLVNTHLLSVNKVQSLWLAREEEVKIVMEKISKAAFAREAVDIGQILCSFTNDLACRVVSRKLVGDDRQKKLLQELVNKTIKLLSIFNVEEYFSILARIGVIGKVMCARAERLKKKWDMLLKKLIADHESKCDSYLVCGRNKDDFVDILLSVRKEYGLTEEHVKAILEDVFIAGTQSSARVIEFTFAELMRKPHMLKKVQDEVRACIPNGQAIVSEVQVNNMTYLRAVVKEVLRLHPVAPLLATHVSMADCNINGYMIPSGMRVLVNAWAIGRDERFWYDPEKFMPERFVESVNGSATASVNFWVNNYQYLPFGSGRRMCLGMNFAMAVIEITLANLLWKFDWALPAHAMEVDMSEEFGLSVRLKEKLLLVPKQHV

SEQ ID NO: 31422 - protein, 292 aa, Oryza sativa
MTRVPKVQEIVSEIFGKSPSKGVNPDEAVAMGAAIQGGILRGDVKELLLLDVTPLSLGIETLGGIFTRLINRNTTIPTKKSQVFSTAADNQTQVGIRVLQGEREMATDNKLLGEFDLVGIPPAPRGMPQIEVTFDIDANGIVTVSAKDKSTGKEQQITIRSSGGLSEAEIQKMVQEAELHSQKDQERKALIDIRNNADTTIYSVEKSLGEYRDKIPAEVATEIETAIADLRSVMTSDDIEKIKANIEAANKAVSKIGQHMSGGGGGAGGSETGGSQGGGEQAPEAEYEEVKK

SEQ ID NO: 31423 - protein, 570 aa, Oryza sativa
MDRTSQWVSSPDIPADLLIRIADDVFPLLKGVMVPKCGYIRKAVAAARGGATATVDLDLSALPGGADAFDKAARYCYGANFEISVRNAAALLCAAAFLDMHPTDGGLARRVEEFLAKVGLRTLPGAVAVLRYCEGLLPAAEEIGVVQRSADAIALRICNEVLFPTRSPPEWWTAELAALSPASFHKVITALRCRRAEPEVLVAAATAYAELLLAEVLAADGHAADHSGMHRALVESVVAVLPSTDDAPLPAAFLCRLLHVAITICASAKTCRDLELRVAAVLDQATAGDLLTVALDSAGERVQNVDTVRRIITAFVERDSAASSGGANGRSRRASLSGAGALQGGGGAMQTVAKTVDEVAAEIATEESLPISKFVGLAGAVPKEARATHDCLYRAVDIYLKAHPALEEMEREKVCSVMDPLKLSYQGRLHASQNNRLPLQAVLSALYYDRLKLRSGDEGGGGWGAYGNGVMRSSAAGSARKQAKEGASLARENEALRSELARMRAYVSGMQQQSKGSSSSRGKKGSWLRTLSRLNPFKAGIWGKDTSGIVDGKTDAMNSVKSKRRRFSIS

SEQ ID NO: 31424 - protein, 452 aa, Oryza sativa
MDHAELTTEQVLKRDIPWESYMANKLISGTCLQLLRRYGHKPESQRGPLLDEDGPSYVRVFLNILRNISKEDTVEYVLALIDEMLAVNPKRAALFYDNSLSGEDIYDPFLRLLLKGNWFVQEKSCKILTQIISARPKMQNGIVPNGEASNSKSKLTSTQDVLRGLVDWLCSQLRNPTHPNCSVPTAMHCLATLLREQYVRALFVQADGVKLLIPLISPASTQQSIQLLYETCLCIWLLSFYDAAVDYLSTTRVMPRLVEVVKGSTKEKVVRVVIMSIRNLLAKGAFAAQMIDLGLPHIVQNLKAQAWTDEDLLDALNQLEIGLKDNLKKLSSFEKYKQQVLLGHLDWSPMHKDPSFWRENINNFEENDFQILRVLMTIIDTSADTTALAVACYDLSQFLQYHPSGRIVVADLKAKDRVMKLMNHENAEVRKNALLCVQRLFLGAKYASFLQT

SEQ ID NO: 31425 - protein, 362 aa, Oryza sativa
MCGGAILSDLIPPPRRVTAGDLWLEKTKKQQQQKKKNKGARRLPLRQEEEDDFEADFEEFEVDSGEWEVESDADEAKPLAAPRSGFAKGGLKNTTVAGADGPAARSAKRKRKNQFRGIRQRPWGKWAAEIRDPRKGVRVWLGTFNSPEEAARAYDAEARRIRGKKAKVNFPDGAPVASQRSHAEPSSMNMPAFSIEEKPAVMSAGNKTMYNTNAYAYPAVEYTLQEPFVQIQNVSFVPAMNAIEDTFVNLSSDQGSNSFGCSDFSQENDIKTPDITSMLAPTMTGVDDSAFLQNNASDAMVPPVMGNASIDLADLEPYMKFLIDGGSDESIDTLLSSDGSQDVASSMDLWSFDDMPVSAEFY

SEQ ID NO: 31426 - protein, 176 aa, Oryza sativa
MERTTSNMTYKAWRREPEVGPIMYCSRTIFEDATPELVRDFFWDDEFRLKWDPMLAYFKILEEFPQNGTMIIHWIKKFPFFCSDREYIFGRRIWESGKTYYCVTKGVPYPALPKKEKPRRVELYFSSWRIRAVQSPKQDGQQSACEVTLVHYEDMGIPKDVAKVGVRHGMWGAVKK

SEQ ID NO: 31427 - protein, 479 aa, Oryza sativa
MKMAHMVTNCSFSPSPAVKTYSKSPGYCCNVTQFQSSKCSNLVLKSCTATRPNRPFVARASAAVQGQTQTPLTGSQQASGHSSSKPKKVMVIGGDGYCGWATAHHLSNKGYEVAIVDNLVRRLFDHQLGLDSLTPIASIQNRIRRWKALTGKTIQLYVGDICDFDFLSEAFKSFEPDSAVHFGEQRSAPYSMIDRSRAVFTQHNNVIGTLNVLFAIKEFSEECHLVKLGTMGEYGTPNIDIEEGFITITHNGRTDTLPYPKQASSFYHLSKVHDSHNIAFTCKAWGIRATDLNQGVVYGVRTDETAMHEELSNRFDYDGVFGTALNRFCVQAAVGHPLTVYGKGGQTRGYLDIRDTVQCVELAIANPAKPGEFRVFNQFTEQFSVNELAKLVTAAGAKLGLEVQTKSVPNPRVEAEEHYYNAKHTKLMELGLEPHLLSDSLLDSLLNFAVQYKDRVDTAQIMPSVSWKKMGAKPKTVSV

SEQ ID NO: 31428 - protein, 544 aa, Oryza sativa
MVEEEGSSEHFPAIKIYDEDVNMKLLICGAPCILDASLLGSLEDGLNALLNIEIRGCRLQNRVSAAPPPLHAETLPHGVVTMRCDITTCSSSHVSLLVSGSPQTCFDDKLLENHIKKEIVEKGQLVRAVLVREDDKPSSVEPLTSISVASGASTFEVWMTLPKWAGQVLKYLAPEISYKSLVPLGIACVNGTPVSSFDRQDVDRLLFFCKNEAIVNGLYSHLPRWSASLVKDRLKGTPESKSSTFSANGVGEYQKHPMKGTSLVVKPKLKSAKMRPIPHSSKRQMHPFVGIPPSFIHDASQVKPSLPAPPVRHNALPVAPTTQRKLSSGTSRVEPAVPLNPLPMKKHGCDRLPIGICSEEDFLKDVMQFLLQRRHTRLVPQGGLAEFPDAVLNAKRLDLYNLYKEVVSRGGFYVGNGINWKGQVFSKMSNHTVTNKMTGVGNTLKRHYETYLLEYELSHDDVGGECCLLCHSSAPGDWVNCGLCGEWAHFGCDRRQGLGTFKDYAKTDGLEYICPHCSLANYKKKPPPPESANGFRIASAQRNI

SEQ ID NO: 31429 - protein, 203 aa, Oryza sativa
MATYYSSPGNERDSQAMYPADSGNSSYPVPSAIGNMLYPGNGSSGPYTEFSGIIQHQQNFMELPGHPTAISQDSSSREPNMVASYMDQRSFGPAKDMRNEMLMHLMDGAHNAGADLIHNDTHSSAQIEFGLLNNHNSMSVAPAPGQGLSLSLNTHILAPSYPYWSAKTELLTPHSYHGDDNRMKNMQSEASQAIRNSKYLKAL

SEQ ID NO: 31430 - protein, 332 aa, Oryza sativa
MELDFNSDKKDILITGAHRKVNTNKADKVATQNYVSTRLRYSLRAYTSVLYLHIPDNFRIVLRGHDVESHNVINDLMYPECVLYKPQIAGLAELSAITTIGFVKGAPEIDVQGFNVYHKNRLIAPFWKVANNSYGKGRGVVGILEANFIKPTHDKQDFEKSVLYQRLESRLKEMTYEYWDLHCHRIGYDNKKLPKSSRALNRANQMNAGSSPPIVPRQLLAADIPTSSCAVPTFMAPALRQKQMGLKRNIDALGSKADSADQDGSHLDVSQRRRFNEYRTLTLENDKCLQYEESAKQLALKEQKLRSQIALERKKYEELLQELRSLDVKTEK

SEQ ID NO: 31431 - protein, 315 aa, Oryza sativa
MGGFYIAPAFMDKLVVHISKNFMTLPNIKVPLILGIWGGKGQGKSFQCELVFAKMGINPIMMSAGELESGNAGEPAKLIRQRYREAADIIKKGKMCCLFINDLDAGAGRMGGTTQYTVNNQMVNATLMNIADNPTNVQLPGMYNKEDNPRVPIIVTGNDFSTLYAPLIRDGRMEKFYWAPTRDDRVGVCKGIFRTDNVPDEDIVKIVDSFPGQSIDFFGALRARVYDDEVRKWVSDTGVENIGKRLVNSREGPPEFEQPKMTIEKLMEYGYMLVKEQENVKRVQLAEQYLSEAALGDANSDAMKTGSFYGSAPSS

SEQ ID NO: 31432 - protein, 342 aa, Oryza sativa
MNETADGAMQAPRNNQSVQRADSAVRNLLFQGSGHLFTEKDIIGIYRTPMLDQLGRSRYSLFQKEVQVTKNQRGNANERYAWLACTKGTMEEMMMNGALEIAKPLQGPMYGVGAHLAPANSSNICVGLSDIDENGIIRMMLCRVIMGNVEVVFPGSNQCQPTSESFDSGVDDLQRPKHYIIWDANVHKHIYAEYAVIIKVPYMNNGDTASNISEIRNSGALDNPTKDDSLQTIASSGDEQQACMLGRAPSPRSPSSPWMPFSMLFAAISAKVPRSDMDLVHKYYEEFKRRKISRPDLVKQLRQIVGDKLLVSTVVRLQQKLPPMAATEQAPRAPGRGGGASP

SEQ ID NO: 31433 - protein, 363 aa, Oryza sativa
MILKYGGVLTHAGRKQAEELGRFFRNNIYPGEGTGLLRLHSTYRHDLKIYSSDEGRVQMSAAAFAKGLLDLEGQLTPILVSLVSKDSSMLDGLEDASIEMDEAKARLHEIIITNAKAKNTNEPVEFPWMVDGAGLPANASQLLPKMAKLTKEVTAQVKLLAEDEDEKLALTNSFSRYDQAKAFGKTTIDVARIAAGLPCGSESFLLMFARWKKLERDLYNERKDRFDITQIPDVYDSCKYDLLHNAHLNLEGLEELFKVAQLLADGVIPNEYGINPKQKLKIGSKIARRLLGKILIDLRNTREEAISVSDPKFTEDEATFLPTKESEYQQNFKLEMRMEEDLVPQVRNHWIRKMKMIEKLNTA

SEQ ID NO: 31434 - protein, 353 aa, Oryza sativa
MSLQDEGAYKRTHVMPRRNPPPPPIEQSNSSLSHGSSKAGDAPLGAFWATQHAQGSQVADNRNSLFDEEPIKPSPSSKHNQSRGDISISAPGDRHGRSGQAVRGTPSNSVSNNGLASGANTNLFMESQSSLKTKESQPKSEKDPFNSFVADFEANNLHSGTNVASKESELEAEVSNLKEQLKKTSSEKAEMTAKFEKLSAICRSQRQEIQELKRTLAETTPPSSKVSSRLPDSGPQRKEKIEGTVWELEQGMLANSLPSSEAKTWQAFPDPKSQPAQVRPKVDHSTNGAQNLARNANSRQSPDGWGFGPDSFRTSPGSTAAQINRPTAQGSSSQRFSSGAAKKVEQPSGWAGF

SEQ ID NO: 31435 - protein, 364 aa, Oryza sativa
MCASATGVVRLQSRRKAEMFLVRTDGFSCTREKVTESSLAFTHPSTQQQMLMWKSPPKTVLLLKKLGDELMEEAKEVASFLHHQEKMNVLVEPDVHDIFARIPGYGFVQTFYTQDTSDLHERVDFVACLGGDGVILHASNLFRTSVPPVVSFNLGSLGFLTSHNFEGFRQDLRAVIHGNNTLGVYITLRMRLRCEIFRNGKAMPGKVFDVLNEVVVDRGSNPYLSKIECYEHNHLITKVQGDGVIVATPTGSTAYSTAAGGSMVHPNVPCMLFTPICPHSLSFRPVILPDSARLELKIPDDARSNAWVSFDGKRRQQLSRGDSVQISMSQHPLPTVNKSDQTGDWFRSLIRCLNWNERLDQKAL

SEQ ID NO: 31436 - protein, 462 aa, Oryza sativa
MSFRSIVRDFRDSFGTLSKRSFEVKISGFSGRHRGKSIGPSSELDDTPVVAQQSKWAGLPPELLRDVMKRLEEDDSNWPSRKDVVACASVCTTWRDMCKDIVRNPEFCGKLTFPVSLKQPGPRDGVIQCFIKRDKSKLTYHLYLCLSSAVLDETGKFLLSAKRSRRTTHTDYIISMDSKNISRSSSGYIGKLRSNFLGTKFIIYDTQPPYNARTLCSQERTSRRFSSRKVSPKVPTGCYPIVQVNYELNVLGTRGPRRMQCAMHSIPASAVEPGGIVPGQPKELLPRLFEESFRSMATSFSKYSITDHSTDFSSSRFSEFGGGALQGQEQEQDGDDVNKERPLVLRNKAPRWHEQLQCWCLNFRGRVTVASVKNFQLIAAAPQPSSGAASEPSQAGQAAQQQTQPSQPSSSSSSSSSNHDTVILQFGKVAKDMFTMDYRYPLSAFQAFAICLTSFDTKLACE

SEQ ID NO: 31437 - protein, 244 aa, Oryza sativa
MSNTLLRVHPSELKIPYEYKRKRSCCMQLTNKTNQYVAFKVKTTNPRKYSVRHACGILPPRSSCDITVTMQAPVEMLSDYHCKDKFLAQSVAVGYGATMRDFVPELFTKAPGRVIEEFKLRVVYVAANPPSPVPEEEEEEEEDASPQSEVMSHGVKMTSVFDAVTVSTLTDGSADKVSSAEGVSVESMLVAEREYPVEENQKLQQQMELLRAARSSQQGFSAMFVLLVFMSSVCIGHFMKQIKV

SEQ ID NO: 31438 - protein, 876 aa, Oryza sativa
MFAMWPSMGSSPCAAGTSEDMPLDAYSGLGEAVEEPSQIMSVNPTEAEKTGKSSGELGSDDGAHQGSSMVPRSVVGSSLADRMLMALSLFRESLGSGALAQVWMPVEQEGHVVLSTCEQPFLLDQVLAGYREVSRHFVFSAKEEPGLQPGLPGRVFISGVPEWTSSVLYYNRPEYLRMEHALHHEIRGSLAMPIYDPSKDSCCAVFELVTRKEKPDFSAEMDNVCNALQAVNLKATKGSSNQKFYTENQKFAFTEILDVLRAICHAHMLPLALTWVPTSNGIDGGYVVGKDGASFSQSGKTIIRIHESACYVNDGKMQGFLQACARRHLEKGQGIAGRALKSNLPFFSPDIREYSIEDYPLAHHARKFSLHAAVAIRLRSTYTGNDDYILEFFLPVSCKGSGEQQMLLNNLSSTMQRICKSLRTVYEAEVDNVNAGTAAVFRKNNESCLPTGHTESSSHGDQSITGASFEDTSLANKPGVMEPELAEQVQPSSIGHAEKKRSTAEKNISLDVLRKYFSGSLKDAAKSLGVCPTTLKRICRHHGISRWPSRKINKVNRSLKKIQTVINSVHGVDRSLQYDPATGSLVPVVSLPEKLTFPSCDGLPTPSVGKTVEENSDLKSEEGCSLPDGSQRQSCQLQISDVKKSNEDEFHIGSGNSDFYGANATAKSNSEVTQGPLCPTGAFSALHLKGTDCTNPSSSLRPSSESTRNQIVGRNSPSIQQEDLDMLDNHEAEDKDHMHPSTSGMTDSSSGSASSHPTFKQNTRSALKDAASPALTVKATYNGDTVRFKFLPSMGWYHLLEEIAKRFKLPTGAYQLKYKDDEDEWVILANDSDLQECVDVLDSIGSRIVKLQVRDLPCIVSSSGSSTCLQLAAHSS

SEQ ID NO: 31439 - protein, 636 aa, Oryza sativa
MLSLLVHLFLANYSAGGITRYSLHMDDVLPFGPRPRPRRLWGSLSTLDHLHPYAKPRKIYPALDYHNGFIYAKIYGGFEKIQSSICDLVAVARLLNATLVIPEIQATTRAKGISSKFKSFSYLYDEDQFISALSSDVAIVRGLPKDLREARKKIKFPTVSPKNSATPEYYVTEVLPKLSKSKVIGIIINGGKCLQSILPATLEEFQRLRCRVAFHALKFRPEIRALGNQIVSRLRVSGRPYLAYHPGLLRDTLAFHGCAELFQDIHTELIQYRRNQMIKRGTVKEQLSVDSVSRKINGSCPLMPEEVGLLLQALGYPSTTIIYLAGSETFGGQRILIPLRAMYANLVDRTSVCSQRELSDLVGPEAPLASDMAHPPPPKTEKELVDEWKRAGPRPRPLPPPPARPYYAHEKVGWYGWIGENDTEPDPSPVEFRRQAHRLLWDALDYFVSVEADAFFPGFHNDGSGWPDYSSLIMGHRLYQTPSGITYRPDRKTISALFENVSDHRYHPPRNWTLAARQHLNNSASVEGIVKSAMLSKPVSFLAHPLPECSCRTPKSPGVQSTKDSHGRLLFGGEEECPDWMVRSLAMVSTKNNEPQNEDYDGDLPEDDSSQDTQQESDRSDMNKSSEQDEEMDPDD

SEQ ID NO: 31440 - protein, 502 aa, Oryza sativa
MWSALFSHLREVHKRSGVKEEKLIMKSPPAAGEAGCHKPQATATNKMTVLQSPLGLRTILTSLVAFFIVVSSVSLLFDRGQDAQAQLAVEQHQHQEVLLKQKPASAAVGEQKSVVVDQSSLRSQEAQVQWTSELQDVATDSGDGGFDGEEDCNWSLGRWVYDNASRPLYSGLKCSFIFDEVACDKYGRNDTKYQHWRWQPHGCNLPRFNATKFLEKLRNKRLVFVGDSVNRNQWVSMVCMVEHFIPDGRKMRVYNGSLISFKAFEYNATIDFYWSPLLLESNSDNPIIHRVEYRIIRADRIEKHANVWKDADFIVFNSYLWWRKQRDGMMMKVMYGSFEDGDAKLDEVQMVDGYEIALKKLTEYLGANINKNKTRIFFAGSSPAHSWASNWGGDDNNKCLNETEPIQIEDYRSATTDYGMMDKAKEIFGTLEPKGIHVQILNITQLSEYRKDAHPTIFRRQYVPLTKEQIANPSIYADCTHWCLPGVPDVWNEFLYAYIMHK

SEQ ID NO: 31441 - protein, 1098 aa, Oryza sativa
MEGAVASNVELDSAVFQVSSAQNRYEAIACSKGNTELIASGPFDQLVLHLEDARKFQSCSTAGTFKLSLSGNAKGSSWFTKSTIARFLNTINSPDASKSANGILHEISQLEETRKFHQSLYSKEQRNPMGGALSGGVFGTIGVEQQGNVGPNSSEATKNELLRALDLRLTVLKEEIFALLNRAVVSNMSTRDVSDLSSFVQHFGASEFSWLMRCLLLIPDCQPSEVSQQQSFPAEKDDKGENALHTRNISSHTIIQRPITNNVSPAKLAQIERESSTESDDSSESSAEDEAVVERSRPLMRSASPRRSASPMRRVQIGRSGSRRSTAIAIKSLSYFPPSQRIPLDKDDESGSCNGETDQPSRKSDNNVRRMSVQDAINLFESKQKDQNPDSQNKKAGLFATKSVLRRWSAGMGDSLNNNSEEKTIDSTSQSKSNNTGSDSEKDGAETQAEPGSASASNTVVTPSVEGFHTNMQGVAMPETETAVSSHTEISAEQTKSGQEENSDRAMASAEWNRQKEAELNQMLMKMMQVMPGKFSSANVTTTGITSTNEKKGGLQGQHKEKRDSKVRTDKGGRRPAKEASTRPLKETVGQKKAAITPKTGTAAEKRNSPVPQRARRNSSPPVLPKELTPKAPARKSSPKPSPAPVTRSSWSGGSLTKATTAQKTKSSPGTVSAPTATSRRRTPVAPSSSQPTSKVERSAQPVKNKKETVAASKPAIKGIEEKKTKTATKTSRLAKSTPISDEKSSAATRPNLYNKVAKKSSVVPLESKPSKKATGISQSAGTDAVKSKMPQLDDSSNDIGNITQAEDKEHSAVTTQPKTTKVLEADLAQPAHDVDENLEISLDNDLNIEKTENSAPSLATTEMDSSEQVEPHTEVQPPPEEDMGISSAAWVEVEHEEVTDVGENVVPEDVTSPSIEPLPSSSPRIRHSLSQMLQADSNEPEIIEWGNAENPPAIVFHKDSPKGLKRLLKFARKNKGDSNSNGWASPSVVSEGEDELEEPRGGNEGVNSSRRTFDGPKTNSILSAQSTTGSFNSTNSDRLRDRPGAAPSTKSSRSFFSLSNFRSSRSNESKLRWHAMFSRRYMDNWIVDPFQFGGQLM

SEQ ID NO: 31442 - protein, 509 aa, Oryza sativa
MGSFARKEHQFLAELGLAPRNPGSFACGAWGGSGPVVTSTNPTNNQVIAEVVEASAREYEEGMRACYDAAKTWMAIPAPKRGEIVRQIGDALRAKLHHLGRLVSLEMGKILPEGIGEVQEIIDMCDYAVGLSRQLNGSIIPSERPNHMMMEVWNPLGVVGVITAFNFPCAVLGWNACIALVCGNCVVWKGAPTTPLITIAMTKIVASVLERNNLPGSIFTAFCGGADIGQAISLDTRIPLVSFTGSTKVGLMVQQQVNARFGKCLLELSGNNAIIVMDDADIQLAVRSVLFAAVGTAGQRCTTCRRLLLHESIYRTFLDQLVEVYKQVRIGDPLENGTLLGPLHTPASRDAFLKGIQTIRSQGGKILYGGSAIESEGNFVQPTIVEISPSAPVVREELFGPVLYVMKVQNLKEAVEINNSVPQGLSSSIFTKRPDIIFKWIGPHGSDCGIVNVNIPTNGAEIGGAFGGEKATGGGREAGSDSWKQYMRRATCTINYGSELPLAQGINFG

SEQ ID NO: 31443 - protein, 353 aa, Oryza sativa
MHPRARIHADPAPEFDQFDCLPDPVVLLILNKLEDVRSLGRCAAVSKRFSGLVPLVSDVYVKIDRVVATDGDADDALNLSSAKPKNIFSHFFKLMLFTIVKPFHSMRNLNGTGRPLFPLAQHSPVHVLRNFSDVWNLRVELPSGDVGTEEGVLLKWRAEYGSTLRNCVILGGTLVDRKPIGAEHESSVEDNGSMPESFYTNGGLKLRVVWTISSLIAASTRHYLLRSIIKDHPTLRSLVLADADGQGTLYMGMEQLREFRENKLSASACSNRTQVPACNMKLKYAPYLELPGGMTLQGATLVVIKPSNDGGSGGHSSRKETEAFVSSAFDEPFRFAVKALMKRRTYLLEMNGF

SEQ ID NO: 31444 - protein, 750 aa, Oryza sativa
MDHSTSLLRLIFLALGAALVVLVVRSAFRLPGDIDTTTTSLFDDGNGGSCTRFSPWACRQGRGDPRSKPSKPRRPSHESDVPRHPLDPLTVREVNRVRELLRAHPLFASAPSSLFVHSLELDEPEKSVVKSWRKGADPLPPRRAVAVVRFRGESHVLGVDLSEGDGAVTPLPVPASGYPMMNMDEQTSLCFAPFKDEAFNASLLRRGVRASDVACLPISLGWYGPAEENRRLIKSQCFSTEGTANFYMRPIEGLTVLVDMDTAEVLHVSDRGAGIPIPAAANTDYRHGHSAPTPAEAQAQGRHGYQTVRVPSMEPPAGGPGFELVDGHTVRWGGWEFHLKPDARAGMVVSRARVQDPATGEHRDVMYKGMASELFVPYMDPTEAWYFKTYMDAGEYGFGLQAMPLVPLNDCPRHARYLDAVFVAADGRPYVRENMICVFERYAGDIAWRHSESPITGMDIRESRPKVTLVARMAASVANYDYIVDWEFQMDGLVRIKVGLSGILMVKGTQYSHMNQVHQNDNMYGTLLSENVIGVIHDHFVTFRLDMDIDGADDSFVKVAMARQNTGAGESPRKSYLKATRHVARTEKDAQVRLKLYEPSEFHIVNPMKKTRVGNPVGYKVVPAGTAASLLDPEDPPQKRGAFTNNQIWVTPYNKTEEWAGGLFVYQSKGEDTLATWSERDRPIENKDLVLWYTLGFHHVPCQEDFPIMPTVSSSFDLKPVNFFESNPTLGQRPTQENDLPVCAAAATTS

SEQ ID NO: 31445 - protein, 285 aa, Oryza sativa
MSKPVYPLVFRNPVSEAEASGMPEASNIGRTTPSDDSPVWRRSLASPELKFHNALSEFRKVEASPEPNTSSRREGFRWSNASSYDFGYDGDAIDISDHISVESQRSPTSSVRFLKCGLCERFLRQKSPWTSNRIVQNSDMPVAAVLPCRHVFHADCLEESTPKSQVHEPPCPLCTRGTDDEGCVSFSEPLHVALRSARRNQGNSFSLGGSGGSTSANPSRSDHGLKRNQSALVARRSGTMFRNRFKKQFSFKGRFGKDLFGGRVFKKVGSSSSSGQQDDRQQPKA

SEQ ID NO: 31446 - protein, 284 aa, Oryza sativa
MTPLDLLRKQPPTASSEILIKQLILAGGIANSMDHETRSAIASQLKMHCIVGSPGTSFKIPDAEIFLHAGIDASDISERTNSFSSVGQSEPEFPESSRKKLNSMQNAAKHLKILLRWPLRKEKKSSSGARNELDDDASSVDSVKSWSHGETPTPLRQKYSRMSSLFNNKRTMAARIGSPSPSMKKSFADGLAHGVMQPESPSGSGSWSSSSLVDRIEAVHLDKNGQASPDTSVVIRRTPKKHGSLNSRLMNQYFCIGAQGIAVEDSTTGQRSSRMFRSSLLSAA

SEQ ID NO: 31447 - protein, 280 aa, Oryza sativa
MAAAAAAAASASSSSSSSSSAESVPLPTTTLPIDKAAAVGGGGDRAVDCGVCAICLDKIALQETALVKGCDHAYCVTCILRWAPYKQTPQCPQCKHPFDFLSVHRSLDGCIHDYMFEESVCLLLRATWFEPLIVEAHEEALDEEELYHIYQYDDGVEDDLDEEAYYMSRSPSIRIGNRRWGDNGYVRGGRKEARPVSRQSLNDTDAGPSRTPKKKDVSASGSGSVSKEVAGRRAKRALKREAADKAAAEKHLKHLQRLGLRKAPEATAEATPEVEPQLNE

SEQ ID NO: 31448 - protein, 386 aa, Oryza sativa
MKELTTNLQLAPRLRFMVRDVVDLRSNNWVPRREEIKAKTISEIHDEAMKTLGLRPGATGLTRNGRNAPGGPLSPGGFPMNRPGTGGMMPGMPGTPGMPGSRKMPGMPGLDNDNWEVPRSKSMPRGDSLRNQGPLLNKPSSINKPSSINSRLLPHGSGALIGKSALLGSGGPPSRPSSLMASLTHTPAQTAPSPKPVSAAPAVVPVTDKAAGSSHEMPAAVQKKTVSLLEEYFGIRILDEAQQCIEELQCPEYYSEIVKEAINLALDKGPNFIDPLVRLLEHLHAKKIFKTEDLKTGCLLYAALLEDIGIDLPLAPALFGEVVARLSLSCGLSFEVVEEILKAVEDTYFRKGIFDAVMKTMGGNSSGQAILSSHAVVIDACNKLLK

SEQ ID NO: 31449 - protein, 357 aa, Oryza sativa
MAGAVSALFLLDIKGRVLVWRDYRGDVSALQAERFFTKLLDKEGDSEAHSPVVYDDAGVTYMFIQHNNVFLLTASRQNCNAASILLFLHRVVDVFKHYFEELEEESLRDNFVVVYELLDEMMDFGYPQYTEAKILSEFIKTDAYRMEVSQRPPMAVTNAVSWRSEGIRYKKNEVFLDVVESVNILVNSNGQIVRSDVVGALKMRTYLSGMPGCKLGLNDRVLLEAQGRATKGKAIDLDDIKFHQCVRLARFENDRTISFIPPDGSFDLMTYRLSTQVKPLIWVEAQIEKHSRSRIELMVKARSQFKERSTATNVEIEVPVPSDATNPNIRTSMGSAAYAPERDAMVWKVKSFPGGKS

SEQ ID NO: 31450 - protein, 441 aa, Oryza sativa
MSGTNVWLNLQGFDDLDVTPCLLTSGNGYSSFHNQNMNGISRDVWTLPYSLVLRHTIEEVNAACIEAIDPDRMELTSRLRDQVMNELGQSLSKYDWFAGFDIADKQPIKYSLQQWINHVKEAQAVVFIAVHGGIGEDGTIQSLLGSAGVPYTGPGQIASRTCMDKVATSLAVSHLASYGVHTIPKDLRATEEILESSPDDIWNDLKAKLQTETVCVKPARDGCSTGVARLCCPKDLEVYANALERKLQRMPANCLSRAHGVIEMPVSPPESLIFEPFIETDEIIISTKSVDDSTRHLVWKGENKWLEVTVGVVGKRGEMLSLNPSITVKESGDILSLEEKFQGGTGINLTPPPSTIMSEEALQKCKSCIETLANTLGLEGFSRIDAFVNVQNGEILLIEVNTVPGMTPSTVLIHQALTEKPPIYPHKFFRTLLDLAFARAN

SEQ ID NO: 31451 - protein, 431 aa, Oryza sativa
MAEQLSRRIIDVTGGYIKMEDIVNGTFELIKDESKAGACLWITKRRGMEYWPTPEEQRKYMLNLPKSKRMLTQNTFSTVQTPEFYEKIVVHTLSHNFRDATRLERVRLRLPVEPHNALVKIIYAGVNASDVNFSAGRYFSGGAKETAARLPLDAGFEAVGIVASVGDSVNHIKVGSPVALMIFGAYSEFTQVPAKHLLPVPRPDPEVVAMLTSGLTASIALEKAGQMASGQVVLVTAAAGGTGQFAVQLAKLAGNKVVATCGGKCKAALLSSLGVDRVINYQNEKIKDVLKKEFPRGADIIYESVGGEMFDLCLNALAVHGRLIVIGMISQYQGEHGWKPRNYTGLCDKILAKSQTVAGFFLIQYAHLWQDHLDKLFDLYASGKLKVSLDPKKFVGVASAPDAVEYLHSGKSVGKVVVCIDPSYSQTLAKL

SEQ ID NO: 31452 - protein, 843 aa, Oryza sativa
MLLVGVLLLLFFNLHLPTAAIDTLTLGQSLLWNQTLVSNGGNFELGLFSPGKSNKHYLGIWYKKISKKTVVWVANRERPILEPSSCHLELSVHGDLRLFSTAPSNTLLWSSNASASSSPSPPRTTVATLQDDGNLVVNSNATRSRSRSPSSTTTTHVAWQSFDHPTDTWLPGARLGYDRGRGVHSFLTSWTDSENPAPGAFSMVIDARGLAKFDLLAGGEHRYWTTGLWDGEIFANVPEMRSGYFTGVPYAPNASVNFFSYRDRLPGAVGNFMLDVNGQMRRRQWSETAGKWILFCSLPHDACDVYGSCGPFGVCSNATNPECRCPAGFEPRSSEEWRLENAAGGCVRRHPLECHGDGFLALPYTVRLPNGSVEAPAGAGNDKACAHTCLVDCSCTAYVHDGAKCLVWNGELVNMKAYAANENGQGDPGLAGAVLHLRVAHSEVPASSTEHSWKKSMVILGSVVAAVVLLLASLVTVVAVAAVLRMRRRRGKVTAVQGSLLLLDYHAVKTATRDFSEKLGSGSFGTVFKGALPDGTPVAVKKLDGLRQGEKQFRTEVVTLGMIQHVNLVRLRGFCCEGNKRALVYDYMANGSLDSHLFVMSGSSSGPDSKQVTLTWSQRYNVAVGVARGLAYLHEKCRECIIHCDVKPENILLDQEMAARLADFGMAKLVGRDFSSVLTTMRGTVGYLAPEWLAGTPVTAKADVYSFGLLLFELVSGRRNSTAPSSSSEGGPGIYFPVHAVVKLNEGDVAGLVDERVAKDADPKEVERLCKVAGWCIQDEEGDRPTMGLVVQQLEGIANVMLPPIPSRLHILAIENEWVRGVPEDERCSKSGSKPETEAIEEM

SEQ ID NO: 31453 - protein, 190 aa, Oryza sativa
MASSFNGNHDIVSNNTLQNIAGVQTGPAWLEADTAANMFLESKDEAHDFASLRHALLEQDRQVLLTGANPLAKELNIKELYNLQSRLAQEKARDVYRQRFQMPEFQGLVQEQNTPIDLCGLHVSEAIHALNYELNNRRKIARSTGRRLQVIIISSTRTPARLTAAVEQYLLEHGIQYTQAQPGLFRVLLQ

SEQ ID NO: 31454 - protein, 539 aa, Oryza sativa
MRLWFLIPLLLCFPTLIRSEDYSDVTIVVRGAETIASTSNEFICATIDWWPPEKCNYDQCPWGQASILNLDLTNPLLAKAIQAFSPLRIRLGGSLQDQVVYGTPNLGSPCTPFSKSSSGLFGFSQGCITMERWDAINKIFMDTGAVVTFGLNALQGRQQMGRGVWGGAWNSSNAREFMEYTVSMNYPIDSWEFGNELSGSGIGASVGAEQYGKDIIELKNIISQLYGNSRKPLVVAPGGFYDQKWYAQLLDISGPNVLDTMTHHIYNLGAGNDPQVANRILNPQYLSQSSDTFRDLQMTIQRHGPWSAPWVGEAGGAYNSGSRKVSNTFLNSFWYLDQLGQSAKYDTKVYCRQTLIGGNYGLLDTETFVPNPDYYSALLWHRLMGKGVISLDTSGSSYLRAYAHCGKQKGGVALLMLNLNKNMGFMVSVRNDLNINFREMAGVKRDNSFVHGLKRTVSWVGSKASDGLEKREEYHLTPQDGNPFARTVLLNGAPLQLTGDGDIPSLPPVMVSVNSPIYVAPLSIAFVVFPDFEAEGCER

SEQ ID NO: 31455 - protein, 282 aa, Oryza sativa
MEACGWDEVFWEEIGLGDLVEGNHAKIGRSVAFPGHPLGSGLTATAAKELGLRPGIPVGTSLIDAHAGGVGVMESVPDAESKADTSDESDEQAICHRMVLVCGTSTCHMAVSKNKLFIPGVWGPFWSAMVPEFWLTEGGQSATGALLDYIVENHVAAPLLANHAASQRISIYELLNKMLFSMAHEQNISFISSLTQDIHVLPDFHGNRSPLADPKSKGIICGFTLDTSEKHLALLYLATIQGIAYGTRLLWSIAMLMGTRSILFLLVADLRRIPCISKSTQI

SEQ ID NO: 31456 - protein, 463 aa, Oryza sativa
MGSKDGSGAASSGGGGGFFSSIAAGVRSLGTAVHKSVNGLVGYEGLEVINPDGGTEDAEAEALRGRWKQEDRDSYWKMMHKYIGADVTSLVTLPVIIFEPMTMLQKMAELMEYCELLDKADECEDPYMRMAYASAWAVSVYFAYQRTWKPFNPILGETYEMVNHQGISFIAEQVSHHPPMGAAHCENAHFTYDITSKLKTKFLGNSLEVYPLGRTRVLLKKSGVKLELVPPLTKVNNLIFGRTWVDSPGEMVLTNLTTGDKVVLLFQPCGWFGAGRYEVDGYVYSAAEEPKIMITGKWNQSMSCQPCDQEGDPLPGTELKEIWRVAPTPPNDKYQYTHFAHKINSFDTAPKKLLASDSRLRPDRYALEKGDMSKSGSEKSRLEEQQRAEKRTREAKGEQFTPRWFNRTDEIAPTPWGELEVYEYNGKYTEHRAAIDSSSVADDDTDVTSIEFNPWQYSSSSSQ

SEQ ID NO: 31457 - protein, 905 aa, Oryza sativa
MADLEAGMVAAATDQGNSTRSQDDAATLIPNSGNLGSSNRSTRTARFKDDDELVEITLDVQRDSVAIQEVRGVDEGGSGHGTGFDGPPLVSPSSKSGKLTSKLRQVTNGLKMKSSSRKAPSPQARQSAKRVRKRLDRTKSSAAVALKGLQFVTAKVGNDGWAAVEKRFNQLQVDGVLLRSRFGKCIGMDGSDEFAVQMFDSLARKRGIVKQVLTKDELKDFYEQLTDQGFDNRLRTFFDMVDKNADGRLTAEEVKEIIALSASANKLSKIKERADEYTALIMEELDPTNLGYIEMEDLEALLLQSPSEAAARSTTTHSSKLSKALSMKLASNKEMSPVRHYWQQFMYFLEENWKRSWVMTLWISICIALFIWKFIQYRNRAVFGIMGYCVTTAKGAAETLKFNMALVLLPVCRNTITWIRSKTQVGAVVPFNDNINLHKVIAAGVAVGVALHAGAHLTCDFPRLLHASDAQYELMKPFFGEKRPPNYWWFVKGTEGWTGVVMVVLMAIAFTLAQPWFRRNKLKDSNPLKKMTGFNAFWFTHHLFVIVYTLLFVHGTCLYLSRKWYKKTTWMYLAVPVVLYVSERILRLFRSHDAVGIQKVAVYPGNVLALYMSKPPGFRYRSGQYIFIKCTAVSPYEWHPFSITSAPGDDYLSVHIRTRGDWTSRLRTVFSEACRPPTEGESGLLRADLSKGITDEKARFPKLLVDGPYGAPAQDYREYDVLLLIGLGIGATPLISIVKDVLNHIQGEGSVGTTEPEGSSKAKKKPFMTKRAYFYWVTREEGSFEWFRGVMNEVSEKDKDGVIELHNHCSSVYQEGDARSALIVMLQELQHAKKGVDILSGTSVKTHFARPNWRSVFKKVAVSHENQRVGVFYCGEPVLVPQLRQLSADFTHKTNTRFDFHKENF

SEQ ID NO: 31458 - protein, 663 aa, Oryza sativa
MDKSMINTDGVAASGEATAAKETTEVSLVENSLELCADGPTEPVIENQTQFNDGSVDVQGGGQHAPHAILATADSQVNVEASTQEMASNDIPSDLPTLEFPEREKMLSAPDVELYQANDLGQVTAEKGTTESDGSNKVGSLTSRKRHLEDSLPALESATTEKLSSRPRGKRTIDGIPDDDDLLASILVGRRTPGLRLDSTPIPPKTSSLKRPRLTSKSTTPKRKVQMDDAMVIHADTIRQQLISTEDIRRIRKKAPCTRSEIWMIEKGSLEDDIFHEPIFSCMCKELNDLQYRTYEIVAHPTIHNMEIHVRLDMSQTMADGSNDVGTSGAKDSGNHQDHVVLPDGAESDAMHPEATDAADTRTDFDSHMPSDKQVNNVEGVTEQLTDNEKETAVVEKATTNMGDSAQVDSLDKEYLQDVPADLQRSTNTNTPLFVLDDMPGPDVVLDSSDPVSAQAVDDMKGELSDIVHDNVNAFDNKDMPTSEITVLEFTQNASGFPQPTEDENVLSAMGENSGLQENHVGSVMDLDNMGHDFSLKECSDFGSAIQGVDTDFLMYDDEVDCDEANDDEPNPEEFQSLDNSGWSSRTRGVARYLKTLFDEESGLGRKSVAIDHLLSGKTRKEASRMFFETLVLTTKDFISVDQPNSFDFVSVKPGPKLLKSDF

SEQ ID NO: 31459 - protein, 312 aa, Oryza sativa
MDSSYLLSMRLSAVSLNPPVDFKAFLNLKRLKLEHTNITDENMQILISNCNALEFLGIVDCGKLTRLSTSHLWNQLKHLHVESCHLLKEIELNLGLTKLGYKGTLIPLSPPGPLLLTNVCMKLQHARSSLGYIFTNLPSTLLHLETLSLQCSELERAILPENHIKFMYLKHLRLQLRHPVTEKKIDLLDFACLLEAAPLLQKFELHMWMPLHHQRYREEAHGELRSLPPQPHAHLRLVHISGFIGMKDQLELSLHILRNSAMIRAMKVDPKPLFALPCISMLSPLEGFQYLDGYEVAIISLQRRPQQCCRCF

SEQ ID NO: 31460 - protein, 255 aa, Oryza sativa
MTGADFFASDLGWCLQGATSDQLGMAQKITITSDTTTIIAHPSMRPEIEARIQQLKKDLEETTSAYLKERFSSRIAKLSRGIAVIKVGAATEAELEDRKLRAEDAKNATFAAISEGITPGGGVTYVQLSKYIPSIMDLVDDSEEKIGVNIVGKALLVPAMTIARNAGADGPAVVEKLLASEWRVGYNAMTDKFEDLVDAGVVDPCRVARCVLQNSASIAGLILMTQAMMFDKIKKKKSTIPQIPGIPPLQINQNA

SEQ ID NO: 31461 - protein, 422 aa, Oryza sativa
MKPERVLARMHHLQQLLDRFLACRPTGGAKHSRMVLVALYQIVRESFQLYADICEVLAVLLDRFFDMEYAECVKAFEAYASAAKQIDELCAFYGWCKETGVARSSEYPEVQRVTDKLLETLEEFMRDRAKRPKSPPREPEPEPVKEEEPEPDMNEIKALPAPEDYKEPEPEKVEEEVKPEPPPQPQGDLVDLREETVTADEQGNRLALALFQGPPAAGGSNGSWEAFPSNGGNEVTSAWQNPAAEPGKADWELALVETASNLSKQKATMTGGMDPLLLNGMYDQGAVRQHVNAQVTTGSASSVALPPAGQKTQVLALPAPDGSMQNVGGDPFAASLSFPPPSYVQMAEMEKKQQFLTQEQMMWQQYQRDGMQGQSSLAKLDRAYNNGFAPNPAMPYGMPAAYNTNPMPMAYTANTGYYYPTY

SEQ ID NO: 31462 - protein, 228 aa, Oryza sativa
MGVSALDMLQFHWWDYANPGYLDALKHITDLKEEGKIKTVALTNFDTDRLQIILENGIPIVSNQVQHSIVDMRPQRRMAELCQLTGVKLITYGTVMGGLLSEKFLDTNVSIPFAGPPLNTPSLQKYKRMVDAWGGWSLFQALLQTLKKVSLKHGVSISTAAVRYILNQTSVAGSMVGVRLGLSEHIKDTNAIFSLELDEEDMNSITEASNKGRNLMDIIGDCGDEYRA

SEQ ID NO: 31463 - protein, 283 aa, Oryza sativa
MRFPLVGSAMLLSLFLLFKFLSKDLVNTVLTAYFFILGIAALCATLLPSIKRFLPKEWNDNAIVWRAPLFHSLSVEFTRSQVVASIPGFFFCIWYAAKKHWLANNVLGISFCIQGIEMLSLGSFKTGAILLSGLFFYDIFWVFFTPVMVSVAKSFDAPIKLLFPTGDAARPFSMLGLGDIVIPGIFVALALRFDVSRGIKNRYFNSAFLGYTVGLTVTIIVVNWFQAAQPALLYIVPGVIGFVAVHCLWNGEVKPLLEYNESKAEEEEACEEDTDSKQNKKKE

SEQ ID NO: 31464 - protein, 306 aa, Oryza sativa
MAPSLLRPASPCLNLAPPTADGPGRSRSAVTIGGSRPLSVSLRVGGSSRRDFPCTTMASRDHSGLTRQLLDFQHGTVDEIDGEHDPFMELKARFMDFKHRNCVDNISNYQNFAQQQTPKFMVVACADSRVCPSSVLGFQPGEAFTVRNIANLVPPYQHGASETSAALEFAVNTLEVENVLVVGHSRCGGIQALMSMKSKQDDSQSRSFIRDWVSIAKNARLSTEAAAGNLNFELQCKHCEKESINSSLLNLLTYPWIEKRVNEGTLSLHGGYYNFIDCTFEKWKLVYRQGLEGGSKYAIKNRTTWS

SEQ ID NO: 31465 - protein, 336 aa, Oryza sativa
MSFFFRMASRLRPSTPEEVVRSIKDSFQALHTKNGARALEEVEKNLSSLRQMLSGDGEAEPNQEQVLQITLEICKEDVLSLFVQNLPSLGWGVRKDLVHCWCILLRQKFDESYCCVKYIENHLELLDFLVGCYKNLDVALNCGNMLRECIKYPTLTKYILDSSSFELFFEYVELPNFDIASDALNTFKDLLTKHETVVAEFLSSHYEQFFELYTRLLTSPNYVTRRQSVKFLSEFLLEAPNARIMKRYITEVRFLNIMITLLKDSSKNIRICAFHVFKVFVANPNKPRSIIEALIENRRELLKLLQNLPTSKGEDELDEERNLIIQGIQKLACSSA

SEQ ID NO: 31466 - protein, 476 aa, Oryza sativa
MSVSPSLGNLGPRITGSVGNIVGGSNIGRNISSGGLSVPSIASRMNLSGNVGSGGLNVQGSSRMMNGILQQGSPQMLNMMGSLYPTSGGSLSQNQIQGGNNSLGSMGMLHDASDGAPFDMSDFPQLTGRPSSAGGPQGQYGSLRKQGVGVNTIVQQNQEFSIQNEDFPALPGYKGNTTDYAMELHHKEQLHDNVPVMQAQQYPMSRSVGFNLGSNYPPNRQQHQQGANSVQNAGPPNIGLRPLNSPNQTSSLGSYEQLIQQYQQPQAQNPFRLQQVSSATQSYRDQSLKSIQGGQTPSDPYGLMGLLGVIRMNDVDLSSLALGIDLTTLGLNLNSPDNLYKTFGSPWSNEPAKGEPEFHTPACYSAEQPPPLQPIHFQKFQTPTLFYIFYSMPRDEAQLCAASELYTRGWFYHKEVRVWLTRIPNVEPLVKTPHYERGSYGCFDPNNWETIRKDNFVLHYDQIEKKPAIPSSQNVR

SEQ ID NO: 31467 - protein, 152 aa, Oryza sativa
MHYLICLQAFLKHIDFEVVQCAVIASPGFTKDQFRDYMHLEAARRDLRLIIENKQRIVLAHAPSGYKHSLKEVLDSPSVMTLIKDTKAAQEVQALKDFFNMLTNVKLLEEKLPSNSWIEISYSIRFILIQLELVMDLSMLRLQMNVLLSKLF

SEQ ID NO: 31468 - protein, 261 aa, Oryza sativa
MVTDGGTRFTMIDRSSGARNPVYHFLNTSTFAEYTVIDSACAVKINPKAPLEKMSLLSCGVSTGVGAAWNTANVSKGSTVAIFGLGAIGLAVAEGARLRGASRIIGVDINPEKFSKGKEMGITDFINSKASGKPVHEVIMEMTDGGVDYSFECTGITDVLREAFVSTHDGWGLTVVLGIHATPRMLPLHPMELFDGRRITGCVFGDFKGKSQLPEIVEKCMQGEININFDGFITQELPFADINKAFQLLEEGKSLRCLLHV

SEQ ID NO: 31469 - protein, 412 aa, Oryza sativa
MTTNSVNATALDTAATQGHIDIVNLLLETDASLARIARNNGKTVLHSAARMGHVEVVTALLNKDPGIGFRTDKKGQTALHMASKSQNAEILLELLKPDLSVIHVEDNKGNRALHVATRKGNTVIVQTLISVKEIVINAVNRAGETAFAIAEKLGNEELSNILREVGGETAKEQVNPPNSAKQLKKTVSDIRHDVQSGIKQTRQTKMQFQKIKKRIQKLHIGGLNNAINSNTVVAVLIATVAFAAIFTIPGNFLEDMKDPHDPNMTLGQAFVASNPAFIIFLVFDALALFISLAVVVVQTSLIVVEQKAKKKMVFVMNKLMWMACLCISAAFIALTYVVVGRDDRWLAWCTMAIGTAIMLATLGSMCYCIIAHRMEEKNMKKIRRSSTSQSWSISVDSDTELLNNEYKKIYAL

SEQ ID NO: 31470 - protein, 544 aa, Oryza sativa
MGLDLGALVLKSGGLLVSDYDSIVAINIFVALLCSCIVIGHLLEGNRWVNESITALVMGLITGGVILLVSGGKNSHILVFSEDLFFIYLLPPIIFNAGFQVKKKQFFRNFMTIILFGAVGTLISFVIISLGAMTLFKKLDVGPLQLGDYLAIGAIFSATDSVCTLQVLNQDETPLLYSLVFGEGVVNDATSVVLFNAIEDIDIANFDSLVLLAFIGNFLYLFFTSTLLGVVAGLLSAYIIKKLCFARHSTDREVAIMILMAYLSYMLSMLLDLSGILTVFFSGIVMSHYTWHNVTESSRITTKHTFATLSFIAEIFLFLYVGIDALDIEKWKLASSSPKKPIALSATILGLVMVGRAAFVFPLSFLSNLSKRETRPKISFKQQVIIWWAGLMRGAVSIALAYHKFTASGHTELRINAIMITSTVIVVLFSTMVFGFFTKPLLNLLIPPRPDIAADLSSQSIIDPLLGSLLGSDFDVGQPSPQNNLQLLLTIQTRSVHRVWRKFDDRFMRPMFGGRGFVPFVPGSPVERSIHGSQLGTVTEAEHS

SEQ ID NO: 31471 - protein, 368 aa, Oryza sativa
MVSTTEFKGEYSLPSKKSPLDQFEGVKTHLYRLGAEHENGTLKSFAYTDQGSPSLLDTIILSQWEDYAWKGHFGYDVTACNLKVVEGGWSFVVQLNDKWNSCVLKEHDKFLEPVGCLKPNCMNSYDELLLCIAQGDKDIPEVVPSTKPPKDGLLLIANAYPVEYGHIFLVPSATNQLSFFWDKRMFSLIARIASEVNSAAFRVFFDSCTSTMPDHMFFQACYFANPLPVESASTVAIYHGKATSAVHLYEIVDYPMKALVLTGKDVNTLANFVSEVSLTLHDNNTAYSLLISNNGTKVFLFPQVKNLATGCCLSAWECSGYFIYRAKYDFDRASENEISNRMASVTLQDGAFENLKNLCCAVADDLVM

SEQ ID NO: 31472 - protein, 277 aa, Oryza sativa
MKDGTGAKPASYDRSTVKRSAWNQNRNSVSRGVAIKSNGCTPLSTSHESTAAENLLNPPYCYTRLQLLNQYIVVLTELAEEKLFKGLDLEALSVELIILAIWNEALNACSLSTDATHDGFFLTQAHVNFLPKNDHRPSRNVVQGLDFTRLVSVCSWAESGFIKAYDRAEKISHRLRDNNDNTEMPDAVEIIFQTALIYGTTGAAKEVLGYQNRSVALYSKAIILLTFVLQEATNLPLNPPFSLSSSDQQRIHRYIANLRSHLCSAQLTGQQERYVQN

SEQ ID NO: 31473 - protein, 233 aa, Oryza sativa
MLSLAFRFLRARTPEERALVDLETHYTKEYLDEKVGSCTRRTILYQEYVKGISSTGMQSNCGFEGQVNACWTHNMTTKELDTIRSAGFLVSVIHGRSDIIAQLCHARRLAERLIPVARMVELHGAHLVSHERPEEVNNALMELIKATKSMMKPEEWSSQPENSSETGALISARPVSVTIRTDDGGNAAIAVYNLLAKLQLSFLYVIGVILMGFEHMRNIVKVMKPVRVAAIES

SEQ ID NO: 31474 - protein, 619 aa, Oryza sativa
MGAAFLSSWPWDNLGAYKYVLYAPLVGKAVAGRAWERASPDHWLLLLLVLFGVRALTYQLWSSFSNMLFATRRRRIVRDGVDFGQIDREWDWDNFLILQVHMAAAAFYAFPSLRHLPLWDARGLAVAALLHVAATEPLFYAAHRAFHRGHLFSCYHLQHHSAKVPQPFTAGFATPLEQLVLGALMAVPLAAACAAGHGSVALAFAYVLGFDNLRAMGHCNVEVFPGGLFQSLPVLKYLIYTPTYHTIHHTKEDANFCLFMPLFDLIGGTLDAQSWEMQKKTSAGVDEVPEFVFLAHVVDVMQSLHVPFVLRTFASTPFSVQPFLLPMWPFAFLVMLMMWAWSKTFVISCYRLRGRLHQMWAVPRYGFHYFLPFAKDGINNQIELAILRADKMGAKVVSLAALNKNEALNGGGTLFVNKHPGLRVRVVHGNTLTAAVILNEIPQGTTEVFMTGATSKLGRAIALYLCRKKVRVMMMTLSTERFQKIQREATPERQQYLVQVTKYRSAQHCKTWIVGKWLSPREQRWAPPGTHFHQFVVPPIIGFRRDCTYGKLAAMRLPKDVQGLGACEYSLERGVVHACHAGGVVHFLEGYTHHEVGAIDVDRIDVVWEAALRHGLRPV

SEQ ID NO: 31475 - protein, 415 aa, Oryza sativa
MGAKDSKPSYSYSSSYDHGNSSSGYNSRYPAYPANASSSQNTRYAPSMENYVQPETHARLQRKYSRIGDDYRSLNQVTEALAQAGLESSNLIVGIDFTKSNEWTGKLSFNRRCLHDIGNTPNPYEQAISIIGRTLSAFDEDNLIPCFGFGDASTHDQEVFSFYPENRPCNGFEEALERYREIVPTLRLAGPTSFAPMIETAIGIVDSTGGQYHVLLIIADGQVTRSVDTQSGQLSPQERDTIDAIVKASQFPLSIVLVGVGDGPWDMMHQFDDNIPARSFDNFQFVNFTDIMSKSIAADRKEAEFALSALMEIPTQYKATLDLQLLGRRQRIQPRIPLPPPMRNAYSRSTSFDQHSGVYSRSSSFGPQTSGFQQSESFKQRQPVATTAPDTYTSESSLEGRLVSIFVYIHTMLNR

SEQ ID NO: 31476 - protein, 422 aa, Oryza sativa
MQTNPQSVATVVPMEDSKFRLFVAFHASLHGFEHGCRPLLFLDVISAKPNKQWKLLTATSVDSEGDVFPVAFAVVDDESSEHWHWFLEQLKSSVSASRAITFISNGENGLWDEVPLVFPDSHHGYCVDYLIEEFKTQLDDAWTEEARDVMVEHLKKAIYACTVDEFNQYIELIKGESDKLAEWLLEIKPERWSDAFFKGSRHGQYSCNFPSTIVEWIPTRYELSIVQLVDMIRCKLMEMMYTRRESSNAWAELLTPAANQKLQEEVSKAHTLNVIPSESNENGNVFKVCDDSVNVVNIDAWECTCRKWHISGLPCMHAIAVIERIGHCPYDYCVKYFRTECYRLTYSMSINPIPDVMLPPAILSDQSQSPVTHATPIRTRRRVGRPKEKPADPRIAIKRAVRCSRCQGYGHNKATCKVPLST

SEQ ID NO: 31477 - protein, 300 aa, Oryza sativa
MLMESLAQLQTDATTGFISEGQVLTASIKERAKKIALEWKSKLDSLDFDASNGNCLEAHAFLQLLATFGIFAEFAQDELCKLLPSVSRRRQTPELCRILGLSQNMPGVIGVLVENGRTIDAINLAYAFELTNQFEPVELLKAYLQEVKSVPHFKTGKISLQVQNEMNERELSALKAAIKCIEEHKLDEKYPIDLLQKRVIQLEKAKADKRRAVEAAKPQSKRPRANGSVYAPHTSFPDKSFYQAAPPQRHSYPYERQYVYGAEAHHHPTMISSAPYGISPAHTTYYGNGYQVQYQVPYIH

SEQ ID NO: 31478 - protein, 346 aa, Oryza sativa
MASKLGMVVLLISGLFAARCAAVVTTGEPVVAGLSWGFYDTSCPSVEGIVRWHVTEALRRDIGIAAGLVRIFFHDCFPQGCDASVLLTGSQSELGEIPNQTLRPSALKLIEDIRAAVHSACGAKVSCADITTLATRDAIVASGGPYFDVPLGRRDGLAPASSDKVGLLPAPFFDVPTLIQAFKDRNLDKTDLVALSSAHTIGLGHCGSFNDRFDGSKPIMDPVLVKKLQAKCAKDVPVNSVTQELDVRTPNAFDNKYYFDLIAKQGIFKSDQGLIEDAQTNRTAVRFALNQAAFFDQFARSMVKMSQMDVLTGNAGEIRNNCAAPNRRSSDLLNAADDDQGFAADA

SEQ ID NO: 31479 - protein, 489 aa, Oryza sativa
MSPEEVVESPTSSEIKSEWMNELSRYVDNSPECYYDFNSLNKNEKHMTTEDFLSMLLEDGCYILHKFVVRQDRTAAVGGGGGSGRYREDIDVNVQRDIIYLAENQIPFFILDKINGIIGWSVTGKPLVEVFCSYIEREVLNWYGYAIGQRWNVTPEPIHLLHLLHILLIGCQKPRALTHTHQVATGAAVPTEPHAARSRIEASSANITRQNETAIEMVPVITDASTTQHEQTAAGTRAAHSHGEASSGNHPQQDETAIDVITGASATEHRNEKPPEKKGVRRFLRWRRAKQYEKARVDLTGVDLISIAEGPGGEACGALSILDVKLIGRCGGIRLEFPSLYVDGETWCMLGNLIGLEQSNPDMIPQRVTAYCVLMSQLACTKEDVELLARRRVTDHLMRNDEDCATKFAALCDGVNFNLDDPSRNYLQKECVALDQRYRSRPSQWTAWMLREHCRNPCVAVASVLAIIAIAFGVLQAVYTVLKLVRKVK

SEQ ID NO: 31480 - protein, 586 aa, Oryza sativa
MGKVGEKVRAFATNRWLVFVAAMWLQSMAGIGYLFGAISPVVKAALGYNQRQVAALGVAKDLGDCVGFLAGTLSATLPAWAMLLVGAAQNFLGYGWLWLIVTRQLPALPRSMMCLLIFVGTNGETYFNTASLVTCIQNFPKSRGPTVGILKGFAGLSSAILTQLFAVLHTPDHATLVFMVAVGPSLVAIGLMFVIRPVGGHRQVRPSDNNSFMFIYTICLLLASYLVGVMLVQDFVQLSDNMLVFITVVLFILLILPIAIPVTLTFSSKTEHPMEEALLAEPSKGQASTSQEKEPDVFLSEVEDEKPKEIDSLPPSERRKRIAELQARLVQAAARGGVRIRRRPHRGENFTLMQALVKADFWLIWLSLLLGSGSGLTVIDNLGQMSQAVGYKDAHIFVSLTSIWNFLGRVGGGYFSENIVRERTYPRHIALAFAQILMAAGHFLFAMAWPGTIYVATFLVGLGYGAHWAIVPAAVSELFGVKHFGAMYNFLTVANPTGSLIFSGVIASNLYDYEAEKQAHHQSSLSGRSLFDMSFLAEGPLKCEGAVCFFVSSLIMSAFCIVGAGLSLIVVHRTKRVYANLYRAVR

SEQ ID NO: 31481 - protein, 485 aa, Oryza sativa
MLAGLNPVVIKRLEVFPPNKSKITTDDIMTQIGGLTIQQAMEQKRMYILDHHDYLMPYLRRINTEGVCVYASRTLLFLRDDGALRPVAIELSLPDGGVGGSEISRVFLPASQGTDAHLWHLAKTHVAVNDSGYHQLISHWLFTHATVEPFIIAARRQLSAMHPIHKLLDPHFKDNMQINTLARSILLNAGGLLEKTMYPGKYSMEMSSDIYAHWRFTEQSLPNDLIKRGMASRDPKARGGVSLHIEDYPYAVDGIDVWLAIEGWVRSYCDHFYHADAAVAGDAELQAWWDDVRRVGHGDRQGDAACWLDLDTVAGLVETLSTLIWTASALHAAVNFGQYGYAGYPPNRPTRCRRFVPLPGSPEMAQLEADPGRFFLETVPDRFTATLGIALIEVLSNHTSDEVYLGQRATSTWTDDGEVLLLLDRFRDELRRVEKRVEERNKDPRLVNRRGPVRVPYTLLYPDAGDVAGKEKGITGRGIPNSVSI

SEQ ID NO: 31482 - protein, 286 aa, Oryza sativa
MRARHPPPSAKVPNDRSISAVCRLAHHLQHRVHECTPCQLHSTRFSFPLPATFTSQPFLSLSLSLSDLVVPMASKPADVTATGGGGVAVVRDDNNNAGGGEAEVYRSELTPLQKHVAFFDRNKDGIIYPSETYQGFRAIGAGVVLSAVGAVFINGGLGPKTIPENTKTGLKLPIYVKNIHKGKHGSDSGVYDANGRFVPEKFEEIFKKHAHTRPDALTDKELKELLQSNREPKDFKGWLGGFTEWKVLYYLCKDKDGFLHKDTVRAVYDGSLFAKMEQEKQSAKKK

SEQ ID NO: 31483 - protein, 488 aa, Oryza sativa
MHPSGEYSPYYQPYPSPTSAPLATYPSASAPPYTPYPATDYAAPAAYPTYPPPPADPPQYAPPPAAPQPQPYYPYEPPPHNPAPSPYPSLDRAGSYGYGSGSQELYPPKPAGGGWSDDGVYAYSGGGGDAPEPYGARGTAPRSNSPLFDDYGRSIGSTKERGGGGGGGGGSSASPKVVRAVPKVETSEDTSGGVQKFRVKLLPEGAGSPMDVLCQVGLDGIRMLDPNTSRTLRIYPLETVTRWDVLDSSIFAFWSKSSVDFEARRIRLKSNSYTTNTILDTVTAASVQFKEMGGSSISRSRAIADAAKPPEQQNDRRKNFLDWRNLMKPMNEEKDHWVPDEAVTKCTACTADFSAFNRRHHCRNCGDIFCDKCTQGRTPLTTDADAQPVRVCDRCMAEVSQRLNNAREAANRPIVHSHEDLAKKLKDAMDINKKSSSASSRSTDGSSRRMREVACPTCTVHLQVQVPTSGSETIECGVCQQPFLVSAR

SEQ ID NO: 31484 - protein, 516 aa, Oryza sativa
MIKQILGRLPKKEKPGKSGEKDLAGVGSSLPDARTTTDLTMSSRIANPNNYTAAVTNPGQNYTVKNAHHGGAGVSNGFLAPPVFEALPSLRDAPAPEKPSLFLRKVVMCYVVFDFTDPTKDVKEKEIKRQTLLELVDYVTSATGKFPEPAVQEVIKMVSTNLFRVPNPAPRENKPLESFDMEEEEPVMDPAWPHLQIVYELFLRFVQSPETDAKLAKRYVDHGFIIKLLDLFDSEDPREREYLKTILHRIYGKFMVHRPFIRKAINNIFYRFIFETEKHNGIAELLEILGSIINGFALPLKEEHKLFLVRALIPLHKPKCVSMYHQQLSYCVTQFVEKDCKLADTVIRGLLKYWPITNSAKEVMFLGELEEVLEATQPAEFQRCMVSLFCQIARCLNSSHFQVAERALFLWNNDHIEVLIKQNSKVMLPIILPAIERNTKEHWNQAVQSLSLNVRKIFMDHDPVLFEECLKKFEEDEAKETALRSKREATWKRLEEIASSKTISSEPAVPPEATVH

SEQ ID NO: 31485 - protein, 339 aa, Oryza sativa
MKDLIEFSHKNKLGPIEGLKSYPKQTAAKLPVQNMHEPKQLMAAAGLPNDQTNLKAMGVKTEMNTHANETHGIGPIGNGPQNAAALNNYQNPIGNGLQNAAALNNYQNILRSSVANQSLLQQEASSMFKGPTAMHNGIQLEASRSFRGPNQVHLAQFQHPASFQQPMPQQSSLQGLGVSPQYQQHVLHQLLQEAKNTNNRVLAQQQQQQQLQHAPANSGLASGGTAITGSAASGDHMNNNGAVKGGTPMVTTGPSSVINNTASILPSRSNSFKSVGSNPQVAAAAGGGIGSGGHAATPKADALHELDDLDNLGNLISTELEESGLFLGDQAGGGYSWNM

SEQ ID NO: 31486 - protein, 361 aa, Oryza sativa
MQMRRPDGSSEILSGFQPLKDTRNPLSSFPSQISGNRSNTWNTINVHYPDQNANHNMYPGTWSLMPPNTGFGVNQQNYLMTPDITLPQRSLNAKFGGNGAFTSLRAHGIDQRSSGWLGHIEPSSHIDDASSSLIKPQPLVIDHNVQKAKGSSCMLFGISLDSPAKPELLISPPSVAFDGKLQQDALEEDECSDPSKTVKPLDGAQHDSAREKHQSCPDGTKNIQSKQQNGSSRSCKKVHKQGIALGRSIDLTKFTCYDELIAELDQMFDFNGELNSSSKNWMVVYTDNEGDMMLVGDDPWNEFCNMVHKIFIYTREEVQKMNPGALNSRSEDSRSTSVERGLVGEGLQGGLSAPSLNSENC

SEQ ID NO: 31487 - protein, 234 aa, Oryza sativa
MARLDRVKNITGLVEAYAKNARLRELVNLVVVAGYNDVKKSKDREEIAEIEKMHELIKTYNLFGQFRWISAQTNRARNGELYRYIADTHGAFVQPAFYEAFGLTVVEAMTCGLPTFATVHGGPAEIIEHGISGFHIDPHHPDQAANLIADFFEQCKQDPNHWVEVSNRGLQRIYEKYTWKIYSERLMTLAGVYGFWKYVSKLERRETRRYLEMFYILKFRELAKTVPLAVDEAH

SEQ ID NO: 31488 - protein, 334 aa, Oryza sativa
MCFWGCFLYKNFGKKDIHGFRVELCGGSSIVMFHGDLPYSTKEILKKLETMDDENIIGVGGFGTVYKLAMDDGNVSALKRIMKTNEGLGQFFDRELEILGSVKHRYLVNLRGYCNSPSSKLLIYDYLPGGNLDEVLHEKSEQLDWDARINIILGAAKGLAYLHHDCSPRIIHRDIKSSNILLDGNFEARVSDFGLAKLLEDDKSHITTIVAGTFGYLAPEYMQSGRATEKTDVYSFGVLLLEILSGKRPTDSSFIEKGLNIVGWLNFLVGENREREIVDPYCEGVQIETLDALLSLAKQCVSSLPEERPTMHRVVQMLESDVITPCPSDFYDSE

SEQ ID NO: 31489 - protein, 479 aa, Oryza sativa
MDTRCCAKYNAPQPGADQFQMKIANNKVGLVIGKGGETIKSMQAKSGARIQVVPLHLPPGDPATERTVYIDGTQEQIETAKQLVIEVTSENRARNPMSGGYSQQGYRPPRPQSNWGPHGGAPMQQPGYGYMQPGAYPGAPPQYGAPQQPYGSYPPASGGYQTGWDQSSNQQSQQAPPGTGYDYYNQQQQPQQQQSAPGTAAPGDATSYNSSQPPAYASQGYDSSYAQQSGGQQQAYDYSSYYQTQGQQQGYSQQTGYDQQGYGTSGYGSAANSTQDGSAPSYGAQGVAGQASPGQQTSTPAAGSHPGYSSQPPTSAASSYPVQGSAPQSGYGAPPPQTGYGTQPQPQGGYSQGSYGAPPQGQKAPPNTSPYGQAPPPGSAPGGYGQYGYSQNQQGYGAPPPYPGAPAASHPGYGQQQSYGDPYGSGSYGQPAAYSTEATTAAASQDQSASAPATGAAPATTAAPAPTAPENSGAQSPAS

SEQ ID NO: 31490 - protein, 241 aa, Oryza sativa
MATSGLRSCSAVGVPSLLAPSSNRSRLPVCAYATTSGRVTMSAEWMPGQPRPAHLDGSSPGDFGFDPLGLATVPENFERFKESEVYHCRWAMLAVPGVLVPEALGLGNWVQAQEWAAEPGGQATYLGNPVPWGTLPTILVIEFVAIAFAEHQRTMEKDPEKKKYPGGAFDPLGFSKDPVKFEEYKLKEIKNGRLAMLAFVGFCVQQSAYPGTGPLENLASHLSDPWHNNIGDIIIPRTIYP

SEQ ID NO: 31491 - protein, 86 aa, Oryza sativa
MQNVITIVILAAMISITHARIALDDCMQLGYIVIKQENPWRFCFLEAVGTTRVTEPEIELAFFMHQMNHKGNNTTTLSKIELLRTS

SEQ ID NO: 31492 - protein, 271 aa, Oryza sativa
MAKHGVASVLTLALVLGVAAIPTVVQSIGVCYGVIGNNLPSPSDVVQLYKSNGIDSMRIYFPRSDILQALSGSSIALTMDVGNDQLGNIKVSTSVSQGVTAGFPPSAGTFSASHMGPIAQYLASTGAPLLANVYPYFAYVGNQAQIDINYALFTSPGTVVQDGGNAYQNLFDAIVDTFYSALESAGAGSVPIVVSESGWPSAGGTAASAGNAQTYNQNLINHVGQGTPKRPGSIETYIFAMFNENQKGGDETERHFGLFNPDQSPAYSINF

SEQ ID NO: 31493 - protein, 511 aa, Oryza sativa
MFGDSDGSKDANPGAPPSTIDPPFPNRELTLSSYLCEKPTLASAAAGGGGGAGPSSPPNPAAAAAGDDGKHCVERDFLHLSAPKRGDPPGDDSSVVGGKKPRLDSLQLSLSLNSDGPAAPPSSQPPLASLLQPVPATDGDLRGAAAAAAVPAAPARRTYSATTARTRSINSDDMSYSYSIFSHNPSCSLTHNSTDIYAAGEGTNGSVHSRFNFRPMGDGSVAFATPPLKEGTSSFFPTELPARMAAAAAAAAASAGGSFDGGRGGLHASRPDKILRDIVSDSVTAMAQVLQDFPSERLELLREAVRGMIDSHEKRDELASLQRKLERRSDLTTETLGRANRTQLEILVAIKTGIATFVTGKGRVPSSELVEMFLMTRCRNLNCKSTLPVDDCDCKICSTKKGFCSACTCSVCHKFDCAANTCTWVGCDVCGHWCHVACALERNLIRPGPTLKGPIGTTEMQFQCLACNHSTSRPLLPFLTPMHLSPAQSHSLLNPISAPLLRRMTLASKPS

SEQ ID NO: 31494 - protein, 182 aa, Oryza sativa
MTEYYSSTVDECYETTGRQHGHGHGHGHGHGHGHGGMRVESHTDDYYSEGGEIDRGRRNNSMHSQEYLMRQQSGHGGYGYGGGQQQEYYKREEREHKQRERVGEIGALASGAFALYEGHQAKKDPANAQRHRIEQGVAAVAAVGAGGYAYHEHREQKQASYGAKEQQYGYARMPQQQGYYCN

SEQ ID NO: 31495 - protein, 345 aa, Oryza sativa
MELAVRAAAAASCSSGASLQLPRARAPLRLLGHRRLPARRVAVEAAAIAVEPENKVPQSNNSEAEVFACPVCYEPLIRKGPSGINLPSIYRSGFKCSKCNKSFTSKDIFLDLTVTSGTKEYSELKPARTELFRSPLVSFLYERGWRQNFNRSGFPGLDEELQMAQDYFQSVAGGVLLDVSCGSGLFTRKFAKSGSYSAVIALDFSENMLCQCYEFIQQDDTLVNTNLALVRADISRLPFASSSIDAIHAGAAIHCWPSPSNAVAEISRVLRPGGVFVATTFLSSPRNNPFSVEALRPLRQIVGPVNTSYNYFTEGELEDLCKSCGLVNYSSKVQRSFIMFSGQKP

SEQ ID NO: 31496 - protein, 676 aa, Oryza sativa
MAPTSMSLAAKTPLPFSTLPSSGVAQRPVSVTASLEHKTNDARRKFLKLALGNLGVGLPTLLGAKRALAEEQGVPSSRMSYSRFLEYLDKDRVKKVDLFENGTIAIVEAISPELGNRVQRVRVQLPGLSQELLQKLREKNIDFAAHSNQEDSGSLLFNLIGNLAFPLILIGGLFLLSRRAQGGLGGPNGPGFPLGFGQSRAKFQMEPNTGVTFDDVAGVDEAKQDFMEVVEFLKKPERFTAVGARIPKGVLLVGPPGTGKTLLAKAIAGEAGVPFFSISGSEFVEMFVGVGASRVRDLFKKAKENAPCIVFVDEIDAVGRQRGTGIGGGNDEREQTLNQLLTEMDGFEGNTGIIVIAATNRADILDSALLRPGRFDRQVSVDVPDVRGRTEILKVHGSNKKFDTDVSLEVIAMRTPGFSGADLANLLNEAAILAGRRGRTAISSKEIDDSIDRIVAGMEGTVMTDGKSKSLVAYHEVGHAICGTLTPGHDPVQKVTLIPRGQARGLTWFIPMDDPTLISRQQLFARIVGGLGGRAAEEIIFGEPEVTTGAAGDLQQITGLAKQMVVTFGMSDIGPWSLMDSGAQSGDVIMRMMARNSMSEKLAEDIDTAVKRLSDEAYEIALSQIRSNREAMDKIVEVLLEKETLSGDEFRAILSESTEIPVENRVPPATPAALPA

SEQ ID NO: 31497 - protein, 593 aa, Oryza sativa
MMGAAVTMVDRRMAFAAEADVDSKAAFGFFGGECFVGEGDLVNPAPPPPQQQQVHEGGFAAEDESDGDDDDDDDDDVDDIEELERRMWRDRVRHKRLKELQQSRAGRESRAGDAGGGGRQQRQSQEQARRKKMSRAQDGILKYMLKMMEVCNAQGFVYGIIPEKGKPVSGASDNLRSWWKEKVRFDRNGPAAIAKYQADNAVPGCDGDAGGAAPAGPHSLHELQDTTLGSLLSALMQHCDPPQRRFPLEKGVPPPWWPEGSEAWWPEAGVPKELGPPPYKKPHDLKKAWKVAVLTAVIKHMSPDVDKVRRLVRQSKCLQDKMTAKEIVTWLAVLKQEEDLYLKLHPGALPPPLSAASFNASVSGEYDVEGVDGDEAGNNNLQKAQNDATAFMDLTTTMDAALSNNKFLIMPLMKEEAIDVDFIQKRSEPELMLSSDSHARVYTCGNVQCPHSNYALGFLDRNERNAHQYACKHNAAAAAAESKPPPPHIFEPLGSFDFDLPVDGQRCLAGLMTMYDNDVAAATQMHHHHHQQQQANFFIRDDAPFGGDVAATAAAAPEFRFSSNFNVTGGGAVDYGGAMQQPPAKYAGSNWFY

SEQ ID NO: 31498 - protein, 744 aa, Oryza sativa
MATHERKTIDLEQGWEFMQKGITKLKNILEGKPEPQFSSEDYMMLYTTIYNMCTQKPPHDYSQQLYEKYRESFEEYITSMVLPSLREKHDEFMLRELVKRWSNHKVMVRWLSRFFHYLDRYFISRRSLPQLSEVGLSCFRDLVYQEIKGKVKSAVISLIDQEREGEQIDRALLKNVLDIFVEIGLTSMDYYENDFEDFLLKDTADYYSIKAQTWILEDSCPDYMLKAEECLKREKERVAHYLHSSSEQKLLEKVQHELLTQYASQLLEKEHSGCHALLRDDKVDDLSRMYRLFSRITRGLEPVSQIFKQHVTNEGTALVKQAEDAASNKKPEKKEIVGLQEQVFVRKIIELHDKYVAYVTDCFQGHTLFHKALKEAFEVFCNKGVSGSSSAELLATFCDNILKKGGSEKLSDEAIEDTLEKVVRLLAYISDKDLFAEFYRKKLARRLLFDKSANDEHERSILTKLKQQCGGQFTSKMEGMVTDLTVARDHQAKFEEFISTHSELNPGIALAVTVLTTGFWPSYKSFDINLPAEMVKCVEVFKEFYQTRTKHRKLTWIYSLGTCNINAKFEAKTIELIVTTYQAALLLLFNGVDRLSYSEIVTQLNLSDDDVVRLLHSLSCAKYKILSKEPNNRSISPNDVFEFNSKFTDKLRRLKIPLPPVDEKKKVVEDVDKDRRYAIDASIVRIMKSRKVLGHQQLVMECVEQLGRMFKPDFKAIKKRIEDLITRDYLERDKDNPNVYRYLA

SEQ ID NO: 31499 - protein, 134 aa, Oryza sativa
MFKDMVLFYIFQLQQSVAPKRADPQGLWRGCRMNHASCNSNQLQFLQGFRNQMLDAVRGFSGARQNGLFINSCFAHCQSERQDTRYAGDSPRLGNKRIAEAVGDWFFDRADAKYTDCAYPCDGTCHHLTFRGDY

SEQ ID NO: 31500 - protein, 353 aa, Oryza sativa
MKDYLDKMEKEVGKKIAVRSPHTNSAFQKIFSLPPEEFLINDFTCHLKRKMLTQGRLFLSPRIIGFYTNLFGHKTKFFFLWEDIEDIQVMPATLYSMGSPSLLIILHKGRGMDARHGAKQLDNEGRLKFHFQSFVSFNVAHKTIMALWKARSLTPEQKVQLVEEESEMKDLQNNESDSFLGIEDAKMSEVFSSTKPFDVSTLMSIFEGGPLEHQVMEKIGCMEYSVSPWESVRADAYQRQIHYKFDKRLARHEGEVMSTQQKSPLPDKNGWLVEEVMTLEGIPVGEYFNLHMRYQLEQISSKPKACNVQVSIGIAWLKSCKNRKKIAQEVLSSASSRLKKMFGLLEKELLPAK

SEQ ID NO: 31501 - protein, 580 aa, Oryza sativa
MSRRRSPYSRRSPSVPRHRSPSPHRRSHIRRKSPPFVRQRSPSPHHRRSPGRAPRSPSPARHRSPRRRSSLDRHWSPSPGRRRPRSPSPGRRRPRSPSPGRRRPRSPSPGRRRPRSPSPGRRRPRSPSPGRRRPRSRSPGRRRSPSPRGSPRLRSPKRPRRSPISPRSRSANRRPSPQRRRSTSPHDRSPIHSRRSLSRDIEKGTNGIPSSNDVDVLQRNKERSHDDNRNDTEVSGHLSSDSEHRKLTKSLNSPNKPERNSTRDSSLKGTDKHLPSQVRTDSSGEEEGSRARENARKANSSRRKIKDFSADLELKKAHDDLSPGEKSPSQHSGKETRRKQNNQLSESSEDERDGRRTKHTVDSPDDSQQKQHTPSRVGMHNSYSKDGMNSEDAIKGLRDGMASKKYPAKIDDDSESEDGSPFRKDKRKAHGNNNIDSGSSGSEESGKHRSHSEKRKHKKSRKHKRRYDDSSDESNSESDDKESKRRRKEEKRLRKEERRRRREERHRRKADRQASKLKLKHAETVDMASDLEKDRESDSDADARKKGSYNGRDESDQQKLEIELREKALESLRAKKAINH

SEQ ID NO: 31502 - protein, 501 aa, Oryza sativa
MLLETLLKQEEDQDQDDNVWNISMSGGTCLGLIARTVGDAIVPLVMPFVEGNITKPDWHCREAATFAFGSILEGPSVEKLAPLVQAGFDFLLNTTKDPNSQVRDTTAWTLGRVFELLHSPASANPIITSANLTRIMTVLLESSKDVPNVAEKVCGAIYFLAQGYEDAESISSVLTPFLPNLIAALLSAADRADTTHFRLRASAYEALNEIVRVSNISETSGIIGQLLQEIMRRLNLTFDLHILSSGDKEKQSDLQALLCGVLQVIIQKLSSSDAKSIIAQTADQLMFLFLHVFACHSSTVHEEAMLAIGALAYATGTDFVKYMPEFFKYLEAGLQNYEEYQVCSISVGVVGDICRALEDKILPFCDGIMTVLLKDLSNSMLNRSVKPPIFSCFGDIALAIGDNFEKYLPYAMPMLQGAAELLAVLDHTDEDMVDYGNQLRRGIFEAYSGILQGIKGAKAQLMIPYASHLLQFTEAVYKDRSRLMSCTLQFMLYYIGKFLPA

SEQ ID NO: 31503 - protein, 219 aa, Oryza sativa
MVSCGVLPIDRMTKHREAIQVVADRVPRSVLEQIYKITLPKPKPYESQSRPPTAAELLRAYCASRGHVSHAGLPDETRAARQILKDYIDGKIPHFELPPGMVDTENEHEETSGLEGPTTSAYNESGGSDSDERDDTVDPAQPDMRHVLSDLESFDLATEGSKPAGKKKKEASHKQHKKPQRKKDRSWRVGNDGGDGTAVLRVYQKPAVNLSAVSASDKT

SEQ ID NO: 31504 - protein, 751 aa, Oryza sativa
MTEMEDSLRSRTEQLLRVREEKERLIIEAADKISLEQKKVWSLQQKLEDANKRFAKVTTENYNLRNIVNSKDKVITELSESAALLNQKLIDATARLEFTHKQCGSLQYEVRILQKELEIRNKEREFDLKSIDAAQKHQQESTKKITALETECQRLRTMVQKRLPGPAALAKMKDEVERRGSNCVENRRRKPRSSAQSSPQVVTPRHPVSEGYLVKMQELDDENRHLRQLLAKKENDLQFVQLQYADEASKLSVVQGQLKELVGSHELDDDNRPEPWANSSLVSKGEHFRVGKQHASHSRGRRIAGSDMQLLVDISEIEKLEMISRPSSAPHQCVPDASDTESKTALTETVCQDRILEDGLSDKYPEWIQDVLELIIKKHQVLKISVDIIIDEIRSALRTEISDKGNDAANVTYDQAVIDSMVATLVERVSCMIERSSGNNVLSSQSFLHEKSELTCHLEHLICVCSDVLDGKANLRKFIEEVCLTLEWTVNQYIYCVDALETVDCITNDFDGNVSLRTLNMQEKQQMQSTNPKVAVGVQQEVQKEPFLIPGDPVENHSQVQFVTCKLDKELLAVRQDHGDNCQEKQSVHYKEESATADGSMQLLPEEEGKQLTNSAISAAADKLAECQETITSLSKKLQALKCPANADAVDKRKSDNLHLLVANQNFSSPPSIEAACKKENDERVTTEKNLLQEQDVGTGHKVDNNGSTQIAPRPVIPKSPLTTVSVDMKRRKKKKQGGSLLSRLIFGKKA

SEQ ID NO: 31505 - protein, 379 aa, Oryza sativa
MYHSPLGPSGFNLHSQAGGTFLGSSPDIRRRSYLYHGGGIRLSPGCPGPMSLGASPSQFTPPNSQMQIPSTATGKYGSTSPARSSHGSLGKAAAVGQYNRRRNLGHPPISMPPHEYTSQLTQGHHGDGTISNHFDGYARGHSGYPQSALPNPGHFSWRPHTCAGSGLSTDTSNHGSFPPSRYGGFPPTHSSNVSADTLASTSSIPDPADWDPNYSEESLLQEDTSLSDALSDLHLKDASGQTNQSSRLAHIQSHAIANSNSLSMNQRGDRLFHASTLTESSASTGHVTYDGYHNANYSQLNFQSRHGQPFQRYNHMTASYLRPMGNHHNGQPVWPNYGMAEPPPATMADGMPWGGRPGHSFTAGGLPSSFAGKDFGRIF

SEQ ID NO: 31506 - protein, 213 aa, Oryza sativa
MDFVCYCRILSLVPNCFLRPREAQKAADEAKARFGHIDGDHLTLLNVYHAYKQNNEDPQWCYENFINARALKSADNVRQQLVRIMTRFNLKMCSTDFNSREYYVNIRKAMLAGYFMQVAHLERTGHYLTVKDNQVVHLHPSNCLDHKPEWVTYNEYVLTTRNFIRTVMDIRGDWLIDVAPHYYDLSNFPSCGAKRVLERLYNKRERERAANRN

SEQ ID NO: 31507 - protein, 185 aa, Oryza sativa
MSLFICIFATGILEMRWSGVGIDDWWRNEQFWVIGGVSSHLFAVFQGLLKVIAGIDTSFTVTSKGGDDEEFSELYTFKWTTLLIPPTTLLLLNFIGVVAGVSNAINNGYESWGPLFGKLFFAFWVIVHLYPFLKGLVGRQNRTPTIVIVWSILLASIFSLLWVRIDPFLAKNDGPLLEECGLDCN

SEQ ID NO: 31508 - protein, 357 aa, Oryza sativa
MDVGLAACQTESDFVSGNDHSRETDLAGSQAPYDASDKEDTAADLIGPKQATLEIEKMQIDGIPEGPSSVPAVLQLTDPNQPAEQERLENSDSKFASTKDQGRVDGTSNLSGGDNAKCSLTNDDSQTVNLVGYSPSEDSNDDDSVQAADSDGVLGNKEGTDDVISAACTDDVSMLKTESIDRHGSDEVDHSTAPSAAIKQESGTEVTCDASVPVSESSISKEIGTSPECDDDQVATAAPHPPTPLSDATDVSADVQIPAGISEAKLEQPNETTSPSGAATEENNTVVSTQIPTLAESEDRTPADTAIQGTEVDSAEPASVSDDENKVTAADDSALPSTGPEDTADDKIDSSADASEK

SEQ ID NO: 31509 - protein, 345 aa, Oryza sativa
MIQTGISTIDVMNSIARGQKIPLFSAAGLPHNEIAAQICRQAGLVKSLEKGKHAEGGEDDNFAIVFAAMGVNMETAQFFKRDFEENGSMERVTLFLNLANDPTIERIITPRIALATAEYLAYECGKHVLVILTDMSSYADALREVSAAREEVPGRRGYPGYMYTDLATIYERAGRIEGRSGSITQIPILTMPNDDITHPTPDLTGYITEGQIYIDRQLHNRQIYPPINVLPSLSRLMKSAIGEGMTRRDHSDVSNQLYANYAIGKDVQAMKAVVGEEALSSEDLLYLEFLDKFERKFVTQGAYDTRNIFQSLDLAWTLLRIFPRELLHRIPAKTLDQYYSRDATH

SEQ ID NO: 31510 - protein, 110 aa, Oryza sativa
MGNEVEYTRIDKPLLPQRLLRDPTLCRKIHSRAAMKSKREKLESRFILDVTVLDGTLMAPSTPFTKIWRMHNNGSIMWPLGTQLIWVGGDQFALQTYVPLEVDSSGRVSC

SEQ ID NO: 31511 - protein, 448 aa, Oryza sativa
MVRQFVEKCLATASRRLSARELLKDPFLQVDDLVFCPGDGDYSLMNYLRQPYLEHAYSNVSMMSDGLSESIDEDTPTEDRWDCEDDDIKADGIDLFNGHEDEPLGNVDITIKGRKSEDGSIFLRLRIADNDGHVRNIYFPFDIEADTALSVATEMVAELDITDHEVTRIAEMIDGEVSALVPDWRPGPGIEESQDTTYCHNCGSNVSSCGSLYAYMSSAARGCQCAELHGRFEEITFQANGEQTDLQDSGGSSDDGGGQTQHVKDQEAVHSNGFVQMGRRGPRDQFCFSSFQEQSCSPRHYEYDTSLQAKGFDMKHEVKMAKYKARKMAHLRRAIHPSLDFDNLNGERRMKSSLNKLQSFHIGKNHNFRIPTCERSPGARDAEEDPDIFNLAYHSRHPDPGAQRARHCEVDAQSSPDLMFTARSYYTGAQLPTNLPRTKSVTLNAVDA

SEQ ID NO: 31512 - protein, 463 aa, Oryza sativa
MRWKLKSSAYKRVPSRDAAMDLDVETPAKMADGGAPSWRMSLPHVCVATLTSFLFGFAGNTLAEGLVVSICLGGAFVGCLFSGSIADGIGRRRAFQLSALPMIIGAAVSALTNSLEGMLLGRFLVGTGMGLGPPVASLYITEVSPPSVRGTYGSFVQIATCLGIVVSLLIGTPVKDIDRWWRVCFWVAAVPATLQALGMEFCAESPQWLYKCGRTTEAEIQFEKLLGPLHVKSAMAELSRSERGDDGENVKYSELFYGRNFNVVFIGTTLFALQQLSGINSVFYFSSTVFRSVGVPPNLANICMGIANLSGSIVAMLLMDKLGRKVLLSGSFLGMAFAMGLQAVGANRHHLGSASVYLSVGGMLLFVLTFSLGAGPVPGLLLPEIFPNKIRAKAMALCMSVHWVVNFFVSLLFLRLLEQLGPQVLYTMFSSACVVAAIFVRRHVVETKGKTLQEIEVSLLQTQ

SEQ ID NO: 31513 - protein, 214 aa, Oryza sativa
MDFGDSRRKPNVVGKFTVAVALTVMCIIVLKQSPGFTSTSVFSRHEIGVTHVLVTGGAGYIGSHATLRLLRDNYRVTIVDNLSRGNMGAVRVLQRLFPEPGRLQFIYADLGDAKAVNKIFSENAFDAVMHFAAVAYVGESTLEPLRYYHNITPNTLTVLEAMAAYNVKTLIYSSTCATYGEPDTMPITEATPQNPINPYGKAKKDGRGHHFRFL

SEQ ID NO: 31514 - protein, 540 aa, Oryza sativa
MACLAPQLKWPLSTRAAAFREHGGAGIGGFRTVRLHCAVSTTALVEAESSDSLAPGARRLVVYDGAVAPPPLPGGFGEAILNQEAVVAAAAAEAVALARAAAEVAGEVVRMSQTEQRHRPDFVTTHDTEDNYLAREILRAEAGLGARYADACLSEDAGFSSIFSDESEVDDDEQCVQGVAVKSVRQSERRARRVRAAMKAAKSFSGRNPVAASSSARKKRLKGCRSPLGCFYKMTGRRLLTAKQEVEFSQGIQDLLKLEAIQKELAHYNGGEPTFSQWAEAAGTDENTLRKRLNYGISCKNTMVKSNVRLVISIAREFEGPGMEFSDLIQEGIQGLVRGAEKFDASKGFRFSTYSHWWIKQAIRKSVLEQTQIIRLPAHMAEASSRVKECRRRLRRQLKRLPTNEEIASDTGMPLRRVEAAMSLPKYTVSLTSKVGCTDMTYQEITPDTSTETAEEMLHRWLMKEDVDRALDGLSPRERQVIRYRFGMDDGRLRTLHDIGRLMGVSRERIRQIELVAFRKLRGRKKVQSLQHYLQPVESW

SEQ ID NO: 31515 - protein, 426 aa, Oryza sativa
MKREDTKWQAGRDVWWQDVVTSFPTKCDVEWVDAEDPLFLLYTSGSTGKPKGVLHTTGGYMVYSATTFKYAFDYKPSDIYWCTADCGWITGHSYVTYGPLLNGATVLVFEGTPNYPDSGRCWDIVDKYKVTIFYTAPTLVRSLMRDGTEYVTRHSRKSLRVLGSVGEPINPSAWRWFYNIVGDSRCPISDTWWQTETGGFMITPLPGAWPQKPGSATFPFFGVQPVIVDEKGKEIEGECSGYLCIKKSWPGAFRTLYGDHDRYETTYFKPFAGYYFTGDGCSRDKDGYHWLTGRVDDVINVSGHRIGTAEVESALVSHPKCAEAAVVAVEHEVKGQGIYAFVTLVDGVPYSEELRKSLILTVRNQIGAFAAPDKIHWAPGLPKTRSGKIMRRILRKIASKQLDELGDTSTLADPGVVDQLIALKDC

SEQ ID NO: 31516 - protein, 297 aa, Oryza sativa
MEEEGEGLCEIARLPEELLSAAISRASPRDACHAAAVSPAFRAAADSDAVWASFLPRNLPDLADGELSPAPASKKELFLRLSDGPYLLSDRLMSMWLDRETGAKCYMLSARSLVIIWGDTPHYWRWIPLTDSRFAEGAELIDVCWLEIRGRIHSKMLSPNSTYAAYMVFKIADEFYGLDAPFQEASVSLGGRGSTKIVCVQSYDSEDEEVPENYWPMSIGPLLRRRARRRDRRLVLDEGVTVPQKRTDEWMELEMGEFINEEGEDGEVCFSLMETKGGNWKRGLIVQGIEIRLKKSG

SEQ ID NO: 31517 - protein, 491 aa, Oryza sativa
MAPAMVAAMGEKPKPAVVLGGMVSGLREVYESGRTKDLEWRQSQLKALIRLLTDKEEEIFAVLHDDLGKHRGESFRDELGILVKSIKYTLQNLKKWAASERAESPLVAFPATAMVVPEPLGVVLVFSCWNLPLGLALEPLSGAIAAGNAVVLKPSELAPSTAAFLAANIPRYLDSRAVKVVLGGPNVGEELMEHRWDKVLFTGSARIGRIIMAKAVKHLTPVALELGSKCPCIVDWLDSKRDRQIAVNRIIGAKWSTCAGQACIAIDHVIVEERFAPILIELLKSTLKRFMAKPGGMARILNAKHFERLSGYLEDNRVAASVVHGGYMDPKKLNIEPTLLLNPPADSDVMTEEVFGPILPIITVKKIEDCIVYLKSKPKPIAMYAFTNNERLKRRIVEETSSGSVTFNDAVVQYALESVPFGGVGHSGFGQYHGKYSFELFSHKKAVFKRSFLIEFMFRYPPWDERKIGTLRHVFSYNYFLLFFNLLGFRR

SEQ ID NO: 31518 - protein, 70 aa, Oryza sativa
MPFFGLVMALIGSLLSILVAVIMPALCFLKIRQNKATTAQVVASIGIIILGTISAALGTYSSVLRIVENY

SEQ ID NO: 31519 - protein, 641 aa, Oryza sativa
MMGGGLVVDQGMMFPGVHNFVDLLQQNGGDKNLGFGALVPQTSSGEQCVMGEGDLVDPPPESFPDAGEDDSDDDVEDIEELERRMWRDRMKLKRLKELQLSRGKDPAGGVVGDPSKPRQSQEQARRKKMSRAQDGILKYMLKMMEVCRAQGFVYGIIPEKGKPVSGASDNLRGWWKEKVRFDRNGPAAIAKYQADNAVPGFESELASGTGSPHSLQELQDTTLGSLLSALMQHCDPPQRRYPLEKGVPPPWWPTGDEEWWPELGIPKDQGPPPYKKPHDLKKAWKVSVLTAVIKHMSPDIEKIRRLVRQSKCLQDKMTAKEISTWLAVVKQEEELYLKLNPGARPPAPTGGITSAISFNASSSEYDVDVVDDCKGDEAGNQKAVVVADPTAFNLGAAMLNDKFLTPASMKEEATDVEFIQKRSASGAEPELMLNNRVYTCHNVQCPHSDYGYGFLDRNARNSHQYTCKYNDPLQQSTENKPSPPAIFPATYNTPNQALNNLDFGLPMDGQRSITELMNMYDNNFVANKNLSNDNATIMERPNAVNPRIQIEEGFFGQGSGIGGSNGGVFEDVNGMMQQPQQTTPAQQQFFIRDDTPFGNQMGDINGASEFRFGSGFNMSGAVEYPGAMQGQQKNDGSNWYY

SEQ ID NO: 31520 - protein, 449 aa, Oryza sativa
MTGALAMMPSTSSPYPLLAPPTCSSRLPPLRCFVGLRWSAPRIQVREYPDAVAGIAKGAGGRGGRFRAPASSISQPCSRTIIITNEHVQNADFPPNYSKREKKPFPIPVLELRRRAKERAKKAEGKPKRSLPPPKNGMLIKRLIPVAYKVYNARILLINNLKRLMKVIPVKGCRHCSEIHVGSVGHPFRTCKGMSSDKRRGQHDWGGTLVEAVFVPVEAYHLEDRLGKRIPHDQRFAVPRIPALVELCIQAGVNLPEYPTKRRRKPIIKIGKNEFVDANEDDLPDPEPYKLEHPILEELNDNEIIAPASPEEIVALAEETLEAWEVVRDGALKLMKGYAVRVCGYCPEVHIGASGHKARNCGAFKHQQRNGQHGWQAAVLDVLIPPRYVWHLPESGEDLQRDLKSFYGQAPAIVEICVQAGAKVPEKYKATMRLDIGIPTSLREAEMVV

SEQ ID NO: 31521 - protein, 286 aa, Oryza sativa
MAMVQAGMGLTRVVVLIGAGMAGSVVLRNGRLSEILGELQEILDKGEKGKDGEGGGGADMTDALTRQVRNLAMEVKQLASSRGSITVLNGGSGQTGVSGLIVPAATVGALGYGYMWWKGISFADLMYVTKRNMANAVSSMTKHLEQVQTSLAAAKRHLTQRIERLDDKLDQQKALSGQIRDDVTDARLKLENIGSEIKNIKQLVWGLDEKMDSMEAKQNFSCAGVMYLCQFIEQNGGKLPERLEGSKMAGKRFGSQNLIQGLQLAIETGNFDKETFNALKNNSDSR

SEQ ID NO: 31522 - protein, 416 aa, Oryza sativa
MQARSTKSFSGGWRMRISLARALFMQPTLLLLDEPTNHLDLRAVLWLEQYLCSQWKKTLIVVSHDRDFLNTVCNEIIHLHDKNLHVYRGNFDDFESGYEQKRKEMNRKFEVFEKQMKAAKKTGSKAAQDKVKGQALSKANKEAAKSKGKGKNVANDDDDMKPADLPQKWLDYKVEFHFPEPTLLTPPLLQLIEVGFSYPNRPDFKLSGVDVGIDMGTRVAIVGPNGAGKSTLLNLLAGDLTPTKGEVRRSQKLRIGRYSQHFVDLLTMEENAVQYLLRLHPDQEGMSKAEAVRAKLGKFGLPGHNHLTPIVKLSGGQKARVVFTSISMSHPHILLLDEPTNHLDMQSIDALADALDEFTGGVVLVSHDSRLISRVCDDKQRSEIWVVEDGTVNKFDGTFEDYKDELLEEIKKEVEE

SEQ ID NO: 31523 - protein, 469 aa, Oryza sativa
MAVTADVKLEGLRAATDKLDQISENEKSGFISLVSRYLSGEAEQIEWSKIQTPTDEVVVPYDTLSAAPEDLNETKKLLDKLVVLKLNGGLGTTMGCTGPKSVIEVRNGFTFLDLIVIQIESLNKKYGCNVPLLLMNSFNTHDDTQKIVEKYSNSNIEIHTFNQSQYPRIVTEDFLPLPSKGKTGKDGWYPPGHGDVFPSLNNSGKLDTLLAQGKEYVFVANSDNLGAIVDIKILNHLIHNQNEYCMEVTPKTLADVKGGTLISYEGRVQLLEIAQVPDEHVNEFKSIEKFKIFNTNNLWVNLKAIKRLVEAEALKMEIIPNPKEVDGVKVLQLETAAGAAIRFFEKAIGINVPRSRFLPVKATSDLLLVQSDLYTLVDGFVIRNPARTNPSNPSIELGPEFKKVANFLARFKSIPSIVELDTLKVSGDVWFGSGVTLKGKVTITAKSGKLEIPDGAVLENKDINGPEDL

SEQ ID NO: 31524 - protein, 329 aa, Oryza sativa
MYEFRSQKDVQRYLESGDVTNCVMIQNKRKMEDLHTARNQSHHTRRPSDHRQLDAGEGATQCDLPIARGNSARSDFLVNANSSDNSEDMSSSVPKGVSEGKLTRLKLQKARVPNQSVEHESSTGEVANMEHKPKEKKQKTKPVKQISTPLRASPRLAALKINQEGNNEPKDEALSTNTDTANQSQPKLTKSPKAKANSSVLPEKSDGAHTSNASEIPQNKYPSATEQMQGSSVHPQQAGTADAMPGSALSSLLRSIWSDPCLKFAIKTLAGDIPALDFIPSQDMNKGTTPNCSSSAYDGSRNHAQVDHVGMPMPRPSDKFYGSGWFPPQ

SEQ ID NO: 31525 - protein, 178 aa, Oryza sativa
MKVLKGSFDQGATEYVEVDRPVAYKEVLKTWAKWVDRNIDPNRTTVFFMSMSPNHITPEAWGNYGGIKCAMETLPITNRTTSLDVGTDWRLYAGAQEVLQTFRRVPVHLVDITALSELRKDAHTSVHTLRQGKLLTPEQQSDPKTYADCIHWCLPGLPDTWNQFLYARIASAPWSSDQ

SEQ ID NO: 31526 - protein, 223 aa, Oryza sativa
MEKAAANQAGKVLKKGKKKQAKDELDRQKQAEKKRRRLEKALANSAAIISELEKKKQKKREEQQRLDEEGAAIAEAVALHVLIGEDSDEPCHLMLNKHRRCNHWDHSAGFDFAVDAQGADIYPPDGLIQCADHVYAPKGRCTDWGIGQPLPSWGEVKDLQLQAPCYQGMFHQSVACPGFIAAQAVSSLQIGGDSSDITSPSQGATVVNRMLGATNRLNLYREI

SEQ ID NO: 31527 - protein, 310 aa, Oryza sativa
MAMAMAMRRAAALGARHILAASSTSSSGVLLRRHMSVDAGAAMEKVRAAGLLRTQGLIGDKWVDAYDGKTIEVQNPATGETLANVSCMGSKETSDAIASAHSTFYSWSKLTANERSKALRKWHDLIISHKEELALLMTLEQGKPMKEALVEVTYGASFIEYFAEEAKRIYGDIIPPTLSDRRLLVLKQPVGVVGAVTPWNFPLAMITRKVGPALACGCTVVVKPSEFTPLTALAAADLALQAGIPAGAINVVMGNAPEIGDALLQSTQVRKITFTGSTAVGKKLMAGSANTVKKVFMKNLQVRLSRLFRV

SEQ ID NO: 31528 - protein, 372 aa, Oryza sativa
MAGKGAKATAAKSAEKEKGKKAPVSRSSRAGSQEKPAPNKDVYQLFAEKVRDNKQLESRWAIMQETRVEYFRGKDFTTFMRNHPEVREILGPDKDLEVEDIVNTLLSKNLVIRCDRVWKTVRPGKKKLSSWPAHLEIHREQVFTENDGFFAWMFLKRRTLWQTILSFVWPLFALAVCLFPVYPYQCKIVVLYSCAGALLFIVSILLLRAAIFGILWVLLGKRVWFFPNINAEETTFRELVRFWPEKDEGERPKWTSRLFYATVAVLVILLLRHHAPDEAARARYQKKVSNIIDDVLEWSPKLALSGMMEKHTGTNASETSNHTSGTGSSPVPPTNEGNTAKADPDMDRQTNSDKVQDGDEYGDDMRTRFSEV

SEQ ID NO: 31529 - protein, 553 aa, Oryza sativa
MSFIRRADPSTTYADNLYIHKFGTPNSNFAARRYASDTQLFRYGPEPYNPENSFYNQQASPMPYMVTADGHSPSSADNSCSDVAKDSPLVSNVSQQNSQSISDNQSSELEVEFDEDDIRMKLQELEHALLDDSDDILYEISQAGSINDEWADPMKNVILPNSPKESESSISCAGSNNGEPRTPKQLLFDCAMALSDYNVDEAQAIITDLRQMVSIQGDPSQRIAAYLVEGLAARIVASGKGIYKALSCKEPPTLYQLSAMQILFEICPCFRFGFMAANYAILEACKGEDRVHIIDFDINQGSQYITLIQFLKNNANKPRHLRITGVDDPETVQRTVGGLKVIGQRLEKLAEDCGISFEFRAVGANIGDVTPAMLDCCPGEALVVNFAFQLHHLPDESVSIMNERDQLLRMVKGLQPKLVTLVEQDANTNTAPFQTRFREVYDYYAALFDSLDATLPRESPDRMNVERQCLAREIVNILACEGPDRVERYEVAGKWRARMTMAGFTPCPFSSNVISGIRSLLKSYCDRYKFEEDHGGLHFGWGEKTLIVSSAWQ

SEQ ID NO: 31530 - protein, 302 aa, Oryza sativa
MSGYVNQKKFGGDTPYSFMFGPDICGDQTKKLHLILSYQGQNYPIKKDLKCETDKLTHFYTFILRPDASYSLLVDNREREFGSMYTDWDILPPRKIKESNAKKPKDWDDREYIEDPDEVKPEGYDSIPKEIPDPKDKKPESWDDDDDGVWKPRMIPNPEYKGRWKRKKIKNPNYKGKWKIPWIDNPEFEDDPDLYVLKPLQYVGIEVWQVKAGSVFDNILICDDPEYARSVVDEVRAANKEAEKEAFEEAEKRRKAREDEEARRAREEGEKRRRDRDRHRGRDRYRDRYRGHHRRYDYHDEL

SEQ ID NO: 31531 - protein, 384 aa, Oryza sativa
MAPGGLGAYSDSRGIPGIRKEVAEFIERRDGYPSDPELIYLTDGASKGVMQMLNTIIRSERDGILVPVPQYPLYSAAISLFGGSLVPYYLEEEANWGLDFVNLRQTVASARSKGITVRAMVIINPGNPTGQCLSEGNIKELLKFCFHENLVLLADEVYQQNIYQDERPFISARKVLFDMGPPMSREVQLVSFHTVSKGYWGECGQRGGYFEMTNLPPKTVDEIYKVASIALSPNVPGQIFMGLMVNPPKPGDISYLKFSAESKSILESLRRRARLMTDGFNSCRNVVCNFTEGAMYSFPQIRLPPKAIDAAKRAGKAADVFYCLKLLEATGISTVPGSGFGQKEGVFHLRTTILPAEEDMPAIMTSFKKFNDTFMDQYDGYSRM

SEQ ID NO: 31532 - protein, 559 aa, Oryza sativa
MASSGFSWTLPDHPKLPKGKTVALVVLDGWGEANADKYNCIHVAQTPVMDSLKNGAPERWRLVKAHGTAVGLPSEDDMGNSEVGHNALGAGRIFAQGAKLVDLALASGKIYDGEGFNYIKECFDKGTLHLIGLLSDGGVHSRLDQVQLLLKGASERGAKRIRVHILTDGRDVLDGSSVGFVETLESDLSQLRDKGIDARIASGGGRMYVTMDRYENDWDVVKRGWDAQVLGEAPYKFQNAVEAVKTLRAETKASDQYLPPFVIVDESGKSVGPVVDGDAVVTFNFRADRMVMLAKALEYADFDKFDRVRVPKIRYAGMLQYDGELKLPSHYLVSPPEIERTSGEYLVKNGVRTFACSETVKFGHVTFFWNGNRSGYFDETKEEYVEIPSDIGITFNVKPNMKALEIAEKARDAILSGKFDQVRVNLPNGDMVGHTGDIEATVVACKAADEAVKIILDAIEQVGGIYLVTADHGNAEDMVKRNKSGQPLLDKNGGIQILTSHTLQPVPVAIGGPGLHPGVKFRSDIQTPGLANVAATVMNFHGFEAPADYEPTLIEVMDN

SEQ ID NO: 31533 - protein, 416 aa, Oryza sativa
MTTLPENFKPHRAVKKIFELRRQMIETGEGIDWAVGEALAFATLIIEGNHVRLSGQDVERGTFSHRHAVIHDQETGEQYCPLDNLVMNQDEELFTVSNSSLSEFAVLGFELGYSMENPNSLVLWEAQFGDFSNGAQVIFDQFLSSGEAKWLRQTGLVVCLPHGYDGQGPEHSSARLERFLQMSDDNPYVIPEMDPTLRKQIQQCNWQVVNVTTPANYFHVLRRQIHRDFRKPLIVMSPKNLLRHKDCKSNLSEFDDLAGHPGFDKQGTRFKRLIKDQNNHKDLEEGIKRLVLCSGKVYYELDEERRKKERDDVAICRVEQLCPFPYDLIQRELKRYPNAEIVWCQEEPMNMGAYSYINPRLLTAMRALGRGTIDDIKYVGRAPSAATATGFYSVHVQEQTELVQKALQRDPINSPF

SEQ ID NO: 31534 - protein, 348 aa, Oryza sativa
MTQGGIPPSTNPASLLKEAIHVISCGYEDKTEWGKEIGWIYGSVTEDILTGFKMHARGWISIYCMPPRPCFKGSAPINLSDRLNQVLRWALGSVEILLSRHCPIWYGYNGRLKLLERLAYINTIVYPITSIPLIAYCVLPAICLLTNKFIIPEISNYAGMFFILLFASIFATGILELRWSGVGIEDWWRNEQFWVIGGTSAHLFAVFQGLLKVLAGIDTNFTVTSKASDEDGDFAELYVFKWTSLLIPPTTVLVINLVGMVAGISYAINSGYQSWGPLFGKLFFSIWVILRLYPFLKGLMGRQNRTPTIVIVWSILLASIFSLLWVKIDPFISPTQKAVALGQCGVNC

SEQ ID NO: 31535 - protein, 209 aa, Oryza sativa
MNNEFDYLFKLLLIGDSSVGKSCFLLRFADDSYVDSYISTIGVDFKIRTIEMDGKTIKLQIWDTAGQERFRTITSSYYRGAHGIIIVYDITDMESFNNVKEWMSEIDKYANDSVCKLLVGNKCDLAESRVVETAVAQAYADEIGIPFLETSAKDSINVEEAFLAMCAAIKKQKSGSQAALERKASNLVQMKGQPIQQQQQPQKSSCCSS

SEQ ID NO: 31536 - protein, 542 aa, Oryza sativa
MAREQALLLTEIVNRGVEPSGPDAGSPTFSVRVRRRLPDFLQSVNLKYVRLGYHYLISHGVYLATIPVIVLVCGAEVGSLSRDELWRKVWGEATYDLATVLAFLAVLAFTISVYIMSRPRPVYLIDFACYKPADELKVSKAEFIDLARKSGKFDEDSLAFQSRLLAKSGIGDESYMPRCVFEPGTNCATMKEGRAEASAAMFAALDELFDKCRVRPKDVGVLVVNCSLFNPTPSLSAMIVNHYKMRGNILSYNLGGMGCSAGVIAVDLARDMLQASGAGLAVVVSTEAVSFTWYAGKRRSMLIPNAFFRAGCAAVLLSNRRRDFHRAKYQLEHIVRTHKGADDRSFRSVYQEEDEQRIKGLSISRDLVEVGGHALKTNITTLGPLVLPFSEQILFFAGVLFRHLFPSKTSAPPPPSADGDASAAAPYIPDFKRAFEHFCMHAASRDVLEHLQGNLGLRDGDLEASRAALHRFGNTSSSSIWYELAYLEAKGRVRRGDRVWQLAFGSGFKCNSAVWRAVRRVRRPARSPWLDCVEQYPARMNA

SEQ ID NO: 31537 - protein, 315 aa, Oryza sativa; identical to SEQ ID NO: 31431

SEQ ID NO: 31538 - protein, 86 aa, Oryza sativa
MHLCVEDWKWWWKAFFASGSVAFYVFLYSINYLVFDLRSLSGPVSATLYLGYSLIMALAIMLSTGAIGFLLSFYFVHYLFSSVKID

SEQ ID NO: 31539 - protein, 340 aa, Oryza sativa
MPRPAKIRKKHENVFDQLIKAIKAPVDFDLPPVLKEWKSNYYVPIKRNAYITRKRVEDDGIFCSYTPSGSSATCDKDCQCGMLFSCCSSTCKCGNKCANKPFQHRTLRKTKLIKTEKCGNGVVAEEDIKKGEFVIEYVGEVIDDRTCEQRLWKMKRQGDTNFYLCEVSSNMVIDATNKGNMSRFINHSCEPNTEMQKWTVEGETRVGIFALRDIKTGEELTYDYKFVQFGADQDCHCGSSNCRKMLGITKPVNSIVLHNGNLSQDQHVRKKRKTYLENCIGEIVRLWHRRHSMYLAASIYDFNERNGIHTLLFTDATIEEFDLREEDWDFLPDPDGPEEV

SEQ ID NO: 31540 - protein, 427 aa, Oryza sativa
MGRHSCCYKQKLRKGLWSPEEDEKLMNHITKHGHGCWSSVPKLAGLQRCGKSCRLRWINYLRPDLKRGAFSQEEEDLIIELHAVLGNRWSQIAAQLPGRTDNEIKNLWNSCIKKKLRQKGIDPNTHKPLTEADRRGAAPTVSTERTSGSSDVNPSSAGALGNLSHLLSETAQSSMLLPVYDKNHPETASLPRPKVPPKELFLDQLTAGHESPSSCRSSGPTLYFPFQQPLGYSNECGTGDGASMNSLWFNQNDFNCSTISTVMPPVSPSALSTSMGLNLPPEDPRHGGTGIGNTPFYWDGSNPSSSGSTGSSGSNSMGFEPQSTTSILENSVFPWTDIGQEKDTRVHLVEELKWPDLLHGTFAEATTAMQNQSQSLYDDVIKAESQFNMEGICASWFQNQQPQQQLQAASDMYDKDLQRLPLSFEHI

SEQ ID NO: 31541 - protein, 355 aa, Oryza sativa
MHTNAMKAAQMGLMATTSEHLKMQSKAMKQLCRLFPLRRVIKDGEQNDGYNGPYDVICNARLPRGLDPHSVPSEELSASLGYMLQLLSIVVPILAAPVLHISGFGASCSRVWQRSSYWSTRQSQSKVYPLFIPRKNNCSVGEDNSWTESGSGNFGVQSVDSDNKSVLDSKRSNSFNFSIASSHSMERHQDLQRGISLLKTSVTAITTYYYNSLGMDVPSNLFTFEAFAKLLHMLSSLKVLRTTLQSNVASRSEKQGQQLNRSIWKASSAISSNSSLMDSVNTAIMPSSLDNLLLNSNTSFLYSGKPTKHGGVPDNILEGWDMVERDVLPPPPSRVEDVAQWERAHTFNRTGSKKK

SEQ ID NO: 31542 - protein, 68 aa, Oryza sativa; identical to SEQ ID NO: 29616

SEQ ID NO: 31543 - protein, 340 aa, Oryza sativa
MINRDSRGHSYFIVRGEILGFMKDEQLRKHLPRMFSLIKNESWGLEDDQILDADYYRRRRRVEKEDGMNFIESIFSFVFGDGDPNDGLEDKRWKMIGQYISSNGGVVTAEELAPYLDVPPISEQSKDDESFILPVLLRFQGHPEVDEQGNILYRFPSLQRTASSKGSGVREYVGNKWSAMFSSVEKYLEEKPWKFSKANASERAMVAGLGGLNLFGVIILGNLLKQMTVPPGGLISFVAQLFPLLQVYAGSFFAIPLFRWFLLRKTNNDIERRNKAREQRAQELALPESSLRRKLLSARDMAQRKVITPEEIVYTTEKDLLDQDYEVKEWEKRFKELESD

SEQ ID NO: 31544 - protein, 433 aa, Oryza sativa
MAAAFSSTVGAPASTPTNFLGKKLKKQVTSAVNYHGKSSNINRFKVMAKELDEGKQTDQDRWKGLAYDISDDQQDITRGKGFVDSLFQAPTGDGTHEAVLSSYEYLSQGLRTYDFDNTMGGFYIAPAFMDKLVVHISKNFMTLPNIKVPLILGIWGGKGQGKSFQCELVFAKMGINPIMMSAGELESGNAGEPAKLIRQRYREAADIIKKGKMCCLFINDLDAGAGRMGGTTQYTVNNQMVNATLMNIADNPTNVQLPGMYNKEDNPRVPIIVTGNDFSTLYAPLIRDGRMEKFYWAPTRDDRVGVCKGIFRTDNVPDEDIVKIVDSFPGQSIDFFGALRARVYDDEVRKWVSDTGVENIGKRLVNSREGPPEFEQPKMTIEKLMEYGYMLVKEQENVKRVQLAEQYLSEAALGDANSDAMKTGSFYGSAPSS

SEQ ID NO: 31545 - protein, 396 aa, Oryza sativa
MSWWWAGAIGAVKKRQEENAAATEPSFQSVALVVGSTGIVGTSLLDILPLQDTPGGPWKVYAVSRRPLPPWSPPASPAATHLHLDLADSAAVAEVLTPLTDITHVFYVAWSAHPTEAQNREVNSAMLRNILSVVVPNCPALVHVCLQTGRKHYIGPFEVIGKIAAPDPPFTEDMLRLDCPNFYYDLEDVLFNEVSRRDGAVSWSVHRPTVVFGFPPRSAMNVVGSLCVYAAICRKEGAVLRWPGSRVAWEGFSDASDADLIAEHEIWAAVEPFAKNEAFNCSNGDLYKWKLLWPMLADQFGVEWSGYEGEESSFKLADAMSGKEAVWAEIVKENDLMDTELEEITNWWFVDAVFGVRSEHLDSMNKSKEHGFLGFRNTVNSFNTWIEKMKVFKIVP

SEQ ID NO: 31546 - protein, 669 aa, Oryza sativa
MEGGVGGEVDHLAGERATAQFDVEHMKVAWAGSRHAVDVADRMARLVASDPVFRKDNRTMLPRKELFKDTLRKAAHAWKRIVELRLTEEEANLLRLYVDQPGYVDLHWGMFVPAIKGQGTEEQQKKWLPLAYRFQIIGCYAQTELGHGSNVQGLETTATFDPKTDEFVIHSPTLTSSKWWPGGLGKASTHAVVYARLITEGKDYGIHGFIVQLRSLEDHSPLPGVTLGDIGGKFGGGAYNSMDNGVLRFDHVRIPRDQMLMRLSQVTKEGKYVHSDVPKQLLYGTMVFVRQTIVADASKALSRATCIAVRYSAIRKQFGPQTGGPETQVLNYKTQQSRPFPLLASAYAFRFVGEWLKWLYTDVTHKLEAKDFSTLQEAHACTAGLKAVTTSATADGIEECRKLCGGHGYLNSSGLPELFAIYVPACTYEGDNVVLLLQVARFLMKTVSQLASGKQPVGTTAYMGNIQYLMQCKCGVNTAEDWLNPAAIREVFEARALRMAVNCAQNINKAPSQEEGFYELSPDLLEVAVAHIQLIIVTKFIEKLEQDIPGEGVKEQLCILCNVYALYLVHKHLGDFLSTGSITARQGALANEQLGKLYAQVRPNAVALVDAFNYTDHYLGSVLGRYDGNVYPALYEEAWKDPLNDTDVPDGYQEHLRPLLKQQLKLSRL

SEQ ID NO: 31547 - protein, 416 aa, Oryza sativa
MATIVNTTEEEPMLAVVRFTAELAWADAGADVAEPEVTRLCVEAQQHILAARWLDMASLMLASADLLLQSTRLPDKDKDLECILAIICNLVTKARSQDEALQIAELICAKLTHQPQDKPALRLKVLFSLYNLLGSPYAKAFVYKKALDLAAAGKAADCIIPTFKNIDSFISDWGIGKVEQRDLFLAAARILKDQKGMNKEYFNFLNKYLATFDGSADDADAIGDAKEEAVAAIIEFVKSSDLYQCDLLNMPAVAQLEKDEKYQLVYELLKIFLTQRLDSYLEFQSANSALLKGYGLVHEDCITKMRLMSLLDLSSRCAGEIPYHAIIDALKINDDEVEYWIVKAISCKILDCKVDQLNQVIIVSRHTERIFGMPQWQSLRSKLGVWRGNIASAINTIQANKVTDDGSQGIQGLMIR

SEQ ID NO: 31548 - protein, 265 aa, Oryza sativa; identical to SEQ ID NO: 30923

SEQ ID NO: 31549 - protein, 294 aa, Oryza sativa
MAHAWNSYVKYAWGMDELQPQSKNGVNSFGGLGATLVDSLDTLYIMGLKDEFQRARDWVADSLSFDKDYDASVFETTIRVVGGLLSAYDLSGDKVFLEKAKDITDRLLPAWDTPSGIPYNRINLAHGRAHNPGWTNGDSILADSGTEQLEFIALSQRTGDPKYQQKAESVIRQLQKIYPSDGLLPIYINPHSGTASYSTITFGAMGDSFYEYLLKVWVQGNKTEHVKHYRQMWETSMEGLLSLTKKLHPLITTTFARRMVVHCLTRWMSLHVLPLVCWHWGPLAMRRLKRLKKL

SEQ ID NO: 31550 - protein, 246 aa, Oryza sativa
MAIIMSSWSENYGDPSESKDLMSQFKVAAKAIASDEKIALLGAIQSLFEGSMYTFVFLWTPALSPNEEDIPHGFIFATFMLSSMLGSSIAARLLARKLKVEGYMQIVFTISAFTLFLPVVTNILVPASSVKGGSISFGGTLQLLGFCTFEACVGIFWPSIMKMRSQYIPEEARSTIMNFFRIPLNLFVCVVLYNVNAFPITVMFGMCSIFLFMAAILQRRLMVVSDLHKSSTKAQEMVDEDEPLNP

SEQ ID NO: 31551 - protein, 194 aa, Oryza sativa
MSGNRQSIDAYSSETKSLALCLFEFMAKAVGAKPESLLDLFEEQPRGLRMAYYPPCRQADKVMGLSPHSDAGGLTLLLEINNVQGLQIKKDGKWFSIDAPNGALIANIGDTLEILSNGKFRSVEHRAVINPNKERISAALFHYPSENMVISPLPEFVKDGKVKYRSISYLDFMKQIFTQQLDGKNRVEVLKLDQ

SEQ ID NO: 31552 - protein, 453 aa, Oryza sativa
MRPHTLQVWTWSSGATSFFSLSLNERGASKRSAHPGDIRARRRRGLCAAAREFARRSKGWAGQREEICSEPMAILPLSISHSLTSALSATSSGIGRPVARLLHPRVPSRPTVICLAAPPKVPVPIASPASLGDDPSKWDPAECDALLRGGEQVASVLQEMLKLMEDMEMDGSFESLAVELIAQGVIGKRVDEMESGFLMALDYMIQLAEKDSDNERKSLLEVVKQTVLDHLTKKCPPHVQVVGLLCQTEKKDSRHELLRRVAAGGGVFKNDKGLKCQIPGANLNDIANQADDLLESMESRPTIPDRKLLARLVIVREEARNMMGGGLLDERNDRGFTTLPGAEVNFLSKLVALKPGKALERMIKDVMQGKAEGADNIENANAGPDSKPNHLTGISGRGSVTGLKPRPVRPGMFLETVSKVLGGIYANNTSGITAQHLEWVHQTTLKILQEMAF

SEQ ID NO: 31553 - protein, 342 aa, Oryza sativa
MERYEVMRDIGSGNFGVAKLVRDVATNHLFAVKFIERGLKIDEHVQREIMNHRSLKHPNIIRFKEVVLTPTHLAIVMEYAAGGELFERICNAGRFSEDEARFFFQQLISGVSYCHSMQVCHRDLKLENTLLDGSVTPRLKICDFGYSKSSVLHSQPKSTVGTPAYIAPEVLSRKEYDGKVADVWSCGVTLYVMLVGAYPFEDPDDPRNFRKTITRILSVQYSIPDYVRVSADCRHLLSRIFVGNPEQRITIPEIKNHPWFLKNLPIEMTDEYQRSMQLADMNTPSQSLEEVMAIIQEARKPGDAMKLAGAGQVACLGSMDLDDIDDIDDIDIENSGDFVCAL

SEQ ID NO: 31554 - protein, 215 aa, Oryza sativa
MAGAPSRSRGDFDHLIKLLLIGDSGVGKSCLLLRFSDDTFTTSFITTIGIDFKVRTVELDGKRVKLQIWDTAGQERFRTITTAYYRGAMGILLVYDVTDESSFNNIRNWIRNIEQHASDNVNKILVGNKVDMDTKRVVSTAQGQKLADEYGMKFFETSAKTNQNVEQVFFTIARDIKQRLTETVAAAAEPPTIQISRQEPDQAAASSRWSACCNT

SEQ ID NO: 31555 - protein, 218 aa, Oryza sativa
MATAAVLGSHDALDNRMHLGAFAVSPASKPRRRRHSKAASPPPKVAAVSSPPVVKSAARVASPPPKAAAAAAVPQGRRSPVARKQGSPTKELPKQRLVMGEIRILKRGEEPPVSSPSPAPVAAQAAAVDQRAPRVPAVAQAAPTDQKAPRPARSKQQQHTAAVPTKIKSVADAPVYAGPAFSSASPEPSSLPFPAFIRRAEAEATRGLRCLLRIGELP

SEQ ID NO: 31556 - protein, 204 aa, Oryza sativa
MLLESAEDTALDILDASDELGLFLARAVIDDVLAPLNLDEISGKLPPNCSGAETLNMARSLATARHAGERLLRCWGGGTGWVVEDTKDKIAKLLEEYESGGDVGEACNCIRELHMPFFNHEVVKKALVMAMEKKNDRILGLLQECFGEGIITINQMTKGFSRVRDGLDDLALDIPDAREKFLSYVEHAKKSGWLLPSFGVATSA

SEQ ID NO: 31557 - protein, 293 aa, Oryza sativa
MLRRNTRLRREYLYRKSLEGKERQHYEKKRRLREALDEGKPIPTELRNEELALRREIDLEDKDSAVPRSLIDDEYAGAALREPKILLTTSRNPSAPLTQFVKELKVVFPNSQRMNRGGQVISEIVESCRSHDITDLVLVHEHRGQPDGLIVCHLPFGPTAYFGLLNVVTRHDIKDRKAMGKMSEAYPHLILDNFTTKTGERTANIVKHLFPVPKPDSKRIITFANRDDYISFRHHVYEKHGGPKSLDLKEVGPRFELRLYQIKRGTVDQAEAQNEFVLRPYMNTAKKQKSLGA

SEQ ID NO: 31558 - protein, 413 aa, Oryza sativa
MGCGLSREKDAGGGPRRRPGSVGDVVVFLPGLRVPRSVDFSQALAGRLDEASSRLSSLRARVVDMAMQESAAALKPKRRAAARHGSSTANLLQALEDYLPVLLGLVKEGSELRHGVHFVWTNQEDNAEETAMADAWYEVLSVLHLMAMVCLLQANSLLLPRSYGDGYAPRVSEESRRATVDVFLKASGYLDCAIRQVLPQISSELRRQLPVDLAEGNLKALSLQALGQGVDMQLGLAIDSPKATLAVKRRLACEMVKYWHQIQESIPEIPVSDGWGKKHLLFVKWKYVEAKAAAYYFHGLILDEGNTEKSHGMAVAALQASEEFLKESKRASEAFHATPPTSRSPTPFGTAKYMLDKIPKDASSKVKINQDLYTQERVIGTPPPLPDFALALKPDDYDLPPLDPLWNKEDSRQ

SEQ ID NO: 31559 - protein, 238 aa, Oryza sativa; identical to SEQ ID NO: 30191

SEQ ID NO: 31560 - protein, 269 aa, Oryza sativa; identical to SEQ ID NO: 30174

SEQ ID NO: 31561 - protein, 226 aa, Oryza sativa; identical to SEQ ID NO: 30524

SEQ ID NO: 31562 - protein, 280 aa, Oryza sativa
MAAATVSVRFHPAASAARCGGGSRRSRRLSGVIRAQSAPASAAAAALTQDDLKRLAAVRAVEQVESGMVLGLGTGSTAAFAVAEIGALLASGKLSGIVGVPTSKRTFEQAQSLGIPLSTLDDHPRIDLAIDGADEVDPDLNLVKGRGGALLREKMVEAASDKFIVVVDETKLVTGLGGSGLAMPVEVVQFCWKYNQVRLQDLFNDEGCEAKLRLDEGGKPYVTDNSNYIVDLYFKTPIKDALAAGKEISALEGVVEHGLFLDMATSVIIAGTDGVSVKTK

SEQ ID NO: 31563 - protein, 265 aa, Oryza sativa; identical to SEQ ID NO: 30923

SEQ ID NO: 31564 - protein, 338 aa, Oryza sativa; identical to SEQ ID NO: 30712

SEQ ID NO: 31565 - protein, 280 aa, Oryza sativa
MDYCRVHGLEIFYNMALLDAEMAGFWAKLPLLRALLLAHPEIEFLWWMDSDAMFSDMAFELPWERYGPYNLIMHGWDEMVYDDKNWIGLNTGSFLLRNCQWSLDFLDTWAPMGPKGPVRIEAGKVLTKYLKDRPVFEADDQSAMVYILATEREKWGDKVYLENGYYLHGYWGILVDRYEEMLENYHPGLGDHRWPLVTHFVGCKPCGKFGDYPVERCLKQMERAFNFGDNQILQMYGFTHKSLGSRKVKRIRNETSNPLDVKDELGLLHPAFKAMKTTST

SEQ ID NO: 31566 - protein, 223 aa, Oryza sativa
MAKLILATFAVVFMALAATSLAGDPDMLQDVCVADYKSLKGPLRLNGFPCKRIENVTANDFFFDGLMKAGNTGNAVGSVVTAASVESLPGLNTMGVSMARIDYAPWGLNPPHTHPRATEIIFVVEGSLDVGFVTTANKLFTRTVCKGEVFVFPRGLVHFQKNNGNTPVFAIAALNSQLPGTQSIAAALFGAAPPLPSDTLARAFQVDGGMVEFIKSKFVPPKY

SEQ ID NO: 31567 - protein, 216 aa, Oryza sativa; identical to SEQ ID NO: 30559

SEQ ID NO: 31568 - protein, 252 aa, Oryza sativa
MSSVQLSGAGVAAVAFTKNGASSFDGLRLAPPSVRVCSSRRPSRSLVVKAATVVTPKYTSLKPLGDRVLVKLGAAEEKTVGGILLPSTAQSKPQGGEVVAVGEGRTIGDKKVEVSLQIGAEVVYSKYAGTEVQFNDTKHLILKEDDIIGVLETDDVKDMKPLNDRVLIKVAEAEDKTAGGLILTETTKEKPSIGTVVAVGPGPLDDEGKRQPLSVSAGSTVMYSKYAGSEFKGADGTNYIVLRVSDVMAVLS

SEQ ID NO: 31569 - protein, 225 aa, Oryza sativa
MAGSGWRRIPAVRRPPMSRPASVCLWIVLVAATLALAQVLIHLAKKSKADLTEVTHKVYFDVEIDGKPAGRVVMGLFGKTVPKTAENFRALCTGEKGTGKSGKALHFKGSAFHRIIPSFMIQGGDFTLGDGRGGESIYGTKFADENFKIKHTGPGLLSMANAGRDTNGSQFFITTVTTSWLDGKHVVFGKVLSGMDVVYKIEAEGQQSGSPKSKVVIADSGELPM

SEQ ID NO: 31570 - protein, 237 aa, Oryza sativa
MHRSAGATMAWNVFRFCTALRGLGSIMILLVLSIVGVTYYAVVVYNYGPALFAGGASTLLALVVLLLFHFLLVMLLWSYFSVVFTDPGSVPPNWNLDFDEERGETAPLSGLDFNSQVNSQQSIAHNDTGHPRARYCRKCNQMKPPRCHHCSVCGRCVLKMDHHCVWVVNCVGALNYKYFLLFLFYTFLETTLVTLSLLPHFIAFFSDIDIPGSPAALATTFLTFVLNLAFSLSVLVL

SEQ ID NO: 31571 - protein, 322 aa, Oryza sativa
MASSIAMSLRSLAATDAFLPKPSPSSAPFLLLLSPSTPRLRLHLHLRSTRRLPLAPLAASDSFESASSSSAAALDFAEPGAAEESDVPEESDQEEEGYAPEAEEEAEADEEVEEEAVEASAEVAEEAEDVEEVGEYVEPPEEAKVYVGNLPYDIDSERLAQLFEQAGIVEVSEVIYNRETDRSRGFGFVTMSTVEEAEKAVEMFHRYDVDGRLLTVNKAAPRGARVERPPRQFGPSFRIYVGNLPWQVDDSRLVQLFSEHGKVVDARVVYDRETGRSRGFGFVTMATQEELDDAIAALDGQSLDGRALRVNVAEERPPRRGF

SEQ ID NO: 31572 - protein, 186 aa, Oryza sativa
MADEKLCGNMDGLGSLSIEAKKLILGMQSRLDSMEKELHELKKKNSSQQMQQFAGEEKNELLYYLRSLSPEKVVELSESSCPGVEEAVYSVVHGLLATLSPKMHTNRSPTSENMAGGAVNFGMEEDDEFTELVEDVSLPFQPLISIPRDRLARLLFWCMMLGHYIRGQECRLELMHLLAVSSDAHS

SEQ ID NO: 31573 - protein, 334 aa, Oryza sativa
MASQGVASMFALALLLGAFASIPQKAEAIGVCYGMSANNLPPASSVVGMYRSNGITSMRLYAPDQAALQSVGGTGISVVVGAPNDVLSNLAASPAAAASWVRNNIQAYPSVSFRYVAVGNEVAGGATSSLVPAMENVRGALVSAGLGHIKVTTSVSQALLAVYSPPSAAEFTGESQAFMAPVLSFLARTGAPLLANIYPYFSYTYSQGSVDVSYALFTAAGTVVQDGAYGYQNLFDTTVDAFYAAMAKHGGSGVSLVVSETGWPSAGGMSASPANARIYNQNLINHVGRGTPRHPGAIETYVFSMFNENQKDAGVEQNWGLFYPNMQHVYPISF

SEQ ID NO: 31574 - protein, 243 aa, Oryza sativa; identical to SEQ ID NO: 30535

SEQ ID NO: 31575 - protein, 209 aa, Oryza sativa
MAELTTAADVTAAPPPPPGPTPPPEPVVTATVVAEQKVSPTAPPLDVPAPAPPPPKKRKVEEAGFHNSAYYKIRATVADLRVRFVQVYEATDFRNSDAAREILKEIKVVMELAKKMRHDLGATFEPAKPPEKPLAGVVKDGPVEPPPSAENNHAPQTEKMGETPRSEIAQGSCVTGGSPIGWNFLVWPGGEVVYYGRTKEVFRAGQAEN

SEQ ID NO: 31576 - protein, 118 aa, Oryza sativa
MNSRSTRTSLFDGIEEGRIRATSYSSHEIDENENDQAIDGLQDRVSILKRLSGDIHEEVETHNRMLDRMGNDMDSSRGFLSGTVDKFKMVFETKSSRRMGTLVASFVALFLLVYYLTR

SEQ ID NO: 31577 - protein, 119 aa, Oryza sativa; identical to SEQ ID NO: 30676

SEQ ID NO: 31578 - protein, 98 aa, Oryza sativa
MIERFRQKDQLLSDFFMQGHFPDEGTEGDVSTPECLANFIAIVSSTGFFLYLSLFSSVWFKVYVLLSCAYLTFVTYFSIQPPQLICSSEGGTHAKKVL

SEQ ID NO: 31579 - protein, 125 aa, Oryza sativa; identical to SEQ ID NO: 30952

SEQ ID NO: 31580 - protein, 251 aa, Oryza sativa; identical to SEQ ID NO: 30740

SEQ ID NO: 31581 - protein, 254 aa, Oryza sativa
MSSAAGEPSSSSAAAAAISCSSSNDDEKPPPSLEGKELRRVEEEEPAAAARPEKLTEGSSRAAEAEEEEEVVEDEEDDDEEDEGKVAEAIDLGPRVSIKEQLEMDKEDESLRRWKEQLLGSVDLNSVGESLEPDVRITSLCILSPGRPDVLLPLPVEPSNSKEPWFTLKEGSTYRLKFTFSVSSNIVSGLRYTNTVWKAGIRVDKTKEMLGTFSPQLEPYTYVTPEETTPSGVFARGSYSAKTKVMKSDTVIHL

SEQ ID NO: 31582 - protein, 251 aa, Oryza sativa; identical to SEQ ID NO: 30598

SEQ ID NO: 31583 - protein, 319 aa, Oryza sativa
MAAMAMVSVQLTVAARPLRSRRALSVFTCAAPPRQRPPPGPTKHRRLRHDADAQPPRKRGHPPPPPPRRTRTRGPPARPQQSYTDDDEEEDDQDEEEGSFGGGTRAAAMPKPPAGFVLDDQGRCIAAASKRIVTIIDDTNNRPLECIIRRVFRSTLDHDCMLLCPVDMPVQVLKSANFSGWIAVDDDQIKEIIPSVAYALARVHMHFVESGFCYTARGGFCFPEDAIQEFHDSGDGGDSVPFEGVEICCFNLDGAHYMIYTPVDPLLFVAVKDKDGVLRIAEDELMDDPAVVGAIDEETEFTALVEEEEALLESVLGER

SEQ ID NO: 31584 - protein, 392 aa, Oryza sativa
MALDGPAERRDEAQAAMGNGNGVAPPPLRPAGRPSGAPACADRRLRLNPNMEHKPQDYSDVRGEYAPAVYSALERHLPPSVLDANREIKLQLMREVLGHYWPHGERNKVQRHREYRQRILNHYKPLHKELYKMRPSSFFLPTFLEAIRTNTEESFRSIMTEPVPGVYSFAMLQPNFCEMLLQEVENFEKWVHTMKFKIMRPNTMNKYGAVLDDFGLEVMLNQFMEQFIAPMSTVLYPEVGGGTLDTHHAFVVEYGKDRDVELGFHVDDSEVTLNVCLGKQFSGGELYFRGIRCENHVNSETQHEEMFDYSHVPGRAVLHRGRHRHGARPTSSGLRINLLLWCRSSVFREMKKYQKDFSGWCGECKREKKERQIHAVKATKLAFLRGAGGATI

SEQ ID NO: 31585 - protein, 240 aa, Oryza sativa
MASPQCCANPPTLNPAGGEGKVVESFGGIKAYVAGAAESKAAVVLISDVFGFEAPNLRKIADKVASSGYFVVVPDFLHGDPLVPESTEKPFQMWIKEHGPDKAFEEAKPIIAALKEKGVSSIGAVGYCWGAKVVVELVKAHEIQAAVMCHPSFVTVDDMKEVKCPIAILGAEIDRMSPPEVVKQFEQVLSSKSGIGHFVKIFPGVEHGWTVRYKNDDAAAVKSAEEALADMIDWFNKNLK

SEQ ID NO: 31586 - protein, 246 aa, Oryza sativa
MPNGSLDKYLYDQDKPSPNWIQRFEIIKGVASGLLYLHEEWEQVVIHRDIKASNVLLDSEMNGRLGDFGLARLHDHGVDAHTTCVAGTRGYISPELARLGKATKATDVFAFGAFILEVACGRRPIGMNSSGELQVLVDFVLRFWQRDLILCMLDTRLGGEFVTEEAELVLKLGLLCSHPSPASRPSMRLVMQYLCGDVLLPAMPESYRSIRSFSEMQVEGDQLDENPLLRQYLSVQTSITGLSGGR

SEQ ID NO: 31587 - protein, 288 aa, Oryza sativa
MGNLFCCVQVDQSTVAIREQFGKFDAVLEPGCHCLPWFAGKRIAGHLTLRLQQLDVRCETKTKDNVFVNVVASIQYRALAGKANDAFYKLSNTRSQIQAYVFDVIRASVPKLNLDDAFEQKNDIAKAVEDELEKAMSAYGFEIVQTLIVDIEPDEHVKRAMNEINAAARLRVAANEKAEAEKIVQIKRAEGEAEAKYLSGLGIARQRQAIVDGLRDSVLGFSVNVPGTTAKDVMDMVLITQYFDTMKEIGASSKASSVFIPHGPGAVRDIATQIRDGLLQGQATTTSH

SEQ ID NO: 31588 - protein, 320 aa, Oryza sativa
MSLGASPSQFTPPNYQMQIPSNSTGMHGSGSPASGGIHGSPLGKTPSSYSKRRGLPMPPHEYPSQHGQGRHGDGVGFSHSDANVRGHPVYSQNSIPSSGYSSWRPQIGSGSFSLEASSSHGPSQTFHSHFAPRLQTLDNLSDSSAASTLDNAYWDPYFSDESLLHEDNSLSADLSSSLHLGDSANPTSGSARTANVQSHIFMGSNPLPAGESYRADHFFHASSRGSLGGNTHSAVPVNYGGYNPVNHPQQNPQIRHGQPYIQHRYNQATSTHNHPRGSHHNRQPAWPMADGTPWGGTSGHPFTTTGLPSSLPRKDYGSIF

SEQ ID NO: 31589 - protein, 257 aa, Oryza sativa
MRSNFLGTKFVVYDTQPPYNAGSLMSCQHGSRRISSRRVSPKLPTGSYPIAHVKYELNVLGTRGPRRMQCTMHSIPASAVDPEGVVPGQPEQLLPGPFEESFRSTNTSSRFSFMDRSLDFSSSRFSEISGSANQQGEDDIPEAKERPLVLRNKVPRWHEQLQCWCLNFRGRVTVASVKNFQLIAAASSESSQLEQQQQQQQQNHASSSSSASDHGKVILQFGKVGKDMFTMDYRYPLSAFQAFAICLTSFDTKLACE

SEQ ID NO: 31590 - protein, 419 aa, Oryza sativa
MDGKELLSPSELSYYAHQQHQHQHQQHQQQHRMLGGGGGGGGHSASPLAGMHGGPSVIRPMPNMGMSPTAILQSIGPGPLAGMQFQMDAAPPPPPLMHNSMASVSASAGAGSPTVPPSATPMEPVKRKRGRPRKYGPDGTMKVSTAAAAQHQQQMLSAPPRMGSVSGADMVGGGSGMDDSAQKKRRGRPPGTGKKQQLSSPVKLSGGNAFSGSAGTSFTPHIITASPSEDVAGKIVAFANHSSRAVCVLSATGSVSRVVLRHPADGAMSRVHASSHYKNPAIYEGLYEILSMSGCYNLMNEGQSDGLSVTLCSPERHIIGGVLGGALVAASTVQVVLGSFVQGGSKPKSKKAGKQQQQQAAAAAFSSDSLTGGGQDASPSSGHNQNLTPPPPVTTTGGWPSSGIFDTRSSNIDINSSRG

SEQ ID NO: 31591 - protein, 236 aa, Oryza sativa; identical to SEQ ID NO: 30566

SEQ ID NO: 31592 - protein, 94 aa, Oryza sativa
MVHHNPLPSSNCRFLGCQIKGDWIKPGAAVIDVGTNSISDPTRKSGYRLVGDVDFAEVSKVAGHLTPVPGGVGPMTVAMLLKNTVDGAKRGIVQ

SEQ ID NO: 31593 - protein, 111 aa, Oryza sativa
MLQAAMGVAVEDTWEQCWLEAPLRLLQPMGHTRSLLMAMVDTWAMEAMEALVVTAMATAVTTAASSSMASTATMASSSMASMGTACSVVASSRSGSNAHDLIMLELCLGFN

SEQ ID NO: 31594 - protein, 221 aa, Oryza sativa
MSRRGDWVYENNGGTCVAIAGADYCVVAADTRLSVGYNILTRDHSKICELADKCALASSGFQGDIKALHKNLAARELLYQHQHNKRMSCPAMAQLLSNTLYYKRFFPYYAFNVLGGLDSEGKGCVFTYDAVGSYERTGYSAQGTGSALIMPVLDNQLKSPSPLLLPARDAVTPLSETEAVDLVKDVFASATERDIYTGDKLEIVVINKAGTKREYIDLRKD

SEQ ID NO: 31595 - protein, 307 aa, Oryza sativa
MSSPHGGLDDQIERLMQCKPLPEPEVRALCEKAKEILMEESNVQPVKSPVTICGDIHGQFHDLAELFRIGGKCPDTNYLFMGDYVDRGYYSVETVTLLVALKVRYPQRITILRGNHESRQITQVYGFYDECLRKYGNANVWKTFTDLFDYFPLTALVESEIFCLHGGLSPSIETLDNIRNFDRVQEVPHEGPMCDLLWSDPDDRCGWGISPRGAGYTFGQDISEQFNHTNNLRLIARAHQLVMEGFNWAHEQKVVTIFSAPNYCYRCGNMASILEVDDCREHTFIQFEPAPRRGEPDVTRRTPDYFL

SEQ ID NO: 31596 - protein, 333 aa, Oryza sativa
MAASLQAAATLMQPAKLGGRASSAALPSRPSSHVARAFGVDTGAAGRITCSLQSDIREVANKCADAAKLAGFALATSALLVSGASAEGVPRRLTFDEIQSKTYMEVKGTGTANQCPTVEGGVDSFAFKAGKYNMKKFCLEPTSFTVKAEGVAKNASPEFQKTKLMTRLTYTLDEIKGPLEVSSDGTIKFEEKDGIDYAAVTVQLPGGERVPFLFTIKNLVATGKPESFGGPFLVPSYRGSSFLDPKGRGGSTGYDNAVALPAGGRGDEEELAKENVKNASSSTGNITLSVTKSKPETGEVIGVFESVQPSDTDLGAKVPKDVKIQGVWYAQLE

SEQ ID NO: 31597 - protein, 363 aa, Oryza sativa
MEAATMAWTAAGVGMALVYWFVWVMGAAEVKGKRAVDLKMGSITNDKVKDKYTQYWSFFRRPKETATTEASAEKVPAFVDTFYNLVTDIYEWGWGQSFHFSPSLPGRSHREATRVHEERVADLLQAKPGHRLLDVGCGVGGPMRAIAAHSGSNVVGITINEYQVNRARAHNRKAGLDSRCEVVCGNFLSMPFSDASFDGAYSIEATCHAPRLQDVYGEVFRVLKPGGLYVSYEWVTTSLYRADNPEHVEAIHGIERGDALPGLRRQDEIASIAKEVGFEVLKELDLALPPALPWWTRLKMGRIAYWRNSLVVRVLTMLRIAPKGVCEVHEMLYETAQHLTRGGETGIFTPMHMVLLRKPVESK

SEQ ID NO: 31598 - protein, 253 aa, Oryza sativa
MDQIYMAAVNNKTSLPDDEPMKKISGDMPVTAGNACFDCNICLDFAAEPVVTLCGHLYCWPCIYEWLCPGVGSTASNNSSLARRQCPVCKATLSPDMLVPLYGRGGSLKKSLNGVPIPRRPTVQREAVEHQNTHNNIDDRHHENMEPSPPPQPLRHSSHHSSATEFDFIYPPSPIGRGLIHSTAGGVLGGMAVAVLPWAFRGQVPPSMFMSPHYVTAHNMSSRARRHQMEVERSLHQIWFFLFVFVVLCLLLF

SEQ ID NO: 31599 - protein, 477 aa, Oryza sativa
MGVDAAPDRMDAASSWMNPPVEVSSPVAGGGGGEDGAATKLQKVYRSYRTRRKLADSAVVVEELWWQALDFARLSHSTVSFFDDPKPETVASRWNRVSLNASKVGQGLSRDGKALKLAFQHWIEAIDPRHRYGHNLHFYYDVWCQSQAGQPFFYWLDIGEGKDVDLPECPRARLKKQCIKYLGPQERELYEYIVTEGKIIHKHSGEPLDTSQGPKGTKWIFVMSTTKKLYAGKKERGVFQHSSFLAGGATIAAGRFTAENGVIKSIWAYSGHYKPSAENLANFMNFLEENGVDLKEVEVRSSTNEDYYEDPVPNKQNPLATVMESNPPQLILPQNMIEEDKASEPFSQAEGAESDNVPKVQTKPTYQRTLSGGLKSPRAADVPREAILERVKSKGESKSYQLGHRLSLKWSTGVGPRIGCVKDYPMELRMQALEMVNLSPRASTPSPSWRLPACLSPTPNLPSSPLGPIQTSLPQPS

SEQ ID NO: 31600 - protein, 230 aa, Oryza sativa
MLFEPRYKFNVNRIERESGVKFEHISAPQPTDVAQSAGTEAAEAISSVSDSVIPVFREQAEQLLNSSGMSAVDLLAKALAKAVGYTDIKKRSLLSSMDNHTTLLLQTGRSVYAAGFVLSTLKRFMPEERLADVKGITITADGTGAVFDVPSAEVEDYIQGAQNAAMVTVEEVKQLPPLQEREQSGGSRGGGRFGNRRFSGGGGGRGGGGRGFGGGRGRGGGGGNRFNKRY

SEQ ID NO: 31601 - protein, 272 aa, Oryza sativa
MSTAAAAAAAQSWCFATVTPRSRATVVASLASPSPSSSSSSSNSSNLPAPFRPRLIRNTPVFAAPVAPAAMDAAVDRLKDGFAKFKTEFYDKKPELFEPLKAGQAPKYMVFSCADSRVCPSVTMGLEPGEAFTVRNIANMVPAYCKIKHAGVGSAIEYAVCALKVELIVVIGHSRCGGIKALLSLKDGAPDSFHFVEDWVRTGFPAKKKVQTEHASLPFDDQCAILEKEAVNQSLENLKTYPFVKEGIANGTLKLVGGHYDFVSGNLDLWEP

SEQ ID NO: 31602 - protein, 203 aa, Oryza sativa
MTLTIPDDVRAKAEVYVGDEAGQEKTRLLLEETGLPSGLLPLRDIIECGYVEETGFVWLKQRRKVDHFFAKAGRHVSYAAEVSAVAEKGRLRKITGVKAKELLIWVTLHEIAVDDPPTGKLTCKAIGGLSRSFPVDAFEAPPPPPKNPSPAAGDTTKVDEEKKKEEEVAGDAAAAAIDEIEGKMKEMNSKEVQVQAEGVAAKN

SEQ ID NO: 31603 - protein, 339 aa, Oryza sativa
MAPSSTSSEGASDEWLPPSRRPELADVVPVTQDDGPHPVVAIAYRDEFREVMDYFRALYFAGERSVRALHLTAEVIDLNPGNYTVWHFRRLVLEALDADLREEMDFVDRIAECNPKNYQIWHHKRWLAEKLGPDIANKEHEFTRKILSMDAKNYHAWSHRQWVLQALGGWETELQYCNQLLEEDVFNNSAWNQRYLVITSSPLLGGLAAMRDSEVDYTVGAILANPQNESPWRYLKGLYKGENNLLMADERISDVCLKVLKHDSTCVFALSLLLDLLQIGLQPSDELKGTIEAIKNSDPEADEAVDADLATAICSILQRCDPLRINYWSWYRTTISSQT

SEQ ID NO: 31604 - protein, 279 aa, Oryza sativa
MMMQITKFTCGGFVMGLRFNHASADGMGAAQFINAVGDMARGLPEPRVKPVWDREKFPNPSIKPGPLPGLPVLALDYIVLDFPTGYIDGLKAQYKAHSGKFCSGFDVLTAKLWQCRTRALNLEPGATVKLCFFASVRHLLKLDRGYYGNSIFPVKMSAPSETVLSSSVMEVVDMIRQAKERMAVEFFQFAKEETEQDPFQMTFNYESIYVSDWSKLGFAEVDYGFGPPKFAGPLVNNDFIASVVILKAPLPLDGTRMLASCVTKEHSEEFVRGMKEDLP

SEQ ID NO: 31605 - protein, 277 aa, Oryza sativa
MKLDVSAMENNFAAHAAGGEDDGGLFGAGADLPAMELPTCPADFDGFQKETKEMLKHKKGTTTLAFIFDKGVIVAADSRASMGGYISSQTVRKIIEINPYMLGTMAGGAADCQFWHRNLGIKCRLHELANKRRISIAGASKLLANILYSYRGMGLSIGTMIAGWDEKGPGLYYVDSEGARLMGSRFSVGSGSLYAYGILDEGYRYVMPVEEAAELARRAIYQATFRDGASGGCVSVYHVGPNGWTKLSGDDVGELHYKYYPVEATPVEQEMADAPAA

SEQ ID NO: 31606 - protein, 377 aa, Oryza sativa
MADGEDIQPLVCDNGTGMVKAGFAGDDAPRAVFPSIVGRPRHTGVMVGMGQKDAYVGDEAQSKRGILTLKYPIEHGIVSNWDDMEKIWHHTFYNELRVAPEEHPVLLTEAPLNPKANREKMTQIMFETFNVPAMYVAIQAVLSLYASGRTTGIVLDSGDGVSHTVPIYEGYALPHAILRLDLAGRDLTDSLMKILTERGYSFTTTAEREIVRDIKEKLAYVALDYEQELEAAKSSSSVEKSYELPDGQVITIGAERFRCPEVLFQPSFIGMEAPGIHETTYNSIMKCDVDIRKDLYGNIVLSGGSTMFPGIADRMSKEITALAPSSMKIKVVAPPERKYSVWIGGSILASLSTFQQMWISKGEYDESGPAIVHRKCF

SEQ ID NO: 31607 - protein, 223 aa, Oryza sativa
MARRPAPWEQGGDEYDYLFKIVLIGDSGVGKSNLLSRFTRNSFSLDSKSTIGVEFATRTIQVEGKIVKAQIWDTAGQERYRAITSAYYRGAVGALLVYDVTKATTFENVKRWLKELRDHADSNIVVMLIGNKIDLKHLRSVSLEDATSFAEREGLSFVETSALDATNVDKAFQTVLTEIYRIISKKALAADEAGAGAGAVREGQSIQVSATDSSSFTSRCCSF

SEQ ID NO: 31608 - protein, 339 aa, Oryza sativa
MPRCGAGGPCVWIRALSQPQRHGRKPWRGVRVVVLLLHALFIGAVFLLDPTLQRQIHEAKWYIILYGLLVLLTLVQYLYTATSSPGYLPDMLTAGSRMHATFINTTTLSKQANSKSGSLNSAMSRSKIDQQNPQSTTALLLQQTMDLYPPGTSTRDFTCSYCRLIQPPRTKHCHDCDKCVLQFDHHCVWLGTCIAKRNYCRFWWYIFEQTVLTVWTVAFYIQFFYLGIVVSWWKFAIGIVLLVALILILVVLLPLLIFHAYLALTNQTTYEIARRKRISYLREVPSRVHPFSKGICRNLYDLCISKQRGFFLEAVPPLEVLQARARPYTCRDVISCRCC

SEQ ID NO: 31609 - protein, 249 aa, Oryza sativa
MQQPQLSNTQQFAPQPVQQPNVQQFPPPPVQPQQSNTQLPPQAMQPQQHPPVQNQMRPQTPPNYPHYQPHQSLNPPPETLPGSMAMQGPYNTVAPAAGSRSEVPYSYGGPGMPPPQHNMQRQQLPPPSQGSFGPPSKGGYAGPPQYAPQGSSHGYNTAYGYPPSGPSAAQAPQMPPAPGNVGMSHPGSHQMMRGHPYGEMIEKAITMGYPREQVMNVIQRMTESGQPMDFNTLLDRLNEAGSGAPPRAW

SEQ ID NO: 31610 - protein, 205 aa, Oryza sativa
MGSASRAVSCLCCPCKCLACGLFSCLCSILISLLVTLGVLALIFYLIFRPHMIAATVDSAALTQFTLSTNSALAYSLTVDLTVRNPNKRVGLYYDNVESLALFDGQRFGYAPLDSFYQSTEASTKLSPAFKGQQPLQGDITAANFRSQQTAGKFDIEVKLNAKLRVKVWAFKVPGPKAKISCPITVPASAPNAPAFQRTDCKVWF

SEQ ID NO: 31611 - protein, 326 aa, Oryza sativa
MALMMSLRFAPPASVAAPPPRRPRAVASSASSPALQRRRPQNVPGDFFVDHRCIDCQTCRWMASEVFKRVDGKAAVAAQPISDEHRTKALQALLSCPTSSIHTEKPAKDILQVQNMFPLPIDNHLLPGVYLCGYHSQDSYGATSYLLTHPDGNILVDSPRYTTKLAENIEKLGGARYMFLTHMDDVADHRKWAERLKCERIIHSGDVEDVTADVEWKLTGNGPWDIGADFELIHTPGHTEGSVCLFYKPVKALFTGDHVAKSEESDDLDLFLMYSKQSVGLQLDSMRKLLKLDFEWFLPGHGYRIHYKDVRAKDSAIESLIANYTS

SEQ ID NO: 31612 - protein, 186 aa, Oryza sativa
MGSCKILLVTALLVGIASQQSSATRNLHGDHHVAEKKFGGGGGGYGGGGGGGYGGGGGGGGYSPSPTTGFTGSCDFWKSHPEKIISCIGSLGSIVGSFGDVCSGFFGSKLQTLQDALCSTRKDCYGDLLREGAAAYINSVAAKKQAKFAYTTQQVKSCILLGLTSKAAAIEQAALFKKANLACHYT

SEQ ID NO: 31613 - protein, 457 aa, Oryza sativa
MAVGGAGSSRSVAPCCCCAVLLAAALLFSAPATTEAYDALDPNGNITIKWDVMSWTPDGYVAVVTMFNYQQFRHIQAPGWQLGWTWAKKEVIWSMVGAQTTEQGDCSKFKGGTPHCCKKDPTVVDLLPGTPYNMQIANCCKAGVINTFNQDPSNAASSFQISVGLAGTTNKTVKLPKNFTLKAPGPGYTCGRAMIVRPTKFFTGDGRRATQALMTWNVTCTYSQFLAQKTPSCCVSLSSFYNDTIVNCPTCSCGCQNNGTSPGSCVNENSPYLQSAIDGPGKWTGQPLVQCTSHMCPIRIHWHVKLNYKEYWRVKITITNFNYRMNYTQWNLVAQHPNFNNITQLFSFNYKPLTPYGSKINDTAMFWGVKFYNDLLMQAGPLGNAQSELLLRKDSKDFTFDKGWAFPHRVYFNGDNCVMPPPDAYPWLPNASPLTKQPLTLSVLVFSIVLATLLAYA

SEQ ID NO: 31614 - protein, 180 aa, Oryza sativa; identical to SEQ ID NO: 30590

SEQ ID NO: 31615 - protein, 214 aa, Oryza sativa
MSQVGSAPAPMVTSHEDAKKAYADFEKKVKRTIYIDHLSPQVTSSVLKAALAQCANVVDVEFIVNYTIPYDIPSAALVELDDEIQAKAALDLMNDFPFIIGGMPRPVRATCAKPDMFRERPPCPDIKKEFRWVKQEDGTEYEGMKKLRILAKRQEAENMALIKNQLEEEKELAKQQQELLDGNYKKYDMLENVVQNGNMKSLAQHYGVSLADEF

SEQ ID NO: 31616 - protein, 292 aa, Oryza sativa
MQHWFKDMRFSTKVKDGEGMPAFALVNKATGLAVKHSLGQSHPVKLVPFNPEYEDASVLWTESKDVGKGFRCIRMVNNTRLNLDAFHGDKDHGGVRDGTTVVLWEWCKGDNQSWKILPWGPEAHSSSPGAATACTIGGAPVHTVRVFSAAGEDYCLTVRNGTACLAPKTPRDDYQHWIKDMRHSNKIRDEEGYPAFALVNKVTGEAIKHSTGQGHPVKLVPYNPEYQDESVLWTESKDVGKGFRCIRMVNNIYLNFDAFHGDKDHGGIHDGTEIVLWKWCEGDNQRWKILPW

SEQ ID NO: 31617 - protein, 440 aa, Oryza sativa
MGECKVGGGGGGGDCLIKLFGKTIPVPEPGACAAGDVDKDLQHSGSSTTEPKTQENTVQDSTSPPPQPEVVDTEDSSADKNSSENQQQQGDTANQKEKLKKPDKILPCPRCSSMDTKFCYYNNYNINQPRHFCKNCQRYWTAGGAMRNVPVGAGRRKSKSVSAASHFLQRVRAALPGDPPLYAPVKTNGTVLSFGSDLSTLDLTEQMKHLKDKFIPTTGIKNTDEMPVGLCAEGLSKTEESNQTNLKEKVSADRSPNVAQHPCMNGGAMWPFGVAPPPAYYTSSIAIPFYPAAAAAVAAYWGCMVPGAWNAPWPPQSQSQSVSSSSAASPVSTMTNCFRLGKHPRDGDEELDSKGNGKVWVPKTVRIDDVDEVARSSIWSLIGIKGDKVGADHGRGCKLAKVFESKDEAKASTHTAISSLPFMQGNPAALTRSVTFQEGS

SEQ ID NO: 31618 - protein, 264 aa, Oryza sativa; identical to SEQ ID NO: 30587

SEQ ID NO: 31619 - protein, 246 aa, Oryza sativa
MDSEHWISSLAAAKRFYAAQLGHVDDMAGIGMEEVEMEMEDDGEGMELELEMQLEEATWPDVACPYCYEDHDIASLCAHLEEDHPYEPHTSPCPICFEKITRDMLNHITMQHGYLFKSGRRMRRFDIPESQALSLLSRDLRDAQLQALLGGGHRQRRSNTTATNISADPLLSSFGLGFSTLDSEERSKAPVPIPDDTSIHKDTPAQPWESRIDSSLTSEEREQKRKQATDRATFVQGLVLSTLFED

SEQ ID NO: 31620 - protein, 251 aa, Oryza sativa; identical to SEQ ID NO: 30206

SEQ ID NO: 31621 - protein, 224 aa, Oryza sativa
MGRRPARCYRQIKNKPYPKSRYCRGVPDPKIRIYDVGMKKKGVDEFPYCVHLVSWEKENVSSEALEAARIACNKYMTKNAGKDAFHLRVRVHPFHVLRINKMLSCAGADRLQTGMRGAFGKPQGTCARVDIGQVLLSVRCKESNAKHAEEALRRAKFKFPGRQKIIHSRKWGFTKFTREEYVKLKAEGRIMSDGVNAQLLGSHGRLAKRAPGKAFLAETIQASA

SEQ ID NO: 31622 - protein, 268 aa, Oryza sativa; identical to SEQ ID NO: 30179

SEQ ID NO: 31623 - protein, 284 aa, Oryza sativa; identical to SEQ ID NO: 30591

SEQ ID NO: 31624 - protein, 270 aa, Oryza sativa; identical to SEQ ID NO: 28586

SEQ ID NO: 31625 - protein, 476 aa, Oryza sativa
MGKAAAMEVSASAAAEAGMMVGHGEWRDDDGRARRMGTVWTASAHIITAVIGSGVLSLAWAIAQLGWVAGPAVMLLFAFVIYYTSTLLAECYRSGDPCTGKRNYTYMDAVRANLGGSKVRLCGVIQYANLFGVAIGYTIAASISMLAIKRADCFHEKGHKNPCRSSSNPYMILFGVVQIVFSQIPDFDQIWWLSIVAAIMSFTYSTIGLSLGIAQTVANGGFMGSLTGISVGTGVTSMQKVWRSLQAFGDIAFAYSYSIILIEIQDTIKAPPPSEAKVMKRATMVSVATTTVFYMLCGCMGYAAFGDKSPDNLLTGFGFYEPFWLLDVANAAIVVHLVGAYQVFVQPIFAFVERWAAARWPDGGFISRELRVGPFSLSVFRLTWRTAFVCATTVVSMLLPFFGDVVGLLGAVSFWPLTVYFPVEMYIAQRGVRRGSARWLCLKVLSAACLVVSVAAAAGSIADVVDALKVYRPFSG

SEQ ID NO: 31626 - protein, 241 aa, Oryza sativa; identical to SEQ ID NO: 31490

SEQ ID NO: 31627 - protein, 237 aa, Oryza sativa
MGDLLIDDYSTGFCSGGCAAIADSGTSLLGGPTTIVAQINHAIGAEGIVSMECKQVVRDYGDMILEMLIAQASPMKLCSQIGLCAFDGTRSVRNNIESVVDKEKVGSDLSCTACEMAVVWIQNQLRHNQTRELILQYADQLCERLPSPNGESAVDCDEISNMPNLSFTIANKTFTLTPEQYVVKLEQQGQTVCISGFMAFDVPPPRGPLWILGDVFMAAYHTVFDFGKNRIGFAESA

SEQ ID NO: 31628 - protein, 210 aa, Oryza sativa
MGKDCGNHGDDDIRQACRRLLTILFGLALIVAIIALIVYLVLRPTHPRFFLQDATLRQLDLSNSSTSGVLSTALQVTVASRNPSDRVGVYYDRLDVYASYKYQQITLAASLPPVYQGHGDVDVWSPVLSGPDVPFAPYLGDALAKDVAAEYLILQVKIDGRVRWKVGSWISGHYHLFVTCPAFFIASGGNGYPGANGLKFQTATYCRVEV

SEQ ID NO: 31629 - protein, 465 aa, Oryza sativa
MDKSQGVLLSSNVGAGSRPWPELLGSAHWDGLLDPLDLTLRRLILLCGDLCQVTYDSFNSDSHSKYCGTCRFSRSTLLDRTQFPAAGDLSVAAYLYATSDATAFPGSMVYSMSREAWSKESNWIGYVAVSNDAAAAASGQRVIYVAWRGTIRSLEWVDVLKPDLVDHDDILPEGHPGRGRSRVMKGWYLIYSSTDERSPFSKYSARDQMLAAVRELVARYRNESLGVVCTGHSLGASLATLCAFDIVVNGVSKVGDGAHIPVTAVVFGSPQIGNPEFKKQFEEQPNLRALHVRNMPDLIPLYPSGLLGYANVGKTLQVDSKKSPYVKRDTSPGDYHNLQGILHTVAGWNGKDGEFKLQVKRSVALVNKSSGFLKDSNLVPESWWVERNKGMVLGQNGEWQLEGPAEENLPVPPVVTGKIIDDDVAAVATSSSAKEDKKTGKGSKLLSGLIDQLLCVPDTCKAGAA

SEQ ID NO: 31630 - protein, 294 aa, Oryza sativa
MPSSHGDLDRQIAQLRECKHLAEGEVRALCEQAKAILMEEWNVQPVRCPVTVCGDIHGQFYDLIELFMGDYVDRGYYSVETVSLLVALKVRYRDRITILRGNHESRQITQVYGFYDECLRKYGNANVWKYFTDLFDYLPLTALIENQVFCLHGGLSPSLDTLDNIRALDRIQEVPHEGPMCDLLWSDPDDRCGWGISPRGAGYTFGQDIAQQFNHTNGLSLISRAHQLVMEGFNWCQDKNVVTVFSAPNYCYRCGNMAAILEIGENMDQNFLQFDPAPRQIEPDTTRKTPDYFL

SEQ ID NO: 31631 - protein, 210 aa, Oryza sativa; identical to SEQ ID NO: 30533

SEQ ID NO: 31632 - protein, 266 aa, Oryza sativa
MDVSHGQPGQSDRPSIAAVVSSRQWPLISKYRASVHTQSPKLEMMSSLFKPRGTEDDGLIRESLIDFYTSSGKRKPDHVIVFRDGVSESQFTQVINIELDQIIEACKFLDEKWSPKFTVIVAQKNHHTKFFQSGSPDNVPPGTVVDKQVCHPRNYDFYMCAHAGMIGTTRPTHYHVLHDEIGFSPDDLQELVHSLSYVYQRSTTAISVVAPICYAHLAAAQVGTFLKFEDMSDASSSQGGHTSVGSVPVPELPRLHEKVRSSMFFC

SEQ ID NO: 31633 - protein, 263 aa, Oryza sativa; identical to SEQ ID NO: 30602

SEQ ID NO: 31634 - protein, 282 aa, Oryza sativa
MWCCSKTFLVSSYRLRGNLHQMWTVPRYGFQYFIPAAKKGINEQIELAILRADRMGVKVLSLAALNKNEALNGGGTLFVNKHPELRVRVVHGNTLTAAVILNEIPSNVKDVFLTGATSKLGRAIALYLCRKKIRVLMLTLSSERFLKIQREAPAEFQQYLVQVTKYQPAQNCKTWLVGKWLSPREQRWAPAGTHFHQFVVPPIIGFRRDCTYGKLAAMRLPKDVQGLGYCEYTMERGVVHACHAGGVVHFLEGWEHHEVGAIDVDRIDVVWKAALKHGLTPA

SEQ ID NO: 31635 - protein, 220 aa, Oryza sativa
MGQQSLIYAFVARGTVVLAEYTEFTGNFTTIAAQCLQKLPASNNKFTYNCDGHTFNYLVEDGFTYCVVAVESVGRQIPIAFLDRVKEDFTKRYGGGKAATAAANSLNREFGSKLKEHMQYCVDHPEEISKLAKVKAQVSEVKGVMMENIEKVLDRGEKIELLVDKTENLRSQAQDFRQQGTKVRRKMWLQNMKIKLIVLGIIIALILIIILSVCHGFKCK

SEQ ID NO: 31636 - protein, 122 aa, Oryza sativa
MAGVWVFKDGIVRRVENPGSEESSSAGDGGGGGRRKVLVHVPSGEVVASYEVLERRLRELGWERYLTDPCLLQFHQRSTVHLISVPRDFSKFKLVHMYDIVVKTRNVFEVRDAAAPAVSPAT

SEQ ID NO: 31637 - protein, 82 aa, Oryza sativa
METAKWICVGAIDITQLSVAGYLFSSGKPYYALALLGLTIPQVVFQFQYFLKDPVKYDVKYQASAQPFFVLGLLVTALATSH

SEQ ID NO: 31638 - protein, 489 aa, Oryza sativa
MDAALCDDLLQEVFRLLPRASAPAVSLVSRRWYALLRASIASLTLRLPVSSDASVLAPLSALLSRFPYLSALAVVCTAATAQVADAMLLVVASSPSAAQLSGLRFLPDSAISPAALVAACPAFYGLTSLHLTALRPLSFCWIAFLPRLKSFYLVNSAAAAAVDYAGWSSDDVDGNGETIGSLPLERLSLCGICSGDRGIGWLWRRCGNLQWLQLRACDGTGDGPSSQFFAGCLAGLLALELRACRSVSDHVLLLAADRCRVLKSLLVYDGGSREALHRFIHQRGAALHTLDLRLPLDLHNDHLLAIGAEAEQGQQSQNGGHSLAALRLQSCVLITGDGLRSLARTTTGAGIEELALVNCDVVEREPGLLTFLSQSMRRLRRLDLSYNETLSDKEVGAMLSSCHNLIDIRLRGCRCLTRGSLVSLLRYCGRSVEVIDITRCLSIAAADVELFAQEATRLIQVIIEDSLLSEELRAIAHKKGIRVGPLRCD

SEQ ID NO: 31639 - protein, 246 aa, Oryza sativa
MWDQKTGRSRGFGFVSFRNQQDAQNAINELNGKWLGNRQVRCNWATKGANAGEEKQNTDSKGMIELTNGSSEGGKDNANEDGPENNPQYTTVYVGNLPHDVNSNDVHRFFHSLGVGSIEEVRVTRDKGFGFVRYSTHEEAALAIQTGNGQLIGGRQIKCSWGSKPTPPGTASAPLPPPAPAPFNPGMSATDLLAYERTLALSKMAANPALMSQHAALKQAAAMGMGAGASQAIYDGGYQSANAVFY

SEQ ID NO: 31640 - protein, 358 aa, Oryza sativa
MPPPPRCAATTAHHSLLGSPTCLARPRRRCCPVRAAVAVQAGAQAKVSLIRIGTRGSPLALAQAHETRDKLKAAHSELAEEGAVEIVIIKTTGDMILDKPLADIGGKGLFTKEIDDALLQGRIDIAVHSMKDVPTYLPEGTILPCNLPREDVRDAFICLTASSLAELPAGSVVGSASLRRQSQILYKYPSLKVVNFRGNVQTRLRKLKEGDVHATLLALAGLKRLNMAETATSVLSVDEMLPAVAQGAIGIACRSSDDTMMNYLSSLNHEDTRLAVACEREFLSVLDGNCRTPIAAYASRDKDGNCSFRGLLASPDGSTVYETSRTGPYDFDIMVEMGKDAGHELKAKAGPGFFDSLQ

SEQ ID NO: 31641 - protein, 297 aa, Oryza sativa
MALSAAAPANSSCFHPRAAAASAPSSLSVGTKVFVGLKAQTKLGSSESSCPNVTAGFYTAVNRRISLGLSNKRATRARISMMPVGTPRVPYRTPGEGTWQWLDIWNALYRERIIFIGDSIDEEFSNQVLASMLYLDSVDNTKKILLYINGPGGDLTPCMALYDTMLSLKSPIGTHCLGFAFNLAGFILAAGEKGSRTGMPLCRISLQSPAGAARGQADDIENEANELIRIKNYLYSKLSEHTGHPVDKIHEDLSRVKRFDAEGALEYGIIDRIIRPSRIKKEGSTAQKKDLRNLGLG

SEQ ID NO: 31642 - protein, 258 aa, Oryza sativa; identical to SEQ ID NO: 30725

SEQ ID NO: 31643 - protein, 201 aa, Oryza sativa; identical to SEQ ID NO: 30604

SEQ ID NO: 31644 - protein, 323 aa, Oryza sativa
MEAEAAAKRARESGDAAAAGAGEQAGISAVIPGWFSEISPMWPGEAHSLKVEKVLFQGKSDYQNVMVFQSSTYGKVLVLDGVIQVTERDECAYQEMITHLPLCSIKDPKKVLVIGGGDGGVLREVSRHSSVEQIDICEIDKMVVDVSKQFFPHLAVGFEDPRVSLHIGDGVAFLKNAPEGTYDAVIVDSSDPIGPAQELFEKPFFQSVARALRPGGVVCTQAESIWLHMHIIEDIVANCRQVFKGSVNYAWTTVPTYPSGVIGFMLCSTEGPTVDFQHPIFNIEDNEFSTKSKGPLKFYNSEIHSASFCLPSFAKRVIGSKAN

SEQ ID NO: 31645 - protein, 28 aa, Oryza sativa
MYVHIYIARMVWYFFLRSIYIARGSECR

SEQ ID NO: 31646 - protein, 248 aa, Oryza sativa; identical to SEQ ID NO: 30794

SEQ ID NO: 31647 - protein, 132 aa, Oryza sativa
MGGCVGKGRRHIEEDKLDFKGGNVHVITSKEDWDRKIEEANKDGKIVVANFSASWCGPCRVIAPIYAEMSKTYPQLMFLTIDVDDLMDFSSSWDIRATPTFFFIKNEKQVDKLVGANKPELEKKVQALADGS

SEQ ID NO: 31648 - protein, 587 aa, Oryza sativa
MRGGGGGGGGGGEEAGQKLKSMDVDKLENGGDKPALKYHGWRAMPFIIGNETFEKLGTLGTSANLLVYLTQVFHMRSVDAATLLNGLNGTTSLAPIIGAFLSDAYLGRYLALAIASVASLIGMFLLTMTAAADGLYPAECGVGETCSKATSGQFAVLFMSFAFLVLGSAGIRPCSMPFGADQFDPHTESGKRGINSFFNWYYFTFTSAMLVSATVIIYVQSNVSWPIGLGIPTALMLLACVLFFMGTRLYVRVTPEGSPFTSIVQVFAAAARKRSLKQPKDPKQDLFDPPHTSAIVTKLAHTDQFRCLDKAAIVSGPDDVRAGGAAPSNPWRLCSVQQVEEVKCLIRIVPVWSTGIIYYVAVVQQSTYVVLSALQSDRHLGRSFQIPAASFTVFAMLAQTLWIPIYDRLLVPRLRRVTGKDEGLTLLQRQGIGIALSTVAMVMSAVVEDRRRHIALTQPTLGTTITGGAISAMSSLWMVPQLMVLGLSEAFNLISQIEFYYKEIPEHMRSVAGALAFCNLALGNYLSGFLVTIVHRTTGAGSNWLAQDLNKGRLDLFYWMIAGIGIFNIIYFMICAKWYRFKGAAAN

SEQ ID NO: 31649 - protein, 243 aa, Oryza sativa; identical to SEQ ID NO: 30519

SEQ ID NO: 31650 - protein, 349 aa, Oryza sativa
MTGGEEQGRRLFGVSLTDRPRWQQFLICSSGFFFGYLVNGICEEYVYNRLQFSFGWYFTFVQGFVYLGLIRLQGFTVKQMVNPWRTYVRLSAVLMGSHGLTKGSLAFLNYPAQIMFKSTKVLPVMIMGAFIPGLRRKYPFHEYISAVMLVIGLILFTLADAQSSPNFSMIGVAMVSGALVMDAFLGNLQEAIFKMNPDTTQMEMLFCSTVVGLPFLVVPMVLTGELMRAWTACSQHMYVYAVLVFEAMATFVGQVSVLSLIALFGAATTAMVTTARKAVTLLLSYLIFTKPLTEQHVTGLLLISMGIVLKLLLENKENVPRRQVRKTVQHWDDKQREIREVEEEKAPLV

SEQ ID NO: 31651 - protein, 253 aa, Oryza sativa
MGRKFFVGGNWKCNGTTDQVDKIVKILNEGQIASTDVVEVVVSPPYVFLPVVKSQLRPEIQVAAQNCWVKKGGAFTGEVSAEMLVNLSIPWVILGHSERRSLLGESNEFVGDKVAYALSQGLKVIACVGETLEQRESGSTMDVVAAQTKAISERIKDWTNVVVAYEPVWAIGTGKVATPDQAQEVHDGLRKWLAANVSAEVAESTRIIYGGSVTGANCKELAAKPDVDGFLVGGASLKPEFIDIINSATVKSA

SEQ ID NO: 31652 - protein, 341 aa, Oryza sativa; identical to SEQ ID NO: 30618

SEQ ID NO: 31653 - protein, 363 aa, Oryza sativa
MATKLVVLGIPWDVDTEGLREYMGKFGPLDDCVVMKERSSGRSRGFGYVTFSSADDAKNVLECEHVLGNRTLEVKIATPKEEMKSQGSKKATRIFVARIPQSVDESMFRRHFEAYGEITDLYMPKEHGSKGHRGIGFITFQSAESVDSIMQDSHELDGTTVVVDRATPKDEEVRYPPSRGASQGGYGAYNAYISAATRYAALGAPTLYDHPGSAYGRGGYYGSSQGMGNKKIFVGRLPQEANTEDLRHYFGKFGRIVDAYIPKDPKRSGHRGFGFVTFADEGVADRVARRSHEILGHEVAIDTAAPLEGDSGGGYMEPMDLYGAYGSMRTYGRFCSGIDYDYGYGHSGSSSSRSRADWRYRPY

SEQ ID NO: 31654 - protein, 501 aa, Oryza sativa
MALAAAATTFRPRLVVTAKADNTDTRRRHWKAGEFPFPTSSDTPRRSARTAERPPDKPRDEDGDSSRRTGRRHWKAGEFPGTQEDSRRPRRSPIKNVKKRLDARAEAKAWACTVTEALADRIDAKNWQEALQVFQMLKEQPFYHPKEGTFMKLLLLLGRSGQPSRARYLFDEMLQQGCQPTPELYTALIAAYCRNGLLDDAFRLLADMKASPVCQPDVYTYSTIIKACVDASRFDIVDAMYKDMADRSIAPNTVTQNIVLSGYGRAGRLDDMEKVLSAMLDSTTSKPDVWTMNIILSLFGNRGQIESMEKWYEKFRGYGIEPETRTLNILIGAYGKKRMYDKMSAVMEYMRKLAFPWTTATFNNVIEAFADAGDAKNMEHTFNQMRAEGMKPDTKTFCCLINGFGNAGLFHKVVGMVKLAERLGVPMDTTFHNAVLMTCVKAEDLMEMERVFMRMKQIQCIPDATTYSILVGAYRKEGMTDKIYVLQQENPTLVPTDLVHV

SEQ ID NO: 31655 - protein, 358 aa, Oryza sativa; identical to SEQ ID NO: 28573

SEQ ID NO: 31656 - protein, 316 aa, Oryza sativa
MSSSSENPTVTERGGGKDRRDDDGGEKKEGGGGFMEKVKDFIHDIGEKIEGAVGFGKPTADVSGVHIPHISLHRADLVVDVLIKNPNPVPIPLVDIDYLIESDGRKLVSGLIPDAGTIHAHGEETVKIPISLIYDDIKSTYNDIKPGSIIPYLVRVVLLIDVPIIGRIKLPLEKSGEIPIPYKPDVDVEKIKFHRFSFEETTATLHLKLENKNDFDLGLNMLEYEMWLGDDSVASAELTESATIEKQGITTMQVPFSFRPKDFGSAVWDMIRGRGTGYTIKGKIDVDTPFGNMKLPISKEGGTTRIKKDDDDDDED

SEQ ID NO: 31657 - protein, 326 aa, Oryza sativa
MAATSSTASAMAVAATSPTIATAPFSSLPLRLRLRPKPLLFTSRLLLPVPKSSSWVESVSEEGEEEGVEEDSEESGAAGEDDDGEDNDEKPRPEPVAASGFEFASPPEGYVEPAPFDELPPESPEDVAAAYEALYGPAFSGETVMGNNVFEVKVVDPVDMDREQRPSDEFSERVVQVNRVTKVVKGGRQLSFRAIVVVGDMKGHVGVGVGKAKEVTEAITKAAMNGRRNLVTVPLTKYSTFPHRADADYGAARVMLRPACPGSGVIAGGAVRVVLEMAGVENALGKQLRSKNPLNNARATIKATQMMRQFKDVAAERGLPMEQLWK

SEQ ID NO: 31658 - protein, 389 aa, Oryza sativa
MSHRKFEHPRHGSLGFLPRKRSSRHRGKVKSFPKDDVSKPCHLTSFVGYKAGMTHIVREVEKPGSKLHKKETCEAVTIIETPPLVIVGLVAYVKTPRGLRSLNSVWAQHLSEEVRRRFYKNWCKSKKKAFTKYALKYDSDAGKKEIQMQLEKMKKYASIVRVIAHTQIRKMKGLKQKKAHLMEIQINGGTIADKVDYGYKFFEKEIPVDAVFQKDEMIDIIGVTKGKGYEGVVTRWGVTRLPRKTHRGLRKVACIGAWHPARVSYTVARAGQNGYHHRTEMNKKVYKIGKSGQESHAACTEFDRTEKDITPMGGFPHYGVVKGDYLMIKGCCVGPKKRVVTLRQSLLKQTSRLALEEIKLKFIDTSSKFGHGRFQTTDEKQRFFGKLKA

SEQ ID NO: 31659 - protein, 348 aa, Oryza sativa
MDSGVDYLDFQKTYKQAAGSFSEWRGRLVRNFGFVIDLISLLMSLGHCPMIFWLRGMAFHLVDAVLLLNLRALIASFWKRIKTYAKLRKALSSLDGALPDATYDEICAYDDECAICRGPMARAKKLSCNHLFHLACLRSWLDQGLMDGYSCPTCRRPLFLSSQGHTRSTAEVGNVQLIAEQLNAGLNQQRVPGHEHPIEHQNPADAVWRGAGLDSSWAPPWSSPGMDNPSSSSAVTSVGLSGVQMMMRQLTSVTDNYGHPDATWSLWPEPVAGSSVVPSSSSRPDGASAAGLRFRGTARPANGSMSEVLSMVDRVREVLPHIPDELIIEDLMRTNNINATVNNLLLMQ

SEQ ID NO: 31660 - protein, 280 aa, Oryza sativa
MDTFFLSHGTPTLSIDDTMPAQHFFRSWLPAAVAGAQPPRAILIVSGHWETATPTVNVVRGNNDTIHDFEGYGFPKSMFQLEYPAPGAPDVAKKAKELLEQAGFGPVKEDHGRGLDHGAWVPLMFMYPEANVPVCQLSLQTGRDGAYHYDLGRALAPLRDDGVLILGSGNATHNLSCMAPVAEGTPVPQWAAEFDGWLQEALLAGGRHDDVKQYEEKAPNGKMAHPSPDHFLPLHVALGAAGEDAKAELIHHSWYNATLSHASYRFTTTTKNKPIAACKE

SEQ ID NO: 31661 - protein, 204 aa, Oryza sativa
MGAYKYVSELWRRKQSDVMRFVQRVRCWEYRQQPAIVRLTRPTRPDKARRLGYKAKQGYVVYRVRVRRGGRKRPVPKGIVYGKPKHQGITQLKFQRNKRSVAEERAGRKLGGLRVLNSYWVNEDSTYKYFEIILVDVAHSAIRNDPRINWLCKPVHKHRELRGLTSAGKKYRGLRGKGHTHHKARPSRRATWKRNQTVSLRRYR

SEQ ID NO: 31662 - protein, 232 aa, Oryza sativa
MCGGAILAEFIPAPSRAAAATKRVTASHLWPAGSKNAARGKSKSKRQQRSFADVDDFEAAFEQFDDDSDFDDAEEEDEGHFVFASKSRVVAARPRRGNTRATAVPPPATAPAATGHDDDELLHRQRRHVGVRREPRQEGEVRRRRLVRGQRRRRQRHAGFHRRAGVRPVHAVPAPLLRRLRVHRQPLRRRRRQQREHRHERRRQPVELRRLPNRRRPFLMYSSIDAVCALNC

SEQ ID NO: 31663 - protein, 301 aa, Oryza sativa
MAMPLPPPPPPRPPLGRGRLVGVGPAPAPATASQSNRPVPPLQLPRCRCHRSEGPWRTTAAANGRRRWWSDEDMEEEDDEEGYGYDDGGAPGGSAQELFGEPWFSKLFRAYGYVLPLLLASMLVATGPRAFLMAMALPLAQSAISWVVSFFTTRSRRQQEEEESYGYDYDDDPAFQRREEDDDDGDYYDAGAWQWRSRSHQQSTESGSGFGGWDDLLYDDEEKKEQESSGKKRTPPEPDTAAAAAASDLGLGLRARRGPRRSNGGMSRGRSSSSMRYNQAPLLTRLLVALFPFLGSWFRIL

SEQ ID NO: 31664 - protein, 243 aa, Oryza sativa; identical to SEQ ID NO: 30383

SEQ ID NO: 31665 - protein, 117 aa, Oryza sativa
MPPAKAGRLTDYTGTPSSPATTTTNATFIRSPSHASYGTASPYSYDRPAAHPLYCGQNTLAMREPYAYHHPSEVSSVGLGMSYPSPPITYPAYAGYSNGIGYSNAMAPAFHHQAYYR

SEQ ID NO: 31666 - protein, 232 aa, Oryza sativa
MVARGDMGAQIPLEQVPSVQQKIVKLCRQLNKPVIVASQLLESMIEYPTPTRAEVADVSEAVRQRADALMLSGESAMGRYPEKALSVLRSVSLRIEKWWREEKRHEELELKDVSSSFSDKISEEICISAAKMANKLEVDAVFVYTNTGHMASLLSRCRPDCPIFAFTTSTSVRRRLNLQWGLIPFRLSFSDDMESNLNRTFSLLKARGMIQSGDLVIALSDMLQSIQVMNVP

SEQ ID NO: 31667 - protein, 312 aa, Oryza sativa
MVKEASVDDVMKVLMASRKFEMQELWATCSHLVARSGLSADLLAKHLPIDVVAKIEEIRAKSPLAAAAAPRSPFLTHHYLPMNPASSAADRDNKIRRMRRALDAADIELVKLMVMGEGLDLDDALAVHYAVQHCNRDVVKALLELGAADVNSRAGPTGKTALHLAAEMVSPDMVSVLLDHHADPNSRTLDGVTPLDVLRSLTSEFLFKGAVPGLTHIEPNKLRLCLELVQSAVMVTTRDDGAPVTGGEAGGSDGGNFPRSDADDSLVSLTMNSTLMYQGQEMAAAVAAGEGRKSNNGRGSPPPAMYFPNGFA

SEQ ID NO: 31668 - protein, 284 aa, Oryza sativa
MSIKPFVDRLGYDNVPMEINRLRCRVNYHALKFLPEIEEMAEKLATRMRNRTGNVNPYMALHLRFEKGMVGLSFCDFAGTREEKAMMADYRQKQWPRRFKNGSHLWSLALEKRKEGRCPLEPGEIGIILRAMGYTKETQIYVASGQVYGGSNRMAPLRNMFPNLVTKEDLASKEEIEHFKKHVTSLAALDFLVCLKSDVFVMTHGGNFAKLIIGFRRYMGRHRLKSIKPDKGLMSKFFGDPYMPWATFVEDVMITHQTRTGLPESTFPHYDLWENPLTPCMCRA

SEQ ID NO: 31669 - protein, 221 aa, Oryza sativa
MTGVGSAVRRLYLSVYNWAVFFGWAQVLYYAVTTLLESGHEAVYAAVERPLQFAQTAAFLEILHGLVGLVRSPVSATLPQIGSRLFLTWGILWSFPETHSHILVTSLVISWSITEIIRYSFFGMKETFGFAPSWLLWLRYSTFMVLYPTGISSEVGLIYIALPYMKATEKYCLRMPNKWNFSFDFSYASILSLAVYVPGSPHMFTYMLAQRKKALAKAKAA

SEQ ID NO: 31670 - protein, 295 aa, Oryza sativa
MILNQLRNTSNKVAVKDGLNKEIAVFGLAGGSSGGAGLQRANSASAFGQPHNIWRPQRGLPERAVSVLRAWLFEHFLHPYPTDGDKQMLAKQTGLTRNQVSNWFINARVRLWKPMVEEIHNLEMRQMHKHSVVDKGQHSVHHQAQHSSQCSGNPSVPSDSHPGQSSSITRNHNTAASQGFPDELSQMSQSIQGQVSFAYNGLTSQHNIASPHHQHQQVGGVGIGGGNGGVSLTLGLHQNNRVCIAEPLPAALPANLAHRFGLEEVSDAYVMSSFGGQDRHFGKEIGGHLLHDFVG

SEQ ID NO: 31671 - protein, 298 aa, Oryza sativa
MVDTEYWYVESGSRANGRGKKNGLRQTKKWWLPSPRVPDIGLSQFQRNRLVFQAKLVHQILKAAMSINEEVLLQIPIPPAVTDALPKSGRAGLGEDLYHAITTEYIPIEEIFLSLSLKTEHTVLETMNRLEGAVFAWNQRISEEKSKKSPGRHSWNFMKDSSSELDKMSMCIERVETLMQLLKSRFPSLPPTFIEVVKIQYNVDVGHAIVEAYSRVLVGVAFSILSRVAEILLEDDLIKKPNTPLATLKFDLSSDVYLAGITETPPGHIRRSLMDQISLVDGSLDAVVRKKGVKQLRW

SEQ ID NO: 31672 - protein, 334 aa, Oryza sativa
MKTASSSSSSSHGFPATASLCTPYLLLVPLGLLAVVLVVPSLGSSHVRSDGLGVLCHAGPSTADGYLVTPGGDAASAAAAAAETKAVVRPELRLLVGVLTTPKRYERRNIVRLAYALQPAVPPGVAQVDVRFVFCRVADPVDAQLVVLEAARHGDILVLNCTENMNDGKTHEYLSSVPRMFASSPYDYVMKTDDDTYLRVAALVDELRHKPRDDVYLGYGFAVGDDPMQFMHGMGYVVSWDVATWVSTNEDILRYNDTHGPEDLLVGKWLNIGRRGKNRYSLRPRMYDLNWDMDNFRPDTVLVHMLKDNRRWAAAFRYFNVTAGLQPSNLYHFP

SEQ ID NO: 31673 - protein, 220 aa, Oryza sativa
MTTSESVQETLGLDFPHPSKPRVLLAASGSVAAIKFESLCRSFSEWAEVRAVATKASLHFIDRTSLPSNIILYTDDDEWSTWKKIGDEVLHIELRKWADIMVIAPLSANTLAKIAGGLCDNLLTCIVRAWDYSKPLFVAPAMNTFMWNNPFTSRHLETINLLGISLVPPITKRLACGDYGNGAMAEPSVIDSTVRLACKRQPLNTNSSPVVPAGRNLPSS

SEQ ID NO: 31674 - protein, 285 aa, Oryza sativa
MATSSAAAALRLPASQLPLSARPSSSSTLRFPPRRPARRGGLAVSAFTKLSEASPVAIPPEPAQPLPDEEALPPKPGVYGVYDPAGELQFVGISRNVRASVEGHRRKVPADLCGSVKVSIADEETPDRTVLTNAWKSWLEEHITATGKAPPGNVAGNHIWVGPPQRPPDLRLTPGRHVQLTVPLEQLIDRLVKDNKVVAFIKGSRSAPQCGFSQRVVGILESHGVDFVTVDVLDEEHNHGLRETLKTYSNWPTFPQVFVGGELVGGCDIVSSMAEKGELAALFKK

SEQ ID NO: 31675 - protein, 438 aa, Oryza sativa
MACHLRLFPFTQLLVLVLYKIAAVGADPANAELSTKITQHSPLYNPQPQDFPNEELYRNYLVIQRFKKTITSDPKNITATWTGHDICGNTTYLGFYCAALPGRTKKPTVIVVIFNGYGLRAPKLEGFIDHLPDLALFHAASNDFGGDIPYLTGLAYNYKINVDSNLQIQDDFSRDMVGSHVTTKVHGYCVNLDLDITFHLRPGKDDKKGRSIPGATDSKALLLNYNHLSGPLPVNIGFSKLSYLALANNRLTGAIPPSILHLQDSLLEVLLLNNQLSGCLPHELGMLTKAAVFDAGMNQLTGPIPSSFSCLTSVEQLNLGGNRLYGEIPDALCKLAAVPAGRLANLTLSSNYFTSVGPACLSLIKDGVLNVRNNCIPGFANQRRPAECASFHSQPKACPAASATHVACPAGAANAAAAPADRVVKDYSSYVTYATLHE

SEQ ID NO: 31676 - protein, 313 aa, Oryza sativa
MFDNKRQRSVQDMIKTIEKTMSEHINAVTWLDEPTRAAALAKLAKVSNLIGGSTQNRTYPFKLTRDNYFANIQTIQSAEWTRQLGKINKPVDKSQWPMSPATANSFYSWVRNQMVFPAATLQVPFFSDNVHPVQNYGAMGSIMGHELTHGFDTDGRLYDNDGNMADWWSNSSAQAFETRAQCMRDQYSSFTAYALSGPVGKVDGDLTIGENIADNGGLSVAYDAFHEWAKTASTFDTHGVTNDEVDKLFYVSYSQMYCEKMRDETQKQRIASNVHAPGMWRVNGVLMNHDPFAKTFQCKAGSKMNPANKCKIW

SEQ ID NO: 31677 - protein, 27 aa, Oryza sativa
MLGFFWFNWIRLFKFVVYLFSGCGLDW

SEQ ID NO: 31678 - protein, 214 aa, Oryza sativa
MATATLPLRLLASKTLAFPSAPSLPASRCSLPVAASAPRRCWRLLASAEEPAPAPVEAEAEAEVVEEEEVEEEEAAVPEPVEAQIAAAGAGKDADIFAVVMIGSRQYIVMPGRYIYTQRLKGANVNDQIILNKVLLVSTRDKAYIGMPVVTNAAVHAVVEEQGRDDKVIVFKYKKKKKYQRKLGHRQPNTRLRITGISGYEDFPADPILEYVPA

SEQ ID NO: 31679 - protein, 303 aa, Oryza sativa
MGSASLATQPSPAACLPSLPAGGRLRLRLAPPPRAPPRLCKRAGKLRVVTIRSAHSGVSNVSVETPPDNEASVTGAAYGFRGATTSLTNEMLTLSKKITLVRHGLSTWNAESRVQGSSNLSVLTETGAKQAEKCRDALANMKFDVCFSSPISRAKSTAEIIWKGKEEPLIFLDSLKEAHLFFLEGMTNADAKKEYPELYTRWREDPSNFKVNGIYPVRKLWGTAREAWKEILLTPGENMLVVTHKSILRALICTALGLPPERFRSIDVNNGGMCVFTVNKRGEAMLQALNMTAHMYSDHTYQY

SEQ ID NO: 31680 - protein, 149 aa, Oryza sativa
MSIELILWLFSFASIMVLIGLTAYQLICLSDLEFDYINPYDSSSRINSVVLIEYALQGALCASFLLTLHWFPFLVMAPVAYYHGKLYMDRKHLVDVTEIFRQLNWEKKYRMIKLAFYFSLFIITIYRLVMTAVTLFIDEDANLVDTRTI

SEQ ID NO: 31681 - protein, 269 aa, Oryza sativa; identical to SEQ ID NO: 30174

SEQ ID NO: 31682 - protein, 346 aa, Oryza sativa
MAATASNKRVILKRYVTGLLSEDDMEVVTTEVPPLAVVPAGSEAVVVKNLYVSCDPYMRNRMTRHEVPSYVSDFIPGEVLANFGVMRVISSGHPDFKAGDLVWGITGWEEYTVINNPESLFRINHPKLPLSYYTGILGMPGLTAYAGFFEVSKPKKGEYVFISAASGAVGQIVGQLAKIIGCYVVGSAGSDEKVSLLKTKFGFNDAFNYKKEPDLEAALRRYFPEGIDIYFENVGGETLDAVLPNMRLGGRIAACGMISQYNLERPEGVKNLFYIVTKRLRMEGFLVFDFYDRYYQFEDEMARYLKEGKVAYVEDVVEGLDAAPAALIKLFTGRNVGKQLVAIARE

SEQ ID NO: 31683 - protein, 265 aa, Oryza sativa
MLVHPDKNMGNDKAADAFKKLQNAYEVLLDSLKRKTYDDELRREELLNYFRRFQSASQKKGGSGIFRQGFSPSEGVDEGPYGLSRRIACKKCGDFHLWIYTGRAKSQARWCQDCNDFHQAKDGDGWVEQSFQPVLFGLLHKPELPHAYVCAESIIFDVTEWFTCQGMRCPANTHKPSFHVNASLLKQNSGKGSTSAQRGGGIPNGVNMDGGIDEEEFFEWLQNALQSGMFESFGAQNEPPSPGSGSNAKGSNSSSKKKKKGKKQW

SEQ ID NO: 31684 - protein, 250 aa, Oryza sativa
METALFSAASLFRDADDDQDEMQVDADEQVQSVQYEERAHKFPGMELKIREFSSHQLNANMLWPGTFLFADWLVKNKSILHGRRILELGSGTGALAIFLRKAFQVDITTTDYDDGEIQENIAYNCKANDLGVLPHIRHTWGDQFPVLIPDWDIVIASDILLYVKQYPNLTRTLSFLLKEYKGCSQNAGSSASTAITNKSGTQVPVKFPIFLMSCRRRIGKDQSLFFEECEKAGLEVQHLGALVYLIYTKQ

SEQ ID NO: 31685 - protein, 180 aa, Oryza sativa
MTKLAMRIASIMATDLGVDQEALVGAFRDKQQSMAIHHYPPCRHPDKVIGITPHSDGLGLTLLLQLDDTPGLQIRKDGRWLPVRPRPGTFIINVADILEVLTNGAYKSVEHRVLADAEKGRTTIVTFHEAYVDGMVKPIPEVLKLNGAEARYKSIERIEYIKGNFVALSEGTRFLESLKI

SEQ ID NO: 31686 - protein, 247 aa, Oryza sativa
MATSWAAPPPGYPYAQGQGGAQPPHPPQSTAVAVTPVSNGVGNPYVIVTPASASPSTCQSLRKALERYGRKLEDGTRKAADTTGNIWHHLRTAPNMADAAVARLAQGTKVYAEGGHDRVFTQAFGVVPGEQLRKAYACYLSTSSGPVIGTLYISTARLAFCSDSPISYHAPAVAVAGAAPAHPPEAIYKVVLPLNQVKSVNPSASMTNRGERYIQIMTTDNHEFWFMGFVSYDKALKNLYEALQRRA

SEQ ID NO: 31687 - protein, 310 aa, Oryza sativa
MKVSVVSRSGREVVRGGVELKDSAKVADLQDAIYAKTKKYYPARQRLTLPIQPGKSGKPVVLSAKASLSEYCEKGSGSLTVVFKDLGPQVFYSTLFFFEYLGPLLIYPMFYYLPVYKYFGYEGERVMHPVQTYAMYYWCFHYFKRIMETFFVHRFSHATSPVSNVFRNCAYYWTFGAYIAYYCNHPLYTPVSELQMKIGFGFGILCQIANFYCHILLRNLRSPSGNGGYQIPRGFLFNIVTCANYTTEIYQWLGFNIATQTVAGYIFLVVAASIMTNWALGKHRRLKKLFDGKEGRPKYPRRWVILPPFL

SEQ ID NO: 31688 - protein, 207 aa, Oryza sativa
MGSSDGDKPLRRIAASFEELEAVAKQQAPGPAMEVGSFARACSNVSVLFGCLGIAFKFAEMDYVAKVDDLLEASKSISKLPEMVELDIQKGTVRQAGSHTRNMLRVKRGIDMVKILFEQILVTEGNSLRDAASKAYAQVFAPHHGWAIRKAVAAGMYALPSKSQLLKKLNEDENSAKVQMQTFIRASGPVILYVEDLFTSRNLGMDW

SEQ ID NO: 31689 - protein, 556 aa, Oryza sativa
MAPYLPQSGAASGGSPYSEGGALYALGLIHANHGEGIKQFLRESLRNTSSEVVQHGACLGLGLAALGTADEEIFEDVKNILYTDSAVAGEAAGIGMGLLMAGTASEKAGEMLAYAHDTQHEKIIRGLSLGIALTVYGREEEADTLIEQMTRDQDPILRYGGMYALALAYRGTANNKAIHQLLHFAVSDVSDDVRRTAVLALGFVLYNEPEQTPRIVSLLSESYNPHVRYGAALAVGISCAGTGLSDAISLLEPLTSDVVDFVRQGALIAMAMVMIQTNESYDSRVGTFRRQLEKIILDKHEDTMSKMGAIMATGILDAGGRNVTIRLQSRSKHDKLTAVVGLAVFTQFWYWYPLTYFISLAFSPTAFIGLNSDLKVPKFEFLSNTKPSLFDYPKPTTQQTTTASVKLPTAILSTYAKAKSRAKKEAESKAQEKAEAPPSEDASTSMQVDGVAEKKAPEPEPTFQILTNPARVVPAQEKFIKFLEGGRYEPVKLAPSGFVLLRDLKPTETEELVLTDAPATQATNAAAATAGQQGSGAAAMAVDEEPLPPQPFEYTS

SEQ ID NO: 31690 - protein, 207 aa, Oryza sativa
MEHHRHRGAVVLVVAAAAMAMAMSAVRGDFAADRAECADKLMALSTCLTFVQDGASGGAAAPTPDCCSGLKAVLAASRKCLCVLIKDRDDPNLGLKINVTKALSLPQLCNAPANISDCPRLLNLPPNSKDAQIFEQFAKQQAAMQGSPSASPGGSSAPAAGAQKSGAAVLRWLGVDGVGGGGARAVALLLFLLSSAVAVAAPLLLVF

SEQ ID NO: 31691 - protein, 347 aa, Oryza sativa
MRLSVAILCALVAVQAAALLLAGSAAAASELKVGYYHKKCKGVENVIKWHVIKALKQNRRTGAALVRLLFHDCFVRGCDGSVLLDKSYENPHPEKEAPVNIGLAAFDLLEEIKAAVEKRCPGVVSCSDILIYAARDAGSILSNGHVHFDVPAGRLDGVVSRADEAQAELPDSTMTVQQLKDNFAAKGFDTEQLVILSGAHSIGQGHCSSFTGRLSEPPQQITPAYRDLLNYKCSQAANPDVVNNVRDEDASVVARFMPGFVSRVRKISDFLDNTYYHNNLAKIVTFHSDWQLLTDATSLSKVHEYADNATLWDSDFSDSLLKLSQLPMPEGSKGEIRKKCSAINHLY

SEQ ID NO: 31692 - protein, 307 aa, Oryza sativa
MRDLNGVSKGSGFVAFKSAEDASRALVAMNGKMIGSKPLYVALAQRKEERRARLQAQFSQMRPMVMPPSVAPRMPMYPPGVPGVGQQLFYGQPPPAFVNPQPGFGFQQHLIPGMRPSVGPIPNFVMPMVQQGQQPQRPAGRRAGTGGIQQPMPMGHQQMLPRGSRGGYRYASGRGMPDNAFRGVGGLVPSPYEMGRMPLSDAGAPPQVPIGALASALANSPPDQQRLMLGESLYPLVDQLEHDQAAKVTGMLLEMDQTEVLHLIESPDALKAKVAEAMEVLRNAQQQQANTPTDQLAALTLSDGVVS

SEQ ID NO: 31693 - protein, 294 aa, Oryza sativa
MGGAEIIVSPPVVSFRETVLEKSCRTVMSKSPNKHNRLYMEARPLEEGLAEAIDDGRIGPRDDPKVRSKILSEEFGWDKDLAKKIWCFGPETTGPNMVVDMCKGVQYLNEIKDSVVAGFQWASKEGALAEENMRGICFEVCDVVLHADAIHRGGGQVIPTARRVIYASQLTAKPRLLEPVYLVEIQAPENALGGIYGVLNQKRGHVFEEMQRPGTPLYNIKAYLPVIESFGFSSQLRAATSGQAFPQCVFDHWDMMTSDPLEAGSQASTLVQDIRKRKGLKEQMTPLSDFEDKL

SEQ ID NO: 31694 - protein, 88 aa, Oryza sativa
MIRWCRRLLTCTRLIGPSMNPPLAPGHRSTPWAKASQTGGRVETQRRYHLNNHQVTTLPPTKYEWTFEGCCAQLNSYVPYLVKSVSVW

SEQ ID NO: 31695 - protein, 88 aa, Oryza sativa
MPPSVMPRKQATMSAPRPSAAPATACCRWYPSITVRGSSRLAITVVPWCAHGHLTNCLMKCMVEVHSCYCLNPYYYLIFTLFCTVCCD

SEQ ID NO: 31696 - protein, 488 aa, Oryza sativa
MAATGGAAGEKTASSLLLGVRGYTSTLKNASTASCRLSAGHPIEVTLWEASPPALSHFSVHCPDLPSFNGNLLGAPKAIAAAVDDADGQLLLLLRVPIDQLGAPHDNDYLVYHPDPPSPKLDLLPNPPPPTLGDHQLAILSCGDDRYVVAALHVWSEFTSTLRLYRSSCSSGSWTSEEVSVEEPVRDRLCPIPDSAKRQLYHVTTKTITLGGAKGTVGWVDLWRGILLCDVLDEMSPRKLRDMPLPWPAKGNWRMYLNGDVSFCRDIAISQHKDSIKYLEMEIVSPRTVTTTIPTSTSADPTSYLEWVRRSREPQPTRRRSVFHPGSWRITTWSMPIPVTSWDDWRRDCTAESREVHLDTNPSHHYELLHSLMLSNSGDEHREEAQGQGATSSLSLGRLRLCYPALSCIDDDVVYLLGNAAGRGAKTGGMMVAVDVRNKELRGVAKLDPEKNTLYSMRCYLATGISKRLNTTTDTRVGRPEEDAEAAE

SEQ ID NO: 31697 - protein, 228 aa, Oryza sativa
MPRYYCDYCDTYLTHDSPSVRKQHNAGYKHKANVRTYYQQFEEQQTQSLIDQRIKEHLGQAAAFQVGAPFNQHLLSFPGGVPRPRLPILPTPGMPLGVPQVPGAPLMPGVRPPILPAPGIPGYPGAPNVPTMPQTGAPPGSMPPGSMPPGSMPMQMAPLPRPPTLPPPTSGAPGAPIPNSGAPPAMYQTNPPQPAGPTSGAPPPVSAPPPAAPPQAPFSYAQPPEGNH

SEQ ID NO: 31698 - protein, 283 aa, Oryza sativa
MVAGVIDGVGVGRWRAVDVSWQRRGLVVVVVGVLQLVEVEDMLDLKLEVMGRCLVLPPPWSLLLRMEVLLVLYEKVYCLWSLSLCAGCGLGWWWCFVPLASVRDDGVVAGVGDVVVPATELAEALLRPPPSSGSQLVLLLHLLLVRSFPTLCVVPSREQFIRQWLCSSLLQGGWIWGPSPSSFLGSCIHAGWAIRVELMLLRFKGELRGEVWLSPVKLTPKSTAQQQISNLCRLCEGVRRGLPVRQAVCMSKETQGSNRRGFAAAPVDSRLLRCLVSGGCLYS

SEQ ID NO: 31699 - protein, 259 aa, Oryza sativa; identical to SEQ ID NO: 30235

SEQ ID NO: 31700 - protein, 233 aa, Oryza sativa
MVDLIHETDDAMAEAELLLERSRAITLNGRDKRGRALVRIVGKYFPGKLSSASLVRSPQFRCFCRRKSDPVSFVAAARALGGRAEAALRGYVRRRVLPEIGEREFVVAYVHSLVDRGDNFPGVAAIRAAYEALPAAAKERLRAVYFVHPGFQARLFFATLGRFLFSSGYVHTTNHSVCAALRFVGEALVFTVVSLEFWILQAVREAEVHEQARVPVGAREQGGDGGPGMRAPA

SEQ ID NO: 31701 - protein, 217 aa, Oryza sativa
MEASSWDALRKQARRLEAQLDDQMSAYRKLISMKSDGSENDIESDIERSLKQLQQVNSQMQTWVSSGGSEVLSHTLTRHMEILQDLTQEFYRLRSSLRAKQQHASLLDLRDFDRAKFDVEEGADSDQALLKEQAAISRSTGQMDTVISQAQATLGTLMLQRSTFGGITTKISNVSSRLPTINQILSSIKRKKSMDTIILSLVASVCAFLIFIYWMSK

SEQ ID NO: 31702 - protein, 133 aa, Oryza sativa; identical to SEQ ID NO: 30708

SEQ ID NO: 31703 - protein, 269 aa, Oryza sativa; identical to SEQ ID NO: 30174

SEQ ID NO: 31704 - protein, 389 aa, Oryza sativa
MLKLQASLPLFRLRPRPSSPPPCGPRLPFVPICKRRMSTQAQPSFAPLPTAQSESDAGAAGYQFRLVSYNILAQVYVKSAFFPHSPSACLKWKTRSKAVLSELKSFEADLMCIQELDEYDTFYKKNMENSGYSSIYIQRSGDKRDGCGIFYKPKSMELVQKEVLHYNDLVEKYVHTDHVNSDTSNNSSPTEEASKKVDNNKHGDPNDPRFRLKRDCVGLLAAFKLNDPCDHILIMANTHIYWDPEWIDVKLAQAKYILSRVTQFEKLISNKFNCKPSVMIAGDFNSTPGDKVYNYLVSANSDSTDEAPIKLRSLYAANGGEPEFTNCTPGFTGTLDYIFLSDGSSVKPTSLLRIPRGDSAEVQGGLPNFHHPSDHLPIGADFQVLGSEG

SEQ ID NO: 31705 - protein, 471 aa, Oryza sativa
MAAAAAVADEVTVLHGGVVVSMDGGFRVFQDGAVAVAGDRIAAVGPSADVLSSFPGAAATVDLAGRILLPGFVNTHVHTSQQLARGIADDVDLMAWLHGRIWPYESHMTEEDSYASTLLCGIELIRSGVTCFAEAGGQYVSEMARAVELLGLRACLTKSIMDCGDGLPPNWSSCSTDDCIQSQKDLYEKHHNTADGRIRIWFGLRQIMNATDRLLLETRDAAQKLNTGIHMHIAEIPYENELVMQTKGIDHGTVTYLEKIDFLRSNLLAAHSVWLNKPEIGHFLKADVKVSHCPASAMRMLGFAPIREMLDSGVCVSLGTDGAPSNNRMSIVDEMYLACLINKGREAYITGTTNPTALPAETVLKMATINGAKAVLWDDEIGSLEVGKKADMVVVNPLIWSMVPVHDCIANIVYCMRTENIESVMCNGRWIMREKKIVNLNEEEVIASAEKIARDLLARAGINLPNRMNYL

SEQ ID NO: 31706 - protein, 195 aa, Oryza sativa
MAGVQVMPAVGAVATAEGSCRAAGQRRGRGVSSLFAGDWRRRPRRAACTARVRGRRQQQQQQGLAVVCNLGGTYDEGFEDIHVQLINVFTYKAVKTVLTQLYEMNPPSYRWLYNFVAVNKPTDGKVFLRALGKEKQELAERVMITRLHLYSKWIKKCDHAMMYERISDENLALMRERLMETVIWPTDDTNTEKIG

SEQ ID NO: 31707 - protein, 405 aa, Oryza sativa; identical to SEQ ID NO: 31391

SEQ ID NO: 31708 - protein, 302 aa, Oryza sativa
MAPKRLVCFLAVAAALATTCHGWGAGAGDVVSSSAAALSFVDRLRQMMIPAAVGDGDYCDSWRVGVEANNVRGWTAAPRKCDNYVENYMRGHHYRRDSKVVVDEAAAYAEAAVLSGDPAADANATWVFDVDETALSHVKFYKKHGFGYHRTDEPAFMEWLIAGRASALPNTVTLYKKLLLLGVKIVFLSDRPDTPELRNATATNLIKEGFDCWDELILRSENSTATGSVVEYKSGERKKLEEEKGMVIIGNIGDQWSDLLGSPEGRRTFKLPNPAYYIDNYKRAGAAVRAAVAITASSSSSS

SEQ ID NO: 31709 - protein, 201 aa, Oryza sativa; identical to SEQ ID NO: 30604

SEQ ID NO: 31710 - protein, 485 aa, Oryza sativa
MDADGSPPLRVVIFPWLAFGHLLPYMELAERMASRGHHVSFVSTPRNIARLPAPVASAVELVALPLPRVDGLADGAESTNDVPDDEQGLLMEAFDGLAAPFADFLAAACADDGGGGRRRRPDWVIADSFHHWAAPAAARHGVPCVALLPSAAVMAAWVVPPPATSSPSPAAAMPSYEWEKLKASFLAATSHGASSSASGGMSRATRCSLTLERCTLAAMRSCVEWEPEPFRAVAAGLGKPLVPLGLLPPSPAGSRRRRAVAGEEDDDSTNPLLRWLDAQPPSSVLYVALGSEVPLRVDQVHELALGLELAGARFLWALRKPRSSSAASAAAAAAAAILPPGFQERTASRGVVTMGWAPQIAILEHAAVGAFLTHCGRNSLVEGISAGNPLVMLPIAGDQGPNARLMEARKVGLQVARDGADGSFDRHGVAAAVRAAIVDEETRKVFVANALKLREVVADEELHERYIDEFIHQLSLSSPTYLASS

SEQ ID NO: 31711 - protein, 185 aa, Oryza sativa
MARLVSTALMRGLVRSSRAPRVAAVSQPAIQQFRNYSPGLGGDSRGSGDSSSTRVAADPDTHQDFQPTSKSSNMSFDDIVAQDIKENPVLIYMKGFPESPMCGFSALAVKVLKLYDVPISARDILGDLKLKECVKAHTNWPTFPQIFIKGEFVGGSDIILDMHQKGQLKDVLGDIAQKHEQKESS

SEQ ID NO: 31712 - protein, 170 aa, Oryza sativa
MNGQPRFHDMIGGGGKGMQDNEINGLFNMPSYHKFVEGSQMSVDSADGFNMANYVGGSVAMSVDNSSVGSNESRTVILKHPGLRDAPTASYSVGNSVFRPNRVAAHTLNEDALARVLMDPSHPTEILSNYEEWAIDLGRLDMGVPFAQGAFGKLYRGTYNGEDVAISTSS

SEQ ID NO: 31713 - protein, 360 aa, Oryza sativa
MAARVVVAFAVASAMFVAVSGQKFNAIFSFGDSMSDTGNLCVNGPPAGLTLTQPPYGETFFGRATCRCSDGRLVVDFLAEKFGLPLLPPSKRGGSDFRRGANMAIIGATTMDSGFFQSLGIGDKIWNNGPLNTQIQWFQQLMPSICGSSCKTYLSKSLFVLGEFGGNDYNAQLFGGYTPEQAAGQSGTIVDGIGKGVEQLIGLGAMYVVVPGVLPVGCFPIYLTLYGTSNAGDYDQYGCLTRFNTLSSRHNSLLQAKVSSLQSKYPWARIMYADFYSHVYDMVKSPSNYGFSTNLRACCGAGGGKYNYQNGARCGMSGAYACSNPSSSLSWDGIHLTEAAYKQIADGWVNGPYCHPPIMP

SEQ ID NO: 31714 - protein, 265 aa, Oryza sativa; identical to SEQ ID NO: 30714

SEQ ID NO: 31715 - protein, 320 aa, Oryza sativa; identical to SEQ ID NO: 30442

SEQ ID NO: 31716 - protein, 239 aa, Oryza sativa; identical to SEQ ID NO: 30776

SEQ ID NO: 31717 - protein, 293 aa, Oryza sativa
MSAASASATASLSAAAAVAVAAAALRPTQQRRLRVVAPPRPLRLTSLNPPRAASAPSTPLWEAGVRAESSDSPGAGAGGDVMGLLLRERIVFLGNEIEDFLADAVVSQLLLLDAVDPNSDIRLFVNSPGGSLSATMAIYDVMQLVRADVSTIGLGIAGSTASIILGGGTKGKRFAMPNTRIMIHQPVGGASGQALDVEVQAKEILTNKRNVIRLISGFTGRTPEQVEKDIDRDRYMGPLEAVDYGLIDSVIDGDSIIPLEPVPERVKPKYNYEELYKDPQKFLTPDVPDDEIY

SEQ ID NO: 31718 - protein, 286 aa, Oryza sativa; identical to SEQ ID NO: 30185

SEQ ID NO: 31719 - protein, 229 aa, Oryza sativa
MAGAPRGLVLIGVCAVLMAVAVGGEAASVVVGTAKCADCTRKNMKAEDAFKNLQVAIKCKNTNGEYESKAAGKLDGTGAFSVPLDADLDSSDCIAQLHSANNEPCPGQEPSKIVPMSEGTFVAIAGKTHYPSALCASATICGPIKKKIIDHFHKKPVPPKPEPKPEPPKPKPEPEHPFLDHIHKKEKHFFDHFHKKPVPPKPEPKPEPKPEPKPQPAPEYHNPSPPAKN

SEQ ID NO: 31720 - protein, 269 aa, Oryza sativa; identical to SEQ ID NO: 30174

SEQ ID NO: 31721 - protein, 349 aa, Oryza sativa
MEIADLPIATSHRANLLAAGYSSLAALSAASPPRLARDLSIEVHEAEEILKVAVGANKSKGADGPSTSSVLKGVQNAWDMLSDEQSRRHINTGSADLNNILGGGIHCKEVTEIGGVPGVGKTQLGIQLAINVQIPVEYGGLGGKAVYIDTEGSFMVERVYQIAEGCISDILEYFPHCHDKAPAGQEKLKPESFLADIYYFRICSYTEQIAVINYLEKFLGEHKDVRIVIIDSVTFHFRQDFDDMALRTRVLSGLSLKLMKLSKAYNLAVVLLNQVTTKFTEGSFQLTLALGDSWSHSCTNRLILYWNGNERYGFLDKSPSLPVASAPYAVTVKGVRDAVNSNSKRVRVM

SEQ ID NO: 31722 - protein, 257 aa, Oryza sativa
MAEEATLSHPSRYVKLSREHDAPAPAEDIRPGELNQPVHVPQLEGRRCSECGQVLPESYEPPADEPWTTGIFACTDDPQTCRTGLFCPCVLFGRNIEALREDIPWTTPCVCHAVFVEGGIALAILTAIFHGVDPRTSFLIGEGLVFSWWLCGTYTGIFRQELQRKYHLKNSPCDPCMVHCCLHWCANCQEHRERTGRLAENSAVPMTVVNPPAVQEMSMAESRGPVSPGMENGAPSNSKGEHEEPKSDHDDVEVIPL

SEQ ID NO: 31723 - protein, 407 aa, Oryza sativa
MACHLRLFPFTQLLVLVLYKIAAVGADPANAELSTKITQHSPLYNPQPQDFPNEELYRNYLVIQRFKKTITSDPKNITATWTGHDICGNTTYLGFYCAALPGRTKKPTVTVVIFNGYGLRAPKLEGFIDHLPDLALFHAASNDFGGDIPYLTGLAYNYKINVDSNLQIQDDFSRDMVGSHVTTKVHGYCVNLDLDITFHLRPGKDDKKGRSIPGATDSKALLLNYNHLSGPLPVNIGFSKLSYLALANNRLTGAIPPSILHLQDSLLEVLLLNNQLSGCLPHELGMLTKAAVFDAGMNQLTGPIPSSFSCLTSVEQLNLGGNRLYGEIPERHPRGVPRRSCQRCGGAGGQGGQGLLQLRDVRHPARVSPAPRHGRTTCVHACSRGQLEASVSGWYLLLYSCVRLLCS

SEQ ID NO: 31724 - protein, 311 aa, Oryza sativa
MLPLAAGAGAARPCLSSSPAPPVSSPGAIPLLRHTPIPHHRRRPLAALRTRIMLLRPLRAAASPGPAASSRPARDRVIDFGKHKGQMLGTLPPSYLRWVVAELDYGDTAAWASLAREVLDDPVYVDRVEWEHAHRFLRGDTDYDGDGEDGPLHEMADRFGWDLSDEEGWSRLDFRLLGTSYGGRIPRKGGRRQTTTSSLFDIGAETDGPRGKRDERRERMRLRRETQVRGAKLDMLGVNAGVKDGGVLGTPRKARTRTTAKTDILGLGRRRSRGGEVLGEKVLPGSGGQGGNPFPGRQAFLDKVRKLKDDS

SEQ ID NO: 31725 - protein, 271 aa, Oryza sativa; identical to SEQ ID NO: 30299

SEQ ID NO: 31726 - protein, 190 aa, Oryza sativa
MAAAEGEKKMTSFIAKSSGAEEFEAGAIRRAIEDDCDDDDSGILPPDVLSGEGLDNRDAGFPPSQRSASKITGDRAAVNPAAADPPMPVPGLHHHPNIPAANRQLPPAARLLINCGIFLVATAGSSIVFHTAGDPSAIDGPAYALVAFFFVLLGLWFVLLGPVAGQFPGATRVAVAIAKALKGYLLGGGN

SEQ ID NO: 31727 - protein, 224 aa, Oryza sativa
MVLGLLAPCRSYGSTSRFDFQNAIEKLPNNIFEKSYPLRQFDLQKRISAFFYKAAELSLLGVVAGSIQGGLSKALSARKERRLSVTIPSVSTNALGYGAFLGLYANLRYQLLCGLDQYMVRRFDVLGVAIFFSTALRLTNIQIGESSRRTWLGEEADPQYSDRLLRAYKRPVEVAGDQQDSRWFISKDAIVSGLGLLGIKQGGTEAALSKPRRKRVVRKKVAST

SEQ ID NO: 31728 - protein, 230 aa, Oryza sativa; identical to SEQ ID NO: 31096

SEQ ID NO: 31729 - protein, 331 aa, Oryza sativa
MGLRDIELTLPPGFRFYPSDEELVCHYLHNKVVNQHRFAGVGGAAAAGGGTMVEVDLHTHEPWELPDVAKLSTNEWYFFSFRDRKYATGLRTNRATKSGYWKATGKDRVIHNPKLHAAAHRRASIVGMRKTLVFYRGRAPNGVKTNWVMHEFRMENPHTPPKEDWVLCRVFYKKKAETETESSYSMENEQEAVIAMARSAAAIKAGGCYSNSSSSHDPAAAGHHSPPPFPASLAACSSSHHYSSHPPPPPDHHHHHHMPVTGGGGGSLNEFIPTTSMALYSSIFDFSQHLDGGAVAASASAAGSRVDGGEQCGLMELGLEEHYNYNGLMPM

SEQ ID NO: 31730 - protein, 90 aa, Oryza sativa
MHFIEHLAITLSPPLQITIVRLPGRSWRLEGVEEEPCCRRRHRGSRVAAGHQEKPSSTLRRRCLPLSCTVSSSTLPRFAISPSRGTPSCP

SEQ ID NO: 31731 - protein, 382 aa, Oryza sativa
MEVPPFARPNRASPLAWEADFLERTNLTMSTVEYALPTAIMTSPSFVAEGAGGSQICAMYSFQAFSEMINERNAEPGMIDVFLLPHLPLNDVSDVYDQIGSGDAPYRISNGPMLLNKVNAYRELIRVGKELAPLEGLMKSLEDELLVRLNSIVSILKSDGEDIPLPLDMSAATQLLFKWESDFVEACEMATKARRRLMLATLLAMFWSSSDDFVENEFSVREGDAISMSHVQETLQRLAPDLYQNVFGALNEVHYTEDGRPPKSVVVSLKRLITEITSEMTPTEFVAFSLETSRRDLIHQLSDVSHQEFRLKVLRSLQSVASALIHLHMLDKEMLEPHLSRPTLLGCKDYSPLNQDPYWPHFQVLSDEELSVEVRRGSLPMF

SEQ ID NO: 31732 - protein, 287 aa, Oryza sativa; identical to SEQ ID NO: 30679

SEQ ID NO: 31733 - protein, 364 aa, Oryza sativa
MGYLPSSLGSKAAHFVSDLTTVILNPISEREPSSPLPEVDKDEEKSEDDKDSEQNSDTPDGPDTSSFRAFLISFLSSSGSSNGSMEIIPDQNGELGYPTLTPMGKSKKGKSGLLSRGKHSIGKIISKAARIGGFKQNVEPKIDREVVDHVESVSPVLELEESKEVASFINLPAMSEPSVLLSEVMRFNIYASFPVLAKGMNWVLLYSTWRHGISLSTLYRRSMLCPGYSLLVVGDKEGAVFGGLVEAPLQPTSAKKYQGSNSCFVFTNLHSNPSIYRPTGANNYFTVCSTDYLALGGGGHFALYLDADLLSGSSSNSETFNNMCLSHSPDFAVKDVELWGFVYPSKYDETLALCRTEKPGICRW

SEQ ID NO: 31734 - protein, 133 aa, Oryza sativa; identical to SEQ ID NO: 30708

SEQ ID NO: 31735 - protein, 440 aa, Oryza sativa
MASIVPVLLRLLLLLLPLPLIRDHLWPSHRRPTPQDDAGELHPIFLVPGASCSDLEARLTEAYRPSTAHCGAMKGKGWFGLWENNTELLVHDYADCSLEQMTLVYDPAANEYRNLPGVETRVPNFGSAWSFGYKNPVNRLQRAQYLGKLRDWLEELGYRDGDTMFGAPYDFRYAPPVPGQTSEVYSRYFSEFMALVEAATKKKQKKAVILGHSYGGMVALEFVRSTPRAWRDAHIERLVLVAPTLQDGFVGSVMKFITGTGIIFVPTATSTRPMWRSFESAMASFPSPAVFGREPLVVTKRRDYSACDMEDLLAALGFGEGVEPFRRRAVPRMYSLEAPMVPMTCINAVGNKTPLQLVLWDDDDDDLLDASPEVAAYGDGDGEINLISMLAFDTEMGRQPGQEKRFKSVKIANANHSTIAIYDFALKRIIQEIIEVNQVR

SEQ ID NO: 31736 - protein, 125 aa, Oryza sativa
MLEKLWDDVVAGPRPETGLEKLRKAATTRPLVINKDGDGEASGAAYKRTQSMPTTPTTPVTPSSSSPTTTATTTPRGSNVWRSVFHPGSNLATKSLGANLFDRPQPNSPTVYDWLYSDETRSSHR

SEQ ID NO: 31737 - protein, 472 aa, Oryza sativa
MAAMGRTVLPSYVLLDRIVRSEEKAVEEESEWAAMECADWKSYGCHPGDKRYPRNAARVKGMLLLARLAEPPGLSELSIRLSAAAAVPRPPPASFPPGAAVPPIPNLPDASPAPLTYVEAAGDGLIALTSCFRDGCSCYLVYDVVGKSLSMIPGLPESCLTYCSMRPLPLRTAAAGGYALRSSYSLAIVAKDLRFDMEAGGDVYRDVLCLCPPRPSSSSSSRGGITPWQFKDAIFPSQMPRSFHGDKVFSFGGHAFWADLAKGVLFCRCDDALSGRNDDAVQFRYIPLPVECHLNISFAMRGDLQLCRTMSCVDGGGDSIKFVCISDGGSSSAHTGDRAITMWTLTLATGEWLKDAQLMVADLWELEGFDKARLPKAIPISPVLNPQEDGVLSFMLNDADAELYMVSLNMHSKKLLSSLTLSSCPDDIVPPLGLDLSKDLQNLSLRPIAAESVPAKTQGRPIATKRRRSSLP

SEQ ID NO: 31738 - protein, 315 aa, Oryza sativa
MHAKTDSEVTSLAPSSPPRSPTSRGGRPVYYVQSPSRDSHDGEKTATSVHSTPALSPMGSPRHSVGRDSSSSRFSGHPKRKGDKSSSGRKGAPAGKGWQEIGVIEEEGLLDDEDERRGIPKRCKYFLIFVLGFVVLFSFFALVLWGASRSQKPQIVIKSITFDNFIIQAGTDASLVPTDMATTNSTVKLTYRNTGTFFGIHVTADPFTLSYSQLTLASGDLNKFYQARSSRRTVSVGVMGNKVPLYGGGPTLTAGKGSGSMAPVPMILRTTVHSRAYVLGALVKPKFTRAIECKVLMNPAKLNKPISLDKSCIYL

SEQ ID NO: 31739 - protein, 321 aa, Oryza sativa
MAPFLVVFAVMAAAFASASGSGELTPDFYSETCPQALTTIKLVVGAAILKEPRMGASLVRMHFHDCFVNGCDGSVLLDDTDDMIGEKLAKPNNMSLRGFDVIDAIKVAVNTACLGNVVSCADILAVAARDSIVALGGSSYEVLLGRRDATTASIDDANDDIPNPFMDLPDLVDNFESHGLSLQDLVVLSGGHTLGYSRCLFFRSRLYNETDTLDPAYAAALEEQCPIVGDDEALASLDDTPTTVDTDYYQGLTQGRALLHTDQQLYQGGGGGDSDELVKYYGENPDKFWEDFGAAMVKMGNISPLTGDDGEIRENCRVVNQ

SEQ ID NO: 31740 - protein, 219 aa, Oryza sativa
MASSALPCAAALFLVLLLAPLLASAESPISLPPASAPTASTPAADERLHPADAALAPSQPPSEASSSAAALSPPAPPETSPLPAPSHSPPVPHSAAPEPSPMEHSAASAPAPSAAKAKQGGDDEEDDDDKEKDKEEKPSTPSPAPAAEEIKAATAGDKAGEEDGETERHELNGGKKAGVVVGAFSAAAVVGLAAVVWKKRQANIRRSRYADYSARLELV

SEQ ID NO: 31741 - protein, 318 aa, Oryza sativa
MATDGTGVVTVYGSGTNGAALLEPSNHKSATFSVKVGLAQMLRGGVIMDVVTPEQARIAEEAGACAVMALERVPADIRAQGGVARMSDPGLIRDIKRAVTIPVMAKARIGHFVEAQILEAIGVDYVDESEVLTLADDAHHINKHNFRVPFVCGCRDLGEALRRIREGAAMIRTKGEAGTGNVVEAVRHVRSVMGDIRALRNMDDDEVFSYAKRIAAPYDLVMQTKQLGRLPVVQFAAGGVATPADAALMMQLGCDGVFVGSGIFKSGDPARRARAIVQAVTHYSDPKILAEVSSGLGEAMVGINLSDPKVERFAARSE

SEQ ID NO: 31742 - protein, 263 aa, Oryza sativa; identical to SEQ ID NO: 28772

SEQ ID NO: 31743 - protein, 415 aa, Oryza sativa
MELLLRRLAVVVAVVALTAATAAEGYNITKILGDHPEYSQFNKLLTETRLAGDINRRRTITVLVVANGDMGALSGGHYTLPTLRHILEMHILVDYYGAKKLHQLARGDTASSSMFQESGSAPGTTGYVNITQHRGGRVSFTAEDAADSATPSSFVKSVKEIPYDLAVLQISKPLSSPEAEAPVAPPAPVNLTELLSKKYCKNFAGLLASNADVYSNINATKDNGLTLFCPVDAAVDAFLPKYKNLTAKGKAAILLYHAVPDYYSLQLLKSNSGKVSTLATASVAKKDYSYDVSNDRDSVLLDTKVNSASVTATVKDADPLAVYAISKFLQPKELFKVTEDLAPAPAPEGPKKKTKKKKPSTTSAAAAPSDDSSAADSPDGTPADDVADKAAAAPSVLARWVTAAATVAAALALAA

SEQ ID NO: 31744 - protein, 306 aa, Oryza sativa
MTFNEPRVVAALGYDDGNFAPGRCTKCTAGNSATEPYIVAHHLILSHASAVQRYRHKYQHIQKGKIGILLDFVWYEGLTNSTADQAAAQRSRDFHVGWFLHPIIYGEYPKSLQVIVKERLPKFTADEVHMVKGSIDYVGINQYTAYYVRDQQPNATTLPSYSSDWHAAPIYERDGVPIGPRANSDWLYIVPWGLYKAVTYVKEKYGNPTMFLSENGMDDPGNVTIAQGVHDTTRVAYYRSYITKLKEAIDDGANCIGYFAWSLLDNFEWKLGYTSRFGLVYVDFRTLRRYPKMSAYWFRDLVSSKN

SEQ ID NO: 31745 - protein, 399 aa, Oryza sativa
MEGDSARRLALLGLCLGLLLLAPSHLASAAAVEDGLLSNGDFETAPAGGFVKSASVAEGASSIPGWTINGTVELISAGQHQGGMILIVPQGDHAVRLGNDASIGQVVQVEKGSEYAITFSAARTCAQLESLNVSVLGGASQTVDLQTLYNIEGWDAYALAFQATDEQASLEFRNPGMEDDPTCGPILDNVAIKKLFTPDKPKDTVVSNGDFEEGPWMFPNTSFGVLLPTNLDEQTSALPGWMIESNRAVRFVDSDQYTVPQGKRAIELLSGKEGIISQMVETTPQKEYSLTFTLGSAGDSCQPPMAVMAFAGDQAQNFHYSPMGNATSQAANVTFTARAERTRVAFYSVYYNTRSDDHSSLCGPVIDDVRVWGLNGAAGLKASIGLLLGIVSIVSLMLF

SEQ ID NO: 31746 - protein, 520 aa, Oryza sativa; identical to SEQ ID NO: 30963

SEQ ID NO: 31747 - protein, 59 aa, Oryza sativa
MWPPLPLSSRGVGPLPFRPRGLGRPDPLWVWRHVCGLGEHSGAHLTALIAGWTSAPRRI

SEQ ID NO: 31748 - protein, 270 aa, Oryza sativa
MDRYQRVEKPRNETPISENEIRITAQGRMRNYISYGMSLLEENGHDEIVIKAMGRAINKTVMVVELIKRRIGGLHQITSTESIDITDTWEPLEEGLLPLETTRHVSMIAITLSKKALDTLSPGYQPPIPAEEVRPAFDYEHEESFPTNRGRGRGGGRRGRGRAMSNGPPAYDYGEEWEEEGDYYNYRGRGRGRFRGRGRGRGRGGYYGGGRRGGYGYDYGYGGRGDYYEDQGEYFEEPEDYPPPGRGRGRGRRGGGPGPFRGRGRGRGRF

SEQ ID NO: 31749 - protein, 365 aa, Oryza sativa
MTMKMKQQMMNKLGLLVVAVAVAMAPAGSFASSSGRGAPMVPAVIVFGDSIVDPGNNNNLKTQIKANHAPYGMDFANSEPTGRYSNGLIPTDFIVQGLNVKQLMPPYLGVELSPEDLKTGVSFASGATGYDPLTPVIVSVITLDQQIEYFHEYRKRLVGVVGEEETARIIDGALFVVCAGTDDIANTYFTTPFRSVEYDIPSYVDLLVSGAAKLLDQVAALGARRIGFVGLPPIGCVPSQRTLGGGPHRRCEEKRNYAAKLFNSRMEEVIAAKTNPATTRMVYVDIYTILQELVENGDKYGFTETTRGCCGTGTIEVTGLCDARFVDICDNVSNHVFFDSYHPTQRAYKIIVDYIFDNYLQFLLA

SEQ ID NO: 31750 - protein, 114 aa, Oryza sativa
MAARPTGRRRRGLAVVVSSNIALFAGGDEADDGPGFSGGRSNASLRRRAPRQGGSERGGARSPFDWECGNPRWRLVTRSPWLRPRLRLMEVASRERTSSTYLLMQPGSCYPWNP

SEQ ID NO: 31751 - protein, 230 aa, Oryza sativa
MSSAIAAPVEHIVLIKVRPEAASSGAAAAMVSSLQALSTAVPGLSYIHVGPVLRLRSPAAEALGPTHVLHSRYATKPDLAAYAAHPAHVAAVQGHVLPNALDSTAIDWVNAALVPSPVNPGSAVRLSLAKLKEGVEAHQLAEKLAAATAAAGEAKGAKVSFGENFSPARAKGYQFGMVAVFDSVEGLDAVDGDGKVEAAKAIVRPLLDDVLELEFVVGPAAAEAPAPANL

SEQ ID NO: 31752 - protein, 330 aa, Oryza sativa; identical to SEQ ID NO: 29084

SEQ ID NO: 31753 - protein, 196 aa, Oryza sativa
MPIRNIAVGSHQEVYHPGALKAALAEFISTLIFVFAGQGSGMAFSKLTGGGATTPAGLIAAAVAHAFALFVAVSVGANISGGHVNPAVTFGAFVGGNITLFRGLLYWIAQLLGSTVACFLLRFSTGGLATGTFGLTGVSVWEALVLEIVMTFGLVYTVYATAVDPKKGSIGGGLAGVIYEVLFISHTHEQLPTTDY

SEQ ID NO: 31754 - protein, 342 aa, Oryza sativa
MKYRFLGNSGLLVSTLSFGSWVTFDAQLDFEKAYSIMEHAYKNGVNFFDNAEAYAGGKSEEIMGKVVKAGVERGVWTREDLVISTKIFIGTRPGPNFVGLSRKHIIEGTNSALQRLDMEYVDLIFCHRPDPRTPIEETVRAMSWLIDQGKAFYWGTSEWHSGDIIEACEIADRLGLHRPIMDQPQYHILERSRVDYDYVNLYKKYKYGLTTWSPLASGILTGKYNNGIPEGSRLSIEMYKNMLSTGLDEKIAKVVKLEAVAKEVGITLAQLAIAWVASNEHVSTVILGATSIAQLDENLKAIELVDKITPEVKAKIDEIVQFKPVNVPQYEERIIALRSKWL

SEQ ID NO: 31755 - protein, 251 aa, Oryza sativa
MGRSPCCEKAHTNKGAWTKEEDDRLIAYIKAHGEGCWRSLPKAAGLLRCGKSCRLRWINYLRPDLKRGNFTEEEDELIIKLHSLLGNKWSLIAGRLPGRTDNEIKNYWNTHIRRKLLSRGIDPVTHRPINDSASNITISFEAAAAAARDDKAAVFRREDHPHQPKAVTVAQEQQAAADWGHGKPLKCPDLNLDLCISLPSQEEPMMMKPVKRETGVCFSCSLGLPKSTDCKCSSFLGLRTAMLDFRSLEMK

SEQ ID NO: 31756 - protein, 129 aa, Oryza sativa
MCGARRSIQGSGKGVPLSHTSSIVIPVGSASSPSEGISFSAVDSSVASFTYFEVTTMPGSSSSHSSLVMLASNLGDNDSDSCSMSLLFAVPWFGNAEFDCNCQDMGNPVPWRNGCRRGGPCRRGGAVGG

SEQ ID NO: 31757 - protein, 478 aa, Oryza sativa
MKKTMVLYPGLSVSHFLPMMKLADELVEHGYAVTVALIDDPLQKQIAFTATVDRVISSKPSICFHRLPRVDHLPAVTTNDGEFYLPGYLDLVRRHNEPLHGFLSSHFRGGIQALVVDMMSVEALDIAERLKVPGYLFHPSNASLFAFFLQIPSICAESKRSFSELGDTPLEIPGLPPMPASHFIDNRPEEPPESEVYKAVMDLVRRYTNKCSNGFLVNTVDSLEARVVNTLRHARRQGGRALPPFYCVGPLVNKAGERGERPERHECLAWLDRQPDRTVVFLCFGSTGIGNHSTEQLREIAVGLEKSGHRFLWVVRAPVVSDDPDRPDLDALLPAGFLERTSGQGAVVKQWAPQVDVLHHRATGAFVTHCGWNSVLEGITAGVPMLCWPLHSEQKMNKVLMVEEMGIAVEMVGWQQGLVTAEEVEAKVRLVMESEAGVELRARVTAHKEAAAVAWTDVGSSRAAFTEFLSNADSRQTS

SEQ ID NO: 31758 - protein, 344 aa, Oryza sativa; identical to SEQ ID NO: 30654

SEQ ID NO: 31759 - protein, 196 aa, Oryza sativa
MDGAADSGTAGAAAAAAKWRTDASRAFQYYLDRSTPHATGRWIGTLAVAAIYALRVYLVQGFYIVTYGLGIYLLNLLIGFLSPMVDPEAHAAASSDGPALPTRGSDEFKPFIRRLPEFKFWYAITKAFLIAFVMTFFSVFDVPVFWPILLCYWVVLFVLTMKRQIVHMIKYKYVPFSVGKQKYGGKKSAGSSSSKD

SEQ ID NO: 31760 - protein, 282 aa, Oryza sativa
MQEFQSIPGLAGRLFGGAAAADIRRAQAQQGPASRCGGIPSPEAVKCPRCESTNTKFCYYNNYNLSQPRHFCKSCRRYWTKGGVLRNVPVGGGCRKTKRSGSSSAASSAPSTPTAATDNAKNQRRASASSPRSSSGGSGNTSPTAAAATTPTTPATPSSNTIAVINHATTTTTTTNPFPTDVPPPAPIFADQAAALASLFAPPPPPPLPVFSFAAQAKTEDGIASVLLAGQTTAPTAATVADMTPFTSLDAGIFELGDVPPAAYWNAGSCWTDVPDPNVYLP

SEQ ID NO: 31761 - protein, 278 aa, Oryza sativa
MARGGVVWLAVALLCCCFVRHCESARVFTIINQCKTMVWPAVTPGESFGGGGFALKPGQSMVFTAPVGWSGRIWGRTECDFDQAGNGSCATGSCGSELKCGGSGATPATLAEFTLATKDFYDVSLVDGFNLPMVVRPLNGEGNCSVAGCDGDLRDSCPSELSKKVNGRTVACRSACDVFDTDQYCCRGMYGNPSTCQPTFYSKKFKAACPTAYSYAYDDPTSIFTCSNADYTITFCSTRKRPVCTYHNNRLICSASTRSWPSVISALLFTFLALQFSL

SEQ ID NO: 31762 - protein, 166 aa, Oryza sativa; identical to SEQ ID NO: 30733

SEQ ID NO: 31763 - protein, 193 aa, Oryza sativa
MKMKRTMAATSILFFFLAGLAAAHGSTADDTTTTTTNTIRLPIDGAVAARRRTRPWKCCDNIVRLPERINPPFWQCDDELEPGQCFRQCEACRDPPGRPFPGRPLICDDVFWGDDPGTSCAPSSEWPWGPCCDIAVCTKSLPPICHCSDEVESCAAACGQCEMVDSWSWRPLFVCRDSFTGDPGPRCTPEMHN

SEQ ID NO: 31764 - protein, 306 aa, Oryza sativa
MAAPPLPRAPVSSSAAAASPGGRALLLLRVGGGGSGRCAGVAAAAAPGWRRPFPAASVAARSAGTTPGEVAVDPKVEAILDSVKWDSKGLAVAIAQNVDTGAILMQGFANKEALATTISTRKATFYSRSRSSLWTKGETSMNFINVHDIFLDCDRDSIIYLGKPDGPTCHTGAETCYYTSVYDALQGSKPNQDRQVVSTLYSLEDTISRRKEEIVTEGSGKPSWTKKLILDNRLLCSKISEEAGELNQTLLENEDESRTISEMGDLLYHAMVLLRVKGVRMEQVLEVLRKRFSQSGIEEKASRNKS

SEQ ID NO: 31765 - protein, 259 aa, Oryza sativa
MVSPDTIRTAIGVVGNGTALVLFLSPVPTFIRIWKKGSVEQYSAVPYVATLLNCMMWVLYGLPAVHPHSMLVITINGTGMAIELTYIALFLAFSLGAVRRRVLLLLAAEVAFVAAVAALVLNLAHTHERRSMIVGILCVLFGTGMYAAPLSVMKMVIQTKSVEYMPLFLSLASLVNGICWTAYALIRFDLYITIPNGLGVMFAVAQLILYAIYYKSTQQIIEARKRKEADHVAMTDVVVDSAKNNPSSGAAAAAANGRY

SEQ ID NO: 31766 - protein, 376 aa, Oryza sativa
MAPTSSVHREGGSAAMDMAELIPTLPLETGSPPFPLRQYGGYWLPEWVLPGLEAVHTRFEPRPSDVFLASFPKSGTTWLKALAFATINRTTYPPSGDAHPLRHRGPHDCVKFFESTFAISGEGGGGDVDVFAALPSPRAVARPGTCSPPSRRRARLLATHIPYSLLPERITSAAADDGDSGCRIVYVCRDPKDAFVSMWLFTMSNMVKGVTTTTDEHHPAAAAAAPSIEQVFDLFCDGRSIAGPQWHHVREYWEESRRRPEKVLFLRYEEMLREPARNVERLAEFLRCPFTAGEVAAGVVDAIVDLCSIDRLRNVQANKTGVTDLAVKKESFFRRGVAGDWSNHMSPEMASRLDRVVEDALRGSGFTFAAAAGDSE

SEQ ID NO: 31767 - protein, 215 aa, Oryza sativa
MLRKVAVAFLACAALYLAFAAYSRRESLGEVRLPAVTNRVYLDVEIDGQHIGRIVIGLYGDVVPKTVANFRALCTGEEGIGHKGKSLHYKGSRFHRIIPGFMIQGGDIVRGDGKGSESIYGGTFPDENFIVKHTHPGVIAMANSGPDSNGSQFYITTIKTSWLDGEHVVFGRVIQGMDYVYAIEGGAGTYNGKPRKKVVITDSGEIPKEKWAEEV

SEQ ID NO: 31768 - protein, 306 aa, Oryza sativa
MSRRRSTSTSPGMAGQQPQQQGPPEDDFFDQFFSLTSSFPGAAPGGRAAGDQPFSLALSLDAAAAAEASGSGKRLGVGDDAEGGGSKADRETVQLTGLFPPVFGGGGVQPPNLRPTPPTQVFHPQQSKQGGAAVGPQPPAPRPKVRARRGQATDPHSIAERLRRERIAERMRALQELVPNTNKTDRAAMLDEILDYVKFLRLQVKVLSMSRLGGAGAVAQLVADIPLSVKGEASDSGGNQQIWEKWSTDGTERQVAKLMEEDIGAAMQFLQSKALCMMPISLAMAIYDTQQTQDGQPVKHEPNTPS

SEQ ID NO: 31769 - protein, 34 aa, Oryza sativa; identical to SEQ ID NO: 29507

SEQ ID NO: 31770 - protein, 301 aa, Oryza sativa
MAHARAQAIRALLARCSTECPRRAAASSCIRRASLPYCSPGSYPRSLLPAVRAAGADWTRSLASRAQGGAGAGEAGAEEGEAQEWMAEWEEEEEEEEDVEPEIGDGGDGGGVALRGVEWGKRALAAAEEVLGEHFGDDVAMFAFKVSPKGYVYVRLDKLTNRYGCPGIEEIESFNKLYKQKLDELIEQGEIPLDLAIEVSSPGAERLLKVPKDLDRFKDMAMRVQYLVEGDDVVPKQILQKDGIFLLESVDIQAEHCIWKLADVKENRAAAGKGRPLNRKKRDWRLQTSFQAVKKATLYLD

SEQ ID NO: 31771 - protein, 278 aa, Oryza sativa
MDATAIGNGALHSNGAGADTKGKPIKCKAAVAHGPGEALVMEEVEVAPPARMEVRLKVLFTSICHTDLSAWKGENELQRKFPRILGHEAAGVVESVGEGVEDLAPGDHVVPIFTGECGACTYCESSKSNLCKTYRVNPFKSTMVTDGGTRFTMIDRSSGARNPVYHFLNTSTFAEYTVIDSACAVKINPKAPLEKMSLLSCGVSTGVGAAWNTANVSKGSTVAIFGLGAIGLAVAEGARLRGASRIIGVDINPEKFSKGAYFSHVYISAVPFFTFFFL

SEQ ID NO: 31772 - protein, 371 aa, Oryza sativa
MESLWKLSYLLEPASLALILTAVSVAYASASRALDHGREMERNLDFSEASITLDRSQALMIPLASSCSLLLMFYLFSSVSHLVTAFTAVASAMALFFCLSPYVNCVRSRLGVGDPFVSRCCSKPFTRLQGLLVAICVGTVVAWLVSGHWLLNNLLGISICIAFVSHVRLPNIKICALLLVCLFVYDVFWVFFSERFFGANVMVSVATQKASNPVHTVANKLSLPGLQLITKKLELPVKLVFPRSLMGGLAPGSSPGDYMMLGLGDMAIPGMLLALVLSFDHRKIKDMSVSQDMPPSKQRKYVWYALTGYGVGLVTALAAGILSQSPQPALLYLVPSTLGPVMYMSWLRNELWELWEGSRPIINDKAHLLEV

SEQ ID NO: 31773 - protein, 450 aa, Oryza sativa
MGKDKQHLSLVVIGHVDAGKSTATGHLIYKCGGIDKRTIEKFEKEASEMGKASFKYAWVLDKLKAERERGITIDIALWKFESPKSVFTIIDAPGHRDFIKNMITGTSQADAAVLMIASPQGEFEAGISKDGQTREHALLAFTLGVKQMIVCTNKMDDKTVNYSEARYEEIKKEVGSYLKKVGYNVDKVRFVPISGWAGDNMIEKSDNMPWYKGPTLLEALDLLEPPSRPVDKPLRLPLQDVYKIGGIGTVPVGRVETGVMKPGDVVTFAPSGVTTEVKSIEMHHEALPEAVPGDNVGFNVKNISVKDIRRGFVCSNTKNDPAKECETFQAQVIVLNHPGQITNGYAPVLDCHTCHIACKFGTLESKIDRRSGKEIEKEPKAIKSGDAAIVTMVPSKPMCVETFTDYPPLGRFAVRDMRQTVAVGIIKSVAKKEATSAKVTKAAVKAGAKK

SEQ ID NO: 31774 - protein, 319 aa, Oryza sativa
MDSSSSEILVDAGSFRLYKDGHADRTGDMETVPAGFDADTGVTSKDVVIDAVTGVFVRLYLPLIQAATDDDGKTKLPILVFFHGGYFVVGSASCPKRHRNINDIVARARLIAVSVDYRLAPEHLLPAAYDDSWAALNWALSGADPWLSEHGDTGRVFLAGVSAGGNIAHNMTIAVGVRGLDAAVPARIEGTILLHPSFCGETRMEGEPEEFWESVKKRWSIIFPDAKGGLDDPRMNPMAAGAPSLTKLACERMLVCAASEDPIRPRERAYYDAVKRSGWGGEVDWFESEGEGHAFFVRKYGSSKAVKLMDRVIAFLAGH

SEQ ID NO: 31775 - protein, 133 aa, Oryza sativa
MAYVDYFGAPPEHILRAVKAGLKSKGLDAMLELVENEAVSSFAFSSSSTSSSSDDEAHGRAARLRRPSSGSYGRRSTEEPVVCSPASSLVAVMMQALAHRASYLWVLDEDDDCRLAGIVTFADVLTVFREQLQ

SEQ ID NO: 31776 - protein, 355 aa, Oryza sativa
MGHEKEQETAGDELRRPEPPALPWTVRLQLFALVTAVDIVQRGDGTVNRFLFSLADRQSAAAARPDAHGVRSGDVTVDASRGLWARVFSPASSSAVESPPLPVVVYFHGGGFALLTAASSQYDALCRRLCRELRAVVVSVNYRLAPEHRYPAAYDDGVDVLRHLATVGLPADVVAAVPVDLTRCFLVGDSAGGNIAHHVAHRWAAATTSSSRRVRLAGVVLLQPFFGGEERTEAELRLDGVGPVVSMARADWCWRAFLPEGADRDHPAAHVTGENAELAEEFPPAMVVVGGYDTLQDWQRRYAGMLRRNGKAVQVVEYPAAIHSFYVFPELADSGELVKEMKAFMERNAPPKSNA

SEQ ID NO: 31777 - protein, 384 aa, Oryza sativa; identical to SEQ ID NO: 29468

SEQ ID NO: 31778 - protein, 259 aa, Oryza sativa
MVYSCDASLLLHTTTTTGVSEQSSHRSFGMRNFKYITAIKAAVERECPATVSCADILALAARDGVAMLGGPSVAMRTGRRDSRESYYGVVEQYIPNHNDSVSTVLSRFAAIGVDTEGAVALLGAHSVGRVHCFNLVGRLYPQVDGSMEAAYGEYLRGRCPTAAATEDTREVVYARNDRVTPMLIDNMYYRNLLAGRGLLLVDQQLASDARTAPYVRRMAADNDYFHQRFAAALLTMSENAPLTGAQGEVRKDCRFVNSS

SEQ ID NO: 31779 - protein, 273 aa, Oryza sativa; identical to SEQ ID NO: 30563

SEQ ID NO: 31780 - protein, 337 aa, Oryza sativa
MATTTTTTTTMGGLHRLISRSSCSRRTFAASTPPQRPRAIAVRVRSSSAGVTKSQRQRQRQVKLTYLEINSWVWEVGGARILVDPILAGNLDFGAPWLFDAAKKRLKNLGVQDVLQPPGVDLLLITQSLDDHCHARTLAQLAAAAPDLPVVTTPNARPVLAALPTPFRDVTYLEPGQSTNCNGGGVRILATPGPVLGPPWQRPENGYIMFLLQEEEEDAKGLVYYEPHCVYDRSFLEKEALRADVVITPVVKQLLPANFTLVAGQEDAVELASLLRARYVVPMSNGDVDAKGLLTAVVATEGTVEAFKDMLADTLPEAQLLHPTPGVPLHIHLPHLT

SEQ ID NO: 31781 - protein, 146 aa, Oryza sativa
MRRLLLTGFPASSALTFRPRIRFFPRANPRSMAAAGPACCAPAAAAAAASSSASASAAAAAGDGGGGAQKPWLLIGLGNPGRMYKGTRHNVGFEMIDAIAEAEGISVSSKQFKSMVGKGLIGDVPVMLAKPQTYMNASGCTAGFIF

SEQ ID NO: 31782 - protein, 372 aa, Oryza sativa
MSMVVQQEQEVVFDAAVLSGQTEFPSQFIWPAEESPGSVAVEELEVALIDVGAGAERSSVVRQVGEACERHGFFLVVNHGIEAALLEEAHRCMDAFFTLPLGEKQRAQRRAGESCGYASSFTGRFASKLPWKETLSFRYSSAGDEEGEEGVGEYLVRKLGAEHGRRLGEVYSRYCHEMSRLSLELMEVLGESLGIVGDRRHYFRRFFQRNDSIMRLNYYPACQRPLDTLGTGPHCDPTSLTILHQDHVGGLEVWAEGRWRAIRPRPGALVVNVGDTFMALSNARYRSCLHRAVVNSTAPRRSLAFFLCPEMDTVVRPPEELVDDHHPRVYPDFTWRALLDFTQRHYRADMRTLQAFSDWLNHHRHLQPTIYS

SEQ ID NO: 31783 - protein, 342 aa, Oryza sativa
MADQLISTADHDTLPGNYVRPEAQRPRLADVLSDASIPVVDLANPDRAKLVSQVGAACRSHGFFQVLNHGVPVELTLSVLAVAHDFFRLPAEEKAKLYSDDPAKKIRLSTSFNVRKETVHNWRDYLRLHCYPLHRYLPDWPSNPPSFREIISTYCKEVRELGFRLYGAISESLGLEQDYIKKVLGEQEQHMAVNFYPKCPEPELTFGLPAHTDPNALTILLMDQQVAGLQVLKEGRWIAVNPQPNALVINIGDQLQALSNGRYKSVWHRAVVNSDKARMSVASFLCPCNDVLIGPAQKLITDGSPAVYRNYTYDEYYKKFWSRNLDQEHCLELFRTTPTDTS

SEQ ID NO: 31784 - protein, 69 aa, Oryza sativa
MSVQHIGDVGFAVVLNQSQITCTMLILPLALVDAVVFAAAHCFTKHMRKLQCATVTVRARCQADGRLTF

SEQ ID NO: 31785 - protein, 214 aa, Oryza sativa; identical to SEQ ID NO: 28928

SEQ ID NO: 31786 - protein, 330 aa, Oryza sativa
MGHAVLPLRLPFPPQHGEHRAPPGVGVQAPRQQVRVRDDVLAAQPRLAGQEADGPLQPLLRDPRRVREPPQHHGDVVLAEAEAAVDRELVLQRGGLQLGEGGEDVDEHGASWLDAGVLDGLDDLPGAAGAQQDDPGLAGDELGQLAGRKAVDVAEHGERPEEGGLGAAAHGERHLAERGDDARVGAEDLAEGGDERGKVGLDAAVEDDGAEGDDPGEERRRDADGAEVVELGLEGPGGVGREDPGERPDGGGDVGVGEPVAAEERDDGVGVAGEVRRGEGEPGRGGGGAGGGGRGEATGGYQVGYDLRVGGGGGGGGGGGEEAERQREEE

SEQ ID NO: 31787 - protein, 202 aa, Oryza sativa
MLGSGLNLVSAALGFGMTAAFVAFVCARFVCCRARRADASASRPHPSPVDFDADFPSDFDRPIEHSRSGLEPLAVAAIPTMKYNCEAFHSEDDTQCSICLSEYKEKDILRIVPICHHNFHLYCLDAWLLKQTTCPICRISLKELPDGKSTVSSAPTMSQPPTLPESSVNPTSHFLPVHQEHRSHQDGPDMPESVEVVIEIRQ

SEQ ID NO: 31788 - protein, 377 aa, Oryza sativa
MVQRTSSDSAASAEAMVMDLSPKRPAKSYGGEGGSYFDWSPSELPMLRAASIGAAKLSLAAGGLALPFYSDSAKVAYVLQGKGTCAVLLPETPSEKILPIKEGDALALPFGVVTWWHNLHAATTELVVLFLGDTSKGHTAGRFTNMQLTGSTGIFTGFSTEFVARAWDLPQDAAASLVSTQPGAGIVKLKDGFRMPEGCDKDREGMVLNCLEAPLDVDIKNGGRVVVLNTQNLPLVKEVGLGADLVRIDGHSMCSPGFSCDSAYQVTYIVRGSGRVQVVGIDGTRVLETRAEGGCLFIVPRFFVVSKIADDTGMEWFSIITTPNPIFSHLAGRTSVWKAISPAVLQASFNTTPEMENLFRSKRLDSEIFFAPNSNSI

SEQ ID NO: 31789 - protein, 311 aa, Oryza sativa
MEHIEQAGIHSGDSACSLPTRTVSAKCLDIIRSWTTKLAKRLNVCGLMNCQYAITTSGEVFLLEANPRASRTVPFVSKAIGHPLAKYASLVMSGVTLPELGYTQEVVPKHVSVKEAVLPFEKFQGCDILLGPEMRSTGEVMGIDYEFSGAFAKAQIAAGQKLPLNGTVFLSLNDLTKRHLAEIGRGFRELGFNIIATSGTAKVLQLEGIPVEPVLKIHEGRPNARDMLKNGQIQVMVITSSGDALDSKDGLQLRRLALAYKVPIITTVDGARATIDAIKSLKNKSIETLALQDYFQTTDASQNLQAAQSAS

SEQ ID NO: 31790 - protein, 491 aa, Oryza sativa
MGSIAADGDKPHAVCMPFPAQGHVTPMLKLAKILHHRGFHITFVNTEFNHRRLLRSRGAAALDGLPGFRFAAIPDGLPPSDADATQDVPPLCRSTRETCLPHFSRLLADLNANASPESPPVTCVVADDVMSFAVDAAREFRVPCALFWTASVCGYMGYRYYRSFLDKGIFPLKEEQLTNGFLDAPVDWTPGMSKHLRLKDFPSFFRATDPDEYMFHFALHVTERLAEADAAVLNTFDELEPEALDAMRAMLPPSVSIHTIGPLGFLAEQVVPKGSPLDALGSNLWKEDDSCFGWLDGKPPRSVVFVNYGSVTVMTNEELVEFAWGLANSGHDFLWIVRPDLIHGDAAVLPPEFMESVGGRGLLASWCPQEAVLRHEAVGVFLTHSGWNSTVESLCGGVPMLCWPFFAEQQTNRRYSCTEWGVAMEIDDDVRRDAVEAKIREAMGGDKGREMRRRAGEWKETGLRATRPGGRAHASLDALVADVLLSGGKAR

SEQ ID NO: 31791 - protein, 247 aa, Oryza sativa; identical to SEQ ID NO: 31686

SEQ ID NO: 31792 - protein, 130 aa, Oryza sativa
MRASSLFAESVFTTSAAAGRRRCPRLAAVPVTLFFSTGRGSPAMAEEAQQPRGVKVGGIHDAPAGRENDLTTVELARFAVAEHNSKAVRFKNTRPPFFFPLVNCVDRRVDCGKNIKYNKGMFSFHVKILQ

SEQ ID NO: 31793 - protein, 351 aa, Oryza sativa
MTSQQLGYCWVLLIALLSCSAATASEVPAIIVFGDSTVDAGNNNYILTVAKGNFPPYGRDFDGGVATGRFSNGRLVTDFVSEALGLPSSVPAYLDSTYTIDQLATGVSFAPGGTGLDSLTARVVSVIPLSQQLEYFKEYIEKLKQAKGEDVANEIITEALYVFSIGTNDFIINYFNLPLRRAVYTTAEYTAYLVGEAAAAVRDTHELGAHKIIFAGLAPIGCLPSARTLNHDAPGECNEEHSQVAVAFNTALTEAIGKLNDELTGLRVVYSDTYSVLSAILSNPSYYGFVNIAQGCCGTGLIETSVLCGFNDHLTCQDANSYVFFDSVHPSERTYQIIANKIINTDLKLVL

SEQ ID NO: 31794 - protein, 230 aa, Oryza sativa; identical to SEQ ID NO: 31096

SEQ ID NO: 31795 - protein, 244 aa, Oryza sativa; identical to SEQ ID NO: 30851

SEQ ID NO: 31796 - protein, 125 aa, Oryza sativa
MDSDDQIPHIGPEVHHRNRGVQQMLYPNPPFPIDPDYEFGTPQQRVPYQAAYTTDAERNDAVSRDKRAQRAVWNTNLRLLEVKKSALEKKKTELERRLKAEFKKVNEQQSDLGVGYANYQSPYQA

SEQ ID NO: 31797 - protein, 225 aa, Oryza sativa
MASPSSFCLLAVLLALVSWQAIASDPSPLQDFCVADKHSPVLVNGFACLDPKYVNADHFFKAAMLDTPRKTNKVGSNVTLINVMQIPGLNTLGISIARIDYAPLGENPPHTHPRATEILTVLEGTLYVGFVTSNPNNTLFSKVLNKGDVFVFPEGLIHFQFNPNPHQPAVALAALSSQNPGAITIANAVFGSKPPISDDILAKAFQVEKGTIDWLQAQFWENNHY

SEQ ID NO: 31798 - protein, 231 aa, Oryza sativa
MAAALRSSCAAARRLLRISPAALSTLTAASSRPAAVAPLARPIAAAAVSGGNNAFSWNLRRLFSSNEKHLPAISDPEVESAFKDLMAASWTGLPDSLVIEAKKAASKATDDKAGKEALLNVFRAAEACEEFGGVLVTLRRALDDLCGITGENVGPLPGYIEDAVKSAYKRYMKYLESFGPEENYLRKKVENELGTKMIHLKMRCSGVGSEWGKITLIGTSGISGSYVELRA

SEQ ID NO: 31799 - protein, 227 aa, Oryza sativa; identical to SEQ ID NO: 30327

SEQ ID NO: 31800 - protein, 271 aa, Oryza sativa
MEEKRQRLVISLSALCLAVAVMSGFDYYVLALQWPGTVCRQTSHCCSSNGCCRSHPLKFFTIHGLWPQYSYGGWPSCCRPTTFDGNKVAANHPSYLQNGILISRLKTILEEYWPSLYCGSFSTCFGGKRPFWVHEWETHGTCGYPEIQDEYDYFSTALYLYSKYNVTKALKKAHIYPRGGRKYLVGHIVSAIEFSFGAMPSIVCKNGSVQELRLCFHKDYQPRDCLVEGENSVRRNHCPRYVTLPSYKPHAFGNSTEGISNQVNVEHQSYQ

SEQ ID NO: 31801 - protein, 45 aa, Oryza sativa; identical to SEQ ID NO: 29272

SEQ ID NO: 31802 - protein, 206 aa, Oryza sativa
MVSLSTWFRYAAHKFEYSISLSWKKYNVGQINSTQLTDAVWKNFFQGKLTYMHWNKGGEAMAPIESTTGGTLLVRKLVNLSPTQVFVGDVVLLKDPEKSDDLIVRRLAALEGYEMVSNDEKDEPFVLDKDQCWVLADNQSLKPKEARDSRLFGPVPMTDILGRVIYSLRTAVDHGPVENSRMAMNQDSPVLAVELDVEEMAKNNKV

SEQ ID NO: 31803 - protein, 205 aa, Oryza sativa
MAAAAAAKIAPSMLSSDFANLAAEADRMVRLGADWLHMDIMDGHFVPNLTIGAPVIQSLRKHTKAYLDCHLMVTNPSDYVEPLAKAGASGFTFHIEVSRDNWQELIQSIKAKGMRPGVSLRPGTPVEEVFPLVEAEMMEKVRALRKKYPSLDIEVDGGLGPSTIDVAASAGANCIVAGSSIFGAAEPGEVISALRKSVEGSQNKS

SEQ ID NO: 31804 - protein, 166 aa, Oryza sativa
MILPLAKLGTLALKTMSKPIAIRLKTEASRHPQFRQLIINLAQTNHRVSTNIQRRIYGHSTKVEIRPLNEEKAVQAAADLIGELFVFSVAGAAVIFEVQRSARSEARKEEARRNEVEALRQKEDQLAREIEIVKQKLGEIERQANSRGLSGVLFRSSSAPDQTKAS

SEQ ID NO: 31805 - protein, 355 aa, Oryza sativa; identical to SEQ ID NO: 30634

SEQ ID NO: 31806 - protein, 154 aa, Oryza sativa; identical to SEQ ID NO: 30205

SEQ ID NO: 31807 - protein, 275 aa, Oryza sativa
MAPGLYTDIGKKTRDLLYRDYGTHHKFTLTTCTPEGVTITAAGTRKNESVFGELQTQLKNKKLTVDVKANSESDLLTTVTVDEFGTPGLKSILSLVVPDQRSGKLELQYLHEYAGINASVGLNSNPMVNLSGVFGSKELSVGVDVAFDTATSNFTKYNAALSLTNSDLIASLHLNNHGDTLIASYYHLVKHHSNTAVGAELSHSFSRNESTLIFGSQHSLDPHTTVKARFNNYGMASALVQHEWRPKSLITISGEVDTKAIEKSTKVGLSLVLKH

SEQ ID NO: 31808 - protein, 166 aa, Oryza sativa
MSTSSGADSSPPVSGLDYDDTALTLALPGSSSSSSSTADPERKRAAHADHADAKPPSPKARAVGWPPVRAYRRNALREDSARAKLVKVAVDGAPYLRKVDLAAHAGYAPLLRALHGMFASCLAVRGGGGGDGEGTKLVDLVTGAEYVPTYEDKDGDWMLVGDVPWK

SEQ ID NO: 31809 - protein, 332 aa, Oryza sativa
MAAAAARYDVEKGGRKREGEEERCGSPAAVAQYPQREGEREWVPWLVPAILVANVVVFAVAMYVNNCPSHASRGGACVAGFLRRFSFQPLSENPLLGPSSATLQKMGALVWDKVVHEHQGWRLVTCIWLHAGVVHLLANMLSLVLIGLRLEQQFGYMRIGIIYLVSGIGGSVLSSLFIRNSISVGASGALFGLLGAMLSELFTNWTIYTNKAAALVTLLIVIAINLAIGILPHVDNFAHIGGFLTGFLLGFIFLMRPHYGWMQRYVLPSSVKYTSKKYLAYQWILLAVASVLAVIGFAVGLSMLFRGVNANERCHWCHYLSCIPTSRWTCGN

SEQ ID NO: 31810 - protein, 377 aa, Oryza sativa; identical to SEQ ID NO: 29719

SEQ ID NO: 31811 - protein, 281 aa, Oryza sativa; identical to SEQ ID NO: 30307

SEQ ID NO: 31812 - protein, 211 aa, Oryza sativa
MAGQSDPHLSIFSPSEVEFVAEDEIVEIVPNIRMEALNMICGDFGPFFPQIASKVPLWLAVALKKRGKCTIRTPDWMTVDRLTQVLDAERESPKEFQPLPFHYIEISKLLFDHARDDISDAYLVRSLIEDIRDVRFHKVETGLETISGRTHAVKLKNLSAMEVNIVRPFMVRTLQAFYKHDSPQMIQQADNTGSRPTPVTDRGPRRDLRRR

SEQ ID NO: 31813 - protein, 327 aa, Oryza sativa
MAILASMAAMAFLLLMEAMSVSHGQLQVGFYSDSCPDAEDIVTAAVQDAAGSDPTILPALLRLQFHDCFVRGCDASVLIRSARNDAEVNNNKHQGLRGQAVVDAAKAELEDQCPGVVSCADIIALAARDAIAMTGGPSFDVPTGRRDGLVSNLRDADVLPDVVDSIQVLRSRFAASGLDDRDLVLLTAAHTIGTTACFFVKDRLYNYRLRGGGVGSDPSIPAAFLAELKARCAPGDFNTRVALDRGSERDFDDSILRNIRSGLAVIASDAALDASNATRGLVTAYLGAASRRFERDFVAAMVKMGTIGALTGDDGEVRDVCSQFNTD

SEQ ID NO: 31814 - protein, 268 aa, Oryza sativa
MIKLYGKPIRVNKASQDKKSLDVGANLFIGNLDPDVDEKLLYDTFSAFGVIVTNPKIMRDPETGNSRGFGFVSYDSFESSDQAIEAMNNQHLCNRPITVSYAYKKDTKGERHGTPAERLLAANNPGSQKNRPHTMFASGPPTQGLANGAPVPRPFSNGAVPPQIQHVRPPPPPMQQFPPMQMNGQPVWPPQNTQLPPHMPPQMHYRPAVRPPPPNMMPPPPLGMVRPPPPPSSMPAPPMWRPPPPPQQAGGMPPPPMSMPPPPPPPSG

SEQ ID NO: 31815 - protein, 323 aa, Oryza sativa; identical to SEQ ID NO: 29278

SEQ ID NO: 31816 - protein, 343 aa, Oryza sativa
MAMELSNLTRCHLPLLLLFLLAGSSSMALPVHPAMDRVRWQVDKVNRRGHSIGLVMSYIDEATALESSGYFRPWHVLPFVDLYGRRYHIGSIRGVNVIYALTGQRRLNAAVTVQTLIDVFTVSGIVHYGTAGSSNDSMSFGDVSVPKFVAYTSAWTWKKFKSPKESDTELSFGDFTVPNGGENLLGALKFRNEELYSVGKPMKEVFWLPVDSAWFKIAEGLKVSLERCNDTFCLPTTPKVVCGLKGSSADMFLDNAEYRKFLFREFGVSTVDEESAAVVMTTTSPGIPVIVFRGVSDLAGGEPTWSSTSLMNLASINALKVAVEFIATVGKQKSTMSAGSANN

SEQ ID NO: 31817 - protein, 192 aa, Oryza sativa
MWQGSNKISILSSAVGLPNVGNHFENWNVGVLGPVTLSSLNGGTKDLSHQKWTYQVGLKGETLGLHTVTGSSAVEWGGPGGYQPLTWHKAFFNAPAGNDPVALDMGSMGKGQLWVNGHHVGRYWSYKASGGCGGCSYAGTYHEDKCRSNCGDLSQRWYHVPRSWLKPGGNLLVVLEEYGGDLAGVSLATRTT

SEQ ID NO: 31818 - protein, 271 aa, Oryza sativa; identical to SEQ ID NO: 30968

SEQ ID NO: 31819 - protein, 339 aa, Oryza sativa
MALVRQRRHLPHLTLPLDHFALRPPPAPQQQQQPAVAPSTSSDVRLSDFERISVLGHGNGGTVYKARHRRGCPAQQPLALKLFAAGDLSAAREAEILRLAADAPHVVRLHAVVPSAAGGVEEPAALALELMPGGSLAGLLRRLGRPMGERPIAAVARQALLGLEALHALRIVHRDLKPSNLLLGADGEVKIADFGAGKVLRRRLDPCASYVGTAAYMSPERFDPEAYSGDYDPYAADVWSLGVAILELYLGHFPLLPVGQRPDWAALMCAICFGEAPEMPAAASEEFRDFVSRCLEKKAGRRASVGELLEHPFIAERDAADAQRSLAALVAEAEQSGDL

SEQ ID NO: 31820 - protein, 394 aa, Oryza sativa
MGRPVATLLVLCFISVTARAAAFRVHGRLLADAATEGGAVVPIHWTQAMNYVANFTIGTPPQPASAVIDLAGELVWTQCKQCSRCFEQDTPLFDPTASNTYRAEPCGTPLCESIPSDSRNCSGNVCAYQASTNAGDTGGKVGTDTFAVGTAKASLAFGCVVASDIDTMGGPSGIVGLGRTPWSLVTQTGVAAFSYCLAPHDAGRNSALFLGSSAKLAGGGKAASTPFVNISGNGNDLSNYYKVQLEGLKAGDAMIPLPPSGSTVLLDTFSPISFLVDGAYQAVKKAVTAAVGAPPMATPVEPFDLCFPKSGASGAAPDLVFTFRGGAAMTVPATNYLLDYKNGTVCLAMLSSARLNSTTELSLLGSLQQENIHFLFDLDKETLSFEPADCTKLS

SEQ ID NO: 31821 - protein, 227 aa, Oryza sativa
MAGAAGSSWSSLLLAAVAVALAVAAAPSLAGDPDYLQDICVADLNSEVKVNGFPCKANATADDFFSGVLASPGAAANTTTGAVVTGANVEKVPGLNTLGVSLARIDYAPGGLNPPHTHPRATEVVFVLYGELDVGFVTTANKLLSRTISQGDVFVFPRGLVHFQRNTGDKPAAVVSAFNSQLPGTQSIAATLFAASPAVPDAVLAKAFQIDDEEVDKIKAKFAPKKT

SEQ ID NO: 31822 - protein, 342 aa, Oryza sativa
MCGGSILGDLHLPVRRTVNAGDLWGDAGKGRDGGDGLKKRKGSSWDFDVDCDDDDDDDFEADFEEFEDDYGDDDDVGFGDDDQESDMNGLKLAGFSTTKLGLGGSRKRKTRYRGIRQRPWGKWAAEIRDPRKGVRVWLGTFGTAEEAAMAYDVEARRIRGKKAKVNFPDAAAAAPKRPRRSSAKHSPQQQKARSSSSSPASLNASDAVSKSNNNRVSSAGSSTDATAAAIAIDDGVKLELLSETDPSPPMAAAAAAWLDAFELNDLDGSRCKDNAFDHQIHKVEAAVADEFAFYDDPSYMQLGYQLDQGNSYENIDALFGGEAVNIGGLWSFDDMPMEFRAY

SEQ ID NO: 31823 - protein, 323 aa, Oryza sativa; identical to SEQ ID NO: 30216

SEQ ID NO: 31824 - protein, 261 aa, Oryza sativa
MATVGQPDAMRRITVHYVNPPPIAGAGEAHVDGLDDEVLDYVIGDVLQDQEGLYQSILYGKYGDDMRGARNTALAQSDGLHYYYHGENSSGEATTSRNSEIDQQIEYDLVFARQLQAMDNLTIETPADEDDDISCVPSPSDSETDEPAEGNNEEAATQDDNDDPDNMTYEQRQALVESVGNENRGLSDLLISYLETWKYKSGFFPRKANHDNCPICLSAFRRRETLITLACKHSYHEGCIARWLKIDKACPVCKYEVFGPS

SEQ ID NO: 31825 - protein, 233 aa, Oryza sativa; identical to SEQ ID NO: 30813

SEQ ID NO: 31826 - protein, 417 aa, Oryza sativa; identical to SEQ ID NO: 31244

SEQ ID NO: 31827 - protein, 333 aa, Oryza sativa
MSAYCGKYKDELIKNAAYIGTPGKGILAADESTGTIGKRFASINVENVEENRRSLRELLFCTPGALQYLSGVILFEETLYQKTKDGKPFVDVLKEGGVLPGIKVDKGTIEVAGTEKETTTQGHDDLGKRCAKYYEAGARFAKWRAVLKIGPNEPSQLAIDLNAQGLARYAIICQENGLVPIVEPEILVDGPHDIDRCAYVSEVVLAACYKALNEHHVLLEGTLLKPNMVTPGSDAKKVSPEVIAEYTVRTLQRTVPAAVPAIVFLSGGQSEEEATLNLNAMNKLSTKKPWSLSFSFGRALQQSTLREPSRQGLQVLICLGRCWLPLEHSAAVA

SEQ ID NO: 31828 - protein, 228 aa, Oryza sativa
MATQISKKKKFVSDGVFYAELNEMLTRELAEDGYSGVEVRVTPMRTEIIIRATRTQNVLGEKGRRIRELTSVVQKRFNFPENGVELYAEKVVNRGLCAIAQAESLRYKLLGGLAVRRACYGVLRFVMESGAKGCEVIVSGKLRAQRAKSMKFKDGYMISSGQPVNEYIDSAVRHVLLRQGVLGIKVKIMLDWDPKGKVGPTTPLPDLVTIHAPKEEEELRPPVLIAEA

SEQ ID NO: 31829 - protein, 242 aa, Oryza sativa
MSDRNFPFNLEGLMFGRAVRGLDDGSRAALVVKQVMRQLVTSLKRIHGTGIVHRDIKPSNLVVTRRGQVKLIDFGAATDLRIGKNYVPDRALLDPDYCPPELYVLPEETPQPPAEPIAAILSPILWQINSPDLFDMYSAGIVLMQMASPMLRSPSGLKNFNAELKAAGYDLNRWRETTRRRPDLQILDLDSGRGWDLATKLISQRGADKRGRLTAAAALRHPYFLLGGDQAAAVLSKLSLSK

SEQ ID NO: 31830 - protein, 272 aa, Oryza sativa; identical to SEQ ID NO: 30601

SEQ ID NO: 31831 - protein, 288 aa, Oryza sativa; identical to SEQ ID NO: 30703

SEQ ID NO: 31832 - protein, 184 aa, Oryza sativa
MLFTVSKSTGHAGTRIGWALVKDRAIARKMTKFVELNTIGVSKDSQMRAAKVLAAVSDGYERRPEQTKETMTTPLRLFDFGRRKMVERWSMLRAAAAASGIFSLPEETSGFCNFTKETAATNPAFAWLRCDREDVEDCAGFLRGHKILTRSGAQFGADARYVRVSMLDRDDAFDIFINRLSSLK

SEQ ID NO: 31833 - protein, 277 aa, Oryza sativa
MLLRSSSTPFLHSFLSPSSAAAAPSSLQLRRAFSDGHLPSLHPSSDGGGGSKNNTTGLHTELSFSIYNTFNKMAPPPPPVQEQEEAEQQQAPGEPKLPLFLARGLGIDRIASGLFTAGGGGDGDGGNGGAGRMSAVEEEHAEKVAALDAQYKRMMDEQPGDALFLRNYAQFLHEVKGDARRAEEYYSRAMLADPSDGEIMSQYAKLVWEVHRDLDRSLTYFHKSVQAAPHNSNVLAAYASFLWEQDDDDNDDLGEGEQDVAVAAQPGHVRQLASVAV

SEQ ID NO: 31834 - protein, 323 aa, Oryza sativa
MASSSGEGKGAGGAGYQYAPYGGSYYDEERRWWPWLVPTVLVACIVVFLVEMFVNDCPRHGSPLRGESCVAGFLHQFAFQPLRENPLLGPSSATLEKMGALDWAKVVHQHQAWRLISCIWLHAGLIHLIVNMLSLLFIGLRLEQQFGFVRIGIIYLLSGFGGSVLSVLFLRNNYISVGASGALFGLLGSMLSELIMNWTIYSNKAAAIITLLFIIAINLAIGILPHADNFAHIGGFVTGFLLGFVLLARPQFGWMERHELPQTNQPRKYRAYQYVLWAVALFLLLVGFVIALVMLFKGKNGNDGCHWCHYLNCIPTSRWKCST

SEQ ID NO: 31835 - protein, 28 aa, Oryza sativa
MYVGGRGSLVLVGVTPTGTKDHHFSLGW

SEQ ID NO: 31836 - protein, 263 aa, Oryza sativa
MADGKVACKHLVLVHGACIGGWTYFKVATRLRSAGYRVTAPDLGASGVDPRPLREVPTFRDYTAPLLGLLGSLPPGEKVVLVGHSLGGINVALAAELFPDKIAAAVFLCAFMPDHTSRPSHVLEKFIEGKWLDWMDTEFKPQDAEGKLPTSMLFGPQIAQERLMQLCSPEDVTLAGSLLRVSSMFVEDLQKQQPFTEGRYGSVRKVYVVVNQDLAIPEGFQRWMIGNSPVDEVKEIDAADHLVMLSRPDELARCLADIAESYA

SEQ ID NO: 31837 - protein, 105 aa, Oryza sativa
MAGVEAQILGSMRSWMDHGNGTVAAIFTCNSSVAIRDEQRNCNPRYGSFLSVRDGPLCLSVMVSIDWCQAQCKVARSEYIRWQGKAATSECILCFFSFFCDSNSC

SEQ ID NO: 31838 - protein, 59 aa, Oryza sativa
MPPKRQRSAAGPSGEAPVNSLDDGCLMHIFSFLSPIPDGASLHAILDCGCVLRGQSEIQ

SEQ ID NO: 31839 - protein, 253 aa, Oryza sativa
MAATALQLPVASSQRLTLRRFPGSGSLGRYSGLRWPVAAQARRAAEEGFRLRVAFNPSGNFDLSLSTDQDDAPQVEPPPPPTEGRFEIVINTDIIRTLDLSPVHEVLGDLNSLTPAQTRNLLDRTVGFTINYEREDPYDVRELSEFPDIRLWFVRLDACYPWFPVVLDWRAGELARYAAMLAPHQMSMRLGVVFNPEALELFVMKKVFIVYSWLKQQEHPKPGLKTADMARMLGFGIGDELFDLIEKYPAGPS

SEQ ID NO: 31840 - protein, 287 aa, Oryza sativa; identical to SEQ ID NO: 31387

SEQ ID NO: 31841 - protein, 157 aa, Oryza sativa
MPTAAGDSGGGDCGGGRQLATAATAMAVRARRRSSWRCRQRGPPDLGVLAVAMRLVAAATAAGNSGGGDCGGRRRLATPTAAMATTLMAAVSDATPVDGAAAVADTALAVTGGCGSDCGVGIDRQWQLVGSGIVGCRWRRRTWRRRRGGCWLRGGGG

SEQ ID NO: 31842 - protein, 386 aa, Oryza sativa
MASSTSLAALPSQLASPARRAALSRSATARPRHHHHPLLRAPPKGCRLVVTCNAQTAVPTSIAQGTPVRPTSILVVGATGTLGRQVVRRALDEGYDVRCLVRPRPAPADFLRDWGATVVNADLSKPETIPATLVGIHTVIDCATGRPEEPIRTVDWEGKVALIQCAKAMGIQKYVFYSIHNCDKHPEVPLMEIKHCTEKFIQDAGLDYLIIRLCGFMQGLIGQYAVPILEEKSVWGTDAPTRIAYMDTQDVARLTFIAMRNEKASKKLLTFAGPRAWTTQEVITLCERLAGQDANVTTVPVAVLRFTRQLTRFFQWTNDVADRLAFSEVLSSDTIFSVPMNDTYQLLGVDSKDILTLEKYLQDYFTNILKKLKDLKAQSKQTDIFF

SEQ ID NO: 31843 - protein, 282 aa, Oryza sativa
MRIDLITRVFGANAAEDFFEKLPACVQSLEAYTALLHSYARSKMTDKAERLFKRMKDANLSMNILVYNEMMTLYISVGELDKVPVIAEELKRQKFSPDLFTYNLRISASAASMDLEGFKGILDEMSKDPNSNEGWKLYQNLAVIYVDAGQLVGSGNSLVEAEAKISRREWITYDFLVILHTGLGNRDRIKDIWKSMLMTSQRMTSRNYICVLSSYLMCGQLKDAGEVIDQWQRSKAPEFDISACNRLFDAFLNAGFTDTANSFRELMLQKSCILTSRQERSS

SEQ ID NO: 31844 - protein, 308 aa, Oryza sativa
MVVPVIDFSKLDGTAAERAETMAQIDNGCEEWGFFQLVNHGVPKELLDRVKKVCLESYRLREAAFMESEPVRTLEGLMAAERRGEAAAPVDDMDWEDIFYLHDDNQWPSNPPEFKETMREYRAALRGLAERVMEAMDENLGLDKGRMRRAFTGDGRHAPFFGTKVSHYPPCPRPDLITGLRAHTDAGGVILLFQDDRVGGLQVLRGGEWVDVQPLADAIVVNTGDQVEVLSNGRYRSAWHRVLPMRDGNRRSVASFYNPAFEATISPAVGAGGEYPEYVFGEYMDVYAKQKFDAKEPRFEAVKAPKSA

SEQ ID NO: 31845 - protein, 150 aa, Oryza sativa
MYRAMSSSPFSSTPMPMPHGTYRAAGAQPHAPSPHLQQLRMPSPYATSHGNQHQRPSILASLLPFVLPSSSNPSLTAPLSLNTVVHRTSGPLNAGAGSQHAGSQISGVNPSGSSASASLNTWLTARLALTSEARGTVSSTEVVCLSDDES

SEQ ID NO: 31846 - protein, 275 aa, Oryza sativa; identical to SEQ ID NO: 29941

SEQ ID NO: 31847 - protein, 164 aa, Oryza sativa
MAQRDKKDQEPTELRAPEITLCANSCGFPGNPATQNLCQNCFLAATASTSSPSSLSSPVLDKQPPRPAAPLVEPQAPLPPPVEEMASALATAPAPVAKTSAVNRCSRCRKRVGLTGFRCRCGHLFCGEHRYSDRHGCSYDYKSAARDAIARDNPVVRAAKIVRF

SEQ ID NO: 31848 - protein, 261 aa, Oryza sativa; identical to SEQ ID NO: 30242

SEQ ID NO: 31849 - protein, 229 aa, Oryza sativa
MAVSFTNVSSEAGLKKLDEYLLTRSYISGYQASNDDLAVYSAFSTAPSSSYTNVARWFTHIDALLRLSGVTADGQGVKVESTAVPSASTPDVADAKAPAADDDDDDDVDLFGEETEEEKKAAEERAAAVKASGKKKESGKSSVLLDVKPWDDETDMTKLEEAVRNVKMEGLLWGASKLVPVGYGIKKLQIMMTIVDDLVSVDSLIEDYFYTEPANEYIQSCDIVAFNKI

SEQ ID NO: 31850 - protein, 83 aa, Oryza sativa
MLHACAKFPHVSLELQQVLQRSSSAFVVPPAFELEINFGGWLPCERFCFLPFHALHLIEKETLSCTEKREEERELEEEEESLN

SEQ ID NO: 31851 - protein, 133 aa, Oryza sativa
MTGGGSGGGGSWKNKTEDTWNSSGGTRDSGTTPGKSSWGGSEDGQKKEGSWGKSEGSGRQVGGGSSWDKPDGGWNSSKCEGTQGGGGGSSWDKADGGNSNKGTQGGGGGSSWDKADGGWNSSSKGGSSGNGGW

SEQ ID NO: 31852 - protein, 475 aa, Oryza sativa; identical to SEQ ID NO: 29953

SEQ ID NO: 31853 - protein, 264 aa, Oryza sativa
MAATLFSTSLTPTFLPAVPCPKPAPPASACFPCALPPRAALAAPPAPLRRRLSPVAVAVSSEVEEEEGGAESEGEFAEDLKVFVGNLPFSVDSAQLAGLFEQAGSVEMVEVVYDRQTGRSRGFGFVTMSTAEEAGAAIEQFNGYTFQGRPLRVNSGPPPPRDDFAPRSPRGGGSNFDSSNKLYVGNLAWGVDNSTLENLFSEQGTVLDAKVIYDRESGRSRGFGFVTYGSAEEVNNAISNLDGVDLDGRQIRVTVAESKPRRQF

SEQ ID NO: 31854 - protein, 266 aa, Oryza sativa
MASPQLQLQVLALLLLLATTATATATPTPTLIFLLGGQSNMGGRGGATNGPWDGVVPPECAPSPRILRLSPELRWEEAREPLHAGIDVHNVLGVGPGMSFAHALFRAIPPSTVIGLVPCAQGGTPIANWTRGTELYERMVGRGRAAMATAGAGAGARMGALLWYQGEADTIRREDAEVYARKMEGMVRDVRRDLALPELLVIQVGIATGQGKFVEPVREAQKAVRLPFLKYVDAKGLPIANDYTHLTTPAQVKLGKLLAKAYLSTL

SEQ ID NO: 31855 - protein, 303 aa, Oryza sativa
MAQPAWIPFPSTVTYRRHEAEWIAAGFRPNASGVSDADRFWDSERPSCRLIIYRSCPEAEPRLFPLLTKLYTKPAIPSGLLVPPALDDNDIGVYNRSDRSFVAVMQWLDKQPNKSVIYVSLGTEAPITADHMHELAFGLELAGVRFLWALRRPSGINCHDDMLLPSGFETRVAARGLVCTEWVPQVRMLAHGAVGVFLTHCGWGSTVESFHYGQPLVMLPFIADQGLIAQAVAATGVGVEVARNYDDGSFYRDDVAAAIQRVMVEEEGKELAHKAIELCGILGDRVQQEMYLYELIGYLQCYK

SEQ ID NO: 31856 - protein, 241 aa, Oryza sativa
MSGGARRVLEAWRLGVVRYGDALGLQERLVTDRRAGRVPDLVLSLQHPPTYTLGKRRTDHNLLLPEADLRALGADIHRTERGGDVTFHGPRQAVLYPILSLRAIGLGARRYVEGLESAMIEVAALYGVQACPGAAGETGVWVGDRKIGAIGVRISSGFTCHGLAFNIDPDLGFFEHIVPCGIADKEVTSLRREAAVELPPDEVIHDQLVQSLARTFCFSDVEFKDESECADMVCLAADKQS

SEQ ID NO: 31857 - protein, 264 aa, Oryza sativa
MHKENQVMESSLETKLIDMPQPQETNGDGEAAPEADISMATTLMPNGVGERKATAAPALPAARPPPEMTDKVMASTANLAQLLPTGTALAYQALSTSFTNHGQCYRSNRWLTAGLVAVLTASSIFFSLTDSVVGRGGKLYYGMATPRGFNVFNLSREEEEAQELSRTKLRELRVRPLDIVHAFFTAVVFLTVAFSDVGLTKCFFPDAGNDTKELLKNLPLGMAFMSTFVFLLFPTKRKGIGYTDTTPRPAPETNKPTQVSDHMP

SEQ ID NO: 31858 - protein, 292 aa, Oryza sativa
MDLPGPRWKKGNDGKDFSALAAANPMSVIVAELKASFISSKPVAVLSGPGGGAILGVEPEQAVILNRAAFGHAVEIAAAQKHWFQLSPEEVFYLCHVLNCIRVESHDKKQMSDKQLWNHFRSMSESFPEMYKAYSHLRFKNWVVRSGLQYGADFVSYRHHPALVHSEFAVVVVPEGAAFGNRCGRMEVWSDLLCALRASGSVAKTLLVLTISSGSCELSSPDCLEQLVVHERTITRWIPQQCREQRSEASRDEANREELISKKESVEFNLWGVILGFSVLSSLLVYKLKFRQ

SEQ ID NO: 31859 - protein, 500 aa, Oryza sativa
MATARVSLILLVVVLAASACAEGLRLPRDAKFPAAQAERLIRSLNLLPKEAGPTGAGDVPSVAPGELLERRVTLPGLPQGVGDLGHHAGYYRLPNTHDARMFYFLFESRGKKEDPVVIWLTGGPGCSSELAVFYENGPFTISNNMSLAWNKFGWDTISNIIFVDQPTGTGFSYSSDDRDTRHDETGVSNDLYSFLQVFFKKHPEFAKNDFFITGESYAGHYIPAFASRVHQGNKANEGIHINLKGFAIGNGLTDPAIQYKAYTDYALDMNLIKKSDYDRINKFIPPCEFAIKLCGTNGKASCMAAYMVCNSIFSSIMKLVGTKNYYDVRKECEGKLCYDFSNLEKFFGDKAVKEAIGVGDLEFVSCSTTVYQAMLTDWMRNLEVGIPALLEDGINVLIYAGEYDLICNWLGNSRWVHSMEWSGQKDFVSSHESPFVVDGAEAGVLKSHGPLSFLKVHNAGHMVPMDQPKASLEMLRRFTQGKLKEEWLAELPEQPMYAAM

SEQ ID NO: 31860 - protein, 486 aa, Oryza sativa
MAVSSSSLLLRRGATGGAGRRWGPGEALRRLVSSSEAAPAEKVPARSPPVMPPFEHRPRPYAGWSGDEILAKRKQFLGSSVFYYYQKPLNIVEGKMQYLYDENGKRYLDCFGGIVTVSCGHCHPDIVNAVVEQTKLLQHTTTIYLNQPIVEFAEALASKMPGNLKVVYFVNSGTEANELAMLMARLYSGNLNMIALRNAYHGGSAGTIGLTGLQTWKYPIPQGEIHHVMNPDPYRGTFGSDAVAYAKEVEEQINYGTSGRVAGFIAETFQGVGGAVELAPGYLKLAYDTVRKAGGVCIADEVQSGFGRTGSHYWGFQTQDVIPDIVTMAKGIGNGLPLGAVVTTPEIANVLAQKIQFNTFGGNPVCSVGGLAVLKVLDKEKRQAHCADVGSHLVNRLKELQQKHEIIGDVRGRGLMLGVELVTDRKEKTPAKAETNLLFEKLKDLNILVGKGGLHGNVFRIKPPMCFTRDDADYLVDAMDYAMSGL

SEQ ID NO: 31861 - protein, 247 aa, Oryza sativa
MASPPPPPPQPPSPSAATAGAAAAPVDALFLQNLMSRVQLRPPFLDTNSFLTQDLDEFLLNEFAALSAAAGASDDDDDGEDGEGEGSDGEVVSGEARRRRTLAREEAKLEKEIVRLVLAGEAEEALKPNSGQSVAVGDHHICVGFHDDSGGVYRVWEWHGHVMIFDDEDGYSAEYIYGNHFEPLAAATARAKEKEREKREKELSSGLRDLILGDTGSGANGSKENGKGGAPRVVRRNVVNAPAAPAR

SEQ ID NO: 31862 - protein, 245 aa, Oryza sativa
MASTSRRWWWWPWATPPPFSSSASRHHKGEGWGLGGPALVKAVGWLLLAGLLFRVLCSFPSSTSSPEISEGKCNLFDGEWIPNPSGPAYTNKTCRFIDGHQNCMLNGRPDMSYLHWRWKPYECELPQFDEVRFLSAMRNKSWGLIGDSILRNQVQSLLCLLSKAEEPIEVYHDKEYRNRRWHFQSYNFTVSLVWSPFLTKSEVFENENGQSTSEIQLHLDILDPIWTSQYETFDYVVIAGAFYSY

SEQ ID NO: 31863 - protein, 85 aa, Oryza sativa
MGFLGFLWRRATATACASSERRGWPTLAAGDGLAGVTSARVQQRWPSPALIRHRRWEFETELTSMAVGRPDWSPAMEAWWRIVRP

SEQ ID NO: 31864 - protein, 126 aa, Oryza sativa
MASGGGGGGGMEAVEVRFRLDDGSDIGPSMHDQATTVTALKEFVLARWPQGKEIAPRTVNDVTIINAGQVLENNRTLAESRNLAAESPEGPITMHVVVRRSRPERRVKQPPKARPPERIGCGCTIL

SEQ ID NO: 31865 - protein, 88 aa, Oryza sativa
MYLRRAPPLHSELLRPCAAAFAGERRPHCRLHHHRRRCWSSIWLRACGCHPLRRWNGYWRTVFAGGESAAPSGTRCRWVCGGPRWADG

SEQ ID NO: 31866 - protein, 375 aa, Oryza sativa
MSAVLTFGGQMPVIKVGRMAGQFAKPRSEAFEERDGVKLPSYRGDNINGDAFNEKSRIPDPQRMVRAYAQSAATLNLLRAFATGGYAAMQRVTQWNLDFTQHSEQGDRYRELAHRVDEALGFMSAAGLTVDHPLMTSTDFWTSHECLLLPYEQSLTRQDSTTGHFYDCSAHMLWVGERTRQLDGAHVEFLRGVANPLGIKVSDKMNPTELVKLIEILNPSNKPGRITIITRMGAENMRVKLPHLIRAVRHAGQIVTWITDPMHGNTIKAPCGLKTRPFDSILAEVRAFFDVHDQEGSHPGGVHLEMTGQNVTECIGGSRTVTFDDLGDRYHTHCDPRLNASQSLELSFIIAERLRRKRIRSSKLNNMLPLPPFGV

SEQ ID NO: 31867 - protein, 142 aa, Oryza sativa
MAEQLGGVGSPQLSLSSCSSFLSISSAGTSAADGAPHLSLGVGGAEELDLLLQVGIGGGGGGGGDEEEEERKTIRMMKNRESALRSRARKRAYVQELEKEVRRLVNENLKLKRHCKQLKTEMAALIQQPTNKQSSHRRSSST

SEQ ID NO: 31868 - protein, 255 aa, Oryza sativa
MEVGDGGGFDADAARDGDGDAESIRDDGSDADLACGGGGGSDATCGGDRGSDAVCGGGGDSVSVSCGGGLTDATRMISFSSTFSIELPRQHVLRHHLWIKSLVGWIWGNSSSLSLGSNNHAGFIVRVEPRLDLQLWFAGLQSKLVRFNDEPRGNLLWSPVMFTPKSTASHQTSHMCRFRGGSRRGLPVRQAEYISIEALGCNCRGPATVPYRFAPSLLLSFIIKFASFFQLTSLLLNMVQLLCLSWAMYWGIQFP

SEQ ID NO: 31869 - protein, 112 aa, Oryza sativa
MMPSAIGVGMACGEMAFTRTPSRASCLATARTMPTMAAFDMEYTGDATPPSTAAELAVQRMQPARRGAMTRAACLTHANIDRALTAMTRSYSSRSSAASEAGAGAPMTPALL

SEQ ID NO: 31870 - protein, 93 aa, Oryza sativa
MDPLPLARRSNGATRLPAMSPGASRSSATSPMAAAPVRRWPGAALPSSSLHWLVKKLGEEGPGQDLHASCLSMAENLELLTGSSDLISSVASD

SEQ ID NO: 31871 - protein, 247 aa, Oryza sativa; identical to SEQ ID NO: 30972

SEQ ID NO: 31872 - protein, 269 aa, Oryza sativa
MGFFPGHETSTIIDGCNGMLLYYASQPAAAFHVVNPTTRRWARLPPPRGKTLLSVLAFDPSASPHYRVVCFTGWLPRGASVEVFDSEGGAWRDHELDFGLDTDAMSATMHYFDGAIHVLAYSGHVVRIDLGTMACAVTALPAPVSCRARAGHCRGRLRYASSDGTRLKFWELKNAATSEWALKHELGVNDLVAGEASGACQAVTFLFMAFHPDREMVYLWTPWKLVAFDMEKRRVEEEWEVGPEKEKEGAHLIQIWLFPFSRHLANSLA

SEQ ID NO: 31873 - protein, 223 aa, Oryza sativa
MGDNSAAAAAVAAPRGRFGRICVFCGSNAGNRAVFGDAALQLGQELVSRGIELVYGGGSVGLMGLIAQTVLDGGCGVLGVIPKALMPTEISGASVGEVKIVSDMHERKAEMARQSDAFIALPGGYGTMEELLEMITWSQLGIHDKPVGLLNVDGYYDPLLALFDKGAAEGFIKADCRQIIVSAPTAHELLRKMEQYTRSHQEVAPRTSWEMSELGYGKTPEES

SEQ ID NO: 31874 - protein, 257 aa, Oryza sativa; identical to SEQ ID NO: 31722

SEQ ID NO: 31875 - protein, 485 aa, Oryza sativa
MAGATAAAVSSSFLALALLSLCAAAAGGSPQLDAEAARQQEADRVTRLPGQPAVRFAQYAGYVTVNETHGRALFYWFFEATAAADKKPLVLWLNGGPGCSSVGYGEAEELGPFLVQKGKPELKWNKYSWNKEANLMFLESPVGVGFSYTNTSSDLQQLGDKITADDAYIFLLNWFKRFPQYKSHDFYIAGESYAGHYVPQLSEKIFDGNKQGPKENYINFKGFMIGNALMDDETDQTGMIDYAWDHAVISDRVYADVKKYCNFGMENVTDACDSALTEYFAVYRLIDMYSLYTPVCTEVSSSAAFGQRQVAVHGAAPKIFSKYHGWYMRPAGYDPCTSDHAEVYFNRADVQEALHANVTNIGYNWTHCSDVIGKWRDAPFSTLPIIRKLVAGGIRVWVFSGDTDGRIPVTSTRLTLNKLGLKTVQEWTPWYDHQQVGGWTILYEGLTFVTIRGAGHEVPLHAPRQALSLFSHFLADKKMPPTAFP

SEQ ID NO: 31876 - protein, 295 aa, Oryza sativa
MATTTAAAMVVAMSVLLLGGGEAAAPRKPVDVAFEKNYVPTWAEDHIHYVDGGREVQLYLDKSTGTGFQTRGSYLFGHFSMHIKLVAGDSAGTVTAFYLSSQNSEHDEIDFEFLGNRTGEPYILQTNVFSGGKGDREQRIYLWFDPTKDYHSYSVLWNLYMIAFFVDDTPIRVFKNSKDLGVRYPFNQPMKLYSSLWNADDWATRGGREKTDWSRAPFVASYRGFHVDGCEASAEDRYCATQGARWWDQPEFRDLDADQYRRLAWVRKTHTIYNYCDDRERYPAMSPECHRDRDA

SEQ ID NO: 31877 - protein, 107 aa, Oryza sativa
MRRALQAIYHPRNQYILHLDLEAPPRERIDLAMYVKGDAMFSEVGNVRVIAKGNLVTYKGPTMVACTLHAVSILLKEGLEWDWFINLSASDYPLVTQDGQCSDYSAE

SEQ ID NO: 31878 - protein, 233 aa, Oryza sativa
MQGEYHRSSSEDSAASAAAAAAAAAAAMAPLAAAAAAVAAKEEQAAAAAVLPLQQQQPRRQYRGVRMRKWGKWVAEIREPHKRTRIWLGSYATPVAAARAYDTAVFYLRGRSARLNFPEEISSLASLSEGGGASEPREPDGGTLSAASIRKKAIEVGSRVDALQTGMMVAPTTHHRERQKHHHHHHHHHPHLQPHGEEQHHHHEQKHQRTAWSGRAKNPDLNQAPSPENSDAE

SEQ ID NO: 31879 - protein, 524 aa, Oryza sativa
MIKDEYYVQWVVDNLPVLYRDPADQQLGSYKRGFPVGETDAQGRFFLYNHIRIIILTNKDPYAAEEGKTKFRVVGFEVVPTSIKHDYENEPLAGQELETKTCGKFVNIEEVAVNNHQYLDPAKDTTVLFTYDVQFQPSDILWEERWDRIISSKSSNDKIHWFSIINSLMIVLFLTGMIAMIMLRTLHRDIARYNEVQTTEEAQEESGWKLVHGDVFRPPQFSPLLFSVFVGTGVQVCSMSAITMVIALLGLLSPANRGSLLTTLLLLFVFMGSFAGYYSSRTYKMFNGKNWKYNTVLTAVLYPGSLFGVFFILNLVLWSKASSQAVPFGTLFALLVLWFGISVPLVFLGSYFGFKAPQIEHPVRTNQIARQVPEQVWYLSSLFSILVGGILPFGAVFIELFFIMSALWLHQIYYVFGFLFIVLIILVATCAEVTIVMCYFQLCAEDYRWWWRSFLTSGSAAVYLFLYSFLYFFTKLNITAFVSGLLYFGYMAMISLTFFFLTGTIGYFACLWFTRKIYASIKID

SEQ ID NO: 31880 - protein, 375 aa, Oryza sativa
MATTQHSNGGAAGDNGEAAPPSVPPSLAPPRKVALVTGITGQDGSYLTELLLGKGYEVHGLIRRSSNFNTQRLDHIYHDPHSQPSTPRPPMRLHYADLSDSSSLRRALDHILPDEVYNLAAQSHVAVSFEVPDYTADVTATGALRLLEAVRLASKRIRYYQAGSSEMFGSTPPPQSESSPFHPRSPYAAAKVAAHWYTVNYREAYGLFACNGVLFNHESPRRGENFVTRKITRAVGRIKVGLQTKVFLGNLSAARDWGFAGDYVEAMWRMLQQDKPGDYVVATEESHTVEEFLQAAFGYAGLNWKDHVVIDKKYFRPAEVDSLQGDATKARKELGWKPKVGFQQLVEMMVDNDIELAKKEKVLVDAGYRDPKQQP

SEQ ID NO: 31881 - protein, 184 aa, Oryza sativa
MPLLRPGARRREGAGWCRVAKKTHVHDAAPGTLTGAVRADDVDAIAQVADDGDGDDGWDGEAVAYMQRARELVRLPCDAVLPVTLGALDYEVFHVCPVRAIAMAPGGTVVAFAPVGLLDTVDATAAAVALRVHGCDHFGAYFSRRPARCTLDGADVGFTYDGDTRTCSQRDPRRINLSQGKTGL

SEQ ID NO: 31882 - protein, 210 aa, Oryza sativa
MSYAYLFKYIIIGDTGVGKSCLLLQFTDKRFQPVHDLTIGVEFGARMITIDNKPIKLQIWDTAGQESFRSITRSYYRGAAGALLVYDITRRETFNHLASWLEDARQHANANMTVMLIGNKCDLSHRRAVSYEEGEQFAKEHGLVFMEASAKTAQNVEEAFIKTAGTIYKKIQDGVFDVSNESYGIKVGYAVPNASGGGAGSSSQGGGCCG

SEQ ID NO: 31883 - protein, 217 aa, Oryza sativa
MASTELASDVYALPCGDDGTTALSTPVVVSVLASLLERHIARNERDQAAAADGEAARRARAFDSGTVLDMSLHAFLERFSRYANVSPQVYVVAYAYLDRLRRGDGVRVVSANAQRLLTTAILVASKFVEDRNYKNSYFAAVGGLTAAELSSLELDFLFLMQFRLNVSVSVFQSYCRHLEREVSYGGGYQVERCLKKALVCSGEAQAQQRQAASAAAQ

SEQ ID NO: 31884 - protein, 258 aa, Oryza sativa
MRFQSMIAAALPALVLSAPTPQWDDVPEESIVGGTTAAAGEYPFIVSLQAGGRHICGGTLINGNTVVTAAHCSVSSAIGSVSNTAVRVGSLSSNSGGTVVRVSRIVLHPSYAASTSNNDVAIRKLSSTVTAGGNVGFATLAASGSDPASGSTASVAGWGATREGGSASTTLLKVSVPIVARDTCIANYGSLTVTTNMVCAGVTAGGRDSCQGDSGGPLVDANKTLIGIVSWGSGCARPNLPGVYSRVGTLRSFIDQNA

SEQ ID NO: 31885 - protein, 215 aa, Oryza sativa
MASSASRFIKCVTVGDGAVGKTCMLICYTSNKFPTDYVPTVFDNFSANVVVDGTTVNLGLWDTAGQEDYNRLRPLSYRGADVFVLAFSLVSRASYENVMKKWLPELQHYAPGVPIVLVGTKLDLREDKHYLLDHPSLVPVTTAQGEELRKHIGATCYIECSSKTQQNVKAVFDAAIKVVIKPPTKQRDRKKKKTRRGCSFFCKGVMSRRRLVCFK

SEQ ID NO: 31886 - protein, 203 aa, Oryza sativa
MAAEAAAALEGSEPVDLAKHPSGIIPTLQNIVSTVNLDCKLDLKAIALQARNAEYNPKRFAAVIMRIREPKTTALIFASGKMVCTGAKSEQQSKLAARKYARIIQKLGFPAKFKDFKIQNIVGSCDVKFPIRLEGLAYSHGAFSSYEPELFPGLIYRMKQPKIVLLIFVSGKIVLTGAKVRDETYTAFENIYPVLTEFRKVQQ

SEQ ID NO: 31887 - protein, 322 aa, Oryza sativa
MAMAAASVLAASSSSSPPPLALASWRWRPPPPPPLLAVAGAARGATNPRLALRLSAAASPPVTGESRAIAGTGRCLVAPMGGDETERDATAATAPDWGALARRLALGALGCAVLCCGGAAVAAEDSIKASGFGLRVAASLRRLGWADEAVVFTLATLPVIELRGAIPVGYWMRLDPIRLTVLSVLGNMVPVPFIILYLKKLAAFLSQRSASATRIMDLLFERARQKAAPVEEFQWLGLMLFVAVPFPGTGAWTGAIISSVLGMPFWSGFSANFVGVVLAGLLVNLLMNLGLKYAIITGLVLFFLSTVMWGVLRSLKKSLNAK

SEQ ID NO: 31888 - protein, 416 aa, Oryza sativa
MEAFLAGFRAPRPRVPAVSAAARSLPPNTSFFSGGRRRRRLLSSSVVCMAEPYLIAKLDSAEKAWKEMSVRLADPDIVSDPSEYQKLAQSVAELDQVVSTYRQFKDCEKQIEETKVLQKENEDDPDMAEMIDSEMESLSNQLEELEEKLKLLLLPNDPLDARNILLEVRAGAGGDEAGIWAGDLVRMYQKYCERNSWKFKPVSSSEAEKGGFKTYVMEVKGKQVYSKLKFESGVHRVQRVPQTETMGRVHTSTATVAIMPEADEVDVVIDPKDIELKTARSGGAGGQNVNKVETAVDLIHKPTGIRIFCTEERSQLQNRERAFQLLRAKLYEIKLREQQESIRNQRKLQVGTGARSEKIRTYNYKDNRVTDHRLKMNFELTGFLMGDIESAVQSCSSMEQKELLEEMATSVGAAKV

SEQ ID NO: 31889 - protein, 321 aa, Oryza sativa
MATIPEVPASELIQTMPRVGMGTAAFPFTSSEDTTAAMLRAIELGYRHFDTARIYATEGCVGEAVAEAVRRGLIASRADVFVTSKIWCSDLHAGRVVPAARETLRNLGMDYVDLLLVHWPVSLTPGNYDFPFPKEVILPSFDMEGVWRGMEECHRLGLARAIGVSNFSAKKLEQLLSLAAVRPAVNQVEVNPMWQQRTLREVCRREGVQLCGYSPLGAKGTPWGSAAVMDSGVLQEIAGAKGKTLAQICLRWLYEQGDVLLVKTYNEKRMKENLDIFNWELTDEERERISQLPQLRGLPGLEFISDHGPYKSVEDLWDGDV

SEQ ID NO: 31890 - protein, 309 aa, Oryza sativa
MAVVHRLLRRGLSAASPLPSLQELGRRPASSSAAAAGDAAAELRGAREDVKQLLKSTSCHPILVRLGWHDAGTYDKNITEWPKCGGANGSLRFEIELKHAANAGLVNALKLIQPIKDKHAGVTYADLFQLASATAIEEAGGPKIPMIYGRVDVAAPEQCPPEGRLPAAGPPSPAEHLREVFYRMGLSDKEIVALSGAHTLGRSRPERSGWGKPETKYTKNGPGAPGGQSWTSQWLKFDNSYFKDIKERRDEDLLVLPTDAVLFEDSSFKIYAEKYAADQDAFFEDYAEAHAKLSNLGAKFDPPKGISLE

SEQ ID NO: 31891 - protein, 110 aa, Oryza sativa
MGALGIDLCRRSRLRWPHGDGLHASGLADGRDVQPPCWPHAVLLLRHRPRERLHHAAVGVAHSPWASSPPAPDLATGGPDLPHTTPAACSRVRRAPLGLLRAPSRRHERL

SEQ ID NO: 31892 - protein, 238 aa, Oryza sativa
MTTRSNGEHHHGPPSYQQRRPHYGGGYGGGSASFRGCCCCIFLLLTFLALLALAVALVVVLVVKPRKPQFDLNQVSVQYLLVTPPSSAASAVGGTVAAAVPAAAYLSLNITLLFTAVNPNKVGIRYGATAFDVMYHGVPLGVAAVPGFEQPAHSTRLLQTRVIVDRFNVLQADAQDLVRDAAISDRVDLRITGDVGAKILVLGFSSPKVQVSVDCAIAISPRRQSLTYKQCGVDGLSV

SEQ ID NO: 31893 - protein, 238 aa, Oryza sativa
MVAEAFTVDLNEPLVFQVGHLGEQYQEWVHQPIVSKEGPRLFANDVLEFLTRTEWWAIPLIWLPVVCWCLTKSVEMGHTLSEVALMVVFGICLWTLIEYIMHRFLFHINTKSYWTNTAHYLLHGIHHKHPTDGLRLVFPPAAAAILCFPFWNLIRLITTPTTTHGVFGGGLLGYVMYDCTHYYLHHGQPSSDPGKHLKKYHLNHHFRIQNKGFGITSTLWDHVFGTLPSTKTIDKKSS

SEQ ID NO: 31894 - protein, 147 aa, Oryza sativa
MAAAALTSQLNALVNNMFAMGLLDDQFQQLQMLQDSTAPDFVSEVVTLFCDDGERIICELSRQLEKPNVDFDRVDSYVHQLKGSSASVGAQKVKNTCIQFREFCQQRSRDGCLKTLDLVRTEFYDLRNKFQAMLQLEQQIQACYPKH

SEQ ID NO: 31895 - protein, 331 aa, Oryza sativa
MEVAAGAGEGAREFKEIVLEVMEVGGVLNVGDFVPALRWLDPQGVVARMKKLHRRFDDMMNAIIAERRAGSLLKPTDSREEGKDLLGLLLAMVQEQEWLAAGEDDRITDTEIKALILNLFVAGTDTTSTIVEWTMAELIRHPDILKHAQEELDVVVGRDRLLSESDLSHLTFFHAIIKETFRLHPSTPLSLPRMASEECEIAGYRIPKGAELLVNVWGIARDPAIWPDPLEYKPSRFLPGGTHTDVDVKGNDFGLIPFGAGRRICAGLSWGLRMVTMTAATLVHAFDWQLPADQTPDKLNMDEAFTLLLQRAEPLVVHPVPRLLPSAYNIA

SEQ ID NO: 31896 - protein, 299 aa, Oryza sativa
MNRSVMIYKLHSCIIQSSMQFQQEVHLISKVRHPHLVTLIGACPDALCLVYEYVPNGSLHDRLWSKCGIPQLPWKIRARIVAEISSALFFLHSCKPQMIVHGDLKLENILLDANLHCKIADCGISQLFMEDAKDADPEYRRSKPLTPKSDIYSFGIVILQLLTGKQAAGLPSEVRRAMSSGKLWSLLDPTAGEWPLEVARRLAELGLKCSEAASPELLTPETVRDLEQLHLMRDNRQVPSFFLCPILKEVMHDPQVGADGLTYEGRAISELMDNGPPITPNHALRFAIHDWLSQRSTPF

SEQ ID NO: 31897 - protein, 214 aa, Oryza sativa
MAMAAAWSPALAAVLLAAAVASASNSEGDALYALRRALADPRGVLQSWDPTLVNPCTWFHVTCDRAGRVTRLDLGNSNLSGHLAPELGHLEHLQYLELYKNNIQGTIPAELGSLKNLISLDLYNNNITGTIPKELGKLSSLVFLRLNDNSLNGPIPRDLAKISSLKVIDVSNNDLCGTIPTSGPFEHIPLNNFDKNPRLEGPELQGLATYDTNC

SEQ ID NO: 31898 - protein, 241 aa, Oryza sativa
MRSHEMNNSSSRYASEEERGSNSFLIESEEEEEDEEAHPHSSILLKDADSDSDSDDSSCATPRPSSYATHQWPQSYRQSIDIYSSVQSPNLSFLGTPTLSRLSNSFLTNSFRGKTPEILSNLVKPLLRPSFSSDDQQQQQQHDDDTRKSSQYLLPSRKPSLQQIPEDQKPLVPAHEVPAYQQCSYTQAVMNGINVLCGVGILSTPHCSICPLLWASYGVGWFFTHHACDLHPSMRLFLGHP

SEQ ID NO: 31899 - protein, 203 aa, Oryza sativa
MAANPGNKIRNAKLVLLGDVGTGKSSLVLRFVKGQFVEFQESTIGAAFFSQTLAVNDETVKFEIWDTAGQERYHSLAPMYYRGAAAAIVVYDITNAASFTRAKKWVQELQAQGNPNTIMALAGNKADMVEARQVPAEEAKTYAQENGLFFMETSAKTAINVNDVFHEIAKRLLQGQQAQDTPAGMVLNQRPAERMVSSSSCCS

SEQ ID NO: 31900 - protein, 231 aa, Oryza sativa
MKGSRAKLGIVTSLSVSWAPDVYDPPVTSGSHTVKGHQRSSRKSHYKYKPAKSSSSRSSSGSKKDRKHSRHSSSSSSSSNHKRDRKPSYRNTVGGVSVGSSSSSRNTDASAAQYRDLYSSSGGNRIDIAVPQYSKLSPLVPSESATYRNVYNSTSGSRTDPTVPHCSKLSPLVTSESASLAGTVPVLKTLEPIKRSSSCCKEQPLSFLSRQFVAAKYKGMFSLWSHNQLAS

SEQ ID NO: 31901 - protein, 378 aa, Oryza sativa; identical to SEQ ID NO: 29484

SEQ ID NO: 31902 - protein, 125 aa, Oryza sativa
MSGRSRPWPGDPSPAPPQPPVVAAAADAGGEASTSLRDFGTSMDAISFGFAATAILVSMFLLMAIFEHLIKPHVFPPLASAALRPARRRHGVSPAGKLRSPPMVRSTSPTTYTERNDPMLRCLLL

SEQ ID NO: 31903 - protein, 292 aa, Oryza sativa
MQAISELTHGKKEEVSRTEFQEVLSDILLGMAAGLKRDPIVILRIDGEDLRDFVDSPRYEPEAAAIFSKIGSEDMSLRQCLLAALQLLNVDNGMPPASDPWVAENIIEPALQKLPAGQLEQPASQDIFLEQLKKLLSNIAERLQEQPVIVAHTENTFDGSCVKRLLDNKFELDKLLDSVWKDVLIEHKNKGSRECLIAALDKMADAAGLPPYGAVNQVDAVVNEALKTVNADERTAVDEAGFKKLLTDILRAVMMQLNRQPIFVSNSTVVHEPLFSSSAILSSPPVKSSPSE

SEQ ID NO: 31904 - protein, 213 aa, Oryza sativa
MDRRDDSCCPGGGGGVSSLIGEFVGDVVMWRRGDVSACLLAATVSGWLLFGSGGYTFLSLASNVLLLLLTVLFLWAKAARLLNRPEPPIPEMRISQQVVNEVAALLHSGMNTVFSVFHDIALGKDSVLFYQVFLSLWIISIIGSLTDFTTLCYTSIVAVLTIPALYQKYEECIDRYMRFAYLNLQMYEMVYERFSAKCFHRARDLVIEVLKEP

SEQ ID NO: 31905 - protein, 225 aa, Oryza sativa
MLLLLPAAWPRGSMAAAMAFLAVVCAAAMAAVSGAEEVYEFGSGASFIFGDSLVDAGNNNYIPSLSKANMTPNGIDFAASGGMPTGRFTNGRTIADIIGEMLGQTDYSPPFLAPNTTGGALLNGVNYASGGAGILNGTGRIFVNRIGMDLQVDYFNITRKQLDDLLGKAKAKEFLKKKAIFSITVGSNDFLNNYLMPVLSAGTRVAESPDGFINDLIIHLREQLT

SEQ ID NO: 31906 - protein, 242 aa, Oryza sativa
MGRSFRDSLKVLEADIQHANSLAAEFRREYDGACLQMRMSYCPAAHFFLFLVQWTDCNLAGALGLLRILIYKVYADGTTTMSAHERKASIREFYAVIFPSLMQLHEGINEVEDKKQKAICIERYRRRDEDQKMVISEIDDNIEEECGICMEINGKVVLPTCSHAMCIKCYRDWRSRSQSCPFCRDSLKRVNSADLWIYTDNRDIVDIATVRKENLRRLFMYIDKLPTVIPETVFDVYDSHVK

SEQ ID NO: 31907 - protein, 360 aa, Oryza sativa
MATLPQMAATKERQEAANPTTTTRTLVESVTNWIRVYSDGSVDRLGPPEAAAFMVLVPPYDDPRDGVTVHDVATDHGVDVRLYLTTTTPAGRRPVLVHFHGGGFCLSHAAWSLYHRFYARLAVELDVAGIVSVVLPLAPEHRLPAAIDAGHAALLWLRDVACGTSDTIAHHAVERLRDAADFSRVFLIGDSAGGVLVHNVAARAGEAGAEALDPIRLAGGVLLHPGFILPEKSPSELENPPTPFMTQETVDKFVMLALPVGTTSRDHPYTSPAAAVTAAEGAQLPPMLVMVAEEDMLRDAQVEYGEAMARAGKAVETVVSHGRGIGHVFYLNWFAVESHPVAAARARELVDAVKSFVDSH

SEQ ID NO: 31908 - protein, 306 aa, Oryza sativa
MAGRYDSNPFEEDDVNPFSEQARGKAGGQPSYGGGAFYMPNPRNVPSVSSNSRLSPLPPEPAAFGATVDIPLDSSKDLKNREKELQAREAELNKREKELKRREEAAARAGIVIEEKNWPPFLPLIHHDITNEIPSHLQRMQYVAFASFLGLACCLFWNVIAVTSAWVKGEGVKIWLLAIIYFISGVPGAYVLWYRPLYNAMRTDSALKFGLFFLVYLFHILFCVFSAVAPPVVFEGKSLAGILPAIDLISKNALVGIFYFVGFGLFCVESLLSIWVIQQVYMYFRGSGKAAEMKRDATRGAMRAAF

SEQ ID NO: 31909 - protein, 310 aa, Oryza sativa
MEQKPPAVAANNNQLLLMMIMVVVACSNYMISGAGAQPSPGYYPSKTIRSMAFGEGYDNLWGGQHQTLSADQTALTVWMDRSSGSGFKSKRSYRNGYFGASIKVPSGYTAGVNTAFYLSNNELYPGQHDEIDIELLGTVPGEPWTLQTNVYVHGTGDGAIIGREMRFHLWFDPTADFHHYAILWNPDHIVFLVDDVPVRRYPRAAGNTFPDRQMWAYGSIWDASDWATDGGRYKSDYRYQPFVSRYRDLKIAGCEAAAPASCQPVPASPSGATGELSAQQKAAMRWAQQRSMVYYYCQDYSRNHANYPEC

SEQ ID NO: 31910 - protein, 186 aa, Oryza sativa
MAEVADLTGDGGVLKTVVRKAKDDAIAPTDSLPLVDVHYEGTLAENGEVFDTTHEDNSIFSFEIGQGAVIKAWDIALRTMKVGEVAKITCKPEYAYGSAGSPPEIPPNATLIFEVELVACRPRKGSSLGSVSDEKARLEELKKQRELAAATKEEEKKKREEAKAAAAARVQAKLDAKKGKGKGKGK

SEQ ID NO: 31911 - protein, 524 aa, Oryza sativa
MGVVEAEALHGAVEALAGSLQPHVATAFFVFSACTVALAALLAVVRLRPPWWCDCTVCEAFLTASWAGEFDNLCDWYAHLLRTSPAQTVHVHVLRNVLTANPVTVDHVLRARFDNYPKGAPFSAILADFLGRGIFNVDGDAWLFQRKLAAAELASPALRAFAARVVASELRCRLIPLLHSASREGNGKVLDLQDMFRRFAFDSICKISFGLDPGCLELSMPVSTLVEAFDTASTLSARRATVPMQIIWRLKRFLNVGDERKLRDAVRLVDALAAEVIRQRRKLGGAATGSDLLSRFMGSIDDDKYLRDIVVSFMLAGRDTIASALTAFFLLLSDHPEVATAIRDEVARVTGDGNRTMAATFDKLKDMHYVHAAMYESMRLFPPVQFDSKFAAGDDTLPDGTVVAKGTRVTYHAYAMGRMESVWGPDCAEFRPERWLRDGRFVPESPYRYPVFQAGVRVCIGKELALMEMKAVIVAVVRSFDIEAIARSSRRPKFAPGLTATFAGGLPVRVRRRRARASGHNPPI

SEQ ID NO: 31912 - protein, 124 aa, Oryza sativa
MIPTSIFPFPAPAMLCATTGLAAPAQADYVPTPFRDLCRTVRRRRRHRRRRCRHRRTNRSRLRDELMMTVHAGRPAVMMPLNYICIWLIKYVRVIKTYAHQRLHTHIVRAANGRALALLSGVQR

SEQ ID NO: 31913 - protein, 100 aa, Oryza sativa
MALRRALGWSEGEVMRPESKPCSRLMRQTAGVFSVGGALSFWVLCRLHYGPRITVPRSLRWASCGAISVSSASALLVRLFSPECEPQNIAAYDKLGHKTG

SEQ ID NO: 31914 - protein, 356 aa, Oryza sativa
MASRTSATAGMLLLAAAAALVCSSAAARMPPLAKGLSLGYYDASCPQAEAVVFEFLQDAIAKDVGLAAALIRLHFHDCFVQGCDASILLDSTPTEKSEKLAPPNKTLRKSAFDAIDDLRDLLDRECGDTVVSCSDIVTLAARDSVLLAGGPWYDVPLGRHDGSSFASEDAVLSALPSPDSNVTTLLEALGKLKLDAHDLVALSGAHTVGIAHCTSFDKRLFPQVDPTMDKWFAGHLKVTCPVLNTNDTTVNDIRTPNTFDNKYYVDLQNRQGLFTSDQGLFFNATTKPIVTKFAVDQSAFFDQYVYSVVKMGMIEVLTGSQGQIRKRCSVSNAAAAGDRAWSVVETVAEAAESLVL

SEQ ID NO: 31915 - protein, 399 aa, Oryza sativa
MGSSGAPELTHEMSSNPCAGGRATILGIGTAVPVHVYEQKSFPDYYFEITDSNHLVDLKAKFANICEKTSTEKRHMYISDEWLRANPSVTAYMSTSLNVRQQVAEEGIPRLGAEAARKAIDDWGKPASSITHIVFATTSTGCLPSADVVLIKLLGLPLSTKRVMLYQAGCFGGTTALRVAKDIAESNHGARVLVVTSEVMSLVIRGPSESHIGNLVGQAVFGDAAGAVVVGCCPTADERRPVFELVRASQDVIPGTDDAVVVKVRQEGVVITMHRDVPLHVSNAIGGVVKSTFHEIDMKITSYNEAFWLLHAGGRGIVDGVEERLGLGGEKLAATREVMRQYGNTRSSTIFLAMEEMKRRSEERGMATAGEGLEWGMLIAFGPGLTLETMLLRAVPRNS

SEQ ID NO: 31916 - protein, 280 aa, Oryza sativa; identical to SEQ ID NO: 31660

SEQ ID NO: 31917 - protein, 241 aa, Oryza sativa
MDGGGGGGGGGFGLGGLQWTAEEASTIGGIATVSLLHSFIPTHWLPFSIVARAQRWPLSRTLLVTAFGGVLHVVSTALLGITAVTMANTIAGEETVHKLASLLLIVLGGSYILLFALGKGGHGHAHNHPMEKMAVAGLVLVPALSPCATTLPVFLAVGNSSSMMILAIIVLLFSTITVMTSLVALSFYGASQIKFHWVERYDKILVGSVLCLVGVLTYVFHHHDGDEHSLHEHVHRKLVGL

SEQ ID NO: 31918 - protein, 329 aa, Oryza sativa
MSSALPETFKAYTYARYGPLEDVLECSQLTQQPLPSPSHVRVKVYSASLNPIDYKVVETYGAKYTGGTPTQESPFRIGFDFAGEVVEVGAEATAFKVGDAVYGKAARDAAGSLGEFLVTHAELLAHKPTTVDFDHAAGVPGVALTSYQALREHAKLQPGERVLVLGGSSSTGIFGIQYAKALGAFVVATTSTKNVAFVQALGTDDVIDYRTQQWSKLVEAHSIDVVYDCGVEPTSWEDGAQHVLKKDTGRFVTLRRGLPHSDAKFGATYSAPFARPSGQDLAAIATLIDAGKIKLFIDSVFPLESTREAFARLKTERAVGKVIVQVATP

SEQ ID NO: 31919 - protein, 356 aa, Oryza sativa
MEEIDKLQRKLKELQEEDDRSILSPRQKAAAASLKKEKRLSTGRYPELQLPQHISRFSMSMISKATGNFCSGNLIGEGGYGPVYKGKLGGVAVAIKLLRPHGRQGFPEYKQEVVVLSRMEHPHIVRLMGVCPESCGLVYEHLPNGTLLDILSNSKSLSWKDRVRILGEQRSALAYLHSCRPHAIIHADLKLTNILLDAANSSRLGDFGTARAVHVKPLQDQADTICRRTNPMGTTGYMDPVFFVTGELTAESDVYAFGVVVLQVLTGLLDLNIADQVREALKMDAVHSVLDASAGSWPEVQAEKLLRLALRCCSLERKRRPAITCDAEWRSLDIMLRMANSPSKSRKWTSISIHAT

SEQ ID NO: 31920 - protein, 165 aa, Oryza sativa
MPPLATMSSPGSLLLLTPAVYQGIGRNRGGQSQEGQSISSSRSLKTKLSVSARAVSSCEASMRITCCANQTQTARRKSFSGPTSPPSGSVKEKVRSPKLDDGGTGFPPFRFGGGGGGGGGGGSNSAGGFILFVIVLLLDYLREFERNLQNGTRRGSDYDNGLAPQ

SEQ ID NO: 31921 - protein, 45 aa, Oryza sativa
MGVIKSPAVVFLVELDQLKEIYLDESEFKRRCSFVCFLLSLGMYV

SEQ ID NO: 31922 - protein, 334 aa, Oryza sativa
MSSYDQMLAPLLGAGRSAWTAHDGGGGGEAVVRQILKCTRWQLEETTDFVTCPYHYYCDSSYPGDYHAAVGVLVAAFAAYCFLSTLAFTVLDLARSGGGGGGAGGVRGIRRKYLLPSGPFLLPLVLLVLAKGQRINAVFPLAQLGPALLLLLQASALAFRNEADGDIRYAVLEASTVSGVLHASLYLDAVVLPYYTGLEALRWSQFSGECATCLCRMEPLVVGGTAVRYRGLSKTALAIIFALCSRMVCQIYGEERLSAWTRSALEAAGWVFVAADAVYLVGWVAIEGGAVAVLAYSLVAGLVFLSVFGKVYRFLAWLETRQSQWKSSLCHSAV

SEQ ID NO: 31923 - protein, 60 aa, Oryza sativa
MAFRCSGLRARRRRAGLREHRGSRSCGRPSRGGSSSSGFGLIGATTTTTTLVVRSIKRSN

SEQ ID NO: 31924 - protein, 272 aa, Oryza sativa; identical to SEQ ID NO: 30793

SEQ ID NO: 31925 - protein, 233 aa, Oryza sativa
MDAGDAWGRSSSSSSSAAAAARRLQARYDLYMGFDDADAAGVEEVEARGGGEAYNCPFCGEDFDFVAFCCHVDDEHAVEAKSGVCPICATRVGVDLIGHLTMQHGSYFKMQRRRRVRKISSGSHSLLSLLRKDLRDGSLQSFLGGSSYVSNPPAAAPDPFLSSLICSLPVAEPSKDLHSDSSDNNFLLNKFPDDKTAERAEPSLSEKDQKERAQRSKFVRGLVLSTIFEDDNL

SEQ ID NO: 31926 - protein, 444 aa, Oryza sativa
MQTEVIGKELFGLLKEQHGKGFQSFIDEKVVPLAADMMHQNLGLEESTLQELAKDLNIIVNGAATTNFYERYDVALDVNVMGVKYLCQLAKKCANLEVFLHVSTAYVCGERSGVVQERALREGETLREGTYLDIETELRLVGEQRQQLEDAGDAKAERKAMKDLGLARARHFGWPNTYVFTKAMGEMMLQEQLVAGAGRRHGIPVVIARPSIITSVHRDPLPGWIEGTRTIDAIIIGYAKQSLSCFLADLDLIMDVVPGDLVVNAMMAAMVAHSRGSSSEMAVYHVTSSMRHPAAYAVLYRTGWRYFLENPRVGKDGVAVRTRPVYFFRTIASFRAFMAVAYALPLQLLRLLSLLCFGLLFARRYADLSRKYSFVMQLVDLYGPFALFKACFDDLNMEKLRLSMATPPSSAAAALFNLDPKNIDWDDYFYRIHIPGVMKYVLNK

SEQ ID NO: 31927 - protein, 215 aa, Oryza sativa
MEKAACNEHVIGIPVSNRAFGIEEPDFPSEGAAAYHAEAKSSATARTSSRFGRTGDRLAQGIKEHVTLGPKLYETMKGKLTLGARILQAGGVEKVFRRWFAVGKGEKLLRASQCYLSTTAGPIAGMLFISTERIAFRSDRSLALTTPSGDTVRVPYKVAIPLRRVKTAKPSENKHRPEQKYVQVVTDDGFEFWFMGFVSFQVTLKNLELAVAQAQ

SEQ ID NO: 31928 - protein, 328 aa, Oryza sativa
MAVVKCIRVHELGGPEVLRWEQVEVGEPKEGEIRIKNTAIGVNFIDVYYRQGVYSAPLPFVPGREAVGVVTAVGPGLTGRKVGDVVAYAGNPMGSYAQEQIIPASVAVPLPPSIDHNTAAAIMLKGMTAHVLLRRVYKVQSGDCVLVHAAAGGVGSLLCQWANALGATVIGTVSNEEKAAQAAEDGCHHVIIYTKEDVVTRVKEFTAGKGVNVVYDSVGKDTYKGSVECLAWRGMLVSFGQSSGRPDPIPLSDLASKSLLVTRPSLMHYTATRDELLESAGEVFANVGSGVLRIRVNHTYPLSQAARAHADLQARKTTGSILLIPDDA

SEQ ID NO: 31929 - protein, 334 aa, Oryza sativa
MAFSSRAVVAVASVALLVAALASTAAAEGNPVEYTESYYDNTCPNAQNIVRSVMERSVAANPRMAPAILRLFFHDCFVNGCDGSLLLDSTDSTESEKEEKANASLAGFDVIDAIKSELERSCPATVSCADVLALASRDAVAMLGGPSWGVLLGRKDSRFVTKNATEELPDPRNGHLDVLLGVFREHGLDERDLTALSGAHTVGKAHSCDNFEGRIDGGEGYDDIDPSYAAELRRTCQRPDNCEEAGVPFDERTPMKFDMLYYQDLLFKRGLLATDQALYTPGSWAGELVLTYSRNQEAFFADFARAMVKMGNIRPDPWTPTEVRIKCSVANGHY

SEQ ID NO: 31930 - protein, 223 aa, Oryza sativa
MALSLTTAFSHLSLPSTSKFHPLPLLHLRFPSSSSSRRAARLALAASAAEAAEPVEVEEAPAEDGADEVVAVEDELSGPALRKYVKQRLPGGFAAQRITATGRRKTAIARVVLQEGTGRVFINFRDAKEYLQGNPMWMEYCKVPLVTLGFENSYDVFVKVHGGGLSGQAQAICLGVARALVKISTANKVTLRGEGLLTRDTRIVERKKAGLKKARKRPQFSKR

SEQ ID NO: 31931 - protein, 404 aa, Oryza sativa; identical to SEQ ID NO: 31169

SEQ ID NO: 31932 - protein, 443 aa, Oryza sativa; identical to SEQ ID NO: 30037

SEQ ID NO: 31933 - protein, 365 aa, Oryza sativa
MAGAWRRWPVVVAAAVVLAVAAPVQAAPQVPCYFVFGDSLVDNGNNNDIVSLARANYPPYGIDFAGGAATGRFSNGLTTVDVISKLLGFEDFIPPFAGASSDQLLTGVNFASAAAGIREETGQQLGARISFSGQVQNYQSAVQQLVSILGDEDTAAAHLSQCIFTVGMGSNDYLNNYFMPAFYNTGSQYTPEQYADDLAARYAQLLRAMYSNGARKVALVGVGQVGCSPNELAQQSANGVTCVERINSAIRIFNQKLVGLVDQFNTLPGAHFTYINIYGIFDDILGAPGSHGLKVTNQGCCGVGRNNGQVTCLPFQTPCANRHEYAFWDAFHPTEAANVLVGQRTYSARLQSDVHPVDLRTLASL

SEQ ID NO: 31934 - protein, 242 aa, Oryza sativa
MAMDPLGSYCSGNSLAGSSKAVASINSVLTDLVTKGSTGVGFATSTAGKGNNVIYGLVQCRGDVSTSDCQACLASAANQILTSCNYQSDSRIWYDYCFMRFENENFFGQADTDNGVIMENVQAMDNAKAFQKAVGKVMSKATAQVSQAGSGGLGRVKDQYTPFINIYGFAQCTRDLSPLTCAQCLSTAVSRFDQYCGAQQGCRILYSSCMVRYEIYPFYFPLATSSTATTDMTKYTKTIVHH

SEQ ID NO: 31935 - protein, 415 aa, Oryza sativa
MASAFSPATAAPAASPALFSASTSRPLSLTAAAAAVSARIPSRRGFRRGRFTVCNVAAPSATQQEAKAAGAKESQRPVYPFAAIVGQDEMKLCLLLNVIDPKIGGVMIMGDRGTGKSTTVRSLVDLLPDIRVVVGDPFNSDPDDPEVMGPEVRERVLEGEKLPVVTAKITMVDLPLGATEDRVCGTIDIEKALTDGVKAFEPGLLAKANRGILYVDEVNLLDDHLVDVLLDSAASGWNTVEREGISISHPARFILIGSGNPEEGELRPQLLDRFGMHAQVGTVRDAELRVKIVEERARFDRDPKAFRESYLEEQDKLQQQISSARSNLGAVQIDHDLRVKISKVCAELNVDGLRGDIVTNRAAKALAALKGRDTVTVEDIATVIPNCLRHRLRKDPLESIDSGLLVVEKFYEVFT

SEQ ID NO: 31936 - protein, 209 aa, Oryza sativa
MSKMAEEKVLAAPATVDGGMQSSGDLQASSAAAARVRPVETLLRAAPLGLCVAAMAIMLRNSVTNEYGTVSYSDLGGFKYLVYANGLCAAYSLASAFYIAVPRPATLSRSWVVFLLDQVFTYLILAAGAASAELLYLAYNGDKEVTWSEACGVFGGFCRQARTSVAITFASVACYILLSLISSYRLFSAYDPPQPSLGNKGVEIAAFPR

SEQ ID NO: 31937 - protein, 474 aa, Oryza sativa
MAAMYRPDPANPAARRPRLVVLLLVAFFALQLLVFLAFRGAPSPSSPDAAVDRVPVSARRDGEDSGCVGGLVYVYDLPPVFNEDLLALCEVLAPMYSLCPYLANDGLGFPAKGGNQSEFPPAELVGSWYSSDQFALEHIVHRRLLSHRCRTTDPARATAFFVPFYAGLAVGRHLWATNATDADRDRDCLALLSWLHAQPYYKRSNGWDHFIALGRITWDFRRSPDGGWGGSFLLMPGLANTTRLVIERDPRDAMDVGIPYPTSFHPRTAADVRAWQQYASSRSRPKLFAFAGAPRSAIKGDFRGLLLEECQAAGDACGALDCGEGRCIKQNELVMELFLGARFCLQPRGDSFTRRSLFDCMVGGAVPVLFWRRSAYRQYGWYVPVGNSQEEEWSVFIDRDELRAGNVTVRGVLAAIPEAKVREMRNRVVEMIPKLVYSAADKEGLGDGMKDAVDVMIDGMLRRAAEQRRSWRKV

SEQ ID NO: 31938 - protein, 305 aa, Oryza sativa
MDSCKRHLETMRRCRTDASNAWRTAAWVRVPYPFQWGPPTFHFKTSIIMVIVSLVASVDSLSSYHATSLLVNLSPPTRGVVSRGIGFEGISTLIAGVWGTGTGSTTLTENIHTLENTKMASRRALQFGAVLLVIFSFFGKIGALLASIPVALAASVLCFTWALIVALGLSTLRYTQAASSRNMIIVGFTLFISMSVPAYFQQYEPSTNLILPSYLLPYAAASSGPVRSGSNGLNFAVNALLSINVVVALLVALILDNTVPGSRQECGVYIWSDPNSLEMDPASLEPYRLPEKISCWFRWAKCVGI

SEQ ID NO: 31939 - protein, 333 aa, Oryza sativa
MAAEEILELSNGRITAKIAAWGATITSLIVPDAHGNLADVVLGFDTLEPYMKGISPYFGCIVGRVANRIKEGKFTLNGVEYSLAINNGPNSLHGGLKGFDKVVWDVVERKSECPSITFQYHSKDGEEGYPGDVTVRATYSLPDSTTLRLDMEAVAENKATPINLAQHTYWNLAGHNSGDTLDHSIQIWGKHITPVDENTIPTGEIMPVKGTPFDFTTEHKIGARINDVPGGYDHNYVLDSGEEKNGLKHAAKLKDSSNSRTLDLWTDAPGMQFYTANYVDGVTGKGGAVYGKHSGVCLETQGFPNAINQPNFPSVVVQPGEKYKHTMLFEFSA

SEQ ID NO: 31940 - protein, 351 aa, Oryza sativa; identical to SEQ ID NO: 30199

SEQ ID NO: 31941 - protein, 318 aa, Oryza sativa
MACSLLPPLAPVSPPPRLLLPSSRSALLPRGPRVAPRVPVSPPRALPDTAVGAAEALRGALADAFLASPPTWRSAAVSNLAIFVAGSPVLLSGLSASGFAAAYLLGTLTWRAFGPKGLVLVASYFVLGTAATKLKIKQKEALGVAEKRGGRRGTGSVIGSSAAGCVCALLSIYNVGSAALAELWRLGFVASYCTKLSDTVSSEIGKAYGRTTYLVTTLKVVPRGTEGAISIEGTLAGILASIILASVGYLLGQVNVSQGAVCVLASQIANFCESYIGATLQDKEGFEWLTNDVVNVLNISTGGILAVLMQQLLVSWRS

SEQ ID NO: 31942 - protein, 310 aa, Oryza sativa
MAYRVLEVTLHSARDLKNVNFISRMEVYAVATISGDPLTRQCTPPDPYGGRHPAWNATLRFTVPPTAASAAGCLHVLLRAERSLGDRDIGEVIIPLADVLSGPYDLGARPPQFASYQVRKLHRSETRGVLHLSYRLGPVVAPQSVFAYPAPPPPPPQLFETAPPSPPYVPPPPDAYLRKPSPPSPPPAKLSPPPPPQTQTQPLAKPPAPATPSRAGGHVAALAPPAVAKADRHVSTPSPAKADWQMVGTPTATKGASKHGSLEFERGLNAGLVGGAIGGMLVGTEMVSDAAFYHAGYRAGLADRDGWAVY

SEQ ID NO: 31943 - protein, 287 aa, Oryza sativa
MLHLAGALRIVDKFWVVGYSAGSIHAWSALRHIPDRVAGAAMFAPMANPYDSKMTKEERRKTWERWSTKRKLMHILARRFPALLPLFYHRSFLSGKQGQPESWLSLSLGKKDKTSLESPMFNAFWEKDVAESVRQGDAQPFVEEAVLQVSDWGFSLSDIQMQKREDLSFFELIKSLFRQAEREWVGFLGPIHIWQGMDDRVVPPSVTEYVRRVVPGATVHKLLDEGHFSYFCFCDECHRQIFSTLFGIPQGPINPVPEPIEVASELTEETTVPDKAKEEEQDISDLA

SEQ ID NO: 31944 - protein, 131 aa, Oryza sativa
MSRRLGAAAAVLLLWLAVLTFALHGYYGGRLGSARRRNILLQHPALALHLPTRKMLLAVASFDDASSPSSLTTTDRHHHHHRHHGHHHHRGHDRWNRKGVPPTAAGPGEEVDPRFGVQKRLVPTGPNPLHH

SEQ ID NO: 31945 - protein, 356 aa, Oryza sativa
MASLTDLVNLNLSDTTEKIIAEYIWIGGSGMDLRSKARTLSGPVTDPSKLPKWNYDGSSTGQAPGEDSEVILYPQAIFKDPFRKGNNILVMCDCYTPAGEPIPTNKRHNAAKIFSSPEVASEEPWYGIEQEYTLLQKDINWPLGWPVGGFPGPQGPYYCGIGADKSFGRDIVDSHYKACLYAGINISGINGEVMPGQWEFQVGPSVGISAGDQVWVARYILERITEIAGVVVSFDPKPIPGDWNGAGAHTNYSTKSMRNDGGYEIIKSAIEKLKLRHKEHISAYGEGNERRLTGRHETADINTFSWGVANRGASVRVGRETEQNGKGYFEDRRPASNMDPYIVTSMIAETTIIWKP

SEQ ID NO: 31946 - protein, 319 aa, Oryza sativa
MSSLNSLFNRSTFGTKCKTCLNLVISRIKLLRNRRELQLINMRKEMVQYLQTGQESIARIRVEHIIREQNILAAYEIVELFCEFVLARVPIVEVQKECPFELREAIASIIFASGRCSDLPELMHLRTLFTTKYGKEFVAAAMELRPDSGVNRTIIEKLSVKAPSAESKLKVLKAIAQEYGLEWDSSNTEAELNKKYEDLLDGSGSSARQGQLPIIENSPVASISRDMPSLSISPVEDTGKYQAAPQSPSSPAGSAVMHAATKSNMVSQEHHRSPADEISCATPSSSDVLEKARAAIAAANRASAAARAAADLVKVKITS

SEQ ID NO: 31947 - protein, 108 aa, Oryza sativa
MAEKLGPEKRHAFVHNGQKVFEWDQTLEEVNMYIELPKGVPTKLFHCAIQATHVEVGIRGNPPYLNHDLTLPVKTDSSFWTIEDGEMHITLQKKREGENMVISNTRPR

SEQ ID NO: 31948 - protein, 61 aa, Oryza sativa
MVKCCLEDDGIEEEEIAKEKILLLLPSAQVTETNVDLVTEKIQDDVFFFFARFNICLYYTH

SEQ ID NO: 31949 - protein, 63 aa, Oryza sativa
MQRLSVVLCWAQSWPLQPSLPSSPLGLISSYLEPNHLWIKMIFVMYKSLNMFSVSYNTNWLKQ

SEQ ID NO: 31950 - protein, 241 aa, Oryza sativa
MEIEPPAFMGCAPNGGPACLTQLKRWASGFLEILISRNNPILTTTFKSLQFRQCLAYLHSYVWPVRAPFELCYALLGPYCLLSNQSFLPKTSEDGFYIALALFIAYNTYMFMEFIECGQSARACWNNHRMQRITSASAWLLAFLTVILKTLGFSETVFEVTRKDKSTSDGDSNTDEPEPGRFTFDESTVFIPVTALAMLSVIAIAVGAWRVVLVTTEGLPGGPGISEFISCGCWCCASCHC

SEQ ID NO: 31951 - protein, 152 aa, Oryza sativa; identical to SEQ ID NO: 31057

SEQ ID NO: 31952 - protein, 243 aa, Oryza sativa
MGQSKKKFRGVRQRHWGSWVSEIRHPLLKRRVWLGTFETAEEAARAYDEAAILMSGRNAKTNFPVARNATGELTPAAAVAGRDGRVGGGSGSSSSMTANGGGNSLSQILSAKLRKCCKTPSPSLTCLRLDPEKSHIGVWQKRAGARADSSWVMTVELNKDTAVSSAATVAAATAVSSSDQPTPSDSTVTTTSTSTTGSPSPPPPAMDDEERIALQMIEELLGRSGPGSPSHGLLHGGEGSLVI

SEQ ID NO: 31953 - protein, 216 aa, Oryza sativa
MARVQLWVAAACAVVLALAAPSLAGDPDMLQDVCVADLASPVKLNGFPCKANVTADDFFFAGLKNPGNTNNPAGSNVTAANVQSFPGVNTLGVSMARIDYAPGGQNPPHTHPRATEIIFVLEGVLEVGFITTANKLFTKTVTAGEVFVFPRGLVHFQQNRGHGPAAVIAAFNSQLQGTQAIAATLFAAAPPVPSDVLAKAFRVDVPQVDAIKAKFK

SEQ ID NO: 31954 - protein, 278 aa, Oryza sativa
MEGERRAVRTVRVRNISDLAGEREVREFFSFSGEIEHVDIRCDGVATGRTAYVTFKDPKALEIALLLSGATIVDRVVNITPAEDYIYIPVTDQQLVVSEVVGEVTSTAPNADLDQPTEANASPTTGRVYVSKAHDVMTTVIARGSAMRQDAVNKAKAFDEKHQLRANASAKINSFDKRVGISEKINSGITVVNEKVKSVDQRLHVSDKTMAALLAAERKLNDTGSAVKTNRYVSAGTSWLNGAFSKVAKAGHVAGSRTREKFQIAVSNLTAKGPAVVA

SEQ ID NO: 31955 - protein, 238 aa, Oryza sativa
MTRLAAAALRRATAASGIPSSSSRSSVLAPFAPRLFSTEASGETPAAGAAAQGSQDEPFFKPSDEGVAYGRFYSVIPGGSRLPKSMLKTDIIHHLDKSELSLDDVKIDYNRGYYPVGALLRFSSVPLFNTAVRQTREGRQYRLEMISREEFDLKQSYDGKAILLQGVPRNAVPEDIERFLCGTNVEPPPFESFLRPGVPDPIRVVLVKFRSRTDAANAFITKNRGFCLNNPVSMRVLQ

SEQ ID NO: 31956 - protein, 224 aa, Oryza sativa
MSFIFGKRKTPAELLRENKRMLDKSIREIERERQGLQAQEKKLIAEIKKVAKQGQMGAVKIMAKDLIRTRHQITKFYALKSQLQGVSLRIQTLKSTQAMGEAMKGVTKAMRQMNRQMNLPALQKIMREFEIQNEKMEIVSSTMNDAIDDALEGDEEEEETEELVNQVLDEIGIDVNSELVGAPSTAVAAPVGAGKVAAQVEAAGGGDGGIDDDLQARLDNLRKM

SEQ ID NO: 31957 - protein, 319 aa, Oryza sativa
MRSIRAAQALASRSLLLSSRALHGDAASTAAAAAGGGRLGVQPSPPSQASSSSSSRAMPAGIAGAVSFSLTFATMAAAEAKERPPMDLLPQNVVLYQYQACPFCNKVRAFLDYHDIPYKVVEVNPLSKKEIKWSEYKKVPILMVDGEQLVDSSDIINILQQRVRPDDKATNEEEEKWRRWVDEHLVHVLSPNIYRTTSEALESFDYISKHGNFSFTERFAVKYAGAAAMYMVSKKLKKKYNITDARASLYDAANTWMEALDGRDFLGGSKPNLADLAVFGVLRPIRYLTAGKDMVEHTQIGDWYQRMEDAIGEPSRIQE

SEQ ID NO: 31958 - protein, 49 aa, Oryza sativa
MSVKMRTTCTWTERPYEALLFPGIGFGPFLRSLGGRRRRPPSGGGPSHQ

SEQ ID NO: 31959 - protein, 269 aa, Oryza sativa
MAATSATEVSSPWLFTSFESARRNSSAVVTFDMNSLSPVAEIGRKEVYGADVEAAIPASRLSWLGRHNLLLAAGSHSGPAGVVGDICLWDVRASATVPVWELREKEDCFADIAASEALSSLFKVGAASGEVFMADLRMLGGGGISIEPWVCIGDGQRAAAAASAGRKEGNGCRIECYLNWVFVARGGEVEVWTQVELAQEAGGKKLMRRNWVGNGPSFVIAGGSGHESVKEKTKIVSWAFGGSRMALARDDKRSIEVWDSAPAAISFNP

SEQ ID NO: 31960 - protein, 367 aa, Oryza sativa
MYLVKDIGGAIALMGVSLVLLGTWPVVLAVLERRGRLPQHTYLDYSITNFLAALLVAFTFGQIGADTPETPNFLTQLTQMQDNWPSILFAMSGGIFNGLGTLATQYGWAFVGLSVTEVMASSLKVVIGTTLNYFLDGRINKAEILFPGVGCFLIAACLGSLVHSSNAADNQEKLSSAMVNHSNTNGDTENEELTKHLLEIEQPKDCEEQEPEVAPAAQAVEKLEAGTADFLVDLEGKRSIKVLGSNTFLGLGIVTFAGVSYSLFSPAFNLATNDQWHTLGEGVPHMVVYTAFFYFSLACFAIGIALNIWFLYHPMVGVPRSSLTAYLKDWKGRDLALLMDMTEKHQKKKKKLHMYSSIDLTTSVCSS

SEQ ID NO: 31961 - protein, 238 aa, Oryza sativa; identical to SEQ ID NO: 30619

SEQ ID NO: 31962 - protein, 187 aa, Oryza sativa
MALTVRLHTAVAAVAVAVVVAMGMAAAQMSPAGAPAPAGGISPACMDAVLNMSDCLTYVMNGSTARKPDEPCCPELAGLLESKPVCLCQLLAGGASSYDISVDYKRAMALPGICGLAAPPVTACALLGVPVPMAPSASPMAGLGPSTEPQMPEKSPSASPSESSNHAPGRFTALAAVVLAVAAAGMV

SEQ ID NO: 31963 - protein, 212 aa, Oryza sativa
MAFWEDWGKGDCDCGWKKCLIWTAAIAGVGGLIVLLVFAFALVFPPKATADDAVLLRLALSPGSPPSNSTVSYNATVTLSLRNPNLYRGISYDPVAVAFSFNGTRFDESATVPAFYHRPRKTATFHVTVGGAGKPVPKLTAAGVAAFRAENATGRFEVEVRLDTVMQYKARKARCPLAVICPLQLQLVDPDVAATAFQRTKCTVLRAKKSGC

SEQ ID NO: 31964 - protein, 305 aa, Oryza sativa
MASSSPPVRPWADLQHDLLVMIMSRVGLPDLLSGGATRACSAWRASARDPLVWRRVDLRDWAVLTSARRRLAAGDGEAAAAGRGRVPLQAALCSVLEIVVRRAAGRMEALLLPEFADEEHLLFLAQRNPNLHYFSLPATCITYDQFRKAIDKLQFLKGMAVDEGLINHDVLSHVHQCCPDFLELKVFALYVDEEMASIICNSLPRLKKLEIPNSDMSCAAIIKFLDCLEELEYLDISGYETSAISSAVLQKASRLNIFIWNSKFELGEFTDCSNCGEHCINPQEPCKCVMEHRVMDWLAGPSQPS

SEQ ID NO: 31965 - protein, 212 aa, Oryza sativa
MVEKTKLQLPLVHNERLWARPWRWAKTVFFLVSMLASLLLVCAPPLLIVVLDLLLPPALLSNFHRAANHPTSLIDQARGFHFRSSLVDLPAVSAARSLLILCAYTACGGGAAYLWVAVACSVGSVCYVVAKAAVVFGAAPDRAVLGLQGKGQLVAVEAMFLMSLALAAAHIAMAYRASCRERRRLLVYRIDVEAVRLKGGQTPKSLKQQFAV

SEQ ID NO: 31966 - protein, 378 aa, Oryza sativa
MASALGAQASVAAPIGAGGYGRSSSSKGSNTVNFCNKSWIGTTLAWESKALKSRHMNKIFSMSVQQASKSKVAVKPLELDNAKEPPLNLYKPKEPYTATIVSVERLVGPKAPGETCHIVIDHGGNVPYWEGQSYGVIPPGENPKKPGSPNTVRLYSIASTRYGDSFDGKTASLCVRRAVYYDPETGKEDPTKKGICSNFLCDSKPGDKVQITGPSGKIMLLPEDDPNATHIMIATGTGVAPYRGYLRRMFMEDVPSFKFGGLAWLFLGVANTDSLLYDEEFTNYLQQYPDNFRYDKALSREQKNKNGGKMYVQDKIEEYSDEIFKLLDGGAHIHFCGLKGMMPGIQDTLKRVAEQRGESWEQKLSQLKKNKQWHVEVY

SEQ ID NO: 31967 - protein, 132 aa, Oryza sativa; identical to SEQ ID NO: 29710

SEQ ID NO: 31968 - protein, 238 aa, Oryza sativa
MGCLVEEGNAVAFLGPLMRAAERGCLQVVEWFVNLGCRDMELCLALTAATSSSQVAVAAYLLPLVPKHVLAPLSVEILKAAGERSTGSLHGVDFLLRSNFLNDPAATYAVADNIAKSADEAVDAKLRSFMLEHWSEAAFSEGFASAQEHFVNFMRIMEKGESPICLRDLPLELVIAMAYLPLYRECVESGGRLLPQKLRGQLVEAAGRLEGRQLDRASQGTELLAILEHHLPCFMIQT

SEQ ID NO: 31969 - protein, 206 aa, Oryza sativa
MAMVPADADAAAKPPPDVEKPDYSSQNGAPNSAAAAAGGGGGGVVDSVVARWRREDMLDKSPLALHAAAAAFAFVALVLVASNQHGDWMEFDRYQEYRYLLAIAALAFAYSLAQALRHALRMRRGVDPVPTASGRLLDFASDQVVAYLLMSALSAATPITNRMRSAVINRFTDTTAAAISMAFLAFVSLALSAIVSGYKLSKQTYM

SEQ ID NO: 31970 - protein, 298 aa, Oryza sativa
MSTAAPASATAAASLFLRRSLSSSSPRHVFLPHWVAPIVVARPARLSAVPAKRGGGGVVAAASAAAGSAQFGAGDSENPYEILGISPLDGFDQVKMAYKRRRKDAESNKDAEHLFKLERAYDMVMMEQLQNRKNGVAYGSIQVSKDIKYADNQPVVPWGPRYSRSTGKDLRINMAISATFIMYISTMGHADWKPMQFLCFAYFYRILDKLKATESASTPIYNEYGEVEGRGIHMAKRVLRSLGLVLGSILAVSLGYTGLANFSQFLGQYIPSVVYNFQELIVTTASSVLLCILASYYR

SEQ ID NO: 31971 - protein, 118 aa, Oryza sativa; identical to SEQ ID NO: 30163

SEQ ID NO: 31972 - protein, 328 aa, Oryza sativa
MAAAPGEVSGGQGNGGVTAIAELTISSLPLETRCAPFPLRQHGGFWLPETFLPGLEAARARFEPRPSDVLLASFPKSGTTWLKALAFATLNRAAYPPSGEGHPLRRRGPHDCVQFLESALVVSDDMFASLPSPRLLSTHLPYSLLPEGVKADSSGCRIVYICRDPKDVLVSWWLFTKKALGTQDGPTNGGNKPMLSNGPYWRHVLEYWAESKRRPQKVLFLRYEEMTRETTSNVRKLAEFMGCPFSGEEEADGVPDAIVGLCSFDHLRSLEVNRNGANDFNIKNDSFYRKGVAGDWANYLSPEMAAQLDLVIDDELRSSGFSFATGGR

SEQ ID NO: 31973 - protein, 509 aa, Oryza sativa
MDAKLLLLPFPSPPATLHHHPPPPKSLFLGASLPLLHPPPPLRLLRPGAPRRLAVVAQAAVKRRKEIPFDNVIQRDKKLKLVLKLRNILVSNPDRVMSLRDLGRFRRDLGLTRKRRLIALLKRFPGVFEVVEEGVYSLRFRLTPAAERLYLDELHLKNESEGLAVTKLRKLLMMSQDKRILIEKIAHLKNDLGLPPEFRDTICLRYPQYFRVVQMDRGPGLELTHWDPELAVSAAEVAEEENRAREEQERNLIIDRPLKFNRVKLPQGLKLSRGEARRVAQFKEMPYISPYSDFSHLRSGSAEKEKHACGVVHEILSLTLEKRTLVDHLTHFREEFRFSQSLRGMLIRHPDMFYVSLKGDRDSVFLREAYKNSQLVEKSKLVLLKEKMRALVAVPRFPRRGVPATSEEADRTNGAAQMLSEGSDVEDDEDEGLSDMEDLISEISGGKSDTDYHWGDGWVGENDDSPPDFEDDDGSSLKEVKVTMKKTANSANGKAHVPVFPDGRPRERW

SEQ ID NO: 31974 - protein, 298 aa, Oryza sativa
MTSAQTTSSTISRTYHTDTDSPYALPNDHIEVSRLHEQHEAVLDLMHGRPVHAPLQNPRKILDIGCGVNADMTILLSKMYPSAIVYAVDISPIAVCLPSNVVFIHGNITTMVAQKDPRLPVGEFDYVFSRFLIGAVKNWSDWIHNTIGPLLAPGGWMELHDSPHFEWYNRKTGEHVSRDWKWLQIYQQHAEKHGLGGYVGRQLKSELPDILHRAPTGLEDIQSRWYQTPWAPVPGRPETEKFVTYALGTLKDTFSAAVDKIVPAEQLEEVIKGIQETMGRRMEDVYMPILVAWAKRID

SEQ ID NO: 31975 - protein, 167 aa, Oryza sativa
MQDGILFDNILIADDEKVATSILEKSWKPKYEVEKEKEKAEEAAAAAGDGLSEFQKKIFDVLYKLADIPFLEPYKTKIIDVIEKGEKQPNITIGILVSIVVVFVTVLFRILFGGKKPAAPVKPVAEVKKPKSTESEAAGSSGGKEDEKEEEEKDGAAAPRRRSRRET

SEQ ID NO: 31976 - protein, 240 aa, Oryza sativa
MAEEATLSHPSRYVKLSREHDAPAPAEDIRPGELNQPVHVPQLEGRRCSECGQVLPESYEPPADEPWTTGIFACTDDPQTCRTGLFCPCVLFGRNIEALREDIPWTTPCVCHAVFVEGGIALAILTAIFHGVDPRTSFLIGEGLVFSWWLCGTYTGIFRQELQRKYHLKNSPCDPCMVHCCLHWCANCQEHRERTGRLAENSAVPMTVVNPPAVQEMSMAESRGPVSPGMENGAPSNSKG

SEQ ID NO: 31977 - protein, 280 aa, Oryza sativa
MASPSRRSHHCCLVLVALSLAAMLLPMAMATTISMSPIGTFCWNPSYNEMSSGEAIARRRSINSVVSDLAAKARAGGGFATSSAGRGIDAFYGLAQCRGDVSGGDCDACLAQAAKQMVTNCNYTLDSRIWYEYCFMRYVDFNFFGEMDTRTDASVTLRQWPDMDNPMAFQKAVGKATGKAVAHAVTMGSGGLGRAKEQCTSFVNVYALAQCTRDLAPPLCAQCLSTTVSKFAEACGSGQGCQIDYSSCWVRYEIYPFYFPLEANRQAPTDLTKYTKVTMH

SEQ ID NO: 31978 - protein, 378 aa, Oryza sativa
MASCWEQLQGLCAAGHLRRRCRGRSLVLLQQLQLLGVLVVVVAGVAPGISEAQVRSRFKAIFMFGDSIVDPGNNNGQLTEARADFPPYGQDFPGGVATGRFSNGKVPGDLIASKLGIKELLPAYKDQDLELNDLLTGVAFASGGSGYDPLTSISTAISSSGQLNLFSDYKQKLTSLIGEEAMTRILSEAVFFTVMGANDLLNNYFTLPVRRHQYDIPGYVDFVVSNAVNFTLTMNEMGAKMIGFVGVPPLGCCPSQRTGPSRECEPLRNQASELFNTRMKQEIDRLNVEHNIDGLRVVYFDIYYNLLDLIHNPGYYGFKDTSDGCCGNTVLNAAIFIKYHSACPNVYDYIFWDSFHPTEKAYDIVVDKLIQENKQYLM

SEQ ID NO: 31979 - protein, 251 aa, Oryza sativa; identical to SEQ ID NO: 29041

SEQ ID NO: 31980 - protein, 43 aa, Oryza sativa
MWGWQSQECDLQKDLLTEDAADPSSCLWSEANQNASDAWTMFD

SEQ ID NO: 31981 - protein, 326 aa, Oryza sativa
MELLLVLLLAVTCSPAMADVVSYSFAAVGGGRAASNGLVVATNSSILSPATFLFDAQLFPVFNESDGFLLLADTLQLWRAAAAGMPPALDASFNTTFTFLSSAVAFVVLLDSFPPLASHRGVSAPTDGGAMTTTNPNATSSLATVEVGTVNSYGRRSPNVGLNVTVSANRTAAPHGLTVWIEYSAVEHHLWVYVAAAGEARPAKSVIDLPLNLPGRRITQRAFVGFFAGTVRDAVLGIRDWNLTVDRFPGDGRRRGEDVDEQVKKGTPPSRWLVALLAVLGAVAAVVTVASVVVCYMVSRRRALETERIRQYTKYYFPAGGRPGSN

SEQ ID NO: 31982 - protein, 219 aa, Oryza sativa
MRARLTNGEPEKPLILYVGRLGVEKSLDFLKRVMDRLPGSRIAFVGDGPFRAELQLMFTGMPAVFTGTLQGEELSQAYASGDVFVMPSESETLGFVVLEAMSSGVPVVAARAGGIPDIIPEDQEGKTSFLYTPGDVDDCVSKIERLLTCEELRETMRKAARKEMEKFDWRAATRKIRNEQYSAAIWFWRKKRAQLLRPIQWVSRRLFRPTPAPSTMNQS

SEQ ID NO: 31983 - protein, 132 aa, Oryza sativa
MSRSLGIPVKLLHEAAGHVVTVELKTGEVYRGSMVECEDNWNCQLDNITFTAKDGKVSQLEHVFIRGSRVRFMIIPDMLKNAPMFKRLEARIRGKGSAIGVGRGRAVAMRARAAAGRGGGPVGRGGAPPVRR

SEQ ID NO: 31984 - protein, 66 aa, Oryza sativa
MPSSLALPAAAFSPSSPAMVARGLSLAAPQLPAHRCLSLDLASLSGEGRRSLGERRRRQPKAGAVA

SEQ ID NO: 31985 - protein, 343 aa, Oryza sativa
MLLAKPHLSSSSFLPSTRVSSPAPGPNHAKPIAASPAPRRCLRLAVTSAAAPAASSAEAAAALSRVDVLSEALPFIQRFKGKTVVVKYGGAAMKSPELQASVIRDLVLLSCVGLHPVLVHGGGPEINSWLLRVGVEPQFRNGLRVTDALTMEVVEMVLVGKVNKHLVSLINLAGGTAVGLCGKDARLLTARPSPNAAALGFVGEVSRVDATVLHPIIASGHIPVIATVAADETGQAYNINADTAAGEIAAAVGAEKLLLLTDVSGILADRNDPGSLVKEIDIAGVRQMVADGQVAGGMIPKVECCVRALAQGVHTASIIDGRVPHSLLLEILTDEGTGTMITG

SEQ ID NO: 31986 - protein, 267 aa, Oryza sativa; identical to SEQ ID NO: 30541

SEQ ID NO: 31987 - protein, 42 aa, Oryza sativa
MIASSILSASSYWMSSTLPPTASKPVSSIKVFFFSSSYSLFV

SEQ ID NO: 31988 - protein, 231 aa, Oryza sativa
MQAWFSGTGPSASSASSSSSPPQPSLLAEWNSYAAARSAEEEEDGGGGGFGIDIEAAVRSANDRVSGTFGVVSKGVLGLPGSFKSTTSSVPSSKSLVYFGLFLASGIFLVFIAFTIFLPVMVIMPQKFAICFTAGCAFIIGSFFALKGPKNQLYHMISKERLPFTMGFVGSMAATIYVSMVLHSYILSVFFSCLQVLALAYYAISYFPGGSAGMKFLSSALVSSVLRCFGR

SEQ ID NO: 31989 - protein, 245 aa, Oryza sativa
MHVDAGLPAGVVASRPGPFLAGSARFTATINGKGGHAAAPHHAVDPIVAVSSAVLSLQQIVARETDPLQGAVVSVTTIKGGEAFNVIPESVTLGGTLRSMTTDGMSYLMKRIREVIEGQAAVNRCTAAVDFMEDKLPPYPATVNDEEMYAHAKAVAESMLGEANVKLSPQGMGAEDFGFYAQRIPAAFFGIGVGNDGGGMAETTTKNQLHSPHFVVDEEALPVGAAFHAAVAIEYLNKNASGPSA

SEQ ID NO: 31990 - protein, 219 aa, Oryza sativa
MPPPMALSISSTAAATALLPTLPPSRSRLRVAPRRAAARVARVVSAGYAAGFYGGAAAAAGGENDEVGDEEGSSSGFGAGLGIGGGGLGMSAAEAALALEEREMPPCPPGLRQYETMVVLRPDMSEEERLALIQRYEELLVAGGAMYVEVFNRGVIPLAYSIRKRNSRTGLPSTYYDGIYLLVTYFTKPESLDALQMRLNADDDVIRSTSFKVRKRKAF

SEQ ID NO: 31991 - protein, 225 aa, Oryza sativa
MVLEALEAMSETEALNMKSALESKGEVEFKVCTLGKDVTIKKSMVSINMEKKKEHQRKFTPSVIEPSFGIGRIIYCLFEHCFYQRPGKAEDEQLNVFGFPPLVAPIKCTVFPLVKIEKFEVVAKKISKALTAAGISHIIDMTGNTIGKRYARTDEIGVPLAITVDNTTSVTVRDRDSKDQIRVEVDEVASVVKEVTDGQSTWADIMWRYPAHTASAAEEEEASET

SEQ ID NO: 31992 - protein, 262 aa, Oryza sativa
MPSAYDRVAACDKASDVLVFKTCAEMEGPYIEYVATQYDKPILVTGPLVPEPPHGELEERWETWLSSFPDNAVVFASFGSETFLPTAAATELLLGLEATGQPFVAVLNFPRSVDAEAEVKKCMAPGFEERVKGRGVVHSGWVQQQHILRHRSVGCYVNHAGFSSVVEGLVAGCRLVLLPMKSDQFFNAALLARELRVGTEVARRDGDGWFGHDAVRDAVNAAVADAGGGDDDERKWREFLTDDAVQRRFVEEFVRELRKLVL

SEQ ID NO: 31993 - protein, 256 aa, Oryza sativa; identical to SEQ ID NO: 30665

SEQ ID NO: 31994 - protein, 218 aa, Oryza sativa
MAKSRPPKRILESYTIKGSDKVIKPGDCVLMRASDTSKPPYVARVEAIEAAGSRGTNVRVRVRWYYRPEESMGGRRPFHGAKEVFLSDHYDVQSADTIEGKCNVHSFRSYTKLDSVNAEDFFCRFEYKSATGSFVPDRIAVFCKCEMPYNPDDLMIQCEECSDWFHPSCIGMTIKDAKKLEHFFCQSCTAENGKMAENSHEATAQSEEKQVESKRRRR

SEQ ID NO: 31995 - protein, 231 aa, Oryza sativa
MEAAAGAGAGLAEAANGGIESSAADPSTSGTASRLSVHRIAGGGKAADIILWKRGRVTIGVIFGATMAWWLFEKSGLSFLTVCSDVLLILIVVQFIRIKVAGLLNKQPRPLPELVLSEEMVSNAAASFRVKVNNMLMIAHDITLGKDFRLFFQVVLLLWLLSVIGNFCSSITLAYFGTIALVTIPALYSKNQEQVDRYAGMVHRNISRHYKIVDENVMSRLPRSFIRDKED

SEQ ID NO: 31996 - protein, 203 aa, Oryza sativa
MAANAGNKIRNAKLVLLGDVGAGKSSLVLRFVKGQFVEFQESTIGAAFFSQTLAVNDETVKFEIWDTAGQERYHSLAPMYYRGAAAAIVVYDITNPASFTRAKKWVQELQAQGNSSTVVALAGNKADLLETRQVQIEEAKTYAQENGLFFMETSAKTATNVNDIFYEIAKRLLQGQPAQNPQAGMVLSQRPNERLVSSASCCS

SEQ ID NO: 31997 - protein, 348 aa, Oryza sativa
MANKGGEPAARAAVRHGGGPVAFKDAVDVDATPVRPPTELAAAVSALPAGVSYGQPMRCYGGTWVFESWAQGVVAMHRGGLVPRAGDVLLASLPKSGTTWLKALAFATMARRACPPPASPDHPLRRLNPHDCVPLLDRLFAAGRDALLDELPSPRLMCTHMPLSLLPPAVADGNSNTKIIYICRDQKDRLVSIWHFRKRNVPDLLLQEVYESICDGTGFAGPVWDHLLGYWRASKIDLGRVLFLKYEEVLRDPVNTVRELAQFVGQPFSDTEEEAGIVAEIVKLCSLESLRSQKANKEGIQGVYIKFSHDSYFRKGVEGDWRNHMTPKMGEHLDSIMREKFDGSGLTI

SEQ ID NO: 31998 - protein, 256 aa, Oryza sativa
MAVVGVLDSLAAEERWLYPGFLAMYAAIYCVGQLALLRRWAWPLRLDGASCLISLAHGTPAALAAAGAILALPPEARGFAAPNTRLQDHVLDYSVAYFTMDLLHYLAFLPGDTLFIAHHVATLFVFVTCRYLVRHGAYALLVLLVLAEVTSLLQNVWTLAGIWRAEKPAAARVYRALSPPFYFIYTVVRGVAGPLFFLKMSLFYLSGQAVDVIPWWVRISWIVVVGTAITVSNLWIWNLWKELFRERKQSMTKKST

SEQ ID NO: 31999 - protein, 252 aa, Oryza sativa; identical to SEQ ID NO: 30640

SEQ ID NO: 32000 - protein, 326 aa, Oryza sativa
MEYSYSYRFMLVCSVLVLCLNTRGARCQLSDDFYDYICPDVYTVVQQHVYAAMRTEMRMGASLLRLHFHDCFVNGCDGSILLDGDDGEKFALPNKNSVRGFEVIDAIKEDLENICPEVVSCADIVALAAGYGVLFSGGPYYDVLLGRRDGLVANQSGADNGLPSPFEPIKSIIQKFNDVGLDTTDVVVLSGGHTIGRARCTLFSNRLSTTSSSADPTLDATMAANLQSLCAGGDGNETTVLDITSAYVFDNRYYQNLLNQKGLLSSDQGLFSSDDGIANTKELVETYSADAHKFFWDFGRSMVKMGNISPLTGDDGQIRKNCRVVN

SEQ ID NO: 32001 - protein, 283 aa, Oryza sativa
MSNLLKAKSWVPEEKAAATASDEQNDKIKKVRELLGSQMTAEMPSFLSDATIRRFLRARNWSTEQATKALKETVKWRRQYRPDTIRWEDIPGREHEARRTYIADYFDKNGRIVFISNPTIKSKSSTKDQIKQLVYNLEIFAMHSENMEDECTVWLTDFQGWVLTNTPLPLLRECTHIIQNHYPGLISVAILSNPPRIFESFWKIVCYFIEPKLKEKVKFVYTNNPESHKIVADMFDLDKLESAFGGRNTLPFDMDKYAERMKRSDQMRGAPMHANGYSCSTQT

SEQ ID NO: 32002 - protein, 216 aa, Oryza sativa
MAEALLPLPRRLVVTASTPACSSASSSTSPSPHCLLSRANPRPPRLAAPSPPRHRRLKAHAAVSDKSEQPKWWEKNAGPNMIDIHSTQEFLDALRDAGDRLVIVEFYGTWCGSCRALFPRLCRTAVENPDILFLKVNFDENKPMCKRLNVKVLPYFHFYRGADGQLEAFSCSLAKFQKLKDAIAVHNTARCSIGPPVGVGDVLDSPEEKPAEASPR

SEQ ID NO: 32003 - protein, 86 aa, Oryza sativa
MWMGSVASYPNPPPRALFSRSSWRGKPAPSGAAVLRVWWPDDGSKQNIAPDLVKPSRFSLYMVIKLAIMVVFFWSNCKHFSVGIVA

SEQ ID NO: 32004 - protein, 226 aa, Oryza sativa
MGTMVGHVAPGAGFILIGMWQLFNHIRLFALRPSSYAAPVWFPVRGVRHLELILVIVGAAISILMELVIGPARHQPFDDDGTIPSNHLHNFEHASISLALLVYAAVTIHMDRARAPMRDAVSQLVAAAAFAQQLLIFHLHSADHMGVEGQFHWLLQTVIAVTLATTVLGIPCPQELRRQPRPVGEPRVPGRLVRRHGRHALDPGAHPQGLLPQPRGRPRRRPVPHR

SEQ ID NO: 32005 - protein, 424 aa, Oryza sativa
MAAAAVTKSPPALVPPAGPTPGGSLPLSSIDKTAAVRVSVDFIQVFPSSAEAAKDQAASVAAMREGFARALVHYYPVAGRIAEPVPGEPEIDCTGEGVWFIEAEASCSLEEARNLERPLCIPKEELLPHPPPEVRVEDTVLLAQITKFTCGGFAVGICFSHLVFDGQGAAQFLKAVGEMARGLPEPSLKPIWARDAIPNPPKPPLGPPPSFTAFNFEKSVIEISLDSIKRVKDQVASETNQKCSTFDVVTAMMFKSRTLAIDFAPDADVRLGFAASTRHLLNNVLPSVDGYYGNCVYPGGLAKTSQEVKDASLVEIVTAIREAKDVLSTRFLDWMSGGAKENHYNVSLDYGTLVVTDWSHVGFNEVDYGFGEPSYVFTLNDDVNIVPSVVYLKPPKPKQGIRLVLQCVEAQHSKVFGEELQKLA

SEQ ID NO: 32006 - protein, 374 aa, Oryza sativa
MVNQAAMPLLTPYKQAGGKIDLSHRVLLSPMTRCRSYGNVPQPHAALYYTQRATSGGLLITEATGVSDTAQGYPETPGVWTREHVEAWKPIVDAVHRKGALFICQLWHVGRVSTNDYQPNGQAPISSSDIQITPDGSGIVYSKPRRLRVDEIPQIVDDFRLAARNAIEAGFDGVEIHGANGYLLEQFMKDSSNDRTDEYGGSLENRCRFAVEVIDAVVGEIGAHRVGIRLSPFLDFMDCVDSDPEALGSYMVEQLNKHEGFLYCHMVEPRMAIVDGRRQIQHGLLPFRKAFKGTFIAAGGYDREEGNKVIENGYTDLVSFGRLFLANPDLPKRFELDAPLNKYDRNTFYTQDPIVGYTDYPFLDEDQNNSVADA

SEQ ID NO: 32007 - protein, 102 aa, Oryza sativa
MVEETAAHHPQQSHPSLSRRRQCTLAFTLCGGDRLEPRRPVTCSHRSSMGWRWKPASNHVHVQCQEDGRSSLWSSAPRNCLPQESSEADMLYFVLFVFRILL

SEQ ID NO: 32008 - protein, 179 aa, Oryza sativa
MAAWRGLALAAVVAWCVAAAAAAPDAALQSKCQQDFTKLTDCMDYATGHEEAPSSTCCGDMSATQQARPECLCYIIQQVHGGRNEVQSLGLRFDRLLAMPTACKLPNANVSLCINLLHLTPSSPDYAVFANASKAAATTPSSTTPGAAAATAGGFKVQAGLSYGVVAAAMVSAVFSSIF

SEQ ID NO: 32009 - protein, 286 aa, Oryza sativa
MATAVNSNLFRDYIGAIFNGVKFTDVPINPKVRFDFILAFIIDYTTETNPPTPTNGKFNIFWQNTVLTPSAVASIKQSNPNVRVAVSMGGATVNDRPVFFNITSVDSWVNNAVESLTGIIQDNNLDGIDIDYEQFQVDPDTFTECVGRLITVLKAKGVIKFASIAPFGNAEVQRHYMALWAKYGAVIDYINFQFYAYGASTTEAQYVDFFNQQIVNYPGGNILASFTTAATTISVPVETALSACRTLQKEGKLYGIFIWAADHSRSQGFKYETESQALLANATISY

SEQ ID NO: 32010 - protein, 176 aa, Oryza sativa
MVYYALYWWADLDNLTNLQPRYGCDDPTYPYYFKLRCENCGEVSAKATCVSLGEVVDLPNGRSTANLVQKCKLCGRDASIVMIPGQGTPLTMEQSQKGDRTCLMVFDCRGCEPIDFAFGNGWKAESLEGTSFDIDCSEGEFADYDEKGECPVGVGKLRSEFRVVKKQESRGKTKYV

SEQ ID NO: 32011 - protein, 373 aa, Oryza sativa
MEDHKWRYLHDLLSPQGPPEPNHRVPLPPLVSGLSASALVEKMRSLEAEARACYSEQPVDLSSDDFVQMLLLDGCFILEFFRKWRRNQPDVLCDVGWGLTFVISDLLLMENQLPFFVLKKLYVTAFGEQDGQAGNNLLQLLLQYIAGRQVPIRWPNGQVNHILHLYYESFVPQSQRTPQQEQSTTAPRVLPCAVEMSEAGMTFAVRRNSDNGYDVVFDSLRGVMEIPTILIDDAKTPLLANLIAFEQSLGNDEAILLSSYVALMGQLIVTARDVALLRRRGVLENMLANDDDAARFFNHLGDCGAVNHDSHAFVGLYKDVDRYCGTWWRRKTAALRRDYFASPWSAISFVAAAVAVVLAVMQTYFTMFPLKKG

SEQ ID NO: 32012 - protein, 171 aa, Oryza sativa; identical to SEQ ID NO: 29200

SEQ ID NO: 32013 - protein, 106 aa, Oryza sativa
MPRGCWTAGPHQRQPLLRKKLRELRHRCQEGSLRDIVFCMRADLLRNLGNTCNSKIRRFCTNLNLYYASMFLFQNAGRFNTQIFERRPKLAKQSLYTSNFDAIRCC

SEQ ID NO: 32014 - protein, 456 aa, Oryza sativa
MARRAREEEADQVERKLVLGRYELGRLLGQGTFAKVYYGRDLRSGESVAIKVIDKARLRRTEGMVEQLRREISIMRMVRHPNVVGIREVLASRARVFVVMEYARGGELFAKVARGRLTEEHARRYFQQLVAAVGFCHGRGVAHRDLKPENLLLDEEGRLKVTDFGLAALPEQLRQDGLLHTQCGTPAYVAPEVLRKRGYDGARADLWSCGVVLYVLLCGFLPFQHENYAKMYQKIFKAEYQVPPWVSGDARRLIVRLLVVDPAKRISIPEIMRTPWFKKGFVPPVPTSPVSPKKWEEDDVLLDGGDSGAMSPRTCNAFQLISSMSSGFDLSGMFESEQKAATVFTSRAPAATVIQKLEAVGRSLGYSATRGKGWKLRLEATADGANGRLAVTVEALEVAADVAVVEFAHDAGDELEFNKFCAVDVRPGLADIVWAWQGDRPAAPDVAAATVECSPA

SEQ ID NO: 32015 - protein, 350 aa, Oryza sativa
MQQMITLITNSISKDLPATLEKSLKKEISSLGPVIARAITPIIEKCSASAVADSIQKVVGDRVVNQLDKSVSAKLEATVARQIQMQFHTSVKQTLQDALRASLEAFLVPAFEQSCKTMFEQVDSAFQKGMSEHTVAIQQQVEATHTPLAQTLKDTISSASSITQNLTAELLDGHRKLLALLASGNAKAHSTNVLQPNNVPVTGPPEVEAPLDPMKELGRLISERKFDEAFTMALQRSDVSIVSWLCSQVDLRALCSMVPVPLNQGVLLALLQQLAVDIATDTPRKIQWMTDVAMAINPTDPVIAMHVKPIFEQVYNALLHLRSLPTTSPSDSTSIRLFMHVINSVLLSYK

SEQ ID NO: 32016 - protein, 46 aa, Oryza sativa
MGGAGSASGGGGGGDPSSSQQWKLQWQPHAAHMSDVGSVGSPPTTA

SEQ ID NO: 32017 - protein, 145 aa, Oryza sativa
MAMDLVRREADRGAAPEFVAVDIGGEAETAGAEAEPKKMESSFAGKGLERERSGDANPSTTGVLAVYEKQVVPVHVDGSPKEQFHPSTPTAGGAKRRRTGRRVPGWRDPRKILFAFAALSSVGTLILLYFTLSMGRMTGGQADGQ

SEQ ID NO: 32018 - protein, 397 aa, Oryza sativa; identical to SEQ ID NO: 28745

SEQ ID NO: 32019 - protein, 330 aa, Oryza sativa
MEHCNDFMLLGTEAVALGRVGDDFWCTDPSGDPDGTFWLQGCHMVHCAYNSLWMGAFIHPDWDMFQSTHPCAAFHAASRAVSGGPVYVSDAVGCHDFDLLRRLALPDGTILRCERYALPTRDCLFADPLHDGKTMLKIWNVNKFSGVLGAFNCQGGGWSREARRNMCAAGFSVPVTARASPADVEWSHGGGGGDRFAVYFVEARKLQLLRRDESVELTLEPFTYELLVVAPVRAIVSPELGIGFAPIGLANMLNAGGAVQGFEAARKDGDVAAEVAVKGAGEMVAYSSARPRLCKVNGQDAEFKYEDGIVTVDVPWTGSSKKLSRVEYFY

SEQ ID NO: 32020 - protein, 262 aa, Oryza sativa
MVVMMMQKSSLDLVLVPCGLVIMFGYHLILLYRILRRPAATVIGYENHNKLAWVRRMVQASPDETGLALSVISSNISASTNLASLCIALGSLIGAWVSSTSKVFMTELVYGDRTQATATVKYISLLVCFLVSFTCFIHSARYYVQASFLITTLDSDVPASYIQHAVIRGGNFWSMGLRALYFATTLLMWIFGPIPMFTCSVLMVFILHLLDSNSLPLHNHQFTIRKRHDQRALASTVVTRHPSPQNPILSNPVLSPVTFSIN

SEQ ID NO: 32021 - protein, 380 aa, Oryza sativa
MARPAPLLLLLAAVCLVAAASAGGADAAERKATTVGVYELRKGDFSIRVTNWGAVIMSVVLPDSRGKLDDVVLGYDTIAEYVNSSTYFGALVGRVANRIAKARFVLDGKAYHLYPNDGKNTLHGGHRGFSNVTWTVKEHVGGGDAPYITLYYHSFDGEQGFPGALDVYVTYQLSGPYVLSVHMNATAAGKATPVNLAQHSYWNLGGTGSGDILGNTVQLFASRYTPVDAELIPTGQVAPVTGTPYDLRAPTPVGARVHLVTGGLSKTGATIYGFDTNYAVDGGDDVDAHAHALRRVAVVRDGKSGRSLELWANQPGVQFYTGNFLTADVKGKGGKAYGQYGALCLETQGFPDAVNHPNFPSVIVRPGQVYKHDMVYKFSF

SEQ ID NO: 32022 - protein, 296 aa, Oryza sativa
MSSSTSARDDEAPDLVCQIDCVHGMVDALSCVRWKRHQDAVLELSEHGIVLIVEESGCLQAKVYLKRELFMEYEYAAEGRPRFGLSLGLLVDCLNTFSAPGHSSPVEIRYPGPDMQLLLKSVGSPDSCMYAEIRTRIPDTISWDYHFEHAGNTPVTFTVKSAVLKESIEDLEWPGSSIQIQMQPDPPSVLFKGEGHGDLQIEFPYYANTDLLIAFQCDHETSYRYKYKFLRATTSNFPNSIVKENRGSKVTIGRGGMLKIQHLVSVARPGCKVLGWDLKRAQSIFLLLLKQQSTAW

SEQ ID NO: 32023 - protein, 159 aa, Oryza sativa
MVCAALTEVRRLRVARDARVGGGEAVPMTVFWLIPQFLFVGAGEAFTYIGQLDFFLRECPKGMKTMSTGLFLSTLSLGFFVSSALVAAVHKLTGDRHPWLADDLNKGQLHKFYWLLAGVCLANLLVYLVAARWYKYKAGRAAAAGDGGVEMADAKPCLH

SEQ ID NO: 32024 - protein, 212 aa, Oryza sativa
MECVIGVVGRDFAVVAADTSAVQSILVHKTDEDKVMVLDSHKLMGASGEPGDRVQFTEFIQKNLHLYQFRNNIPLSTAATANFTRGELATALRKNPYYVNVLLAGYDSDVGASLYYIDYIATFHKIEKGAFGYGSYFCLSLMDKLYRPDMSVEEAVDLVDKCIKEIRLRLVVAPQNFIIKIVDKEGAREYARRAYTDSPPEAATSEAATVAA

SEQ ID NO: 32025 - protein, 238 aa, Oryza sativa
MRPRLVLFGDSITELSFADGGWGAALADHFARKADVVLRGFSGYNTRWALRVLARAMEGAAAAADPAAVTVFFGANDASLPERKQVHQHVPLDEYQSNLRSICAYFKEQWPSTKIILITPPPIYEPARIRDMYGEDDPSKLPERTNEAAGTYAQACLTVAKELNHPVIDIWTKMQQFPDWQTSALCDGLHFTPLGNKILFDCVLETLESIGFSQGSLQPDLPLFHDIDPKDPLKAFEI

SEQ ID NO: 32026 - protein, 230 aa, Oryza sativa
MSNSLNASRFPFCAVVMASTNQRIVLLRQIEGPKSPEEMITTLQGAVEECSASLVAARIDAEERLNNQRLREEQDAAYRAALEADQARERQRREEQEKREREAAEAERKRKEEEEAQERAAQEAAEKEAALARRRQEKAMALGAEPEKGPDVTRVLIRFPTGERKERRFNSSTTITSLYDYVDSLDCLKAEKYSLVSNFPRVTYGPEKLSQTLEEAGLHPQASLFIEIEQ

SEQ ID NO: 32027 - protein, 126 aa, Oryza sativa; identical to SEQ ID NO: 29007

SEQ ID NO: 32028 - protein, 64 aa, Oryza sativa
MLTQGFTHVFSLTFASSEDLTTYMSHERHQEFAGTFMAAIDKVVVVDFPVVASKPAPPAAPAAA

SEQ ID NO: 32029 - protein, 235 aa, Oryza sativa
MAGDGELKLLGMWTSAFVLRVRFVLNLKSLPYEFVEENLGDKSDLLLASNPVNKTVPVLLHAGRPVNESQVILQYIDEAWPDRPPAVLPSDPYERAVARFWAAYVDDKVRLAWLGILFRSETEEERAAAVAQADAALETLEGALRECSGGKPFFGGDGVGLVDVVLGGYLGWFTAIKKLIGRRMIDPARTPALAAWEDLFRATDAARGVLPDDADKMLEFRQTALALGASKKITL

SEQ ID NO: 32030 - protein, 145 aa, Oryza sativa
MNIQRKPGDWNCKSCQHLNFSRRDYCQRCHTPRQDLPLGDGYVPGGVLTSLDIRPGDWYCNCGYHNFASRASCFKCGAIVKDLPAGQGGGVANGDFARALDSSAVRAGWKAGDWICTRPGCNVHNFASRIECYRCNAPREAGNVK

SEQ ID NO: 32031 - protein, 237 aa, Oryza sativa
MLAVFSGAVVEVPAELVAAGSRTPSPKTRASELVGRFLAAAEPAVSLQLGDLGHLAYSHANQSLLRPRSFASKDDIFCLFEGVLDNLGRLSQQYGLSKGANEVLLVIEAYKTLRDRAPYPASFMLSQLTGSYAFVLFDKSTSSLLVASDPEGKVPLFWGITADGSVAFSNDIDLLKGSCGKSLAPFPQGCFYSNALGGLKCYENPKNKVTAVPANEEEICGATFKVESATAILTALH

SEQ ID NO: 32032 - protein, 351 aa, Oryza sativa
MVTGGAASNVLYNLLCTGCGRRAAAVIDYDIALLFQPCLLLGVSIGVVCNVMFPEWLITALFALFLAFCTTKTLRAGLRIWSSESRGATLAVAAATAHGREEPLLLPHGTDAGNGGGARGDAGFPWKDVSVLVMVWLCFFVLHVFIGDKHGKGMIRIKPCGVAYWLITLSQVPFAVAFTAYIIYAKRKKQVLHNQEDGKANPESTKMDTLPTLLFPLAAFVTGALSGLFGIGGGLLLNPVLLQIGIPPQTAAATSSFMVLFCASMSMVQFILLGMQGIGEASVYAGICFVASVVGAVVIERAIRKSGRVSLIVFLVTGIMAVSTVIITFFGALDVWAQYTSGAYMGFKLPC

SEQ ID NO: 32033 - protein, 259 aa, Oryza sativa
MLVMMLRKLLLNTFVYPMPVGIWDEQCQLVYKTIMAVLHALNPILRPRTLGHNSGTRRDIFGSSPGGGDAGRHVLFRSEESMAVSCQQNEIRLGHSSSGERVLHPFARGGAGGGAPFAHGEEHIAIDIDLLLQATPNIFSAREASPTPVTPDDRVVVAQTLQTILASILPLCAASRPLFKDGPEYAKVVTFGFLGTIVLVAYAGVFAKAANSKAALRLVVSAAIAAMTFAVASQLSGIGYIVTASLTGAIMAAFIMLAV

SEQ ID NO: 32034 - protein, 269 aa, Oryza sativa; identical to SEQ ID NO: 30174

SEQ ID NO: 32035 - protein, 405 aa, Oryza sativa; identical to SEQ ID NO: 31391

SEQ ID NO: 32036 - protein, 274 aa, Oryza sativa
MAGIVVVFDFDKTIIDVDSDNWVVDGLGTTEEFERLLPTMPWNTLMDTMMGELHASGKSLADVAGVLRSAPLDPRVVAAIKACYGLGCDLRILSDANRFFIDTILDHHGLTGYFSEINTNPSAVDAATGRLRIAPYHDFHAGPHGCGLGICPPNMCKGQVLDRIRASAGAAGKRVIYLGDGRGDYCPSLRLGRDDFMMPRRGFPVWELICEDPSLLHAEVHSWADGAEMEETLLRLVGRVLLEERNLPPLDCKLESLPAVAVQDGMPMTLRIKN

SEQ ID NO: 32037 - protein, 245 aa, Oryza sativa
MAASASAPPHSLLLAAVALAALASVAAARDENGVYDPCSDTRIQRGDGFSFGIAFATLGAFYSGGSVQLSPCDRRLSLASSGQLAVFRPKVDEISLLTINTTTGFNPATAGGYMVAFAGRKYAARSVPTFVSNSSYTVSSFTLVLEFNKGRLQNLHWKKDGCGACAKSSSLVCIGKQTCAFRTQSCKSQGPVDCSIGIQLAFSGTDKHESVLNSWYEVSNLRQYSLYGLYSNLKDTLSGQFNKFF

SEQ ID NO: 32038 - protein, 213 aa, Oryza sativa
MSEEDTNAAAGQPRRAPKLNERILSSLSRRSVAAHPWHDLEIGPGAPAVFNVVVEITKGSKVKYELDKKTGLIKVDRVLYSSVVYPHNYGFIPRTLCEDNDPMDVLVLMQEPVIPGSFLRARAIGLMPMIDQGEKDDKIIAVCADDPEYRHYNDISELSPHRLQEIKRFFEDYKKNENKEVAVDAFLPANTARDAIQYSMDLYAQYILQSLRQ

SEQ ID NO: 32039 - protein, 276 aa, Oryza sativa
MLVMNDGSKNLLRAINNRLSALSFHIREYYWVDMKKINEIYRYKTEEYSHDATNKFNIYPEQIPSWLVDWIPEKGGYLIGNLQPAHMDFRFFSLGNLWAITSSLTTPKQAEGILSLIDEKWDDLIANMPLKICYPAMEDDEWRIITGSDPKNTPWSYHNGGSWPTLLWQFTLACIKMGRPELARRAIAVAEEKLAADKWPEYYDTRSGRFIGKQSRSYQTWTIAGFLTSKMLLENPELASILTCDEDLELLEGCACCLSKKRTRCSRRAAKSHVVE

SEQ ID NO: 32040 - protein, 72 aa, Oryza sativa
MKVRSSLPCESIKGSGGEVQGGEVNRGRRRRWRKRRGLVGTCMQARCLVRRKMKLVVSQVAPCSPILIASLP

SEQ ID NO: 32041 - protein, 306 aa, Oryza sativa
MLQGVLSRAPGADAAAMKAKRAADDEEEGGERERARGKRLAAEGKQGLVVVSTGEEEEAAAETRGLRLLSLLLRCAEAVAMDQLPEARDLLPEIAELASPFGSSPERVAAHHGEATVVHWMHHCLYDVTGSDAGTVRLLKSLRPKLITIVEQDLGHSGDFLGRFVEALHYYSALFDALGDGAGAAEEEAAERHAVERQLLGAEIRNIVAVGGPKRTGEVRVERWGDELRRAGFRPVTLAGSPAAQARLLLGMYPWKGYTLVEEDGCLKLGWKDLSLLTASSWEPTDGDADADVAVAGDTHHESHDS

SEQ ID NO: 32042 - protein, 229 aa, Oryza sativa
MGSRLGRRVIHFANLPLKLMLPPAPLSSVQEFAVKTVPSASKVDIRRCLESMYGFSVAEVRTLNMEGKKLRRGPFLAAKPDYKKAYVTLRAPLPVSPDLFPIGLVLGERERKASAAAARRKAVEGAEVEGEGKGKHWMEDEKVGFSRAGRGKVVYGNPGRLGKKRNGGTKVKDRAGEEVGKFPWSGTRLATEKKPARKQQYAPKKKGIVLKQKSWKGSVHRQPKKKVEA

SEQ ID NO: 32043 - protein, 270 aa, Oryza sativa
MALLSPPSPPPPLPPLRRRPASPTLLAVATRPSSLLSLPHCHCGLPLPSTANARAYSRSSRRRRRVAASLGQDEPGVSDTAVAPEGEGDSEPPASSDGAAGDIAASAEQPEASPEDLEVKLTIMIEDPRDIERKRLLGIEDPDEITRDDLADALVEVNEGRIPENRVALQLLAKEMTEWPDLEMEAPKKKSKPGKSVYAKATDTGIDPETAAKRLNIDWDSAADLDDEEEEDDETEVPSAVGYSALYLLTAFPVIIGISVVLILFYNSLQ

SEQ ID NO: 32044 - protein, 146 aa, Oryza sativa
MEESDETAVEAALGLSASFFVNSVLNAVDDVRYGAFEYCLQEGAPEAVGAAMATQKAEELERGVISIHNLVKDVLDKRMSNWEKYCLRHCFAIPEGFLTREDDIPAKNHSMMGILIRISMLNLFLLGKNLKMLTMNLKNFKKSFLP

SEQ ID NO: 32045 - protein, 117 aa, Oryza sativa
MASMDDVDFSPHQATPKESMNSKDDAKVQPSSGQTPNKGNYYMGHANAIMMMFQYIRDGCRRVESSMEDYTCKKVEKGYGEKRKVGEGYDPRWSSPIEITMKICNDDVSDEATEKEP

SEQ ID NO: 32046 - protein, 374 aa, Oryza sativa
MAGQAPNMLAPPTDDELLHAQADLWRHSLYFVTSMAFQCAVKLGIPTAIHRAGGTASLPDLVAALSLPPAKLPFLRRLMRLLVHSGVFAAADDTTGSAGTYRLTPLSWLLVEGEGGAPVVDGHPCQVPVVLAGTSRHFVEAAMGLAEWFRKDVPAAAPPSPFEEVHGAVLFDESMASLHPEVDTVFNQALAAYDHSGFATVLRECSEVFQGVQSLTDCRGGDGAAAKAIVEAFPHIKCTVLDFPRVIGNKRGDGVVNYVAGDMFRAIPPAQAVMLKLVLHHWSDEDCVKILTQCKKAIPARKDGGKVIIIDIVIGAPSGPLLEAQLLMDVGMMVATKGRQRDENDWRDLFKKAGFNNYKIVKKLRARAVFEVYP

SEQ ID NO: 32047 - protein, 283 aa, Oryza sativa
MSPAEPRPSAAATRKRKKPHKPTKTLAKNPTNPVSTKAKKKKPPPPSKADQSASAAAAGGVLLSAEMPPARQLEFLLRSFERAAKMRLSPLELDAYSEGCMVPLAEGASQDVEGFGDHVKGAFGSSWKEELCEGELDGGAVDAGSPALLVICSAALRSLELLRGLKMFTKECRPIKLFAKHMKVEEQVALLKTRVNIACGTPSRIKKLIDMEALSLSRVKLVVLDMQRDAKSFTLFTLPQVSNEFWDLYKGYLDQKVRGGDTRLCFYGAVSEKDVKKALPSAE

SEQ ID NO: 32048 - protein, 217 aa, Oryza sativa
MPRLSVGHNSPHRFPTPTGSTPLRAFQASDLSHLHVRVAELRPVTDGRKGWLYILDVGCAGRAWQIAKRYSEIREFWETLCDLLVENHETCTEKCHFLAGCETYKFPKKRLVHTRGVLEERATELDQFFERVAMRLNLCDARALALCYAGGCSTLGLLSSFLEIPTQFQNPRPYPYNTLEQSSSVPLFKDILSKDGRLTLNHGRLSLTSLRELQYAA

SEQ ID NO: 32049 - protein, 210 aa, Oryza sativa
MASSPASSYDCSFKILLIGDSAVGKSSLLVSFVSASHIDDEIAPTIGVDFKIKFLTVNGKKLKLTIWDTAGQERFRGITSSYYRGAHGIILVYDVTKRESFTNLADVWAKEIELHSTNKECIKMLVGNKVDKNEERMVTREEGLAFAQESGCLFLESSAKTRENVEKCFEELALKILEVPSLLEEGSSVVKRNSLKQKHENKAKNGGCCQ

SEQ ID NO: 32050 - protein, 201 aa, Oryza sativa
MRLIGRGKSSKAKKGSSTPLQSKEKIAANVETVAVGSNNRQVAPDDNMPLGEAGYASSRDEVFFEACPWLESDCEDEFYSINGDGTPARSFRTNSSNHAIQPEPRKLPTLGAILKAEPLRPPPPPQETQPTPPSPATTMRLADLLRERQESFTCYDGPACAISRTGSSCGAGNGEQWSHCCIPSFVPRTSVSYAKGRRKRR

SEQ ID NO: 32051 - protein, 241 aa, Oryza sativa
MASGVEERVRGEVRGEEDDRPQLSAAAAEALREFLLEQGRDGGEEGEEGGGGVELVAEDWRLSQFWYDERTARALAEEVARLVSLSGPASSAAVACVACPTLYTYLKTSSPDVTAQLLEYDVRFGQYGGDFTFYDYNQPEELPAAMKHAYRIVVADPPYLSKECLEKVAKTVSFLAHPEGSFLLLLTGEVQRDRAFELLNVRPCGFKPQHSNKLGNEFRLFTNYDPEDRLGGWEQNDGATV

SEQ ID NO: 32052 - protein, 106 aa, Oryza sativa
MDKRQLQELRVRPVSASGNSHRTLMPALSMRLWYAPHIELPGGQLLKGATLVAIRPSEDVLREGGGIEVAGPTGASWILDAFEEPYRTAAQVLLKRRTYSLEMNSF

SEQ ID NO: 32053 - protein, 334 aa, Oryza sativa; identical to SEQ ID NO: 30543

SEQ ID NO: 32054 - protein, 182 aa, Oryza sativa
MGEFSKESCPSVKNILLLDSEGKRVAVKYFSDDWSSNASKLAFEKSVFTKTLKTNARSEAEITLFDGYIVVYKFVQDLHFFVTAGDDENELIIANVLQGFSDSVGLLLRGDVEKRTALENLDLILLCIDEIVDGGIILETDANTIAGKVATNAVDGSAPFSEQTISQALATAREHLARSLLK

SEQ ID NO: 32055 - protein, 270 aa, Oryza sativa
MAVITSLKHFIPSDDDALSLVYKHFDMKHEAASLLESRAEQYMNSWLSRYDKERRNDELLEAMHHLVEMAEVLSTIDAGQRTHRACARASLLSLQIRIPDLLWIGLSETNARRIFVEQSRFQEALIVAEAYNINQPMEWAPVFWNQMLKPDLIEQFVAEFVLVLPLQPPMLLELARFYRAEVAARGDQSHFSVWLSPGGLPAEWVKHLGRSFRSLLRRTRDMRLRLQLATLATGFSDVLDACNSVLDKVPENAGPLILRKGHGGTYLPLM

SEQ ID NO: 32056 - protein, 166 aa, Oryza sativa
MAPAASASASAVVTPSSFRCVPTASCGLGARGKAPAPRRLLHDHAQGKKRAAATWSLKAGLWDSLRSGFLKSNNSTETVEPPSAPIEEEEPLPEELVLLERTLADGSTEQIIFSSAGDVNVYDLQALCDKVGWPRRPLTKIAASLRNSYLVATLHSVTMPSKAEVI

SEQ ID NO: 32057 - protein, 218 aa, Oryza sativa
MAKTRQPQKRVLESFTIKGPDGVIKPGDTVLMMAPDSSKKPYVARVEEIEATGPQASQVKIKVRWYYRPEESIGGRRPFHGSKEVFLSDHYDSQSADTIEGKCYVHTFRDYTKLRSVSAEDFFCRFEYKSATGSFVPDRIAVFCKCEMPYNPDNLMIQCEDCSDWFHPSCVEITIKEAKKLEHFYCKSCIAENGKDLQKSNGATVQSEEKVQSKRRRR

SEQ ID NO: 32058 - protein, 301 aa, Oryza sativa
MATMPLTFSPPRLLHRHRRREAKPQRRSATRVSLLPRRGAASARRPLYCAPGGGGEVSAPPATEQQEQAAKEEEEEYTLLAKTGVWTNSYWDEFVSLPAVVPRGPVALLGLGAGTAAHLMLKFYPWLQLVGWEIDPKIIELSRDYFGLSDLEKATESGGSLSVRIGDALSPSATIEGGFAGIVVDLFADGKIIPQLQEVETWLEIAKKLMPDGRIIVNCGGADAAVSLANDTGLSSWVQNSTIKALCAAFPGQLNWKRLSEKESVNYVALTGPLPNLDEWSTSVPSEMSTKVKQWVPCELA

SEQ ID NO: 32059 - protein, 220 aa, Oryza sativa
MSVIKDCGGHKGCECEKEKVHRRLCWALVALVLLTLFIVLVVWLALRPHKPRFYLQDLSVLCLNVTPPASAYLFTTMQATVAARNDNGRVGVYYDKVDVYAQYKDVAITVPTRLPVEYQGHYDQSVWSPFLQSLDHVVLPPNLAVALAQDETAGYVLVDIRLDGWVRWKVGTWISGHYHLRVNCPALLTVNDGKGSYGVNYGGGDGYFRFQQAAACAVDV

SEQ ID NO: 32060 - protein, 278 aa, Oryza sativa
MGDHVVVNVEGLGNDGGAVEKPSEAVNSSVVAAASLSTTVDTVEEGGGEEEPLIQAAECRICQEEDSIKNLEKPCACSGSLKYAHRACVQRWCNEKGDITCEICHEQYKHGYTAPPRVEPDDTIIDIGGDWARDPRIIAVAAAQRRLLETEYDEYAGTDASGAAFCRSAALILMALLLLRHALSISDNEGDDDASTMFSLFLLRAAGFLLPCYIMAWIFSILHRRRQRQEAAAIAAAEVAFILQSAQGHALQFTIAPDSPATPQHEPQQQQPQPQPQQ

SEQ ID NO: 32061 - protein, 61 aa, Oryza sativa
MKVHTGLRCIMNRKRSRTVTSWRSESAQYRAIVFCRGVRMGWRCEKYNASCIPESVSTASW

SEQ ID NO: 32062 - protein, 226 aa, Oryza sativa
MGLEIMTDEAAAAPSPAAAAARVEIYPLCRYYFGARDVAAGGAGAGLETAADRALRLKANFAAHGLRTSVHGVLLVELFDHPHVLLLQVRNSSFLLPGGRLRPGEQDVQGLKRKLSTKLSVAGHQDDEDGDGDDEWQIGECIGMWWRSEFDAAPFPYLLPNARAPKECIKLFLIKLPVSRQFVVPRNMKLLAVPLSQIHDNAQVYGSIIAGIPNLLSKFSMNIISD

SEQ ID NO: 32063 - protein, 274 aa, Oryza sativa; identical to SEQ ID NO: 31329

SEQ ID NO: 32064 - protein, 243 aa, Oryza sativa
MASLFKDPTKLSAYRDRRFTGTQEEYEAALQASVTVYVGNMSFYTTEEQAYELFSRAGEIRKIIMGLDKNSKTPCGFCFILYYSREDAEDAVKYISGTMLDDRPIRVDFDWGFEEGRQWGRGRSGGQVRDEYRTDYDPGRGGYGKMVQKELEAQRELVDYGGAFQPNAPPQYDRGDRKRRYGDSYRNDRDYQRKRYRNDERSSQRAPDSEFKRDAIDSEKNPRFREKGDSDEEDDDYDKRRRR

SEQ ID NO: 32065 - protein, 163 aa, Oryza sativa
MDDDGDWITARYLLSSILGRNPLVVDYVDEESFPVEDPPPVAGGARGGRQAVVSQPPVVRATAGVAGTVCSVCTEEIAVADAVVRLPCAHWYHAGCISPWLGIRSTCPMCRAELPASDDAAEEGGGAGREKPPRAGRAGTSAGGGVRRDASYELLAGGGVLSG

SEQ ID NO: 32066 - protein, 216 aa, Oryza sativa
MAAASSAPFFGLGDTQMPPPQNPTNPALHHHPNPSPAPVAAAAPAPKKKRNQPGNPNPDAEVIALSPRTLMATNRFVCEVCNKGFQREQNLQLHRRGHNLPWKLKQKNPKEARRRVYLCPEPSCVHHDPSRALGDLTGIKKHYCRKHGEKKWRCDKCSKRYAVQSDWKAHSKTCGTREYRCDCGTLFSRSVCFDLDLPRLVHGLIRSRSKLINSSN

SEQ ID NO: 32067 - protein, 246 aa, Oryza sativa
MAAAIPPEASGLAHDLGSAAVTAGVALALLRFFEELAKRGVFEQKLNRKLVHITIGMVFLLFWPLFSSGSYAPFLAAVAPGINIIRMLLLGLGVMKNEAMVKSMSRSGDPRELLKGPLYYATTITFATSIFWRTSPIAIALICNLCAGDGIADIVGRRLGQEKLPYNPNKSYAGSIAMALAGFMASIGYMHYFQSFGFIEESWSLAFGFLVVSVTAALVESHPISTHLDDNLTVPLTSFLVGSLVF

SEQ ID NO: 32068 - protein, 309 aa, Oryza sativa
MAVDLMGCYAPRRADDQLAIQEAATAGLRSLEMLVSSLSSSSQAAGAHKASPQQQPFGEIADQAVSKFRKVISILDRTGHARFRRGPVESSAPAAPVAAAPPPPPPPPAPVAAALAPTSSQPQTLTLDFTKPNLTMSAATSVTSTSFFSSVTAGEGSVSKGRSLLSSGKPPLSGHKRKPCAGGHSEATANGGRCHCSKRRKNRVKRTIRVPAISSKIADIPPDEYSWRKYGQKPIKGSPYPRGYYKCSTVRGCPARKHVERATDDPAMLVVTYEGEHRHTPGPLPAPPAAAAVAAMPVSVAVSTGNGHV

SEQ ID NO: 32069 - protein, 358 aa, Oryza sativa
MATAGKVIKCKAAVAWEAAKPLVIEEVEVAPPQAMEVRVKILFTSLCHTDVYFWEAKGQTPVFPRIFGHEAGGIVESVGECAHCKSAESNMCDLLRINTDRGVMIGDGKSRFSINGKPIYHFVGTSTFSEYTVMHVGCVAKINPAAPLDKVCVLSCGISTGLGATINVAKPPKGSTVAIFGLGAVGLAAAEGARIAGASRIIGIDLNANRFEEARKFGCTEFVNPKDHDKPVQQVLAEMTNGGVDRSVECTGNINAMIQAFECVHDGWGVAVLVGVPHKDAEFKTHPMNFLNERTLKGTFFGNYKPRTDLPNVVELYMKKELEVEKFITHSVPFSEINTAFDLMHKGEGIRCIIRMEN

SEQ ID NO: 32070 - protein, 115 aa, Oryza sativa
MAVGLRRSDSIADMMPEALRQSRYQMKRCFQRYVSQGKRLMKRQQLLDELDKSVDDKADKDQLLQGFLGYVISSTQVGELLTFLGTCASLCQSNIIHGPCRRLQCSPHSSHSLSG

SEQ ID NO: 32071 - protein, 212 aa, Oryza sativa
MDEEEHEVYGQEIPEDGDMDGADVDMASGGDDAAKLQELDQMKRRLKEMEEEAAALRDMQAKVAKEMQGGDPSASTAEAKEQVDARSVYVGNVDYACTPEEVQQHFQACGTVNRVTILTDKFGQPKGFAYVEFLEQEAVQEALNLNESELHGRQIKVAPKRTNVPGMKQRPPRGYNPYHGYPYRSYGAPYFPPYGYGRVPRFRRPMRYRPYF

SEQ ID NO: 32072 - protein, 307 aa, Oryza sativa
MATAVLRRPLLAAAAAAAAVSSTSSSFRPSRFHLRRCRYPPPVFAVSSDSPKPVTSSSTGGDNPDEEPVLPLLQELADCLVLPPKFLSQLPRDLRLDLNDAAFDLSNGPVLDECGQEVGDLLLNLAKAWEMADTSTSNNLVKQLPSMEPYLTGSAKSAFGKRLMSAGRRFTSMGQYGKGELKKIAETMSKTGKLLSKRPVVQSEVEAMKVKRKLKFLELEFELTAEKANIGAAVGLVFGFLSWQLARGIQNIPDGSMQYANDNALQMAKSLKVSLLVLGYTSTALSVFTSIGLLLLAQQINSDDKTE

SEQ ID NO: 32073 - protein, 185 aa, Oryza sativa
MDLSWLHPTYCLINCYLARYLYLEDMQLLPWGGKITSESLKFFSPIVIWTIFESTEHNHHVLHSAFVDYYKVWLELMDQAIKENNKATIARNQEEQHKYLTWRAEKDPGYPLLKKLIGESRAEDLVMEFLFEGVNTLGTKSFLDYFPEYARDDGSVNKKRSMIGKSFETRPWDANGEFIGDAEAQ

SEQ ID NO: 32074 - protein, 63 aa, Oryza sativa
MLLHLTRSHKQQSSSPSPRPHDGGTVPFERVREEPMSISAVLSSTKQPWDVEILESSKHGCVH

SEQ ID NO: 32075 - protein, 97 aa, Oryza sativa
MNRKESWGRLTPPPPLPTVSILSLLVFHSFIRFIFHPSHLVSPSISVHVQLVTFNIDTNTLTDRHSNIVWIKTVLFSGNWYVERWFSHLTMQTCSTH

SEQ ID NO: 32076 - protein, 293 aa, Oryza sativa
MQQQGAAALTPATGLGSRPSLTVKTSRVCTTAALPPLCRCGRRHLIGSTSATALLPLLALPSPAASPVDPEVMLERVHPARPEWYEKFYATAMDKFMKPYEAEIAQYKSKLFSQLMTAGKNILELGVGTGPNLKYYANADGVNIVGVDPNKHMEEYARAAAVSAGLPPSNFTFRRGVGEALPAEDNSMDAVVGTLVMCSVSDVEMALREIKRVLKPGGLYIFIEHVAAPDGSFLRFVQGALNPLQQFVSDGCHLTRETGEIIRDAGFSSLDLNTTRLSTAFILSPHVYGVACK

SEQ ID NO: 32077 - protein, 54 aa, Oryza sativa
MNSDTTSTSENFWATLVPTSATRRKRLWISHPTTSRQGRLGRQNIDSIAQHSPQ

SEQ ID NO: 32078 - protein, 100 aa, Oryza sativa
MYTARKKIQKEKGLEPSEFEDSVAQAFFDLENGNQELKSELKDLYINNAVQMDIAGNRKAVVIHVPYRLRKAFKKIHVRLVRELEKKFSGKDVVIVSWKM

SEQ ID NO: 32079 - protein, 394 aa, Oryza sativa
MGRPVATLLVLCFISVTARAAAFRVHGRLLADAATEGGAVVPIHWTQAMNYVANFTIGTPPQPASAVIDLAGELVWTQCKQCGRCFEQGTPLFDPTASNTYRAEPCGTPLCESIPSDVRNCSGNVCAYEASTNAGDTGGKVGTDTFAVGTAKASLAFGCVVASDIDTMGGPSGIVGLGRTPWSLVTQTGVAAFSYCLAPHDAGKNSALFLGSSAKLAGGGKAASTPFVNISGNGNDLSNYYKVQLEGLKAGDAMIPLPPSGSTVLLDTFSPISFLVDGAYQAVKKAVTVAVGAPPMATPVEPFDLCFPKSGASGAAPDLVFTFRGGAAMTVPATNYLLDYKNGTVCLAMLSSARLNSTTELSLLGSLQQENIHFLFDLDKETLSFEPADCTKLS

SEQ ID NO: 32080 - protein, 84 aa, Oryza sativa
MPLLLLPWINSGCRCDPRTCSRTPARSPPSSTSASLPSPHHGIEHRRFATSRVLKRSPCLYACVPNKMIGVRFHSRSRSLVDCL

SEQ ID NO: 32081 - protein, 181 aa, Oryza sativa
MPTLIITVDLQCCRCNIKIQKVLCCMQERGELEIEKIVYEKDTVVVSGPFDAEKLSCKLWCKAGKIIKDIKIKPPEEKKKPEPKPDEKKPDPKPKPDPCKLIPFPYPYVYPPPPPCGGCATPHCCDCHPKPPPPAPAPAKPACGCPAWSSPCHCYPPPAMLPYPPVLVCDEGPQYGACAVM

SEQ ID NO: 32082 - protein, 290 aa, Oryza sativa; identical to SEQ ID NO: 31332

SEQ ID NO: 32083 - protein, 320 aa, Oryza sativa
MRALALAVVAMAVVAVRGEQCGSQAGGALCPNCLCCSQYGWCGSTSDYCGAGCQSQCSGGCGGGPTPPSSGGGSGVASIISPSLFDQMLLHRNDQACAAKGFYTYDAFVAAANAYPDFATTGDADTCKREVAAFLAQTSHETTGGWPTAPDGPYSWGYCFKEENNGNAPTYCEPKPEWPCAAGKKYYGRGPIQITYNYNYGPAGQAIGSDLLNNPDLVASDATVSFKTAFWFWMTPQSPKPSCHAVITGQWTPSADDQAAGRVPGYGEITNIINGGVECGHGADDKVADRIGFYKRYCDMLGVSYGDNLDCYNQRPYPPS

SEQ ID NO: 32084 - protein, 292 aa, Oryza sativa
MATDRVEVDTARPFRSVREAVAVFGERILVGDGYSRRPSNGNAAAAAVVDIAIAKHEASGDSDDATVSSPDAMEAEPEVEEDAAPAVVPMMYSAPSSPQSSPPPPNDGGDADDERDGGVVDEGVTVAMMRSVKKLEAEVAETRQEVAQLKKRGSEMEMAVASLNAQLHRGLSKLAEMEAGDTAAAARRSVGGETDVSSTVATFRSERWGGVGGGGAAVSRATSCEYLPSFSHALSLGEVDDGELVGRRRKARKVKPIVPLIGDIIFSKRKSTKDKGGDGFYGNNGDLYSVLG

SEQ ID NO: 32085 - protein, 323 aa, Oryza sativa
MAVVVPEAVLRHGDARPMPAVGMGVAEYPSTPERTRDAVLAALEAGFRHFDTASLYRTEAPLGEAIAEATRRGLLASREEAFVTTKLWCTQCHPDLVLPSLRESLRNLQMEYVDLYLIHLPISVKPGPMVFPVKKEDVVPFDFGGVWRAMEECHRLGLAKAIGVSNFTTKHIDKLLAVATILPAVNQVEMNPTWQQRTVREYCDAKGIRVTAYSPLGGQNWGGSANYVMESSVLTEIARARGKSIAQVSLRWIYEQGVTPISKSYRKERLKENLEIFDWELTDEDRLKISQIPQRKRVTAASLFSPDGEFTSVDLPDIEIVEE

SEQ ID NO: 32086 - protein, 217 aa, Oryza sativa
MEASSWDALRKQARRLEAQLDDQMIAYRKLVSMKSDGSENDIESDIERSLKQLQQVNSQMQTWVSSGGSEVLSHTLTRHMEILQDLTQEFYRLRSSLRVKQQHASLLDLRDFDRAKFDVESGDSADQALLREQAAISRSSGQMDNVISHAQATLGTLMSQRSTFGGITTKISNVSSRLPTINHILASIRRKKSMDTIILSLVASVCAFLILVYWLSK

SEQ ID NO: 32087 - protein, 338 aa, Oryza sativa
MAMARCSLLPILAAVLLAASLSLPPRAAAYAAMVDSLLPASATALSFEEGYTQLFGDSNLMLHGDGKRVHISLDERTGAGFASQGAYHHGFFSASIKLPADHTAGVVVAFYMSNGDVYERTHDELDFEFLGNVRGREWRVQTNVYGNGSTAAGREERYGLWFDPTQDFHRYAIRWSHDTIIFYVDETPIREVVRTASMGAQFPSKPMSLYATIWDGSSWATSGGRYKVNYKYAPYVAEFTDLLLHGCPAGSPPPCEGAAASATMPPGQRSAMERFRARHMTYGYCYDRVRYHAPLPECSVGAEAEAFLPSGEARSTDRRGGRHGKRHRRAGGGVDSAL

SEQ ID NO: 32088 - protein, 290 aa, Oryza sativa
MAAAAAEGGGGGGGAVYDPSYVPDSVKTFVAHMYRHVRDKNVYEIHQMYEGGFQRLSDRLFRDAPWPAAEAVSPYCDGDHVFLLLYRELWYRHAYARASSSSSSSAPLTAGQRAESWANYCDLFSVVLHGVVNMQLPNQWLWDMVDEFVYQFQSFCQYRAKLKNKSDDELHQLKQFDKAWNVYGVLNYLQALVEKSMIAQILEREKEGLEQFTATDGYDYQGGSNVLKMLGYYSMIGLLRIHCLLGDYRTGLKCLAPIDLNQQGVYTIVIGSHISAIYHYGFANLMMRRY

SEQ ID NO: 32089 - protein, 270 aa, Oryza sativa
MAGSNPPPKPWERAGTSSGPAPFKPPSGGSTSDIVEASGTAKPGEVVSAAESNVASNVNSTISRPVPPRPWQQQGYGNSYGGYGSSMYSSLGGFGGPYSSGGLYGNNMYSSYGGGYGGMYGSSGMYGGSMYNSGMGGPYGGYGMGMGAYNQGPNSFGPPAPPPGFWMSFLRVMHGVVNFCGRVAFLFSQNTQAFHMFISALLQLCDRTGMLYGELARFVLRLLGIKTKAKKGGVQGAETSSFEGPGHHFAEAPKANNSWDSVWTDDGSGK

SEQ ID NO: 32090 - protein, 372 aa, Oryza sativa
MADSGKKRDGSANGAEKKASPTPKPPSSSTSGFSKNVPLLVFVLLLGLLYRQLQPPVPKICGTPGGPPVTGPRLQLKDGRHLAYHEYGVPKDQAKHKIIFVHGFDSCRYDALQVSPELAEELGVYMVSFDRPGYGESDPHPGRTEDSIAFDIEGLADGLQLGPKFYLIGYSMGGEIMWSCLKNIPHRLAGVSILGPVGNYWWSGYPSNVSTEAWYVQLPQDQWAVRVAHHAPWLAYWWNTQKLFPASSVISFNPAILSREDLTVIPKFAYRTYAGQVRQQGEHESLHRDMLVGFGKWGWSPLEMENPFPAGEAAVHLWHGAEDLIVPVQLSRHIAQRLPWVRYHELPTAGHLFPITEGMPDLIVRSMLLTDE

SEQ ID NO: 32091 - protein, 486 aa, Oryza sativa
MTDVQMSDSEPQAAPPAAPAASALHHLKEIASVIEAGSLSKEVRRISRAVRLTVALRRRLAARDVSAFLAFALPPSSEAYTRLTSLVPKEDDTEMDIDMAAPATQISIKHGLPEIEIYCYLLVLIFLIDQKKYDDAKACANASIARLKNLNRRTVDVLASRLYFYYSYVHELTNSLAEIRGNLLALHRMATLHRDELGQETLLNLLLRNYLHYNLYDQAEKLRSKAPRFEAHSNQQFCRYLFYLGKIRTIQLEYTDAKESLLQAARKAPITARGFRIQCNKWAIIVRLLLGEIPERTVFMQKGMKEALTPYFELTNAVRIGDLELFRAVADKFVSTFSADRTRNLIVRLRHNVIRTGLRNISISYSRISLADIAKKLRLDSDNPVADAESIVAKAIRDGAIDATIDHANGWMVSKETGDVYSTNEPQIAFNSRIAFCLNMHNEAVKAMRFPPNSHKEKESAEKRRERLQQEEELAKHMAEEDDDDF

SEQ ID NO: 32092 - protein, 252 aa, Oryza sativa; identical to SEQ ID NO: 30561

SEQ ID NO: 32093 - protein, 117 aa, Oryza sativa
MARAQLVLVAVVAALLLAAPHAAVAITCGQVNSAVGPCLTYARGGGAGPSAACCNGVRSLKSAARTTADRRTACNCLKNAARGIKGLNAGNAASIPSKCGVSVPYTISASIDCSRVR

SEQ ID NO: 32094 - protein, 148 aa, Oryza sativa
MRYVDIGIPANNKGRNSIGCLFWLLARMVLQMRGTILPGHKWDVMVDLFFYRDPEEAKEQEEEAPAQDFAAITDYTAPEQWSADQWTSDVAAPPAATVGDWGAAPAPVAAAEGWDQAGAPVATEAAVVPPVAPTGWDPAAQPAAQGWD

SEQ ID NO: 32095 - protein, 157 aa, Oryza sativa
MDSDVLSSYVSKLAGGIEKITEVLRLNEEVKSREDAWRFHDSMQKFLKRADDDIIRVQAQESVALSLVKEITEYFHGDSAKEEAHPFRIFMVVRDFLSVLDQVCKEVGRINDRTIASSVRHFPVPVNPMMPQLFPRIHALRAGISDDESSATSASSP

SEQ ID NO: 32096 - protein, 252 aa, Oryza sativa; identical to SEQ ID NO: 30657

SEQ ID NO: 32097 - protein, 255 aa, Oryza sativa
MHSDQKTRFSLRGKPVYHYCAVSSFSEYTVVHSGCAVKVGPTVPMDRICLLSCGVSAGLGAAWKVADISKGSSVVIFGLGTVGLSVAQGAKLRGASIIIGVDTNPEKQEKGKAFGVTDFINPEELNEPVQQVVKRLTNGGADYSFECVGDTGVVSTALQSCSDGWGLTVTLGVPKAKPEVSAHYALLLSGRTLKGSLFGGWRPKSDLPLLVDKYANKEIQVDDLVTHDLSFDYINKALELMLENKCLRCVIHMPQ

SEQ ID NO: 32098 - protein, 438 aa, Oryza sativa
MACHLRLFPFTQLLVLVLYKIAAVGADPANAELSTKITQHSPLYNPQPQDFPNEELYRNYLVIQRFKKTITSDPKNITATWTGHDICGNTTYLGFYCAALPGRTKKPTVTVVIFNGYGLRAPKLEGFIDHLPDLALFHAASNDFGGDIPYLTGLAYNYKINVDSNLQIQDDFSRDMVGSHVTTKVHGYCVNLDLDITFHLRPGKDDKKGRSIPGATDSKALLLNYNHLSGPLPVNIGFSKLSYLALANNRLTGAIPPSILHLQDSLLEVLLLNNQLSGCLPHELGMLTKAAVFDAGMNQLTGPIPSSFSCLTSVEQLNLGGNRLYGEIPDALCKLAAVPAGRLANLTLLSNYFTSVGPACLSLIKDGVLNVRNNCIPGFANQRRPAECASFHSQPKACPAASATHVACPAGAANAAAAPADRVVKDYSSYVTYATLHE

SEQ ID NO: 32099 - protein, 259 aa, Oryza sativa; identical to SEQ ID NO: 30235

SEQ ID NO: 32100 - protein, 251 aa, Oryza sativa; identical to SEQ ID NO: 31755

SEQ ID NO: 32101 - protein, 227 aa, Oryza sativa
MDMLLCFVEIFSILCCCIIYYYHLQTKKASASEPTEWPVLGHLFGMFANIHRFHDWATDILAGGMVIFDASELKNLVYLQAALSECLRLYPSVPFEHKAVAADDVLPSGHEMKAGDKVLVFSYSMGRMEGVWGKDCTEFLPERWITSEGKLRYEPSYKFFSFNAGPRTCLGKELAFVQLKTVAAAVMWNFAVEVVPGHAVEPKLSIILHMKNGLAVTVKRRATMASC

SEQ ID NO: 32102 - protein, 214 aa, Oryza sativa
MALVAAAAANPKQKQKQQKASIGRRAWRLLRLAVLWARKGSAVHSLRLLSNLRRAGVGLGVVGRGDRLGYGEREYSIEETPAFRFRTPSARVLRLIPCIAPAVPDTPGLYGDEDRYFFARRDTEPECGGGVGYYDYNGEPGECGGVDDESFRDGAMEEQLLELSMLEASAAAVTEDAGVDAKAEEFIAKFHAQMKLQRQISWLQYNEMMERSLR

SEQ ID NO: 32103 - protein, 269 aa, Oryza sativa; identical to SEQ ID NO: 30174

SEQ ID NO: 32104 - protein, 287 aa, Oryza sativa; identical to SEQ ID NO: 30679

SEQ ID NO: 32105 - protein, 265 aa, Oryza sativa; identical to SEQ ID NO: 30714

SEQ ID NO: 32106 - protein, 255 aa, Oryza sativa
MAARKFFVGGNWKCNGTGEDVKKIVTVLNEAEVPSEDVVEVVVSPPFVFLPQVKGLLRPDFSVAAQNCWVRKGGAFTGEISAEMLVNLQVPWVILGHSERRALMGESSDFIADKIAYALSQGIKVIACIGETLEQREAGTTMEVVAAQTKAIAEKISDWTNVVLAYEPVWAIGTGKVATPAQAQEVHDGLRKWLVTNVSPAVAESTRIIYRGSVNGANCKELAAKPDVDGFLVGGASLKPEFVDIIKSATVKSSA

SEQ ID NO: 32107 - protein, 280 aa, Oryza sativa; identical to SEQ ID NO: 31660

SEQ ID NO: 32108 - protein, 221 aa, Oryza sativa; identical to SEQ ID NO: 30476

SEQ ID NO: 32109 - protein, 248 aa, Oryza sativa; identical to SEQ ID NO: 30794

SEQ ID NO: 32110 - protein, 266 aa, Oryza sativa; identical to SEQ ID NO: 28561

SEQ ID NO: 32111 - protein, 210 aa, Oryza sativa; identical to SEQ ID NO: 30650

SEQ ID NO: 32112 - protein, 259 aa, Oryza sativa; identical to SEQ ID NO: 31765

SEQ ID NO: 32113 - protein, 366 aa, Oryza sativa
MASSDAAAAQAATPLLKDELDIVIPTIRNLDFLEMWRPFFQPYHLIIVQDGDPKKTIRVPEGFDYELYNRDDINRILGPRASCISFKDSACRCFGYMVSKKKYIYTIDDDCFVAKDPSGKDINALEQHIKNLLNPSTPFFFNTLYDPYRDGADFVRGYPFSLREGAPTAVSHGLWLNIPDYDAPTQLVKPLERNSRYVDAVMTIPKGTLFPMCGMNLAFDRDLIGPAMYFGLMGDGQPIGRYDDMWAGWCTKVITDHLGLGVKTGLPYIWHSKASNPFVNLKKEYNGIFWQEELIPFFQSASLPKEADTVQKCYLELAKQVRAKLGKVDGYFNKLADSMVTWIEAWDQLNPPKGAVATANGTAKSK

SEQ ID NO: 32114 - protein, 308 aa, Oryza sativa
MAPGSSIVTDIPESDCVSDGLSEALTGIRLDGDSTCKPWSTSLVTVELSSLTGLNDLLECPVCTNSMRPPILQCPNGHTICSNCKHRVENHCPTCRQELGNIRCLALEKVAESLQLPCKYQSLGCAEIHPYQNKLKHEELCRFRPYSCPYAGSECLIAGDVPMLVSHLINDHKVDLHEGCTFNHRYVKSNPYEVENATWMLTVFKCFGQHFCLHFEAFLLGMAPVYMAFLRFMGEDSEARNFCYSLEVGGNGRKLTWQGIPRSIRDSHKKVRDSFDGLIIHRNMALFFSGGNRQELKLRVTGRIWKEQ

SEQ ID NO: 32115 - protein, 283 aa, Oryza sativa
MAALAPSKMLGTRLNFAGSSRYATAAPTTGAQKIVSLFSKKPAPKPKPAAVTSSSPDIGDELAKWYGPDRRIFLPEGLLDRSEVPDYLNGEVPGDYGYDPFGLSKKPEDFSKYQAYELIHARWAMLGAAGFIIPEACNKFGANCGPEAVWFKTGALLLDGNTLNYFGNSIPINLIVAVAAEVVLVGGAEYYRIINGLDLEDKLHPGGPFDPLGLASDPDQAALLKVKEIKNGRLAMFSMLGFFIQAYVTGEGPVENLSKHLSDPFGNNLLTVISGAAERTPSL

SEQ ID NO: 32116 - protein, 269 aa, Oryza sativa; identical to SEQ ID NO: 30174

SEQ ID NO: 32117 - protein, 320 aa, Oryza sativa; identical to SEQ ID NO: 30442

SEQ ID NO: 32118 - protein, 303 aa, Oryza sativa; identical to SEQ ID NO: 30545

SEQ ID NO: 32119 - protein, 291 aa, Oryza sativa
MGSRYEVEVTVSSARDLKNVNWRNGDLKPYAVLWVDDGAKCSTRVDLDNADNPNWDDKLTLPLPPSSRLDDALLYLDVVHANAAEGVKPLVGSARLPLRDVLDDAGVGARVSRSLRLKRPSGRPQGRLDLRLAVRESARYYDPSPYPAPYGQPAGTRDPYGAPPPAYSSGSGGQYPYGGGYGSGGYAAPPAGYPSAYGAPPQPAYGGAPPVAAYGAAGGAPVVVEETKKKSKMGMGTGLAVGAAAGVLGGLALAGGASYLEDKFEEGVAEKVEDDLDRDDDYAAGGYDDDY

SEQ ID NO: 32120 - protein, 338 aa, Oryza sativa; identical to SEQ ID NO: 30712

SEQ ID NO: 32121 - protein, 39 aa, Oryza sativa
MKGKHIIFAVWFSSHGLQVQHSTNKNSKLYYQDFVQSAI

SEQ ID NO: 32122 - protein, 215 aa, Oryza sativa; identical to SEQ ID NO: 31554

SEQ ID NO: 32123 - protein, 222 aa, Oryza sativa
MATTKHFVLLIILVLLSIGMTTSARTLLGYGIGGEGGGGGGGGGSSGGGGYGGSGYGSGSGYGEGGGAGAGGYGHGGGGGGGGGEGGGSGSGYGSGQGSGSGYGSGAFGAGGYGSGGGGGGGGAGSGYGSGEGYGSGYGSGAGGASGGGGGHGGGGGGGQGGGYGSGSGYGSGSGYGQGGGAYGGGYGSGGGGGGGGGQGGGSGYGSGSGYGYGSGGGGGHY

SEQ ID NO: 32124 - protein, 229 aa, Oryza sativa
MAGAPRGLVLLGVCAVLMAVAVGGEAASVVVGTAKCADCTRKNMKAEDAFKNLQVAIKCKNGNGEYESKATGKLDGTGVFSIPLDADLHSSDCVAQLHGATNEPCPGQEPSKIVPMSEGTFIAVAGQTHYPSALCASATICGPIKKKIIDHFHKKPVPPKPEPKPEPPKPKPEPEHPFLDHIHKKEKHFFDHFHKKPVPPKPEPKPEPKPEPKPQPAPEYHNPSPPAKN

SEQ ID NO: 32125 - protein, 218 aa, Oryza sativa; identical to SEQ ID NO: 31555

SEQ ID NO: 32126 - protein, 231 aa, Oryza sativa; identical to SEQ ID NO: 31995

SEQ ID NO: 32127 - protein, 70 aa, Oryza sativa
MVLSLTNRSSNLHEKVTSSVVIVEVYHDSALKWSRESSSSIWFQGCIHVYFHSITFIAVRYKGGIGLSKA

SEQ ID NO: 32128 - protein, 204 aa, Oryza sativa; identical to SEQ ID NO: 31556

SEQ ID NO: 32129 - protein, 306 aa, Oryza sativa
MAGSLSAALCLTLFCLLGACIAPGARANGRHSRRDLDINLGNGNGGGISIGIGGSGGGGGGGSSGGSSGGGGDLRPCDFENERLYKAYKVIQKFRRTVTCDPQNIISSWSGADLCSTYKGFFCERPPNITDRTIASVDFNGYNLQASSLKEFVDALPDLALFHANSNNFGGAVPDLSRLQYFYELDLSNNKLSPATFPTDVLKLKNATFVDIRFNSFYGELPGGVFCSFPQVQAIFVNNNQFSGSLPDNIGDSPVNYLSLANNNFTGEIPKSIARMANTLFEVLFLNNKLSGSEQDKYRTYSALHP

SEQ ID NO: 32130 - protein, 331 aa, Oryza sativa; identical to SEQ ID NO: 31895

SEQ ID NO: 32131 - protein, 252 aa, Oryza sativa; identical to SEQ ID NO: 30482

SEQ ID NO: 32132 - protein, 250 aa, Oryza sativa; identical to SEQ ID NO: 30579

SEQ ID NO: 32133 - protein, 210 aa, Oryza sativa; identical to SEQ ID NO: 30650

SEQ ID NO: 32134 - protein, 210 aa, Oryza sativa
MVLMAGMLPGVECARRRRLRQGGGEAPCGTRRPSLCLYAGGHDHALLGSSACKQQRSACEEQQPGWWTLDSNVREAKERLDQKLRSQRESAVVVVKRHNKAQVAGTSSDGGEQSTATTAAPQWEVYTRKEGRRRMWFRRLGRRPTPEEEEECAVCLEELRAGEAVAHLPCTHRFHWGCAVPWVQTASRCPVCRAAVYLTSPAPAASNNYN

SEQ ID NO: 32135 - protein, 271 aa, Oryza sativa; identical to SEQ ID NO: 30299

SEQ ID NO: 32136 - protein, 259 aa, Oryza sativa
MAPPSDSGDSAPIPAGAISKLLIVIAMQTEALPLVNKFHLVEAEESIFPKGAPWIRYHGNYKGLHVDLVWPGKDPVLGVDCVGTVSAALVTYASIQSLKPDLIINAGTAGGFKAKGADIGDVYLASDVAFHDRRIPIPVFDMYGIGTRKTFATPNILKELNLKVGKLSTGDSLDMSPHDESAILNNDATVKDMEGAAVAYVADMFSTPAIFVKAVTDIVDGEKPTAEEFLQNLVAVTAALDKAVTEVVDFISGKCISDL

SEQ ID NO: 32137 - protein, 233 aa, Oryza sativa
MAGGGDELKLLGMWASPFALRAKLALSFKGLSYEYVEEDLKNKSELLLTSNPVHKKVPVLIHNGKPVCESQVIVQYIDEAFPDAGVPLLPSDPYDRAVARFWAAYIDDKLLKSWLQASMCKTEQEKAAAMKETFAAVANLEAAFKECSKGKPFFGGDAVGYVDVTLGAVIGFVRVGEAVHGMRLFDASRSPLLDAWLDRFAALDAAKAVLPDTGRLAEYAKMKQAEWAAAATN

SEQ ID NO: 32138 - protein, 219 aa, Oryza sativa
MSASAAPTHIRFSSAAPPSAAALRRPRRRCATPVRCSLAAAPGLRAPPELIDSILSKVKGTDRGVLLPKDGHQEVADVALQLAKYCIDDPVKSPLIFGEWEVVYCSVPTSPGGLYRTPLGRLIFKTDEMAQVVQAPDVVKNKVSFSVFGFDGAVSLKGKLNVLDGKWIQVIFEPPEVKVGSLGFQYGGESEVKLEITYVDEKIRLGKGSRGSLFVFMRR

SEQ ID NO: 32139 - protein, 210 aa, Oryza sativa
MQYAVTVDVLHTVFSAFGTVQKIAMFEKNGGMQALIQYPDITTAAVAKQALEGHCIYDGGYCKLHLSYSRHTDLNVKAHDERSRDYTVSSDPSAQMQAAAQAPGPSTPGVAWQNTAPSASFYGSTAAATPVGQVPAWNPNMQAGAFGSASSAYPTQPMMPGSVPHYPGIGSSSGALPVSFQASHQMPQYGVPPAAPHHAPPAGQPMYFPK

SEQ ID NO: 32140 - protein, 339 aa, Oryza sativa; identical to SEQ ID NO: 31603

SEQ ID NO: 32141 - protein, 250 aa, Oryza sativa
MHALPRSRLGFGFFASMSSSAARVGGGGGRDPSNNPAVGRLRELVQRGDAADGWEKSWEAAVTPWDLGKPTPIIEHLVKSGTLPKGRALVPGCGTGYDVVALASPERFVVGLDISSTAVEKAKQWSSSLPNADCFTFLADDFFKWKPSEQFDLIFDYTFFCALDPSLRLAWAETVSGLLKPHGELITLIYLISDQEGGPPFNNTVTDYQKVLEPLGFKAILMEDNELAIKPRKGQEKLGRWKRFVPGSSL

SEQ ID NO: 32142 - protein, 98 aa, Oryza sativa; identical to SEQ ID NO: 31578

SEQ ID NO: 32143 - protein, 270 aa, Oryza sativa; identical to SEQ ID NO: 28586

SEQ ID NO: 32144 - protein, 458 aa, Oryza sativa
MALHLLHLLAFSLLFAVATPIRDITDVCSSQIKDFQYLNSTGLHLELHHPRSPCSPAPVPADLPFTAVLTHDDARISSLAARLAKTPSARATSLDADADAGLAGSLASVPLSPGASVGVGNYVTRMGLGTPATQYVMVVDTGSSLTWLQCSPCLVSCHRQSGPVFNPKSSSTYASVGCSAQQCSDLPSATLNPSACSSSNVCIYQASYGDSSFSVGYLSKDTVSFGSTSLPNFYYGCGQDNEGLFGRSAGLIGLARNKLSLLYQLAPSLGYSFTYCLPSSSSSGYLSLGSYNPGQYSYTPMVSSSLDDSLYFIKLSGMTVARNPLSVSSSAYSSLPTIIDSGTVITRLPTSVYSALSKAVAAAMKGTSRASAYSILDTCFKGQASWVSAPAVTMSFAGGAALKLSAQNLLVDVDDSTTCLAFAPARSAAIIGNTQQQTFSVVYDVKSSRIGFAAGGCS

SEQ ID NO: 32145 - protein, 337 aa, Oryza sativa
MAMAAPLTLVVVAAAVAVVFVGGGVEGWVLKEGFYEQSCPRAEALVKHYVEQHVPLAPSVAATLIRTHFHDCFVRGCDASVLLNGTDGAEAEKDAAPNLTLRGFAFIDRIKSVVESECPGVVSCADILALATRDAISVIGGPFWRVATGRRDGRVSIKQEALDQIPAPTMNFTDLLSSFQSKGLDLADLIWLSGAHTIGIAHCNSFSKRLYNFTGKGGPGDADPSLDAEYAANLRRSKCAAPSDNTTIVEMDPGSFLTFDLGYYRGLLRRRGLFQSDAALVTDAAAEANIASVVSSPPEVFFQVFARSMAKLGMVGVKTGSEGEIRKHCALVNDIHY

SEQ ID NO: 32146 - protein, 257 aa, Oryza sativa; identical to SEQ ID NO: 31589

SEQ ID NO: 32147 - protein, 266 aa, Oryza sativa
MAMTGYKYQAQELMRDYLLADPLVPYTSVLVGIALCKMAYDLTRVLSSFYFKGYSSLTKIQRVEWNNRGMSSAHAIFITAISLYLVMSTDLFSDRLKGPITFRNSIISTFALGVSVGYFIADLAMIFWLYPSLGGMEYIVHHTLSLVAIAYTMLSGEGQFYTYMVLISETTTPEINLRWFLDTAGLKKSSAYLVNGILMFVAWLVARILLFIYVFYHIYLHYSQVMQMHAFGYYLTFIVPSVLFVMNTMWFMKILKGVKKTLGKWS

SEQ ID NO: 32148 - protein, 72 aa, Oryza sativa
MVRRRTSSAEIMAPPWLMPPVFSRKGSGTSRASLYRGQIAPMPARLSSGDEVFAGFLIRTSCHRIVAEFGFL

SEQ ID NO: 32149 - protein, 34 aa, Oryza sativa
MQAQAGMVEQPPQIRSVRHLGLRVNYTAMASICS

SEQ ID NO: 32150 - protein, 320 aa, Oryza sativa
MGYSYSSAAVAVSVLVVALVAAASGQLSTTFYASSCPTALSTIRSAVNAAVAREPRMGASLLRLHFHDCFVQGCDASILLADNATFRGEQGAFPNVNSLRGFEVISSIKMQLEASCRQTVSCADILAVAARDSVVALGGPSYPVELGRRDGMTTNQTMANTNLHPPTTDLGNFVTSFAGKGLSPTDLVVLTGAHTVGVAQCTNFRSRLYGESNINAPFAASLRASCPQAGGDTNLAPLDSTPNAFDNAFFTDLIAGRGLLHSDQELYRGDGSGTDALVRVYAANPARFNADFAAAMVRMGAIRPLTGTQGEIRLNCSRVN

SEQ ID NO: 32151 - protein, 227 aa, Oryza sativa
MSIKHCEQHKDCERQRLYRRCCAAIFGILLLLLLIVLIVWLILRPTKPRFYLNDLTVVCLNVTTGGSYAGATASSGYFSFLTVTMQTTLAARNGNERVGIYYDRADVYAEYKGLRITVPTSLPPVYQGHPDLTVWSPFLSGNNVQLPPYLAVSITQDETAGYLLVTIRVDGWIRYKAGAFITGHYHLRVRCPALLIVNDGRGSYGSNSGGGNGYFRFQRAAACVVDV

SEQ ID NO: 32152 - protein, 316 aa, Oryza sativa
MANSSCPSTSPAALRLARPKLPDSAMIMQLQLQLQHAPLFPRPPAARAHHHHHHQRRLLLAVSDHVAAKPVTVPVGRMRMRAATAMVSQEEAAATAVEEQQEEEVEEEQLQEEDGAAVQEEEQGGVLEGSSGGGEAEAEAAGITTKLYFGNLPYNCDSAQLAGIVQDYATPEMVEVLYDRATGRSRGFAFVTMSTIEDCEQVIKNLDGSLYSGRTMRVNFADKPKPKLPLYPETEHKLFVGNLSWTVTSEMLTEMFQKCGNVVGARVLYDGETGRSRGYGFVCYSTKEEMDEALSSLNGTELEGREIRVNLALGKK

SEQ ID NO: 32153 - protein, 291 aa, Oryza sativa
MAAPVVDAEYLRQVDRARRHLRALIFSKGCAPIMLRLAWHDAGTYDVNTKTGGANGSIRYEEEYTHGSNAGLKIAIDLLEPIKAKSPKITYADLYQLAGVVAVEVTGGPTVEFIPGRRDSSVCPREGRLPDAKKGALHLRDIFYRMGLSDKDIVALSGGHTLGRAHPERSGFEGAWTQEPLKFDNSYFLELLKGESEGLLKLPTDKALLEDPSFRRYVDLYARDEDTFFKDYAESHKKLSELGFTPRSSGPASTKSDLSTGAVLAQSAVGVAVAAAVVIVSYLYEASKKSK

SEQ ID NO: 32154 - protein, 282 aa, Oryza sativa
MSKEVSEEPEHVRPKDYTDPPPAPLFDVGELRLWSFYRALIAEFIATLLFLYITVATVIGYKVQSSADQCGGVGTLGIAWAFGGMIFILVYCTAGISGGHINPAVTFGLLLARKVSVIRAVMYIVAQCLGGIVGVGIVKGIMKHQYNANGGGANMVASGYSTGTALGAEIIGTFVLVYTVFSATDPKRNARDSHVPVLAPLPIGFAVFMVHLATIPITGTGINPARSIGAAVIYNQKKAWDDHWIFWAGPFIGALAAAAYHQYILRAAAIKALGSFRSNPSN

SEQ ID NO: 32155 - protein, 287 aa, Oryza sativa; identical to SEQ ID NO: 30679

SEQ ID NO: 32156 - protein, 287 aa, Oryza sativa; identical to SEQ ID NO: 30679

SEQ ID NO: 32157 - protein, 287 aa, Oryza sativa; identical to SEQ ID NO: 30679

SEQ ID NO: 32158 - protein, 320 aa, Oryza sativa; identical to SEQ ID NO: 30442

SEQ ID NO: 32159 - protein, 266 aa, Oryza sativa; identical to SEQ ID NO: 28561

SEQ ID NO: 32160 - protein, 227 aa, Oryza sativa; identical to SEQ ID NO: 30236

SEQ ID NO: 32161 - protein, 241 aa, Oryza sativa
MRPPSPPRPLAFPTLDSLAAFLGSRLPASALASWGTAPGTKTLLNLFLELSQGECVLISAAAAAAPPSQQQQQHPVVRAVHVASVRIRNGRGALLMETGQLLSDGTLRSRGGLRPLSEKMRPGETPEAAAVRAVREELGERVRVRILGGEEARVEERDSASYPGLHARYVLHAVDAEVVEGVPEDGEFDTEEGGEHEDEVVVDGAAAAITVKRHYWKWVDDNDNDEEDVAGAEEGARQSAH

SEQ ID NO: 32162 - protein, 305 aa, Oryza sativa
MNAMDEEEQEQPPQRYWFPYWTSPPPPPPPPPPPPSSSRYRPPSPPSSRHPHPTIPAARAAPPLGPTNRRLHQQPPPPASRDGRHEPPPKPKDVVVIPTDTVLHHKQPPPTHHHQHQQHKVKDQEEKKGDLRKDLKAGLAGMLSAASHGQQGTSIITLAGDNKGASMKISSPAPGSKGAGDDKRSSADGKGGVKAMINATCSPSTTRCFSTAPAAAATSGCTSSSSSPQTPSPSPRPRARRSSSIMSSPIPATRRRSPIAARRRRRLVPAPPNPTSHPPLPKATSPPVQLTSDSADILMYVCALY

SEQ ID NO: 32163 - protein, 158 aa, Oryza sativa
MADGNPDGIKRYTPPVHRNRANNRRKSGDRAEKASYLYNNDGEKSHAPSLKNLPPIIPHETFFSNPQNDYSQTRLIPLEGCCASEAAQLLNDRWAAAMNLYNDQSYDSPDKPVMYSGSSGSSWGHGHMKLPHQMNFSEELRRALDEQPVTGPSVNTWN

SEQ ID NO: 32164 - protein, 287 aa, Oryza sativa; identical to SEQ ID NO: 30679

SEQ ID NO: 32165 - protein, 105 aa, Oryza sativa
MASTSAAEPGVRFSDRAARRSSLGLRSMVLLMHVVFVGAVFLLDPTLDRRIREEPWYIGAYGALVLIALVQYFYTAGSSPGYVLDAMKAGSTMHATYINTATLSK

SEQ ID NO: 32166 - protein, 160 aa, Oryza sativa
MLPAALLPHLLIPPMMGRIASPLIPPKPGRITWPRSGRTPGTPMTSSPPMLWSTRCWSNASALLWSPPPRIRSPSPSLSRSWTYNEPLLAAILVSTAKSCSALADLRRINLDGLRWCVFDAKGQVLGRLASQIAVVLQGKDKPTYAPHVENRDMCVVLNG

SEQ ID NO: 32167 - protein, 273 aa, Oryza sativa
MARRRHACFLLLLPLLVLQLLLAGGSLVDDLPAATHQVPRLVGPQRKLQQLPNPRPQPQPLPQPNPNPQPQPLPQPQPQPQPQPQPLPQPQPQPQPLPLPGPQPLPQPGPQPNPNPQPLPQPNPNPQPLPQPDPNAPPLPLPQPNPNNPQPLPQPDPNAPSLPLPQPDPNAPPLPLPQPDPNAPPQPLPQPDPNNPQPLPQPDPNAPPQPLPQPDPNSPPQPLPQPDPNTPPGQQINAKISSQPDSIGGARTLYPYGVIYNLMPLFSLFFYMF

SEQ ID NO: 32168 - protein, 301 aa, Oryza sativa
MPEHGSKPDISFAGRFTASAIAACFAEVCTIPLDTAKVRLQLQKNVAADAAPKYRGLLGTAATIAREEGAAALWKGIVPGLHRQCIYGGLRIGLYEPVKSFYVGKDHVGDVPLTKKIAAGFTTGAIAISIANPTDLVKVRLQAEGKLAPGAPRRYAGAMDAYAKIVRQEGFAALWTGIGPNVARNAIINAAELASYDQVKQTILKLPGFKDDVVTHLLSGLGAGFFAVCVGSPVDVVKSRMMGDSAYTSTIDCFVKTLKNDGPLAFYKGFLPNFARLGSWNVIMFLTLEQVQKLFVRKPGS

SEQ ID NO: 32169 - protein, 244 aa, Oryza sativa; identical to SEQ ID NO: 30851

SEQ ID NO: 32170 - protein, 125 aa, Oryza sativa; identical to SEQ ID NO: 30952

SEQ ID NO: 32171 - protein, 281 aa, Oryza sativa
MRGGVAGPTAGEPPGTEAEAEEVEESSAGDDEELELGLSLGSKKQQQQQHAPCRILTARDLQPAAALSPDSSVSSSSPAAAAAAGGKRAEGPTATTSPGTVASGHPHSSFGVVGWPPIRQFRMNSLFNQAKENTSETDTKKTATNESDVQKDKEEGEKKGRVAGWVKVNMDGEVIGRKVDLNAHRSYKTLALALELMFTKPSIGLCASHNTNSLKLLDNSAEYQLTYEDRDGDWMLVGDVPWEMFVSSVKRLRIMRTSDANGLGQRYQGIHRTIASTRGRS

SEQ ID NO: 32172 - protein, 364 aa, Oryza sativa
MNLTAITALLIAALAAADAATIPREHHARFLAEQATLAEELAAWKDSPAGRYAKENNLYKEASSSHTDTESASVESNDHLTRFFLSKVTAEKAQRENPEATYGLSSPFSLMTEEEFAKYVSKTQTLGKASFFRGLAEEATEVVEEVEVAQATTVDWTTSGCVAGVKNQGQCGSCWAFSAIGSLESAYCLKYGSLTLLSEQQVTNCDPQSSGCDGGWPSWALSYIKSNGGVCTSASSPYTLGSSGVTGSCSTSCTKKAIKITSVASVTATDAGFATAITKQPVAVAVAAGNPSWKQYTGGVVSSCSTSALDHAVLAVGFDSNSFRFKNQWGTSWGAGGYIQLKRTSGSSGTCGVINRNAVYPVVA

SEQ ID NO: 32173 - protein, 286 aa, Oryza sativa
MEWIRSEIKKERPKNDWIAGAAITNPAADRKKPKRRAREWWREEYADELAKKQKRRALAKSKSEQVGLQWWERDIDDDLDAKGRSKWSMMKSWSRRSNGSTGNGNGNGNGSINWWVNGARSTRDWASGEFVPKSSGAVSSTPSMRGTVCYVAPEYGGGGPLSERCDIYSYGVLLLVLISGRRPLQVTASPMSEFEKASLISWAKHLARVSRLIDLVDPALQDVNRDEVLLCITVALLCIQRSPARRPSSEEVLRMLSGEGEPPHLPLEFSPSPPGGFPFKSRKKVR

SEQ ID NO: 32174 - protein, 94 aa, Oryza sativa; identical to SEQ ID NO: 31592

SEQ ID NO: 32175 - protein, 330 aa, Oryza sativa
MMMRCGWSAAAVVAVVVMVGVMVASPVAGELARVEHPTKEDGSLAVLVVGDWGRKGQYNQTLVATQMGVIGEELAADFILSTGDNFYNDGLTGDNDTASFQESFTNIYTADSLQKPWYIVLGNHDYTGDALAQQSPAIRAVDSRWTSINKSFIVDSDIAEFFLVDTVPFVQKYWNESKFDWRQVAPRDTYLSTLLTDLGDAMSQSNATWKIVVGHHTISSGCEHGNTTDLVAMLLPVLKTYGADMYINGHDHCLQRITSIDSPLEFITSGGGSRAWAGKFKQTSDKLEFIYDGQGFLSMQLTMAEASFAFYDVTGAVLYSWQLAKSTSTN

SEQ ID NO: 32176 - protein, 290 aa, Oryza sativa
MESTKVSAMLLLAMLALSSSPLALACGSCGSGGSGSAPSGGGGSAPSGGGGGIGGVVGGIVGGVAPVVGGIVGKVPPVVGGVVGGVAPVVGGIVGKVPPVVGGVVGGVAPVVGGIVGKVPPVVGGVVGGVAPVVGGVVGGVAPVVGGVAPVVGGVVGGIAPVVGGIIGGGSGGGGYSPSPSPPKRHGGRKACPPSPTPTPSTPTPSSSDTCPIDALKLGVCVDLLGNEVHIGDAHVTCCPLVKDIAGLSAAACLCTAIKAKVLDISIYIPIALKLLVNCGCDVPPGYTCA

SEQ ID NO: 32177 - protein, 216 aa, Oryza sativa
MVLWVFGYGSLIWNPGFDFDEKILGFVKGYKRTFNLACIDHRGTPEHPARTCTLESDEEAICWGMAYCVKGGLKKEQEAMKYLERRECEYDQKISVDFYKEGDSLKPAVTGVLVFVSTPDPVGNKYYLGPAPLEDMARQIATANGPNGNNRDYLFSMEKALSNICHEDDSIIELANEVRKVLSRPKEKITGSDSPQKSHALVHLSALPEGTVVDSR

SEQ ID NO: 32178 - protein, 405 aa, Oryza sativa; identical to SEQ ID NO: 31391

SEQ ID NO: 32179 - protein, 246 aa, Oryza sativa; identical to SEQ ID NO: 30336

SEQ ID NO: 32180 - protein, 296 aa, Oryza sativa
METSCFLTSNASPVKSMVMPSPAGVVKARPHVLFGGRRAASSSVTTCCSYNGEGAAPAIDPDWRSFRAQLYFNEQYAKSVNPAVAAVRATATTPEPVKIGDKWAHPLVEPEKGCLLIATEKLDGSHIFERTVVLLLSAGVLGPVGVILNRPSLMSIKEAQAVFAETDIAGAFSGRPLFFGGPLEECFFLLGPRAAAAGDVVGRTGLFDEVMPGVHYGTRESVGCAAELVKRGVVGVRDFRFFDGFCGWEREQLRDEVRAGLWRVAACSPAVLGLATVVKGGLWEEVQGLVGERRVW

SEQ ID NO: 32181 - protein, 284 aa, Oryza sativa; identical to SEQ ID NO: 28809

SEQ ID NO: 32182 - protein, 318 aa, Oryza sativa; identical to SEQ ID NO: 30569

SEQ ID NO: 32183 - protein, 287 aa, Oryza sativa; identical to SEQ ID NO: 30679

SEQ ID NO: 32184 - protein, 266 aa, Oryza sativa
MQINHMATASLSLLLCLAAAAGAAAAAVPPRLQCFEHPPDMKAGGGEAGVVVHDLAGYEAYVTGAAHSGRAIVLASDVYGFQAPLLRQIADKVGDAGYYVVVPDLFHGDPATTTVNFTEWLESHSPVKEAEKAKSIFAFLRNEGKSLVGVGGYCWGGKFAVEVAKTNEVEAVVISHPYAVTADDMKEVKWPIEILGGQNDTVTPPRLVYQYVHALRQRNDIDFYAKIFPGVSHGFAGRYNTSDPFALETGKQALALMLDWFQKHLK

SEQ ID NO: 32185 - protein, 320 aa, Oryza sativa; identical to SEQ ID NO: 30442

SEQ ID NO: 32186 - protein, 252 aa, Oryza sativa; identical to SEQ ID NO: 30657

SEQ ID NO: 32187 - protein, 287 aa, Oryza sativa
MARSLAALLLLLVAAAGASHAASPAEMYWKIALPTSPMPGAIRDLISPASSAASASKDKEDTVGSVFFLEKDLFPGSKMTLHFTRATAGAALLPRGRADSVPFASEKLPEILSQLSIPAGSPTADAMRSTLAVCEAARIASETAPKHKHYCATSLESMVELVASSLGTRDVHAVSTEVVNRAGPTPRQAYRVEAVRPVPVPGGDMVACHRMPYAYAVFGVYGIKGAAYTVTLAGADGTMAEAVAACHGDVDGHGVAVAEAYKRLGVAPGKVAVCHFLPQDDMLWVRN

SEQ ID NO: 32188 - protein, 294 aa, Oryza sativa
MQMQNADPKATLAERISITERLSSEIHSFLNTRRSSKPKDDKLYISNEKQDASLCRQSLESVHLHGATSAPRLAEDDNDNSVASDLHCFELSMHGHTIQNNDLIGTRQRVTSCMYSPMRRLEFSNGIPVEGSRISTMSPCSMKDKARPNGIREQLNASTPEISPCNDAKNAPRCAQDETVMTQVSQRLHDDLLKIKSEAPQHAYLGQKSNDHHSRAGQFRDQCTTSGNVYDLCSPARQLNQRSSLDHEITEASPTHPLEGKSTTLKAKLLQARLEGQHARMRASGYSLTSTRRK

SEQ ID NO: 32189 - protein, 183 aa, Oryza sativa
MLNLIKIKGQKKEDAANANGKPPAKKQSPGELRLHKDIAELNLPKSTRISFPNGKDDLMNFEVTIRPDEGYYLGGKFIFTFQVPPAYPHEPPKVKCKTKVYHPNIDLEGNVCLNILREDWKPVLNVNTIVYGLNLLFSQPNDEDPLNHEAAAVLRDNPEKFERNVQRAMAGGYVGETHFPRCM

SEQ ID NO: 32190 - protein, 256 aa, Oryza sativa; identical to SEQ ID NO: 30965

SEQ ID NO: 32191 - protein, 448 aa, Oryza sativa
MEITSSAMLKPAPTPTPHPLAGEKVPLTAFDRAAFDVFVPMVFAYRAPAPSSEAVKEGLRMAVAAYPLAAGRLAVDVAADGQGRRRRRRVLHVNDEGALVLDATVEADLDAVLAANVATDLYPAPPEHSFGAAVLQVQLTRFRCSGLVVGLIVHHHVFDGHSTSAFCTTWARAVRDGEAFSVPSPCLDRAITSVPRSPPAPVFDHRSIEFKVGNKSSDSSGAAAAAVEKITNIGVRFTAKFVAELKARVGGRCSTFECVLAHAWKKMTAARGLKPEEFTRVRVAVNCRRRANPPAPADLFGNMVLWAFPRLQVRRLLSASYRDVVGAIRAAVARVDGEYIQSFVDYVEVADARGEELAATAAEPGETLCPDLEVDSWLGFRFHEMDLGTGPPAAVLSPDLPIEGLMILVPVGGDGGGVDLFVALADDRAQVFEQICYSLEEHAIPSHL

SEQ ID NO: 32192 - protein, 163 aa, Oryza sativa
MLLLVQNTSGRRRHLMRRPPGCARRRAASLTVVQGMGYRPGRRRRCRCRRPWEQERPDLERLEAVPAGRVVLLQQVGEVVVAGDGDERVQVLRRELAPQAHRLPPAHLPQLPLQLWIHNPNVRCKSSDRSRDRTTSLTQEQVAGVPWKGRERSTETTRLSPPT

SEQ ID NO: 32193 - protein, 246 aa, Oryza sativa; identical to SEQ ID NO: 31619

SEQ ID NO: 32194 - protein, 153 aa, Oryza sativa
MAFFSSYGQPGPMGSPMGGMGYGPGPELGRYGYGFRGSPMPVSSPWSGGALVENNDSSASRKRRGGPDGMAENDWICPKCENVNFSFRNSCNMKKCGAPRPSPGSNATPCRKDKDAPEGSWTCPECNNLNYPFRTACNRKGCGSSRPAAATAN

SEQ ID NO: 32195 - protein, 124 aa, Oryza sativa
MIPLFMMFAGGPLGTGRQWFSWIHQDDLVDLIYESLKNPSYKGVINGTAPNPVRLSEMCERLGRVVGRPSWLPVPEIALKAVLGEGASVVLEGQKVLPVKAKQLGFSYRYPYVQDALRAIARDL

SEQ ID NO: 32196 - protein, 201 aa, Oryza sativa
MTPPLKSMGAIKKEIVIRLQSSEKGHKKAIKVAAAVSGVESVTLAGEDKNLLLVIGFGVDSNDLTEKLRRKVGHAEVVELRTVDADELMRVAAANQYPYRYYPGAPPPAPYYGNGGYPPPHQRGGGGGGSGGGYYTPMTMATGGYYGGGGGGYPQYGQSSSYPQYGQSSSYYPPAAAATTNTHTVVHHQYANNDPDSCAIM

SEQ ID NO: 32197 - protein, 250 aa, Oryza sativa
MKVQCDVCAAEAASVFCCADEAALCDACDRRVHSANKLAGKHRRFSLLQPLASSSSAQKPPLCDICQEKRGFLFCKEDRAILCRECDVTVHTTSELTRRHGRFLLTGVRLSSAPMDSPAPSEEEEEEAGEDYSCSPSSVAGTAAGSASDGSSISEYLTKTLPGWHVEDFLVDEATAASSSSDGLFQGGLLAQIGGVPDGYAAWAGREQLHSGVAVAADERASRERWVPQMNAEWGAGSKRPRASPPCLYW

SEQ ID NO: 32198 - protein, 287 aa, Oryza sativa
MARSLAALLLLLVAAAGASHAASPAEMYWKIALPTSPMPGAIRDLISPASSAASASKDKEDTVGSVFFLEKDLFPDSKMTLHFTRATAGAALLPRGRADSVPFASEKLPEILSQLSIPAGSPTADAMRSTLAVCEAARIASETTPKHKHYCATSLESMVELVASSLGTRDVHAVSTEVVNRAGPTPRQAYRVEAVRPVPVPGGDMVACHRMPYAYAVFGVHGIKGAAYTVTLAGADGTMAEAVAACHGDVDGHGVAVAEAYKRLGVAPGKVAVCHFLPQDDMLWVRN

SEQ ID NO: 32199 - protein, 238 aa, Oryza sativa; identical to SEQ ID NO: 31955

SEQ ID NO: 32200 - protein, 100 aa, Oryza sativa
MPVHGQNLVSWNSMLNSFAANGRPNEVLTVFREMLGVNFAPDGVTIVSVLTACAEIGALALGRRVHVYAEKVVLVDNSHVSNALINLYAKCGIVNDARLI

SEQ ID NO: 32201 - protein, 288 aa, Oryza sativa; identical to SEQ ID NO: 31587

SEQ ID NO: 32202 - protein, 542 aa, Oryza sativa; identical to SEQ ID NO: 31536

SEQ ID NO: 32203 - protein, 215 aa, Oryza sativa
MAHRVDNEYDYLFKIVLIGDSGVGKSNILSRFTRNEFCLESKSTIGVEFATRTLQIEGQTIKAQIWDTAGQERYRAITSAYYRGAVGALLVYDITKKQTFENIQRWLRELRDHADSNIVIMMVGNKSDLNHLRSVPEEDGQALAEKEGLSFLETSALEALNVEKAFQTILKDIHQIISKKALAAQEAAGSGPPTQGTTINVTDSAVNTKRGCCSS

SEQ ID NO: 32204 - protein, 216 aa, Oryza sativa; identical to SEQ ID NO: 30559

SEQ ID NO: 32205 - protein, 340 aa, Oryza sativa; identical to SEQ ID NO: 30320

SEQ ID NO: 32206 - protein, 309 aa, Oryza sativa
MQVQMQMQQATTVLSSSSNRPWTLWCHPVPVVSSPSHAKNKKHGLRLRAGMAMASSELPDLSAIQRVVLDIEGTTTPISFVADVLFPYARDNVRRHLAATYGSSEETRADVALLRAQVEEDLAQGVDGAVAVPPDAEGEGEGAVVEALAANVESMIRADRKVTALKQLQGRIWRRGFDSGELRSEVYDDAADALRRWRAKAYIYSSGSREAQRLIFANTAAHGDLRDHLCGFFDTTIGAKREVSSYYEIWQTLGTDRPSQILFLTDVYQEAAAAKTAGLEVIISVRPGNAPLPDNHGFHTITSFAEISI

SEQ ID NO: 32207 - protein, 213 aa, Oryza sativa
MGRGYSYSPSPPPRSYRRRASSPIPRDRYGGRGRDLPTSLLVRNLRRDCRPEDLRRPFGQFGRLKDIYIPRDYYSGEPRGFGFVQYYDPDDAADAKYYMDGQVILGREVAVVFAEENRKKPSEMRSRDRISGSRGRSYDQRYSRSPRYSPPPRGRSPYRSPSYSRSPSPRYARRRMRERSYSPVESRSRSRSPVEEGYGGGSTRRERSLSVSE

SEQ ID NO: 32208 - protein, 223 aa, Oryza sativa
MEESDAAAASAKAPNGEASGGGGRPVEVEDTLPGVLRSFVDGVCSQGGGGGGEPLLRRIRAASCETAPRLREASRNSARDLLEWTRRGSGLRAILVISVGTITLIALTGLLIFMFFLLVATTNAVVVSVLMSLAAAGGFLAMFFACLVAVYIGVVSVAVFVISATVISAIVGVMIATGWLGFFWMIWFAARKSMDLTKHSIGVTNSAIQSYSASRHAKQKPID

SEQ ID NO: 32209 - protein, 408 aa, Oryza sativa
MAPKVAVTEATGRQAASFVLGCVATLTVMLLFQYQAPPDYGRAARSPVQFSTSRDQLLLHCGGNGTAPPPPVIARGGEEANITGKPPTTATAVAEEQPPTKPPATSTASSPTHHIPATSTDLEEEGGEFRGLAAAVARAATDDRTVIITCVNHAFAAPDSLLDIFLQGFRVGDGTPELLRHVLVVAMDPTALTRCRAVHPHCYLYTMPGLDVDFTSEKFFASKDYLELVWSKLKLQRRILQLGYNFLFTDVDIVWLRNPFKHVAVYADMAISSDVFFGDPDNIDNFPNTGFFYVKPSARTIAMTKEWHEARSSHPGLNEQPVFNHIKKKLVKKLKLKVQYLDTAYIGGFCSYGKDLSKICTMHANCCIGLQSKISDIKGVLADWKNYTRLPPWAKPNARWTVPGKCIH

SEQ ID NO: 32210 - protein, 265 aa, Oryza sativa; identical to SEQ ID NO: 30714

SEQ ID NO: 32211 - protein, 296 aa, Oryza sativa
MIPFVTIFHWDTPLALESKYGGFLSEDIVKEYVDFAEVCFREFGDRVKYWTTFNEPFTYSAYGYGKGVFAPGRCSSYVSKSCGVGDSSREPYLVAHHIHLSHAAAVQLYRTKYQPTQKGQIGMVVVTHWFVPYDNSDADRGAVQRSLDFIYGWFMDPIVHGDYPGTMRGWLGNRLPEFTPEQSAMVKGSYDFIGVNYYTTYYAKSIPPPNSNELSYDLDNRANTTGFRNGKPIGPQVSVSSSSTPRGDTTTRPSMLQKTASMRVTTAHCQRRSRMDTGSSSTQSTCSSSTTPSRMG

SEQ ID NO: 32212 - protein, 246 aa, Oryza sativa; identical to SEQ ID NO: 29285

SEQ ID NO: 32213 - protein, 55 aa, Oryza sativa
MTASPSPSLAAGLQELGAAVSSPRLPIAGRRIRPRRVWRMRIQRPPASAATSPAS

SEQ ID NO: 32214 - protein, 279 aa, Oryza sativa; identical to SEQ ID NO: 31604

SEQ ID NO: 32215 - protein, 277 aa, Oryza sativa; identical to SEQ ID NO: 31605

SEQ ID NO: 32216 - protein, 431 aa, Oryza sativa
MMLEGNSCLISRSLPSSCEPESQWAYLSHEVLNGKRPAPEDAEAEDMDEVDFGGGKRSKPPSPQPHTPDISEGHGSSRHVAASGGGEEHGNGSSLIGAIGRDLTINCLLRLSRSDYGSVASLNKDFRSLVRNGEIYRLRRQSGVAEHWVYFSCNVLEWDAYDPYRERWIQVPKMPPDECFMCSDKESLAVGTELLVFAMAHIVFRYSILTNSWTRADPMISPRCLFGSTSVGAKAYVAGGTDSSGRILSSAEMYDSETHSWTPLPSMNRARKMCSGVFMDGKFYVVGGVASNNKVLTCGEEYDLKRRSWRVIENMSEGLNGVTGAPPLIAVVNNELYAADYSEKDVKKYDKQNNKWITLGKLPERSVSMNGWGLAFRACGDRLIVIGGPRTSIGGTIELNSWTPDERPPVWNLIARRPSGNFVYNCAVMGC

SEQ ID NO: 32217 - protein, 339 aa, Oryza sativa; identical to SEQ ID NO: 31608

SEQ ID NO: 32218 - protein, 269 aa, Oryza sativa; identical to SEQ ID NO: 30174

SEQ ID NO: 32219 - protein, 228 aa, Oryza sativa
MVPAEVLSELAPYVVLAEKLGRLAVQLVAGGGGIKSVKVTYASARAPDDLDTRLLRAMITKGLIEPISSVFVNLVNADFTAKQRGVRITEERILLDGSPETPIDYIQVHIAHVESKFPSAISESGEITVEGKVKDGIPHLTKVGSFQVDVSLEGSLILCRQVDQPGMIGAVGSVLGEENVNVSFMSVGRIAPRKHAVMAIGVDEEPKKSTLTKIGEIPAIEEFVFLKL

SEQ ID NO: 32220 - protein, 364 aa, Oryza sativa
MSQPKTHKIALLPGDGIGPEVCAEAVKVLEAVGALRGHTFAFERALCGGASYDVHQSHLPQETIDIVARSDAVLFGSVGGPPDAQEDPKWKDAEKNCLLGLRKNFGLAVNIRPAKIYSMLPDLSPLKPSLIASGVDMVIVRELISGIYFGEHATNGDVATDVMRYTEAEIKIPMRFAFETAMSRTKKLTVVDKANVLDCSRLWRKVAKEMHAEFPQVALEFMYIDNAVMQIIQKPSHFDVIATGNMFGDILSDAASVLPGSLGLMPSASLGDKIHLFEPIGGSAPDIAGKGVANPIAQILSAALLLRYSFALEAEAQLIEKAVEDVLQDGLRTGDLTHDRASAVGTAAMGDAIVAKIHALHQQQ

SEQ ID NO: 32221 - protein, 145 aa, Oryza sativa
MAFMRSHSNASSGMGVAPDIRDTSLELQMKKAFRYVIFKIEEKQKQVVVEKTGATTESYDDFLASLPENDCRYALYDFDFVTGENVQKSKIFFIAWSPSTSRIRAKMLYSTSKDRIKQELDGFHYEIQATDPTEVDLEVLRERAH

SEQ ID NO: 32222 - protein, 222 aa, Oryza sativa
MASPAPPPTARLRPSQAASSASSSSFPTSICGLGSLGDASRVSSVSFRRRPPASPLVRCSQDPGKIEVFNTEGTEQSQGGSTGSINHGKYSTRSFSSKDLLERLKRYGAAGVLSYGLLNTVYYVTTFLLVWFIFSPAPGKMGYAAAVERFLKLMAMVWAGSQVTKIFRAGGALALAPFVDRGLRWFTVRFNFKSEGKAFATIVGFCFALAALLFFGLTILWA

SEQ ID NO: 32223 - protein, 440 aa, Oryza sativa; identical to SEQ ID NO: 31617

SEQ ID NO: 32224 - protein, 311 aa, Oryza sativa
MEGLAVLKIIKHCEEFAPALVTGQLLGLDVGSVLEVTNCFPFPMREDDEEADADGANYQLEMMRCLREVNVDNNTVGWYQSCLLGSFQTVELIETFMNYQENIRRCVCIVYDPSRSNQGVLALKALKLTDSFMDLYRNNGLTGEKLREKKLSWVDIFEEIPIKVSNSALVSAFMTELEPESPVSQCDFDRLKLSTAPFMERNLEFLIGCMDDLSSEQNKFQYYYRNVSRQQSQQQAWLQKRRQENMARKAAGEEPLPEEDPSNPIFKPIPEPSRLEGYLVTNQISSYCNHINGVAGQNFNRLYLMKALQED

SEQ ID NO: 32225 - protein, 195 aa, Oryza sativa; identical to SEQ ID NO: 30208

SEQ ID NO: 32226 - protein, 53 aa, Oryza sativa
MKNKVAIVHKEAEEKRAMVEAKRGEEVLKAEEMAAKYRATGHAPKKLIGCFGA

SEQ ID NO: 32227 - protein, 350 aa, Oryza sativa
MAAAAMATVAVPRVKLGSQGMEVSAQGLGCMGMCPAFEPPKPEADMVALIRHAIAAGVTFFDTSDLYGPHTNEVLLGKALQGGGVRDRVELATKFGKFFAGGKPGIRGDPAYVRAACEGSLRRLGVDCIDLYYQHRVDKKVPIEVTIGELKKLVEEGKIRYIGLCEASASTIRRAHAVHPITAVQLEWSLWSRDVEEDIVPTCRELGIGIVAYSPLGKGFFSSGAKLVDSLPDHDFRKLIPRFQPGNIEKNAEIFERVNEMAARKGCTPSQLALAWIHHQGRDVCPIPGTTKIENFNQNVAALSVKLTPAEMAELESYASNVHGDRYPLMMANTTWQDSETPPLSSWKSE

SEQ ID NO: 32228 - protein, 229 aa, Oryza sativa
MRKLGLIWVTNRMHIEIYKYPAWGDVVEIETWCQEDGKIGTRRDWILKDLANGEVIGRATSKWVMMNQNTRRLQRVSDDVRDEVFVHCPKTPRLAFPEENNGSLKKIPVLTDPAQHSRLGLVPRRADLDMNQHVNNVTYIGWVLESIPQDIIDTHELQTITLDYRRECQHDDIVDSLTYIEEGEEKSSNGSAFAAPHPEEQRQFLHCLRFAGNGNEINRGRTVWRKLAR

SEQ ID NO: 32229 - protein, 210 aa, Oryza sativa
MADDVVASPEESLTALLLEPAASPRDDPSVEVRLYRRGAGPVAVFRSALVGPRRDRLQVRAIQAEHGLRALFAFKPESSLRGIRIRPGPAAAAGCSAVPFRDGAVIALDGEPKGSWTKPAAVIVAGVLVPAVMVAVAVKGCRSRCGRRGWSTPSSRRGSSPAPSSSTLASGRAQGRLLHDPSPIACSSSSPSTTSPSLFFPLSRNLYEKK

SEQ ID NO: 32230 - protein, 251 aa, Oryza sativa
MAEHKEEESLVESVMDKISDKLHGRGGSSSSSSDSDGERTADLKAKIYRLFGREKPVHSVLGGGKPADLFLWRNKKISVGVLAGATAIWLLFEVMDYHLLTLLCHCIILTLAMLFLWSNASTFINKSPPNIPEVKIPEDLAVNVARSLRFEINRGFATLREIGQGHDLKKFLIVVVGLWVLSVLGSCCNFLTLFYIVFMVLYTVPVLYEKYEDQIDAFGEKAMIELKKYYAIFDEKCLSKIPEGPLKNKKH

SEQ ID NO: 32231 - protein, 212 aa, Oryza sativa; identical to SEQ ID NO: 30192

SEQ ID NO: 32232 - protein, 240 aa, Oryza sativa
MAAPNPSATMAAAAASTPARAWWRAAAPASASTAAVSCFRVGAKSLTGLQMTSTRANKVRTVHVKSGEAEGSPSTESITRDEETLQRDLQTAIQEENYAQAAKLRDELRVLQEDSRSAVLAANARFYNAFKNGDLVAMHSAWAKGDHVYVVHPSAGRISGYDMVMQSWEMVCDADYEFPLQIDLQDVEVHVRGDLGYVTCLELVKTKGSSSWGRQVATNVFEKVDGKWFICIHHASHFDE

SEQ ID NO: 32233 - protein, 196 aa, Oryza sativa
MDLAAVHAALAGKSYSSVAPLCDDLFLQAASRGAATDGWPYAVHLLAHLYLNDLNSARFLWKSTPQEAKDARPELAAVWRIGQCLWNRDYAGVYAAAQGFEWSPEIADFVAAFLESYRKRIFQLLTSAYSTISVADVAHFMGMNEEDATNYAMQNGWSLDAAARMLTVVKPKVKTNQKLDASKLQRLTECVFHLEH

SEQ ID NO: 32234 - protein, 223 aa, Oryza sativa; identical to SEQ ID NO: 31607

SEQ ID NO: 32235 - protein, 186 aa, Oryza sativa; identical to SEQ ID NO: 31612

SEQ ID NO: 32236 - protein, 306 aa, Oryza sativa
MCEEATRSRVLVVGATGRLGGCLVRASLAAGHPTFALVRPHHLAVPDSAPLTSLAGATVVKGSLEDYPSLLEAVRQVDVVICAVPTKQALEQKLLIRAIKDAGCVKRFIPAEYGLDPTKVQICGMDHGFYEKKIEIRHLIESECIPHTYICCNFLMRYLLPSLVQPGLDAPPRDEVKIFGDGNTRGVFVEETDVAKFTICTIDDPRTLNNTLYLRPSGNVYSMNKLVDLWEKKINKFLNKIYITEEQLLKNIEDAPLPLKMDLIFIYSTFIKGDQTYFEIDSRKEGTQLYPHVNYTTVDGYLDKLV

SEQ ID NO: 32237 - protein, 238 aa, Oryza sativa; identical to SEQ ID NO: 31892

SEQ ID NO: 32238 - protein, 270 aa, Oryza sativa; identical to SEQ ID NO: 28586

SEQ ID NO: 32239 - protein, 440 aa, Oryza sativa
MASIVPVLLRLLLLLLPLPLIRDHLWPSHRRPTPQDDAGELHPIFLVPGASCSDLEARLTEAYRPSTAHCGAMKGKGWFGLWENNTELLVHDYADCSLEQMTLVYDPAANEYRNLPGVETRVPNFGSAWSFGYKNPVNRLQRAQCLGKLRDWLEELGYRDGDTMFGAPYDFRYAPPVPGQTSEVYSRYFSEFMALVEAATKKKQKKAVILGHSYGGMVALEFVRSTPRAWRDAHIERLVLVAPTLQDGFVGSVMKFITGTGIIFVPTATSTRPMWRSFESAMASFPSPAVFGREPLVVTKRRDYSACDMEDLLAALGFGEGVEPFRRRAVPRMYSLEAPMVPMTCINAVGNKTPLQLVLWDDDDDDLLDASPEVAAYGDGDGEINLISMLAFDTEMGRQPGQEKRFKSVKIANANHSTIAIYDFALKRIIQEIIEVNQVR

SEQ ID NO: 32240 - protein, 178 aa, Oryza sativa
MAAEAEQQHQLLSTAVHDTMPGKYVRPESQRPRLDLVVSDARIPVVDLASPDRAAVVSAVGDACRTHGFFQVVNHGIDAALIASVMEVGREFFRLPAEEKAKLYSDDPAKKIRLSTSFNVRKETVHNWRDYLRLHCYPLHQFVPDWPSNPPSFKEIIGTYCTEVRELGFRLYESTLKP

SEQ ID NO: 32241 - protein, 222 aa, Oryza sativa
MRRLWRWYQQCLATHPVRTQVVSSGILWGLGDIGAQAVTHYSAPGRPRHHQHHAKNPPEDKDKEFKIDWKRVGITSSFGFAFVGPVGHYWYEYLDRFILRRYQPKTFKFVASKVAADGLLFGPVDLLLFFSYVGLASGRSVEQVKDDVKRDFIPALVLGGTIWPAVQIANFRFISVRYQLLYVNLFCLLDSCFLSWIDQQGDAPWKQWFTSFQKIEGQKGKV

SEQ ID NO: 32242 - protein, 249 aa, Oryza sativa
MGEYGTPNIDIEEGFITITHNGRTDTLPYPKQASSFYHLSKVHDSHNIAFTCKAWGIRATDLNQGVVYGVRTDETAMHEELSNRFDYDGVFGTALNRFCVQAAVGHPLTVYGKGGQTRGYLDIRDTVQCVELAIANPAKPGEFRVFNQFTEQFSVNELAKLVTAAGAKLGLEVQTKSVPNPRVEAEEHYYNAKHTKLMELGLEPHLLSDSLLDSLLNFAVQYKDRVDTAQIMPSVSWKKMGAKPKTVSV

SEQ ID NO: 32243 - protein, 292 aa, Oryza sativa
MAIATESRCEEEKASPHSQEVKRWVLSDFDIGKPLGRGKFGHVYLAREKRSNHIVALKVLFKSQLKQSQVEHQLRREVEIQSHLRHPNILRLYGYFYDQTRVYLILEYALKGELYKELQRCKHFSERRSATYIASLAHALIYLHGKHVIHRDIKPENLLIGSQGELKIADFGWSVHTFNRRRTMCGTLDYLPPEMVEKTEHDYHVDIWSLGILCYEFLYGVPPFEAKEHSETYRRIVKVDLKFPLKPFVSPAAKDLISQMLVKNSAHRLPLHKLLEHPWIVQNADPSGVYRG

SEQ ID NO: 32244 - protein, 108 aa, Oryza sativa
MAAGLETGGGGVNRSGGGASGSGGGATSGGVWSVRRRQPTSPVAGDGGERRTADLGFRSRSGAFSVGVKGGAESGHCAGGVHSAGTLRCAGGIWKLPFWMLWLTGSPR

SEQ ID NO: 32245 - protein, 163 aa, Oryza sativa
MDRYQRVEKPRNETPISENEIRITAEGRMRNYISYGMSLLEENGHDEIVIKAMGRAINKTVMVVELIKRRIGGLHQITSTESIDITDTWEPLEEGLLPLETTRHVSMIAITLSKKALDTLSPGYQPPIPAEEVRPAFDYEHEESSPLIVEEAVVVAEEAGAEP

SEQ ID NO: 32246 - protein, 494 aa, Oryza sativa
MGEPTGSCSIDIQRLAADLETKLCNVDLDGGRRWRRSPECLISKVKPQVRRVDDSQYTPQVVLVGAYHHKPLDSTDQLAKWTALRRVLPDDGEQRASTLRRCLEAIAGVEDEARSYYEDGAKTWRENQMFVQMLLLDAWFVLDIFNVGGEAAAAVGSRGGSAVDYIFAVRDVFYLLENQIPFFILEKVYELVRVGNSGQDQDQRTQTCTSPPPPQPPGATAIAGGGPSSSSTVVVDGFLRHLRSLLQDQGYSNVEVDITSTRPCHLVHLLHMHFTPMAMSPADDTDDAAAVPNRRARATVYRWRGATQYHAAGVRFKKRALGAAAGDARCVLDVELRRLTTLHVPTLTVDNNTWRVLRNLMALEQNNPHLGSHVTAYCLFVSQLAGTASDVALLARKGVVVHFMATDEDVADGFAGLCRGVALDVDDARRNYLQPTWERMERWYSSRPVNWMALLRRRHLSNPLVAIALLAAITGLVCEVVQAVYAVKTYRPTI

SEQ ID NO: 32247 - protein, 326 aa, Oryza sativa; identical to SEQ ID NO: 31611

SEQ ID NO: 32248 - protein, 336 aa, Oryza sativa
MESPPHPLLLLLTLLVAAGAASAGADDLVAELQSLRSRSPSGVIHLTDTSITRFLSAPAPRPYSVLVFFDAASLHSKTDLHLPQLRREFALLSASFLAHNPASADLFFADIEFSESQHSFAQFGVNSLPHVRLVRPEHTRLAGSEQMDQSHFSRLADSMAEFVESRTGLEVGPIVRPPLVSRNQMILLVILFLVSIPFLIKRIMDGETLFHDRRVWMAGALFIYFFSVSGGMYGIIRHTPMFITDRSDPNKLVFFYQGSGMQLGAEGFAVGFLYTLVGLMIAMVTHLLVRVESLQIQRFTMLAVMIIGWWAVKKVILLDNWKTGYSIHTFWPSSWR

SEQ ID NO: 32249 - protein, 122 aa, Oryza sativa
MNSRSNYRSTRTSLFDGIEEGRIRATSYSSHEIDENENDQAIDGLQDRVSILKRLSGDIHEEVETHNRMLDRMGNDMDSSRGFLSGTVDKFKMVFETKSSRRMGTLVASFVALFLLVYYLTR

SEQ ID NO: 32250 - protein, 259 aa, Oryza sativa
MAEKEESTSIPLSQAAEAVDPEDPAKSPPRPSSPTTSTRKACCAVLQSWVSRKFMTGCVVLFPVAVTFFITWWFIQFVDGFFSPLYAKLGIDIFGLGFLTSLVFIFLVGIFVSSWVGSTIFWVGEWFIKKMPFVRHIYSASKQVSTAISPDQNTTAFKEVAIIRHPRIGEYAFGFITSTVVLQTDKGDEELCSVYVPTNHLYIGDIFLVNSEEIIRPNLSIREGIEIIVSGGMTMPQVIASLEPTPRKSQNIRLNRIMT

SEQ ID NO: 32251 - protein, 74 aa, Oryza sativa
MKSNRSSVRLPSVLNKRYKVVEEILLFYLPLIGYLLMLLLFNQTGGGAKVTVILLKVVRTYRTSIFIGTCESEL

SEQ ID NO: 32252 - protein, 268 aa, Oryza sativa; identical to SEQ ID NO: 30179

SEQ ID NO: 32253 - protein, 315 aa, Oryza sativa
MGPGSNNSFPAEKRVAVVTGGNKGLGLEICKQLAANGVTVVLTARSEERGAGAAAALRQLGLSEVLFHQFDVSEPSSAAGLADFIKHKFGKLDILVNNAGILGVTFDFGNLDLNKAIEGKSANETLEWLMQHTVETAENAEECLKINYHGNKKTIQALLPLLQSSPDGRIVTVSSVFGQLSFFSGEKLKEELNDFSKLSEERIDELAELFVRDFKDGELESRGWPARADAFAAYKTSKALQHAYTRVLARKHASSSSSPLRVNCVHPGYVKTDMTLGTGELTVEEGAAGPVALALSPPGGATGVFFIQTEPASFV

SEQ ID NO: 32254 - protein, 309 aa, Oryza sativa
MGRDQAAAAVMHEKVKLFIGVLALQFLLAGFHIVSRAALNMGISKIVFIVYRNLISLALLAPFAYFLEKKDRPPLTFSLLVEFFLLALCGITANQGFYLLGLYHLSPTYASAIQNTVPAITFAMAAVLRLEQVDLGKRHGVAKVVGTVVSIGGATVITLYKGLPLFNHNLNIKSLSSSSLILNWTLGCVFILGHCLSWSGWMVLQVPVLKRYPARLSVLSLTCIFGLLQFLVIAAFTEEDLSRWKVNSGSELFTILYAGLVASGVAFALQIWCIDRGGPLFTAVFQPVQTVAVAVMAAIILGDQLYSGG

SEQ ID NO: 32255 - protein, 287 aa, Oryza sativa; identical to SEQ ID NO: 30679

SEQ ID NO: 32256 - protein, 158 aa, Oryza sativa; identical to SEQ ID NO: 30737

SEQ ID NO: 32257 - protein, 269 aa, Oryza sativa; identical to SEQ ID NO: 30174

SEQ ID NO: 32258 - protein, 280 aa, Oryza sativa
MQGCDASVLLTKNPAGGQTERDATPNNPSLRGFEVIDAAKAAVEAACPRTVSCADIIAFAARDSVKLTGNVDYQVPAGRRDGSVSNGTEALHNLPPPNATAQQLADTFFANKFLTLEDMVVLSGAHTVGRSFCASFFNRVWNGNTPIVDAGLDPAYAAQLRALCPTRDTLATTPMDPDTPATLDNNYYKLLPQGKGLFFSDNQLRVNATMNALVTRFAANEAEWKQRFADAMVKMGHIEVQTGRCGQIRVNCNVVNPSTSSPEVELAGEDQETGGAVAAS

SEQ ID NO: 32259 - protein, 141 aa, Oryza sativa
MAAAMGAAVVRRLHAAQAQAQPPRLTKLALRAPKFVEVEFEDGSSFHLPAEFLRVYSPAADSKIRSVAGEKVIFGRRHVGIMSAESVGNYGVRILFDDLHKTGIFTWDYLHHLGSNKFGLMRSYITTLKKHGLTRDPQRRK

SEQ ID NO: 32260 - protein, 122 aa, Oryza sativa; identical to SEQ ID NO: 31636

SEQ ID NO: 32261 - protein, 180 aa, Oryza sativa
MAWTAAAATVTRAAATPAAELRLPLAAGLGRASFAVTGRLRRAVSASLSTAAAAVKKEAVQTEKAPAALGPYSQAIKANNMVFVSGVLGLNPETGKFVSESVEEQTEQVMKNMGEILKASGASYSSVVKTTIMLADLQDFKKVNEIYAKYFPAPAPARSTYQVAALPLNARIEIECIAAL

SEQ ID NO: 32262 - protein, 188 aa, Oryza sativa
MGTAAGDAAEQPPAAPEAKRAAAPRTLVFTYGTLKRGFSNHGLLQDLARDGDASFVGAATTAPRLPLVCGPYRVPFLLNLPGAGHRVSGELYAVTPRGLDRLDELEGVSRAHYERLPISVLLAEGAQVDAVAYYAHRGYADDLWARSGKKGYPEYSPAVADGYIRRKDRPQQLTFLEQIRVFVSSQSS

SEQ ID NO: 32263 - protein, 232 aa, Oryza sativa
MSWRFPLFGSSQQQQPDTNFQDNPTQPWYPPSVLGSSSHPSLPSSSSGSPHQRASDNPQSLHGQPSPAEAAGIIARLKDKSVDDLQRLLKDKEAYSAFFNSLDQVKTQNNLRDELKKETVQLARDNLEKEQRISEIRNQCTIIRTTELAAAQDRLADLERQRDEVMKSYSPAALLDKLQKLMAKLDEESEELHQKFLEKDIDLPTFVQKHKKLRTAYHKQALLHLAGKTSVR

SEQ ID NO: 32264 - protein, 403 aa, Oryza sativa
MDATAIGNGALHSNGAGADTKGKPIKCKAAVAHGPGEALVMEEVEVAPPARMEVRLKVLFTSICHTDLSAWKGENELQRKFPRILGHEAAGVVESVGEGVEDLAPGDHVVPIFTGECGACTYCESSKSNLCKTYRVNPFKSTMVTDGGTRFTMIDRSSGARNPVYHFLNTSTFAEYTVIDSACAVKINPKAPLEKMSLLSCGVSTGVGAAWNTANVSKGSTVAIFGLGAIGLAVAEGARLRGASRIIGVDINPEKFSKGKEMGITDFINSKASGKPVHEVIMEMTDGGVDYSFECTGITDVLREAFVSTHDGWGLTVVLGIHATPRMLPLHPMELFDGRRITGCVFGDFKGKSQLPEIVEKCMQGEININFDGFITQELPFADINKAFQLLEEGKSLRCLLHV

SEQ ID NO: 32265 - protein, 418 aa, Oryza sativa
MYLVKDIGGAIALMGVSLVLLGTWPVVLAVLERRGRLPQHTYLDYSITNFLAALLVAFTFGQIGADTPETPNFLTQLTQMQDNWPSILFAMSGGIFNGLGTLATQYGWAFVGLSVTEVMASSLKVVIGTTLNYFLDGRINKAEILFPGVGCFLIAACLGSLVHSSNAADNQEKLSSAMVNHSNTNGDTENEELTKHLLEIEQPKDCEEQEPEVAPAAQAVEKLEAGTADFLVDLEGKRSIKVLGSNTFLGLGIVTFAGVSYSLFSPAFNLATNDQWHTLGEGVPHMVVYTAFFYFSLACFAIGIALNIWFLYHPMVGVPRSSLTAYLKDWKGRDLALVAGMVCGLGNAFQFMAGQAAGYAAADAVQALPLVSTVWGIVLFGEYRRSSRRTYTLLGSMLFMFVVAMVILMASSAHRRPL

SEQ ID NO: 32266 - protein, 401 aa, Oryza sativa
MAAARLWVVAVAVAVAVAVMAAAVEGKSYNITKILAAHPEFSKFNEMLSKTRLAYDINRRQTITVLAVDNSAMASLDHFTLPTIRHILSLHILVDYYGSKKLHALSHGATASSSMFQATGSAPGTTGYVNITSHKGGKIDFISEDADESAKPSRYVKSVKEIPYDISVLQVSSVLSSSEAEAPVPPPAPVNLTELLSKKYCKSFAGLLAANADVFRAVNETKDNGLTLFCPVDAAVAAFMPSYKNLTAKAKTAILLYHAVPDYFSLQLLKSNNGMVTTLATASESKKDYSYDVQNKGETVTLDTRVVNSAVTATVGDAEPLAVYAVTKFLKPKELYKVVEAPAPAPEPSKKHKSAADDSSDDSSDDSGDVKAHKGAAAPAPLARWVTAAAAAAVAALMLMA

SEQ ID NO: 32267 - protein, 149 aa, Oryza sativa; identical to SEQ ID NO: 30243

SEQ ID NO: 32268 - protein, 349 aa, Oryza sativa; identical to SEQ ID NO: 31650

SEQ ID NO: 32269 - protein, 298 aa, Oryza sativa
MERVRRASHAGSWYTNNARKLDEELDGWLRAAGLTKSPDVRAVIAPHAGYSYSGRCAAYAFGNIDPTNISRVFLLGPSHHYYTPKCALTRATIYSTPIGDLPVDHEVIEELNATGKFDFMDLSVDEAEHSMEMHLPYLSKVFQGHNVKVVPILVGALNSQNEAMYGQLLSKYLDDPKNFFSISSDFCHWGTRFSYTYYDKSHGAIHKSIEALDRMGMEIIETGNPDAFKQYLQEYENTICGRHPISVFLSMLKHCLTKIKIGFVRYEQSSQCKSMRDSSVSYASAAAKVDTPAEEEKD

SEQ ID NO: 32270 - protein, 235 aa, Oryza sativa
MAPRAATVEKVAVAPPTGLGLGVGGGVGAGGPHYRGVRKRPWGRYAAEIRDPAKKSRVWLGTYDTAEEAARAYDAAAREFRGAKAKTNFPFASQSMVGCGGSPSSNSTVDTGGGGVQTPMRAMPLPPTLDLDLFHRAAAVTAVAGTGVRFPFRGYPVARPATHPYFFYEQAAAAAAAEAGYRMMKLAPPVTVAAVAQSDSDSSSVVDLAPSPPAVTANKAAAFDLDLNRPPPVEN

SEQ ID NO: 32271 - protein, 266 aa, Oryza sativa; identical to SEQ ID NO: 31632

SEQ ID NO: 32272 - protein, 343 aa, Oryza sativa; identical to SEQ ID NO: 31816

SEQ ID NO: 32273 - protein, 40 aa, Oryza sativa
MINIVLVIHLLAWLFPSCTCDTSTWLVRWDNLKLFVNFLN

SEQ ID NO: 32274 - protein, 267 aa, Oryza sativa
MDPKLVEVTQLFSRFKAAFARNDFDTCVDLLSQLKVRLTKFPSLPPSFQQTPNAVEELKIARDIYEHAVVLSVKIEDQDAFERDFCQLKPYYMDTCGIIPPSPQEYPILGLNLLRLLVQNRIAEFHTELELLPVTALENPCIKHAVELEQSFMEGAYNRVLSARQAVPHETYVYFMDLLAKTVRDELAGCSEKGYDYMSIAEARQVLMFSSDKELHQYIAEEHPEWEVKDGSVFFQKAKETQPCKEIPSLQVINQTLSYARELERIV

SEQ ID NO: 32275 - protein, 248 aa, Oryza sativa; identical to SEQ ID NO: 29138

SEQ ID NO: 32276 - protein, 297 aa, Oryza sativa; identical to SEQ ID NO: 31641

SEQ ID NO: 32277 - protein, 107 aa, Oryza sativa
MKRTTGRSGGGSRRAAMRRTRSRRPAGEPERVVGRRRCTTATTAIRIFPGRSGSSAPSAPTSTSASSASRSAPRSPRTAATILTGSWTTCLSLLFVQIGMQTRKSFF

SEQ ID NO: 32278 - protein, 178 aa, Oryza sativa; identical to SEQ ID NO: 30732

SEQ ID NO: 32279 - protein, 287 aa, Oryza sativa; identical to SEQ ID NO: 30679

SEQ ID NO: 32280 - protein, 393 aa, Oryza sativa
MHQPAIMQRALAVVALLAAAAAIAAAQGESPELLPFAVGAAPEGCDVGEGEWVFDEAARPWYAEEECPYIQPDLTCQAHGRPDAAYQRWRWQPRDCSLPSFNATGMLEMLRGKRMLFVGDSLLRGQYTSLLCLLHRGAPGGGGGSRSFETVDSLSIFRAKDYDATIEFYWAPMLAESNSDGAAVPDDRLIRGAPMNKHSSFWKGADVLVFNSYLWWMTGDKIQILRGADEDMSKDIVEMEAAEAYRLVLHQVTRWLEGNVDPKSARVFFVTASPSHAGAGGECYDQTTPVGAADAASYCGSTSRRMVQVAGEVLGASRVPVGVVNVTRMSELRRDAHTQVYREQRWAKPTAEQLAADPRSYADCTHWCLPGVPDAWNELLYWKLFFPARDEAI

SEQ ID NO: 32281 - protein, 229 aa, Oryza sativa; identical to SEQ ID NO: 29253

SEQ ID NO: 32282 - protein, 218 aa, Oryza sativa; identical to SEQ ID NO: 30237

SEQ ID NO: 32283 - protein, 148 aa, Oryza sativa; identical to SEQ ID NO: 30981

SEQ ID NO: 32284 - protein, 275 aa, Oryza sativa
MDCCVCSPMASMYRLPRNAICAACYEGAKAIIAFFNDDDDEHADADQGSVKPSRLTKLNSTTKGLRDAWEEVKQMRCREEETKQRASFLQQGFAAAWKDGIHTDIAVRPGTGPPIQAHKAILATRSEVFRHILAGDDDCKAPAGDSLSLPELTHDELSHLLAFLYTGSLATCTEERHLHALLVAGDKYDVPFLRRACEARLAAGVEAGNVLRTLEVAELSSSAALKERAMGAVVEHAEEVVFSPEYEEFAVRNAALCVQITRALLANKAFPAKTP

SEQ ID NO: 32285 - protein, 209 aa, Oryza sativa
MAWQLLAGVLLLQLAASAAGQQQCLSATFQNGQTFLKCNPLPVLGASLHWTHHAENGTADVAFRAPQQSSGWVAWGINTRGTTMPGSSVFIASQDGSGSVSVLMTVLENTSPSLTNGSLSFDVLSPPTADYTNGVYTIFATIALPNNSTTQNTVWQAGPGSTGNVGQHATSGPNVQSMLRLDFSSGQSTGTASNSRLHRRNVSSSPPPC

SEQ ID NO: 32286 - protein, 280 aa, Oryza sativa; identical to SEQ ID NO: 31660

SEQ ID NO: 32287 - protein, 251 aa, Oryza sativa; identical to SEQ ID NO: 30740

SEQ ID NO: 32288 - protein, 233 aa, Oryza sativa
MAAVSEVEVDGVVFPPVARPPGSGHAHFLAGAGVRGVEIAGNFIKFTAIGVYLEEGAAVPALAKKWAGKSADELAADAAFFRDVVTGDFEKFTRVTMILPLTGEQYSDKVTENCVAAWKAAGVYTDAEGAAADKFKEAFKPHSFPPGASILFTHSPPGVLTVAFSKDSSVPEGAVAAAAIENRALCEAVLDSIIGEHGVSPAAKRSIAARVSQLLKAESTGDVAAAEPAPVSA

SEQ ID NO: 32289 - protein, 214 aa, Oryza sativa
MSLFGLGRNQKTFRPKKSAPSGSKGAQLRKHIDATLGSGNLREAVRLPPGEDINEWLAVNTVDFFNQVNLLYGTLAEFCTPESCPTMTAGPKYEYRWADGVQIKKPIEVSAPKYVEYLMDWIEGQLDDESIFPQKLGTPFPPNFKEVVKTIFKRLFRVYAHIYHSHFQKIVSLKEEAHLNTCFKHFILFTTEFGLIDKKELAPLQELIESIIPY

SEQ ID NO: 32290 - protein, 249 aa, Oryza sativa; identical to SEQ ID NO: 30462

SEQ ID NO: 32291 - protein, 257 aa, Oryza sativa
MLVDILKKNGVNAEGCLFDEHARTALAFVTLKSNGEREFMFYRNPSADMLLTEAELNLDLIRRAKIFHYGSISLITEPCRSAHVAAMRAAKSAGILCSYDPNVRLPLWPSEDAARAGILSIWKEADFIKVSDDEVAFLTQGDANDEKNVLSLWFDGLKLLIVTDGEKGCRYFTKDFKGSVPGFSVNTVDTTGAGDAFVGSLLVNVAKDDSIFHNEEKLREALKFSNACGAICTTKKGAIPALPTVAVAQELISKAAN

SEQ ID NO: 32292 - protein, 285 aa, Oryza sativa; identical to SEQ ID NO: 29474

SEQ ID NO: 32293 - protein, 331 aa, Oryza sativa
MARRWGLFFFLPLLLLLLLSCSCIISHALPCCSGKQTAHDDLNPEQATNPTMPITVPSTNPAPIIITVPSTNPTITIPSLNPLPTPITAPSMVNPSTSPAPAAYPLPTPSTSPPSASLTNPTSNPMTPAISMPPPALTTTPPTAPGLSGQQLWCVAKADSADIALQNALDYACGIGGADCLAIQPSGTCYYPNTLGAHASYAFNSYYQRSPATSSCDFGGTAILVNVNPSSGSCVLASSMSLPSSSVSGYNPALTTPTASSTITPTTLSGSGPSVLNPDGSGSASSSEFGSDIPATSNSWRSISPNGWSLAASFSMLAWAYMMKGTILETE

SEQ ID NO: 32294 - protein, 227 aa, Oryza sativa
MLARQTGLTRSQISNWFINARVRLWKPMIEDMYKEEIGEADLDSNSSSDNVPRSKDKIATSEDKEDLKSSMSQTYQPSQLGESKANIGMMSLGGAPAGFHNEGNQDDSFMNLMLKDQRPGEAEGSLLHDAVAHHSDENARFMAYHLSGLGRYGNSNVSLTLGLQHPDNRLSVQNTHQPGFAGAGEEIYNSTASLGVAAASSSDYESTNQIDQRQRFEPSPLMHDFVA

SEQ ID NO: 32295 - protein, 148 aa, Oryza sativa
MAAADAVAPDDGDHAVLRDDERGIPRSLSLLAALVEAEALRHAAAAADADADSDRIRAFRGGATPTVRIGEFLERIHTFIQRESVRHVIELQGACYVLAGIYLFRFIRSGAAREAGILVDPSIAHRLVAVAIFVGAKFGGPIDRLPTR

SEQ ID NO: 32296 - protein, 275 aa, Oryza sativa; identical to SEQ ID NO: 32284

SEQ ID NO: 32297 - protein, 294 aa, Oryza sativa
MRRMLEVAADAGSSAAAAAANGAVDWWRDVNESPVWQDRIFHVLAALYGFVSAIALVQLIRIECRVPEYGWTTQKVFHFLNFLVNGVRSIVFVLRRNVQLIHPEILQHVLLDMPGLAFFTTYALLVLFWAEIYYQARAMSTDGLRPTFYWINAVIYAIQIILWMVLWWKPVRVMIILSKMFFAGVSLFAAFGFLLYGGRLFLMLQRFPVESKGRRKKLQEVGYVTTICFTCFLIRCVMMCLNTFDKAADLDVLNHPILNFFYYLLVEIVPSALVLFILRKLPPKRGITQYHPIH

SEQ ID NO: 32298 - protein, 224 aa, Oryza sativa
MSKEKHHKREHHLRRCCGGMAACILALVLVVGFIALVVYLALRPSKPSFYLQDLQLRSVDLGDPSLSATAQVTLASRNPNDHVGVHYRRLDVFVTYRDEPVTVPVSLPPTYQGHRDVTIWSPVLSGESVPVAGFVADALRQDVAAGYVALQVKVDGRVKWKVGSWVSGSYHLFVSCPAMLASAGPGGVGPMPLGGASAAVVNSTGAGAVASLRFTQPTGCSVEV

SEQ ID NO: 32299 - protein, 316 aa, Oryza sativa
MGMGMRRERDAEAELNLPPGFRFHPTDDELVEHYLCRKAAGQRLPVPIIAEVDLYKFDPWDLPERALFGAREWYFFTPRDRKYPNGSRPNRAAGNGYWKATGADKPVAPRGRTLGIKKALVFYAGKAPRGVKTDWIMHEYRLADAGRAAAGAKKGSLRLDDWVLCRLYNKKNEWEKMQQGKEVKEEASDMVTSQSHSHTHSWGETRTPESEIVDNDPFPELDSFPAFQPAPPPATAMMVPKKESMDDATAAAAAAATIPRNNSSLFVDLSYDDIQGMYSGLDMLPPGDDFYSSLFASPRVKGTTPRAGAGMGMVPF

SEQ ID NO: 32300 - protein, 279 aa, Oryza sativa
MAEALCSGSVASPCGEVGVGFAAGLVRGAAAAAALAESVPIGGYSSKSTFPSGRVALTERKARPLPRNLEAAHGQMNLTIGKAMRWWEKCLQPNMREIESAQDLADSLLNAGDKLVVVDFFSPGCGGCRALHPKIAQLAEKNPEVLFLQVNYEKHKSMCYSLHVHVLPFFRFYRGAQGRVSSFSCTNATIKKFKDALAKHGPDRCGLGPAKGLEESELMALAINRDLNFTYTPNQDLVPIADALLKEAAAPGGPWLPLPATATQLFIQGSENSLLSSGR

SEQ ID NO: 32301 - protein, 325 aa, Oryza sativa
MGEQPARGAASSASESSPLIPPPSEIDIEAGAGDQFQCRICLETDGRDFIAPCKCKGTSKYVHRDCLDHWRAVKEGFAFSHCTTCKAPYYLRVHVHTDRKWRTLKFRFFVTRDILFIFALVQFVISALAYLVHFIDGLQNYWLRTAWAFDNEVSFYYICGALLFFALLGLSGCFITCYDRRVRNDLAQPCRELCLCCCQPGMCADCHLPGTLCMWTDCTTCFEGCATTAGECGGCLGGAGEAGLPLLFIMGVIVLGLFTVIGIFYSVLVATMVGQRIWQRHYHILAKRMLTKEYVVEDVDGERADWCPPPLPSEHVQQLKSLGLL

SEQ ID NO: 32302 - protein, 252 aa, Oryza sativa; identical to SEQ ID NO: 30657

SEQ ID NO: 32303 - protein, 245 aa, Oryza sativa
MLVYEYINNGNLDQWLHGARSQHGVLTWEARMKIILDIAKALAYLHEGIEPKVIHRDIKSSNILIDKDFTGKLSDFGLSKLLRAGKSHITTRVMGTFGYVAPEYANTGQLNEKSDVYSFGVLLLEAVTGRDPVNYGRPTDEVHLLEWIKLMASSRRAEEVVDPAMEAKPTKRQLRRALVAALKCVDPKADKRPTMGSVVRMLEADDVALSSRQDRRSPMGRCGDGDGSGRREPSGTSARYDTAFV

SEQ ID NO: 32304 - protein, 232 aa, Oryza sativa
MPVDVGRAAAREAAMPAACSSSSIGKDSDECSPPGKEEEEGEEVQSAFVGGGGGLAGLEALEEALPIRRSISKFYNGKSKSFACLKEAVSSCGSAKDIAKAESAYSRKRKNLLAYSIMYETSQETAAEVYETGPPKRLASLSRNSLVTLASSNSRSSSSISIEETELTEQLHSPPSLANDENSAVYNAPALQLGSCDPKTSSVPVRSFSMMDLRRLHRPRSSCRLKDQKTTE

SEQ ID NO: 32305 - protein, 284 aa, Oryza sativa; identical to SEQ ID NO: 30613

SEQ ID NO: 32306 - protein, 268 aa, Oryza sativa; identical to SEQ ID NO: 30739

SEQ ID NO: 32307 - protein, 287 aa, Oryza sativa
MARSLAALLLLLVAAAGASHAASPAEMYWKIALPTSPMPGAIRDLISPASSAASASKDKEDTVGSVFFLVKDLFPGSKMTLHFTRATAGAALLPRGRADSVPFASEKLPEILSQLSIPAGSPTADAMRSTLAVCEAARIASETAPKHKHYCATSLESMVELVASSLGTRDVHAVSTEVVNRAGPTPRQAYRVEAVRPVPVPGGDMVACHRMPYAYAVFGVHGIKGAAYTVTLAGADGTMAEAVAACHGDVDGHGVAVAEAYKRLGVAPGKVAVCHFLPQDDMLWVRN

SEQ ID NO: 32308 - protein, 116 aa, Oryza sativa
MEFRSSTAGVTSSRQRRCSRLPTTLECLQTYPVCMVTESVGVLRSCVMMFSVVCKGHRGLIFCYRYSWECLVLGDLAIARRILEPCHDSLVWLFFHQIPVFTGILLRTVIFATFSE

SEQ ID NO: 32309 - protein, 269 aa, Oryza sativa; identical to SEQ ID NO: 30174

SEQ ID NO: 32310 - protein, 147 aa, Oryza sativa
MSRCGTHGPVSRAGAAYAWVGNSATQCPGQCAWPFHQPVYGPQAAPLVPPSGDVGMDGMVINVASMVAGAVTNPFGDGFYQGERGAALEAATACTGVYGKGAYPGYAGALLVDKATGASYNAHGAHGRKYLLPALFDPDTSACSTLV

SEQ ID NO: 32311 - protein, 262 aa, Oryza sativa
MEVATATEASAPAASRRSHPFPWLDLAISEPYYFLHLVAFFSYFAARSTVPSADDGLLLRREIQAVLTFLVLFVVKIVKEENWETCIADSLLYAKGLLLAVTLVIDYWLTVSYLLGFVVIYAVAQQPPYDGLGHSNHLTPLQLEGLLTEEPTTRFWLVEFRTSFSGTCIEASSVLPELSNIYSNKNISFGIIDLGHFPNAAAKFGISMWDHLPTYILFDKATEVARFPEIMNESKVFVPKITKKLLCQHFDLDRRLIEYLSR

SEQ ID NO: 32312 - protein, 330 aa, Oryza sativa
MERAAGGVSYQRFPRVRIRELKDDYAKFELRDTDASMANALRRVMIAEVPTVAIDLVEIEVNSSVLNDEFIAHRLGLIPLTSAAAMAMRFSRDCDACDGDGSCEYCSVEFHLAARATDSDQTLEVTSNDLRSTDPKVCPVDQARAYQHALGGTEPFDTAAAADQRGILIVKLRRGQELRLRAIARKGIGKDHAKWSPAATVTFMYEPEIRINEELMETLTLEEKRNLVESSPTKVFNIDPNTQQVVVEDAEAYTYDDEVIKKADAMGKPGLIEINAKEDSFIFTVETTGAITAYELIMNAITVLRQKLDAVRLQDDDADLGELGAHLVGG

SEQ ID NO: 32313 - protein, 387 aa, Oryza sativa; identical to SEQ ID NO: 31330

SEQ ID NO: 32314 - protein, 100 aa, Oryza sativa
MATAARLLLLLFLTAAASAWEMNIRLPTEMLNGGEAVVAPIIHALRPLLGSGGQLAARAGVACDSWRLGVEAHNVIGWKTVPARCEGYVGHYMLGWPLPP

SEQ ID NO: 32315 - protein, 132 aa, Oryza sativa
MAEKEEGKVAAEGGAEAEADEEVEVKFRLFDGSDIGPLRCNAVATTVAALKDRVVADWPKDKTIVPKTANDVKLISGGKILENDKNIAQCRAPFGDLPSTAITMHVVVQPSSAKSKPGELYYFIESMLDCLT

SEQ ID NO: 32316 - protein, 374 aa, Oryza sativa
MGRDQAAAAVMHEKVKLFIGVLALQFLLAGFHIVSRAALNMGISKIVFIVYRNLISLALLAPFAYFLEKKDRPPLTFSLLVEFFLLALCGITANQGFYLLGLYHLSPTYASAIQNTVPAITFAMAAVLRLEQVDLGKRHGVAKVVGTVVSIGGATVITLYKGLPLFNHNLNIKSLSSSSLILNWTLGCVFILGHCLSWSGWMVLQVPVLKRYPARLSVLSLTCIFGLLQFLVIAAFTEEDLSRWKVNSGSELFTILYAGLVASGVAFALQIWCIDRGGPLFTAVFQPVQTVAVAVMAAIILGDQLYSGGIIGAVLIVIGLYFVLWGKSEEKKSKNNNLQDQPVQGGGDDIRRHLLGQEDASRKDEEAAVTDELA

SEQ ID NO: 32317 - protein, 396 aa, Oryza sativa
MHQPAIMQRALAVVALLAAAAAIAAAQGGVAGVAAVRGGGGAGGVRRRGRGVGVRRGGAAVVRRGGVPLHPARPHLPGSRPPRRRLPALALAAARLLPPKLQRDGDAGDAAGEADAVRRGLAAPGAVHVAALPPPPRRSRRRRRVQILRDGGFAQYLQGQGLRRHHRVLLGAHARRVQLRRRRRPRRPPHPRRPHEQALLLLEGRRRPRLQLLPLVDDRRQDPDPERRGRGHEQGHRGDGGGGGVQAGAAPGDAVAGGQRGPQERAGVLRHGVAVARRRRRRVLRPDDAGGRGRRGVVLREHEPADGAGRRRGAGGIAGARRGGERHPDVGAPPRRAHAGVQGAAVGEADGGAARRRPEELRRLHPLVPPRRPRRVERAALLEALLPRARRGDLTS

SEQ ID NO: 32318 - protein, 267 aa, Oryza sativa; identical to SEQ ID NO: 32274

SEQ ID NO: 32319 - protein, 273 aa, Oryza sativa; identical to SEQ ID NO: 30563

SEQ ID NO: 32320 - protein, 117 aa, Oryza sativa
MVKCVEVFKEFYQTRTKHRKLTWIYSLGTCNINAKFEAKTIELIVTTYQAALLLLFNGSDRLTYSEIVTQLNLSDDDVVRCSILSPVQNTRFLTRNQLIDLFLPTMFLSSIQNSLTG

SEQ ID NO: 32321 - protein, 90 aa, Oryza sativa
MIQRNWLRGLQSFLVVWLSSRLGLQLRLSLRTANYVSRMRRMQLSQLLRRALFLEVVQRMCIFQLPSLRSKKQSKTMMSALVQTLFKRRW

SEQ ID NO: 32322 - protein, 374 aa, Oryza sativa
MAAAARLVSTTLARSSSSLAAAARRPDLLASSPRGFSSMADSIQRSGSGDITRVLFCGPYWPASTSFTKEYLQSYPFIQVDEVGLEEVPDVIQNYHLCVVKNRRLDSDTIAKASQMKIIMQYGVGLEGVDVNAATEHKIKVARIPGSTTGNAVSCAEMAIYLTLGVLRKQKVMDTAVKRKDLGIPVGDTIFGKSVLILGFGAIGVEIAKRLRPFGVKILATKRNWSSDTLPCDIDELVDKKGGPEDMYEFAGEADIVITCLLLTNETVGIVDHKFLSAMKKGSYLVNIARGRLLDYDAVFNHLKSGHLGGLGIDVAWTEPYDPEDPILKFSNVIITPHIAGVTEYSYRTMAKVVGGVALKLHSGEPITEVEFVN

SEQ ID NO: 32323 - protein, 275 aa, Oryza sativa
MAFVSAAAAATAAAAFLPGVSSASRAGTPLLSLQRQPLAGSLRAAAQGSSASSGQVVMESKVKAKKKKGSGAGNLPGAIDAEIREAQDYLAIDEQEPVPENFPFEILDEEGMSVVILKRDYKDEKIEVIVSMPNLEGGPEFDDEEAEGEGKNASKDDEDEEEDESAGDSSVSLKVTVSKGSGPKLEFTCTAFREEITIDDMLIVENAATEGDEKFPYEGPEFTELPVNVQKGLFKYLEQRGITLPTTNYMHDYMVTKQTKEYVGWMTKLKDFVRQ

SEQ ID NO: 32324 - protein, 166 aa, Oryza sativa
MKERRGSAGVFPFSIGCMSQSAVDVADPHDKKSTTTTQNDPSSSSASAAAMAAAAQSAEEEGGGEKVKGATAAAAAAVASSGIVATGVQRLIKGIKSLSQIFAMYDDEEEDEEEREMVIGYPTDVQHVGHIGWDGMNKVGGMVNAFSLPSSLSLRQLEMAMEAAHA

SEQ ID NO: 32325 - protein, 88 aa, Oryza sativa
MDQLKELGWAKRWSSQPYVSCCTTSLQELTTLGIKHVENLAIPSVRNDAAFFFTVVGSTRFLPIRAGQLSMVFPCYLLFVLLWIATLD

SEQ ID NO: 32326 - protein, 282 aa, Oryza sativa
MQALGQLTELRSLAFKCWNPDWYFDAGMYKEVSVASLRELGKHKLQYLDICDDDAIPDALMCSSSESDCPFPHLQKLVLSNHNIQRIPRWIGSLVNLCHLEIVVKTTRQNDLGTLGNLPCLLYLKICRLYEPVESQQLIVPNRGFRCLKELCFQCWCPLGLEFAPGAMPWVQTFRLWFMPCWKSCDHGVSVGLGIEHLLELKLVDVKTGYGCGKREVKSFEAAITAVVANHPRRPALVLRRSGERSAVRKENWTAVETNMNKSLFDSSTVRQRLQKQSRFQT

SEQ ID NO: 32327 - protein, 171 aa, Oryza sativa; identical to SEQ ID NO: 30521

SEQ ID NO: 32328 - protein, 224 aa, Oryza sativa
MPPNAAEVARPKSPLRGILPQSPLRIKQDGKFYERLLAKERSAASRSFRHYWAAEPGSVPFVWESQPGTPKVDVSRMVAGAVPAITPPPSYLLRHGGKAGAAAPAAPRRRPQGKGKAKTGGKTRYRFKRIKIGFLAGIFRRIALGHVWRRSAASVQVSSLSSRWLFSSAATAPEKAEHLDHDTPAPPPPPRPNTELSTRARARPSLWMLRFRGFRSWSRDDGWA

SEQ ID NO: 32329 - protein, 438 aa, Oryza sativa; identical to SEQ ID NO: 28597

SEQ ID NO: 32330 - protein, 337 aa, Oryza sativa
MDLQEAAMEARNGHRIPPTEEKVIIDTDPGIDDSVAIMMAFEAPGVKVVGLTTIFGNCTTSHATRNALILCDRAGRPEVPVAEGSAEPLKGGKPHVADFVHGSDGLGNTSFPDPTTTNKVEQSAAEFLVDKVSESPGEISVLALGPLTNIALAMKKDSSFASKVKRIVVLGGAFFAAGNATPSAEANIHSDPEAADIVFTSGADIYVVGLNITTQVYFTDKDMLELRNSKGKHAQFLCDICKFYRDWHVHSYGVDALFLHDPVSFTALVHPEYFTFKKGVVRVETQGICKGHTSMDMGLKKWNSDNPWTGYSPISVAWTVDVPKVLAYAKELLFNAQ

SEQ ID NO: 32331 - protein, 224 aa, Oryza sativa; identical to SEQ ID NO: 30534

SEQ ID NO: 32332 - protein, 267 aa, Oryza sativa
MTPIFTFIVALPYGLEKVDLKTGAGIAKVGGTVLGFSGAMILALYQGPSLTKLGPAAARSSSSSSSSSATAAVVGHGSGGGAHRWAIGSVALLGGSACWSLWFILQSRIAKKYPALYSGTALMFLLSFLQMAAVALAVDRISLSPWILTTKLQIITVLFVGIVGSGIAFLAMSWCVEQRGPVFTTAFTPLIQIIAAAINVIVLHEQLHLGIVIGSALVIIGLYFVLWGKNKEASSSSSPAKEAVPALRQQYGGHDQETTNDVQMQTV

SEQ ID NO: 32333 - protein, 287 aa, Oryza sativa; identical to SEQ ID NO: 30679

SEQ ID NO: 32334 - protein, 115 aa, Oryza sativa
MVGERGAQLSGGQKQRIAIARAIVKDPKILLLDEATSALDAESERVVQDALDRVMMNRTTVIVAHRLSTIQGADMIAVVKNGMIIEKGKHDALIGIKDGAYASLVALHVSAAAIS

SEQ ID NO: 32335 - protein, 287 aa, Oryza sativa; identical to SEQ ID NO: 30679

SEQ ID NO: 32336 - protein, 231 aa, Oryza sativa; identical to SEQ ID NO: 31988

SEQ ID NO: 32337 - protein, 242 aa, Oryza sativa
MCSPGCLGISTSYSIPATLAGRSLQKEEGAAGDPRHGAVRGRPVGAHPSGEPHHQPAKSPHRLQALHRFSVDDDVAAVRRVLHRRLRRQPAADAAALLHQLRLLAGVLLPDAGLQLPAVQEHHGEPRPALHPVGQPAQAAPALPRPQGLPPDAAQRRALRQEVQGGRPRPGQDRPGHPPPRRRRPGPGFRLRRVVLRGGRQAVLQPAGGREEGHDKGRCRVQEAQGHAQQDDECEKFQEAAV

SEQ ID NO: 32338 - protein, 256 aa, Oryza sativa
MDRRRIRRDVEIESVADDSANSVQNIRLVIDIGDRTIQVPLNGHTVAQNIGRQAAAAVAGDSSAGGVSEKAGGGGEEWLQEQDGLLSMRGWLMAVATLFAAMAFQAALQPPGWMPRPRDWFAALLAADPAAAAVTRDQAGKAMLYLIVNTCTFATSLAVLLMLLAVGDAGGGGGGCASRRVTARLIANMMTAVALFAAATFALCAADDYRLMAFVGTVVAVYAAVTVVFVRCNLALPFRRGGGGGGHGCCSWVSRL

SEQ ID NO: 32339 - protein, 287 aa, Oryza sativa
MARSLAALLLLLVAAAGASHAASPAEMYWKIALPTSPMPGAIHDLISPASSAASASKDKEDTVGSVFFLEKDLFPGSKMTLHFTRATAGAALLPRGRADSVPFASEKLPEILSQLSIPAGSPTADAMRSTLAVCEAARIASETAPKHKHYCATSLESMVELVASSLGTRDVHAVSTEVVNRAGPTPRQAYRVEAVRPVPVPGGDMVACHRMPYAYAVFGVHGIKGAAYTVTLAGADGTMAEAVAACHGDVDGHGVAVAEAYKRLGVAPGKVAVCHFLPQDDMLWVRN

SEQ ID NO: 32340 - protein, 267 aa, Oryza sativa; identical to SEQ ID NO: 30541

SEQ ID NO: 32341 - protein, 255 aa, Oryza sativa; identical to SEQ ID NO: 30542

SEQ ID NO: 32342 - protein, 395 aa, Oryza sativa
MRAIASSCRHTQTAAAMAPGSRCSRRQQLLVAVAVVLLLAAAPTGCSAARSKKSYEAIFSFGDSLSDAGNLIADGIPKSLTTARAPYGMTFFGRPTGRCSNGRLVVDFLAEHFGLPLPPASKAHGADFSKGANFAITGATALEYSFFKQHGIDQRIWNTGSINTQIGWLQDMKPSLCKSDQECKDYFGKSLFVVGEFGGNDYNAPLFSGVAFSEVKTYVPLVAKAIANGVEKLIELGAKDLLVPGVLPIGCFPLYLTLYNTSSKADYNARTGCLRRYNRLAFHHNRELKQQLDELQKKYPETKIMYGDYFKAAMQFVVSPGNFGFSSTMQACCGAGGQGNYNFNLKKKCGEEGASVCSNPSSYVSWDGIHMTEAAYRYVANGWLNGPYAEPPILK

SEQ ID NO: 32343 - protein, 200 aa, Oryza sativa
MTSCGNEPLFKDGKGCGSCYQIRCVGHPACSGLPETVIITDMNYYPVSLYHFDLSGTAFGAMAKDNRNDELRHAGIIDIQFRRVPCQYPGLTVTFHVEQGSNPVYMAILVEYENGDGDVVQVDLMESRYSTGGVDGTPTGVWTPMRESWGSIWRLDTNHPLQGPFSLRITNESGKTLIADQVIPADWQPNTVYSSIVQFD

SEQ ID NO: 32344 - protein, 50 aa, Oryza sativa
MDAIRCWGLSHSKNVNKSFGKGRLYSKVGLCAAQLYVSASYRSYLVISGP

SEQ ID NO: 32345 - protein, 438 aa, Oryza sativa; identical to SEQ ID NO: 28597

SEQ ID NO: 32346 - protein, 265 aa, Oryza sativa
MAFSSKACRCLVLMSFALLPLSMAMDSIGSYCSGNSLAGNSKAVASINSVLTDLVAKGSTGGGFATSSAGKANNVIYGLAQCRGDVSTSDCQACLASAANQILTSCNYQSDSRIWYDYCFMRFENENFIGQTDTDAGVILVNVQAMDNGKAFQKAVGKVMGKATSQASQAGSGGLGRTKDQYTPFINIYGLAQCTQDLSPLACAQCLSTAVSRFGQYCGAQQGCQINYSSCRVRYEIYPFYFPLATSARSATTDMTKYTKIVVHR

SEQ ID NO: 32347 - protein, 237 aa, Oryza sativa
MSTLDATRAELGLVVLYLNKAEARDKICRAIQYGSKFISNGQPGTAQDVDRSTTLARKVFRLLKWVNDLHGLISPPAKGTPLTLVLLGKSKNALLSTFLFLDQFVWLGRTGIYKNKERTDRIVRISLYCWMASSVCAGLVELGELKRLSKSMRKLARELRDTDKYENDQYKSKMKQSDERLLALVKAAMDVVVAVGLLQLSPKKITPRVTGAFGFVTSLISCYQQLPSRAPAIKVKA

SEQ ID NO: 32348 - protein, 160 aa, Oryza sativa; identical to SEQ ID NO: 30264

SEQ ID NO: 32349 - protein, 287 aa, Oryza sativa; identical to SEQ ID NO: 30679

SEQ ID NO: 32350 - protein, 236 aa, Oryza sativa
MAAGLGVKAAPFTYVAHALAVAAAVMVLVWCISFRGGLAFEADNKNLIFNVHPVLMLIGYIILGSEAIMIYKIFPKLNHDTTKLIHLILHAIAIVLGAVGIYCAFKFHNESGIANLYSLHSWLGIGTISLYGIQWIFGFVAFFYPGAAPHVRRGALPWHVLFGLFVYVLTLATAELGLLEKLTFLQSSGLDKYGAEAFLVNFTGLVVALFGAAVVVAAVAPAHVEEPEGYAPIPVN

SEQ ID NO: 32351 - protein, 287 aa, Oryza sativa
MARKCSSCGNNGHNSRTCSGQRVLDHSISSSNSGSTTAAAATACGGLRLFGVQLQVGGGSSPLKKCLSMECLASPAYYGASASPSVSSSSSSLVSIEENTERVSNGYLSDGLMGRVQERKKGVPWTEEEHQMFLAGLDKLGKGDWRGISRHFVTTRTPTQVASHAQKYFLRQNSMTQKKRRSSLFDVVEGIKRAAAMPISGSASELQIPGMSIGVGVVKEEVVLPPCLNLMSNSSSASQHSPSLTLLANPQVQLQMPDLELKMSTSRLSDQSGPSPSTPFFGTIRVT

SEQ ID NO: 32352 - protein, 192 aa, Oryza sativa
MPGGGGPGAPPPYHGGGGGGGGGGGGGGYTGSAAPEPAAKVKQCDANCDETCDNARIYISNLPPDVTVEELQELFGGIGQVGRIKQKRGYKDQWPWNIKIYTDDSGKNKGDACLAYEDPSAAHSAGGFYNNYEMRGYKISVAMAEKSAPRAPAYGHGGGRGGYGGGRRDNFRDGGGHGPNRHQGGGSRSRPY

SEQ ID NO: 32353 - protein, 229 aa, Oryza sativa
MASFPTTAAAAAAQAFAFALAPKPSSSAAAPSALFPRTAAAAAFPTLAVRGSGKARQPVVAAAAGAGTGSEQRETILLPGCDYNHWLIVMEFPKDPAPTREQMIDTYLNTLATVLGSMEEAKKNMYAFSTTTYTGFQCTVDEETSEKFKGLPGVLWVLPDSYIDVKNKDYGGDKYINGEIIPCTYPTYQPKERRTSKYESRRYERRRDGPPASRRPRPQTAQPESASSS

SEQ ID NO: 32354 - protein, 227 aa, Oryza sativa; identical to SEQ ID NO: 32151

SEQ ID NO: 32355 - protein, 320 aa, Oryza sativa; identical to SEQ ID NO: 30442

SEQ ID NO: 32356 - protein, 170 aa, Oryza sativa
MSSKLVTSPLKSMEQGHLEQPLRDPQAPAEQHDMGLSPLTLLGFAFLTFNSGMAVYRSDRDLATIFFVVFSYVDLVSLFYFLRLFEKTPPESPRRHHIKTAVWLLTTMLTAVFSYKVAAIMPFPVQVLVWAMAAATVLGGFYAFFLHSDEKKPIESAPGILLILPFIELK

SEQ ID NO: 32357 - protein, 260 aa, Oryza sativa
MLDYRTRRLEMEPIAWNQMAPSDLSAGVDPATPEFRRIVCEGDFDEERSVFVGPRSRSISGVTENGYYVVTPLIPRPSEHGSSWPPILVNRGWVPRDWRDKNVQDHQCVREVPEYKEADKKTDGKGSWWKFWSNSKEPEQSCEIEKPVKPPVRVLGVIRGSEKPSIFVPANEPSVGQWFYVDVPMIARACGLPENTIYIEDINEDVSPTNPYPVPKDVSTLIHHSVMPHDHLKYTVTWYTLSAAVTFMAAKRIKAKKVKL

SEQ ID NO: 32358 - protein, 352 aa, Oryza sativa
MREMGEKRRRGHLNPAGFAGGLHDHEEKKNEEHKLDMSGMSMDALPHLTMSLGQVTILDLSNNNLESIPESIIARLLNVVVLDVRSNQLKSLPNSIGCLSKLKVLNVSGNLLESLPNTIEECRALEELHANFNELTKLPDTLGFELHSLRKLSVNSNKLAQLPSSTSHMTALRALDARLNCLRALPDGLENLANLEALNVSQNFQFLRELPYAVGLLASLRELDVSYNSIAALPDSMGCLTKLARFSAVGNPLVSPPMDVVEQGLDAMRAYLTARMNGGDGKRKKKAWLPKLVKYSTFTARMTPGRTRVHENTEGLLMSDYRSLNGIASPRFLTMLSPRRLFSPRRNSPKHC

SEQ ID NO: 32359 - protein, 302 aa, Oryza sativa
MAAAEAAAAVGKQQQKGGGGRGGGGGGPAPFLTKTNQMVEESATDEVISWGKEGRSFVVWKPVEFARDLLPLHFKHCNFSSFVRQLNTYGFRKVVPDRWEFANGNFRRGEQGLLSGIRRRKATTPQSSKSCGSGVNVAFPPPLPPLPPEPSATTSSGNDRSSSSASSPPRADITSENEQLRKDNQTLTMELARARRHCEELLGFLSRFLDVRQLDLRLLMQEDMRAAAGGVGGEQRVQEHAREEKCVKLFGVLLDDTHGAATRKRARCEEAAASERPIKMIRIGEPWVSVPSSGPARCGGDN

SEQ ID NO: 32360 - protein, 270 aa, Oryza sativa; identical to SEQ ID NO: 28586

SEQ ID NO: 32361 - protein, 396 aa, Oryza sativa
MCGGAIISGFIPPSAAAAAAAAVAKKQQGRRVTADVLWPGMLRKGKAAAAEEDFEADFREFERGMSDDEAEGGGGEEEEDDDDVVVVVPPPAAARFVVRAAAKAAPPTADGMLTTKLVQHDGPTARSAKHKRKNQYRGIRQRPWGKWAAEIRDPSKGVRVWLGTYNTAEEAARAYDAEARKIRGKKAKVNFPDEPAVAQKLSLKQNAAKQEKLAPPLKTCGDDAFFQLNSSDNDLFAMLAKVPAKPAEPVDLMPPVKPLASTETFEMNMLSDTSSNSFGSSDFGWEDDTLTPDYTSVFVPNAAMPAYGEPAYLTGGAPKRMRNNYGIAVPQGNGMPNLAQNMPTFDPEMKYLPLPYVESSSDESMDNLLQNDATQDGASNEGIWSLDELLMAAGAY

SEQ ID NO: 32362 - protein, 143 aa, Oryza sativa
MDTTASWRLLPPAASSPPPRRQAALLRRHPAATTTSSSSGKRTTRLLCLLHDTPPPAPPPAADEISSPPLRKLAAALQCGAIWAAVEAPAALAVTGEEDLDILGILPTVAAIAFVYLFVFPVRSGPPFLVSCEANSEIGCTGL

SEQ ID NO: 32363 - protein, 416 aa, Oryza sativa
MDTKLGALALMLPLLLLISATRVAYGGIQPTPPPASFQAALVRIEPAGINYTRAVQRSRSRLSMLAARAVSNAGAAPGESAQTPLKKGSGDYAMSFGIGTPATGLSGEADTGSDLIWTKCGACARCSPRGSPSYYPTSSSSAAFVACGDRTCGELPRPLCSNVAGGGSGSGNCSYHYAYGNARDTHHYTEGILMTETFTFGDDAAAFPGIAFGCTLRSEGGFGTGSGLVGLGRGKLSLVTQLNVEAFGYRLSSDLSAPSPISFGSLADVTGGNGDSFMFTPLLTNPVVQDLPFYYVGLTGISVGGKLVQIPSGTFSFDRSTGAGGVIFDSGTTLTMLPDPAYTLVRDELLSQMGFQKPPPAANDDDLICFTGGRRRRRSRPWCCTSTAAPTWTCPPRITCRKCKARTGRQPGAGPW

SEQ ID NO: 32364 - protein, 361 aa, Oryza sativa
MAAAVLAVLWACMMMMSLAPASLAASGFEEVPTIAFDEGFSPLFGEDNMVKSADGRTVSITLNRYTGSGFISSDYYHHGFFSASIKLPKDHTAGVVVAFYLSNGDVFEKTHDELDFEFLGNRYRHEWKMQTNVYGNGSTDRGREERYLMPFDPTADAHRFSILWHSRLIVFYVDGVPIREVPRTAAMGADYPSKPMALYVTIWDGSTWATDNGKYKVNYKRGPFTAVFSDLVLRGCTARSDIRLATTADDQDRCAAAEEDLMESDEYSSTMAMTARKRMAMRRFRQRQMLYTVCYDTNRYPEPFPECDVNMAERQMYWQWGESKVVRPRVRPRPGRRSKRRPSPEATAIPPPVLVSLQQAD

SEQ ID NO: 32365 - protein, 214 aa, Oryza sativa; identical to SEQ ID NO: 30074

SEQ ID NO: 32366 - protein, 235 aa, Oryza sativa
MAAGAGGDGGGELKLLGTWASPFVQRVRLALNLKGLAYEFIEEEIGGGKSELLLASNPVHKKVPVLLHRSNPICESQVIVQYLDDAFPGGAAGGDLLPSDPHARAVARFWAAYIDAEFFAPWNRSFYTASEEEKTAEMGRAAAALATIERAFAELSRGKGFFSGEDRPGFVDVVLGGFVGSMRAYGTAVGVEVLDAGRTPLLVAWAERVAALDAARGVIPDVERVVELSRYARKK

SEQ ID NO: 32367 - protein, 311 aa, Oryza sativa
MGRPPCCDKEGIKKGPWTPEEDIILVSYIQEHGPGNWRSVPINTGLMRCSKSCRLRWTNYLRPGIKRGNFTAHEEGIIVHLQSLLGNRWAAIASYLPQRTDNDIKNYWNTHLKKKLAAAANSTSSSNRHPIFADATFPSAAGGSYTVSSNSDVTQMAAIARRSPFADCPSSSYASSMDNISKLLDGFMKTNSPSPPPPPLQHYDSGYYDDVKPAVDVGGNPLLSSFDCMSGADLDCCFDVHQQHQQQQPASFMEYGGYGGGYGDESKQQLMNQAAPPLSSIEKWLFDEAAAEQVADLMDLSDGCCSVPMMF

SEQ ID NO: 32368 - protein, 252 aa, Oryza sativa; identical to SEQ ID NO: 30657

SEQ ID NO: 32369 - protein, 287 aa, Oryza sativa; identical to SEQ ID NO: 30679

SEQ ID NO: 32370 - protein, 203 aa, Oryza sativa; identical to SEQ ID NO: 30314

SEQ ID NO: 32371 - protein, 281 aa, Oryza sativa; identical to SEQ ID NO: 29271

SEQ ID NO: 32372 - protein, 204 aa, Oryza sativa; identical to SEQ ID NO: 29722

SEQ ID NO: 32373 - protein, 428 aa, Oryza sativa
MDREEVTEFLGQVPLLQCLPSSSIRRIADAVLVKRYEPGGYVAREGDPVDGLYIILDGQAEVSAPANTEEENRPDYVLNKYDYFGYGTNSSVHQVNVIAVSKLTCFVLPNQYGHLLQPKTIWSAEETPENHSLLEQILHLEPLEVDIFRGFTLPGAPTFRQVFGGQLIGQALAAASKTVDCLKAVHSLHAIFLIAGDKNLPIIYQVHRARDGTSFATRKVEAKQKGLVIFTLIASFQKDELGFEHQAAIMPDVPPPEELLNLEEIRERRLTDPRFPMQYRNSAAKKKFVPWPIEMRFCEDSASQHKPSLNYWFRARGKLSDDPALHRCVVAYASDLLYSGVSLNPHREKGLKTYSLSLDHSIWFHKPVKADDWLLYVIDSPSAHGGRGFVTGRMFNRQGELVMSLTQEALIRRAKTPGQPSQTPRPKL

SEQ ID NO: 32374 - protein, 338 aa, Oryza sativa
MWESLVEHAKTCVLSGKHYVYYAIDSRNVGAIFNNIYEFTGLIADDQFISAENLTDNQKIYADGLVKKAYEDWMHVVEYDGKALLSFKQKKKSVTTRSDTAAAATNSPVSYGSSNTHKQLSQPAKAGQTSTGTTSEDGSTSAYNGNQAGRYAVNSQSIPANVTTQYERSSLTPESQFNGSALQNQVSRGSNILALGPPQQQHQQNFEFSALGGQSMQPTGLNPFDDWSQPQENRSGVDDYLMEEIRMRSHEILENEEMQQMLRILSMGGASTNLTEDGFAFPNYMPSTPPNFNFGDDRARPPGKAVVGWLKIKAAMRWGIFVRKKAAERRAQLVELED

SEQ ID NO: 32375 - protein, 259 aa, Oryza sativa; identical to SEQ ID NO: 30235

SEQ ID NO: 32376 - protein, 325 aa, Oryza sativa
MATSHADVEKGARRKEVGKVPSPLYPQHEGEREWVPWIVPSFLVANIVVFVLTMYANNCPLHTPPRSGKCIARFLGRFSFQPLHENPLLGPSSATLQKMGALVWDKVVHEHQGYRLITSIWLHAGVLHLVANMLSLIFIGLRLEQQFGYVRIGAIYLLSGLGGSVLSSLFIRNHISVGASGALFGLLGAMLSELLTNWTIYTNKVAAVITLLFVIAVNLALGILPHVNNFAHIGGFLTGFLLGFVLLMRPHFGWMERYSLPSGSPCSSKKYLVYQWILLAIATALVIVGFAVGMTMLFRGENANDSCHWCHYLSCVPTSRWTCSN

SEQ ID NO: 32377 - protein, 475 aa, Oryza sativa
MASGQKVVKPMEVSVEAGNAGEAAWLDDDGRARRTGTFWTASAHIITAVIGSGVLSLAWAIAQLGWVAGPAVMLLFAFVIYYTSTLLAECYRTGDPATGKRNYTYIDAVRANLGGAKVTFCGVIQYANLVGVAIGYTIASSISMRAIRRAGCFHHNGHGDPCRSSSNPYMILFGAVQIVFSQIPDFDQIWWLSIVAAVMSFTYSGIGLSLGIVQTISNGGIQGSLTGISIGVGVSSTQKVWRSLQAFGDIAFAYSFSNILIEIQDTIKAPPPSEAKVMKSATRLSVATTTVFYMLCGCMGYAAFGDAAPDNLLTGFGFYEPFWLLDVANVAIVVHLVGAYQVFVQPIFAFVERWASRRWPDSAFIAKELRVGPFALSLFRLTWRSAFVCLTTVVAMLLPFFGNVVGLLGAVSFWPLTVYFPVEMYIAQRGVPRGSARWVSLKTLSACCLVVSIAAAAGSIADVIDALKVYRPFSG

SEQ ID NO: 32378 - protein, 22 aa, Oryza sativa
MNVQLRQLRQGQIQQHPILILY

SEQ ID NO: 32379 - protein, 297 aa, Oryza sativa
MTMEEGEVAEFTIPPQHAFDAVGSDQHQFAFVPRNATVVYKIELLSVVNEKHPLYIPSRDEIVEYASRKEEEGDIYFNLGKHLRAHRRYFKARQIIEYSRFGVRRGKINLIKLLSIPTSEIDAQLEEMWISCTFKAAKCAIQLGCYMQASCYYSEVLNYDVANVQAQQQQTLLQEFPDGSSRDPDAMQRGFEQFPPEYESELQLNATFTPAAFSPRRKGEHPYRGEIIGFPDVQANSSQPASTPSTAPSTPNPATPQTNALATGTSGTPSGSAAQSSGTINTNRGFLFRCFGPSPTS

SEQ ID NO: 32380 - protein, 118 aa, Oryza sativa
MAQRRRTFTVTCKEAGKVVEEFKLRVVYIPANPPSPVPEEEEDEIDSLDSDVDHEVQMPSTFDAASRKGYTSGSQASHDEDLLKKKRSSSDGGFTALFVPFVFAFFVFIGYLMAGSNV

SEQ ID NO: 32381 - protein, 475 aa, Oryza sativa
MASGQKVVKPMEVSVEAGNAGEAAWLDDDGRARRTGTFWTASAHIITAVIGSGVLSLAWAIAQLGWVAGPAVMLLFAFVIYYTSTLLAECYRTGDPATGKRNYTYMDAVRANLGGAKVTFCGVIQYANLVGVAIGYTIASSISMRAIRRAGCFHHNGHGDPCRSSSNPYMILFGVVQIVFSQIPDFDQIWWLSIVAAVMSFTYSGIGLSLGIVQTISNGGIQGSLTGISIGVGVSSTQKVWRSLQAFGDIAFAYSFSNILIEIQDTIKAPPPSEAKVMKSATRLSVATTTVFYMLCGCMGYAAFGDAAPDNLLTGFGFYEPFWLLDVANVAIVVHLVGAYQVFVQPIFAFVERWASRRWPDSAFIAKELRVGPFALSLFRLTWRSAFVCLTTVVAMLLPFFGNVVGLLGAVSFWPLTVYFPVEMYIAQRGVPRGSARWVSLKTLSACCLVVSIAAAAGSIADVIDALKVYRPFSG

SEQ ID NO: 32382 - protein, 309 aa, Oryza sativa
MAPATTAAMALAPPPSHHHHHHHVKQLQLPPSVSVSVPLRSGFLGRALPAAAHPQPLLAAESRRSSAVSVRMSWDGPLSSVRLIMQGRNVKLNEKVKEHIEEKAGRAVAKHSQLVKEVDVRLSARGGELSRGPKICRCEITLFTKRHGVIRAEEDAESTYASIDLASSIIKRKLRKIKEKETDVRHLKGTKPPVSDWPPSLLDNNDDDAQAQLKDLEEAVGAEDEDTVLTKVVRTKVFEMPPLSVEEAMEQLVNVDHNFYAFRDEKTGEMNVLYKRKEGGFGLIVPKGDGHLHKETIPNSDHHHPSLAA

SEQ ID NO: 32383 - protein, 437 aa, Oryza sativa
MAAASSSAAACFLSPSPPPRPRHHSIKHLACAASRSPSPGPSSSRSLALPSPSASASPWPWPRRLRDLLPDETGRILSSATGSLIVALASAALILGDAGSASAFVVATPRKLQADELATVRLFQENTPSVVYITNLAVRQDAFTLDVLEVPQGSGSGFVWDKSGHIVTNFHVIRGASDLRVTLADQTVYEAQVVGFDQDKDVAVLRIKAPTDKLRPVPVGVSADLLVGQKVFAIGNPFGLDHTLTTGVISGLRREISSAATGRPIQDVIQTDAAINPGNSGGPLLDSSGNLIGVNTAIYSPSGASSGVGFSIPVDTVGGIVDQLIKFGKVTRPILGIKFAPDQSVEQLGLSGVLVLDAPPNGPAGKAGLQSTKRDSYGRLILGDIITSVNGTKVTNGSDLYRILDQCKVGEKVTVEVLRGDQKEKIPVILEPKPDES

SEQ ID NO: 32384 - protein, 287 aa, Oryza sativa; identical to SEQ ID NO: 30679

SEQ ID NO: 32385 - protein, 233 aa, Oryza sativa; identical to SEQ ID NO: 30501

SEQ ID NO: 32386 - protein, 287 aa, Oryza sativa; identical to SEQ ID NO: 30679

SEQ ID NO: 32387 - protein, 204 aa, Oryza sativa
MAAPPPRRTPNPERGSRRKGEDPWLAASLRPGNFLPGLAIGFLLGLLVDLTSSWRPQSSPPLAPAAPAPRGSKRTGGSSSAGGGIGGEELKMVLVVRKDLKMRAGKIASQCAHAATGLYAELMASNRGLLRQWEQFGQAKIVLTCKNQQVMNRIKETAEHRGIPTFVVADAGRTQVQAGSKTVLAVGPGRKADIDSVTGKLSLL

SEQ ID NO: 32388 - protein, 240 aa, Oryza sativa; identical to SEQ ID NO: 32232

SEQ ID NO: 32389 - protein, 287 aa, Oryza sativa; identical to SEQ ID NO: 30679

SEQ ID NO: 32390 - protein, 258 aa, Oryza sativa
MADNDKEAAGEGATPRGADWEVVTLTASAYAAAPGPGGAGDRPAAETKGLDASQEGDQTKGLDGSQEGRGSESALFMSGHFVFPPSEHENLPIDAGFDDIQHKKDAQEASTSVEDEGFKNVGGNYGAGLERIQFYDEGRNLSANDVEMMMGDAAEHGSFHAQDEEQGLDDDNDFDDSHDKSDLPSESADSKSRDSGAPCKCWLKKHMSCLYHQAKETNALWSVVVAAALVGLVILGRWHKDKLHLKNLKWRSGSTVRG

SEQ ID NO: 32391 - protein, 328 aa, Oryza sativa; identical to SEQ ID NO: 30316

SEQ ID NO: 32392 - protein, 279 aa, Oryza sativa
MAVSVRCCFGSSSLSHHARLLLVIVALLAPRLASGCDRCVRRSRAAYYTSSLTLTAGSCGYGTAAATFNGGGFLAAAGPALYRGGVGCGACYQVRCKDKKLCSNAGARVVVTDRARTNRTGLVLSSPAFAAMARPGMAASLTELAAVDVEYKRVPCEYRHRSLSVRVDERSRGPNELTISFLYQGGQTDIVAVDVAQVGSSSWKFMTREHGPSWSMANAPPGPLQMRLVVTGGYDGKWVWADREVLPRRWRAGEVYDTGVQITDIAQEGCFPCDTHEWK

SEQ ID NO: 32393 - protein, 320 aa, Oryza sativa
MWLLYQSEAAANGTAGSAVGSPVANLVSRLGSFTFRRTSSGRVETTTDPESDETASVGGSFFETLTSSEFYKNTKVGDISGSFRWAPFLALQTSDTFLTMLLLLSKYRMKSLPVVDIGGDKIENIITQSSVVHMLAECVGLPWFESWGTKKLSELGLPLMKPCKLVKVNEDQPVLKAFQLMREKGVGGLPVMDTSGTKAIGNISIRDVQYLLTAPNIYKDYRTITAKDFLTAVRQHLQEQHEASPLLGSVITCRRDDEVKDIILKLDSEKIHRIYVIDDKGNTEGVITLRDIISKLVHEPRHYFGDFFDGVVPLPPNSTV

SEQ ID NO: 32394 - protein, 210 aa, Oryza sativa
MEEIRRLRIQQRIKNVELGISVDVPEGELPDFPSFIPFLPPLSAANLKIYYATCFTLIAGIMVFGGFLAPILELKLGVGGTSYADFIRSVHLPMQLSQVDPIVASFSGGAVGVISALMVVEINNVKQQEHKRCKYCLGTGYLACARCSSTGTLVLTEPVSTFSDGDQPLSTPRTERCPNCSGAGKVMCPTCLCTGMAMASEHDPRIDPFD

SEQ ID NO: 32395 - protein, 218 aa, Oryza sativa; identical to SEQ ID NO: 30237

SEQ ID NO: 32396 - protein, 204 aa, Oryza sativa
MACLHDHSCEDHNCAADWSLFNHIDVPKVVALNESVAGSVKSVFKPWEQRLDTSGGFLESNEGDPELLVFIPFTSDVKIKSISVVGGADGTSPSRMRAFINREGIDFNDAQNMQPVQEWELAENLQGVLEYQTRYSRFQGVANLTLHFPENFGGDTTKIYYIGLRGEATQNKRDVVATIVYEIMPNPSDHKTKSETGGGFSHVE

SEQ ID NO: 32397 - protein, 167 aa, Oryza sativa
MVMTTTNGGGVDPPQWPEEEEDEDAAAGSSCRVTAANGHHHHHQQLVVSGELGGGGGGGGGGREKEDDELKRKWAAIERLPTADRLRLSLLSSTRGGGSSGDVSEGGGGGAASSELEVVDVRWLGAAERRAVVQRLVADVKHDHVRMLRKQRERMERYVTRSNTSFS

SEQ ID NO: 32398 - protein, 293 aa, Oryza sativa; identical to SEQ ID NO: 31717

SEQ ID NO: 32399 - protein, 57 aa, Oryza sativa
MAHRRRSLVRPTTARRRQELLPAWQGKACWRQQDDDARLGRDRAAWNETIHVLGGMF

SEQ ID NO: 32400 - protein, 133 aa, Oryza sativa
MGLLDKLWDDTVAGPRPDTGLGRLRKHAAARPAAVKINDPTGDAAMVAVPPTTPAGAEEAPVKVTRSIMIKRPAGYPASPRSAASTPPASPAGSTPPISPFAGAGGRFRRKSSSEAYERATPGTTSHPPPFEV

SEQ ID NO: 32401 - protein, 210 aa, Oryza sativa; identical to SEQ ID NO: 32134

SEQ ID NO: 32402 - protein, 214 aa, Oryza sativa; identical to SEQ ID NO: 30361

SEQ ID NO: 32403 - protein, 245 aa, Oryza sativa
MATRIQFENNCEVGVFSKLTNAYCLVAIGGSENFYSAFESELADVIPVVKTSIGGTRIIGRLCVGNKNGLLLPHTTTDQELQHLRNCLPDQVVVQRIDERLSALGNCVACNDHVALTHPDLDKATEELIADVLGVEVFRQTIAGNILVGSYCAITNRGGLVHPHTSIEDLDELSTLLQVPLVAGTVNRGSEVIAAGMTVNDWTAFCGSDTTATELSVIESVFKLREGQPAAIVDDMRKSLIDSYV

SEQ ID NO: 32404 - protein, 250 aa, Oryza sativa
MHKLGRGSRDKVQQFMTITGASEKVALQALKASDWHLEGAFDFFYSQPQISLTNSRHLEDLYNRYKEPDVDMIMVEGVSQFCTDLQVDPQDIVMLVISWHMKAATMCEFTRQEFIGGLQSIGVDSIEKLREKLPSLRAEIKDDHKFREIYNFAFAWAREKGQKSLALETALGMWQLLFAERHWPLIDHWCQFLQVRHNKAISRDTWSQLLEFVKTIDPQLSNYDEEGAWPYLIDEFVEYLTENGFVQLRK

SEQ ID NO: 32405 - protein, 329 aa, Oryza sativa
MASLLPSPVFPTAAAAAASTSSSSRCRCRCRITTSSSAHGWSNCQGWRLHHRVWAAQAADQQGGVQQQQQQEENEDGVVDSNVLPYCSINRKEKKTIGEMEQEFLQALQAFYYDKKAVMSNEEFDNLKEELMWEGSSVVMLSPDEQRLLEASMAYVAGNPIMTDAEFDELKLRLRKEGSEIVQEGPRCSLRSRKVYSDLTVDYFKMFLLNVPAAVLALTLFFFLDDLTGFEITYLLELPEPFSFIFTWFAALPLIFWVAQAITSAIVKDFLILKGPCPNCGNENLSFFGTILSVPSGGARNSVKCANCSSSLVYDSASRLITLPETAEA

SEQ ID NO: 32406 - protein, 211 aa, Oryza sativa
MAGAGRTRSTAMAAWSYSSLLLQLLLLSMVAVLDGAATTGGGGAGAPAPAADCTDALLSLAGCLSYVQEGSTVAKPDAPCCSGLKGVVKKEVACLCQAFQGSQNFGVTLNMTKALQLPAACKVKTPPFSKCHLSIPGVTGGAPAPAPFSGAPFFGGSSPSASPAGTGSDSAAATVRAPAPSPSAAVRPKETKAALFSAAVIAAATLLAHRA

SEQ ID NO: 32407 - protein, 336 aa, Oryza sativa
MAASSSSSSSLAVVVVAAAVALVAGGGAAVAQLCEEYYDCTCPDAYDIVRRVLIDAHRSDARIFASLIRLHFHDCFVQGCDASLLLDSVPGMPSEKTSPPNNNSARGFPVVDDVKAALEDACPGVVSCADILALAAEISVELSGGPGWGVLLGRLDGKTSDFNGSLNLPAPTDNLTVLRQKFAALNLNDVDLVALSGGHTFGRVQCQFVTDRLYNFSNTGRPDPTMDAAYRSFLSQRCPPNGPPAALNDLDPTTPDTFDNHYYTNIEVNRGFLQSDQELKSAPEATGTTAPIVDRFATSQAAFFRSFAQSMINMGNLSPVTDPSLGEVRTNCRRVN

SEQ ID NO: 32408 - protein, 257 aa, Oryza sativa
MDLDSAAAAAAAAAHHQQQQQQTTSQDKLKALAYEYGHEFRVFSSVTFESMTSNLPAADQEEDDDFYELQPADYFNLVSNRIGEQSKVLKTRKMREAELAAQRAKIKKAVMRVRFPDGYILEADFHPSETVQSLMDFLKKVISRPDLPFYLYTVPPKKRIKDTSLDFYTIGFVPGANVYFSYDLPEGSELNTDSVKSGPYLREEIRMLDGLPIVQEPVHQPIDSTMNSSSAHQSDVSQSDFAPPANKKPAKPKWFKR

SEQ ID NO: 32409 - protein, 447 aa, Oryza sativa
MGKEKTHINIVVIGHVDSGKSTTTGHLIYKLGGIDKRVIERFEKEAAEMNKRSFKYAWVLDKLKAERERGITIDIALWKFETTKYYCTVIDAPGHRDFIKNMITGTSQADCAVLIIDSTTGGFEAGISKDGQTREHALLAFTLGVKQMICCCNKMDATTPKYSKARYDEIVKEVSSYLKKVGYNPDKIPFVPISGFEGDNMIERSTNLDWYKGPTLLEALDQINEPKRPSDKPLRLPLQDVYKIGGIGTVPVGRVETGVLKPGMVVTFGPSGLTTEVKSVEMHHEALQEALPGDNVGFNVKNVAVKDLKRGYVASNSKDDPAKEAASFTSQVIIMNHPGQIGNGYAPVLDCHTSHIAVKFAELVTKIDRRSGKELEKEPKFLKNGDAGMVKMIPTKPMVVETFSEYPPLGRFAVRDMRQTVAVGVIKNVEKKDPTGAKVTKAAAKKK

SEQ ID NO: 32410 - protein, 169 aa, Oryza sativa
MLRDPRRLYAPGRLYHIVERKPFRCGRYPPVVRTAVPVDGRFEHIVLSCNMISDHAIIWIEREAQRGLDLMLENERTMKPPETQRMDDEIAIERDHDEEQKAALRRAVALGVADVNVPSAYGTFSENLTPEADEASPVLPDSGLRRTVWDEWIARIFEKDESGKMIPRT

SEQ ID NO: 32411 - protein, 303 aa, Oryza sativa; identical to SEQ ID NO: 30545

SEQ ID NO: 32412 - protein, 240 aa, Oryza sativa; identical to SEQ ID NO: 29049

SEQ ID NO: 32413 - protein, 224 aa, Oryza sativa
MKATVKGRYEGDKATAAATLAFTPSAADLRFKASATDAAFARGPSLEGLILTLEKPGSFLLDLKPHSKDVRFQFMNSALLLDRRVSLTYTHSTTLSPGPAKLPARTALDGSLTFDPANKFSLSHTLGSSGCRVKYSYAHGQDRLTTIEPCFDTANNAWDFAVTRKFQGGDAIKATYQASTKLLALDWTRDSKIGASFKVAASFDLSDQSKAPKLIAESTWNYEI

SEQ ID NO: 32414 - protein, 323 aa, Oryza sativa; identical to SEQ ID NO: 30216

SEQ ID NO: 32415 - protein, 226 aa, Oryza sativa
MASLSPSLHLPCNSRTGFAGKTQGIRLRVIPAGRVGFVRTTVECKESRIGKKPIEVPSNVTLTLEEQFIKAKGPLGELSLNYPGEVKVVKEESGKLRVSKTVETKRANQMHGLFRTLTDNIIVGVSKGFDKKLQLVGVGYRAAVEGKDLVMNLGFSHPVRMAVPEGLKVKVEENTRIIVSGYDKSEIGQFAASIKKWRPPEPYKGKGIRYADEIVRRKEGKAGKKK

SEQ ID NO: 32416 - protein, 475 aa, Oryza sativa
MASGQKVVKPMEVSVEAGNAGEAAWLDDDGRARRTGTFWTASAHIITAVIGSGVLSLAWAIAQLGWVAGPAVMLLFAFVIYYTSTLLAECYRTGDPATGKRNYTYMDAVRANLGGAKVTFCGVIQYANLVGVAIGYTIASSISMRAIRRAGCFHHNGHGDPCRSSSNPYMILFGAVQIVFSQIPDFDQIWWLSIVAAVMSFTYSGIGLSLGIVQTISNGGIQGSLTGISIGVGVSSTQKVWRSLQAFGDIAFAYSFSNILIEIQDTIKAPPPSEAKVMKSATRLSVATTTVFYMLCGCMGYAAFGDAAPDNLLTGFGFYEPFWLLDVANVAIVVHLVGAYQVFVQPIFAFVERWASRRWPDSAFIAKELRVGPFALSLFRLTWRSAFVCLTTVVAMLLPFFGNVVGLLGAVSFWPLTVYFPVEMYIAQRGVPRGSARWVSLKTLSACCLVVSIAAAAGSIADVIDALKVYRPFSG

SEQ ID NO: 32417 - protein, 206 aa, Oryza sativa
MAENPQLFGNGMLVPFYGEMFVLARDGVEFHVDKIPSAPGGHAKTKGTIYLSNIRMVFVASKPVGNFFAFDMPLLYVHGEKFNQPIFHCNNISGFVEPVVPENQNRALYSTHTFKILFKEGGCGTFVPLFLNLVASVRRYNQFEAQSAASMAPRVDPLQAVQTPVDDMMRHAYVDPNDPTKIFLQQPAPESQLRRRNYHGRADNAY

SEQ ID NO: 32418 - protein, 266 aa, Oryza sativa
MEVAAADSSGGDRYRSHLTGDGEKNTVWRHGAPPTYDAVNSLFEAERTQEWPAGSLEETVQNAIKTWEMELSYKAKLEDFKSVSPGRFRLSVNGGRPLTGEETLAVGSYNALLTSPILPGAGAYDAAAETFESSHDLFRAAFPRGFAWEVIRVYSGPPVITFKFRHWGHMDGPYKGHAPTGDKVEFYGVAVLKVDEQLRAEDVEVYYDPGELLGGLLKGPLLVPSAEEEDARQLGERLGEAAIVSASGAAPQSQACPFLASAKREE

SEQ ID NO: 32419 - protein, 374 aa, Oryza sativa; identical to SEQ ID NO: 32316

SEQ ID NO: 32420 - protein, 339 aa, Oryza sativa
MLTTSSHSRHHHAFERSPNHSMMKNIADRNKHDLLQSAMNHAASKYMQRIYPLGIQRSSSNLTLSSLSLSQNSNDSSLSSSNSSWEPKVPLLYGGTFSPWGDVLVSLERRREEDDDKVSDHDVEGGEEDFDCSEPGSLHRCSWITKNSDEAYVQFHDECWGVPVYNDNRLFELLALSGMLIDHNWTEILKRRDMYREAFADFDPSTVAKMDENDVAEISGNKELKLAECRVRCIIENAKCIQKVAKEFGSFSGYIWGHVNHRPTVGRYKHHKYIPFRTPKSEAVSKDLVRRGFRLVGPVIVYSFMQASGIVIDHLVDCFRFPECLHLADRSWGITNVAA

SEQ ID NO: 32421 - protein, 164 aa, Oryza sativa
MQQHLAPQYKHLITIKAGKPKGTLLDALQSDPEKVRRLSLSEQQLAKLADHHGTEIVRFTQRNLLRIYPKGTRVTSSNYNPFLGWVHGAQMVAFNMQGYGRALWLMHGFYKANGGCGYVKKPDFLMQTDPEVFDPKKIPISQENLEGESIHGGWLADGLHADPL

SEQ ID NO: 32422 - protein, 181 aa, Oryza sativa
MARSLAALLLLLVAAAGDSHAASPAEMYWKIALPTSPMPGAIRDLINPASSAGSASKEDTVGNVFFLEKDLFPGSKLTLHFTRATAGAALLPRGRADSVPLATEKLPEILSQLSVPAGSPAADAMSARPRRSPARRSNARRRSSPWWSSPRPASAPATCTPCPRRSTGQGRRRGRRTGWRP

SEQ ID NO: 32423 - protein, 336 aa, Oryza sativa
MLEVTSTQMEQILGVDFAEYYRQSKLFQQTQEMVDILSRPRRESKELTFATKYSQPFFAQYAACLWKQNLSYWRNPQYTAVRFFYTVIFSLMFGTICWKFGSRRETQHDIFNAMGAMYAAVLFIGITNATSVQPVISIERFVSYRERAAGMYSALPFAFSLVTVEFPYILVQSLIYGTIFYSLGSFEWTAVKFLWYLFFMYFTLLYFTFYGMMTTAITPNHTVAPIIAAPFYTLWNLFCGFMIPRKRIPAWWRWYYWANPVSWTLYGLLTSQFGDLDQPLLLADGITTTTAVDFLRDHFGFRHDFLGVVAGMVAGFCVLFAVVFALAIKYLNFQRR

SEQ ID NO: 32424 - protein, 394 aa, Oryza sativa
MAASSSTAAASSMSGANGGGGGGSVFPGPPPPTPSNHHHALPSSGAAGGGTDAALSTILQRLLLSSPAPILRSPLSSRSRAPPSLPPLVSLGSSGTLRLDAAADVGYFHLEGHGVPSQLPSSALAELSLVDASARRASNLLTLGFTEEDQQEADGAEDPALVFDVDDEGEMGALPAAAAEYARRMRDVGMQVVAMMSGCPEVGFGEAPFAEGRRKARCLMWVSKVAAGEAAPPAAGKAKAYPYVVGIHCQWEASGKEAAPASWVMDDGGEWTAVGARDGALLVTIGNIAQVWSNGKLKKVRGMARPVSSAPGAGHGAEADRLSVTVLITLPLDSVISPLVPVTDAGEEGGDDEVDGAGDDGDGWRFHSFLLEDLAWRVYNGRLQFKDPLVRYRI

SEQ ID NO: 32425 - protein, 77 aa, Oryza sativa
MKEEKDSRLYGLSVPSISAIVWMPWDHHQFKATDSALCSGSRRYHCIYVSIYMSNLMLIEIIFVVYVFFLRVIPISN

SEQ ID NO: 32426 - protein, 215 aa, Oryza sativa
MASKPADVTATGGGGVAVVRDNNNNAGGGEAEVYRSELTPLQKHVAFFDRNKDGIIYPSETYQGFRAIGAGVVLSAVGAVFINGGLGPKTIPENTKTGLKLPIYVKNIHKGKHGSDSGVYDANGRFVPEKFEEIFKKHAHTRPDALTDKELKELLQSNREPKDFKGWLGGFTEWKVLYYLCKDKDGFLHKDTVRAVYDGSLFAKMEQEKQSAKKK

SEQ ID NO: 32427 - protein, 98 aa, Oryza sativa
MAGSSSLSTLSLCARPARRARRWSSSSRSSRPATPRRRPPRRSPSSTASGSSRTPHFHSYSHYWGLVVCLSLSRWKKYHKLLILRTSRFRIASSFQDL

SEQ ID NO: 32428 - protein, 252 aa, Oryza sativa; identical to SEQ ID NO: 30657

SEQ ID NO: 32429 - protein, 224 aa, Oryza sativa
MSKEKHHKREHHLRRCCGGMAACILALVLVVGFIALVVYLALRPSKPSFYLQDLQLRSVDLGDPSLSATAQVTLASRNPNDHVGVHYRRLDVFVTYRDEPVTVPVSLPPTYQGHRDVTIWSPVLSGESVPVAGFVADALRQDVAAGYVALQVKVDGRVRWKVGSWVSGSYHLFVSCPAMLASAGPGGVGPMPLGGASAAVVNGTGAGAVASLRFTQPTGCSVEV

SEQ ID NO: 32430 - protein, 280 aa, Oryza sativa; identical to SEQ ID NO: 31660

SEQ ID NO: 32431 - protein, 285 aa, Oryza sativa; identical to SEQ ID NO: 30234

SEQ ID NO: 32432 - protein, 121 aa, Oryza sativa
MMNDLPTVYEVVSGSRQSKERDRSGMDNSSRNKISSKHTSDVARVENNIKEEDEGYDEDDGDHSETLCGTCGGIYSADEFWIGCDVCERWYHGKCVKITPAKAESIKQYKCPSCSSKRPRQ

SEQ ID NO: 32433 - protein, 288 aa, Oryza sativa; identical to SEQ ID NO: 30702

SEQ ID NO: 32434 - protein, 112 aa, Oryza sativa
MTTTMMATPMDLPLAWPGRVDPPLAGLGEGRGAGGDEEERRRLTSSLSLRRTDDDGDDGAACGKPGQRKRGSDARRRPQRCRRQLLGRPADGGGEPSARGEAGGGAFFFYLL

SEQ ID NO: 32435 - protein, 105 aa, Oryza sativa; identical to SEQ ID NO: 31212

SEQ ID NO: 32436 - protein, 272 aa, Oryza sativa
MNQHEAIQKFIQGTIAEGAPVVPISAQLKYNIDVICEYIVKKIPIPERNFTSPPNMIVIRSFDVNKPGSEVDEIRGGVAGGSILRGVLRVNQNIEVRPGIVMKDESGNIKCTPIYSRIVSLYAEQNELQFAVPGGLIGVGTTMDPTLTRADRLVGQVLGEVGSLPDVYVELEINFFLLRRLLGVRTKGTEKAGKVSKLTKGEILMLNIGSMSTGARVVAVKNDLAKLQLTAPVCTSKGEKVALSRRVEKHWRLIGWGQIQAGTTLEVPPCPL

SEQ ID NO: 32437 - protein, 482 aa, Oryza sativa
MAEEEVAAVVGELRGSFRSGRTRAAEWRAAQLRGIVRMVEEREGDISDALHSDLAKPRMESYLHEISLAKAACTFALKGLKNWMKPEKVPAALTTFPSTAQIVSEPLGVVLVISAWNYPFLLSIDPVIGAIAAGNAVVLKPSEIAPATSALFAKLLPEYVDSSCIKVVEGGVPETTALLEQKWDKIFYTGSGNVGRIVMAAAAKHLTPVALELGGKCPAIVDSNTDLHVTMKRLAVGKWGCNNGQACIAPDYVITTKSFAPELVDSLKRVLKRFYGEDPLQSEDLSRIVNSNHFRRLTNLIEDKKVAQKIVYGGQTDEKQLKIAPTVLLDVPLDTTLMAEEIFGPLLPIVTVDKIEDSIQFINSRTKPLAAYLFTKDKKLQEEFVSNVPAGGMLVNDVALHLANPHLPFGGVGDSGIGSYHGKFSFDCFTHKKAVLIRGFGGEATARYPPYTIEKQKILRGLINGSFFALILALLGFPKERR

SEQ ID NO: 32438 - protein, 261 aa, Oryza sativa; identical to SEQ ID NO: 31083

SEQ ID NO: 32439 - protein, 234 aa, Oryza sativa
MDWMPPPKPTSPRSPPLLWDWADAAVPGSSSGEVSAAAAAAAAHPGRRRKEKRGRAEEGGGGGGEVRCQVEGCGVELVGVKDYHRKHRVCEAHSKFPRVVVAGQERRFCQQCSRFHALSEFDQKKRSCRRRLYDHNARRRKPQTDVFSYASARPPSSLLFDDNRQISFVWNKAPLSHVRPFAISPWESSSEVGTTDGHIYLDKSHISKSLPAFNTDIDELLPMKGMIFQRCKFS

SEQ ID NO: 32440 - protein, 219 aa, Oryza sativa
MAASYYNNPPPPHSSYAAPPPPPPPPPGTSLYASYRHHAYPPHPPPPPAYVGAYYDHAAEPLPPRDELRTLFIAGLPGDAKAREVYNLFRDFPGYVSSHLRTSGKSSQAYAFAVFADQPSALAAMSATNGRIFDLENNCTLHVDLAKSNSRSKRSRTDDVPSYSSEKKARNPRGFPDSVTRTLSLLLSARTHQHLPLKTILLALHSLLLTLVQLALSKS

SEQ ID NO: 32441 - protein, 309 aa, Oryza sativa
MPGGTVSGGILCLSGRMTSPTFWLAVVGFLIIAFCLIKNVKGAMIYGILFVTFISWPRNTAVTVFPDTPAGDESFGYFKKVFDVHRIQSTAGALDFRGARHGYFWEALFTFLYVDILDTTGGLYSMARFAGFVDDATGDFEGQYFAFMSDATAIVFGSLLGTSPVTAFIESSTGIREGGRTGLTALTAAAYFAAALFVTPLLASIPSWAVGPPLVLVGVMMMRAVAEVDWADMRQAVPAFLTLALMPLTYSIAYGLIGGIASYMLLNSWDWACHAVAVLRSRRRRGARAETRSAAAGDNGEQRKNLEMA

SEQ ID NO: 32442 - protein, 287 aa, Oryza sativa; identical to SEQ ID NO: 30679

SEQ ID NO: 32443 - protein, 214 aa, Oryza sativa
MITASLLPLPATSSSSGRRSLPPPTTTFPRPPPPLRRHRHLSSSSSSASSTESDGGGGSTNGSLPGLPPVVVEEEEEEFCPVECVTEFKTEEELARVLERAKATGALVVVDFFRPSCGSCKYIEQGFMKLCKGSGDHGSSVVFLKHNVIDEYDEQSEVADRLRIKVVPLFHFYKNGVLLEAFATRDKERIIAAIQKYTAPSSPPAESEEPSQEG

SEQ ID NO: 32444 - protein, 318 aa, Oryza sativa
MKSHGSRDKLQAAASSSHRRVLLLLFATCFALATFVTFVYNTSHFASASGSGAAADSSGGGASAGSGTGAVSALPLPVFDALVHFASISNATHRMSDTDIRAISAVLRARGPCNLLVFGLGAESPLWLALNHGGRTVFLEENEFYVKYLEPRHPGLEAYDVSYTTKVRDFRDLLDAARASRAAECRPIQNLLFSECRLAINDLPNDLYDVAWDIVLIDGPSGWNPTSPGRMPSIFTTAVLARTGATAAKGPTDVLVHDFQFELEQVLSKEFLCDENRVAGSGTPSLGHFVVRPDGRRDAFCSGQDSTAAGTSSEKSGK

SEQ ID NO: 32445 - protein, 171 aa, Oryza sativa; identical to SEQ ID NO: 30521

SEQ ID NO: 32446 - protein, 301 aa, Oryza sativa; identical to SEQ ID NO: 31770

SEQ ID NO: 32447 - protein, 250 aa, Oryza sativa
MATARLLLLLTVVAAAAGSCFCSGQEAKPPTPPPPPPYCGSVRTAVEAHNIIGWKTLPADCAKYVADYITGDRYGRDSDVVINEAVAYAESLKLSGSGKEVWVFDVDETALSTVPYQAKHGYGVQPYDHANFLQYVAGGSAPALQGTLRLYQRLLQLGIKPVFLTDRTEDQIAITTHNLLSQGYSSWEKLLLQPIGLQTSTQAFKTSERKKLVDAGYVIIGNIGDQWSDILRSPEGCRTFKYPSPMYYVA

SEQ ID NO: 32448 - protein, 209 aa, Oryza sativa
MWAAHLQVIQDELFLDKQGGGYFNTPGEDPSVLLRVKEDYDGAEPSGNSVAAINLIRLSSIFDAAKSDGYKCNVEHLLAVFQTRLRELGIALPLMCCAADMLSVPSRKQVVLVGNKESTEFRDMVAAAFSTYDPNRTVIQIDPRNTEEMGFWESNNAIIAQMARSSPPEKPAVAHVCQDFKCSPPVTSADALRVLLNKTVAAATSSAAA

SEQ ID NO: 32449 - protein, 282 aa, Oryza sativa; identical to SEQ ID NO: 32154

SEQ ID NO: 32450 - protein, 228 aa, Oryza sativa
MAADSLLDMSLDDLITNKYKRRSRPGPAPSARRSHSRAATRSAAAPYHAITFQAPPTAYVHPTPAANVETGTKLYISNLDYAVSNEDIKELFSEVGDVKRYSINYDRSGRSKGTAEVVFSRKSDALAAVKRYNNVQLDGKPMKLELIGINIEPPPPAIFGFAAPAGYFDFPPKRGGRGWPRGRGGFGGRGRGHVGRGRGRGDRGSRKISAEDLDADLDKYHAEGMQMS

SEQ ID NO: 32451 - protein, 170 aa, Oryza sativa; identical to SEQ ID NO: 30530

SEQ ID NO: 32452 - protein, 456 aa, Oryza sativa; identical to SEQ ID NO: 32014

SEQ ID NO: 32453 - protein, 263 aa, Oryza sativa; identical to SEQ ID NO: 28772

SEQ ID NO: 32454 - protein, 396 aa, Oryza sativa
MAATSGKLRPPFRLLLLLLAAAVARSVDGVELTLLTGAREKGAVCLDGSPPGYHLQRGFGSGEHSWFIHLQGGAWCNTIEDCSKRKMSAYGSSKFMRAVEFNGILSNDQQLNSDFYNWNRVFIRYCDGASFSGDGEAQDQDGSTLHFRGLRIWEAVINELMGKGLATAKQAILSGCSAGGLAALLHCNDFYARFSKEVSAKCLPDAGFFLDIEDLSGERHMWSVFNGTVHLQNVTQVLSKDCLAKKDPTECFFPAELVKSITAPTLILNSAYDSWQIQNALAPDGSFPGQSWSSCKTDIRNCSSTQIQVFNGFRNKFVDDIEVVKDKKDWGLFIDSCFTHCQTPFDISWNSQASPVLGNKIVAEAIGDWYFERSYEVKEIDCEYPCNPTCSSQLPK

SEQ ID NO: 32455 - protein, 240 aa, Oryza sativa; identical to SEQ ID NO: 29049

SEQ ID NO: 32456 - protein, 271 aa, Oryza sativa
MSPPLEPHDYIGLSAAAASPTPSSSSCSSSPNPGGEARGPRLTLRLGLPGSESPEREVVAAGLTLGPLPPTTTKAASKRAFPDSSPRHGASSGSVAAAAACQDKAAPAAAPPAAKAQVVGWPPVRNYRKNTLAASASKGKGEDKGTAEGGPLYVKVSMDGAPYLRKVDLKMYSSYEDLSMALEKMFSCFITGQSGLRKSSNRDRLTNGSKADALQDQEYVLTYEDKDADWMLVGDLPWDLFTTICRKLKIMRGFDAAGIAPRSIEQSGQSR

SEQ ID NO: 32457 - protein, 187 aa, Oryza sativa; identical to SEQ ID NO: 28677

SEQ ID NO: 32458 - protein, 374 aa, Oryza sativa; identical to SEQ ID NO: 32316

SEQ ID NO: 32459 - protein, 193 aa, Oryza sativa
MPSRGGYFVGNVSPARMDFRWFALGNFVAILASMATPEQAAAIMDLIEERWEDLIGEMPLKISFPAIESHEWEFVTGCDPKNTRWSYHNGGSWPVLLWLLTAACIKTGRLKIARRAIELAEARLARDGWPEYYDGKLGRYVGKQARKLQTWSVAGYLVAKMMVEDPSHLGMISLEEDRAMMKPVLKRSASWTV

SEQ ID NO: 32460 - protein, 360 aa, Oryza sativa
MAARVVVAFAVASAMFVAVSGQKFNAIFSFGDSMSDTGNLCVNGPPAGLTLTQPPYGETFFGRATCRCSDGRLVVDFLAEKFGLPLLPPSKRGGSDFRRGANMAIIGATTMDSGFFQSLGIGDKIWNNGPLNTQIQWFQQLMPSICGSSCKTYLSKSLFVLGEFGGNDYNAQLFGGYTPEQAAGQSGTIVDGIGKGVEQLIGLGAMYVVVPGVLPVGCFPIYLTLYGTSNAGDYDQYGCLTRFNTLSSRHNSLLQAKVSSLQSKYPWARIMYADFYSHVYDMVKSPSNYGFSTNLRACCGAGGGKYYYQNGARCGMSGAYACSNPSSSLSWDGIHLTEAAYKQIADGWVNGPYCHPPIMP

SEQ ID NO: 32461 - protein, 343 aa, Oryza sativa; identical to SEQ ID NO: 31816

SEQ ID NO: 32462 - protein, 275 aa, Oryza sativa; identical to SEQ ID NO: 30585

SEQ ID NO: 32463 - protein, 182 aa, Oryza sativa; identical to SEQ ID NO: 31494

SEQ ID NO: 32464 - protein, 335 aa, Oryza sativa
MAAASEEAIKQFSALMELLDEPLKTTFQHVHQGYARGTLVRFLKAREWNVPKAHKMLMDCLNWRIQNGIDSVLAKPIVPSDLYRTIRDTLLVGLTGYSKQGQPVYAFGVGLSTLDKASVHYYVQSHIQMNEYRDRVVLPKASKMFGKQINTCLKVMDMTGLKLSALNQIKMLSTITAIDDLNYPEKTETYFIVNAPYVFSACWKVVKPLLQERTKRKIKVLYGSGRDELLKVMDYEALPNFCKREGSGSSNDSSDGVDCYSYDHPFHQELYNYIKQQALNEDFIGPIKQGSMHVDVPTPDLEEAKIMETIESELHKFSGANGLSHSFNKIKIEGP

SEQ ID NO: 32465 - protein, 271 aa, Oryza sativa
MLCDGGDGGGGSGLRLFGVQVHVAAGGGGGGGGGGLPMKKSYSMDCLQLAAAGAAPGSLVSPSSSSSSSMLLSIDEGGLERASNGYLSDGPHGRIVQERKKGVPWSEEEHRLFLVGLEKLGKGDWRGISRSYVTTRTPTQVASHAQKFFLRQSSIGKKKRRSSLFDMVPICENGARVSEQLSGEGAAAAAAASTSLSLMNTHETSSDRVAAIDLNSTEEDDTVGASGRPFFPVVLMEQQQQASHGHGHHHHCTPLDLELGMSVSSTPSIGT

SEQ ID NO: 32466 - protein, 300 aa, Oryza sativa
MFRAAQLLLRETNRALGAATSPAGFVSGFSTASNSAQRLAGKVAVITGGASGIGKATAKEFIENGAKVIMADVQDDLGHSTAAELGPDASYTRCDVTDEAQVAAAVDLAVKRHGHLDILYNNAGVMGAMPQDDMASVDLANFDRMMAINARAALVGIKHAARVMSPRRSGVILCTASDTGVMPMPNIALYAVSKATTIAIVRAAAEPLSRHGLRVNAISPHGTRTPMAMHVLSQMYPGVSKDDLEKMADAAMDAGEVMEPKYVARAALYLASDEAKYVNGHNLVVDGGFTSHKGSDTRLN

SEQ ID NO: 32467 - protein, 200 aa, Oryza sativa
MAAKRELSSTLRNLKFMQRAAVAQKVEEKPKVEAAAAAAEEEVVTVPSGGVGSSVKVARKCVVIMEGNPHPGAAKGRMSFLNFNPSIDKLTQEATGGRQSQLASPSNNHQDGSNSSRTDEVSRTRFSDFNIDSSESISLNELKRKQPELEMETPPSHRQPKTTGKSIDGDSSSQSNGRGSHKSNKREKLDWNLLRPRKSK

SEQ ID NO: 32468 - protein, 186 aa, Oryza sativa
MARWAIAIHGGAGVDPNLPEHRQEEAKRVLARCLQVGVDALRSGAAALDVVEAVVRELESDPFFNSGRGSALTRLGTVEMEASIMDGRGRRCGAVSGVSTVKNPVSLARLVMDKSPHSYLAFDGAEQFARDQVNYLSLINPHPTNKSLPINYANFLVNLTCLCTLINKTFLMWNYSVDMARGNDGY

SEQ ID NO: 32469 - protein, 34 aa, Oryza sativa
MIGGCVVGKSSLFHNPAEPGQLLRVAGPWLRRWS

SEQ ID NO: 32470 - protein, 301 aa, Oryza sativa
MATAAAAALITAASTPFPLVSFRSRRDGHLSLSPPRRPGAGRCRASAPTFQGGPAASYAREMERLSAKESLLLAFRDAGGFESLVSGKTTGMQKIDVNERIVGLERLNPTPRPTTSPFLEGRWNFEWFGDSSPGALAARLLFERSPTTVAHFTGLDVLIKDGYSKISSNVKFLNTVQSKFLLTTQLSVEGPIRMKEEYVEGLIEIPRIREETLPDQLKGFFGQTAGALQQLPAPIRDAVSEGIKLPLNGMFQRLFMISYLDEEILIIRDASGAPDVLTRLEGPQPNSIDGTSDAVLSEYES

SEQ ID NO: 32471 - protein, 284 aa, Oryza sativa
MATARKAPRMVAIWAVVVVVVAADLFGAAVARSASARHAVGKKQREFDYFALALQWPGTICASTRHCCAINGCCRSEPLQTFTIHGLWPDYDDGTWPACCRHTSFDMDKILPLKPTLEKYWPSLYCSSSSTCFSGKGPFWAHEWEKHGTCSSPVVKDELEYFTTALDLYFKYNVTEMLASGGIHVSNGKQYALTDVIDAIKCAFGASPQIVCKKGSVEELRLCFDKDLKPLDCLTTTATNENVSKKKYCPRYITLPTYDPIVHANSTREIITVESEVYGYLYTS

SEQ ID NO: 32472 - protein, 287 aa, Oryza sativa; identical to SEQ ID NO: 30679

SEQ ID NO: 32473 - protein, 71 aa, Oryza sativa
MYVSAAELRCRSLGPCRVISIVFFPPPLFGLGVVMVGVRVDDVSCAVCLSLSWLRPLLAVVKRLWCSWRNN

SEQ ID NO: 32474 - protein, 243 aa, Oryza sativa; identical to SEQ ID NO: 30535

SEQ ID NO: 32475 - protein, 454 aa, Oryza sativa
MEKPPKDDSSVIDPAFLVEELTGLQFSDQFEQENLVQSGIGPSQIAGAASHPPPPPAPPAPPPKPSSGNNGLRRMGSGSSNNARIGSSRRPVAWPPVAVRSSASGSRPSSPRSLADSEGYNSADEQGPCYASNYYDSERERMFEHDLRRVRGFEINKMAEDGNCLFRAVADQVYGDPEAYDMARQMCVDYMERERDHFSQFMTEGFTSYCRRKRRDKVYGNNMEIQAFAEMYNRPIHIYSYSTEPINIFQGSYNTDVPPIRLSYHHGNHYNSVVDPRGLTVGAGLGFSSLRGTNNVDRDQVKAAIKAQQDQQIENALLAEGRLYSDLELTEKEIERMVMEASRAEYLKQQQQQLNFRESSTSGAEPSSSAAISGSSRSAGTADRVGEECFVLPDTVLTRSMQLLLAMGFNYIQVMEAYSIFGEDVDSMIYYLVEMGGTGASAGGSNRRKGKAAE

SEQ ID NO: 32476 - protein, 287 aa, Oryza sativa; identical to SEQ ID NO: 30679

SEQ ID NO: 32477 - protein, 147 aa, Oryza sativa
MVASRAPRSESPWLKKPMHGVSGSTAMASTPWSSMPPSSHSLGAQSQLVCSGCRNLLMYPAGATSICCAVCGTVTAVPAPEQKSSCNVHENKERLKGNTNGFRAPQRCARRVDGACTQVAREVHTEVALVIFTLLCVTLPGLLFSLG

SEQ ID NO: 32478 - protein, 322 aa, Oryza sativa
MVSMEVTDEMFKCMEVGLAFRDYNGRISSMDFHSKATNYLVTACDDESIRLYDIQNAVCLKTINSKKYGVELVCFTENPTYVLHSSKNGWDDSLRLLSLVNNCFLRYFKGHLDRVVSISLCSENGNILSGSLDRTVLLWDSRVEKAQGLLRVQGRPAVSYDDQGLVFAIAYGGYIRMFDARNFEKGPFDIFSVGNDDSEANVIKFSSDGRRLLLTTKAGRVHVLDSFHGNNIATYNVKPVVSNSTLEASFSPDGNHIISGSGDGSVYAWNVRSGKVARWGSTDSEPPLIRWAPGSLMFLTASSELSCWVPDLSKLGSFTVSK

SEQ ID NO: 32479 - protein, 279 aa, Oryza sativa
MDPNPRLLILLVLLAFSATVAVAEDGESTGGSKVSLGRRAGGFLHGLKKEAVVEGDHGVALDEVGPGLFDALFASLSMILVSEIGDETFIIAALMAMRHPKSIVLSGALSALYVMTVLSTGLGRIVPNLISRKHTNSAATVLYLFFGLRLLYIAWKSDPKGSQKKEMEEVEEKLESGQGKSTLRRFFGRFCTPIFLEAFILTFLAEWGDRSQIATIALATHKNAIGVAVGASLGHTVCTSLAVIGGSMLASKISQRTVATIGGVLFLGFSVSSYFYPPL

SEQ ID NO: 32480 - protein, 290 aa, Oryza sativa; identical to SEQ ID NO: 28559

SEQ ID NO: 32481 - protein, 305 aa, Oryza sativa; identical to SEQ ID NO: 30954

SEQ ID NO: 32482 - protein, 82 aa, Oryza sativa
MAASKLQAFWNHPAGPKTIHFWAPTFKWGISIANVADFAKPPEMISYPQQVGRFSCQLILFLTSVYHQFMYNVVVLTLMYDV

SEQ ID NO: 32483 - protein, 330 aa, Oryza sativa
MMVVVMRRRMAAAAMLVLVAMAGGATVCAAQLRRNYYAGVCPNVESIVRGAVARKVQETFATVGATVRLFFHDCFVDGCDASVVVASAGNNTAEKDHPNNLSLAGDGFDTVIKAKAAVDAVPGCRDRVSCADILAMATRDAIALAGGPSYAVELGRLDGLRSTASSVNGRLPPPTFNLDQLTALFAANGLSQADMIALSAGHTVGFAHCNTFLGRIRGSSVDPTMSPRYAAQLQRSCPPNVDPRIAVTMDPVTPRAFDNQYFKNLQNGMGLLGSDQVLYSDPRSRPIVDSWAQSSAAFNQAFVTAMTKLGRVGVKTGSQGNIRRNCAVLN

SEQ ID NO: 32484 - protein, 339 aa, Oryza sativa
MARRSSSRACAAMATAAVFALLAATATASGLVRVEHPAKSDGSLSLLVVGDWGRKGTYNQSRVAEQMGKVGEKLNIDFVISTGDNFYEDGLTGVDDQAFEESFTDIYTAKSLQKPWYLVLGNHDYRGDVLAQLSPVLRKIDQRFICMRSFIVNAEIVDFFFIDTTPFQLKYWTRPKDHHYDWRGVAPRQKYITNLLKDMDEAMKKSTAKWKIAVGHHTIRSVSDHGDTKELLQLLLPVLKVNGIDFYINGHDHCLEHISSRDSPIQYFTSGGGSKAWRGVLQPNSDKLQFFYDGQGFMSLQINQDQADFIFYDVSGNILYKWSKSKANYLQPSTYITEA

SEQ ID NO: 32485 - protein, 266 aa, Oryza sativa; identical to SEQ ID NO: 28561

SEQ ID NO: 32486 - protein, 175 aa, Oryza sativa
MFGVPPQRAALVPTFVSTPLLSSSTMSPTFYRVLLRSIIVAGRPLPVPPTVFSASSVIDSATVISRIPPTAYQALRAAFRSAMTMYRPAPPVSILDTCYDFSGVRSITLPSIALVFDGGATVNLDAAGILLQGCLAFAPTASDRMPGFIGNVQQRTLEVVYDVPGKAIRFRSAAC

SEQ ID NO: 32487 - protein, 167 aa, Oryza sativa; identical to SEQ ID NO: 29673

SEQ ID NO: 32488 - protein, 252 aa, Oryza sativa
MVPSERGDVATAIRPAAADKLVHGPISDKKCRKKVPRKVHKSEREKLKRGHLNDLFGELGNMLEADRQSNGKACILTDTTRILRDLLSQVKSLRQENSTLQNESNYVTMERNELQDENGALRSEISDLQNELRMRATGSPGWGHGATGSPLPVPPSPGTVFPSQQPMQPSPMTTSTVFPLQQPLPQPTVIEPSARQPLELKLFLEAPPAEDPEPSEDQEAPNNVARPQPRYPTEASSWPISLGLPRMEDEQM

SEQ ID NO: 32489 - protein, 202 aa, Oryza sativa
MSGERCAGRPLFGGAISSTFPVRFQDVSNIRQVPDHQEVFVDPARDESLIFELLDLKGEVEDGGSALWFLRDIANEQDAGDNLVVEHSGTIELGGLRFGDAPAVAGTAVGQLAISKGRQGREAQNIVRLYLANIRLKNAATDVVITAYEPLLINPLSESASAVAAGPAVPAEQAGCLAMSEIFKLAVMNFNVHDWNLFNGSS

SEQ ID NO: 32490 - protein, 127 aa, Oryza sativa
MANKSKSAAASPSSSSSPSVALGLAATTPTTSPLPLAPAAAASSSNPNATPADTTPTSPPPASPPLPSATPPLAASPPPPPPPPPPRNSPSPPKPPSQAASFSMWRTQQRLGCSSGWCWATTMTAPT

SEQ ID NO: 32491 - protein, 229 aa, Oryza sativa; identical to SEQ ID NO: 30528

SEQ ID NO: 32492 - protein, 290 aa, Oryza sativa; identical to SEQ ID NO: 32176

SEQ ID NO: 32493 - protein, 176 aa, Oryza sativa
MGNFVTEMSSDSYQLLGMAERGMLPEFFAKRSRYGTPLIGIMFSAFGVVLLSWMSFQEIIAAENYLYCFGMILEFIAFIKLRVVHPNASRPYKIPLGTIGAVLMIIPPTILIVVVMMLASFKVMVVSIMAMLVGFVLQPALVYVEKRRWLKFSISAELPDLPYSNVEEDSTIPLVC

SEQ ID NO: 32494 - protein, 324 aa, Oryza sativa
MSSQLVKAMPSLIFTKVQEDNCTSSMCAICLEDYNVGEKLRVLPCRHKFHAACVDLWLTTWRTFCPVCKRDASTGIPDPPASETTPLLSSAVRLPSQSSSFRSSVASSPPRPISRRPSSQSISRIYAASGTPNSPNPIRSFTNSTAMSISRSNVDLSNMSSRPRASHLASAHSLVGSHLSPPINIRYASPHMSHSGYASPSPHVSSSYVSNSGYGSSSYYLGSSSQHRSYLRRCGESGPSLSTMAPQSPQQSQLRHGGESDLNLAGASSGQSFRQSYLRHCADSEVNLAGASSGQSFRQSYLRHCADSDASLSAMASAQSLPGC

SEQ ID NO: 32495 - protein, 251 aa, Oryza sativa; identical to SEQ ID NO: 30598

SEQ ID NO: 32496 - protein, 309 aa, Oryza sativa; identical to SEQ ID NO: 32206

SEQ ID NO: 32497 - protein, 235 aa, Oryza sativa
MKRTIIVKVDLECERCYAKIDRVLTRIRDKGEFVIDDIEFDVKHNKVIVSGPFDPDKLADKLCCKACKIIKEIEIVDLPPPPPPPAPEPEPEPPKKEEPQPPPPKEEEKPEPPPAVIIVEPPAPAPEPEPEPPKKEPPPPPPPKQEPCPPPPKVVEVPYPWPYPYPFPSWPSDCCCHHGHGGCHCCSCGKAPEPAPAPAPPPPQYIPCYPPQQPYPCGGYRIVCEEDPSYACAIM

SEQ ID NO: 32498 - protein, 343 aa, Oryza sativa
MEQHQGQAGMDLPPGFRFHPTDEELITHYLAKKVADARFAALAVAEADLNKCEPWDLPSLAKMGEKEWYFFCLKDRKYPTGLRTNRATESGYWKATGKDKDIFRRKALVGMKKTLVFYTGRAPKGEKSGWVMHEYRLHGKLHAAALGFLHGKPASSKNEWVLCRVFKKSLVEVGAAGGKKAAVVTMEMARGGSTSSSVADEIAMSSVVLPPLMDMSGAGAGAVDPATTAHVTCFSNALEGQFFNPTAVHGHGGGDSSPFMASFTQYGQLHHGVSLVQLLESCNGYGGLVDMAASGSQLQPAACGGERERLSASQDTGLTSDVNPEISSSSGQKFDHEAALWGY

SEQ ID NO: 32499 - protein, 393 aa, Oryza sativa
MYEEASQVANDAVSSIRTVASFSAEEKVMDLYKMKCEGPLRTGIRTAIISGIGFGVSIFLLFGVYAASFYAGARLVEDRKTTFPNVFRVFLALTMAAIGVSHTSNLTSDSSKAKSAVSSIFAIVDRKSRIDPSDDAGVSLEPLRGDIEFQHVSFRYPTRPDVQIFEDLCLTIQSGKTVALVGESGSGKSTAISLLQRFYDPDAGHILLDGVDIQKFQLRWLRQQMGLVSQEPALFNDTIRANIAYGKEGDATESDIVSSAQLANAHKFISSLHQGYETMVGERGAQLSGGQKQRIAIARAIVKDPKILLLDEATSALDAESERVVQDALDRVMMNRTTVIVAHRLSTIQGADMIAVVKNGMIIEKGKHDALIGIKDGAYASLVALHVSAAAIS

SEQ ID NO: 32500 - protein, 216 aa, Oryza sativa
MSKLQTEALKEAISQVVADCKEKNRKFTETVELQIGLKNYDPQKDKRFSGSVKLPHIPRPKMKVCMLGDAQHVEEAEKIGLDYMDVEALKKMNKNKKLVKKLAKKYHAFLASEAIIKQIPRLLGPGLNKAGKFPTLVTHQESLESKVNETKATVKFQLKKVLCMGVAVGNLSMEEKQIQQNIQMSVNFLVSLLKKNWQNVRCLYIKSTMGKPYRVF

SEQ ID NO: 32501 - protein, 316 aa, Oryza sativa
MSTAEAAVWRGHGSSNITRQILKCTRWQLEETTDFITCPYHYYCDSAYPGDYSPAVGALVAAFAAYCLVSAAAFAVLDIGRAGGGGGRNRRKYMVPSGPFLLPVVLLALAKGQRINAVFPLAQLGPALLLTLQASALAFRNEADGDLRYAVLEASTVSGILHASLYLDAVVLPYYTGTDALRWSRFSGECATCLCRMDPLVVGGRTVLYRGLSKTALAIIFALCSRMVCRIYGEERVSAWTRSALEAASWVFVAGDAVYLAGWAFAEGAAASVAAYALVAGLVFLCIFGKVYKFLAWMETRQVQWKPSVSCHSNVV

SEQ ID NO: 32502 - protein, 108 aa, Oryza sativa
MIQGGDFDKGNGTGGKSIYGRTFKDENFKLVHTGPGVVSMANAGPNTNGSQFFICTVKTPWLDGRHVVFGQVIEGMDIVKMIESQETDRGDRPKKKVVISECGELPVV

SEQ ID NO: 32503 - protein, 143 aa, Oryza sativa
MRELVAGNEMQRRGLEHRMSELEGHMIDICGSLRTSFTSLHQLAGECSVTTTIPAHPDEFSLTSSLVELATAMEEITSKHAARIGEETSNGIYTGACHVLACMRLAYPDLDLKKALDLGAADDARKDTMEEVGDLGESVLPLF

SEQ ID NO: 32504 - protein, 405 aa, Oryza sativa; identical to SEQ ID NO: 31391

SEQ ID NO: 32505 - protein, 267 aa, Oryza sativa; identical to SEQ ID NO: 30541

SEQ ID NO: 32506 - protein, 287 aa, Oryza sativa; identical to SEQ ID NO: 30679

SEQ ID NO: 32507 - protein, 438 aa, Oryza sativa; identical to SEQ ID NO: 28597

SEQ ID NO: 32508 - protein, 245 aa, Oryza sativa
MPSEKTSPPNNNSARGFPVVDDVKAALEDACPGVVSCADILALAAEISVELSGGPGWGVLLGRLDGKTSDFNGSLNLPAPTDNLTVLRQKFAALNLNDVDLVALSGGHTFGRVQCQFVTDRLYNFSNTGRPDPTMDAAYRSFLSQRCPPNGPPAALNDLDPTTPDTFDNHYYTNIEVNRGFLQSDQELKSAPEATGTTAPIVDRFATSQAAFFRSFAQSMINMGNLSPVTDPSLGEVRTNCRRVN

SEQ ID NO: 32509 - protein, 345 aa, Oryza sativa
MTRLPLLLHSPRFAAALTTPPPPPLPPARRLVAAAAGGDLSLAMSAATGEYPVPVSPPYPAASKDVELRRAMTASARSAAYSSAPVVFEDEWLAVVDKPAGVYCDALLSALPCSAATLGDEATKPNLHLANRLDRDTSGLMVITKCNKVAGKLVKAFTEHKVKKTYLALCIGYPPAWEKIKICSGHGRSKHGAWRVYAMSDVGRSLPGGSVVRDMSTRFEVLGINGKGQFREPSNFEVDETESITVQEKAADLTSDGDEKNSIILVRAYPQSGRTHQIRLHCQYLGFPIRGDVKYSGVIEWNGVDYDGHALHAESLSFVHPVTGLPVTFRSPLPSWANEFISTMA

SEQ ID NO: 32510 - protein, 219 aa, Oryza sativa
MLLPPRAAHPRAARRRLGRRPPLRLPPGVQALHPQLRPPARSPPRRQRQRPPPRPPPRGQRHLRPPRQHQHRAPRPPRRRPPRLRLHHHRRRAPPPQLPIRHHRLPARRDLHPRPRVLHRRRPRRQHRGRHPPLRRHRHQAQPPEAQVRLRGQRQRRCRRRRSSSSSTGGGGIAFFFSFWTSLQFHFYSGRCFEFAPCLMKLEEEGSASNTSHSWWCCL

SEQ ID NO: 32511 - protein, 251 aa, Oryza sativa; identical to SEQ ID NO: 30740

SEQ ID NO: 32512 - protein, 117 aa, Oryza sativa
MARTVVVPPLVQWRPRLPLWERAKKGRWPVAEVLPLSRRRRRSRLLLIPRLRRSSRRQFRRPQQRLHQGRPLPQRTLQCLEQLCTLSLRSRDMPPCCWVEPFPSISCSRRMSRTFGG

SEQ ID NO: 32513 - protein, 156 aa, Oryza sativa
MVGVDLDEEIEAEGEEEILVIVDPHGAEEVTEMMSHVERDLKIAGTHEILMVAEEEEEDTLAEVIAIKVITMVRVTTMTEPGVLAGETGTRMVAKIGTEMMTEDRSVKIEVVTGLNLPTGTPTKDSPAGERQNLLVEMTRQEKTMETIRGVLLLTA

SEQ ID NO: 32514 - protein, 213 aa, Oryza sativa
MAAQALLSGRQLLGRPLQSSVSRSSSSRKAPFMVRAEATPPAKQGADRQLWFASKQSLSYLDGTLPGDFGFDPLGLSDPEGTGGFIEPRWLAYGEVFNGRTAMMGVVGMVAPELLGKLGLVPAETAIPWFQTGVIPPRAPTPTGPTLTLSSSSSSPSSASPSTAASRTGTRRAPWGSSTSSASRSTSPAPASRPTPAARSSTRSASGPRARRR

SEQ ID NO: 32515 - protein, 372 aa, Oryza sativa; identical to SEQ ID NO: 32090

SEQ ID NO: 32516 - protein, 276 aa, Oryza sativa
MASTAAASSPFDCVLFDLDDTLYPGSAGIGLATKRNIDEFLMARCGVTAERAAALRVELFRSYGSSLAGLIALGYDVHPDEYHSYVHGRLPYDRIAADPQLAGLLRSIPQRKILFTNSDRAHMRKALQRLSVDEGCFDAVVCFETMNPHLFGEAPCASGDDRPGVILKPSPDAIVAALRIAGTNPHRTLFLDDSERNIAAGKALSLRTVLVGKRVRSKEADYALESIGSLRRAIPEIWGGVAVAVAGEQLDHGAAEKTKGMRSDLDSIIQPTSVLA

SEQ ID NO: 32517 - protein, 442 aa, Oryza sativa
MAITVRRSTMVRPAWETPRVRLWNSNLDLVVPRFHTPSVYFYRRGPEGGGAPEGFFDGERMRRALAEALVPFYPMAGRLARDEDGRVEIDCNGEGVLFVEADAPDASVDDYGDFAPTMELKRLIPAVDYTDDISSFSLLVLQVTYFKCGGVSLGVGMQHHVADGMSGLHFINSWSDLCRGTQIAIMPFIDRTLLRARDPPTPSYPHVEYQPAPAMLSSVPQSVTANKTTPPPTAVDIFKLTRSDLGRLRSQLPSGEGAPRFSTYAVLAAHVWRCVSLARGLPSEQPTKLYCATDGRQRLQPPLPEGYFGNVIFTATPLAEAGKVTSGLADGAAVIQEALDRMNDSYCRSALDYLELQPDLSALVRGAHTFRCPNLGLTSWVRLPIHDADFGWGRPVFMGPGGIAYEGLAFVLPSANKDGSLSIAISLQAEHMEKFRKLIFEV

SEQ ID NO: 32518 - protein, 224 aa, Oryza sativa; identical to SEQ ID NO: 30532

SEQ ID NO: 32519 - protein, 328 aa, Oryza sativa
MASLSDPNSPPPHVVEDCRGALQLLSDGTVVRAAAPPPPFYVRLDIDDGRVEWKDVVYDAAHGLGVRMYRPAATGGAEEKLPVVVYFHGGGFCIGSCTWPNFHAGCLRLAAELPAVVLSFDYRLAPEHRLPAAHEDAAAALIWLRDQLLSDPWLADAADARKVFVSGESAGGNFAHHLAVRFGAAGLDPVRVAGYVLLMPAFISERPTPSELAAPATAFLTRDMCDRYCRLALPAGADKDHPLVNPFGPASRSLEAVDVGRVLVVAADGDLLRDKNVEYAERMKAMGKDVELVVFAGEEHAFFGVKPMSAATGELVEVIRRFIAGAAA

SEQ ID NO: 32520 - protein, 186 aa, Oryza sativa; identical to SEQ ID NO: 31612

SEQ ID NO: 32521 - protein, 319 aa, Oryza sativa; identical to SEQ ID NO: 30615

SEQ ID NO: 32522 - protein, 413 aa, Oryza sativa
MARLLLSGVAPLPLLPCRRRAIAFALPLGNVRLRLRVAAPTSRVATVEEDDNENNAPPPPCEDFDPGAAPPFGLADIRAAIPKHCWVKDPWRSMGYVLRDVVVVFALAAAAARLHSCLAWPLYWAAQGTMFWALFVLGHDCGHGSFSNNSRLNSVMGHILHSSILVPYHGWRISHRTHHQNHGHVDKDESWHPLPERLYRSLNRATRMLRFSIPFPMLAYPFYLWSRSPGKSGSHFHPSSDLFQPNERNDVLTSTACWVAMAALLAGLTFLMGPLLMLNLYFVPYWIFVMWLDFVTYLHHHGHNDKLPWYRGKEWSYLRGGLTTVDRDYGWINNIHHDIGTHVIHHLFPQIPHYHLIEATEAAKGVMGKYYREPDKSGPFPLHLFGALSRSLKRDHYVSDTGDVVYYQTDPAN

SEQ ID NO: 32523 - protein, 316 aa, Oryza sativa
MMSSWLFRRSGPSGFSWASTADQVTAGLSAAGLTAIVTGASSGIGAETARVLAIRGAHVVMAVRNLAAAQPVRDAILADAPAASLDLMELDLASMDSVRAFASDFAAKGLPLNILINNAGVMATPFSLSKDGIELQFATNHVGHFLLTHLLLETMKKTSRESNVEGRIVNVSSEGHRFAYREGIRFAKINDESEYNSIGAYGQSKLANILHANELARRFKDEGVNITANSLHPGSIITNLLRHHSILDVLHRTLGKLVLKNAQQGAATTCYVALHPQVKGVSGKYFSDSNVNEASEKGNDMELAKRLWEYSIELIT

SEQ ID NO: 32524 - protein, 287 aa, Oryza sativa; identical to SEQ ID NO: 30679

SEQ ID NO: 32525 - protein, 344 aa, Oryza sativa; identical to SEQ ID NO: 30654

SEQ ID NO: 32526 - protein, 62 aa, Oryza sativa
MKGGRPPQRALSPSTNMVMIIVDIDQDLSRVSRTALKLGLAFLDTMLFQKLISWNLVFILLA

SEQ ID NO: 32527 - protein, 110 aa, Oryza sativa
MEIDSRRDTVRPSRQEIERSREGESRRLTGGGEGEVAPLHARNREELKKLQLSPFRVATNSTNCFQDASFPIQSAATASGEITSLPRRRLFFPASSKRGSWQRSNFASLE

SEQ ID NO: 32528 - protein, 275 aa, Oryza sativa; identical to SEQ ID NO: 30653

SEQ ID NO: 32529 - protein, 425 aa, Oryza sativa
MAAPLFLLLLLLVSSASAGYEEEALLRRAEEERDWMVGVRRRIHAHPELAFREHHTSALVRDELERLGLTARAVAGTGVVADVGSGLPPVVALRADMDALPVQELVEWEHKSKVDGVMHACGHDVHTAMLLGAAKLLSERKEQIKGTVRLLFQPAEEGGAGASYMIKDGVLDGVEAIFGMHVDYRMPTGVIAAHAGPTQAAVCFYEAKIEGKTGKAETPHLNVDPIVAASFVILSLQQLISREDDPLHSQVLSVTYVKGGNTIDATPPVIEFGGTLRSLTTEGLYRLQKRVKEVVEGQAAVHRCKGVVQIKRDDYPMYPAVFNDEKLHHHVETVGRRLLGPDKVKPGEKIMAGEDFAFYQQLVPGVMFGIGIRNGEVGSVHTVHNPKFFVDEDVIPIGAALHTALAEMYLTERSTEGEDGSQHSH

SEQ ID NO: 32530 - protein, 177 aa, Oryza sativa; identical to SEQ ID NO: 29175

SEQ ID NO: 32531 - protein, 247 aa, Oryza sativa; identical to SEQ ID NO: 31686

SEQ ID NO: 32532 - protein, 170 aa, Oryza sativa; identical to SEQ ID NO: 30530

SEQ ID NO: 32533 - protein, 320 aa, Oryza sativa; identical to SEQ ID NO: 30442

SEQ ID NO: 32534 - protein, 311 aa, Oryza sativa
MAQAPARAASVVRLFDAHCHLQDPRVLSVAPSLIRAATAAGVARFAVNGTSEKDWHLVKQMAEEYPSVVPCFGLHPWWVPERSPDWMDSLRRFFAETPEAAVGEIGLDKGSHGKTIDFGEQVEVFQQQLELAKELNKPVSVHCVRAFGDLLEILKRTGPFPAGVLLHSYLGSAEMVSSLEILGCYFSLSGFLTGMKSTKAKKMLKSMPLDRILLETDAPDALPKLDDISLLAVPVDSSSADNGESKKDSNSRASTTSNESLNHPSNIHIVMKYVASLLEISEIELAEVTYKNATKLFSYHGSKVHNEVEAV

SEQ ID NO: 32535 - protein, 325 aa, Oryza sativa
MLEGFNEMDTLTDRGFLPGMSKEEREKVARSETLAIRLSNIANMVLFAAKVYASVRSGSLAIIASTLDSLLDLLSGFILWFTAFSMQTPNPYRYPIGKKRMQPLGILVFASVMATLGLQIILESVRSLLSDGDEFSLTKEQEKWVVDIMLAVTLVKLALVLYCRTFTNEIVKAYAQDHFFDVITNMIGLVAALLATYIEGWIDPVGAIILAIYTIRTWSMTVLENVHSLVGQSASPEYLQKLTYLCWNHHKAVRHIDTVRAYTFGSHYFVEVDIVLPSSMPLQEAHDIGEALQEKLERLPEIERAFVHLDYEFTHRPEHALSHEK

SEQ ID NO: 32536 - protein, 312 aa, Oryza sativa
MIRPLGLARLMAFSLASFVAPTTTASAPSLAIGPLPRSSVQIRLSRRFNRATPHPDPLVEASIEQLWAAHKQRAPRLFNGTKFRLHDWRLDADNSRLSLHCGLTDYKAYLGTCCSTLVTQLRSDGERLHAGDATAFLSRKVGVSGVVETRDQRVALIERSRSVGVYQQLFDTPGGHPEPSDLPFTMEDLETLEEGSERATAVEALAVERLFGSIVDEVHEEINLSPTQLSDPLLLGVVFQFEAETPSFVFHMATPLLSEEVDALYRLGPQDKFESTRLCWVDQSTLDKYQLTPAAQGSLSLWQQFCAFRTTT

SEQ ID NO: 32537 - protein, 172 aa, Oryza sativa
MVYSGPGVERPVFFRPRFPHNPNGGGDRLHVYGDGSAAVVRSTVIDEPGRPRVKVVAGVDLYGFGSVVGGDWQLASTVPGELVEGFRKPYAVMTGLLSEREGVVRLVLISNCRGAWDIVWLSYDRARGEWWWVPVPDWGTKGLNVAGIAVSSTFSRLWPPAAASSCTTTTSQ

SEQ ID NO: 32538 - protein, 321 aa, Oryza sativa
MASRTWHCWLLLVFFLLSDDASGQLSTSYYADSCPSVEKVVHATVASAIQAERRMGASLIRLFFHDCFVQGCDASILLDDVPATGFVGEKTAAPNNNSVRGYEVIDQIKANVEDVCPGVVSCADIVALAARDSTALLGGPSWAVPLGRCDSTTASRSEANSDLPGPGSNLTMLIARFGNKGLSPRDMTALSGSHTVGFSQCTNFRAHIYNDANIDPSFAALRRRACPAAAPNGDTNLAPLDVQTQNAFDNAYYGNLLVRRGLLHSDQVLFNGGSQDALVRQYAANPALFAADFAKAMVKMGNIGQPSDGEVRCDCRVVNDS

SEQ ID NO: 32539 - protein, 269 aa, Oryza sativa; identical to SEQ ID NO: 30174

SEQ ID NO: 32540 - protein, 384 aa, Oryza sativa
MKRRHWSHPSCGLLLLVAVFCLLLVFRCSQLRHSGDGAAAAAPDGGAGRNDGDDVDERLVELAAVDPAAMAVLQAAKRLLEGNLARAPERHRDVALRGLREWVGKQERFDPGVMSELVELIKRPIDRYNGDGGGGGEGEGRRYASCAVVGNSGILLAAEHGELIDGHELVVRLNNAPAGDGRYARHVGARTGLAFLNSNVLSQCAVPRRGACFCRAYGEGVPILTYMCNAAHFVEHAVCNNASSSSSGAADATAAAPVIVTDPRLDALCARIVKYYSLRRFARETGRPAEEWARRHEEGMFHYSSGMQAVVAAAGVCDRVSVFGFGKDASARHHYHTLQRRELDLHDYEAEYEFYRDLESRPEAIPFLRQRNSGFRLPPVSFYR

SEQ ID NO: 32541 - protein, 259 aa, Oryza sativa; identical to SEQ ID NO: 30235

SEQ ID NO: 32542 - protein, 261 aa, Oryza sativa
MDYCKQQERDGHRDDGDVTEWKKVAELRAVVEAQDPACKEEDDYQLRRFLRARDHNIGKASAMLVKYLQWKREVKPGGRAIADEEVRGELAQEKLYMQGYDRQGRPLVYGFGARHFPARRDLDEFKRYVVYVLDRTCARLGGNGGQEKFAAVADLQGWGYYGNCDIRAYVAALEIMQNYYPERLGRVFLIHVPYVFMAAWKIIYPFIDDNTKKKFVFVADKDLHATLRDAIDDSNLAEDYGGKLKLVSPLINGATESNRRR

SEQ ID NO: 32543 - protein, 232 aa, Oryza sativa
MERAAAAAPVVVRHGGVVLPPGFRFHPTDEELVVQYLRRKAFGLPLPAAVIPDLHNLFKLDPWDIPGASSDGDKYFFAVRPPAARGRRQHVTASGGCWKPAGGRDKPVVVARCGGSHLVGVKKGMVFVPRQGRKAPAAAAAAAGGGCWVMHEYSLALPMHKKGCLAEAEEWVVCRIFQRSSSGSRSPRRPDNDVRRTMPAVAELGRSPSPSSSSSQSSCVTSSSDQEEVSSG

SEQ ID NO: 32544 - protein, 257 aa, Oryza sativa
MAAAAAAPALSLAEAAPVTAVLAPCPTPSRTFRRRSWVAAICRPALKCHHSRPLTAVVAAAAAAAAAGDSTSAGVFHGECFVVGDNIDTDQIIPAEHLTLVPSKPDEYRKLGSFAFVGLPTAAYPTPFVAPGEETTRYAVIIGGANFGCGSSREHAPVALGAAGARAVVAEGYARIFFRNSVATGEVYPLELADTGAWKECKTGDVVTVELDNCVMINHTSGKQYKLKPIGDAGPVIEAGGIFAYARKTGMIASKSA

SEQ ID NO: 32545 - protein, 270 aa, Oryza sativa
MGYSYSSAAVAVSVLVVALAAAASGQLSTTFYASSCPTALSTIRSAVNAAVAREPRMGASLLRLHFHDCFVQGCDASILLADNATFRGEQGAFPNVNSLRGFEVISSIKMQLEASCRQTVSCADILAVAARDSVVALGGPSYPVELGRRDGMTTNQTMANTNPQRLRQRLLHRPHRRPRPPPLRPGALPRRRLRHRRPRPRLRRQPRPLQRRLRRRHGAHGRHQAAHRHAGRDQAQLLQGQLICISLRNASIYCTYVDRIESNKTRLLIS

SEQ ID NO: 32546 - protein, 227 aa, Oryza sativa; identical to SEQ ID NO: 32151

SEQ ID NO: 32547 - protein, 195 aa, Oryza sativa
MEQADESSVNKESSEQQQLTSEQDDDGATWLSLTLATQGSPEEATAEAEETEAANCSESEAPKPSSAPHKVFSCNFCMRKFFSSQALGGHQNAHKRERSAAKRSYHAQRMMMGLPLEAHAAFVHSLRVNQSSVIQKAGQQAQIRTAPRFHEGSISWPPIAYEEVPNSTWPGSFRLRSQPSDQPSEQSKIDLNLRL

SEQ ID NO: 32548 - protein, 308 aa, Oryza sativa
MAALSSRRRHGSLRLLAVALLVLAGVASSAAAAGSGRGAFDPSRVVQLSWRPRAFLHKGFLTDAECEHLISLAKDKLEKSMVADNESGKSVMSEVRTSSGMFLEKKQDEVVARIEERIAAWTFLPPDNGESIQILHYQNGEKYEPHYDYFHDKNNQALGGHRIATVLMYLSDVGKGGETIFPEAEGKLLQPKDDTWSDCAKNGYAVKPVKGDALLFFSLHPDATTDSDSLHGSCPVIEGQKWSATKWIHVRSFDISVKQGASTDGCEDENVLCPQWAAVGECAKNPNYMVGTNEAPGFCRKSCNVCAQ

SEQ ID NO: 32549 - protein, 331 aa, Oryza sativa
MALIHHHLAVPVAPAPPPRGLGPATAARRLTLHRRRRRSGAAAGRMTVTASSMVEPASGEETAARSAADVVRAFYDGVNRRDLAAVEPLIAEGCVYEDLVFPNPFVGRAEILGFFAGFMGSVSSDLRFVIDDISAGDDSRAVGVTWHLDWKGRPFPFSRGCSFYRLQLDEKQQQLQIVYGRDCVEPAVKPGESALLIIRAVTWIFERFPRLANMLTKCVIGKIIWKSRAPARCKFFMYTAMRGACLTADNLQRRGWHLAPVCHLCSQDRETCAHIFLSCRYTQQVCATVRGRLGLSSTTPSADLSSWWRSARKSISKQDRKTFDAGVILVT

SEQ ID NO: 32550 - protein, 180 aa, Oryza sativa
MGDAASSASAAEMVGRAVGEVREALNEHADVVAELFGRVSSDLRSGFRPALDSFLGFFHAVDWKEPWLISMLIFHAILLLVTIISRRNVNFQLILSALTFSGVFLAERINTFLGQHWKSFSSQNYFDPQGLFISVVWSGPLLLITILILVNTLVTLCLLMVRWKRAELRHRAREVRNKQD

SEQ ID NO: 32551 - protein, 333 aa, Oryza sativa; identical to SEQ ID NO: 28544

SEQ ID NO: 32552 - protein, 316 aa, Oryza sativa; identical to SEQ ID NO: 31656

SEQ ID NO: 32553 - protein, 263 aa, Oryza sativa; identical to SEQ ID NO: 28772

SEQ ID NO: 32554 - protein, 371 aa, Oryza sativa
MASGISRTPATGVTAGGGDDEEAAWLHALELISGFTVSMTLKAAIQLGLIDALTAAADGRALTAGELVAQLPAVDDAEAATSVDRMLRLLASFNVVRCSTEAGPGGDPLRRYSPAPVCRWFTAGDNHQGSLAPRLMLDVDEDNLSTWHQMAAAVVSGGPSAFERAHGMPLFEYMGTNHRFNMLFNQAMSQQSMMVMNKLLDRFHGFDGISVLVDVGGGTGVTLKMIISRYKHITGVNFDLPHVISQAPSLPGVNHVAGNMFESVPKGDAIFLKSMLLRNDEECIKILKNCHYALSDNGKVIVVDIVLPETPKPVPEAQNPLRMDVMMLNNLRGGKIRTEQEYAKLAMDSGFSGSFRTTYIFANFMAIELCK

SEQ ID NO: 32555 - protein, 205 aa, Oryza sativa
MERKVVVVCAVVGFLGVLSAALGFAAEGTRVKVSDVQTSSPGQCIYPRSPALALGLISAVALMVAQSIINTVAGCICCKRHPVPSDTNWSVALISFIVSWATFIIAFLLLLTGAALNDQRGEENMYFGSFCYVVKPGVFSGGAVLSLASVALAIVYYVALSSAKSPPNWGPQQNQGIAMGQPVIPPQSSEPVFVHEDTYNRQQFP

SEQ ID NO: 32556 - protein, 344 aa, Oryza sativa; identical to SEQ ID NO: 30654

SEQ ID NO: 32557 - protein, 49 aa, Oryza sativa
MLKIYSIHQGNTNSNRLFYREQRIFESANASPLLQYISSLEICKVSVTM

SEQ ID NO: 32558 - protein, 280 aa, Oryza sativa; identical to SEQ ID NO: 31660

SEQ ID NO: 32559 - protein, 220 aa, Oryza sativa; identical to SEQ ID NO: 31635

SEQ ID NO: 32560 - protein, 263 aa, Oryza sativa
MSPPLELDYIGLSPPPPPPSSSSAAAARADDVDLKGTELRLGLPGSESPDRRPAAIAAAAATATTLELLPAKGAKRVFPDEAALTPPTAAAGKGKAAREGEEVGAEEEDKKVAAPPQPAAKAQVVGWPPIRSYRKNTMATNQIKSNKEDVDAKQGQGFLYVKVSMDGAPYLRKVDLKTYKNYKDMSLGLEKMFIGFSTGKEGAENQKDGEYVLTYEDKDGDWMLVGDVPWEMFTDSCRRLRIMKGSDAIGLAPRAGEKSKNRN

SEQ ID NO: 32561 - protein, 227 aa, Oryza sativa; identical to SEQ ID NO: 30236

SEQ ID NO: 32562 - protein, 267 aa, Oryza sativa; identical to SEQ ID NO: 30541

SEQ ID NO: 32563 - protein, 413 aa, Oryza sativa
MKLFVKTLKGTNFEIEASPEASVAEVKRIIESTQGQNVYPADQQMLIHQGKILKDDTTLEGNKVAENSFLVIMLSKAKASSSGASTASKAPVSQSQPATPVASVARTPPPQAPVVTPEPAPPSAQPPVASATPAAAATPAAAVTASSDADVYSQAASNLVSGSNLEQTIQQILDMGGGTWERDMVVRALRAAYNNPERAIDYLYSGIPENVEPPQPVARAPAAVQQGNPQVPSQAQAAPPPPVQPAGGASGPNANPLNLFPQGIPSAGSNPGAAAGAGAGAGALDALRQLPQFQALLALVQANPQILQPMLQELGKQNPQILRLIQENQAEFLRLVNESPDSGAAGGNILGQLAAAMPQALTVTPEEREAIQRLEAMGFNRELVLEVFFACNKDEELAANYLLDHGHEFEDQQ

SEQ ID NO: 32564 - protein, 250 aa, Oryza sativa; identical to SEQ ID NO: 30579

SEQ ID NO: 32565 - protein, 252 aa, Oryza sativa; identical to SEQ ID NO: 30657

SEQ ID NO: 32566 - protein, 132 aa, Oryza sativa; identical to SEQ ID NO: 31983

SEQ ID NO: 32567 - protein, 262 aa, Oryza sativa
MFLHSLLMQNMAKNTTTQQQQQTRSSKEAGGGGAARSRGVSSKKSPWYQRAVEVLLLIWKQPTGAGTGTTTKAAAASGMGARLRKSSSLNVAASFTRVCLCAPISSYNEQALYFQAGDVAPRRSYSYPRASSASASGCSGGGNSNPLVAPPPAAEQRALMRTPGPGGESARRPVFRGKSLTDDILMRRFVVDEEATRRRNEMEVIRRRHAAAAKRRRLGPSPLRRMALAESESEADDEEETTTTEAAEPTSRRKPQAVPIAA

SEQ ID NO: 32568 - protein, 276 aa, Oryza sativa
MQTKPITMAPTSMLHRSLLCLAVLAAAAGGGAAGSPRLQCLENPPELTAAGDGEAGVVVQNLGGFAAYVTGGAAHSGRAIVLASDVFGFEAPLLRKIADKVGEAGYYVVVPDFFQRRPYNGDPSINITKWIMAHSPVKAAVDSKPIFAALKREGKYVVGVGGYCWGGKLAVEVAKTNEVGAIVISHPSSVTADDMKDVKCPIEILGAENDAVTPPRLVYQFVNALRQRPEVDYFARIFPGVAHGFACRYNASNPFAVRTAEQSLALMLDWFEKHLK

SEQ ID NO: 32569 - protein, 77 aa, Oryza sativa
MGSGLRPPGGEGRPRCRCPCSYMVFRRLAQAAVRWRREEVVGGSRGGRHRPCRPILERRRGANGWSLLCALLPSISQ

SEQ ID NO: 32570 - protein, 289 aa, Oryza sativa
MEGKEEDVRLGANRYSERQPIGTAAQGAGDDKDYKEPPPAPLFEPGELKSWSFYRAGIAEFVATFLFLYITILTVMGVSKSSSKCATVGIQGIAWSFGGMIFALVYCTAGISGGHINPAVTFGLFLARKLSLTRAIFYIVMQCLGAICGAGVVKGFQQGLYMGNGGGANVVASGYTKGDSLGAEIVGTFILVYTVFSATDAKRNARDSHVPILAPLPIGFAVFLVHLATIPITGTGINPARSLGAAIIYNKDHAWNDHWIFWVGPFVGAALAAIYHQVIIRAIPFKSRS

SEQ ID NO: 32571 - protein, 286 aa, Oryza sativa; identical to SEQ ID NO: 30175

SEQ ID NO: 32572 - protein, 241 aa, Oryza sativa
MQHMRLLFELDVSNNLLAGAFPAFLTSLPGLKFLDLRFNAFDGELPAAVFGRRLGLDAIFANDNRFNVSLSSASLTNSTASVIVLANTRLAGCLPPSIGDMADTLVELILLNTSISSCIPPEIGKLKKLRVLDLSHNELAGELPASVGDMESLEVLNVGHNMLAGEVPEAICELPRLRNLTIAGNYFCDEPVSCLHVPLRDDRMNCIPDWPHQRSPEECIAFAHRPPPHCAADGCIVIPPP

SEQ ID NO: 32573 - protein, 195 aa, Oryza sativa; identical to SEQ ID NO: 30208

SEQ ID NO: 32574 - protein, 213 aa, Oryza sativa
MVSLSAAVAPAAGVVPPPQKAQAFAVAEAHAPTIPRRHLLLASAASTLPAAAAAASASAAAAPSFAEIPGSGGVKALDLREGPGEVPADGDQVAIHYYGRLAAKQGWRFDSTYDHKDETGDPMPFVFTVGAGNVIPGIEAAVKSMRVGGLRRVIIPPSQGYQNTSQEPIPPNFFDRQRLFTTIFNPTRLANGEGSTLGTLIFDIELISIRQHS

SEQ ID NO: 32575 - protein, 309 aa, Oryza sativa
MHVCSDHDDDEGTDSGEDFDENEGLLSLESDSTDDVVDIDNELVISPTFSSCNASESSINKSDSGNSSINGTPPLVSAMKGSRAKLGIVTSLSVSWAPDVYDPPVTSGSHTVKGHQRSSRKSHYKYKPAKSSSSRSSSGSKKDRKHSRHSSSSSSSSNHKRDRKPSYRNTVGGVSVGSSSSSRNTDASAAQYRDLYSSSGGNRIDIAVPQYSKLSPLVPSESATYRNVYNSTSGSRTDPTVPHCSKLSPLVTSESASLAGTVPVLKTLEPIKRSSSCCKEQPLSFLSRQFVAAKYKGMFSLWSHNQLAS

SEQ ID NO: 32576 - protein, 391 aa, Oryza sativa
MRPSLRTIYFLLLLLPHVVFSRPLFPLPSKSNGIEKRPLQTFRPYNIAHRGSNGEIPEETAAAYLRAIEEGADFIETDILASKDGALICFHDVTLDATTDVASRKEFSNRRRTYEVEWFNATGWFVVDFTLEELKTLKVNQRYPFRDQQYNGKFSIITFEEFISIALDASRTVGIYPEMKDPVFINKHVKWDGGKKFEDKFVDTLLKYGYKGQYMSENWLKQPLFIQSFAPTSLVHASKLTDSPKIFLIDDFSVRTQDTNQSYWDITSDDYLAYISNYVVGLGPWKDTVVPAAKNYTMAPTDLVARAHAHNLQVHPYTYRNENQFLHLNFHQDPYAEYDFWINSMGVDGLFTDFTGSLHRYQELVAPHAKDETANSLLVKIAQMISQYEGF

SEQ ID NO: 32577 - protein, 249 aa, Oryza sativa
MDAFYSTSSAYGAAASGWGYDSLKNFRQISPAVQSHLKLVYLTLCVALAASAVGAYLHVALNIGGMLTMLGCVGSIAWLFSVPVFEERKRFGILLAAALLEGASVGPLIKLAVDFDSSILVTAFVGTAIAFGCFTCAAIVAKRREYLYLGGLLSSGLSILLWLQFAASIFGHSTGSFMFEVYFGLLIFLGYMVYDTQEIIERAHHGDMDYIKHALTLFTDFVAVLVRILVIMLKNASDKSEEKKRKKRS

SEQ ID NO: 32578 - protein, 283 aa, Oryza sativa
MVAVLFKDVAKTAHDVLNDDYDYSRKLKIKSKASNGVSFTTEGQLNANKSILAKVAGGFTHSGSGVVFKKLQVTTQGRLVTEAELPNVLTHGLNLTFKLEDGSVAKHASAKQVGVLGAEYKQAKFSFNTEADFVSNTVKAAGAIVQDSFVLGGQVAFNVDKSALTEHNVGVSYVSHDFTTSLVTKKNFGALQASFHHRLSKDTIYAAVLDYDLKSAANTLNVGGRFKADADTTYAGKIDSEGFVSLASIQKVRPYVTLTTSVHVDAKNFEGDAHKFGLGLTLG

SEQ ID NO: 32579 - protein, 438 aa, Oryza sativa; identical to SEQ ID NO: 28597

SEQ ID NO: 32580 - protein, 274 aa, Oryza sativa
MLPPAARLAARRLLGLATSSASESAAARRLSRSPISYAAAGCSSRLFSTALNYHLDSPENNPDMPWEFTEANMKKVNEILSHYPSNYKQSGIIPMLDLAQQQHGGWVPVAAMNAIAKIVEVAPIRVYEVATFYTMFNRTKVGKYHLLVCGTTPCMIRGSREIEEALLEHLGVKRNEVTSDGLFSVGEMECMGCCVNAPMIAVADYSKGSEGYTYNYYEDLTPKRVVEIVEMLKRGETPPRGTQHPERKNCGPAGGNTTLHGEPKPPPCRDLDAC

SEQ ID NO: 32581 - protein, 229 aa, Oryza sativa
MAGAPRGLVLLGVCAVLMAVAVGGEAASVVVGTAKCADCTRKNMKAEDAFKNLQVAIKCKNTNGEYESKAAGKLDGTGAFSVPLDADLDSSDCIAQLHSANNEPCPGQEPSKIVPMSEGTFVAIAGKTHYPSALCASATICGPIKKKIIDHFHKKPVPPKPEPKPEPPKPKPEPEHPFLDHIHEKEKHFFDHFHKKPVPPKPEPKPEPKPEPKPQPAPEYHNPSPPAKN

SEQ ID NO: 32582 - protein, 211 aa, Oryza sativa
MSSRDAAATFHVYQPVQIPTATVAPAAAVSAAPAEAVAQLVPAPSKKAAGAAGGKDRHSKVNGRGRRVRMPIVCAARVFQLTRELGLKSDGQTIEWLLRQAEPSILAATGTGTTPAAFVSSSAPSTSSSHQHTLLGKRQRQESAAADAVSVAGAASAFWAALPAPGRPDAWGFSPLDAQPTYVPMAQAHHHHLNLLAALSGAARRAEEESR

SEQ ID NO: 32583 - protein, 228 aa, Oryza sativa
MQRLSRFVPSSSRRVTDLKDALWSGSLTFQHALSTFAADENTSGRKFASYTVFKGKAALSMQPILPSFSKLESGGSRVNKNGSVMLTFFPAVGQRKYDYSKKQLFALSPTEVGSLISLGPAESCEFFHDPSMKSSHEGQVKKSLSVTPLGNDSGYFLNITVLNNLQKTTERLSLPISKAEFTVMRTALSFALPHILGWDQALTNHQPSPSPASKPRVERPHPDSEWER

SEQ ID NO: 32584 - protein, 233 aa, Oryza sativa
MEVEAACGDGVVSSSNEMQELWPLGEVDQKGTRFPCCIVWTPLPVVSWLAPYIGHVGIAREDGTVMDFAGSNFVSVDDLAYGSAARYLQLDRRKCCFPANLAAHVCARSYEHSEAGTAISWDDALQSGARRFEHKCYNLFTCNSHSFVASCLNRLAYGGSVGWNVLNLAALVWLRGRWLGKMAVVRSLLPFAAVACVGVLMAGWSFLISMAAFSSLLLGWFVLGVYCFKGLVC

SEQ ID NO: 32585 - protein, 159 aa, Oryza sativa
MPHHLPWIYRLQVGGGGGRRGSASGGDGLGVGGQQDEEEEHGEDGDGHEQQHRRRRRQRRQQQRQHQQRRRHHPEQHRRLHPQVPSSSSAYFHRRRRLLHHSPLHSHLSVQSPSRRRRRGPVPGHGVLLVTQQDDSSHQEADAEAEAMEEKKTRRRRRS

SEQ ID NO: 32586 - protein, 202 aa, Oryza sativa
MEAESRKLLLALAVSLCCFVAASRAQSYIGVNYGEVADNLPAPEETAKLLKSTTISKVRLYGVDPGIMRALAGTGISLVVGVANGDIPSLAADPAAASRWLAANVLPFVPASTISVVAVGNEVLESGDASLAAALLPAMQNLRAAAAAAGDGAARIKFSTVNTMNQLYQAAGRHPWNCDFRSSATLTSDNPSYGSCVYTGGQ

SEQ ID NO: 32587 - protein, 194 aa, Oryza sativa
MGSSEMTATEVAALLDLKPHPEGGYYTETFRDGSVSVTTAQLPPQYKVDRAISTAIYFLLPSGSVSHLHRIPCAETWHFYKGEPLTVFELHDDGHIDLTVIGPHLEAGQRPQYTVPPNVWFGSFPTLDVESFASDGSVLVKSRKRDPELHYSLVGCTCAPGFQYEDFEMANFDDVKSIAPKAEPFLKYLIPSTK

SEQ ID NO: 32588 - protein, 270 aa, Oryza sativa
MGWGIPTRPPATSTPSRVQALYELCKRTFPSPSSVAASSSPSSPPPDHAIGAISSLMDTITPVDVGLRDDNLEDGRGFGFFESNFLKNSARVARWAQPITYLHVYECDAFSIGIFCLPTSAVIPLHDHPGMTVLSKLLYGSMHVKSYDWVEPAVLANGKPVKLGKLHTDDVLNAPCPTAVLYPQSGGNMHCFTSVKSCAVLDVIAPPYSESSGRVCTYFHDYPFSSFSAGQAKVVHGPDNYAWLEALIVPVNINMRPGTYTGPTIQEHLP

SEQ ID NO: 32589 - protein, 342 aa, Oryza sativa; identical to SEQ ID NO: 29675

SEQ ID NO: 32590 - protein, 33 aa, Oryza sativa
MWQLKTSNEYVMHMRYYQMRTRGRYMTSMVWKV

SEQ ID NO: 32591 - protein, 242 aa, Oryza sativa; identical to SEQ ID NO: 31906

SEQ ID NO: 32592 - protein, 229 aa, Oryza sativa; identical to SEQ ID NO: 29253

SEQ ID NO: 32593 - protein, 403 aa, Oryza sativa
MDATAIGNGALHSNGAGADTKGKPIKCKAAVAHGPGEALVMEEVEVAPPARMEVRLKVLFTSICHTDLSAWKGENELQRKFPRILGHEAAGVVESVGEGVEDLAPGDHVVPIFTGECGACTYCESSKSNLCKTYRVNPFKSTMVTDGGTRFTMIDRSSGARNPVYHFLNTSTFAEYTVIDSACAVKINPKAPLEKMSLLSCGVSTGVGAAWNTANVSKGSTVAIFGLGATGLAVAEGARLRGASRIIGVDINPEKFSKGKEMGITDFINSKASGKPVHEVIMEMTDGGVDYSFECTGITDVLREAFVSTHDGWGLTVVLGIHATPRMLPLHPMELFDGRRITGCVFGDFKGKSQLPEIVEKCMQGEININFDGFITQELPFADINKAFQLLEEGKSLRCLLHV

SEQ ID NO: 32594 - protein, 235 aa, Oryza sativa; identical to SEQ ID NO: 32497

SEQ ID NO: 32595 - protein, 167 aa, Oryza sativa
MADEYGRGGYGRSGAGAGDDYESGGYNRSSSGGADEYGRRPGGGAGGYNKPGGTDDYDSGYNKSAGGDDDDYGRTGGGGYNKSGTDDDYDSGYNNRSGANEKYGRNKSGDDEYSGGGGAEADEEYVDGLSSRDDPEKYRKEEKEHKNKERLGEVGALAAGAFAMVRS

SEQ ID NO: 32596 - protein, 258 aa, Oryza sativa
MGSIDGHSLQQHQGYSHGGGAGGSNEEEEASPPPGGGSATGSAGRRPRGRPPGSKNKPKPPVVVTRESPNAMRSHVLEIASGADIVEAIAGFSRRRQRGVSVLSGSGAVTNVTLRQPAGTGAAAVALRGRFEILSMSGAFLPAPAPPGATGLAVYLAGGQGQVVGGSVMGELIASGPVMVIAATFGNATYERLPLDQEGEEGAVLSGSEGAAAQMEQQSSGGAVVPPPMYAAVQQTPPHDMFGQWGHAAVARPPPTSF

SEQ ID NO: 32597 - protein, 181 aa, Oryza sativa
MTEEQAVAEQQRMFAEARARMNNGAAKPKEPEPEAQQQTQQPPQPQLHPQPQQPLQPQLQLHPQPQQQPSQLHPQQLLHPQSQQTPQPQPQVHPQPQQPPQLQPQPQLLQQPQLPQQLQPQSQLPPQPQQPPQLQLQSQLHPQPQQPPQLQPQPQLHQQPQPQAELQSQSQPQTEHGLDSS

SEQ ID NO: 32598 - protein, 233 aa, Oryza sativa
MRKSSINGVHVIGVPVTAKAFGIEEEVSLARGQSFRKADGDHLAVSLSHPSPYTSFGYKHSSKGQVIHWVSKLSRRAQGFREHVTLGPKLSETVKGKLSLGAKILQAGGIERVFRKAFSAEKGERLVKALQCYLYTTGGPIAGMLFVSTKKVAFRSDRPVTVTSAKGDVARVPYKVVVPLRRIAQVRPSENADKPEEKYIHVVTVDGFEFWFMGFVSYQRSCKYMQQAISELQ

SEQ ID NO: 32599 - protein, 212 aa, Oryza sativa
MGKDCGKHGDDDFRQGCRRFITVLVVLAILVGIIALIVYLVLRPTHPRFYLQDATFRQLDLSNSSSTAGGVLSTTIQVTVASRNPNDRVGVYYDRLDVYASYKYQQITVAASLPPVYQGHGDVDVWSPVLAGPSVPFAPYLADAISQDCQAGYLILQVKIDGRVRWKVGSWISGHYHLFVTCPAFLVTAGGNGSPGASGFRFQTTTYCHVEV

SEQ ID NO: 32600 - protein, 293 aa, Oryza sativa; identical to SEQ ID NO: 31717

SEQ ID NO: 32601 - protein, 335 aa, Oryza sativa
MGCLLMLCLVSPLLLATSVHGNPWYGYGYGLFPQFYDHSCPKAKEIVQSIVAQAVARETRMAASLVRLHFHDCFVKGCDASVLLDNSTTIISEKGSNPNMNSLRGFEVVDEIKAALEAACPGTVSCADILALAARDSTVLVGGPYWDVPLGRRDSLGASIQGSNNDIPAPNNTLPTIITKFKRQGLNIVDVVALSGGHTIGMSRCTSFRQRLYNQSGNGMADYTLDVSYAAQLRQGCPRSGGDNNLFPLDFVSPAKFDNFYFKNILSGKGLLSSDQVLLTKSAETAALVKAYADDVNLFFKHFAQSMVNMGNISPLTGSQGEIRKNCRRLNNYYH

SEQ ID NO: 32602 - protein, 246 aa, Oryza sativa
MKEVVLHVYDVTNSDSEKTNNTILQINRIFKDRIGLGGIFHSAVQVYGEEEWSFGFCENGSGVFSCPIGKNPMYTYRECIVLGETECSIATVNRILRELSREWPGHSYDLLSRNCNHFCDVLCERLAVPKLPGWVNRFANAGDTAVVVAENTAVKFRQAKTEIVNASRVAYRFMAGLASKNQNPQPESPSNQSRNGPTFQGTWFKNIISNGAKPSSSESTSSHDTGTGGDESSLQNQKPSEQSTRL

SEQ ID NO: 32603 - protein, 158 aa, Oryza sativa; identical to SEQ ID NO: 30737

SEQ ID NO: 32604 - protein, 318 aa, Oryza sativa
MAFGGDQTTTKSRILVVGGTGYIGRHVVAASARLGHPTTALVRDLAPSDPAKAQLLHTFRDAGVTLLHGDLHDHASLLRAVRDADVVISAVRATQVPDQTRLIDAIKEAGGGRVRRFIPSEFGMDPGRGASAAVEPVRSMYGSKVGIRRAVEAAGIPHTYVACNYFAGFALPSIGQFMPKAAPVDSVVILGEGHTKVVFVEEGDIGTYTVLAAVDPRAENKTLHIRPPANTMSHDELVSMWEKKTGKKLERVYVPEDAVLTKIKELEYPKNVLVSIAHAAYCRGEMSSPLDDPQDVEATQLYPEIQYTTVDEYLNTLL

SEQ ID NO: 32605 - protein, 150 aa, Oryza sativa
MESGSESGSGSGSRGEITLAIGGGGASAAAWTRLVSSGVEDVLVVGGAGGWRGGGGGDGAGGLLPYGHFLEACFLCRKPLASNRDIYMYRGDIPFCSEECRREQIEMDDEMERKEKKNISKKVAPRTPDPREVESTPRPPKARAGSILAG

SEQ ID NO: 32606 - protein, 396 aa, Oryza sativa
MEGHEGGEEEGLGDQFERLPDEVLLDVFGRIGDVKALGRCALVSRRFHALVPLVDSVFVRVDCVISDDPPPSSAGSAQAAAAAEGGPPAARGRGALAHLARLVLGGIVRPIQALGQILSPAAATVSRRSAAPPAAPAPAAADVSHHSPSEVLRSFKELRRLHIELPTGELGIEDGVLLKWKADFGSTLGSCVILGASSVTSKPPPPPAAPPPTAADSSAASPDSSREPDELGNIPESLYTNGGLKLRVVWTISSLIAASARHYLLQPIIADHSTLESLDLTDADGQGVLTMDKRQLQELRVRPVSASGNSHRTLMPALSMRLWYAPHIELPGGQLLKGATLVAIRPSEDVLREGGGIEVAGPTGASWILDAFEEPYRTAAQVLLKRRTYSLEMNSF

SEQ ID NO: 32607 - protein, 416 aa, Oryza sativa
MIRITTHLSPTLKPPPPLSLHPHLPLLRRHRHPSSRPISVSAAAPSDLLASVESVASAASVLAAIVLVHESGHFLAATSRGIHVSQFSVGFGPALARFRLGPVEYALRAIPLGGYVGFPDDDPDSGFPPDDPDLLRNRPVPDRLLVVSAGVAANLLFAFLIVYAQALTVGVPVQAQLPGVLVPEVIPGSAAARAGLLPGDVILSVPGLAPDPSVPVLVDLIKASPNKDVSVTVSRTGPGPGDRRSIDLTVVPDTSVDGTGRIGVQLSPYFRVTRVHPNNLAEATVLALREFTALSATVLDGLRQTFLNFSQTAEKVSGPVAIIAVGAEVARSSAEGLFQFAAVINLNLAAINLLPLPALDGGTLALILLEAARGGQKIPREIEQRIMSSGILVVLMVGMFLIVRDTLNLDFIKDIL

SEQ ID NO: 32608 - protein, 326 aa, Oryza sativa
MAVGGRGRRPLLLLLLLLAVALALAARARAQLSPGFYSASCPTVHGVVRQVMSQAVMNDTRAGAAVLRLFYHDCFVGGCDASVLLDDTPAAPGEKGVGPNAVGSTTVFDLVDTIKAQVEAVCPATVSCADVLAIAARDSVNLLGGPSWAVPLGRRDALSPSRSAVSTDLPGPEADISALVSAFAAKGLSSRDLAALSGAHTVGRASCVNFRTRVYCDANVSPAFASHQRQSCPASGGDAALAPLDSLTPDAFDNGYYRNLVAGAGLLHSDQELFNNGPVDSVVQLYSSNAAAFSSDFAASMIRLGNIGPLTGSTGEVRLNCRKVNS

SEQ ID NO: 32609 - protein, 28 aa, Oryza sativa
MLASQDPPMPAKASSPLVPHHIIHLSLQ

SEQ ID NO: 32610 - protein, 616 aa, Oryza sativa
MAAVDTPEKPYEGKPAAEARSYWRWQKEDFFPEPSFASWGAYRAALAATPARFRDRFAGRSTDADELGALRRRSENEMRRCLTWWDLTWFGFGSVIGAGIFVLTGQEAHDHAGPAIVLSYVASGLSAMLSVFCYTEFAVEIPVAGGSFAYLRVELGDVAAFIAAANLILESIIGTAAVARSWTSYLASLINKPASALRIQTSLAEGYNELDPIAVVVIAVTATLAILSAKGTSRVNWVASAVHVLVIAFVIVAGFLHAKTSNLTPFMPHGVPGVFRAAAIVYFAYGGFDNIATMAEETKNPSRDIPLGLLGSMSVITAIYCVMALVLSMMQPYTAIDRSAAYSVAFSNVGMRWAQYVVALGALKGMTTVLLVGALGQARYTTHIARSHIIPPVFALVHPRTGTPVHATVLIAAAGACIGLFSSLDVLSSLLSVSTLFIFMMMATALLVRRYYVRGVTSRTHARRLVALLSVVIGSSAGIAAYWGAAPERWVGYTVLVPAWAAGTLGIQLLVPAARAPKVWGVPLVPWLPSLSIATNLFLMGSLGAQAFIRFGVCTAIMLLYYVLVGLHATYDVAHGACSGDDVDEEVYADAAHVDDAKAAAAVAANADVERAGAKI

SEQ ID NO: 32611 - protein, 351 aa, Oryza sativa
MEKPTKKGVAPPMAWRTRLSILAAGCLTDATCRADGTINRRLLNFLDPHVPPSAAPRNGVASRDVVVDPAIPLRARLFYPCPSGGDGGTGDATKPLPVVVFFHGGGFAYLSAASRAYDAACRRIARYAGAAVLSVDYRRSPEHRYPTPYDDGLAALRFLDDPNNHPLAADDGDVPPLDVTRCFVAGDSAGANIAHHVARRYALASTTFANLRLAGLIAIQPFFGGEERTPAELRLVGAPIVSVPRTDWLWRAFLPPGADRTHEAAHAASPAGAAGIDSPAFPPATVVIGGYDPLQDWQRRYCETLRGKGKAVRVLDYPDAIHAFYIFPEFAEARDLMLRIKDIVAGGGGEH

SEQ ID NO: 32612 - protein, 80 aa, Oryza sativa
MGFMLRVRLASFFAGAAAAGAAGGFFLYKDYKLAHDSMALQVKGLQDHVDARYKALDKRLATLEDQKTSETAPDVGVPSD

SEQ ID NO: 32613 - protein, 144 aa, Oryza sativa
MASVWCLSASASAAAPVAAAAAAPGPLGASVASVSLARAAVPSRRRRRWDALVVCAAPDEEKITRRSPLDFPIEWEKPKPGRRPDIFPKFSPMKTPLPHPLPADDPLDDDEEEEEEEPQPQEEPQEDDPDKEEPEEDDPDKPTE

SEQ ID NO: 32614 - protein, 220 aa, Oryza sativa
METSSFLRTTLPTAKPLPAFQTLAPRPRPRPLRRSTISAAITRGRKEDTVAAVREQLEGCYLLAGIRYEGLTVKQLQGIRDTLPETCRLLVAKNTLVGKAIEGTPWEALKPCMKGMNAWLFVHTEEVPAALKPYRAFQKEERLEGTNDFVGAVFEGKFYAPGDFKALETMPSRAEVYAKLLGSLQGPATSVVTTLQAPARDVVSVLSAYVRKLEQEVGAA

SEQ ID NO: 32615 - protein, 191 aa, Oryza sativa
MATDGGGATPSPAAKKANLLDPYSIKHLLDETVSEVAKSKGYPEDARLSNRRLAVGAAVIAVALLAQFYPRKFPENRDVLLACIALYAALNVALQIVTYTKEKNAILFTYPPAGSFNRTGLVISSKLPRLSDMYTLTIASADPHSKSSSEPVHFTKSVTKWFTKDGVLVEGLFWKDVEKLIDDYNSDHRSK

SEQ ID NO: 32616 - protein, 561 aa, Oryza sativa
MLFNLGLTAYLIGNMTNLVVEGTRRTMEFRNSIRAASNFVGRNHLPPRLKQQILAYMCLKFRAESLNQQQLMDQLPKSICKGICEYLFLPVVKDVYLFKGVSREVLLLMVTKMKPEYIPPKEDVIVQNEAPDDVYIVVSGEVEVIYSDGEAEERVVATLGTRGVFGEVSALSDRPQSFTLRTRTLCQLLRLRQAALKEAMQSKPEDSVVIIKNFLKHQIEMHDMKVEDLLGEDAAGEYDHGNIPCNLLTVAATGNSSFLEDLLKVGMDPDVGDSKGRTALHIAASKGYEDCVLVLLKQACNVNIKDAQGNTALWNAIAARHHKIFNILYHFARVSSPHHAAGDLLCLAARRGDLDTLRELLKHGLAVDSEDRDGATALRVALAEGHADVARLLVLNGASVDRAASHNEQQAAAAVSVDELRELMKTRELAHPVTIVVDSPSPAAAAVIREVGSSGDSRNGRRQSARSDGAHWPRVSIYRGHPFVRNRSSEAGKLINLPGTMEEFRIIIEEKLKVDARKTLIMNDEGAEIDSIDVIRDNDKLFIVTEEHMTAVASMDSVSGS

SEQ ID NO: 32617 - protein, 150 aa, Oryza sativa
MPAMACGARAGAAFPSPRPARAPWPPGRFRALVPAPPALRLGLLRLPPPMASTIDSPGSSSDFAKRMERAWLISQQPRPNPCSSCQSAGHVECKWCTGTGFFILGNNMLCEVPSKNTKCVICSGKGFATCADCKGTGFRAKWLEDPPVDK

SEQ ID NO: 32618 - protein, 131 aa, Oryza sativa
MARGRGSAMRGAVAVAFLAVVVSCIFLSGCGVADAATYYVGDSLGWSLGSGSWPSGKKFHAGDILVFRYLPWMHNVVAVDEDGYADCNPPPFSRYYTSGSDSVRLARGDNFFVCTRYGHCNLGMKMVVTAV

SEQ ID NO: 32619 - protein, 55 aa, Oryza sativa
MYNPPAQQDMSYYDHCTKRHEEKGCLYACIFTALCCFCCYETCECCLDCLCCCCN

SEQ ID NO: 32620 - protein, 193 aa, Oryza sativa; identical to SEQ ID NO: 31763

SEQ ID NO: 32621 - protein, 55 aa, Oryza sativa; identical to SEQ ID NO: 32213

SEQ ID NO: 32622 - protein, 137 aa, Oryza sativa
MYLSDVKQGGETVFPRSEMKDAQAKEGAPSQCSGYAVRPAKGNAILLFNLRPDGETDKDSQYEECPVLEGEKWLAIKHINLRKFDYPKSSLASEDECTDEDDRCVSWAASGECDRNPVFMIGSSDYYGSCRKSCRVC

SEQ ID NO: 32623 - protein, 125 aa, Oryza sativa
MAAAAASSVSLPGARALPTWSSSVSGDSHSLALSSWAARPRSARPLRAPARMGNVDEGKGIFAPVVVVVRNIVGRKRFNQLRGKAIALHSQVITEFCKTIGADAKQRQGLIRLAKKNGEKLGFLA

SEQ ID NO: 32624 - protein, 771 aa, Oryza sativa
MAAATARSPSPGPGARPGCAVRRSADSSPAASPCDLAALRSSVVCRNASPRASWCAEKENSGQRDAAARAAAAPKPARPAAGAAKNFMAPTISAASEASPRKKVLGERNEQQQLYPVASSPVKPMASEAGAPRRLRLSFDGAPNTAPPAASTPVTAAAGSRHSFGGEEERRVENPPCKNHHHATAFDDAASAEADQGAAPYDPRTNYLSPRPRFLHYKPNPRIDLYRQGSSGGVRRLEDGFASESSEETVTTTTTTSSEEEVVLVDEEQQAHLSSELGDGAAVPAADACALPLEPASGSPRARVLTPEPATRSPRARVQTPEPEPTASSERARRPRKRSSLRFLVAPLALVVFMAAALICVPPPPVDSPVMPLTALSKVSDFLSVQELHPVELAAWLKQWSSSSLNLVTSYWESLVWAQEQEFFGPHFAANLSAATASAHEGVDLYCNFVETRPVLMEDIGASAFEQDSKIQEAVSASDSELISEISDVEQEDITDKGDVIDDGFLAEELNVEMPEEDAEMSQEVSGSNGEEMASFSQDLEPSQPAGEAEPLENIETSTSSLKQDVQTDDSEGDRAADGEESPEADHGMKSELGMWPSYLDKISKPAAAGAALAAVIVPAALAFLLMSKKQDQAVANAAAEAPADQAEPVVEKTLSGSGSSEGHLRVKGSQLQTPPVADETERFGGGSGASMYSSSLSSGYGRRKSAKEDESLSLDPVSRRDSAAQPTSSYGSFTTYEKIPAKKRNKDDEAVTTPVRRSSRLRNQVKSPEA

SEQ ID NO: 32625 - protein, 168 aa, Oryza sativa
MRRRRLPPPSLASLPRVDLPGGGRRRMRRRRLPLPPLASLPWVDPPGGGGGGSHGQIRRRQLLPPLLASLPRVDLPGGGGHGQIRRRRHLLRVDPATAASSAASLLPPARWSRVDPTVVASTEGGSGNGGFLRRLSSPSGAMVVPDGGSGGRGVNFCDVCYSCCYSWM

SEQ ID NO: 32626 - protein, 176 aa, Oryza sativa
MRRTTSMTEFSPPDVLAAVVEEEGEDLEAMMMVGQPGGGGGDGAQDWLASFGREGGGGGGGGGAPGQDWLAAYRARAAPARAGLRRNSADYCSVETASFLRSCGLCRRRLGPGRDTFMYKGEAAFCSLECRQQHMTQEEWQDKCGVTSMKKEAPAPPNGRRRSSKTTTSGGTVAAA

SEQ ID NO: 32627 - protein, 171 aa, Oryza sativa
MAAAGSSSRFAVTCGLLSQYMRERQQPQPPVTVLEAVAEEEEEEDARTMQLFPPRAAAADGVATPSAGTAPLTIFYDGRMVVVDDVPVEKAAELMRLAGSACSPPQPAHAAALPEMPIARKASLQRFLQKRKHRITTTSEPYKKAAVASPAPEKSFAVAPVKDEPATWLGL

SEQ ID NO: 32628 - protein, 142 aa, Oryza sativa; identical to SEQ ID NO: 30885

SEQ ID NO: 32629 - protein, 25 aa, Oryza sativa
MVSFALHLDYGYGVAVYALQEKYSQ

SEQ ID NO: 32630 - protein, 138 aa, Oryza sativa
MAGKGGKGLLAAKTTAAKSADKDKDKKKAPVSRSSRAGLQFPVGRIHRQLKSRASAHGRVGATAAVYSAAILEYLTAEVLELAGNASKDLKVKRITPRHLQLAIRGDEELDTLIKGTIAGGGVIPHIHKSLINKTSKE

SEQ ID NO: 32631 - protein, 160 aa, Oryza sativa
MAPVSISDERAVSVSAERVWKVFSDAPAMPKVCAGFIDAIEVEGDGGAGTVTTMKLNPAVDDGGSFKTRVVARDNAAHIIKSEVLDVPAGSKVGKLKSHVTETKIEAAGAGSCLAKINVEYELEDGGSLSPEKEKLILDGYFGMLKMIEDYLVAHPTEYA

SEQ ID NO: 32632 - protein, 159 aa, Oryza sativa
MAVSTTASNLVLRAAPTTTTTRRRRVAASAVRFDRRSAALLLLSAAAGAAPTVASPSPANAAGIGLFGIRKKLERAEEAAAEAVREVEEAAVEAAEVGGEAVKAAEKEAAEVAGEGVQLVAGAELAGDGLVQAGAVAATEALGVVVGLSVVNGILRPES

SEQ ID NO: 32633 - protein, 69 aa, Oryza sativa
MLAGNYLFPLYFFCCLASQWISEQKTVSACLDDNQLVWPFPQYRSHFVLSVKLAPSKKFQSQSCSVKER

SEQ ID NO: 32634 - protein, 468 aa, Oryza sativa
MEPKPSTPTAAATPRFKLGKQSSMAPDRGGAGESSEEGSSEAVGVMGFQLMYMAHEGDVEGIQELLDAGADPNFRDSDGRTAMHIAACEGQAEVVELLLQRGADAVAEDQWGSTPLADALHYQNHDVIKILEKHGSKLKIAPMHVKNVREVPEYEISPNELDFTNGNGISKGTFRKATWRGILVAVKKLDDDLIMDENKVQAFRDELDVLQLIRHPNVVQFLGAVTQSSPMMIVMEFMPKGDLRKHLSRKGALEPSYAVKLALDIARGMNYLHEHKPQAIIHRDLEPSNILRDDTGHLKVADFDLCKMLKWRRKVREEKAVTSPGNACRYVAPEVLRNEEYDTKVDVFSFALILQEMIEGCLPFYDKKNNEIEKAHNSKERPPFRAPPKHYAYGLRELIEQCWSENPASRPDFRTIIEQLSYIQNEISQRNRWKVKPLKCFLSFEGMWKKDRNEGSTTRSSRSSRSYF

SEQ ID NO: 32635 - protein, 46 aa, Oryza sativa
MVSNPLCICVKAFCPFNQLSRASFCKMYRGYTMMYVSLLGFEMDAC

SEQ ID NO: 32636 - protein, 156 aa, Oryza sativa
MDYHRGGGVEVRIARIFNTYGPRMCLDDGRVVSNFVAQALRRQPMTVYGDGKQTRSFQYVSDLVAGLMALMEGDHIGPFNLGNPGEFTMLELAQVVKETIDPMATIEFKPNTADDPHMRKPDITKAKHLLRWEPKVSLREGLPLMVKDFRQRILDE

SEQ ID NO: 32637 - protein, 608 aa, Oryza sativa
MTFSATTLRSGLHAMLPALEPLLANQELRFPHFPAIDGLYSVGIPLPAQLAAAGAATATAGGAAASSSTSTNIVGGVIPRLVRMIEDTTDHVLRFDVPEMFERDRFSWFRDEEFARQVLAGVNPICIQLLTEFPIMSKLDPEVYGPPESALTKELLESQIVESVTVEEAMAQRRLFILDYHDVFLPYVHRVRERPETTLYGSRTVFFLTGAGTLSPLAIELARPQSPTRPQWRRAFVHGPDATASWLWKLAKAHVLSHDTGYHQLVSHWLRTHCCVEPYIIAANRQLSRMHPVHRLLHPHFRYTMEINALARESLINADGIIEESFWPGRYAMELSSVAYAATWRFDAEALPEDLVRRGLAVRQEDGELELTIKDYPYANDGLLVWNSIKQWASDYIDFYYKSDEEVACDEEVRAWWEEVRTKGHADKKDEPWWPAVDTRDGLIGVLTTIMWVTSGHHAAVNFGQYHYGGYFPNRPTVMRKKMPVEENKEEEMKKFMEMPEHVLLDTMPSKMQAITIMATLDILSSHSPDEEYMGEHAEPAWLAEPRVKAAFERFAGRMKEIEGIVDERNNDPELRNRCGAGIVPYELLKPFSTPGVTGRGIPNSISI

SEQ ID NO: 32638 - protein, 28 aa, Oryza sativa
MREVMMIVGVIYEYSTGTRMKLFFCIFS

SEQ ID NO: 32639 - protein, 175 aa, Oryza sativa
MAPSVMASSATTVAPFQGLKSTAGMPVARRSGNSSFGNVSNGGRIRCMQVWPIEGIKKFETLSYLPPLTVEDLLKQIEYLLRSKWVPCLEFSKVGFVYRENHRSPGYYDGRYWTMWKLPMFGCTDATQVLKELEEAKKAYPDAFVRIIGFDNVRQVQLISFIAYKPPGCEESGGN

SEQ ID NO: 32640 - protein, 167 aa, Oryza sativa
MASYAPLFVNNNDQTWNPDAIVFNSWQQYGTPSYWMQTLFGESSGAMFHPVTITSSYSGSLAASAITWQDSENSFLRVKIINFGSDPVSLTISATGLQARVNALGSTATVLTSSNVMDENSFSNPNKVVPVKSQLSNAAEQMQVTLAPHSFSSFDLALAQSKLVAEM

SEQ ID NO: 32641 - protein, 487 aa, Oryza sativa
MAPDVEARLLAASSKPATAAAASLPRRNKYPFFCAVLASMTSVLMGYNVAVTSGAQIFMAEDLGVSDAQIEVLSGAINIYSLVGALLAGWTSDRLGRRLTIVLTNGFFLAGPLVMSLAGGYAALMAGRFVAGIGVGYALVIAPVYAAEISPASSRGLLSSLPEIFINGGVMLSYVSNFAFSGLPVHLSWRPMFAAGVVPTVFLAAGVLTMPESPRWLAMKGRRGEARVVLDRTSDTPAEAEQRLQEIEDVVAAAGSVAGNGNGGGGAWKEVATKPGVRRVLAIVLTLQFFQQASGIDSVVLYGPRVLAAAGVASNTLLLGLNVVFGVAKASSILVAMALTDRVGRRSLLLASTGGMTASLLALGSVFAAFGGARDDAAVAAGAAVAVVVAFVCAFSVGIGPLAWVYSSEILPLRLRGQGAGVGTAMNRVVSGVVTMTFISLYGAITMAGAFYLYAAIAAASFVFIYACLPETRGRSLEDMEELFHTK

SEQ ID NO: 32642 - protein, 41 aa, Oryza sativa
MVCSFAVGLDFGIFFSLRTFFSSLFNCSWVYTQITLFTESG

SEQ ID NO: 32643 - protein, 42 aa, Oryza sativa
MLVSVVLSYFCSYLYQSFSYLWPSPLISEVGALDPFVYISIC

SEQ ID NO: 32644 - protein, 31 aa, Oryza sativa
MVTAHCMIHLVKFTFVFSPHSLFLSSFCFLQ

SEQ ID NO: 32645 - protein, 137 aa, Oryza sativa
MKAVADAYSKRSLKYFETALRDYKSQLEEDPIVHRHLSSLYDTLLEQNLCRLIEPYSRVEIAHIAEMIELPVDHVEKKLSQMILDKKFAGTLDQGAGCLIIFEDPKTEAIFPATLETISNVGKVVDSLYMRSAKIMA

SEQ ID NO: 32646 - protein, 80 aa, Oryza sativa
MQEAAKKREMRYSDLKKIDRGVRRHFHDDITVIVVFLDSNAISKANWSRGPSVSLRGGGVTLPANSLAPFSTPTVLSSTY

SEQ ID NO: 32647 - protein, 98 aa, Oryza sativa
MGAVEGYRIAGGPLGEVVDPLYPGGSFDPLGLADDPEAFAELKVKEIKNGRLAMFSRFGCFVQAIVTGKGPLENLADHLADPVNNNAWAYATNFVPGK

SEQ ID NO: 32648 - protein, 136 aa, Oryza sativa
MLHPTKYTAMLAEKMQKYGATGWLVNTGWSGGRYGVGKRIRLPYTRKIIDAIHSGELLTANYKKTEVFGLEIPTEIDGIPSEILDPINTWTDKGAYKETLLKLAGLFKKNFEVFANYKIGGDSSLTDKILAAGPNF

SEQ ID NO: 32649 - protein, 153 aa, Oryza sativa
MFLESKDKAHDFASLRHALLEQDRQVLLTGANPLAKELNIKELYNLQSRLAQEKARDVYRQRFQMPEFQGLVQEQNTPIDLCGLHVSEAIHALNYELNNRRKIARSTGRRLQVIIISSTRTPARLTAAVEQYLLEHGIQYTQAQPGLFRVLLQ

SEQ ID NO: 32650 - protein, 33 aa, Oryza sativa
MMNETRRIPTISDTWQDISQLKVQSPYGSPKRF

SEQ ID NO: 32651 - protein, 64 aa, Oryza sativa
MGWLHSLFSPLRKLWVRAHSARRNRRGMHILYKDVKSCQDEDVHVLWSILVDSHRHPALMKLKL

SEQ ID NO: 32652 - protein, 405 aa, Oryza sativa
MASPAAEGDAVSAGFAELERQQQLLASCTRLYKQLEEHFASLERGLAARSDSLRHKRRAAEARASAAMDSLRRREASIDGSVSRALDHLDDLASASSVPSDAAAAAEGVAESLRAMCARMDSAGFFGFVVARRKEVDALRAEMPPALKCCVDPAKFVMDAVADVFPVDRREAKNPTDLAWACVLILEAAVPALADPDPEIGAARLLVPRAARERARGMAREWKEAAERKGGVEWTKPPDAHAFLQHVATFAVAEREDRGIYRRIVVSFSWRRQMPRLALTLGLEEDMADIIEELIAKGQQLDAVNFAYEAGLQEKFPPVPLLKSYLADSKKTSCTVSDNSSTSSGQSGSNANKKEQSVLRAVIKCIEDRKLEAEFPLEDLQRQLEELEKAKTEKKKATSSASSGG

SEQ ID NO: 32653 - protein, 175 aa, Oryza sativa
MVLLTRVLLCFCQAAALSQAMSGLQGRKMEWRLPRAVPIHGRRPLPLSLIHPQETGQVCLVKLQDQYGGVAVTLSPKSWGHRTAGTPWSPMRPQAPGQSRRVSLLLAPMLYPAQGQVLRHRLVRCSLKSKWMIGKKLVNESSGSSVSDGLPPFRSFFGRILFASTKCILTLLCGS

SEQ ID NO: 32654 - protein, 150 aa, Oryza sativa
MAATTCRLAAAPLVLAPLPRRPTTVAFAVAATGIKYGLRASRGVAIRAADGTGSETEVPEVVKAAQDAWAKVEDKYAVTAIGVAALVGLWTAIGAIKAIDRLPLLPGVLELVGIGYTGWFTYRNLIFQPDREALVSKIKSTYNEITGSSS

SEQ ID NO: 32655 - protein, 192 aa, Oryza sativa; identical to SEQ ID NO: 30571

SEQ ID NO: 32656 - protein, 138 aa, Oryza sativa
MAEEKHHHHLFHHKKDDEPATGVDSYGEGVYTSETVTTEVVAGGQDEYERYKKEEKQHKHKQHLGEAGALAAGAFALYEKHEAKKDPENAHRHKITEEIAATAAVGAGGYAFHEHHEKKKDHKSAEESTGEKKHHLFG

SEQ ID NO: 32657 - protein, 458 aa, Oryza sativa
MALHLLHLLAFSLLFAVATPIRDITDVCSSQIKDFQYLNSTGLHLELHHPRSPCSPAPVPADLPFTAVLTHDDARISSLAARLAKTPSARATSLDADADAGLAGSLASVPLSPGASVGVGNYVTRMGLGTPATQYVMVVDTGSSLTWLQCSPCLVSCHRQSGPVFNPKSSSTYASVGCSAQQCSDLPSATLNPSACSSSNVCIYQASYGDSSFSVGYLSKDTVSFGSTSLPNFYYGCGQDNEGLFGRSAGLIGLARNKLSLLYQLAPSLGYSFTYCLPSSSSSGYLSLGSYNPGQYSYTPMVSSSLDDSLYFIKLSGMTVAGNPLSVSSSAYSSLPTIIDSGTVITRLPTSVYSALSKAVAAAMKGTSRASAYSILDTCFKGQASRVSAPAVTMSFAGGAALKLSAQNLLVDVDDSTTCLAFAPARSAAIIGNTQQQTFSVVYDVKSSRIGFAAGGCS

SEQ ID NO: 32658 - protein, 53 aa, Oryza sativa; identical to SEQ ID NO: 32226

SEQ ID NO: 32659 - protein, 249 aa, Oryza sativa; identical to SEQ ID NO: 32242

SEQ ID NO: 32660 - protein, 224 aa, Oryza sativa
MAAPVTVYGPMISPAVARVAACLLEKDVPFQVEPVDMSKGEHKSPSFLKLQPFGQVPAFKDSLTTVFESRAICRYICDQYADSGNKTLMGRKEDGAVGRAAIEKWIEAEGQSFNPPSLAMAFQLAFAPFMGRATDMAVVEQNEAKLVKVLDVYEQWLGENQYFAGDEFSLADLVHMPNTDLLVRKTNKAGLFTERKNLARWWDEVSARPSWKKVVELQNVPRPS

SEQ ID NO: 32661 - protein, 225 aa, Oryza sativa
MAAPTAAALSTLSTASVTSGKRFITSSFSLSFSSRPLATGVRAAGARAARRSAASASTVVATIAVGDKLPDATLSYFDPADGELKTVTVAELTAGRKAVLFAVPGAFTPTCSQKHLPGFIEKAGELHAKGVDAIACVSVNDAFVMRAWKESLGLGDADVLLLSDGNLELTRALGVEMDLSDKPMGLGVRSRRYALLADDGVVKVLNLEEGGAFTTSSAEEMLKAL

SEQ ID NO: 32662 - protein, 44 aa, Oryza sativa
MCLGNLDGDFDYKEILQTCRSKLTIFETQLLKNGVYNRELGSHW

SEQ ID NO: 32663 - protein, 305 aa, Oryza sativa
MPQRHSKNNNDLAFFTYEEKRKLRYGTQRERLGKDSIKPFDACCLCLKPLIHPLCCPKGHTFCKECILECLLAQKKDIKRKLAAHEAQKKLEKEEEDEKRMLQKSKELDAFDQQNHGAVPQYHDRSGSEDKNGFHGANSVKVTSFEEEALRNMKAFWLPSATPEATAKVEAPSTDTICPEGQEKLKLKSLFPISFTEENTDQKNKKSVEKSYMCPSCKSTLTNTMSLVTISTCGHVFCKKCSDKFLVTDKVCLVCNKPCKERNFVPLEKGGTGFAAHDERLEARDFKHLGSGSGLGLVKPAPKNY

SEQ ID NO: 32664 - protein, 63 aa, Oryza sativa
MILVRGSQTLQRQRRFWGGSPGSFCVMAWCSWKMISGSASKCPRRTRPKLLHRIWRKMSLEHT

SEQ ID NO: 32665 - protein, 89 aa, Oryza sativa
MGKRKSAAKPPPKKRMDKLDTVFSCPFCNHGSSVECRIDMKNLIGEASCRICQENFSTTVNALTEPIDIYSEWIDECERVNNVEDDDGA

SEQ ID NO: 32666 - protein, 488 aa, Oryza sativa
MEISFEAWEGVQRHGQDIADRLAQGFTGLLQAQPPQFPWPAASHKRIPFEIDLPVVPFGASRGARAGKEFFPAAAVASVIDIGGRLGQAGVEIGASVGGAVQHAVRQLPLPFRSGQIRRRKLPPQPQAPSPAAAVGEAAVGLSVERAVDRCPLEAAAAAAAAATGSAAASTVSGAVGGDDVDEEDEGFGCEIGTFGNFKKSKGTVNVSASYNTRNHDIESSVVARGDLWRLEASRSSSTSGNDSSPLYLVQLGPLLFVRDSTLLLPVHLSKQHLLWYGYDRKNGVHSLCPAFWSKHRKWLMMSMVCLNPVACSFMDLQFPNGQLTYVAGEGITASGFLPLFGGLLQAHGKYPGETRVSFSCKNKQGTRFTPMFQWPDKSLSFGVTQALAWKRSGLMVRPSVQVSLCPTFGGNDPGVRAEVIHSLKEELNVMCGLSCSRHPSAFTALSIGRSKWNGQMGSSGVVVTLETPLNNIGRPSLSVQLNGGFEI

SEQ ID NO: 32667 - protein, 18 aa, Oryza sativa
MCSVLERAQINMFRQDIF

SEQ ID NO: 32668 - protein, 206 aa, Oryza sativa
MEDAFMALKFVRDIHDMMANRLQEQFAKDGSSSPANSRSFITLEKNGNTFELFPHEVSTDQITAIEQAYWSMASALSEADGIDYTDPEELELLVATLIDLDAMDGKKSVSLLAECSSSPDVNTRKALANALAAAPSMWILGNAGMGALQRLAQDSNYAVARAATRAINELTKQWELEEGDSLRFVLNQNMVSKETADDSAAADDTR

SEQ ID NO: 32669 - protein, 31 aa, Oryza sativa
MPTRIRSSLLLSRNSRSRRSCFLPCVHTIPD

SEQ ID NO: 32670 - protein, 476 aa, Oryza sativa
MGWRFALLLLHVLLCLVNGVSCGRTSSYVRTEYPSTDIPLESEWFAVPNGYNAPQQVHITQGDYNGKAVIVSWVTVAEPGTSEVLYGKNEHQYDQRVEGTVTNYTFYDYKSGYIHHCLVDGLEYNTKYYYKIGSGDSAREFWFETPPAIDPDASYTFGIIGDLGQTFNSLSTLQHYEKSEGQTVLFVGDLSYADRYQHNDGVRWDSWGRLVERSTAYQPWIWSAGNHEIEYRPDLGETSTFKPYLHRCHTPYLASKSSSPMWYAIRRASAHIIVLSSYSPFVKYTPQWTWLKYELKHVDREKTPWLIVLMHSPMYNSNEAHYMEGESMRAAFEKWFVKYKVDLVFAGHVHAYERSYRISNINYNITSGNRYPVPDKSAPVYITVGDGGNQEGLASRFSDPQPDYSAFREASYGHSILQLKNRTHAIYQWNRNDDGKHVPADNVVFHNQYWASNTRRRRLKKKHFHLDQIEDLISVF

SEQ ID NO: 32671 - protein, 287 aa, Oryza sativa
MVSIAKVARFPATSKEEWEEQCKLWPTSYHPPHDLDGVSGFKECELPSIFNCMRTALRLSEVGNAAVVVNPSTMQIIAKATDQTLQHDSLKSNKCAELNSDSPFSSLEVTEKKGSRLFLSNSNVSKCNSLNMEASCLNPWGWMKPRPSEQKSLPCEGGFPWHPLRHAAIVAIENAAERDKVMFPSIISSTKPNSDGNMEYYSVNESAKRLKVDRNDDKKIAHEAICDDLSETRPYLCTGFDIYLVWEPCSMCAMALVHQRFKRTSMLSQIQLLEHWAVSTDCTGRKV

SEQ ID NO: 32672 - protein, 185 aa, Oryza sativa
MDHINEITSYNGGDQGYLNEIFTWWHRIPKHMNFLKHFWEGDDDSAKAKKTELFGADPPILYVLHYLGMKPWLCFRDYDCNWNIPLMREFASDVAHARWWKVHDNMPEKLQSYCLLRSKLKAGLEWERRQAEKANLEDGHWRRNITDPRLTICYEKFCYWESMLLHWGEKNPTNNNPVPATISSS

SEQ ID NO: 32673 - protein, 197 aa, Oryza sativa
MNVMQHQQKGGHVFNMDGAGSGGSSTPLTAVYGSTKCGLRQFQASLLKESRRSKVGVHTASPGMVLTDLLLSGSSLRNKQMFNLICELPETVARTLVPRMRVVKGSGKAINYLTPPRILLALVTAWVRRGRWFDEEGRAVYAAEADRIRNWAESRARFSFTDAMEMYTENTWVSVFSLSVVCAFIILSSSGGPLPGT

SEQ ID NO: 32674 - protein, 217 aa, Oryza sativa
MDYCICGLWAANSLPTLYYVVIPSLGLVKGTPLFPQIMSPWATPFIYVFCVKTLYGLYEALLSGDTLKGWWNGQRMWMVKSITSYLYGFIDTIRKCVGMSKMSFEVTAKVSGHDEAKRYEQEILEFGSSSPEYVIIATVALLNFVCLVGGLSQIMAGVWNMPWNVFLPQAILCGMIVIINMPIYEAMFLRKDNGRIPTAVTLASIGFVMLAFLVPIV

SEQ ID NO: 32675 - protein, 22 aa, Oryza sativa
MLCSSYKRRLGCCIVYKVSGAS

SEQ ID NO: 32676 - protein, 447 aa, Oryza sativa
MENPKSIPHPEPRGVVVAAANHGSTNSSGGTFTSSSELANGSSKSSLSASFDSSSKLGNSLEFRFASVKGHGKNMCKDGEAGRVEDSGTSPAVAVSHGEPVIGLKLGKRTYFENVCGGQNVKSSSAASGVTCPSTVVKKMKVSQQSTQSSYCQVEGCKVDLSSAREYHRKHKVCEAHSKAPKVIVSGLERRFCQQCSRFHGLAEFDQKKKSCRRRLSDHNARRRKPQQEAISFGSSRLATMFYDARQQTDIYFGQSPFGQVRSNAISSCDNLGGFKFTEAKLPWMKPMKTIGLEDLNFSTLQMPGNVVSHTVHHHDFDGLIPFKGNTPKVLNQGVDPACAVVSSNSNGAPDLRRALSLLSSDSWGPADVQAGSQVHPGGVMPPLAVAAATVTAPTNPVSVMHALHPSTGGGGFWQDGDDPPPLDHASQAQAFMHPGNGSSSGYGHLH

SEQ ID NO: 32677 - protein, 380 aa, Oryza sativa
MADDLGPPTVLQKIHGQSMMFSKISPYSLMKNPALYNANTSYSVPLKSYNGMDGNNGFSSVTSVSPVFASAPKEKGLSGFMIDFMMGGVSAAVSKTAAAPIERIKLLIQNQDEMIKSGRLSHPYKGIADCFGRTIKDEGVIALWRGNTANVIRYFPTQALNFAFKDHFKRMFNFKKDKDGYWKWFAGNLASGGAAGACSLFFVYSLDYARTRLANDAKAAKKGGGRQFNGLVDVYRKTLASDGIAGLYRGFNISCVGIIVYRGLYFGMYDSLKPVVLVGNLQDNFLASFLLGWGITIGAGLASYPIDTVRRRMMMTSGEAVKYNSSLDAFKQIVAKEGAKSLFKGAGANILRAVAGAGVLAGYDKLQVVVFGKKYGSGGG

SEQ ID NO: 32678 - protein, 220 aa, Oryza sativa
MYPEVDLIGGNVVTIAQAQNLVASGVDGLRVGMGSGSICTTQEVCAVGRGQATAVYKVASYAKDHNVPVIADGGISNSGHIVKALSLGASTVMMGSFLAGSHEAPGTYEYKDGHRVKKYRGMGSLEAMTKGSDARYLGDTLKLKVAQGVVGAVADKGSVLRFIPYTMQAVKQGFQDLGASSLQSAHELLRSETIKLEVRTGAAQVEGGIHGLVSYEKKAF

SEQ ID NO: 32679 - protein, 167 aa, Oryza sativa
MDKFLYLLNFAECGSELLLVAYNGVSRSKLLVYRLADLVSGRIEPVTTIGDHALFLDERCLCVSLSNNKEGSKILPSDLSNSIICMHSLQVDPSSLDIFRFEQYDLGTGTWAPASDGDIFHKPPPSPHTLIHHIFTCCNRRYWNKGIMYCSKRQPIWLVKQELRFGA

SEQ ID NO: 32680 - protein, 592 aa, Oryza sativa
MPEANAGGRAAPAAEQRSKNTTEMDFFSEYGDSSRYKIQEIVGKGSYGVVCSAIDQHTGDKVAIKKIHNIFEHLSDAARILREIKLLRLLRHPDIVEIKHIMLPPSRRDFKDIYVVFELMDTDLHQVIKANDDLTKEHHQFFLYQMLRALKYIHTANVYHRDLKPKNILANANCKLKICDFGLARVAFNDTPTTVFWTDYVATRWYRAPELCGSFFSKYSPAIDTWSIGCIFAEILTGKPLFPGKNVVHQLDLMTDLLGTPSMDAISRIRNDKARRYLSSMRRKQPVPFSEKFPNVDPLALKLLQRLLAFDPKDRPTAEEALADPYFKGLAKVEREPSCQPISKMEFEFERRKVTKDDIKELIFREILEYHPQLLKDYMNGSENTSFLYPSAVDNFRRQFAILEENGGKSGALDRKHVSLPRATTVHSTSIPPNEGLDATSQVTQRIPTARPGRTVGPVLPFENPGAADPHSARRVVRNPMVPPAAANKSGYSYNLKSDYSDRQHQEELEKDRVQYRPAQHLMDAKVAPDTAPDIRSSQYYFTRSAPRTDLTDRAALQGSMLYGIAPFNGIAAVAGGYSKVGAVQYGVSRMY

SEQ ID NO: 32681 - protein, 93 aa, Oryza sativa
MHVIIETNRTTARIFPAVLDVENPEFKRKLDRMVEINKKIIAIGESDDIPLVKNLKRIPHVAALVSEIIAAYLMPPIESGSVDFAEFEPQLVY

SEQ ID NO: 32682 - protein, 212 aa, Oryza sativa
MACINTFQSCSVLKGAKINGTKIGGGRGSPTFRCRASTFMDGSLRLEIDENPEAIISGEWPENFSLLSYDDLHAYLQSQEAAAQADNQRVALLSEAMSAPVLVATAEQTLEEVECHFETVSGLPVIDASLRCVGVIVKSDRARASHGSKTKIAEVMTSPAITLPSDKTVMDAAALMLKKKIHRLPIVNQDRQVIGIVTRADVLRELEALLEV

SEQ ID NO: 32683 - protein, 266 aa, Oryza sativa
MVFGNGQKLSLSPENYLFRHSKVEGAYCLGVFQNGKDPTTLLGGIVVRNTLVTYDRHNEKIGFWKTNCSELWERLHISEVPSSAPSDSEGDMAPAPAPSGLPEFDVGLITVNMSINVTYPNLKPHLHELAELIAKELDIDSRQVRVMNVTSQGNSTLIRWGIFPAGPSNSMTNTTAMGIIYRLTQHHVQLPENLGSYQLLEWNVQPLSKRSWFRDHVVSILLGILLVVLLTLSALLVLIVWRKKFRGQAAYRPVDSAVPEQELQPL

SEQ ID NO: 32684 - protein, 318 aa, Oryza sativa
MAHGRAAAVRRPKSSSASSAGAAAERKRKRAAAAKTVSLKNQIRSTERLLRKDLPNDIRVAQEKKLEELKRQQELQNQLAIQRTVQLRDRKIKFFERRKIERMIRRLEKQQRSNADDASNKLSKLKEDLEYVRFFPKNEKYVSLFSGGNTPDMLEKRNKWRKQIKENLMAAAENGKDLEETASDDDTVDVSDDDFFMSGSSSDEEADDEWTDKSAKEPASSASGKAASGMSSDEKNQRQRDARVLMPPPRSLAPNRTRPGVKHVLSSSSNTSNSTSGGTFKNRRAANQPGDHNSNLSSNSDAHKPRRKRRHRKKKKLA

SEQ ID NO: 32685 - protein, 495 aa, Oryza sativa
MIAMTPLGLLLVLLVLCSSILVAHGGDAAAGAYMVIATSTMKPKTFCSGHKVAPGDVPSPNSTWAPLHHLYGPCSPAPSSANSTAADVAASMADMVDDDQRRADYIQKRLTGATDDKQPMAFSSRTSQYEKNGQYATNGGLGSVPHLKSLSTTATTNSAPDGTSAVTQTVIIDSGSDVSWVQCKPCPLPMCHRQRDPLFDPAMSTTYAAVPCTSAACAQLGPYRRGCSANAQCQFGINYGDGSTATGTYSFDDLTLGPYDVIRGFRFGCAHADRGSAFDYDVAGSLALGGGSQSLVQQTATRYGRVFSYCLPPTASSLGFLVLGVPPERAQLIPSFVSTPLLSSSMAPTFYRVLLRAIIVAGRPLAVPPAVFSASSVIDSSTIISRLPPTAYQALRAAFRSAMTMYRAAPPVSILDTCYDFTGVRSITLPSIALVFDGGATVNLDAAGILLGSCLAFAPTASDRMPGFIGNVQQKTLEVVYDVPAKAMRFRTAAC

SEQ ID NO: 32686 - protein, 342 aa, Oryza sativa
MMLLVACRRRLADEHPKIASFGDLGDAVFRGPGRLAVDTMLVLSQASFCVGYLIFISNTMAHLYPVFAPSSNALLSPKALFIWAMLPFQLGLNSIKTLTLLAPLSIFADVVDLGAMGVVLGEDVSVWLAKPPPVFAFGGLSAILYGIGVSVYAFEGIGMVLPLEAEAANKKKFGTTLGLSMGFIAVMYGLFGAMGYIAFGDATRDIITTNLGTGWLSAAVQLGLCINLFFTMPVMMHPVYEVAERLLHGKRYCWWLRWLLVLAVGLSAMYVPNFTDFLALVGSSVCVLLGFVLPASFHLKVFGAEMSWSGVLSDVLLVLLGLSLAVFGTYTSLLQIFHSSSA

SEQ ID NO: 32687 - protein, 402 aa, Oryza sativa
MESPLSHPAMVALSLLLLVALYLARRAVLGKKRRYPPVAGTMFHQLLNFGRLLEYHTELSRKYRTFRMLTPTCNYVYTVEPANVEHILKTNFANYGKGPMTHDVLEDLLGDGIFNVDGGMWRQQRKVASLEFSTRVLRDYSSAVFRDTAAELAGILERGPAAKGRERVDMQDLLMRATLDSFFRVGFGVNLGVLSGSSKEGLVFARAFDDASEQVLFRFFDLLWKVKRFLNISSEATMKQSIRTINDFVYSIIDRKIEQMSREQHEFAKKEDILSRFLLEREKDPGCFDNKYIRDIILNFVIAGRDTTAGTLSWFLYAVCKNQRVQDKIAREVRDATTGDRDVGVQDFSSFLTEDAINKMQYLHAALTETLRLYPGVPLVSTVVGLFFFRIRGQEDCYCCWS

SEQ ID NO: 32688 - protein, 377 aa, Oryza sativa
MADGEDIQPLVCDNGTGMVKAGFAGDDAPRAVFPSIVGRPRHTGVMVGMGQKDAYVGDEAQSKRGILTLKYPIEHGIVSNWDDMEKIWHHTFYNELRVAPEEHPVLLTEAPLNPKANREKMTQIMFETFNVPAMYVAIQAVLSLYASGRTTGIVLDSGDGVSHTVPIYEGYALPHAILRLDLAGRDLTDSLMKILTERGYSFTTSAEREIVRDIKEKLAYVALDYEQELETAKNSSSVEKSYELPDGQVITIGAERFRCPEVLFQPSMIGMEAAGIHETTYNSIMKCDVDIRKDLYGNIVLSGGTTMFPGIADRMSKEITALAPSSMKIKVVAPPERKYSVWIGGSILASLSTFQQMWISKDEYDESGPAIVHRKCF

SEQ ID NO: 32689 - protein, 55 aa, Oryza sativa
MLSLILMLVQRAVECSIRTEGVCIIPERRSQLISNVLLKLKRTPMEEHLISLSLK

SEQ ID NO: 32690 - protein, 64 aa, Oryza sativa
MIVLPAGMYHRFTLDSDNYIKAMRLFVGEPVWTPYNRPHDHLPARKEYVEKIINRGGTQAVEAR

SEQ ID NO: 32691 - protein, 139 aa, Oryza sativa
MAATALSSQVRLPMSLRVATAPAPARVSVLPASNKLGDRLRMQATYNVKLITPDGEVELQVPDDVYILGQAEEEGIDLPYSCRAGSCSSCAGKVVSGEIDQSDQSFLDDDQVAAGWVLTCHAYPKSDVVIETHKEDDLI

SEQ ID NO: 32692 - protein, 374 aa, Oryza sativa
MLGIARRRLGSGCALGQLMQALRPAAAAAAARTYSAAAKEMTVREALNSALDEEMSADPSVFLMGEEVGEYQGAYKISKGLLDKYGPDRVLDTPITEAGFTGIGVGAAYQGLRPVVEFMTFNFSMQAIDHIINSAAKSNYMSAGQINVPIVFRGPNGAAAGVGAQHSQCYAAWYAHVPGLKVLTPYSAEDARGLLKAAIRDPDPVVFLENELLYGESFPVSAEVLDSSFCLPIGKAKIEQEGKDVTITAFSKMVGYALQAAEILSKEGISAEVINLRSIRPLDRATINASVRKTNRLVTLEEGFPQHGVGAEICMSVVEDSFEYLDAPVERIAGADVPMPYAANLERMAVPQVEDIVRAAKRACYRAVPMAATA

SEQ ID NO: 32693 - protein, 195 aa, Oryza sativa
MARRVQLMDDLSVSEDSEDLDCKIKEAWEGAPLFSFDGNFVGMNLFLAMGRAFFLPWGTIQKHWASLQNKTGLPESNSLKVYRFGTSSTAEKSNSHPEVNNDILDPEQIHIDSMGYPKFPTHMFADGMILVNTFEETFGDLRGEGVWSKLSKKSCSNIDRSVVALASFSGERRFFACTGFFVEYKGWDWRPCCYS

SEQ ID NO: 32694 - protein, 145 aa, Oryza sativa
MGPSDPQPNWHLGMRGTQHRAVMWRVWKEGGTGFLYWGTNCYEKAMIPSAEICFRRGLPPGDGVLFYPGEVFSSSHEPVASTRLERILSGMQDIEYLKLYSSRYGREEGLALLEKTGVYLGPDRYALDHGPIDVMRGEVYRTCRS

SEQ ID NO: 32695 - protein, 353 aa, Oryza sativa
MAAAVVANGASGDSSKAAFAEIYSRLKEEMLEDPAFEFTDESLQWIDRMLDYNVLGGKCNRGISVIDSFKMLKGTDVLNKEETFLACTLGWCIEWLQAYFLVLDDIMDNSQTRRGQPCWFRVPQVGLIAVNDGIILRNHISRILQRHFKGKLYYVDLIDLFNEVEFKTASGQLLDLITTHEGEKDLTKYNLTVHRRIVQYKTAYYSFYLPVACALLLSGENLDNFGDVKNILVEMGTYFQVQDDYLDCYGDPEFIGKIGTDIEDYKCSWLVVQALERADENQKHILFENYGKPDPECVAKVKDLYKELNLEAVFHEYERESYNKLIADIEAHPNKAVQNVLKSFLHKIYKRQK

SEQ ID NO: 32696 - protein, 84 aa, Oryza sativa
MPPASLRHVPLSSALAIHEPLPSSSIASLPNIFRGVRGGKVLDPVMIRSTSTGRSSVNWRYDRSRWLTHKASLSSHCPRIGSPQ

SEQ ID NO: 32697 - protein, 301 aa, Oryza sativa
MGTLLISKIREEYPDRMMLTFSVFPSPKVSDTVVEPYNATLSVHQLVENADECMVLDNEALYDICFRTLKLATPTFGDLNHLISATMSGVTCCLRFPGQLNSDLRKLAVNLIPFPRLHFFMVGFAPLTSRGSQQYRALTVPELTQQMWDAKNMMCAADPRHGRYLTASAMFRGKMSTKEVDEQMLNVQNKNSSYFVEWIPNNVKPSVCDIPSHGLKMASTFIGNSTSIQEMFRRVSEQFTAMFRRKAFLHWYTGEGMDEMEFTEAESNMNDLVAEYQQYQDATADDEEEDYGDEEEDEVAA

SEQ ID NO: 32698 - protein, 79 aa, Oryza sativa
MSHSHNQVLYFQAQRKVRFQDNQANIMKEVPIGTNEKLVHDQRMKDDKNKDVDSVASDFIKLKHRAWALQKSASMYQPS

SEQ ID NO: 32699 - protein, 47 aa, Oryza sativa
MMSLSLSLERRSRRLQRRRSLRRRRKRRWKRRKSRPSFVHRRRLLLL

SEQ ID NO: 32700 - protein, 152 aa, Oryza sativa
MVKAVVVLGSSEIVKGTIHFVQEGDGPTTVTGSVSGLKPGLHGFHIHALGDTTNGCMSTGPHYNPAGKEHGAPEDETRHAGDLGNVTAGEDGVANIHVVDSQIPLTGPNSIIGRAVVVHADPDDLGKGGHELSKTTGNAGGRVACGIIGLQG

SEQ ID NO: 32701 - protein, 408 aa, Oryza sativa
MGSVGVAPSGLKNSSSTSMGAEKLPDQMHDLKIRDDKEVEATIINGKGTETGHIIVTTTGGRNGQPKQTVSYMAERIVGQGSFGIVFQAKCLETGETVAIKKVLQDKRYKNRELQTMRLLDHPNVVALKHCFFSTTEKDELYLNLVLEYVLETVHRVVKHYNKMNQRMPLIYVKLYMYQICRALAYIHNSIGVCHRDIKPQNLLVNPHTHQLKLCDFGSAKVLVKGEPNISYICSRYYRAPELIFGATEYTTAIDTWSAGCVLAELMLGQPLFPGESGVDQLVEIIKVLGTPTREEIKCMNPNYTEFKFPQIKAHPWHKVFHKRLPPEAVDLVSRLLQYSPNLRCTAVEALVHPFFDELRDPNARLPNGRFLPPLFNFKPHELKGIPSDIMAKLIPEHVKKQCSYAGV

SEQ ID NO: 32702 - protein, 312 aa, Oryza sativa
MRKKQPVPFSERFPKADPAALKLLQRLLAFDPKDRPTAEEALADPYFKGLAKAEREPSCQPITKMEFEFERRKVTKEDVKELIFREILEYHPQLLKDYMNGTEKTNFLYPSALDNFRRQFANLEENGGKNGDAVPSDRKHVSLPRTTTVHSAPIPPKDHQNITSQVPQRIPGRTGRGACPVIPFENLSAMGPYNQRRVVRNPVLPPATTNLSAYAYHRKSDSSERELQQELEKDRMRYQPSEHFMDAKVVSHMSHDLRASSYYVSKAKSDVADRAALQSNMMQGIGPFNGIAAVGGNYNKVSTVQYGVSRMY

SEQ ID NO: 32703 - protein, 79 aa, Oryza sativa
MTSTCSMSSRRPREAARRRRCLSSSPRRSQRATWGSTRRAVHAKARSHGWRYPMTTRTSSSFLILDEMLLCNSNAMQVM

SEQ ID NO: 32704 - protein, 273 aa, Oryza sativa
MPLLEIVRTEKTSPQAILDLITVGKMIKKVPVVVGNCTGFAVNRTFFPYTQGSHLLVSIGIDVFRIDRVISSFGMPMGPFQLQDLAGYGVALAVKDIYAAAFGTRNLDSNLVDLMVQNGRQGKSNGKGYYLYEKGGKPKPDPSVQVVIDEYRRCAKTMPGGKPVTLSDQDILEMIFFPVVNEACRVMDENVVIRASDLDIASILGMGFPKFRGGLVFWADTIGAPYIHSKLSKWTEIYGDFFKPSSYLEDRAKRSLPLSAPNATQQASSRSRM

SEQ ID NO: 32705 - protein, 33 aa, Oryza sativa
MIRPSNYPIRHQHFEGSNTLCIFVIYSFILPHR

SEQ ID NO: 32706 - protein, 361 aa, Oryza sativa
MDVEATKDVVHEQAAAPGRGRAARWLLVALNCGMLVVGTTGGPIPSRLYFSKGGHRKWLSAWLETAGWPLLLVPVSASYHSRRARDRGAPLFLTPRRVLLAGAVLGVLTGADDFVYAYGLAYLPVSTSAILISTQLAFTVFFACLIVRQRLTAATLNAVALLTIGAVVLGLHASKDRPAGVTTGKYWMGFFLTLGAAALYGLILPLVELAYKHAAGGGRAVTYALVMEMQLVMGFFATAFCTVGVIVNKDFQAIPREAKQYELGEARYYVVLVFNAVLWEFFFVGAVGVIFCVHTLLAGIIIAVFIPITEVLGVIFLHEKFSSEKGVALVLSLWGLASYSYGEYADAKAKKKAALEAEEAS

SEQ ID NO: 32707 - protein, 527 aa, Oryza sativa
MHSTNLLLEEPIRMASILEPSKPSFFPAMTKIVGTLGPKSRAVDTISSCLKAGMSVARFDFSWGDAEYHQETLENLKLAIKSTKKLCAVMLDTVGPELQVVNKSEAAISLEANGTVVLTPDQGQEASSELLPINFSGLAKALKPGATIFVGQYLFTGSETTSVWLEVSEVKGDDVVCVIKNSATLAGSLFTLHCSQIHIDLPTLSDEDKEVIRRWGAPNKIDFLSLSYTRHAEDVRQAREFLSKLGDLSQTQIFAKIENVEGLNHFDEILQEADGIILSRGNLGIDLPPEKVFLFQKSALHKCNMAGKPAVVTRVVDSMTDNLRPTRAEATDVANAVLDGSDAILLGAETLRGLYPVETISIVGKICAEAEKVFNQDLYFKRTVKYVGEPMTHLESIASSAVRAAIKVKASVIICFTSSGRAARLIAKYRPTMPVLSVVIPRLKTNQLRWSFTGAFEARQSLIVRGLFPMLADPRHPAESTSATNESVLKVALDHGKASGVIKSHDRVVVCQKVGDSSVVKIIELDD

SEQ ID NO: 32708 - protein, 325 aa, Oryza sativa
MIGEILEREKVGLEQFTATDGYDYEGGSNVLKMLGYYSMIGLLRVHCLLGDYHTGLKCLAPIDISQQGVYTTVIGSHISTIYHYGFASLMMRRYIDGIREFNKILLYILKCKQYHQNSPQYDQLLKKNEQMYALLAICLSLCPQDKLIDENVGTQLKEKYGDKMTKMHRYDDEAYAIYDELFSYACPKFITASPPVLREPYTNYNQDAYRLQLKLFLYEVKQQQLLSGIRSYLKLYSTITIGKLAKYMDVDEVTLRTILMTYKHKMHSIDSDGKVISSADFDFYIDEDIIHVVESKLTKNHGDYFLRQILKFEEMITQLDKVQFD

SEQ ID NO: 32709 - protein, 359 aa, Oryza sativa
MATAASLSATASSLLAPAPATTGAAAAQCCSSSSTALFPTPVPSLRAYYPRLLLAFRRPAVAAVADPQGAVLEEEQGEQQDEGQEQYDDDDYDDGYEGGRGPAFTPPTRPRTGKAALPLKRDRTRSKRFLEIQKLRESKKEHDVPTAISLVKQMASARFVESAEAHFRMNLDPKYNDQQLRATVNLPKGTGQSVKIAVLTQGEKIDQARAAGADIVGGDDLIDQIKGGFMEFDKLIASPDMMPKVAGLGKILGPRGLMPNPKAGTVSPNITQAIEEFKKGKVEYRVDKTGIVHIPFGKVDFPEEDLIANFMAVVRSVERNKPSGAKGVYWKTAYLCSSMGPSIKLNIKEMLDYGSESSD

SEQ ID NO: 32710 - protein, 136 aa, Oryza sativa
MVNLAEWGMKWQKRGELHQIVDQRVSGSIRPDSLRKFGETVEKCLADYGVERPSMGDVLWNLEYVLQLQDADSSTVSDVNSMNRIVELPSPVQNIGALESISVTMAEAGASHEPDHDLSDVSMSRVFSQLIKAEGR

SEQ ID NO: 32711 - protein, 240 aa, Oryza sativa
MEVIPMGQDISNTYENPSPMIVDEAMLEKVLGPPRFDDSEAADRVASPGVSVGLVWTSFGGEVQFVEATAMVGKGDLHLTGQLGDVIKESAQLALTWVRARAADLNLSPTSDINLLESRDIHIHFPAGAVPKDGPSAGVTLVTSLVSLFSHRKVRADTAMTGEMTLRGLVLPVGGVKDKVLAAHRYGIKRVILPERNMKDLAEVPAPILSGLEILLVKRIEEVLDHAFEGGCPLRPHSKL

SEQ ID NO: 32712 - protein, 402 aa, Oryza sativa
MASPMLSAATVPLQGGGLSEFSGLRSSSSLPLRRNATSDDFMNAVSFRTHAVGTSGGARRAPTEAKLKVAINGFGRIGRNFLRCWHGRGDSSPLDVIAINDTGGVKQASHLLKYDSTLGIFDADVKPVGDNAISVDGKVIKVVSDRNPSNLPWGELGIDLVIEGTGVFVDRDGAGKHIQAGAKKVLITAPGKGDIPTYVVGVNADQYSPDEPIISNASCTTNCLAPFVKILDQKFGIIKGTMTTTHSYTGDQRLLDASHRDLRRARAAALNIVPTSTGAAKAVALVLPNLKGKLNGIALRVPTPNVSVVDLVVQVSKKTLAEEVNQAFRDSAANELKGILEVRDVPLVSVDFRCSDVSCTIDAPLSMVMGDDMVKVIAWYDNEWGYSQRVVDLADIVANQWK

SEQ ID NO: 32713 - protein, 154 aa, Oryza sativa
MLVWTWSCTRLTIQMVHCPYMMSTEELLSEHRFLLLFRRINSCAALAIYLQEAMQLDTTVTSGLKYCQLMHSQHLKTLVWTMRRQLRKLADDSEKQSLRLEVENLHSRCLCLSADGSHHRKLCSGTTACYLLLHCDNSCSIVPFFFLLTCENGL

SEQ ID NO: 32714 - protein, 332 aa, Oryza sativa
MAKEPMRVLVTGAAGQIGYALVPMIARGVMLGADQPVILHMLDIPPATESLNGLKMELVDAAFPLLKGIVATTDVVEACTGVNVAVMVGGFPRKEGMERKDVMSKNVSIYKSQASALEAHAAPNCKVLVVANPANTNALILKEFAPSIPEKNITCLTRLDHNRALGQISEKLNVQVTDVKNAIIWGNHSSTQYPDVNHATVKTPSGEKPVRELVADDEWLNTEFISTVQQRGAAIIKARKQSSALSAASSACDHIRDWVLGTPEGTFVSMGVYSDGSYGVPAGLIYSFPVTCSGGEWTIVQGLPIDEFSRKKMDATAQELSEEKTLAYSCLN

SEQ ID NO: 32715 - protein, 116 aa, Oryza sativa
MISKLGSAQARCIPWPRDNLMHPSGQALHSKVSTIARHNSANQGNSVALTEVFKHNSIDNALQSVVGHKRKVHDLTPKENIGREDTHSRAKKIGKARPDSPYANFTNSQLLTTSRF

SEQ ID NO: 32716 - protein, 398 aa, Oryza sativa
MVPSQELQPKVDGLTDTSSLGNGNAILSERNKQTSQHQNPFSMPASHGKDTGAGLAAQTFPTKDAIVSNGVVPSSRDPISSEKVCGLQKSIKQDDKTVKELPISENNIVSGLERVNARKQTSSEVSMKVAAADSCNSNTPKRVDLKSKKLVRYPVMSMWLGPRQVMLGSLKVQKKKKCNRTRRRSVVCEDMANATCSGNNTSEQQASTSTTTSSETVQCTPRGRKRAYDSDSPKNNNQKQNKQDVIGADTGSGELNMDKRNVISETAASAELPKLGPGSSANQEHSRNNVHAKLGVPRHFTVLTRDLAEVTVPCWDDVAVSNAEARESKHSESKSIGYVLDEWDEEYDRGKTKKIRNSKEDYGGPNPFQEEANYISQRNMKQRTYQPKSWKKHAHVRR

SEQ ID NO: 32717 - protein, 393 aa, Oryza sativa
MVHHLRRHMISLLLRPAYPHPTAAISPLSSLRRLLLFSTTAAPVSPEPFAVEDYLVATWGLTGAQARKASKKLSHLRSPSKPDAVLAFLSDLGLPPRKIAAVATADPRFLCADVESNLARRVDELGGLGLSRSQIARLVPLALTCFRSSSVGTNLGFWLQIVGSFDKILKALRMNSSLLGSDLEKVVKPNLELLKQCGMSDFATSFPLYTSRLFTANPIYLRDAVARVEELGLDRSSRMFRHGLIAVAFTSKESVARKIQVMEELGFSRDELLMIIRKAPQLVASSEEKIRQAAEFLKRDVGLEGRYIAHRPVLFLYSLERRLLPQHHLLKVLRMKGLLDCELDYYNTAAMSERKFVRKFVDPYKCHIPGLADAYTSSCAGETANGVASLLGV

SEQ ID NO: 32718 - protein, 41 aa, Oryza sativa
MGSPCYLSIVVPSLDLLSFNIYKLRFGVEARLDQRSCIGKN

SEQ ID NO: 32719 - protein, 108 aa, Oryza sativa
MCAHAGMIGTTRPTHYHILHDEIGFSADDLQELVHSLSYVYQRSTTAISVVAPICYAHLAAAQVSQFIKFDEMSETSSSHGGHTSAGSAPVPELPRLHNKVRSSMFFC

SEQ ID NO: 32720 - protein, 158 aa, Oryza sativa
MFFLFIPRRCVHSCFTQERWGGSKRGEDSRGVDSDCRIAPTSDGRHDFMRTPIWACKYFMESLSSLLSNGSIPMSISDLEQLQSSFYCRVLFCPRCCVTSFGPNVLYIKLGPLGVRPRVRARHQHPCGRSPPLLIPLAAAKNTWALFRSKYSVATWPS

SEQ ID NO: 32721 - protein, 304 aa, Oryza sativa
MGGFVKTQKTNAYHKRFQVKFKRRRQGKTDYRARIRLTNQDKNKYNTPKYRFVVRFTNKDITAQIVYATIAGDIVMAAAYSHELPRYGLEVGLTNYAAAYCTGLLLARRVLKLRGLDQEYEGNIEATGEDYYVEPADERRPFRALLDVGLIRTTTGNRVFGALKGALDGGLDIPHSDKRFAGFKKDEKQLDSDIHRKYIYGGHVADYMRSMAEEEPEKFQAHFSEYLKKGIDADGMEALYKKVHAAIRADPTMAKSTKKEPATHKRYNLKKLTYEQRKASLVERLNALNSSAGADDDDEEEDDE

SEQ ID NO: 32722 - protein, 287 aa, Oryza sativa
MFKSTYEAITKGNPMWNELSVSASTLYPWDPTSTYIHEPPYFKDMTMSPPGPRPVKDAYCLLNFGDSITTDHISPAGSIHPDSPAARYLKERGVERKDFNSYGSRRGNDEIMARGTFANIRLVNKFLKGEVGPKTIHIPSGEKLSVFDAATKYKNEGHDTIILAGAEYGSGSSRDWAAKGPMLQGVKAVIAKSFERIHRSNLAGMGIIPLCFKSGEDADTLGLTGHERFTVHLPANVSEIKPGQDVTVTTDNGKSFTCTLRFDTEVELAYYDNGGILPYVIRKIAEQ

SEQ ID NO: 32723 - protein, 172 aa, Oryza sativa
MALETCFRAWATLHAPQPPSSGGSRDRLLLSGAGSSQSKPRLSVASPSPLRPASRFACQCSNVVDEVVVADEKNWDSMVLGSEAPVLVEFWAPWCGPCRMIAPVIDELAKEYVGKIKCCKVNTDDSPNIATNYGIRSIPTVLMFKNGEKKESVIGAVPKTTLATIIDKYVSS

SEQ ID NO: 32724 - protein, 202 aa, Oryza sativa
MAETVFTPSLEGMKHVKSESSVILTKPFLDVCKQILPVLDKFGAAMALVKSDIGGNITRLENKYSSDPSKYEQLYSMVQEEAQNKTAKGSSSCTNGLLWLTRAMDFLVELFRNLLEHQDWTMSQACTDSYTKTLKKWHGWLASSSFTVAMKLAPNREKFMEVISGTGDIKADIEKFCTTFYPFLKENHDFLASVGLDDLKAS

SEQ ID NO: 32725 - protein, 478 aa, Oryza sativa
MAGAAAASAAAAAVASGISARPVAPRPSPSRARAPRSVVRAAISVEKGEKAYTVEKSEEIFNAAKELMPGGVNSPVRAFKSVGGQPIVFDSVKGSRMWDVDGNEYIDYVGSWGPAIIGHADDTVNAALIETLKKGTSFGAPCVLENVLAEMVISAVPSIEMVRFVNSGTEACMGALRLVRAFTGREKILKFEGCYHGHADSFLVKAGSGVATLGLPDSPGVPKGATSETLTAPYNDVEAVKKLFEENKGQIAAVFLEPVVGNAGFIPPQPGFLNALRDLTKQDGALLVFDEVMTGFRLAYGGAQEYFGITPDVSTLGKIIGGGLPVGAYGGRKDIMEMVAPAGPMYQAGTLSGNPLAMTAGIHTLKRLMEPGTYDYLDKITGDLVRGVLDAGAKTGHEMCGGHIRGMFGFFFTAGPVHNFGDAKKSDTAKFGRFYRGMLEEGVYLAPSQFEAGFTSLAHTSQDIEKTVEAAAKVLRRI

SEQ ID NO: 32726 - protein, 382 aa, Oryza sativa
MAHGGGGRAKVTPNLAMDEEGTRVLNITVLQRLDPAVEDILITAGHVTLYDFDTNLNQWSRKDVEGSLFVVKRNAQPRFQFVVMNRRNTDNLVEDLLGDFEYQLQVPYIMYRNAAQEVIGIWFYNSQECEEVANLFSRILNAFSKATPKPKAPSIKSEFEELEAAPTLVEGPLEPQTSNIIPATTHVQEDPLSAFFSGAINVGSASGLSVAGQLNQSFGSTPLSSHAPTSISISQPPAVHHLLPSQTSSVISPDVHGGTGAVVNRSASLLNPSLFSPLTSSQTTMARTNPVAPTAPPQHPRITQQPHSAPLLQPFPLPTASPSPPYGTPLLQPFPPPNPSPSLASAPVYSPVLSREKVRDALLRLVENDDFIDLVYREIVKG

SEQ ID NO: 32727 - protein, 117 aa, Oryza sativa
MLRRVEPYVAYGYPNLKSVRELIYKRGYGKLNKQRIPLQNNKVIEEGLGKHDIICIEDLVHEIMTVGPHFKEANNFLWPFKLKAPLGGLKKKRNHYVEGGDAGNREDYINELIRRMN

SEQ ID NO: 32728 - protein, 552 aa, Oryza sativa
MATRRALSSLVRAASRLRGASPAPRPRGPLHRPSPSGYLFNRAAAYATAAAAKEAAPPAPATGKATGGGKITDEFTGAGAVGQVCQVIGAVVDVRFDEGLPPILTALEVLDHNIRLVLEVAQHLGENMVRTIAMDGTEGLVRGQRVLNTGSPITVPVGRATLGRIMNVIGEPIDEKGDITTNHFLPIHREAPAFVEQATEQQILVTGIKVVDLLAPYQRGGKIGLFGGAGVGKTVLIMELINNVAKAHGGFSVFAGVGERTREGNDLYREMIESGVIKLGDKQSESKCALVYGQMNEPPGARARVGLTGLTVAEHFRDAEGQDVLLFIDNIFRFTQANSEVSALLGRIPSAVGYQPTLATDLGGLQERITTTKKGSITSVQAIYVPADDLTDPAPATTFAHLDATTVLSRQISELGIYPAVDPLDSTSRMLSPHVLGEDHYNTARGVQKVLQNYKNLQDIIAILGMDELSEDDKLTVARARKIQRFLSQPFHVAEVFTGAPGKYVELKESVNSFQGVLDGKYDDLPEQSFYMVGGIEEVIAKAEKIAKESAS

SEQ ID NO: 32729 - protein, 305 aa, Oryza sativa
MAKDGGGPDWNGLLKWSLAHGDGTAKPRSLSEEDKKWFMEAMQANTMDVVKRMKEITQVMKTPDDVLQSQGVTPENIEDMLDELQEHVESIDMANALIRHNQPGVAAFRLGNGYSALRDALGSDDARLQRKALHLLQYLLHDNKADRSVATELGLPKLMMHLASSDDSGVREAALGGLLELARDNTSGAGNVLPDQDKLKDVLKSRIEGISTMDADDLSAHREERQLVDSLWKECYNEPSSLREKGLVVLPGEDAPQQPPPDVVGSMFEPPLRAWAASRPPPKEDSESESAKKDPPLLLGPGPSS

SEQ ID NO: 32730 - protein, 347 aa, Oryza sativa
MATAPSDVLAVELLQRECHVKTPLRVVPLFEKLADLESAPAAVARLFSIDWYRERINGKQEVMIGYSDSGKDAGRLSAAWQLYKSQEELINVAKEFGVKLTMFHGRGGTVGRGGGPTHLAILSQPPDTIHGSLRVTVQGEVIEQSFGEEHLCFRTLQRFTAATLEHGMHPPIAPKPEWRALLDEMAVVATKEYRSIVFQEPRFVEYFRLATPEMEYGRMNIGSRPSKRKPSGGIESLRAIPWIFAWTQTRFHLPVWLGFGSAFKHILEKDIRNLHMLQEMYNEWPFFRVTIDLVEMVFAKGDPGIAALYDKLLVSEELWPLGEKLRANCEETKQLLLQVAGQGSSRR

SEQ ID NO: 32731 - protein, 312 aa, Oryza sativa
MLDSFEPQAWTNSRCSNGSPEWDANKINSNLFTDGPLLGSKESLAYLDHLAASAKLAHSPLSLSPLSPKFMNRTKATGAQCRTMRDIEHHFLDSREKGGPDGIRMLSVLEETNILHDEYNVMTPKRSSCRRYQIWGPESTPTSPRVGYGRSLSLPVRRSLVGSFEESLLSGRLSYGKDNQIIDGFLAVLNITGGNFSPPTQKLPFAVTSIDEDSSLLYYSSIDLAGRSSATNCRSPKLERSLSNNDSRSAKSRLRIPVKGRIQLVVSNPEKTPLHTFFCSYDLTDMPSGTKAHLMDQRRKTQMQNVVRWTVT

SEQ ID NO: 32732 - protein, 520 aa, Oryza sativa
MEATSSSSSLLNGLNSGVVLSLIAVLWTVVWQNLQRLQLQTLVGRHMNRHARRLAALVDPYLSVTIHEYEGGRMKRSAAYEEVKAYLSASSARDVRHLRAEGAKDADKLVLSMVDGEEVSDVVAADDSTDVTVWWCAYSTPPPRTDGGGYYGWGGGGRAQENRRYYRLFFLDRHRELVINTYLPSIRRQGRAVMVQNRQRKLFTNISTHNWSDVDGLVRSAWSHVVFEHPKTFDTLAMDPAKKKEIMDDLDMFKNGKDYYARVGKAWKRGYLLHGPPGTGKSAMIAAMANYLDYDIYDIELTSVHSNTDLRKLFIETTSKSIIVIEDIDCSLDLTGARKKKKEAADDDDGGSKDGGAPPKPDMKKDASSKVTLSGLLNFIDGLWSACGGERLIVFTTNHVKKLDPALIRRGRMDKHIEMSYCCFEAFKFLAKTYLDVDSHRLFAAVDELLSEVDMTPADVAENLTPKSLDDNADTCLAALVKELEKAKENKSKGKNAHGEDKDEDEDEEDDDVEVVGKDK

SEQ ID NO: 32733 - protein, 332 aa, Oryza sativa
MASTASFMLAVLLAVAVAAAPARAVRCPPSDKQALMRVKQSLGNPATLSTWSLASADCCEWDHVRCDEAGRVNNVFIDGANDVRGQIPSAVAGLTALMSLSLFRLPGLSGPIPACLTALSNLQFLTISHTNVSGVIPDSLARIRSLDSVDLSHNSLTGPIPNSFSDLPNLRSLDLRSNKLTGCIPAGLVQGQFRSLILSYNQLTGPIPRDDAQDEINTVDLSHNRLTGDASFLFAAGRPIGKVDLSWNDLDFDLSKLVFPPELTYLDLSHNRIRGTVPRSLAALSTLQTLDLSYNRLCGPLPRLHGVIRHGCKPYEHNQCAGGAPLGGCHQS

SEQ ID NO: 32734 - protein, 351 aa, Oryza sativa
MAAAAPATAAVRRMKLGSQGLEVSAQGLGCMGMSAFYGPPKPEPDMVALIHHAVAAGVTLLDTSDIYGPHTNELLLGKALQGGVRDKVELATKFGIAFEDGKRDVRGDPAYVRAACEGSLRRLGVDSIDLYYQHRVDKKVPIEVTIGELKKLVEEGKIKYIGLSEASASTIRRAHAVHPITAVQLEWSLWSRDVEEDIIPTCRELGIGIVAYSPLGRGFFSAGAKLVESLSDQDFRKHIPRFQQENLEKNAEIFERVNAMAARKGCTPSQLALAWVHHQGSDVCPIPGTTKIENLNQNIGALSVKLTPEEMAELESYASTDDVRGDRYPQAMANTTWQNSETPPLSSWKAQ

SEQ ID NO: 32735 - protein, 263 aa, Oryza sativa
MVGSHVTIKVHGYCVNLDLDITFHLRPGKDDKKGRSIPGATDSKALLLNYNHLSGPLPVNIGFSKLSYLALANNRLTGAIPPSILHLQDSLLEVLLLNNQLSGCLPHELGMLTKAAVFDAGMNQLTGPIPSSFSCLTSVEQLNLGGNRLYGEIPDALCKLAAVPAGRLANLTLSSNYFTSVGPACLSLIKDGVLNVRNNCIPGFANQRRPAECASFHSQPKACPAASATHVACPAGAANAAAAPADRVVKDYSSYVTYATLHE

SEQ ID NO: 32736 - protein, 368 aa, Oryza sativa
MSQMSLEKRFGQSSVFVASTLMEYGGVPQSATPESLLKEAIHVISCGYEDKSDWGTEIGWIYGSVTEDILTGFKMHARGWRSIYCMPKRPAFKGSAPINLSDRLNQVLRWALGSVEILFSRHCPIWYGYGGRLKFLERFAYINTTIYPLTSIPLLLYCILPAICLLTGKFIIPEISNFASIWFISLFLSIFATGILEMRWSGVGIDEWWRNEQFWVIGGISAHLFAVFQGLLKVLAGIDTSFTVTSKASDEEGDFAELYMFKWTTLLIPPTTILIINLVGVVAGISYAINSGYQSWGPLFGKLFFAFWVIVHLYPFLKGLMGRQNRTPTIVVVWAILLASIFSLLWVRIDPFTTRVTGPDTQKCGINC

SEQ ID NO: 32737 - protein, 389 aa, Oryza sativa
MPRGNFSNEVAYAEITSREGISHIGRDILEPAANNAETDTVCIPEVGGPVSESGFSSSQRASERIMADLEAGEIAHGTSSTTIMSSERSDTSQSSLTSVLPATSTAPSTIGESLPDTVPSREDVPIFSGTQGEIGGNTLHDDMMSIFSNDGPARVRDSSSNEMRRSHRRVLWDTFSRRSSRGYLDSDTDDLGFYSRWLDLGDELFADEIEEARFFHRRRHGSIRVSQYSRSRIREHRRAVFDSGTDQSTVACPLGIHQIGRCTCDSFLIAEESSARASISRIVMLTEALFEVLDEIHRQPASLSLSMVSAQAPESVVNSLPCKSYKKQTAQCSDDMEQCHICLTEYEDGDQIRSLPCKHEFHLLCVDKWLKEVHRVCPLCRGDVCEGAA

SEQ ID NO: 32738 - protein, 195 aa, Oryza sativa
MASMAFTLVGAFKGMSLSSPCHSSSSASFLRADRVSLSVGGGVGMGVPMTMPVRRLTIQMAHKKGAGSTKNGRDSPGQRLGVKIYGDQVAKPGAIIIRQRGTRVYPGNNVGMGKDHTLFSLIDGLVKFEKYGPDKKKVSVYPYEKQPENPNSYRARKREYFRMQRERKKARAEGIVEVQLVLAAADESPEVNADC

SEQ ID NO: 32739 - protein, 294 aa, Oryza sativa
MSPAATMAVLLRPSTLLPSSQSTTTSRLRFPVATPLPRCRHGGAGKKSRLLVARRRGRRDRVACLPTKEEEEEEVGVAGDGGEEDGDEDGYLAREGEWGVRRMGRVGEEMRRVALVQAEAFHIPVALFNDFFFDFFKAEVLSALIYRVRNSPPDRYACLVAEEVGATSQISEAPFEKIVGVVDCTVQNEADILKNLQGVDEYLYVSGIAVLPSFRRRKVGTALLKACEALALQWRHRFMALRAYKDDDGARGLYSKAGYRVVAKDPGWVTWVGRRRRVLMIKELPIHEHHLEQQ

SEQ ID NO: 32740 - protein, 292 aa, Oryza sativa
MTTLTIMRTLPREVDPVVYNMLHEDPGNVSYSAVGGLSDQIRELRESIELPLMNPELFLRVGIKPPKGVLLYGPPGTGKTLLARAIASNIDANFLKIVSSAIIDKYIGESARLIREMFGYARDHQPCIIFMDEIDAIGGRRFSEGTSADREIQRTLMELLNQLDGFDELGKVKMIMATNRPDVLDPALLRPGRLDRKIEIPLPNEQARMEVLKIHAAGIAKHGEIDYEAVVKLAEGFNGADLRNVCTEAGMAAIRAERDYVVHEDFMKAVRKLNDAKKLESSAHYSADFGKE

SEQ ID NO: 32741 - protein, 242 aa, Oryza sativa
MALQDRVMEETKDKKNAVESYVYDMRNELYDKYNDFVTAEDKEAFIAKLQEVEDRLYEDGEDETKGVYVAKLEELKKVGGPIEARYKEWMDRGPSIDQLAYCINSFRDAALSKDPKFDHIEMEEKQKVINQCSEAEVWLREKIQQQDALPKHANPVLLSSDLKKKAETVDRFCKPIMMKPKPAPKPQTPPQTPPTETPAGGAQTPEQQPQGAEAAGEASEGGASESTGEQMETDKPEGTEAA

SEQ ID NO: 32742 - protein, 160 aa, Oryza sativa
MSFTTDKLRSLVKKWQTLIEAHVDVKTTDGYMLRLFCIGFTKRRPNQVKRTCYAQASQIRQIRRKMVEIMANQASSCDLKELVSKFIPEVIGKEIEKATSSIFPLQNVFVRKVKILKAPKFDLGKLMEVHGDYAKEDIGTKLDRPAEDEAMAGQEVAAAE

SEQ ID NO: 32743 - protein, 235 aa, Oryza sativa
MSSSRNPNPPPGSSSSGTNYFPLPLHLQQQPPQPPPMAMASTYQYQQYQQLQQAQQLFQRDAQTITPEALESVKAALATSDVLDPANARATATSSSDPAAKKKAIPRRAAGQSWEDPTLTDWPDNDYRLFCGDLGNEVNDDVLSKAFSRFPSFNMARVVRDKRTGKTKGYGFVSFSNPTDLAGAIKEMNGKYVGNRPIKLRKSNWKERTDVDALERQKNHIQKKPKMPKKSILHK

SEQ ID NO: 32744 - protein, 329 aa, Oryza sativa
MSWAAIENDPGIFTELLQQMQLKGLQVDELYSLDLDALNDLQPVYGLIVLYKWQPPEKDERPIKDPIPNLFFAKQIINNACATQAIVSVLLNSPGITLSEELKKLKEFAKDLPPDLKGLAIVNSESIRLASNSFARPEVPEEQKSSVKDDDVYHFISYVPVDGVLYELDGLKEGPISLGKCPGGVGDIGWLRMVQPVIQERIDRFSQNEIRFSVMAILKNRREKFTLELKELQRKRENLLAQMGDPSANRHAPSVEHSLAEVAAHIEAVTEKIIMEEEKWKKWKTENIRRKHNYVPFLFNFLKILEERQQLKPLIEKAKQKSHSSANPR

SEQ ID NO: 32745 - protein, 260 aa, Oryza sativa
MKLVGEDELSDEFIREMEFFMRFEEDGTFDWYFYPDYCWLAALNDYQRLVPINCVGEEYAYWDDYRGYFNSYHTELQYLDFCKALSKELKWMEDYVLNKLPSSKWGRICSRGAYQAIKIATRFSKITAALAYNAYYHMRFYVAYCKDMDSLYFEIWQRVNMQKKSFRDSLEEVYNLNKFPSRQDKMKDALENNCSHMETVFHVCTASVTSEIAEDKALELIAKAVESRMNKAKFYEQYIEKKIDIAQAIGLISTDGTEAT

SEQ ID NO: 32746 - protein, 138 aa, Oryza sativa
MVAAARNPVCNLSLMIGTTDIPDWCYAVACGSEGRQHASESPSPDHLRLFYQKSPIAHISKVKAPLLMLLGGADLRVPISNGLQYARALRERGGEIRIMMFPDDIHEINIPQSDFESFLNIGVWFKKHLSISASDASA

SEQ ID NO: 32747 - protein, 141 aa, Oryza sativa
MAATSLSPPTVAGLRLAPSPRVRSPSVAFRAAPARRRSVAARAELSPSLVISLSTGVSLFLGRFVFFNFQRENVAKQVPEQNGKTHFDAGDERAKEFAGLLRSNDPVGFNLVDVLAWGSLGHIVAYYILATCSNGYNPNFF

SEQ ID NO: 32748 - protein, 347 aa, Oryza sativa
MEKGDETLAYPAAAAGGQKTAPIGCFAGDDVAATTDGHPTKSYAAVAAEKTLPNGSVEEDEVTVTAAENPAKSYAAVVAEKTSPNGSVAEDEVTVTAAENRAKSYADVAAEKTYPNGNVEEDEVSVTAAVNPAKSYATVAAEKTVPDGSVAEDEVTVTAPVNPAKSYAAVAANAEIEDLRTTNHDLEEKLAAADREKKGRATEIDGLKDTSDKAKQNSVVFQYIASSSDAKVLALREELEDLQKLLQAEKDEFKADKRDSNQLAGKVGSERAVKMRLEEEVIAMKERARARAAAAAAAAAAEDERVAAPTPGTLQGARVAWPVMAGAAAVGAAAAAVAVVIFLRLKR

SEQ ID NO: 32749 - protein, 509 aa, Oryza sativa
MSQSSPFFSVARAHAGAGGRAAAAALLLRHPVAQLPPRIHGLRYYPSAIVSPAKTLNSHLSLPHATISSFANADNGSSGQADATESEEEQNGESELSEMAKAFHISPRMAMSISVVIAFAALTVPLAMQSVVFHGTNKMKALAYLTLLSGFYMAWNIGANDVANAMGTSVGSGALTLRQAVLTAAVLEFSGAFLMGTHVTSTMQKGILVASVFQGKDSLLFAGLLSSLAAAGTWLQVASSYGWPVSTTHCIVGAMVGFGIVFGGVNAVSWSSLARVSSSWVISPLMGAAVSFIVYKGIRRLGDLLSSEAEKIASADKANAQQVGFLSDIAGPTGAQLQIVYGVFGYMQVLSACFMSFAHGGNDVSNAIGPLAAALSILQGVASSAEIVIPTEVLAWGGFGIVAGLTMWGYRVIATIGKKITELTPTRGFAAEFAAASVVLFASKLGLPISATHTLVGAVMGVGFARGLNRVRAETVREIVASWLVTIPVGAVLSIFYTLLFTKVLAYFM

SEQ ID NO: 32750 - protein, 395 aa, Oryza sativa
MQELLNQGETEEFFTSYDEVHESFDDMGLQENLLRGIYAYGFEKPSAIQQSGIVPFCKGLDVIQQAQSGTGKTATFCSGILQQLDYAVVECQALVLAPTRELAQQIEKVMRALGDYLGVKVHACVGGTSVREDQRILASGVHVVVGTPGRVFDMLRRQSLRPDYIKMFVLDEADEMLSRGFKDQIYDIFQLLPSKIQVGVFSATMPPEALEITRKFMNKPVRILVKRDELTLEGIKQFYVNVEKEEWKLDTLCDLYETLAITQSVIFVNTRRKVDWLTDKMRGRDHTVSATHGDMDQNTRDIIMREFRSGSSRVLITTDLLARGIDVQQVSLVINYDLPTQPENYLHRIGRSGRFGRKGVAINFVTRDDERMLFDIQRFYNVVIEELPANVADLL

SEQ ID NO: 32751 - protein, 428 aa, Oryza sativa
MMTHRNVLATLSAVMTIVPEIGKKDVYLAYLPLAHILELAAEALIAAVGASIGYGSPLTLTDTSNKIKKGTLGDASALKPTLMTAVPAILDRVRDGVRKKVDTKGGVAKQLFDVAYNRRLAAVNGSWLGAWGLEKLLWDMLVFKKVRAVLGGKIRFVLSGGAPLSGDTQRFINICLGVPIGQGYGLTETCAGGTFSEYDDPSVGRVGAPLPCSYIKLIDWSEGGYLTSDSPMPRGEIVIGGPNVTKGYFKNEAKTNEVYKDDEKGMRWFYSGDIGRFHPDGCLEIIDRKKDIVKLQHGEYVSLGKVEAALIVSPYVENIMIHADPFHSYCVALVVAAHNELENWASQQGVTYTDFVDLCQKPEAVKEVLGSLSKAAKQARLEKFEIPAKIKLISEPWTPESGLVTAALKLKREVLRKTYEDDLAKLYA

SEQ ID NO: 32752 - protein, 261 aa, Oryza sativa
MAACCSSLATAVSSSSAKPLAGIPPAAPHSLSLPRAPAARPLRLSASSSRSARASSFVARAGGVDDAPLVGNKAPDFDAEAVFDQEFINVKLSDYIGKKYVILFFYPLDFTFVCPTEITAFSDRYDEFEKLNTEILGVSIDSVFSHLAWVQTDRKSGGLGDLKYPLISDVTKSISKSFGVLIPDQGIALRGLFIIDKEGVIQHSTINNLAIGRSVDETMRTLQALQYVQDNPDEVCPAGWKPGDKSMKPDPKGSKEYFAAI

SEQ ID NO: 32753 - protein, 394 aa, Oryza sativa
MASWSSPVAAAALQVHFGSSCFFSARSPRQTLLLPPLARNPTLTIQPRPHPFRNINSSSSSSWMCHAVAAEVEGLNIADDVTQLIGKTPMVYLNNIVKGCVANVAAKLEIMEPCCSVKDRIGYSMISDAEEKGLITPGRSVLVEPTSGNTGIGLAFIAASRGYKLILTMPASMSMERRVLLKAFGAELVLTDAAKGMKGAVDKATEILNKTPDAYMLQQFDNPANPKVHYETTGPEIWEDSKGKVDVFIGGIGTGGTISGAGRFLKEKNPGIKVIGIEPSESNILSGGKPGPHKIQGIGAGFVPRNLDSEVLDEVIEISSDEAVETAKQLALQEGLLVGISSGAAAAAAIKVAKRPENAGKLVVVVFPSFGERYLSSILFQSIREECEKLQPEP

SEQ ID NO: 32754 - protein, 120 aa, Oryza sativa
MYPNLDADTSPEALVDKVPKLIKQPMRNLYIATNEPFYNYFDKLRSYFHVHLLDDYKELWSNTSEWYNETTTLSGGRPVPFDAYMRVIVDTEVFYRAKTQVETFNNLTRDCKDGINTCNL

SEQ ID NO: 32755 - protein, 360 aa, Oryza sativa
MELLSFMYSGKLTSTDPTLLLDILMAADKFEVISCMRYCSQLLTSLTMTTESALLYLDLPCSISMAAAVQPLTDAAKEYLSNKYKDLTKFQDEVMNIPLAGIEAILSSNDLQVASEDAIYDFLIRWARAQYPKSEERREILSSRLLPLVRFSHMTCRKLRKVLICTDLDHEQATKCVTEALLYKADAPHRQRALAADVTTCQKFAERAYKYRPLKVVEFDRPYPQCIAYLDLKREECSRLFPSGRMYSQAFHLAGQGFFLSAHCNMEQQSTFYCFGLFLGMQEKGSMSVTVDYEFAARTRPSGEFVSKYKGNYTFTGGKAVGYRNLFAIPWSTFMADDSLFFLDGVLHLRAELTIKQPTV

SEQ ID NO: 32756 - protein, 89 aa, Oryza sativa
MAPWTGAKVLVPTKFIVGDGDLAYHLPGVKSYIHKGRLKKDVPMLEEVVVIKGAGHFIQQERAQEISDHIYNYIKKFNTGVSSPKSSRL

SEQ ID NO: 32757 - protein, 495 aa, Oryza sativa
MEGIHAGTVTMACSWLVLTAAMAVLASWLIRLVSLKWNSSHPCKAGEGSRLPPGSRGLPLLGESLEFFTSSTSLELPVFFKRRLNRYGPVFRTNMVGQDLIVCLDPEVNSFVFQQEERLFQCWYPDSFMRIIGADNIITTLGSSHKYIRNLILRLFGPENLRRAMLQDVHRTAQASLLSWLDRPSIELKDAVSSMIFSVTAKKLISYDSLASDGKMWKQFDAFIRGLLAFPIGIPGTAFYKCMQGRKNIMKMLKELIDERKEASGRRGSIDFIDVLLEELNEEKPLISENVALDLIFLLLFASFETTASAITAVVRFLTDNPEALQELAEEHDNIQKRRVDLNSEITWEEYKSMKFTSHVIHEALRLANIAPVMFRKATEDVHIKGFFIPKGSKIMICPSTVHLNPMIYKDPNIFNPWRWKDTAEPTGGASKDFMAFGGGLRLCVGADFAKLQTAIFLHCLVTKYRWKAIKGGTMVLGPGLRFPEGFHIQLFPKP

SEQ ID NO: 32758 - protein, 237 aa, Oryza sativa; identical to SEQ ID NO: 32347

SEQ ID NO: 32759 - protein, 404 aa, Oryza sativa
MNMDAFRFSIAWTRILPNGSLSGGINKEGVAFYNSLINDVIAKGMIPFVTIFHWDTPLALESKYGGFLSEDIVKEYVDFAEVCFREFGDRVKYWTTFNEPFTYSAYGYGKGVFAPGRCSSYVSKSCGVGDSSREPYLVAHHIHLSHAAAVQLYRTKYQPTQKGQIGMVVVTHWFVPYDNSDADRGAVQRSLDFIYGWFMDPIVHGDYPGTMRGWLGNRLPEFTPEQSAMVKGSYDFIGVNYYTTYYAKSIPPPNSNELSYDLDNRANTTGFRNGKPIGPQEFTPIFFNYPPGLRELLLYTKRRYNNPTIYVTENGIDEGNNSTLPEALKDGHRIEFHSKHLQFVNHAIKNGVNVKGYFTWTFMDCFEWGDGYLDRFGLIYVDRKTLKRYRKKSSYWIEDFLKRH

SEQ ID NO: 32760 - protein, 130 aa, Oryza sativa
MLIEDSGSSKDLKNLFTSAVDQPFLARSSNLALMQNSGTVTIKASFKEDIVRFRFPCSGSVTALKDEVAKRLRMDVGMFDIKYLDDDHEWVKLACNADLEECMEISGSHVIRLLVSDVAAHLGSSCGSSG

SEQ ID NO: 32761 - protein, 290 aa, Oryza sativa
MSQLVQSALDGYKVCIFAYGQTGSGKTYTMMGPPGRDQKGIIPRSLEQIFKTSQSLESQGWKYSMQASMLEIYNETIRDLLAPGRSNNFDLSTSKQYTIKHDPQGNTTVTDLTVADVFSSADVTSLLAKASQSRSVGRTQMNEQSSRSHFVFTLKISGSNENTGQQVQGVLNLIDLAGSERLAKSGSTGDRLKETQAINKSLSALSDVIFAIAKGDDHVPFRNSKLTYLLQPCLGGDSKTLMFVNISPEASSVGETICSLRFASRVNACEIGIPRRHTQARSFDSRLSYG

SEQ ID NO: 32762 - protein, 335 aa, Oryza sativa
MGSEYLAKLLSQHLEAVIRARIPSITSLINKTIDELESEMDHIGRPIASDAGAQLYLVLELCRAFEKIFREHLDGGRPGGDRIYGVFDNQLPSALRKLPFDRYLSLQNVKRVISEADGYQPHLIAPEQGYRRLIESALNYFRGPAEASVDAVHYVLKELVRKSIGETQELKRFPTLQAELAAACFHALERFREDGRKTTVRLVDMESAYLTVEFFRKLPQEVDKTGTGNPSTPSVDRYADAHFRRIASNVSSYIGMVSDTLKNTIPKAVVHCQVREAKRSLLNYFYTQVGRKDAKQLAQLLDEDPALMERRQQCFKRLELYKSARDEIDAVSWSR

SEQ ID NO: 32763 - protein, 440 aa, Oryza sativa
MASIVPVLLRLLLLLLPLPLIRDHLWPSHRRPTPQDDAGELHPIFLVPGASCSDLEARLTEAYRPSTAHCGAMKGKGWFGLWENNTELLVHDYADCSLEQMTLVYDPAANEYRNLPGVETRVPNFGSAWSFGYKNPVNRLQRAQCLGKLRDWLEELGYRDGDTMFGAPYDFRYAPPVPGQTSEVYSRYFSEFMALVEAATKKKQKKAVILGHSYGGMVALEFVRSTPRAWRDAHIERLVLVAPTLQDGFVGSVMKFITGTGIIFVPTATSTRPMWRSFESAMASFPSPAVFGREPLVVTKRRDYSACDMEDLLAALGFGEGVEPFRRRAVPRMYSLEAPMVPMTCINAVGNKTPLQLVLWDDDDDDLLDASPEVAAYGDGDGEINLISMLAFDTEMGRQPGQEKRFKSVKIANVNHSTIAIYDFALKRIIQEIIEVNQVR

SEQ ID NO: 32764 - protein, 273 aa, Oryza sativa
MAKNNPRGLPLSTDGEGLKRGTRVGEGALREVAAYILDHPVYGCKSCDVPGFSGVPPTALVRCFHMGKGSNKVGSLQLFVDNNGSCEDMGPRAFPVKEVQKIAILDIRLANADRHAGNILVCQDGEDHLKLIPIDHGYCLPEKFEDCTFEWLYWPQAREPFGPETAAYIGSLDADKDIALLKFHGWALSPQCARVLRISTMLLKKGAERGLTPYDIGSILCRQTVKKESEIEAIIEEAEDAILPGTSEETFLETISEIMDFHLDKLAVKLKKF

SEQ ID NO: 32765 - protein, 361 aa, Oryza sativa
MPLAGMALLQLREHCSLLPNPLRPARNPRKNRLLPPNSAKVPGFSRISIHGAPPAPEAAILEERVEVDVDVEAAVVPWRGAFLFPVAAAVVASWPLPSLAAEAGGKVSLESIVVAIDDFNNRNPFFVAGAVFVWLVAIPLVQEYFKKYKAVSAIDAFRKLRDEPGAQLLDIRRGKSVRFMASPNLRLVEKSAVQVEFDEEDEEGFVKEVLARFPDPANTVVCVLDNFDGNSMKVAELLFNNGFKEAYAIKGGLRGPEGWQAIQEKYLPPSVHVVPRKKSKESEDSDVSADGTDDQLEVNGKLLATPNSSVVNTGNGAEDSTEKPNGSTSAIKRASRRPLSPYPNYPDLKPPSSPTPSKPER

SEQ ID NO: 32766 - protein, 307 aa, Oryza sativa
MKGMGGTPFRRKEQASFLTKLLVLTRRSFLNMHRDIGYYWMRLGIYLGIGICLGTIFYQVGYSYSSIQSRCEVIMYTTALVTFMAIGGFPSFVEDIKLFRRERLSGHYGVMEFVISNTLSATPYLAVIAVIPGAMMYYLTGLTRGAEHFAYFVATLCMCTLLVESMMMIIAVIVPDFLMGIIIGAGIQGMMMLNGGFFRLPNELPKPVWKYPCYYISFHKYAVQGFYKNEFIGLSFPSDQLIEANATISGLQVLKERLQVEMGYSKWVNLAILFGMMVTYRMIFFVIVKIAEELRLKLRGIRFRRLK

SEQ ID NO: 32767 - protein, 460 aa, Oryza sativa
MYFSAEDRGEMMSMVYNWPADQVDMIVVTDGSRILGLGDLGVHGIGIAIGKLDLYVAAAGINPQRVLPVMIDVGTNNEKLLKDPLYLGLQEHRLEGEEYVAIIDEFMEAVFARWPNVIVQFEDFQSKWAFRLLQRYRKTYRMFNDDVQGTAGVAIAGLLGAVRAQGRPMLDFPKQKIVVAGAGSAGIGVVNAASRTMARMLGNNEVAFESARSQFWIVDAHGLITEERTNIDPDARPFARRKSELGHQGLSEGASLVEVVKKVKPDVILGLSAVGGLFSKEVLEALKDSSSSRPAIFAMSNPTKNAECTPEEAFSILGEKIIFASGSPFSDVDLGNGKIGHSNQGNNMYLFPGIGLGTLLSGARVISDGMLQAAAERLASYMKEEEVLEGIVYPPISRIRDITKEVAAAVVKEAVAEDLAEGYRDMDARELARLSEEETVEYVQQNMWSPVYPTIVYKKD

SEQ ID NO: 32768 - protein, 317 aa, Oryza sativa
MASATNSSLSLMLLVAAAMASVASAQLSATFYDTSCPNALSTIKSVITAAVNSEARMGASLLRLHFHDCFVQGCDASVLLSGQEQNAGPNVGSLRGFSVIDNAKARVEAICNQTVSCADILAVAARDSVVALGGPSWTVLLGRRDSTTASEALANTDLPAPSSSLAELIGNFSRKGLDATDMVALSGAHTIGQAQCQNFRDRIYNETNIDSAFATQRQANCPRPTGSGDSNLAPLDTTTPNAFDNAYYSNLLSNKGLLHSDQVLFNGGSADNTVRNFASNAAAFSSAFTTAMVKMGNISPLTGTQGQIRLSCSKVNS

SEQ ID NO: 32769 - protein, 58 aa, Oryza sativa
MRTVKGAPSAIAVNKRKREDGKPKVISKEEEAALKAREAARKRMEDREKPLMGLYRSY

SEQ ID NO: 32770 - protein, 305 aa, Oryza sativa
MQGGLEFKTEIELLSRVHHKNLVGPVGFCFEKGERMLVYEFIPNGTLSEALYGIKGVQLDWSRRLKIALDSARGLAYLHDHADPPIIHRDVKSTNILLDERMTAKVADFGLSLLVSDSEEGQFCTNVKGTLGYLDPEYYMTQQLTAKSDVYSFGVVLLELIVAQPPIHKQKYIVREVKTALDMGDQTYCGLKDVMDPVLQKTGDLRGFARFLKLALQCVEDLGTDRPSMNTIVREIEVIMQDNGIRTGMSSTSSSFSIDSRTMMAAPKYPYSNASTSSTAFDMDSRAFEYSGKFPSEGSLKNRGT

SEQ ID NO: 32771 - protein, 101 aa, Oryza sativa
MMERVFGPLPCHMLKRADRHSEKYVRKGRLNWPEGCASRDSMKAVMKLPRLQNLVMQNVDHSGGEFIDLLQGLLRYDPASRLTAQEALRHPFLREQSERRR

SEQ ID NO: 32772 - protein, 451 aa, Oryza sativa
MHDLKSELEGYNTGDSDDINKKKALDALNRMEKWNLFKDVPEEHHSYTVARDSFLAHLGSVLWGSMSHVIAPSVSHRAHHYYDKLSFQLYFVTQEKVRNMKQFPVNVKSVTEGLSSVLLQFQKPMFSQRMLSLSEDPALMMAFSMARRAAAVPLLLVNGTYKSTVHTYLDSAILQHQLQRLSEHNSLKGGHSNHRSTLEIPIFWFIHSEPLLLDKHYQAKSLSNMVVVVQSEVDSWESHLQCNGRSILWDLRRPVKAAIAATAEYVSGLLPSHLAYSPAHETATEDWTWSVGCNPLSITSKGWQLSEFQRDVIARNYIITAVEESIQIINSAIQQLITERTSERGFKLFKAQERVLVEKYNSVVSLWRRVSAMSKGLRYGDAVKLTSMLEEASHGFANAVNSTISSLHPVQCTRERKVDVQLDLTTIPAFLAVFLLLWFLLRPRRPKPKIN

SEQ ID NO: 32773 - protein, 30 aa, Oryza sativa
MRAFWEIKLFFLLICDAAPVILHILRDRIA

SEQ ID NO: 32774 - protein, 41 aa, Oryza sativa
MVAMLGFIVQASVTHVGPIDNLLTHLSDPFNKNIIHTLSSS

SEQ ID NO: 32775 - protein, 393 aa, Oryza sativa
MSSDDEVREEKELDLSSSDVVTKYKDAADIINNALKLVVSLCKPKAKIVDICEKGDSYIREQTGNIYKNVKRKIERGVAFPTCVSVNNTVCHFSPLATDEAVLEENDMVKIDMGCHIDGFIAVVAHTHVIHDGAVTGKAADVLAAANTAAEVALRLVRPGKKNKDVTEAIQKVAAAYDCKIVEGVLSHQLKQFVIDGNKVVLSVSNADTKVDDAEFEENEVYAIDIVTSTGEGKPKLLDEKQTTIYKRAVDKNYHLKMKASRFIFSEISQKFPIMPFTARALEEKRARLGLVECMNHELLQPYPVLHEKPGDLVAHIKFTVLLLPSGSQRVTSHSLQELQPTKSIEDNAEIKAWLALGTKTKKKSGAKKKKGKKGDAAEAVPMEEGSNDANKE

SEQ ID NO: 32776 - protein, 314 aa, Oryza sativa
MAFTMPGLYRVVHGIDVFDPKFNIVSPGADMSIYFPYSESRKRLTSLHPEIEELLYSEVDNNEHKFMLKDRNKPIIFSMARLDRVKNLTGLVELYGRNPRLQELVNLVVVCGDHGNPSKDKEEQAEFKKMFDLIEQYNLNGHIRWISAQMNRVRNGELYRYICDTKGAFVQPAFYEAFGLTVVESMTCGLPTFATAYGGPAEIIVNGVSGFHIDPYQGDKASALLVEFFEKCREDPSHWTKISQGGLQRIEEKYTWKLYSERLMTLTGVYGFWKYVSNLERRETRRYLEMLYALKYRTMASTVPLAVEGEPSNK

SEQ ID NO: 32777 - protein, 316 aa, Oryza sativa; identical to SEQ ID NO: 32299

SEQ ID NO: 32778 - protein, 221 aa, Oryza sativa
MALPNQGTVDYPSFKLVIVGDGGTGKTTFVKRHLTGEFEKKYEPTIGVEVHPLDFTTNCGKIRFYCWDTAGQEKFGGLRDGYYIHGQCAIIMFDVTSRLTYKNVPTWHRDLCRVCENIPIVLCGNKVDVKNRQVKAKQVTFHRKKNLQYYEISAKSNYNFEKPFLYLARKLAGDPNLHFVEAVALKPPEVPIDLAMQQQHEAELAAAAAQPLPDDDDDLIE

SEQ ID NO: 32779 - protein, 251 aa, Oryza sativa
MGSKSYPTVSDEYLAAVGKAKRKLRGLIAEKNCAPLMLRLAWHSAGTFDVSSRTGGPFGTMKNPGEQSHAANAGLDIAVRLLDPIKDQLPILSYADFYQLAGVVAVEVTGGPEVPFHPGRQDKPEPPPEGRLPDATQGSDHLRQVFSAQMGLSDKDIVALSGGHTLGRCHKERSGFEGAWTSNPLIFDNSYFTELVSGEKEGLLQLPSDKALMADPAFRPLVEKYAADEDAFFADYAEAHLKLSELGFAEE

SEQ ID NO: 32780 - protein, 433 aa, Oryza sativa
MNRGHISSSELIDAKLEERRISTAKHCPSCGNKLDCKPDWVGLPAGVKFDPTDQELIEHLEAKVREEGSRSHPLIDEFIPTIEGEDGICYTHPEKLPGVTRDGLSKHFFHRPSKAYTTGTRKRRKIQTECDVQKGETRWHKTGKTRPVMVSGRQKGCKKILVLYTNFGKHRKPEKTNWVMHQYHLGDLEEEKEGELVVCKIFYQTQPRQCSWSSDRGGGAAATASAVTTAAVQQDQQRRRDSGSGSCSSTRDHEVSATSYSTAGYAVAAAVEMQHLKHAADHFSFAPFRKSFEEVGISGDQVHSNQLGRSEQQHAGQEQQPHRPLLATTTAVPATAFLISRPTNPVSNIVPPAMQHASVVLDHDQFHVPAILLHHDKFQQQQQKLDRRSAGLEELIMGCTSSSTKGEASIPHSQETEWPYQPYWTPDNQDHHG

SEQ ID NO: 32781 - protein, 227 aa, Oryza sativa
MDATLLRSADAAVAVRSTTTAPPPRPRLHRPSTLPLPSSCACGPLRAYAAPAAPAPAAHNNGVYTVGDFMTKRPNLHVVTPATSVDEALETLVQHKISGFPVVDDTGKLVGVVSDYDLLALDSISGSGLTGTNTSMFPEVDSTWKTFREIQRLLSKTNGKVIADVMTYSPLAVRESTNLDAATRLLLETKYRRLPVVDSTGKLVGMITRGTVVRAALKIKKTAEETA

SEQ ID NO: 32782 - protein, 227 aa, Oryza sativa; identical to SEQ ID NO: 32294

SEQ ID NO: 32783 - protein, 494 aa, Oryza sativa
MPGAAGYSGSVKLKYVKLGYQYLVNHFLTLLLVPVMAATALELARMGPGELLSLWRSLQLDLVHILCSVFLVVFVGTVYFMSRPRPVYLVDYSCYKPPPSCRVPFATFMEHTRLITDDEKSVRFQTRILERSGLGEETCLPPANHYIPPNPSMEASRAEAQLVIFSAIDDLVRRTGLKPKDIDILVVNCSLFSPTPSLSAMIINKYKLRSNIRSFNLSGMGCSAGLISLDLARDMLQVHPNSNALVVSTEIITPNFYWGTRRDMMLPNCLFRMGAAAILLSNRRREARRAKYRLMHVVRTHKGADDRAYRCVYEEEDEQGHSGISLSKELMAIAGDALKSNITTIGPLVLPMSEQLLFFFRLVGRKLINKKWKPYIPDFKLAFEHFCIHAGGRAVIDELQKNLDLSAQHVEASRMTLHRFGNTSSSSLWYELAYIEAKGRMRRGDRVWQIGFGSGFKCNSAVWKCLRTVKTPADGPWDDCIHRYPVDIPEVVKL

SEQ ID NO: 32784 - protein, 375 aa, Oryza sativa
MLASTCFSAPPPSSSSPSIPTHLATLCCCFRPPARPPWPRSLLLLGAFPPPTRPLPRASVSSSTAPAKDYEFTDGGGEVELRLDIGKLGIENSRDVFVDVDDTSLLVRAKSDGTLRTLINVKQLFDRIKSSETIWFIDEDQLVVNLKKVEQELKWPDIDESWESLTSGITQLLTGISVHIVGDSTDINEAVAKEIAEGIGYLPVCTSELLESATEKSIDKWLASEGVDSVAEAECVVLESLSSHVRTVVATLGGKQGAASRFDKWQYLHAGFTVWLSVSDASDEASAKEEARRSVSSGNVAYAKADVVVKLGGWDPEYTRAVAQGCLVALKQLTLADKKLAGKKSLYMRLGCRGDWPNIEPPGWDPDSDAPPTNI

SEQ ID NO: 32785 - protein, 369 aa, Oryza sativa
MGEITNVMEYQAIAKQKLPKMIYDYYASGAEDEWTLKENREAFSRILFRPRILIDVSKIDMSATVLGFKISMPIMIAPSAMQKMAHPDGEYATARAASAAGTIMTLSSWATSSVEEVASTGPGIRFFQLYVYKDRNVVEQLVRRAERAGFKAIALTVDTPRLGRREADIKNRFVLPPYLTLKNFEGLDLAEMDKSNDSGLASYVAGQIDRTLSWKDVKWLQSITSLPILVKGVITAEDARLAVHSGAAGIIVSNHGARQLDYVPATISALGEVVTAAAGRIPVYLDGGVRRGTDVFKALALGAAGVFIGRPVVFALAAEGEAGVRNVLRMMREEFELTMALSGCTSLADITRAHIYTDADRLARPFPRL

SEQ ID NO: 32786 - protein, 449 aa, Oryza sativa
MATAAAAARALLLLIAVAGALLRPAAAEIKQESFKDDSRASILFEKFGFSRRGFVSIAITGARTSSKLAKAEPDQFGFFLLSDEALFEAIYEQPPPTDLNPNPEPNPGCVLSSPYVKPLFSFADLDGNGNYKKTFPVTQPDEYSLFFANCAPETAVTMEVRTDMYNTNLDGSKDYLSVGQAPVPAIYAFFTVCYLVFLAVWLYVTLYRNRLSAHRIHHLMSGLLAARMLYCISAAEDQHYIRIAGTPHGWDVMFYLFQLVKGVILFAVIALIGTGWSFLKPFLQDKEKKVLMVVIPLQVAANIAAAVVGETGPFLQGWVTWNQIFLFVDVACCCAVLFPVVWSMRSLRESSKTDGKAARTLAKLTLFRQFYVVVIGYLYFTRIIVYALKTITNYKYRWVSVAAEEVATVAFYLFMFYMFRPAERNQYFALDEDEEEAAELALREEEFEL

SEQ ID NO: 32787 - protein, 266 aa, Oryza sativa; identical to SEQ ID NO: 32147

SEQ ID NO: 32788 - protein, 301 aa, Oryza sativa
MAGGGGAGSKVSVAAVQFACTDVESENVDTAERLIREAHKKGANIVLVQELFEGQYFCQAQRLDFFQRAKPYKGNPTIIRFQKLAKELEVVIPVSFFEEANNAHYNSVAIIDADGTDLGLYRKSHIPDGPGYQEKFYFNPGDTGFKAFKTKYATIGVGICWDQWFPECARAMVLQGAEILFYPTAIGSEPQDNNLDSREHWKRVMQGHAGANLVPLVASNRIGRETVETEHGESTITFFGNSFIAGPTGEIVKLANDKDEDVLVAEFDLDEIKSTRHGWGIFRDRRPDLYKVLLTLDGEKS

SEQ ID NO: 32789 - protein, 245 aa, Oryza sativa
MATTTTTTISSSLITPPAAALHHRSSSCRCPSRLTVGAARWWARRRQPAVVVRVVASSSVLEAPEEVAARKLYVGNIPRTVTNDELAAMFADHGTVERAEVMFDKYTGRSRRFGFVTMSTPEEANAAIESLNETEVGGRKIKVNVTESFLPNIDRSAPEPEPVFVDSQYKVYVGNLAKSVTTEMLKNFFSEKGEVLSATVSRIPGTAKSKGYGFVTFSSEEEVQAAVSTFNNAELEGQPIRVNKA

SEQ ID NO: 32790 - protein, 213 aa, Oryza sativa
MAPPPPCCVLVVRCCSGSLPSPPPPPPPRPSPSNNLRIARREFVLRSSELATLAAIFHLSGTKPRYLGVQKSPPSLALCPATNNCVSTCEDITDSIHYAPPWNYNPKDGRRAKPITKHEAINQLIQVVTQTKPDNFTPRLVEKTDDYVRVEYESPIFGFVDDVEFWFPPGNKSIVQYRSASRSGFIDFNANKKRVKALRLALENKGWASESTI

SEQ ID NO: 32791 - protein, 173 aa, Oryza sativa; identical to SEQ ID NO: 30624

SEQ ID NO: 32792 - protein, 179 aa, Oryza sativa
MIMVEGVSQFCTDLQVDPQDIVMLVISWHMKAATMCEFTRQEFIGGLQSIGVDSIEKLREKLPSLRAEIKDDHKFREIYNFAFAWAREKGQKSLALETALGMWQLLFAERHWPLIDHWCQFLQVRHNKAISRDTWSQLLEFVKTIDPQLSNYDEEGAWPYLIDEFVEYLTENGFVQLRK

SEQ ID NO: 32793 - protein, 316 aa, Oryza sativa; identical to SEQ ID NO: 30651

SEQ ID NO: 32794 - protein, 358 aa, Oryza sativa
MSAYCGKYKDELIKNAAYIGTPGKGILAADESTGTIGKRFASINVENVEENRRSLRELLFTTPGALQHLSGVILFEETLYQKTKDGKPFVDVLKEGGVLPGIKVDKGTVEVAGTNKETTTQGHDDLGKRCAKYYEAGARFAKWRAVLKIGPNEPSQLSIDLNAQGLARYAIICQENGLVPIVEPEILVDGSHDIERCAYVTEKVLAACYKALNEHHVLLEGSLLKPNMVTPGSESKKVSPQLIAEYTVRALQRTVPAAVPAIVFLSGGQSEEEATVNLNAMNKLSTKKPWALSFSFGRALQQSTLKAWGGKTENVVKAQKAFITRCKANSEATLGTYQGDAVLGEGASESLHVKDYKY

SEQ ID NO: 32795 - protein, 120 aa, Oryza sativa
MVYDVTRRETFTNLSDIWAKEIDLYSTNQDCIKMLVGNKVDKESERAVTKKEGIEFAREYGCLFLECSAKTKVNVEQCFEELVLKILDTPSLLADASSGAKKNIFKQKPPEADAAASSCC

SEQ ID NO: 32796 - protein, 275 aa, Oryza sativa; identical to SEQ ID NO: 32323

SEQ ID NO: 32797 - protein, 287 aa, Oryza sativa
MEHKIGQGGFGSVYYAELRGEKTAIKKMGMQATQEFLAELKVLTHVHHLNLVRLIGYCVENCLFLVYEFIDNGNLSQHLQRTGYAPLSWATRVQIALDSARGLEYLHEHVVPVYVHRDIKSANILLDKDFRAKIADFGLAKLTEVGSMSQSLSTRVAGTFGYMPPEARYGEVSPKVDVYAFGVVLYELLSAKQAIVRSSESVSESKGLVFLFEEALSAPNPTEALDELIDPSLQGDYPVDSALKIASLAKSCTHEEPGMRPTMRSVVVALMALTANTDLRDMDYHPF

SEQ ID NO: 32798 - protein, 254 aa, Oryza sativa
MASTSCFLHQSTARVAARVASPSPATRTHLLVCRAQKQDDADVSRRAALALLAGATAAVGVKVAPAAAAYGEAANVFGKPKTNTEFIAYSGEGFKLLIPSKWNPSKEREFPGQVLRYEDNFDANSNVSVIINPTTKKTITEFGSPEEFLAQVDFLLGKQAYSGKTDSEGGFESDAVATANILESSAPVVGGKQYYSVTVLTRTADGDEGGKHQLITATVNDGKLYICKAQAGDKRWFKGARKFVESAASSFSVA

SEQ ID NO: 32799 - protein, 258 aa, Oryza sativa
MAPKRGGRAPVPAKKKTEKVTNPLFEKRPKQFGIGGALPPKKDLHRFVKWPKVVRIQRQRRILKQRLKVPPALNQFTRTLDKNLATNLFKMLLKYRPEDKAAKKERLLKRAQAEAEGKTVEAKKPIVVKYGLNHVTYLIEQSKAQLVVIAHDVDPIELVVWLPALCRKMEVPYCIVKGKARLGSIVHKKTASVLCLTTVKNEDKLEFSKILEAIKANFNDKFDEVRKKWGGGVMGSKSQAKTKAREKLLAKEAAQRMT

SEQ ID NO: 32800 - protein, 337 aa, Oryza sativa
MSSSSNSDSGKKGGNPLEAMGAFFSSQVNRRKLVTSEKQALATRLSAGGEAFPGSEHRPADRKTWMAELGPERLRVHQLVWPGTHDSATNKIGIPFVTRPFAQCQSLSVYEQLAAGARVIDVRVQEERRVCHGVLATYSVDVVLDDVRRFLGETASEVVILEVRTEFGHDDPPEFGRYLVEQLGEHLIPQDEAVFHKTIAELLPRRLICVWKPRKSPAPKPGEPLWSAGYLRDNWIDTDLPETKFESNVKFLGEQPPVADRRFFYRVENTVTPQADNPVLCVRPVTRRIHGYARLFIAEVFAKGLGDKLQVFSTDFIDGDFVDACAGVTKARVDGAA

SEQ ID NO: 32801 - protein, 396 aa, Oryza sativa; identical to SEQ ID NO: 32361

SEQ ID NO: 32802 - protein, 118 aa, Oryza sativa; identical to SEQ ID NO: 31576

SEQ ID NO: 32803 - protein, 264 aa, Oryza sativa
MDGHSCGDLGRVSEVISDGTSSGSADGGKSLPEKHSALADATSGVAAENADNLSQAGKYMDFSSTTSLGVKKGFQKCMTFPPSSGEAQQQQGSCCDADKNPKDVPTYERSVSLPPILKIISAMKGSRQKNGMASSTESRHVKWAPDVYDPPVTSVCHSVNNSYQRRSKSRKKDKNKQKQKQKQKGRSKKNHQNAIQSSAVLQAPGEFDRLKDAETTSSNSAPDDLNKHETDILDYGISSQDAKCGSSFLRESAAKMHFSTAEAS

SEQ ID NO: 32804 - protein, 374 aa, Oryza sativa; identical to SEQ ID NO: 32322

SEQ ID NO: 32805 - protein, 200 aa, Oryza sativa; identical to SEQ ID NO: 30667

SEQ ID NO: 32806 - protein, 229 aa, Oryza sativa; identical to SEQ ID NO: 32353

SEQ ID NO: 32807 - protein, 372 aa, Oryza sativa
MCCWCCCLDCIHNIPPLNLLFLHFSPHSLSSSAASAGGGEAAAAAAVAPMASISVPNPAPSPTEDAESIRKAVQGWGTDENALIEILGHRTAAQRAEIAVAYEGLYDETLLDRLHSELSGDFRSALMLWTMDPAARDAKLANEALKKKKKGELRHIWVLVEVACASSPDHLVAVRKAYRAAYASSLEEDVASCSLFGDPLRRFLVRLVSSYRYGGGGVDGELAIAEAAELHDAVVGRGQALHGDDVVRIVGTRSKAQLAVTLERYRQEHGKGIDEVLDGRRGDQLAAVLKAALWCLTSPEKHFAEVIRTSILGLGTDEEMLTRGIVSRAEVDMEKVKEEYKVRYNTTVTADVRGDTSGYYMNTLLTLVGPEK

SEQ ID NO: 32808 - protein, 136 aa, Oryza sativa
MERNIKASSGKCGIAVEPSYPLKKGENPPNPGPTPPSPTPPPTVCDNYYTCPDSTTCCCIYEYGKYCYAWGCCPLEGATCCDDHYSCCPHEYPICNVQQGTCLMAKDSPLAVKALKRTLAKPNLSFLFGNGKKSSA

SEQ ID NO: 32809 - protein, 215 aa, Oryza sativa; identical to SEQ ID NO: 30672

SEQ ID NO: 32810 - protein, 213 aa, Oryza sativa
MAKAVMMLPVLLSFLLLPFSSMALTQDFCVADLTCSDTPAGYPCKASVGAGDFAYHGLAAAGNTSNLIKAAVTPAFVGQFPGVNGLGISAARLDIAVGGVVPLHTHPAASELLFVTQGTVAAGFITSSSNTVYTRTLYAGDIMVFPQGLLHYQYNAGQSAAVALVAFSGPNPGLQITDYALFANNLPSAIVEKVTFLDDAQVKKLKSVLGGSG

SEQ ID NO: 32811 - protein, 218 aa, Oryza sativa
MAPRVSLLAAGAVAVAVVLLLAAPARASNDEGDALYALRTRLSDPNGVLQSWDPTLVNPCTWFHVTCDHASRVVRLDLGNSNISGSIGPELGRLVNLQYLELYRNNLNGEIPKELGNLKNLISLDLYANKLTGTIPKSLSKLGSLRFMRLNNNKLAGSIPRELAKLSNLKVIDLSNNDLCGTIPVDGPFSTFPLRSFENNNRLNGPELQGLVPYDFGC

SEQ ID NO: 32812 - protein, 463 aa, Oryza sativa
MARSGGELVVVEEDDEYAKLVRRMNPPSVVIDNDSCDSATVIRVDRVKKHGILLEAVQVLVDLNLVITKAYISSDGNWFMDVFNVTDQDGNKVQNKEVTDCIKKCLESEDYLVLPASSPAGGAAPSEETTCIELTGTDRPGLLSEVCAVLASLRCNIVNAEVWTHDRRAAAVIQITDEATGLPVRDGGRLSQLQELLGNVMQGDGDGGGDSRKGSTAVSLGAANAERRLHRLMLDDGDAGRCGEERGGVAAAKAKAKVVVMDCTERRYTVVILRCRDRPRLLFDTLCALTDLHYVVFHGTVDAEGGSAKEAYQEYYVRHVDGHPVRCDAERLRLVRCLEAAVERRASDGLELEVKTEDRAGLLSEITRVFRENSLSIIRAVITTKDGEADDTFYVSDAYGNPVDGKAMEALGEQLGHAVLRVKSNGRAAINRAEDSGGGGAAAIIGNLLKGSFQGFRLIRSYS

SEQ ID NO: 32813 - protein, 352 aa, Oryza sativa; identical to SEQ ID NO: 32358

SEQ ID NO: 32814 - protein, 336 aa, Oryza sativa; identical to SEQ ID NO: 32407

SEQ ID NO: 32815 - protein, 414 aa, Oryza sativa
MWAASCLASCCAACACEACRTAVGSIGRRSARIAYCGLFALSLFASWALREVAAPLLQSIPWINHFHKTPDREWFETDAVLRVSLGNFVFFTILAIIMAGIKDQKDPRDKIHHGGWMAKIFCWVVIVFLMFFVPNGVVSFYESISKFGSGLFLLVQVVLLLDFVHGWNENWVAKDEQFWYMALLVVSVVCYIVTFSFSGLLFHWFTPSGHDCGINLFFIVFTLILVFVFAIVALHPKINGSLLPASVIALYCTYLCYSGLSSEPRDYECNGLHNHSKAVSTGSLSLGLLTTILSVVYSAVRAGSSATVLSAPDSPRAGADKPLLPFSKADEEAEKKDVPRPVTYSYSFFHLIFSLASMYSAMLLTGWSTSVGESGKLVDVGWPSVWVRIATQWATAGLYIWSLVAPLLFPDREF

SEQ ID NO: 32816 - protein, 320 aa, Oryza sativa; identical to SEQ ID NO: 32393

SEQ ID NO: 32817 - protein, 309 aa, Oryza sativa; identical to SEQ ID NO: 32382

SEQ ID NO: 32818 - protein, 269 aa, Oryza sativa; identical to SEQ ID NO: 30174

SEQ ID NO: 32819 - protein, 205 aa, Oryza sativa; identical to SEQ ID NO: 30778

SEQ ID NO: 32820 - protein, 318 aa, Oryza sativa; identical to SEQ ID NO: 30569

SEQ ID NO: 32821 - protein, 288 aa, Oryza sativa; identical to SEQ ID NO: 28626

SEQ ID NO: 32822 - protein, 338 aa, Oryza sativa; identical to SEQ ID NO: 32374

SEQ ID NO: 32823 - protein, 246 aa, Oryza sativa; identical to SEQ ID NO: 30788

SEQ ID NO: 32824 - protein, 267 aa, Oryza sativa
MSLVGFLASAMGPRVAASCASAALSVLTVDDDSRVNSEGICSDSRGQGPHPNFRDHNGGVSSSISPEKVKHAAMCGLSAAATKAKLFADQEEREIQRLTATVINHQLKRLELKLKQFAEVETLLLKECEQVERIRQRIASDRVRIVSTRLASPGNSLPGGSTSTMSSNPMSMSPRPMGVPGSMPQSSMPAPFANNMQGHGHPQMAFLQQQQRQQMLSFGPRLPLSAIQTQPSPQTSNIMFNPGMPNSVTPNHHQLLRSSSGNNSSVG

SEQ ID NO: 32825 - protein, 245 aa, Oryza sativa; identical to SEQ ID NO: 32403

SEQ ID NO: 32826 - protein, 214 aa, Oryza sativa; identical to SEQ ID NO: 32289

SEQ ID NO: 32827 - protein, 329 aa, Oryza sativa; identical to SEQ ID NO: 32405

SEQ ID NO: 32828 - protein, 394 aa, Oryza sativa; identical to SEQ ID NO: 30720

SEQ ID NO: 32829 - protein, 156 aa, Oryza sativa; identical to SEQ ID NO: 30629

SEQ ID NO: 32830 - protein, 271 aa, Oryza sativa; identical to SEQ ID NO: 30721

SEQ ID NO: 32831 - protein, 198 aa, Oryza sativa; identical to SEQ ID NO: 30707

SEQ ID NO: 32832 - protein, 98 aa, Oryza sativa; identical to SEQ ID NO: 32427

SEQ ID NO: 32833 - protein, 227 aa, Oryza sativa
MTVFHFLNCAALTFGPHVVYYSATPLSEYDTIGTCVKAAVVYLGTALVKLVCLATLLKVPENDSFDPYQELMKIFIGFIDVAGLYFALTQLTHRNISQNHKFQAVGLGWAFADSVLHRLAPLWIGARGLEFTWEYIFQGLEANANLVMTLSLAALGSLMWLRKNKPRTLVPIIYACALLLATMPSITSYLRRSLEWQTPKVVGFELFSSLVMAFISWQLFSACQRPM

SEQ ID NO: 32834 - protein, 133 aa, Oryza sativa; identical to SEQ ID NO: 30708

SEQ ID NO: 32835 - protein, 187 aa, Oryza sativa; identical to SEQ ID NO: 30736

SEQ ID NO: 32836 - protein, 482 aa, Oryza sativa; identical to SEQ ID NO: 32437

SEQ ID NO: 32837 - protein, 288 aa, Oryza sativa; identical to SEQ ID NO: 30702

SEQ ID NO: 32838 - protein, 430 aa, Oryza sativa
MAAAAAARRGCLVALLAVLFLACAAEGGAAAASAAQQQQQLRRRRHLLRRQRQVHSHLRRLNKAPLASIESPDGDIIDCVHISNQPAFDHPFLKNHTIQMRPDYHPEGLYDESKVASQQNTQTITQMWHKNGVCPENTIPIRRTKKEDVLRASSIRRYGKKKHKSTPNPMSVDPDMLNESGHQHAIAYVEGDKYYGAKATINVWQPRIEQANEFSLSQLWILGGSFGQDLNSIEAGWQVSPDLYGDNNTRLFTYWTSDAYQATGCYNLLCSGFIQINNQIAMGASISPLSNYGGSQYDINILVWKDPKEGNWWLQFGNDYVLGYWPSFLFSYLADSASMIEWGGEVVNSEPDGSHTSTQMGSGHFPEEGFGKSSYFKNIQVVDSSNNLRAPSGIGSFTEQSNCYDVQNGNNGDWGTYFYYGGPGKNPNCP

SEQ ID NO: 32839 - protein, 138 aa, Oryza sativa
MSESKAAAAVTLRTRKFMTNRLLSRKQFVLEVLHPGRANVSKADLKEKLAKLYEVKDSNCIFVFKFRTHFGGGKSTGFGLIYDNLDAAKKYEPKYRLIRNGLATKVEKSRKQMKERKNRAKKIRGVKKTKAGDAGKKK

SEQ ID NO: 32840 - protein, 299 aa, Oryza sativa
MRFSGSQIIMPLAHTVENEEILEVVRLEGQALTHDDGLMSRDIHLLQLCTGIDEKSMGSCFQLVSAPIDELFPDDAPLISSGFRVIPLDMKTDGTPAGRTLDLASSLEVGSTAQPTGDASMDDCNLRSVLTIAFQFPYEMHLQDSVATMARQYVRSIVSSVQRVSMAISPSRSGLNAGQKIISGFPEAPTLARWICQSYQFHLGVELLRQADDAGEALLKMLWDYEDAILCCSFKEKPVFTFANEMGLNMLETSLVALQDLSLDKIFDEAGRKALYNEIPKLMEQVESHLQNPHFLFPM

SEQ ID NO: 32841 - protein, 205 aa, Oryza sativa
MQRAIQAIGSHGSLLKSAVLRHISAPKPSILPAVYSRSMSVSSAQIEESGFETATVADILKSKGKSADGSWLWCTTDDSVYDAVKSMTQHNVGALVVVKPGQDKSIAGIVTERDYLRKIIVQGRSSKSTKVGDIMTEENQLITVKPDTRVLQAMQLMTEKRIRHIPVIDGTGMVGMVSIGDIVRAVVSEHREELNRLNAYIQGGY

SEQ ID NO: 32842 - protein, 422 aa, Oryza sativa
MGLGNEASSSSSRLLDPAPLLPHHGGDGAGKLSSQPKTFANVFIAVVGAGVLGLPYTFSRTGWAAGSILLLSVAALTFYCMMLLVACRRRLADEHPKIASFGDLGDAVFRGPGRLAVDTMLVLSQASFCVGYLIFISNTMAHLYPVFAPSSNALLSPKALFIWAMLPFQLGLNSIKTLTLLAPLSIFADVVDLGAMGVVLGEDVSVWLAKPPPVFAFGGLSAILYGIGVSVYAFEGIGMVLPLEAEAANKKKFGTTLGLSMGFIAVMYGLFGAMGYIAFGDATRDIITTNLGTGWLSAAVQLGLCINLFFTMPVMMHPVYEVAERLLHGKRYCWWLRWLLVLAVGLSAMYVPNFTDFLALVGSSVCVLLGFVLPASFHLKVFGAEMSWSGVLSDVLLVLLGLSLAVFGTYTSLLQIFHSSSA

SEQ ID NO: 32843 - protein, 222 aa, Oryza sativa
MDARRRRLSPAVAVAAALLFFPMFFGSHTPAAAAAYGEASGDAGVTALQKHAAFFDKDGDGIVSLSETYDGLRALGLGSGLSSLSAAFINGVLSPKTRPDNGTAPRLSIYIENIYKGIHGSDSSAYDSEGRFVAEKFEEIFAKHAKTVPDALTSDEIDELLQANRKPGDYTGWVAASSEWKILYKIGKDKDGLLRKEAVREVYDGSLFTKLAAARINDENQA

SEQ ID NO: 32844 - protein, 305 aa, Oryza sativa; identical to SEQ ID NO: 30193

SEQ ID NO: 32845 - protein, 190 aa, Oryza sativa; identical to SEQ ID NO: 30748

SEQ ID NO: 32846 - protein, 339 aa, Oryza sativa; identical to SEQ ID NO: 32484

SEQ ID NO: 32847 - protein, 309 aa, Oryza sativa; identical to SEQ ID NO: 32206

SEQ ID NO: 32848 - protein, 264 aa, Oryza sativa
MGTEAAAPARAMGPTKLAYFDDMWALSSTATVVSLLQEEGGRRAVLVDSTVFYPQGGGQPADTGVISAGGGTRFIVDDVRMKDGVVFHYGRFEDAGDGCNSGFSEGQSVSLEVDAERRNLNSRLHSAGHLIDICMSNIGLSHFDPGKGHHFPDGPFVEYKGVIPPDQLQDKKNELEKEANELITKGAKVLAYILPYEEAAQLCGGALPSYISKDSTPRIVKFGDYPGGPCGGTHVADISIINNIKVTNIRVKKGLTKVSYSVSL

SEQ ID NO: 32849 - protein, 357 aa, Oryza sativa
MQWTRVDHPLYSSNASNMWECPDFFAVLPGKNNGLDLSAAIPNGAKHVLKMSLDSCDKYMIGVYDLKHDMFVPDTVLDDRRLWLRIDYGNYYASKSFFDSKKGRRIIWGWTNETDSTSDDVAKGWAGIHAIPRTIWLDGDGKRLLQWPIEEVESLRRNEVSHQGLELKKGDLFEIKGTDTLQADVEIDFELTSIDAADPFDPSWLLDTEKHCREADASVHGGLGPFGLVVLASDNMDEHTTVHFRVYKSEQKYMVLLCSDLRRSSLRPGLYTPAYGGFFEYDLEKEKKISLRTLIDRSAVESFGGGGRACIMARVYPAAVVDGATHMYAFNNGSSTVKVSQLKAWSMTRAQVNVRKG

SEQ ID NO: 32850 - protein, 343 aa, Oryza sativa; identical to SEQ ID NO: 32498

SEQ ID NO: 32851 - protein, 337 aa, Oryza sativa
MGQRRRSGPRRQSQSVVVVVVAVLLATASCAAAQLSQSYYASTCPNVETLVRGAVTQKLKETFNAAPGTLRLFFHDCFVRGCDASVLIAGPDDEHSAGADTTLSPDALDLITRAKAAVDADAQCANKVSCADILALAARDVVSQAGGPYYQVELGRLDGKVGTRAVVKHSLPGAAFDLDQLNKLFATNGLTQTDMIALSGGHTIGVTHCDKFVRRLYQFKGAAPQYSPPMNLAFLRQMRQTCPLSYSPTTVAMLDAVSPNKFDNGYFQTLQQLKGLLASDQVLFADRRSRATVNYFAANQTAFFDAFVAAITKLGRVGVKTAAGSDAEIRRVCTKVN

SEQ ID NO: 32852 - protein, 362 aa, Oryza sativa
MAHAAAATGALAPLHPLLRCTSRHLCASASPRAGLCLHHHRRRRRSSRRTKLAVRAMAPTLSSSSTAAAAPPGLKEGIAGLYDESSGVWESIWGEHMHHGFYDAGEAASMSDHRRAQIRMIEESLAFAAVPDDAEKKPKSVVDVGCGIGGSSRYLANKYGAQCYGITLSPVQAERGNALAAEQGLSDKVSFQVGDALEQPFPDGQFDLVWSMESGEHMPDKRQFVSELARVAAPGARIIIVTWCHRNLEPSEESLKPDELNLLKRICDAYYLPDWCSPSDYVKIAESLSLEDIRTADWSENVAPFWPAVIKSALTWKGLTSLLRSGWKTIRGAMVMPLMIEGYKKGLIKFTIITCRKPETTQ

SEQ ID NO: 32853 - protein, 372 aa, Oryza sativa
MALWRCSSSWLSSVSRSSGGVGGGESKVSPEIAPVSGGEGEGEEEEGEEERWSRLLPELLTEIMRRVDAGAERWPPRRDVVACACVCRRWRDAAVSVVRPPLECGRITFPSSLKQPGPRDAPMHCFIRRNKKNSTFYLYLSLTQALTDKGKFLLAARRFRNGAHTEYIISYDCDDLFPGSNSYVGKLRSDFLGTKFIIYDSQPPYDGAKPSRSQSSRRFASKQINPNVSGGNYEVGQVSYKFNFLKSRGPRRMQCNIQCPVGQSTASDPLKKLISTSSPLALRNKAPRWHEHLQCWCLNFHGRVTVASVKNFQLVAPAGTSDPWGIADEETVILQFGKIEDDAFTMDYRQPLSAFQAFAICLTSFGTKLACE

SEQ ID NO: 32854 - protein, 335 aa, Oryza sativa; identical to SEQ ID NO: 32464

SEQ ID NO: 32855 - protein, 126 aa, Oryza sativa
MSDMKDTNAAGPETVGNPDPMDQTEDNSMPSAQEQELAIKKKFGGLMPKKPPLISKDHERAYFDSADWALGKSGQQGAAKPKGPLEALRPKLQPTRQQQQRSRRLINTSSENEDGDGAGAEDMNIN

SEQ ID NO: 32856 - protein, 322 aa, Oryza sativa; identical to SEQ ID NO: 32478

SEQ ID NO: 32857 - protein, 279 aa, Oryza sativa; identical to SEQ ID NO: 32479

SEQ ID NO: 32858 - protein, 177 aa, Oryza sativa; identical to SEQ ID NO: 30773

SEQ ID NO: 32859 - protein, 249 aa, Oryza sativa; identical to SEQ ID NO: 30779

SEQ ID NO: 32860 - protein, 308 aa, Oryza sativa
MAGKEEGRIFVGGLSFHTDERKLADAFRRFGKVVDAQIMLERHTQRHRGFGFVTFSDPEAVDSAIKEMHCQELDGRTISVNKAEPKMNTDDTRYESGGGRGEYRGGRGDGPPPGNCFECGRAGHWARDCPNPGGGRSARYSSSKFSAGGRGDRFSGSDRFGDRYMDDRYDGGYREPVDVRDRYGGGRDRYANDRYPSGGDRYVPDRYGGPDRYQPSSYGRERERSYERDGVRGNGGYDRSGPRGGGSYDRDGPRGGISGGYDRDGPRGGGVDRYGGGGPARYDGGSYRDRSGPYDRPSRGGRFDDRFQ

SEQ ID NO: 32861 - protein, 507 aa, Oryza sativa
MSLENPSQDRERVIENGGWPSWGSEDVIFFHRKDGDGENSCWGVFRHTLSTGETVRVTPAAFDSVTPAAIDETRVAVAAIRQKSEFSDVRVEAQYRHIEVFDMRSPEQPMQITRNTRPKADHFNPFVMDGGKFIGYHRCKSELLQHGDDLPRKFHKLQSPHEDVGVFRVSGVFPTFSKDGSQLAFVDNEFKSVWLADSQGMRVVFKTDGPDSVFSPLWNSKKDILYVCMGPSFKASETLEIHSIHNVSTGDRKSRQLTFGGFNNAFPSTNPDGTKFVFRSTRDGGAKYSKNLYIMEDADAGEGEDGSQSTVTRMTAGEWTDTHCQWSPNGKWIVFSSNRDRPADAPERDHGLDPGYFAVYLMDVASRSVVRVIRSGYDVAGHVNHPVFSPDGRSIAVTSDLAAVTADPMSLPLFLHSVRPYGDIFTVDIDPDDMARNEDVEGFVRVTHSRYENSTPAWTVFSTHDPHAQWNLLVVEDEHVPSCPYAHPDGGESWHMTGQICIPKRHC

SEQ ID NO: 32862 - protein, 215 aa, Oryza sativa; identical to SEQ ID NO: 30774

SEQ ID NO: 32863 - protein, 333 aa, Oryza sativa; identical to SEQ ID NO: 28544

SEQ ID NO: 32864 - protein, 195 aa, Oryza sativa; identical to SEQ ID NO: 30208

SEQ ID NO: 32865 - protein, 384 aa, Oryza sativa; identical to SEQ ID NO: 32540

SEQ ID NO: 32866 - protein, 311 aa, Oryza sativa; identical to SEQ ID NO: 32534

SEQ ID NO: 32867 - protein, 412 aa, Oryza sativa
MAFEKIKVANPIVEMDGDEMTRIFWQSIKDKLIFPFLDLDIKYYDLGVLHRDATDDKVTVEAAEATLKYNVAIKCATITPDEARVKEFNLKQMWKSPNGTIRNIINGTVFREPIICKNVPRLVPGWTKPICIGRHAFGDQYRATDAVLKGPGKLKLVFEGKDEQIDLEVFNFTGAGGVALSMYNTDESIRAFAEASMTTAYEKKWPLYLSTKNTILKKYDGRFKDIFQEVYEAGWKSKFEAAGIWYEHRLIDDMVAYALKSEGGYVWACKNYDGDVQSDFLAQGFGSLGLMTSVLVCPDGKTIEAEAAHGTVTRHFRVHQKGGETSTNSIASIFAWTRGLAHRAKLDDNARLLDFALKLEAACVGTVESGKMTKDLALLIHGSSNVTRSHYLNTEEFIDAVAAELRSRLAAN

SEQ ID NO: 32868 - protein, 371 aa, Oryza sativa; identical to SEQ ID NO: 32554

SEQ ID NO: 32869 - protein, 229 aa, Oryza sativa; identical to SEQ ID NO: 32581

SEQ ID NO: 32870 - protein, 441 aa, Oryza sativa
MRKLCPNLERDDALDTVLEVPIPEEMFSRGSGGGGSRGSRFGCTNVKSWVRPNASDRSGGAGEPCSMSRGELQLMLGVIGAPLIPLPVDHAKQSPCSVLCEQLKADPIESSTAKYIIQQYIAASGGEWALNKVTNMYAMGKVRMTAAELNSSDADGGGGGGGGHRGGKKSSKNGGEVGGFVLWQKKPELWSLELVVSGCKISAGSDGKVAWRQTPWHQSHASRGPPRPLRRSLQGLDPMLTASLFADAVCIGERSVDGEDCFVLKVEAEASSLRARNSSSVEIIRHTVWGYFSQRTGLLVQLEDSHLLQIKSSGHGSVFWETTMESHLHDYRAVDGVNIAHAGRTAVSLVRFGDSSDGNTRTRMEEVWNIEEVDFNIWGLSMDCFLPPSDLKDSKEDKDVSAAVKPARPPPIRIPAVAVRVGPSQVAAVNMDDSDSLIARS

SEQ ID NO: 32871 - protein, 232 aa, Oryza sativa; identical to SEQ ID NO: 32543

SEQ ID NO: 32872 - protein, 145 aa, Oryza sativa
MPKIKTSRVKYPGGWELIEPTIRELDAKMREAENDTHDGKRKCEALWPIFRISHQRSRYIYDLYYRRKEISKELYEFCLDQGYADRNLIAKWKKPGYERLCCLRCIQTRDHNFATTCVCRVPKHLREEKVIECVHCGCRGCASGD

SEQ ID NO: 32873 - protein, 304 aa, Oryza sativa
MAEHLASIFGTEKDRVNCPFYFKIGACRHGDRCSRLHNRPTVSPTIVLANMYQRPDMITPGVDAQGQPIDPEKMQEHFEDFYEDIYEELSKFGEVETLNVCDNLADHMIGNVYVQFREEEQAVAAHNALQGRFYSGRPIIVEYSPVTDFREATCRQFEENSCNRGGYCNFMHVKQIGRELRRKLYGGRSRRSHGRSRSPSPRHRRGNRDRDDFRRERDGYRGGGDGYRGGGGGGGGDGYRGGDSYRGGGGGGRRGGGSRYDRYDDGGRRRHGSPPRRARSPVRESSEERRAKIEQWNREREEKP

SEQ ID NO: 32874 - protein, 318 aa, Oryza sativa
MMESQALQDPVAEPHGAEPAAAGAPPAVVPGKEFTRTCKGLVVVLVGGYVLLQLLPSSLDYLAIIPAKTIPFVWTVFTAGYIEQVLPGAIGSSLGLLFCGKDIEPVWGRKEFLKFIILVNSICGVLAFCFAVALYYVTGKESFLVTPLSGFHGALAGFLVGLKQLLPNLELPMCFFWKIKAKWMPFFVLCFSTIMAFIVPDSINFLPTLLSGMYVSWIYLRYFQRNPLTGLKGDSSDDFSFPSLFPDAMRPVTDPVANLFDRMLCARSRPSELALPVSDPAKASRRRERGERVLEERLAADHAADTEAPALGHSTAED

SEQ ID NO: 32875 - protein, 228 aa, Oryza sativa; identical to SEQ ID NO: 32583

SEQ ID NO: 32876 - protein, 192 aa, Oryza sativa; identical to SEQ ID NO: 30796

SEQ ID NO: 32877 - protein, 77 aa, Oryza sativa; identical to SEQ ID NO: 32569

SEQ ID NO: 32878 - protein, 292 aa, Oryza sativa
MSMACTKVWRSTMYTPRRLKRTTPASRVSSTAMAAANGDASHGANGGIQIQSKEMKTAIHSNDSPKTLLKSESLHEYMLNTMVYPRENEFMRELRLITSEHTYGFMSSPPEEGQLLSLLLNLTGAKNTIEVGVFTGCSVLATALAIPDDGKVVAIDVSREYFDLGLPVIKKAGVAHKVDFREGAAMPILDNLLANEENEGKFDFAFVDADKGNYGEYHERLLRLVRAGGVLAYDNTLWGGSVALEDDSVLEEFDQDIRRSIVAFNAKIAGDPRVEAVQLPVSDGITLCRRLV

SEQ ID NO: 32879 - protein, 340 aa, Oryza sativa
MRPSLMRSASQVLRRRRGYSSASGQPERKVAILGAAGGIGQPLSLLMKLNPLVSSLSLYDIAGTPGVAADVSHINAPAQVKGFMGDDQLGEALEGSDIVIIPAGVPRKPGMTRDDLFNINAGIVKNLCTAIAKYCPNALVNMISNPVNSTVPIAAEVFKKAGTYDEKKLFGVTTLDVVRAKTFYAGKANVPVTDVNVPVVGGHAGITILPLFSQATPATNALSDEDIKALTKRTQDGGTEVVEAKAGKGSATLSMAYAGAVFANACLKGLNGVPDVVECSFVQSTVTELPFFASKVKLGKNGVEEVLGLGQLSDFEKEGLENLKGELKASIEKGIKFANA

SEQ ID NO: 32880 - protein, 125 aa, Oryza sativa; identical to SEQ ID NO: 30784

SEQ ID NO: 32881 - protein, 250 aa, Oryza sativa
MAVATSFATLAIARPAAERALLASKTPSPLLSIRTGTGTARLPSSAVFGGFTPALSAAHSRARFVSSATADPKEVDLQSKITNKVYFDTSIGNPVGKNVGRVVIGLYGDDVPQTAENFRALCTGEKGFGYKGSSFHRVIKDFMIQGGDFDKGNGTGGKSIYGRTFKDENFKLVHTGPGVVSMANAGPNTNGSQFFICTVKTPWLDGRHVVFGQVIEGMDIVKMIESQETDRGDRPKKKVVISECGELPVV

SEQ ID NO: 32882 - protein, 478 aa, Oryza sativa
MELGVPLPRRPVPGSYGVPFVSAVRDRLDFYYLQGQDKYFESRAERYGSTVVRINVPPGPFMARDPRVVALLDAKSFPVLFDVAKVEKRDVFTGTFMPSTSLTGGYRVCAYLDPSEPNHAKIKQLLLSLLVSRKDAFVPVFRSNFGALLDTVESQLASGGGKSDFTALNDATSFEFIGEAYFGVRPSASSSLGTGGPTKAALWLLWQLAPLTTLGLPMIIEDPLLHTLPLPPFLISSDYKALYAYFAAAASQALDAAEGLGLSREEACHNLLFATVFNSYGGFKLLLPQILSRVAQAGEKLHERLAAEIRSAVADAGGNVTLAALEKMELTRSVVWEALRLDPPVRFQYGRAKADLEIESHDASFAIKKGEMLFGYQPCATRDPRVFGATAREFVGDRFVGEEGRKLLQYVYWSNGRETENPSVDNKQCPGKNLVVLVGRLLLVELFLRYDTFTAEAGKKVVITGVTKASTSAVNRTA

SEQ ID NO: 32883 - protein, 397 aa, Oryza sativa
MGLSRRAKNLIVDVPFQGAKWLRCVDLAGQLFGNTATPPPPTTIAHGSESAAVQEDYTSQTLVSDSCNPKKKAAGLKMERIRLPRPILKFCSTHGSDQISLDCFPLVDRKVVIADHTRRMFLCDADTRAVVSIPNLHKPKSRPISLFIPSTADANDHPSVGGGSLYVMERVPEPEKGDVKLSDQFEAFVCSNIFEGPWNCHFLRPPPFVSDRTCCFTYPKITSYAVVGSNICISHNSCNATYCLDTARNTWEVGNGNLPLYGKVVYVPELKLWFGFSTEARTMSPLAAADLSTMDSHSQPQLIGDWKEFDPPKGWLESHDPQLVNLGSGRFCIARFFRIVSMDDGEIIDRIEVFTGVEVLPVGHDGDGSGNTKLKLRMKKNKSLCHVSNGTVIADIF

SEQ ID NO: 32884 - protein, 158 aa, Oryza sativa
MRNGGSLLDGHISAAVPVVDFSARLQNNDHAMDHRVSFELTVEDVARCLEKKTNINGESAAASFRLVPTGNGDHIHPRESNDTRAGLCVDETYHDLPEKARRSLSLRKAKEFKFNNVDAPSVEPSVGSDWWANEKVAGITSEPRKSWSFFPVAQPGVS

SEQ ID NO: 32885 - protein, 224 aa, Oryza sativa
MAVTFTDLHTADGLKALEQHLSGKTYVSGNAISKDDIKVFAAVPSKPGAEFPNAARWYDTVAAALASRFPGKAVGVNLPGGGAASSAAAAAPAAKDADEDDDDLDLFGDETEEDKKAADERAASKASSKKKESGKSSVLLDVKPWDDETDMKKLEEAVRSVQMEGLTWGASKLVPVGYGIKKLQIMLTIVDDLVSVDSLIEEHLTEEPINEFVQSCDIVAFNKI

SEQ ID NO: 32886 - protein, 348 aa, Oryza sativa
MAAVAFRSLLHPAAAALTERVPLPPAHLRLQGLHRHRVGVLNLFVASGHRRRILLPLAAAGGEFSSEEEEYANEEEEEGEEYVEEEEEDGEEEEAAAVAAPRGYYPPRSRPALGQEPGRLFVGNLPYTMTSGEISQTFSEAGRVDNVQIIYDKVTDRSRGFAFVTMATAEEAATAIQMFNGALLGGRTARVNYPEVPRGGERAVGSAAATRENRRDDGTFKIYAGNLGWGVRADALRAAFEGQPGLLDARVIFERDSGRSRGFGFVSFRTAEDAQAALEALDGVELEGRPLRLSMAEQNPTAGSPSTVQSQEEETASESSDAETEQSITSEPSEAETEESNLQTAASY

SEQ ID NO: 32887 - protein, 424 aa, Oryza sativa
MATVAMDISKPPPAAGGDEAAAAKGRGGAGGGGGEGLRQYYLQHIHDLQLQIRQKTHNLNRLEAQRNDLNSRVRMLREELQLLQEPGSYVGEVVKVMGKSKVLVKVHPEGKYVVDIDKSIDITKITPSTRVALRNDSYMLHLILPSKVDPLVNLMKVEKVPDSTYDMIGGLDQQIKEIKEVIELPIKHPELFESLGIAQPKGVLLYGPPGTGKTLLARAVAHHTDCTFIRVSGSELVQKYIGEGSRMVRELFVMAREHAPSIIFMDEIDSIGSARMESGTGNGDSEVQRTMLELLNQLDGFEASNKIKVLMATNRIDILDQALLRPGRIDRKIEFPNPNEDSRFDILKIHSRKMNLMRGIDLKKIAEKMNGASGAELKAVCTEAGMFALRERRVHVTQEDFEMAVAKVMKKDTEKNMSLRKLWK

SEQ ID NO: 32888 - protein, 233 aa, Oryza sativa
MDASPSSSSSSPVAPEVVQWAGGADGFGSAAIGFACRVLCAVATCVFAAVGSVVGAVTGSAIGLATESGMLRGAGIGAISGAVFSIEVAESSRDLWHSSDSAVWCLVYMVDIISSLLSGRLVREKVGPAVQSAVQSQISAISSPFAETSDLFETGGTKGLPADTLRRLPAIKITGDNAVDSAGEPICCSVCLQDFRVGEMARRLPSCRHVFHVPCIDCWLVRHGSCPLCRRDI

SEQ ID NO: 32889 - protein, 232 aa, Oryza sativa; identical to SEQ ID NO: 30187

SEQ ID NO: 32890 - protein, 117 aa, Oryza sativa; identical to SEQ ID NO: 31665

SEQ ID NO: 32891 - protein, 204 aa, Oryza sativa; identical to SEQ ID NO: 31661

SEQ ID NO: 32892 - protein, 202 aa, Oryza sativa; identical to SEQ ID NO: 30172

SEQ ID NO: 32893 - protein, 226 aa, Oryza sativa
MDSEHWISRLAAAKRFYAAQLGHADRAGMEEVDMDEEVRPEFACPYCYEDHDVVSLCAHLEEEHPFEPHAAPCPICSDKIAKDMLNHITVQHGYLFKNRRRLRRFVIPGSQALSLLSRDLREAHLQVLLGGGGHRSNNSSNTTNISADPLLSSFGLSFPTSDTEETSKPPISIPDDASVIKETPAQPWDSSIDSSLTREEREQKRKQASVRATFVQDLLLTTLFGD

SEQ ID NO: 32894 - protein, 275 aa, Oryza sativa
MISMAVHRNLLRLRGFCMTPTERLLVYPYMANGSVASRLRERQPNDPPLEWQTRTRIALGSARGLSYLHDHCDPKIIHRDVKAANILLDEDFEAVVGDFGLAKLMDYKDTHVTTAVRGTIGHIAPEYLSTGKSSEKTDVFGYGIMLLELITGQRAFDLARLANDDDVMLLDWVKGLLKEKKVEMLVDPDLQSGFVEHEVESLIQVALLCTQGSPMDRPKMSEVVRMLEGDGLAERWEEWQKVEVVRQEAELAPRHNDWIVDSTYNLRAMELSGPR

SEQ ID NO: 32895 - protein, 389 aa, Oryza sativa; identical to SEQ ID NO: 31704

SEQ ID NO: 32896 - protein, 435 aa, Oryza sativa
MAGGDDWSKRTIMEESLQPPAHGAAATTPWVLLDIRAFMANHRNATTAMSETRSGHPIEVSSWTAPPPRVSYICVHCPGLDSKKFATEPTIIAAEADLLLIRVAMGRRNIRFKSSFHDYFVYQATTPTPKLTLLPPPPIDRFIDHELGLLRCCASPDYIVAALCNTFESGYFEYDLHIYCSGADAWTCHPISLHGLVDTSFTHINTKAITIGGKAGTMGWVDLYRGILFCDLLRDTTKLRYFPLPPPLSPNNSLTGSPRPHRDIALVQGRIKFIETRLHVKPGSIINGTFISQGWTAATWTAPDTNPWNQGWRQDCKLTASDISVDDSKMNFELLPKLFDDQGTPQPTLERLHVGHPTLSLHSDDIVCFMAKADQWDDDAWVLAVDMKNKRLKVVAEFGAERTLGIGYAYMSSNISGYLRTAPGIEGSLKRQGVC

SEQ ID NO: 32897 - protein, 185 aa, Oryza sativa; identical to SEQ ID NO: 31711

SEQ ID NO: 32898 - protein, 250 aa, Oryza sativa; identical to SEQ ID NO: 31684

SEQ ID NO: 32899 - protein, 180 aa, Oryza sativa; identical to SEQ ID NO: 31685

SEQ ID NO: 32900 - protein, 289 aa, Oryza sativa
MEGKEEDVRLGANRYSERRPIGTAAQGAGDDKDYKEPPPAPLFEPGELKSWSFYRAGIAEFVATFLFLYITILTVMGVSKSSSKCATVGIQGIAWSFGGMIFALVYCTAGISGGHINPAVTFGLFLARKLSLTRAIFYIVMQCLGAICGAGVVKGFQQGLYMGNGGGANVVASGYTKGDGLGAEIVGTFILVYTVFSATDAKRNARDSHVPILAPLPIGFAVFLVHLATIPITGTGINPARSLGAAIIYNKDHAWNDHWIFWVGPFVGAALAAIYHQVIIRAIPFKSRS

SEQ ID NO: 32901 - protein, 287 aa, Oryza sativa
MAAVANTVTTLPLLPSPHAFAVPAMGSLPFLRRRMRSRRLAAVQQDAAVWTPAPVSSFGPATADGSLVHFSVDLSDATDLAASYTTPGQYLLIRVPGEDELKPAFMAIASPPGGAAFEFLVKTVPGTTAEKLCGLRDGDVLELGAIMGNGFPISRINPPDEAQTVLLFATGTGISPVRSLIEFGFAADQRADVRLYYGARNLQTMAYQDRFTNWESTGLKIIPVLSRADDSWKGERGYVQDAFLKAQNIANHFSTGAVLCGQKQMSEEITSALVADGVSPDKILTNY

SEQ ID NO: 32902 - protein, 140 aa, Oryza sativa
MRKYRVAGLVAALLVLHSLATPSAQAEAHRAGGEGEEKMSSDGGPVLGGVEPVGNENDLHLVDLARFAVTEHNKKANSLLEFEKLVSVKQQVVAGTLYYFTIEVKEGDAKKLYEAKVWEKPWMDFKELQEFKPVDASANA

SEQ ID NO: 32903 - protein, 347 aa, Oryza sativa; identical to SEQ ID NO: 31691

SEQ ID NO: 32904 - protein, 240 aa, Oryza sativa; identical to SEQ ID NO: 30196

SEQ ID NO: 32905 - protein, 283 aa, Oryza sativa
MSPGVSRFLRFTREERLAKDVDFEKIARRTPGFTGADLQNLMNEAAILAARRDLKEISKDEISDALERIIAGPEKKNAVVSEEKRRLVAYHEAGHALVGALMPEYDPVAKISIIPRGQAGGLTFFAPSEERLESGLYSRSYLENQMAVALGGRVAEEVIFGQENVTTGASNDFMQVSRVARQMVERFGFSKKIGQVAIGGPGGNPFLGQQMSSQKDYSMATADVVDAEVRELVEKAYSRATQIITTHIDILHKLAQLLMEKETVDGEEFMSLFIDGQAELFVA

SEQ ID NO: 32906 - protein, 274 aa, Oryza sativa
MASPSSSSSLCSTFASPRAASLGRRLAFSSPRKAFRVRASSRVDKFSKNDIIVSPSILSANFSKLGEQVKAVEVAGCDWIHVDVMDGRFVPNITIGPLVVDALRPVTDLPLDVHLMIVEPEQRVPDFIKAGADIVSVHCEQSSTIHLHRTVNQIKSLGAKAGVVLNPATPLTAIDYVLDVVDLVLIMSVNPGFGGQSFIESQVKKIAELRRLCAEKGVNPWIEVDGGVGPKNAYKVIEAGANAIVAGSAVFGAPDYAEAIKGIKTSQKPVAVPA

SEQ ID NO: 32907 - protein, 358 aa, Oryza sativa
MAAMVVGALRRGTATAGGSSRSFARSLPRPVSTLVVAEHEGGFVKPSSLSALAAAEAIGKDDNRVSLLLGGSGPGLHKAAEHAASSHPLVSEVLVADSDVFAHPLAEPWAELLRSVQHKGGYSHVIASSTSFGKNLLPRAAALLDVSPVTDVTSISEPRVFVRPIYAGNALCTVRYTGEDPCMMSIRSTSFSPTEAMSEAKVAPITQVDLSFLSEGSSGKSAWVNLKSQDTERPDLANAPVVVTGGRGLKSAENFKVLEQLAEKLGAAVGATRAAVDAGFVPNELQVGQTGKIVAPELYMAFGVSGAIQHLAGMRDSKVIVAVNKDADAPIFQVADYGIVADLFEVLDELLKKLPDKK

SEQ ID NO: 32908 - protein, 366 aa, Oryza sativa
MAAVNTVSSLPCSKAGAAVAGGAPRPSTCSVFYPPRCWSKRSSGNGVRAQASTTETTAAPAAEVTTKVEKVSKKQVDGVVTNKYRPKEPYTGRCLLNTRITGDDAPGETWHMVFSTDGEIPYREGQSIGVIPDGIDKNGKPHKLRLYSIASSAIGDFADSKTVSLCVKRLVYTNDQGEIVKGVCSNFLCDLKPGSDVKITEPVGKEMLMPKDPNATIIMLGTGTGIAPFRSFLWKMFFEEHDDYKFNGLAWLFLGVPTSSTLLYREEFERMKEIAPERFRLDFAVSREQTNAAGEKMYIQTRMAEYKDELWELLKKDNTYVYMCGLKGMEKGIDDIMIDLAAKDGIDWLDYKKQLKKSEQWNVEVY

SEQ ID NO: 32909 - protein, 88 aa, Oryza sativa; identical to SEQ ID NO: 31694

SEQ ID NO: 32910 - protein, 203 aa, Oryza sativa
MAMATQASAAKCHLLAAWAPAKPRSSTLSMPTSRAPTSLRAAAEDQPAAAATEEKKPAPAGFVPPQLDPNTPSPIFGGSTGGLLRKAQVEEFYVITWTSPKEQVFEMPTGGAAIMREGPNLLKLARKEQCLALGTRLRSKYKINYQFYRVFPNGEVQYLHPKDGVYPEKVNAGRQGVGQNFRSIGKNVSPIEVKFTGKNVFDI

SEQ ID NO: 32911 - protein, 488 aa, Oryza sativa; identical to SEQ ID NO: 31696

SEQ ID NO: 32912 - protein, 265 aa, Oryza sativa
MARGLKKHLKRLNAPKHWMLDKLGGAFAPKPSSGPHKSRECLPLILIIRNRLKYALTYREVISILMQRHVLVDGKVRTDKTYPAGFMDVISIPKTGENYRLLYDTKGRFRLQSVKDEDAKFKLCKVRSVQFGQKGIPYLNTYDGRTIRYPDPIIKANDTIKIDLETNKIVDFIKFDVGNVVMVTGGRNTGRVGVIKNREKHKGSFETIHVEDALGHQFATRLGNLFTIGKGNKPWVSLPKGKGIKLSIIEEQRKRDAAAQAAANA

SEQ ID NO: 32913 - protein, 467 aa, Oryza sativa
MASLASASASTSLVFSTSSSKPRLGSSVGFSSPARFRRTAAAAASRGTGRRAGLLVVRAARGKFERTKPHVNIGTIGHVDHGKTTLTAALTMVLASVGGSAPKKYDEIDAAPEERARGITINTATVEYETETRHYAHVDCPGHAGYVKNMITGAAQMDGAILVVSGADGPMPQTKEHILLAKQVGVPKIVVFLNKKDQVDDEELLQLVELEVRELLSSYEYDGDEVPIVAGSALKALENLMANPAIKRGDDEWMDGIFSLIDSVDNYIPVPQRQTDLPFLLAVEDVFSITGRGTVATGRIERGTVKVGDTVDIVGIRETRNCTVTGVEMFQKTMDDAMAGDNVGLLLRGMQKDDIERGMVLAKPASITPHTKFDAVVYVLKKDEGGRHSPFFPGYRPQFYMRTTDVTGNVTKIMNDKDEEAKMCMPGDRVKMVVELIQPVACEQGMRFAIREGGKTVGAGVINTILK

SEQ ID NO: 32914 - protein, 346 aa, Oryza sativa
MSDSALKDLNLAQSAELEKTKDSSAKSCITKPVLNGNKCNNTEENAPPVLPDAVTNGCEAGNADVEYIDSESLTDLEDAGATLSTLVARLDSKDWVMTCEALNNVRQLAIFHKDRLQELLEPLVPLIVKSVKNPRSAVCKTALMTCADIFKAYGDLMVDSIDPLLVQLFLKSSQDKRFVCEAAEAALISMTSWIAPSALLPKMQPYLKNRNPRIRAKASMCFSKSVPSLGVEGIKEYGMDKLVQIAATQLSDQLPESREAARKLALELQAFYEKSQASSSGEVDDAPATSPDADADAGAESWEAFCQSKLSPLSAQAILRVTSTTKEGVAVGVTSTPPKEGVTVGC

SEQ ID NO: 32915 - protein, 245 aa, Oryza sativa; identical to SEQ ID NO: 30210

SEQ ID NO: 32916 - protein, 301 aa, Oryza sativa
MLPYATAAEAEAALGRAMTAAESLWFRYSAGIPDYVLFWHNILFLFVVFTLAPLPVALLELRAPAAVGPFKLQPKVRLSREEFFRCYRDVMRLFFLVIGPLQLVSYPTVKMVGIHTGLPLPSLGEMAAQLLVYFLVEDYLNYWIHRLLHGEWGYEKIHRVHHEFTAPIGFAAPYAHWAEVLILGIPSFVGPALAPGHMITFWLWIVLRQMEAIETHSGFDFPFNLTKYIPFYGGTEYHDYHHYVGRQSQSNFASVFTYCDYLYGTDKGYRYHKAYQAKMKALGQTEGEKADSNGLSYAKLD

SEQ ID NO: 32917 - protein, 290 aa, Oryza sativa
MASKEEVAVETVEGGAAAAKAPYWDPPPAPLLDTSELGKWSLYRALIAEFMATLIFLYVSIATVIGYKNQRATVDACTGVGYLGVAWSFGATIFVLVYCTGGVSGGHINPAVTLGLFFGRKLSLVRTVLYVVAQCLGAIAGAGIVKGIMKRPYDALGGGANTVSDGYSAAGALGAEIVGTFILVYTVFSATDPKRTARDSFIPVLVPLPIGFAVFVVHLATIPITGTGINPARSLGAAVLYNQHAAWKDHWIFWVGPVIGAFLAAAYHKLVLRGEAAKALSSFRSTSVTA

SEQ ID NO: 32918 - protein, 227 aa, Oryza sativa; identical to SEQ ID NO: 32151

SEQ ID NO: 32919 - protein, 328 aa, Oryza sativa
MGSDFKAIPLIDISPLVGKIDDPSMVNDEDLLQVVQMLDDACREAGFFYVKGHGIADSLMKQVRDVTQKFFQLPYEEKLKIKMTPQSGYRGYQRVGENITKGKPDMHEAIDCYTPIEPGKYGDLAKPMVGSNLWPKYPSNFDVLLENYISLLRDLSRKIMRGIALALGAPVDAFEGTTAGDPFWVCRLIGYPVSTDIPEEQRTDTGCGAHTDYGLLTLVNQDDDICALEVRNQSGEWIYAKPIPGTFVCNIGDMLKVWSNGIYQPTLHRVVNNSPRYRVSVAFFYESNFDAAVEPVEFCRERTGGVAKYEKVVYGEHLVQKVLTNFVM

SEQ ID NO: 32920 - protein, 260 aa, Oryza sativa
MADDAGAGRTRSRRDPSDRPTRSGQFLIRALLRGELEERTADARFIPLTPIMEDLFVSGIEEIPEDTSVHHQQTDEPPPSYNTIRRGEGTLMAELREATEQLRLSFYANTDEETRAQMKQFWDEEFNAISEEATIERGLEWMRAEVVEAFSTHSGANVVEYELEDISHQCLIFDDCAKSYHHYNFIMKSKCPDSHLEGSCLFFAEVKVVDGEKHYFCCPLQPDDDGHCHGCQNSGIDLKHPSDGGYEEGNADSGFPFDPI

SEQ ID NO: 32921 - protein, 288 aa, Oryza sativa
MAKDIEASAPEGGEFSAKDYTDPPPAPLIDVEELTKWSLYRAVIAEFIATLLFLYITVATVIGYKHQSDATVNTTDAACSGVGILGIAWAFGGMIFILVYCTAGISGGHINPAVTFGLFLARKVSLIRAVLYIIAQCLGAICGVGLVKGFQSSYYARYGGGANELSDGYSKGTGLGAEIIGTFVLVYTVFSATDPKRNARDSHIPVLAPLPIGFAVFMVHLATIPITGTGINPARSLGTAVIYNKDKAWDDQWIFWVGPLIGAAIAAAYHQYVLRASAAKLGSYRSNA

SEQ ID NO: 32922 - protein, 376 aa, Oryza sativa
MAMWRAAAGHLLGRALGSRAAHTSAGSKKIVGVFYKGGEYADKNPNFVGCVEGALGIREWLESKGHHYIVTDDKEGLNSELEKHIEDMHVLITTPFHPAYVSAERIKKAKNLELLLTAGIGSDHIDLPAAAAAGLTVAEVTGSNTVSMAEDELMRILILLRNFLPGYQQVVHGEWNVAGIAYRAYDLEGKTVGTVGAGRIGRLLLQRLKPFNCNLLYHDRLKIDPELEKEIGAKYEEDLDAMLPKCDVIVINTPLTEKTRGMFNKERIAKMKKGVIIVNNARGAIMDTQAVADACSSGQVAGYGGDVWFPQPAPKDHPWRYMPNHAMTPHISGTTIDAQLRYAAGVKDMLDRYFKGEDFPVQNYIVKEGQLASQYQ

SEQ ID NO: 32923 - protein, 245 aa, Oryza sativa
MRVLPASWSSAASSSASASADRLNSPTPAPPPPAPPPPAPKSSSSSSAELYLNIYDISPINHYLYWFGLGIFHSGIEVHGMEYGFGAHEYPTSGVFQVEPKSCPGFIFRRSVCVGSTDMSRSEVRSFIEDLAEDYHGDTYHLIAKNCNHFTADICKRLTGKPIPGWVNRLARLGSFCNCVLPESIKVSAVKDVTDPPEFPDDDMESNASIVDGSDADDLDHLLITPSSDVVSSKDKILTPGRDSL

SEQ ID NO: 32924 - protein, 149 aa, Oryza sativa
MSSIGTGYDLSVTTFSPDGRVFQVEYATKAVDNSGTVVGIKCKDGIVLGVEKLVTSKMMLEGSNRRIHSVHWHSGLAVAGLAADGRQIVSRAKSEAASYEKVYGEPISVKELADRVASYVHLCTLYWWLRPFGCGVILGGYDRDGPQLL

SEQ ID NO: 32925 - protein, 430 aa, Oryza sativa
MAHKQQRKIKGYGSCANNELEKLASQLTLETPASDQAGCCGNHGICSHEVLQDESPGPNPRSSHKLVSRKASFRLSWGCNGDKNGQHKHDFVSFEKGDITTAERSNKQILLKWESSPQTVLFITKPNSNSVHVLCAEMVRWLKEHKKINVVVEPRVSKELLTEDSYYNFIQTWDDDEEKKMLHTKVDLIVTLGGDGTVLWAASLFKGPVPPVVAFSLGSLGFMTPFPSEQYRDCLDNVLNGPFSITLRNRLQCHVIRDAAKDELETEEPILVLNEVTIDRGISSYLTYLECYCDSSFVTCVQGDGLIISTTSGSTAYSLAAGGSMVHPQVPGILFTPICPHSLSFRPLILPEYVTLRVQVPHNSRGQAWASFDGKDRKLLSPGDALICSISPWPVPTACLVDSTTDFLRSIHEGLHWNLRKSQSFDGPRD

SEQ ID NO: 32926 - protein, 351 aa, Oryza sativa
MAAAAAAAVACGMSTSFLIRLSPSPPASSHVPLPRSPASSARPRRASSVSLSTAPRPRARAAGSDSPSNFGGQTSLMPPFSLMLDEGSRSKKPYRWQRVLLKVSGEALAGDHTENIDPKITMAIAREVASVTRLGVEVAIVVGGGNIFRGASWAGCSGLDRSSADYIGMLATVMNAIFLQATMESIGIPTRVQTAFRMSEVAEPYIRRRAVRHLEKGRVVIFAAGTGNPFFTTDTAAALRCAEINAEVVLKATNVDGVYDADPKRNPNARLLEAVSYHEVQTRDLSVMDMTAITLCQENNIPVVVFNLQKPGNIAKAIVGEKVGTFIGCTKDQDQIVGNALDQERRLVNEL

SEQ ID NO: 32927 - protein, 132 aa, Oryza sativa
MKGDYHRYLAEFKTGAERKEAAESTMVAYKAAQDIALADLAPTHPIRLGLALNFSVFYYEILNSPDKACNLAKQAFDEAISELDTLGEESYKDSTLIMQLLRDNLTLWTSDLTEDGGDEVKEASKGDACEGQ

SEQ ID NO: 32928 - protein, 333 aa, Oryza sativa
MASGGSSNAGSLTQWLREKGFDEEAIGRMSRRCKNLHGLDAGEASGVWDYLLNVVKIERRKLRYVVTKCPKVLTLSVDDKLVPTVQCLTTLQAKPGEVAQAIVKFPQILFHSVEEKLCPLLAFFQTLGISEKQLAKLLMVNPRLISYSIEAKFSQTVNFLVGLGIDKEGMIGKIMAKEPYIMGYSVDKRLRPTAEFLKSAVGLEGSNLQRVIMSFPDILSRDVDKILRPNLAFLQSCGFSKDQVMALVAGYPPVLIKSVKHCLEPRMKFLVEEMGRDMGEVVDYPQFFRHGLKRSLEYRHKVLKQMNSRCSLSEMLDCNQKKFAMKFGLLAAV

SEQ ID NO: 32929 - protein, 297 aa, Oryza sativa
MPICPPSSESSPAPGLGGRALIFHGLALGAAAAAAAAAAYLYRRPGGFRGRAVGIIPARFASSRFEGKPLAPILGKPMIQRTWERVMLASSLDHVVVATDDERIAECCRGFGADVIMTSESCRNGSERCCEALQKLNKHYDIVVNIQGDEPLIEPEIIDGVVMALQRAPDAVFSTAVTALKPEDASDTNRVKCVLDNQGYAIYFSRGLIPFNKSGKVNPQFPYLLHLGIAGFDSKFLKIYPELPPTPLQLEEDLEQLKVLENGYRMKVIKVDHDAHGVDAPEDVEKIEALMRARNIQ

SEQ ID NO: 32930 - protein, 117 aa, Oryza sativa
MEDLQALKAAGEVWLLSNMDSQEDIVYPNDPKAKIKVDDDLKQLFREMELPRDMVDIEKELQKNGIKPMTNTAKRRAAAQINGVQPKAKPKKKQREITRRTKLTNAHLPELFQNLNT

SEQ ID NO: 32931 - protein, 251 aa, Oryza sativa
MVGMMETSPDDGGGGEAMAAAQQTEEDMGPPWLRPLLSTSFFVACASHPELSKNECNLFCLGCTGDALCAYCLPAHRDHHVIRRSSYHNVIRVSEVGKLIDISHVQTYVINSAKIVFLNGRPQARPGKGVTNTCEICCRSLPDSFRFCSLGCKLGGMRWDPSLTFAIRPKRGQDSGDGGSGSDYDSFSPKKARRAAAGYDQLGRFDRGMIRWSDDEGSKSNTAPITPTTPPISRCRPSRRKGIPHRAPFYG

SEQ ID NO: 32932 - protein, 31 aa, Oryza sativa
MLNISQYLHSLNSPPHYKYPCPLPHSHTLEA

SEQ ID NO: 32933 - protein, 265 aa, Oryza sativa
MEPASSSSPAPAPEAAAAGRRVPEAAELKLRRRTLETVLEQCQRALEMMREADLGIAVSEEEEEEEGADAVAANPEVGGSDGCDEEGAPPPSPPSEADYETDELCDLLKSRVASPEFLEKLDNIQKSVYQNGAVDETISWDIISAADIWDDIDKGMNISDDSEDGYVLIKQEDIVDGIASFMAAYLLSLKQTKDLTPNQLQQALSKTFSAKKRKSKLQKAWDGTKVIYNIASWSATAIGIYQNPAILKAATAAFWTSCRVASKFL

SEQ ID NO: 32934 - protein, 242 aa, Oryza sativa
MMMTSFIALVETTGAFIAASRYASATMIPPSIISRGIGWQGISILIDSFFGTANGTSVSVENVGLLALTHVGSRRVVQISAGFMIFFAILGKFGALFASIPLPIFAGMYCIFFAYVGACGLSFLQFCNLNSFRTKFILGFAFFMGISVPQYFNEYTAVAGYGPVHTGARWFNDMINVPFSSKPFVAGLVAYFLDNTIETHNNTVRKDRGYHWWDKFRSFKKDARSEEFYSLPFNLNKFFPAV

SEQ ID NO: 32935 - protein, 356 aa, Oryza sativa
MEDAAAAARRMERLASHLRPPASQMEESPLLRGSNCRAKGAAPGFKVAILGASGGIGQPLALLMKMNPLVSVLHLYDVVNTPGVTADISHMNTGAVVRGFLGQPQLENALTGMDLVIIPAGVPRKPGMTRDDLFNINAGIVRTLCEGIAKCCPNAIVNVISNPVNSTVPIAAEVFKKAGTYDPKRLLGVTTLDVVRANTFVAEVLGLDPRDVNVPVIGGHAGVTILPLLSQVNPPCSFTSEEISYLTTRIQNGGTEVVEAKAGAGSATLSMAYAASKFADACLRGLRGDAGIVECSFVASQVTELPFFASKVRLGRCGIEEILSLGPLNEFERAGLEKAKKELAESIQKGVAFINK

SEQ ID NO: 32936 - protein, 233 aa, Oryza sativa; identical to SEQ ID NO: 32288

SEQ ID NO: 32937 - protein, 307 aa, Oryza sativa; identical to SEQ ID NO: 31692

SEQ ID NO: 32938 - protein, 544 aa, Oryza sativa
MPIAAAAVTSPPAAAQVHGVVPRHASPTPQQRAAPRREQSPLNPSSQSIRSASSGTELAGSAATEASRAHIANLDRVLGKPPQVPRPASHAAASKQERQQQDGELEPLNVRHGLLNALNLSFFVPMPGMRARTAADEHMSPRSLMHMQQLLSADSPRASPRSTIAPRWRSLHGEDGWAGLLDPLDSDLRRELLRYGDFVQAAYQAFHSLPTASARHRGLMLPDRSYRPTRSLFATSALSMPPWAKRPNTPEWLTQQSNWIGYVAVCESEREVARMGRRDIAIVLRGTATCLEWAENLRASLVPLDGESGEGGGQEEPKVARGFRSLYKTAGEKVKSLSEEVMGEVRRLMEKYKGEELSITVVGHSLGGALALLVADEIATTVPDAPPVAVVSFGGPKVGNAAFVDKLQKNGRVNVLRIVNAGDMVTKVPGVAPRLPLTKEQYQHVGAELRIDSKNSPCLRPDAGPACRHDLEAYLHLIDGFTGTGRPFRHDARRSVIRLLQLQRGNVKKEYVNRARELGVDPSAPVDVGRSMAYGNCAVASPSS

SEQ ID NO: 32939 - protein, 266 aa, Oryza sativa
MDVDKIAFTGSTDTGKVVLELAARSNLKSVTLELGGKSPFIIMDDADVDHAVELAHFALFFNQGQCCCAGSRTFVHERIYDEFVEKAKARALKRVVGDPFKNGVEQGPQIDDEQFNKILRYIKYGVDSGANLVTGGDRLGDKGYYIQPTIFSDVQDNMRIAQEEIFGPVQSILKFNDLNEVIKRANASQYGLAAGVFTNNLNTANTLTRALRVGTVWVNCFDVFDAAIPFGGYKQSGIGREKGIDSLKNYLQVKAVVTPIKNAAWL

SEQ ID NO: 32940 - protein, 259 aa, Oryza sativa; identical to SEQ ID NO: 30691

SEQ ID NO: 32941 - protein, 342 aa, Oryza sativa
MAFFSHHHLQQPHPQAPPPPPPQQQQQPVPPSFRNALPVPVDGQIPAPLPFFNPPPAFQDQPAQPPLVDAMGLTAAAGLGWRQPREQELLGENSQMSSIDFLQTGSAVSTGLALSLEDRRHGGGSGAGAGNSSGDSPLLLLPMLDDDISREVQRLDADMDRFIKAQSERLRQSILEKVQAKQFEALASVEDKILRKIRDKEAEVENINKRNSELEDQIKQLAVEVGAWQQRAKYNESMINALKYNLEQVCAHQSKDFKEGCGDSEVDDTASCCNGGAANLQLMPKENRHSKDLTACRVCKSSEACMLLLPCRHLCLCKECESKLSFCPLCQSSKILGMEIYM

SEQ ID NO: 32942 - protein, 212 aa, Oryza sativa
MSVETERSSTESSAASGLDFEDTALTLRLPGSSSSSSSSSSSSSSSSPSEPDRKRASATDDDPDNRLGSTATESPPSPKARVVGWPPVRAFRKNALAALAAASSSKAKFVKVAVDGAPYLRKVDLEAYRGYDQLLAALQDKFFSHFTIRKLGNEEMKLVDAVSGNEYVPTYEDKDGDWMLVGDVPWKMFVETCQRLRLMKSSEAVNLAPRSA

SEQ ID NO: 32943 - protein, 257 aa, Oryza sativa
MSSFGGTSSVASGGGKRLEYGRTHVVRPKGAHKATIVWLHGLGDNGASWSQLLETLPLPNIKWICPTAPTRPVAVFGGFPSTAWFDVADLSEDAPDDVEGLDASAAHVANLLSTEPADIKLGVGGFSMGAATALYSATCYAHGKYGNGNPYPVNLSVSVGLSGWLPCARSLKNKIESSQEAAQKASSIPLLLCHGKADDVVLYKHGEKSADALKTTGFSNVVFKSYNRLGHYTVPEEMDEVCKWLTANLGVSSSSSA

SEQ ID NO: 32944 - protein, 267 aa, Oryza sativa
MAPTPLFLLLLLTGVTAESAHPGYAEGDGSSCDVAAVAVAERREEFDGGRIVDISHYYREEMPEWESADGTGGGFLRLVRSMRNGSDIANFSELRLTAHSGTHVDAPGHVFDHYYHAGFDVDTLDLAILNGPALLVDVPRDSNITANVMESLHIPKGVRRVLFRTLNTDRKLMWKKEFDTSYVGFMKDGAQWLIDNTDIRLVGVDYLSVGAFDECIPAHLVFLEKREVILVEALHLEHVTPGIYTLHCLPLRLRGSEGSPARCILIK

SEQ ID NO: 32945 - protein, 244 aa, Oryza sativa; identical to SEQ ID NO: 30577

SEQ ID NO: 32946 - protein, 324 aa, Oryza sativa
MELLLRPSPPPPWAIPRRSSGERTKPCRSRSRSRTGTSKQTFPVPLLVGKVGRRPFPVQCSIVRCCLSSTDAIHSTSDDIHEDNGHGHFLMKSTSDLQKVISSCFGKACLLSSVMLVLPPSCFAEPCEPEYSLPNMPLLFAIAMIGATVGGLLARQRRGELKRLNDQLRQINAALRRQAKIESYAPSLSYAPVGSKIPESEVIVDPQKDRLISYLRAGKNYLRNQAPDKAFPEFKAAFDLAQSLGDHVEEKKAARGLGASLQRQGKYKEAIKYHSMVLNISKLTGEDAGVTEAYGAIADCYTELGELEKAGKFYDKYIARLEND

SEQ ID NO: 32947 - protein, 259 aa, Oryza sativa
MAPPSDSDDSAPIPAGAISKLLIVIAMQTEALPLVNKFHLVEAEESIFPKGAPWIRYHGNYKGLHVDLVWPGKDPVLGVDCVGTVSAALVTYASIQSLKPDLIINAGTAGGFKAKGADIGDVYLASDVAFHDRRIPIPVFDMYGIGTRKTFATPNILKELNLKVGKLSTGDSLDMSPHDESAILNNDATVKDMEGAAVAYVADMFSTPAIFVKAVTDIVDGEKPTAEEFLQNLVAVTAALDKAVTEVVDFISGKCISDL

SEQ ID NO: 32948 - protein, 213 aa, Oryza sativa
MSRHPEVKWAQRIDKVYITVQLADAKDAKVNLEPEGVFSFSATAGTDGNLYESKLELNDKVNVEESKISVGVRSIFCIVEKAEAKWWKKLVRDDQKAPHFVKVDWDKWVDEDDDGADVNVDGMDFSNFGGMGGMGGMGGMGDMMGGMGGMGGMGGMAEMMGGMGGMGGMGGMGGMDEFEDESDDEEEVSKPQDAEKAAEAGKSQESDAKAETS

SEQ ID NO: 32949 - protein, 239 aa, Oryza sativa
MAHGGGEEEEERVLSHGDVVLLRCDLTILRGPHFLNDRIIAFYLAHLAADHHDDDLLLLPPSVPYLLSNLPDPASVAAVADPLRLASRRLVLLPVNDNPDVSHAEGGSHWTLLVLDNSNAVSGPRFVHHDSLPPTNLPSARRLAAVLRPLLPASAIPLIEGPTPRQTNGYDCGVFVLAVARAICNWWPTRARHSNSDSDWLEAVKREVNADSVKAMRTQLLQLIHTLIQNNTTTNQHSC

SEQ ID NO: 32950 - protein, 238 aa, Oryza sativa
MAGAAAAVEDAGMDEVQKRLMFDDECILVDEQDNVVGHESKYNCHLMEKIESENLLHRAFSVFLFNSKYELLLQQRSATKVTFPLVWTNTCCSHPLYRESELIQENYLGVRNAAQRKLLDELGIPAEDVPVDQFTPLGRMLYKAPSDGKWGEHELDYLLFIVRDVKVVPNPDEVADVKYVSREQLKELIRKADAGEEGLKLSPWFRLVVDNFLMGWWDHVEKGTLNEAVDMETIHKLK

SEQ ID NO: 32951 - protein, 276 aa, Oryza sativa
MAFRLSNSLLGILNAVTFLLSVPVLGGGIWLATRADGTECERYFSAPVIAFGVFLLLVSLAGLVGACCRVNCLLWFYLVAMFVLIVVLFCFIVFAFVVTNKGAGEAVSGRGYKEYRLGDYSNWLQKRMENSKNWNRIRSCLQDSKVCKKLQDKNWDRTQFFKADLSPLESGCCKPPSSCNFLYVSGTNWTKVPTNSSDPDCNTWVDDGTQLCYNCQSCKAGAVATLKRDWKRVAVVCIVFLVFIVIVYSLGCCAFRNNRRDNRGAYRGAAWKGGYA

SEQ ID NO: 32952 - protein, 71 aa, Oryza sativa
MQFFLNSSTKRSNIIPGTWSISMINICSELFMMLYLQLLNFKTDERENASLLICILHCQIFSLTAFLCERY

SEQ ID NO: 32953 - protein, 386 aa, Oryza sativa
MILFCKAAVEVPWFAPCGGSIYGDGNLVFIANDWHTALLPVYLKAYYRDNGLMQYTRSVLVIHNIAHQGRGPVDDFATMDLPEHYIDHFRLYDPVGGEHSNVFAAGLKMADRAVTVSHGYLWEIKTMDGGWGLHEIINHNDWKLQGIVNGIDMAEWNPEVDEHLQSDGYANYTFETLDTGKKQCKEALQRQLGLQVRDDVPLIGFIGRLDHQKGVDIIGDAMPWIAGQDVQVVMLGTGRPDLEEMLRRFESEHNDKVRGWVGFSVQLAHRITAGADVLLMPSRFEPCGLNQLYAMAYGTVPVVHAVGGLRDTVAPFDPFADTGLGWTFDRAEANRMIDALGHCLNTYRNYKESWRGLQARGMAQDLSWDHAAELYEDVLVKAKYQW

SEQ ID NO: 32954 - protein, 201 aa, Oryza sativa
MNSRTSMAQRDEVIRRTVYVSDIDHQVTEEQLAALFINCGQVVDCRMCGDPNSVLRFAFIEFTDEESARAALNLSGTVLGYYPVRVLPSKTAIAPVNPTFLPRSDDEREMCARTIYCTNIDKKVSQADVKLFFESICGEVYRLRLLGDYHHSTRIAFVEFVMAESATAALNCSGVILGSLPIRVSPSKTPVRPRAPRQLMH

SEQ ID NO: 32955 - protein, 325 aa, Oryza sativa
MLFRYLQEKDLFEKYYKQHLAKRLLSGKAASDDSERSMLVKLKTECGYQFTSKLEGMFNDLKTSHDTTQRFYAGTPDLGDAPTISVQILTTGSWPTQPCNTCNLPPEILGVSEMFRGFYLGTHNGRRLTWQTNMGTADIKAVFGNGSKHELNVSTYQMCVLMLFNSADCLSYRDIEQTTAIPSADLKRCLQSLALVKGKNVLRKEPMSRDISDDDNFYVNDKFTSKLFKVKIGTVATQKESEPEKMETRQRVEEDRKPQIEAAIVRIMKSRRVLDHNSIVTEVTKQLQPRFMPNPVVIKKRVESLIEREFLERDKTDRKLYRYLA

SEQ ID NO: 32956 - protein, 193 aa, Oryza sativa
MGSGSFLKLLANNFDVLAGPLVSLAYPLYASVRAIETKSPVDDQQWLTYWVLYSFITLFELTFAPVIEWLPFWSYAKLFFNCWLVLPCFHGAAYVYDHFVRPMFVNRQIVNVWYVPRKENLSKPDDVLSAAERYIEQNGPEAFEKLISKSTRPSTSKRSTKQSILEEVESEHMARAERESWGENPFYDKNYRC

SEQ ID NO: 32957 - protein, 90 aa, Oryza sativa
MAARKGCTPSQLALAWIHHQGRDVCPIPGTTKIENFNQNVAALSVKLTPAEMAELESYASNVHGDRYPLMMANTTWQDSETPPLSSWKSE

SEQ ID NO: 32958 - protein, 515 aa, Oryza sativa
MGEDGGVNSSSNSPAAAVGLVLVVAICTYLAVVATRKQKRRRRRRPPVVGTAFHQLYHVRRVHDYHTALSREHMTFRLLVPAGREQIYTCDPAVVEHILRTNFANYGKGSFNHGNMSDLFGDGIFAVDGDKWKQQRKIVSYDFTTRALRDFSGDVFKRNAAKLAGVVSSHAASNQSMDFQGFLMRATMDSIFTIAFGQDLNTLDGSGEGRRFAAAFDDASEFTMLRYLNPFWKLSRLLNVGAEAMLKERIKVVDGFVYKLIRDRSDELSNTKAHDTDSRQDILTRFIQATTSDSGTVDYKYLRDIILNIVIAGKDTTAGSLAWFLYMMCKHPEVQEKICHEAMEATNAGEAASIDEFSQSLTDEALNKMHYLHAALTETLRLYPAVPLDNKQCFSDDVLPNGFNVSKGDIVFYIPYAMGRMESLWGKDAESFRPERWLDENGVFQQESPFKFTAFQAGPRICLGKDFAYRQMKIFAAVLLRFFVLKLRDEKEIISYRTMITLSVDQGLHLTAMAR

SEQ ID NO: 32959 - protein, 249 aa, Oryza sativa
MARYDRAITVFSPDGHLFQVEYALEAVRKGNAAVGVRGTDTVVLGVEKKSTPKLQDSRSMRKIASLDTHIALACAGLKADARVLINRVRVECQSHRLTVEDPVTVEYITRYIAGLQQKYTQSGGVRPFGLSTLIVGFDPYTEKPALYQTDPSGTFSAWKANATGRNSNSMREFLEKNYKDTSGKETIKLAIRALLEVVESGGKNIEIAVMTHKDGLRELEEAEIDEYVAEIEAEKAAAEAAKKGAPKET

SEQ ID NO: 32960 - protein, 241 aa, Oryza sativa
MNGNKQSLIYSFVAKGSVVLAEHTAFSGNFSTIAVQCLQKLPPNTSKSTYSCDGHTFNFLVDRGFVFLVVADEAVGRSVPFVFLDRVKEDFMQRYGSSIDEEGQHPLADDADDDDFLLEDRFSIAYNLDREFGPRLKDHMLYCINHPEEISKLSKVKAHLTEVKGIMMDNIEKILERGEKIELLVGKTETLQSQADSFHRHGRELRRKMWLQNLRFKLMVGGAVAALILFLWLIICGGFKC

SEQ ID NO: 32961 - protein, 205 aa, Oryza sativa
MTMRLAAAVEERCPGVVSRAADAQRDLPDSTFTISELIRNFRRKNFTIEELVILSGAHAVGVGHCSSLRARLTAPPEQILPGYRSLLAGKCAAGEDPIVPNNVRDEDPAAVAATIPSFLPKLRKFEFLDNSYYHNNLARIVTFNSDWQLLTEKKARGHVHEYADNGTLWDEDFSDALVKLSKLPLPPKAKGEIRRHCRRVNTHHY

SEQ ID NO: 32962 - protein, 170 aa, Oryza sativa
MERVAAYRKVLKTWSRWVEKHVDPKRSTVFFMSVSPVHMQSEGWGKPDAIKCFSETQPAINYTKKLEVGTDWDLFSTAHHVTKAMKRVPVHFINITALSEIRKDAHTSVNTLRQGKLLTKEQKANPRKFADCIHWCLPGLPDTWNEFIYGHIVSSPQRRPVEPIENQPQR

SEQ ID NO: 32963 - protein, 253 aa, Oryza sativa
MGNSLWMTRFFSGVSHGGCREPCFRQDAAGLGDEVGDRAGGGARRGAHPLDGADGVARQHQVVQRAAHQELRGAGVGPRPPHAGRPVILADEGVRLPCPGGDRHSPGLAEGRRVQLRRAAPRAAHRQGADARRRQRGGTRPAALGAVRRPGGVDRRGVRPGAPQVPERRGGDGAAPPARHRLLGAAPRQAAVHVRGGREDRRDPPLQPRRPSGHRQRRRGRGAFTITDQPTLPSGSPYIDLSLSERKLSWRIA

SEQ ID NO: 32964 - protein, 106 aa, Oryza sativa
MAELVGPRVYSCCHCRNHVCLHDDIISKAFQGRNGRAFLFSHAMNISMGPKEDRQLMTGLHTVADIYCRDCREVLGWKYERAFEESQKYKEGKFIFEKAKIVKENW

SEQ ID NO: 32965 - protein, 364 aa, Oryza sativa
MAGTVTVPSASVPSTPLLKDELDIVIPTIRNLDFLEMWRPFFQPYHLIIVQDGDPTKTIRVPEGFDYELYNRNDINRILGPKASCISFKDSACRCFGYMVSKKKYVFTIDDDCFVAKDPSGKDINALEQHIKNLLSPSTPFFFNTLYDPYREGADFVRGYPFSLREGAKTAVSHGLWLNIPDYDAPTQMVKPRERNSRYVDAVMTVPKGTLFPMCGMNLAFDRDLIGPAMYFGLMGDGQPIGRYDDMWAGWCMKVICDHLSLGVKTGLPYIWHSKASNPFVNLKKEYKGIFWQEDIIPFFQNATIPKECDTVQKCYLSLAEQVREKLGKIDPYFVKLADAMVTWIEAWDELNPSTAAVENGKAK

SEQ ID NO: 32966 - protein, 206 aa, Oryza sativa; identical to SEQ ID NO: 32417

SEQ ID NO: 32967 - protein, 343 aa, Oryza sativa
MKTHERAANLALAGLSLAPLVVKVEPNVNVILTACLAVYVGCYRSVKPTPPSETMSKEHAMRFPLVGSAMLLSLFLLFKFLSKDLVNAVLTAYFFILGIAALCATLLPSIKRFLPKEWNDNAIVWCAPFFHSLSVEFTKSQVVASIPGFFFCIWYAAKKHWLANNVLGISFCIQGIEMLSLGSFKTGAILLAGLFFYDIFWVFFTPVMVSVAKSFDAPIKLLFPTGDAARPFSMLGLGDIVIPGIFVALALRFDVSRGIKNRYFNSAFLGYTVGLTVTIIVMNWFQAAQPALLYIVPGVIGFVAVHCLWNGEVKPLLEYNESKAEEEDAVEEDTDSKQNKKEE

SEQ ID NO: 32968 - protein, 516 aa, Oryza sativa
MVIPWCSSMMRLLWFLFALLLARSVADAATANYTFTVESMRVSRLCNSTDIIAVNGLLPGPMIEVNEGDAVAVEVINGSPYNLTIHWHGILQLLTPWADGPSMVTQCPIQPNSSYTYRFNVTGQEGTLWWHAHSSFLRATVYGALIIRPRNGSAYPFPAPDQEVPIVLGEWWSRNVVDIESDAVSSGQLPRESDAFTVNGVTGELYQCATQHDGATPGHQRWTQHAPLLQGGRPRVHRRGRRRVLHRQLHHGHARARAGAHRGRAHGHQRVGRQLLHGGAGVRQPVSDHHGRNRRHHRHGHRALQHHVDQEKRDARHAHHAPELRLRDGQRLLLRAEGPAVSQRAGRADQGGREHDHRAGPRPAAVRLHTEQLLGEIRRGGDERRVVPPPVADVPPGGAVQPHAGGVHRRLPGRPAAERHADGRGDQGAEAQVQLDGGDRAAEPDRLPVGEPPDPPPRLQLLRAGPGPRQLHAGQRERLQPRRPGFAQHPRRADRRLGRHPFRCQQSRHVVLPLPP

SEQ ID NO: 32969 - protein, 230 aa, Oryza sativa
MTLVRYPQAIGSLVAVFLSSFATMCIFTSGTLYAIGGVCIKPVLVLVLWILYFLFPLISLPLLHPIQIIIRADAVRMQLLGFIICLFVSGAGFYFKSHRWRAAHIIVIALVQSTANGVLYSFGRILLLDASPPGKEGAFAVWYAFVRCIGAMIGFAAASAGPGRAGGSFAAAFLGSFLGIIVLIFGNVSNIGALKAAGHLKGMEDEKRLGMEKGEGMSAVADSGEGRGRV

SEQ ID NO: 32970 - protein, 151 aa, Oryza sativa
MSSLMDKAKGFVAEKIAHIPKPEASLDSLSFKGMSRECITVHSNVNVSNPYDHRLPICELTYTLKCAGNVVASGTMPDPGWIAASDTTKLEIPAKIPYDFLISLVKDVGRDWDIDYQLDVGLTIDLPIVGNFTIPLSTSGEMKLPTLKDMF

SEQ ID NO: 32971 - protein, 244 aa, Oryza sativa
MLFHYDGEMDGWRELGWSDRAIHVAAKDQTKWWFGKRFLHPDMVAEYEYIFLWDEDIEVDGFDPIRYLRVVRRERLEISQPALDHRSQIHHRLTLRARKGQVHRRFYKTRGGGRCDDNSTGPPCTGWVEMMVPVFSRAAWRCAWHMIQNDLIYAWGLDFKLGYCAGGDRRLAVGIVDSEYVLHRGIPTLGDGGGKPAAKRSSTATKAATDRLAVRQRSYTELQIFNRRWKAAAEGDVCWTDPYP

SEQ ID NO: 32972 - protein, 295 aa, Oryza sativa
MPMSDPTAAVIPKPGGIGVGGGGGDDEEPVEIREVWADNLEEEFALIRDVVDEFPFVAMDTEFPGIVCRPVGAFRSPADYNYATLKANVDMLHLIQLGLTFSSPRGELPALGPGRRRCVWQFNFREFDDARDIFASDSIELLRRSGIDFRRNSERGVDARRFAELLMSSGVVLNDSVYWVTFHAGYDFGYLLKILTCSSLPDTQAGFFKLMKIYFPTVYDIKHLMKFCNSLHGGLNKLAELLDVERVGESHQAGSDSLVTSCAFWKLKDSFFAGSTEKYAGVLYGLNAENVVSAH

SEQ ID NO: 32973 - protein, 315 aa, Oryza sativa
MASLTLPPAPTNPRQDAIDLHKAFKGFGCDSTTVINILTHRDSMQRALIQQEYRTMYSEDLSRRISSELSGHHKKAMLLWILDPAGRDATVLREALSGDTIDLRAATEIICSRTPSQLQIMKQTYHAKFGTYLEHDIGQRTSGDHQKLLLAYVGIPRYEGPEVDPTIVTHDAKDLYKAGEKRLGTDEKTFIRIFTERSWAHMASVASAYHHMYDRSLEKVVKSETSGNFELALLTILRCAENPAKYFAKVLRKSMKGMGTDDSTLIRVVVTRTEIDMQYIKAEYYKKYKKSLAEAIHSETSGNYRTFLLSLVGSH

SEQ ID NO: 32974 - protein, 262 aa, Oryza sativa
MSDLSLDQDSCTSPWRICTVTQVEELKILIRLLPIWATGIFFCVGISQMHTTFIQQGTVMNTKIGSLSIPAASLYSFEVICVTFWVFLVNKVIIPVTRACFANGAEMTQLQRIGIGRFLMIFAMAIAAFLEMKRLESVQGGDQPLSIAWQLPQYFVIAGAECFTIITQLEFFHGQAPDSMKSMLTAFALLTTALGNYFSSAIITLIARVTGTWHSPGWIPDDLNKGHLDYYYWCLAAISAVNFVVYIYFASKYKLKKAVIQV

SEQ ID NO: 32975 - protein, 210 aa, Oryza sativa
MRAINAGCWIVRRVYGWCVADAGLQRSGKSCRLRWVNYLHPGLKRGRMSPEEERMVVQLHAKLGNRWSRIAKSIPGRTDNEIKNYWRTHLRKLKLKQQKQQQSDDHHNDNDDDDDRNSSSSSSSSNSNSNLQQQPQPEDESSASGSLQAQHHEDQHQLFLHPLWNDDIIVDVDCWSSSTNVVAPPPMPASPLWDIDDAFFCSDYSLPLWG

SEQ ID NO: 32976 - protein, 265 aa, Oryza sativa; identical to SEQ ID NO: 30789

SEQ ID NO: 32977 - protein, 252 aa, Oryza sativa; identical to SEQ ID NO: 31347

SEQ ID NO: 32978 - protein, 290 aa, Oryza sativa
MASSMAATATLSPPVLSAERPTVRGGLFLPPSPATSRSLRLQSARRCGISPATRKPRSLPRAAKVVVAVKADPLKVMIAGAPASGKGTQCELIKSKYGLVHISAGDLLRAEIAAGSENGKRAKEFMEKGQLVPDEIVVNMVKERLLQPDAQEKGWLLDGYPRSYSQAMALETLNIRPDIFILLDVPDELLVERVVGRRLDPVTGKIYHLKYSPPENEEIASRLTQRFDDTEEKVKLRLQTHYQNVESLLSIYEDVIVEVKGDALVDDVFAEIDKQLTSSLDKKTEMVASA

SEQ ID NO: 32979 - protein, 280 aa, Oryza sativa
MRGGVAGPTAGEPPGTEAEAEEVEESSAGDDEELELGLSLGSKKQQQQQHAPCRILTARDLQPAAALSPDSSVSSSSPAAAAAAGGKRAEGPTATTSPGTVASGHPHSFGVVGWPPIRQFRMNSLFNQAKENTSETDTKKTATNESDVQKDKEEGEKKGRVAGWVKVNMDGEVIGRKVDLNAHRSYKTLALALELMFTKPSIGLCASHNTNSLKLLDNSAEYQLTYEDRDGDWMLVGDVPWEMFVSSVKRLRIMRTSDANGLGQRYQGIHRTIASTRGRS

SEQ ID NO: 32980 - protein, 265 aa, Oryza sativa
MARGLKKHLKRLNAPKHWMLDKLGGAFAPKPSSGPHKSRECLPLILIIRNRLKYALTYREVISILMQRHVLVDGKVRTDKTYPAGFMDVISIPKTGENYRLLYDTKGRFRLQSVKDEDAKFKLCKVRSVQFGQKGIPYLNTYDGRTIRYPDPLIKANDTIKIDLETNKIVDFIKFDVGNVVMVTGGRNTGRVGVIKNREKHKGSFETIHVEDALGHAFATRLGNVFTIGKGNKPWVSLPKGKGIKLSIIEEQRKRDAAAQAAANA

SEQ ID NO: 32981 - protein, 245 aa, Oryza sativa
MKFNIANPTTGCQKKLEIDDDQKLRAFYDKRISQEVSGDALGEEFKGYVFKIMGGCDKQGFPMKQGVLTSGRVRLLLHRGTPCFRGYGRRDGERRRKSVRGCIVSQDLSVINLVIVKKGDNDLPGLTDTEKPRMRGPKRASKIRKLFNLAKDDDVRKYVNTYRRTFTTKNGKKVSKAPKIQRLVTPLTLQRKRARIAQKKQRIAKKKSEAAEYQKLLAQRLKEQRERRSESLAKRRSKLSAATTA

SEQ ID NO: 32982 - protein, 273 aa, Oryza sativa; identical to SEQ ID NO: 32167

SEQ ID NO: 32983 - protein, 239 aa, Oryza sativa
MKNTRKRKHRASAEGHANVCAAGRPKAAQHGTPKVWPAGGAARCWKINLPGDEGCDKIDATPSRTISSNIVQFFCLSLSLSTCIFQAFSTYMHGQSFNSHQSIHWRRLRRRQNTEGGRTRRHERSRWLPAGASDARRGYRRSPKRRRQAIDIRPAIPLPDEKVQHAGRRLDRMTEERGSARSSTPARQAFSFFLFYRLIMESRGHRCRTTAKERIHPSTPGINKIDRSTHFHPENTQHT

SEQ ID NO: 32984 - protein, 237 aa, Oryza sativa
MARPRAPLLRRMLLLCAVAASCSYYLLVLHAQASVPPRYDGFAYGDAATAAWKDTILVEAFLDPLCPDSRDAWAPLRLAVDRYAPRVSLIVHPFPLPYHTNSFLACRALYIANKLNSSSTYPLLELFFKSQGKFYNAATSSLSSTVISGEMSKLAARVVGNSVSEFQSGFSDIRTDLAARVSFKYGCTRGVAGAPFFFVNGFLQPGGGSPIDYSTWVSILDPLAGQHGDRLEMFTSM

SEQ ID NO: 32985 - protein, 200 aa, Oryza sativa
MSCLPNMIVMSPSNEDELIDMVATAAMVEDRPICFRYPKGAIVGTSGTLAYGNPLEIGKGEILAEGKEIAFLGYGDVVQRCLIARSLLFNFGIQATVANARFCKPLDIDLIRMLCQQHDFLITVEEGTVGGFGSHVSQFISLDGLLDGKIKWRPIVLPDRYIEHASLTEQLDMAGLTAHHIAATALTLLGRHRDALLLMK

SEQ ID NO: 32986 - protein, 478 aa, Oryza sativa
MKQTVVLYPGGGVGHVVPMLELAKVFVKHGHDVTMVLLEPPFKSSDSGALAVERLVASNPSVSFHVLPPLPAPDFASFGKHPFLLVIQLLRQYNERLESFLLSIPRQRLHSLVIDMFCVDAIDVCAKLGVPVYTFFASGVSVLSVLTQLPPFLAGRETGLKELGDTPLDFLGVSPMPASHLVKELLEHPEDELCKAMVNRWERNTETMGVLVNSFESLESRAAQALRDDPLCVPGKVLPPIYCVGPLVGGGAEEAAERHECLVWLDAQPEHSVVFLCFGSKGVFSAEQLKEIAVGLENSRQRFMWVVRTPPTTTEGLKKYFEQRAAPDLDALFPDGFVERTKDRGFIVTTWAPQVDVLRHRATGAFVTHCGWNSALEGITAGVPMLCWPQYAEQKMNKVFMTAEMGVGVELDGYNSDFVKAEELEAKVRLVMESEEGKQLRARSAARKKEAEAALEEGGSSHAAFVQFLSDVENLVQN

SEQ ID NO: 32987 - protein, 66 aa, Oryza sativa
MPAGRLACDIEKLSDEAAAQFAFSQLKKILPNAAEPIHYLVSHWGSDENTLGSYTFDGVGKPRDLY

SEQ ID NO: 32988 - protein, 206 aa, Oryza sativa
MLSSDEEREGVDDNGTIVVVVDGDMAAASVHHSACWVGAHAENGRQLGRGPGCLGASWCGNGDTLGELGMRVEDALPLFQAVCLARQAEAIPRNIWEKLLVSPVFPALSCPGPAAVAPFPHVCVPANISTTTSEHFDGFLFFSFFLSLFNPVSLVRPPDSPVHRCFQFIGKTLPFFWGLLVSAVCALWLRQIVPCIDEHLFRSYAQ

SEQ ID NO: 32989 - protein, 254 aa, Oryza sativa
MAAAAGGVAGEPSGTRTKQLKVAVIHPDLGIGGAERLIVDAACQLAVHGHDVHVFTSHHDKNRCFEETVSGPFEVKVYGDFLPRHIFYRFHAICAYLRCIFVAMCVLLWWPSFDIILVDQVSVVIPLLKLKAKSKIVFYCHFPDMLLAQHTTMLRRLYRKPIDMIEETTTGMADLILVNSKFTATTFARTFCSLHARGVEPAVLYPAVSVEQFQEPHAYKLNFLSINRFERKKESWSCHFSIFSASLCCFYATW

SEQ ID NO: 32990 - protein, 131 aa, Oryza sativa
MDPHHLNRPTADDAAAADDDWDNDGFVIPSLSVEESDLGDWEAAQVSRPQPPPKATKDTEKIYLGPHGAPPSRAKKQEDTAAAATGYRDKSKVKEADQKVLGTGRDNKGGNNFNRYNNAGHHVKEPYKRST

SEQ ID NO: 32991 - protein, 175 aa, Oryza sativa
MDVVKAAQLSGRTLEKVVVHPLVLLSIVDHYNRVARDTRKRVVGVLLGTSSRGSVDVTNSYAVPFEEDDKDPRIWFLDHNYHESMFSMFKRINAKEHVVGWYSTGPKLRENDLDIHALFNNYVPNPVLVIIDVQPKELGIPTKAYYAVEEVKENATQKKSKGVCSCSFRNSCPRG

SEQ ID NO: 32992 - protein, 213 aa, Oryza sativa
MGVEVCVKAAVGHPDTLGDCPFSQRVLLTLEEKKVPYEMKLIDVQNKPDWFLKISPEGKVPVFNGGDGKWIPDSDVITQVIEEKYPTPSLVTPPEYASVGSKIFSCFTTFLKSKDPNDGSEKALLTELQALEEHLKAHGPFINGQNISAADLSLAPKLYHLQVALEHFKGWKIPEDLTNVHAYTEALFSRESFIKTKAAKEHLIAGWAPKVNA

SEQ ID NO: 32993 - protein, 245 aa, Oryza sativa
MASVQLSAGPRVSVSPAAALVAMPSVAAAASRGRRGYRGLVVRAATVVSPKYTSIKPLGDRVLVKIKTSDDKTVGGILLPTSVQSKPQGGQVVAVGEGRSMGSDSIEISVPVGAQVVYSKYAGTELEFDGSDHLILKEDDIIGILDTDDVKDLKPLNDRVLIKVAEAEEKTAGGLLLTQATKEKPSIGTVTAVGPGPLVEDGSRKPLSITPGNTVMYSKYAGSEFKGEDGEYIVLRVSDVMAVLS

SEQ ID NO: 32994 - protein, 223 aa, Oryza sativa; identical to SEQ ID NO: 30852

SEQ ID NO: 32995 - protein, 170 aa, Oryza sativa; identical to SEQ ID NO: 30190

SEQ ID NO: 32996 - protein, 245 aa, Oryza sativa
MMGAVLVSAFESTGAHFATARLAGATPPPASVLSRSVGLQGIGMFLEGIFGAPAGSSVSVENIGLLGLTKVGSRRVIQISTGFMIFFSIFGKFGAFFASIPLPIFAAIFCILFGIVAAVGVSYMQFVNKNSMRNIYIIGLSLFLGISVPQYFHEYTASASTGPARTNAGWFNDIINTVFASGPTVSLIVASILDNTLEFRGYENDRGLPWFMPFLHRRKGYSDPRNDEFYSFPIRVHDVIPSRFL

SEQ ID NO: 32997 - protein, 549 aa, Oryza sativa
MDVHKKLLLASLSCVLLIQVASSDGTAEGVGTTSWTCVCTAHPLGEPNSNSSLSSNCSSSCHCLQDDDGGTGSWNCTCASDKALKKEHTAVHDRGCFTSCNCTSGISQEGKKHVSNKTVIVTLLVCVILTTIAFLGTTAYYLRRKDALSPHSHAYSFDKYTSWSSRSNLVSHRSSPLPQPKPKPRISVLKEFLCSCNPICGNEGGPLPGVIVRFSYSELEQATGKFSDEHLIGVGGTSKVYRGQLSDAKVIAVKKLRPLGGADEDFEFLSEVELLSRLNHCHVVPLLGYCMESQGRQLERLLVFECMGNGNLRDCLDLKQGRKAMDWATRVGVALGAARGVEYLHEAAAPRILHRDIKSTNILLDDKFRAKITDLGMAKCLMNDGVTSCSSSPARMLGTFGYFAPEYAIVGKASLKSDVFSFGVVILELITGRRRGCATAGWWWRFPQEEMQIMAHLARECLQWEPESRPTMSEVVQILATIAPSSRKHAAAATLVTRIGRSSSAGDTMHSTRLAVKCSVGESWRSPEMEEETVVDLTEPRLEPAIFFN

SEQ ID NO: 32998 - protein, 261 aa, Oryza sativa
MGRVIRAQRKGASSVFKSHTHHRKGPARFRSLDFGERNGYLKGVVTDIIHDPGRGAPLAKVTFRHPFRYKHQKELFVAAEGMYTGQFVYCGRRATLSIGNVLPIRSVPEGAVVCNVEHHVGDRGVFARASGDYAIVISHNPDNGTSRIKLPSGAKKIVPSSCRAMIGQVAGGGRTEKPMLKAGNAYHKYRVKRNCWPKVRGVAMNPVEHPHGGGNHQHIGHASTVRRDAPPGQKVGLIAARRTGRLRGQAAATAAKTDKAT

SEQ ID NO: 32999 - protein, 250 aa, Oryza sativa
MAKNYPVVSAEYQEAVEKARQKLRALIAEKSCAPLMLRLAWHSAGTFDVSSKTGGPFGTMKTPAELSHAANAGLDIAVRMLEPIKEEIPTISYADFYQLAGVVAVEVSGGPAVPFHPGREDKPAPPPEGRLPDATKGSDHLRQVFGAQMGLSDQDIVALSGGHTLGRCHKERSGFEGPWTRNPLQFDNSYFTELLSGDKEGLLQLPSDKALLSDPAFRPLVEKYAADEKAFFEDYKEAHLKLSELGFADA

SEQ ID NO: 33000 - protein, 228 aa, Oryza sativa
MASAKSGERGSSSFAMACSLLSRYVRQNGAAAGELGLGIRGEADANKGKETMELFPQNSGFGSEAAAVKETPDAREQEKRQLTIFYGGKVLVFDDFPAEKAKDLMQMASKSSSTAQNCVLLPSSATATVADNTKVSAVPAPASALPVAQANAPKPVRPNAADLPQARKASLHRFLEKRKDRLQAKAPYQGSPSDASPVKKELQESQPWLGLGPQVAAPDLSLRQESSQ

SEQ ID NO: 33001 - protein, 312 aa, Oryza sativa
MARCFVLNTGAKIPSVGLGTWQAEPGVVGNAVYAAVKAGYRHIDCAQAYFNEKEIGVALKKVFDEGIVKREDIFITSKLWCTNHAPEDVPVALDSTLQDLQTDYVDLYLIHWPVRMKKGAGFGGQNVLPTDIPATWAAMEKLHDSGKARAIGVSNFSSKKLEDLLAVARVPPAVDQVECHPVWQQTKLRKFCTSKGIHLSAYSPLGSPGTASVKAVGNVLAHPVVVSTAEKLGKTPAQVALRWGIQMGHSVLPKSTHEERIKENIDVYDWSIPEDLFIKLSEIEQMKLIRGEFWTHPEGVYKSIEELWDGEI

SEQ ID NO: 33002 - protein, 472 aa, Oryza sativa
MHLLASSSSIPMATTRATSTLLLLLLLVSATWAASAPTTSRARNVITHVKGFQGRLPFHLETGYVEVDNTNTVELFYYFIQSERSPADDPLILWITGGPGCSALSGLLFEIGPLKFDVAGYTEGFPQLFYFQDSWTKVSNVIFLDAPVGTGFSYAREEQGYNVTLTQTGQQLVVFLTKWLGDHPEFASNPLYIGGDSYSGYTVPVTALQIANDDDARARLNLKGYLVGNAATDVKYDSGGKVPFMHGMGLISDEMYEAARSSCRGDYVSTPTNADCANALQAISMATFAINPVHILEPICGFALRGRAMPETTMDQRLRLGLPVECRDNGYRLSYLWADDPEVRATLGIHEGSIASWSRCTALPLFRHDVDSAIPYHAELTQRGYRALVYNGDHDLDMTFVGTQQWIRTLGYNVVTAWRPWYSNRQVAGFTTVYDHNLTFATVKGGGHTAPEYRPKECLDMLDRWTSPAGEL

SEQ ID NO: 33003 - protein, 240 aa, Oryza sativa; identical to SEQ ID NO: 30198

SEQ ID NO: 33004 - protein, 260 aa, Oryza sativa
MRLVAAKPCCLFRISSVAAVAAGRRRPWRAAAASGNAHAEAEGDEDGQSLSARARGRRARLSARRRERIVVVEGGGVGGIGEFLRQPAGVESLLNTRALQSFAAVDEAPGANTFRCTLQSIGFLGFQVAPVLDLRVAPTCHDCTVEMLSCRFEGSGSVEQQNELFSAFMSNHITWKDDGEEPCLDIDVNLEVTLEVYTKPFSMLPLSAVETPGNLLMQGLLDRLVPLLGEQLLRDYHSWVQLQQQQPEISSLETAEIDAS

SEQ ID NO: 33005 - protein, 206 aa, Oryza sativa
MQKTLRWILPIAENTIRAHQGFGWVGEWANLGCEMNKKSGSQLSITRVQTLHYADKAKTEQYMLDLVVLLHHLVVQVKNRGYGSKSSKHDQSRSRKGMDLQPESKLNTSPVNNATYPSPLSESERETLDHLSFKRTGYGRSKSCEPPPNRGKKAHRTWDSCRSHGSSPAREFGRNSASELDKTMDLDVIDGLDRLTSYHPTSPTFC

SEQ ID NO: 33006 - protein, 227 aa, Oryza sativa
MKKAKVVLAQPAARAPPSPLLPRAPGHSRGGGVGGGEEAYRARAKYKNLLQDYKELLEETEAKKKRLQMEKLKKQRLLAEVKFLRKRYKSMSENPSQTFVYRVKNPALPPTLRQPGWSHGEEYHTVRAIGSSSKGPSAHRRLNAAPRASPVIDLNEACEPSSEEMEELHGYQEPVRVGRVMRYPMEGDFAAGPSDAKMAAFWDVRNAASSRAGKRKISWQDQLALRV

SEQ ID NO: 33007 - protein, 389 aa, Oryza sativa
MIKQAMSQTFSRHGAQSGGYGQQNYRPQGHGAASQWGPRSQPQPGYGYPPRGPPPQNMPYSQPYGGYPQQPPPRGGMGWDQRQGPPPHASHHGGGYDYYKQGSQPYEGQPPNYPPGPGNYNSYGPSQGPNYGQPQYPQSAPPQNYGPGYGDPRYNAPAPNQQYYGQPPAGPQQGYPPQQDPYARPYGGPGQWAPRGAPAGDGTYQAPPPTSYGPPSQQPPAYGQTYGPTTGPDGYSQQSYPQQGAQAPATYGQSAPAGPGYAQQGAQQGGYAQYPQSQPAYGDQAAQNNANYGYQGAPADPNYGNAYPQAGYGSTPASGQAGYAAAPAAGQPGYGQPGYTQPPTNPPAYDQSAQPPAQSGYAAPPANPQPAVAKGVSPQPAGYGGQWTA

SEQ ID NO: 33008 - protein, 283 aa, Oryza sativa
MAMTPLHHTCSFFFRPQPSPSLSHSPCAAAADDDFFTVDYDPEEEKEEDEEGSPWEGAVVYRRDASVHHLEYATTLERLGLGDLSSTHSRARAATMGILILSSTNLTGTKDDDTPVLVSLDVARRRGRLRLDGIVRTVITLGCYGCAEPAPQGIFANFSLLLTEDRVEEPDVVDLGTIFEEEQTKAPSLTGSQEDGDDEDIDWDDRLHFPAGEKEIDISKHIRDIIHLEITLDALCSPTCKGLCLGCGENLNTSSCSCNAEKQQAKNVQRRGPLKDLLKPLQR

SEQ ID NO: 33009 - protein, 305 aa, Oryza sativa
MASDKCSSFLLAAAAAAVLVLASAPVAHSWSKEGHMLTCRIAQDLLEPAAAHAVRNLLTEEADGDLSALCVWPDQVRHWYKYRWTSPLHFIDTPDKACSFVYSRDCHGADGAEDMCVAGAIANFTSQLMHYNHGSADRKYNMTEALLFLSHFMGDVHQPMHVGFTSDQGGNTINLRWFRHKSNLHHVWDREMILTAIAEFYGKDMDAFQKDLVHNFTTGTWSDDVSSWGDCEDLLSCSTKYATESINLACKWAYNDVREGETLSDDYFGSRLPIVTRRIAQGGVRLAMFLNRLFGEHNRDVASPA

SEQ ID NO: 33010 - protein, 244 aa, Oryza sativa
MAAAAAAPASSEKEVLPPSLTSSSEPPPLFDGTTRLYVAYHCPYAQRAWIARNYKGLQDKIKIVAIDLADRPAWYKEKVYPENKVPSLEHNNQVKGESLDLVKYIDTNFEGPALLPDDSEKQQFAEELLAYTDAFNKASYSSIVAKGDVCDEAVAALDKIEAALSKFNDGPFFLGQFSLVDIAYVPFIERFQIFFSGIKNYDITKGRPNLQKFIEEVNKIHAYTETKQDPQFLLEHTKKRLGIA

SEQ ID NO: 33011 - protein, 232 aa, Oryza sativa
MDPSGAFFHAAPRSGSNVSLASLARTAGGRRMMHRVFRGVITFIFAIAGLFLGAVTGGLIGLATESGLFRGTGIGAITGALVSIEVVDSSIRVWRSRRSGISSICYVLNVIYSLLTGRLVREKVDPAVQRVVRSQMNAVDSSPFRESPDLFEIEGTNGMPRASIDKLPEVRITEEYRRNAIGDLSGCSVCLQDFQTGEKVRSLPDCWHVFHVPCIDGWLIKHGSCPLCRRKL

SEQ ID NO: 33012 - protein, 192 aa, Oryza sativa
MLREFLEGTESTGFMYPSAVDHFKKQFAYLEEHYAKGSTAAPPERQHNSLPRPCVVYSDNRPQSTASVTEDLSRCLIRDNNLKSQDSASVGASRIPQGAAARPGKAVGSVLRYGNCSTSAAEQQYEQRRVVRNPAIAPNSSVPLGSSYPRRNQTCKSETGDVERIDSSQTGPPKPYVANKLPATVDGRSGHW

SEQ ID NO: 33013 - protein, 318 aa, Oryza sativa
MAMQTGFATSKVLILVGAGLTSSIVLRNGRLSDVLAELQELMKGVNQGEGSSAYDIALLQSQIRNLAQEVRDLTISRPITILSGNSDSGGSLSSYILPAAAVGAMGYCYMWWKGLSLSDVMFVTKRNMTKAVESMSKQLDQVSSALAATKRHLSQRLENLDGKMDEQVEVSKIIRNEVNDVKDDLSQIGFDIAAIQQMVAGLEGKIELLDNKQDATNAGVWYLCQIAGGLKDGINAKFFQEANEKLKLTELAQSERKAVKGLESVLESRKEQKAIDSKQNTTAIIDAEKPVKTVDGPVKSGAVHRCSRISFRKEGLAL

SEQ ID NO: 33014 - protein, 391 aa, Oryza sativa
MGSRGRRGGGERETETEEDETWKLRVGDDFTVPERFHRKPPFFSRIFPAGSHGKHRKIAKYYKKQENLLKDFSEMETMNEIGSLDQNAPTEEELRQMAKGERLAINLSNIINLILFIGKVLASVESLSMAVIASTLDSLLDLLSGFILWFTAHAMKKPNKYSYPIGKRRMQPVGIIVFASVMGTLGFQVLIESGRQLITNEHQVFDHRKELWMIGSMSSVAVVKFFLMLYCRSFKNEIVRAYAQDHFFDVITNSVGLVSALLAVRYKWWMDPVGAILIAVYTITTWARTVVENVGTLIGRSAPAEYLTKLTYLIWNHHEEIRHIDTVRAYTFGTHYFVEVDIVLPGDMPLSHAHDIGESLQEKLEQLPEVERAFVHVDFEFTHRPEHKAEV

SEQ ID NO: 33015 - protein, 209 aa, Oryza sativa
MGAECKYEVAQVAYVKLALHALKHPAAAVNGLLVGRLLDGAASPAAVVSIADAVPLSHHPHHLPLLPTLELALTLVEDHFAAQGLAVVGYYHANARRDDADLPPVAKRVGDHVFRNFPRAAVLLLDNKKLEEAVKGKSREPVVQLYTRDSSKSWRQAGSDGSSQLTLKEPSTNMVLADHVTTKKWQQVVDFDDHLDDISKDWLNPGLLA

SEQ ID NO: 33016 - protein, 377 aa, Oryza sativa
MATRYWIVSLPVQTPGSTANSLWARLQDSISRHSFDTPLYRFNVPDLRVGTLDSLLALSDDLVKSNVFIEGVSHKIRRQIEELERAGGVESGALTVDGVPVDTYLTRFVWDEGKYPTMSPLKEIVGSIQSQVSKIEDDMKVRGAEYNNVRSQLSAINRKQTGSLAVRDLSNLVKPEDMVTSEHLVTLLAVVPKYSQKDWLSSYESLDTFVVPRSSKKLYEDNEYALYTVTLFAKVVDNFKVRAREKGFQVRDFEYSSEAQESRKEELEKLMQDQEAMRASLLQWCYASYSEVFSSWMHFCAVRVFVESILRYGLPPSFLSAVLAPSQKGEKKVRSILEELCGNVHSIYWKSEDDVGVAGLGGETEAHPYVSFTINFI

SEQ ID NO: 33017 - protein, 266 aa, Oryza sativa
MELESEQHGCEHYTRGCRIRAPCCGEVFGCRHCHNEAKNSLEIHLNDRHEIPRHEIKKVICSLCDKEQDVQQYCSGCGACMGKYFCEKCNFFDDDVSKNQYHCDGCGICRTGGVDKFFHCDKCGCCYSNVLRDSHHCVEGAMHHNCPVCFEYLFDSTKDISVLHCGHTIHLECLNVMRAHHHFACPVCSRSACDMSDAWKKLDEEVAATPMPEFYQKKMIWILCNDCGATSNVNFHVLARKCPGCSSYNTRETRGCGRPAAARSTV

SEQ ID NO: 33018 - protein, 252 aa, Oryza sativa
MALASTSATASAAVLKTPFLGAKRALANAVGVAGAKPAPRRALVVSAKKSWIPAFKSDAEFINPPWLDGSLPGDFGFDPLGLGKDPAFLKWYREAELIHGRWAMAAVLGIFVGQAWSGVPWFEAGAQPEAIAPFSFGSLLGTQLLLMGWVESKRWVDFFNPDSQAVEWATPWSRTAENFSNATGEQGYPGGKFFDPLGLGGETRDGVYIPDTDKLDRLKLAEIKHARLAMLAMLIFYFEAGQGKTPLGALGL

SEQ ID NO: 33019 - protein, 270 aa, Oryza sativa
MDSNSIQRLAGKVAIITGGASGIGKVTAKEFIKNGAKVIIADVQDELGHSAAAKLGPDASYTHCDVTDEAQVEAAVDLAVRLHGHLDILYNNAGIIGAMPQDDMASVDLANFDRMMAINARAALVGIKHAARVMAPRRSGVILCTASDAGVMPIPNIAMYSVSKATTIAIVRAAAEPLSRHGLRVNAISPTGTRTPMMMHIISQMTPGVGEDDLERMADAAISAGVAIEPEYVARAAVYLASDEAKYVNGHNLVVDGGFTTHKGDDNRMN

SEQ ID NO: 33020 - protein, 298 aa, Oryza sativa
MRAWSRRRRAEGKTVAVVPTMGYLHQGHLSLISAAAAAASADPVAIVVTIYVNPSQFAPSEDLATYPSDFAGDLRKLASTGVVDAVFNPPDLYVRGAGRRGAASGGAISCLEEAAGDGHETWVRVERLEKGMCGASRPVFFRGVATIVSKLFNIIEPDVAVFGKKDYQQWRVICRMVRDLDFAIEIIGSEIVREADGLAMSSRNVHLSREEREKALSISRSLVDARTGALKGNTDCKQIKNKIVQTLTETGGQVDYVEIVEQESLVPVEQIDGPVVICVAAWFGKVRLIDNIEIDTRS

SEQ ID NO: 33021 - protein, 216 aa, Oryza sativa
MLGLAKRIGAKFLLTSTSEVYGDPLQHPQVETYWGNVNPIGVRSCYDEGKRTAETLTMDYHRGANLEVRIARIFNTYGPRMCIDDGRVVSNFVAQALRKEPLTVYGDGKQTRSFQYVSDLVEGLMSLMEGEHIGPFNLGNPGEFTMLELAKVVQDTIDPNARIEFRPNTADDPHKRKPDITRAKELLGWEPKVPLREGLPLMVTDFRKRIFGDQEA

SEQ ID NO: 33022 - protein, 239 aa, Oryza sativa
MSKLCQSACKAAKSLLSATAAASSPRTSLLAEGRNAALATLTNLGRKTLPTAYAYSYHHNSSAAAAGWLAAIPAAVYMLQDQEAHAAEMERTFIAIKPDGVQRGLISEILSRFERKGFKLVAIKLVVPSKEFAQKHYHDLKDRPFFNGLCDFLSSGPVLAMVWEGEGVIKYGRKLIGATDPQKSEPGTIRGDLAVVVGRNIIHGSDGPETAKAEIGLWFEPRELVSYTSNEEKWIYGVN

SEQ ID NO: 33023 - protein, 178 aa, Oryza sativa
MASLTPEAEAPGGGALLAAGDDVTAANLLAAAVATEGPVFDMPDFKMGGKKSDDAAPTDAGDEDGGDDDGDEDGDFGEGEEDVSEGEGYDNPKGIDNNKKRGEPEENGEEDEEEPEGQEGGGGDDDDDDDDDNEDDDDDDDGGEDDDGVDEEEEDQDNEDDEEDDDEDSLQPPKKRKK

SEQ ID NO: 33024 - protein, 289 aa, Oryza sativa
MVDRMLRLLASYNVVRCEMEEGADGKLSRRYAAAPVCKWLTPNEDGVSMAALALMNQDKVLMESWYYLKDAVLDGGIPFNKAYGMTAFEYHGTDARFNRVFNEGMKNHSVIITKKLLDLYTGFDAASTVVDVGGGVGATVAAVVSRHPHIRGINYDLPHVISEAPPFPGVEHVGGDMFASVPRGGDAILMKWILHDWSDEHCARLLKNCYDALPEHGKVVVVECVLPESSDATAREQGVFHVDMIMLAHNPGGKERYEREFRELARAAGFTGFKATYIYANAWAIEFTK

SEQ ID NO: 33025 - protein, 265 aa, Oryza sativa
MQAFIDKFRYNAKRASLVQSRIKALERMEHVDAVVSDPDYKFEFPTPDDRPGPPIISFSDASFGYPGGPTLFKNLNFGIDLDSRIAMVGPNGIGKSTILKLISGDLQPTSGTVFRSPKVRMAVFNQHHVDGLDLTVNPLLYMMRCYPGVPEQKLRAHLGSFGVTGNLALQPMYTLSGGQKSRVAFAKITFKKPHIILLDEPSNHLDLDAVEALIQGLLVFQGGVLMVSHDEHLITGSVDELWVVSEGRVSPFAGTFKDYKKMLKS

SEQ ID NO: 33026 - protein, 435 aa, Oryza sativa
MWRGGATAASAARALRSRLIPDTSHHPATALAPIASPRSSSSSSSSSAPTIAAAVPAVAEATAAAAAVSRQAGSVSDALRHYGRCYFELSKARLSALVVATSGAGYVLGSGNMVDIAGLCCTCAGTMMVAASANTLNQVFEIKNDAKMKRTMRRPLPSGRISPAHAAMWATSVGVAGTALLAWKANGLAAGLAASNLILYAFVYTPLKQIHPVNTWVGAVVGAIPPLLGWAAASSELSLNAMILPAALYYWQIPHFMALAYLCRNDYLAGGYRMFSFADPTGKRTAWVSLRNCLYMLPLGFFAYNWGLTSEWFSLEASLLTLGLTIGALSFVLEPTPKTARRMFYGSLLYLPAFMAGLLLHRLPNEQKEHNVTQTSEITGILYGAEQQDEERARQKREDRKPSRIHSRPPVAYASVAPFPFLPVPIYVSTQGHEL

SEQ ID NO: 33027 - protein, 312 aa, Oryza sativa
MAAAWAAAVAVMLLLAQVSAAAPVMGPAFLWAPNNYGFSSDETKEMVYYQTVSPKSLVKSVLEEGGWSNLVCSREDHAKSVDVAVLFLGSKLQSSDISKEKQADSTLVDMLKNSFASSEFSMAFPYVAMSDDDKLEKSLLSGFAENCNNGLGNNHITYTDTCSVSEDLKKHHDMDSIHGLVASQTKKNPSGQTDLVVFCDGGFKDNTKSEGELLSELVTLLKKSGAKYTILYASQPYGLLESPSNLPLGRYLAEKTNTTKPGRGKCDGECLVKSTLLEGSFVGIVLLIILISGLKCMMGIDTPSKFDAPPES

SEQ ID NO: 33028 - protein, 356 aa, Oryza sativa
MVLCGFSLDVSLWRCRQLTSKLMTVREALNSALDEEMSADPSVFLMGEEVGEYQGAYKISKGLLDKYGPERVLDTPITEAGFTGIAVGAAYQGLRPVVEFMTFNFSMQAIDHIINSAAKSNYMSAGQISVPIVFRGPNGAAAGVGAQHSQCYAAWYAHVPGLKVLVPYSAEDARGLLKAAIRDPDPVVFLENELLYGESFPISAEVLDSSFALPIGKAKIEREGKDVTITAYSKMVGYALQAADILSKEGISAEVINLRSIRPLDRATINASVRKTNRLVTIEESFPQHGIGAEICMSVVEESFEYLDAPVERIAGADVPMPYAANLERMAVPQVDDIVRAAKRACYRAVPMAATA

SEQ ID NO: 33029 - protein, 223 aa, Oryza sativa
MAQPSSKKTPSVYLYIPNIIGYFRIIINFIAFAVCYSNRVLFAILYFFSFFCDGLDGWFARKFNQASTFGAVLDMVTDRVSTACLLALLSQFYRPGLVFLMLLGLDITSHWFQMYSSFLSGKTSHKDVKDTGNWLLKLYYGHRPFMAFCCVASEVLYIVLFLFADEKSTSLLNVCGNLLKQSPLTVFVFISTLVGWALKQVINVIQMKSAADACVVFDLKRGK

SEQ ID NO: 33030 - protein, 352 aa, Oryza sativa
MMFFSTLEGPVSHSERKRSACCKVLYFTIWNVFFVNVLSGSAISQVNALSSPKDIPMVLARAVPVQATFFTTYVLTSGWASLSSELMQLFGLTWNFIMKYVLRMKEDSYFVPSFPYHTEVPKVLLFGLLGFTCSVLAPLILPFLLVYFFLGYVVYRNQFLNVYCTKYDTGGLYWPIAHYTTIFSIVLTQIICLGVFGLKESPVAAGFTVPLIILTLLFNQYCSNRLRPLFKTLPAQDLIDMDREDEQSGRMDDIHHRLHSAYCQFADTDDIPLKGVHVDRDADASGSSGESSCKEDTNQPTTSDISHPTLEGLPVNRLRHAVRSLSSIIRLQKRGLSPQPAGPSADVNPQTA

SEQ ID NO: 33031 - protein, 238 aa, Oryza sativa
MWPEGVPESGSVQAILDWQRRTMEMMYTDITEALQAKGIEANPKDYLTFFCLGNREVKQAGEYRPEEQPEADTDYSRAQEARRFMIYVHTKMMIVDDEYIIIGSANINQRSMDGARDSEIAMGGYQPYHLATRQPARGQIHGFRMALWYEHLGMLDDVFQRPESLECVQKVNRIAEKYWDMYSSDDLQQDLPGHLLSYPIGVASDGVVTELPGMEYFPDTRARVLGAKSDYMPPILTS

SEQ ID NO: 33032 - protein, 101 aa, Oryza sativa
MIGGRQCFVEEKRTPGSRGSSRGGRFAPGRGNNNFRADGMRGRGNYSGGRSYGRGDFSYRSDYGGRGGGRGGSARGPDVGYQRVDGGRGGRTSAGPGAPAK

SEQ ID NO: 33033 - protein, 224 aa, Oryza sativa
MVGTSSWSSSSSSSLGSLDDDIIVACVVKAADAAVEGACVKFLCSYGGRILPRHADGALRYVGGDNRVVSVDRSLPFHELQRKLREMCGWEAVCLRCQLPTEDLDALVSVNGDDDLANLLEEYDAASRDRLQPLKIRAFLFPRTTATTTAPLSRSPSPTAASRTAPRAHYQHQTGSAPSCASRWAARQMSLPPARVPHQQQHYNRHGGDARPQRYLVQSASSRW

SEQ ID NO: 33034 - protein, 226 aa, Oryza sativa
MEQAAGLVYQLFQNEMFPWILALFPFLLLALHYLATNHRTPTTCKETRNHLSPPSPPRLPIIGHLHLIGDLPHVSLRELAHRYGPNLMLLHLGQVQNLVVSSPHAAEAVLRTHDHVFASRPHSLIGDILLYGPSDVGLSPYGEQWRRSRRIVTTHLLTNKKVRSYHVAREEEVHKVMTKVHELSTKGMGVDMFELFSTYSNDLIYRLVSGKNFQGDKGQEHEEVVG

SEQ ID NO: 33035 - protein, 160 aa, Oryza sativa
MSDSEEHHFESKADAGASKTYPQQAGTIRKNGYIVIKNRPCKVVEVSTSKTGKHGHAKCHFVAIDIFTAKKLEDIVPSSHNCDVPHVNRTEYQLIDISEDGFVSLLTENGNTKDDLRLPTDDNLLSQIKDGFGEGKDLVVTVMSAMGEEQICALKDIGPK

SEQ ID NO: 33036 - protein, 273 aa, Oryza sativa
MLLLHSSPRLLLRHRLLLPPSRDLLPAASASALRLRRSVAVRAEPELSTSAAEPPPGDDGEGDGPVELRTPTLFSIDENPTPLQTATSVLLTGAISVFLFRSIRRRVRRAKELRVRSGGVEKPNNLSKEALEGLRLVSASPIEVDKPPSPVQALLGGIAAGVIALILYKFTTTIEAALNRQTISDSFSVRQITITIRTIINGICYLATFVFGINSIGLVLYGLQLTFASIMGDDNSSSAAEKISEQSNTMASSNSSTDSTSDNESTSNDKSKG

SEQ ID NO: 33037 - protein, 340 aa, Oryza sativa
MAVRVPSMELHRPPPSVSGVRGKSCLQKPFLVQAKRLEGLEKANPRSRGKQSLEQVKKRAPLIRGTVSPPLPVPGHITQPPYVGKKDASEIASEIQMHDKVSIIHMKAACELAARVLEYAGTLVKPSVTTDEIDKAVHKMIIDAGAYPSPLGYGGFPKSVCTSVNECICHGIPDSRELQDGDIINIDVTVYLNGYHGDTSKTFLCGEVDEASKRLVKVTEECMLRAISACKHGTSLKKIGRRISEHAERHGFGVVDRFVGHGVGRIFHSEPMIYHQRNNMPGQMVEGQTFTIEPALSMGSIDCDMWDDGWTAVTTDGSLAAQFEHTILITKTGAEILTKC

SEQ ID NO: 33038 - protein, 257 aa, Oryza sativa
MAIDHASPFSLKNRGDMGGRGYEEEEVENQRWPPWLKPLLSTSFFVQCRIHADAHKSECNMYCLDCMNGALCSLCLSHHRDHHAIQIRRSSYHDVIRVSEIQKVLDITGVQTYIINSARVVFLNERPQPRPGKGVTNTCEVCERSLLDSFRFCSLGCKIVGTSGGYRPRKKHGGCGGGGGGGDGGKKKKKRAALKDARYESEDSCTSTSGGSSDKSSVVQSFTPLTPPPTSASYRTGNKRRKGVPHRSPFGSLIVEF

SEQ ID NO: 33039 - protein, 187 aa, Oryza sativa; identical to SEQ ID NO: 30736

SEQ ID NO: 33040 - protein, 328 aa, Oryza sativa
MEGYDREFYQFSDQLRLQTASFSGLSLGDSIWSSPSDRRNEPAFDGEYHHFSSPSPAKNAIATKADRYNSVNLPVDNNNNNKSYGGAAKINNNNVNAFGFNKMGGYNNSSNGGGNYGGNGGDVKSYFNKSVGRPASNNNNNNSNGGGGYYGKKGGDGAGGKKKHAKNSDSGAQASDKRFKTLPASEALPRDEAIGGYIFVCNNDTMEENLKRQLFGLPSRYRDSVRAIRPGLPLFLYNYSTHQLHGIFEAASFGGTNIDPTAWEDKKCPGESRFPAQVKVATRKIYDPLEEDAFRPILHHYDGPKFRLELSVAEALSLLDIFADKDDA

SEQ ID NO: 33041 - protein, 87 aa, Oryza sativa
MTRWRKRMKGRRGGGKGGVCRSATGVHESSGSVGRRRCSAVHGCQRWSAVHGRRDVRAAELGCGRQMADPAATRSSPALASSPSASH

SEQ ID NO: 33042 - protein, 68 aa, Oryza sativa
MLLKKGAARGLTPYDIGRILCRETVNRDSEIEDIVQEAEGHVLPGSSEVIFLETVSEIIDRHLDKKFA

SEQ ID NO: 33043 - protein, 257 aa, Oryza sativa
MDRVQLLLVGLPALLFLSDLSHIFAPPPPHLRHPHHHPPHHHPHPPHHHPPHHPHPPHHPHPPHHPHPPHHPHPPHHHPHPHPDPAAEAIQANVDGAGYGTTVELQFCASCSYKGTAMTMKRMLETSFPGIHVILHNYPPPFPKRVLGKLVPILQVGAIATIMAGDHIFPRLGMVPPPWYYSLRANRFGTMATIWLFGNFAQSFLQSSGAFEVYCNGDLVFSKLAEQRFPSEFELRDLINSRLPDSLVGKNVGKSLS

SEQ ID NO: 33044 - protein, 200 aa, Oryza sativa
MARKRKTDAAPRLDEADRTLYSTFCGAANSLSQLYTQAMAQQKLSFQAGERHSLEKLHQWILRKHEEESRLTAADIMSHIQHELDYGGNDPHVSPRVHQHSANPFANSSIQPSAGSYGQATVGFAPRPSISDQSKNTIFSNALSSPVRRSLQSYHLTQGSGNGGRNAETNSAGQNRETNSGGSNDTSMDMVSDSAGNEYY

SEQ ID NO: 33045 - protein, 133 aa, Oryza sativa
MGCSEISLGDTIGVGTPGSVLAMLEAVMSFVPVDKIAVHFHDTYGQALANILVSLQLGINIVDSSVSGLGGCPYAKGATGNVATEDVVYMLHGLGIETNVDLNKLMDAGDYISKHLGRQSGSKTTTALRKLTT

SEQ ID NO: 33046 - protein, 403 aa, Oryza sativa
MDWAAAGYTAAALVCAAAATVIALVHIYRHLLHYAEPIYQRFIVRLIFMVPVYAVMSFLSLILPDNSIYFNSIREIYDAWVIYNFFSLCLAWVGGPGAVVVSLNGRTLKPSWFLMTCCFPAIPLDGRFIRRCKQGCLQFVILKPILVVITFILYAKGKYADGNFSVKQSYLYITIIYTVSYSMALYALAVFYAACRDLLRPYNPVPKFIMIKSVVFLTYWQGVLVFLAAKSRFIKNAEKAADLQNFVLCVEMLIAAIGHLFAFPYNEYAGPNGRPSGDFKGSLLHALKFNDFYHDTVHQFAPTYNEYVLYNHNEGDSTQRKYPSVSTVPSGRDVELSGISVMPANSAVTSSVSSNQADQEETMSTPIKDRVDNVGLYDLTDLLDVDLSNYPAKVPAISDVRKQ

SEQ ID NO: 33047 - protein, 268 aa, Oryza sativa; identical to SEQ ID NO: 30739

SEQ ID NO: 33048 - protein, 426 aa, Oryza sativa
MAPEPEDDIMNEKNPRPLDEDDIALLKTYGLGPYSTSIKKVEKEIKEMAKKINDLCGIKESDTGLAPPSQWDLVSDKQMMQEEQPLQVARCTKIISPNTDDAKYVINVKQIAKFVVGLGDKVSPTDIEEGMRVGVDRNKYQIQIPLPPKIDPSVTMMTVEEKPDVTYNDVGGCKEQIEKMREVVELPMLHPEKFVKLGIDPPKGVLCYGPPGTGKTLLARAVANRTDACFIRVIGSELVQKYVGEGARMVRELFQMARSKKACIVFFDEVDAIGGARFDDGVGGDNEVQRTMLEIVNQLDGFDARGNIKVLMATNRPDTLDPALLRPGRLDRKVEFGLPDLEGRTQIFKIHTRTMNCERDIRFELLARLCPNSTGADIRSVCTEAGMYAIRARRKTVTEKDFLDAVNKVIKGYQKFSATPKYMVYN

SEQ ID NO: 33049 - protein, 206 aa, Oryza sativa
MDAKGVNDRDALIDLESGNNIVVGEHNNGADANFAVAQERTAPNGSWNGAMGTNGCLKDDVNHQHMCCCLSSPDAAAKNGDDQKLLNELSELAILKRARIERMKALKKMKNAKHGSSSGNLFPLIITIIFCLVILWQGFFSRTGSAVSFHGSPESSVRAHSSLISIRFYKNNNSNSRSREAISAAPKNAETPSRLEIHSKARKITR

SEQ ID NO: 33050 - protein, 354 aa, Oryza sativa
MQPDSASHRIARVAAHLSPSPRPQMEEGVRPAPCRAKGGAPGFKVAVLGAAGGIGQPLSLLMKLNPLVSVLHLYDVVNTPGVTADVSHMDTTAVVRGFLGPNQLEAALTGMDLVIIPAGLPRKPGMTRDDLFNKNAGIVRSLCEGVAKCCPNAIVNLISNPVNSTVPIAAEVFKKAGTYDPKRLLGVTTLDVARANTFVAEVLGIDPKDVNVPVVGGHAGVTILPLLSQVHPPCSFTPDEISYLTKRIQNGGTEVVEAKAGAGSATLSMAFAAAKFGDACLRAMRGDAGVVECSYVASAVTELPFFATKVRLGRAGAEEVLPLGPLNDFERAGLEMAKKELMESIQKGIDFMNK

SEQ ID NO: 33051 - protein, 377 aa, Oryza sativa
MNLLSGRNILMLSGEELKQVRGALQNFLSPEMVIRYVSKMDEEVRRHVKVNWVGHKTVKVLPLAKRLTLDIICSVIFGQEAGSVREALATDFPAMVRAALSIPVKIPFTRFSRGLSASQRIRKLLRGIARERETLLQQQQAHGASAADDFFTYMLALRAEGAHSLTVEDIVDNAIFLLIAGYETTSVLITFMLWHLDKEPEVLSKITEEQDEIARNKGPEDALTWDDVSRMKYTWKVAMETVRTIPPIFGSFRTVTRDIEYQGYHIPKGWMVFTAQSVTHLDANIFPEPSNFDPARFENNSSIPPYCFVPFGGGPRMCPGNEFARTETLVTMHSLVTQFRWKLCCKEESYKKDPSPTPLLGLPVELEPRCLPENAHA

SEQ ID NO: 33052 - protein, 378 aa, Oryza sativa
MGSSEKNGTAYGEYTYAELEREQYWPSEKLRISITGAGGFIGSHIARRLKSEGHYIIASDWKKNEHMTEDMFCHEFHLVDLRVMDNCLKVTNGVDHVFNLAADMGGMGFIQSNHSVIMYNNTMISFNMLEAARINGVKRFFYASSACIYPEFKQLETNVSLKESDAWPAEPQDAYGLEKLATEELCKHYTKDFGIECRVGRFHNIYGPFGTWKGGREKAPAAFCRKAQTSTDRFEMWGDGLQTRSFTFIDECVEGVLRLTKSDFREPVNIGSDEMVSMNEMAEIILSFEDRELPIHHIPGPEGVRGRNSDNTLIKEKLGWAPTMKLKDGLRFTYFWIKEQIEKEKTQGVDIAGYGSSKVVSTQAPVQLGSLRAADGKE

SEQ ID NO: 33053 - protein, 318 aa, Oryza sativa
MGKAERDGSNEFANYQPGSLNTTDRLVEDLDNYDIVFHIGDLPYANGYISQWDQFTAQVAPITAKKPYMIASGNHERDWPNTGGFFDVKDSGGECGVPAETMYYYPAENRANFWYKVDYGMFRFCIADSEHDWREGTDQYKFIEQCLSTVDRKHQPWLIFAAHRVLGYPSNWWYADQGSFEEPEGRESLQRLWQRHRVDVAFFGHVHNYERTCPMYQSQCVSGERRRYSGTMNGTIFVVAGGGGSHLSDYTSAIPKWSVFRDRDFGFVKLTAFNHSSLLFEYKKSSDGKVYDSFTVERDYRDVLSCVHDSCLPTTLAS

SEQ ID NO: 33054 - protein, 164 aa, Oryza sativa
MGRRAGSYPYYVEAAPPVDVNKNTEWFMYPGVWTTYILLLFFAWLLVLSVSACSPGIAWTVVNLAHFAITYHFFHWKKGTPFAADDQGIYNRLTWWEQIDNGQQLTRNRKFLTVVPVVLYLIASHLTDYKQPMLFLNTIAVLVLVVAKLPNMHKVRIFGINADI

SEQ ID NO: 33055 - protein, 551 aa, Oryza sativa
MGNACGGSLRSKYLSFKQTASQRHDTDDNNNAAAADSPKKPSRPPAAAKTDDHPVSASAPAAAMRRGQAPADLGSVLGHPTPNLRDLYAMGRKLGQGQFGTTYLCTELSTGVDYACKSISKRKLITKEDIEDVRREIQIMHHLSGHKNVVAIKGAYEDQLYVHIVMELCAGGELFDRIIQRGHYSERKAAELTRIIVGVVEACHSLGVMHRDLKPENFLLANKDDDLSLKAIDFGLSVFFKPGQTFTDVVGSPYYVAPEVLLKHYGPEADVWTAGVILYILLSGVPPFWAETQQGIFDAVLKGFIDFDSDPWPVISESAKDLITKMLNPRPKERLTAHEVLCHPWIRDHGVAPDRPLDPAVLSRIKQFSAMNKLKKMALRVIAESLSEEEIAGLKEMFQTMDADNSGAITYDELKEGLRKYGSTLKDTEIRDLMDAADIDNSGTIDYIEFIAATLHLNKLEREEHLVAAFSYFDKDGSGYITVDELQQACKEHNMPDAFLDDVINEADQDNDGRIDYGEFVAMMTKGNMGVGRRTMRNSLNISMRDAPGAL

SEQ ID NO: 33056 - protein, 142 aa, Oryza sativa
MAGIGPIRQDWEPVVVRKKAPTAAAKKDEKAVNAARRSGAEIETMKKYNAGTNKAASSGTSLNTKRLDDDTESLAHERVSSDLKKNLMQARLDKKMTQAQLAQMINEKPQVIQEYESGKAIPNQQIIGKLERALGTKLRGKK

SEQ ID NO: 33057 - protein, 267 aa, Oryza sativa
MDDGSVLHLKLTLDSSKGEATFDFEGTSPEVYGNWNAPEAVTAAAVIYCLRCLVDVDIPLNQGCLAPVKILIPKGSFLSPSDKAAVVGGNVLTSQRVTDVVLMAFQACACSQGCMNNLTFGDDTFGYYETIGGGSGAGASWDGTSGVQCHMTNTRMTDPEIFEQRYPVLLHRFSIRENSGGSGFHRGGDGLVREIEFCQPVVVSILSERRVHAPRGLKGGRNGARGANYLVKKDGRRVYLGGKNTVMVNAGEILQILTPGGGGFGSP

SEQ ID NO: 33058 - protein, 293 aa, Oryza sativa; identical to SEQ ID NO: 31717

SEQ ID NO: 33059 - protein, 267 aa, Oryza sativa
MDSFSLPLRNKSNVRPSLSFGCGYDQQVGKNGAAPATTDGLLGLGRGSVSLLSQLKQQGITKNVLGHCLSTSGGGFLFFGDDMVPTSRVTWVSMVRSTSGNYYSPGSATLYFDRRSLSTKPMEVVFDSGSTYTYFSAQPYQATISAIKGSLSKSLKQVSDPSLPLCWKGQKAFKSVSDVKKDFKSLQFIFGKNAVMDIPPENYLIITKNGNVCLGILDGSAAKLSFSIIGDITMQDQMVIYDNEKAQLGWIRGSCSRSPKSIMSSFP

SEQ ID NO: 33060 - protein, 283 aa, Oryza sativa
MAALAPSKMLGTRLNFAGSSRYATAAPTTGAQKIVSLFSKKPAPKPKPAAVTSSSPDIGDELAEWYGPDRRIFLPEGLLDRSEVPDYLNGEVPGDYGYDPFGLSKKPEDFSKYQAYELIHARWAMLGAAGFIIPEACNKFGANCGPEAVWFKTGALLLDGNTLNYFGNSIPINLIVAVAAEVVLVGGAEYYRIINGLDLEDKLHPGGPFDPLGLASDPDQAALLKVKEIKNGRLAMFSMLGFFIQAYVTGEGPVENLSKHLSDPFGNNLLTVISGAAERTPSL

SEQ ID NO: 33061 - protein, 576 aa, Oryza sativa
MDQGSNRKILASVKKYTKRCPPDIVLYVDRLDSLSRDLNDLPLLKTITSVLGSSIWFNAIVALTHAASAPPEGLNGAPMTYEVLMAQRSHIIQQSIRQAAGDMRLMNPVALVENHPSCRRNREGQKVLPNGQSWRHQMLLLCYSSKILSEANSLLKLQDPNPGKLFGFRFRSPPLPFLLSSLLQSRAHPKLSPDQGGNEGDSDIDLDDYSDIEQDEDEEEYDQLPPFKPLTKSQLARLTKEQKNAYFDEYDYRVKLLQKKQWKDEIRRLKEMKKRGKTDMDAYGYANIAGENDLDPPPENVSVPLPDMVLPPSFDCDNPTYRYRFLEPTSTVLARPVLDAHGWDHDCGYDGVSVEETLALLNKFPANMAVQVTKDKKEFSIHLDSSISAKLGEDASSLAGFDIQTVGRQLAYILRGETKFKNIKKNKTTGGFSVTFLGDIVATGLKVEDQLSLGKRLALVASTGAMRAQGDTAYGANLEARLKDKDYPIGQSLSTLGLSLMKWRRDLALGANLQSQFSIGRGSKMVVRLGLNNKLSGQITVRTSTSEQVQIALLGLIPVAASIYRSFRPSEPSFAY

SEQ ID NO: 33062 - protein, 34 aa, Oryza sativa
MICSALRPIGMCSQNATQANFVHSSRPMLMVDQQ

SEQ ID NO: 33063 - protein, 513 aa, Oryza sativa
MDNAYIIAILSVAILFLLHYYLLGRGNGGAARLPPGPPAVPILGHLHLVKKPMHATMSRLAERYGPVFSLRLGSRRAVVVSSPGCARECFTEHDVTFANRPRFESQLLVSFNGAALATASYGAHWRNLRRIVAVQLLSAHRVGLMSGLIAGEVRAMVRRMYRAAAASPAGAARIQLKRRLFEVSLSVLMETIAHTKATRPETDPDTDMSVEAQEFKQVVDEIIPHIGAANLWDYLPALRWFDVFGVRRKILAAVSRRDAFLRRLIDAERRRLDDGDEGEKKSMIAVLLTLQKTEPEVYTDNMITALTANLFGAGTETTSTTSEWAMSLLLNHPDTLKKAQAEIDASVGNSRLITADDVTRLGYLQCIVRETLRLYPAAPMLLPHESSADCKVGGYNIPRGSMLLINAYAIHRDPAVWEEPEKFMPERFEDGGCDGNLLMPFGMGRRRCPGETLALRTVGLVLGTLIQCFDWERVDGVEVDMTEGGGLTIPKVVPLEAMCRPRDAMGGVLRELV

SEQ ID NO: 33064 - protein, 347 aa, Oryza sativa
MVALSKLVLITAVALLGWAYKVARPPPPPILGGPGGPPVSSPRVQLKDGRHLAYREAGVGREIAKYKIIFSHGFASTKESDFPVSQELAEELGIYLLYFDRAGYGDSDANPKRGLKSDATDVEELADKLQLGEKFYVVGTSMGGYVAWSCLNYIPYRLAGVALVVPAVNYWWPMPASVSASAYRKLDVGDRRTFWIAHHMPWLFYAWFNQKWFRISPIVEGKPEAFTEKDWEILAEIQRTGQLDRGRATKQGAYHSLCRDATILFGAWEFDPTAIENPFPNGDGVVSIWQGREDKIVRVEAQRYVAEKLPWVRYHEHPEGGHLFMCADGLGDKIVRELLLGEEPRDL

SEQ ID NO: 33065 - protein, 424 aa, Oryza sativa
MAIRARSSSYAAAAVALALALASVAAVAGEVFFQEKFEDGWESRWVKSEWKKDENMAGEWNHTSGKWNGDPEDKGIQTSEDYRFYAISAEYPEFSNKDKTLVLQFSVKHEQKLDCGGGYVKLLGGDVDQKKFGGDTPYSIMFGPDICGYSTKKVHTIFTKNDKNHLIKKDVPCETDQLSHVYTLIIHPDATYTILIDNVEKQSGSIYEHWDILPPKQIKDPEAKKPEDWDDKEYIPDPEDKKPEGYDDIPKEIPDPDAKKPEDWDDEEDGEWTAPTIPNPEYKGPWKQKKIRNPNYQGKWKAPMIDNPDFKDDPYIYAFDSLKYIGIELWQVKSGTLFDNFLITDDPELAKTFAEETWGKHKDAEKAAFDEAEKKKEEEEAAKAGEDDDDLDDEDAEDEDKADEKADSDAEDGKDSDDEKHDEL

SEQ ID NO: 33066 - protein, 43 aa, Oryza sativa
MKSTKTKRKRLRPNSIEPHLPFTGCFASEEFCVFVMLCSFFFL

SEQ ID NO: 33067 - protein, 316 aa, Oryza sativa
MLTISREVALEVQSLTTVLGSCLGNVMCQSLVLFEDLLVSTTLPPDDTLNLYTYAILRLTPRALLSNATSWSYLRKGTSVHAGPTSSSSNGTASVERPLQREKLYKGKDGFVAAGSTTSEVRGAVAWVPILWFQQAEDRMHLCVYQHKNITILLLIPASSLINGDDGIAHVKRHLLENASQNIVTLELKLSRGWGGENAYHVGGYRYLLVDPDRKVSRASPPGKVTTLSKDSLLSLNRLREEIDLEKSRAKRSDSCHDKDFEVCIRAKNNAWVIAKVTRGRELYMALEKAGETLLYASTAIEKFSNRYCEGAFSTD

SEQ ID NO: 33068 - protein, 15 aa, Oryza sativa
MDTTHPCIDRQTDRQ

SEQ ID NO: 33069 - protein, 201 aa, Oryza sativa
MRKMQNINGLEGQLLLEPITNDLQPMEKCNSVQSPKVANFTALHNVDNESMNHVSTATGATTSVTTVDTLPSTIRPLSSYSLLDGSLDDGLPSPASNVSFRPQITNNSSVSNGTMTDISNGCLTSINSGQNEASDSHNSVEFTQYFQEGYCKISELDDCRELTEAVTDADSSSSHCEREKPEEDGDNDDMLGAVFAFSEEG

SEQ ID NO: 33070 - protein, 181 aa, Oryza sativa
MALPLLKSSPHFSALHSANRAQLHGRCRATLGGFHDPRSNSSRCKKSAGRGSVKANASPLDVVTLMVTMVEHVDLQRDYVVHKSIWHLSDAALKSVYTFYAFFTVWGICFFASMKDPFYDSEAYRGQGGDGTVHWYYDRQEDLEASAREELLREELLEEIEQRVGGLRELEEAAKEEQLTN

SEQ ID NO: 33071 - protein, 254 aa, Oryza sativa
MDEEMAYKNTVEGITGIISKTISKKGMLEVYNSLTEEGKKEFNKAYSASFYPCMDILYECYEDVASGSEIRSVVLAGRRFYEKEGLPAFPMGNIDQTRMWKVGEKVRSTRPENDLGPLHPFTAGVYVALMMAQIEVLRKKGHSYSEIINESVIESVDSLNPFMHARGVAFMVDNCSTTARLGSRKWAPRFDYILTQQAFVTVDKDAPINQDLISNFMSDPVHGAIEVCAELRPTVDISVPANADFVRPELRQSS

SEQ ID NO: 33072 - protein, 627 aa, Oryza sativa
MASSASLQRFLPPYPHAAVSRCRPPGVRARPVQSSTVSAPSSSTPAADEAVSAERLEPRVEQREGRYWVLKEKYRTGLNPQEKVKLGKEPMSLFMEGGIKELAKMPMEEIEADKLSKEDIDVRLKWLGLFHRRKHQYGRFMMRLKLPNGVTTSEQTRYLASVIEAYGKEGCADVTTRQNWQIRGVTLPDVPAILDGLNAVGLTSLQSGMDNVRNPVGNPLAGIDPDEIVDTRSYTNLLSSYITSNFQGNPTITNLPRKWNVCVIGSHDLYEHPHINDLAYMPAVKGGKFGFNLLVGGFISPKRWEEALPLDAWVPGDDIIPVCKAVLEAYRDLGTRGNRQKTRMMWLIDELVNHFFLHSSTPLTELRMSQCSYQLIAVLALQGMEAFRSEVEKRMPNGVLERAAPEDLIDKKWQRRDYLGVHPQKQEGMSYVGLHVPVGRVQAADMFELARLADEYGSGELRLTVEQNIVIPNVKNEKVEALLSEPLLQKFSPQPSLLLKGLVACTGNQFCGQAIIETKQRALLVTSQVEKLVSVPRAVRMHWTGCPNSCGQVQVADIGFMGCLTKDSAGKIVEAADIFVGGRVGSDSHLAGAYKKSVPCDELAPIVADILVERFGAVRREREEDEE

SEQ ID NO: 33073 - protein, 172 aa, Oryza sativa
MSNTRVFFDMTVGGAPAGRIVMELYAKDVPRTAENFRALCTGEKGVGKSGKPLHYKGSTFHRVIPEFMCQGGDFTRGNGTGGESIYGEKFADEVFKFKHDSPGILSMANAGPNTNGSQFFICTVPCSWLDGKHVVFGRVVEGMDVVKAIEKVGSRGGSTAKPVVIADCGQLS

SEQ ID NO: 33074 - protein, 322 aa, Oryza sativa
MTTTKKKLVIDTDPGIDDAMAIFVALRSPEVELLGLTTIFGNVYTTLATRNALHLLEAVGRTDIPVAEGSHVTIKKATKLRIASFVHGSDGLGNQNFPPPTGKPLDQSAAAFLVEQANLYPGQVTVVALGPLTNLALAIELDPSFPKKIGQIVILGGAYSVNGNVNPAAEANIFGDPDAADIVFTSGADILAVGINITHQVVLSDADREKLEQSDSKYARYLSKILGLYYDYHKDGYFIKGVYLHDPATLIAAVDPSLMTYTEGVVRVQTDGITKGLTVFDTTKKRYGEITAWTGKPTVKVAVTVDAPAVVEMIMQRLTTDD

SEQ ID NO: 33075 - protein, 290 aa, Oryza sativa
MDDRIPPPSPLQYSPSPVHSSPHPLSSLRYSSSERERYLAELLAERQKLAPFVQVLPFCTRLLNQEILRASSLPPNHNFVDPERIEHGSPLRLPGLPVNGQPMDLEGWSGMQTENMRVLQASSMGWNGPPAITGTPVVKKVVRLDVPVDKYPNYNFVGRLLGPRGNSLKRVEASTQCRVYIRGRGSVKDSVKEDKLRDKPGYEHLNEPLHVLVEAEFPADIIDTRLNQAVTILEDLLKPIDESMDCYKKQQLRELAILNGTLREESPSPHLSPSVSPFNSTGMKRAKTGR

SEQ ID NO: 33076 - protein, 699 aa, Oryza sativa
MASETETFAFQAEINQLLSLIINTFYSNKEIFLRELISNSSDALDKIRFESLTDKSKLDAQPELFIHIVPDKASNTLSIIDSGVGMTKSDLVNNLGTIARSGTKEFMEALAAGADVSMIGQFGVGFYSAYLVAERVVVTTKHNDDEQYVWESQAGGSFTVTRDTSGEQLGRGTKITLYLKDDQLEYLEERRLKDLVKKHSEFISYPISLWTEKTTEKEISDDEDEEEKKDAEEGKVEDVDEEKEEKEKKKKKIKEVSHEWNVMNKQKPIWLRKPEEITKEEYAAFYKSLTNDWEEHLAVKHFSVEGQLEFKAILFVPKRAPFDLFDTRKKQNNIKLYVRRVFIMDNCEELIPEWLSFVKGIVDSEDLPLNISREMLQQNKILKVIRKNLVKKCVELFFEIAENKEDYNKFYEAFSKNLKLGIHEDSTNRTKIAELLRYHSTKSGDELTSLKDYVTRMKEGQSEIYYITGESKKAVENSPFLEKLKKKGYEVLYMVDAIDEYAVGQLKEFEGKKLVSATKEGLKLDESEDEKKRQEELKEKFEGLCKVIKEVLGDKVEKVVVSDRVVDSPCCLVTGEYGWTANMERIMKAQALRDSSMAGYMSSKKTMEINPENAIMDELRKRADADKNDKSVKDLVMLLFETALLTSGFSLEDPNTFGTRIHRMLKLGLSIDEDESAEADADMPPLEDDAGESKMEEVD

SEQ ID NO: 33077 - protein, 69 aa, Oryza sativa
MGMLKHEFEHPQQHIQQGEHRLEFFKDVFMVARWRKISIVVYFIWRSELLWLLVFLKVNVTCFVDVETI

SEQ ID NO: 33078 - protein, 400 aa, Oryza sativa
MSALLDLLMGVFRQPTLGGVALELASLAAPLWLAALVGLLIGWAWRPRWALVVVGEAPPPPRAAAEDSCRKNELVAAVPRTAMAAAAPEEDEGLAVDTGDLMHLRRLVEEKDGGPAWIHMMDKTLPTMRYQAWRRDPEGGPPQYRSSTIFEDASPEVVRDFFWDDEFRIKNTWDDMLLQHDTLEECTKTGTMVLRWVRKFPFFCSDREYIIGRRIWASGKTYYCVTKGVPRPSVPRCNKPRRVDVYYSSWCIRPVESRNGDGSMTACEVLLFHHEEMGIPREIAKLGVRQGMWGCVKRIEPGLRAYQIARTAGEPLSKCAAMAHVNTKVDPDELITAEDKTEASSTNNAEAEKPKHWTGNIPKVILVGGAVALACTFDHGLLTKALIFGTARRFAGPGRR

SEQ ID NO: 33079 - protein, 86 aa, Oryza sativa
MASPLSSNRLCALPSAVKAYRLYGEHVLLLILCSHHLPATLARHLWSCFSSCCSSLRFRDSRSSPMRWLQELQKINFAARSSSPIR

SEQ ID NO: 33080 - protein, 138 aa, Oryza sativa
MGLRLVGSKFGFHGAVLLRTSRLPSRMPTSGMATTMDTNRAMILLTMVHPMHRILVRKTTMDILAMAITNSSRSPHSSSSNPHNSPHSSDHGDVQLSDLAVGLSGCTFCVNSSWRFLKLFVDVFVWMRSCSSSATTCR

SEQ ID NO: 33081 - protein, 407 aa, Oryza sativa
MASSSVFAGLAQAPEDPILGVTVAYNKDPSPVKVNLGVGAYRTEEGKPLVLNVVRRAEQMLINNPSRVKEYLPITGLADFNKLSAKLIFGADSPAIQENRVATVQCLSGTGSLRVGGEFLARHYHERTIYIPQPTWGNHPKVFTLAGLTVRSYRYYDPATRGLDFQGLLEDLGSAPSGAIVLLHACAHNPTGVDPTLDQWEQIRQLMRSKALLPFFDSAYQGFASGSLDQDAQSVRMFVADGGELLMAQSYAKNMGLYGERVGALSIVCGSADVAVRVESQLKLVIRPMYSNPPIHGASIVATILKDSAMFNEWTVELKGMADRIISMRQQLFDALKTRETPGDWSHIIKQIGMFTFTGLNSDQVAFMRQEYHIYMTSDGRISMAGLSGRTIPHLADAIHAAVTKLK

SEQ ID NO: 33082 - protein, 71 aa, Oryza sativa
MCVAKRSLGGWNGTNHASHRCGEAKEEGVGGFRGTRRFSCHVKEVIISPILFYLWCVILLLRRNNKTVQDV

SEQ ID NO: 33083 - protein, 632 aa, Oryza sativa
MVSYIDQEGGDQFRASSVARTSTSRLSMSRASPMPLTPGISKETDSSVSPPAPSFSRLLAMNAPEWRQAVIGSLSALVYGSLQPIYAITIGGMIAAFFVQDLKEMNAIISRYALIFCSLSVISIVVNLLQHYNFAYMGEHLVRRIRVQVLEKILTFEAAWFDEETNSSGSLCSRLSNEASLVKTLVADRISLLLQTASGIIIAVTMGLIVAWKLALVMIAVQPTTMICYYAKKIVLSNVSRDLAKAQHQSTQIAIEAVYNHRMVSSFGCSSKVLQLFEHTQEEPLKRARKKSWVAGITTGLSPCLSFLSWALDFWYGGKLAQSGEISAGDVFKTFFVLVSTGKLIADAGSMTSDLAKGANAVASVFEVLDRKSISPQNSQVEKDNQKNKIQGRIEFKRVDFAYPTRPQCLILQDFSLDVKAGTSIGLVGRSGCGKSTIIGLIQRFYDVDRGAVKVDGMDVREMDILWYRGFTALVSQEPAIFSGSVRDNIAFGKPEADEDEIVEAAKAANAHEFISSLKDGYHTDCGEHGLQLSGGQKQRIAIARAIIRNPAILLLDEATSALDAQSEQVVQEALDRIMSGRTTIVVAHRLNTIKNVDSIAFLGEGKVVERGTYPHLMSKKGAFYNLAALQK

SEQ ID NO: 33084 - protein, 286 aa, Oryza sativa
MSRRWSRTIYVGNLPGDIREREVEDLFYKYGRIVDIDLKIPPRPPGYAFVEFEDPRDAEEACAGRDGYNFDGHRLRVEPAHGGRGNGGSSFDRPSNFGGGGRRGVSRHSEYRVLVTGLPSSASWQDLKDHMRKAGDVCFSEVYREGGGTVGIVDYTNYDDMKYAIKKLDDSEFRNAFSKGHIRVKEYDGKRARSYSRSRSPSRSRSKSRSLSKSPRTRRSASRSRSRSRSVSSRSRSASKGRSPSRSPARSKSPNASPANGEASSPKKRSPSRSPSRSRSPDAKSE

SEQ ID NO: 33085 - protein, 100 aa, Oryza sativa
MTLQGEAAALADRYGLAVGLPAATAVLLKKQMQYRYSHGIDYWWTYMRADSEGLHEIQRLSGAGKLQIPVEKTFPISKVREAHEAKEKRLVPGKVVLEFD

SEQ ID NO: 33086 - protein, 330 aa, Oryza sativa
MAPPPPSPPRSLTSVSLRTPLSPLLFLRPASCNPSAVSGSCSSGACRGVRCSAANKPSPSTAPGTEVSSTSMAKIRSEVLSPFRSVRMFFYLAFMASAGLGALIALTQLIPALSSPARAAAAGETLKGLGIDVAAVSVFAFLYWRESKAKDAQVAKLTREENLSRLRIRAGEGRPPVPLGELRGTARLVIVAGPAAFVTESFRRSKPFLKDLMERGVLVVPFSTDGNAPDLQFDEADEEEEEAAAAAGKMKRRLWQLTPVYTSEWAKWLDEQKKLANVSPDSPVYLSLRLDGRVRGSGVGYPPWQAFVAQLPPVKGMWSGLLDGMDGRVL

SEQ ID NO: 33087 - protein, 533 aa, Oryza sativa
MRIVQRPEDFVDSVLSAQREAAASFGINTLLVEKYITQPRHIEVQIFGDQHGNVIHLYERDCSLQRRHQKIIEEAPAPNVTAQFRSHIGEAAVSAAKAVGYYSAGTVEFIVDTLSGEFYFMEMNTRLQVEHPVTEMIVGQDLVEWQIRIANGECLPLSQEQVPLNGHAFEARIYAENVPRGFLPATGTLHHYRPVPSTATVRVETGVEEGDTVSMHYDPMIAKLVVWGESRNAALVKLKNSLSNFQIAGLPTNVGFLQELAGHSAFEKGLVDTHFIERYQNDLLSTSTQALSGSHEAEELGAILAAACICKKDHVSSEVSLHDKKLSMWYAHPPFRMHHFAKRLMEFELDRELGGSSDDLLKLSVTYRSDGTYFVETEDGSSPGLDVKVDSRGDHDFRVDVGGLQTDVTLAFYSKDNCNHIHIWHGKHHHHYRQTLRAEQSPDDSSQPSASSEARSHPKGSVLAPMAGLVVKVLLKDGARVEEGQPVMVMEAMKMEHVVKAPCAGYVEGLKATAGQQVFDSSVLFTVKENKPN

SEQ ID NO: 33088 - protein, 369 aa, Oryza sativa
MPLAGIALAPLFVSHLAPPHHRRSSVASAAAAAARRRPRAVQCSATATAASGEGAGDDVELSRGTLLWRAAKLPIYSVALVPLTVGSACAYHHVGSFFGKRYFVLLVASVLVITWLNLSNDVYDSDTGADKNKKESVVNIVGSRTMTQYAANISLLFGFMGLFWAFAQAGDARFILSVTCAIICGYVYQCPPFRLSYRGLGEPLCFAAFGPLATTAFYFSNSSRNISSGTALLPLSKTVIASSILVGLTTTLILFCSHFHQIDGDRAVGKMSPLVRIGTKTGSRLVTLGVVTLYVLLAAFGMSKSLPSACTVLCALTLPVGKWVVDYVLKNHEDNSKIFMAKYYCVRLHALFGMALASGLVLARNGTLV

SEQ ID NO: 33089 - protein, 25 aa, Oryza sativa
MLKAAWLSWSEGEKENKKGNKSHSL

SEQ ID NO: 33090 - protein, 183 aa, Oryza sativa
MNGNVFCFSTPSPHHPLKEWRSSNQGRNNAAYRYNREGIYVKHGSRTFRDEEGKHFWVEFEIVDKYRVPYGNQAPYNVTVTLLVPGNYQGERRIVVNAAYNEPGKQRMKLPTVPVRTTGTVLVEMVDKNGFYFSDEFSLTFHMHYYKLLKWLVLLPMLGMFSVLVILRPQEGAPLPSFSRNID

SEQ ID NO: 33091 - protein, 145 aa, Oryza sativa
MQAKSKETEEAELKKLRKSLNFRANPMPSFYKEPPPPKVELKKIPTTRARSPKLGRSKNTSSVSTEESTVPSSRPARLSLDERASQNGVKKVPAANTVRKPQRKSLPKLPSEQTVTEQVENNTSATDPVRELIRAQVTPDDQFGG

SEQ ID NO: 33092 - protein, 409 aa, Oryza sativa
MGHALSSARDVLYNSDEVSRRLLVMLQSTELNIDSVKKQNSFLVQHAAKTVPMPLHCLHMQLTTDYYFRDGMIKEYFHDAALKEEEDKAKREDRSLYHYAIFSDNVLAASVVVRSTVTHAKEPEKHVFHIVTDRLNFAAMTMWFIRHPPLPATVHVENIDNFKWLNSSYCSVLRQLESARLKEYYFKAHDPSSLSDGNENLKYRNPKYLSMLNHLRFYMPEIHPKLDKILFLDDDVVVQKDLTPLWDVDLKGMVNGAVETCKESFHRFDTYLNFSHPKIAENFDPRACGWAFGMNMFDLKEWKKQNITGIYHYWQDLNEDRKLWKLGTLPPGLITFYNLTYPLNRNWHVLGLGYDPAVDLAEIENAAVVHYNGNYKPWLDLAVSKYKPYWSKYVDLDNSHIQHCYMSEQ

SEQ ID NO: 33093 - protein, 661 aa, Oryza sativa
MVGMRGAYGYNDNGNEGGVVVGGGEAEAEIAAMAVLHKVAAPPAQSTASKLKARVKETFFPDDPFRGFKGKPLTTKWVMAVQYLFPILDWVPSYSFSLFKSDLVAGLTIASLAIPQGISYAKLASLPPIIGLYSSFVPPMVYAVLGSSRDLAVGPVSIASLIMGSMLRQAVSPAAEPLLFLQLAFTSTFFAGLVQASLGILRLGFIIDFLSKATLVGFMAGAAIIVSLQQLKALLGIVHFTTEMGLVPVMASVIHHTKEWSWQTILMAVCFLVLLLTARHVSMKWPKLFWVSACAPLACVIVSTLLVFLFKAQKHGISIIGQLKCGLNRPSWDKLLFDPQYLGLTVKTGLVTGIISLTEGVAVGRTFASLKDYQVDGNKEMMAIGLMNIVGSCTSCYVTTGAFSRSAVNHNAGCKTAMSNVIMALTVMVTLLFLMPLFVYTPNVVLGAIIIAAVIGLIDLPAVYNIWKMDKMDFLVCLCAFAGVIFISVQQGLAIAVGISIFRVLLQITRPKMMIQGNIKGTDIYRNLHQYKDAQRVPGFLILTVEAPINFANTNYLNERIKRWIEEESSAGTKQSELHFVILDLSAVPAIDTSGISFLIDLKKSTEKHGLELILVNPTGEVMEKIQRANDAHGHFKSDSLYLTTGEAVASLSTFSKMTAP

SEQ ID NO: 33094 - protein, 173 aa, Oryza sativa
MEHKEAGCQQPEGPILCINNCGFFGSAATMNMCSKCHKEMIMKEEQAKLAASSIDSIVNGCDGGKEHIVAASGSTAVAVAQVEAKTLVVQPTDVAGTSEEVAVVPKVKEGPNRCATCRKRVGLTGFNCRCGNMYCALHRYSDKHECQFDYRTAARDAIAKANPVVKAEKLDKI

SEQ ID NO: 33095 - protein, 382 aa, Oryza sativa
MLYDGQGKFHKSTTTTSNFVVSQANFTVENLNNLSDSLSAAKKVDIGRSFLPNDVQNQINEIQGKLNSSATELATRTTDNSEKIQKLLNQVRIALIIIAAVVLLLAFIGFLLSIFGLEFIVSILVIIGWILVTGTFILCGVFLLLHNVVADTCVSMEEWVAHPTEHTALDDIIPCVEPATANESLYRSRQVTYQLVNLVNQVITNVSNGNFPPQTPFFYFNQSGPLMPTLCNPFTADLNNRTCTRGEVTLDNATRVWKNFECQTTTVSGTEICTTVGRVTPTILGQMAAGVNVSQGLYQYGPFLIQLEDCTFVRDTFTNINQNHCPGLERYSKWVYVGLVMVSSAVMLSLVFWVIYARERRHRAYSKQHNYADKPHPTGPDA

SEQ ID NO: 33096 - protein, 350 aa, Oryza sativa
MALDLPHGGHLSHGYQTDTKKISAVSIFFETMPYRLDESTGLIDYDQMEKSAVLFRPKLIVAGASAYARLYDYDRMRKVCDKQKAILLADMAHISGLVAAGVVPSPFDYADVVTTTTHKSLRGPRGAMIFYRKGVKGVNKQGKEVMYDFEDKINAAVFPGLQGGPHNHTITGLAVALKQATTPEYRAYQEQVMSNCAKFAQSLTAKGYELASGGTDNHLVLVNLKSKGIDGSRVEKVLENVHIAANKNTVPGDVSAMVPGGIRMGTPALTSRGFVEEDFAKVADFFDAAVNLALKVKAAAGGTKLKDFVATLQSDSNIQSEIAKLRHDVEEYAKQFPTIGFEKETMKYKN

SEQ ID NO: 33097 - protein, 440 aa, Oryza sativa
MASRIASRLLRHSNATLGLIRSYSHARNYSSQLSALIPIGSQSSKLTRRRYYLPNASPYQLWSRSFASDNGDQVEAVVPFMGESVTDGTLANFLKKPGDRVEADEPIAQIETDKVTIDVASPEAGVIEKFIASEGDTVTPGTKVAIISKSAAPAETHVAPSEDSTPKETPPKAEETKPKLEEKSPKAEPPKMPLPPKTSPTEPQLPPKERERRVPMPRLRKRIANRLKDSQNTFAMLTTFNEVDMTNLMKLRSDYKDEFVTKHGVKLGLMSCFVKAAVTALQNQPIVNAVIDGDDIIYRDYVDISVAVGTSKGLVVPVIRDADNMNFADIEKGINALAKKATEGALSIDEMAGGTFTISNGGVYGSLISTPIINPPQSAILGMHSIVQRPVVVDGNILARPMMYLALTYDHRLIDGREAVYFLRRIKDVVEDPRRLLLDI

SEQ ID NO: 33098 - protein, 40 aa, Oryza sativa
MCATQYNLLSRQTAMQIASTRIKRLIWIAKFCTWYAVRVI

SEQ ID NO: 33099 - protein, 165 aa, Oryza sativa
MDHIKTHCYVTFSSVEEAVATRDAVYDLQWPPNNGNRLVAEFVDPQEVKLKLEPPPPAAAPISPATTPKEPPFQQAQANQNMPRQAAAPREHLPPPPPLTTLPTSDSGSAKERLPPTPKKQPEPPVVTLDDLFRKTHSSPRIYYLPLSEEEVAAKLASQGKGKRE

SEQ ID NO: 33100 - protein, 103 aa, Oryza sativa
MDKTLKWLVPMAINTTCARGFLRFSEWARSGTERVGRRPGQPDVVETLYHADKAKTEDYILDLVVWLHHLVNQSNRPANAKDKDKEQSTSPLTKSDLDKAQQE

SEQ ID NO: 33101 - protein, 413 aa, Oryza sativa
MACLELDSSQFLLNGDGSVIGSPFDIQLECNSFTGSKAVQDHSRYTLPSQCTNAPDPPPLPGTSYGTHRTSRNAKACRCVPEEIQDFWDRMFFEAYQYDLRVLTEDGNEIMSHSCVVGIKSPVLRAMLEEAKVQGGIRHILIPGVSSEAVHVFIRFLYSSRFEQYQMKRYVLHLLVLSHVFSVPSLKRVCINQLETSLLSPENVVDILQLARLCDAPRLSLVCTRMIIGDFKAITQTEGWRVMRQANPSLEQELLESLVEEDTKRQERARRLEENKVYLQLHEAMEALIHICRDGCRTIGPRDQTLKSSQAVCRFPACKGIELLLRHFSACKMRVPGGCANCKRIWQLLELHSRMCSALETCHVPLCRHFKEKMQHLSRKEEAKWNLLVSKVLESKATTSSISERRKFPSLKT

SEQ ID NO: 33102 - protein, 175 aa, Oryza sativa
MVREVAESCVDGVVMEMVAAYCGRFYAAKPELAARRIEAIGFQVGHQLTERYTMERPRFSDHLEAIKFICKDFWSELFKKQIDNLKTNHRGTFVLQDNRFRWLTRVSIDPSVESMDATDNDSATLGDSAAQTTSMLLYFPCGIIRGALTNLGISCSVTADMSNLPACSFVVRIKT

SEQ ID NO: 33103 - protein, 57 aa, Oryza sativa
MLFLLFVIKTAPKYKDKSTVELDCLLPSCVENFVFCIGNVNAKQLTVSLMMHLCWFL

SEQ ID NO: 33104 - protein, 346 aa, Oryza sativa
MASKLGMVVLLISGLFAARCAAVVTTGEPVVAGLSWGFYDTSCPSVEGIVRWHVTEALRRDIGIAAGLVRIFFHDCFPQGCDASVLLTGSQSELGEIPNQTLRPSALKLIEDIRAAVHSACGAKVSCADITTLATRDAIVASGGPYFDVPLGRRDGLAPASSDKVGLLPAPFFDVPTLIQAFKDRNLDKTDLVALSGAHTIGLGHCGSFNDRFDGSKPIMDPVLVKKLQAKCAKDVPVNSVTQELDVRTPNAFDNKYYFDLIAKQGIFKSDQGLIEDAQTNRTAVRFALNQAAFFDQFARSMVKMSQMDVLTGNAGEIRNNCAAPNRRSSDLLNAADDDQGFAADA

SEQ ID NO: 33105 - protein, 369 aa, Oryza sativa
MDGAPVAEFRPTMTHGGRYLLYDIFGNKFEVTNKYQPPIMPIGRGAYGIVCSVMNFETREMVAIKKIANAFNNDMDAKRTLREIKLLRHLDHENIIGIRDVIPPPIPQAFNDVYIATELMDTDLHHIIRSNQELSEEHCQYFLYQILRGLKYIHSANVIHRDLKPSNLLLNANCDLKICDFGLARPSSESDMMTEYVVTRWYRAPELLLNSTDYSAAIDVWSVGCIFMELINRQPLFPGRDHMHQMRLITEVIGTPTDDELGFIRNEDARKYMRHLPQYPRRTFASMFPRVQPAALDLIERMLTFNPLQRITVEEALDHPYLERLHDIADEPICLEPFSFDFEQKALNEDQMKQLIFNEAIEMNPNIRY

SEQ ID NO: 33106 - protein, 48 aa, Oryza sativa
MIYDVNSPLFRSFLSQKGGASSDKRKMEEQKPKEQRPKASENKPVMNE

SEQ ID NO: 33107 - protein, 224 aa, Oryza sativa
MKFLEYTPFDSINLFLDNLDLGDCTIRGNLEAFSCKHTGNDRRLSISLEHEILDCLSKSSDSDHSSPVEHLSCRSSRKTLIYLVLTLSHMYPDYDFSAVRAHLFFKEEEWESFKEMTDTYLSEASKQWAATNEGTSLLDSMTNVIDEVIKIGESDIYSYNPDQDGDPFLEKGVIWSINFFFYNRKLKRVVSFRCSCISKISGDDFLTSAPSDGEEEDALIDMDI

SEQ ID NO: 33108 - protein, 336 aa, Oryza sativa
MGGGSDFHNPFDIFEQFFGGGAFGGSSSRVRRQRRGEDVAHTLKVSLEDVYNGSMKKLSLSRNILCPKCKGKGTKSEAPATCYGCHGVGMRNIMRQIGLGMIQHMQTVCPECRGSGEIISDRDKCTNCRASKVIQEKKVLEVHIEKGMQHGQKIVFQGEADEAPDTVTGDIVFILQVKVHPRFKRKYDDLFIERTISLTEALCGFQFILTHLDSRQLLIKANPGEIIKPGQHKAINDEGMPHHGRPFMKGRLFVEFNVEFPESGVLSRDQCRALEMILPPKPGHQLSDMDLDQCEETTMHDVNIEEEMRRKQYQRKQEAYDEDEEEDAPRVQCAQQ

SEQ ID NO: 33109 - protein, 38 aa, Oryza sativa
MHHLLLINWSTTNQIRPDNVRCTHLLLSLGHLLYASYC

SEQ ID NO: 33110 - protein, 328 aa, Oryza sativa
MIGRVLGGIATSLLFSAFESWLVAEHNKRGFDPQWLSITFSKAIFLGNGLVAIIAGLFANLLADNLGFGPVAPFDAAACFLAIGMAIILSSWSENYGDTSDNKDLIAQFKVAAKAIASDEKIALLGAIQSLFEGSMYTFVFLWTPALSPNDEEIPHGFIFATFMLSSMLGSSIASRLLARKLKVEGYMQIVFSISAFTLFLPVVTNFLVPPSSVKGGGILFGGCLQLLGFCIFESCVGIFWPSIMKMRSQYIPEEARSTIMNFFRIPLNLFVCVVLYNVNAFPITVMFGMCAIFLFMAAILQRRLMVVSDLHRSTTVEMTGEDEPLNP

SEQ ID NO: 33111 - protein, 81 aa, Oryza sativa
MMRNIIHFNTLANQAVERAANADGQKITYSVIKHRMGDLFYRLVSQKFEDPAEGEDVLVAKFQKLYDDLTTGFRNLEDEAR

SEQ ID NO: 33112 - protein, 67 aa, Oryza sativa
MLLSTNTTERLSTSLIQLLDTLTTHFFHQMSKCAFQYSNSLPPLIKAAQQPPFVLLLGRIEEIWPLI

SEQ ID NO: 33113 - protein, 283 aa, Oryza sativa
MEEIHGMQESKTASVIKVAREPAVIINGVPDLPPDVASESQPEPRNAAEPPVDHRFGEFLEGRKVRKPFGDKHFVGKVDKYDSESNWYSVVYQDGDQEDLEWKEVEEIMLPLDITIPLKTLISDKFALQNTAPVFKPKVGRPRKVYAITDGNTNNAMEDQMMTGAANEHQSNNLLALVPASTSNDAYVNASSQPRKRGRPRKDATMYPRKDATIPANTQPKRRGRPPKNRNLSGNAQSAECTPQNSVLIRNAQTVRAEKLAKAERLKRENMHAQGAPPGTQFF

SEQ ID NO: 33114 - protein, 327 aa, Oryza sativa
MVEGLVARLASSGISIYKALKCKEPKSSDLLSYMHFLYEACPYFKFGYMSANGAIAEAVKGEDRIHIIDFHISQGAQWISLLQALAARPGGPPTVRITGIDDSVSAYARGGGLELVGRRLSHIASLCKVPFEFHPLAISGSKVEAAHLGVIPGEALAVNFTLELHHIPDESVSTANHRDRLLRMVKSLSPKVLTLVEMESNTNTAPFPQRFAETLDYYTAIFESIDLTLPRDDRERINMEQHCLAREIVNLIACEGEERAERYEPFGKWKARLTMAGFRPSPLSSLVNATIRTLLQSYSDNYKLAERDGALYLGWKSRPLVVSSAWH

SEQ ID NO: 33115 - protein, 341 aa, Oryza sativa
MLRVLLKHDRSQGYVINRKNGYPLLLSAAHRGHVAVAREIIKYCPDAPYCKKDGWTCLHKAVKSGNMEFVEFILGEPRLQKLVNMRSSKGKTALHYAIQKCDPKIVAALLDKKIDLTILGSDGNAAAWELRDALDSAKTLNWNEVSMLMIKADPPNAKSVYNLHEEAKEKLINASRKDARSLTQTYTSNTSLVAILIATITFAAAFTLPGGYSSDAGSQGLPIMARNVAFKAFLISDTLAMCASLAVAFICIIARWEDLDFLLYYRSFTKKLMWFAYMATTTAFATGLYTVLAPRLLWLAVGICSVAVLVPILTKVLGEWPVLKLRIRLGQAFKSEFLDMV

SEQ ID NO: 33116 - protein, 297 aa, Oryza sativa; identical to SEQ ID NO: 28574

SEQ ID NO: 33117 - protein, 188 aa, Oryza sativa
MGIDLVAGGRNKKTKRTAPRSDDVYLKLLVKLYRFLVRRTKSNFNAVILKRLFMSKTNRPPLSLRRLAKFMEGKEENNIAVIVGTVTDDKRIQEIPKMKVTALRFTETARARIVNAGGECLTFDQLALRAPLGENTVLLRGPKNAREAVRHFGKAPGVPHSHTKPYVRSKGRKFEKARGRRNSRGFKV

SEQ ID NO: 33118 - protein, 379 aa, Oryza sativa
MEDQSLKPIRCKAAVCRAASEPLIVEEIVVDPPKAYEIRIKIICTSLCHTDVTLWHKVDPAFPRILGHEAYGVVESVGENVEGLAAGDTVVPTFMGQCDSCASCAAEWTNQCTAVPFTMGPGMRRDGTTRFWDGEGKPLSDTVAVTSFSQYTVVDVNQVVKVDPAVPPKIACLLGCCGGTGVGAAWRLAKVQPGSSVVVFGLGSVGLAVVQGAKMCGATKIIGVDLNPNKEEVGKEFGVTDFVNPSQLGDKSVSEVINAMTDGGADYSFECIGISSVMTEAVRSTKSGRGKTIILGVEKDSQPLCLPSFEFLFGKCVMGSLFGGAKPKTDIPILAEKCMNKELELEKLVTHEVGLTEINTAFDLLLQGKSLRCIIWMDK

SEQ ID NO: 33119 - protein, 71 aa, Oryza sativa; identical to SEQ ID NO: 32473

SEQ ID NO: 33120 - protein, 643 aa, Oryza sativa
MLSKAKVDISISVSEQRRKKLYSSPATLSVHPPMSAPSYSSISDAAPPDAASNTSAAPSGLVQPPVSPHNACCSHNMVQKRGSQDCHCVYPVRVELFLRNVSLTSNWSDEFLGELASQLSLRVTQFEIVNFYVVGASGLNITMYIAPHTGISFSADQVTAMNYSLSQHTVQINPVLVGDYNLLNLTWFRPLVLAPAPTFTISPKPSPSQASTVPRHSADTSNEKHMSLITIICIFIGALIAVLVIAMFICFCKLRKGKRKVPPVETPKQRTPDAVSAVDSLPRPTSTRFLAYDELKEATNNFDPSSMLGEGGFGRVFKGVLTDGTAVAIKKLTSGGHQGDKEFLVEVEMLSRLHHRNLVKLIGYYSNRESSQNLLCYELVPNGSLEAWLHGTLGASRPLDWDTRMRIALDAARGLAYLHEDSQPCVIHRDFKASNILLEDDFHAKVSDFGLAKQAPEGCTNYLSTRVMGTFGYVAPEYAMTGHLLVKSDVYSYGVVLLELLTGRRPVDMSQPSGQENLVTWARPILRDKDTLEELADPKLGGQYPKDDFVRVCTIAAACVSPEASQRPTMGEVVQSLKMVQRSEFQESIPTPPARPNVRQSSTTYESDGTSSMFSSGPFSGLSPFETENISRTAFSEDLHEGR

SEQ ID NO: 33121 - protein, 136 aa, Oryza sativa
MTFKRRNGGRNKHGRGHVKYIRCSNCAKCCPKDKAIKRFQVRNIVEQAAIRDVQEACVHDGYVLPKLYAKVHHCVSCAIHAHIVRVRSRENRRDRRPPERFRRREDRPTGPRPGGAGGPGAPAAAGPGGPPNVART

SEQ ID NO: 33122 - protein, 60 aa, Oryza sativa
MNSLLLVTSAVARLNSLAKLLWNQDSTKPQRRSSKHEQARLSSAQADKLEHDGRRDGRAR

SEQ ID NO: 33123 - protein, 371 aa, Oryza sativa
MHVKNLEAAKVLAENLLDTIAAEFGASRISSSKVYGAVPPPQQLLDGVQTSGTIPDVHPTLGPNVLTGASHSFASTGANASLVAPSVTSQSGAPSYSVVSPPSNLICPSQPANGGTFYGGYGGIYPQATPLQQVALTLKHASSSSTQVVSATSTSTSTVAMVNPCSHAEADKRSQRRKFQELPVSQGATTEVQNSQQRSKFVKTGLDGLGNMTNSSIEPPIKVQPGSNGMLLQDQPHVSAHPSASKNMLPPPPPPPRNMLPPPPKSMPPPPPKFPSNEMSRNEDRRSDLNKPMAPPRSLDVSSVSPPNLYSAQLPSKEPRVVKPGGASVSDTLLKLMDYGDDDEEDNIDEANSVLGGNPTSISGQKPFWAV

SEQ ID NO: 33124 - protein, 106 aa, Oryza sativa
MYFSYVSIVGGFVSSNGHSSLSTCRRYMGHKRTIRPNAKKLNLLFKRRKQMGWDIFSQKVKKVQRGLMGEPDDIRPGRDDFNEFPSSCICQRIPVNRSVTARAENL

SEQ ID NO: 33125 - protein, 607 aa, Oryza sativa
MIDTWQEAFGGPRARYPQYYAAYHDLVRAGAAFPKRSDRPAPLFNGQSPAGRNMRSPDQQDEAESSAGNDFPALSMSEIQNARGIMDVLAEMLNALDPGNREGLRQEVIVELVDQCRTYKQRVVLLVNATADEELMSQGLALNDDLQRVLAKHDAIAAGIAVRVEKKPKSLQALVDTEDSMNQDSKKEQALVDIEDPTTQETNKEPSQSASVQSPFEQLALPAPPVSNGSATPAPKSDLGVDLLSWDDNPSTTENSLALVPVTDPVVDSTPSQNALAIVDIFSQNNTTNNIAKPADPFGVNSSSTLPGSQPYNAPTQHPLQAQQQPQQVGLYPNGGAVNPGTSYPTSSGWNGQIANNATPPAQQTVNYDEQSGALPPPPWEAQSAPSGDMSNGGMQSHPVSNGQFGGMPSLPTPSNQMGGMQPLHPQMNQMGGPQAHQMYNNQQPGAMQPSQPAVTQMQSGFANQFGSMPPHSMPGMQFPGMQPSPMPGAQPVMMYAQPMMMPGMQFAAMPQPRMYGPQMSQYRLVQQQAAQYYSNSQGRPTYYAGMNDLSQKMYGLSMQDSSYMGMNSSPYSTTPSSSSSMGQPSKPEDKLFGDLLSIAKTKQNKA

SEQ ID NO: 33126 - protein, 200 aa, Oryza sativa
MPGGNLYDFLHKQNNVLDLLTILRIAISISKGMNYLHQNNIIHRDLKTANLLMGYHQVVKIADFGVARQGNQEGQMTAETGTYRWMAPEIINHKPYDNKADVFSFAIVLWELVTLKVPYDNMTPLQAALGVRQGFRLEIPSSVNPRLSKLIQRCWDEDPDVRPVFAEIVIELEDILQHAQANSRGASRRSRAKIQKKSPR

SEQ ID NO: 33127 - protein, 173 aa, Oryza sativa
MAAAAAHKEEVIGKLNVRVVRGSNLIIADPLTHTSDPYVVLSYGPQKVKTSVQKKNSNPVWNEVLQLAVTNPTKPVKLEVFDEDKFTADDSMGVAEFNVTDIYDAAKLDLKHVSDGARIKTIYPVGVNYLGAESHVSWKNGKVVQDITLKLSKVDSGLIVLQLEWVHVPGVTL

SEQ ID NO: 33128 - protein, 179 aa, Oryza sativa
MPDVPPPEELLNLEEIRERRLTDPRFPMQYRNSAAKKKFVPWPIEMRFCEDSASQHKPSLNYWFRARGKLSDDPALHRCVVAYASDLLYSGVSLNPHREKGLKTYSLSLDHSIWFHKPVKADDWLLYVIDSPSAHGGRGFVTGRMFNRQGELVMSLTQEALIRRAKTPGQPSQTPRPKL

SEQ ID NO: 33129 - protein, 575 aa, Oryza sativa
MAAAAALRCNPRPSAAVALRGAAAAPQVGNEAAFELLVGATEPCLRGRRRGAGIRCQRSAAASAVVVEKKSRAVEPAREGANAGHTESELTVVMKFGGSSVASAERMREVADLILSFPEERPVIVLSAMGKTTNKLLMAGEKAVGCGATNVSELDELTFIKELHFGTIDQLGLDRSIVSGLSDELEQLLKGIAMMKELTLRTRDYLVSFGECMSTRIFAALLNKLGVKARQYDAFEIGFITTDDFTNADILEATYPAIAKRLHGDWVTGPAIPIVTGFLGKGWKTGAITTLGRGGSDLTATTIGKALGLREIQVWKDVDGVLTCDPNIHPNAKPVPYLTFDEAAELAYFGAQVLHPQSMRPAREGDIPVRVKNSYNRRAPGTLITKARDMSKTVLTSIVLKSNITMLDIVSTRMLGQYGFLAKVFSIFEDLGISVDCVATSEVSISLTLDPSKLWSRELIKQANELDHVIEELEKIAVVHLLQHRSIISLIGNVQRSSLILEKAFNVLRTNGVNVQMISQGASKVNISLVVHDSEAKQCVQALHSAFFESGFLPEVNDILQDDSVAHSNGTVYRH

SEQ ID NO: 33130 - protein, 267 aa, Oryza sativa
MQIAAINLEKGNQKECKKLLDEGKSTLDSMTDVDPTVHASLYWISSQYHKARQEFAEFYKNALLYLAYTTVESLSESFKLDLAFDLSLAALLGDNIYNFGELLAHPIINSLIGTKVEWVYHMLQAFNTGNLALYQELCRVHNAALSAQPALVQNERKLLEKINILCLMEIIFSRASEDRTIPLSVIAERTKLSISDVEYLLMKSLSVHLIEGIIDEVDSTVHVSWVQPRVLGIPQVKALRERLDAWVGKVHTTLLSVEAETPDLVAA

SEQ ID NO: 33131 - protein, 174 aa, Oryza sativa
MIGPVDFEKSVDYWQQDKWTGQFPVKWHIVKDVPNNLFRHIILENNDNKPVTNSRDTQEVKLEQGMEMLKIFKDHEEDASILDDFDFYEERERALLDNKARLHQQHQLPSSTVVEPKKPLTVATDLVGHITKSFAQAVRLGEAKNVSPNSADKGASGDSSVAAKPLEVKEAGLA

SEQ ID NO: 33132 - protein, 120 aa, Oryza sativa
MYPGGTSASQSPPLVAVVNNQLYAADQATNVVKKYDKGNNTWNIVKPLPVRADSSNGWGLAFKACGDRLLVIGGHRVPRGEVILLHSWCPEDGNGGADWEVLSVKERAGVFVYNCAIMGC

SEQ ID NO: 33133 - protein, 418 aa, Oryza sativa
MALVLHTFDGNKNAFKALIAAEYSGVKVELAKNFQMGVSNKTPEYLKMNPIGKVPILETPDGPVFESNAIARYVTRSKSDNPLYGSSLIEYAHIEQWIDFSATEVDANTGKWLFPRLGFAPYVAVSEEAAIAALKRSLGALNTHLASNTYLVGHSVTLADIVMTCNLYMGFARIMTKNFTSEFPHVERYFWTMVNQPNFKKVMGDVKQADSAPQVQKKAAAPKEQKPKEAKKEAPKEAPKPKAAEKPEEEEEAPKPKPKNPLDLLPPSKMILDEWKRLYSNTKTNFREVAIKGFWDMYDPEGYSLWFCDYKYNDENTVSFVTMNKVGGFLQRMDLCREYAFGKMLVIGSEPPFKVKGLWLFRGPEIPKFVMDEVYDMELYEWTKVDISDEAQKERVSAMIEDLEPFEGEALLDAKCFK

SEQ ID NO: 33134 - protein, 232 aa, Oryza sativa
MAKYLKTVVAPQIPPEIYDSFIAAIDKGSIRTMPNRSMPAAPHPTPGALLMGDAFNMRHPLTGGGMTVALSDIVVLRNLLKPLRNLHDASALCKYLESFYTLRKPVASTINTLAGALYKVFSASPDQARNEMRQACFDYLSLGGVFSNGPIALLSGLNPRPLSLVAHFFAVAIYGVGRLMLPLPSPKRMWIGVRLISSACGIIFPIIKAEGVRHMFFPATVPAYYRAPRPME

SEQ ID NO: 33135 - protein, 455 aa, Oryza sativa
MLAVSPAMCPDIEDRAAVAGDAGMEVVGMSSDDMDQFDFSVDDIDFGDFFLRLEDGDVLPDLEVDPAEIFTDFEAIATSGGEGVQDQEVPTVELLAPADDVGVLDPCGDVVVGEENAAFAGAGEEKGGCNQDDDVGEANVDDGAAAVEAKSSSPSSTTSSSQEAESRHKSSSKSSHGKKKAKVDWTPELHRRFVQAVEQLGIDKAVPSRILEIMGIDSLTRHNIASHLQKYRSHRKHMIAREAEAASWTQRRQIYAAGGGAVAKRPESNAWTVPTIGFPPPPPPPPSPAPIQHFARPLHVWGHPTMDPSRVPVWPPRHLVPRGPAPPWVPPPPPSDPAFWHHPYMRGPAHVPTQGTPCMAMPMPAARFPAPPVPGVVPCPMYRPLTPPALASKNQQDAQLQLQVQPSSESIDAAIGDVLSKPWLPLPLGLKPPSVDSVMGELQRQGVANVPPACG

SEQ ID NO: 33136 - protein, 373 aa, Oryza sativa
MDHRLLLLGLLLLSPAVAAASVPGEEEPLIRQVVGGGDDNELELDAERHFASFVQRFGKSYRDADEHAYRLSVFKANLRRARRHQLLDPSAEHGVTKFSDLTPAEFRRAYLGLRTSRRAFLRGLGGSPHEAPVLPTDGLPDDFDWRDHGAVGPVKNQGSCGSCWSFSASGALEGANYLATGKMDVLSEQQMVDCDHECDSSEPDSCDAGCNGGLMTNAFSYLLKSGGLESEKDYPYTGRDGTCKFDKSKIVTSVQNFSVVSVDEDQIAANLVKHGPLAIGINAAYMQTYIGGVSCPYICGRHLDHGVLLVGYGASGFAPIRLKDKAYWIIKNSWGENWGEHGYYKICRGSNVRNKCGVDSMVSTVSAIHTSKE

SEQ ID NO: 33137 - protein, 284 aa, Oryza sativa
MSVNAMGWEGQVNPKVNEVQKAQDCLLPMGITSENVAHRYGVTRQEQDQAAAESHRRAAAATAAGKFKDEIVPVPTKIVDPKTGEEKKVAISVDDGIRPGTTASGLAKLKPVFRKDGTTTAGNSSQVSDGAGAVLLMRRDVAMKKGLPILGVFRSFAAVGVDPAVMGVGPAVAIPAAVKSAGLQIEDIDLFELNEAFASQFVYCCNKLGLDRSKVNVNGGAIALGHPLGATGARCVATLLNEMKRRGRDCRFGVVTMCIGSGMGAAAVFERGDSVDQFSNVRHH

SEQ ID NO: 33138 - protein, 73 aa, Oryza sativa
MVSDYGVAVLASARQLKLRVLSLSGCLKVTQKSVPFLGSMSASLEGLNLQFNFIGNHNIASLEKQLWWCDILA

SEQ ID NO: 33139 - protein, 481 aa, Oryza sativa
MREKHVKAYLGMLPAAKPKFWLAFPVSVPPLGFNTYFISSGKKSASVSLMSTLHSSQGSENSNMQIGQGQLKLQYNAAGALSLYSNSKTQVEANFEQKYKYYIGQDGNGSDPQASGAYIFRPNGTVPIKTDGQVPLTVLRGSILDEVHQQINPWIYQINRVYKGKDYVETEFIVGPIPVDDGNGKELSTEVVTNMATNKTFYTDSSGRDFIKRIRDYRSEWKIEVHQPIAGNYYPVNLGIYVEDGSRELSILVDRSVGGASIKDGQIELMLHRRLLHDDGRGVAEALNETTCFDNQCEGLVIQGKYYLKIDPQGEGARWRRTFGQEIYSPLLIAFAEQDGGNWVNSHVTKFSAMDPAYSLPDNVALLTLQELEDGTVLLRLAHLYEAGEHKDLSALASVDLKRVFPDKKIVKIVETSLSANQERSAMEKKRLKWKVEGPPADEKIVRGGPVDPSKLVVDLGPMEIRTFLINFAPQSGKQLM

SEQ ID NO: 33140 - protein, 416 aa, Oryza sativa
MNSPWRDRPIEESLKLFEDMRHGLVAEGKATLRMKQDMQNDNKNMADLIAYRIKFTPHPHAGDKWFIYPSYDYAHCLVDSLENITHSLCTLEFDIRRPSYYWLLVSLDQYQPYVWEYSRLNISNNVMSKRKLNKLVTEKWVDGWDDPRLLTLAGLRRRGVSSTAINSFIRGMGITRSDNSLIRLERLEYHIREELNKVAPRAMVVLHPLKVVINNLDYGTIIDLDAKKWPDAPGDDASAYYKVPFSRTVYIEQSDFRVKDSKDYYGLAPGKTVLLRYAFPIKCTEVIYGDNSDNIIEIRAEYDPSKATKPKGVLHWVAEPSPGVNPLKVEIRLFEKLFLSENPVELEDWLGDLNPRSKEVIKGAYAVPSLATAALGDKFQFERLGYFAVDSDSTAEELVFNRTVTLRDSYGKAGPK

SEQ ID NO: 33141 - protein, 509 aa, Oryza sativa
MGTRSVALVLLAAVLLQALLPASAAEGLVRIALKKRPIDENSRVAARLSGEEGARRLGLRGANSLGGGGGEGDIVALKNYMNAQYFGEIGVGTPPQKFTVIFDTGSSNLWVPSAKCYFSIACFFHSRYKSGQSSTYQKNGKPAAIQYGTGSIAGFFSEDSVTVGDLVVKDQEFIEATKEPGLTFMVAKFDGILGLGFQEISVGDAVPVWYKMVEQGLVSEPVFSFWFNRHSDEGEGGEIVFGGMDPSHYKGNHTYVPVSQKGYWQFEMGDVLIGGKTTGFCASGCSAIADSGTSLLAGPTAIITEINEKIGATGVVSQECKTVVSQYGQQILDLLLAETQPSKICSQVGLCTFDGKHGVSAGIKSVVDDEAGESNGLQSGPMCNACEMAVVWMQNQLAQNKTQDLILNYINQLCDKLPSPMGESSVDCGSLASMPEISFTIGGKKFALKPEEYILKVGEGAAAQCISGFTAMDIPPPRGPLWILGDVFMGAYHTVFDYGKMRVGFAKSA

SEQ ID NO: 33142 - protein, 396 aa, Oryza sativa
MVPVEMEVDDPRGWDFVDWVGPDASASIFRSLDDPADIVRAAAVSRSWRRFVVENEFSKSICLRICPEIANFTSAEEVSRSPPQPPHAESSHGVQRKALERDYRIYSYLSGALVSNSPSMDCILQCIGASSTDNFPDETIENTLIPHDRVKHRPSYWSSGGHDDPDTPETLTYRLNCDMCIVDEIKLQPFKAYFQYGHPIYSSKAVRFRMGHSKLPHGSDSFVTVEDENLMAIADENYVWTYTSPEFPMLQENVLQSFKLPRPVLCIGGIVKVELLGRVQKQEADDRYYICICHAQVRGRSLSPVFMVDTSDPAGYSVLKYLPDAKILRSEDAMLDDGSESLEWHSLVARYRRMRHLAIMNVLLGPEEFMDEDDIIGGVLMDEDDLGGMLEDDPFV

SEQ ID NO: 33143 - protein, 307 aa, Oryza sativa
MQVTTIERYVKYHVKEFERCFQMRFPACSIAAKRPIDSSTTILDVQGVGLKNFSKAARDLITRLQKIDNDNYPETLRRMYIINAGQGFKMLWSTVKSFLDPKTASKIHVLGSKYQNKLLEIIDENELPEFFGGKCKCEAFGGCKKSDKGPWKDPNIIKRVLNGEANYGRQIVTISSTDGKIIRYAGPQYPTRKGSDGSAESGSEVEDGASPMASRNLITNPLLTPVHEESKLAAHGFTSASPSIIEESIPVVDKVVDDGWGSPRASSSPSRSLPITFDGLWTQVITWLTVLIVSLFCYGSLCPKQDG

SEQ ID NO: 33144 - protein, 249 aa, Oryza sativa
MDAFYSTSSAYGAAASGWGYDSLKNFRQISPAVQSHLKLVYLTLCVALAASAVGAYLHVALNIGGMLTMLGCVGSIAWLFSVPVFEERKRFGILLAAALLEGASVGPLIKLAVDFDSNILVTAFVGTAIAFGCFTCAAIVAKRREYLYLGGLLSSGLSILLWLQFAASIFGHSTGSFMFEVYFGLLIFLGYMVYDTQEIIERAHHGDMDYIKHALTLFTDFVAVLVRILVIMLKNASDKSEEKKRKKRS

SEQ ID NO: 33145 - protein, 164 aa, Oryza sativa
MALRLWASSAANALKISCSGATRAAPAYSISRYFSTVLDGLKYSSSHEWVKNDGSVATIGITDHAQGHLGEVVFVELPEAGAKVSQGGAFGNVESVKATSDINSPISGEVVEVNDKLSETPGLINSSPYEDGWMIKVKPSSPSELDALLDPAKYTKHCEEEDAH

SEQ ID NO: 33146 - protein, 194 aa, Oryza sativa
MAFASSLLPAPPASVAPELASFLPPQAKRGAVSLAATRRRGARIGVRAEVNESGSALAADAFAQVKHVLLPVTDRNPYLSEGTRQAAATSASLAKKYGANITVVVIDDKPKEEFPEHDTQMSSIRWHLSEGGFTEFGLMERLGEGKKPTAIIGEVADELELDLVVLSMEAIHSKHVDGNLLAEFIPCPVLLLPL

SEQ ID NO: 33147 - protein, 282 aa, Oryza sativa
MNQDLVLQISKLQDEFNEMQEGLTNKLGEVESVSKALSDELVSVKEMVHKGQEELEATSNELASIVEARDNLKKELLDVFKKLESTSQELVDERKTVTTLNRELEALVKQLQMDSEARKALEADLDEATKSLDEMNRSALSLSKELEETNSRKDTLEAEKKMLSKALAEQQKITTEAHENTEDAQNLISRLQTEKESFEMRARHLEEELALAKGEILRLRRQISTSRSQKAKTLPNTNASPEVSQAPDEQPVNDNQNTSKVAAGSQYTAKRTTRRRKGGAST

SEQ ID NO: 33148 - protein, 323 aa, Oryza sativa
MGTVRPWATGLSGQLQKAFVTGVPALKRSELETACEDFSNIIGCTSTCTLYKGTLSSGVEIAVASSLVTSADDWSKECESRYRRKITSLSKVSHKNFMNLLGYCEEEQPFTRVMVFEYAPNGTLFEYLHVREAEKLDWMTRLRISMGIAYCLEHMHQLKPPVVPRNFDSTTIYLTDDFAAKVSDLEFWSGAKEPNPATSNSSSSSDLENTVRKYGMVLLEMLTGRVPDSEEDGPLERLASRYFDGETRLAELIDPSIGSFSEEAARSLCEVVRSCIDPDPKRRPTMAEVAARMREITALGPDGATPKVSPLWWAELEIMSSES

SEQ ID NO: 33149 - protein, 457 aa, Oryza sativa
MQIFVKTLTGKTITLEVESSDTIDNVKAKIQDKEGIPPDQQRLIFAGKQLEDGRTLADYNIQKESTLHLVLRLRGGMQIFVKTLTGKTITLEVESSDTIDNVKAKIQDKEGTPPDQQRLIFAGKQLEDGRTLADYNIQKESTLHLVLRLRGGMQIFVKTLTGKTITLEVESSDTIDNVKAKIQDKEGIPPDQQRLIFAGKQLEDGRTLADYNIQKESTLHLVLRLRGGMQIFVKTLTGKTITLEVESSDTIDNVKAKIQDKEGIPPDQQRLIFAGKQLEDGRTLADYNIQKESTLHLVLRLRGGMQIFVKTLTGKTITLEVESSDTIDNVKAKIQDKEGIPPDQQRLIFAGKQLEDGRTLADYNIQKESTLHLVLRLRGGMQIFVKTLTGKTITLEVESSDTIDNVKAKIQDKEGIPPDQQRLIFAGKQLEDGRTLADYNIQKESTLHLVLRLRGGQ

SEQ ID NO: 33150 - protein, 297 aa, Oryza sativa
MLTCFQTSVISSAMFLTAMAANPLAANLTAGTIGQGIGWTLWAKAAIVPGLLSLVFVPLILYLIYPPEVKTSPDAPRLAKERLEKMGPMSKEEKIMAGTLFLTVGLWIFGGMLNVDAVSAAILGLSVLLISGVVTWKECLGEAVAWDTLTWFAALIAMAGYLNKYGLISWFSETVVKFVGGLGLSWQLSFGVLVLLYFYSHYFFASGAAHIGAMFTAFLSVSSALGTPPLIAAMVLSFLSNIMGGLTHYGIGSAPVFYGAGYVPLAQWWGYGFVISIVNIIIWLGAGGFWWKMLGLW

SEQ ID NO: 33151 - protein, 357 aa, Oryza sativa
MVSILQLGQSSYLPHPIDNDSYDRIVLCVRLLCNTGDDVRKVWLQSCRQSFTKMLAEKQFRETEEMKAKAQISHAQPDDLIDFYHLKSRRGMSQLELEDAVQDDLKAATGEFTKDADDANRLNRILQLTGFSDPVYAEAYVTVHHYDIVLDVTVINRTKETLQNLCLELATMGDLKLVDRPQNYTLAPESSKQIRANIKVSSTETGVIFGNIVYETSNVMERSVVVLNDIHIDIMDYISPATCADVAFRNMWAEFEWENKVAVNTVIQDEKEFLDHIIKSTNMKCLTPPSALDGECGFIAANLYAKSVFGEDALVNISVEKQADGKLSGYIRIRSKTQGIALSLGDKITLKQKGGSS

SEQ ID NO: 33152 - protein, 305 aa, Oryza sativa; identical to SEQ ID NO: 30954

SEQ ID NO: 33153 - protein, 396 aa, Oryza sativa
MEHILEGSSYMKLAKKLGELDPLMKPKQDRYALRTSPQWLGPQIEVIRFATKSIEREINSVNDNPLIDVSRGKALHGGNFQGTPIGVSMDNTRLALAAIGKLMFAQFSELVNDFYNNGLPSNLSGGRNPSLDYGFKGAEIAMASYCSELQFLGNPVTNHVQSAEQHNQDVNSLGLISSRKTAEAIDILKLMSSTFLIALCQAIDLRHLEENMKTAVKNCVMQVAKKSLSMNHMGGLHIARFCEKDLLTAIDREAVFAYADDPCSANYPLMQKLRAVLIEHALANGDAERVLETSIFAKVAEFEQHVRAALPKEVEAARAAVENGTPLVPNRIKECRSYPLYRFVREEVGTEYLTGEKTRSPGEELNKVLVAINERKHIDPLLECLKEWNGAPLPLC

SEQ ID NO: 33154 - protein, 77 aa, Oryza sativa
MAGHRNKDDLFVSWGEFARGLFCLAPGSPPNLVSRCPLVVLRSHCDYIVQRSRVNLNVELQRNNQEIVAFSRRFKVT

SEQ ID NO: 33155 - protein, 335 aa, Oryza sativa
MATMPLTFSPPRLLHRHRRREAKPQRRSATRVSLLPRRGAASARRPLYCAPGGGGEVSAPPATEQQEQAAKEEEEEYTLLAITGSDFNEVIMIIDSPATRYLLLDTNRNVHSVLPKTGVWTNSYWDEFVSLPAVVPRGPVALLGLGAGTAAHLMLKFYPWLQLVGWEIDPKIIELSRDYFGLSDLEKATESGGSLSVRIGDALSPSATIEGGFAGIVVDLFADGKIIPQLQEVETWLEIAKKLMPDGRIIVNCGGADAAVSLANDTGLSSWVQNSTIKALCAAFPGQLNWKRLSEKESVNYVALTGPLPNLDEWSTSVPSEMSTKVKQWVPCELA

SEQ ID NO: 33156 - protein, 328 aa, Oryza sativa
MGYTLLLSLIEYKTLVMRGDIERANDILPSIPKAQYNNVAHFLESRGMLEEALEIATDADYRFDLAVQLGKLEVAKAIAMEAQSESKWKQLGELAMSTGKLDMAEECLVQAKDLSGLLLLYSSLGDAEGIEKLASQAKEHGKNNVAFLCLFMLGKLEDCIQLLIDSNRIPEAALMARSYLPSKVSEIVAIWRNDLSKVNPKAAESLADPSEYPNLFEDWQVALTVEKNVASRRVHYPPADEYLNHAEKSDMTLVEAFKRMQVIEDEETEDALDENGEPDEEVLEENKVEESTDEAVEVDADEPEETVLVNGKEGEEQWGTNNEGTSSA

SEQ ID NO: 33157 - protein, 384 aa, Oryza sativa
MEGREKVYVDDLKKAVELVILPRSILSDNPQEQQDQQPPPPPPPPPPQDQDSQEDQDEDEEEDQEDDDEENEQQDQQIPEEFIFDAEGGIVDEKLLFFAQQAQRRRGKAGRAKNLIFSSDRGRYIGSMLPKGPIRRLAVDATLRAAAPYQKLRREKDRDKTRKVFVEKTDMRAKRMARKAGALVIFVVDASGSMALNRMQNAKGAALKLLAESYTSRDQVSIIPFRGDFAEVLLPPSRSIAMARNRLEKLPCGGGSPLAHGLSTAVRVGLNAEKSGDVGRIMIVAITDGRANVSLKKSTDPEATSDAPRPSSQELKDEILEVAGKIYKAGISLLVIDTENKFVSTGFAKEIARVAQGKYYYLPNASDAVISAATKTALSDLKSS

SEQ ID NO: 33158 - protein, 394 aa, Oryza sativa
MDRPPPDQQRQKQAPLFSPYQMPRFRLNHRVVLAPMTRCRAIGGVPGPALAEYYAQRTTQGGLLISEGTVVSPAGPGFPHVPGIYNQEQTDAWKKVVDAVHAKGGIFFCQLWHVGRASHQVYQPNGAAPISSTDKPISARWRILMPDGSYGKYPKPRRLAASEIPEIVEQYRQAAINAIEAGFDGIEIHGAHGYIIDQFLKDGINDRTDEYGGSLSNRCRFLLEVTRAVVSAIGADRVAVRISPAIDHLDAYDSDPIKLGMAVVERLNALQQQSGRLAYLHVTQPRYTAYGQTESGQHGSAEEESRLMRTLRGTYQGTFMCSGGYTRELGLEAVESGDADLVSYGRLFISNPDLVERFRLNAGLNKYVRKTFYTPDPVVGYTDYPFLGQPKSRM

SEQ ID NO: 33159 - protein, 148 aa, Oryza sativa
MSSPSRRSSSPESNTSGGGGGADERKRKRMLSNRESARRSRARKQQRLEELIAEAARLQAENARVEAQIGAYAGELSKVDGENAVLRARHGELAGRLQALGSVLEILQVAGAPVDIPEIPDDPLLRPWQPPFAAQPIVATAMADAFQF

SEQ ID NO: 33160 - protein, 360 aa, Oryza sativa
MLPCIDRSSAEFRSIFAGDLVKQMGTISEHIKAIARNGTKQSGLVPSGTEAASNKSSSRKGIRGGSPNIGRRAPVGNDPTPPSASALRATVWLRLQFIIRLLPLIMADRSMRHTLASAILGLLSARIIYEDADLPLPPTNTTVLRRDVDSLLEPPLDVLLDRPGESLFERLICVFHALLGNGKPSWLKSKSVSKSTTRTPRDFPAFDSEAAEGLQSVLDHLEMPGIIRRRIQAAMPVLPPSRHPCISCQPPQLSLAALSPLQSGTSTSGPQQKGNSTSWVPTNVSIRNKAAFATQDPEMEVDPWTLLEDGTSCPSMSSGSNSSSGMAGDHGNLKACSWLKGAVRVRRTELTYIGSLDDDS

SEQ ID NO: 33161 - protein, 150 aa, Oryza sativa
MSSNDYSFCLANRQWELLDKGVHKHIFNFDKDIMSLDGKERLISGGSPIVHHCDDTSMIIYFTRGPFLFVFNFNPDASYQLYSVGVDEAGEYQLILNTDETKYGGRGELTSNQYMKRTSDNRVGGCRNSLELTLPSRSAQVFKLVRILRI

SEQ ID NO: 33162 - protein, 257 aa, Oryza sativa
MQGGLAMSLLERASSLHNELLTTKLTTQYRMHDSIASWASNEMYDGFLKSSPSVASHLLADYPFIKETWITRCAFLLLDTRMPYGSLNIDCEEHLDPAGTGSFYNNGEADVVSQHVLNLVQCGVSPTAIAVQSPYIAQVQLLRDRLEDYPEASGVEVSTIDSFQGREADAVVISMVRSNTLGAVGFLGDNRRMNVAITRARRHVALVCDSSTICNNAFLARLLRHIRQHGQVRHVEPGSFGGDSGLGYTPPALPSIS

SEQ ID NO: 33163 - protein, 361 aa, Oryza sativa
MFTAREMGKVFFTNSGSEANDSQVKLVWYYNNALGRPDKKKFIARSKSYHGSTLISASLSGLPALHQKFDLPAPFVLHTDCPHYWRFHLPGETEEEFATRLANNLEELILKEGPETIAAFIAEPVMGAGGVIPPPKTYFEKVQAIVKKYDILFIADEVITAFGRLGTMFGSDMYNIKPDLVSMAKALSSAYVPIGAIMVSPEISDVIHSQSNKLGSFAHGFTYSGHPVACAVAIEALKIYQERNIPDHVKQISPRFQEGVKAFAGSPIVGEIRGVGLILGTEFADNKSPNDPFPAEWGVGAIFGAECQKRGMLVRVAGDNIMMSPPLIMTPDEVEELVSIYGDALKATEERVAELKSKKNN

SEQ ID NO: 33164 - protein, 463 aa, Oryza sativa
MTSLSSSAAAARATFVMPSSVRGGMSRGRRMARLVTRAAASSPKLPSGRRLRVAVVGGGPAGGAAAEALAKGGVETVLIERKLDNCKPCGGAIPLCMVSEFDLPLDLVDRKVRKMKMISPSNVAVDIGGTLAPHEYIGMVRREVLDAYLRSRAEGAGAEVVNGLFLRYEAPKEPNGSYVVHYNHYDSSNGKAGGEKRTFEVDAIVGADGANSRVAKDMGAGDYEYAIAFQERVKIPDDKMKYYEERAEMYVGDDVSPDFYGWVFPKCDHVAVGTGTVTHKPDIKKFQAATRLRAKDRIEGGKIIRVEAHPIPEHPRPKRVAGRVTLVGDAAGYVTKCSGEGIYFAAKSGRMCAEAIVAGSANGTRMVEESDLRRYLAEFDRLYWPTYKVLDVLQKVFYRSNAAREAFVEMCADDYVQRMTFDSYLYKRVVPGNPLDDIKLAVNTIGSLVRATALRREMEKVTL

SEQ ID NO: 33165 - protein, 277 aa, Oryza sativa
MRKNFRKRNLEADAAADHSDDDDARRVALEEIKYMQKLRERKLGIPAAAAAAGASSAASADGASPRGRGGGGGGLAAGGDAEKEDLVLQDTFAQETAVTIEDPNMLRYVENELLKKRGKKVDVKDKEEKDQVDELYTVPDHLKVRKKNSEESSTQWTTGIAEVQLPIEYKLRNIEETEAAKKMLQEKRLAGKTKSDANIPSSYNADFFHRGKDYTEKLRREHPELYKDQGSQANGTGGKSMGGNHPDGAGAGRREAATDELLLERFRKREKFRVMRR

SEQ ID NO: 33166 - protein, 443 aa, Oryza sativa
MEGNSTNLDAAIESLLNVEKQMRLAGDVAGTRKAAIDIVELCYKAGAWKTLNDQIVVLSKRRGQLKQAITAMVQKAMEYIDLTPDMDTRIELIKTLSSVSAGKIYVEIERARLIKRLAKIKEEQGQIDEAADLMQEVAVETFGSMAKTEKIAFILEQVRLCLDRQDYVRAQILSRKISPRVFDADPSKEKKKPKEGDNIVQEAPAEIPSLLELKRIYYELMIRYYSHNNDYLEICRCYKSIYEIPSIKEDPSKWIPVLRKICWYLVLAPHDPMQSSLLNATLEDKNLSEIPNFRLLLKQLVTMEVIQWTSLWEFFKDEYANEKNFLGGALGDKAAEDLKLRIIEHNILVVSKYYSRITLKRLADLLCLSLQEAEKHLSDTVNSKSLIAKIDRPMGVVCFRTAQDSNGILNSWAANLEKLLDLVEKSCHQIHKETMIHKAVLKA

SEQ ID NO: 33167 - protein, 220 aa, Oryza sativa
MSAAAGGYRAEDDYDYLFKVVLIGDSGVGKSNLLSRFTKNEFSLESKSTIGVEFATRSLQVDGKVIKAQIWDTAGQERYRAITSAYYRGAVGALLVYDVTRRATFDNVGRWLRELRDHTDPSIVCMLIGNKSDLRHLVAVSTEDGKEFAEAESMYFMETSALDATNVDNAFAEVLTQIYQIVNKKPVEAPEDGSAGPGKGEKINVKDDVSAMKRVGCCSN

SEQ ID NO: 33168 - protein, 181 aa, Oryza sativa
MGLTFTKLFSRLFAKKEMRILMVGLDAAGKTTILYKLKLGEIVTTIPTIGFNVETVEYKNISFTVWDVGGQDKIRPLWRHYFQNTQGLIFVVDSNDRERVVEARDELHRMLNEDELRDAVLLVFANKQDLPNAMNAAEITDKLGLHSLRQRHWYIQSTCATSGEGLYEGLDWLSNNIANKA

SEQ ID NO: 33169 - protein, 96 aa, Oryza sativa
MILSHDRERGRVSLSTKKLEPTPGDMIRNPKLVFEKADEMAQIFRQRIAQAEAMARADMLRFQPESGLTLSSEGILGPLSSDTPSEGSGEGQTTDE

SEQ ID NO: 33170 - protein, 248 aa, Oryza sativa
MSLSKDTEQSPSKTRLTKLQSERFEHLSEQELCLKESLAAYRNAADAASNIQAALRERTLKLQTKAIQLANPEIEASEIVAAMKIQHAFQNYNRKKAMRAAARIQSHFRTWKMRRNFINMRRQVIRIQAAYRGHQVRRQYRKVIWSVGIVEKAILRWRKKRKGLRGIASGMPVVMTVDAEAEPASTAEEDFFQAGRQQAEDRFNRSVVRVQALFRSYKAQQEYRRMKIAHEEAKIEFSEGQLGAACRS

SEQ ID NO: 33171 - protein, 433 aa, Oryza sativa
MERYKVIREIGDGTCGNVFRAYNTETNEIVAVKKMKRKFFQWEECISLREVKALQKLNHPNIVKLKEVTMENHELFFIFENMECNLYDVIRERQAAFSEEEIRNFMVQILQGLAYMHNNGYFHRDLKPENLLVTDGTVKIADFGLAREVSSSPPYTDYVSTRWYRAPEVLLQSSAYTPAIDMWAVGAILAELFTLSPLFPGGSETDQLYKICAVLGTPDHTVWPEGMNLPRSSSFNFFQIPPRNLWELIPNATLEAIDLIQQLCSWDPRRRPTAEQSLQHPFFNVGNWVPRPLHASHTKTIETRPNPRLELNLWDFGTEPEDNYLDLTLSLKPSFPGTDFSNNVPEHTKEEILLYPGFENPPVQSGFWPLVASDRPMGDVPAMSSWPQAYVVDGQATLPAVGFSGSPFGLSPLQPNLFENRSFATPIRQVNFF

SEQ ID NO: 33172 - protein, 440 aa, Oryza sativa
MAYHGQLDGRQASGLMRDGAFPAASLSGRQPLDRAATALEILEKKLAEQTAEAEKLIRENQRLASSHVVLRQDIVDTEKEMQMIRAHLGDVQTETDMHMRDLMERMRLMEADIQAGDAVKKELHQVHMEAKRLIAERQMLTVEMDKVTKELHKFSGDSKKLPELLTELDGLRKEHQSLRSAFEYEKNTNIKQVEQMRTMEMNLMTMTKEADKLRADVANAEKRAQVAAAQAVAAQAGVAHVTASQPGAAQAVAVPAASNPYSSAFTGHPSAYHQGATQAGVYQQGTTQAGAYQQGSTQAGAYAYPTYDAATAYQMHAAQANAYAGYPGYPVAGYTQAALPGYPSAYAAPQQPISSGVATDVASMYGAISSAGYPAGVVQSSSGAANAGQAPAIILSHTTQPEQARGEIVVSVSDPNHYLLNPFCGVAVVRSLERPTTAWL

SEQ ID NO: 33173 - protein, 431 aa, Oryza sativa
MTQLLPVVIRGILPDNVRATITKLCAFMNAISQKVIYPDRLEALQNEVVQCLVSFELIFPPSFFNIMTHLLCHLVKEIRILGPMYLHNMFPFERYMGVLKKYVRNRARPEGSIAKGYGTEEVIEFCVEFIEDLRPIGVPESRHEGRLRGKGTLGRKAITTVDNNSFRKAHFTVLQHSSLVAPYIEEHLALVRARNIGKSDAWITRHHIDTFPAWLRQHLMGNESINQQLAFLARGSSGSIATFQGYEINGYTFYTRAQDMKSTNQNNAVRVDAMGHDGTTATYYGAIEDIWELDYGPLKVPLFRCQWVRLTGGGVMIDDSGMTTVDLNKVGYSDEPFVLANDVTQVFFVKDMSSKGKKGRGPDEPKRQVVLPGKRKIVGVEDKTDEDYDQLDGQPPFTVTIDPSILLSNEDTPYSRSDHKEGTIVRRKYVP

SEQ ID NO: 33174 - protein, 518 aa, Oryza sativa
MAGGAVVSTGAGKDYPGKLTLFVFFTCVVAATGGLIFGYDIGISGGVTSMDPFLRKFFPEVYRKKQMADKNNQHCKYDNQLLQTFTSSLYLAALVSSFFAATVTRVLGRKWSMFAGGLTFLIGAALNGAAENVAMLIVGRILLGVGVGFANQSVPVYLSEMAPARLRGMLNIGFQLMITIGILAAELINYGTAKIKAGWGWRVSLALAAVPAAIITLGSLFLPDTPNSLIDRGHPEAAERMLRRIRGSDVDVSEEYADLVAASEESKLVQHPWRNILRRKYRAQLTMAICIPFFQQLTGINVIMFYAPVLFDTLGFKSDASLMSAVITGLVNVFATLVSIFTVDRLGRRKLFLQGGAQMVVCQVVVGTLIAVKFGTSGIGDIPKGYAAVVVLFICMYVAGFAWSWGPLGWLVPSEIFPLEIRPAGQSINVSVNMLFTFVIAQAFLTMLCHMKFGLFYFFAGWVVIMTVFIALFLPETKNVPIEEMVLVWKSHWFWRRFIGDHDVHVGANHVSNNKLQP

SEQ ID NO: 33175 - protein, 99 aa, Oryza sativa
MEDLYRPGEIPIRGARVEDLYRPGEISARAVRVEDLYRSDQRITHAVDLPLHAPYPTAHYEVPNPAYSDISQRYASTRLNAPGASVSSLYSFPGAPAYR

SEQ ID NO: 33176 - protein, 306 aa, Oryza sativa
MGNQELIDYFSEYAASKARHAYGPNGHRGMSVLIFDSSAVGYMEAERLHDHFVRQRTDRNTWNSAHKVTFLPGGKRQLYGFLATKDDMETFNRHCHGKSRLKYEMRSYNEMVVTQMKQMSEDNQQLNYLKNKMVKKEQHSKLVEDTLSVVTQKLRETMEENTIVRNKAKEKHLEYEKEMKYQEEFFHDQIEKIHKATEEKEIKFEKLLQEERAKARQSDVDSGSTEDRRQRKEKIQNFIDCQVKDVEEFEAERDKLIKLHEEKKVKLKKEYLAKEFELEKELDTALTSLMDKHKPDIFKSSTSPST

SEQ ID NO: 33177 - protein, 361 aa, Oryza sativa
MKALILVGGFGTRLRPLTLSFPKPLVDFANKPMILHQIEALKEVGVTEVVLAINYRPEVMLNFLKDFEDKLGITITCSQETEPLGTAGPLALARDKLVDGSGEPFFVLNSDVISEYPFAELIKFHKSHGGEATIMVTKVDEPSKYGVVVMEEVTGMVEKFVEKPKIFVGNKINAGIYLLNPSVLDRIELKPTSIEKEVFPRIASDAKLFALVLPGFWMDVGQPRDYITGLRLYLDSLRKRSTNRLATGAHIVGNVLVHESAKIGEGCLIGPDVAIGPGCVVEDGVRLSRCTVMRGVHIKKHACISNSIIGWHSTVGQWARIENMTILGEDVHVGDEVYTNGGVVLPHKEIKSSILKPEIVM

SEQ ID NO: 33178 - protein, 497 aa, Oryza sativa
MVLSHASSGRDDAVRCTFATRYACETLPRFRMPEQSIPREAAYQIINDELMLDGNPRLNLASFVTTWMEPECDKLIMDSVNKNYVDMDEYPVTTELQNRCVNMIAHLFNAPIKEDETAIGVGTVGSSEAIMLAGLAFKRKWQNKRKEQGKPCDKPNIVTGANVQVCWEKFARYFEVELKEVKLSEGYYVMDPVKAVEMVDENTICVAAILGSTLTGEFEDVKLLNNLLTEKNKETGWDVPIHVDAASGGFIAPFLYPELEWDFRLPLVKSINVSGHKYGLVYPGVGWVIWRSKEDLPEELIFHINYLGTDQPTFTLNFSKGSSQIIAQYYQLIRLGFEGYKNIMQNCMENTAILREGIEATGRFEILSKEAGVPLVAFSLKDSGRYTVFDISEHLRRFGWIVPAYTMPANAGHVAVLRVVIREDFSRSLAERLVSDIVKILHELDAHSAQVLKISSAIAKQQSGDDGVVTKKSVLETEREIFAYWRDQVKKKQTGIC

SEQ ID NO: 33179 - protein, 260 aa, Oryza sativa
MARKKIREYDSKRLLKEHLKRLAGIDLQILSAQVTQSTDFTELVNQQPWLSTMKLVVKPDMLFGKRGKSGLVALNLDIAQVKEFVKERLGVEVEMGGCKAPITTFIVEPFVPHDQEYYLSIVSERLGSTISFSECGGIEIEENWDKVKTIFLSTEKPMTPDACAPLIATLPLEARGKIGDFIKGVFAVFQDLDFSFLEMNPFTIVNGEPYPLDMRGELDDTAAFKTSRSGEISNSHYHSVEFSVLQKALSMTWMRRQVHL

SEQ ID NO: 33180 - protein, 376 aa, Oryza sativa
MKERFVSSGGAIFEGKSLSSISVHDDFAVLNLSDGGSLPCRLVIDAMGNFSPIVRQIRSGRKPDGVCLVVGTCARGFDRNTTSDIIFSSSSIKRAGNSGVQLFWEGFPAGSGPTDRTTYMFTYVDPHSGGPKLEELLETFWDLMPAYEDVVLENLDIMRVIFGIFPTYRNSPLPAAFDRVLQVGDASGIQSPVSFGGFGSLTRHLGRLSNGIYEAVSGDLLDARSLQLLNPYMPNLSASWLFQRAMSARPQIDVSPTFINELLFANFESMQKLGDSVLRPFLQDVIQFGPLVKTLGLVMITRPQILPSIFKQAGPGVILNWSGHFVMLGYYTFLSTFIDPILRPWVESLPLRNKYQWKRYLEAWKYGAGLDYRQGE

SEQ ID NO: 33181 - protein, 277 aa, Oryza sativa
MKATVMIRRLKKDVLSQLPVKRRQQAFLDLSEKEMRHIRALFHELETVKIKIQSCDSQETMDSLKFAQKNLINKIYNDSAEAKIPAVLDYLGTIIEAECKFLIFAHHQSMLEAIHQHLLKKKVKCIRIDGQTPVPVRQTLVTDFQNKDDIKAAVLSIKAGGVGLTLTAASTVIFAELSWTPGDLIQAEDRAHRIGQVSSVNIYYLLANDTVDDIIWDVVQGKLENLGQMLDGQEKTLDVSQSDTRPSPSKQKTLDAYLKRCSNSTEADQPKLKNPRF

SEQ ID NO: 33182 - protein, 351 aa, Oryza sativa
MGGGDASGGDGPEQELKRAAAAAYNYEGDARWAEYWSNILVPPHLASRPDVVDHYKRKFYQRYIDRDLVVEPMSSTGSTQPSGPEVRSSSFSSSENVRARSSGSSSRSAAPPPPPPQTDSATNPLRFDARTIHFSINAWVLVVAGLGMLPILPKHLADRACKLSLLGTILSSAYSLYSTYGKPRAWNMPAVQGWLQAVLGTKDFIHLMFSLMLFTSQLHLKIAALPVFCWALDHVARFLRRNFARSSFYRSYLEEPCLWVETNNTTLSLLSSNAEIALGFLLIISLFSWQRSIIQTFMYWQVLKQMYHAPVTASYHQSAWAKIGRIVNPYIHRYAPFLNTPISAAQRWWFR

SEQ ID NO: 33183 - protein, 456 aa, Oryza sativa
MFDEHVNYATAHRTSRIVYPGHCEVFTSDPAVVEHVLKNSFNKYSKGDFLTTAMKDLFGDGIFVTDGDMWRHQRKLASYEFSTKVLRDFSSDTFRRNAAKLAEKISCAAANRISINIQDLLMRATMDSIFKVGFGFELNTLSGSDESGIQFSKAFDEANSLVYYRFVDIMWKLKRYLNIGSEAKLKRNIQIIDSFVMKLIHQKREQMKIAADYKTKEDILSRFVLASEQDPGTMDDRYLRDIVLNFLIAGKDTTGNTLTWFFYLLCKNPIVQDKVALEIREFVEWSKEDNTIESFTKRLDEGAISKMHYLQATISETLRLYPAVPVDAKMADEDDVLPNGYRVVKGDGINYMIYAMGRMTYLWGEDAQEFRPERWLVNGVYQQESPFKFVSFNAGPRICLGKEFAHRQMKIMAATLIHFFKFRLEDESKEPIYKTMFTLHIDNGLHLLANPREISP

SEQ ID NO: 33184 - protein, 720 aa, Oryza sativa
MALTTFSISRGGFVGALPQEGHFAPAAAELSLHKLQSRPHKARRRSSSSISASLSTEREAAEYHSQRPPTPLLDTVNYPIHMKNLSLKELQQLADELRSDVIFHVSKTGGHLGSSLGVVELTVALHYVFNTPQDKILWDVGHQSYPHKILTGRRDKMPTMRQTNGLSGFTKRSESEYDSFGTGHSSTTISAALGMAVGRDLKGGKNNVVAVIGDGAMTAGQAYEAMNNAGYLDSDMIVILNDNKQVSLPTATLDGPAPPVGALSSALSKLQSSRPLRELREVAKGVTKQIGGSVHELAAKVDEYARGMISGSGSTLFEELGLYYIGPVDGHNIDDLITILREVKSTKTTGPVLIHVVTEKGRGYPYAERAADKYHGVAKFDPATGKQFKSPAKTLSYTNYFAEALIAEAEQDNRVVAIHAAMGGGTGLNYFLRRFPNRCFDVGIAEQHAVTFAAGLACEGLKPFCAIYSSFLQRGYDQVVHDVDLQKLPVRFAMDRAGLVGADGPTHCGAFDVTYMACLPNMVVMAPSDEAELCHMVATAAAIDDRPSCFRYPRGNGIGVPLPPNYKGVPLEVGKGRVLLEGERVALLGYGSAVQYCLAAASLVERHGLKVTVADARFCKPLDQTLIRRLASSHEVLLTVEEGSIGGFGSHVAQFMALDGLLDGKLKWRPLVLPDRYIDHGSPADQLAEAGLTPSHIAATVFNVLGQAREALAIMTVPNA

SEQ ID NO: 33185 - protein, 276 aa, Oryza sativa
MASTAAASSPFDCVLFDLDDTLYPGSAGIGLATKRNIDEFLMARCGVTAERAAALRVELFRSYGSSLAGLIALGYDVHPDEYHSYVHGRLPYDRIAADPQLAGLLRSIPQRKILFTNSDRAHMRKALQRLSVDEGCFDAVVCFETMNPHLFGEAPCASGDDRPGVILKPSPDAIVAALRIAGTNPHRTLFLDDGERNIAAGKALSLRTVLVGKRVRSKEADYALESIGSLRRAIPEIWGGVAVAVAGEQLDHGAAEKTKGMRSDLDSIIQPTSVLA

SEQ ID NO: 33186 - protein, 191 aa, Oryza sativa
MLEKKEKVLEKKAAAELERAKEFSKAKNKRAAIQSLKRKKLYEQQIEQLGNFQLRIHDQMIMLEAAKATTETVDALRTGAAAMKAMQKATNIDDVDKTMDEINEQTENMKQTQDALSAPLGASADFDEDELEAELEELEGAELESQLLEPVAAPPVHPVQVPGTRIPTRPAPQKASAEEDELAALQAEMAL

SEQ ID NO: 33187 - protein, 148 aa, Oryza sativa
MMEDDSEVGDMGIVGVYGGQIVRVANPVSRGGRSATDVRMRRSQELFFILELFQKMVQQGVRPNVVTFSAILNACSRCNSFEDAALLLEQLRLFDNFVYGVAYGLLVGSREVWSQAQSLFNQLGRMDSPTSSAFYNALTDVLWHFGQR

SEQ ID NO: 33188 - protein, 50 aa, Oryza sativa
MPRNNTWNDVSGQLGMYVFELQSFIVIPRILLGFVCVNFATPQMLTWVSL

SEQ ID NO: 33189 - protein, 110 aa, Oryza sativa
MKYKESITKSTRGWKERLFSRHSSVADLGSEVRREVNAGIASVSRMMERLETRGSNGRTSDGPAISTSEVIPSTESSNERVTENNPTTAATSSGNTSASSAPCVTTTGSN

SEQ ID NO: 33190 - protein, 389 aa, Oryza sativa
MMASLSTPPATAGVSPSPRPSLLAYKKAAGLTPSPWCGWRRAAVATAATSSNRTAAPAETIVTGNDVPLLSFAEVAERLDEFHASGTRNQNYMAMYSSIFGGITTNLSAMVIPIDDHMVHRGHGVFDTAAIMNGHLYELEQHLDRFLKSASMAKITLPFDRSTIRSILIQTVSASKCTQGSLRYWLSVGPGDFQLSSAGCANSALYAIVIESPSLPVPAGCKVITSSIPIKSQQFAVMKSVNYLPNALTKVEGEENGGFTGIWLDDEGFVAEGSNMNVGFVTQSKELLMPRFDKILSGCTAKRVLTLAKQLVADGRLSGISSRNVSVQEGKAADEMMLIGSGILVKPVVQWDDQIIGSGKEGPIAQMLFNLILEDMRSGPPSVRIPVSY

SEQ ID NO: 33191 - protein, 397 aa, Oryza sativa
MSWLARSIAATLSSSHSDEDGDNLEASSGDDHRDEQPDTPSGGGGGVKGDLSELTDSLTRGLWGVASFLAPPPAPAAEAAETATGAVGEGEDGARSPRIAGIRSDLAEIGGRVRSGISLLSNANAVAEISKIASSLLPFGPGEDDDDDDDAEAVGVTEEVVEFVRHISTHPETWLDFPLFVNDRHADDFELSDTQYGHALAIERVVPSLSYLRTELCSTNMSEACFWKIYFVLLHSKLSKQDAELLSTPQILKAREVLLQSSPTKKRLGPDDGSSQNWNVASTKGDNSGMSEAPSLEEATSVPMNVVEADKHPISVAEVEIIDKSVVEEELVVKNETKSIPSDSEKANLHITSDDDDKEVEDWLKDVAPVSSKTGNVNSAGQEEDISFSDLEDEEDD

SEQ ID NO: 33192 - protein, 257 aa, Oryza sativa
MMYHAKKFSVPFGPQSTQSNEHMSNIGAFGGSNMGSPANPAGSGKQRLRWTSDLHNRFVDAIAQLGGPDRATPKGVLTVMGVPGITIYHVKSHLQKYRLAKYIPESPAEGSKDEKKDSSDSLSNTDSAPGMQINEALKMQMEVQKRLHEQLEVQRQLQLRIEAQGKYLQMIIEEQQKLGGSLKACEEQKLPHSPPSLDDYPDSMQPSPKKPKMDNLSPDSVRDVTQSDFESHLIGPWDQEAAFRVDEFKADPGLNKS

SEQ ID NO: 33193 - protein, 155 aa, Oryza sativa; identical to SEQ ID NO: 29654

SEQ ID NO: 33194 - protein, 426 aa, Oryza sativa
MRSLGSSIQDTDDSLITPELATAGWSYAIEPVGITKENALTKPGLMEQINTTADASDFLWYSTSIVVKGDEPYLNGSQSNLLVNSLGHVLQIYINGKLAGSAKGSASSSLISLQTPVTLVPGKNKIDLLSTTVGLSNYGAFFDLVGAGVTGPVKLSGPNGALNLSSTDWTYQIGLRGEDLHLYNPSEASPEWVSDNAYPTNQPLIWYKTKFTAPAGDDPVAIDFTGMGKGEAWVNGQSIGRYWPTNLAPQSGCVNSCNYRGAYSSNKCLKKCGQPSQTLYHVPRSFLQPGSNDLVLFEQFGGDPSMISFTTRQTSSICAHVSEMHPAQIDSWISPQQTSQTQGPALRLECPREGQVISNIKFASFGTPSGTCGNYNHGECSSSQALAVVQEACVGMTNCSVPVSSNNFGDPCSGVTKSLVVEAACS

SEQ ID NO: 33195 - protein, 365 aa, Oryza sativa
MLLTRASPTFLPSTSAASPSPQQAPSSPTFGRSQYRRGGGLVSVSSPVAGQRCAARRRSVMAAAGAVPAAKLENADALIDSVETFIFDCDGVIWKGDKLIDGVPETLDMLRSKGKRLVFVTNNSTKSRKQYGKKFETLGLNVNEEEIFASSFAAAAYLQSIDFPKDKKVYVIGEDGILKELELAGFQYLGGPSDGDKKIELKPGFYMEHDKDVGAVVVGFDRYFNYYKVQYGTLCIRENPGCLFIATNRDAVTHLTDAQEWAGGGSMVGAILGSTKQEPLVVGKPSTFMMDYLAKKFGITTSQICMVGDRLDTDILFGQNGGCKTLLVLSGVTSVQMLQSPDNSIQPDFYTNQISDFLTLKAATV

SEQ ID NO: 33196 - protein, 387 aa, Oryza sativa; identical to SEQ ID NO: 28598

SEQ ID NO: 33197 - protein, 271 aa, Oryza sativa
MLIGVPGSRYLPTRSNRGIWNLDSSIRTLILNISKKYEHDSSTSVNKDLLHSIIQGSKDGPFASCTPEDFIVDNCKNIYFAGHETTSTTAAWCLMLLASHHEWQSRARVESLDICQGRPLDFDILRKLKKLTMVIQETLRLYPPASFVAREALNDMKLGGIDIPKGTNIWIPIAMAHRDPSVWGPSADKFDPDRFANGIAGACKPPHMYMPFGVGVRTCAGQNLAMVELKVVLSLLLSKFEFKLSPNYVHCPAFRLTIEPGKGVPLIFREL

SEQ ID NO: 33198 - protein, 350 aa, Oryza sativa
MEQGGEAGTGGGLGNLRALLAILQWWGFNVTVIIINKWIFQKLDFKFPLTVSCVHFICSSIGAYIAIHVLKAKPLIQVEPEDRWRRIFPMSFVFCINIVLGNVSLRYIPVSFMQTIKSFTPATTVILQWLVWSKHFEWRIWASLVPIVGGILLTSITELSFNMFGFCAAMVGCLATSTKTILAESLLHGYKFDSISTVYYMAPFATMILALPAVLLEGGGVVTWFYTHDSIASALVIIIGSGVLAFCLNFSIFYVIHSTTAVTFNVAGNLKVAVAVLVSWLIFRNPISPMNAIGCAITLVGCTFYGYVRHLIPQQQAVAPGTGSPTTSQTNSPRSRMEMLPLVGDKQEKV

SEQ ID NO: 33199 - protein, 165 aa, Oryza sativa
MIVDAKTKAECTEALKEGDELMNTGRLKQALPYYEKVMQAVDFKTELHGMAALQWSICLDSLCRSKEAMSMYSKLKNHPNSEISKKANMFMFSFQAMDFMKVNSSPLPRNTGYEKYFDKFGGQKNYYAALDEPEMGIDQIIPYMLFLVSPIFLVAFVALRKSFQL

SEQ ID NO: 33200 - protein, 321 aa, Oryza sativa
MGETIAKDVTELIGNTPLVYLNRVTDGCVGRVAAKLESMEPCSSVKDRIGYSMITDAEEKGLITPGKSVLIEPTSGNTGIGLAFMAAAKGYRLVLTMPASMSMERRIILKAFGAELILTDPLLGMKGAVQKAEELAAKTNNSFILQQFENPANPKIHYETTGPEIWKGTGGKVDGLVSGIGTGGTITGAGRYLREQNPDIKIYGVEPVESAVLSGGKPGPHKIQGIGAGFVPGVLDVDLINETVQVSSDEAIEMAKALALKEGLLVGISSGAAAAAAVRLAQRPENEGKLFVVVFPSFGERYLSSVLFQSIKKEAENMVVE

SEQ ID NO: 33201 - protein, 139 aa, Oryza sativa
MQRFDPGFGFNGGSYTIQPLYAPAVNYNTEFPQLGSHGSPVPVEQQPQSIAQHIPGPWSPAQSPNAIGYRPPDGSMPPPYSPGHAGAPIRSSVFMHTPQQFAMPSRPGVTYVHPQEPMRPFAQTHQQQPEASLRLARPR

SEQ ID NO: 33202 - protein, 541 aa, Oryza sativa
MSWKAFTKSLLFHSNKIVRRLKSFVLHAHPPPPPPHVVRRPPSSDELPAAADVTVCKVEGGLLMSPSTFPYFMLVALEAGGLFRGLLLLLLYPVLLLLGHDRATKLMVMVSFAGVRKEKDGSPSFRVGRAVMPKLFLEDVSAEVFDAAARRRRLVCVSSMPREMVEPFLKEYLAVDAVVAPELRAFRGYYLGLAESDGEVMQRLDMEEVIGMKERGGAGDGDGDGQVTVVGIAGLGNSFHQLFQNYCKEVYVASEWARRRWRPLHPRRYAKPLIFHDGRVAFRPTTSATLAMFVWLPLAVPLALLRVALIVVVLPFSLAAPIAAALGIHCRCIAASTLRAAAVLDLFVCNHRSLLDPLYVSAVAGRADLAAATYSISRLSEILAPIRTFRLTRDRAADRAAMQAHLSRSRRGGGGGGLVVCPEGTTCREPFLLRFSPLFTELGADVQPVALHSEVAMFHGTTAGGWKMLDPFFLLMNPSPAYVVHFLDPVAGGGGGPEVANEVQRRIAETLGYTCTALTRRDKYLVLAGNDGVVANNNKSN

SEQ ID NO: 33203 - protein, 403 aa, Oryza sativa
MAISSLHATTSLHSPCTTNTSFRQNQVIFFTTRSNRRGSTRYGGARTFQVSCSVDKPVVIGLAADSGCGKSTFMRRLTSVFGGAAEPPKGGNPDSNTLISDTTTVICLDDYHSLDRTGRKEKGVTALDPRANDFDLMYEQVKAIKEGKAIEKPIYNHVTGLLDPPELIQPPKIFVIEGLHPMFDERVRDLLDFSIYLDISDEVKFAWKIQRDMAERGHSLESIKASIEARKPDFDAFIDPQKQYADAVIEVLPTQLIPDDNEGKVLRVKLIMKEGVKNFNPVYLFDEGSSITWVPCGRKLTCSYPGIKFAYGPDTYFGHEVSVLEMDGQFDRLDELIYVESHLSNLSTKFYGEVTQQMLKHADFPGSNNGTGLFQTIVGLKIRDLYEQIIAERAGAPTEAAKV

SEQ ID NO: 33204 - protein, 246 aa, Oryza sativa
MASTDADEDQLLKSFLAEVSEAERDNEVLRILGCFKLNPFEHLKLSFDSSADEVKKQYRKLSLLVHPDKCKHPKAQEAFAALAKAQQLLLDPQERGYILDQVTAAKEELRAKRKKELKKDSASKIKSQVDEGKYEEQYERSEEFQKQLIIKVREILTDKEWRRRKMQMRISEEEGRLKKDEEETKEMWKKKREHEEKWEETRDQRVSSWRDFMKTGKKARKGEIKPPKLKTEDPNKSYVQRPVKRA

SEQ ID NO: 33205 - protein, 320 aa, Oryza sativa
MSKDTSSKRSLGDIILEKIREKDAEISTEGRTPVKLDSSIIELYKGVGEFLSRYTSGKIPKGFKRIPSLECWPDVLQLAEPENWSPNAVYQATRLFSSNMNAKNAVRFYEAILLPRVRNDIRKNKRLHFALYQSLKKCLYKPAAFFKGILLPLCQERNCTLREAVIIGSIISKVSIPPLHASAALMKLAEMEYCGTTSYFIKLFLDKKYALPYRVVDAVFAHFMRFIDEERVMPVIWHQSLLAFVERYKNELEKKDKEKLARLLDHQKHYLVTPEIRRELRMSCNRGEKDTIMSICSPVSVITKPIEEDRRNVPEVPMEE

SEQ ID NO: 33206 - protein, 428 aa, Oryza sativa
MSQFSGYITVNSQNGRALFYWFFEAQALPSKKPLLLWLNGGPGCSSVGYGAASELGPLMVNGNGTGLEFNKFAWNNEANLLFLESPVGVGFSYTNTSSDLESIDDRFVAEDTYNFLVNWFKRFPQYKNHDFYISGESYAGHYVPQLADVVYERNKHVETNQHINLKGFIVGNAETDDYYDYKGLVEFAWSHSVISDQLYKHVNNVCDFRLSPRSNECNHVMGYIYDQYDMIDIFNVYAPKCNTDDSSLFSTSYSTADMNAKKRLKGTRMYSGYDPCYSSHIEDYMNKMDVQKSLHANTSGLIKDRKWSICSYSIFDNYDITVFSVLPIYSKLIKAGLRIWVYSGDVDGRVPVIGSRYCVEALGLPVKSQWQPWYLNNQVAGRFVEYQGLTMATVRGAGHAVPQDKPEQALVVINSFLSGRRLPTKNNR

SEQ ID NO: 33207 - protein, 258 aa, Oryza sativa
MESPSPPFLDDLKTSAQEQIDFMLHEDDDTALVTMDEDVRSVVREGLKKLFSTLKIGLDLLTSEYEQLPEQAEQRVLCSLADIDWMANVLTKIEMMNEFVSGWSEISGYVLSVVQDKKYSSGLWLVKAKLIEVTGKAFDAVGYGSVVFPASSRVHFLRMWLPFMQTTKRLLDEKSKDDAIPQMDADLFQNIEGAIVSLVLALPSGDQADILGEWMKNAEQFRYPDLTEAFEVWCYRSKTAKRRLVGGLNGSGNPTVSL

SEQ ID NO: 33208 - protein, 639 aa, Oryza sativa
MTTPKPSPTIRRLDVASPVPADIDIANAVSPLPIADIAAELGLRPEHFDLYGKYKAKVLLSVLDELKGQQDGYYVVVGGITPTPLGEGKSTTTVGLCQALGAFLDKKVVTCLRQPSQGPTFGIKGGAAGGGYSQVIPMDEFNLHLTGDIHAITAANNLLAAAIDTRIFHEASQSDKALFNRLCPPNKEGKRRFADVMLRRLIKLGISKTDPNELTPDEVRRFARLDIDPESITWRRVMDVNDRFLRKITIGQGPDEKGMVRETGFDIAVASEIMAVLALTTSLADMRERLGRMVIGNSKAGEPITADDLGVGGALTVLMKDAIHPTLMQTLEGTPVLVHAGPFANIAHGNSSIVADKIALKLVGKGGYVVTEAGFGSDIGTEKFMDIKCRYSGLMPQCAIIVATIRALKMHGGGPDVVAGKPLDHAYVSENVALVEAGCVNLAKHIANTKSYGVNVVVAINKFASDTEAEMDVVRNASLAAGAFDAVVCTHHAHGGKGAVDLGLAVQRACGSQADPLKFLYPLESGIKEKIESIAKFYGASGVEYSEQAEKQIEMYTKQGFSNLPICMAKTQYSFSHVPSMKGAPSGFVLPIRDVRASIGAGFIYPLVGTMSTMPGLPTRPCFYEIDVDTATGKVMGLS

SEQ ID NO: 33209 - protein, 346 aa, Oryza sativa
MLHGALRIQKNFRGLCTRQEYQGLKKGAMTLQSFIRGEKARVHFDHLVKRWKASVLIQKYARRRIAATMFIDQLKYVVLLQSVMRGCLARKKYKCLKEEKDSKASHRKVIHVRNNVSQARVYHETNGDYPRQPVITELQGRVSKAEAALRDKEEENEMLKQQLDQYEKKWSEYEAKMKSMEEAWKKQLSSLQLSLVAAKKSLTAEDVASRAARTDAAPMHAHYDSEDTSTGTHTPEGTEFKYQNHNSEARVAAPNSDRRINAVNHLAKEFEDRRQVFEDDAGFLVAVKSGQVGSNMNPDDELRKLKDRFATWKKDYKSRLKETKVNLQKVGEEKSRKRWWGKKSSK

SEQ ID NO: 33210 - protein, 267 aa, Oryza sativa
MDEAPPVWVDRVGFKANITESFTRQSKFTYGLVVEEITTRDETNSICTHGSRAMPSGGLSMDGPPTTLSGTGIDRMAFLQANITRDNTEFVNGAVIGDRCIFQLDQGLGIGSKNPFFNRHQLTLTKFVNLNKQEKGAGKPLPAVLVLHGHYAGCVGDLPSYDAFTLGGPYSVRGYGMGELGASRNVLEVASELRIPVRNTYVYGFVEHGTDLGSSKDVKGNPTEFFRRVGHGSSYGLGVKLGLVRGEYIVDHNAGTGTVFFRFGEGF

SEQ ID NO: 33211 - protein, 286 aa, Oryza sativa
MPLAAVKYSRGMFIFPSAQPAPHRSFSEEVAVLNRYFGHLKSGGNAYVIGDPAKPGQKWHIYYATQHPEQPMVTLEMCMTGLDKEKASVFFKTSADGHTSCAKEMTKLSGISDIIPEMEICDFDFEPCGYSMNAIHGSAFSTIHVTPEDGFSYASYEVVGFDASTLAYGDLVKRVLRCFGPSEFSVAVTIFGGHGHAGTWAKELNADAYKCNNMVEQELPCGGLLIYQSFDATEDVPVAVGSPKSVLHCFEAENMVNPAPVKEGKLGNLLPWGEDALEENDGVFDE

SEQ ID NO: 33212 - protein, 381 aa, Oryza sativa
MGATNVSKIHPDSSIASALMDLYQSMGDALAHQYGGSAAHNTVFPERQGKWKATTQSREFLKSIRRYYSNAYTDGEKQDAINLFLGYFQPQDGKPALWELDSDYYLHVTTYGDDLISDSYHMTSSTGNSAPGESGAALSPGATLSPVPACKEDFSRMKLTSFDKLIERTCSSIRNVRLHCDADLKQSGTVGTSGMAPDAVEIQLRTPNWLFGQRKHAETVPTVKVIPVENANEGNGEDTNVSLCGELNWLSSADTCEEDNFRRYLAFTTADVENGWYGGTLIYDQDENSGAYKHYSEFCQGSVMDPLEHDPEKEMHYAEALSVDIDITDDATVEAEMQAALDDYQIIGSDLSIIPSCGSLAEDPSQLTRWIIGDDKLQVAQ

SEQ ID NO: 33213 - protein, 373 aa, Oryza sativa
MLSAGENFIHPGGELLELQMDDDCSAGVFLGNDHDSSQSNSPQKKRRKSDNGDDGEACKRCSCKKSKCLKLYCECFAAGVYCSEPCSCQGCLNKPIHEEIVLSTRKQIEFRNPLAFAPKVIRMSDAGQDITGEDPNNTPASARHKRGCNCKKSSCLKKYCECYQGGVGCSSNCRCEGCKNTFGKRDAAVSTEAEEMKQGGEEAENCGKEKENDLQKANAQSEDHPFLELVPITPPFDVSSSLLKPPNFSSAKPPRPTKARSNSSRSSSKAPGAVHSQKFSKIANSGLNEEMPDILRDDASPGNCVKTSSPNGKRVSPPHNALSVSPSRKGGRKLILKSIPSFPSLIGDASSGSSMNSSESAFNTASPLALGPS

SEQ ID NO: 33214 - protein, 32 aa, Oryza sativa
MMQVNFVCACSIHSEIVVKACEIPLLSEMLTY

SEQ ID NO: 33215 - protein, 186 aa, Oryza sativa
MAALVISKQRSHQQQSSDRRRKPSSHFASPQSMRGFNAVNCRAFHSSVSIGILPSPPPPPARTYSSPEPKTPKSQPHHGKKRSRAISISPSTSPPSRPELWAGPAFSNSPPPSSLPIPKFSLHQKRSVSLELPPAGRSDDVVVPLHAKSAPSSPTAGSGVSFFSDSDTAIATENLRRILHLKIADH

SEQ ID NO: 33216 - protein, 431 aa, Oryza sativa
MADDKSDTVQVSEDTAHQISIDPWYQVGFILTTGVNSAYVLGYSASIMVPLGWIGGTCGLILAAAISMYANALLAHLHEVGGKRHIRYRDLAGHIYGRKMYSLTWALQYVNLFMINTGLIILAGQALKAIYVLFRDDGVLKLPYCIALSGFVCALFAFGIPYLSALRIWLGLSTVFSLIYIMIAFVMSLRDGITTPAKDYTIPGSHSDRIFTTIGAVANLVFAYNTGMLPEIQATIRPPVVKNMEKALWFQFTVGSLPLYAVTFMGYWAYGSSTSSYLLNSVKGPIWIKTVANLSAFLQTVIALHIFASPMYEFLDTRFGSGHGGPFAIHNIMFRVGVRGGYLTVNTLVAAMLPFLGDFMSLTGALSTFPLTFVLANHMYLTVKQNKMSIFRKCWHWLNVVGFSCLSVAAAVAAVRLITVDYSTYHLFADM

SEQ ID NO: 33217 - protein, 357 aa, Oryza sativa
MTVVVVADDAAAAAAAAQQQEELPPGHGQTVCVTGAAGYIASWLVKLLLERGYTVKGTVRNPDDPKNAHLKALDGADERLVLCKADLLDYDSIRAAVDGCHGVFHTASPVTDDPEQMVEPAVRGTEYVIKAAAEAGTVRRVVFTSSIGAVTMDPNRGPDVVVDESCWSDLEFCKKTKNWYCYGKAVAEQEACKAAEERGVDLVVVSPVLVVGPLLQPTVNASAVHILKYLDGSAKKYANAVQAYVDVRDVAAAHVRVFEAPEASGRHLCAERVLHREDVVHILGKLFPEYPVPTRCSDEVNPRKQPYKMSNKKLQDLGLHFIPVSDSLYETVKSLQEKGHLPVLSKEIPEELNGVPA

SEQ ID NO: 33218 - protein, 384 aa, Oryza sativa
MAAPVRSVLPVVLLGCGGVGRHLLRHILSCRPLHANQGVAIRVLGVADSSSLLVADDLHSNGFDDALLADLCAAKSAGSPLSSLLSRGQCQLFNNPEARRKVIDTASVLGKTTGLVLVDCSATYDTVGMLKDAVDRGCCVVLANKKPLTCAYEDFEKLVSNFRRMRFESTVGAGLPVIASVTRIIASGDPVSRIVGSLSGTLGYVMSELEDGKRFSEVVKTAKSLGYTEPDPRDDLSGMDVARKALILARLLGQRISMENINVEGLYPSEFGPDAMSTKDFLESGLVQLDKSIEERVKAASLKGNVLRYVCKIESTGCQVGLEELPKNSALGRLRGSDNVVEIYSRCYESAPLVIQGAGAGNDTTAAGVLADILDLQDLFHKTA

SEQ ID NO: 33219 - protein, 294 aa, Oryza sativa
MHARGWRSIYCMPKRPAFKGSAPINLSDRLNQVLRWALGSVEILFSRHCPIWYGYGGRLKFLERFAYINTTIYPLTSIPLLIYCVLPAICLLTGKFIIPEISNFASIWFISLFISIFATGILEMRWSGVGIDEWWRNEQFWVIGGISAHLFAVFQGLLKVLAGIDTNFTVTSKASDEDGDFAELYMFKWTTLLIPPTTILIINLVGVVAGISYAINSGYQSWGPLFGKLFFAFWVIVHLYPFLKGLMGRQNRTPTIVVVWAILLASIFSLLWVRIDPFTTRVTGPDTQTCGINC

SEQ ID NO: 33220 - protein, 96 aa, Oryza sativa
MVASVSLAISYPTIAAAPHMFLNGYKNVLAVAVETEYSYPHADKIKEYLKDPSKFAVAAPVAADSGAAAPSAAKEEEKKEEPEEESDGDLGMSLFD

SEQ ID NO: 33221 - protein, 309 aa, Oryza sativa
MSINQKAKTDNDRLLRGPNVAPHKMSGSTERNKLTTKQTGVRRPSSASSQRPSVGERHRIARESIKKPADVSTPRRPSTAERHPVTTERARKQADVDTPRRPSTSERRAVNKGSADMTTTHRPSTGERRSVTRESVLKMDVRTPSKTRPTMTQLKGATTTVGIVKKAGTPNASKSINMGTKSNIRELEGPSKVGRHSVGSKITDLQIAGKQKSSSVHLPPRKLLSSSIGEPALQTFTRPKKKDVAAQSRASTSRRAMTLHTGNVKGRSSNPPPPPPPPRRPSRTTNRPNGSNSSTVGQKPKVSSAPKWH

SEQ ID NO: 33222 - protein, 163 aa, Oryza sativa
MVSLRLIAAFAPAPPPPPPPRPRRAPPSAARLASNGIAFVTVAAVAAASPPAIAALAAEPANALSLPTWAVHVSSVAEWVTAMALVWDYGERTGLKGWKGLSWGMVPLLGGAMCACTWHFFYNSESLEVLVALQGALTVIGNITMCIAAFRIFKASQESSKSS

SEQ ID NO: 33223 - protein, 61 aa, Oryza sativa
MMEFLGIPDRRCVQYVKHPVPLRQRKLQFNWQAPQVPAEIPHMCCAHRLSCAALSFRRRFA

SEQ ID NO: 33224 - protein, 430 aa, Oryza sativa
MSNEMYNTIARVTDGIYEGIAIGGDVFPGSTLSDHILRFNNIPQVKMMVVLGELGGKDEYSLVEALKQGKVQKPVVAWVSGTCARLFKSEVQFGHAGAKSGGELESAQAKNQALKDAGAVVPTSYEALETAIKETFEKLVEDGKISPVTEITPPPIPEDLKTAIKSGKVRAPTHIISTISDDRGEEPCYAGVPMSTIIEQGYGVGDVISLLWFKRSLPRYCTQFIEMCIMLCADHGPCVSGAHNSIVTARAGKDLVSSLVSGLLTIGPRFGGAIDDAARYFKDAYDRNLTPYEFVEGMKKKGIRVPGIGHRIKSRDNRDKRVQLLQKYAHTHFPSVKYMEYAVQVETYTLSKANNLVLNVDGAIGSLFLDLLSGSGMFSKQEIDEIVEIGYLNGLFVLARSIGLIGHTFDQKRLKQPLYRHPWEDVLYTK

SEQ ID NO: 33225 - protein, 299 aa, Oryza sativa
MASSSKRRGGAGGGGAEKKDLFHVVHKVPAGDSPYVRAKHLQLVDKDPETAIVWFWKAINSRDKVDSALKDMAVVMKQQDRAKEAIEAIRSFRHLCSRQAQESLDNLLIDLYKKCGKVDEQIDLLKQKLKMIYLGEAFNGKATKTARSHGKKFQVSIQQETSRILGNLGWAYMQQSNYSAAELVYRKAQSIEPDANRACNLGLCLIKQSRHDEARQVLHDVVLRRISGSEDDKVVARAKQLLHELEPVTHVTSPNNAGLSVSEEIMERLDLVLNEWTPFRSRRLPVFEEIATLRDQIAC

SEQ ID NO: 33226 - protein, 330 aa, Oryza sativa
MAKHGVASVLTLALVLGVAAIPTVVQSIGVCYGVIGNNLPSPSDVVQLYKSNGIDSMRIYFPRSDILQALSGSSIALTMDVGNDQLGSLASDPSAAAAFVQNNIQAFPGVNFRYITVGNEVSGGDTQNILPAMQNMNSALSAAGLGNIKVSTSVSQGVTAGFPPSAGTFSASHMGPIAQYLASTGAPLLANVYPYFAYVGNQAQIDINYALFTSPGTVVQDGGNAYQNLFDAIVDTFYSALESAGAGSVPIVVSESGWPSAGGTAASAGNAQTYNQNLINHVGQGTPKRPGSIETYIFAMFNENQKGGDETERHFGLFNPDQSPAYSINF

SEQ ID NO: 33227 - protein, 260 aa, Oryza sativa
MLGFAPAPGRPLFVLFGSSIVQFSFSNGGWGAALADIYARKADILLRGYIGWNSRRALQVIDKIFPKDSPVQPSLVIVYFGGNDSVAAHSSGLGPHVPLEEYIDNMRKIADHLKSLSEKTRVIFLSCPPLNEETLRKSTSTVLSEIVRTNETCRLYSEACVSLCKEMDLKVVDLWNAMQKRDDWATACFTDGLHLSEEGSKIVVEEILRILKEAEWDPCLHWKAMPTEFGEDSPYDLVSSSGQSTVNPSDWTFHRTIQWD

SEQ ID NO: 33228 - protein, 397 aa, Oryza sativa; identical to SEQ ID NO: 30550

SEQ ID NO: 33229 - protein, 209 aa, Oryza sativa
MAPAALAAPIASISPSSAGRVTAAAAGLRSARMASSPVAQPIGEAVVLRPNQMFRSVLRQRRRLVVRSSSSDETNSTTEEKTPFGYTRKDVLLIGVGVTLLGYGLKYGLELVGVDPLQAGNAVQLIIVLGMTVGWISTYMFRVANKDMTYAQQLRDYEKQVMEERLESLTEAELQVLLEQVEEEKQRLTPVRDQGVTFTRKTEDQANAS

SEQ ID NO: 33230 - protein, 85 aa, Oryza sativa
MLEVVDSGKKSLYSAKVWVKPWLDFKAVVEFRHVGDSQSQSATAADDNAGQDTADPTVASRNDLHNTENNKVSVVLSTFSQTYSV

SEQ ID NO: 33231 - protein, 320 aa, Oryza sativa
MSAPAAVEQRLQALRQKLGRKQHFEEAVADLAAAVRDHHAAASPALRDLMYSTVCRVATVLQTRYTAPGFWRAGLNLFLGTEKLVTNPSEKEQLKTFILRAREHLDEKENEESMPNNRETDTRFLFEGHLTVGPEPPPPAWLVAQNLARELSILAEPSGDQGANNNGESRAEEMAPAAAIMNFLNTMTVDGDLEAALEESLQNVMANPKVPPASKEVVANLPVVTVTEEIIARLGKETQCAVCRESLLVDDKMQELPCKHLFHPPCLKPWLDENNSCPICRHELRTDDHVYESRKEREREEEEDRKGAANAVRGGEFMYV

SEQ ID NO: 33232 - protein, 152 aa, Oryza sativa
MATTTVTTPILCNLSAKPRDTLRLPTTRSPNDGTRRTTLHLSSSRARGDLIRAAAAVYTVKLIGPEGQESVIKVPEDTYILDAAEEAGVDLPYSCRAGACSTCAGKVVEGGVDQSDQSFLDDAQVGAGYVLTCVAYPTANSVIQTHKEADLY

SEQ ID NO: 33233 - protein, 421 aa, Oryza sativa
MRCHCNFGANSELSEHEEKQQVSDVETSSLQKDLDEVKSEKEALEAVVLVNKDEIDRLKESMVSAAKQFEVELAHRDTEIDKCKQELEVLSEKYLHDISALEAEIGKLQGVIKTFEDDFAKISQEKLMLESRVEELEQSVNSSNYSVSEMVNLQELMKDTQAELEKVSQEKEVLRERDLEFEQLLGDFENSGMEVAKLPETIKNLGAQIEGTLQEKSVLQDRIKELEQAVHDSLQNHSLEKSSLSAELSKLSEANASLEAKLASVEAELKQVYDEKANESLNSEKEISRLNQELANVKTDLELLLSEKSLVDNKVTTLLTDITTRDEKMKQMDDQLNQLQLEHSKLMAQADLARKSLSELHARVCELEKEVEMQKLVISESAEGKREAIRQLCFSLEHYRSGYQELRQLLHDQKRPLVMAT

SEQ ID NO: 33234 - protein, 115 aa, Oryza sativa
MKTWKNLIQQDERCGLLIQNMFRGCVNQMDELCLSAPDLQMAWDPGGLCLLKFLAISSLGQITFQAVKFSLQDSSLFHMRSARICLSCSFEMQVFCWHAENKLDINEAFGTMQEY

SEQ ID NO: 33235 - protein, 474 aa, Oryza sativa
MPTVSVKWQKETFPGIEIDTSQPPVVFKTQLYTLTGVPPERQKIMVKGGILKDDADWSTLGVKDGQKLMMIGTADEIVKAPEKGPVFVEDLPEEEQVVALGHSAGLYNLGNTCYMNSTLQCLHSVPELKSALLSYSDNVRGNGVDQASHNLTVATRNTFGELDQSVRPVAPLLFLQTLRKKYPQFAQQQNNVYMQQDAEECWTQLVYTLSQTLTSETSEPPAGQMKELFGIDLVSRVHCAESGEESLERESVYSLKCHISHDVNHLHEGLKHGLKSELEKASPSLGRTALYTRESRINELPRYLTVQFVRFFWKRESNQKAKILRKVDYPLELDVYDFCSDELKQKLQAPRQMLRDAENAKFGLKAQGKASSSKENEGSSSNAGESSSMDIDKADSSVPKKHLTGIYDLIAVLTHKGRSADSGHYVGWVKHDDGKWIEFDDDNPSIRKEEEILKLSGGGDWHMAYICLYKARVI

SEQ ID NO: 33236 - protein, 294 aa, Oryza sativa
MATSLDMSLDDMIKNNRNSRGRGRGRSQGGGRGRGDGQRFSYGSGRGRGAGTFRGRGVGVPSRRPLGVSTRSSSYAIAKSFNKTKDIVWRQDLFEDSMVAAGLSVTESSTKLYISNLHYGVTKEDIQELFSEMGHLKHCAVHYDNNRRPTGSAEVIFTRRSEAVAALKRYNNVRLDGKPMKIEVIGADLGMAAPSAPRVSVVPGARGRGQREVVMMPGGSGFGRGAAGSSNFIPGWKRNNFAQRGGQGRGRGRGRNNFGRGRGRGYVRKGPVEKSAEQLDKELDSYHSGAMNVD

SEQ ID NO: 33237 - protein, 501 aa, Oryza sativa
MATGDPNPTTTPPSQQLQGADPQPQSQQDAAANATPAAVAVREDYVQNAVKFLSHPKVRGSPVLYRRSFLEKKGLTKDEIDEAFRRVPDPQPSATATAAASPSPSQHPNNQNHSSTVVQPYAPRQPATPAGSIIVATQPKFSWYRAFVAAGLLLGFGVSAAVFVKKLLLPRLKSWIRKVVAEGDENEGRQIKSKIDEETAEAVKASASAVSAIAKTNQELLASKDEEKKILVTLTQALDSQAKELKSLCESLNHSRDSINITREDRFSQYRALEEHAPSAARNGPVNTPWRASQQTNMYGVPNSDFGSGRPSFASTHNEATPGSFSRSYVETSAAHRGDNRSSGSKPWEMQQYSQQRIGYGSNSQLSDDGCPETQDNYGGGPSYSYHQNQNQNGKAPAPDIQAEEARPSVYISGAEERSPPPPPQRRWVPPQPPGVVMPEAVAAIRQPKSLAKQPSSEASQEAAGETHANGASSSSPLPEEALVNGSDAGRSEIEEQAEAI

SEQ ID NO: 33238 - protein, 327 aa, Oryza sativa
MARLLLSGVAPLPLLPCRRRAIAFALPLGNVRLRLRVAAPTSRVATVEEDDNENNAPPPPCEDFDPGAAPPFGLADVRAAIPKHCWVKDPWRSMGYVLRDVVVVFALAAAAARLHSCLAWPLYWAAQGTMFWALFVLGHDCGHGSFSNNSRLNSVMGHILHSSILVPYHGWRISHRTHHQNHGHVDKDESWHPLPERLYRSLNRATRMLRFSIPFPMLAYPFYLWSRSPGKSGSHFHPSSDLFQPNERNDVLTSTACWVAMAALLAGLTFLMGPLLMLNLYFVPYWIFVMWLDFVTYLHHHGHNDKLPWYRGKIDDMYRNGAICGED

SEQ ID NO: 33239 - protein, 354 aa, Oryza sativa
MLQQHSSLKTIKKKLIRKALDMIRKLAEEDPDEYSNKDKTDEEKSAMEEKKGQYAKFWNEFGKSVKLGIIEDATNRNRLAKLLRFESTKSEGKLASLDEYISRMKPGQKDIFYITGSSKEQLEKSPFLERLTKKNYEVIYFTDPVDEYLMQYLMDYEDKKFQNVSKEGLKLGKDSKLKDLKESFKELTDWWKKALDTESVDSVKISNRLSDTPCVVVTSKYGWSANMEKIMQSQTLSDASKQAYMRGKRVLEINPRHPIIKELRDKVAQDSESESLKQTAKLVYQTALMESGFNLPDPKDFASSIYRSVQKSLDLSPDAAVEEEEEVEEAEVEEKESSNIKEEAEPSSYDKDEL

SEQ ID NO: 33240 - protein, 366 aa, Oryza sativa; identical to SEQ ID NO: 28611

SEQ ID NO: 33241 - protein, 163 aa, Oryza sativa
MRQAVGLCKAHQLRPAALLSPRPLLRRASPCLPAAGAGGELRRASAASRLVVRRRCQEEEQQQQQEEEERSNGGGGDGEQEQRTFLSLEEAGLVEMSGLSTHERFLCRLTISSLNLLRVISEQEGVPIEELNAGLVCDWFVKDKLKREQNVGSAVLQWDDPGF

SEQ ID NO: 33242 - protein, 301 aa, Oryza sativa
MPPQGYPPDAQLQEFQYFVVIDFEATCDKENNPHPQEIIEFPSVLVNSATGQLGASFQTYVRPAYNQLLTDFCKELTGIQQIQVDRGVPLSEALLMHDKWLEEKGIKHKNFAVVTWSNWDCRVMLESECRLKRIRKPPYFNRWINLKVPFQEVFGGVRCNLKEAVQLSGLTWEGRAHCGLDDARNTARLLALLMHRGFKFSITNSLVWQSAPQSITCQSSPAHSPYPNQSHHKPMEVMGSPVQVNPYAGITVKKPMYCHCGVLSQIKVTYRPGPMHGRYFYGCGNWTSTRGANCDYWVWLS

SEQ ID NO: 33243 - protein, 271 aa, Oryza sativa
MDKQEAVDISSTLSNEEDDRVTHRAPLSLGFDANDDYVEHKRRKMDVYAATSTSTNAIDIGAVASRAIREPRVVVQTTSEVDILDDGYRWRKYGQKVVKGNPNPRSYYKCTHPGCSVRKHVERSSHDLKSVITTYEGKHNHEVPAARNSGHPSSGSAAAPQATNGLLHRRPEPAQGGGGGSLAQFGYGSAGHRPAEQFGAAAAGFSFGMLPRSIATPAPSPAIAVPAMQGYPGLVLPRGEMKVNLLPQSGNAGAAASQQLMGRLPKQHPQM

SEQ ID NO: 33244 - protein, 159 aa, Oryza sativa
MEDTGMDYFKEMVSGSFFQPFSERFDSTVYIMHDLLHDLAESLSREDCFRLEDDKVREIPCTVRHLSVRVESIIQHKPSVCKLQHLRTLICIDPLVPDLPSSLQRISIVDCPNISSLPDLPSSLQHIYIRDCPLLKESCRVPDGESWPKIAHIRWKRID

SEQ ID NO: 33245 - protein, 533 aa, Oryza sativa
MAVAGAMVMSGGVLLLLLAFTCAAYNDAGELPPISRRSFPKGFIFGTSSSSYQFEGAAAKGGRGPSIWDTFTHQYPDKITDKSNGDGACNSYHLYKEDVRIMKEMGMDAYRFSISWSRILPNGSLSGGVNREGINYYNNLINELLSKEVQPFATLFHFDTPQALEDKYKGFLSPNIINDYKDYAEICFKEFGDRVKHWITFNEPWNFCSMGYASGTMAPGRCSSWEKGKCRVGDSGREPYTACHHQLLAHAETVRLYKEKYQFTEEAIRQSPFIRDNNLNRRSAKALQKGRIGIILNSEWFVPFSQSKSSNDAARRVLDFMLGWFMDPLIRGDYPLSMRELVGNRLPEFSKEQSEMVKGAFDFIGLNYYASSYADNDPPSYGHNNSYNTDSHAKITGSRNGIPIGPQAASFWFYIYPEGLRELLLHIKENYGNPTIYITENGVDEINNKTMRLKEALKDDIRIEYYHKHLLALLSAMRDGANVKGYFAWSLLDNFEWSEGYTVRFGINFVDYDNGMKRYPKNSARWFKKFLRK

SEQ ID NO: 33246 - protein, 346 aa, Oryza sativa
MITGTSQADCAVLIIDSTTGGFEAGISKDGQTREHALLAFTLGVKQMICCCNKMDASTPKYSKARYDEIVKEVSSYLKKVGYNPDKIPFVPISGFEGDNMIERSTNLDWYKGPTLLEALDQINEPKRPSDKPLRLPLQDVYKIGGIGTVPVGRVETGVLKPGMVVTFGPSGLTTEVKSVEMHHEALQEALPGDNVGFNVKNVAVKDLKRGYVASNSKDDPAKEAASFTSQVIIMNHPGQIGNGYAPVLDCHTSHIAVKFAELVTKIDRRSGKELEKEPKFLKNGDAGMVKMIPTKPMVVETFSEYPPLGRFAVRDMRQTVAVGVIKNVEKKDPTGAKVTKAAAKKK

SEQ ID NO: 33247 - protein, 362 aa, Oryza sativa
MAAVTAAAVSTSAAAAVTKASPSPAHCFLPCPPRTRAAHQRGLLLRAQVSTTDAAAVAAAPAKKEKISKKHDEGVVTNKYRPKEPYVGKCLLNTKITADDAPGETWHMVFSTEGEIPYREGQSIGVIADGVDKNGKPHKLRLYSIASSALGDFGDSKTVSLCVKRLVYTNDQGEIVKGVCSNFLCDLKPGSDVKITGPVGKEMLMPKDPNANIIMLATGTGIAPFRSFLWKMFFEKYDDYKFNGLAWLFLGVPTSSSLLYKEEFDKMKAKAPENFRVDYAVSREQTNAQGDKMYIQTRMAEYKEELWELLKKDHTHVYMCGLKGMEKGIDDIMVSLAAKDGIDWADYKKQLKKGEQWNVEVY

SEQ ID NO: 33248 - protein, 308 aa, Oryza sativa
MIGLTEAVAIGRTFAALKDYQLDGNKEMVALGTMNIAGSMTSCYIATGSFSRSAVNFMAGCQTPVSNIIMSAVVLLTLLVITPLFKYTPNAILGSIIISAVIGLVDYEAVILIWKVDKMDFISCMGAFFGVVFASVEIGLLIAVSISFAKILLQVTRPRTVLLGNLPGTTIYRNTDQYPEARHIPGVVIVRVDSAIYFSNSNYVRERTLRWLTEEEEKAKAEGQSKINFLIIEMSPVIDIDTSGIHALEDLYKNLKKRDIQLILANPGSIVMEKLLSSKLNEHIGSNNIFLTVADAVRFCTRKSMQEP

SEQ ID NO: 33249 - protein, 362 aa, Oryza sativa
MQPKSGGKLRPRLNTGERPIANKYREGKMKRTLKRESKSAFIFFTAVYCLGILTYGVAVPSGLFIPVILAGATYGRIVGTLLGSISDLDPGLFALLGAASFLGGTMRMTVSVCVILLELTNDLAMLPLVMLVLLISKTIADNFNKGVYDQIVVMKGLPYMEAHAEPYMRHLVAGDVVSGPLITFSGVEKVGNIVHALRFTGHNGFPVVDEPPLTEAPELVGLVTRSHLLVLLNGKMFMKDQLKTSGSFVLQRFGAFDFAKPGSGKGLKIQDLDFTDEEMEMYVDLHPVTNTSPYTVVETMSLAKAAILFRALGLRHLLVVPKTPDRPPIVGILTRHDFVEEHIHGLFPNLNPHKFHSTSMGG

SEQ ID NO: 33250 - protein, 291 aa, Oryza sativa
MASGSEAEKSPEVVLEWPKKDKKRLLHAVYRVGDLDRTIKCYTECFGMKLLRKRDVPEEKYTNAFLGFGPEDTNCALELTYNYGVDKYDIGAGFGHFAIATEDVYKLAEKIKSSCCCKITREPGPVKGGSTVIAFAQDPDGYTFELIQRGPTPEPLCQVMLRVGDLDRSIKFYEKALGMKLLRKKDVPDYKYTIAMLGYADEDKTTVIELTYNYGVTEYTKGNAYAQVAIGTEDVYKSAEAVELVTKELGGKILRQPGPLPGLNTKIASFLDPDGWKVVLVDNADFLKELQ

SEQ ID NO: 33251 - protein, 380 aa, Oryza sativa
MKALTERIYSVDSTWRIGGFVIDDPASELDPIRDVFSCPILFSLWHIRRTWLKNIIKKCSNSEVQREMFMQLGKVMYSIWSEKNPMDALEQLFQDFVDQTTFIQYFKSFWVPKLEMWIDTIRSLPLASQESSGTIEGYHLKLKVKAYDDSQLDALQRVDWLVHKLTTELHSSYWLNLYADESGSFPEVKAEYIASTSWHRALQIPDDAVIFDDKEPFSAKVTSQKDTSQMWTVWNPGSEFSLCDCSWSMQGNLCKHIIKVNMMCGPRKDFQPSLSFQSFQRVLLDLWQKPMDDSFSLDLSVAWVMQMQERIQKVTELATADGIAEVSNRLPIQWTNKKGRKVAAKRTSPLRVLPHSNGIVQKDFTPKKNRKRKRLSTVSG

SEQ ID NO: 33252 - protein, 325 aa, Oryza sativa
MEVVVARQPKAKKQINLFYCSECEELALKVAASSDTIHLQSINWRSFDDGFPNLFINNAHDIRGQHVAFLASFSSPSVIFEQISVIFALPKLFIASFTLVLPFFPTGSFERVEEEGDVATAFTLARILSMIPKSRGGPTSVVIYDIHALQERFYFGDDVLPCFETGIPLLLQRLRQLPDADNITIAFPDDGAWKRFHKLLLNFPMVVCAKVREGDKRIVRIKEGNPEGRHVVIVDDLVQSGGTLRECQKVLAAHGAAKVSAYVTHAVFPKQSYERFTHTNSAGSADKFAYFWITDSCPQTVKAINQQPPFEVLSLAGSIADALQI

SEQ ID NO: 33253 - protein, 291 aa, Oryza sativa
MRDFPSCFGESGVQIADASSSSSSAGKGAAQNLVTCLYQAQFSGRPCVISVTWSKSLMGQGLSIGVDDLSNQCLCKADIKPWLFSKKKGSKRLDVEDGKIEIFWDLSGAKFGAGPEPMEGFYVAVVFDLELILLLGDMKKDAYRKTGANRPMLNAAFVARREHIYGKKIYTAKAQFCENGQFHDVVIECDTVSLKDPCLEIRVDKKPVMQVKRLAWKFRGNQTILVDGLPVEVFWDVHSWLFGLTTSNAVFMFQTCQAPEKSMPWSYSQVFRESQLQGLGFSLILYAWKLE

SEQ ID NO: 33254 - protein, 352 aa, Oryza sativa
MDSVWHPQCFRCFACNKPISEYEFAMHEDQPYHKSCYKDFFHPKCDVCKNFIPTNRNGLIEYRAHPFWMQKYCPSHEDDGTPRCCSCERMEPMDIKYITLDDGRKLCLECLNSSIMDTPECQQLYMDIQEFFEGLNMKVEQQVPILLVERQALNEALETEKNGHHLPETRGLCLSEEQIVRTILRRPIIGPGNRIIDMITAPYKLERRCEVTAILILYGLPRLQTGSILAHEMMHAYLRLKGFRSLSPQVEEGICQVLSHMWLESEIIFGSSIDISATSVASSSSSSSTPTTSKKGAKTEFEKKLGAFIKHQIETDSSEAYGDGFRAANRAVESYGLRSTLNHMKMTGSFPY

SEQ ID NO: 33255 - protein, 231 aa, Oryza sativa
MQEGRAKQLEEEIKELRTRHKKELQDAAEHRELLEKDLEREKAARAELEKTSSRDAPKIPLPDQTRNAPLRKLSSSGSINSLEESHFLQASLDLSDNASLERRMSAESNTSYYLRSMTPSAFESALRQKDGELASYTSRLASLESIRNSLAEELVKMTEQCEKLRTEASALPGLRAELEALKQRHFQALELMGERDEELEELRNDIVDLKEMYREQVDLLVSQLQSLGARV

SEQ ID NO: 33256 - protein, 65 aa, Oryza sativa
MLIGTQLTVQHRQYRTSRSWMTGNHLLIRIFRRNQLLPCRYQKRVRQNHRIKEPTPSKEYRLYST

SEQ ID NO: 33257 - protein, 357 aa, Oryza sativa
MGEEIKNGEEGPDMAAPGEEEQEQGRKGIPSLLSSREENIASNITQLIGWTPLVEMKNIAKNEGVQARLVGKMEAYQPLCSVKDRSALRMIEDAEEKGLITPGVTTLIEPTSGNLGIGLVLVAVQKGYRFIAVMPAKYSLDKQMLLRFLGAELILTDPAIGFNGMMDKVEELMKSIPNSHCLNQVTNPANPEAHFMWTGPEIWKDTAGKVDVFVASVGSGGTLTGVGRYLKMKNPSINIVCVEPSESPVISGGSPGPHKIQGTGAGFIPEILDKSVIDEVVTVNTEESMAMARRLAKEEGLLVGISSGANVAACIKIADREENKGKMIVTMFPSGGERYMNSDLFAPVREECDNMTF

SEQ ID NO: 33258 - protein, 260 aa, Oryza sativa
MQGMSPELVKTASDMIGTMKPEELQKMFEAASSLHGTSSSPPNLGPNMPEMSPEMFKMASDMIGNMSPDELQNMLNFASNMGGPSASPLRPENKLQSSSRATTSSTSQRSVDNSQPSSSQNVMENPHEILSNQRMGESSSPGAPSTADMQETMRNAMKDPAMRKMYASMMKNISPEMMSSMSEQFGMKMTKEDAAKAQEALSSLSPEALDRMMKWMDRAQQGVEAAKKTKNWLLGRKGLVLAIVMLILAFILRQLGFIGG

SEQ ID NO: 33259 - protein, 80 aa, Oryza sativa
MLSQKLNMSYDEAELWIMNLVRNSKLDAKIDSVSGTLIMTTNHVNIHEQVIESLKNLNMRTFLLAKNIVEPAQAAQQAAR

SEQ ID NO: 33260 - protein, 260 aa, Oryza sativa
MLVVDPMKRITIREIREHQWFTVGLPRYLAVPPPDTAQQVKKLDDETLNDVINMGFDKNQLIESLHKRLQNEATVAYYLLLDNRLRTTSGYLGAEFHESMESSLAQVTPAETPNSATDHRQHGHMESPGFGLRHHFAADRKWALGLQSRAHPREIITEVLKALQELNVCWKKIGHYNMKCRWSPSFPSHESMMHNNHGFGAESAIIETDDSEKSTHTVKFEIQLYKTRDEKYLLDLQRVSGPQLLFLDLCSAFLTQLRVL

SEQ ID NO: 33261 - protein, 250 aa, Oryza sativa
MALPQYGIYTDVRVCYDCFNKSSSRGGVGNAGSPGSVSSAADSFSGLNLGEDDASSPMKNSAFHSAPAVIECKCGMPLCICEAPKPEPVPVKSISTTSSSAQSNPRPKKSSTNQQSAESSVKKASATSSSNSSSFLNLGLMSNDTNDKGPSEYDVTGEGLREAIKSGDIKAVKKLLSQGVDSNYCDKQGFALLHLAALFNQTEIALILMDNGANIQSKNGQGETPLDCAPAMLQYKMRQRMEELAASQRP

SEQ ID NO: 33262 - protein, 230 aa, Oryza sativa
MPKNILKKFICIADLRTQIAGFLYGLSPQDNPQVKEIRCIAIPPQHGTHQMVTLPANLPEHEFLNDLEPLGWMHTQPNEAPQLSPQDLTSHAKILENNKQWDGEKCIILTCSFTPGSCSLTAYKLTPSGYEWGRSNKDTGSNPHGYLPTHYEKVQMLLSDRFLGFYMVPDNTPWNFNFMGVKHDPLMKYNMKLGTPRDFYHEDHRPTHFLEFSNIDEGEVAEGDREDTFT

SEQ ID NO: 33263 - protein, 77 aa, Oryza sativa
MGGGNGQKSKMARERNMEKNKGAKGSQLEANKKAMNIQCKICMQTFICTTSETKCKEHAEAKHPKSDLTACFPHLKK

SEQ ID NO: 33264 - protein, 441 aa, Oryza sativa
MVPGMVPVCVSSIKVQRPGIEPIIYRDLFLFRTLASFLNGISLQKLGCNAELIVDEFGEKLLEELDYTLEATNIEDFLENFKDDPTVKIPQVYKQYSGSRVLVMEWIDGIRCTDPQAIKEAGIDVEGFLTVGVSAALRQLLEFGLFHGDPHPGNIFAMRDGRIAYVDFGNVAVLSQQNKQILIDAVVHAVNEDYAEMANDFTRLGFLASGTDVSPIVPALEAIWQNSAGKGLADFNFRSVTGKFNQLVYNYPIRIPERFSLVIRSLLTQEGICFTLQPDFKFLEVAYPYVAKRLLTDPNPALRERLIQVLFKDGLFQWKRLENLIVLAKENVSKMSSNPALKKNSSQIERNRQMEKKLDLTDTIKDGARLFLIDAGIRRQLIMAFTEDSKLHVEELVDVYRLVEDQIDIPSVALEVIQDLPSVARDFMLSWSDSILSDRQY

SEQ ID NO: 33265 - protein, 152 aa, Oryza sativa
MDGLTKTDDLVFVLAATNLPWELDAAMLRRLEKRILVPLPEQEARHAMFEELLPSVPGTMNIPYDVLVEKTEGYSGSDIRLVCKEAAMQPLRRLMPVLEGRQEEVPEDELPEVGPVTTEDIELALRNTRPSAHLHVHRYEKFNQDYGSHVLS

SEQ ID NO: 33266 - protein, 145 aa, Oryza sativa
MELPPGNTITKVTKLPALQDDGPATDSYGRFSNSDRGFRNRRSRGGGSRGGRGGWDSDGEDRFRRGGRSFRSDNDSWSDDDFGGGRRSNRSSSFGGRGSSYGSRSSSSFGGRSSSFGSRDSSRSFSGACFNCGESGHRASDCPNK

SEQ ID NO: 33267 - protein, 115 aa, Oryza sativa
MPQLSLTTNVPVDAVVAADIIKDCSKALARIIGKPESYVMVSISGSVPMSFAASEEPAAYGELMSIGGIGPGVNGKLSAALAEILETKLSVSRSRFYVKFDDVKGFNLGFNGSTF

SEQ ID NO: 33268 - protein, 337 aa, Oryza sativa
MYGSVSQLGTGNAILIILQLFFAGIIVICLDELLQKGYGLGSGISLFIATNICENIIWKAFSPTTINSGRGAEFEGAVIALFHLLITRTDKVRALREAFYRQNLPNVTNLLATVLVFLIVIYFQGFRVVLPVRSKNARGQQGSYPIKLFYTSNMPIILHSALITNLYFISQLLYRRYSGNFLVNLLGKWKESEYSGHSVPVGGLAYYVTAPSSLADVLANPFHALFYVVFMLSACALFSKTWIEVSGSSAKDVAKQLKEQQMVMPGHRESNLQKELNRYIPTAAAFGGVCIGALTVLADFMGAIGSGTGILLAVTIIYQYFETFEKERATELGFFGF

SEQ ID NO: 33269 - protein, 554 aa, Oryza sativa
MASGQPQFRYTQPPSKVIHLRNLPWDCTEEELVELGSPFGKVVNTKCNVGANRNQAFVEFADQNQAIAMISYFASSAEPAQVRGKNVYLQYSNRQEIVNSKSSGEAAGNVLLVSMEGVLPDAVSIDVLHLVFSAFGFVQKIATFEKASGYQALIQFCDTETASSAKAALDGRCIPSYLLPELDVPCTLRINYSAHTVLNVKFQSHRSRDYTNPYLPVAPSAIDGSGPDGKKQEAESNVLLASVENMQYVVTIDVLHEVFSAFGFVQKIAIFEKNSGFQALIQYPDIQTAVAAKEALEGHSIYEGGYCKLHLTFSRHTDLNVKVNNERGRDYTGGNTAPTSNQPSILGPQPVYSGAYNNAPSSATGAVVPPGTTLTPPGAPSHPYTSSEPLPQTPAVPSGGAPLYTSQGILQGPPGVPPAQFPGYGSPQFPPGSAQAQMHQQHPVQGSQQMPGQMNHQPPPGSFMQYPGDGGRPVQDAPGQQAMPFHGHGGGQHLPPGYGGQPQFQQGPRPPMPPQQFPMYGDQQFPPGTGPQMMMPFAGQGGGQQHPFRPYNSH

SEQ ID NO: 33270 - protein, 142 aa, Oryza sativa
MKTLLPPKERVGVYGDGNVKVFFVDENDVGTYAIKSIDDPRTLNKTIYIRPQDNCLTQNELISKWETLTGKSLEKFHIPGDEFLASMKDLDFASQVGIGHYYHIFYEGCLANFEIGDNGAEATQLYPEVQYTRMDEYLKRYI

SEQ ID NO: 33271 - protein, 37 aa, Oryza sativa
MMSQFYVLLCVTVVKLTSQYFLANEADLLGNSFFPLL

SEQ ID NO: 33272 - protein, 135 aa, Oryza sativa
MALSLSTSFLPTQAAAAATRTTLRSLVPSQRMRCSMRKKGLHPEIYEDAKVYCNGELVLVTGGTKPEYTVDVWSGNHPYYVGDTSAMVVMDSQIEKFRKKWGHIKEYWPEDQWREMHPDGDPEFDPEEEGSAGAS

SEQ ID NO: 33273 - protein, 171 aa, Oryza sativa
MGKYSTEPSNPTKSAKAMGRDLRVHFKNTRETAFALRKLPLVKAKRYLEDVIAHKQAIPFRRYCGGVGRTAQVKSRQSNGQGRWPAKSARFILDLLKNAESNADVKGLDVDNLFVSHIQVNQAQKQRRRTYRAHGRINPYMSSPCHVELILSEKEEAVKKEPETTIAPRRQ

SEQ ID NO: 33274 - protein, 361 aa, Oryza sativa
MSCFACCGDEDTQGVPDNRNPYPGNHPARSDAYRTADPTPRGPQPVKVQPIAVPIIPVDEIREVTKNFGDEALIGEGSFGRVYFGVLRNGRSAAVKKLDSSKQPDQEFLAQVSMVSRLKHEHVVELLGYCVDGNLRVLAYEFATMGSLHDMLHGRKGVKGAQPGPVLSWAQRVKIAVGAAKGLEYLHEKAQPHIIHRDIKSSNVLLFDDDVAKIADFDLSNQAPDMAARLHSTRVLGTFGYHAPEYAMTGQLSSKSDVYSFGVVLLELLTGRKPVDHTLPRGQQSLVTWATPRLSEDKVRQCVDSRLGGDYPPKAVAKFAAVAALCVQYEADFRPNMSIVVKALQPLLNARATNPGENAGS

SEQ ID NO: 33275 - protein, 316 aa, Oryza sativa
MAGGGGGGNRLDLPVVDLASSDPRAAAESIRKACVESGFFYVVNHGVEEGLLKRLFAESSKFFELPMEEKIALRRNSNHRGYTPPYAEKLDPSSKFEGDLKESFYIGPIGDEGLQNDANQWPSEERLPSRRETIKMYHASALSTGKRILSLIALSLNLDAEFFENIGAFSCPSAFLRLLHYPGEVDDSDDGNYGASAHSDYGMITLLATDGTPGLQICREKNRNPQLWEDVHHIDGALIVNIGDLLERWTNCIYRSTVHRVVAVGKERYSAAFFLDPNPDLVVQCLESCCSESCPPRFSPIKSGDYLKERLSATYK

SEQ ID NO: 33276 - protein, 33 aa, Oryza sativa
MISHQLQSQSKKKEGTSCISSPDYVQFLAVPLQ

SEQ ID NO: 33277 - protein, 545 aa, Oryza sativa
MLMHMMDGAQGSGSELIHDDAHTGSQLEFGVLNNHNSSSVPSMQSQGLSLSLNTQIMAPSLPYWSIKPDMLTPQSYHDNLRGEDMRMKNLQSEASRAIRNSRYLKAAQELLDEVVSVWKSIKQKAQKEKVESGKADGKETDGGPKSEGVSSNPQESGANAAPELSTAEKQELQNKMAKLMAMLDEVDRKYKHYYHQMQTVVSSFDVVAGPGSAKPYTAVALQTISRHFRCLKDAINDQINVIRKKLGEEENSSGKEGKLTRLRYIDQQLRQQRAFQQYGMIPQNAWRPQRGLPENSVTILRAWLFEHFLHPYPKDSEKLMLARQTGLTRSQISNWFINARVRLWKPMIEDMYKEEIGDLEQDSNSSSDNAPRSKDKMASSEDKEDLKNSRARICETSQLSESRTSIGAMNVGGAPVGFQNEPNPDDSFMNLMLKDQRSNEVDGGLLLHNTVAQHSDENARFMAYHLAELGRYGNGNVSLTLGLQHSSSNLVPNAQPGFPGVNEDDIYNATAPLGVTVASSDYDSMNQMDQRQRFEHSPLLHDFVA

SEQ ID NO: 33278 - protein, 230 aa, Oryza sativa
MHGTNTVGSHGESLRETEGSTCEGYSEGHGRSRIRDAFEKTNILHDDFDMRIPKKSSDRKSQNWGPESASVSPRIGCIRSIGLLPVRRSLIGSFEESLLSGRYSCGKDNQNIDGFLAVLNVTGGNFSPPTQKLPFSATSIDENSSLLYYSSIDLVGRLPMSSSKSPKLKRSLSNHDSRSAKSRLRIPVKGRVQLVVSNPEKTPLHTFFCNYDLSDMPAGTKAVDQGRTAT

SEQ ID NO: 33279 - protein, 54 aa, Oryza sativa
MVICSVVSRCIDPDPSKRPSMQIITGVLENGIDLSAAAILKESSLAWAELALAL

SEQ ID NO: 33280 - protein, 358 aa, Oryza sativa
MNNHAAGGSTSNGGSGVDGDGGGGGGAARRNTKMPKYSKFTQQELPACKPILTPKWVVSVFFLVGVIFVPVGVVSLLAAQNVVEIVDRYDDACVPANMTDNKLAYIQNPNISKECTRTLTITEDMNQPIFVYYQLDNFYQNHRRYVKSRNDGQLRDAAKANQTSACEPEKTTADGKPIVPCGLIAWSLFNDTYSFTRGNENLTVDKKDISWKSDREHKFGKNVYPSNFQNGLLKGGGTLDPAIPLSEQEDLIVWMRTAALPTFRKLYGRIYVDLKKNDTITVKLSNNYNTYNFGGKKKLVLSTATWLGGKNDFLGFAYVIVGGVCFFLAFAFTLLYLIKPRKLGDHNYLSWNRHPGGR

SEQ ID NO: 33281 - protein, 508 aa, Oryza sativa
MEAPVLEVLQFEKSSSSNYITKNLVNGLSSGDEDPCQELLSWLLPLDRTLPPRSLSPPTLNPSASHKQSYSASGSQIFSLSHFRSYSMPSASSTQPPNIRPPPISESQEFVPEKPAKTPDIINDGQLSFRGVPLEPERYSVRCGLEGVYLPGKRWRRKVEIIQPIEVHSFAAKCTSENLLCVLIKNISPQHVKDIVVLVDAITIVFEEASKGGAPLSLPIASIEVGHGHSLPNLALRRGEEHSFILKPATMSFRDRRTNNDAPLTLSLPKMNGTATNVSLAKVGETIGSLMDQCAVLVSYRCNYTESKLFFKQATSWRPCVASDLMISVSSELSLRNPISSARVPQLPVQVLTLEATNMTSENLTVTVLAPEASGSSSVVSLNSAPTTPNSSYDNLNESVRRSGLGKHRAGFRRMNSVLAGSPKESDNGGNRISTSGGCTHLWLQSAVPLGCIPARSSTTVKLELLPLTDGIITLDTLQITIREKGLTYIPEHSLEIYASAANSTGSS

SEQ ID NO: 33282 - protein, 87 aa, Oryza sativa
MTCPINHIIDRDCTRTQSFPLTVGKQTSSRHLQHGSRDSRIHYRYGQMIIRVENGFLCLCIATCKPSVIASTSVIFSSCLPHSLELA

SEQ ID NO: 33283 - protein, 299 aa, Oryza sativa
MDNIHKLHGMPLVIVTDRDRIFTSNLFQELFKARRVNLRFSTAYHPQTDGQSERVNQCLESYLRNMTFKEPQNWYSWLALAEWWYNTTYHTAIQMTPFKALYGYTPPQINEFSVPCNVSAEARVSLEEKEAIIQNLKSSMDAAQKRMKHYADRNRTERELQVGDMVYLKLQPYRQNALGVRGSLKLRSKFYGPFRVEQKIGQVAYKLQLPEGANIHPVFHVSQLKKHLGRHAVPMPNLPLVGPDGQIKAEPVAILQRRMIPRRGEPVVQWLVLWRNLSPADATWEDATFIRATFPNFEP

SEQ ID NO: 33284 - protein, 7 aa, Oryza sativa
MEVHSCW

SEQ ID NO: 33285 - protein, 116 aa, Oryza sativa
MLGPMSFYLGKNQNLWKCVNIMDINAKYPKDTFDAVHRFISSTSGSSAIKNSRSKYQAAIALKNQCLKHLALGEVLQILYIIINTKKWFVPHSSGWQPLSFNIIVVDATTGAGGKA

SEQ ID NO: 33286 - protein, 117 aa, Oryza sativa
MYVFDAAARRLTRHVIMVIQYHLQSIIVSPTREHTNNRRCNRVGEIISLSIYLSIYLSIYQLFWLFPFHEIRMELFSWLSIKSSTMLFGIQARRYKTLLVFILFMVGLLKWIIYSTD

SEQ ID NO: 33287 - protein, 48 aa, Oryza sativa
MASMKKKKSGKESDTAAKIAAAEAAARSARLAAAKKKEKNHYNQQPVR

SEQ ID NO: 33288 - protein, 241 aa, Oryza sativa
MCRRRRPPCSQAVASASCSRTLTRRTPTLTTTRTPAPPQRSATLSSSLASQLRRRSRPLRRPPSLPTPTSARLGAPATVVCASGSGASGRRRSATPSPAIGSGLAPLTLLMRPPPPTSLPPATSPKRSAAVVWPPLPHLLVRRPLLRLRPRRPRLLPRHSPTLRRRLCSKPPSQLQSQSRRRCRSKLQLPSWWRLPTRPPSCRMTQSSTRIYCAVYSCRTLTRWISELGWMLWISPMCRLT

SEQ ID NO: 33289 - protein, 51 aa, Oryza sativa
MTLNNLQTSLPNVFHALMGFSGVCVQAFEGISRCSEIVASHSGAVSPAISS

SEQ ID NO: 33290 - protein, 262 aa, Oryza sativa
MSAQAELSREENVYMAKLAEQAERYEEMVEFMEKVAKTVDSEELTVEERNLLSVAYKNVIGARRASWRIISSIEQKEESRGNEDRVTLIKDYRGKIETELTKICDGILKLLESHLVPSSTAPESKVFYLKMKGDYYRYLAEFKTGAERKDAAENTMVAYKAAQDIALAELPPTHPIRLGLALNFSVFYYEILNSPDRACNLAKQAFDEAISELDTLSEESYKDSTLIMQLLRDNLTLWTSDISEDTAEEIREAPKRDSSEGQ

SEQ ID NO: 33291 - protein, 247 aa, Oryza sativa
MNSVMSKLFEKENDHLDSMEIQNHGVDFDAAEPSNARNELQMDKREETSEEDLDDQMEETEDPSEEELDDLVLNIVTCKPKSSVAQLNSEKQAADKDSRFRKRQQFEESSLQKRHKSSDFSETRNRKQSFPAISGAIQNEQKSSDLSGKGTHEFSSELDGDKSSASVQDVEALADSSTRNGSEQNSLASEPKRVSLWTQKGEVCPFMRNSESEKQWSKAKKVLTGFIKKGNESTGSNVGKGKPSTRR

SEQ ID NO: 33292 - protein, 78 aa, Oryza sativa
MRTSSVVTTSVVTHRYGDQAGQVTQDYLHASGNALGVAWAVFKIRKALDPKGNLKKSSLASAAAHAVAKESISRQRRK

SEQ ID NO: 33293 - protein, 304 aa, Oryza sativa
MANAAGLQNLRCMSVTSCPGVTNLALAAIAKFCPSLRQLSFRKCGHMTDAGLKAFTESARLLESLQLEECNGVTLVGILDFLVNCGPKFRSLSLVKCMGIKDICSTPAQLPLCKSLQFLTIKDCPDFTDASLAVVGMVCPYLEQVDLSGLREVTDRGLLPLINSSEGGLVKVDLSGCKNITDAAVSTLVKGHGKSLKQVSLEGCSKITDASLFAISENCTELAELDLSKCMVSDNGVATLASAKHLKLRVLSLSGCSKVTPKSVSFLGNMGQSLEGLNLQFCNMIGNHNIASLEKQLWWCDILA

SEQ ID NO: 33294 - protein, 396 aa, Oryza sativa
MAALDTFLFTSESVNEGHPDKLCDQVSDAVLDACLAEDPDSKVACETCTKTNMVMVFGEITTKANVDYEKIVRETCRNIGFVSADVGLDADHCKVLVNIEQQSPDIAQGVHGHFTKRPEEIGAGDQGHMFGYATDETPELMPLSHVLATKLGARLTEVRKNGTCAWLRPDGKTQVTVEYRNESGARVPVRVHTVLISTQHDETVTNDEIAADLKEHVIKPVIPEQYLDEKTIFHLNPSGRFVIGGPHGDAGLTGRKIIIDTYGGWGAHGGGAFSGKDPTKVDRSGAYVARQAAKSIVASGLARRCIVQVSYAIGVPEPLSVFVDTYGTGRIPDKEILKIVKENFDFRPGMIIINLDLKKGGNGRYLKTAAYGHFGRDDPDFTWEVVKPLKWEKPSA

SEQ ID NO: 33295 - protein, 234 aa, Oryza sativa
MRDVAMLRRELPIIREACLRVLVLCTIFLKEAAASGLCLAEIGEMMTREFRGLEEEPSKLEVVCMEARRKLAEWEPYSPVIEQGEDMDFQFSLDMLGEYNDVIRSPRFNGLGAKGNGFRNPLSKLVESIDEDNDDDDGRSESSKRSSERVHSGGLKFPSADKSSGSNGSVHALNRSADEQLPSSVYFVRLSDMNAEEWNIFLEKFQELLKEALQERAAAAGQRMKQRLGTSCKF

SEQ ID NO: 33296 - protein, 324 aa, Oryza sativa
MLVSDAGRVYAFGKDSFGEVEYAAQGSRVVTTPQLVESLKDIYIVQAAIGNFFTAVLSREGHVYTFSWGNDMKLGHQTEPNDVQPHLLAGPLENIPVVQIAAGYCYLLALACQPSGMSVYSVGCGLGGKLGHGSRTDEKYPRLIEQFQALNIQPVVVAAGAWHAAVVGKDGRVCTWGWGRYGCLGHGNEECESVPKVVESLVNVRAVHVATGDYTTFVVSDKGDVYSFGCGESSSLGHNTITEGNNRHTNVLSPELVTSLKRTNERVAQISLTNSIYWNAHTFALTDSGKLYAFGAGDKGQLGTELVAQESERGTPERVEIDLS

SEQ ID NO: 33297 - protein, 409 aa, Oryza sativa
MRVILASNRGTVMELGITPIVTSGMVMQLLVGSKIIEVDNSVREDRALLNGAQKLLGILIAIGEAVAYVLSGMYGSVSQLGTGNAILIILQLFFAGIIVICLDELLQKGYGLGSGISLFIATNICENIIWKAFSPTTINSGRGAEFEGAVIALFHLLITRTDKVRALREAFYRQNLPNVTNLLATVLVFLIVIYFQGFRVVLPVRSKNARGQQGSYPIKLFYTSNMPIILHSALITNLYFISQLLYRRYSGNFLVNLIGKWKESEYSGHSVPVGGLAYYVTAPSSLADVLANPFHALFYVVFMLSACALFSKTWIEVSGSSAKDVAKQLKEQQMVMPGHRESNLQKELNRYIPTAAAFGGVCIGALTVLADFMGAIGSGTGILLAVTIIYQYFETFEKERATELGFFGF

SEQ ID NO: 33298 - protein, 294 aa, Oryza sativa
MIIARGTPGFSGADLANLVNVAALKAAMDGAKAVTMNDLEYAKDRIMMGSERKSAVISDESRKLTAYHEGGHALVAIHTEGAHPVHKATIVPRGMALGMVAQLPDKDETSVSRKQMLARLDVCMGGRVAEELIFGDSEVTSGASSDFQQATAVARAMVTKYGMSKQLGFVSYNYEDDGKSMSTETRLLIEKEVKCFVENAYNNAKNILIKHNKELHALANALLEHETLTGAQIKNILAQVNNKQQQEHAIEAPQKTPAVPSSPAASAAAAAAAAAAAAQQAAAKAKGEIAGIGS

SEQ ID NO: 33299 - protein, 214 aa, Oryza sativa
MPRPLPGNLSGSCPYQELQCLQCQIPTHGLLVSSARSRPVLPVSAVGSGGGSSVAEDERKSGLSLQNAKTSVVSRDDETINVRVDLPGKATQKVFDEALTSLARDAPPVPGFRKSKGGRTSNIPSSILLQMLGKSRVTKFVLQEILSITVGDFVKKENLKVNPEIKTTQSEEELESSFTPGSSFSFSVVLQLEKPESDETSENSESDEASEPSS

SEQ ID NO: 33300 - protein, 352 aa, Oryza sativa
MVQQLDGTKNEWGWCKQKLGANAILAVSLALCKAGAIIKKIPLYQHIANLAGNKQLVLPVPAFNVINGGSHAGNKLAMQEFMILPTGASSFKEAMKMGVEVYHNLKSVIKKKYGQDATNVGDEGGFAPNIQENKEGLELLKTAIEKAGYTGKVVIGMDVAASEFYTEDQTYDLNFKEENNDGSQKISGDSLKNVYKSFVSEYPIVSIEDPFDQDDWVHYAKMTEEIGDQVQIVGDDLLVTNPTRVAKAIKDKACNALLLKVNQIGSVTESIEAVKMSKRAGWGVMTSHRSGETEDTFIADLAVGLSTGQIKTGAPCRSERLAKYNQLLRIEEELGAAAVYAGAKFRAPVEPY

SEQ ID NO: 33301 - protein, 32 aa, Oryza sativa
MLVQSIKSCALLVSFRNILKLPQVCGYLKLCC

SEQ ID NO: 33302 - protein, 255 aa, Oryza sativa
MAAFASALRVLPSPPAAVPRRLRSREQRQGCRSRRYSKVVAYYALTTPPYKLDALEPYISKRTVELHWGKHQQDYVDSLNKQLATSMFYGYTLEELIKEAYNNGNPLPEYNNAAQVWNHHFFWESMQPEGGGSPGRGVLQQIEKDFGSFTNFREEFIRSALSLLGSGWVWLVLKRKERKFSVVHTQNAISPLALGDIPLINLDLWEHAYYLDYKDDRRMYVTNFIDHLVSWDTVTLRMMRAEAFVNLGEPNIPVA

SEQ ID NO: 33303 - protein, 363 aa, Oryza sativa
MSSAAVNGLAGAGGGIIAQIITYPLQTVNTRQQTERSAKKKKANGAAIANTSTLFQMLQLFQTEGWGGLYSGLKPSLIGTAASQGIYYYFYQILKNKVEDLAVARGKKGLGDGTVGMFSWLGIAAVAGSINVLLTNPIWVLVTRMQTHTQAEKKIMESKKELLLKDVARANSIEVSILKDRLYKLDSEKPRPYGTIQAVREVYRESGIRGFWKGLIPTLIMVCNPSIQFMIYETLAKRLRSKRSGKELPKKNLTAMEVFLLGAIAKLGATVVTYPLLVVKSRLQAKQEIGRNVMSRYTGTIDAIIKMIRYEGLHGFYKGMGTKIVQSVFAASVLFMVKEELVKFVVMLIARSRTVLGPSSKKR

SEQ ID NO: 33304 - protein, 149 aa, Oryza sativa
MAAAALRDQLTALLSSMFSQGLVDEQFQQLQMLQDEGGTPGFVSEVVTLFCDDADRIINEIATLLEQPVVNFDKVDAYVHQLKGSSASVGAQKVKFTCMQFRQFCQDKSRDGCLMALAVVRNDFYDLRNKFQTMLQLEQQIQAYDPKQQ

SEQ ID NO: 33305 - protein, 335 aa, Oryza sativa
MKDLIDYSRQNGSGPIASLHSFPRRTSSGVSPHQSQQQQPEEQQSIPQSSNQSGQNAAPMTGVQASASANADVTSNNSLSCAPSTSAPSPSVVGLLQGSMNSRQDHPMSSANGPYTSGNSAAIPKVNSTTSLQSNPSTSFPSPMPTTSNNNMMPAPQSTNQLSSPTTSSNLPPMQPPATRPQEPEPNESQSSVQRILQDLMMSPQMNGIGQLGNDMKRPNGLTSSVNGVNCLVGNAVTNNSGMGGMGFGAMGGLGPNHAAGGLRTAMVNNAMAISGRMGMNHSAHDLSQLGQLQQQQQHQQQQQQQQHDLGNQLLNRLRAANSFNNLQYDWKPSQ

SEQ ID NO: 33306 - protein, 223 aa, Oryza sativa
MNEGPGHIPMHKIPENMEKQLEWCNEAPFYTLGPLTTDIAPGYDHITSAIGAANIGALGTALLCYVTPKEHLGLPNRDDVKTGVISYKISAHAADLAKGHPYAQAWDDTLSKARFEFRWLDQFALSLDPVTAMSFHDETLPSEGAKVAHFCSMCGPKFCSMKITEDIRKYADEHGYGTVEEAVIQGMNAMSAEFSAARKTISGEQHGEAGGEIYVPESYTARK

SEQ ID NO: 33307 - protein, 420 aa, Oryza sativa
MSSSTFSNGSSARTQNKGSTPQQMGMNNRRPTTTTGSAAPTYPNRMYPSTRSYSQYGNSYKTGLSYSTNGCGSNGYGSNGYDSRLYGRRGLSMDNRYKPRGRGNGYYGFGNESQDGTIELNRGPRSGRFKNQKLFGHTVTIAVKGQSLPTSDSMNATDVPDRTQFNRDDFPVQYDDAKFFVIKSYSEDDIHKSIKYDVWASTTNGNKKLDAAYQEAQAKSSKCPIFLFFSVNTSGQFVGVAEMTGAVDFEKTLEYWQQDKWNGSLSLKWHIVKDVPNNILKHIILENNENKPVTNSRDTQEVNLDQGIQMLKIFKEHVSKTSILDDFAFYENRQKLMQEKRVKQQQIQKQVWDSRAPSSVTGEKQQDAATAKPKLPNGVNGELKVPAENGTAPVVTYAAKVAQTAATEKPALANGTVKAS

SEQ ID NO: 33308 - protein, 260 aa, Oryza sativa
MSPAEASREENVYMAKLAEQAERYEEMVEFMEKVAKTTDVGELTVEERNLLSVAYKNVIGARRASWRIISSIEQKEESRGNEAYVASIKEYRSRIETELSKICDGILKLLDSHLVPSATAAESKVFYLKMKGDYHRYLAEFKSGAERKEAAENTLVAYKSAQDIALADLPTTHPIRLGLALNFSVFYYEILNSPDRACNLAKQAFDDAIAELDTLGEESYKDSTLIMQLLRDNLTLWTSDNAEDGGDEIKEAAKPEGEGH

SEQ ID NO: 33309 - protein, 329 aa, Oryza sativa
MEDQKKNAKPEGSSGSQRGAPPAPDAGLPNPFDFSQFSNLLNDPSIKEMAEQIASDPVFTQMAEQLQKSAHVTGEQGGPALDPQQHMETMTQVMQNPQFMSMAERLGNTLMQDPGMSSMLESLTSPSHKELLEERMSRIKEDPSLKGILDEIESGGPSAMVKYWNDPEVLQKIGQAMSINFPGDAATSTTLSGPEETEEDGGDDDESIVHHTASVGDAEGLKKALEDGADMDEEDAEGRRALHFACGYGELKCAEILLEAGAAVNALDKNKNTPLHYAAGYGRKECVDLLLKHGAAVTPQNLDGKTPIEVAKLNNQDEVLKVLEMDAFL

SEQ ID NO: 33310 - protein, 333 aa, Oryza sativa
MWDPVAYALGFIDCDNISARCMLTIFTLFATKTEASLLRMLKGSPDVYLSGPIKKYITDRGGRFHLRWGCREVLYDKSPDGETYVKGLLLSKATSREIIKADAYVAACDVPGIKRLLPSEWRQWDTFDNIYKLDGVPVVTVQLRYNGWVTELQDLEKSRQLKKAVGLDNLLYTPDADFSCFSDLALSSPADYYIEGQGSLIQAVLTPGDPYMPLPNEEIISKVQKQVLELFPSSQGLELTWSSVVKIGQSLYRESPGNDPFRPDQKIPVKNFFLSGSYTKQDYIDSMEGATLSGRRTAAYICGAGEELLALRKKLIVDDSEKARGKVEALQTS

SEQ ID NO: 33311 - protein, 138 aa, Oryza sativa
MARRSSARSRPAPRAAPVRNPPQPARQAPPPAPAQNGGGSILGGIGSTIAQGMAFGTGSAMAHRAVDAVMGPRTIQHETVVSEAAASATPMANATPSDSCSIHSKAFQDCINNYGSDISKCQFYLDMLNECRRGGASA

SEQ ID NO: 33312 - protein, 392 aa, Oryza sativa
METVAAASYTRGAATRSPACCAAMSFSQSYRPKAARPPSTFYGESLRVNTARSLPSGRQSKAASRAALSTRCEIGDSLEEFLTKATPDKNLIRLLICMGEAMRTISFKVRTASCGGTACVNSFGDEQLAVDMLADKLLFEALEYSHVCKYACSEEVPELQDMGGPVDGGFSVAFDPLDGSSIVDTNFTVGTIFGVWPGDKLTGVTGGDQVAAAMGIYGPRTTYIIALKDCPGTHEFLLLDEGKWQHVKDTTTIGEGKMFSPGNLRATFDNPEYDKLINYYVKEKYTLRYTGGMVPDVNQIIVKEKGIFTNVTSPTAKAKLRLLFEVAPLGFLIEKAGGYSSDGKQSVLDKVINNLDERTQVAYGSKNEIIRFEETLYGSSRLTAGATVGAAA

SEQ ID NO: 33313 - protein, 196 aa, Oryza sativa
MNFCQGKLTSSPWSELDGLQPETKIIDDQLVKINQKGFLTINSQPAVNGERSDSTSVGWGGPGGYVYQKAYLEFFCSKEKLDQLIEKSKAFPSLTYIAVNKDGESFSNIPTNAVNAVTWGVFPGKEIVQPTVVDSASFMVWKDEAFEIWSKGWACLFPEGDSSREILDKVQKSYFLVSLVDNDYINGDLFAAFKEI

SEQ ID NO: 33314 - protein, 261 aa, Oryza sativa
MDYCKQQERDGHRDDGDVTEWKKVAELRAVVEAQDPACKEEDDYQLRRFLRARDHNIGKASAMLVKYLQWKREVKPGGRAIADEEVRGELAQEKLYMQGYDRQGRPLVYGFGARHFPARRDLDEFKRYVVYVLDRTCARLGGNGGQGKFAAVADLQGWGYYGNCDIRAYVAALEIMQNYYPERLGRVFLIHVPYVFMAAWKIIYPFIDDNTKKKFVFVADKDLHATLRDAIDDSNLAEDYGGKLKLVSPLINGATESNRRR

SEQ ID NO: 33315 - protein, 72 aa, Oryza sativa
MVGCVHICITVVSRSAVSSLLNWSLGFHGFCFLLMGWLAPEALAVNNLVDALKLHCTLTLLILGLVKIGLWS

SEQ ID NO: 33316 - protein, 481 aa, Oryza sativa
MGRRTWQWHAIAALGVACAAAAAVAADRRAFSVTSAAGGGAAAAAAVVAATPEEVGILRKVANFLWQTDGNSYHHVWPEMELGWQIVLGSLIGFFGAAFGSVGGVGGGGIFVPMLTLIIGFDPKSSTAISKCMIMGAAVSTVYYNLKLKHPTLDMPVIDYDLALLIQPMLMLGISIGVIFNVLFPDWLVTVLLIILFLGTSTKAFLKGVETWKKETIIKREAAKRLEQTSEEPEYAPLPTGPGAVADAKRPSDEAASLMKNIYWKEFGLLAFVWMAFLVLQVTKNYTATCSSWYWILNLLQIPVSVGVTMYEALGLMSGKRVLSSKGNEQTTLKFHQLCIYCFFGITAGVVGGLLGLGGGFIMGPLFLELGIPPQVSSATATFAMMFSSSMSVVEYYLLNRFPVPYALYFVIVAFIAAIIGQHVVRRLINWLGRASLIIFILAFMIFVSAISLGGVGISNMIHRINQHEYMGFENLCKYDA

SEQ ID NO: 33317 - protein, 475 aa, Oryza sativa
MGDGRVGGGTNRPAWLQQYELVGKIGEGTYGLVFLARLKQSHPHAAAGVGRRGSPIAIKKFKQSKEGDGVSPTAIREIMLLREINHENVVKLVNVHINHADMSLYLAFDYAEHDLYETIRHHREKLNLPINPYTVKSLLWQLLNGLNYLHSNWIIHRDLKPSNILVMGEGEEHGIIKIADFGLARIYQAPLKPLSDNGVVVTIWYRAPELLLGAKHYTSAVDMWAVGCIFAELLTLKPLFQGVEAKATPNPFQLDQLDKIFKVLGHPTVEKWPTLANLPCWQNDQQHIQGHKYENTGLHNIVHLPQKSPAFDLLSKMLEYDPRKRITAAQALEHEYFRMDPLPGRNALLPSQAGEKIVQYPVRPVDTTTDFEGTTSLQPTQAPSGNAAPGNQSVVPRPIPRQMQQPMVGMSRMGGTNMAAFGAAPQGGIAGMNPGNIPMQRGAGAQSHPHQLRRKADQGMGMQNPGYPTQQKRRF

SEQ ID NO: 33318 - protein, 69 aa, Oryza sativa
MSRVRQRHDELKERYGVSDITVSVQNVASQLGYSSIDSVTLEDMVLEIVRQIERLIRAKSMMEAAGKPF

SEQ ID NO: 33319 - protein, 72 aa, Oryza sativa
MLNTVDSEGDTPLHHAARGEHLGIVDLLLKAGACAKKENTYGQVPAEMADEGTEVRKLLIQEQVEASTHTSN

SEQ ID NO: 33320 - protein, 176 aa, Oryza sativa
MSFEKSASRLPPNLGCTITWHNTDASVEPVHWLEGSSVVIVDPPRKGLHPSVICALQKVALSERKAYKAKSTLTKVKDEKRPWILRAREAAVQVDSTPLEGSSETWPETLIYISCGWDSFKKDCKSLMSSKAWHLQNAHAFNFFPGTDSIEVLAIFKRESEAVQKKKKKAKKKKAK

SEQ ID NO: 33321 - protein, 416 aa, Oryza sativa
MRDGIGSMSRRAADGRAGGGRGGSRHSWPVLWSEQQQPPQQQQLQRQEHQQQQGRWANLPPELLLDVIQRVEASEATWPARRQVVACAAVCRSWREVTKEVVKTLEECGRITFPISLKQPGPREHPVQCFVRRDRATSTYLLYLGLSPSLHGENDKLLLAARKIRRATRTSFVISLVSNDFSLSSSTYVGKLKPNFLGTKFTIFDSQPPCDAVVLPNNRPSKRHFKQVSPRLPLGNYNVATVSYELTVLRNRGPRRMQCTMHSIPALCIQEGGKAPTPTGIIHSLDEQVPALSTSKGKEPAIEFSSTSLSADLSGPVCTNEVPLVLKNKAPRWHEQLQCWCLNFRGRVTVASVKNFQLVASVDPSLGIPAAEQEKVILQFGKIGKDIFTMDYRYPLSAFQAFAICLTSFDTKPACE

SEQ ID NO: 33322 - protein, 526 aa, Oryza sativa
MEAPAMEPGEMEAMLRAAAEFASYPGAHGDDTVRQFLEQYPLPKLLGALQSEADVPGMDETIAACLDKVFSSRYGASFLPSYGAFIQAGLLANSKNTRQLACKAVIHLLDKAGDSAVVVDTFVQHNLYPLLMNCLTEGDEEISAISLDGIKRLAQIPKGIEIIFPPNGQGSVQLHKVAAQSSSMARIRILSLIAKLFAVSTYTATAIYDSNLLSLFEDEIKDRRDMLKTLSALEVLYELVEHPHSNIFLLKTNLLQLMVDVINDSSADSIVRSRATLISGRLLSSADAFTTIDRNCVANLLLAIDKLLKMEESQNTDETESALEALGLIGTTSAGACLLLTDSSNAARHVVEASFGRQGRGKQLAALHAFGSISGVDRQEDQIKLDNQAEERLKRFVYTTARNSPKLTPSALLLSVLQQDPDIRITGYRVISGLVAREWCLMEICSKLDIINLVTDPKMEMTKLGMEARHDCCLAISKALSSSHLLHEPSLSELIGKLNEAVKRGPYLSERKRVEPQPVVVPAERF

SEQ ID NO: 33323 - protein, 166 aa, Oryza sativa
MSLVKLFDTLAFDAWNPFSIFGTTVAADAWLASDTSAFANTYIESRETAEAYVFRADLPAGVKKEEVRVEVDEGNVLVITGERSVRREEKGQRSHHIERSCATFFGRFHLPDDAVVGLVRASMDGGMLTVTVPKVVTDKQPAIAAAAPVPAVVAPAVEAKAIEASP

SEQ ID NO: 33324 - protein, 510 aa, Oryza sativa
MSSGKGGGGGGKGGGGKKKEVKKETKLGMAYKKDDNFGEWYSEVVVNSEMIEYYDISGCYILRPWAMEIWELLKEFFDAEIKKLKLKPYYFPLFVTENVLQKEKDHIEGFAPEVAWVTKSGKSDLEAPIAIRPTSETVMYPYFSKWIRSHRDLPLRCNQWCNVVRWEFSNPTPFIRSREFLWQEGHTAFATKEEADEEVLQILELYRRIYEEFLAVPVSKGRKSEMEKFAGGLYTTSVEAFIPNTGRGVQGATSHCLGQNFAKMFDITFENDKGSRSMVWQNSWAYTTRSIGVMVMTHGDDKGLVLPPRVAPLQVIVIPVPYKDVDTTAIVNECKKTVETLEKAGIRADLDTRENYSPGWKYSHWEMKGVPLRIEIGPKDMANNQARVVRRDNGAKADIPTADLVEKVNGLLDEVQKNLFETAKQKRDACLKVVNTWDEFIVALNDKKLILAPWCDEEEVEKDVKARTKGDLGAAKTLCTPFEQPDLPEGTTCFASGKPAKKWSFWGRSY

SEQ ID NO: 33325 - protein, 134 aa, Oryza sativa
MPFKRFVEIGRVALVNYGKDYGRLVVIVDVVDQNRALVDAPDMVRCQINFKRLSLTDIKIDIKRVPKKTTLIKAMEEADVKNKWENSSWGKKLIVQKRRASLNDFDRFKVMLAKIKRGGAIRQELAKLKKEAAA

SEQ ID NO: 33326 - protein, 281 aa, Oryza sativa
MAASTAAAVAPDWWNDVNNSPMWQDRSFHALATLYGAVSFAALVQLIRIECRVPEYGWTTQKVFHFMNFIVNGVRPIVFVLRRDVQLVQPEVFQHVLIDFPGLAFFTTYALLVLFWAEIYYQARAMSTDGLRPAFYTINGVVYAIQIILWMALWWKPVRAMVILSKMFFAATSLFAALGFLLYGGRLFLMLQRFPVESKGRRKKLNEVGYVTTICFSGFLIRCVMMCLNAFDKEADLDVLNHPILNFFYYLLVEIVPSALVLFILRKLPPKRGITQYHPIH

SEQ ID NO: 33327 - protein, 279 aa, Oryza sativa
MPGNSFLPTGNGAPDTRNLYYSFDSGVVHFVYMSTETNFVQGSDQYNFIKADLEKVNRSRTPFIVFQGHRPMYTSSNEARDFAHRQQMLQNLEPLLATYKVTLALWGHVHRYERFCPMKNFQCVNMSSSFVYPGAPVHLVIGMGGQDYQPFWQPRKDHPDVPVYPQPERSMYRGGEFGYTKLVATKEKLTLTYIGNHDGQVHDMVEIFSGQVSNNNGVPEVIDDTKLSTGVSTKLKIPLFSLEIVGSVMFALVLGFSLGFLIRRKKEAAQWTPVKNEET

SEQ ID NO: 33328 - protein, 308 aa, Oryza sativa; identical to SEQ ID NO: 32860

SEQ ID NO: 33329 - protein, 360 aa, Oryza sativa; identical to SEQ ID NO: 31713

SEQ ID NO: 33330 - protein, 409 aa, Oryza sativa
MDGSRQEMPPPTELSALGHREVAAAERPFKKTCHSSVPTSSTLCEPHVWPGLLEGLLHQIIALLSSFQDLLAFSATCHSWRAALSSFPSVYTFNFPPLCLKLNTPNIRPLRVLLKDNLLSYCKWQLDDPSKRNISLRCSAPPDAPNRMRYLGCSYGYLIFSYHEKNCLFVDAYTSTKLKSPKLNFMGDRDIYYGILTAPLNSPNSHLILCSRSSIFYWQVGTNSWTKHGYGGEHILQIVLFKGEIFAMDVLGRLHTMQFAPELSIQEVAVLRREEMVTGPRSGPWLVACGEMLLMVDLSTDRDQLPRTFQVFRLEFSAETVECVKMERLENQALFVNLDGRDPTFSCTSPERWGGKSNWIYVAKPSGDSGEPWTAVELGQPVPSRIDRVPDFQVDNMWVVPSLIYDVNQ

SEQ ID NO: 33331 - protein, 319 aa, Oryza sativa
MKSCPGGNAVVIGGGYIGMECAAALVTNRIKVTMVFPESHCMARLFTPKIAEYYENYYTSKGVTFVKGTVLTSFEKDSTGKVTSVILKDGKHLPADMVVVGIGIRASTGLFEGQLLMEQGGIKVNGQMLTSDGSVYAVGDVAAFPIKLFDGVIRRLEHVDSARRTARHAVAAILEPSKTKDIDYLPFFYSRVFTLSWQFYGNNTGEVVHFGDFTNSSPRFGAYWVDKSRIRGAFLEGGSREEYEAISNVVRRKAKVINIAELEKQGLMFAIQESQKDLPDGGLALGEKPTYVWHTTAGVIAAASIAAFGYWYGRKRRRW

SEQ ID NO: 33332 - protein, 115 aa, Oryza sativa
MNKVGQELAHYLTTSLLSPSGKHRILQLLSLLLTLLVWTFSLKCFGTSQTKGSQLDRLLSMNTSRTLRWYNDPAMALHWIGICMGWAPHFIPSVNAVPFVWAFLSFSWIFQILCV

SEQ ID NO: 33333 - protein, 386 aa, Oryza sativa
MIAEAMSKVGRKGVVTLEEGRSSENNLYVVEGMQFERGYISPYFVTDSEKMSAEYENCKLLLVDKKITNARDLINVLEEAIRGAYPILIIAEDIEQEALATLVVNKLRGSLKIAAIKAPGFGERKTQYLDDIAILTGATVIRDEVGLSLDKADKSVLGTAAKVVLNKESTTIVGDGSTQEEVTKRVAQIKNLIEAAEQEYEKEKLNERIAKLAGGVAVIQVGAQTETELKEKKLRVEDALNATKAAVEEGIVVGGGCTLLRLAARVDAIKDNLENDEQKVGAEIVRRALSYPLKLIAKNAGVNGSVVTEKVLSNDNFKFGYNAATGQYEDLMAAGIIDPTKVVRCCLEHAASVAKTFLTSDVVVVEIKEPEPAPVTNPMDNSGYGY

SEQ ID NO: 33334 - protein, 57 aa, Oryza sativa
MRKEFRKMAKAVKNQVSDNYYRPDLTKPALARLSSVYRSLQVAKSGVKKKNRQPAKL

SEQ ID NO: 33335 - protein, 417 aa, Oryza sativa
MDKKFITKENKISYVKMERIVLDQLDHPGVIRLFFTFQDTYSLYMALESCEGGELFDQIVRKGRLSEDEARFYAAEIVDILEYLHSLGLIHRDVKPENLLLTSDGHIKIADFGSVKPTKDTPIKVLPNSTNERACTFVGTAAYVPPEVLNSAPPTFGNDLWALGCTLYQLLSGSSPFKDASEWLIFQRIIARDLKIPEYFSDDARDLIDKLLDVDPSKRPGAGPDGYVSLKKHPFFRGIDWKNIRSTRAPKLAMEANANEDEDSQDSSWLSHMGSAPVNQHVSPVGNDGASSSSEVRSHISRLASIDSFDSRWQDFLEPGESVVLISKLKKINKLTNKKVQLILTDKPQLICVDPGKMVTKGNIMWSDDPSELNVQVSNSSHFRICTPKKVSSFEDAKQRAWQWKKAIEDLQRCQKN

SEQ ID NO: 33336 - protein, 166 aa, Oryza sativa; identical to SEQ ID NO: 29934

SEQ ID NO: 33337 - protein, 319 aa, Oryza sativa
MAAAQGSGVPAALALSSGHTMPSVGLGVWRMDSPAIRDLIHSALRIGYRHFDCAADYQNEAEVGDALAEAFQTGLVKREDLFITTKLWNSDHGHVVEACKDSLKKLRLDYLDLYLIHFPVATRHTGVGTTASALGDDGVLDIDTTISLETTWHAMEDLVSMGLVRSIGISNYDIFLTRDCLAYAKIKPAVNQIETHPYFQRDCLVKFCQKHGILVTAHTPLGGSTANTEWFGSVSCLDDPVIKSLAEKYGKTPAQLVLRWGLQRNTVVIPKTSKEERLQENFAVFDFAISDEDMEKMRSIDRKYRTNQPAKFWGIDLFA

SEQ ID NO: 33338 - protein, 237 aa, Oryza sativa
MSASFLEIQPSELSFPFELLKQSSCSMQLTNKTDHYVAFKVKTTNPKQYCVRPNIGVVLPGSTCDVTVTMQAQREAPPDMQCKDKFLVQSVAAENGATTQDISAEMFNKVAGKVVEEFKLRVVYVPTTTSSAMPEDSEQGSSARPFAQENGIHNSTMPQPVFRSSAEPTKERPTEPSSMISKLNEENRVAIQQNQKLRHELELLRKESSKSSGGFSLTFLAIVGLLGIIVGYILKKT

SEQ ID NO: 33339 - protein, 93 aa, Oryza sativa
MNPSSHCPGIRRVVLEQSIHMMEYNSRYANYFNEYQMMDALSFVELTPSRAENYMVFLGDAGFMECNTPLSALVDRAKELMGRQWLQGISSAN

SEQ ID NO: 33340 - protein, 407 aa, Oryza sativa
MEDGTLHRFRATNTILATGGYGRAYFSATSAHTCTGDGNAMVARAGLPLQDLEFVQFHPTGIYGAGCLITEGSRGEGGILRNSEGERFMERYAPTAKDLASRDVVSRSMTMEIREGRGVGPLKDHIYLHLNHLPPEVLKERLPGISETAAIFAGVDVTKEPIPVLPTVHYNMGGIPTNYHGEVVTMKGDNPDSVVPGLMAAGEAACASVHGANRLGANSLLDIVVFGRACANRVAETAKPGEKQKPLQKSAGEKTIAWLDKLRNANGSLPTSKIRLNMQRVMQNNAAVFRTQETLEEGCKLITKAWESYHDVKISDRSLIWNSDLIETIELENLLINACITMHSAEARKESRGAHAREDFTKRDDEQWMKHSLGYWENEKVRLAYRPVHMNTLDSEVESFPPKARVY

SEQ ID NO: 33341 - protein, 216 aa, Oryza sativa
MSKLQSDALREAISQIANDSREKQRKFVETIELQIGLKNYDPQKDKRFSGSVKLPHIPRPKLKVCMLGDAQHVEEAEKMGLDYMDVEALKKMNKNKKLVKKLAKKYHAFLASEAIIKQIPRLLGPGLNKAGKFPTLVTHQESLESKVNETKATVKFQLKKVLCMGVAVGNCAMEEKQIFQNVQMSVNFLVSLLKKNWQNVRCLYLKSTMGKVYRVF

SEQ ID NO: 33342 - protein, 335 aa, Oryza sativa
MNGDSKVRASHSTTSVISNSNNRTVERSSHYSMIPRHLQSPRLGRHVNNANNQEPANSTLPVEDSILMEECHDAMQSSADLKCPLCRGSVSGWIPAGEVRKYLNEKLRTCSHDSCKFVGTYEQLREHARTAHLLAKPAHVDLSRKRTWDRLEREQEVGDVISAIRSQNPGAIIVGDYVIETRDAMSPDENTGDESNDEWWRDSIESPDNRYNSPRLLPNEAPESSIIWADERHGLPRFQPQNNRVLPRFSFTNRSSSRSDWHRIRRPSRQSLARRGLLNRPYRNNSDYHGFRPQLFDQPNGSSHRSGINRSLDDPSFVPRRQRLRYTHRSHHIRD

SEQ ID NO: 33343 - protein, 302 aa, Oryza sativa
MGLGKSSNAEPPEFGAAADGDADRNMILGKRFFVTPSDSVAIIAANAVQSIPYFSSGLKGVARSMPTSAALDVVAKNLNLKFFEVPTGWKFFGNLMDAGMCSICGEESFGTGSDHIREKDGIWAVLAWLSILAFKNKDNLGGDKLVTVEDIVRQHWGTYGRHYYTRYDYENVDAGAAKELMANLVSMQSSLSDVNKLTKEIRSDVSDVVAADEFEYKDPVDGSVSKHQGVRYLFGDGSRLVFRLSGTGSVGATIRVYIEQYEKDSSKTGRDSQDALAPLVDVALKLSKMQEYTGRSAPTVIT

SEQ ID NO: 33344 - protein, 574 aa, Oryza sativa
MGKSPAKWIKSVLLGKKSAKSNSTKAKDLAKAANNKPVLSEDPPVISEPALVNSHNDGNAENCKLPNGVAVEAMGQGVENQNIVGSKAPTSPEKLSEELAAVKAQAAFRGYLARRAFRALKGIIRLQALIRGHLVRRQAASTLRVTWLIVKLQALVRGRNVRLSGASIQFVVKSGQHKFLSDKPSDAWKEKVSSNAYVRKLLSSSIGLEALHLQYDKRDPNSLYNWLERWTISQIWKSSSQPKKVADGKPQVRKASYAMETESAKLKRNVRKSSAVTVDSFQTNMTVEPEKIKRNSRKFSSSAADSVPDSQLSELEKVKRNLRKVTNSMAEASKISSSRADASKVSSSMADASKVSSSTADASKVPDSVAQIPPSLVNGISDHQDNQCEEAQQNACVSFPPETQELHSGILLEDNSHMNLLEPDLISNPETPFTSILTWEKFNDSTADAQEVEVLPLQNIDNEDNFPENGVLGKKEKPRSKEEPLSNGNLKTSKRRSSFSTKSDYPENGAQNTPVPRRKPSYMAATESAKAKLRGQNSPRLDSDSPADMNGFTRRQSLPSSTNNRAIRAEWRRW

SEQ ID NO: 33345 - protein, 360 aa, Oryza sativa
MEPTSSAAMARQTWELENNIPAAASDPDALDAIYRYDEAAQARVQQEKPWANDPHPFRRAKISALALLKMVVHARAGGTIEVMGLMQGKCEGDAIVVMDAFALPVEGTETRVNAQADAYEYMVEYSTINKQAGRLENVVGWYHSHPGYGCWLSGIDVSTQMLNQQFQEPFLAVVIDPTRTVSAGKVEIGAFRTYPKDYKPPDEPVSEYQTIPLNKIEDFGVHCKQYYALDITYFKSSLDSHLLDLLWNKYWVNTLSSSPLLGNRDYVAGQIFDLADKLEQAEGQLAHSRYGMLMPSQRKKEQEESPLAKVTRDSSKITAEQVHGLMSQVIKDILFNSVHPSNKASTSAPDSSGPEPMVEA

SEQ ID NO: 33346 - protein, 382 aa, Oryza sativa
MLNSEKMSKSTGNFRTLRQAIEEFSSDATRFALADAGDGMDDANFVFETANAAILRLTKEIAWMEEVIAAESSLRAGPPSTYADHVFANEINIAVIETEKSYNAFMFRDALKLGFYDLQLARDEYRLSCGAAGMNRELLWRFMEVQTRLITPICPHYAEHVWRNILRKEGFAIKAGWPIAGTPDPTLRIANKYLQDSIVKFRKLLQKQESGSKKPKKGTAPPPSEQNKLTVGLVYVNENYYGWKEQCLRVLQSKFDSQARLFAPDEEINEALKNCSIGQETNFKQVQKLCMPFIKSKKDEARSVGPHALNLKLPFGEMSVLEENLELIKRQVGLEHAEVLSASDEAARAKAGVHASMLDKTPPSPGEPVAIFMSKLDLEARC

SEQ ID NO: 33347 - protein, 151 aa, Oryza sativa
MLLRLPNIKFIIVTLGEKGCLMLERSTTDASEAEEIDVESLLESLEKKEVLSSSMPKCIASKSNLRISADGIGSISGRLLLGTAEIIPSEELIDTTGAGDAFIGAVLYGLCSGMPPEKMLPFAAQVAACGCRGLGARTALPHRTDPRLVAY

SEQ ID NO: 33348 - protein, 310 aa, Oryza sativa
MARKCSSCGNNGHNSRTCTGQRSLQESGGGYGGGGAGGVRLFGVQLHVGGAPLKKCFSMECLSSPSPSPSPAYYAAVAAAASNSSPTVSSSSSLVSVEEAGEKMANGYLSDGLMARAQERKKGVPWTEEEHRKFLVGLEKLGKGDWRGISRHFVTTRTPTQVASHAQKYFLRQSSLTQKKRRSSLFDVIEDAEKAPSVNERLKLRHETASVPAEMGFPALSLGISSMAQPEAMLLPPPSLTLTPSCSSPAVSSSSSEQPRTIHPSLMVAKPQVQLQLQPPDLELKISTVRQNDQPSSSPRTPFLGTIRVT

SEQ ID NO: 33349 - protein, 467 aa, Oryza sativa
MFPSGKGTMDSHVAIGSVEINTDVIDADMKDSTNMVEGEQETKTASDDVNNGGDPNTEETSKLESNEVPNDSDKKSNSTSIRTEHSNFPLHRCMRIVPHDQNSGAFFIAVLQKISPINGNQEAELIKGEHNISKDRAEKLEKGLGSDKVPHKENTVQQQGVDDGNVMDEQQNGDVDNETSNGKSSEEAKVIVNEAENDQAGPRDRRRKPQNQGRWRGVDPVIFFKDEATIRSIVSFYGIKDTFPLEGHLVTRNPDAGHVKRIYYVSKSVQEVLELNVKVGERLKITSLGLKIFERQSSKDGSPCTFRLSSEGLPLLLPYITKQILYASAIDFQHLLQYRTIKFPDFVDAKFGEEASALLPGCCVVVLWEGHQNIDSIAMDPSAIAIVCWKGKTNLCVMVSPLDGKELLERICLRYGLKIPKADDVKPSMKIDGSDEQPDLSTEAVDPEAVPESKASDMEIADAKEVE

SEQ ID NO: 33350 - protein, 84 aa, Oryza sativa
MCAQSPLGQSDFKNVARRATHTILALSGIAHNEDFVVSTPHPLPSHCNHACDGQEPAFLMRTCCSSCFNSFVGGVVSYIAEMFT

SEQ ID NO: 33351 - protein, 242 aa, Oryza sativa
MLDDEADFVEASPIVHSVNDSGIVVRKHLIIITTTSVRPHQAYYLNRLAHVLKDVPPPLLWIVAEWPYQSRETAEILRSSGIMYRHLICNRNTTNIRKIVVCQKNNAIFHIKKHRLDGIVHFADEERAYSADLFEEMRKIRRFGTWPVAIHVGTKYRVVLEGPVCKGNQVTGWHTNQRRGVSRRFPIGFSGFAFNSTILWDPQRWNSPTLESIIVHSGGRGGLQLNTPFQDLVSSVNLLHNY

SEQ ID NO: 33352 - protein, 252 aa, Oryza sativa; identical to SEQ ID NO: 30657

SEQ ID NO: 33353 - protein, 439 aa, Oryza sativa
MATITTQLRSALLSPAASPSRRARRAPSSVRCDSSAASSLSASASLDDDFDKKQFRHNLTRSDNYNRKGFGHKKETLELMSQEYTSDVIKTLKENGNQHTWGPVTVKLAEAYGFCWGVERAVQIAYEARKQFPDDRIWLTNEIIHNPTVNKRLEDMGVQNIPVDAGIKDFDVVEQGDVVVLPAFGAAVEEMYTLNEKKVQIVDTTCPWVSKVWNMVEKHKKGDYTSIIHGKYSHEETVATASFAGTYIIVKNIAEASYVCDYILGGQLDGSSSTKEEFLEKFKNAVSPGFDPDVDLVKVGIANQTTMLKGETEEIGKLVEKTMMRRFGVENVNDHFIAFNTICDATQERQDAMYQLVKEKVDLILVVGGWNSSNTSHLQEIGELSGIPSYWIDSEQRIGPGNKISYKLNHGELVEKENWLPEGPITRSYFWRLNSGQGC

SEQ ID NO: 33354 - protein, 297 aa, Oryza sativa
MASRRLAPLLVLLLSSSLAAGQSTGDTVVFWGRNTDQLEGSLREACDTGLYTTVIISFLSAFGYIPGTYKLDISGHTVSAVGPDIKHCQSRGILVLLAIGGQGGEYSLPTSQAAVDLEDYLWNAFLGGGRPGVARPFGDAVVDGIDFFIDQGATEHYDELARRLYAHNKDYKGRLGVMLTATARCVFPDQRLQAALSTGLFSRIHVKVFGDGRCASRREELEKWMAAYPQSRVLVGVVASPEADRDGYVSHKDLYYDVLQFINKLPNYGGIMVWNRYWDKKTGWTAGNEPGLLDQVL

SEQ ID NO: 33355 - protein, 428 aa, Oryza sativa
MGLSRRFLNLIVDNRIPGAKSLRCIDLTLARYKLFNTTTPAALILNGKISESERPQDSTPWAGADNNEKEAAATLKIGTIQLPTPIMNFRSSAEYLSWYINCIPLAGRKVLCTDQSGRACLFDADTCKVDTLPSLHKPKCLPYSIFIPSADDKDDHDDNSNGGGSVYIMDTCLNHIPRDNIQLSSQFEAFVYRRSTLTSFTKSWQCQRLPPPPFVCDPKYKHASPHKIISYAVVDGGSRICISVDGAGTYCLDTVKHTWIQIGEWTLPFIGKVEYVPELKLWFGICANDWKQFGAADLSTILSTMDSQPQLVGSWKELEAPQEWTEMQHPHLVNLGSGRFCVARFYHSWTPTAGLFGSDLGELFFTVLTGTDVVQCVVHDGNGTGNASCNDSCNNPYGSNGKVELRMIKHNSKCHMSYGTDGNIKVLF

SEQ ID NO: 33356 - protein, 222 aa, Oryza sativa
MGSEGPSGVTVHVTGFKKFHGVAENPTEKIVRNLESFMEKRGLPKGLTLGSCTVLETAGQGGLGPLYEVFESAIVDKEYGLNDQGQVILLHFGVNSGTTRFALENQAINEATFRCPDELGWKPQRAPIVSSDGSISNLRKTTVPVNEVNKSLQQMGFDVAPSDDAGRFVCNYVYYQSLRFAEQRGIKSLFVHFPLFTTISEEVQMNFVATLLEVLASQNYAQ

SEQ ID NO: 33357 - protein, 155 aa, Oryza sativa
MGQQLPQLNCLGLLVISGIRDTFSKKYIEGIASSSSSTPESRKMALAKAKETVASAPVVVYSKSYCPFCVRVKKLFEQLGATFKAIELDGESDGSELQSALAEWTGQRTVPNVFINGKHIGGCDDTLALNNEGKLVPLLTEAGAIASSAKTTITA

SEQ ID NO: 33358 - protein, 542 aa, Oryza sativa
MAAATAAVFALLMASALAGAAAGGDIVHHDDEAPKIPGCSNDFILVKVQSWVNGKEDDEYVGVGARFGPQIVSKEKHANRTRLMLADPIDCCTSPKEKVSGDILLVQRGKCKFTKKAKFAEAAGASGIIIINHVHELYKMVCEKNETDLDINIPAVLLPRDAGFALHTVLTSGNSVSVQQYSPDRPVVDTAEVFLWLMAVGTVLCASYWSAWSAREALCEQEKLLKDGREVLLNVENGSSSGMIDINVASAIMFVVVASCFLIMLYKMMSSWFVELLVVIFCVGGVEGLQTCLVALLSRWFRAASESFFKVPFFGAVSYLTLAVSPFCIVFAVLWAVHRHFTYAWIGQDILGIALIITVIQIVRVPNLKVGSVLLSCAFFYDIFWVFVSKRWFHESVMIVVARGDKTDEDGVPMLLKIPRMFDPWGGYSIIGFGDILLPGLLVAFALRYDWAAKKSLQTGYFLWSMVAYGSGLLITYVALNLMDGHGQPALLYIVPFTLGALISLGWKRGELWNLWSKGEPERVCPHHMHMQPQPKTPPLVQ

SEQ ID NO: 33359 - protein, 308 aa, Oryza sativa
MLPTISSKDWLDIDFGISEGVDFIAVSFVKSAEVINHLKSYIAARSRGSDIAVIAKIESIDSLRNLEEIIRASDGAMVARGDMGAQIPLEQVPSVQQKIVKLCRQLNKPVIVASQLLESMIEYPTPTRAEVADVSEAVRQRADALMLSGESAMGRYPEKALSVLRSVSLRIEKWWREEKRHEELELKDVSSSFSDKISEEICISAAKMANKLEVDAVFVYTNTGHMASLLSRCRPDCPIFAFTTSTSVRRRLNLQWGLIPFRLSFSDDMESNLNRTFSLLKARGMIQSGDLVIALSDMLQSIQVMNVP

SEQ ID NO: 33360 - protein, 379 aa, Oryza sativa
MPRSRGSELPQRASPRAPLHLKTTACSDANGAHHRTVVDRSSPKLADRHSPRSPLHEKKRAGTRVAELETKLGKVQDELKKLREQLATAEAAKKDAQVALEEAKKRVGTKGSPASAAAASPRSPSPVAVETPKKTEQQLKVTEPPAEEESSINSPATDVFEVVRTESGDKENQSAVGAEDGEEVSCGIKAALAEKELEEEETKKMIEEESIDATAIDSGEKENPEVAELKAKLMAKDMEVAILTADNAELKKQVGEAAEAAKKAEEEAAAKASLVEQDLKERAAREARMGEQLRASEAARETLEAEMRRLRVQTEQWRKAAEAAAAVIGGDAHFVGHNGNGWGSPATMPDDCDDEGFGGKRKGAGIRMLGDLWKKKGSK

SEQ ID NO: 33361 - protein, 439 aa, Oryza sativa
MECCFVVPSEKTPKHVLWLSPLDIVLANRGALTPLVHFYRRRHDAAGGGGGFFDVGRLKEALAKALVAFYPLAGRFRVGGDGRPEIDCNADGVFFAVARSELAVDDILADLKPSPELKRLFIPRTEPPSAVLAVQVTFLRWGGIVLGTAMHHAAVDGHSMFHFLQTWAAFCRDGDAAVVELPCHDRALLRARPRLAIHPDASSVFCPKLNLRPPSASGSGLISAKIFSISNDQIATLKRICGGGASTFSAVTALVWQCACVARRLPLCSQTLVRFPVNIRRRMRPPLPDRYFGNALVEVFAAAAVEDIVSGTLAAIAARIKGVIGRLNDDEMLRSAIDYNEMAGMPDRPDNGSLPETELRVVSWLGIPLYDAVDFGWGKPWAMSRAESLRGGFFYVMDGGAADGDGGDAAAVRVLMCMEAANVEEFERLLRAKFVYPRI

SEQ ID NO: 33362 - protein, 260 aa, Oryza sativa
MKREAKKDTTSLGSTTSSVSDVRSNMIGEIENRSTFLLAVKVDVETQGDFVESLANEVRAASFVNIDDVVAFVNWLDEELSFLVDERAVLKHFDWPESKTDALREAAFEYQDLLKLEHKVSSFTDDPKLACEEALKKMYSLLETVEQSVYALLRTRDMAISRYREYGIPVDWLSDSGVVGKIKLASVQLAKKYMNRVATELDALQGTEKEPNREFLLLQGVRFAFRVHQFAGGFDEESMKAFEELRSKMCTTQTSAPQIS

SEQ ID NO: 33363 - protein, 206 aa, Oryza sativa
MFVVGVNEKEYKPDIDIVSNASCTTNCLAPLAKVINDRFGIAEGLMTTVHAITATQKTVDGPSSKDWRGGRAASFNIIPSSTGAAKAVGKVLPALNGKLTGMAFRVPTVDVSVVDLTVRLEKPASYDQIKAAIKEESEGKLKGILGYVEEDLVSTDFQGDNRSSIFDAKAGIALNDNFVKLVSWYDNEWGYSSRVVDLIRHMYNTQ

SEQ ID NO: 33364 - protein, 173 aa, Oryza sativa
MDGSRILIFFQTKKDCDKVTRQLRMDGWPALSIHGDKAQAERDYVLAEFKSGKSPIMAATDVAARGLDVKDIKCVINFDFPTTLEDYIHRIGRTGRAGASGTAFTFFTLSNAKFSRNLVKILREAGQVVNPALESMAKSASSMGGGNFRSRGRGGFGNRSGSNSIPIRGRRPY

SEQ ID NO: 33365 - protein, 86 aa, Oryza sativa
MGPVPWVIMSEIFSIEIKAIAGSLVTLVSWIGSFAISYSFNFLMDWNSAGTFFLFSAASLVTVLFVARLVPETKGKALEEIQESFT

SEQ ID NO: 33366 - protein, 263 aa, Oryza sativa
MMSGAATPSTSSAAHLRNRIGGGSGVPPDSLRGLDLVSSSSKGGAHQFDPPKLVQPLSVQFQFGATAHRYPFQQHQHQQKLQAEMFKRSNSGISLKFDSPSATGTMSSAFMSSLSMDGSVASLEGKPPFHLISGPVASDPVNAHHVPKRRCTGRGEDGSGKCATTGRCHCSKRRKLRIKRSIKVPAISNKIADIPPDEYSWRKYGQKPIKGSPHPRGYYKCSSVRGCPARKHVERCVDDPAMLIVTYEGEHNHTRLPTQSAQT

SEQ ID NO: 33367 - protein, 37 aa, Oryza sativa
MMLEASVKYCIHYSLFKVVSLMSRTLDIPSRQDFEHF

SEQ ID NO: 33368 - protein, 389 aa, Oryza sativa
MAARSPYFVPESEGIRAGESPAAALRRILASPGAHQAPCCFDALGARLIQRAGFPICFMGGFCVSAARLGLPDAGLISYGEMVDQGRLITEAVSLPVIGDGDNGYGNAMSIKRTVKGYINAGFAGIMLEDQVAPKACGHTEGRKVISREDAIMHIKAAVDARKESGSDIVIIARSDSRQAISIDEALWRVQAFADAGADVLFIDALASIEEMKAFCAVSPKVPKMANMLEGGGKTPILSPAELQEIGFSLVVYPLSLIGVSMLAMEDALIAIKSTGAPRPGSLPSFQEIKDTLGFNRYYKEEKQYATVQQAQPLSTNIVLRLKITEKSGTQKINEGIPAGILEKISKAIPGLAGVNLTEILQGADQSQKGKLLLDREDATGDRIQVSIE

SEQ ID NO: 33369 - protein, 170 aa, Oryza sativa
MASSSKLSSAFALAVVVLLLAGGVMPAAEAASAHLHFFMHDTLTGAAPTAVQVVNGPRSHFGDTIVIDDVLTAAASRSSAAVGRAKGQYVWASSGNPELLVTMEVVLTSGPFAGSSVTVVGRDDIAAPVRELSVVGGTGEFRMASGYVLWKTVSLDHPNAILELDVYVNP

SEQ ID NO: 33370 - protein, 360 aa, Oryza sativa
MGAGSDRSLKITENERNPTMLANGCLPYNTQAHPLSGQILPKAPTLCSAFQNVSSFMEPVNLDAFGFQGAQNVAMLNKTSLPNGNPSLFDNAAIASLHDSKEFLNGGSIPSFGTVLQALGAGGLKAAQQEQNIRNIPLPTFTSGSHLAVTDAQGPPLPSKIPPLIHDHNSEYPINHSSDVEPQANSAPGNSANAKPRTRARRGQATDPHSIAERLRREKISERMKNLQVLVPNSNKADKASMLDEIIDYVKFLQLQVKVLSMSRLGAPGAVLPLLRESQTECHSNPSLSASTISQGPPDMPDSEDSSAFEQEVVKLMETSIISAMQYLQNKGLCLMPIALASAISNQKGMAAAAAIPPEK

SEQ ID NO: 33371 - protein, 234 aa, Oryza sativa
MAANVGESTSGSSSGGADSGGSFECNICFELPQEPIVTLCGHLFCWPCLYKWLHIHSHSPECPVCKAVVEEDKLVPLYGRGKDRVDPRSKNVPGADIPNRPAGQRPATAPQANPNTHFPNANPNPWFMGGGIPLANARWGNYTFSAAFGGLFPLLSFQVHGFPDATAYGQPAGFPYGYGHGHGHGHGHAFHGGHAHAAAAPRHGPPGQQQQADVYLKALLILVGFLVIASLITF

SEQ ID NO: 33372 - protein, 77 aa, Oryza sativa
MFAVRRPIRRDRRGGSGGVGALGAEGGGPRLGGGEAAAAVGTSRRCLGLSRFYTLERRRRRSKLFFFHTFQGHGRIF

SEQ ID NO: 33373 - protein, 409 aa, Oryza sativa
MRELQEAFRATFGRQTTVKDKLWLKRRIAMGLINSCDVPSSGCVVRDYKVIAMGAKQEIPVVEAIPKMELEANLVRDQVMNPGHERDLPSSLSYHSEEQQRSSKRLKRVPTDNDEPQVTIFAEQGTTKRIRKPTKRYIEELSDIDTHESTGRLSSPGKRHVYDEVLLRPRIAPLHEVDSLSTAYPTREDTLGGCSVHVPYVSRMRRGRPRSNFIPFLDPEPSVECTEAPAADVVNLEKEGERKNHQKNTGKKGVHVETSCEKDVQGLQDKDFCDSDDNPKTKRGGKRKHHRAWTLCEVVKLVDGVARYGAGKWSEIRRLAFSSYSYRTSVDLKDKWRNLIRASQTQLSTENDGVCPRKSNPSAIPIPVSILLRVKKLAEMQSQAGDVRVPIKFSGQSTTVVQGKVSGFL

SEQ ID NO: 33374 - protein, 374 aa, Oryza sativa
MKLEHDFHMAIGEAEDNYANNSRLQRRALLKTKPVLDKAVRQVCMALHPRAMIVADLGFSVDANTLLFVSDVINTVADAQHHDELRCHPMELQFFLNDLSGNDFNQVFKSVKQFTKSIAASHPKGVALPPFYISGLPGSYYTRLFPCQSVHLFHSSYCLHWRSQMIKDMDEKMSDINGGNIYIAKSMPPSVVKMFQDQFQKDMSLFLKLRHQELVPGGQMLLTFLGRKKEGVLDGDLSHLCALLAEALQALVTEGLVEREKLESFNLPLYGPSIDEVKAVIALNKLFGIDHIQLFESNWDPYDDMENDGMCSSPQHGVNVAKSIRAVFEPLLASHFGECILDELFQRYARNVERHLAEDNTKYSVIVLLLNRKV

SEQ ID NO: 33375 - protein, 150 aa, Oryza sativa
MDLLWSDPTENDSVEGLRPNARGPGLVTFGPDRVMEFCNNNDLQLIVRAHECVMDGFERFAQGHLITLFSATNYCGTANNAGAILVLGRDLVVVPKLIHPLPPAITSPETSPEHHLEDTWMQELNANRPPTPTRGRPQAANNDRGSLAWI

SEQ ID NO: 33376 - protein, 335 aa, Oryza sativa
MALAHQLVANRPLLPTPAPRVPRASISNARPQPLLGRDCRLTLLRAERRTLAVARASSSSSSSSSQTEPKSEGGEAAAAEGEEQPYEEYEVEILKPYGLKFAKGRDGGTYIEAILPGAAADQTGKFEVGDKVLATSAVFGEEIWPAAGYGQTMYCIRQRVGPLYMKMEKRFGKWDGAAELSEKEIIRAERNSGVISNRVREIQLQNYQRKMEQKMQREEDLRMGLRLYKDGKYEEALEKFESVLGSKPEINESSIASYNVACCYSKLDRIQAGISALEDALKAGYEDFKRIRTDPDLENLRKTEEFNVLLNKYDESFINENAINAIKSLFGFNKK

SEQ ID NO: 33377 - protein, 395 aa, Oryza sativa
MAVLSVADSPPVSAIGFEGYEKRLEITFSEAPVFADPNGRGLRALSRAQIDSVLDLARCTIVSELSNEVFDSYVLSESSLFVYPYKIVIKTCGTTKLLLAIPKILELAEELSLPLEAVKYSRGTFIFPEAQPSPHKNFSEEVAVLNRYFGGLKSGGNAYVIGDPAKPGQKWHVYYATQHPEQPVVTLEMCMTGLDKKKASVFFKTSADGHTTYAKEMTKLSGISDIIPEMEVCDFDFEPCGYSMNAIHGPAFSTIHVTPEDGFSYASYEVMGFNPASLAYGDLVKRVLRCFGPLEFSVAVTIFGGRNHAGTWAKGLDVGAYSCSNMVEQELPSGGLLIYQSFTATAEIATGSPRSVLHCFADENTEKAGKMEALYWEDDAVEEIDGTEGKKMRSC

SEQ ID NO: 33378 - protein, 160 aa, Oryza sativa
MSDSEEHHFESKADAGASKTYPQQAGTIRKNGYIVIKNRPCKVVEVSTSKTGKHGHAKCHFVAIDIFNGKKLEDIVPSSHNCDVPHVNRTEYQLIDISEDGFVSLLTESGNTKDDLRLPTDDSLLGQIKTGFGEGKDLVVTVMSAMGEEQICALKDIGPK

SEQ ID NO: 33379 - protein, 317 aa, Oryza sativa
MPWLAIPQEDKMGEKLARYFELRGLPTLVLIGPDGKTLNNNVADIIDEHGQDAWEGFPFTAEKMEILAEKAKAKAELQTLESLLVIGDLDFVLGKDGAKVPVSELVGKTVLLYFSAKWCGPCRAFLPKLVDEYNKIKEKHNDFEIIFISSDRDQSSYDEFFSGMPWLALPLGDERKQHLSKTFRVRGIPSLVAIGADGRTVARDAKTPLTAHGADAFPFTEERLLEMERKIDEMAKGWPGKLKHELHDEHELVLTRCTTYGCDGCDEMGSSWSYRCRECDFDLHPKCALGKEEEKKGDDEAEAEADPACEGGVCRKA

SEQ ID NO: 33380 - protein, 317 aa, Oryza sativa
MIMLLQEMENHPVQCMAKTNYDFLARNNYPMKQLVQRNSDGDSSPTKSGESHQEASAVSDSSLNGQHTSPQSVFVPSDINNNDSCGERDHGTKSVLSLGNTEAAFPPSKFDYNQPFACVSYPYGTDPYYGGVLTGYTSHAFVHPQITGAANSRMPLPVDPSVEEPIFVNAKQYNAILRRRQTRAKLEAQNKAVKGRKPYLHESRHHHAMKRARGSGGRFLTKKELLEQQQQQQQQKPPPASAQSPTGRARTSGGAVVLGKNLCPENSTSCSPSTPTGSEISSISFGGGMLAHQEHISFASADRHPTMNQNHRVPVMR

SEQ ID NO: 33381 - protein, 50 aa, Oryza sativa
MPEASRCSAVALVLRSVTSMLLSTCHLVCVSPFVSHGDVFMLLLMNNVSS

SEQ ID NO: 33382 - protein, 324 aa, Oryza sativa
MLMASEAWLSPASRLFHPPRSSTAAFFSASGLPRLPRRSSCALATSTRGRRLRLGATDQQQQQGKQDGDEVVDSNVLQYCSIDGKGKKAEKRSLGEMEQEFLQALQAFYYDQKAIMSNEEFDNLKEELMWEGSSVVMLSPDEQRLLEASMAYAAGNPIMSDAEFDQLKLRLKKDGSDIVTEGPRCSLRSRKVYSDLTVDYLKMFLLNVPATTLALGLFFFIDELTGFEINIFQLPEPFGFIFTWFAALPLILFIAQSITNAIVNDFLILKGPCPNCGAENLSFFGTILSVSSGGETNKVKCADCSTEMVYDSKSRLITLPEPSQ

SEQ ID NO: 33383 - protein, 348 aa, Oryza sativa
MAAMASPPPPTRVCVTGAGGFIGSWLVKLLLSRGYAVHATLRDPCDPKNAHLKQLDGASEMLSLFKADVLDAGELSAAIAGCEGVFHVASPVPGDKIVDPELEVMAPAVKGTLSVLEVCSSSKKVQKVVVVSSTAAVHYNPNWPPGKPKDESCWSDRKICMEKKEWYSASKVIAEKMALEYAEKKGLNVVTVCPCLVFGPQLQPTVNTSNELLIYITKGGPNVMRNMLLHIVDVRDVAEALILVYEKPESSGRYLCAPYHISPKATVEFLKNIYPNYNYVKCSAEVNGKTEIFTPISSEKLKSLGWKPRKLEETLTDSIEYYEKTGILQDAGGRPCVLPYLFHFLVEN

SEQ ID NO: 33384 - protein, 230 aa, Oryza sativa
MGESEKLVANLFQMARENAPSIIFIDEIDSLCGQRGEGNESEASRRIKTELLVQMQGVGHNDDKVLVLAATNTPYALDQAVRRRFDKRIYIPLPDLKARQHMFKVHLGDTPHNLNESDFENLARRTDGFSGSDIAVCVKDVLFEPVRKTQDAMFFFKADGDMWMPCGPKQSGAVQTTMQELASKGLAAKILPPPISRTDFEKVLARQRPTVSKKDLEVHERFTKEFGEEG

SEQ ID NO: 33385 - protein, 353 aa, Oryza sativa
MERGKLDKGGYSAISGPRVVEKAFGDMSITGSGFGSGSGLGGLSMDMDSFASKPKGRPSAAATAPGKGLGMKLGKTQKTNQFLESLKAEGEVILEDVQPSSVQSRVSPLPPSDPVTVTIEEKLNVTVKRDGGVNNFDVQGTLALQVLNDTDGFIQLQIENQDVPGLSFKTHPNINKDLFNSQQVVGAKDPNRPFPSGQNETPLVKWRIHGMDESSLPLSVNCWPSVSGNETYVNIEYEAAEMFDLHNVVISIPLPALREAPSVRQIDGEWRYDSRNSVLEWSILLIDQSNRSGSMEFAVPPADPSTFFPISIGFSASSTFSDLKVTGIRPLKDGNPPKYSQRARLVTANYQVV

SEQ ID NO: 33386 - protein, 167 aa, Oryza sativa
MMDHIGNRNQQTPFDMTQAIQHDPHRSFSSNMNPMQQSLHAPRAPHVDPAAHHLMMQHISTPGNFPPEGLQRGVPPSQPVHHMPGYRPEMSNVNNFHMHPRQPNYGEFGLMMAGPSGPELRGNHPDAFERFLQMELTARSKQMHPAMAGHVPGGMYGPELDMNLRYR

SEQ ID NO: 33387 - protein, 191 aa, Oryza sativa
MVVVAAAVMMVVPGLHVANLACASGMEVAKDVRRRTVSGAPKVIQASASLMGVGGVANFQNARRVHREAQSSARRMVEESDAHSRVATKELKAALSFARATVEASDAYFRVVVCARRACMAELNTVLLMVVGRGVLFLVAPRVLEGVQSTACAMEVARGASLRAARRVRRGAPISARLMVEVSAAHGARLT

SEQ ID NO: 33388 - protein, 445 aa, Oryza sativa
MTVRDDSGTIQLYCEKDSLTEEQFEQLKTIIDIGDIIGANGSIKKTEKGELSVYVKNFEILTKSLLPLPDKYHGLTDVDKRYRQRYVDMIANPEVADVFRTRAKAVSEIRKTMESFGFIEVETPVLQGAAGGAEARPFITHHNSLQRDLYLRIATELHLKRMLVGGLEKVYEIGRIFRNEGISTRHNPEFTTIEMYEAYSDYESMMNLAEEIVTRCAMATHGKLRVDYQGTEISLERPWRRETMHSLVKEATGIDFNSFGEDLESAKNAARGIKTESNENISLQACSSVGHVLNEVFETVVESSLVQPTFVLDYPVEISPLAKPHRRYAGLTERFELFICGREIGNAFSELTDPIDQRGRFENQIKQHNAKRAAMTKEVKSTEGKHEEDDFSYEVTLDEDFLTSLEYGMPPASGMGLGIDRLVMLLTNSASIRDVIAFPVLKIQQ

SEQ ID NO: 33389 - protein, 82 aa, Oryza sativa
MASADAILSSQVAGECLKINKLAAASPVKVVQVQKPSKETKNISGAPVAAAAVRVVVSKQVMKPRFAVELDGLNCFETLVPR

SEQ ID NO: 33390 - protein, 315 aa, Oryza sativa
MYAANKSMDGCAFCNADGDFLIVPQQGKLLITTECGKLLVPPGEIVVIPQGFRFAVDLPDGPSRGYVSEIFGTHFQLPDLGPIGANGLASARDFLSPTAWFEQVHRPGYTIVQKYGGELFTATQDFSPFNVVAWHGNYVPYKYDLSKFCPFNTVLFDHADPSVNTVLTAPTDKPGVALLDFVIFPPRWLVAENTFRPPYYHRNCMSEFMGLIYGIYEAKADGFLPGGASLHSCMTPHGPDTKTYEATISRPDANEPSRLSGTLAFMFESALIPRVCQWALDSPSRDLDYYQCWIGLKSHFSHDNGGATSEEPCRK

SEQ ID NO: 33391 - protein, 175 aa, Oryza sativa
MLLSPSCRSSSAGFSGDSVRQIGSQFTMFLTAPLQAFCHLIGNNGVDIDRDTYNKAEELLSLSLNEWATTLVASSSLHPVWVEVLGDPLLRRLLLRFIFCRAAHSIFKPTYHKVDFLPTCTPPLPESVDAESMLSQCCLLRVASFFGATNQFSFSEVTTWPEVDVEEAAVVNPSI

SEQ ID NO: 33392 - protein, 212 aa, Oryza sativa
MERLVLACGGEAVDSVDDLTEDCLGWAGLVYEHTLGEEKYTFIENVKNPRSCTILIKGPNDHTIAQIKDAVRDGLRSVKNTVEDEAVVLGAGAFEVAAKKHLIDNVKKTVKGRAQLGVEAFADALLVIPKTLAENSGLDTQDVIVSLQNEHDRGLVVGLNHHSGEPIDPQMEGIFDNYSVKRQIINSGPIIASQLLLVDEVIRAGRNMRKPT

SEQ ID NO: 33393 - protein, 25 aa, Oryza sativa
MNVGDAHYDPLFPFGYGLTTQAHSS

SEQ ID NO: 33394 - protein, 179 aa, Oryza sativa
MIVSKDNNILESFSATNQASTLQFPNYSSLEGSVFERFDPDLIKKLSTSCLVMQNHKYGISPKTLRENVALSSFFKILTTSPDENGEVYVSTVQANKYPITCTQWHPEKAIFEFGKQMIPHSEEAVQVTQNFANYFISQARKSQNRPPADKVLDNLIYNYSPTFIGKKSKSFDVVYIFS

SEQ ID NO: 33395 - protein, 412 aa, Oryza sativa
MGIKGLTKLLAEHAPGAAVRRRVEDYRGRVVAIDTSLSIYQFLIVVGRKGTEVLTNEAGEVTSHLQGMLNRTVRILEAGIKPVFVFDGEPPDMKKKELAKRSLKRDGSSEDLNRAIEVGDEDLIEKFSKRTVKVTKKHNEDCKRLLSLMGVPVVQAPGEAEAQCAALCENHKVFAIASEDMDSLTFGARRFLRHLTDLSFKRSPVTEFEVSKVLEELGLTMDQFIDLCILSGCDYCENIRGIGGQRALKLIRQHGYIEEVVQNLSQTRYSVPEDWPYQEVRALFKEPNVCTDIPDFLWTPPDEEGLINFLAAENNFSPDRVVKSVEKIKAANDKFSLGRGKLLAPVANLTGSTSTAGKEPKCILGGPGQVMKARSPLQVCKSSSLNFIHDNSKAFMLGRRSGFLRISTYASI

SEQ ID NO: 33396 - protein, 182 aa, Oryza sativa
MASEKKQSNPMREIKVQKLVLNISVGESGDRLTRASKVLEQLSGQSPVFSKARYTVRSFGIRRNEKIACYVTVRGEKAMQLLESGLKVKEYELLRRNFSETGCFGFGIQEHIDLGIKYDPSTGIYGMDFYVVLERAGYRVARRRRCKSRVGIQHRVTKEDAMKWFQVKYEGVILNKAQANTS

SEQ ID NO: 33397 - protein, 46 aa, Oryza sativa
MADSCYVVADGCGVQSFVELSNAGSNLLIFSPLSCSTLSIVTISGC

SEQ ID NO: 33398 - protein, 56 aa, Oryza sativa
MKMIMKKKPFRDQEFSSRNFRKVQLQEEAVGFGCFVYSLKGSEEKAPGCVFVCSTN

SEQ ID NO: 33399 - protein, 204 aa, Oryza sativa
MVNYVDEIRAQGFELEYLNIGGGLGIDYHHTDAVLPTPMDLINTVRELVLSRDLTLIIEPGRSLIANTCCFVNRVTGIKSNGTKNFIVVDGSTAELIRPSLYGAYQHIELVSPSPDAEVATFDIVGPVCESADFLGKDRELPTPDKGAGLVVHDAGAYCMSMASTYNLKLRPPEYWVEDDGSIAKIRRGESFDDYMKFFDNLSA

SEQ ID NO: 33400 - protein, 185 aa, Oryza sativa
MSLFICIFATGILEMRWSGVGIDDWWRNEQFWVIGGVSSHLFALFQGLLKVIAGIDTSFTVTSKGGDDEEFSELYTFKWTTLLIPPTTLLLLNFIGVVAGVSNAINNGYESWGPLFGKLFFAFWVIVHLYPFLKGLVGRQNRTPTIVIVWSILLASIFSLLWVRIDPFLAKNDGPLLEECGLDCN

SEQ ID NO: 33401 - protein, 302 aa, Oryza sativa
MGAMDVQLESTAVQHGQAKINVEEHALVSLLSDEKYATEKTEDVDPDDYEKLEEGIMQYGCARYRRRCRIRAPCCNEIFDCRHCHNETKNSIKIDAVKRHELPRHEVQQVICSLCGTEQEVRQVCISCGVCMGKYFCEVCKLFDDDVSKQQYHCNGCGICRIGGKENFFHCSKCGCCYSIVLKNSHACVEGAMHHDCPICFEYLFESTNDVSVLPCGHTIHVKCLREMEEHCQFACPLCSKSVCDMSKAWERLDEELATISDTCDNKMVRILCNDCGATSEVQFHLIAHKCQKCKSYNTRQI

SEQ ID NO: 33402 - protein, 208 aa, Oryza sativa; identical to SEQ ID NO: 30754

SEQ ID NO: 33403 - protein, 440 aa, Oryza sativa
MGNDATHCASSFFYEKAKKHLIERLDNQKNDTSQIVHKSKPFGKLLSYSENDTFSQTDCPQEDVKLSEDSTASSALLTTEQEDISSNSDPPMKFGELIPLDTSTSANTQLDEFKTDHASHPVKEGTISQELTSEGIDSMNDATDTPQVSIQIETSTESLEQINTDQCFAEESQTMNALPEVSLHTPEKVNEQFNHSPSAVVGLTKPSILTFSCSPENADDKEERLSPQSVLDSFLGDGISPSHKTRTQDELSMPSTRILFKEDDTPSGTPTLQNTPQEAILDDKQARLSFIKVVLEASDFLSEESSEIWYVDGSLLDTSVLAEVGTLYCLTDDAVFLFDCVEEALCKIRDNFFGCDPWVAYLKHSVRPAPVGTGLIQEVDNCIDSLVSDEVPSTLDRVVLKDLESGSWMDLRVDTEEVAIEVWDTLLDDLLEEMVFDLWL

SEQ ID NO: 33404 - protein, 343 aa, Oryza sativa
MAVVQANNLLEDQCQIESGPLSFLDSGPYGTFVGVYDGHGGPETACYINDHLFHHLKRFASEQNSISADVLKKAYEATEDGFFSVVTKQWPVKPQIAAVGSCCLVGVICGGILYVANVGDSRVVLGRHVKATGEVLAVQLSAEHNVSIESVRKELQSMHPEDRHIVVLKHNVWRVKGLIQVCRSIGDAYLKRSEFNREPLYAKFRLREPFHKPILSSEPSISVQPLQPHDQFLIFASDGLWEHLTNQEAVDIVHSSPRNGSARRLIKAALQEAAKKREMRYSDLKKIDRGVRRHFHDDITVIVVFLDSSLVSRASTYRGPSVSLRGGGVNLRSNTLAPYASQM

SEQ ID NO: 33405 - protein, 362 aa, Oryza sativa
MIQAAHVGIGISGQEGMQAVMASDFAIAQFRYLTDLLLVHGRWSYLRLCKVITYFFYKNLTFTLTQFWFTFQTGFSGQRFYDDWFQSLYNVIFTALPVIMVGLFDKDVSASLSKKYPKLYQEGIRNTFFKWRVIAVWAFFAFYQSIVFYYFTAAASRYGHGSSGKILGLWDVSTMAFTCVVVTVNLRLLMSCNSITRWHYISVAGSITAWFMFIFIYSAIMTSFDRQENVYFVIYVLMSTFFFYLTLLLVPIIALFGDFLYLSIQRWFFPYDYQVIQEMHRDEPHEYSRIQLPETSHLSPEEARSYAISMLPRESSKHTGFAFDSPGYESFFASQQGVGVPHKPWDVARRASMKQRQKTGGS

SEQ ID NO: 33406 - protein, 335 aa, Oryza sativa
MATLCHSAHTRTFGKIGRRNAAKVLCSTQMPPSQSTIKVVIIGATKEIGRTAIAAVSKARGMELAGAIDSQCIGLDAGEISGMEEALEIPVLNDLTMVLGSIAQVLASSLYYKMLISTCTVVLLYTSRVCYLKLMFFQTRATGVVVDFSEPSTVYDNVKQAAAFGLNSVVYVPKIELDTVTELSAFCEKASMGCLVTPTLSIGSVLLQQAAIQASFHYNNVEIVESRPNPSDLPSQDAIQIANNITDLGQIYNREDMDSDNPARGQILGEDGVRVHSMVLPGLASSTSIHFSGPGEIYTLRHDVTNVQCLMPGLILAIRKVIRLKNLIYGLEKFL

SEQ ID NO: 33407 - protein, 389 aa, Oryza sativa
MRRLATHLHRLSHRAIPSPPPSRPPTTTSLPFLLSRRLLSDDAAPPPAADVPNKELKRRLETYYGVDDEAELPSVTEAVLERKLADVHSETDDELIEELRSKPLPEVRDRDFESDFEEMHDTDEELDNLYNARQYVEKKIKSDEFFNMDDDKWNKMIKKAVDNGHLGNMNECENILEDMLHWDKLLPDEIKKKVEAKFNELGDMCEKGELEPEQAYELFKEFEDKMVSECTELMEAENPTDVDEFSKMENKSVKLDDPPGEGPVLRWESRIVFAPGGDAWHPKNRKVKLSVTVKELGLSRHAFRRLREVVGNRYNSGKDELTITSERFEHREENRKDCLRTLYAVVEDANKANKLADDARNAYVKNRLKANAQFMERLKVKTQKLRVAA

SEQ ID NO: 33408 - protein, 370 aa, Oryza sativa
MIVGVLTNAAILLCYFWKYLSVEKDQEGGQPAGPEVVADDEVTSHRFTPARMSHVSSLNPDDMDCISEPIIRSNSVRSTSANENLRSRSVNSEADIQLAIKSLRASSMSHEMVEVSTVTDRRDEGASSRKFTRTASQQRSVIIEDSPPSPASNGDKEKEDEVAEKRWRVFVWKTAVYLITLGMLIALLMGLNMSWTAITAALVLLALDFTDAQACLEKVSYSLLIFFCGMFITVDGFNKTGIPNTLWELVEPYSRIDSAKGVALLAVVILILSNVASNVPTVLLLGTRVAASAAAISHDSERKAWLILAWVSTVAGNLTLLGSAANLIVCEQARRAQFFGYNLSFWSHLRFGVPSTIVVTAIGLLIVTSY

SEQ ID NO: 33409 - protein, 160 aa, Oryza sativa
MSGGIARGRLAEERKAWRKNHPHGFVAKPETLADGTVNLMIWHCTIPGKQGTDWEGGYFPLTLHFSEDYPSKPPKCKFPQGFFHPNVYPSGTVCLSILNEDSGWRPAITVKQILVGIQDLLDQPNPADPAQTDGYHLFIQDPTEYKRRVRLQAKQYPPIV

SEQ ID NO: 33410 - protein, 245 aa, Oryza sativa
MELDKKFKVLCLHGFRTSGSFLKKQISKWNPSIFQQFDMVFPDGIFPAGGKSEIEGIFPPPYFEWFQFNKDFTEYTNLDECISYLCDYMVKNGPFDGLLGFSQGATLSLIGYQAQGKVLNDHPPIKFMVSIAGSKFRDPSICNVAYKDPIKVKSVHFIGEKDWLKVPSEELAAAFEDPVIIRHPQGHTVPRLDEASVKQLSEWSSSILEDIKNADDVAKASIVEKPSEGNTVAESGENLVEQIAA

SEQ ID NO: 33411 - protein, 364 aa, Oryza sativa
MGLNGKWRKAMPYMAMVFLQFGFAGLFLISVASLRQGMSHYVLVVYRNAVAAVVMAPFALWFERKTRPKMTLSVFFKIMALGLLEPVLDQNFFYMGAKNTSASFSSALTNILPAVTFVNAIILRMERISIKERRSQAKIAGTLITVGGAMLIILFKGPVINFPWTKNANHNISDSSDHNNGHWLMGIFMILLSCFCWSAFFILQSYTLRGYPAELSLTTLICAMGVAQSGAVALVMERDIKAWLIGFDMRLFTAVYSGIMCSGVAYYVQGMVIKERGPVFVTAFSPLCMIIVTILGSFILCEVVTLGRVIGAIIIVVGLYALIWGKNKDHGNQVDQDDNFEKQKTFELPLSTTNVNEARSPNHI

SEQ ID NO: 33412 - protein, 257 aa, Oryza sativa
MPKLCVRLNSLYYGISQLSKLEDSINERWARRKSESINIRRSMSEKSKSAVSSQKNQFDGSRKEINAAIDRICEFTGLKVIFWDLQQPFIDNLYKNNVSQARLDAIMEVLDTVLNQLCNVIVEQLRDRVVTGLLQASLDGLLRVILDGGPTRVFSPSDATLLEEDLEILKEFFISGGDGLPRGTVENLVSRVRPVIDLIKQETRVLIDDLREVTQGAKSKFGTDSKTLLRVLCHRNDSEASHYVKKQFKIPSSAPAT

SEQ ID NO: 33413 - protein, 340 aa, Oryza sativa
MDVLAMPQEIRCDYWPLEDWISGQLQKAFVSGVPQLQRPELERACEDFSNIVASHPYYTVYKGTLSSGVEIAVVSTTIKSSKDWSKHCEDCFRKKIESLSRINHKNFINLLGFCEEEEPFTRVMVFEYAPNGTLYENLHDEAFDHIDWRSRMRIIMGIAYCIQHMHELNPANVHPDLHSSAVFLSEDCAAKIADLSVWQEVVSDGKKSTANNDHHEPISARLAGNVYSFGILLLEIISGKPPYSENEGSLANLALGCIIKGRSIASTLDSVLESHKENELDVICQIIMECIQSDPTKRPGMREITTRLRETIAISPDAATPRLSPLWWAEVEVLSPVEPR

SEQ ID NO: 33414 - protein, 213 aa, Oryza sativa
MAAAAETSAKVGAPRRWSLQGKTALVTGGTRGIGRAVVEELAALGATVHTCSRKEEELSERLKEWEARGFRVTTSVCDLSVRDQRERLLRQVADLFGGKLDILVNNVGTNIRKPTTEFSAEEYSFMMATNLESAYHLCQLSHPLLKASGSGSIVFISSVCGLVAVFSGSLYAMTKGAINQLTKNLACEWARDNIRSNSIAPCFWQIRTLKVLW

SEQ ID NO: 33415 - protein, 298 aa, Oryza sativa
MTPSALAHLASASPLPAFSPKPRARPGSAAGPALRRLAVAAPAPRAYFSSSPMPYQPQPQQPAGYSSHQAFGLVPMVIETTSRGERAYDIFSRLLKERIVLIHGPIADETASLVVAQLLFLESENPLKPVHLYINSPGGVVTAGLAIYDTMQYIRCPVTTLCIGQAASMGSLLLAAGARGERRALPNARVMIHQPSGGAQGQATDIAIQAKEILKLRDRLNKIYQKHTGQEIDKIEQCMERDLFMDPEEARDWGLIDEVIENRPASLIPEGATGVDLPHHSAAGVGGRGRDVEEPSAV

SEQ ID NO: 33416 - protein, 269 aa, Oryza sativa
MPLLEIVRTQHTSPQVVVDLLDVGKKIKKTPIVVGNCTGFAVNRMFFPYTQSALLFVDLGMDVYKIDRACTKFGMPMGPFRLADLVGFGVAAATGMQYLENFPERVYKSMLIPLMMEDKRTGEASRKGFYKYEDKRKATPDPEIMKYIEKSRSMAGVTPDTELMKLSEKDIVEMVFFPVINEACRVLDEGIAVKASDLDIASIFGMGFPPYRGGIMFWADSIGAKYIHDKLEVWAKRYSDIFKPCSYLAERAANGVPLSAPAKQVKARL

SEQ ID NO: 33417 - protein, 76 aa, Oryza sativa
MSLQKFAGSSSISSADLFGRRDMDDSNLDLSAADLINRISFQASQDLSSLKNMAGETGKKLTSIASNFISDLDRIL

SEQ ID NO: 33418 - protein, 304 aa, Oryza sativa
MLETIRRKVMVRIHDQRTISGRWTTSVCPNILKKMNVYITESAFCHATCNGGDSFEVKHHDNRFTVHLDKKECSCRYWQLSGLPCPHAISCIFFKTKTNSLDEYIAECYSVKEFKKIYSQCLEPVEGMSSWPEDDKEPLNAPGYIKMPGETRRESNEPLKATKLSRIGSIIRCSKCKQIGHNKSTCNKHHGGGSSTPDSLQVVNPADNLMLSNTQQSSKQSRKRKSRTAANTNSASQSRKTVSSKQKALVELHAHSQGSTSATIKVTSGQAFVNVSTQESAKFKPKKLTPGLLLLMPPWESDKL

SEQ ID NO: 33419 - protein, 313 aa, Oryza sativa
MVPRGGGCPDFAESAQFHKVLQGQELLGFKSHGGTAAATSQPCEARHLQYIDERSCSSDASNSILGVPRLGDRAPLGNPGFSYHCSGFGESHRLQKVLQGQELFRPYRGTLVDASMGSNGFHQQDSPRAPGVVNKWQAQLHGRAAFHGPPALALPSQSSSPPSVLMFQQANSKMPRLEFGHGQLDKHENDRRVRFGPSEGIERREQRIPLQPYPTSGEVIDGQVTVEKSHSPGRHGKDGPDNKAVGTNSCKIFGISLTEKVPAREELDDGDANYSLQSLKQVPKSLGNSCATVHEQRPVVGRVIDISTMDMMI

SEQ ID NO: 33420 - protein, 322 aa, Oryza sativa
MTSSGAPFWSAPKRFPRPLEFLTSDPSQLNFILAAAILRAETFGIPIPDWVKNPAKMAEAVDKVIVPDFQPKQGVKIVTDEKATSLSSASVDDAAVIEELIAKLEAISKTLQPGFQMKPIQFEKDDDTNYHMDVIAGFANMRARNYSIPEVDKLKAKFIAGRIIPAIATSTAMATGLVCLELYKVLGGGHKVEDYRNTFANLAIPLFSMAEPVPPKTIKHQDMAWTVWDRWTITGNITLRELLDWLKEKGLNAYSISCGTSLLYNSMFPRHKERLDKKVVDVAREVAKVEVPPYRRHLDVVVACEDDDDNDVDIPLVSIYFR

SEQ ID NO: 33421 - protein, 388 aa, Oryza sativa
MASATLLKSSFLPKKSEWGATRQAAAPKPVTVSMVVRAGAYDDELVKTAKTIASPGRGILAMDESNATCGKRLASIGLENTEANRQAYRTLLVTAPGLGQYISGAILFEETLYQSTVDGKKIVDILTEQKIVPGIKVDKGLVPLAGSNNESWCQGLDGLASREAAYYQQGARFAKWRTVVSIPNGPSELAVKEAAWGLARYAAISQDNGLVPIVEPEILLDGEHGIDRTFEVAQKVWAETFFYMAENNVMFEGILLKPSMVTPGAECKDRATPEQVSDYTLKLLHRRIPPAVPGIMFLSGGQSEVEATQNLNAMNQGPNPWHVSFSYARALQNTCLKTWGGQPENVKAAQDALLLRAKANSLAQLGKYTSDGEAAEAKEGMFVKNYVY

SEQ ID NO: 33422 - protein, 313 aa, Oryza sativa
MTMKLRDFYKTPKVDPELVKEIEQWNEALKSDVIKFCEENNFHSGFFDGNENNMVADAYELKVRLEHIIERIALVSDAANTERPSLVINNLFIGGALAARSMYTLQHLGITHILCLCSNEIGQSDSQFPDLFEYKNFSISDDDDANISDLFEEASDYFDHVDHVGGKVLVHCFEGKSRSATIVLAYLMLRKGLTLAKAWNLLKKVHRRAQPNDGFAKALLALDRKLHGKVSMDWQHKRPEMKVCPICSKNVGLSTSSLKLHLQKAHKRLSAGSVDSAMTLEIQKSIQSLRISRGGSLSPSQKLTKAFADELSF

SEQ ID NO: 33423 - protein, 137 aa, Oryza sativa
MAASVMASLALKPSASPLLERSKLRGKGTMARPSLIIVAKKAKKIQTSQPYGPAGGVVFKEGVDASGRVAKGKGLYQFSNKYGANVDGYSPIYTPEEWSSTGDVYVGGKAGLLLWAITLAGILVGGAILVYNTSALA

SEQ ID NO: 33424 - protein, 450 aa, Oryza sativa
MREIISIHIGQAGIQVGNACWELYCLEHGIEPDGTMPSDTTVGVAHDAFNTFFSETGAGKHVPRAIFVDLEPTVIDEVRTGSYRQLFHPEQLISGKEDAANNFARGHYTVGKEIVDLCLDRVRKLADNCTGLQGFLVFNAVGGGTGSGLGSLLLERLSVDYGKKSKLGFTIYPSPQVSTAVVEPYNSVLSTHSLLEHTDVAVLLDNEAIYDICRRSLDIERPTYTNLNRLISQIISSLTTSLRFDGAINVDVTEFQTNLVPYPRIHFMLSSYAPVISAEKAYHEQLSVPEITNAVFEPSSMMAKCDPRHGKYMACCLMYRGDVVPKDVNAAVATIKTKRTVQFVDWCPTGFKCGINYQPPSVVPGGDLAKVQRAVCMISNNTAVAEVFSRIDHKFDLMYAKRAFVHWYVGEGMEEGEFSEAREDLAALEKDYEEVGAEGADDENDDGEDY

SEQ ID NO: 33425 - protein, 433 aa, Oryza sativa
METPRVNEDDLSTKKLNEFLSELQALQKEKSNRLHKILDFVSSVHDLCSVLGMDFLSTVTEVHPSLNDSVGAEFKSISDATLSKLSKMVIQLKEEKSKRLERIQALASQLTDLWNLMDTSADERQLFDHVTCNISSTLDEVTAPGALDIDLIEQAELEVERLDQLKASRMKDIAFKRQTELEDIYAQAHITIDTSAARDRILTVIDSSIFEPSELLADMENQILKAKEEALSRKDILEKVERWMSACEEESWLEDYSQDDNRYSATRGAHLNLKRAEKARLLVSKIPVIVDTLMAKTRAWEQEHGMPFSYDGVHLLAMLDEYKVLRQQKEEEKRRMRDQKKINDQLAAEQEKLFGSKPSPARPQSSRKAPGPRANGGAVNGTPNRRLSAHQNGGGRSVSRDGRRDSGRPAAPVNYVAICKEESSNNNPAASSP

SEQ ID NO: 33426 - protein, 492 aa, Oryza sativa
MDPYKHRPSSSFNGPLWSTNSGAPVWNNNNSLTVGSRGPILLEDYHLVEKLANFDRERIPERVVHARGASAKGFFEVTHDITHLTCADFLRAPGVQTPVIVRFSTVIHERGSPETLRDPRGFAIKFYTREGNWDLVGNNFPVFFIRDGMKFPDMVHSLKPNPKSHVQENWRILDFFSHHPESLHMFTFLFDDIGIPADYRHMDGSGVNTYTLVNRAGKSHYVKFHWKPTCGVKSLLDDEAVTVGGTNHSHATQDLYDSIAAGNFPEWKLFIQTIDPDHEDRFDFDPLDVTKTWPEDIVPLQPVGRMVLNRNIDNFFSENEQLAFCPGIIVPGIYYSDDKLLQTRIFSYSDTQRHRLGPNYLLLPPNAPKCAHHNNHYDGFMNFMHRDEEVDYFPSRYDPAKHAPRYPIPSATLTGRREKVVIAKENNFKQPGERYRSWDPARQDRFIKRWIDALSDPRLTHEIRSIWLSYWSQADRSLGQKLASRLSAKPSM

SEQ ID NO: 33427 - protein, 271 aa, Oryza sativa
MQVAEGGLSHMSGFSVFRRILRSDGIPGAFRGFGTSAVGALPGRVFALTSLEVSKEMAFKYSEHFDMSEASRIAVANGIAGLVSSIFSSAYFVPLDVICQRLMAQGLPGMATYRGPFDVISKVVRTEGLRGLYRGFGITMLTQSPASALWWSSYGGAQHAIWRSLGYGIDSQKKPSQSELVVVQATAGTIAGACSSIITTPIDTIKTRLQVMDNYGRGRPSVMKTTRVLLEEDGWRGFYRGFGPRFLNMSLWGTSMIVTYELIKRLSVKPE

SEQ ID NO: 33428 - protein, 160 aa, Oryza sativa
MSATAVSSLNPDAPLFIPAAFRQVEDFSPQWWDLVKTTAWFRDHWFHEHQQLDEMADSLALHDAAADDDDLAGLLPDDAFDDDDDDDLFFDQTHNLLVDPPQPPAALKTDAVLKALSLVSPKGGDAPRGLREKPRHSEKPTKYAGSPRSGGAPRVIHQPR

SEQ ID NO: 33429 - protein, 136 aa, Oryza sativa
MARTKQTARKSTGGKAPRKQLATKAARKSAPTTGGVKKPHRYRPGTVALREIRKYQKSTELLIRKLPFQRLVREIAQDFKTDLRFQSHAVLALQEAAEAYLVGLFEDTNLCAIHAKRVTIMPKDIQLARRIRGERA

SEQ ID NO: 33430 - protein, 72 aa, Oryza sativa
MRTSAAAPYYSIRMVLMQEIRNHSLWVQTSEPGQGDRELPLAKKATRTSQSPRLIVTLLPMELILQGLPRTE

SEQ ID NO: 33431 - protein, 402 aa, Oryza sativa
MFSRSGAKDGSRLSGCSSRASSASMPPTAKTECEILQSANVKIFSFSDLRIATRNFRPDSVLGEGGFGSVYKGWIDENTLSACKPGTGIAVAVKRLNQESLQGHREWLAEVNYLGQFCHPNLVKLFGYCLEDEHRLLVYEFMPRGSLENHLFRRGSHFQPLSWNLRMKVALGAAKGLAYLHSSEAKVIYRDFKTSNILLDTDYSAKLSDFGLAKDGPVGEKSHVSTRVMGTYGYAAPEYLSTGHLTAKSDVYSFGVVLLEMMSGRRAIDKNRPQGEHNLVEWARPYLTHKRKIFRVLDTRLEGQYSHVGAQTVATLALECLSYEAKMRPSMEAVVTILEELQESSHVDRKPAAERRQESTTGTGKKAPTANASKNSGKPRRKSLGETREKIGPNPTALVRSH

SEQ ID NO: 33432 - protein, 365 aa, Oryza sativa
MAELRAEAKQQSESTGTIGRSNGAAVTTSLQQQISVTVVTEFVRWNEEAISRCTLLFSQPATVAANVRSIFACLLDQVSQYLTEGLGHARESLNHAATQRDRYVIGTSVSRRVATAAANAAEAAAAAGESSFRSFMIAVQRCASSVAILQQYFSNTISRLLLPVDGAHPSACEDMGSAVSVVEAAAHKGLLQCIDTVMSEVERLLSSEQKATDYRTPDDGAAPDHRPTNACIRIVAYLSRVLEVAFSALEGLNKQSFLTELGNRLHKGLLNHWQKFTFSPSGGLRLKRDITEYGEFVRSFNAPSIDEKFELLGIMANVFIVAPESLASLFEGTPSIRKDALRFIQLRDDYKTAKIASMLNSIMAE

SEQ ID NO: 33433 - protein, 336 aa, Oryza sativa
MAGQESLTLAGVLRGHNDMVTAIAAPIDNSPFIVSSSRDKSLLVWDITNPSTAVATDPEAAPPEYGVSYRRLTGHSHFVQDVVLSSDGQFALSGSWDGELRLWDLATGRTTRRFVGHTKDVLSVAFSVDNRQIVSAARDNTIKLWNTLGECKYTIGGDHGAGEGHTGWVSCVRFSPNPMAPTIVSGSWDRSVKVWNLTNCKLRTKLEGHNGYVNAVAVSPDGSLCASGGKDGTTLLWDLTEGKMLYKLDAGAIIHSLCFSPNRYWLCAATEDSVKIWDLESKLVMQDLKPEVQAFKSQMLYCTSLSWSADGSTLFAGYTDGTIRVWKVSGFGGYAI

SEQ ID NO: 33434 - protein, 334 aa, Oryza sativa
MYNKCGCIQDANKAFLEMPTRTFVTWTSMISGYSQHGQPQEAIQLFEEMRLAGVRPNEITFVSLLSACSYAGLVEEAEHYFDMMKKEYCIEPVVDHYGCMIDMFVRLGRVEDAFSFIKRTGFEPNEAIWSSLVAGCRSHGNMELAFYAADKLLELKPKGIETYILLLNMYISTERWQDVARVRKLMKQEDVGILRDRSWITIKDKVYFFRANDRTHPQATELYQLLENLLEKAKAIGYEPYQNAELSDSEDDEKPAAGSLKHHSERLAVALGLLQTPPGATVRVTKNITMCRDCHSSIKLFSLLENREIIVRDSKRLHKFKDGRCSCGDFGALL

SEQ ID NO: 33435 - protein, 134 aa, Oryza sativa
MILNAISRQLNNAPAPGVCIQGMFVLANVAAGGELNKEAVMNILVPRRADRVKQSFIVNFLLSKDKQLRVATLWCVLNLIYPKCEASSVRVVRLQNAGVISQVKGMINDPCLDCKLRVRMVLEHCLDNADDGFM

SEQ ID NO: 33436 - protein, 68 aa, Oryza sativa
MPVVTNAAVHAVVEEQGRDDKVIVFKYKKKKKYQRKLGHRQPNTRLRITGISGYEDFPADPILEYVPA

SEQ ID NO: 33437 - protein, 811 aa, Oryza sativa
MSVKSMPFENLAMLMESPTTLQTTKAVLDRFEKRLLLSQPTGSSSAENIDHLLKRLGSPKRKAPASRSRVAAKKPAKGSETSKLSRYSLRVVLCSYMILAHPGAVLSGQGEKENLLMESAENFVKEFELLVKTVLDRPGGASMQSTDAASQKKFRTQLAAFDKAWCAYLYHFVVWKLKDAKSLEQDLVRAACKLELSMMQTCKLSSDGQSHDLSHDMKAIQKQVTDDQKLLREKIQHLSGDAGIERMNSALSDTRSKFFEAKENGNPLATSVANVSTPLSINSSGQVPNPTSKPTVEGSSFTAQSLPGAASSSSSTSPMKPPTDNEQMVNEMLHEDDVSFARNSDNVSSAEKDFQAKVKATMEKAFWDLVTDSMRGDKPDYSQLINLVKEVRNSLHELASNELKEEILENIDLEILSQVLQSGSQDTRYLGQILQYSLDMVRKLSAPAKEDDMKRSHEKLLNELAASSEVNDNGISSFVIVVIKGLRFTLEEIKQLQTEVSKARIQLMQPIIKGSAGVEYLQKAFTDRYGPPANASVSLPITKQWVSATKSIVEQEWSSHLESLQALPADHAQHVVPVLRAGHGAPAPQASSSAASSSGLPECKGEKIDKLTRVGLLQLISNVEGLNMQSTPETFQINLLRLRAVQDQFQKVIVIATSMLVLHQVLMLKIAPPELQNTISELYDALVKLLDNNADASTKEIVEAMTRSLASVGSLPEEQIQDTTELATKMLLKSLQAGDIVFGKVSRAVYFAFRGVVLGGGAKGKKLAEAPLRRLGAAKLADRVVKAGEVLIKMAVISEKVHGQWYKALAL

SEQ ID NO: 33438 - protein, 128 aa, Oryza sativa
MAAADVAYAPPMKSGKIGFESSQEVQHRIRITLSSKSVKNLEKVCGDLVKGAKDKSLKVKGPVRMPTKVLHITTRKSPCGEGTNTWDRFEMRVHKRVIDLVSSADVVKQITSITIEPGVEVEVTISDQ

SEQ ID NO: 33439 - protein, 429 aa, Oryza sativa
MSSPPPAAAAAMAVDDADDDQLASMSTEDIVRATRLLDNETRVLKDELQRTNLEVESYKEKIKENQEKIKLNKQLPYLVGNIVEILEMNPEDEAEEDGANIDLDSQRKGKCVVLKTSTRQTIFLPVIGLVDPEKLKPGDLVGVNKDSYLILDTLPSEYDSRVKAMEVDEKPTEDYNDIGGLEKQIQELVEAIVLPMTHKDRFQKLGIRPPKGVLLYGPPGTGKTLMARACAAQTNATFLKLAGPQLVQMFIGDGAKLVRDAFQLAKEKSPCIIFIDEIDAIGTKRFDSEVSGDREVQRTMLELLNQLDGFSSDERIKVIAATNRADILDPALMRSGRLDRKIEFPHPSEEARAGILQIHSRKMNVNPDVNFEELARSTDDFNGAQLKAVCVEAGMLALRRDATEVTHEDFNEGIIQVQAKKKSSLNYYA

SEQ ID NO: 33440 - protein, 69 aa, Oryza sativa
MSDEEVSDPKALLEDRSKAKCVYQWYEYQKCVKRIEDDETGQKHCTGQYFDYWKCVDKNVAEKLFDSLK

SEQ ID NO: 33441 - protein, 170 aa, Oryza sativa
MWISCTFKAAKCAIQLGCYMQASCYYSEVLNYDVANVQAQQQQTLLQEFPDGSSRDPDAMQRGFEQFPPEYESELQLNATFTPAAFSPRRKGEHPYRGEIIGFPDVQANSSQPASTPSTAPSTPNPATPQTNALATGTSGTPSGSAAQSSGTINTNRGFLFRCFGPSPTS

SEQ ID NO: 33442 - protein, 427 aa, Oryza sativa
MRCLPFLHGDSKEEDPVNKSASVRSLSTTSTERDVRSGSDFNSLNVSDMSAESIRRTQYPSFTDRPSNLRVFSFPELKNATRNFSRSLMVGEGGFGCVYRGVIKNSDEPTERTEIAVKQLNRKGLQGQKEWLTELNVLGIVEHPNLVKLIGYCAEDDERGVQRLLVYEYMPNGSVDDHLSSRSNSTLSWPMRLKVALDAARGLKYLHEEMEFQVIFRDLKTSNILLDENWNAKLSDFGLARHGPSEGLTHVSTAVVGTLGYAAPEYMQTGRLTAKSDIWGYGVLLYELITGRRPIDRNRPKGEQKLLDWVKPYISDIKRFPIIIDPRLEGHYNLKSMTKLASVANRCLVRLPKSRPKMSEVYEMVQKIVASIETGTPQPPLHYHGSVSEPGSKRPKKGSLKRRFQEFKFGCRQIVWRSWKPEIIKTC

SEQ ID NO: 33443 - protein, 369 aa, Oryza sativa; identical to SEQ ID NO: 28579

SEQ ID NO: 33444 - protein, 463 aa, Oryza sativa
MSSVPTVDEGSTSARWKSGGKLLPYLYQSRNNTGHFSSKELPGSSNQSQDLAPLPKMIQTPQSPVTSTSGVVSFQQRCNSTKICSQPGCAKGARGSSGRCIAHGGGRRCQREGCKKGAEGKTIFCKAHGGGRRCEHLGCTKSAEGRTDFCIAHGGGRRCSRDGCRKAARGKSGLCIKHGGGKRCQKLNCTKSAEGQSGFCIAHGGGRRCKHDGCTKGAQGSTNFCKAHGGGKRCTHPNCSKGAEGSTALCKAHGGGKRCSAEGCPKSVHGGTEFCVAHGGGKRCVVPGCTKSARGRTDCCVRHGGGKRCQFTGCSKSAQGSTDFCKAHGGGKRCLWGQSGSGLGDGSGTCERFARGKKGLCVAHNALVEDSRVRGGQTVGTIALPGSTGADSDVSHGTLPGNSFNFGETFAANTKQALHHVQSPVPEGRVHGGNIAAMLANSMDYQKQLNFSTGASTSDRNWL

SEQ ID NO: 33445 - protein, 331 aa, Oryza sativa
MVKTLSLAIVRTIILERRPITMVAKAMDVVLDSYSRLMKMGGGLPAVRRTSEQNQQPGVQPGVNPDSASGDGNRPVQSNSEVEHGIANLAEHVDRTLLNTSSDSDDIIDASGASDAPDRKPQVLGQDSRPLASGTSTQHGSHVASVAVSPSEMFESVFVLVEDEMMADPAYLISIIMEFLRSVSRAGLKAPPNLFVMMTTLLARSNRYPEIALFVSNKILEPSKELAMQLMELGQQHSPTRKLGVDMLRERGLHHDYVTALLQDGYHLEALRYARKYKVITVQPVLFLEKAVAINSAQNLAAMLSFFSEFTPTFKTTSDYGRYRHILSEMI

SEQ ID NO: 33446 - protein, 131 aa, Oryza sativa
MSPVTYIDSSAVQALKDLYQEYRDRHIQIAIANPNRQVHLLLSRSGIIDMIGTGWCFVRVHDAVQVCLQKVQSSSSSSIKLSPQASGDLADSVTTPKVQQRYSFLKNLWKSQVGDGCTGSEVQPLLRQNLV

SEQ ID NO: 33447 - protein, 178 aa, Oryza sativa
MKKAVEKDRSTVGVSELSKLGLMEITRKRVRPSVTFMISEPCPCCHGIGRVEALDTSFSKIEREICRRLAASGHKSDPEKPKSWPRFVLRVDHEMCTYLTSGKKTKLGLLSSSLKVWILLKIARGFARGAFELLPYSDEKETDERKEETSESPPKEAGSPKLSVFPIKKWMSRAKRAK

SEQ ID NO: 33448 - protein, 58 aa, Oryza sativa
MHMLFKELNSFVIFSPFQAMCIPLVHVMCSCSCSGSLETELGQYFSPTSVILHISVVK

SEQ ID NO: 33449 - protein, 454 aa, Oryza sativa
MAGSLSAALCLTLFCLLGACIAPGARANGRHSRRDLDINLGNGNGGGISIGIGGSGGGGGGGSSGGSSGGGGDLRPCDFENERLYKAYKVIQKFRRTVTCDPQNIISSWSGADLCSTYKGFFCERPPNITDRTIASVDFNGYNLQASSLKEFVDALPDLALFHANSNNFGGAVPDLSRLQYFYELDLSNNKLSPATFPTDVLKLKNATFVDIRFNSFYGELPGGVFCSFPQVQAIFVNNNQFSGSLPDNIGDSPVNYLSLANNNFTGEIPKSIARMANTLFEVLFLNNKLSGCLPYELGLLAKATVIDAGTNQLTGPIPASFACLRKVEQLNLADNLLYGEVPNALCELAFSWSGRLRNLTLSNNYFTSLGSCCWDLIKEGKLNVDRNCIPYAPNQRSHDECAAFFHRTKTSACPCNTYVPCGHNKHSAAGAGSEQDTAAAEEDKYRTYSALHP

SEQ ID NO: 33450 - protein, 353 aa, Oryza sativa
MVQQLDGTSNNWGWCKQKLGANAILAVSLAVCKAGAMVKKIPLYQHIANLAGNKTLVLPVPAFNVINGGSHAGNKLAMQEFMILPTGASSFKEAMKMGVEVYHHLKSIIKKKYGQDATNVGDEGGFAPNIQENKEGLELLKAAIAKAGYTGKVVIGMDVAASEFYSEKDKTYDLNFKEDNNDGSHKISGDSLKDVYKSFVSEYPIVSIEDPFDQDDWATYAKLTDEIGQQVQIVGDDLLVTNPTRVAKAISEKTCNALLLKVNQIGSVTESIEAVRMSKRAGWGVMASHRSGETEDTFIADLSVGLSTGQIKTGAPCRSERLAKYNQLLRIEEELGDAAVYAGEKFRAPVEPY

SEQ ID NO: 33451 - protein, 155 aa, Oryza sativa
MRRHLTEKVDVYAFGVVALETVAGRSNTNNSIEESKIYLLEWAWDLYEKEQAQRIVDPRLEDFNKDEVLRVIHVALLCTQGSPNQRPPMSRVMAVLTGDAEVVEMVTKPSYITEWQYRDGNSTNSESTTSEFSRQKEIDPLTMSPTITGSSHDGR

SEQ ID NO: 33452 - protein, 363 aa, Oryza sativa
MKFSVSPVVRVAVQCKVASDLPKLVEGLKRLAKSDPMVLCTIEESGEHIIAGAGELHLEICLKDLQEDFMGGAEIIVSPPVVSFRETVLEKSCRTVMSKSPNKHNRLYMEARPLEEGLAEAIDDGRIGPRDDPKVRSKILSEEFGWDKDLAKKIWCFGPETTGPNMVVDMCKGVQYLNEIKDSVVAGFQWASKEGALAEENMRGICFEVCDVVLHADAIHRGGGQVIPTARRVIYASQLTAKPRLLEPVYLVEIQAPENALGGIYGVLNQKRGHVFEEMQRPGTPLYNIKAYLPVIESFGFSSQLRAATSGQAFPQCVFDHWDMMTSDPLEVSSQANQLVLDIRKRKGLKEQMTPLSDFEDKL

SEQ ID NO: 33453 - protein, 60 aa, Oryza sativa
MMRKEMVHKAQLMPAFDKPFHPQRSTRPLTVPKEPSFLRLKCCIGGEFHRHFCYNAKAIK

SEQ ID NO: 33454 - protein, 228 aa, Oryza sativa
MTVFWSKLAQSMTSRPMKGMLTGPVTILNWSFVRNDQPRFETCYQIALAIKKEVEDLEAGGIQVIQIDEAALREGLPLRKAEHAFYLDWAVHSFRITNCGVQDTTQIHTHMCYSNFNDIIHSIINMDADVITIENSRSDEKLLSVFREGVKYGAGIGPGVYDIHSPRIPSIEEIADRVNKMLAVLDTNILWVNPDCGLKTRKYNEVKPALTNMVSAAKLIRTQLASAK

SEQ ID NO: 33455 - protein, 297 aa, Oryza sativa
MGHPERFPLKYVAIGNEDCDKGFYRGNYLKFYDAIRKAYPDIQMISNCDGSSRPLDHPADLYDFHVYTSAANLFIMKNKFDRTSRIGSKVFVSEYAVNEQRDAGKGSLLASLAEAAFLTGLEKNSDLVQMASYAPLFVNDNDRTWNPDAIVFNSWQQYGTPSYWMQTYFRESSGSVIHPITIGSSYSDSLAASAITWKDTHDIFLRIKIVNFGPNAVNLAISSRGLQAGVNTAKSTVTVLTSGNLLDENSFAEPNKVVPVKSELPDASEEMEAALSPYSFTSFDLALDQYSKLVAEM

SEQ ID NO: 33456 - protein, 382 aa, Oryza sativa
MDNALASAAAIADQRQKIEQYRHILSSVLSFSPPDISQAKRFLDHMVSDEVPLVVSRQLLQTFAQELGRLEPEAQKEVAHYALTQIQPRVVSFEEQVVVIREKLAELYESEQQWSKAAQMLSGIDLDSGIRMLDDTNKLSKCVQIARLYLEDDDSVNAEAFINRASFLVTNSHQELLNLQYKVCYARILDLKRRFLEAALRYYDISQIEQRQIGDEEIDENALEQALSAAVTCTILAGAGPQRSRVLATLYKDERCSKLKIYPILQKVFLERILRKPEIEAFAEELRPHQKALLPDKSTVLDRAMIEHNLLSASKLYTNISFDELGALLGIDPRKAEKIASRMIYEDRMRGSIDQVEAVIHFEDDTEELQQWDQQIADCAKR

SEQ ID NO: 33457 - protein, 57 aa, Oryza sativa
MYGGYFLQSCTFFQFLPISFFPWRAQYSQVDQISKNVYSQRNRMIANRGSIKRTDQP

SEQ ID NO: 33458 - protein, 383 aa, Oryza sativa
MNRINGKQEVMIGYSDSGKDAGRLSAAWQMYKAQEELVKVAKHYGVKLTMFHGRGGTVGRGGGPSHLAILSQPPDTIHGSLRVTVQGEVIEHSFGEEHLCFRTLQRFTAATLEHGMHPPISPKPEWRALMDEMAVVATKEYRSIVFKEPRFVEYFRSATPETEYGRMNIGSRPSKRKPSGGIESLRAIPWIFAWTQTRFHLPVWLGFGGAFKHIMQKDIRNIHTLKEMYNEWPFFRVTLDLLEMVFAKGDPGIAALYDKLLVAGDLQSFGEQLRNNFEETKQLLLQVAGHKDILEGDPYLKQRLRLRESYITTLNVCQAYTLKRIRDPSFEVMSQPALSKEFVDSNQPAELVQLNAASEYAPGLEDTLILTMKGIAAGMQNTG

SEQ ID NO: 33459 - protein, 43 aa, Oryza sativa
MHAATLRVKLTNQAMAPLLLSRSMCRRGGRHRHGRRRLTTGSM

SEQ ID NO: 33460 - protein, 158 aa, Oryza sativa
MSGGDHIHAGTVVGKLEGEREMTLGFVDLLRDDFIEKDRARGIFFTQDWVSMPGVIPVASGGIHVWHMPALTEIFGDDSVLQFGGGTLGHPWGNAPGAAANRVALEACVQARNEGRDLAREGNEIIRSACKWSPELAAACEIWKAIKFEFEPVDKLDS

SEQ ID NO: 33461 - protein, 396 aa, Oryza sativa
MELSGDAAVVSGSGNRKRKRHVQQHSLEYPCVSRLRHRRLLAFLSRHDYDSTFDALVQETSVLFRVGHIQALVRQGRWADAASYVNRFVPPSRVLTDAGLVFHEFLYIHHVLDCIVAGDHLRGAQVAASYQRHVRDNPNPSHGAIKLIRILLTILHCHPIRAFLNWHLVRYKAAEIIKDLIPQIPEFNDLLKLPKGGPIKPHNILPIGSSSHRRRHVKNEDRIPPDIARFYLQKKRGLPSSTICQERYYTGLSRNAANWLADIIDKSLQAGVLRDGYPFKHSCNEGVTGAPIGLDSPANSYGISTQTIADMMRPLIISDIGQGSVARNNPTRPETTAHQAISPTTQQITTEFVQHSESQFQEYNSQMDGRVRIVESGMKRSRSFGGGCSSSVEISS

SEQ ID NO: 33462 - protein, 262 aa, Oryza sativa
MSQPAELSREENVYMAKLAEQAERYEEMVEFMEKVAKTVDSEELTVEERNLLSVAYKNVIGARRASWRIISSIEQKEESRGNEDRCTLIKEYRGKIETELSKICDGILKLLDSHLVPSSTAPESKVFYLKMKGDYYRYLAEFKTGAERKDAAENTMVAYKAAQDIALAELPPTHPIRLGLALNFSVFYYEILNSPDRACNLAKQAFDEAISELDTLSEESYKDSTLIMQLLRDNLTLWTSDISEDAAEEIKEAPKGESGDGQ

SEQ ID NO: 33463 - protein, 58 aa, Oryza sativa
MLIPMEYFFMGYSLYRPSQLDCSPRSPLSPFCISPDLLSPESMGVKLKPIKTRVRLEV

SEQ ID NO: 33464 - protein, 428 aa, Oryza sativa
MQSGSEMRPVHNSVDTVNAAAVAIVTAESRTQPQAEPRRKWADWLSVYFCFGSQKNGRRISHAVLVPEPLPPRTDAPMPEIPIHPPPPVFPFVAPPSSPASFLQSGGASIVQSPVGAPSFSPLSPNSPSPTGPPSIFAIGPYAHETQLVSPPVFSAFTTEPSTAPFTPPPESVHLTTPSSPEVPYAKLLTSINNSKNAETGELQSYQIYPESPIGRLISPSSACSGTCSPFPDPEVQTSSRSTFPSFPVREPPKILDGEGIATQKLIPRHMRNGGSLLDGHISAAVPVVDFSARLQNNDHAMDHRVSFELTVEDVARCLEKKTNINGESAAASFRLVPTGNGDHIHPRESNDTRAGLCVDETYHDLPEKARRSLSLRKAKEFKFNNVDAPSVEPSVGSDWWANEKVAGITSEPRKSWSFFPVAQPGVS

SEQ ID NO: 33465 - protein, 318 aa, Oryza sativa
MTQPYPVGSHLGSSSTAPVVGITPLISSYGGYKGDVAGDWPSIYQPRREESSAKEFSLRLLCAASNVGGVIGKGGGIIKQIRQESGAFIKVDSSNTEDDCIITVSAKEFFEDPVSPTINAAVHLQPRCSEKTDPESAIPSYTTRLLVSTSRIGCLIGKGGSIITEIRRTSRANIRILSKENVPKVAAEDEEMVQISGDLDVVRHALLQITTRLKANFFEREGALSGFPPVIPYHPLPVGVSEGPKYLGRDTKPLGHDYPYSSGYRGSDDIGPIDSYASYGSSQVSGGGYGAYGGYSGRSGSSGLSGPSSFSYGKRHGY

SEQ ID NO: 33466 - protein, 297 aa, Oryza sativa
MLSKSKASGSSGALSSLTSSTPLTRQETPADASRAAPQPLVAPTRTPQPERPPAEAPSNAYGQAASNLLSGSNLDTTINQLMEMGGGSWDRDKVQRALRAAYNNPERAVEYLYSGIPITAEVAVPAGGQGANTTEPSSTREASLSGIPNASPLNLFPQGDANDGGGAGGGTLEFLRHNQQFQALREMVHTNPQILQPMLQELSKKNPQLLRLIQENHDEFLQLINEPFDGADGDFLDQPDQDEMPHSINVTPEEQEAIGRLEGMGFDRARVIEAFFACDRNEQLAANYLLEHAADED

SEQ ID NO: 33467 - protein, 565 aa, Oryza sativa
MNDVLYQLYTITNDQKHLTLAHLFDKPCFLGLLAVQADSISGFHSNTHIPVVIGAQMRYEVTGDLLYKQIATFFMDTINSSHSYATGGTSAGEFWTNPKRLADTLSTENEESCTTYNMLKVSRNLFRWTKELSYADYYERALINGVLSIQRGTDPGVMIYMLPQAPGRSKAVSYHGWGTKYDSFWCCYGTGIESFSKLGDSIYFEEKGDRPVLNIIQYIPSAYNWKAAGLTVNQQLKPISSLDMFLQVSLSTSAKTNGQSATLNVRIPSWTSANGAKATLNDNDLGLMSPGSFLSISKQWNSDDHLSLQFPITLRTEAIKDDRPEYASLQAILFGPFVLAGLSTGDWNAEAGNTSAISDWISPVPSSYNSQLVTFTQESSGKTFVLSSANGSLTMQERPTVDGTDTAIHATFRVHPQDSAGQLDTQGATLKGTSVQIEPFDLPGTVITNNLTQSAQKSSDSLFNIVPGLDGNPNSVSLELGTKPGCFLVIGVDYSVGTKIQVSCKSSLPSINGIFEQAASFVQAAPLRQYHPISFIAKGVKRNFLLEPLYSLRDEFYTVYFNLGA

SEQ ID NO: 33468 - protein, 118 aa, Oryza sativa
MLSCAGADRLQTGMRGAFGKPQGTCARVDIGQVLLSVRCKPNNAVHASEALRRAKFKFPGRQKIIESRKWGFTKFSRDEYVRLKSEGRIMPDGVNAKLLGCHGRLSARAPGKAFLSAA

SEQ ID NO: 33469 - protein, 435 aa, Oryza sativa
MPYPKVDSFLKICQILGLAGIDLFTPSDVVEKRNVRKVCMCIRLLSKKARTMRLTVPDFDIVTHTIAMPNYIVGGIRRSLEQPQCSSSGSSGYSPSANSKALNQQRVFGAENDQQCETHYDSDEAESKLSALEPEDSVSEDNISTLLKSGNMPKEEKEGYGDSEHGMHEEKSLSESVGSIDFGNMESDSVGSTPLFHKNESYCCIESPTDQCSRTRTIRCSLSSEESDSISSHLVVDSSKAKRTHGEHLEPLNGNGKRFANDPEKESDALQKVTFDQQCDLLACDGESVCSNCDSTPYSSLTPIDSACGKLPAVSEDDSACRGLELEFRCGNKTDVSQKEDKQVESEYKAENDSSAQMNENGVPKSGKGMLKSVAGGITPVGAVFFIAHLRRSKDRSFAGVIAPFSEKSVQGDSRAKKVEKTKAGAVYPGEWLKV

SEQ ID NO: 33470 - protein, 527 aa, Oryza sativa
MICAISGEVPDEPVVSKKSGLLFERRLVERYIEDHGKCPVTKEELTMDDIVAVKTNKVVKPRQLQAASIPGLLGMFQNEWDAIMLSSFALEQQLHTARQELSHALYQHDAACRVIARLKKERDEARALLAQAERQIPASMAGAAPTAVVSNGKRAFEDEVGPDGKKIRPGINPVMIDELTECNTMLSAHRKKRQVPPTLASIDAIERYTQISSHPLHKTNKPGILSMDIHPSKDIIATGGIDTNAVLFDRPSGQILCTLTGHSKKITSLKFVPRDELFVTGSADKTVKIWQGSEGGNYNCIHTLKDHTAEVEAVTVHATQKYFVTASKDNTWCFYDIPSGSCLTQVGESSGQEGYTSASFHPDGLILGTGTTEAVVKIWDVKTQSNVAKFEGHVGPVTAMSFSENGYFLATAALDGVKLWDLRKLRNFRTISPYDSDTPTNSVEFDFSGSYLAVGGSDTRVYQVANVKLGWNLVKTLPDLSGTGKVTNVKFGTDAKYIAVGSMDRNLRIFGHPGEDDQMDDAKPSEE

SEQ ID NO: 33471 - protein, 155 aa, Oryza sativa
MFPPSVDWDNINWSTRRPQMDFPVQSAICTLEDVDVIKEGKARIAGYAVSGGGRGIERVDISVDGGKTWVEAHRYQKSNVPYISDGPRSDKWAWVLFEATLDVPANAEIVAKAVDSAANVQPEKVEDVWNLRGILNTSWHRIKIQNSSCVGRSKM

SEQ ID NO: 33472 - protein, 258 aa, Oryza sativa; identical to SEQ ID NO: 32799

SEQ ID NO: 33473 - protein, 208 aa, Oryza sativa
MDRKHTSLPRSTIVHSTPIPAKEQPRIGPSRDKPSDEPYSNPREFDRFSGNAPRTSQAPQRVPTARPGRVVGPVLPYENGATKDSYDARRLAMNSGYPPQQQIPQAYGYYQIPGKSACSELSQAERYTLHQRAYTCANSATVTDVALDMRAPPFHLSGGPKSDSSERLAAETNLYTRSLNGLAATAAGVAASAHRKVGVVPYGMSRMY

SEQ ID NO: 33474 - protein, 84 aa, Oryza sativa
MAVSNLEARQPLVPLGSVEELLAAYDSKRDELPPPVTVWEWGWTKSAETWNGRAAMLAVLALLVLEVTTGEGFLHQWGILPLFH

SEQ ID NO: 33475 - protein, 355 aa, Oryza sativa
MISSLLLYLKFFPTAEESIEYYNQKRCVDGKGLILPSQIRYVKYFERILTYFNGENQPPRRCMLRGFRLHRCPYWIRPSITVSNHNGVLFTTKKHPRTKELMPEDFWFSAPKKGIMVFALPGEPGLTEVAGDFKIQFHDRQGDFYCWLNTTMMENRVTLNPTDLDDFDKRKLPSPGFQVEVVLVDYDGSQPPKPKPAAASTDQKSEADSSTGTVAKGNNASSAEVSNKESARNDKDDVFSDSEAEDGSSKGRREKVSRNVEGTTNAAKASETSSVQKEASAAASRIEKVSITSEQGSARTPDAAPLKSGVSSKSSSTTAPPPPPAAADSSMSEFKAIAADASVFSFGDEDDYESE

SEQ ID NO: 33476 - protein, 181 aa, Oryza sativa
MIFTFYKAQGLSVGSSLVEEDKLELATSLLAKAKEKGVSLLLPSDVIIADKFAPDANSQVVPASAIPDGWMGLDIGPDSVASFSSTLETTQTVIWNGPMGVFEFDKFAVGTEAIAKKLADLSGKGVTTIIGGGDSVAAVEKVGVADVMSHISTGGGASLELLEGKELPGVIALDEAVTVAV

SEQ ID NO: 33477 - protein, 206 aa, Oryza sativa
MFVVGVNEKEYKSDVNIVSNASCTTNCLAPLAKVINDRFGIVEGLMTTVHAITATQKTVDGPSMKDWRGGRAASFNIIPSSTGAAKAVGKVLPALNGKLTGMAFRVPTVDVSVVDLTVRLEKPASYDQIKAAIKEEAEGKLKGILGYVEEDLVSTDFQGDSRSSIFDAKAGIALSDTFVKLVSWYDNEWGYSTRVIDLIRHMHSTN

SEQ ID NO: 33478 - protein, 118 aa, Oryza sativa
MRKSKALIQGKLWTASAIFFVLNVVFIVVEVAFRAWVVRGATHGLGAGSRLLLGLAMLAALCVVVMLALVVQTVVYLVCKSYHHESIDKSNLSDHLEVYLGEYVPLKASDVQMEQFNL

SEQ ID NO: 33479 - protein, 188 aa, Oryza sativa
MIGPVDFDKSVDYWQQDKWSGQFPVKWHIIKDVPNSLLRHIILENNENKPVTNSRDTQEVRLDHRLQMLTIFKNHEVETTILEDFDFYEQREKAMLDIRQRQKQQHTDSEVQKPMVEAKEPVDLMNQISATFARAVQLGETKGSREDKPKVEDASAAAVAVPENEPVALAETEGLLADSEPSPLKESG

SEQ ID NO: 33480 - protein, 310 aa, Oryza sativa
MKVMRKDKILEKNHAEYMKAERDILTKVDHPFVVQLRYSFQTKYRLYLVLDFINGGHLFFQLYKQGLFREELARIYTAEIVSAVAHLHDNGIMHRDLKPENILLDADGHAMLTDFGLAKEFNENTRSNSMCGTVEYMAPEIILGRGHDKAADWWSVGILLFEMLTGKPPFVGNRDKVQQKIVKEKLKLPSFLSSEAHSLLKGLLHKEGGKRLGSGPGGSDEIKRHKWLKPINWRKLEARQIQPSFRPNVSGLTCIANFDECWTSMPVLDSPVATPVAGGAGHSSFAGFTYVRPAPFLQDVKPPSSSRLKD

SEQ ID NO: 33481 - protein, 374 aa, Oryza sativa
MSWWCCIPKSKKGENPYSHGVSGIPPEKNIRLFSYSELRSATENFNRSNKIGRGGFGTVYKGTIRNGRDVAVKVLSAESRQGVREFLTEIDVITNVKHPNLVELIGCCVEGNNRILVYEYLENSSLDRALLGSNSEPANFTWSIRSAICIGIAKGLAYLHEEIASPIVHRDIKASNILLDKLYNPKIGDFGLAKLFPDNITHISTRVAGTTGYLAPEYAWHGQLTKRADIYSFGVLVLEIVSGKSSSRSLLADDKILLEKAWELHEVGKLKELVDSEMGDYPEEEVLRYIKTALFCTQAAAARRPSMPQVVTMLSKPIRINERELTAPGYIHDYNGTVSKATNSSNSRFKHSASDTSDMFSTVVPPTVSEISPR

SEQ ID NO: 33482 - protein, 308 aa, Oryza sativa
MVPIDCFEEQWVIFRGKDGRPGCVMNTCAHRACPLHLGSVNEGRIQCPYHGWEYSTDGKCEKMPSTKMLNVRIRSLPCFEQEGMVWIWPGNDPPKSTIPSLLPPSGFTIHAEIVMELPVEHGLLLDNLSDLAHAPFTHTSTFAKGWSVPSLVKFLTPSSGLQGYWDPYPIDMEFRPPCMVLSTIGISKPGKLEGKSTKQCSTHLHQLHICLPSSRNKTRLLYRMSLGFAPWIKHVPFMHILWSHFAEKVLNEDLRLVLGQQERMINGANVWNWPVSYDKLGIRYRLWRDAIERGVDRLPFSNQSESGS

SEQ ID NO: 33483 - protein, 76 aa, Oryza sativa
MCVPYTGTEAWTRSLGYGVIDSWRPWHLNGQVSGYTQGYEHGLTFATIKGAGHTVPEYKPQESLAFYSRWLAGSKL

SEQ ID NO: 33484 - protein, 77 aa, Oryza sativa
MTVIAHKLGTTTAGASFFLDGTFSLNQTWSLNQGVRDKISSLANRYMAEVRRLSLPKNQTENVYRGFQELEEKLLTN

SEQ ID NO: 33485 - protein, 266 aa, Oryza sativa
MASRGGRGGRKRNRWATRSDRGGSHSELDSRYGGRDGLSGSSGRLDSSRSSRRHDYGDDGRSRRSGRGRSRSRSRSDSDRYSRSPKRSRRHSRSRTRSRSRSRSRSYTRNRRASRSRSRSPGASRRHERSATGSGSALPDSGHGERKRTPEADPSRNHTNHSDPKDDRHPEDGKVGKVDLDRSPTPQDKSGPYSPAYNGKTSRSVSPGNQVEGNNKAAEVSKNPDPSSPPHHGKTREDEEEGMIDEDGEIADDPRANATVQNGGDN

SEQ ID NO: 33486 - protein, 641 aa, Oryza sativa
MSMKGVDGRSASNNQFFHQGQNGSIGWFARSPLEAPAINNFPRLDRSHNSSLGALAPPMSIPRIDHPSGASPIGSCTVDPRSSAINNATFQPIPSFKGSSTVNQSIGTSILKVKKNEDLDGNCPGFALDPFCASRPQHQVAISSDEEQTECLMFEHSARHRENPHFANDKGPKNFNLNEALSDGQEDYLVEQDGGSVSSLPQSKASGFPWLIKTTDTCTRPSDLQNPRKVFAHSNRIVIDLNSNTDRKEAALTIHSLSDSASTSLDCGVKKESQDCGIKKDEAFGDITTRTEVACNTTQESATCLPVLCQEYVPGDDKAANGGDKKSSAPVRNFIDLNDDAPNEDNSESSVVSHECHVVSLQNNHGKRKFVIDLEVPACEEGVAWDFNQECSPSGKLDVTQEADDAHFTCTKIAAESIIALSMHVPTIAETPDDMLQWFADLALSSTDDHVEQAEAHDCVNNSSDDGLDSFESLTLKLEETKIDEYWSRPQAPEIPNDEQAGLSVNLLTKPKRGQQRRRRQKRDFQKDILPGLTSLARPEIIEDIQLLEGLVQASGGSWQSSLTRRGRYGGRPRGRKPRKNLSETIEEEEVPVSPPAKPDTAKPDAAEIEASDRGIIGWGRTTRRCRRPRCPSGYNISAAS

SEQ ID NO: 33487 - protein, 83 aa, Oryza sativa
MGEFDDYWARAYRGDSGVPHSDPQRLVTTWTGAFALGAAACVHHHASALASNIKSLPHYWQDMTMMLDQKRWKKILEKKQQQA

SEQ ID NO: 33488 - protein, 293 aa, Oryza sativa
MRTVALGIVAMACLVAIAHGGNFFQDAEVSWGQGRGKIVDGGRGLDLTLDRSSGSGFQSKSEYLFGKIDMQIKLVPGNSAGTVTTFYLSSQGSTHDEIDFEFLGNVTGEPYTLHTNVFTQGQGQREQQFRLWFDPTQSFHTYSIIWNPQHVIFAVDGTPIRDFKNHEARGVAFPKSQPMRVYASLWNADDWATQGGRVKADWSKAPFVASFRDFNADACVWSNGAQRCPVGTMETVAAPAGGRRGGAGGWWNQELSDMSYRRMRWVQRKFMIYNYCTDAKRFPQGTPAECKLR

SEQ ID NO: 33489 - protein, 211 aa, Oryza sativa
MQDGPAEHQWELIDNFLQNTASQLTVYGLFCLQEGLNERELCVFFRNNHFNTMFKYNGSLYLLATDQGFFSQSDLVWQKLDEVNGDGVFLTSNFTPFKAENPRNDSWNEQQAMTSTADYLAQFDNTTLQHSSGNSDLELAIALQQQEFERQQPQRHQSSTQQQEPVPQQQQQTPNQSHGTGRPGLVVGPTTARRPPAPQPTTPKKEKCIVM

SEQ ID NO: 33490 - protein, 74 aa, Oryza sativa
MQFSNGDRCWNGPDRSLKVRLRCGLNNELNGVDEPSRCEYVAVLSTPALCDEQKLKELEQKLKASSNQRDHDEL

SEQ ID NO: 33491 - protein, 257 aa, Oryza sativa
MAPCLLLVLFLLPALATGHQHPSTLGSSALSEWRSAKASYYAADPEDAIGGACGFGDLGKHGYGMATVGLSTALFERGAACGGCYEVKCVDDLKYCLPGTSIVVTATNFCAPNFGLPADAGGVCNPPNHHFLLPIQSFEKIALWKAGVMPIQYRRVNCLRDGGVRFAVAGRGFFLTVLISNVGGAGDVRSVKIKGTESGWLSMGRNWGQIWHINSDFRGQPLSFELTSSDGKTLTNYNVVPKEWDFGKTYTGKQFLL

SEQ ID NO: 33492 - protein, 157 aa, Oryza sativa
MKGAKSKGAAKPDAKLAVKSKGAEKPAAKGRKGKAGKDPNKPKRAPSAFFVFMEEFRKEFKEKNPKNKSVAAVGKAAGDRWKSLTEADKAPYVAKANKLKAEYNKAIAAYNKGESTAKKAPAKEEEEDDEEESDKSKSEVNDEDDDEGSEEDEDDDE

SEQ ID NO: 33493 - protein, 316 aa, Oryza sativa
MDNNPGKVPSGTDYPLMYRDVRSAVDLCHRDGTLKRMVAKDPSRYINEDLAIVPMLEMIRKSGRSTFLVTNSLWDYTDVVMNYLCRPYTSDVSSSHNHKWLGYFDVVITGSAKPGFFHDGNRAGLFEVEPDSGKLLNADLHIGSPRSGQQPSRPIHKIYQGGNVGHLHRLLSVASSSQILYVGDHIYGDILRSKKVLGWRTMLVIPELEQEVKLLSESKSTRKELRHLRMERDSIEDKIHRLEWSLKFENLTEDEKEKLFSEHDILLQKKEHVRRLHQEAQRQHHHKFHSVGATHEDGLSKLPICSSGREICVPLQ

SEQ ID NO: 33494 - protein, 287 aa, Oryza sativa
MLAFAGKVCHITELFDVLRCFTSCNMDPYLRIGEDLQLYVRLQSDLGNYGSDSDQEIARSVLSDCRTKVGINDQRVLDVVACALCNLTEMDKDVLVKELTEMFTPEEVPLFGSNSAFDWANFHVQAFSDESLSFDEECSRTSSVDGGLHESPITNTGSSISKTTMPQSVPRVLGVGQLLESALHVAGQVAGASVSTSPLPYGTMTSQCEALGSGTRKKLSSWLVNGHDSTPDNPAPSLPSAQHFIIPKVNSCGFESSIRTTLEPCSAVKLPPASPFDNFLKAAYRAQ

SEQ ID NO: 33495 - protein, 33 aa, Oryza sativa
MLHSSEAIFVRLPKTCIEGYHANIRYLRVWSNM

SEQ ID NO: 33496 - protein, 168 aa, Oryza sativa
MTTPSGRFAPHKRICLSMSDFHPESWNPMWSVASILTGLLSFMMDDALTTGSIRSTEGEKRRLAKASLAYNCESKNCPHFRKMFPEYVEKYNQQKQMEQTVAEPETQENPAPAPSPAVQQQAAVVANKAKPAAEAAGEQKQKKRVPFWMMLVMFSVFGAVMALPLMQL

SEQ ID NO: 33497 - protein, 266 aa, Oryza sativa
MLLIGAGKMGKLVVKHLIAKGCKKVVVVNRSVERVDAIPEEMKDIEIVYRPLTEMYEAAAEADVVFTSTASETPLFTKEHAEALPAISDAMGGVRLFVDISVPRNVSACVSEVGHARVYNVDDLKEVVEANKEDRLRKAMGAQTIITQELKRFEAWRDSLETVPTIKKLRSYADRIRASELEKCLQKIGEDALTKKMRRSIEELSTGIVNKLLHGPLQHLRCDGSDSRTLDETLENMHALNRVFSLDTEKAIIEQKIKAKVEKSQN

SEQ ID NO: 33498 - protein, 438 aa, Oryza sativa
MAATTTIPLLLLLLAATVAAAAAELSVYHNVHPSSPSPLESIIALARDDDARLLFLSSKAATAGVSSAPVASGQAPPSYVVRAGLGSPSQQLLLALDTSADATWAHCSPCGTCPSSSLFAPANSSSYASLPCSSSWCPLFQGQACPAPQGGGDAAPPPATLPTCAFSKPFADASFQAALASDTLRLGKDAIPNYTFGCVSSVTGPTTNMPRQGLLGLGRGPMALLSQAGSLYNGVFSYCLPSYRSYYFSGSLRLGAGGGQPRSVRYTPMLRNPHRSSLYYVNVTGLSVGHAWVKVPAGSFAFDAATGAGTVVDSGTVITRWTAPVYAALREEFRRQVAAPSGYTSLGAFDTCFNTDEVAAGGAPAVTVHMDGGVDLALPMENTLIHSSATPLACLAMAEAPQNVNSVVNVIANLQQQNIRVVFDVANSRVGFAKESCN

SEQ ID NO: 33499 - protein, 406 aa, Oryza sativa
MAAAATTSSHLLLLSRQQAAASLQCGLSFRRQPGRLAGGSSAPSVRCMAAVDTASAPAATEASKKSSYEITTLTTWLLKQEQAGTIDGEMTIVLASISTACKQIASLVQRAPISNLTGVQGAVNVQGEDQKKLDVVSNEVFSNCLKSSGRTGVIASEEEDVPVAVEESYSGNYIVVFDPLDGSSNIDAAVSTGSIFGIYSPNDECLADIADDQNLDQVEQRCIVSVCQPGSNLLAAGYCMYSSSVIFVLTIGTGVYVFTLDPMYGEFVLTQEKVQIPKAGKIYAFNEGNYALWDDKLKSYMDSLKEPGPSGKPYSARYIGSLVGDFHRTLLYGGIYGYPRDQKSKNGKLRLLYECAPMSFIVEQAGGKGSDGHQRILDIMPTEIHQRVPLYIGSVEEVEKVEKFLA

SEQ ID NO: 33500 - protein, 171 aa, Oryza sativa
MLRAGGRRLLAPGLRRVLGGGAAAPVAVGGAKAYHERVVDHYENPRNVGSFENDDPSVGTGLVGAPACGDVMKLQIRVDESSGKIVDACFKTFGCGSAIASSSVATEWVKGKQMEEVVTIKNTEIAKHLSLPPVKLHCSMLAEDAIKAAVKDYEAKKAKLAQKGEEKAAEA

SEQ ID NO: 33501 - protein, 241 aa, Oryza sativa
MRGADVDDRQLRDDLMTMLIAGHETTAAVLTWSVFLLAQNPSKMRKAQAEVDSVLSNETINVDQLKKLEYIRLIIVEALRLYPQPPLLIRRALRPDKLPGGYNGAKEGYEIPAGTDIFLSIYNLHRSPYFWDRPDEFEPERFSVPKKDESIEGWAGFDPDRSPGAMYPNEILADFAFLPFGGGPRKCVGDQFALLESTVALALLLQKFDVELRGSPDEVEMVTGATIHTKSGLWCRVRRRT

SEQ ID NO: 33502 - protein, 138 aa, Oryza sativa
MQEHLVLSCSYSSKVWLVGDGVTDEEQMKAQKGSHFVPYSQFPPNKARNDCVYHCTPALLVPESFENLHVCENWLPRRVMSAWRAAGIVHALEKWDGHECGGRVTGVQKAWSAALARGFRPYDDHHHPGITHDGRGGL

SEQ ID NO: 33503 - protein, 423 aa, Oryza sativa
MARKKIREYDSKRLLREHLKRLAAIDLHILSAQVTESTDFTELVNQEPWLSSMKLVVKPDMLFGKRGKSGLVALNLDLAQVRQFVKERLGVEVEMGGCKAPITTFIVEPFVPHDQEYYLSIVSERLGSTISFSECGGIEIEENWDKVKTVFLPTEKAMTPDACAPLIATLPLEVRTKIGDFIRGVYSVFQDLDFSFLEMNPFTMVNGEPYPLDMRGELDDTAAFKNFKKWGNIQFPLPFGRVLSPSESFIHELDEKTSSSLKFTVLNPKGRIWTMVAGGGASVIYADTVGDLGYASELGNYAEYSGAPNEEEVLQYARVVLDCATADPDGRKRALLIGGGIANFTDVAATFSGIIRALREKESKLKAARMNIYVRRGGPNYQTGLAKMRTLGAELGVPIEVYGPEATMTGICKQAIDCIMAEA

SEQ ID NO: 33504 - protein, 299 aa, Oryza sativa
MNRRHFLQCPSSLLSKNFEKLLQCDQRLNQLSQQPDIILDSPVFEPRCSIFEDPVESKCQGFTNLKDEHELSGFSGSLSPCAGSSMSAKIEVNDSIATQAGFLAQPGNPGPSAVNVQGVSRNVNGAPELNIPSWWSQLKVPGLRPSMSVDDLVNHLGNCISEQITSVNPTLPSNEVPTKETLEEIAQYLLGDAQGPPASTSDERSLMARVDSLCCLIQKDTPPVAQPKPEPNDSDSIGGDGTEGSDEEFSSAASTVKTTGPAQPPAMSRKDSFGDLLMNLPRIASLPQFLFKIPEDSEN

SEQ ID NO: 33505 - protein, 53 aa, Oryza sativa
MVLVSKIYSGYKEDWKQLKRRTLSEKVPSLSSLLVLVGFRNFSAGRISNERRL

SEQ ID NO: 33506 - protein, 339 aa, Oryza sativa
MGGGSSSDFHSPFDLFEQIFQNRGGFGGRGHRQKRGEDVVHTMKVSLEDLYNGTTKKLSLSRNALCTKCKGKGSKSGAAATCHGCHGAGMRTITRQIGLGMIQQMNTVCPECRGSGEMISDKDKCPSCKGNKVVQQKKVLEVHVEKGMQHGQKIVFQGEADEAPDTVTGDIVFVLQLKDHPKFKRKFDDLFTEHTISLTEALCGFQFVLTHLDGRQLLIKSNPGEVIKPGQHKAINDEGMPQHGRPFMKGRLFVEFNVEFPEPGALTPGQCRSLEKILPPRPRNQLSDMELDQCEETTMHDVNIEEEMRRRQQHRRQEAYDEDDDEDAGAGPRVQCAQQ

SEQ ID NO: 33507 - protein, 216 aa, Oryza sativa
MKQKGGNSSSHEAMSNEWLENGQCPLARSYRAMSGILPLVAKALQPPAGVKLKCPPAVVAVRAALARTELVKSLRPQPLPAKMVAIALLGMAANIPLGVWREHTKKFSPQWFAAVHAAVPFIGMLRKSVNMPKTAMAFTIAASIVGQTIGSRAERIRLKALAAKSDADSTTVADMYPNKTGNCSDTEGKAWDPLAMKMMAGRASGGAAAPTPSMCF

SEQ ID NO: 33508 - protein, 416 aa, Oryza sativa
MAAAPYHQPTSLEEVRTLWIGDLQYWADENYLYNCFAHTGELQSVKIIRNKLTSLPEGYGFIEFISHEVAEKVLQTYNGTQMPGTEHTFRLNWASFSSGERRPDAGPDHSIFVGDLAPDVTDYLLQETFRVSYPSVKGAKVVTDPNTGRSKGYGFVKFADENEKNRAMTEMNGMYCSTRPMRISAAIPKKTTGSQLQYGAAKAMYPAAGYAVPQVQPVLPDSDPTNTTIFIGNLDQNVTEDELRQICVQFGELIYVKIPANKACGFVQYASRASAEEAVQRLHGTTIGQQVVRLSWGRSPASKQDQSAVWSQQADPNQWASAYYGYGYDAYGYAQDPSYAYNSYAGYTQYPQQVEGATDMASAAGSHAPGMEKEEVYDPMNLPDVGKLNASYIAVHGRAMLGRSLWLRTSSLPQSA

SEQ ID NO: 33509 - protein, 104 aa, Oryza sativa
MLQELGKQNPQILRLIQENQAEFLRLVNESPDSGAAGGNILGQLAAAMPQALTVTPEEREAIQRLEAMGFNRELVLEVFFACNKDEELAANYLLDHGHEFEDQQ

SEQ ID NO: 33510 - protein, 390 aa, Oryza sativa
MAAAILLRRVPPARAQATALIAARSISDSTAPLTIETSVPFTSHIVDPPSRDVTTTPAELLTFFRDMSVMRRMEIAADSLYKAKLIRGFCHLYDGQEAVAVGMEAAITRSDSIITAYRDHCTHLARGGDLVSAFAELMGRQAGCSRGKGGSMHFYKKDANFYGGHGIVGAQVPLGCGLAFAQKYRKEETATFALYGDGAANQGQLFEALNISALWKLPAILVCENNHYGMGTAEWRAAKSPAYYKRGDYVPGLKVDGMDVLAVKQACKFAKEHAIANGPIVLEMDTYRYHGHSMSDPGSTYRTRDEISGVRQERDPIERVRKLILAHDLATAAELKDMEKEIRKEVDDAIAKAKESPMPDTSELFTNVYVKGFGVESFGADRKELRATLP

SEQ ID NO: 33511 - protein, 232 aa, Oryza sativa
MKIKAQELRERARKKKEEEERRMEREREKERIRIGKELLEAKRIEEDNERKRMIELRRLEKEEEKRAREKIRQKLEEDKAERRRKLGLPPEDPAAPKPSAPPPVEEKKRALPVRPATKAERMRDCLRNLKQQNKDDDAKVKRAFQTLLTYIGNVAKNPDEEKFRKIRLTNATFQERVGNLHGGIEFLQLCGFEKLEGNEFLFLARDKVDKAVLNTAGAELNSAITNPFFGVL

SEQ ID NO: 33512 - protein, 163 aa, Oryza sativa
MKLYHETALATGKRILSLIALSLNLDVEFFDCPVAFLRLLHYPGEANESDDGNYGASAHSDYGVLTLVATDGTPGLQICREKDRCPQLWEDVHHIEGALIVNIGDLLQRWTNCVFRSTLHRVVAVGKERYSVAFFLHTNPDLVVQCLESCCSEACPPRSSSSC

SEQ ID NO: 33513 - protein, 291 aa, Oryza sativa
MVTRKCKGDIFARIRDKLTKTDVLNLASSLGVQMRNIHQLPLPHVEHISKSGNEDIKAKENSISDVTHVPPEWKQVVSTLDRRKKSIKKHLSNWGGSIPQVLIEKAEEYLPDDIRFLIKFVKDDDGDSVYVVPSWIHSDIMDDNILIEGTTEPGTSTDCIAVEDLNKMDAIHIIDFSDLSIGDPLCDLIPLHLDVFRGDIDLLRQFLRSYQLPFLRAESNKDIYKSIQNSKFSRASYRAMCYCILHEDNVLGAIFSLWKDLGTATSWEDVEHLVWGELNQYQQSCSVGEIN

SEQ ID NO: 33514 - protein, 227 aa, Oryza sativa
MKQRYHYNVADARLHQHIEKGNDDGLFISSVASSANLWALIMDAGTGFTSQVYELSPIFLHKDWIMEQWENNYYISAIAGATNGSSLVVMSKGTPYTQQSYKVSESFPFKWINKKWKEGFHVTSMTTAGSRWGVVMSRNSGFSEQVVELDFLYPSEGIHRRWENGYRITSTAATGDQAAFILSIPKRKLMDETQETLRTSAFPSNHVKEKWAKNLYIASICYGRTVS

SEQ ID NO: 33515 - protein, 188 aa, Oryza sativa
MVGSPDLISIPGEIGRTYEANVDDVGYRLVIIYTPVREDGVEGQPISASTEPIAVEPEIYKEVKQKLDDGSVKFEVLCDKDRTPKKAQVMGHLERRILEVNRKRIKVVKPGSKASFPTTEVRGTYVPPFHVELYRNDQHRFKIVVDGESEVDLMVQTRHMRDVIILVIRGLAQKFNSTSLNSLLKIEA

SEQ ID NO: 33516 - protein, 207 aa, Oryza sativa
MSAQIAPAEQVCYVHCNFCNTILAVSVPGNSMLNIVTVRCGHCTNLLSVNLRGLMHSAPALQDHHHHHLQESGLSGCFRDQSGYPEFGFSAASSSSKLRLPPAAAAMVSYSQQNQQLEQALHARPPEKRQRVPSAYNRFIKEEIRRIKANNPDISHREAFSTAAKNWAHYPNIHFGLSPGHEGGKKLVDVDPIPTAPSSKKIQGFYS

SEQ ID NO: 33517 - protein, 495 aa, Oryza sativa
MLLLAPSPAAAAAAARRRKVGGSALRVRCSSVRELERSPNPRPGERLPPLREAKRVVLVRHGQSTWNAEGRIQGSSDISVLTPKGESQAETSRLMLLSDSFDACFTSPLARSRRTAEIIWADRDDDLIPDSDLREIDLYSFQGLLKNEGKERYGVIYRQWQKNAANFSIDGHYPVRELWDRAQNCWERILAHEGKSVLVVAHNAVNQALVASSLGLGTEYFRILLQSNCGASVLDFTPQAGGGPPAVCLNRLNQTPNSPVASGSSAGRKTSKRIILACQGATQNSAEIGVSGMGYAPLNMLGIIQSQKTAELLLDQKVNGILCSPQVAAFDTATTICEVQEAADCLGADCVPRYVEMKKLLELEIDDAFQTKQKSFGEIAQSGWLGSMEYKTLEGLWNQSKAAWQALLNELQDDTSERILVVVGHPGINLALICRCLDLTMDYMSSFHLDDGSISVIDFPDGPKGRGVVRCTNYTAHLGRWSIPITRTMETDEEF

SEQ ID NO: 33518 - protein, 448 aa, Oryza sativa
MAEGDAYAASAAASAASPRTPAPPETPSTQKRRQRGLVSRVWKGIFGRREDVEKLLQALSKEEEAVRSRLRRRARASRQSAHNVLAIAAALEIAAVGYAIMTTRSPDLSWQMRATRVLPMFLIPALAALIYSTITSVTKMLDNRDQHTLENLRAERQAKIDELKERTNYYTTQQLIQRYDLDPAAKAAAATVLASKLGADSGLRVFLGDESNRDATLSKSNDAQTTGPRQRKPGHLSNSTGRTYGPESLGGSYAYDGNEGVTTPNQRTVDHFRGPAGNDGGWLARAAALLVGEDPTQCYALICGNCHMHNGLARKEDFAFITYYCPHCNALNGPRQHDEHEMVSPGKETPISHSDGSIGHAGANLANSGAGSPIVKDLPTVEELPAESSVATNLPSAEELPAESPIANNLPAVEELAAESPVASSTPAIEELPAEGTVEKASIDHPAS

SEQ ID NO: 33519 - protein, 421 aa, Oryza sativa
MVVHPRHSGSDPDMVKITVAGGNVNGGAAASETYSQASSGPRDIHVVETGNMVISIQVLRNVTNNFSDENVLGRGGFGTVYKGELHDGTKIAVKRMEAGVMGNKGLNEFKSEIAVLTKVRHRNLVSLLGYCLDGNERILVYEYMPQGTLSQHLFEWKEHNLRPLEWKKRLSIALDVARGVEYLHSLAQQTFIHRDLKPSNILLGDDMKAKVADFGLVRLAPADGKCVSVETRLAGTFGYLAPEYAVTGRVTTKADVFSFGVILMELITGRKALDETQPEDSMHLVTWFRRMQLSKDTFQKAIDPTIDLTEETLASVSTVAELAGHCCAREPHQRPDMGHAVNVLSTLSDVWKPSDPDSDDSYGIDLDMTLPQALKKWQAFEDSSHFDGATSSFLASLDNTQTSIPTRPPGFAESFTSADGR

SEQ ID NO: 33520 - protein, 148 aa, Oryza sativa
MGKDSKPKDKGKGKQAAGSSGGDDAGGGGKGGKGKGGKSADGLGTCTYVKARHVLCEKQGKINEAYKKLQDGWLDNGDKVPPAEFAKIAQEYSECPSGKKGGDLGWFPRGKMAGPFQGVAFSTPVGATSAPFKSTHGYHFILCEGRKN

SEQ ID NO: 33521 - protein, 357 aa, Oryza sativa
MNVPGLTRENVASHLQKYRLYLSRLQKQNEERILGAARQDFSHKGTSENLNLRSSFQEQPSNIANGYPHASQNIQTQANMLDSQLEDTKSTVPLPVPDKKRTLASDAADSQNVTSASSLGGVLSFKSMPVNQDRKPSETMILECQAWTGGIPSKQFMQYPKHNHERCDLLGDYSCLPKPDLEHPVGPSNLYAPPPLISMSCGMEGDARDFSDVKPAIMDCIKSLSPALTCTVDSVSVQLSDSVVTSIDGDLKSSGVDGLPSIKDCCLDQTNSQGSLRPSQEPSIIGSTELASLPEDLPSYPLHGVSLENIGLSSIDLLNYSDAMILSGLQSNWYDDLEFSSEMMDYPSIDECLFASS

SEQ ID NO: 33522 - protein, 181 aa, Oryza sativa
MGLTFTKLFSRLFAKKEMRILMVGLDAAGKTTILYKLKLGEIVTTIPTIGFNVETVEYKNISFTVWDVGGQDKIRPLWRHYFQNTQGLIFVVDSNDRERVVEARDELHRMLNEDELRDAVLLVFANKQDLPNAMNAAEITDKLGLHSLRQRHWYIQSTCATSGEGLYEGLDWLSNNIASKA

SEQ ID NO: 33523 - protein, 475 aa, Oryza sativa
MEDCVGIKYSSVNEGEERKGGHGVPKVSIIPLIFLIFYEVSGGPFGIEDSVKAAGPLLAIAGFLLFALIWSVPEALITAEMGTMFPENGGYVVWVSSALGPFWGFQQGWAKWLSGVIDNALYPVLFLDYVKSSIPALGGGLPRTLAVLILTVALTYMNYRGLTIVGWVAVFLGVFSLLPFFVMGLIAIPRIEPSRWLEMDLGNVNWGLYLNTLFWNLNYWDSISTLAGEVENPKRTLPRALSYALVLVVGGYLYPLITCTAAVPVVREFWTDGYFSDVARILGGFWLHSWLQAAAALSNMGNFVTEMSSDSYQLLGMAERGMLPEFFAKRSRYGTPLIGIMFSAFGVVLLSWMSFQEIIAAENYLYCFGMILEFIAFIKLRVVHPNASRPYKIPLGTIGAVLMIIPPTILIVVVMMLASFKVMVVSIMAMLVGFVLQPALVYVEKRRWLKFSISAELPDLPYSNVEEDSTIPLVC

SEQ ID NO: 33524 - protein, 351 aa, Oryza sativa
MQSPQEHCDLNPLLQQQILQQASQQQIINPDAQNIQTMLSPSAIQQQLQQLQQMQQVQNDQKQKIQPDQSYQVPTSAVLPSPTSLPSHLREKFGFSDPNANSSSFITSSSSDNMLDSSFLQGSSKAVDLSRFNQPVASEQQQQQQQAWKQKFMGSQSVSFGGSVLHNSPTSKDGSVENKIGRDVQNQSLFSPQVDSSSLLYNMVPNLTSNVSDGNLSTIPSGSTYLQNAMYGCLDDSSGLLQNTGENDPATRTFVKVYKSGSVGRSLDITRFSNYAELREELGQMFGIKGQLDDPDRSGWQLVFVDRENDVLLLGDDPWESFANSVWYIKILSPEDVHKMGKQGNDPRYLS

SEQ ID NO: 33525 - protein, 343 aa, Oryza sativa
MGVTGEKFQLGTVGALSLSVVSSVSIVICNKALMSSLGFNFATTLTSWHLLVTFCSLHVALCMKLFEHKPFDARTVMGFGVLNGISIGLLNLSLGFNSVGFYQMTKLAIIPCTVILETLFFRKKFSRNIQLSLSVLLFGVGVATVTDLQLNAVGSVLSLLAIITTCIAQIMTNTIQKKFKVSSTQLLYQSCPYQALALFIVGPFLDGFLTNQNVFAFDYTSQVVFFIVLSCLISVSVNFSTFLVIGKTSPVTYQVLGHLKTCLVLAFGYVLLHDPFSWRNILGILIAVIGMVSYSYFCTKEAPPKPTEASPQLNQVKESESDPLISDSLSTAENGGNAGDDEA

SEQ ID NO: 33526 - protein, 441 aa, Oryza sativa
MRPAVAAALLLVAAAVAASPVSALYSAGSPVLQFNPNNFKSKVLNSNGVVLVEFFAPWCGHCQQLTPIWEKAAGVLKGVATVAALDADAHKELAQEYGIRGFPTIKVFVPGKPPVDYQGARDVKPIVEFALSQVKALLRDRLNGKTSAGSGGKKSGGSSEKTEPSASIELNSQNFDKLVTKSKDLWIVEFFAPWCGHCKKLAPEWKKAAKNLKGQVKLGHVDCDAEKSLMSKYKVEGFPTILVFGADKESPFPYQGARVASAIESFALEQLEANAAPPEVSELTGPDAMEEKCASAAICFVSFLPDILDSKAEGRNKYLELLLSVAEKFKKSPYSFVWTAAGKQADLEKQVGVGGYGYPAMVALNVKKGAYAPLRSAFQLDEITEFVREAGRGGKGNLPLDGTPTIVQSEPWDGKDGEVIEEDEFSLEELMADNSPVNDEL

SEQ ID NO: 33527 - protein, 192 aa, Oryza sativa
MARSRMSESEGTLPLSSMSYRKMLLKHWRVQMEALLWTGLSLWNMHFVMMMRKGMDTAQKEEAVIDLQTGGTIAGGLQVLMAEGVRGAALTMEEAGRGAARTMAGVVTEVALIITVVQVRKGATKVMRGAAPLTTTTVNAVKPALAMIGPAVAHLRGTRENEVAPHDACAAPSCFRSMDALLLCTELLMLSL

SEQ ID NO: 33528 - protein, 394 aa, Oryza sativa
MPPKASKKDAAPAERPILGRFSSHLKIGIVGLPNVGKSTFFNIVTKLSIPAENFPFCTIDPNEARVYVPDERFDWLCQLYKPKSEVSAYLEINDIAGLVRGAHAGEGLGNAFLSHIRAVDGIFHVLRAFEDKEVTHIDDSVDPVRDLETIGEELRLKDIEFVQNKIDDLEKSMKRSNDKQLKLEHELCEKVKAHLEDGKDVRFGDWKSADIEILNTFQLLTAKPVVYLVNMSEKDYQRKKNKFLPKIHAWVQEHGGETIIPFSCAFERLLADMPPDEAAKYCAENQIASVIPKIIKTGFAAIHLIYFFTAGPDEVKCWQIRRQTKAPQAAGTIHTDFERGFICAEVMKFDDLKELGSESAVKAAGKYRQEGKTYVVQDGDIIFFKFNVSGGGKK

SEQ ID NO: 33529 - protein, 367 aa, Oryza sativa
MKASIKFRDDDRPLVRAKVPVGVLGLPFLTGVSAGGGGDSRDLRFDLSTAFASGPALRLSYRPNDPLQPFALSVRTGLGPLGSPARAPFAISAEFNLLSSSPPAFSLLFKPRIGDFSLANSVISPPASASPAPPLPPPPPSHKLTDLANGGDDHRAFSFSGNGFAANVAAAGKSGGGVGALLSGMRLTTRSVLPLWSKASLRFQWGLRVPPELKAALADDGYGRKAGNLATNKLPLLVMNKITIEHTLRNPPHSDADKGKKKDAPEFQTEGFSLVKRQLEVLNAESIMLRRTVEDLRAEIGGNRAASMPGKGDARRMPSSLAPPPPQPFLAKPDRHGNGKEMVDSGPKPVSNEASEELKKALEARRK

SEQ ID NO: 33530 - protein, 251 aa, Oryza sativa
MPFYDASSNHKWVDGKDDYLNLNDLLYPPAENQPLFDAGDDLMAYFDATEDDFKFDIMGTEDSNSQLPDMSNFVQKDDNNNKFTLDGISNTALYGASSSGSHGNMYPDTAVPDMPMDDTVDKSFGKRLASMLGSIPAPPAMASEFPPSTGKSVVPLSAVNPSSSIRVTAGIIQLGGITFTGSTGHLQKNGDFNLLLSFTVEGDVSTKSIGFEPDTQMSTTPMVLRSGMYLFFVSAMILMLSYKVGLCIYSR

SEQ ID NO: 33531 - protein, 179 aa, Oryza sativa
MLQNPLDQYPIQYATDVWSGIQKEELWSPQANAEPSQSNEAADNGIIRRYRSMKTPETSVPQFKGKTQAKMRVGINKMATSSSESINQTIKFENSGRLVEHQKNQAHDVASTKRSDAGKPSTELSSNRGFLRGIRNAFAGCSDARWNMILVAGFAIGVAVVALHIGQRLGLSQRDQQHT

SEQ ID NO: 33532 - protein, 213 aa, Oryza sativa
MSKAAMIAAAFGGTLPPGVSGINDRCTLLVSNLNTDKIDEDKLFNLFSMYGNIVRIKILKNKPDHALIQMADGLQAELAVLYLKGAMLFGKKLEVNYSKYPTVTADPDARDYSTSHLNRFDSNVVKNYRHCCAPTKMIHISALPQDITEDTIHSLVGEHGTIANSRLFETNGKTQALVLFESVEEATEALVEKHASKLDRTNIRISFSQMQNI

SEQ ID NO: 33533 - protein, 230 aa, Oryza sativa
MVRGKTQMKRIENPTSRQVTFSKRRNGLLKKAFELSVLCDAEVALIVFSPRGKLYEFASASTQKTIERYRTYTKENIGNKTVQQDIEQVKADADGLAKKLEALETYKRKLLGEKLDECSIEELHSLEVKLERSLISIRGRKTKLLEEQVAKLREKEMKLRKDNEELREKCKNQPPLSAPLTVRAEDENPDRNINTTNDNMDVETELFIGLPGRSRSSGGAAEDSQAMPHS

SEQ ID NO: 33534 - protein, 383 aa, Oryza sativa
MDGASSISPAFTSNYQQSKLADPIQSKPKPLTPKDLMPVQFSSSLPDPTSICFEGIAAITTPNFEDHGNRASIASGAKDVNMFPTFKDQSSNRHDALFSNVDGYMQQRRNNHFGTEVCGLSESTGISQSDQFTVSKFQNGRPSSLGLSNGNLGVLSTGRREEAREGLFRPCSVKTSAGNEEQQKRPGDVKLFGQILSHQSSLQSSGSSVHGSKSKPPSPKVDKPASSRLLSNPRERLVYSSRPPIIANSGLEERAMRSFDHMDGRTIQPEPMVMVAKCQRPSAGVPVYSTKNGALSVFAEFQQPSMPPHTSDHKLLENFADLHKRNGIELLSGFQQPGRLGGAGVLVSGVSDPVAALKAQYGSGSKMLSSSNDVDTWKDIGSR

SEQ ID NO: 33535 - protein, 473 aa, Oryza sativa
MLGFGLSEPWVQHLSKTKFIRADREKLRTLFTFLGECLKLIVADNELGSLKLALEGSYVEPGPGGDPIRNPKVLPTGKNIHALDPQAIPTTAALKSAKIIVDRLLERQKVDNGGKYPETIALVLWGTDNIKTYGESLAQVLWMIGVRPVADTFGRVNRVEPVSLEELGRPRIDVVINCSGVFRDLFINQMNLLDRAVKMVAELDEPEEMNYVRKHAQEQARELGVSLREAATRVFSNASGSYSSNVNLAVENASWTDEKQLQDMYLSRKSFAFDCDAPGAGMREQRKTFELALATADATFQNLDSSEISLTDVSHYFDSDPTKLVQGLRKDGRAPSSYIADTTTANAQVRTLSETVRLDARTKLLNPKWYEGMMKSGYEGVREIEKRLTNTVGWSATSGQVDNWVYEEANATFIEDEAMRKRLMDTNPNSFRKLVQTFLEASGRGYWETSEENLEKLRELYSEVEDKIEGIDR

SEQ ID NO: 33536 - protein, 298 aa, Oryza sativa
MVGKYTGLSDSYLSVLKALLHASVAMGRKLVVEWVPSCDLEDSAAKETPEAHKKAWKLLRGAEGILVPGGFGDRGVQGKILAAKYARENNVPYLGICLGMQIAVIDFACSIMKLPGANSTEFDPDTMSPCVIFMPEGSKTHMGATMRLGSRRTYFHATACKSAKLYGNARFVDERHRHRYEVNPEMVPEFEKAGLSFVGKDESGRRMEIIELPSHKFFIGVQFHPEFKSRPGKPSPLFLGLIAAASGQLETLLQPSSNIVNPNPMPRFPIPKKTIYHAKKPLDSLVNGYFANGNVIHT

SEQ ID NO: 33537 - protein, 274 aa, Oryza sativa
MSNVQAESHQTKPATTNYRTSIDSPKQSSSAEKSQDIPSRPLMMTPQEKIEKLRRRQQMQALIAIQQQQQQFGQDGSGSDTMVPQAYSPKSKNPDSLGSSVVIDDNANKVFSLELIPTGHEEIQKSSGIPDDPFIEEKIYYQLQDALAKLDTRTRRCIRDSLLRLAHSVSERQITSDRSSANKSNKDDDEVSEDTSKRRSPASEAETNTNPIDRIVAHLLFHKPCSKVSTPAKEEIKSSTPLPTEPDSKIPTDAPGGPSENHQNGQEMTLQPSL

SEQ ID NO: 33538 - protein, 227 aa, Oryza sativa
MVWSKGYTELLQLLQKHQKELSGLKMELYGSGEDSDEVKASAEKLNLDVRVYPGRDHGDSIFHDYKVFINPSTTDVVCTTTAEALAMGKIVICANHPSNEFFKRFPNCHMYNTEKEFVRLTMKALAEEPIPLSEELRHELSWEAATERFVRVADIAPIMSIKQHSPSPQYFMYISPDELKKNMEEASAFFHNAISGFETARCVFGAIPNTLQPDEQQCKELGWRLQE

SEQ ID NO: 33539 - protein, 89 aa, Oryza sativa
MWGRKISSRISSLAIGLLGISALFNDVAFYWVVLIFFLQRGPISPLSEEITEPENNYISIGVAILLFGLLVCLPYPFPFDPSQLTDFDL

SEQ ID NO: 33540 - protein, 64 aa, Oryza sativa
MSYKVTILKDWVLQFFTMLLSFLSLSGRSQAPFLSQRLSTRSNLYTQIGLRLTRSWKTFLTWKN

SEQ ID NO: 33541 - protein, 133 aa, Oryza sativa
MALLCSELQVRAMVVIAAVMLAAAAPAGTTCEQLESVARSCTGYLKRSLIFLNDACCDGAESVYDALTTDAAVDLGFVCRCLRGFVISESLRPYLYRVANLPRLCRFKDRGPIPYNNSTIHDCRFSGTTRHSL

SEQ ID NO: 33542 - protein, 293 aa, Oryza sativa
MPCIFVDFDAVGQINSSGDENTTPLVKIAPARTWVGGEVLAPKISTFSSRGPSPLLPQFLKPDVAAPGSNILAAVKDSYKFQSGTSMACPHVSGVAALLKALHPDWSPAIIKSALVTTASNDRYGLPILANGLPQKIADPFDYGGGFIDPNKATDPGLAYDVDPKDYDLVVNCESANSSCESIFQNLNLPSIAIPNLTMPTTVLRTVTNVGQDDAIYKAVVQCPPGVRISVEPSVLQFKQGKKKQSFKVTFSMTHKVQGSYLFGSLAWCDGAAHYVRIPIAVRPVISENYADL

SEQ ID NO: 33543 - protein, 203 aa, Oryza sativa
MSAYCGKYKDELIKNAAYIGTPGKGILAADESTGTIGKRFASINVENVEENRRSLRELLFTTPGALQHLSGVILFEETLYQKTKDGKPFVDVLKEGGVLPGIKVDKGTVEVAGTNKETTTQGHDDLGKRCAKYYEAGARFAKWRAVLKIGPNEPSQLSIDLNAQGLARYAIICQENGLVPIVEPEILVDGSLPVIGSSFLVFL

SEQ ID NO: 33544 - protein, 518 aa, Oryza sativa
MAPRARVAVYKVLFDEGGYTTDIVAAIDQAIADGVDVLSISLGLNNRPLHTDPVAIGSFAAMQHGIFVSTSAGNDGPGLSVLHNGAPWALTVAAGTVDREFSGIVELGDGTTVIGESLYAGSPPITQSTPLVYLDSCDNFTAIRRNRDKIVLCDAQASSFALQVAVQFVQDANAAGGLFLTNDPFRLLFEQFTFPGALLSPHDGPAILRYIQRSGAPTAKIAFRATLLNTKPAPEAAAYSSRGPAVSCPTVLKPDIMAPGSLVLASWAESVAVVGNMTSPFNIISGTSMATPHAAGVAALLRAVHPEWSPAAIRSAMMTTAATLDNTGRSINDMARAGHAATPLAMGSGHIDPNRAADPGLVYDAVPGDYVELMCAMGYNLSDIRAVTQWSTYAVNCSGASSPDLNYPSFIAYFDRRSAAAAAAETKTFVRVVTNVGAGAASYRAKVKGNLGGLAVSVTPSRLVFGKKGETQKYTLVLRGKIKGADKVLHGSLTWVDDAGKYTVRSPIVATTLSSTRL

SEQ ID NO: 33545 - protein, 344 aa, Oryza sativa
MAAAAAGGGGGGGGSGRLLRGATAKAFHGDGSSHHRMMPSSSSSVAAGGGGGVAGPCRIPSLKFPSLWESKRQGGGVGSRAAERKAALIALGAAGVTALERERGGGVVLLPEEARRGADLLLPLAYEVARRLVLRQLGGATRPTQQCWSKIAEATIHQGVVRCQSFTLIGVAGSLVGSVPCFLEGCGAVVRSFFVQFRALTQTIDQAEIIKLLIEAIDMFLIGTALLTFGMGMYIMFYGSRSIQNPGMQGDNSHLGSFNLKKLKEGARIQSITQAKTRIGHAILLLLQAGVLEKFKSVPLVTGIDMACFAGAVLASSAGVFLLSKLSTTAAQAQRQPRKRTAFA

SEQ ID NO: 33546 - protein, 266 aa, Oryza sativa
MSQVGSAPETMDLETENRLASLLLEEARRLQAEADREGVHAYLRKPNVRRRPNSRFLTATVRGVQQANRVVEVNEMWRAREKELELESKMKRSRGLGDARGEKRKSDLRNQSSSPRVEEEGIAYNSSYSDQEDGLGDDDIEKFLHSRVKRGRGAVGSRMDEPGPYLNVASRSQENEPNADTQVEEKWERRVQGPEKPVSLRSRSPDDYWRREALDGEPSSPELHKKKEKKKEKSSEKKDRKERRKKKDKKKSKHRHHHHHKSRQRE

SEQ ID NO: 33547 - protein, 296 aa, Oryza sativa
MYQRKQLADLFSDIGDQQKELVRQMGFDGLLSMRLTKLNKQFGAWILCKLDPSSGNLFAGSKHEICLTCEDVSLLLGIPCGRKQILPAIKNEVKDVKAYMCEIFEKDSFDGITIATIQRILEKKFTRTMTVHEQIVFKTAFIIFVVTKFLAPQSVNNHISIRYMKALVDVENIHKYNWAEFVLHEIKDAAAALQDKIRHRKSIGYINGCIILPELFYLHHLDFGTDTPGHENISRIGVYNDSMIAEFIDRDVILKNRKPFPAYGKMKLRNRHVEKCNLGHPTGATEAAHVNRSFDT

SEQ ID NO: 33548 - protein, 197 aa, Oryza sativa
MDSSGRNSQQQLLKPRVDAETLQPSHWLSDPQNERKGELSLHYVTLDDGGEAFSLLNRNLPIYMHCPHCKSSDRKGNQDAKVAAAVSQLQRIFIVTPDFPVLLASCPVVQFEASCLPSNASDHDQQGSFSLGCRVVLPPESFLTMRLPFVYGVETRDGNTAPLKYLEEQPELTAWLVGGTALQIVSVGHTNEKEAPL

SEQ ID NO: 33549 - protein, 412 aa, Oryza sativa
MPPTKRAKKAAAAGGGDLIGALPDAMLHRILSLLPAQEAVRTCVLARRWRHLWRSAPGLRVVRAAGRPPATVEELQGFVDHLLLLRGGSSLDTCELSFDQIRRQDIPRVNLWIRHMVMCKVRVLVLHLNPYCHELDELPLVSQHLTRLELSGLILNDSFLNFSSCPALDYLEIVQCYFSSLTKITSQSLKRLRIIKCFTGSRPHVHATNLISLHLDTITRTPVLERLPSLVKADIKLNSQCRDFSSFDDFSGGCNHEFCGGCRGVQAENCVLLRGLSEAKNLALVAETKMFVFRRDLKWCPIFRNLKTLLLNECWCVLSDLSALACILQHSPVLEKLTLQLFSMGPKHKVKMKGSRHPSGVSAAMLKYLEIVEVKCEVVDESVLDVLKFLSSLNICKITTGTHAFYIHSICI

SEQ ID NO: 33550 - protein, 147 aa, Oryza sativa
MVARLKLKGIDGRAPFALVHPKFPPTSGNRWRITEDDDYVKLWFHVGEIDREKLKVRIEHDTVLLVSYGGAGDETSTPANSLDVRLLLPNKPYDTAKVEAELTFGTLLVTVAKRKPLQGRDKVGIPITPAPSNEKTTTATGQTGSET

SEQ ID NO: 33551 - protein, 163 aa, Oryza sativa
MAAAAQRLVAAVVVLVACLALPAARGLNITAMLNGYPDYKMFNKYLSETKVCDEINARESITLLVLGDGPMSTLVLDADQSLAGIKNALRLHAILDYFDPKKIRGLPDAGRRAVEAGGSQGNEGVVRRRVAVSSARRISRGRVFLRAALSTSFFFPFFHVQCR

SEQ ID NO: 33552 - protein, 612 aa, Oryza sativa
MNQDNYMEEALKMRNLLQEFLTEHGVRRPSILGVREHIFTGSVSSLAWFMFNQEHSFVTIGQRLLANPLKVRFHYGHPDVFDRIFHLTRGGVSKASRSINLSEDIFAGYNSTLRGGNITHHEYVQVGKGRDVGLNQISKFEAKVANGNGEQTLSRDIYRLGHRFDFFRMLSCYFTTVGFYFSTLLTVVTVYVFLYGRLYLALSGLEEGLLTQRRYIHNHPLQVALASQSLVQLGFLMALPMMMEIGLEKGFGQALSEFIMMNLQLAAVFFTFSLGTKTHYYGRMLLHGGAQYRATGRGFVVFHAKFAENYRLYSRSHFVKGIELLILLIIYQLFGQSYRSTIAYIFVTFSMWFLVLTWLFAPFLFNPSGFEWTKIVDDWSDWNKWISNRGGIGVSPDKSWESWWEIELEHLKYSGTIGLFVEIILSLRFFIYQYGLVYHLNITGDKSILVYLISWLVILVVLLVMKTVSVGRRRFSADFQLFFRLIKFMIFVSFIAILIVLIAILHMTLRDIFVCFLAFLPSGWGILLIAQACKPLARRAGLWGSVRALARAYEIIMGVLLFTPITILAWFPFVSEFQTRMLFNQAFSRGLQISRILGGQKKERERSSRNKD

SEQ ID NO: 33553 - protein, 504 aa, Oryza sativa
MRQRAKRLKMNVRTLFWTSNDVVVRMNLVDAVQRLGIGHLFKDEIRRTLNDIHQSEFTSSSLHEVALRFRLLREHGLWVSPVTFNKFKGDDGRFMNGIADEPRGLLSLYNAAYLLVHDEPELEEAISFSRYHLKSMMQGNNLKHPLSDQVKRALNTPLPRTSKRTETLHYLSEYGQEEGHMSILLDLAKVEFNLLQGVHLKELKAISEWWRDLNEHVELSYLRDRVVESYTCSHMLFYEEGLAFTRITFTKIIVLIIMMDDTYDSHATIQECRKLNEAIQRWNESAVSVLPEYLKNFYHKLLNNFKEFENQVVVSEKYRVAHAKKEFRILSHYFLQEAEWSHNNYKPSFEEQLALSTKTSTVQLLCVSTTVGRGDAITNEAFMWAASSTTVTSCAKIMRFMNDIASFERGKNKGEIASTVECYMNEHNIISEVAFAKLDSLVEDEWRTINQARCEHHQLLPVVQRVVNLAICIMFFYDKRKDAYTFSTHLQEIVRNLFINPITM

SEQ ID NO: 33554 - protein, 82 aa, Oryza sativa
MMAERGFINREGLDGRPWYKHMIYASSDQDDWGTKAFPGIVSAIDKANKLNTTESWQLLQHEIYRAARAVSKASAVLDGRLT

SEQ ID NO: 33555 - protein, 493 aa, Oryza sativa
MAAIKEESDYDSSRSSLTAPDSRRSWISDIGSSSSVSARSFGGDTPASSCRYKPHKANQAEWEAIRRLRAGAGRVGLEHFRLVRRLGSGDLGNVYLCRLREPWSSSSMTTTAGGCLYAMKVVDKDALAFRKKLRRAEVERDILRTLDHPFLPTLYADFEASHYACLVMEFCPGGDLHVARQRQPGRRFTVSSTRFYVAETVLALEYLHMMGVVYRDLKPENVLVRGDGHIMLSDFDLSLKCDVVPKLLRPARSAAAGGKPPLPPPSSCVPPTIQPVLSCIFRGVHKCHHAKECAGGGAAAGNNGDGDGNDEEAETETAEPEVVVVEPVAARSKSFVGTHEYLAPEVISGQGHGSAVDWWTLGVFMYEMLYGRTPFKGESNEKTLINIIKQPVTFPRLAGAAAAGEWEEMKTAQDLMLQLLAKNPKKRLGSTMGSAEVKRHPFFKGVNWALVRSVRPPEVPAPPAPAPKKVMTMSKKERQEPYNYRPENHFDYF

SEQ ID NO: 33556 - protein, 426 aa, Oryza sativa
MSQETPARRSLPHLLLVSAPLQGHVNPLLCLGGRLSSRGLLVTFTTVPHDGLKLKLQPNDDGAAMDVGSGRLRFEPLRGGRLWAPADPRYRAPGDMQRHIQDAGPAALEGLIRRQANAGRPVSFIVANAFAPWAAGVARDMGVPRAMLWTQSCAVLSLYYHHLYSLVAFPPAGAETGLPVPVPGLPALTVGELPALVYAPEPNVWRQALVADLVSLHDTLPWVLVNTFDELERVAIEALRAHLPVVPVGPLFDTGSGAGEDDDCVAWLDAQPPRSVVFVAFGSVVVIGRDETAEVAEGLASTGHPFLWVVRDDSRELHPHGESGGGGDKGKVVAWCEQRRVLAHPAVGCFVTHCGWNSTTEALAAGVPVVAYPAWSDQITNAKLLADVYGVGVRLPVRRRGHERAGGGGDAAEGAGVERQGERGGG

SEQ ID NO: 33557 - protein, 325 aa, Oryza sativa
MMIQSSSQLLLQTNIILILQTAVQKAKKASGSRSSNSHAESEEEDATEEPKDNQTEKVNEDEDPLLWKPFPPAWMHPNWWERLCEYWAKGEVLQMSLKYRKNRFVGGRAHHTSGSRSFAMQRQLMVIENGGKPVSELEIFNKTHKFNGGTGEFVSEKAKRIVEGFKKRMEEAGDKPADPDAAWIQQVGGRNRGRYYGLTGTIDKAKIAEIAKSIPGKRGQQKFSQEEVQQMINHALQGLNQSWEEKFKSLEQSVRGAPLLGVDHEHAPGSSAAGGDVQQDQSKHQDESDKQHVERRQSARHHDDDDDDDDEDYEVEEEEVVSTSD

SEQ ID NO: 33558 - protein, 231 aa, Oryza sativa
MADDRVAGGATPPPPPPPPPLDASAFTHTPYYCEENVHLLCKELIRSGISDPAGTNLYAVFISNEEKKVPLWYQKASHSGDGFVLWDYHVICIQSRRKNGEVLDLVWDLDSSLPFPCSFIQYVSDAIRPLSFGNSTYRRLFRVIHAPVFLRSFASDRSHMKDHAGNWIQLPPKYESIVAEDGTTNNLNEYITMSMDDVKDLESMADDVYSSKHGVVINETILPEFFSRLPG

SEQ ID NO: 33559 - protein, 285 aa, Oryza sativa
MEQAQLVKYKLTDNSWWKQVDYILSFTEPIYSMMRVTDTEEPRLHLINEMWNTMVEKVKAAIYKHESREPEEESAFYSVVHGILEDWWSRSKTPLQCLAHSLNPRYYSDSWINQAANRLPPHRDAEISRVRNNCWRKLFFTTDNLRTVKSEYGEFALLGTKHFSLNSRADRDKLDPKMWWATHGTSAQAVQSLAFKLLSQPVSSSCCQRNWRTYDSIRDIVRDKLRPKWADDLVFVHNNLRLLSRRSEEYHTDREARYWDVGDDNFKSLGGAGILESANLSLDEP

SEQ ID NO: 33560 - protein, 347 aa, Oryza sativa
MAGQQEQPEMAPPPPRRRVVCVTGAGGFVGSWLVELLLSRGYAVHATVRDPDDPKNAFLKQLENAPENLQLFEADVLDCGSLTAAFAGCEGVFHLATPVPEEKIVDPQKEMMAPTVEGTRNVLEACSAASVQKLVVASSIATVCLNPSWPQDMPKDETSWSDKKLCIENEDWYSVAKIEAEEMALEYGEKNGLHVLTICPGIVFGPMLQTVEINTSSKVLLYMIKGGDGPHVMNNKFWPMVDVRDVADALLLAYHKAGPSERYLCTLEQMDLKHLLDLMKNMYPNYNYADKMVDVDYKVEVTSEKLKNLGWNPRKREETLADSIEFFEKAGLLDGRPCRLPYFAVQE

SEQ ID NO: 33561 - protein, 237 aa, Oryza sativa
MEILPRQLLLGVCGAVVLVAGLAHAAYAGTAPVVVGLAMCSGCTRKNMNAEAAFKGLQVAVKCKNSRGEYDKMAVGKVDKSGAFSVPLAADLVGEDGVLKQDCFARLHSASSAPCPGQEPSMIVAAQQPGHDGAKTFVALAGKVHRPSAECASAFLCDPFHKHHHHIVLHPPVIVPPKHDHDHSLPPVHEPPVTVPDHKPAPVTVPDHKPPSTTTPVYAPPKPTPIYGPPTQQKNKH

SEQ ID NO: 33562 - protein, 92 aa, Oryza sativa
MKILHFQFPNRHNYQKPQVQSQRKVVMLSQMYPGHPVHMYFCHRTTVHQGLLPQTHLQGVSRQYHLQGGIQFQLHQGICLMTGPRPILVIVQ

SEQ ID NO: 33563 - protein, 133 aa, Oryza sativa
MIERFRWDVMTYHSFDRAKDDPHNYYPPEFLNSLTPNGLPLHVLKLKINCPIMLLRSIDPANGLCNGTRLVVHQFGKNAIDAEIVVGKHAGKRVFLPRIPLCPSDDEMFPFRFKRKQFPVRLSFAFTINKAQG

SEQ ID NO: 33564 - protein, 370 aa, Oryza sativa
MRRAPPRGRRPVVPAVEEHHGAGRPRRRARPASPTSSASSSTTPPVTTTASPAWRLVSWTSAPPVGSSPTCPPTVQLAETTVSHELRQQKHIDRDEKYCGLYTRAETSAWEGSSRRWRKSATATARPCSARRTTSGRRQRHRGSRAGRSRGSGVSSGRLSSTRAGRTGTNRSSSCRTARAATSRSSSSTGAPWRGAGGTSSTSSWRPPAPAGSCWDCSPWSPASATPPRWALPGGASPASSRRCRHPRCSTATRRWWSRGTRTTGAPDGSRSPGVRGDAIQDEGAAGGDEFQGAGGADDVHQRRRRADDGEAGVLGRRLQPGPGDRVRRRRWGRQFGEHTGSRHGDRRRSEAGVLQVRQDRRHVSRRRCL

SEQ ID NO: 33565 - protein, 378 aa, Oryza sativa
MSMADVAALCETVPQYNNLIRSALQRTQPAGVLLKCAAHVGYTQGFFVCQRKNLYHMLAGLIFSDLVEANAKGLDFTSYRSFAPGRRNWVLNENLRKVCGLEVQGSLRGSFDRGVILWHIATDLCMRRMMAENTIDEIDRKFLECTEAISDYMAHLLNLRPDMLMTGSRQHLFTQAMEEVELILKDIESQQQQPHSLKKLGRDILAKKIIDKAKAGVNAEVNAAIDIEMVREQEREIRVDEPPPPKYPLVHDACRLAEELMDKMGRRTRCQVMYRVWVGMLFYSASMCRGYLHAKSLGEGGEFLSFVWLILSLKGAKTLADKLQMPEPEPEPEREPEPKSGPYSPSQEIVQGEPTATVATTADEGEDLSFLLPHSPRS

SEQ ID NO: 33566 - protein, 522 aa, Oryza sativa
MAAVQLDSGLLVGFLFLATCLAVAIRSYLRSGGAAIPSPPALPVIGNLHQLGRGRHHRALRELARRHGPLFQLRLGSVRALVVSSAPMAEAELRHQDHVFCGRPQQRTARGTLYGCRDVAFSPYGERWRRLRRVAVVRLLSARRVDSFRALREEEVASFVNRIRAASGGGVVNLTELIVGLTHAVVSRAAFGKKLGGVDPAKVRETIGELADLLETIAVSDMFPRLRWVDWATGLDARTKRTAAKLDEVLEMALRDHEQSRGDDDDGGGGDGEPRDLMDDLLSMANDGGGDRGHKLDRIDVKGLILDMFIAGTDTIYKSIEWTMAELIKNPAEMAKVQAEVRHVAAAAHGDEDEDTVAVVREEQLGKMTLLRAAMKEAMRLHPPVPLLIPREAIEDTVLHGHRVAAGTRVMINAWAIGRDEAAWEGAAEFRPGRFAGGGAAAGVEYYGGGDFRFVPFGAGRRGCPGVAFGTRLAELAVANMACWFEWELPDGQDVESFEVVESSGLSPGLINPLVLAAKPLK

SEQ ID NO: 33567 - protein, 32 aa, Oryza sativa
MYITDVTGLLFTIMSELPEVHDQYMPVRFVSS

SEQ ID NO: 33568 - protein, 33 aa, Oryza sativa
MYNNICVTYILLCHAYMHVELWYLVCSGLGDLL

SEQ ID NO: 33569 - protein, 288 aa, Oryza sativa
MPGTAVTKSVVATEPGGKKREEIFVDIIERISVTFSSSGYILTSEIDGTIQMKSYLTGNPEIRLALNEDLSIGRTGSSSYDYRSSSGGGAVILDDCNFHESVHLDSFDIDRTLHLIPPDGEFAVMNYRITQEFKPPFRVTALIEEAGPSRAEVLLKIRADFSANVTANTIVVQMPVPSYTMRASFELEAGAVGQTTDFKEGSRRIEWNLKKIVGGSEHTLRAKLTFSQESHGNLTKEAGPVNMNFTIPMYNTSKLQVRYLQIAKKSKTYNPYRWVRYVTQANSYVARL

SEQ ID NO: 33570 - protein, 63 aa, Oryza sativa
MPFISQVESHHQSASAVSSSTPSQAAHGNLNTARAGPSHSRSSHQHNRDPVDGPNSKRQRTSE

SEQ ID NO: 33571 - protein, 279 aa, Oryza sativa
MAPLPSPPLLAESLATLRTASPSPPIPCSPRRTRPLVSARFARTAGRRSRSTGGRRDLRSCAYAAEAEYGSAEDEVADDFYSVLGVMPDATPEEIKKAYYSCMKACHPDLSGDNPEVTNFCMFINEVYTVLSDPVQRAVYDEIHGYTATATNPFFDDSAPKDQVFVDEFTCIGCKYCANVCPNVFRIEEDYGRSRVYSQSGSTELIQEAIDSCPVNCTHWTSAAQLSLLENEMRRIERVNVGLMSAGMGVSVDVFRLVNLLACVGKRDSQKFWKKLGHG

SEQ ID NO: 33572 - protein, 292 aa, Oryza sativa
MSALGRPQDMFSDTAIQLQPIFAQWVQNLHAGAPSVTAPGATTSTSLTWGGGELVAVGGKVALLPIPLGTADFLVHHIHAFTIHVTVLILLKGVLFARSSRLIPDKANLGFRFPCDGPGRGGTCQVSAWDHVFLGLFWMYNSISVVIFHFSWKMQSDVWGTISDQGVVTHITGGNFAQSSITINGWLRDFLWAQASQVIQSYGSSLSAYGLFFLGAHFVWAFSLMFLFSGRGYWQELIESIVWAHNKLKVAPATQPRALSIIQGRAVGVTHYLLGGIATTWAFFLARIIAVG

SEQ ID NO: 33573 - protein, 213 aa, Oryza sativa
MDRTHRLGQTKEVTVYRLICKDTIEEKILQRAKQKNAVQELVMKGKHVQDDHLMRQEDVVSLLIDDTQISHKLKEISMQAKDRLKKRRTKGIKVDKEGDLMLEDLDDQTSGAAEHDNTSSKKKKSSQKKLPKLQDNGSVDKNAEAEGGEVEDEDSIAAPRPKRSKRLMKNLNEDKEPEQEPTTDGDNPAEAAENNISPDDNDTEEAKDRTPSA

SEQ ID NO: 33574 - protein, 170 aa, Oryza sativa
MNPAPSRAPQRQQRGGEMSARYGGGLQFFADAPPAGVEGGAATARTFFPVPGGGGEQQPPERAMRQQHYGGGGSGAAEISLGHGHGHGGKHHFHQFGVEAKDGGGGGDQSGFLTRHNSSPPGFFSSPVMDNGYCTLCSLNYVYLRFAVLIRLFHYYRVWNVPINHRSSFS

SEQ ID NO: 33575 - protein, 460 aa, Oryza sativa
MSGGSGFPGFHKHGYDRDYARPLFRVSSFSDNGGGEEQEHYTPSPPRGRSMSRTTSTAPRLSPSVSKLSMKKLQQVVNEKSLEDEEMELMKEKYTKLLLGEDMSGSGKGVCTAVAISNAITNLYATVFGTCHRLQPLPPEKKAMWNREMDCLLSICEYIVEFSPKVQAMPDGSTHDVMATSPRSDILMNLPALEKLETMLLEILDSFEKTDFWYIDQRKQSFSDSMKFQRSEDKWWLPEPCVPESGLSDRMHRELQQKRDQASQIHKMAMEINSGILSEMQVPLSYIETLPKSGKVGVGDAIYRYMSAGDQFSPDHLLNFLNLSSEHEALEIADRVEAAMYVWRRKASMTHVVSKWENVTELNADGDKNLILASRARSLLLCLKQRFPGLSQTTLDTSKIQYNKDIGQAILESYSRVLENLAYNIVSWIDDVLIADGNARKGHNIRMQKQEFSKLSPQQY

SEQ ID NO: 33576 - protein, 291 aa, Oryza sativa
MRDSLRMPNSSSYLSMLVLPKALDLNSCRYESFEDTLARANAWIYSSQVSGIPIEFMNVQSEALLTKISGETASATVNSGSLSDLSNVTNATLYGFEDYHGVDIGVVKAARLWYSSIAEEMPLEIPQEGDTRLGFAIGRTEEGFIFISSVVDNDKDNEAPSTRSGLRDLFNQAREASKLLVISRVSNEKVLPWMISSSGAVRCFDTISLSQKLSLHRLAVRPIQLHLLMWEKPSGPVERIIRSPKLPPQSELPQVPWNLIESIEPRVDVDEDYVGDLSFRIDDLSVGTSWV

SEQ ID NO: 33577 - protein, 238 aa, Oryza sativa
MNDASEVLGVIFECLHKSYTSRADCQVKSHEINYIGSWDCASSSCIAHCLFGMDILERMNCQSCRLESRRLKYTSFFHNINASSLRTAKDMFPDHSFDDLLKIVIMNDHLACDPEDGGCGKPNHIHHILSSPPHVFTVVLGWQNNKESVDDISGTLAGISTEIDISTFYRGLDQGSKHSLVSVVCYYGQHYHCFAFEDGQWVMYDDQTVKVVGNWDDVLVMCKKGHLQPQVLFFEAAK

SEQ ID NO: 33578 - protein, 79 aa, Oryza sativa
MSSSKGLSSSVPPQGGSGASKRHADIHHEVTNLPGSKGFTPSRNNNQQPYNGQGAHSLTYGFKTFATKARACPNWSYKP

SEQ ID NO: 33579 - protein, 62 aa, Oryza sativa
MEMCMDDKWKLTKKGSRRLEEGRASRGPSRSVPGRLASLVKEQRARFYIMRRCVTMLVCWRD

SEQ ID NO: 33580 - protein, 51 aa, Oryza sativa
MLAKRDQGGDSWRSLRRSESAWNLFVLDVILKSTASRQWILLGSACALTPV

SEQ ID NO: 33581 - protein, 93 aa, Oryza sativa
MVRRSCGGYTRVQQRRRQHVVGTLAATAHGGSESGMWELQQRVGAATTTRRCGRNGNTVSILTAARSSCGRLSSLDSRHIWLASWRLCFSWNI

SEQ ID NO: 33582 - protein, 103 aa, Oryza sativa
MVDMAEAAASMSPELAAALAKVAVFAVVQALVYLILRKSSGVFSPDRTAAAGSRSLSFRPMRSMSVRRFLAALSDVPVGVTEDGGSPAPAPAPPHRGPADLAE

SEQ ID NO: 33583 - protein, 114 aa, Oryza sativa
MRREGRQRGWVCVYDRALVDPEGKRRVVGAVAAPATVANGGFIRAPRKPTNHSKFTGGRAFRELASGKGACSGGPAASTTGGKGRHKFKHDEIKAYYLELEAGADDAVDELGSL

SEQ ID NO: 33584 - protein, 84 aa, Oryza sativa
MQFRSLVVALAAVVAVTLAPTTSAMELATNATAANSTVTTAPTSNSTAKTTTPTPSPSKKSGASTAALAGGATLFAATLAFTSA

SEQ ID NO: 33585 - protein, 336 aa, Oryza sativa
MVVPAATLKQQAQRGEEVRRWWWWWWGSSLQSADFSLGRRTAPLNSVASLQQQRQQKQKAGSHGRGEEEGEGEEEEAQGEGEGEGGHPRWGGALQAERGGEGGAVRRPVHREVVHGAAGVAAGAAPAAGHPAGVPERVPEPAVPVHHGVHAHQLHHPGAPGVAHAHAGAGHQEVQGGALRVRVRGHEGRRRPALAVHDPARRRQQEAHPGAHRQRDGPVQVQEGLPHHLRLRRPPPRRRRLHVRRRPQEDTRVRGGAQGFLGSHRHARHAQPEEHHLAVPGRSGSLIQLSQVLLIVSSVQVLLLACNLQRSLILFLRFNWFIPVSMFHFLCWKGVV

SEQ ID NO: 33586 - protein, 14 aa, Oryza sativa
MPADGAAEGRAERR

SEQ ID NO: 33587 - protein, 22 aa, Oryza sativa
MFPAWPVSTCGSPQALAPTRAI

SEQ ID NO: 33588 - protein, 121 aa, Oryza sativa
MNSRRDFRSHRAALFDGIEEGAIRSSAYSSQIHEHENDQAMDSLHDRVSVLKRLTGDIHEEVENHNRMLDRMGNDMDASRGFLSGTVDKFKMVFETKASRRMATMVASFISVFFLIYYLTK

SEQ ID NO: 33589 - protein, 94 aa, Oryza sativa
MAPPRCTALLLLASLLLFFLCISATHEAARTASGQPIQEQEQEQHGKVEEETMAASFAAVEEQCGGEEGEEEECLMRRTLVAHTDYIYTQGNHN

SEQ ID NO: 33590 - protein, 40 aa, Oryza sativa
MGSFDPAGWRCRRRRRRWRLRLRCRSRRNQSILICGQGFF

SEQ ID NO: 33591 - protein, 72 aa, Oryza sativa
MIIPVRCFTCGKVIGNKWDLYLDLLQADYTEGDALDALGLVRYCCRRMLMTHVDLIEKLLNYNTLEKTETAG

SEQ ID NO: 33592 - protein, 91 aa, Oryza sativa
MAEEKKHHHLFHHKKDGEEESSGVVDYDKEKKHHKHLEQLGGLGAIAAGAYALHEKHQAKKDTENAPSTSTTRRRTPRSTPPTNTRSIPIE

SEQ ID NO: 33593 - protein, 88 aa, Oryza sativa
MDFFNLVNDNNIQLDIICRPISGASMNPARTIGPAIILGRYTGIWVYIAGPVFGAVAGAWAYNLIRFTDKPLREITMTASFIRSTRRN

SEQ ID NO: 33594 - protein, 137 aa, Oryza sativa
MPGRRRRPASQFAGVLHYTGTTHEFSSVASAPYQLALDATRRWEFWVIGGYLPGVLQLGALHPWLLVMAAPKTDGIGVFAVGCVVGGSELSGPKKFGRVISLARFSGGSCLGRFFDSFVWSFFFLAASGRIFAWFET

SEQ ID NO: 33595 - protein, 122 aa, Oryza sativa
MAIACALSVAAPSLTGKTNSNPPPRRSFQQQWRERRRRGVAARFSGKSADVDAEADSGRIEDDSSYLWKLGLGSVGGAAAIKYGSILLPDITRPNIVVALLMVSIPVAVAVLLLLKVSSRDD

SEQ ID NO: 33596 - protein, 192 aa, Oryza sativa
MDWPVRLRIALGAARGLAYLHSTTAVGVPVVHRDFKSSNILLTEHFEAKISDFGLAKLMPQDIDLYATTRVLGTFGYFDPEYALTGKLTLQSDVYAFGVVLLELLTGRRAIDLSQGTPEQNLIVRMQQVSGDRKRLRKVVDRDMARSSYTPESVSMFAGLAARCVCFESAGRPSMADCVKELQFIMYANMKI

SEQ ID NO: 33597 - protein, 83 aa, Oryza sativa
MRFSNKALIPSSFAWNPLASSFASTLVLSASSYQSSGAPTSAPSRKEPKRWFYPGQASKVNPGGKERPGGRSGVEELVNSSGS

SEQ ID NO: 33598 - protein, 151 aa, Oryza sativa
MAGRRPGGGGSSRALPSVGSSWRGGGGRRVAAAPSPPSDLAGGSGRRVAAAPSLPSDLAGGRREAAGDGLRRRRRPPLPWIWREGRQEVAGDGLRRRPPLPWIWREGRWEATGDGLRRRHMAMMFFVNLLMNLLLNMFIMLCQFILVVICE

SEQ ID NO: 33599 - protein, 108 aa, Oryza sativa
MEVFIHEEYVHKRREQRRRRGRRPAAVALQLLQVQSSSTTTKPEKKAAAAAAAGGRRPLAPLATELQDSPWDLPAGSGGGASPSDAAGSPAAAAAATVSFADHLLGYL

SEQ ID NO: 33600 - protein, 55 aa, Oryza sativa
MTSTVDVKDDSRSRPMQKAKIEIVLGKTDKFDELMAAAAEEREAAAAEAEAEEQS

SEQ ID NO: 33601 - protein, 135 aa, Oryza sativa
MVPKIADFGLSRLLGEEQTRVCTQNVMGAIGYMAPEYLYRGEISTQSDIYSLGLLIIEITTGEKNFPNREDIIAKNFIENVRRNRTNIVHISLKYPSLDTNCLQQVKTCIEIGLSCVQTNRKDRPSIGEIVNMLS

SEQ ID NO: 33602 - protein, 19 aa, Oryza sativa
MASCLSQPDEVLSSAAVVA

SEQ ID NO: 33603 - protein, 243 aa, Oryza sativa
MAMLLASLLSPSPLPTTTTSSTSPRAVRLAPAKPLAATLAAVAAAGLLALSPATAAAAAAGEAEFKVYYGTAASAANYGGYGGNASKKDAAEYVYEVPEGWKERLVSKVEKGTNGTDSEFFNPRKRSEREYLTFLAGFRALAPVGAVLDNLALSDVGLQDQIASADGVLSTERRDGGGQLYYEYEIAGAGAHSLISVTCARNKLYAHFVTAPNPEWSRDEAVLRRLHQSFKTVDPARPPPASS

SEQ ID NO: 33604 - protein, 13 aa, Oryza sativa
MIERERIGMSDRG

SEQ ID NO: 33605 - protein, 102 aa, Oryza sativa
MSKVYMHNYCHLTMDHCIFFSSFKPPRQCKTKLFVVGLASGLGQYTEVVREAQKGIKLRNVRFVDAKGLPLEDGHLHLSTQAQVQLGHMLAQAYLNYGTSTL

SEQ ID NO: 33606 - protein, 16 aa, Oryza sativa
MEILVRKHHPSLNRRL

SEQ ID NO: 33607 - protein, 194 aa, Oryza sativa
MTVPSSRASSRQRAGVVKAADVVVVSAGNVPAASHFLTAIHNHPLHALAAAPRHAAPGPPPLAPSRPRGRLRRPLDLPPELPAAAQQRHLHLRRRGRRARRRRRRPGERGVVTTSEAAASGPRPDPTSCGGRLRAGRRFPLFFFFVSCGRNNLTAQDNRLSRVSHTVGPSAHENIDFSRHLGVDGQIIRTEKSF

SEQ ID NO: 33608 - protein, 71 aa, Oryza sativa
MRFRGVQVDLVYAGVCLPWCPTTWSGPQRDRSVLRGLDDLATARSLTASAWPTRSCGLSRTPRRSAPCCGA

SEQ ID NO: 33609 - protein, 58 aa, Oryza sativa
MKHMKAIQSSSELGWNIPSLHRGCRSGSRLRQSPLIKAVAVAHQLPIRGASLAQIEIN

SEQ ID NO: 33610 - protein, 82 aa, Oryza sativa
MGKQLEMHAFIFHLILQSCCIYLGNVAQKTLTWHHANVQFLLYYMFVHSTMKGWLLTIKFWLQSSNTFFSMVRSSPMKSQAL

SEQ ID NO: 33611 - protein, 100 aa, Oryza sativa
MAAAAAAAGLEEALRPFHDRASDAETRLAKLEALLLNKDGLTSGSETNSSAVKDLQSKLDAVNTECLAEKEKNKKLIIENEKLQYRITHLIRALKEADSR

SEQ ID NO: 33612 - protein, 22 aa, Oryza sativa
MTETIDELCTDDGVIAHSRLAV

SEQ ID NO: 33613 - protein, 95 aa, Oryza sativa
MRLKLASPAAVARRRSAYSSSAINDTLPPLPEPCMEQRPSLSTSGAVSFEDARAMPLGKEFPQVRAGRRVKFGQFVVAYFVLFFQSSISCFEMLN

SEQ ID NO: 33614 - protein, 64 aa, Oryza sativa
MVGERSVTICGLHHPSLLHYPCLFLSCWLLQSSCSAFVMHGTPRQLQEPSSLVSPNGLHVGYVV

SEQ ID NO: 33615 - protein, 123 aa, Oryza sativa
MAAAPSRRGATLRVQAKKQTFSSFDELLEKSEKPVLVDFYATWCGPCQYMVPILQEVSEKLGDKIQVVKIDTEKYTSIANRYQIEALPTFIIFKNGKPCHRFEGALPANQLIQQIESALEVAK

SEQ ID NO: 33616 - protein, 235 aa, Oryza sativa
MAASSPPAAVMTVARQGAFAAAAAIATFAGLRLLRARVYDALIVNLTTEWYAQVLARLPKRASMLDVGVGTGLALVNNKPLVCAKELTVVGVDYDGDYVKRCRALVVQRQLTDAVRVHHASVYDFKGGPYDAVYFSASLMIMPDPVKALTHGASMLKPGGRVYVTQTIQTQRSRLVELGKPLLKFLTTIDFGQVTYEPDLLATFKKAGLSVVEDVAISGSTKTSTRSYRLFVLQP

SEQ ID NO: 33617 - protein, 176 aa, Oryza sativa
MPLLARAPPPPPPLRHRGRLLPRFTSSSSPRRRRRPRATRVRASGSDPPPQQQQQQVNLSVLRFTLGIPGLDESYLPRWIGLGFGALVLLNHLLSPSPTPAQLRSEALGLCLAAFSATLPYLGRFLEGAGAAERVPLPEGSRQVFAMSDSLSAAQKEDMAWASYVLLRNTNTTSVF

SEQ ID NO: 33618 - protein, 204 aa, Oryza sativa
MGAYKYLQEIYRKKQSDVMRFIFRIRTWQYRQVAAIHRAPKPTRPEKARRVGYKAKAGYVVYRVRVRRGSRKKPVPKGQVYGKPKHQGINQLKFQRSLQSVAEERAGRRLPTLRVLNSYWIAQDATYKFYEVILVDPFHTGVRNDPRINWICRANKKHRELRGLTSAGKKSRGLGHGHRYSLTTGGSRRKCWKRRQQLSLRRYR

SEQ ID NO: 33619 - protein, 61 aa, Oryza sativa
MSPSVPRFLFSYPEISVLFNVFGFLAPDCIVSESFCSLPTRQTAVCSGGIMSQEGCIMKVN

SEQ ID NO: 33620 - protein, 69 aa, Oryza sativa
MELSTGLLKNAGATYQMSDGMEWKERTRQRGVTKMALFYSKWGHLSTMSDSTHVCIPFSCLVFVWWILH

SEQ ID NO: 33621 - protein, 263 aa, Oryza sativa
MVSFLSDCCWQCTGSRCSPTTSRTTPGTSRGSSRERTRPFKTSIVFAHDREGTSVLFKVLSAFAFRDISLTKIESRPHRHRHPIQFVDGANVGTAKHFEYMFYIDFQASMAEVRAVGDTGVHLLPPRARQLPHGHDAMDDDRSTRLMLKFYVAGAGEKLQANIRIASGMTRILAIFLGPWIQRINGAEGIPPTMRIAFSFCSEHMWSIKTCADTPFLLLGCGAFSLRRRLKLSMAAMRCLQLQSSEASETLYDWDAWDALPSI

SEQ ID NO: 33622 - protein, 44 aa, Oryza sativa
MVRVLTITIVAAQDTSQRLCANCSATVQITNCAIISKWKKKTQI

SEQ ID NO: 33623 - protein, 95 aa, Oryza sativa
MGSPPSLLSSSSFVPNQWKARVPPTRDWRALLVAPSSPAGGPVVRQHPLFRWSSSLSFARRHRFLPLVHSLRQAVWSLLRPSLSSTLSVELSGKG

SEQ ID NO: 33624 - protein, 70 aa, Oryza sativa
MPAGTVTTRRLQTTTASTGMWCTTAPESSPKCSRMSPAIRLSLAPRRSGARSVATARPCSSRPLPEGRKG

SEQ ID NO: 33625 - protein, 105 aa, Oryza sativa
MSSSLLQQQQQQQQPQSPPSLVGAWLCQISSGLRQREARRRGGHAEVDDEQSSPKNAATAAGRNKAAREEANNKASSTAVTASCRAGAAMPEATVCLLLDRFAPS

SEQ ID NO: 33626 - protein, 153 aa, Oryza sativa
MQIFVKTLTGKTITLEVESSDTIDNVKAKIQDKEGIPPDQQRLIFAGKQLEDGRTLADYNIQKESTLHLVLRLRGGTMIKVKTLTGKEIEIDIEPTDTIDRIKERVEEKEGIPPVQQRLIYAGKQLADDKTAKDYNIEGGSVLHLVLALRGGQ

SEQ ID NO: 33627 - protein, 100 aa, Oryza sativa
MSKGKKSGESKGLNAKRVKKVLKDSARSVTKGSIRRLARRAGVKRISGLLYEEVRGVLKSFVEGVVRDATAYTEYAKKRTVTTGAVVAALRKRGRAIYGY

SEQ ID NO: 33628 - protein, 65 aa, Oryza sativa
MAPRVAVLLMAVASSLLVMASAQEFNAPASSPAPSPMAGAAPGSASPLAVASSALVTLLAAALMQ

SEQ ID NO: 33629 - protein, 140 aa, Oryza sativa
MSVVSSSCCLLSFPLLCLPHDTSHGFCSAAQRSPAPCFSPLSVCSPCMHGHWKENSPCIVGREEREMDSERDHQLMQCKDHSVTGGSVYGDASFSPSHTHLLPSISLTRTHKNTHDCFCFMVVSLHSSDFANYNINHQGF

SEQ ID NO: 33630 - protein, 20 aa, Oryza sativa
MGGGSGGDGDLGRESGEHGR

SEQ ID NO: 33631 - protein, 70 aa, Oryza sativa
MAAAGAPHHILRCILLVDSFTGREGGGGGTLALALALPLSQPHLMIERSPCLGFFCFFLLLLLLSATPTI

SEQ ID NO: 33632 - protein, 37 aa, Oryza sativa
MFFNLLKISWMVLDPFSLVVFNTSILWMNGWDIFTWI

SEQ ID NO: 33633 - protein, 23 aa, Oryza sativa
MAFLVVCWSQIRSMATVRQRSHG

SEQ ID NO: 33634 - protein, 69 aa, Oryza sativa
MLGFFFTFLVPETMGRSLEEISGEDGNTGAGGGGAPAAANAGVGVSASDVSRDEKFPASSTEWQTSMHA

SEQ ID NO: 33635 - protein, 113 aa, Oryza sativa
MRALRLSPSRRGRRRRSWRRPGASNGCLPVDSRVVDADEEESIPSFAVAAGWLLVLLARDVASMERPPPHCGRRRQPSQRRSPPLPRRPGGLLPSRRTVCPEKRRKKKRRERV

SEQ ID NO: 33636 - protein, 54 aa, Oryza sativa
MYVKPMRAGGAAKICELQPMVNCKFCRLKSWSDNCRHINIVTKTYLIDFFQKKI

SEQ ID NO: 33637 - protein, 144 aa, Oryza sativa
MISAKRLAQMAKKWQRIAALGRKRITWTTPKATDECCSSVAVKGHCIMYTADGRRFEVPLAFLATMIFAELLRMSQEEFGFTTDGGITLPCDAEVMEYVLCLLRRNASEEVVRAFLSTIVKSCHYGNGFAQSLGSVQQVAASSF

SEQ ID NO: 33638 - protein, 131 aa, Oryza sativa
MSTSASPRRMSTTATPKLMSGTTSPSKTRIEGYMSMTPWYPSSKQSSAANSPPRGRPNPGRTPRIDGKEFFRQARSRLSYEQFGAFLANIKELNAHKQSREDTLKKAEEIFGPDNKDLYLSFQGLLNRSLP

SEQ ID NO: 33639 - protein, 116 aa, Oryza sativa
MVKNVRVTYRRRHSYATKSNGIKVVKTPGGKLVAQYRKKATAGPKCGDCKQSLKGIKHLSPKEYKTVSKTHRTVSRAYGGSRCATCVRQRIVRAFLIEEQKIVKKVLLEKLKTKSA

SEQ ID NO: 33640 - protein, 115 aa, Oryza sativa
MRKQVRSNPYIYRGKLPLKTCHELLMVSLDIEKNLHEVTLPFLVLHGGDDIVTDPSVSKLLFEEASGRDKTFKLYPGMWHALTAELPDDVERVYSDIISWLDERSDCAGSVPETF

SEQ ID NO: 33641 - protein, 169 aa, Oryza sativa
MLPTTCRAPPCPWPRPLAAGRARGGYGLGRARGVKRRAAAARGMVVRCGLLPVDPWAPTMDSQSVASQLFAVSLFPYLGFLYFMTRSKTAPGLTLFGFYFLLAFVGATTKVHYGTSLSNVDWLHGSAESLLTLTNLFIVLGLRGALRKLEDTKESASEESQDIKEKGSI

SEQ ID NO: 33642 - protein, 143 aa, Oryza sativa
MALKNFLVLGVFLAALLMFSLDDVAHARELTEANESEGKNVKPTGGPGVEDQKWGGGYYPGGGYGYGGGYGGEYGRPGYGGGYGGGYGHPGYGGGYGGGYGRGYGGGYGGSGGGYGGGYGGGYGGGYGGGGGYGGGYGGGGWY

SEQ ID NO: 33643 - protein, 128 aa, Oryza sativa
MRATVGVAACGGGRALPSVRSGEGRPRRCRPAVACSGGGEGGCGGGLAVAPSPLDSLSLPSAGGWPVEAVAAADPPPSLPDPGRCGLVAGGGMLRRKGGGCGGGTRGGGGLAAAPSLRRIWRPGGNVL

SEQ ID NO: 33644 - protein, 305 aa, Oryza sativa
MDLILGSSMINFYCKVGLVEAAEVIFEQMVERDIVTWNLMISGYLQDGQTDKALTTCHRMLESGLKFDCVTLASVIMACVKSYRMEVGGAAHAYAVRNNLESDKTVFCSLIELYSSSGRIEQMRRVFDSIRRRDIATWKAMICAYADHGMGSEALKLLYQMQLEGTSPTAACWDSVLSAFIRNGQLDDALSTFYEMLQTSTRPNLRTWSLLISGLSRNGMHPEVMNLCCKMQEVEPAPSPTIFSAALLAVKSAASVQYGKAMHACIVKKGLLLSKSVVQSLLNMYGSFNDRGTVESLLRFLAAAQ

SEQ ID NO: 33645 - protein, 120 aa, Oryza sativa
MFKTTVVFAAVAAATVSGYATYPAFCPQSELAKLAPLALLNSDDIKACQKASGWTLIPPSAEPTVAQETTMCSTQSCKNLVAAVQKLNPADCFLSLSNNQQGINAKKLVEEFAPFCALLG

SEQ ID NO: 33646 - protein, 175 aa, Oryza sativa
MVFLKVEMSLNVLISPSQLSPQGLLLRKAVIVRLLEDIANRKASKDHGYYIAVSELKAISEGKVRELTGDVLFPVTFTCITQKPMKGEVLVGSVDKILKHGIFLKSGPIESIFLSEKTMSDFKYIGGENAVFMNEHSKLEKDTVVRFKVMGFRWMEADRQFQLLATLAGDYLGPL

SEQ ID NO: 33647 - protein, 25 aa, Oryza sativa
MSMYWNKHVTMNGELDTKENFAFSA

SEQ ID NO: 33648 - protein, 108 aa, Oryza sativa
MDDDEKPPAAAAGAIGGEVAAGAVAVDACLVAAAMAGASLLAWWAVAFHPSNSRLWMVPVGLVLACTPAIVYLALSLQPPSTVSDHKGSHAAGHPPPPPPLSMVVIDK

SEQ ID NO: 33649 - protein, 137 aa, Oryza sativa
MEVTAEFGGAYYGGAAGREKKALQQGCGDHFAVDDLLVLPYGEEDETTREGEATGGKEEAAGFGNASADSSTITALDSCSNSFGLADGDFPGELCEPVNSLATFCLVNYLGFCSRGANHFWQLLHITSSEIVVPFIC

SEQ ID NO: 33650 - protein, 48 aa, Oryza sativa
MSMPWAMAVSVVDKVWAVLAAWVSSCLTAATAVARALRAGDIGVLHVG

SEQ ID NO: 33651 - protein, 64 aa, Oryza sativa
MSIACRVVCYSKPCLVPKFFFSKLPTFHHIKLFIHTTFLSHRTNFNQTSKLQCELNTALVARMK

SEQ ID NO: 33652 - protein, 150 aa, Oryza sativa
MSNVFLPGELIGLLRAERAGRALDESIYYRAILLGITRVSLNTQSFISEASFQETARVLAKAALRGRIDWLKGLKENVVLGGIIPVGTGFQKFVHRYPQNKNLYFEIQKKKLFASEMRDILFLHTELVSSDSDVTNNFYETSESPFTPFI

SEQ ID NO: 33653 - protein, 132 aa, Oryza sativa
MAAKAALVLAVSLLVVAMAVACPDCPSPKPPAPRPKPPTPHYGGGSSCPRDALKLHVCANVLGLVKAKVGAVSPYEPCCSLLDGLVDLDAAVCLCTAIKANVLGIKLNLPIDLSLILNNCGKICPSDYQCVH

SEQ ID NO: 33654 - protein, 329 aa, Oryza sativa
MKAVLLLALIAVSAFAYSAQYEELNLLWSTWKNLHAKQYTAGEEAARYAIFVDNYNKVTKYNAEHTNVKLRLNLFADMTGAEFKHKQAGCAFVEDNVELIQENTVKFEAIKAPASVDWRNNNAVTPVKNQGQCGSCWTFSTTGVLEGFHSIQTGQLLSFSEQQIVDCASSAGQGCSGGWPYLAVQYAAQAGLEQESSYPYTAENGNCNYNQGLTTKTNNGYAFVTNYNVDALKSAIATMPVSVLVEADQDVFQFYSSGVVGAGDGCGASLDHAVLAVGYGSVDGADAFFVKNSWGDSWGQAGYIYFSTDGSANGGAGVCGILSQPVVPN

SEQ ID NO: 33655 - protein, 134 aa, Oryza sativa
MSSFFSTMFTPPPAADDGGDSRVVAVHSTATWDEQWGAHKSNPNKLIVIDFSATWCGPCRFIEPAFKDMAGRFADAVFFKIDVDELSEVARQWKVEAMPTFVLIKGGKEVSRVVGAKKDELERKVNMFISSSSS

SEQ ID NO: 33656 - protein, 248 aa, Oryza sativa
MAENMKFAEGSYVANELDMLSLASSVYTAPLFQTEFDSVYVPEYGDVGNSQDGLFPGLFISDGFVFPPSEHENLPIESDLDGSNNNNNGQESSCAGNIYEGCNEPAKEVDGRSLSVSGDLHSANETTIPNLEPPEIRAEQEKDNATIKCDLPCEGWLKRKSNCLSHRMKGVTTVCTIVAAGALMGFVIIGQRWQQDKLHLHHFQFNIGTEGVNRIVGIFSRCKDALPSSQQLKSLLPTRVLPQEPVSA

SEQ ID NO: 33657 - protein, 90 aa, Oryza sativa
MASFGEDNRAATQREEGSSQNKYGGISPKKPLINKDHERAYFDSADWALGKQGASNSTKGTTEPLKPKLQRTAYPQLPPRRPACTSGATE

SEQ ID NO: 33658 - protein, 61 aa, Oryza sativa
MVKQKNHTARNNTVKAHKNGIKKPKNHRYHSTKGLDPKFLRNQRWAKKYNKKHANKSVKAE

SEQ ID NO: 33659 - protein, 132 aa, Oryza sativa
MNQMAAMSSCHHLSSSISTPRFGTRKATMAKFVRAPVHSCSCSNAHLSQTAAPAKMVFEDQVRGVVCYRDDKGNMICEGYDEGPRLGMRLPEKACFPWPMGVQVTDFIELSTLRVFEDVDSLQPRKDQKGKL

SEQ ID NO: 33660 - protein, 97 aa, Oryza sativa
MQKLSTATTQAIQKAKDGISTSSSNSGDLVEQCVQCPARFSTVGALIEHCEKSHQSNSQSSRSRVTVDVCPKCSKAFRDPVLLVEHVERDHGGTSRA

SEQ ID NO: 33661 - protein, 186 aa, Oryza sativa
MFSKLVVIAALACVALAEDVPQCSTSDALAVNKIEKPAADLCKAETGFRAVPPTGSPDDAQLTKMCASPNCVQFFTGLKAQYTLDCEFKFPNSPVTNLLTIIKGFEPNCQRLGVTVPPSTPVVTTAPPSTTAPPSTTAPPSTTAPPSTTAPPSTTAPPSTTTPPSTTAPPTTTAPPPSTPSVAPHC

SEQ ID NO: 33662 - protein, 125 aa, Oryza sativa
MGKNGSVVETGSFAALAAQPNSALSALIALQQLSKPGARVRTADGSTVDSSIDDDDDDDDNESDDGSSTTGDGTSTSASSAGNSTETRRRRDSIEAALTALEQAAGSHPEATAIIARLRKQIQLH

SEQ ID NO: 33663 - protein, 91 aa, Oryza sativa
MSTSSTWYDDQFQVISRNGDLPHKIFVEQEYVRCPGYVLVHGKSFPRPIITLWYHKFTTPETDRDKARSTAAHCVHFLFHRQYIFTLKRIM

SEQ ID NO: 33664 - protein, 109 aa, Oryza sativa
MASKLQAFWNHPAGPKTIHFWAPTFKWGISIANVADFAKPPEKISYPQQVAVACTGVIWSRYSMVITPKNWNLFSVNVAMAGTGLYQLSRKIRKDYFSDEKDAAASLEG

SEQ ID NO: 33665 - protein, 272 aa, Oryza sativa
MQAKPITMATASMLLRSLLCLAVLAAAAAAAQPRLQCLENPPELTAAGDGEAGVVVQNLGGFAAYVTGAAHSGRAIVLASDVFGFEAPLLRKIADKVGEAGYYVVVPDFFQGRPYNGDPSINITQWIMAHSPVKAAEDSKPIFAALKREGKSVVGVGGYCWGGKLAVEVAKTNEVGAIVISHPSSVTADDMKDVKCPIEILGAENDAVTPPRLVYQFVNALRQRPEVDYFARIFPGVAHGFACRYNASNPFAVRTAEQSLALMLDWFEKHLK

SEQ ID NO: 33666 - protein, 186 aa, Oryza sativa
MASKLVTAVARQAAATSRAARLAAVARHDAAAASRSAGLAAAAASRAARLAAAAASRAARLKPRPPLDDAARLSFRYSSEPPDDGKCVTKEDLESDEAVWALFERYCKSYNRKYDHAQMVRRFRIFKFNAKRTYCWNQYLHKDVKELARAKKDRDLGLPVDSWYLQKELGEYDDGGEPLTEYWRKF

SEQ ID NO: 33667 - protein, 259 aa, Oryza sativa
MSNNSMATSTILLFLLAVGGLAAAHGDTIRLPSEGDAPPQPAKPWDCCDDIEMSPLKIFPPLYRCNDEVKQCSAACKECVAAPAAGDSPCGGGAALVCRDWYSTEDPGKPCTPEREWPERTTKKRPWKCCDNIRRLPPRIHPPFWRCDDELKPGQCFAACKACREAPGPFPGPLICDDVYWGADPGPFCTPRPWGDCCDNTTCTKSIPPICSCGDKVAACDGACKDCQPVASSSEPPRFVCKDQFTGQPGPKCTPCTQN

SEQ ID NO: 33668 - protein, 78 aa, Oryza sativa
MFRTGAKNMSSDLPVEGVVRVRKVEKIQAYNLVTKPSATTSRISPITGQAESMAVTVVRVGAVAGKPDDIVPVARMNN

SEQ ID NO: 33669 - protein, 312 aa, Oryza sativa
MQSLYNLYKMMLVVLALLGVATAAAAAAGDVVSYSYPAFNATTTRDDSLVAATNASILTTARLLFDPDFPHGFNVSEGFLLLSGDIDVWRDGVGSAGAPAREASFNTTFTVVAAASPVAFVVLLDRYPPLLDQSGLRGSNVSSAADGDDGNATNSLVAVEVGTVKSYGRESPDVGLNVTVTPNRTTAPSGSTVWIQYDAVEHRLSVHVAAAGEPRPSNALLDVPLYLAGGRTTQTALVGFFGGTIGDIIVGVRGWELTVERLRGDDGGGGKKRTSWVVILLAVVGSVAGVAAMVSVLVCRFVRKRRHTEPKH

SEQ ID NO: 33670 - protein, 153 aa, Oryza sativa
MAPATATAVASPSTSSRLLHRSLLSPTPTAARCLRPPLCRGRLRTVRQVVANGDVSSPSSDVAAEESAAAPKIGKRVRVTAPVRVHHVSKAPDLDICGMEGVVKQYVGIWKGKRITANLPFKVEFELRVDGQDKPVRFFAHLREDEFELVEDE

SEQ ID NO: 33671 - protein, 169 aa, Oryza sativa
MPSSYLMSRRFSYRRLKKLPTAAVAAPPDVPQQLQEQYYAAITAAAAAAAQHGGGGGIGRRRRRRMRPRLRISRLARVLRRKAAAVGGAVRASVAKVVRRLREGSPYVGDLFAGNYMFMQVTPSPTMAAAAGLAKNGVVPYYHHGIIGGKNSKLGTTCSPSVMYKVKFN

SEQ ID NO: 33672 - protein, 52 aa, Oryza sativa
MRGTRGAASNSQADGGNGAAARERRGAAAAGTGRGKSRSSSPTRGQDTAFTY

SEQ ID NO: 33673 - protein, 83 aa, Oryza sativa
MASPASPREFTQEAARQSLIAISRSVPAAGEAVNIKSPSGAMVNGHHHDDDGAEKYRSKLISISNLSPDAQPTPCSPKDTAAA

SEQ ID NO: 33674 - protein, 41 aa, Oryza sativa
MSSHRTRLAGSPPSPRYARGYFGHLCKNLTDQWMLTSVNSR

SEQ ID NO: 33675 - protein, 146 aa, Oryza sativa
MFTYDPKARITAQQALEHRYFLSVPAPTKPSQLPRPPPKGDSGNNKIPDLNLQDGPVVLSPPRKLRRVTAHEGMEVHMHRADRTEEHPSGARHMDDMSSQSSRIPMSVDVGAIFGTRPAPRPTLNSADKSRLKRKLDMDPEFGYTE

SEQ ID NO: 33676 - protein, 56 aa, Oryza sativa
MHVATPVPPSPPPPPGLCSTLASAPPAHARAHMVLCLLPVPLQCLPVPLLVLPSHQ

SEQ ID NO: 33677 - protein, 122 aa, Oryza sativa
MDRGGRPGWLPSLGFAFLSFNCGMAIYRSSSDPSAVAFVVVAYLALIALFRCLHLLERAPAGGQARASMKAAVWGLSTLLTLMFSYKVAAIMPLWGAAGVWVMGLGTIVAGFYAFFVHREAP

SEQ ID NO: 33678 - protein, 114 aa, Oryza sativa
MGNCAVTQHAVSWADDGEWELPESGEEGTAPPRSGAHMTEVTIRITKRQLQELVDKRAAAAGGGHGYHVYRKSRRSAAELLADIMNAGEVYHQHYRVAHWKPALQSIPEAAMES

SEQ ID NO: 33679 - protein, 101 aa, Oryza sativa
MHTMGKSPALPLYYLLITLLAFYFLIVPSNAIPLSRVQRLHLQESSEMPLVRGSTAKPKMEMERPVVALEEDAMINARMALETQDYAPSGPNNHHKPPGWS

SEQ ID NO: 33680 - protein, 148 aa, Oryza sativa
MAVSIELTKEYGYVVLALVAYAFLNFWMSFQVGKARRKYKVFYPTMYAVESENKDAKLFNCVQRGHQNSLEMMPLFFVTLLVGGLQHPLVAAGLGVFYAVARFFYFKGYATGIPDNRLKIGGLNFLAIFGLIICTASFGINLVLRESI

SEQ ID NO: 33681 - protein, 143 aa, Oryza sativa
MWKEVLASMRSSSPPARWGEVEAGKGKSGGSGKGGDRRRECVEREETRKPAASAQVDPLHRHFGPPRRPQEVAKSMSAVLRRLHVLVHHHPLHRRLRRHARREHRRDGLHHRLHALQPQPHRLHHRQHDQPCRPWHQPHQEIR

SEQ ID NO: 33682 - protein, 43 aa, Oryza sativa
MKFHNGHKVPLRFYNVGLAEIFLSLSVLSWARRGNTLMFQNLK

SEQ ID NO: 33683 - protein, 107 aa, Oryza sativa
MPVMAPPEKEKEKEKAKAAQAQAPAAARRRRRRKETADEAAGGRAASNAAAAPPTRVGSEGEKERLLANERYLSEIMKEKASTARDRRRGRVAVWRPHLESITEDDL

SEQ ID NO: 33684 - protein, 72 aa, Oryza sativa
MASGRCCTFLEILLAIILPPLGVFLRFGCCSMEFCICLLLTILGYVPGIIYAVYVLVALDSDQYQREYHTLA

SEQ ID NO: 33685 - protein, 196 aa, Oryza sativa
MEEERRVLVTGGNGFIGSWIVRILLARGYAVTATYQPGTDAAHLLALDDERLLLLPADLLDAGAISAAAAAGGGCRAGVLHVASPCTLADPRDPQAELVEPAVRGTLHVLEAARGAGARRVVVTSSISAMVPNPGLAAGELVDERSWTDMEFCKARGKWYPVSKTLAERAAWEYAARWPGFELATILPSTCLGPLL

SEQ ID NO: 33686 - protein, 222 aa, Oryza sativa
MRESRLEQTGRMASSTSGRRGRGRLLSPAAVVLAAVAVLLSASQALAAPCYPRVFSFGDSLADTGNGPFLYGNESRRPPLWPPYGETFFHRATGRASNGRLIIDFIADALGLPFLRPYWGGRTTGDFASGANFAVGGATALSPDFFWERGVHVRDTVHLDMEMNWFRDLLGLLCPDDLAETEGATDPGEGQDPQDLEQEAGDEASEDPYAYYQEGDEDEGAQ

SEQ ID NO: 33687 - protein, 35 aa, Oryza sativa
MQAHIFGDIHRRINGLDTSACEDRAVGWNWRPCLG

SEQ ID NO: 33688 - protein, 51 aa, Oryza sativa
MASTALTNLALKEAKDLIEGLPKKVKEGVSKDEAEDAKKQLEEVGAKVSIA

SEQ ID NO: 33689 - protein, 248 aa, Oryza sativa
MDHHPPPPSPPRDSGGSLEVRLFYVRLSPRGHTPPPRLALALRSSRGGDEEEAPTPLSLPLRLDRRDPASGEATYVSTASARLPPPSAAFEVADHRGAALLRGSLRRCPDAKPDSSPAWAIDCIPAAGAEAETSAFEVYVAGCCAGEPAVLTCALRLATPEEQKAAGGLVRRRSPTSNAAGDEDVNGSIQHPEGWYSDDDDGQLTWFNAGVRVGVGIGLGVCVGVGIGVGLLMSSYQATARSLKRRFF

SEQ ID NO: 33690 - protein, 89 aa, Oryza sativa
MGFLVESQSEEELPERLFGAVRIAQMEMGAAKYVETAPDDVVPDAGRAGAGFRVHSAKVANDSRHQERAAGKVGRSMSCQERGSGGGGK

SEQ ID NO: 33691 - protein, 89 aa, Oryza sativa
MEQLRLCDCLPPPRHVSLSASLPAPRGRPRSATAGPALLLLRAAAANPASIRTASALFLGIMCIGGTTAVVAGIATVVIPGLYPHQHDE

SEQ ID NO: 33692 - protein, 250 aa, Oryza sativa
MADHHHQPPTPPRRHRRPHELSMAAEERHHGTQTAMASDDDRHHDRGGWIRPEEKHRSSGVAWALVILCTLLAVGVIVAGATVFAVYLIYKPRMPYLVVSDAQLVRLDYDQGGTIDYLEALVTVMARNTNSRADASFARVDLALRFHGADVARLRAAPFVVASASAAPLRYDVVSKGRALDAGGMRAMDASLKSGVVPLDLLGRARTRWKVGIFASLKFWTRISCRLHFFYPGNGTVMASDRNTCTSRSP

SEQ ID NO: 33693 - protein, 67 aa, Oryza sativa
MSDQSSYPNPAQGYYQGPPASAAAAQDNTAAGGGKSNAAKKDQPSFMDNLLACLPCARPAEAKNDAS

SEQ ID NO: 33694 - protein, 120 aa, Oryza sativa
MFFSSLPSSYLHLGRAWGGTSSPHGGARRVVGGLPGPAGREKAGHGWRPGGGSRVVSLSLSSLRRWQPSGGPAEAAAAAQVHAEAATHCLVFFLFLFSSCGSGGALFLSSCLGLPLFSPP

SEQ ID NO: 33695 - protein, 104 aa, Oryza sativa
MSAGVGGLRQLLAAAVTTGVAEARAAIFGHALNPTGKRAATKLLRKKMVGEQLAQWYPYDIKRDDPLVMAREEKARLSKLEMLKRRGKGPPKKGQGRRAVKRSK

SEQ ID NO: 33696 - protein, 40 aa, Oryza sativa
MDAGSYYASLAQGLLVEPPAAGAWWEDGELAGSDMPLWSY

SEQ ID NO: 33697 - protein, 50 aa, Oryza sativa
MNDGQGYFAGKPAKPNDKEQQAGDEETQAVDAQTPGDLFNIYVRKIMIYL

SEQ ID NO: 33698 - protein, 102 aa, Oryza sativa
MATAAGGARRALAGLRSASSSRAFSQPAPAAAAARSPELAAFSLPRSTRRRPAISRVPVEALGGAHGLMPLHSATASALLTSMLGLKPGSWGWLSEGFATPL

SEQ ID NO: 33699 - protein, 83 aa, Oryza sativa
MRERVAARGRGRRGAGKEVVATAPGRDWRWLTTVEVRERVRRGGDPLMPGLGSGAGKGQQGLSGLAPRGRGRQGTDPVPTSLG

SEQ ID NO: 33700 - protein, 119 aa, Oryza sativa
MAKSLRSKREKRLRTLRREIAQPFYDKKEAAKLAAQAAALEAPALPVRAPPPPSKDSGGSRAASSSASAMDVEMADEGNNKSKSFLKPIGSISKKKVQLHLKIKKDKRKARKKGRFSKK

SEQ ID NO: 33701 - protein, 162 aa, Oryza sativa
MFSAKARWIVAVVLRVAAAGAAAVAAVLMAMSHDEVIVYGMEVQAKFRYTPSLVFFVAANAAVSACSLVVLLVPSSTSKLAARLLLMADVVLGMVLAGAFAAAGAMAELGKNGNSHAGWIAICVQVPLFCDRVRSALVAGSATIVLYYLMLMYSIYTLPMFP

SEQ ID NO: 33702 - protein, 154 aa, Oryza sativa
MASPTTMVGVATSAHLHTTTTGRLSCACAPPTRGTRRRRLAVAVRVRVRVRASASEAMATEKLGVRVERNPPESRLSELGVREWPKWGCEKSKFPWTYSAKETCYLLQGKVKVFPDGAGEDFVEIAAGDLVVFPKGMSCTWDVAEAVDKHYKFE

SEQ ID NO: 33703 - protein, 156 aa, Oryza sativa
MARTTLYRPRVKSFWVLVRRLLCCRRKSYRPDYAAAGEEDDGEKSSLLLTSRSSLEELLVSDDADDDGAIDDAAVTCRNASLCAKKDGQAPVVVLPPPGLHHPVMARPAHGMVTTSSGGGRDGAAVQCRRRFMFGGLRRRLMMRRPWRPVLVAIPE

SEQ ID NO: 33704 - protein, 212 aa, Oryza sativa
MEVQPELSLGPTLLGFGVGAGAGKSSSSSESDGSSDDGSRKRRKHFAWEEAVSHASLDLHLNDPLPMDWEQCLDLHSGRMYYLNRKTMRKSWVRPMEEHGGSNTLDLELNISTIPSTFHVGAGKASSGGAAAIAEDDARIAGGGGGVGSLGPMVAVPCVNCHLLVMLCKSSPACPNCKFVQPSVPAPAMPRTPPRRRLEATVKPLETLSLLH

SEQ ID NO: 33705 - protein, 158 aa, Oryza sativa
MQIFVKSPAGQTFALEVSASASIESVKAMIEAATGVAASACHLVADKMLEEGSTLGEYGIQTEATIHVVLAVDGGKKKKKKKKIFKGPKKHAHRHKNVAMRVLKYYKVEGDGGDAEYKVTHLRTECPHPDCGAGVFMAQHKDRQTCGKCSLTYVAQKK

SEQ ID NO: 33706 - protein, 164 aa, Oryza sativa
MPPRSLTLSRLPVAALGLPFSSCSPPPPRLRFPFAARRARSLATRASSSSPDSSFGSRMEDSVKRTLADNPVVIYSKSWCSYSMEVKALFKRIGVQPHVIELDQLGAQGPQLQKVLERLTGQSTVPNVFIGGKHIGGCTDTVKLHRKGELATMLSELDIDVNNS

SEQ ID NO: 33707 - protein, 123 aa, Oryza sativa
MEDERWKLSSSKGRSKSGRSCSSSSNYYYHSSDFNSSNATTLSRSYSASVTASRHATTAWSAAGAGGGGASSSSSSQHQHQQQQQSNNSQRLSKKCVEAVKEHRARFYIVRRCVSMLVCWRDY

SEQ ID NO: 33708 - protein, 59 aa, Oryza sativa
MHLGPRTSGLSRRTGRPSPGSCKYSMFFFAMLQLLPLLHFCAWFFSCGSVCEKCKIAGP

SEQ ID NO: 33709 - protein, 101 aa, Oryza sativa
MSSPAGEDEKKPAGGEGGGAHINLKVKGQDGNEVFFRIKRSTQLKKLMNAYCDRQSVDIKSIAFLFDGRRLNAEQTPDQLEMEDGDEIDAMLHQTGGSLPA

SEQ ID NO: 33710 - protein, 159 aa, Oryza sativa
MQTIKTITAAAVMTAAFLDITDAQDNYRVTLYEHENYGGSAITFLAPWPSTCYNIWDCFNDRATSAKWTDFGVYFEPDMLTFYDDADCKGSKLVVQAGQYYPANGIPNVGAAMNDRISSFSTFTGLTGITGYAGYKCSARRVGNETVAPVQIPMPASGL

SEQ ID NO: 33711 - protein, 87 aa, Oryza sativa
MFRSNFLEISTDNLKRREYQTRSVGGEWCGGGGGCWSGLGFYMLLLLCLVLCAMFANEGVRLWIPGTLLAASLLGCSASTSSQVVRS

SEQ ID NO: 33712 - protein, 46 aa, Oryza sativa
MRRRGGDISAPPLSSNPVGSSSSSTRRSGDKEAAGGDGNDDYTRQG

SEQ ID NO: 33713 - protein, 191 aa, Oryza sativa
MLGNIRLIGELYKKRMLTERIMHECIKKLLGNYQNPDEENIEALCKLMSTIGEMIDHAKAKEHMDAYFDIMLKLSTSQQLSSRVRFMLRDSIDLRKNKWQQRRKVEGPKKIDEVHRDAAQERHAQSSRLARGSVVGSGPRRGAAPMDYGPRGSAAALASPSSQQVGHRGMPSHSRGFGTQDIRLMKEVQWT

SEQ ID NO: 33714 - protein, 97 aa, Oryza sativa
MSTCHSSPPSLVDLVSLPPSSPAGGGGGGAGAGVVQVVPLDVSEELLGKFQDTSEFGFEYEKSGLWSPLVVRPEALVLAGGGKRRRRSWRRKVFCCW

SEQ ID NO: 33715 - protein, 38 aa, Oryza sativa
MGGHRREGCHRHHGRSAREVRSPLGGAPREVVAGGSTL

SEQ ID NO: 33716 - protein, 122 aa, Oryza sativa
MEAAADEEQEGISAQSPAQAPPSSASSLPKEQSQVELELRVLQALEFYPPSKLKGIHRHFVIYGLMEYLRKSLDRQFSADEVLQLLDRFFNLEMLKPEDDEKDNFTQGEEFSLPESFFNKDE

SEQ ID NO: 33717 - protein, 133 aa, Oryza sativa
MHGRFRGLGFRGGGGGRRSHRGGAAARTPSRLASGIAARWHRLRMCSTPPAGAGEVVRHPGADSLEMDRLHRRRHRRLKGEARGAFSLETSLKIHAISLHPGASIEHQLSYVFANCGCNSIFNVSELAICLIG

SEQ ID NO: 33718 - protein, 146 aa, Oryza sativa
MAGKGGGHIPRFGDWKSSDGGTPYTVFFDDARKRKNAGHRTPPHGAGSSTPQRNKDPASRPRSQSAVGHGGGSVPAWGQWNEGNAGGGGAQQYTLMFDQIRDERRGSAPSTPTVEQLQRATPTRYNQHNQHANMRKRFTCFGLCLK

SEQ ID NO: 33719 - protein, 63 aa, Oryza sativa
MLNFKIGTALLALTISISGAQAQANARCNGAGDDCSRFNSQCGRAASCQWNTFAQPNGWFCGC

SEQ ID NO: 33720 - protein, 84 aa, Oryza sativa
MARLQRRRLVLALLQLAVALWLAATSGCFCRQPPSPIAGVSSPPILPDGNRPPKSPPAPASAQHMNRSFQPGCPPDCTDQQRQP

SEQ ID NO: 33721 - protein, 77 aa, Oryza sativa
MPHFFSAFWGVSSQLVDVQDTLRREKNEAVFFSFLWLIKFWDFVFTINVSVSGCSWLSVSCYVLGLGIFCLSTTICR

SEQ ID NO: 33722 - protein, 155 aa, Oryza sativa
MPPSRRRNNSSLLESSTIITANLIMASSSYLLSKITPRAAPSSMQSAAPAPARPPQPPPAAVTARAWPTAVSARSVEPAVTRRKVLVAPDDGEDGKVDERADTFIRKFKERTQSDIARMEAEAAAAVAAARPPPALGAANLAGTAYGYYGTGYYC

SEQ ID NO: 33723 - protein, 72 aa, Oryza sativa
MLFVTRGCSRSYEANKYPGCRRRSRGAAMPLLAMQRQRQVAGGCRGRGQVLAGARPVEILTAGLVSPVRDFC

SEQ ID NO: 33724 - protein, 107 aa, Oryza sativa
MMRKQSRSPCSSSSSAAVVSLCKVLLLVLALICTLETVSVEGGRVAAAALVGGGVPLNPRYPAIPEEPYIGRRGDPYTGRGGEPYTRPGRGCTVAYGCYGGPPAAKP

SEQ ID NO: 33725 - protein, 74 aa, Oryza sativa
MPVHPLLLLLLLRDLRVLPRMPLLLLISLSHFSSQNNDDDISYIVRNKRYNMPFEMQEFIFPISNHSLLLYVYW

SEQ ID NO: 33726 - protein, 180 aa, Oryza sativa
MEKSYASASSGELGVVAGGGGRSVRVIPLRHPQEAVAGSSPSWWSVVMVKARGMGPRDWAEAALPCLSWMRTYRLKEDLQADLAAGITVGVMLVPQAMSYAKLAGLHPIYGLYTGFVPLFVYAIFGSSRQLAVGPVALVSLLVSNVLGGIVDSSSELYTELAILLAFMVGVLECLMGLLR

SEQ ID NO: 33727 - protein, 41 aa, Oryza sativa
MNKAILLVLESGSPCSTNSTTLCDSESSLYAGNLMRGEGLQ

SEQ ID NO: 33728 - protein, 106 aa, Oryza sativa
MAIYDAFLAHDWRETLEKTLTWLAPMAHNMIRWQAERNFEQQQIVLKGNVLLLQTLYFADREKTEAVICELLVGLNYICRYEQQQNALLDCSSSLDFDDCMEWQLQ

SEQ ID NO: 33729 - protein, 37 aa, Oryza sativa
MWKSTEQLNGEQLMHWTGIHSDQQKPSAGIPLHLSPL

SEQ ID NO: 33730 - protein, 125 aa, Oryza sativa
MTDAAHIVSLPPSKPRADPTTRTIHQVGSGEERRETAHLHDVFVGVPGKTQQVDGAAAAAKPRRSIGSRPPANPSNSEEHALVGSPRGPLRRHGDAAALRTRELLRPNSVEIAASDHRSSGRTSF

SEQ ID NO: 33731 - protein, 179 aa, Oryza sativa
MDNGDGIAVGWLGHPIFRDKEGRELFVRRMPTFFETFPVVLVDEEGIVRADVPFRRAESKYSVEQVGVTVEFYGGELNGVSYSDPATVKKYARRSQLGEIFELDRATLKSDGVFRSSPRGWFTFGHATFALLFFFGHIWHGARTLFRDVFAGIDPDLDAQVEFGTFQKVGDPTTRRQPV

SEQ ID NO: 33732 - protein, 148 aa, Oryza sativa
MARKNLLLLGVFLSALLFFFLDVAHARELAEASESEGKNVKPTGRSGVEDQKWGGAHGGGYGYGGGYGGGGYGHPGYGGGYGGGYGHPGYGGGYGGGYGQGYGCGYGHPGHSGGYGGGYGGGYGGGYGGGGGYGGGGGYGGGHGGGWP

SEQ ID NO: 33733 - protein, 147 aa, Oryza sativa
MARKCSSCGNNGHNSRTCTGQRSLQESGGGYGGGGAGGVRLFGVQLHVGGAPLKKCFSMECLSSPSPSPSPAYYAAVAAAASNSSPTVSSSSSLVSVEEAGEKMANGYLSDGLMARAQERKKGEFLRDIWFVHASLICCGLALITAT

SEQ ID NO: 33734 - protein, 133 aa, Oryza sativa
MAIPAMPSGEEFKPEAAIVNYYGPSDMLGGHVDDMEADWSKPIVSISLGCKCIFLLGGKTRDEVPTAMFLRSGDIVLMAGEARECFHGVPRIFTGSDQAEISALVPQLSAEDDSFILNYIQNSRININIRQVY

SEQ ID NO: 33735 - protein, 120 aa, Oryza sativa
MASTRQALIAFAVVLLAAAFLVAASAADETQANKKEDTKVDVQDYWRGGGGYPPRGGGYGYPGRGYGYPGRGGGGGYPGGGGGWHGCRCCGYGYRGGCRCCASPDEIPEPMYRPEVDPHN

SEQ ID NO: 33736 - protein, 128 aa, Oryza sativa
MSTPEEANAAIESLNETEVGGRKIKVNVTESFLPNIDRSAPEPEPVFVDSQYKVYVGNLAKSVTTEMLKNFFSEKGEVLSATVSRIPGTAKSKGYGFVTFSSEEEVQAAVSTFNNAELEGQPIRVNKA

SEQ ID NO: 33737 - protein, 136 aa, Oryza sativa
MARKNLLLLGVFLSALLFFFLDVAHARELAEASESEGKNVKPTGRSGVEDQKWGGAHGGGYGYGGGYGGGGYGHPGYGGGYGGGYGHPGYGGGYGGGYGQGYGCGYGHPGHSGGYGGGGGYGGGGGYGGGHGGGWP

SEQ ID NO: 33738 - protein, 39 aa, Oryza sativa
MSQYQVHAFRRCQKHSMAGSRYICNFELLFSLLCAANDD

SEQ ID NO: 33739 - protein, 94 aa, Oryza sativa
MAKVALAVAAMAVLLLLAAAAAPGAEAACDALQLSPCASAIIGNASPSASCCSRMKEQQPCLCQYARDPNLQRYVNSPNGKKVLAACHVPVPSC

SEQ ID NO: 33740 - protein, 64 aa, Oryza sativa
MCFYDRELPCVGIGKVAQNIYALCALDDSEVRVYAQQVLLVHLHDGARCGSSTIMLDYHLVGDG

SEQ ID NO: 33741 - protein, 40 aa, Oryza sativa
MRTIDQRPKQDLTPLRHLVKQQEEWELSSATVVANGRKHM

SEQ ID NO: 33742 - protein, 117 aa, Oryza sativa
MSYQRVPPDEPYPPPGYPQSGPYPYPPPSGAVYPPQGYPSSHGVYPPPQGPYPPPHQPPPPGYQGYFNQGQQPYYPPPPLPYDHCHHHCGDEGSGAGFLKGCLAALCCCCLLEECCF

SEQ ID NO: 33743 - protein, 73 aa, Oryza sativa
MFSLFLLRAAGFLLPFYIMAWAVSILQRRRQRQEAAALAATEVAFILQSGQGTGVHFTIAPDSPTTPQHEPQP

SEQ ID NO: 33744 - protein, 131 aa, Oryza sativa
MAISSVFLRPSLFSSPPAAAAASSPRRHAAVLRVTSSKRRPLFSRAATSLTVRCEQTAKPGGGTGAGAADVWLSRLAMVSFSTAVVVEVSTGEGLVANLGVATPAPTLALVVTSLAAGLAVYFIFQAGSRN

SEQ ID NO: 33745 - protein, 96 aa, Oryza sativa
MARRATARGAGLPAPFVVVVSVLLLLLGSLPLHEVAAAEDEDQIGGGGGLEHGARGPTWRGCCNQYKERGEPGGSYTGRGRFGPCIPTQPCHKPIP

SEQ ID NO: 33746 - protein, 106 aa, Oryza sativa
MTTPTRPRLQIIATASSGEKQATIITRCVFLQLHYIYFLSLCSSLMLWYCANRCICYFDSPSCLSLLSATIQSSCSFLGLNEDKGNGSVCQVRYVYINVLEMYKYK

SEQ ID NO: 33747 - protein, 234 aa, Oryza sativa
MFSKTRMFDSTPRSGPKAFVSEYAVTGNDAGRGTLVAALAEAAFLIGLERNSDVVEMASCAPLFINDNDRGFSPDAIVFNSWQHYGCPNYWMLHFFKDSSGATLHPLTIQVSNYDQLAASALTWQNSNDGNTYLKIKVVNFGNKAVNLNIAVAGLENGIQEFGSIKTVLTSGWLRDENSFQQPDKVVPAASPITNAGEKMGVIVDPYSLTSFDLLLDTNTDKYPLLESSFHSSM

SEQ ID NO: 33748 - protein, 69 aa, Oryza sativa
MDCATELVAWSLWTVLRFFLSNSAFLFEAAIKKFTEFSHFRQYRIENHLLCICRYTQYTNNLGPRDREA

SEQ ID NO: 33749 - protein, 47 aa, Oryza sativa
MTTLADATATRRRARAASSRWRRKRDSGVASACLLLLTMVVFSLLLQ

SEQ ID NO: 33750 - protein, 63 aa, Oryza sativa
MASLVFEPHGGAAVVVAGVGGGDVVFCVVILCLSVLSMIIFAAASPGGERRRRRRLCSENPYG

SEQ ID NO: 33751 - protein, 38 aa, Oryza sativa
MKLSLELIHGASLLTLPRDMSMHFQRSTRHCFSFLLTW

SEQ ID NO: 33752 - protein, 164 aa, Oryza sativa
MAGPWPLLRSFLRNCVAGTLVVVTVNDRYASVITVRGTSMNPTLESQQGDRALVSRLCLDARYGLSRGDVVVFRSPTEHRSLLVKRLIALPGDWIQVPAAQEIRQIPVGHCWVEGDNPDVSWDSRSYGPIPLGLMQGRVTHIVWPPNRIGPVERKMPEGRVMQR

SEQ ID NO: 33753 - protein, 80 aa, Oryza sativa
MGGKSSFLCPIFSFLSCKSRRYEDDDDDGELSGEWPARYGSKVRSSDEDYGAWWVGERDVDRKASDYINSFHQRKQVAAA

SEQ ID NO: 33754 - protein, 71 aa, Oryza sativa
MPLVFKIFEICLFVLGYRSRSKANALCPKTCQCFVAISSFARRMFRESRTPVCTKFDLNVLVKREIKFGIT

SEQ ID NO: 33755 - protein, 118 aa, Oryza sativa
MVQRLTYRKRHSYATKSNQTRVVKIPGGRLVYQYTKKRASGPKCPVTGKKIQGIPHLRPAEYKRSRLSRNRRTVNRPYGGVLSGTAVRERIIRAFLVEEQKIVKKVLKIQKTKDKTAK

SEQ ID NO: 33756 - protein, 170 aa, Oryza sativa
MARSTRSAATEQAYSRFAPTAASSRGRGVGGGNGFDEFDESDIWGSFEPAAEVAESPRAARHQVPAARPPGRKAAAAASKPAAHGSLPVNIPDWSKILGDEYRGHHAGDWEADDVDDDDIDAASAVAVLPPHELAWRRRAASLSVHEDGMGIGRTLKVRDAVWKKTGFQA

SEQ ID NO: 33757 - protein, 35 aa, Oryza sativa
MPLSGGEKRAAWRGKLATTTHSSDSSTETNDVVAA

SEQ ID NO: 33758 - protein, 61 aa, Oryza sativa
MAVLVLVIAVVCGCLIFFYNLDLLFLPCVCGCYLHDCGSSSVTGVPPDQNGFSFLRMCSSS

SEQ ID NO: 33759 - protein, 214 aa, Oryza sativa
MSLITDESPRDCSSYKHQHHHRAIHGRRISRRTLVVASSAVVSLASLSLILWLVLRPSPPRFSLLAATTTANDSASVVAINAAFAARNPNSHTAVLYDRLQASASYAGLPLTAPSPLIPPFLPQQGQGDAMLSASLTSPPAAAAVAGGRALLRLRVEGQLRWKVAAWVTGRHALTVDCIAVVELQPTPTPSPSAIVGVLQPQDQAGSRCSTTVA

SEQ ID NO: 33760 - protein, 77 aa, Oryza sativa
MCCCGGDCRPIGWLLGLPFALLAVVVSFIGAIIWIVGLPISCICPCCLCVTVLLEVAVELVKAPLHVMTWFTSKIPC

SEQ ID NO: 33761 - protein, 77 aa, Oryza sativa
MPLPSSPTTPVTPSTAPPPCRSPPQLDLLVQGSVGATAPSPTGGPAFRQRHCSVVLRWSSFPSRLRSCRRYEGHSLP

SEQ ID NO: 33762 - protein, 105 aa, Oryza sativa
MARRLWRWYADRQFNRWEKTVLWDMVEPYRPPRSFAPLIGTYVAAFYTGVVASAITEQLYKEKYWEDHPGEAVPLMPPKFYWGPWRVMNGEVPRFMQTPEEAKPA

SEQ ID NO: 33763 - protein, 66 aa, Oryza sativa
MRTRSLSLTPHRDREELRRAAGPAAAASLPRRHRHSNGSGGGGGDDDHRVGAQGRAVHARVLLPRP

SEQ ID NO: 33764 - protein, 85 aa, Oryza sativa
MPSVSVASSMSKLKFLVTVVLVILLLFDSSSSGQAETAYTNYEVTSKVKERIQKHSRRVLTDVQDYDYGGPNPRHEPRKKPGNGH

SEQ ID NO: 33765 - protein, 76 aa, Oryza sativa
MDLMEKSRRANFLFDDNDGDEDQNDKQKKERTPVNRAGEKNNNENFTSRGLPNDTSKDRSSGLLASLLCCCGPRRN

SEQ ID NO: 33766 - protein, 118 aa, Oryza sativa
MAFVKKGDKVEETENIHKIRITLSSRNPKALEKVCADLMLRAKDQKIKTRGPVRLPTRNLKLTVRKSPCGNGSASWDTYEMAIYKRLIDLYAVLDVVKQITAINIEPGVDIDVAVAEA

SEQ ID NO: 33767 - protein, 170 aa, Oryza sativa
MEVATNTATRSPVKLMLVLTLSPASKVIAKGGGGVKRVHLDGGAFQCRTCGRRFSTFQALGGHRTSHKRPRVRADGLDLLLGARPGKLGAGGASTPVVHRCDMCGKVFATGQALGGHMRRHRPLVSRNGTMSTTWTAAAAAAATMSGSSSEERDDDDDDDVHNYNFIHFL

SEQ ID NO: 33768 - protein, 114 aa, Oryza sativa
MESFNNVKQWLSEIDRYASDSVCKLLVGNKCDLVDSKVVDTEEAKAFAESLGISFLETSAKESINVEEAFLTMSSDIKKRMATQPAVERKPTVHIHMRGQPIQQQNSSSSCCSS

SEQ ID NO: 33769 - protein, 49 aa, Oryza sativa
MAGINRKGGAAAAYAVALCQYARDPSYRSYVTSPSAQRAVKACNVKANC

SEQ ID NO: 33770 - protein, 38 aa, Oryza sativa
MGRGRACWRSARVVRPTSAPVRPLHIEAGEQVPATRMA

SEQ ID NO: 33771 - protein, 72 aa, Oryza sativa
MSSSDSKPCGGLKTEWPELVGLTIEQAKAKIKADRPDLQVEVLPVGTIILGVVVPNRVILWVDTVAEIPKIG

SEQ ID NO: 33772 - protein, 149 aa, Oryza sativa
MADQLTEEQIAEFKEAFSLFDKDGDGTITTKELGTVMRSLGQNPTEAELQDMINEVDADGNGTIDFPEFLTMMARKMKDTDSEEEILEAFKVFDKDGNGFISAAELRHIMTNLGEKLTDEEVDEMIREADIDGDGQINYEEFVKMMMSK

SEQ ID NO: 33773 - protein, 73 aa, Oryza sativa
MVWLQYTATRSQRAATACFFLTGVALILAAARLSYANIEPQRAKAADRRRVLEDFIRRKRNHALDLEDPPPKP

SEQ ID NO: 33774 - protein, 70 aa, Oryza sativa
MASAAAEKGKAPADTEQTAAATAARLAAEWTTWAMKNAKVVAHYGFIPLVILIGMNSEPKPRLAQLLSPI

SEQ ID NO: 33775 - protein, 335 aa, Oryza sativa
MSRVCVTGAAGYIATWLVKKLLGRGCVVHATLRDLGDEKKTALLRRMPGAAERLVLFEADMYDAATFEPAIAGCEFVFLIATPLQHDPSSTKYKNNTEAAVDAMRVILQQCERSRTVRRVIHTASVTAASPLREDGSGGYKDFINESFWSPLNLTYDFTNAHLDGYVSSKSLSEKELLSYNSSPSPAFEVVTLACAVVGGDTLQPYLWSTIPVIMSPLTGDELCHNVLKFLQALLGSVPLVHIDDVCDAHVFCMDQPSIAGRFLCAAGYPNMKDYIDRFAAKYPEIEIKLKEVIGEGVRVQADTKKLVDLGFKYKYGVEETLDCSVECAKRLGEL

SEQ ID NO: 33776 - protein, 251 aa, Oryza sativa
MTLELSLADDHEAREQRPRVQQVELLDVGVGPDLAGERVEAGLSGELLEVLERLVHPAGDDPAHQQRLARRRRVVATDDGAGGGLDGLVGAAAGGRGEDADAGLAFLLGGESVADDAADGALVGGAEAGGARRAAERAGERGAVESEQLVAVGEAARVLLGQLARLQLHRLTVLLEARQRPLRVVHLEHTLDPHAAALRLEQARPADDLHDLPRRVPFHQLRHCHRSRHIHTHMHSRPLVSVDSARCLIET

SEQ ID NO: 33777 - protein, 135 aa, Oryza sativa
MFLMFMSTLLAPGLDERLLGDLPPLLGRALHLLEEGHHLLHGGPLRGRRVHAEDGDPQRLQHLLDQLVRHAAQLRVQDVHRWLVAPHLLLRPLHDVEGVAHHRLHRAPPAQDLQEHHPVAVHVALLGDLRGVAIL

SEQ ID NO: 33778 - protein, 192 aa, Oryza sativa
MKTILASETMEIPSGVTVHVAAKVVTVEGPRGKLTRNFKHLNLDFQLLEVEGVRKLQVDAWFGTRRTMAAIRTAISHVQNLITGVTKGYRYKMRFVYAHFPINASITNSNTAIEIRNFLGEKKVRKVDMLEGVTILRSEKVKDELVLDGNDIELVSRSAALINQKCHVKNKDIRKFLDGIYVSDKGTITEDQ

SEQ ID NO: 33779 - protein, 104 aa, Oryza sativa
MAKQATAAVLAVALVLAASAGLAHGICNLSDAGLQACKPAAAVRNPADTPSSECCDALAAADLPCLCRYKGSAGARVWVRFYGIDLNRAMTLPGKCGLTLPAHC

SEQ ID NO: 33780 - protein, 50 aa, Oryza sativa
MPASACLLFQFFLPGCESPIPSPIWICMYTRELREIRIACTKFTEITAVS

SEQ ID NO: 33781 - protein, 107 aa, Oryza sativa
MATAAKAFWNSPVGPRTTHFWGPVANWGFVLAGLVDMNKPPEMISGNMTAAMCVYSGLFMRFAWMVQPRNYLLLACHASNESVQLYQFSRWARAQGYLENKEPEGQQ

SEQ ID NO: 33782 - protein, 96 aa, Oryza sativa
MMRKLAVLVLAVAMVAACGGGVVGVAGAGCNAGQLTVCTGAIAGGARPTAACCSSLRAQQGCFCQFAKDPRYGRYVNSPNARKAVSSCGIALPTCH

SEQ ID NO: 33783 - protein, 156 aa, Oryza sativa
MQGIVMEQEELSDSEEDSQHVEFEREEMDDSDEDQVQGVDPLLAQNKEVSTSVGCGEYEGSNNQSQNQQRLVQVGGKQGAATQKPQRLSNARPAREKLKGDNAKRPGSRTTQRSSTSPTTEPSQTKTRRPKAQQVQIGAERKSSDSRRSRKKPAPS

SEQ ID NO: 33784 - protein, 247 aa, Oryza sativa
MRYGEGKSLRHAWENVRKQQGDVETFTLFVIRETVKALQYLYDTHRVAHRDIKPDNIVLSGDFSNVMLIDFGLAERIESDTQTYCPCGTKGFASPENIAAVTRGESRFVATGAMMHESDIFSVGVVAFILLSGTKPFRSLGFREMHAQLNHGLQCAGPKWEGISLQSRQLVEWMLHRNFERRATPDDIFNHAAMVNLDQRIKPLLDERRKAQEEEDRGVSKEFDLVLDASEIFGNQARQKQFNQADL

SEQ ID NO: 33785 - protein, 53 aa, Oryza sativa
MFAQLLLIVALVLAVLASVSEAWYGLGWGYGWPYSYGYGYGLGWPYYGGLWGR

SEQ ID NO: 33786 - protein, 81 aa, Oryza sativa
MIAMHYDVKRTLGVLKKRFPILKVATFHKLKNQVKIRIATAIFHNLIREMEGDELWLDDQPDNIDPTDFVDLPSGYQRQYS

SEQ ID NO: 33787 - protein, 80 aa, Oryza sativa
MFRRAALNSAVLRTSAQSRASSAHPNFGVWNPMGPVIFGGAVIGACWMVFSPTTQTAKGDGLLARSGLGFASRTFVQLWM

SEQ ID NO: 33788 - protein, 264 aa, Oryza sativa
MMSSFNPFEAHYDTINDKDDFNIGCVSKNYTIDPLETEAERNIRTRTVTPVVTGSSIAAFVFKDGVILAADVLGSYGSLAKYRNLPRIHQVNDKTVLAVSGDLSDADYIKEAIDTKVEEDLVQEDGGEMTPLALYAWCTRLMYHRRTKFNPLLTSVVVAGLENDEPFLGRVNDKGSAFKEFLIMTGIASHLAQGWIRTILENAGQLNKDQAEALMDRVVKQLYYRDCRAFARYRVCIVTKAGVEFKAKEVQPDWSLAPLLRNGE

SEQ ID NO: 33789 - protein, 43 aa, Oryza sativa
MATGGPSSMSAGLLFLTLTWRRSPSSWPGRSCCAPGRCTPEHT

SEQ ID NO: 33790 - protein, 117 aa, Oryza sativa
MTFIVPPPRARRVDDAEAAAALLLEELSIRLMEEGSSAGGHPPPTSCSDHALRYFIRGFTTIVSLVMVAWLIYARYTTDDSELHDPAKLSFLIVLSLSLAAFGFCSTSETELQRLLD

SEQ ID NO: 33791 - protein, 147 aa, Oryza sativa
MSADLLWQIVQRNNRFYKLRNGIRLSSDPFNNTGNDTLRHAGFLQSKAAVVKVRGEKKLYVSIKNGEHANQPRKAFTKKEFDASAKASDVARAVSAVRPDLADVAFRRARKLARTLSRTKKVRAARKVLSSKRTFKRKNVRKSAKKN

SEQ ID NO: 33792 - protein, 84 aa, Oryza sativa
MAGGRGRGGGGGGGVAGGGNLRPWECSPKCAGRCSNTQYKKACLTFCNKCCAKCLCVPPGTYGNKGACPCYNNWKTKEGGPKCP

SEQ ID NO: 33793 - protein, 127 aa, Oryza sativa
MSPVTALLAGAAAPLPAMARRPSRVAPPGYSPVGGGCALAVECSSRPQKKATKHHMKTRPKKSQPWDRKRRPTQYRPLPALPPDWTLVAAGATVDASAQAEDADEEEPEPVAAPVVEVVAAPAAADD

SEQ ID NO: 33794 - protein, 67 aa, Oryza sativa
MARIPFAAIVVAILSFAIAAAAQAPAPSPTSDGTSVDQGIAYLLMIVALVLTYLIHPLDASSAYKLF

SEQ ID NO: 33795 - protein, 138 aa, Oryza sativa
MAGEASPPAPPEIPTRCHHCAGPLSKDMETSSWTVPPLVRDSFSMIGSAIGGTAGAFYGFNHTMPFVRRYIKGPMWMHFLVGAPPVIVFSSACAGLAGGTIPALAQLVSSSYHSATASSFAHTTSRDEMHKARSSSTL

SEQ ID NO: 33796 - protein, 75 aa, Oryza sativa
MEREKRPLPTTPFLPSVNARASLLSRQPLRATSLPPATVRDSFPAGRRSRLLSYPWLLSSCRPALASPLPPRRGR

SEQ ID NO: 33797 - protein, 145 aa, Oryza sativa
MTLVKIGPWGGNGGSAQDISVPPKKLLGVTIYSSDAIRSIAFNYIGVDGQEYAIGPWGGGEGTSTEIKLGSSEQIKEISGTHGPVYDLADIVTYLKIVTSANNTYEAGVPNGKEFSIPLQDSGHVVGFFGRSGTLIDAIGIYVHP

SEQ ID NO: 33798 - protein, 129 aa, Oryza sativa
MSSSSAAALARGKSGISAAKFEASKGLGAKPKRSASATGSRGKTEKKVYSLPGQKFDPPEEREPLRIFYESLSKQIPSSEMAEFWYAQIFTPFSVIYKFSSISTVRNTPTPIWNIYTVVVHTSDIQVSV

SEQ ID NO: 33799 - protein, 127 aa, Oryza sativa
MAAAAVYGGMKGGKLGVEEAHELQLNRIRITLSSKNVKNLEKVCADLVKGAKDKQLRVKGPVRIPTKVLHITTRKSPCGEGTNTWDRFEFRIHKRVIDLISSPDVVKQITSITIEPGVEVEVTIADV

SEQ ID NO: 33800 - protein, 53 aa, Oryza sativa
MPFHSFLELLLCLTHFHYWRDMHHQWKLIGRGVQEEGQESCGKKWHYKDFEFS

SEQ ID NO: 33801 - protein, 112 aa, Oryza sativa
MGGSGGGGGSGDGGGSGRGRIRRQSVVVVSVTAAASLLPSVEVVASGGSGGSGGGRGRSGGSRRWWRQRRPRVDPAAMAAAEGGSGRLFFRPSLFLFRGIGHWDQVHELYSD

SEQ ID NO: 33802 - protein, 81 aa, Oryza sativa
MRVVMAAYEEIAAPTLEGGSGGSTTWWEGAAAATGWDLRRRGGRGSAPAERRQCRGAEGFVAAAAAHARSSCFMQSMATAA

SEQ ID NO: 33803 - protein, 125 aa, Oryza sativa
MAGRGSAMAAVGVLVLLCVLLHGEMAESAVFTVGDRGGWGMGAGSWANGKRFKAGDVLVFKYDSSAHNVVAVNAAGYKGCTAAPRGAKVYKSGNDRVTLARGTNYFICNFPGHCQAGMKIAVTAA

SEQ ID NO: 33804 - protein, 95 aa, Oryza sativa
MYIRVKRNKTTYFIQCDPTETTLSIKQKLHSLVDQPPGNQQLILLATTEVVLDDSKTLADQKVENDAVVALTLRKDDNVFEEVSIARPEDFMSSS

SEQ ID NO: 33805 - protein, 121 aa, Oryza sativa
MPNANWKGIDPVNTTTDKMCNQQKAAFNITNDFAVKGGVRSMGEALRAGVVLTMSIWVDFGTQGLWLDSSFPVDKDPSLPGVVRGSCPTTSGKPADVMAQTPGATIKYSNIRVGDIGSTTQ

SEQ ID NO: 33806 - protein, 94 aa, Oryza sativa
MVKWAAVMEMLLLTAAATAVAVVAAQCDPEQLSACVSPIFYGTAPSESCCSNLRAQQKEGCLCQYAKDPTYASYVNNTNARKTIAACGIPIPSC

SEQ ID NO: 33807 - protein, 163 aa, Oryza sativa
MEGGGATAPAAPHPAVAPLAFLLGKWRGEGEGSFPTISPFRYGEELLFSHHPSKPVISYTQRTWKAASGEPMHAESGYWRPRPDGSVEVVISQSTGLAEVQKGSFDAEKKTVTLQSELVGNASKVKQITRAFQLVDGELSYVVQMATITTSLQPHLKALLKKI

SEQ ID NO: 33808 - protein, 113 aa, Oryza sativa
MAWPRCGGCGLALHGPVSLICTGVGGERGEAATGVWEPWSSAVRERGRALRAVSRLRPLVGDQGGAPPAVAALLESVAGKFSVPTPRFLYDSKKVKSKGKREWWDPPRVNLSL

SEQ ID NO: 33809 - protein, 131 aa, Oryza sativa
MQLKPHEIYHWVAGPWMKCSSPCDGGVRYRDVACYGNLSDATIKHYPVDDASCSADEMPARQEACNEQSCGVDMAEQTNSRKNGMSGWLVALILLLGLGAIGGIVFTSYTYYLRRTSGRNGFVYVMMEAYS

SEQ ID NO: 33810 - protein, 145 aa, Oryza sativa
MTGVLVFKPIEAKLTHDTDIFTKMDPYCQFLIGDRKVKGEVCKHGGKHPKWHDTITFERHHEPICYIELKDHDTFSSDDIIGVGQIDLNALPPGSVTAKWYPLFWKQKPAGEVLLEIIWTPSAEQKPLPHDHKHHHHQHPHFGQF

SEQ ID NO: 33811 - protein, 186 aa, Oryza sativa
MMACRALALLPLPAPSRLPRPRAASLARLDAARRRASASLLVRCCANPAGPGGQEDPPQDAVLKAISQVANSKGRVAQTTNVVMGGTVTDDATDEWLVLDKQVNTYPTVRGFTAIGTGGDDFVQAMVVAVESVLEEQIPKAQISHKVSSKGKYVSVKIGPIPVVSSEQVQAVYNAMKKDERMKFFL

SEQ ID NO: 33812 - protein, 106 aa, Oryza sativa
MVNIWAIGRDSKVWFEPDKFIPERFLQKEVDFRGRDFELIPFGSGRRICPGLPLAVRMVHLMLASLLHRFEWRLLPEVERNGVNMEEKFGIVMTLATPLQAIATPI

SEQ ID NO: 33813 - protein, 34 aa, Oryza sativa
MMVSVIAATGVMSMIAMSLARIRAGRLVKRQGIN

SEQ ID NO: 33814 - protein, 208 aa, Oryza sativa
MMMMMSAASSPSCLLLLPRPTKPTPPLLPSTSSCRRPPRCRIRSLRPENPAPPAAGVARAVASSSSPMEMEAAQTQACGGGEGQQEAMRLLFVEMGVGYDQHGQDVTAAAVRACRDAITSNSIPAFRSGSIPGVNTEQMKLQIKLGVPRPTQHLLDVERVKAVFPYGKIISFEVVDGGMICSSGVCLEAMGDKNDDCYIVNAAVYVGY

SEQ ID NO: 33815 - protein, 33 aa, Oryza sativa
MAISPGWPSGSGWPSSSRMAISVEGSGRPMVPV

SEQ ID NO: 33816 - protein, 83 aa, Oryza sativa
MVMVMMPMGWCWLCGLVRWCAAPGCFDVRHHGAAARRLMRAQNQMQIHLPHVRVPRVWHRRMQSPSLGHWPGSTARLGRQGDD

SEQ ID NO: 33817 - protein, 206 aa, Oryza sativa
MASKIVRVLLALALCMTVAVEAGKGPKITNQVFFDITIGGKDAGRVVMGLYGKTVPKTVENFRALCTGEKGMGKKGKPLHYKGSTFHRIIPNFMIQGGDFTDGNGMGGESIYGEKFEDENFKLKHTGEGVLSMANAGANTNGSQFFICTVKTSWLDGRHVVFGRVISGMDIIKAVEAVGSGGGTPSEQVVVKDSGELPEAEWVAIE

SEQ ID NO: 33818 - protein, 81 aa, Oryza sativa
MTDNQGVPQSGSTSTPFWQPRKPHAPIYALRLCSLHLVPPSRPLDRHGLNYSNSSLQVFFFNDLGYHFGAETNMTPIKQCS

SEQ ID NO: 33819 - protein, 130 aa, Oryza sativa
MQCPNSNLMLGNVTAQSTSGGCNVSSCSYAGLVNGTIATSLSSGLQPTCPGPHQFPPLRATPIAVNQGSYLAPSPAPGAGEAGGDIPGFPGSSNVSPANGPSGSVSQAASVNRPHQIVALILSVALYFQM

SEQ ID NO: 33820 - protein, 73 aa, Oryza sativa
MAATTRSLLSEHCRPSPRANIFASTRRTHFTPFPQPFHLELSHHRQLPNRPNQALAAGVPVSSLSLSASHRPP

SEQ ID NO: 33821 - protein, 121 aa, Oryza sativa
MSKQMAQVSRRRLTRVGTVLLPTFSTPYAAGGHRPVHVAVHDHLAVAELVVEPRDHVLEADVEALDDGVFLVGTRAAAPRGALQREAAHGREAVKVDLAGTERVQLADERVRLGDAPMPRR

SEQ ID NO: 33822 - protein, 80 aa, Oryza sativa; identical to SEQ ID NO: 32612

SEQ ID NO: 33823 - protein, 332 aa, Oryza sativa
MGLWEWPWDRRRRGPSGLGPTSTAEEVTAGVDATHLTAIVTGATNGIGRETARVLARRGAEVIIPARTMESGNAVKQSIAEEVPGSRLHVMEMDLASLDSVRRFATAFDSSHTHLNILINNAGIMGCPFKLSKDGIELQFATNHVGHFLLTNLLLDKMKSTARKTGVQGRIVNVSSIAHKRSDGSCFDLNKLNDKSRYKPLIAYAHSKLANILHANELAKRFQEEGCNLTANSLHPGVILTNITRYVVTNSVMVSILSVGNLFLKNTQQGAATTCYLALHPELKDVSGKYFADCKEATPRPAARDAELAKRLWDFSEQLVDTNRRGEFNRQK

SEQ ID NO: 33824 - protein, 52 aa, Oryza sativa
MIAIGPPARMLLPALQFVRLGETCAKILSGTLNFVESLHFQCLLSSLDLEME

SEQ ID NO: 33825 - protein, 127 aa, Oryza sativa
MAARSSLHPSSMASIPRLIGTRKAALRFRAPAHGGTSSSQLSIAAATANKKVFEDQLRGIVCYRDDKGEMVCEGYDEGPRLGMRLPEKACFPWPMEVQITDFIELATFRVFEDADVLQIKNDQKRQI

SEQ ID NO: 33826 - protein, 140 aa, Oryza sativa
MSKAKRLSRGSGSGSSSSRAAAATTASGVNNSQAPVDTSANVPDGSAMEESHVLPVINEEAANNVEAVNDDETVNHEEEDMSEESAEGEEEANPPPVRDVAMENELAHEMTGDALDDYDIDVSNEGQAISEYLSLLDSAA

SEQ ID NO: 33827 - protein, 53 aa, Oryza sativa
MASKKHNLTGSDTGDDGPLSLSLGLPGVVTSNQALEMKQFLPEKPGMNTSLLL

SEQ ID NO: 33828 - protein, 43 aa, Oryza sativa
MFFVWCPWTLGEQEFYTSIELYLFLQFLSLQHNLQYHTLNSVY

SEQ ID NO: 33829 - protein, 102 aa, Oryza sativa
MAAELTAAQLRAYDGSDPSKPIYVSVRGKVYDVTSGRGFYGPGGAYAVFAGREASRALGKMSKDDADVSGDLSGLSDKELGVLADWETKFQAKYPVVARLTE

SEQ ID NO: 33830 - protein, 83 aa, Oryza sativa
MLPRTSLVSRMERPSVSRSRTTLVPSASLRALDCSSMLLASMSNHDAMPCSYVPVPLPVTACSTMVCENQSGLYMYLHNRIFQ

SEQ ID NO: 33831 - protein, 67 aa, Oryza sativa
MYDASGIRFHTGRQAALLNQIVSDFPPEHPIISSFRPLQEPLGHSPFQVFAGALVGCSIAYLMGKSV

SEQ ID NO: 33832 - protein, 109 aa, Oryza sativa
MSQPCTWFTQPHFSCAWICQSPFTKLLKAAGHVYIIVVVIVNCESLSLYISPLMTMFELPCLTTPATQFAFGSVIIGNCKVACSLITDSANDLSHFFCTMYAIIIVITE

SEQ ID NO: 33833 - protein, 190 aa, Oryza sativa
MAARTPKLFGKWTFHDVTVSDLSLRDYISTTPVYAPHSAGRFTKRRFRKAKCPIAERLANGLMFTGRGNGKKLLAARILKHTFEIINLMTDSNPIQVVVDAVAKGGSREDSTRVGTGGVVRRQAVDVSPMRRVDEAIYLMCKGARASAFRNLKTMPECLADELINAAKGSSNSFAIKKKDETERVAKANR

SEQ ID NO: 33834 - protein, 544 aa, Oryza sativa
MKQESATAALGFICTLTYNISGKDSAAAVIHKLPGQLNYSTQLKFIISALDALQPNKRFQLPQLSMPPRLTSYEVMSEVHSNIALGNAIGGESDKFLRVDGGLSYLKKVLHMYPDCSLVRNQLGSLLLSSEDWMASHKAVRVTSLSRGYTSNRGLRSPHQIQACAAVSCYATCTSYPKFSFPTCEDQYLSGYNAICRLQRWVHLEPWNQDARRLLVLTLFQKAREEKYPKHICTILKRLILQVLSSGSNSQDNKVVQYGNYLLLLVASEVSLQSGDHGNCIAQATEALGVTSSSVDSFFAHLQLCRAYVMQGNLLNSRSEYMKCLQNRTDTEIGWVILKQLASICSLEGTPDEIEIHLGGCVERKGSNASKWMSLFYLACAQCSVWNEDFASAEKAIAQACAEGDPDSCVLFLNGAICMDIAWRFAAPQFIARAASSLRKAQQKSLASLPIVSLLLAQAEGSLGSKAKWEKNLRLEWFSWPPELRPAELYFQMHLLATQSSAATSQQNQLVETMQTPEKWLLRAIHLNPSCSRYWTALMQLVYV

SEQ ID NO: 33835 - protein, 326 aa, Oryza sativa
MRPILMKGHERPLTFLRYNRDGDLLFSCAKDHTPNVWFADNGDRLGTYSGHNGAVWSCDVSRDSTRLITGSADQTAKLWDVQTGAELFTFRFDAPARSVEFAIGDGLAVITTDNFMGNVPTAQVKRIADDPDDQSEESLLVISGIKGRINRAVWGPLNRTIITAGEDATIRIWDTETGTCLNESDKEQGHQKTITSLSKSADWSHFLTGSLDKSAKLWDTRTLTLIKTYVTERPVNAVDISPLLDHVVIGGGQDAMNVTMTDRRAGKFEAKFFHKILQEEIGGVKGHFGPINALAFNPDGRSFSSGGEDGYVRLHHFDSDYFNIKI

SEQ ID NO: 33836 - protein, 169 aa, Oryza sativa
MKAIVQEEMFADASISKLKRAKALVMHKVMDAAKGQYQKLFNYQLELLRSNPGSTVVVNREVGLDPPVIKRIYICLDALRKGFKAGCRKVIGLDGCFFKGATNGELLCAIRRDANNQMYHVAWAVVNKENNEEWDWFMDLLSRDLQVGDGEGWLFISDQQKGILNALEK

SEQ ID NO: 33837 - protein, 340 aa, Oryza sativa
MAATAGRTAGALAVLQLASIVAAAVLLSSPPAAAAEPSVDFIDVVACSQSQVDSIVRSAVQAALQREIALAAGLIRIFFHDCFPQGCDASVYLSGANSEQGMPPNANSLQPRALQLVEDIRAKVHAACGPTVSCTDISALATRAAVVLSGGPTYPVPLGQLDSLAPAPLRLVNQLPGPGTSSVQALIDLFGSRGMGDAADLVALSGGHTVGKSKCAFVRPVDDAFSRKMAANCSANPNTKQDLDVVTPITFDNGYYIALTRKQGVFTSDMALILDPQTAAIVRRFAQDKAAFFTQFVTSIVKLSKVPRPGGNKGEIRRNCFKTNSGARLVDVVEGFAASA

SEQ ID NO: 33838 - protein, 547 aa, Oryza sativa
MWTVGTILGVGLFIGFVMMIVKLVPHKRPPPPPPDQYTQALHKALMFFNAQRSGPLPKHNGVSWRGNSCMKDGLSDSTVRKSLVGGFYDAGDAIKFNYPMAWSMTMLSWSVIEYKAKYEAIGELDHVKELIKWGTDYLLKTFNSSADTIDRIVAQVGVGDTSKGGAQPNDHYCWMRPEDIDYPRPVTECHSCSDLASEMAAALAAASIVFKDSKTYSDKLVRGAKALYKFGRLQRGRYSPNGSDQAIFYNSTSYWDEFVWGGAWMYFATGNNTYLSVATAPGMAKHAGAYWLDSPNYGVFTWDDKLPGAQVLLSRLRLFLSPGYPYEEILRTFHNQTDNVMCSYLPMYNSFNFTKGGMIQLNHGRPQPLQYVVNAAFLASLYSDYLDAADTPGWYCGPTFYTTEVLRKFARSQLDYVLGKNPLKMSYVVGFGNKYPKRAHHRGASIPHNGVKYGCKGGFKWRETKKPNPNILIGALVAGPDRHDGFKDVRTNYNYTEPTLAANAGLVAALISLTNIHVKSGIDKNTIFSAVPPMFPTPPPPPSAWKP

SEQ ID NO: 33839 - protein, 499 aa, Oryza sativa
MAAVAGTGVFAEILEGEVYRYYADGEWRVSASGKSVAIVNPTTRLTQYRVQACTQEEVNKVMETAKVAQKAWARTPLWKRAELLHKAAAILKEHKTPIAECLVKEIAKPAKDAISEVVRSGDLVSYTAEEGVRILGEGKLLVSDSFPGNERNKYCLSSKVPLGVVLAIPPFNYPVNLAVSKIGPALIAGNALVLKPPTQGAVAALHMVHCFHLAGFPKGLINCVTGKGSEIGDFLTMHPGVNCISFTGGDTGIAISKKAGMVPLQMELGGKDACVVLEDADLDLVAANIVKGGFSYSGQRCTAVKVVLIMESVADIVVEKVKAKLAKLTVGPPEADSDITPVVTESSANFIEGLVMDAKEKGATFCQEYRREGNLIWPLLLDHVRPDMRIAWEEPFGPVLPVIRINSVEEGIHHCNASNFGLQGCVFTKDINKAIMISDAMETGTVQINSAPARGPDHFPFQGLKDSGIGSQGITNSINMMTKVKSTVINLPSPSYTMG

SEQ ID NO: 33840 - protein, 290 aa, Oryza sativa
MAEHLASIFGTEKDRVNCPFYFKIGACRHGDRCSRLHNKPSVSPTLLLSNMYLRPDMITPGIDAQGNPIDPEKIQADFEDFYEDIFEELSKYGEIESLHVCDNFADHMIGNVYVQFREEDQAARALQALTGRYYSGRPIIVEFSPVSDFREATCRQYEENSCNRGGYCNFMHVKEIGRDLRKRLFGHLHRSRRSHSHGRSRSPSPYHYRRDYDRRSSSRSRDHDDYYRGGSHDYYRGGSRRSSERHRSSYDSDGSRRRHRSRTRSPVRDGSEERRAQIEQWNREREAAQV

SEQ ID NO: 33841 - protein, 451 aa, Oryza sativa
MSSPDEDPPTEPERWRDLDMLPSRPGNLVHADFNPSPGLRDSLGSLVEVLVVGAGGLGCELLKDLALSGFKNIHVIDMDTIDVSNLNRQFLFRVQDVGKSKAEVAAKRVMERVSGVNIVPHFCRIEDKEIEFYSQFSIIVLGLDSIEARSYINSVACGFLEYDSDDKPIPETLKPMVDGGTEGFKGHARVIIPGTTPCFECNIWLFPPQVKFPLCTLAETPRTAAHCIEYAHLIKWNEVHPGKPFDADDAEHMQWIYSEALKRAELFGISGVTYSFTQGVVKNIIPAIASTNAIVSAACALEALKLISGCSKTVSNYLTYNGLDGTHINVSEFAREKDCLVCGPGTLIELGTSTTLSEFIKMLEEHPKLLMSRASVTHEGDNLYMQAPEVLEQMTRPNLGVPMFELLKGAARTTVHVTGMAENNGKKVSSLRKLRVTFKGVEESSKMDESS

SEQ ID NO: 33842 - protein, 464 aa, Oryza sativa
MSSSVGGGGGQQFRYTQTPSKVLHLRNLPWECAEEELVELCNPFGRIVNTKCGVGANRNQAFVEFTDINQAISMVSYFASSSEPAQIRGKTVYIQYSNRQEIVNNKSPGETAGNVLLVTIEGVQANDVTIDVIHLVFSAFGFVHKIATFEKAAGFQALIQYTDAATASAAREALDGRSIPRYLLPEHVTSCCLRISFSAHKDLNIKFQSHRSRDYTNPYLPVNSSAIDTLQPAVGADGRKVEAEGNVLLASIENMQYAVTVDVLHTVFSAFGTVQKIAIFEKNGGTQALIQYPDVTTASVAKEALEGHCIYDGGYCKLHLSYSRHTDLNVKAHSDKSRDYTIPQGAMQAVPQPPGVPTTSAGWQGNPQAGGAYAPPGAAAPNHGTTGQVPNWNPGNSGYAPAPGAYPGQMYSSPMQYGASGGFSAPAAPPQELHTSQQMPPPQYGNQPGPAGAPGTGQPHPYYR

SEQ ID NO: 33843 - protein, 126 aa, Oryza sativa
MATFTGRTSLLATLVVVVSAVVMACSVDVCHGAREGAFSRPDPAPADHRPKDDDVYVPGGGGEGGYGPRGPCYDPLIPGHGGGLIPIRPDLPAPGYGRGRYPCFRPLPYHPTPPLPPPQNGDTPPP

SEQ ID NO: 33844 - protein, 193 aa, Oryza sativa
MANLAASLLFLLAVASSATVPAHGRRDLLPTRIKLVRGADAGAGAVAGGDKMECVYTVYIRTGSIWKAGTDANITLELAGADGNGVGITDLPSWGGLMGEGHSYFERGNLDIFSGRGPCMAAPPCWMRVASDGTGPHHGWYCNYVEVTVTGAHKGCAQQLFTVEQWLATDAAPYKLEAIRDKCSAAGAGAAAA

SEQ ID NO: 33845 - protein, 477 aa, Oryza sativa
MRTGGDYVKPKTETPKAASGGRNTTATTSRGSPRQTRERDEAKSMGETNYVQGQFLDGVVKNSTRAGSFVTLPDGSEGFLPREEEAVALFTLIGHSALEVGQQVRVKVLNVVRGQVTLTMKEGEDDEEDLASLNTQLKQGWSRGTNAFELAFRRNKEISAFLDQREKIIVPDVQEAAVASVGTELDAEVGIEQSPGKEPETGNAESVAIDSSITEVKETDSIAAVEKDSEISKTESVETASSVVISEDDSTVDGKLVEPTASVSATETEIKEDSSEGSVTTEPTEAASTEFVTAVVEESAPTASSVETSEDDSTVDDKLVEPTASVSATEAESKEDSSGGSVASTESVTAVVEESAPVSSVAIEVPAPEASEASAQEIIEDSTTVEGAADDQTVESDSPPPEGVELSSNGAPDSSIAEDKPDEPEESLIVEEVPVTASSESEDKEPAAVPEEVAASSEKTADVAVAGAEASTATGQQ

SEQ ID NO: 33846 - protein, 592 aa, Oryza sativa
MRINDSDDPIAAQKAGEVLKNLEKCSKNIKYMAESGYLEPLQSHLVEGSEEMQMEMVGYLAELIQEQELTIDINGSTSGVLIKMVHSCNTVARKAALDVLVQLSSHRPNSKTLVEAGVVPVMVEELFIRKVDDEPLSYKAMAAAVLANVVESGIDPDNTVVNKEGHVLTSKYSIYNFVHMLKCFMPDELNLSIIRVLLALTAHAKALAAVVSVVRENHRGHSIVELMSSWTEALGVASTRLLITLSAHMGHTIAERLCKTQGQPRRLVRSIFRAGRAAITERHAAAVTLLSRLPYRNVSLNLALVQEGAVPAILRGIEEMGSGAARMTTSRHAAPYMEGLVGTLVRLTATLYNPDVLKAAMDHDFASVLTALLAGAAGSGEVQRLAAVGLENLSYHSIKLSRPPPPPEDEPRPKKMTILKRLKDARVHNHSSSKNPPLNVCPVHRGVCTPATTFCLLEAGAVEGLLACLENDDARVVDAALGALCTLVDDRVDVEKAVVALAGQGAARRVLAALRQHRGNSLWHRCFSVVEKLLVHGDDVCVREVTGDRMLPTALVSAFHRGDANAKQAAESILRRLHKMPDYSATYMSVEF

SEQ ID NO: 33847 - protein, 252 aa, Oryza sativa
MQPIYGFVRILIKSFTSEFPHVERYFWTMVNQPNFKKVIGDFKQAESVPPVQKKAAPPKESKAKEAKKEAPKEAPKPKVEASEEEEAPKPKPKNPLDLLPPSKMILDEWKRLYSNTKTNFREIAIKGFWDMYDPEGYSLWFCDYKYNDENTVSFVTMNKVGGFLQRMDLCRKYAFGKMLVIGSTPPFKVKGLWLFRGQDIPKFVMDEVYDMELYEWTKVDLSDEAQKERVNAMIEDQEPFEGEDLLDAKCFK

SEQ ID NO: 33848 - protein, 394 aa, Oryza sativa
MMAVLARLGVIVVLWAVVAEGILDPVDFLALQAVRRSLDDMPGSSFFEAWDFTADPCGFPGVFCDGNKVSALALGDPRAGSPGLSGRLDQALGRLSALTELSLVPGRVEGELPESLSSCRNLRFLAVSKNLISGQIPDGLGGLSNLRTLDVSFNQISGTIPASIAALPSITNLILCHNHLTGGIPSFPDSSPLIRLDLKHNDLSGGVPNLPSTLQYLSLSANRLTGTVDSVLPRLTRLNYLDLSMNQLDGPIPASVFTLPLSVLQLQRNFFSGLLQPANDVTIQVVDLSYNRFWGPVSPLLAGVGQLYLNNNRFTGVVPARLVQELVGSGGLQVLYLQHNFLTGIEISPASSLPSSVSLCLMYNCMVPPVYAPCPLKAGSTNTRPADQCPEWRG

SEQ ID NO: 33849 - protein, 371 aa, Oryza sativa
MENTDEPSVSQPDILTQGAVDVSSLQYNLPSVSDHVYSNTTQPSTMESSQGDIQVQHLPQFSSLLQANTLHNNLLGSNLPNLRDFDFSPLLSTQLATKYNPPVPTTSLPAISMQETLKPGGFSNAQPTQNLPSASIPSGPPLPQQLSVHPYPQPTLPLGPFSNLVGYPYLPQNYYLPSAAFQQSFSSNGPFHQSAATTGVPGVSMKYSMPQYKGSLPATSPPQPSSVVSGFGGFGSSNNIPGNFGLNQNVPSAPTTMGFEEALSTQFKDNSQYIALQQNDNSAMWLHGAAGSRAVSAVPPGNFYGFQGQNQPGGFRQGQQPSQYGGLGYPSFYQSQAGLPQEHPQNLTEGTLNSSQITPSQPSHQIWQHIY

SEQ ID NO: 33850 - protein, 229 aa, Oryza sativa
MTTMLAASSVVNSNLPCSSRISSCSDFTSGYSWRPIEAAKLCRTRAVRSLQITCTATKPAKSPAEEEWKIKRQVLVEKRVRSVDVKEALRLQKENNFAILDVRPVADFKEAHPPGAVNVQIYRLIKEWTAWDIARRAAFAFFGIFSGTEENPEFIQSVDEKLGKDAKIIVACSTGGTLKPTQNFPDGKQSRSLIAAYLLVLNGYKNVFHLDGGLYTWFKEGLPAVEGEE

SEQ ID NO: 33851 - protein, 553 aa, Oryza sativa
MAVNHKLSALLVATALPLLLLSTADAGEIGVCYGRDASNLIDPPEVVKLLNANSITMVRIYDTDPTVLNALANTGIKVMVMLPNKDLASAGADVGSATNWVKNNVVPYLNQGTLINGVAVGNEVFKQQPELTGMLVSAMQNVQMALANLNLADGIKVSTPIAFDALDVSFPPSDGRFKDSIAQSVMKPMIDFLVRTGSYLLVNLYPMYAAADPSTHISIEYATFRPNSGVLDEKTGIMYFSLFDAELDAVYAAISKVSGGSLRASLAQGDQMLVQVAETGHSSGNTFGGPVVVEADADLNAIATIPNAKAYNNGLIRRVLSGSPGKHDVSAYIFSLFNENLKPGPATEGHFGLFYPNGQQVYEVNFQGGRSPCPTNASWCVANPNVDNAALQRALDWACNNGADCSAIQLGKACYEPNTLVAHASYAFNDYYQRKGQASGTCNFNGVAFIVYKPSPSICDPNPSWCVAKDSVGEAQLQNALDYACGSCADCSAIQRGAQCFNPDTKVAHATYAFNDYYQTAGRASGSCDFAGAATIVTQQPKIGNCLLPPNNA

SEQ ID NO: 33852 - protein, 385 aa, Oryza sativa
MDEVDFGGGKRSKPPSPQPHTPDISEGHGSSRHVAASGGGEEHGNGSSLIGAIGRDLTINCLLRLSRSDYGSVASLNKDFRSLVRNGEIYRLRRQSGVAEHWVYFSCNVLEWDAYDPYRERWIQVPKMPPDECFMCSDKESLAVGTELLVFAMAHIVFRYSILTNSWTRADPMISPRCLFGSTSVGAKAYVAGGTDSSGRILSSAEMYDSETHSWTPLPSMNRARKMCSGVFMDGKFYVVGGVASNNKVLTCGEEYDLKRRSWRVIEDMSEGLNGVTGAPPLIAVVNNELYAADYSEKDVKKYDKQNNKWITLGKLPERSVSMNGWGLAFRACGDRLIVIGGPRTSIGGTIELNSWTPDERPPVWNLIARRPSGNFVYNCAVMGC

SEQ ID NO: 33853 - protein, 339 aa, Oryza sativa
MHPLSEAIALLSNSHNALPQIFLVTDGSVEDERNICRTVKEQLATRGSKSPRISTFGLGSYCNHYFLRMLASIGKGHYDAAFDTGSIEGRMVQWFQKASSTIVINISIDATKYIREFEVDSEYIQDISAKCPLCVSGRYQGKLPETLTAKGYLADMSEISIELRVQHVKDISLDKVLAKQQMDLLTAKAWFYENNQLEMKVVKLSIQNSIPSEYTRTILLQNFVEKIEQGKQKPKKNSTQNEQSATSLNGLTLGFGDTAATRENLSAGFGDTKPPERFEMFDKAVGCCSRLTDCCCCMCFINTCSKMNDRCAIVMVQLCGALSCLACFECCSLCCGGSD

SEQ ID NO: 33854 - protein, 401 aa, Oryza sativa
MDEEQLRALLRDLDALKQRPDPAAIDRDMSSEVVDSNPYSRLMALQRMGIVDNYERIRDYSIAIVGIGGVGSVAAEMLTRCGIGRLLLYDYDTVELANMNRLFFRPDQVGMTKTDAAVQTLSGINPDVTLESYSLNITTVKGFETFLGSLKARSSDGRNTGVDLVLSCVDNYEARMVVNQACNELGQTWMESGVSEDAVSGHIQLLVPGETACFACAPPLVVASGVDERTLKREGVCAASLPTTMGVVAGLLVQNALKYLLKFGQVSPYLGYNSLKDYFPTMEMKPNPQCSNPACVQRQKEYMQSKPARDAAAKAKMEAEASAADECPVHLDNDWNISVVDDSDTVTPSILSTGADSLPEGLVRELPTADSYQEPVAPVTSGAIDDDLEELQRQLDALNSS

SEQ ID NO: 33855 - protein, 120 aa, Oryza sativa
MARSSFKLEHPLERRQAEANRIREKYPDRIPVIVEKAERSDIPDIDKKKYLVPADLTVGQFVYVVRKRIKLSAEKAIFIFVKNTLPPTAALMSAIYEENKDEDGFLYMTYSGENTFGLFV

SEQ ID NO: 33856 - protein, 397 aa, Oryza sativa
MAAPKPIARLISHVILDLDGTLLNTDCVVSQVLKPFLVKNGKKWDSKKAHKLVGKTPYEAAAVVLEDYGLPYSTEEFLSMLTPMFNEQWCNIKALPGANRLIKHLKSNGVPAALASNSPRSNIDAKISCHQGWKESFSAIVGGDEVEKGKPSPDIFLEAAKRMNTNPPNCLVIEDSLPGVAAGKAAGMHVIAVPSVPKRTAEFSSADEVINSLLDVKPEKWGLPPFSDWIDDTLPIEPWFIGGPVIKGFGRGSKVLGIPTANLPAENFSDVLSEHTSGVYFGWAGLSTRGIFKMVMSIGWNPYFDNTEKTIEPWLLHDFGEDFYGEELRLVIVGYIRPEANFPSLESLIERIHEDARISDKALNLPLYAKYKDSPYLRNSLKEDNSANGNQSVIDSK

SEQ ID NO: 33857 - protein, 419 aa, Oryza sativa
MAASTTCPARSMASVSRALRPRPHAAIASAAVRTAARLGGGLGIVCSMPSYGRKEKEEWGLTIASAPATTAAPALRSCQLLCKAEASISSNLPESIPSEANQYEKIVELLTTLFPVWVILGTIIGIYKPSMVTWLETDLFTVGLGFLMLSMGLTLTFEDFRRCMRNPWTVGVGFLAQYLIKPMLGFAIAMTLKLSAPLATGLILVSCCPGGQASNVATYISKGNVALSVLMTTCSTIGAIVMTPLLTKLLAGQLVPVDAAGLAISTFQVVLLPTIVGVLAHEYFPKFTERIISITPLIGVLLTTLLCASPIGQVSEVLKAQGGQLIIPVALLHVAAFALGYWLSKVSSFGESTSRTISIECGMQSSALGFLLAQKHFTNPLVAVPSAVSVVCMALGGSALAVFWRNRGLPANDKDDFKE

SEQ ID NO: 33858 - protein, 355 aa, Oryza sativa
MASGDVVGKSRGDTAVTTIVNLAEEAKLAREGVKGPGYQVLSICKSLFAGGVAGGVSRTAVAPLERMKILLQVQNPHSIKYNGTIQGLKYIWRTEGLRGLFKGNGTNCARIVPNSAVKFFSYEQASSGILWLYRQQTGNEDAQLSPLLRLGAGACAGIIAMSATYPMDMVRGRITVQTEKSPYQYRGMFHALGSVYREEGFRALYRGWLPSVIGVVPYVGLNFAVYESLKDWLLQTNPYDLGKDNELHVVTRLGCGAVAGTIGQTVAYPLDVIRRRMQMVGWNNAASIVTGEGKEALQYNGMIDAFRKTVRYEGVGALYKGLVPNSVKVVPSIAIAFVTYEFVQKVLGVEMRISD

SEQ ID NO: 33859 - protein, 88 aa, Oryza sativa
MPDLAGREVAAPPSRPLHPAGGDAAAARQLWRRRPLCQIWPEGMRWRLATGGVAAREESRPSSSTSGDGGFPRQRSSSGDGGGGGDGS

SEQ ID NO: 33860 - protein, 322 aa, Oryza sativa
MAAALSFPIIDMSLLDGAERPAAMGLLRDACESWGFFEILNHGISTELMDEVEKMTKDHYKRVREQRFLEFASKTLKEGCDDVNKAEKLDWESTFFVRHLPESNIADIPDLDDDYRRLMKRFAAELETLAERLLDLLCENLGLEKGYLTKAFRGPAGAPTFGTKVSSYPPCPRPDLVKGLRAHTDAGGIILLFQDDRVGGLQLLKDGEWVDVPPMRHSIVVNLGDQLEVITNGRYKSVMHRVVAQIDGNRMSIASFYNPGSDAVISPAPALVKEEEAGETYPKFVFEDYMKLYVRHKFEAKEPRFEAFKAMENETPNRIAIA

SEQ ID NO: 33861 - protein, 497 aa, Oryza sativa
MEQAAKATISLSPPSYAGCCMAACPYRSTRHLRGGGGCSARSISSLRHAPSARVYAAAAAAATPESKSTKENDLVFIAGATGKVGSRAVREFIKLGFRVRAGVRSAQRASSLVQSVEQLKVDDDATSPAERLEIVECDLEKQAQSDIVSAIGNAAIVVCSIGASEKDILDVTGPYRIDYMATNNLVQAATAAKVEHFILVTSLGTNRIGFPAFLLNLFWGVLCWKRRAEEALIGSGLPYTIVRPGGMERPTDAFKETHNLVVAVEDTYVGGLVSNLQVAELIACIASNRRTAYCKVVEAIAETTAPLLPTEDQLANIPSKRQPPPEPEVVQQGETPPKPIQQSQRPLSPYTAFVDLKPPSSPSPCPPSAAAPAPTSTDTAAAGSSSTLNSSATGTPISVDQPKQQQRPLSPYTRYEELKPPSSPSPTPPSAASSASVSASPDTPPAAAASSAALDSSANGTPITGDQLNQQQSPLSPYTRYEELKPPSSPTPSTPKL

SEQ ID NO: 33862 - protein, 265 aa, Oryza sativa
MRRYSPPYRSPPRRGYGGRGRSPPRRGYGGRKEQGSGSLLVRNIPLSCRAEDLRVPFERFGPVRDVYLPKDYYTGEPRGFAFVEFVDPYDASEAQYHMNRQVVFGREITVALAAESRKRPEEMRSRARVRGYSDHEGRRSSHYGRSRSRSRSRSPRYRGRPRSRSYSPAPRRRDDYSASPQRKDTHRAKSPRRQPKEHEVDKKRRSYSPANKDGDRRDADNGYEKRSPPADSDGSPPHRRSPRQSSGSPPGSRSRSADGSPARSD

SEQ ID NO: 33863 - protein, 429 aa, Oryza sativa
MESLVLASSCSASPRLPPLSAARRRRPSSQTLPATAAASGRRGAGRSKLVVVAAAAAAARGSGNGFEGLKTNGFASMSSSTNSENMSTGTGSLPPMPPPSSYIGSPVFWIGVGVALSAAFSMVSPMVKKYAMQQAFKSMMTQAPPNTFGSNSPFPFAMPPQAAPAAPSSYPYSQPRKDTSPQSATVDVSATKVEATGTLEEADVAEQPKKKFAFVDVSPEELQQKELQSSLETVDVKSESKQSETMEDTEQKAPTNGTAFKMNEGSASGTTESSNSGPMLSVDTIEKMMEDPAVQKMVYPYLPEEMRNPDSFKWMLQNPMYRQQLQDMLNNMGGSPDQWDNRMLDHLKNFDLSSPEVRQQFAQVGMTPEEVVSKIMANPEVAVAFQNPKIQTAIMDCSQNPLNIVKYQNDKEVMDVFMKISQIFPQING

SEQ ID NO: 33864 - protein, 360 aa, Oryza sativa
MTSEIKHGGKLSCSGMDSDGPHTSLIHGLPDEIAILCLARVPRRYHNALRCVSKRWRALLSSEEWHSCRKRNNLDEPWVYVICRSTGIKCYVLAPDPTTRSLKIMQVIEPPCSSREGISIETLDKRLFLLGGCSWLKDANDEVFCYDASSNCWSSVAPMPTARCYFVSAALDKKLYITGGLGLTDKSPNSWDIYDPVTNSWCVHKNPMLTPDIVKFVALDGELVTVHKAAWNRMYFAGIYDPLCRTWRGTENEIALCWSGSTVVMDGTLYMLEQSLGTKLMMWQKETKEWIMLGRLSDKLTRPPCELVGIGRKIYIIGRGLSIVTIDLDTVRADGFLVSSSTGPLVEHDFPPERCRVISI

SEQ ID NO: 33865 - protein, 70 aa, Oryza sativa
MRLLSQVCFLSYFESPICHDLESLQTVVYLSNKMVSSLTERDPLTSRITCLNLVRVVCCVTMLSCCPVCS

SEQ ID NO: 33866 - protein, 213 aa, Oryza sativa
MSPQETKWPANVVKTEAADVFQEPYYHALHLNGAGAAAAASIFHHGGNKARKHHFPFLTADHGGGAAAASPLFGCQPFTITPSSESRSSSSSRHSNGKMFAHDGGLDNCALSLLSDNPTPTAQITIPQPLFAGGGQYGGGGGGDVSLTGLSYVRMAGKDTSILAKSATTTATTATTPTTTSAQLQYHGYYHHHVSADQGSSDAAIQALPFSSW

SEQ ID NO: 33867 - protein, 637 aa, Oryza sativa
MDLNMTNLWFHGKEHIAASPFPQVATSMNFTCLGSSKTIETSKKMFQQSDQSLSIPDDGCRLVLGLGPTPNLHYADNESSGGNRDKESANLFSQHFAIADHGLMLGISRGGTRNFQATTMIEKYSHQNRNGIVFPLTDEGSTSAKRKPGGYVLPLLFAPRSDDICPNGTPPVTDIQHVETVDDCDDDHITSLNQQKVQISPEPSATTDCSFAATSDMIFSSTSTEQRSHQRHPKKCRFNGCSKGARGATGLCISHGGGQRCQKPGCNKGAESRTAYCKSHGGGKRCQELGCTKSAEGKTEFCIAHGGGRRCGTPGCTKAARGRSGFCIKHGGGKRCRVEGCSRSAEGQFGLCISHGGGRRCQYPNCSKGAQGGTMFCKSHGGGKRCIFEGCTKGAEGNTLLCKGHGGGKRCLFEGGGVCPKSVHGGTSFCVAHGGGKRCSVPGCTKSARGRTDCCVRHGGGKRCKVDGCDKSAQGSTDFCKAHGGGKRCAWSTGCERFARGRSGLCAAHGTLMASKQVPESEHSRGMIRNSLFSKMVSASSMTAGASMDHAISSSLPGASSDRGESLEEMRNGKLLIPHQVLVPGSMRPSSSHGKGQENGGSQEQQCFGFVVPEGRVHGGGLMSILGARGNLDDPRD

SEQ ID NO: 33868 - protein, 763 aa, Oryza sativa
MTLTSNQQAPAKNREVVDSEHYTNDRDPVSTHDLVPQSKSASERHKSKHKSRSSHSDGGDLTEKSKKHSKSKNRRGIDRDEHKTSKKTKKEDRHYFNKDWKNEYDLAGNKVRDETKALSAKAKMSKDSCEQDEFSLRKEKASRFDILEKTKRINDDDVAFHEKMKEHRAGIETLDLSGKKKTVKEWEDNRLSSMDHTSKGGDNENLNERLSKIKKSEARPEEVQDANALFSSAGRRQDNELVADNKFVTCKEGPSELWDNQPPRQVLNLAEPTRRDVACLQSSTVATSSSSKVSSSRRNKNSREAKGSPVESVSSSPLKNSNTDKISKARKTGKDGELNADSSILHTPMKYPTHEVGLLHTGQQAVGEAILRGSTNNSGMGRVDNQLYPGDKKILDMHGPTLQPDQQDCFNPRATADSTGHKSKNSAPSRQGRNGSSNLISEGNKQIEMSSRKEKLRPSIDNQDMQKSIGQDNHSHMKEGKSEVHTTRVKPGASKNHTQLRSNVENGDSASPIRRDGNMIAFALKEARDLKHKANHLKEKGLELESMGLYFEAALKFLHVASLWETPNLDNSRSGDVAQSMKMYPETAKLCSFCAHAYERCNKMASAALAYKCVEVAYLKAAYYKHPSASKDRQELQSVVQIAPGESPSSSASDIDNLNSHGLSKALSTKGGNSPQVAGNHLPLAVRNQAHLLRLLAYTNDVNCAFDATRKSQVAIASAASSQERGKTVDDGLASVRTVLDFNFNNVNELLRLVRLSMELINT

SEQ ID NO: 33869 - protein, 93 aa, Oryza sativa
MSPYVRASFQSSLFTMRPTKKRTTTAPSRTASYCIHVRRIAILRLKLFAVEKIPIKRSTSFPSGIGDDFNIARSKLSPGLLMWAGHLQLHLLA

SEQ ID NO: 33870 - protein, 540 aa, Oryza sativa
MKQIINLKFVVLANRISMAAILLLLLVFLVSVALVVRTWSASRRSHEKARYATAELRPYPLVGHLPQFLANRHRILDWMTEVLSRQPTRTFVLRRPGGVRGVITANPANVERFLRSGFDNYPKGERFASLLHDFLGRGIFNADGEAWRSQRKAASYEFNTRSLRAFVARCVHGELHGRLLPLLRRAAAEGRAIDLQDALERFAFDNICRVAFDHDPGQLPDASGGGALAEADDGSTASGRFADAFRDAANLSAGRFRYAVPWFWRVKKALHIGSERRLRESIAIVHDFADRIIRSRREEIRAGLEKHDLLSRFMASHDESYTEVALRDVVISFLLAGRETTSSALTWFFWLLSSRPDVERRIREEVATVRARRGDGDVDRVGFDLDELREMQYVHAAITESMRLYPPVPVDSLHAQEDDVLPDGTAVEAGWFVAYNSYAMGRMESVWGKDAAEFRAERWLEDAAAATFRPESPFRYVSFHGGPRVCLGKEMAYIQMKSIIACVLQELELAVDGAYRPRQVTSLTLRMADGLPTRVKVRGN

SEQ ID NO: 33871 - protein, 256 aa, Oryza sativa
MIIKTLKARILCALKSSLPAAASPPPSPTKPGRAAAAVVVVAGDAFSDDASFFDAHETPTKNGAEPIDDWELVDEEGRVGVAAAAAEEEEEQLREFPARCPPGGEGAVVLYTTTLRGIRKTFEDCNGVRALLENLDVAFQERDVSMDRGLRDELWSVAGEKAVPPRLFVRGRDVGGAAQVLALHEDGRLLALLSPGSNKNRSAAAAAAKCDACGGLRFVVCGECDGSRKVFGGERGRGVRCRGCNENGLVMCALCL

SEQ ID NO: 33872 - protein, 348 aa, Oryza sativa
MEHIHSTHGLPQAIVSDRDRVFTSSLWKELFRRAGTQLRMSSSYHPQSDGQTERVNQCVEMFLRCFVHSCPSRWKHWLALAQCWHNTSFHSALGMTPFEVLFGHKPRYFGLSTSSVDAPGDLASWLSERNDMNTLIHHHLLRAQQRMKSQADSKRSERCFAVGDWVFMKLQPYIQQSVMTRSNRKLSFKYYGPFQVLQRIGLVAYRLQLPAHSLIHPVVHVSQLKKALAPSEAVQPSLPVLNPDAGHLAIPIKILDHRSIRRGSKMIKQVLIRWSGVSSSADTWESLDEMQAKFPAAPAWGQAETQGGRNVTASIQSTTHNSSIIGPRRSKREVHTNPKYMGCDWSNS

SEQ ID NO: 33873 - protein, 446 aa, Oryza sativa
MDAPAMLTTKHVPEDVGLRNVAAAEEEGGQGQMYRGEEKQHKPVLKKMKEKVKKIKNTIAGGGGGGHGGNNGGERASGSSSSSEEGEDDVAAQRMGDVDQRGYQEDVEEDKPVAMESDPEVHGAPMYDSARIPSVQEVEGDGGAPRVRLGDLGGPVVEDPAAPRSTTRVPREGEDIGTTPVVCAFESMSVSDDPKHVGAAGKPDADVQNDPMPVSDAATAGEEWKDATPDSAAAGATPGATYTDKIKSAAAGTTEYGKKLATTVYEKVAGVGTAVAGKVRQVTQSAGTATPGVAGGAAGSQSQDDVDASTTLASGEPATGGQQQQDKGVTVTGYIADKLRPGDEDRALSEAISGAVQRRKDDVAQRVPAVAPAAPGDTIAKVREAPAQVLAKARDAVTSLTGGTHVSDTVQPTTTTEADGAEVESAPVIRGEEIGETQRQPNVSMT

SEQ ID NO: 33874 - protein, 427 aa, Oryza sativa
MDHSTSLLRLIFLAVGVPARAGRPEVEAVQAAATVARVRRAAAPARPTHGEGGEPRPRAPPRAPAVCVGAVVPVRALAGARRAGKVRRQELAEGRRPAPASPRRGRRPVPRRVPRPRRRPQRGRRRGDSSACPCLRLPDDEHGRADQPLLRAVQGRGVQRQPPPPWRQGLRRRLPAHLPRLVRPSGGEPATHQEPVLLHRGHGQLLHAPHRGPHRAGRHGHGGGPPRLRPRRRHPHPRRREHRLPARTLGADSGGGASAGAARVPDRPRAVDGAAGGRAGVRAGRRAHGAVGRVGVPPEARRARRHGGVAGAGAGPGDRRAPRRDVQGHGVGAVRAVHGPDGGVVLQDVHGRRRVRLRAAGHAARPAQRLPAPRPLPRRRLRRRRRPPLRAREHDLRLRALRRRHRVATLREPHHRHGQVDGFDRDW

SEQ ID NO: 33875 - protein, 419 aa, Oryza sativa
MFAEGEGGDGDGRLELLPFSDGTENGFVKRGDAAELGAYMASFHASGRRSVGEMVDALAARGRPVSSVVYTLLLPWAADVARDRGVPSALYWIQPVAVLAIYCHYFHGLGGVVDEHRRDHSFVLEFPGLPPMAAGDLPSFLTEATDPSDYFHSIFTTFRDLFDALDRETPKATVLVNVFQELEADTLAAVGAYDVLPIGPVLPSGDDAALFKQNDAKYMEWLDTKPAGSVVYVAFGSLTVMAKGQVDELLHGLEESGRPYLCVVRKDNKAAVAETGDATAAAAARRNGVVVEWCDQVRVLSHAAVGCFVTHCGWNSVLESIASGVPMVGVPRMSDQQMNARLVERDWRVGVRAEVDGGGGVLRAAELRRRVEEVMGDGEAAEVRRSAAAWKRAVAEALGKGGSSDRNLTAFVEGARSVI

SEQ ID NO: 33876 - protein, 379 aa, Oryza sativa
MGVLRSTQSMEAEVEEMRAALALAPLGRHGAWRSGAAAKREAGAEEGAAPEARTVCVTGGISFVGLAVVDRLLRHGYAVRLVLETQEDLDKLREMEMFGENGRDGVWTVMANVMDPESLNQAFNGCVGVFHASSLIDPGGISGYTKHMAILEARAAEQVVEACVRTESVRKCVFTSSLLACVWRQSYPHHRRRFPAIIDESCWSDESFCRDNKLWFALGKTMAEKAAWRAARGRDLKLVTICPALVTGPGFRRRNSTPSIAYLKGAHAMLAEGLLATADVERVAEAHVRVYEAMSGGGAAGGRYICYDHVVRRGEEFAELQRQLGLPITGVAAASRPGYSDDGDVGGDGRFALCNGKLARLVSSRRRCTYDVYYPASYD

SEQ ID NO: 33877 - protein, 535 aa, Oryza sativa
MDALRQFDLGQPPDHPSLQSLLADMGISTAASCRAEIDYLEEQILSQEEDTDLPLVGSVLALLRYCLFAVFDPSNAKALRDWPLSGNRQRLLSIGGGDDTSFSVPKEFSCPISLDLMRDPVVASTGQTYDRPSIIQWIEEGHSTCPNSGQTLADHRLVPNRALRSLISQWCGVYGLQYDSPESNEGMAECVAASCSSRAAMEANKATARILVRMLEDGSENVKAVAAKEIRLLAKTGKQNRAFIADLGAIPLLCRLLLSNDWMAQENAVTALLNLSIFEPNKGRIMEQEGCLRLIVGVLQNGWTTEAKENAAATLFSLSVVHNFKKLIMNEPGAVEELASMLTKGTSRGKKDAVMALFNLSTHPESSARMLESCAVVALIQSLRNDTVSEEAAGALALLMKQPSIVHLVGSSETVITSLVGLMRRGTPKGKENAVSALYEICRRGGSALVQRVAKIPGLNTVIQTITLNGTKRAKKKASLIVKMCQRSQMPSAMALGSTLTVVDRSLVGNNTLRRAASFGSGELSNPISISVQVP

SEQ ID NO: 33878 - protein, 746 aa, Oryza sativa
MAVLLNPSSSSSSKATPRPPQQQQLLLLLLHLLLVAVPATSLTFSYDADSSVSEDFRQEDDAMVTAGRIELLGEEFAARARGRALYKRPVQLWDGATGEEASFAASFNFTIRSVAGRGNALAGHGMTFFLAPFMPDMPQECYEGCLGLFDQSLTRNTASATMGNASGAASFVAVEFDTHMDGWDPSGRHVGVDINNVDSRRGNYVVLPEDSLVDAGVMSATVSYDSGARRLDVALAIGGGAATATYNLSAAVHLRSVLPEQVAVGFSAATGDQFASNHTVLSFTFSSTLPTRTTNPPPPSTSSAKTAHLSAAVAAAGIALLLLVLAITILIRRARKRRRRDDGVSYDDSLDDDDEEDMESGTGPRRIPYAQLAAATGGFAEIGKLGEGGSGSVYGGHVRELGRDVAIKVFTRGASMEGRKEYRSEVTVISRLRHRNLVQLMGWCHGRRRLLLVYELVRNGSLDGHLYSNKETLTWPLRYQIINGLASAVLYLHQEWDQCVVHGDIKPSNIMLDESFNAKLGDFGLARLIDHGMSLQTMTAVAGTPGYLDPECVITGKASTESDMYSFGIVLLEVASGRRPMVVTPRAAAATAGGGKDDDDGGGQVFRLVEWAWELYGRGDDDQSSLDAIADTRLGGAFDRWEMERVVGVGLWCAHPDPKARPAIRQAAEALQSRKFRMPVLPPRMPVAVYLQPFAASTMKYYGDSMTSVGSEVVGYSSTSLATATLSSSSSLPSAMANNDSLSPRE

SEQ ID NO: 33879 - protein, 624 aa, Oryza sativa
MVFDAGTGSSGGGSPAAPSPPPPWQNPLRVILTAAFARQVAVGRWFTVFASLLILTASGATYIFGIYSPALKASLGYDQHTLNTVSFFKDLGANLGVLSGLINEVTPPWVVLAIGAAMNLSGYLMVYLAVAGRTAAPPVWLVCLYVFVGANSQSFANTGALVTCVKNFPESRGVVLGILKGFVGLSGAVYTQLYLAFYGDDAKSLILLIAWLPAAVSVVFVHTVRIMPYPRRRGGQETSVDPFFCFLYISIGLAAYLLVMIVVQRQFAFSRTAYSCAAAALLIVLFLPLCVVIKQEFKIHRERLELAAAAPPPHTITVLEMSKETERSPRPSSPAPAETSWVKGMFRPPARGEDYTILQALVSVDMAVLFVATICGVGGTLTAIDNMGQIGQSLGYPARSTNTFVSLISIWNYAGRVAAGFASEAFVERWRLPRPLVLTGILLLACAGHLLIALGVPRALYAASVVIGFCFGAQWPLVFAIISEVFGLKYYSTLYNFGGMASPVGSYILNVLVAGRLYDAEAGRQPGAGLAAGAGRDKVCLGVDCFKKSFLIITAATVFGALVSLVLVWRTWRFYKGDIYARFRDGDGAVAGEGGDGRLPVDQRRRPPPPEEEEESTAVNGGKE

SEQ ID NO: 33880 - protein, 227 aa, Oryza sativa
MYISSPHTSHFTSIDRSPAVVSESDRSMEEAAAAADMNGGVHQSRFRRVCVFCGSSSGKRRSYRDAAVELGKELVARKVDLVYGGGSLGLMGEVAEAVRNGGGHVIGVIPTTLMGKEVTGETVGEVREVGSMHERKAEMARRSDAFVALPGGYGTLEEVVEVIAWAQLGIHAKPVGLLNVDGYYDFLLAFVDKAVADGFIPPSHRHLFVSAPDAPSLVHKLEEYVPV

SEQ ID NO: 33881 - protein, 287 aa, Oryza sativa
MAAAAAAAAAAALPAGSQDHMNALRSTALRRSTLHWDAAAAFFAPPFRSRSCRRRRVPAPAAAAETRPTRSPSRARARARAKLLADADTRDPWLASLSLLPVDDGEAAAAAAAASTGWAIGVDPDTGGAIAVLSPDGSSQVFDNPFVHIVVSEFIRKRLDTKSIIELLRGLDAPPGTTAYIEKSSPFPTDGKLGWWSTGFSYGLWIAALVASGFSVVPVASQTWKAYFGLTRSGSPKDYSRQAASILFPDKALSLNRKKHHGRAEALLLAAYGKGLVLPSGEFSKTL

SEQ ID NO: 33882 - protein, 46 aa, Oryza sativa
MAGLPRVSGVKLGGEGVRCDCERRGKERREREREGVGIKAGEKRKK

SEQ ID NO: 33883 - protein, 147 aa, Oryza sativa
MAAAAASLLHLATSACSPPRVRLVGPTTGRRSPLRAAPAPPPPRAYKVTIEHGGESRVVEVEEGETILSRALDEGIDVPHDCKLGVCMTCPARLVAGEVDQSDGMLSDDVVAQGYALLCASYPRSDCTIRVIPEDELLKVQLATADD

SEQ ID NO: 33884 - protein, 144 aa, Oryza sativa
MALAVKLAVLLLLAAAAAGGSSTTTVPPLEERLGAAFDGMAAAAEGGGGGGWMMECWSAVTKLGSCTNEIVLFFVNGESYLGPDCCVAIRTVTRRCWPAMLASIGFTAQEADILRGFCDAELAAPPPPSTNASSAAPAPAPASA

SEQ ID NO: 33885 - protein, 124 aa, Oryza sativa
MESEVVKTEMVLAATFPFKKVQIADKYPKGQSRGRQWKHLRLLLQAADATSLPPDRPNYLNIQSPPSIYPPKRYCDITGFEAPYVDPRTKLRYADPEVFKQIRMLPDEYVQRYLALRNAAVVLR

SEQ ID NO: 33886 - protein, 111 aa, Oryza sativa
MGRWASPKTRGVGGKPYRNDSSQKDATRIKAGIPSDDEGDVDREDVPFSEKEEAAMNRIHARAMAKKAAASAAIAPAPAVVPAAIAPVPADVPAAIAPVPTDAPDAIAPGP

SEQ ID NO: 33887 - protein, 21 aa, Oryza sativa
MRNAMVIVVGGHRLNIGSSTN

SEQ ID NO: 33888 - protein, 335 aa, Oryza sativa
MHCYISLSSICRSTKQYTMATRANGSSCSLASLMAAIFFLLVVSSRGAHGGRIAIYWGQNGNEGTLADTCATGNYAFVNLAFLCSFGSGQAPQLNLAGHCDAYSGACANLTADIARCQSMGVKVLLSIGGGAGGYSLASKQDVSHLARYLWESFLGGRPSAPGGRRPLGDAVLDGVDFDIEGGGGDPRYYGDLAAYLKAYSGKGAAGKEVLLSAAPQCPFPDQWVGKALDTGLFDYVWVQFYNNPPCQYAAGSGGGAANLLDAWRQWTSGVEARYIFLGLPASPGAAGSGFIPVGSLESQVLPALKASSKYGGVMLWSRYYDDQDGYSSAIKNAV

SEQ ID NO: 33889 - protein, 290 aa, Oryza sativa
MAASRYEVEVTVASARDLKNVNWRNGDLKPYAVVWIDDGAKCSTRVDLDNADNPTWDDKLTVPLPPSTRLDDAVLYLDVVHANATDGVKPLVGSARLPLRDVLADTGIGARASRSLRLKRPSGRPHGRLEVRVAVREPKRYYDPSPAYPAPYHQQSSRDPYAYGNTTTGGYGYAYGGAPPAPYSAAPPAGYPSAYGGAAPTQPAYGSAAPPQPAAVSYGAPPVDAKKKSKMGMGGGLAVGAAAGVLGGLALAGGASYLENKFEDRVAERVEEDRYGGGGGGYDDYGDDDY

SEQ ID NO: 33890 - protein, 119 aa, Oryza sativa; identical to SEQ ID NO: 33700

SEQ ID NO: 33891 - protein, 169 aa, Oryza sativa
MRARVLSPLRTIWNASPGPGDATVATTVTPSPATVTNRLSNTLRSNVSSSILHSLKVSHPEALVRFATRMVPPPCSAHRRSLFGMSSKREGRIQPSVTSQPPRFTARMGGDGAPRFAGRTVLPSETEKRHGEQRRRKRRSSKWRMMKTKIFQLLMTILAQLANVYIYTT

SEQ ID NO: 33892 - protein, 105 aa, Oryza sativa
MYERLPPLEQEEDGDDDSAAVRRRRRSLKMAVWALSTALSAAFAWRVAAVMPAPAMKAAVWGMTSTVAVAGFYLLFVHRPAAISSYSELDTCKHEQASSKLDQIL

SEQ ID NO: 33893 - protein, 122 aa, Oryza sativa
MSWTTGLCDCAADTSVCCEAVLCAGCLIGRQCAALDNQVDTLNCMMCIGYFFAPVCCVCQVRRGVVAKYGIDESCCASALYSWLCPTCSSCQTHRELTARGVWPGGTCCHKQPGNFMNAPIR

SEQ ID NO: 33894 - protein, 43 aa, Oryza sativa
MTILSKYVRAEASLLDTHSTPPIPAAGLVRRHHKSKTARIDRA

SEQ ID NO: 33895 - protein, 95 aa, Oryza sativa
MLSSLLGPSLHPAPPSGRGRRCCRCSVRGAPDLSAGRRGGGGVVAAACRRWEERRGRGLGGRRRVPPRRPSAGAALAAALCRRVSKQEFGNNKRG

SEQ ID NO: 33896 - protein, 107 aa, Oryza sativa
MVLIGLGYLIGYPISSASVGALQGLLTNNLVALKGSCPNCGEQVFAFVKTDNSIKAPHRAECHVCSCPLEYRTKVEKSLSGTRRTWVYGRVYLVKQGHPRKRKWLKD

SEQ ID NO: 33897 - protein, 128 aa, Oryza sativa
MVDVKHTAGHAGARRVKLFRVPRRPARAAEEAGAPLVPAGERRKRKMAVARLGGGAGGRRRLFGAFRRLRVRWLAALYRRSLRRLRAYYAKAVQDLLEGAAAMSTLRSQAAADCSFGTAFAPVVAVGY

SEQ ID NO: 33898 - protein, 239 aa, Oryza sativa
MAEHFSHAGMYIGYTADAAASSSSSSSSSSSSSSEMLRFDTGWPDETPAPSSVAGRRRSAGGDHRQGRGQTEAAAAFIGVRRRPWGRFAAEIRDSTRNGARVWIGTFDSAEAAAMAYDQAALSARGAAAALNFPVERVRESLHALSLGAAGGSPVLALKRRHSKRKRRKKAELLAAAAATAATANATPQTRRISKSTELTTATTDEQKRFVVELEDLGAEYLEELLWLSEINGGSDPAD

SEQ ID NO: 33899 - protein, 9 aa, Oryza sativa
MISVTWPKL

SEQ ID NO: 33900 - protein, 75 aa, Oryza sativa
MSPKVIAICLVALLLPISISHGGRIGPIEPSKASSKVVERGNYDGRVEGCEEDDCLVERLLVAHLDYIYTQGKHN

SEQ ID NO: 33901 - protein, 139 aa, Oryza sativa
MAGGGRMPLLGWWLMLVGSLRLASVWFGFFNIWALRVAVFSQTDMTEIHGRTFGVWTLLTCTLCFLCAFNLENRPLYLATFLSFIYALGHFLTEYLIYHTMAVANLSTVGFFAGTSIVWMLLQWNSHGKSRGSQSVKQS

SEQ ID NO: 33902 - protein, 26 aa, Oryza sativa
MVASSVRKVSLFLFLFKPSASLKNLD

SEQ ID NO: 33903 - protein, 223 aa, Oryza sativa
MDALVCTNAFATAIAAGRFPLPRGRSPPYAAAAVPALRSRRCLPTRGLLRLRCARGVDWTDPSFVAVAEKPDAGAEAWKALASAGGGGIEEEEDGPFEAINGDGGYSVEESVVLPPFEQSLVAAVADSVEDDALSQALSSKLDFKETSTFVMYGSGAFIAGWILSAVVSAIDSIPLFPKILQIVGLGYTIWFSTRYLLFKENRDELFVKVDDLKRKITGYGDE

SEQ ID NO: 33904 - protein, 183 aa, Oryza sativa
MAKDQNGSAAGEGEAAAAVAARSRSKSIEADEEERSKGRRDRDRDRRGKSKRREEEEEEEEEEGDAGSESSGEDSGERRKRRRKEKERRHRRRRSRSASSGSSSESESESESSYSDCSAGSESETDSEEERRRRRRRRRRKEREEEERRRRRKDKERRKRKEKERERERKKKEKKKNSFFNEY

SEQ ID NO: 33905 - protein, 97 aa, Oryza sativa
MASGGGKAKASSWAAAMSVGTVEALKDQAGLCRWNYAFRTLQQRGRQQAVAGTSGAKSGGGARALQPAAAAAARRKAQQQEEELRTVMYLSNWGPNN

SEQ ID NO: 33906 - protein, 35 aa, Oryza sativa
MNHTISGTHQIGIQRRKLNTGPIKHASSIPLHKKL

SEQ ID NO: 33907 - protein, 147 aa, Oryza sativa
MEVEMMEDDVFFAELSKRISLLITDDDEAADFGAARFPASAAAPIPGFSLAHVPMGASMVAPPAYTLYHHAASYNNGGGMIGAGDNAAVRAWQQQQQQLCGSKGTGVFIPRSSPGSVHPKKKGKSKGNVHKAVRGQAAPAKKQSSQK

SEQ ID NO: 33908 - protein, 148 aa, Oryza sativa
MAEFLFEDIFTVTRLDPDGKKFDRVSRIEARSDQFDMYMQLDVATDVYPMHPGDRFTMVLVPTLNLDGTPDSAFFTQAGRKTLADKYEYVMHGKLYKISEDKDTSDQNAKKVEMYASFGGLLVMLKGDPSSAANFELDQRLFLLMRKV

SEQ ID NO: 33909 - protein, 24 aa, Oryza sativa
MDFGVRARIQSPYRSAAHFVAGER

SEQ ID NO: 33910 - protein, 170 aa, Oryza sativa
MRVRYHGPRTVKSLAAFYRDVSGFDVSMTSEAVLHSVDGIELKKDAEQENCPFWWARSPEKILQQDTYLALATAFVILRLLYLLFPKIGSFAKRAWRRHTLFPNLVGVHEYFFTYLEQARHKFFRLYPSKRGNLQEGARNATAWASKSLASVSIGEPSTIGRTNSTNELR

SEQ ID NO: 33911 - protein, 58 aa, Oryza sativa
MRCHFLLEHVQVGPFESTAWLPEKWQRHRLILLDGLTISNLEAFDTESKHLVFKRFIF

SEQ ID NO: 33912 - protein, 188 aa, Oryza sativa
MRRAASFVPDLYAIDADYALSELCKDEQKLEKVLLSREFHVSLGRTVAIQVHQIESLVAMLRQKFRSQQRYWMDFNKWEHFVNDDCTRSFLSLEVTSTGLPEISKQITMVDDVYRLHGLPEFYKNPRPHISLAWALGDVSCKLKQAIKEIEKSQSSLGTSQISNLRCKFSHVVCKIGKKVYDICKLAD

SEQ ID NO: 33913 - protein, 74 aa, Oryza sativa
MKWAAAAAATASAAATAVASAATAAATERCVTPCSNPTGSPASRGNGRRSAAEDRFAPRFDGLRFIETLVTAHR

SEQ ID NO: 33914 - protein, 175 aa, Oryza sativa
MASRLLHLRRLLPSARPSAGGGGGGGGAVAAFSTVTPTPRVSALVDEICGLTLIEASSLTDALRGRLGVDQLPPLAILTGGAAPLAGGGAATGAAGEEAKAKEEKMAFDVKLEGFDAAAKLKIIKELRAFTNLGLKEAKELVEKAPAVLKAGVPKEEAESIAEKMRAIGAKIVLE

SEQ ID NO: 33915 - protein, 171 aa, Oryza sativa
MERKPDEPEKAASGAGAGDPPPPPFLEVKCRSSGEVRRFAFGTTARYALHAVNRKLAPGAPAALHVEAVKDGEEPVSFGPAAPLADYGDGWKLQTITEQDAPGYYQTPASDTRRDDTKQSAKNPRDQETMAAYITKIVLAFVFIFLLGGLFTYLLETLPDMFQPASEPQPL

SEQ ID NO: 33916 - protein, 54 aa, Oryza sativa
MAGAAAAGWALPGIPLLWWLASSSYPHPGGWDLELLVVGRMVEIDGTQVMARSI

SEQ ID NO: 33917 - protein, 77 aa, Oryza sativa
MALDNGQELRLLQALRRQVQVWLHLRCHLQKGEFKGDDGDVAFKVNPIPSFCPVHDLFSFAEVLSQFSCLFSSLGFN

SEQ ID NO: 33918 - protein, 174 aa, Oryza sativa
MQSKSLAPQRGSRELDVCVEDETMGYLNRKDVQEAMHARLEGGVPKWTVCSSVLEYKQLDLQIPTINIVGGLVKSGVPVLVYSGDQDSVIPLTGSRTVVQRLAGWLRLGTTAAGYRVWFEGRQVGGWTQSFGGGALSFATVRGASHEAPFSQPERSLVLFAAFLAGRPLPDSFQ

SEQ ID NO: 33919 - protein, 41 aa, Oryza sativa
MQQPHVLHCSSTSVVATPVTECGDTSFAILHVATHANSVLF

SEQ ID NO: 33920 - protein, 9 aa, Oryza sativa
MVSEQWSEP

SEQ ID NO: 33921 - protein, 59 aa, Oryza sativa
MQCETLTQLDQVWGVCLFLLQGSYLEAIINEDPTKGQNMRWLETWVCLVSIQPFKALRV

SEQ ID NO: 33922 - protein, 181 aa, Oryza sativa
MEILVSALLLLLVPPLSALLAVAAPSLAWPSGSSSVRKLIAKKVAPEQAARDELLRVARYSSASAAAAASAVQQPGGSESSRPAAAAADDGGRPDQCAVCLSGIEEGDEVRELRCRHLFHRGCLDRWWLSARPPATCPLCRCRLLQSPSAAADDGDGDGEEDSDSDMVMFMAYLRSSSTWL

SEQ ID NO: 33923 - protein, 85 aa, Oryza sativa
MAARVAVVLLLLFGLAAVAVTAARIMPDDDCGDTANAAGAAGVGEAKTAFGGSDGRGGLFGAGGGPFGGFGGGVGLGGGGGGFRP

SEQ ID NO: 33924 - protein, 40 aa, Oryza sativa
MSMLQSLKVRTSVVYNFTAYTNTTKEVCCCHSETWWLVFI

SEQ ID NO: 33925 - protein, 109 aa, Oryza sativa
MPRVRVPVRRSGYRYTARPGRRYPVAPPPARGGAGLLGGLAGLLLCLLCLATLGLLGLFATFIAVTAYLGDVYRAIRDAGGAASGLYVNMAILVAALCFAAFHKLQRSL

SEQ ID NO: 33926 - protein, 146 aa, Oryza sativa
MASSTSGRRGELRRWCWRPWLCCSRRHRHWRRRAIRACSASGTRLQTPATSLSSTATTPAGPRCGHPTARPSSTAPPAAPPTAASSSTSLLTRWGCHSCGRTGAGGPRGTSPTGPTSRWAAPRRSARISTGREACTCATPCTSTWR

SEQ ID NO: 33927 - protein, 28 aa, Oryza sativa
MHRLLRLEQQLLHEKCLRFFVCCCCVIW

SEQ ID NO: 33928 - protein, 37 aa, Oryza sativa
MTLRHSQLTHSSGRRPWSKVALLTVSENIPPSSAIAV

SEQ ID NO: 33929 - protein, 198 aa, Oryza sativa
MDTGSGGGGGGGGGGGGTSIHITALDGIVNVNSLFTLAAFIGLAWRPSADGPELAGGADRLGSACAAGDRVESDLVLFHVLAFACFLFSSIVALCLKQIVRTHPHYRLRSGGGGSAVSRTAMINRVALRVGILASAVGSVCGCGFLMMALVNVVQVKLGRLGCGAGGAAAWGAVVPLVSLVPTAMLIYIGIVFYAFTR

SEQ ID NO: 33930 - protein, 23 aa, Oryza sativa
MHLGMLWVLIWVSICDLDRADSN

SEQ ID NO: 33931 - protein, 146 aa, Oryza sativa
MSLRGGGESAGSDSPCRREEAKSRTPRPQPGSAGERSAAASAEMSSRGGSKSCGGDSLQPGEAGEHGVAPSAAAVETSSEVAKVRGQAATPYSAAPFDESMLVQHSTGKAMGNREADVAAVGLGPKNSGLKICPARSLVSNLFLFL

SEQ ID NO: 33932 - protein, 251 aa, Oryza sativa
MHRQRRSISSPGGNLSPPLLVVAAAVFVVAGLSAAVPGAAAYKNYTVGDDKGWYDGLTHPGVDYQEWADGKNFSLGDFLIFNTDKNHSVVQTRNETLYKSCDYNDSGPDDTVEWSAAAPEFSKDAVTVAVPLLKEGSSYFFSGNYDGEQCESGQRFAIAVAHGQGLPPDLRPPAAEAPGPSSSAGAAADAPPTFDFSHPKNVSNSPADTSTTAPLDDADDAPTTGGAGRSIARLGSGLAAAATLLFFVVQV

SEQ ID NO: 33933 - protein, 122 aa, Oryza sativa
MPPASSAPIASAAVSSAGEPSMVKERLRVLGHLVPGCRKLPAPMLLGPTMWPRWRCSQGHVLIDLLAATAGDACDRGRRVNGQRAAHDVGDRAVPPQRRRWGGATMRLRWRSIPSSIRIMRS

SEQ ID NO: 33934 - protein, 295 aa, Oryza sativa
MTDFRRTLNTFGDAFPVSDDANHGGFNFDNCRRNELIMAAGGGKGPAIKAMKTGTTIVGVLYKDGVVLGADTRSTGGSTVMDKNCEKIHYIAPNIYCCGAGTAVDTENTTALISSQLELHRLNTDTESRVSTAMTLLKRMLFQYQGHVSAALVLGGVDCTGPHLYTVYPHGSTDKLPFVTMGSGSLAAMSVFENGYKDGLTEAEAKRLVQDAILAGVWNDLGSGSNVDITIIKRVNGVVEVVQDINSITPNNVADLRSQIKRDIVTSIPRGATRVLSSTFEPFPIVVEEATPMEL

SEQ ID NO: 33935 - protein, 159 aa, Oryza sativa
MEGNSWLSSKEKSDLKKQHGEAQEAAEKDKGKVVVTFDLVGRKVILNKDGATVLESEHRILGPPEEKDQIHRIQANPTIREQPVFIETGPVKPKTDRARQSKRLTKNGLCLEVTGRLQHDDKDPQSFLGGKMKKGDHLAYSSFGQPREGDDFDCSQDFD

SEQ ID NO: 33936 - protein, 6 aa, Oryza sativa
MIFLFC

SEQ ID NO: 33937 - protein, 114 aa, Oryza sativa
MDWMPPPKPTSPRSPPLLWDWADAAVPGSSSGEVSAAAAAAAAHPGRRRKEKRGRAEEGGGGGGEVRCQVEGCGVELVGVKDYHRKHRVCEAHSKFPRVVVAGQERRFCQQCSR

SEQ ID NO: 33938 - protein, 41 aa, Oryza sativa
MKPLVVLQQDVGSCYMKLSPLGLRQIGELALVSKLEPLYFI

SEQ ID NO: 33939 - protein, 74 aa, Oryza sativa
MSCSCGSSCSCGSNCSCGKKYPDLEEKSSSTKATVVLGVAPEKKAQQFEAAAESGETAHGCSCGSSCRCNPCNC

SEQ ID NO: 33940 - protein, 141 aa, Oryza sativa
MGGGKNKVQVCAVFVVALNMVISMQMGAVQACEPYCPTPTPPVTPPPSPPSGGGNKCPIDALKLGVCANVLNLLKLKVGVPASEECCPLLGGLVDLDAAVCLCTAIKANVLGININVPVDLVLLLNYCHKTCPSDFSCPLI

SEQ ID NO: 33941 - protein, 40 aa, Oryza sativa
MHSLLSCVVLFQLRCTLLLLPPRHVLLMSKHGGSSIMHAW

SEQ ID NO: 33942 - protein, 88 aa, Oryza sativa
MAGCDEAKSLASMEEEACIEKKYGGIAPKKPLISKDHERAYFDSADWVLGKQAANSNGSKAAVETLKPKLKRTPHHQLPPRKPTCASS

SEQ ID NO: 33943 - protein, 178 aa, Oryza sativa
MAKAALQLLLLLCVAAVAWAMDDGGGGGAGMTKIKVYWHDVVAGPNPTAIRVAQAASTNASSTYFGAVVAIDDPLTSSPAAAAAGEVVGRAQGTYTFADQRVIGLLMDMNFVFTAGDHNGSSLAIMGRNEVMSPVREMSVVGGSGKFRMARGYAEARTVDSGFKSGETIVEYTLFVKA

SEQ ID NO: 33944 - protein, 184 aa, Oryza sativa
MKIWVLCNIPYLVKKYHFSLQSNTDIFYTKFSMGTFFLPERKYVVGNYRLQFYTRMCMYETLRSQNDFTHYICLSVCVCSHKGRIVEEISKPRGRSRSPSPKRRYRADYRDRGYRDDYRDRHYRDDYQDREYRRSRSIERYERERYQEKGYRRRSRSISPDYDRRHRKNGPRDERSPRSRSPLT

SEQ ID NO: 33945 - protein, 64 aa, Oryza sativa
MAGFGSLAPKTKNIVVAGGLSAFVLGVYYYTMRAVGGTDELQVAIDKFEGMKKKDAGNSSAAGS

SEQ ID NO: 33946 - protein, 167 aa, Oryza sativa
MHLRFVPFPAIAVGGASLRFLADNTRAVGGSGRRRCSDVVAFSSSEKGPGPGSGEEREPRAEEALRRLAELDSQLEGLSEPRERPPAPPLPPDPYMDRDMITGRGSKDELPEFSPTYVTFSTLALVILTIFTNVVFNLYIKPSVDGVDQPVRIERVPMVNPADQQFK

SEQ ID NO: 33947 - protein, 190 aa, Oryza sativa
MYSCDHECTAPTHTAFGAKYQPCIGVSGRPDHHAVGRLQQPAGKAAAAAVVSAAAQPQRAAKKRHAAAPPPRPSASTSRRSSTTVVATDVSSFRSMVQELTGFPAAAIFRPLPRRIPVHAVNPSPAVRGYGGGALQGHGSDTATAAGSSSSSNPGVSTVQLMQCSPPGVFDGLPDLGSPEFDSWLDLSDE

SEQ ID NO: 33948 - protein, 32 aa, Oryza sativa
MSRCFPYPPPGYVRNPVVAVAAAEAQATTKVC

SEQ ID NO: 33949 - protein, 137 aa, Oryza sativa
MTTSGSVSSSPAERGGVQIRAAAAARPGGEESRRRRSEEGRVGSARPRGRRHRRSRYLATRAAVPPSRSSPSGPDKERRGRAVRRRAPPWSRVRESLIVVHMLRSALPTSVSPGSSLPCRFGMRRRHCPRRRSSLAR

SEQ ID NO: 33950 - protein, 164 aa, Oryza sativa
MSSAGLDDAQSSMLFTGWHLPDCPLDPILFNKVLELREQSSYQRLLFDCVNVALVEIGENTLLSTFPWSKAHSRTWMDASSPALGIEVWSILKDWIYGARMFVVSRRDNAGIMIERVVKQEVEGTGWVKTMRTQLVDITEQIEGGVWEELVGEAVLDFVPACQR

SEQ ID NO: 33951 - protein, 89 aa, Oryza sativa
MFSLIKNESWGHPPAAQTPQLHHWPLFPPQIAFLALYRAQTTHQSAMPFPPSQREGELATHERSRPLSCAPVAAASASLWNSPVAQRAT

SEQ ID NO: 33952 - protein, 32 aa, Oryza sativa
MHKTSNMRLLIVTLWPYNKVELIRLLDCNKGC

SEQ ID NO: 33953 - protein, 94 aa, Oryza sativa
MAGINRKGGAAAAYAVALLLAAGAADAAGCNPSALSPCMSAIMLGAAPSPGCCVQLRAQQPCLCQYARDPSYRSYVTSPSAQRAVKACNVKANC

SEQ ID NO: 33954 - protein, 30 aa, Oryza sativa
MCRESEKDIWEEMVGAFQTMARSQGGSEVA

SEQ ID NO: 33955 - protein, 154 aa, Oryza sativa
MALVTVHARLAAAASSASPPLRSAASCTRLRALSTVTGTRLSIRHQQRRRWRRPRRAAAIAASLDLNEDNVRLAIDEAKAELGQLFDTSVGITGQVDLAELDGPFVKLRLKGKFWHTRATVLARIGNYLKNRIPEILEVEIEDEKQLDDSPAAF

SEQ ID NO: 33956 - protein, 49 aa, Oryza sativa
MKRAGRNRAAKTRLSNASCPRFSTPPHLDSIEERVTKFGHMRSRFVGQH

SEQ ID NO: 33957 - protein, 151 aa, Oryza sativa
MVVASAASPCESSALFATFDHDGDGRISAAELRLCMKTTLGEEVSDEEAGQLVASVDADGDGLLCEAEFVRLVQAAEVEEEDERRGTGLREAFGMYEMEGEGCITPTSLRRMLRRLGSDQDIDDCRAMICRFDLNGDGVLSFDEFKIMMNA

SEQ ID NO: 33958 - protein, 133 aa, Oryza sativa
MGKEASAMVARRSTSRRDWRRWWWWLLPLACCFVCWVASSAATVAPAAGVAVTSLPGFDGPLPFSLETGDTRYGSQKHQYVNTASIYIYRTRLDRNRSRDSSIARRAPLPEKATARPYQKRKACNARLSLRMV

SEQ ID NO: 33959 - protein, 130 aa, Oryza sativa
MASKNSMSSSLLFLMALLLSWSSISSAARYLEEEAAPKEEYPELPKPELPPHLAVPELPKPELPHGAAVPEFPKVPELPHPEVPELPKPELPEHPAVPELPKPELPSLPKVELPPLPKPEFHFPEPEAKP

SEQ ID NO: 33960 - protein, 87 aa, Oryza sativa
MTDPGSQFSSLVQGYRMYYGGGDLPTIRPNKRRLASILLKNATMEWNEFETRVRKLIQQTKQVHERPVARSIFRHPRCLDCMCRTEN

SEQ ID NO: 33961 - protein, 333 aa, Oryza sativa
MGAVAAVRAAVLVVAVALAAAAAGASAQLCDKYYDGTCPDVHRIVRRVLKRARQDDPRIFASLTRLHFHDCFVQGCDASILLDNSTSIVSEKFATPNNNSARGYPVVDDIKAALEEACPGVVSCADILAIAAKISVELSGGPRWRVPLGRRDGTTANLTGADNNLPSPRDNLTTLQQKFAAVGLDVTDLVALSGAHTFGRVQCQFVTDRLYNFSGTGKPDPTLDAGYRRALAKSCPRRGGNSSALNDLDPTTPDAFDKNYFANIEVNRGFLQSDQELLSTPGAPTAAIVNSFAISQKAFFKSFARSMVNMGNIQPLTGSQGEVRKSCRFVNGS

SEQ ID NO: 33962 - protein, 323 aa, Oryza sativa
MEEGLPPGFRFHPTDEELVTYYLARKVSDFGFATRAIADVDLNKCEPWDLPSKASMGEKEWYFFSMRDRKYPTGIRTNRATDSGYWKTTGKDKEIFHGGALAGMKKTLVFYRGRAPKGAKTSWVMHEYRLQSKFPYKPAKDEWVVCRVFKKLQCHLAKPRPPHDDVDGDGASPPEMVDASSLGELGELDVSSILLGGFAPPSGELCHGGGGGDGFGAHRLHVGAYMSWLQAAAAANQGMFQWPAATQAGLVGGTVFAAAHKAAGTMPFGGGCSQQQARDVGVSLANVGGGDALFGGAPLAKVDMECGEQAPQLDMDDSTWRAF

SEQ ID NO: 33963 - protein, 321 aa, Oryza sativa
MDAAASEIEFDMPGVLRMYKDGRVERFDGTQTVPPSPSGDPANGVVSKDVVLDPAAGISARLYLPPGVEPGKKLPVVLFFHGGAFLVHTAASPLYHRYAASLAAAVPAVVVSADYRLAPEQPVPAAYDDAFAALRAVVAACRPDGAEPWLAAHGDASRVVLAGDSAGANMAHNAAIRLRKEGIEGYGDKVSGVVLLHPYFWGKDPVGGESTDAGYRGSFHGTWEFVSAGKLGLDHPCVNPLASPEEWRQLGAGRVLVTTAEHCWFVERARAYAEGIKKCGWDGEVELHETDGEGHVFFLPKPDCDNAVKELAVVTDFVRRC

SEQ ID NO: 33964 - protein, 181 aa, Oryza sativa
MGMAFSRVFERLFGKQEMRILMVGLDAAGKTTILYKLKLGEVVTTIPTIGFNVETVEYKNISFTVWDVGGQDKIRPLWRHYYQNTQGLIFVVDSNDRDRVDAARDELHRMLNEDELRDSILLVFANKQDLPNAMSAAEMTDKLGLHGLRHRQWFIQACCATTGDGLYEGLDWLSATLQKRK

SEQ ID NO: 33965 - protein, 54 aa, Oryza sativa
MRFLSSSWMFSFGRFRWISSCLLPRIRWIGRRCYGGFDLFCWFVRYASSWLGCV

SEQ ID NO: 33966 - protein, 105 aa, Oryza sativa
MLPRSAALAARSFARRNASTSVAARLCTRSFASGNGSATNSNSSKLLDESIMDHIVCPISKLPLRYDAARGLIVCPEIRVAYPIVDGVPVLVPTEGRLLRDDEEV

SEQ ID NO: 33967 - protein, 87 aa, Oryza sativa
MSRHRRQPSRSLPLDFNVDMDDEPAAAAKGTAAHVDGGGGQPGRRRNTTDDAKSQEAGNNGKKLPPSSATTGGGRPVASSEETGKKK

SEQ ID NO: 33968 - protein, 113 aa, Oryza sativa
MASKIAISLLLAALLACAAASGAAARRLEEEEPSSTTAPAEEEDQEEPNHPAAVFPELPVPEHELPPLPKVVELPPFFPEAHLPPFPEVDLPPKPEFPGVPEFHFPAEPEAKP

SEQ ID NO: 33969 - protein, 66 aa, Oryza sativa
MDSLGMAASSEPKACEALGVRETRAGLAPARFPREPLVKIRANPFPLPLLSLFLSLLLFFKAWTSA

SEQ ID NO: 33970 - protein, 197 aa, Oryza sativa
MKAEKAAVAVGGGGGGDEWRCRKHPVARSGGGVCPHCLRDRLLRLCPNCAHVRPCPCTCASPSSSSSASGEAVGRVHTLIEREHRIARSRSVAASSSLAAASTASATAGAVGGRRKARVWGWPPFWKPAAKDGVAAAAEEDEEEGGMGLARSSSVSATVVEAKAAAAAAKARWGWHFPSPLKAFRHRRSSASMPERG

SEQ ID NO: 33971 - protein, 88 aa, Oryza sativa
MLAAQSRQKSYADVRRRELEFEVGDQVLLKVSPTKGVVRFGTKGKLSLRYIGPFSIVERVGILAYRLELPESMKGVHDVFHISMLRKY

SEQ ID NO: 33972 - protein, 137 aa, Oryza sativa
MAAKTKQTAVKTKTTTARALGTKTGKKSAGSSGASGVKRAHRWRPGTVALRQVKALQKSTELLIARAPFSRLVREIAESHKAGLRFQSSAVAAIQEATEAFVISLLSDANLTALHANRVTALPRDLQLVRRLRGERL

SEQ ID NO: 33973 - protein, 40 aa, Oryza sativa
MRFFFFFSLRWFCSFSRRDFVRFICAWLNVILSGGNKEDR

SEQ ID NO: 33974 - protein, 75 aa, Oryza sativa
MLGKLQCSVHAVRLRRCFTVKLEFVLSTCSVFCKRGDNNPVGGGSEAVPRRWKNWHRNILSRTSLLISCYSLLGC

SEQ ID NO: 33975 - protein, 69 aa, Oryza sativa
MDGIEDVMSGTTELRVEKEIEVLSGTSVPESTIGELLPGSTEISTTRHPEPVDDRNPMEPPMGEQKAES

SEQ ID NO: 33976 - protein, 60 aa, Oryza sativa
MDLLMGNYYLAFTNESLFMAVTVVFLLLRVYFLYIWVRAAFPRYRYDQLMGLSDDPKLKD

SEQ ID NO: 33977 - protein, 118 aa, Oryza sativa; identical to SEQ ID NO: 30197

SEQ ID NO: 33978 - protein, 41 aa, Oryza sativa
MKLVGSERRQRGGGFGRAIKQQRARLYIIQRCVVMLLRWQD

SEQ ID NO: 33979 - protein, 242 aa, Oryza sativa
MLDEQVRLLILDVAKEQHHYQDSHNSLVNAIIDGAQDGRSAAEAEDFIVGNCKTIYFGGHESTAVTAIWCLMLLATHSEAMEVCRGRSTLDVDALRRLKIVTMVIQETLRLYPPASVMMQEALTDVKLGNIEVPRGTIVQVPRLMLHLDKEAWGADADEFRPDRFANGVAAACRAAHMYVPFGHGPRTCIGQNLAMAELKVVLARLLTKFAFSPSPRYRHSPAFRLTIEPGFGLPLMVTKLP

SEQ ID NO: 33980 - protein, 83 aa, Oryza sativa
MVAVARVRRPRLLRHQEEGRRTARARARGGGGGGVCGGGGGGDLRRRREEVVGDPGPEAAVPCLAASRFRPQDMRRPPAPTAS

SEQ ID NO: 33981 - protein, 197 aa, Oryza sativa
MELLLLPSRGAATRPLHQPSRRRVAGVFTARPAAVASSSNVEVIDTTAAAAARGDVAKNRQEWRAAGGLGLGLNLSEDMRRGMMWRMLAPPAAAVAAEAAFLRVLDGAASDAAPAWAGSAGSAVLFAVGLLGFHYGFLSSRWNAAERGSLVGWELAASHWSELSMAKHSSIDDEVDDDEDEEEEDEDEEEVEDEDTD

SEQ ID NO: 33982 - protein, 53 aa, Oryza sativa
MRARPPSLPPSPNWPPALEHQAGPARRRRRRPPPSSNRSAPAMFNPTTFALID

SEQ ID NO: 33983 - protein, 49 aa, Oryza sativa
MYSNCNESIFTTFPTSRRIGRLRITIDNKFESQEPAFQARSITCSAEST

SEQ ID NO: 33984 - protein, 4 aa, Oryza sativa
MARW

SEQ ID NO: 33985 - protein, 233 aa, Oryza sativa
MSSSSSMECTGNMSAAPLLVLTVAVLAVLASTCAADPEPIQDFCVAVPRAGGEASPAYPGFPCKPASAVVSDDFFFAGLAAAGSTDNPFGASLKPGNVEAFPALNTLGVAINRVDLAPGGVNPLHSHPRAAELVHVITGRMLVGFVSTAGKYYSKVVGEGETFAIPRGLMHFQYNPGNASARAMTVFNSQLPGVVPAATALFGADPEIPDAVLAKSFQVDAEIIKLLKSKFKK

SEQ ID NO: 33986 - protein, 142 aa, Oryza sativa
MAAEARAESPAAPVVVPAAASPEKRVLSGDAGREEERPEPKRRRACVAALDSVPCAAPPLVDGDGSSFSFQHARGGFVVLETTPKFGSFNPPAAAAVGPKPAPPAGAGQGSPEEEGGPAREEAEAKDGNSQLVGPGVQGQKT

SEQ ID NO: 33987 - protein, 157 aa, Oryza sativa
MAAAMGLERKAKVAEVALRCAVCALAALAAALVGTGSQTRTFFSLEKKARFTDMKALVLLVAAHGAAAVYSLLQLARCAAAAAWKGGSNGGAAVVAWSVFSCDQAVAYAPSPRASPPCSSPPSPRSTCSASTAAAAAAARAAPAPSPAMARTRGRQG

SEQ ID NO: 33988 - protein, 149 aa, Oryza sativa
MVISTKSMGGLGALAALMCPAMARPPGSPSAAGVATMSDSTTLQWSMGEADAGAVGPGLLCRICRLRPPTPAWEGGHGGGAAASLPCNRTDLSSSSAVVAAHHPNLSSPPAVAIHSRRHTDLSSPSAVVAIRRCCPLSPPAVAAIRRHP

SEQ ID NO: 33989 - protein, 180 aa, Oryza sativa
MVSMAPSSSAAATRRLPLLLLLAAVLLLHPCHAATEASAAARRECTYTVRVKTSCASPARTADIVSVAFGDAYRNEAYGARLPAGGASGALDRCAVDAFRVGGQCGYGVCYLYLRRAGRDGWAPEWVQVFEPGAAAGEKPSTFYFGSPLPDGVWYGHNRCPKASPAMAARRTNTSASPLG

SEQ ID NO: 33990 - protein, 85 aa, Oryza sativa
MFRRPMTTAALARTRSNALVQMRASSEHPSFGVWNPLGPVIFFGAVVGGAWMVFAERPETSKDPNNLMARSGLGFVTRTFVNFWM

SEQ ID NO: 33991 - protein, 54 aa, Oryza sativa
MHAVISEDKAVALLLVRHGADVAIEDKEGYTVLGRASDSFRPALIDAAKAMLEG

SEQ ID NO: 33992 - protein, 159 aa, Oryza sativa
MAVAARASSSLLRGVAVLRRRPPVRSIHEGPDTIDELLDRHLAKKSPSSSSGALDGDAADAEARRRLTSSRREALGLYRDILRVTRLFEWPDDRGVPWREVLRANARREFEEARGERDPEVVARLLIGGRDAVQQALDRLAEASRRMVEAEEAKRRGGA

SEQ ID NO: 33993 - protein, 73 aa, Oryza sativa
MLPCSTSYRGACHVELLLHGRLEERTTQSYILEQTAGPWTTSRLSGPPELDITGRKLFYSDHSMNHSVSYPPR

SEQ ID NO: 33994 - protein, 261 aa, Oryza sativa; identical to SEQ ID NO: 30971

SEQ ID NO: 33995 - protein, 20 aa, Oryza sativa
MQCRSQDRFNARASCWRTKT

SEQ ID NO: 33996 - protein, 36 aa, Oryza sativa
MALSSSARSSRRRRRRRETRSWFSYHLPAAAASILN

SEQ ID NO: 33997 - protein, 176 aa, Oryza sativa
MTSRNKSRNRNGDPEEMEGGGATAPAAPHPAVAPLAFLLGKWRGEGEGSFPTISPFRYGEELLFSHHPSKPVISYTQRTWKAASGEPMHAESGYWRPRPDGSVEVVISQSTGLAEVQKGSFDAEKKTVTLQSELVGNASKITRAFQLVDGELSYVVQMATITTSLQPHLKALLKKI

SEQ ID NO: 33998 - protein, 58 aa, Oryza sativa
MSNPVACCFLFLSLKIVTFQFYSRAGLDACCVHGGVQVLYFSTFQLLPCVLRSGLLMA

SEQ ID NO: 33999 - protein, 181 aa, Oryza sativa
MSNTTEKKMPQQQQVERPTALAPADAEIERVFTRFDADGDGRISPSELAAVTRAIAPPPSESAGGREVAAMMNELDTDRDGFVDLGEFAAFHGRGRGDAEHEAELRAAFDVYDVDGDGRITAAELGKVLGRIGEGCSAEECERMIASVDVDGDGCVGFEEFKKMMCRDAAATGGADKAKTE

SEQ ID NO: 34000 - protein, 38 aa, Oryza sativa
MSPLAKFCLIFFGDCSDQQCFFRQCTPSGCKFSKSLAA

SEQ ID NO: 34001 - protein, 83 aa, Oryza sativa
MHPPLTLHRHPMCAEIIEAFQKCHVDHPVKKFFGECTDLKIKLDQCFRQEKALKRKANFEESKKFKEQLLAYKKEMAEQDKES

SEQ ID NO: 34002 - protein, 30 aa, Oryza sativa
MVMVVVVYTWRFGNHSAVMCQCLINWCVGK

SEQ ID NO: 34003 - protein, 86 aa, Oryza sativa
MATVPVNPKPFLNNLTGKPVIVKLKWGMEYKGYLVSVDSYMNLQLANTEEYIDGQFSGNLGEILIRCNNVLYLRGVPEDTEIEDAE

SEQ ID NO: 34004 - protein, 154 aa, Oryza sativa
MGKTEHKKKQQQHGGDEAAAAAKERLDRFKAWLMHFDGDGDEHISRRELRDAIRSGGARFATVRAWVNLYLADKNRNGVIDDGEIKHLMDLTEKDLDLSKLQPTPAAARPTATGAPPAMVVVSACQFQTTPLVSRTIDLRKLTAKPVLSSTANN

SEQ ID NO: 34005 - protein, 120 aa, Oryza sativa
MEGETRRARRRCRPVQLAAAACAPFVVLLLAAAAAAAGGEAVAAWRTTVEDTVVEVAALPAELGGMLHRRVWSSKESIGKHALSRDGGLCIQDCAGKGPGDPYTPPVTEHCNRRYYNQGC

SEQ ID NO: 34006 - protein, 127 aa, Oryza sativa
MQDGQEVSFFEEGEPKIDGEPGDLKFRIRTAPHERFRREGNDLHTTVTISLLQALVGFEKTIKHLDNHMVEIGTKGITKPKEVRKFKGEGMPLYQSNKKGDLYVTFEVLFPKTLTDDQKSKLKSILT

SEQ ID NO: 34007 - protein, 181 aa, Oryza sativa
MFKKFSFEDISAQNQVKASVQRKIRQSIADEYPGLEPLLDDLLPKKSPMIVVKCQNHLNLVVVNNVPLFFNIRDGPYMPTLRLLHQYPDIMKKFQVDRGAIKFVLSGANIMCPGLTSPGGSLDVEVEEETPVAIMAEGKQHALAIGYTKMSAKDIKTINKGIGVDNMHYLNDGLWKMERLE

SEQ ID NO: 34008 - protein, 46 aa, Oryza sativa
MAAAAAAAVSYSGDGCSPPRRSWRRLGSALLLLMTLPRGEDKGMIM

SEQ ID NO: 34009 - protein, 95 aa, Oryza sativa
MSKRTQKMGIMGKCGARYGANPRKRARKLIVSQHAKHFCAFCGKFAFKRKAVGIWRCAASGCDKTVAGGAYMLNTPNSSTVRSTVRRLRELKVKA

SEQ ID NO: 34010 - protein, 34 aa, Oryza sativa
MPSKKRGTFPGEFRRIQCVRAHPCLGWHAAYVSV

SEQ ID NO: 34011 - protein, 52 aa, Oryza sativa
MPIARWSRRSRRWTRRPTHPKAVAPVAGGSLSPCRQGRQAAPPQEHWHGHQR

SEQ ID NO: 34012 - protein, 82 aa, Oryza sativa
MGHFMMDDQNIFAWLCTSCVLCCFMGCAYIFYIIVTIILPPLPVFIRHHCEVSQICRFYLVSDVLKRNKLVFISCYSFRCLA

SEQ ID NO: 34013 - protein, 100 aa, Oryza sativa
MKENTFQEGTAMASSSSSSSFLAHPSSLLRQVVHGFAGYLAGLCRSLQNLKPSAAPKQDADDEFAVNNTAASSSEEVENVQMKRRSTPQRWPLASIDAKL

SEQ ID NO: 34014 - protein, 265 aa, Oryza sativa
MAASTMALSSPAALAGKAVANAKVFGEGRVTMRKSAAKPKPAAASGSPWYGADRVLYLGPLSGEPPSYLTGEFPGDYGWDTAGLSADPETFAKNRELEVIHCRWAMLGALGCVFPELLARNGVKFGEAVWFKAGSQIFSEGGLDYLGNPSLIHAQSILAIWGCQVVLMGAVEGYRVAGGPLGEVVDPLYPGGSFDSLGLADDPEAFAELKVKEIKNGRLAMFSMFGFFVQAIVTGKGPLENLADHLADPVNNNAWAYATNFVPGK

SEQ ID NO: 34015 - protein, 14 aa, Oryza sativa
MHLCLVGAKRSQVT

SEQ ID NO: 34016 - protein, 91 aa, Oryza sativa
MSAADRKAVIKNADMSEDMQTDATEIATQAMEKFNIEKDIAAYIKKEFDKKYNPTWHCIVGRNFGSYVTHETKHFIYFYLGQVAILLFKSG

SEQ ID NO: 34017 - protein, 141 aa, Oryza sativa
MISSRKLAQLGKKWQRMVASSGRQTASIDGCCSTATAYVADKGHCVLYTTDGARFEVPLMYLNTAIFCELLRVSQEEFGFASNNKITLPCDASVMEYVMCLIRRDASEEIEKALLSSIVRPCLNTSVVPPMRLNQQFAVCS

SEQ ID NO: 34018 - protein, 203 aa, Oryza sativa
MEGSTSPKALRVAAISGSLRRGSANTGLIRAAKEICEESIPGMVIDHVDIPDLPLLNTDMEVDDGFPPAVEAFRASVRAADCFLFASPEYNYSISGPLKNALDWGSRPPNCWADRAAAIVSASGGSGGSRSMYHIRQVGVFLDIHFINKPEVFIKAHQPPKKFDSDGNLIDPEIKEELKDMLLSLQAFALRLQGKPANSKHAA

SEQ ID NO: 34019 - protein, 58 aa, Oryza sativa
MRAPLLASRCSDPAACCFPSSPPSAREPRLEGVQSKRSLGAMADDAFLETQAIPNVPK

SEQ ID NO: 34020 - protein, 175 aa, Oryza sativa
MIVVNESNVLGRRRSHDTVELLSEKCEVDVANRLISVCVFCSISSRLPRLDKILKTWFSNKTQDSKSMQFIQAKVTSIPLIKFRLELERDITEEDGIWENISKWKTVPMVQRVALDVVAKVEEEGRLKAMSVKKVKKPYPVVDASSWSSLTSNISFTKFMSFVLPPEPLTLDVKW

SEQ ID NO: 34021 - protein, 196 aa, Oryza sativa
MSYYRGTSPAWGLGRRGGGGGPSPVVPLLIVVALVWVNYNETLTEWYDKAANLPGTVADNAVTLVAAGGLLLLAAVLLSRRSEVVVVPVAIVLSVMLLQNIMAFLVLLLVVAYFAGIYYYPADAAKYGVTAGGEWCGGGGFWSGLGFYMLLLLCLVLCAMFADEGVRWWIPGTLLAASLLCLNLFSGGQVLGYGHL

SEQ ID NO: 34022 - protein, 128 aa, Oryza sativa
MRFVTLSFIVLAVVLLTSCVDAYKSVKLRRPQTDEERAERHAHNMRRPERPYDDAAHLRALAEGQQRAVRNPLLASKLHHHQFGPKYGKNKQNELAFRKKRYDGRGYEVPQDVPAHIDPKLFPQRRPM

SEQ ID NO: 34023 - protein, 160 aa, Oryza sativa
MAPKVFVPLCVVVLAAALAAGPPVADAASAHLHFYMHDVLGASAVQVVRGPRGMFGNTVVMDDVLTEGPAATSSVLGRAQGQYIVASTGSMDLMVTMNVVLSSGPFAGSSVTVVGRDDTGAAVRELTVVGGTGQFRMARGYVLWRTIRPDLLELDVYVNP

SEQ ID NO: 34024 - protein, 171 aa, Oryza sativa
MNAMYCGEQIRVPEELGAVLKDFTKAAIRDSLKEGDVLKWAANYFANLSGQPAPFDGQGRLMSEGGKPRTSGSAGQMVSDVLEGAGGYESLDGAANDGNEALIRQIFQHYDKDGSGRLEKGEVPSLIADLKASMGIDFSDEQHSMLMDMLDTDKDGTINLQEFRQLFFSSE

SEQ ID NO: 34025 - protein, 37 aa, Oryza sativa
MRVAREHAWPPTSSIPGHRSPSTPPPCYSARREERRR

SEQ ID NO: 34026 - protein, 82 aa, Oryza sativa
MGSSSTSPSTTPAAACSCSLSPWTRCSSWSLGCATSRRSLPCLCTSLRATPLLPLHRPCRRLHRCPPPRRVVSLFVFVAPLS

SEQ ID NO: 34027 - protein, 131 aa, Oryza sativa
MMKSFLALFLLLLTFASHGTWCAAAADRSHRITTAHLRPHLHVEELHGKKLMEIQVPRKLGHEVKVPKRMAIAHKGGSAGAAAAAGAGGGGVSESRPRNGKNGAATLPAPATTSILALAITCAAVLSSFSF

SEQ ID NO: 34028 - protein, 89 aa, Oryza sativa
MGSKDAFFCTFCSLLLFCFSSKCLSSELDLPQTALVEVDASWEVSRKIPDTLFGLFFEEINHAGAGGIWAELVSNRSNSQFDKHSSWKL

SEQ ID NO: 34029 - protein, 17 aa, Oryza sativa
MFMRASELEGDCKSATA

SEQ ID NO: 34030 - protein, 90 aa, Oryza sativa
MDYREYLKKMIKNGEWGDHVTLQAAADSYGVKIFILTSFRDTCYIEILPVVQKSERVICLSFWAEVHYNSIYPEGELPVMENKRKRWWHF

SEQ ID NO: 34031 - protein, 32 aa, Oryza sativa
MAECRRASILVTYCPSVVLWGRPVRRCMYIFV

SEQ ID NO: 34032 - protein, 57 aa, Oryza sativa
MPPCEIFIYIVSQPTFAQEAKAGWTYIRIAIFTPVKFLLCANHFPVQLQVPIFVGVM

SEQ ID NO: 34033 - protein, 105 aa, Oryza sativa
MLPSFFLTNNTGAPQGDELGRTNPFSCNSLICFLSSSNSLTGIRYGLLDMGVVPGIRSIVNSMSRSSGIPGKSSGNTSGNRYTTGIPFRGSMVNMPPARSVSLGS

SEQ ID NO: 34034 - protein, 62 aa, Oryza sativa
MGRALPRGDAPQRGLRHLRRRRSLRRRAGGGLRGAQGLGDEQHREKVRRYISAGAKAGRVEQ

SEQ ID NO: 34035 - protein, 103 aa, Oryza sativa
MAYVDHAFSISDEDDLVGGAVGGPRGAPVKEIAFAAALLAFGALGAIGGVLMAANNVGGDRAHGIFFMILGIVMFIPGFYYTRIAYYAYKGYKGFSFSNIPPI

SEQ ID NO: 34036 - protein, 119 aa, Oryza sativa
MAPPREDGSGGGRRAASSGRRSSPGQPVVEAETEGALRPPPHQPTTRLLRVGRRRQFLSSDVHAQTTQPRSYSSPSYRIGDGVVPAHSGRLICCLYFKALEAVVTFPFPCTAPALTMSA

SEQ ID NO: 34037 - protein, 163 aa, Oryza sativa
MCPIRIHWHVKLNYKEYWRVKITITNFNYRMNYTQWNLVAQHPNFNNITQLFSFNYKPLTPYGSKINDTAMFWGVKFYNDLLMQAGPLGNAQSELLLRKDSKDFTFDKGWAFPHRVYFNGDNCVMPPPDAYPWLPNASPLTKQPLTLSVLVFSIVLATLLAYA

SEQ ID NO: 34038 - protein, 72 aa, Oryza sativa
MKLWRRRAKKAVAPTQSSAPGASPSWSSAVQLHSSQPTPCHHLRHDANNRPAHGVVHKLCCCTWICALGCLC

SEQ ID NO: 34039 - protein, 270 aa, Oryza sativa; identical to SEQ ID NO: 28586

SEQ ID NO: 34040 - protein, 109 aa, Oryza sativa
MPDAPRSAAPPHLSSSQRQFAVDPASAAPRFLSSPAPPLCLSAVVASPHPYPAQRRSPPNPNRRRSTLSLSRRRRAPPSICRFRHPAFARDAAGAPPRRPCILLNALFY

SEQ ID NO: 34041 - protein, 203 aa, Oryza sativa
MGSSSVPEHRRQLVAAVALILAVAACRGAAGRGASAGGAAAGVHARHRGRGGADVGGGGEGAGAGEPVHVAGEQLRGHGDHRRRGDGGPKPGVQGGWAGAGDVHASSMARPVFIVDITVVLTDGPYNGSTILIAGRDDTSEEVRELAVVGGSGMLRRASGTCCGGRPRWSPSCTPCWSSTCTPRCLLLLLLLVVVVAMATHFW

SEQ ID NO: 34042 - protein, 86 aa, Oryza sativa
MATVPVNPKPFLNNLTGKPVIVKLKWGMEYKGYLVSVDSYMNLQLANTEEYIDGQFSGNLGEILIRCNNVLYLRGVPEDAEIEDAE

SEQ ID NO: 34043 - protein, 75 aa, Oryza sativa
MRQPCAALTYKILWNQSWTPARTPETGMACMLCCLFARSLESTQPADLQAHGNKRCIHPASNQRKSPVMGSPLKA

SEQ ID NO: 34044 - protein, 31 aa, Oryza sativa
MTTSYRCISLTLLDSMAYIGTTSMLTLSRSH

SEQ ID NO: 34045 - protein, 190 aa, Oryza sativa
MASAPTAAACFGLLVAMWAIGLVSYLDQFLGALMSSARALPPLDVAVEVVMAVAAIGSLNTAMASIYFRVYNGRAAAANRRMLDGACFAVWASASVLLHLIFFLQPGAMDGADQDLLPLAAAVVRALLPASAAVTFFASIILIYAYLRSGGAGAGTGTSVKLLTKVTNSAALVTIVLSLVVAAIVVFYSE

SEQ ID NO: 34046 - protein, 87 aa, Oryza sativa
MNVEEEVGKLKEEIQRLGQKQPDGSYKVTFGVIFNDDRCANIFEALVGTLRAAKKRKIVKYDGELLLQGAHDNVEITLLPPPAVAAA

SEQ ID NO: 34047 - protein, 35 aa, Oryza sativa
MLLACLLQSLVIFCCFSTCSWINPKKKFPSCFTSF

SEQ ID NO: 34048 - protein, 27 aa, Oryza sativa
MELVLVISLPLLALIIIVAIVLCVICR

SEQ ID NO: 34049 - protein, 95 aa, Oryza sativa
MSSWSWSVRLMVLTLTLLGAELAGIRHGRRIIPSLEGDSPSPSPASKGCGLLTEEMAAPPGHYYSSRRMMQEEEEDHGVSASKRVVPEGPNPLHN

SEQ ID NO: 34050 - protein, 68 aa, Oryza sativa
MLECQRRLRGFGSTATQAADLASLCLVGVAGGGAAVGRRRDDDRRHASRRGRDDTILAFHSPILSKFL

SEQ ID NO: 34051 - protein, 248 aa, Oryza sativa
MEMMEVVATEIMDAALHVAVAGRTLAVAERDGTHDPATGRALTGSWLWDSSLVLASHLASCVHHHHLRGATVLELGAGTGLPGIAAVACLGAARCVLTDVRPLLPGLRANADANGLTAEQADVRELRWGGHLEPEVQVDVVLMSDVFYDPDDMPAMADTLHGLWRDGDSDSDGGGTVGWAASEARDGVQDCIDVLREQGFEVVEVDRVTRPLLRDPEQAADFAVYRLFRRTTSPSIVSNPTPITTAGC

SEQ ID NO: 34052 - protein, 131 aa, Oryza sativa
MTFAARMKELMRKYGKVAIGVHLSVSCASITGLYVAIDNNVDVDAIFRRIGISPSGGVAGDEAAETPTPSAAVPEEAPPRNRTRELVASSGGALALALMCNKALLPVRVPVTLALTPPVARFLARWKLVKT

SEQ ID NO: 34053 - protein, 71 aa, Oryza sativa
MLMLEVYDHDTFSRDYMGRCILTLTKVLIEEDYKDSFKLEGAKSGKLNLHLKWSPQPIFRDSREEDSLRFR

SEQ ID NO: 34054 - protein, 99 aa, Oryza sativa
MPASENAQILNLPQGELPSSSQDCLLNPLQYQPLNEALEDVLQTAGGSHHQHQGGSGELPWIASSFGAGGFVDARDPFDVQFSGSQPCGLLLSSSGARL

SEQ ID NO: 34055 - protein, 88 aa, Oryza sativa
MGSKKDAQTWADQWGSSGGDGSFKKGGGGGGSSGNSEKKTVAGNVKAAASEGLVKAKAAALVGAHKVKSGTSSGIKWVKGQYQKRAGK

SEQ ID NO: 34056 - protein, 25 aa, Oryza sativa
MWGSCTNASRRWHPVSRLNRLFRMM

SEQ ID NO: 34057 - protein, 94 aa, Oryza sativa
MAALLGALRGKLHGCALRLRGDSLPVVVSVLAVAALCATALSRTARRWCSPAGWPPSAAATATMSRRSSRRCGWTGWRRACGTATSAGGRGGTT

SEQ ID NO: 34058 - protein, 72 aa, Oryza sativa
MIGSGNNKDCEEWFFDSKITQIPPTKFSQIPYPHTKIFSNSIQTGRVFKRDFGRELRCLHVHVDLTLSRLIC

SEQ ID NO: 34059 - protein, 169 aa, Oryza sativa
MKFAAVAVAALAAVSTADAALASARCVGEPYLAWISNDVDPGLACFTATGFSGSGYPFPSQETAAKFCSNSACRTLLDGVIAATPAEGDCTVQQLQADGTRVKINFYENIASVFAGVCSKSTLPPTPTPTPTPTPTPTPTPTPTPTPTTTAPSPTPTVTPEPTTQRPQC

SEQ ID NO: 34060 - protein, 63 aa, Oryza sativa
MESAAVEPPAGGGSGVMAAAARANTLRGGAPGLLAFHSYARGSLMASWRSSGFCSSTSMLISS

SEQ ID NO: 34061 - protein, 76 aa, Oryza sativa
MLFVATDVFVFWDGNMLFFLIGLFIEIPVYVGRILNYLFLLLIAGMDAIAQRNLILGSLFLWKQDMENLQFDSCLS

SEQ ID NO: 34062 - protein, 117 aa, Oryza sativa
MARAAPVDGSGPAMEEVAGVEAVEVAVAAAAGVAAAEVAVAAAEVAVNKGTEHGGEGVLWKRYFLWNFMPSDLHTSLILLCSVFHLHQSWNKNNKHIGSFAYVSLYVNILLHVYVLY

SEQ ID NO: 34063 - protein, 168 aa, Oryza sativa
MAAAPSATSVHDFTVKDASGKDVNLSTYKGKVLLIVNVASQCGLTNSNYTELSQLYEKYKVQGFEILAFPCNQFGGQEPGSNEEIVQFACTRFKAEYPIFDKVDVNGNNAAPLYKYLKSNKGGLFGDSIKWNFSKFLVDKEGRVVDRYAPTTSPLSIEKDIKKLLGSS

SEQ ID NO: 34064 - protein, 46 aa, Oryza sativa
MHAFCLCLQTWMSAHYVSRIPSMKIYILAGKESATTHQEDIYANAS

SEQ ID NO: 34065 - protein, 163 aa, Oryza sativa
MDGAGGRSYEDFKPPHKMVREPPTHTLTIDLSAKGYKKEHIKVQLVRSRRRLVVSGECPVAGETNRWSRFRLQFPVPDGCDLKAIQARLHDGVIRVTLPGVKPQQQPPPAKTAAAAAVVGGDQRGGGERCQFLRERGKLATTLLGVVLVLFSFVIYIRYSVKP

SEQ ID NO: 34066 - protein, 112 aa, Oryza sativa
MVLELLTMAAHRVGRCMLLQPPRLATCVLFLLLPLLLPCSASSSVITHLPGFHGRLPFHLETGYVGVDEETGTELFYYFVESERSPSTGPVILWLTGGPGCSGFSGVVFEVG

SEQ ID NO: 34067 - protein, 77 aa, Oryza sativa
MLRAVIAVFLADPTSPLSQTWLHTSVCGVFELNGKPRRRRGELYIGGRARFDASLNFPPARALTHVVEMAFLVTKSK

SEQ ID NO: 34068 - protein, 213 aa, Oryza sativa
MFGWFMDPLIRGDYPLSMRGLVGNRLPQFTKEQSKLVKGAFDFIGLNYYTANYADNLPPSNGLNNSYTTDSRANLTGVRNGIPIGPQAASPWLYVYPQGFRDLLLYVKENYGNPTVYITENGVDEFNNKTLPLQEALKDDARIEYYHKHLLSLLSAIRDGANVKGYFAWSLLDNFEWSNGYTVRFGINFVDYNDGRKRYPKNSAHWFKKFLLK

SEQ ID NO: 34069 - protein, 120 aa, Oryza sativa
MAAAAAMAMKDPSLWHKVAAISGVAALGLGTYGAHMFRPKNPAYKEVWHTASLYHLVHTAALLGAPITKRPDVFGGLLTAGIVLFSGTCYTVAYLEDRKYSSTAPLGGFAFIAAWASLLF

SEQ ID NO: 34070 - protein, 108 aa, Oryza sativa
MENPPFHQKIWAWIGCQRGSYTSFIAGGAAVPVTGGRRRWGRGGGGGGIPLQFRPSLSPYVPLLRPEGLPSQRLLLRGPPSVGGSPSSIRGRSRGSAARRGAARPHHG

SEQ ID NO: 34071 - protein, 130 aa, Oryza sativa
MMQFLSSSAENGWRVLGGTVAPKAIPLSEVVPGEPTILVLGSEGTGLRPLVERSCTHLVRIPGNVDGSFVGADTDTDGGEEGDNYSGNQDMKSFLAVESLNVSVAAGVLLYHLAGTNASPVSDKPSIPLM

SEQ ID NO: 34072 - protein, 65 aa, Oryza sativa
MKKLGIIEEEEEANQEAVQEFEKLFDEPLPPHHVQAIAELLQIDMAAPLQPLPEVLPGVEVASPA

SEQ ID NO: 34073 - protein, 89 aa, Oryza sativa
MAAAAAKNGRIAVAALLLAALALSAQLAPAAACSCCPLLSGVADLDAALCLCTAIKAKALGVSLVLPVAISVLVNECGKHVPSSFQCPS

SEQ ID NO: 34074 - protein, 78 aa, Oryza sativa
MNEHLRFEDGWKILEQGIVKCSKLLEDCPGGRPTVNEYMNYYDCAYRMAVQKDQYCQEMYNSYKATHESCVCAMVLQY

SEQ ID NO: 34075 - protein, 77 aa, Oryza sativa
MAAAGSREQRRWETRWMRYGAFGGAMEIDGIQVTVGLICLICFFSLSRALPATCSWDHHIAVDLSFIRAALIRSELI

SEQ ID NO: 34076 - protein, 62 aa, Oryza sativa
MAISRSAPMEERDQLQGARRSAVGDYLETRPAGGGRCPATTLRASRSLSPLRRAGGAIPVGE

SEQ ID NO: 34077 - protein, 181 aa, Oryza sativa
MAPAAAAAAALVRLPLRPARATLPNQGFGRRRAGASSLAVRAKDSDDLRVLISEKPAEPAPAKREGWEGFGREVGDGDGEVQVQGESTSWNVLNQIGVELDSENSYTALVYGTSALVTIWISSIVVSALDSVPLVPQVMEVVGLGFTVWFTSRYLIFKENRDELITRIGSIKKQILGSRGD

SEQ ID NO: 34078 - protein, 38 aa, Oryza sativa
MRKLKTMLKEELIAKAAAGEGKRLALAELDDNAGGVDC

SEQ ID NO: 34079 - protein, 86 aa, Oryza sativa
MSDAPPMAEKPTIKVETTPGDWRFPSANQTKRCFTCYIEYNKCIEAKGEGSDECTKYAKCYRSLCPGEWIERWKEQRANGTFAGPL

SEQ ID NO: 34080 - protein, 60 aa, Oryza sativa
MARSIRAGVVWVNCYFAMDRSCPFGGRKMSGFGKDDSMHALDKFLAVKSVVTPVHGSPWF

SEQ ID NO: 34081 - protein, 43 aa, Oryza sativa
MSIGNSVRELTLFTLLHSAHSVNLCTLCQPATTIGPFEAPIFT

SEQ ID NO: 34082 - protein, 95 aa, Oryza sativa
MSFLLKTRSESDKPKSPSSEELQQKIVQVRELLGSLAAEMPAFLSDTTIRRFLRARNWSTEQATKSLKETVKWRRQYRPESICWVLSQIPNQPLC

SEQ ID NO: 34083 - protein, 31 aa, Oryza sativa
MALRIQCLYHEMFSFPFFFFALCFGEKSPVE

SEQ ID NO: 34084 - protein, 117 aa, Oryza sativa
MSPPLLLRRALQRLLPHRTRSFCSSRLSSSSSSPGEVKSIRRFDEFEAMAQREIVEDVEEVRKLKSEDRNYLNRLLTSWGVPNGEFRDKLMWGGNVAAIFIASSAVGTLSAKIDGSA

SEQ ID NO: 34085 - protein, 45 aa, Oryza sativa
MIICYERSAYTYRCFFKKNRSPEETLVLSITITVLETKYNHESKK

SEQ ID NO: 34086 - protein, 119 aa, Oryza sativa
MPPSPGFSFGQIWRGGRRVVERRSPGPALRGGGSLKSADGGASVRCGGCHVLPFVCVVVLSWWTAICSQGCRVPSESLVRWFTGPTAATSSGVVISLERCRGLPSPFLGELLWVKTTSF

SEQ ID NO: 34087 - protein, 229 aa, Oryza sativa; identical to SEQ ID NO: 32124

SEQ ID NO: 34088 - protein, 80 aa, Oryza sativa; identical to SEQ ID NO: 29879

SEQ ID NO: 34089 - protein, 73 aa, Oryza sativa
MKKNWKKKSFLNTREKVPSKLHYCKGILSIYLKEGTNEDKRKLLLICPSGIYGVIFFHFHPKGLFSISLFHSI

SEQ ID NO: 34090 - protein, 251 aa, Oryza sativa
MQQPPPPPPQYAPPPPQQFQLPHQQYAPPPQHYAPPPPQQQYGAQMAGGPAPGGDEIRSLWIGDLQYWMDESYLSNAFAPMGQQVTSVKVIRNKQSGHSEGYGFIEFQSHAAAEYALANFNGRMMLNVDQLFKLNWASSGAGERRAADDGPEHTIFVGDLASDVTDSMLEEAFKTSYPSVRGAKVVFDKVTGRSKGYGFVRFGDENEQTRAMTEMNGATLSTRQMRLGPAANKKNMGTQQTYSTNGRHATL

SEQ ID NO: 34091 - protein, 100 aa, Oryza sativa
MSASARLSVFRSNKHLYAQVIDDTKSCTLVSASTMHKSLSKDLEYSAGPTVEVAQKIGEVIAKSCLEKGITKVVFDRGGFLYHGRIKALADAARENGLDF

SEQ ID NO: 34092 - protein, 133 aa, Oryza sativa
MLSKAWSAAKGTDITKSEAKDIMFHLYMTAVANLQRQMPKDIRILKHLIMIEDPEERLSALNDAFTPGPELQGDNVDTLYTSPEVLHTWASAIVDAYYNSREGTLLRQARDLMNPKIIKRIEEILKLIKDKYL

SEQ ID NO: 34093 - protein, 204 aa, Oryza sativa
MAASRYYLNLDFDVSDMKPLPDYCFSEAWEVWEAHADQSDYEREQAVLRFYEEKEKEIKAAYSEALSDEDDEEKDGEICQLLGYEEEHGQVSAGMEDIPENHVKKGCTYASPEYLAELTQKILLEINVNEDLGNLSLLESWKVMRTRKLLKQVLCHEMKHARNEGGQVFEGELEHKKARMAESSQNKGEDEETLLPVGLTPDDI

SEQ ID NO: 34094 - protein, 77 aa, Oryza sativa
MKLIPTGALGLAAAAFDETVAASAGPSVALRGRWQRKADSPPAPARGGRGRRRWDPRRRPAVKVRSGGGGIRAGDRP

SEQ ID NO: 34095 - protein, 99 aa, Oryza sativa
MDCLHSSSRRRPPPPLSTPVAATLPHRRPPPSNSLSRCSLALAKRRIQRLRARHRRIRLVIRRACGWGDGAAWAGAAACSGMGRRSGVRASIAALRTAL

SEQ ID NO: 34096 - protein, 71 aa, Oryza sativa
MVSTATFPIQYRMMDIHQETVGTSIGKIQVTRDGTTGKTRGLIGSLIGNRQATRGVMTSTTAGIVTGMMTG

SEQ ID NO: 34097 - protein, 107 aa, Oryza sativa
MILHSGKYENGDRLSPEHEKAILERLLPYHPQYEKKIGCGIDYLTVGLHPEFENSRCLFIVRKDGEQVDFSFWKCIKGLIRQKYPMYADSFILRHFRRRQDYRISDS

SEQ ID NO: 34098 - protein, 45 aa, Oryza sativa
MAGEDGNDGILNRSAEARAILLSGLVDLVAGASSMAIGESASIHA

SEQ ID NO: 34099 - protein, 134 aa, Oryza sativa
MARNAATACSTLLLLIAAATTLLVPAASAAKLVAGKDAATATAAEAALGSTVAPWVEADAGGVVGGMMMVAAAAGSVEYGHGGVHHRRVLQARGGGNVNPSLVADRQRCIGSCPARGGSYTGRGNQCIYHNRSC

SEQ ID NO: 34100 - protein, 100 aa, Oryza sativa
MATSSPAPARPRRHLPSPSPSGLPRAARATPWCAASSPSSPATPPPPSASATATAPSPPPTPSAPRAPSRPRPSTPPPPRHPPRPPWRTASRRCSSTPGR

SEQ ID NO: 34101 - protein, 28 aa, Oryza sativa
MDYTLYSLLQVMSFCRLLMSSYITCQDK

SEQ ID NO: 34102 - protein, 193 aa, Oryza sativa
MGGLSVIAPPAGDSASPAHRRARRAFLVSNYMILGAASGCGFLTLSLRLVPSVDGFLLILLHAITVAAAVAGCAVIAAPDPPRGRVYTTHMAGTVFVSILQGAAAVLTFSRTSDFLADGLKSYVREEDGAVILRMIGGLGVAIFCLEWIALALAFVLRYYAYVDRECGGNPLRRSAKVGGEDGAGTWPWPFQV

SEQ ID NO: 34103 - protein, 106 aa, Oryza sativa
MGNCFKSQRAAASWADDGEWEDEEEQQQQQHLHEMAAVEKMERVEVKIRVTRRQLQELLEKAAGEGKGRPVEKVLAEMISSGKVCYEQEAAGWRPSLQSIPEADES

SEQ ID NO: 34104 - protein, 26 aa, Oryza sativa
MGNTDINRARISAQSEASNYTQGFKM

SEQ ID NO: 34105 - protein, 104 aa, Oryza sativa
MHTALRGCPPWRAGGVARDGRVRREEGGDEADEAAAEEKRAQERDEAYQRALDGATPVSPESLAAMLDQALQSVRQPPPPPQQQQNCQNTLRHGGMVRRMRTGF

SEQ ID NO: 34106 - protein, 15 aa, Oryza sativa
MLKSRSLRQRRTRCC

SEQ ID NO: 34107 - protein, 82 aa, Oryza sativa
MPSEVSDIKQFIEICRRKDAKSACIKKNKKVNNIKFKVRCSTNLYTLVLKDTDKAEKLKQSLPPGLTISDVGKKNPKGKRTA

SEQ ID NO: 34108 - protein, 122 aa, Oryza sativa
MKQKIVIKVSMPCEKSRSKAMKLVVMASGVSSVEVTGDGKDRLQVVGDGVDAACLVTCLRKKIGHAELVQVEEVKEKKPEEKKPEEKKPEPCYCPHPCYYHHHYGGIPVAVGDQPSDPCSIM

SEQ ID NO: 34109 - protein, 83 aa, Oryza sativa
MSPFEGAPEEFDQTIFPVDHKWSIGPVEGLALNFVKDEKRKRSYTDTANFTLRCGVCQIGVIGQKEAVEHAQATGHVNFQEYK

SEQ ID NO: 34110 - protein, 29 aa, Oryza sativa
MILFVVDSGLELCPYCFLAMLLDHLKVEK

SEQ ID NO: 34111 - protein, 32 aa, Oryza sativa
MSKMLDQDGPSSCICNPSVYRNCSGSLLVTNW

SEQ ID NO: 34112 - protein, 102 aa, Oryza sativa
MRRGSDHRGHDPNCRPLPPPPPHRQPPDPATAASPPSAGRFLLRHCTANRRIRPRQVCGARIRPPRPLPRPSAASSSATVPPTAGSGRGSGHRLLHHCTTAR

SEQ ID NO: 34113 - protein, 103 aa, Oryza sativa
MPPRSLTLSRLPVAALGLPFSSCSPPPPRLRFPFAARRARSLATRASSSSPDSSFGSRMEDSVKRTLADNPVVIYSKSWCSYSSRTSSSSTNSAHRDLSCKRC

SEQ ID NO: 34114 - protein, 50 aa, Oryza sativa
MFSSILFLLQINSQFDLGLTDTRAGIALPPAERLGFLGFPVVIPSLQPTR

SEQ ID NO: 34115 - protein, 110 aa, Oryza sativa
MTTKRRNAGRSKHGRGRCTPMHCFNCGRLCPKDKAVKRFVVRNMLDQASARDVAESSPIYSQGFPLPKLYMKQRYCIACAIHSRVVRGRAVVDRKIRYSSRDAAFKATRK

SEQ ID NO: 34116 - protein, 121 aa, Oryza sativa
MGRNQRCRRDPPAQPRFASPVGLVRLGGAPPRVGRHPARGGGRGALAGRREYTPPTPHLQFRWPRLVDGVQRQSPHRLAAHFVASEGGHRRMASYNGERCTVSCAREVFVEMPPRLCGSVL

SEQ ID NO: 34117 - protein, 129 aa, Oryza sativa
MSVESATFPLMLPSRAYELLEKEFEQDNPLLIKSRLQPMNTCYKGSVDDIADNATITLHFHGGIDLQLSRNATFMEITSMNGDQEERYVCLIVDKTVDGTAVLGLSPQLDHNIGFDLENKQISIYRKIC

SEQ ID NO: 34118 - protein, 7 aa, Oryza sativa
MARFVNL

SEQ ID NO: 34119 - protein, 263 aa, Oryza sativa
MSEKAEDAFLRMKTDGIMPTSSTYTSLLCAYAVNGLHEKAYLTYVDMKREGLKPSLETYTALIDMFRRAGDTEKLMETWRSMINEKVPGTRVIFHMVLDGLAKHGLYVQATDVIYEFRRAGLQPTVMTYNILMNAFARGGQHYKLPQLLKEMAAMELKPDSVTYSTMIYAYARVRDFSRAFYYHKLMVRSGQLPDVSSYKKLLNTLDVKAARKNIKDKNAIVGILKGKSSLKHRKEKKDEFWKNRKKRSMMNHVYGYPRKRFL

SEQ ID NO: 34120 - protein, 69 aa, Oryza sativa
MGANGHPPPASAAAQNGSHSSGGGGGGDGGGGGANPSPGGTVAALRHDPGLAREWSPEEQSTLDELLVK

SEQ ID NO: 34121 - protein, 190 aa, Oryza sativa; identical to SEQ ID NO: 30386

SEQ ID NO: 34122 - protein, 171 aa, Oryza sativa
MDAVGGGGYSPRFQRQASCSCAPSISMSRRYVRGGFDLAGDYDDDDEEEYGYLGAGVFDGVHHADGKPGAASRGAGAPASASASSGRGCGTRLKGLWRRILRENKKRILLCATGCVPASSSAAAAARVPYDAYSYAQNFDDGAAWVEPENLSRSFSARFAVPSRVLQRVAV

SEQ ID NO: 34123 - protein, 138 aa, Oryza sativa
MVAKRKAEFTVRTQQFKTNQLLNRRQFVVVVDHKNWNGTVPIKDVRKKVAALYKVPDEGQVSLFHFKTAFGGGQSRGFGIIYDDIAAMKRVEPNYRLLRNGLGKKRAVARKSQKERKNRDKKVRGISKGKAAAKKDKK

SEQ ID NO: 34124 - protein, 86 aa, Oryza sativa
MKNRFFSSDSSDSAASVLFTFMAEHWKCSFHVTVSWIKYWKCFSSTRGGRTLLVYIAFKIIVTFRIFSYSLNHANNLITLAESGVD

SEQ ID NO: 34125 - protein, 274 aa, Oryza sativa
MTTSSTFLHTWRNSTILLLLCLVAFFLVSSCSAEDCLVVCESTTCQDSVCDTDDGLCKMTPKDPFPESCCKTNKDCEDGDDCTINICDIDTNTCDLIPLCVPTPPDPNQNPGDDETCNENSDCVNESLCLSYLCVSNKCTSWVRSPLPDGCCMSVEDCPAVECSVSFCNFATQECFYQDEMGCQKSSDQQKTSNEGESDGDDSGPKRHTLLNDVLFLTAIVCVLVVFVLSAVVAFLYIKKLRPANKWRKLSASNPSSQSDDVSSLSGFEIHDDL

SEQ ID NO: 34126 - protein, 135 aa, Oryza sativa
MEGVKSLIMCMLVLGLVLQQEKIQVEAKSCCPSTTARNVYNSCRFAGGSRNTCAKLSGCKIVDGNCEPPYVHHTLHPEAEESEVVDFCKLGCASSVCSTMSTLFANEEANHAVDRCNEACRRFCTKEAETVTAVS

SEQ ID NO: 34127 - protein, 95 aa, Oryza sativa
MGRWLKPDVYPLIAAMTFVTGLCTFQLTRNVFMNPDVRVNKNNRKSAVLENAEEGEKYHQHAFRRFLATQRPEVFPALNRFFAGPATVARSDRHD

SEQ ID NO: 34128 - protein, 121 aa, Oryza sativa
MANPLHGSGPLRSRNASSSDEIQLRIDPVHGDLDEEIDGLHSRVRLLKGVAQEINAEAKFQNDFLSQLQMTLIKAQAGVKHNMRRMNKSIIQQGSNHVVHVVLFALFCFFVVYLLSKFSRR

SEQ ID NO: 34129 - protein, 117 aa, Oryza sativa
MARSSSSLLVLTVLVVAAAACSTTAAARSVPAEEKKTAAPVAAADVKQPETFHEGTVLIPGLGRFELGSTYVPDITGVDHSVPAAEHGQFLPGADDTWVPNPGFEVPNPFQPGSSSP

SEQ ID NO: 34130 - protein, 183 aa, Oryza sativa
MAGGSTSSSSSWGPSPALVTAVVALLGLGLAAYIVGPQLYWHASEALGRSTGACPACDCDCDARPLLALPEDCSKQFKDVKSRASGEETEKSFTELLIEELKQREEEATQAQQQADVKLLEAKKLASQYQKEADKCSSGMDTCEEAREKSSEALVEQRKLTALWEERARELGWKPGNIKPHQT

SEQ ID NO: 34131 - protein, 94 aa, Oryza sativa
MGSTNSPVVVVVPDPVVVGVGLHHPHPAAALISRRVAMARDYAAAAAVLRPPWLLDLLPFLIVLLIAAHVLALGYWIYRLATDGSRQPARSKKH

SEQ ID NO: 34132 - protein, 43 aa, Oryza sativa
MSREAMRVDQILGHQELLIAVNLCVWWIRCNHSTCTVLEWRLC

SEQ ID NO: 34133 - protein, 201 aa, Oryza sativa
MNPEYDYLFKLLLIGDSGVGKSCLLLRFADDTYTESYISTIGVDFKIRTIELDGKTIKLQIWDTAGQERFRTITSSYYRGAHGIIVVYDVTDQESFNNVKQWLHEIDRYACENVNKLLVGNKSDLTAKRVVSTDAAKEFAESLGIEFLETSAKNAANVETAFMMMAAQIKKRMANAPTAAKPNAGVRLTGTSVKESKSGCC

SEQ ID NO: 34134 - protein, 193 aa, Oryza sativa
MARLGRSAWLLAAAVLLYAAAAQPDCANATFQAGRTYRRCDTLPVLGASLHWTYHPANGTADVAFRAPQSSSGGWVAWGINTQGAGMVGSSVFIASQINATGAGAGGVSVVTTVLESFSPSLRNGTLRFDVPAPPAAEYSAGAYTIYATVALPGNSTTQNMVWQAGPVRGGAIAMHPTTGANLRSTKKHDFTS

SEQ ID NO: 34135 - protein, 145 aa, Oryza sativa
MKIVLKVPITCKKCKSCILQIVSRNKGVKSLTFDDEKSTLTVIGEVDVVVIVDKLRHPKKGKEKREGYMVEVMAVSDEKKEAEEKKKKDEEEKKKKEKEKEEEEKKKKECAEKLKQCAELQQCCRACRPYYVAVDDHPGYSCTIV

SEQ ID NO: 34136 - protein, 85 aa, Oryza sativa
MRSAEEPHPTRRCLLPCSRRAVTKRKERRGLLALPRLLLTRVGWTSGRGRQKGHMRWRRVFLGGEEGAIEGGLEVAAHGPWAAER

SEQ ID NO: 34137 - protein, 151 aa, Oryza sativa
MASSSNLLAMAIAVAAVLLAGNGNTGHAARHLADTTEAPAAAIPAVPAMPKPTIPTIVPAVTLPPIPAVPKVTLPPMPAIPTVPAVTMPPMPAVPAVPAVTLPPMPAVPTVPPNTVVVPAAVVPALPKVALPPMAAVPNVPMPFLAPPPKA

SEQ ID NO: 34138 - protein, 47 aa, Oryza sativa
MACHAPSTVTSPPYIPCTFVHTFAVVELTQGQVGRSLRLCRWRLGCR

SEQ ID NO: 34139 - protein, 89 aa, Oryza sativa
MPATAAARRTTAHQTSRPTSPPRNKCIGAMKDLWMHFEAWRVWHTEGSFWRLLSVYEAWDGDCAWIASNLRVTLTTEIIESAKYKSKFS

SEQ ID NO: 34140 - protein, 81 aa, Oryza sativa
MGMLAVEGTYDKMEALLNQDIHPVDILLMLAASEGDKPKLEELLRAGAKYDVKDVDGRTALDRAADDTREFILGFAATLAA

SEQ ID NO: 34141 - protein, 51 aa, Oryza sativa
MPSQKTFRIKQKLSKKLKQNRPIPQWIRMKTDNTIKYNMKRRHWRRTKLGL

SEQ ID NO: 34142 - protein, 33 aa, Oryza sativa
MVSSTPASFLQFSLTTLTYISKEHLLPGKIGCI

SEQ ID NO: 34143 - protein, 126 aa, Oryza sativa
MASNKIAPLLALTLLILFFGCAVTNCTGKPVARTPPSHDDHGRCPIDALKLRVCANLLNGLIGVKIGRGPDDCCPLLAGIADLDAAVCLCTALKANVLGLINLNLPVDLSIILNKCGKNYPSGFTC

SEQ ID NO: 34144 - protein, 88 aa, Oryza sativa
MKAFAAVVLAAVAVSSAVAIPDLPVSVCKDATYILPGARGAMCSGAGAAPAGKACPLTTKPLPSTPCPSLTTKPLPSTPCPSLTSKPI

SEQ ID NO: 34145 - protein, 197 aa, Oryza sativa
MEGEQQQQQQQSVAAVRPSLGKAPSPSFRLRNGSLNAVRLRRVFDLFDRNGDGEITVDELAQALDALGLEADRAGLAATVGAHVPDGAAGLRFEDFESLHRALGDALFGSLDVPEDGGGGGGGDEEMKEAFKVFDVDGDGFISASELQEVLKKLGMPEAGSLANVREMICNVDRDSDGRVDFGEFKCMMQGITVFGA

SEQ ID NO: 34146 - protein, 164 aa, Oryza sativa; identical to SEQ ID NO: 33145

SEQ ID NO: 34147 - protein, 41 aa, Oryza sativa
MLVGDVPWQMFVESCKRLRIMKGSEAIGLAPRAKDKYKNKS

SEQ ID NO: 34148 - protein, 250 aa, Oryza sativa
MSYFQATTYKPHNGIIVDKVAIGLGSTCKLLHERAKCSYSNRFIKLQEQVYPRLLLVAACHNRIGPVYASSGKGNSERVNDPFSMESLNKAIAGTKKQWPIQDMLIDQISKIRGSGSGGNGGGNKNSHEGSGGGSEDESLTESLYEMVQVLLATIAFILMYIHIIRGEELYRLARDYTRYLVTGKRTSRLKRAMLNWHNFCEGITNKDSVQESTFERSTSEPMWWQQPLKFVHRIEELYRGYFRPHAQES

SEQ ID NO: 34149 - protein, 104 aa, Oryza sativa
MAGAAAASAAAAAVASGISARPVAPRPSPSRARAPRSVVRAAISVEKGEKAYTVEKSEEIFNAAKVTRLLSFLSLLRGDASPRASFRGGGGLLHYLRHFCDCEL

SEQ ID NO: 34150 - protein, 183 aa, Oryza sativa
MAQRASRRPAAAAAAVVVAVVLAVSGGVGATPETACRAAAEEDRRVDYEFCVSRLSHHHDSPDADTWGLAKVAADVGVCIAGDAAYDAKAKLQAAKAGGEREALERCAELYDRMGSAFAAAYDDINRREYAAGKEKAGEAASLARRCDGAFADAGVAPSPLERQTAESVKIAIVCTAITNLVK

SEQ ID NO: 34151 - protein, 37 aa, Oryza sativa
MSNRCSKQKTQFASSSLSRLVTGLSGGWGSTRHGRMG

SEQ ID NO: 34152 - protein, 25 aa, Oryza sativa
MWLCLLTVSPGANPQYAAPFLYSFI

SEQ ID NO: 34153 - protein, 125 aa, Oryza sativa
MAGRLTAAGSRVLGGQGAAARAAVSALRHRAGMGLPVGRHIVPDKPLPTNDELVWDNGTPFPEPCIDRLAPHIGKYEALAWLCGGLGFFATLGLAATLNDKASKIPYTPKVYPFDNLREELGDRP

SEQ ID NO: 34154 - protein, 46 aa, Oryza sativa
MVVIICLGFSILIHLHAKQKFVTSFMFHPFVLVIYLKAVYMWLSFL

SEQ ID NO: 34155 - protein, 16 aa, Oryza sativa
MTAICSVVHMSSLTCA

SEQ ID NO: 34156 - protein, 52 aa, Oryza sativa
MRGGAPQLERPSPEPEGQRWASWSLEVAAAAAHSQLLTSRLGPLIFREKNAE

SEQ ID NO: 34157 - protein, 221 aa, Oryza sativa
MASSSFSFLLVAALLGLASWKAIASDPSPLQDFCVADLNSPVRVNGFVCKNPMNASADDFFKAAMLDKPRDTNNKVGSNVTLVNVLQLPGLNTLGISIARLDFAPLGLNPPHTHPRATEIFTVLEGTLYVGFVTSNPDNRLLSKVLNKGDVFVFPEGLIHFQFNPNPHKPAVAIAALSSQNPGVITIANAVFGSNPPISDDILMKAFQVDKKIIDLLQAQF

SEQ ID NO: 34158 - protein, 114 aa, Oryza sativa
MLGFFEVPSAEIISRRLALFAFIAGWSIVTSAETGPTFQLALSLVSCIYFLNEKMKNLSRASMTGFGVFVGGWIVGSLLVPVIPTFAIPPTWSIELLSSLVAYVFLFLGCTFLK

SEQ ID NO: 34159 - protein, 48 aa, Oryza sativa
MIISWLLGTNQIRWFYFSTFLTCSYGTKVERIEKVSHSQPLMKDSSKS

SEQ ID NO: 34160 - protein, 77 aa, Oryza sativa
MVARWRRQVVLSAPAAGGAADFFGDMVTKQLEPIQFWKVFDAGERLYPAQGPGYLLHLRHSSVSEGDFVYGRAVDSK

SEQ ID NO: 34161 - protein, 65 aa, Oryza sativa
MCCCPSKACCICTLIVLVLVAVGIVFGFGVYTRGFHKLTSSIHDASSTAAGSLRAHQFFAPPPPY

SEQ ID NO: 34162 - protein, 57 aa, Oryza sativa
MELEAPSPARYLVGAAIMMAGVVLPLAYMIFRSKRSSSSSTAVAASSAPSSSFSKQT

SEQ ID NO: 34163 - protein, 62 aa, Oryza sativa
MAPRIKENTTIFFAESKLWFSTGDTLLIFFLQYVFSVWVDNLESSKTIAENQTKILLGASAK

SEQ ID NO: 34164 - protein, 102 aa, Oryza sativa
MEASPPTSPSSLRHRLRTTVCCCFGSPGERRSGEKLRWRRRVAAGEFGYDPLSYALNFDDGDGDDDAADDAAAAFRYKNFSSRLPPSPVAAPARRSTAIAIS

SEQ ID NO: 34165 - protein, 37 aa, Oryza sativa
MSNWPLVYCSFFLSFFFLGWLVVYALPCSLLLPHSLT

SEQ ID NO: 34166 - protein, 166 aa, Oryza sativa
MQQMRSAAAAPCSLAAMLLRRFAYTSYSSSCGPIRRHAAVALSSTTTTTTRFAAWSPPPPSGGARSRGFAAWASAPGPAGSTDSPAMQALETKIKEQLEADTVTVVDTSGDGRHVCIDVVSKVFEGKSAVNRQRMVYKAIWEELQSTVHAVDQMTTKTPSEAAANQ

SEQ ID NO: 34167 - protein, 61 aa, Oryza sativa
MDRAEHLEPFYPQAEVQWLAAPRFPGVGIVSPIPSGGVILNSVWSSSSRTGRVNPSKMDVL

SEQ ID NO: 34168 - protein, 48 aa, Oryza sativa
MRGNPIAIFFIQVGVTTSITFTLPPDIFRVISHSSSSAHWNPYTWTGT

SEQ ID NO: 34169 - protein, 267 aa, Oryza sativa
MISSNIGEVASIFLTSALGIPEGLIPVQLLWVNLVTDGPPATALGFNPPDKDIMKKPPRKSDDSLITPWILFRYLVIGLYVGIATVGIFVIWYTHGSFMGIDLTGDGHTLVSYSQLSNWGQCSTWNNFTVTPFTAGARTFTFDDNPCEYFHGGKVKATTLSLSVLVAIEMFNSLNALSEDTSLLRMPPWVNPWLLLAMSVSFGLHFLILYVPFLAQVFGIVPLSLNEWLLVLLVALPVVLIDEVLKFVGRCTSSSGPKRRTRKQKGE

SEQ ID NO: 34170 - protein, 90 aa, Oryza sativa
MAVAPTRAEALSLFRSLLRTARQFSDYNIREYTRRRAADAFRENRALGDTAAAAAAFADGKKQLEVAKRQAVVYSLYAPKAKSIMEMKLQ

SEQ ID NO: 34171 - protein, 53 aa, Oryza sativa
MEQSQGMLQDLLESDVSILTNIEKSLQDNVQIFQANIQTLDERMNHLLSSHRS

SEQ ID NO: 34172 - protein, 20 aa, Oryza sativa
MVEACIQPFSSTGFQRSRAE

SEQ ID NO: 34173 - protein, 103 aa, Oryza sativa
MHGHHLAGAADEAPADEHRRHGGPAAAAGAVEPPGELPLHLLPERLPVELVHGGADGELAEQRRHRGAHAAAALGEHHHRPLRRQPRHHLRHCSISYLASGRF

SEQ ID NO: 34174 - protein, 88 aa, Oryza sativa
MMLSPLVFASSKPQAARRRQEIGDAQGGARSSSQALDGGAYIRVMLLPAAVRILMKSQEAKIRGPAKLSAVVVRSSVMPPSCAHGLLG

SEQ ID NO: 34175 - protein, 105 aa, Oryza sativa
MAEEKKHHHLFHHKKDGEEESSGVVDYDKEKKHHKHLEQLGGLGAIAAGAYALHEKHQAKKDTENAHGHKVKEEVAAVAALGAAGFAFHEHHEKKDAKKHAADQY

SEQ ID NO: 34176 - protein, 40 aa, Oryza sativa
MTYWNFSVGTHSQNILLFCITFALCVLLVCSTREHQTRRL

SEQ ID NO: 34177 - protein, 187 aa, Oryza sativa
MPRRAPPLQSHRRRGGGWRRGGAEEEEEEEEQVPRRAAAAMGEVGCGDPRPSPSGAQVAGDVRHRRGGRQGVRPRRRRVPRPARQAQLPVPRAALRARRQQWRRQRRRQVRHIVSVAAQRRRRRASRAHAVAAGRRRRRRRRRRRDRGPALGRLARPDAAGRRRAQLVPTVVRFLELNVVIRSQPLE

SEQ ID NO: 34178 - protein, 117 aa, Oryza sativa
MMTMQLKLLLPAAVAVPPPSEIAGGGVEPFDAELAYYDSSWNTMIPAEEQLLRPITGYLSWPEQEAEEDDDQGEEEEDEKNEIDRLADKFIERCHERFILEKQESYRRFHEMLARSL

SEQ ID NO: 34179 - protein, 25 aa, Oryza sativa
MQCHSSTNGDACLLRTTGRSRIRPI

SEQ ID NO: 34180 - protein, 110 aa, Oryza sativa
MVASKKTKKTTENINSRLQLVMRSGKVALGYKQTMKSLRSTKAKLVLIAANTPPLVKSEVEYYSMLAKTPVHHFAGSNNDLGTACGKYFRVGVMTILDAGDSDILRSASE

SEQ ID NO: 34181 - protein, 159 aa, Oryza sativa
MDRVEEKEGNRFQEPASDRCEDNEDKEQDNSEESSSVDQRKEEEEEEKEGCEEATPAAAAAAAAPSFFAHPCSLLQYIARVCACCLGLSDSFCDPKASSVLVPEPEPAAADPSQEGEEDMKSSYFYMQEATTRVRAARLRPKPPGNPREGSGGNGGHHH

SEQ ID NO: 34182 - protein, 324 aa, Oryza sativa
MTTATTTTTLPAAAALLLLLLSAAAQLCSACPPAASQTAENNPRLQRAYVALQALRRRVTDDPKNLTGGWCGPDVCRYFGVYCAAAPDDPCAATVAGIDLNHGDLAATLPDELGLLTDLAVLHLNSNRFSGALPDTLPKLSLLHELDVSNNRLAGGFPDHILCLPNVKYVDLRFNNFCGEVPPAIFDKKIDALFLNDNHFDFELPANLGNSPASVIVLANIKLRGCIPSSVGRMAATLNELVVLNSGVRSCIPPEIGHLGELTVLDVSNNQLQGTLPESMAWMRSLEQLDVARNELAGHIPEGICALPRLRNFTYSYNYFCGEK

SEQ ID NO: 34183 - protein, 79 aa, Oryza sativa
MHTQLSISIGDSSEELSELIQCISCLVISSPHHKQQQLPGKNKQQQQLVIDEEENRGWLVGFQHKLADCCLHLPNQQTF

SEQ ID NO: 34184 - protein, 140 aa, Oryza sativa
MMHTVAEVSSADYSACSASNSIQSYSDQNTKIALTKPGTRYFICGTSGHCSGGMKLAVTVSAAAATTPTPTASSSPPSTATPATPSSDPGMDTPSSTPDATTTPTTTTTKSTGSTGGASGSEARSVMGLLVGAVGLAMMG

SEQ ID NO: 34185 - protein, 185 aa, Oryza sativa
MAATSSTSTALFSLAIPSSRVVSTRGHRKASSGSGPFRAARIRCSNAASPNASAGAASAEEAAPPPKPQIDLEFVGPKADADGSFPVDRAAAGSGEKLLRDVMVENKIELYAAYGKVMNCGGGGSCGTCIVEIVDGKELLNERTNTENRYLKKKPESWRLACQTIVGNKENSGKVVVQRLPQWKK

SEQ ID NO: 34186 - protein, 172 aa, Oryza sativa
MAARLWAAAVAPATLNPPLLTLSASSSPSSSRLRRSVLGRLRSRAPRPADFVCRRAKNAAYDDYKFPDPIPEFAAQETSKFKEHMMWRLEQKKDDYFGEHVEEIVDVCTEILGTFLEHDYCGPGTLLVHPFLDMKGEIKERGLPGAPQAARAAIAWAEKNIDKDWKAWTGEY

SEQ ID NO: 34187 - protein, 44 aa, Oryza sativa
MYNRLTRSLTISTTTITSACTCIYTRMVEAFVLRAGTLVTPMYF

SEQ ID NO: 34188 - protein, 184 aa, Oryza sativa
MPLVGVDWSQNGVAHLFSAIKENGYQLLFLSARAISQAHLTRQFLFNLKQDGKALPDGPVVISPDGLFPSLYREVIRRAPHEFKISCLGAIKALFPPDSNPFYAGFGNRDTDELSYLKVGIPMGKIFIINPKGEVAVNRRVDTKSYTSLHALVNGMFPPISTSSEQEDYNTWNYWKMPLPAVDI

SEQ ID NO: 34189 - protein, 199 aa, Oryza sativa
MKQLHKSSPTHAPAAAHAPASKASKASRPGPRSWVGYLLREQRLLFVLLGALIASSFFLLRPYLFSLSPSSHVPDRRPLFSFASHTSSASGVPPGFRPPPRRVVVTGGAGFVGSHLVDRLLEQGDSVIVVDNFFTGRKDNVAHHLRNPRFELLRHDVVEPILLEVDRIYHLACPASPVHYKYNPIKTIISFSSRICTYL

SEQ ID NO: 34190 - protein, 68 aa, Oryza sativa
MLLHICHGRLLLTRDSMAERPLLPLAPWVEEGCGMATVDDIAAAVHHVLCIIDAEAASQMLLAGEASG

SEQ ID NO: 34191 - protein, 37 aa, Oryza sativa
MKAAQWIADGRIPGCIIVRPLSSRPVQELCLCVASCC

SEQ ID NO: 34192 - protein, 18 aa, Oryza sativa
MLLASFFFHGINNGVVIR

SEQ ID NO: 34193 - protein, 141 aa, Oryza sativa
MISAKKLAQLAKKLQMRMASAGGSRQKAVVAADDCCSTASLSLAGKGHCAVYTADGARFEVPLPYLGTPLFGELLTMSREEFGFAGDDGRITLPCDASVMEYVMCLLSRDASEEVERAFLSSMARPCRNIGVISHQFAVCT

SEQ ID NO: 34194 - protein, 43 aa, Oryza sativa
MPTLSSGLTFQPQRLMLILENGSSHVLDLLLMLLSVRKQLLLL

SEQ ID NO: 34195 - protein, 167 aa, Oryza sativa
MPLFASKFAPLIPRLRRLSTAAAAATATAAGEDPKLSRIADQLLELSPAELDDYSALLRLKLRLSLTSSAASGAAATGAAGDAASGSAGAEEAAAVKTSFDVKIEKYEAAAKIKIIKEVRAVTDLGLKEAKELVEKAPVVVRSGLPKEEAEALAAKLKAAGAAVALE

SEQ ID NO: 34196 - protein, 313 aa, Oryza sativa
MAAKAVMLALLVLVSTAQVSMGARRRMELYKPDPADMLSYHSGAVLQGNIPVSIYWYGKFTPAQKSILFDFLLSLSVAPYAAAPSVAQWWSSIDELYLSKAVQTNSNGQSKKTQVLVASQVSDINCSMGKSLTLAQVAALAAQAKPKKGGIALVFTAQDVTVEGFGMSRCGLHGSDAKSGTAYIWVGNPATQCPGECAWPFHQPMYGPQGAPLVAPNGDIGADGMVMNLASMLAGTVTNPFGDGYYQGSRDAPLEAATACPGVFGSGAYPGFAGELKVDQATGASYNANGANGRKYLLPALYNPSTGTCNTLV

SEQ ID NO: 34197 - protein, 58 aa, Oryza sativa
MIYRNWSLLSSTVVIWGGVATAGLAGIFLFGGKEKFQNYLCREGERLRQQDRAAMGKN

SEQ ID NO: 34198 - protein, 55 aa, Oryza sativa
MPRHLISDAHEWIIEIPTVPVYYPAKPQPRERAWRNQRGKKTLLSLTLVRLCEMT

SEQ ID NO: 34199 - protein, 82 aa, Oryza sativa
MGGGEATSGGGGGFRARVEHYLYSGEKKHVVAGIAIFAAIFGVPWYLMTRGAKHQSHQDYMERANKARSERLSSGQASSPKE

SEQ ID NO: 34200 - protein, 32 aa, Oryza sativa
MGNSALHKKMETASNAIKRDIVFAASLYVTGI

SEQ ID NO: 34201 - protein, 139 aa, Oryza sativa
MGIQEVKKRLHLHVEAQPESCKKKEQAAVWVLAGGGGGGGGGGEITVSLKPVKVSRPQLGDEEEEEEVTTPRGEECRLPAEAATCPPAPKKPRTAAVAIVAGGGRRCNCCDDDGGDSLEFFRVPADLEAVFANRVAKAN

SEQ ID NO: 34202 - protein, 81 aa, Oryza sativa
MRRRGGGPIWTPLTRPIRLGRIPPCARLLGGSVVFGRFRLDRVRGILRCSCCDGIQLCRCRNLMLTCWVALLLLILSVNLE

SEQ ID NO: 34203 - protein, 138 aa, Oryza sativa
MLRASGSHLASSIERCPTSPNYSPTSPSYNPSSAKYSPSHAYSPSSPRLSPYSQTSPNYSPTSPTYSPTSPSYSQPSPSYSPTSPYTTSGGPSPDYSPTSPNYSPSGSYSPTAPGYSPSSTGQQFSPQAADKDKEKAK

SEQ ID NO: 34204 - protein, 25 aa, Oryza sativa
MRRRLDGRRRWCPGGGRSGSGGALL

SEQ ID NO: 34205 - protein, 20 aa, Oryza sativa
MQLPIRRNRSFAKDIAGSQK

SEQ ID NO: 34206 - protein, 204 aa, Oryza sativa
MGEAAADERGLAAAAAGEDEEETSPIEEVRLTVPAGDDTALPVWTFRMWSIGLLSCALLSFLNQFFSYRTEPLIVTQITVQVASLPVGHFLARVLPRRAFRAPALLGGGEWSLNPGPFNMKEHVLISIFANAGCAFGNGNAYAVMIVDIIRAFYKRSISFVAAWLLIITTQVLGYGWAGLMRKFVVEPAHMWWPGTLVQVSLFR

SEQ ID NO: 34207 - protein, 133 aa, Oryza sativa
MAAKAALVLAVSLLVVAVASACTYCPEPPTPKPKPPAPRPPTPGGGAGSCPRDALKLHVCANVLGLVKAKIGAVAPYEPRCSLLDGLVDLDAAVCLCTAIKANVLGLNLNIPIDLSLILNNCGKICPSDYQCA

SEQ ID NO: 34208 - protein, 212 aa, Oryza sativa
MACINTFQSCSVLKGAKINGTKIGGGRGSPTFRCRASTFMDGSLRLEIDENPEAIISGEWPENFSLLSYDDLRAYLQSQEAAAQADNQRVALLSEAMSAPVLVATAQQTLEEVECHFETVSGLPVIDASLRCVGVIVKSDRARASHGSKTKIAEVMTSPAITLPSDKTVMDAAALMLKKKIHRLPIVNQDRQVIGIVTRADVLRELEALLEV

SEQ ID NO: 34209 - protein, 163 aa, Oryza sativa
MAAAMAAAVAARLPPAAARRARLEATTPSSPFAVAAPRRVMAPTRRPRLGTRLVVVSAQSNFSRVVQTAWKVGRDAVEAGTTLVPGSVPRPVARIGVTFVALSIALFLLKSVVSTAFFVLAMMGLIYLGFLAMNPKEGSRVDEGANSSEDPVEEARRIMEKYK

SEQ ID NO: 34210 - protein, 107 aa, Oryza sativa
MESSLGGWPSYNPQNFSQVVPADPSAQPLNVVPATYIATHRTDPPPGQVITTDPKNILLRHFYQKSEEKLRPKRAAPDNLTPQNNGKQPRGPLSDGGGSQATASGRS

SEQ ID NO: 34211 - protein, 41 aa, Oryza sativa
MLFRYDGLIRLQKSVSFFVVREMQKSVSTLRSFSKSIRCLH

SEQ ID NO: 34212 - protein, 81 aa, Oryza sativa
MVVMGQLGRFMDGIKSKLRGGGGRKTGRKKEAAAMMTYDKMDKTESMRVEIRSRQAQKLIAKNLVAADSIGRRNKRFFLAF

SEQ ID NO: 34213 - protein, 118 aa, Oryza sativa
MESKVRCVWFLLVVAVVVAAGVETVRGAGECGRVPVDQVALKLAPCAAATQNPRAAVPPNCCAQVRSIGRNPKCLCAVMLSNTARSAGVKPAVAMTIPKRCAIANRPIGYKCGPYTLP

SEQ ID NO: 34214 - protein, 225 aa, Oryza sativa
MSSFTHFISLPLGIHPQLVDKLNEFKRSILTSNEYKAAGFRIDESIFAIPESLHLTVLMLELKGENIAKASSVLQSVSDKLMEALKNRPISIQLRGLACMKGSPDKAWVVYAPVLEVGEQGRLQQVCDIIIDAFTSSNLAPTSDEKRELKLHATVMNARFRKGYCPDASFDARKIFEKYAEHEWGEYLIPEIHLCQTRRFDESGHYYCCSSLPLPGNMQAERASE

SEQ ID NO: 34215 - protein, 85 aa, Oryza sativa
MDCAVVQIVMQVVLRRSICRLQEVFRVAVELGAAILAAVRLSGMASHRPTTPTSSPAAASRTTTTTYYYSPVVASMIGMSRLDRH

SEQ ID NO: 34216 - protein, 39 aa, Oryza sativa
MFLTLYEIFFLCVAMQATTEFLYTISHPKVVRTRRHFKF

SEQ ID NO: 34217 - protein, 141 aa, Oryza sativa
MATIVAWESRNLQLQGGGGGHGEDARGGDSTWRFRYSYWSSSQSYVITKGWSRYVRDKRLAAGDTVSFCRAGARLFIDCRKRAASVSSSSLVPPALIKVQLPPSRPVVDEEEAACGRRCLRLFGVDLQLRADASPALDLQL

SEQ ID NO: 34218 - protein, 67 aa, Oryza sativa
MIDRSILDVRCIGCQSAFLLVISGWLVMMVSERSLGVSSLCTLITTFFWFYRGKICVYFWCIIFGGS

SEQ ID NO: 34219 - protein, 62 aa, Oryza sativa
MRTLITKESGQDSSENTFLLDDEISMPISLEEIGDSMDSKEFQHIAPPPELVAIPAFQFLKS

SEQ ID NO: 34220 - protein, 44 aa, Oryza sativa
MIFFFLLFEPISIGRSGRHRILSLMRKIGCGMLLPALSQSCEPP

SEQ ID NO: 34221 - protein, 25 aa, Oryza sativa
MIDMEAEDDSLASRVDSVLEEILSD

SEQ ID NO: 34222 - protein, 100 aa, Oryza sativa
MRRAMERRPRDLVAVLALSCLLLLLPLLVSSVPMSRSLHLSSQQQQHPPSLNLSPDEMAAAAAARGLGRRPAARMDVEVNDYPGSGPNNRHDPPKGPGRA

SEQ ID NO: 34223 - protein, 105 aa, Oryza sativa
MKEYTLDEIRRLADTNPEKLAQEYAAARSATAELASRARAGLAARTANPPVGRFQTWIQGYGQRYIHTGSSKPIVHMMLIIGATGVGVEWWAHHRHAHAHSEEHH

SEQ ID NO: 34224 - protein, 62 aa, Oryza sativa
MFPGLIHHHRLLDADVGGGGGGSSAGLVLTADPKPRLRWTADLHDRFVDAVAQLGGPDRCSL

SEQ ID NO: 34225 - protein, 112 aa, Oryza sativa
MAPVKKTKKNAEGINNKLQLVMKSGKYTLGYKTVLKTLRNSKGKLVIVANNCPPLRKSEIEYYAMLGKVSVYHFNGNNVDLGTACGKYYRVCCLSVVDPGDSDITKQLPESH

SEQ ID NO: 34226 - protein, 166 aa, Oryza sativa
MVARLKLKGIAKKEIIWYPLFGQLYVLANHLRIHRSNPAAAIESMKEVARAVTKNNLSLILFPEDTRSKTGRLLPFKKGFVHTALQTRLPIVPMVVTGTHLAWRKNSLRVRPAPLTVKVLPPIETDGWVEERIDEYVEMVHSLYADSLPDSQKPLEPVNTGKKKMS

SEQ ID NO: 34227 - protein, 169 aa, Oryza sativa
MARHSRERSRSPSTSRRDKRGRSRSPRRESAHRASRSRSPHRSEKRRRRHSRTRSRSVSSSSSSSDSEHDGKTRRKESKKRKKPKSKRDKKDKKRRRKDGKKKKARKRSASSSPSSGSSSGSESDSGSDVVRSAISGKKIKRKLSRSDADVQAQKNRQQLLQFYNSMHD

SEQ ID NO: 34228 - protein, 49 aa, Oryza sativa
MALPSSSPTTATLDSCKDHRRFRRLSWMEASTSEEADDAVLLLHEKSKS

SEQ ID NO: 34229 - protein, 38 aa, Oryza sativa; identical to SEQ ID NO: 29624

SEQ ID NO: 34230 - protein, 40 aa, Oryza sativa
MGDGGGPLPPGSAGGCPPLLRSAGGGPPPPGSAGRCPPPP

SEQ ID NO: 34231 - protein, 35 aa, Oryza sativa
MVMVDLARRRLALGWTGGGQREGWQRPQLLRIWWL

SEQ ID NO: 34232 - protein, 47 aa, Oryza sativa
MSISLSPALACTRWKADEMACWLINQVGCFLYYCLSSLVVRQYDRLK

SEQ ID NO: 34233 - protein, 265 aa, Oryza sativa
MAAIGTLSQNNNLLPKFSEYRSQVMLGDLPSDFLRVQLLESQVYDPFLAPQENMINPNFLGYLTLTIVEARLIKNSGPLGFLRMDPYVRFHIGHVSRETPTASGGGKNPQWKISYRINLFKGIDKIHLEIFDQRSFTEDSFIGECNVNIPHDVLDGHTHQQWYTLMGREANLNENQGDILIIMSFTSTVNENMPIADSSSFPSSPTVSSSSSPSNSLVESARNYSSADIQTIKEMFPTIDQQLIIDLLDRYEGNKDLVVNHLLQN

SEQ ID NO: 34234 - protein, 216 aa, Oryza sativa
MAPAKVYGPAMSTNVMRILVCLEEVGAEYEVVPVDMSTGEHKRPPHISRNPFGQVPAFEDGDLTLFESRAISKYILRKHGSDLLRESNLSESAMVDVWLEVESSHFDGAMSPIIFQCFIVPMFMGGATDIGVVNESLEKLKKALEVYEAQLSKSKYLAGDFISLADISHFPTVYYLLASAHASVLEAYPRVKAWIDDVMQRPSVKKVTEALKMPSA

SEQ ID NO: 34235 - protein, 51 aa, Oryza sativa
MRNSGELILPGCPPPIRVFSASIHRRCGGLASLASPHLALVAGVAQIRSTF

SEQ ID NO: 34236 - protein, 33 aa, Oryza sativa
MGKLVDMLAKKFSETSNTSHAIVSHVESVKQLS

SEQ ID NO: 34237 - protein, 94 aa, Oryza sativa
MAAAAARSLLRSSASLLRAAPARSASASSSAARPSLRRALAAPPRILRSPVELSVCVESLLPLHSATAAARMTSMLAVPGQGLGWLTEADTDGV

SEQ ID NO: 34238 - protein, 139 aa, Oryza sativa
MAASLQAAATLMQPAKLGGRASSAALPSRPSSHVARAFGVDTGAAGRITCSLQSDIREVANKCADAAKLAGFALATSALLVSGASAEGVPRRLTFDEIQSKTYMEVKGTGTANQCPTVEGGVDSFAFKAGKYNSLGHFN

SEQ ID NO: 34239 - protein, 41 aa, Oryza sativa
MMKALVSSSCLPSSACGRRPSLPPFFVRLHVCWAFAAHVIN

SEQ ID NO: 34240 - protein, 130 aa, Oryza sativa
MVRVSVLNDALKTMYNAEKRGKRQVLIRPSSKVIIKFLIVMQKHGYIGEFEFVDDHRSGKIVVELNGRLNKCGVISPRFDVGVKEIESWTARLLPSRQFGYIVLTTSAGIMDHEEARRKNVGGKVLGFFY

SEQ ID NO: 34241 - protein, 96 aa, Oryza sativa
MAAGRGGVDERVRWRRGGDSCHAGGEAGADPEAEAEGDGVGERGGRGRPWRRRPRARRVRSARGSSGRPPPSPSASTPVWKFADVLLTICSKSSKN

SEQ ID NO: 34242 - protein, 2 aa, Oryza sativa
MA

SEQ ID NO: 34243 - protein, 65 aa, Oryza sativa
MQSRDCSSPVMCQWHSSSNASMPASDKFILHMLDPTHMFVQPHVADMIRSKISEFRDQNSYEKPS

SEQ ID NO: 34244 - protein, 20 aa, Oryza sativa
MLQFRLSGIMLARFRPCCYY

SEQ ID NO: 34245 - protein, 239 aa, Oryza sativa
MAKPKYSVLLPTYNERENLPLIVWLLEKTFRENDLAFEIVIVEDNSPDGTLQVAQDLQKIYGKSQIVILPRKGKLGLGSAYRDGLKLATGDFVFLMDADLSHHPKFIPEFIAAQAQSNCDIVTGTRYVSGGGVFGWDLRRKLTSRVANYLATVLLNPHCSDLTGSFRLYKRAVIEDIMASIQGLGYVFQMEILVRARMKQYSLAEVPITFVDRIYGESKLGAGEIVAYLKGLLNLFFTT

SEQ ID NO: 34246 - protein, 172 aa, Oryza sativa
MARKVGFVLVLLAAATLAMEAGTAAAQSSPQDFLDAHNAARRGEGVDLPDVAWNATLEAFAESVVASAAAGGACDLRHTSGSGYGENLYWGPAGKAWSAADAVGLWMEEKASYVYSSNTCTKGALLDCGHYTQIVWRSTTSIGCGRAVCNNGDVLISCNYFPPGNVPNERPY

SEQ ID NO: 34247 - protein, 82 aa, Oryza sativa
MRRRDRYRRRTPAGRRRCCARLGRGGSRSTPAALTSSSALLTSSSPPTPPTRTLGNQRNSVGSVSSLTVELMNCRCSLFCLI

SEQ ID NO: 34248 - protein, 96 aa, Oryza sativa
MSGKDQKKAAALEEKLELLRSVTKSSAANETSILVDASKYIKELKDKVSQEPEQLGSTSSSMPMPRSEAAERSVDEQMVRHAVLQAIKKCMDGSSI

SEQ ID NO: 34249 - protein, 210 aa, Oryza sativa
MSISVNGQSVVPPGFRFHPTEEELLTYYLKKKVASERIDLDVIRDVDLNKLEPWDIQERCRIGSGPQNDWYFFSHKDKKYPTGTRTNRATAAGFWKATGRDKAIYSSSNRIGMRKTLVFYKGRAPHGQKSDWIMHEYRLDDPSSASASVSVNLPSYYSSSSSSSSPMHGVAGDQGAQEEGWVICRVFKKKNLVHHGGHGGQPEQLLDGDR

SEQ ID NO: 34250 - protein, 137 aa, Oryza sativa
MARPRRRRRGRLRGRRSRRRRQGVHVRRRGGGAGGGGLHEESRQLSVERRGLLSPRVAADGIWLENCFGNINWILWSSVWKCRRSRWRWDFRADADLDHWFRREIINGDIKIHCQHSAVQSISSLLVPLNRAFQNKR

SEQ ID NO: 34251 - protein, 87 aa, Oryza sativa
MSSSYHPQTDGQTERLNQCLEAYLRCTVHACPTKWSSWLSQAQYWYNTSFHSALGKTPYEVLFARKPSHFGVADLGQSTVPDVQVWL

SEQ ID NO: 34252 - protein, 278 aa, Oryza sativa
MGLREIESTLPPGFRFYPSDEELVCHYLYKKVSNERASQGTLVEVDLHAREPWELPDVAKLTASEWYFFSFRDRKYATGSRTNRATKTGYWKATGKDREVRSPATRAVVGMRKTLVFYQGRAPNGVKSGWVMHEFRLDSPHSPPKEDWVLCRVFQKSKGDGEQDNPTSAASPAATFAGSSQAAVPGQAAYSSDDHTGSSMGFAPRQNEILDSSSHQLLNLAMLQCNSVLDHFPQEVNSSPMMGLAGSIGIGDEYGFFYDTGFEETASLGGMRFPQGWS

SEQ ID NO: 34253 - protein, 114 aa, Oryza sativa
MSILSQARSSKGTVYWMAPEVAKAKPHGPPADIWSLGCTVLEMLTGKVPYPDMEWTHALLKIGRGIPPEIPATLSEDARDFIIKCVKVNPNDRPSAAQLLDHPFVQRSLQHKGA

SEQ ID NO: 34254 - protein, 61 aa, Oryza sativa
MVKVATYFAMTFGAFLFWQSMDRVHVWIALHQDEKKERMEREQEIKRMQAELMAQAKESES

SEQ ID NO: 34255 - protein, 162 aa, Oryza sativa
MATGNLASVVVAVDGSEESMNALRWALDNLRLRPDGALVVLHVQPPPSIAAGLNPGPIPFGGPSEVEVPAFTQAIEAHQRRITQAILDHALKICSEKNVEVKTDVVVGDPKEKICEVTANLKADLLVMGCRAFGPLKRMFLGSVSNYCINNVVCPVVVIKGT

SEQ ID NO: 34256 - protein, 209 aa, Oryza sativa
MSSAIGWLQSSFGLDITGEWNRLVHLSVGGMTYSCQRKTFRARQEESVLCKMILDDAFPRSEDGAVVIDRDGESFGHVLNFLRTDKLLLSDSFDSWDLLLNDAAYYGLKSLEEAILAHPSFQRRQLRRALPNSVYLRFDDIQNPLGRVHLVPALPMLSVDNESGRLLHHGREISSVDEAATILTSAYEMTIQHWETRDVTTAVIFALRS

SEQ ID NO: 34257 - protein, 95 aa, Oryza sativa
MHRQLSLSPGPKQQQHDDGGNIGIGSDAAEVMAVPEESSAAKGRSVREERTIHLIPLLTFLCFLLLFLFSHDPSSADMSSFRDGGNGGNRRLRML

SEQ ID NO: 34258 - protein, 90 aa, Oryza sativa
MAVFPPAADEEEEEEAVAVLLSGEFFTCWSSLSESTDDETTRRTTTESMFYIPTNGSNDVGRRRRKVRSWSRGSFLGRGSFGMVFEGITK

SEQ ID NO: 34259 - protein, 53 aa, Oryza sativa
MAHQRLDCPDPAPLLRRPHMGRELRGASPRCGLGGRPPRRRDGRCSGWPLPAA

SEQ ID NO: 34260 - protein, 14 aa, Oryza sativa
MRIEMVYSACNSIV

SEQ ID NO: 34261 - protein, 136 aa, Oryza sativa; identical to SEQ ID NO: 33737

SEQ ID NO: 34262 - protein, 68 aa, Oryza sativa
MSNAAASAPTSNHKPTTMVAATPSDEQRPQAHRVVREATASAQRQAVALASNDLGLIEQQERRQPRHR

SEQ ID NO: 34263 - protein, 39 aa, Oryza sativa
MIKLIEEIRKLNWIGESPLVRSLTSYVKAFDPNLKIRTS

SEQ ID NO: 34264 - protein, 130 aa, Oryza sativa
MGIRHRHRDDPPLTLAKKGRWRGSIATAVVVALPLPTKVAGSSELASRNQIRYRCHSRRGGGEASELAGKSSATACEEGEREKPARSLWIRRGHGGDGRDPADRGGGGEQIETKGGGAVSAAVEKGIGRE

SEQ ID NO: 34265 - protein, 58 aa, Oryza sativa
MSICMYSFSFSGEISSSIEPMKTRFLYVHEEIIKGRDRHDLFLTKFLRPNSTSFGKLK

SEQ ID NO: 34266 - protein, 80 aa, Oryza sativa
MTAEKRRNTCSARLESTSTRISHAFHKATTLAMDPSIFVFQSAACSTIPAFLLPGHCLILSETLISSSLGERIFFSRWKA

SEQ ID NO: 34267 - protein, 100 aa, Oryza sativa
MIGEPADPFATPLEILPEWYFFPVFQILRTVPNKLLGVLLMVSVPTGLLTVPFLENVNKFQNPFRRPVATTVFLIGTAVALWLGIGATLPIEKSLTLGLF

SEQ ID NO: 34268 - protein, 50 aa, Oryza sativa
MAFRHWRLVCYCYPCCCLLARGSRLGTSKLSSLGETPPRFRTSEIYGTLF

SEQ ID NO: 34269 - protein, 202 aa, Oryza sativa
MAAATMALSSSFAVAAAAAGGAPWRGVVSAGRAAPRRRVALVVRAQSEPEVEPTKEETATSSSSPSPATTPTPSPAAAAPKAKPAASTKLWDVLAFSGPAPERINGRLAMVGFVSALAVEASRGGGLLDQAGSWSGLAWFAATAAVLSAASLVPLLRGETAEARSGGVMSADAELWNGRFAMLGLVALAFTEFLTGSPLVNV

SEQ ID NO: 34270 - protein, 69 aa, Oryza sativa
MADWGPVFIGLVLFILLSPGLLFQIPGKGRIVEFGNFQTSGLSILVHSIIYFALIAIFLLAVNVHMYLG

SEQ ID NO: 34271 - protein, 88 aa, Oryza sativa
MSRYGASSPPLSLISGCVRWCSPGRDPSLSRLGVVDGSVRRPRGTGWSTHGLARPRGRLRSSSPSPPSCPVVASSCELCSLTQQLFGV

SEQ ID NO: 34272 - protein, 30 aa, Oryza sativa
MWRASIGWTAAARARVSSSTQWRGGARLAA

SEQ ID NO: 34273 - protein, 87 aa, Oryza sativa
MLFFLSISLSPSSSLTSVSLSTHLSITAKQERRFSGFNHKFLLPITAISSLILPRFASHHFCQLIWLLLLAAISPGSIGNSTQLWLL

SEQ ID NO: 34274 - protein, 219 aa, Oryza sativa
MMTWSFVPRFLKLMIQLSSQTNELYQLASVAFCLLLAWCSDYLGLSLELGSFLAGVMISTTDFAHHTLEQVEPIRNLFAALFLASIGMLIHVKFLWNHVDILLAAVILVIIVKSVVVTVVVKAFGYSIRTAFVVGLSLAQIGEFAFVLLSRASHLHLVGGKMYLLLLGTTALSLVTTPLIFKLIPVVMHLGILMRWFPSESSMQNEDKATMLEAYNRSL

SEQ ID NO: 34275 - protein, 114 aa, Oryza sativa
MNGGSPVMTERERRAYRYGQASSPTARAVGQLGCIRKSWSNDSLSSYGGGGRAGGGGAQACVCAPTTHPGSFRCKHHRQNASNLGAAAAAPAQVVDVDADAKHQEAQEQEEKAT

SEQ ID NO: 34276 - protein, 52 aa, Oryza sativa
MLVVVFATIVILQQDLKVSLNKRLVSSNKAYGNESVQLLRQPPVPSPATLLL

SEQ ID NO: 34277 - protein, 109 aa, Oryza sativa
MPLEAGNAKNGEKIFKARCTQCHTINAGGSHKVGPNLHGMWNRQSGKAKGYDYSAANLERGVTWNDETLFEYLENPKKYIPGTKMIFAGLKKDKERSDLIAYMKQASQE

SEQ ID NO: 34278 - protein, 94 aa, Oryza sativa
MGFVMEFAENLILRMMEDPGKRDAAQREHVYRMKERCERTKAAWSLPLRPYGFWTFDRFNSQLSWDPQISHAPGRRDPYDDVLHRHSNPPPSSS

SEQ ID NO: 34279 - protein, 88 aa, Oryza sativa
MSGTIARKAAGNVFQVLTPTRNYGLGKKVTRGIWDRFPEPSFWEVTRVRPSHDLKHGKVYGRLTFRGKTDPVEKRINGPLKRDWRMAE

SEQ ID NO: 34280 - protein, 408 aa, Oryza sativa
MAGLPALTDDVLAEILVRVPSSCDLARASAACSSFCRIATSPRFLRRFRSLHAPLPLGVLCPDGAAAFHPAMPPHPSAPAARALALAADFAFSFLPPPARAWLLRDHRDGRFLLDRALAGGSTAFTDVAVCDPLFRRYVLLPPIPDDLAASVQNPYLQCGGDGGLQSRSSEIFLASCGSDAGGEEPLFAVIWMACCRGKLVAFFFSSESQQWRALSPPEHYALSTRRVMGVRLGQRNHAHGCFYWMITLTHRWLVLDTRRMEFLVVDISPVLSGRAMMFSNQIITLESMDGWTIVVVADVFRSDKRCVLYFYKFMYFSDRWQLQSKINLPEEWGYRFRGIIGASECYLFIKLDHPKQNLGDPVQQNAMYFMFDIKTMQLGRFSEICSGTVSEAYLYTGFPPSQSLPSV

SEQ ID NO: 34281 - protein, 32 aa, Oryza sativa
MLVTYADRLGRGTPGVMLRRPRMKLTRSLQRY

SEQ ID NO: 34282 - protein, 121 aa, Oryza sativa
MNKGKIFKLAKGFRGRAKNCIRIARERVEKALQYSYRDRRNKKRDMRSLWIERINAGTRIHGVNYGNFMHGLMKENIQLNRKVLSELSMHEPYSFKALVDVSRTAFPGNRPVKKEGLASIL

SEQ ID NO: 34283 - protein, 126 aa, Oryza sativa
MAMTVEVLAGLAFMFSTSILLQILACALYNNWWPMLAALMYVLVPMPCLFFGGGSTQFLTSRDGGGWFNAAKFLTGASAMGSIAIPAILRHAGLIETGAMFIEFTSFFILVCTVMCFHRATLDEDW

SEQ ID NO: 34284 - protein, 18 aa, Oryza sativa
MMVLAVSQFGSPVILLNV

SEQ ID NO: 34285 - protein, 44 aa, Oryza sativa
MNTRATRRRRRRRILDKRPKELEQQADRNRGTSETTYMAFFWVR

SEQ ID NO: 34286 - protein, 136 aa, Oryza sativa
MGRGSHGCSVLGSSLLLLFCLGSAAAQKASTWKTLSGNPPAIIAKGGFSGLFPDSSDFAYGFVAAASSPDTALWCDVQLTKDGAGICLPDIRMDNCTNIANVYPKGKKTYSVNGVSTPGWFSVDYDSTGLSKVNCK

SEQ ID NO: 34287 - protein, 67 aa, Oryza sativa
MCYQVKCGTCGKSTWAGCGRHVASVHSQIADGQHCACRAWPGVADKAAAAATDAAGEAPSSSLCAIM

SEQ ID NO: 34288 - protein, 34 aa, Oryza sativa
MLPFAFAMRPGRRTGRGVQSMPPHPLNTTKGISP

SEQ ID NO: 34289 - protein, 346 aa, Oryza sativa
MATDHNPKCVDCQTMAELVAHQRHAHGLCDGFPTILYYAREMKNLAEEIRSCSKEHLIELGAIDWQEFPDRWPNIFIRNSEQIRNSHVLFLASLHNPQTIFEQISLLYHIPKYLCRSLKVLLPYFPTGTMERIQIQGEIATAYSLAQMLSAIPLTRTGPCEVVILDVHALQNQFYFSPNIIVRLESTVDLLLDQLKARADQNEKYAIVFPDDGAHKRFGQMFDDKIFPKLICSKIREGDERKTTIKDGNPEGYHCMIVDDLVQSGGTIIECAHALLQKGAVNVSAFVGHGIFPNDSWKKFVHAENPKVRFHTFYVTNTYPNTEVLIDKPPFKVLSIAQLLCNISLT

SEQ ID NO: 34290 - protein, 59 aa, Oryza sativa
MLPVAAGATAAEPMACRSAARLRTHRYEHVATQNAHGSATSASPTAGSQCGASCDGSTT

SEQ ID NO: 34291 - protein, 39 aa, Oryza sativa
MLVLIPFRTEDIMEEAQIHMTITTTFFSAFLFIFWPEPM

SEQ ID NO: 34292 - protein, 85 aa, Oryza sativa
MATAKAATAPPTHRASSPAAASPPYPSAARIADSDCFPQYTASLKCLEANQDKSKCQQQFDDYKECKKREREARLERNKGRSLFG

SEQ ID NO: 34293 - protein, 72 aa, Oryza sativa
MQDWGPVLISWVLFILLSPGLLFQIPGKCRLIEFGKFQTSVVSILVHTILFFALDAIFLVAIGVQINLGSSP

SEQ ID NO: 34294 - protein, 210 aa, Oryza sativa
MAATSSTSTALFSLAIPSSRVVSTRGHRKASSGSGPFRAARIRCSNAASPNASAGAASAEEAAPPPKPQIDLEFVGPKADADGSFPVDRAAAGSGEKLLRDVMVENKIELYAAYGKVMNCGGGGSCGTCIVEIVDGKELLNERTNTENRYLKKKPESWRLACQTIVGNKENSGKYKTTSIPQERRVFSLMLITQNLAHENAFIHHDFSEI

SEQ ID NO: 34295 - protein, 12 aa, Oryza sativa
MNFVRGGSLLKA

SEQ ID NO: 34296 - protein, 120 aa, Oryza sativa
MLLKHAAAASPSSSPAGPPPPCRHNIAASRYAVAEVLPHGGARAAAASPSSSPAGRPPPRRHSSTLSAEALLHALAWRPTVELGRKRMQRRRSRSSRAGSDEPAAAVVLSHTLSATPGKS

SEQ ID NO: 34297 - protein, 224 aa, Oryza sativa
MAQAVRPCNATLLARLRDGEARFELLEDSAAAAAASPAPAPVWPGLSCFSRVATSLRGGWSGALNKVEHYGVQRVTGDGRCMFRALVKGMAKNKGIPLTSREEVQDADDLRMAVKEVICDDETERQKYEEAVIAITVDESLRRYCHRIRRSDFWGGESELLVLSKLCRQPIIIYIPEREYHGRGNGFIPIAEYGLEFSKDSKQWKKKVPVRLLYSGRNHYDLLV

SEQ ID NO: 34298 - protein, 166 aa, Oryza sativa
MKTALPILVALGAVAGFVAADNVPTGVNVTVGSSAQKESSNDIEAFQCWTKPDGLGAWYYDSKSNGPYRCTLKNSQDDWSMLNAYRSGGTEGVHWKYTENPNDGECLNNWKIYSSDGQTVTATVSGRTTTQGGWRWCALPVYRPGGVVGKQWDYCTCKWQTNPPHP

SEQ ID NO: 34299 - protein, 44 aa, Oryza sativa
MSRRLRRWRMGTVRGGIRVGFLPRVGRATQNLSRNCWTIYTFSE

SEQ ID NO: 34300 - protein, 102 aa, Oryza sativa
MARKNLLLLGVFLSALLFFFLDVAHARELAEASESEGKNVKPTGRSGVEDQKWGGAHGGGYGYGGGYGGGGYGHPGYGGGYGGGGGYGGGGGYGGGHGGGWP

SEQ ID NO: 34301 - protein, 94 aa, Oryza sativa
MLSAPGRRPMAHPLFFFIFLFLFFFLSLFFVRGGRPGDKHAARQGIISVVARRSAADARNGASCVRTARPRPRLRRGGQRGCGRGTEMNLLSFM

SEQ ID NO: 34302 - protein, 110 aa, Oryza sativa
MGGSGGGGGGGGGGGQGRIRRQSVVVASVTATASLLPSVAVVASGGSGGSGGSGGSGEWIRRQWRRPRAIRRQSATAAGGSGGSRGWIRSPFFSPEFVSFSWNQTLGSSS

SEQ ID NO: 34303 - protein, 110 aa, Oryza sativa
MHLGDGSVDSCLTACDGSQKDQDILSISLSAQKGKEIGCMSFDMHVKERGSEDLFLDKLNRRPSNHPERCERRGGFSMSCQTANLDLNMNDTYDGPKHCKKFDLNGFSWA

SEQ ID NO: 34304 - protein, 88 aa, Oryza sativa
MGSKKDAQTWADQWGSSGGDGSFKKGGGGGGSSGNSEKKTVAGNVKAAASEGLVKAKAAALVGAHKVKSGTSSGIKWVKGQYQKRTGK

SEQ ID NO: 34305 - protein, 103 aa, Oryza sativa
MLLACIFMLGDQQNQPARGDASPVHLMFLILGIGAAFGSNSGYALNPARDFGPRLATAICGWGSKVFTLRDSYWWIPIVAPVLGGVFGGYCYKIFIEYHHPRK

SEQ ID NO: 34306 - protein, 144 aa, Oryza sativa
MATPIESVQVFGRKKNATAVAYCKRGNGLIKINGTPIELVEPEILRVKTYEPVLLLGQQRFANVDIRIRVRGGGHTAQIYAIRQAIAKSLVAYYQKYVDEASKKEIKDILLAYDRTLLVADPRRCEAKKFGGPSARARFQKSYR

SEQ ID NO: 34307 - protein, 326 aa, Oryza sativa
MASSRVILALLLAAAAVMASSAQLDEKFYSNSCPSVEAVVRKEMVRALGAAPSLAGPLLRMHFHDCFVRGCDGSVLLDSAGNSTAEKDATPNQTLRGFGFVERVKAAVEKACPGTVSCADVLALMARDAVWLSKGPFWAVPLGRRDGRVSIANETDQLPPPTANFTELTQMFAAKNLDLKDLVVLSAGHTIGTSHCFSFTDRLYNFTGLDNAHDIDPTLELQYMARLRSKCTSLQDNTTLVEMDPGSFKTFDLGYFKNVAKRRGLFHSDGELLTNGFTRAYVQRHAGGGYKDEFFADFAASMVKMGGVEVLTGSQGEIRKKCNVVN

SEQ ID NO: 34308 - protein, 69 aa, Oryza sativa
MLGSSAARSRPSCYMAGGLTQWTVHVNARSAGRASRISLAGPLTGWSHASSTLICLFSFSSPIGNWNCG

SEQ ID NO: 34309 - protein, 113 aa, Oryza sativa
MGGAAPLLPSWRAAAAAWVALCLVPVVLSLAVLWLPLLCCAVAVFRFRRVRMMRSSAATGGRRRCGGGGGGRWPEKGEGEDSGGDRGMLLQKYLEDQMELVGEFAADPPPVES

SEQ ID NO: 34310 - protein, 53 aa, Oryza sativa
MEHIARFFFGVSGECAAMASCSLFLISYLSICACSICFSHLRTLEEMKVYGCS

SEQ ID NO: 34311 - protein, 125 aa, Oryza sativa
MLAPGNTVVAPPSSGMAIEGSEMAAERTRLPVIRSRIIRNMGIELAPYVCGLGPRRGEIYTPINSLQPIYILDGTLQVVARELCDNIVDMSSKIFFLTYYTIFFTCLYIFVLLSIIQKNSYAWVV

SEQ ID NO: 34312 - protein, 229 aa, Oryza sativa
MASSNFFLPTALIALVATQAMAFDPSPLQDFCVADRNSPVRVNGFPCKDAKDVNVDDFFLEANLDKPMDTTKSKAGSNVTLINVMKLTGLNTLGISMARIDYAPKGQNPPHTHPRATEILTVFEGTLYVGFVTSNQANGENKLFTKTLNKGDVFVFPQGLIHFQFNPSYDKPAVAIAALSSQNPGAITIANAVFGSNPPISDDVLAKAFQVDKKAVDWLQAQFWENNHN

SEQ ID NO: 34313 - protein, 150 aa, Oryza sativa
MRLEMSPDNLLFFCSVAASAAAGFCLFSLYRRLARRCHHHHAAPAGGSEEEEEERRRLTAVASGLPAFMYDRLVRHSGKGASWTECAVCLGVIHVGAMVKLLPACAHIYHVDCIDLWLSSHPTCPLCRCRVDHPGQGQETARQLAQLSPA

SEQ ID NO: 34314 - protein, 151 aa, Oryza sativa
MGRMHSSGKGMSCSVLPYRRAAPAWVKTSASEVEEMIVRVAKKGQLPSQIGAILRDAHAVPLAQGVTGGKILRVLKSRGLAPEVPEDLYFLIKKAVAMRKHLERNRKDKDTKFRLILVESRVHRLTRYYRLAKKIPAFFKYDSTTASTLVA

SEQ ID NO: 34315 - protein, 117 aa, Oryza sativa
MKFAAVLVAAVATFTATASAAECPSTEVLRLLALANEPSIDKCESDSKFNFLPPPGIPTAAQLDRMCASAACTTTLAALKAIGPADCEITFSNGVTLNVKTVLDTYLSTCGRRNLRN

SEQ ID NO: 34316 - protein, 58 aa, Oryza sativa
MSKQTGAAISQSVPPSRVLVLRRPGPRRPLRQAAAVHPSSRPAADARRHHLLIVPGYS

SEQ ID NO: 34317 - protein, 47 aa, Oryza sativa
MCLFQLFEAFVSAFSSEFLASLLRDESLSEGTRAHILSPQQHHTTYV

SEQ ID NO: 34318 - protein, 196 aa, Oryza sativa
MATATSTLFSLSSLSASLPSPAQPAPASLSLRAVSPRARLSASYAAFPIGGIGAWAAATPASSGRWRRRGLEVVCEAAKTGTATGRRPDSVKKRERQNDRHRIRNHARKAEMRTRMKKVLKALEKLRKKADATPEDIIQIEKWISEAYKAIDKTVKVGAMHRNTGNHRKSLLARRKKAIEILRGWYVPNAEPAATS

SEQ ID NO: 34319 - protein, 40 aa, Oryza sativa
MSECKVQFSAVKNLPTDQGRGQGKGAAALQHISASRYAVF

SEQ ID NO: 34320 - protein, 28 aa, Oryza sativa
MEQSLLFFLLCVLVWSPLLSAARERIHS

SEQ ID NO: 34321 - protein, 119 aa, Oryza sativa; identical to SEQ ID NO: 33700

SEQ ID NO: 34322 - protein, 112 aa, Oryza sativa
MQGEYEWVVSCCCIIKPSANGHCYGCRNNGYVGMKHPNNDAYSGGHLDGYLPFGVNSYARNNDEELSVKDEEDMLRRMYKGLDKPGGFKRPIPKFATRIVWKTEEEAGVEAG

SEQ ID NO: 34323 - protein, 102 aa, Oryza sativa
MDTAADFGTASASQIVRVAEVAVAPLVRSLEPAAPLPTAVVPLLSRPSAEGDGELGTGGGGGDDLNGVLAMGDAPAMSPHISSVLLVCRHPQRWCPTKSSRR

SEQ ID NO: 34324 - protein, 87 aa, Oryza sativa
MCLLQEDQPCSTSQPSLCRYASSAHHGGGGRSDEATSSRNGGGVGGRFLASRHRKRSPSDFRRSGLAQSVSGVQGRNCSNAVVGRNE

SEQ ID NO: 34325 - protein, 212 aa, Oryza sativa
MRSAIISCSSTSEDQQAAAAAQAQPEESTWTDYFVDFMMSEEEKKSQEDHGASSYCSHGGDGVYGDCSDQKELEEEEGEEDSMISDAASCAPAAAALPDRYKELKKLKKKVFKALDHDDSLEDTASSPVNSPKVSALTQLELSPKRRCNTRDLTKEVGIGDDRGREGMDYADAMVEGVRFVDQSQKSVTPCGELKDKGLCLFPLSMLLHYHG

SEQ ID NO: 34326 - protein, 266 aa, Oryza sativa
MGRSPCCEKAHTNKGAWTKEEDQRLIAHINQHGEGCWRSLPKAAGLLRCGKSCRLRWINYLRPDLKRGNFTDEEDELIIKLHELLGNKWSLIAGRLPGRTDNEIKNYWNTHIKRKLLARGLDPLTHRPLNAAAAVAGHHHLAAGGSSCSPDATSGHSSCSDGDEYRGGIDLNLSISPPSSSSQPSSPPPPPHEAEARRAGATASYTYHHHYSETREKICLCLNHLGLHGGDECSCGGSSASSSSSPPPATASSRAFTFANASSSTV

SEQ ID NO: 34327 - protein, 96 aa, Oryza sativa
MASAAAAAASCRTRSWRGTRSGSGPAWRRPSSRPWRAAPASTSTPPTTRATTTTPRRPRTAPSCSPAPRPSPSTTTTDPPPPPPSPRCDLICCSLL

SEQ ID NO: 34328 - protein, 10 aa, Oryza sativa
MWGAAPGAGR

SEQ ID NO: 34329 - protein, 86 aa, Oryza sativa
MEGIHAGTVTMACSWLVLTAAMAVLASWLIRLVSLKWNSSHPCKADEGSRLPPGSRGLPLLGESLEFFTSSTSLELPVFFKRRLNR

SEQ ID NO: 34330 - protein, 56 aa, Oryza sativa
MVKALDSVSSFFNGVWVHVNFLAKLKGATQCPDLVPKFFFAEEVQRQHQFVVVGFV

SEQ ID NO: 34331 - protein, 85 aa, Oryza sativa
MAPSPVFCSKLSVKRVVPVLLGIMACVSLRRMLRSCGSPFRFLRECVRFACFRSWDGAVYSGGMAKWREGRNAWRQLRSWDDVIQ

SEQ ID NO: 34332 - protein, 24 aa, Oryza sativa
MDFSVRARIQSPHWSAAHFIAGER

SEQ ID NO: 34333 - protein, 142 aa, Oryza sativa
MASQIESHRSGAEIVNGDAICRKKSIELLEELGLPKGLLPLEDIEEFGYNRGTGFMWLVQKKKKIEHTFKKIKQTVSYANEVTAFTEKGKLKKITGVKTKELLLWLSVVEVYITDASPDKVTFKTGTGLSDTFDAAAFALGE

SEQ ID NO: 34334 - protein, 99 aa, Oryza sativa
MDREAKKEAFRKYLESSGVLDTLTKVLVALYEENDKPSSAVEFVQQKLGGPSISDYEKLKAEKLDLQLKYNELLETHKETCRQLDELKNSKNGSGNNTC

SEQ ID NO: 34335 - protein, 64 aa, Oryza sativa
MNANDVKVLFAVSAGVDEPSKLASEEVAVSSEEVVIVQRNEIRSRGVDPSVSGGKQPGINAAGI

SEQ ID NO: 34336 - protein, 176 aa, Oryza sativa; identical to SEQ ID NO: 30302

SEQ ID NO: 34337 - protein, 14 aa, Oryza sativa
MVVTGDGISARSTR

SEQ ID NO: 34338 - protein, 41 aa, Oryza sativa
MESCNGSPSEQLEGHTAPHAVCVLIVVASILLKGLLHHLGQ

SEQ ID NO: 34339 - protein, 174 aa, Oryza sativa
MYSLYSASAHRDCPLNNVHHEIAAVIVVVVVPPARLRAPPPAPLLRLQQRSGAVDIVQLARLGSLGRHPVAPDEVVQDLLHGRPRRRVLPRADHAEREHRHDVRQTGLLPDVGVDDVIERRAFLVPPPRPLGQAEVGCGVVRDLAGRQLQQHDAEAVDVHLLIHPLAVPILCKM

SEQ ID NO: 34340 - protein, 170 aa, Oryza sativa
MVAAKGARKINVGKRKGATLRDVSANKWIRAMAQHLKQSGKLFVPSCTELVKQSHGNQRAPQNPDWYFYRCAAVLRRIYVRPGTGYGGLSKAFAIKKNNGSRPEKTVRASTGLLHWACRSLEGLKLIGKGKESGRILTKDGRRKCDAIAFNVKSGRKAVGTGAGKKTAKK

SEQ ID NO: 34341 - protein, 190 aa, Oryza sativa
MAIMAARALLVVAMAAAVLGTALGATYTVGAPSGSWDLRTNYDQWVSNINFRAGDQIVFKYSPAAHDVVEVNKADYDSCSSSSPIATFNSGDDTIPLTATGTRYFICGFNGHCTGGMKVAVKVEAATGSNPAPSPMTPRPRTPTAMAPNAMPPTAGGRPVPPSNSASQPAGVASLVGLSLGAIVVGLMAF

SEQ ID NO: 34342 - protein, 163 aa, Oryza sativa
MIPRAPSLFHIEDGAVGVAASTKKPMPADSGELVGLRLIIQQSPRQRPPLSVLRRSAVRPSPAATAAASQDEAGAPAGRGFMGLGFLNCCYCCHKKLYADMDVFVYKGEHAFCSAECRSQQMAREERREIEMLVRRRRDAFHRRRASPPAKIGGHARLQIAAS

SEQ ID NO: 34343 - protein, 98 aa, Oryza sativa
MQEVRRRPRVDAAQPRASTAAATVGQHAGGAATAVGPRGSTAGQRDSDNHWPVRREVRRQREEEARPWSGGPLATAGLHGPARRGAQDWVSTAGEGKA

SEQ ID NO: 34344 - protein, 78 aa, Oryza sativa
MFFWPFLEGLLILANALAILNEDRFLAPRGWSMSEVSGNGRSKSLKGQIVGLIYATQFFRMPLIALNVLIIVVKLVSG

SEQ ID NO: 34345 - protein, 185 aa, Oryza sativa
MVSYVKVGRLARVLRGPREGKVAFITAIIDGNRVLMENPADEKMWRHVQSLQNIEPTRFAIDIAPNATAKDIKAALAKKDVLAAYTKTGVAKKVASLKALAESTDFERYQLRVAKRSRAHWSRKLFAAADAKKPTSFQAKLAAKIEKSTKKFGDKKLKARHERIKKHFAARKAKKAAKGKKTGKK

SEQ ID NO: 34346 - protein, 182 aa, Oryza sativa
MAMGDDYSKARQALAVSAHECSLVDAVSSAATPPTADDGEGHAAGFFEGFVLGGIRVDSVRPGLVDCSFTVPSRLTDRSGCLAAGAVVSLVDEVGSAASIADGRPVKVSTDMSVSFVSLAQARPGDRLRITARALGHKGAYSATHVLISNAATGEVVAEGRHSLFGRMKVVSTSTATATSKL

SEQ ID NO: 34347 - protein, 365 aa, Oryza sativa
MSAYCGKYKDELIRNAAYIGTPGKGILAADESTGTIGKRLASIGVENVEENRRALRELLFTAPGALDCLSGVILFEETLYQSTRDGTPFVDVLAAAGVLAGIKVDKGTVELAGTDRETTTQGHDGLGERCRRYYAAGARFAKWRAVLSIGRASSRPSQLAVDANAQGLARYAIICQENGLVPIVEPEILVDGEHGIEACAEVTERVLAACYKALSDHHVLLEGTLLKPNMVTPGSDAARAPPEVVAEHTVRALLRTVPPAVPAIVFLSGGQSEEEATRNLNAMNQVASRGKKPWSLTFSFGRALQQSTLKAWAGKAENVGKAQAALLAAAGPTPRRRSARTPATPPPARASPRTSTSRTTSTEAL

SEQ ID NO: 34348 - protein, 61 aa, Oryza sativa
MRAIASSCSSPARGNGQNLLKKLPCSCTGKNRIERNSQWKRVFLSHVMCLFSPFQLGLHLW

SEQ ID NO: 34349 - protein, 179 aa, Oryza sativa
MMCRKFHMPSVEIHSLMKQRQRIASLAKFKSLQVPILFATDVASRGLDIPSVDLIINHNVPFVPKEYVHRVGRTARAGRCGTAITLVTQYDVKLMHKIEDRVGKQLSEYRVKEKDVLKLLVEVSMTRSQVEIQLDEEDFGEAEKINKRKHRLLQQELLAESSSAITEEKSKKKRKKSEK

SEQ ID NO: 34350 - protein, 55 aa, Oryza sativa
MPLMAKKILICVCFLCYCFQHHSKNKKCFVCNKPTLGIFNAAQEIRKKMAQDKKQ

SEQ ID NO: 34351 - protein, 37 aa, Oryza sativa
MTGKVFDEMFISMPFQFPFLIFCPSLNRIHQLQNTRL

SEQ ID NO: 34352 - protein, 68 aa, Oryza sativa
MEGGVGGEVDHLAGERATAQFDVEHMKVAWAGSRHAVDVADRMARLVASDPVTITFSLFLSFFAQIDR

SEQ ID NO: 34353 - protein, 70 aa, Oryza sativa
MARRKSNPHKGRGDEEYPMVAYACCPCYVLSSVIRGIGRCLFVACYPAIQCCGLDECRHHHTTTQLSHFR

SEQ ID NO: 34354 - protein, 96 aa, Oryza sativa
MGHHHKNDDKAAAAAGGDHRKEEKHHKHMEQLAKLGAVAAGAYAMHEKHKAKKEPENARSHRVKEEIAATIAAGSVGLAIHEHHKKKEAKKHGHHH

SEQ ID NO: 34355 - protein, 150 aa, Oryza sativa
MGSNTEVEKKKAPTALAPIAKPLAGKKLCKRTLKLVRRASEAKCLKRGVKEVVKSIRRGNKGLCVIAGNISPIDVITHVPILCEEANIPYIYVPSKEDLATAGTTKRPTCCVLVMTKPAKGEINEEVKEKLKSDYDHVVAEVAEVTSSMF

SEQ ID NO: 34356 - protein, 33 aa, Oryza sativa
MSRIHHCYRYFQCKTLSVKNDSGSLVLPDFVRI

SEQ ID NO: 34357 - protein, 101 aa, Oryza sativa
MCSVARWCLWFVHSFFFIIILFVCWMQWPKQLNAPLEEVDPEIADIIEHEKARQWKVTSNHQKKSAWIVQCLVHRRIAELWQSVWCRVWSSSRRRTSPRCQ

SEQ ID NO: 34358 - protein, 144 aa, Oryza sativa
MHRKGSTTTIELNGTRLCNGQVLGVHGGELDGVRELDGDDAEPAGADARGLAQRPVVVRGGVLHAGAHVHRVAAQDAPVAGHPRLGRRPRLPLVHHQPPPGAPRENRPGDLLRPQQLKKPRARRTTTDSFISLLRFSLSLIDDS

SEQ ID NO: 34359 - protein, 91 aa, Oryza sativa
MPPASSVASAVEKLQAAAQDAANSSSRSAAAFSEQAHQVLVPRAAGRVVSLSTCTKISAVSFAVGVVVGFTLKRRLRRWAARLLKRIKDDD

SEQ ID NO: 34360 - protein, 155 aa, Oryza sativa
MSTAPASSSATAPAAPAATPTLVAPAVPRIEATELGALLASADAKPLVVDVRDPATSGGFIKGAINVPKVLFDTDEFVDDFVDKHATPGAVMVFHCLNSNGRGPTAAGRVYDRIQAKFADDDKNKPQVHVLRGGFRVFSETYGLDSPLVDPSDLH

SEQ ID NO: 34361 - protein, 98 aa, Oryza sativa
MARRATARGAGLPAPFVVIVSVLLLLLLGSLPLHEVAAAEDEDQIGGGGLEHGASALKPDRGPLWRGCCNQYKEGGSYTGRGRFGPCIPTQPCPKPIP

SEQ ID NO: 34362 - protein, 104 aa, Oryza sativa
MAALRLAARKIAGGGGRRASMNIGGGSPVVAAEAEGQRRRLLQGLIYGGGGGGSPVSSSSSSYGTTFRRLMSSDAAADHPPSTPKVRIVQIPLDCMLPLLNFLI

SEQ ID NO: 34363 - protein, 290 aa, Oryza sativa
MAKPTPAPRATPFLLAAVLSIVVVAASGAEARWYGGGGGGGYSPSPSPVSSIVSEQLYASLFLHKDDAACPARGFYTYASFVRAATRFPRFAATGCADARKREVAAFLAQISHETTGGWATAPDGPYAWGLCYKEEINPQSSYCDATDKQWPCYPGKSYHGRGPIQISWNFNYGPAGQALGFDGLRNPEIVANCSDIAFQTALWFWMTPRDTKPSCHQVMVGEYRPGPADVAANRTAGFGLVTNIVNGGLECNRAGDARVNNRIGFYRRYCQVLGVDVGPNLDCEHQQPF

SEQ ID NO: 34364 - protein, 125 aa, Oryza sativa
MEEDEMRMREKLATMDERQAMAMRLTWISELVASNKKSIAGNKAYILALIDAIDNDRCPYTAAELSDKIRELREDRVTVIKTMIDSVRAATPAAGGDGGTRRRGADDNSGAIGCGPTHQSRTISR

SEQ ID NO: 34365 - protein, 40 aa, Oryza sativa
MPLGFLCSSPRFFCFLHQQNTSSCCLWSSYGLCTNFSQEQ

SEQ ID NO: 34366 - protein, 140 aa, Oryza sativa
MILTHAAVVRLYREKYQTLQKGIVGINVLSLWSYPLTDSTADLQAAQRYKDFTYGWILHPLVFGDYPQVMKKAIGSRLPSFSKVQTELVKGTLDFIGVNHYFSLYVSDLPLAKGVRDFIADRSVSCRGWPVFYLIMHINL

SEQ ID NO: 34367 - protein, 160 aa, Oryza sativa
MWRLKVAEGGAPGLRSCNGFLGRAVWEFDPNAGTPEERAEVERMRREFTLRRFERREAQDLLMRMQINLEWREYTINMGQASCNKHMLMTLPVPTTEILHPFYNIRASTIILMSQRYGLHVDSRGSWRDKGKRKIAGWRLICSPAVHYSQCSVASITAFN

SEQ ID NO: 34368 - protein, 52 aa, Oryza sativa
MWVLHVIEIRVAYLKFCKIRVVWFQQTHSILPVWTVEAVRKPASLPSGNFLH

SEQ ID NO: 34369 - protein, 228 aa, Oryza sativa
MVIQANINKKKHFVHQGLLYAELNEFLKRELAEDGYSGVEVRATVARTEIIIRATRPQTVVGENGRRMKELTSVIQKRFGFEDGKIELYAENVKNKGLSAIAQAESLKQKLMEGVAVRKACYGVLRFVMDSGAKGGAVIVSGKLRAQRAKSMKFAEGYMIRTGQPVKDYVDIAVRHVYMKQGVLGIKVKVMLPWVVGTQAGSHQKPQPDVVSVHEPKEDLSVPTVAHD

SEQ ID NO: 34370 - protein, 110 aa, Oryza sativa
MMSGGDGFADIVGRRYGSAKLPFNENKSWIGSISMFISGFLLSALMLFYFSCLGYFTVCWDLALGKLALVALAATVVECIPVNDVVDDNISVPLATMLAAYLLFGYSSCC

SEQ ID NO: 34371 - protein, 151 aa, Oryza sativa
MEAAAAASTGELLTGKSSAPLPHKRRSRDTTLCCCAHRQQKIAAFAGSRIIFSRHVIQVVVVCAARRRRADIQSETYVLMEPGEEEEFVSKEELEGRLRGWLERWPGGELPPDLARFDTVDDAVSYLVRSVCELEIDGEVGSVQWYQVQLE

SEQ ID NO: 34372 - protein, 281 aa, Oryza sativa
MHTKARSPVALVLLVVAMAASPALVAAAAQQQQLVPCMYIFGDSLVDSGNNNNILSLARANYQPYGIDFSGAAPPGRFTNGLTVVDMLADMLGLRPPLIPAYAMAQPGDFARGLNFASGAAGIRPETGNNLGRHYPFSEQVEHFRAAVRQMGPNAGSPERLGRCIFYVGMGSNDYLNNYFMPNYYTTAQSYDPAAYAADLLQEYSRQLAALHALGARKFVLAAVGDIGCIPYELARISNNQDDDDAAPSSDSGTGISISLGGVGLTAGDAYPINVSQLAAI

SEQ ID NO: 34373 - protein, 145 aa, Oryza sativa
MAFSSVFRRGNVKELISNVSVYTSAAESSGGLSLIFKRWATKKTAGSTKNGRDSNPKYLGVKKFGGEKVEPGNIIIRQRGTRFHPGNYVGMGKDHTLFCLKEGHVRFERNKLTGRKWVHVDPVAGHVLHPVYASDSTPAAEMEPL

SEQ ID NO: 34374 - protein, 192 aa, Oryza sativa
MAARLVFSLLLTVACSHAALAAAASSSAVEDTCAKATASGSRKDLAPFCVSTLQAAPGSAGADARGLAVIATNLTLANYTAAYATIKALQRRGGWSERERAALATCRQLYIEALNVVHSAIHALNTGQTQAYVADMGVVRRAATGCEDAFGFGGGGGGGGVGNQLATESPLHKVDDDAINLTTVATLIVLIL

SEQ ID NO: 34375 - protein, 74 aa, Oryza sativa
MDWVLEGSTDGGSTWNTIDARSSVIFDSRFYRKTFTVDKRYKANAFRFRFLRVRESNGNPRFQIGSIDLYGKST

SEQ ID NO: 34376 - protein, 32 aa, Oryza sativa; identical to SEQ ID NO: 33952

SEQ ID NO: 34377 - protein, 37 aa, Oryza sativa
MLQGHPRLHARATRVLCQVRIRGEGGSDGNLLLNSDP

SEQ ID NO: 34378 - protein, 174 aa, Oryza sativa
MRRRGTSGGGATPREVGGGRRRSSGVTSVPPRGAWRWRWPRCPPRRSSRSPRPGCGCVSRPCCCVPAPRACHHQVPPRACLAAPLLPELWRGYPAGGAMDPATTEQLQGGQIQPSGDGAGRSSGEGAGRSSGEGTERSSCGRWRLAGSPSLFSSPAPNPSPLSSSAPAVLGNDN

SEQ ID NO: 34379 - protein, 106 aa, Oryza sativa
MITRAKLVEQLREHQIRSAQSYSAALAVFSPSPHIASRRDLKVALFYAILFCFVMVSCYVALYLRWFRLSAIFVVFGILLPVGLKISRHRRLKRKRERRLLLPLSM

SEQ ID NO: 34380 - protein, 77 aa, Oryza sativa
MNEQAPGQDCISTISRTSPSRCSPDWRCCLRLRLRRPAMAADQAIIDRKEGLRMIKHKSRRYAELDDGGTRSVKSVL

SEQ ID NO: 34381 - protein, 236 aa, Oryza sativa
MADVLGCYTIKSHGTKVARLHMYDWIILLLLAVIDGLLNIIEPFHRFVGRDMMTDLRYPLKGNTVPFWAVPLIGIVLPCAIFGGIYFKKKNFYDLHHGILGILYSVLITAVITDAIKDGVGRPRPDFFWRCFPDGKDVYDNVTTGVICHGEKSVIKEGHKSFPSGHSSWSFAGLGFLAWYLAGKITVFDRRGHVAKLCIVFLPLLTAALVAVSRVDDYWHHWQDVFAGSLIGLQFQ

SEQ ID NO: 34382 - protein, 180 aa, Oryza sativa
MGNCVKAIACGGRHSAVVTDSGALLTFGWGLYGQCGQGNTDDVLSPTCVSSILGVKMQDIGAGLWHTVCTSVDGDVYSFGGNQFGQLGTGSDQAETVPKLVDASSLENKNARAVSCGARHSAIITDEGEVFCWGWNKYGQLGLGDSMDRNVPCSVPVDAYHPLNVSCGWWHTLVLAESPT

SEQ ID NO: 34383 - protein, 61 aa, Oryza sativa
MASSATSGRVLAIMLLMAIIAALMIINSPVAECRVAPDQVGVDPNGHCYFDPSSCRSPGAP

SEQ ID NO: 34384 - protein, 110 aa, Oryza sativa
MSLHLAVAPGLDNNPNNLVACTTFFSETTRAMLCLVRIETDPQDRTQLRLTVASGDQYLTFELKEYIKEHLIDIPRVQTASPPVPVQPQLPPAAVPATYNDPGAMLAGLL

SEQ ID NO: 34385 - protein, 110 aa, Oryza sativa
MASSASRFIKCVTVGDGAVGKTCMLICYTSNKFPTDYVPTVFDNFSANVVVDGTTVNLGLWDTAGQEDYNRLRPLSYRGADVFVLAFSLVSRASYENVMKKVQKKKISCN

SEQ ID NO: 34386 - protein, 52 aa, Oryza sativa
MLAIRKYIYISCTLCRTQECLEALHAWVVLAAHVLSGCSNLSYFPVNYLINS

SEQ ID NO: 34387 - protein, 245 aa, Oryza sativa
MELLSSDQICTGQENLDMIGNRYSSENAMEQPEDQKFSIASGSQLSSSQNLLNQKNHLDSTSPSNITSESYPERNCQIIPSGASFAERNLKVQKKVASSASGQLISDNVTGHPGHQTLTRRASYPCENHEIGKRSLGKRGLGHSDVAMGTSMVVDGSFVSSISSDNSVEENSFRQLQDAVSQLDVKTKMCIRDGLYRLARSAQNRQVFPNTMNNNGDSHNVKDMQNAETSGKYVDFSENMLFVPL

SEQ ID NO: 34388 - protein, 74 aa, Oryza sativa
MPAWSPGAPSCGPAPLSSRSASSTPGTAATGHASAPSPRTPRRRSSWPPTPSCLSASPSCSRHRRKTAVTTPES

SEQ ID NO: 34389 - protein, 55 aa, Oryza sativa
MFELVISIPAILLVLVIALGCYLLGRNRGRAEAASPQQFAPPAPPQQFAPPTPPK

SEQ ID NO: 34390 - protein, 104 aa, Oryza sativa
MVEPRNPTLPRFPVIVQHPTYADSRANFNGSDYLRWAGLTALSFPLGYVFGVKVHKRVAVPSMVVTGVLGSFGGFLLAYQSSSFRLQGRLENDGEVRKYIPAQE

SEQ ID NO: 34391 - protein, 43 aa, Oryza sativa
MEISLSEPREVAAQKGVGWNGCRWRRQKATAGRALQATAMAGT

SEQ ID NO: 34392 - protein, 124 aa, Oryza sativa
MAAKAALVLAVSLLAVAVAASACGTDCPPAPRPRPSTGSCPRDALKLRVCANVLGLVKAKVGAVAPYEPCCSLLDGLVDLDAAVCLCTAVKANVLGIKLDLPVDLSLILNNCGKICPSDFKCVH

SEQ ID NO: 34393 - protein, 25 aa, Oryza sativa
MRERVAARGRGRRGAGKEVVPTSLG

SEQ ID NO: 34394 - protein, 24 aa, Oryza sativa
MLWQKLKIDSTTLDAFLKKCIFCC

SEQ ID NO: 34395 - protein, 86 aa, Oryza sativa
MDSFSSPSSAGSTASTEHLMEQIKAQLAQAYAQEFLETVGNKCFAKCVTKPGTSLSGSESSCISRCVDRYIEATGIVSRALFSSQR

SEQ ID NO: 34396 - protein, 15 aa, Oryza sativa
MVVSLTGGAQVGVGS

SEQ ID NO: 34397 - protein, 126 aa, Oryza sativa
MVIDQKLLCLVFVSGVLVLANLADVSSAAASSLSRQQDQVARVLGRRGRELIGEGLSGHQYRHEGKHKEQHEVVAMEATTKETAETKAGWVDDDEGAREGLIDSADYSGVAMHSPSPPKRKHPKKP

SEQ ID NO: 34398 - protein, 209 aa, Oryza sativa
MAVLLHPSPRSVCLAFAIAVCLLLPCCFGSKAAVEMFEKACHCFDDHNVYSECKEELRLGVEGAFHVGKESVDEYCGGPCLMETKMALQCVEEVAHDGFRFYSGASLPAVKAALDTGCSYTPDRGTFEIRERKQCGDEYYHYSHHEQTTEQQYGGYYGSEEGEYPTTTSTLPASDYCYGAGASSLGLRYSLLQMLMLFSASMVLLLLVI

SEQ ID NO: 34399 - protein, 71 aa, Oryza sativa
MPLRAASFSTCRNTSSGCVAADCADDLAAPSGAGTDQYSAVMPENSSVTFGDDEADNGSHRSEGDEPEAKR

SEQ ID NO: 34400 - protein, 260 aa, Oryza sativa
MFEARLLHGSIFAKVIEGLRELVNEATWECSGNGITLQAMDSSHVALVSLVMRSEGFESYRCDRNMSLGISLVSMSKVLKTMGKDDSLTIRVNDDSDSIIIAMESQNQDKFADYELRLMDLDSEHLGIPDTDYSCTIKMPSSEFSRICRDMSIMGDSVLVCTTKEGVKFSAKGDLGQGSIRLVQTTNIEKEEEAVIIEMKEAVALTFAVRYLSMFCKAAPLSPQVGLSLSEDTPLMCEFKIAEMGHVRFYLAPKIEDAEN

SEQ ID NO: 34401 - protein, 196 aa, Oryza sativa
MLEAVIPAVWSAVHGWFTPAVLFLVLNIVIGTIAVTSKVTASSSTAGGGGEGVGYGAWAGGGGGGGGEQRRFSRVPSMALDRLRSFNLSGRFSAAASAPAAPEAAAVVGGVLDLGARDEATTAAVVKDVGGGREREEEVEDEQERAQAAHVVERSKSEATAAAADLPRLPARLRKSASDQSAFAHFEAAAAVGSDL

SEQ ID NO: 34402 - protein, 55 aa, Oryza sativa
MDWRAMGAVTGVKDQGSCGTNSGEHEQTNDYLILHASTGNYVIESNNHLIKFAIN

SEQ ID NO: 34403 - protein, 49 aa, Oryza sativa
MPWSHQVAVRSEACCCCCALRSEGNPGTPPKEASDLLLDASFSFLPHKF

SEQ ID NO: 34404 - protein, 216 aa, Oryza sativa
MPSSSSPPPPPPPATTATPRRRRRRRLLPSSAGGGGSSSSFSSTNSSSSSPFVSFLPPPTSPSPFHRFLPSPLRASSVPFSWEHRPGIPKTPARSSRSSSKQPPPGVVGGGKHYPSAPPLPLPPSLLSRAASDPYASAVVPAEYAASGAMPPHPPPGYYYPAGAKAARRLRLRRRRPRLADALAEWLSVLSLYRSCKRVAACFAAKAKPPPPAPAP

SEQ ID NO: 34405 - protein, 57 aa, Oryza sativa
MSLWKVLLMVIALICALHTTSGRPPVVGYPAPRPNGSSGTRCYEGCNPPGRDGNRDP

SEQ ID NO: 34406 - protein, 144 aa, Oryza sativa
MSSSSTSGSAEPAAAVRVLGSWTSPFVMRVVVALKLKGVEEYELLQETRGKKSELLLRSNPVHKKIPVLLHHGKPLAESLIIVEYIDEVWPASDGAPAILPRDPYCRAVERFWAQYIDDKFPRGTRVLRGTVAGEEPWLKCPPL

SEQ ID NO: 34407 - protein, 84 aa, Oryza sativa
MAERRMDELGRGSSWLVSTWVERTLALSKERRSRSGTQRKRRRRFLTMVPTACRHRRCASSDGFLAGTSKCSCRYLSSFSIPGR

SEQ ID NO: 34408 - protein, 122 aa, Oryza sativa; identical to SEQ ID NO: 33677

SEQ ID NO: 34409 - protein, 6 aa, Oryza sativa
MSHRYE

SEQ ID NO: 34410 - protein, 21 aa, Oryza sativa
MNFLVTEVKQSHSCQRLSRAF

SEQ ID NO: 34411 - protein, 108 aa, Oryza sativa
MVFGRSKSSSSTASPPPAAAASSAAAAACSELRAAYHECFNRWYAEKFAKGQWHKDDCVGEWHKYRACLEEHLEDKNLRQILLESETSAYYAQFDADSSSRKGGTSTK

SEQ ID NO: 34412 - protein, 253 aa, Oryza sativa
MKILVAVKRVVDYAVKVRVRPDRTGVETASVKMSMNPFCEIAVEEALRLRESGAATEVVAATVGPSQSADTLRTALAMGADRAVHVLHDPDPSRPLLPLAVAKILRALALQENPGLVILGKQAIDDDCNQTGQMLAGLLNWPQGTFASKVILNKEKATVEREVDGGIETISLDLPAVITTDLRLNQPRYATLPNIMKAKSKVIKKVTPEDLDVDIRSDMEVVEVTEPPKRKAGVILSSVDELVDRLKNEARVL

SEQ ID NO: 34413 - protein, 50 aa, Oryza sativa
MATAYAPMASQLMKSSLVCSKPRGLSGASLTRRPRFTVKAIQSEKVSRAS

SEQ ID NO: 34414 - protein, 241 aa, Oryza sativa
MGGDGKHTKLPWLGVARYAVTAVLAATVAATVVLAIRMVLRPVELDLSVANGAVSVERPESPSAASLVKYKVTLRAYNPSGRAVVHFGGDNLVRLIYGAAAQTELAAFTLPAFVVPQQESHFVTKSAFLNASALPASLAARLYDGETDQVVVQAVASLSFTIGGARGVSAGRRGHNFTFHCWPVSISSYYEVSGGEASCSQDTTEAAVAGLTHDRCIGGPCPEPYKNSGNCSGNNSTGIKG

SEQ ID NO: 34415 - protein, 74 aa, Oryza sativa
MTILCFSGLPATDGREERVAPGGVRPRRRHDQPKVRTQPRTQNNPPFFFFPATKIPRISLKCQPHFPPFFQKTT

SEQ ID NO: 34416 - protein, 84 aa, Oryza sativa
MPPLLRPPDLGFYWSRRAQRPADHGRGRGDQICNWGQQARGGNCIICKKLLAEDHTDDILASYAVAASSLLPPVAKASKMKTLN

SEQ ID NO: 34417 - protein, 154 aa, Oryza sativa
MAKPQLLLVVAAAALLLVVAASAKKSGDVTELQIGVKHKPESCSIQAHKGDRVKVHYRGKLTDGTDFDSSYERGDPIEFELGTGQVIKGWDQGILGMCVGEKRKLKIPSKLGYGAQGSPPTIPGGATLIFDTELVAVNGEPASKSDEDDDDSEL

SEQ ID NO: 34418 - protein, 128 aa, Oryza sativa
MAAIFPHLASTLPLLRAVRTPRRLPPAVSAVPPRAARVVLRGFRLPDPAARKFLCFEDSIGLQTEHQKPDSTSTGAKQNSSSDDNSSSTDGPPVLTILAGIIVFLLVLWVIGSLFTWIAGLVFGAAKS

SEQ ID NO: 34419 - protein, 41 aa, Oryza sativa
MAKWAAAMEMLLLVVVTPGCCRHARPRSSSGRRRRRRAALA

SEQ ID NO: 34420 - protein, 140 aa, Oryza sativa
MDAGGGGHGGAMAVSAAAAGMDEADAAFFSRRGNRCCCFWGPWASSSYSRAGGPAAAAEEEWWHRVGGGGGERRRWWRREEAQLRPAQLRAQFRRGPRRRVQPGGRLRRRTDRIFLLLLGGGGDKGGRHFLSFAAGRWCP

SEQ ID NO: 34421 - protein, 99 aa, Oryza sativa
MATLLLSSNKKPCSSSSSLLLLVLLLLLVFFAHHGSCSRPLPLPSPTPMQPQLKHESETASADTTTTTEEQVMQQQLSWLRSMKPRGRPQPSSPSKRTN

SEQ ID NO: 34422 - protein, 53 aa, Oryza sativa
MGAMGKLRVFVVQEPVVAASCLIAGFGLFLPAVVRPILDSFETAKQAPPTNSQ

SEQ ID NO: 34423 - protein, 136 aa, Oryza sativa
MSAEEVVADVPKELGEMDALKEVLKKALVHDGLKRGLHEAAKALDSRRARLCCLAQDCDEPSYSKLVRALCEEHGVNLILVPSGKQLGEWCGLCKIDATGEARKVVSTSCAVITDFGEESHALNVLLEYLKRQGEN

SEQ ID NO: 34424 - protein, 123 aa, Oryza sativa
MIQPQTLLNVADNSGARKLMCIRVIGAASNQRYARIGDVIVAVIKDAVLQMPLERSEVIRAVIVRTCKEFKCEDGIIIRYDDNAAVIIDQKGNPKGTRVFGAIAEELRELNFTKIVSLAPEVL

SEQ ID NO: 34425 - protein, 116 aa, Oryza sativa
MSQCSRPTSSFIRDLLNDLRDAVWSLRREKDELFVAVREGQAMARDVDTARRELAALKKHVVETDAKLVLLKEQNRRLEKDRCVLFFCFTGNLWSVCHGLGDELSSISECYYDGRY

SEQ ID NO: 34426 - protein, 113 aa, Oryza sativa
MKHLAAYLLLGLGGNTSPSAEDVKSVLSAVGIEADDERLNKLISELEGKDINELIASGSEKLASVPSGGSGGGAAAAAGGAAAGGAAAAEEAPAAKEEEKEESDEDMGFGLFD

SEQ ID NO: 34427 - protein, 113 aa, Oryza sativa
MNTKLVTLCVLLLVVSGAVARQCYQCAACPKPFKGNEAGVTKVDVGDDDYCFKSVLPIVGTIVKGSAGRNCDPVGSTYFCCKGDLCNGSTSTMFNVKLLTGMVAAFFAIRFFY

SEQ ID NO: 34428 - protein, 130 aa, Oryza sativa
MDISFALFTASGAVVQDGEYGYQNQFDATVDALYTAVAKLGGENVRVVVSETGWPTAGGVGASVENAMTFNQNLVRHVRNGTPRHPGKKTETYVFAMFNENLKEAGVEQNWGLFYPSTDRVYPISFHARI

SEQ ID NO: 34429 - protein, 69 aa, Oryza sativa
MSSSPHHGLSTMIRPPLPPSPPRRQPPSPAAELPRPVAPGERGEGMKKGRERMTCGAHVGPPFSNYYFV

SEQ ID NO: 34430 - protein, 93 aa, Oryza sativa
MTPTTPATGHTADAGHNTTLPTPATATRPTTPATSHTADAADASPCRQQQPVAQWQQVFLLLLILCSVNFVEENCIINMFYCHSPSTPIKTDC

SEQ ID NO: 34431 - protein, 38 aa, Oryza sativa
MNLDFIVLRSGHTTGSSSGAAKDDLVLHYQGRLTLVFM

SEQ ID NO: 34432 - protein, 45 aa, Oryza sativa
MPMPPSPSTCLPFLTMLPCSSSSPGGHSGDLVVAAAAAAAVVFSQ

SEQ ID NO: 34433 - protein, 43 aa, Oryza sativa
MLPSWPLAPPCWDSSFNASGRNGRLLFFFFFSETQRYGHESRR

SEQ ID NO: 34434 - protein, 134 aa, Oryza sativa
MTTMAKVITSVVIAAVVALAMVSLVAADSGTATFYTPPYTPSACYGFEDQGTMIAAASDVFWNGGAACGQQYVVTCTGPTNQGVPQPCTGQSVTVKIVDHCPSGCAGTIDLSQEAFAIIANPDAGKVFIDYQQV

SEQ ID NO: 34435 - protein, 19 aa, Oryza sativa
MMSSRHHKSFFSFSVLDKI

SEQ ID NO: 34436 - protein, 63 aa, Oryza sativa
MEEEIKGRVVVLGADAAADPELEAFHLPSADQPPHSHLLHHHHSPQSHPQPAAARCSKNELMK

SEQ ID NO: 34437 - protein, 80 aa, Oryza sativa
MAGSWVRTITSPFRKVFGAQPHKDGGKRPQQPNSGMMVQHVVVDAERSKLHGEVMACAYEDVQVMWDMLDKARIREFNSS

SEQ ID NO: 34438 - protein, 139 aa, Oryza sativa
MSTTAPRAVAERWRELHGEDHWKGLLDPLDADLRRSVIGYGELAQATNDAFIREAWSPHAGACRYSRDRFLEKAQGKRGGFKLEVDRDVELVNKNVDALKEEYHVPPSWSVQRDKGMVRGADGHWKLMDYEGEESSQDK

SEQ ID NO: 34439 - protein, 47 aa, Oryza sativa
MVTNHLFCAFFLTPSLMCLVLLCYHYALCSIDQSNVFSWLCTSVPIF

SEQ ID NO: 34440 - protein, 123 aa, Oryza sativa
MANACPTSTTSSLPLFFLFCFLLFSHARCNQGHHGSISGTDYGEQYPHQTLPEEHIHLQENIKVLNKERLPKYARRMLIGSTAPICTYNECRGCRFKCTAEQVPVDANDPMNSAYHYKCVCHR

SEQ ID NO: 34441 - protein, 82 aa, Oryza sativa
MPVLVRDGRRLDRYESRSALSSPKSAISPQICGGGDRGGGSAAAARGRGSAVARGRRSAVTTLGGSGWRVVGLGGDDACWQR

SEQ ID NO: 34442 - protein, 1 aa, Oryza sativa
M

SEQ ID NO: 34443 - protein, 247 aa, Oryza sativa
MPSPYTRSQLSEKLRRLKNKFRGMSARVARGLDPARLAPHDRDVLHLCSRLWDPANAATSPFAAAGDASSGNKRRRAAPRAGPLMPPDPSGDSNSHDYNGGISAGTPGAFGDGHGGEEMMYLEQESGHFGYHGDVAIAADGSLDGIVKVQPETLPALPSIGDIAVHSENGNGKAVVPRSNEHHMANAVLDIFEECLREVKANGITYGANVNGGSEFARRWRAQRIDELDVLSRRLRLLVEDAAAAGR

SEQ ID NO: 34444 - protein, 98 aa, Oryza sativa
MGKGDNDSFLLSSPLLPPNGSGALRQCKRTEEVCHDFLFFSPLLFLPTVVEGSGNGGEQRRRATAAAFAARVDPTAVTLPLHGSGGSGGGEAQRWRIR

SEQ ID NO: 34445 - protein, 277 aa, Oryza sativa
MVAVGLLVFVFLPVSPEVMEIDIDDGEISSVKDTTKEPLLEPGQEVKHNAVGFLEAWKIPGVAPFALCLFFSKLVAYTFLYWLPFYISHTPIGGEYLSDALAGSLSTIFDVGGVLGGVLAGHISDRLNARAVTAASFMYCAIPALFLYRTYGSMSIMWNICLMFITGMFVNGPYALITTAVSADLGTHSSLNGNSRALATVTAIIDGTGSVGAAIGPLLTGYISSSSWSAVFTMLMAAALLAGLLLTQLVCSELKGKATSNASKDVADAQGTYSDEV

SEQ ID NO: 34446 - protein, 40 aa, Oryza sativa
MQPKSGGKLRPRLNTGERPIANKYREGKMKRTLKRESKSA

SEQ ID NO: 34447 - protein, 173 aa, Oryza sativa
MARRAASRALRSEGSIQGRGGRAGGGGGGAEDARHVFDELLRRGRGASIYGLNRSLADVARGSPAAAVSRYNRMARAGADEVTPDLCTYGILIGCCCRAGRLDLGFAALGNVIKKGFRVEAITFTPLLKGLCADKRTSDAMDIVLRRMTELGCIPPEMKQQLTFLHKHFCQLL

SEQ ID NO: 34448 - protein, 104 aa, Oryza sativa
MMRRACTRATSRALVAPVATVALRPASTVAISVQGLHFVGTGLAAIALAGVGLGIGTIFGNLLVACARQPNLTRMLFNYAILGFALTEAIGLFALMLAFLMLFS

SEQ ID NO: 34449 - protein, 188 aa, Oryza sativa
MERSPEVVQHKAANRAAEDDHTTSIPWLKLGVVDALTAEAGKLPESNPKPAVAAPHRTFSCNYCMRKFFSSQALGGHQNAHKRERCAPRKSHGFQQQHLMVGLSPTAPSSFLHHMRVNPHATILKVNRGYSSADGVVVAKFHGGQMSSSWVPFAVEHGRGSVWPGSFKASSQEQKKRTEEDLDLSLRL

SEQ ID NO: 34450 - protein, 176 aa, Oryza sativa
MAASPAFLVLAVLLCAAAAVARAADDGAAGMTKFKVYFHDVVGGTKPTAIRVAQAASTNGSSTFFGAVVAIDDPLTTDAASSSSEVGRAQGSYTFADQKTFGLLMNMNFVFTAGDHKGSTLAIVGRNEVLSAVREMSIVGGSGKFRMARGYVEARTVDSGANSGETIVEYTVFVKA

SEQ ID NO: 34451 - protein, 247 aa, Oryza sativa
MAEPEPKKPKAKDHVDLVFDAAKVKAKAKAKAIDGDADVEIAKPAEQHGHGSRLLRRACCALGVVAAVAAVAMLVLSLTVLKVRDPTLSMDSVTVERFHVGFGTEASRPLRINVTLVAGIVIKNPNYESMRFGTSTTEFYVDGVPEYVGLGSAPPGEVAARGTSRVRVGMDVFVDRVGAAVVGEVLFGRGEVRLASHTAVDGRVSVLGGLYGRRAVRVAMRCRVVLRVSAAVVVAGSPSCVADFSSH

SEQ ID NO: 34452 - protein, 94 aa, Oryza sativa
MLRRCSSSLGIKGAGGDDDGLPGDVPRGHFAVYVGISRRRYIVPVACLAAPEFQELLRKAEEEFGFDHDMGITLPCDEATFHGVLASASATSIR

SEQ ID NO: 34453 - protein, 100 aa, Oryza sativa
MDEYLPQQKKVDEEQAAAVDTGKTNGKEAAKQHGHIRIDDDLVEYVNFGAVAQAGTAYFEKKYEAATGEKAADKVVRLIGKEETKDRDQEEKNKGVVYQF

SEQ ID NO: 34454 - protein, 41 aa, Oryza sativa
MMVVFLHCSALCVDLFLAKGMIGKFCCVFLCSGKEKRTSIS

SEQ ID NO: 34455 - protein, 77 aa, Oryza sativa
MVEPSKSGGGAALRRAAAGVALPVGVVYVIEGQEPAPLLFSTGAGEISDLSTARSSSSSWTFSPSHGVAHLRGLYTP

SEQ ID NO: 34456 - protein, 70 aa, Oryza sativa
MALVKLSLSASLAWPPAFLVVRHCLLQKGPIITKLFLFYLSIFFSFNFFVNAFPSILPMNEQVNKTSRFS

SEQ ID NO: 34457 - protein, 45 aa, Oryza sativa
MDGTVVVKVVIPEESLPQGIEGEVISAYTVKSIFDGIKKTYLVES

SEQ ID NO: 34458 - protein, 111 aa, Oryza sativa
MDMHAADARRPAHEAALRAVQKPPAKPWRASPSAAPGPAPPKVYRVEPREFRDLVQRLTGAPAPPPPRQPVAPAQPVPVRPAVDEAQLYAPWFGFPMPMAASLDAAHGALI

SEQ ID NO: 34459 - protein, 135 aa, Oryza sativa
MPTTDELIRVLEAVKLGYILPRFNGLDSMHDWASVLSLGEQQRLAFARLLLAKPTLVLLDESTSALDDMNERHLYSQIEAAGITYISIGHRKTLHKFHNKVLYISNSDSTDSNPRNWYLKPTEQMSIEESSSFAS

SEQ ID NO: 34460 - protein, 401 aa, Oryza sativa
MAAEGEDAAAARRRAAATDYRKKLLTCRELEARARTARDNLKNAKKDFGKTEDDLKSLQSVGQIIGEVLRPLDSERFIVKASSGPRYVVGCRSKVDKEKLIAGTRVVLDMTTLTIMRTLPREVDPVVYNMLHEDPGNVSYSAVGGLSDQIRELRESIELPLMNPKLFLRVGIKPPKGVLLYGPPGTGKTLLARAIASNIDANFLKIVSSAIIDKYIGESARLIREMFSYAREHQPCIIFMDEIDAIGGRRFSEGTSADREIQRTLMELLNQLDGFDELGKVKMIMATNRPDVLDPALLRPGRLDRKIEIPLPNEQSRMEVLKIHAAGIAKHGEIDYEAVVKLAEGFNGADLRNVCTEAGMAAIRAERDYVIHEDFMKAVRKLNDAKKLESSAHYSADFGKE

SEQ ID NO: 34461 - protein, 352 aa, Oryza sativa
MRRRILQRDVEIEVEAVDRTGTFLGSLWESKTNMASVLLEAGLAKLSSFGLDRIPDANVLMRAEQSAKQQKLKIWENYVEGEEVSNGSASESKQKEILKVVVTEVLGGGKFYVQTVGDHRVASIQQQLASLKLKDAPVIGAFNPVKGEIVLAQFSADNSWNRAMIVNGPRGAVSSQDDKFEVFYIDYGNQEVVPYSRIRPADPSISSSPALAQLCSLAFIKVPNLEDDFGHEAAVYLNDCLLNSQKQYRAMIEERDTSGGKSKGQGTGTILIVTLVDAETETSINATMLEEGLARLERSKRWDTRERKAALQNLEQFQEKAKKERLQIWQYGDVESDEEEQAPAARRTGGRR

SEQ ID NO: 34462 - protein, 418 aa, Oryza sativa
MASWENLGDVATVVQLTGLDAVRLISMIVKAASTARLHKRNCRRFAQHLKLIGGLLEQLRVSELKKYPETREPLEQLEDALRRAYLLVHSCQDRSYLYLLAMGWNIVYQFRKAQNEIDNYLRLVPLITLVDNARVRERMEYIERDQCEYSFDDEDKEVQDALLNPDPSTNPTVVLKKTLSCSYPNLPFNEALRKESEKLQVELQRSQSNMDMGQCEVIQHLLGVTKTVASSIPEKCATPKVSEKADSNHTKVSEDSAKTYHDDSPKKQKDACTAPRSSPPSSYGHDLVSSRGSYSDEWHADLLGCCSEPSLCLRTFFFPCGTFSKIASIAKNRPMSSSEACNDIMAYSLILSCCCYTCCVRRKLRQKLNIAGGCIDDFLSHLMCCCCALVQEWRKVEIRGAYGERTKISPPSFQYMEH

SEQ ID NO: 34463 - protein, 146 aa, Oryza sativa
MADSTARTVKDVNPHEFVKAYSAHLKRSGKMELPEWVDIVKTARFKELPPYDPDWYYTRAASIARKIYLRQGIGVGGFQKIYGGRQRNGSRPPHFCKSSGAISRNILQQLQKMGIIDVDPKGGRLITSQGRRDLDQVAGRVDVTIA

SEQ ID NO: 34464 - protein, 354 aa, Oryza sativa
MEVRSEQGLMAGRDLFGMPKSPPAAAAAPPQSVRMAYTSDGTPVFAPVSAAVSAPPGYQPGGAAGGNGAAALADSGGEPVAKKKRGRPRKYGPDGSMSLGLVTSPTAAASTPVAQGVPGPFSPTQPKPPASFLSSGWPDGVKKRGRPKGSTNKPRIDAVGSAGVGFTPHVITVLAGEDVSAKIMSFAQHGNRAVCVLSANGATSNVTLRQTATSGGTVTYEGRFEILSLSGSFLLTDHGGQRSRTGGLSVSLAGPDGRLLGGGVAGLLIAATPVQIVVGSFNSEGKKEPKQHAHSEPASAPSKAVPTAGMGPNSPPSRGTLSESSGGAGSPLHPGIAPPSSNSQPPFLSSMPWK

SEQ ID NO: 34465 - protein, 289 aa, Oryza sativa
MAPAAASLTAPNALAATSLPFLHGRKSGGGGVSVHAGAPSPSRAVAVVARRLWGSASSSRRMVVAAATAAEMAPAASGEEGKPFVEEMRAVAMRLHTKDQAKEGEKEPQAPPVARWEPSVDGYLRFLVDSKLVFETLETIVDRAAVPWYAEFRNTGLERSEQLKKDLEWFKEQGHTIPEPSAPGTTYASYLEELAEKDSQAFICHFYNVYFAHTAGGRMIGKKVSENILNKKELEFYKWEGNLSQLLQNVRNKLNEVASSWTREEKDHCLDETEKSFSYSGDLLRHIFT

SEQ ID NO: 34466 - protein, 202 aa, Oryza sativa; identical to SEQ ID NO: 30172

SEQ ID NO: 34467 - protein, 98 aa, Oryza sativa; identical to SEQ ID NO: 28718

SEQ ID NO: 34468 - protein, 63 aa, Oryza sativa
MPWATPLLRRRRRTRPPRARRRWTAAQQYVAAAVVRRRSGEVVRRRVAATAQRCVAAAAAVRR

SEQ ID NO: 34469 - protein, 391 aa, Oryza sativa
MHVLFDLNEIRSNNNKSQFIEEIIITGGGGFVFGADPGLLEKLPRAAEVAELRRAVGVVGADAEAFNGAALVDDVGAPADAQHLVAPLAGEDAVGVVSLLHLDELAGVGVLGGGAVEGEVTVLPPVRDGAVLAQRHLLQLVEHVGVRARLAVVVAPVVGDVEVDAVLRLAEVGGARLDVAHEDAELGVDVAEGPRVEVAQPHHVGDERRRPGQRDAEAGVVQEGPPDPWVPGAGGEEAVLRRADARPRRLDPVLEPDHRPAGEEDAVVGEAVGLELEQRRRQPRREAAGDVGAVPLQPLLGGPGGDEAQRRLRAEAEVVVEAVPRRGHVDAVVLPVDHLPLPRQPRHVAELVRAAPHRHLLREVRVVPRHEPHRPLELRLQLECHLQNHIK

SEQ ID NO: 34470 - protein, 279 aa, Oryza sativa
MAATALLRRARWALVDHPAVASFRWEPGRTPASTPSFAAAVICAYLATVFLLHRRVVPLPSPHPRALRAVSALHSAVLLALSAAMAAGCVLSVAATAPSAWWAFCFPPGGATAASGPVFFWAHVFYLSKVYELGDTLLILLGRRPLTLLHVYHHAAVIAMCYLWLATRQSLMPIALATNAAVHVAMYGYYLCCSLGLRWPPRWKRAVTELQIAQFLFSFAASAVMLWRHFAAGGCEGMAGWAFNAVFNASLLALFLDFHGAAYAAAKGKKSRSEVVKEE

SEQ ID NO: 34471 - protein, 193 aa, Oryza sativa
MMFLINQYRQNGKIKPNQALVVFLTTICAYSDEKSEIEELSMVALSGCIWLQAFVVTLDTNSFTYPQIILIWGNFIAFYMINLIVSAVPTLQMYTIMFRLCSQPSYWITMGLIVAVGMGPVLALRYFRNMFRPNAINILQQIEQSNGHTHTTRNMESRIISAGSYLTHLLADSRRNRGATYQPLLSDSVASDG

SEQ ID NO: 34472 - protein, 339 aa, Oryza sativa [sequence omitted]

SEQ ID NO: 34473 - protein, 234 aa, Oryza sativa
MSRRSGVATSRRTRRAAEQEVQPPPLFAANPIFLCEDDGSAGRLIKPGGGVRGYGPGSLHALVRGRGRGRDVAADDDDDDGGNKMLPLPLPPCRAHREGRGGTRVPTAWHVGPTIVVGPHGAVVRIRAPPPPQQHDPFLAAYVACTKGRAGAGNKKKKKKAKAAARGGCGMWNGWASGARYARVMSCRHGGAVTVLQGATPLPAVAGYAESPAHPTLDLSRLPAVLPGRRRVHN

SEQ ID NO: 34474 - protein, 302 aa, Oryza sativa
MAVVSGGKRALLVGVSYKGDTSRELTGAAEDVKNMNSLLKKFLFPEESIHMLTEELGAKDPLKAPTRENIMKEMRWLVEGCRAGDSLVFHFSGHGRQRKDDNGDEVDGRDEELCPVDYKVSGNILDDDINDAIVKPLTQGVKLHAIIDTCHSGTMLDLPYLCRFNRMGLCSRYKWVGQTRWRLSPKKEWAMVPVGGHAISISGCKDYQNSLEPDNTAGGGVMTWSFLEAVGSRRTMTYGELLDSMRAKVHHRLQQSSSGKCLVTGCLGSLAAKCLPCCFLSVQEPQLCSSKEFNVYEEQFIL

SEQ ID NO: 34475 - protein, 132 aa, Oryza sativa
MEREEGRDERRRSCSSPVGSERAGVGGEKGRRTAPPGGRQCRLHRGRAPKWGRMTGGGGWRGDGDDGLRLHRRRLFLHPVLLPPVVPAGCRRRCPREASGAASPALPSAPPPASPPHPPPTPAAAASWRTRG

SEQ ID NO: 34476 - protein, 23 aa, Oryza sativa
MISFGISSNYVHLGLTVQTMILS

SEQ ID NO: 34477 - protein, 113 aa, Oryza sativa
MKFAAVFVAIAAYVATTEAVACDAGETLKLAGLVFEPSRAQCEKDSGFTFIPPPGPPTSAQVDKMCASAACPKTIAALQKLNPSDCDLTFSNGVTLNVKKLLDTLTPACGRRQ

SEQ ID NO: 34478 - protein, 117 aa, Oryza sativa
MDGEMMEREAPQLSVRHFVERIVRAPWRALRPSATARIGKQRGAWPPPEMELGDARRLFGGPRRRAGMRHRIEGRGLAQGETEDFLHVEASQLVLPCPPICWLETWTTKWQTIIAEH

SEQ ID NO: 34479 - protein, 95 aa, Oryza sativa
MATRARPPLVLLLCLCLASCLSSAIGGVSAAGNGYRTTAFLVDEEGRRLRAELAAVAGAGGGSTAAYGDDVQRLDVYARCAQLHFSIFYRNCSMS

SEQ ID NO: 34480 - protein, 140 aa, Oryza sativa
MVHPVFHVSQLKGTQNFKHSIQSQLPNITDHIQYPVQILDTRIQKKGNKVVRQILVCWSNLPAVEATWEDEEELKQRFPSALPWGQVSLQGVGFVSSNTASRELPLSDEAQENTITRPLKRATRIKKSNVRLSGPEWACK

SEQ ID NO: 34481 - protein, 106 aa, Oryza sativa
MTKGTQSFGKRNCKTHTLCRRCGRSSYHLQRQRCAACGYPSAKTRKYQWSEKARRRKTTGTGRMRHLKVVFRRFRNGFREGTLAKSRKSQRQATATATTTAPATTK

SEQ ID NO: 34482 - protein, 166 aa, Oryza sativa
MSSSTFSGDETAPFFGFLGAASALVFSCMGAAYGTAKSGVGVASMGVMRPELVMKSIVPVVMAGVLGIYGLIIAVIISTGINPKAKPYFLFDGYAHLSSGLACGLAGLAAGMAIGIVGDAGVRANAQQPKLFVGMILILIFAEALALYGLIVGIILSSRAGQSRAD

SEQ ID NO: 34483 - protein, 195 aa, Oryza sativa
MNVAKQHVHSGYFLIEDTFYNDTRRSTVDYSKPILDWIKNSRNEAEEKWDAITSGVLKKRQKDLLMGLNVSNVPDFKSAKMEKTRFSDLNFRLGAGYLYCHQGNCKHMIVIRDMRLIHPEDTQNQAEYPLMTFQMQRRLQKCSVCQIFHATKMTVDDKWTLNNPCYFCDKCYYLLHYKEDNSLLYHHTVYDYLQE

SEQ ID NO: 34484 - protein, 231 aa, Oryza sativa
MELLDMVPADAIALRLYSLPAAAAAVGSLWAWLVAALAAAVGLWRIRAAAGVRSALVDDDDYKQRKAKQPRGALRPAGVGEARPARAEAAESEATTPTSPSEPSTPSKVRFTAYYGGEGDGADEGVVDSVRRCVDNDGDGEGETPTAPVRRTASGRRRWSTTTTTTTAPFMATPWEEREMAVRRRGDLGWYRHLDMAALDGSVVRLWDGEVTAASPGRRGRRALSELHLSL

SEQ ID NO: 34485 - protein, 46 aa, Oryza sativa
MPQQQQGMAVAGQTLLLHAMALALALAMSQREQALYRSCRWKKAMS

SEQ ID NO: 34486 - protein, 69 aa, Oryza sativa
MTWRCSTSRSTLISCASPASTGRIARSFCLTWILMVTKLSVKSFLGQGRENIVTASTLQSSASLTCQVT

SEQ ID NO: 34487 - protein, 72 aa, Oryza sativa
MSSSPFSDLVVVVLLVCAVVAAAVLLPLVCARRSMHQRLHGWNKSTSMLRDGFGVKYSGFLHIRPCGFCRGD

SEQ ID NO: 34488 - protein, 69 aa, Oryza sativa
MNTGSVSVSCKAMLALAWYCFFFCKPFENKLFEMILFQRIQGGIREASFLISMLRIFLFITIDTYYLAK

SEQ ID NO: 34489 - protein, 208 aa, Oryza sativa
MPAASVGEGERGDRRDIVGGEKAQGMSHKEVATAAVAGGGKAAGAEGSSSAGDSGGAPPPQAPCRGRRLPTTILRSAPSSSSMPPPRATLDLPRPVRPRTFTTSSVASVLDSSRCAGLGSPPMAAPPLSPPLSPLPSARSAASPLASYSARRRYHNPGVQNHGGCPRGAAAGERGSGQWERGQRDGRSGMCALVRRQSSTGCLAPICH

SEQ ID NO: 34490 - protein, 98 aa, Oryza sativa
MEFYVDDKWKFSKKSRNNGSRRIPGGSGAGGDPFLKRSASSRDQVIGRGRVGSGGGGGAAAAPSSFSSRCAGLVKEQRARFYIMRRCVTMLVCWKDCS

SEQ ID NO: 34491 - protein, 33 aa, Oryza sativa
MYTSYFNLVQLVGRFFNSANPAKMCPMHTYILY

SEQ ID NO: 34492 - protein, 51 aa, Oryza sativa
MAAAHHTGAIYAGCSTLEPLREHGRNTKHHHRILSPQILLYIDCICLPETD

SEQ ID NO: 34493 - protein, 35 aa, Oryza sativa
MPLPSSTPRKLVAAVAPKFDVLVCISAFPCIVARY

SEQ ID NO: 34494 - protein, 10 aa, Oryza sativa
MSARERFWCQ

SEQ ID NO: 34495 - protein, 69 aa, Oryza sativa
MAAALRATGGRRRLAALLVLMLFVMAAALQEAPVMASAARVLLQSGLLPTPYPTCNPGQYSCPPPTTVP

SEQ ID NO: 34496 - protein, 71 aa, Oryza sativa
MGIMLYVRPILVGPKRAYGVTCCIWKLGLVTGWWCTCGPYWLGQHPSAASAATALPVVFVVAAAGALIFSR

SEQ ID NO: 34497 - protein, 49 aa, Oryza sativa
MVNLVSRKARRRLFPWSSQPESTSVKWGWPVFCCYKGFQANDDPIGLKL

SEQ ID NO: 34498 - protein, 80 aa, Oryza sativa
MMRKQSSSSTSRATAAVVSLCKVLLMVIGLICALHTATVEGGRALAAAAVGGTGVDLPPTAPSYSSKCRYPYKCPPAGSP

SEQ ID NO: 34499 - protein, 178 aa, Oryza sativa
MTTPPAAHARGSVMAVVLAAGGPRIQQPWRRSSEEDASAQRSRTTKVASHERIRDGGGGGGGGIHGSGSKEALVYGAGGARARGSAAALSDGVCGARGWLRRQISGCGGGACGRNPAAVGLAAQLHTAARLLNTSPPRAFFLFVSFPWRQSTEPERELIFFNPCGRSLAIRTAHPKAS

SEQ ID NO: 34500 - protein, 87 aa, Oryza sativa
MRPITTASHPNSTSLCCSCSYPPYLPSKRRAARGDGNPRRRGTWNDRGEGVEISMVLSTPQRLQIGPVRHPTKSFWPKGVQVEEQEL

SEQ ID NO: 34501 - protein, 91 aa, Oryza sativa
MAKWAAIMAVLLLAAAWAPAPATAQCNAGQLAICAGAIIGGSTPSASCCSNLRAQRGCFCQYARNPAYASYINSANARKTLTSCGIAIPRC

SEQ ID NO: 34502 - protein, 21 aa, Oryza sativa
MFLPTVLAPWCIKFYCTFCEH

SEQ ID NO: 34503 - protein, 114 aa, Oryza sativa
MPRATSDAKLLIQSLGKAYAATPTNLKIIDLYVVFAVATALIQVVYMGIVGSFPFNSFLSGVLSCIGTAVLAVCLRIQVNKDNKEFKDLPPERAFADFVLCNLVLHLVIMNFLG

SEQ ID NO: 34504 - protein, 136 aa, Oryza sativa; identical to SEQ ID NO: 33429

SEQ ID NO: 34505 - protein, 92 aa, Oryza sativa
MCNYLRSIYKNMRLYLQERGLYLDDDFDHDEEIKYSAVRRDTDNTKFKSSTNVLSNTNQVDSLTRAGNTNPKALLSTAVRERSGLICTILHL

SEQ ID NO: 34506 - protein, 131 aa, Oryza sativa
MVSRSKQALATPLSLFLLHLLLAALALRLVAVASASVVISVAEEAENNATAPWATEERLVVVVELGSAAARQLQLGGGGVELHHRRRELAGKIPFGPLRPDGSACRPHCPAKSGLPYTRDCKVIYLCGRGR

SEQ ID NO: 34507 - protein, 153 aa, Oryza sativa
MVSREQKRASLHEKLQILRTLTHSHAVNKMSIISDASTYIKDLKQKIAALNKELGCAKNMNICEEPSPVVRVQVLDKGFLINVFMDKSSPGLLSSILQAFDELGLTVIEARASCSNSFRLEAVGGEHEEADGGIDANAVELAVMQAIKSTPGK

SEQ ID NO: 34508 - protein, 41 aa, Oryza sativa
MRSAASNRVAPPPPRSRHKTTNSPSRAAGTRPLSSFSFVPL

SEQ ID NO: 34509 - protein, 26 aa, Oryza sativa
MRARGKLKRSSFRDRWNMAEKSMYIS

SEQ ID NO: 34510 - protein, 230 aa, Oryza sativa
MPAVKWLMHWHPNQGATLNSQILAEACACAESLGGSKDGRWKTSIIFYRAMARDGASAAAAGGGGPPQQHPDVPRELLGVALHERPGLYFSILRAHRLVLQADSAFPQVMEKLQSYKARVTLNFEGFQYQLGDFCLRIGKCVPNNSETLRGIMMEVEYYPLSSIEKSRAVMEDFFDIWQETVAKKSLPGHFIHVESNFSEYGLSDHYSFQHTAVQYATCLQQLMAAVRPQ

SEQ ID NO: 34511 - protein, 97 aa, Oryza sativa
MAASLACAFFFDAEPVGEQGRHALDACALCTKQLTRDSDIFMYKGDTPFCSEECRYEQMQLDAVYARSAGRRQQQQYSGRADSRRGHRETRKVSVAS

SEQ ID NO: 34512 - protein, 130 aa, Oryza sativa
MIFLQILPGLRVLRGSVAGDKDQTAGEMSTTLQRLEEAFVKCSQGKEYFGGDSIGYLDIALGSFLGWIKAVEKIAGVELLNETKLPILAVWADRFCAHPAVVDVVPDADKLVEFTVQYGSVLNTVNVLPK

SEQ ID NO: 34513 - protein, 112 aa, Oryza sativa
MRASSTCPGRRRRGGRRRRRRWRPSSPRRRAAWRGASRPSTTMTSSRTLRWMAGTSGSGYARKEDMWQQPVKMSGGCTDQSCPNESFLYPCICSYSVTPCHVFSCNLFKLTR

SEQ ID NO: 34514 - protein, 136 aa, Oryza sativa
MKKSSLAVFLLLLTLASQGTWCAAERSHRINGAHLRPHVQVEESHITEGKKLLEIQVPRKLGHEVKFPKRMAIAHKGGSTGGGSTGGTTGGASNVNSGPADTRPRKNAAAMPAPATTTSILALAFSFAIAVSAFSF

SEQ ID NO: 34515 - protein, 60 aa, Oryza sativa
MRGKFVCFRVVCLYFVDVTTEDEERENERGGMVYWEAHACPSVMLWSEIFVHLRANSVQA

SEQ ID NO: 34516 - protein, 112 aa, Oryza sativa
MERKATIACCLLLLAVDVAATGAVPAAAWMEDDTVGIDLQLQVAPLAMVLAAAAGGGVDDDHELHRRVLQARGGYVDPSLVADRQRCIGSCSRPGRPYTGRGNLCIFQNRSC

SEQ ID NO: 34517 - protein, 70 aa, Oryza sativa
MQDWAPVVVGVVLFVVLSPGLLIELPGTHRWVDFGSLRVTGKSAVVHTIVFFVLFAIVVVACKLHIYTGA

SEQ ID NO: 34518 - protein, 81 aa, Oryza sativa
MCDGSGAAGSTGDGLDVRRRRRGGLDAPRCATAAAWRPRCATAAAAAASLFLLSAMNFVDGGGNDGLSLPPFCCEFCCWIC

SEQ ID NO: 34519 - protein, 165 aa, Oryza sativa
MEQPLPTAAAEAAAAGGDGEAYRIRPLELADISRGFLGLLNQLSPSPPLTEEAFRARFEELAALGADHLVLVAEDAATGRLAAAGAVLVERKFIRRCGRVGHVEDVVVDAAARGRGLGERVVRRLVEHARGRGCYKVIINCTPELTGFYAKCGFVEKNVQMGLYF

SEQ ID NO: 34520 - protein, 125 aa, Oryza sativa
MATRMAAAVAAMVAAVAISLAAGGAAQSSPSTPSCASKLVPCAQYMNGTDTPPAACCDPLKEAVKNELKCLCDLYASPEIFKAFNINISDALRLSTRCGISQTTSMCPGNQLILPSSSSFYPLFF

SEQ ID NO: 34521 - protein, 180 aa, Oryza sativa
MRRSRSTPPCSTAPPSRPQTRPSSAASSRSTTSRASTSASSSRPLPRHVAPAPEIMFKLEAREREYVRKFLQERAAAAAAAGRGGAPTGDSRRDRPRVPRQRHRQAIHAPRQHLRQRRRQPRAAVVASPPGRGPHRAHRRSAPLTTMPSLRASSRRRRAGERAAAIFTFFLFFFRASGII

SEQ ID NO: 34522 - protein, 63 aa, Oryza sativa
MAEEKKHHHLFHHKKDGEEESSGVVDYDKEKKHHKHQALGAAGFAFHEHHEKKDAKKHAADQY

SEQ ID NO: 34523 - protein, 148 aa, Oryza sativa
MRPAGAADMAMGGIGGAAASTSSVPAMPAAVAPPPFWSTPTPYLFIGFGVVMALIAVALAVLLCTRRKDGGRGVGGEERGDVVVPPGMMSVRVLAPLDREAPPRVVVVMAGDDSPSFLASATPLAFAAAAATGVPLAPAPKVVAPPQP

SEQ ID NO: 34524 - protein, 66 aa, Oryza sativa
MSPADGSSGVDGSRTWRQQWQPRRPNERWRQAEFSSAGMLLLDGLMGDLCFVIWRMLLDKSMVVWG

SEQ ID NO: 34525 - protein, 163 aa, Oryza sativa
MGLAFSAFGLPGWSSIPTGQVYDQYFKDKKTDSFEAFHVAYVEFCKDFNTVLPGQDFDTPSLEKIQKFYDDTWKLINEDQEKKKAFMDYIRDNVKEAAVDDSLFIMAGLAAPAGAIVLKRTGQSIPQLKRLDLLPNVLFVPLFTLAAIMGATAVQMKQRSRHT

SEQ ID NO: 34526 - protein, 15 aa, Oryza sativa
MADARHPCVPHPARP

SEQ ID NO: 34527 - protein, 103 aa, Oryza sativa
MTVPAFGDWDMKNGALPDYSMDFSKIREMRKQNKKELSRTSLGGDDDLLAQQKQQQPQPQQKPAKANLGRPADDHRHRQLHGRHGSPTGRRTFLSYFQCCIKA

SEQ ID NO: 34528 - protein, 122 aa, Oryza sativa
MEPASSSSPAPAPEAAAAGRRVPEAAELKLRRRTLETVLEQCQRALEMMREADLGIAVSEEEEEEEGADAVAANPEVGGSDGCDEEGAPPPSPPSEADYETDEVRRGERAVPLNFVIRGVCR

SEQ ID NO: 34529 - protein, 97 aa, Oryza sativa
MSTGGGADKSGGGGGGAVKTPSDFLKSIRGRPVVVKLNSGVDYRGILACLDGYMNIAMEQTEEYVNGQLKNKYGDAFIRGNNVLYISTSKRTLTDDA

SEQ ID NO: 34530 - protein, 24 aa, Oryza sativa
MPCLLALLALEHLALDPAGNFVEC

SEQ ID NO: 34531 - protein, 47 aa, Oryza sativa
MAWRLWPIQRRCDGPYFPVARLWEGCRGSPVTAAAVADLVDADGEQR

SEQ ID NO: 34532 - protein, 74 aa, Oryza sativa
MSTSPQYQVCMAPCTWLCHFRCELGVVDLPHCVVCILGMNFVNREHGCMVCCVEGTHVIEWPHILVQNPVVSRQ

SEQ ID NO: 34533 - protein, 135 aa, Oryza sativa
MSWRSCRRRCPGRRRRRKVTATTTEGSAGAGGTATASAAGRRRRRGAACAYRGSGTGRRCGGCRAGTRSTGTASTGGWRSTAGGGRARSAASTSAAPWWPPPWPGSTSSSSATTSSSGSPPSSSPVSSLVNQNPS

SEQ ID NO: 34534 - protein, 215 aa, Oryza sativa
MEKHGDPLFLRHVAIVEIWGLLALRLADDPVLPFDYQTYASQLQEHANAFSSMMENSKWVHLLNRSIEDLSDAGLEFLKEAKKLQDQNISDGYSLMRRRLLNDRLLLAERSFLQADGLQGRGWFKHLMYSPPEDYESKLSFFPGVADAISRSSNRSAKEQQAAVRHEQLPVQERGRAAAHRRRSRLRRLPRGSWKTSHLNSRFLDWLHNTSTDER

SEQ ID NO: 34535 - protein, 169 aa, Oryza sativa
MFVKSRDERLRSVPRRFGIAPPIALKLRLRYRSPATSAADARPPERPLLGRWILVRDERLEMQGGISPLRPCASMSKATTKRGFGSSLEHVTPRQVHMSSEVLFHVVRAPPSGLERCDLMQSRASRWLLSDSSAIANAVRETSIATTAMCIAAHTIFAGVYFGQYGFSF

SEQ ID NO: 34536 - protein, 108 aa, Oryza sativa
MGGSSGGGGCGGQIRRQRRRLPLPPLASLPRLKRRWWRASAAQLGKPLPAATPRPFTGFGHGRRWQQRRLWKNLLDFCSICFFLSPFAVLLFLYLGSNINWIKTLCVI

SEQ ID NO: 34537 - protein, 137 aa, Oryza sativa
MASSAAAYLDADENLEAIISRIEQKSRKIETLLKQSKPVEALKTALEGTPLKTRDERCKSANWIVVHRAMMAIRDVDGMFNSLDPEYYDILMKYLYRGLSTGDRPTCDQCLKIHEKLTEKAGLGCILRSLADTVNTV

SEQ ID NO: 34538 - protein, 119 aa, Oryza sativa
MSSDAKSVASAKQSSKAPSSTGRPLLKNLTRARVPRAGLFGISLAITGALLWKINVSDRHKRNISSFYKDFDPERDYARMKASGVFKSLEGQERPAWLHEYEAELDKAIASLRTSVTRK

SEQ ID NO: 34539 - protein, 152 aa, Oryza sativa
MMVMAMMRRVVMVVAVLCAVATMAMAQEASNVRATYHYYRPAENNWDLGAPAVSAYCATWDADKPLEWRQKYGWTAFCGPVGPTGQDACGKCLSVTNTATGDQITARIVDQCANGGLDLDWDTVFSKIDSDGQGYQNGHLIVDYQFVDCGDN

SEQ ID NO: 34540 - protein, 18 aa, Oryza sativa
MVLLVRLTKFPWSARKDA

SEQ ID NO: 34541 - protein, 230 aa, Oryza sativa
MDAAAADLEARQLRILRRVADLELAAQQHRLGALSISAAPSGGEAETGATEARLSSILTARGVLDFTFRRVPADYYDRPLEERRDLLRADSVNQLCKSIVMVNTQAAADVVDCSNPKNSKYYVVVVQYMARLNADSIKNFIYSLNEKQIPKKRFNMRLAPEEESLKLTGFVHNAVTCIGMETDIPVIIDEAITKLDKDFFWLGGGEVDLKLGVRTSQFLNAFKPFVVKCS

SEQ ID NO: 34542 - protein, 6 aa, Oryza sativa
MAEAVW

SEQ ID NO: 34543 - protein, 398 aa, Oryza sativa
MAVSVSWSWAPRFLACVAVAVLLVTSGLGGAAAGGGGRRHGHTKGLRPGKAAAKPYYPVNATAVEAIERQFTRWVRSMVGRRHSTFQRALYRGLLPTRTLVVDKNPAAGNFTSIQAAVDSIPLINLARVVIKVNAGTYTEKVTISPLRAFVTIEGAGADKTVVQWGDTADTVGPLGRPFGTFASATFAVNAQFFVAKNITFKNTAPVPRPGALGKQGVALRISADNAAFLGCNFLGAQDTLYDHLGRHYYRDCYIEGSVDFIFGNALSLYEGCHVHAIARNYGALTAQNRMSILEDTGFSFVNCRVTGSGALYLGRAWGTFSRVVFAYTYMDNIIIPRGWYNWGDPTREMTVFYGQYKCTGPGSNYAGRVAWSRELTDQEAKPFISLSFIDGLEWVKL

SEQ ID NO: 34544 - protein, 341 aa, Oryza sativa
MEGAAAAAAVIRHRTVEANGISIHVAEAGGEGGDGAAVLFLHGFPELWYSWRHQMEHLAGRGFRCLAPDLRGYGDTDAPPEIESYSAFHVVGDLVALLDALGLAKVFVVGHDWGAIIAWYMCLFRPDRVTALVNTSVAFMRHVFIRSGADAIKTTDHFHKAYGPTYYICRFQEPGVAEEEFAPAHARHIIRRTLCNRFTVHKAGKPESEESPPPPPLPLPAWLTEEDIDYFAAAFERTGFTGGINYYRNMDRNWEMAAPWADAKVQVPTKFIVGDGDLTYHYAGIQDYLHKGGLKAEVPLLEDVVVIPGAGHFIQQERAEEVSDLIYNFLTSPKPNQDDDF

SEQ ID NO: 34545 - protein, 32 aa, Oryza sativa
MMIAASRSSSLWLCCCNIATFYLLPSCEEADS

SEQ ID NO: 34546 - protein, 92 aa, Oryza sativa
MAAAHGEVPVEAVVASAWRKRGGGGAGRRSPPLRRRGRGRCSRRPRPRRSPRPLPRRAPVRARRVLNHLLACKPRARAQQAEREREEEPRSS

SEQ ID NO: 34547 - protein, 102 aa, Oryza sativa
MAASGGVAAGLLSCCLLRPGLGMHELTISNTELDHLFDGMQQKEDTFSQIALAPTLLGGREYYTIHMHLLGAIKRCNFIQHTVTTIRLNLVLHDGAFANLNL

SEQ ID NO: 34548 - protein, 50 aa, Oryza sativa
MRNSTVCPRVEEMKAFKMGGSPADGYDNSKFVSIFFIRLGLMQVVRRVKL

SEQ ID NO: 34549 - protein, 108 aa, Oryza sativa
MAMAGESRRRRRAAAEAVAWCLALGVVALLLVGSVEKEEEVVVVRGARLAAARPCEEIYVVEEGETLHSISDRCGDPYILEQNPHVHDPDDVFPGLVIKITPRPGRRN

SEQ ID NO: 34550 - protein, 21 aa, Oryza sativa
MPIAKQVKPPSTTPFPSVLAL

SEQ ID NO: 34551 - protein, 204 aa, Oryza sativa
MEIGGVLVSLLFAAFSLPCLLLLLVLAEAGLRLASLALRGGRYAWPTRSDFLGYRIARRRRAAVSGGAGGADGEEEAQPTAECCDRLAVAMYRRGRDAAPVDCVFCLSRVDDGEEVRELRCRHVFHRACLDAWLVLPRATCPLCRDCLLPPPCEPPRSFPLDYYDDDDDVHFGFNDFSITSSTTTTTSAAAAVAYPHGVALWPM

SEQ ID NO: 34552 - protein, 108 aa, Oryza sativa
MRRSTTYPAVVVGGCRFRRTVLQQLPGRSAGAPEMHAHAVAVRLALVGAWLCSVDRKCKHGSSGRKPINHRAGRLCFSCPVAGGGSGLLARGILSRILAGSCSKICCF

SEQ ID NO: 34553 - protein, 169 aa, Oryza sativa; identical to SEQ ID NO: 30313

SEQ ID NO: 34554 - protein, 77 aa, Oryza sativa
MFCLLHRLFPFLVGTAVGVYAAQNYKVPNLRGLADRGVDAAKQYEEAYRKKPSSGAGAGGGSKKRMNKAVEIDDDEE

SEQ ID NO: 34555 - protein, 155 aa, Oryza sativa
MLQCPFLRGGEGHDRSRSAGGSDGLQARRPARAAPLRSSLMGMEAFDTAAASPSSMFGRPALFPSSGKLMESYGVASRNCVQRLIAVDLETNIWPSLNFAPLSIPPAWLPHSSDKQDIGRSQNASNSCRLVFLCTIWMDQQLPCKFFTTSSTFML

SEQ ID NO: 34556 - protein, 78 aa, Oryza sativa
MDVMEKSRRAHFLFDDDDQTPPKQNGPQNDDQHNNDDGSGCLCVSCYGGVAKPKAPKSSSPAKDVVAGGRPAAGSNCT

SEQ ID NO: 34557 - protein, 116 aa, Oryza sativa
MPDVISAPDAETTGGGGSSPHVEKLRKMLFRRMLVGVNDGRYFLGLFHCVDKQGNILLQDAVEYRTSARRRSPSSPSSSPAEQRGLGLILIPAACRSSCHVDCAVEESMSLLSLDR

SEQ ID NO: 34558 - protein, 123 aa, Oryza sativa
MKAILSFVALFLLIAQAQMAGGYTDQSVSTVETDQGTQTAFNFGKAQFIKAAYAANEISSTNFSSEKVVSVATQVVAGLNYKFTVEFTDSEGKNTYGTFVVFSQPWTSTLEMTSYSVSATPQF

SEQ ID NO: 34559 - protein, 259 aa, Oryza sativa
MTESSMSIREMQEKRQVADLQQRKCSVIFDISCSLARILEFFTREIPHAFLMGPDMNLRRLAELVVFILNHIILAADAEFFDMTLRRPGQHQEKTNCTMILAPLVGIILNLMESSSTSGHRELNDVITVFTSMDCPATIHFGLQYLLSYNWSNVLRGDASLAKLAQLEEFSHYFMHITMSADGNEEQGFSTASNEENNCCICYNSDSDTTFEPCHHRSCYGCITRHLLNSQRCFFCNAVVTSVTRIADSRIESRSPLAP

SEQ ID NO: 34560 - protein, 116 aa, Oryza sativa
MAGKLIANLIVMGSGIIGRAMLQAYRKALDNANKTGVAHETINNIRRASKTMTEQEARQILGVSEQSTWEEIAQRYDNLFERNAKSGSFYLQSKVHRAKECLENVYQKNKQDGTPP

SEQ ID NO: 34561 - protein, 424 aa, Oryza sativa
MSSSSSSPRAPGDRKRCRRASGPVPRWASLPEDLVDLVASRLLAGGDLLDYVRFRAVCTSWRSGTASPRGRGVADRRFHPRRWMMLPEGHGLYPGHPSLRGYARFLNLDTGTLVRARIPLLRDGYVAIDSVDGLLLLLLDPDPNQEGAVRLLHPFTGDTAELPPLGTVLPHLGSRLLDCPAPYRIRSLARVVCASVSCSATGAGAGAITVLLALSVVSRVAFATSLDRQWSLSTYECVILSSPIASHGKIYLMHTDRSCGEKMHQILRIDHPPAAAQDGSGSGAGRALQEPKLVATIPARKLDHFQGLVECGSEILVLGYKNWSTSRISVFKLADLVLQRFMPIKSIGGHTLFIGERNISVSSKILPTVKGDNLVYLNSGLVKYHLSSGSLSLAIDNCSLYGRAPGPSSLVHYIYSCCIRNRWY

SEQ ID NO: 34562 - protein, 437 aa, Oryza sativa
MCCRRYELKLPIGCDPKQYIVDLILELEGTLEALGDYCFLCQGVWSEFIVGNNLDFLKQLELTSDKLVQVTSNLVRTCYMQKLGTGEEHILKFKYACNGWPTRKFRKMPKNDCNGHWKMSRLFVNLHYFSFGLSTAKTVQKGSCYLRGSDKVLLTKLEMQSCVNLGDDNVSCHTMAPSEGMDFCELKVLEVTSDGCPIFWILVLAATEWKVGNYTILTEGTYTKMAVCSEQKLQCDALKRNQTGAKHVIQRNTFVAPGNLAYSVTNNYLPEGNKHRTMATRVNVFGHGIHSTENQGFYSEGIQVHSSVQKIPALVLNRELSMDFSKDIAAPMKYALQVSESFELNRSKKVHDLFHFDDGLLSSSQELEHPWDPGGLLHRLGDKTIFKERGLLGPDGLWLDRYNNPPIQPKKAQLERQQKQQQQEGWGHRLITWTWWS

SEQ ID NO: 34563 - protein, 592 aa, Oryza sativa
MVSDASKKKAAQKKAAAAAKRGAKASSSSSSSSSAADKAANGIAALKLSDRTCTGVLASHPLSRDIHIESLSLTFHGHDLIVDSELELNYGRRYGLLGLNGCGKSTLLTAIGCRELPIPEHMDIYHLSSEIEASDMSALQAVICCDEERMKLEKEAEILSAQDDGGGDALDRIYERLEALDASTAEKRAAEILFGLGFNKQMQAKKTQDFSGGWRMRIALARALFMNPTILLLDEPTNHLDLEACVWLEETLKKFDRILVVISHSQDFLNGVCTNIIHMQSKKLKLYSGNYDQYVQTRSELEENQMKQYKWEQEQIASMKEYIARFGHGSAKLARQAQSKEKTLAKMERGGLTEKVVRDKVLVFRFTDVGKLPPPVLQFVEVSFGYTPDNLIYKNLDFGVDLDSRIALVGPNGAGKSTLLKLMTGDLAPLDGMVRRHNHLRIAQYHQHLAEKLDLDMPALQYMMREYPGNEEEKMRAAIGKFGLSGKAQVMPMRNLSDGQRSRVIFAWLAYRQPQLLLLDEPTNHLDIETIDSLAEALNEWDGGLVLVSHDFRLINQVAQEIWVCEKQAVTRWEGDIMDFKEHLRSRAGLSD

SEQ ID NO: 34564 - protein, 259 aa, Oryza sativa
MAAVRIAPRLRSLPLLLPGPDAAATAAAVHRSCSSCGGSLAALAPARLRAMSSSSSSSSVSPSPYTTLVGRVSCEREIKKSKFIAIAAPVPDERAAMSFLNEVSDPRATHNCWAYKLGEQFRYNDDGEPSSTAGKPIYSAIISSGIDMVMVVVIRYFGGIKLGTGGLVRAYGGVASECLKDAPTCLVKPKARVGMEVPFDLLGTVYHQLQHYQAEDIKQDYDTGKDGTVMVMFKLEYEKIENLGNAVNSACSRKIELLL

SEQ ID NO: 34565 - protein, 420 aa, Oryza sativa
MGICCSKGKEELEEEGFPWKHDAFFHDQLWSAGVSMHTKQGWKGANQDAMTTCQDFAGHKGQIFCGVFDGHGPLGREVARHVRDVLPVKLSSSLALKTEQDPSSNTDKETLEKSDCTSLSDTSNEKQLLSTWKNIFVKTFEDVDEDLRQHSGIDCICSGTTAVTVVRQGDHLIIANLGDSRAVLCTRDSKDRPISVQLTTDLKPNLPSEAERILNSKGRVFAMDDEPDVPRMWLPDQDAPGLAMARAFGDFCLKSHGLICTPEVYYRKLSAKDDFLVLATDGIWDVLSNKEVIKIVSSATDHSKAAKQLVERAVRTWRRKFPTSMVDDCAVVCLFLKPSPSSSESTPGDAKPPQAVSFTGSFRKVLGGGGGEAEEGTNVWRALEGVARVNSVVRLPRMGAVLSWRRRSTSLEEDDEARID

SEQ ID NO: 34566 - protein, 72 aa, Oryza sativa
MRLLPASGIVRLVALVFLLIFSSSLQQQAGVGAIRLHDRKQHGEQWEEERTQMRSFMTMDYSSVRRRRPIHN

SEQ ID NO: 34567 - protein, 328 aa, Oryza sativa
MEGSSNSPDRQSSGGSPPEERGGGGSGGGRGRSAAGEPVRSRWTPKPEQILILESIFNSGMVNPPKDETVRIRKLLERFGAVGDANVFYWFQNRRSRSRRRQRQMQAAAAAAAAAASSSSPSANTSPAAASAATVQVGLPPGAVVHTMAMGGSACQYEQQASSSSSSGSTGGSSLGLFAHGAGASGAGGYLQASCGASASASSALAPGLMGDVVDSGGSDDLFAISRQMGFVGSPRCSPASSPATPSSAATAAQQQFYSCQLPAATITVFINGVPMEMPRGPIDLRAMFGQDVMLVHSTGALLPVNDYGILMQSLQIGESYFLVARPP

SEQ ID NO: 34568 - protein, 222 aa, Oryza sativa
MANGGGGGGASVRRKSVSVASASSASLGRRLEAIVEPDSPGRRSEGSSSSSFGRKVARSRSVGCGSRSFSGDFLERLSTGFGDCALRRVESHREPKPKSSAGALAHLGGNHSAAGNGDDDEYESTQQHRIKCAGFFGGLGAAPPPTSSSYWLSAADGATAAAPSARTHGARSHRSWAWALASPMRALRPTSSSSSKSIMAAPHNRGGVSGNGGMAMAAVATS

SEQ ID NO: 34569 - protein, 117 aa, Oryza sativa
MSVRIKAVVDRFVKELKEALDADIQDRIMKEREMQSYIEEREREVAEREAAWKAELSRREAEIARQEARLKIERENLEKEKSVLMGTASSQDNQDGALEITVSGEKYRCLRFSKAKK

SEQ ID NO: 34570 - protein, 440 aa, Oryza sativa
MAVAAADGIAALVDWSDLLPVILEDISQRVHGDDRAVFAAVCKSWRRAASAAGPRLSRHSLHLVALCSGANAVDFSSRHGDVVKTAYLGSGGARPHRIIGCSHGWLVVVDEACRASLLEPFTDGAQVPLPPVTSFDCEYFVTAVGGDGDGVPEYFAVDNHAYHHHLQGHRKIEWKPPKLVPVQSMRDEFFQKAAIAPGSHRKESYAAVMVSHSGGSGLAFARSGDDRWTSLPTQALTRYADVIWHNGAFYTLTRGDGAVEAWEPDGRALKPRLVTGPVMRWEFKRLVEFHSDTFHQPAFYEGARYLAKQADGGGGLLVVSTVAILDDSNALRARRFKVFDVDEDKGEWRSRDDVGDAAVLVGINHGECVSTREYPCLKPNCVYYVVKSFAADFEEEEKGCSRYKSGVCDVKTGVASRMSVFRRAAGGHPVWFVPSAVSRR

SEQ ID NO: 34571 - protein, 586 aa, Oryza sativa
MNSYCDKKEVTVAFSKTKRQEEDEVIWRMVEQGATDDEECGGTNCSAGENRDPGWPGTSVFRMLIPATKVGAVIGHSGERLRRLCEETKACVRVIGGHFAAAERAVIIFAKEQPDEPKPPAIDALLRVYECIINDDGLDVRYNNIVVARILTPSEQAASLIGDQGSVINYIKKASKTNIHVIDGDLPPVALEDDMIIEIWGLPARVHQALELVACHLRKYLVHRSVIPLFDPHVSIPISPVDMPPFHYSDHHEGLLHEASPGYYSLYAEAFQLEHPWTDTSYSRYPMENFTHADIFEYRQEAPVFFGRYRSVTPPHYGHEAEAYLSSPMELCLHNNLNTYGWQATPPIGRSDTVERIRSLISVYGKQAHPHPLRQTYQSTKMEKHPHSGISLYRRDDHPTRVSPSPATELPPSPAVSAYKWQVSPSLKMYPSTNVENLQHCRVSACAPEELPNVVVPSLTSQSPAVTSQVIMKMQVPIFYAEAVIGPTGARIDYIRQASGSSVVIKDLDDSAMSIEITGSAATDVQIAEQLIKNFMAEAAAASPDHSYDFIPSHLPAPRSPEPDIPTTSLTRRASCFTEPRLQATY

SEQ ID NO: 34572 - protein, 120 aa, Oryza sativa
MVFARGNGTACRVSRGYLYSCSLDGLLAGKPNMIAGAGGHKDEDGRKVKLPANVAVGKSVFRRRRAAGEMYTGAGPSAAVCFCNFSLVMMAGAGDGSHAWTIVARSRRRGGEGAVAGGMM

SEQ ID NO: 34573 - protein, 98 aa, Oryza sativa; identical to SEQ ID NO: 28718

SEQ ID NO: 34574 - protein, 371 aa, Oryza sativa
MDLPKRVLPHGSPRGSPMATRRRDAEADENVRAWSENPGRLGAVAEWTASLERKKVLGERNGGGDGSGEAASPPQFFSQAKPATSPPSLSCRGEGPYDPKTNYTTPRPEFLRYNPEKRREILLRLEREAEDESSSATSATPTPTPSECVSSGSSVRGGEAELDRADAKEEEIEIPSPRGLDRADAEEEEIEIPSPRGGWARRLLLLLVAAACSCCYIYCMSSSPFPTSQMGLDFAGTTGSVHDASAHQVGSLELRAPTEMMGSHHVFEEATDQTVPNGSENAAQLYGPMGGSRKNFMAIAAMGLADSCPNVPFGEFTCQIGDRAVEDVQNSKEDFQLSELIVATSENAEQLGEVVSLNENVTADSIFNLHR

SEQ ID NO: 34575 - protein, 395 aa, Oryza sativa
MAAQASPPTKKVLVPIVAGTEPVEAAVPIDVLRRAGADVTVASADDGELVVEVMYGVRIVADALVAGGDCAAAHFDLIVLPGGVPGAANLGGCAALEAMVRRHAATGGLYAAICAAPPLALASWGMLNGLKATAHPLFVDKFPPEVAAVDASVVVDASAVTSRGPATSTEFALALVEQLYSKNKAEQIAKEMLVRYDAGYTIDEVNSVQWKCNGTPKVLVPVANGTEEMELITIIDVLRRADADVVVASAENAGVEIVARHGMRIVADTTLDEAAADDQTSSFDLIILPGGTPGAKTMSSNEKLVTLLKKQAAASKPYGAIGAATAHVLEPHGLLEGKKAADQDGGDECESRVVVDGNVITSGGTGTAMEFAVAAVEKLLGRDVAQRVAEGLLFA

SEQ ID NO: 34576 - protein, 409 aa, Oryza sativa
MAAYLSMGEAHRRIADYLSRVADSVSSSDGAALASLLAVSSAQAPAPLSDALSAFPDFPRLAADRYPHLSDLLPPLLRAIHSHSLRRFADAYSSFEKAANAFLQEFRNWETPWAMEAMHTVALEIRLLAEKADRELATSGKNPDKLQSAGSFLMKVFGALAVKGPKRIGALYVTCQLFKIYFRLGTVHLCRSVIRSIETARNFDFEDFPVKDKVTYMYYTGRLEVFNENFLVADQKLTYALVHCNPQYESNLRRILKFLIPVKLSIGVLPRITLLERYNLLEYADVVTSLKRGDLRLLRQALERHEDQFLKSGVYLVLEKLELQVYQRLVKKIHIIQRQKEPAKAHQIKLEVVVKALKWLEIDMDVDEVECIMACLIYKNLIKGYFAHKSKVLVLSKQDPFPKLNGKPV

SEQ ID NO: 34577 - protein, 133 aa, Oryza sativa
MLFVKNFKLEVAKYTSEGNMVKNLRLALTRLDETAAGVGTFLHLTSRFGSALLPDHAEKINQETSSTLVATEIFGRDTEKNEVMRWLVDNIEGDSNTPGINRVPVSAIIGMGGIGKTTLAQIVCEEFKRFNIL

SEQ ID NO: 34578 - protein, 417 aa, Oryza sativa
MPLRVATLVRNGTRRWTQGTKSPYPSSCRGRCTRRRPRRPARRDRPCRRGDDAVNPNDASAPARAFGICRQGQFRPLTDVSKNPYYEPIIPAPAPNHCNCRAQRLASEMPGLRPESPAIPSPELRRVRTSFTGASSWVATTAMGKVVRSANAPVEPKAKVEDVEKQRRRGKGGCNGTVSSARCRSPPPSPVSPELGKTRCSWITVNSEPLYVAFHDEEWGVPVHDDQKLFELLTLSQALAEITWPIILNKRDEFREMFDGFNYASVSEFTDKKINLLSKSNGNMLLSEQKIRAVVTNAKQMHKVIQDFGSFSNYCWSFVKHKPVKSNFRYARQVPIKTPKSEAISKGLMRRGFQCVGPTTIYSFMQVSGIVNDHLSCCFRFQDCRDIKRNLRAEPGLIERRLNSPPSSEDSETSREA

SEQ ID NO: 34579 - protein, 283 aa, Oryza sativa
MEALTNAEKCFSPARAMSPLPLVRPPPSPGAAGQYLAELLQEQQKIGPFVQVLPICGRLLNQEIMRMSAIVSHLGVREHDRLPIASPNQMHPLPQVPNFCGNGFNPWTGTLPEKNGFPRGTMGWEGAAHDPSYIVKKIVRLEVPTDAYPHFNFIGRLLGPRGNSLKRVEASTGCRVFIRGKGSIKDPIKEEQLKGRPGYEHLSDPTHILIEAELPADVIDTRLAQAQEILEDLLKPVEESQDFLKRQQLRELAVLNSTYREDSPHQNGSASPFSNGSTKLGKQ

SEQ ID NO: 34580 - protein, 46 aa, Oryza sativa
MPVLEGWTTMHSRCDETPSQHDQHRPDADRREGCQHRKDHQALCCW

SEQ ID NO: 34581 - protein, 445 aa, Oryza sativa
MRALLPRLPRRQRRPGPELRVPARGLLEARVPWVRDRALDHVVERERHLVPFLLAKDALLSAAPPPHAVPLHSLPSTIPFPFRPLRFLRLYTSAFALSPHPVAVSPTPRLAGIHSAEAQVLDSTRADAADHLLRLLMLAPARALPLHLVARLRLDLGLAPDFPRSLLPNYPDYFALSRDGALLELVCYRKDLAVSAMQSYAQRTGGYKVGDAVPFPLSFPRGFELDKKVRKWLDDWQRLPYISPYEDGSHLTPRSDITEKRTAAVLHEVLSLTVGKKMEKEVLVKLGEALRLPPGFRKVLARHPGIFYLSHKLRTQTVVLRESFRRHMLVDKHPMMGIRYQYLHLMHMGQEEAGKRKGKGRKTVRGEQMIGEEFGAEGENDDEEDEEYDDEEEDMEAGVASGDEDSDDDDDDEEGEKEDMEAGVASRDEDSDDEDADDTDHAAKG

SEQ ID NO: 34582 - protein, 260 aa, Oryza sativa
MLLFGRKRLLAVLGSCCTILSLLTPTQCASSSPDSLNQSYKIVQPLELTPKLSLQLKLHAFLLWSSVGFLMPIGVLLIRVTSNVKSTRSIRILFYCHVASQIVAVILATAGAVLSISNFENAFNNTHQRIGLALYGFIWLQPLIGFLRPDRGVRFRSIWYLTHWLLGIAICVVGVANVYIGMHTYHERTGRSVRPWTVLLTVEVSAMAFVYLFQDRWNHVVRQQQQQEAAALGDDDDDDDEQSEEHVYPANDHKEVAVVP

SEQ ID NO: 34583 - protein, 378 aa, Oryza sativa
MEEHYTMKKPRLLLLSLEVILIALLLPLRGAHCESSTQGEGGGGGAGAGAANLTVTGTVFCDACSSSSFSNHSYFLPGVKVRIDCMISVKSASKEEIKITAEKVTNTFGAYQLDIPAIDGFECATSAAAAADSFCRAAVIDNPSPLCNVPAVTTTVGHISSSSSGHDHDQPNACLYNLNSLYYRPGGAKNGGQCGGTGGGGDVPPAALNTSLFYCPPWPWPPIPFCTPRPWFPPIPFLTPPPPPFLPFPLPPIPFLTPPSPPPPAFPFPLPPWPWAPPPAFPFPHLPPIFSPPSPPPPPPPAFPFPFPQLPPLPHFPPLPSFYPSPPPPPPPPPPPPPSFPWPFPPLAPLFPPYPSPPPSMYSRKDPSTWSSSSKQQP

SEQ ID NO: 34584 - protein, 322 aa, Oryza sativa
MITASGPPCRSRGRGDTGGDHRRLPPSSTSPPPEQTAGNRVAARKAAAGPSFSLEGAGRCPRPRPVGGGDGAAASASASGRWAGRAEATGCGTAGRRRLGAERRRRRRIWRPSPDPAVRSPPGTMVAPKEAGKGDAGGGKGGAAATRVASPDPGWGSGRRRGGAETGRQRQRHGGQATTAAARSRRGRGAAVGVCQALVLASVMLRRRALAGHPLYLAGSGRPRPDPSPPRRMAAGRRDGCVWTASAAAARWRPASCSAGGFCRWWVLSLLMGGDVRMWKWQDDGLCWREAGMGLDVRDGDFLIVGRVFSLSSVSPLGRTLF

SEQ ID NO: 34585 - protein, 390 aa, Oryza sativa
MPLHHHRHHHHSAAVAVAVADDDDEAKPRRPYSTFASPRAPTSAFSAAFSTHRLLVLFSVACLLVAAASLAFAFSARAATLQPPPLAAVAEATAKVAFRCGRAEDTLRAFLASSSGNYSSAAEGREREKVLAVVGVHTEIGSAARRAALRATWFPPKPEGIVSLEHGTGLSFRFVVGRTKDKEKMADLQKEVDMYHDFLFVDAEEDTKPPQKMLAFFKAAYDMFDADFYVKADDAIYLRPDRLAALLAKDRLHQRTYIGCMKKGPVVNDPNMKWYESSWELLGNEYFSHASGLLYALSSEVVGSLAATNNDSLRMFDYEDVTIGSWMLAMNVKHEDNRAMCDSACTPTSIAVWDSKKCSNSCNTTEIVKALHNTTLCSKSPTLPPEVEDE

SEQ ID NO: 34586 - protein, 485 aa, Oryza sativa
MISQFPQHGHKGDRPSRGGRGRPNGRDSQRVGVTLPIMPPPFGPLGLPPGPMQHIGPNIPHSPGHPLLPGVFVPPFPGGPLLWPGARGVDVNMLSVPPNLPIPPPVAGEHSFTPGMGAGPNIHLNQFGSGIGAPTNMSGLSFHQLGTQSREMVHGKPPVGGGWTPNRNSGPTRKAPSRGEQNDYSQNFVDTGMRPQNFIRELDLTSVAEDYPKLRELIQRKDEIVAKSASPPMYYKCDLRQHVLSPEFFGTKFDVILVDPPWEEYVHRAPGITDHIEYWNGEEIMNLKIEAIADTPSFVFLWVGDGVGLEQGRQCLKKWGFRRCEDVCWVKTNKKSATPSLRHDSHTILQHSKEHCLMGIKGTVRRSTDGHVIHANIDTDIIIADEPTDGSTKKPEDMYRIIEHFALGKRRLELFGEDHNIRPGWLTLGKGLSYSNFNKEAYVKNFADKDGKVWQGGRNPPPEAPHLVVTTPEIEGLRPKSPPHK

SEQ ID NO: 34587 - protein, 437 aa, Oryza sativa
MDRIMRQWRSLLLLLLCVVGSSSLLLVSSQTSSSSSDSCTAALAVGDLIPFNTTGLNCFQAWSSQDFILRFGQDASAGSNVWNFVLSAPDAGGYISVGFSPNGGMVGSSAVAGWVASGGVGTARQYYLGGTSSRSCPPGQGKLSLSTGAAAPTIVSQGSRLYLAFQFSGQPRTDLVYAVGPAGSLPGTNGFLAQHQYMTSGTITLPTGTSGGGGGGSTSTGGGGGGGDSDDGNEGGGGEGKGKHKHSGGDGDGDEGKGGRRTSPSSSSSATASGAAGGLSSKRRHGVLAVVSWGAMIPAGVAMARFMKRFEPFWFYAHAGVQGLGFVVGAVAIVAGFRLDGEDDVGAHKAVGVAVLVCACLQVMAVLARPIKEAKARKYWNWYHHYVGRAAVVLGVGNVFYGMSLAKEGDEWSYVYGIFVGVCAVAYLVLEEWRRRH

SEQ ID NO: 34588 - protein, 395 aa, Oryza sativa
MSWRRGDGGVARRWVLLLCTGSFFLGLLFTDRMWTLPEVTEVARPNGRREKEDELTAGDCNSAKVNVKRDYREILQTQDTHHAVWTLDKTIAKLETELSAARTLQESFLNGSPVSEGHKGSDSTGRQKYLMVIGINTAFSSRQRRDSIRNTWMPQGIKRRKLEEEKGIVIRFVIGHSAISGGIVERAIKAEERKHGDFMRIDHVEGYLELSGKTKTYFATAVSLWDADFYVKVDDDVHVNIATLGQILSNHVKKPRVYIGCMKSGPVLSDKDVRYYEPEHWKFGDQYFRHATGQLYAISKDLATYISINKRVLHKYINEDVSLGAWFIGLDVEHIDERRLCCGTPPDCEWKAQAGNTCAVSFDWKCSGICDSVENMQWVHNRCGESEKSLWISSF

SEQ ID NO: 34589 - protein, 49 aa, Oryza sativa
MLFLIAVSLMKQLRAESSQRSLSRPWTRRAMPRGSCASLPSTGSTRDGR

SEQ ID NO: 34590 - protein, 573 aa, Oryza sativa
MAPPPPPTAFSRLRRLFSTAAATATAPTPESVLYSLRTLSKDPSVALAFFRRSQAGGHPLGSAAYNLMLRTLASHPTSAHSHFWPFLRDMNDAGHSIDQGTYLAALASFKKASLTADYASLTAHYAKAQEDAKGGTPTSAAADAVRALEDGSDSDASAELDEKLEGVDLPLTETAVARVLREVRDHPIKALAFFRWAGRQIGYKHGSVSYNAMVRVLGREESMREFWDLIQEMKADGIHVDIDTYVKLSRQFQKRHMLTEAVELYELMMDGPYKPSKQDGPVLIRRIALGPSPDLELVYRVVRKFEAVWEFKTKDVFDGIHRALTSNGRFDEAAEIVKRMKGEGHQPDNITYSQLIFGLCKANRFDEARKALDEMEAEGCVPDLKTWTMLIQGHCAAGEVEKALQYFTEMVEKNLEADAALLDVMVKGLCSDDKIDASYAFFVEMVDKANLSPWQGTYKHIIGELLRVKKLEEALGLLRSMKARKFPPFADPFPTHIAKYGTFDDARQFLKALTVNNKYPSPTAYLHVFKSFFTEGRYSEAQDLLYKCPFHIRKHPDVTELFESIKVESESAA

SEQ ID NO: 34591 - protein, 615 aa, Oryza sativa
MTGSSGSIAYSASKTILVVPDPPLALGLPITWLFPPFYTTTDLLPRSVDPDSDDLESTIGYSLLRNIGKSDLVLQNANIIDGSKIRTGESNAIDCIQAKDHSTGRTEIASCLRVAEVAQAQIAAAESSIHIAYLSVHDKVELDIKYSDELGYTFSEALGIVPVKIETNHPDVVSILMPKEGNGTHGTHERFVLQARSHGTALVRLQISHIPKKADFIMVSVGAQMYPRDVVLRSGQQLNFTIIGDRMDVRGSSQWLSSNEKVVHINRITGEAQARGEGIAEVIFKGPNTKLHTTVTVLKVNQIVVNAPAETLTNAAGPPGGYKFSVKLSDSTGHSADSSINHINVPFDCKVEPSFVGFVEPWSDDAAKKSYCLFHPYSPAQLLPVKLNLKEGFLHIVVHANLKEDPKVTGSAHALFVKGFYIKEPRKLNLTPSCNHSIITIGGNTDVELFWNAKDLLSASRVDTNGRGVPSQISYQVEALKRQSFYDKITIILPATGQTEEIEVIYDTGERREPSTSGLTTLAAIVTCIVVPIATIALFMKLLEKKPIREAPPRHATPAPASAPAAAMADPASPATGELSPRTPQPFMEYVRRTIDDTPYYKRDARRRFNPQNTY

SEQ ID NO: 34592 - protein, 508 aa, Oryza sativa
MQGSVGVHGILLLAAAAVLTQCLLAAAVNTPVVQCASGTTKCTVTNAFGAFPDGSTCHVAAAAFPATEEELVRVVAGAAASGTKMKVATRLGHNFMKLSCPGGDGLVISTNALNRVVGVNAARMEITVESGVTLSELIDAAAHAGLALPHAPYWLDLTVGGLLSTGAHGSSVSGKGGAVHEYVTGMRVVTPAPASEGYAKVRVVNAGDPDLDAVKVSLGVLGVISQVTLALQPLFNRSVSFRRRGDGDLAERAVAFAGEHEFGDVVWYPARGEAVFRIDDRVATTKTNTISSGDFQNVIQSSRSTEQQQHGDVLPFQAGISVPLSRASAFIRDAQRLLDMNPGALCGGENGGILIRYVKASTAYLGKTEDSVEFDTTSCRHDGDAAMPEEMEQMALRKYGGVPHWGKNRNVAFDGAIAKFPKAGEFMKVKDAYDPDGLFSSEWSDQVLGVAGAGGVNVARNGCGMEGLCVCSEDEHCSPEKGYLCRPGMVYRDARVCRRVAGDAYADA

SEQ ID NO: 34593 - protein, 64 aa, Oryza sativa
MSFSSMRVAIEKNHDRWSVQGQEQRAAGPAVSETKLARQLNSIRNSGCIMKWLEQVQRGDKREE

SEQ ID NO: 34594 - protein, 591 aa, Oryza sativa
MSTPPPAAAASPATDQGKTKSKKKSKKHQEDTSSSLAVAAASVDEAAEAKADGYLIKPQSVAPPLDTSAWPLLLKNYDRLNVRTGHYTPLPAGHSPLKRPIAEYLRYGVINLDKPSNPSSHEVVAWIKRLLRVEKTGHSGTLDPKVTGNLIVCVDRATRLVKSQQGAGKEYVCVARFHAAVPDTARVARALEALTGAVFQRPPLISAVKRQLRVRTIYESKLLEHDADRHLAVFWISCEAGTYVRTLCVHLGLLLGVGAHMQELRRVRSGILGETDNMVTMHDVMDARWAMDNFNDESYLRRIVMPLEVLLTSYKRLVVKDSAVNAICYGAKLMIPGLLRFENEIEVGEEVVLMTTKGEAIAIGIAEMTTAVMATCDHGAVAKIKRVVMDRDTYPRKWGLGPVALKKKKMVAEGLLDKHGKPNEKTPSEWLRNAVLPAGGDAMIAGIAAAPEPEKPKVKEEADVAEETKEKKKKKHKDWAGDNADEGRKRKVGDDDLSASVSAKKIKVEEEADAVEGEKSEKKKKKKKDKAESAYADGEVKAELSDGEKGGSEKKKKKKKSKEGEAGDDEAEKSEKKKEKKKKNRDAEVTQ

SEQ ID NO: 34595 - protein, 385 aa, Oryza sativa
MIPGGGGGGGGGGISPYLVQSQHGHGGGVDGMEMEEGGGFMGEQPQCHPLLYNLSVLKDRVQQLHPLVGLAVAHNAHAHGPLDVSAADAIIQEIVAAASSMMYAFQLLCDLGTAPTTAPSQETAAASAVVVKNNDHAADAGQMEDDHLMQQQWQQNGSRQHDYSSHAHAPPVFHSETAAPAGATSATDTIIELDAAELLAKYTHYCQVCGKGFKRDANLRMHMRAHGDEYKSKAALSNPTKLLAKGGDETMAAAARKYSCPQEGCRWNRRHAKFQPLKSVICAKNHYKRSHCPKMYVCNRCGRKHFSVLSDLRTHEKHCGDHRWLCSCGTSFSRKDKLIGHVSLFAGHQPVMPLDAPRAGKRQRSSSASVAGNIDDTTGIGMGAA

SEQ ID NO: 34596 - protein, 472 aa, Oryza sativa
MAMNKLVGAAVRRPGWADLPRDLLESVLGRLPVPDRLRFPGVCTAWQSADAASATARFRAAQPPWLMLPFNPTARRQSPSGGGGGDGRFLEARFLSLSDGRAYAIPQPAPPVSERLCVGSSDGWLVTADAASELHLLNPLTGAQVQLPSVTTLPFVDASRDADGRVASYDLRCCFGDGDNDGDEVLVPPESFAPDRLRYELYEKAILVAPPRRQTTPPGSWGGYAVLLICQPLYRLAIARAGDTKWTLLDMPSRCWVDAVRAASAPAADGHQAVYTLDSVGRVEAWDMDVTAAGTTPPPPREIAPPCCCSGRACSMSIPCSKYLVELSPGHLLQVHRLRDKAHARSKWEPRQERVEYTTVKAELFEWNAAGGGHGEWARVDGAGAGILAGRALFLGKSVSLCVPADCCPEVKGNCVYFTDDGPWSHERCHEVVPDVGVLDLADGSYKVPRGAVRDLLWKWPPPVWVFPSCTN

SEQ ID NO: 34597 - protein, 521 aa, Oryza sativa
MRNATLACGGVYMYANQQGCDGGRLYYDGCCCIAVNGDVVAQGSQFSLKDVEVLDALVDLDAVSSYRASVSSFREQASHRTKVPFVKVPYKLCKPFQSGMVPTGPVEVMYHRPEEEIAFGPSCWLWDYLRRSRASGFLLPLSGGADSSSVAAIVGCMCQLVVKDIENGDEQVKADAMRIGQYKDGEFPKDSRELAKRLFYTVYMGTENSSEGTRSRAKMLAEEIGSFHLDVPIDSIVSALLSLFERLTGKRPRYKVDGGSNTENLGLQNIQARIRMVLAFMMASLMPWVHNKSGFYLVLGSSNVDEGLRGYLTKYDCSSADINPIGSVSKQDLRAFLRWAAVHLHYSSLAEVEAAPPTAELEPIRADYNQLDEVDMGMTYEELSIYGRLRKIFRCGPVSMFQNLCHRWCGTLSPSEVADKVKHFFKYYAINRHKMTVLTPSYHAESYSPEDNRFDLRQFLYNARWPYQFRKIDELVQDMDKDGKWVNSTEGELRRRKGVRSAEGGGMGVVAVGSANPSAGS

SEQ ID NO: 34598 - protein, 719 aa, Oryza sativa
MAGVLQITSSTTTTRYNIVGLIFFFSVFCDDLYSPAPVALALTFNHTNFGPDEQTNIRLEGDAAFSADFSFSGDGGGWVDISANRHGSIEDSRGRVSYALPVPLWDAATGEVASFTTGFSFVINPPKQDGGIDNKGAGMAFFLAGFPSRLPGSYPYNLGLTNQTADQVAAGDDRFVAVEFDTFNDTIVHDPDATYDHLGVDVNSVVSKTTLTLPSFTLVGNMTAVVEYDNVSSILAMRLHLGYGLSGPRHRPDYNLSYKVDLKSVLPEQVAVGFSAATSTSVELHQLRSWYFSSSLEPKAAPPPVAPPSPSPPPTSGSGSGGVVAGATVGAALFVVLLLAMVAVVVLVRRRHQRKKMREAEEANDDDDDTEGDPIMEIENGTGPRRFAYHVLVNATKSFAAEEKLGQGGFGAVYRGYLREQGLAVAIKRFIKDSSNQGRREYKSEIKVISRLRHRNLVQLIGWCHGHDELLLVYELVPNRSLDIHLHGNGTFLTWPMRVKIILGLGSALFYLHEEWEQCVVHRDIKPSNVMLDESFNAKLGDFGLARFIDHIVGMQTMTAVSGTPGYVDPECVITGRASAESDVYSFGIVLLEVACGRRPMSLLDSQKNGIFRLVEWAWDLYGKGDILMAADERLNGDYDAAEMERVIVIGLWCAHPDPNARPSIRNTMAMLQSGGQLPVLPAKMPVPMYIPPVVSVDELFTSPAGMSSSSATQSSTTT

SEQ ID NO: 34599 - protein, 420 aa, Oryza sativa
MDDSDTDSEGDGSFSESDSDYDRKKKKSTNSSRNESKDDKPRRKAPKDKYSDGPESGSDSDHGGKSKYSKISRRDSELQSRKDADKQDQYRDKLKSEFASDGYGEKKSVKIPYNDLKDDKPSSKVVRKDRYSDESETDSETYVKKKKNLPKSYHHSDKPAQRGKEKEENSGKNVDKRKRHDTDSDSDSHARERKRHLDARASLAAQKKRSVTSSSESSESSDYSSSSDSESDVSSDSREDRKSARQLKHDELERKKRSQDEKRKELEKQKQEEERKELDRQKQREEERKAKELEKQKQREEERKALEKQKQGERDGDRYERDHEGRKGENDVERDYKRKVGEDRYDPSRRQDEDRYDPNRRHDEDMYDPNRRHEEHGRRRNRDFDSRDPKRSRHDDSYHHSRRDYEQRYSRDEYRDRRHR

SEQ ID NO: 34600 - protein, 409 aa, Oryza sativa
MPELPEVEVARRALEEHCVGKRIVRCSAADDTKVIDGVAPPRLEAALVGRTISAARRKGKNLWLALDSPPFPSFQFGMAGAIYIKGVELSKYKRSAVSPTEEWPLKYSKLLVVMDDGLEFSFTDKRRFAKIRFLDNPEAVPPISELGPDALFEPLHLDDFVESLSRKKAPIKALLLDQSFISGIGNWIADEVLYQARIHPMQTASMISKEKCKALHQCIIEVIEKSLEVGCNSSQYPENWIFHSREKKPGKKIDFITVGGRTSAYVPELQKLDGIDATASRAKISKEQSKSNKAAREVDDDEEEAKPAKRGRKQLVKATHEIQEDEEDTKESKRGRKQPAKTSKGSWKKAHHSSEGSGDDDSDDEAVDKVVAEQGKRRDPKQPAEAKSSSDKGGSAAPAKRPQRKKRQL

SEQ ID NO: 34601 - protein, 387 aa, Oryza sativa
MGRSRRSYARLLLLGFLLLRFSWCLAVADDGGGAEEGGGIFPVVVSTWPFREAVRAAWEVVSASGGAGCSAVDAVVAGCSACEVLRCDGTVGPGGSPDENGETTLDALIMDGTTMEIGAVAAMRYVKDGIRAAKLVMDHTEHTLLVGEKATSFAISMGLVGPADLSSPESIGKWTIWRQNHCQPNFWKNVVPAGSCGPYNAIDVPSGESKASAKRVLERTQGDICQGLFEPNNLLEPMNSRLKIVNRHNHDTISMAVIDKMGRIAAGTSTNGATFKIPGRVGDGPIPGSSAYADDEVGACGATGDGDIMMRFLPCYQVVESMRRGMEPRDAAMDAILRIARKYPDFVGAVFAINKKGVHAGACHGWTFQYSVRNSSMQDVEVITVSP

SEQ ID NO: 34602 - protein, 108 aa, Oryza sativa
MFVVVFADLDWRRGGPLFRFCYISLERFFLLSLTRFSLKFTGYFLVSYSVIYEIYIVTFVSYSVIFESLYVSFEIYIGFGFFLRYGNLVSIMVFLVAFYLLLCLFCVI

SEQ ID NO: 34603 - protein, 737 aa, Oryza sativa
MRRALDWTPPLPASLLTTTPRRLLEPSSTFPLPLLRPSPPPPPPISPPPPPPPAAAELPAADMDDACAVCAEPLEWVAYGACAHREVCSTCVARLRFVLRDLRCCLCITPCPAVFVTKAMGDRTKVIPDFSALRGAGGEGKAGEYWHHEATQTWFDDADQYRMISAMCRLSCSVCDSNKEEEEERTGKAAKAKRKSKIRSVDQLKGHLLDRHGLYMCDLCLEGRKVFICEQKLYTMSQLNQHIKSGDSEVDGSEVERRGFGGHPMCEFCKSPFYGDNELYTHMTREHFSCHICQRQHSGQYDYFRNYDDLEMHFQRDHFLCEDKGCLEKKFVVFESEAELKRHNGVEHGKHMPGAVDSSSSSMQNGIAAVGHGLGGQSDSSRVPLQSLSISSSSGQSSETRQSFARNRVLQQACVPPLSRQEVHDARVGSVLQEASFPSLPAQSRKAPAHSQSSRTAARIGDQQFRPLSVTSNRNVALAQQGTRTLPENTHVSGLAQYSKRTENMHQAVQPQFLKNNSLIPSGSTSRPVHVPSSAGNERQDTFSNSQVLSSVEDILAANKALVEKMRAALGMDQDMFNAFKEIAGEYRQGVINSSEYLSYVKQFGLLHLVPEMARLLPDAQKQKELADAYYANLRLTSLQENGGGGTDNSKQGNQNKKGKGGVPDAIGTSNAATDPLKDKLLNTAIKFQSNYMPQEGCCGVQRKEGRTTDGSSQGLPLKGAWQSRGGQRLFMSKAKK

SEQ ID NO: 34604 - protein, 340 aa, Oryza sativa
MQQRRGGGGVPRLAMAVAVLVLAASSAGRCRAQLASGYYAGKCVNGGGGNSSVAVDVESIIHDAVQARLAWDKRMVAGLLHLIFHDCFVAGCDASILLDGPNTEKTAPQNNGIFGYDLIDDIKDTLEKACPGVVSCADIIVAATRDAVGMCGGPRYEVQLGRLDGTVSQAWMAADLPGPDVDIPTAIDMFAKKGLNSFDMAILMGAHTVGVTHCSVIKDRLYNFNGTGEADPSMDPIYVWILTTFACPKSQAFDNIVYLDDPSSILTVDKSYYSQILHRRGVLAVDQKLGDHAATAWMVNFLGTTDFFSSMFPYALNKLAAVDVKTGAAGEIRANCRRTN

SEQ ID NO: 34605 - protein, 223 aa, Oryza sativa
MDERFIIKQVTKTELDSFIGFAPHYFRHLAESLTSRSPTCLAKIMGLYQVNIKGLKGGREVKMDLMVMENIFFQRTISRVYDLKGSVRSRYNSDTSGHNKVLLDSNLIEAQHTNPIFLGSKAKQRMERAVWNDTSFLASLDVMDYSLLVGVDERKNELVIGIIDFLRQYTWDKQLETWVKASGILGGSKNEAPTVISPVQYKKRFRKAMSRYFLAVPDDWSSS

SEQ ID NO: 34606 - protein, 129 aa, Oryza sativa
MTYQNTNKNIFDFYNSKDFIQYVDVTIKYMHTTKHEKYKILPKNTSDKWRIYRILKSNEFWNPVRPPETALISNGPSAFMPTPIWVILDFVESLSRYLSNASSLTSKFISSLRESPKQDSTVAETELRP

SEQ ID NO: 34607 - protein, 523 aa, Oryza sativa
MTMEDGSCPSPVTPSEAEAGAEDYESWTLKQKIEDLVNCDPIHGIVPKNPKYKAYFEEKFQEKLSKYVRVVLPKLRPAIQKDSVKQFFQVYNCWSGFMGRGNFLLPDILTNMANENALRCARVALQGTSPLLRRRRADPNTRHRYGFAPLHMAAENFSVDMVKLLFRYGASANICTKGEYVIEGLLPLHVAVENASMHKYIEDHWAHGDHIINLIFLLCLPEMKMFLDTTRLIAKQTDNIVDEVWNYIREEKHVQAAILLLAAQKQLRGRLNNSSGKASLNGFDIVKSHIDDALNTIHLEGLNMVKEGKNGRALKRLKDKKEALLTALVLVGIVHKAGEALEGYIQTHSQVRHDEIVEHVSSILKSNGIAHSGESIDTGKLECYQHGGGMSIGKSDSQRVGYGETIEADKSSSDIGEVSKMILGKQPPKGSAIREVRDMFFPYWKSVLSRRLQLKIVPSCQLSRKDLLSAEASTKGTKSMDHPCNPIKSMGNLGSMGWPPLSSESRRMLYTVASMSRKVFKRT

SEQ ID NO: 34608 - protein, 370 aa, Oryza sativa
MQERNHGPESHPLPEGTPELQRLIARMGALQVAIRNAKDLHDQESTKSAATLAAAHRDIQELKARGGSLMEAREIYSDNEKLNNVEGSKGKQVQMMKDIELDQISTCPPYGTGAALYPLKNGANAGMDDEMLQLWEAAERSCKNQTSKSSSAEHDIEAVEEVKSEYPSSELARGRDLGINKLEVSTSSVEPHEQWSNNVLEKLSSDAQRLQSIQVSIKELKRKMGSPSNGKSPMNSEYNTVSTQLLDTEGCVLEQINYNNKLTKRVENYPALSDSMNAEQEGYPSRRKISGQVQKGSENVGRLELELQKIQYVLLKLEEEHEYRRLKVSDKRTRVLLRDYLYGRKEKRGGAQKKKKRAPFCGCVQSRTET

SEQ ID NO: 34609 - protein, 844 aa, Oryza sativa
MASKLSFKRMDSIAETMPDALRQSRYQMKRCFQRYVSKGKRLLKNQQLMEELEKSLDDKVEKEKLVEGFLGYIICSTQEAVVLPPFVAFAVRMNPGIWEYVKVHSDDLSVEGITPSEYLKFKETLYDEKWAKDDNSLEVDFGALDLSTPHLTLPSSIGNGLQFVSKFMSSKLGGKPESMKPLLDYLLTLNYRGEKLMINDTIDTVSKLQTALLLAEVFVSGLPKYTPYLKFEQRFQEWGLERGWGDTAERCKETLNCLSEVLQAPDPTNMEKFFSRVPSIFNIVIFSIHGYFGQEKVLGLPDTGGQVVYILDQVRAMEEELLQRIKQQGLHVTPKILVLTRLIPDAKGTKCNVELEPVENTKYSHILRVPFKTEDGKDLRQWVSRFDIYPYLERYAQDSCAKILDILEGKPDLIIGNYTDGNLVASLLSNKLCVTQGTIAHALEKTKYEDSDVKWREMDQKYHFSCQFTADMISMNTSDFIITSTYQEIAGSKEKPGQYEHHYAFTMPGLCRYATGINVFDPKFNIAAPGADQSIYFPFTQKQKRLTDLHPQIDELLYSKDDTDEHIGYLADRNKPIIFSMARLDKVKNKKLRDLVNLVVVAGLLDASQSKDREEIEEINKMHNLMDRYQLKGQIRWIKAQTDRVRNGELYRCIADTKGAFVQPALYEAFGLTVIEAMNCGLPTFATNQGGPAEIIIDGVSGFHVNPINDREAGIKIADFFQKCKEDPSYWNKVSTAGLQRICECYTWKIYATRVLNMGSTYSFWKTLNKEERQAKQRYLQIFYNVQYRNLAKAMARAGDQQARQTTTGVAPSEIVVRPKERKPQTRMQRILTRLAGQKPPVSE

SEQ ID NO: 34610 - protein, 484 aa, Oryza sativa
MGCFPCFDSRMGEEEEEELYYGKGGARGGGNGGGALSAAAAAASSSSGVGGGGWEGTSTAAPRVEKISAGARGRGNATVKKELSALKDANGNVISAQTFTFRQLAAATRNFREECFIGEGGFGRVYKGRLDGTGQIVAIKQLNRDGTQGNKEFLVEVLMLSLLHHQNLVNLVGYCADGDQRLLVYEYMPLGSLEDHLHDLPPDKVPLDWNTRMKIAAGAAKGLEYLHDKAQPPVIYRDFKSSNILLGEDFHPKLSDFGLAKLGPVGDKSHVSTRVMGTYGYCAPEYAMTGQLTVKSDVYSFGVVLLELITGRKAIDSTRPHVEQNLVSWARPLFNDRRKLPKMADPGLEGRYPMRGLYQALAVASMCIQSEAASRPLIADVVTALSYLASQKYDPNTTPSSKKAGGGEAGRALSRNDEAGSSGHKSPSSKDSPREQQLPGILNDRERMVAEAKMWGENWREKRRAAATTSSNAQVSLDSPTETG

SEQ ID NO: 34611 - protein, 276 aa, Oryza sativa
MAALSQLVLVAVVSLVALLPLGMAATTYDPIGSFCSETWMNYGDLNSSEAVTRRRAVNFVVSDLVAKARTGGGFATSKAGRGSEVFYGLAQCRGDVSGGDCDACLAQAAKQMVSNCNYTSDSRIWYEYCFMRYYSSYNFIGDVDTREDASVTLRRWPDMDNPKAFQKVVGKAMVKATTQAVSVGGNGLGRAKEQYTPFVSVYALAQCTRDLAPPACAQCLSSTVSKFDKACGAAQGCQIDYSSCWARYEIYPFYFPLEANGRATIDMNKYTKVTMH

SEQ ID NO: 34612 - protein, 117 aa, Oryza sativa
MTQSAHAVPKNSEKGAASPSKALRWSSTMSGLSWGTSLVDSAPSGSPSTRGSGSATKATSGASAGRTGGRRDMFRGVETNDTRWPRDARRWARSRHGSRWPKASHGQITTCIPAAAA

SEQ ID NO: 34613 - protein, 279 aa, Oryza sativa
MAYLGLLVLLLAFCGGAEHHGAEAAGDASARGASARRGLATVSVAKPSYPTVTTPMSASTSPSTMPMSSSPSAFPSLATAGGGGGGGGGGSWCVASQSASPTALQVALDYACGYGADCSAIQPGGSCFNPDTVHDHASYAFNSYYQKNPVATSCDFGGTATITNTDPSSGSCQYSASSGGGQNMLPPPSPTTLPPPTPMTPTTPMTPTPTTPDTGTPIYGGSTTPPDYGSMSPPGGFGSNSPPDYGDVGAAPATMASGRAAVALAGVLIATVSLMSMST

SEQ ID NO: 34614 - protein, 80 aa, Oryza sativa
MVNPGRTARALCLLCLALLLLGQDTHSRKLLLQEKHSHGVGNGTTTTQVSRLVQYRFFSLLTVAKFEFYNLILELMWMCY

SEQ ID NO: 34615 - protein, 42 aa, Oryza sativa
MTQEEWQDKCGVTSMKKEAPAPPNGRRRSSKTTTSGGTVAAA

SEQ ID NO: 34616 - protein, 721 aa, Oryza sativa
MAVESRIIDPAESSVALKGDKASMTPIGQPLVNAESHTNYYAKKPINSQPSSDAVNSGKLVTSLSEENNKTMPISTPFNIGTWDNSQLNQQVMPLTQTQLEEAMKPGKFEQAGSGFSLEPNNALSPTLGSEKTFPSSASPINSLLAGEKIQFGAVTSPTVLPPVSRTITSGLGPPGSSRPDMKIHRNLPGDSNSTAILFDKETSTTKEPSPNSDDVEAEAEAEAAASAVAVAAISSDEIVGSGADATAASASDNKSFGNKNLAGLASGGQSSTDEPLSVALPADLSVDTPPMSLWHPLPSPQASGPMLSQFPGAQPSHFSCFEMNTMLGGQIFAFGPSDECAGSQVQQPQRSNALPSAPLGAWPQCHSGVESFYRPPTGFAGPFISPGGIPGVQGPPHMVVYNHFAPVGQFSQMGLGFMGTTYISGDKQPDWKQNQGPPVVGVSQSDPNNQNMVPGQVSSPSVPTPVQHLRPTSIMPIPSPLTMFDIAPFQSSTDIQMQPCWPHMPVAPLHTVPLSVPLQQHPMDGTAAAQFVHNIQVDNKASSNNRFQEPSASVVPADNSKNIPNASATQFTDDLGLVEQPASTSSNAQTVQPSFARVGMISNEVPNSAKVMGRSSNTPNVNPGIATGVSNSNGSQVASMPSKPHQSSSSSGQQYQHQVNNQDRRSRVTQKTGAVNEWQRRSGYQGRNQNSGSDKNLGTGRMKQIYVAKSSSASGHAPSG

SEQ ID NO: 34617 - protein, 216 aa, Oryza sativa
MRAAGLDLAAATRSLTKIPVSSPQLAKHALEAHVTRVLLVGFEHESFYLDGSLSSLLDPAAFRRERYTQFRDMRGMEPAELLGLLPTCPFGRYAASKFAALLPPRVEQAVLGDGEHRRAVEGGAHPRTPFYGEFLRAAKAVWMLHLLAFALETPPSHFEAGRGAEFHPDYMESVAGGRGGGAAGMVVGFAVAPGFRLGNGAVVRARVYLVPRGGRP

SEQ ID NO: 34618 - protein, 608 aa, Oryza sativa
MAAASAVASSSSSPALEPHPDLSPVFSSPSAASSSSSSSRDEGARGVSCEGGGGDDVFDLDAPWVAAAEAESRLEEAVTAAAAARVGLCCTEEKGKGKGEKEEDEIRNNRQRQEDELMALEAIYSDDLAVFGKKGGLHYFEIYIHYDLNDGAEVCAKLSSANEKNPKDGRCCVGIEGHGDEPEDFSYTCNFEYLPPLVLTCLLPLSYPSKEPPYFTVTVKWMDGPNVSQLCKMLDTIWAELPGQEVVYRWVESLRNSSRSYLWFDGKITLGPDTPMQKGDNRAISRSLSLESVIPSMLSYSSKKRYQAFLEDLHMCMICLSQSKGSNFIRLPCQHLFCVKCLGTLCRMHVKEGSVFQLVCPDTKCNASIPPYVLKRLLTEDEFERWDRLTLEKALDSMSDVVYCPRCVIGCLEDEDNNAQCPKCSFFFCSFCKEPCHPRRQCLTPEEKLQRRQASGRMSEREVAQEILNIKALYNDVRLCPKCRMAISKTAGCNKMVCGNCGQFFCFRCGKAIKGYDHFSECKLFAPRDISAWERQMEEQYGNHVRLSLRPVGGTIRCPKCRERNFKDDEKYIFCWACRANYCTMCRREVQDKRGHFGSPECVGLEDF

SEQ ID NO: 34619 - protein, 437 aa, Oryza sativa
MGGYQAVLDPDNQKPSSKNPGYFLSKHTCAWLASGFVLLALLHLLCCAPAGTRPAAAFSPLLQYINNTYSFVSTVPGVGKSCNYSDGKWVWAPGHVLRYNATRCNVKATHDCIRNGRPDTGYLDWRWQPAAAGCTLPAFDAGSFLAAVRGKHVAFIGDSMARNQAQSLICLLAAAFPYRLQYRATGDPGKYNLWRYAFPSHAVTVSYYWAPFLVRAEGKSVDDSVPHNYVHLDEPGERWSADAATIDVAVLAAGHWLMNGAIYYNGSEVFGVHNAPEEFANRTKVGYAWPLRLAYRTAMERLVGASRGTPRDMLLVTFSPSHFEGRPVQSPTACTRMEPYREGEKELEWVFREIRDVVYDVAAEARRGGGGGETTVRIEVLDVTKLASMRPDGHPGVYMNRDPFANGVDENMFSDCLHFCLPGPVDTFNEILVQLLK

SEQ ID NO: 34620 - protein, 116 aa, Oryza sativa
MSGSAFNAFKSRVAVAWSPKLYITLVRGLPGTRRLHRRTLEAMRLRRCHRTVEHRTTPSLLGMLTQVKRLVVVETQEMYAARRQAEDDRRAPRPPLVVSHRPPAAATPTPTPTAGH

SEQ ID NO: 34621 - protein, 452 aa, Oryza sativa
MDGETSCSSWDSDDEYQKFIQKMNPPRVVIDNTSCKNATVVHVDSANKYGILLEVVQVLTELQLIVKKAYISSDGGWFMDVFNVTDQNGQKIMDESVLDEIVKYIHKCLGADSCFLPSRRRSVGVEPSSDYTLIELTGTDRPGLLSEVSAVLTNLECNVVNAEVWTHNKRAAAVMQVMDRKTGLAISDTQRLARIKERLSYVFKGSNRSQDTKTTVTMGITHTERRLHQLMLEDRDYERYDKDRTNVNPTPVVSVVNWLDKDYSVVNIRCKDRPKLLFDTVCTLTDMQYVVFHGSVDSEGPEAYQEYYIRHIDGSPVNSEAERQRVIQCLEAAIERRVSEGLKLELSTGDRVGLLSDVTRIFRENGLTVTRAEVSTRGDKAVNTFYVRDAAGSSAVDLKTLEAIRQEIGQTVLQVKGHPDHRKSPPQESPSRFLFSSLFRPRSLYSLGLIRS

SEQ ID NO: 34622 - protein, 123 aa, Oryza sativa
MSTLSPDGDSDYGGGGGGGEAAGAVMADVLSKGREACYKARDAFYTCVEKHADKKPTEIATMGLLYPADCKKSRANFVNSCRPSWVKHFDRQYSAKKRVQRLLDGGDDRRGPISLPQPYTFKQ

SEQ ID NO: 34623 - protein, 444 aa, Oryza sativa
MKVDVPQEEEDNEMKVDAPQEKKDNEVTADVPEEKGNDEMRVDASESIESIEPVSRSTLDNKKEDQGQMNNVEEKAASDSKDENEKTANDESGQDKVLKKPDKILPCPRCNSMDTKFCYYNNYNVNQPRHFCKNCQRYWTAGGTMRNVPVGAGRRKSKSSSLHYRHLLMAPDCMMGSRVKISKSMNPEAFASAHSTPIQPIGRNETVLKFGPEVPLCESMASVLNIQEQNGTNAAAVPTGENQEDNSCISSITSHNVLPENAAQVDKNSTPVYCNGVGPVPQYYLGAPYMYPWNIGWNNVPMMVPGTSMPESASQSESCSTSSAPWMNMNSPMMPVASRLSAPPFPYPLVPPALWGCLSSWPATAWNIPWIRTNGGCMSPSSSSNSSCSGNGSPLGKHSRDSSLPLKEDKEEKSLWVPKTLRIDDPDEAAKSSIWHLQAVPVQR

SEQ ID NO: 34624 - protein, 390 aa, Oryza sativa; identical to SEQ ID NO: 34585

SEQ ID NO: 34625 - protein, 98 aa, Oryza sativa
MKVRASVKRLCAYCKVVKRRGIVFIQCKANAKHKQRQGFSTLAEAAAACHPPPPPLLTNTSPAVAAAVAEASKVAKQEPSMKFNWPLGLAALLKNSDK

SEQ ID NO: 34626 - protein, 568 aa, Oryza sativa
MSALQSWRKAYGALKDTTTVSLANLNSDFKDLDVAIVKATNHVECPPKERHLRKIAAATSIGRPRADVAYCIHALARRLAKTRNWIVALKTLVVIHRLLRDGDPTFREEFLTFTQRVRILQLSNFKDDSTPVAWDYSSWVRTYGLFLEERLECFRVLKYDIEAERLSKQGQGPEKGHSRTRELDSPDLLEQLPALQQLLYRLIGCRPEGAANSNYLVQYALALVLKESFKIYCAINDGIINLVDKFFEMPRHEALKALEIYRRAGQQAGSLSDFYENCRGLELARNFQFPTLREPPQSFLSTMEEYVREAPRMVPIKEPLEFPERLLLTYKPEESEEIPEPVSAEEEKPQIEEPAVAVPSTEVVPPPPPKPEVVDTGDLLGLSDPTPSVSAIEESNALALAIIPTGGETSTSGTATLQDKGFDPTGWELALVTTPSTNTNSMAMDSNLGGGFDKLILDSLYDEGTYRQQMQQQQLYGSAAPNPFMASDPFAMSNQVAPPPSVQMASMTQQPQQMPMMMQPNPFGPPLQPQHAGIAQAPNPFLDAGFGPFPASNGMHPQANPFGTAQLL

SEQ ID NO: 34627 - protein, 436 aa, Oryza sativa
MRRPLEKAGAAGLVAMLAAAAALLLLVCAASLRCSAAVGSALAAPKKLLSGGVSIEEPRGGGAGGGGGGEECDLFDGEWVWDDGYPLYASRDCPFLDVGFRCSENGRPDDSYTKWRWRPSRCDLPRFNARNMLEKLRNRRVVFVGDSIARNQWESLLCMLAAAVPDKSSIFEVNGNPITKHMGFLIFKFREYNCTVEYYRSPFIVLQGRAPAGAPAVVKYTIRVDAMDWMSGRGKWKDADLLIFNTGHWWNHEKTIKGGAYFQEGNEVKMEMTVRDAYQRSMQTLFHWLRNEVNTNKTQIIFRTYAPVHFRGGDWKTGGTCHLETLPDVTPIKSLEPWADLLEPINHVLGNSITTKLVGLDILNVTQMTALRKDGHLSVYLSPSGPASHHRQDCSHWCLPGVPDAWNELLYALFLRRKMVMPHNVSSVGAKRLNTG

SEQ ID NO: 34628 - protein, 450 aa, Oryza sativa
MQGSVGVHGILLLAAAAVLTQCLLAAAVNTPVVQCASGTTKCTVTNAFGAFPDGSTCHVAAAAFPATEEELVRVVAGAAASGTKMKVATRLGHNFMKLSCPGGDGLVISTNALNRVVGVNAARMEITVESGVTLSELIDAAAHAGLALPHAPYWLDLTVGGLLSTGAHGSSVSGKGGAVHEYVTGMRVVTPAPASEGYAKVRVVNAGDPDLDAVKVSLGVLGVISQVTLALQPLFNRSVSFRRRGDGDLAERAVAFAGEHEFGDVVWYPARGEAVFRIDDRVATTKTNTISSGDFQNVIQSSRSTEQQQHGDVLPFQAGISVPLSRASAFIRDAQRLLDMNPGALCGGENGGILIRYVKASTAYLGKTEDSVEFDTTSCRHDGDAAMPEEMEQMALRKYGGVPHWGKNRNVAFDGAIAKFPKAGEFMKVKDAYDPDGLFSSEWSDAYADA

SEQ ID NO: 34629 - protein, 502 aa, Oryza sativa
MCDSPSSSSCSSLSLALAMGERMRRAAHAMLFPFPCSGHINPTLKLAELLHSRGVHVTFVNTEHNHERLLRRRSGGGALRGREGFRFEAVPDGLRDDERAAPDSTVRLYLSLRRSCGAPLVEVARRVASGGGVPPVTCVVLSGLVSFALDVAEELGVPAFVLWGTSACGFACTLRLRQLRQRGYTPLKDESYLTNGYLDTPIDWIAGVPTVRLGDVSSFVRTLDPTSFALRVEEDEANSCARAQGLILNTFDDLESDVLDALRDEFPRVYTVGPLAADRANGGLSLWEEDAACMAWLDAQPAGSVLYVSFGSLTVMSPEELAELAWGLADTRRTFLWVIRPGLIAGAGAGDHDVVTNALPDGFVAETKGRCFIAEWCAQEEVLRHRAVGGFLTHSGWNSTTESICAGVPMICWPGFADQYINSRYVRDEWGIGLRLDEELRREQVAAHVEKLMGGGGGGGDRGKEMRRNAARWKAAAEAATAKGGSSYGGLDKLVEQLRLGQ

SEQ ID NO: 34630 - protein, 497 aa, Oryza sativa
MATMDEQQPLHILFLPFLVPGHLIPIADMAALFAARGVRCTILTTPVNAAVVRPAVDRANDDALRGDAGGAPAIDIAVVPFPDVGLPPGVESGTALASEEDRGKFVHAIQRLREPFDRFMAEHHPDAVVADGFFTWSVDAAAEHGVPRLVFLGTGVFARSCQESMVRHNPVEACPDDDPDAAVSLPGLPHRVEMRRSQMIDPKKRPDHWAYFKMMNDADQRSYGEVFNSFHELETDYVEHYRTALGRRAWLVGPAAFASKDFAARGAAELSPDADGCLRWLDAKPHGSVAYVSFGTLSSFSPAEMRELARGLDLSGMNFVWVINGAADDTDASGQWMPEGFPELISPHGDRGLTIRGWAPQMLILNHPAVGGFVTHCGWNSTLEAVSAGVPMVTWPRYADQFFNEKLIVEVLKVGVSVGSKDFASNLENHQVIGGEVIAGAVRRVMGDGEEGAEAIRKKAAELGVKARGALEKGGSSHDDVGRLMDALMARRTSVDV

SEQ ID NO: 34631 - protein, 336 aa, Oryza sativa
MASGSEPIECQVLVLRVSIHCEGCKKKVKKVLQHVPGVFRCDVDARSNKVIVTASRNMDANILVAKLRKSGKQAEPWPEEPKQQQPPPPPAESQSQETKNQSDESSKPSDQPAEKPGPDKAEGSAAEPNNPQPSPEPTKSTDETPKPNQEIQEPSNAKANTDANASGNASDETKEAAATGEQSSEPKGKVKQHRERPIDARVTMEYGGGSHVNYMPQPQPVPVMSYNVARPTASAAYYAAPPAPAPMSMPMPMARPGPSSQGYIDEEYSPSYYNRSSPYEPYYYPQPSPYRYQHYQQSSADDYYYGAPQQRSAFSPPRDAYGEMFNDENSNSCSVM

SEQ ID NO: 34632 - protein, 74 aa, Oryza sativa
MLRTRPLRLLRRLPRAADELPLLDVDADDDCSQQQQEGSHWLLLARQLPMAVWNDAQGGATYSELLSCLFRGFR

SEQ ID NO: 34633 - protein, 185 aa, Oryza sativa
MAKLVALTFVVLVSIGLANAGRVARYASAGGGGGGGGGGGGSNGGSGWGSGSGSGYGQASGGGAYASGGGGGGGGGGGQNGGSGYGSGSGSGYGQAGGYGPYGGGYAQGGGGGQGGGGGQNGGSGSGYGSGSGYGQAGGYGPYGGGYAQAGGQGGGGGGGQSGPGGSGYGSGSGSGSGSAYGGHP

SEQ ID NO: 34634 - protein, 342 aa, Oryza sativa
MAGGGVGASAAAAATIPEAALRSGKPMPLVGMGTASFPLDAPQLPATVRDAVLRAIDAGYRHFDTAAAYGTEAPLGEAVLEAVRAGMVASRDDLYITSKLWISDTHPGRVLPALRRTLRNLQMVYIDLYLIHWPIRLRVEQETPSPVYDNDFVMMDMEGVWKDMEECQRLGLTKAIGVSNFTCKKLNTLLSFATIPPAANQVEINPYCRQNKLREFCKEKEIQLCAYSPLGASGTIWGSNAVLDCPVLKHIAVQKGKTVAQVCLRWLHEQGDCIIVKSFNERRMRENLEIFDWELTDADRQEISALPEFRGNRDFYVHESGPYKTTDEFWDGEITGPQLKTC

SEQ ID NO: 34635 - protein, 423 aa, Oryza sativa
MDKLNGSARLMIVSDLDHTMVDHHDEENLSLLRFGALWESVYCQDSLLVFSTGRSPTLYMELRKEKPMLTPDITIMSVGTEITYGEEMVPDDGWVEYLNNKWDRNIVVEETANVSELKLQVESEQRPHKVSFYVDKKSAQEVIKSLSEKLEKRGLDVKIIYSGGQDLDVLPQGAGKGQALAYLLKKLSSCGKPPNNTLACGDSGNDAELFSIPGVHGVMVSNAQEELLQWYSENAKDNPKIIHATERCAAGIIQAIGHFKLGPNVSPRDVDFPYVKENPVKPTDAVVKFYVLYEKWRRAEVPKSDSVTQYFKNITHANGVIIHPAGLECSLHASIDALGSCYGDKQGKKYRAWVDRLVVSQCGSEGWLVRFNLWELEGDVWSCCLTSLALNAKPETPEGFVVTHIHKTWLKGYSSADEQSSKL

SEQ ID NO: 34636 - protein, 240 aa, Oryza sativa
MRILRRFPRLLRRSNAAARSPAPMHRLISSPSLMASAAASWCWWSPLLARGGPVVRRVSRFPWEPRNMTTISRVKGDESYRRLPSQEKKHTAITQGMKTIDTRGTILEARAGDEKSNRDAASSEVSYIKYDVLGQSAKQDGCDEDDRRSETEEHVEEDEVLDPEEYTVNNILPKSRHRDGSIYRDIMDTPWKREFHIADRNESKLSFLYLYLLYYFLLEIICFLEHNESLSISINILLRS

SEQ ID NO: 34637 - protein, 407 aa, Oryza sativa
MAKLVGATLYLYLFLFLLLLHLHCHQCKPAAAASFVVHGGGGATARAAAVRAVFVFGSSLVDNGNNNHLNGSGAVRADYAPYGVDFPLGATGRFSNGRNVIDALGELLRLPAAGLLPPFADPATRGRAALHGVNFASGGSGILDLTGKNKGEVLSLKQQITNFEAVTLPDLRAHLQGATTATTTTGHKMKGQDFFDQCYLPKSLFIIGTGGNDYLLNYFNAGSGPTRAPLSEFTSSLLTKLSNHLQRLYDLGARKFVLFSIQPLGCTPVVRTFLNATSDACIEPMNHAALLFNSGLRSIVKNHNGGVRSHMPAASFVYVNSYKIISDIIQHPAKYGIRKTSRACCEVSRGGVLCQKGGAICSDRTKYAFFDGLHPTDVVNARLARKAYGSNSPDKVYPINVKKLAML

SEQ ID NO: 34638 - protein, 402 aa, Oryza sativa
MASPSPSPSPSSASNQRRSLPPSPAAASSVGSSPAFPPRKRRRSGRPPPFLGLACYDGFYPATEPHPSAERAIALARKADFEYGFVPWVPEEEAWGWFPLDACDGRVLIQSKYFPDDPDGGDFPRPRFMNYAVCDPLFKRYVMLPPVPDDLTANEGSLVDFGLCLAPSQEDEADTSFRVICVARYNTNLVAFVFSSVTRQWGIGSSSTWSSLGTEEPPNRHGLSCFDCVDGCFYWTVPSADKILVLDAIKMEFSVINYAHRVEDGFRACIAVDTEGTPGMLTVGEYLGNREFRFSRIAKQSDRESPNERLSENIIQLPSNCNKYFTLGAAEGFIFLRGIPEEEKVEDSSSEDLYMDPEEIEYYSLNVKTVEFEMVCAMDMDKCYFHVCPYFRFSPPSAKPCV

SEQ ID NO: 34639 - protein, 357 aa, Oryza sativa
MSMAEVCCDSAVVVGAEAEARARARAGRRRRAGVEGAGRWNATATAAGVAAEEAATRKRRASGGEAGLVVVAKRHGAASVAGRRREMEDAVSLREAFAAPANGEVAAARCDFYGVFDGHGCSHVADACRERMHELVAEEMGAGSPAAAAREPASWTETMERSFARMDAEVIAGCRAESGSCRCEGQKCDHVGSTAVVAVVEESRVVVANCGDSRAVLCRGGAPVQLSSDHKPDRPDELERIEAAGGRVIFWEGARVLGVLAMSRSIGDAYLKPYVTAVPEVTVTGRSDFDECLILASDGLWDVVSNEAACEVAQSCLRRGRQRWCAEAAAVLTKLALARRSSDNISVVVDLRRGNAL

SEQ ID NO: 34640 - protein, 766 aa, Oryza sativa
MAQDFVGSNNINLLQPNGQFGTRDQGGKDAASARYIFTLLSPITRSIFPKDDDILLNYLDEDGQSIEPTWYVPILPMVLVNGSEGIGTGWSTFIPNYNPRDIVANLRRLLNDEPVEPMDPWYRGFKGSIQKTGTKAGGVSYTVTGIIEVVDDTTLRITELPIRRWSQDYKEFLISIGGTDKSKDKDKDKGKGKGKVKEKEKKEKDIEPFIEAFDTYSDDKNVEFLITLSKENMAIALQEGLEKKFKLTTTIGTTNMHLFDSNGKIRKYDTPEDILKEFFGLRLEFYEKRKRVLLENIELELKKLSNKVRFILAVVEGDIIVNNRKRAELFVELKQKGFDPFPRKKQRAGPSAVGAIEEDEENEESPEAANVGSSDYEYLLSMAIGTLTLERVQQLIAEKGRMENEVAELKRTRPKSLWMRDLDAFEKELDALDEKDSMDAEERRATRNAGGGAAPNKAAPKRRPRKTATNTQAAESSDGNAAAPAVPKPAAPRKKPAGKASLADSEDEDYIAAIPKPAAQKKQPAKKASTQLSDDEDDEVLALKDRLAAYNLDDHSEDTAMETETTEEQAKGKKGRKEPSKRGAAKKAISSLAVISDDEEDETVPIDEDDEDDFAMEEVPVKKGRGKKPAAEKPKAATRKRAPAQGKSMRQKVMEEMFKPTEDSSTSAPSPEKKVRKMRASPFHKKSGSVLQRASTASTSTEETESSSPSGSSAEPVAARPKRQTRGNKKSYQEVQELSDDDTEDEVQDISDDSDFAGSDFGEDDD

SEQ ID NO: 34641 - protein, 77 aa, Oryza sativa
MGAARRLRFGLRAPAASAMSVLLLLLPSSLSLALSPPPPPPFFPPQWAPPVAGGGGPFAGEDARRWNISSDLYSGFR

SEQ ID NO: 34642 - protein, 615 aa, Oryza sativa
MMKHLVESEKAAENAGPTYRNVLAKDAGLLRPPPGVESCWDVFRNSVEKYPDSPMLGRRRVVDDGKAGEYVWMTYKEVYDVVMKLAASISKSGISKGESCGIYGANCPEWIISMEACNALGVSCVPLYDSLGAGAVEFIVCHAEIQIAFVEERKIAELLKTCHATSKYLKTIISFGGVTNDQKEEAKNHGMSIFSWEEFLIMGGDHHFDLPDCVTRSIGEPFDHDDVYISYLPLAHIFDRIFEELFISHGSKIGFWRGDVKLLVDDIAALKPTVFCAVPRVLDRIYSGLTGKISSGGILKKALFNIAYKLKLDSMRKGIKHEKAAPFFDKLVFSKVKERLGGKLRFIVSGGAPLSVAVEEFLRVVTCASVVQGYGLTETGAASFVAIPNDFSMVGTVGPPVEHLDARLESVPEMGYDALSSIPRGEVCVKGSVLFSGYYKREDLTQEVMIDGWFHTGDVGEWQPNGSLKIIDRKKNIFKLSQGEYVAVENLENVYGVLQEIDSIWIYGNSFESFLVAVINPNQQVLEHWAEQNGISGSLSELCENSRAKEYILSELTKIAKEKKLKGYEFIRAVHLDPLPFDMERDLITPTYKKKRPQLLKHYQGTIDALYKMAK

SEQ ID NO: 34643 - protein, 566 aa, Oryza sativa
MEDGAAGGDVSADRVIAELLDMGFEFDEISRAIGAVGTRCADVLEFMLGGSGNGKMKKASRETRSRSCVSSNAEARPSDDGNKLVNPRKRLKQSSITDHLASNTGCRRGSCGEKASTSYPCLAASDDPRAPVAVSADVCSALKPESQFLLANSRSESDLGHKISAVLRKHFGFSCVKGFQKEALDAWFAHKDSLVLAATGSGKSLCFQIPALLTAKVVVVISPLISLMHDQCLKLAKHGISACFLGSGQPDSRVEGKAMSGMYKIIYVCPETVLRLMEPLKKLAEKPGIALFAIDEVHCVSKWGHDFRPDYRRLSVLRENFSASKLKFLEHDIPLMALTATATIPVRADIIKSLKMSEDTVVVLTSFFRPNLRFRVKHSRTSVSAYKKDFRELVVTYNDSRNFRGKGQKALSEINPDSESSSYESPDDAMSDDEDANVDSMSHEDNSFGKTKVGMPLINENAEIPRVLIQYPEVTEAGLNFLSMQSEEEGLYEYLNAAMLLVMNDPKPISTSSEWGRGWADPAIRRQRLAGKKMGRRKGKRHSRSHSTGFTTARQRLAEILSKRRR

SEQ ID NO: 34644 - protein, 227 aa, Oryza sativa
MAAEMEVDDVDVHEVPECIASMIDRGSVESHRLFLARRTAMEMLRDRGYSVPEAEIARTLPEFRAWWAEKPGIERLAFTTTLVSDPSKKVQLVFCPPEPVKIATIREIYLQTKEENLSRLVLILQSKILSRAREAIKEIFKFKVDIFQATDLLVNITKHVLKPKHEVLSADQKAKLLKEYNVEDSQLPRMLETDAVARYYGFDKGTVVKVTYDGELTGKRVAYRCVF

SEQ ID NO: 34645 - protein, 394 aa, Oryza sativa
MASPEPCAAAAAPGSGFGAVDGVLPPELLLEVLLRLPAKPICRLRAVCRSWLSFTTDRLFLAAYAAVHPHPLLAVLVDSFPSRCCVDLVDLSGNVVEEILGVGGECRVLTASYDRVLVAGEHHRVSVLDPATGSVSALPFGIAEDMVRRNGMRPAWFAFGQTNSTGEYKLLRILEDLEDGYEADPVCEVFAIGDMNGRWRKMESPPGYLDPSCTNGVVFEGAAYFFLDHWQMDPSYYFATGCIPSFDLATEQWSTALQGPVNRILEEANGTLNYADLTDRLMLAQLEGTLCTAHFNDQISAVDLWFLVDFENGMWSKEYRINVEFAFDGFGDGVQPLLVTDEGNVVLWVQIGSKGMVWIYNPVTNTSSEIVQTKASIFTGVGVYTGNQLCPQSM

SEQ ID NO: 34646 - protein, 410 aa, Oryza sativa
MGVVGALLGPEAEALVRLRAAAWRLRREVAAATDDDEHWAFAYSMLHRVSRSFAIVIQQLGPDLRNAVCVFYLVLRALDTVEDDTSIPTEIKVPILQEFHRHIYNRDWHFSCGTKDCKILMDKFHYVLTAFLELGSGYQEAIEEITRRMGAGMAKFICKEVETVDDYDEYCHYVAGLVGIGLSRLFHAAGLEDLAPESLSNSMGLFLQKVNITRDYLEDINEIPKSRMFWPREIWSKYVDKLEDLKYENNSVKAVKCLNEMVTNGLIHTEDCLRYMSALKDITILRFCAIPQVMALATYALCYNNVNVFRGVVKLRRGLTARIINETNSMADVYTAFYEFSSLLAEKIDDNDPNASLTRKRVNAIKETCKSSGLLKIRGYDLDRPKRNPAMIMMLLLLLVAIFLGALYRR

SEQ ID NO: 34647 - protein, 336 aa, Oryza sativa
MPASHLMPELLEDPESETYRATVSMLRATLDADGILVNTFASLEPRAVGALGDPLFLPATGGGEPRRRVPPVYCVGPLVVGHDDDDERKENTRHECLAWLDEQPDRSVVFLCFGGTGAVTHSAEQMREIAAGLENSGHRFMWVVRAPRGGGDDLDALLPDGFLERTRTSGHGLVVERWAPQADVLRHRSTGAFVTHCGWNSASEGITARVPMLCWPLYAEQRMNKVFMVEEMGVGVEVAGWHWQRGELVMAEEIEGKIRLVMESEEGERLRSSVAAHGEAAAVAWRKDGGAGAGSSRAALRRFLSDVGGRELRSVETLLLWAFHEIVVARIGLPLD

SEQ ID NO: 34648 - protein, 393 aa, Oryza sativa
MAAPPRPIPSIHRQPPKPTTTHVARCFRDPPKAPDTNSNTNPLLSLLSAVPDWADAVSERRIRDRRPLYTHADWREHRSSRRHLRHLLSSLTSRVILSLAPPVSAFTAFAAAIATYNTLLPAYALTASSLPYQLTAPALALLLVFRTEASYARFDEGRKAWMRVIAAAADLAGMAMRHHNPPATRALLNYILAFPLALKCHIICHSDIKRDLQGLLSEDDLNVVLRSKHRPRCIIEFISQSLYMLDFDENKRNIMESKLSCFLEGISVCEQLIGIPIPLSYTRLTSRFLVLWHLTLPVILWDECKWIVVPATFISAASLFCIEEVGVLIEEPFPMLALDELCKQLHDSTQDVMSVQNLVHNRLAAKTKDQDSGSMRCSDNGWPSSKSEQAKID

SEQ ID NO: 34649 - protein, 359 aa, Oryza sativa
MGSNGGGGGGGKQVLWEFHATGPRNISNPSWRDLIRSSWTDPNYRRIAVSCFVQAAYLLELDRQEKRNGESALAPNWWKPFKYKLVRPLIDSRDGSIYGVLLEWDQLAALSDLIVLRPNGAPKVVLAIRGTVLKQSTVVRDLEDDFRFFTMESLRGSVRFTGALEALKSAIDKRGSNNVCIAGHSLGAGFALQVGKTLAQDGIFVECHLFNPPSVSLGMGLRKLQEKAGKVLKRYVSGSSSNATELSHPTEDGGAASEIGEEKLIKEVKRWVPNLYINSCDYICCFYADRSGVATVTAEKHDGHSGTHSKLFVIAKGPKKFLEAHGLQQWWSDDYELQLAVHDSKLMYRHLKSLYVNES

SEQ ID NO: 34650 - protein, 253 aa, Oryza sativa
MVVSAELEKVLGGVDVASARVSFAMGGGVDCPLQGFLFGSPVSDVESRPEYLQAPRDSSGSCGGGGRRTSLGELFMRTRFADEKVALVAVAEGEDGVAGDDGAAAAGVGGDRAGKGGGYKTMKKRKVKDEKGGGGAAGGGMPATVTKGKFQKILQIFHRKVYPENTLLTRNLTKKSRNRGATDNGGGAVATGDPDGPLASPVLRCRKDHPMRGFGCCTNGAFGASSPGGNAEMNGNKSGHWIKTDADYLVLEL

SEQ ID NO: 34651 - protein, 335 aa, Oryza sativa
MLSPASPLPPPDHLSFPFALSAAAAVSPSPGTQLHALLVKNGLFPSDHYVATALLQLHAARPDDARRVFDELPRREAIHYDLVIGAYARAGMAAEGLGVFRAMFMDGVAPDAVVLTTAITACAQAGALECGEWVHRYVERSAPELLGDAFVGSALVSMYAKCGCLEQAVRVFDGMPERNDYVWGTMVGAFAVHGRAEEAVSCLDRMAREDGVRPDGVAVLGALSACAHAGKVDDGLRLLREMSRRYGVAPGHEHYACTVDMLCRVDRLEDAVALIETMPMAPLASVWGCGAGGGGRRRARQARRRPRRGRVRAALQHLPRRQPEGRRAEGQEADR

SEQ ID NO: 34652 - protein, 474 aa, Oryza sativa
MSLRRFDLEIASRELVRASRPPPGFPPVLAVSNLDLILGPFPIYLVSVYAPPPGGVAAVVSAVRAALPAYLSHFFPFAGRVVRDPATNIPEVACNNAGAELVVADAAVPLAAVDFAQVDRSIGLMRVAFDASLPLSLQLVRFACGGFSLTVATNHLLADGRAFIVLLNALGEMVREGRLTSEPLLDRSLLMPRSPPRFSPSLDEEFSRFTPATMINPLMAAAIQRRLYRIEAADLERLREEASAGGGGGRRATRFVALCAHVWKLLARAVGDSDTHCRMAWIIDGRKRLEPPSVGGGEGGALDRYMGNVVTYTSREASVEEVLGAPLHAVAGMVRAAITAAMTRDRFQQLVDWMETKKAAAFKDGGKWTEAVNLGLGSPAMVISGLLPFAIDGDMGFGKPRLVMPWLQHGRLGSASATVVPSPAGDGSWFFAGTRLWPRLLEVVEAAGPDCLLKPATAASLGLAYPAGAHGSRL

SEQ ID NO: 34653 - protein, 481 aa, Oryza sativa
MAATGDSAAAAGEVRRLLAHLDSHQQLLASCHDAWSRALRWMCGRMDADFLAAEDGAGEDQFWVLGILLRSLFDSDGRKPPEIEDTLVERAAGVAKNWSEKFGIKMELYAPDNNEVEMTEAPLVENATATEKKEEHVDEEEEEEEEDPEEMVPASEEEADAEEVEKEEEDPEEVEKEGGEAEAKVANAAKTGEVEKRKVEEDKKASGREVKEGEKGGQAEVQIFLQMVAAFGLKDRYDVDFLRRLLVDNGRRRELARIACVLGFEDSLRDVIEEFIKSGNEIEAIHIAHEAGLLERFPPVPLLKSYIKRITNKTQVALRGGRHSNSVVEEANNSECNAYKSIIRCVETCQLTSAFNLDGIRKKVARMEKEKADRRKPSGMNRFQNNKRARGASGPQSFPPSKYSRGSNSNYGSSFRNPASHSFPYTDRAGFVGPAPGARPHFAPGSSMGTRRAGVLYGGPGATFGAGHGYGAGAGHQSYHH

SEQ ID NO: 34654 - protein, 300 aa, Oryza sativa
MAEVLASGATGLITSLLGKLASLLDDEYTLLREVRGDVEFLQAELSGMDDLLVRLVEMEKNGHGTKKWRVKLRELAYEVEDGIDSFTHRLGSARDRAGFVRGFMKQLNLMVRHQVARQIQELRDQIEVECARQMRYTQLGGGGSSSIDAAVADQIDCRVKALYVDPDHQLVGMDGPVASIVELLTMEEDESSARQLRIVSIFGPGGLGKTTLANQVHRKIKGQFDYAALVSVSQRPIRDILTKIAPSVIPTDSSSSLDTCQLIEIVKDFLQDKRYAHIFNSIFFFGLAQNLHLVHRTETG

SEQ ID NO: 34655 - protein, 72 aa, Oryza sativa
MTRGDQRERDRQRAQARKPVVKGRDDGLTPEQRRERDAKALQEKAARKAAQATGQGGICRHLICSHLTSGCV

SEQ ID NO: 34656 - protein, 386 aa, Oryza sativa
MQGSLWEDAQKQGNQARAPDIDLSELESLFSTAVATNASEKGGTKRGSAISKPEIVHLVDMRRANNCEIMLTKIKMPLPDMINAILALDTSVLDNDQVENLIKFCPTKEEIEMLKNYNGNKEMLGKCEQFFLELMKVPRVESKLRVFAFRITFSTQVEELRTNLTTINDATKEVKESLKLRQIMQTILTLGNALNQGTARGSAVGFRLDSLLKLSDTRARNNKMTLMHYLCKLLSEKLPELLDFDKDLIHLEAASKIQLKLLAEEMQAINKGLEKVEQELAASVNDGAISVGFREALKSFLDAAEAEVRSLISLYSEVGRNADSLAQYFGEDPARCPFEQVTSILVIFVNMFKKSRDENARTAELEKKKLEKDKEKATLSAKKVLE

SEQ ID NO: 34657 - protein, 485 aa, Oryza sativa
MAAEPAAAEAMDVEAPARPTTTTSTVSTSKGKSPHDLLAETRASVEEVAARILAIKKDDAPRTELRELVAQMSLLLITLRQANREILMEEDRVKAETEAAKAPVDSTTLQLHNLLYEKNHYVKAIRACLDFQTKYPGIELVPTEEFHRAAPADIRDKTLAADASHDLMLKRLNFELVQRKELCKLHEKLEQRKSSLLDTIANQKKFLSSLPTHLKSLKKASLPVQQQLGMQHTKKLKQHHAAELLPTPLYIVYTQFLGQKEAFGENIEVEITGSTKDAQMFAQQQAKQENAGTLSNGDNRVDDDAIDDEEDAQRRRSRSRKSVVKEASNSVVAYQLHPLKVILHVYDTEESGAKRRKLMVLRFDYLAKLNVVCVGIEDSKGLDHDILCNLFPDDTGLELPHQMAKLYAGEVPNFSEKDSRPYKWAQHLAGIDFLPEVPLSVGDDSNRASRSADLSSGLALYRQQNRAQTILQRIRSRKVAQMALT

SEQ ID NO: 34658 - protein, 444 aa, Oryza sativa
MARTPRKRRRRRGGGGHDYLSGLPDDVILAILSRLTTRQAVTLSALSRRFRVLPSQFGRVDSALVADPALPLPSLPARPSFIRRLSFAPQTRRFSSSAFGRLLDAAADRGLSELAVRLPRSAFLPQNLLSIRSLTVVSLDSCALPRWCPAACPGLRTLKLHHVAIPQRMISVILKAAPVLETLEMVYCMGFAGSCSMESSTVRNLLFKSALEQREVTVKMAGLRTITLYTRPKVQSVRLDPAPEIRKAYLHIARPRVKLQFRIRPFLDAGTGLTCLTLRGMAIKLLSSEYKDTPNLAVQFEDLRILSVSLDFSNERELIFLLKLLESCPNLQQLTLSAVDAKDDTALPNFADHEERLSKLSCLTKSLEQLKFLGFRPQRYQKELFIFLLTQATNLKKMAVEFPKDQEAAVRRILSVRKAPTQKKTTKYKQYYLELEYPVEPNCS

SEQ ID NO: 34659 - protein, 572 aa, Oryza sativa
MSSPFSVPSLIMEEEGRFEAEVAEVEAWWGTDRFRLTKRPYTARDVALLRGTLRQSYASGDMAKKLWRTLRAHQANGTASRTFGALDPVQVAMMAKHLDTVYVSGWQCSSTHTSTNEPGPDLADYPYDTVPNKVEHLFFAQLYHDRKQREARMSMSRAERAHEPYVDYLKPIIADGDTGFGGATATVKLCKLFVERGAAGVHLEDQSSVTKKCGHMAGKVLIAVSEHVNRLVAARLQFDIMGVETVLVARTDAVAATLIQTNVDARDHQFILGATNPRLRNRSLAAVLSDAMSAGKNGRELQAIEDEWLATAQLKTFSDCVRDAIASLNATDADKQRKLQEWSAATSHDKCVPLEQARDIAAGLGVTSLFWDWDLPRTREGFYRFRGSVAAAVVRGRAFAPHADVLWMETSSPNIAECTAFAEGVRAASPGAMLAYNLSPSFNWDASGMTDADMSEFIPRVARLGYVWQFITLAGFHADALVTDTFARDFARRGMLAYVERIQREERSNGVETLQHQKWSGANFYDRVLKTVQGGISSTAAMGKGVTEEQFKGSWTGPGSESSSHVLAKSRM

SEQ ID NO: 34660 - protein, 45 aa, Oryza sativa
MKSGPDSSLFQLLPRTQTGRSQLSWTRQVRRDLRGTGEGVSIDLF

SEQ ID NO: 34661 - protein, 458 aa, Oryza sativa
MGDPMITTPPGLYYISLAYVASLFPGAWVTRIAEAFDALCTTALLRSTNVIMAMICGVLVHDLLLCIRPKIGKRKATAFAILVALYPIHWFFTFLYYTDVASLAAVLAMYLFCLKKQFWVSAAFGAFSILLRQTNVIWMIFFAANGAIAHAQYLYVKDNVCYENSELTDKSNKEASHMDNKTTAPGLRRRRNNNPINKREVVSESNIMYSSFTEEIWDAIFKLWNSKCEVLIAFIPFAMVLLVFVAFIVWNGGIVLGAKEAHVVSPHFAQFLYFGLVSAAALLPWHFTPTRASDLFHWCRKNKTYSSFAILVALGLSLVAVHLFSIAHPYLLADNRHYTFYIWRKVIQVHWMMKYILTPVYVYSWFSIVNILGKSQTRLWVLSFVLSVALALIPAPLVEFRYYTIPLVILVLHSPVISNVKLLALGFLYAAVDFFTLAMFLFRPFQWQHEPGTQRFIW

SEQ ID NO: 34662 - protein, 398 aa, Oryza sativa
MTSLRCSSARVLPWLGLSLLLASLPPPTAMAATDRRRPTPSKPIVARLGKDAAARRRPRRPAALVDVPARAPHGPMQLQRVQGGELVPVSGQLPVLRRRPAGLRRQGVRLRRVPVQPGEWAVRTRGRRRRAARRERHGRQEPAVPGVVLGVRVVRAQRAPGVAPVGCRRRRGDVEAAAVAAVPGGVVAEGGEAVRAVPSGQRRRRRRRGHLRRRAVPAPSGAAHGDRRRSPPQPRAPPQEPQEWRLLPPRHRHRRQPRGGAHPAPRARPRRPPWHGRRHAEHRRAVHHAPARRLPRAARGVRRGHVGYPTRGGGEAVRDVLPGVRARHDAARLRRGEHRPGAGRRPELDAPRRQLAGAGGRTDGVLRVPRDDGDLAGGGRLAGDCHRRFPDGEQSAAV

SEQ ID NO: 34663 - protein, 629 aa, Oryza sativa
MPLLLPPPPTPTPPCASRDPLHAAPRRSRSPSTSRPPSRHRRTASARSTLPAAARDLLADDPTPRAFSALLKAASSSASPPRRPSSLGLGAQLHAQAVVRGFLGGDDSTILATAVLSFYASCREPDLARKVFDGMPRRNAVTWNALIKGYAQAGRREEAILLFRDMKREGSHVAPDRYTFPALLSGIGREGGSGRTLVSLYAARRTLEDAKVAFDQVGSSDPIVWSSMISAYVNCEEEEGALLIFFNMLCQDIKPTQFVYSTVFSVCGRMGILEMGKQVHAHSLKSNTEKDAAMFNALLTMYSDCGCINDAQKVFSSNDCVNVISYNSMISALGQHGYPKEALEHFRQMKFAGLMPDEVTLLNLISSFNHAGLVHEGLQMFNSMVDIEGIKPMYQHYACVVDMLARSGEIGKAMKTINEMPFEAEAPLWRIVLGACSKHRDIETGKRIAEMLFEMEPYEATNYILLGNIYARLGRWTEAEKVRSLMGERGVYKDDAFSWIEMGQRTYRFGVDDRSHPISREIYRNLDRLISTIKVAGYVPDISFAAHNIQRDRKEESLYYHCEKLAFAFGDLAAPSGGTLRIMKNLRVCGDCHCAYKYFSLVTGREIILRDNQRFHHFNSGFCSCGDYW

SEQ ID NO: 34664 - protein, 441 aa, Oryza sativa
MASMAVFLLVLLAALVSVDVAAAHSGGGFGFKATLTHVDANAGYTKAQLLSRAVARSRARVAALQSLATAADAITAARILLRFSEGEYLMDVGIGSPPRYFSAMIDTGSDLIWTQCAPCLLCVEQPTPYFEPAKSTSYASLPCSSAMCNALYSPLCFQNACVYQAFYGDSASSAGVLANETFTFGTNSTRVAVPRVSFGCGNMNAGTLFNGSGMVGFGRGALSLVSQLGSPRFSYCLTSFMSPATSRLYFGAYATLNSTNTSSSGPVQSTPFIVNPALPTMYFLNMTGISVAGDLLPIDPSVFAINETDGTGGVIIDSGTTVTFLAQPAYAMVQGAFVAWVGLPRANATPSDTFDTCFKWPPPPRRMVTLPEMVLHFDGADMELPLENYMVMDGGTGNLCLAMLPSDDGSIIGSFQHQNFHMLYDLENSLLSFVPAPCNLS

SEQ ID NO: 34665 - protein, 77 aa, Oryza sativa
MRRRRRHVRRLRRLRPAPAPSASASSAGVGTSLASPPSALFSGYEKNSTCVPGHGGMEDGWNFDVLCGINGLMCQRP

SEQ ID NO: 34666 - protein, 24 aa, Oryza sativa
MRPDLVSGGAEPEGSRQADASRPR

SEQ ID NO: 34667 - protein, 53 aa, Oryza sativa
MNAKSGDPNCPSLRPQVSQYLSKYVVLVSFRIEHFMQTTFTTSLRINTDDNKY

SEQ ID NO: 34668 - protein, 488 aa, Oryza sativa
MAAAAAAVGVVALLLLLPLAASAYGDGLGRAAVGVNWGTMTSHPILPCEVVRMLAANGVARVKMFDADPWTAAPLAHTGIQVMLAVPNDQLARLAGDPRRAYRWAEQNVSAYLEAGVDVRYVAVGNEPFLKSYNGSLINVTFPALKNMQRALDKLGLGDHVKAVVPLNADVYNSPENKPVPSAGSFRKDINALMVDIVNFLNMNNAPFVVNIYPFLSLYQNPNFPLNFSFFDGGSKPVYDKGVVYTNVFDANFDTLVWSLRKAGVPDMKIIVGEVGWPTDGDKHANVRYAQKFYDGFLKKMVRNIGTPLRPGWMEVYLFALIDENQKSVLPGRFERHWGLLTYDGKPKFSMDLSGDGLDNLVGVEVEYLPAQWCVFNKDAKDKFKDLPAAVNYACSNADCTPLGYGSSCNNLSHDGNISYAFNIYFQTMDQDVRACSFEGLAKITTINASQGGCLFPVQILSASERVVPLRFLPTSFLILLMVVSILT

SEQ ID NO: 34669 - protein, 563 aa, Oryza sativa
MRRGGGGGGRRLPKSSLAPSAASDRTPLLDPHVLHPRNLDLAFSRRDSDAASLCSSRPSSIGTGPSFAAPVTNFSDRASQAAALRVVNAYLAPAVSLRPPLPSAKDIVAAFRCPFKLTRSALKAPGTPHSWPPLLSVLYWLTLLVNSSESGAGGDDSPAASNDLMLYITNSYSLFISGDDDSVASLDEEYSSKARAHAQAAVEASQALEKEALDLESKRTKLTSGPSRLEALQAEKEALTADVEKFEAVVKSWTVKIQEKEESSVHLEKELEAKLMDQQRIAAENEELMKKVDAQVVNVRDVDRMQREIQSVERDNVKLENGNATLEEKGWELEAAVVGKLEEIEGLVEQCNQALRKLKPGIDFQYMLNTKASSPVELLGTSYKTIMKPALNSLADEARRISILKHDESVELEKQSQRNAKILSEKKNHISVCQTKTDEMVARLDSLDVEIGNHVSRCKADARLMKDELEKKDHHLSTVEKESEEFLKISEKKLEDAKRETDEEIQMCARELLKLIDSVTEYKEFMETSISGMRKDLYETVDDISSLASKAASTRQTSAQFVM

SEQ ID NO: 34670 - protein, 223 aa, Oryza sativa
MVMWPPAPVMELARLAVDSGGDPGAIHRALDPTMLPVPDVQRAKRNKCQLTRTPYGRRFANKDINSYLAFLFELIAARGPSVGLNVSLSRYDFFHGHLFLASGTGRLGILFHAKEYPAFDKELFPYSLGFCQAGSNVVYDDSMNLRNILWLAPLPSNETKAWLSPGVLVVLDAHPDGIIYQDMIRDYVRDVRTIYEDDFGEVSVDVNYLNVANSAPANRVFIC

SEQ ID NO: 34671 - protein, 547 aa, Oryza sativa
MQGGGGAASAAAAAAAAATQQHRELLERYELVRVRGRGSFAQVWEARHRRTGLSVAVKILNLAGLLASGIPIRKVEREIAVMRLLNHPHIVRFHEAIAGGDGGGHVYIVMELATQGQLYDYVTQLGRLREDDARRIFQQIISGAEYCHHNMVVHRDLKLENILMDSEMNVKIVDFGFSKFFRHNKVLSASCGSREYAAPELLAGRKYVGPPVDVWSCGVILYILFCGRLPFDSADVSELHRIIKRGEFSIPPYVPDDARDLISSMLIVRPDKRLTITEVRTHRWLQHSIPRYLAMPPLNARTQITRIDAETVDKVVGHGFERRYLVESLENRVENEATVAYNLILNKKFDAPTRYVWTIDVYQEAGQSNTTGAAEATGSSAAGEPPVAVAGEDDGRNNGWALGGVEFHECPREAMRAIAAALRETGVVYAHDDDDRGRYGKLLCARFAGAAGVRRIIRSYLAATDDAPSSSSSAGGGSGRGEAGHGGGAPVDDAVLESLSAAVFFEIQLYKSEGEGNYLMDLKRLSGPQLQYLNICSELSSKLRAIN

SEQ ID NO: 34672 - protein, 552 aa, Oryza sativa
MAMKFSSEDEGFAFYNQYAKEKGFSVRKDYSRRDRFSGLIFHKRFTCSREGFRKEVYMDYSGRTREPRALTHCGCNAHFEIKLDEIKGHWYVTRFVADHNHPLCKADEVAFLRSHRRITPAQQAKLVELRDLGLHQHQVMDVIERDHGGFEGAGFVTRDLYNFFVKMKKKRIDGGDADRVIKYMQARQKDDMDFYYEYETDEAGCLKRLFWADPQSRIDYDAFGDVVVFDSTYRVNKYNLPFIPFVGVNHHGSTVIFGCAVVSDERVGTYEWVLKQFLSCMCQKHPKSVITDGDNAMRRAILLVFPNSDHRLCTWHIEQNMARNLSPTMLSDFRVLVHAPLEEDEFERKWVEFKVKHKVSDENRWLNRMYNLRKKWAAAYTKGRVFLGMKSNQRSESLNSKLHRLLDRKMSLVILIEHYEHCLSRMRHQEAELDAKASQSVPFTSNDSTLIEKDAARVFTPKIFKKVKVELYMGMNWEVIDTIEEDNCVRYVLQMIGKDGVVILTGMFEEALLVSICCPCRKMECEYIPCNHLFAVLKLFKVRHHSDLLHST

SEQ ID NO: 34673 - protein, 542 aa, Oryza sativa
METTVSLLPHLLVKPSSSFSCCFTMGIGRRYGRIKVYAVLGDDEAQHAKNNMRGALFHVDNPGPMAPIAKGNFLDVNQALEVVRFGIQYCDWRARQDLLTIMVLHNKVVEVLKSLAIEFKSNGTLRKELAELQEELAKAHNQVHLSETRASSALDKLAQADNLVNDRLLQDGGSSASIDNYVSLASRTSSASRFVNKKTLRPSLDVSGPVQPYNPNLKNFWYPVVFSGDLKDDTMVPIDCFEEQWVIFRGKDGRPGCVQNTCAHRACPLHLGSVSEGRIQCPFHGWEYSTDGKCEKMPATKLLNVRIRSLPCFEQEGMVWIWPGDGTPESTIPSLQPPSGFTIHAEMVMELPVEHGLLLDNLLDIAHAPFAHTSTFAKGWSVPSLVKFLTPASGLQGYWDPYPIDMEFRPPCMVLSTTGISKPGKLEGKSIKQCSTHLHQLHICLPSSRNKTRMLYQMSLNFAPWLKHIPFMHILWSHFGEKVLNEDLRLVLGQQERMINGANVWNWPVSYDKLGIRYRLWRDAIERGANRLPFNNQSESGS

SEQ ID NO: 34674 - protein, 610 aa, Oryza sativa
MPEAPTAKTAPAYGYAPGAHAEALEFIEHVTANAGQVQRRVLGEILAQNAPAEYLRRYGIPGSPDVVDAFRRLVPLVTYEGLQPDILRIANGDTSPIFSGKPISEFLTSSGTSGGERKLMPTIADEMNRRSLLYSLLMPVMSQSVSGLDKGKAMYLLFVKAESRTPGGLAARPVLTSYYRSRQFLDRPRDPYTSYTSPDEAILCVDSYQSMYAQLLCGLVHRADVLRVGAVFASGFLRAIHFLEKHWARLCHDIRTGELDPEITDRVVRDAVGRVLRADPALADAIEDECARASWEGIIRRLWPRTKYIDVIVTGTMSQYIPTLEFYGGGLPLTCTMYASSECYFGLNLNPMCKPSDVAYTLIPTMCYYEFLPVNCNNATAEASHRDLVDLVDVKLGHEYELVVTTYSGLYRYRVGDVLRVAGFKNKAPMFSFVRRQNVALSVDSDKTDETELHAAVSGAVQHLAPFGASLVEYTSYADAATIPGHYVLFWELRAGSTAVPASVFEECCLSVEEALNSVYRQGRACDRSIGPLEIRVVAEGTFDKLMDYAISRGASINQYKAPRCVRPGPVVELLDARVQGKYFSPKCPKWSPGNKQWNKSKDLVGKGDA

SEQ ID NO: 34675 - protein, 205 aa, Oryza sativa
MESEADKAAAPAPAAAASVAETSDDAIQEESPAPAPSGKPGSEAAAKPEVEVQLFRRGRGPVAVFRSPLGGYTQDQLEVGDILEQHGLKSVFVFHPASRTRGVAIRFHPRNGRSLLTYVAGSTIFLDGEPKDSLLKPVTKVMIGVAAMTAVAAVLLKEGKMPEWLKESKLGNLNFPPWVLACMVIVFMRLRKRTKDAMKKFGWSS

SEQ ID NO: 34676 - protein, 269 aa, Oryza sativa
MPNPKNKNIKFWIASSPCILCGSMHRPVVAVGAVEGLRHGEQQQQDTGDHRDDRPWVAEVVVLEAGDPGAPLVVVVPVHLVREPREVAVVDVEHHLLAQPVEEVGHLGVAAQPVLDDAAVVEVLDVVGGVDEVVHEDGVGGDVVAARGGDVHVALLERDQVEEEGLGAVVDEDARDLEHAVVEPDVPEAVRVPPPAPDAGLPELRHAVDELLPPLVRHAPEPRPLLEPQPRGGRRGGLQPRAEEAAPEHVEAMEHRAGQRVELERRRRR

SEQ ID NO: 34677 - protein, 340 aa, Oryza sativa
MDAAAAAAAAGGGGGGGGSVAARSSPASVQATNDDAAASKLSCVNKGYMKDDYVHFFVRRTTKRAPIINRGYYARWSVLRKLLHQFLGAGNGSNDQNRKQILSLGAGFDTTFFQLQDEGIAPYLYVELDFKEVTSKKAAIINHYSQMKEKLGPEASISIEKGEVRSAHYKLFSADIRDIPKLDSVIQMAEMDPTLPTFIIAECVLIYLDPASTSSIVIWASDKFSTAIFFLYEQIHPDDAFGEQMIINLESRGCPLLGINATPTLSHKENLFLDHGWQRAVAWDMLKIYNDFIDSEERRRIERLELFDEFEEWHMMQEHYCVAYGINDAKGLFDDFGFKD

SEQ ID NO: 34678 - protein, 89 aa, Oryza sativa
MGAGDAPRPYAERLRLVRRSARGVDCCRPRRRPKPGGSAPPAAVVGAAGHRAPLARPSGRCAATACGLPIRPVLKHGPRSLTCVRVDGF

SEQ ID NO: 34679 - protein, 160 aa, Oryza sativa
MQSNLILGMAGSLLELMIQLKTRNPGVMCLHPHQIVRGMLLQFPKGMKVQMQSNLILGMVGSLLELMLQLTKTRNPGAMCLHLHQIVHGMLLQFPKGMMSGILLKPMSHVIRTGNQMDGVPEVAIGGAKETILVGPQGNLMAGVCLGDLMRGGHQGDTLT

SEQ ID NO: 34680 - protein, 547 aa, Oryza sativa
MPALQPPPASSPGRERERGDAAASSAGGRRRSRSPPWSPRARSPSLSRSPPSSSSSSSEDERENCETQTETAWMELGFSNSGPRGVTEITYLLRSHELKISELESKEQIYCNSLVQLEERIASLEYYKEKLLTRLSWTEEANSTLRSDNSKLKNLAYSLKERVDELEKDNFMLGLKMNEFAQEMERFQMQVGSTNTQMQDNLDDMAKAFESKERHVTFTQQKLADSINHHEERITTLEQDISQCTQHVQSLQVKVKSNTSQLETNNNDHHSLENRIQVLESTERQNASRLVKMEESIIHQHERTIGVEQDLSANITQHGQQIQTLQNKVQLQTNNNEAHLLENRIQVLESAERQNASRLVKMEDSIIHQHERIIGVEQDMSANITQHGQQVQTLQNKENDVLMKSFQSLLTCMVPFIVAFLLSMLSSQSDFGEYEKDLVIQVSLVCGLPGVMAMVFAHLASGPFWTSIVASLTLYFVIYSITLVYYAFIRLLPWSPWTRLQFYATVILLAIFLIVVLTMLIVWGSFVKKPKFTRWIASYFSCCPGPE

SEQ ID NO: 34681 - protein, 810 aa, Oryza sativa
MDTVLLSVSVYINSSMFHGQKQSTPKAARAATEDSTFHPLPALFKLTGLSPFKKAAFTPEDLYSRKRPLETKSSAPATKLTTEKLRLSSDGNEDDHAERIVSDSELDDIIGISDSSALEERDPPDALQCDLRPYQKQAFYWMMQLEKGSSSQDAATTLHPCWEAYKLEDKRELVLYLNVFSGDATTEFPSTLQLARGGILADAMGLGKTIMTIALLLADSSKGCITTQHSTHICEEASGLGELPVQPHDDVKKLAIPFSFSKLRKPKTPLIAGGNLIVCPMTLLGQWKAEIEAHATPGSVSIYVHYGQNRPKEANLIGQSDIVLTTYGVLSSEFSNENSTESGGLYSIHWFRVVLDEAHMIKSPKSLISLAAAALTADRRWCLTGTPIQNNLEDIYSLFRFLRVEPWRNWSLWHKLVQKPYEEGDERGLKLVQSILKPIMLRRNKNSTDKEGRPILILPPANIEVKYCDLSETEKDFYDALFRRSKVKFDQFVEQGRVLHNYASILELLLRLRQCCDHPFLVLSRGDTQEFADLNKLAKRFLHGGNGAVNGDSSLPSRAYIEEVVQELQKGEGECPICLEAFEDAVLTPCAHRLCRECLLSSWRSASAGLCPVCRKSMSKQDLITAPTDNRFQIDVEKNWVESSKISFLLQELEVLRTSGAKSIIFSQWTAFLDLLQIPLSRHNFSFARLDGTLNLQQREKVIKEFSEDKSILVLLMSLKAGGVGINLTAASNAFVMDPWWNPAVEEQAIMRIHRIGQTKSVSIKRFIVKGTVEERMEAVQARKQRMISGALTDQEVRSARIEELKMLFS

SEQ ID NO: 34682 - protein, 449 aa, Oryza sativa
MGGQGNTKTFSFSFGGGNPGAGGGNPFNFDFGDVFSNIFSGGSMGGSQHTGSAGKARRGTKSSGHDSSSVNIQEVTMQIFNKETADQGITWLLLFYTPNTKGQFVLESVVEDVARSLDGALRAGKVNCDHEKALCKKAGVSIGKSARLFIYSYTTTEKGSLHEYSGDYDSKSLKTFCQEHLPRFSKRVDINQFSFPSNIIPNLPQVLLLSAKKDTPAMWRAVSGMFRSRLIFYDAEVQDVSHPLLKSLGVKNIPALIGRSVNGEEQLLKDGISVKDLRSGIKELKNLLENFEKKNKKLASNQAKKPAHTDQPKENKIPLLTASNFEEICGEKTSVCILGIFKSSKAKENLEAVLSEISQKTLIRGQNYNSGNAVAYALLDGNKQSAFLSTFDKSAFKSSDKLLLAYKPRRGRYAVYDNEVTMEEAERFVVSVLNGDVQLSAAGRKPVLR

SEQ ID NO: 34683 - protein, 134 aa, Oryza sativa
MGTRHRSVQREGHGQRCGEEAHGEKTSTTRRKALGRCSRRKKGGGVLLLPLRRWSREGAEVVPRRCRSDHRRGGWRRRAVGRGCRRYAHQRQHHMGIRGDVDVLLLVLNMYWCFCLTCFFCGHKFVPCIFFWAI

SEQ ID NO: 34684 - protein, 483 aa, Oryza sativa
MDREGHTKADDQVALSTPPGNLSALSGILPDNTVNDVKQEGGISHQLNAAAHANMTPGTPLQQHPANRMLPSVNNQALMQQGYMQGANMPPRSQQLDQNLIQQQQQQPPQLQQNAQAQLQQPASLPLNQMQRPQLLPTNPLSQMLGNTGSNLPMASSHMGNKVAPNSVQLQMMQQQQQSRKMMMGLGSPANMGNMVNNVVGLNNIGNVMGMGNVRPMSSPMGNMSGLGNNPNQMSLGMVSSLSAPGIRPGMTHAAIAKMRMGLIQQQRAAGIYPQTSMVGMPGSSSPILPGSANLSMMNQLNRSNINPLQRAMMGPPKMPGSNYPLTPQQQMQLQQQFQQNPLQQQQLQQLQQQQQQQQQQQIQQQQQQQQQQQQQQQIQQQQQQMGSPLQQAAQVGSPAGSQQSLVMSQHQQISPQQMAAMSPQLSSGTMQQVNNNVINHVATPGPPPSPQLSSQTHGSVNSIANSPMEQLQGANKGGPGSM

SEQ ID NO: 34685 - protein, 325 aa, Oryza sativa
MPAPPAASWRRHAAAAAASSSTRKTLLLLLPVFLLLLLFVLSRAPDLTLSPAAASSRHLSAGVRPFDCYASQQASPVFASLVEGVPHPFFYSLADMGALPDHPHKNIARILKGKRFRKPDISETIQQLLGGKVGIGSRGVVVDVGANVGMASFAAAVMGFRVVAFEPVLENLQRICDGVYLNRVQDQVVVYHAAASDRVGNITMHKVIGRLDNSAISATGAKLAFKANEEIAVEVATIPLDEVILDAERVVLIKIDVQGWEYHVLRGASKLLSRRKGDAPYLIYEEDERLLQASNSSAREIRAFLSSVGYNHCTRHGTDAHCTKN

SEQ ID NO: 34686 - protein, 485 aa, Oryza sativa
MPVPGSQNGRPRPAKAETIHGLARAGDLAGVQRKLQENPALINDRNPVMSQTPLHVAAGYNNTGIVKFLLDFQGTDKVELEAKNMYGETPLHMAVKNSSCESAKLLLERGAHIEAKANNGMAPLHLAVWHALQSGDCSTVSVLLSYNADCYAKDDEGKIPSNHIPGGAGNEKLQKLLTRHMEEQRKRKALMSCREGKAMAEFEEAISQIVGLQDLKMQLRRWARGMLFDEKRRAMGLGIASRRAPHMAFLGNPGTGKTMVARILGKLLHMVGVLPTDKVTEVQRTDLVGEFVGHTGPKTRRKIQDAEGGILFVDEAYRLIPMQKSDDKDYGVEALEEIMSVMDNGKIVVIFAGYCEPMKRVIASNDGFCRRVTKFFYFDDFTTTELAEILHLKMNNPTESSLLYGFKLDPSCSIEVVGELIARETTEQRRKQMNGGLVDTLLINARENLDLRLDFNCDDANTMITITLEDLEAGLKQISKQRQLQ

SEQ ID NO: 34687 - protein, 359 aa, Oryza sativa
MIQELLGGTTMDQLKGASALNHASLPVVLQPIVSNPSPTSSSSTSSRSSAQATQQRSSSATSSPHGQGQGGGAAEQAPLRCPRCNSSNTKFCYYNNYNLTQPRHFCKTCRRYWTKGGALRNVPIGGGCRKPRPMPAPVAKPPMSCKAAPPLGLGGGPVSWASGQQAATAHLMALLNSARGVQGHGGSNVHRLLGLDTMGHLQILPGAPNGAGAGTAASLWPQSAPRPVTPPPPHMDSQLGMGTLGHHDVLSSLGLKLPSSASSSPAASYYSDQLHAVVSNAGRPQAPYDVATASLPCTTAVTSLPSALSSVSAAAPTSNTVGMDLPPVSLAAPEMQYWNGPAAMSVPWPDLPTPNGAFP

SEQ ID NO: 34688 - protein, 601 aa, Oryza sativa
MPTDNQADVYADASPLVTSVLDGYNVCIFAYGQTGTGKTFTMEGTERNRGVNYRTLEELFKIAEERKETVTYSISVSVLEVYNEQIRDLLASSPSSKKLEIKQASEGSHHVPGIVEAKVENIKEVWDVLQAGSNARAVGSNNVNEHSSRSHCMLCIMVRAENLMNGECTRSKLWLVDLAGSERLAKTDVQGERLKEAQNINRSLSALGDVISALATKNSHIPYRNSKLTHLLQDSLGGDSKALMFVQISPSNNDVSETLSSLNFASRVRRIELGPAKKQVDTAELQKVKQMLERAKQDIRLKDDSLRKLEDNCQNLENKAKGKEQFYKNLQEKVKELESQLDSKMHSQITSEKQQNELFGKLKEKEEMCTTLQQKIAEESEHKLRLQQQSESEIKELELKLKEQEHHRSVAESKAMEIGQELLETQRTEAMLQIKPRDLENNLQERTTLQDTNMILDSTNCMRVASTPGEAKAHLLTREEAMSEKEQHILRSSDSMNKKVTNNSSIVGAPEVVNEKKRKGDARNSSIGGELENQPVGSQNASRKRSLQGEPRLKRKSTEPLKNPGRVTATSKTAAATHKTGPVTRATRQQPAVNKTRGWVR

SEQ ID NO: 34689 - protein, 596 aa, Oryza sativa
MATAAAAGEGGSGRRYWRWSKADFFPEPSFASWRSYGGALAATVPRLVDRVGSRSSEAAEAGTLRAVSENPLRRCLSWLDLAFLGFGSVVGSGVFVLTGQEARFDAGPAIPLAYAAAGFSALLSSFCYAELATEIPSAGGSFSYLRVELGDIAAFLAAGNILLEAVVGAAGLGRSWTSYLAVLLGRDTDSLRIHVPALAEGFNLLDPIAVVVLVSTSAVAMSGARLTSTLNSLASVVGIAIIAFVLAAGFSHFDAGNLAPSFFPFGAAGVFRAAGVVYWSYTGFDMVATMAEETKNPGRDVPLGLISSMSSITVVYCLMSLALVGMQRYTEIDANAAYSVAFAAAGMRWARYVVALGALKGMTSGLLVGALGQARYTTQIARTHMIPPYFALVHPTTGTPIYATVAVTLGAACVALFSSLDVLASVSSISTLFIFALVAVALLVRRYHVAGATTPGQLRTFLAFLALVVLSSIGVSAYYNSRYARRWPGYAAFGCGWAAGAAGLAACAEKQRAPRVYGAPLVPWLPAMSIATNLFLMGSLGTAAYARFGICTAAMLVYYVLFGVHATYDVAHADDAAADNLEHGKIAAAPAPTTPA

SEQ ID NO: 34690 - protein, 270 aa, Oryza sativa
MRSLDDFTMKALWGFLEALSSSLCMNIYVVGLNQLYDIQIDKVNKPSLPLASGEFSVATGAVLVLTSLIMSIAIGIRSKSAPLLCALFISFFLGSAYSVDAPLLRWKRNAFLAASCILFVRAVLVQLAFFAHMQQHVLKRPLAPTKSVVFATLFMCCFSSVIALFKDIPDIDGDRHFGVESLSVRLGPERVYWLCINILLTAYGAAILAGASSTNLCQMIITVFGHGLLAFALWQRAQHCDVENKAWITSFYMFIWKLFYAEYFLIPFVQ

SEQ ID NO: 34691 - protein, 738 aa, Oryza sativa
MGTSVQVTPLSGAYGEGPLCYLLAVDGFRFLLDCGWTDLCDPSHLQPLAKVAPTIDAVLLSHADTMHLGALPYAMKHLGLSAPVYATEPVFRLGILTLYDYFISRRQVSDFDLFTLDDIDAAFQNVVRLKYSQNHLLNDKGEGIVIAPHVAGHDLGGTVWKITKDGEDVVYAVDFNHRKERHLNGTALGSFVRPAVLITDAYNALNNHVYKRQQDQDFIDALVKVLTGGGSVLLPIDTAGRVLEILLILEQYWAQRHLIYPIYFLTNVSTSTVDYVKSFLEWMNDSISKSFEHTRDNAFLLKCVTQIINKDELEKLGDAPKVVLASMASLEVGFSHDIFVDMANEAKNLVLFTEKGQFGTLARMLQVDPPPKAVKVTMSKRIPLVGDELKAYEEEQERIKKEEALKASLNKEEEKKASLGSNAKASDPMVIDASTSRKPSNAGSKFGGNMDILIDGFVPPSSSVAPMFPFFENTSEWDDFGEVINPEDYLMKQEEMDNTLMPGAGDGMDSMLDEGSARLLLDSTPSKVISNEMTVQVKCSLAYMDFEGRSDGRSVKSVIAHVAPLKLVLVHGSAEATEHLKMHCSKNSDLHVYAPQIEETIDVTSDLCAYKVQLSEKLMSNVISKKLGEHEIAWVDAEVGKTDDKLTLLPPSSTPAAHKSVLVGDLKLADFKQFLANKGLQVEFAGGALRCGEYITLRKIGDAGQKGSTGSQQIVIEGPLCEDYYKIRELLYSQFYLL

SEQ ID NO: 34692 - protein, 67 aa, Oryza sativa
MTSPCLGATSLLREMLSSKLCSLFLPRLHMISMRVTTTLTSQTLSCMLEGFSSLMNLMSFFRSISAF

SEQ ID NO: 34693 - protein, 795 aa, Oryza sativa
MRMAAGGRCCFRRGAPAAVLVLPLLLLIAAAALPRRALAATVAADVAAINGLYVALGSPALPKWTANGGDPCGDGWQGVVCIGSNIDSIIFNAANLEGQLGSLGNFTSITTINLSNNNIGGTIPEDLPVTLQHFFMSDNQLTGSIPTSLSMLQSLTDMSLNDNHLDGKLPDAFGSLTGLVNFDISSNNFSGSLPPSLGSLSSLTTLHMQDNQLSGTLDVLQDLPLKDLNIENNLFSGPVPPKLLNVPNFKKDGNPFNTSIAPSASPSSTPTGSTPTQTPSSPSSSGTPSPSSSPSNSSGGSTARDSSSPSSRKHKSSTLRIVGYVLLAIVLFIVTVLLVIFCLSKYQERQSRRDYTTSQVGRVHQRVEEPKVKQASVQSRNDAKKGSTEVPERRQVREINLAVPAALEKPPEKRKEHVINLQRSETEIFASTPPPPPPPPPPPPPPPPTPPPPPPRPPPPPPPPPPVEKVIVNPIVKPEKRVSTPPRTGPSTSATSFSVASLQQYTNSFEEGNLIRESRLGKVYLAELPEGRFLEVMKIDNANDRIPVDEFLELVASVSDIRHPNILELVGYCAEYGQRLLVYNHFSRKTLHDVLHEGEELDGALSWNARLQVALGAAKALDYLHESCEPPVVHQNFEPANVLLGNGFSVRVAECGLAELTLSGSVTQLSGRMRALLNYEAPEIHEAGTFTYRSDVYSFGVVMLELLTGRKPYDSSRPRAEQHLVRWADSQFHDIESISKMVDPSIQGECSEKVLSRFADIISRCIRPEPEFRPSMSEIVQDLARIISVTSEESE

SEQ ID NO: 34694 - protein, 761 aa, Oryza sativa
MSQTTAPMSRRRLSSILASTATASSTAASTTTAATASPARPSPPAHAAFRERLRSGTLGPDDARHLFDELLLRRDAPAPARGLNELLSALARAPPSAACRDVPALAVELFKRMDRCACPEAAPTIYTYNILINCYRRARRPDLGLPVFGRLLRTGLGPDVFSYNALIDGFSKEGEVDKAHDLFYKMEEQGIMPNVVTYSSLINGLCKTKEMDKAERVLRQMVGAGVRPNNMTYNCLIHGYSTSGMWKESVRVFKEMSSSLLVPDVGNCNSFMTALCKHGRIKEARDIFDSMVLKGPKPDVISYGALLHGYATAGCIAGMDNLFNVMVCEGVVPDRHVFNTLINAYARLGMMDKSLLMFEDMTKQGVNPDIITFSTVISAFCRLGRLDDAMEKFNHMIDTGVPPDTAVYSCLIQGQCNRRDLVKAKELISDMLSKGIPPPCIKFFTSIINNLCKEGRVAEGKDVVDLIIHTGQRPNLITFNSLVDGYCLVGNMKEAVGLLDSMESVGVEPDIYTYNTLVDGYCKHGRIDDALTLFRDMLHKRVTLTSVSYNIILHGLFQARRTIVAKEMFHEMIESGMAVSIHTYATVLGGLCRNNCTDEANMLLEKLFSMNVKFDILTFNIVIRAMFKVGRRQEAKELFAAISTYGLVPTILTYRVMITNLIKEESFEDADNLFSSMEKSSCTPDSRILNEIIRMLLNKGEVAKAGNYLSKIDKKGILPEATTTSLLIYLFSVNGKYREYIKLLPEKYRFLREQAAVDNCI

SEQ ID NO: 34695 - protein, 412 aa, Oryza sativa
MEGMLPSDPPGSDDDGNGTNMWTGQKDKLALDPCVSGDTNENAHACTSLTAVHQVLEESTNNTVHAMDMGVVTRQDDPLKASEEDINQHKDEQELWGPNVQTSQDDYFDYVKQLSPNSRRIDKWSLLSHDEMIEVKERHARYRIRFCKMLNKEFEDTMKDPAEYSRGELLKENYFLRYERDETLGWYFHPVHTWLAGLNDYQKLVLVNHDDSTEFLARDDYHSCFNTYEVDEDYVKYCEELPKKIKWIGDYVDLDRSSQEWSKMDNTTFFQALKIATNFCHMTVGLAQFAYMEYVWDLREISRLKEWPYFLHEIWKLVAKQKMNFNDALKVVYEMDMFHSFKFAVEAELNGDKLFGLEYRFSMCSKDISGDVEEGKALDLITKAVYREFHHTQTMCGYAAKKMDMAKKIGLV

SEQ ID NO: 34696 - protein, 56 aa, Oryza sativa
MSICIFTLSVAAHLLFFLYLYILISIESLLDGICYRPGPHYSIFQDFSWTRENTME

SEQ ID NO: 34697 - protein, 103 aa, Oryza sativa
MTNAPPWKNTRTGSAPARSFFPAPFAGGRYIRAPTPVLRSMTTSLDVTPVASSTPAGTRSVPSIRWTRPLLYSIRNGEKSNATMLSGSEAFTGGDPGGNGLRW

SEQ ID NO: 34698 - protein, 526 aa, Oryza sativa
MASRSRWSALAASALIQCFAGSSYCFAVYSPALKASQSYDQSALDKVAFFKDVGANAGILSGLLAAWAPAGRRRPWLVLLAGAALCAVGYLPIWLAVTGVAPAPLPLLCLYMLLAAQAQTFLNTADVVTAVENFPDRRGTVIGIMKGFLGLSGAILVQVYRTIHIAPSTFILMLAILPTAITLLLMYFVDVHRSDHQRYNKKFMDAFSLIAITVAGYLMIIIICDQVLKIISSAVQTVCFVILLLLVLSPVAIAVKAQKTESMKQEEETRDQAERIGLLQEQISTNASSSSDERCQELSTGKENMNLVQAMCKLNFWLLFLAMSCGMGSGLATVNNISQIGGSLGYSTKETSTLVSLWSIWNFSGRFGAGYISDHFLRSRGVGRPFFIGVTLLVMSLGHAIIASGILASLYVGSVLVGLCYGCQWALMPSITSEIFGLNHFGTIFNVVAVASPVGSYILSVRVVGYIYDMESPPGARACSGNHCFVLSFVIMACVCVVGSAVAFMLFVRTRRFYKRVVYARLQSFL

SEQ ID NO: 34699 - protein, 390 aa, Oryza sativa
MLDSADSTKVEQIFHSKDAVCRPLQTQKDKVQGETVDFLPQNMLPDVKVEEMDLTKTDAHVPEDIGPSLRKENAWIESGSDVGKNVSAVLDDVFSEPEVSSEAKTDTFSVEVRKSRSSDISCDNAQGINSLASIDKYLELHFEAEMVEWTCESCSKVAQKPGINLGKYSNPMMSSTNEDITVDGDQSELSEKITCRSEQSNGRPECHEGVQEAEPSCIPAEKQANLLSGQDQNASILSEERGEQVKLHHGAHQVEENQNEQKDWNKGGIKKHFISKLPPVLVIHLMRSLLGPHKVIGHVRFKEILDMGLFMDPSSEDKDNLSYRLVGVVEHRGLGNDAGHFLAYVRASPRQETSGSSSWFRASDDSIREVSLEEVLKCEAYLLFYERMEN

SEQ ID NO: 34700 - protein, 122 aa, Oryza sativa
MDFSSHMIFTLVFVRTYHKYGSKRFVKLLAWFMAIVQSLLIIASRKHYSVDVVVAWYTVNLVVFFVDNKLPEMPDRTNGVPLLPLSTREKDGRLKEEKDSRLKEEFHKLLNGNHGDPTDRVL

SEQ ID NO: 34701 - protein, 694 aa, Oryza sativa
MQNRRRSRPVVPTPMARVRHRHLLLLVAAVAAAASALLPCASAVRPFVLVLSRDDFLKDTAGAHPSLPSADADSDEWDDFDDESPATDPLLSPSSWVPLLDPASASPSGDEPDSPSDALFVAGVRAMLSAASAGDDAAFATAAAQIEAAATGGHPGAQSALAFLSGAGMTRPASRSRAFLLHKFAADAGDLQSKMALAYSFFRQEMYEEAVTLYAELAEAALTSSLISKEPPVIEPVRLHSGTEENKEALRKSRGEDDEDFQITEYQAQRGNTVAMHKLGLLYYYGLRGVRRDYGKAYHWFSKAVEKGDTRAMELLGEIYARGAGVERNYTEAYKWLTLAAKQQQYSAYNGLGYLYVKGYGVEKKNLTKAKEFFEIAAEHKEHGGYYNLGVLYLKGIGVKRDVMTACNFFLRAVNAGQPKAIYQVAKLFQKGVGLKRNLQMAAVMYKSVAERGPWSSLSRWALESYLKGDIGKALLLYSRMADLGYEVAQSNAAWILDRYGDESICMGESGFCTDMERHLRAHALWWQASEQGNEHAALLIGDAYYYGRGVGRDYERAAEAYMHAQSQSNAQAMFNLGYMHEHGHGLPLDLHLAKRYYDQAVEVDPAAKLPVMLALTSLWIRKNYDGSFLVHFIDSLPEVYPVVEEWVEDVLMDEGNATIFTLFACLVTVLYLRERQRRQAAAANPQQPDGAPI

SEQ ID NO: 34702 - protein, 65 aa, Oryza sativa
MDVSLYIICFHSFLSICWLVYTMINLLPCCFYLRYASVFTMFLLSYLKKTCLCYHCLFLVSHLTG

SEQ ID NO: 34703 - protein, 186 aa, Oryza sativa
MAASHQQLLTAAAVVVLASLRAVAQPAGDGYGNATFSLCSGVDNTQAAGRSTWSGRLLPPKPSRRPPLRRRTGPRAWLATGSTTRSRSAAPTCPRGTARGASPPASESSAGAETTCARKPRCATTTAASSASPRATTSPASTSTSTRRPCSTAGAAASPSPRRCPPACSPRWRPPPRRAGRGPPPG

SEQ ID NO: 34704 - protein, 221 aa, Oryza sativa
MDAQFESFRAQLDESSTLRDRIRAVVSEVESASRVASAALLLVHQPVPLADVLGKAKAQVEVIKGLYSRLAEILKECPGQYYRYHGDWRSETQAVVSMLAFMHWLETGGLLMHAEAQEKLGLSSGEFGLDVEDYLTGLCFMSNDFPRYVVNRVTAGDYDCPRKVLSFLTDLHASFRMLNLRNDFLRKKFDGMKYDLRRVEEVYYDVKIRGLVPGESKQEAA

SEQ ID NO: 34705 - protein, 335 aa, Oryza sativa
MIQAMASHAGGSGGGGGGSGRDAGSAQRGPMQGLARQGSLYGLTLNEVQSQLGEPLLSMNLDELLKSVFPDGADLDGGGGGGGIAGQSQPALGLQRQGSITMPPELSKKTVDEVWKGIQDVPKRGAEEGGRWRRERQPTLGEMTLEDFLVKAGVVTDPNDLPGNMDVVGGAAAAAAGTSDLNAGAQWLQQYHQQALEPQHPSIGAPYMATHLAPQPLAVATGAVLDPIYSDGQITSPMLGALSDPQTPGRKRCATGEIADKLVERRQKRMIKNRESAARSRARKQAYTNELENKVLRLEEENERLKKQKELDEILNSAPPPEPKYQLRRTSSAAF

SEQ ID NO: 34706 - protein, 328 aa, Oryza sativa
MECGGALQLPPGFRFHPTDDELVMYYLCRKCGGLPLAAPVIAEVDLYKFNPWDLPERAMGGEKEWYFFSPRDRKYPNGQRPNRAAGTGYWKATGADKPVGSPRAVAIKKALVFYAGKPPKGVKTNWIMHEYRLADVDRSAAARKLSKSSHNALRLDDWVLCRIYNKKGVIERYDTVDAGEDVKPAAAAAAKGGRIGGGGGAAAMKVELSDYGFYDQEPESEMLCFDRSGSADRDSMPRLHTDSSGSEHVLSPSPSPDDFPGGGDHDYAESQPSGGCGGWPGVDWAAVGDDGFVIDSSLFELPSPAAFSRAAGDGAAFGDMFTYLQKPF

SEQ ID NO: 34707 - protein, 348 aa, Oryza sativa
MASRILLPILLFLLCSRGGSGAPAARRGMRVPPLGGDPVKFDFSPFLIEYKSGRVKRLMGTDVVAASADVLTGVSSRDVAIDPANDVRARLYLPSFRATAKVPVLLYFHGGAFVVESAFTPIYHAYLNTLAAKAGVLAVSVNYRLAPEHPLPAAYDDSWAALKWVLANAAPGTDQWVSQYGDLSRLFLAGDSAGGNIAHNLALRAGEEGLDGGARIKGVALLDPYFQGRSPMGADAMDPAYLQSAARTWSFICAGKYPIDHPYANPLALPASSWQRLGCSRVLVTVSEQDRLSPWQRAYYATLRSSGWPGQAELYETPGEGHVYFLTKLSTPQAQAEMATLVAFINRN

SEQ ID NO: 34708 - protein, 219 aa, Oryza sativa
MMDVEDSDFYNFDADRCEKCFKRGQVWALYGDDDGMPRHYALVEMITPGGRFRAQIRWLDLQPDGGEGTPCGEFKVGRTVTVHSVNIFSHQVAYERVAREVYRIYPKKGSVWALHGGKDADSGRPKYEFVVFLSGYSDLYGASFGYLEKVEGFRSIFTRQDVGRDAVQTLHKGDMGKLSHQIPARRAPKGEGSTLPPTDCWELDPASLPSELLHDNQQK

SEQ ID NO: 34709 - protein, 224 aa, Oryza sativa
MLHGAFFQQRLGDDINARMFRETAQMDPSPALFVNDYNVESANDPNATPERYVELVTDLQKRGAAVGGIGVQGHVTHPVGDVICDALDRLAVTGLPVWITELDVSAADEAVRADDLEIVLREAFAHPAVEGIMLWGFMQGNMWRSHAHLVDADGKLNEAGHRYVGLRQEWTSHARGQVDGSGHFKFRGFHGKYVVQLTTGAGEMKYQQFDVGKGDGPLVLDMDL

SEQ ID NO: 34710 - protein, 592 aa, Oryza sativa
MYTYDKKANKRARKNAAAAAAAAAAAAAAAEATTRPAGVDTFWTSCNRCRMQYEYLRIYLNHNLLCPNCHHAFLAVETGFPCNGSSSSFSWSTKQQPQNNNSTKHSYGSTSRTSSIPGTGHGGYQQDGTYDSYNNQSFQWNQYSKTTPAAGTNAYGTQALEKPKRKHEESYSYNYSATGNSYGHERTNSRRGRFSKRRRHSNDGYTTMDFGGDNRETVAASTETTAFTDVAVAQVNGTSGEKLRSAVSGRRANVLREISQIDTRALLIEKAKAAIQEKLQEWNITSSSRLAERGKSQGKVYPSDNNIKQNGGLSDKHVKGLKQCSSRSVDTQAPTVDEKNPEQRRVPVSIDVPDPDFHDFDKDRTERAFDSDQVWATYDSEDGMPRLYAMVQKVLSMRPFRIRMSFLNSKSNSELAPISWVASGFQKTCGDFRVGRYQISETVNIFSHKVSWTKGPRGIIRIVPQKGDTWALYRNWSPDWNELTPDDVIYKYEIVEIIDDFTDEQGLTVIPLLKVAGFKAVFHRHMDPKEARRIPKEELFRFSHRVPSRLLTGEEGNNAPKGCHELDPAATPVDLLKVITEVTEDTATQPAK

SEQ ID NO: 34711 - protein, 447 aa, Oryza sativa
MALRRINLRKKPLLLFPRPFSSSSSPNPPFPPPPPPPNDRDDASPKPSEGEGRNPAASLFQDLRDRLMSTPSHLPSRRIPTAPPPRPSGNAEPVASIDDIRRQLESYRGSLAARGAPPGSSPDGAAPSLLDLVRSTSSPTSPQGPNSGHFSSLAESLRNLPSGRQPQQRRQPRSTTPFLSPTAHPIFGRELGENARKAEGKEENSAIELKKEYSYAELGKKLGQLRPSGAGNDGKEWFSLEELQGRIAKLANLDIADDMRLGGQYVALRKSLLGIQADQKTKDDIKKTRSMQGLSFLANIGGPATPQYLQHPPQEELLERYFHPDHMSSEEKMKLELQRVRDEFKMSENDCGSARVQIAQLTVKIKHLSTVLHKKDKHSRKGLQDMVQRRKKYLKYLRRTDWDSYCLVLSKLGLRDVPEYKAPDYKNKSTSKAKSKKSKSKKRKMKA

SEQ ID NO: 34712 - protein, 82 aa, Oryza sativa
MSGDGVLCLDGRGSRSVARQSDGFASQGSGWMDLLQNGSINIFAVTFMHSSVIRNGDLRVDTICCVLSSIWGNFANFLVQKT

SEQ ID NO: 34713 - protein, 425 aa, Oryza sativa
MESPDSSSGSAPPRVLRRQQQQPGSAPELPPGFRFHPTDEELVVHYLKKKAASVPLPVTIIAEVDLYKFDPWDLPEKANFGEQEWYFFSPRDHKYPNGARPNRAATSGYWKATGTDKPIMSSGSTREKVGVKKALVFYRGKPPKGVKTNWIMHEYRLTDTSSSAAAVATTRRPPPPITGGSKGAVSLRLDDWVLCRIYKKTNKAGAGQRSMECEDSVEDAVAAYAPSSQQHATAAAGMAGSDGAGGVAAAHGGDYSSLLHHDSHEDTFLVNGLLTAEDAAGLSTGASSLSQLAAAARAAATPCDATKQLLAPSPTPFNWFEAFLPRAKEFPSGLSRSSRDIGDMSLSSTVDRSLSEAGAVAIDTGDAANGANTMPAFINPLGVQGATYQQHQAIMGASLPSESAAAAAACNFQHPFQLSRVNWDS

SEQ ID NO: 34714 - protein, 141 aa, Oryza sativa
MFLIKIRGLKMMRILQTNHQCCLPQLDEILTEKKYIDRLRLWQVFFASPYEWWDNRQSKPYSYYPDFKHKDTGEKLWLRADDPPWVRRQLELQDQQLAENGHRDGSRTLKNHTWKSQDFDCSPSQDFGYSDDEELLHSSGA

SEQ ID NO: 34715 - protein, 204 aa, Oryza sativa
MGFVSGIDDFVFPPGQAFQFGSLDFITNDFGNISLLDSDPNQSGRGQASAPFGLPNSAEIYSKIISSESASNYSEEIQSTSTRPDQDDGAYPSILMKLPDDLAAIFTTRMSPPRRSRRDLVSAPIQSSSREVGVILQPLGTVSTEELDGYLSFPGVDSRPTEILEYDNFGYHYDYSNLDDFDEGYEDNYMPLFFGVFMANNETA

SEQ ID NO: 34716 - protein, 363 aa, Oryza sativa
MASSDDGVVALYGGGKVSCKPPAATFSVKVGLAQMLRGGVIMDVVTPEQARLAEEAGACAVMALERVPADIRAQGGVARMSDPALIRDIKRAVTIPVMAKARIGHFVEAQILEAIGVDYVDESEVLTPADDAHHINKHNFRVPFVCGCRDLGEALRRIREGAAMIRTKGEAGTGNVVEAVRHVRSVMGEIRALRNMDDDEVFSYAKRIAAPYDLVMQTKQLGRLPVVQFAAGGVATPADAALMMQLGCDGVFVGSGIFKSGDPARRARAIVQAVTHYSDPEILADVSAGLGDAMSASTSTTKMSSATPPAPTEQLLLLLLLPLSSSLSAPHRWMVNVNQQSSSLTNFLLTMDWRMDDCCCHYY

SEQ ID NO: 34717 - protein, 306 aa, Oryza sativa
MARHFTNATGRGMPLVCPTFSFLPQCHHVVILDSCNGLLLCRCHVSRETLQFQYAVCNPATGECVMLPDANWAIDENRTACLCFDPAISSHFHVLEYVEDEEYVEDEDEYDALVTGVVIYSSKTGLWSLHVNGWDDEVMVSLPVDRTRVFLNGFLHSVTTCDIVAVDMEGKKWRKIPMPDPDGDIGIIHQTQGRLCAFNVDPNDILELSIWFLEDYDTDNWILKHTVSSINLFGRKKYQLDFDYQVIAVHPECNLIFFVYGWHNTLMAYEMDRKEVRVIRKLGHESCLPYLPYVPMFSESLPDGWC

SEQ ID NO: 34718 - protein, 527 aa, Oryza sativa
MRRLSLGNREASNCSDQAVSGATLPRCSTRSSCSQQPNHSPNLDEEILEEEETSEEIWFRGPTRVPPQPTREEDKPVLTPVGDRQWRANDYGGNIRVPNSILTLLLKQWFPGIVTLKGKEEPAWSWKHYRIAPDTPRSNQIRLPSCLHRVEEDFWLYFRWAEGKEQEARKVVHNCVKGLVDRLFYETRILAVLNYQRKILKVNTSREIACRTYLTESEYLKVEPWWFLNSENAWRELIRLRWCNPKWQAVSRAHRIRREKMKGPSHRQGSANLSRYQKNLEKKKKRPVAPLEAYTEGRRENREDGQFSCDPRVAEKLEAYAAAYVQLHGPENDWRTSPIDPVAVHMAGGGKKHGRFMIGDGLIDSSAVFGDNSRDDQRPRRRLRTDHDNTNQVEDLLRQLQEEREAREREREEREREKERERQEKEQEKECEREERAREKEQERKEREEERKERELEKIASQQKSAFFEAALRVIQSKLNIDLSASGTPPLPVMLTHLASSGPVASNGNSGPNHVGVGAASGAIVNF

SEQ ID NO: 34719 - protein, 210 aa, Oryza sativa
MDSASPPSPPPAQASAAEASGASNASLRWRILRRALLARSASTSRAPEETSNDQQDKNDTNKISRKTSRGFDLIECHMLPISQSTKSHGDSSSRNENIVECHNDVRVCYKLPCEGSPKLNLVYRREDSLELNDIVASNRYNIDTTGLVCCWPSEEVLAYYCINHSDMFRSKKVLELGSGYGLAGLAIAASTDADEVVISDGNPQVVGCIL

SEQ ID NO: 34720 - protein, 243 aa, Oryza sativa
MLAKGRKVAGRGGDMSAHYAFGLQEDDAIIKRRLLTRTTTTRGEPPLKKLQKKFMSFATEVEKDADNISDCERLYKAFLQEINAFVLPLLKSKAVVDANLREKESFNELQDEIQRQILQAQTDIEELKKKLEQSRIERLYKEECEAIRKMISLQPPRSETEKLIAGLEKEIANLEAENTACIRTLELRKKQLSLLLHVVEELQISIEDEQRSIADELRAGAEEQQNMSTDEGSGDASDAMALD

SEQ ID NO: 34721 - protein, 76 aa, Oryza sativa
MLYLLTRMETKMVNQKVVTCPQLLMAFLILFNQKSAIPFMPKMTLMSITRWLMHKRIQGILLLLVLTKSIRKHVLI

SEQ ID NO: 34722 - protein, 369 aa, Oryza sativa
MEEKCDMSMGKWVREPKGPVYTNTTCPTLPDFKNCQKHGKDPGHLYWRWQPHGCDLPRFSPDRFLAAVRGKRLAFIGDSLARNQMDSLLCLLSQAETPTEVYRDAHDKFQTWRFAAHEFTLMVMWTEFYVHAEPVVGADGKPTPSFDIHLDRLSANWTRRLPELDYAVISGGNWFNRPNYLWEGGRRVGCVKCGGAANLTDVGVPYAVRRVVRAAVEGIARCTGCKAGLVAFLRTFSPDHFEHGAWFSGGYCNRTRPLEEDEVSPDSAAWELRRVQREEVMRVKETAAAAAAASGNARRFEVLDVTKAMMLRADGHPGAAIDKRWQKNIVSDCLHWCMPGPVDMWNEMLLQRLTEISTLDQDASIFEAP

SEQ ID NO: 34723 - protein, 394 aa, Oryza sativa
MASSPEKKDPPSCGSRDSQPIPCTDDPPLSESPTTDLGCHDPRDEDADHPAPPMGKGDIDEDSDDDGYADEETTCPGQNFTKEQAKEIIRKWLETYDKRNREFMVACEEFQKQGGDETSASCPVFPLKPLPETTDFCTTKSLCYHREYKTNDTSETASTIGWLEPKEMLQIFSLRLSSSMSYPISVYGIFAVRDYLDPLRNYVFNRTRDDPVIVEQDSFTLPLCSPCRGMYVVEYALFEVDLWVKMEGGVSNDKQLVSAYVEIFARGVFNKEIRGRILSDHCYLDIHYMYLSQSIEAVIQVSTEIDSNDPRHVRFTAFCSGFDREILLFNGKFCKDKSFQHIVAMKSKGKLVVHLEFEGSLFCWTFNNGELGAVNSPDDSVLKQFHVRVLFSPK

SEQ ID NO: 34724 - protein, 633 aa, Oryza sativa
MHNANRNVTESPVETPIPEQVENVEIEDRVGSCAHSEESTVDKDSECPEEGSDITSQNNNLPDHEDSTMLNVFEVASKLIKRDLDQEKQDTLQPGEVETRTVLDSNDKDTKENPSENSNTIGSEEVLSHGNQEDQKVPEMDKTKGRSDANAQVKLSGVNFYEDGDVTSAANNVTTRLTTNSKGQASSSSEMLTGRQHLPQDAGPAISQTSNGTFPSLEKTEEVCKEAGRELPTDKSAAFEDENSRACKSKAELKQQQFHSEKSSSLPKSAEGHIPSSADISRKETPGVQRLKEQGSLRTEREREKDKEASRRLEETKERDKKFEKEREIAEERERKKLEEQEREREREKDRLAVERATREAHERAFAEARERAEKIALERVTAARQRASAEAREKEERASTEAAAERAARIKAERAAVERATAEARERAIEKAKAEKAAAEARERRERYRSSFKESFKSSNLDNRQDTQFQRAVSSNLMRNPDSYSKGLEVESALRHKARLERHQRTAERVTKALAEKNMRDLLAQREQAEKHRLSEYLDPEIKRWSNGKEGNLRALLSTLQYILGADSGWQPVPLTELITAAAVKKAYRKATLCVHPDKLQQRGATIRQKYICEKVFDLLKDAWNKFTSEER

SEQ ID NO: 34725 - protein, 343 aa, Oryza sativa
MSPVRFNPWRAAEAEVQGVKRKGDSCYNKGSYGKAIKHYTRGAELDPSDISFLIKRAKALSGLGQYQECVRDCNDALRRGEELGSGSSGNKLISEALLWKASALEHLADCAADYEQVILLLRRSLETCHSEEAQIRLKGALFMREQYEELKSQKLECGAYPTYTQHLYPARLEERINMDKTRLNTLLKHATKELQKNEDKLSEERSRRKEYEDMVMAIQASIEQLTMNHDAELKSVREDKANLECQLLQCTEKLERLQSILNREPPFTCPIFLHVMEDPYITADGHTYDGEAIRAWLDAGHDTSPVTNLPLEHMELIPNRALRSAIVWWHEQQNAAREHRDMA

SEQ ID NO: 34726 - protein, 454 aa, Oryza sativa
MAVAAPARRLTPLTLRDFLEQSSSEGFRAYPRFPVADEGVAGGDLAPPVRLLIEAGLRRSPSRLPSFYNFFHKSPGTLAKISRLSRSLSRRFRDGLWRRRGEDDGEEDDDIAVDERDSLGLPSPVVSSCSSSECEYMAESEAELATTEEEKCASASSASEYEKTSQSSTGSVAFHGAADAGGDGHKEDVGDEPVGRKLEMEDKQQLSPVSVLDFPFDDDDGEEGSDAGMCSPSFQQCLAELQRSKAELLHKIRRLEGLTQVVVPVDLEAQFTESDSSERTHLNANSTSSSDDTATTAPTTPRQCTDDQDVVNHGEEEEEEHSLLARLLESVVVTDEVSEWLLLDFFAEGVDRLRSSASSCPLNDCEEAALLRAAGDWARGAGQRWGVGDVVFSGWAAVADMERSRRWMCVAEEERDVGAEVDGLVMDALVDELVADLALGGATTVGVEVCTCRR

SEQ ID NO: 34727 - protein, 140 aa, Oryza sativa
MGSLRGGGGGGGGGRGDCSKQEETERVMRSVDAEEACALLSSGRHQYLDVRMWEDFDKGHVAGARNVPYYLSVTPRAKEKNPHFVQQVAALYHAHDHIIVGCRSGVRSKLATADLVAAGFKNVRILEGGYLSLLRAANQQ

SEQ ID NO: 34728 - protein, 373 aa, Oryza sativa
MPRKERDSESSRRRRRRRQRSRSPSDSEEASDSSGSPRRSRSRNRRKSRRRDTPSSSDASDSQASDSGSDSGGRVRRRSGSRKKGEVTEEQIVEYMAKKAQKKAEKVAKKMKANAVSGYSNDSNPFGDPNLTEKFVWRKKIERDVSQGQKVDISVKGEKKKQRERMAEIEKVKKRREERAIEKAQHEEEMALLARERARAEFQDWEKKEEEFHFDQSKVRSEIRLREGRTKPIDVLLKNLNFSEEFDVELNEPYLVFKGLTVKEMEELRDDIKMHLDLDRESQINVKYWEALMVVCDWELGEARKRDALDRARVRGEEPPPDVLAEERGLHASIEGDVKDLLEGKTSTELEEMQSQIESQMRSGTAKVVEYWI

SEQ ID NO: 34729 - protein, 826 aa, Oryza sativa
MVKFTVEEMRRIMDKKHNIRNMSVVAHVDHGKSTLTDSLVAAAGIIAQDVAGDVRMTDSRSDEAERGITIKSTGISLYYEMSDESLKSYKGDRDGNEYLINLIDSPGHVDFSSEVTAALRITDGALVVVDCIEGVCVQTETVLRQALGERIRPVLTVNKMDRCFLELQVGGEEAYQTFSRVIENANVIMATYEDALLGDVQVYPEKGTVAFSAGLHGWAFTLSNFAKMYASKFGVDESKMMERLWGENYFDPTTKKWTIKHTGSDTCKRGFIQFCYEPIRQIINTCMNDQKDKLLPMLQKLGVTMKDLTGKALMKRVMQTWLPASNALLEMMIYHLPSPAKAQRYRVENLYEGPLDDIYASAIRNCDPEGPLMLYVSKMIPASDKGRFYAFGRVFSGRVATGMKVRIMGPNYAPGQKKDLYVKNVQRTVIWMGKKQESVEGVPCGNTVAMVGLDQFITKNATLTNEKEVDACPIKAMKFSVSPVVRVAVQCKVASDLPKLVEGLKRLAKSDPMVLCTVEESGEHIIAGAGELHLEICLKDLQEDFMGGAEITVSPPVVSFRETVLEKSCRTVMSKSPNKHNRLYMEARPMEEGLPEAIDEGRIGPRDDPKVRSKILSEEFGWDKDLAKKIWCFGPETTGPNIVVDMCKGVQYLNEIKDSVVAGFQWASKEGALAEENMRGRGICFEVCDVILHSDAIHRGGGQIIPTARRVIYAAQLTAKPRLLEPVYLVEIQAPENALGGIYSVLNQKRGHVFEEMQRPGTPLYNIKAYLPVIESFGFTSTLRAATSGQAFPLFVFDHWEMLSVDPLEPGTRQLTLSWISARGRV

SEQ ID NO: 34730 - protein, 376 aa, Oryza sativa
MAAAPARLVVLVLVAVVVVVGGDGDAGVIRQVTDGGYWPPGLLPEAQFAAFVRRHGREYSGPEEYARRLRVFAANLARAAAHQALDPTARHGVTPFSDLTREEFEARLTGLAADVGDDVRRRPMPSAAPATEEEVSGLPASFDWRDRGAVTDVKMQGACGSCWAFSTTGAVEGANFLATGNLLDLSEQQLVDCDHTCDAEKKTECDSGCGGGLMTNAYAYLMSSGGLMEQSAYPYTGAQGTCRFDANRVAVRVANFTVVAPPGGNDGDGDAQMRAALVRHGPLAVGLNAAYMQTYVGGVSCPLVCPRAWVNHGVLLVGYGERGFAALRLGHRPYWIIKNSWGKAWGEQGYYRLCRGRNVCGVDTMVSAVAVAPPPP

SEQ ID NO: 34731 - protein, 278 aa, Oryza sativa
MSSTSSSQSTKPAARSSATPSNENVRARDSGSSARSTAASQPSQTERTANSLWLDGRTIHFSINAWVLVVASLGILPILPKHIASKAYRLSLLGTICSSAYSLYVTYGKPRAWNMAAIQPWLQSIIVAKDFVHLMFSLMMFTSNVHYKIALLPVLCWALDHVARFLRRNFARSSLYRKYLEEPCLWVETNNTTLSLLCSNAEITLGFLMIVSLFSWRRNIIQTFMYFHLLKLIYHAPVTSGYHQSAWARIGRAVNPYIHRYAPFLNTPISAVQRWWLR

SEQ ID NO: 34732 - protein, 66 aa, Oryza sativa
MHFAILLWINCRGMKVCLLLLKPSPLRRSTLLVQKFWNLFQIMESLMHRFLLLLWPVYPKRSTWME

SEQ ID NO: 34733 - protein, 408 aa, Oryza sativa
MEPANAEDSVAKALRYRDQLVRNRTQSRGIHGVVEEDEGDGHHCLPELHGSNSFQVVEDASSAARRGRRGGHDGGRGKRPTTQSISSAPSSAARGGRPRKAPYKQPRPSSSGAATGVTASADNLCAEGFVDSETCNGSGMKEFDKAEWSTTNTRIFCELCVEQIEAGNRPIGIMTTRGYQNIAVKYLQKTGLRHSKMQLKNRWDILKALYSFWLGLLKDTGLGWDSTQGTVSASDKYWKQVTKGHSEWKKLQHGPPDCEDLLSQMFAEVAVDGSSACAPGEDVGGAGVQSLDDTPVDISLHRYTTNNKSVKRGCITTENSPLKKVKNPMVKVMKNIQSTLDTNCSIANKVMQGEFRYNSIKEVMDLVVECGAAEGSAEHFMATQLFVKSFHIVTCSRLLPPRREGSVG

SEQ ID NO: 34734 - protein, 144 aa, Oryza sativa
MTSPGASSFAAALVVEDFPWVKREEEMGMDPDKYREVFDLAQRGARAFRDGHFDEAVSFYSKAQTLRPGDPIILSNRSSAFCMISQVLRERSAADSEYQPLNGLDPTTHAEVALKDAEKVLAIGSNSPRPYLLKAYALILVKPS

SEQ ID NO: 34735 - protein, 538 aa, Oryza sativa
MATGPDLTPPAAAASAEAPSASAAKKDRHIVSWSTEEDDVLRTQIALHGTDNWTIIAAQFKDKTARQCRRRWYNYLNSECKKGGWSREEDLLLCEAQKVLGNKWTEIAKVVSGRTDNAVKNRFSTLCKRRAKDDELFKENGSLCSSTSSKRALVQTGCLTSGASGSAPPIKQMRPCNSDFKENMTPNMRLVGQDKSTQDSRQPLAIVYQNNQDNMNTMDTQNLVAKTAAKQLFAGEQNCVKHEGNFLNKDDPKIATLLQRADLLCSLATKINTENTSQSMDEAWQQLQHHLDKKDDNDMSESSMSGMASLLEDLDDLIVDPYENEEEEDQDLREQTEQIDVENKQNSSQTSMEVTSQMVPDNKMEDCPNDKSTEDNNMEPCPGEDIPTSENLTEAAIEDSLLQCVEYSSPVHTVIQAKTDAEIAASENLSEVLEHNRLQCIQLASPAQTTTPVEANAETPASEKLREVVKCNNPSCIEFTSPAHTVPTFLPYADDMPTPKFTASERNFLLSVLELTSPGSRPDTSQQPSCKRALLNSL

SEQ ID NO: 34736 - protein, 453 aa, Oryza sativa
MPTGKEGMEEPLPTDADHIGALPDTVLHHVLSFLPSQDAVRTCVLAKRWLDLWKSVTALRIGDRDKRKLWTVKGLQGFVDHFLLLRESVPLHTCVLRFIVFSEDLNETSRLNLWIKHALLRMVQFLQVSIRQNTAFYHQINLGILPFVSRHLSMLELHGVRMVGSFLDFSRCPALQHLEFDRCELPCDKILSESLKLLRITRCKFSQTSRVRICVPSLVSLRLDDFYRRTPVLERMPSLVEAFVRVVHRTYDCCGYDYINSGDCGNEHCKSCHGIKDDNNCVLLDGLSEAKTLALIDGTISFIFNRDLKWCPTFSKLKTLLLNEYWCVPDEFSALACILEHAPVLENLILQLYSEGPKHTMKIKGNCHPMDRSAAISGHLETVEIRCEVVDKRVLKVLKYLSTFNILFSFEQVKISEEDDSDDNDQEDEEDDDDDFYGEEEEEEEEDDEDEDD

SEQ ID NO: 34737 - protein, 455 aa, Oryza sativa
MQSAAVETTPAAAAAAENGGQVVVVVGGGWVDGCWARVRAAVEVAGRWVGGLARKVGGIAADDPRRVAHSLKVGLALTLVSVLYYVTPLFKGFGVSTLWAVLTVVVVMEYTVGGTLSKGLNRAFATLVAGFIAVGAHQVANRCGAQGEPILLAVFVFLLASAATFSRFIPEIKARYDYGVTIFILTFSLVAVSSYRVEELIQLAHQRFSTIVVGVATCLCTTIFVMPVWAGEDLHKLAAGNLDKLADFLEGMETECFGESATSESLEGKAFLQAYKSILNSKATEDSLCNFARWEPGHGKFSFKHPWSQYQKIGALSRQCASSMEAMASYVITLTKSQYPEANPELSFKVRTACSEMSSHSAQALRELSAALRTMTVPSTTSMSAAIKAAKTLRSELSEDKALLQVMHVAVTASLLSDLVTQVKKIAESVDNLARLACFKVPEKSQKEVAINIMS

SEQ ID NO: 34738 - protein, 829 aa, Oryza sativa
MLRTWIQYNRPSEPNFTHAGLLLAFGLHEHLRVLTMTDAYRYLSQEHDITRLGLLLGLAASNRGTMHPAISKMLYFHVPSRHPSSTPELELPTLLQSAAVMGIGLLYEGSAHALTMKILLGEIGRRSGGDNVLEREGYAVAAGSALGLVALGRGSNAFGFMDTFLDRLFEYIGSKEVYHEKHLNAAIAADEQSGNTGQMMEGAQINVDVTAPGAIIALALIFLKAESEEIAARLSVPNSHFDLQYVRPDFVMLRIVARNLILWNRIQPTKDWVESQVPSFVNFGVSNTSQEAMDSDELDSEALFQAYVNIVTGACIALGLKYAGSRNSDAQELLYAYAVHFLNEIKHISIQTASILPKGLLQHVDRGTLELCLHLIVLSLSLVMAGSGHLQTFRLLRYLRGRSSAEGQVNYGLQMAVSLAIGFLFLGGGTHTFSTSNSAVAALLITLYPRLPTGPNDNRCHLQAFRHLYVIATEPRWIQTVDVDTGLPVYCPLEVTVAETEYYDETNYCEVTPCLLPERSVLKNIRVCGPRYWSQVITLTPEDKPWWKSGDRTDPFNGGVLYIKRKVGSCSYSDDPIGCQSLLSRAMHEVCDTPSTSCSNQANSATRSSLRVDQLVSTFSANPSLIAFAKLCCQSWKDRRNGSFEEFCSQILYECMSKDRPALLQVYISFYTIIETMWEHLKIGHFPFSDSLFLSSLKVASAYNEALIDGRITTGGIIQSTFLESLMKRIEYIFAELPNLHDSFINYLNKGKWPDAQNEAVLLSWYLQWYSIPPPHIVSSAIEKVKPRTRTSLSMLPLLRLLLPTTHLVGLMEIEKLHMTHGHEGLTLH

SEQ ID NO: 34739 - protein, 770 aa, Oryza sativa
MDVNEEAMAAHKRAFLDFLDQDVGKGVYMQAVRDMVQNKRHRLIIGMDDLRNHSLDLARRVIRSPAEYMQPASDAVTEVARNLDPKFLKEGQRVLVGFSGPFGFHRVTPRDLMSSFIGTMVCVEGIVTKCSLVRPKVVKSVHYCPATGGTLSREYRDITSFVGLPTGSVYPTRDENGNLLVTEYGMCEYKDHQTLSMQEVPENSAPGQLPRTVDIIVEDDLVDSCKPGDRVSIVGVYKALPGKSKGSVSGVFRTVLIANNVSLMNKEANAPVYTREDLKRMKEISRRNDTFDLLGNSLAPSIYGHLWIKKAVVLLMLGGVEKNLKNGTHLRGDINMMMVGDPSVAKSQLLRAVMNIAPLAISTTGRGSSGVGLTAAVTSDQETGERRLEAGAMVLADRGVVCIDEFDKMNDQDRVAIHEVMEQQTVTIAKAGIHASLNARCSVIAAANPIYGTYDRSLTPTKNIGLPDSLLSRFDLLFIVLDQMDPEIDRQISEHVARMHRYCTDDGGARSLDKTGYAEEDDGDVNAAIFVKYDRMLHGQDRRRGKKSKQDRLTVKFLKKYIHYAKNLIQPRLTDEASDHIATSYAELRDGGANAKSGGGTLPITARTLETIIRLSTAHAKMKLRHEVLKTDVEAALQVLNFAIYHKELTEMEEREQREMEMKQQADHDAGASGGNADEHRSSGNDPMDVDVGNASNDQDVPAERIEAFEAILGQHVLANHLDQISIDEIEQTVNREAAAPYNRRQVEFILERMQDANRIMIRDGIVRII

SEQ ID NO: 34740 - protein, 58 aa, Oryza sativa
MGVCMWEGRILPARTLAQVVVMMDLDQTIHLSVPVHQVQMCCKEILQNHLEMGLVSYH

SEQ ID NO: 34741 - protein, 134 aa, Oryza sativa
MLIFISNQERTLVQEIAALKETGCISVPGEETKNRENLGERNSHSSTGKRRSLWRSIRNLFRGDDGDTRFASISAQSVTPLWTPRRGSHPAVLLLEGFLMITVLLFVISRTRIIRSTPKRYDRPTEAKEADGET

SEQ ID NO: 34742 - protein, 551 aa, Oryza sativa
MPRMVIIPPGVEFGHIIHDFEMDGEEENPCPASEDPPIWSQIMRFFTNPRKPMILAVARPYPEKNITSLVKAFGECRPLRELANLTLIMGNREAISKMNNMSAAVLTSVLTLIDEYDLYGQVAYPKHHKHSEVPDIYRLAARTKGAFVNVAYFEQFGVTLIEAAMNGLPIIATKNGAPVEINQVLNNGLLVDPHDQNAIADALYKLLSDKQLWSRCRENGLKNIHQFSWPEHCKNYLSRILTLGPRSPAIGGKQEQKAPISGRKHIIVISVDSVNKEDLVRIIRNTIEVTRTEKMSGSTGFVLSTSLTISEIRSLLVSAGMLPTVFDAFICNSGSNIYYPLYSGDTPSSSQVTPAIDQNHQAHIEYRWGGEGLRKYLVKWATSVVERKGRIERQIIFEDPEHSSTYCLAFRVVNPNHLPPLKELRKLMRIQSLRCNALYNHSATRLSVVPIHASRSQALRYLCIRWGIELPNVAVLVGESGDSDYEELLGGLHRTVILKGEFNIPANRIHTVRRYPLQDVVALDSSNIIGIEGYSTDDMKSALQQIGVLTQ

SEQ ID NO: 34743 - protein, 264 aa, Oryza sativa
MAMATTSSKNERWSLAGATALVTGGSKGIGRAIVEELASLGATVHTCARTEAPLNRCREELTAKGLAVTVSVCDVSLRADREALAGTVRELFGGKLSILVNCAGMSFLKPAVELTPDDCSQVMGMNFESCFHLSQLAYPLLKASQRGCIINISSIASVVAFCSLPNAVYSAAKGAMNQVTRNLAAEWANDGIRVNCVAPGFIRTPLLSEFVEGNELGRAEFSRVPMGRLGEPEDIASLVAFLSMPASSYITGQVICADGGRCLS

SEQ ID NO: 34744 - protein, 358 aa, Oryza sativa
MRARAADHLEALSLEIERKLQKALNSNSQRLQLLQQLFADIALKVDDRARDVILSTNDDGIAPVDEREDTRLCFYEILANHFVKVPESGRRILDLIVQLWSQSFAANIFALLFHRWLFEVPLDGKEVSLRYSSALVQGATNVFWIDIQTNTRHFLSLYNYLLEEVALVPDQLSKISVQAGRGLFLLLSRFMLFYDQDHLLASFLEHFPTFPNSFLVGGPADYYVIELTDQLQKLKVEPVLLHYLSRLTILQGLELRMSTSTRLKACLYSFTSPGGPTYPTRAVRHAAWNTLDLLFPVGRYPRHVISLFFRLLYPWYWPSSCWNFIMTCVKTVYYYILNLIVSSWENMRRPNHQRMHRD

SEQ ID NO: 34745 - protein, 223 aa, Oryza sativa
MAACAASTATIDWELLEAAISGDTRSMKMKYMDSHDPTILLGKNPQGNTCLHISSMCGHLEFCKDVLSLPQDPTVKKKLLTTVNVMNETPLLTAITSGHVTLAAFLLKYCHEQGFSEVILKQDKHKCNALHHAICNGHKDLALELIATQPALSKDVNKYGESPMYIALMMRDSKFTDIFEKLLGIDGSSHSGTYGYNALHAAIRNGNPGENYGVQLRSHGKLA

SEQ ID NO: 34746 - protein, 444 aa, Oryza sativa
MYAMNVPKFLWSEAVMTATYLINRTPSRILGMQTPCEMIFGKNEFVVPPKVFGCTCFVRDHRPSVGKLDPRAVKCIFIGYPSGQKGYKCWSPSERRTFVSMDVTFRESVPFYGEKTDLSSLFVDLDNSTSGHDGQQMEGEILGPKGDEQSKKEKFVVGSIPCPMGGPVAQEQEWRKPHEEENLQVYTRRTRCPVIQQVEEDNQVEKDVNHEQGSLESGGEEEEVREESDLPIAVRKSVRSNAGKPPLRYGFEDQDEGDEENNISNFVSYDSLSSTYKAFVASLDSMEIPKDWREAKQDPRWHQAMLDELEALEKNKTWDLVPFPEGKKVVNCKWVYTVKQNPNGKVERYKARLVAKGYSQTYGIDYDETFAPVAKMSTVRTLISCAANFDWPLHQLDVKNAFLHGDLQEEVYMDIPPGFATSQTEGKVLRLKKSLYGLKQSPRA

SEQ ID NO: 34747 - protein, 159 aa, Oryza sativa
MMSVFVCGWRSSTRRWRRSGRGRTGWCTRASTGIPTRRSRSRRSAWSRRTRASPPPPSARSRCSRRCSIATSSGDPPPPSLLAPSLSAAVGWVGGWIDGLRDLRFVNALGIWIVPCRLQDVVHKEKCIYLVFEYLDLDLKKHMDSSPDFKNHRIVKVRC

SEQ ID NO: 34748 - protein, 503 aa, Oryza sativa
MASKKALAMQPSKKICMTLLPQDIVELILLRLPVSTLLRCRGVCKQWDGIIRDPQFAMVHIQRAPRRPLFFFQRENLVHLLYPSEAILFDEAWSPSKWVVPVIEPDDFLCASCNGLICLHSDKSTIKIANLATGECMHLVKPVRNSKTDHFSYYSFGFHPVTKQYKVMHFLRDEHLHVGTSFSIIQVYTLGDEKWRDVRTPQALSLRCVERSGVVNVGGAMYWLTEDEESVWKHAVVTFDLSEELFQWLQLPAVDPANYVLGDPDQWLITEVDSNVSVSYYETGKLHIWTIDSKIEQSWSQKYNIRLSMLEVPGPHWICGDKIILHDFNKNLYFYELMGKNSEIESSKLVKQLRFSPRNNMQCFMFVKSLVRLDAFRKAGVVRRPKRQEGWKLKKWEVWMDRLHRLENHCRSIHDMKHKIYENADKMGMEIKLDLQQTPDLDSSLRLINWLEYRRVLEILCVNLDNMHEVLTVMNNTTGAAHNKESHVADQGTSSSAVGISGS

SEQ ID NO: 34749 - protein, 364 aa, Oryza sativa
MRSRRLPCADAVFRPRFTDEDARACSDSRGHFASGRDPSPPPLLPAQCEDHVGGTSGLADVSSLGDFPGATTLKESTASSPTSSLQAVPDDTIDAPQSGHCLSSSLGSIIWVQKPPHGRPGVYHIRKDRLGSFHTYPDLGGPFQSLNEAEDVISSHINKLYPPVKFEERAGESYVDMIIRKALYWPDGTRKKCSKAEAFQNVNNNMNQLAKVILDMYNDDHNLLEDLAFELKGVINYEPIIESRRWFDHINFTATTKGLNGLDSDHLFFAEAMSLKGEKDYVVTCCSLISSDDNGNCYTCKIGNKSMKHPSDVNSYVGGHCYIKGIYDTIVSSDSEEDEDAEEQRLRKMYQGLDDPGVCEELFD

SEQ ID NO: 34750 - protein, 67 aa, Oryza sativa
MKRTSSQLWGSVETSHLSWIKRCALKQLKIRVIVDPENVSDLSYQLLIWRNRIVVLKNVREQFHHLC

SEQ ID NO: 34751 - protein, 419 aa, Oryza sativa
MAPGTTLAPKRRKAEASPSPSPSPMGDSSDGGYSDSDLHDAEESFYSARSGSEDDRQVSSSNDDDDSEEEEQEEREMDEEEDEEDDDDEEMNEEDDEDEGEEMNELEKEYRTLQTNQQNILETLKQHRDDDVSKGQAVKNQKVLWDKALEMRFLLQKAFSTSNKLPKEPIRSMFCDHNQEIEQAYLDLLNSSKQTLGSMMELQEALLERNRATKDVTDTDNSSELNGEDDEWSEVQKLQKRITPFRNSEIDKWQRKTQVTTGAAALKGKLHAFNQNISDQVTSYMRDPSRMINRMHLRKSTLGVFGEEVGEHENNKEENNTEGDPELVDDSEFYQQLLKEFLESCDAGASESAFYALKKQQHKKRKLVDRRASKSRKIRYHVHEKIANFMAPVPMVIPPMAPKLFENLFGMGNQKSTTA

SEQ ID NO: 34752 - protein, 417 aa, Oryza sativa
MTVDDISSDDTSTNTKLEESSAKGEPCVSIGCEILEQETKSSHLDVILSHADAVASAEEMITESLILKKDSNENDLMYEKDQKDSDHISTDCKPEQSGPKDQVSEVNQDLESQIKCVSISPDDILVNKNDNVEGNMNADNFDLGLESKQDIVKPSSSNPSSVGDDLQTPDDDKEISLIDMSLQDTDMSLKKKEGSPDSIYPEKLNLDRSSGDESMEEDAMETKHMDSKTIPDYLEGKSEVTLEHVSSGDESMEEDVMETKHVDSNTKVEHVSSGDESMEEDVMETKHVDSNTKPDYLEGKNDVTLEHVVKEVILLDTVTEGSSVDQKEAISQEKPVMPTEKRKAEDQEVVANNEPIKRQRLWNVDDVKPEQATSKLSGSDASKVVHPPARRRSFGRSDSTARGNSPKERMGEVSLPF

SEQ ID NO: 34753 - protein, 403 aa, Oryza sativa
MSPSAPPSALRLRGLPKASLPASSSFPPSARFPHHLSMSASSSRRPPPLAATAAAAGTGSGASPSLLAADPGHRDAVLLAARGAMANCLGETSLHLAVPGLRLAAKGKVRDVYESGEHLVLVTTDRQSAFDRVLASIPFKGQVLNETSLWWFDRTRHITPNAVVSSPDKNVTIAKRCSVFPVEFVVRGYVTGSTDTSLWTVYNKGARNYCGNVLRDGMVKNQKLSANILTPTTKAADHDVPVTPEEIINSGLMSKEDFDEARSKALSLFAYGQEVALENGLILVDTKYEFGKTADGTIMLIDEVHTPDSSRYWIADSYEERFSSGLEPENVDKEFLRLWFKNNCNPYEDAVLPEAPEELVCELAWRYIFLFETITNTKFEIPKTQEPIHERISRNVAQALQNL

SEQ ID NO: 34754 - protein, 554 aa, Oryza sativa
MRRCGRIFFPPSLKFVSHSGGRLSATRFSTTGFDLPDWFRNPKDDGSCAGLDDEEDDIFVLPTEPNVSDERRSQSSTSRSLSIRPGFPATASHEDAEFEADIDEVSRILSARFASPEAIMIAMDCCSVRVTGCLVDKILTRFSNDWVAAFGFFMWVGTQGGYCHCADSYDLMVDILGKFKQFDLMWGLINQMVEVGGLMSLMTMTKVMRRLAGASRWTEAIDAFHKMDRFGVVKDTKAMNVLLDTLCKERSVKRARGVFQELRGTIPPDENSFNTLVHGWCKARMLKEALDTMEEMKQHGFSPSVVTYTSLVEAYCMEKDFQTVYALLDEMRKRRCPPNVVTYTILMHALGKAGRTREALDTFDKLKEDGVAPDASFYNSLIYILGRAGRLEDAYSVVEEMRTTGIAPNVTTFNTLISAACDHSQAENALKLLVKMEEQSCNPDIKTYTPLLKLCCKRQWVKILLFLVCHMFRKDISPDFSTYTLLVSWLCRNGKVAQSCLFLEEMVSKGFAPKQETFDLVMEKLEKRNLQSVYKKIQVLRTQVTNLKHMESFQ

SEQ ID NO: 34755 - protein, 680 aa, Oryza sativa
MYRKASKIENILPRGLSSQPLTGFPRRRRRGSMLTVTLLDAHLARCSSARHLLQIHAQFVASGLLADAFAASRLILFTTSTRLLPLPFHHSLRLLHVVHRPNAFSCNMVLKAAREHGLPHLCLPLYASMSAAPDCYTHTILAAACATRRAIEEGRQVHCHAVRHGFGRNLYLANALMSMYSACGCLGDARKVFDAGPVWDAVSWNTILAAYMQAEDVDQAVGVFARMPERGAAAVSSMVSLFGRRGMVDEARKVFDVVERKDVFTWTAMISCFQRNGKFAEALALFSDMRGEGWPVDEAVMVCVVAACARLEVTRNGEMCHGLAFRAGLGSRLNVQNALIHMYSSFLNVVAARRLFDSGQCLDQFSWNSMIAGYLKNGSVKDAKELFTVMPDKDNVSWTTMISGCVQNDQSSEALTIFNNMQAQGIKPDEVTLVSVISACTNMSSLEQGKSMHEYIREHQYTITVILGTSLIDMYMKCGCLESALEVFDTMEERGTPCWNAVIVGLAMNGLVMKSLDMFSEMESSSTATPNEITFTGVLSACRHAGLVEEGQHFFKLMQHKYHIIPNIRHYGCMVDLLGRAGYVKEAENLIESMPMSPDVPAWGALLGSCWKHGDNEVGERVGRKLVNLDPHHDGFHTMLSNIYASEGMWQHVKDLRGSMKLWHVPKIPGSSVVESSLPL

SEQ ID NO: 34756 - protein, 440 aa, Oryza sativa
MSHLQHLAAGELVTALRGASCPSSALRLYSLIRIHARPSDPALFAWRPAVLALKPLSAAASLPLLSHFHAHLIRSNLLAYPHVASSLLRGYSLLSPEHAHHLFDQIPPSTCNLVVVNVMLGSLCRSSDLASARAFFDGIPDKDVVSWSTMLACYFSHSRVAEGLAFFRTMTFTTQLAADYVMLVTVLTGCASAGLLPVSCRAIHGYIVRRGITFTMHLGTALIDCYAKAGRLDYASRVFCRVPLRNVMHWTAMICGSAAHLGSEKAIQLFEEMCRSGVQPNEMTFTAVLSACGQAGLVDQGRRFFKLMVDTYGFEPTIHHYGCIVDLYAKAGKLEDAYEVIKTMRMEPNIIIWTSLLAACKKFKNFYIAVEGIEKVLSMEISEENGGLYALISDLYAMGGQWEDVLRVRSLMEERNVWKIRGSSSIKVGEPQDFTFPAVS

SEQ ID NO: 34757 - protein, 494 aa, Oryza sativa
MAKPPPAPHRANRAPPGLCALPAISYNSHRGLVLGLTFVAYALYHASRKPPSIVKRALSEAWPPFHDPALLGETDVAFLAFYSLGMFVAGHLGDRLDLRLFLAVGMIGSGTAVALFGVGYFLSLHSLAFYLAAQVIAGLLQSTGWPSVVAIVGNWFRGRRRGLIMGIWNAHTSIGNISGSLIAAAVLRYGWGWSFIVPGLLIAFGGVLVFFFLAPYPEDLGFSPTTLPKAVSEASTDEEDSSSSASAAGGAGKEERRDAVGMWKAFAIPGVITFALCLFFAKLVAYTFLYWLPFYLSQTAIGGKEMSVTSAGYLSALFDVGGIIGGILAGFISDHLNARATTAAIFMYLAIPSLYAFHAYGSTSEVANIGLMMISGLFVNGPYALITTAVSADLGTHKSLKGDSRALATVTSIIDGTGSLGAALGPFITGFISKRGWDSVFTMLIFCALAAGVLLSRIVKSEIVHIIQNRRNHTLDMHNRTADSGAQPLLEGDT

SEQ ID NO: 34758 - protein, 524 aa, Oryza sativa
MSQPVTPRRTTRSSASASPSPAPASPTSPPKSRPKPSPRRQLLAAAAAPPKEDGSSADALLAELPGRRAQAMDILRLLAPAPALPLMLHGGAATGKTRALLLALRYLRPSQRLVYAALRSLPSPRALFASLLSQLSATPFSTSSRHRVPDKPSDFVAALRDALNGIVSQGEVVYLVFDNLEVVRSWDKGGQLLPLLLRLHDLLQLPQVVLVYVSSATPDAYYSMTGSVEPNYVYFPDYTVDEVRDILMHDHPNPKLYSSFLSVALKPLFRVTRRVDELSAVLEPLFRRYCEPLGDLKAVPDEGMKRRLFEHVQSHLAVALNETFNVPMRASMDEIKDGGSAGKGSAKRQFAGKDGLSSELEFHMSVSAKYLLLSAFLASRNPATLDAALFDSTGGLDNRKRKRKSSQASMHMKDTIVEEMLMKGPGTFPLERLLAIFQCITSVSEDILDEIDCPGNMASESGTTGLMSDVLLQLSTLCNSNFLSKSRSCPLEGSARYRSNIDEDLALKVARSVNFPLSKYMYRR

SEQ ID NO: 34759 - protein, 60 aa, Oryza sativa
MPAHWILKSVALNSLSSSLISLLKRKRIQFLECLQFHMLEAICLGQGSFLLIRWLVYSKG

SEQ ID NO: 34760 - protein, 349 aa, Oryza sativa
MDWSGLPGDLLRLFSGRLHDPLDFLRFRAVCRAWRAATAAAAASPPPFLPWLLARPAPINPTAGPGPSLSFYSLSSAALRSVAAPSATCSLLGHTNSHLLFSDHGPLLLLVNPLTGADLPLPPSPFDAFSPITQGYYLPGPDSPVVLYDTRRIFFHHPAGGGGGWTTVPVVDLVAENMYHAGKVFVCNDRGHLTIFDAATLAVLGDAAPPPPPPVTLHRDAFKCSSFVPSGDDLLCVIRYFRRKNTEQAGELLEDCRALEVHRLEIAGEKSRWVQMRSIGDRMLFVGLYQGFSLRAADFAGLEGNCVYFFKMDRASRSFIYRFSMEDGQIEELPGPSMHACTWFVPSLS

SEQ ID NO: 34761 - protein, 46 aa, Oryza sativa
MFNGLICYCQFDTQVSSYLPSKFALNPKFQVVSNMFCSMPSPYTMN

SEQ ID NO: 34762 - protein, 455 aa, Oryza sativa
MAAESSAAAAAGGGERRGPMDLNLYLGLPPLPPPPGRLDVAADYPSLLLNSAATVANEQRGSVVVAAPPPAAAAYSPSNALSAPEQVLVDPVAAWLVDPGEQQPVPPLETPSYMARASSTLPQIFACAALEMLVQTGGAIPPTGLIRGAEIAAASRPMTPENRLRRLIQVSDQHGVGNGRAGTGPVSRSRRANSPEADNLARAIQRSHNSLEASRRQMLDGDGSDATKKDDGCGCNGSFECNICFESAKDPVVTPCGHLFCWPCIYQWLHGHSEHSDCPVCKGEVLEVNVTPIYGRGGGEENSSRNDIQIPPRPSAQRTESLRQQLQRPDTRGGIANMVRRLMQNQDIVVGQAASSAPRPRGRGRRQARQDAPSAPATQQQVVNADAGSGNQAPLPPPDANGAAPAAAVAPQQSSSVEQASTSSTVGVIAGGPAQGRRSRVSESTPARRTRRRHQ

SEQ ID NO: 34763 - protein, 308 aa, Oryza sativa
MASFRLMIAAVSLSLVQLSMGSRRLMELYIPPASDQLTYHHGSVLSGDIPVSILWYGKFTPTQMSIIADFVVSLTGAPNAATPSVGQWWGTIEQLYLSNAATNSQTSTRVLLDEQVSDEQCSLGKSLTLAQIDQLAARVGTKRGGVALVFTDEDVTVEGFCSSRCGKHGSDASAGTTHIWVGNSAKQCPGQCAWPFAQPVYGPQGTPLVAPNNDVGADGMVMILASMVAGTVTNPYGDGFYQGPQDAPLEACSACPGVYGSGAYPGNAGKLLVDATTGASYNANGANRRKYLLPALYNPATSSCDTLV

SEQ ID NO: 34764 - protein, 115 aa, Oryza sativa
MSDENVGVCVVCRVPCRKKGGVRFTINGFRYFNLVLITNVAGAGDIVRASVKGTSTGWMPMSRNWGQNWQSNSVLVGQALSFRVTGSDRRTSTSWNAAPAGWHFGQTFEGKNFRV

SEQ ID NO: 34765 - protein, 128 aa, Oryza sativa
MTPPPGRSAPLSPPASSLCASSPHDGPPPDQRPRLLAPPQCRTSAEALPHCCPWPGTGPVASDRHHSASAARRDAAATRPATSVATANTRVSSSLIEIESTHIHHQPPAGRRAPASRMGRPPCCDKVG

SEQ ID NO: 34766 - protein, 593 aa, Oryza sativa
MAAEVGQRFCSGWSYSDVPYNDHHAQTDASVQQMVLDHGSVSFGRFAAESLSWEKRSVFDHNRRQEELSNLTMPGLVAQKKAFFEEYYKRARLLKAQEEVNQTEATSEEGTDHYDANGHNIHEHKLPAVSSEDPVASAPSSSFEPSTGVSSSGEKKCQDPHGLGYLTFNPLFSQITGSQNIQLEGPVSDQMHHAEGDFPCATHTNTRDVLNHEPLERKVLAPKHIVSNDNGENVAVSRIALPIASLQREHLKIDLERQEPRKNALISSMPTKSSKEPSTSVIHIPRIDSIRNSENRNSLELKDPFHKRVEMKLRALSDRMNADKATASSRSVFHQHAERAVTSSRSSMTSCRSSTYQNGDRVATSSRSALGQNADRVHASSKSAQQASRRSLREPHGAVSLPRAAVNKGSHVSHVALSNSTTQKFVTSHPKHSVMPNSSQRASTLHTTQVSLKRSAGVSSVNNRPQNKRKQLSTPSTWDENKLNRGYARTSAPSSARSSSVGILPYKTAKAPKISNGNNVVVKQTEMMQKSRNGSHPAGGRNVQPKNVVSCNEQKRKVTPFQASSLSSSTRNNQASGPSMSKSKPRQERPRWR

SEQ ID NO: 34767 - protein, 629 aa, Oryza sativa
MAKNGGAHGAATLFGLLALASMVKLGFVAGGGHDYAMALRKSILYFQAQRSGVLPPNQRVSWRASSGLFDGKANGVDLVGGYYDAGDNVKFGLPMAFTVTMMSWSILEYGKQMAAAGELRNAMDAVKWGTDYFIKAHPEPDVLYGEVGDGDTDHSCWQRPEDMTTSRQAFRVDPQHPGSDLAAETAAAMAAASIVFRGTYPGYANLLLVHSKQLFEFADKYRGKYDASITVARNYYGSFSGYGDELLWAAAWLFEATEDRSYLEYLAGNGEALGGTGWSINQFEWDVKYPGVQVLAAKFLLQGRAGDHAAALQRYRQNAEFFVCSCVGKGAVNVARTPGGMMYHQRWNNLQFVTSASFLLTVYADFAAISGRGAVHCPAGAAQPFDILKFVKSQVNYILGDNPRGTSYMVGYGASYPRQVHHRGASIVSIKRDPSFVSCQEGYSSWYGREAGNPNLLDGAVVGGPDEYDDFADERDNYEQTEAATYNNAPLLGVLARLAASCGGLKEEEYEQETATPVVNRTSSSSSLPATATAIGIEQNVTGTWARRRRTYYRYAVTVTNRSRGKTVRELHLGVSGLRGRLWGLEEARYGYVPPRWLPALRPGRSLRFVYVQPAPAPANIWVTGYKLV

SEQ ID NO: 34768 - protein, 592 aa, Oryza sativa
MADAGELEGFRRLSGLAFDELSRRDLSSASGPPPADLPTLLRLCLLSLPLSADAELALRRCTRLLASLRGILCRDLDPSLLPALEVFLDNLVSSNQLMTCFTAANAVMPRRSRITSLGSVCSGGNLFVMELMSHHFISSVQDEEGFLSALSWSAKAKLEVPEIGLSGALSLLHKSCLLSIPPAVQAHFLLLACRCADNGDLNMNLLAFEHAMDVYLSYLPALGVFRRTSGVKRPLGCSMKRRPLSSCLQAATHQKLACDINRLVLFCNLHSNDDLPINESDIVRFIEENQQVLHEQSRQDTITAVKSIVSNVLLLAKQEEMDRLYPNVSEEIICLAAALRLMGSSFIRIMHCIRQMTVGDGCQTTHCLEPCKVFNIVSETISLLGHYEPNELQRNDLFDTIGKPGDGQQGAVLMLSHFATLSVHCLRMRFNFMWKGCIFMMMMANLCATEMYHFLIDGSKASKVRCADQDGSLKASVPRKSSTVIALRFQNTQQVYIQDKLGPGFGEVCSSDSLQRCTSSYGRDNVRTILKGLTGRGEDSSDLYDFIECNPSLDYSNWWTQRKKFKKFKDHKWIRSKRHSMSRLRTSKVWLR

SEQ ID NO: 34769 - protein, 77 aa, Oryza sativa
MQPCRVNERTLTCCASPARPPERLPGDGGASACCAGVRGAAGGSDGGDKKRYSGVQVQPRIQNIHSKLVLPVIIMVG

SEQ ID NO: 34770 - protein, 90 aa, Oryza sativa; identical to SEQ ID NO: 31730

SEQ ID NO: 34771 - protein, 152 aa, Oryza sativa
MASSETPPPPSPGTGGAVPLAPALLGLLRFVLSSHLAAPDPALPLSPSYCSRLLLDDDDDDLLEKLAAGLARCVEEGRLPVAAAAAEAGIPAGEAWSEEREREWEAVVLEKGNELKRLEPKKLKGGWQLVITTGLQKVLCFFSISVSCLMFR

SEQ ID NO: 34772 - protein, 407 aa, Oryza sativa
MARKGNPISVRLDLNRSSDSSWFSDYYYGKLLYQDVNLRSYFSSIRPPTILTFGFRLGRCIILHFPKRTFIHFFLPRRPLRLKRRDKSRPGKDKGRWWAFGKVGPIGCLHSSEGTEEERNEVRGRGAGKRVESIDREKQNEIRIWPKKMQRYGYHDRSPSRKKNFSKLLRVSGAFKHPKYAGVVNDIAFLIENDGPTSHLLKRTLPAVRPSLNYLVMQYFFNTKNKMHFDPVVVLNHFVAPGVAEPSTMGGAKGGSLDKRIRSRIAFFVESLTSEKKCLARAKKRLIHFIRQANDLRFAGTTKTTISLFPFFGATFFFLRDGVGVYNNPFFEYAREQLLGQLRIKCRNLMGKDKVMELIEKFIYLGRIGKLIKGIEMMIEIILRKRIIPYGYNSYLNEVQKMRSFFV

SEQ ID NO: 34773 - protein, 304 aa, Oryza sativa
MVSLDDLQRDEVFKRGTVPSWMAYSGYFLLSIIAVITIPIMFRQVKWYYVIIAYALGPVLGFANSYGAGLTDINMGYNYGKIALFVFAAWAGKDNGVIAGLVVGTLVKQLVLVSADLMHDLKTGHLTLTSPRSMLVGELIGTGIGCFIAPLTFMLFYRAFDIGNPDGYWKAPYALIYRNMAILGIEGISALPKHCLSLSVGFFAFAVLTNVARDALPARYKKLVPLPTAMAVPFLVGASFAIDMCVGSLVLFAWNKMNKKEAAFMVPAVASGLMCGDGIWTFPSSILALAKIKPPICMKFTPGS

SEQ ID NO: 34774 - protein, 456 aa, Oryza sativa
MKYSSGNDKMTIDIESLVKDVTICWQRAEGAKSRSGCKIPSLDQRDRPAAMCIGPNHHNPFYRQMEEEKKAMLYSILTQVDEQHKAAVLTRLMDAIKALENEARDHYLDRAESMSSSEFVQMLVIDGCYILGKFVLPHSCCPSTSDDGAQNGSAMQNMELVRDVFYRLDNQIPFCVLDEIHKVLHGKIIRSCTAVADVLVTHVGDLLENLSYSRVHALDVHASPWHLLHLLHTRLQPTAEWGSEKPTKGAAAHVVVSCASTPGFYRWRPATQYDAAGVRFRKFDGSSCILDVKLDGATLRVPSLVVDTNTYALLRNLMMLEQHNPDQLGSHVTAYCVFLSQLAGTPGDVALLARKGIIVHLLPSDSDVAVMFAGLCVGITIGMDEPKHNYLHKERNDLERIYNSRLMVQHTRNCVTLPHRNPMLVVALLAATLGLVCLLLQAIYTMKSYYCKGHTS

SEQ ID NO: 34775 - protein, 63 aa, Oryza sativa
MFGTVVYCFTLIALVKQDLTKKHFLLPFQHNLQNMNSTTRRDVTGTNTLMSKIRVRVFFLFPQ

SEQ ID NO: 34776 - protein, 411 aa, Oryza sativa
MNALAATSRNFRQAARLLGLDSKLEKSLLIPFREIKVECTIPKDDGTLASFIGFRVQHDNARGPMKGGIRYHPEVDPDEVNALAQLMTWKTAVAAIPYGGAKGGIGCAPGELSTSELERLTRVFTQKIHDLIGAHTDVPAPDMGTNSQTMAWILDEYSKFHGHSPAVVTGKPIDLGGSLGRDAATGRGVMYATEALLAEHGKSISGSTFVIQGFGNVGSWAARIIHEKGGKVIALGDVTGSIRNKNGLDIPALMKHRNEGGALKDFHDAEVMDSSELLVHECDVLIPCALGGVLNRENAPDVKAKFIIEAANHPTDPEADEILAKKGVTILPDIYANSGGVIVSYFEWVQNIQGFMWDEEKVNMELHKYMNNSFQHIKAMCKSHDCNLRMGAFTLGVNRVARATLLRGWEA

SEQ ID NO: 34777 - protein, 406 aa, Oryza sativa
MSSRRPRRLLLTLPDEVLEEIFLRLDALPDLARASAACATFRRLITARAFLRRLHSLHPRPLLGFFKREGPSCEFFPAAPPHSSSAAASAVARGAADLTFSFLPATPGGWRLRNIRRGLALLSTRDGGGGCFFPDVVVCDPLHRRYAQIPQIPDDLAAPIRRSGSLPKGFDYLLAPARREEEEEEEEDSSFKVVCRPRLTEECDITVFVFSSGAGIWRAATLGSSLATAISVTSRPRCVHRCVYWLTRFLDRLLILDTDEMELSMFDNFPPSTGFVLNHTTAAIAEAGEDRLGVFNLDVHNVNLLSRAIRGSADEQWRHDKTIPLLPGYSIWRFVNHADVDGYILLGGVLGSGLQSDPITDGLQYFSLDLKTFRLERLCPMTIYQARNSPTELYTSFPPPLSLSSI

SEQ ID NO: 34778 - protein, 102 aa, Oryza sativa
MFPGPSSSSAAAGPGFTEKNGLHVDPMAAAAWSGGRTNGKEDAEMVLADQEELATPSASAGVGGREGRRRREWIGGGGRGGASGGAAGASAGAGAGVDAEGR

SEQ ID NO: 34779 - protein, 293 aa, Oryza sativa
MQRNGVMECSVCHSKVVAPSPRSVSRAYDKHRSKISSKYRALNFLLVSGDCILVGLQPILVFMSKVDGKFQFSPISVNFLTEVTKVIFAIVMLIIQSRKQKVGEKPLLSLSTFVQAARNNALLAVPALLYAINNYLKFIMQLYFSPATVKMLSNLKVLVIAILLKFIMRRKFSIIQWEALALLLIGISVNQLSSIPDGTKSFGLAVTTIAYIYTLIFVTVPSLASVYNEYALKSQFDTSIYLQNLFLYGYGAIFNFLGILGTVIFQGPQCFSFVTMLHKAFSLHSSLSMQTQF

SEQ ID NO: 34780 - protein, 92 aa, Oryza sativa
MVMVAGLPVRMGPRGSTRRGTSPTTRRRWADLGGGPPRGGVKEVSGAEELSALESARGRCRLCWRRRRRARSAELPPCGRHSVARGPPRAAR

SEQ ID NO: 34781 - protein, 328 aa, Oryza sativa
MGRGGDVDGAAGALRRFVREAGGCAVVDGGLATELEAHGADLHDELWSASCLVSAPHLIRKVHLDYLDAGANIITSASYQATIQGFQARGLSRERSEALLRRSVHIAQEARAIFAEGWSKGPYANHRSSPRRPVLVAASIGSYGAYLADGSEYTGDYGISVTKETLKSFHRRRLQVLADAGPDLIAFETIPNKLEAQASGDPITECAAVADACARVGAVGVNCTAPRLVHGLILSIRKVTSKPVVVYPNSGETYVAETKEWVESEGGASETDFVSCVGKWRQAGAALVGGCCRTSPATVRAISWALRESDDAVGGDGDRDDFPAVAVL

SEQ ID NO: 34782 - protein, 373 aa, Oryza sativa
MMGAPSTTRSSSSCSRNVRWRQTISSGAPPPRFIPLPSYSSRFAGGGELDKVFDSGLLSNSRLIASRKGLLVLELRRSSRAAAVRLVVCNPMTGDMATLPILAGKDRPGHYACALITFDDHEGAPDRLGFVHDPAAFRLLLVYKRRNFTACRSYWSDTKAWDAEGKLSGAKIGGRRLGEMTGAVAVRGSVFWLLKNLLFVVRLGALKATTETFPSKWCSKLCFCYGSPVQNRQLAVTPDGRLCAVQVDRHVTSNNTVRINVISRHDGYGPPTWECDNARDVELNRVLPMANVRRVCLRGVCERSGVVFLAIGTDLYNQQPDLALYALDMDKKEARKVAAPPGHCRRLSSSFFGYEMDRVAYLASLSGGESIAS

SEQ ID NO: 34783 - protein, 507 aa, Oryza sativa
MDTFFSAVLGDLLSRSVSFLINRYHQQQKDAEEDQQRLHRVLLRIEATVEEADRRCITNQAMLLQLRMLRDVMYRGYYFLDSFRYRNIQAHAQDEVGDHSLGLSHFCPLKRFCISTRTWKILSQVLEKKELQEMLDHLQGIVSDMQEFVVLMSSYPRMSRQPYGSYLLLENCMFGRQIEKERIINFLLEPHRPAGSKGIDVLPIIGPCRVGKTTLVEHVCHDEMVRKCFSKILMYGADSIECGELVPLTEIGVIKHRNPASTGQSLLIIELVNDMDNETWTRILHRLRGDHSTPVGKIIITSRSNKVATFGTTEALQLDFLPEEEFWYFFKTMVFGSANPEEEPELAAICMEIAALMNRSFMGTYIIGDILRSNLNPQFWYKFLECFKYYTDIHIRELGEHPTETYKRISGHTCVWTPENRCVTEATYALTYTLYQASSEDLNDQPMVLASDVLVGNVQLQGKVDVLQWRSKIPPYYCYMAHFEVLARPLHMPPKRKRSRSLSGQLV

SEQ ID NO: 34784 - protein, 344 aa, Oryza sativa
MGREASSPPPPPPPPAVVHGAGSSLSGQKRKAAMDDGSGEDDNVPPWLKLSLGPVAYGVATGVVDDDSSSCAPAVTTSIEVRPPVATGVVSGSAAQPSIEHVPADDAVVTPSFVASAAGVLFTGCASGLIPNGAVSVFPCFNFLGPSMSSSILSHLHQQFSSTRRQSNASMARSSRTCGGDDDMALSNIAAPNVTNGGGNNNNDGNALPDPPYPWATNEPAKHHSLAELARRDITTIQGDARCRRCDARKARWMNPVVPNCDDCGHEKCLRPVIAAEKERINWLFLLLGETLGLCTLDQLKYFCAHTNRHRTGAKDRVLFSTYEELCNQLVPGLITRRDQLRMR

SEQ ID NO: 34785 - protein, 404 aa, Oryza sativa
MAGLVIFLFLLPPRRHPRPPVPSPEAATSNGVLSSSAPRPWPPRPSRSRAATTSPRAPPPPPPPPFAARASRSGAPRLACADMDDDGVYIRWCVELARKAAGHTSPNPMVGCVVVRGGRVVGEGFHPEAGQPHAEVFALRDARDLAENATAYVSLEPCNHYGRTPPCTEALINAKLKDVVVGMTDPNPIVASKGIERLQSAGIDVRVCMEEEALCRNLNEAYIHCMLTGKAFATLRTTLSVNGVVVNQIGTGADQPGGYYSQLLKEYDGVIISGISVNMTTLPTSHEAGAKQPLYIIIAQGGNSQLNIQFLREECASEAVVLTDSPVTVKPPGVEVLVLDRMSLEFILEILAQRGLCSVLVDFREAGGDFAYLLKNFQEEKLVQKVVVELLPIWTVTKASKGRS

SEQ ID NO: 34786 - protein, 261 aa, Oryza sativa
MEDLAKFLFGVSGNVIALFLFLSPVPTFWRIIRRKSTEDFSGVPYNMTLINCLLSAWYGLPFVSPNNILVSTINGAGAVIETAYVVVFLVFASTHKTRLRTLGLAAAVASVFAAVALVSLLALHGQHRKLLCGVAATVCSICMYASPLSIMRLVIKTKSVEYMPFLMSLAVFLCGTSWFIYGLLGRDPFVTIPNGCGSFLGAVQLVLYAIYRNNKGAGGGSGGKQAGDDDVEMAEGRNNKVADGGAADDDSTAGGKAGTEV

SEQ ID NO: 34787 - protein, 507 aa, Oryza sativa
MSSNLAASRRSSSSSSVAAAAAAKRPAVGEGGGGGGKAAAGAAAAKKRVALSNISNVAAGGGAPGKAGNAKLNLAASAAPVKKGSLASGRNVGTNRASAVKSASAKPAPAISRHESATQKESVLPPKVPSIVPTAALAPVTVPCSSFVSPMHSGDSVSVDETMSTCDSMKSPEFEYIDNGDSSSVLGSLQRRANENLRISEDRDVEETKWKKDAPSPMEIDQICDVDNNYEDPQLCATLASDIYMHLREAETRKRPSTDFMETIQKDVNPSMRAILIDWLVEVAEEYRLVPDTLYLTVNYIDRYLSGNEINRQRLQLLGVACMLIAAKYEEICAPQVEEFCYITDNTYFRDEVLEMEASVLNYLKFEVTAPTAKCFLRRFVRVAQVSDEDPALHLEFLANYVAELSLLEYNLLSYPPSLVAASAIFLAKFILQPTKHPWNSTLAHYTQYKSSELSDCVKALHRLFSVGPGSNLPAIREKYTQHKYKFVAKKPCPPSIPTEFFRDATC

SEQ ID NO: 34788 - protein, 348 aa, Oryza sativa
MDAQRALLDELMGTARDLTEEERKAHKEVRWDDPDVCAAFMARFCPHDLFVNTKSNLGPCMKIHDLKLKESFESSPRRETHMRRFEAELAQQCEKLVIDLDRKIRRGRERLAQDVAVPPPVIGKTSEQLSIIEEKVKKLLEQIEELGEAGKVDEAEALMRKVELLNAEKTALTNQADNKVAMLPQEKKMELCEICGSFLVADDVLERTQSHVTGKQHIGYGLVRDFLAEHKAAKEKARDEERIAREKKAEERRKQREKEYDVGGRDGGSRREKSGDRDYDRDRYYDRNRGRERSHDHRDRGSEYRSSSYRNGRDSERDRHRYRSDDMRKDRSRVRSRSRSPSRHGPDQ

SEQ ID NO: 34789 - protein, 352 aa, Oryza sativa
MPSTAAAAAAEMEPEPDHTKPSTSAAAAGHRKHLAMLERLSKRAAAPAPSQDSPVAAFLSRFAAAKLAAESALSACRSSPDDAQPSLSAAAAAIDDLDRLVAEASHSLPPYELRSALAAASDLRAAHRLAASDLRPKKSFSFRNKSKAPKNPPQDPPPTLPPPPDQPNPSVEAILPGLGFRGRRDATLVKDLRVSDEKDGDFTLADLVSCQVYLKGKCRALHVHKLKDCRVFVGAVFGSVLIEDVERCAFVMAAHQIRIHEATATDFYLRVRSRPIIEDCCGVRFAPHALKYEGIGEDLRDAGLEEETGNWANVDDFKWLRAVQSPNWCLVPEEERLQTIDISDVQEREYDN

SEQ ID NO: 34790 - protein, 581 aa, Oryza sativa
MLSQNEADRLEVWAQPINTKDAATFRGKISSDKWIDHARTAFAVDPRIAFSMIMRFPTNSALSSEITQLVQTHILELRTIPEALPFFITPKAVDENSSLLQQLPHWAPCSVTQALEFLTPPYKGHPRVMAYVLRVLETYPPETVTFFMPQLVQSLRYDDDKLVEGYLLGAARRSNIFAHILIWHLQGECVPDEPGKEAAAPKATAFHSLLPAVREKIVDGFTPEARDMFEREFEFFDKVTSISGVLFPLPKEERRAGIKRELEKITVPGDDLYLPTATNKFVRGIQVDSGIPLQSAAKVPIMITFNVVDRDGDPNDVKPQACIFKVGDDCRQDVLALQVIALLRDIFQAVGLNLYLFPYGVLPTGPERGIIEVVPNTRSRNQMGETTDGGLLEIFQQDYGPVGSPSFEAAREMFMISSAGYAVASLLLQPKDRHNGNLLFDSHGRLVHIDFGFILEISPGGNMGFESAHFKLSHEMTQLLDPSGTMKSDTWNQFLRLCVKGYLAGRRHMNGIITTVNLMVDSGLPCFSRGEPIANLRKRFHPEMNEREAANFMVRTCVDAYNKWTTAGYDLIQYLQQGIEK

SEQ ID NO: 34791 - protein, 77 aa, Oryza sativa
MVAEASLFSFTRKNAHALQWVKIFFIAYTLYSLFGFGPKAHYFLPFQPYRLQPPEVHVRYRSRSSHQIRSNLSRWVS

SEQ ID NO: 34792 - protein, 35 aa, Oryza sativa
MIASTSSLNSIIFRESIKQVLGHICPLLTSSRAQY

SEQ ID NO: 34793 - protein, 680 aa, Oryza sativa
MVKVEDDVEGSGINASVGDLRDAAVNPQPALLRATVKEEEGQPSSSSSHVRSQFIGMGFSPMLVDRVLQKHGDRDSDTILEALLSQSALQKSGSESGSLGDLFDSDNEENSSHFAPRKEVIQDIKVEADSSSEKRSYLLSTMNFSQREVDLALNQLGEEASLEQLVDFIVTGQVSGCSGGNENGDASNEVKDESLFGVMDKTLHLLQMGFTEEEVSSVIDKAGPEATVLELADTIFARRIASSIEQKEVKVEPDFLDETETSYSAYHPSNSGLRYYDDDHDNIRIKRAKHMFIDDSAGSSSRAGNQPNLDPWLKDHRATTSDGSVKEEFDAMTPGIRRNVRSDVANPPYFLYGNVVEIPKATWRQLSEFLYNVEPEFVNSQFFSALSRKEGYIHNLPTEGRRNLVPRSPMTIEEAFPFTRQCWPSWDTRKQLNSVATEVAGIEQLCERLGKMVRDSGGYLSQEKKTHIMHQCKLANLIWVGPDRLSPLDPQQVERILGYPRKHTNLFGLNPQDRIEAMRYSFQTDTLGYLLSVLKDLYPDGLRVLSIYSGIGGAAIALHRLGIPLQCVVSVDQSDTNRKILRRWWSNTEQKGQLRQINTIWKLKINVLEDLVKEFGGFDIIIGGNFSSCKGGTTVNSSMGMDSNQFFEYVRVVQRVKHIMGRLQVRAHESARHRHRSPSN

SEQ ID NO: 34794 - protein, 270 aa, Oryza sativa
MSSGGGSSPTSSPSVCSRSWSISEDSLKRYVSYASESCIQELLAASDSGGGGGGGDDGWKVLAYCNGVEISKRRAGAAHVFRSRWLLHAVSPGKFMAVANAVDAAKQWESDLVDARYIRELGDDLSIVHLKLGADASKRTAGLFRRRDVVVYERRQTMDDGTLVVAVASLPKEIAAGLLPPGSSSGARGAGLLLQSGWVVEKLDAGDGGDGPPCCVVTYVVQLDPAAGWLPRCFVSRLNSKLVIMIVAKLKKMALATMHSAAADDGEVMP

SEQ ID NO: 34795 - protein, 140 aa, Oryza sativa
MCSTTPPPSPPTITSSSNSTTTTSNSSIHLRTTKTLPIISSTALPSLHQQHRRPPLASSTALSPPRQPRPRRGSLSRRRRRNRRSRLRRRIPRHPCPHRSSSSSSQSRSSSRGLLRGRRRRRGRCGTRSLRLVRALQGGR

SEQ ID NO: 34796 - protein, 67 aa, Oryza sativa
MFQPGLPDRTTKTYIRKSIVVVYKKKVITQVALHKFIIEVAHDFKMATTTIRECNFAIYEATISPIL

SEQ ID NO: 34797 - protein, 428 aa, Oryza sativa
MSSSLPILPKSLKDIPRSHNTQNILMPGQLPNDSMPLHQSATQSSISHPRASVVRSSYSAMLGYAANPIDSVSSHEGHFMAAPFISQSSNAEMLQYLCNNNTHGGHTVPTFFPAPACGAPDYMDTITVPDNHTQSGSSTVTSDAAKQNEWWADIMNDDWKDILDATATDSQSKSMAQPSNSAASQPAFNQSTSSHSGDICPVTSPPPNNSNASASKQRMRWTPELHESFVHAVNKLGGSEKATPKGVLKLMKVDGLTIYHVKSHLQKYRTARYKPDLSEGKTQEGKTTDELSLDLKASMDLTEALRLQMEVQKRLHEQLEIQRKLQLRIEEQGKYLQKMFEKQCKSSTQSVQDPSSGDTATPSEPSNSVDKDSEAALDPNRIGDNHPKNSTNVGANLKTAATESPDSPVIATDGSELPQEKRRRVHES

SEQ ID NO: 34798 - protein, 51 aa, Oryza sativa
MLWAKKVEHFSEHQTKRPCWEQCLRHLQRDRRTEPAVDLTVSKNSVVVVAF

SEQ ID NO: 34799 - protein, 359 aa, Oryza sativa
MASTLSSPSPPSADPVTGSSDAASSFLPSLLIIAALLAFVLLASVSIHLLLRLLSRSSPPPPPPPPLPRTRREVHNVEAADASPVRRNGVCEGKKEVVGDEKQRLIESLPLFTMASSLAALPKSSPDCAVCLSPFTLDAELRLLPACRHAFHAACVDAWLRTTPSCPLCRATVTLPHPSISAILAAEQPPPPEPRSRDRSRSFRVEMGSVSNRSASTATGGNARPTYSLGTFDYHIDEEVEAVVSRAAPMTTRSAAAVKEDKPAAEQSPPPPGEAVAEAAGATRGWLREYVERLATSASSLSSFSGRWSSRWSQSYQSHHSHSQEEPWLWDAEAVRMSPPGTEEEETAFMVLYRWIAGV

SEQ ID NO: 34800 - protein, 348 aa, Oryza sativa
MQVPIEHNGGEQTLLVPFRAHRPPRPLLQLGSRASPVSGFQLGVVEGEWRVVQPAYGQARWTTSPPPASPTSGSLRRPTLSASKATCWGGCTIWTRPIIEAFHGKGVQVIADIVINHRTAEHKDSRGIYCRLPPRLGPAHDLPRRPLRRRHRKPGHRRRTSTTSTSASSGSSSAGSTGSRWTSASTRGASTSPRATPPTWQRSTSMPPSRASPWPRYGRRWRTAGTASRTTTRTRTGRSWSTGSIVSAAPTAMPRRSTSPPRASSTSPWRAIELWRLRGEDGKAPGMIGWWPAKATTFVDNHDTGNPCIFYDHFFDWGLKDEIERLVSIRNRQGIHPARGRCCWLLPS

SEQ ID NO: 34801 - protein, 484 aa, Oryza sativa
MASDGHLAAPLLDGGGGVDDAALLRRLYVGHFLARWGARMWEFSVGLYMIRIWPGSLLLTAVYGVVEASAVAALGPIVGAVVDRLAYLQVLRLWLLLQGASFVAAGVSVTALLVYGARLAAAGFPAFVALVVVTNVSGALAALSTLAGTILIEREWVVVIAGGQPAAVLTGINSVIRRIDLSCKLLAPVLSGFFISFVSMEASAAALAAWNLAAVWVQYWLFVSVYAGFPALSETSQISRRRADDDEAAAAAQPQKVERLWMTMLPCWESWAVYARQEVVLPGVALAFLYFTVLSFGTLMTATLDWEGIPAYVISLARGVSAAVGIAATWVYPAAHARVSTLRAGLWSIWAQWCCLLVCVASVWAGGAAPLASAWMLMGGVAASRLGLWMFDLAVMQLMQDGVPESDRCVVGGVQNSLQSMFDLLTYVMGIIVSDPRDFGELIVLSFFLVTCAAAMYTMHVYRVRKHLFHLDRILPKMNWIKAS

SEQ ID NO: 34802 - protein, 410 aa, Oryza sativa
MSVACAAALPTASARRRHRGSPQTALEGTASWFIFYFFPFLFVFYFTLRAAFFDFLVRGGGKLVMMQRRDLVTKGVTLSVCCSMLSSSNSSAQALERLPFKADGYNFWTWRGRRIHYVEQGAGQPIVLIHGFGASAFHWRYNIPELAKKYKVYAIDLLGFGWSEKALVEYEATIWMEQVRDFLRDVVKDPAVIVGNSLGGFTTLFAATEVPELVRGVVLLNSAGQFGDPNRPPEAAEAAAGEESAVTRLVVRPLKEAFQRVVLGFLFWQAKQPARVEKVLKSVYKDATNVDEYLIGSITAPTADPNAGEVYYRLMSRFMANQSRYTLDRLLGKLSCPLLLLWGDLDPWVGPAKAAQIKKFYQDTTVVNLQAGHCPHDEAPEQFNGALLEWLASLDAGKPADQPEPALQSV

SEQ ID NO: 34803 - protein, 95 aa, Oryza sativa
MAAAAARSLLRSSASLLRAAPARSASASSSAARPSLRRALAAPPRILRSPVELSVCVESLLPLHSATAAARMTSMLAVPGQGLGWLTEAETDGLC

SEQ ID NO: 34804 - protein, 120 aa, Oryza sativa
MKGAAAVAMVVVAGCLLAAAAVSVVDGAVTCGDVDASLLPCVAYLTGKAAAPSGDCCAGVRHLRTLPVGTAERRFACDCVKKAAARFKGLNGDAIRDLPAKCAAPLPFPLSLDFDCNTIP

SEQ ID NO: 34805 - protein, 736 aa, Oryza sativa
MAMLRPAAMDLFLSATSIVSNANEWFEFLGTAFSAASLLLSRWRRRRQGDEAERRQLQWKGQDAKMKQLHYCMLQLPDLIHHAEWLSFVKDDKEVAKLLPELKARVHDAYDLLEEFNHHHHHQQQLQLDLGQDAAAEKAGDDFLQSIAGGNTVREILDDLNCLRNTLEGVIDRHARSEPHQIGKLLRPAMTSFYDKSKFRSLEDEVNELLELLGVKICSARPHKRRIKGETASASKRTKRNSGVPSASTRTSCSNQEIASDNVTVLAISGIGGVGKTTLARQVYNDERVKGYFDVRIWISVSDDFNVKRLTKEFIEFALANWMQSDNLCNLQQSLTESIVKFRFLLVLDDVWDDVYANQDNRWQNFLEPLKSAQQGSAILLTTRSQRVADLVNENRHFRLEGLPPTIFDEFFEACAFGSDRCGVNPELNPIGKRIIPQLKRCPLAAETLGRLLKPMLDREHWNQIAGSELWELKQEKYDILPVLRLSYLYLPSYLRNCFLFCSMYPKNHQFDKDTLVNSWIAAGLVESCKGGKLESNGYQYFEDLLHRSLLQKESNSPTDSKYVMHKLIHDMAQLISEHECFIVKGETDLTKIPQGVRHLSIIGSSSLSETNLIMVCKYKTLRSIVCHGVETYILTAVAKYWFEELTKIRMLGFLSCEVNSLPENIDNLKLLRYLNISDCTFEELPQSFWRLQNLQIVDAQKCRVQQIPDDFNRLGNLQRFKLRGRIIKQPGTYEL

SEQ ID NO: 34806 - protein, 438 aa, Oryza sativa
MPPQQGECCRHGWLGVGEAAVGGGGEEAIRKGHRSYSLMLNLQLGISYSVGKSSALPFQKLAASDFDPREKVWTRFPPEGSKFTPPHHSVDFRWKDYCPAVFRHLRKLFGVDPAEYMLAICGNDTLRELASPGKSGSCFFITQDDRFMIKTVKKSEVKVLIRMLRSYYEHVRQYKSTLLTRFYGTHCIKQAGCPKVRFIIMGNFCCSEYKIHRRFDLKGSSHGRTIDKTERKIDETTTLKDLDLQYAFRLQRFWYEELMKQIQMDCTFLETQGIMDYSLLLGVHFRNDYSVSKIGISQHIAFPKSTGKRKSFEGGSSFCELCFVESGCKDRDLIDSRKPFIQLGINMPAQAERSSKKILDNFLLNERHLFITPPSGGSCDVYLFFGIIDILQDYDITKKLEHAYKSFQVNPDYISAVDPKLYSRRFQDFIRRVFIKEQ

SEQ ID NO: 34807 - protein, 195 aa, Oryza sativa
MVNIPHLNGRTLLVANAGDCRAVLGKRGRAVELSRDHKPSCRSEKIRIENLGGTVFDGYLNGQLSVARAIGDWHVKGSKGSISPLTAEPEFQEVRLTEEDEFLIIGCDGLWDVMTSQCAVTMVRKELMTHNDPERCSQELVQEALRRNSCDNLTVVVVCFSSDPPPQIEVPRFRVRRSISMEGLHMLKGALDSNA

SEQ ID NO: 34808 - protein, 311 aa, Oryza sativa
MAKALLAVVVVAVAAVLELGLVGANFQDQCDITWEPQNAKMTEGGDHLTLSLVSNSSGCMLRTKKQFIYGSVSTRIQLVKGNSAGTVTTYYTSSIGDKHDEIDFEFLGNSSGLPYTFHTNVFADGVGSREMQFRPWFDPTDGYHNYTIFWNPCMIVWFVDSIPIRVFRNHEKEGVPFPTKRPMYAFSSIWAAEDWATQGGRVKTDWTKAPFVAEYRDIGLNICECPGSGSGSSSSFSSSSSSTSGDAEDPACAQRCATSDHWYAAEGLCQLSDKQLRQMKAVQLGYTIYDYCADAQAKGRPVPPECSMPQY

SEQ ID NO: 34809 - protein, 77 aa, Oryza sativa
MLKGVGAATPAAPAPFVPHHAAAVAAAPAYHPAAFAQAGGKYVPYATSYAPPAAFWQWIPPTSLDTSKDPVMWPPVA

SEQ ID NO: 34810 - protein, 182 aa, Oryza sativa
MKTTLVLAYESSPTLSLPRSILTSPYGKFLLLISSSLVQRIDGNADVPSRAPERAPNVAVVASSPSPPIWTKPGHAIAPSSSPRTPLHFPSRTTKNGATSVEIGHRLLHLRLPSPLSFPPPPVSHCSITRAHTISLASLTSWTHLHDSSWCRLSRRRSPGRFLPSPSRSASHRCRQDHGNLR

SEQ ID NO: 34811 - protein, 455 aa, Oryza sativa
MAALASLLLLRRRGGSHAADALLRALTTAAGEQPLTASAAKTRLRREHDPDRVVSLFEAIDDASLSASSTRHALSLAARRLSRSRRFADAEALLSSHIPASPTEPQLAAVLCSYAAASLPEKALAAFRSAAPSLPSPISPLPFNAVLSVFLRCRRHRRVPVLFDELSKEFSITPDASSYGILVKAYCMLSKDAKAHEVLDQMRGQGFTPTNSIYTTMIDSMYKQKKMEQAERLWKQMLESGRKPDQAVYNTKIMHHSLHGKTEDVLEVIAEMEEAGVKPDTITYNFLMTSYCKHGKMETAKELYRSLGEKGCSANAATYKHMMAQLCAHGDLDGALVIFKESYRSNKVPDFRTMSGLVEGLTKAGRVAEAKNIVAKMKKKFPEQLLSGWMKLEKELGLNSDSGDAGTRAECISEETPSEAEAAMPKTLELEDPSSDETECMAEASTSEEMPRDSA

SEQ ID NO: 34812 - protein, 98 aa, Oryza sativa
MRWRRVLLGGEGAIGGGLEVAAHGPSASARLTGQEASANRGAGEEQAAGAVIGEGADRRQSRRPLGPPPVPPLLSSSTSCMIFHCCCYQGCAGTRAQD

SEQ ID NO: 34813 - protein, 495 aa, Oryza sativa
MDDQTEVLDECGADAFLFTRDGDAMLKSEQPIDSKGGDIELLDMSTVEKELQMLSPYLAEADALEKAELEHDFSGNGELDINVVTNEKTADDKELLKNSYSIHSLPEIGDPLDVYEMEDFGRTDTSVQNSTANKIAEDARTDIDLALSRFHEEYEVFELRIFHRKNRTGFEENKEFPIVMNSVVGGRYRITEYLGSAAFSKVVRAQDLWTGMDVCLKIIKNDKDFFDQSLDEIKLLKFVNKYDPDDEHHILRLYDFFYYQEHLFIVTELLRANLYEFQKYNQESGDEVYFSLRRIQAIARQCLEALVYLHHLNIVHCDLKPENILMKSYSRCEIKVIDLGSSCFLTDNLSLYVQSRSYRAPEVILGLPYDQKIDIWSLGCILAELYTGEVLFPNESVQIILARMIGTIGPIDMEMLALGQDTQKYFTEDYDLFHKNEETDQLEYLIPEKISLRRRLQCPDTKFVKFLSYLLQINPRKRPTASEALQHPWLSYAYQ

SEQ ID NO: 34814 - protein, 262 aa, Oryza sativa
MDGGHSPDRHAAAAAGEPVRSRWTPKPEQILILESIFNSGMVNPPKDETVRIRKLLERFGAVGDANVFYWFQNRRSRSRRRQRQLQAQAQAAAAAASSGSPPTASSGGLAPGHAGSPASSLGMFAHGAAGYSSSSSSSWPSSPPSVGMMMGDVDYGGGGDDLFAISRQMGYMDGGGGSSSSAAAGQHQQQQLYYSCQPATMTVFINGVATEVPRGPIDLRSMFGQDVMLVHSTGALLPANEYGILLHSLQMGESYFLVTRSS

SEQ ID NO: 34815 - protein, 87 aa, Oryza sativa
MGCDDKCGCAVPCPGGTGCRCASSARSGGGDHTTCSCGDHCGCNPCRCGRESQPTGRENRRAGCSCGDSCTCASCGSTTTTAPAATT

SEQ ID NO: 34816 - protein, 428 aa, Oryza sativa
MEGGGGGGTDMNAVPDGVVQHVLSMLSNVRDVAACACVCRRWRECVPYLPALFFPRNAFDTAAAAGGAADDAIGRMVRSVERLRELVIYCPFSMARLPEWLALRSTSLRVLELRMDAAAADKAEDGGYLDCIGLARGLEELRLWGVSLTAAPAWGRLDKLRVLEIVGAPLEDSAVKDAISACPNLTDLSLLGCDCSGAVSIELALLERCRLDFLGAGNCSLSLAAPRVESLEVQGFTWITLRGGHSLRRLSIAKSTGRVYKVDTGKLPDLEHLSLRGVQWSWAAVSSVLQCARDVKHLVMKIEFSGDFDALQPFPEVDLVDFFNSHPNLRKFDIHGAMFAALCQKNSLKNLDARFCIPCLEEVLITVRSPLNAEQKLNTLESLVKYSVRLRSMVIRISQMKNCHDAADDFFEEICKFKYMNNKKVRVE

SEQ ID NO: 34817 - protein, 382 aa, Oryza sativa
MGMLKIGKNCSVCKEWQEHCYWSHMADDCKHFLTYMVGDFTESMIVPSRFANNFNGHISEVVNLKSPSGKTWSIGVAYSDTGELVLRSGWKEFVDANGVQENDCLLFRYSGVSSFDVLIFDPSGCEKASPHFVENRGFGREEKSAGAEGGGRDGDKNGHHQHQLEMTPHKNSSRCRSIPSACKRGLFSDEIEQDHREEKKEGDDEDEDEDEDEDVDKDGEDRYYFCRHGGRVTEYNLSKGDKEEISRVPVPVEPGNPVLVKVIHASHLLSSRYSTVGVSPEFAGRYLGPAMAREVVMERGGGGGGGDQWHVRFVRRESSRGFHGTGWRRFARDNGLLAHDVCLFELRLVDGAGAGDRLRRRPRPTMAVHVLRRVRGRFVLIR

SEQ ID NO: 34818 - protein, 1022 aa, Oryza sativa
MLAPQSTGFLSISPDSIMLNATGRPDENFSIEVNVPLFFGTHEAIQDGRLLSIFLQKGQLRSNICYHPENLTSLEVRNLPLDELEFASLRGFVQKAELQLNFQKRRGHGLLSVIRPKFSGMLGESLDIAARWSGDVITMEKSVLEQANSKYELQGEYVFPGTRDRFPMESQSNGFIEKAMGGHLGSMMSSMGRWRMRLEVPGAEVAEMLPLARLLSRSTDPAIRSRSKELFMQTLHSVGFNAESLRDQLKALEMYPDWLDDDTIEDITLPGLAELRGYWRGSLDASGGGNGDTMADFDFNGEDWEWGTYKTQRVLASGSFSNNDGLRLDKLFIQKDNATLHADGSILGPLTNLHFAVLNFPVGLIPALVQAIESSTTDSIHFLRQWLTPIKGILHMEGDLRGTLAKPECDVQIRLLDGTIGGIDLGRAEVLASVTPTSRFVFDANFEPTIQSGHVNIQGSVPVTYVDSNSIEEDLEGGDGKQGIIRIPVWAKDRGLTNDISETRIMRDKPDEGWEFQLAESLKGLSWNMLEPGEVRINADIKDGGMTLITALSPYSNWLQGYAEVLLQVKGTVDHPVVDGSASFHRATVASPFLRTPLTNFAGNVHVISNRLCISSMESRVGRKGRLSMKGTLPLHNIEPSANDKIELKCEVLDIRAKNILSGQVDSQLQVTGSILRPDVSGMIRLSHGEAYLPHDKGNGAVATRLSSNKSISVPAGFDQRTVSRDVSHFLGSLSTSPDGQQSETERTPEHGSFKPNIDARLNDLKLTFGPELRIVYPLILNFAVSGDLELNGMVHPKYIRPKGVLTFENGEVNLVATQVRLKNDHLNVAKFEPDLGLDPILDLVLVGSEWQFKIQSRASMWQDNLVVTSTRSVDQDVLSPSEAAKVFESQLAESLLEGDGQLAFKKLATATLETLMPRIEGKGEFGQARWRLVYAPQIPSLLSVDPTVDPLKSLANNISFATEVEVQLGKRLQASVVRQMKDSEMAMQWSLIYQLTSRLRVLFQSTPSNRLLFEYSATSQG

SEQ ID NO: 34819 - protein, 53 aa, Oryza sativa
MIACKRLSIQLIIFIGCIIVDSLPMASLLERFVCFGACAIFIASFPLACLMFI

SEQ ID NO: 34820 - protein, 472 aa, Oryza sativa
MGELVTSMVIGPLVHMVKEKASSYLLEQYKVMEGMEVQHKILKRKLPAILDVISDAEKQASEHREGAKAWLEELKAVAYEANEVFDEFKYEALRREAKKNGHYTKLGIDAVKLFPTHNRVVFRYKMGRKLCRIVQNIEVLVAEMNAFGFKFEPQSIESKEWRLTDSDIFDPMNIASRSRDEDKKLLVSILLSQASNVKLAVLPIVGMGGLGKTTLAKLIYNEPEIQNHFQLMIWVCVSDNFDVASVARSIVDAVPKKGDKVTINENQTSALDELQKLVSGQRYLLVLDDVWNRDDEKWRKLKKCLEHGSTGSAVLATTREGGVAELMHTTDAYNLTALNNSVIKEIIDTAAFRPKKEIKPAELVQMDDKSLLSKKKEMIDQFVERCAGLPLAAKALGSVLYTKTSLEEWEAVLRSSSICTKETGILPILKLSYDNLPSHMKQCFAFCAIFPKDYEIDKDRKWINPRNKRYPP

SEQ ID NO: 34821 - protein, 29 aa, Oryza sativa
MRNNNRAGCDEINRMIDLTSAISYIVVYL

SEQ ID NO: 34822 - protein, 289 aa, Oryza sativa
MEVEAATTQRQPCKNAITTKQQQQQQQQLSTGRLFRSPLLVVNFVLMVVGSACGPLLLRAYFLRGGNRKWLSSLLQTAGWPLLLAPLCFSYSSRRRRREVEDDGAGAGAAATPLFLMTPRLLVASAVVGLMTGVDDLLYAYGLAYLPVSTSSILISTQLAFTAAFALLLVRQRFTAFSVNAVVLLSVGAAMLGMNAGGDRPAGVSRAQYCAGFAMTLAAAALYGLVLPVMELSQAHHAAARGAVTYTLVMEMQLVIGFVATAFSAVGMLVNNDFHVRFQPLLSQFFTAH

SEQ ID NO: 34823 - protein, 243 aa, Oryza sativa
MAAPTATAVFLDENLHIHRGPAGKRADGLKAKPLKPLAAKQGLQEKKALRDVSNIGKPPVSTRKPLQDVSNTAKPRGRNISDGTTLKKTALRSHEATKNPVKKTVIFSDETAKCHEWAKDGVEGTHFTGNDSQKLEKDSQDKRVKKKVEKIMSALHDWPDAVFDHVLFPSEVVAAFFEEVKEMELEPEILPENNRRRSSSGDKMKLAEDPFTEDELDYYPFLENNPVEFQLRDELPLLEPGMN

SEQ ID NO: 34824 - protein, 618 aa, Oryza sativa
MPPSPPLRHLPSFRRRPLAPRFLLLPRRFSASASASALQAATPPPSSSSAARLAAAVHGSAASGDFAHAIRLTKHLVRASSSPSHRPGAAGAAAAAALASTSASPAPALGVLVIALSQMALPDEALSVFGRLRELPALPACNAILDGLVKAHMLARVWELFDEMLGRGMVPSVVTYNTLINACRHQGDVAKAWEVWDQMVARRIDPNVVTYTTMICALCEEDCIGDAEGLFLEMKEAGMRPNLYTYNALMSSHFKRDNIKHALVFYYDLLKCGLVPNDVIFTTLIDGLCQANRITEAKNIFLDMPRYEVAPTVPVYNSLIHGAFRSGYAQEALAFFQEIIRKGLRPDEFTCSIVIRGLCDGGQMQVATRFLEVMQQSGIALNAAAYNVLIDEYCKSGNLDEALVTCTRMSEVGVEPNVVTYSSLIDGHSKNGEMEIAMAIYTEMVAKGVEPNVVTYTALIHGHAKNGDMDAAFWLQKEMEEKGIYSNAITVSVLVDGLCRENRVQDAVRFIMEYSGQKKSEKNPSIANSVTYMTLIYGLYIDGQYNEACHFFSCMRDSGMVPDRFTYTLVIRGLCMLGYVLNAMMLYADMVKVGVKPTKCAMVCPDIWSRESVDHRMT

SEQ ID NO: 34825 - protein, 463 aa, Oryza sativa
MARPPSPSPVVPVKREPDGATAAVSDAYTPRPPLRKRRRLPSTPTQPLLLTPQAMSSTRDSFAGERSGLAPASVPTSVKRELGADGDGDGDGDRDARGKAVSVAEGNLQPRKTALAELPTLLANRRRLDRLLHELVRSHRWGDAAGVISALVSGTRHPESFDEMRSVFAVGMEIHRRLAENSGIQQNTRSRYYLRTQKLYDVWMRRLMWLPTCERKYMVKLELALFYLSQGCIDSAYNTTKTLIAKDGLKTPIVNLIHGLISYDNWYSGLPEDMQLEEFDVYCESHTVSMATHHCDENGQQDTSDDNCSIDADSSSPGCSSKSSINNWNIDKQRKFPEKPGFVHSAREDDSVGSQVDEKMVDTDFRSVFFNTANSPTCGASKAGSMISFPNYSHMRLCQVALGPTAVRLDFRVVGTTAKLIQQVSQFFNKVFQFVIKLISNFLGKRISSSLFVFEYEVFILSR

SEQ ID NO: 34826 - protein, 312 aa, Oryza sativa
MGPRCPSWPASSPSRPPPWPAPRPPPTPPCPPAPSPSPPSSRSPPTSGAPSPAPAPSAPPTSPSSPSSPTAAPASARPSRPPTSATSSRPSSPACPRGCSSLARPSSPRGCCRRPSTTTTPPPSPGGWRSTRRRPSCSTTATPAPTASPSAARRASGCTTSTSASAARSGCEAAPTTSSTGWSTSTRAAAATAASTSSSRCSRSRCRGWTRTKTSSKCEPLNSFFFFFYTPIYYDDSSAACYSLVVLFLLNCNFSYYSFMFSWMHAWIPCCLLLFIYSGVLCCVLCCLQATFICGFAYIELVHYLNKDRIWN

SEQ ID NO: 34827 - protein, 404 aa, Oryza sativa
MAEKEEAEEEVEDEEEYESDLDDAPLPAVRRRAAASDDEEGGGASGSSAPWSVAGSDLDSYSDSDGQDAAEMYDDEEEGSEERDELEAGGGGGGGGGGGGVGGGEALEDEGKCADEEALEDEGRYGDEEADGVVAALGDEGKCDGEEAEVEAAVEGAEVVNKEGEAQAVPTIGAFYMHDDRFRDPENGRHGSQRKNFGGQKLWYPKDDNVWAHDRFYEMNSHHDRLYETNSHNSPNDSGRGPRGSFRAWGGDRTHRYDHGYLERTLSQSYYHDDREEYKYVPKEPRTFFATTRDHISFLKESNNMYGSANNYKRVPSKFHTYYDHGDTKNFAYVQRESHTYYGNAKDFTSAHDGYRGGVSNPYVSHWRSDPEICSGQYIRSQNEEASSNAEGGKVSLSNSGFPN

SEQ ID NO: 34828 - protein, 164 aa, Oryza sativa
MDNYQGQHGYGADRVDVYGNPVGAGQYGGGATAPGGGHGAMGMGGHAGAGAGGQFQPAREDHKTGGILHRSGSSSSSSSSEDDGMGGRRKKGIKEKIKEKLPGGNKGNNHQQQQMMGNTGGAYGQQGHAGMTGAGTGVHGAEYGNAGEKKGFMDKIKEKLPGQH

SEQ ID NO: 34829 - protein, 338 aa, Oryza sativa
MSRYVDPNDRYEPRGRNSRLYVGHISLRTRAEDLENLFSRYGRVRFVDLKNEYGFVEFSDPRDANDARLDLDGRKYDGSDIIVQFARGVERGLGGSRGYKARPAHGSDHCFNCGMEGHWHRNCTAGDWTNRCYGCGERGHILRECKNSPKDLKQERGYSRSRSPRRRRSPSYGKSGPPSHWGSHGADREERLHSRRDGRGYSRSPRRHDSPSNQRNHSPRRYALPSNERYDGTRRYASPSYGRDRSPGGNALPANGRSHNLTSDGMNPSPRERDDQNGSHRRGDNDYLPSKRDDQNGSYRRGDSDYLSRERDDYLSRGRDDQNGSHRRGDSDYLSRDR

SEQ ID NO: 34830 - protein, 642 aa, Oryza sativa
MATTPEAAESLRFRWPAAEEEFDNDMVLPYISRLLMEDDVHDHFFYQYPDHPALLRAQQPFAQILASSPSSAAGASSSSSSSDAPPSRPFFDDEAATAKTFPTAAVHSVDHQYSGGLDMVNMAFLKGMEEANKFLPTNTLLLSTDSSTTLQLQVQGEVVVDGHGMLGGVGGAAAAHAHGAINSKKVNCRDDDLEAGTGRATKLMAPEPELEEEGARQMFDEMMLQEHEICMKGVKQLSLKSKSSSSKKARGRRTVIHTEPVDLHNLLLHCAQAVATDDRRSAHELLRQIKQHSSAWGDAGQRLAHCFAQGLEARLAGTGSQVYQSLMSQRTSVVDFLKAYRLYMEACCCKKVAFVFSNKTIYDAVAGRRKLHIVDYGLSYGFQWPGLLRELAARRGGPPEVRITGIDLPQPGFRPDQHIEETGRRLSRYADELGVPFKFHGIAATKKESVRREELGEAEEDEVVVVISLCHFRNVMDESLQEDSSRSPRDEVLGNIRRMRPDVFIHGIMNGAYGATYFLTRFREALYYYAAQFDLLDATVGRESHERMLVERDIFGRAALNVIACEGAERVERPEMYKQWQARNQRAGLRQLPLNPQVVRLVLDKVRDKYHKDFVVDEDQRWLLHRWKGRVLYALSTWVAQH

SEQ ID NO: 34831 - protein, 737 aa, Oryza sativa
MEFHYCQQRLASVLLLCFWMLFIRAHGSRKLYITYLGDRKHAHTDDVVASHHDTLSSVLGSKEESLSSIIYNYKHGFSGFAAMLTEEQAEQLAELPEVISVQRSRRYKTTTTRSWDFLGLNYQNPSELLRRSNYGEDIIIGVVDTGIWPESRSFRDEGYGPVPARWKGVCQVGEGWGSNNCSRKIIGARFYHAGVDEDDLKIDYLSPRDVNGHGTHTASTAAGSVVEAVSFHGLAAGTARGGAPRARIAVYKSVWGRGGAGSGNSATVLAAIDDAIHDGVDVLSLSLGTLENSFGALHAVQKGITVVYAATNFGPAPQVVRNTAPWVITVAASKIDRSFPTVITLGDKRQIVGQSMYYYEGNNSSGSSFRLLAYGGLCTKDDLNGTDVKGRIVLCISIEISPLTLFPLALKTVLGAGASGLIFAQYTTDLLGITTACNGTACVLVDLESANLIGSYISEASSPMAKIEPARTITGEGVLAPKVAAFSSRGPSVDYPDIIKPDIAAPGSNILAAMKDHYQLGTGTSMATPHVAGVVALLKALHPDWSPAAIKSAIVTTASVTDERGMPILAEGVPRKIADPFDYGGGNINPNRAADPGLIYDIDPSDYNKFFGCIIKTSVSCNATTLPGYHLNLPSIALPDLRNPTTVSRTVTNVGEVNAVYHAEIQSPPGVKMVVEPSVLVFDAANKVHTFKVSFSPLWKLQGDYTFGSLTWHNEKKSVRIPIAVRITIQDFYADVA

SEQ ID NO: 34832 - protein, 82 aa, Oryza sativa
MMSMARGRAVSISLQDLRMNARLGHLKWREPHAGRPARTVFRGIRPAGAHPTRGTEKLIEYKTYLQALPYFDRSEGDRGVTE

SEQ ID NO: 34833 - protein, 617 aa, Oryza sativa
MEHTSDEDPELEAYGSDTYALLEAGDIKVMNDKNMYQCPFCSDKKNDYNAHGLLQHALAVGSADDRPAKEKANHRALALHLKDDTAESSRPLSQPPQHSKNDLFVWPWMGIIVNMPAEYVGKSANRLKEHFSCYHPSKVYSVYSKGRPSGNAIIEFGKDWSSFRNALQFESEFEKKGCGKKAWLDSGRGGPEPFGWIARADDYNSSGPIGEHLKRNGDLKTVSDVENEGTVKTDKLMASLACQVKEKEIHLEKLQSVYDERYLSLGKMMESRENMLKSCNTEIQKMQQLAYEQAQRTVDENQKLRLNLQSMMHELDANCKRLEELTAQADSDKRNLEVLMQKNAKKADHLRLAELEQQKADGNVLRLVEEHNREKEATLNSNMRLHEQLDRKQKLELEIAHLKGKLQVTKHTQGTEDSDLEKTIEALTNELEEKIEDMNYMDNMNQTLILKEKRSKDELQEARKLVIDSLQRLPSDIRSQAQIGIKRIGELDLKVFSDACRRRFSEDFAEVESSVLCSKWQNEIKDPEWHPFKSVWVNGKESKVIREDDEKLQQLKEEYGQEVYDAVTNALFELDMHSIGGRDPFLELWNYEEGRKAGTREVIQQVIKLYKATKRRR

SEQ ID NO: 34834 - protein, 213 aa, Oryza sativa
MELDEQAFLEELFSLRRDAWEYNAMGDFFSPACAAMDGFQERHQSTTTVSVLPTFTASYEQPPPAPAAGFDCLSEVYGNAAAAFGPNAGGGGGEYGGGGDMGFLDVVEPKASMVVDGGGLGVCKVEPGLQAEGGFSAAAAAPASKKKRVEGMPSKNLMAERRRRKRLNDRLSMLRSVVPKISKVYRVLSESFCVAIGIASAREMRLDDVCVCE

SEQ ID NO: 34835 - protein, 252 aa, Oryza sativa
MARPPQEAIDTFVSITGADEALAVRKLEEHGGDLNTAINAHFNEGDSTVNRASQNNIPESHDDMMDLDGPLDNAFRRSLFPETLRDPFALMDTNFQQNYFDRVGSTDTFGHGPQVSHPREVREIPIEVKDSNPQTGPSGQAPIIEDVTGHESSYGPEVRGAIVIDDDDDEQPSAPSLHANIDSSLQPNPSIPTAPPLVHVTDYDNDIEEEMIRAAIEASKRDAEAMTITAEQGITQPPEGVNITEHSFDEED

SEQ ID NO: 34836 - protein, 548 aa, Oryza sativa
MSAAHLLRHSRKLRTLRDALDYDRSALVRYFSAASASFPTKGGAAAGVEKRIGGARFPQCKQPGKELETFKVSLGGLNGRYACRRAPNNCIPTTITGLNGSLSCGQVSSARSFSSSADLPPHQEIGMPSLSPTMTEGNIARWLKKEGDKVSPGEVLCEVETDKATVEMECMEEGYLAKIIHGDGAKEIKVGEIIAVTVEEEGDLEKFKDYKPSTSAAPAAPSEPKAQPEPAEPKVKETEPSRTPEPKAPKTEEASQPGGRIFSSPLARKLAEDNNVPLSSVMGTGPDGRILKADIEDYLASVAKGGKREALAAPGLSYTDVPNTQIRKVTANRLLSSKQTIPHYYLTVDARVDNLIKLRGELNPLQESSGGKKISINDLVIKAAALALRKVPQCNSSWMSDFIRQYHNVNINVAVQTEHGLFVPVIRDADKKGLGTIAEEVKQVAQRARDNSLKPEDYEGGTFTISNLGGPFGIKQFCAIINPPQSAILAIGTAEKRVIPGSVDGQYEFGSFMSATMSCDHRVIDGAIGAEFLKAFKGYIENPNSMLL

SEQ ID NO: 34837 - protein, 49 aa, Oryza sativa
MSAGSFQVCIPAHWQAGLDLQGGHECTPWYSWSSLSPVQLQKKNHQESA

SEQ ID NO: 34838 - protein, 377 aa, Oryza sativa
MEKAKLSSALFAGTHFDRKRFAGDFARFRQGPPAPDVASAAAPSPEKKRKRQSKAKAKKSKKRRAEGADSASDAVEGFSVFKGLAAKKDEDDSEKKVETGKSEDSEVVRRRKEVEREIERAAILRKKFDIHISGQNVPAPLENFEELVSRYGCDSYLVGNLSKLGFQEPTPIQRQAIPILLSGRECFACAPTGSGKTLAFLFPILMKIKPGSKEGVKAVILCPTRELAAQTTRECKKLAKGRKFYIKLMTKDLSKSGNFKDMHCDILISTPLRLDHAVQKRDLDLSRVEYLVLDESDKLFELGFVEVIDSVVKACSNPSIIRSLFSATLPDSIETLARTIMHDAVRVIVGRKNSASSLIKQKLIFAGTEKGKLLALR

SEQ ID NO: 34839 - protein, 105 aa, Oryza sativa
MAVADHLKVRKNSEESSTQWTTGIAEVQPPIKSAGEKLCCSRNEEGTPQALRQLGDEAVCVGRLGGGDHLLRCGVLLPEQDVLPDAGGEQRRLLAHQPHLRSQPL

SEQ ID NO: 34840 - protein, 106 aa, Oryza sativa
MASAAAAAASPGDARPRCTALQNLPLTLLVSDLALLHCVPLLPPPPLRSPLTRSPDGRRRPRWCPPSLRRSRRRRRLCGCLCHLENVSKIECACIFRFITMDKNVW

SEQ ID NO: 34841 - protein, 673 aa, Oryza sativa
MVELIKVPKIEQEEGNADSHGKEKADVVHEEKTEKVKRRRKRVSDPQRKKACVDCTKRCIRIHGMASSSSEKARPTPTLPSFFKIMVGYFSENMDIPLPFARTITDMTGSNVYLEDAYGLRWRVRLYLHDDVLSFGHGWKNFVLDHDISVGEFLVFRQIARSVFTVQIFAISACERIHLCERNKRQSRKRKPGRKTGYPANNQMVKVSSKDVVKRRKKQRTDEQIYDLDPRQHDMPVRVCIDSGSEQRCSESSVKELDAAPDKSHAVVQVPATECNADPSYNAAGMKTIKNLEAIGASSSTKDVTWDANKSEDYPSFSYPESSNVMTADKESERSHQDRPMQLYCELGLEDGNAETENCENSNVLENAELRTPLAMMDLNEVGIDDIFLSADIYEFDSDFCSPEAFSVDVNTEGLVSNGRTPGDCFGVPETSRCLENKQMTDVPRTSTDDGSIAVHGIDINALPSNTYPDIGQGNTYPDIDAAPDDCKKDKDVLHSECNKVAQKAHSSVKQDITKDGPRQIAAEIMSSDPKTCELTYVRKNSVQPGISSVSQWNNSKGQESGGTKSCVVLAVAANSKKFCITIPPPDQTWLELPRRLPVLPRTKKQARKILILKDPSMRLWPVLYQCTPKFNGFIAGWADISRENNLREGDTCEFELCSNSELSFQVLVPNLQ

SEQ ID NO: 34842 - protein, 800 aa, Oryza sativa
MLSEGPNVIENPCGDGRRKKKKTKHHSESSKDVGPTHDVTKSLITNEISIQNTNVSPLDPKQITPATTGVGTIGHQTKFDVSLDVAAAKVIDEVLADLRCTDNTSKDLDQCQLSKQKHQGSDVLGVHGNTVDKGALSAVLPLKYPAAIHSDAPISSPSHNKARGEKLEVLPTAHDSSHFSGGVPDENANAELRESVSLRPSDNTSVSNNISTENVVVQDDDKNKATKRQRKKISLKHVPTDNDKTIQSLDEQVNQVAIEDLNGSNATKADLVQGGSVIDGPAGTVENVQKKSRSTKIRTPKVQKAYPSAHFEDSKSAKDSQGKCVSYIGESGTHSNDTAVGAPTQSFAVQEDATALRTLTPSALKGRKKSSKTGLQSQNASLDHGSDVDLMNYKAEHITASPKKSAVAVEPNEKINFLDHFSPKGTNDQYVSAENKENGREETVREVEDESNKREVDLQSQLADNAKPNDLLQSHHIEKTTSTNNSPGDVGVPSDSTQNVDIADGNVKKGKQKKRKKKSDLLNSVPQKVDPNSDHRDIDNGVQDFSFSVAQEGRMEHDRKENNNNVIWNSSMLTQDPKDATCDSRVKKLNQSKSGSDNQGNLPIDKDHALMDKGQRKSSSQTKPHAESKNFDRFSNGKADPNSKSIRNLVKSFSMSPPASSDSTQGTPQNSRFRLAARKVPRKRYEQTSGKSKKDKGTGTIFNDASSDGSDDELGIGSEKAAIETSSDDASSSADSGISSAAHDSGEPDDDGNASLSQKSRKGGLGSILRGSCSYKKAKQKQAVQLDDTEVPDSQPMDIF

SEQ ID NO: 34843 - protein, 236 aa, Oryza sativa
MCKILPIGNALIDMFSKCGSLTLALDVFNAMPQKNVVTWTSIITASAMHGDGRSALTLFENMKSEGIQPNGVTFLGLLYACCHAGLVEEGRLLFKIMVQQYRIEPMHEHYGCMVDLLGRAKLLGQAADLIQSMHLRPNVVIWGSLLAACRMHGDLELGTFAAKKILELDPNHGGAQVLLSNIYAEYGNWNDVKEVRGVMEVQGTWKKKGCSWMELNGSVHQFAVGGEKILEMKGSF

SEQ ID NO: 34844 - protein, 597 aa, Oryza sativa
MLLVGVAKYTEKTLALHGANLANVRRSLERQQHRHHMGGGNHHSQQLAFATDDNDGALVMKAHALFHICKNSLVDSSVDIESTSPSTALFDLRWKELFRVMEIELSLMYDFLYTKATIIHTWHGYCIRALSPLATTVSLVLVELSNEGGRRHKQSDIVITRVLLVATFLLESASLLRALSSTWTGFLLHSKLQPGWIRHEVLCMRRWHRFHSVIMSLGWPAKVQAHRQWLGKMGQLNMLQLVITQKELERPAPKGGQFWDKEYQRCSNETMIPENVKKLVSELVSRQLKELRDYVKKVVAQEGADALSQDVNLLEMAVYLRKKRGQQALEKNNLLSDLRWSLGNELQLGILTWHIATNMFLLLSGKAAKAKGDEGPKVCAIMTLSNYMMYLLALRPYMLPGLVTRKLIELTCEELAQIWSEHQAAPAAVDDLESSSSPSFCNIRVFMRGKFSQWHNRWRVSTRLSHGRAEEEELARMLIERDNETALNKYLSRGIDVAQKLLDLVDLRKEIDMVQVILAVWVEMLFYASYQCSKESHAKQLSQGGELTTIVWLMAEHAGLFLVNKTRKGAEEANWRKRKANKKKEAGTSDATVNKLS

SEQ ID NO: 34845 - protein, 629 aa, Oryza sativa
MGVGGSFWDLLKPYARHEGAGYLRGRRVAVDLSFWVVSHSAAIRARSPHARLPHLRTLFFRTLSLFSKMGAFPVFVVDGQPSPLKSQVRAARFFRGSGMDLAALPSTEAEASADALVQPRNAKFTRYVEDCVELLEYLGMPVLRAKGEGEALCAQLNNQGHVDACITSDSDAFLFGAKTVIKVLRSNCKEPFECYNMADIESGLGLKRKQMVAMALLVGSDHDLHGVPGFGPETALRFVQLFDEDNVLAKLYEIGKGVYPFIGVSAPNIDDLPSPSTKSLPRARSPHCSHCGHPGNKKNHIKDGCNFCLVDSLENCVEKPAGFICECPSCDKARDLKVQRRNENWQIKVCKRIAAETNFPNEEIINLYLNDDNLDNENGVPLLTWNKPDMEILVDFLSFKQNWEPAYIRQRMLPMLSTIYLREMASSQSKSFLLYDQYKFHSIQRIKIRYGHPYYLVKWKRVTRSMISNDPPSKQTELEGKNDKVEVLDGDDEVVDEEEEEPTMISETTELLDEPDVPQVLDDDKDCFLLTDEDIELVNAAFPDEAQRFQEEQRLKEAKSIARKSKLNVAGFETPKGPRPSGVQLSIKEFYRSKKGLSGDSGKDGSRKSSDVDLSKNLPKSVRRRLLFD

SEQ ID NO: 34846 - protein, 282 aa, Oryza sativa
MEFWGLEVKPGQTVKCEPEDERFLHLSQAALGESKKGSDNAVMYVKTDDQKLVIGTLSADKFPQIQFDLVFDKEFELSHTSKTASVFFSGYKVSQPAEEDEMDFDSEEVEDEEEEEKIIPAPRANGKVEGKENEQKKQGKTDSSASKSKAAVNDDDDDDDSDEDDSEDEDLSPEDDDDDSSEDDSSEDDEDESDEEDTPKKPETGKRKVAEIVLKTPSSDKKAKIATPSGQKTGDKKGVHVATPHPAKQASKTPVNDKSKEKSPKSGGGARAGRAGGRQGGG

SEQ ID NO: 34847 - protein, 76 aa, Oryza sativa
MPLYSSIVIMHCITAHKIHVFLASYIYMLDQTFGHDNQHQIRGATANLQHENSIMFATIYYIIKTALKEGTTFAGG

SEQ ID NO: 34848 - protein, 432 aa, Oryza sativa
MDAKGTVLDFFGVAVKAHELIARVEELQFLARRIARYKDPVRQYRIQAPYKKPQWSASCGWTETDDARLMVGIHWYGYGNWEKIRLDPKLSLTAKIAPATLGERETFLPRAPNLDNRASALLQKEFANLRGKSSKAKGGPRQAIDNESNGGARSLRGRQKDTKIKEDNNSIKDDFKKRKVVEPEAREEGEISESEAETKYRQDKEEKWLEWCSEVLDDEQEILKRLDRLQNTSVNLPKEKVLSRIRKYLQIIGNKIGEIVDQHSESYKQSRMAMRLWNYVANFSSMSGEQLHDLYLKLSQDQMEAGVGPSHGGNFASVPPNRGPKSNQLHPSRNQRSTRSVQYVSESFNNGENTGNSEAWKRRRRSEPDNQFDNQPLYQAPPIMTNGNRLQESSSSAGILGWAPVEMRRYGNERPKRGVHPSRFPPGHGPLL

SEQ ID NO: 34849 - protein, 143 aa, Oryza sativa
MIYTISGCVIGETRYKLFYMMHLGRLSYASTIFIKTSFCILDIYFILCENQAKTIAPSRIDRHQQPVKETMSVWMKAADDMYEEALEHMDMQHKRLEDAKRQEAILKYKYHILQELYDVKDKRILYLIFVLRARHSVFTKSLG

SEQ ID NO: 34850 - protein, 157 aa, Oryza sativa
MPRSRSPSLSPPPPPPSPAAAKSHALRLNESRRTLGMAPRGNMDGAVTKCRSAHAAAQGNAPARTANRSTAGRASIRPVARSRRDWRAGSSPTTPMSPRLTRSTHTSRKARRGRGEQRTHAGSAENALVGPFDTNRRRHAGGTQPSPTLPTPPPPPP

SEQ ID NO: 34851 - protein, 825 aa, Oryza sativa
MIPISLYITMELVRVGQSYFMIGDTRMYDSSSGSRFQCRSLNINEDLGQIRYIFSDKTGTLTQNKMEFHQASIYGKNYGSPLQVTGDSSYEISTTESSRQQGSKSKSGVNVDAELIALLSQPLVGEERLSAHDFFLTLAACNTVIPVSTENSLDLVNEINEIGRIDYQGESPDEQALVTAASAYGYTLVERTTGHIVVDVQGEKIRLDVLGLHEFDSVRKRMSVVVRFPDNIVKVLVKGADTSMLSILRREDDDELHNSLHAKIRETTENHLSGYSSEGLRTLVIGSKNLTDAEFGEWQERYEEASTSMTERSAKLRQAAALVECNLTLLGATGIEDKLQDGVPEAIESLRQAGIKVWVLTGDKQETAISIGLSCRLLTQNMHLIVINGSSEFECRRLLADAKAKFGIKSSDSGRDCQDIEHTHNGDVSKLRTSNGHMSESGIHNFELTGVIASDKSEYSEKVANFADTDLALVIDGSSLVYILEKDLESELFDLATSCKVVICCRVAPLQKAGIVDLIKSRTSDMTLAIGDGANDVSMIQMADVGVGICGQEGRQAVMASDFAMGQFRFLKRLLLVHGHWNYQRIAYMILYNFYRNAVFVLMLFWYILHTAYSATLALTDWSSVFYSLIYTSIPTVVVGILDKDLSHNTLLHYPRLYETGLQNEGYNLTLFWITMLDTLWQSLVLFYVPFFTYNISTMDIWSMGSLWTIAVVILVNIHLAMDIQRWVLITHLAVWGSIAATFLCMVLIDSIPIFPNYGTIYNMAASRTYWLSVCLIIVLGLLPRFLCKVIYQTFWPSDIQIAREAELLKKLPRQLGSRPASDIS

SEQ ID NO: 34852 - protein, 302 aa, Oryza sativa
MHRFASASSLPPPAPATAAAAAAQAAALRFGSAATTRVPRALALTASTCPWHRRHLCSSSSSSSSAAAAAATAAAVEEARQGRKQLGATTQLYEYLLANVREHPVLKELREETAAMRGSQMQVSPAQAQLLAMLAQILGAQRCIEVGVYTGYSSLAVALALPESGRLVACERDERCLEVAKKYYQRSGVAHKVDVKHALAADSLKLLIDGGEVNSYDFAFVDADKRMYEEYYELLLKLVRVGGLIVIDNVLWYGRVADPLVNDRKTISIRNFNKKLLEDNRVSISMVPIGDGMTICRKLVDT

SEQ ID NO: 34853 - protein, 492 aa, Oryza sativa
MDAYYLVRLHLPPPLQLPPTLPLPRGRHDRRVGGAVACRATAGPVGSQERPWESYDRGIQHHAGSDLASSLRLLADMQAAGLRPSGAAYARLIRALARAGRTLEAEALLLEMRRLGLRPDAAHYNALLEGLLSTAHLRLADRLLLQMADDGVARNRRTYMLLLNAYARAGRLEDSWWVLGEMKRRGIRLDTAGYSTLVRLYRDNGMWKKATDLIMEMQELGVELDVKIYNGLIDTFGKYGQLADARKVFDKMCAEGVKPDITTWNSLIRWHCRVGNTKRALRFFAAMQEEGMYPDPKIFVTIISRLGEQGKWDEIKKLFHGMRNRGLKESGAVYAVLVDIYGQYGHFRDAHDCVAALKAENLQLSPSIFCVLANAYAQQGLCEQTVNVLQLMEAEGIEPNLVMLNLLINAFGTAGRHLEALAVLQHIKDSGMSPDVVTYTTLMKAFMRAKKFEKVSEVYKEMEGAGCTPDRKAREMLNDASIVLEQRGMLHL

SEQ ID NO: 34854 - protein, 179 aa, Oryza sativa
MTRAADPVTGRHEGGGSGDGEARGSGSGGDVRAADPATGSARGGGSSDGCGGGNSIRRRIHRSQVPAPPSSPSPAVTTPSPFLRSGTRGVVEAAAGLCNGSGEAEAVEAGGARQQRRRGGGGGGRQGSAAAALRQIRRWWFSSATSRMTTATSSRVRQRRRRVRLGQRRPADFCDDDVL

SEQ ID NO: 34855 - protein, 295 aa, Oryza sativa
MKFGKSLSSQIVETLPEWRDKFLSYKDLKKRLKLIGGGGGGEERQAKRARVAADGGEEEAAAAAMTPEEAGFMRLLEAELDKFNSFFVEKEEEYIIRQKELQDRVARAAGRESKEELMRVRKEIVDFHGEMVLLENYSALNYTGLVKILKKYDKRTGALIRLPFIQKVLQQPFFTTDLLYKLVKQCEAMLDQLLPSNELSVSSEDGRGDSTNEDKPSNPSSSLVNGGTIPELDEIEYMESMYMKGTVAALRSLKEIRSGSSTVSAFSLPPLQGDSSPEEQQELWNKIPVIEQAAK

SEQ ID NO: 34856 - protein, 519 aa, Oryza sativa
MANSEYEYVKREFELDSLLPPSNWIVVRIDGCHFHRFSKIHTFEKPNDERALRLMNACATSMLEKFPDIVFAYGVSDEYSFVFREETEFYQRRESKILSLCVSYFTSVYVMKWKDFFPNKELKEPPYFDGRVVCYPNLKTIRDYLAWRQVDCHINNQYNTCFWSLVKSGKTEKEAQQALKGTFSKDKNELLSQQFQINYDDEPAIFRKGSCVYRDKVETMVKTDRCGNPIKRTRLVITNANVDIIGPEFWENHPYILREEKCRYENVKKFDINHRLPPCNWTVVRIDICKFEQFSLIHSFDKPNDEAALRLMNASASLMMESFPDIVFGYGFSNEYSFVFQDKTELYQRQESLILSSCTSRFTLFYMMKWKDFFPNKDLVEPPHFEAELLCYPKQKILCDYLSSRQAECHTTNQYSTCFWMLVKSGKSENEAREILKGTLSKDKNELLFQQFHLNYNNEPAVFRKGSCTYRQKVEESADAEGRENTTRERWDVIVAHADMGTEFWRKHPYILRKLDLLG

SEQ ID NO: 34857 - protein, 119 aa, Oryza sativa
MLWRLASDDSSKLVNEAFAHLNVEGFVGQKSIAPFLNWPCDEEQQICPVQLLLLWKEKVVAKPLQAIGWDRHGLLLQRESEEFRDVSLDLLQQPCIHPMVHKLQKLHISEDHLLLLQSN

SEQ ID NO: 34858 - protein, 205 aa, Oryza sativa
MEQLVGVHHHHSSSSSLSPRTPSPTHPLPHLLRLPSSSNRLRPPDHPHSSHPVSKLLRVTPPFFLVLLAAVYLLASFTIFSSPAASLRPTKNRPKLLLPMPAPSPPPPDLFELHGGRIRAWITNVGATVTSLLVPDNNGVLGDVVLGFDSLDPYQEKCSTFNDACLNNLKLVTSTSNYGWRMALHLILAALLGELQIGSRMGSLL

SEQ ID NO: 34859 - protein, 390 aa, Oryza sativa
MCAVLRMTSDQQRCHISKAPDHIRSSNPEHYKPLAFPVGPYHARSGVPAPEKAQRLKEQCVDEVVQLSGRSRHDLLEQMRSVLDRAKEYYADEIGMDDEALAQMLLLDGCFVLVSLRGTERLKQLTPGWKAEESTESLLSENSDDRCSDCSDQQGDEENQPPAADHVHHLLHLSHMYLRPRTRRQSSRWSGGGGATVGRLRRATQLRELMVRLKKLEIGGKAAPAGSILDVAFHGGVLEIPRLEIDGGTWRQMANLILLEQGSPHVGLYVTAYCAFMSQLAGTAEDVALLCESGVIEHQLGGDGDVADGLRRLCDGIIFDADDDAYNYLRPVYRAVEEHCRSRTLRLLCWVRGHANCPNPWLLLGIVAIITLLCFIVQQLQHATLRKNAT

SEQ ID NO: 34860 - protein, 396 aa, Oryza sativa
MDEEQLRALLRDLDALKQRPDPAAIDRMRERVAGMVTPAAAARSKIKDMSSEVVDSNPYSRLMALQRMGIVDNYERIRDYSIAIVGIGGVGSVAAEMLTRCGIGRLLLYDYDTVELANMNRLFFRPDQVGMTKTDAAVQTLSGINPDVTLESYSLNITTVKGFETFLGSLKARSSDGRNTGVDLVLSCVDNYEARMVVNQACNELGQTWMESGVSEDAVSGHIQLLVPGETACFACAPPLVVASGVDERTLKREGVCAASLPTTMGVVAGLLVQNALKYLLKFGQVSPYLGYNSLKDYFPTMEMKPNPQCSNPACVQRQKEYMQSKPARDAAAKAKMEAEASAADECPVHLDNDWNIRFSCHTNGADKIVDLDRTLYPMLKPTSFLKHPACRIACV

SEQ ID NO: 34861 - protein, 439 aa, Oryza sativa
MSGVRRAAGRPKIGDLATSDVVVRLRTPEGRDEWLYCHSGVLAAGSRYFADRLSDDWPTCQILGSRYCVEVHCQELDLSPHVTALRLLYAAEPCSRFGVRGALGVLQAAAHLACPRVAAACVDYLESAPWDEADEEEILRTIPCLGPQYECVLARLRPIDPAPVAGILLSAFRHATSTRSPPQELKSAAQEQLEYMLTEDDDAPLLAFDDDIVRSQVKDCVAALLSRFSGFTSSILMEQGEAPLGHGDAEVQQELHSLVSDISWVCQILSKLEMMKCVVVYWIGVSSDVVEAVDKACGGISCLKTRLKVIEVSAKVLEAIAFGNIVLPTEKRCDAVNVWIGFARRTKPLVGHPEHDDDDGDAEAPKINLDSEVWQSLESAIVSIVLTLPSNSQADILSDWLQSKHAKYPDLTEAFEVWCYRSKAAKRRLSFLSHANRVS

SEQ ID NO: 34862 - protein, 125 aa, Oryza sativa
MQRLGSTNPNCFPRNSPPSLMLLVFSPQENRLRQEIEDLEKDTGYKLRVLAQNYPDTPGLAIKDFWQVDDQTIVFVADPTFGNIINFNVGALVDLDIPRSFWSRVSGKYGNMFFWKEKVTFCYSI

SEQ ID NO: 34863 - protein, 331 aa, Oryza sativa
MAPAAGEPSAAAGGGEGDTEAHAVIDVSSSETDSDPDPGFGGAGKRPRRVVATAGSGREAEKRARILAAAVPPGFLDPLPRPSAPPPPPPPPRGRRRVTRQFWNAGDYDGKPDLLGGDPSLRSDSGMDHIRVHPRFLHSNATSHKWALGAFAELLDNSLDEVANGATYVNIDMLENKKDGTRMVSVEDDGGGMDPDKMWHCMSLGYSAKSKVKDTIGQYGNGFKTSTMRLGADVLVLSRSCGNGGRRRTQSIGMLSYTFLRETRKDDIIVPMIDYEKGQQYWKRMMRTTSIDWQTSLATIIEWSPYSSEAELLQEVYVMLCCIYIILFYWF

SEQ ID NO: 34864 - protein, 351 aa, Oryza sativa
MEFAVPVPQQVSSLALPVVVAEAEAAAAAAAAPGRRGAAGGVSSIPKGAGAAARRKTLCDITNLRPRPAAAVEQDGATCAADAGGVAQAQLVKENSELVRLLEERDKIIELSGTELQKLRLANWQLAQANSQMLAELNLGRDRLKKLQHQLACSRAVIATKTSELEEAKKAMKRNRNLPLPEKAPPASETAQQQQGSDRAAQIKDGDVVNPEPAAASDASHAASTKKLSNASRKRMQRSRSLGPAATTKLAATPKEKENVQRRKSMRTPVPQPSEHREDLFEIEDLQLAIGGGGGGGDSKAGTSDPPEQAAVAVAAAQFPRRSSLGRPIRRATERVASYKEMPVNIKLRRS

SEQ ID NO: 34865 - protein, 611 aa, Oryza sativa
MSVSHGEELEISPCDPNSEDDRRRRGMGSSLRRKAIRALRKRGGRRRRRRVDFRYPAAMSIEDVRDAEEELAVAAFRDRLAVHALLPDKHDDYHMMLRFLKARKFDSEKAMQMWAEMLRWRKEFGADTILEEFEFDELDDVLRYYPQGYHGVDREGRPVYIERLGKVYPNKLMQITSVDRYIKYHVQEFERAFRERFPACTLAAKRHIDSTTTILDVHGVGLKNFSKTARELVHRMQKIDSDYYPETLHQMYVVNAGSGFKLIWNSVKGFLDPKTSSKIHVLGTNYQSRLLEVIDKSELPEFLGGSCTCSEGGCLGSNKGPWNDHVILKLIHSMRSNSSMREIKQVSDSEDRSGSSLRAEKLKGMMSDISNAESESDVDEFSLSAVLRSTDYSFLTPVSEEVKGSDSSTFCSCESCDRKGLPDVTPESSQSVQQSSEMVPNQLVSHEHSSTTRWMNNLGNMAISFHGTLTGRTLSNFVRVVGTLMIKILAVFSLFVSRRGNMLENVHPSNVEDEPQPRSATEDNMSACLQRLEKLESLCNHLMSKPPDMPKEKECLLLQSFDRIKTIESDLERTKRVLHMTLVKQMEMMETLEAMQHHYQSSSVRRRLCCS

SEQ ID NO: 34866 - protein, 46 aa, Oryza sativa
MGLLLVLREGSESIPIFTGRFGECNLPQRKQCTSCGNTYSYIPLAY

SEQ ID NO: 34867 - protein, 385 aa, Oryza sativa
MGMEEEGVARGGGGKKLALASIGFADVRVGAVAGGGGAGAGGGYKEDLLVVGLPKDDDFDVAKVVGDVAVGLPDVGAAVRNFLRNREVGEFVSGALAGAMTKAVLAPLETIRTRMVVGVGSKHIFGSFVEIVEQNGWQGLWAGNTINMLRIIPTQALELGTFECVKRSMTEAQEKWKEDGCPNIQIGNLKIELPLHLLSPIAVGGAAAGIVSTLVCHPLEVLKDRLTVNREAYPSIGLAFNKIYQTDGIGGLYAGLCPTLVGMLPYSTCYYFMYETIKTSYCRAHKKKSLSRPELLIIGALSGLTASTISFPLEVARKRLMVGTLQGKCPPHMIAALAEVFQEEGIKGLYRGWAASSLKVMPTSGITWMFYEAWKDILLAPELHT

SEQ ID NO: 34868 - protein, 380 aa, Oryza sativa
MAAQRDDEAGWSAEAARRVWGGAVPLQVHLHDADVTTLPPPPPFLTLGPRIGYLPLLVPIIKAHFSSTLPPGIDTVWFEYKGLPLKWYIPIGVLYDLLCADPERPWNLTVHFRGYPSEILTLCDGEDSVKWSYMNSLKEAAFIITGNSKNVMNMSQADQGALWQSVMKGNLDGYMNISTRLKLGPFEEDCLVRTSSVEGQQGSDEPESPGSGKPCRVPVRLYVRSVQEDLYDLEDALPVGDWESISYINRPFEVRREEGRSYITLEHALKTLLPEFFSSKASRIPDDSETAPQAPDSAPNDDSDVTPRSCEKLESSASSSPQEANVANKGKIVKLVRVQGIEVDMDIPFLWVANNLKNPECYLHICVYVGTRKREPKDGR

SEQ ID NO: 34869 - protein, 657 aa, Oryza sativa
MATATMATAAGAAALLYYTLNRRLQVEKLNQEGDCGNERDAATRGALSTTSRSRVSRRDVRAPATWLETISTLSETLRFTYSETLGKWPIGDLAFGISFLLKRQGNVPVASIYAGDDSVELNGAPVIADLKHHLNLLTLCWHFSKKPFPLFLEATGYSSEDVLMQEPKAGILKPAFTIILDRDKQCILLLIRGTHSIRDTLTAATGAVVPFHHTIVQEGGVSDLVLGYAHFGMVAAARWIAKLAAPCLAQALHTHPDYKIKIVGHSLGGGTAALLTYVLREQQEFASTTCVSFAPAACMTWDLAESGVHFITTVINGADLVPTFSAASVDDLRSEVTASAWLNDLRHQIEQTRILSTFYRSASALGSRLPSIANAKARVAGAGAILRPVSTGTQVVMRRARSVAQAAWTRPALQLSSWTCIGPRRRTNTVSTSTVTSEEIRATTNDGSESTSLLTETTEIVKTETMQFASSEEVQSSSEVSDAVGMMDEKVDSDGEDIIDHHVDEDRMTDVELWQQLENELYRRSEDDEIVEDMTESAITEEVGGTAEDVLSETNDKEVHRFYPPGKIMHILTSTIEETVSAEESSVPHEDDTTGDSDTRIGIFLTPRSLYGKLRLSKMMINDHYMPIYRRNIEQLIAELEKDSSFPVSDCLDSEVP

SEQ ID NO: 34870 - protein, 409 aa, Oryza sativa
MAIAAARRRLWRGLTTAAAASVGVEADTSALLARLVAEPEYRVKATMEEASGGSSAAAAFWEPLAAALLRASSPTKANLVLEWKLEKLIKEGIRDCEPYSVIIRFCRETKNAEFAMKVFEFVEELGIQLNTGIFNALINAFLSVGDLLAAMTLYEAMEDIEDCKPNSATYDAFISAFSRLGSGHAMMSWYLASKDAGFTPSIKAFEYLITGFVKLDRLDDAEVVFEEMICFEIKPNFAILEAKLELLSRRKDPNRVKVFLELVSDGNQELSEATVERLTRLCLYEDKIGELDQLLSLVQGMHTSSLTKLHCGIIRFYANADRLSDMEHAIFQMLDNGMVFAHSEDVEAVICSYFRHKDFDRLDLFLNRIRSLYKLTRSTYDILISGYQRLNLHGRLDLAIKDMREAGFA

SEQ ID NO: 34871 - protein, 387 aa, Oryza sativa
MAPSPSDVALQAAQDGNLRLLRKMAKKLDLRGVKDKNGLSALHFAASHGHLDCCKFLVEESGLDVNSVGHKGETPVFYAAIDGNVQVLGYLLDHGGDPVKPEERGCTPLHNAAENGHDEAVRLLLSKGVHVDPLNYRGAPLHLAASKDRVQAMKVLLEHGADPNRVVNHIFSPLMMACCGHSLKCVKLLVEAGADVNGAGADPNIPDEEGRIPIMVAAARGQRELVEILFPRTKPIPCLPDWNVDGIIRTMRTTRIEPQSAIPVEEQVSDAKSKGKEAFAKGDYLTAIYFYTLAMDKSPLDATLFANRSLCWLRQREGDRALLDAQQCRMLRPGWSKAWYREGAALSFMKDYKGAVDAFGEALKLDPMSDEVKNALREAIECLKRAA

SEQ ID NO: 34872 - protein, 323 aa, Oryza sativa
MATGGSGGGGGGGGGGDDVHGRHKVCYMHAKEPIVVVAGLEQRFCQQCSRFHQLPEFDQEKKSCRRRLAGHNERRRKPTPGPLSSRYGRLAASFHEEPGRSRSFVVDFSYPRVPSSVRDAWPAIQPSDRMSGSIQWQGGHELHPHRSAVAGYSDHHAFSSHGGSAAGAPMLHHPAFELTSGGCLAGVATDSSCALSLLSTQPWDTTQSTSSHNRSPPMSSTASAFGGGNNPVSPSVMASNYMAASPGWNSSSRGHDGARNVHLPPPHGVVLNEVPPGSVHHGHFSGELELALQGGAPSNRPEAEHGSGSGAFSHSTNAMNWSL

SEQ ID NO: 34873 - protein, 78 aa, Oryza sativa
MRFPECLRQRRSDLIYVLRFQVLQASHLLPDLCPHFESAAIVRIFSTRKLHRISQKLSLGSVLYHLCPHHLRVHLQQQ

SEQ ID NO: 34874 - protein, 247 aa, Oryza sativa
MARAFRAASPLPLPSSSSRAAAASGGTGGGGGGNFPWLSRKRLGAKPPSPQRRGGQEREGGGDEAAGMGTTTRAARFSATSSAEPAEVQSSSSSRKRADALARLRAAFLAEMAAYSTGALVREMSSGLVRLALECEKQPINPGEKRRALLEEPTWRAYCNGRKCGFAVRRECGADEWRVLGAVEPVSVGAGVLPDDAAAAAAAEEGDLMYMRARFERVVGSRDSEAFYMMNPDGSGGPELSIYLLRV

SEQ ID NO: 34875 - protein, 203 aa, Oryza sativa
MDPPPVPSPFRRRRLGDAGDEPSPVSILPDDVLAEILHILPPDPSSLPCLSLVCKRWRRLVSDPAFHRRFHSHARRRRAPLLGFFHNSFNVPCFVPTGRAPDRVPAEAFSLRRHPGRWLFLGCRGGRALLASPFSVCRLLMVWDPLSGEPCSAAPPCSATLASATAPPHSAWSSPSSTSAAAPAPASTPRFPANGARWSVGGR

SEQ ID NO: 34876 - protein, 35 aa, Oryza sativa
MRRRALRVGHEAGAGGGGGGGGRGGQESRRVHSQI

SEQ ID NO: 34877 - protein, 118 aa, Oryza sativa
MADQLTDDQIAEFKEAFSLFDKDGDGNNNNHHHHLVLSFSISICSLDRSLSFAHAGRLAPVALPPPRGCPSFLASSGGRSDPGTDLDGNRSLSSSCVSSGELSDMDATLICCADLTIS

SEQ ID NO: 34878 - protein, 132 aa, Oryza sativa
MAAAMGLERKAKVAEVALRCAVCALAALAAALVGTGSQTRTFFSLEKKARFTDMKALVLLVAAHGAAAVYSLLQLARCAAAAAWKGGSNGGAAVVAWSVFSCDQAVAYALMAAARAAPAPSPAMARTRGRQG

SEQ ID NO: 34879 - protein, 44 aa, Oryza sativa
MRLTRSASRASPTRASWTPSRSSSSASSPTSPPRLSPSSTAASA

SEQ ID NO: 34880 - protein, 345 aa, Oryza sativa
MDRPRRPGSDRRYPPLRFRKRKRSSSDSRSSKLNNKPGSDKWEDVCSICDDGGDFLCCEGRCLRSFHATEKHITEINQCTTLGLTEEQWKIFRQNDEKSEPLYICKNCKYNQHQCFSCGLLGSSDLSSGAEVFQCEDEKCGHFYHPKCLARLLYPDSSMQPLNFEEEVARGLKFLCPVHKCHVCKGGENKNDMENQFAVCRRCPTVYHRKCLPSDIVFEDDESNGIVQRAWDDVLRDQILIYCMKHEIDPELGTPARNHIIFPDCKNLLTRGPSKPKGQEDAPAVLDIPEEDMSPDHSSEPSQPPPQPAAETDQTDQDLSNGFNSFAPKALFPLPYPGSCGWLDD

SEQ ID NO: 34881 - protein, 93 aa, Oryza sativa
MQKETAILPTGQNNLQPATTFMQNRNIKCSRLQNIQQFLPLILTHHTGDKPSFPLSSRNRTLPRGFINMSASCSAELVYSTSTSFLSTLSRMK

SEQ ID NO: 34882 - protein, 51 aa, Oryza sativa
MDNTRLFFLLRRFQILDGLAHPSAAMDLSAEAAAAARPRVRRVRSGADLTS

SEQ ID NO: 34883 - protein, 365 aa, Oryza sativa
MADGEDIQPLVCDNGTGMVKAGFAGDDAPRAVFPSIVGRPRHTGVMVGMGQKDAYVGDEAQSKRGILTLKYPIEHGIVSNWDDMEKIWHHTFYNELRVAPEEKMTQIMFESFNVPAMYVAIQAVLSLYASGRTTGIVLDSGDGVSHTVPIYEGYALPHAILRLDLAGRDLYEGYALMKILTERGYSFTTTAEREIVRDIKEKLAYVALDYEQELNAAAAAKNSSSVEKSYELPDGQVITIGAERFRCPEVLFQPSLVGMEAAGIHETTYNSIMKCDVDIRKDLYGNVVLSGGSTMFPGIADRMSKEITALAPSSMKIKVVAPPERKYSVWIGGSILASLSTFQQMWISKAEYDESGPAIVHRKCF

SEQ ID NO: 34884 - protein, 371 aa, Oryza sativa
MAAASLAPPTASFSPAPAPGRVKAAAPLLSRRPPGRFLLRVASESSSISGDTLLGLYEKERLSHSLYANEDYDKEMFWDNLDADLRYWTRSLRPVQWYPGHIAKTEKELKEQLKLMDVVIEVRDARIPLATSHPKMDAWLGNRKRIIVMNREDMVSNEDRNAWASYFANQGTKVVYSNGQLGMGTMKLGRMAKSLASTVNTKRREKGLLPRAVRAGIVGYPNVGKSSLINRLLKRRMCPAAPRPGVTRELKWVRFGSDLELLDSPGILPMRISDQTAAIKLAICDDIGERSYDFADVAAILVQLLVRHPAVGPEAFRRRYRLDMDSDCGKMFVTKLSVHLFNGDASQAAFRILSDYRKGKFGCVALERPPT

SEQ ID NO: 34885 - protein, 366 aa, Oryza sativa
MHTPFVDKSPHRRLDGLGAGGWLKQRLAQILVRSTCTTNTTTTTTTTSSTAFVSLDKTNADTHQEPPPPPSPYFCTPCTYQRPKLDAPGRPRRRRRSASLVHISIDCTGGAGATSGRRSVHSDAPLLPYSSSLPTKDGRKQSRARRKARSSPSTSRRHCPSSSWGRARLPRGAPGQYSSSSSTVTDDELAPFSTDEEGGEEADTRTLFSSLSFSSDSTSEFYHTNSSSSLARKGHKNAPARRPPARRASARITSDPADAFRPVVSVAATKKQHNDMKKKEETAIKRQLGTDDDTAAGAGMAVVKRSSNPYADFRSSMVEMVVERRICSVPEMEELLGSYLSLNSPQHHPAILAAFEDVWEAVFGEE

SEQ ID NO: 34886 - protein, 55 aa, Oryza sativa
MKALKKKLLCWAGGKKNKYGVGILTCSLDPMKIKSICFVCHQSSDTSKFQLNVVT

SEQ ID NO: 34887 - protein, 76 aa, Oryza sativa
MNNPKMGYNAATNEYVNMFEAGVIDPTKVVKTALVDAASVASLMTTTEAIVTDLPKKEEHSHAGGAGGMGGGDYGF

SEQ ID NO: 34888 - protein, 154 aa, Oryza sativa
MKDVVGSPGTWSGMSLRVSQCVFAGASVVAMASAYGFSNYTAFCYLIASMGLQLLWSFGLACLDIYSLQTKRDLHNPVLVSLFVVGDWVTAILSFAAASASAGVTILFERDVHFCRMYPQLSCGRYELSVILAFITWSFIATSAVSMFWLLASL

SEQ ID NO: 34889 - protein, 74 aa, Oryza sativa
MIPVAKVAAAEPVTMKESPPEKYVHVVTVDSHDFWFMGFVSYDKAVHHLVQAVSSQQRGGAAADTAAAVPGDGK

SEQ ID NO: 34890 - protein, 115 aa, Oryza sativa
MAFAGIRSGVLRSVAGVDGLAAAAAARPTPLLPRVHLAGDGTGRMATTIGFCPRLRAAPPSCKKAEADPAPSLQDAVVAVDAVLRAPPPPQEHGGKMAAILEFLKKHSLSRERRR

SEQ ID NO: 34891 - protein, 329 aa, Oryza sativa
MGNSLGCSASGERLVSAARDGDAVEARMLLELSPALARYSTFGGLNSPLHFAAAKGHLDIVTLLLEKGADVNVRNYCGQTALMHACRHGHWEVVQMLLLFRCNVTRADYLSGRTALHFAAHDGLVRCVRLLLADFVPSAPLEDGASSTVDGGECQTNSGSSPCSSLGLKFNESARLRYINKPADGGVTALHMAALNGHFDCMQLLIDLGANVSAVTFPYGTTANLIGAGSTPLHYAAGGGNAECCQLLLSKGASKLTLNCNGWLPIDVARMFGRRFLEPLLSPNSNSSIPAYQPSNYLALPFMSILNIARLVLNNSLLTNRFSSDGSKV

SEQ ID NO: 34892 - protein, 89 aa, Oryza sativa
MASRSSSSRSRAVAMWLVALMVVFLVAGPQPASAARPLRPAGWNAPSIDGEGHYASGVVDKYAPLLLSMLPRGPVTPSGPSGGTNGDGN

SEQ ID NO: 34893 - protein, 75 aa, Oryza sativa
MSSTNTTSNDPKTTKDELAPPAPTAAEHGGGKDAVTKTVQTVEVKESVGQEPVLKPTKVVHQIPADQAKDAPKQD

SEQ ID NO: 34894 - protein, 104 aa, Oryza sativa
MASSSKALLLLAVLLASAVLLAAAADQPHGKEQKKTESGGGAGVQDWHDDHGGGGHHGGGGGGYPGGQCHHGCCGGYGYHGGCRRCCATADEKPDPMYRPEAHN

SEQ ID NO: 34895 - protein, 144 aa, Oryza sativa
MVQGTLEVLLVGAKGLENTDYLCNMDPYAVLKCRSQEQKSSVASGKGSDPEWNETFMFSVTHNATELIIKLMDSDSGTDDDFVGEATISLEAIYTEGSIPPTVYNVVKEEEYRGEIKVGLTFTPEDDRDRGLSEEDIGGWKQSS

SEQ ID NO: 34896 - protein, 201 aa, Oryza sativa
MVMTTTRHTVRFGSATIDTTVTSDVAAADEWARGVRAAARGGRGLIVGLDCEWKPNHVSWKTSKVAVLQLCAGERFCLVLQLFYANRVPPAVADLLGDPSVRLVGIGVGEDAAKLEADYGVWCAAPVDLEDACNRRLGLVGTGRRLGLKGYAREVLGMAMEKPRRVTMSNWEKRELDPAQVEYACIDAYVSYKLGERVLAN

SEQ ID NO: 34897 - protein, 317 aa, Oryza sativa
MALRALDNTLPMASAERPKKLPKLSAAAAAVVPAASPEGKRKKNDENSAPKATTEQAVEYVRSEDLQPVPHPKAKAAGLVAELDSKDWIRACDALNDARRLAIHHPSLLNPILGKVMLAIVKTMKSPRSAVCKTSIMACTDVFDSFGNLLSSASDDAFDKLLLQLLLKASQDKRFVAEEAEKAMRAMAASMPPLPLLRKLKAYVHHANLRVRAKAAVAMSQCASRMDVATMKEFGMSAMLQVAAELLSDRLPEAREAARGMVNSMHAAFSKEAAAAREEEEGAAAAAAASWESLCALSLPPISAQSVAKIVSQSQSQ

SEQ ID NO: 34898 - protein, 164 aa, Oryza sativa
MMRSPWMVFAWAAAMVAVAAASPVPTKLKVGFYEHSCPQAEEIVRNAVRRAVARDPGLAAGLIRMHFHDCFVRGCDGSILINSTPASFDNQYYKNVLKHRVVLNSDQALLDSPWTAGVVKLHSAVEKVFQVKFAAAMLKMGNIDVLTGDEGEIREKCFMVNNHY

SEQ ID NO: 34899 - protein, 212 aa, Oryza sativa
MRQYAAATAASSSFRARPRARPSCLPAAALPLAPCCGVAWSRASYRRASVRAMGAASSSSSSSSSSPSPQGQAQAQAQGKPNYSTSLTDEEWRKRLTKDQYYITRQKGTERAFTGEYWNTKTPGIYHCVCCDTPLFESSTKFDSGTGWPSYYQPIGDNVKCKLDMSIIFMPRTEVLCAVCDAHLGHVFDDGPRPTGKRYCINSASLKLKKTQ

SEQ ID NO: 34900 - protein, 243 aa, Oryza sativa
MGSRSKISLKLLVDSKSKKVLFAEAGKEFVDFVFSLLTLPVGAVVKLISAGTMQGSIGRLYQSVEHINASYLLPNKDRADLLQPKVLHPDARELLLLQPESGGAGGSPLARFKLYTCAGHCTTAAMEAKAACPQCKQAMDTEVALVLPSASSPAQSSAAASGGDGESSGYVKGLVTYMVTDGLEVTPMSAISSITLINKFSVGKDVELAEKYVSIAMDEGLGILKAALRSDTVLSDVFLAKKK

SEQ ID NO: 34901 - protein, 92 aa, Oryza sativa
MGGAAGVDGVEAAGGPPPDPMAWRQLWPGGGGRGGRPGAAPSRLPDLAAGREAARPDGGTRGSDALPPSDLEGGHAAAVQRQEVVVARRRRW

SEQ ID NO: 34902 - protein, 404 aa, Oryza sativa
MIKVQGPVVLYQDGVHEAARRRRSLRARYAYGLIFFATNLLAWFVRDYGAKLLRGLHHVPVCGAGDSKCFQSGGVLRVSLGCFIFFWVMFATTFGTRKLHEVRNSWHSGCWILKFLVYAVSIIIPFIVPNIFIQLYGEIARMGAGIFLILQLISMSHFISWCNKRWMPDSQSNQCGLFGLFLSTISFIASFAGIAVLYVLYVPNSSCAFNIFTITWTATLVAVMMAVSLHSKVNEGLLSSGIMGLYIVFLCWSALHSEPQTGKCHTRLIFANDGDWATIVSFIIAICAIVMATFSTGIDTRSFQFRNDEDQLEDDVPYSYEIFHIVFAMGAMYFAMLFINWELNHPTRKWSIDVGWVSTWVKIINEWFAASIYVWRLISPVILRKQAANNEELVPRTLIVQCSR

SEQ ID NO: 34903 - protein, 173 aa, Oryza sativa
MAGVGRNMLAPLLVLNLIMYLIVIGFASWNLNHFINGQTNYPGVAGNGATFYFLVFAILAGVVGAASKLAGVHHVRAWRHDSLATNAASSLIAWAITALAFGLACKEIHIGGHRGWRLRVLEAFVIILAFTQLLYVLMLHTGLFGGGDGAYRDHDYGVGAGAAAGEPKGTARV

SEQ ID NO: 34904 - protein, 99 aa, Oryza sativa
MMEVPVNSVKVFLEKKRLEGYSVIGLEQTANSKPLDHFSFPSKTVLVLGREKEGIPVDIIHVLDACVEIPQLGIVRSLNVHVSGAIAVWEYTRQQRIAT

SEQ ID NO: 34905 - protein, 93 aa, Oryza sativa
MAVTARSDVLWKPLNHEVLMRTRSDKVRPKMLGLKVVRHMVQQLKEEYVVLLPETIPFLAELLEDVELPVKTLAQEIVKEMETLSGESLRQYL

SEQ ID NO: 34906 - protein, 163 aa, Oryza sativa
MFTEPIAGIPSPATQTAQERNTGRDNVETMKSSRSTCTEHIILLSDSEENSLTADVSGEDVLSSVKDSDGSGTSDMQKEVEHSEPRMPTEDRHVSLKQQICSPASDIVASSKPVSKDRSIIAAKEGLGRAKIPTVPVNTNDTSLLPKKIKPPTTTPSAAAAAA

SEQ ID NO: 34907 - protein, 342 aa, Oryza sativa
MTFNPGSPGFGFPFPFYPPNPNPYAPLNPNAPKPPVMPPRPQAPPPPQRFPPPPAPPIRPPSPPGRAPPPPGRAPPPPSQAPPPPRRAPPPPALPPPPPRRAPPPPSMPPPPPPRRAPPPPATPPPPPRRAPPPPSPPIRPPPPPTPRPYAPPPPSHPLAPPPPHISPPAPVPPPPSPPPHIVIIVVFVSFGGLLLLACLAALFCWHKKRRETERKAEVHNLSGHVHVHKATESGPSGAKATVLSIDEDLKFQEVAGESSSAAGAGSHHTPWSWHRRQQEGKAENKAELINVTEHIHVDEKIVSGPQGQKIEILSEDEDIRFEEEGRKEKGDQRSKTRITKT

SEQ ID NO: 34908 - protein, 199 aa, Oryza sativa
MPAQQPKTTTKPAAAATTKQTGAAKITKAKSGNPMRQIKIAKLCLNISPGETGERLQKAAKVLEQLTGQTPVFSKARLTIRTFGIRRNEKIAVHATVRGEKAAELLRRGLRVKDFELRKHNFSESGQFGFGIQEHIDLGLKYDPSIGIFGMDFFVVLERPGCRVSRRKRAVASVGKQHKVTKKEAMKFFQEKFDGILLG

SEQ ID NO: 34909 - protein, 377 aa, Oryza sativa
MADGEDIQPLVCDNGTGMVKAGFAGDDAPRAVFPSIVGRPRHTGVMVGMGQKDAYVGDEAQSKRGILTLKYPIEHGIVNNWDDMEKIWHHTFYNELRVAPEEHPILLTEAPLNPKANREKMTQIMFETFNAPAMYVAIQAVLSLYASGRTTGIVLDSGDGVTHTVPIYEGYALPHAILRLDLAGRDLTDCLMKILTERGYSFTTTAEREIVRDIKEKLAYIALDYEQELETAKSSSSVEKSYELPDGQVITIGAERFRCPEVLFQPSLIGMEAPGIHETTYNSIMKCDVDIRKDLYGNIVLSGGTTMFPGIADRMSKEITALAPSSMKIKVVAPPERKYSVWIGGSILASLSTFQQMWISKGEYDESGPSIVHRKCF

SEQ ID NO: 34910 - protein, 173 aa, Oryza sativa
MADRQQQHAHGEGRTAAQRLGYAPAASADSPSTTLLRRVQTHAPNSTQVVGFLTLAVSGAVLLLLTGLTLTGAVVALIFLGPIALLTSPIWVPVAVALFVLAAAALSACAFVVVAVAAGTWMYRYFTGRHPVGADRVDYARSRIADTASHVKDYAREYGGYLHSRAKDAAPGA

SEQ ID NO: 34911 - protein, 48 aa, Oryza sativa
MQEVRSGSSTYGHFSLPPMTPLPDSDWLIQSVQPPPPPPPSSPLIIPT

SEQ ID NO: 34912 - protein, 166 aa, Oryza sativa
MEEQLSQHHGENFGFQYLVSLTGLVTTHCFQNCGCYLISSHFIQDKARNQCAKEDLYYRHPLGQDILWATLYKFVEPVLSHWPGSKLREKALKNAMQHIHYEDENTRYICSGAVQKVLNMLSCWIENPNSEAFRFHIPRVHDYLWVAEDGMKMQVLISYLGLMAIF

SEQ ID NO: 34913 - protein, 88 aa, Oryza sativa
MTELFDTAVTSLLHLPEVLDRLGAAAGDRRSAGDHAHHAAHGHGQHRISGIGGGAPVDIMETPGEYAFVLDVPGLSKSDIQVRTKSEP

SEQ ID NO: 34914 - protein, 168 aa, Oryza sativa
MREKHVDIPQLTYFQMDVRDMSLFGDGTFDCVLDKGTLDAMMCGDDAPLGASKMLAEVARILRPGGIYMLITYGCPKERVQLLYQSGSHKKIELYIMPTPGYQLKWSKGVSLAQPIMEEVSLTVDGQLPPDYVLKDPESHFIYICKKPDAANEANSVVANEGETITSK

SEQ ID NO: 34915 - protein, 85 aa, Oryza sativa
MYSSDVAMQPGFESSYSDYGILDDLSAFNCTEDKSLTTADPSSAVCDEQFDDSYLFNEQKPEDVYGEQAYQRDAMELLSSDQCSE

SEQ ID NO: 34916 - protein, 328 aa, Oryza sativa
MASDRRVCTVHHMSHAAIVLVSVLLLCSAHPSAGARRLMELYKPPPSEQLTYHNGTVLRGDIPVSVVWYGRFTPAQKAVVSDFLLLLTVASPAPTPSVSQWWNTINQLYLSKAAAQGKNGGGGGKITTQVRLAGQLTDDQCSLGKSLKLSQLPALAARAKPKKGGIALVLTAQDVSVEGFCMSRCGTHASNAKARTAYVWVGNSATQCPGQCAWPFHQPVYGPQTPALVPPSGDVGMDGMVMNIASMVAGVVTNPFGDGFYQGPKEAPLEAATACPGVYGSGAYPGYAGNLAVDPATGASYNANGAHGRKYLLPALFDPATSTCSTLV

SEQ ID NO: 34917 - protein, 45 aa, Oryza sativa
MSFGSGSASLALVRTATASVAMRLHFADSLVVLATRHGSSKVSLY

SEQ ID NO: 34918 - protein, 77 aa, Oryza sativa
MLLVEFQICFNFVLLICLDYFVFVLHIQIRAEGRSTINNRIGQAMIGPFVVSLKSVYQKLKLQVINWCIFMHGLLME

SEQ ID NO: 34919 - protein, 115 aa, Oryza sativa
MEKLVPNTKKAMEDKEEKPKVPSSDPDLVDLVAGEQPQLQREHQPPNISEMKPLTREAYGGGMYANEGRRDPTRPRASATQSADGPEEAAVRPKHAPPPSTGDRDLDITGQSYIQ

SEQ ID NO: 34920 - protein, 129 aa, Oryza sativa
MICMRDRSRRGVARERMAAVSVGGGGRNIGVAMDFSACSKAALRWAAASLARPGDRLVLVHVKPSFQYEQGVAHLWEQQGSPMIPLVELADPRVSRIYGAAATAARRNGGELLLMADQLRFPHVCLGQL

SEQ ID NO: 34921 - protein, 104 aa, Oryza sativa
MERVAKLSTEKAVVIFTASNCPMCHTVVSLFSDLGVGAAVHELDRDPLHGRDMERDLARRLGRSPPVPAVFIAGKLVGSTDRVMSLHLAGKLVPMLKAAGAIWL

SEQ ID NO: 34922 - protein, 203 aa, Oryza sativa
MICMRDRSRRGVARERMAAVSVGGGGRNIGVAMDFSACSKAALRWAAASLARPGDRLVLVHVKPSFQYEQGVAHLWEQQGSPMIPLVELADPRVSRIYGVAPDAETIGILTSAANQKGVEVVAKVYWGEPAKKLTEAAQGIPLHWLVVGNRGLGAVKRVLMGSVSTYVANHATCPVTVVRENLPPPPPPPQPPQPVATAASYY

SEQ ID NO: 34923 - protein, 51 aa, Oryza sativa
MRSPPNQMGRVGLVQFKKSEFGKFKKLVQFTSSIILEILTYSTAKLFSRLN

SEQ ID NO: 34924 - protein, 29 aa, Oryza sativa
MNKWLTTAPGHEQVCKMADNLTCCLALDP

SEQ ID NO: 34925 - protein, 293 aa, Oryza sativa
MAPARAHHLLACLLASALLAAATPVTGGGLMTDQLEVLFGQTQLLNDSNGDQTIALTLDREMGSAFKSKTSYLFARIDMDIKLVADDSAGTVTTIYLISEKDWNTHDEIDLEFLGNVTGQPYTLHTNIFANGEGGREVQYRLWFDPTQDFHTYSVIWNPDEILILVDNMPIRQFKNHLDSGVPFPIYQPMRLFGCLWDADDWATEGGRIKTDWSQAPFVAYFRNYTADGCVPSSYAWVCGQGPASSSDWFDRGLDDVKQQQQLREAQDKYMIYNYCNDPERFPDGYPKECGLQ

SEQ ID NO: 34926 - protein, 85 aa, Oryza sativa
MGVAGWMLEKTIELDRLLSVEPGRHGAAPTILGFVEEHNEVLLCTDIGAFMVNLHSMQFKKLSQTMEPGFYHPFTSFYTKKMLPE

SEQ ID NO: 34927 - protein, 72 aa, Oryza sativa
MSRSLNGLFTGKIYLLRMLLGRTLLLFKQRFHIFDLEDKVVLKGIGLLEMEISEKKWRRVSEVSVKNSEVQS

SEQ ID NO: 34928 - protein, 36 aa, Oryza sativa
MVVLEVVQKRVVGLVVVLVLVQVSVAEAALAGSCEK

SEQ ID NO: 34929 - protein, 240 aa, Oryza sativa
MAAPFALVSRVSPAARLPIRAAWRRARPTVGLPSSGRARQLAVASAAQENRDNTAVDVHVNQDGGNQQGNAVQRRPRRSSALDGISPFGLVDPMSPMRTMRQMLDTMDRIFDDVALGFPATPRRSLATGEVRMPWDVMEDDKEVRMRFDMPGLSREEVKVMVEDDALVIRGEHKKEEGEGAEGSGDGWWKERSVSSYDMRLALPDECDKSKVRAELKNGVLLVTVPKTEVERKVIDVQVQ

SEQ ID NO: 34930 - protein, 199 aa, Oryza sativa
MLGLDRLKRGRGPVMVRTVAATVLVVLASSVHSMNKIRGRAAGELDGAGAGTLTPTDQVLLARHLLEASLMGYSLFLALVIDRLHNYIREVRGLKRNLEAASKLNKTLDEAKLIGSSDESKTYQKDIASLNEEIKKMKRQLKEKANEAKDAEAKALAAQKQSEGLMIEYNHLVEDNKHLHDQLESADLTVSRSDGKKNT

SEQ ID NO: 34931 - protein, 279 aa, Oryza sativa
MATARAVRLIASRPPSTNLRSLVVVPGRRRLLSTSTEAGGAGDPSVHSGDPPSDDYPDRPPKFSGAEEATGGGDHGKNPSTAAATPSESTKERVPPFAMSDKLGSQELADPAGGSSFTQKRRRSSSSRPADSREEATPGGEEAAGRKVREEDREYYQTHKPSPLAELEFADTRKPITRATDGGSAADRLSDVPGKVAEDTADDSLARAEAMFREVTPSGRTRARSRRCWRGAAAKETLRGAGAVRLGEASQASADPRECRRAVVAWGVCKKKCYSCCVY

SEQ ID NO: 34932 - protein, 88 aa, Oryza sativa
MASTKVQRIMTQPINLIFRFLQSKARIQIWLFEQKDLRIEGRIIGFDEYMNLVLDEAEEINIKKDTRKSLGRILLKGDNITLMMNTGK

SEQ ID NO: 34933 - protein, 66 aa, Oryza sativa
MPPFRQTPPPQARARRWGSASCRRCTRRPPWPARSPPRSRRRTARSPPSSVSESSALQRLIWNQAR

SEQ ID NO: 34934 - protein, 107 aa, Oryza sativa
MTMAQVADTVALHPWLLDLLPLLIVLLISTHVLVLVHTSPSRESSRPPSGSSVLVPCPSGAPSAQGQALRELLHLERNQGKLSEYKTRMVRLKPKVPKLMFGNIDKG

SEQ ID NO: 34935 - protein, 96 aa, Oryza sativa
MATATEEVAAAAAAAGEAPPPPPPAVVEEAKEALEAPKPEEAPKAEEGEEKKAEGEKEKEKAKKERKPRARKPRSAGPHHPPYFEVRGKSIDRSMQ

SEQ ID NO: 34936 - protein, 164 aa, Oryza sativa
MQGTTTTKAGRNGDRAGTEAPGATRATDGKVGRGGQGLADHRRAAVAGHRRAPRPRRPRGTRPQAISCESAGGAGHLPPRRNHDGRSRAPPPQRAAAARRLLRPRRQRHHLPMGNLRRVPCAWVQHDHVLPHCSGRERVHELPHAAWLAAVPVLPDLHPQHPQE

SEQ ID NO: 34937 - protein, 198 aa, Oryza sativa
MLPAALRPLRRIPLARLRSRLLSSSASGEGGPPAVASTDEAVRAAKLREEAYKQVANLDWSSNADFWKAVDIVKTLPPKRKEFGLDFHLVQLFFVCLPSLAVYLVAQYARSEIKRMEAEAEEKKKKDEELEKEKQLEADSVKDETDSKLSAVLVRLDTLEGVVNEIVDDKRKGSAPGFSNKEEATKKGGDKAIPLMAR

SEQ ID NO: 34938 - protein, 98 aa, Oryza sativa
MGNCLQSGGGGAAALGDGKMSMRRRVCGGGGGGEEEDEAAGSSSSSSVMKVKMVLTKAELEWLMAQLKAGDRRLEDVLQPGEHRRGPRDELLQLRLLN

SEQ ID NO: 34939 - protein, 140 aa, Oryza sativa
MDRRPQGGWQPVKRRFGEEGRGFRDLTEGELRERLQRERAREGEREGSRERGGEQRGPRCFGSPVGRREGGRGAGRGDENWQGGRPDVARQGGGGDGGWHGGRGDGGRLGGGRAEVIKCFKCAQEGHLQIDCPNPPICYT

SEQ ID NO: 34940 - protein, 96 aa, Oryza sativa
MEINPENGIMEELRKRADADANDKSVRDLVLLLFETALLTSGFSLDDPNTFAARIHRMLKLGLNIDDDDAAAADDDADMPALDDAAAEESKMEEVD

SEQ ID NO: 34941 - protein, 143 aa, Oryza sativa
MTHFRIGTASLLLAWILSSLRPTVARIRRRRRREGRIQRPLPLHGSCGRLHSSSFGSHRFSAPLSCGSVGGGDGRGGSGDLFPSRMVPVVSPPPSLSHGSAAGDDGRDGPGGLSYGDDGDGFQEVSMSTTRPSASSGLHHRSH

SEQ ID NO: 34942 - protein, 89 aa, Oryza sativa
MAMRALVSKLRVPAAASRRALPPFRSFSAASQDKVGGTTARAAAKEGTPISDNSRKVEKFYRKLRWYQALGNFLGFNTSVYLFYRYHYT

SEQ ID NO: 34943 - protein, 89 aa, Oryza sativa
MPLLLLPWINSGCRCDPRTCSRTPARSPPSSTSASLPSPHHGIEHRRFATSRVLKRSPCLYACVPNKMIGVRFHSRSRSLVDCLWDWYS

SEQ ID NO: 34944 - protein, 180 aa, Oryza sativa
MATATNGNASAAAAAADSAVQEPPHKIAKVAPLLKVKKLSENAVLPSRGSALAAGYDLSSAAEVVVPARGKAMVPTDLSIAIPEGTYARVAPRSGLALKHSIDVGAGVIDADYRGPVGVILFNHSDTDFAVKPGDRIAQMIIEVIVTPEVAEVEDLDATVVSSRKLGEFIWSVMDGWVMS

SEQ ID NO: 34945 - protein, 74 aa, Oryza sativa
MAYVPVCVQCGTHSNPCRCKVLGPTLGFVAFVVAGVVEWPLGAFVYLFRHRKGRRIMGHPANVVYPRITSAIPI

SEQ ID NO: 34946 - protein, 294 aa, Oryza sativa
MAAHLLRPRRPRQQHRPQERRPRRDAPLHLRRARRAPGPQPPEQQPLRRPPVLPRHGLPPPRLPQQQLLPLHPRRLLQRPHLPPRHLPRPEPAQRLLRGVDDPRRRRRRAAAAEPQPQRMQPHRRHPGLPRRHEQPPGAQARLQRPLRTHPLHLQRLRVADALAQQPARRPQALRHARPHRHHAQPRTGMAPRQRLLRPHPGLHRRLQAPLRPLPQQQPARRPRPTGARVHGRPQVRSARQQQSLGPRPGDQGAQVHLLTERVLRRQAGGRLLASGDGIASLPRRGRLPQEAGS

SEQ ID NO: 34947 - protein, 59 aa, Oryza sativa
MLLWYLSLKSRLCGCSVYRSCSTLLWTEKRNQRKTQERAAKEKRDEQSQVSTTRHVRRS

SEQ ID NO: 34948 - protein, 122 aa, Oryza sativa
MAAPDVEYRCFVGGLAWATDDRSLEAAFSTYGEILDSKIINDRETGRSRGFGFVTFSSEQSMRDAIEQCVLAPNPSCSPNAKSCGFSLSYADSSLQAALSQDTLAVAGDVVKAYTFGCFNSL

SEQ ID NO: 34949 - protein, 121 aa, Oryza sativa
MERRWEAARGRTATTREGGGSGVAQRGGGGRRPGGGARGEGRGAAREELGGGRAAMREEGWWSSTSFDLREVGRGGELAVETGIAAKLLLWSPLSSSASSSTLTISCSPAPCLPCSPAAAS

SEQ ID NO: 34950 - protein, 172 aa, Oryza sativa
MASPSALIAMLLVMVVGCAAVASAMELSFIVGDAQGWNTGVDYTAWAKGKTFEANDTLVFRYARKQHTVTEVTKSDYDACTVSGKPISDFEGGALVTFIALSPGEHYFICKIGNHCASGMKLAVTVSNSSDTPRPQPWIGPYSTPASASAHLHAGGAVVAAAVGILLNLALF

SEQ ID NO: 34951 - protein, 70 aa, Oryza sativa
MLKGWLKPEIRKRPDRFLCRLRDFKLDSVEMVGVEPIPGVTHCDDKGGMLPVLPSHHFGLLLTIAPQIHK

SEQ ID NO: 34952 - protein, 125 aa, Oryza sativa
MAAAAAAPLRRLLLRLGKPPPLPIPLLPHITPQTAQAAGDPAAPPCPGAIPSQAPARNLRDVISSFHPGLQIYPSLDPRFGEVEEGVDGEGGGAEVWADSVKKKRKRKMNKHKLRKLRKRLRRQT

SEQ ID NO: 34953 - protein, 288 aa, Oryza sativa
MERPAPVRKSHTSTADLLTWPEGAAQELAAGATPPPNRRPHQPSEAISKVVFGGQVTEEEFESLNKRKPCSAPKWKEMTGSGIFAAEGEVEEDESANASATPVRTVSKNYQAISTISHISFAEEESVSPKKPTSIAEVAKQRELSGTLQSEDESKMKRQISNAKSKELSGHDIFAPPEDPRPRNSANGSTSQTPGKNAQVSTITFGEADTDSVVKTAKKIPEKKLTDLTGNDIFKGDAAPGTAEKHLSTAKLKEMTGSDIFADGKAPSRDYLGGIRKPPGGESSIALV

SEQ ID NO: 34954 - protein, 341 aa, Oryza sativa
MDDDASMSIRWGGFFESPARNLGLQLMSSVPAERDTKQLLSGSPFLHHQHQQHVPHHHHQPHHPRDCGANGNANGGAMPPPPATEAPPSMPMNFARSDMWMHPQQQQQHHHPREHKALHNLTVGHGSSHIAHHDPVGYGMIPGTHTLQMMQQQTEPQLQPPPPPQQPKEECISSPLIEENVPVIDEPPPPKKRQQGRQPKVPRAKKPKKSAAPREDGAPPNAPAPRRRGPRKNIGMVINGIDLDLSRIPTPICSCTGAPQQCYRWGAGGWQSACCTTTISTYPLPMSTKRRGARIAGRKMSHGAFKKVLEKLAGEGYNLNNPIDLKTFWAKHGTNKFVTIR

SEQ ID NO: 34955 - protein, 326 aa, Oryza sativa
MSRSPHLPPRCPPLGPQITRRDDSLFTQSCRFPSEDPFVGEPPCWLDDLLADSGKSHTLPPLRRACSDSDAILDVLTSFQSPIYPIDEGDPQPVGEAGESFNAAAEGGGSGAGIEGSCVYGPNSPRQKTRLTSSESSMVNAVLENVPSNPLQYLMIDATSGVNCNVGAANGTGDTGDAVCHADQEKSLKRRSGQRSRVRKLQYIADLERTVDSLQNIGADLAVRVASLFQLRNALSMENKQLRRQITSLQQAKLIKDGQTQMLKKETERLKQLSVRHRRSRSVTSCFEANSFGGGDPSAINWQMLDMSKLSLNGGAVVPPRGGYGM

SEQ ID NO: 34956 - protein, 76 aa, Oryza sativa
MPDPGSLTAGDTTRLDIPVKVPYDFLVSLARDAGRDWDIDYEMRVGLTVDLPILGNFTLPLTKSGELKLPTLSDVF

SEQ ID NO: 34957 - protein, 393 aa, Oryza sativa
MPLFCKHGAGFLAVAVSTSIVFLLLLHAFSLPASALSFGLARRHRKDAAVSCDVFSGSWVRDDGGGGAAAYTGYNCPVIDAEFNCQLYGRPDSDYLRYRWKPAGCELPRFDGADFLTRMKGKTVMFVGDSLGRNQWESLICLLHAAAPQSPAQLVSVDPLYTYKFLEYGLVVSFYRAPYLVDIGVAQGKKVLWLDDISGNGEAWRGADVLSFNSGHWWTHTGTLQGWDYMGADGRYYEDMDRMVAFQRGMATWANWVDANVDPAKTRVFYQSMSPTHYSSKEWANPVSKNCYGETAPAAAAAAGLNATTAQATSGQDQVIQATLRSMKSPVRLLDISALSALRKDAHPSVYSGDLSPAQRANPGGGSADCSHWCLPGLPDTWNQLFYALLFYQ

SEQ ID NO: 34958 - protein, 83 aa, Oryza sativa
MAARTVAVAAALAVLLIFAASSATVAMAGRPTPTTSLDEEAAQAAAQSEIGGGCKEGEGEEECLARRTLTAHTDYIYTQQHHN

SEQ ID NO: 34959 - protein, 304 aa, Oryza sativa
MSGMNSLSMVEARLPPGFRFHPRDDELVLDYLERKLLDGGVGGAAAAAAAVTIYGCPVMVDVDLNKCEPWDLPEIACVGGKEWYFYSLRDRKYATGQRTNRATESGYWKATGKDRPISRKGLLVGMRKTLVFYKGRAPKGKKTEWVMHEFRKEGQGDPMKLPLKEDWVLCRVFYKSRTTIAKLPTEGSYNNIDSVATTSLPPLTDNYIAFDQPGSMQNLEGYEQVPCFSNNPSQQPSSSMNVPLTSAMVDQEQNNMGRAIKDVLSQFTKFEGNVKREALQSNFSQDGFDYLAESGFTQMWNSLS

SEQ ID NO: 34960 - protein, 273 aa, Oryza sativa
MGKPLIYEILEKPASSSVIGICSLIWFFIQKRNIGYGDVGLSYEAAMEGGQYWRIITSAFSHISVVHLVFNMSALWSLGVVEQLGQIGLGVEYYLHYTLVLVVLSGLLVLGFYHVMIQKFKVEYFRRVTAVGYSCVVFGWMTILATKQPSSKLNIFGVLSLPISFAPFESLIFTSIMVPQASFIGHLSGIIVGYSIAWGLVHGMNNYWAITMFGWIVLVFVLSLKRTGSMDLRFIEIEPVTDPSLPSVGVVASRNGRTLQMDVLPRRGVADIV

SEQ ID NO: 34961 - protein, 157 aa, Oryza sativa
MASEGAVSPAFAYTVVYVKDVAKSAAFYSAAFGYTVRRLDQSHKWAELESGTTTIAFTPLHQRETDALTGAVQLPDSAGERGPVEICFDYADVDAAYRRAVDSGAVPVSPPEQKTGARRSGTSGTSTGSSCAWAATSARSGHAPARLGDFSRVCSIM

SEQ ID NO: 34962 - protein, 149 aa, Oryza sativa
MMHMTFYWGKDVTILFDGWRTATWTGYLLSLVALLLASAFYQYLEAFRIRVKLLAGAKPASIPPPASSDAARAPLLLPSSAAGRWPARLATAGLFGVNSGLGYLLMLAVMSFNGGVFVAVVVGLAAGYLAFRSSDGEDLVVVDNPCACA

SEQ ID NO: 34963 - protein, 241 aa, Oryza sativa
MGDHAMANNHEHKVDHLDQPFYGPPVLPPVEPLSAAAARRRCVADPYALCCRAIRVLTIVVIAVGVVALVLWLVSLPNALKAYVDSAELTRFELGGSDGAKRGQLLRYNLTVAVSIRNPNRDQAVLYRRLEAVVLYGGERFGYVDFPRTRQGRKSTMVIRPSFVGQGVLAGAAAFGREKEEGFFNINVKLHMRVRLKVMVFVDSVEYRPDVDCYIRVPDPSNATAVAMGFTATRCRVDDFM

SEQ ID NO: 34964 - protein, 167 aa, Oryza sativa
MMASRVSSLLRAAAAAVSVPGRSRSLSAAAATAAKKPAGDYVPVYVAMGMIAVSVSLGLATARQQLAHAPNVRLDKKKRETVPEVAAPDMALDEAERFVGGSLFRKVAHVQDDASLRAGVAADPVAEYPARKAVTLKDAGVEPPGIEQGREGILEVLGKKTKPAAAA

SEQ ID NO: 34965 - protein, 250 aa, Oryza sativa
MAMDHRGGGGGGGRSSSRLRDRLARMFRPGALLRSTCNNHATASTSSSSSSAAAAAGGVVTASACSSSRALLAADAAAAVDYCGRESFLASSRRDYSDAAATALVGRTESFSTALDRLHRRGGGTPLPPSRFSVDAPPPPPPTTRHQIRRKRRAARASSCVDTCGVRDGFRPVVSAAEEQVRRGFAVVKRSRDPYADFRSSMVEMVVGRQLFGAAELERLLRSYLSLNAPRHHPVILQAFSDIWVVLHGG

SEQ ID NO: 34966 - protein, 155 aa, Oryza sativa
MPPDPSGDSNSHDYNGGISAGTPGAFGDGHGGEEMMYLEQESGHFGYHGDVAIAADGSLDGIVKVQPETLPALPSIGDIAVHSENGNGKAVVPRSNEHHMANAVLDIFEECLREVKANGITYGANVNGGSELARRWRAQRIDELDVLSRTYWWFW

SEQ ID NO: 34967 - protein, 342 aa, Oryza sativa
MADGSSPSAAAGYPLLVQRSNAGSPAMAFSLSDGKTHDDVSLPEMHSSTYLQTPQGWVLVLSSSSAPEMSTFLLDPRDGRKVGLPPLDESELPTARKCVLSDNAPDAGAGVVVLSLQGPAVWFCRVGGERWSTHTYDMGYFSLPVEYRAPKKRHLFDVAGVGGRFYFCEDKDFSLGTLDFTGDGEVALVAVSVPGIDDIFPSPDSSGIAATYLVESRGDLYLAAVVFLGFRAEGPPHKFSVYRMDFSAAGPAWRRTADIGGDRAFVLGGGGGGNFGASCSASGCGVRANCLYWFNSFSPDDYNLHVLSVGDGGVETVAPPPFEHASCVHKPFWLVPTTNNTA

SEQ ID NO: 34968 - protein, 158 aa, Oryza sativa
MGSGMEAARRVLEHPTPTDASSAAALPSGFYDAFVLRGIRVEAAEPGRLLCRFTVPSRLLNSGGFLHGGATASLIHLVASAVFHTTGNSSSSSSSTSPLEMNISYLDAAFPDEEIEIEAKVLRAGKAVGVALVDLKKKSGKLIAQARYSNYLAPSSKL

SEQ ID NO: 34969 - protein, 256 aa, Oryza sativa
MDGGYGSVTIVHDARSPEDVFQDFCGRRSGIVKALTIEVEKFYKQCDPEKENLCLYGLPNGTWAVTLPADEVPPELPEPALGINFARDGMQEKDWLSLIAVHSDSWLLSVAFYFGARFGFDKKARERLFMMTSSLPTVFEVVSGGVNTQSKTANGSSKNKSGSKPPKRPNSDSKPQKQVQAKYEEENGGRGNGGDEDQAETICGACGEAYANGEFWICCDICETWFHGKCVRITPAKAEHIKHYKCPGCSNKRTRE

SEQ ID NO: 34970 - protein, 73 aa, Oryza sativa
MPSRSRTRGGDGDGDGDGLPAGDLKPGVIRNLPTFSRLLINKWPPVFRQRFSYPFRCFRTHCTADLGVREGAG

SEQ ID NO: 34971 - protein, 21 aa, Oryza sativa
MMESSNASSYFVIELSTVLMD

SEQ ID NO: 34972 - protein, 97 aa, Oryza sativa
MAASEFRSGRRAVALVVVICAVLLLSSAVERAAAQVPCSKCDHACKKSCKGYGRDSSCSLPCGDPSNKAGCESCLDAYYLKCLNYCGQSCRVTCTSG

SEQ ID NO: 34973 - protein, 374 aa, Oryza sativa
MSLASHAVRSTRAFASSSIASARLTSLNRQINTSPFLGFRKMSSLPKTMKAVYIEKTGGTDVLQYKTDVPVPEPQEGEVLVKNDFIGINYIDTYFRSGVYKPPKFPYILGREGAGTIAAVGPNVPSDLTVGTRVGYMGQYAYAEYVPVAATYTIPLPDSIDSKTAAASILQALTAITLIRDAYPVQKGDWILVTAAAGGVGLWLCQLLRAIGARVIASASTEEKRNLAKENGAEFVLGYYEEDRDQFVKKVLEITGGEGVHAVFDSVGKATFDSSLATIRRKGSMISFGNASGPVEGFALARLSAKNLKLMRTTLFNFIVTREETLKAAEELWKLIEKDGLNVKIHEVYPLEDIVRATQDIEGRKTTGKLLLKP

SEQ ID NO: 34974 - protein, 147 aa, Oryza sativa
MDLAPGRRARLLVALALVVLVALAARSGAEVITLTEETFSDKIKEKDTVWFVKFCVPWCKHCKNLGTLWEDLGKVMEGADEIEIGQVDCGVSKPVCSKVDIHSYPTFKVFYEGEEVAKYKGPRNVESLKNFVSDEAEKAGEAKLQDS

SEQ ID NO: 34975 - protein, 355 aa, Oryza sativa
MTTTFRASALVRKATQPVVPFGDIRGKTGPIFGSKLIEVVYQVGEGWRAPLLRDYGDLEVRPQIAGLHYGLQVFDHCVISADKATKKPRIFRQECFLSRLAESRDYLHFGKYEDAELTALIKEYLAAEQFNIPTGPGQALLVRTCIIGDNNSLSAGPADSFRLFIFSTPFDTFAETKPLNVKADPTVRRSWAGGTGGVSVGGNYANQIYHETLARKEGFDRILWLVDNENIATAGDANFFAVYKNASGAHELVTPELGQTSMAGTVRTTILERFGKQARVSDVTAKEFGAALRSGAAVEAFATSSTCITRPIASMSYNGEAFAIPTPADGFAARIKKEVLGIWDGSIADPSSQLL

SEQ ID NO: 34976 - protein, 283 aa, Oryza sativa
MGRLVEALERVGYRDGETLFGAPYDFRQPPAAPGQPCRSFSRFQRRLRALVERASRTNGGRPVVVVSHSQGGYFALEFLNRSPMAWRRRHVKHFVMASTGAGGFVGSMRFLATRDDSPLGRVGRSSAIKFTPLPSPKVFDRHTPLVITRHKNYTAEDMPEFMAAVGLPASEVALYETRALPVAMSFRAPVVPTTCVNGGGVPTTETLVYWDGDFGKDPRVVYGDGDGVVNSASILALDTVIGDDPKQVYYRSVKIAGASHVGVVSDAAALRRVIAVILQDNFV

SEQ ID NO: 34977 - protein, 15 aa, Oryza sativa
MRVLVPFTRVCQLVY

SEQ ID NO: 34978 - protein, 192 aa, Oryza sativa
MDEERTAAWWGRRAWELLSAVRARAPLVHCVTNLVSMDIAANALLAAGASPAMVHSLREVPEFTPRCDAVCVNVGTLSEGWLPSMRAAASAGRPWVLDPVAAAASEFRMEACLSLLALRPAVVRGNASARCPRAGSPPCAPPPPRAAPGCSTPSPLLSLAWPGRSGWSLAPRDPPLSGCISSMLSTASTCRR

SEQ ID NO: 34979 - protein, 105 aa, Oryza sativa
MESHGLCTLLCLIESSLMFFLWMRIYPFCGSKLRICIWRYQICSMRIMYFLNLGEQHAEKNNMQHENNVLLQNLGEQHAEKNAPGQVQEEHAEKNAPGQVQEEMQ

SEQ ID NO: 34980 - protein, 380 aa, Oryza sativa
MELMDDDGSSSLLEELMAPLRRGTPTTTPEDLWLQAYPMMMSPMCGDGVMLGDLLVGGGNARNTLASPPPPSFPLPVPLTTTTPCPPLHEVSFEFDSIDCLGEVCNPYKRSGGAVRATAAAQVMVAAMDPRREAASSAVAVAAVEEEERCKARRGAGGGGDSGELAPMFVFGGGGGAAASVRPRSCRPPQPGAPSKNLMAERRRRKRLNDRLSMLRSVVPRISKMDRTSILGDTIGYVKELMDRIKNLQVEAATGDSSSSSTENLSMLKLNTLKPPPSSSSGEETPLIRNSTRFEVERRENGSTRIEMACAAIPELLPSTLAALEALGVEIEQCVISCFDDFAMQASCLQDDKKREMTRDTEEIKQTLFRSAGYGDGCLI

SEQ ID NO: 34981 - protein, 38 aa, Oryza sativa
MNRWMHSDLTRYNKPIRCILLNDCHLTCSTDLALASDL

SEQ ID NO: 34982 - protein, 356 aa, Oryza sativa
MGVLCFGASNILLCAEDSSSVLGLGGFGGGGGEVAAELGCGGGGGFDFFGFGGGAVFPIDSDEFVALLVEKEMDHQPQRGYLEKLELGGLECSWRKDAIDWICKVHSYYNFGPLSLYLAVNYLDRFLSSFNLPHDESWMQQLLSVSCLSLATKMEETVVPLPMDLQVFDAEYVFEARHIKRMELIVMKTLKWRLQAVTPFSFIGYFLDKFNEGKPPSYTLASWCSDLTVGTLKDSRFLSFRPSEIAAAVVLAVLAENQFLVFNSALGESEIPVNKEMVMRCYELMVEKALVKKIRNSNASSSVPHSPITVLDAACFSFRSDDTTLGSSQSNSNNKDYNSQDSAPASKRRRLNTTPI

SEQ ID NO: 34983 - protein, 387 aa, Oryza sativa
MMASFRPFSLSSPMTTTMLLLFLLLCTNSATADVAGSNGGCGGFKRMFSFGDSITDAGNLATISPPDASFNRLPYGETFFGHPTGRFCDGRLIVDFLADDLGLPFLTPFLRAKSPEDFRQGANFAVAGATALSQDFFKQMGLNLTIIPPFSLDVQLEWFKSVLNSLGSTDQERKEIMSKSLFLMGEVGGNDYNHPFFQNRSFTNEIKPLVPKVIAKIENAIKVLIDLGAKTIVVPGNFPIGCVPSYLTMFQSKSSPQDYDAFGCIKWLNDFSVYHNRALKRMLHQIRRDPTVTVLYGDYYNTALEITHHPAVHGFKKETVLVACCGDGGPYNSNSLFSCGGPSTNLCTNPSTYISWDGVHLTEAAYKFVAHHMLHGLYAHQPSLSPK

SEQ ID NO: 34984 - protein, 170 aa, Oryza sativa
MGMAPVATYPSSSSSSTLARPPCAAAGRAAAAGRARVAAAGMSSRASSFVTGGAGGLAVAVAARTRAGSGAGSRGGGAMGCKCLFGLGVPELVVIAGVAALVFGPKQLPEIGRSIGKTVKSFQQAAKEFETELKKESDDGGDQPPPPTETAVSDGGEEKELEASSSKEST

SEQ ID NO: 34985 - protein, 359 aa, Oryza sativa
MEQQQAAPMARNRKVVLREYIAGRPPREDDMVLVDGGTVALRVPEAAAPAPAVLVKNLYLSCDPYMRGRMRDFHGSYIPPFKPGSVIEGLGVARVVDSTHPGFSAGDIVSGMTGWEEYSLIDRPEQLSKIQQSDIPLSYHLGLLGMPGFTAYAGFYEICSPKKGEFVFVSAASGAVGQIVGQLAKLHGCYVVGSAGTNQKVELLKGKFGFDAAFNYKEEPDLTAALKRYFPEGIDIYFENVGGPMLDAVLLNMRTHGRIAVCGMVSQNALTDPVGIHNIFCLVPKRIRMQGFIQSDHLHMFPQFVSDMAKHYRDGKIVYVEDMSIGLENAPAALVGLFSGKNVGKKVVCVSQELSQFTF

SEQ ID NO: 34986 - protein, 182 aa, Oryza sativa
MEGFLHRRKPTTTMTTTRRRRKMPLLPASLPSSGGRLGSPPSPPPSCASPALARRPPLRQPQMPRAHAAAGDGGPRASASCSGAWPGQRNLTAIDGFPPPFGRHFTVHCLRRSPSIPRASSLAGQYLYFVWNLLALTLASLLDLETAFCHILFPPKCGGSSSAEPHAQRVARRLQHRPFHLR

SEQ ID NO: 34987 - protein, 65 aa, Oryza sativa
MILVAVVAELLEEYTVLVARVLEQLFNDAPFPRRMRFLMLRSLPFVPPPLPPPPPSHALRVTTRG

SEQ ID NO: 34988 - protein, 95 aa, Oryza sativa
MASGQQQQGRSELDRMAREGQTVVPGGTGGKSLEAQENLAEGRSRGGQTRKEQMGEEGYREMGRKGGLSTGDESGGERAAREGIDIDESKYKTKS

SEQ ID NO: 34989 - protein, 380 aa, Oryza sativa
MAAALSSSRRALHALHRRLLLHPLPSRHAPPIPRHHFPSPPSSSSSSSRFFTTTRPDARLLQLHARRLVVGGARSFAAGVGGGGSSKLAPLGQGVKGLGLGRPLDAAKNAAARYREAVGLQVEAFWRRNYMLLVGAGAVVVCIALWRVMFGIASTFVGLSEGMAKYGFLALATAMVAFAGMYTRSRFTINPDKVYRIAMTKLNTSAAILEVMGAPLAGTDVRAYVMSGGGPKLKDFKFRLGGKRCFLIFPIKGSERKGLVSVEVKKKKGQYDMKLLAVDIPMASGPDQRLFLVGDEQEYKVGGGLISELRDPIVKAMAAEKEFDYLDEREDAEDEAREREEAERRQQEEEAEALRREEERLREEYEERKRQEAENLEKTT

SEQ ID NO: 34990 - protein, 31 aa, Oryza sativa
MNMSCKTTHFGFDRSKCPGKRGSTSGVVVES

SEQ ID NO: 34991 - protein, 147 aa, Oryza sativa
MMYMRATHRDEEGKKVTEKVAVPETRHPDTARHFERKLDQQGLHRMERHPANGSRGIGAPPPKSGRGGKFTWEGPDSIVDSQLDPLPAAIDRNDPNYEEEEGDHEREADVVGEVEVAKVAGDARDGVARVDVVAPPQLHEKLQLQPQ

SEQ ID NO: 34992 - protein, 150 aa, Oryza sativa
MSLVRSGNVLDPMSVDFWADADPFGAVRSLAERCPVLTNVRVDWKETPTAHVFTADLPGVRKDQAKVEVEDGGVLVISGERAREEDVDGKNDERWHHVERSSGKFQRRFRLPRGARVDQVSASMDNGVLTVTVPKEETKKPQLKAIPISG

SEQ ID NO: 34993 - protein, 122 aa, Oryza sativa
MQTAKVKVQDMVSGAKEKVKEGTAKAHGKAGQATAATHGEKEMAKQEEKAGKAQAKADEHQERAEHRANATTGRHGTRVPLTAGGNRHHHAPVGGPAVDPAYPAAGTGTGTGTYAASDKSYI

SEQ ID NO: 34994 - protein, 152 aa, Oryza sativa
MRAGGEHAGTVHHVRDGEGVRPHRRLLRRGQDPQLRRRHHRRPPDHLRLPQAADQRHGRPEARPRRRHPLQVRRQHPLRHQPFHRLLQGALMSGSTSTSDATIIKERSIHRSPALISRLLCACAVVNDRARNIYACCSFVVLLPAYLLRFDS

SEQ ID NO: 34995 - protein, 127 aa, Oryza sativa
MASSRASASCALFLALNLLLFAITTACPSCGSGGGGGHGHYGGGGSSGGGGGYGGGSGGYGGGGSSGGGYGGGGGSSTSGWYGKCPTDALKLGVCANVLGINLNLPIHLSLILNFCGKGVPTGFMCS

SEQ ID NO: 34996 - protein, 261 aa, Oryza sativa
MESDCQFLVAPPQPHMYYDTAAAAVDEAQFLRQMVAAADHHAAAAGRGGGDGDGGGGGGGGGERKRRFTEEQVRSLETTFHARRAKLEPREKAELARELGLQPRQVAIWFQNKRARWRSKQIEHDYAALRAQYDALHARVESLRQEKLALADQVDELRGKLNERQDQSGSCDGGGAEGDDDDKRNSVMNASSSGLVEEDYVSCLAVPVVDVSEDGSAACGGSSYEYDHHLDYLGGGQLPDPFCGMPDLWEIWPMVEWNAVA

SEQ ID NO: 34997 - protein, 40 aa, Oryza sativa
MRSLSASPSMMRSMVRIIWSSVLASGKLSHNPAHVRKWSN

SEQ ID NO: 34998 - protein, 398 aa, Oryza sativa
MEGSPSKRRGVTAPAHTDDGDWFSDVPDDVILNIMSFLTTRQAVQTCVLSRRWLNLWRSVPCINADVGEFQRSDTEWEEYDQERESAFKMFMDRVLELRNPAAPIRTFRFRCCRLDGFEGTSDEADMNRWITHAMQKQPWVLDILVLYDALKLDHSAFTCRYLTRIKFINVLMMPGFFQQLEMGCPVLENLFLDESIVADVEISSRTLKVLTIKSTQFSYKFRTTISTPSVTYLKLWRPVNGIYVFNDMPLLVTSILVLYDVQDSSDFCQNLRSLSAAKRLEFDYFGRKLTMENNLQLYPKFNNLVSLTLGQWCLDANFYGLVVFLQNAPKLEKLTLELEKNTPERIIGKLEDRSFTCEHLTRVEVVCSEGDPLVKDVVNFFVNSGLTSAQVQIIRWC

SEQ ID NO: 34999 - protein, 115 aa, Oryza sativa
MRRRLVAKAAAHRCLAPPHTTTASRRRPVPAPTCEEPSRRRTLGSRWPRKRLPHRLGAPPLKTCTGSSPRTAAAAAASSCSSSDGRRRVPRRHAPPARMRLQPPVTSPPKPPPPL

SEQ ID NO: 35000 - protein, 426 aa, Oryza sativa
MEPLHDEALSENSNELQQCTTSERSSTMISPAAADNSMITMAATSVESSVSADKVSPVEGQVTEAAVEHAPVEKDQCEEPNTTIVDSGDSSVSLKNEELQDHDQAPSGSSIMSNSAEQPEEASDVNMQQQVENVDTTQDATEESDATPEIGMVDVTYADTENYVQSPLLQTTSKLQSTTGQNVLKEPEAAKQSDVSGEYESVLVGKQNESANNLTGDSAKEEPPLVGLGMEADTHESAPRELKDEPILPETERSELSCEHGDITGHEDSEMYAPPECETDVQKESCCVDRRRADMQVPKEVECDELGDDNPKEDASVQTENMASEEASLASATPDGMKDENKVAEETTSDYATPYSSKSDNENKLAEENQKLKEMLQNLLASGSDQMGVITELSEKVKTLERKLARKKRPKVRVHRPTRQATAKVH

SEQ ID NO: 35001 - protein, 33 aa, Oryza sativa
MRGLSGPLGTASSSRLAVEVTGIYSNNSLKSTK

SEQ ID NO: 35002 - protein, 154 aa, Oryza sativa
MSGAAAAAVAPGGEAYTRDGGGVVPPAGEKTFAYEGTVSAAGVTGASGQLQPTTREEGHTTLGETLRRSGKSSSSSSSSSEDDGQGGRRKKKSIKEKIKEKLPGSHKQEEQKQAGHTAPAAGTGTGTGTHAAGKHEKKGIVEKIKEKLPGHGHH

SEQ ID NO: 35003 - protein, 401 aa, Oryza sativa
MTPLARRLLHASSPAAAGGEPGVLACRLASRAVVRFAGPEAGRFLRSLLTNDLLLSSSSQQRYAPTPNAPARAPPPAYAALLTPQGRFLYDLFLYRPPPPSQLLDRTGSAPLTGERPKGNQEDEGEDEPGEVLADVDAAEVDELLACFKRYRLRSKVEIDNVSKEFLCWQRFGRNVEHTGPSTQEPEAQSIGWGQGVDHAAESAAQGNGHGWEWFKDPRLDCLGYRGIFPANTIPPLVESDKEADERHYLLWRIENGVAEGSTEIPKGEAIPLEYNFAGLNAISFEKGCYIGQELIARTHHRGVIRKRLMPLIFEDENGQELKQAVAPGSEVVDKESGKKIGTVNTALGSRGMGLLRLEEALKQNSSLAIKDNRDVRVKAIKPDWWPVEWTQMLEQQSAVA

SEQ ID NO: 35004 - protein, 133 aa, Oryza sativa
MRLLTHNMLASNARGAVTGYPLKLQVVKWSTKEAEPNPEFLRGMLPKIDWPALVAATQALGLPELLPEAPPTDAELSAEGAAADEGSALRRLHRALLEIHIEEGALVCPDTDRCFPISRGVPNMLLHEDEVRN

SEQ ID NO: 35005 - protein, 85 aa, Oryza sativa
MASLVFEPHGGAAVVVAGVGGGDVVFCVVILCLSVLSMIIFAAASPGGERRRRRRSSSGPVFVGGRGCGCGGRSSGACVCGTYLS

SEQ ID NO: 35006 - protein, 262 aa, Oryza sativa
MSAAAAATDGTYSPAAAAGEKRRERKEELRRHLAEDADWPRADGRSFHDCRPAFMQTGPTTAASGSAYAEFGKTKVIVSVFGPRESKKAMLYSDTGRLNCNVSYTTFATPIRGQGMDNKEYSAMLHKALEGAVMLHTFPKTTVDVFALVLESGGSDLPIIISCASLALADAGIMIYDLVTSVSVSCFGKNIIIDPTSDEEAWQDGSIMVAYMPARKEITQLTLTGEWSDGKITNAVELCMDACSKLCDILRERLKDAASLAE

SEQ ID NO: 35007 - protein, 30 aa, Oryza sativa
MVPTPNCQRTGGTYSWNTLKMSSQSLWSSS

SEQ ID NO: 35008 - protein, 103 aa, Oryza sativa
MTSSMSPAPAPAYAQVMEDMEKGKELAAQLQGLLRDSPEAGRFVDQILHTFSRAMRALDKAAVSAAGGEGSEVQSEVTCGGGASAGGKRKAPAADRKANCRRR

SEQ ID NO: 35009 - protein, 57 aa, Oryza sativa
MTPPPRRARWRRWTELNKYSLPCRNASWCHGWVCLRCTSTVCGRVCVVSPVLDMSLT

SEQ ID NO: 35010 - protein, 151 aa, Oryza sativa
MMEARLPTVHFGGLGELTTTNTAEPSAAVPLASQAGGGDVAADVAAQPPPPAVAGGGRGVDMAAAARRVASPRLKVPPPDAAALAGVLQPPHEEHHQPIVGKQGTQAGARRRRRWRRLVVVDRADADPVHGRGRAAAAQGQDLHLPHARRG

SEQ ID NO: 35011 - protein, 215 aa, Oryza sativa
MASMRTAAAAAMLACIAVVLASTAADGALLPWFGGGGARDEAVPELGLLAAADPFRILEHVPFGFDRDDVAMLSMARVDWRETGDAHEVVVDVPGMRKEDLRVEVEDNRVLRISGERRREETTEQKGGGDHWHREERSYGRFWRQLRLPDNADLDSIAASLDNGVLTVRFRKLAPDQIKGPRVVGIASAGGDDGGKKSIGGAGEGQNQQAKKVEL

SEQ ID NO: 35012 - protein, 90 aa, Oryza sativa
MAASCGGFCSVRRPPGGAVPPPDPAGRRAPEPRHHQMRRSPWCCPCRRPASSSSTSPTTAPSTSAAARCLQPDVPPTTFCLPANSYSLLL

SEQ ID NO: 35013 - protein, 374 aa, Oryza sativa
MSYAFNAGSLGGAAQFGGAAAFAGAAAHGGAAAALGGAGGACGGQPCQARISIPVPTPVPVPVRVPQPVPQPYKVPRYVDVPVPVPQPYRVEVKVPQPYPVPTPVPVPRPVPVPRPRPVPTPVQVQVPVPVPTPVRTPVPVPCPVPQQCPIPYPVPQVNKVPQPIPYQVPTPTPVPTPVQAPCPVKVPVPFQYIEEVPIPVPVKVPIPTPVIVDEHVPIPYPVPTPQAVPVPVPTRVPVPREQPVPYPFQVPVPVPQPVPRPRPVPVPTPCAVAAAPAVAAVAAAPAPAFAAAAPALSAAQFGGAAQFGGAALSGAQFGAAQLGGAQFGGAALSGAQFGAAQLGGAQFGAAQLGGAQFGAAQFGGAAAGGCGGF

SEQ ID NO: 35014 - protein, 274 aa, Oryza sativa
MGELPPGYRFYPTEEELVCFYLRHKLDGGRRVPDIERVIPVADVCSLDPWQLPEAHQGAWTGDGEPWFYFCPRQEREARGGRPSRTTPSGYWKAAGTPGWVYSSDGRPIGTKKTMVFYRGRAPAGAKTKWKMNEYRAFEEDDDNAAAAAPAQNHYLQTRSDFSLCRLYTRSGCPRQFDRRPPSSSVAGGGGENRAAPSSTAAAFANEDAAESSGKSQKRKRSAPDDSLDSTSSSDDNGGCDGSMLQQQQQRQRGTDEELVECSMTDWADLLDWF

SEQ ID NO: 35015 - protein, 41 aa, Oryza sativa
MTPTPPTAPPTPTWLQPLRLPDLAYAADYGEQQEGCYPSRQ

SEQ ID NO: 35016 - protein, 153 aa, Oryza sativa
MHMWGHGSQYRKGPESLRGIQPTAMLRLPCYCCAAGCRNNIDHPRAKPLKDFRTLQTHYKRKHGLKPFLCRKCGKAFAVKGDWRTHEKNCGKLWYCLCGSEFKHKRSLKDHARAFGHGHGALGGAAALDDDDDGAVSDLDHDSSSTAPAARSL

SEQ ID NO: 35017 - protein, 322 aa, Oryza sativa
MAQAVVPAMQCQVGAVRARPAAAAAAAGGRVWGVRRTGRGTSGFRVMAVSTETTGVVTRMEQLLNMDTTPFTDKIIAEYIWVGGTGIDLRSKSRTISKPVEDPSELPKWNYDGSSTGQAPGEDSEVILYPQAIFKDPFRGGNNILVMCDTYTPAGEPIPTNKRNRAAQVFSDPKVVSQVPWFGIEQEYTLLQRDVNWPLGWPVGGYPGPQGPYYCAVGSDKSFGRDISDAHYKACLYAGINISGTNGEVMPGQWEYQVGPSVGIEAGDHIWISRYILERITEQAGVVLTLDPKPIQGDWNGAGCHTNYRFHYLLLMLKYPAA

SEQ ID NO: 35018 - protein, 153 aa, Oryza sativa
MVADERVQGRVYGLDIQESAIASTSSFLKMAVNSHELELVKLFTICHSRMEEVVPKDFPVRLVAFNLGYLPGGDKTIITVPKTTELALQAASSIVSSGGLISVLVYIGHPGGRDELDVVESFASSLPIDTWMSCKFEMLNRPAAPVLILLYKK

SEQ ID NO: 35019 - protein, 154 aa, Oryza sativa
MAEEQRWQEGCHRLCANNCGFFGSPATLDLCSKCYRDRQGRESTAPVVVAAAASACPATHPSSPSSSSCPAFLPSSTAAEAGVVVAAVAKASRCASCRKRVGLTGFACRCGGTFCGAHRYPERHACGFDFKAAGRDAIARANPLIKGDKLKDKI

SEQ ID NO: 35020 - protein, 162 aa, Oryza sativa
MGQDADVPGRALAAVGESREARQRRGEGRGGGVDEELLRVVVAVVPGLDGDDDAEEEVVGVRGEERGEAVLEGVGRRHRVQVDVGDRRRRGEAQRHREGEPGGGRAVAGGPRARHRLANDELRIEYGSGHLLLLLLLLRRRCSISTRIVDRDGSNLGHGAFG

SEQ ID NO: 35021 - protein, 399 aa, Oryza sativa
MSNKSSVISFYPGEDERRLYRLVFHRRHRDLVLDGYLPHVLAEGRAVTVRNRQRRLFTNNASTSWNPYRRGKGVWSHVPFEHPASFDTLAMDPGDKDAIVVDLVAFRDGKDYYAKVGKPWKRGYLLYGPPGTGKSTMIAAMANFLDYDVYDLELTAVKNNTELRKLYIETTGKSIIVIEDIDCSIDLTGKRKKSSGDNKASDGGGEGSDDKPKLPTEADKDDGGSKVTLSGLLNFIDGLWSACGGERIIIFTTNHKEKLDPALIRRGRMDVHIEMSYCGFEAFKVLASNYLGVEQHELLGDIRRLLEEADMSPADVAENLMPMSKRKKRDPDACLAGLVEALNMAKEEAQANKAAKEDEEAKAAKGIEEMKTKEQATTNGEDEGKDKRTSEENKANGDI

SEQ ID NO: 35022 - protein, 69 aa, Oryza sativa
MAPPGPRPARGGAAGHGALAAAEESELGMASFSPGFVSTFSESELFTCVYFSFLKCLFQLFQASSSRPC

SEQ ID NO: 35023 - protein, 111 aa, Oryza sativa
MAAAINSEASMSSRPKLACLCSPTNHPGSFRCIRHRPIPRARHLSSSSSPPPPPPSSSPSSGGVASAGARAKGGRSVRAHLLRMISCSNGGRRRRRGDFQPRPSRLRQCAS

SEQ ID NO: 35024 - protein, 280 aa, Oryza sativa
MIKRMNELESTTNADFCHGPSVPHPPGHELQTKAVPYRIPLDLKPIQGLGTYHPSDSRNSTGSSHMYEPSAPPQEDPLQLIKQMPVAAAAVATAAVVASSMVVAAAKSNSDIKLDVPVAAAATAAAVVATTAAVNKQYEYLEPGCQLLSLPSSSGANELIPKGRHDFWDNQLEIDHGQTSVPEKEKDLVEVPQEAERVSDKSVGTESSRSDIALDGVAEFEIQWEEITLGERVGLGSFGEVYKGEWHGTEVAVKKFLQQDISSDALDEFRTEVTVCNPNL

SEQ ID NO: 35025 - protein, 51 aa, Oryza sativa
MSTRYAVLDPLRMSVSNCLGLKTRILWLVLCSQALVILLVLSLNLMLSCRF

SEQ ID NO: 35026 - protein, 179 aa, Oryza sativa
MSGSSNSSLETRTFLDEVRGLEKNWMVDLGHPLLNRVAESFVKAAGIGAVQAVARESYFMAMEGEGGGTGAVSDSTGARKRSFPDLNGGNSSKSAEAMVKSVSKESLQWGLAAGLHSGLTYGLTEARGTHDWKNSVVAGALTGAAVALTSDRASHERVVQCAIAGAALSTAANVLSGIL

SEQ ID NO: 35027 - protein, 105 aa, Oryza sativa
MGPQQDRSAAKPYANGSTAAAAAAGRKENNKVVRYRECQRNHAASIGGHAVDGCREFMASGAEGTAAALLCAACGCHRSFHRREVEAAAAECDCSSDTSSGTGRR

SEQ ID NO: 35028 - protein, 156 aa, Oryza sativa
MASAVAASHQPAASVMARVDRLDLVVGHLEEMRRGGGGGRRSSCGGSPSTTTTTVSSNESGSSSVASTPRGMSCRPAKEALEEARAKGSLVDRIASLETRVLKMEEEMEVTSSDVRNTGSDEKQQRSAAGNKKAEKRKRLKSLVKSCVRGKLNTND

SEQ ID NO: 35029 - protein, 113 aa, Oryza sativa
MAAEAGSGGVVKHILLARFKEDVAPERLDQLIRGYAGLVDLVPSMKAFHWGTDVSIENMHQGFTHVFESTFESTEGVKEYIEHPAHVEFANEFLPVLEKTLIIDYKPTIVNNS

SEQ ID NO: 35030 - protein, 68 aa, Oryza sativa
MERVKDYYNQLKESSAEKHWICIKDKFRAAGEYVSQKSSSVFGKKKVEPVVKDAAVPGEASSVTVESQ

SEQ ID NO: 35031 - protein, 51 aa, Oryza sativa
MASSMAGAAGEEKAAAGAGRRGMIVIDRQAVDRGIAYALMVVALVATYALH

SEQ ID NO: 35032 - protein, 157 aa, Oryza sativa
MVNSTVLNPWLWVTPNFAQAARVYASTIPRDADAGTIFAIIVAIVFCAGFASVFMLYRRQFTEAETNRRRRAEALAYAEAHSIRGPAKSTLDTTPIASPTSRSIDPPPATTPAAGGFHRELEPPRDYPASGIALYRQGSYVPADPAKVRDILADADL

SEQ ID NO: 35033 - protein, 248 aa, Oryza sativa
MAVVMKQRGYHADAIDAIKSLRHLCPKQSQDSLDNILLDLYKASGRTKEEIELLKQKLRKIYLGEAFHGKTTKRARSHGRKIHVSVKQETSRVLGNLAWAYMQQGNFMAAEVVYRKAQMVDPDANKACNLALCLIEQRRPADAEAVLAGVLAGRYHARDDDHGAPHTGGKILAKVEELMARITGEVDGRSNSSGGSSSDDDDRDVEDEMVELLDVVVRQWAAPYRRSNRRLPVFEEITPVCREQMAAC

SEQ ID NO: 35034 - protein, 173 aa, Oryza sativa
MGDERVKAEALQILGLFQALPRLVVFDLDYTLWPFYCECRSKRESPSLYRHAKGIMFALREKGIDMAIASRSPTPDIAKVFIDKLEIKSMFVAQEIFSSWTHKTEHFQKIQRKTGIPYKSMLFFDDEDRNIESISKMGVTSVLVENGVNLDMFKLGLSNFATNVAASSTSKDE

SEQ ID NO: 35035 - protein, 135 aa, Oryza sativa
MPAIPPSRPANPPPPPPPRSATAASILHPRRLDLHPLHPDPRAAEETGVWRRGVPPRRSTPPLPRSVAAASIPTSCASIHRHQGGERRRCLQGRELELERGKRADELGGARLVKWDGIGRGSGCRWGNEGEEILY

SEQ ID NO: 35036 - protein, 218 aa, Oryza sativa
MRVTTVCHHPSTIPRVRSSLLRHSVVPRAYDSFDDMAIVSVTTATAAAGVLILVVAAGAAAAAGARRHHVVGGDPGWAVASDVLAWSADRLFTVGDTLWFAYSAEDGGVAEVGGEEEFESCDAGSPVRMYTEGLSRVDLGGEGSRYFVSADPDKCGGGLKLRVDVRAPVAGTTPPPGSSRKGDRAAAPAPAPLASSGGRGVATSRTCVMLCCLLFLAI

SEQ ID NO: 35037 - protein, 349 aa, Oryza sativa
MPRRAALAMMNVVAIGLVLSTLAAAGVWSPAPTPPPSTAGEHVVREGRRVVIVEYEREHPLYPGDAVKETHVLPPDSLDGGEGRLTDKARGAVSDAADRVADAAEGGKEKMSDAKESATGKVFGAVKRCKDRLCGAAREAEEGAKDKASAGEHGAEQAVPDVLPRRGVRRRPRARGAPARPRAQLPRRARPERQPPRRARPGPRQHAAPGAKSHQSDVREDEGGEGGRQGEGHGRHRRPANGHRRGGQHGHHHHRSHGGGAQAGRQQQYGGEVGGGGGAGGRADVQEPGGDAEPAAQEAERLLVSVQRAVPDGADVAPRAPGTSPPDSQRLLGSKLFVVRVVCCESDML

SEQ ID NO: 35038 - protein, 81 aa, Oryza sativa
MATMKAKAEDAASSAKAGVHKAKATAGEKVEKATTGDPMKKREAEERKEDRKLEAESDERVEKEGHADEKSGKHTFTTATG

SEQ ID NO: 35039 - protein, 155 aa, Oryza sativa
MSRGRSRLSWLWRAPARALGRARDMYVRGMTGCARCVPADAAFGYPVFVPSSAAASMRSNSFGSDSRFGGGADDDLRELIRAASQRRAAEQEREARAVARSQSMASGISMARIDEDAPCEEFGDAGVMHYPRSQSCVGGVGGRIAHCHRKVAALA

SEQ ID NO: 35040 - protein, 295 aa, Oryza sativa
MEAAGVEVNGGGGGDVVVVVPQQHEVAAKQAAAAAAAKGKSVESKGVRVVGGRIYDPENGKTCHQCRQKTMDFAASCHKIKKNNKQCTIQYCRKCLFNRYGQEAEKVANDGTWTCPKCKDICNCSFCMKKKGLPPTGILAHAAKASGCASVHHLLKKGKEAVAAAQRSTQKVRSTPVKKSPKRAIQPDAAADEPLAEGDENVCIDFNAAPVKKQKRSRKVGNGVALTKDESPDAPKEQVVLPKGTPVTSVAGAEWEPEDVGLALQFFEFCRTFAEVVTKERSRIFNSMIAHALSE

SEQ ID NO: 35041 - protein, 96 aa, Oryza sativa
MAAKASAVFVLLVVVLAVAAAMRGAEAATCTPTQLTPCAPAIVGNSPPTAACCGKLKAHPASCFCQYKKDPNMKKYVNSPNGKKVFATCKVPLPKC

SEQ ID NO: 35042 - protein, 99 aa, Oryza sativa
MATAAAARSFLRSGVASSSSIRGAAARAASRAGPAPLPRRLPAAAPRLILRSPVEMSSVCLETLMPMHSATASALMTSLLAAPACRSFGWLSEAGNDDV

SEQ ID NO: 35043 - protein, 356 aa, Oryza sativa
MPHLVRERLFFGDINDAIAALTTTAADTGGFTHLLSVVSSASISFITDCRPGLSIPTEEVRRVVAGEEGAPPVSAVAPGRLLRVVERAGVGLRVTRMAVPLRDTEEENLLDHLEPCLDFIDEGRKEGNVLVHCFAGVSRSATIIVAYLMRTEQKSLEEALESLKEVNESACPNDGFLEQLKLFEEMGFKVDTSSPLYKRFRLKLLGQSYKIGEKIGSYVFEDDPGLSGQPNSSTQDLPNKQTQQTAYRCKKCRRIVAVQGNVVSHTPGEGESCFQWQNKRKGERSYSKEQDCSSLFVEPLKWMTPVEDGALEGKLSCIHCGARLGYFNWSGIQCNCGSWITPAFQISKSKVDISTT

SEQ ID NO: 35044 - protein, 96 aa, Oryza sativa
MVPAPRGSGIVAAHVPKKVLQFAGIEDVFTSSRGSTKTLGNFVKATFDCLMKTYGFLTPDFWRETRFIKTPFQEYTDLLARPKGLVIEAPAEKIEA

SEQ ID NO: 35045 - protein, 114 aa, Oryza sativa
MVTAFGMSEIGPWALAEPAAQGGDVVLRMLARSSMSERLAADIDAAVRTIVDEAYEVAKAHVRRNRAAIDQLVDVLMEEETLGGDEFRAILSEHVDIGKERRETAARTQQLATA

SEQ ID NO: 35046 - protein, 19 aa, Oryza sativa
MLLAPAFCSSGCDFWHGVF

SEQ ID NO: 35047 - protein, 53 aa, Oryza sativa
MWLRFGCGWSKCASHYTTVHSHEKVSSIKMIEHPATCALLHLLPYEDEAGSSS

SEQ ID NO: 35048 - protein, 74 aa, Oryza sativa
MTSDAVRRRPWREDLDGSTQSTRPLLAAQERGGVLLLPLRRWSREGAEVVPRCCRSDHRRGGWRRRAVGRGCRR

SEQ ID NO: 35049 - protein, 50 aa, Oryza sativa
MLGSLIRCFFTKLTTLFISSRKFATLLSFSWKPSIHLCLFSLLSMMIYLS

SEQ ID NO: 35050 - protein, 272 aa, Oryza sativa
MDGRHASQCLLHLPRHRRTTAISRVLVPNLDANVLERREVLHAQIAQPKPKPTTTAAIAGGGEVPCPEAEREPPNPRHGASREHGRRRHEVQERARRRAGERAGAHREPLHRRARVYPAGGPQPERLEGRQLPDDADVAPPHPIHPHVEEGEARQRRAAHPRRQRRERARGPVRHEPAEARRRHPAVADVTDAAAATAVSVNLDALDPLQLAESPHHSSARAVLHLSPLEPEHPELLQTAKLSDDAVCRITANSEPGHLLQRRQGCEPTISW

SEQ ID NO: 35051 - protein, 52 aa, Oryza sativa
MPQQHPQPPAGSRLLDAVPLFVVVLLAAHVLALVYWMYRLASDKQPPRRKTQ

SEQ ID NO: 35052 - protein, 160 aa, Oryza sativa
MPLESTTLGNAAWINQLCGASPSSHPRCSSCRCRLRAARQRLVSSPSPRRCFAPPHALPPPLRITPPLLDYSSHHTDATSQHGRRFSFSPSGVRNPAGVQYPHGDGDGRKPRPVCGDRDRERGSFSARGRGRSASLLRSLPRPYFGNMGRGSFVGSQKDK

SEQ ID NO: 35053 - protein, 223 aa, Oryza sativa
MEWTTVEAANGAKLSVRLFKPAAGAEAAAAEDVAVVLVHPYTILGGVQGLLRGIAEGVARRGYRAVTFDMRGAGRSTGRASLTGSTEVGDVEAVCRWVADNLNPRGVLLVGSSAGAPIAGSAVDKVDQVIGYVSIGYPFGLMASVLFGRHHNAILKSEKPKLFVMGTKDGFTSVKQLQNKLKNAAGRVDTHLIEGAGHFQMEGPAFDARMVDLIVNFIKSLPK

SEQ ID NO: 35054 - protein, 195 aa, Oryza sativa
MATATNGNASAAAAAADSAVQEPPHKIAKVAPLLKVKKLSENAVLPSRGSALAAGYDLSSAAEVVVPARGKAMVPTDLSIAIPEGTYARVAPRSGLALKHSIDVGAGVIDADYRGPVGVILFNHSDTDFAVKPGDRIAQMIIEVIVTPEVAEVEDLDATVRGVHLVCDGWMGDVVMKHLYPLNASDAFVVSNGII

SEQ ID NO: 35055 - protein, 106 aa, Oryza sativa
MSASPEFYRPSPPAFSPSCAAGTSTTEVDEYSCCRTPTPGIREPATCPPAPRKPRPVACRKLLFDPAQQQGKGKAISLRLDELERLFRPITNNANLHLQTNKPTHT

SEQ ID NO: 35056 - protein, 102 aa, Oryza sativa
MDSPTPMLLEPSEPRARRRRRGHGAGLRRVRLVDLVHHPRGGGRRSRRRVTRLWGLDSTRRRRANVAAGEAVAARILRAYLDTKGDGPVPLTAKPPLQMLEQ

SEQ ID NO: 35057 - protein, 82 aa, Oryza sativa
MWRGEEVAVRPERRWRWSRSDRRWWWWPAPPMIQIREGWRSGATGSGMPVKRTSSQRRAPIIDARSDPRRTTEVEDDVLLAA

SEQ ID NO: 35058 - protein, 250 aa, Oryza sativa
MRLTITDSDPSLAVKQAGDRGVLVDSLSNNRTCIHADSDHSVLQVGRWFSRSQITPPSSFIFLFTAVVLLRWTVAVEVGTNVIRLPPVAHLAQPDLDVLDLHGQPVAFGEAPDKPGHPAEAAEEEALGGWPSCDALRVLLDAVLAVAGELHRLPDPWRALVVVVVVEGAGLLVQEEQEEGVHHLHLVLDELHVAADAAKQLCLVDEHGADAAQQRPHGALGRADHELRHCRRLVATKLDLLVGFQTLSAW

SEQ ID NO: 35059 - protein, 79 aa, Oryza sativa
MPSLTTGRSPWRRRKRGTATTARRRRTPTSLRALWRRIVPRTSTTTAPRVRTRKPGLLSRALRVLSCGGGRRSRAARRS

SEQ ID NO: 35060 - protein, 90 aa, Oryza sativa
MEGSTAAGGHGGLAGGRGEAAGSNVRAADDDEDGEAAAGSSVHVANDDDDGSEAAAVSSMHAADNDDEAVAGSGVRMTTTTAARRRSGAG

SEQ ID NO: 35061 - protein, 155 aa, Oryza sativa
MATTLKDAVARKPVLATIRLIVPAGAARPAPPVGPALGFYRLNLMAFCKDFNARTQKYKAETPMQVTLTAYKDSTFEFVVKSPSVSWFLKKAAGIETASGRPGHTVVSSLSLRHVYEIAKLKQSDPYCKHMSLEALCKSIIGTANSMGIEIVKDL

SEQ ID NO: 35062 - protein, 362 aa, Oryza sativa
MPSTTHAVALPYPVAMRLLEFMPNSPTTTGCRSEPSPVTSLLKASPELQETVAVGLALGFVRRVRLYAEQRRRAELGRQVEWAELACDPLTAQVTALCCYPQQLMQDGGRPLRSLLLDALLPSPGFTKLVLSAQGADSWVLALLKPSQSASPILQAKNAEDEPSCLFVGSNDRDRTLVLWAARAPCGAEVLRFAAEEGRTDFLRDFLHWCSSVTSGTQLEQFAHYAVVHGHIDVLRLLRQSAVSWTLAFQTNGRTCLHHAAANGQAESVQFLLDCSWNASAGDAAGVTAAHLAAEAGHVECLRLLHKRVGDRIFDVRNKRGETCLHVVAAKGHLPALRAAFPTSHALASFAALENCGAPAAP

SEQ ID NO: 35063 - protein, 111 aa, Oryza sativa
MRLTRSASRASPPASASTTQTPSPPGSTACSSSASTSTTTTPPRPTTTLTCPRSMTPPPRRARWRRWTELNKYSLPCRNASWCHGWVCLRCTSTVCGRVCVVSPVLDMSLT

SEQ ID NO: 35064 - protein, 133 aa, Oryza sativa
MVVPLLTKKIVKKRVKQFKRPHSDRYIGLKTSWRRPKGIDSRVRRKFKGCTLMPNIGYGSDKKTRHYLPNKFKKFVVHNVSELELLMMHNRTYCAEIAHNVSTRKRKEIVERAAQLDIVVTNKLARLRSQEDE

SEQ ID NO: 35065 - protein, 391 aa, Oryza sativa
MATAAAASLQYALHGAASASAKPRSAAPGRSVRVVAARRSVRARGGAVVARAAVTASADATAESKSGGHEVLLFEALREALIEEMKEDPTVCVFGEDVGHYGGSYKVTKGLAEMFGDLRVLDTPIAENSFAGMGVGAAMKGLRPIVEGMNMGFLLLAYNQISNNCGMLHYTSGGQFKIPIVIRGPGGVGRQLGAEHSQRLESYFQSIPGLQMVACSTPYNAKGLMKAAIRSENPVVLFEHVLLYNLKEKIPDEEYICCLEEAEMVRPGEHVTILTYSRMRYHVMQAAKTLVNKGYDPEVIDIRSLKPFDLHTIGNSIKKTHRVLIVEECMRTGGIGASLRSAIIDNFWDYLDAPIMCLSSQDVPTPYAATLEDATVVQPAQIVAAVEQICQ

SEQ ID NO: 35066 - protein, 153 aa, Oryza sativa
MHPSLSCNAGMQTGLDVSKEEVTQAGKLLIAGDVPMGLDYDPQNGLGATNGENDFESGLPEFDPVKHHNSYCPWVNGTVAAACCSNTESSSSSSPLSGWQLTVDALDTFQSLGQAQNHAMRSDSAASLYMDDHVTPNHKLARRASVSRSHGKC

SEQ ID NO: 35067 - protein, 476 aa, Oryza sativa
MDGRKDVGILAMDIYFPPTCVLQESLEAHDGASKGKYTIGLGQDCMAFCSEVEDVISMSMTVVTSLLKKYKVDPKLIGRLEVGSETVIDKSKSIKTWLMQIFEECGNTDIEGVDSSNACYGGTAALLNCVNWVESNSWDGRYGLVVCTDSAVYAEGPARPTGGAAAIAMLIGPNAPIAFESKYKASHMAHVYDFYKPDLASEYPVVDGKLSQTCYLMALDSCYRQFCKKYEKLAGKQFSISDADYFVFHSPYNKLVQKSFARLYYNDFTRDCSSVDNDAKEKLQPFSNLTGEESYQSRDLEKASQQVAKPLYDIKVQPSTLLPKQIGNMYTASLYAALASVLYNKHASLDDQRIVMFSYGSGLTSTMFSLKLNNGQDPFSLSNIASVLNATEKLESRHMTLPEKFVETLKLMEHRYGAKDFETCKDTSLLPPGTFYLTRVDSMYRRFYERKADEEIAAAKAKYSNGHATNGHANGH

SEQ ID NO: 35068 - protein, 484 aa, Oryza sativa
MKLQLINQREDFSFALFSGGLSNPKLIAHSKRVTFTNPKAPVYPRLAQGKSWNEMTVTWTSGYGTNEATPFVKWGLQGQIQSLSPAGTLTFSRSTMCGPPARTVGWRDPGFIHTSFLKDLWPNFKYTYRIGHRLSDGSIIWGHEYSFQAPPYPGEDSLQRVVIFGDMGKAEADGSNEFNDFEPGSLNTTYQLIKDLKNIDMVIHIGDICYANGYLSQWDQFTAQVEPIASSVPYMVGSGNHERDWPGSGSFYGNLDSGGECGVPAQNMFYVPAENREQFWYSIDYGMFRFCIANTELDWRPGTEQYKFIEHCFSSVDRQKQPWLIFLAHRVLGYSSASFYVEEGTTEEPMGRESLQPLWQKYKVDIAMYGHVHGYERTCPVYENVCVAKAASHYSGAFTATTHVVVGGGGASLADYAGVRARWSHVQDRDYGFAKLTAFNHTALLFEYVRSRDGSVHDSFTVSRDYRDILACGVDNCPTTTLAS

SEQ ID NO: 35069 - protein, 45 aa, Oryza sativa
MSNVCTTYIKLCHMKSELELVSLICHVSQHLVSSYQVKFLLSGKL

SEQ ID NO: 35070 - protein, 72 aa, Oryza sativa
MIPRSSVWKISLLVMAWPLFSLISNTGANTRTSYLHLFGMRRDEMPKDHAFVCHPIEESTRFLLHSLVTVEF

SEQ ID NO: 35071 - protein, 572 aa, Oryza sativa
MLISFILLGKYLEILAKGKTSEAIAKLMDLAPETATMLIYDHEGNVVGEKEIDSRLIQKNDVIKVVPGGKVASDGFVIWGQSHVNESMITGESRPVAKRKGDTVIGGTVNENGVLHVRATFVGSESALAQIVRLVESAQMAKAPVQKFADQISRVFVPLVIILSLLTWLAWFLAGRLHGYPNSWIPSSMDSFQLALQFGISVMVIACPCALGLATPTAVMVATGVGASQGVLIKGGQALESAQKVDCIVFDKTGTLTIGKPVVVNTRLLKNMVLREFYAYVAAAEVNSEHPLGKAVVEHAKKFHSEESHVWTEARDFISVTGHGVKAKISGRAVMVGNKSFMLTSGIDIPVKALEILTEEEEKAQTAIIVAMDQEVVGIISVSDPIKPNAREVISYLKSMKVESIMVTGDNWGTANAISKEVGIENTVAEAKPEQKAEKVKELQSAGRTVAMVGDGINDSPALVSADVGLAIGAGTDVAIEAADIVLMKSNLEDVITAIDLSRKTFFRIRMNYVWALGYNIIGIPIAAGVLFPSTRFRLPPWVAGAAMAASSVSVVCWSLLLRYYKSPKLGR

SEQ ID NO: 35072 - protein, 371 aa, Oryza sativa
MSHSRSLPVKPPRPGDSQQRQKHSSQAEGVKDSSRLASSRDKKTKKEKSIDDALTPEQPAKVHREPSSDPVRKSRRIAKKSILDSELDEDYDTNVLDDFGTSEGVEVHTREPAKKTGSSSKKNAAKKAKTKSTSYEIDNDFVTSRSKRDGNKRSRESTDADNSEEEPTSDSELDAQNRKQKAVTESPANVRSEPLTTRRRALQSWMDGNSNSAIEFPDGLPPAPSRGKKDKLSDAEMLAKKAEAAQRRKMQVEKATKESEAEAIRKILGLDSGKKKEERKQKEREDKERAARAQTIPENTIRWVMGPKGTVVSFPEEVGLPSIFNSKPCNYPPPREKCAGPSCTNAYRYRDSKLNLPLCSLKCYKAVNGNA

SEQ ID NO: 35073 - protein, 380 aa, Oryza sativa
MATKPRRRSPSLSSSSSTSYSRSPASPSSSPSRSRSPPRPAGGARSPSPPPPPPPPRKASPPPESTVLHVDHLSRNVNEDHLKEIFENYGEVVNVELSMDRVVNLPRGYGYVEFKNRADAEKALLYLDGGQIDGNVVKVRFALPPQQQRAAASPKALHPSPKRDVVDHNKVGPSAEKATKQQPRKPASPQRKPAPSPRRRSPPSRRVESPRCRPDSPPIRRRTAPSPIRHGGTPSRRPGSPIRRRSPSPPPRRLRSPRHLSPRRDRGSPIRRRSPLPRRRLTPPRRMWSPPRRPQSLRHRSRSPIHRPIRSPSRSISPRRGRGPPVRRGRSSSSYSDSPTPPRRGPRRVLRSRSPRRPLRGRSASSYSRSSSSSGSPIRN

SEQ ID NO: 35074 - protein, 102 aa, Oryza sativa
MLTVSGGEEAVRGAISGVPAEPGEASEDAGQHPGDVAPRLASLQAARFRQDDHWPGQPGEGMDHKAGTGDGRLGQGVARWQRHRHRFSRRQGILRHGIHIHV

SEQ ID NO: 35075 - protein, 297 aa, Oryza sativa
MDISGQEHLDVKHDIFKQRIDVHGNVIATKQDAVGGMKVEQPLQRHGGRLEHNETYCGSCYGAEESDEQCCNSCEDVREAYRKKGWGVSNPDLIDQCKREGFLQSIKDEEGEGCNIYGFLEVNKVAGNFHFAPGKSFQKANVHVHDLLPFQKDSFNVSHKINKLSFGQRFPGVVNPLDGAQWMQHSSYGMYQYFIKVVPTVYTDINEHIILSNQFSVTEHFRSSESGRIQAVPGVFFFYDLSPIKVTFTEQHVSFLHFLTNVCAIVGGVFTVSGIIDSFVYHGQRAIKKKMEIGKFN

SEQ ID NO: 35076 - protein, 189 aa, Oryza sativa
MVLGAWLMSPASVPWSLLAYGVLGLVLLWQAGRLLHSLWWRPRRLELALRAQGLRGTRYRFLTGDLGEHGRLNREAWARPLPLRCHDIAPRVAPFLHNAVREHGSACFTWFGPTPKVTITDPDLAKGVLSNKFGHFEKPKFPTLTKLFSDSLANHEGEKWAKHRRILNPAFHLEKLKVPTQTIFTSSIR

SEQ ID NO: 35077 - protein, 602 aa, Oryza sativa
MAESGSSGLEEKLAGLSAGCGEEPQQLSKNAKKREEKRKKQEEERRLKEEEKKKKAAATAAASGEPPKESAADDEEMDPTQYYENRLKALDSLKATGVNPYPHKFLANITVADYIEKYKSMNVGDKLVDVTECLAGRIMTKRAQSSKLLFYDLYGGGEKVQVFADARTSELEDNEFIKFHSTLKRGDIVGVCGYPGKSKRGELSIFPKKIVVLSPCLHMMPRQKSEGSAVPTPWAPGMGRNIEKYVLRDQETRYRQRYLDLMVNHEVRHIFKTRSKVVSFIRKFLDGLDFLEVETPMMNTIAGGAAARPFVTHHNELNMRLYMRIAPELYLKELVVGGLDRVYEIGKQFRNEGIDLTHNPEFTTCEFYMAYADYNDLIELTETMLSGMVKELTGGYKIKYHANGVEKPPIEIDFTPPFRKIDMIEELEAMAKLNIPKDLSSDEANKYLIDACAKYDVRCPPPQTTTRLLDKLVGHFLEETCVNPTFIINHPEIMSPLAKWHRSRPGLTERFELFVNKHEVCNAYTELNDPVVQRQRFEEQLKDRQSGDDEAMALDETFCTALEYGLPPTGGWGLGIDRLTMLLTDSQNIKEVLLFPAMKPQD

SEQ ID NO: 35078 - protein, 860 aa, Oryza sativa
MNWNATYDYYDRTNVKQAYYLSMEFLQGRALTNAVGNLELTGQYAEALQQLGHSLEDVATQEPDAALGNGGLGRLASCFLDSLATLNYPAWGYGLRYKHGLFKQIITKDGQEEVAENWLEMGNPWEIVRTDVSYPVKFYGKVVEGTDGRMHWIGGENIKVVAHDIPIPGYKTKTTNNLRLWSTTVPSQDFDLEAFNAGDHASAYEAHLNAEKICHVLYPGDESPEGKVLRLKQQYTLCSASLQDIIARFERRAGDSLSWEDFPSKVAVQMNDTHPTLCIPELMRILIDVKGLSWNEAWSITERTVAYTNHTVLPEALEKWSLDIMQKLLPRHVEIIEKIDGELMNIIISKYGTEDTSLLKKKIKEMRILDNIDLPDSIAKLFVKPKEKKESPAKLKEKLLVKSLEPSVVVEEKTVSKVEINEDSEEVEVDSEEVVEAENEDSEDELDPFVKSDPKLPRVVRMANLCVVGGHSVNGVAAIHSEIVKEDVFNSFYEMWPAKFQNKTNGVTPRRWIRFCNPELSAIISKWIGSDDWVLNTDKLAELKKFADDEDLQSEWRAAKKANKVKVVSLIREKTGYIVSPDAMFDVQVKRIHEYKRQLLNILGIVYRYKKMKEMSAKDRINSFVPRVCIFGGKAFATYVQAKRIVKFITDVAATVNHDPEIGDLLKVVFIPDYNVSVAEALIPASELSQHISTAGMEASGTSNMKFAMNGCILIGTLDGANVEIREEVGEENFFLFGAEAHEIAGLRKERAQGKFVPDPRFEEVKRFVRSGVFGTYNYDDLMGSLEGNEGYGRADYFLVGKDFPSYIECQEKVDKAYRDQKLWTRMSILNTASSSKFNSDRTIHEYAKDIWDIKPVILP

SEQ ID NO: 35079 - protein, 91 aa, Oryza sativa
MILANATSLGMYPNVDGTPIPKKALSFYDVVFDAVYAPKVTRLLREAEECGIKVVSGVEMFVRQAMGQFEHFTGGIEAPESLMREIAAKYT

SEQ ID NO: 35080 - protein, 64 aa, Oryza sativa
MTDPFLMIHASHTRDIGLQTVVTKTGDYPRFRTSKSTHPSRREKNVFELISSSFFFLLWDFYDD

SEQ ID NO: 35081 - protein, 132 aa, Oryza sativa
MEMGSELSKTVATFIVQKILLDDVGLRYICATAERFFAVASVLSQMVQALADQPSPRLLKHIIRCYLRLSENSRACTALNSCLPNALKDGTLNNFLQDDHVTRRWLQQLLHNMTMAGMGGAPHGGLDHIMGM

SEQ ID NO: 35082 - protein, 250 aa, Oryza sativa
MEELLLKKKTSTAGDSLEIRSQKVDKLKVLATSLSNSSSKAEKRILDHRRQKEEALNFRAKKENEVSAVEKELTAEISELEKQRDELEARLKKVNISLNAAIGRLKQTREERDQFDEANNQMIFSLKAKDNELSKSITSCNVEAGVVKTWINFLEDTWQLQSSYNEQKEKRTNDELERCTDNFLKLTKYHLSTFKEILSPQLSESAHTWIIWQFCSQGTCQQNMTMRNYQKRQVHRNPLRKNIWKLKRRL

SEQ ID NO: 35083 - protein, 236 aa, Oryza sativa
MAKGKAKADAFPTSHERSLTWHEDQTKFMLEWYMEYLKKQHAGFKVKKSHHMLCADALNKKFGMGVTADQVDRHYRYHKENWKYIAAALSKSGNAFDHTRFLVTISESEKATLCDRARRLLSKPIRFFNEMQELFTGSSADGSLAMDQNTCMNDSDGSNSDDSRDMLDLNCYTQPEEPTGEDSDTLPSPTTNATVDNSSSGSQGKKKRPRGNKSPTKSHKKARVALPSPMMKSLLR

SEQ ID NO: 35084 - protein, 977 aa, Oryza sativa
MLASCTTKRNSQMDVAPVEQDQGLMKINSSDCSGDGASCENETNYTDHGKQSNELGHARISVTGGGYFHQLLAEHTIISEAFLSAATYSWFEKEKDLLSSQLSSLKRIWSQPQWQACLKHLCCHGEFRSAVLKIIKIFEEELSKCREETNMLHQPDQISHSTLMSLVSLIIPPLLKLIRFVHALWMDGAVLRFPEELIEARKMKNVDQILRFRGETLEFLDVWPEELEEGLAQWLQLIRESGYNLLGLCATIKGAFSELLDNSSINNAIMENIRSMEIRHLTKLIDLVIVPFIKHCPHNLWVEWMLKLLLPLFDYCGDVLYYSWFSLLHNGQANVPLFFGYICGSEETVSKMENYLLLDLTRKVSKLLGALASQELNQGVYRAGLVLDMNSASHDFKCTPSTSLVGYILLNDCFTRLSMNLFGCWVDGEAAIDSIPFCHSLVQVAVATNNEKLKRFIKDDMLPAIIRRLYDDLPCAVQKTIRKLSPLMNSINCRKATKDLLVLCQEIYKVYIRCQNLEGEDQDTDNIAYWFDDWLTKQKKELCVKASYAIPDEFPATLWNWEFEEEFQRYLPTYLDVLHEVDTMDCQECCCLDSAKIFENLSLEFRSRHGVRSHTDHVVWMISNLLQRKMPGAYSEQRADRISKWTCELIKSKPYIKLSNGWNNAMNRLKENFVINVDTKPDAIDAVNIFYNSILLLWEPQFHPLIREGQMDVLVEIAHQLAFAEERKNYEPLEPDSLDFLDHLQPYAKLYIYRKKTESGYFTAIEQVQLHKEFDRYLASGVLDGDICKFSSFQDDFIEEFADKHIAKSQFVQLDRKLITLSLEQRAQILEKQRQINTYAECLRNILTDLKLKDGLQSLMSELEVEGFFDVNNNCTDWEKGCFLRLIDNFEDLVFRGHCFPRYLVIQGIMDYWEMSQRSDSTWEDSFEQVVEVLCDNWRQDLTQIWMETRYYEGLYYDVLRKPLKKIFMRKIEASEL

SEQ ID NO: 35085 - protein, 148 aa, Oryza sativa
MTLGSSGAGSSVVVPRNFRLLEELERGEKGIGDGTVSYGMDDADDIYMRSWTGTIIGPHNSVHEGRIYQLKLFCDKDYPEKPPSVRFHSRINMSCVNHETGAVDSRKFGVLANWQREYTMETILTQLKKEMATPQNRKLVQPPEGTFF

SEQ ID NO: 35086 - protein, 170 aa, Oryza sativa
MAARVAWIGAAAAVVVVALMAGGAAAQPPSSTSGCTQTLLSMSPCLNYLTGNETAPSASCCGKLGEVVKSQPECLCVALNADTAALGLSINRTRALGLPDACKVQTPPVSNCKSGAAAPPAGQTPTTPAGTGSKATPATPVGSGVAPLRVSPVGILAGIVVAAVYAVSAV

SEQ ID NO: 35087 - protein, 233 aa, Oryza sativa
MAGGGDELKLLGMWASPYVLRVKLALSLKGLDYEYVEEDLKNKSELLLSSNPVNKKVPVLIHNGKPVCESQIILQYLDEAFPDAGATLLPADPHERAVARFWAAFCDDTIAKASQQASSGKTEEEKAEGEKKVVEALEKMEVGLSECSKGKPFFGGDTVGYVDIVLGSFLAWVRAGDAMKGVKRFDPATTPLLAAWAERFVELDVAKAAMPEVDKLIELAMARMAGAAAAATN

SEQ ID NO: 35088 - protein, 97 aa, Oryza sativa
MEARDGGRASRSQARLREGSHVADLAAGRYGGVEARAGGRNWGRGGSRQQARLWAGYGAHVQPALPSAAAQGRGLGSGKGIDGDRAWRWWMARGGAQ

SEQ ID NO: 35089 - protein, 189 aa, Oryza sativa
MAMARSILLLLLAAAASASADAPFLVAHKKVSLSRPKPGVERLAVSLDLYNQGSATAYDVSINDDTWPKEAFELVSGEMSKTLERLDPGVTASHAFVLETKVQGRFQGSPAVITYRVPTKAALQEAYSTPILALDVLAERPPEKKFEWAKRLVAKYGSLVSVVGLVGVFIYLVASPSKSSGAKASKKRR

SEQ ID NO: 35090 - protein, 25 aa, Oryza sativa
MCIRCRESCLFCTISNAPPLSRMVI

SEQ ID NO: 35091 - protein, 37 aa, Oryza sativa
MDADVFAMSYEPKKNERIEGKLGIVIDTIKEHGIIFV

SEQ ID NO: 35092 - protein, 114 aa, Oryza sativa
MAEVIINEFLKKHNLEEVVSGTPIDVAKVPKNNQESVAAILLHCCINGPVSPHKSTTYPVIGDARLQDLVGDQRITNSGLKKTCEEVAKILKAKGFHSGFQVQNGDFWPLNIRD

SEQ ID NO: 35093 - protein, 137 aa, Oryza sativa
MAASASAAGAGAGKSLFQTFRKFFKKPWEITGPCASPEYRSALPGALEYRHRCPATLTKDTMAVVPTSEPETVYDIKYYTRDRRRDRPPVRRTLLRKPDLERYMAAKQFDPAKDFPVPYVNTAVEEDYDAVGGGYQK

SEQ ID NO: 35094 - protein, 175 aa, Oryza sativa
MGREVAESCVDGVVMQMVAAYCGGFYAAKPELAARRIEAIGFQVGHQLTERYTMERPRFSDHLEAIKFICKDFWSELFKKQIDNLKTNHRGTFVLQDNHFRWLTRVSVDPSVESMDATENDSTTLGDSAAQTTSMLLYFPCGIIRGALTNLGISCSVTADMSNLPACSFVVRIKT

SEQ ID NO: 35095 - protein, 99 aa, Oryza sativa
MAWRANLSRGVKEIRFLFCQSSPASAPAREFVKKNYGDIKARNPSLPVLIRECSGVEPQLWARYDMGVERCVRLDGLTEAQIDSKLEELAKAGGSLKPK

SEQ ID NO: 35096 - protein, 230 aa, Oryza sativa
MAEADGDRGVAAAAAAAVVHDDVLESDEEDFTFAAAAAVTCVVGGGRIGAVVYPVFGRPRSPPPVQEVEEPDTATVRVPLGQLLLEERASAPPSGEQADEDGVLDGVPAETYCLWSPGSPAPAVSNSPARCQKSGSTGSVLRWRQRLIGRSHSDGKEKFVFLSSGSDVRSKGRTTTTSRGDAGGRGGGWRYYASGGGNGGGRRPSFLPYKQDLVGLFANAGAFRRSYHPF

SEQ ID NO: 35097 - protein, 145 aa, Oryza sativa
MVAPATLSLRPFATLAPSRAALPRVGAGFALPPAVSCQPRRRRLSLRAVAVDSDQQGSPEPPDQEAKPKKYHFLVANAKFMLDEEEHFQEQLKEKLRLYGEREKEQDFWLVVEPKFLDRFPNITKRLKRPAVALVSTDGNWITNA

SEQ ID NO: 35098 - protein, 188 aa, Oryza sativa
MTEMNGQYCSSRPMRIGPASNKKNIGGQQQPSATYQNTQGTDSDSDPNNTTVFVGGLDPSVTDEVLKQAFSPYGELVYVKIPVGKRCGFVQYSNRASAEEAIRMLNGSQLGGQSIRLSWGRSPGNKQPQQDQNQWNAGYYGYPPQGYDPYGYVRPPQDPAMYAYAAYPGYGNYQQPAPQQPPQQVKAL

SEQ ID NO: 35099 - protein, 172 aa, Oryza sativa
MGSIGGVAVVLVGMAAMLVGMASAATYNVGEPGGAWDLTTNYTNWVAQKRFHPGDQIVFKYSAQRHDVVEVNKAGYDSCSTSTSIATHTTGNDVIPLTSTGTRYFICGFPGHCTTTGTGNMKIQIDVVQADSSSAPAPVATTTPPSPPSSAATSLKATAAAAVLLAALLIMA

SEQ ID NO: 35100 - protein, 137 aa, Oryza sativa
MKSGPVLTEKGVRYYEPEHWKFGEPGNKYFRHATGQLYAISKDLATYISINRHVLHKYINEDVSLGSWFIGLDVEHIDDRRLCCGTPPDCEWKAQAGNTCAASFDWRCSGICNSEGRIWEVHNKCAEGEKALWNATF

SEQ ID NO: 35101 - protein, 142 aa, Oryza sativa
MSYLLPHLHSGWAVDQAILAEEERLVIIRFGHDWDETCMQMDEVLAAVAETIKNFAVIYLVDITEVPDFNTMYELYDPSTVMFFFRNKHIMIDLGTGNNNKINWALKDKQEFIDIVETVYRGARKGRGLVIAPKDYSTKYRY

SEQ ID NO: 35102 - protein, 67 aa, Oryza sativa
MTESPFLPRERLFKQQQYFQNLTKHTYLKGRYDVVTSVAIPLALAASSLFMIGRGVYNMSHGVGKKE

SEQ ID NO: 35103 - protein, 26 aa, Oryza sativa
MIVSPRRSVVIIVGCRCMIYLYCSWK

SEQ ID NO: 35104 - protein, 105 aa, Oryza sativa
MVNVPKTKKTYCKNKECRKHTLHKVTQYKKGKDSLSAQGKRRYDRKQSGYGGQTKPVFHKKAKTTKKIVLKLQCQSCKHYSQHPIKRCKHFEIGGDKKGKGTSLF

SEQ ID NO: 35105 - protein, 172 aa, Oryza sativa
MPPPVPPEERRKPSPAESRQWTQRFFQVLGAGEPLPAPAELPAAYSALVRGVLSSAAVSSSASPRVSCTLTVSPAAVNGYNTLHGGMVAAVAEAVGMACARAAAGDKEMFLGELSTAYLSAARLNSEVEVEAQILRKGRSVVVTTVEFRLKDTKKLCYSSRATIYIMPVVSL

SEQ ID NO: 35106 - protein, 71 aa, Oryza sativa
MVKKAMLRWFRFWWVGALFLLLWQPGRILMLFAQDFQMLSLGDKLQFQGEQLLRLCRMSHSEGGIQKCVIE

SEQ ID NO: 35107 - protein, 80 aa, Oryza sativa
MDMLFFFLGGGGGDLVELILHSPFYQGESCSDEPCPICLDCPAAGEYLRRLPCLHKFHKECIDKWLRMRISCPVCKSEVI

SEQ ID NO: 35108 - protein, 63 aa, Oryza sativa
MLVKMCVRGGRFVEAANYLVEMSEAGFAPRAPTFNSVVDGLRHCGKHDLAQRMEQLEMSMNGN

SEQ ID NO: 35109 - protein, 187 aa, Oryza sativa
MGSTSSPSPPPPPMIGRAGNLTVFITPPSPASTPRSSRPSESPRSGFSTPATAPRTAASPSPPSPAPSPQQQRVASPPPTIPVKFSPPAAPVKVPPPPPVQVPPPQYEKASAGGKHDGSAFGFFWDAVARVQEAHASLDEYVANWFGLDQSKYQWALNDYYESTGKEVECGKAGKPKELTTSKVQKV

SEQ ID NO: 35110 - protein, 46 aa, Oryza sativa
MLMMKLHKKRLLWHQLQGAWCLSGNYSWPVDLVHSNFCRGICTLNI

SEQ ID NO: 35111 - protein, 138 aa, Oryza sativa
MSDSKAAAAVTLRTRKFMTNRLLSRKQFVLEVIHPGRPNVSKAELKEKLAKLYEVKDANCIFVFKFRTHFGGGKSTGFGLIYDNLDAAKKYEPKYRLIRNGLATKVEKSRKQMKERKNRAKKIRGVKKTKAGDAGKKK

SEQ ID NO: 35112 - protein, 86 aa, Oryza sativa
MEGIIPFIFKAVAQYKEGGHVSLSDMISDRPSPASYVLLPGDSDGRHADDKTQPLRLQASTGSEEEVTTCTARASHLRCSTLRRRA

SEQ ID NO: 35113 - protein, 240 aa, Oryza sativa
MYQQSAGQIQLQEGPMAPMKVYGWVVSPWMARVLVALEEAGAEYEVVPMSRSGGDHRRPEHLARNPFGEIPVLEDGDLTLYQSRAIARYIFRKYKPEFLGLGEGGSLEESAMVDVWLDVEAHQHEAAVRPILWHCIINKFEGRDRDQGVVDESVRKLEKVLGVYEARLSGSRYLAGDRISLADLSHFSNMRYFMATEYAGVVDAYPHVKAWWEALLARPTVQKVMAGMPPDFGFGSGNIP

SEQ ID NO: 35114 - protein, 82 aa, Oryza sativa
MASLRATTLLVLMQIIMVFYTVILSCSFSDARTFPGGEGGLDPNHPVCVGGACPTPGLPYTNPRDPCIYRNRCNPPGRMGDP

SEQ ID NO: 35115 - protein, 146 aa, Oryza sativa
MSAGRRPPPRTSTPPASPVINQKHHLIESFGALISLIDTKRGMVGLGVRKEEIRVEVEDAMYLVIRTELDDGGDGDGGGGGGRRSFARKFRLPAMVDADGISAEYTHGVLRVTVPRLHTRARPVVNLAGGGGGGGGPACDPVARAA

SEQ ID NO: 35116 - protein, 135 aa, Oryza sativa
MSPPPTTRTPSARAGTALPSSSTPRSSSSRRCFTSRLRRALPSRRRAPPPRLPPLCPQFLHAQHTLCALASSPGPASALGFFSLLRRDSGNSSGGGGGSYSPHSLPGTRVWERERITKEPSSLLSRRRAGRAADG

SEQ ID NO: 35117 - protein, 61 aa, Oryza sativa
MALPASSSGLFRFISPRRRPQSTDIAAAATWGVFAGTAAIYLVQPFDWIKKTFFEKPEPEA

SEQ ID NO: 35118 - protein, 68 aa, Oryza sativa
MKRNPRKVKWTKVYRCSRRRIPCCQHKRQRSWSKFLSSRPKKILWKSNEMESCCMRSHFVIFMQHLCF

SEQ ID NO: 35119 - protein, 28 aa, Oryza sativa
MAPPPRARLVQIGTRRRRCRGRIPPCTK

SEQ ID NO: 35120 - protein, 81 aa, Oryza sativa
MGGGGHGGGTTYKGYTIPHNKRWHTVAGKGLCAVMWFWVFYRAKQDGAVLLGMRHPWDGHDDHSHGHGHEHEGSSSTSSSH

SEQ ID NO: 35121 - protein, 42 aa, Oryza sativa
MGTMKKNTVKPYVEPAVAATTPTSFGLGATFASGGSTANALG

SEQ ID NO: 35122 - protein, 288 aa, Oryza sativa
MPQAGRTPHHVILMSCSFRFHSSALPAAAARLHLSRGLRPPPSRRRLHNTFSPTLSISPPSRHAAIAAAAASPLGASQEASAMAVSASEGVGQYDLLIVGPGVLGRIVAERWQQEHPGCKIFGHTATTDHHSELTQLGIIPSLKGPAVQKVPYVIFCAPPYRTDDYPGDLRVAASNWNGQGSFLFTSSTAVYDCSDNGLCSEDAASLAIAIMKRRLRARVFVGCDNQPLSRQEIMDLVNRSGKFDTKFQGFTGTDGPLGKRMENSKTRAEIGWQPKYPSFTEFLGLSN

SEQ ID NO: 35123 - protein, 90 aa, Oryza sativa
MEMVTGRRPSWPVKINMKGKEVEMLKWARDKVDKGQALEILDRQMGIQWEGREADQDEMIAYLDVARRCTEESPKHRPSMEEVVEMLNKI

SEQ ID NO: 35124 - protein, 206 aa, Oryza sativa
MVSGSGLCTRRVVVDARHHMLGRLASLVAKELLNGQRVVVVRCEEMCISGGLVRQKMKYLRFLRKRMNTKPSHGPIHFRAPSRIFWRTVRGMIPHKTPRGEAALANLKAFDGVPPPYDRTKRMVVPDALKVLRLQPGHKYCLLGQLSKEVGWNYHDTIRELEEKRKEKAKVAYERRKQLTRLRVKAEKAAEEKLGSQIDILAPIKY

SEQ ID NO: 35125 - protein, 147 aa, Oryza sativa
MEIILGGLASLSDELSWFKKEAEKWSVNLAEVSPLKSNTEYCRFLQSFSEPEISYVVAITTFWIIETVYQDSFAFCIEEGNKTPPELLGTCQRWGSPEFKQYCQSLQRIADRCLAEASADAARSAEEAFLRVLELEIGFWDMSSSRS

SEQ ID NO: 35126 - protein, 270 aa, Oryza sativa
MFELSWKKVLDKYDLHDNSWLQSLYRIRQKWVPVYFKGVFTADLSASQRPESLRNIFEKYFNRRTALPVFISLFEHLMAGWSEREAVEDLATSFTRPVLRTPSNMMKQVSEIYTTTVFNILEEEFIGSLGYYISSLDNDGLIAVYSVTKEDTEATCRVRYDTSGNIAKCSCCKFESCGILCRHILRVFLALDVRTIPDVYILKRWTKEAKNGFVLDECLRYSELHRDALRYAREGSTSGEVFTFAQQTLQVAFAEVVQMKQETFSQCTIR

SEQ ID NO: 35127 - protein, 57 aa, Oryza sativa
MDVKDRIKKVASMKKKKSSKEMDTAAKIAASEAAARSAKLAAAKKKEKSHYNQQPVR

SEQ ID NO: 35128 - protein, 47 aa, Oryza sativa
MNQEVFLQRGQRQITFCEAADSAVGTAYPANKHRRIKSCELPFSEMS

SEQ ID NO: 35129 - protein, 54 aa, Oryza sativa
MMVANKNCFPIIHLVSHCSILLLDEICKTHMIRIPLTVKSPKLWVILFLQASFE

SEQ ID NO: 35130 - protein, 244 aa, Oryza sativa
MGASPSREEAHSNSSFSGNGKAMAVASSASSSGSNQAQSKRAPALHMFQEIVAEKDFTASSLEDQIYTGIFLAGKTKKYWVDERTRNNCFMLFPRGLSITWSEDPRFWTWKPLKEGSSDADTDTQIEVPSLQNVCWLEIHGKLERSYLTPGVTYEVLFEVMLIDPAYGWSVPVNLQLKFPDGTVQQRKENLEEKIRMKWLELKVGEVKTQQGQKGEIEISMFEYDGGLWKRGLLIKGIKILPKQ

SEQ ID NO: 35131 - protein, 40 aa, Oryza sativa
MMDDVLAISLCCWCDARDGAADDCGDGADADYGQILVLTH

SEQ ID NO: 35132 - protein, 58 aa, Oryza sativa
MFSNSRWTTQEGIGLSICRKILKLMGGEVQYIRESERSFFHIVLELPQPQQAASRGTS

SEQ ID NO: 35133 - protein, 69 aa, Oryza sativa
MDAVDSVVDPLREFAKDSVRLVKRCHKPDRKEFTKVAARTAIGFVVMGFVGFFVKLIFIPINNIIVGSG

SEQ ID NO: 35134 - protein, 58 aa, Oryza sativa
MPSPWRSSWRAKTWRRWWYSEASSLRRREWSETGRPSEPRMDSPRSPSPPLHLASLPR

SEQ ID NO: 35135 - protein, 327 aa, Oryza sativa
MGNPPELYHRILNIPRETSPQEIRAAYKSLVKKWHPDKHPPSSKPEAEARFKAITEAYEALLDQQENRAVFGVCCNDGRAGEKAMACGVVGGGGAHIARTRSDDFGARMAPGTPAREFKKVYSSGNSGGRRAFAEFSSSIMRKAPPLERKLDCTLEELCHGCKKEVKFTRDVVTKNGSIVKKEVSQMVLVKPGWKKGNKITFEGMGDERPGCLPADAVFVISEKKHPVFKRVGNDLVLKAEVPLVSALTGWSFSFRLLSGKKVSCSFQDEIICPGYEKIIKGEGMPIADQKGARGDLRVKFEIAFPKQLTDEQRDGLAQILRGCAWD

SEQ ID NO: 35136 - protein, 89 aa, Oryza sativa
MITRSKLVEQLRDYQIRSQHKRDIIGAVSWGLLCCFLIISSYMTLYFRHFWLSAVIISLGILLPAGLYILRQRKLAKKRERRLLLPLSM

SEQ ID NO: 35137 - protein, 26 aa, Oryza sativa
MKAVTRPNGRRQLCHTKALGQANLVW

SEQ ID NO: 35138 - protein, 29 aa, Oryza sativa
MIDVDVAQKEDKERRPKVGSLFHVVNVLV

SEQ ID NO: 35139 - protein, 66 aa, Oryza sativa
MARLHWLEAMLPLGIIGGMLCIMGNAQYYIHRAAHGRPKHIGNDNWDMAMARRDKVLLHQASSENN

SEQ ID NO: 35140 - protein, 65 aa, Oryza sativa
MGWMGSWSLEPYGKSDSRDRWGVSICFFFSFSSESHRSAFFFFFFRIVLDLLVASNCSVSSMCFL

SEQ ID NO: 35141 - protein, 216 aa, Oryza sativa
MGMVLGKITVETPKHEVLHTGAGYEVRKYPPCVVAEVTYDPAEMKGDRDGGFTVLGNYIGALGNPQNTKPEKIDMTAPVITSGEPESIAMTAPVITSGEPEPVAMTAPVITAEERSQGKGQMTMQFLLPSKYSKVEEAPRPTDERVVLRQVGERKYGVVRFSGLTGDKVVKEKAEWLKAALEKDGFTVKGPFVLARYNPPFTLPPLRTNEVMVPVE

SEQ ID NO: 35142 - protein, 76 aa, Oryza sativa
MRAPLGGQHMRGAGAAVRRSAGRLRLGKPGAWSGGGKRRPVGEAAACARCLRRIEHSSWWKEPIEELSKRAVVPDY

SEQ ID NO: 35143 - protein, 75 aa, Oryza sativa
MSYQGPPPGTAAYPPPGTGYPPPAYGAPPPVAADYGGYQQQQPPPPPQDSQSRGDGFLKGCCAALCCCCLLDMCF

SEQ ID NO: 35144 - protein, 59 aa, Oryza sativa
MCRRRMLRLWRMPPSCSLPRLWLPLSKYASNLDNRLYIVLCVESFCSSFCPCSEVSIVV

SEQ ID NO: 35145 - protein, 165 aa, Oryza sativa
MASQLVEEHRSGAEVHTGHELCERKARELLVELGLPDGLLPLPSLEEVGYNRAAGFVWLRQTQAGGATHTFDTIGKQVWYAGEVTAFVEQGRMHGVAGVKSKELLIWVSISEIVLSPSGTKLVFRTPAGLGRALPVTAFQLNPAPPEPEKKDAAAADEADAAATN

SEQ ID NO: 35146 - protein, 147 aa, Oryza sativa
MASKRIQKELKDLQKDPPTSCSAGPVGEDMFHWQATIMGPSDSPYAGGVFLVTIHFPPDYPFKPPKVAFRTKVFHPNINSNGSICLDILKDQWSPALTISKVLLSICSLLTDPNPDDPLVPEIAHMYKTDRHKYENTARTWTQRYAM

SEQ ID NO: 35147 - protein, 57 aa, Oryza sativa
MDGQGTYHPKLHGMSCDSDVLAAIEYVRLCCWRKVILIARLSASVVRDFGMQCNNLR

SEQ ID NO: 35148 - protein, 37 aa, Oryza sativa
MFGYLHFCVVRLIRFLQFFSFVACAERVPLFPIDRPR

SEQ ID NO: 35149 - protein, 44 aa, Oryza sativa
MTRGSIRGGGLVISAPRTPNGSKKISMVGSFSVFSSYSHVYSLL

SEQ ID NO: 35150 - protein, 149 aa, Oryza sativa
MSRSQLMHMYKLGDLTPAPSMTIPMAHSSRPTLGFPLGTALLIFVIFSLSGIFSCCYHWDKLRAFLWSRHPDVILQEGQHTVISIASPSKTTSDHKNEKAEKECGLPVIMPGDRIPKFFARPCPHEKCLPAAEEEEAEVQVKCSVPQSS

SEQ ID NO: 35151 - protein, 235 aa, Oryza sativa
MQKLVQQHLHRAQQQMKHFADKKRSFRTFAIGDWVYLKLQPYVQTSVAVRANHKLAFKYFGPFQITAQIGTVAYKLQLPPTSSIHPVFHVSQLKSATGFTGHVQSHLPSSISALQVPWRILDRRLAKKGNSTISQVLVQWSESPPEDATWEDYEELHARFPAALAWGQANSQGVGLVRDSPLSTVEGGAIGGKDLNAEEEEDVQTSQSDISTGNGHRPVRERRPNPRVLGPEWVA

SEQ ID NO: 35152 - protein, 174 aa, Oryza sativa
MLPSRQRSIFHLGEEGGGAADAEHLGADHGDGHGDHGIISIHQQRLRVVGLQIVLAQTRHHHRQQHGHVVLKQMQMVSPPPAARHRRRRRPCGDFLSACSLCRLELGPDKDVYMYRGEQGFCSEECRWQQIMTDEARERDAMAKKERLGLHHRTPRPPPAAIRGGSPRRLLAVA

SEQ ID NO: 35153 - protein, 84 aa, Oryza sativa
MSSLVDIWTVERERIRVSGAQAFRTTVASKRGCTARSDDGQNKPDGAAVETAAKKQQAAAVGGAPASVIQEDAFLSILIDCFGQ

SEQ ID NO: 35154 - protein, 100 aa, Oryza sativa
MNSTSHFVAISFFHHQLDQTAETREDELVGEDVVAGGGWAEHRGGQEGDSQGQARRRHRRAAIRHGGARGFSLQPCPNLRRHRRRDASCGLASRIYIALN

SEQ ID NO: 35155 - protein, 358 aa, Oryza sativa
MAEESGRRSGGGVRVCVTGGAGFIGSWLVKKLLGAGYTVHATLRSIGDEVKVGLLRRLVPGDAPPERLRLFEADLYDAATFAPAIAGCQFVFLVATPFLHDATSTKYNNTAEAALDAARVILRQCEESSTVKRVIYTSSMAATSPLKEDSTGFKDSIDESCWTPLAVDYPYRSARFDEYILSKLLSEKELLGHSHAGERRRPAVEVVTVPCSVVAGGTLQGQSTTSLDCVVSPVSRDEGRFRALRLLQRLMGSVPMVHVDDVCDALVFCMEQPSLTGRFLCSAAYPTLDDIVEHFAGKYPHLDLLKETETLPSIQAHTDKLGELGFKYKYGMEEILDESVECAVRLGCLDASKLSLQG

SEQ ID NO: 35156 - protein, 130 aa, Oryza sativa
MVITALQLLPPILGLPATARNGYAVRRPRMMTVTCCRHNQATTVHESRLTSSLSRRDALSYMSSAFIATLLVAGPAEARTSRQENKRKVREKLEKLREKALGPDDKNGAIRKKESLANLLIPPKLVEATI

SEQ ID NO: 35157 - protein, 224 aa, Oryza sativa
MAATASSFLARRLLLTRRVLSSPLRPFSTTDSSSSSSSSSSSDDSRAGSDAGPDPEQQQPPPAGQDQQAAARPRAGDTRPLENGLDPGIYKAIMVGKVGQEPIQKRLRSGRTVVLFSLGTGGIRNNRRPLDREEPHQYAERCSVQWHRVCIYPERLGSLALKHVKTGSVLYLEGNLETKVFSDPITGLVRRIREIAVRSNGRLLFLGNDCNAPKLGEAKGVGYF

SEQ ID NO: 35158 - protein, 226 aa, Oryza sativa
MANVKCLGTHFYLAFGQEDFGHNGDCLRLLQRFQFDALDRLSLTLAYMSELNDLENEYLMEEMTMLPDIMFLGLTVLASGHAIGPSVFHVLRMSTSIRRLELATDIYSSNPQARAACSSSCTCDLPPNWKTEELKLAFLHEVEINNFRGTEHQIALVKQLFGWAAMLKDMTINFCHSITESMARKVCQMLLSFSRPEILMNFYIYQQTTSGFVCSRGQMHRTKLVA

SEQ ID NO: 35159 - protein, 101 aa, Oryza sativa
MSIRSARRIYNVVDDDPAPRSEVFAFARSLVERKHPGLIMDSVVLPATQDRIVAAEKRVSNARLKEELGVKLLHPTYKSGLQSILDSWSVESSFSNRNVDV

SEQ ID NO: 35160 - protein, 174 aa, Oryza sativa
MECGGGGREQQMQIVCVRGGGGGGGGGGGEEDGSSEWDQSSSRSALSLFKEKEEEIERKKLEVREKVFSMLGRVEEETKRLAFIRQELEVMSDPTRREVETIRKRIDKVNRQLKPLGKNCLKKEKEYKACLEAYNEKSNEKATLVNRLMELVGESEQLRMKKLEELNKTVESLY

SEQ ID NO: 35161 - protein, 43 aa, Oryza sativa
MSGLVLLCVITELFFFFCTFECCCFCSWPTGNAITHKRYSSEH

SEQ ID NO: 35162 - protein, 36 aa, Oryza sativa
MPTSTPSPSSPSGRLLVMADSETKTVVVGCSPRSCR

SEQ ID NO: 35163 - protein, 213 aa, Oryza sativa
MWDRQKAKLQEDIAECKTKITQVDRELAEINKAIRNMEMKIREDTKAKEENLALAEQEHAKRESAKANAERRLEEIRQKTEVESRCFKDDIKRLEDELARLQKSMGVNHPTVPSTHPPGVADRNSTRAPKQPTNQRPSPASNKQSQAPTQKTSRRRDCVICKREEACVILLQCAHQVLCVGCNKRHEEKGVARCPCCNAKVEERIRVFGASSN

SEQ ID NO: 35164 - protein, 67 aa, Oryza sativa
MKRNTILALFIWAMAMVIFATAMPAKARMEGIHPQGCRCCYFRLRPMIQCAKACCGSDDENCCLVNN

SEQ ID NO: 35165 - protein, 78 aa, Oryza sativa
MALGDDSPASYIHMVQHLIEKCMTFGMSMEECMETLSKRADVQPVVTSTVWKELEKENKEFFDKYKQLRSEKGGVSSS

SEQ ID NO: 35166 - protein, 113 aa, Oryza sativa
MGCAGSTPKVDENSKKLKKPKPWKHTQAITPTQLSKMREEFWDTAPHYGGQKEIWDALRAAAEAELPLAQTIVNSAGIVVSNSDMTLCYDERGAKYELPKYVLSEPTNLIREP

SEQ ID NO: 35167 - protein, 160 aa, Oryza sativa
MATGGAAGEDVPGGGEFYLRYYVGHKGKFGHEFLEFEFRPDGKLRYANNSNYKNDTMIRKEVFVSPSVLREARRIIQESEIMKEDDNNWPEPDRVGRQELEIVMGNEHISFTTSKIGSLVDVQTSKDPEGLRIFYYLVQDLKCFVFSLINLHFKIKPIQS

SEQ ID NO: 35168 - protein, 188 aa, Oryza sativa
MLRRRREMDASSSAEVTGRCGGGGDDGGGGGDEEIRCRRRRRRRRGDAASVSAEETRRCGVVVGSGGDVEMRRWRRQRRRGDAARRRRRWMPRRRGAPAPRPSVRGFVPRDTVKAQATTRCRRFPNCPLFFFFTSSGTRCCVSAFRSLLQCCFVAVGFLLLVDLGRKCDCLSGRCDAQGVSDRWMRCC

SEQ ID NO: 35169 - protein, 22 aa, Oryza sativa
MTLRHLDWGKSRLASDIGFAVM

SEQ ID NO: 35170 - protein, 112 aa, Oryza sativa
MGFEKTILKAGTGPKPVKGQKVTVHCTGFGKDNDLAKKFWSTKDAGQEPFSFNIGQGSVIKGWDEGVMTMQVGEVARIQCTPDYAYGASGFPAWGIRPNSVLVFEIEVLSAQ

SEQ ID NO: 35171 - protein, 24 aa, Oryza sativa
MFAMCSLLEETDAYTVIFTVMCTT

SEQ ID NO: 35172 - protein, 333 aa, Oryza sativa
MRKKVSDAATREGAKLLDHWFIGCHATYVVCEDASVKRYVGHSDNIVTPLWILKTAKEKGLQRLVHLSSDLARQVATILENAQTFQENRKIGDVPSVNSNSSGVPSTQGEIDEIHQERQKFVEVAKKNVRDRRARRMQSCEVPIHPITPVKLMESICWTVSEPTTSACIYTEFSWSDDAFEQQSTTFFDANGDGKDDQSSDSFTRPLRESEKSEVIFKNHFLTVLFPIDRFGELGPSSRTFFSNGGFTRIQVLDHIYNFYQENMSSDEINVALQTDSRHADRLRSLYASTESAERGFVTFKRIDFLGSRRSFEGLKRLSRENNSNVYELVIRA

SEQ ID NO: 35173 - protein, 33 aa, Oryza sativa
MLAVTNSEHKLQSSPWLVYVCISFLFQILVQEQ

SEQ ID NO: 35174 - protein, 61 aa, Oryza sativa
MDLKNGTELVLTYEDKDEDWMLVGDVPWRMFTDSCRRLRIMKGSDAVGLAPRATDKSKNRN

SEQ ID NO: 35175 - protein, 95 aa, Oryza sativa
MARSASGRSLLVILLAVSLLLVASSDAARFTRSNRMAMMVVEAPARPGVGVSGSAEDDVSTSDAIVEMFGRMALQTTDYPPSGPNDRHTPKAPGT

SEQ ID NO: 35176 - protein, 94 aa, Oryza sativa
MNDRGVSYTFGADKVSEFLEKHDLDLICRAHQVVEDGYEFFADRQLVTIFSAPNYCGEFDNAGAMMSVDETLMCSFQILKPAERKGKFMASNKM

SEQ ID NO: 35177 - protein, 76 aa, Oryza sativa
MSSNAIAVDSGQRNGHCFSLEIWAYAVVKFMFQRNAATKCIYELEVISKLSVTHYLVNCSDRGLDAKELQSVEKMY

SEQ ID NO: 35178 - protein, 12 aa, Oryza sativa
MRWISWQRKLRA

SEQ ID NO: 35179 - protein, 112 aa, Oryza sativa
MVKGRTGQRVRLYVRGTILGYKRSKSNQYENTSLVQIEGVNTKEEVAWYCGKRMAYVYKAKTKSGGTNYRCIWGKVTRPHGNSGVVRAKFKSNLPPASMGRKVRVFMYPSSI

SEQ ID NO: 35180 - protein, 71 aa, Oryza sativa
MGGGMEVHKNKWIEEWNAGRENLEFNFRWTRRSLAVVGLFGLAVPILVYKGIVREFHMQDEDAGRPYRKFL

SEQ ID NO: 35181 - protein, 29 aa, Oryza sativa
MVLHFLHRKHCKSEEAFIKRFTVVQATNS

SEQ ID NO: 35182 - protein, 69 aa, Oryza sativa
MADWGPVVVATVLFVLLTPGLLCTVPGRGRVAEFGSFHTSGLAIIVHAVLYFALLTIFLIAIGVHIYAG

SEQ ID NO: 35183 - protein, 42 aa, Oryza sativa
MHCSATSGSQMQQARSPRSALDILCKVSCRIMFVWLSVRPAW

SEQ ID NO: 35184 - protein, 80 aa, Oryza sativa
MAPHHHHVRAGLLHRPADHIPRVPFLHPRLHLHLHIRGDEMISQSYHHKCDSCVYVFHVIDFRKKKSSACKARWFKAIEW

SEQ ID NO: 35185 - protein, 53 aa, Oryza sativa
MAPNAGEIIHEAVLALQYGASSEDIARTCHAHPTVSEALKEACLQTYLKAIHI

SEQ ID NO: 35186 - protein, 232 aa, Oryza sativa
MVAGGTESSIDALSIAGFSRLRALSTKYNSLPQAASRPFDCGRDGFVIGEGCGVMVLEALDHAKERGAKIYAEVRGYGMSGDAHHITQPQNDGRGATLAMKRALDQSGLQADQIDYLNAHATSTPLGDAVEANAIKSVFGDHATSGGLALSSTKGAIGHLLGAAGSVEAIFTVLAIHHGIAPPTLNLEKPDTLFEGAFMPLSSPKKMPIRAAISNSFGFGGTNTSLLFSCPP

SEQ ID NO: 35187 - protein, 29 aa, Oryza sativa
MLHPFCRKPSILLAISLCRLVLVPSSCQG

SEQ ID NO: 35188 - protein, 64 aa, Oryza sativa
MENSKGQTVVLSTGLKDKNRATDMMDDADEEEEEAALEDFRISEDDEDEDEDEGEDEEVEHFGL

SEQ ID NO: 35189 - protein, 151 aa, Oryza sativa
MATSPMLFLVSLLLVLVAAATGDEASPSNAAAPAAPVLVGGRTEIRDVGSNKAVQSLGRFAVAEHNRRLRHGGSGGPADPVPVKLAFARVVEAQKQVVSGVAYYLKVAASARDPRGGAAAGGDRVFDAVVVVKAWLKSKELVSFTPASSTK

SEQ ID NO: 35190 - protein, 37 aa, Oryza sativa
MGSRPVVYAVACLKWEFLSMQIDPPGGFYMPDSRRVL

SEQ ID NO: 35191 - protein, 91 aa, Oryza sativa
MHLRKFLERKYLWLLVHDALVMLRFSFRQLLKQRENSSGRQNMASKKCAETNGTGRARILSGTPRPTPPSRMVIHTDQRRLVCVNSVVHAT

SEQ ID NO: 35192 - protein, 163 aa, Oryza sativa
MASLTLHPLFPATAPGVSTTSTPSRDILRRGTRRLTTTCKAEPSGGNSTLELAAGAAGLASSSVVAWSLYTLKTTGCGLPPGPGGALGAAEGVSYLVVAALIGWSLTTKVRTGSGLPAGPFGLLGAAEGVSYLAAAAIAVVFGFQFFEVGSLPGPLPSDQCFG

SEQ ID NO: 35193 - protein, 137 aa, Oryza sativa
MNWKIYGSFILMWPSSMPITMELLWESSFPLNNLELRILWQLAVVEEDLMVYLKLQDVDMVNTRCAMTLNCMGHGMTIIHQKLCLRPLQLACYGVHTHKLHSRAHKLQSSVLLLNTRSSMICSCDYIFVIFIECMCG

SEQ ID NO: 35194 - protein, 18 aa, Oryza sativa
MRIRWHSHFVSPLFLPKL

SEQ ID NO: 35195 - protein, 63 aa, Oryza sativa
MLPGSWAYVSAGAFGRAIIQDESEIGLGGNSQLLTLGIGLLFTAIAATYVTRLAKDAVKEIDE

SEQ ID NO: 35196 - protein, 138 aa, Oryza sativa
MANDKEHLAFAEQLLSGPRPDVVLLTEASIAGGRSRSMPASSLKEIWMAAAQSQGISCYSDIGTITGVEAPIIASRPTTSRSLSGDKPMLIGCCTPFSSDLIRVASRLLQTQEDGDTGLICVTGSLHMVSSVLGQLRQ

SEQ ID NO: 35197 - protein, 24 aa, Oryza sativa
MKYLNSHFGRSWEKFGFCCVFRLS

SEQ ID NO: 35198 - protein, 80 aa, Oryza sativa
MSNAALSPSLKNGEVCTVSPSVGEWSPDLLNPHVVRAMKGCIEWPRGAQKQNTHNLKSKLLEAKLDGHKVQLRQALKQKI

SEQ ID NO: 35199 - protein, 185 aa, Oryza sativa
MARVYVGNLDPRVTARELEDEFRVFGVLRSVWVARKPPGFAFIDFDDRRDAQDAIRDIDGKNGWRVELSRNASSGRGGRDRYGSSESKCYECGETGHFARECRLRIGSGGLGSGRRRSRSRSRSRSPRYRRSPSYGRRSYSPAGRSPRRRSVSPARARSYSRSPQYNRGRDESPAYDNGYRRSRS

SEQ ID NO: 35200 - protein, 111 aa, Oryza sativa
MVVQKCRKMTTYEKRKLGAGLCHLSPEELTKALEMVAQDNPSFEAKGDELELDMDAQSETTLWRLKFFVREALERQANVASGRTDENAKRKREICNALARTASKRVKQQPN

SEQ ID NO: 35201 - protein, 165 aa, Oryza sativa
MAGGGRADDERRIGVAMDYSASSKRALDWAIANLLRRGDHLVVLHVLHHGGEEAKHALWGKSGSPLIPLSEFRDPTAMQQYGVHCDAEVLDMLDTAARQLELTVVAKLDWGDAREKLCDAVEEQKIDTLVMGSRGLGSIQRILLGSVTNYVLSNASCPVTVVKGK

SEQ ID NO: 35202 - protein, 37 aa, Oryza sativa
MTKLTMHCFCLWIVLRLGQKNCKSIICSMWELDHNLQ

SEQ ID NO: 35203 - protein, 81 aa, Oryza sativa
MREVVESIKQVMQHNELDGDVEASGESSPPHEVPGKPTADDVAVAAARRRMLHLAALGENANNIARRRFMLMRAAAAPTPT

SEQ ID NO: 35204 - protein, 114 aa, Oryza sativa
MVIPPPERAARITRFLKPYLLRMHFSNKYVSAQVVHTPTATVACSASSQEKLLRPNMESTRDVAAAAKIGKLLGERLLQKGIPAVCIHMKREQKYHGKVRAVIDSVREAGVKLL

SEQ ID NO: 35205 - protein, 81 aa, Oryza sativa
MGRKAGALYINPKKFGGVTKPCMIEMVSFLNCLALNKQNDDKCVRQKDLLVACAQAQKGRPKNAAKTINYHLQRLARDKGI

SEQ ID NO: 35206 - protein, 34 aa, Oryza sativa
MANLDFTEAPWDESDAFHLYKCPSWEIDWDSILS

SEQ ID NO: 35207 - protein, 180 aa, Oryza sativa; identical to SEQ ID NO: 32550

SEQ ID NO: 35208 - protein, 86 aa, Oryza sativa
MGAAILGMQATVGALVAKALTTSAVPYYQGISPGQSPVLSLDVFLVQASANTILSHFLGLSSTLELLRSVTLTKVEAASTPRSQPA

SEQ ID NO: 35209 - protein, 49 aa, Oryza sativa
MLCQFGCISCIVGTVEPTSCLGTVRLHLALHTIVVFHLVFSQHRISDFF

SEQ ID NO: 35210 - protein, 101 aa, Oryza sativa
MLEAVNDGKDLHISVTMPSIEVGTVGGGTQLASQSACLDLLGVKGANRESPGSNARLLAAVVAGAVLAGELSLISAQAAGHLVQSHMKYNRSSKDMSKVAS

SEQ ID NO: 35211 - protein, 19 aa, Oryza sativa
MCVCLMCIDYVSQGRVFCC

SEQ ID NO: 35212 - protein, 92 aa, Oryza sativa
MGYLQEARENHVKKKVEEALRSKMKQKALKECDFYCSKYAECARGRTFSVVWQCRKQAKELNDCLHQFTNDAVLEEMKKAYMVEQESKEKNQ

SEQ ID NO: 35213 - protein, 72 aa, Oryza sativa
MIPLGMFIFSTSIFQNVSEDQILLICSPGNVERAVITLHYITCGSHLYYISQGQCLVRNVLNHKCIVSSVAP

SEQ ID NO: 35214 - protein, 166 aa, Oryza sativa
MEHYSTKFSNGGGRLVDPMPDRRSRFWQMDSQPTELICPMPRRPSPRPPFLSDSINRTLPVYRADSASDVLDLILSKNDPDVDTDSSTQVGFFCGSPPVRANNPIVHDPQFGKNIPSFSPLGSSFGKKSAGRAEVGSPSCGASSPKVRIEGFACGNKEPHCAVTFA

SEQ ID NO: 35215 - protein, 142 aa, Oryza sativa
MAASLWRAVMGAGASSADTDTTGGVEFWRSPERAGWLTKQGEYIKTWRRRWFVLKQGRLFWFKDSGVTVKGAEDTLNRQFAFELSTPAETMYFIADSEKEKEEWINSIGRSIVQHSRSVTDAEVVDYDSGRPAASVTADGDK

SEQ ID NO: 35216 - protein, 50 aa, Oryza sativa
MVQLAPPLLLSLLFLFFFCSFCFSSRWDRSGDILLLCILIINVIVVYLLI

SEQ ID NO: 35217 - protein, 172 aa, Oryza sativa
MAAPTSKNLLLVLVVAATAVGIVAPHGSEAAAGRAVTGLVTGVVPCSAGSSINAASVPAFPDAGVQMVCGGRVVGGATADGTGAFTINMGALNATMLMAMAGNQCKVVVTTPLAACDASLAAVAGTLTAPVQLLGGTGGLGGLGGLITLITQILSGLLGEILNIIPLPFSLV

SEQ ID NO: 35218 - protein, 27 aa, Oryza sativa
MERVLPVCPLCTVYFAAQSFHHKMIYQ

SEQ ID NO: 35219 - protein, 40 aa, Oryza sativa
MSVVVPRRQELGATAQHLSSSACKLMEVLVYYGGGHRNCA

SEQ ID NO: 35220 - protein, 131 aa, Oryza sativa
MRTVIQALDAFPALVDFVMEILSRLVNKQIWKMPKLWVGFLKLAYQTQPRSFDVILQLPPPQLEIALNKYPNLRTPLCSFVNQRNMHSILPRQILKVLGFINEPHQAPIPFVPAAMQTADATSSLPGATLM

SEQ ID NO: 35221 - protein, 119 aa, Oryza sativa
MSTTRGVSSSSAAAALALLLLFALCFFSFHFAAAARAVPRDEHQENGGVKAVAAVAADQLVLQLEGDTGNGDEVSELMGAAEEEAAACEEGKNNDECVQRRLLSDAHLDYIYTQHKNKP

SEQ ID NO: 35222 - protein, 57 aa, Oryza sativa
MLSLETKTQQSPGNAQVIQNQNPPGSGVTMLPKKHLSGAQKRNKRKRGDQLIGSQKK

SEQ ID NO: 35223 - protein, 10 aa, Oryza sativa
MIGIKKCVHF

SEQ ID NO: 35224 - protein, 69 aa, Oryza sativa
MADSSAASPIPVAYSSGDPPSATPVPVPGSDLPAAPAAKSQEASPAVPVIDPSKEERMGSGHPLPGGKD

SEQ ID NO: 35225 - protein, 63 aa, Oryza sativa
MSVGGGVRDWSRMNLEFDLGCMMLDIKRMVKWYMDVRCLCFGPCSNNQLFLVFCFFFALFVKL

SEQ ID NO: 35226 - protein, 76 aa, Oryza sativa
MAGTELSVRALLPYVCSHVSQWRKLFRPEEESKLKTKGGTDEANDDKIKTSKSRSGIVVMFAFPVYSCCRSSTGCV

SEQ ID NO: 35227 - protein, 92 aa, Oryza sativa
MGPLRIRLLNDQWLTAVLWSGFARIVNNEIIILGNDAELGSDIDPEEAQQALEIAEANVSRAEGTKELVEAKVALRRARIRVEAVNWIPPSN

SEQ ID NO: 35228 - protein, 106 aa, Oryza sativa
MDDPFIRNYIEDLLKNIRTQVLLKLIKPYTRIRIPFISQELNFPEKDVEQLLVSLILDNRIQGHIDQVNKLLERGDRSKGMRKYQAIDKWNTQLKNIYQTVSNRVG

SEQ ID NO: 35229 - protein, 93 aa, Oryza sativa
MSSEKQKRESAPPTIHSHKRAEKAQYFLAEAVHNFNGTTEKELSLIVGDYVVVRQIAPNGWAEGECKGVAGWFPAAYVERRENIPPNKVFPQA

SEQ ID NO: 35230 - protein, 59 aa, Oryza sativa
MSPSALLPPQIRPSLMASFVGWMMIGDTVDLILLAPEMAPDLVHRLASGGFVHRLEEER

SEQ ID NO: 35231 - protein, 235 aa, Oryza sativa
MSSITSKWFGEGEKYVKAVFSLASKIAPSVIFIDEVDSMLGRRENPGEHEAMRKMKNEFMVNWDGLRTKDKERVLVLGATNRPFDLDEAVIRRFPRRLMVNLPDASNREKILKVILAKEELAPGIDMDSLATMTDGYSGSDLKNLCVTAAHYPIREILEKEKKEKNVAKAEGRPEPALYGSEDIRPLTLDDFKSAHEQVCASVSSDSANMNELLQWNDLYGEGGSRKKKALSYFM

SEQ ID NO: 35232 - protein, 378 aa, Oryza sativa
MATAAVFSASARRLLSTVAGGAGAGSAAELPVLIGHLRSLARAGRLADIDAALAPHLASHSVAAVSALSSVGLPDRASALLATIRNPTAAHLNALLAPLLRRHRLVGLIPTLLAAHPSVPRDDATEGIHAKALCIATGADSALHLLQRESPPPSLQLFTSVIDSYYKQRKPHRAEQLWREMVEDHGIVPDAAAHNVRITYKAATGTVEEVKELIRAMREDAGLQPDIVSHNGLMRAMARHGRVDEMMEVYKRLEKGSASAAAEGKSAPDCATYTCVVAALCKAGRWSEADDVFYEAVKRRKLADLGTARVLVRGLKEAGKGRAARRVVIGLRKKFPDRFDGPWKDLEELAGIAGEDEESDVEGEDDEQPPATTTTTAA

SEQ ID NO: 35233 - protein, 520 aa, Oryza sativa
MRSKESGVGKFSSIIFEYASNIPNIAVEDVIVSFNRWHEQFEVAPSISASEKIISVCCKSSKISLALDVAECLCKSNPDMPVELFHPIIQACEQGSEFHLVHPIYDLMRRHKMKLKTETFRNMINLCVKMKDFEGAYRILTDAEESGDISTVSLYNAIMLGYFREKNHNGAQMVMAQMQIAGVKPDSETYCYLIFNCEFEEKISEYLDQLRQDGIHMSKHIYMSLVSAYARLGNFDMAKQVLENKEIPPKYLNEIKSALIGALASNGKVLDGLIMYDEIKQSGCHLEPKSAIALIENTQTKGELDRLYQLLEELGDSNMWFDGCSRVLLYCVQHNHPNAAIGLLKQLKEKDELSTYMVIDQVFSQIWDMDPVNLDFGMKILHAVKELGLNVSRTSLDFLLSACVKAKDSNRAQLIWTEYESAGLPHNVLTSLRMYQALLLSQKKKATKKLLRKIPKEDVHVRYIIDSCQMAYCSQNLKLPSASRSSSIKRAASKAGSTCKPAASGTEVFRNEAEEAHTGP

SEQ ID NO: 35234 - protein, 370 aa, Oryza sativa
MSSSLLTDLVNLDLSESTDKVIAEYIWVGGTGMDVRSKARTLSGPVDDPSKLPKWNFDGSSTGQATGDDSEVILHPQAIFRDPFRKGKNILVMCDCYAPNGEPIPTNNRYNAARIFSHPDVKAEEPWYGIEQEYTLLQKHINWPLGWPLGGYPGPQGPYYCAAGADKSYGRDIVDAHYKACLFAGINISGINAEVMPGQWEFQIGPVVGVSAGDHVWVARYILERITEIAGVVVSFDPKPIPGDWNGAGAHTNYSTKSMRSNGGYEVIKKAIKKLGMRHREHIAAYGDGNERRLTGRHETADINNFVWGVANRGASVRVGRDTEKDGKGYFEDRRPASNMDPYLVTAMIAETTILWEPSHGHGHGQSNGK

SEQ ID NO: 35235 - protein, 181 aa, Oryza sativa
MAAVGKSKEADAARCRRHPKHRHAAGVCPFCLRDRLSRLSAEVASAASPSPSSASSSGSSSSLCSSTGEGSYSAASATQAPPVGRRARLGMLMRQEEQRETTATAATVLGAAGHDKKEVPPAEEEKKTARRSGFWARLQQQLHHGSWHRKADGCSLAHSKAVSEKAAAAAAAPAKRPPALF

SEQ ID NO: 35236 - protein, 259 aa, Oryza sativa
MVTLPPGQTAAMMQNSAAMPIFPHYQPLHPATSLPATSSAVGDEPKKTAAAMADKLASLSAPEKVLSSIFSSLAAEQARNSGSTSGDLSAGPPGFESNKKPRLDNPIHVSDMGAPPFFGQVPQVQPQIGATAALGGTQPPTQANQATGSFPPPPPPLPLMPQFVQNTGGMFGMGPFGMVSGSAPPPPLLPNIMSAGFPRLSAPPPLPLPTQPQNQSQPQQQQSPQAPQQSPTSTGFFQPPGAGFFPPVQVQQSPSAQRQ

SEQ ID NO: 35237 - protein, 585 aa, Oryza sativa
MSPAARSLLLSAARRQRRRFSTEAPSSTPQQQLLPKGKRWDAVVIGGGHNGLAAAAYLARAGRSVAVLERRGVIGGAAVSESDLVPGFRFSRCSYLLSLLRPALIQELELERHGLKLLPRSPSSFTPCLDGRYLLLGPDAELNHSEISKFSENDAGAYPRYEEKLEKFCKLMDFVIDSPPPEMRHEYHLSMVDRMKDKVDKSVFWSKLLGIVMQQGQKDMVDFFDLLLSPASKILNNWFEGDVLKATLATDAVIGSMAGVHTPGSGYVLLHHVMGETGGQRGVWAYVEGGMGSVSSAISKAALEAGVEILTNAEVSQISVHHTSGKVQGVVLADGTEVLTSVVLSNATPYRTFVDLVPANVLPDNFLSAIKTADYSSATTKINVAVDRLPQFSCCKDFNPEGGPEHMGTIHIGSESMEEIDLAYREAANGVSSTRPVIEMTIPSVLDKTISPPGQHVINLFVQYTPYKLSEGSWQDSNVRKSFAERCFSLIDEYAPGFSSSVVGYDMLTPPDLEREFGLTGGNIFHGAMGLDSLFLTRPAKGWSDYRTPVKGLYLCGSGAHPGGGVMGAPGRNAASVVLEDLRTK

SEQ ID NO: 35238 - protein, 422 aa, Oryza sativa
MGTRPCAGVASAVAAAVAVLLLAVSCFAAAATTTQKHGRMSGKGGDVLEDDPTGKLKVFVYEMPRKYNLNLLAKDSRCLQHMFAAEIFMHQFLLSSPVRTLDPEEADWFYTPAYTTCDLTPQGFPLPFRAPRIMRSAVRYVAATWPYWNRTDGADHFFLAPHDFGACFHYQEERAIERGILPVLRRATLVQTFGQRHHPCLQPGSITVPPYADPRKMEAHRISPATPRSIFVYFRGLFYDMGNDPEGGYYARGARASVWENFKDNPLFDISTEHPATYYEDMQRAIFCLCPLGWAPWSPRLVEAVVFGCIPVIIADDIVLPFADAIPWGEISVFVAEEDVPRLDTILASVPLDEVIRKQRLLASPAMKQAVLFHQPARPGDAFHQILNGLARKLPHPKGVFLEPGEKGIDWDQGLENDLKPW

SEQ ID NO: 35239 - protein, 248 aa, Oryza sativa
MGYYASEHTKNVRDWKEVFDLVPRQTPPPPTTAVADGDLVFDNKWPDDLPGFREAMEEYGEAVEELAFKLLELIARSLGLRPDRLHGFFKDDQTTFIRLNHYPPCPSPDLALGVGRHKDAGALTVLYQDDVGGLDVRRRSDGEWVRVRPVPHSFIINVGDIIQVWSNDRYESAEHRVAVNVEKERFSIPFFFNPAGHTMVEPLEEVVSDESPARYNPYNWGEFFSTRKNSNFKKLDVENVQITHFRKN

SEQ ID NO: 35240 - protein, 305 aa, Oryza sativa
MESDEPAKTPQKKETAVSVGSNKSATKPGQEEPKTPASNQNQATGSKTLFVGNLPYNVEQEQVKQFFQEAGEVVDIRFSTFEDGNFRGFGHVEFATAEAAKKALELAGHDLMGRPVRLDLARERGAYTPGSGRDNSSFKKPAQSSGNTIFIKGFDTSLDIHQIRNSLEEHFGSCGEITRVSIPKDYETGASKGMAYMDFADNGSLSKAYELNGSDLGGYSLYVDEARPRPDNNREGGFSGGRDFNSSGRGGRRGGRGDGSRGRGDRGRGRGFGRGDRGHGGRGTPFKQSAGTPSAGKKTTFGDDD

SEQ ID NO: 35241 - protein, 115 aa, Oryza sativa
MDGGVRDKLVRGGVGAGGRLRLRRVGEHHQLRPPGRHLRPLRQVLPVPASPRRRRPLAAGCHRSGAGLDAAAVQLHRRRHLCRSGAVSCSGSGTDAFRPWSPPPSPAPPPRPLAN

SEQ ID NO: 35242 - protein, 602 aa, Oryza sativa
MQTSKTRNGPSDAPQKASPATPRSSRVAKTGGNETDSAGITPTRTTPEKSPKVTERRSPRSPITERPSRLSELESRVSQLQDELKKAKEQLSLSESRRRHTQQEAEEAKKQEQAATSKLEDLQRQLAEFSAAEESRLQELRKVSQERDRAWESELEAVKKQQSVDSAALSSALSEIQRLKQQLGATTESDAARAKQCEFAESELEGLKQEMELRLATIEGLKVNVGESDKAVAEANAVAAETKKQLEMAQATIDSLLAEGARLQECLRSKDAELGQSMARLATLEEDLKKAHNKDDVDGSFGSPDHGEAVEKVVVTIPNGNGSCGGSGAEIEQLRTALEVAEIRYQEEQTRTTIETKTAYEMLENAKSEYDRRVRDLELELKSKNDELTEAKATLAVRCDGKSDVMQPELEAKLMKSITDATELKASLMDKETALQSVMEENETLKSEAGKKAAEVQRRYEAAVAELELAKAAEQDVRMRLGYVTEEANKSSRRAARASEQLDAAQAASVEMEAELRRLRVQSDQWRKAAEAAAAALGGGGGGIGRNVERTGSLEPAEYTNSMIGGKLASSPFSDEPEEESPKRRNSGVLRRMSGLWKKSPK

SEQ ID NO: 35243 - protein, 597 aa, Oryza sativa
MEGTVLCSANHAPLTPISFLERTALVYPDRLAIVASDGSAGVAVSRTWRDTRARCLRLAAALTGLLGVQRHDVVAVFAQNIPAVCELHFGVPMAGAVICTLNSRLDAAMAAVLLRHSEAKVVFVDRALLGVAQKALVLVAEAGARRPVLVLISELLDENERSPPDAKIKVTRVDYEYEHLLSAAAAGSSPDFAIRWPADENEPIALNYTSGTTSRPKGVIYSHRGAYLSSLAAVIVNAMAETPVYLWTVPMFHCNGWCQVWGVAAQGGTNVCVRRVTAAAIFDSVARHGVTHMGGAPTVLSMIVNATADERRRQPGGRRRRVTVMTGGAPPPPQVLFRMEEQGFLVIHSYGLTETYGPATVCTWKPEWDALTAEERARIKSRQGLHHVGLEAADVKDPATMRSVPADGRTVGEVMLRGNTVMSGYYKDGGATAEALAGGWLRSGDLAVREEDGYIKILDRSKDIIISGGENISTVEVEAALFGHPAVEEAAVVGRPDEYWGETPCAFVKLRGGGGGGGGGAAVEEELMAFCRARLPRYMAPRTVVVVEEELPKTATGKVQKVALRERAKAMGSLPAAASSSSRRAPTGTAGSGRSKL

SEQ ID NO: 35244 - protein, 498 aa, Oryza sativa
MDNSHEQPLPPGVGAWPPPPSIHPAKFQPNPQPTMPFPNMDAGGAQSNQTAHEVSNHNDSAADIESAVQEAVLREQDIETQQVIQNQRQAKATIEPTQYGEDLLSNRRNPNALKEHLLKMTAEHRAEMANKRGKPLHADNGNVEIGNGYGVPGGGAYYAANMSSGQMNKPKDIADKAKGADDLPEFLRQRLRARGILKDEATNNRFTIKQNVDSPVGQIKAAQELPPGWVEAKDPTSGASYFYNQSTGTTQWDRPGAPLNTMQHQAPPSSSLPENWEEALDQSTGQKYYYNTNTQATQWEPPTAVNPGVAPHAPTNAAVEMAAQNTDIWNSQMQRCLGCGGWGVGLVQPWGYCNHCTRVQNLPFQQYPSYPNNTTHSSSNKNPGNVAAKDRSSAKPPFGKANRKDHRKRNRPEDDELDPMDPSSYSDAPRGGWVVGLKGVQPRAADTTAAGPLFQQRPYPSPGAVLRKNAEVASHGKKRGMAPITKRGDGSDGLGEAD

SEQ ID NO: 35245 - protein, 137 aa, Oryza sativa
MSVEILDGRTVESFVEDEGAFNSTVDDRFAALDGDRDGRLSYADMAGELMSLRVLETHFGVDGAAATDAELVDLYRGLFARFDRDGDGAVDREEFRAEMKEVMLAVASGLGFLPVQMVVEEGSFLKRAVERELAKAA

SEQ ID NO: 35246 - protein, 486 aa, Oryza sativa
MWRRHLLRRLLPSPATAAAAAASPSPAIRLLSTASPDPAPPATLASSLAGALSALSSTPPPATSPDAYFSLHFSDVRPTNALLAEALALAPPATSRAAAELFRFLVRRRSLHPSDSALAPVVRHLARRRDFPAVRSLVQEFPSALGHDTLDAYLLSLARAGRATDAVKVFDELPPQLRTRQALTSLVSSLSAEGWPSHAEGAVKKVANEIFPDDNICTLLVSGYANAGKLDHALRLIGETRRGGFQPGLDAYNAVLDCICRLCRKKDPLRMPAEAEKFLVDMEANGIPRDAGTFRVLITNLCKIRKTEDAMNLFRRMGEWGCSPDADTYLVLIKSLYQAARISEGDEMMTWMRSAGFGAKLDRKAYYGFIKILCGIERVEHAVKVFRMMKGYGHAPGTKSYSLLIEKLTRHNLGDRANALFREAVARGVTVTPGVYKIDKKYVKAKKEKKVKKRLTLPEKMRLKSKRLYKLRMSFVKKPKRRMVRV

SEQ ID NO: 35247 - protein, 202 aa, Oryza sativa
MRRKTEMIQTTPCVALLLLVGVAFAARSASAITDGLLPNGNFEEAPDKSQMNGTRVTGRYAIPQWEISGFVEYIGSGQKQGDMLLPVPEGAYAVRLGNEASIQQRLTLTRGMHYSITFSAARTCAQSELLNITITPESGEIPIQTVYTSSGWDSYSWAFKAKHSVVLFIVHNPGVSDDEACGPLIDSFAIKTLNPPQRTKGN

SEQ ID NO: 35248 - protein, 377 aa, Oryza sativa
MEDLPMGRRNPAASLTDDLVVEILRRLPVRSVCRFKRVCRSWRNLIADREHRKKLPQTLSGFFYKSISGERCPCSAHHFTNVSGKGVPLIYPSFSFLPQCDTVVPLDCCNGLLLCRCFQPGPNNSDDEIEPFHYAVCNPATKEWVMLPDADWANGETRIACLCFDPAISSHFHVLEYVEAEYEDVTGVEIYSSETGLWTLHVSGWGDDVFLRHWANPRSVFLNGFLHSATCAAEIAVVDMEGKKWRTIAMPEPEGDTGIIHQTQGRLCAFNVDPDDIFKLSIWILEDYDTDNWILKHTVSSLRLFGGKKYQFGFDYQIIVVHPECNLIFFVYGWDKTLMAYEMDRKEVRVIRNLGHDSSDPYLPYVPLFYESFADGR

SEQ ID NO: 35249 - protein, 369 aa, Oryza sativa
MNKRPRDEPSSSFASAPKRQYGAGGGGYGGHGYSEERSSARRVADHYSARSNQTLEERENSPIIHLKKLNNWIKSVLIQLYAHPGDCVLDLACGKGGDLIKWDKAKVGYYVGVDIAEGSIKDCMTRYNGDTDQQRRKKFSFPARLICADCYEARLDEHLYEDAPFDICSCQFALHYSWSTEARARQALANVSALLRPGGVFIGTMPDANVIIKRLRETDGMEFGNGVYWISFGEEYAEKKFPASRPFGIKYKFHLEDAVDCPEWVVPFHLFKLLAEEYDLELVLTKNFHEFVHEYLQKPEFAELMRRLGALGDGRQDQSTLSQDEWEVAYLYLAFVLRKRGQPPSQRRANNANRGKMFLTENDIDFLGV

SEQ ID NO: 35250 - protein, 277 aa, Oryza sativa
MDTNNGKGVVASWTSSMSSLMLSNLANLVASGTRTSAGFKQVHLNACARVVNEKFSTTLTGDQIRNHLKTWHKKFQKISRLRKVSGAIWDEENFIISLDEEHYNDYMQHNNKSDAEFFNRPITNYGEMLTIFGSTMAIGNFAKDSSSVLGTEDVEGTENEVNEDAPTIDHDERSSASKPKRQKTYAHDDDGLVGAFDRASDKLANAIIRSSTVGNELPDDLWDNLNSLPGFEQHHISFYYHYLVANPHIARAFNGLPFANKLDWVAMYISEKFPGAM

SEQ ID NO: 35251 - protein, 398 aa, Oryza sativa
MGGSHHLFRFLAADDHPFFPTFPTSSSSFLLDDTHPFFFPPSSSCPLGFTSPPSSSCPLGFTSSYDLDAAFHHHLDLDLDLDLFLPTPTPPVTTSCPALRDPFLLHHSLAHRVSALELAAPRSKYTYEAESAGRKIKWTTHDKPDGDRTFKWEAQIDTPNDDGFDRKWKWESKASAAGTTKLKWAKEVKGKGFLHPWSHAYSVEEVFGDDDHHHKADKTAENKVKQHNKDTSAKEEKKKTNKSNVQIVEIDDNTAGCVAINKAFASSYAKGKRKQLSPQDAALLIQMNYRAHLAHRSQVLRCLRHLAVAKAKLKDIRSLFYNISYRRRISHDSEERQRFADKIIALLATVDALEGPDYMVRNAKRSMLEELEGMLEIVGPQSLGKPRTLSRRKFENHI

SEQ ID NO: 35252 - protein, 559 aa, Oryza sativa
MVAVFNKDVLSWYLITVKLKETVDANLNKSAPPPGALPLWQALNRNLPLLTNGEAAGAGGDALPPRQEREREVKVQVQSPAHSPKPQDPEWVVAIRGKLAQARAEEAACPWARLSVYRVPKSLRDGDERAYMPQVVSIGPLHRGRRRLREMERHKWRALHHVLKRTGHDVTAYLDALRPMEERARACYDGRVAGMQGNELVECLVLDGTFVLELFRGAQDGGKGFGDDLGYSRHDPIFAMRGAMHAIRNDMILLENQIPLFVLDLLLGLQLGNPEQTGAVAGLAVRFFDPLMPTDEPLLRKDRSKLESSIGASPAAAAFEFDPLSGPMLHCLDVFRRSLLRAGLQPTPPPPARLWLKKWSGLRRVADKRRQQFVHCVSELREAGIRCRRRNTDRFWDIRFHDGVLQIPRILIHDGTKSLFLNLIAFEQCHMDIATPGGNNITSYAIFMDNLINSADDVKYLHDRGIIEHWLGSDAEVADLFNRLCQEVVFDINDSYLSGLSDQVNRYYDHKWSTWIASLKHNYFSNPWAIVSVVAGVLLLLLTMTQTFYGTYSYYRPMH

SEQ ID NO: 35253 - protein, 69 aa, Oryza sativa
MADWGPVVIATVLFVLLTPGLLFQLPAHGRIVGFGTMHTSGVAVLVHAVIYFALITIFLIAIGVHIYAG

SEQ ID NO: 35254 - protein, 210 aa, Oryza sativa
MDPEVKDSRPSRSPGEPNLFLQWGSRKRLRCVKTRDDGSPSPGRTDVLRRTIPRVNRPLGGDVAPFRSPRRPSTLNRRKTEPFVSDNRHSMSLSPEKDRYYSTRGSPFPFEGNGFDFGGGMEEKGTTALPRFFISLSNKEKEEDFMAMKGCKLPQRPKKRPKLMQKCLLMVSPGAWLSDLSHERYEVREKKCARKRARGLKALCNESDSE

SEQ ID NO: 35255 - protein, 556 aa, Oryza sativa
MAQAARLNLRMQKEVKLLLNDPPHGVSLNLSGDESALSSLLSFEARIQGPDETVYSKGVFVLKIQIPERYPFQPPNVTFVTPIYHPNIDNGGRICLDILNLPPKGAWQPSLNIATVLTSIGLLLSDPNPDDGLMAEISREYKYNRQVFDINARSWTEKYANPSAIGASGWSSVDVSTLAPNIQEEKLSLEPLPKASNKNCDGSRKKMRLLSQKLSLKSVPEENTTTGKKDLVTNHLSSTARPTDPTACLSDVSGKLNDTSESISVIADSAVTSKKEYQGTRRNLQLLGQGLPVTSEGPSKNSNGSVEDKLPNHLLASASSNTKHPVMGSSDNALEKSSAKRIGESLDSLYKASEGDGTNVRSLGQKLSLKSAKPESKSNVQKENMAPNHLPSLSGFSNLDKRQSHVISGGNSIGHTNLVQQNSNNENVLPSTQLIPSKECNQGRKKLHLLSKRLSLKSELPADKTIEKEYMQTDCSQNNRKPNELPLSAPVLKNQILGTIDPQKDARQSKSSIQQNTTPVERIVVSDSEDSADECERPSRSRLSLMRRRLAGKPRS

SEQ ID NO: 35256 - protein, 359 aa, Oryza sativa
MAAQRLAALHAAAPSAFSSTSSASHGRPAARSSTTALLPVALPRASATLRAAPSRLLPQEAKAAGSGRSVMCMASASASAASAAVASGAAELKAAREDIRELLKTTHCHPILVRLGWHDSGTYDKNIKEWPQRGGANGSLRFDVELKHGANAGLVNALKLVQPIKDKYPNISYADLFQLASATAIEEAGGPKIPMTYGRIDVTGPEQCPPEGKLPDAGPSAPADHLRKVFYRMGLDDKEIVVLSGAHTLGRSRPERSGWGKPETKYTKNGPGAPGGQSWTAEWLKFDNSYFKEIKEKRDQDLLVLPTDAALFEDPTFKVYAEKYAEDQEAFFKDYAGAHAKLSNLGAKFNPPEGFTLDG

SEQ ID NO: 35257 - protein, 339 aa, Oryza sativa
MSSNNSMEANNGDDEKKQEQVVCVTGAGGFIGSWVVKELLLRGYRVRGTARDPRKNAHLLDLEGAKERLTLCRADVLDFASLRAAFAGCHGVFHIASPVSKDPNLVPVAIEGTRNVMKAAADMGVRRVVFTSSYGAVHMNPNRSPDAVLDESCWSDPEFCQREDIYCYAKMMAEKTATEEASRRRLQLAVVVPCVTVGPILQPSVNFSCHHVVRYLTGAAATYPNAVAAYADVRDVARAHVLVYEHHGARGRYLCIGTVIHRAELLRMLKELFPQYPVTSKCEDEGNQMVKPYKFSNQRLRDLGLEFTPLRKSLHEAIECLQRKGHLPVVTVAQQRACL

SEQ ID NO: 35258 - protein, 419 aa, Oryza sativa
MAPPAAGAAIPRDALLRIAAPLRDSLAAAPYAPPEGSSTSTKSLLSSLLPSSHPQAPAGGGGARSKEAAGLLLFCAAARAASPEYPALHWVPVALSDAAAAAVEEMAAAGGWGDVGEMVVGMMPEVVPPLKDVVKATCVDTEDEEIGKEKPPKEHAVVAAHQFRWLVSQVTYPKLGDLCWLVIPCALTALDHWSPEVKEQGMVSFMHIAKSVKATELNLYEDAILDACCHNIPANDELWYRAVEVSVLLLTCTQRSNPRSPWYDRMLAEMLGHLERQPLNKKRRVAWLTLIGPVFEAMGLFLLAHFRLLFSLFFQWMHADDDKTVLLVLERIHEVIKLTWIRKSPYTSRLVDELVLLYKESATRSSREVVWNHILEMLATLQKCKGQQFEEAWKKHEVDPDLTMLLSCFNELCTKNHSS

SEQ ID NO: 35259 - protein, 236 aa, Oryza sativa
MVVIEQEPEVEETPAAAEEPAAEEQAAGGAAGGEAARADGEDEEEAFEDALTDEQLREKARSQANDAKAEGNKFFGAGEYERALSQYETALQIAAELESAEDIRSACHSNRAVCFLKLGKYDETIKECTKALELNPSYLKALLRRGEAHEKLEHYDEAIADMKKIIELDPSNEQAKRSLFRLEPLAAEKREKMKEEMIGKLKDLGNSVLGRFGMSVDNFKAVKDPNTGSYSISFQQ

SEQ ID NO: 35260 - protein, 503 aa, Oryza sativa
MKSNRNLTRGDGRRLGNAALIAFMLGSLLVLSLVRARFSPIGKPGEAIKTEEQEAMRKGSVKMETLEAADEAAASAAAEEEEETQPKAGDTTAGGGGGGASSAAVAAASTTATDHLTKPVCYESSRRSDTCEATGDVRVHGRSQTIHISPLEQEWKVKPYCRKHDAFALSHVKEWALRPLSTADTYPAVPHCTVNSSATAFVLSTGGFTGNPFHDYTDVLIPAFITAHRFAGEVQFLVSSFKSWWTNRYMQIFQRLSKYELVDIDNDDEVRCYRSVVVGPTFHKELGVDASRTPSGYSMVDFRTMLRGALGLERAVAEPSGDRWDIRRRPRLLIISRRNSRAFLNERAMADMAMSLGFYVRLGEPDISTDVSKFARLVNSADVMVGVHGAGLTNMVFLPAGAVLIQVVPYGGLEWLARGTFKEPAADMQIHYLEYMIQLDETTLSEQYPKDDPVLKDPYSIHKQGWNALKMVYLDKQNVRPHLGRLKNTFMEALKLLPHGHTN

SEQ ID NO: 35261 - protein, 304 aa, Oryza sativa
MVALGRRSWLVPLAMVLAVSSCLAGPAMAAGKTGQMTVFWGRNKNEGTLKETCDTGLYTTVVISFYSVFGHGRYWGDLSGHDLRVIGADIKHCQSKNIFVFLSIGGAGKDYSLPTSKSAADVADNIWNAHMDGRRPGVFRPFGDAAVDGIDFFIDQGAPDHYDDLARNLYAYNKMYRARTPVRLTATVRCAFPDPRMKKALDTKLFERIHVRFYDDATCSYNHAGLAGVMAQWNKWTARYPGSHVYLGLAAANVPGKNDNVFIKQLYYDLLPNVQKAKNYGGIMLWDRFYDKQTGYGKTVKYWA

SEQ ID NO: 35262 - protein, 356 aa, Oryza sativa
MAALTSYEMAASILLCAEDSSSVLGFGGEEEEEEEDVVAGKRARCAGPPPPPCVDVAGVDFAVPSEECVARLVETEADHMPREDYAERLRAGGGDGDLDLRVRMDAIDWIWKVHSYYSFAPLTACLAVNYLDRFLSLYQLPDGKDWMTQLLAVACLSLAAKMEETDVPQSLDLQVGEERYVFEAKTIQRMELLVLSTLKWRMQAVTPFSYVDYFLRELNGGDPPSGRSALLSSELILCIARGTECLGFRPSEIAAAVAAAVVGEEHAAFSHVNKERMSHCQEVIQAMELIHPKPSSPSRVFVSSSIPRSPTGVLDAAGCLSYRSDDSAVASHYAASSWGYEHDSSPVSSKRRKISR

SEQ ID NO: 35263 - protein, 431 aa, Oryza sativa
MEEDPLIPLVHVWNNAAFDDSSCSRSAWLPQSPAVAAVRKGDKENHRPEVVDVAAGYDVEAEIGHIEAEILRLSSRLHHLRVSKQPEPNRDDAPMGEMVAKVRPRPRGLSLGPLDVISIVNREKHPLRTKKPPATRGRGLSLGPMEIAAANPRVPAAAQHQQQQRAGTARILKPIKEPPVQRRRGVSLGPLEIHHGVGSKAPAAARAKPFTTKLNAIREETRPSKQFAVPAKPWPSSNTRQTLDSRQGTAASRAKARSPSPRPRRQSNGKATDTRGGNKVVDELKPKGASSSQSGSAAAAATAKRMAGSSKMRVIPSRYSLTPGASLGSSGAQERRRKQSLPGSSGDANQNEEIRAKVIEPSNDPLSPQTISKVAEMLPKIRTMPPPDESPRDSGCAKRVAELVGKRSFFTAAAEDGRALDVEAPEAVAEA

SEQ ID NO: 35264 - protein, 110 aa, Oryza sativa
MTTRPSRSSTRTTTRIRSSSSCFATRWWTTTTTKTTSVAKAMPAPATTRKKWKVRLIMEGKVKRKEKVKVRGKLGWKKKAKLKLIKLILIKEKVMGKRSRAPQKENLVTG

SEQ ID NO: 35265 - protein, 359 aa, Oryza sativa
MHPNGAPLAVPPGFRFHPTDEELLYYYLRKKVAYEAIDLDVIREIDLNKLEPWDLKDRCRIGTGAQEEWYFFSHKDKKYPTGTRTNRATVAGFWKATGRDKAIFLGSGGGTRIGLRKTLVFYTGRAPHGKKTDWIMHEYRLDDDNVDVPEEGWVVCRVFKKKSIHQRGFDQPDMAAAADEDELRYQLLHGAGMSSSPVDQKHVLLQEQLVAHGAHGGGFVVPAFEASMHLPQLASADAAPCGGGGGGHVAFASMNPLDAAGCGSQNMMTMKMAATSGGEMLLMSGGGVDGGRFGAAADWSILDKLLASHQNLDQLFHGKVAGAHQQQQQMAMDAASSLQRLPFHHYLGLEAADLLKFSM

SEQ ID NO: 35266 - protein, 542 aa, Oryza sativa
MDFFTEYGEGNRYKIEEVIGKGSYGVVCSALDTHTGDKVAIKKINDIFEHVSDATRILREIKLLRLLRHPDIVEIKHILLPPSRREFKDIYVVFELMESDLHQVIKANDDLTPEHYQFFLYQLLRGLKYIHTANVFHRDLKPKNILANADCKLKICDFGLARVAFSDTPTAIFWTDYIATRWYRAPELCGSFFSKYTPAIDIWSIGCIFAELLTGKPLFPGKNVVHQLDIITDLLGTPSPETISRIRNEKARRYLNSMRRKKPIPFTQKFPNADPLAMRLLERMLAFDPKDRPSAEEALADPYFKNIANVDREPSAQPITKLEFEFERRRITKEDIRELIYREILEYHPKMLREFLEGTESTGFMYPSAVDHFKKQFAYLEEHYAKGSTAAPPERQHNSLPRPCVVYSDNRPQSTASVTEDLSRCLIRDNNLKSQDSASVGASRIPQGAAARPGKAVGSVLRYGNCSTSAAEQQYEQRRVVRNPAIAPNSSVPLGSSYPRRNQTCKSETGDVERIDSSQTGPPKPYVANKLPATVDGRSGHW

SEQ ID NO: 35267 - protein, 454 aa, Oryza sativa
MSLLSNSLLLQGRLRHAAASAVAAAAMGRRGVATSTEEYNRRNYANNISEYNTVFGSLTAQRRHYLLRDAYDDMMLDGVQPVRDTFHNLIVGAMKGSRLQDAFYFRDQMKEMGLQPDVNLYNFLISTCGKSKNSDAAIMLLEEMKAHGVKLKGETYTCLLNALAATGRTDQVYAIVRDMTAAGLGLNKFCYAGLITAFKNKAPTTEETMTKIVEFVQQSKGWKNVERVSKDSSENIMMNVSEEELYNLPTAEYVHRQAFVYKQMTIYHVAIHACADLKSKETLEVLLDMLIKDGFTYDAFIAMQAMRCYLQCGDIDSAVKIFEEYTSSKSPPAELYVTLAEGAMIGHTPRGMQLAQETIEKMTSRNFFLNARMGTDLLLAASGEKTGGYTIANYVWDLMQNRRITPSLPAVEAYYKGLKEREIPSDDPRLMNVSRVLDNLSIRFGPRRNSNAQA

SEQ ID NO: 35268 - protein, 393 aa, Oryza sativa
MMAATQSSSWADLQMDILGLVLRRLPSLADRVRLRAVCRPWRSNAQLLTLPPPFPWLNLLDGTFLSISDGEIHRMPLPDDASCYGSIDNWLFLTDSDDGCSLMNPFSKATLQLPKLARIWHHERGNAYNACTRLFYKLAVPLPLDLSSDSLVAVLMNDPLRHSVVCIVHRSISTDSFRFHDRPIKNNFYDIAFCGGKLYALSCGKLFTVEMSEVHIEKPKVPHVECIVEDFPTESHSQPCPENHICVTWPYLVASGGRLLNVIRLVGVPFPPEDDDDIFKDSLTFSFEVYEADLNTGSRMWRRVESLGDQALFVGRHYSKSLSAAEYVGAQEDCIYFMCDDYFRSDEDPLCDAGIYNMRSGVITPLLQENTAPRLHPTGEGHPTWFFPADGAM

SEQ ID NO: 35269 - protein, 394 aa, Oryza sativa
MAPEEEVEVVVVVKEAVVVTVDRAMVLVLGMVREVVVEVLPVAGMGVVEAAAAVVVRVVAPALAMGLGKALAMVQVLVVLAGMVVVAEVVVAKVVVLAATGKGLAMVPAMGRVLVVLMVVVMEVVAVAVAVEAMADSGDSSPHSAAATDDAHHEGSEAAAAQAAPPPPAPPAKVRLMVSYGGRIQPRPHDHQLSYVNGETKILSLERPLRFADFAARLAGLAGSPGDFCVKYQLPGEDLDALVSVTNDEDLEHLVLEYDRLHLLRPAPGSGGGSSRGGSTPRLRVFLSPVFFIPAPPHGYFTTAAGPGATSFPAVYAVVQHNGNANASGNGPSPAAASNAQAYAPQVAYDSNGHAIYYTSVLPQYASAVSGVPAAATVLGTDPAKPVAVKPTVS

SEQ ID NO: 35270 - protein, 135 aa, Oryza sativa
MPLYDILNEFQKGHSHMAVVIRQTNANYAAEPPANDGGTLEVAISIDDKHGEKVVKNLPPLRRWKSCPNSQNSNRGNRNRKWSKDQSDVLQIHEEPLPTLNEDEEAVGIITMEDVIEELLQEEIYDETDVHVEEQ

SEQ ID NO: 35271 - protein, 394 aa, Oryza sativa
METMTEYEKQKRMLEDLQLRLEEAEQQILDGENLRKRLHNTILELKGNIRVFCRVRPLLPNESGAVAYPKSGENLGRGIELTHNAQMYSFTFDKVFEQSASQEDVFIEISQLIQSALDGYKVCIFAYGQTGSGKTYTMMGNPELHDQKGLIPRSLEQIFQTSQALISQGWKYKMQASMLEIYNEAIRDLLATNRTTVQDGGASKYSIKHDANGNTHVSDLTIVDVSSINEVSSLLKRAAQSRSVGRTQMNEESSRSHCVFTLRIFGVNEGTDQQVQGVLNLIDLAGSERLNKSGATGDRLKETQAINKSLSCLSDVIFSIAKKEEHVPFRNSKLTYLLQPCLGGDSKTLMFVNLSPEVSSTGESICSLRFAARVNSCEIGIPRRQTQVRSLAQG

SEQ ID NO: 35272 - protein, 388 aa, Oryza sativa
MPETGPYGHKKTDGICDGVCGEPASKAVLTMSRLRCALRGFDFRALLALLIGVPILILMIYAHGQKVTYFLRPIWESPPKPFKTIPHYYHENVTMAKLCKLHGWKVRETPRRVFDAVLFSNELDILEIRWNELSPYVSEFVLLESNSTFTGLKKPLHFKENRHRFGFAESRLTYGMIGGRFVKGENPFVEESYQRVALDQLIKIAKIEDDDLLIMSDVDEIPSGHTIDLLRWCDDIPEILHLQLRNYLYSFEFFLDDKSWRASIHRYRSGKTRYAHFRQTDELLADSGWHCSFCFRYISDFAFKMQAYSHVDRIRFKYFLNPERIQDVICRGADLFDMLPEEYTFQEIIAKLGPIPSTFSAVHLPSYLLQNVDRYRYLLPGYCRRESG

SEQ ID NO: 35273 - protein, 474 aa, Oryza sativa
MYRVKSESDCDMIHQEQMDSPVADDGSSGGSPHRGGGPPLKKGPWTSAEDAILVDYVKKHGEGNWNAVQKNTGLFRCGKSCRLRWANHLRPNLKKGAFTAEEERLIIQLHSKMGNKWARMAAHLPGRTDNEIKNYWNTRIKRCQRAGLPIYPTSVCNQSSNEDQQCSSDFDCGENLSNDLLNANGLYLPDFTCDNFIANSEALPYAPHLSAVSISNLLGQSFASKSCSFMDQVNQTGMLKQSDGVLPGLSDTINGVISSVDQFSNDSEKLKQAVGFDYLHEANSTSKIIAPFGGALNGSHAFLNGNFSASRPTSGPLKMELPSLQDTESDPNSWLKYTVAPALQPTELVDPYLQSPAATPSVKSECASPRNSGLLEELIHEAQTLRSGKNQQTSVISSSSSVGTPCNTTVLSPEFDMCQEYWEEQHPGPFLNDCAPFSGNSFTESTPPVSAASPDIFQLSKVSPGWTLKFLIPL

SEQ ID NO: 35274 - protein, 310 aa, Oryza sativa
MAFLVERCGEMVVSMEMGPHGGGGAAAGKPVPAPFLTKTYQLVDDPCTDHIVSWGEDDTTFVVWRPPEFARDLLPNYFKHNNFSSFVRQLNTYGFRKIVADRWEFANEFFRKGAKHLLAEIHRRKSSQPPPPPMPHQPYHHHHHLNPFSLPPPPPAYHHHHLIQEEPATTAHCTVAGDGGEGGDFLAALSEDNRQLRRRNSLLLSELAHMKKLYNDIIYFLQNHVAPVTTTTTTPSSTAMAAAQHHLPAAASCRLMELDSPDHSPPPPPPKTPATDGGDTVKLFGVSLHGRKKRAHRDDDDGVHDQGSEV

SEQ ID NO: 35275 - protein, 632 aa, Oryza sativa
MGAVNGVCYGVLGDNLPPRSEVVQLLKSQGIGAMRIYYPDKEALDALRGSGIAIIVDVGDSGAVANLASNPSAAGDWVRDNVEAYWPSVIIRYITVGNELPAGDMGLILPAMQNVHKALVSAGLSSSIKVSTAIKMDVVANTFPPSHGVFRPDVQQFMAPIARFLANTVSPLLVNVYPYVSYRENPRDISLNYATFQPGTTVRDSDSGLTYTNLFNAMVDAVYAALEKAGTPNVRIAVSETGWPSAGGFAATAENAMNHNQGVIDNVKNGTPKRPGPLETYVFAMFNENQQTGDETRRHFGLFNPDKTPAYPITPYPRPAVQSIGVCYGMVGNDLPSRSEVVQMYVSLGINRMRIYNPDREALDALRNSGIDLILDAGGFDTVSYLAASSSNAASWVHDNISPYYPAVNIKYIAVGNEVVGGTTESILPAMRNVNSALAAAGIGGIKVSTAVKSDVIANSYPPSAGVFAYPYMNGIAQYLASTGAPLLANVYPYFAYAGNPREISLNYATFQPGTTVRDDGNGLTYTNLFDAMVDCIYAALEKADAGNVRVVVSESGWPSAEGIGASMDNARAYNQGLIDHVGRGTPKRPGQMEAYIFAMFNENQKTGAATERHFGLFYPNKSPVYQIAFSN

SEQ ID NO: 35276 - protein, 519 aa, Oryza sativa
MAPPGQLLPLARSLLPLSAPPFVSGRRRRLPTLVLGRALPPPTWLPHGRLSPAHPLPFAPPRRLSRPPPPATSLPGASPGGGAEAQAVLAEFVTSERVKVAAMLGLALALCNADRVVMSVAIVPLSQAYGWTPSFAGVVQSSFLWGYLVSPIIGGALVDYYGGKRVMAYGVALWSLATFLSPWAAARSLWLFLSTRVLLGMAEGVALPSMNNMVLRWFPRTERSSAVGIAMAGFQLGNTIGLLLSPIIMSRAGIFGPFVIFGLFGFLWVLVWISAISGTPGENAQISAHELDYITRGQKLVKTQSGGERLRKVPPFSKLLSKWPTWALISANAMHSWGYFVILSWMPVYFKTIYHVNLREAAWFSALPWVMMAVLGYVAGVVSDRLIQNGTSITLTRKIMQTIGFVGPGVALLGLNAAKSPVIASAWLTIAVGLKSFGHSGFLVNLQEIAPQYAGVLHGMSNTAGTFAAILGTVGAGFFVDRMGSFRGFLILTSLLYFSSTLFWDIFATGERVDFDGTG

SEQ ID NO: 35277 - protein, 122 aa, Oryza sativa
MDWCLKITDSSLRSLLSNCKLLVAIDVGCCDQITDAAFQDMDANGFQSALRLLKISSCVRITVAGVRNVIESCMALEHLDVRSCPQVTRQSCEQAGLQFPGSCKVNFEGSLSESDPSVAIFF

SEQ ID NO: 35278 - protein, 540 aa, Oryza sativa
MGSRSRGGRHLLLLLLLHLLSLHSSLLPWAAVSAAGGGGSGDPYVGVTIGTAVTNLLSPSDLPEFLRAQRITHVRLYDADPRMLSALASSGARAIVGVPNDELLALGSSPATASAWVARRVLPYAGANSSTPGLIAAIAVGDEVPTALPSALPVLLPAIQSLAAALAAANLSSIPVSTPLPFSVVLDPFPPSQAFFNQSLAKSFILPLLSHLANTSAPLMLNLYPYYSMMQSNGVIPLDNALFKPLPPSLEMVDPNTLLHYTNVFDAMLDAVHVAVKNLNATGGGGPVPVLVTETGWPSYGDRRAEPYATRDNADAYNSNLIKHVNDKPGTPMRPGAQASVYIYELFNEDLRPGPVSEANWGLFHGNGTPVYLLHVSGAGGFLANDTTDRTFCIASDDADEKAVQAAMDWACGPGRTDCTAIQPGQGCYEPNDVRSHASFAFDSYYQSQGKAAGSCYFQGVGMVTTTDPSHDSCIFPGSKLLSNVTKSDGANTTTAQTSDAEGSAIWRLRTGRETGFLFILRWLLSLSVVLITTNSNFWT

SEQ ID NO: 35279 - protein, 332 aa, Oryza sativa
MRASSFSSLMLPCSHGHGGGRATASTCAAAAAACLALVALVILVVSMDPRAQASSWFFLSSSSSSSSSSSSTLVRPAASSHAASLRKPSSWGGGNGGGGGGEHLLVTSSSFGSGGGARGSWSRNSTSKEVLFQGGGGGGGDEMTSTAAAPTPALIIGSSSGDGVSPSRVAVTAAAAEPTPALAPAPAPEWGVGDAASGDDIIQVMPQAQRRRDVKLELLELGLAKARATIREAIYLECVPVVIGDDYTLPFADVLNWAAFSVRVAVGDIPRLKEILAAVSPRQYIRMQRRVRAVRRHFMVSDGAPRRFDVFHMILHSIWLRRLNVRVIARED

SEQ ID NO: 35280 - protein, 321 aa, Oryza sativa
MLGGDGRTKTVCVTGAGGFVASWLVKLLLSRGCYTVHGTVRDPGDAKNAHLMSLDGAAERLRLFKADLLDYGSVAAAIAGCDDVFHVACPVLLSAPNPEVDILAPAVTGTTNVLKACSEAKVGRVVVVSSVSAAMVNPNWSEGKAIDEDCWSDVDYCRATKNWYTLGKTLAEIEAFDYAKRSGLDLVTLCPSLVIGPLLQPTVNASSTVILGCLKGDCEVKIKLRNFVDVRDVADALLLLYETPGVSGRYICSSHARRMPHIIDLLKSWYPGYKFADKFVEVSDEPQFNSGKLEKLGWKIKPFEETLRDSVESYRAAGVLD

SEQ ID NO: 35281 - protein, 497 aa, Oryza sativa
MASPPQPGPYMPDLPAVPAWLNKGDTAWQLVAATFVGIQSMPGLVVIYGSIVKKKWAVNSAFMALYAYASTLIVWVLVGFRMAFGDRLLPFWAKAGPALTQDFLVQRAVFPATAHYGSDGTLETPRTEPFYAEAALVLFEFEFAAITLVLLAGSLLGRMNIKAWMAFTPLWLLFSYTVGAFSLWGGGFLYQWGVIDYSGGYVIHLSSGVAGFTAAYWVGPRLKSDRERFSPNNILLMIAGGGLLWLGWAGFNGGAPYAPNVTATVAVLNTNVSAATSLLTWTCLDVIFFGKPSVIGAVQGMMTGLVCITPGAGLVHTWSAMLMGMFAGSVPWFTMMILHKKSTFLMKVDDTLAVFHTHAVAGILGGVLTGLFATPELCALDCPIPNMRGVFYGSGIGQLGKQLGGALFVTVWNLIVTSAILLCIGLFIPLRMSDDQLMIGDDAAHGEEAYALWGDGEKFDVTRPETTRTGGAGGAGREDTMEQRLTNMGARGVTIQL

SEQ ID NO: 35282 - protein, 493 aa, Oryza sativa
MAHVAFVALLFLLLVGHCLGGKVGICYGRNADDLPAPDKVVQLIQQQSLKYVRIYDTNIDVIKAFANTGVELMVGVPNSDLLPFAQYQSNVDTWLKNSILPYYPATMITYITVGAEVTESPVNVSALVVPAMRNVHTALKKAGLHKKITISSTHSLGILSRSFPPSAGAFNSSYAYFLKPMLEFLVENQAPFMVDLYPYYAYQNSPSNVSLNYALFSPQSQDVIDPNTGLVYTNMFDAQIDSIFFALMALNFKTLKIMVTETGWPNKGAAKETGATPDNAQTYNTNLIRHVVNDSGTPAKPGEEIDVYIFSLFNENRKPGIESERNWGLFFPDQSSIYSLDWTGRGNVDIMTGGNITNANGTWCVASANASETDLQNGLNWACGPGNVDCSAIQPSQPCYQPDTLASHASYAFNSYYQQNGANDVACDFGGTGVRTTKDPSYDTCVYMAAGSKMSTTNSSNLPVQSGFSPSRFDKNFYLLFSMLPIMIAACIV

SEQ ID NO: 35283 - protein, 473 aa, Oryza sativa
MDMPPTPLPPETANTSPAPNGATAGIRVENCYVFKSRLQEYAQKAGLQTPEYHTFKEGPSHEPVFKSTVVINNTSYDSLPGFFNRKAAEQSAAEVALMEIVKSIPANANIPAVQETGLCKNLLQEYAQKMNYAIPSYICTKSASGLAPFICTVEIGGIQYIGAAARTKKDAEIKAARTALLAIQGQSEGSANGATKYIVVPGKRVGKEVEKMPIETPKPLKIKKGGFKKKWNKRKFMKKDGQAVVEKDEARVAGDAHDSDVLMQPTVITQEASCGTLFLQPCEEAKRVEAEPPRDIEMVQPDKENQHSDAALVQPDDEARVEQEPSRDISVVPPNEEAISVKQEPSIDAAILQPKEEASSVKQEPFIDTAMLQACKEAGSVELGPARDTVISQLNEQDRGVKQEPAGDTAVPQPDVDARVVKEESPRTEPNGEATNMKETPKNSAVCNSPETKEFGDITAMGSDPPATNMSEE

SEQ ID NO: 35284 - protein, 700 aa, Oryza sativa
MDTPPPPPPPPPPTPTQSSPPVNWDALDALVLDFARSDRLLLPPASPSPPSSPSSSSTTTATSSSSSAPSPSSSYRSRLLIRRARTALEEGDVDAALALLRAHAPAALLDHRLLFHLHKQRFVELVRRGTEADREAALDCLRTALAPCALDAYPEAYEEFKHILLVLIYDKDDQSSPVANEWSIKKRFELAGLLSSILRTHLQAYDPILSMTLRYLISIHKLLCSRQGISSPISNLTERLLFDDRDPPAVPQECSLEAPPFDEVDVQALAHAVELTRQGAVDSLKFAKGDLFQAFQNELCRMKLDLPLLDKLIHEYCIYRGIVEGGSHVLPGLQSNNQSNDVNFVDKQEDSTETRIDFEMTNNQNGNCSTSDTSHHDSWSRRLRRVRSSASGQRRRKRWRGRVDDLDYGCETPLDANKHAILCSALDMDEDDMIVKPDLMADTGLPDSRCNQDQKYEVILEMRDLTRKGMASKVVEEINNMDPDFFLKNPILLFQLKQVEFLKLVASGDHGAALKVASTHLGPLAASNQALLKPLKETLVTLIQPCEDVLTKSVSLPVLASSLQIAMSRRLGIEEPQLMKIIRTTLHTHSEWFKLQMCKDRFEHFLKIDSLKEVDPSAGSHNMSKVLTDECANGSSQITTCSSGKVLDEGSSPQESSEVTCDENAILKVMEFLALPRADAIQLLMQYGGNAEEVIQQIFS

SEQ ID NO: 35285 - protein, 335 aa, Oryza sativa
MSQQGEYHADMMAEFLRGSGGAAVIDGGLATELEANGADLKDALWSARCLFTCPDLIRKVHLDYLEAGASVLITGSYQATIQGFLSKGFSQEESESFLRRSVELACEARAIYLEKCSNGSDEAKDVTKYRKRPILIAASVGSYGAYLADGSEYSGDYGNEGTLEFLKNFHLRRLQVLAEAGPDVIVFETIPNKIETQAYVELLEECKLRIPAWFGFTSKDGVNVVSGDSLIECASIADSCKEVAAVGINCTPPRFIHELVLSIRKVTSKPILIYPNSGESYDPIRKEWVECSGISNEDFVSYVKKWHEAGASLIGGCCRTSPDTIRGISKALHGV

SEQ ID NO: 35286 - protein, 567 aa, Oryza sativa
MASSHIILPPDDDDEEQRRLEEEEDEDPWARSGPPPAAPEHAMKAALPFSATCVRISRDSYPNLRALRNASSVSLADAAYVKISEGDFGYVLDDVPHLVDHLPDAPTYPNPLQDHPAYSTVKQYFVNEDDTVPQKVVVQKNSRRGVHFRRAGPRQKVYFESDEVKACIVTCGGLCPGLNTVIRELVCGLAHMYNVSKIYGIQNGYKGFYSSNYLTLTPKSVDDIHKRGGTVLGTSRGGHDTKKIVDNIQDRGINQVYIIGGDGTQKGAYEIFKEIRKRGLKVSVAGIPKTIDNDIAIIDKSFGFDTAVEEAQRAIDSAHVEVCSAENGIGLVKLMGRYSGFIAMYATLASRDVDCCLIPESPFYMDGEGGLLQYVERRLKENKHMVIVVAEGAGQDLIAKSLSTSEQQDASGNKLLLDIGLWLTHKIKDHFKSKKMEMTIKYIDPTYMIRAIPSNASDNVYCTLLAHSAIHGAMAGYSFTVGNVNGRHAYIPFYRVTSTRNKVKITDRMWARLLSSTNQPSFLSQKDIDEAKENDRTANKPPLPTGLSHHVANSFDQSASSSSNSQI

SEQ ID NO: 35287 - protein, 365 aa, Oryza sativa
MKSLCCNLRNEIFTDIEIHNQHILPSFVDAKELFHLYIVLWIEDKRRTLLENCRMDKVKWSGVRTQHMTTPFVDEMYDLLKNTLTEYEVIICRWPEYIFVLENAIADIEKAVIESLEKQYGDVLAPLKDCIAPKKFGLKYVQKLTKRNSVGPYTVPEDLGILLNTMKRLLDVLRPRIESHLKSWSSCMPNGGNSAAIGERLSEVTVTLRAKFRNYMQAVVEKLSENTRMQNTTKLKKIIQDSKELVMESDIRSRMQALKDQLVEAINHVHKVTEVHVFVAICRGFWDRMGQDVLSFLENRKENRAWYKGARVAVSVLDDTFASQMQQLLGNSIQQKELEPPRSIMEVRSILCKDAPRQKNSSFYY

SEQ ID NO: 35288 - protein, 516 aa, Oryza sativa
MSPFEHGEVFVLDDGGEVDLDLGNYERFLDVTLTRDNNITTGKIYQSVIEKERKGDYLGKTVQVVPHVTDEIKQWIQSVSSVPVDGQTRPADVCVIELGGTVGDIESMPFIEALRQLSFSLGKDNFCLIHVSLVPVLGVVGEQKTKPTQHSVRELRALGLTPDLLACRSAQPLIGSVKEKLSQFCHVPVENILNIHDVPNLWHVPLILRNQKVHEAIIKQLNLGRSAGPPELRDWTQMAESYDDLKNSVKIALVGKYTNLTDSYLSVVKALLHASVACSLKPSIQWIAASDLEDATATSAPDAHAKAWETLKGSSCILIPGGFGDRGISGMILAAKYARENKVPYLGICLGMQISVIEMSRNVLGLKDADSEEFNSETPFRVVMYMPEVSKTHMGNTMRLGCRRTFFRRTDCLTSKLYGSPEHVDERHRHRYEVNPSFVAMLENAGLHFVGCDESGKRMEVVELQDHPFYIGVQFHPEFKSRPRRPSPPFTGLILAAAEYMGTPANNSNGHVGTSE

SEQ ID NO: 35289 - protein, 932 aa, Oryza sativa
MREMLASLSSSSRAAISCIPLCLLFLTLASSNGVFAAAPPKVGSGYKLVSLVEHPEGGALVGYLQVKQRTSTYGPDIPLLRLYVKHETKDRIRVQITDADKPRWEVPYNLLQREPAPPVTGGRITGVPFAAGEYPGEELVFTYGRDPFWFAVHRKSSREALFNTSCGALVFKDQYIEASTSLPRDAALYGLGENTQPGGIRLRPNDPYTIYTTDISAINLNTDLYGSHPVYVDLRSRSGHGVAHAVLLLNSNGMDVFYRGTSLTYKVIGGLLDFYLFSGPTPLAVVDQYTSMIGRPAPMPYWAFGFHQCRWGYKNLSVVEGVVEGYRNAQIPLDVIWNDDDHMDAAKDFTLDPVNYPRPKLLEFLDKIHAQGMKYIVLIDPGIAVNNTYGVYQRGMQGDVFIKLDGKPYLAQVWPGPVYFPDFLNPNGVSWWIDEVRRFHDLVPVDGLWIDMNEASNFCTGKCEIPTTHLCPLPNTTTPWVCCLDCKNLTNTRWDEPPYKINASGQTARLGFNTIATSATHYNGILEYNAHSLYGFSQAIATHQALQGLQGKRPFILTRSTFVGSGAYAAHWTGDNKGTWENLRYSISTMLNFGIFGMPMVGADICGFYPQPTEELCNRWIELGAFYPFSRDHANFASPRQELYVWESVAKSARNALGMRYRLLPYLYTLNYQAHLTGAPVARPVFFSFPDFTPCYGLSTQYLLGASVMVSPVLEQGATSVSAMFPPGSWYNLFDTTKVVVSRGEGAVKLDAPLNEINVHVFQNTILPMQRGGTISKEARATPFTLVVAFPFGATEAEAEGAVYVDDDERPEMVLAEGQATYVRFYATVRGKAVTVRSEVELGSYSLQKGLLIEKLSVLGLEGTGRDLAVHVDGANATAIATSRPYFAGAEAELHGHRDVEGHKKSVMVEVGGLALPLGKSFTMTWNMQIEA

SEQ ID NO: 35290 - protein, 373 aa, Oryza sativa
MVSGGGVAAENGEMVGNGEGRKGAGASVLVTGGAGYIGTHTVLRLLEKGFAVTVVDNFHNSVPEALDRVRLIAGAALSARLDFIAGDLKSKDDMEKVFAAKRYDAVIHFAGLKAVGESVAHPQMYYENNVAGTMNLYSAMTKYGCKKIVFSSSATVYGQPEKTPCVEDSKLSALNPYGTTKLVLENYFRQVQAADPEMRVILLRYFNPIGAHRSGDIGEDPRGIPNNLLPYIQQVAVGRRPELNVYGVDYPTRDGTAIRDYIHVVDLADGHIAALEKLFATPDIGCVAYNLGTGCGTTVLEVVKAFEEASGKKIPIKICPRRPGDCTEVYASTDKAKKELGWSARFGIEDMCRDQWNWAKKNPYGYSANAEQN

SEQ ID NO: 35291 - protein, 343 aa, Oryza sativa
MASSSSAAALWTAAPHPHGSCIRIHAIFHQRHQRRGRRPVVVASSVRPLQAASLAVATAPVAVASRRTAAEKTFYLGTQLMTPERRKAVWAIYVWCRRTDELVDGPNSSYITPKALDRWEKRLEDLFEGRPYDMYDAALSDTVSKFPVDIQPFKDMIEGMRLDLWKSRYRSFDELYLYCYYVAGTVGLMTVPVMGIAPDSKASTESVYNAALALGIANQLTNILRDVGEDSRRGRIYLPLDELAEAGLTEEDIFRGKVTDKWRKFMKGQILRARLFFDEAEKGVAHLDSASRWPVLASLWLYRQILDAIEANDYNNFTKRAYVNKAKKLLSLPVAYARAAVAS

SEQ ID NO: 35292 - protein, 162 aa, Oryza sativa
MKVTAIESGIEGRVVIVASNSYKHPYREGIRFDKINDESGYNKIFAYGQSKLANILHSNLLSSNLKEQDAKVTVNSLHPGAVVTNIMRHWYFVNGMLSTLGKFFVKGVEQGAATVCYVALHPQVAGVTGKYFVDCNVTELKSHALDMGLAKRLWDFSLNLIH

SEQ ID NO: 35293 - protein, 246 aa, Oryza sativa
MHVKEPLDIFMSHDWPLGITEYGNWQKLIREKRFFEEEVNKRTLGSEPAARLLNKLKPPYWFSAHLHCKFPAVIQHGEGGPTTKFLALDKCLPRRGFLQVIDIPSGPGPHEIQYDEEWLAITRKFNNVFSLTRMPFTMLDEQVDTQDDLQWVRNKLNARGAKPIDFVQTAASYDPSCQASNPSITVHCRNPQTESFLQLLNLPYLLDSSNSYGVSRNESSSQTGQALDSDDIELPDDEDDPADDDD

SEQ ID NO: 35294 - protein, 243 aa, Oryza sativa
MSGSGSSSSSGSTGMSYGSSGAGSFSGSSSGSNSNAGSMSGANSGAGSSSSAYGASGSGSNSMSDSGSSSGSVSASGSGSSNSGAGSGSSSSSWSGSNSGSGTMSGIDAPSSTGTSSTAESNSGSATSVTGANSGSYSSAWSNSNSNSGSTMPSGIGVASNAGSSSGSWSNAGSNTGTLSGAGSSNWSSSTSGSTSSSGLGGGQGVGSRFGSGAQPTFGMGGGGGFGAGYGFGAGAGGWGKHH

SEQ ID NO: 35295 - protein, 826 aa, Oryza sativa
MSSKAVPSLVSTGRSAHTERTRLNDWASKLMEIGEKMSVMVVNDGESISYRSDSQGSTDNPLYDILTKLIHKTRPAHRSKKTKISFVAKDVAIKKLSDDSEVQVVESLSIRDSQLERNEGSCASSDGGNDDYTEDSVHENRATEAEYINDRQAPIKLEKGPANYCDNNEKHLESSDTEVEEEHKTKASDVSLDLQEDISVDMHSSNAPKNFCKINKEDLDCSDTKMEEQEHKTEASDTSADLQEEVSTDVHSSNEVGHILHKHKDEETVREALDILEPDGTNVNFNQQKSGSANQQDAVFSVLGQESRRIEDAIYEDNLFILDEGSEESDSKYPVHAALSSSSSLVGDNTYYTEQETPSIPDEHFAGSLFFSDGGYRLLQTLTGGSRMPSLVIIDPIQQKHYVFPDEIEFTYPSLANFLDHFMNRSLSPYYRSALSVISSKELLRPPFINRDFHEADSIPQLTTSNFCMLVFGFEGCVSKSELPFSNTENISSAWKKDVLVLFSNSWCGFCQRTELVVREVYRSFKNFLSSNSQFLQAQDLQIEEKEEESTMKGFPAIYLIDCTSNECHHLLKSVGKEERYPTLLFFPAENKSAISYERGISVSNLFEFLESHASNSPHLLEYKGFLWKKKTVVQGDAPQAIQFDNSDKISNDVGSHSPSHSERNEARVLTGSVLTATSKLGSAVPFDNSQVLIVSADSREGFHGLIINKRLSWDTFKNLDGSMEPIKHAPLFYGGPVVVQGYYLVSLSRVAFDGYLQVIPGVYYGNVAATAQVTRRIKSGEQSAENLWFFLGFSNWEYSQLFDELSEGAWQVSEEPIEHLVWPEN

SEQ ID NO: 35296 - protein, 462 aa, Oryza sativa
MDMPPTPLPPETANTSPAPNGATAGIRVENCYVFKSRLQEYAQKTGLQTPEYHTFKEGPSHEPVFKSTVVINNTSYDSLPGFFNRKAAEQSAAEVALMEIVKSIPANANIPAVQETGLCNTGSQQLNLREMHHHLLATLARHRRLAAAATLFSSTLRTARALNSLLAAICSSPAFLRFAPKVLLLAAPSVSPDATTFHILTSTLCQAHRPAAAADLLCCMPSLLLDPDPASCRAVLSSLCQYASAQDAVAFLDKMCHWGISPSRSDYHAVFEALLQEGKVVEAYEVMKNKMGSNRVAPALAYFKLTMQAFSKCLEFDSVEEVFDEMLLRGLVPDVDVYNVYIGALCRKGDLARARQMMTCMEHAGCPPDVRTFGVVVAGCMSAGDMGTVRELVQEATRRGLQWDPPALSELIGLLQAGGGATQAQELLLEPLFVHDAPVLGQLIGALCKQGLLGPATVVDDY

SEQ ID NO: 35297 - protein, 337 aa, Oryza sativa
MVAITAPSSIEHIPLVRCPKGANAGPQAVIPCIDLSAPGAAAAVADACRTLGFFKATNHGVPAGLADALESSAMAFFALPHQEKLDMSGPARPLGYGSKSIGSNGDVGWLEYLLLSAGAASSGGAALPAALRAAVEAYTGAVRGVGCRVMELMAEGLGLGASEEGRCVLRRMVVGCEGSDEMLRVNHYPPCLLPPGRDRDECGVTGFGEHTDPQIISVLRSNCTAGLQILLRGDYSSPARWVPVPPDPDSFFVNVGDSLQVLTNGRFRSVIYFGGPAASQRIAPLEQVMREGEQSLYREFTWGEYKKAAYKTRLGDNRLGPYELQHAAANDEAATKK

SEQ ID NO: 35298 - protein, 365 aa, Oryza sativa
MESSSPSVPFPLLQAPVESTYRACTIPYRFASDNPRKATPVEIQWIDLFLNSVPSFRQRAENDPTVPDAPAKAEKFAQRYTAMLEELKKNPESNGGPPDCILLCRLRELVLRELGFRDIFKKVKDEENAKAMSLFEGVVQRNDEIEDDGKRAENLIRGILAGNIFDLGSAQLAEVFAKDGMSFLASCQNLVSRPWVIDDLDAFQNKWTKKSWEKAVIFVDNSGADIILGILPFARELLRHGTKVILAANDMPSINDVTYPELVEIINKLKDENGKLAGVDASDLLVANSGNDLPVIDLSSVSPELAYLANDADLVVLEGMGRAIETNLYAQMKCDSIKIGMVKHPEVAQFLGGRLYDCVFKFNEA

SEQ ID NO: 35299 - protein, 412 aa, Oryza sativa
MVGAVSFFLGGAVNAAAANVAMLIAGRLLLGVGIGFGNQAVPLYLSEIAPYNIRGAVNQLFQLTTCLGILVADVINYFTDKIHPWGWRLSLGLAMGPATAIFVGALFLPETPNSLVEMGRLEEARRVLEKVRGTRKVDAEFEDLREASEAARAVRGTFRSLLAARNRPQLIIGALGIPAFQQLSGMNSILFYSPVIFQSLGFGNSAALYSSIITGSMLVVGALVSMVVVDRLGRRFLFIEAGIQMISSMVVVAVILALKFGHGEELSKGVGTVLVVAICLFVVAYGWSWGPLGWLVPSELFPLEMRSAGQSVVVCVNLFWTAAVAQCFLAAMCHLRWGVFILFAALIVVMSIFVILLLPETKQVPIEEIWMLFDKHWYWKRIVRKDPKYQGHHHHQMAAMPTAAAKSGSSEV

SEQ ID NO: 35300 - protein, 588 aa, Oryza sativa
MISGHDFYTVMAAVVPLYVAMFLAYGSVRWWGIFTPDQCSGINRFVAIFAVPLLSFHFISTNDPYAMNLRFLAADTLQKLLVLAGLAAWSRLPSRTGAPRLDWSITLFSLSTLPNTLVMGIPLLIAMYGPYSGSLMVQIVVLQCIIWYTLMLFLFEFRAARMLIADQFPDTAASIVSLHVDPDVVSLEGGHAETEAEVAADGRLHVTVRRSSVSRRSLLVTPRPSNLTGAEIYSLSSSRNPTPRGSNFNHADFFAMVGGGPPPPTPAAVRGSSFGASELYSLQSSRGPTPRQSNFDEHSARPPKPPATTTGALNHDAKELHMFVWSSSASPVSEVSGLPVFSGGGGGALDVGAKEIHMVIPADLPQNNGSGKEHEEYGAVALGGGGGGENFSSTAELHPKVVDVDGPNAGGGAAGAGQYQMPPASVMTRLILIMVWRKLIRNPNTYSSLLGLAWSLVAFRWHVSMPAIVEKSISILSDAGLGMAMFSLGLFMALQPSIIACGKSAAVVSMAVRFLAGPAVMAAASIAIGLRGTLLHVAIVQAALPQGIVPFVFAKEYNVHPAILSTAVIFGMLIALPITLLYYILLGL

SEQ ID NO: 35301 - protein, 340 aa, Oryza sativa
MQGEHHDHVPVYESGTEVFQKLQEKWNSTKHKRYRAMYSSVVGGIILDPSMMVIPIDDHMVHRGHGVFDTAMLSDGYLYELDSHLDRLLLSASKAKISSPFSRETLRAILVQMTAASKCRNGSIKYWLSAGPGDFLLSPKGCTAPAFYAVVIASATAAAAGGHPRLREGVRAITSTVPMKDPFFAAMKSVNYLANALAMAEAEERGAYASVWVDGDGGVAEGPMMNVAFVTGGGDLVVPAFDRVLSGCTARRLLALAPRLVDAGVLRSVGAARISAADARRCAEMMFVGSGLPLLPIVEWDGQPVGDGQVGKIALALSDMLCEDIKAGLDRVLVPYDQAS

SEQ ID NO: 35302 - protein, 207 aa, Oryza sativa
MAVQNGGGDGSGSGAASVVVNVYDLTPMNNYLYWFGLGIFHSGIEVHGVEYGFGAHEFPTSGVFEVEPKNCPGFVYRRSVRMGTTGMSRAEFRSFIEKLTGKYNGNSYHLISKNCNHFTDDVSKNLTGKPIPGWVNRLARVGSFFNYLLPKSIQVSAVRHVPTHPAFSDDDMDSRSCSISGDSDVDELDQHLLSATTIELHSIEHQS

SEQ ID NO: 35303 - protein, 577 aa, Oryza sativa
MAASNTTKKGGGGGGPAIGIDLGTTYSCVAVRRRYRSEAITNDQGNRITPSCVAFTAADRFVGDAAENQAALNPTNTIFEVKRLIGRRFSDKSVQEDIKLWPFKVIAGRDDRPTIVVRHEGKEKQFVPEEISAMVLSKLRDAAVAYLGEPVTDAVITVPVYFNNAQREATLDAATIAGLNVMRIINEPSAAALAYGLDKMPPASGGAGRMVLIFDLGGGTLDVSLLNIGRPGNNNSSDSGSFEFEVKAVAGDTHLGGADFNNAIVKHCINEFIRKHGVAAEGIWSNQKAIRRLRTACERAKRMLSFTTLASIEVDSLHDGIDFCGKMSRSRFEELNKELFGKCVKAVKKCLEDAKMDKNAVDDVVLVGGSSRIPKLQSMIHDFFDEKKLRRNVNPDEAVAYGAAIQASVLNGDADEADDKKQVMILRDITPLSLGIEVGLDHTMSVVIPRNTFIPTKNVRRYSTIFDNQIAVSINVFEGESASILRNNLLGKFVLSGILPAPRGVPQIDVTFEFDANGVLHVSAKDMGTGSKNNIAITNHSGRLKKEDVERMAREARSYNRTRSSLAITSGNLVIFQ

SEQ ID NO: 35304 - protein, 250 aa, Oryza sativa
MNGSRQMELHYINTGFPYTITESFMDFFEGLTYAHADFAIADAFHDQANPYWAMMHTNSYKYGYSGAGNYYSYGHVYDMNDYMHRADGGRRIWDNATPVNNTESPNVVLQGGETPHANTSSTTEECIQQQVHQNSSSPQVIWQDNIDPDNMTYEELLDLGEAVGTQSRGLSQERISLLPVTKYKCGFFSRKKTRRERCVICQMEYRRGNLQMTLPCKHVYHASCVTRWLSINKVCPVCFAEVPGDEPKRQ

SEQ ID NO: 35305 - protein, 197 aa, Oryza sativa
MYTTFFLFFYTNSNSTLNVSLWAEQASAFEADAIHKAGKSEPQIILFVGTLAKNYPGIGLALSGGSACKWYINIDVPAIVELKDKTGTNFQPINWIEAPARAAVEEVAENKTVRELLEINPHKCKKVRFQAHVTVRRICNDKCWWYGSCQRCFKVAKPYGSTYKCTSCSNIAVAVPRYRIVVIAGDDSDDAMFVLFG

SEQ ID NO: 35306 - protein, 317 aa, Oryza sativa
MATAGASSFEDEIMESDIELEGEAVEPDNDPPQKMGDPSVEVSDEKRDQAQLCKNKGVDAFSEGKLDEAIEHLTEAIVLNPTSAIAYATRAVIFVKSKKPNAAIRDADAALKINPDSAKGYKSRGMAKAMLGKWEEAAQDLRMAAKLDYDEEIGAELKKVEPNVLKIEEHRKKYERLRKERDIKKAEMEKQRKHAEEVSAASAALKDGDVIAIHSSSELDTKLKAASSLSRLVVLYFTAAWCGPCRFIGPVCKSLAEKHRNVVFLKVDIDELNSVAYRWNVSSVPSFFFVRNGKEIDKVVGADKNGLERKVAQHGSS

SEQ ID NO: 35307 - protein, 224 aa, Oryza sativa
MPKSIIQAAAQVMGQQGARHESPASYRQPTSYTTRQSWSSNSVHAGNEVSFSILTHGIHLKFVRLYHRHHLASLKLKVSWVLDASFISFLCSSIHVEVIVRVEHRLSVRLWSAGILLVFLRFNDDFHGNHWLSPVKPPTYLRLNSKAQLVPNPWRQPEGSLAGQMGSTFEEALGCNRRGNAADLRRLYSLLLLYQMIWKFASIIQSLPFRKMVLNVCCYQFLAR

SEQ ID NO: 35308 - protein, 223 aa, Oryza sativa
MQVLDHPNVACLKHYFCSTTAKEELYLNLVLEYVPETVHRVIRHYNKMSQRMPLIYVKLYMYQICRALAYIHNCVGVCHRDIKPQNILVNPHNHQLKLCDFGSAKVLVKGEPNISYICSRYYRAPELIFGATEYTTAIDVWSAGCVLAELLLGQPVFPGDSGVDQLVEIIKVLGTPTREEIKHMNPNYTEFKFPQIKAHPWHKILCLGFCSTHHTSGAVHWRC

SEQ ID NO: 35309 - protein, 394 aa, Oryza sativa
MAMPYASLSPAVADHRSSPAAATASLLPFCRSTPLSAGGGGVAMGEDAPMTARWPPAAAARLPPFTAAQYEELEQQALIYKYLVAGVPVPPDLVLPIRRGLDSLAARFYNHPALGYGPYFGKKLDPEPGRCRRTDGKKWRCSKEAAPDSKYCERHMHRGRNRSRKPVETQLVAQSQPPSSVVGSAAAPLAAASNGSSFQNHSLYPAIAGSNGGGGGRNMPSSFGSALGSQLHMDNAAPYAAVGGGTGKDLRYTAYGTRSLADEQSQLITEAINTSIENPWRLLPSQNSPFPLSSYSQLGALSDLGQNTPSSLSKVQRQPLSFFGNDYAAVDSVKQENQTLRPFFDEWPKGRDSWSDLADENANLSSFSGTQLSISIPMASSDFSAASSRSTNGD

SEQ ID NO: 35310 - protein, 147 aa, Oryza sativa
MGASKDKASEAKDRASEAAGHAAGKGQDTKEATKEKAQAAKERASETAQAAKDKTSSTSQAARDKAAESKDQTGGFLGEKTEQAKQKAAETAGAAKQKTAETAQYTKDSAIAGKDKTGSVLQQVHTGLKAILPPFFFFFAGSRGTVR

SEQ ID NO: 35311 - protein, 423 aa, Oryza sativa
MADRKKCKAAAVATTDGGGEDRISALPDEVLQRALSFLPSRDVVRTCVLSRRWRHQWKSVPALRIYAFDDCRDVQHLSDFVTNFLLRRNRLALHECDITCFDEGDGCEVFGENARQWIRYAVSCQVRVLRVSVEAHTRLFGAPLKAQRLKRLELFSVELGAFSLDFSSCRELEELELGGCIIKDKVKQILSESLRRLRIEGCDFFRNRTRISCPNLISLEITDFTLYTPVLMSMPSLASAFIRFGEHCADSCDCYYYGEFGPDYTGCHHSTVKGNGTVLLNGLSDAIQLELISGAGVFIFRRDFRCCPTFNKLKTLLLNEWCMAADSSALIYFLQHSPVLEKLTLQLRKSQRTMVKRGSTNKNQNEKFLVSKHLKLVEIKYCEDEMVQQVLHVLSACGIPSEKIIIQRISSWASGGFSFEQRK

SEQ ID NO: 35312 - protein, 56 aa, Oryza sativa
MAKATRKDYDEVCGALCRPEEGQVCERWPYSVQDCLPASECVILGGGDKTLHAAFQ

SEQ ID NO: 35313 - protein, 337 aa, Oryza sativa
MEEAKMGDVATIRAVLAILQWWGFNVTVIIMNKWIFQKLEFKFPLTVSCVHFICSSIGAYIAIKILKMKPLIEVAPEDRWRRIFPMSFVFCINIVLGNVSLRYIPVSFMQTIKSFTPATTVILQWLVWRKYFEWRIWASLVPIVGGIMLTSITELSFNMFGFCAAMVGCLATSTKTILAESLLHGYKFDSINTVYYMAPFATMILSVPAIVLEGSGVINWLYTYDSIVPALIIITTSGVLAFCLNFSIFYVIHSTTAVTFNVAGNLKVAVAVLVSWMIFRNPISAMNAVGCAITLVGCTFYGYVRHLISQQSVNSSPRTPRSRMEMLPLVGDKQEKI

SEQ ID NO: 35314 - protein, 440 aa, Oryza sativa
MGKQMAALCGFLLVALLWLTPDVAHAQTQILFQGFNWDSWKKQGGWYNMLKDQVGDIASAGVTHVWLPPPTHSVSPQGYMPGQLYDLNASKYGTKAELKSLIAAFHAKGIKCVADIVVNHRCADDKDGRGVYCIFKGGGPRGCLDWGPSMICCDDTQYSDGTGHRDTGADFAAAPDIDHLNPLVQRELSDWLRWLRRDVGFDGWRLDFAKGYSAAVARTYVQNARPSFVVAEIWNSLSYDGDGKPAANQDGQRQELVNWVKQVGGPATAFDFTTKGILQSAVQGELWRMRDKDGKAPGMIGWYPEKAVTFVDNHDTGSTQRMWPFPSDKVILGYAYILTHPGVPCIFYDHVFDWNLKQEINALAATRKRNGINAGSKLRVLAAESDMYVAMVDERVITKIGPRIDVGNIIPSDFHIVAHGNDYCVWEKSGLRVPEPEGRR

SEQ ID NO: 35315 - protein, 157 aa, Oryza sativa
MHEWAGYPLRSRRWSVEAPEPGQLIYNDSCNEVMSVGGVWHPSAVGEPQAVPVLSRPPSQPCCPMPRLEHGKDRRLLHHHHRTCQRRGRRRRTSGGDPRPRRPAGTEAARATGGAQARAQQWSSASPPHRPVRPRCIRAGRRVRSPEQIHIHIVTEY

SEQ ID NO: 35316 - protein, 538 aa, Oryza sativa
MAGELKVLNALDSAKTQWYHFTAIVIAGMGFFTDAYDLFSISLVTKLLGRIYYFNPASKSPGSLPPNVSAAVNGVAFCGTLAGQLFFGWLGDKMGRKKVYGMTLMLMVICCLASGLSFGSSAKGVMATLCFFRFWLGFGIGGDYPLSATIMSEYANKRTRGAFIAAVFAMQGFGNLTGGIVAIIVSAAFKSRFDAPAYRDDRTGSTVPQADYAWRIVLMFGAIPALLTYYWRMKMPETARYTALVAKNAKQAAADMTQVLNVEIVEEQEKADEVARREQFGLFSRQFLRRHGRHLLGTTVCWFVLDIAFYSSNLFQKDIYTAVQWLPKADTMSALEEMFKISRAQTLVALCGTIPGYWFTVFFIDIIGRFVIQLGGFFFMTAFMLGLAVPYHHWTTPGNHIGFVVMYAFTFFFANFGPNSTTFIVPAEIFPARLRSTCHGISAAAGKAGAIVGSFGFLYAAQSTDASKTDAGYPPGIGVRNSLFFLAGCNVIGFFFTFLVPESKGKSLEELSGENEDDDDVPEAPATADHRTAPAPPA

SEQ ID NO: 35317 - protein, 195 aa, Oryza sativa
MVSSKIHCAMAALLLAILLPVSHASGRYVAPAPAPVPVPPPPRTSPPSRIQPVVVVQGTIYCKSCNLSGYNRYMDASPLPNATAQLVCYGDKVLNMTSTATDKNGYFLVMVYRLDVFRRSRCRVYLGSSPSPLCAAPFIPSNKWLGLTLERERVASLPKGVRGVYRPKSTLMFGPGTGGKCPAAAAADAAGVPMM

SEQ ID NO: 35318 - protein, 636 aa, Oryza sativa
MLRSVPAARHRWLPWNGLARGSSRTPHCHAAAAAVSSWHVHDSSSPCASSWSWASQVGDRIQLRPFSAAPAIVGDGIEDVDDRRVKQMRRRRDARIAQKAFMEYLHVTRGICFSDAEHMSKRSPIFISKLLEKVKDAAKEPTEEGEEVPFRSKVKKREMRDERVSKALVRLFNFHPINEFEPFFESIGIAPGEYEPLLPRDLMFLNDDETMLDNFRVLCNYGIARTKIGRIYRDATEVFSFGHGVLASKLKALEDQGLSKTSVIKLVMSSPVILVRDPNVELKILRWLDDVGIQRDWLGRFLSVKKSYNWGKMVQVPQFFSDLGFTNEGIGKLVRQNPDFLFSGSGKMLFSAVLVMLKAGFGKKELVDLFLNFPNLSVDNFTRNLRRGIFFLAEIGVSEEDIKKFVVSNGSILGSVQLKKPNSIMTHLSVGKKRLCRMVMEDPQLLMKFSLGAKVSRIPKVDLHEASFKEKVKFLQNLGFMEGSERMTRGLKAFRGKGDELKDRYDFLVKTGLDPEHVVQMITMAPHVLNQKIHVLESKISFLVNDMGYPLSTLVIFPSFLSFTVERTKLRFLMYNWLLEKGVIATGLALSTLLATADKHFVKRYVVRHPMGLEVWEKFKTEVASTKNNTPCTPDD

SEQ ID NO: 35319 - protein, 834 aa, Oryza sativa
MAYGLDHSEWLEVKYINNHALFVGYLSMAVKGVGFLVGLWTTVVLLGGFVSMLEKKDFWSLTIITLVQTAGVFDVLLNEKLRHAVNSVDGFLVTMDMVFRCEDEEFDSGIQLWRSRAGRLVTFIQAVVFAIILCPLAVLYLSGLVISTSLSLWRLIQHDYGDGDGSANLTPALNVLYSLALFQGVLFFYQWVSYFAGKRLIEKVASKYWQNSKEAGGAGARAGAWRKLVKVYMKKTKIRCEKDPSFLEEWNLVTFAVELMKPESKSSDYVSGAMILDTILGQKDLTAQHALIRKLVGSASSRKVMKKLLRSLRSASQYNRNIRVHAARIVSRLAGEISLASFPEALSCISSLLDTTTTEQQEQQQQDGDSAPSAHYRDLMVLGRVILQKLAAADEHNLFLIGKKQSTISKAMLPVRKDLLHIHNNGHVDAWKDIVTESLQLMSQLVSAPGKTGDDLRSHILTIHKDDIRVNNIIICKQCQSNKKLHMQAINIFTQQQHPMEALSTTSSNIDTTYSETNIRLLVDIFLTNKDASTRKMAVGILAILLSDQNKSNANANATIIFKASDTVVRDLKTVLLDDEETEYRICAAEILEHLHRTKEASYLKKLMEAMQNVLPKILNEIFISLSPPKQGEKQAEKAEKGTDGTKTDPDIEEGAGAVASKDNVDVNDQKEDIGKKKKDRTRKLHAALLSLSVAIFEKRIRDGKDLDTLAGEIARGDSASSFVGKLRTMVDQNSEQTVNCLRILKIATRMIISLLKLEGCYPKQELENLMVSLSKASEQMFELEALMMLSSSDHTGKKTESFGSLVKEAEGLMKNKKEKNVATTPASTMNGNQ

SEQ ID NO: 35320 - protein, 886 aa, Oryza sativa
MEPNPPPPPAAATATYRRRGKPKPKPKRKAAKPPSPSPPPKRQARDDPPHTGPLTRHSPLNPAPEDAPPQLHAGERDPPPRAWIEPAKLPPVSEEVQAVLSRGAGVHVVPSFAGWFSWKEIHQIEKQALPSFFDGISLRRTPEIYLGIRNFIMKKFHSNPQMHLELKDLSELSDGEMDAQLKVLEFLSHWGLINFHPFPPAVQGVSELVESITNADTEEKISVVDKLFQFETLQSYLIPAPNQAEVTAPIHTPSLLSEPTLTEDSITQAESSVEYHCNSCSVDCSRKRYHCRTQADFDLCCDCYDKGNLDAGMSQTDFIIMESAEIPGFGGTSWTDQETLLLLEALEIFQAKWGDIAEHVATKSKAQCMLHFLKMPIMDPFLHDGDVNEISQETAEQVSAEQGTSRVTEKMEVEDKTKEIKTNDRKTAAKPKLNLTETEVNLDDNVVANNDTKSSGDINVDVCSNTGVSNRSSDTEPTKKETSGENTSNIVNDVLKYAFEAVGHIPKIEGLGSFTEAGNPVMALVAFLSGLVDHDDVTTLCCSSLKAISDMSPALQLATMHCFILQDPPNDLKDPPVSISFANTDCGQQKDKDATSNPSVTDNDDNLKEESALSVEEPNTTSTSSKNTRKLSNAKESKDESPQVEPKPSSANDCDNPISQVAKRASDNIRGHSSTVLPVSLNNTNEPCSISSQEASAGNTKDTSHTEHIEGDKPIYEDPPLEGKVELNKIEHEVTDLSAVQQHESIQTSLKKGYIQDHNSIKKTVADDVSVQRLQRAAASAISAAAVKSKLLAKHEEYQIQRLAALVIDKQLHKMQAKMSVFTEADNLVLRAREHTERTRKKLLMERSAIIASRMAASPPRPNHQPGMPGSRLPVGYGVNQHLRRS

SEQ ID NO: 35321 - protein, 369 aa, Oryza sativa
MGKGGKGAEAAAAAVAGAGEEENMAAWLVAKNTLKIMPFKLPPVGPYDVRVRMKAVGICGSDVHYLREMRIAHFVVKEPMVIGHECAGVIEEVGSGVTHLAVGDRVALEPGISCWRCRHCKGGRYNLCEDMKFFATPPVHGSLANQIVHPGDLCFKLPENVSLEEGAMCEPLSVGVHACRRADVGPETGVLIMGAGPIGLVTLLAARAFGATRVVIVDVDEHRLSVARSLGADAAVRVSARAEDVGEEVERIRAAMGGDIDVSLDCAGFSKTVATALEATRGGGKVCLVGMGHNEMTVPLTSAAIREVDVVGIFRYKDTWPLCIEFLRSGKIDVKPLITHRFGFSQEDVEEAFEVSARGRDAIKVMFNL

SEQ ID NO: 35322 - protein, 139 aa, Oryza sativa
MAHLLQLPDLAAARPPAARRRIAAAAVVVAEARGGVKQQQQQVAVGRVIRVADPVREGRLLLLPPPLFSVPVTPSESPAAARRREEDEEERRRYYLNMGYAIRTLREELPDVFSKEPSFDIYRLVLSCFDLRRRFLILN

SEQ ID NO: 35323 - protein, 415 aa, Oryza sativa
MKGGCLQRPLVSKLCLGFAALLTALIVIMSLEEAPVLTIFSSTPEKLKVLSQGFLQQQEQEHLEDSTARQNENCNYAKGKWVADKKRPLYSGNECKQWLSKMWACRMMQRADFSYENFRWQPHGCQMPEFTGPNILKRLRHKTLAFVGDSLGRQQFQSMMCIATGGKYSPEVEDVGWKYGLVKAPGALRPDGWAYWFPGTNSTILFYWSASLSELELLNTTDSVTSYALHLDRPVTFLKKYLHSFDVLVLNTGHHWNRGKFNGNHWELYADGKPVGKGRLADLNRAKNLTLYSIARWVDSELVRYPQVKAFLRTISPRHFVNGDWNTGGSCGNTVPLSNGSEVLQDHSSDLPVESAVNGTRVKILDITAVSQLRDEGHISNSTFKGRASTGINDCLHWCLPGIPDMWNELLFAQI

SEQ ID NO: 35324 - protein, 369 aa, Oryza sativa
MPLAESPQWRQKATNFFSSSSFKLKQAGQSAGDNIADVAGKVGSVVKSRWAVFQEARQRQPPPGETVQERFISAAATTGVLLRKGISETKEKVAVGKVKVEEAAKKTADKSKTILNNIERWQKGVASTDVFGVPIEATVQREQSGKAVPLVLVRCADYLVISGLSNEYLFKSEGEKKVLQQLVSLYNEDSGAPFPDGVNPIDVAALIKCYLASIPEPLTTFSLYDELRDARVSIADLRNILKKLPNVNYMTLEFVTALLLRVSRKSSLNKMDSRSLAVEFAPLIMWQQGDSGTDLRNHLRFTLKAPPKIVDTTSNTTEWDLLDEDDVDASSQIPLDDASPPDYSSIEVIQSLIEHHNAIFTDANETVWR

SEQ ID NO: 35325 - protein, 638 aa, Oryza sativa
MQVLLLPLLVAAAVGLARAAATDDPFLSGAPGNHSYNIDCGGAADFVSVFGRRWLADQFFSAGGQAGMVAEPHRFPQPQERTLRFFPPSSAGKSSCYSLPLPPGRYYLRLFSVYDNYDSKLRTPSFDVSAAATLVLSFRSPWPEPASRYGAYSDLIFPSATSPTSDICFYSLSTDAPVVASIEVAPVHPLAYDGATTGADLILVNYGRLTCGNNLFGPGFTNDSDAFSRVWQSDIDFRNNDLNYDAITAGGRKIFGSNQPPNYFPTKLYTSAITTGGDASNEIEYLMPVDTRMSYMVWLHFAEIDAGIGSAGQRVFDVMLAGKNVTRIDIFKQVGGFTAFKWTYIVENLTSSTMSVKLVPVVGRPILCGLENYAMVPLETRTVPNQVAAMKALKDSLKIPARMGWNGDPCAPRTWDAWEGVTCLRKDKGLVITQLDLASQGLKGYITDEISHLTDLVSLNLSYNSLTGSLPPGLGQPSLATLDLSSNQFTGGIPGTIGSSKLQTALLNNNQLDGQVPERLYSIGVHGGVIDLSGNKGLCGVPTLPACALFWEKGGLNRTGKIALGASLGFVLLVTLIVVYILCIRRGPYDYDFEFPQDLTSISAISAKRNRYQRAKSVMLAEMEAHGPDGYYTNGGAH

SEQ ID NO: 35326 - protein, 299 aa, Oryza sativa
MTVSFHKFGDYFPGTGDIRDIGYSEGKYYCLNVPLDDGIDDDSYQSIFKPIISKVMEMYRPGAVVLQCGADSLSGDRLGCFNLSGKGHAECVKFMRSFNVPLLLLGGGGYTIRNVARCWCYETGVALGEELREKLPYNEYYEYFGPEYSLYVAASNMENRNTNKQLEEIKCNILDNLSKLQHAPSVQFEERIPETKLPEPDEDQDDPDERHDPDSDMLLDDHKPMGHSARSLIHNIGVKREITETETKDQHGKRLTTEHKVPEPMADDLGSSKQVPTADANSMAINAPGNAKNEPGSSL

SEQ ID NO: 35327 - protein, 90 aa, Oryza sativa
MKSLSKGGEEKNFWKVERLLFLVQLGISFFSKVREVFLWNSERDVYVCTKCAFYHFRFYFSKHRNIFDGFANVFIKGEIVKSKVFFIIIL

SEQ ID NO: 35328 - protein, 439 aa, Oryza sativa
MRVLPLALAAAIFSGVTAILVYLSGLSSYGGARVSDADLAALGALQSGFSKCVDANGLGLKAIPGEDYCRVVIQYPSDTDSKWKDPKTGEPEGLSFEFNLCEAVASWEQVRNSTTILTKEYIDALPNGWEEYAWRRINKGIHLNKCQNRTLCMEKLSLVLPETPPYVPRQFGRCAVVGNSGDLLKTKFGDEIDSYDVVIRENGAPIQNYTEYVGTKSTFRLLNRGSAKALDKVVELDETKKEALIVKTTIHDIMNQMIREIPITNPVYLMLGTSFGSSAKGTGLKALEFALSMCDSVDMYGFTVDPGYKEWTRYFSESRKGHTPLHGRAYYQMMECLGLVKIHSPMRGDPGRVVKWAPTKDTIEAARVASEKLLKRPGAGSEGPLSSCTMIKKREKGKTPKRSVVRHAALKHLEYMRGATRYPLERNAGGGYLCMINER

SEQ ID NO: 35329 - protein, 236 aa, Oryza sativa
MARNKKKVAVAAPKARKPKRDAEEKKFAKKADMTEFRAQLDSLGLKIIEVSADGNCFFRAMGDQLEGNEEEHMKYRAMIVQYIKEHRVDFEPFIEDEEPFEKYCDSMLEDGTWAGHMELQAASILKRKNICIHMLNSPRWYIRNFSDREATSMIHLSYHQGEHYNSVRLREDPCQGPAMPVIIKADANVASTSNNAQTKAKAKQLRNTTVHILKRESQKPRNALVDLLGSTSLLVI

SEQ ID NO: 35330 - protein, 535 aa, Oryza sativa
MGMEVAAARLGALYTTSDYASVVSINLFVALLCACIVLGHLLEENRWVNESITALIIGLCTGVVILLMTKGKSSHLFVFSEDLFFIYLLPPIIFNAGFQVKKKQFFRNFMTITLFGAVGTMISFFTISIAAIAIFSRMNIGTLDVGDFLAIGAIFSATDSVCTLQVLNQDETPFLYSLVFGEGVVNDATSIVLFNALQNFDLVHIDAAVVLKFLGNFFYLFLSSTFLGVFAGLLSAYIIKKLYIGRHSTDREVALMMLMAYLSYMLAELLDLSGILTVFFCGIVMSHYTWHNVTESSRVTTKHAFATLSFIAETFLFLYVGMDALDIEKWEFASDRPGKSIGISSILLGLVLIGRAAFVFPLSFLSNLTKKAPNEKITWRQQVVIWWAGLMRGAVSIALAYNKFTRSGHTQLHGNAIMITSTITVVLFSTMVFGMMTKPLIRLLLPASGHPVTSEPSSPKSLHSPLLTSMQGSDLESTTNIVRPSSLRMLLTKPTHTVHYYWRKFDDALMRPMFGGRGFVPFSPGSPTEQSHGGR

SEQ ID NO: 35331 - protein, 234 aa, Oryza sativa; identical to SEQ ID NO: 30935

SEQ ID NO: 35332 - protein, 421 aa, Oryza sativa
MTRSRNVRQRSKKKRVHALEVATERWKVLTKVLAVVDALKKEEEHVTPLKRLEILRPQLGLTKPNKVAHFVSRSPQLFEVCRDSRGVMWAGLSPQAEALIEEEARLLEDHSRTAAEYVTRLLMMSVDRRLAIDKIAHFRRDMGLPHDFKTRWVHMFPEQFRVVRLEDGDYLELVSWNPNWAVTELEKKTAALTGDANANGIGSPPGELSLSFPMKFPPNFTSYYKFYGKVHHYVKKGNTEQFQKTTYLYPYSEARGLTPGSPEFDKRAVAVMHEVLNFTLEKRLVIDHLTYFCREFVMPQKLMRLLLKHYGIFYVYERGKRFSVFLTKSYDGTKLIEKCPLVRWKEKVLQLTSYRGRIKNLGKFAELFDSEDYLFGNDDSSSATDSILDVKSEDSDDIMDDGALADDTEMDVGDLSDCCIE

SEQ ID NO: 35333 - protein, 547 aa, Oryza sativa
MSMATPTQELITKDLHGSEWRFKHIYRGQPRRHLLTTGWSTFVTSKKLISGDAFVYLRSETGEQRVGVRRLVQKQSTMPASVISSQSMHLGVLASASHAIKTNSIFLVYYRPRLSQSQYIVSVNKYLAASKVGFNVGMRFKMSFEGEDVPVKKFSGTIVGEGDLSLQWSGSEWKSLKVQWDEVTNVNGPERVSPWEIETCDGTAPAINVPLQSATKNKRPREPSETIDLQSLEPAQEFWLSGMPQQHEKTGIGSSEPNCISGHQVVWPGEHPGYGAVSSSVCQNPLVLESWLKDFNSSNKGVSPTLSEISQKIFQVTSNEARIATWPARSAYQAEEPTSKLSSNTAACGYRTEEVAPNASKVVEGKKEPAMFRLFGVDLMKCTSISTTTDDKSSVGAGEASAKGTGSHEDSGQLSAFSKVTKEHIAADESPQEIQSHQNYTARTRIKVQMHGNAVGRAVDLANLDGYEQLMNELEEMFNIKDLKQKWKVAFTDDEGDTMEVGDDPWLEFCQMVRKIVLYPIEDEKKIEPHPKLLSSANPEQDQKTGF

SEQ ID NO: 35334 - protein, 354 aa, Oryza sativa
MQQLMHSPGNIKKMAKDFVHQCQICLQAKPDRNRYPGLLQPLPVPEGAWQIISMDFIEGLPRSFRYDCILVIVDKFSKYAHFLPLSHPYTAIDVAKLFMVNVYKLHGLPQTIISDRDRVFTSQLWEQLFKGAGTQLHMSTAYHPQSDGQTERVNQCLEIYLKSFVHATPTKWFSWLHLAEFWYKTSYHSSLSSSPFDVLYGHPPRHFGISSADCAIPDLAVWLKERNLMQALIKQHLNRAQQKMKHMADKKRSFRSFAVGDWVYLKLQPYVQSLVAPRANHKLSFKYFGPFMFSRSWVQWLTGCSFLNPVLYILYSMFLSSRVLRISNHQCCPTCLALTKTCNSQLVSWIPVLT

SEQ ID NO: 35335 - protein, 616 aa, Oryza sativa
MASDGDGAAAVAALGISGGGGDDWAPPLRRNLPLLAPHEVKLAKLLLSEGQSHLFEHWPEPGVDDDKKRNFFDQVCRLNSSYPGGLASYIQNARKLLADSKAGKNPYDGFSPSVPSGEVLTFGDDNFVSLEEAGVKEARHAAFVLVAGGLGERLGYKGIKVALPRETTTGKCFLQHYIESILALQEASCKLVEGECNTKIPFVIMTSDDTNALTVKLLESNSYFGMEPSQVHILKQEKVACLADNDARLALDPNDKYKIQTKPHGHGDVHALLYSSGLLEQWKSTGRKWVLFFQDTNGLLFNAIPSALGVSATKGYNVNSLAVPRKAKEAIGGITKLTHVDGRTMVINVEYNQLDPLLRATGHPDGDANCETGYSPYPGNINQLILEIGPYMEELQKTHGAISEFVNPKYTDSTKTAFKSSTRLECMMQDYPKTLPPSAKVGFTVMDAWLTYAPVKNNPEDSAKVPKGNPYHSATSGEMAIYRANSLILRKAGAQIADPVIDTFNGQEVEVWPRITWIPRWGLIFKDVKAKVHSNSSVSQRSALVINGKNITIQGLSLDGTLIVNAKDEAKFNVTGHIENKGWTIQHVDHKDTSEKEEIRIRGFKFNKVEQLELNY

SEQ ID NO: 35336 - protein, 566 aa, Oryza sativa
MAEVAATQHGHAVAARAMPGRGEVDTSSPFESVRQAVDLFGGGALSPWRHHHPPPPPPPPPLQLRPEEVELMKVEEQTVKLEMELFVKEKETFKVLKELQATKQVADNLKLQLEKAASESAASARGHSDAGKVYPLPDTERKCSYHTGQPVESAKGNQSALTTLIKLNQAKAFLNMDTVMTIKRQIEEEKGSLEKTRERLQLNRAKASSLEADLNKIVSQLQAARGPKPTLEPSDIWLQMKQLNSEKEKHRKIADDSKNEIGELTATIEHTKSRTKTLQFRIVMAEKLKEASRRGEALALAERKNLSNGEHEASTASDVTLSVEEHSVLVQKAEEADAACRKKIDAAMQELDQANRGKLELLERVEEAMAAVETSRKALEEALKREESTNKAKLVAEESLRKLRSEQIIQNWRPTGNSSVKFKTSAATTAAVVAHRRAGSGIYDVNGLSLVTATPKSTKAMSIGQILSMKLDHRELEVAGKGGDAKKKVSLGQILSQKYDALSPLRIDHGGASRRQFHPRRRKLGFVVYALLLAKHRHRKKRQPAAAAAADSSSCTHGSFSTKAVY

SEQ ID NO: 35337 - protein, 458 aa, Oryza sativa
MAAVEAEKVVAELRERCATPASLLRDVAAAMAGEMGAGLEKEGGSRVKMLLSYVDKLPTGREDGLFYGLDLGGTNFRVLKVHLGGSKKHVVNSESREVSIPPHLMSGTSSELFGFIAGELGKFVAEEEEGTDMPNGKKKELGFTFSFPVRQRSVASGTLVKWTKAFSIDDAVGEDVVAELQTAMVKQGLDMHVAALINDAVGTLAGARYYDEDVVAGVIFGTGTNAAYVEKANAIPKWEGELPNSGDMVINMEWGNFYSSHLPVTEYDEALDKESLNPGEQIYEKLTSGMYLGEIVRRVLLKLSLQSGIFGSIDNSKLKTCFHLRTPHISAMHHDETPDLKIVAEKLHQILEITHTSLEIRKMVVEICDIVARRAARLAAAGVAGILMKLGRNGGINNQRSVIAIDGGLFEHYTKFRECLESTLGELLGEEASKSVAVKHANDGSGIGAALIAASQSR

SEQ ID NO: 35338 - protein, 459 aa, Oryza sativa
MGSLSSLAAAAVFLSLLAVGHCAAADFNATDADADFAGNGVDFNSSDAAVYWGPWTKARATWYGQPNGAGPDDNGGACGFKHTNQYPFMSMTSCGNQPLFKDGKGCGSCYKIRCTKDQSCSGRSETVIITDMNYYPVAPFHFDLSGTAFGRLAKPGLNDKLRHSGIIDIEFTRVPCEFPGLKIGFHVEEYSNPVYFAVLVEYEDGDGDVVQVDLMESKTAHGPPTGRWTPMRESWGSIWRLDTNHRLQAPFSIRIRNESGKTLVANNVIPAYWRPVAAAPAASGKPVTAPAAATATNAASRRLYNTEGAPLRRYDVVDESGTDSGDEYDATDDGRRLTVPFFFSASDVLDPFGAPTSLGRRRGAPQGLDARAGEGAREGVGGAEQPGDQGRGGEGPGGRRRRRAAALHPPHRAPRRRVQNGQDQGGDEERRAQGGRAQAQGGGAQGRLPGQCRVGGPTK

SEQ ID NO: 35339 - protein, 418 aa, Oryza sativa
MAVQSAERGVEAPPLTLSIFEFNSKVMQDELQKLALKVNHHEENIRFLKSELNAVEDSCADLGIKIGNYYSSMAAIANNDTSVEEAEQRTIQSILKQDETAAGIICQLKIRHYQHASKLPLMKDVLGVVATLGKINNDNLSRVLSEYLGLDNMLGVVCKTYDGVEGLETYDKEGMVDKTSGIHGLGRTIGKFLDGRFTVFCLENIRPFSGDFMIDDPQRKLLLHKPRLPSGEFPPGFLGFAVNMIHLDQANLSCLTAGGHGLRETLFYSLFSQLQVYKTRAELRNAIPLINDGAVSLDGSILRPNGSFCLGNRASLGIQFPVTANLGVSNLPVTITELEEQVKHKNWEKERLLEDIKRQEDLLNQVKDLFSKKKEQFMAYITQPGMLQRASQASPTIPSPATPGSNPFGSRPPHLRGR

SEQ ID NO: 35340 - protein, 176 aa, Oryza sativa
MPPHYGFAETFVRADGAFIPFADDFDISTVTTVVRGVGDIGDVKVIDLQCPLNSLIGRQVCKVGRSSGHTTGTVMAYALEYNDEKGICFFTDILVVGENRQTFDLEGDSGSLIILTSQDGEKPRPIGIIWGGTANRGRLKLTSDHGPENWTSGVDLGRLLDRLELDIIITNESLQG

SEQ ID NO: 35341 - protein, 361 aa, Oryza sativa
MAAAGGLEQWQKDGFFQAAEEVQESADLMESIYRTWMRERDSGANLEELSDLQRELKTALGTAKWQLEQFERAISMSNDKYSLEEGTLARRRQFVVAMEDQISQVEKQINDYSIDNDRRGLNWVKLDDEERDDLVAFLSAPAQLSQDTKKRDNTYHSPSKQKNALIGANDPRDMAAISKDRHKTEALCREISNGQSEACCLAEQLNGHSTSPSSGGEHWKIDISDDKDDDRKLSPNKVEASSQATAFSGIMKTTESFTRVRWLRNSLWKAKSDEHLPLRYDMPNHLDWRVITLLAQRFNGLTERSRSCFSGWKENSRVSGRMGGLHIQGPQYNTQFGRSIRITLLLVLSIFLIVPFLVYSA

SEQ ID NO: 35342 - protein, 386 aa, Oryza sativa
MASGKMENGQQQQQQEVRRRRNGEVVVDGSEILQLVENKEAFGKFVEQKFRLLDADGDGRLSVRELQPAVADIGAAIGLPARGSSAQADHIYSEVLNEFTKGKKESVSKSEFQRVLSDILLGMAAGLKRDPIVILRINGEDLNEFVESPRYEPEMAAIFSQVESGNSTLQQCMLAAIRQLTVDHGMPPASDSWVMENIIEPALQELHGDNLEQPVTQEVFFQEFRKFLAILTQRLQGHPVIVAHTENTFDGNGIKKLLSNKLELDKLLDCVWRGVPKEKDRTAKQYIRVAFDRMADSINLPPYGAVEQVDAVVDEAFKMAKAEDGKAVDETEFKKLLTEILGAVMLQLDGNPISVSTNSVLHEPMSTSSTLLSPSPPSPMVSSPSE

SEQ ID NO: 35343 - protein, 424 aa, Oryza sativa
MGCGASIPKKCKVGGKGKKRRSVIQEVAIFVPTIRIPVDSDVAHPLRGLVSKELVDRLSKFRDRVVALSEDIYCADVSDVSELQHALEEYLPVVLGLTMKESRLESSVEFRWRTLDDDEECCLSSAWYEVLSVIHMMAMLALFEANLILIPKNGQVGGERKVSEDAKKDVVDSLLRASGCLDYCVHRILVQMPAQVKKSFPSYFQEGMLEAISIQALAQCVEIQLGLASECEKATLSVKRRLACELVSYFSQAHYCLSGCDTSDSFGKKLLLFLKWKCMEAKAVAYYYHGLVLDKGNEASSHISAVCCLSAADDLVADSKRACLSFCLANPITRVPPPWGIMRNMHKKIPDSACKRFQMYGYLFEQDNNSALQSLPDLPEFALSLRPEGYELPSTDSIWDNVDSQPQIQSLKEHLDDEDEVETK

SEQ ID NO: 35344 - protein, 513 aa, Oryza sativa
MGMKFLNKKGWHTGSLRNIERVWVAEEKEKEEQRKIQELKKQQDEEREKAAFRKLQEDAGLKPRQERLDFLYESGLAVGKGSSEGFQALQPSAPAAAAAASSSAQASAGSSKAAAPGALFEDKPQSANDAWRKLHTDPLLLIRQREQDAIARIKNNPIKMAEIKKSVEAEKKQKEEKKEKRKHKKRHHHKSKSKRHHSSENSDSEESDGRDERRKSVQASEHKREEKRSRHDKKDHGQDSEDDERRKRRHATSEDDEPRKSQKEKKGQREDSEDDKPKKSRKDRRRHDSEDEEPRRKHQRSEDDEPKRRQSEVSGDDEPRRRRQEMPKHDEYSRRGRSDADDRRGRHYTPSDDRRGRHYTPSDHNSAYPKHDSSDSRHRRPEYGRGNSTSELGSEGQRRQESQQGRNGPTFNRRRGVQHMSEEEREARLRQMQADAEVHEEQRWSRLKKAADDDAKEAASVNANQFRGKNFLEEEKKSIFGTEKGGSATIEESIRRRAYYSQRNAHESNAFRR

SEQ ID NO: 35345 - protein, 368 aa, Oryza sativa
MVSVIALPHSGYGGSDLLDVGGGEKVVGARNLSLTLQKLYIWEKKLYDEVKAEEKMRLLLAKNSKRLKFLDQKGAEAPKIDATRNLVRKLSTKIRIAVRVIAKVSKKINRVRDEELWPQVNTLIQGFVKMWQDKLNCYHIQCQAISEAKNLDSIISGGTSRDLAMELELELIKWIVNFSSWVNEQRSFIKALNGWLALCLNYQQEETADGVPPYSPGRVGAPLVFVICNSWSQAMDRISEKEVITSMQALVSSVRSLWEKQNVEQTEQLIAIREREKWNKILERKTLEINKEADTLNRKLALVPGRQSLLPTAQTYQVHFLEANSVQVSLKRVLEALESYSSNSLRALDETLRHAEEERLSRERAKVS

SEQ ID NO: 35346 - protein, 174 aa, Oryza sativa
MDAATQGALEAGKPVGGFKIGKEAGEWTTSNFHPYLPSESYLTCRFFSARKHGLVDAAVRNCPTDRTAIIALPGGIGTLDELFEMMALIQLERIGSTLPVPFLLLNYDSYYSKLLDFLNDCEEWGTVAPGEVASLWKVCNGNHEALEYLAQFYNVPLAERNYCISPQLKQQATS

SEQ ID NO: 35347 - protein, 315 aa, Oryza sativa
MAAVTLGTETDGSILCPASLNSVVGIKPTVGLTSRAGVVPISPRQDSVGPICRTVSDAVHVLDAIVGYDALDAEATGAASKYIPNGGYGQFLRMDGFKGKRIGIPNGFFTQEIFEKKQLRAYQKHIQLMRKHGAMVIENIDIAKNLTEVQNVLFSNEHIAMIAEFKLSLNAYLSDLLYSPVRSLADVIAFNKAHPVEERLKDFGQPYFIEAEKTNGIGPVEKASIQHLNKLSADGLEKLMRMHQLDAIVTPNDNGRVFFAVSGMPAITVPAGYDSQGVPFGTCFGGLKGYEPRLIEMAYAYEQATKVRMMPGFKM

SEQ ID NO: 35348 - protein, 578 aa, Oryza sativa
MAYMCADSGNLMAIAQQVIQQQQQQQQQQQRHHHHHHLPPPPPPQSMAPHHHQQKHHHHHQQMPAMPQAPPSSHGQIPGQLAYGGGAAWPAGEHFFADAFGASAGDAVFSDLAAAADFDSDGWMESLIGDAPFQDSDLERLIFTTPPPPVPSPPPTHAAATATATAATAAPRPEAAPALLPQPAAATPVACSSPSPSSADASCSAPILQSLLSCSRAAATDPGLAAAELASVRAAATDAGDPSERLAFYFADALSRRLACGTGAPPSAEPDARFASDELTLCYKTLNDACPYSKFAHLTANQAILEATGAATKIHIVDFGIVQGIQWAALLQALATRPEGKPTRIRITGVPSPLLGPQPAASLAATNTRLRDFAKLLGVDFEFVPLLRPVHELNKSDFLVEPDEAVAVNFMLQLYHLLGDSDELVRRVLRLAKSLSPAVVTLGEYEVSLNRAGFVDRFANALSYYRSLFESLDVAMTRDSPERVRVERWMFGERIQRAVGPEEGADRTERMAGSSEWQTLMEWCGFEPVPLSNYARSQADLLLWNYDSKYKYSLVELPPAFLSLAWEKRPLLTVSAWR

SEQ ID NO: 35349 - protein, 92 aa, Oryza sativa
MSISRSQGKRGIRRASDSTNSGQYLMLILPSFGNQHLFSLLHRKLGILLSLGQSSTVKLVRLGKTLESSTFQSSNSGIVLINSPSKHGNPTT

SEQ ID NO: 35350 - protein, 689 aa, Oryza sativa
MSSAVKDQLHQMSTTCDSLLLELNVIWDEVGEPDTTRDRMLLELEQECLEVYRRKVDQANRSRAQLRKAIAEGEAELAGICSAMGEPPVHVRQSNQKLHGLREELNAIVPYLEEMKKKKVERWNQFVHVIEQIKKISSEIRPADFVPFKVPVDQSDLSLRKLDELTKDLESLQKEKSDRLKQVIEHLNSLHSLCEVLGIDFKQTVYEVHPSLDEAEGSKNLSNTTIERLAAAANRLREMKIQRMQKLQDFASSMLELWNLMDTPLEEQQMFQNITCNIAASEQEITEPNTLSTDFLNYVESEVLRLEQLKASKMKDLVLKKKAELEEHRRRAHLVGEEGYAEEFSIEAIEAGAIDPSLVLEQIEAHIATVKEEAFSRKDILEKVERWQNACEEEAWLEDYNKDDNRYNAGRGAHLTLKRAEKARTLVNKIPGMVDVLRTKIAAWKNERGKEDFTYDGVSLSSMLDEYMFVRQEKEQEKKRQRDQKKLQDQLKAEQEALYGSKPSPSKPLSTKKAPRHSMGGANRRLSLGGATMQPPKTDILHSKSVRAAKKTEEIGTLSPSSRGLDIAGLPIKKLSFNASTLRETETPRKPFAQITPGNSVSSTPVRPITNNTEDDENRTPKTFTALNPKTPMTVTAPMQMAMTPSLANKVSATPVSLVYDKPEVTLQEDIDYSFEERRLAIYLARQMV

SEQ ID NO: 35351 - protein, 421 aa, Oryza sativa
MEEASVTGELLEQEAPSSSISGVDWSQLPADLLVCIFGVLEVPDVFSSGVVCRAWHASFLEARRLGICSSNPGPCLVFSSGDRDPSVVTLHSLTTGKNYYVTMPDPPFRTRYIVGSSHGWLITADERSNLLLVNPATQAQIPMPPPETIANVRIRCNGEGVPHGYDLFKLDMSSQDFDTETEPNDLSWEEGRFYFYKRVVLTADPSSRNCTVMILHLLDDFLSYARVGDNHWTWIDVDELCCCYHDVLYKDDDRLFSAIRATGDVHAIDTNGPSPMLRVVLDTKNSLINNTKYIVLSESGDLQVWRYYKHVNNDRRTRELIVYKVDLGEQKLAELKDFDGRALFIGFNSSFFLRVEDFPMLAPNSVYCTDDSMEYIYCVRFGFREVGAFHLDDSSFTDQLIGSRLNWPSPIWFWPSFTKVN

SEQ ID NO: 35352 - protein, 564 aa, Oryza sativa
MVNQEIISDMMLTNGQANTSACGTSMNEGYAMLSTKKFGKQKMALSRRYNPVRKARGGLLSVQQLHTKKIMPSELKRGKMRLIHALQDMNDPSDNIQLKGNSTSPSREIICALSVSSQCNTPSPLGKQIKAFDFVSREADSGSNTKFLILKKFARKKGSKESDSPHNSLDATSTVQPIRRKKAAGRLKGSSVERQLEGETHIQQQLNKALEDNLNANEVTNQELLPLTPPGFESVVNGKRSRDWNTDGFSEVNLNSSLFDEELTATINSICQDNHNRDAESDNVATEVAEISHLMEKSMLPLDCSVGHEVGGKVGQGSIQLHIGNSGSLPCTSDNAILRRCSFGGNSMVSDISKCQLTGQQAPFTKRSHVWSLFEEMDVFRKMPQQPHFLPLKHHPLGLREGTALGLMWSYTDAVDNISKLCITDSMEIFEDHIKTLTILEENGFSVQSLQQILTKLLQIRSDYTNSLRDGEKLKEQIADKAFAVSRVDALLDENDSAIAKLEQELGKLRWKGQKMSKKKEDEDAELSRLKAENNNAEEAHGDAKRQFDSIRAELRQHLAIDSQ

SEQ ID NO: 35353 - protein, 365 aa, Oryza sativa
MCGGAIIHHLKGHPEGSRRATEGLLWPEKKKPRWGGGGRRHFGGFVEEDDEDFEADFEEFEVDSGDSDLELGEEDDDDVVEIKPAAFKRALSRDNLSTITTAGFDGPAAKSAKRKRKNQFRGIRQRPWGKWAAEIRDPRKGVRVWLGTFNSAEEAARAYDAEARRIRGKKAKVNFPEAPTTAQKRRAGSTTAKAPKSSVEQKPTVKPAFNNLANANAFVYPSANFTSNKPFVQPDNMPFVPAMNSAAPIEDPIINSDQGSNSFGCSDFGWENDTKTPDITSIAPISTIAEVDESAFIKSSTNPMVPPVMENSAVDLPDLEPYMRFLLDDGAGDSIDSLLNLDGSQDVVSNMDLWSFDDMPVSDFY

SEQ ID NO: 35354 - protein, 609 aa, Oryza sativa
MVMAQKTKEAEITEQDSLLLTRNLLRIAIYNISYIRGLFPEKYFNDKSVPALEMKIKKLMPMDTESRRLIDWMEKGVYDALQKKYLKTLLFCICEKEEGPMIEEYAFSFSYPNTSGDEVAMNLSRTGSKKNSATFKSNAAEVTPDQMRSSACKMIRTLVSLMRTLDQMPEERTILMKLLYYDDVTPEDYEPPFFKCCADNEAINIWNKNPLKMEVGNVNSKHLVLALKVKSVLDPCDDNNVNSEDDNMSLDNESDQDNDFSDTEVRPSEAERYIVAPNDGTCKGQNGTISEDDTQDPVHEEELTAQVREWICSRDTESLEVSDVLVNFPDISMEMVEDIMERLLKDGLLSRAKKDSYSVNKIADPTTPHIKKEVIMQNVSPTEGTKNSNGDLMYMKALYHALPMDYVSVGKLHGKLDGEASQNMVRKLIEKMVQDGYVKNSANRRLGKAVIHSEVTNRKLLEIKKILEVDIAEQMAIDTNAEPGEPERKDHLSGHEMRDGSTMGCLQSVGSDLTRTRELPEPQQNVSMQSGQEASTVDKDPSRTPTSVREASVCSLESGVLGQKVRKSLAGAGGTQCSQDKRFRKASTVKEPILQYVKRQKSQVQVQVQ

SEQ ID NO: 35355 - protein, 423 aa, Oryza sativa
MCVYCNAGIFGGVRDSTWSSMRNMVIPLYQPARLAGLIPTMQSYVDALVDNIAGCPDQDCIPFCQLSLCMAIDIIGKTAFGIEFGLSRKAADTAAGDDGDGDDDDDVKEFLREYKKSMEFIKMDLSSSLSTILGLFLPCVQTPCKRLLRRVPGTADYKMDQNERRLCRRIDAIIAGRRRDRDAGDGAALDFIAALLDARESGGGGHGGFALEDRHVRALAYEHLIAGTKTTAFTVSSVVYLVSCHPRVEERLLREIDGFAPRGRVPGADELHAGLPYLNQVIKEAMRFHLVSPLIARETSEPVEIAGHLLPKGTYVWLAPGVLARDAAQFPEPEEFRPERFAAGAAEGRARHPYAHIPFGIGPRACVGHRFALQQVKLAAVGLYRRYVFRHSPAMESPLQFDFDLVLAFRHGVKLRAIKRTNT

SEQ ID NO: 35356 - protein, 289 aa, Oryza sativa
MSHFGRSGPPDIRDTFSLLVLNISFRTTADDLFPLFDRYGKVVDVFIPRDRRTGDSRGFAFVRYKYAEEAQKAIDRLDGRNVDGRNIMVQFAKYGPNAEPIRKGRIIEEVEKSRDRSRSRSPRRRHRDDHRDRERRGRSRSRSRERHGRDRDRDHRRHSRSRSRSRSRSRSRSLSPDYKNRRRGRDDDKRRSKSKSKSKSRSKSRSRSKSRSKSRSRSRSRSRSRSFHSASPTRHSASPPLKGSTPRRSPARNGSPEKETNGKGSPPSRSVSPSPQRAGSRSPGSDDKE

SEQ ID NO: 35357 - protein, 71 aa, Oryza sativa
MGLGQYLPSFGHIPSVFLGATFCFVAGLALLGSVLKITIRGGTSVPSTSSALRIAHWSTSARWSTSVHVGA

SEQ ID NO: 35358 - protein, 576 aa, Oryza sativa
MQRAHSYCNIWFICNGKLTCVREASCCPVKRSKSARLPSSVDSCKVDLQSLLEPNIEAKRLGCMYINEMELRKETEAKLSQEKEESESLKHATMVLQNDLDWLKYQLNEKANRLQDLNQQKHLLEHRISESDSVATYLEESMKVTESRVQSLKLEYSKMKRERDDAVKEARSMRIEKELTNSCAYGAISSEFSLMELEQATQNFSNALNIGQGGFGSVYKGSLRNTTVAIKMLSTDSLHGQSQFHQEVAILSRVRHPNLVTLIGACTEASALVYELLPNGSLEDRLNCVDNTPPLTWQVRIQIITEICSALIFLHKHRPHPVVHGDLKPGNILLDANLQSKLSDFGISRLLLESSVTGSDAHYTSRPMGTPAYMDPEFFATGELTPQSDTYSFGVTIMRLLTGRAPLRLIRTVREALNDYDLQSVLDHSAGDWPLVHVEQLAHIALQCTELSKQRRPDLEHDVWEVIEPMKKEAHLPLSQSFRSICSAIETATPSYFLCPISQVTMRDPQMAADGFTYEADAIRDWLDKGHDRSPVTNQTLANCDTIPNIALRSAIQEYLKQNNMNKSFALYEQQH

SEQ ID NO: 35359 - protein, 173 aa, Oryza sativa
MGVGYPLDIVVCSALGADMYDCVYPTRTARFGTALVPEGVLKLKQNAMATDERPIDPTCPCMVCKNYTRAYLHCLVTKDAMGSQLLSYHNLSFMMRLSRDLHMSILEGRFPEFVRGFLRMQFPKGDVPKWVRNAMVVAGIDISECCTPAKYPRDAMDAPGTDIPELLPPTKCS

SEQ ID NO: 35360 - protein, 178 aa, Oryza sativa
MAPSSPRRDLDGEGTGGGSSAAREKERPRSFDEKTRSACWRKAAVVMGRHPERWRQDAAGNVVCRRFWSCHGCLCYEYDHIVPFSKGGESTVDNCQILQTRVNRSKSDKAWIEQAEMQGFSCDIKFTDKELDVIEMAVYGDVIRPGKQCRCRTVAEMLGKVKSKNQMAACELPHNDAS

SEQ ID NO: 35361 - protein, 345 aa, Oryza sativa
MEAEKKPPAVSDVGAWAMNVVSSVGIIMANKQLMSSSGYAFSFATTLTGFHFTVTALVGWISNATGYSVSKHVPLWELVWFSLVANTSITGMNLSLMLNSVGFYQISKLSMIPVVCLMEWVLNSKHYTTKVISAVVVVAAGVGICTVTDVEVNAKGFICACVAVFCTSLQQITIGSFQKKYNIGSFELLSKTAPIQAVSLIILGPFADYYLNGRWLLNYNFSTGATFFILLSCSLAVFCNMSQYLCIGRFSATSFQVLGHMKTVCVLILGWILFDSALTVKNILGMLLAVMGMVVYSWAVETEKKASAPIPRNKSDMLDDSEDVPLKARVSGLPSSDLEEGEMKS

SEQ ID NO: 35362 - protein, 194 aa, Oryza sativa
MAPWLGGFLTLDLWVAGEWVDRSGRAHGLRRAQGVHRLPHHQDSALARRPLRPQGEMRSDLLLLLFPFSICAFFSPGFSVVDPPDLCFFFCFDPVAVQRVRDPVPEEETGGAGARRRRGRRGAAGEEEEQEGERGGGDHGAPHGGVREGGGPEAAAADAAEETPRRGGEGGHPPHGPLLRSHLRLNHHPTYLPT

SEQ ID NO: 35363 - protein, 371 aa, Oryza sativa
MFMKKFESFDNIIVRIDGLPKIDRLMSLEAFVKLPGNHFVEPRTLFATGSSLTVASGTRVGRIIATGALQEILKAHASRNSWNGSFKRKNILVRNGCYSEISMPFHAEFSRDSMLNDYIAYFDEVISLFELKGVGCPAFFPWMRKSLLRFMPAPSPSFCDEFRHFQCFAMAQFALKRPVVRIGFLSNLYRLRRCANRQVRKTLLAILRSLSLRSDWRVIVLLHSHPILVKVYLFNKKKDKEGNGGGKTKEGNGENSKDQKGGEKTNDADYKMAKLTKYDNSANHLVIYTRHVIEHGMDPAQLESDDEVLEDEMYQLDDESIEMLSELDLLYSHYLELNDMLEELFYSGMMTKELWQVFEEILDVHNMVEPL

SEQ ID NO: 35364 - protein, 319 aa, Oryza sativa
MRMRESNEEEKKSVCVMDASGPLGHALVARLLRRGYTVHAATYPHHHHHPEEEYQQHPRLKLFRADPLDYHAIADAVHGCSGLFAIFNTPSSSQSQSHSCFLDEEEGMVEAEVRAAHNILEACAQTDTMERVVFNSSVTAVVWRPQPEEDDDAALQLDENTWSDLTFCRRFKLWHALAKTLSERTAWALAMDRGVDMVAINAGLLTGPGLTAGHPYLKGAPDMYDHGVLVTVDVDFLADAHIAAYECPTAYGRYLCFNNAICRPEDAAKLAQMLISSAAAPRPPAPPSDELKVIPQRIHTKKLNKLMLDFTSGVYGDIN

SEQ ID NO: 35365 - protein, 315 aa, Oryza sativa
MGGKAALLMALVAISVVLEARADAGGYGGGYTPTPTPVKPAPKPEKPPKEHKPPHHHEPKPEKPPKEHKPPAYTPPKPTPTPPTYTPTPKPTPPPYTPKPTPPAHTPTPPTYTPTPTPPKPTPPTYKPQPKPTPAPYTPTPTPPTYKPQPKPTPPPTYKPQPKPTPTPYTPTPTPPSYKPQPKPTPTPYTPTPTPPSYKPQPKPTPTPYTPTPTPPSYKPQPKPNPPPTYKPQPKPNPPPTYKPAPPTYKPQPKPNPPPTYKPQPKPTPTPYTPPTYKPQPKPTPTPTPYTPTPKPNPPPTYKPQPKPTPTPPPY

SEQ ID NO: 35366 - protein, 332 aa, Oryza sativa
MSSRMAGSAILRHVGGVRLFTASATSPAAAAAAAARPFLAGGEAVPGVWGLRLMSTSSVASTEAAAKAEAKKADAEKEVVVNSYWGIEQSKKLVREDGTEWKWSCFRPWETYTADTSIDLTKHHVPKTLLDKIAYWTVKSLRFPTDIFFQRRYGCRAMMLETVAAVPGMVGGMLLHLRSLRRFEQSGGWIRTLLEEAENERMHLMTFMEVANPKWYERALVITVQGVFFNAYFLGYLLSPKFAHRVVGYLEEEAIHSYTEFLKDLEAGKIDNVPAPAIAIDYWRLPANATLKDVVTVVRADEAHHRDVNHFASDIHYQGMELKQTPAPIGYH

SEQ ID NO: 35367 - protein, 88 aa, Oryza sativa
MGKTWAIITLLEMVAEPVLYWIPVWYPVKVLFVAWLVLPQFKGASFIYKKLVREQLRKYRARGGAAATVTAGEDHKVHIAKAEHDHGH

SEQ ID NO: 35368 - protein, 85 aa, Oryza sativa
MRKETRASTGAEARRRDGNGTEARRTLTYGGRRSAVACELLIADGRKRRPPQPAIHPSIFWSYSNTAHQPAVVRWFDSSPPLLAE

SEQ ID NO: 35369 - protein, 75 aa, Oryza sativa
MGEEAVVMEAPRPKSPPRYPDLCGRRRMQLEVQILSREITFLKDELHFLEGAQPVSRSGCIKELLMSSYITCQDK

SEQ ID NO: 35370 - protein, 342 aa, Oryza sativa
MGVVGWRVRSMVQHLGWNCRRGLSSAAVQSQLENVGFIGLGNMGAHMARNLVMAGYKVTVHDVNENTMKKFSDDGIPTKLSPLEVSKSSDVVITMLPSSAHVLDVYNGRNGLLANGGCLGPWLYIDSSTVDPQTSRKISMDISRCTLKEKKAYAEKPMMLDAPVSGGVPAAEAGKLTFMVGGSEEAYLAAKPLLLSMGKKTIYCGGAGNGSVAKICNNMAMAISMLGVSEAFALGQNLGIKASVLTDIFNCSSARCWSSDTYNPVPGVMMDVPSSRNYDGGFTSKLMTKDLDLAMASASGVGFNCPFGSQALEIYRKLCADGCELKDFSCAFRHNYAGKDEN

SEQ ID NO: 35371 - protein, 103 aa, Oryza sativa
MTMKPNEVLVLVLVLAVVTSPGTVCGASRTAPAAATKCDPLALRPCAAAILWGEAPSTACCAGLRAQKRCLCRYAKNPDLRKYINSQNSRKVAAACSVPAPRC

SEQ ID NO: 35372 - protein, 52 aa, Oryza sativa
MRASARASSSSSPSRCSTRTWCRASTRCHPRARGRCSRRCRSPSASSGACCS

SEQ ID NO: 35373 - protein, 434 aa, Oryza sativa
MACSFHFVPLLLLLTLLLLISSASRTAALPSMRSSSEDTASNATAAARLRPGKELLKYKRIRALLKKLNKPSLKTIQSPDGDLIDCVPSHLQPAFDHPKLKGQKLLDPPERPKNYNLTIAVSSSSSSRVGEVVVQAWHAAGEECPEGTVAIRRTTEKDLLRASSLRRYGRKPARRNIRRDSTSNGHEHAVGYVNNDNYYGAKASVNVWSPRIGDPSEFSLSQIWVISGSFGNDLNTIEAGWQVSPELYGDSNPRFFTYWTTDAYQETGCYNHNCRGFVQTTNKIAIGAAITPESVYNGRQFDITLMLWKDPKHGHWWLELGPGMVVGYWPSYLFTHLAHHGNMVQFGGEVVNTRPSGSHTATQMGSGHFPGEGFDRAAYFRNLQVVDWDNSLIPAANLKLLADHPACYDIQGGSNSYWGSYFYYGGPGRNVKCP

SEQ ID NO: 35374 - protein, 65 aa, Oryza sativa
MDSILELTCSSMETRIMMSVQPNPISRAEVGENTIKARGRGISEPTDGVSHSNVTFKTKILICAN

SEQ ID NO: 35375 - protein, 150 aa, Oryza sativa
MASPPRIEVEKLSVEQLKALKEQTDLEVNLLQDSLTKIRSAATRLENASAALHDLSLRPKGKKMLVPLTASLYVPGTLDDSEKVLVDVGTGYFIEKTMTEGKEYCERKINLLKSNFDELVEMATKKKNIADEMGRLLQAKLRQSSPSPSS

SEQ ID NO: 35376 - protein, 295 aa, Oryza sativa
MRESRLEQTGRMASSTSGRRGRGRLLSPAAVVLAAVAVLLSASQALAAPCYPRVFSFGDSLADTGNGPFLYGNESRRPPLWPPYGETFFHRATGRASNGRLIIDFIADALGLPFLRPYWGGRTTGDFASGANFAVGGATALSPDFFWERGVHVRDTVHLDMEMNWFRDLLGLLCPDDLAETEGATDPGEGQDPQDLEQDCNDMMNQSLFLVGEIGGNDYNHPLMGGVSIRKIRSFTPSIIAKISSTITELIGLGAKTLVVPGNLPIGCIPHYLMIFKSGKKEDYEPETGCLRWMN

SEQ ID NO: 35377 - protein, 185 aa, Oryza sativa
MKTAMTTSTLLFLLLAGLTAAALGTADDDTTTNTIRLPTDGGSAQQAPTKKKPWKCCDNIERLPTKTNPPQWRCNDELEPSKCVAQCEVCQEAPGPFPGPLICSDVYWGADPGPFCTPRPWGDCCTNTTCTRSIPPICRCNDKVKKCAAACKDCKRVKSSKPPRYVCQDQFTGQPGPKCKHSCEN

SEQ ID NO: 35378 - protein, 40 aa, Oryza sativa
MLNPLRLVWRKKGWRSRVSFMLQMRSLLRQTVRNLRLTGI

SEQ ID NO: 35379 - protein, 150 aa, Oryza sativa
MRAGGEHAGAVHHVRDGEGVRPHRRLLRRGQDPQLRRRHHRRPPDHLRLPQAADQRHGRPEARPRRRHPLQVRRQHPLRYQPFHRLLQGALSGSTSSDATIIMERWIHRSAALILRLLSAIFVVVREIELEMHVTPPFCYYLLTCCFVAV

SEQ ID NO: 35380 - protein, 433 aa, Oryza sativa
MAKNFSKFPMESFLGNPLLHVYCQDSSCGHSHGQRVNISKTAIACIILGFIILLCVLLLAIYKTNQPQPLVKGSDKPVQGPPKLVVLQMDMAIHTYEDIMRLTENLSEKYIIGYGASSTVYKCELKSGKAIAVKRLYSQYNHSLREFETELETIGSIRHRNLVSLHGFSLSPHGNLLFYDYMENGSLWDLLHGPSKKVKLNWDTRLRIAVGAAQGLAYLHHDCNPRIIHRDVKSSNILLDENFEAHLSDFGIAKCVPSAKSHASTYVLGTIGYIDPEYARTSRLNEKSDVYSFGIVLLELLTGKKAVDNESNLHQLILSKADDNTVMEAVDSEVSVTCTDMGLVRKAFQLALLCTKRHPSDRPTMHEVARVLLSLLPASAMTTPKTVDYSRLLASTTTAADMRGHDVTDIGDNSSSDEQWFVRFGEVISKHTM

SEQ ID NO: 35381 - protein, 357 aa, Oryza sativa
MSRTLVQPVGQKRLTNVAVVRLRKHGQRFEIACFPNKVLSWRTRVEKDIDEVLQSHTVYSNVSKGVLAKSKDLLKAFSTDDHTAICLEILDKGELQVSGKEREAQLSSQFHEIATIVMDKTINPETRRPYTITMIERLMHDVHFAVDPNLTSKEQALKVIKKLTEHFPIKRAPLRVRFTAPKSKFASLTEKLEEWNANVISKDESGSQPSVVCEIEPSILRSCEERLKDVQGRVEVLSVSAHAEGGSSVDQYENTEESQSVPAVEIDPVARIGEAMQKQSISSEPENPGQGQGKQQRRCKECDVLVEDKLYREHCKSGWHKHNYTRHKNGLPPLSQEECLVEMELADSKRDLKDYDF

SEQ ID NO: 35382 - protein, 166 aa, Oryza sativa
MALVEDNNAVAVSFSEEQEALVLKSWAILKKDSANIALRFFLKIFEVAPSASQMFSFLRNSDVPLEKNPKLKTHAMSVFVMTCEAAAQLRKAGKVTVRDTTLKRLGATHLKYGVGDAHFEVVKFALLDTIKEEVPADMWSPAMKSAWSEAYDHLVAAIKQEMKPAE

SEQ ID NO: 35383 - protein, 93 aa, Oryza sativa
MAQQAEKAAELQDPEIRAELDRRARDDGKTVIKSGTGGKSLDAQERLAEGRKKGGLSRTTESGKERADDDTGAVLIEPDDKMLKEAKKNLGRK

SEQ ID NO: 35384 - protein, 155 aa, Oryza sativa
MVTSKKVQNNEAAMADGAVKEYRHGLCMDVPMYIEDSEYCGEELGTRLTCRHGLTPKRRTAWEGPDTGRRFLGCPLEEEDQCDKFFWVDEPWHPRVQKTLEQMWHAVERATKLTGSKQYDWCCFVRNTKAEEEKMKLELDTADHISELELAYKKN

SEQ ID NO: 35385 - protein, 148 aa, Oryza sativa
MSSSPTATAISSSKSPASVLHEELGYIRFLHDQVQVLSSPYLQRLPPSARVPEQERGTPAAEEQPPALRPSDLRSRGLCLVPISCTEHVAGAGAGTGHGNGADLWSVAAGMAKATATVTAAVERSKEAAAAAATAALLRADRPGQQLA

SEQ ID NO: 35386 - protein, 97 aa, Oryza sativa
MSSATATASGGLHAAGGEWLGELSAALQGKWQAMVSTDQRRRRQRGDEADEKKGVAGAGAALGVETRRRKEEGDVGACGGAMSDTTVFLLLDHFAPS

SEQ ID NO: 35387 - protein, 242 aa, Oryza sativa
MAAADAVAPDDGDHAVLRDDERGIPRSLSLLAALVEAEALCHATAADADADSDLIRAFRGGATPTVRIGEFLERIHTFIQQESVRHVIEIQGACYVLAGIYLIRFIRSGAAREAGILIDPSTAHRLVAVAIFVGAKFGGPIYRLPTRWTVVFETSSDAAIRAREMAGLERRFLIAVDYRLFVRADQFDWFCRVLERGPRPSGRCGGGGAGRKRTAAEAVEGEAEDGRRRVRASLPPPSVVAN

SEQ ID NO: 35388 - protein, 425 aa, Oryza sativa
MDSLLANYASSDDEADETLPTPPAAAAARPKPPSGGGIFSSLPQPKSALLFSSLPAPKSGPVFSAIPPPKSSSGNPKRVVQFRPPPIRQPTGESSDEEDDDAEKRRPSEAEPRPPVSAGTGPVSSFLPPPKRSLGLGGGGAARRSAIDTAAPERSNVVAAGPSSSAVNAIAPERPDTTSADDEDDESNGSSDDDEMPVPEEQQEQLAVDSEAGQQQQNQQQSYDAGVGSSNGQEGYAWDPNYYANYGANYGWDPSGNVNYGTEAQYAAYGGEHGGVYGNTYGVEHGDGYGHSTEMAYGGGYAGGYEHNAAAATAPPIQQPILPPEVGRIGGKRGRSDMPAEILEVNQAELMKNRPREDKSKLTGMAFGPSYQPAPSAKGKPSKLHKRKHQIGSLFYDMKQKEMELAERRSKGFLTKAETQAKYGW

SEQ ID NO: 35389 - protein, 171 aa, Oryza sativa
MAAAEGEQGKTVVVVGVDDSEHSNYALEWTMQHLASGMAGSGGAELVIVHAKPSPSSVVGFGAGPGSGEVVRYVEADLRKTAEDVVEKARRLCIANAMHALIEVIEGEPRYVLCNAVEKHSAGLLVVGSHGYGAIKRAFLGSVSDYCAHHAHCSVMIVKQPKAKRSRAETA

SEQ ID NO: 35390 - protein, 163 aa, Oryza sativa
MLACLPPCSSCLRRRQPAVVVGGRQIRLLPRPSSLRRRQPAVVVGGHQICLLPRPCSLRRRQPAVVVGSRQFRLLPCPPASGKVVWWGRLAACNVVGGLRRRLLPVPRSTFPLAAWPELVSSVATDNAADFADVCSIFFSSCLPGGWKHFELCHDQLSPNLHV

SEQ ID NO: 35391 - protein, 151 aa, Oryza sativa
MEILGFTVMGGGGSPAWIEVPEKSKSAFWELKRRKVHRYVIFKIDDRREEIVVEKTGAPGESYDDFTASLPADDCRYAVYDLDFVSDDNCRKSKIFFISWSPSVSRIRAKTIYAVSRNQFRHELDGVHFEIQATDPDDMDLEVLRGRANRT

SEQ ID NO: 35392 - protein, 36 aa, Oryza sativa; identical to SEQ ID NO: 28880

SEQ ID NO: 35393 - protein, 185 aa, Oryza sativa
MATTKHLALAILVLLSIGMTTSARTLLGYGPGGGGGGGGGGEGGGGGYGGSGYGSGSGYGEGGGSGGAAGGGYGRGGGGGGGGGEGGGSGSGYGSGQGSGYGAGVGGAGGYGSGGGGGGGQGGGAGGYGQGSGYGSGYGSGAGGAHGGGYGSGGGGGGGGGQGGGSGSGSGSGYGSGSGGGNGHH

SEQ ID NO: 35394 - protein, 9 aa, Oryza sativa
MCVYLCANC

SEQ ID NO: 35395 - protein, 203 aa, Oryza sativa
MALTNHILAPAAAAACCFGRRVPLPPPHQLAVRRKQKSVVVAMADLLGDFGARDPFPEEIESNFGERVLGNVDTLHNILIPTLSVLSIARLPLEPNPAPVDAADARRLLHKVVGWRLLDDADGMRLQCVWKVRDEACGHELVARINAAVDGAPATVVFEAPNQVRAELQTPSAGGLTVNDFIVAARIDKVKTVDLIPKKRVWA

SEQ ID NO: 35396 - protein, 147 aa, Oryza sativa
MGGEGRGAVVPLQTGPFLALSSLGPLRGQEDVATTPSIRDDATTSVRADPTLPMPPVLRPRTAAADPPFARRYRCLHRRPRRPHATHAGGLLPHIVLTPGSGFWPSSPRRYRSCEFPPFIFLGFSALSSNRPTDCLNPFEQGSAQIF

SEQ ID NO: 35397 - protein, 131 aa, Oryza sativa
MSPSSGAPTSAAAPSARRSTATRTSPSTSPTGSGRTSSSPGRSRGAGRATSTRASWCSTSPGGGGRATRGASSGGWRYRSRRRGASTSSGRCRPSCWCSRGTWRRSSTGGTSTASAATTCSAAAATSTRGR

SEQ ID NO: 35398 - protein, 336 aa, Oryza sativa
MPGDVATSPAPAPPSASSQQSHHATSARGLLCHAAAGASAGVVAATFVCPLDVIKTRFQVHGWPKLATGTIGGSVIIGSLQQIAQREGFRGMYRGLSPTILALLPNWAVYFTVYEQLKSLLSSNDRSHHLSLGANVIAASCAGGATTIATNPLWVVKTRFQTQGIRAGVIPYKGTLAALKRIAHEEGIRGLYSGLVPALAGISHVAIQFPAYEKIKAYLAERDNTTVEALSFGDVAVASSLAKVAASTLTYPHEVVRSRLQEQGAHSKARYTGVMDCIRKVYHIEGLTGFYRGCATNLLRTTPAAVITFTSFEMIHRFLLDVFPPLPEQQPQPLKH

SEQ ID NO: 35399 - protein, 280 aa, Oryza sativa
MARTKLVSLSFVVLLSVGLANAARVARYASAEGGGSGGGGGGGSEDGSGWGSGSGSGYGQAGGSSGGAYASGGGGGQGGGGGQNGGSGYGSGSGSGYGQAGGYGPHGGAYAQGGGQGGGGGGGVNGGSRYGSGSGSGYGQAGSYGPGGAYAQGGGQGGGGGGGQNGGSGYGSGSGYGQAGSYGPGGAYAQGGGQGGGGGGGQYGGSGHGSGSGYGQAGSYGPGGAYAQGGGQGGGGGGGQYGGSGSGSGSGSGQAGGYGPYGGGYAQAGGQGGGGGGGHP

SEQ ID NO: 35400 - protein, 233 aa, Oryza sativa
MGKHHVTLCCVVFAVLCLASSLAQAQVLFQGFNWESWRKQGGWYNFLHEKVEEIASTGATHVWLPPPSHSVSPQGYMPGRLYDLDASKYGTEAELKSLIEAFHDKNVECLADIVINHRCADYKDSRGVYCVFEGGTPDGRLDWGPDMICSDDTQYSNGRGHRDTGAGFGAAPDIDHLNPRVQRELTDWLNWLRTDLGFDGWRLDFAKGYSAPLARIYVDNTNPASWGGCPIRP

SEQ ID NO: 35401 - protein, 216 aa, Oryza sativa
MAKTKQGKKDVESYTIKGTTKIVRVGDCVLMRASDTEKAPYVGRVERLETDGRGSVRVRVRWYYRPEESKGGRRQFHGAKELFLSDHFDTQSAHTIEGKCVVHSFKNYTKLDNVGPEDFFCRFEYKAATGAFTPDRVAVYCKCEMPYNPDDLMVQCEGCKDWFHPSCMGMTIEQAKKLDHFLCADCVKENGTKRPSNSYPASSNSDSKVEPKKRKR

SEQ ID NO: 35402 - protein, 259 aa, Oryza sativa
MLRRLAAAAPRAFFSSSTPHAPPPPAGYTQRREYGLVPMVIEHTSRGERAYDIFSRLLKERIVCIHGPITDDTASLVVAQLLFLESENPAKPVHLYINSPGGVVTAGLAIYDTMQYIRSPVTTLCIGQAASMASLLLAAGARGERRALPNARVMIHQPSGGASGQASDIAIHAKEILKVRDRLNKIYAKHTSQAIDRIEQCMERDMFMDPEEAHDWGLIDEVIEHRPVSLVSDAVGSDLPNLGGGGDGANKATDEPSPA

SEQ ID NO: 35403 - protein, 215 aa, Oryza sativa
MASQQERASYHAGETKARAEEKTGRMMGTAQEKAREAKDTASDAAGRAMGRGHGAKEATKEKAYETKDATKEKAYEAKDAASDATGRAMDKGRGAAGATRDKAYDAKDRAADTAQSAADRARDGAGQTGSYIGQTAEAAKQKAAGAAQYAKETAIAGKDKTGAVLQQAGEQVKSVAVGAKDAVMYTLGMSGDNKNNAAAGKDTSTYKPGTGSDYQ

SEQ ID NO: 35404 - protein, 111 aa, Oryza sativa
MAPVFSRDAWRCVWHMIQNDLVHGWGLDFALRRCVDPAHEKIGVVDSQWIVHQVVPSLGNQGQSEHGRAPWEGVRERCRKEWGIFQTRIAEAEKSYYEMMGVPPPNVTFVH

SEQ ID NO: 35405 - protein, 231 aa, Oryza sativa
MSALYIKFLMEEGYPTVWKALKHSPASLVLMIYCFIALWFVGGLTGFHSYLICTNQTTYENFRYRSDNRPNVYDQGCLNNCLGVFCSKTKPSKHKFRAYVQEEVRAPVVNFGRQMEEEPAGGPRAKVEDDLEIGSDLLQISQRRNYGDVDLEMGSQDCSEMEGIPNAKLAIGSESQIPAIGSEVRVRHSSWDRRSGNWDMSLDVIGRSASDVIRRSASGHEAAPPFQTETH

SEQ ID NO: 35406 - protein, 343 aa, Oryza sativa
MSSSPAIAAASAAVVALAVANRVLYKLALVPLKQYPFFLAQLTTFGYVAVYFSILYARYRAGVVTGDMLALPKRRLAAIGLLEALGLAAGMSAGAMLPGPAIPILSQSFLVWQLISSALLLGRTYSMRQIIGCFLVASGVILAVASGANEGQFLSEVKFIWLALMVASSAFQAGASILKESVFIDGAKRLKGRRPDIFVVNSFGSGFQALFVFLLLPLLSNLKGIKFAELPAYLNGGAECFLNVDDSLIDCGGAPFLPLLFILVNMAFNIALLNLVKLSSALVASLTATSAVPISIYILSLPLPYIPHGAELSSSFILGGVVLLMGLIIYNLPQSSKKQSKIE

SEQ ID NO: 35407 - protein, 934 aa, Oryza sativa
MELDNARPPELGMKFATLEDAQRFYETHALKTGFVAKRGTNYRRKKFTIECHKTGTSKLTPNPQRKRKKNIIERTQCQAKVVVKLNKGQWEYAAVRNEHNHPLCPSYSLRFSKRKRRRNPPSQKQLDVQRNSDQLTQADNLEERLSQPLISADSNEVNNKRMPRHAEISISTVEKEPVDKLQRAGDYQEQSSNGIDKNTERPIVDKLGDQTSSIDHSLQHTEEHNRSHDNVESSEAPSEDTSSESNSDSSSGDESDKELGKYFYPSFDELKNSRPPEPGMKFPSLQAAQRFYYAHALLTGFVGKRGTNYKRKKFHLECNKSGKMKLTKSSENPMKKRRSNLVEKTQCKARVIVKLDKGEWEFTAVRHEHNHPLCPSPLLARFIVDHKQMSTGEKSFLRVLQQNRVPPKKIMKIFRKLRVCFGDIPFENKDEHNIAQTEHRKANSDVESALKHFTELQIQNPEFLYVMQKDEDNTVTSIFWTDARLRIEYDIFGDLIMFDAAYSTDMYNMPFVPIIGINSHATPFLLGCALLKDEKVETFEWMLRTFLQVMGGKMPRAVITNQDTSMEKAFAELMPHVRLRFCKRHVMSKAQEKLGDFMTARGNINTDLHNLVGNSLVETEFEEGWVELIERYNASENQHLQLMWQTRKSWAPVYFREDLYPFIDSVGSNEGMNSLFKGNMLPKDTIDKFIGQFKEIQENIAKVHEEDRFQSGADLKYISMQPIEQHAAHIYTREIFLKVQEELLHSTAFNVQEIQIGTVYRLEKVFNYENPEFDRNYFEVLAEPGINAFKCQCAKFTRDGIPCCHIFRLFTQFGINEIPEQYIMPRWTKKFREEQLKQNKEKLFDKHGIKDSENTLRYAMLMSKAAEICPKICHDEAKCSIFMQELDKIQEKLITESRENAQNDNPCREQGALQQEHRGSSSNTEQEQQHTGGL

SEQ ID NO: 35408 - protein, 442 aa, Oryza sativa
MSPARGGTPEEEGGGADVEKAAAETGGRGTWRHAAFHVATTIATPAAYAPLPFALASLGWPLGVCSLVTGTLVTWCSSLVVASLWQWNGDKHTSYKLLAKSIFGPWGYWYVSFFQQVASIGNNIAIQIAAGSSLKAVYKHYHTTDDGAMTLQQFIILFGAFELLLSQLPDIHSLRWVNAACTASTIGFAGTAIGVTIYDGHRIDRKEVDYSLQGSAASKIFRAFNALGTIAFSFGDAMLPEIQSSVREPVRMNMYKGVSTAYSIIVMSYWTLAFSGYWAFGSGVQPYILSSLTFPRWTIVMANLFAVIQITGCFQIYCRPTFAQFEQRIQAKDAGYRARMWRLVYTSAYMVVITLISAAMLFFGDFVSVCGAVGFTPLDFVLPALAFLKAGKLPENPGLRHAVKVITSAVAVLFSIVGALACIGAVRAIALDVKTYKFFHDM

SEQ ID NO: 35409 - protein, 408 aa, Oryza sativa
MAETLAEDAADAPLDAAAIRSRLERLALSRRGEEEVASAAAAAADAVRRLPSVEDVEPLQGLEFDAWASSAAPMESDFDAFMEWLSKEVSLAEEENRKLSVEISSVAETTLKDSIQLDADIAELESSLKKIDSQGLKHLEASHIAELSVSTDSCRDQIKFDKDYKYEVLELNQQLEKYENDLKLLENQKSAEAMWELESMLSEANVLDFKDNCLRVFLKEAVLTPECLMYGKESDCSVNSFVSDHELLIEVGENMEPKRVQIFPDDTCVDILLDKLKASRETISTTSLGWIIRQFQHHIIINTLRRSLVKDANNSRHSFEYIDKDGTILAHLAGGIDAFIKISADWPLSSCGLKLISIHSSRAQSADISLALLSKTKELANGLELQTRRHLVKFVDAIEDILFREMRS

SEQ ID NO: 35410 - protein, 49 aa, Oryza sativa
MGLTWTSDSDSDSYSGSDDDVDDYRDGDGMIEIELEEDNLIEIDISKCR

SEQ ID NO: 35411 - protein, 499 aa, Oryza sativa
MPLLLRGGSLFRLYGCGCGLPSANFSPSKLALIRLSLMMAETRATYSRRAASKNTDIKKDDEHVLEKEDVAESKLEIEQLRNDPDRLQSMTVKELREITRMMGIPVKGNKKDLVSALMDSLGKVGTSSVEKIGVSEVPSKRKGASVVVEQNIDSSEVISETPSKRSRAKNKGTAEESSGANVKQSKTSVQKKKLVVQGASVDHEEPWTVLVHKKPQPAWIPYNPKVMRSPSLSKDTKALKILSWNVNGLKALLKSRGFSIHQLAQREDFDILCLQETKMQEKDVEVIKEGLLEGYTHSFWTCSVSKLGYSGTAIISRVKPLSIKYGLGVPDHDTEGRVVTVKFNDFYLLTAYVPNSGDGLKRLTYRVTEWDPSLGNYMKDLEKSKPVILTGDLNCAHQEIDIHDPAGNRRSAGFTIEERESFETNFLSKGFVDTFRKQHPNVVGYSYWGYRHNARKTNKGWRLDYFLVSESIAERVHDSYIIPDISASDHSPLGLVLKL

SEQ ID NO: 35412 - protein, 294 aa, Oryza sativa
MDAKDFPVGHKFRLISHYTHCDGLVLAPTITKLYLFNPATREAITLPDGHGHSHTAGLGLDPGTGRYKVVRSFYRSPSMDPPVSMGMEVLTVGEPGARWRETAVDPPHPITRWRTALAVNGGYLFWYMDRRRYPDDAPRGLLRFSLRDEAFAVTRLPESMDPTLDENVLPDVLHGELCVVQALPDKAGVLIWTMSSSSMDNDDVHLDDGPWELRYCICVNALCHPLGVLPDGGGILLWANRSVRRYDFSARKLAGVVCNLDRIRYQGGRPARWKSVVDFTLTPYTESLVRITAA

SEQ ID NO: 35413 - protein, 500 aa, Oryza sativa
MQKSHAGFMTIAHLDFKDSILTDEETSVLSPEKYDTISPVRQGNLFPDKENVTPASRDLKPIIGRKVLGPRVDNSLSVECTSKRRIHRQEPNELSAKSKVCHAVDDDVFYSDKENLTPISSGGIKARRCLPKSLTVDADQDQEAFYSDKENLTPVSSASRKTKDLSENRARMESTITKKRVVDRLPFQTLLSNSPLRHTSSLDSTQVNPRAVDVAMKLEGELNNVPHKGQESEKTKEGMKVWTMVTDMECLLDDESRKSIMLLRGLKGTQLVIPMIVIRELECLKKRERLFRMLSKATSMLQWINECMEKESWWIHVQSSTEMLPVAPTPPATPTALCNNGEREISAGTFNPIALFSPRSFSDIVSPKTEDRVLDCALLFNKLKGNQNIVILSNSVTLKIKAMAEGFPCEGAKEFRETLVNPCSSRFMWAASAPRGSAWSCLDETTLEENYYNSHHGARRRIPRPMEPAKGLKLILLHNSHYGQATNFVENRPLAPMASW

SEQ ID NO: 35414 - protein, 71 aa, Oryza sativa
MARMASSACCSSSSNVSRNPFVSCSSSSRTSNTTPHHRTRVMHACEPLRSSLRCLTLTRRCMWWCHMVEYL

SEQ ID NO: 35415 - protein, 434 aa, Oryza sativa
MALPPPLLRFFIVAVLLSSVAAWVAAATTLHERDAAALRDVRAGLRDLPGSRFFESWDDATDPCDYAGVVCEPDEDDPAALRVSVLTLGTGLTDSPGLAGTLPASLASLTALTDFVLYPGRVAGAIPTDIGSGLRRLRLLSMSGNQLTGQIPESLAGLPDLHTLDLGNNHLDGSIPSGLLLPSSQSLKVLILANNGGLSGQIPDQFSSSQLFHVDLSRNSITGSLPPLAQTVRYFSVAANSMQGSLDGAFGNGSAPTDLAFLDLSMNNFSGSIPRELFALPSASSLLLSRNNFTGSLAVPAFASERAATPPWSVVDVSHNGITGEVPEELAAVESLYVNNNRMYGEVPEAVARSVFAGRMTTFYAQHNFLTGFPVPPLPLPDSAALCLSYNCMELPSASAANGCPTIGGPMESRPADQCRSSTAANAGSSGGDG

SEQ ID NO: 35416 - protein, 258 aa, Oryza sativa
MSQVVSLVVTQFRCNISKALVLTNGKWTATIKEQEKDRLTPIVEALSNAYFGPDYSQPKDAVEISLKDIDQLAKTSFPLCMRHMLEKLRENHHLKHGGRMQFGLFLKGAGLKLEDALAFWRAEFSQKVGSERFDKEYAYSIRHNYGKEGKRTDYTPYSCQKIISATPGVGDHHGCPYRHFGEDNLRAALNKMGISGHPLEEIMDKVKNRHYQLACTMTFEAEHGVSCDTGINHPNQYFSESQKVLKAKNQAVQSQGTT

SEQ ID NO: 35417 - protein, 609 aa, Oryza sativa
MASAAEEAKGVEEGGGGASANGGDNPATATASASAAAAASSSSPADDRGLPRSSTMPGGINNVEITNETAGPSNLERSRTERRRQNNPADDPTKQLFDDKISLKKKLEMLNRIATVKDDGTVVVDVPSSLETSTTDGVAYDGYSDVTVEEPLDGADISVRPPMDIVILIVGTRGDVQPFIAIGKRLQDYGHRVRLATHANFKEFVLTAGLEFFPLGGDPKTLAEYMVKNKGFLPSGPSEIPIQRKQMKEIIFSLLPACKEPDPDTGIPFKVDAIIANPPAYGHTHVAEALKVPIHIFFTMPWTPTSEFPHPLSRVKQAAGYRLSYQIVDSMIWLGIRDMINEFRKKKLKLRPVTYLSGAQGSGNDIPHGYIWSPHLVPKPKDWGPKIDVVGFCFLDLASNYVPPEPLVKWLEAGDKPIYVGFGSLPVQDPAKMTEVIVKALEITGQRGIINKGWGGLGTLAEPKDFVYLLDNCPHDWLFLQCKAVVHHGGAGTTAAGLKAACPTTIVPFFGDQPFWGDRVHARGVGPLPIPVDQFSLQKLVDAINFMMEPKVKDNAVELAKAMESEDGVSGAVRAFLRHLPSRAEETAPQQTSSFLEFLGPVSKCLGCS

SEQ ID NO: 35418 - protein, 291 aa, Oryza sativa
MRIARIPTSIPPHLRLPLDLSAVSPMGSASEHDVREHLLDVGGVGEEGAAAAAGPKIRVRGLTRRSEARGEEILRGVDLDVPRGVVVGVIGPSGSGKSTLLRALNRLWEPAPGAVLLDGVDICGIDVLALRRKVGMLFQLPAMFDGTVADNVRYGPQLQGKKLTDAEVQSLLSLADLDPALCSKPASELSVGQAQRVALARTLANDPEVLLLDEPTSALDPISTQNIEEAIVRLKKTRGLTTVMVSHSVKQIQRIADLVCLLVAGEVVEVLPPSELSEAKHPMARRFLELS

SEQ ID NO: 35419 - protein, 333 aa, Oryza sativa
MASPGSSGRCSRTPGFPAGPLGGGGRAVPAVGLGTASLRSVGEESFRGALLAALEVGYRHIDTASVYGSERVVGEAVAGAARRGVIACREEVFVTTKVWCTQCHPDLVLPSLRESLQNLQMEYVDMYLVHWPMSVKPTKPHYPMKREDIMPMDLRGVWQAMEECHQLGLAKMIGVSNFTTKKLQELLAFAKIPPAVNQVELNPVWQQKKLMEFCKAKGIHVTAYFPLGGRHSTSTVNPVLDSDVLKEIAAAKGKSVAQISLRWIYEQGASMVTTSTKRERLKENIDIFDWQLSDEDRLKISQIPQHKTVSVLSILCPDGVSSVELSEVDVVEV

SEQ ID NO: 35420 - protein, 442 aa, Oryza sativa
MANPPIKCLLPPAIVSLVLLISCMVATGEQQAPYKPLVVPLVRDSDTSFYTIPIKNGAPLVVDLAGTLVWSTCPSTHTTVSCLSGTCGAANQQQPRRCRYVDGGWFWSGREAGSRCACTAHPFNPVTGECSTGDLTTFAMSANSTVNGTRTLHPEEFAAVGSCAPQRLLASLPAGATGVAGFSRRPLSLPSQLAAQRNFGNKFALCMSQFATFGDAPVYLGMEGRGFVDYREILPYTPLLTNPRIPGYYLPVKGISVSWSVPETPASLPAGALDLDARTGRGGVVLSTTTPYTVMRPDVFRAFAEAFDTAIIRRSKYTYSNVTRHPPVGPFKLCYNGAFPMLKRPASMDIPTIHLELDGATGTWSWFNDNYLVFAPGAALCVGVLEMGPGGMPVDGEPAMVVGVKQLDWNLLVFDLDKMLMWFSGDLAFRLAGCSYSSQIGL

SEQ ID NO: 35421 - protein, 328 aa, Oryza sativa
MHQEEQVFKDVKECVQSEAETCTEKCSKDQQSEESVVVVQSEEEWQEENLKIVLPEPEMQDQEYKDVEPVKELQDQEYKFLQPEEEEEQQEQDSENDAQPEEQLQEQDCDNGVQPEEEEESQEHEMRLQESHDDQEEEFKDAADQESPREDPLRPSTSIARRVHSRTSSEHLLVVGEGSPRKEKEWKRTLACKLYEERMQLKLRRDRAVVESSSDNMDMLWEAYEVGGGGGGATSTKGGASKAKRKQERATVERKQEHATADEEDDDDDGDEEEGSVRQLCCLQALKFSTRKMSFGGGGGKPSLAKISKVLRRVAALSRSGSRRSTKG

SEQ ID NO: 35422 - protein, 53 aa, Oryza sativa
MKRPDPDRDARAGVRRPRRRRYALWSGMDVPSQRQHIELISISLDNNGDGDLC

SEQ ID NO: 35423 - protein, 280 aa, Oryza sativa
MADDGDGDCVNLEPFFYDEAATVAEAAAAAERREREEQEKAREAAANARRWAAHNAALAGIREYDPAEETYIYTRYHYADLSEFDLDEESRLPPMRHTAATYAPPARALHFLCDMINVLAVRIILPSSDRSDGGGVGFPISVYSSVIARDQLDYKCVHLFRRCRDDPQLITSEDELSLILTGPHRGLVLYDALYIEVDLKMKVKGDQQQGCKDKRLSKGLIVLDGVLLSTNLSDHLRAAVKTATLDRRSTMPCAVQVTYAYVTRAVEATVSVELLHDQGG

SEQ ID NO: 35424 - protein, 27 aa, Oryza sativa
MNFYMVVMTCAFLYVLATDEFLYGCDG

SEQ ID NO: 35425 - protein, 302 aa, Oryza sativa
MPSKLCTGCRTVCGLAYFSCEKADISLCARCYVRANYRPGLTSADFKRIEITEDAKSDWTDKETLHLLEAVLHYGEDWKKVSHHVGSRSEKDCIARFTRLPFGEQFMGPKEDKIQFGNDCDLNEESGSHISKRLRLTPLADASNPIMAQVAFLSAIVGSDVAVAAGQAAISAQSQVDISASETDSSINISKEEESSCTNGLSANDLLKEASANAQVQLEKERKAIEQSLSDIVGVQMKEIQDKIRRFEQKELLMEKERKQLHCLKELLFSDQLAVVQHQRRPPAVTTESKDDEKPKPVISIS

SEQ ID NO: 35426 - protein, 434 aa, Oryza sativa
MARNKEALVLLLDVGPSMHGVLQEVENICSTLVHKKLVYNRSDEIGVVLFGTKETSNELAKELGGYKHVVVARDIKVVDEETTNALQNLPRGTSPGDFLDAIVVGLDMLIRKFGNIKGKQRMCLVTDAQHPLRDPPQGTKKDQVDTIADQMKRHEIKMDCIIFRESGVRHNAVMDENDQLLYHFRERSVTKVVHVDSPTSLLGALRTRNVLPVTVFRGDLEVSSSFKIKVWVYKKTSEEKFPTLKKYSDKAPASDKFASHEVKVDYEYKSVLEPDTVVPPDQRIKGYLYGPQVVPISSAEWEAVKFKPEKGVKLLGFTDRSSISRHYFMKDVFSFVPEPGNTKAVAAVSALARAMSEMNKVAILRCVWRQGQGNVALGVLTPNISSAKKMFWIPFTSIYFHLLRTSESFSFGPSAACHHHLSLPRNSRKLQITW

SEQ ID NO: 35427 - protein, 176 aa, Oryza sativa
MLKLRSSPVTAVRFTMLAITWPSASATLLQLSGLSMILLRIFTPNQVNSMLTVTSLPELSAATINDDTIGSIAGKLSRRRSRESSKMTPAACPLVFTSFRVLFVSPSMLTTPPTVSAEARSLMSASALYLGTLRMLSRTPTPTRRSAMELDRTSSMAKLTRSMFMASRTLPPEHLR

SEQ ID NO: 35428 - protein, 392 aa, Oryza sativa
MANRTDPLAKSIHGTNPQNLVEKIVRSKIYQSTYWKEQCFGLTAETLVDKAMELDHTGGTYGGNRKPTPFLCLALKMLQIQPDKDIVVEFIKNEDYKYVRVLGAFYLRLTATVADVYQYLEPLYNDYRKIRHKLSDGKFTLTHVDGFIDDLLTKDYSCDTALPRIQKRWVLETSGTLEPRRSALEDDFEEEEEDKEDEQPMDIDEPNGREKHDHYRGRSPTRDRDRERKHERHHRDRDYDRDRDYGRGRERDRDRDRERDRDRDRDRDRDRDRDRHRIRDEDYSRDRDRARDRDGRERERWDRDRGRRRSRSRSRSRDRRERDREDGEYRRRRDRGSASPRGHAEDGGSRDEPKKRKEKKEKKGEGNAPDPNDPEIIEMNKLRASLGLKPLK

SEQ ID NO: 35429 - protein, 383 aa, Oryza sativa
MVQEEPNITTPDAGHPSPPSRLLSKHRPRRGAAAPRASLHPPAPPHSQPNLNLCHCCGVRFPPAPPGAKRRPVRPLRSLWRVVLLCTECLSLVRSAAVCSYCLSLDNLPPEDSSVTCRCCNRCVHPYCIAGEHRAALIQPIDVENFICVDCCPTVKPGGKNGGASSVHMLQAVAREPRKGDIVAESKENAVRKAMEMKLAFKRAKEALVSAAGGRGSQRTVGGKPDLPDEELALQLHLAMNGSQRFSRAGNTSGGDSAEQCKGHKSVIGGKNFYGDQELCVTNMMDQLDDDEAGVEPLCRIRRPSRRRLDPSVTIVLALEYVDGKHVKESMKGKRKGHLVTKKQNDLVDRYKRKYSKWNSKKQTKNENPEFKDISGGKDKDDE

SEQ ID NO: 35430 - protein, 418 aa, Oryza sativa
MPREEYRAKRRRLPAAEPDFLAGLPPEIVDDIISRLDIRDVVRTSALSRAWRRRWESVRGLDLSFRSSAPAAAISSVLKRAAAPVRGLGLRVPGRRFRRAVHWLRLLPRKRVQSLDLHFEFVFGEKPSLDPSILSCLELTTLVLGGCIFPPSPPPPSFVGFPELTKLSLSEIDLPRHGGRRLEAMIAASPLLVELSLSNVRSLHHWERWFIRGPNLRSVWIWTDYDYGCRIGELPRLEHAIVFASAIKTEVLCKILEGISHAETLGFDAITDQFNGNPPERFSFTFQNLRSLDLHACLDQISSTSWVFCILRSAPNLETLEIEVDCDDDEVDAGSVEGFANAQASDDIFPRLRDVWLHSIDCSSNEMCFIKFVLSKARSLELFSVRVTSSRLSYQEACIEMAKYKRASPLAKLRLIRG

SEQ ID NO: 35431 - protein, 357 aa, Oryza sativa
MLYPERPSRVNGTATVDCSAYPLDCHPVCPGGSCYEIAEPPPPSPVVPRVDVAVDDHHLPVRLLLTVSLLSAFLFISLSVSTILLYRRRVVLRRRRRAATAPLPGDDGYGDGDEEAGGGGGDVHHVWYIRTVGLDEATITSIATAEYRAGVGWGGDCAVCLGEFRDGELVRLLPRCSHPFHAPCIDTWLRAHVNCPLCRSPVVVPSDLPATATEGEAEGGGQAEEHQVFDEISLSESRADVSEDSDTSSDTQSEDTAASPEDGGRVMPKPIRRSASMDSPLFLVVVPEAQDDAMRGDRKFPNGQEMKLFSVKEKDATGTSSSSCQAGRFGIGRSMSSSGQGFFFSRNGRSSSAVLPL

SEQ ID NO: 35432 - protein, 423 aa, Oryza sativa
MVTTHHLCLLRSTVLSVPVRLRAPRAPPHPRLPTASASASSYHGPTHLRRLRPLRAAAAAAGGASPDGADGAKRPAPAAASSSLGAALVGFARSNFLPLALIAGIALALMDPTLGCLAHKYSLSKYSTFGIFLISGLTLRTKELGAALEAWPAGLFGLASILLFTPFLAQFIMQIKFFPHEFITGLAMFCCMPTTLSSGVTLTQLVGGNTALALAMTAMSNLLGIMIVPLSLAKYIGVGAGVSLPTEKLFKSLVTTLLIPIILGKVARETSKGIAGFVDGNKQGFSVTSAILLSLVPWIQVSRSRSLLLSVQPKAFAVAVTVGVLLHFALLAFNAAALHILSRLEQRGVSVFARNEYARAVILVASQKTLPVLVAVVEQLGGALGESGLLVIPCVAAHINQIIIDSIIVNWWRQRDQQFANAK

SEQ ID NO: 35433 - protein, 126 aa, Oryza sativa
MTPFSPASGQQRYPSSCERRRRRQRRPALPQAAAAAPSLAASGGGGGASPSPHRRPLLSSSGGGHCPAPRQIRRRFLLSLSCGGRHPVPRQIRRADGEVARISVRQPPVRPALSYHHLVLIFWMFF

SEQ ID NO: 35434 - protein, 482 aa, Oryza sativa
MSSCEARRAHAVLIPQPAQGHVTPMLHLAKALHARGFFVTYVNSEYNHRRLLRSSGPGALAGAAGFRFEAVPDGMPESGNDDVTQDIAALCVSTTRHSAEPFRELLVRLNSTPGTPPVSCVIADGVMSFVQRVAEEMGILALVFWTTSACGFMGYLHFAELIRRGYVPLKDESDLTNGYLDTPIDWIPGMRGIRLKDVPSFIRTTDPDDVMLNFDGGEAQNARKARGLILNTYDALEQDVVDALRREFPRVYTVGPLPAFAKAAAGEVGAIGGNLWKEDTGCLRWLDAQQPGSVVYVNFGSITVMSPAHLAEFAWGLACCGRPFLWVIRPDLVSGEKAMLPEEFVGETKERGVLASWCPQELVLSHPSVGLFLTHCGWNSTLESICAGVPMICWPFFAEQPTNCRYVCDKWGVGMEIDSNVSRTEVARLVREAMEGERGKAMRVNAMVWKEKAKEATEEGGSSSRNLDRLIEFLHSSGSDAR

SEQ ID NO: 35435 - protein, 124 aa, Oryza sativa
MLRKGEAPGHQTPPHLHKDDGDDDDDAPSGFVKLISAEGFEFVVDKKAAMVSNTLRNMLTSPGGFSETREGEVRFPEISTPILEKICQYFYWSLHYSSGKETSEFQIEPEITLELMMAANYLDT

SEQ ID NO: 35436 - protein, 242 aa, Oryza sativa
MPVMIVYRVVQPPPPAAHATRCQITEIEDGGGVETAKAVDGDEPQPFIRTVRSTRRRKAAAIRLPKAFRAALLPPPPPPCALGFTATTTSLMIRNIPNKFLKARLMAILDQHCADENGKCHRRGGGGGRSVVKSEYDFFYVPIDFKTGFNKGYAFVNMTTATAARRLRAFLQDHRWDAAMSGKVCDVVPAAIQGLDAFVAHFSASCFPCRTKEFLPVWFEPPRDGEQQTKAHVVGRLVVRPR

SEQ ID NO: 35437 - protein, 136 aa, Oryza sativa
MVVRIRLARFGCRNRPFYRVMAADSRSPRDGKHLEVLGYYNPLPGKDGGKRMGLKFDRVKYWLSVGAQPSDPVQRILFRAGLLPPPPMLAMARKGGPRDRRPIHPMTGRPLDLEGVTVVDDSNVPEGGAEEPVSEE

SEQ ID NO: 35438 - protein, 430 aa, Oryza sativa
MPPLFSAPALHRRRLLRHAAAFALVLLAVALLFLLLVHPRSLGTPSPSPSYGHRLPTLVDLTLVHGAKEKGAVCLDGTPPGYHWLPGFGDGSNKWLLHLEGGSWCRNRTSCDHRKKTSLGSSAYMETRVEFVGILSDDKAQNPDFYNWNKVKIRYCDGASLSGNVQDEHQYGATFFFRGQRIWEAVMAELLPKGLARAKQAFLTGCSAGGLSTYIHCDDFRALLPKDSTVKCLADGGFFLDVEDISGRRYMRGFYNDVARQQDLRKRFPGCSSDMEPGQCFFPQEVAKGITTPMFILNPAYDVWQVEHVLTPDGSDPQNLWQDCRMDITKCNTKQLEILQGFRKSLLDAISEFKKKRGWGMFIDSCFIHCQSMKSLAWHSPSASRINNKTVAEAVGDWFFDRREVKEIDCEYPCNPTCFNVVLEQPYQEG

SEQ ID NO: 35439 - protein, 373 aa, Oryza sativa
MKLEPQLAITMELGRSSDPNISLQSRRHSYLQEIRSLAVDSAGGWSPSSSSRSARSSSYYSSSKSSSSRHRYAPYSISSSRRLARLEDKSPRDIARRMVRDGFMGKLIGEFGRAPRPALERWFSELDVGWVLRSALEKEKSELALDKLYDLAVQRWTRGFTVMAEALSATQRHLQEEGRSTAQVDRDDDLRLVRFVEATVCKMLAFANSLVAVADKTWNPMNKLSGLMNVRSCISHASEIIMLSLKKETLWLPDSDEMLQGLLNKTSNIFSTAKDNLGQAIQRMANDAEAVTPVLSGMHSWETFPQSAEIHKATHLIMDYARLFWGHIDELNSILGQCWPHRILKCDIIEQMISNLIDHLEKKSESFSDPILS

SEQ ID NO: 35440 - protein, 42 aa, Oryza sativa
MRVVKSSVVGFLLYSVKEIDLLKEAYPKETEFKENAAWQVIY

SEQ ID NO: 35441 - protein, 221 aa, Oryza sativa
MVAPTTTTPPPPPPPPSESTPTSDPKPPPPPPTSSTAAPKKRKLEEVGFHHSPYYNIRAAVANLRGRFIQLCKGTDTQKKDAALEILKEIKVLMELSKEMRLDLPTAAGPVKLMDEPTSRDARNMPAGKIPPGEKNQVRPADQAASFMHSSGEKVPLNPVDIKHDAKPSVTDSTKKSGQCLQGSYIVGGSPIGWNFLMWPGSSTRYCGLTRSEWLARQSAK

SEQ ID NO: 35442 - protein, 76 aa, Oryza sativa
MPSVQEISVHRVAKIEPTTPTTVANAVKTPAPPAGGGIDAAAAGYIAKMKRRWAAESAAAAAASSSSSTRATAKKR

SEQ ID NO: 35443 - protein, 250 aa, Oryza sativa
MSYFQATTYKPHNGIIVDKVAIGLGSTCKLLHERAKCSYSNRFIKLQEQVYPRLLLVAACHNRIGPVYASSGKGNSERVNDPFSMESLNKAIAGTKKQWPIQDMLIDQISKIRGSGSGGNGGGNKNSHEGRGGGSEDESLTESLYEMVQVLLATIAFILMYIHIIRGEELYRLARDYTRYLVTGKRTSRLKRAMLNWHNFCEGITNKDSVQESTFERSTSEPMWWQQPLKFVHRIEELYRGYFRPHAQES

SEQ ID NO: 35444 - protein, 690 aa, Oryza sativa
MSVLLLLFLPLAAAQPWQVCQDSRGKYTSNSTYQANIQSLSSTLPAKAAAPSTGLFATRVAGNAPDTVYALAFCRGDITNASACAGCVASGFQDAQQLCPFNKAASLYYDLCLLRFADENFLATNNSDVVMLMNSQNFTASVGSVRLLLFTLLNATAESAASSSRRFTTSRLDVSSLPTLYCLMQCTPDLTAGECAACFEDFPRLTLQYLDGARGGRILATRCTMRYEIYPFYSGDTMLRIINLATTVPEMNTTAPTTPVTVYPQPAGPGGASAPPPPQPNPGIPEQAQRSPYHKSKVWIVAIVAPLLAILFCFMLSIVWIRRGRKGEVNMQNNIAAVNRLEEDALVWRLEERSSEFSLFEFSELLEATDNFAAENRLGQGGFGPVYKGQLHDGVEVAVKRLASQSGQGFTEFKNEVELIAKLQHTNLVRLLGCCIQGEEKILVYEYLPNKSLDFFIFDVDKTSLIDWNKRCGIIEGIAQGLLYLHKHSRLRVIHRDLKASNILLDQDMNPKISDFGLAKIFSSNNTEGNTKRVVGTYGYMSPEYASEGIYSIKSDVFSFGVLLLEILSGKRNSGFHQYGDFLNLLGYAWHMWEEGRWLDIIGASIPQTIPTEGLRKYINIALMCVQENADDRPTMSDVVAMLSSESAVLPEPKHPAYYNLRVSKVQGSTNVVQSISVNDVTITSNPEGR

SEQ ID NO: 35445 - protein, 425 aa, Oryza sativa
MEPGAALRAYLPDDLVADILTRLPARSVCRFRAVCRSWRALATERQFVLAHAARDRAAAVPMNHHHRKVHPPFSPSPRRGGGEPTVMLAFVMICRRNEPDRSFYLESREDGACKLLGCWDGMMCIDVRRDSPACRDGIVVVNPISMAYAVVRSPMPDGGEFIAGYAHPDTFAFHPMYCCHNQGKVIFQVIKAGDSQWREIAADRLAISGIDFDKQGISSVALHGGLHWQLRTNSGQWVMLVYDMVTEKFRSIAAPQCAITWVRGLSVLSGRLCSIVIPESMTAEIWVLEDYHEHRSWHCIREIDMAASAERINLENFWDSDLRMFLKVDVEQGIEHEVQEIIIHHGNKIISQPCSVYELRRNEAVYNVRHNVWRKSTMCFNEESIMYKESIVPYQMSFGMKSQFCERKRGALQFSEGQHVYHLPL

SEQ ID NO: 35446 - protein, 235 aa, Oryza sativa
MCVYLVEELQVDINAANDSGATPLIYAVLGGIVYTVSYLLDHGANPDKPNEQGRAPLHLAVEQGNCEILKVLLVKGADVDSSSDCGTPLHIAAVKSHDGCMKILLDHHADCNKVFSTFYTPLIAALMVRSLKCVKLLIKAGADIKGVGTFTPLIAAATEGLTDFYKCLLEAGADPNVPDENRRKDVEILLPVTSRIPSVYDWSVDGIITYVNKNVQDDPMYKIRPADLKLEGSRA

SEQ ID NO: 35447 - protein, 251 aa, Oryza sativa
MCTRGFDVNTRPADGGAEAGRPSSPSSMQEASTRQQVADQEAADDEDNGGGGARKKLRLSKEQSSFLEDSFKEHSTLTPKQKSDLANRLNLRPRQVEVWFQNRRARTKLKQTEVDCEHLKRCCERLTRENRRLQREVAELRGTLRTTTSSYPPLYGLHHLPAAAGTVFRVCPSCEHSKVVAAAASESFSPRVFAGGGAPAAITAAAAVPSPGAGSPPSSSAALFGARRPHFGPFAAAVIPPVLRRQPSATS

SEQ ID NO: 35448 - protein, 458 aa, Oryza sativa
MGCMCLFQDKRRSKRRPEVAAPAPAPAPPSPSAAAAVSTDACSNVSVPAAAPSTCTSSWASTRPSASSSAVSTPEPYEARQGAPRELALRELRGATGDFSPLLMVGRGGFGCVYRGVLRLPGEPPHGTPVAVKRLNPDSRQGHKEWLAEVQLLGVVEHPNLVNLLGYCAAQTERGPQRLLVYEFVPNKTLDDHLFDRSHPVLPWGVRLQIALGAAEGLLYLHEGLEFQIIYRDFKAANVLLDDEFRPKLSDFGLAREGPSEGQTHVSTAVMGTYGYAAPDYVRTGHLTTKSDVWSFGVVLYEILAGRRSIDKSRPKDEQKLLEWVRRHPAGSPRFGRIMDGRLQGRYSVRAAREVAELAAGCLAKHGKDRPAMAEVVERLRRATRHAELDGEVYDDAGEESSSSPAAAAVEDDVAVAAAAARRRMLHLAALGENASASAHARRRLMLMRAAAAATAAT

SEQ ID NO: 35449 - protein, 326 aa, Oryza sativa
MKFKAFFTDDGIALLDKRFLPAMDKVGRLCHVYLTPTHAMLLHNLLGPTGTGPDGGGPQCVAQFAKDLLFREYSVSSRNGNRVAFAVDVALLHRALRSALAVHAQSPAAGDASAAIQVKLVNKLPAGSRSASPFLTFETKGARSAVVQDVPISRPLSRSDVERLQAALDSAQELPQTLVQVPDLPQLQSLVDRLKNVGDLLTVAVTQYGDLHLHVATSLVTVGSEFRKLRILGVRATAPVGDQNLSASTRTNMAIERGEALSVQVNMKHLAKGLQCHLAKPDCTFYGISPGGACLTVIFQYFIPGTRLTDKSISFYCRLPVLDPGS

SEQ ID NO: 35450 - protein, 407 aa, Oryza sativa
MAVAEVGGMLASAVLKVATQKLGAAIAGRVMLQWNFDKDLEGMKATLESVDAVLRDAERRSIRDAAVRLWLRRLKDAAYDISDMLDDLENITSKSDAGKLGCVMIPNLTIAHKITLANKMKTISDELKEITNQHLSFRFTEDSSYKEHRVTDKRETSSKVEEALVVGRTAEKRIIISSLSKRMTEETVILPIYGIGGIGKTTLAKLVFNASNFRDYSKVWIYVSQTFDLNKISNSIISQVSESESQLTEREMINRRLDELLSGRKILIVLDDLWERDQFQLDDLKTMLKVGRGSRVIAIVTTRDKDIAEKICTTEPYKLEPLTDDMCWKIIKEKSVFEARDDKEQLENIGREIASKCGGVALAAKSLGYTLQPMKFDEWVSVRNNDIWKASTFECTSLPYHNVLASL

SEQ ID NO: 35451 - protein, 200 aa, Oryza sativa
MDMRARYLARKRREEEDDDMMLFIFPALHLLSSSGAREKKRHHTSKLTGDERVRELLEGHVKNCRVAFRMEPEIFISLANYLRTEKLVDDTRIKVEEKLAFFLYMLSHNASFEDLQEKFGHSGDSFYRHVKHFFNSVVPTLLKRFLKPPNPNEVHWKIEKDPRFYPYFKNCLGAIDGTHIPISISSDKAAPFRNRKNTLS

SEQ ID NO: 35452 - protein, 330 aa, Oryza sativa
MGSDAAAAGEKHTLRSQVLFPKDYILRKVFRKDGPPLGSEFDPLPHSAPGHLRDTTDDHFYQNQRVIKKRKIVEPTTQRSSLPCGDNGPVRKHGAGKGLMTVWHAMYSHSSKIQDGSNFIDETGCLRSLRPLDDCGRIEDCDDGKLIQKKVLARKKVVKRTRPPSNKRKVPSSRVTDPKKHPPMECHLSVDESQSPVLQANQVTLVDDEELELRELQAGPNPLRCSAHLSSSGRHGCPLCKDLLSRFPPSSVKMKQPFSTRPWGSSPEMVKKLFQDSMLLGEVHVNLLKLLLLNTERGSNDVFVPRSSKDCRFLSFVNFVSLDSTNLCFS

SEQ ID NO: 35453 - protein, 131 aa, Oryza sativa
MSVEYPLAKSRRQPSKPTSDLSQLSQSVSSRWTRGLRWSMSGAAPNPSPVSRWPVPSEYCVSSLQIMPGPQSRRSSGVPPSNTQYTPRASFFSAHRWLITTSATHWTPFPWNAAISDLSSAAVPYLDASRS

SEQ ID NO: 35454 - protein, 506 aa, Oryza sativa
MFKSFNDSQTSLMDFVFHLKSVVGIEAFVEAVAIGKGKDDLTGFVLDPSKPNQVLSVQPGMPAGKDCSSLASEDIIKFLTGDFRRSKTRSNDLFWEAVWPRLLARGWHSEKPNDVSTTKNCLVFIVPGIQRFSRSELTKGTHYFDSVSDVLKKVVADPVLLEIEVDGMGNGVNAEKNGFDTAMKLNQDVPFDGYHELPKFTIIDTSLVQGEEPSQVRELRNLPADANISFGPLRHTHNMVSDSSSDEHDTDDRSSDYKEGYAGVTADENGTEMVSSKNADNESQVDSFRNMAATSCSVFPVNGHSSNGNGDTIGATSFFPQKTKIEKRKYLSPVTKRRRLTSCSNDQTSRRSFSFSKGPGLEKEKVKLPSTSSKPTAIDVGGSFQSKSLASCSGKEKPCQQIKDASNSHANDRSNEKMNVARPKEKPSGHKVDTLASVHSKTAVEDTKPAKGVAQSSDLVANQVKLETPQDDKTVTIAHAPSSDTHFGIVRVIDRHQPCRRKKNIR

SEQ ID NO: 35455 - protein, 272 aa, Oryza sativa
MVQVTTRDPQANHSSPFSLLLSHSQRPPPLYPTFPFPAPGRRPPPHSRLQLGDGEDEVLGVRRLHNAVRVVEWRGARQRLVRGGGSRRRRHRRRVVVARGDARRPRQPELRTSPGQRLLLLRAPPLVSPRTPHLAELNESGGLEWRAAPATRRRSEEDGGGGADLEWHRAPPLSVATRRRSEEDGGGGGADLERRRAPPLSASTPPLLAGAPLRCSRRALQRSRGKVPSGGGGGFSPVMAVLGDIAGRRLRSRPAHSHCVLFSLVSFTFVHG

SEQ ID NO: 35456 - protein, 307 aa, Oryza sativa
MFLRKIFFGTKPGLVFVYMQVHAETYALVVSTENITLNAYMGNYRPMLVTNTLFRMGGAAVLLSNRRAERRRAKYQLMHTVRTHRGGASDRSYACVTQEEDGAGNVGVSLSKELMSVAGDALRTNITTLGPLVLPLSEQLRFLATVVLRRVFGHAAGVKPYLPDFTAALDHFCIHAGGRGVLDELERSLKLSAWHMEPSRMTLYRFGNTSSSSLWYELSYCEAKGRIRRGDRVWQIAFGSGFKCNSAVWKALRTVDGGAGRDAGAWAQDIDALPVHVPKVVPIVDDDDGANGGDGDRHDAASHVRPE

SEQ ID NO: 35457 - protein, 471 aa, Oryza sativa
MEPDAAAAAAAGEREAEIEKAFRARLPDFRKQADSLTLEGVRRALEKDMGLEKHSLDAHKKFIKQCVDKVFSGSDDDNTNNNAPEKDEAKDDRSSKEESEDAQPTSDSNKISSNADEPVAKSSETDRDQEGDKDHSSGSDISEATIKNAIVKRASYFRENSETITLQGVRRTLEEDLKLQKKALDAYKSFISTELDNILQEPANGTKKTSKTESHKDSGQKTSKNSKRARQDSDTSEINDSHCERGDSDEDARPKKKKAEKGKAVKRQKKTTVEKQLSNSKAKKVAKKDLDKSKERSGSEEDNSNSSAEEDNKKKRQVAPAYGKRVERLKSIIKSCGMSIAPTVYRKAKMAPESKREACLIKELEDILEKEGLSTNPSEKEIKAVKKRKERAKELEGIDMSNIITSSRRRSTSNFIPLPTPKIVADSDEDDEEDAEDDNDEEVNVEGGDEGDNDVGKAGDGSADDAEHDSD

SEQ ID NO: 35458 - protein, 84 aa, Oryza sativa
MMAFKAAHDRENWNGGRICKLESKVYHLQKELAELKGEAPPPAPKLRLTVRKRTRPPPRIQLASKTRVVGDVAPDHAEPVIHVK

SEQ ID NO: 35459 - protein, 401 aa, Oryza sativa
MHILSLPMAAAAASTVPQSSSTSSTPQNTISTHSTELVRGSHEFTVAGYSLQKRKGAGHSIRSGSFEVGGYSWAIRFYPAGSTKEEERHVSVYLELRSTVVEKVTARFSFHVHGASASSLHMRGSFDDYTPTSKSWGYPKFMEIETVESEYLINDCLTLLCDVEVVKTVKTGATISCFITVPPPAICRDLELLVGSKEGSDVTLQLEQSEYDAHRAVLAARSPVFSAQFFGPMADEDAAAAGSRRNVRIHDIKPAVFEAVLHFVYTDTLPPATTSWSASHRDKRPKLSDVAAASCSEEEVRVMIGERLAAADRFDLERMRLLCEDALWETIDVANAAATLRLADRHHCPQLKELCMEYIASAGVLAAVMTTEGFRELKLDCPSLLIEILENFGKRSEADEE

SEQ ID NO: 35460 - protein, 447 aa, Oryza sativa
MPQPATSSRRSGDFPDWVFLDTVAHTGRCHDNATTARAKSSDGYPIEVSFVFADPPALTRCFVHCPAGLTAGEFSMSPPSITGADGAFLLLRVIFPHRSDRCMVTDWFVYKSGPGTPSLELLIQRPNPLDVVSRRAGVLSCGDHCLVVDPEWRFHDDDWMKFHLHIFSSKTKRWSNKVAKLGRGMEAFNPFFLPTKVLCVVRGGSMAWVDFRNSILLLDSVPGNCPEVSLIRLPPLMPINNVDSGGSPDGPCVDLVRDVTCRDGWFKFIEMGFPYLDPNDAQLNRGWEATMFKRKIRSDNYWQWEPCGTVDSASLLPADSCVACLFPEIFDCNEHKLALNNVVSSFPTLDLYCDDVVYMMTKIKADDPDGWIFAFNTENNRLEEISPFSQENCHLHRIYLQCDLSKHLMNKALDVLASRRSGGGNGSGTRRTGVEEERRWWFGDDEE

SEQ ID NO: 35461 - protein, 263 aa, Oryza sativa
MPHYLRSLLCSIAEARYLNRTLVLDLSVCLAAAYAGGMPEEGKRLAFYIDIEHLQSVVGIVEHKRFWEDWDKWGAQGQLGVRIIEDSRVAPTKFSKSRDPLIVRKFGDVEPGNYWYNVCEGEAEHVLRPPQGAIRTAPSLMDIVDGIISRMQVDFDSVHVGGNDGNLRRRIEERLNGGGRQVYVAGEGINVVLLDALKAKYSSVHYLDAFEELWARDSKWFLEMKRLNGGVPVEFDGYMRELVDREVFLKGKKKVEVLVRSTL

SEQ ID NO: 35462 - protein, 300 aa, Oryza sativa
MNEHLRFEDGWKILEQGIVKCSKLLEDCPGGRPTVNEYMNYYDCAYRMAVQKDQYCQEMYNSYKATHESCVCAMVLPHLMHKQGDLFWRELVKMWSNYCAMIRFTTGFLAYLDRCFVTHKKLPSLEDAAATSFFSPVFSYFNNEISDVLLTLIRQERDGCNVDMDLLMGIMRGICRSEVKTKLKSAVIQDTYLYYSRKSYEWIVQYPLQDYLAKVQETVQKEMKRLIHYLCISEEEGSGLCLKAVSAPLMQAYENYTKKKHIGGQVLLQTYKTVEDDLLDRCSRLTIDNGLDNNSFSHME

SEQ ID NO: 35463 - protein, 357 aa, Oryza sativa
MVVTIDLREVTIDLREEGEAAAAAAMKAIAGRSDEEVLAAVLARKGGPVPFLQAAIDAAAAAATKAIAGRSDEEVLAAVLARKGGPVPFLQAAIDVAQRRSDLFLDPSAPGVVAEMAVEAQAKAEAEERRKRAKGEPRKAEEMLKEEEPMKAEEMLKEEEPMKAEEMLKEEPRTPMREAGRDKVERAAVVERVRDPKPNAGNGLDLEKYSWTQERPEVTITIPVPQGTKSSLVTYEIMKNHLKVGLKGCSFIIDGELFEPVKVNDCLWTIEDGNTLSILLTKENQKEWWTSVIKGDPELDPRDMKVPELRDCDVEAKETIVRILSHGLPKRAMDPATSDDIQQEELLKNAQYSHMDS

SEQ ID NO: 35464 - protein, 324 aa, Oryza sativa
MEVEAATTQRQPCKNAITTKQQQQQQQQLSTGRLFRSPLLVVNFVLMVVGSACGPLLLRAYFLRGGNRKWLSSLLQTAGWPLLLAPLCFSYSSRRRRREVEDDGAGAGAAATPLFLMTPRLLVASAVVGLMTGVDDLLYAYGLAYLPVSTSSILISTQLAFTAAFALLLVRQRFTAFSVNAVVLLSVGAAMLGMNAGGDRPAGVSRAQYCAGFAMTLAAAALYGLVLPSWSSARRTTPPRAAPSRTRSSWRCSSSSASSPRPSAPSACSSTTISTQSQEKPMNSVWAKRATTCSWPDRLPCTSASSSARSAPSSTARRCSPASS

SEQ ID NO: 35465 - protein, 463 aa, Oryza sativa
MSEVIASAVVGEAVSRISTFLIDNHNRKSSEEDGLERLEMAHIKMEAALEVSSRWPLAMDSSLMRWRKKLKRASDECSHVMDRCKRRAMEDDETEKISRCSFPKRIALATRSFLSSFAADENVDSLNSTSTIQRFERFADGAGEFLKFMEFGRIGSINYMLVDPLTGHLLAGKALQYESSHGNQYYLISKPMSFAERGQEAGVLLRYNNHERPEENFVLGILLRLTASTNVTGIVARCLDSLLPSFKPVAEAAKQELTQVHHRAFYCFPFVDSTDPEYWSIHHSETHRARPNPACCHGQSRSSDMVELSGTTTFPEQVIKLFVQRHVSARPSSSGHGGDGERRRSSEDSGPPPLLQVTAIFAPHASPEELPPSGSESAAVVAIDGREEPAVRTDIGLREVDEFLLPGAIDRLCHCHDVHGTVDGSSAAAAYEVFWRSGHGVAYLCVEKMGTEMARCRPTQWRE

SEQ ID NO: 35466 - protein, 62 aa, Oryza sativa
MRFPKAPAPPMDAASRRWLTSSTKLWISWLLLMEWPKRSRIQGKVRCSALGWGDQLPSARGL

SEQ ID NO: 35467 - protein, 181 aa, Oryza sativa
MLGPTVMRTEGRHHVGQLLLRPHPRCPPMGFTVMRGLHQNPFWCSAHVGHHQRPLVSCEGAGVGVVGSGVPSGSSAAAVASSFTSSEAKGRRWGATAPAASSTTHWSPKDPLKLMHELTETTGTDVARKGRTGIERNIGTVVPRPHLLWAGQHYYQPLHLDRGLRRRRPGRPLLGRQELMG

SEQ ID NO: 35468 - protein, 622 aa, Oryza sativa
MLKCLRYAEIPQHFAKKLKELKWLKTCLGFRAPPGTFLVNDDWKCLLNIVDDVPLLDLKFYGDEIRVYAGELRKVSVIVGFIEASKAIACRVTKLLCSSLFTEERGVAMLECYRELSTKHGKLPVDLANCMKYERWLHTSLGFRAPQEAIIFGSEWEHVSKISNLPFIDDYYYSEYGQGKGISIYRDELMALGAKAELKHGAPFVISGLKIPHDASAITPEAVISLLKCIRSWKMLGSALPDNFMSSINLRWVKTTAGYRHPKNCLLFGPACSSLHRDDGPFVDEVFYGQEILSYESELHTLGVIVDARAGCALMAQCLKSCSNGDAISRIYSYLEALRWKPRNANDNWIWVPQGSDNGQWVSPDRCVLYDRNSLFGSQLHVLVTWYDYKLLRFFKTVFGVKGHPTIGDYCRLWIMWQNSKSTPTPKDCAAFFEFVDKNWNTEIGKYLAGSITKVPVCSEDRILLLPKQDVFIPDDLLLEDLFRMQAEQPLFVWYPPASLSLLSPAKLNEIYSTVGVQKISKVVTRDESEDLKLDHSLTMVQKGTVIKPGLLRIILAFLADPALDFPAEKRHEMVSCLTNVVVYETAMPLTVSYQVGLSSGRSLNVKSARIFRWKGRNPEFS

SEQ ID NO: 35469 - protein, 154 aa, Oryza sativa
MRRLGRLKPEEKRSRQAVDLFGCLPCPPSLPQLSRSRFFYSISPPRLRLASLAMGKSRSGVLLALLLVCAAVAAAAAAAVPGSKGKGGAGRAEVACSDLATRGECVASGGGSRCRWCRSEALDDMCFGAAEAWRLPNQVFSCDPPAGGVAHARR

SEQ ID NO: 35470 - protein, 123 aa, Oryza sativa; identical to SEQ ID NO: 34622

SEQ ID NO: 35471 - protein, 710 aa, Oryza sativa
MKQVRDIAYDMEDCVDDFAHRLRHDPRGDGCLVEVYRALYEIYTCRPRCDIAAKLAELKNRAQQVGERRLRYGVVLNPIPPQRGETRNGDQTTGENQVAGRRLITVKEPIGVARAIEKLEAWMKSQSHKNRGVLAIHGFGGGGKSTIAAALYRKHGQNFDCRAWVTMPQKFDDRAVLRSILSQVMLPATASGGGDRRRRGGSRHAKIETMSQEQLIKGLKNHLQNKSYILVVDDVRSAEAWQTIRQYLPDEEGSRVVVTTRFEAVAGECILDRQKDMLHHVDRLSDDDAKRLFQESVSESIHSSDVKHAKETMDRMNLSHVRSVTVFGSLNQLPFMSLKLGIVQVLDLEGCKGFKKQHVKDIFKMLLLKYLNLRGTDINSIPSKIGKLRYLETLDIRDTNVQKLPDAIVQLERLTSILGGNTMAQVTLKLPAEATKKPLRTLHILSGIEITGEPTSVNDFHGYTALRKLGIHKLQIQEGTPGFKALLSSIQYLGGSSLKNLLINDECSGFIDALDSLTSPPRYFHSLQLYGMFIKVPRWIAHLTELKNLTLSVTVLRTDTLELLQKLPRMFCLIFSSWTSSKDLDLVDILEKNKSDSEGQILVKHGGFDCLKLLRLDAPLLPLLVFSERAMGNLERLDMKFNTLEGVFGMDNLTSLREVHMTAGEKAGEITKSIVRELEAEAGKYANTPRVVVYELAGRGSRSHTPNDPE

SEQ ID NO: 35472 - protein, 355 aa, Oryza sativa
MTQWADLDALRPAVAADVQVVTSDGKSIAAHSFVLGTASPVLERMIERARRGWNAECTIRVLGVSSDAVFAFLQLLYASRVTPEDEEVVTAHGPQLLALSHAYRIGWLKRAAEASVTARLTPEHAVDMLKLARLCDAPRLYLRCARLAAKDFAAVERSEGWRFARRHDAALELEILQLLEDADQRRERWARERASREAYRQLGEAMDSLEHIFSDDGCSCADADADADTDAPPCRGLRLLMRHYATCGARKAAPGGGCTRCKRMVQLFRLHASVCDRAAPHDDGDRPCRVPLCSHFKGKMRAEKADKTWRLLVKKVTRARAMSRLAAGREREVVPEVVAASWARYSSSGGAARLR

SEQ ID NO: 35473 - protein, 78 aa, Oryza sativa
MLKKRRKHKKRPKKWKMEVVVGLLLSLEMNCQSLFLMKQRQGQEMLVIRAMKKILRNLGLLQRKILRLIRMLLKKLVV

SEQ ID NO: 35474 - protein, 363 aa, Oryza sativa
MPPRPTVWAGPPHAALLRTQPLPAPPSAPPPSGGPARVAFLFLVRAGVPLDFLWDAFFRNGEEGKFSVYVHSAPGFQLDRTTTGSSYFYGRQLARSVKVAWGEPTMVEAERMLFAAALEDPANQRFVLLSDSCVPLYNFSYIYTYLMASTKSFVDSFVDKTEKRYNPSMSPVILKDKWRKGSQWVALTRRHAEVVVGDKLVLQVFRRHCKMVVTKALLGQKPNYRRLGFGLRRKQISKGSTRMEHDCIPDEHYVQTLFSINGHENELERRTLTYTSWNQSSDPKDKMTWHPMTFEYESASPEQINSIKGIDHVNYQMEHRTEWCQCNTTSVPCFLFARKFSYSAAMHLLEAGTVGPLKSALLA

SEQ ID NO: 35475 - protein, 176 aa, Oryza sativa
MPLQPGTADIVFSICYNADRWDLLSKYARRFVKSEVKLHGASFDIWMDFAAKVGDSQSIWNINSLRGKSVKRYNLATGFACVKGFLLERKPESAAAMIKLLHKHSPDEKKQLVTDELQKLVAEWPAEVIKRQKKDDRKALEEALITDIPQMISSMSKLRLDISVNLEKLTSQPETA

SEQ ID NO: 35476 - protein, 369 aa, Oryza sativa
MFVVFAHQVFASNHLKILKLSYAELDDDVFRGFSSRCPSLEELELKKCVVSAREISSVTLKSLIMVECKFTMNLSVGTPNLVFLQCITPMKWVPVLKDSGSLVTGSIMIDDSLLIGDSKKGHEVDGFSSDYSYGGSSEDYFDDLSSDISDDYDYNYENDINSDADTYEYNEIVNEYKFEQYKDHDDGGDCSMGGKYHGSSSNNGFNDDKTLGGQNVLHSLSNARSLELLAHSGEVVLSRESRSCPTFSNLKTLTLGEWCISMVADFDILILFLQNSPNLEKLFLQLEMSYNIQKELEKGIKPKGGSFACKRLSTVKIRCTKDDLRVRMLAQLFNSNGLSLEKIFVRRSGSFRLRNSKLNRELNCPWRMS

SEQ ID NO: 35477 - protein, 394 aa, Oryza sativa
MSDTGGGHRASAEALRDAFRLEFGDAYQVFVRDLGKEYGGWPLNDMERSYKFMIRHVRLWKVAFHGTSPRWVHGMYLAALAYFYANEVVAGIMRYNPDIIISVHPLMQHIPLWVLKWQSLHPKVPFVTVITDLNTCHPTWFHHGVTRCYCPSAEVAKRALLRGLEPSQIRVYGLPIRPSFCRAVLDKDELRKELDMDPDLPAVLLMGGGEGMGPVEETARALSDELYDRRRRRPVGQIVVICGRNQVLRSTLQSSRWNVPVKIRGFEKQMEKWMGACDCIITKAGPGTIAEALIRGLPIILNDFIPGQEVGNVPYVVDNGAGVFSKDPREAARQVARWFTTHTNELRRYSLNALKLAQPEAVFDIVKDIHKLQQQPATVTRIPYSLTSSFSYSI

SEQ ID NO: 35478 - protein, 264 aa, Oryza sativa
MIVGDGSRTSFWHDCWIASECLATKFQALYTHTMDNQISVKYALQQGLTASLVPRLSETARQECQCLQDLLQDFSLNNERDIRTGGIMGKFTTKNIYDTRLPPGISSPNWNLIWKCRAPLKVKLFAWLLVRDRLSTKQNLLKKKIVQNGVCDVCQQGDETADHMCFTCPFVQSFWERIRVNPTIQDVWLLHQLKPSPNVPELHHHVFFLLCMWAIWNHRHDVVFRGQTPSIRCCLQRCINEAALWAENLKIEDRHVGKLSPPVI

SEQ ID NO: 35479 - protein, 32 aa, Oryza sativa
MQWFGGNANLADDTLEHAPGAAVAASSPLPSI

SEQ ID NO: 35480 - protein, 458 aa, Oryza sativa
MATQEREPERQPHAGRRVALFPLPFQGHLSPMLQLADLLRARGLAVTVLHTRSNAPDPARHRHGPDLAFLPIHEAALPEEATSPGADIVAQLLALTAACEAPFRDALASLLPGVACAVVDGQWYAALGAAARLGVPALALRTDSAATFRSMLAFPRLRDAGFIPIQGERLDEAVPELEPLRVRDLIRVDGCETEALCGFIARVADAMRDSASGVVVNTFDAIEASELGKIEAELSKPTFAVGPLHKLTTARTAAEQYRHFVRLYGPDRACLAWLDAHPPRSVLYVSLGSVACIDHDMFDEMAWGLAASGVPFLWVNRPGSVRGCMPALPYGVDVSRGKIVPWAPQRDVLAHPAIGGFWTHCGWNSTLESVCEGVPMLARPCFADQTVNARYVTHQWGVGLELGEVFDRDRVAVAVRKLMVGEEGAAMRETARRLKIQANQCVAATLAIDNLVKYICSL

SEQ ID NO: 35481 - protein, 122 aa, Oryza sativa
MRRTDWSEVPLDQMSLPLAFSRRTRSPSPVSSRVAFSPTGLAWLAHQTTRAILFTGKESVSGKMKTAKMNSWQGGVQKNPAANERSEVCGDRRTMARTNPSSYGTLSRTLFLTHSVERLALG

SEQ ID NO: 35482 - protein, 358 aa, Oryza sativa
MTVTTVVEETNNPAATAVKVEEKTAAATTTTTTTTQVDKKTTSGEEEKPKPVVTYRYICENIHRLDRNDPFFFTWGMRNETAYAMCLLSLLYAVLSLCLLLPWQPIPTEGDGDHPLINSIWTFSLLALSYMFCWIISLSEAITKLVAFTSITYGILMAFAVAHLLGRVVGMAVIVIAVLYTTGMFAHAIAEHRQHTGSDTAADALLTKKLTTEQMQREELRRLPFIVLGAYSLFVFGCTAWLVFTEMGSISTATVIIVLAEVSIGTCFISYLWSILLSVGLLHDTFVSHDTIVFKAGSYSIALYFLAFLLIAMFESKLLGLSVLLLIPMAMAGFLGYLVAVYSHYKSLRDKLDINNLK

SEQ ID NO: 35483 - protein, 485 aa, Oryza sativa
MLPFVRSLRRLGPAAADGRLLLPLAPLSSKAAAPPPEYEMPSVTWGVIQGRKERLVSRVLALDFLRSAGVSDPAGELEAVELPSSLEVLQERLDFLLRLGLSTDDLSAYPLLLACSLRKNAIPVLSYLEKLGVTRARLAAFVRAYPACLHASVAVDLTPVVKSLRGLDVDRQDLPRVLERYPDILGLKPDGTISTSVAYPVGIVGVAPRDIGPMVTHFPFFLGMRVGTTIKPLCEYITSLGLPMRILARILEKRPYILGYDLEETVKPNVEALLSFGIRKEMLPLVIAQYPPILGLPLKTKLAAQQYFFNLKLQIDPDAFACAIEKLPQLVSLHQNIILKLVEFLRGRGISNEDVARMVVRCPQILLLRMELMKNSLYFFKSEMKRPISELLDYPEYFTYSLESRIKPRYMRVSTKGIRCSLDWFLNCSDQRFEERMRGDFIEGDAPGPSFTMGGKLQMPGSQLVSDDDNAESDDEVLYRRTVML

SEQ ID NO: 35484 - protein, 391 aa, Oryza sativa
MACPSRRAWSDGLPPELLAIIVLQLNCLADRACFSAVCRAWRDAAPYADAPQRGVPWLLLPARDAPSFFSLHSGATRRMRLPDGVRGTRFCGVHDGGWAAVAADTWRGFAVVNLFTGVRLPLPEKLRVEVPPGGNHDQFALAAGFTRHHMLIRTVVFSCPPTSPYCIAAAHVSSASNIAFCQPASLSTSWTAYRRDMDIIQDLIFHRGALLQGFHVLTNKEEVLVYAPTAPHRPGAPLKLACTRYSLRPRDDYQPDDALPPTFIATRYLAESRGKLLMVLRHYTGNPVVRRRTRMFRIFELTFGEPAEPRRAATPCWWVEIPELTGRALFLGRSCSRSVDVAQFPMLQEDTIYFLDDANLDLSMVLNNGSTYCNVDMGMYRKGEKIRPGAR

SEQ ID NO: 35485 - protein, 352 aa, Oryza sativa
MATAVMDSEFGSLVKVSAAVWAAMFYARLAAASLRPGAPRLAALLPVVALFCVVPFSFSTTTFRGCSAFFLSWLGVFKLLLLAAGRGPLNPTHPLHHFVFSASLPVKLRHLASAKPAKGVDPAPANESAAGKILVSGAVIPLIIYTYQFKNAMSRYQLLILYTGHIYFSLQLLLAVVHGLIHGVLGMEMEPQVDRPYLASSLRNFWGRRWNLMVPAILRPSVYRPVRARLGDAAGVLAAFLVSGLMHEAMFFYIMWRPPSGEVTVFFLLHGVCTAAEAWWARHAGWWRPPRAAAVPLTLAFVAGTGFWLFFPAMIKAGLDEMVLHECQGMVAVMEQSGRWLAGATNLTFATR

SEQ ID NO: 35486 - protein, 421 aa, Oryza sativa
MAGATTTSSPLRRMESVCRHLLPASPPILYQNPLGAIRLESSPVIIGGMVLDIHAKPSMQPHPGTTVPGMVKYVSGGVARNIAECICKLETRPFMISVVGNDMAGDFLLKYWRSAGLCTDGILQIDDVTTPIVSNVFDGSGELIAGVASVGAVEKFLSPSWICQFRLHISTAPLLMLDANLSPDSLEAACKIAHESGVPVFFEPVSLAKGSRIAPIAKYITYTSPNEIELVAMANSLSPPEKYTFVKMEQSKNKAKAVEYLFEMLSPAMFFLLEKGIKFLLVTLGSNGVFVCCKESTSLMDQRKSEMMSFSTPLLQKLERCFPSNMLVDLPREGSSRTCVFHFPAVSASVVSLTGAGDCFVGGVISALCGGLGMMQSVAVGIAIAKSSVESEANIPDKFSAATIADDARRTLLSAKMMWCK

SEQ ID NO: 35487 - protein, 350 aa, Oryza sativa
MGAGMSSGRRPSFYGGGGGGGVGRPRGMLPLLALQVLLEYGRAGASRPPVTAALLAANALLYLRPGSLDALLPSLNRVAFNPHLIIHYCDLTRFFLSAFYHLSETHFFFNMSSLLWKGIQLETSMGSVEFASMAAALLGMSQGITLLLSKGLLLFGNDEAYYDQYAVGFSGVLFGMKVVLNAWSDDYVFLHGVVIPAKYAAWAELLLIQAFIPGTSLIGHLGGILAGLAYLWLKRSFSGPDPLSLLISGIGKAVRWPVGFVQKLFRSGRPQGYTPSRGRVGRGSARENGRGIWRCSACTYDNSPSTDICEMCSSAREDHAFSHRQHLQAGGNGEPSVEEIRRRRLERFSR

SEQ ID NO: 35488 - protein, 72 aa, Oryza sativa
MLQKGDFSCDVNLIQLSMHGDLIVWERKSHFPGQIKRKQISRLACSLMPHLQEGISGSVSICFFSQRVGKNL

SEQ ID NO: 35489 - protein, 391 aa, Oryza sativa
MAAASNVPPSSSTSSSSPHNTTSTHSTELVKGTHRFTVAGFSLQKRNGAGHFAKSGSFDVGGYSWAVMFYAAGEKEEDQGHVSVFLELQSTGVEKVTVKYTFNISGSSLLSAGWGDFKPSSKCRLGFNKFMEIETVEDVYLMNDCVTIHCAVEVVREKKARATVSRRIAVPPPAICRHLEQLLESKKGSDLTVQVGESKYDVHRAVLAARSPVFRAQFFGPMAAANRRASGGGRCVRVHDMRPAAFEAVLHFVYTDTLPPVKEEEGFLTNNSASRRHLVNLRDAAAGCSKGEVRVMVREWLAAADRFGLERMRLLCEDALCESIGVANAAATLRLADRHHCALLRALCMEYIASPGMLAAVMATKGFKELKVACPSLLIEILEKVGCCRSE

SEQ ID NO: 35490 - protein, 461 aa, Oryza sativa
MQIPGEHVTGVLSKHHRSYKLALFPAIGALVTGLAVILMIVLILLIRKKSRELEKIEGTNPLDAWSSCLKKGQEGSSTIFDRFTYRQMKKATRNFGTVLGGGEKGTIFKGKLSDGSVVAIRRIESSPKQGQLEFCKEMELLGRLHHRHLVGLKGFCLTRFEGFQVYEYMENGSLKDHLHSSGKRLLPWKNRIQIAIDVANALEYLHFYCDPPLCHGDIKPSNVLLDRNYLAKLAVSGLVQCSNGDSTTISSTLVNVKIPATPGYVDPCYVVNQVVTPKSDVYSYGVLLLELVTGKPVAQGDDDGNGDSSSRSSSKNLVEWSRELIGTDYRLHELVDPAVADAFDLDELQVMADVIHWCTHRDGAARPSMKQVLRILYERLDPLSGGLARAVAGEEGYYYGGWQSGRKGKEGAEMLAGGGGDGGRCLPSSSNTSRSYCSRSVLLECNSPEEAPSQSSPRGLP

SEQ ID NO: 35491 - protein, 130 aa, Oryza sativa
MRRAMERRPRDLVAVLALSCLLLLLPLLVSSVPMSRSLHLSSQQQQHPPSLNLSPDEMAAAAAARGLGRRPAARMDVEVNDYPGSGPTTAMTLPKVLGEHEFSQAEAAAAAAAGTACSSFISLLAISKFT

SEQ ID NO: 35492 - protein, 101 aa, Oryza sativa
MDGEATSLMISPEIRDAVTKVAVFVLVQALVYLILRSSSSVFSKDGKLRSSMSFRSMRSMSVRRFLAPLSDVPVGTDEPWPSPSSSPSPTLSRRWASRRED

SEQ ID NO: 35493 - protein, 59 aa, Oryza sativa
MRTVWRCRGIGSDLVDSAGSHTAGKGSGAGGATAATETPHAASRSAWQPARTSTTAPPV

SEQ ID NO: 35494 - protein, 193 aa, Oryza sativa
MYSDVAAGGGGGSGGGGRVSAIETGTKLYISNLDFGVSTEDIKELFSELGDLKKYVIHYDRSGRSKGTAEVVFARRGDAVAAVKKYNNVQLDGKPMKIEILGTNTPTAAAALPANNGGYVRNVAKSAPRGGPAGLPQGRPRPRGGGRRRGGGGGSGGPGGSGGRRGKERSQPKSAEELDADLEKYHADAMQTN

SEQ ID NO: 35495 - protein, 51 aa, Oryza sativa
MAELAVSSVPPVRRVMPLVAAAPRCCRRWVSGGAPPLPSPRPSRPGSGWSH

SEQ ID NO: 35496 - protein, 72 aa, Oryza sativa
MHRLLLALSPPPPRLLSAFSSSHRSSPPSSRVAPPPSSHRASPSSPRAVPPSPPRAMSPPSTHTSARPRPDS

SEQ ID NO: 35497 - protein, 468 aa, Oryza sativa
MIVPLEQKLNMLWSFIKRHLKSRILVFLSSVKQVKFVYEVFKKLRPGISLRCMHGRMKYEVQQAIVAEFKEGHSVLFSTDIFARGLDIEDVDWVVQVDCPENIALYIHRVGRTARYNKRGKALIFLCPEEEKMLEKLKAAESKIPIHIKKPNTEQLQQISQNIASVLVQYPNLQQLGKRAFVTYLKSVYLQSDKEVFDLSRFSMENFAAYAASLGLPVTPKIRFVSHKKNVPKKYMGDIDVKRMKRSSKPEVIEINPQAKSNLIEDDGDYDILYPKEQQTDVNMADGLDDVLYPKVSTADTNNEPEKVTQLGNKSVKKKKLKINVHRPLGTRVKFDDEGHTIPPFASIAEEVGSGDVIDKDKISQRYAEMLREMQEHDKEDKLEHKRILREKKLQKKLKLKRKRNEEMDAGSENSGSESDRDQRTASKGKKRYFNSDDEEGSKDAAKDGDVLAQQEALALKLLSKMHS

SEQ ID NO: 35498 - protein, 350 aa, Oryza sativa
MAPLPSPPLLAESLATLRTASPSPPIPCSPRRTRPLVSARFARTAGRRSRSTGGRRDLRSCAYAAEAEYGSAEDEVADDFYSVLGVMPDATPEEIKKAYYSCMKACHPDLSGDNPEVTNFCMFINEVYTVLSDPVQRAVYDEIHGYTATATNPFFDDSAPKDQVFVDEFTCIGCKYCANVCPNVFRIEEDYGRSRVYSQSGSTELIQEAIDSCPVNCIHWTPAAQLSLLENEMRRIERVNVGLMSAGMGVSVDVFRLASVRWEKRQSKVLEKIRTRMTNKKYSDISSSWTDIWGSPTRYQGNDLLMISEEEGTERAKRAAAAARRWREYSRKGADRPPEYKLPEAAGNKE

SEQ ID NO: 35499 - protein, 103 aa, Oryza sativa
MEGVNGGAVEEERKPLSEVVGDCVQRWFQDALKEARRGDSAMQVLVAQMYHSGYGIPKNEHKGRAWAEKASRYRPSVWKVGTKRPGYNASDSDSDEMNDDEKQ

SEQ ID NO: 35500 - protein, 458 aa, Oryza sativa
MLHLRRRLLPLLRVPSSPHASASYYAHLRRLRLPLSTAAAATATPSSAEDYLVATCGLTGDQALKASKKISHLRSAANPDAVLAVLSGVGLSRADLAAVVASDPHLLCARPDNVSRRVTSLRDRVGLSDPQIGRFLLAGGAMAVRKCDVAERLEFWIPFLGGSFETLLKMLRRNNAIVRADVEKVIKPNIALFQESGLTVRDIVKMPGWLFTFNPKRVEAAVERTGKLGVELASSRLKYMLSIAGNITEGNASARMKYLSSTLNCSMDKVECMVGKMPTIITLSEEKLRSKIEFLSSTLNCCVDKIGHMVCKEPFILAISEEKLRINTKFLSSALGCSIDNICVMVYKMPSILGLSVNNLCRKIEFLVTKVGLEPDYILSKPVLFACSLEKRLMPRHYIVEVLLAKGLIKNAGFLTYAILREKDFVARYIDQHKNAVPGLADAYATICSGKVPPELQP

SEQ ID NO: 35501 - protein, 316 aa, Oryza sativa
MVETTVDVMIRKGTNMRLESYEFLSDFKHGNAVVLLDYTESGNKGSFIVTQVDGSFTAWFETGGKELCFDSSGHITQLFKDMIVDFYDLTWSLHKRHLVMQNFVKENIYVKIFDGVPKLMILLTEVKLVDQLGPFKQDWSHVQGLMTWCKEQSGLKMDFLTKSFYDFIGSTDCTVIKLRNYPDDWDEKKKGDYLLTLAEVNHGVLKDKLKSRDDFHWPFVKLPKLEQNLPPMLQQILSGERQMKRKFDVTFFCDYINLLRNSYKKFNELPENVKALCINQDGFIKLIDGWSPEFWTKIYEKIGWPDYNIWKWPCKK

SEQ ID NO: 35502 - protein, 217 aa, Oryza sativa
MRSHTAVVCSALLVLAAALLLPAHHAMAEDVVSSRDNTARAPSSSPSAATATAPAPSPYTDTAMAPAPSSSNDTAVEPVAPPPLPFIIVEGVVYCKTCKSRGYSSDMDASPLPGATAQLVCYGKKVVNVTGTVTDANGYFLVMFYDLRNFNPRTCKVFLGSSPTSLCDKPVYPPNKWIGLSLLKETRTVPPVGLQAIYCPTSVLFYGPANAGQCPSG

SEQ ID NO: 35503 - protein, 133 aa, Oryza sativa
MGKYMRKAKVVVSGEVVAAAVMELAAAPLGVRTRARSLALQKRQGGEYLELRSRRLEKLPPPPPPPPRRRATAAAATADATAAESAEAEVSFGGENVLELEAMERWGFSLSSYCAILFLFFVGFLVGLIGGIA

SEQ ID NO: 35504 - protein, 59 aa, Oryza sativa
MNTLYRYKYTTIRLCGLEKNILSLLISNTQVENPGPAPGGQQPPNALTDSVCLSIYLSV

SEQ ID NO: 35505 - protein, 158 aa, Oryza sativa
MSKLVSDLTMSAVSSDRVVTMTVLPLALVFLNGAKNLSHLYSLSHGHISSKMSKNLLDCSLRSTSVWSCSRLCGSLSLPHLRLQLTSLATMLLKISLVRRSTSKRRETCTQILTWKCFFTLWSWNRCWVKVVLPIPPGPTTGRTARPSRSPVISLMAA

SEQ ID NO: 35506 - protein, 123 aa, Oryza sativa
MATSFSFGSSAASGSTGSSPFSFSTGTAPSAFSFSQPAAAPGLFGAAASAASAPSLFSGAATGFGFGSAASGTTTAATAAASTPSFGFGYSRMNGCCFVKMRLLLQEIQCLSNLKLWRMNCNI

SEQ ID NO: 35507 - protein, 390 aa, Oryza sativa
MHLLHQARKKNETSKPTTDEHKEVASNVLCKWTKEDIDRAETAMLKVLRVVQPGQWVSWRALRGAASKAVDSQELLDYSLRGLGGKLMDDGHFIAVRCNAETSAIEYRLEDNSNQSVDAAAFGPSVDHLLHDLKFLYNALLNPETMLASQPEVIGASSHSAAAKILDCKQFIKHYDQHTPRAPLNPFLLSVRCSIELLDHPKDYTAPPVELVLLPASATLAELKIQATRAFQETYLMFQSYQVEQLPDFPNFSDTTLVKHVLGSSQLVRVRGRCTGDNRRIVQFRMERGLENWTVDCTCGAKDDDGERMLACDVCGVWQHTRCSGISDFDDVPEKFICRKCASPRRGKGRGGGGGNGGSRMDVSAAGRCKDEIGSSVGGAGKFGRMATVG

SEQ ID NO: 35508 - protein, 359 aa, Oryza sativa
MKQGKVEMTPAVAAAAVLPVGFRFRPTDEELVRHYLKGKIAGRSHPDLLLIPDVDLSTCEPWDLPAMSVIKSDDPEWFFFAPRDRKYPGGHRSNRSTAAGYWKATGKDRLIRSRPAGPLIGIKKTLVFHRGRAPRGLRTAWIMHEYRTTEPHFQSGKNGSFVLYRLFNKHEQDDTHTPASNLDQQLSTSSQGNPQNGTPAVQPALASIMKDHQTLPSSGFSQLTEIQDASTSVHDKEQTVAHDDAFLDVLSQLPDLEPEQRYNGFPNITSPIRPYSDHPFVGNLGEQDLSAHFGSTLSEQDLQSLLFSPNYTKMDKHPTGNVESNPTASSNNPNNNTLLMDSWRKNDSYQMLLIQVRIF

SEQ ID NO: 35509 - protein, 111 aa, Oryza sativa
MGSEDTKDMLKNVDWKTVGGGSVTTDPSQPVVKKRLPKKIRQVPECYFLPRRYLPSALAIYGAVCAAGVGAGMLLEVWINKKIKGAFLFYLVAGGAIQLTFLEHCYFLESL

SEQ ID NO: 35510 - protein, 85 aa, Oryza sativa
MYGAGEIERRCVISSRYSWEKWAAAYPGSKVYIGLVASPEQDEAWVFQKDLYYEYLQFVTKLPNYGGLAVYDRYYDKKANYTGEG

SEQ ID NO: 35511 - protein, 553 aa, Oryza sativa
MSHRRRRNAAGPPPPEGIGGSSTAEASSTGEERPDLPWAWALGSERRVLALALAFRAANALLVRTYFNPDEHWQCLEVAHRIVFGYGHLTWEWKRGLRSYLHPFIFAALYKILSLLHLDSPWFMAMAPRLLQSVFASFGDLYLYKLSKLIFNNHVAQWALFSQLVNWFMFFCITRTLSNSMETVLTVTGLYYWFVAIESVKGNSVVSKQQAASKQSPPSRKMALLIAALACAIRPTSAITWLYVGLLDFIQMKSKSRFIFLEVVPLGVFVLAVTTFLDCWMYGSRIIVPLNFLKFNLFSSGGDYYGTHVFHWYFSQGFPSMIWTFLPFSISGILKSREWRLAGLIVWVLVVYSILGHKEFRFVLPVLPFMFMFSGHNLAAMAQLKGKGHNEKGRLSRLKLSVILLILTNVPMALYMSLYHQRGTEDAMLYLSREAHDGRVKSVLFLMPCHSTPYYSTLHYNLPMRFLDCTPSENKGTLDESDRFLMNPADFVGEVFGNLSSFSHIVLFESEERHVKLLLRNSFQEVRRFFHSHFKVDRDLQSSVVVYSQKSVL

SEQ ID NO: 35512 - protein, 260 aa, Oryza sativa
MAADSSMGFHQGITASMYNHHMLSFQSNSDLGGGAGAAAGMVMAPRSMNGTSSSAGLFVSPNTGELNTLKEGLVRYAREPNIMKYIKIAAMLPNRTVRDVALRCWWATSKDRRKKPDGFYTGKKIRDMKPIQDKMVASASMANFHLAPANTVTPFSISMQHTNQQCQVPKEEVPVVDSATQHLLEENNHLLNQIATNIETFKTGENTDLFFRTNNNFKNILSRMSETPGIMGQMPQLPVQVNEDHLSSLLQLDRMVRGDP

SEQ ID NO: 35513 - protein, 234 aa, Oryza sativa
MADPEDAAAAAAAGNEDDVEDLYADLDDQVAAALAAAGESGGSNPATDGEAEAEAPGAHHTEADANEAVDLGDGTAGYISSDEESEDDLHIVLNEDGAAPPPPPPAGRCEEGSEEGEVSGSCVKGLSTDGGRGKLGELHRKGLFEKTTAPITGQGDRSHQHAFQKEFNFFLPRNRTVFDVDIEAFQEKPWRQHGVDLTDYFNFGLDEESWRKYCFDMEHFRHGTRTLANELSGL

SEQ ID NO: 35514 - protein, 225 aa, Oryza sativa
MGRGKVELKRIENKISRQVTFAKRRNGLLKKAYELSVLCDAEVALIIFSTRGRLFEFSTSSCMYKTLERYRSCNYNLNSCEASAALETELSNYQEYLKLKTRVEFLQTTQRNLLGEDLVPLSLKELEQLENQIEISLMNIRSSKNQQLLDQVFELKRKEQQLQDANKDLKRKIQETSGENMLHISCQDVGPSGHASEANQEFLHHAICDPSLHIGYQAYMDHLNQ

SEQ ID NO: 35515 - protein, 427 aa, Oryza sativa
MLERGLVAPDPQVYALVMGGFVNAGDGDTVVSLYEELVEKLGGGQILDGMVYGNLMKGYFLKGMEKEAMDCYAEVLGEGSKVRFGAVSYNMVLDALGRNGKLDDALQLFDRMCEEHDPPRRIAVNLGSFNVMVDAYCRAERFQDAIEVFGKMGEKRCAPDALSYNNLIDWLGKNELVGEAEQLYKEMGERGVNPDEYTYVLLIESYFKVDRVDDSVSYFNKMFVAGLRPNANAFNKVIGGLVKVDRLDEAQGFFDKMPEKEVKPNIGSYELLLRAYIDAARLDDAIKMAKCILLDESVVFSDELKALLEGALQKDGRDGDMTKLYEDVEREKAEAAARAAEEKARAEALAKEEEERKKAEAKAKEEAAARASRAAIEAVLGRKKEGENDDSTVNVEEAQVVESHSDTNDITEENEGDDQKKSGDALP

SEQ ID NO: 35516 - protein, 413 aa, Oryza sativa
MPVVDELLDELAGAKWFTKLDLRSGYHKIRLLPQDEHKTAFRTHQGLYEFRVMPFGLTNAPASFQGLMNKIFALMIRKNVLVFVDDIPVYSKSLAEHVQHLRQVFQILQHHQLFVKASKCSFAKQQLEYLGHIIGEHGVATDPAKVQAVQEWPVPKNLKQLRGFLGLTGYYRKFIRHYGVITRPLTELLKKDKSYNWTDAQQKAFCQVKMAMVQAPVSVLAMLDFSQEFVLETDAYDRGIGAVLTQNGHPIAYLSKALGVKAQALSTYEKECLAILMAVQKWRAYLQHSEFVILTDHRSLTHLGEQKLTTSMQHKAFVRLMGLQYRIQYKQGSENKVAYALSRRDAQTELLAISVGRPKWLEIVVERYEQGDEAKQLLAQLILNPTGVEHFSLLNGVIRFQGRIWLGKFEDAH

SEQ ID NO: 35517 - protein, 216 aa, Oryza sativa
MAGATAAGAAAAAAGTGAGSPCGACKFLRRRCVPECVFAPYFSSEQGAARFAAIHKVFGASNASKLLSHLPVADRCEAVVTITYEAQARLRDPVYGCVAQIFALQQQVAILQAQLMQARAQLACGIQSSSHSPVSWPDSGSISALLRQDMARRPPGGALDDCFGGGGALLPELMAAGFKDDVAAVQMQQHCSKAVDAGELQYLAQAMMRSTSNYSQ

SEQ ID NO: 35518 - protein, 45 aa, Oryza sativa
MMALSDGFGSNMAAVVVEAGASRYFADGGGGYGWMRRNQWRRQRI

SEQ ID NO: 35519 - protein, 284 aa, Oryza sativa
MVGLSEGEKHFIRGGIAQDLRTDGRRRLQFRAISVETGVIPQANGSARVRLGATEVIATVKAELGKPSILHPDKGKVSIFVDCSPTAAPMFEGRGSEEFSAELCVALQRCLLGGKSGAGAAIDLSSLIVVDGKVCWDLYIDGLVVSSDGNLLDALAAAIKVALSDTGIPKVNVSLSATTDEEPEVNVSDEEFLQFDTSSVPVIVTLTKVGKHYIVDATSEEESQMSSAVSVSVNRHGQIRGLTKRGGAGLDPSVIFDMISVAKHVSRQFISVLDSETLAAEAAE

SEQ ID NO: 35520 - protein, 114 aa, Oryza sativa
MASRSGDRRLAVVAFAAAVLLSAAEGLGVNWGTMASHPLPPRAVVRMLQDNGISKVKLFDADAGTMEALAGSGVEVMVAIPNNLLDLLTDYDAARDWVHENVSRYSFDGGVNIK

SEQ ID NO: 35521 - protein, 113 aa, Oryza sativa
MSARGGVTMAGGGGGDRAPSSSSTAMISRLLPPGFRFRPTDGELVAHYLARKAADAGFTSAAIRDADLYRAEPWDLLPPPRCDAAEEEEEEEEERCGYFFCTAAAAAAAAPWG

SEQ ID NO: 35522 - protein, 530 aa, Oryza sativa
MAKGDSKSNHVLAPMLRKEGLLANSIEKSNPQLTSPIRAHPIHALVRTKKGIPARSVLKSNPQPIRPKQMRGSVRGVSLKGQSTMANDNSGEELKSCKVKNYSISKESAKELMVHKGNSYEDNKCDKICGEVTMGDRKHHVNLGSTKSLKRDYIPSTCGDHYKDNTKGNEVPNPSPLTKDGPKKHDRDECEDYKNLRPTKKRRRYIVNVDEEDDYDDKNPMDIKDSTKVAMPIAAESIKRQFYHCIQPIDEPIWSGIFKIGGNDYIPFSAHLSTKSCKKVWDLSVSIPSIVQVTKLSRSVVWPKSLEASSPTDDSIGLYFFPPKMRLDKGMDQLVKEIVEKDMALSAVIGEAQMLMFPSTLLPEKYRTFQGKHYLWGVFKRRGGDEQQAAAMAAEQQRGSDQRVKQEQENTQFQGDETQQRIKKPNSNLQETAVIKQQPSSPSSSSVTAAHIGVDVVQEKSTAASGGRPAVPAGSHGRVIGLVVRQTPGVEELIQQMRRGGALLATMEGEMMGGFEANDDDGAKKFKMVE

SEQ ID NO: 35523 - protein, 396 aa, Oryza sativa
MLLSSRLHLATPSSPATCPSPLRRRRRLGLPEPRTRRPPPLASKNPAPPQPQPLPLSWLSPRRQWRWRSDYGDADAAEEESPAPLVEDGVSGGGEKKSFWAAVSLIVGTAVGPGMLGLPSATIRSGPVPSTAAIVLSWVYVVSSIVLVAELSFAAMEDGGVDEVSFTGLASSTLGATLGAVVAVVYAALSFSLLVACVAGIGSLVSQLFPAVDPALAMVLSWNAVILGLASSSGGARSDDPIKLLLSVNPAALPAVRGFAFAALATSLIGYAVSFPKQLADTVELIGQRFSPKRGIGQLSESSGGHGRNGAILTWIVLIIPIVIASFFSAAFSKALDFAGVYANCFLFGILPPVMAWIHRSQKRKRSSGSCEDILPGGNVALLILFSIAVVLAFWH

SEQ ID NO: 35524 - protein, 406 aa, Oryza sativa
MAAARACLVVALLLLVALFSPSEATSSTSLRRRQVRSLLKRLNKPPLATFQSLDGDIIDCVHISNQPAFDHPLLKDHTIQMRPSIQPSGLYGEATRPFTQTWNQNGEKCPDNTIPIRRTKEEDVMRATSVTTFGKKTHGGSPHPHSHLGGVTDGHHYGVAYATGDSNYYGTKVTINVWQPTIATFGDFSLSQLWITAGSYENKDLNTIEAGWQVYPAMYGDDKTRLFIYWTRDAYNTTGCYNLACSGFIQTNPQFVIGGSLSPVSIYGSTQYEYDYLVWKDPAGGNWWLQLQGNYVGYWPSSIFTLLQTGVADTVEWGGEVYSPQITAPMGSGHFPEEGFGKATYSRAIQVVDSSNHLKPPNGVGLIASLPNCYNIMTGSSSTTSWGTYIYYGGPGCPQNSQIEVM

SEQ ID NO: 35525 - protein, 476 aa, Oryza sativa
MMATAGSKSPGRALRRIAGAAVAAVLLRGSFSASKCKTEARMAAARMKLLRNRREAQVHQMRRDIAALLRDRQEDTARIRVEHVIREQNIMAANEIIDLFCELIVTRLPIIAKQKECPADLKEGICSLIFAAPRCSELPELGRIRDLFEKKYGKDFVSAAVDLRPDACVNNLLIEKLSVKKPSGQTKLKILKEIAKEHQIDWDMTETEQELLKPSEELIQGPNTFVEATNFPVKTTMSAAHAVQINPSNYSSGYADEYDDERTMQFKDAASAARAAAESANRAASAAKAAADLVNKKTHSSDEVEDRRTSFHESSHSSKRQSMSNSSRSSRKEDIVAFDESNPQGRRTSRTGSSIESNHVEDKEDTEQVELSARRMRKRNIRSTRKVHSEIKFDDSEGLNSETEDESDTEIQSIERPAPRSEPYPGSRHSEDEEKENHELPDLPKANLSSRVHPNMPLDYETLTARFEALKSGKLP

SEQ ID NO: 35526 - protein, 148 aa, Oryza sativa
MQRQRVIHFLKGLNKEFEDRRAAMFYQATLPTMEEAISAMVQEEMRLKLMRGTNPTRSAYTVADNRECYNCGQVGHVSYNCPTPRNIGGRGLIRGGYGGFGGTRGGFGGDRGDFGGNHSGRGGRGGDRGGGGRGRGEVLLRPCSHRGG

SEQ ID NO: 35527 - protein, 232 aa, Oryza sativa
MEMVLKSTDDRARREMKALVLNLLKDSNHCTDGSSDISSELLYSSCQGCLDRLRLLFSEATGQEFSVELTRQITLETDNLLWLVEILVNQRICDDFVALWANQSKIAELHGKLPVASRHTVSCITARLFVGIGRGEMLPSKNTRLLLLQVWLQPLIDDYSWLQCSCRSFDRKLVEEGIGQTILTLPLEDQRSMLLAWLGRFLKLGDNCPNLQRAFEVWWRRTFVRPYVSQAR

SEQ ID NO: 35528 - protein, 217 aa, Oryza sativa
MERRALRRSRRVRQHSAPLRRLGGRTKDRHREQLTPPVAPLAVPVPMPPDTNRTSPGDRPVLGLPAGRRRRLPHPRRRVRRQPEARRPLARQVPRVRRPPRRPREDLPPRRRRPEEAGGRGIRLRRRWTGFPAAAILNARDDDGNTALHLAVVAGVLRVFWCLFRNRRVCLDLANNDGLTPADLARSTIPAGLYSNRTVHHFYLTRACTKIVSDMVF

SEQ ID NO: 35529 - protein, 678 aa, Oryza sativa
MSKKLLPIMATKSAKDLVGDSKALVAASDVVTSSAIAESYNDQIRPLLDAVDRLRHLKVTQEGIQLPTIVVVGDQSSGKSSVLESLAGISLPRGQGICTRVPLVMRLQDDPSADSPKLQLEYSNGRVVTTSEAKVADAINAATAEIAGSGKGISDAPITLVVRKRGVPDLTLVDLPGITRVPVQGQPDDIYDQIAKIIKEYIAPKESIILNVLSATVDFPTCESIRMSQQVDRTGERTLAVVTKADKAPEGLLEKVTMDDVNIGLGYVCVRNRIGEETYDQARIEEERLFKYHPLLSKIDKSMVGIPVLAQRLMQIQATIIAKCLPDIVKQINDRLSRHSSELDQMPPDLNNVADAVRAFFHIVKQVCASLEKVLVRGEFDEFPDDRHFHGTARIAEKMDGYKRRLPAECPKSSDDDAMFLMEEVRVLEETKGINLPNFLPRSAFLVLLKKKVETVMHVPHELVNEVWGYVEDVVMNILLKHSENFPQVQPSCRRAVQTLMDKARARSAQHVKELIEMELVSDYTANPDYMRTWTEIMEGHDSFMEAVEDGSKPARITLEGFGEVDVSHLRAHAGSAGQAFDLRARLTAYWRSIVLRLVDGLALHVLRVVKRLVEHDLEAELADELLGNKMAGVERMLAPSPSTGAKRERLKKSIVLLRQSKEVVANIMDRISAAGEV

SEQ ID NO: 35530 - protein, 82 aa, Oryza sativa
MASMKLSLAVVFLLSAVVVMSAMGGAEEARCSVVCIQGGYITCDNYPYQKLDGCACECAPKDGQNCVLHLEHGPPSDCPPQA

SEQ ID NO: 35531 - protein, 438 aa, Oryza sativa
MYKVSVQMIEIYNEQIHDLLGNSGSEKKLGILNASQPNGLAVPDATMHPVNSSSDVIELMRTGLENRSVGATALNERSSRSHSVVTMHIQGDRLKEAQHINKSLSALGDVIFSLSQKNAHVPYRNSKLTQVLQNSLGGNAKTLMFVQVNPDVSSYAETLSTLKFADRVSGVELGAAKANKEGKDIKEFKEQLSLLKDKIAKKDEEISRLQLQSHNTPRATAKRADSLLKHSSSSPGISSLGSKIQHRRTASGGRIKIVGSRAGSDVDNFSDISDRHSEAGSMQSVDDIQQSREIMGLSKLSMSEMGHNSVDPELPCFGYDDSEGRLSDISDSGLSMGAETDCSMSSVVELTSLPDQDRVSGTQKEQHMAPSTPKDRLHKVATRASRTTTPKTPQSPTLWPKLRDPPPPRSPISTSTGKVRVTQATSSSRNSSTQKRWT

SEQ ID NO: 35532 - protein, 415 aa, Oryza sativa
MRRYDEMPPAMVLVPPPFTFPAAAARTRMAVPAYEVMFGKLQRRSLFDDYFDQVGSITSGMIMLRPLVDSHVDLTAKMTTTGGEALFRWQRYLDDPNTFMDLHLSTPKPMVQLRSCAYYPKYRIGAFGTFPLLKANRDCSEGDYGIMGLRYGSENLSIGASFLPFALSGQVPYGAWLVGRKGNISAGIQYKPLSGESMHPVPLTDLKNWNCAISYGMGSTSPLSPSFNFSLELVRNTQLVASFYQHFVVQRRVMNPREEEHIIGTTNFVDFGLELATSLDKDKAKENASNPSFQVAASWQASKNFLVKGKLGPSKSSMALAMKSWWRPFFTFSFTAMYDHLKGTGSYGFGISIEDLKEPSYQMAYSNYVIVTQNKEDVEPRFLKKLGKKYIFQPDIDSGNYDNLPTGLKPIDKIL

SEQ ID NO: 35533 - protein, 47 aa, Oryza sativa
MLHSDDNCATKEIARQLCLEHQLSFSKMASSDDNTEFMIDMLRSVKC

SEQ ID NO: 35534 - protein, 224 aa, Oryza sativa
MSVDAPMTEAPEPVNVSNHNIEEQNSCHDREQNSCHDRESRMSASIGNVKLMDKYEVSKELQCTADSRLDALPKDHFSPVVNGQEVLDKPRSQLEVVSTSYDGNQAPDSMNGLETKEKKKDKKDKKRHRDKKDDPEYLEKKRLKKEKKRMEKEKGKKQKEGEGVSSSEQKNTAKPSDSQGTSSARPPAPMRIPEPKISNVGTPVDTTRTLTTTKIRIKVKPLQR

SEQ ID NO: 35535 - protein, 667 aa, Oryza sativa
MKPSPLVRQCLAVTIFHSKNTAPLAPAAAAQLHALLLTSGHLLRYHGLHPLFMVYCACGRPSSAHNLLAQMPQPPPVSFSNSLLRSYTGLGCHREALAVYSAMRAFDHLTFPFAAKACAGLRLGRHGRAVHCRALAAGFGGDTYVQNALISMYMSCGDVGAAEAVFGAMRNRTVVSWNAVIAGCVKNGYAERALEVFGEMAADGVGIDRATAVSVLPACAQAKDLNTGRAVHRLVEDKGLGDYVAVKNALIDMYGKCRSLEDARRVFDHCKHDKDVVSWTAMIGAYVLNDRAFEAISLGCQMLMSGAAWPNGVTMVYLLSACASMPSGKHAKCTHALCIRLGLKSDIAVETALIDAYARCGKMKLMRLTLERGSWRAETWNAALSGYTVSGREKKAIELFKRMIAESVRPDSATMASILPAYAESADLKEGKNIHCFLLTLGFLRSTEIATGLIDVYSRAGDLDAAWALFQWLPEKDVVAWTTIIAGYGIHGHARTAILLYDRMVESGGKPNTVTIATLLYACSHAGMIDEGIKVFKDMRNVHGLMPNGEHYSCLVDMLGRAGRIEEAHRLIQDMPFEPSTSVWGALLGACVLHKNVEFGEVAAKRLFQLDPENTGSYVLLGNIYAAADRWRDVQDVRRMMVERGLLKEPGSSLVEARSVQCRTAMP

SEQ ID NO: 35536 - protein, 201 aa, Oryza sativa
MHAATGGHAAVVQLLLDAGAPWNALSPTGISAGDLASDSATFDLLLDHALRSELVLGTVARRQAGPADSPAESYLESRVSFSEERVMDADSKAVMMEWERPLMEAHARAVCSGGKVLNVGFGMGLVDTAIQRYEPEEHTIVEAHPEVYARMLKLGWGEKKNVKVVFGRWQDVLPQLGSYDGIFFDTYGEYYEDERVPPTSS

SEQ ID NO: 35537 - protein, 155 aa, Oryza sativa
MNGTVQGNVLFLSTSSSSILVSVKNCVSVSYLSVHHTPRMAAPIWVVLILLCLPEMIPSRQFMHCSDGMPCMHCTSPYTVCPVSSNLCLPTAYLSGRLTAASVSARSTLVTRSSNCLATEAVTAFRLVFTVHSGTFVKLEIKSWLEKCILAWSWL

SEQ ID NO: 35538 - protein, 55 aa, Oryza sativa
MAHEGDSRALSRRVHVARVRTLCAVAVGTPAQCTRARHLYTTYTFTYTCICLSST

SEQ ID NO: 35539 - protein, 346 aa, Oryza sativa
MTAVPAILDRVRDGVRKNVDAKGGAAKKLFDIAYSRRLAAINGSWLGAWGLEKHLWDMLVFQKVRAILGGRIRFILSGGAPLSGDTQRFINICLGAPIGQGYGLTETCAGGTFSEYDDNSVGRVGAPLPCSYIKLIDWAEGGYLTNDSPMPRGEIVIGGPNVTKGYFKNEAKTNEVYKDDERGMRWFYSGDIGRLHPDGCLEIIDRKKDIVKLQHGEYVSLGKVEAALSVCPYVDNIMIHADPFHNYCVALVVVAHSELKSWASQQGITYSDVSDSCEKQETVKEVLQCLAKAAKQARLEKFEIPAKVKLVPEPWTPESGLVTAALKLKREAIKKAYEDDLAALYS

SEQ ID NO: 35540 - protein, 582 aa, Oryza sativa
MGSNNTTEYPLLIQLRLFYNGSAVKGTVLVDKRLPPRTIHIRPSMLKIKTYPELSGVQSVNSLDIVSARNAKKSLSGVQSVNSFEIVSTSNRSGRTFTSNNLIALLHYGGVPEEFFMELLQTAIEEADNARFDYAGALNIAFNYADMEDSMPARMILSGIPLEESYLQSRLDFLSLLERKGIKNGKIPIDDCYYLMGTADPTGKLGPNEVCVILDYGQVSGDVLVYKYPGLHPGDIHVLKATYSSDIEKVVGNSKHAILFPTTGQRSLADEMANSDFDGDIYWVSLNPKLLEHFKPSKPWVPAITPNGTKQKGPEDFNESELERVLFHEFLKTRFAPSYARATAATNWLVYMDRLLTVSLDESEKKLIEKKMLKLVDLYYLALDAPKMGNKVNIPRDLMVKQYPHFMDRSPSYHSSSILGKIYDKAGDPKPLRSDNVQPTSISSLPCFAERDVPPAIKQLWQHRYNEYLADSSLLYAEEADEEEKKIKFQELYEKYKHLLYGASEFEETPRDLDDVFSEACAIYQIAYEKARSANNVARCGFAWKVAGRALCHFYTVKNEGNAVVCSLQLLRNFRFTKKYRK

SEQ ID NO: 35541 - protein, 45 aa, Oryza sativa
MIIMFDFKISMTIKKGLSGRAVEKYNGKAADGLAGFLESKNEPKR

SEQ ID NO: 35542 - protein, 280 aa, Oryza sativa
MLYAARRFFFDLPLPARKRYMSADIRAAVRYGTSFNQLNDAVLSWRDFLKLLIRDTRRLADVLPSWPDAPDDLRPAAAAYATACQRLFRELMEAALDALGIVRCRRQLLEECDAGSQMMMVNCFPACPEPELTLGMPPHSDYGLLTILLQDEVRGLEASYGDGGGWAVVEPLPGAVVVNVGDHLEILSNGLYRSVLHRVRVNGRRARVSVASLHSLAAERVIGPAAELVDEQRGRPRRYMDTDMAAFLAYLASAEGNRKSFLHSRRINTISSSGLTQPSN

SEQ ID NO: 35543 - protein, 445 aa, Oryza sativa
MLLGEKHRASSPTAMNHRSSRSHSILTVHVNGKDMSGNVTRSSLHLVDLAGSERVDRSEATGDRLKEAQHINKSLSCLGDVITALAQKNSHIPYRNSKLTQLLQSSLGGNAKTLMFAHISPEADSYVETLSTLKFAQRASCVELGTAHANKESNEIRELKEQVENLKRALAAKELEKSSFKLKENTVVRERAKQVPERTPPRPRRLSLENTGIGKGSIPDRKGPKSPLSVTKLNRDHATIHDSIDGFNHHIMHQGSVMQMSATSSEDPVREETEKIITTVDTVPFCGLHPDAYISSKQSGLDTLLRTPCRSRNLNLEVGQTDEPSSSAKLEKMTSSNATKKGSHLRKSIQSSIGKLIHGSERRNVQHLGQATPAKIANSTNNDVPSSITPDLRLRRRQSLTGLPPPPSTMSRRSSLGGKSDIGSDKRGAKTPPPVNSAAKAKRWL

SEQ ID NO: 35544 - protein, 141 aa, Oryza sativa
MTRRKVHHGRFLLAQFPLFSTLLSPLAPAARLFRSSPLTPFLLFLTLYFAVVRNQQAFSRFVRFNAMQAVALDVLLIFPDLLVQSFAPSTGGGIGFELFQSMESTVFLFLLVCLVYGGGACLLGKTPRLPIVADAAERQVM

SEQ ID NO: 35545 - protein, 115 aa, Oryza sativa
MVWVGAHKPTPLHEQAIWEDLEDLKMRFPGALAWGQAKFHGEGIVRNLPVTMGTEEGEPDEAEAEQGEKEPEEGEPDEAEAEVQEEEIQTTTPGRARPTRGPKPNPRYHGSEWVA

SEQ ID NO: 35546 - protein, 222 aa, Oryza sativa
MAAAPPCQTRHHAGDRVLPQEIETETYVFRRRMASVGKWVSLYACSSSLSASPPPKSQSEYATMSSSNLMCSARYLLGSPPARRAGTSSMLLPNSCLSISVRIAPARRSRWTSREPARWISGTNLSAWKLHLHRSLCKNRRRRHEQSRGWMAMVLLSSRQVRRSRKMNCVRDLQMNGHRIEAEPVAESEEMDNAILLENWEHSFDEFRWRSFFRDVHVCDLS

SEQ ID NO: 35547 - protein, 326 aa, Oryza sativa
MKPGTGLTVAVKTLNHDGLQGHKEWVAEVDFLGNLHHPNLVRLIGYCVEDDQRLLVYEFMPRGSLDNHLFRRSLPLPWSIRMKVALGAAKGLAFLHEEAERPVIYRDFKTSNILLDADYNAKLSDFGLAKDGPVGDKTHVSTRVMGTYGYAAPEYVTTGHLTSKSDVYSFGVVLLEMMSGRRSMDKNRPNGEHNLVEWARPLLGERQRFYKLIDPRLEGNFSVKGAQKAAQLARACLNRDPKARPLMSQVVEVLKPLLNLKDMASSSYFYQTMQAERMAHSSSMNGRSHALKVQGSFARNGQQPMRSLSDGPRASPFRYSPKPNVK

SEQ ID NO: 35548 - protein, 46 aa, Oryza sativa
MVGSGEPGLAHLVLKARRVVFLCLVVILKQTMLKVMTHRTMIMMMI

SEQ ID NO: 35549 - protein, 377 aa, Oryza sativa
MALSSASYFFFSESKYLAVLELSGLPIETIPYSVGELFNLRYLCLNDTNVKEFPKSITKLLNLQTLSLERTQLLNFPRGFSNLKKLRHLLVWKLVDATYKSLNNWESLEPFEGLWNLKELQSLCEVRATRNFVSKLGNLSQLRSLCITYVRSSHCAQLCNSLSKMQHLTRLHIRAMNEDEVLLLDDLMLPNPLEKLDLLGQLSKGTLESPFFTTHGNELLQLELSRCQLTVNLVAWLSKLSNLTELRLTRVYTGQQLSFHANCFPNLKKALLWDLQQVNQIYIQEGALSSLQYLHIDSLMELRDVPTGIEFLRSVKEAYFTMMHSDFVRNLRTGKVNHIPKVYWSTQGVSAEPANLPGESSTNPQWRMLGGSGWVFI

SEQ ID NO: 35550 - protein, 140 aa, Oryza sativa
MGSGSKKKSGGGDDQRPLLWRLPEVTSTELGKIGPAFGLGVGCGVGAGVGFFGGAGLGYGFPGLTLGFGVGAGCGVGFGFGYGLGKGFAYDQNKRYSNVGTMFQEAPSLPMDTVAGLVDELVVNTKKLVRATSKEIEKWR

SEQ ID NO: 35551 - protein, 368 aa, Oryza sativa
MLMSDGQQNRGDATRLDPGGVPVHTFGLGADHDPAVLQAIAGKSREGMFHYVADGVNLTAPFSQLLGGLLTIIAQDLELTVTRVDGEAAIKKVDAGTYPQAAAADGSSVTVQFGTLYSAEVRRVLVYLALEDSTAFPPYDAEVVEAQFRYSLQGATVASNPDPVSIRRSGSAPEPSEEAPARKPEVETEMARRRHAESIREARSMADGKELERARTRLVEAQNALEDVLDQANPMVDMLREELLQLLRLMETQEAYERAGRAYAVSSLASHDRQRFAARGDAEGVRLFATPRMDAYLEQAWRFDEDPGGAALPSAEEDVRQEVAANPLAPVAGQIAFYVRSAIQALQAIDKIFASVAAATSTSTSTST

SEQ ID NO: 35552 - protein, 399 aa, Oryza sativa
MQRMYEQASTIASDAISNIRTVTSFCVGEKIIESYRNKCKGPVKKGVRQGAISGVGYGFSFALLLCFYAVSFYVGARFVHNGTADVGEVFKVFFALTMMAVGVSQSSSLARDFSKVQDAAASIFKIIDRKSKIDASSDDGMAPEKIEGNIEFQHVSFKYPARTDVQIFTNLCLRIPSGKVHVVLMTVALVGESGSGKSTVVALLERFYDPDSGAIFLDGMDLKTLKLTWLRQQIGLVGQEPVLFNGTIRANIAYGKQDQVSEEEIVAVAEAANAHRFISSLPHGYDTSVGERGVQLSGGQKQRIAIARAILKDPKVLLLDEATSALDSESERIVQEALDRVMVGRTTVIVAHRLSTITGADKIAVIKNGVVAEEGRHGRLLRLPGGAYASLVALQSSSS

SEQ ID NO: 35553 - protein, 283 aa, Oryza sativa
MEEIHGMQESKTASVIKVAREPAVIINGVPDLPPDVASESQPEPRNAAEPPVDHRFGEFLEGRKVRKPFGDKHFVGKVDKYDSESNWYSVVYQDGDQEDLEWKEVEEIMLPLDITIPLKTLISDKFALQNTAPVFKPKVGRPRKVYAITDGNTNNAMEDQMMTGAANEHQSNNLLALVPASTSNDAYVNASSQPRRRGRPRKDATMYPRKDATIPANTQPKRRGRPPKNRNLSGNAQSAECTPQNSVLIRNAQTVRAEKLAKAERLKRENMHAQGAPPGTQFF

SEQ ID NO: 35554 - protein, 132 aa, Oryza sativa
MLRAAATAALRRLPQSQAPRRQARGLQYASPERRPLDGARWALYARLSAHLPSGGMVEELGRWLRERRPLSEEQVLFCVRRFRKFKQNKHALQVSPLTPTHTHPQTPVPSRENSGLIWIGDVMVRFQSIGSG

SEQ ID NO: 35555 - protein, 96 aa, Oryza sativa
MATSKKEVRHGTAQAKVNGDDEMLRTGFINGTPLEAGKVADSQPVDLFDQARRVCPEEEEDEAGCRKIAESEPVDLFSDAGRVAHQQQHKVVGRQA

SEQ ID NO: 35556 - protein, 399 aa, Oryza sativa
MADRYFPNDLPDFVAEAPDGGRGLLSLPYSSLSERLLRAALRIKDKVMEETWTRARRQVTDYTLYTGALGTALLLFKSFQVTGNRADLALAGDIVKECDAASRGLPFLTFICGRAGVCALGAVIAKHCNDQLLLTHYLSSFDEIIVTEKVPNELLYGRAGYLWACLFLNTHLGEKTIPHEHITSVAKDIIDEGRKLAKKGNCPLMYEWHGKKYWGAAHGLAGIMHVLMHTELKLDEKDDVKNTLLYMIRNRYPTGNYPSSEGSESDRLVHWCHGAPGVALTLAKAYQVFHDEHFKQTAAEAAEVVWNRGLLKRVGICHGVSGNAYVFLSLYRLTGNVEYLYRAKAFACFLLEKADQLIADGVMHGGDHPFSLFEGRAGMAYLLLDMVSPSESKFPAYEL

SEQ ID NO: 35557 - protein, 96 aa, Oryza sativa
MLQFPALMRQWPSPPLIPASTLLPVPATTQEDELLLAMAESDLEDKLNEIRKTNSNLVIIGKPTGDVKEEYDAEAEDDDADNVEESDGDDFDQETG

SEQ ID NO: 35558 - protein, 544 aa, Oryza sativa
MFSLLIQSVDFTDDAAAAAATAVAAGETSGTSHPLSPRSGDPLPTTTSASVTAPLELPGATSASPARNPKINYTRGILHLYRSSSSSSSTASYASAVAATPSSSSSGPAAPQLASDCLLPPWRGTRLLVLAVPTHVSPDDFVRFCGPYIEHASDIHVVRDDGVEDRYSVLVEFEDQKSADGFYLDLNGWRFSSSEVEVCHVLFIVAVQYTPSTKPAVTPPVGSTELPTCPVCIERLDQDISGIMATTCDHSFQCSCVSMWVNSSCPVCQFCQKQSENPTCSVCQTSGNLWICIICGFVGCGRYEEGHAIRHWKETQHCYSLDLETQRVWDYVGDSYVHRLNHSKSDVKHSKFKSKCKYSGDKCANCSCNDEEDIGGAIFSSKAETIVDEYNRLLASQLETQREYYEARLSEAKKEKEQHISDAVDKAVNDKSKEIQQKIESAMLEKKKLADMNEKLTKNQDIWRRTLKEIEERERAQLKLKDDTIRDLEEQIKDFKFSIKLQKSIEKNKNADDLKGGLLVPLPMVPDSGTKGKRSSRTSKRRNQ

SEQ ID NO: 35559 - protein, 105 aa, Oryza sativa
MHFIEHLAITLSPPLEITIVRLPGQSWRLEGVGEVPCCRHRHWGSRGPLDTGNHASNTFGRHQQLAASASSAPHHASPPFAVSPSRETVYRLVVRERIQLPGGEG

SEQ ID NO: 35560 - protein, 360 aa, Oryza sativa
MAARSSSSPAKTTTTLALLLVVVAAAAAVAAEAAAVAADAARGVRQVNRRGPYLGVVVPNGFEMEPLLRSPAFSPAKKLPYLDVAGRRFRFGSIGEKKVIIVMTGLGMLNSGVTTQLLLTLFDVEGIVHFGIAGNADPDLHIGDVTVPRYWAHTGLWNWQRYGDGPEKELALESNGDYTRKYGALNFSDYGVAGGGGGNLLNGVWYQPEEVFPADGTPESRRHEFWVPVDGRYYQLAQKLEAMPLERCVNRTGTATSPATCLARAPAVARVERGCSASVFVDNAAYRQFLRSRLGVTPIDMESAAVALVAAQQGAPFIAIRSLSDLAGGGSAESNEAGVFAALAAQNAVAVAVKFISLLS

SEQ ID NO: 35561 - protein, 77 aa, Oryza sativa
MRMPPAVPSGRAVVASSSAAAAEIWGISGLGLSLVNHPHMPTLTQNEPNGPTIQWRVAQQRVLCLCPSPDAALRLCA

SEQ ID NO: 35562 - protein, 364 aa, Oryza sativa
MARHGPQSHDQPLQEEDYIDMDLSSPAAAEAVTASARASLLCYSTAMAASPQNSREFEFHMSAPVDKWEPAASPADELFYKGKLLPLHLPPRIQMVEKLLESAAEKGLLSASTAPATPYQSCNASPANSCYVSGELNAEHYFHECTSAGIGAAEEAAACEKKPWSKKLKFIRHLNLGLKLKASKAYIKTIFATKAGNPDGKTGTPSANELSNAQFKSWRKNPFGQIRSNRYIASPISNSVTLGGRLKEDECGHRRSFSSVIIRYSSSNKTSSASSSSCSSSNSSSSILSSTDSGVGPVLRRSSSASSEMDNPIQGAIAYCKRSQQLASVRKSASDAGFRFMSSSASRIAAESEDPDDIIEICGR

SEQ ID NO: 35563 - protein, 63 aa, Oryza sativa
MLSKPIHLSETEESGISCVGVKSVDLRRNAKSEGSSLGPYRRWGAKAWGANRIRYPGSPCRKR

SEQ ID NO: 35564 - protein, 399 aa, Oryza sativa
MRDANGLSRCFGFVNFEKSECARNAVKNLNGKSIGNMVLYVARAQKKSERQAELKAKFEHDKNQKFEKLQTVNLYLKNLDDDINDEHLRKLFECFGEVASCKVMLDSHGRSKGCGFVSFATVEDANNAILKMNGKMVGKKPLYVAVAQRKEERKAFLAAHFARVRALATMAPTLGPNIAPHQFNFGHGVPALFPPPPPAGFGFQPNFVPNMMMPYNMQRQPGQRSGPPHGGMPRHLHNPHQMFHQNANQGFRHMPNRRNGVANPAMLHQHHRFSSPMQPMQQAVKHVVPVGELQAPSNNLQTSLASANPEQQREILGDMLFPLVEQLVNEKAYKVTGMLLELDKTEVLNLVESPDTLRDKVAEAMKVLELEATATAAAAAAASGSGDGDAAAPSSSSAA

SEQ ID NO: 35565 - protein, 308 aa, Oryza sativa
MSARAAAGGGDGDGGGRRKTLAKVSLSSLSAAAAEAATFPIDAVKTRLELHRGTGGSGGGGGGVMRVAGELVRDGGIYRGLSPAVLRHLFYTPLRIVGYEHLRSTFASGGRDAGLLEKALAGGVSGVVAQVVASPADLIKVRMQADSRLLSQGIQPRYTGIFDAFTKIVRAEGFRGLWKGVVPNAQRAFLVNMGELTCYDQAKHFIIRKQICGDNLYAHTLASVASGLSATTLSCPADVIKTRMMNQGKDAKVLYRNSYDCLVKTVKHEGLTALWKGFLPTWARLGPWQFVFWVSYEKLRQASGISSF

SEQ ID NO: 35566 - protein, 327 aa, Oryza sativa
MGRLPLLLLLAAAAVSTAGGAPVYRADYLVDGNQLVDMQYHMGPVVSGSPTNLYLIWYGRWEAAAQAVLRDFLASLSAPAAPSPAVSDWWARAPRLYADQTGANVTGAFAVAGERSDAGYSHGASLRRIDMQSVIRSAVYAYPDPLPLDPYSGVYLVLTSPDVQVEEFCRAVCGFHYFTFASVVGVTVPYAWVGNSATQCPGKCAYPFAAPDYGGGAGGQQVLRPPNGDVGVDGMVIVLGHELAELATNPLVNAWYAGDTPTAPTEIADLCLGVYGDGGGAGGLVGNVSRAADGASYNVNGVNGRRFMVQWLWNPVRGACYGPNSSS

SEQ ID NO: 35567 - protein, 230 aa, Oryza sativa
MSVTTAMDLLSPLAAACHQQMLYQGQPLESPPAPAPKVHGIVPHDEPVFLQWPQSPCLSAVDLGAAILGGQYMHLPVPAPQPPSSPGAAGMFWGLCNDVQAPNNTGHKSCAWSAGLGQHWCGSADQLGLGKSSAASIATVSRPEEAHDVDATKHGLLQYGFGITTPQVHVDVTSSAAGVLPPVPSSPSPPNAAVTVASVAATASLTDFAASAISAGAVANNQFQGTLFVL

SEQ ID NO: 35568 - protein, 379 aa, Oryza sativa
MGRHKFRLSDMIPNAWFFKLRDMRAARGGAGAGGGGASHGGVVTQSSVAVSRAGRACRPLPNTPRHGALSLPHRASYYYTPRAGDLLVGSPLHPKCSDTQFPPLQLSPPRKSRRRHRRRSVKLAPSVSGSSVLSSPVSTGCRCGRKPELVVVEAPDTPPCRRDKFVGYNDDDDDEEEEEVEFKKPTVAVAACDELDGKVITSATDIIIDLRTEKRPDKVLPPIVTKPARRELDGCDLEEKHIDVVRRASAKKPTTLLEQSKPRRSVSSARRLKTRANTPRIVAKKSKPPPPPPPAAARSPAPTTKPPLAESFAVVKSSRDPRRDFRESMEEMIAENGIRTAADLEDLLACYLSLNAAEYHDLIVDVFEHIWANLADIKM

SEQ ID NO: 35569 - protein, 205 aa, Oryza sativa
MYLVKDIGGAIALMGVSLVLLGTWPVVLAVLERRGRLPQHTYLDYSITNFLAALLVAFTFGQIGADTPETPNFLTQLTQMQDNWPSILFAMSGGIFNGLGTLATQYGWAFVGLSVTEVMASSLKVVIGTTLNYFLDGRINKAEILFPGVGCFLIAACLGSLVHSSNAADNQEKLSSAMVNHSNTNGDTENEELTKHLLEIGTNQI

SEQ ID NO: 35570 - protein, 393 aa, Oryza sativa
MARMRVSAAAAAALFVAVVVASPLLASSQQPAMAPAAAAAPTNNSRLEKAYVALQALKRAITDDPKNLTHSWCGPEVCGYFGVYCAAAPDDPCARTVAGVDLNHGDLAGTLPEELGLLTDLAVFHLNSNRFCGSLPDSLRNLHRLHEIDVSNNHLSGSFPSQLLCLPDLKYVDLRFNNLCGEVPAAIFEKKIDALFINNNNFDFKLTESFSNSTASVIVLANLPKLGGCLPSSIGDMAETLNELVLLNSGISSCIPPEIGKLDKLTVLDLSFNDFAGALPETIGHMRALEQLNVAHNGLAGEIPDSICALPHLKNFTYSHNFFCGEPHRCLEVPHVDDRQNCIAGRPDQRSGEECIAFLHRPPVHCDAHGCIAPLSPPPPPPPVHYAPPPPVY

SEQ ID NO: 35571 - protein, 387 aa, Oryza sativa
MDVTGDGGGGGQRPNFPLQLLGKKEEQTCSTSQTAGAGGGGVVGANGSAAAAPPKRTSTKDRHTKVDGRGRRIRMPAICAARVFQLTRELGHKTDGETIEWLLQQAEPAVIAATGTGTIPANFTSLNISLRSSGSSLSIPSHLRLAGLAGPRFGGGARAADAWDRVVGLGFGGAADAPSSATSSSSSPLLLSFHSGSVGLDVSPPSASTSPAAADLSRKRRWEQEMQQQQQYQQQMAGYTQSQIPAGTVWMVPSSNAQAAGGGAPPGGGGESIWTFPQSGSGGGGGAATVYRGVPSGLHFMNFPATPMALLPGGQQLGLAGAGGGGEGHPGILAALNAYRAQAAQPDAGAAAQNGAQGSSQHRQHQHHGGGGGGGDERHESMSASDS

SEQ ID NO: 35572 - protein, 189 aa, Oryza sativa
MFEVSAFAFLAEPPAAPAAAGGRICDACGDGVRGFVYHSDDPRPRPPPMLRVPAQARRGAGRPPLRAPQARAAAPACAARGAAAAATSGRTGPTTTTANPCTCTSRASRTDTAGGARRRCGGEIVLVSSSPAMDGVLQSVPRRRTPRSGGFERFCKIVNVVVSVIIAAIFGSPMAMISAVAGPDGLLRG

SEQ ID NO: 35573 - protein, 644 aa, Oryza sativa
MADEVAKGLGIAEEPASFDAGKVSGGSVSESRGVEEKGNALPEQSGASFDGELDVEMEPKTGSGGLVPQLVQDQHPASDIGDLAVREDGSEIMVDVERSTVPVDADMNNVSLALVKEEAEGGGDREDKSDEEESESSKEESSEASSSSDEEEDKRESSEASSSSDEEEQMAKKTGGAGDTDSLFEEGELMLASDDDDEEAPKGPIKSKHEVEVLPPVPKIDVQLEPHHQTLPVGTISAIMGERVIVEGSVQHNPLNEGSILWITESRIPLGIVDELFGPVKNPYYLVRYNSAEEVPADISAGTAVSFVAEFADHILNMKELYAKGYDGSGENDEDQTDPEFSDDEKEAEYKRSLRLAKRQTDRQHEGKKTSGDKKRAQPRGSGFRKDMPPRSHDGPAPGRQSQPHFHRPDKAPVVDAIRPLGSQDGPMSAPTKLPPGPVHPVMPAANQLTNQMGGRFMNPSQQFLPQQPNVVWPGGLTPTPHPNMGIEGAAFAANIMQNLLIGANQYQQQFQNHNFGGFLNQMPVPPPQFMSQGGMPSNPMAFGGPTMAQMNPPFGPPQLPMDQGNFGQAPHMAGHTVQQGPPAGFPNGQGFGQSASPQGDGEQPPMQFSSGQFNQGNSSFHGRRQQQRGGRHSSGRGGDRHRR

SEQ ID NO: 35574 - protein, 88 aa, Oryza sativa
MKNSAPRCFNHGSFASFHCLSGCFSSCNFLPCHSRVVRIGTSQSLIKRCSHAIALLKYTKRNNFNSDATIIFNGNFPLLIKRTKSRQQ

SEQ ID NO: 35575 - protein, 393 aa, Oryza sativa
MFPTAGGRRLLVLIRRASAAAAAGANPNHHHHHATLFTHRYSSSPLARTPEAESAAAASYLVASVGLSPAAAARISRKARFRSNADAEAVVSLLRGHGFSDANIAQVLPKIPGLLILNPDKILRPKLEYFASLGVVPSALSRAPLLARSQEKHLVPCVEFIRGVVGTDANLCAAISRNPWALWCDINSSMRPAVESLRRHGLAEANISRLVVINLSALTMSPDRIDGIFGDLEALELPISHSRFVYGFWALSRLKRGAWEERMSVFMRFGVSRSELLKAFREQPGILVFTAKTIQRKLSFYQEKLKVAPADVIAHPLLLTFSLEKNIIPKCAVLNVLLREGKIKRYGREMDLLRPLQRSNISFFERFVRKYEEDVPDVVKAYEGKIKFTGFMD

SEQ ID NO: 35576 - protein, 100 aa, Oryza sativa
MLPMPAGTSPAILVLERSRCMSSVSSWNPVNGSLDMLKLLPERSRCLSEVNLNNAGWTLSACRWWPPKSSEVTRPSAPSQWTPSQWQQSAPATHDRKTVE

SEQ ID NO: 35577 - protein, 252 aa, Oryza sativa
MHDEFAAPTNEAKDLFKAPDAGKFLATFTLSREHLQGVKDAVAAEAARRGVPPPRCTSLVAMYGLMWHCYRRSRRESDNGGSGRAAAAAHFIFSVDHRSRLVPRVPDKYLGNCVGPGFVSAPEEELAGAAVAGGVFTACAAVAAAIDEAVRGEPAYWEGWKERIVEACRDDAPFSVAGSTRFRVYDVDFGFGRPAKVEIVSVAKTGAVSAAEDRSGAGGIEVGIALLPERMDTFRRCLADAMAWFSSSSQCN

SEQ ID NO: 35578 - protein, 439 aa, Oryza sativa
MLRLRRLTGAVSGGLARYLSTRAASPARPPWALLQLSKMDRSGASSQPGASLHADYPPCVSYLTFAASFVDPRLRHDAESEMFGTVSTDVCATSGDGLVPVRFYDSRNHLPTVGSRGGEPMREWALDGVDRDPEVTRFICNPLSGEMYRLPDLNGTKKTSRYLHFGLLTQSDAGQGPPARYAVAELDGNREEDGQGWLVRRFLSDSGEWDKLVGMPSPLPARRTVDIDQEVVAFGDRLWWVDASWGAVTIDPFSDRPELRFVELPKESVLPDLDDVVMLRELGKYRRMGVSEGKLRYVEVSLGKQFLIRSFSLADDDEGGDSWTLEHEVAFGPIWKDEHHASVPLGGMPRIGAIDPLNANIVHLIVGDQMLSIDMIKERAIDSSRLGCADFPLLPCVLPPWLESSQIPEGIHWSKKAKMKSNTPSYSDMSVHVDIELKK

SEQ ID NO: 35579 - protein, 112 aa, Oryza sativa
MEPPYAVDAHALINLVENPSCHPSHLQPSSAMAQLWRPCASSLQAPPQPVGSLRSFSAPPLAAAGSPSAGLPCVPCSPAASARSGGRRRRLKTTFSRATDKPSPLLLFPLET

SEQ ID NO: 35580 - protein, 307 aa, Oryza sativa
MQASSYLCSEVGKDGVLTNSVITEFVLYDIAHARQSFSAEEKTQCTETTQSTLSSAVEKSASGDCPQRINLMDQQNSARNNSDVSTSCPWSEEDLYPHLEIAATVIQVPFNRSKSKELKSGLSPGTVKVITPSGLHGLPNDDETSPSPLLDRWRYGGGCDCGGWDMACPIAVLGNAYDNNWANSVTKEGENPMELFVLGGKEELPALSIKGNEKGQLLVHFHARLSAMQAFSTCISLLHCSEASTAVSIEKGKHKLYSSSLKMLLEEEVSQLIEAVTAEEKRKTKKRSEKPPRPVVLDPPFSPMGRV

SEQ ID NO: 35581 - protein, 483 aa, Oryza sativa
MAYQGIDLLSTKAAGDDHGENSSYFDGWKAYDTNPFDLRHNRGGVIQMGLAENQLSLDLIEEWSKNHPEASICTPEGVSQFKRIANFQDYHGLPEFRKAMAQFMGQVRGGKATFDPDRVVMSGGATGAQETLAFCLANPGEAFLVPTPYYPAFDRDCCWRSGIKLLPIECHSFNDFRLTKEALVSAYDGARRQGISVKGILITNPSNPLGTITDRDTLAMLATFATEHRVHLVCDEIYAGSVFATPEYVSIAEVIERDVPWCNRDLIHVVYSLSKDFGLPGFRVGIIYSYNDAVVAAARRMSSFGLVSSQTQYFLARMLSDEEFIGRFLQESKCRLVARHERFTSGLREVGIGCLRGNAGLFSWMDLRRMLREKTAEAELELWRVIVHQVKLNVSPGTSFHCREPGWFRVCHANMDDETMEVALGRIHDFVRQHQQRRVKAERWAANRQLRLSLPHHHHLSPAHLSSPLALLSPQSPMVRATS

SEQ ID NO: 35582 - protein, 140 aa, Oryza sativa
MRCHLFMALPSCNFTGRHPSSSGSFPRFLPRRPLPPSPRLVSRALCIAGDGQSSGGAASSGGGLLGFPGSSSHSKGTLPLAGRYTLDECPSSSLPPAPCRRPAGDVAAAAALSIAFLPSVLLCSIHFTFFLASFSSGVLS

SEQ ID NO: 35583 - protein, 201 aa, Oryza sativa
MFGQQAAARLSSSAVVERISSDGAGAAAATAALPRRAAAAVGEVGGGDPRPGEGGAGVARHLRHRRGRRPRLRRRRRPLQGLQGQGQLPRRSRRRQHRRRPAATPSSTPPPNVTAAAAGAGASEATLQPRRRPEHHTGARSRRRRRSAAGRVPRPQQLRAHTAERRPGVRLPRRGFCRTNDDSWAIVVVVVIVDAAAIRGS

SEQ ID NO: 35584 - protein, 423 aa, Oryza sativa
MSNRRRKRGESKPQAHDAGDTTPIDNILTSLDDAPPPPPPPRHELPLLQLNDHQEADDADASSSSSPHQQRRLWVKDRSRAWWELCSSADYPEADFRRAFRMSRPTFHFLCDALAAAVAKEDTALRAAIPVRQRVAVCVWRLATGEPLRVVSKRFGLGISTCHKLILEVCAAIRNLLMPRFLHWPDHPTSTTYKTRFEATSGVPGVVGAMYTTHIPIIAPKVSVAAYLNRRHTERNHKTSYSITLQGVVGPDGTFTDACIGWPGSMSDEQVLRKSALHQRASAAAGSMSWVVGGASYPLTEWMLVPYAQRNLTWTQHAFNEKVGEVRRVATEAFVRLKGRWACLQKRTEVKLQDLPAVLAACCVLHNICETRGEDMDPDLRCDLPPDEEEDDTVLVQSESANKVRDDIAHNLLHRGLAGTAFF

SEQ ID NO: 35585 - protein, 60 aa, Oryza sativa
MIDVTFLFYLQDNLVEDLLSDFEYELQPPYLLYRNAAQEVNGIWFYNQHDCEAVARLFGR

SEQ ID NO: 35586 - protein, 452 aa, Oryza sativa
MARLALLAVPVALLLSLSFLLLRPASPPLPFSRQQAASGPDRRRLLRVYVAELPRALNHGLLDLYWSLPAADSRIPASSDPDHPPPRPPRAHSPYPDSPLIKQYSAEYWLLASLQPDWRDADVVFVPFFATLSAEMELGWGAKGAFRRKEGNEDYRRQREVVDRVTAHPAWRRSGGRDHVFVLTDPVAMWHVRKEIAPAILLVVDFGGWYKLDSNSASSNVSHMIQHTQVSLLKDVIVPYTHLLPTMHLSENKDRPTLLYFKGAKHRHRGGLVREKLWDLMVNEPDVVMEEGYPNATGREQSIKGMRTSEFCLHPAGDTPTSCRLFDAVASLCIPVIVSDEIELPFEGMIDYTEFAIFVSVNNSMRPKWLTNYLRNVPRQQKDEFRRNMAHVQPIFEYDSIYPGRMASAAQDGAVNHIWKKIHQKLPMIQEAVTREKRKPDGTSIPLRCHCT

SEQ ID NO: 35587 - protein, 322 aa, Oryza sativa
MGREASSPPWAAATAANGVAGSSSSGQKRKAAVDDDGRGEDDNWLKLSLAPVDYGDPTGDVVDNNSSSCAPAVMTSTEERSGTAAGVASGSARAGLIPNGAVPIFPCFNFLGTSTSSSSLSHLHQQSSSTRRQSNASTSSSSGGIGGGDDDEAPNVMNGGDKNDGNALPDPPYPWATNGVAKHHSLVELARRDIININGEARCRRCDTRKMIVYNIATKFREVSDYFRQNYQHMNDRAQARWMNPVVPNCDSCGHERCMRPVIAAEKERINWLFLLLGETLGLCTLDQLKYFCAHTNRHRTGAKDRCSSQPTKSYATNLLLG

SEQ ID NO: 35588 - protein, 688 aa, Oryza sativa
MEGTMAGMVALWNEWEIRVLVLSSLALQVFLLFSAVIRKRNVSAVLGLLLWLAYLLADSIAIYALGYLSQTRVPRGVDVRSFRNTHRIQAFWAPFLLLHLGGQDTITAFSIEDNELWKRHLLSLLSQVALAMYVFAKSRPGADILAPAVFMFLSGILKYGERTWALKCASMDNLRSGMVTTPDPGPNYAKFMEEYRFTREAGLQAEIVIEPERRGGWVTAAAIAEESVPYTTIITDARRFFVTFKRLFVNLILSFQDRTRSQATFLRLTPEQAYKIIEIELSLMYDTLHSKAAVIHTWYGRLFRCVTLLSTSAACLLFNLLDKDRYESHDTRVDIFITNLLFGGALCLEVYAIGMMLISYWTYAALQGCNCRTLSHLLFKSIKYFRPESRPKWSNLMAQHNLISYCLHDRATLLTKVITMVGLKGHWDSWMHIQHIDVLPELKTLVFRELKDKAVSIVDNAESYRKFSNHRGQWALQCKGYYKELGWSVEVEFDESILLWHIATDLCFYYDIDGSDGDAKLTEYVGISRAVSNYMLFLLVARPFMLTAGIGQIRFGDTCAEAKIFFEREMALPDERAAAAMVLEVNAEIAPRDVKGDRSKSVLFDACRLAKSLLELQPGKRWRLIRVVWVEILCYAASKCRSNFHAKQLSNGGELLTVVWFLMAHLGMGEQYRIEAGHARAKLIVEKN

SEQ ID NO: 35589 - protein, 360 aa, Oryza sativa
MKPPRRRYGLLAVVVTLIVLASLQIQFHHLKEDRLTGDRTFATTTTDPVHWRTGAEGLPRGIVHSNSDMYLRPLWDSGANPKNKNDNHNALLAMAVGISQMQNVDIMARKFLNQNYTVMLFHYDGNVDGWHNLEWSDKAIHILARNQTKWWFAKRFLHPDVVAIYGFIFLWDEDLGVDNFDPRRYLDIMVSEGLEITQPALDPDLSTDIHHRITIRNKMMKVHRRIYDNRASMNCSDGSKGPPCTGWVEGMAPVFSRAAWRCVWHLIQNDLIHGWGLDMKLGYCAQGDRAEKVGVIDSEYVVHQGIPSLGGPSLSSKTPRRSLDLRTHIRRQSSAELEKFKERWNRAVREDEEWTDPFDT

SEQ ID NO: 35590 - protein, 459 aa, Oryza sativa
MWVFYLISLPLTLGMVTVTLRYFAGPGVPRYVIATVGYAWFCSLSFIILVPADIWTTLTGREKGGIGFFWSWSYWSTFILTWAVVPTIQGYEDAGDFTVKERLKTSIHMNLLFYSIVGAIGLFGLILLLVMHRAWDGGIVGFAMACSNTFGLVTGAFLLGFGLSEIPRNIWKNADWTHRQKVLSHRVAKMAVKLDNAHQEYSNAIVVAQATSNQMSKRDLLRPYMDIIDKMLAQMLREDPSFKPSGGRLGENDMDYDTDDKTMATLRRQLRRAHEEYYRCKSEYMTYVMEALELEDTIKNYERRDANGWKFVSSFRESRPGTLGSLLDTMEFIWRCVLRKQLQKGFAIVLGCMSAAILLAEATLLPSGVDLSLFSILVKSVGKQEVLVQVAAFVPLMYMCICTYYSLFQIGLLMFYSLTPRQTSSVSLLMICSMVARYAPPISYNFLNLIRLGGDAKTT

SEQ ID NO: 35591 - protein, 275 aa, Oryza sativa
MQNRGRSDVHPRDENPNNSERNTRQEKPNNTHDGNRLSSNSGARQVSRDRYRESTRKGRSSDINEHDLPKSSKRRREDHESHRGGKVDVKGVSEQENSRDHTVSSKKGQNPQRESFVKQAEEDPMSDDENHEDSRRGRSKLERWTSHKEIDYSSIDNENAPTFSSIKSDVQAPTADELGKSEAAAAGNSELKSGGDNGQTSEKNAEERDRHLDTVERLKRRSERFKLPMPGEKDAPQSKKVDTEVQPPQIESASADLEVKPERPARKRRWTGTGG

SEQ ID NO: 35592 - protein, 35 aa, Oryza sativa
MLLLIWVKKRSQTKICYFEGAIVVKKKICTLYIPM

SEQ ID NO: 35593 - protein, 349 aa, Oryza sativa
MEDLEAFLDSVPQKIEQSLCSEDADLGNLAGRLVGLSVHALMIKHGKISVRYSNRGEVEDVSDGKIACEASGILLVKPKELVAKYKDRNTACATSQEIPKYSTTYKIREHELQILLRMEIMKSELGPGIEEGSKQKMIKEICSLLQFIDINLQGDSFQSNSILEFAEKTIKIRYIESMEDVIKKIYTEMEFDLFDDEVECSESLPSSSNHDVDGSNSRRHRSNSAPHLLRRDHGGGSSHEERLARAEERRNRDRRLSSFTSWVPDLRRVWALKHPGKEPAAAAPPQSRQGASKRRKRRRAACTDMVCETPMTVAASGKRKPGDAAGSLATVSKALFHDDEAAGISSSSV

SEQ ID NO: 35594 - protein, 328 aa, Oryza sativa
MAAARFAGVPRRAAQSSSSSSQAPLDEPPPPALTPEQVGLCREALEYFEGMCGRPEAMSDEFRRLQDTRHELMRSSNEARNAANREKNRYIDVVPFDTTRVRLKRSTTSQTSSNDYINASFIKVTEDNRVAKFISTQGPLAKTFDDFWEMVYEYQCPVIVMLTQFDSLKCDEYLPLRKQREAYGKYNVKITNAKRDSHQLWLRDVMVQCNESSRVHSVRHIEYPDWPDHGVPTNTDAVRQIRKWLQNTPMEHPIVVHCSAGIGRTGAYITIHSTIERLLLGDKSSYHLDETVKTLRTQRVGMVQTEKQYMFCYRAIADELKDLLESNR

SEQ ID NO: 35595 - protein, 77 aa, Oryza sativa
MASIKLSLACVLLISGLVMLERIEHTEAVCTLFCAKGTYITCSNHPYEQLYGCACRCAPPDGVDCVVHLADGSTQQC

SEQ ID NO: 35596 - protein, 174 aa, Oryza sativa
MPRPSSWSSLWSPTTGVALSTRFAGHTSSCRPAPCASSCHSATVELDLGALDPAPPPLPPPPSLQLPTSTAVCAPALGMPNPLPRASDPLRPCRSTLAAVDLQRHAPLRPLVPRASFAGSRLTMSSPPPSQLAARLCSSELRRRRGVEGGWKVATQAARVSPPRNLCKSDAGSG

SEQ ID NO: 35597 - protein, 448 aa, Oryza sativa
METEANGGREAKAMKDHIDLECSQAKKPQPKDLKEIAGSFWLAASVFSKKWQKWRRKQKLKKQDAAGSKAAAAAMPPPEKPSKPSFLRRSRLRGEACSEFAGGRRSCDTDPRFSLDAGRMSVDDVGFSWDEPRASWDGYLFGAGTGIGLGRAPPPLSRLPPILSAMEDSPAGIVERSDGQIPVEDDSQPEPDPDADTPGGSVQTRDYYDTSSSSRRRRSLERTSSVRRPSFEVTDAKPVLPAAAAITSVKDSPLIGSSEFYHFQHAEDLLEHHRFSTSSLIEDFPMSLDAAFPGPDKKPRRWRKAWSLWGLIHRRAAGRRGGASDVADRAFSEPWPELRVRGCNARMQRCNSNASARSSFSSNSGGLGSSRRSYVDGNGNVVKRRREECALERNRSARYSPGHADNGMLRFYLTPMRSASGRRAPGLPAKGGRQLRSQSFARSMLRLY

SEQ ID NO: 35598 - protein, 357 aa, Oryza sativa
MSMVVASYAPASRSPVTRASSGARRVSHTQSWRPPPPPFFPASAAVKCRRPTLPVARSVGPPEKHRPVLNIPPTALLYQVPPPEGKERWEIKDDEGNVQLWLQVPGLTEDDLEITTTDELLEIKRKAGRGDPRRLDDVQGVGSFHLRLLLTKEFVSSQVTAELKAGMLEVTIPKNTNLRRTVVRIGQQSQSPAAVRTAQPKVVDPPPANSPPKNNNLVRNTSVQSRIDPPARESPKNDLGVGISVQPNDSPAREPPKNNLAGGRNVPTKDDPPARELPKNNLAGGRNVPPKDDPPAREPPKNNLAGGRNVAPKDDPPANEAPRNNLAGGTGVPTKDPPRNANEPPKNPPGTREANLG

SEQ ID NO: 35599 - protein, 506 aa, Oryza sativa
MAAAAAAAPPSSSSLAPPEVPMELHAGNRDRLVAALRAHLSASGRPLRGLVLLQGGEEQTRYCTDHLELFRQESYFAYLFGVREPGFYGAIDIVSGQSILFSPRLPADYAVWMGEIKPLSYFKDRYKVDMVFYVDEITQVLQDRFSDHGKPLLFVLYGKNTDSGNYSKPASFEGMEKFDSDLSTLHPILTECRVIKSDMELALIQYANDVSSEAHIEVMRRAKPGMKEYQLESIFLHHVYMYGGCRHCSYTCICATGENSSVLHYGHAAAPNDRTLNDGDMALMDMGGEYHCYGSDITCSYPINGKFNSNQTIVYNAVLKAHNAVIAHMRPGVNWLDMHKLAEQTILESLKNERILHGDVTDMMAQRLGAVFMPHGLGHLLGIDTHDPGGYPEGLERPKEPGLSSLRTIRELKEGMVITVEPGCYFIDALLIPARDDPVSSKFFNWEEIEKYKSFGGVRIESDVYVTAHGCKNLTNCPRETWEIEAVMAGAPWPVRATNNSLSKAS

SEQ ID NO: 35600 - protein, 93 aa, Oryza sativa
MGTPRPHAWNKLLLETKSRLWGHDSRWSLSVEELLPKRSHRRVHGKTWSHGRCHRYRAHLRKLCLQHRLPVFFTLCKCDIQWLSRYHFAIHFS

SEQ ID NO: 35601 - protein, 472 aa, Oryza sativa
MDDAHSSQSPLHVVIFPWLAFGHLLPCLDLAERLAARGHRVSFVSTPRNLARLPPVRPELAELVDLVALPLPRVDGLPDGAEATSDVPFDKFELHRKAFDGLAAPFSAFLDTACAGGKRPDWVLADLMHHWVALASQERGVPCAMILPCSAAVVASSAPPTESSADQREAIVRSMGTAAPSFEAKRATEEFATEGASGVSIMTRYSLTLQRSKLVAMRSCPELEPGAFTILTRFYGKPVVPFGLLPPRPDGARGVSKNGKHDAIMQWLDAQPAKSVVYVALGSEAPMSADLLRELAHGLDLAGTRFLWAMRKPAGVDADSVLPAGFLGRTGERGLVTTRWAPQVSILAHAAVCAFLTHCGWGSVVEGLQFGHPLIMLPILGDQGPNARILEGRKLGVAVPRNDEDGSFDRGGVAGAVRAVVVEEEGKTFFANARKLQEIVADREREERCIDEFVQHLTSWNELKNNSDGQYP

SEQ ID NO: 35602 - protein, 402 aa, Oryza sativa
MLKPQTPRARRAAHPNSHMASSSSSSSLCRLLIPRPTTRRFSGGGGEGGMAAAAPVKREVKPEAGEGWGGGDLGVVPPPPRPMEGLGEAGPAPFVAKTYEMVADAATDAVVSWGPGGSGASFVVWDPHALAAGVLPRFFKHANFSSFVRQLNTYGFRKVTPDRWEFANEAFLAGQKHLLKNIKRRRVSKPLVDSQLRNKASVVFGQPEAPGEVVSLKRDRAALRAEVIMLKQQYNACKSQLIAMEEMVRNIERRQQRTIGFFAKVLTNPAFVQQVLLNYVNKNGLRGAAKRQRLMENEEQHADSPLNKGMEAASVMEADVSPGSTGCGTVGKVETTPMCNFQNIENMCDDVWEELDALPETGMEQEEKAGIGSFDVEEFVGRPCGWVDDCPYLVEPMQFVEH

SEQ ID NO: 35603 - protein, 93 aa, Oryza sativa
MERIQWEEDSRGVDSDCRAAPTSDGRHDFMRTPIWACKYFMESLSSLLSNGSSHMSISVLERPQLSFYSRLFSVHGVASPLLAQWTVYPSWAH

SEQ ID NO: 35604 - protein, 57 aa, Oryza sativa
MRGERVNGGSIYTLQVNGTRRVWRQGPSFTFYFFCFGFGFLFLGNLSKRFEWTRLPF

SEQ ID NO: 35605 - protein, 85 aa, Oryza sativa
MTYSITAASQGSVILPSPANPNSSCDILRSSPKTVVPRYGNGTLNRLPSAVYMVQRPLSATGEVVQQASSSLAAVVLTLCSLLAS

SEQ ID NO: 35606 - protein, 149 aa, Oryza sativa
MIWAWHLARPLARNKRAVFFRMPYRLYDSVARSWRHGWDAGPTMPSNHLDGPSRGQVEEWLKRVNKRERRRKRERRRRRRKKERRRRRERRRKRRSKWSSVPPSYRMLHSHHRGHLDHSARELLFPTGGTLPISLVLQGVGRSKFFLVV

SEQ ID NO: 35607 - protein, 381 aa, Oryza sativa
MGGVIGALFRGGGHRREMHRAPMNQPGYGGGGENHRRAMLTKKYSYIPDNYQSLDQVTAALRDQGLESSNLILGIDFTKSNEWTGKRSFSGQSLHKIGSTPNPYEQAISIIGKTLAPFDDDNLIPCFGFGDATTHDYNVFSFHPDNSPCHGFEEVLSCYKEIVPHLRLSGPTSFAPIVEAAVDIVDRSGGQYHVLVIVADGQVTRSVDTSDNDLSPQERRTVDSVVMASSYPLSIVLVGVGDGPWEDMQKFDDKIPARQFDNFQFVNFTSIMSGSTTQQQKESAFALAALMEVPIQYKATMELGILGRSTGKAKRIMPAPPPLPSAAGRQPSLRREDSAAATAAAAPPSPREDQVCPICLTNAKDLAFGCGTCAAGNVGRA

SEQ ID NO: 35608 - protein, 458 aa, Oryza sativa
MMSVQMAASLRVIVVLVCVTAGAALADAAAGGVRVGLTRIHSEPGVTASQFVRDALRRDMHRRARFGRELASSSSSSSPAGTVSAPTRKDLPNGGEYIMTLAIGTPPQSYPAIADTGSDPVWTQCAPCGERCFKQPSPLYNPSSSPTFRVLPCSSALNLCAAEARLAGATPPPGCACRYNQTYGTGWTSGLQGSETFTFGSSPADQVRVPGIAFGCSNASSDDWNGSAGLVGLGRGGLSLVSQLAAGMFSYCLTPFQDTKSKSTLLLGPAAAAAALNGTGVRSTPFVPSPSKPPMSTYYYLNLTGISVGPAALPIPPGAFTLRADGTGGLIIDSGTTITSLVDAAYKRVRAAVRSLVKLPVTDGSNATGLDLCFALPSSSAPPATLPSMTLHFGGGADMVLPVENYMILDGGMWCLAMRSQTDGELSTLGNYQQQNLHILYDVQKETLSFAPAKCSTL

SEQ ID NO: 35609 - protein, 98 aa, Oryza sativa
MSLSLIGIGPTMIYTYLKSSNLPENVAPTVFCPGVALAGSRHVSVRWRAGGFRGFSCVCVGPRIFAQKPFFLLIICFRYMLFSLYGVLCSYVQGLYKL

SEQ ID NO: 35610 - protein, 637 aa, Oryza sativa
MPRRLATTYSGRIAAARPSPAGPSLTVTVAPTPPPTPLDPRGYPLPRRHLVCAAARILRSHASPSPLLDLADYLRGLRLTLTAAEASEVVKALYGDPPLALAFFRFAAASLPGFRHDAFSYNRILALLFRTRAGPSEALRLVADMERDGVAGNISTINLLVGMGGGGVEMERCLELASKWGLRLSGYTYKCIVQAHLRSREVSKGFQVYEEMRRKGYKQDIFAYNMLLDALAKAGMVDQAFQVFEDMKQKHCVPDAYTYTILIRMSGKAGRTSKFLSFFDEMVSKGCVLNLIAFNTIIEALGKNKMVDKVIFVLSKMVENDCQPNQFTYSITLDILATEGQLHRLNEVLDICSRFMNRSIYSYLVKSLCKSGHASEAHNVFCRMWNSHEKGDRDAFVSMLEVLCNAEKTLEAIDLLHMMPEKGIVTDVGMYNMVFSALGKLKQVSFISNLFDKMKTNGIIPDVFTYNIMISSYGRVGLVDKASELFEVMEASSCKPDVVTYNSLINCLGKHGDLDEAHMLFKEMQEKGYDPDVFTYSILIECFGKSNKVEMACSLFDEMISEGCTPNIVTYNILLDCLERRGKTEEAHKLYETMKQQGLIPDSITYSILERLESRSQRTVRIRKPTRISGWVVSPLR

SEQ ID NO: 35611 - protein, 540 aa, Oryza sativa
MASGLWGALGQASSVAQLVGVDACRRLGQHVDLVGGLLRELELAELMRREATRRPLERLQGALRRCYALVRACQDDCGYLHRLLLGARMADELRAAQHEIDMYIRLIPLISLVDSSNNNRRVTATEGVPSVVPSYSDHHTRFPRRILAFTEIHVQGATKPREIRGKSLEVTVDLQEQKIMDMEAIMRLCIQTEENYPGFRKFGFFQLVDATDGFSENRNVGIGGFGTVYKGQLLDGHTVAIKRFVVDAAIFDFKSELQLVRLQHTNLIRLLGWCIHEKEKILVYEFMQKGSLDNIIFHKRKGALLNWSKRLQIIKGLAEGLLYLHKHCLIVHRDLKPNNILLDHDMNPKIADFGSAVTLVSDVAEECTRRVVGTSGYIAPEYASEGRYSLKTDVFSFGVVVLEIISGRKNFIMEKQGDTVGNLIRDAWHMWRDGRLHELVDPALCDEYESPVIMRCTQVALLCAQEDPTERPTMTDVTRVLNSQSILLSDPKKPTELTDGGASTDRPSTYIGQSSKTIDITITSSAPVSTRVRIIVDPEI

SEQ ID NO: 35612 - protein, 300 aa, Oryza sativa
MASSSQRRRALPLSFVVIVLLILAGPGPVAGDKTGELTVFWGRNKDEGSLREACDTGIYNTVIISFLTVFGHGRYWADLSGHPVAGVGADIKHCQHAKNVTVLLSIGGDGDQYSLPTPRSAKDVADHLWHAYLGGGRHGVFRPFGDAVVDGIDLYIDHGGSANYDELAKRLGEHGGVLLTATVRCMDGQETSGEAAVATGLIGRIHVRFYDDRRCSYDSSERRPFYGAWLGWTARYANASVHVGLPAAWDAASDGWINPAALVFDALPLVRGTPNYGGVVLWNRHFDRRSRYGQTIKGML

SEQ ID NO: 35613 - protein, 456 aa, Oryza sativa
MATGGNSLPSPSCADDKKRRVCYYYDPGIAHIKFSDDHVMVPARVAMAHSLVGVYGMLGDMRRLRTRPATEAEIRRFHSPEYVDLLRDLTPESYFNDAALRQKAEDDHGIGGDDDCPAFDRLWKYCRGYAGGSFAAARALVDGASDIAINWSGGMHHASACKATGFCYVNDIVLAINELLGTFRRVIYVGIDAHHGDGVQNAFLDSNRVMTLSFHRYGKITPHKDFFPGSGAINEIGDGAGEHYSVNVPLDAGVRDDVYHTLFKPIVGKAMEVFQPEAIVLQCGADSLSGDRLGGMELSVRGHAECVSFLRGFNLPLLLVGGGGYTINHVASAWCYETAVAVGKERKLPDDIEIPSHGYELMYKNQGNKLHYKTSTATAARKRSSSTEVTKGKVLEHLSQVKRAPSVQFQERRGGDNAAGVGLYYERPPSLEDDEPAQRLHRLCFPGLTKRIRLND

SEQ ID NO: 35614 - protein, 79 aa, Oryza sativa
MRRRRRPAPPHHAHPTPALPPPPPRSGRAAATRSPSTASTSSGVPCRLKHGMSSSGSISRLSLSMHAGICTVQGAMGCF

SEQ ID NO: 35615 - protein, 65 aa, Oryza sativa
MCASVMLVSNLGYSGGFMFDGDVGRLCHDDIDFGSSMVDVVNAVWAHLLIPFRLICLLSRILYCC

SEQ ID NO: 35616 - protein, 72 aa, Oryza sativa
MSAKAVALPYTRIRFLAPSRVSTITRSRFLAGADTDFSLKAKTQKWANTRPSGRTCRLRLRAPADTFRSTFT

SEQ ID NO: 35617 - protein, 139 aa, Oryza sativa
MRRVESMDLPSSALIETSMTQRYIDTYLHVSWSPLLSCLFIENPSISLGKTRAGKPFGFRRYLSLDRFESEFQRTYTNHKFWKVPNPDLRQRLRQAIVQKVVTHYSMYLEERAARGMHNQPPKSTPEQLKELLDELFEG

SEQ ID NO: 35618 - protein, 509 aa, Oryza sativa
MEVELPWGARCAAAAFFVSSLCVAALGVVLLLLRRWPWCGCHVCRAYLAGSWRREFANLGDWYADLLRRSPTGTVHVHVLGCTVTANPANVEYMLKTRFDNFPKGRPFAALLGDLLGDGIFNVDGDAWRHQRKMASLELGSVAVRSYAYKIVAQEVEARLMPVLANAADSGAVVDLQDVFRRFAFDTICKISFGLDPGCLDREMPVSELADAFDAASRLSAMRGAAASPLLWKMKRFLNVGSERELKKAIKLIDGLAAAMIRERRKLGVANSHDLLSRFMASSGDDARGAADDKFLRDIVVSFLLAGRDTVSSALTTLFMILSKNPDVAAAMRAEAGAAAGESAAVSYEHLKRLNYTHAVLYENMRLFPPVQFDSKFCAAADVLPDGTYVDGGARVMYHPYAMGRMPRIWGADCDAFRPERWLTGAGGAFVPESLFKYPVFQAGLRVCLGKELAITEMKAVSVAVVRAFDVEVVGENGRCGGGAAAAPRFVPGLTASISGGLPVKIRRV

SEQ ID NO: 35619 - protein, 364 aa, Oryza sativa
MTLITLIRDYIDRMLHDIPGMKVLVLDPDTVGMVSVVYSQSDLLRKEVFLVETVDNASSSRESMAHLKAVYFLRPSSDNVQKLRRHLAAPRFAEYHLFFSNVLKIPQIQVLADSDEQEVVQQVQEFYADFCAIDPYHFTLNIRNNHVYMLPMVVDPPGMQSFCDRAVDGIASVFLALKRRPVIRYQRTSDVAKRIAQETARLMYEQESGLFDFRRTENSSLLLVIDRRDDPVTPLLNQWTYQAMVHELIGIENNKVDLREYPNVPKDQKEVVLSSVQDEFFRANMFENFGDLGMNIKRMVDDFQHLSKTSQNIQSISKKLLPFLFPTKERKKQLCHWKVGSADLPLLSLTCSPRTHVSHTYNGE

SEQ ID NO: 35620 - protein, 428 aa, Oryza sativa
MEYVLSNAAVARSFTDYLASTCGITEPDAWRIQVDGIAKGYNALDFPAVALILVLTLCLCYSTKESAMLNMVITVFHLLFFVFIILAGLWNGSARNLVSPHGLAPYGVRGVLDGAAIVYFSYIGYDSASTMAEEIRDPARALPVGIAGSVLVVSALYCLMSLALCAMLPYTEIAESAPFSAVFREKAGWEWAGSVVGAGASLGIVASLLVAMLGQARYLCVIARARLVPAWLAKVHPSTGTPMNATIFLGLCTASIALFTELQVVFEMISIGTLLVFYLVANALIYHRYAKLGADRSLHVLLFLLILTLSSLGFSLSRRIHGQCRWGMALFGATSVTITAMFHCAVRRDMPEPPSEWMVPLMPWPAAASVFLNVFLMTTLKVMSFQRFGLWSFVIIVFYVCYGVHSTYSAEEIEAVNAMIHHANMDIS

SEQ ID NO: 35621 - protein, 78 aa, Oryza sativa
MAEPAGEAAPQADGVSEEAAARPRGFRLLGGDKSVHQALGGGKGKCEIRAFSLSRGVDCSFRAGIVSGLCAVPLCVNQ

SEQ ID NO: 35622 - protein, 133 aa, Oryza sativa
MGINNLCTMGGKPPFFYVVMTGRMTSSRYLAGACCHGIVNVVESCPTEEVSSESSETSPSLPRLHQPNTSLGDGDCRTALGAMVLPSSESPCQSSDRHHPVESLVMTLLVAVISSPTSAGHLRWCYHLPHTRR

SEQ ID NO: 35623 - protein, 109 aa, Oryza sativa
MGGEKEWYFFSPRDRKYPNGQRPNRAAGTGYWKATGADKPVGRRGRWRSRRRSSSTPGSRPRASRPTGSCTSTASPTSTAPPPPASSPSPPTTPSGLVFTSFNYLLLLI

SEQ ID NO: 35624 - protein, 483 aa, Oryza sativa
MELAKAKKEVESMNAQFSYNEKRLDSLKAASHPKADEVRRMEELDDIISAEQAELNRLAKCSSKLKDQASELQQKIENAGGQVLKDQKLKVANIQSQLDKTSSDINRHKVRITTCEKLVKKLTKGIEESRKEKEKLLAEKEKMMSIFKEIEKAAFTVQEDYKKTQEMMDNHKDELDKTKVEYNKLKKAMDELRSSEVDVEYKLQDTKKLAKEWEMKVKAFRIKLDDIQTNLVKHMDQIQKDAIDHEKLKETLSDEQFNEACDMRKAVEMVALLEALLKDLSPNLDSIAEYRTKARVYGERVDELNATTQERDDLKKQYDALRKRRLDEFMAGFNIISLKLKEMYQMITLGGDAELELVDSLDPFSEGVVFSVRPPKKSWKNIANLSGGEKTLSSLALVFALHHYKPTPLYVMDEIDAALDFKNVSIVGHYVKDRTKDAQFIIISLRNNMFELADRLVGIYKTDNCTKSITINPGSFAESMKVV

SEQ ID NO: 35625 - protein, 78 aa, Oryza sativa
MSPSSLLPAHGCGGGRQWLMSATGEEGAPTSTTAALRRRREKWRMCTLYCPPPLSPLPPAPGSSSPSATGQERSGMRH

SEQ ID NO: 35626 - protein, 350 aa, Oryza sativa
METPLSSRRITRSMAKASAAAPDATSTAHPPRPALHDITNDSPIVGLASSGLRTPASTAAKARPTRASRRTPGSGEALLRGQVKTLLQKVHHDASSSSSCAAAAPPSPNILRIHAPIGLARSPAHLLAPTPANTPHLTAAAPHAFTMTVPCVLEEELLSKLQVIADALPPPPAQAEENHLGECNRALVFDDSPGKSDLSNAASVLSSSSLSFQDSSSTDRSPDDDSSSAWSIQVNASSEKGDEDTFTDQDPEEEEEEWLTEDDDDDECFDDLCEGMSKMSVFDDEEEEDKKAGLPAFQGKHTRFIYDSDGEMEREDVAHVPVENCTMVLRGLPVPEGKHLRSHEVEEDEE

SEQ ID NO: 35627 - protein, 458 aa, Oryza sativa
MEEPPGKKGPAMDPAQDSGRDWLSGLPEGVLHRIMSFLDSRQAVRTCVLSRRWRDLWRSVPRVHADICDLIPDRIIDVEGEKAKMVVFNSFVNRLLERRDPTASIETFFCRCCIPDEDGHGSADANRWISYGLQKNAWFLEVVMLLKPLELDPSVFSSIYLRRIAFDNVFMDQGFFKQLQMGCPALERFDLDGCIVADDEISSNTLKVLTFDTTKFCYEYRISISTPTVTTLGLRNTIGGKPVLKDVASLVSASVVLYCVETSDFDANDLRHYLWSFSHVKDLIFSYQGKKLTIENNLQWCPKFFNLVGLTLGKWCLNANFYALIVFLQNSPRLEKLTLILAEDNWKTTEVFIGDLEERSFTCEHLTSVEVKCWEDDPLVNVVDFFVGSGMSSAQIHIEYEDNDEDQFHIESDNMVGFELEDEDEDEDEDEDEDEDEDDEDEDGDEDEQRSLFQSKDV

SEQ ID NO: 35628 - protein, 490 aa, Oryza sativa
MEEEAGAEVPLLKIKGDYHQGCPGCAYDRKKEVYRGLPYKEFLYLWMICLTAALPISSLFPFLYFMIRDLHVAKRTEDIGFYAGFVGASFMFGRCLTSTIWGIAADRIGRKPVVVFGIFAVVIFNTLFGLSFTYWMAIATRFLLGALNGLLGPIKAYAIEVCRPEHEALALSLVSTAWGIGLIIGPAIGGYLSQPAEKFPNVFSPDSLFARFPYFLPCLCISVFAAVVLIGCIWMPETLHKHKADANRSQTVEALESHLIDPEEKADQNGSLDCKKSLLSNWPLMSSIILYCVFSFHDMAYTEIFSLWAEGDRKYGGLSLSSEDVGQVLAITGASLLVYQLFIYPRINKVIGHIKASRIAAILCIPILFAYPYMTYLSGPGLTIILNIASVIKNNLGVTIITGCFILQNNAVPQDQRGAANGLAMTGMSFFKAVAPAGAGIVFSWAQKRQQASFLPGDQMVFFLLNLFELLGLILTFKPFLAVPQQHDTN

SEQ ID NO: 35629 - protein, 474 aa, Oryza sativa
MAMVEKTVLLYPCPAVGHLNPMVQLAEALVRRGVSVTLAVADPPDKGAVLAGAIARIAAVCPSIGVRLLPIPSCEGKTYSHPVMWIVDALRLANPVLRELLRSFPAAVDALVVDMFCIDALDVAAELAVPAYMFYPSAASDLAIYLQVPHVARSAPSSFKDMADTVLSFSGVPTIRALDMPDTMQDRESDVGTTRIHHCSRMAEARGILVNSFDWLETRALKAIRGGLCLPSGRSVPAIYCVGPLVDGGKLKENDARHECLEWLDRQPKQSVVFLCFGSRGTFSVSQLSEMARGIENSGHRFLWAVRSNLGEVDLEALFPEGFLERTQGRGFVVKNWAPQSAVLQHGAVGAFVTHCGWNSSLEAIMSGVPMICWPLYAEQRLNKAHLVEEMKLGVLVEGYDGELVKADELETKVRLVMESEEGKRLRERSAMAKEMAADAVKDGGSSDMAFAEFLNNLGTNNVKSGPRDTPVHD

SEQ ID NO: 35630 - protein, 149 aa, Oryza sativa
MDPAAAAAAGGGAGPKSDAAPSAPALHGLPVEMTTKAGLQFPVGRIARYLKAGKYAERVGAGAPVYLSAVLEYLAAEVLELAGNAARDNKKNRIVPRHIQLAVRNDEELSRLLGTVTIAAGGVLPNIQQVLLPKKGGGKGDIGSASQEF

SEQ ID NO: 35631 - protein, 437 aa, Oryza sativa
MGKHHVTLCCVVFAVLCLASSLAQAQVLFQGFNWESWRKQGGWYNFLHEKVEEIASTGATHVWLPPPSHSVSPQGYMPGRLYDLDASKYGTEAELKSLIEAFHDKNVECLADIVINHRCADYKDSRGVYCVFEGGTPDGRLDWGPDMICSDDTQYSNGRGHRDTGAGFGAAPDIDHLNPRVQRELTDWLNWLRTDLGFDGWRLDFAKGYSAPLARIYVDNTNPTFVVGEIWSSLIYNGDGKPSTNQDADRQELVNWVEGVGKPATAFDFTTKGILQAAVQGELWRLHDGNGKAPGLMGWMPDQAVTFADNHDTGSTQSLWPFPSDKVMQGYAYILTHPGIPCIFHDHVFDWNLQHEIATLAEIRSRNGIHAESTLDILKAEGDIYVAMIDGKVITKLGPRYDAGGIIPSDFHVVAHGNDYCVWEKEGLRVPAGRKHY

SEQ ID NO: 35632 - protein, 369 aa, Oryza sativa
MLRYTRGPSSYAALMGDAFGRAGAALLNVFVAFNAIGTLTVYLIIIGDVMSGTTSDGKVHDGVLTEWFGQQWWTGREAVLVAAAVLLLPLVLRKRVDSLKFTSAVSILLAVVFMFISLGIAVYALFTGTAKMPRMLPDFSRLSSPFELFTAVPIVVVAFTFHFNVHPIRTELSKTSDMKAAVRISLVLCAAIYAAVGFFGFLLFGDATMADVLANFDRSSGAGVPQALNDAARLSYALHLVLVFPLLHFSLRVNVDELLFPGRRPLATDTRRFVALTAVLMAVLYALAIAIPSIWTLFEYSGSTFAVCISLIFPGAIVLRDAHGIAKTKDKALAATMIALAVITSSIAIASNVMSSISGKVEGGHAAGR

SEQ ID NO: 35633 - protein, 361 aa, Oryza sativa
MGAQQSVNAGKAKVDVHVDLTHMLCEALLLPPMRNSGATFSQIVGRISLKHPSLFGRSEKLDVILDKGINESNAVIAFRRPRPEWLSQQSFVIQHTMTPEIAVHGFPADNFTRSGSRGINLSRLSLGVELNEPSTSNWTSGTSVKFEHIRPVNNEGRSIARDHDGFPLTCSGNLHDNMIILKQESGYADVNDNSFLKVNLQMEQGLPLVPKSLTFNRVKCAVSKGMKLGPTFLVTSLTGGSIVGDMAPYQAFAIGGLGSVRGYGEGAVGAGRLCLIANCEYTVPLAKHLEGSIFMDCGSDLGSACHVPGNPALRQGKPGFGVGFGYGIHFNTDLGQIRVDYAMNAFSRKTIYFGINSGGGS

SEQ ID NO: 35634 - protein, 508 aa, Oryza sativa
MLVMAYGRSYGLPVITTRGNNVYGPNQFPEKLIPKFILLAMRGLPLPIHGDGSNVRSYLYCEDVAEAFEVVLHKGEVGHVYNIGTVKERRVIDVAKDICKLFGLDTEKVIRFVENRPFNDQRYFLDDQKLKKLGWAERTLWEEGLKKTIEWYTNNPDYWGDVAGALLPHSRMLMTPGVERHNWTDEIKSLSTSPDEAKESSTAVPAATAKSTSSAPQKASYKFLIYGRTGWIGGLLGKICEKQGIPYEYGKGRLEERSQLLQDIRNVKPTHVFNAAGVTGRPNVDWCETHKQDTIRTNVVGTLNLADVCREQGLLMINYATGCIFEYDAKHPEGSGIGFKEEDKPNFTGSYYSKTKAMVEELLQEYDNVCTLRVRMPISSDLSNPRNFITKIARYDKVVNIPNSMTILDELLPISIEMAKRDCRGIWNFTNPGVVSHNEILEMYKKYLNPDFKWTNFTLEEQAKVIVAPRSNNEMDASKLKSEFPELLSIKDSLVKYVFEPNRKVPAN

SEQ ID NO: 35635 - protein, 137 aa, Oryza sativa
MVVRIRLARFGCRNRPFYRLMAADSRSPRDGKHLEVLGYYDPLPGKDGGKRMGLKFDRVKYWLSVGAQPSDPVERILYRAGILPPPPMLAMAHKGGPRDRRPIDPMTGRPLDLEGVTVVDDSHTPKSGDGAPNEETA

SEQ ID NO: 35636 - protein, 504 aa, Oryza sativa
MAAMGRSVRVVLDSSVLLDPSGVTAEEEEVVVALRPGAEALLRRLRYSNLRVAICHPEGLPTNESGFLEKTAKLYSFGYMPLTSPSGSNLLNELMLEWSGTNFCFYVTSGVHEGLLSELQNHNWEVIAMGNEDVIKNSGVIHISMLQELLITLATSIKKEIGNSSAFVVGYVMKQSREEDFAKRGAFPIYPSKNDLIFVPLSFELPLASQLQEVDLVLHKITDEIINIDPNSSISFPKGISFSPGMSEIIRFVEEHCDFCVIDPFKNIYPLLDRIQIQEILIRLEGLSAEGRPKLRAPCFLKIESFCGSELQKQLAEAKLSFPLIVKPQVACGVADAHNMALIFKIEEFSNLSVPLPAILQEYIDHGSKIFKFYAIGDKIFHAIKNSMPNASHLKSSSGGKPLTFNSLKTLPVATKEQLLQNEVQDSKLLDINLVEEAAKLLKELLGLTIFGFDVVVQESSGDHVIVDLNYLPSFKEVPDNVAMPAFWDAIKQSYESRKQMTQT

SEQ ID NO: 35637 - protein, 303 aa, Oryza sativa
MASPQSAKFMRAFSDAQNAVMDRFMSPVKSRWRFKRLFNMEPERQMREALATIHGFAERIVRERRERGEAGLARSDDFLSRFAASGDHSDESLRDVVTNFLIAGRDTTSTALTWFFWLLSGRPDVEDKIVREIHAVRRASGGTGDPTFNLDELRDMQYLHAAITESMRLYPPVAMDSHSCKEDDFLPDGTFVGKGWFVSYSAYAMARVEDIWGADCEEFRPERWLDEAGAFRPESPFKYPVFHAGPRMCLGKEMAYIQMKSIVASVLERFSLRYAGGEGHPGFVLWLTLRMKGGLPMQVTTRG

SEQ ID NO: 35638 - protein, 170 aa, Oryza sativa
MDDIMNKLGGYWLGQKANKEISSAGDDIESLSTSVGEGAKWLVNKLKGKMQKPLQELLREHDLPEGLFPREATNYEFSPETRRLTVHIPAACEVGYRDGSVLRFDATVCGTLEKGRLAEVEGLKTKVLVWARVTAVRADAAKVHFTAGIRKSRSRDAYEVVRGGIIVEEF

SEQ ID NO: 35639 - protein, 308 aa, Oryza sativa
MGGGGGGGGRKDRGEGLGRALTRQRNKAAAAAKERGHALALARRARQPLESVIEVSDIDAVLQRAAEEYLLLGGGGGDGAGDVALSASLGSGLIDLDGTVETEEERRWLREEQEALHAGSLKVPRRPPWTPQMTVEELDANEKRAFLEWRRNLARLEENEKLVLTPFEKNIDIWRQLWRVLERSDLLVMVVDARDPLFYRCPDLEVYAQEIDEHKRTLLLVNKADLLPLNVRQRWAEYFKQHDILYLFWSAKAATADLEGKKLSSYSMENWNTADLDTKIYGRDELLVIQILKLTQRKPLTLKAQILQ

SEQ ID NO: 35640 - protein, 466 aa, Oryza sativa
MAVSSELEGLQDVEPSRFIAFSFPNPLLLLDHASDPYAHGGHEFLRVAVLDHSSPHPSPRTAAMLVPAGRHRDWIFSTRAGHLHLLLASRSQCSHLSRLILVGPELSAPSPSRVVVVAAAARPDPDPAHARLLPLLLALCPRAAFGGDAIPDVPLLSFHDDLLRLAPVKVVAGPVVGEMVVEDVAVDCAPRSAELRRRLRFKRMPFLVQTQVRLVRQLSPGDSLMLDALDEVGGGSLQPEVGGELVQPYLQAMAAGLAVIAPSMDESFRLGGKPRCLCAGIGGGALLMSIRMGLQCDVLGIEADGVVLDVARSHFGLVEDEFLQVRVGDAIQMIQDFAHQGDPDMNFSAIMVDLDSSDAICGVSAPPLEMTKESILLASRTILHRDGAFILNVIPPAADGSFYKGLIDVLRRVFSELYEINVSNGENFVLVATVSPVETILADSSGSVLTKLRKLAGDFLEHITRI

SEQ ID NO: 35641 - protein, 185 aa, Oryza sativa; identical to SEQ ID NO: 35393

SEQ ID NO: 35642 - protein, 532 aa, Oryza sativa
MAGRCAGGGDGGGEGMLARLRRAAARRIGLSCASFFSHAATSPSPPPKTISCSALNAPADSTDEDQEKLEEPTSTRMADKNLCAICLEPLSTGSVDIDNGDRPAIFTSQCSHSFHFLCIASNIRHGNVTCPICRAQWSQLPRDLKVPPLLQNNQSDPILRILDDNIATSRFNRRSSIRAARYNDDDPVEPYTLTEHVDPCLRFALIPSPVAAHHHALGHYPCGRVMPLQQHCQYSSSSMLSPPQIASPSGQRRAYLSVSLAPQPAMDLVLVASPNGPHLRLLKQAMALAVFSMRAIDRLAIVTNATTATRAFPLRRMSSHGKRMALQVIEHLCCVGGTDPVGALQKGLKILEDRAHQNPSSCILHLSDHPIRSCFGVDMNRFNIPVHQFHVGLGFGVQNGFVMHEFEELLARLLGGVISDTQLRIGEHGGVVRLGELRGGEERRIPLDLVSDCGFILVGYSYLEGGREDQFRTGEVAVGFEEKGDNRYCGVRDAGGLSIGGERRSSCCAERWDYLDPFMARRWAKHFNVYRA

SEQ ID NO: 35643 - protein, 223 aa, Oryza sativa
MGTPETSREPCPDRILDDVGGAFGMGAVGGSLFHFLKGTYNSPNGERLVGGAQAVRMNAPRVGGSFAVWGGLFSAFDCTMVFMRQKEDPWNSIIAGAATGGFLSMRQGPGAAGRSALMGGMLLALIEGAGLMLNRVLATPPPLPVDDPNLPAVMGGGGGIPGIPQVPVAPPEVASSSGGGSGWFGSLFGKKEEEKKASPSGGKSEMLESFDTPSTPIPTFEYK

SEQ ID NO: 35644 - protein, 91 aa, Oryza sativa
MLCFQWGTMHGDVMVCLSRNYRRLIVYKKLIHSTVLHYAAINCGDFTLQYCAAQLVQRLDDAEHMYGLLTDVSTRIYLNQLVFGSGNTLMR

SEQ ID NO: 35645 - protein, 397 aa, Oryza sativa
MADGESPPWAELVPDIVRKIGRHLLCEIDRHHADGLCRSWRDALLQLRPPPPPLPRLVLPEADGPAFYCVPSGCRPHPFVLPPAALRARCFGSYNGAWIFQAVDQAANHVLLNLITHQQLNLPNLIRFPSFRLPGLTFDFEVAFVAATLSSQPTDQGCVGASIIGFKRRPLNPRHIAFWRMGDEAFSQSIESRWIDEELELDVVDLLYSGHGAGAFLFLTRGENIRVFRQPIFPLGDMQTTVLYFERRGDDDDDDGRPVLDRYLVESRGKLLMVVRLGDREPGRLPTTTFRVFEREDELFNNYWTKLPDLGGRMLFVGRGCSRSYEAADGYPGMEGVYFLDDRSFHDPMVVYKDAAQRRYPCSDNGRWSGAPPPAEVERCFPEQGPSNYSPPVWILP

SEQ ID NO: 35646 - protein, 327 aa, Oryza sativa
MLRRVAPSLRRAILTSSAHGRAGAQLTEPGLSPRHALLPQWRLCSSAASTNSPPPPPPPPSSPPQGTPRPAGGSTVSSLNPAEVAKFAAIAETWWDSEGPFKPLHLMNPTRLSFIRSTLCRHFRRDPNSSKPLEGLKVIDVGCGGGILSEPLARMGATVTGIDAVDKNIKIARVHAASDPSTASIEYFCTTAEDLVKENKQFDAVISLEVIEHVANPSGFCESLSALTVPNGATVISAINRSMRAYATAIVAAEYILNWLPKGTHQWSKLVTPEELVLILERASISVQEMAGFVYNPLRGEWSLSDDLTVNYIAYGMKKVETPSESN

SEQ ID NO: 35647 - protein, 306 aa, Oryza sativa
MQQQQAWAAGLGGLAVAGVGEEGGGGGPAPTTVDEASMERSKSFVKALQELKNLRPQLYSASEYCEKSYLHSEQKQMVLDNLKDYAVRALVNAVDHLGTVAYKLTDLYEQQASEVSTLELKVACLNQQVLTCQTYTDKEGIRQQQMTGTATRHHKHYIVPTLANKRMQAFSEMQTDADIDSRPRPYPSAKTLFWHLASEKNSKTNGARQSEFVLEETKATKPASRGKEPSTSPLPKHLQTNLASSDFAMHNVGMKDQPGVRYLSSFSSFDNPRGRQIQKAPLRTKSMLAAFFVKHKSGKMKNVSVR

SEQ ID NO: 35648 - protein, 272 aa, Oryza sativa
MASVKAANNITIEPVVQYVDKELDKASNRDKGAKGNRGMVVADHFQLWPSPYQLNCECSHTEQQPWPPPTQAGDIGCQVALRRVLGSSSKCSQGDLMPVTPPRPLTIGKLHNSRSRSAGNTTEAVQSIIESHAISLHCRISKSMCIALNFVESWLQNTAKKLCNGQLLNLSVGIHFDDRKISTTLFFAELLEHPIIYFQVYLTAFHCVHSNKILRPWIIARAANEKQNRKVKRCGYDSIVGFDGNNPIDASIAVKVSIDVIGTWTDSETLYA

SEQ ID NO: 35649 - protein, 80 aa, Oryza sativa
MEVAETLSRNHRIHEAKKVLSEYRGKKEWSVSVVFRMFSSPFFSFLSFSHLLVDSSIKQHEKKKMPLALMEEKVAAYEVL

SEQ ID NO: 35650 - protein, 443 aa, Oryza sativa
MTHEPNWLLDWYWKETTGKNVSHLIQDYLNGRCKLRLAGDLHHFMRHSANQIDNPTSVQHLLVNGCGGAFLHPTHVFKNFEQFSGATYECKAAYPSFDDSSGIALGNILKFRKKNWQFDTIGGFIYFILVFSMFPQCNLGHILNEETWSGRLGSFSNTIWSALLYIFEHSYVSSVGSLTLLLASYSFVPSKLSRRKRAIIGGLHVLAHLTAALLLMLLLELGIEICIRNHLLATSGYHTLYDWYRSMESEHFPDPTGLRARLEQWTLGLYPACIKYLMSAFDVPEVMAVTRINICKNGMMSLSRSVLMMYYTSVFIYFWIFSTPVVSLIFGSYLYICINWFHIHFDEAFSSLRIANYKSFTRFHIKKDGNLEIFTLAVDKVPKDWKLDPKWEAEERRPHQLSHHRKHPSKWRSSSSPDPVTSVRVVDHFTISRTRTSDPNTSC

SEQ ID NO: 35651 - protein, 508 aa, Oryza sativa
MDAGECSSSQPCASSSPDAAGGVWAKLVPSDSAFPEVELAEDDAVVCSRVTPDGGGEVAAWCEIRRGGGDGDASSATIRNLSSDAIIVDGRVIQQEAVDIKPGSEIVSGPQKDGHLLYTFDITGLNDQDKTNIKIVLDIENAKCSICLNLWHDVVTVAPCLHNFCNGCFSEWLRRSSANSRDKSQSAACPQCRTAVQSVGRNHFLHSIEEAILQAFSSLQRSDEEIALLESYASVKTNIAWHAFIPFPWSYAGAMILRSTMGINICQREVLGKQKIQSRKRRLPRSNDEANHTNHADFLCPQCGAEFGGFRCSPGAPHLPCNGCGGMMPARPDTSIPQKCLGCDRAFCGAYWCSQGVNSSQHNPICDQETFKMISQRHISSVPDTIHGGNQYEKDITERCIQQSGKALQAIISEWIVKFDNKELDRSRLQLNHVDAITSRTYVCNQCYSKFIDFLLYWFRVSMPRNLLPPDAANRESCWYGFMCRTQHHRPDHAKKLNHVCRPTRGNP

SEQ ID NO: 35652 - protein, 396 aa, Oryza sativa
MGGGAARAWFAMKVMDKASLESRRKLSRAQTEREILQLLDHPFLPTLYAHFETDRFACLVMEFCPGGDLHALRQRQPGKHFPEHAARFYAAEVLLALEYLHMLGVVYRDLKPENVLVRDDGHIMLSDFDLSLRCAVSPTLVMSSSLGSDPKRGNNAQSCAAQPAACIQPTCFMPKLFGKKPKSSQPRQRYHHQQQQQLAAAALPEVVVEPTGARSMSFVETHEYLAPEIIKGEGHGSAVDWWTFGVFLHELMYGRTPFKGQTNRATLFNVVGQQLRFPDHPPTSNAGRDLIRGLLAKEPQGRLGVKRGAAEIKQHPFFDGVNWALIRCSTPPGVPRAVEPVAVAAAVPATVMSKPPPVDTVEMAIHSNCNSTNSSKRMAGPPEVESGGKYLDFEFF

SEQ ID NO: 35653 - protein, 339 aa, Oryza sativa
MGMDYYNILKVNRNATLEDLKKSYRRLARTWHPDKNPTGGAEAEAKFKQITEAYEVLSDPEKRAIYDRYGEEGLKGMPPPGSQSRTSAAAGSSGPSNFRYNPSDPDDFFAEFMASNKPYSFDQERTRFQPRSQWTAGNTRGEASSASHKESSTSTSQLEKPAAIEKTLLCTLEELYNGTKRKMKITRNVANTDGKVEIETEVLPVEVLPGWKKGTKITFPNKGDRLSGQLPQDLTFVIDLKPHDVYLLEGNNLVATQVIPLVDALAGTTIHLKTLDGRNLPIRVEEVVRPGHEIVLANEGWPIRKEPGKKGNLKIKFDVTFPTRLSSSQRAAIRQIMGG

SEQ ID NO: 35654 - protein, 75 aa, Oryza sativa
MKLLKRKKLYLFQKAVMSLKFGTVRLLFPHTQILTTILERFKHQEILKIGSLKFFLEKQLQRKISSGFKAKRDFQ

SEQ ID NO: 35655 - protein, 217 aa, Oryza sativa
MSRTSSNAFRCCSAYSGHGAIGTPCHRLSSTEFHPPCVTKPPMAGWARISFCGAHVGHTMPLPLVLSRNPSGRSSSRFASVGCSDPSGAPVPDSAAGGGPRRTQRKRWPERSSAAVISTTCAASNQPMLPKQRNTTDAGGCPSSHAMHSCGGSELSLLSLPPSESTGPMGYTGGAARPGTHRPSAMAARGPGSSSSAVFAMMPVASMKRSPRRTNHV

SEQ ID NO: 35656 - protein, 486 aa, Oryza sativa
MLRCVFRAPMSFFDTTPSGRILNRVSVDQSVVDLDIAFRLGGFASTTIQLLGIVAVMSKVTWQVLILIVPMAVACMWMQRYYIASSRELTRILSVQKSPVIHLFSESIAGAATIRGFGQEKGFMKRNLYLLDCFARPLFSSLAAIEWLCLRMELLSTFVFAFCMAILVSFPPGTIEPSMAGLAVTYGLNLNARMSRWILSFCKLENRIISVERIYQYCKLPSEAPLIIENSRPSSSWPENGNIELVDLKVRYKDDLPLVLHGISCIFPGGKKIGIVGRTGSGKSTLIQALFRLIEPTGGKVIIDDVDISRIGLHDLRSRLSIIPQDPTLFEGTIRMNLDPLEECTDQEIWEALEKCQLGEVIRSKDEKLDSPVLENGDNWSVGQRQLIALGRALLKQAKILVLDEATASVDTATDNLIQKIIRSEFKDCTVCTIAHRIPTVIDSDLVLVLSDGKIAEFDTPQRLLEDKSSMFMQLVSEYSTRSSCI

SEQ ID NO: 35657 - protein, 349 aa, Oryza sativa
MGNILRCFKGDDDGGDHYPYYKPTSRPHYQPPHYHGQPAAPPAPLQQQHLGPHGVTPSTVGVAALAHDLLNFESTSMVPDGLSQHVVSSRKAQVKWYQKLLEAYKNTTPPPKTPANAAQLIARALNMIQRADLEGILEFYNLPIPSLPTASSNYQPSLLPEGVQFVLNTLPVYDKCIGDGDGFTAYVPTTDPRESANVPLEVHELVIARTQARKCRDYQSADALLSSLDEAGYKIISCSDDEVLARKYRIRMRGIDAPELKMPYGKESRTALVKLIGGKSVKIYVYDLDQSLQDGRERQELQTEGFGRQGILRNHGIGEETNATQDRTPSRCTEVESPALIWPQMCIYV

SEQ ID NO: 35658 - protein, 212 aa, Oryza sativa
MDKKQTSLGTPVYRTNPFDSDSDSEVPSRPSRAQSVPVRRTDQSIQELEDYAVDKVEETSRKVNDCVRAAEAIREDATKTLVTLHRQGEQITRTHRVAADIEHDLSMSEKLLGSLGGLFSKTWKPKRNQQIKGPISQNNSFTSSANHMEQRQRLGISSTRQPSPNQVHRSPATAIEKVQVEIAKQDDALSDLSNMLGELKGMALDMGTEIER

SEQ ID NO: 35659 - protein, 312 aa, Oryza sativa
MISCISPNAGSCEHTLNTLRYADRVKSLSKGSNTRKEQPTGPTIPSSKDSSSAPSYPMPIETEEIANQIQEKRPVETSRKAAENFTSNSSMEPDRNPVSMIPSYSNRGKEENGSSGLNDRERVDLNSSRISYNSKPQSVQSSANLQEEEKVTKVSPPRRKAYRDDKPERQSNYAKKDSGPETSRPGYKVQQAKQLQQQQRPTSASASQNSSRQSEKESSCDDVEIDAVLEEEEALIAAHRKEIENTMEIVREEMNLLAEVDQPGSLIDNYVTQLSFLLSRKAAGLVSLQARLARFQHRLKEQEILSRKKSSR

SEQ ID NO: 35660 - protein, 447 aa, Oryza sativa
MVSQFMVELVGTKAVDGEAPPRILHFNPRIRGDYSGKPVIEMNSCYRMQWGQSQRCEGYASRPANETVDGQLKCEKWIRDDDKKSEESKMKWWVKRLIGRPKDVHISWPYPFAEGKLFVLTLTAGLEGYHVNVDGRHVTSFPYRTGYTLEDATGLSLNGDIDIESIFASSLPNSHPSFAPERYLEMSEQWRAPPLPTEPVELFIGILSAASHFAERMAVRKSWMMYTRKSTNIVARFFVALNGKKEVNAELKREAEFFQDIVIVPFMDSYDLVVLKTIAIAEYGVRVIPAKYIMRCDDDTFVRIDSVLDQVKKVRSDKSVYVGSMNYFHRPLRSGKWAVTYEEWPEEAYPNYANGPGYVISADIARYIVSEFDNQTLRLFKMEDVNMGMWVEKFNNTLRPVEYRHDVRFYQSGCFDGYFTAHYQSPQHMICLWRKLQSGSSRCCNVR

SEQ ID NO: 35661 - protein, 522 aa, Oryza sativa
MAGGEDGADGVGDDTELRRFSDVELLEKSRRIQGELSGGIERRLKDRGAKFRRLLDAIVREIDRRKAATDDDRCARVVQSGCAESSVKQQAVTISDFRSSFGIDEEAGVDVSHLETSACIGDPKTSTDNEGILCEEEDSCKCKPSTSQKASYVDRSTYMENIDAADDGKDNGYSRICKDAHTSRKRNGEFSPTFSMRLRSRKVVEEVVLLDGDTCISDSAEKTSSACDAMKIHYPSWDTPNSIELSYSDMKCLEPESLLSSPILNFYIMYLMGQMPSTSRLGGKYHIFNTYFFSKLEALTSKVDNDAYFLNLRRWWKGVDIFKKAYIIIPVHADAHWSLVIICMPAKEDQSGPTIFHLDSLKFHSSRFIFSTVERFLKEEWNYLNKTGSLEDCHLHESVWKNLPRKIKKKAVTVPQQDNEYDCGVFVLYYMRRFIEEAPERLNNKDSSNMFGEGWFQREEASALRKEMQALLLRLFEEAKDNNHMRDPTTPVSATAEHPVEVLSTEPAVPDHPRNAVGVATS

SEQ ID NO: 35662 - protein, 485 aa, Oryza sativa
MGSLGAAGKPHAVCMPYPAQGHITPMLNVAKLLHARGFDVTFVNTEYNHARLVRTRGEAAVAGAPGFRFATIPDGLPPSDDDDVTQDIPSLCRSTKETCLAPFRRLLAQLNDPATGHPPVTCVVSDVVMGFSMAAAKELGLPYVQLWTASSISYLGYRHYRLLMERGLAPLKDVDQLTNGYLDTPVEDVPGLRNMRIKDFPSFIHTTNPEEYMVGYVIEETERCKDASAIIVNSFGDLEGEAVAAMEALGLPKVYTLGPLPLVARKDPPSPRRSSIRLSLWKEQEECLQWLDGKEAGSVVYVNFGSITVMTNEQLVEFAWGLANSGREFLWIVRRDLVKGDTAVLPPEFLAETAERGLMASWCPQQDVLNHPAVGAFLTHSGWNSTLESLAAGVPVISWPFFADQQTNCRYQCNEWGVGMEIDSNVKRGAVACLIAELMEGQKGKEMRRKAEEWREKAIRAAKPGGSSHRNFEELVRHVLLAKES

SEQ ID NO: 35663 - protein, 264 aa, Oryza sativa
MAGVQKPAKRLGGMAEALSIAADLGFPAPPAQEDQGSSDKSDDLVRVLRELTVVQRNIANLQVELQGRKDDKNIAHLTHVSEMEKKCESLARITTILKDVIQNKDRIIARLQQPYSLDCIPVEAEYQKQFSELLLKAASDYGALTASVGDFQWSQNFRESPAVWGEMLRPIPAALASCTRFFEAMSAMRESFSTLQKLRVGHSSLSMTPGGSSDDSKFLTPPQWREGSMLDSWKQVDETIPESDGLDAINQRRLSWPSSIKREQ

SEQ ID NO: 35664 - protein, 610 aa, Oryza sativa
MGRRGAQLQALVLSARKPHAVLKSPSARCCLEQEPGADMVPDGGEGHEIVEVAGEPGAPSSTMRLMDFIPIYIPTVETGALSRSACKRRFLDFLRAHPSRDWFLRSTFVGRLRHRGQGQAASGDDEEVDSGGGRRRPRRRFRVPFVRKIKWGKLWSYAVSWCRKPENFAMIIWLAFVAAGLLMLFMLMTGMLDSAIPDDEQRKKWTEVINQILNALFTIMCLYQHPKIFHHLVLLLRWRPGAGADREEIRKVYCKDGAPRPHDRAHMLVVVVLPHATCLAQYFCCALFWSYARKERPDWALNIGYGLGTGCPVIAGLYAAYGPLGRKQHEDSDEESAAAQAGGGNRPAENDREVEIKIYNRRVVVSSPEWSGGLFDCCDDGTVCALSATCTFCVFGWNMERLGFGNMYVHAFTFILLCVAPFLIFSVTALNVHDDDIRDTVVSVGVLLGLCGFLYGGFWRTQMRKRYKLPASGCGCGCECGAGGQGHACRAAVSDCAKWLFCWSCALAQEVRTANFYDVEDDRFVFHGARNEDGRAVLVPLPREASTATAHSRSMSCPPKIDAVAALSGASPLGVQMAAINMERSATYSGEHHPAAMRPPVPPLMQMDQE

SEQ ID NO: 35665 - protein, 815 aa, Oryza sativa
MDSTYALHLAVATLLGASFAAASAYYMHRKTLDQLLRFARSLDRDHRRRNRHLLDADDDDDDDPPRDHDRRTTLPIPPGLPPLHTGREGKPIISPASTKRVGPLVRPTTPRSPVPTVSAFETIEDSDDDDENIAPDAKNNAVSLLTNGTIGSDPLPGKASQNGDTKPVPSTNMIRSQSATGSLHGAQHNPVAADILRKEPEHETFSRINITAVETPSPDEIEAYKVLQKCLELREKYMFREEVAPWEKEIITDPSTPKPNPNPFYYEQQTKTEHHFEMVDGVIHVYPNKDAKERIYPVADATTFFTDMHYILRVLAAGDIRTVCYKRLNLLEQKFNLHLMVNADRELLAQKAAPHRDFYNVRKVDTHVHHSACMNQKHLLRFIKSKLRKEPDEVVIFRDGTYLTLKEVFESLDLTGYDLNVDLLDVHADKSTFHRFDKFNLKYNPCGQSRLREIFLKQDNLIQGRFLAELTKEVFSDLEASKYQMAEYRISIYGRKKSEWDQMASWIVNNELYSENVVWLIQIPRIYNVYREMGTINSFQNLLDNIFLPLFEVTVDPASHLQLHVFLQQVVGLDLVDDESKPERRPTKHMPTPEQWTNVFNPAYAYYVYYCYANLYTLNKLRESKGMTTIKLRPHCGEAGDIDHLAAAFLTSHNIAHGVNLKKSPVLQYLYYLAQIGLAMSPLSNNSLFIDYHRNPFPTFFLRGLNVSLSTDDPLQIHLTKEPLVEEYSIAASLWKLSSCDLCEIARNSVYQSGFSHRLKSHWIGRNYYKRGHDGNDIHQTNVPHIRIEFRHTIWKEEMELIHLRNVDIPEEIDR

SEQ ID NO: 35666 - protein, 376 aa, Oryza sativa
MRMGLRTCSAMEGEVVAASPFFEWLKPPPRPASSSSWSSSFSSSSSMASRDQETVVPGEDGGGEIQEDHKSGMTCLPLLSMLEEGNSKRHEHPVKEEIMSSAHAAGVVEPGVELNIGLPVTGSSAQEVTMEEDDEEEDDDDVGEEEMDEWKPMHGGCKVEGDEEQYGEAVASVEGSSSITAVGDMFGGVGAESGVAMSSRYWIPTPAQILVGPVQFICHVCNKTFNRYNNMQMHMWGHGREYRKGPESLKGTQTLAMLKLPCYCCAAGCKNNVAHPRARPLKDFRTLQTHYKRKHGAKPFRCRRCAKPFAVKGDWRTHEKNCGKRWFCACGSDFKHKRSLNDHVRSFGAHHLPVAESAAAAATTPADKDRIISFQR

SEQ ID NO: 35667 - protein, 130 aa, Oryza sativa
MSPMEAAARRISPRSRSTRSTPAASSTTSGGRRCSAWRSARRRASSRRRRRRRRTTTTTSPCRTTMTPPSRPAASTARCSRSSAASGAATPPSSTRRPRCIPPRRRVNPATRRGRSPRRRRRSGPCTSRT

SEQ ID NO: 35668 - protein, 600 aa, Oryza sativa
MPLNLASSPAAAAAAKVCAGVRASPRHLLPRALDHQSRRVLSLSSSSSAGRAAGVRAMAAAEAGASTATQAKSSGVKQALISLSDKTDLAYLGNGLQALGFSIISTGGTASSLEAAGVNVTKVEQITNFPEMLDGRVKTLHPSVHGGILARRDQEHHLKALNEHGIGTFDVVVVNLYPFYNKVTSGVISFEDGIENIDIGGPTMIRAAAKNHKDVLVMVDHEDYPALLEYLQGKQDDQQFRKMLAWKAFQHVASYDSAVSEWMWKQSNKGDVFPPNFTVPLSLKSTLRYGENPHQKAAFYGDKSLSVVNAGGIATAIQHHGKEMSYNNYLDADAAWNCVSEFESPTCVVVKHTNPCGVASRQDILEAYRLAVKGDPVSAFGGIVAFNTTIDEDLAKEIREFRSPTDGQTRMFYEIVVAPGYTEKGLEILKGKSKTLRILEAKRSGKGMLSLRQVSGGWLAQESDDLTPEDITFTTVSERAPQDSELSDAKFAWLCVKHVKSNAIVIAKNNCMLGMGSGQPNRLESLRIAFRKAGEEAKGAALASDAFFPFAWNDAVEEACQNGIGVIAEPSGSMRDGDAVDCCNKYGVSLLFTGVRHFRH

SEQ ID NO: 35669 - protein, 625 aa, Oryza sativa
MEANGVIPDVMMPSLLADVEVSHLAGFDVTPSPHAEPSPRPQLRHDNPSRSRVPPLERVSRRSEVVFPPLDSPFQAPGYRSVQPVSISLPASPTGFGVPVALPIAVGDAGEPADLRRQAMSNAARDAEEQQLAAQGKGSNNNVRFVQPDKVVFRSQPIPGGKPARRAASNRGGRMMSRDRRYDSFKTWSGKLERQLTHLAGAGPEVPEEEEDGCDGDAISSHHTKSMPQVDRFFAALEGPELDKLRSSEELVLPSDKTWPFLLRFPVSAFGICLDVSSQAILWKTVATSTPTRFLHVTTKVNLVLWCVSLALMCVIAAIYACKVVFFFEAVRREYYHPIRVNFFFAPWIACLFLAIGVPPSVATELPRWLWYALMTPILCMELKIYGQWMSGGQRRLSKVANPSNHLSVVGNFVGALLGASMGLKEGPVFFFSVGLAHYTVLFVTLYQRLPTNETLPKELHPVFFLFVAAPSVACMAWAKITGEFGLGSRVAYFIAMFLYASLAVRINFFRGFRFSLAWWAYTFPMTGAAIASIRYSTEVDNAFTKALCVALSVLAMLTVLALLATTIVHGFVLRNLFPNDISIAITERKVKPIVELHEMLGSNDSAAGRSNDDIEAGVAAVESS

SEQ ID NO: 35670 - protein, 327 aa, Oryza sativa
MGHVDASAAAAAARDAKKKRGNRSSAKLKQCKLDARREQWLSQVKDGKEAKASTSPTGTEPNAGSMTVPSPHPPLPRRRLDVRSKGGDPEEDREERGAARQELGSSYLDSPVHSPSSDNSGSVGGMHRKHYNNGGGLNLSSSSSVWSSSRSVSEAEDDDTGGPEEENGVLDDWEAVADADALTVDDCHSHQSSGHVAPPAAPNVCTAPANQTGRQDPIQRTKAWAPDDIFRPQSLPSISRQVSFPASIGNGWMGAAQQANLSTPLTCPICCEDLDLTDSSFCPCPCKFCLCLFCHNKILEADGRCPGCRKEYVAARLSRSCSMGPRY

SEQ ID NO: 35671 - protein, 358 aa, Oryza sativa
MVGDRKRPAPFAGFSPFARSLLFSASSSKPLPLPGDPPAAAADEIPSGIAGSSRDMPPPKRAKRAEPSSDEERYSSDDESYSSDSDDSDDASEELDTVQADFAFYDPKPGDFHGVKLLLKTYLDSKPWDLTGFVDLILEQTTVGTVVKIADDEEDGEGNGADGSSTGGNDDLFGLISVLNLGRYSEHRCMKDLKDYLLAVCGDKDTKKKLKQMLGDKAPDVGLLVCRRFVNFPYELVPKMYESLFDEVSWATEDEPTQELRDSFRFKQYLMVVRVLERKTPAKQKAKNSTEEDEPIIYPKLEDEIFRELSSWSFTFPIRSEQSAQQEMKNYKEMGLVMAVKAEAIPKFRKKLEDLLSE

SEQ ID NO: 35672 - protein, 311 aa, Oryza sativa
MARNEEKAQSMLNRFITMKQEEKRKPRERRPYLASECRDLADAERWRSEILREIGAKVAEIQNEGLGEHRLRDLNDEINKLLRERGHWERRIVELGGRDHSRSSNAPLMTDLDGNIVAIPNPSGRGPGYRYFGAAKKLPGVRELFDKPPEVRKRRTRYEIHKRINAGYYGYYDDEDGMLERLEAVAEKRMRNEVITEWHRVERVRREAMKGVVSGEVASAGGRGGEAAREVLFEEVEEEVEEERRLEEEKREREKGEEAGKEFIAHVPLPDEKEIERMVLERKKKELLSKYTSDALQVEQEEAKEMLNVRR

SEQ ID NO: 35673 - protein, 214 aa, Oryza sativa
MTEGTKRIFDELTEAAMKLMENGEYNVYSDDRETFEREAAGYERLARARLGLPEAEEDMFADSPKDKTTASLLDMEPGPSAAHTSTTTTTSKEDDSDFDMFGDDDDKTDVKRDSDANAVGSGSNPEQVSHDANETSGAEKGENGSVSSDYVYDPTSGYYYSSSTGYYYDSTSGCYCSASTGAWYSYDEQTGEYKEIQSEQASTVNETPGDGIKE

SEQ ID NO: 35674 - protein, 733 aa, Oryza sativa
MRPTSRILAAGHLLRGSRSRYDPSPVAAAAPIFRRPPTVPRPLPSPLLGGFGPNCWVYPGDGKYAPFGRLSCFMSDSTYPPPPRDVRGHAFSTSANAVAVGKSSDDKVKKDISKKDVDDQIADTQILKNLGKYLLLNDSPDIRFRLILSLGLLVGAKVINVQVPFLFKLAVDWLAALAGAETSLASFTEANATLLALFASPAAVLIGYGIARSGVSACTELRNAVFSKVTLRAIRSVSSTVFSHLHELDLRYHLSRQTGALNRIIDRGSRAINYILTVMVFNVVPTILEIGMVSSILAYKFGSTFAWITSVSVATYIAFTLAVTQWRTKFRTAMNKADNASSTVAVDSLLNYETVKYFNNEQFEVEKYDKYLKKYEDAALKTQSSLAYLNFGQNIIFSSALSTAMVLSSYGVMSGALTVGDLVMVNGLLFQLSLPLNFLGSVYRESRQSLIDMKSMFQLLEEKPGIKDEPHAQPLQFKGGRIEFENVHFGYVPERKILKGATFTVPAGKSVAIVGTSGSGKSTILRLLFRFFDSSSGSIRIDGQDIREVTLDSLRKCIGVVPQDTVLFNDTIKHNIQYGRLSATDEEVYDVARRAAIHDTIMNFPDKYNTVVGERGLKLSGGEKQRVSIARVFLKEPSILLCDEATSALDSTTEASILNSLKTLSVDRTSIFIAHRLTTAMQCDEIIVLENGEVVEQGPHDFLLSKGGRYAELWSQQNNSDAIDAAAVSLEVS

SEQ ID NO: 35675 - protein, 467 aa, Oryza sativa
MKPPVAMDSAGGNSGKLFDEMPPRSSGRGCPRSPSPAAMEHGFDRHCVVLGGMPKKRSRLELGAGVSLWAGLQPDILGIVLHFLPCLADRARMRSVCRHWRASANGHVLPPPLPLLMLPGFKLSSLSDKGDLMPVRCVPVPKEVAADDLRCVGYFDGWLVGVTPNKDRSDEYNRDADGDCFLVNVFSRKVIRLPQLCHMRYNFPAYSSKTLRIINGSGEVYFRVNDIYTMSLCNVALSASPDSRGKYIVAASSDHKCASKLALWQPGMISWHICAGVDIDGPRDLTFYLGKLYVLQRYKIRLFAFEVGEDNGGLMVSRVKRCLSALPLHHPYQGGGAISCNMVVWRGELLLIIRHYSDNYRDREVLKVEVFALDVNTNPYGLTEIHSLNGDCIFVGLGGCKSFPAGLHHGVEGDHIYFVPDDWKPYDTFVYSMRDGKMRSFAVKLLASDFDVDQLSRDFPVWLLPTE

SEQ ID NO: 35676 - protein, 343 aa, Oryza sativa
MEHVQIPRVKLGTQGLEVSKLGFGCMGLTGVYNAPVAEEDGVAVVRRAFEAGVTFFDTSDAYGPHTNEVLLGKALKQLPREKVQVATKFGIAGFDANGMLVKGTPDYVRACCEASLERLAVDYIDLYYQHRIDQSVPIEETMGELKKLVEEGKVKFVGLSEASADTIRRAHAVYPITAVQMEWSLWTRDIEEEIIPLCRELGIGIVPYSPIGRGFFAGRAAVQSIPSESWLTRHPRYNGENLEKNKVFYTRIEELATKYGCSPAQLALSWVLHQGDDVVPIPGTTKVKNLDDNIGAVKVKLSKEDLKEISAAVPAGEVAGSRLIGVLEPYSWRVANTPPPKSL

SEQ ID NO: 35677 - protein, 322 aa, Oryza sativa
MDAAALDDLIRRLLDARGGRTARPAQLADAEIRKLCAAAKDVFLSQPNLLELEAPIKICGDIHGQYSDLLRLFEYGGFPPEANYLFLGDYVDRGKQSIETICLLLAYKIKYPENFFLLRGNHECASINRIYGFFDECKRRFNVRIWKVFTDCFNCLPVAALIDDKILCMHGGLSPDLKNMDQIRNIARPVDVPDHGLLCDLLWSDPDKEIEGWGENDRGVSYTFGADKVAEFLQTHDLDLICRAHQVVEDGYEFFAKRQLVTIFSAPNYCGEFDNAGAMMSIDDSLTCSFQILKPSDKKGKAGTGNMSKPGTPPRKIKINII

SEQ ID NO: 35678 - protein, 325 aa, Oryza sativa
MGGSKAEEKPAGGGGGGEDWWCYQFGNKDALIVKSSKKSPLALRMVVFAMTMICGIFICTMCMKQLGSDSLSRIVKIEVAEQLCNKSAILHSEVHFVHYPQPITYSRSECKCTPVRFFAIISSQRSGSGWFETLLNSHMNVSSNGEIFSSKERRSNISSITKTLDKVYNLDWNSSASKNECTAAVGLKWMLNQGLVANHADIADYFNRRGVSAIFLFRWNLLRQLVSQLANNHDRYLKQLNGTHKAHVHTAYEASILARYKPRLNTTSLIRSLKQVDDYTRDALENLKSINHITIYYEDLIRNRTKLLDVLDFLKVPRSKLVADT

SEQ ID NO: 35679 - protein, 111 aa, Oryza sativa
MKIEKTNAGFLTNFEVLDFLRSRGAKTDPMGCLGAVAASECKVYEYLLKTPACNQTRESINEFVTRCESFKLTNADKLNVINWRPSSAADAYAQNEGILRAIIQIWGQDCK

SEQ ID NO: 35680 - protein, 458 aa, Oryza sativa
MAAAARRLLLLAIAVAAVSLAPRAAAEIRTEAFREDPRPTILFEKFGFSKTGAVRIVITGAGISSTFARPDPKQLGFFLLSDESMFQAIYEAQARRPPERREEVAGGGADEPDISRCILTSPYVKTLFTFHDLKRGHYNKTFPVTHPDEYSLYFANCAPESLVTMRVRTEMYNGNADGSVDYLPVGQAPVPAIYGFFAACYAAFLAAWGYLTLSSRDHRAAAHQIHHLMSGLLAARLLYCLSAAEDQHYIRVTGTPHGWDVAFYLFQLVKGVVLFAVIVLVGTGWSFLRPVLQDREKKVLMVVIPLQVMANIASAVIGETGPFLQGWVTWNQILLFVDVACCCAVLFPVVWSMRSLRETSKTDGKAARTLSKLTLFRQFYIVVIGYLYFTRIVVYALKTIASYQFRWVSVLAEEVATLAFYLFMFYTFRPAERSRYFSFDEDEEEAAEMVLREEEFEL

SEQ ID NO: 35681 - protein, 525 aa, Oryza sativa
MMSSRLLKRACLLLLVSSWLCSLSDAKRKTPPSPPPPPSSFGLPVRAVCLGGWLVTEGWILPSLFDAIPNKDLLDGAQLQLKAVAAGAYLTAADQGGAAAVVANRTQAAPSASETFKLWRINETTFNFRASSGRFVGAGSDGGAAVVAVAAAPGPSETFQVVRDDGDKSRVRIRAPNGHFLQIALGSNSVTADYYGESTSWGDDDPSVFVVTKVLELQGEYQICNGYGTAKATPILRNHWSTYIVEDDFKFISASGLTAVRIPVGWWIASDPNPPAPYVGGSLQTLDNAFKWAEKYKLGVIIDLHAAPGSQNPWEHSSSRDGTQEWGTSDANIAETVQVIDFLASRYAKSPSLLAVELMNEPFAPRATLESLMKYYHDGYNAVRKYSSTAYVIMSNRLGPHDPTEFLQFANGFPRAVIDVHYHTVFNDLFNNLTVQQNIDFIKSNFSSELKNVTTQNGPLTFVGEWVAEWRVPNATKEEYQRYAKVQMDVYGQATFGWSYWTLKNVNNHWNLEWMINNGYISLKT

SEQ ID NO: 35682 - protein, 408 aa, Oryza sativa
MLAMGSEEWELYPSSFIGAQVIDYGHVSGDMDDDQSGDLAVSMDAVLPDDLLEKVLSFLPVASVIRSGSVCKRWHEIVHARRQTWSKMVPQKPWYFMFTCSEEAVSGFTYDPSLRKWYGFDFPCIEKTTWSISSSSGLVCLMDSEDRSRIIVCNPITKDWKRLVDAPGGKSADYSALAISVTRTSHQYMVAVARCNQVPSEYYQWEFTIHLYESEMNTWVSPFTELLIGWRGGDECVICDGVLYYLVYSTGVLVNNNEHRHCLLMYDLSTRPTHTSLMSMAIPVPCPLTCGRLMNLNERLVLVGGIGKQDRPGIIKGIGIWELRNKEWYEVARMPHKFFQGFGEFDDVFASCGADDLIYIQSYGSPALLTFELNQKLWKWSLKSPVTKRFPLQLFTGFSFEPRLDIAS

SEQ ID NO: 35683 - protein, 497 aa, Oryza sativa
MSSAGHAVDQQRKSTTMKAHFVLVPMMAQGHMIPMTGMARLLAEHGAQVSFVTTPVNAARMAGFVTAVEAAGLAVQLVKLPFPATEFGLPDGCENLDMIQSRDLSRNFMEACGALREPLTARLRQLCPPPSCIISDMVQWWTGEIARELGIPRLTFDGFCTFASLARYIIFRDKLLDNVADEEIVTFSGFPMLLELPKARCPGSLCVPGMEQIRDKMYEEELQSDGNVMNSFQELETLYIESFEQITGKKVWTIGPMCLCDRDSNMMAARGNKASVDEAKCLQWLDSKKPGSVIFVSFGSLASTAPQQLVELGLGLEASKEPFIWVIKAGNKFPEVEEWLADGFEERVKDRGMIIRGWAPQVMILWHQAIGGFMTHCGWNSTIEGICAGVPMITWPHFAEQFLNEKFVVNLLKIGLEIGVKGVAQWGSEHKEVRVTRNAVETAVSTLMNDGEAAQEMRMRAKDLGVKARRALEEGGSSYDNISLLIQEMGNKQNASG

SEQ ID NO: 35684 - protein, 225 aa, Oryza sativa
MQRTNSERNSELQLDSSTDSATLREANNRDLLERRSAFLERRRIRSQVRALQRLGSRYENLSGLSGHERSCILSGQHRTGNCNCRTSSRPGNSDEETNTRASISRIVMLAEALFEVLDEIHQQSAALSSRPSFSSIGSVPAPKEVVERLPVKVYRRSLKHQTEEAAQCYICLVEYAEGDCVRILPCNHEFHLTCVDKWLKEIHRVCPLCRGDVCRSNASGIGKTT

SEQ ID NO: 35685 - protein, 119 aa, Oryza sativa
MIRYSVGMDSGIHGATRTESRTLYVEGLPSNCTKREVAHIFRPFSGFREVRLVNKESRHAGSCNLLCFVDFSSPPEARAALETLQGYKFDEHDHESSNLRTQFSLTPRRRSIGGPCVRN

SEQ ID NO: 35686 - protein, 591 aa, Oryza sativa
MHMEIGRRIYRERLETRDRDADMEQRRAFQKLIYVSNLVFGDASTFLLPWKRLFGVTDSQIDIAMRENAKILYASQLKSIGRGLDIGTLIEVRRAQLAYKLSDEIAAEMFKEHAKKLAQENISSALDIVKSRTKAANSPTQVIEDVKSILAFNSLLITLSKHPDQDRFIRGLGPISLGGESDHDRRADDLKLLYRAYATEVLSDGHLDDEKLAPLNQLRNIFGLGKREAESIMSDVKAQVYRKRLAKSFNSELAAAPSKAAFLQNICEELQFDPELASKMHEDIYRQKLQQFVADGELNKDEVEALMAFQVRLCIPQETVDAVHSEICGKLFEKVVVEAISSVDGYDTNRRQAVKKAAQGLNLKNESVMAIFSKVVRKLFLNYIQRAKAAGNRIETAKELKKMISFNTVVVSELLADIKGEPTTAEPQTSDATSEPEVSESEGDDEYEWEQLETLRKTRPDKELREKLAKSSQKEITLKDDIPLRDRAELYETYLVFCVTGETTNVSFGTAISTKKDNSEYLMLKQLGDILGLTRKEAQNVHIKMAEKAFVQQAEVILADGKLTEAKADQLAKIQKQVGLPTEYALYILMS

SEQ ID NO: 35687 - protein, 412 aa, Oryza sativa
MEVDHADRDGARRRCREYLLALEEERRKIQVFQRELPLCFDLVTQTIEGMRSQMDAAGSEETVSDQGPPPVLEEFIPLKPSLSLSSSEEESTHADAAKSGKKEEAETSERHSSPPPPPPEAKKVTPDWLQSVQLWSQEEPQQPSSPSPTPTKDLPCKPVALNARKAGGAFQPFEKEKRAELPASSTTAAASSTVVGDSGDKPTDDDTEKHMETDKDNDKDAKDKDKEGQSQPHRKPRRCWAPELHRRFLQALQQLGGSHVATPKQIRELMKVDGLTNDEVKSHLQKYRLHTRRPSSTGQSSAAAGVPAPPAPQFVVVGSIWVPPPEYAAAAAAQQHVQLAAAGNNASGSANPVYAPVAMLPAGLQPHSHRKQHQQQQQGQRHSGSEGRRSGDAGDGSSSSPAVSSSSQTTSA

SEQ ID NO: 35688 - protein, 290 aa, Oryza sativa
MGLVHALLPFAAAAALLLLAAPPPATADDPGLAVYWGRHKEEGSLREACDTGRYTTVIITFYNAFGHGRYSLDISGHPLAAVGADIKHCQSRGITVLLSIGGQGGAYSLPTNASAADVADNLWNAYLGGHRAGVARPFGDDAAVDGIDFFIDQGGADHYDDLARRLDGYNKYYRGRVGVLLTATTRCSYPDHRLEKALATGVFARIHVRMFGDEQCTMSPRYSWEKWAAAFPGSKVYIGLVASPEQDSAWMFQKDLYYEMLQFVRSLPNYGGLAIYDRYFDKKANYTGEG

SEQ ID NO: 35689 - protein, 177 aa, Oryza sativa
MAGSSEPTRVMVAVNESSIKGYPHPSISCRAAFDWMLSKLVRSNAAGFHLLFLHVQVPDEDGFDDMDSIYASPPDFQRMKQRDKIRGLHLLEHFVNQCHQLEIKCEAWIKQGDPKEVICSEVKRVQPDLLVVGSRGLGPFQRVFVGTVSEFCVKHADCPVITIKRKADEAPQDPVDD

SEQ ID NO: 35690 - protein, 371 aa, Oryza sativa
MPRRGGAAKKPAGGGELSRFLQSHLQTINDTFQMMAEAAPGGLERTEWSEVVKLGEQVSRQATVAGMVWSGDLPDVETLKENIVAYFNILQGFLLGCHGSTVGAGPTLHKSICSSAKNDVDSSFSLFNRAVSAYESRSPDRKTTIPQVTGTVWEACLALNKVPTTNCVAIGRAMTQIGVYLKDILREMKELPIGDSNGTAEKSSNGAVDTTSCSDRDGSSSDLELDEDFTEEEVAVAKLVVTVASDALVVVKETIRFITCLLKISGNRSGANEEKVETMEQLLSCCRQAADQINDLGASVYPPQDLSEMKSSVKRLYGGANAMRREIRSLGGSPEGAFVALERFEKSLGALEVEIADDVANEMENLTISSS

SEQ ID NO: 35691 - protein, 510 aa, Oryza sativa
MAFTNMPLYVKHNKSTSGRQYNQLSNFPPSLFLNDNGLNGTIWPEFGNLKELHVLDLSNNAISGSIPDVLSRMENLEVLDLSSNNLSGSIPSSLTDLTFLSKFSVAHNHLVGPVPNGGQFFTFSNSGFEGNPGLCRSSSCDQNQPGETPTDNDIQRSGRNRKNKILGVAICIGLVLVVLLAVILVNISKREVSIIDDEEINGSCHDSYDYWKPVLFFQDSAKELTVSDLIKSTNNFDQANIIGCGGFGLVYKAYLPDGTKAAAKRLSGDCGQMEREFRAEVEALSQAQHKNLVSLRGYCRYGNDRLLIYSYMENNSLDYWLHERSDGGYMLKWESRLKIAQGSARGLAYLHKDCEPNIIHRDVKSSNILLNENFEAHLADFGLARLIQPYDTHVTTDLVGTLGYIPPEYSQSVIATPKGDVYSFGVVLLELPTGRRPMDVSKAKGSRDLVSYVLQMKSEKKEEQIFDTLIWSKTHEKQLFSVLEAACRCISTDPRQRPSIEQVVAWLDSV

SEQ ID NO: 35692 - protein, 349 aa, Oryza sativa
MVMVKLNAAVAAAAVVLSLLVVVAVHPAAADAGGDWYGKKSIEETVRKEVEKAIKHNPGVGAALVRLVFHDCWVNGCDGSVLLDKTPYSSSTEKAAANNIGLDGFDVIDAIKSKLGAAVSCADIVVLAGRDASAILSGGRITYDVGTGRKDGVVSSAAAADAVLPESTFDFAQLKDNFASKGLTQGELVILSGAHSIGVAHLSSFHDRLAAATATPIDATYASALAADVERQKGVQRTDNPAEKNNIRDMGAAFQSAAGYDAAGVDTAAVGALDNSYYHNNLQNRVLFKSDWVLRTDGDAAADLAEYRDNATKWDVDFASAMAKLSKLPAEGTHFEIRKTCRCTNQNYY

SEQ ID NO: 35693 - protein, 553 aa, Oryza sativa
MYYGDDWEGLFESITGYGLGGSSMALFGRVGGGIYTKAADVGADLVGKVERNIPEDDPRNPAVIADNVGDNVGDIAGMGSDLFGSYAESSCAALVVASISSFGINHDFTGMCYPLLVSSMGIIVCLITTLFATDFFEIKAVKEIEPSLKKQLIISTALMTVGIALVSWLALPYKFTIFNFGEQKEVTNWGLFLCVSIGLWAGLIIGYVTEYYTSNAYSPVQDVADACRTGAATNVIFGLALGYKSVIIPIFAIALGIYVSFTIAAMYGIAVAALGMLSTIATGLSIDAYGPISDNAGGIAEMAGMSHRIRERTDALDAAGNTTAAIGKGFAIGSAALVSLALFGAFVSRAGVKVVDVLSPKVIIGLIVGAMLPYWFSAMTMKSVGSAALKMVEEVRRQFNTIPGLMEGTGKPDYANCVKISTDASIKQMIPPGALVMLTPLIVGTLFGVQTLSGVLAGALVSGVQVAISASNTGGAWDNAKKYIEAGASEHARSLGPKGSDCHKAAVIGDTIGDPLKDTSGPSLNILIKLTAVESLVFAPFFATHGGILFKLF

SEQ ID NO: 35694 - protein, 394 aa, Oryza sativa
MAGFMSRGPPNGSVYVCNLPPGTDETMLAEYFGTIGLLKKDKRTGRPKIWIYRDKVTNEPKGDATVTYEDPHAASAAVEWFNNKDFHGSTIQVHIAESKNKDMNDSSATASLNNSAELGGQDELDNGEGRGRGRGDGPGKAWQQDGDWLCPNTSCGNVNFAFRGVCNLCGAARPAGVSGSSAGGGGRGRGRGSDDARGGSRAAAAAAVGGPPGLFGPNDWPCPMCGNINWAKRMKCNICNTTKPGHNEGGVRGGRGGGYKELDEEELEEVKRRRKEAEEDDGEMYDEFGNLKKKFRAKTQQTENAPTLPGSGRAGWEVEQRGSTGREGKERSRDQGRDHDYDERDSRNRDRGSHGRERRRSRDREKERGRDTGRDHSYERSWERGTERDHDRYR

SEQ ID NO: 35695 - protein, 376 aa, Oryza sativa
MPQAQPNSSPSPPPHTHTHAHHSSPHNPSTPTPPPPPGSPRDGAGEHPSTSAMTMPFAVSDPSASVEEMVAAAAADDECVCVWLEEQYEKVEKIGEGTYGVVYKGKHRHTNETIALKKIRLEQEDEGVPSTAIREISLLKEMQHRNIVRLQDVVHKEKCIYLVFEYLDLDLKKHMDSSPDFKNHRIVKSFLYQILRGIAYCHSHRVLHRDLKPQNLLIDRRTNSLKLADFGLARAFGIPVRTFTHEVVTLWYRAPEILLGARHYSTPVDMWSVGCIFAEMVNQKPLFPGDSEIDELFKIFSIMGTPNEETWPGVASLPDYISTFPKWPSVDLATVVPTLDSSGLDLLSKMLRLDPSKRINARAALEHEYFKDLEVA

SEQ ID NO: 35696 - protein, 135 aa, Oryza sativa
MAKEFPVPPVVFTPSTPTHRRHPPPGTGPSPPPAFAPPRPSTSSGANPLPFMSFDVGNAATSSSPPLFAGPIGVGGSGASFEDEPPLLEELGINTRQIWRKTLSILHPLRSADPSLHADADLSGPFLFLLSFGLF

SEQ ID NO: 35697 - protein, 366 aa, Oryza sativa
MAAAAEEPEPKPEIETPPPAREPPTEPPAAAPAPAAAASDRPLQPWEQHAAVINLPRYDYRASGSLLLRSHSGFLITCPIKREKSATKEAISILENSIGHANSYSSEMSEPSDTEVSAKKRKICSETPDIENSGDAVTYEKGDASETTGSVEKDSVSPHSKTSKNVDDTSNLSLVKLSRSGLLFFSFPSGGLRVVQMLTQMFHSLHSGKLKSPQWCHRIFPIQETCVLSEAELHTTVSKLFLDFVKSKEDQDEPIKFAVGYNRRGIDETEMKGQKNGNEGSKQQTLMDRDQCFKVVAGAVKSVAENSIVDLRSPEVAVLVEMLPISGVSLGSSVAGVSVLPSELISTKPRLCVKALVPDAKAAKKK

SEQ ID NO: 35698 - protein, 130 aa, Oryza sativa
MAAPRTPLPLVLLLVSAALLAAAPLSPAAETGAAAFDVRRHLSTVTRYDVARGSNSVSSAPSMSDECRVIHLNLVARHGTRAPTKKRIKELDRLAVRLKALIDEAKQGPESDSLKKNSFMDERVGVTLER

SEQ ID NO: 35699 - protein, 782 aa, Oryza sativa
MDAEMAAPALAAAHLLDSPMRPQVSRYYSKKRGSSHSRNGKDDANHDESKNQSPGLPLSRQSLSSSATHTYHTGGFYEIDHEKLPPKSPIHLKSIRVVKVSGYTSLDVTVSFPSLLALRSFFSSSPRSCTGPELDERFVMSSNHAARILRRRVAEEELAGDVMHQDSFWLVKPCPYDFSASSPHDVLTPSPPPATAQAKAPAASSCLLDTLKCDGAGWGVRRRVRYIGRHHDASKEASAASLDGYNTEVSVQEEQQQRLRLRLRLRQRREQEDNKSTSNGKRKREEAESSMDKSRAARKKKAKTYKSPKKVEKRRVVEAKDGDPRRGKDRWSAERYAAAERSLLDIMRSHGACFGAPVMRQALREEARKHIGDTGLLDHLLKHMAGRVPEGSADRFRRRHNADGAMEYWLEPAELAEVRRLAGVSDPYWVPPPGWKPGDDVSAVAGDLLVKKKVEELAEEVDGVKRHIEQLSSNLVQLEKETKSEAERSYSSRKEKYQKLMKANEKLEKQVLSMKDKYKLVLEKNDKLEEQMASLSSSFLSLKEQLLLPRNGDNLNMERERVEVTLGKQEGLVPGEPLYVDGGDRISQQADATVVQVGEKRTARKSSFRICKPQGTFMWPHMASGTSMAISGGGSSSCPVASGPEQLPRSSSCPSIGPGGLPPSSRAPAEVVVASPLDEHVAFRGGFNTPPSASSTNAAAAAKLPPLPSPTSPLQTRALFAAGFTVPALHNFSGLTLRHVDSSSPSSAPCGAREKMVTLFDGDCRGISVVGTELALATPSYC

SEQ ID NO: 35700 - protein, 42 aa, Oryza sativa
MSGRRRRRSISFSIAPLSISSHLRLCLPPTTPFCPFPPSLPL

SEQ ID NO: 35701 - protein, 453 aa, Oryza sativa
MIRDAMHQSVVYKEQLRMNQAATSTLMARLEAQRAMCDSSETELRRKYQQKDELEKQIKPFTDQARKRYRVDDDGLLEERHSLEERHSERVKYFPGIRLRSRNPLKQELRVFLEEDQRASDAYISLEEEEIAGETSTMGNFRNSPFKVINFPRRSMEDNTVDTERGRASVREKLEHLAIKERQRGRRRERTMSSRGSRATSTPVRSRDGNGKSKAAMVQCESETERSQTVSVPRTSSVPPSPPYRVTGMYGTPRYPAEKSVLLKKNNVIHRQGVGRSEGDANMNHTGKGTVDKWLQMLMEDQQQQEDPAAAYHSSEDHNTADEIASDEHQMQSRIDDESCRNEITECSDEIVEVGGDGATEQQDRCRNSFEIKERGEEKKIWFPRSDSSRGFRSLPSSPSKILGMRRGVECMSRKPKVVGDDNGRYGYEDSVSTSSSKFLTRCKQAIKKAVNK

SEQ ID NO: 35702 - protein, 93 aa, Oryza sativa
MMHRWDLTVSNKVNLEPEALVYIWLCCHTIVLHCRTDPPFPYGAPPGCCGFQSRSPCLALRAAKLSLSRMSPARHRCTRRYRNWWRGRGRPGS

SEQ ID NO: 35703 - protein, 150 aa, Oryza sativa
MDQKLWLANWHIEQEHNLRRDRVRSWLSDDFLKSLQHQFACSRPIIIAKISELEVWRCSYSGWKFIWSRLVNVGTHVHTSYRHRGHCRKKREVDFRTDRLSRAQMPSSVLLRSPSNRASLDPLDGGGRQAVGDGSAPPAECVGAVCSFRV

SEQ ID NO: 35704 - protein, 620 aa, Oryza sativa
MALLLPEFDPADVRAGRDLIHRLTADAAGIQRGVLREILSRNSGTEYLRRFLGGAAGDDDDVRDAFKRRVPVSGYEDVKPYVDRVASGGEPSSALLCSDPITCLSRSSGTSGGQQKLLPSTAEELDRKVFFYAVQALVRNMSLHTDHGEDDDGGGGEGMYLMFAFHGDRTLSGLPIQSALTTYYHSRQFQECDIGGFDKCTSPLEAILCPYGEQSMYCQLLCGLLHRCRVDRVGASFAAGLVRGIKFLENHWEEMCFNIRSGQLSDWITHTPLRDAVTGQYLQGSNPALADEIASECARKPWDGIVRRLWPRARYIRTIVTGSMSQYIPILEVYGGGLPLVSPIYASTECAAGINLRPLDPPSHVSYALLPNIAYFEFLEVMDENGEKVQGTTRLDDNLGEVKVVDLVDVKVGRCYELIVTTFAGLYRYRVGDLFTVSGFYNATPLFHFSGRHDVILSIDYEKISEEDLLNAIAETDKFHLRPLGYMLVGSTAYADISTLPGHYILFWELTNTCDSNVAIDIDQTAMEKCCLAVEDHFDEMYRKIRHRGSISALEIRILSHGAFDALMDFFVSRGTSASQYKTPTAIRSKEAMMVLEERVVGRFFSQATPSCRSAEFERR

SEQ ID NO: 35705 - protein, 272 aa, Oryza sativa
MKLQEIIKDLQRRLDNDSNEKKMLEERAIEFEQVRKELEGSRTEVAELQATINNLKADLGRALEEKSQLESRINDLEHTIACNLEEFSQEKSSLGAEIQKLKEANASLEGKLTSTESQLQQLHAEKSEASISSEKQISDLNQAIADLETKLELLSSEKTTVDNKVASLLTDVTARDEKIREMDSHLHQLRLEHVKLIAEADAVTKAVSELRARVSELEEEVEEQKLMVSDGAEGKREAIRQLCFSLEHYRHGYQQLRQLLQGHHRRPLVMAN

SEQ ID NO: 35706 - protein, 748 aa, Oryza sativa
MYSPVLHGDVKPANILLDENHSPKISDFGIARLLCANGAQHTKNIIGSIGYVDPAFCENGILTPKSDVYSFGVVLLEIITRKKAVDGTITLAQSFTDAIEKGKKVMNLFDEEINDKQNMNFLEDIGKLAVKCLRRDVKVRPEMVEVATSLRMIRKDLEGEQGNLTQQHTSTPNNSTPSKNEGSAGRQFGNLNIFKQEEIKHMTRNYSMTFREEFHERLYNGVLGMVHAVIVKQVSTSSKTDREVFLKTMGKLCQKYHKNVANVAGFHLGEYISECVYESCCELSQVNNGHISFSNRNLYEIICSTEKLPLHVRLSIAVQCLEGLVHIHSFLAENPESRGTSLFGNFRSANIFLDKNFMPKVFNANLSTFLGLCAVQQCTASVDCIHDQRSQKYYLDPKDVSDHLFNPKSDVYSFGVVLLELITWKTAKYKSGGQAHMLTTDFLDTYRIDHSATDFFVKKVYDEEGKCFLHEAIAIGVECLKLDVQMRPEMSDVLSRLRIISAAQSIRSKLMGPQAKDCGDNGPSQYIAPTPVNNDVKIPSPPTSASTISLDILKKITRNFSNNSLIGEGSHAKVFFGVLKDGKNSAVKKLNPNEETIVQVSTISRMLKHDNVVQIHEYFIEGENHVLVYEYAPKGSLHDILHGREGVTGAQARPPLSWVQRVKIAITAAKGLEFLHEKAVPPVIHTNIKSSNILLFGNDVAKIGDLGVSKQLHVEDYDYSYTRVVPQIFRYEAPEYATQCFHAFRLLH

SEQ ID NO: 35707 - protein, 235 aa, Oryza sativa
MAAAANGGGAALFSEEELRDVSGVRRCEDFVEVTCGCTSHRYGDAVGRLRVYASGDLEVSCECTPGCREDKLTPSAFEKHSGRQTAGKWRNTVWVMVQGEKVPLSKTALLKYYSLSHKSANGSNKGRNGRLSHRDEFIHCTECGKERRFRLRSKEECRIYHDALAKPNWTCADLTTDRVTCGDEEERASRKVLRGCSRSTSCTGCVKCVCFGCEVCRFTDCGCQTCVDFYHNSKE

SEQ ID NO: 35708 - protein, 370 aa, Oryza sativa
MPSSTPPSVQPAPTVQPLPSSTAGQSTRIDLREIKSNIIKRIGPGRAKKYFQHLERFLSSKLNKNEFDKLCLVTLGRENLPLHNHLIRSILHNACRANGPPAIDAPKLAGDVSKSEQILHPVWNNGNVSIQHVKDNRSLTIEQEGAPIIRENGAPNFSDLKRCQQVQNSEHAEPRNKRLHYEKEPPSFLEPSHSNGPSAISYGENSGGENIHRIQGPVRAPLGIQFSPVNFGGIQKSSAIASVPPNDSSVSCYELGELCDTMLLSKRMEKVAEAAGLEGVSVECANLLNNGVDVFLKQLIGSCVQLVGTRSQLGKLSHASLKQQLSRKLINGVSLKNHVHGQGIIIPTGPNSTPNKLRSHNTEFSVSGLQ

SEQ ID NO: 35709 - protein, 331 aa, Oryza sativa
MAPIVRPSKSGSNSDSDSHAHHPPPEPPQESSDGEDLELESSEELDSHGAPTKKAPFVAPPPPPPPPPPPQQNGKEVSDSPSLPTNSAIVLSPLPPPLQANKNHQDQDSESDSDSDDDEPPLPTNNAIVLAPPNNQESESDSDSDDDQESALKANKIVSLSGDDDQESDSSDDEALPALQANKNASPSDDDEDDDQESDSGDDDVLLDPALQANKNVLAFNGKRKVPPQEVGQSLRQPKKKKMEAPAQGNTDIDTQFKEKIASYFFLGKVVSLLDEEHPDLFKEAFLKLADSKASALDAKIKQLTLAQVRVSLKGRDLEKELIKLLSGFLK

SEQ ID NO: 35710 - protein, 427 aa, Oryza sativa
MAQDDAPDSTTSSSSASSASAPAPSAARLNAAAPEFTPRSAAHHHHHHANPRRQHRGGGGGAYHHHQQHYQPHHHHQHHQHWQHYGEDEGDAAAAGAVGEGGIPEDVARRVVKQVEFYFSDVNLATTEHLMEFMIRDPEGFVPMSVVASFRKIRELVSERSALAAVLRTSAELVVSDDGKRVRRRVLFTEADAEEVQSRIVVAENLREEHRYPNLMKIFSAFGSVKSIRTCYPQGGIDGAGTSTGKASKIEMLFANKVHAFVEYETVEDAEKAVSEFSSGRSWRDGIRVRSLLGCLKQAMGQGRRGGDEVDAADEDDPETTDHPQDYETEDASQISEAHLDHQADDGYHDKGGMRHGRGRGRGGRGRGRGQYYGHSRDANHPIGTPPSNHSALADHLSKPPPGPRMPDGTRGFTMGRGKPLNPTNAV

SEQ ID NO: 35711 - protein, 335 aa, Oryza sativa
MVDCLVFPQRGERPHPNECSGGDLDGDLYFITWDDKLIPEKVDTPMDYTATRPRIMDHVVTLEEIQKHFVDYMINDSLGAISTAHLIHADRSPLKARSPECLQLATLHSMAVDFAKTGAPAEMPRTLRPREYPDFMERWEKPMYISNGVLGKLYRSAMGHMEKSGDSGALSSSSAQPSPTYDPDLEVPGSDGFLQAAEEYYELYEEKLTTLMNYYRAELEDEILTGNIRNKMLYLKRDNKRYFEMKDRIVVAVDALHREARGWLLSSRKEEDASRMASAWYRVTYHPDRRRGKRFWSFPWIACDNLLAIKASSQLRRRRQKDDDSTAVVQMDCSA

SEQ ID NO: 35712 - protein, 390 aa, Oryza sativa
MAHQKREATSDNGGGDEEWASKRPKVVGAAAEKEHILTSDASHETNGDEAQGGDASRKENTVSTNPCVSDEKAATNSNVSSGHGVILTSVEADAAEDKGCRHTMEDAWVLLPDASMESPGNLRCAHFAICDGHGGRLAAEYAQKHLHQNVIAAGLPRELMDVKAAKKAIIEGFRRTDECLLQESTKGNWQDGATAVCVWVLGQTVVVANAGDAKAVLARSTSADGEGAVDDAKSQLKAIVLTREHKAIFPQERARIQKAGGSVGPNGRLQGRIEVSRALGDRQFKKVGLIATPDVHSFEVTRKDHFIILGCDGLWGVFGPGDAVEFVQNQLKETSSATLAVRRLVKEAVRERRCKDNCTAVLIVFKHQNSFHPLRPFSFFHQAELGKRII

SEQ ID NO: 35713 - protein, 955 aa, Oryza sativa
MIGSPVDVDYRRNMCAHARILALEEAIDTEWVYMWDKFGGYLLLLLGLTAKAEQIQDEVRLRLFLDSIGLSDLSAKEIKKWMPEDRRHFELIQESYIREKEMEEEVLMQRREEEGKGRERRKALLEREERKWKELEISLLSSIPNAGSRDAAAMAAAVRAVGGDSALEDSFARDRVSSIARHIRKAQLARRAEQTGIPDTVCILDDEPRSTGRHCGEIDLCLCESKKVSFSIAVMVQPVSGPVCLFGTEFQKKVCWEILVAGSEQGMEAGQVGLRLVTKGERMTTVAKEWNIGASSIADGRWHLVTVTIDADLGEATSFIDGVYDGYQNALPLPRNNGIWEPGTDIWVGARPPTDLDAFGRSDSEGSDSKMQIMDAFLWGRCLTEDEVAMLHTAICSAEYGLFDLAAEDAWHGSYSARVDDWESEEANFELYDQEDVEWDGQYSSGRKRHARDSVAIDIDSFARRPRKPRFETREEVNQRMLSVERAVREALIAKGERNFTDQEFPPDDRSLFVDPMNPSLKLQVVSEWMRPSDIAKEVSISSQPCLFSGSVNSSDVCQGRLGDCWFLSAVAVLTEMARISEVIITPEYNEEGIYTVRFCIQGEWVAVVVDDWIPCESPGKPAFATSRKQNELWVSILEKAYAKLHGSYEALEGGLVQDALVDLTGGAGEEIDMRSPQAQIDLASGRLWSQLLHFKQEGFLLGAGSPSGSDAHISSSGIVQGHAYSILQVREVDGHKLVQIRNPWANEVEWNGPWSDSSQEWTERMKHKLKHVPQSKNGVFWMSWQDFQIHFRSIYVCRVYPPEMRYSVHGQWRGYSAGGCQDYDSWHQNPQYRLRVTGRDALYPVHVFITLTQGVGFSRKTNGFRNYQSSHDSSMFYIGMRILKTRGCRAAYNIYMHESVGGTDYVNSREISCELVLEPYPKGYTIAPTTIHPGEEAPFVLSVFTKAPIKLEAV

SEQ ID NO: 35714 - protein, 523 aa, Oryza sativa
MLKVLEGLNRYSFHLVSDERNRAFVHGSITDLDDLKVDVSVVPQQEFVSAKLTDKLEQQMHDPLVLRSRCLPLWCTELMSACPFLFSFEARWKYFQLTAFGSLIPQHGNMMDTSGSGVMTERVPSFSRKKFKVDRDNILVSAAKVMQSHARSNAMLEVEYEEEVGTGLGPTMEFYTLISHEFQKSGLGMWRGELSGEAGLDNVHGGSVFVVAPNGLFPKPWSTHVDCSSFSEVNKQFHLLGQVVAKAVKDNRILDIPFSKAFYRLILGQELNIYDIHSFDPELAMTLMEFKALAARRKYLESSSSGDCKSTSDLSYRGCRIEDLAIEFALPGYPEYVLSLENSLDNVSADNLEQYVSFVVDATIRSGIARQLEAFKSGFNEVFPLSMLQVFSEDELERLLCGEQDTWDFAKLVDHIKFDHGYTSSSPPVINLLEVIQEFEGHQRRAFLQFITGSPRLPPGGLAALNPKLTVVRKHNSNEADDDLPSVMTCANYLKLPPYSSKDKMREKLLYAITEGQGSFHLS

SEQ ID NO: 35715 - protein, 210 aa, Oryza sativa
MKEFVGGTAPSSTTSDPLADITNTNGLGFTNRRGKGRAKSLCVVRRNDEECHGSKENCDNSEQNTPIASNVHPIVTPNSQSFADDRDASFSTPSNLPMCTGAHGDVTNLTHAEVARKRARNWYTSLTQEQKDERNKKDHERRKRKKEESQVLKSATNSGVAPLGKLSNVSAADLMTCQLEVNDSSTLKNEVMLPILISHPDVSHLQSSTM

SEQ ID NO: 35716 - protein, 340 aa, Oryza sativa
MASSSSAASGKSRPECINSSNPFHECSDYCLRKIAEAKERIEDEQRPPVDRTVHPDCINASNPYHVCSEYCFKRIADAKSGLERAEQEPPSADAGKSDAAQAEGGGGDDDAEQEDAGSDDGYPQMTEKQKKLFELRLKMNEARKANQQAMVAEKKRMEPRAESRGVSKQKWLEDRKKKIGKLLDSNGLDMTKSYMLDTQESAEAKYKKWEKEPAPYGWDVFNQKTLYDAYKKRTKNIEVDMEAYNKAKEADPEFYRDASSLQYGKVSKVPEENIDRMVNELKERDEKRKAFSRRRKFHEDKDIDSINDRNEHFNKKVERAFGKYTLEIKNNLERGTALPD

SEQ ID NO: 35717 - protein, 70 aa, Oryza sativa
MEFLEIKFSAPLTFCFKCIFPIPMLLMDCILSQAVVLVKKLYVIHEIAWDSNSSRNKTLFEHKEKSPFKP

SEQ ID NO: 35718 - protein, 462 aa, Oryza sativa
MTCVLSTLPASCEQHSVATNLDNPGNNETVMAHDVQTAAVSSFDLKGIEKHVESLHDAMELDGTESSKMNLIADFTAPLSSDDSLVCYAIPCSMELSDTSVVNKCPHQSTGFPDYAKACTECDSGLTSCERVDRISQDHDILSGSSIYSKNKDLYSYSDISVFSETHKDFAEPLELPPCGKDDEAPPDLAAQLHCNSCKDVMMPPQVISDEVEPVDRGATILVEHTPCGPETALTAFLYDKGSIDTTSKTDELAKQNSNSLEGDVAKIHEQLLNYSYASGEVEISLTRSEKRTKKLRSQHPIYVPFLGFLKSVSFKKKASKGWSSSSSSSSSLRRVLSTGGGLVEEERRERIDKYRSKRNQRNFDKKITYACRKTLADSRPRVKGRFARNSSDDAAAAAAAQVEVSPATNNNVPEWWPAVQEALARQEQEAAGLHLCDTADDDLLAAYLGVSSIDLYSPRGH

SEQ ID NO: 35719 - protein, 397 aa, Oryza sativa
MAPVKKSKKGKRKSKDSGKLKIVKYGGGAPPLPPELRGLDTEWWYTFLHKHSELGLSAPSDEGEAFRYFFRTSRRTFDYICSIVREDLISRPPSGLINIEGRLLSVEKQVAIAMRRLASGDSQVSVGAAFGVGQSTVSQVTWRFIESMEERARHHLVWPGQERMEQIKARFEAESGLPNCCGAIDATHIIMTLPAVESSEDWCDPAKNYSMFLQGIVDDEMRFIDIVTGWPGSMMFSRLLKCSGFFKHCDAGTRLDGPVMVSAENGEIREYIVGNNCYPLLPWLMTPYEGESLSAPMASFNARQKAARTLGPRALSRLKGSWRILNKVMWRPDKNKLPSIILVCCLLHNIIIDCEDELLPDVQLPDRHDTGYSEEKCEQVDPNGKIMRDVITGYLQI

SEQ ID NO: 35720 - protein, 391 aa, Oryza sativa
MAPLRGAKRRRKAAAEKKAAMAAAAAAGGAPGAGGGDWWDGFCMRMSGTLSGIQDAQRFEFIFKMPRRTFNYICGLVRDEMMVRSSSYTFLDGKVLSLEDRVAVALIRLNSGGSLVTVGSAVGVNHSTVSLITWRFVEAMEERASHHLRWPDSSEVEKIKSMFEKIHGLPNCCGVVDTTHITMCLSSAEPNCKVWLDHEKNYSMVLQAVISPDMRFMDIVTGWPGSMKESSILHSSGLFKMCEKGARLNGSKMVVSDGSEIGEYIIGDAGYPLLPWLLTPYQEKDLSDSKLEFNKRHAAAITVAPSTLANFKDTWKFLHGEMWRPDKHRLPRIIHVCCMLHNIIICLQDATIDEAAMSNDHDANYKQQVCQLADENAVRVRDKLSEHLVSR

SEQ ID NO: 35721 - protein, 220 aa, Oryza sativa
MASIVASKRIPLFRLVEQLLAASPAQGAASALRPVAVAGGSRAYNTGAQLRRHERDESDDDSGRGYDTRRPTRDATMPAFFSDVFRDPFSAPQSLGRLLSLMDDLATPAGRAGAATLRRGWNAKESEEALHLRVDMPGLGKEHVKVWAEQNSLVIKGEGEKEAGEDEGAAPARYSGRIELAPEVYRMDQIKAEMKNGVLKVVVPKVKEEQRRDVFQVNVE

SEQ ID NO: 35722 - protein, 26 aa, Oryza sativa
MITQNLHFCVLTVLYACMQSTVDTIA

SEQ ID NO: 35723 - protein, 359 aa, Oryza sativa
MRPQGKTLEMGKRALPRSSDGDEDRTGDLPDGILHHILGSLPARDAARTCVLARRWRHLWKFATGLRITDREMREPAPMEKLQDFVDHLLLLRGRAPLETCWLNLTRLSSDGDARRVNLWFRHAVLCEVQVLRLDLILNGFQLKLDDLPLASRCLAKLNLSGVHLMHSFPDFSCCPVLEHLDIFFCDLSDAKKITSQSMKCLNIRHCTFSQISRTRISAPNLISLRLENYWHRTPVFEVMPLIVDAFVRVHDRSGDWYSCTSGNADFEECLCEDCDFCHSNTNCVIMQALSQAKNLVLSAHEQEFIFKKELMRCPTFSNLKTLLLINCFCVAFDLHGITSILRHTPVIEKLILSFFRGY

SEQ ID NO: 35724 - protein, 484 aa, Oryza sativa
MASAERSKKLRVLLMPFFATSHIGPCTDLAVRLAAARPDVVEPTLAVTPANVSVVRSALRLHGSAASTVVSIATYPFPGAAGLPPGVENLSTAGDERWRVDAAAFDEAMTWPAQEALIKDQSPDVLITDFHFSWNVGIAEELAMPCVQLNVIGLFSTLAVYLAAAVVNDSDSEELTVAGFPGPELRIPRSELPDFLTAHRNLDLVDNMRKLVQVNTRCHGFAVNSFLFLDKPYCEKFMCNGFAKRGYYVGPLCLPQPPAVASVGEPTCISWLDSKPNRSVVYICFGTFAPVSEEQLHELALGLEASGKPFLWAVRAADGWAPPAGWEERVGDRGLLVRDWVPQTAILAHSATAAFLTHCGWNSVLEGVTAGVPLLTWPLVFEQFITERLVMDVLRIGESVWDGARSVRYKEAALVPAAAVARAVARFLEPGGAGDAARIRAQDFAAEAHAAVAEGGSSYGDLRRLIDDLVEARADAGESALQPL

SEQ ID NO: 35725 - protein, 162 aa, Oryza sativa
MADCTTMRLASSVTIILLLLVASQALVVSGESSSSAMQSKTLNMNKLLNISEDHSPNGGRHWMQRMQPDSCSEQNVVVYQNNAEHLPSGIPTYSVEIINVCTACTVYDVHISCGEFASAELVDPSQFQRIGFNDCLVKGGGRLGPSEAVSFQTPTPSPTRSP

SEQ ID NO: 35726 - protein, 317 aa, Oryza sativa
MGSPMSRPATADGSARGGGLALAIADELPQEAVAKPALMSQVMAGNSSMVAKMDEVSRVADDLMFAEDLQLEEVIRFSAHSAGPNCAVCGQATPSVDASWKPDYCTICMETVDAIERFAIPGCTHAFCASCVRQYIAAKVEENVLSIGCPDPGCKDSGGGALHPEACRDVIPPQLFQRWGDALCDSALSSLKFYCPFSDCSALLVDDPGDGEEAITDAECPHCSRMFCAQCKVPWHGGATCAEFQKLGKDERGRDDLLLRKVAKDSKWQRCPKCKMYVERVEGCVFIICRCGHCFCYLCASPMSRDNHHCKKCKRTW

SEQ ID NO: 35727 - protein, 313 aa, Oryza sativa
MASSERGGGGGIHVVLLPYPSQGHINPILQLGKRLAGHGGVRCTLAVTRFILRQGEPPSTGAVHVAAYSDGYDAGGFHEAGSAGEYLSRLESRGSDTMDALLRAEAEQGRPVDAVVYDSFLSWAPRVAARHGAATASFFTQACAVNAAYESVFTGRVELPLAADGEEPLRLPGISVGLTLDDVPTFMANTEDSPAYLDLLVNQFKGLDMADHVLVNSFYELQPQEAEHMASAWRAKTVGLTVPSAYLDNRLPDDTSYGFHLFSPTTETKAWLEARPPRTVAYVSFGSVATPSPAQMAEVAEGLYNTGKPFLGW

SEQ ID NO: 35728 - protein, 365 aa, Oryza sativa
MSMEEAEECSAACGFSLTCQEDGADLGDGVVDDDDDGDVFLFYNAVAAADDEEEEEEYVEQMVSKEASFCCSSSSSLFDAAAGDGYGDGDGDGDWFRQARLAAIKWILETRGYFGFGHRTAYLAIAYFDRFCLRRRVDREAMPWAARLLSIACVSVAAKMEEYQSPALSEFDAGGGRVFCSDSIRRMELLVLSTLGWRMGAVTPFDFLPCFSSRLHRHHHGGAGAAGHGAAAAARVALNAVGFTFATAEAGSVLDYRPSTVAAAAILAASYGAPLTKEALESKMSNLSPSCLIDKENVHACYSMMVGDMNNNRRSSKRPLQCSDSNEITTTSTYDSVLVDDVTDTAAFAATAMNKRLRPEPPRIR

SEQ ID NO: 35729 - protein, 682 aa, Oryza sativa
MSSQAPSAPVTPAAPPPQTPPVTPPPVTAPPPVSPPPVTPPPVTPPPVSPPPVSPPPVTPPPVSPPPVTPPPVTPPTPVAPPPVPPSPPPPTPTPTPVTPSPPPPVTPSPPPPVASPPPPDVPTAPPPSNNPPSPPPSPSNVPASPPPPRISLSPPPPPSTPTQSGASSGSKSSNNGTVVAVGVAVAAVVVLGLAAGLIYFFVSKRRRRRQHPPPPHHPGYPPFPAEFYDPHRPPSQQQSHALSPSPSSTPPLLLQPHSFVSSGGASEAASAVPGIAMMGGAFGYDELAAAADGFSESNLLGQGGFGQVYKGTVRGQEVAIKKLRSGSGQGEREFQAEVEIISRVHHKNLVSLVGYCIYGEQRLLVYEYVPNKTLEFHLHGSGRPALDWPRRWKIAVGSAKGLAYLHEDCHPKIIHRDIKAANILLDYTFEPKVADFGLAKYQATEQTAVSTRVMGTFGYLAPEYAATGKVNDRSDVFSFGVMLLELITGKKPIMVSHGDQPDTLVSWARPLLVRAVEEENFEELVDPRLENNYDAYDMGRLIACAAAAVRHTARSRPRMSQIVRYLEGELAAEDLNAGVTPGQSAMQRTSGGTTDQMKRLRKMAFGSATGTGTVSEYTSSEFSEPTSEYGLNPSTEYTTSAAGGDTGEVTVDVQMTAGASGEAAGTERLSRRTTARRGGRV

SEQ ID NO: 35730 - protein, 405 aa, Oryza sativa
MVSTRGAAANAPGRRGRPPKAAEEAARSPVLSSPVVAADAAEGYERERAERIRENMERMQKLGILDLATRFNQSAGGLAGSGSGRGRGRRKAAVTPGSVGVGRMIKPASPSPARRSLRLKNVEPVSYCEIRTKKDKDDNEGGNSVLIEAGSKEEVYTEEDEKLLGPCVEPWTLFVDGYGKDGKRIYDQVRGQTCHQCRQKTLGHHTSCCKCQIVQGQFCGDCLYMRYGENVLEAKKNPDWICPVCRGICNCSICRTKKGWFPTGAAYRKVVSLGYKSVAYYLIATQRASPAGSADSNKVAATKSEASSESDQAPVAKEDQEDAEMSGKAIQKVEADHQVNNPPDDSDNDDSRSESVVTSDSQDCQVNLDIGCATPSKPTGPKKRKWIERSPDCVASRLRSRSNKS

SEQ ID NO: 35731 - protein, 424 aa, Oryza sativa
MPRLLLRRLCVRHRRRPKPQALAAAVSNGTTSAIAEELTDDLLVEILSRVPYKSLCRLKCVSMRWRRVISHPDHRRQLPRHHLQPLAGFLYADYRVLNRFQIVPALDPPPLIDPSFSFLPKCDDLQLVDSCNGLLLCRCWNQLNEHRTFNYVVCSPTAEKFVVFPDSTCSKKVRPFLGFDPAVSSHFHVFEVVEDWDYYDCDDDDLECDGVEDVVGLRIYSSETGVWSDEIDNGWSNRIRIRRDQKGGSKSVFFNGMLHLVAIQPVVAVVDVEGKNWRTIPLAHKDGSPLCGAHPPCASGPEGFIALSRDLLHFASTDSYGDWEISVWVLDDYYGGQWTLQHTVSTMRPFERTMRRRMNPDDCTLVWIEGRKMFFMFYDYVHCILTSYEMDSGEVRCLSRPRSYCEPPYLPYIPLFLESLADGP

SEQ ID NO: 35732 - protein, 105 aa, Oryza sativa
MISVMAMRRNERPVLRLPPIPFPIQLVSGMGRDGSSMMCSSAKGSLSHSFFTSTYVQYTLFRVLFRVKILQVIRVLIQCADIQQCTHVGICIVLRFCSCILFQKH

SEQ ID NO: 35733 - protein, 338 aa, Oryza sativa
MSSNFEANNNNNGEKQLVCVTGAGGFIGSWVVKELLIRGYHVRGTARDPADSKNAHLLELEGADERLSLCRADVLDAASLRAAFSGCHGVFHVASPVSNDPDLVPVAVEGTRNVINAAADMGVRRVVFTSSYGAVHMNPNRSPDAVLDETCWSDYEFCKQTDNLYCCAKMMAEMTATEEAAKRGLELAVVVPSMTMGPMLQQTLNFSTNHVARYLMGTKKSYPNAVAAYVDVRDVARAHVLVYERPEARGRYLCIGTVLHRAELLRMLRELFPRYPATAKCEDDGKPMAKPYKFSNQRLKDLGLEFTPLRKSLNEAVLCMQQKGHLPLIYPVPKRAYL

SEQ ID NO: 35734 - protein, 968 aa, Oryza sativa
MKKNLRNDANEEKRKSSDDMRDGDDEEKKCSRQDMKKNLRNDADEEKRKSCDDMRDGDDEEKKKRSRHDMKKNSRNDADEEKRKRKRKCSDDLKKSVVNDASKEATSHSDWRKNRKAGSDAEQRGKKLLNGDKKAKSRKVTTPFFEKMRKIKMQRTSNQNGEKNMKSDGDSYKKTVPLSVNKGKMEKDGTNKRTLSNTLVAKERKMRPSDSMEMKMKKKKRDASFVQPDERTAQTFSTKNKEKKRKAPSTPLKREQKERVASSDNKKETKKACIVAIGNEKKNCRDGKKKKRKAAFAFFKFVRDEFEELLFIPPAVAPSLKDLIDRHVYLEDSEGKCSKIRLSVVDGSLAFYEGWNSFVSEHCIKWGEFLLFEYTPESTFSVRVFGIDSCERLHFSVKSGGKGAVKKRKERHTLSDDLISHYNGQYQDSEDIHDGPNVSGESPRSKEPKITVDAEIGTKNLVAKSINAASETQDSERVESGIGYGSLGALGNKVRNLSNGECDTRSDSVFCIQEKTRRSEVIIISDEAYSTQVDEDTMKQTAPSEASEIHHVTINTQKDLERVVDGVCCESSVALNNKMGNLILGEPKNKNISPACSTEKTNGSEITPTTGVIPLTQENIDTVKLNTLSCFEEDRSTTRESELAAAIPTTSETHDSDKDLGQKHRRNSVQVNSIIAVDKYPNDSEMNISGNIFRIYEAPAGTRCLEKWKRGIVNGRAALDDIGQVRPEKTQKAGEKLVGNCGAMGESPVDLRIESDVTDTCLKPILNIPIEELSILDSVSISKCGRSRTEVNHLFNQKGATVQLQTKKEPLKPTGSSGNRKGDKIAVSVNRVFAHQSELQIPQQENGNFTSCVTPVALLPAKAELLDLDDHSLQFCIPSTIQKWLELPKSLPITCRQKGRYDRNVVILKDPMRRLWPVFYHDKPVFVGFTAGWKPFAAANNLQAGDVCKFVKEMDEDELAFQVYITRK

SEQ ID NO: 35735 - protein, 107 aa, Oryza sativa
MFKQRYSSTEEEVENMTGAIWIEGFIRRESLGHFIIIICCDYNGTTSRTIIWESKLYMIPDQFVTDIVKNNKEDFTSQIAPNLLHQLLLVPAIHFTPELVQRENNLT

SEQ ID NO: 35736 - protein, 482 aa, Oryza sativa
MAGAGEYGGGGGGGGGFGGDFMVLRPDKGGIGDLFHLLWSCKVAENAAVDCPIGTEIAERRRRWALFVSLVAQMLLLWTKKPMALLGGGTEYWMNLLNENGGSVFMLITNALQGKVRMPDKSSINYRSCIGLLDTRIDLDEKIKPEDRNYHAALSIMAAKLAYENELVVRTVVQNHWQMNFVGFYNCWNEFQEDYTTQAFMVSDKAEDASLAVVAFCGTKPFDTEQWCADVDFSWYEIPGVGKVHGGFMKALGLQRNGGWPEQPTGAGDDGGSDKKPFAYYVIRERLRAFLAENPRARFVVAGHSLGGALAILFPTVLALHGEEDMLARLHGVYTFGQPRVGDEGLCRFMDGHLATPVSRYFRFVYCNDIVPRVPYDDTALLFKHFGTCLYFDSFYKGHVTEEEPNKNYFSLLTVVPKYANAAWELARSFVIGYVDGPEYGEGWLMRIARAAGLLLPGLPPHAPQDYVNATRLGAASLEPLR

SEQ ID NO: 35737 - protein, 439 aa, Oryza sativa
MKGPEVPPDLSFTGAALPSNPSFDAKLSSNLNPLPAASTDLSLSLPLPSSNDSPAPSSNHDANTEGMDSSSKINLSYDEDQKVWIPQDKKDEMVLILVQRQKELQAHMRDWTDWAQQKVMQVTRRLAKEKEELHSLRKEKEEADRLQEERHNLEERTRKKLLEMESAISRANTQLEKAESSARRREAENEQLRIQMEAAKRHALVSATNILELSKKDENSHKRSQHWESERALLQEDLAAQRNKLSQVHQQLHHAKEQKDQIQARWRQEEAGKIEAIARVSLEKKERDQIETSLRSEENFLHLKAENDTQRYKSQIRALEQQISQLKVSLDSLRVGAPPKWGADNRTNALRLSEGRKNGSAQILANIAAVPQDFDFDDIQRDRECVMCLSEEMSVVFLPCAHQVVCAKCNNLHDKQGMKECPSCRTPIQRRVCARLAGC

SEQ ID NO: 35738 - protein, 362 aa, Oryza sativa
MASNFSFPPLTPEQIAEALHTYGLAPTANLRAEDIANPQPDLLPAVISNFLATVVDPTGADDLDGQLGFDALASLDNPEHYMEGIRVLRLHKRASAFLESIQFPGFTLRDLLRPDPRRLVQVLSALINFLYYRDDKLALLQPIIHEFPNLDERCMELKAKLAEHQKAIADHELAAQMEEPMVQQIEAEVNSLKQKLVEYNKKQLALRANATAINDKKEETHRKIAKNDFELVKLAQENSKLLPKIVESPEKLQRALEEKKTARAELKNAEKIATQSVQEKTATLEIYSKGYEKLSKHSTKIQALQEQVTATKALEKEVKARKTKISDESVEIMALDTKIIEWDGKVHEMEEHVKAKEKKRIK

SEQ ID NO: 35739 - protein, 370 aa, Oryza sativa
MSNPAAYYAAVARKQYFCYQCNRTVLLPASAAAAGALSCPECRGDFIEEVNVPAPAIIPFPFAFPPMMPTATSASAAAAAAASPTQSSSSSAATSPSSDLSASLNSMLGPLNLRTDERMPGTTSAAGTATPEDEPDGFDAVTFFQNYLQNLMDGGANIQVLLDDASVGLAPGIGRVGGASFGDYFVGPGLEQLIEQLTENDPNRYGTPPAAKSALSTLPDVVVTDAMVAAADGAECAVCKEDFSPGEGAKQMPCKHIYHADCIMPWLDLHNSCPICRFELPTDDPDYEGRKKSNPQPTAGVDAGAASGSSTAAEEREESGESARLVERRFNVSLPWPFSGLGSQTPQQDGSNGGAGASGSKDGGASSDKK

SEQ ID NO: 35740 - protein, 317 aa, Oryza sativa
MEAITMSPSSVSSHHLDVDAASTSEDMSSLQEGLLFSDSLKDLRNLRSQLYSAAEYFEVFYRNNSQKSTVMTSLKDYTVEALVSTVDHLGFVSYKVDNLVKERSDEVNETEFRVSSVEQRVRICQQTIDQEGRSQQSLLIRAPKYHRRYILPGTDIVESAIHPVSEPPRYSRQHMSRKMHKSQSISTPVGRQSTMRSARSPSPSARGTHHRSRSLSPSRKARAKSPSPQIISTQTKETRAGSPIPNSNPLARSATVARRPPVHPKHFRQTSMQLHSDWSNHKEQEKSSSKGRGFLKSLLTRRRWRNDESLYSYLDEY

SEQ ID NO: 35741 - protein, 181 aa, Oryza sativa
MDNPDFEVELKVKGIAETEDKVLSSHAFTFNCIYDDGSSVKRRVASNKRSTVQITFALIPETVEATFEVKVVDGSLDPSLRPHFFASTHHHPSTECVLLDPREGATVISDNNSVKLTRSVVSVEVLGGLKLTAEALDDEKAVVPRTTIIFEPQRDGRVYGFLDLNCCKMVVKVSWSRLSIC

SEQ ID NO: 35742 - protein, 92 aa, Oryza sativa
MNMLVKTSIKLFPLGTLQSPSIYKISLIIKNGLGIQLTPSNFGHKPSYCQILIKSTKFSYVNIAKHFKFKSNTCGLVFQAIAGKASQNSAYK

SEQ ID NO: 35743 - protein, 222 aa, Oryza sativa
MTCQAIVKNTIGVGVDDEDRKRTWVADAEECKKRGSVETAPAIYAHVLSVFKFKKSIWLKAAQLEKRHGTEESLYILLSKATTYNRHAEVLWLMYAKEKWLAGDVPAAQTILQEAYAYLPNSEEIWLAAFKLEFENNEPERARILLSKARERGGTERVWMKSAIVERELGNVDEERKLLEEGLKLFPSFFKLWLMLGQMEDRLGHVAKAKEANENALKHCPN

SEQ ID NO: 35744 - protein, 215 aa, Oryza sativa
MSSAMASSMAKNSSPFKVVLGSSSPARREILADMGYEFTVMCADIDERAIRREKPEELVKALAEAKAEAIKLKLHGEDSAQERDQPTILITSDQVMVSKGMIRERPKGQEEAREFIKGYSGDKAFAVNYVLVTNLSNGASKGGWDIPEIYFHHIPEDFIQSVVKEGHMTCVAGGLKLTHPSVLPFIKQLIGTMDSVRGLPRELTERLIQEVLGAK

SEQ ID NO: 35745 - protein, 113 aa, Oryza sativa
MTPLMFWKGHSRVSKELLNTCTWAYCLSIMKVKVRTADFSAPSAVHVKMSRSGRNWQVSLLEIRTIILFPCFHMNKMSNGTMKGLTGALENNFSQLGRCCVFERVLRRAISVE

SEQ ID NO: 35746 - protein, 72 aa, Oryza sativa
MSFLASCSSPCTLRRAPPPPRIPCHPAIHLPAVTGLSPITVSSPSASSSQVMSPPTPTTTPTLAYGSTRSPS

SEQ ID NO: 35747 - protein, 259 aa, Oryza sativa
MKEGLISEAFLFLDEVRQFDIVPNLYTYKVIINGLFKGNESDDLWGFFGDMIKRGYIPDVVLYSIIIDGFVKALDLQEAFRLYHKMLDEGTMPNIFTYTSLINGLCHDDRLPEMTPLLKNMILEGLTPDRIMYTSLIACYCKRSNMKKAMEIFREMKNGGISPDTFVYTCLIGGYTKVRAMDFAELLMEEMETKGLTPTVVTYTDLIIGYLKTGDEKSAYRTYHNMIQRGITPDAKLSCILDLGNDADVDNSPKEKDVS

SEQ ID NO: 35748 - protein, 83 aa, Oryza sativa
MLTCTGRHYSRCQLSSKSFSESSCPLCTNCASAHQIRLPEKKSSIHPRNACHWLKKKCIAAKMHSLIWCVQELHDHLVARTTS

SEQ ID NO: 35749 - protein, 646 aa, Oryza sativa
MHKANLMKCQVDAKLCALRSFITFLSVCTGTSSYKKFGLPGGGISITTTQSAVRCACKSLQSAVDSLPPEVDNSGVLFPPLSGQVELLLTITRILLDHAKQSKSSRHLYPVIVLLMKTSGASTSFLFNLMPSSPALKQPVKSLLVLLLSLFEFVYKKVDMKDGSEDVNIFGELSLLSMSLLPVLCKLAESREYFDLAIASMDIILKGFLPSNVWVPILQKHFRLQVILQKCQSGALLCTQVILNFLLTMGRTKDGAKILQSANIFAFIKVLLSQMSLDDSCLRNSLSTQTKDVKIWGLGLAIVSSLNHCMDDDISRNSVANSTISFLSGQVPLMSSYLSAQSVNTHQSKKRTLLQKSQTSLSALSLTENILTLLCILAKYHFPRDTGMKEVDSELREIIIHLLAFISRGSERTGDSPNWNLSFGCPPIIKEEMKLNEEPPLIRSKYGWFRFAASCTLSTPSVSGPPNAGLSLVIRDKNPADSDSMKQTRFTEMLAVQIYRIAFLIMKFLCSQAKEAVRRAEELEFLDLAHFPELPMPDILHGLQDQVVSIVTKVLEANVSTALNTETERVCQLLLVILETSLYMELCVSQSCGIRPVMGRFEDFSKEIKAMVHASEKHSSFKPLVRSLAQITTLLYPGIVQNNNLM

SEQ ID NO: 35750 - protein, 73 aa, Oryza sativa
MSFMSSVFSFKIWTFFLYQWSMTWEIYRQKSTEALTRLSKPVWIWLVINSAFIILKLYLLKYDLIRFVFLLYW

SEQ ID NO: 35751 - protein, 121 aa, Oryza sativa
MTAFFVINKKRVECGANMAGYKYSQRKMRRDGLSEDAAGLPGESPPPLANIDIYSWCAYSRFRISFRPGQAESGHHLGWEWLSPHASFDETSPVASDQWLVNHRTVAPHRMPLRWGNTAHD

SEQ ID NO: 35752 - protein, 296 aa, Oryza sativa
MNSKKSKCTCTLTDDLVVDILSRLPLKSVCCFKCVCKSWASLFSDQYFCTKLPRRPAGLLYQDSNNSSIQIAKLPSGNSEIGTSLSFMPHHENLKLVDCSNGLILFTHGSKSDSPDSSHFIVCNPATQEWIALPDTCPRVNGSDYIAMLAFNPSSFCHFFVFNFQKRGSPHSGVFVITEVEIFSSEDFTWIADDAFETEIMMISMPHVLLHGVLYLRTVEHSVFAIETPHMYKPWIHRWTFELPGDSCPMNNYIWGCLGESSGILHYMQPNYDGCWLNVWRLESRHQQWSMTHSLS

SEQ ID NO: 35753 - protein, 215 aa, Oryza sativa
MAARLCTYYQKTSPSDQTATSLRSNSDGLGTMLAIDPADKSPFLGNIRSGSHQSCLETNMYRAPVFPHKVATTDYLLVRSPKGMLSLRRIDKLYAVGQQEPHMEVFSPGTKNMQNYILNRILVYVYREFRAREKPGIIPQIRADELPIQPPITEAIVRKRLKHCADLRKGPKGHLFYIQRPDFRIPSEEELRRLLTPEMSAVMRVCKLASIVSST

SEQ ID NO: 35754 - protein, 44 aa, Oryza sativa
MPIVAMKTTLYTSSEEMLTPLFVIENVKHGGSRGVECGANINIF

SEQ ID NO: 35755 - protein, 746 aa, Oryza sativa
MPGIQDRQFNNEVHHLMGLKHQNIVQLIGYCDERQEKVIYDEYQKKNICAEVQERLLCYEYMANGSLDKLVYDQSHVLEWHDRYAIIKGICQGLCYLHEELENKPIIHLDLKPSNILLDDNLLPKIADFGLSRLFGEEQTRTCTTMVTGSIGYMAPEYCHKGGISTKSDIYSLGILILEIVAGEKNHQSSVDLSGQRFIHSVRNKWSRMSKITSRYPLLDTHSLQQVHSCFKIGLNCVEIDPKRRPPARKIVNMLPWECKKAEAMASMLLPNVSNGRFTSSVVDKESNVIGLPAHQVDSNMKEILSVNPLELWFPMKAQEEFSCSMLLKNKTHHYVAYKINAQKLNIYRIEPCSGLISPQFTCNISVRMQAQQGVSPNMQLMDRILVQSVVVSDDLIDIAKDLSCKQKGKLVLKGPDKIMSKIYVNIRKTGALDENKPICGTTEGIGNSHHDNKLSGLSIMKNSSRDDYVIDGMRIYVKIPSIAKTIKLIVKNSNSVADVKVEIERKEGILQDNQMLMYAGRQLDDRQILSHFGLSDDQILHVLICPFEKLRIFVNISNRRTVRLDVESWYTVADVKVMIEALLGFPACTQLLMWTNPSVDIELMDTETLKEQNVKNNTVLLLHPNVQIFIKSWEGRTLTTLVSMFDTAEEIWKKIKKRSQIKAEKYFLCYRGHVLPPGVSLDMYKIESNSTISIRLRNSYRKEEPGRITRGTSSFTLQSSLMEWYQERKYARQAKATAEDTILHA

SEQ ID NO: 35756 - protein, 188 aa, Oryza sativa
MIESGSSDRASKDCKDVHKLRYSRIAWIPKAPDISRIHVLPWSASRTVLRFRFLATTAACTAGARVRIDDPWIQLSSQKSTFIPLPTRHVKETWSRFLSFCEIGTLSPCHGFSGDVLSCQAQRHRSASPMHSRSGTPNPPYDLGAQTRAQATRQLPPLALAFPDGRKPRRTLSIPFITHFGTLMAISR

SEQ ID NO: 35757 - protein, 92 aa, Oryza sativa
MLLNKYEKRIAEQRSNKGKRPRSPPRRDLVNPQDKWSCLFLTIHKVMQWGPCPMPPPGYPFPYFMPWGAPPPMYEFVPPTVLMQFHQSWVEP

SEQ ID NO: 35758 - protein, 48 aa, Oryza sativa
MLEMIYVRLCCIPGQLVLHEDGFEMVEITGEYAFVEIESLGYAFGRHH

SEQ ID NO: 35759 - protein, 405 aa, Oryza sativa
MLEAKAARVPDAVSSSERGQVRVYQEKIAKWQTQVEERLRVLGQRSGAAAPVPKKVVTNNPVNRNDRAASTSFHRPTSQPSPTFNRGGQASSHQKSSSGGAKPVQRAGANYDDKLVEMINTTIVDRSPAVKWEDVAGLDKAKQALMEMVILPTKRRDLFTGLRRPARGLLLFGPPGNGKTMLAKAVASESEATFFNVSASSLTSKWVGEAEKLVRTLFMVAVDRQPSVIFMDEIDSVMSARLANENDASRRLKSEFLIQFDGVTSNPDDLVIVIGATNKPQELDDAVLRRLVKRIYVPLPDPNVRRLLLKTQLKGQSFKLSSHDLERLAADTEGYSGSDLRALCEEAAMMPIRELGPQNILTIKANQLRPLKYEDFKKAMTVIRPSLQKSKWDELEKWNEEFGSS

SEQ ID NO: 35760 - protein, 95 aa, Oryza sativa
MCYSPAANRVVEVNKMWRAREKELELESKTKRRSINRGDSRGKKRRSDVRNQSSSPRMEQDSTSYNSSYLDLEGALGDDEIEMFLHSRLVASIFS

SEQ ID NO: 35761 - protein, 76 aa, Oryza sativa
MPTAAKWETLASPHLEAPIHKVTSAVTYNLFWQPSSCSSYRSTPSTSSNRCICSSIIILARSNSSFCRRGCPCQGI

SEQ ID NO: 35762 - protein, 1025 aa, Oryza sativa
MKVISVVGFGGLGKTTLAKAVYDHFKPHFKCRASVPVDQNPDMNKAFDDQVEPHFECGAFVPVGRNPDMKKVFRDILIDLDKEKYTNPNMMVLDEKQLMDELKEFVKEKRCFIVIDDIWDKESWKLIRCALQESDCGSRLVITTRISEVATHAGEAYKIQPLSRDNSEKLLYARIVDGEWKYFDNPSAKACEKILKKCGGVPLAIITIASLLASKPGEDWSEVYNSVGFGHEDNDDVGNTRRILSFSYYDLSSHLKDCLLYLCVFPEDHVIEKNSLIWKWIAEGFIHEELAAGLGLFELGERCFNELINRSMIQPVETKHEGYVDGCCVHDMVLDMIHSLSSEENFVTVLNGDERQKLPGSIARRLALQRVLVHKDGQLANITLKNVRSLIASQCFGSLCLHTPVLRVLDVINCAESETPNVLEDRDKTMPSHLGSLLHLRYLGLVDTYITKLPREVRYLKFLQTLDLRGSRIKELPEEVGLLTQLVCLRADWEIMVKIGLIGKLTSLQELWIEPAAAVYDDDAASVDDDDDAAAVDDTTKSTMKFVNELGLLRELRVLRTYFEDLNESMERALLESLGKLHNIRDLHIEGPPLVTRRVTSSARSVSCLHLRYLCLNCFVFSGLPAWIKSSLAPNLSCLDVVVLIVKEQDMETLARLPELRCLVLRLHETELVSIKIHTEDVGYFRKLRILRILGTSIWFDLHGSKCNITDNRSLASIIMPSLEFLEFAVHMRFLKDATQLGFDKLLSFEKLGRSSLQKVTIVLKCGDARLSEVEEVAAALMNSAAVHPKHPTVQTKWQDEQAVLSPYQEAYMHVSRTPELVNEAWKANIVSSGRIRALRMPVTEASSSKVICLLYRKSGKGLLALSSNAVHKLWKWESNDKNPAGMSTTSVPPQVWQPESDILMNDTANGNPEEAAACSLLSKNDCYLISASGGKVSLFNMLNFKTMTTFIAPPPSATFLAFHPHDNNIIAIGTDDSSILLYNIRVDEVSVSRASLVPCLHKSQKYWQNSLSMIPTGSAVPIVK

SEQ ID NO: 35763 - protein, 51 aa, Oryza sativa
MSRRPVFYLGSGIRGSLQAGGGGVGDGTRTVDQVRTAAATGDALVATRSSL

SEQ ID NO: 35764 - protein, 119 aa, Oryza sativa
MFLEAGADGISTSTSISHWNLLPLPLSYGSDIDRKFEWDTDVEVEFPATPAMLSMDARVPSTRRTQVGDRGISNHQRMCVDAIFCLKSTFFLYNNHIGHVVARRTNVDDHYWDYFEPES

SEQ ID NO: 35765 - protein, 93 aa, Oryza sativa; identical to SEQ ID NO: 34905

SEQ ID NO: 35766 - protein, 441 aa, Oryza sativa
MLGNQTIERLQQIFSSSSQTYGGLTLDLHCNRFGPTALFQICECAVMTNRLEVLNLSGNRLTDACGSYLFTILQKCKALYSLNVEQCSITSRTVQKMADALHEGSALSHLSLGNNNPISGNTMLSLLSKLASLKRFSELSLTGIKLSKLMVDKLCVLAQSSCLSGFLLGGTYIGSGGATKLTEALSCASQELLRLDLSNCGLTTPDFSQLCTNLSQINIVDLNLGGNSFTLEECDAIRALLSNPQCSLRSLTLDRCNLGLAGTVGIIQALAGNDQLEELRVAENTNLALQRTLQYDEDAQDVSPGTDQNQRTNAEANDHIDPDKMEVPDSEDEEAVHEDTRAATGPDGSCASSCQRNSSSGCHAIQELADAIISAKQLKVLDLSRNGLSEEDIQSLYSAWASGPRGDGMARKHVAKEVVHFAVDGMNCCGLKPCCRRDLQM

SEQ ID NO: 35767 - protein, 103 aa, Oryza sativa
MSLFWPPHIIVAKVAEQIRSPLPPPPLFCRLFPSSLFLCTAASSSRSPPSNDSSAGEVVMSVNHVPSPPIHLLRLVDRSCVTSSSSPRSPSTEAMQPHFSSIW

SEQ ID NO: 35768 - protein, 388 aa, Oryza sativa
MQNNNGNTSVNGVNEAIVGPDHVAQVVSRWTGIPVTTLDQEEKEKLIHLADRLHERVVGQDEAVKLVAQAVLRSRAGLEQPGQPIGSFLFLGSTGVGKTELAKALAEQLFDSEKMLIRFDMSEFVGSGSVLRLIGAPPSYHGHQDGGQLTEKVRTRPYSVILFDEVEKADPSVFNVFLQLLDDGMLTDGKGRTVDFKNTIIIMTSNLGAEHLTEGVTGERTMEAARDLVMKQVQKYFRPELLNRLSEIVIFEPLSHDNLKEVVKIQMKSVVTSVAHKGVSLLASDDALDVILSESYNPMYGARPVRRWVQKNVMTKLSEMLITGDAGQGSTISIDATDDKKGLNFQVLKEEVVVPRGKRPVEELQSDSDSDDDVFEIAPIPKRKKGDY

SEQ ID NO: 35769 - protein, 350 aa, Oryza sativa
MKLSNMTAFLSLLIFILLVAIEARNLVGVERVELPNPASMVTAYWQKMLPHSPMPTAILELLNPPTDVNQGVHGNGYDQVYGNGYDGGYINGYSHSYSNGYSNGYFHKANLHFLEDALKPGSIITPYITGIATRAPFLRRDIADSIPVSTKNFADILAMFSPISLVMADGIQSALDTCEHHRPIKGEERACATSIESVVEFAMSVLGTRDLRAFSPDVPPEGIMPGNMYKVVAVRTVAGLRGDTVTCHTMRFPFAVFYCHAINPTRVYAVVLESEEDGSGSGSGTPEKMEALAVCHLDTSRFDPKTPLFVEHNLRPGDASVCHFVSRDSVNWAPVAAVITHGDEQVSIAE

SEQ ID NO: 35770 - protein, 54 aa, Oryza sativa
MVNYCIKMSILDLISVRYVHLRYSPLAFVSVGVLFYIFPKGHSFISFFPVDHYD

SEQ ID NO: 35771 - protein, 353 aa, Oryza sativa
MNNLLENINVDLKKFAGYHKSNKVYHGKVPLTSPQNVLRNKVIELGGRKYQIKGSPGTGAFAKVYKASVDGNTEDLVALKIQKPPFPWEFYMYRQLDTRVSDIERPSFGYTHEVHVYADVSVLVCDYLPYGTLLDVINSHLVLERHMDEVLCIYYTIEMLRMLETLHSVGIIHGDFKPDNMLVCYPSGEITDETFKGETRSERNQGLCLVDWGRGIDLNLFPSGAEFYGDCRTSGFSCVEMQEQRAWTFQADTYGLCVIAHMMLHGTQMSIQKTPRPDGSYMYQPTSPFKRYWNVELWKNLFSTLLNATSNGSDAAVLRSLRMSFQEYLCSNRQLVGKLNQQLAKQKTSLCLS

SEQ ID NO: 35772 - protein, 397 aa, Oryza sativa
MMNGSNGSQGYHVNGKQVQSVVPSIQNNGPRHRPLTLMRRCRGMLCLVIMPLTAFMMMVYLSPVTTFLIRLFSVHYSRKSTCFLFGMWLAMWPFLFEKINKTKFVFSGETVPPKERVLLFANHRTEVDWMYLWDLALRKGRLQCIKYVLKKSLMKLLIFNWAFHIIEFIPVERKWEVDEPLIRSRLSELKNPKDPLWLAVFPEGTDYTEKKCIKSQEYAKEHGLPILNNVLLPKTKGFHCCLQELRDSMDSVCDITIAYKHRPPTFMDNVYGIDPSEVHIHVKIIQVSDIPTSEDEVADWLIERFKLKNKLLSDFSALGHFPNEGTEDDLSTLKCIANFVAVISTTTVLTYLTLFSSVWFKIFVAFSSAFLTFATLYSIHLPQLICSPEAGTHAKKS

SEQ ID NO: 35773 - protein, 204 aa, Oryza sativa
MFLQDRDAEIALLNKELASIKDQVQTYLEEINTLKSSKNEKEEMIEKLQSEIRSLKFEYDNLKILMSTNDSEKHNLASQVLKLRRALESREDVKQNGVKSDEDNHHATSKRIKHDDGTTGSCNVLPSTNRHNANGDCNGHDRRDAAHDQSVKELEILKERNTALEEELKELHGRYSEISLKFAEVEGERQQLVMTVRALKNSLR

SEQ ID NO: 35774 - protein, 348 aa, Oryza sativa
MDLRFGCQVHACVLKSGFQGDYDVSKMLLDMYVQAGCFTNARLVFDRLKERDVFSWTVVMSTYAKTVEGEKAIECFRSMLRENKRPNDATLATSLSVCSDLACLGSGLQLHSYTIKSGWNSSVVSSALVDMYVKCGNLADAEMLFDESDTHDLVEWNTIICGYAQHGHGYKALEAFQEMIDEGNVPDEITFVGVLSACSHAGLLDEGRRYFKLLSSVYGITPTLEHYACMVDILAKAGKLAEAESLINEMPLTPDASLWKTILGACRMHGNIEIAERAAEKLFESQPDDISSCILLSNIYADLKRWNDVAKLRSMLVDRGVKKEPGCSWIEINGKLHVFLSQDGCAKY

SEQ ID NO: 35775 - protein, 501 aa, Oryza sativa
MLVKDESGKVQENYETLLIERDISIGKAQLAVSMSEGAVRKVEELTVELNRLKVELELAHSTCHDAEKHSKDTSLACDEDSLKWKSDLRQAEEELNQLAKKISSIEELKSTLDTSTGLLLKLKNELAGYVEAKPIDKEAQGNITQRSLHNEVILSTRELEECLMSVDKVRDEVCALNVAAASLKTELIKEKTALATMKQMEATSSIAAASLRVEIQLALRELEAVQAKEKESRNGMLGLQKIMEDTAKEADESKSIAREAQEKLRKAKEDMDHAKSCLDTMEFRIQAVLKEMEATKESMRLAIDALRPFDSELPVDIEEQGSQIVTVDLDEYQSLIAKSSKAEELVHERTASAIAQAKIAKESESRTLSTLSETHKVLEQRKQALVAATERADRATEGKLAMEQELRKWREENEQRRKAGEALKSQLNPSSTPVIIVERSSDTKSTSKDDSYASVHPLLDMSARSTPNDSALLSNKKKRKKLSFFPRITMFFTRKKSRAAI

SEQ ID NO: 35776 - protein, 54 aa, Oryza sativa
MQAGYNIVINFTWKGSSICPLKFTVHVFSSVFISFLERIPHISTSESAGFGSYL

SEQ ID NO: 35777 - protein, 224 aa, Oryza sativa
MDDVPSQLLFSHPEVPDSFDDFLNNITTCTHTHTCNPPGPSATMHTHTCLHTHTQVFASGSGEDDIKEDLTKTRRPLGNREAVRKYREKKKAHAAFLEEEVKKLRAANQQLLKRLQGHAALEAEVIRLRSILLDVRGKIDMEIGTFPYQKPCSVGSVACTDPGMCFNGNSEIGGVWEECSRPVGADRMIDKDGSMSQEIDIPGPVHSISMDVVGSLVTSASLSE

SEQ ID NO: 35778 - protein, 123 aa, Oryza sativa
MLSNNFVFTLYCLLQKFCEFNWEMDDYEDFADEKVKEEGLPEDEREKMKEFLKEKVRERKRELKQAKEARKKAIDDMDPKIKEAFENIQFYKFYPVKTLDTPDVSNVKARYINRYYRNAHHLM

SEQ ID NO: 35779 - protein, 560 aa, Oryza sativa
MCIMQISFVLCSKLMVVLIKGFNSTLRQGNVTHHEYIQLGKGRDVGMNQISNFEAKVANGNGEQTLCRDIYRLGHRFDFYRMLSLYFTTVGFYFNSMVAVLTVYVFLYGRLYLVLSGLEKSILQDPQIKNIKPFENALATQSIFQLGMLLVLPMMIEVGLEKGFGRALGEFVIMQLQLASVFFTFHLGTKTHYYGRTILHGGAKYRGTGRGFVVRHAKFAENYRMYSRSHFVKALELLILLVVYLAYGISYRSSSLYLYVTISIWFLVFCWLFAPFVFNPSCFEWHKTVDDWTDWWHWMSNRGGIGLAPEQSWEAWWISEHDHLRNGTIRSLLLEFVLSLRFLIYQYGIVYHLHIVHGNRSFMVYALSWLVIAIVLVSLKVVSMGREKFITNFQLVFRILKGIVFIVLISLVVILFVVFNLTVSDVGASILAFIPTGWFILQIAQLCGPLFRRLVTEPLCALFCSCCTGGTACKGRCCARFRLRSRDVLRKIGPWDSIQEMARMYEYTMGILIFFPIAVLSWFPFVSEFQTRLLFSQAFSRGLQISRILTGQNGSGSKRD

SEQ ID NO: 35780 - protein, 677 aa, Oryza sativa
MDDRGNFVTGANSKAFTSVHGNMESTLPARMTKLNLGHGAPSNNNKDETAHQPPEVSGFGTNAATTFSSAQAASMPFTSIQTNVSFELKGNGGNLANEDIGNITHSRSDNDQGYGPSSFVFSSGSNAVPPSEGYAEHALQEDIKKLNINREGASVGSTKVNGSSQFVFRSKAEAIPVFGAIPQPNVPESRAFSHSNHSSSFSTSGNDMPSFSFKTTNTASDTIPGESCAVRQEPAWCSRESLFGIDYIKSAYRDKKEAHKNARKNKRPTKLKQHAQPHHFASQETCTTGPDMDLAGDYSPMDCSPYSATVEQVAKEASVMSDQSVHIHDYGVSNQSSSCAEDLVSATEHLVIDADLPTCEDEGRIPNVDTSANSFASSFSSFDEEVTIPIAPQPSSSNMHDTANGKPKSAPAEVWDDAYRLNNQGQAYEENGYRTAHEIGEHATFQESSEDFSGLNFTFGASTSPQSSVSTQRRNTRRKVRTKSGQLPKPSVTQAYVQPKSSQDKKTMQFSPEKNKAGDSADEQSTRGASTSAALETCETWRTSGNQAYTNGHFATAEEYYTRGINSVSGHDSSGYCSRALMLCYSNRAATRMSLGRMREALQDCLIATSIDPTFLKAKVRAANCQLALGDLEDALRSYTACLTSSKTSGSDRKMLAEASDGLERVQVCYISAQGSL

SEQ ID NO: 35781 - protein, 121 aa, Oryza sativa
MTADGWRRHRDEAAHGCSGLQLLDNLHVAVHRQAVVDQVLRLHGFYLHKFLVPPCFAAKCEVVKLAPRARGSAIDAESEPCGNFLYHSASQLEEHGHVSFFFLCAASRVESDRPAVSTDLE

SEQ ID NO: 35782 - protein, 239 aa, Oryza sativa
MVQPPAAVVQAQPVSEVEAGDPVLVRDFFRLLSLGSEASVPRDGVVCCYMDVSALFLYYRNMSGVLVLVPHVRPMCDAPLMVQQLQKMEMRSDWEIPNLAALKDVATASDALGRMGKMMLQARRVLKTLKNYPDGEEGLEILFYNTLLGEALTRAREAIPAVITSADLLVFDNGEVRLMALSLAHQAMSTVEACLGAVHEGKGLTGREMHRLVKKVLRPLSYLRKVKVIDLPRFNPFDV

SEQ ID NO: 35783 - protein, 82 aa, Oryza sativa
MRSMKAGSPTLCQVLKVFSYIEITRKPRPTFFIYRSNSSQKWDDNLFRHQSGSTFLLSLLGLRLCRIEIDAHHALSFPSPVK

SEQ ID NO: 35784 - protein, 45 aa, Oryza sativa; identical to SEQ ID NO: 34660

SEQ ID NO: 35785 - protein, 40 aa, Oryza sativa
MLRRNKYKLNNLHDECWKICYQPHNATDECANHEYSAIIS

SEQ ID NO: 35786 - protein, 39 aa, Oryza sativa
MGTVSLGNKKAVLSAVPIEIAQYILLPLSGISIQLRYNM

SEQ ID NO: 35787 - protein, 55 aa, Oryza sativa
MFLAFSSEYASSVCSVQSRFRTLRCFFSVSRNGSVLLRGVPLSNFIIPSCLNCGR

SEQ ID NO: 35788 - protein, 458 aa, Oryza sativa
MSSSEAQKCSKGRTERESEEPFKSLSGDNRMKSPQNTIAEKGLMFYQDVPPETNPSEVMQQKEQDDLSCCWNGCSDTSTKPVADSHPESSVHQKFSQQGAIEGHSNARSRHELVVGCDIENTLEADGAKSGEQSTVPELLDKKAAVLCSMDDDSVKVVNVSACSNQDSDTTPCGVTKLDKGTANKFLEKPVNLSTGSNFRVIQWGAVDCNIVRIKQENSQHADSEQDTHHKESGEPSQALKVASNQQIPHQFDSDRDNPCTTRQADWDSCSSIPDLNCLPNMNTDDELEPVENVTFQVNEDGTNPQNNIKSLSASSCKPTLQKEQSKQPEPIELTGGICERKDGNRFQSPNSHSGPSQQSIVEESSMSIDVFKCNLCEFIKNIIKPLWEDGLLSREVHKIIVRKAVEKVTTVLGSKVPLTEIDACRFLLEESQNLEKLVQGYLDLYVGREVLKKKHDR

SEQ ID NO: 35789 - protein, 789 aa, Oryza sativa
MGLGKTVQVLSFLGSLHNSGLYKPSIVVCPVTLLQQWRREASRWYPKFKVEILHDSANSSSKKSKRSSDSDSEASWDSDQEEAVTCSKPAKKWDDLISRVVSSGSGLLLTTYEQLRILGEKLLDIEWGYAVLDEGHRIRNPNAEITLVCKQLQTVHRIIMTGAPIQNKLSELWSLFDFVFPGKLGVLPVFEAEFSVPITVGGYANATPLQVSTAYRCAVVLRDLVMPYLLRRMKADVNAQLPKKTEHVLFCSLTTEQRATYRAFLASSEVEQIFDGNRNSLYGIDVLRKICNHPDLLEREHAAQNPDYGNPERSGKMKVVEQVLKVWKEQGHRVLLFTQTQQMLDIMENFLTACEYQYRRMDGLTPAKQRMALIDEFNNTDEIFIFILTTKVGGLGTNLTGANRIIIYDPDWNPSTDMQARERAWRIGQTRDVTVYRLITRGTIEEKVYHRQIYKHFLTNKVLKDPQQRRFFKARDMKDLFTLQDDDNNGSTETSNIFSQLSEDVNIGVPSDKQQDQLYAASATPTTSGTEPSSSRHGQGKEDHCPDQADEECNILKSLFDAQGIHSAINHDAIMNANDDQKLRLEAEATQVAQRAAEALRQSRMLRSHESFSVPTWTGRAGAAGAPSSVRRKFGSTLNTQLVNSSQPSETSNGRGQSLQVGALNGKALSSAELLARIRGTREGAASDALEHQLNLGSASNHTSSSSGNGRASSSSTRSMIVQPEVLIRQLCTFIQQHGGSASSTSITEHFKNRILSKDMLLFKNLLKEIATLQRGANGATWVLKPDYQ

SEQ ID NO: 35790 - protein, 474 aa, Oryza sativa
MTDEIVELYLELLCQYERRSVLKFLETFDSYRLERCLHLCLDYGVTDAAAFLQERVGDVGSALALILAGLDEKINLFISSVENAFSGIASKSISEIEQPDIVLKMSEAHPVLDALRAAIGLCQRNSQRLNPEESQSLWFQLLDSFSEPLKKLYGSKDVNGKGVRSNGSETSSRQPKDKGFSRKTRISAYQRCLNALRRVFSQFVGEIIEAMAGHIPLPAIMGKLLSDNRSQEFGDFKLVIHRMLSMYLYEKRILETAKSVIEDDSFYTLSLLKRGVCHGLAPQTFVCCICNCSLSKESAVSAIRVFSCGHATHLQCESEQSKSSNRDSKDGCPICLSTSNTQAQNKSPISENGLGKHFGAESEVSHGTYHTHETDHVDRSRGLQQMSRYEILNHLQRPQSLHIETVPPLRLSPPAIYHEKIQKRTTTMGESSKHSVRTEKPQRIWQMKEPRSKRSGNRVLPKSSMLSSQNNQVR

SEQ ID NO: 35791 - protein, 78 aa, Oryza sativa
MSPPASTWPSSCVPSRTASGTLTSSCGRRIRPFLAGFEAKSQLQNTVRDQQIALSLSLSLDGCIRSIFFCHGSNKPTI

SEQ ID NO: 35792 - protein, 233 aa, Oryza sativa
MMGDFLSRVLLLAFGYAYPAYECYKTVELNKPEIEKLIFWCQYWILVALLTVLERFGDLAISWLPLYSEAKLMFFIYLWCPRTKGTSYVYETFFRPYISQYENDIDCSILDLRVRAGDMLVVYWQKVAIIGQTTFFNILKYASAQSPAHSSRSRSTQVCKQNVLSSSLLNDNGTAFINQCLLNTPTFGSQFIFMHNLFCLLIPELQVSCYHSFVDKCHAVVLQTFCATTPTLC

SEQ ID NO: 35793 - protein, 53 aa, Oryza sativa
MVRSTCVRREAPRSSGQFRKIFLLLSFIWASSFWGNLCLSQHLSYAWASSSSA

SEQ ID NO: 35794 - protein, 55 aa, Oryza sativa
MNTRRILHEVWSKEGISGIFRGAGPRMARAGPSVGIVVSSYEVVKHIMHRKHAEL

SEQ ID NO: 35795 - protein, 566 aa, Oryza sativa
MDAVLKDIPKTGKVSMKTIFGRKKVRKDGSEGKTISIEPVEKLQREDRELWICYSSLDSMSTLKLYESLKNKLEAKEWIFDDCPRGTMYDFYEEYWRPFGALLVKMETEGVLVDRAYLSEIEKAAVTERELAADKFRKWASKHCPDTKYMNVNSDNQIRQLFFGGIENRNKRGETWPQSKTFKVPNDEGIATEGKKTPKSRTIKLFTIVEDLKIDMFTPTGWPSVNGDVLRSLAGKIPTDHIYKIDDGQEFDEDGSSLELPEQDIEDTSPYGTAYEAFGGGKKGREACHAIAALCEVFSIDKLISGFIVPLQGDRISCKEGRIHCSLNINTETGRLSARTPNLQNQPALEKDRYKIRHAFVAAPGNTLIVADYGQLELRILAHLTNCKSMLEAFKAGGDFHSRTAMNMYQHVRDAVEEKKVLLEWHPQPGQDKPPVPLLKDAFGAERRKAKMLNFSIAYGKTAVGLSWDWKVSVREARDTLKLWYRDRKEVSAWQKKQKAFALEKCEVYTLLGRSRQFPNMTHAGPGQKGHVERAAINAPVQGSAADVAMCAMLEIERNARLKELG

SEQ ID NO: 35796 - protein, 207 aa, Oryza sativa
MNTFFKMACQSSCEGIMLKILDVDAGYSASKRCDSWLKVKRDYVGLGDSPGLVPIGAWYGNGRKAGWYSPFLMACYNPEYEEFQSVCRVMSGFSDEFYKEMKEFYSGDRILPKKPVYYKTDELPELWFSAEQVWEIRGADLTLSPVHHAAIGLVHPSRGISVRMPRYIRSRPDRSPEDCSTATDVASLFKAQTRKMEVSSDGQDTSH

SEQ ID NO: 35797 - protein, 185 aa, Oryza sativa
MASRCLVTTGFEDECREIHDACNQPRRLSVLLAHRSPSERQKIKATYRTVFGEDLAGEVQKILMVNQEDELCKLLYLWVLDPSERDAIMARDAVENGGATDYRVLVEIFTRRKQNQLFFTNQAYLARFKKNLEQDMVTEPSHPYQRVALACCLPFYLSFQLCSLPFSQLSSTPPLLSGDNSSSYW

SEQ ID NO: 35798 - protein, 235 aa, Oryza sativa
MEYQGSNTRQLSTALYFAFSTLTFSHGQIIKSPLSKIVVVIWCFVVLVLVQSYTASFSSILTVKRFQPSVTDLDQLLKNGDYVGYQEGSFVNSFLTRRGFGERRLRSYTKKQEYAEALRKGSKNGGVSAIVDEIPYLTAIVSDPHYQKEFQMLKRIYKTPGFGFVFPPGFPLVHNLSTAMLDVTSGDEGSRMETKWFGAEAVSPSNAIPNTDSAPLTLRSFSGLFIITGVSQLSC

SEQ ID NO: 35799 - protein, 39 aa, Oryza sativa
MNSTKQNYLVVSYLTIQIVKPRHCHVLIFRLAFKCPYKP

SEQ ID NO: 35800 - protein, 160 aa, Oryza sativa
MEKSSEDQDSVTYLNTLLACSHSGLVDDGMLVFRRMVNDKGIIPCPEHVGCIVDMLARAGRLEEAAGVASLTHNKLGANAWKALMGGGHLHGDMKFTKVAAKKVLTTESFDYGHVVLLSNAYASSGKYRAAESVRSCYAKRITRKTLGLSSIEIVPYSRR

SEQ ID NO: 35801 - protein, 275 aa, Oryza sativa
MFMYSYNDLPKEYKSCLLYLAIFPKGQKIRRSTLIARWVAEGLTFKEDWPSSVYQANRCFDALIRRWLVYPDDISATGKIKSCVVGDPVHGFITAIARKQHIVETRLSHHLARHFSIFNDLRLRSSDRIGTFFQGLSRSSRVSLLKVLDLEGCQCFASKNQRYLKDICNKMLLLKYLSLKGTDITQLPSEINCLRELEVLDIRETKVPANATVNVLLLKLKRLLAGASQIDPTPRNFVTNVRIPSRIDKMINIEVLSNVKASTMIIWKILGSYAS

SEQ ID NO: 35802 - protein, 443 aa, Oryza sativa
MSLKQQKLDQRKASEISGDTRAWNSFYMRQDTVAENIARKNGISKSELLDREADDLAVRIALGETHVIAETKKYLSRSGVNVAALEELASKRNEKFKRSNHVILVKNLPYSSCEEDLATMFRKHGSLDKIILPPTRVFALVVFVEATEARHAFKKLLYTRYKDTPLYLEWAPENILSPTSAPVEDDEKDVVGDRIVTKAIVEQTVEGVSAEEIDPDRVESRSVFVKNLNFKTSDESLKQHFSTKLKSGSLKSATVKKHIKNGKNVSMGFGFVEFDSVETATSVCKDLQGTVLDGHALILQLCHGRKDGQTKKNEKDKSSTKLLVRNVAFEATEKDLRQLFSPFGQIKSLRLPMKFGSHRGFAFVEFVTKQEAQNALQALASTHLYGRHLVIERAKEGETLEELRARTAAQFVDEQSGFQRLSKKRKQTSLVDEGSVKFSRIVE

SEQ ID NO: 35803 - protein, 60 aa, Oryza sativa
MYCLDCMNGALCSQCLSYHRDHHAIQIRRSSYHDVIRVSEIQKVLDITGVQTSSRWWCRS

SEQ ID NO: 35804 - protein, 68 aa, Oryza sativa
MTCMGRTFIFVLRTSSVSKNFSFVISFGSIVTVPPRLKYLSSNSLHIFLRCSSFKFSHSSRSKTLSSS

SEQ ID NO: 35805 - protein, 833 aa, Oryza sativa
MSDLGPQWSKDELMRFYEAYRRHGKNWKKVSASVGGKSADTVEALYSVHRTFLSLPEREGTAMGFVALVTGHHNVSQDESKSHKGSDQTVRASGKVRKREATGQKEKEAPHAHRSYHERRTSGLSSFKKRYYGELVKNIPRHPSGKRTPRVPVIFPADMNVAHAGIPETENAINCTKKASGATNNELECSSHGSPGISESAKFVQGQTFLEAKGTGSLKKRRIEQSMEQGQTIKDEHKTAMVAKEGNDLTEYQRLTNLFSPDEMLVLDVLESLVTVPSKISEPKINIPSGTLGRDDSALSHRREEGPSVKRSKQGKQVGECSASKTRNKRRKKLIAEEVPTEGVTSNHLDLPEERQVDATECALNSDLERGTVDLPESTANISTKIPDLPSQLKPEINMSRRSKRKSKSPCGSKYVVCNGADNLQARRLQHCLSSESLRRWCTYEWFYSAVDYPWFMDNEFVNYLNFANLSHLSRLTRSEWSTIRSSLGKPRRFSDHFLAAEKDKLENYRKKVRQYYALLSEDSWDSLPPDLARPFSIGQQVIVRHPSTRELCDGKVVMMEQDRYNVQFDRPDLGVDEVKDTDCMPVNWLDNLPDDLKKRSFLSNNSHNRVEVEQIPKFTSKENWDHISGEAEPSKTMHITSDEQVEIAVDIERLSNKSTSGNCGPLQPLQSVDDNVRSRGLSEHRNGHNDELDSYITSFVQMSLAQAKQMVDEAMKEISENGKSSLEETGISNEATDCTGPEPESAANSELPRNLIFNCIATLLAIKHFSEGRHPPPNIAGVLERACLMLRPSCAENLPIYNEIENFIAVIKNQILALVPSASSNARLPMYM

SEQ ID NO: 35806 - protein, 340 aa, Oryza sativa
MRSTQQDLYSELEYEQDVGEDPEERQMVSLNRLFEKHRDVSLNRLLEKHRDEEMQESCSTDKEGEEDEKIDTLSFEQSILKITSMKLGNLWNNPNQLSEEMVRCMRNIFLRLSESSKMLPKESSDCSSSSAERLSGSTLASFSDSSIIPSMLRSPSVDSNRNDEMTTEASNFDPYKVNGKESRRDIGNYHSAAEVSWMSVGKEQLEYASEALKKFRFLVEQLSKVNPNSMNCDERLAFWINLYNALIMHAYLAYGVPRNDIKLFSLMQKACYTVGGQSFSAAEIEFVILKMKTPVHRPQLSLMLALNKFKILRSTRNTRLMGQNPLCCLDSAAECSLHPP

SEQ ID NO: 35807 - protein, 446 aa, Oryza sativa
MTRFFRGLNFNIQAGLVNVTYNHIGQLFMLACIVERKILENPMEQQDMLVPPIADVLQEVQKSLQNEKNDMFEMSLPSLANEEKADAATLSEESSQGRLNGAERNEGEYSQGELHLSTFHAILEQPLVESITELPLSQVDLLAVPCDKEELCDNVSLISMPQLVNEHVSSTISLCADSKHVVHIANEVEERELLSSLNTLGYVQFDDFCELGNLKEKLFAKSDLPCPTNAIFHIFGEYNDRGIFLVHRVYICSDLEHLVVPDKICKLEKNVIANQIVSSLPCFDWKKQVVVNGLRKEHHMEKPRTVFREEGEDDVTMATTDATIAHIMDEQEDIEIKYSKCWNPIRPPTTLLTSNGHRICIRPPFSAREYLMESSRSPLSNGSSLFSEFYLVWPESQELGVASPIMGLWACNFIWDPGPGGAHVGCAPSWWSTTLGTPRSSSHPYI

SEQ ID NO: 35808 - protein, 263 aa, Oryza sativa
MHEYPFSIVEHEYFVDFIKSLHPTFPIKSRITVRKHILDMFLDEKKKMYEYFKTLACRFSTTMDMWTSNQNKGYMCITVHWIDDTWCMQKRIIKFMHVEGHHSGKNLCKEFYDSVLDWNLDRKLLALTLDNASANDVCARGLVEKLNDIQPLVCEGIFFHVRCLNHIFNLVAQDGLKQISSSVSNIRNTISILNSPLQWSEFMKCASECDGLDTTCGLSLDVPTRWNSTYIMLKQAIHYRNAFNRLFLCHRSKYHKCAPKDDD

SEQ ID NO: 35809 - protein, 47 aa, Oryza sativa
MLQLRISRKGARMSSHLLLNSLTTHPSEVIVWKWHAQERLINCQKRR

SEQ ID NO: 35810 - protein, 42 aa, Oryza sativa
MHIYIDQTIRYYLFYFKFRNTRIIGVECTNPIIKSLQMHAAN

SEQ ID NO: 35811 - protein, 232 aa, Oryza sativa
MAQFSFGGSPLQSPRGFRGDQDSRHQCRFEHLTALEATHQQRSEAGFTEYYNIEARNEFRCAGVSVRRLVVESKGLVLPMYANAHKLVYIVQGRGVFGMALPGCPETFQSVRSPFEQEVATAGEAQSSIQKMRDEHQQLHQFHQGDVIAVPAGVAHWLHNNGDSPVVAFTVIDTSNNANQLDPKRRVCVHMLHTSIMNIPYHYFDFNDNKMLMCIVYYEMINGLGVFLGWKA

SEQ ID NO: 35812 - protein, 67 aa, Oryza sativa
MREIESKEIFQEIGALAKFPPKSTCNVPFHRNFIGFEKFQSFESNDLCRNFIGHKSFDSQGLNGHWL

SEQ ID NO: 35813 - protein, 531 aa, Oryza sativa
MYERFSCSLQNMVGQVMCTAGMVSIICIISDSHFMHANFYFDDIFNPSSDTFDENTPPLSDPNYISSLGAATFRGMQSGDDDAIWLMQGWLFSYDPFWEPPQMKAPLHSVPVGRMIVLDLYAEVKPIWINSDQFYGVPYIWCMLHNFAADFEMYGVLDMVASGPIDARLSANSTMVGVGMSMEGIEQNPIVYDLMSEMAFHHRQVDLQVWVETYPTRRYGKSMVGLQDAWKILYQTLYNCTDGKNDKNRDVIVAFPDVEPFVIQTPGLYTSSSKTYSTKLSKNYIAVDASNDEYEHPHLWYDTDAVIRALELFLRYGDEVSDSNTFRYDLVDLTRQTLAKYANQVFVKIIESYKSNNVNQVSNLCQHFIDLVNDLDTLLASHEGFLLGPWLESAKGLARDKEQEMQYEWNARTQITMWFDNTKTKASLLRDYANKYWSGLLRDYYGPRAAIYFKYLILSMEKKEPFALEEWRREWISLTNNWQSDWKVFPTTATGDALNISRTLYKKYLHDADLIQPEGIIRLRNLKNTPW

SEQ ID NO: 35814 - protein, 369 aa, Oryza sativa
MVKTMADSGTTAEQIESFIVNNQNVPDLPEHEAVWSFSSLIIADQDVDCQRTEFQSICDSQKTEIRSTCELNISKHQRTSGVASSWPPNDWKTAPDFITSHNSQFTPNQETNLNNVVPSLDLTKTQCENSEDIVGPVDLEGDWITEDDFGSENTVLAERIGATGDEPHMVMSINSANLPAYLDLETGSSANSVVDIELTEFNDKLANVSEKRDRLCIKAPDRDKLLRIGKQGEAAAHQHFVDHFGSNNVRWVNQENETGLPYDIVVTHKSGFTEYVEVKATTNSYKNWFYITLREWQFALEKGNAFTIARVVLKDSKKANDKSNVLILKNPYKLCLNKSVYLALIIPQQYQTKRRYFEGNSDLQSEVNH

SEQ ID NO: 35815 - protein, 74 aa, Oryza sativa
MQRKRRDDDGEPAKRSMGRRCGGGGGGHGWQLGLYYCLVVACSCVVATQAQAHQAPRTDPVEGICYVLPHPIMF

SEQ ID NO: 35816 - protein, 29 aa, Oryza sativa
MTWLVQRALRAVFNITISPNQPVVEIKKW

SEQ ID NO: 35817 - protein, 202 aa, Oryza sativa
MGCPNWSNATIASRKEDSAAAQPDHGILMIAHVGCGTWSRHLSVDIGQFTTAQSTWNRCLVDSCSVVNMARFCIPDSQTWNMIPLSVLFNSTMDESNPRDENEILLLSVYCGSLCKYLTVASGRASVFVLRARTKNLKSWDHAVGVICVQEAGGQISDWSGKPLDLAADLTGRRDIYPSGGVLVTNGALHGKLVEMISANHK

SEQ ID NO: 35818 - protein, 150 aa, Oryza sativa
MRKLQSTYPVYFLTNGGTEIYADVRRNSLEEAIKLCLASGMQGIVSEARGIFRHPAAVPKIKEANLSLLTYGTLNNVPEAVYMQHLMGVNGVIVDLVQEITEAVSELITVPEPDLNADNLSNGAAKDAATPHFSQCEISFLLRLIPELVQ

SEQ ID NO: 35819 - protein, 131 aa, Oryza sativa
MLERLANHSFFCFLDGYSWYHQISIHPEDQSKATFTCPYSTYAYRRMSFALCNAPASLQRCMMSIFLDMIEDIMEVFMDDFSVYGNTFGHCLQNLNKVLQRYQEKDLVLNWEKCHFMVYEGIVLGHRVSER

SEQ ID NO: 35820 - protein, 734 aa, Oryza sativa
MSFLQYSSLVPDYTGLREDAKCSMVLSMHDLMHDLARCVMGDELLLMDNGKEYNSGEGNCRYALLINCVGQTKFSYSSTKLRAMRFFNCDGIQLPLFTKSLRVLDISKCSCGKLPSSIGKLKQLKFLSATGMQHKTIPKHVMKLSKLIYLNINGSLNISTLPTSVNKLRCLLHLDLSGCSNLCSLPNSFGDLTNLLHLNLANCYDLHSLPKSFHRLGELQYLNLSRCLSLNLMVDINAVCCLTKLQYLNLSRCSSLIHLPETIRGLKDLHTLDISGCQWIEIFPKSICEITSLKFLLIQGCSPWLEKRVRESQFKNDMLALPKFIVQRAAFGMCSNISRLQSVHPAELEIECLENVTSIGEVDVVNLTYKSALSKLALAWTPAAERFVEDEDLLRKLQPPDTLKVLQIQGYMATSFASWMMNLASRLPYLVRIEMVDLPRCEYLPPFGQLQHLELLILRRILSLRKLGGEICGGNGAFRKLREFTLVKMDNLNEWITKVSANGEFMFPSLHKLEISQCPILRLNPCLPRALEWRIEASDQIIADFYHTGSSSSLVLSKMHIRSCRLLPNDWKLLQFLPDLQVLELTHCWFYELPKSIGYLTTLRSLRIDGCDSMTKLSKWLVSLSLLHELIITGCLNLVYLPAFVQKLSALEKLEINDNDALQRWCRNSDSWISENGIKNKIYFDGKLMSTKKQEDTADIDRTDVRDYRNPCDEDEYVDCFAMLELGESSRMGR

SEQ ID NO: 35821 - protein, 132 aa, Oryza sativa
MVAQNIEPQQMHYACMVDLLGRAGQLSKCAEIIRDMPFPANSDVWGALLGACRIHGNIELAQWAAEHLFELKPEHSGYYTLMINMYAETGRWNEANKIRKLMKSRKVQKNPAYSWVQDQDGNKLQAFLVGDG

SEQ ID NO: 35822 - protein, 528 aa, Oryza sativa
MKSDPPIAQRRSPRQHTVQGSGGPTIRSDPQPQTSKPAGQTGSRKRKLVLNDDEGDDSNKSGDKGTPNKLPKHTMPRKKLAGRQMPKIRTSSRKPSDIDPTRKNPDPTATESNLSKDADPTAENQSTAESQPTGAHASDDKANPSDQPPTGNQSAATETATTQEPPTGNQSDVGLNQEIPEAEAQATTSQGPKAGNDSVIGSPDKEQRSPHAQLGASSGPLGGDEEEILRIKAADDSRPPILLKWWDENSQVSGIVINRQKEDEEVCQLKKVLGEATRIVNRIHLRNEAKTTTLEKLVPHLGTLEAVREQLHEAKEHAKKTEKELRERIAQLQDSNFELSGSSKAQATRMAQMEKQIEALKRDKVELAAERDSALKEVEDRKIKSQAQFDVLVGKIKKLEGARDEVANVATPLVQAMFLNNSGPSALDATEIFDKLRVAPDVYFKNIKKAGSMGASMALAMTKSLYPRIEIDTIDGFADGTSEEAALDLISNAQSAADKIASDVVEQFRNNDLQPSNNNSDDERTDSD

SEQ ID NO: 35823 - protein, 110 aa, Oryza sativa
MAAGVTFNWIKTPLDIRRFHDFSSLSFRCRNTFGSIQPSWLTTDQEPSFSKVRVAADYSDSVPDSKYTRDRGYHPLEEVKERPKKKDLSLTDVETARTVVEVPWCIYTFV

SEQ ID NO: 35824 - protein, 52 aa, Oryza sativa
MKIYICTFYTYKSHRISKLMHCLSLILLVSRFSSLYACVINNQIYTLFNYSG

SEQ ID NO: 35825 - protein, 200 aa, Oryza sativa
MRSSPAASGTTPSNMDSGSESDSAPEELTAVQGVEKHDEISKVEKDSAIRVSQQEKERRRRWAQRRTSSKPDKKEPLEVEDKDIKQKAENEEDEESEETHTMPGMLPTNVIEMLAAREKQTFSSDSEEEITNQKVQKRKKRLKSSGPETILLKDVRSTQHVKNALAFLEQRKNQVPRSNAVLKNANKALRLLSSKGNFLS

SEQ ID NO: 35826 - protein, 427 aa, Oryza sativa
MASLVGIDFSAKILASLAKLFEDEYSKEDGLSLRNLTLLLCYLCIFDVISSDLVYDLLSVLSKRLTELDVSTVLTILQCCGMKLRGDDPSAMKDFVLSIQNSVNQLKLKAHPAGQDNGQAEMHSKRMEFMLETICDIKNNKKRPKEDPAHHTRIKKWLQKLKAEDVLLRGLTWNKLLDPDKKGQWWLSGDVSSTVGNIGEVAAVISKEVVEAQKLVQLAAAQRMNTDIRRAIFCIIMSAEDYVDAFEKLLRLDLSGKQDREIIRVIVDCCLQEKMFNKYYAVLASKLCSHDKNHKFSLQYCIWDHFKELDNMELNRSMNLAKLVAEMLANFTLSLATLKVVKNLAVEVIPKRTIHFRMLFETLLQKDDAVVWNVFTRIAGLPELEILRDGLVLFIKQHVIAKDTGKDLASKFKIAKKALDNTAGVLM

SEQ ID NO: 35827 - protein, 43 aa, Oryza sativa
MDMQEGVLLGVCRGCVCSREWIPRQVRGGCGHTCANSGNGYKG

SEQ ID NO: 35828 - protein, 46 aa, Oryza sativa
MHRPNLHGHTAVPSYACTWQRLLSTPSRLVICTAPWQSPSYHACSS

SEQ ID NO: 35829 - protein, 88 aa, Oryza sativa
MSWMDVGIGQLVMASIFVGSALMPSSETMYPNQTRSHKLALLEIDIEFMLFPITLLFSFFHSVFSICTVRRKDGEGTWEYVLQGMPTK

SEQ ID NO: 35830 - protein, 265 aa, Oryza sativa
MKARQQTERQARRSRVKSDLQIKQPKLKQQIQPRSPSSACSSNLPSQLRKNRENMGKGIRRWTKKEEDYLVQLTKDPEMAELFDGGNYEAVVSELKVHNELQKDKAAAMDTYLGRHDKKKDDEMARTREVTERIMALSRECWVTEETPKLWVGMLKMLKDRDAVNVFELSNPEGRKSLLEHLAREDVRPEPADTGDEDFEKELDRVMMEYFMDDFADTVFLYGVCCCMEVLSGGLGVPKPDWLPGALQGDQVPSSRVSKRRRTRM

SEQ ID NO: 35831 - protein, 316 aa, Oryza sativa
MKLLKGNVPLLTSVLNVIASTMRLSMKRKIYQPHFSLSLHGIHKLCRTIGGISRSIEVKLAMQLGIDVILMNGPLPVLSEMDKSMTATVVSWATSNIFWLCDEQRSVLKMPHEEPLKNECLLSKMLRWLVASIILGKISCISHEKCGDLTRDANNFGSLESFLNYTYDEKVETVGSHSADEALAIIILYLQKHLKMNRDFLPSVVAALCLLLLDRSNKQVIRNFIGDYGQIEMLCSQIQCPAEANPAWRWHYYQPWKDPAMHRNEAEHLEEEQACQSLLVMFSNSFSAGLSGFPVLSLGDVEKSGLFQWERHSILK

SEQ ID NO: 35832 - protein, 142 aa, Oryza sativa
MDRSKMARANLKISGHGHDTTGVPTSFTQCFLDLGQGVSSHLDCEGQFCELENLLDAKIYRVSDREEIELCVPSAKEMYRFYDPKTICFEDLSEELGVLCPKYDALITELQNKQSYMYEDADDITKESRRRLSNFSKNLLLP

SEQ ID NO: 35833 - protein, 316 aa, Oryza sativa
MTKELSSVPDSGAGRVKHLVQAFESILSISGATSDADRAGEGSWALPGLQAWKEDCEGKIGMPPVSVSSSAEFLNAGPNRLCSSLDGKSDRLSWDSRTSAGGCRSRRNTSESLRSSWNKKLKVTSQHPFKLRTEQRGRVKEQQFIQKVQEMLMEEEQQRIHIAQGLPWTTDEPECLIKPPVKETTEPVDLVLHSDVRAIERAEFDQYVSERNKFAEQLRLERERQQKLEEEEMIKQLRKELVPKAQPMPYFDRPFIPKRSAKPATVPKEPKFHPRPEKQSCLCRQRCMDTGMLISSCLHDQSTVLAEKSKALPRMF

SEQ ID NO: 35834 - protein, 56 aa, Oryza sativa
MVPPVIRTLRLVVRAAAGYKSVVRCSSLSSFISLKYACSWLIACYCTCSKITVLPI

SEQ ID NO: 35835 - protein, 35 aa, Oryza sativa
MPLSLHHTLEVLTLTIACRHVVENCVRRSSLASTR

SEQ ID NO: 35836 - protein, 37 aa, Oryza sativa
MLWVACKEPSMRAMISLSALIQFQTCVVGFVSSRCSC

SEQ ID NO: 35837 - protein, 415 aa, Oryza sativa
MSFAFLGAGRSRGSREGKRTNLLLHLARDEKERASSIDEQQIDGALGIALFFSFFLLASSDPFVRNFFVCTEPLAESNPVPQDPILAIHPPCIYAGDVASAMGFGLCRSKMMNGIVALHSPPMRKDAAEKNGTLLRSAGCVGSHIRSSLFTRSFKHFVGGAPALLLRSNRSLLMLLRRRFFAFSSLWTGALMDTGREQAKRVVRNGKKDTTTSPLCWTAGANTVVSDQDQEPIRIWILTCWLFLTVGISPGSWWAHHELGWGGWWFRDPVENASFMPWVLATACIHSVILPLLHSWTLLLNILTLPCCVSGTFSIRSGLLAPVHSSATDDTRGRFLWWFFLLITGISMTLFYQMKQEASVRRTYKKEMVVARSTLVHLRHSARAQPRPVMLWKNLAYCWAGYSEPATGCRISSRP

SEQ ID NO: 35838 - protein, 368 aa, Oryza sativa
MFSVGMVICDGEGHLNEKSILLQGSVEHSRGQHVRLDLKDVDRFSLFPGQVVGIQGHNPSGHCFVVSKLNDSIPNFVDAQLPRAKKQAVDSEGNQSSDVVSRVLSSVIAAGPYTTSDNLLFEPLQELISYASRKQPQLLILMGPFIDSDHPEIKKGAVDKSFQDIFLFEILRKLQDFTQYLGHNVRVILIPSVRDAHHDFVFPQPAFDLNLPEDITHQITCLANPSLFSCNEIHFGCCTMDILKHLSGEEISRKPPGEKHGDRIGRICTHILKQQSYYPLYPPPAGVPLDFSLANGALEIASAPDVLLLPSDLAPFVKVLSLDESSEEPKRFICMNPGRLAKGIGGGTFVELNYNEDTDKTSASLIRI

SEQ ID NO: 35839 - protein, 151 aa, Oryza sativa
MVPMVLTSARNCFSPWLSPSSLFTAMAVESGSFPLNTVPKAPPPSFSEKLLVTCCRSLYRKAISAPPVVLDMRRVLSRRHFWNTMNNTIARIIKAAATPPTTAPMIIFLLFLESGSSDAASLRKSVPPPFPLYWSWRLIKSPCQTKQPLLL

SEQ ID NO: 35840 - protein, 225 aa, Oryza sativa
MDRRPQGGWQPVKRRFGEEGRGFRDLTEGELRERLQRERAREGEREGSRERGGEQRGPRCFGSPVGRREGGRGAGRGDENWQGGRPDVARQGGGGDGGWHGGRGDGGRLGGGRAEVIKCFKCAQEGHLQIDCPNPPICYTCKKSGHIAAECSNFHRKGIHLCGCGIAGQCFNSMTIETDGGEDDQIPIRGILTVISGEGSVDQIEWKLKYKLFKGVVGLEGDCNQ

SEQ ID NO: 35841 - protein, 112 aa, Oryza sativa
MRFSEALTTRNLSISFSNLIAFFGRIKGHSFSIFSLWAGFNSLFLAQINTLCPTSLQNLFPAAPFCIPWLYALSTYIDNSGFSRNLNNSSFISRSILNLRVKKSFHESREHL

SEQ ID NO: 35842 - protein, 538 aa, Oryza sativa
MGFFRTVLGFFGFGVGVTMGLVIGYYLFIYFQPTDVKDPVIRPLVELDTKSLESMLPEVPHWVKNPDFDRIDWLNKFVENIWPYLDKAICKTAKEIAKPIIAENTAKYKIDSVEFETLTLGSLPPTFQGMKVYTTDEQELIMEPSIKWAGNPNITVVVKAFGLKATAQVIDLHVFALPRITLKPLVPSFPCFAKIVVSLMEKPHVDFGLKLLGADLMAIPGLYVFVQEIIKTQVANMYLWPKVLEVPIMDPAKAQKKPVGILHVNIVRAVKLTKKDFLGKSDPYVKLKLTEEKLPSKKTSVKRSNLNPEWNEDFKLVVKDPESQALELTVYDWEQVGKHDKIGMSVIPLKELIPDEAKSLTLDLHKTMDANDPANDKFRGQLTVDVTYKPFKEGDSDVDTSDESGSIEKAPDGTPEGGGLLVVIVHEAQDVEGKHHTNPYVRIVFRGEERKTKHIKKNRDPRWEQEFQFVCEEPPINDKMQIEVISRPPSIGIHSKENLGYVVISLADVINNKRINEKYHLIDSKNGRIQLELQWRTS

SEQ ID NO: 35843 - protein, 259 aa, Oryza sativa
MGGQSHDGTTEWKETWWEKSDWTGYKELGAEKSGKNGEGDSWWEKWKEVLYQDEWSNLARIERSAEKQAKSGAENAGWYEKWWEKYDAKGWTEKGAHKYGRLNEQSWWERWGEHYGGRGFVLKWTDKWAETDLGTKWGDKWEEKFFAGIGSRQGETWHVSPGGDRWSRTWGEEHFGNGKVHKYGKSTTGESWDLVVDEETYYEAEPHYGWADVVGDSTQLLSIQPVERPPGVYPTIDFSASSPAPPSDDPPGMPPSPLE

SEQ ID NO: 35844 - protein, 377 aa, Oryza sativa
MAETRGVGGRLAALASKVDSKIYYLKDVLVEYMDMKNVVAEIAEERERFQLEQRGNDALLEAMKEELVAANNELEAAKEEISRKNNELESVKKQLQESEARNIQAEQQSGIVVELMQPRGVQTRSMQKRKRPLQGPSGCEADDQEYTSQINVQSPRCLESMRTPDVKKRSVQKQKHLSQGLPGDPGELQLMEGHLSDPNAGEASGALVSKDDDLEAVREELIKGFLDIDNGGRKLGIKEMGQLNEKVFQIACLAKLPPEEVGEASYELYSSWQKQLSDLSWNPFKTITVDGNGKEIVNVDDEKLQELKRDYGEGAHKAVMNALMEMKEYNVLADRSIAYELWNYKDGRKATLRECVEYVCNQVKQLTVTKRRKSRRW

SEQ ID NO: 35845 - protein, 431 aa, Oryza sativa
MGAVTSLMYGAEDPSIAGMVLDSPFSNLVDLMMELVDTYKYPLPKFTVKLAIQHMRKVVKRKASFDIMELDTIQVAKRCFVPALFGHATEDDFILPHHSDKIYESYVGDKNIIKFDGDHNSPRPQFYFDSITIFFHNVLNPPDVPDDHYFLTPHGSLGQGHWDTEHDIEYRFAQSPTARTATTEDAIAQLRSRRLMSRMEVPTGATAEDRADRNEVMDSDNGPSSSSVSTATPPNGRNGRLLTPTSDDGEYVEYSFDSLSDMPYTEEDEDRMLMQAIMESLKDLELSNTKAAQSAASDAASKENKENGCNGATVTVLEPDASSTSARPTPTDAPGKDVTTCSTKAKSPEVQSASNHTTNNAASVNTSSSLESNASTHVTNGKSTSSESQKPTQNANGEDGTRATLVVQKSRTGSLMDGLTHKWGSLFKNND

SEQ ID NO: 35846 - protein, 132 aa, Oryza sativa
MVVPYRTAGARAVAFVVVLQDSNVLRPRSERACRRTTAVPFFSELERCHLIHGKRVKLSLRVEALKEKDRETRRHRNHGNPGGRKTMYGIRDPRSRLDQNPAERGQPLEATGGETKRRLRLFLSSSRHKKRD

SEQ ID NO: 35847 - protein, 461 aa, Oryza sativa
MQNAMKAPSKRSKIERKMDRIIYLLLSALVLISVIGSVFFGITTRDDLQDGRPKRWYLRPDDSTIYFKPTKAAISAILHFFTAMMLYGNFIPISLYISIEIVKLLQALFINQDIHMYHEETDTPAHARTSNLNEELGQVDTILTDKTGTLTCNSMEFIKCSIAGTAYGRGITEVERAMAKRKGSPLIADMASNTQGSQAAIKGFNFTDERVMNGNWVSQPHSGVIQMFLRLLAVCHTCIPEVDEESGTISYEAESPDEAAFVVAARELGFTFYQRTQTGVFLHELDPSSGKQVDRSYKLLHVLEFNSARKRMSVIVRDEEGKIFLFSKGADSVMFERLSSSDCAYREVTQDHINEYADAGLRTLVLAYRQLDEAEYANFDRKFTAAKNSVSADRDEMIEEAADLLERKLILLGAAAVEFGHALRQFSVRSTGVGVSARRDARDLHLPPPSQSHSHSQTTST

SEQ ID NO: 35848 - protein, 49 aa, Oryza sativa
MENIQFLNTTQERFWLDANGLDRRKGHKNPLLNLLVQLYVKCWHCLFEI

SEQ ID NO: 35849 - protein, 46 aa, Oryza sativa
MRKISCIEPKNRGIKGIISVTFAYLLDHCCCLDLGILAVTPRTFTF

SEQ ID NO: 35850 - protein, 161 aa, Oryza sativa
MNWLAQFQGVVDCTRRTITLYQGPEQPVVFFAPPTSVGSSELHQIGLSEIPIVSEFGDVLPEELPGMPPKREIEFRIDLAPGTTPLYKRPYRMAANELAEVKRQLEELKEKGYIRPSTSPWGAPVIFVEKDKTKRMCVDYRALNEVTIKNKYPSPRIDVTS

SEQ ID NO: 35851 - protein, 73 aa, Oryza sativa
MLIFGGISSMSVIINLYLSRLWPTLQRKSDLLEIKMLWSVSVAPCLATVKEYIFFWLSFLYIAQFKITQSEKS

SEQ ID NO: 35852 - protein, 201 aa, Oryza sativa
MESDEDAKKGYADFEERVKRTIYIDHLSPQVTSSVIEAAISQCARVVNVDFIVNYTIPYDIPSAALVELDDEIQAKAAIDLMNNFPFIIGGKPRPVRAIYAKHEMFLDRPPRPGIKKEFQWVKQEDGIEYEGMNKLRLLARRQETENMALIKNLLEEDKDLAKQQQELLDGIYKKYCILDSDVMNDIKNLSRRYGVNLAGD

SEQ ID NO: 35853 - protein, 227 aa, Oryza sativa
MYPSLAAAKAAVIAIGEEIATFGLPSGICPIVFVFTGTGNVSQGAQEIFKLLPHSFVDAGKLPELSAARSLSQHPQSSKRVFQLYGCVVSSRDMVTPKDPTRCFNKADYYAHPEHYKPVFHERIAPYASAIVNCMYWERRFPRLLSIDQLQQLMKNGCPLVGISDITCDIGGSIEFVNKSTSIERPFFRYDPCTNSCHDDMEGNGVICLAVDILPTEFSKEVGSFIE

SEQ ID NO: 35854 - protein, 365 aa, Oryza sativa
MPTGNTSQNMTNSRHLELDVWAKEREVAGLKASLNTLTSEVQRLYKLCAEWKEAEDSLKKKWKKIEEFDARRSELECIYNALLRANMEASTFWEQQPLSARGYASRTIIPACNAVVDMSTNSRDLIERELSAFGQSLDNSLCRLPATPQALLEALGSNGATGSEAVAAAEKHAALLTARAGARDPSAVPSICRISTALQYNSVSPGTEGTDSGLASVLNSLEFCLKPCGSEASILEDLSKAINLVHTRRNLVENDRVLLNRAHRAQQEYERVANYCLKLAGEQEKMVSERWLPELRNAVQEAQRCFEDCRRVRGLVDEWYEQPAATVVDWVTIDGQSVGAWINLVKQLHMEISRRTLAISTAGDD

SEQ ID NO: 35855 - protein, 214 aa, Oryza sativa
MESFSNLLWKSAGATPAIRLSREESGSDTRLNSALGFFVFFLRTICNSWKDIHGPEGFSPSFEVRIKLDVPQIGNLRLFWSYDWWRSDWSDIVRVRDLLLKLFLRDGSVVRQTQVAISQKPSSLDRFSVRPQGFGSTSMVSAGGGGDKGIIKAMITHPKPSEEALIVPTNKSLVLQDSMVRTDLPPGAKVDPKVKTIVQRLLSTLEHEGARSQS

SEQ ID NO: 35856 - protein, 34 aa, Oryza sativa
MIFFVTRLFHITEKKFPFFYSSFLFQKLHKQTFK

SEQ ID NO: 35857 - protein, 327 aa, Oryza sativa
MALMRRRVGGYICSELCGSVMNQRLYSSRVDWKQLRPMILKRIKNRAKEYPIKRMIPVAEEVVKAREIVTKGVSTLLQVVPIHSCKFCPEVHIGAVGHEMQSCHGFKRMIKNQPHKWGPGCLNDILIPVESFHLENTFQDEIKHDQRFDFPRVPAVLELCHQAGADIPDEVWHRSGTSSAIVRENDEKPAAFLPEELRFIGQRTIEAWERLRLGVTKLLLVYPSKVCERCSEVHVGLSGHKARMCGVFKFEGWRGKHKWKKADVDDLVPPKIVWHQRPHDPPVLVDAGRDYYGHAPAVIELCMQVGARAPPKYHCMMKAQGLAPPIK

SEQ ID NO: 35858 - protein, 291 aa, Oryza sativa
MMAAVQSSSWADLQPELLGLVLTRLPSLADRVRLRAVCRPWRSNARLQPLPPPLPWLTLLNGTFLSISDGEIHCMPLPDDASCHCSIDNWLFLSHDDGGFSLMNLFSKATLQLPKLDTIWCHHLWYAAPKFPLFYKLAVPSPLDFSPTSLVVALIMNRSHQKALCICQPPVATESFRVEGSTMEGMQDFTFLDGKLYVLNNFNKLFILEIDESHIDYLIVRRYYLVESGGGLLMVTRYVGIVLPLAEPNSFKHSRTLSFKVFEADLTTGSRMWRRVTSLGGRALFVGTHCS

SEQ ID NO: 35859 - protein, 81 aa, Oryza sativa
MDRVTYMAEILIYYSIFLFRFLPYQSHHRMISNYYGVGVELPTCHSAIKCWYEMEIVTLVSCLGLALRAILILMISDAMLV

SEQ ID NO: 35860 - protein, 74 aa, Oryza sativa
MMRKFASFALMVVTLLCVIVGVVLRLTTLLVLIGMTSSSNRRVVGIVGGIFVATARNLPSICVTHVPIPYAKNA

SEQ ID NO: 35861 - protein, 50 aa, Oryza sativa
MCLQKDRSRLFLTVNAALAVHLVKFCLIAVGCLELPASGFRSAVFKKSVC

SEQ ID NO: 35862 - protein, 407 aa, Oryza sativa
MLSHSIDSCKEDQEHLALLDPKLAPVLLLVAYRIIDTDDKGNTDDEYCPIDDEEEELDHGDENSHDEDIVDNDKDDCDLGDEDDNHTCERDYDGSDDAGTEESDDSDDQEEDDTLFFYSIAKRELLSKRVDEFGIHLYWITAQGWLLMVHLELYEIFLWSPITNQKISLPFDEDNFLANNNVVKCFLSHKPSDPNCIVLVVNCRDTMFWYCHPKGDVWFRHEYQSSMISTGEDRENVIATVKHLTAVGGRFHAYLNQDKAILTLEFLPKPTFTTTPVKDAPDPSYWCTFSTCFLLESGGELFTLSFKHPIECVDKVMQIEVHKLNLSQRIWMKVSTIDNKAFLVDCTGFGASLNAEDVGLKRNCIYFVRPKDKGLYVYNMERGITTIHNPGEDLPDNIALEIVMPPS

SEQ ID NO: 35863 - protein, 113 aa, Oryza sativa
MLFSISPKRIPPSFHGPLTEEEMREDPGPEQVGLGYRAVSAVGVTEDVLVRFIVGYDILVDCWERLLYSKYAFLGALRSAAQMVSYEVSIGLILIVRLVSTFGSAKAIARIFP

SEQ ID NO: 35864 - protein, 373 aa, Oryza sativa
MAAAAAAASYSSTSWRVRPGLTPFRSPLQPHPQGRLQRIAIFATRIRIATPSAAMQSSSTRHRLEAVNHDHETIPERLAVVTGGNRGIGLEVCRQLALQGVTVILTARDEKRGKDAVESLCHESNLSNIIFHQLDILDGNSRASLARYINSRFGKLDILVNNAGVGGVAVDQDGLRALNIDPRVWLSGKAVNLIQSVIVQTYDEAVKCLNTNYYGLKWITEALLPLLKQSPSGARIVNTTSLRSELKRIPNEKLRDELRNIDIWDEARIEAMLNEFLLDLKNERLEEAGWPTMLPAYSMSKTVVNLYTRILAKRHPEMRINCVHPGFVNTEINWNTGIIPPEEGARGAVKAALLPQDGPTGCYFDQTELGEAW

SEQ ID NO: 35865 - protein, 234 aa, Oryza sativa
MEGRHSAEILDGHNVADFLDPDILQRCEELEREEGLRLEEEAAQEAFQIDGHELTEEQREILGQIRKKKALLIQEHRMKKRTAESRPIVPRKFDKDRTFTTDRMGRQLSSMGFDPSAAMDRARSRSRGRKRERSLSRAASDGDDMDIDGQQSSKKLRALSRSRSRSKSRPPEEVVPGEGFKDSAQKKKAIKKAKDSVRNRNKEARRGEADRVIPTLKPKHLFSGKSSIGKTSRR

SEQ ID NO: 35866 - protein, 271 aa, Oryza sativa
MDEPTSGLDARAAAIVMRTVRNTVDTGRTVVCTIHQPSIDIFEAFDELPLMKRGGRVIYGGSLGVNSVDMINYFQGIPRVVPITEGYNPATWMLEVTTQASEERLGIDFATVYKNSYQFRNVENLIVELSIPASGTEPLKFSSEFSQNRLTQFMVCLRKQSLVYWRSPEYNVVRLFFTSVAAIIFGSIFWNVGMKRESTEDILLLMGALYAACLFLGVNNASSVQPVVSVERTVYYRERAANMYSSFPYAAAQVYHVPFTGLVPILVVILP

SEQ ID NO: 35867 - protein, 176 aa, Oryza sativa
MPRCRASSLCRLQVSPRRTDHVGVVVTLLCWGTPGSPEARSHRRLPRLLLPPRTAYQIMAAALSPDAADVRRCYCSHDGDTIFLTMAAAPRADDGGYRSTSTNIVGLQIRSAIGGLMYTHRMAATQAEAKQQHAESTPFSNTWCGNVADQPEGDTSSPCFSAMHKKLSMRWLNKSC

SEQ ID NO: 35868 - protein, 503 aa, Oryza sativa
MRIAGKHGHLNVGHKAHSVMLKDSSVDKGAKGDNEIFTVGKEDTSEREQTSEHCSGERLIIPNVVTFHANQEQNDELQSLYKEKHANGSGGGNNLTSGKESDVHRGENACGHNSAARQKTEISKRENRMTDSTHEENMRSGKEKIPRDGSNKGTVKPDLVDGLPPDKHVDVAFVHKTTTNRVDTQQECGYNVAVDVDDNYALQHEPKSPHGNDNLRGTEMDTSGDNSRKTREQKEVTDGKRLDLDRKREAVRMKNARDGHHEDDRTAHPQCVDVKSPSHNDDQRARGASVCKSRKRGTSNRILESRDTVSENSARRQVPVERRNGHAPYSRRPDYSATARRGSPSYPRRRRRSRHFSSERDWSTVPPRGNSPDTEYDGTRYNTEYDGYGSQSGCGYHGMDTLPVDRYYPQEHHNGAYRPQTNFGEEEQAAAYGRRRNDHGWGPDYRRRDSFDWEHRSSARGTVTDRYVPDLEQTNHQIPGQASLQDGYFMRRSRSFVNMHVPY

SEQ ID NO: 35869 - protein, 230 aa, Oryza sativa
MLCIPYLIFFLKISILVFLVFYRIVLPIVQMFSLLTCCSFLITLPPEVQDPQALAHLEGLNFYLSLYEQDPEWVAFIQQELNHNTPLEDIPGRLRLFLMEERTSNVRMDLIQEFLALYARNGAVLPVEPYLLEGALRSYLDSIRATDDFSILQAAYQDLRDHEEGSFFFRDVVSHNRDFLEAQSAKRTWIEVERNSLYSKIERAQARLERTEFQHTLLIFQLEDRKRGGE

SEQ ID NO: 35870 - protein, 68 aa, Oryza sativa
MRLSSKTHVQYSLFISYKLIDGMEGAGLRIINMVNSGNLASGCHQWGFHSAEIVYKMHPLYVPVCTCL

SEQ ID NO: 35871 - protein, 147 aa, Oryza sativa
MHKGKKKLTGLGSDRAKDRELPPAVAVPLLNAPTTIAAMARNTGLPISCYACSLRSEGSREEAKSSSARARRREEARRRGRRRDGIKLMATSVLHRPCTTILRRGRGRRRRAQQPTRRNLPDSSGPSFSAIQMGRIVAEELQWSKSL

SEQ ID NO: 35872 - protein, 261 aa, Oryza sativa
MAAACSFRSVARAPPPLRGLARRGVVHCCSTAPPSGGTSTSSSKLVLEVKERLEREHPGLPTGRNGRDDEEMILWFLKDRKLSVDETVSKLTKAIKWRQDFQVSELSEESVKGLYQTGKAYVHDSFDIYGRPVLVVVASKHFPSKQDPVENEKLCAFLVEKALSRLPLGTENILGIFDLRGFQVENGDLQFLKFLIDVFYYYYPKRLGQVLFVDAPFVFQPMWQLVKPLLKQYASLVRFCDVETVRKEYFTKETVPPDFRN

SEQ ID NO: 35873 - protein, 166 aa, Oryza sativa
MPRYQCLRVCRGKNLLSVSGWKKPSANLPLRETSFSSFGSASPAEIVSVAAEHAGECMEKSRGTRMMKVRSMVNEEDKNEECDFGVWGCWCHDICLLTWLKNIHAASLHLDVLSLRHFCSLALTSTSKPTLLPILVISHYWSTAVKLGILDCTVFKTVTELILLTL

SEQ ID NO: 35874 - protein, 98 aa, Oryza sativa
MLAFRIHDNKVSIVEKLCSVGSSGCCVGAPYNFAIVVKKGQGAVLLEGEPGTLSVHRSIAVRRPSDRLLRRPGEPDGEGECVGGHPVESAGEVAIGGH

SEQ ID NO: 35875 - protein, 161 aa, Oryza sativa
MDGFDSDMKVIVMAATNRPKALDPALCRPGRFLRKVLVGVPDLEGRRNTLAVHLRDVPLEEDPEIICDLVASLTPGLVGADLANIVNEAALLAARRGGNTVAREDIMDAIEREKYGVNGRQENADSERQGLTKLFPWLPKPGNRPTNPDDIGGVMGYHTLS

SEQ ID NO: 35876 - protein, 399 aa, Oryza sativa
MHARTDETAAKVIGRKCSIHYVEEYSRRGNYNRTYDMWVWTDEPRAIPRGGSFAITSADKEGLPTDIPLPELEPLRNPPPSEPKKGWSYDVLIHVDTLEDLHARKAWAYKWDYKVQDDGINFREYPLPCRAEPDPARGPDDEDEDGNDPSRGRYRSRSLWDRLSGRSHSRSRDPNRRDTQRRDQERRGRSRDRERSDHRYRGHRSREPSEGRVDILDILESHLDPMLHEAAVHHSIYSPDTSSPRVSSPVFVPTSTGHAGADTPSACKAMKIDSFINGLATPVQPPLLPAPDVNARKPSRAKVKIPALVSAQRHSERLLCKRRAGAKLENFAQEILSKKFGIIDESASFDDNIKKLYLQRYKKPLSPASLKIIADLVEKGGCKTIGMKNLKKNAAVAPL

SEQ ID NO: 35877 - protein, 33 aa, Oryza sativa
MLSLQFQWIKRRPRVPLTSYLTMTMIFCPQSFI

SEQ ID NO: 35878 - protein, 295 aa, Oryza sativa
MEPAKSINVEMAHKWDESKIYYPSRTDLETFELICSDIECLEPEEYLKSPVINFYMQYLRKSRTCGDLYIFNTYFYSKLEEVLSRMGDHDDSQFSKLRRWWKHIDIFRQPYIILPIHGEMHWSLIIICMPAKETESGPIILHLDSLGLHSSREVFYVIESFLIAEWQHLQNDSSYTIPFSGRIWNHLSKNINKEKVQVPSQRNKYDCGIFMLHYIERFIQEAPERLTRENLCMFGRKWFDPKETSGLRDRIRALMFDAFESARMDDESSQSESHSDDQSGDEDKDRDGVMVVVID

SEQ ID NO: 35879 - protein, 255 aa, Oryza sativa
MIHGPCGEGHPSCACMVNGECSKNYPKEYCEKTTILQNGHVRYARPKNRISTKKNGVAVDNAFVLLHNVDLCVKYQAHINVERVSRDGMEKYLFKYFTKGFDCSEVGLQRKRASGESSTCTKGVNEIQDYLECRCIAPNDAAWRLLQFEIHHTNPSVERLPVHLPLGNSVVYNEDDSLEQVLQNPWNQITKLTAWFEANKTYPEAVCYTYAEFPEHFTWHADGKYWDYRRGTGNVGRLANVGPNQGDSYYLRMLL

SEQ ID NO: 35880 - protein, 44 aa, Oryza sativa
MVLFEGRDAWGGSGASTKRKRRTGTAVMTCEMVMTKRRSTVITT

SEQ ID NO: 35881 - protein, 333 aa, Oryza sativa
MLASAGEDVEDPVLSKLASNSFMFDYSCGGDDSGTEEEQAAFMKELERFYREKLMEFKPPKFYGEGLNCLKLWRQVTGLGGYDQVTSCKLWRQVGESFKPPKTCTTVSWTFRNFYEKALLEYEKHKIETGEFQVAASNLTERITSESQVGIHASGSGRARRESATRAMQGWHSQRLLGNGEIADPIIKDKGTVSVLKKDKTPKSSGSAKRKRTPTLEDDRIVPYKPDKLQNDSMVLDLGPPADWVKINVRRTKDCYEVYALVPGLLREEVHVQSDPAGRLIVTGEPEQLDNPWGVTPFKKVISLPSRIDPHQTSAVVTLHGQLFVRAPFEQSK

SEQ ID NO: 35882 - protein, 144 aa, Oryza sativa
MKTININKRPACSWLKLKNEVSTFGIGDRGHKHAEKIYAKLDEMLLKLREVGYIADTSSALHDTDEEQKEQNLWNHSEKLALAYGLIVVPEGSTVRIFKNLRVCSDCHLVFKLVSMVFNREIVLRDPYRFHHFKVGSCSCSDFW

SEQ ID NO: 35883 - protein, 75 aa, Oryza sativa
MCEAIDEEKDPECLKLSFNLVEAVMKLFPDPSGLAAQYASEVFEILSKYYPIYFTHVCRLTVLTFKAFSCALLFY

SEQ ID NO: 35884 - protein, 290 aa, Oryza sativa
MEGKLEKAQIQHLTDFNNKYGPSIRQSVETAEHNNCALRCLNNYLELMIEEPRFSSIAYVRLDSQVKKLDKENTSAMDLSSSLHQMLQKLNLRVQDEEVWVSQLGSNLQASFRKIMDTSSEIGKLEDEVLQLKVDIAEFAPGEVTSCAVYEMIKTLQIVELFMNNSTRHLKLIDGINSEMREFGSIFNGKVRCLVRFARYQQTNMEKSTQIINFLGDIRAKVDKMTQMYGLSEVVPIVSNQFIEGSFNADAYAFESLKEHSTDLCFSWRTRKFHNRLILPPVRQQTSGMK

SEQ ID NO: 35885 - protein, 257 aa, Oryza sativa
MISDKVKKELNPLLELCIQDPRTSHSNQAKASLSSASHLGQQSQLTHWLGIVKILNNCLHLLRANHVPSILIHKLLTQIFSMVNVQLFNRLLLRRECCSFSNGEYIRAGLTQIKHWCNDVNQEFADSAWEALRHIRQAVDFLVISLKPIRTWSEICDDVCPALSLQQLERIVGMYWDDMNGTNIISAEFTSSMRTMMKEESNNATSFSVLLDDDSSIPFSLEDIAKSMPTIEETTENDLLPFVRENQSFAFILHRRD

SEQ ID NO: 35886 - protein, 404 aa, Oryza sativa
MGWVSNGVVGSPAFAAYDQGYDVFLGNLRGLVSREHVDKNISSYKYWKYSVNEHGTKDMPAIVEEIHKIKTSELGKSRPHISEETEDQNDKIKNLEVQASQDDERDNQPYKLCAVCHSLGGAVMLMYVVTSRIAQKPHRLSRLVLLSPAGFHEDSNVVFSMVEKLILFVGPVLAPFIPGLYIPTRFFRMLLNKLARDFNNYPALGGLVQTLMGYVVGGDSSNWVGVLGLPHYNMDDMPGVSFHVALHLAQIKRAKRFQMYDYGSPVANMEAYGTPEPLDLGAHYGLIDIPVDLVAGQRDRVISPSMVKKHYKLMRKAGVEVSYNEFEYAHLDFTFSHREELLSYVMSRLLLVSDPGKGRIKQTSVRLRKLKKAQSEIENDSDSKEHNGIDNVVTDEQNGHVHAA

SEQ ID NO: 35887 - protein, 671 aa, Oryza sativa
MHMMTSASGCAKLDYLSSQEPGDESQINAIDIVDRLLVEDDIETYQQISIDQTTRAKSASTLGSDIAQCLAKRARCSSPLKKAGNFDWVDTPTVDDCRTSIISMENTVDRANNQVKHGGCGSSTRAWPILECIDEDLGTNCLKKTEPFCGTDDLYQEYDIGPNTQMAAEAMEALFNASTVSYDVKENERPEDSVVKNMTKGTKVDMTCAVHSPIQKRKVNFLRHRSGVATEYKQIKVDDTVRENGESSVSHTNTSQTRKYTKQMAGKAKRNISSGITQRDIDHEVSEVITRSGTNDSNIPLSLDTDALIHPKRRRTYIFTSGSSKIEFIEAIKPTALRAKTTEVKQLSTANTVSVSDQDTTSGLRMSQHSSFADHEASAGSSYFNPLAETFTVGLEKQSIPEKKGHDSSLMPSVPLRELNGAGPQARTRTSETPKRVLKSPGSRELANLFRNEVSPVLQSSRRRRKHMSTVRVLLSQSMGNETLNDQTKILIHFGLSVATTISEATHFVAEKFARTRNMLEAIATGIPVVTPAWLECCREARSFIDEKRYILRDIKKEKEQGFSMPVSLSRACKKPLLEGRRVLITPNAKPSKELLKSLVVTAHGKVLERNAMSKMKNRSLMGSFVISCEQDYKICVPFIKNGFEVFESELVLNGIVTQKLEFERYRLFSG

SEQ ID NO: 35888 - protein, 329 aa, Oryza sativa
MRVSYAQLSKATSSFASENLIGVGSFGAVYQGRIGISDQQLVVAVKVLNLQQAGAYRSFDAECEALRCIRHRNLVKILTVCSGIDFQGSDFKALVFEFLPNGNLDQWLHKHLEEEGEPKVLNLVERLQIAIDVASALEYLHQHKPCPIVHCDLKPSNILLDNDMVAHVGDFGLARFLHQENSNSSDKSTGWNAIRGTIGYVAPEYGLGNEVSIHGDVYSYGILLLEMFTGKRPTNSEFGDVLTLHEYVETALPDQTTSVIDQSLLDATWNSEGTAQKYHDIEEIRTECIVSILKVGILCSKEIPTDRMQIGDALRELQAIRDRFDTHQL

SEQ ID NO: 35889 - protein, 772 aa, Oryza sativa
MRCMTKKKDTKAKKLVTRGSQLTSRKKPIPADLASCNDSDEIRDKPSSDKLLETADVVPRPKETMKQQNAVLALASQIKLPLQLSMTGSGHLKYTSSLILGSPIELPSSQMDVMPSVPQTAGLQASLFGVFGKLRPIPQDPLLVMQSPHPDLSRNEGSKASTDQEKQSTDEGCCLISSAANSFNFVSFAGIDVSRKRKECVSFQAPEELGMKKNRVDETIEGTHDIAAISEEQTKLIFRDEHNELPTNVIAGPAIPSEKNQPTPLEDNKGPRDSSIVDKISQSGINDVRQDENLVLHATSTLDNSGDVNLLSSVSSTENQKKISKSEGCEISMDEDSGEEFCRSILVMPDDTRMDQFPSAKSGQATRHDDLICKENLGAIVECVTNTPTENLSFLSPAMFDDGVPNQSPVSENCQDNKQDGMDNVDHGANVVELASIIPETQHASVGGPLSTISLAALEGKTVLSHSLTWESALNEQSGVSQQYHSSAMVESPECVAESSQSIDDSTITQLCSFDMSQCIDAELGNSLIVSNNAQDTPISKYVARTHNSSCPLMQKFLHVHENIMVDQPSESLAIIELPFVKTSPMWAQIEAMEVFSKVPQRPNFHQLQQHPPEFREGIALGLMYSFTNLAESINMLNVHDDNAVFEHKMRCISVLEADGFDVRHLRSRLETLLSLKNSWSKIQDMMKRSEKKIAQEEIDDQQRCAEISVLSMVVRQLEQHAHLFRCIKNRAISQQMSHAMENSRLKVEASQLKQSSMSTEQRFSSVVAAPW

SEQ ID NO: 35890 - protein, 517 aa, Oryza sativa
MSRWRKRITWDLKKKKLKVANTGKHTGCSNEDKAHQDQDHSGSKKLKSPCIDDAKKVMLAEADVTLEKEQISKRDNQTKLNSETKEDDCNTQSDIKRVSRSARRKKLKRQLRQKAKEQLKEKEHCQEQPTVADCPSSNNRDVLPSPSSNQNNSSLPFVRHEADEEESDTSDDIVPVVVRPGHIRFESAGGESDKSPVKEIQTTFQWSGTTSKKKGQKWEMDNSNKKSSDISYHGRITGTDTEVNHHVAGNSKTSDNDFGLASNQKVGESSHVGSASEKIVAEKGKSSSEPLDFDSLYPLTRLPKEGDLIVYRLVELSSSWCPELSSYRVGKVLIYDPISLRIILLPVPEYPFTAGEKNGEDESEMLVDMSPYKEDGSLEIEYSSLLDIRLLKDTDSVQPAVSTPLTETGIKGGSHAQKPANLDNHKGKIHSEKLPNNTKDPEATQEKTQNTVWEENGEIANDEPAVQENGWGTWTPNASTSAWSYRALRSSALGPTLAHLRGKNTKRGRPYNRKYGK

SEQ ID NO: 35891 - protein, 186 aa, Oryza sativa
MGCAASRLEDEEAVKMCRDRRDFIKQALEQRNRFASSHFAYIESLRRVSMALQWFVAGDDHHELIFDPFISPLKQQKPELLGLPYGSYEKRTIHVSKYLRSGPNPSVSVEEQPRPVETIRIESHYPTDNFGGMDRFFAAQSSPMRPSSYYTPPYDRPNYPPPSPQEPVRNSYYMSYDRPSYPAAVA

SEQ ID NO: 35892 - protein, 50 aa, Oryza sativa
MIIQAGKIADPLKIKERNSWVRVAMHYCISDVLEPLSVACTKIFKAAGRL

SEQ ID NO: 35893 - protein, 66 aa, Oryza sativa
MAQKDGLSDLRNLSPHVLVRGSFPSVQNMIASYFQHAALSLQAILNMCDNIGGTLIDMNGPLPMAY

SEQ ID NO: 35894 - protein, 118 aa, Oryza sativa
MSREALRQQFVSLKQGSGTVQDYNMKCDNLMRYAPDIVADDFRLRRQYLEGLHPRLTQIIDLPGTVRLVDLMAHALRVESYEPSKGQQGFVLNVKPRVDVSSIKAKSVNEFPAIRKSS

SEQ ID NO: 35895 - protein, 349 aa, Oryza sativa
MDKLDGSARLMIVSDLDQTMIDHNDPKNLSLLRFQALWESEFSQDSLLVFSTGRSPISYRGLRTQKPLITPDITIMSVGTVIAYGEEMIHDVGWAEFLSNKWDRDIVVEETAKFPKLKPQPERSQGPHKVSFFVDKEGAREVMDSLPETLNRRGLDVKIIFSSGEALDVLPQGAGKGQALLYLLKKFNSDGKPPNSTLVCGDSGNDAELFSVPSVHGVMVSNAQEELLQWYEENARGNPMMIHATERCAAGIMQAIGHFNLGPNVSPRDLEFPYPKLDAIKPADVVVKFYVLYEKWRQGEVQKAPFIIQYLKRITVSTFLSYILRITQSSFVHKPLFLKSIIPFVDCYS

SEQ ID NO: 35896 - protein, 74 aa, Oryza sativa
MLEGAKLIGAGAATIALAGAAVGIGNVFSSSIHSVARNPSLAKQLFGYAILGFALTEAIALFAPMMAFLISFVF

SEQ ID NO: 35897 - protein, 418 aa, Oryza sativa
MHLSPAIYRCMQWRSWMPATPAGGSGGGANDGGGDGEDKKKSGEVAEAVISVPVHCDGCARKLRRSVQRLDGVEEVTVDCRTNTVIVRGPKAAVDPAGIVEVLDRRTGKKALLLSSLPSANLKPPLSPEKRSSETAKKDAAEQDMGKEMSEEDMEMVVVMRIDLHCEACCEEIKRRILKIKGVEEVTPHMKSSQVMVRGKVEPATLVGLIHKWTGRRAAIFRAEPQHPLPPPSESPPKVDDDNEPPKVAGSTEPAEEEETKQGGDPSPSDDAQEKKEGEEADQMKDQKEEPEEKEKKEEPDEKNEGGEADDLKPLTEDDASYNGVAEESHSTKDHLFRVALPRSVVAVAPPESEKMAMNSLCYSYYYYPVYPYPCHQYYQYPQQNIYAAGNYPAMYGYYPHHVPEDFSDANPNVCTVM

SEQ ID NO: 35898 - protein, 326 aa, Oryza sativa
MLLRFESQTSKGHCFPGSFYKESSTPCDDTSLMLIAVRRIGITPVVLVPLHDRANADIIVLGDRPRLLQSARHSLAHSSISFLPASHVTPVSSTDCPSGLLFVSENCLHLVEMVHGKRLNAQKFSIGGTPRKVLYHSDSRTLLVLRTGLTSVSCSSDIVQIDPSNGALLSRFKCEPGETAKCMQIAKIGNDQVLIVGTSKSNGRPMMPNGEAESIKGRLILLSLETIESPRESGSFTAASNLNSSHAGSPFPEFVGYAAEELSSNSMCSSPDEVCCNQIQPELMAGHLRSLVQHTFNGAVLAVHPYLDRYVLAAAGNVLFVFGFFK

SEQ ID NO: 35899 - protein, 73 aa, Oryza sativa
MLWICGVKHLTTADSAIIAYIICRQGWRHFSVISPLPCVCYRSGFLLSTYQLLCCCYSKVYLICSLKVNGGQS

SEQ ID NO: 35900 - protein, 130 aa, Oryza sativa
MYFCRLCYIWACVLFLNAILMMRWTKKARDSIPAHLGTFPDDVGMAQARVFRHNVLQSTANEIVRLGDQDNQSFEILLRYLGEAKEEIAKAASKMSGAAASFHFISFQMFSFQMFQSLNGIHATVPFELF

SEQ ID NO: 35901 - protein, 32 aa, Oryza sativa
MKRRTISRQSSHWKFHRVVDIMYNLNQHRYLT

SEQ ID NO: 35902 - protein, 483 aa, Oryza sativa
MMKETESYGIHNSRSGKEENAGQTSCNLKGTNLSDLPVRRQAEAGNKRNVGPGKEKETTEKTSCDVREVILSDDRPVKTQAGYGQVKAKEYHRSDSLPVKKQAETNYQQISQSGKEKEHSMDESNSTHNRSRKRTPDQVDGSLPPEKQVEVAYEERMAIPIKKSTHQEKQLDAGDRLNAHRGSEIMGAKFTEQANSDMSMSSSDSSNAQNKSRSGSPFIPIGHPADKSTGRDSFISYPPKEHLVSKQATYQGRYLASNNECNNAFEGKIDPPIHTNIDDISRKFSPGTDFEVNRQHFTAPTGNVYSLQSLRDSDRFYRTQRSEDRNTNSLESTTGDAPLHGHPTRYSRQVGDDNYLQTSRVPSTLHEQAHPRTHVGHADGYLQTSQYSLGSSGATYGQQTSSYGLPGASTPYSIMDKYAPGFLAPSAQRSSVMDMYALVPSASGSSVMDKYAPPLEDTNYSARGVPQYPYRQLGSSGGGWPRS

SEQ ID NO: 35903 - protein, 540 aa, Oryza sativa
MDYNRESESNLANSTDMNSAAAPSVNFSSNEVPSLDISMPNSGDGSRLLSNSKPELQTDTPPSQIKQTNPFRSIGDAMADWKERAKVSADTQDHQPEAEHHIDDESATEFRYVPDSEQSTSQALGNATADQINDDLQVKQSSMEDENRVQKEEHNTDRAPGDDHNLEVPHLQASQSRTNKSENANNLEHREIQTDTYVQDSVQGETDETFGDFVSFKQPPADEKTVMRDDLANDRELSTPMEINITDVDMKGPIVDWKSVELTTMKLSQELAEQLRLVMEPTLASKLQGDYRTGKRINMKKVIPYIASHFRRDKIWLRRTKPNKRNYQVVIAVDDSRSMSEGKCGKVAIEALVTVCRAMSQLEVGQFAVASFGKKGNVKVLHDFDQVFNGEAGTNMISSLSFEQDNKLEDEPVADLLMHLNTMLDTAVARSRTPSGQNPLQQLVLIISDGKFHEKENLKRCVRNVLNRKRMIAYVLLDGHEESIMDSLEVSYQGTKLTMGKYMDSFPFPYYVMLKNIEALPRTLADLLRQWFELMQSANE

SEQ ID NO: 35904 - protein, 61 aa, Oryza sativa
MRHVWVAEATESSTYSLSHEIPKKSHLKEAATSAEKWASNSHPMIQHLKERVLQIVGDSGG

SEQ ID NO: 35905 - protein, 418 aa, Oryza sativa
MTNFKNTRAVYEELGKYGSIENQLLCRQRIEEVEPMIGFCSRKLGGSALQAHELLDLEKEGPAYDLFKAKIEAVLSETRSQQAASMTEFSWLGRRFPITNAKTRVSILKAQQLEKDLNGANTESVPADKKLGIFDKIFSAYHDARSCIRNDLASAGNAENIRDELNGLDKAVSAVLGFRTIERNQLLVSIAKSKFTKHRDEKNEKITKPEELVRLYDLLIQNTTDLTDLISSGRDKNKEENTFIQEYELKSLAFRAERCFYLAKSYSSAGKRAESYALFCHARSITDSALQQLTNSPDKALVQDLKALSDSCRSNSFIEHATGIMEEENVPERLSKGVSTLSLGERKAFLLDMLESYESALGESNTKTPCRIARFPPPFQSVPCNPIVLDMAYNAIEFPNIENRMKKEKKGLLSRFWG

SEQ ID NO: 35906 - protein, 318 aa, Oryza sativa
MAHAQLLVFLIPMALFLKLAMPVDGAMAMPGCPDKCGNVAIPYPFGIGENCSATNLNSYFNLMCNDTFHPPRPQIREPEAHIEVTGISLERGEMRVLSPVNHICFTSNTTSTKSSGVGYDLSRTPFLPSPSRNRFTVIGCNTLGLITGYRGASGQYVTGCYSYCEGINSTSDGAPCAGMGCCEASIPANLTAFAVTFDLNHSKVWTFNPCFYSVVAEVGWYNFKKQDLVGHLGFIKERAQNGVPIVADWAIRNGSCPKKGEKEPSSYACVSANSYCTAVINSPGYLCNCSQGYGGNPYLSDGCQGSAITQIYLNFVTY

SEQ ID NO: 35907 - protein, 637 aa, Oryza sativa
MNKQSDLIPAAELVFKNSSAVSVELPAVVACKTDGASVPPAPAWVCCDDCEKWRCIPTELADKISKENLRWTCKENEDKTFANCSIPQEKTDDEINAELGLSDASADEANGDGSNSKASGEPNFALLRSNLFLHRNRRTQSIDESMVCNCKPPHDDRMGCRDGCLNRILNIECTKRTCPCGEHCSNQQFQRRTYAKLGKFHTGKKGYGLQLKEDVSEGRFLIEYVGEVLDITAYESRQRYYASKGQKHFYFMALNGGEVIDACTKGNLGRFINHSCSPNCRTEKWMVNGEVCIGIFAMRNIKKGEELTFDYNYVRVSGAAPQKCFCGTAKCRGYIGGDISGADMITQDDAEAGTFEPMAVQEDAEEVLGANGLSSHGTHLDIVDHEASSKTEDSNDCPSVNPPELESEQQTSGTLFDTSEPENSLEALSPQDDEDVVRTPVHVSRTVESTSRQFPGYGTRSSEILQRAPCTLDGPKVPSTTNGIPPSSDLGSHWVPGFHANKKTNVKHHLILNPSSAPIDSEHILGVEGRLNSLLDVNGGISKRKDATNGYLKLLLVAAAEGDNAGGTSKSVRDLSLILDALLKTRSNSVLLDIINKNGLQMLHNILKQNKSDFHRIPIIRKLVKVCISFLCYVLLH

SEQ ID NO: 35908 - protein, 597 aa, Oryza sativa
MEKARGRSKEKVINGMAVGKNKENTLTDYEIRRKGVIAANNEMLQSLNLPPMGSNTHVQQRPKKIPKVTDGRNMVPCGDHNLRSRSRNNLEENVDENVGDDPEYQLEEDAMDDNEVDVEETLELEKVQQKKKEGRGITQKLNIISRVGEAKIKITLNEFGQPVGLDSEEFATTFGTFVRKKIPVACGDWRDVDVKDKLKVWEDVQKHYEINEYGLHFVLETSHMIWKDYKADLKKKHFDANLTDEELMDRRDLRVNEAQWKWLINHWRSPEAVARSIRGKANRGMLRMLHTAGSKSHARVGHDMGVKTGRPPRRDEVFVETHKRKNGEIIPEAAETVEMLKEAAEVNPELKNKTIQEGDLYSRVCGTKEPRGRVRVLGKGPTPQDVGTPGTRSRMPTRLQLEIESHRQTKQEVVCLNKRMDDMQQRFNIMEHMVMSQGVQNIETSSHHASNSRHAESPRSPVLEELHPNEPTNRHLLEEPHAEPTSRHLDNILSGDDFIIRKKAITPRVPSRNTATGSHEATIAEGENLVGKDVILYAVLRSDTPVAKATIVSIHPSSLVGGQPLGVEFYEVVVNVVLKRDALLPRPYDDMQTMTWV

SEQ ID NO: 35909 - protein, 588 aa, Oryza sativa
MSEDENRSPDLQRTSDSCFYNKVSGDSFSSHSPFSQEKGNNMKRHYDCAREEYLPLGRSSMEQHIYANNQSQILTPSTRINTLDISNSCPAETNRSDLHEEKLPLSHFSPSNLLDLSGDLDLHLECLRKVQYHLESMFDWLIQEASFSGAVNNDPFNIPTQSSFSNTDGRALRPLLVSSAYTQRGNLSRVYCSHGTREISQKSVSRTEVQVNAVCQQNVALPSGTNNRLALPPSPVADSEKSPVSPLHNTVDIVGTHGAGMHTLNNVSLLSGTDVLSNAFAQLSFPAVNSVDYKYCWSYTTTNNRATSSQKTNRGKGGTGTYIPRMNYHTYKERIFYYNGRSQREMLPDRPFKIKTNPIGYIRRRSSPEMGCSSSSNGGITFENTSHTPSKKQDHSSESTVTAEGSFAQERAPASQEWNICTNMNMVDSQKPGNDEDLVRPNNESRELRTLHPSEVRNREMTASSSSSVELPHCVGNGLQESNTSQPSSPATEASSPIKTSLVEGLEFGSFEPILGTSFLCEKFCEEFPPLPARKWPAVAAVSTPVTVSSSPAETGSKPEGLYQLRDEADFPPLKAGARNGFNHRVGR

SEQ ID NO: 35910 - protein, 216 aa, Oryza sativa
MAKTKQGKRDVDSYTISGTNKVVRVGDCVLMRPVDSDNQPYVARVEKMELDGRGSVRVRVRWYYRPEESKGGRRQFHGAKELFLSDHFDMQSANTIEGKCVVHSFKNYTKLDNVGPEDFFCRFEYKAATGAFTPDRVAVYCKCEMPYNPDDLMVQCDDCKDWFHPSCMSMTVEQAKKLDHFVCSDCVKENGAKRPSHAYAGSTKYEPKAESKRQRR

SEQ ID NO: 35911 - protein, 56 aa, Oryza sativa
MNPQRQNYVRPPHVRIEPTDHSSFNACISTRLSHMSSTRALQFLTFFSSLRPERHV

SEQ ID NO: 35912 - protein, 463 aa, Oryza sativa
MRAAISETFPEPNRRLLQRILRMMHTVASHTAENRMTASAVAACMAPLLLRPLLAGECEMEDDLDMNGDSSAQLIAAANAANSAQGIVTTLLEEYEGIFYDEHLRCSLSPDSQIEDSGSEESTDDETVDIKDSGFHDAENDADQELDDSERILSGKLSETSACTAGDLYDYKVADDDSDGEPSTEDKALETKVDVNDAQHSHLAENVSVNVQRSPNEKDPPNMVSSQDSPLSMGDILSSLDAGISLPGPGPEYSVDRQSIKSNGTQMHVKRSNFWGRNNGRKSQQSELADSSGEEELAIQRLEITKNDLQIRIAKEARGNAILQASLERRKQALHERRLALEQDVSRLQEQLQAERDLRAALEVGLSMSSAHISSSRSMDSKTKAELEEIALAEADVARLKQKVAELHLQLNQQRQHQYGSLADANDRYQHLPNHLPQNFVQSGFDMNLAFCNQEKKQRNEVS

SEQ ID NO: 35913 - protein, 326 aa, Oryza sativa
MKVVVPCSSDVYLNTSALPSKAYFRPEVNETIAELLSFLANHSSPFMVELNPFSSFQHKKNLSLDYYLFQLMSHPVSDGHIKYDNYFDASMDALVTSLTKAGFSNMDIIVGRVGWPSDGAVNATPAIAQSFMTGLVNHLARKSGTPLRPKVPPIETYLFSLLDEDQRSIASGSYERHHGIFTFDGQAKYYVNLGQGSKALENAPDVQYLPSKWCVLDNNKDISNVSSSFSAACSNADCTALSPGGSCSGIGWPGNVSYAFNNFYQQHDQSEEGCSFNGLGLITTVDPSVDNCMFNLAIDTSTAASFHPILAMLQILVLFFCTYNLL

SEQ ID NO: 35914 - protein, 334 aa, Oryza sativa
MNFDHNHVVIMGLNQRDSIWKLLNDYNVNSLKRRRQAEIDAFFEPFERAQRIRFNNWQNGIELLDGAEWRNGDIVIPGGGGPVISSPLDQFFIDPLFGLDMGNFYLSFTNESLFMAVTVVLVLSLFGVVTKKGGGKSVPNAWQSLVELIYDFVLNLVNEQIGGNVKQKFFPRISVTFTFSLFRNPQGMIPFSFTVTSHFLITLALSFSIFIGITIVGFQRHGLHFFSFLLPAGVPLPLAPFLVLLELISHCFRALSSGIRLFANMMAGHSSVKILSGFAWTMLFLNNIFYFIGDLGPLFIVLALTGLELGVAILQAHVSTISICIYLNDAINLH

SEQ ID NO: 35915 - protein, 177 aa, Oryza sativa
MKDKFHRSGLCLEVPMYIDDGEYFGDETGTQLKCRHGLRPKRRTAWEWKDTGRRFLGCPLEEEDQCDALFWVDEEWQPRIQKAFEMLWLALDHASTRNPTKAQYQWSNFVDRTIVEEDKMKLEFQMASQISAIEAKHKKRVSRIKKETEDLKAWLMGSLVVIAFLLFKIIENMYQGC

SEQ ID NO: 35916 - protein, 417 aa, Oryza sativa
MDPSKRGFMNLLNQGSPSQQSSQNSPPTQFPSTFSQSQFPQSPHFTQASPPNFQTFNPFGPPANYHLYGSSPPNFQGFLQQASWLQSAPISFQGFRPQESWMHSPNQVVGSASSHGSKSASQCPARQEENNLVNIEESSDNSQETGRRGTHVNWTEEENLRLLSSWLNNSLDSINGNDKKGEYYWRDVAAEFNGNASSNNRKRTVVQCKTHWGGVKKDIAKFCGAYSRARRTWSSGFSDDMIMEKAHALYKSENNDKTFTLEYMWRELKDQPKWRRILEEDSKNKRTKISESGAYTSSSNQETEEETSRKEKRPEGQKKAKAKLKGKGKKPAPSPLGDQPSQDFVLFNEAVKLRAEAVLKSAEATTKSAEAKKEQTRMEKYQTYLKLLDKDTANFSDAKLKRHEAVLEKLATELAEE

SEQ ID NO: 35917 - protein, 356 aa, Oryza sativa
MINIEVLSNVKAQHHDNLEDIGKLCQLRKLGVVIDGKKSHLGSLLKAISDLHASLRSLSITIPTTTLEVTPSSPELQDIASRLKHHPEFLESLSISGAKHLFPLLTEGGNKKLAKVTLSNTPLNQDDLKFFAQLPMLQCVRLRHISCTESVLNFKKDDFKCLKYLLIEGSNLTNITFEDEAACELEKMVLSSTCIESISGVHGLPKFEELELNSSSCGRLLSSCFYNVERIAKLTLRGTLLKQGDLRIIARELNICCLVLLENSFDISQNQITFEKEEFIWLKLLSVDCSTITKINFITGSAPRLKKIVWSSFTSLSGINNLPRLKELEFNGYSVPNDVEEAIKNNKSINLKHNKP

SEQ ID NO: 35918 - protein, 84 aa, Oryza sativa
MRLPSLSWSDALSFTGRDLLAVHMIRGMDEVLKAGLLGSPTDTEKMAKRKSLQGAVQMKPHAKNGLYHVGFCLTRIALIVEPSG

SEQ ID NO: 35919 - protein, 440 aa, Oryza sativa
MGEGHETDKNIEVWKVKKLIKALDAARGNGTSMISLIMPPRDQVSRVTKMLGDEYGTASNIKSRVNRQSVLAAITSAQQRLKLYSRVPVNGLVLYTGTIVTDDGKEKKVTFDFEPFRPINASLYLCDNKFHTEALNELLESDDKFGFIIMDGNGTLYGTLSGNSREVLYKFSVDLPKKHGRGGQSAVRFARLRMERRHNYLRKAAELATQFFINSATNQPNIAGLILAGSADFKTELGKSEMFDPRLQAKVIKTLDVSYGGESGFNQAIEMSAEVLSDVKFVQEKKLIGKYFEEISQDTGKYVLGVQDTITALEIGAVDTLIVWENLDVRRYELKNTATGETVIKYLNSDQEADQSNFVDEATSGEFDVIDKPLLLEWFAENYQQYGCTLEFVTNKSQEGSQFCRGFGGIGGILRYPADVAAFNDDDDDMLDEADYEDFE

SEQ ID NO: 35920 - protein, 221 aa, Oryza sativa
MKFSYTVLGGGFGLVTYLNKVYDWFEERLEIQAIADDITSKYVPPHVNIFYCLGGITLTCFLVQVATGFAMTFDYRPTVTEAFSSVQYIMTEANFGWLIRSVHRWSASMMVLMMILHVFRVYLTGGFKKPRELTWVTGVVLAVLTASFGVTGYSLPWDQIGYWAVKIVTGVPDAIPVIGLPLVELLRGSASVGQSTLTRFFSLHTFVLPLLTAVFMLMPFL

SEQ ID NO: 35921 - protein, 354 aa, Oryza sativa
MKIKRLGLEFIVREIIDQYNTLRKQLNNAIPSVSISNSKCSVGNECVKNQTCCVTMVVQVEINSMSQLDVIKERVIPSILATLLKGFLEFKNVKVQCQEDNELVLKVGMSEHCKSGKFWATLQNACIPIMELIDWERSRPERVYDNFCSYGIDSAWKFFVESLRSTTDAIGRNIHRQHLLVVADCLSVSGQFHGLSSQGLKQQRTWLSISSPFSEACFSRPAHSFINAAKRDSVDNLSGTLDAIAWGKEPCAGSSGPFKILYSGKSHETKQNEHIYDFLHNPEVQALEKNVMDTYRKRTEKTSKRRSALNSEGNATINGGAISLIRSFLMLKLVYGRTSLTCALPCKTCFGSTH

SEQ ID NO: 35922 - protein, 73 aa, Oryza sativa
MGRGSGLPSSPPYIRRIDSNKEVPYSERDNEDTASPSCSNVKKGHCLISIFIYIKIWVLCREIPFFLGLPFML

SEQ ID NO: 35923 - protein, 82 aa, Oryza sativa
MTLLIVSMFFISFLFTVHFDGDMLFGKLILSNSNIIITYLLITPISIRWRIILPFPLNIRVHSTAAVRAITELSPTQYLKTG

SEQ ID NO: 35924 - protein, 279 aa, Oryza sativa
MSSAYHPQTDCQTERVKQCLEIYLGCFVHATPTKWSSWLYLAEFWYNTTYHSALNKTPFEVLYGYCPGHFGISLNDCSIPDLNQWFQQRKLMQQLLQHHLNRAQQQMKHMADKKRSFREFQVGDWVYLKLQPYVQSSVAVRANHKLAFRYYGPYQILHRVGAVAYKLLLPAASQIHPVLHVSQLKGARGFSCPMQAELPTALSKFQVPQQFLHYRVSHTKNCPIIQLLTHWTGSAATDATWEQLLTPHGRICKIFTQGSLMHRLGGKPISKHGGLSGLL

SEQ ID NO: 35925 - protein, 352 aa, Oryza sativa
MDIGESKGKGRGKGKSSNLAAGRAKPINWPLALSEFLLDWYIEKKLQLPPKAVIKKIHHTACTLAINSKYGTTYTVDQVQHHYRRHKENWSLVARHLNESGNGWDETTKMLTLSQATLDALLINDRGILSKPIQFFDKLQELFSGCSADGAFMEDPSSAADFDDEDDEDDKFDFLNDMSTYADTKVPQGEDFDKLESDSDDCKEVAALSAATIQVSSSTNYDLKPNKKNFKRCGKPKTLPQSHNDKCNKTKAKSTAQVHDSDDVDVLINNTLVGIKNTLEKPIQTVAPQDPNIPLWDMLKKIALDPDDKLRVGLHLCKPELQANRSFLISMGQEYLEHWIYKFLSGDDPNLG

SEQ ID NO: 35926 - protein, 132 aa, Oryza sativa
MQEPAMAGSTNTVVQTISVTAAATGVHDFRFVRLFPHQGGRRRRGLLPVRGLLRRRPQLGNPLLPQVPNRVSSRVSLYPVLLSRPADDDGRVHASFACTLLDKSGKPASPESKDTADSAHTHSAPAPGRRLV

SEQ ID NO: 35927 - protein, 364 aa, Oryza sativa
MAKRRAESELELVEAEAEAEAEAEAEKNGRRAAGSQDGVNRAFILECSKHSDGSIYSGDDFWHRFYKVADTRETRMEAMMLSNPTNCRPHMWACKAHSVQFMMQIFSLKLSNITAAVDGPVHLYGYFAVRDHLDPLRNYIFNRTRDDPFIMGQDNGVDSDNSLIPMSGPKRGIGNQVRVLIEFDMKIKNGETQDDDFQLIDGAIICSEFVLPDRVFTQRIEGDCGAVDISRALFHEAVEATIQVSISQVHVNGLSLSLYSYTSRIPEKIRLFDGVISKPCDLNRVVAVVENTPLFLIFRAVHRDGSDYDIPKYCPLVFKVDQGDGSYRVSEYCPFKARRHGYDMKELKLGGARVLLKVSWSTLK

SEQ ID NO: 35928 - protein, 68 aa, Oryza sativa
MVLATASQLLLSSASSGRVEAKSIGRLEAIKALALLEAAGDVAVAERPAGAVVETAMAWSLEWARPSR

SEQ ID NO: 35929 - protein, 501 aa, Oryza sativa
MDGARREIVCRADGTMRLGEPTSNETLSCVIIFVIVYYALMAGVVWFVVLTYAWHTSFKALGTTYQPLSGKTSYFHLLTWSLPFVLTVAILAVAQVDGDSVSGICFVGYKNYRYRAGFVLAPIGLVLIVGGYFLIRGVMTLFSIKSNHPGLLSEKAASKINETMLRLGIFGFLAFGFVLITFSCHFYDFFNQAEWERSFRDYVLCQANVTIGLPTKKPITDCEIKNRPSLLVEKINLFAMFGTGIAMSTWVWTKATLLIWRRTWCRLTGQSDDEPKRIKKSKMIAKAFSKRRELLQNPGQELSFSMHTVSHDGPVAGLAFDLNEPSADVSSAWAQHVTKIVARRGAILPQDVSVTPVGTPVPPEDQANKWLVEAEISPELQKRLGRKKKRRKRKKEVCPLAPPTELCHPVPAPSAVPRLPQLPRQKCLVAGAWGTAETHRHGAWTLVSNPLCPEPNSLQDPFLPTAPGPAAWAQGRRPCLAPIHSRTNLMEAELLDADSDF

SEQ ID NO: 35930 - protein, 80 aa, Oryza sativa
MVSSHSLLVWIRFLSSFCVWLLGDFLAADADADEDEDAVCACARRSSLVLVNEQLRIDHGWVGRNPSVLTIDRSNLGAPC

SEQ ID NO: 35931 - protein, 58 aa, Oryza sativa
MHGFNSSQQPNSILLHACKSIRCLFASGGRGRLRCCTHAYRASTEASLPLNPCRCSDG

SEQ ID NO: 35932 - protein, 182 aa, Oryza sativa
MEVDMEAEGASGELGHKRADLEKPTEEERASNGGGDAAKTPSEDHHDSARRRAMAMENDDDDDEYYDEPLPNPLDAYRQSWARSYGTNGATFEDETDLPPMPNTDIPVLPPSAQPMETMQVFTVKVTQITGGLRWPLGVYGVVAVRDSMDHKRNVLFRRGRNECQTLTSLQACANCSYPIIL

SEQ ID NO: 35933 - protein, 50 aa, Oryza sativa
MAAENKPEDDHGNSNGSHVKIFLPKKLLECLPKCSSLPKERHRWNTNERS

SEQ ID NO: 35934 - protein, 45 aa, Oryza sativa
MKLLAEVELTNFKEKKHELDFLKLLFRAEPSLTRMRITCHHSFAV

SEQ ID NO: 35935 - protein, 321 aa, Oryza sativa
MIREAIDHYGFVALATRVMFAELERLANMTLFALDDQAIFVGEGHDDSVSARGPLPRRSRAPPHPCRSPATPRLLLICGIWRGGFGGATRAPLVVQGRHGHPDTPPSSLAHWIPGTGGERRCTTRGTATCSAPPRRGGRGGARREGVEGPRRRRWRGLRHAAQDRPHLAPPPADQVCHDWRAPSHPRRSSSGAPHPRRLRHPRAPGRRTRHALLGLLRRWLGLHLLGPHDALLSLHNLRRHQPLCTHVLPYPPKTSARVQGAWNRWVGGCCSCSSLQCRSYNADDYPAADFNVVASGQVLCRSKSRRTTHRRRGFYPVMLV

SEQ ID NO: 35936 - protein, 128 aa, Oryza sativa
MQIFVKTLTGKTITLEVEPSDTIENVKAKIQDKEGIPPDQQRLIFAGKQLEDGRTLSDYNIQKESTLHLVLRLRGGIIEPSLRQLAQKYNCDKMICRKCYARLHPRAVNCRKKKCGHTNNLRPKKKVK

SEQ ID NO: 35937 - protein, 66 aa, Oryza sativa
MSTGATCIYALTFAHDMSIHCAFILLQSYCDQLYCWCCFGRVHPQGFSAVSTDQLEVKRWMVGKKR

SEQ ID NO: 35938 - protein, 52 aa, Oryza sativa
MARRGSGDNGGGKGWPARRLMVRGASPLSPSSPRGSAGEVEAGAEAGVARWQ

SEQ ID NO: 35939 - protein, 92 aa, Oryza sativa
MSFTSAITAQISSMMSVFLLMSCQRHPSPTCSFIPLDHSYYQLLSHIPAPTSFREFSEVVVKYKERHLEMKPLEFLAAASILCTCLQTAASK

SEQ ID NO: 35940 - protein, 364 aa, Oryza sativa
MTILFRVKKSRLLKVVLIPSILATGIIAICLLFSIKFCTGKKLRGLPITMSLESNNNHRAISYYELVRATNNFNSDHLLGAGSFGKVFKGNLDDEQIVAIKVLNMDMERATMSFEVECRALRMARHRNLVRILTTCSNLDFKALVLQYMPNGSLDEWLLYSDRHCLGLMQRVSIMLDAALAMAYLHHEHFEVVLHCDLKPSNVLLDADMTACIADFGIARLLLGEDTSIFSRSMPGTIGYMAPEYGSTGKASRKSDVFSYGVMLLEVFTGKKPTDAMFVGELSLREWVNRALPSRLADVVHPGISLYDDTVSSDDAQGESTGSRSCLAQLLDLGLQCTRDLPEDRVTMKDVTVKLQRIKEVLQA

SEQ ID NO: 35941 - protein, 115 aa, Oryza sativa
MAAVALRSLARKAMPAPATLRRAPPPSRSLHRHSLEDKLRGTTSPKTTAPTDQGRVSYFEENPELFAELVKRDAARRMFTRLVLAGAASAYAGALFVVSSMRDSVKEELRKNIYD

SEQ ID NO: 35942 - protein, 378 aa, Oryza sativa
MAMWRAPSAAGQLLGRALASTAAQTSAGSKKVVGVFYKGGKYADKNPNFVGCVDSALGIRGWLESKGHRYIVTDDKEGINCELEKHIEDAHVLITTPFHPAYITAERIKKAKNLELLLTAGVGSDHIDLPAAAAAGLTVAEITGSNTVSVAEDQLMRILLLLRNFLPGHHQIVNGEWNVAGIAHRTYDLEGKTVGTVGAGRIGRLLLQRLKPFNCNLMYHDRVKIDPELEKEIGAKYEEDLDAMLPKCDVVVINMPLTEKTRGMFNKERIAKMKKGVTIVNNARGAIMDTQAVADACASGHVAGYGGDVWFPQPAPKDHPWRYMPNHAMTPHCSGTTIDGQLRYAAGVKDMLDRYFKGEDFPAQNYIVKAGQLASQYQ

SEQ ID NO: 35943 - protein, 304 aa, Oryza sativa
MGAGASSMMGPEGYGRGWGQTSLGDMPESCVAAVLLYLDPPEICKVARLNRAFRGAASADCVWAAKLPANYRYLAALAAAADDDSGGDGATEGNGSRCSSAAMIKKEIYARLCRPTPFDGGTKEFWMEKNKGGLCISISSKAMAITGIDDRRYWSHLSTEESRFHHVAYLQQIWWLEVAGEIDFCFPAGSYSLFFRLQLGRPHKYMGRRVYGYESIHGWNIKPTRFQLSTSDDQQATSQYYLNEPGNWILYHVGDFVVSSSDQLTNLKFSMMQIDCTHTKGGLCVDSVFIYPKGHRHEDCTICK

SEQ ID NO: 35944 - protein, 231 aa, Oryza sativa
MADPVKLIGAFGSPFVHRAEVALRLKGVAYEFIHEDLDNKSDLLLAKNPIHKKVPVLLHGDRAICESLVIVEYADEVFDGRPILPTDPYDRAMARFWAHFIEHKCSRSSWLALWLDGEEQEGLLKETKENLALLEAQLHGKRFFAGDSVGYLDIVASGLAHWISVVEEVTGVSLMGGADEDDEYPALRRWAKEYTTDETVMQCLPSREHLAAFFAAKKDKLKMVAKAMLHQ

SEQ ID NO: 35945 - protein, 220 aa, Oryza sativa; identical to SEQ ID NO: 31673

SEQ ID NO: 35946 - protein, 627 aa, Oryza sativa
MDFTAPSFSLGSEFDEPEEAVGYTAPDAPSFSLGIDFEGDGDESHLTDAGNGGEEQKRYEAPDAPSFSVGIDSGSDGGEERRREEQRRSYEAPDAPSFSLGIDSDGDGGDEPHLTNGGHREEQQRRYEAPDAPSFSLGIDFGDGDDEPRLPNASRQAPRYEAPDAPSFSLGFDDDEDDVLIGGSRHELGTVEEEDDDFVLADGQQQQQRRHETVVPDPAPPPPEMNRFKRLRRGPAPPSQAPTPPPHRTPAPATMEASPVVSSKAVLGDIGSFEDEIEDFTDEERFMRDVPPSVGSCITSSSSRFSHASNSKFSLMNHGVLMSQSTSKSKKFAQTPNYSASRSMEESSTKKLLPKTALSPMRKIHLLDSDSDSDDNKEMPGLQQNCKSKVSTVQHKGKAEMNDSWATPALDEFCNEYFKSVEDSRPSQQKEGNSFCGPKVIRSNYSVSETGGHFPHQSTPSGAVLEDNQTDSHPPAMHYFFHHDQLVRDLIRQRLKHFVPVGVDSRGNEQDGTQNLQYRSQTGRCAAENDRWVTPNKRMPVATQVGRRRVNPAGMSGSGHWLTGDDGKKVYISKDGQELTGRVAYRQYQRESGKGFRQSKKKSSAGTRAKKATTKVKQEKTRAKRKR

SEQ ID NO: 35947 - protein, 375 aa, Oryza sativa
MAGLAGDDSSFFGDDGDGDEFCYGPFDVEDLCYGASDVDDDWEEFCDGPFGGGGVEEFCVSGFSVRDLSDASSSGARETGDPHDDDPLPQTLARSLDSDGDLSATLHQIVSAMRLSEDEEEEEEEELLVLGHGHGVGIGGGGDVDGFMVSAFDLDTAMAIGGILEDIHEVMGADEVREEVVVEEEEAGNGGGIMPNGFEFGPPPRAISGTAAGFRMMVDADDTDSDDFQFVEVLGGGQVREAGAGMSMRPSRASQLVVESLPEATLSEEEASRGCAVCKDSFASGQIVALLPCKHYFHGDCIWPWLTIRTTCPVCRHQVRTEDDDYEQRMARRVIVLAAVEHQGAPAQGCGDSATMGAEGASECVVENGPEKTSF

SEQ ID NO: 35948 - protein, 186 aa, Oryza sativa
MEEVVEVVPRVDLLLHHHLHHRLPEVLVRLRRLHRHSHALLRHAPVRRLLLQLLLLVVVAADIAAPSEGGGAGPPPPPTLLPPPPPRLQLLLLLLRRRRLLEQRVGGERRGAPRGVGGGGRAGAPGRGRERRGRRRGGGVGRLGLATAAAERRGRRRGEDGEQLRPAAVAADVHHRRLPQREAAPP

SEQ ID NO: 35949 - protein, 33 aa, Oryza sativa
MLSSTRMCPPKVRPTTLAPARSPPVPWLPSMTS

SEQ ID NO: 35950 - protein, 122 aa, Oryza sativa
MNKGKIFKLAKGFRGRAKNCIRIARERVEKALQYSYRDRHNKKRDMRSLWIERINAGTRLHGVNYGNFMHGLMKENIQLNRKVLSELSMHEPYSFKALVDVSRSAFPGNRPPVKKEGLAAIL

SEQ ID NO: 35951 - protein, 340 aa, Oryza sativa
MGSGNKLAATVVVVTFAVLMAAVTTTCQAAYGPPNPASCGLKVGYYYAKCPHAEEIVKNVVGAAILHNPGVGAGLIRMLFHDCFVEGCDASVLLDPTPANPQPEKLSPPNMPSLRGYEVIDAAKAAVEAACPGVVSCADIVAFAARDASFFLSNSRVAFQMPAGRLDGRYSNASRALDFLPPPKFNLGQLVANFATKGLGMEDMVVLSGAHTVGDSHCSSFVPDRLAVPSDMEPPLAAMLRTQCPAKPSSGNDPTVVQDVVTPNKLDNQYYKNVLAHRVLFTSDASLLASPATAKMVVDNANIPGWWEDRFTKAMVKMASIEVKTGGNGEIRRNCRAVNH

SEQ ID NO: 35952 - protein, 234 aa, Oryza sativa
MAGHDELKLLGHWSSAYVTRVKLALHLKGVSYEYVEEDLRNKSDLLLASNPVHKTVPVLIHNGNPIRESQIIVQYIDEVFSGAGDSILPADPYERAVARFWAAYIDDKLLAPWKKVFRAKTEEERAAWMKQMFVAVDVLEGGLKECSKGKGCFFGGDSVGYVDVVLGGAVSFVHANDMITGGKLFDAARTPLLAAWLERFGELDAAKAVLQDVDRAVEHTKVRYARNAATAAND

SEQ ID NO: 35953 - protein, 267 aa, Oryza sativa
MGMARARARRLLPLLTFVTLGMILGSLLQLAFFRRIDDHSNVTHLENDQEAAFLRLGLVKPEVISWSPRIIVFHNFLSSEECDYLRSIARPRLQISTVVDVATGKGVKSNVRTSSGMFVSSEERKLPVIQSIEKRISVYSQIPEENGELIQVLRYEPSQYYRPHHDYFSDTFNIKRGGQRVATMLMYLTDGVEGGETHFPQAGDGECSCGGKMVKGLCVKPNKGDAVLFWSMGLDGETDSNSIHGGCPVLEGEKWSATKWMRQKEFV

SEQ ID NO: 35954 - protein, 137 aa, Oryza sativa
MHFIEHLAITLSPPLEITIVRLPGQSWRLEGVGEVPCCRHRHWGSRGPLDTGNHASNTFGRHQQLAASASSAPHHASPPFAVSPSRAAVPPPTSSPWTGHPRCSSSHLSGEIERPYAVYAHALINLVGNPSCRPSHL

SEQ ID NO: 35955 - protein, 484 aa, Oryza sativa
MAPPTPGLSAAARLVIRRFLTTGAEAAEAVAPHAARAKGKKDKRPLGRRLLELGDAAGEGSVSRVLDEWVREGREEAIAAADLAKCARDLHKVKRDAHALELMDWMVNTKGMSMTYARYALHLELLYSVYGIEAAEEYFSGIPSFTRDQNHRTYGALLNCYCSAKMEEKATNIYRRMDELGIPSSTKLMNNLMGLYLELGQHSKVANLFDEMKERNVQPDELTCCILMRSHAAHNKIDTVKETFYNMSLLDVPKQWSIFRTLGSIYMNAGMVEEAELAFMRAQEFLGFDHGRHPFYFLMRQFASIGNLRGVNRVWKDIKMTFSYNRTNFSYLLMFQCLYKLGDTDRMKEIYKEWEYRYENYDPRLTNMLTRAHLRNGMTNEAELLWEKVKERGGDFDFETCELFREHYLGKGDTTSALKWAEKMTKLPKKQGKQDQETCKFLKWFEEDKVVEGAKSTCNCSNCLRNADSETCEPLLAPADLLPD

SEQ ID NO: 35956 - protein, 201 aa, Oryza sativa
MESDGEEEAAATPGAGGAPAAGRLKGCPELMVDDDMREMAKTAAWSVSSCKPGNGVASLRDDNLDTYWQSDGAQPHLVNIQFQKKVQLQLVVVYVDFKLDESYTPSKISVRAGDGFHNLKEIKTVELSKPVGWVHISLSGADPRETFIHTFMLQISVLSNHLNGRDTHIRQIKIYGPRPNHVPHQPFHFTSREFVTYSTVR

SEQ ID NO: 35957 - protein, 188 aa, Oryza sativa
MGDAQFYFLLPTRSVFATDAARRASAAARRAVPPPPSSSSDGDDGEEEREAAVAKRPRNGDAGSLAGRKSEKGSKGYRQSDNLQLLQLEEKDVISSTATVLSDLCGPQEWVPMDRLHEVMFEKYGDLWHHNRVRKYLTSEDWPKSETDGRPWHGLSLLLRKYPEHFVINIRMSGGRSIEFVSLVSLQP

SEQ ID NO: 35958 - protein, 67 aa, Oryza sativa
MGASLHASCFSRRRSPKTRARSSEGARLPWPASLRGNINRNILCRWRWNCVHAGDNWGCIFMSEWKN

SEQ ID NO: 35959 - protein, 228 aa, Oryza sativa
MVKLISAFGSPFGHRAEAALRLKGVQYELLLEDLRSKSDLLLAHNPVHKLVPVLLHSDGRSVAESLVVVQYVDDAFHGPPLLPADPYARAQARFWAQFIDDKFSRPFWLSFWMEDGEKKEAFVREAKENLRPLEAQLDGGNKRFFGGDAIGLVDIAASGLAHWVGVFEEVTGVSLVSEREFPALCRWSQRYVNDGAVRQCLPSRDELVALFTANKEAYTLLAKAKLQK

SEQ ID NO: 35960 - protein, 174 aa, Oryza sativa
MATGSGAAAAAAADAEEKESGSRMITLTSNEGKAFVVTEASARQSATIRSMVDDGGCVDKGFPLPNVDSKTLARVIQYCDEHGNKEPHTVDERAALAKFDRDFIAELDADKAFLYDVTMAANYLHIQGLLALTTQCVADTIKGKTPEEIRTAFGIEYDLTAQDEKEIKEEDTHA

SEQ ID NO: 35961 - protein, 192 aa, Oryza sativa
MALGALLRRARALPLLPQGTAARSFSAPNVGHFSASNTKHAIQRCREALLEELIWNEVYAKHNEARVRRLINSLVRSLGDVPKQKGFTKTFSQEFGMVVKELEKDMNMSFKSFKVPLRRLILRTLDKYQQQGSDALLKNSLESKVHSSHWGDAHANPNFWTRAFGLSLLLSFFSFEVGQQYEILNGEGELPK

SEQ ID NO: 35962 - protein, 53 aa, Oryza sativa
MRPSKSARHIHPTSLSSEIAAVAVAAVAAAAAGWNRICLRVLDSLQDRSVGES

SEQ ID NO: 35963 - protein, 150 aa, Oryza sativa
MIPFPTSLVDKHSQFPIGQRLRCGGAQPVLLLQARDRRPVRGAVVPLPSGACGGGGGGALLLVLEVAPDGPEDLGATPHGRARRAVRRGALGRQRHHFLHGRHHRAGPPHPGVHRHHRVAVPALPQRLRPHGNFVEHLSCNNLGNVKRGS

SEQ ID NO: 35964 - protein, 304 aa, Oryza sativa
MFAPTFAVAAALAPPPPRGGGGGGGEFDHFVVVDFEATCERGRRIYPQEIIEFPAVLVDAATGRLVSAFRAYVRPRHHPRLTDFCRELTGIAQGDVDAGVGLAEALLRHDEWLRAAGVVEGGGRFAVVTWGDADCRTMLEQECRFKGIAKPAYFDRWVDLRVHFEAAFGGGGQRVKLQEAVRAAGLEWVGRLHCGLDDACNTARLLVELLRRGVPISITGSLPAAPPPLEQARKQQQQQEMQQLLVPCGAAVCCYCGVASTGGVMAMPGSTQRRCFYGCGNWTAVSGATCPFFLMGGVVDCPIN

SEQ ID NO: 35965 - protein, 322 aa, Oryza sativa
MELVVAVAGAVVVALSLCIGGVQGQLQVGFYDQSCPQAEVIVRDEVGKAVSANVGLAAGLVRMHFHDCFVKGCDASVLLDSTANSTAEKDAIPNKSLRGFEVVDSAKRRLESACKGVVSCADILAFAARDSVVLAGGTPYRVPAGRRDGNTSVASDAMANLPRPTSDVAQLTQSFATHGLSQDDMVILSGAHTIGVAHCSSFSSRLYGYNSSTGQDPALNAAMASRLSRSCPQGSANTVAMDDGSENTFDTSYYQNLLAGRGVLASDQTLTADNATAALVAQNAYNMYLFATKFGQAMVKMGAIQVLTGSDGQIRTNCRVAN

SEQ ID NO: 35966 - protein, 62 aa, Oryza sativa
MQKYYCSISNISRKLNLVYSKDHSKGRHIVCIIFINIIAYSSVALTVCQETILFFDHPTKLM

SEQ ID NO: 35967 - protein, 234 aa, Oryza sativa
MAGHDELKLLGHWSSAYVTRVKLALHLKGVSYVYVEEDLRNKSDLLLASNPVHKTVPVLIHNGNPIRESQIIVQYIDEVFSGAGDSILPADPYERAVARFWAAYIDDKLLAPWKKVFRAKTEEERAAWMKQMFVAVDVLEGGLKECSKGKGCFFGGDSVGYVDVVLGGAVSFVHANDMITGGKLFDAARTPLLAAWLERFGELDAAKAVLQDVDRAVEHTKVRYARNAATAAND

SEQ ID NO: 35968 - protein, 357 aa, Oryza sativa
MSSSSSLYKQLGLGAGSPVSASHLLLLVLGAGFLALTVFVVHPNEFRIQSFFSGGCGRPGTDAATAAVAASPVKNVSGGASDAAAATTAARSPDNNVRVLIGIQTLPSKYERRNLLRTIYSLQAREQPSLAGSVDVRFVFCNVTSPVDAVLVSLEAIRHGDIIVLDCAENMDNGKTYTFFSTVARAFNSSDGEGSGSGSPPPPRYDYVMKADDDTYLRLAALVESLRGAARRDAYYGLQMPCDRENFYPFPPFMSGMGYALSWDLVQWVATAEESRRDHVGPEDMWTGRWLNLASKAKNRYDMSPRMYNYRGASPPSCFRRDFAPDTIAVHMLKDAARWAETLRYFNATAALRPSHL

SEQ ID NO: 35969 - protein, 124 aa, Oryza sativa
MAGAGTVCSMCGDVGFPDKLFQCARCRYRFQHSYCTNYYGDAAPAPAGADMCDWCLSDVAGKARYSSAAGKQQGAGSQESSTTTSSSSAGRGGGGKPGAGEQESGRRGTKAAGRRYKLLKDVLC

SEQ ID NO: 35970 - protein, 198 aa, Oryza sativa
MNLSYLDDESRTGLRRNECSTSYLPLPDHICRVPETWGHGHAVLRMVLGHAMLLWMVLVLVLLMLLLMPFAVSLAVVLPCCRFPWGELDLEAVVDVVDHGAGARHRLHHRVLDLEPLLQVAADGIDAVELVLGGGRPLLGEPPAAEPADDAGGDGEEGDHGEHGEHRAERAPGRGGRLRVHDGVGGWVVTHGLRKWLV

SEQ ID NO: 35971 - protein, 249 aa, Oryza sativa
MARTMLDEYKTPRKFWAEAINTACYISNRVFLRSKLGKTSYELRFGHQPKVSHLRVFGCKCFVLKSRNLDKFEARSTDGLFLGYPAHTRDYRVLILGTNKIVETCEVSFDEASPGTRHEIAGTLSQVQEEDGRIFEDESDYDDDNEVGSAGQTGRQAGQTAGTPPVKPAHDVRSDRPGSSAEGSVDADRDGPPEITTSTSTDTERGSTSEVAAPLHIQRRHPPEQIIGNIGERTTRSKILLRLCAGNLR

SEQ ID NO: 35972 - protein, 236 aa, Oryza sativa
MLRRLPPCLRRALPASSSSTSAPRRGVRLAEHGQSPPQSAPPPPSPATQKDGAVRTPGGGSAASSLNPAEVAHFASFAETWWDTEGLFKHLLVMNPTRVSFIRSILCKHFRRDPNSSKPLEGLKIIDVGCAAGMLSEPLARMGATVTGIDAADESIKIARVHAASDPLTASIEYLCTTAEDLVKENKQFDAVICLEAAGIIFKTLKFRDSLSISERGAFLLSYISILENALVVLYS

SEQ ID NO: 35973 - protein, 267 aa, Oryza sativa
MVAALKANIHCWFYEYLENGSLDKALFGTEKLNIDWPARFEICLGIARGLAYLHEESSIRVIHRDIKASNVLLDANLNPKISDFGLAKLHDDKKPHVSTKVAGTFGYLAPEYAMRGRMTEKVDVFAFGVVLLEILAGRPNYDDALEEDKIYIFEWAWDLYENNNPLGLVDPKLEEFNREEVLRAIRVALLCTQGSPHQRPPMSRVVTMLAGDVEAPEVVTKPSYITEWQLKGGDTSYLDSEVSWQSSSAPGGPASPRTSSPFLSSVD

SEQ ID NO: 35974 - protein, 182 aa, Oryza sativa
MASSASSATSLASSITPCSPVFANRGDPSRSSSSSSTRRVTSHGCSCRPPPRPHCSASSPRTPTAPGSSATRAARDSAAPSRVPGSPRSSPSRAAAAPCCSTYAPASVSPSREAVRPENLPPPILLRHRRRHQEEVPPARYACTSWCSPATSCSWSSGSSQRGRRRLMRFRLEHGDGQQPPH

SEQ ID NO: 35975 - protein, 80 aa, Oryza sativa
MAGSGRCGLCLVKGRRQAPAATPSPPPDPVAGLPRPAPVGDGAGVGSSADLGLVCFFYLFHVLSFNLSHMCTENELLLLT

SEQ ID NO: 35976 - protein, 137 aa, Oryza sativa
MSVEILDGKTVLSFVEDEGAFNSSVDGRFAALDTNRDGLLSYAEMANELMSLRVLDKHFGVDEAAMGADELVELYHGLFLRFDRDGSGAVDLEEFRAEMKEVLLAVANGLGFLPVQMVVEEGSFLKVAVDRELAKAA

SEQ ID NO: 35977 - protein, 106 aa, Oryza sativa
MIEPRTLQYKLLEPVLLLGKERFAGVDIRVRVKGGGHVAQIYAIRQSISKALVAYYQKYVDEASKKEIKDILIQYDRTLLVADPRRCESKKFGGPGARARYQKSYR

SEQ ID NO: 35978 - protein, 428 aa, Oryza sativa
MRSSHQPLCTRAHQAAALLLVAATFFLTRLLDRSPLSAPPPPCAAPYSPWPHRDLRIYVYAEDEVDGLRALLRGRNDDVTAATCIKGQWGTQVKIHQLLLSSRFRTFDKDEADLFFVPTYVKCVRMTGKLNDKEINQTYVKVLSQMPYFRRSGGRDHIFVFPSGAGAHLFRSWATFLNRSIILTPEGDRTDKRGISAFNTWKDIIIPGNVDDSMVKSDRLAVKPIPLTKRKYLANFLGRAQGKVGRLQLVKLAKQYPDKLESPELKLSGPDKLGRIDYFKHLRNAKFCLAPRGESSWTLRFYESFFVECVPVILSDEVELPFQNVIDYTEVSIKWPASKIGPGLLEYLESIPDGRVEEMIGRGREIRCLWVYAADTERCSAMSAIMWELQRKVRRFHQSAETFWLHNRSIVNRDLVEFHEWRTPVPLP

SEQ ID NO: 35979 - protein, 64 aa, Oryza sativa
MLTKLKGIATPAPFSFVKMRRNISPLEELRVECAWLFCSPLISLLVLGAGGAIQMNSTCELLFV

SEQ ID NO: 35980 - protein, 392 aa, Oryza sativa
MMEPAYAPGRDRLSALPDNVLRRIMSFLNARQSVQTCVLSRRWRHLWRSLPRINADYTEFCFACLDEKKEKVQEARFKKFVSTLLLRRDPVPLLDKFWLRYQVSDGNNNEKASAEAGLWISHALQLQTPVVEVLTFQFPLMLDHAVFTSDYLRKLGLSNAYLRMGFFEQLSRGCPQLEDVFLNDCIILDDEISSTTLKTLNIYASRFSEDYRASISTPSLTSLTLYKPDASVPSLKDMKSLVSASIILDDNTDIHELLMSLSGVRNLDLECPQKMVSIAKNTQWCPEFKDLVNLSLGQFCLGSKLYALTVFLKNSPKLEKLTLDPPEVIIDKLEERSFECEHLKIVEVICSEDDSTLLKLVEDIFVTSGMNSLQINRKSSYKQYYSDDFFQI

SEQ ID NO: 35981 - protein, 194 aa, Oryza sativa
MPVARSWVCRKTYVTPRRPFEKSRLDQELKLIGEYGLRNKREVWRVKFTLAKIRKAARELLTLDEKDPRRLFEGNALLRRLVRIGVLDEGKMKLDYILGLKIEDFLERRLQTQVFKLGLAKPIHHARVLIRQRHIRVRKQVVNIPSFIVRLDSQKHIDFSLRSPYGGGRAGRVKRKNAKKGQGGAGTGDDEEED

SEQ ID NO: 35982 - protein, 128 aa, Oryza sativa
MAGRGGGGGGGELQLLGTWYSPYAMRAKIALGLKGLSYEYIEQDLFGKSELLLKSNPVHKKVPVLIHAGRPVCESRVVLEYVDEAWPGAAPPLLPADPHDRATARFWATYFDSTVIDGIFLKKSTLDR

SEQ ID NO: 35983 - protein, 246 aa, Oryza sativa
MATTRRRTASAIPSSSAPADELPGRGGDALGAERLEGSVPAGELVKAKATKKPAAFARVWSEADELRILECLAAHVEKHGAPPGRSQLPEVLAGRGLDKEEFTVSEIYEKVRRLRTQYDKMLSGPRPVPGDNRFELSCAIWGNPVAPPPTSPAPEKSSIPASGTRGRRDLEELRPLYPYLVDEVERISTNELGGHVLKMGLEFIDDGTAVRMNGMAKKQRVLELKTMLKLDSMRKEVTRTLLNNMD

SEQ ID NO: 35984 - protein, 135 aa, Oryza sativa
MPQSLVEPFNGIGEGFIVLSQGSLYFVNSDHDKPYKVSVWVLEDYSSEQWIWKHTVSHLHLFQTKRLLFGHDYKVVSIHPERNNIFLVWPHSKMLMSYELDSREVHFICGIGGCEWVMYYLPYVPLYLESLADGH

SEQ ID NO: 35985 - protein, 321 aa, Oryza sativa
MAATLAGRRLLLQRSAAAAGGRWRLLGTAAEASSSPGGREEAGGGGGDEIYLKKPAAAAVVTTRDETSVAMPMSFMTGSVVGKRFYREATVRRADDGNGWSVMLDYRTLKSPAKRPLKLQSRTLAMAIAAEWEYQEADGIRPFTMPLMKLACTALERVPLTRKKIIDNLMKKFHQDLVFCRSPDDNELTVGVYQRQKEKIDPILDWVNTEFGFKPVVYTSFFGGKQDEGLANAVETVLKNTTDFELASIDAMAAAAHSLVIPLAIFRGKLGIEQAIELIRLEEDHQVDRWGLVEGGHDVDIADLKVQMSSAVVFLLLSWQL

SEQ ID NO: 35986 - protein, 89 aa, Oryza sativa
MCDRKAVIRNADMSEEMQQDSVECATQALEKYNIGKDIAAHIKKEFDKKYNPTWHCTVGRNFGSYVTHETKHFIYFYLGQVAILLFKPG

SEQ ID NO: 35987 - protein, 108 aa, Oryza sativa
MTVLMVLNLNLKTKEQMPNKLFKRKNKKTLDTREGPNVEFIKKEGEHVRPESNAGHGEHNGCTMPSAALRYAQCLKRKNIKQYLKAKRETVNSKMCKLKLNLLMQSFS

SEQ ID NO: 35988 - protein, 315 aa, Oryza sativa
MRLLRLAAMAHLPLLLLSFLLLIGVHASVSDGSPLPHTYNTSICSKSYKCGGVNISYPFYLSNATGETYDYTQFSCGYTDLNITCSWDGSKQTPFIQLNGDNYTILEIIYDSRTIVLVDTDALRGGSCPRVRHNITFSQADEWLQYTGPRDNLTFFFGCNLVPLPPMDPGLTRFVDKNQINCKDFSNWPDGGDSFVFTSVELEAPMEYELASRCRQVIVVPVNGSILNSSSQSALPSGEYGQVLKKGFELAWKSRKDKQCNLCEQSRGQCAYSQNRTFLGCLCADGKVSSTDCTSSKSFDADPSFFSPPFCKANN

SEQ ID NO: 35989 - protein, 69 aa, Oryza sativa
MRVGRHGGFLQLPHPSPLHVPPDLSLPSLWRGNSHGRSCLDVKNYLVDLEKKKSQFMCMLFVFRLLHFF

SEQ ID NO: 35990 - protein, 232 aa, Oryza sativa
MDAPALPPPPRLVDYISSLQGLVRLGDLADLEPDKSVVVVVSGCYPLEDAPILFDDLSARETWCVIGMPELCILRARAISLLQRREDLRALVRDMGHDLLVCGTESGKVEGVLARALKLPAGMDAPPGISLDLVGDADEGRRFLRRDIARARLQLAALAGHTERHILRRLGRELALRASTGVVAPQELWPDIQEQRLRHAPPDSTSDAALYAEAAEEAAWVAPAGTPPDCDA

SEQ ID NO: 35991 - protein, 551 aa, Oryza sativa
MLEHGWRCLGESVYVLSTFADTKERTDQCTVNVEVKLGRNDDIEFAVSPDALRFTTPKFSDFVSSDEMETFENDKEVILDYCNFRTACTTLPTLQEGHVIGFSKTLPTGQCLDKFMQLCSLKHDLEADYSHYAAVRFGYESSHEIWLPCSFVLQGSGLQPAPKSSRASRAMCALQSFMGLLNAWNFFGQNQLVIKEQLLLNSTATLPTWDKAMSSARTNNSEDLRLVHTNILTNDQSLALDFRTPKPAVLCSTSIKPWNTKVQMTSLSLDNDDTGNRKGSINYDCQTQSIVRTNLCKSQVALLKPSFSRGKSEQGHKRKHSSEHSDADNSDKLRHTSLTNSTLVSGGHKRKHAESLDRNCQEVSKVHLQDYSQKENLDTSRKSKDCIPQVPDETRAIPGVKNDMLSTKVMKPTLKCVVSNDEKTAPTNSKTKQKVRKDVLTAVTKPTIRTEDVKDHFTKKVVDNQKDELMKKATKAKGRRVVNSTELTSMNSKTNSDVLNDDIVRKVTDHQKRGELRLLTVADLKCFLSARKVKVGGTKEMLIKRVAELIG

SEQ ID NO: 35992 - protein, 45 aa, Oryza sativa
MMCYRSAAPELFHDKSDMCRRAAMASPAPAAASPATPAILHMLCL

SEQ ID NO: 35993 - protein, 407 aa, Oryza sativa
MAAAAAPLADDGDGIVDRGMWLACAAPNSGRLPAVGSVVFYFVDGHAAQFCQFPAPLLEQLAVPGPRVFLCTVAAVRLRADALTNEAYAEITLDPVADHDVPRLAPAPAPAPAAAAGGQQLRYFVKTLMISDFDFRIRFSAPMADAKGVFPPLVDAKAVQPLLVKDLHGSPMTFDYGRKGKRVTLAKVWKKFRDDMDFVDGDSVIFMRRRDDDDDDGELYVGVRRQRTLERPLRNTMRRYRPPTPPQAAVQEAVLAAAGHAAAGERFTVAYRSRKDGDEFVVPREAVEEGLRARLTSLAEVEFVWAVEDGAPPVVGPRGKVTAIATGQLWRNLEIVWDGNSEMDMSANFWQVRPVEEVDISPSTPPPKRLKNCEIDDTASTSVSVDNGDEQVPTMRQRLEALIPDNI

SEQ ID NO: 35994 - protein, 133 aa, Oryza sativa
MMASSRAALLVAVLLLLLVSSLSVRAEADQVARAPALAPDVAAASWVQQGSQEAAAPGRPGMGMGKNGAARWRRTAGRRGRGGGGGGTGAWAFSAMLPRGFVPPSGSSACHNDMPAAAADAEFFVCGGGDGSP

SEQ ID NO: 35995 - protein, 133 aa, Oryza sativa
MKTRSQTAPKPLKTVRLPPVKPRPKPPPPQPQPPPSRKKGQPLVDRRRPKKPPTAFFYFMEDFRKTYKEENPSVKSMQEVGKACGEKWNTMTFEERVKYYDIATEKRAEYEKAVAEFDKKKESGELSEESDYD

SEQ ID NO: 35996 - protein, 274 aa, Oryza sativa
MERFQDRHHVWLRSREHGLYLHADLADGSSVYLHPYRATARAAWAVHVLHHFDGRMLMLHSAANGRYLAATTSPWAATAARFGLGGGNRVTLRDLDRLPMFAAGWFPIVSASGDVLLGHASDRFLRAIDRGDGNGVTVEVSDSRRPNTPWVVEAIPPIESIPRLPHLVGIGHIARAIRFVRAERASTDGTFPHVAWACFEFTGRSLFNLRTELARRLNFAVVSDVIMCVRAGLFGRLTPLITDLPPNNVTMEIIVVTAGTIDANELRFPNVGAV

SEQ ID NO: 35997 - protein, 188 aa, Oryza sativa
MALSRRRFAPRALQLGAGATAGYTALMAQAMSHHFGSLRRAILRKLRLHAAAAARTRSALLRLARDAMEEDDEGDGEEEEEVVNRVVRRTKQAAAARAEQAWRPLRGLPEDAVGVLRAWLFDHFLHPYPNDNEKLMLAVATGLSRTQISNWFINARVRLWKPMVEEMYNDEFDDDDAGSGGGGASSSS

SEQ ID NO: 35998 - protein, 195 aa, Oryza sativa
MTTTTTAATRRWWKRRGGGGGDGAEDGDDLIPMDIQDQEEMVRSLEQKQAQQSRRWRRVFAGFLLGYAAFLVYSGFHHAAAPWELRYHAYFMEDLSSPMVVVADWIAALACLFSIKGLLHSWKKWMWYSFYVSILVALFWTYYLLRLPRIRWDVAWLPFGPLIASALSLYVDHSMLESMQDINTLRSYMYNYKAL

SEQ ID NO: 35999 - protein, 64 aa, Oryza sativa
MQAYNTPSHAVNLAAHARHHRLRRARRPALVALAVMADPLASLARAMEVVPDSEMEVAPVSSSE

SEQ ID NO: 36000 - protein, 198 aa, Oryza sativa
MRIEEVQSAAKKQRIATHTHIKGLGLDANGAAIGLASGFVGQAAAREAAGLVVDMIRQKKMAGRALLLAGPPATGKTALALGISQELGSKVPFCPMVGSEVYSSEVKKTEVLMENFRRAIGLRIKENKEVYEGEVTELSPEEAESTTSGYGKSISHVIIGLKTVKGTKQLKLDPTIYDALIKEKVYFLILILMSCARL

SEQ ID NO: 36001 - protein, 22 aa, Oryza sativa
MCKPSIIEDIRLRELEGKNLLE

SEQ ID NO: 36002 - protein, 363 aa, Oryza sativa
MQRQKQPQPSHIVRPSLTPNLGPLDTTTTTRNVDERREAKLGEMAATAMQCRGGERSEDGGGGGMRTVECLRGRLLAERVASKAAKEEADSLAKRLDELEKKLSDEVKIRNKAERRLRRAIKKLESLKILDVELSDSSIGSLSSNSCSGHRAPETEADVNNPGSSAGSCTQVNSSQEGSWCSVVSEQSPSVHCKEEEENGLDPEDAKNCGSGEEAGDHDSERTHGTLPCSRDDEPVHVPSDFGSSKSQDNQRDEDDDRLALVLVDPQPNAETGNEDYMRIDIQARKAQAEPREGDGEMEEANELAIVLADPQPEPKAEPAATARPRNDVQSVLLALRQVKEQLRYTIERRSELVAHQELCGHC

SEQ ID NO: 36003 - protein, 474 aa, Oryza sativa
MELPRMASRRLPLPLVAQLVVLLGLACGLRSSSAAAAAASGLAGERVTYLPGQPPVDFDMYSGYVTVDKRAGRSLFYWLQEAPAAAQPAPLVLWLNGGPGCSSVAYGASEELGAFRIRPDGATLFLNDYRWNKVANILFLDSPAGVGFSYTNTTSDLYDSGDKRTAHDSYKFLVKWFEKFPQYKYRDFYIAGESYAGHYVPQLSQLVYRNNKGVKEPLINFKGFMVGNAVTDDYHDYIGTFEYWWNHGIISDGTYRLLNASCVHDSGEHPAPACLAALNASTVEQGDIDMYSLYTPTCNETSTSSAAARQRRLKQGHYPWMTGSYDPCTERYSTEYYNRPEVQRALHANVTGINYTWATCSDILNDNWRDSPRSVLPIYHELIAAGLRIWVFSGDTDAVVPLTATRYSIDALGLPTTVSWYPWYDTMKILCLRDQLVPPLPQKFVRLHQHLLPFHHCNHKGQDVSYGKPNACDA

SEQ ID NO: 36004 - protein, 132 aa, Oryza sativa
MAPSKSTAAAGVLLVLLVAAAGGGAEAAATTCVASLLELSPCLPFFKDKAATAAPEGCCAGLSSIVKGEAVCLCHIVNHTLERAIGVDIPVDRAFALLRDVCRLSPPADIISTCANEKGGVPPLYSCPAPSA

SEQ ID NO: 36005 - protein, 244 aa, Oryza sativa
MANFQAALLLLLLRFLLNLAGHRGEVLSVSAAQQQDPPGDDLVFLKLRSGDGDGTVLAMHRHDISFAGFTNGSHHWHVFRGDEDAIPNARRLPFRNTYRDLIGGLHHVPGLPLGKAAAARAAGVLASYDPDAEEGTAAVKRAVAALSVMFTQALRLEPIRETVSSGWESGEARVAAEHLPYIEHWDTMSFEVLRWRRTGEWDGPFTEVLRRRAGIRSAGEALAIAKLLANRSFVQLLQDHSHSA

SEQ ID NO: 36006 - protein, 67 aa, Oryza sativa
MALAVEKAKERAVQTAHLAMNGWNAAPPGAGTAATTSRRRRGARGSHEPAPLLRITDKHNTTHGNVP

SEQ ID NO: 36007 - protein, 119 aa, Oryza sativa
MAALDFIVSTASDIFIPTYDGNMAKLVEGHRRFLGFRRSVLLDRQKLVGFIDLYNNKTISWNNFASSVQETHRNRVVQPSCRQKLENKPKEEDYFYANPHECLANSRFCSRTKDAISVR

SEQ ID NO: 36008 - protein, 425 aa, Oryza sativa
MLLERVLFTLDGLECNKIGVGYEAFRSQPNFCSSPLDSCLGDQLSKFWEIDKNRVNNSQPPQYVVLGKFERINQYPNAGVHTFSVGIPEVLNTNLMIELSADDIEYVYQRSSGKIISINISSFEALSQVGSARVKTKNIGRLEASYSLTFDCLSGINPVEEQYFIMKPDEKLIRTFDLRSSTDQASNYTCQAILKASDFSELDRKESQFSTTATVLNNGTQIGSSENHTKGGIWGFFEAIKAWCAKMWHMLINFFTGTTCSTRCWSFLKFVIHGLLLVAVLWLLHRKGLFDPLYYWWDGVVGSEAQERARRRHKRAHSHRHSHHHDAHKRHKTELAGHRRHHVLHIHDDDDPVAAAAAAEHVILRRHGRHEAALGVQHRDGLKLNKHRRHGGKAVALLPPGEIIVRDGGGCGGVEHGDRRHHAWH

SEQ ID NO: 36009 - protein, 299 aa, Oryza sativa
MGGNGGGGGGDGVTVVGRAEIDMRAPFRSVKEAVVLFGEKETPLLAGDGDVHGPGLHRLRLMNRAATTPPAIWPTFSQQQVSGGVVAVTRHVPAELEEARQELEKERSEKQKMAGCILSLQEELSNAMSELNKIKARDDVGDGDGGEAAAKVIDLQVEDLKFVEIDDDKPQPRQQSPSPGEFQKRRYVTFADPPPPMASAYDRAPPQAPLPDVVIELRHRHNHSSTPSPPQLREVRFMRQMSASHGMMKAAAVAAVDQEGRKKKKSLIPLVGALFMRKKKSSSCSCHNDDSALNPRTSF

SEQ ID NO: 36010 - protein, 167 aa, Oryza sativa
MLDDRSRETKLVRLPIPAGIWPAKLGGEMLRWVSSVSLSNPVAGSCDALKSLPPRLRYLSDVRLKTAASRPPLCRRRPPRSRKVTRPPSQRTPAQRQQSVPARHDRNAVADAVVAENDRFSWSSAAAWSGKHGSELAIKVCSRRRSTSNNGSYSRWATRGDILAGGS

SEQ ID NO: 36011 - protein, 279 aa, Oryza sativa
MGRQPCCDKVGLKKGPWTAEEDQKLVSFLLGNGQCCWRAVPKLAGLLRCGKSCRLRWTNYLRPDLKRGLLSETEEKTVIDLHEQLGNRWSKIASHLPGRTDNEIKNHWNTHIKKKLRKMGIDPVTHKPLYPAPPLADGGSPEQKVPEEEEEVEEKSSAAVESSTSTCAGHDVFRTDEVPMLHLDDIVLPPPCDVVGDTAGSPAESSSTSTSSSGGGGIDEEWLLPIMEWPELMYLMGLDDVDMVTTAAPAMATSWEFEDPFNAYQRIALFDHHHELTWA

SEQ ID NO: 36012 - protein, 374 aa, Oryza sativa
MSDGSVESPSLHRTPPPPSPSPSLSLSRSQQQTPRGRQPPPPGADPVAFAVVAFVAICFVLISFSAPSSILHQVPEGHVGVYWRGGALLETITPPGFHVKLPWITQFEPIQVTLQTDQVRNIPCGTKGGVMISFDKIEVVNRLHKEFVHETLLNYGVHYDKTWIYDKIHHEINQFCSAHSLQQVYIDLFDQIDETMKEAIQRDCTRYAPGIEIISVRVTKPNIPDSIRRNFELMEEERTKALIAIEKQKVAEKEAETQKKIALSEAEKNAQVSKILMEQKLMEKDSSKRQQQIDNEMFLAREKALTDANYYRITKEAEANRLKLTPEYLELRFIESIANNSKILFGEKIPNMIMDQRMPRNYLDNGSTKDHLEI

SEQ ID NO: 36013 - protein, 360 aa, Oryza sativa
MAPSLATVVAIFLAAILLSSPPPCAAASSAPAPAAAGHGVPAVFAFGDSTLDPGNNNRLATLVRADHAPYGRDFPGGAATGRFTDGKLITDYIVSSLGIKDLLLAYHSSGLAVADASTGVSFASGGSGLDDLTANNALVSTFGSQLNDFQELLGHIGSPKSDEIAGKSLYVISAGTNDVTMYYLLPFRATNFPTVDQYGDYLIGLLQSNLNSLYKMGARKMMVAGLPPLGCLPVQKSLRGAGSGGCVTEQNEAAERYNAALQKALSKLEADSPGAKIAYVDIYTPLKDMAENPKKYGFTQASLGCCGTGMMEMGALCTSALPQCQSPSQYMFFDSVHPTQATYKALADEIVKSHVPQLMQ

SEQ ID NO: 36014 - protein, 159 aa, Oryza sativa
MSLRRLAASALRRGGANDGGVLAAVRAEIAHELSSSPSSSPPSLQSQDIPDFSTVSDAPRGQEVLLRRRDASEEVLVSAVLAPLRFEGEEPLPRDALMKVFVSKPDVKPVMRFDCRAFAAEGDGGSADYDVTAVCYHPFAGECDAGEDKYEGPEFRRSC

SEQ ID NO: 36015 - protein, 32 aa, Oryza sativa
MTGSLLKAQFWQVLNSSSMAGSLLKAFSFGKF

SEQ ID NO: 36016 - protein, 195 aa, Oryza sativa
MWHAEIMRQNWDEEVKSGYHNSKLSSQCTHRYKIYAEGFAWSVSLKYILSCGSMALVIDPQYEDFFSRGLRPEVNFWPVHIDVAAGGMCESIRDAVEWGEAHPAEAEAVGRRGQRLMEELDMDAVYDYMLHLLTEYARLMRFRPAEAPPPRPPAQEVCEASVLCLAGEKQRRFLEASAASPAVSEPCVMPPDAGE

SEQ ID NO: 36017 - protein, 161 aa, Oryza sativa
MGKFRKLGRHAAHRVSMLRTMVSQLVKHERIETTVAKAKEVRRKADQMVQLGKEGTLDAARRASAFVRGDDVVHKLFTELAYRYKNRAGGYTRLLRTRIRVGDAAPMAYIEFVDRENELREAKPATPQPPQRSPLDPWAKSRASQQWAGPKISEGSRKEGL

SEQ ID NO: 36018 - protein, 334 aa, Oryza sativa
MSQVTAGDGAKIMGYAAVGSPAASHNATIVFNSTVVGVKPAPVVAAFSSRGPSAASPGVPKPDIMAPGLNILSAWPSQVPVGEGGGESYDFNVVSGTSMATPHVTGVVALIKKLHPDWSPAMIKSAIMTTSSAVDNDGHAIMDEEHRKARLYSVGAGHVDPAKAIDPGLVYDLAAGDYAAYICALLGEASLRVITGDAAATCAAAGSVAEAQLNYPAILVPLRGPGVEVTVNRTVTNVGPARARYAAHVDAPGSGTTTTTTVKVEPAELVFEEAMERKTFAVTVTASGGGGAGGGGHVVAEGSLRWVSRRHVVRSPIVADSSVGGPSRRSAQDA

SEQ ID NO: 36019 - protein, 64 aa, Oryza sativa
MVVRTQLTRTEKELVRSCPRICQLYNCLCTSFAHILLRLSFFCHAGTEDHKINSNRKSHFIDND

SEQ ID NO: 36020 - protein, 77 aa, Oryza sativa
MPPNHRRPARRSPPHRSRSPPTKHRRTPRRFLLATTVRRRQTAVALPRSAEPSLHRLGRRQIDRSHRQLHLRRHREP

SEQ ID NO: 36021 - protein, 467 aa, Oryza sativa
MVLKKSTGRSSGHASTSYDASAGGGAVAVSAYEQRIRRNAAVLEKVAVSVHDSLASTREAALAELIAALEGFLSADDAEGGHTDEILRGCYVSIKKRAAREACVALRAVALLAVTLGPGATSKKIAAVETAANPLGSGANKIMKATYPLASRILEAPQADASLVVAALECLAVVAFVDVAAENMDDTEACMNALWAVICPSAGPKLASAAKGTASPRVLAAAVSAWTLVLTTTGGWNKKKKVSPAAPWRGAAAHAHLVSLLGSDSREVRMAAGEALAVAIEMKLFTEKNNGALFSKMEARASDLANDAAGAGVDKTNFVEQKELFKDITTFLAGGKPPVISVRTSSSNYGLLTTSTWTDNVRLNFLRRFLAGGFLHHLQGKGLMGQVFVIDDDEVTGKLSAARSKRSLMKDTRIVKELNGGRGGGGGAMDEKKEKKQEMIKNSLEKKRTVKKERLIAHELKHGSSDL

SEQ ID NO: 36022 - protein, 373 aa, Oryza sativa
MMQSAAGAMELLVASQEAGGVVVVGMNSGDAGELSYANNSDMQRTIAAATRKERQEMAAAVRRGRRQARAIAIADLGCATGPNALLMAGDAVEAMLGDAERQQEAAPAEFHVFLNDLPSNDFNSVFRQKQKLVVPSNNANSSRCLVSAWPGSFYGRVFPADSLDYVVSSSSLHFLSRAPADAAPNEGRMYVSASSSSSSSSRVLHAYRAQFQADFRLFLSCRAEEVRRGGVLLLTFVARREAVPSPHDCHLWDLLAEAAADDRRLVDSFDAPFYGPCPEELREAIREEGSFQVTRMELFEVSRSRSCQSQADLDQLAAQTSSTIRAVVEPMLGPHFGWDAMDALFRRYTHLLHNYYRHNNDQLTNVFLALHKI

SEQ ID NO: 36023 - protein, 173 aa, Oryza sativa
MQVQGKHALHGTRYSSPLDCAMKTLQSEGVCGLFRGGLATLFREAVGNSVFFCTYEYSRYWMHRYLDSLWFSGGNHLVLAKDVGVGIMSGGISGMAFWTATLPLDVAKTIIQTDPDPHLSRNPFQILKMVYRRAGMGGCYAGLGPTLARAFPANAAAIVAWEYSAKILSIRRD

SEQ ID NO: 36024 - protein, 541 aa, Oryza sativa
MLRTYNKIHIMGNGDDTTTEMVFLDEAGQQLPEVRVNIIHDDNDDGGDLPPSSLSFRWKTKKYRLWRVPEQVRAINKEEAYAPKFVSVGPYHRRHAGAGDRNRLCGEKLKKRYLHELLRDVEPDDHKHGGILQRCKSSLQEIVDDIRWFYAEEEYVREMKDEEMVRMLLHDGCFIIKHLYNFVQGYNEEELYATRWSPAQLRIDLGMLENQIPFFVLEEIFYHLTPRKLQRKITRDVGDDGMMITPQTFQRKTMMRQRKRHKLPVMAMWYMLKGWFVLPEDESDELYKLIADKEVHHLLHLLHLAHAHLVNVDDDKGAVLGLRRRDGSATNQQQQGHDKDDDDAKAKANIVSAAQLRGLGVKISKAPTKRGGILDVRLRNGLLSPVLEVPALTVDQGTVQLLQNLVAYEQQGTPPPSNDDEHPRDYFTTYAFLMYNLVSSTDDIAVLQEQGVLLNNFGSHETIIEYFKNLCRGNQRSGTEEKTHIGKVLQGLRDCSQNKAYRYWAEAKKYMDSPVKILALIVSTLLAISTVLQTTVAFYPK

SEQ ID NO: 36025 - protein, 154 aa, Oryza sativa
MCTAVTSRGVTAMTRSCFLIVLLLAVAMGGSKLSLAAGESGGGGIPTTLGRELRELISKASDFLGAAPRRAGADGWHAAAATGDGADAIRASLRSTARGRPARKSAANCIPADMCRKKKVLCGKRCFRSSSSSSLSHIPSTKCVVKCKKCVPTC

SEQ ID NO: 36026 - protein, 341 aa, Oryza sativa
MAKNACKLCYRRFASPRALAGHMRSHSVAAANAAAAAAAAAAAKLQISSASSASTSFTAADGEEEEEEEEEGVGFKKPLSIYALRENPKRSLRVSEYAFSDRESEAESTPTPAAKGLRAGGGGGGGDGEPMSSLSYAGTPEEEVALALMMLSRDTWPSVERGGGGGEYSDDGSDDGYALPPPSPAPAPAPVPEKRTRFQCPACKKVFRSYQALGGHRASHVRGGRGGCCAPPVAPPPQPHPQPPLPEHDAGEEDMDGKAPPHECPYCYRVFASGQALGGHKKSHVCSAAAAAAHAQTPGGGAPPPQPKILGMIDLNFAPPVDEVELSAVSDPHFPSNPPGP

SEQ ID NO: 36027 - protein, 104 aa, Oryza sativa
MQERKEYAELVRDVAPPAKEDSPELFSSYKDQIGFGLHVVLIMFTGYLVGFVAFRALFNNSPVMNAAGGILGLVGGMLMETVLFIIRSSSKELATSVPRPKKVQ

SEQ ID NO: 36028 - protein, 79 aa, Oryza sativa
MPSTATPSASTSSTASRTSPLPYSRSSSPPPAAFRLPHPRSPRLNPARCLSAFAYAARSSIRSTPSTCPSSSRTTCVSG

SEQ ID NO: 36029 - protein, 409 aa, Oryza sativa
MGQCAMSPARSGTTAGSGGGPTPSSSSSRSASTIVAGTASGYHLLKIDDYSRTRDLFPTSTALKSRAFTIGGHRWRIQYYPNGNTPNCGDYISLFLHLDEEVTREVYAQLQFRLLDDELGDKLPPPPPPPSLDANKFFSHASWGQPKFIKKEELEKSRHLKGNSFTVRCDVVVITEFVAKDMPEAATATAARRRTPARGTGSFVSVPPSDLHRHLGELLLGEKGADVVFKVGGKTFTAHRCVLAARSPVFGAELLGSMKESRRKAVVRVVDMEAQVFKALLRFAYTDSLPEMKEKDEGAMCQHLLVAADRYAMERLKLVCEEKLCERIDVSSVATVLALAEQHHCDGLRNACFDFLSSPENLKAAMAGDGFEHLSRSCPSLMTELVAMLGNCHDPQPTHRSMPNTGSNR

SEQ ID NO: 36030 - protein, 211 aa, Oryza sativa
MAQRHWPWRLAVFVAAVVTPVAAEERLVVGMTLLQAATSTGAVCLDGSPPAYHLHRGSGGGAGGWVLQFEGGGWCNDAPSCAERAGTRRGSTRSMDSLEVFSGLLSNDPDMNPDFYNWNRVKLRYCDGGSFAGDSELRNGSSVLYFRGQRIWDAIISDLLPKGLAKAQKVLLSGCSAGGLATFFHCDDLKGRLGDAVTVKCLSDAGFFLDV

SEQ ID NO: 36031 - protein, 428 aa, Oryza sativa
MSNSTWQPSPPQTPAAAASSASGIDGVENKISPSIVFIVAVLAIVFFVCGLLHLLVRHLLRLHRQRRAREDAESATAFEGQLHQLFHLHDAGVDQAFIDALPVFLYRNVVGVGGEDGKDPFDCAVCLCEFAADDQLRLLPKCSHAFHLECIDTWLLSHSTCPLCRRSLLAELSPTCTPVVMVLESESSRDMVHAADDEPADDGGEDAPGAEEVVEVKLGKFMCVEGNVFFNVNAIAGEGDRAGTSSNGNGDANAKAGGLGQRRCHSMGSYEYVMDAHASLRVSIKPPRKKPAAAASKSRRRGAMSECEFGASKRGESSLRLPPFRATPRKNPDDDAAAAAGAKLAKDSFSVSKIWMVPSKKEPGAAAERRAVSFRWPAAKDWDVEAGSCGGNSAVSSVAAEERPSFARRTLLWVVGGSRQLSRVGSCS

SEQ ID NO: 36032 - protein, 76 aa, Oryza sativa
MSGYGQQPTGDRLESATLVQSMESTKDTIVRRITESAATVDSADVQAAAAKLTAAVEYRFDVAKADVDRIMAGRGN

SEQ ID NO: 36033 - protein, 268 aa, Oryza sativa
MPGPGAHLLYALSGGAALSRLAGAARFGPHHCAVYAANAFLGPDLGSFAEWLASFLPSSSSAAAAVGDLAMGVVHHPFYYPLLLGFPLACLYAWLSRRLLLAGVLDEPSRVALSRRQCFYLITAGSLSHFFLDHLFEENGHSTMYTWILSTGWWVGRAPINSDAVVIVGLLCICLVLGFVYINRVKHEKSATQKSNQSFFLIVVIAILYCMWCATQIYLRNPPQPAIGEEADLGVIIFVAIYLFLPHGLCALSMNQNDYAELEGIQLR

SEQ ID NO: 36034 - protein, 180 aa, Oryza sativa
MGRPRGGKGRKSTEAAKADDGSSSGGGGEEVIPAYKRRGRPQQQKHHHLKDDHAAGDDEDEDDDSVAKTEEEEEEEEHDDIAKIDDDAAKTTAAAAAAPQASKAGSSKAAAQNPGRKRRRQLKRGSDNSNSNSASAIERRRRKDGGEPSSSRQQNGFRQHGSRRKNSTPRRAAEAGVGCK

SEQ ID NO: 36035 - protein, 30 aa, Oryza sativa
MMNCIALVKQISSSGISGFDTEKRWIECCK

SEQ ID NO: 36036 - protein, 249 aa, Oryza sativa
MGRGPVQLRRIENKINRQVTFSKRRNGLLKKAHEISVLCDADVALIVFSTKGKLYEFSSHSSMEGILERYQRYSFDERAVLEPNTEDQENWGDEYGILKSKLDALQKSQRQLLGEQLDTLTIKELQQLEHQLEYSLKHIRSKKNQLLFESIPELQKKEKSLKNQNNVLQKLMETEKEKNNAIINTNREEQNGATPSTSSPTPVTAPDPIPTTNNSQSQPRGSGESEAQPSPAQAGNSKLPPWMLRTSHT

SEQ ID NO: 36037 - protein, 262 aa, Oryza sativa
MATMASSGAAAAAMAVFLAMALVLSGTEARFLSNNITVVGSVYCDACSNNTFSKHSFFLKGARVLIQCSFKVNSTMAEELSLEAERTTDQNGVYKLDVPAAGGFDCREGHDLRSACRATLVRSSSAACNVPGLRGSTQHIALRSRATNACFLNLNALNFRPAKRDAALCHGGDGAGAGGGAAFGSSLFFWPFLPLFWPPYRLPGGGGGTVSFPWPFPVPDWLVPFLRPPFLPFTLYQPAPAGSAPPPFYRFPPSQEASPSQP

SEQ ID NO: 36038 - protein, 182 aa, Oryza sativa
MQRRCLSLYVAVLMLVWLFFAPLSVVAGSLIAIPSALDGSRTSHRRPIENPRFNVTLWEKNEINTRPKASHGFDDGDEVSYTVAMPFIEKLRRRCAVATGGSHRRCDATAIRQFEEDVAPCLLEGLKVNREFSHTLSNLDYSRWLGPYYLDLAVQQRSQMMNLFCMNKPNVLSCLCYLKMIN

SEQ ID NO: 36039 - protein, 314 aa, Oryza sativa
MGFASCVAVCLAFAVLLPWHATATSPTGTIQRETKQQILASIPPHWQENPVLFLTSPSGKYTAYFLRSQTAPGAGGLGADFCYVEVLDTSDPGAEGRSVWESECLAVSTVNTCSLVFSWKGLEVFDGSNSVWHTHDTQSDSQNFLETLELVDEGDMRILDKGGELAWKASDEPRAAQHCGMPGSPGLASAFPPFAQPIGHGSSDLPFGFGNGDHVAGNGIGGGAVAQPELPVAPVPQPELPLAPVPQEADLGGAAGVEPQGQGVGQTSFGFGAQPLVDNSPYDSGAWKQVGGCSLTAIGVGFILNVAIAMGLGH

SEQ ID NO: 36040 - protein, 206 aa, Oryza sativa
MASRDAATFQVYRPMAMPTPAALPPSSQQITMPFTAALVDAVLPAPRKAAATQGGKDRHSKVNGRGRRVRMPIVCAARVFQLTRELGLKSDGQTIEWLLRQAEPSILAATGSGTTPAVFSCSSAPSTASSSFLLGKRPRQEDHEAPTFWEALQQQPRPAVSSWGALASPSQEAQAYASSVAQVHHLNLLSALSGAATRRPAQEESR

SEQ ID NO: 36041 - protein, 487 aa, Oryza sativa
MHTTNGAPACCDANADTPPLHLIFVPFLSRSHFGPVTAMAAEADACHRGGRTAATIVTTRHFAAMAPASVPVRVAQFGFPGGHNDFSLLPGEVSAAAFFAAAEEALAPALGAAVRGLLREGGSTATVTVVSDAVLHWAPRVARECGVLHVTFHTIGAFAAAAMVAIHGHLHLREAMPDPFGVDEGFPLPVKLRGVQVNEEALVHLPLFRAAEAESFAVVFNSFAALEADFAEYYRSLDGSPKKVFLVGPARAAVSKLSKGIAADGVDRDPILQWLDGQPAGSVLYACFGSTCGMGASQLTELAAGLRASGRPFLWVIPTTAAEVTEQEERASNHGMVVAGRWAPQADILAHRAVGGFLSHCGWNSILDAISAGVPLATWPLRAEQFLNEVFLVDVLRVGVRVREAAGNAAMEAVVPAEAVARAVGRLMGDDDAAARRARVDELGVAARTAVSDGGSSCGDWAELINQLKALQLTSSRDRRTDAVTRD

SEQ ID NO: 36042 - protein, 188 aa, Oryza sativa
MQGFSFAAMEEFTFPSVAPERCNAGKKPPFSPHFATPPPWFGGGVVVDAVVYDHRRSFSAVEKGEEEGTVRGGWYYCYDDGGCGNVSARFAGGEETKTMDMLWEDFNEELSRAAAAAPCPLSKEWTKEAWLAGDGTPEMRRHAAAAAAVASGSVVRRRRLSLLMMLKLLKKLFLAHKSNAASRKAPPI

SEQ ID NO: 36043 - protein, 151 aa, Oryza sativa
MVVLPELAAPLLRRLLDLLGVGPDLHHGQQDPAVPHAQDLLAGGKQPEAGVLRVLGRVGDAVLADDGEEEDQPATHDQHPRGEVEEVVDALREAVRRGGWDVAVPLLVRNRVRSDGALYELPATGLAASSPDSVWWITDDGIENLIDRKHQ

SEQ ID NO: 36044 - protein, 210 aa, Oryza sativa
MAGEETASGSKPPAAATTIRLVNFISEDQLDEAKRTRGERADDGTAQRDKPLFQILQENKEKKDAEFNERFKHRPPKALDEDEMEFLDKLASSRKEYEQQVANEEAEQLRSFQEAVAARSNIIHEEAPTVSRPEESKPKAKRSQPALLKNVIISVKPQAKKAKLDGEDKPPAKELPSNGHSADHKPPDATKGVLGSLVQYDDDESSDGDV

SEQ ID NO: 36045 - protein, 151 aa, Oryza sativa
MVPGGMGGGGPMGAAAAGGGGGGDGRHDDEAVLTEFLSSLMDYTPTIPDELVEHYLGRSGFYCPDLRLTRLVAVATQKFISDIASDSLQHCKARVAAPIKDNKSKQPKDRRLVLTMDDLSKALQEHGVNLKHPEYFADSPSAGMAPAAREE

SEQ ID NO: 36046 - protein, 67 aa, Oryza sativa
MPGSLYAARMAANPMNSISLLAAAYGVRGAKHGPLPFSLSLSTSLSSFLLHCMFYISLECLFSFLVK

SEQ ID NO: 36047 - protein, 228 aa, Oryza sativa
MERRGLFHPANFNSTVCGVCVRHGRRQQAAADGNKVPVAEPCALHAGLRGHRPRRRRHRPRRRRATPPGEAPAKRRRRPRVRQQDAGDEAAAPREHELRPQGLQPQRPRLHRVHGHHRRAPGHRRRRRRLAGGGGADHRAVPVPGRARGAAGGARGGGEGVAGGGGGRASPVREGAVRRPWHQRGDTGGRLPHHPHGDRREDQQEQRRRRHHVLLPAGDHRRRRRRRR

SEQ ID NO: 36048 - protein, 328 aa, Oryza sativa
MSELTMDQEIQLNQRPSPQRQQQAQEHGGATAPAPAPATPQDDEQQGHQAAVARHGCGGATAERHHQTKLTLLPLVFFIYFEVAGGPYGAEQAVSAAGPLFALLGFLAFPFAWGVPVSLVTAELAAALPGNGGFVVWADRAFGPLAGSLLGTWKYLSCVINLAAFPALVADYLGRVAPAVAVPGSRARTGTVLGMTVFLSFLNLGGLSIVGWGAVALGFVSLAPFVLMTAMAAPRTRPRRWAARVQVKGKRDWRLFFNTLFWNLNYWDSASTMAGEVERPERTFPRALAVAVVLIAVSYLLPLMAAVGATDAPPEAWENGYLADAAGT

SEQ ID NO: 36049 - protein, 94 aa, Oryza sativa
MAASKGNAAAAACALVLVLLAVGAEAQGGGGGECVPQLNRLLACRAYAVPGAGDPSAECCSALSSISQGCACSAISIMNSLPSRCHLSQINCSA

SEQ ID NO: 36050 - protein, 162 aa, Oryza sativa
MAATAQGGGGAVSVQHVARASSDELLRKFADPDAHAKQITPPRRSLALRRKRSSRRVASGLSARDLESGAELAAPKRRRSIGGSTEWKAGLLLPTTTTASARKGSAASHSHRGGAARLDDAAGIGLLLAALERTWRKTVAGASKMFVERHRTNHVLLISDMV

SEQ ID NO: 36051 - protein, 171 aa, Oryza sativa
MEKKLSILVCLLLLAVSGHGLRILHDVDGDFGQGFAFGSKAAAADETEPLDPLLDDYENEISHLEFEPVDAGSTPYAAGDADAAAPAPGPAAEAGSAAGSDSMKWWLPPSTIPSFPLFPGMPGLGMPLPGIPFKPIGWGSPAAPGQYAPDPPAGAGADGDADPSAASQVIN

SEQ ID NO: 36052 - protein, 81 aa, Oryza sativa
MRQASAHRAYAERVREMARAELELAEREFARARAIWERAREEVERVERMKEIAARRLGIGPAAASAALEITCHACMQRFHP

SEQ ID NO: 36053 - protein, 235 aa, Oryza sativa
MGANADPTGVLLGGPHHRNPSPAPALAQPPGASTAAALRHDPGLSVRWTPEEQAVLEGGLASYAADAAVVRYAKIAMNLPDKTVRDVALRCRWMAKKESNKKRKEESSKKNKEKKERANDSSSKGPAHLVARPNAAPYSLPVLPMDDDDVSYKTIGGQTGQILEHNAQILNQIYTNISNMQVQENIPLLCQTRDNILAVLKEIGDVPEIMRQMPPLPVKLNEELANSMLPRPPHT

SEQ ID NO: 36054 - protein, 118 aa, Oryza sativa
MFGWAGNGRDQGPIPVDQPGVGRIPAHARIGVRLSPCEILSRPTGCFPRVIGREIFSFSGGEEKTLSRACNAAAAQREGALLRRGWRGAARRGATRTQRQQHTLSVGSCLLRWPPSPR

SEQ ID NO: 36055 - protein, 221 aa, Oryza sativa
MGKYMRKGKVSGEVAVMEVGGALLGVRTRSRTLALQRTTSSQKPPEKGEGDPGAGAGAGAEYLELRSRRLEKPPPHTPPAKEKETARRASAAAAAAVRMPAAPQAAEEFEAEVEVSFGDNVLDLDGDAMERSTRETTPCSLIRSSEMISTPGSTTKTNTSISSRRRMETSVCRYVPSSLEMEEFFAAAEQQQHQAFRERYNFCPVNDCPLPGRYEWTRLDC

SEQ ID NO: 36056 - protein, 179 aa, Oryza sativa
MRAFARNLAAIIPPARCNATATTAAAPSSLVLKVGDTLRERRRFTDGEVEAYAAVSGDRNPVHLDDAFARQVGGFGRGRVVHGMLVASLFPALIAAHFPGAVYARQSLKFAAPVYVGDKVLVQVQALHIRASTKHIVKFGTKCFTSDSDDLLAVDGEAMAVLPSLYLRQQLNQVPPIVD

SEQ ID NO: 36057 - protein, 323 aa, Oryza sativa
MPSAAAGDGKGKRRLVGMPPARAAAADFAMGRAAAVVAKTGAAPVERVKLLLQNQAEMLRRGSLTRPYRGIADAFGRVLREEGVAALWRGNQANVIRYFPTQAFNFAFKGYFKSIFGYDKEKDGKWKWLAGNVASGSAAGATTSSLLYHLDYARTRLATDAIESQGSKRQFSGLLDVYKKTLKTDGIRGLYRGFSVSIVGITLYRGLYFGIYDTMKPLILVGPLQENFFASFALGWAITTFSGACAYPFDTLRRRMMLTSGQPLKYKNAFHAAKQIVSTEGFFTLFRGVGANILSGMAGAGVLAGYDSSTGLQVNMVTILRAR

SEQ ID NO: 36058 - protein, 211 aa, Oryza sativa
MAPASLTRLTNPLPCASPSPRCRRRPGRSPPARAAACGVVSRRRAVSEMAILGGAAAAAASCCVDLFFAHMPARAATLEPDVIRYRKLDSGVKLEDVVDGEGPEAREGDVVQFNYVCRRANGYFVHSTVDQFSGESKPVTLALDGKEMIRGLKDVIVGMKTGGKRRALIPPQVGYTDESLQPIPEEFGPRRSLLSHAKEPLVFEVQLLKVL

SEQ ID NO: 36059 - protein, 364 aa, Oryza sativa
MALKPTLAALLFSLAAIHGIVVVAVDAAAAAVSLGGSARRIPAVFAFGDSTLDAGNNNRLVTAVRADHPPYGQDFPGGAPTGRFCDGKIMSDFLVEALGVKGLLPAYHSGSEVLSDADAATGVSFASGGSGLDDRTATNAGVATMASQIADFSELVGRMGAGKAGEVVNKSLFLVSAGTNDMIMNYYLLPSKYTLDQYHALLIGKLRSYIQSLYNLGARRLLVAGLPPVGCLPVQMTLAALRQPPRPQGCIAEQNAEAEKYNAKLRKMLTKFQSTSPGAKAVYADIYTPLTDMVDHPQKYGFAETGKGCCGTGLLEMGPLCTDLMPTCTTPAQFMFWDSVHPTQATYKAVADHFLRTNMLQFDD

SEQ ID NO: 36060 - protein, 105 aa, Oryza sativa
MEIVITFALVYTVYATAADPKKGSLGTIAPIAIGFIVGANILAAGPFSGGSMNPARSFGPAVAAGNFAGNWVYWVGPLIGGGLAGLVYGDVFIGSYQPVADQDYA

SEQ ID NO: 36061 - protein, 15 aa, Oryza sativa
MSPRCFWTSCRLCSL

SEQ ID NO: 36062 - protein, 284 aa, Oryza sativa
MLHFFIRLRGGEMLEQCRDKRVVLVGDSLNRNMWESLACVLYAAAPDRSRATVDDASADHKIFQALDYNCTVEFYWSPFLVDLDDQTRVLKLDRLPATTYRRLAAADVLVFNTGHWWTHTGKFRAWDHLERNGKKVEMGAEEAFNRALRTWTRWLDRNVDSHKTMVFFRSISPEHKNKNWCYNETAPMARAEEYVEAFPRGMVSIVERNVRRARTAVGYLDITRLSELRRDAHPSVFTVRGGKLLTPEQRRQPGSYADCSHWCLPGLPDTWNLLLFASWTSLRS

SEQ ID NO: 36063 - protein, 151 aa, Oryza sativa
MFRHALSTAGCIGQDKIDAKVAVLKESLGWSQEEVNLAVSKAPRILVASEERLRRNAEFLIDEVGLQPQYVARRSVLLMYSLERRLVPRHLVVKLLKERGLIEQDRCFFNAVAPTEEKFLEKFVVPFEGCVPGLADAYESACAGKTPVQAE

SEQ ID NO: 36064 - protein, 161 aa, Oryza sativa
MFDKNGDGRITKKELGESFKNFGIFIPDDELDATMDKIDANGDGCVDVEEFGLLYRSILGDDAAGRAPRTAAAAIGGEGGAPDDEDEGMREAFNVFDQNGDGFITVDELRSVLSSLGLKHGRTADDCRRMISMVDADGDGRVDFKEFKQMMRGGGFAALGG

SEQ ID NO: 36065 - protein, 360 aa, Oryza sativa
MGGAFTAAPALALVLLVALSVAATANVGDSCSTAVDCGGGQWCFDCQPEFAGSSCVRSAATNPFQLTNNSLPFNKYAYLTTHNSFAIVGEPSHTGVPRITFDNQEDTVTDQLNNGVRALMLDTYDFKGDVWLCHSNGGKCNDFTAFEPALDTFKEIEAFLGANPSEIVTLILEDYVHAPNGLTNVFKASGLMKYWFPVSKMPQKGKDWPLVSDMVASNQRLLVFTSIRSKQATEGIAYQWNYMVENNYGDDGMDAGKCSNRAESAPLNDKTKSLVLVNYFPSVPVKVTACLQHSKSLTDMVNTCYGAAGNRWANLLAVDYYKRSDGGGAFQATDLLNGRLLCGCQDVRACSRGSGVICSS

SEQ ID NO: 36066 - protein, 324 aa, Oryza sativa
MAGSGDIDGEVVFEVEHCIRIFKGGRVERYFGSDSVPASTDAATGVASKDRAISPDVSVRLYLPPVAGVSGEGEGKKLPLLIYFHGGGFCLHTAFNFVFHAYLTSLAARTRAIVVSVEYRLAPEHPLPAAYEDSWQAVLWAASHAPGAGEETWLTDHADFSRVYLAGESAGANIAHNMAMRAGAEGLPHGGRVNGVVLVHPYFLGRGKVPSEDWDPAMAENVVKMWSVVCPATTGVDDPWINPLADGAPGLEGLACGRVLVCLAEKDVIRDRGRAYCEGLKASGWAGEVEVVEVAGHGHCFHLMDFNGDEAVRQDDAIAEFVNR

SEQ ID NO: 36067 - protein, 125 aa, Oryza sativa; identical to SEQ ID NO: 34952

SEQ ID NO: 36068 - protein, 526 aa, Oryza sativa
MDVVPLPLLLGSLAVSAAVWYLVYFLRGGSGGDAARKRRPLPPGPRGWPVLGNLPQLGDKPHHTMCALARQYGPLFRLRFGCAEVVVAASAPVAAQFLRGHDANFSNRPPNSGAEHVAYNYQDLVFAPYGARWRALRKLCALHLFSAKALDDLRAVREGEVALMVRNLARQQAASVALGQEANVCATNTLARATIGHRVFAVDGGEGAREFKEMVVELMQLAGVFNVGDFVPALRWLDPQGVVAKMKRLHRRYDNMMNGFINERKAGAQPDGVAAGEHGNDLLSVLLARMQEEQKLDGDGEKITETDIKALLLNLFTAGTDTTSSTVEWALAELIRHPDVLKEAQHELDTVVGRGRLVSESDLPRLPYLTAVIKETFRLHPSTPLSLPREAAEECEVDGYRIPKGATLLVNVWAIARDPTQWPDPLQYQPSRFLPGRMHADVDVKGADFGLIPFGAGRRICAGLSWGLRMVTLMTATLVHGFDWTLANGATPDKLNMEEAYGLTLQRAVPLMVQPVPRLLPSAYGV

SEQ ID NO: 36069 - protein, 145 aa, Oryza sativa
MSAAVSALRRALSSSSSAAKTSSSLRRLLPAAPLRRGVLSSQPRPSRRKDSIELSRSEEGRRLAGRFDEIEDAVHAILIRDIESYRASTMADQGFVERRLTSLGFTKGYTRDQALWLSKLVLAFFSSWVVGTGFAKIDDSLHQNL

SEQ ID NO: 36070 - protein, 174 aa, Oryza sativa
MSLHARVALFAAALAAVLAASTAGFISNEAVGASSAASGGAGRSLLQAKKDCPVNFEEANYTVITSRCKGPMYPPALCCQALKDLACPFTAYINDAQTTCAASMFSYINLYGKYPPGLFANTCKEGANGLECPEDTPQMKPGEDKAASSAAAIVAAVARPVLAAVSAFLMLIVS

SEQ ID NO: 36071 - protein, 356 aa, Oryza sativa
MLAGRHTSVLSVTNRSELLRQGQGATTREAASLAAIQDDTRAVAAVNAVLFSKDVAVAKETGWRRDAKITVRGRGHGNPPRALVVRPLPLLPPSPFLRNRGISSLPSNQKDQGLKELLDSHGGGPGDSSAMNGIAYKHINDDADKAKMADGAGLQDATDVDKFGTGAGGAGSQDVEGAGDQDKAKNVAAVVVDGTSDVDKAKDVAGVVVEGDADKADDRAPGARRRRRTKPRDERLLQRILLYARNISGKLDDLCSRPRTGAADMDKIKVMMNQLRWSIPFTTGLGLFVGVVVIVVLAIKFGIPFVIDKFAQELGMVLQSIDAEDVKMVIDTFTNLILENVWAFLVGKIPYFGRSK

SEQ ID NO: 36072 - protein, 111 aa, Oryza sativa
MGCSTSKLEPKDQLDASAPSHHRRRGFASDLFGRATRKNHHNGGKSGCESGDAAVPMAGRQHEEEQPRQGKKGGRGKREVQAGSPSFRYYCENAAAAAFGEHRGQAPTTQI

SEQ ID NO: 36073 - protein, 276 aa, Oryza sativa
MDAGDASRLGESLDAVSAAFQSRVMELQELVLARNMYPATAIPDLAAVDVSLTAMEAQLQAVRRRLQEEREAFPKAKKLVQQSLKQQRRLQLMLANMPTGMREDVFATPLEHNSSMMFPESLNFSSAVPEVRDHDLKIKEEPTAPPKKGRGPAPRWYISTEELDSLSSYMRGRLTLEKVNIAINEVASYADGNAHLVACPKKKLSEDTWEKALELRDIAARESVKGRHFFLETDIKGPGLKLDTTGKAILTVLRHLGRFQETRIGHHRVFILSKQQ

SEQ ID NO: 36074 - protein, 403 aa, Oryza sativa
MGTLPPFPPLLLLVAVIFSFLSSSCFAVTSHEAAAIARRQLLNFEKHGDHVHIDIDIEIKVSNPRLAAAHRALHALKRALYSDPGNFTGDWAGPDVCAYNGVLCAPSPDNASASAVASLDMNAADVAGYLPREIGLLSDLAVLHLNSNRFCGVIPEEVANMTRLYELDVSNNRLVGAFPGAVLRVPELSYLDIRFNDFDGPIPPELFLRPYDAIFLNNNRFTSGIPDTIGRSTASVIVLANNDLGGCIPPTIGQAAATLDQFVFLNNSLTGCLPLESGLLANATVFDVSHNLLTGAIPATMGGLAKVEQLDLSHNTFTGVVPGDVCGLPALTNLSVSYNFIAGEDAQCSSALLDAKLDKSLEDEANCMGNVRPMQRSAGECAPVVSHPVDCSKTKPCGWPAPA

SEQ ID NO: 36075 - protein, 582 aa, Oryza sativa
MEAVAGGGGGGGGESVGELLLRAAAMVPAEHYALAALAVVSVLAYGFLELHFLGDLLRGFRCGRVELTFHPASEIYHRVASKCRSLHGRYLATPWLASPHLQTLFLGISGRPPSFTYKRQLYTVHDGGTIALDWLLATDSKGSDGILSEDASAPLVVIVPGLTSDSAAAYVKHMAYSMATKGCNTVVSNHRGLGGVSITSDCLYNAGWTEDLREVINYLHHKYPKAPMLCVGTSIGANIVVKYLGEEGENTPVAGAASICSPWDLVVGDRFISRKLVQRFYDKALAFGLKGYAKLHEPVLVRIANWEGIKKSRSIREFDHHATCMVAKYETVDTYYRRCSSASYVGNVSVPLLCVNALDDPLCTREAIPWDECRANKNIVLATTPNGGHLAFFQGLTAGRLWWVGAVSEFLFALLDSKYMHQQKAQDHILRSSLESSIDKSPYVNVMEDGMIAPVTDDGPCDDITPSHQVNDIKQDNGDFTQQNEHTREADDKNITEVNAMPSQSPEQSAGQQVEEHYVGKFHEAIAPVKRSINQLTRYQGKSVWLLAYIAFVTSWPLLGSLAFIAFRKKFRNNLLAKWLRR

SEQ ID NO: 36076 - protein, 258 aa, Oryza sativa
MRPLLARLFAPTYIAMGFSSSASPPSRRLAHLTRHLLLSSGELSSSVGAPAAAARPAYLAAPKGYAAVLVCLFEDPHGGDPRVILTKRAASLSSHSGEVSLPGGKVEEGDADATATALREAKEEIGLDPALVSIVTVLEPFLSKNGLHVTPVIGILSDKALFKPVLNESEVADIFDAPLEMFLKDDNRKTQESNWMGMNIPVQSFEYQSEDKTFVIWGLTAHILTRAAAVVLPREPSFVEFRPRYVNSPSGDTNETKR

SEQ ID NO: 36077 - protein, 244 aa, Oryza sativa
MAALAVLLLVVAAVEGGAAWSFWPPAAGDEPYCLSWRVMVEANNAKNWPTVPPPCVGYVWRYMAWGQYARDVAGVADQIAAYAAQLAAGDDGLDAWVFDVDDTCLSNLFYYQAKQFGAYDPVAFKKWASKAICPGVPGMAQLFQMLRGRGFRVFILSGRDQQTLASSTAANLAAAGFAGYDRLIMRSAEYRGMSAVVFKSAMRMQLMEEGYRIRGNVGDQWSDLQGDFVGDRVFKVPNPMYFVP

SEQ ID NO: 36078 - protein, 36 aa, Oryza sativa
MPAAGATETGGRADGCAEAAIDDDEGGSRVLSRRGR

SEQ ID NO: 36079 - protein, 465 aa, Oryza sativa
MMMMNYRALWLWLSVAIVFSVQSCRALAAGEGSKEADKIAALPGQPPDVKLQQYSGYINVNETSGKSLFYYFVEASVDAAHKPLLLWLNGGPGCSSMGIGAFQEIGPFRVDTDGKTLCRNPHSWITAANLLFLESPVGVGFSYAAVKPQEVYSTIGDNMTAHDSHTFLLRWLDRFPEYKTRDLFIVGESYAGHYVPELAVTILDNNLLPHATPIKLKGIAIGNGILEFAAEQTQLYEYLWQHAFISDSAHALITQSCKYPDDHPSALCESARKAAYSRIGNIDIYNIYSSTCHEQKVRPSASKCMDLADPCSQYFVEAYMNQPQVQKTIHANTELKYPWTRCRVYNLDHFGDSPKSMLPYIKAVITGRIRIWIFSGDLDAMVPVTATRQSMERLQLRVAADWRPWSADGKDVAGYVIAYDGLVFATVRGSGHMAPIDQPERALVLVSSFIRGQPLPPPQPDQHDA

SEQ ID NO: 36080 - protein, 210 aa, Oryza sativa
MAPFMACASPPVLALALLASCGAFLATSMLPARATASSCLDVGDMVMMDRFRAWQGAHNRSYPSAEEALQRFDVYRRNAEFIDAVNLRGDLTYQLAENEFADLTEEEFLATYTGYYIGDGPVDDFVFTTGAGDVDASFSYRVDVPASVDWRAQGAVVPPKSQTSTCSTTPRPKSAVSESVGKAPMCQQIICQKRFSRQISFEHDDPTYSK

SEQ ID NO: 36081 - protein, 27 aa, Oryza sativa
MAVEEDEASKERICHCRRLARMDSTSP

SEQ ID NO: 36082 - protein, 226 aa, Oryza sativa
MGRIQYAAVARGAVVMAEHGDAAFPNAGAVARQILDRLSAGDGGGGGDCNISYTQDLHVFHVKRTDGVTALCMADDAAGRRIPFAFLEDIHGRFVKTYGRAALTALAYAMNDEFSRVLGQQMDYYSNDPNADRISRMRGEMDQVRNVMIDNIDKVLERGDRLELLVDKTATMQGNTMRFKRQARRFRNTVWWRNVKLTAASVFILLVIIYIVLVYMCHGFTLPSCI

SEQ ID NO: 36083 - protein, 406 aa, Oryza sativa
MLSNGGHQIQVTICVAPPPLVSYICAWSPTTHHAELFDTEPTVVAVDADLLLLRIHVSLNHVHDLVYQASMLPSLTLMPSQDPYLHEPNCIALIPRSSHGFYISTLDTDLRSGIGRYNLCLFDSTNSKWSHESLSLDQLRNPPDKNEVLHITEKVITFINDPHLVAFVDLWRGIIICDILDTKTQTASYVPMLKEIINLRRTRASSITRDIAVVNGRLTVVRLTTVFDPDINGWDWDLSTWSRAVDCLEQEDWREDSLVEASDILIDHNICNVELLPKIQGQPTMAKLHVALPTLSLTDAQVVYVMGKVNESDEKAVLLSIDMANRRLDAVSVYDAARILHYFDVCYTQSTIFRYSAPSSGLNGNLKRPGKFPMPYPRKQQAVNEPFLPDAGRGLETEDRDTMDWE

SEQ ID NO: 36084 - protein, 548 aa, Oryza sativa
MSCRAAPWGRPSLPGGRPSPGSARQRGPFGGLNVWRNSILNNSWRLGGTPMKFGLPSRLFRLMASSSSGDGGFSRPSSTDEGPMPIYSWPDKQRPRVCILGGGFGGLYTALRLESLVWPNDKKPQVMLVDQSDRFVFKPMLYELLSGEVDVWEIAPSFTELLKNTSVQFVKDSVKLLRPSDHFRRDSGGSCTGGVVHLESGTVIEYDWLVLALGAEAKIDVVPGSAEYAIPFTTLDDALNVESQLKMLERRRFGKNSPDIQVAIVGLGYSGVELAATISERLKNKGIVQAINVQTTICPSAPPGNRDAALKVLESRNIQLFLGYFVNCIREASASEDSSSMVTDAKEVNGDHKKLLLELQPAQRGIQSQVLEADMVLWTVGSTSQIPRLQPPDAPYVIPLNGRGQVETEETLQVKGHPRTFAIGDSAALRDPSGKLLPATAQVAFQQADFAGWNLWAAINDRPLLPFRFQNLGEMMTLGRSDAAITASFIEGLTLEGPLGHAARKIVYCLRMPTDEHRVKVGISWFTKTAVDSLASLQNAVSSMLTSP

SEQ ID NO: 36085 - protein, 121 aa, Oryza sativa
MTVFSWRVKGCLRKPTLSMAAVQRRTRKKPRRLAETLSEGMTPVVRDSFMTMMLNMMERRNPTTKARTVSCSLHDGTGLSANACSTDGATASASSSSSPALPRAAAVVLRRRRRPPVSAAS

SEQ ID NO: 36086 - protein, 271 aa, Oryza sativa
MARRLLLLAVVLAMVAAVSASTAAAQSCGCASDQCCSKWGFCGTGSDYCGTGCQAGPCDVPATNDVSVASIVTPEFFAALVAQADDGCAAKGFYTRDAFLTAAGGYPSFGRTGSVDDSKREIAAFFAHANHETIKFCYIEEIDGPSKNHCDETSTQWPCMAGKGYYGRGPLQISWNFNYGPAGQSIGFDGLGDPDAVARSPVLAFQTALWYWTNNVHDAFVSGQGFGATIRAINGALECDGKNPTAVSNRVAYYQQFCQQFGVDPGSNLTC

SEQ ID NO: 36087 - protein, 425 aa, Oryza sativa
MTFVVTKSSPSVLVRPSEPTPAATIRPTSTDMTRLGMSFTSFHVFERGVDEPAETIRRALSRALVHYYPFAGRLAGSGDDVVFSCTGEGVVFVRATANCTLEDVNFLGAPVVMSLADLAVRYGGPCRAASDPLMMMQVTEFACGGFVVAATWNHGVADACGLAQFLRAVGELARGLHSPSVVPVRYDESLPDIPQLATILLKRLAAGVKFEHVDFAYCDVIIPWSFVNRVKAEFGSRHAGDRPCSVFEAVTAAMWQCRTRAINGHGGGALAPLVFAANVRKHVGAKDGYYGNCIMSQVVVATADAVANGDVVDLVKLIKDAKERIPVLLSTKTLGLDDSGGGELVAALCGYGALYASSWAGLGLDGVDFGGGRPARVIPYSEVKMLPSISPGAPCSMMDGHGVNVVASCVTDEHLEGFRAQLARL

SEQ ID NO: 36088 - protein, 127 aa, Oryza sativa
MAQNKTMALLLATLVAVVAVVRATEEKDIEEAVCSEHCNDEGKEGTIDHKHCVDICILTNRELFGALERGMKPSMEQFSALCNEGCSKEFKEDPATNKKCVDSCIVDAKELNGHLAKGGASSVPARA

SEQ ID NO: 36089 - protein, 256 aa, Oryza sativa
MRSMGWCHRIHVRSESLKTLCGCGDFDELLIEHAPNLEQVYGNYMYMRSTHLKVAHAPKLEFLGYLGMSFDTIEIGQSVFTEDDFDIKTLMPSLKTLAIELSYTSEGYINWFMQLLKLFPCLETLYIRSDTWSKVRAAAPGSWDVLRSVPCIDNHLERVVFEVYRGHEWQREMAKFLHGRARFLKAMEFHCQGDKGCSELLGEEWVREQQELLCLDSRASLDARFLFFKGALVNNHHDVSHHEWYKRKYYHYLYNV

SEQ ID NO: 36090 - protein, 442 aa, Oryza sativa
MGVRTLVVISSAELVHEALVEKGREFATRPAESPIRSIFSSGKFTVNSAVYGPEWRSLRRNMVSGMLSAARLREFRPARLRAMERFVARVRAEAAASRDGASVWVLRNVRFAMFCVLLDMTFGLLDLDEELVVRVDAVMKRVVLAVAARIDDYLPFLRPFLWRQHRQAVALRREQIDTVLPLINRRRAIVRGMRAGSPPDPAVAAPYSYLDSLLDLRVEGRDAVPTDEELVTLCAEMINGGTDTTATAIEWAMARVMDNPSIQARLHGEIMQRVGDARPVDDRDTEGMPYLKAFVKELLRKHPPTYFALSHAAVEPGSKLAGYDVPVDANLDIFLPTISEDPKLWERPTEFDPDRFLAGGETADITGSAGVRMIPFSAGRRICPGVGMGTAHIALMVARMVQAFEWRAHPSQPPLDFEDKVEFTVVMKRPLLAMVTPRKLSF

SEQ ID NO: 36091 - protein, 339 aa, Oryza sativa
MAMQMQFEASADTSVEEENIGPQPISRLEQCGINANDLKKLEEAGYHTVEAVAYAPKKELINIKGISEAKADKILAEAAKLVPMGFTTATEFHQQRSEMIQITTGSKELDKLLQGGIETGSITEIFGEFRTGKTQICHTLAVTCQLPIDRGGGEGKAMYIDTEGTFRPERLLAVAERYGLSGSDVLDNVAYARGFNTDHQTQLLYQASAMMVESRYALLIVDSATALYRTDYSGRGELSARQMHLARFLRMLLRLADEFGVAVVITNQVVAQVDGAAMFAADPKKPIGGNIIAHASTTRLYLRKGRGETRICKIYDSPCLPEAEAMFAINADGVGDAKD

SEQ ID NO: 36092 - protein, 72 aa, Oryza sativa
MNRYGLLGEGQNKLDYVLALTVENFLQCRLQTIVFKNGTVKSIHHDHVLIRQHHIRVGRQLVNIPLFMVRLD

SEQ ID NO: 36093 - protein, 100 aa, Oryza sativa
MLNLIYIDHNVYYTCTIASLLSIEAAILEINRSLSAFFGSYQTERRQDGLLDVDGNRRPAGHRDLLSVNTVHQQREDCCEPADQQASGGVATSISHQQIS

SEQ ID NO: 36094 - protein, 145 aa, Oryza sativa
MSSPPPPPPLPRRSNPRYPPPHPPAPNPAPLTSPWFSQDIPDFATVSDPPRGQEVLLRRRDASEEVLVSAVLEPLRFEGEEPLPRDALMKVFVSKPDVKPVMRFDCRAFADEGDGGSADYDVTNACYHPFAGDAGEDKYEGPEFR

SEQ ID NO: 36095 - protein, 119 aa, Oryza sativa
MKGSGAAMPSSMFYVHEADVAQIHHFLEECSLCGKFLSGDIFMYRGDTPFCSEECRQQQIEVDRAKHRRKKRAAAHAVSVRKEHRNHHHHHRHHHQQPQPRPAIDANPWGTARGPALRV

SEQ ID NO: 36096 - protein, 334 aa, Oryza sativa
MFHSVTNSIVSRAAFGKKRKNAAEFLAAIKSGVGLASGFNIPDLFPTWTGILATVTGMKRSLRAIYTTVDGILEEIIAERKGIRDEKISGGAENVDENLVDVLIGLQGKGGFGFHLDNSKIKAIILDMFAGGTGTSASAMEWGMSELMRNPSVMKKLQAEIREVLRGKATVTEADMQAGNLRYLKMVIREALRLHPPAPLLVPRESIDVCELDGYTIPAKSRVIINAWAIGRDPKYWDNPEEFRPERFEDGTLDITGSNYEFIPFGSGRRMCPGFNYGLASMELMFTGLLYHFDWSLPEGVNEVDMAEAPGLGVRRRSPLMLCATPFVPVVSAN

SEQ ID NO: 36097 - protein, 538 aa, Oryza sativa
MDSAGVILSILSKLQSLGFCAHLRIGDAAASGPPSDLFDTVLAAFLREVYPGGREVRPLPAKLGDGSRVDLLRLFSAIRAAGGYAATSSSPAVWASAAESVCLDATLAAPVKLIYHKYLAALDRWIQRLVEAHGPFLDGNDGRKKPEPFFDSNGRENEEPLLECNGGDLQHPILKRKREDMVGMLDWVRELAENGGEAGTMAAGSANGYYSLALAARKAVFAKRARRSSMTMNGALMQEIFPMDCKCCMSSSTTGIDTQEKCSKKIQLVIPQAGSDINELINVVENINVPSIGMEQENNIIGQAKYESRKHHNSDNWLFTSQQRNKIPVGSEFQAQVPQWTGELPVSYDNAETRKWLGTKVWPLENGNRKLSYFCNPVGKGREGVCGCNLPGSVECVRFHVAERRLQLRRELDSAFYAWGFDRMGEEIALSWTDKEEANFKACVQLNAPSSGRNFWKRLHMLFQSKGRKELVSYYFNCFLLRRRCYQNRMTPNNIDSDDEDETEFGFLGNRLGHNATKYDSSKYTLCIESTHCMDLNQ

SEQ ID NO: 36098 - protein, 356 aa, Oryza sativa; identical to SEQ ID NO: 31945

SEQ ID NO: 36099 - protein, 478 aa, Oryza sativa
MSLRKRQRSASSSRLSTLSSSPAPHTAAAAASASSPPLSFPNADLVLRLHLDPCPDDDADLDAGEDHRPSLDLHVSSASLLRSRYFAALLSDRWSPAPTSAAGGHGHLSLAVAAPRSASHPFHAHVEVVRLLHTLDFAGAIHSPADALDILPVALQLLFDACVEACTRFLEAVPWSPDEEARVLEIAPLLPADEAADLLARITPPPAASASAAGGEAARSPSEAMLHGLIHSAIHGHPVPAATKAFVAMLLKDYPSRDCVQKVLDEAFLSRLETVKELMGKYASPDFRVAVDSDERDAIQRLNLQSAVLNVRHLLWLIERMVEMRVAGDAVKLWSEQAALTADLQKLLNDVDMWKNITPGLPVPVTRCTLRFANSVVNGETIVPRQVRTKLVRSWLPVLNVCRNMVQPMQCGYKSPNCQELEETFLQIISTLPVPDAQELLQQCLGFSTRNVDDCPHLIAAFKTWFRRAGRAPQGAEN

SEQ ID NO: 36100 - protein, 75 aa, Oryza sativa
MFVVIGFACIYTISCASNSSPQRYKSSISGSVSTSIYSFLSVELPNYIRYYIYFYAPYWKSCFMANISILIFQIR

SEQ ID NO: 36101 - protein, 538 aa, Oryza sativa
MKLRVKGLGLLLLLVLLALCSTIDVCDARRGKHWRPRSSPSSSLLRNKGKGKKGSSNRQHGSNRPSPKPPLSPPPSPGNGKGYQSPYQPSPSPSPNAPVSPSPVNGSGHASPKSPTPSCEKGNQPPSRPTPTSPQGAVFNVVDFGAKGDGVSDDTKAFEAAWAAACKQGASTVVVPSELEFLVGPISFSGPYCKPNILFQLDGTIVAPTSAKAWGSGLLQWIEFTKLNGVSIQGNGIINGRGQQWWTYSDIDDDEDDDTQYDVEFERMPQVKPTALRFYGSFNVVVAGITIVNSSQCHLKFDSCQGVMVHDVTISSPENSLNTDGIHLQNSKDVSIHHTNLACGDDCVSIQTGCSNINIHNVNCGPGHGISIGGLGRDNTKACVSNVTVRDVNMFRTMTGVRIKTWQGGLGLVQDVRFSNIQVSEVQTPIIIDQFYCDKRTCSNQTSAVAVSGVQYENIRGTFTIKPVHFACSDSSPCSGITLTGVQLRPVQIPHYRLNDPFCWQAFGELYTPTVPPIACLHLGKPAGNNLQSYHDLC

SEQ ID NO: 36102 - protein, 218 aa, Oryza sativa
MGNSLSPCMHLPATAAAGVKLVYWGGQTRMLDDDGGVCAVAGDVTAELPGDHVVCAADSFYVGLPIPVVSAGEELMAGRTYFVLPAERFSCFKVLTAAALASLSPAPSKKVSVAGPGQCPFEYVKGEGGATLIRVLPEFIEKVISCDENGGGARRRKPSTTATATATELCSTPELKRHYALLMGRRNQPWSPRLETISECNKTRKLLLRTLARLLSSR

SEQ ID NO: 36103 - protein, 168 aa, Oryza sativa
MVKNPRMETFYYVQLMGISVGGARVPGVAVSDLRLDPSTGRGGVIVDSGTSVTRLARPAYAALRDAFRAAAAGLRLSPGGFSLFDTCYDLSGLKVVKVPTVSMHFAGGAEAALPPENYLIPVDSRGTFCFAFAGTDGGVSIIGNIQQQGFRVVFDGDGQRLGFVPKGC

SEQ ID NO: 36104 - protein, 450 aa, Oryza sativa
MKVDDGPGVNGSRWAKMMSTDSWRWCLGLIYIVAVASIWIAASYIVQSVVDEGVSPFLITYICNSLFVIYIPIVEAARYFEDSINNFWTKLKGKDVADLEQSADLESINLLHGSEQEGNTASPTRLPEDILASEAVFPVQAELNVADGSKGLDAKGRWTRARVARVSMVVCPFWFLAQLTFNLSLRYTTVTSNTILSSTSSLFTFLVALVFLGETFTWLKLISVLLCMGGTIIVSLADSGSTANTIATNPLLGDVLSIVSAGLYAVYITLIRKKLPDEKEGQGEVSMAQFLGFLGLFNMLFFFPFALFLNFTKLEPFHRLTWEQVGLIVGKGLLDNVLSDYLWAKAILLTTTTVATAGLTIQVPIAAIVDTLTGHAPHLLDYIGAAAVLVGFAGINIPVGTPQGSQQEQETPIVSMVDDPVHLPSDRNATSMVDDPVYLPSDRNTTGAVQ

SEQ ID NO: 36105 - protein, 500 aa, Oryza sativa
MDALLVEKVLLGLFVAAVLALVVAKLTGKRLRLPPGPAGAPIVGNWLQVGDDLNHRNLMALARRFGDILLLRMGVRNLVVVSSPDLAKEVLHTQGVEFGSRTRNVVFDIFTGKGQDMVFTVYGDHWRKMRRIMTVPFFTNKVVAQNRAGWEEEARLVVEDVRRDPAAATSGVVIRRRLQLMMYNDMFRIMFDRRFDSVDDPLFNKLKAFNAERSRLSQSFEYNYGDFIPVLRPFLRRYLARCHQLKSQRMKLFEDHFVQERKRVMEQTGEIRCAMDHILEAERKGEINHDNVLYIVENINVAAIETTLWSIEWGIAELVNHPSIQSKVREEMASVLGGAAVTEPDLERLPYLQAVVKETLRLRMAIPLLVPHMNLADGKLAGYDIPAESKILVNAWFLANDPKRWVRPDEFRPERFLEEEKAVEAHGNDFRFVPFGVGRRSCPGIILALPIIGITLGRLVQSFDLLPPPGMDKVDTTEKPGQFSNQILKHATVVCKPIDA

SEQ ID NO: 36106 - protein, 378 aa, Oryza sativa
MLEDVGLQEADAENAAIESPSVALDNMVEMHETQVDNRLQDEAGRDARFWQPSLDDSLDRWPNETAEDAERNWEDNAEELHSETMEDDAREHDHLQDEHDEWHDDESHGTENWQDDFQDSPLDMGPIPRTENRFIPPDDDNVYSMELRELLSRRSVSNLLSNGFGESLERLIRSYVQRRGRGPLNWNLDAAIPSVNSPNENQEQERNAETRQFQAPVNRPALVIPPPPLPPRQPLWHRELRHNNWSTRHREWDAINDLKADMGRLQQGMSSIQRMLEACMDMQLELQRSVRQEVSAALNRFAGPEGYPTDLSDDGSKWDQVRKGTRCVCCDAQIDSLLYRCGHMCTCSKCANELIRSGGKCPLCRAPIAEVVRAYSVM

SEQ ID NO: 36107 - protein, 330 aa, Oryza sativa
MGGLQPDIVELHKLEAVDKHLGRFADARKIGNWKSALRECNAAIAAGADSCAMLFASRAEALLQINQLDEADLAISRASKLDCSSSCSQDMMFCGFQSNSYLYYVHAQVDIAFGRFDSAMSSMEKARKIDSGNVEVMAMHKSVRTVAQARTLGNELFHSGKFAEAFLAYGEGLKHHPANSVLYCNRAACMFKLGQWEKSIEDCNEALKIQPNYWKALLRRAASYGKIEQWADSVKDYEVLRRELPGDTEVAEGHFHALVALRSSRGEDVSNMKFGGEVEALVGAEQFQMATTLPGTILLKIFPFHCFHVHHAAKPQSRPWTNEVIGQQVC

SEQ ID NO: 36108 - protein, 531 aa, Oryza sativa
MGCCGSSLQAGTHPEKPPGMAAPPQRPSFSLNQHQAPGSAAAQGVGRGEVPAFAEFSLAELRAATGGFAAENIVSESGEKAPNFVYRGRLQRTRRAIAVKKFPKMAWPDPKQFEEEAKGVGKLRHRRLANLIGYCCDGDERLLVAEFMPNDTLAKHVFHWENQTIEWAMRLRVAHHIAEALDYCSSNERPLYHDLNAYRVLFDENGDPRLSCFGLMKNSRDGKSYSTNLAYTPPEYLRNGRVTPESVIFSFGTVLLDLLSGKRIPPSHALDMIRGKNIQVLLDSHLEGKYSTEEATALVDLASQCLQYEPRDRPNTGKLVSILDPLQTKLEVPSYEMLGIPKHEEEAPPAPAPAPAPQPQHPLSPMGEACSRMDMTAIHQILVATHYRDDEGTNELSFQEWTQQMRDMLDARRRGDFAFRDKDFKTAIECYTQFVDVGTMVSPTVYARRSLCHLMSDQPDAALRDAMQAQCVYPDWPTAFYMQAVALSKLNMQSDAMDMLNEASQLEEKRQERLWSKDASAQSPLRLKGLC

SEQ ID NO: 36109 - protein, 439 aa, Oryza sativa
MDNMPGCLSGMTESIEPVSSQEIKERHLDPILDNNERGVEFRRLATPPTANDVAVTEHVQLFSDACENIKHQERVSSSETEAEEHQNGTGITDVMDSHPPKPLFLVPSISQQGLQGSVFPSDTSDNGEHSSYTSRAVSEDEKTVDDHNAACAMDLHITSSSASSHVSENGCNQQSHGESLPVTSVDKVHTSDASCEDNKLKNHFITSEVCSDATNLSASGLLTEEENIHNVEDQYEGPLPSEESSGCLDYPHDDHNSEKEDIHQPDGYAASPGNNNHFDSSHEGGYLHAEQPPVMGWTVRPQMLHPNYGISMEENQFEPKVEDHLLIKKPVSIRNIPRNPLVDAVAAHDRSTMRKVSELVAPTDKSKPNERNLLLEQIRNKTFNLKPVSSAKQPTIRTPPRVSTRNLKVAAIIEKANAIRQAVGSDDEDGDNWSESSDT

SEQ ID NO: 36110 - protein, 193 aa, Oryza sativa
MIDLNGSQVEIKKAEAKKPSNPPHRSFDSEPRGRPHADGYDGLGNSYNYGGSFGPYRSPGSFGTRPGGYSSSYGPGDYGSGYGAYGGALGGYRGESSLYSSRFGSTYGGSFGGGYAGGSYAGGLGGAYGRDAGGVVLAMALVMTLLQVLVLVLALARVDSMVLEEAMVAVVLVLLVVIIHMQGRQLQMLPCVC

SEQ ID NO: 36111 - protein, 497 aa, Oryza sativa
MSGKIWVGRTSMPAGRAGESASHGLTENLQQLGFETDRLKTGTPPRIDRRTVNFSGLEPQHGDEEVGWFSFDPEFHIERDQMCCYLTRTTKETHQIVRDNLDETPTYGGWVEAKGPRYCPAIEDKIVRFKDKESHQVFLEPEGRDVPELYLQGFSTGLPERLQLSLVRTLPGLENCVMLRPAYAVEYDYLPAYQCSRSLMTKKFEGLFFSGQINGTTGYEEAAAQGIISGINAARHSDGKPLIILERESSYIGTLIDDLVTKDLREPYRMLTSRSEHRLLLRADNADSRLTPLGRDIGLIDDRRWELYQSKQARIKEEKERLKSTKIPGGEFAAAVTSVSNQPVKESSTLEAILKKPHVQYKLLDKHGYGNEHLSRIEKECVEIDIKYEGFIARQQSQLQQIVNQEHKKLPEDLDYHSMTNLSLEAREKLSKVRPQTIGQASRIGGVSPADMTVLLIWMESNRRMANYKRQQSTLRSAATKADDSSDEVVHASATNA

SEQ ID NO: 36112 - protein, 296 aa, Oryza sativa
MFGCGQVQTGSFLGSAAPNGLLGLGMDSKSVPSLLASKGLAANSFSMCFGDDGHGRINFGDTGSSDQKETPLNVYKQNPYYNITITGITVGSKSISTEFSAIVDSGTSFTALSDPMYTQITSSFDAQIRSSRNMLDSSMPFGFCYSVSANGIVHPNVSLTAKGGSIFPVNDPIITITDNAFNPVGYCLAIMKSEGVNLIGENFMSGLKVVFDRERMVLGWKNFNCYNFDESSRLPVNPSPSAVPSKPGLGPSSYTPEAAKGALPNGTQVNVMPSASSPLQPQSVSATIVLLFLIVL

SEQ ID NO: 36113 - protein, 355 aa, Oryza sativa; identical to SEQ ID NO: 31541

SEQ ID NO: 36114 - protein, 28 aa, Oryza sativa
MIFVLLCQSFTLVFLTCFLSSTVVLRIQ

SEQ ID NO: 36115 - protein, 483 aa, Oryza sativa
MSKLQDRHGGEAAADVGRRARHQRLLLSFPVFPIVLLLLAPCTIFFFTSGDVPLPRIRIEYARRDAPTITAVAADTSPPPPSPPSSSPPPLSFPPPPPPPSSPPPPALPVVDDHSDTQRSLRRLRQLTDSPYTLGPAVTGYDARRAEWLRDHTEFPASVGRGRPRVLMVTGSAPRRCKDPEGDHLLLRALKNKVDYCRVHGFDIFYSNTVLDAEMSGFWTKLPLLRALMLAHPETELLWWVDSDVVFTDMLFEPPWGRYRRHNLVIHGWDGAVYGAKTWLGLNAGSFIIRNCQWSLDLLDAWAPMGPPGPVRDMYGKIFAETLTNRPPYEADDQSALVFLLVTQRHRWGAKVFLENSYNLHGFWADIVDRYEEIRRQWRHPGLGDDRWPLITHFVGCKPCGGDDASYDGERCRRGMDRAFNFADDQILELYGFAHESLDTMAVRRVRNDTGRPLDADNQELGRLLHPTFKARKKKTSRAARPM

SEQ ID NO: 36116 - protein, 294 aa, Oryza sativa; identical to SEQ ID NO: 30929

SEQ ID NO: 36117 - protein, 238 aa, Oryza sativa
MPLALAQLQDIGDRITDRLRPWSRSAEFWVRAADIYTSYKVCQLRAGFVKDEEEREAMWEQQHELGAQKMYSLCSELGGLFLKAAQILGKPDLAPMAWVKRLVTLCDNAPATPIDVVRDVVEKLMMVDIRNMQAFALFLQKYDINFDLYSATKEMEKQICYEFDFVREAKAMERIREFLRVTNKKKPPVIVPRVIPEMVSREVLVMEFIEGTPIMNLGNEMAKRGIDPGGKIATMAKQ

SEQ ID NO: 36118 - protein, 444 aa, Oryza sativa
MLSCYFTTVGFYFSTLLTVVTVYVFLYGRLYLALSGLEEGLLTQRRYIHNHPLQVALASQSLVQLGFLMALPMMMEIGLEKGFGQALSEFIMMNLQLAAVFFTFSLGTKTHYYGRMLLHGGAQYRATGRGFVVFHAKFAENYRLYSRSHFVKGIELLILLIIYQLFGQSYRSTIAYIFVTFSMWFLVLTWLFAPFLFNPSGFEWTKIVDDWSDWNKWISNRGGIGVSPDKSWESWWEIELEHLKYSGTIGLFVEIILSLRFFIYQYGLVYHLNITGDKSILVYLISWLVILVVLLVMKTVSVGRRRFSADFQLFFRLIKFMIFVSFIAILIVLIAILHMTLRDIFVCFLAFLPSGWGILLIAQACKPLARRAGLWGSVRALARAYEIIMGVLLFTPITILAWFPFVSEFQTRMLFNQAFSRGLQISRILGGQKKERERSSRNKD

SEQ ID NO: 36119 - protein, 204 aa, Oryza sativa
MAASRRVAISLLLLVAAMASSFSFSPCTAQSSSSCASYTFSSNQQYGSCATLPRLGATLHYNYTAAASTVAVAFRAPQPAGGKGWVAWGINPSGSGMVGTQAVVAFRHSNGSLVAYPTVLGSYAPSMAPAAAKDLALPVSGVSAEENGKAKEVVVYATVALPAGKGTKFNHVWQQGSSVAGDVPAAHPTSGDNVLSVGSIDFSK

SEQ ID NO: 36120 - protein, 255 aa, Oryza sativa; identical to SEQ ID NO: 30542

SEQ ID NO: 36121 - protein, 363 aa, Oryza sativa
MGSLAAEKTVTGWAARDASGHLTPYNYTLRKTGPEDVVVKVLYCGICHTDIHQAKNHLGASKYPMVPGHEVVGEVVEVGPEVTKYSAGDVVGVGVIVGCCRECHPCKANVEQYCNKRIWSYNDVYTDGRPTQGGFASAMVVDQKFVVKIPAGLAPEQAAPLLCAGLTVYSPLKHFGLMSPGLRGGVLGLGGVGHMGVKVAKSMGHHVTVISSSARKRGEAMDDLGADAYLVSSDAAAMAAAGDSLDYIIDTVPVHHPLEPYLALLKLDGKLILMGVINQPLSFISPMVMLGREAITGSFIGSMAETEEVLNFCVDKGLTSQIEVVKMDYVNQALERLERNDVRYRFVVDVAGSNIDDADAPPA

SEQ ID NO: 36122 - protein, 274 aa, Oryza sativa
MASSQANLDKMQLRQSYRNLWHSDLTSTIQADFPYCCLALWCGPCVSYMLRKRALYNDMSRYVCCAGYMPCSGKCGESRCPEFCLATEVFLCFGNSVASTRFLLQDEFNIQTTKCDNCIIGFMFCLQQIACIFSIVAAIVGSEELSEASQILSCLSDMVYCSVCACMQTQHKIEMDKRDGKFGPQPMAVPPMQQMSRIDQPIPPPVGYTPQQPAYGQPYGGYPPAPPAQGYPPAAYPPAGYPQGGAYPPPGSYPPPGSYPPQGSYPPPQGYYGK

SEQ ID NO: 36123 - protein, 107 aa, Oryza sativa
MDERDAKIRAELGGVKDASEEVRQLEEQAAAVLKAARAEIAAALNKMKKETTQELEAKLDEGRRRVEAELVEALANLEAQKEEAVKALDAQIASLSDEIVKKVLPSA

SEQ ID NO: 36124 - protein, 420 aa, Oryza sativa
MTKDEDFKLVKIQTHVLRVNIHCDGCKHKVKKLLQKIEGVYSVALDVDNHKVTVTGNVDSDTLIRKLTRGGKHAELWSQQKGGSNQGHKGSNNQQKQQQQQGQQQHGQQHQKQGANPSKDGNKNNNILKDQGKQGGVGGLIQGLKAFKNQHSKNQLPELDSEDDDLYDDEDDEFDDDYEDDLRFLGDKMSQLGFLRQQAAAAAAANVKNKNANTATVNNHHNNVNGKKGGGGGGSAGGGNHHQNNHHQNQKNPNVINMAAANAKMANGAQKNTGAINGMMGLNHGLGTAGATPGFQGYTGFNHPSYASAGYGGLQQQHLQQQQQSNNLMASMQGYHHHPAATAAMMNNLRGLNNNMMMMHQPQQQPQMMYHRSPQISPYTAYYNPYSYYYHPGAAGYHPASNGDVETMFSDENTKGCVVM

SEQ ID NO: 36125 - protein, 467 aa, Oryza sativa
MSIDGVTGDYQTQIDINLLADQLEAKLCDVPLDDGGRRHGSPECHISIVKPQVRLVDVSQYAPQVLLVGAYHHRSLDRCELDKLAALRRALPDGDDERASTLRRYLAAIAGLESEARSYYRDDTDDMGAEEFALMLLLDGWYILHYFGVGVGGGGRAVDIFAVRDVFYLLENQIPFFILEKVYELIHSPPPSPGATAIAGGGSSSSSVVVVDGFVRHLRSLLRDQGYSNLEVDITSTRPCHLVHLLHMHFTPMAMAPAADDAAAVPIPTRRARATVYRWRGATQYHAAGVRFKRRALGLGDARCVLDVELRRLTLHVPTLTVDNNTWRVLRNLMALEQNNPNLGSHVTAYCLFMSHLAGTANDVALLASKGVVVHFMGCDEDVAKGFAGLCRGVALSVDDARQNYLQPTWEKMERRYSSRPVNWMALLRRRHLSNPLVATALLAAIVGLVCEVLQAVYAVKSYKTRS

SEQ ID NO: 36126 - protein, 207 aa, Oryza sativa
MRSPVGRREVVVSGVFTALLVLSILSLPSLLLTGPAYKSWPFLAAARDDSTTGSGGGAGYYPVSFAYLISASTGDAARAARLLAALYHPANCYLLHLDREAPAEEHRRLAELVSGQPVYARAGNVWIVGRPNLVTYRGPTMLSTTLHAVAMLLRLGRRWDWFVNLSASDYPLVTQDDLMDVFSRLPRDLNFIQHTSHLGWKIRGRGR

SEQ ID NO: 36127 - protein, 429 aa, Oryza sativa
MAEGSRSPLRSFVEVAPGSHFPIQNLSFGVFRRRGSPEPEPPRPAVAIGDFALDLAAVSDAGLFHGPLLSASPCFRQETLNMFLGMGRPAWKEARATLQKILSADEPVLRDNEALKKKCLVPMSDTEMLLPITVGDYTDFFCSVHHARNCGFIFRGPQTPVNPNWFQLPVGYHGRASSVIVSGTDIIRPKGQGHPTGDSRPYFGPSKKLDFELEMAAIVGPGNELGKPIDINDAEEHIFGLMIMNDWSARDIQAWETIPLGPFLGKSFSTTVSPWIVTMDALKPFTCEAPKQEPEPLPYLAEKNHVNYDIPLEVWIKPKEQSEPSMVAKSNFKHLYWTLTQQLAHHTVNGCNLRPGDMFATGTLSGPETESLGCLLELTWNGQKEISVGNSTRKFLEDGDEVILTACCKGEGYNVGFGTCTGKVLPALP

SEQ ID NO: 36128 - protein, 434 aa, Oryza sativa; identical to SEQ ID NO: 35415

SEQ ID NO: 36129 - protein, 263 aa, Oryza sativa
MVGSHVTTKVHGYCVNLDLDITFHLRPGKDDKKGRSIPGATDSKALLLNYNHLSGPLPVNIGFSKLSYLALANNRLTGAIPPSILHLQDSLLEVLLLNNQLSGCLPHELGMLTKAAVFDAGMNQLTGPIPSSFSCLTSVEQLNLGGNRLYGEIPDALCKLAAVPAGRLANLTLSSNYFTSVGPACLSLIKDGVLNVRNNCIPGFANQRRPAECASFHSQPKACPAASATHVASPAGAANAAAAPADRVVKDYSSYVTYATLHE

SEQ ID NO: 36130 - protein, 360 aa, Oryza sativa
MAVVSESSRKALLPSFLYAAPAASSSPSFAAAAAVGVRGVPAPSLAGPAVWARSPREPAGKIEMYSPAFYAACTAGGIASCGLTHMTVTPLDLVKCNMQIDPAKYKSISSGFGVLLKEQGARGFFRGWVPTLLGYSAQGACKFGFYEFFKKYYSDIAGPEYAAKYKTLIYLAGSASAEVIADIALCPMEAVKVRVQTQPGFARGLSDGLPKFVKAEGYAGLYKGIVPLWGRQIPYTMMKSASFETVVEMIYKYAIPAPKSECSKPLQLGVSFAGGYIAGVFCAIVSHPADNLVSFLNNAKGATVGDAVNKLGMWGLFTRGLPLRIVMIGTLTGAQWGLYDAFKVMVGLPTTGGVAPTPAK

SEQ ID NO: 36131 - protein, 394 aa, Oryza sativa; identical to SEQ ID NO: 34723

SEQ ID NO: 36132 - protein, 259 aa, Oryza sativa
MEEFVWGLQLNEETRKPEAEDVFMDEDDDMIMSDTVAKDDMSGLAVVKEETSVEVPVKNEEEEELKPDEIVHGAAVGKGLAGALKFLKERGTLNEGTDWGGRTTDKKKSKLAGIEDGPKDIRIERIDEFGRVMTPKEAFRDLSHKFHGKAPGKMKQERRQKKYRDELKTKRMISSDTPLMSAKKMREAQALSKTPYLVLSGNAKSGQTSDASGFATVEKEHPGSLTPMLGAKKVEHFLGIKRSAQGGGLPPPPPKKPKN

SEQ ID NO: 36133 - protein, 381 aa, Oryza sativa
MATNHYHNQRSSKFPGEPQYQKHSPLHGVNLNDTPQDVTAIQEQGSENSPVDISWLRKDPVDLMKSQVQPSCANGQSQISLGSTAYSEGSTRVLGFPINAAAERNTEPLIKREADMEMHKKDDANARNLIDLNAAPSMDEPDIDVHQSEGGTVPQQPDDPSEDSLARTAAESLVALCKDVFQAGSPLADILHWFADLAIASKEDAVVCSSESDSDDEFEALTLQLEETKGYELYSTPKTPVEHKSNEDHGSVAASLLQTKPRRGRARKRPQKKDFQKDILPNLASLSKHEVSEDLHTLGRSTPSKRGGRNGSQSRGRRRARSVAIAVEEVEVSPPPAPAPPPPPPADLDANALGITGWGRTTRRCRRPRCPPANNASLRLA

SEQ ID NO: 36134 - protein, 319 aa, Oryza sativa
MPDAAAAAAAAQDADAVMRDAPADAAAGGGDNDDDDGDDGTEEDEEEDDDEEGDEEELPPAEDPAAPEPVSALLPGSPNQLTLLFQGEVYVFESVMPEKVQAVLLLLGRSEMPPGLANMVLPNQRENRGYDDLLQRTDIPAKRVASLIRFREKRKERNFDKKIRYAVRKEVALRMQRRKGQFAGRANMEGESLSPGCELASQGSGQDFLSRESKCQNCGTSEKMTPAMRRGPAGPRTLCNACGLMWANKGTLRNCPKAKVESSVVATEQSNAAVSPSGIDNKELVVPNPENITASHGEVMGDSTPANEAEIGAPKAQSQ

SEQ ID NO: 36135 - protein, 504 aa, Oryza sativa
MAARRANCALVLVLALALLAARDAGAAAVPKPNWLGGLSRAAFPKRFVFGTATSAYQVEGMAASGGRGPSIWDAFAHTPGNVAGNQNGDVATDQYHRYKEDVNLMKSLNFDAYRFSISWSRIFPDGEGRVNQEGVAYYNNLINYLLQKGITPYVNLYHYDLPLALEKKYGGWLNAKMADLFTEYADFCFKTFGNRVKHWFTFNEPRIVALLGYDQGTNPPKRCTKCAAGGNSATEPYIVAHNFLLSHAAAVARYRTKYQAAQQGKVGIVLDFNWYEALSNSTEDQAAAQRARDFHIGWYLDPLINGHYPQIMQDLVKDRLPKFTPEQARLVKGSADYIGINQYTASYMKGQQLMQQTPTSYSADWQVTYVFAKNGKPIGPQANSNWLYIVPWGMYGCVDYIKQKYGNPTVVITENGMDQPANLSRDQYLRDTTRVHFYRSYLTQLKKAIDEGANVAGYFAWSLLDNFEWLSGYTSKFGIVYVDFNTLERHPKASAYWFRDMLKH

SEQ ID NO: 36136 - protein, 111 aa, Oryza sativa
MMEALACRDGIQLAREKGVLRIQVETDCQELTKLWKQGGSQRSHVASIISDAIELSSSFHGFTLLYTPRSCNHVAHVLAKQVTADDRLGEWQSAPACIEHLVTEDCNPAVP

SEQ ID NO: 36137 - protein, 417 aa, Oryza sativa
MFGRAPKKSDNTKYYEILGVPKTASQDDLKKAYRKAAIKNHPDKGGDPEKFKELAQAYEVLSDPEKREIYDQYGEDALKEGMGGGGSHVDPFDIFSSFFGPSFGGGGSSRGRRQRRGEDVIHPLKVSLEDLYNGTSKKLSLSRNVLCAKCKGKGSKSGASMRCPGCQGSGMKITIRQLGPSMIQQMQQPCNECKGTGESINEKDRCPGCKGEKVIQEKKVLEVHVEKGMQHNQKITFPGEADEAPDTVTGDIVFVLQQKDHSKFKRKGDDLFYEHTLSLTEALCGFQFVLTHLDNRQLLIKSNPGEVVKPDQFKAINDEGMPMYQRPFMKGKLYIHFTVEFPDSLAPEQCKALEAVLPPKPASQLTEMEIDECEETTMHDVNNIEEEMRRKAQAAQEAYDEDDEMPGGAQRVQCAQQ

SEQ ID NO: 36138 - protein, 365 aa, Oryza sativa
MGGGGDGELSPAEARLAMMELANMISVPMALTAVIRLGVPAKLWAGGANAPLAAADLLPAGHPDPSVLERLLRLLASRGVFSEHTGSSSPSPRRFSLTAVGRTLVPGGGGSPSGSGASYADYVLQHHQDALVRAWPLLHEAVLDPSGPEPFARANAGVPAYAYYGKDREANEVMLRAMTGVSEPFMEALLEGYGDGGFEGVSTLVDVGGSSGACLEMIMRRVRTIRDGVNFDLPDVVAAAPPIPGVRHVGGDMFKSIPSGDAIFMKWVLTTWTNEECTAILSNCHKALPGGGKVIACEPVVPDTTDGSTRTRALLENDIFVMATYRTQGRERSEEEFRHLGLAAGFASFRAIYLDPFYAVLEYTK

SEQ ID NO: 36139 - protein, 447 aa, Oryza sativa; identical to SEQ ID NO: 32409

SEQ ID NO: 36140 - protein, 530 aa, Oryza sativa
MSSFQLLLHSLLLLLVVGGVAGGGGGGGRLRAPSLEFHHRFSSPVQRWAEARGHVLPGGWPEHGSADYVAALNGHDRRRALSAAGGDGGGGGDKPPPLTFSEGNATLKVSNLGFLHYALVTVGTPGQTFMVALDTGSDLFWLPCQCDGCTPPASAASGSASFYIPSMSSTSQAVPCNSQFCELRKECSTTSQCPYKMVYVSADTSSSGFLVEDVLYLSTEDAIPQILKAQILFGCGQVQTGSFLDAAAPNGLFGLGIDMISIPSILAQKGLTSNSFAMCFSRDGIGRISFGDQGSSDQEETPLDVNPQHPTYTISISEITVGNSLTDLEFSTIFDTGTSFTYLADPAYTYITQSFHAQVHANRHAADSRIPFEYCYDLSSSEDRIQTPSISLRTVGGSVFPVIDEGQVISIQQHEYVYCLAIVKSAKLNIIGQNFMTGLRVVFDRERKILGWKKFNCYDTDSSNPLSINSRNSSGFSPSAPENYSPEETKGGNPASVTQLRPLSNSNPVMWYDSLVFRFLLVNLAALILF

SEQ ID NO: 36141 - protein, 28 aa, Oryza sativa
MGPAFEGIGAPLIYRYILFVHELLQYFL

SEQ ID NO: 36142 - protein, 39 aa, Oryza sativa
MWVQLFIFQKISTRRMPLQQNVNAVSHQDCNICMIRRRL

SEQ ID NO: 36143 - protein, 145 aa, Oryza sativa; identical to SEQ ID NO: 33797

SEQ ID NO: 36144 - protein, 73 aa, Oryza sativa
MEKFVEGNAIQTLDPNLEATDAINLAVEKTYELALQCLATTKRNRPSMRRCAEILWSIRKDFRELDIPTASLN

SEQ ID NO: 36145 - protein, 54 aa, Oryza sativa
MLRCYGIEAVANNAWRVGLCFGCCIVIQGLEKKKLPIENKKYHSTKQRQAKVMW

SEQ ID NO: 36146 - protein, 115 aa, Oryza sativa
MSDLDIQIPTAFDPFAEANAGDSGAAAGSKDYVHVRIQQRNGRKSLTTVQGLKKEFSYNKILKDLKKEFCCNGTVVQDPELGQVIQLQGDQRKNVSNFLVQAGIVKKEHIKIHGF

SEQ ID NO: 36147 - protein, 51 aa, Oryza sativa
MLRKTWFLLTLLVTAGRASSTPRLELLLTITLSSLSPGTTTSGVTATVSST

SEQ ID NO: 36148 - protein, 39 aa, Oryza sativa
MLRFLDKTIPCVCYHGFGSTLAALIAHNFFGFLANNSSV

SEQ ID NO: 36149 - protein, 340 aa, Oryza sativa
MPKRRRGVRPPPPDPSPAPATIDYSLTYKEIAASGAPGAVDFVKNHGLYLLLLETPSGFSIFSLCGVYIHLPDAIQNIWAMFGTYRSSHDVIWLKEFQKFDDKSSAINVDTGVNKQLTEMIMRWRRPRQKLVVGKPEYKSIIENTLGIPCLCDEVVMDVMWAMKRLIRYFVPTETPELAEEDSLTMSQGLRMFLSRYGFEIKPEMVYNDIVRAASIVFRCDAVEDLYEHLQHLGRHLKNVSGIDYENWGTVKLATAFKIICSRKIDKSDEMFSDDVRSKLLDDADKYKDLVFSTGCIANYKKILGLNILRNDKMDQLAELVKVARIKAEHVRVPENVPEN

SEQ ID NO: 36150 - protein, 23 aa, Oryza sativa
MSARGSVMKNVAVPCVLVVKNLS

SEQ ID NO: 36151 - protein, 575 aa, Oryza sativa
MGGGGGEAGGGDGGESSPAAAAAAAVAGAAALHIRCANGSKFTVRADLDATVGAFKEVVAGSCDVPAAQQRLIYKGRILKDEQTLESYGVETDHTIHMVRGAGPPAGSAAPAAASPQASAAPSSGPTDGLGSLFPGLGGTGTAGTRPSGLFGSGFPELDQMQQQLSQNPNLMREIMNMPMMQNLMNNPDLIRNMIMNNPQMRDIIDRNPDLAHVLNDPGVLRQTLEAARNPEIMREMMRNTDRAMSNIESSPEGFNMLRRMYETVQEPFLNATTMGGEGNTAPNPFSALLGNQGSNQPRDPATNAPNTGSESTTGTPAPNTNPLPNPWSSNAGGAQGATRAGSTGNARTGATGGLGGLGSADLSSLFGGLAGNTGTGATGGLGGLGSADLGSLLGGSPDSSSLSQILQNPVMMQMMQNIMSDPQSMNQLLNFNPNTRNLMESNTQLREMFQNPEFIRQLTSPETMQQLLSFQQTLLSQLGQNQPRQDGSQGGNATGMRGNVSLDTLMGMLSGLGAGGGIGVPNTSNVPPEELYATQLTQLREMGFIDTAENIQALVATAGNVNAAVERLLGNLGQ

SEQ ID NO: 36152 - protein, 216 aa, Oryza sativa; identical to SEQ ID NO: 30638

SEQ ID NO: 36153 - protein, 165 aa, Oryza sativa
MSSVFSGDETAPFFGFLGAASALIFSCMGAAYGTAKSGVGVASMGVMRPELVMKSIVPVVMAGVLGIYGLIIAVIISTGINPKAKPYYLFDGYAHLSSGLACGLAGLAAGMAIGIVGDAGVRANAQQPKLFVGMILILIFAEALALYGLIVGIILSSRAGQSRAD

SEQ ID NO: 36154 - protein, 346 aa, Oryza sativa
MSSQVDNRSQSAGKRARTDGGRREDDWVCPSCQNVNFAFRTTCNMRNCNQSRPTDYTDMQKPMQTPPPHFPMSGGYMSPGTPPSMYLGGGAPPYGTSLYGGPALPRYGIAQFPGGSGYPYGYGGRLPMGSPYGPPMHMAGPPYSAGSMMGPGGMYGMPMDRYSLGLPAGPGPMGARAGSYSEEGSQKKPAGAGRDNDWKCPNCNNINFAFRTVCNMRKCNTPRPENQGSKPDGARGPKPKMPEGSWKCEKCNNINYPFRTKCNRPSCEAEKPFQTNNANESSADQDNQLLSCNIVKLLSKLQLSHDFQDNNEQTKVDPPGGPAGVPTSSHALRMAALSELQNSVKS

SEQ ID NO: 36155 - protein, 181 aa, Oryza sativa
MDSSDPLNGIDKENTDILMYCTGGIRCDVYSTILRKKGFRNLYTLKGGVSNYLKEEGSAGWVGNLFVFDGRLSLPPATYKPGAGDDDDEEEEEGRNRSSSELGRCYACGSEVVELRHRNCANIDCNRLYLCCGRCVEELRGCCGEGCTAAPRLRPLLPSHQRYHKWHLYRHLDLGAPSSPS

SEQ ID NO: 36156 - protein, 325 aa, Oryza sativa
MMMTRASMGAMEGAAVDEVVRRLVEGGRGGRQVQLSEAEIRQLCVEAKRVLLSQPNLLRIHAPVKICGDIHGQFVDLLRLFDLGGYPPTSTYLFLGDYVDRGKQSLETICLLLAYKVKYPDKIFLLRGNHEDAKINRVYGFYDECKRRFNVRLWKIFCDCFNCLPMAALIDDKILCMHGGLSPELNSLDQIKDIERPTEIPDYGLLCDLVWSDPSPDSEGWGESDRGVSCTFGADKLVEFLEKNDLDLICRAHQVVEDGYEFFAQRRLVTIFSAPNYCGEFDNAGALLSIDESLMCSFQILKPNDTGAPHSRKPTSNKTPKTGNA

SEQ ID NO: 36157 - protein, 264 aa, Oryza sativa
MPLPTMTHSSSFLRLPATSSPHPPPADDASAAYAVVVLNQRLPRFAPLLWDRARLRVCADGGANRVFDGMPELLPAEDPDQVRMRYKPDVIKGDMDSIRPEVKEYYSNLGAEIVDESHDQDTTDLHKCVSFITRNPPGSEESNLYILVLGALGGRFDHEMGNINVLYRFSNIRIVLLSDDCSIFLLPKTHSHEIHIERSIEGPHCGLIPMGSPSASTTTTGLRWNLDNTSMSYGGLISTSNIVEEETVRITSDSDLIWTISLRN

SEQ ID NO: 36158 - protein, 538 aa, Oryza sativa
MLQAQQNMASPTSSDVDSRRLRMMLNNRNVGQTNSGGDIIPNIGSPSLSGGDVDILIKKKIAQQQQLLQQQSNSQQHPQLQQPAVSSQQSQSSNQFLQQEKPGIGTMPVDGGMPNSFGGVDQTTKKRKKPGSSSGRANSSGTANTAGPSPSSAPSTPSTHTPGDAMSMPQLQQNGGSAKPLVMFGSDGAGSLTSPANALADVDRLLEDGSLDENVESFLSQDDMDPRDSLGRSMDASKGFGFAEVAKARASATKVTCCHFSSDGKLLATGGHDKKVLLWCTEPALKPTSSLEEHSALITDVRFSPSMSRLATSSFDKTVRVWDADNTSYSLRTFTGHSASVMSLDFHPNKEDMICSCDGDGEVRSWSINNGSCLTFVKVFKGGATQMRFQPQKGKYLAAASEKAIYILDGETQLACRNPLQGHTKNIHSLCWDSTGDNLASVSEDSVRIWSFAPGHDGEFVNELSCSGNKFQSCVFHPSYPYLLVIGCYESLELWDIREKNAMTVHSAHDGLVAALAASSATGKVASVSHDRFVKLWK

SEQ ID NO: 36159 - protein, 22 aa, Oryza sativa
MFSHPYLRPARVFWVAVCLKPH

SEQ ID NO: 36160 - protein, 279 aa, Oryza sativa; identical to SEQ ID NO: 32300

SEQ ID NO: 36161 - protein, 15 aa, Oryza sativa
MPLVPDARGERSCPP

SEQ ID NO: 36162 - protein, 278 aa, Oryza sativa
MTLLKMFGDFQKDTPEERNVRFGVREHGMGAICNGIALHSPGLIPYCATFFVFTDYMRAAMRISALCEAGVIYVMTHDSIGLGEDGPTHQPIEHLVSFRAMPNILMLRPADGNETAGAYKIAVLNRKRPSVLALSRQKLAQLPGTSIEGVEKGGYIVSDNSTGNKPDFIVMSTGSELEIVAKAADELRKEGKTVRVVSFVCWELFDEQSAEYKESVLPEAVTARVSLEAGSTLGWQKYVGSKGKAIGIDKFGASAPAGKIYQEYGITAENVIATAKSL

SEQ ID NO: 36163 - protein, 60 aa, Oryza sativa
MAKSKNHTAHNQSYKAHKNGIKKPKRHRQTSTKGMDPKFLRNQRYSRKHNKKSGEAESEE

SEQ ID NO: 36164 - protein, 130 aa, Oryza sativa
MATSMITSPLVAPARAKGLPSISRRGSSFAIVCSGGKKIKTDKPYGIGGGMSVDIDASGRKSTGKGVYQFVDKYGANVDGYSPIYSPEEWSPTGDTYVGGTTGLLIWAVTLAGLLGGGALLVYNTSALAG

SEQ ID NO: 36165 - protein, 22 aa, Oryza sativa
MFSHPYLRPARVFWVAVCLKPH

SEQ ID NO: 36166 - protein, 572 aa, Oryza sativa
MPDWRVGEFEGKLKDGFARSNNSEHENGAGTVSISSKKSKHRVDSEKKPHVDISGVIDSDSQKCNSEQIHSANGIVSRDVNHDHIENCKVESNDFPLNTISETRYPTDNWNSSQFALSNDGSPVLNNQSTPQTGHGYGDNDLTYIDWPAIDNFEDVDNLFRRCDSTYGQQQLPNTDGLSWIPSSDVMYSSDVAMQPGFESSYSDYGILDDLSAFNCTEDKSLTTADPSSAVCDEQFDDSYLFNEQKPEDVYGEQAYQRDAMELLSSDQICTGQENLDMIGNRYSSENAMEQPEDQKFSIASGSQLSSSQNLLNQKNHLDSTSPSNITSESYPERNCQIIPSGASFAERNLKVQKKVASSASGQLISDNVTGHPGHQTLTRRASYPCENHEIGKRSLGKRGLGHSDVAMGTSMVVDGSFVSSISSDNSVEENSFRQLQDAVSQLDVKTKMCIRDGLYRLARSAQNRQVFPNTMNNNGDSHNVKDMQNAETSGKFVDPGSIETQTNPIDRSIALLLFHQPSEHVTGAVDEAASLKSHNDNHQAAAKNQRVMHASSVHSPRGQGDPMDAKSCRNN

SEQ ID NO: 36167 - protein, 18 aa, Oryza sativa
MIAVTYLDAGSNIISWWQ

SEQ ID NO: 36168 - protein, 458 aa, Oryza sativa
MASAPFAVSSSPAASAVAARSKVLRGGRSEARTGCRLGITRKNFGRVMMALAVDVSRFEGVPMAPPDPILGVSEAFKADQNDLKLNLGVGAYRTEELQPYVLNVVKKAETLMLEKGENKEYLPIEGLAAFNKATAELLFGADNPVLKQGRVATLQSLSGTGSLRLAAAFIQRYFPEAKVLISSPTWGNHKNIFNDAKVPWSEYRYYDPKTVGLDFEGMIADIQAAPDGSFVLLHGCAHNPTGIDPTPEQWEKIADVIQEKKHMPFFDVAYQGFASGSLDEDASSVRLFVQRGLEVFVAQSYSKNLGLYAERIGAINVVCSTPEVANRVKSQLKRLARPMYSNPPIHGARIVANVVGDPTMFGEWKQEMEEMAGRIKNVRQKLYDSLSAKDDSGKDWSFILRQIGMFSYTGLNKTQSDNMTDKWHIYMTKDGRISLAGLSLAKCEYLADAIIDSFHNVS

SEQ ID NO: 36169 - protein, 77 aa, Oryza sativa
MKKGYRGRIFLGCDNKPLSRQEIMDSVNRSGKFDTKFQGFTGTDGPLGKKMENSRTRSEIGWEPKYPSFTEFLGLDS

SEQ ID NO: 36170 - protein, 284 aa, Oryza sativa; identical to SEQ ID NO: 32471

SEQ ID NO: 36171 - protein, 46 aa, Oryza sativa
MSYMVLYPGLSLCYVALSNVQTPLAKIDQNQLYLMVQCCSWSCYGL

SEQ ID NO: 36172 - protein, 358 aa, Oryza sativa
MPPPAVSTAPVAPVVASSSSAAAAAPRRPRSLRLRVTPYASVSSSSSPSTFAVSIPPPPPARHSRKQLVGRDGAPAKPAKPRVFFLDVNPLCFRGSQRSLGAFARWLALFFAHVSLRDPVVAVLDGEGGNEYRRRLLPSYKAHRPRGPGTGADSRVIDVLRECNVPVVRVDGYEADDVVATLTEQVLQKGFRVVIGSPDKDFKQLISEDVQLVMPIPEIGRWSFYTLRHYVAQYKCDPTADLSLRCFIGDEADGIPGIQHLVPGFGRKTAVKLLKKHGSLENLLNTAAVRTVGKDYAQDALVKHADYLRKNYEVLSLKRDVKVQLDDRWLSTRDSCNDSSVLSDFILKFNEGQNIRGN

SEQ ID NO: 36173 - protein, 159 aa, Oryza sativa
MAAPLRRSLPSLGRTLLSPSPAPARMLSAAASDALVEIKPGEIGMVSGIPEEHLRRKVVIYSPARTASQQGSGKVGRWKINFVSTQKWENPLMGWTSTGDPYANVGEAGLTFDSADSAKAFAEKHGWDYVVRKRHTLLLKAKSYAENFKWRGPPKAEQA

SEQ ID NO: 36174 - protein, 190 aa, Oryza sativa
MSHPQALAQCEHTLTEFGIEHREAVDDTAGAAKTVAEQNLQDTGAIASSLAAELYGLNVLAENIQDDKDNVTRFMMLAREPIIPRTDKPFKTSIVFSLEEGPGQLFKALGVFALREINLTKIESRPHKKRPLRITDDSFSTPSKQFDYLFYMDLEASMADPKTQNALGNLKEFATFLRVLGSYPTDVNEA

SEQ ID NO: 36175 - protein, 328 aa, Oryza sativa
MIDWMHGGGQVGIFDATNSTRKRRYMLMKMAEGNCKIIFLETICNDPNIIERNVRLKIQQSPDYADQPDYETGVRDFKERLANYEKVYEPVQEGSYIKMIDMVKGQGGQLQVNNISGYLPGRIVFFLVNSHLTPRPILLTRHGESLHNVRGRVGGDTVLSEDGELYSKKLANFIEKRLKSEKTASIWTSTLQRTILTASPIVGFPKIQWRALDEINSGVCDGMTYEEIKKVMPEEFESRKKDKLRYRYPRGESYLDVIQRLEPVIIELERQRAPVVVISHQAVLRALYAYFADRPLREVPDIEMPLHTIIEIQMGVTGVEEKRYKLMD

SEQ ID NO: 36176 - protein, 257 aa, Oryza sativa
MYNSYHCFGFDRLNESHLFIDKKILTKLAQAFDSQAEAFRSLSDSLNRMSENRFYQYNLMEDHFQSAPWNGPTTNSWRASQQTNAYNTSPRSDFDSGRHPFMPVPGEPSPGAFPARSYVEQQRMQRPGYGFQPQMSNDRWNPGSPLTNYHGAPPYQQYHHGSTNAIDEAPAPAPVPAPAPPAESPFQRRWVPPQPPGVVMPEAVAAIRQPRQQVAAASRPSESAAATEQPQSGDVAGGAAMANAGNGEAEQEREAAA

SEQ ID NO: 36177 - protein, 161 aa, Oryza sativa
MNAYRKKDSNGLNFYTKKFLELIVDIDTLLASDDNFLLGPWLEDAKSLARTENERKQYEWNARTQVTMWYDNTKTEQSKLHDYANKFWSGLLKSYYLPRASKYFSRLTKGLQENQSFQLEEWTKDWIAYSNEWQSGKELYAVKATGDALAISSSLFKKYFS

SEQ ID NO: 36178 - protein, 305 aa, Oryza sativa
MSQAGSESAAAKEPSFKEGERVLAYHGPLLYEAKVQKSENKEDEWRYHVHYLGWNKSWDEWVTNDRLLKLTDENIRKQQELEKSQVVDKSVKSGRSAQHKPKGSNDAKTDKEDTKIIIKGKKRKSQPGGTEEKERKSSESLFMSHFPSTLKKQLVDDWEFVTQLGKLVKLPRSPTVDDILKKYLEHRTKKDNKINDSYAEILKGLRCYFDKALPAMLLYKKERQQYSEEVKGDVSPSTIYGAEHLLRLFVKLPELLASVNMEEDALNKLQQKLLDILKFLQKNQGPFFLSAYDGGSKGTDGIKTK

SEQ ID NO: 36179 - protein, 268 aa, Oryza sativa
MDDDEEGGKDLDFDLDDEIEKGDDWEHEETFTDDDEAVDIDPEERADLAPEIPAPPEIKQDDEENEEEGGLSKSGKGLKKLLGKAAGLNESDADEDDEDDDEDESSPVLAPKQKDQPKDEPVDNSPAKPTPSGHARGTPPASKSKQKRKSGGGDDSKASGGAASKKAKVESDTKPSVAKDETPSSSKPASKATAASKTSANVSPVTEDEIRTVLLAVAPVTTQDLVSRFKSRLRGPEDKNAFAEILKKISKIQKTNGHNYVVLRDDKK

SEQ ID NO: 36180 - protein, 365 aa, Oryza sativa; identical to SEQ ID NO: 33195

SEQ ID NO: 36181 - protein, 150 aa, Oryza sativa
MTANAKSLARDLISKDASIYRVLLSRVLADVIFQWMVKATGFKRAGQLEPHPRVTAGKNDEDLGLSKEAPALVTFQTAVRDRRLKVIFSKFVRDIREDPILMVRVSWNMFAISVVSAAIGVHRFIVVLSEEFLSTLPPPVPPPRLVIQSI

SEQ ID NO: 36182 - protein, 474 aa, Oryza sativa
MGKKGKWFGAVKKVFSPESKEKKEERLRRKLAASNPNPPDLTPSASLEVNVSVPPPPPPPPVQQIEEVKVPEVEQEQSKHVTVEAVPEAVPVPAQTSSLPPGVSREEQATIKIQTAFRGYLARRALRALRGLVRLKSLVEGNSVKRQAASTLRCMQTLARVQSQIRSRRLKMSEENQALQRQLLLKQELESLRMGEQWDDSTQSKEQIEASLISRQEAAVRRERALAYAFSHQWKSTSRSVNPMFVDPNNPQWGWSWLERWMAAKPWEGRAGTDKESNLDRASAKSASLNLGEGEITKAFNRRGSKPDKSSPTTPKLTRPASRQSPSTPSAKVSPIFAKKKSATPKNGLSQVDDDAKSVFSVQSERPRRHSIATSTVRDDESLASSPSVPSYMAPTKSARAKLRLQGSAVTDGAETPPEKVASVGSVKKKLSFQAGMAPPSPMRRHSGPPKVEVVKDIAEPPQPEALVINGGSK

SEQ ID NO: 36183 - protein, 19 aa, Oryza sativa
MEDRTTQMFFERLCRVWLF

SEQ ID NO: 36184 - protein, 150 aa, Oryza sativa
MKRNPRVTSSRRKCRKAHFTAPSSVRRVLMSAALSTELRHKYNVRSIPIRKDDEVQVVRGSYKGREGKVVQVYRRRWVIHVERITREKVNGSTVNVGIHPSKVVVTKLKLDKDRKAILDRKASGRAADKAKGKFTAEDVAAAGASLQEID

SEQ ID NO: 36185 - protein, 286 aa, Oryza sativa
MMGVSVGLLSTMNHNLAYNLSWRTITDRALMSSNSIRGQLGHSLLSSIKYAYKVDQRDSRIRPTRGYAYLFSSQVGGLAPESKDARYIRQELDLRVALPLGVLNGALNAGVAAGIIHPLARGSTGSISPLSEQFYLGGNRSLMCRLGGPSSLLGFKKRGLGTDLQSSTPENSENVASTSPELSARGGDIAVTAFADLSFDIPLKPLRELGIHGHAFVSAGNLAKLTEPDLRKFPLAEFLQTFRSSAGFGVVVPTRLFRIEVNYCHILKQFDYDLGKAGIQLNFSSP

SEQ ID NO: 36186 - protein, 236 aa, Oryza sativa
MASLHKFMEPLFNMWPMNKLRKRALTNLMDHIHYEDENSNYVGLCPINKVLNMICCWIENPNSNAFRRHVPRIHDFLWLAEDGMKSKVYVGSRCWDTALIVQAYCSTGLTQEFSETIKKAHDFIKNAQVTKNCPNYKRYYRERSKGSWTLSNGENGWPIADTLAECLKAVLLLSKIPPTQVGDPIQEQRLYDAIDCLLSYVNKDGTLSSAESKRTTPWVEFINPSESFRNIIVDYP

SEQ ID NO: 36187 - protein, 371 aa, Oryza sativa
MLISQMSFEKSFGLSSVFIESTLMENGGVPESANPSTLIKEAIHVISCGYEEKTEWGKEIGWIYGSVTEDILTGFKMHCRGWRSIYCMPIRPAFKGSAPINLSDRLHQVLRWALGSVEIFLSRHCPLWYGYGGGRLKWLQRLSYINTIVYPFTSLPLIAYCCLPAICLLTGKFIIPTLSNAATIWFLGLFISIIVTSVLELRWSGIGIEDWWRNEQFWVIGGVSAHLFAVFQGILKMIAGLDTNFTVTAKATDDTEFGELYVFKWTTVLIPPTSILVLNLVGVVAGFSDALNSGYESWGPLFGKVFFAMWVIMHLYPFLKGLMGRQNRTPTIVVLWSVLLASVFSLLWVKIDPFIGSSETTTTNSCANFDC

SEQ ID NO: 36188 - protein, 250 aa, Oryza sativa
MEPSSQPQPAIGVVAGGSQVYPAYRPAATVPTAPAVIPAGSQPAPSFPANPDQLSAQHQLVYQQAQQFHQQLQQQQQRQLQQFWAERLVDIEQTTDFKNHSLPLARIKKIMKADEDVRMISAEAPVIFAKACEIFILELTLRSWMHTEENKRRTLQKNDIAAAITRTDMYDFLVDIVPRDDLKEEGVGLPRAGLPPLGVPADSYPYGYYVPQQQAPGAGIAYGGQQGHPGYLWQDPQEQQEEPPAEQQSD

SEQ ID NO: 36189 - protein, 39 aa, Oryza sativa
MEEGEFSEAREDLAALEKDYEEVGSEFDDGDEGDEGDEY

SEQ ID NO: 36190 - protein, 103 aa, Oryza sativa
MARKLSARRVRWERSISSSTWVAYRFCFFSRFQRVRSIFLHITVYSSKYIWASIESVLDIITWFVMSLSWVVSFWDEVSCCRIEPSAIALSVVDGKKIKRIKI

SEQ ID NO: 36191 - protein, 571 aa, Oryza sativa
MLADPKEARAGIREVHFLPFNPVDKRTALTYIDADGNWHRASKGAPEQILTLCNCKEDVKRKVHAVIDKYAERGLRSLAVARQEVPEKSKESAGGPWQFVGLLPLFDPPRHDSAETIRKALHLGVNVKMITGDQLAIGKETGRRLGMGTNMYPSSALLGQNKDASLEALPVDELIEKADGFAGVFPEHKYEIVKRLQEKKHIVGMTGDGVNDAPALKKADIGIAVADATDAARSASDIVLTEPGLSVIISAVLTSRCIFQRMKNYTIYAVSITIRIVLGFLLIALIWKYDFSPFMVLIIAILNDGTIMTISKDRVKPSPLPDSWKLKEIFATGIVLGSYLALMTVIFFWAMHKTDFFTDKFGVRSIRNSEHEMMSALYLQVSIVSQALIFVTRSRSWSFIERPGLLLVTAFMLAQLVATFLAVYANWGFARIKGIGWGWAGVIWLYSIVFYFPLDIFKFFIRFVLSGRAWDNLLENKIAFTTKKDYGREEREAQWATAQRTLHGLQPPEVASNTLFNDKSSYRELSEIAEQAKRRAEIARLRELNTLKGHVESVVKLKGLDIDTIQQNYTV

SEQ ID NO: 36192 - protein, 66 aa, Oryza sativa
MSSAAKLVDMSSCLAWCHHSTVEWLIYLCCYHLISLVLPRVLHQDMSVQLCELVMEPYLLLMFTYR

SEQ ID NO: 36193 - protein, 311 aa, Oryza sativa
MLWATSKHDVYFMSNSTVGHWSSLSHNLSEVLDFSGHVAPAQKHPGSLLEGFSGVQVSTLSVNEGLLVAGGFQGELICKVVGDRDVKFCTRTTLSDNAITNAIDIHRSASGSLRVTVSNNDCGVREFDMETFQLLNHFSYNWPVNHTSVSPDRKLLAVVGDDRDALLVDSRNGKVTSTLVGHLDYSFASAWHPDGRTFATGNQDKTCRVWDVRNLSTSLSVLRGNIGAIRCIRYSSDGQFMLFSEPADFVHVYSAAADYKKRQEIDFFGEISGISLSPDDESLFVGVCDRVYASLLHYRMVHSFGYLDSFM

SEQ ID NO: 36194 - protein, 262 aa, Oryza sativa
MAAANPTSNLFFHEAWKLQLELSNATGHEDPVFSSIAKDMHERFDKYWKDCNLVLAIAVVMDPRFKMKLVEFSYSKIYGVEAAKYVKVVDDAVHELYKEYVAQPLPLTPAYVEQGEGNNAPASENSTQTTAPSTGDGLVDFDMYLSEIATSQPTKSELEQYLDESLTPRIQEFDILNWWKLNTLKFPTLSKMARDILAIPMSMVSSGNSIFSAGTGTRTLDDYRSSLRPEIVEALFCAKDWLQYSPATPEAPSTALVKVDAP

SEQ ID NO: 36195 - protein, 40 aa, Oryza sativa
MSWDEWMLYSSVSSSDIGRVVLCCVICEYCNVAPKILRPS

SEQ ID NO: 36196 - protein, 171 aa, Oryza sativa
MVKYSREANNPTKSSKAMGRDLRVHFKNTRETAFAIRKLPLGKAKRYLEDVIAHKQAIPFRRYCGGVGRTAQAKSRHSNGQGRWPAKSARFILDLLKNAESNAEVKGLDVDTLYVSHIQVNQAQKQRRRTYRAHGRINPYMSSPCHIELILSEKEEPVKKEPESQIAARKA

SEQ ID NO: 36197 - protein, 315 aa, Oryza sativa
MGIWNAHTSVGNISGSLIAAAMLKFGWSWSFAVPGVMIAVVGLAVFLFLPVGPEMIGIEEDIHEKDAEKDDMSAPLLEERSASKEKAVGFIQAWRIPGVAPFALCLFFCKLVAYTFLYWLPFYISHTAIGGVYLSDTAAGVLSTLFDVGGVVGGILAGHISDRLDARALTAASFTFSAIPALFFYRIYGSFSLYSNIALMFVTGTLVNGPYALITTAVSADLGTHSSLNGNSRALATVTAIIDGTGSIGAAVGPLLMGYISAKSWSGVFTMLMASAFVAGLLLSRLVMAEISAKMESRRPDAAASDLPVSSMEQS

SEQ ID NO: 36198 - protein, 286 aa, Oryza sativa
MLLVTMMFAVLGFLSPSNRGGLMTAMLLIWVLMGLFAGYASSRLYKMFKGSEWKSITLKTAFLFPGIAFGIFFVLNALIWGEKSSGAVPFSTMFALVLLWFGISVPLVFVGSYLGFKKPAIEAPVKTNKIPRQVPEQAWYMNPAFTILIGGILPFGAVFIELFFILTSIWLHQFYYIFGFLFLVFIILIITCAEIAIVLCYFQLCSEDYMWWWRSYLTSGSSAIYLFLYAGFYFFTKLQITKLVSGILFFGYMLLASFSFFVLTGTIGFCACLWFTRLIYSSVKID

SEQ ID NO: 36199 - protein, 330 aa, Oryza sativa
MMPEAALSSGKPMPRVGMGTASFPLGATDPSTVKDVVLRAIEAGYRHFDTAAVYQTEAILGDAVAEAVRAGLVASRDELYITSKLWVAHAHPGHVLPSLRRALRKMQMEYLDLYLIHFPVSMRLAEDPESMTYSKDDLVMMDMEGVWKEMEECQRLGLTKAIGVSNFSCKKLETLLSFATISPAANQVEVHPYCRQNKLREFCKEKGIQLCAYSPLGGKGTPWSNNAVMDCPLLKQIAMERGKTIAQVCLRWVYEQGDCVIVKSFNKSRLRENLGIFDWELTNDDRHKISTLPEWRGTLDIFVHKTGPYKTVDEFWDGEITGDKTFSNGP

SEQ ID NO: 36200 - protein, 364 aa, Oryza sativa
MSLDSLEGLERLSTQLASTSTLDSQWSKNYYLLPYLRNNVPWCCCTSCNPPIVCVRVAPIRSTIKLAIYMLSQKKKKKKKKKKATASSRPCWLVNLSRCGVYDEGCEHLEGLVKLKVLNLGFNYITDACLVHLKELINLECLNLDSCKIGDEGLAHLKGLLKLRSLELSDTEVGSNGLRHLSGLRNLQSINLSFTLVTDIGLKKISGLNSLRSLNLDNRQITDNGLAALTCLTGLTHLDLFGARITDAGTNCLKYFKNLQSLEVCGGLITDAGVKNIKDLKALTLLNLSQNGNLTDKSLELISRLTALVSLNVSNSRVSNSGLHHLKPLQNLRSLSLESCKVTAIEIKKLQLAALPNLVSVRPE

SEQ ID NO: 36201 - protein, 86 aa, Oryza sativa
MLGADFYETDLERGELLAEGKVPIGIGENTKIQNCIIDKNARIGKNVTISNSEGVQEADRTSEGFYIRSGITIVLKNSIIADGLVI

SEQ ID NO: 36202 - protein, 90 aa, Oryza sativa
MAARKGCTPSQLALAWVHHQGSDVCPIPGTTKIENFNQNVAALSVKLTPGEMTELESYASTDVVQGDRYAQTAGTWKDSETPPLSSWKAE

SEQ ID NO: 36203 - protein, 449 aa, Oryza sativa
MCPAKTSSWMRQLTSSSRQGHHGDVLRLFFTGVRLQAGSRGTVDPWPGAVPTALRACAHLADVASGRLIHALVLTRPALASDAVAATALLDMYSKCGLVASARKVFDEMASRGDPVVWNALLACYARHGLPEHALALAVKMRGIGLCPDLVTWNIVVSGFALAGDDLMAGDLVGAMKDDGFQPDVVTWTSRVSGSVLNFQYGRARALFRAMMVAGGRVLPSSATISTILPAFANVADVKHGKEVHGYSVVAGVEQELTVSSALVDMYAKCGLVLEARRLFDKMPQRSTVTWNSMIFGLANSGHCQEAVGLFDRMLRDGAKPDHLTFTAVLTAATAAWSRSGRSCTEPCRWSTASSRGWSTTPAWSTCLAAPGGSTRRTVSSGRCPWSPTASSGARCWERAEAMETSSSRSLRRRACLQSSQTMRRATSCSRVRWRTLASRMMSSRSRGW

SEQ ID NO: 36204 - protein, 510 aa, Oryza sativa
MVRPRHRRRHESRGLPHALPLRHRPRRRQDPALARLPLHRRRRQLAGLRQHRRARHLRQELPREPRRHARLAQGVRRPQRRHLHAALPLLLRRRRQQHQAAHPAVGWLPAAISVAFLGTIRIIRAPRSPTAARREYRAFCGFLYVSLALAAYLLVVIVLQKRFKFTRAEYAVSAAVVFAALLAPFAIVLREEAALFRKTPSKEEADDVPALSAATKPSPAAAETPPATAMERVVRALRPPPRGEDYTILQALVSVDMVLLFTATVFGVGGTLTAIDNMGQIGESLGYPQRSIATLVSLISIWNYLGRVSAGFASDALLSRYGISRPVVVTGVLLLTVAGHLLVAFGVPGSLYAASVLIGFCFGAAYPMILAIISEVFGLKYYSTLYNVGNVACPVGSYILNVRVAGRMYDREARRQGAVAVAAGKKELTCIGVKCYKDSFLIVAGVTVAAAVVMAALAWRTRKFYAGDIYARFREEAAAGGGGAGNGTGAGEDEKVESKEEKAVMTPTST

SEQ ID NO: 36205 - protein, 366 aa, Oryza sativa
MIRSCESLNSLEGLQWLGNLRVLRAHRCLSGYGEYGRCTLPQSLEELYIHEYSQETLQPCFSGNLTLLRKLQVKGNSNLVSLQLHSCTSLQELIIESCKSINSLEGLQSLGNLRLLRAFRCLSGYGEYGRCILPQSLEELFVSEYSLETLQPCFLTNLTCLKQLEVSGTTSLKSLELQSCTALEHLKIQGCASLATLEGLQFLHALRHMEVFRCPGLPPYLGSSSEQGYELCPRLERLDIDDPSILTTSFCKHLTSLQRLELNYRGSEVARLTDEQERALQLLLSLQELRFKFCYDLVDLPAGLHSLPSLKRLEIWWCRSIARLPEMGLPPSLEELVIVDCSDELAHQCRTLASKLNVKINGEYVN

SEQ ID NO: 36206 - protein, 524 aa, Oryza sativa
MDGRHLLLLHVLALLLLAVVVAAGGGAVVGRDSAVLQLRELQWGSSGQVRYSQSKRFEKKMTGEHKKAAAAARTRTRSTTVLGLKHHSLTAIPDHPAAQETYLRRLLAADEARANSLQLRNKAAFTQSGKKATAAAAAAAGAEVPLTSGIRFQTLNYVTTIALGGGGSSRAGAGNLTVIVDTGSDLTWVQCKPCSVCYAQRDPLFDPSGSASYAAVPCNASACEASLKAATGVPGSCATVGGGGGGGKSERCYYSLAYGDGSFSRGVLATDTVALGGASVDGFVFGCGLSNRGLFGGTAGLMGLGRTELSLVSQTAPRFGGVFSYCLPAATSGDAAGSLSLGGDTSSYRNATPVSYTRMIADPAQPPFYFMNVTGASVGGAAVAAAGLGAANVLLDSGTVITRLAPSVYRAVRAEFARQFGAERYPAAPPFSLLDACYNLTGHDEVKVPLLTLRLEGGADMTVDAAGMLFMARKDGSQVCLAMASLSFEDQTPIIGNYQQKNKRVVYDTVGSRLGFADEDCSYA

SEQ ID NO: 36207 - protein, 1011 aa, Oryza sativa
MGSERAELARVCGGRNWSKAIRILDAHLARSPSSIHDLCNRAFCYSQLELHKHVVKDCDRALELDPALLQAYVLKGKALSALGKREEALAVWEQGHEVAVRDTMDLKQLLELEELVSSVKICETIECEDRVVDASPCDTKVVISEDRVVDTSCTATTMADTKTVVCEENIGNSGVISNGAVILANDNKADNNKECSSPTKDTTGTHHTPKKTTKPDKKSKAKGRKEINSQIEDVADSISSGETVAVDQTLFASKISKSSKSISLDFRLSRGIAQVNEGRYDQAISIFDQILRETPTYPEALIGRGTAYAFQRELDSAISDFTKAIQSNPSAGEAWKRRGQARAALGEFTEAVEDLTKALEFEPNSPDILHERGIVNFKFKDYNAAVEDLSTCVKRDKKNSSAHTYLGLTLSALGEYKRAEDEHLLGIKYDENFLDSWAHLSQLYLDIGCPEKMLNNVEKVLQIDVSFGKAYHLRGILYHGMGRHRSAIKDLSVALKHESSNIECLYLRASCHHAIGEYKAAIKDYDDVLDLELDSMDKFVLQCLAFYQKEIALYTASKANLESSQFNIDDDVDPLFKEYWCKRLHPKNVAEKVYRQPPLRISLRSGRLNKQDFKFTKHQTTLILAADSIGKKIQYNCRGFLPNQRQYRMAGLAAIEIAQKVSKAWRFLRNPKNNAKLVRRRDKLNACQNRGGYCSTSTLSGSPTSSPNEDRISSGISLSWHDVYNIAVKWRQISEPCDPVVWINKLSEEFNSGFGSHTPMLLGQAKIIRYYPYYQSVLEAAKNIMLDLKYVNNAEDRAIFLTDIEKLKKIEVASSCSELYHIVGETYWVSTRCDSIAFQGRRLEGTRITTQNMGKTGFDFAIRTPCTPSRWEEYDEEMSAAWEAICEAYCSDTNPTRDPDMLDAVKAAILRMTYYWYNFMPLSRGSAVVGYVVLLGLFLAANMDVTASIPHGVQVDWEAILSQDPDTFVDKIKPWLYPSIKTSRNLKDYADVSVAFSTTGSVVAALTCVDT

SEQ ID NO: 36208 - protein, 36 aa, Oryza sativa
MELGQESMLHCMEKMQLNLNPSFNSCTRHHSPSHPC

SEQ ID NO: 36209 - protein, 21 aa, Oryza sativa
MPWVKLLSRSSQVHGKKNYSV

SEQ ID NO: 36210 - protein, 483 aa, Oryza sativa
MSKLQDRHGGEAAADVGRRARHQRLLLSFPVFPIVLLLLAPCTIFFFTSGDVPLPRIRIEYARRDAPTITAVAADTSPPPPSPPSSSPPPLSFPPPPPPPSSPPPPALPVVDDHSDTQRSLRRLRQLTDSPYTLGPAVTGYDARRAEWLRDHTEFPASVGRGRPRVLMVTGSAPRRCKDPEGDHLLLRALKNKVDYCRVHGFDIFYSNTVLDAEMSGFWTKLPLLRALMLAHPETELLWWVDSDVVFTDMLFEPPWGRYRRHNLVIHGWDGAVYGAKTWLGLNAGSFIIRNCQWSLDLLDAWAPMGPPGPVRDMYGKIFAETLTNRPPYEADDQSALVFLLVTQRHRWGAKVFLENSYNLHGFWADIVDRYEEMRRQWRHPGLGDDRWPLITHFVGCKPCGGDDASYDGERCRRGMDRAFNFADDQILELYGFAHESLDTMAVRRVRNDTGRPLDADNQELGRLLHPTFKARKKKTSRAARPM

SEQ ID NO: 36211 - protein, 574 aa, Oryza sativa
MGNTCCVAPATTDEVGAPPRDHHHAAKKSPAPSATTTTATRQRHGQEPKPKPKPRARAKPNPYDWAPPRVLPARGGAAASAVRVLEGVVPHHPRLRVTDKYQLGRELGRGEFGVTHLATDRATRERLACKSIPKRRLRTAVDVADVRREVAIMASLPDHPALVRLRAAYEDADAVHLVMELCDGGELFDRIVARGRYTERAAAAAARTVAEVVRACHAHGVMHRDLKPENFLYAGKAEDAQLKAIDFGLSVFFRPGERFREIVGSPYYMAPEVLRRDYGPEVDIWSAGVILYILLCGVPPFWAETEQGVARAILRGAADFDREPWPRISRAAKSLVRQMLDVDPRRRPTAQQVLDHPWLHHAARAPNVPLGDVVRARLKQFSLMNRLKKKAMRVIAEHLSVEEVEVIKDMFALMDTDNNGRVTLQELKDGLTKVGSKLAEPEMELLMEAADVDGNGYLDYGEFVAVTIHLQRLSNDNHLRTAFLFFDKDGSGYIDRAELADALADDSGHADDAVLDHILREVDTDKDGRISYEEFVAMMKSGTDWRKASRQYSRERFKTLSNSLIKDGSITMAR

SEQ ID NO: 36212 - protein, 660 aa, Oryza sativa
MWALERLDLSGNRFSGAIPDAIAKCKKMVEADLSRNALAGELPWWVFGLPLQRVSVAGNKLYGWVKVPADAALALRALDLSSNGFSGGIPPQITAFAGLQYLNMSSNSFARQLPAGIGGMRLLEVLDVSANRLDGGVPPEIGGAVALRELRLGRNSFTGHIPSQIGNCSSLVALDLSHNNLTGSILSTVGNLTSLEVVDLSKNKLNGTLPVELSNLPSLRIFDVSHNLLSGDLPNSRFFDNIPETFLSDNQGLCSSRKNNSCIAIMPKPIVLNPNSSTNPLSQATPTAPSSMHHKKIILSVSTLIAIAGGGTIIIGVIIISVLNRRARATTSRSAPATALSDDYLSQSPENDASSGKLVMFGKGSPEFSAGGHALLNKDCELGRGGFGAVYKTVLRDGQPVAIKKLTVSSLVKSKDDFERQVKLLSKVRHHNVVALRGFYWTSSLQLLIYDYLPGGNLHKHLHECTEDNSLSWMERFDIILGVARGLTHLHQRGIIHYNLKSSNVLLDSNGEPRVGDYGLAKLLPMLDRYVLSSKIQSALGYMAPEFACKTVKITEKCDVYGFGVLVLEVLTGRRPVEYLEDDVVVLCDLVRSALEEGRLEDCMDPRLCGEFPMEEALPIIKLGLVCTSRVPSNRPDMGEVVNILELVRSPQDSLEDELV

SEQ ID NO: 36213 - protein, 101 aa, Oryza sativa
MLVYFRLHSNYYCCHIQIVKENQELHKGSVEIEDDFATLADKCIFPGDVLWVKDSEIYENRDIADEISEQKVVVQTEEGFRGTLLTSSASAQLCQDISFSD

SEQ ID NO: 36214 - protein, 398 aa, Oryza sativa
MAAAVVLLRRLRGVTAAPRRAAAALPLTTSVRGVSDSTEPLTIETSVPYKSHIVDPPPREVATTARELATFFRDMSAMRRAEIAADSLYKAKLIRGFCHLYDGQEAVAVGMEAATTRADAIITAYRDHCAYLARGGDLAALFAELMGRRGGCSRGKGGSMHLYKKDANFYGGHGIVGAQVPLGCGLAFAQRYRKEAAVTFDLYGDGAANQGQLFEALNMAALWKLPVVLVCENNHYGMGTAEWRASKSPAYYKRGDYVPGLKVDGMDVLAVKQACKFAKQHALENGPIILEMDTYRYHGHSMSDPGSTYRTRDEIAGIRQERDPIERVRKLLLAHDFATTQELKDMEKEIRKQVDTAIAKAKESPMPDPSELFTNVYVNDCGLESFGVDRKVVRTVLP

SEQ ID NO: 36215 - protein, 440 aa, Oryza sativa
MLSTAAPSSTSLVASFPSRARRRGLPGRRGVVVAAAGAGPGAGAAERFAASSSSITDYLRYRRPGSAGGGGGTGVCGGELQTAVVRYEKRLPWSLIHPFLHVDLVSTVHIADKEYFDRLQQALQDYDCVLYEMVTSRENLNNRKDPTFAKKLKSSRRGFSILGFIQKQMANILSLDYQLDCLDYGSEKWQHADLDFETFKQLQSERGESLFTFAVDMTLKSTKALVQPTLPDGLDFWRSKLLWASRVLPMPLVGLFLISGLCLPIDDQGGYPELEALSRLDFGAALKIFLAKQLTSDFTSMTSPIEEKSVIIGERNRVATEKIQEAINHGYKRIAVLYGGGHMPDLGRRLREELNMVPADVQWVTAWSIRSRELDRESLPFLKTMAEVSGWPLNRYETLALLIFSSVLAVDLWFWELLVGTAVNWASLAGSWIEQFNGPF

SEQ ID NO: 36216 - protein, 407 aa, Oryza sativa
MIQTPQSPVTSTSGVVSFQQRCNSTKICSQPGCAKGARGSSGRCIAHGGGRRCQREGCKKGAEGKTIFCKAHGGGRRCEHLGCTKSAEGRTDFCIAHGGGRRCSRDGCRKAARGKSGLCIKHGGGKRCQKLNCTKSAEGQSGFCIAHGGGRRCKHDGCTKGGQGSTNFCKAHGGGKRCTHPNCSKGAEGSTALCKAHGGGKRCSAEGCPKSVHGGTEFCVAHGGGKRCVVPGCTKSARGRTDCCVRHGGGKRCQFTGCSKSAQGSTDFCKAHGGGKRCLWGQSGSGLGDGSGTCERFARGKKGLCVAHNALVEDSRVRGGQTVGTIALPGSTGADSDVSHGTLPGNSFNSGETFAANTKQALHHVQSPVPEGRVHGGNIAAMLANSMDYQKQLNFSTGASTSDRNWL

SEQ ID NO: 36217 - protein, 569 aa, Oryza sativa
MEEVSIHSQMSHRNVVELIGYCIGESTLMIVTKYISKGNLDDILHNSDISIPLDVRLGIAIGCADALSYMHSMHLSNGSLICHGDIKPANILLDSNLTSKLSDFGVSRLLSGGVTQYTVHIKGSVSYMDPIYFHEGCLTPRSDVYSFGMVLLELIARKRVRKGDINLIGGGEIFDAEIANRSNMKILKEMRKLAIECLTLDIHKRPQMNVVAKRLRTLKKELKDMHGRYSEHILASHRSWRKNDNQGPSYNSRMQLKKSLSIFKRNLSNSSKILLGLGNMRIFTQEELNEITQNYSCLLSGGTSGKVYKGTLEDNTVVAVRIFSEALEGFEEAFINGGMILSQIVHKNIIRLLGYCLNADCPAFVYEYAARGTLSDILDGREDFPLHLRVKIAVETAEALEYLHSSAAGMIRHGYVAPSKTLVDDSFTPKLTGFSWAQRLNNDDSAIHDHDKYCVSLKLKTDVYQFGVLVLTLISRKNFAFYADHEHLVSQFLAAYKADNSGRAFFDDDITTRSEDVALLEEIGKLLLKCICLEIDQRPTMKQVAQHLRIIRRCWKNNCTADGASLVTN

SEQ ID NO: 36218 - protein, 261 aa, Oryza sativa
MWFMVVTWLFAPFLFNPSGFEWQKIVDDWTDWNKWISNRGGIGVPPEKSWESWWEKEQEPIKYSGKRGIVLEIVLALRFFIYQYGLVYHLNITKHTKSVLVYCLSWVVIFVILLVMKTVSVGRRKFSADFQLVFRLIKGLIFITFISIIIILITIPHMTVQDIFVCILAFMPTGWGLLLVAQAIKPVIVRIGLWGSIKALARGYEIIMGLLLFTPIAFLAWFPFVSEFQTRMLFNQAFSRGLQISRILGGHKKDRATRNKE

SEQ ID NO: 36219 - protein, 581 aa, Oryza sativa
MHLHTHQAKDMETLGRRRRVAVLAWCNAIAMALALATPVAAVAANHGDTAAAKDNVAVVPRIAASAAAAASSVNVTAICMATPYPSACETALSSAAARGAANDPFAASVQFAMTRAESARALARNLSASSSRPRVAPSGMDDCAELLDISLDQLHDALAARAADAAGVTTWLSAALTNQGTCGDSLAAVPDPAARSAVRARVAALEQFIGTALALHAKLNNGGSGSSSPAPPSRAAFPSWVTKHDRHLLSSPASTIAPDAVVALDGSGTHTSISDAIAAVTAPPPPAHHPTASGGGGGGRSRKVIYVKAGRYEESVSVTSKQKDVVLLGDGKGKTVISGHRSVAGGYTTYASATVAAMGSGFIAKGLTIVNSAGPGKGQAVALRVGGDLSVVYNCGIEAYQDTLYVHSNRQFYAADDISGTVDFIFGNAAAVIQGCEIRARRPSPGQEDTVTAQGRSDPNQNTGISIHRCRITGAPDLGGTPVYLGRPWRRYSRTVVMGTFLDRSIAPAGWLEWSGQFGLSTLYYGEYGNTGPGAGTRRRVTWSGVHTSMSTSDATRFTVANFIVGDAWLPATGVTYTSGL

SEQ ID NO: 36220 - protein, 671 aa, Oryza sativa
MLREPFHCFTLLLLLLAAADRCAAATGGSGGLQFAYDGFSGANLTLDGAATVTASGLLMLTNGSIQMKGHAFHPSPLPLRAARSFSTTFVFAIFGQYADFSSHGLAFFVSASADAFAAALPGQFLGLFNGTGATTGNRSAAGVFAVEFDTLFNAEFHDLNSNHVGVDVNSLTSVKAADAGYYDDVTGQFRNLTMISRKPMQAWVDYDGGSTEVTVAMAPLGTARPKKPLLRTNVDLPDVATGAAHVGFASATGILFSRHFVLGWSFAVDGPAPPLNISSLPPLPRAWPKPRSKVLEIVLPIASAALVAAVAMAVYAMARRRLRYAELREECETAFGPHRFSYKDLFHATKGFSDKNLLGTGGFGSVYRGVLRKPDMEVAVKRVSHESRQGMKEFVAEVASIGRLRHRNLVQLLGYCRRKGELLLVYDYMPKGSLDKYLYDGSKHPLSWPQRFHIIRGVASGLLYLHEDWEHVVIHRDVKASNVLLDDEMNGRLGDFGLARLYDHGAVAQTTHVVGTMGYLAPELGHTGKATPSTDVFAFGAFLLEVTCGRRPIVQDEHGNRAVLVDWVTEQWSKGALVNVVDARIPSCFDPDEVSLVLKLGLLCSHPLPNARPTMRQVAQYLDGDMALPDLSPTYLSFTSLERMYKEFNRNSISYISSASMGAISDISGGR

SEQ ID NO: 36221 - protein, 765 aa, Oryza sativa
MAAVAAAAAAAGDDRRPYVVRMDVSAMPAPFATHDGWYRSVLSSASARDAAAAPAAEHLYTYSHAMNGFSAVLTARQVEEIRRADGHVAVFPETYARLHTTRTPAFLGLSAGAGAWPASRYGADVVVGIVDTGVWPESASFSDAGVAAPVPARWKGACEAGASFRPSMCNRKLVGARSFSKGLRQRGLNISDDDYDSPRDYYGHGSHTSSTAAGAAVPGASYFGYANGTATGVAPMARVAMYKAVFSADTLESASTDVLAAMDQAIADGVDVMSLSLGFPESPYDTNVVAIGAFAAVRRGILVTCSAGNDGSDSYTVLNGAPWITTVGASTIDRAFTATVTLGAGAGGARSIVGRSVYPGRVPAGAAALYYGRGNRTKERCESGSLSRKDVRGKYVFCNAGEGGIHEQMYEVQSNGGRGVIAASNMKEIMDPSDYVTPVVLVTPSDGAAIQRYATAAAAPRASVRFAGTELGVKPAPAVAYFSSRGPSPVSPAILKPDVVAPGVDILAAWVPNKEVMELDGGETKLYTNYMLVSGTSMASPHVAGVAALLRSAHPDWSPAAVRSAMMTTAYVKDNADDADLVSMPGGSPGTPLDYGSGHVSPNQATDPGLVYDITADDYVAFLCGELRYTSRQVAAIAGHRAGCPAGAGAASHRDLNYPSFMVILNKTNSATRTFTRTLTNVAGSPAKYAVSVTAPAGMAVKVTPATLSFAGKGSTQGFSVTVQVSQVKRSRDGDNYIGNYGFLSWNEVGGQHVVRSPIVSAFAQ

SEQ ID NO: 36222 - protein, 443 aa, Oryza sativa
MKSANDEEAIDKDSIIQKADDLAVRVEEELFKLFGGVNKKYKEKGRSLLFNLKDKSNPELRERVLSGDITPDRLCSMTAEELASKELSEWRLAKAEELAQMVVLPSTEVDVRRLVRKTHKGEFQVEVEETDGISVEVELGGNLLTQVPSKAPEDQTKSDDKESTDDKTGIQDNDKAPDGTSQDEDNGAGKNDPQDDLEYVDNEKSDLMQELMVDDLKDTENLPPIPSLDEFMQGLDSEPPFENLSAGTPEEDSDDRDEADTTAESAELPEEEVKVSAAEKIVSEADLPSSQDKSESKLESPKDEVGSNLGPVEQREGKLIKSSPDSVEVKQTTTENVLNRDSTVHNMATTLPMIRESIWEGAIQLTMSSLTNVVAIFKSGEKPPVKEWRSFVEIKGRVKLSAFQEFVEQLPKSRSRAIMVTELCWKEGSHESGRQHLLQVFLS

SEQ ID NO: 36223 - protein, 439 aa, Oryza sativa; identical to SEQ ID NO: 34861

SEQ ID NO: 36224 - protein, 201 aa, Oryza sativa
MDRSGRGRDDGGGRDQAHAHRRRRRRRRHEQRRRRRKRGRGRDGEPGERGRGSGGFLRGRRHHHHRAHDGDGGRHGRRRGGGGGGGVGGDGGARAAHPPRHRRLHSPGVGDAGGGARAVQEPRRRLRGPPLLDPQGEGGEVGGGDPGAARPRRRQRAGTLPPPQRPAPPPRHRPPRPHLTCLLPPAPPKSIAAAVSSQLVV

SEQ ID NO: 36225 - protein, 1023 aa, Oryza sativa
MAAAADARRFAVVPQLDIAQILKEAQQRWLRPAEICEILKNYKSFRIAPEPPNRPQSGSLFLFDRKVLRYFRKDGHNWRKKKDGKTVKEAHERLKSGSIDVLHCYYAHGEENENFQRRTYWMLEEDFMHIVLVHYLETKGGKSRTRGNNDMHQAAVMDSPLSQLPSQTIDGESSLSGQFSEYEEAESDVYSGGTGYHSFTQMQQQQNGIGPVTDASMFSSRVSASSIGNYQGQHAMGHTTNFYSSSQHDSPLVLSDPNLELANNGHESLWNGVMKPDEGTVQMTHLQPPVHPEQGMFTTEGQGVEYLTFDEVYSDGLSLKDIGAAGADVEPFWQLSSATADISATENSVQQNDGSLGAAIGFPFLKTQSSNLSDILKDSFKKSDSFTRWMSKELLDVEDSQIQSSSGAYWNTEEADSIIEASSREPLDQFTVAPMVLQDQLFSIVDFSPSWTYAGSKTKVLVTGRFLHANEVTERCKWSCMFGEVEIQAEISADGTLRCYSPPHKPGRVPFYVTCSNRLACSEVREFEFRPSDSQYMDAPSPLGATNKVYFQIRLDNLLSLGPDVYQATITNPSKEMIGLSKKISSLLANNDEWSKLLKLADDNEPLSHDQQDQYAENLIKEKLHVWLLHKVGDGGKGPSVLDDEGLGVLHLAAALGYDWAIRPTVTAGVNINFRDFHGWTALHWAAFCGRERTVVALIALGAAPGALTDPHPNYPAESTPADLASANGHKGISGFLAESSLTSHLQALNLKEANMSEISGLPGIGDVTERNASQPAIGDSLGAVRNAAQAAARIYQVFRVQSFQRKQAVQYEGDKGGISDEHALSLLSMKPSKSGQLDPLHAAASRIQNKYRGWKGRKEFLLFRQRIVKIQAHVRGHQVRKHYRKIVWSVGIVEKVILRWRRRRAGLRGFRPTEGAIESSSGGTSSNLVKDKPAGDDYDFLQEGRKQTEERLQKALARVKSMVQYPEARDQYQRILNVVSKMQESQTVQEKILDESTEMDEGDFMSEFKELWDDDTPLPGYF

SEQ ID NO: 36226 - protein, 344 aa, Oryza sativa
MSVSEKVVPPSSVSSSDLDPLLKDLTEKKLSFRRNVVSLAAELKDVRNKLASQEQLFVRESQTRKFAETKARSMEEEISKLQKCLNDKDEQLRSSTGCTEQYFHELDDLRSKLSVTQATAEASAASAKSAQSQCLSLLKELNEKDSSLKEHERRVNKLGEQLDHLQKDLESREYSQRQLKDEVLRIETDIMDAVAKVGSNKDNELLKILSDVSPRNIDNLNKLLNAKDAEIARLRDEIRILSAHWTNKTKELESQLEKQKRTDQELKKRILKLEFCLQESRSQIRKLQRAGEKRDKQLKELKDQVGMKQPSVPYRDDKHNFWENQSFKFIASMSMLALVMLTKR

SEQ ID NO: 36227 - protein, 302 aa, Oryza sativa
MTSSMSKSDKKKVLDFAAWSFNITTSVGIIMVNKALMATHGFSFATTLTGLHFVTTTLMTIVFRWLGLSQPSHLPIPDLIKFVIFSNLSIVGMNVSLMWNSVGFYQIAKLCMIPASCLLEVVFDRVHYSRDTKLSIMVVLIGVAVCTVTDVSVNAKGLAAAVIAVWSTALQQYYVHFLQRKYSLNSFNLLGHTAPAQAGSLLLVGPFVDFLLTGKRVDHFGFTSIALFFLTLSCVIAIGVNLSQFICIGRFSAVSFQVLGHMKTVLVLSLGFLFFGKEGLNFQVVLGMILAVVGMIWYGSEK

SEQ ID NO: 36228 - protein, 292 aa, Oryza sativa
MRCKLHPYANAVGVCAPCLRDRLLDLAAQRDAAADAAEADDHHHSSSSRASSSLFARSVSPYAAARRSDACAYASSSSSSAAAAHHHHHHPNLLFFRTPQVGPARAAGGGDEPEPRGKKVARRRSFLAAIFGGGGRGRHARGDDDVVRGGGVSAEDPPRRSTSWLSSIVRRKRRPEAAATAAESLPPPLDEAPDSPGGSTTSSWWFPSPSPARQHRRRHTGVGASGDGISGFAVCLSPLVRPTSGGGGGRRRCQPPDPSPLGDTHRRNLSAGGAASFGRNTSRKLADMGRFR

SEQ ID NO: 36229 - protein, 179 aa, Oryza sativa
MAGDEWRCRKHPAPPCGGVCPYCLRDRLLRLCPECAHARPCPCAASSSSPSSSSSSAASGSAAVVGRVYSLIERERRMGLRSRSVAAGGGGGGRGIVVRDERPKSRAFGWVSFRKATSDRVVEVDDGAALARSSSVSATAVETRAPPKSRGWGRFIPGSIKALRHRKSRAAGDCREGVR

SEQ ID NO: 36230 - protein, 268 aa, Oryza sativa; identical to SEQ ID NO: 30608

SEQ ID NO: 36231 - protein, 175 aa, Oryza sativa
MRLPFMCFAGGLGAMQGVSEEEGRRRRPAGQRRRRLSHLHRLDVDDDVVTATAAGPPPPCSRSGGRLLRRFPAAGCWLRLRRRLREPHAAGGATLPIRRRGYRVPGGVRRRRRGSRRVRVWDILGLGLRARRHGECSWRHQVVPAGLELIDPGTKQIYFAYVRTYVYASYTGSDR

SEQ ID NO: 36232 - protein, 70 aa, Oryza sativa
MSKARNVLVATGLLAFAGAGLAFPFYFVKSKNKPIIDSSKPLPPQATFRGPYVNTGSRDIGPDYTDYPKK

SEQ ID NO: 36233 - protein, 37 aa, Oryza sativa
MRGCEGRSRRRLRACVRSYRIYKAYRYGRRRRSIVRI

SEQ ID NO: 36234 - protein, 144 aa, Oryza sativa
MKVRLAKRTVGSGKHNQSSKENQAIQGQPSKVEQQMVSEKNGGTDSVESAFDNENVNSNISHEDMHQHQKVNAKGGRKGRYKSQGRGQIQQNTSGQGHVSSPATSGSDHVNKPIPGPRMPDGTRGFTMGRGKSPTFQKGDNAEE

SEQ ID NO: 36235 - protein, 119 aa, Oryza sativa
MDRGVELMGCVCRIKNCAVELLEMEEDLVIGMDDDDRDLFWSELQLKTTFLYIDLSRVISSSESDERREALTLLTNKLFYFLEELTDAVTSGSVSFTKLCYGDAAQALREVVAFLAPPQ

SEQ ID NO: 36236 - protein, 113 aa, Oryza sativa
MAANQSIKELMAAETKASKIISEARQERGERLKQAKIEAEAEINAYRKQQEHQFQMSANTDLMGDDPSILDEDTAREIQKMRGEFEMNKAGVIQMMVEHVGRVQLKVPDARKA

SEQ ID NO: 36237 - protein, 151 aa, Oryza sativa
MRGQYSIKSDVFSFGVLVLEIITGRRNFGSYGSDQQDYDLINATWEHWTSDKALELIDPSLGNHYPVDKVLKCIQIGLLCVQPKPADRPLMSAVNVMLTGTIRLPSLSRPAFWFQEIGASSDVNSEQNLLDPHNSTKMYQSEAPITELEPR

SEQ ID NO: 36238 - protein, 41 aa, Oryza sativa
MVKNQSMTVQAHEGLIAALAQSPITGMVASASHDNSVKLWK

SEQ ID NO: 36239 - protein, 122 aa, Oryza sativa
MRTAAAKARCSVPFILAALAALSCVFLVHAAAAAAAAAVTTTTTSVVGYRRALLPREAAAVVMPTTSTAEDAAVVGMAGVEGELPVVADEAAAAAARRMDMQTTQDYPSSGANSRHDPRNPH

SEQ ID NO: 36240 - protein, 153 aa, Oryza sativa
MHYVHAALYESMRLFPPVQFDSKFAAGDDTLPDGTFVAKGTRVTYHAYAMGRMESLWGPDCAVFRPERWLSGGRFVPESPYRYPVFQGGVRVCVGKDLAIMEMKAVIVAVVLSFDVEAVDRSSRRPKFAPGLTATFAGGVPVRVRRRAHCAPS

SEQ ID NO: 36241 - protein, 171 aa, Oryza sativa
MAVNARHSGENSIDCSLIAPAVLVLFIILMYLPPSTTFALSNGDEKTANKKAKRKLGLVVQNLAFSQLACISVFVIVAFITERSRLRNDPLNFSALNMIFEIISAYGNVGLSTGYSCSRLQKLHPGSICQDKPYSLSGWWSDEGKLLLVFVMLYGRLKAFTKGTGEYWRLW

SEQ ID NO: 36242 - protein, 123 aa, Oryza sativa
MEDFYVTIPYGAAVLVGGVAGYLKRGSKASLAAGGGFGGALLLAGALSARAFARGHPSGSLFAAVLQTVCAVALTVVMGIRYIKTRKVMPAGIIAAVSALVLIFYIYKISNGGNKVYVPVSAE

SEQ ID NO: 36243 - protein, 168 aa, Oryza sativa
MEGGGGERAAGVVRRLMAAKAESRKSFSEIGEEAGLTNVYVAQLLRRQAQLKPETAPALRAAVPGLTDDLVALMMEPPFRSYHPDIVHEPAIYRLNEAVMHFGESIKEIINEEFGDGIMSAIDFYCSVDKVQGADGKDRVVVTFDGKYLPYSEQRSDHMMSRLTRKTS

SEQ ID NO: 36244 - protein, 247 aa, Oryza sativa
MLYDCNEQLQQFSHVNKKALDQYVNFTEQREQLQRRRAELDAGDQKIRELISVLDQRKDESIERTFKGVARHFREVFSELVQGGHGHLVMMRKKDGDADDDDNDEDGPREPDPEGRIEKYIGVKVKVSFTGKGETQSMKQLSGGQKTVVALTLIFAIQRCDPAPFYLFDEIDAALDPQYRTAVGNMIRRLADMADTQFIATTFRPEIAKVADKIYGVTHKNRVSYINVVSKEQALDFIEHDQTHNAS

SEQ ID NO: 36245 - protein, 167 aa, Oryza sativa
MQKEKKNMRNPSQMLRLLLLRVAILAAVLATPSLGRVIGGSKCKCLMCVCDVDPHPLPPSRHHPPPPEEPEPEPTPVNHHYPPPTTPAYSLPPPAQPYGQYPYPYPSQGQAGAAYWPPSTPAEMYPQVRGYIRSAAAHRRRPGHGGLSSRLVVVSVLLVSGLMPLLV

SEQ ID NO: 36246 - protein, 106 aa, Oryza sativa
MAATPPPPPLHIVVFPWLAFGHMIPFLELSKRLARRGHAITFVSTPRNAGRLGAIPPAMSAHLRVVSLDLPAVDGLAGGRRVDGRRPAGEGRAPQEGVRRPRRALR

SEQ ID NO: 36247 - protein, 148 aa, Oryza sativa; identical to SEQ ID NO: 33159

SEQ ID NO: 36248 - protein, 73 aa, Oryza sativa
MEGAVLCAANHASLTPITFLDRAALVYPDHPAIVASSSGLTRTWRETRDRCLRLAASLAALDVHRHHVVAVFA

SEQ ID NO: 36249 - protein, 206 aa, Oryza sativa
MASSRRRTLLKVIVLGDSGVGKTSLMNQYVNKKFSQQYKATIGADFVTKEVLIEDRLVTLQIWDTAGQERFQSLGVAFYRGADCCMLVYDVNAKRSFNALNTWHDEFLTQASPSDPKHFPFILLGNKIDIDAGNRRAIPEKKAKEWCVSKGNIPYFETSAKDDYNVDSAFLCIAKLALEHEHDQDIYFKTVAQPAPDTEHTSGCAC

SEQ ID NO: 36250 - protein, 118 aa, Oryza sativa
MATRAPATGSATVTVDPTPSSSAPASSAPPPAAETVVLRLKRRAKKKVTWKEGTVDNESLGRKSSKKCCIFHKDVPFDEDCSDDDPDGGRRSPPGDAGEGTSGGGGGCCSSSSDGHGH

SEQ ID NO: 36251 - protein, 140 aa, Oryza sativa
MNEFSQYHNKLLIDELEKLRKLHPDVAIIYADYYGAAMEVFLSPEQFGIKDPLTACCGGGGPYGVSGTARCGYGEYKVCDDPQKFGSWDGFHPSEAAYKAIAIGLLRGSYTQPSFATTTNSCPQITELSSSVEYKVLYDL

SEQ ID NO: 36252 - protein, 206 aa, Oryza sativa
MHFFCGDSSFAKSNQESLKNILIIFAKLNAGIRYVQGMNEILAPLFFVFRNDPDDKNANFAEADSFFCFMELLSGFRDNFCQKLDNSAVGIQGTLSKLSQLVAKYDGELQRYLEITTEINPQFYAFRWITLLLTQEFNFADTIHIWDTLLSDPDGPQETLLRICCAMLILVRKRLLAGDFTSNLKLLQNYPPTNISHLLYVANKLH

SEQ ID NO: 36253 - protein, 51 aa, Oryza sativa
MVAPLLLPTAGSFSPRQAVAAAPLSRQIRRADGEVVRSSALAPPSPLGISC

SEQ ID NO: 36254 - protein, 79 aa, Oryza sativa
MGKADADAEFKAAGKRKKAGGAGKPKRGLTPFFAFLAEFRPQYMEKHPNTKGVAAVTKAAGEKWRAMSDEVSRCWQLLY

SEQ ID NO: 36255 - protein, 173 aa, Oryza sativa
MDSHVGKLFDSVGSIFRGSDTLPWCDRDIIAGCENEVAEAANEEQKNESLMRLSWALVHSRQPEDVNRGIGMLQASLDRSTSPLQTREKLYLLAVGHYRTGDYTRSRQLLERCLEIQPDWRQALTLQRLVEDKTRRDGMIGMAIVTGAFGLVGLVAGGIIAAASSSSSSSRKK

SEQ ID NO: 36256 - protein, 118 aa, Oryza sativa
MDPVYCQTGLLTDKSDVYSFGVVLLELITRKKASHSDNNGLRQNFIDAYTSGKTVTELVDEEIATTNDVDILVNLAGMVVQCLNREVDQRPEMTDIAERLHNMAKRVHSNVFMNLQNF

SEQ ID NO: 36257 - protein, 133 aa, Oryza sativa
MTTVTIRRSRRTTKTHRPPLNTTTHRHRRTTMTRRTHRTTTTRRHHRTTTTRHRRRTTAEAVDMANHRRRRHAAHARVSRTDATGPASAARRRPMERAPYNSYEADHTWWFINKHFSLIKYYSKLLEKCIQFK

SEQ ID NO: 36258 - protein, 323 aa, Oryza sativa
MAMITLPVAAHAPSPWLPPSILRLRSTSTTTTIPAAAARSSAPHPLPDELHLVADIRSPHNHIRVADVSRTASGAGHPLAGARLLLLDAPGNIHSLSFPRSPCPLTSTYLDVFATLPPLLPASASSLAVLGFGAGSAARAVLHFFPDISVHGWEIDPAVVSASRDFFGLAELEAEHAARLSIHVGDALEASADAVAVPGGFGGVLVDLFAGGSVLPELQEMDTWRRIGRRMVAPGGRVMVNCGGPCVEAEEEGRGGEAVKDATLRALTAAFGHGMVSVMDMDESWVAMTGPAVSSAPEEAAAWKAKLPPELRRYVDMWRPCLL

SEQ ID NO: 36259 - protein, 308 aa, Oryza sativa
MMDLGLSLGLGLASQGSLTSSTTTTSSPGAGSSSPWAAALNSIVGDVRRDQAAAHAAAAVGVGVGGEEMYQGRASTSPDSAAALSSASGKRERELERSGSGVDDDDGADGAGGRKKLRLSKDQAAVLEECFKTHSTLNPKQKVALANRLGLRPRQVEVWFQNRRARTKLKQTEVDCEYLKRWCERLADENKRLEKELADLRALKAAPSPASASAMQPSSSAAATLTMCPSCRRVATAGAPHQPNHQQCHPKSNTTISSSSTAAAAVAVAGGNVLPSHCQFFPAAAAAADRTSQSTWNAAAPLVTRELF

SEQ ID NO: 36260 - protein, 158 aa, Oryza sativa
MVAIENQSQGQRAAEAAAQPRIPREARRLLHEMAASWADVADCRALQVIPLKGAMTNEVYQVRWLNGAPATADGGEVEAEAAAREREVRKVLVRIYGDGVELFFDREDEVRTFECMSRHGQGPRLLGRFTNGRVEEFIHARVGAHEYDMIPRCCSQTV

SEQ ID NO: 36261 - protein, 109 aa, Oryza sativa
MARPRRRRRGRLRGRRSRRRRQGVHVRRRGGGAGGGGLHEESRQLSVERRGLLSPRVAAFGSVGGVGGGGIFVPMLTLIIGFDAKSSTAISKFIVSTQQCNQYHPYWYH

SEQ ID NO: 36262 - protein, 165 aa, Oryza sativa
MLFTTFPRLTVISGTDVSLVSIPPDGPAPKACSHRDPPYDDGKRGGGDSLLRPQRPTVGAFARYTTQVPRPNDSTQRLLSNFNFHLASNFNGNRPCLISVKRSLSSAIHRIRTTGHVIVRSRHLRTSRWSRAACLLLLRHYTTAFTTPLPDGYSRLRLHHAFPYL

SEQ ID NO: 36263 - protein, 208 aa, Oryza sativa; identical to SEQ ID NO: 30222

SEQ ID NO: 36264 - protein, 66 aa, Oryza sativa
MGEELACRPRARGGARRRPCVRVELAGRPPTGGGASRALIWAYVYIDRSMHMHACICFHCSGYVFR

SEQ ID NO: 36265 - protein, 136 aa, Oryza sativa
MFWAEQYREIEATTDFKNHNLPLARIKKIMKADEDVRMIAAEAPVVFARACEMFILELTHRGWAHAEENKRRTLQKSDIAAAIARTEVFDFLVDIVPRDDAKDADAAAAAAAAGIPRPAAGVPATDPLAYYYVPQQ

SEQ ID NO: 36266 - protein, 103 aa, Oryza sativa
MPFLFSFSLSQTKQSLGLQRRRRAVDTGLTQRRLIAAAASSSSAATAAAATPLGAHALGEDALGAVAAGVLLVDADHGAVSVAPALPAVHLAPCFADDSFCAW

SEQ ID NO: 36267 - protein, 46 aa, Oryza sativa
MGKVCLLVIDENLFNGILLVAIVVIMFMLLAGGGAPPPRRRGFCVY

SEQ ID NO: 36268 - protein, 115 aa, Oryza sativa
MSKDKLCRKVDIPFDDITSFCFVFGQQSDILTIEVKSSLIPLSAAKPLPGKFLDWKVDYSKDDEYYFPESKSLWVEAEKGSLEKTYAKLKYTNPHLTCLFTDAGEQGETSARHAT

SEQ ID NO: 36269 - protein, 163 aa, Oryza sativa
MHNRRGSGGSSEATVSLTALGRVCNIALSNGPQNTDALSAPLRRIAEDLLRMAEENRIDVRAALARAARRQLLQSDRNTTLDEGGDGRSSSPLPFVETTTTSPVMTAQAMHHRMTSDASSAILPTVRCAQPTAAEGGSSGGGGYLGLQLLRDAVATKPFSSPA

SEQ ID NO: 36270 - protein, 43 aa, Oryza sativa
MHTCFRCTLCTTTNQCHQKILNKIVHLLLILLHLYISFGIQIH

SEQ ID NO: 36271 - protein, 115 aa, Oryza sativa
MLVAALRVPAPIPSSLPSPARPLLRRRSSHRLPPPPPPAASMADAGGATTNKPAPAPAPEPPEKPLPGDCCGSGCVRCVWDVYYDELDAYNKALAAHSSSASSGSKPATSDGAKS

SEQ ID NO: 36272 - protein, 414 aa, Oryza sativa
MEKKKVDAVVAAARPFLRGDLSQVDPELPSLVSVLCDAGAGECYHKHGTFLAHLIDVYRILRLWGAPDAVARCGLYHSAYSNSYVNLAIFQPDVARDHVRGIIGAAAERLVHLFCVVPRHQLMHDDLHLRYTDAELTAHLAASQASLDAARKSGGGGGDPGEAWRAKLASVVPPEGVVARHIRTGEAVALSRRVLGVFIVMTIADFSDQYTDYQDKLFDNEDGRLEYRGDNWRAVWPGSGKPGLWMSAMSRLAAVYRLIATDEEIRELTAGERSVVKREDAELELVIPPVFERCSKVLDAAEQKEGRDLYWEAVCGEWEEGKTERLLRRSIEKNPFVGEPWLVLAQALLNSGHDEEAEAAAEEGVRLVVEWGSSWDKRMSWEGWVSWGRVLRDGAHRRQWPRTAWGIINLGLVK

SEQ ID NO: 36273 - protein, 97 aa, Oryza sativa
MGFHLVAIVAARGFLHLFHLSAPLLWPLNLWLPLPRHLPAACAALYGGVVFHAALLRRAYARRGGGGNVWSRSIRGGDGGGGEADELLRQALLSISY

SEQ ID NO: 36274 - protein, 169 aa, Oryza sativa
MATAASSAASVHDFTVKDASGKDVDLSTFKGKVLLIVNVASQCGLTNSNYTELSQLYEKYKDQGFEILAFPCNQFGGQEPGTNEEIVQFACTRFKAEYPIFDKVDVNGDNTAPIYKFLKSSKGGLFGDNIKWNFSKFLVDKEGRVVERYAPTTSPLSMEKDIKKLLGSS

SEQ ID NO: 36275 - protein, 162 aa, Oryza sativa
MMDWLRVCAAEGERPGAEAAAPGRGEADGGGGGGDGVAVPGAGEGRDVARAGVAQGVDGLLGVQAGPERVRAGAGAAAAGARRPGERQLLLPRVHADGHDPRLGEAHRGGGCRDRGAPRPAPARRAPHGHLLQVVHAAALLQALTAAAPREPRGIRVVRCGL

SEQ ID NO: 36276 - protein, 146 aa, Oryza sativa
MPLYDCMLLVKPLVTREAMAELVGRVARRAYQRNGVVTDVKSFGTICLGYGIKKLDGRHFKGQLMQMTMMVPPSFTQELHYLNKEDRLLRWLVVKHRDAVYGVEFINEDDGRREMTDFRYRTKDEASDVDEYDDDDDDYEYEIDEE

SEQ ID NO: 36277 - protein, 25 aa, Oryza sativa
MPLPLTITLLLHPLQFHRSQTPTVH

SEQ ID NO: 36278 - protein, 102 aa, Oryza sativa
MLAVFSGAVVEVPAELVAAGSRTPSPKTRASELVGRFLAAAEPAVSLQLGDLGHLAYSHANQSLLRPRYTSCCFYSASAEIAEKTSAVFFTLNSPSPGFHEI

SEQ ID NO: 36279 - protein, 220 aa, Oryza sativa
MDERLLDAICERLRPTLYTENEYILREGDPVDEMHFILHGCLESETTDGGRSGFFNKVQLKEGAFCGDELLTWALDPKSAANFPASTRTVKALTEVEAFALCAEELKFVASQFRRLHSRQVQHTFRFYSQHWRTWAACFIQAAWRRYYKRKMAEQHRKEEEAANRQSSSSHHPSLAATIYASRFAANALRGVHRLRSRASPTIVRLPKPPEPDFAVDEAD

SEQ ID NO: 36280 - protein, 146 aa, Oryza sativa
MAKAQLVARFSVEVAPPLLSSIIRPRRRRGFPAMLDTIAEEEPDAPPLPAIVMARELSASYALLRGVAAAAAAVAPAPPPPPRNVMVGSSCSSLVLVRRAEAKEKRCVVVVVGSSAASAAIVHGEKRLHLAAAPASEAAACSEIGA

SEQ ID NO: 36281 - protein, 383 aa, Oryza sativa
MADFIAREKAAYPDLANKYQYLKDLQSRKLYHELTGELEVFVKDPATHKSPPNLPKLYTEFIKSFQDKLNQIRLVSICTEISTQFTDPAEAQAFLEGIAAQLNAKADFEAALLCKMQIARCKLRRGADFHADVKAELDEQLPVVEALVGAEPVVHSAYYRVACDYYGAKGPASKFYKNALMLLAYTQYDEMPPQERFDLAVNISIAAMTGDGVFNFGEVIATPILRALEGTDKQWLSDLLHAFSKGDIDKFNAVIASNAAEFDAQPALATKRESIKEKIALLALMVLVFQRPSHERNISFAEIADVTRLPVDQVEWLVMRALSLGLIKGSIDQVDAIVRVSWVQPRVLDNSQLAELVSRLDDWSKKVNSTLLYVEEQTPELFQ

SEQ ID NO: 36282 - protein, 162 aa, Oryza sativa
MAATSGSCLAFVMALALIGTNVSYAARLLADATESATPTASPAAVPGSIPAVPKLPVPTAMPPMPAVPAATVPQVTMPPMPAVPAVTLPPMPAVPAVTVSTVTVPPMPAVPKVTLPPVPAVVVPKVTMPPIPAGIPKVALPPMPAIPAANVPVPFLAPPPSA

SEQ ID NO: 36283 - protein, 58 aa, Oryza sativa
MASLKAVKPAGLAKEPAAKLSETATKPAAAKGGVKKAEQKPREPKKKVKSSKPAAAKN

SEQ ID NO: 36284 - protein, 213 aa, Oryza sativa
MASSSSSSPSRPLLRRVLSFREPLLLIPYIVGFLAAASSGFFYSYSSFLHSFARSLVPAAAAGAVVKCAYLSAAADSDEPCSSCGGEDEDVVAAVEEEEAHLSKVEVEEIMERIGLGVGGHGEGLKARMGRDEVSRLFDADEPSFAEVRRAFAVFDGNADGFIDADDLRAALARLGFREDAAACRAMIAASCGSVDARMNLFQFVKFLETGLC

SEQ ID NO: 36285 - protein, 534 aa, Oryza sativa
MAAAPMSFAFTLLAACISFLHHAPAAAAAAPANQTAGFLDCLAASLPAGVVYTHASRSYQSVLESSIKNLLFDTPATPTPVAVVEATDASHVQAAVRCGVGHGVSVRSRSGGHDYEGLSYRSLDAARAFAVVDMAGGALRAVRVDVLGRAAWVGSGATLGEVYYAIANKTSRLGFPGSVGPTVGVGGFLSGGGFGLMLRKHGLASDHVLDATMVEAKGRLLDRAAMGEDLFWAIRGGGGGNFGIVLSWKLRLVPVPATVTVFTVHRSRNQSATDLLAKWQRVAPSLPSDAFLRVVVQNQNAQFESLYLGTRAGLVAAMADAFPELNVTASDCIEMTWVQSVLYFAFYGTGKPPEMLLDRGTGRPDRYFKAKSDYVQEPMPSQVWETTWSWLLKDGAGLLILDPYGGEMARVAPAATPFPHRQALYNIQYYGFWSESGAPAAAKHMGWIRGVYGEMEPYVSKNPRGAYVNYRDLDLGVNDDGDGGGGVARARYEKATVWGRAYFKANFERLAAVKAKVDPDNYFKNEQSIPPLPS

SEQ ID NO: 36286 - protein, 26 aa, Oryza sativa
MGLGRAWRRTPPRWRRQSATTSKGSS

SEQ ID NO: 36287 - protein, 273 aa, Oryza sativa
MATAARLLPKIQSPASPAVAEARRRRPSSLRLGVTSGPARTLKQKLVAKSAVSVVEGENAFDGVKQDTRPIIVIDNYDSFTYNLCQYMGEVGANFEVYRNDDITVEEIKKISPRGILISPGPGTPQDSGISLQTVQDLGPSTPLFGVCMGLQCIGEAFGGKVVRSPYGVVHGKGSLVHYEEKLDGTLFSGLPNPFQAGRYHSLVIEKDSFPHDALEITAWTDDGLIMAARHRKYKHIQGVQFHPESIITTEGRLMVKNFIKIIEGYEALNCLP

SEQ ID NO: 36288 - protein, 80 aa, Oryza sativa
MAVTATTVAAATTMMAAVAAVFPAVDAARVRGGLRRLLGCGGASPPPPPHQHEHADRDIEMGLAAGGETSSPAKSPHPSS

SEQ ID NO: 36289 - protein, 32 aa, Oryza sativa
MLRVCRAGQHDPPLKDRALIMGLNKCEVTWPL

SEQ ID NO: 36290 - protein, 27 aa, Oryza sativa
MPLSESAGNWNPGNPTDKIRKSVASYS

SEQ ID NO: 36291 - protein, 145 aa, Oryza sativa
MQMAVAASTEALAVAAAATARAPQHHHIPSQPRWVVILYSPLHGMVAAAPPPPPPQFVKHFAPPAPVTPPPHPQPQQQQATGGRGWIRRREQGREPNEGYDDLGADDEEQQQAAAAGGGPSGEVRSLLPSLLPRSNGEIRRGSSI

SEQ ID NO: 36292 - protein, 198 aa, Oryza sativa
MAGSTSGGGGALSAQAAAALGEGIGLVFGRWTALQMAVENQWGGRDSRAKADQLAESILSWFANSKGKHYYEDLVDMMYDTVSKSFNADFEDGSVEEVAEQLLIMHEECLQSNYSSVEKLRNSRAQGNAVSQSRKMVVDGDDDSSDDEDDDDDGEPSMMDNEAGSAEKMAVDEPKPSKPVPDADGWTTVPPRRGRGKN

SEQ ID NO: 36293 - protein, 86 aa, Oryza sativa
MRRRRRGRLELREASASSSPHEINKRRLGTRAGVQRRGYAAGTRAWQAASQQAAGAMWEAEGKQQQQDSMHIYPLPDSIDYCLAEY

SEQ ID NO: 36294 - protein, 90 aa, Oryza sativa
MRLRRRRRGGGTDRRRCSWRWTTPSCSPSPGSSPTSSSPTSSPPSPPPRSALFSLFLLCFFFFFVCSIGSDAGDVTSDRLVVGCHDISDV

SEQ ID NO: 36295 - protein, 171 aa, Oryza sativa
MPNPQVFFDMTVGGVPTGRITFELFADKVPKTAENFRALCTGEKGIGRSGKPLHFKGSSFHRVIPNFMCQGGDFTRGNGTGGESIYGEKFADENFLLKHKGEGILSMANAGPNTNGSQFFICTVETAWLDGKHVVFGRVVDGMDVVKKIEAVGSQSGTTKKPVVIADCGEL

SEQ ID NO: 36296 - protein, 69 aa, Oryza sativa
MADWAPVVVGVVLFVLLSPGLLVELPGTHRHVDFGSFRTNGKAIFVHTLIFFAAFAILTLALHLHIYTG

SEQ ID NO: 36297 - protein, 87 aa, Oryza sativa
MCCCCGGGGDGDGDGCKCRPLGWLLGLPFALLAVLVSIVGAIIWIIGLPISCICPCCLCVTLVLEAAVELIKAPLHVMTWFTSKIPC

SEQ ID NO: 36298 - protein, 197 aa, Oryza sativa
MSSSSSSLLSSLATLGLGYSIAIALGFLVLLASLLLASYFCFRRGGGGGHFSGVLTPSSSSSHLSITVPRVLFVAEGSESPDAYSSGVAAASSPVGLDPAAIASYPKVPFYSGAGADADAMCSICLSEYADGEMLRVMPDCRHRFHVCCLDAWLRRNASCPVCRSSPIPTPVATPLATPLSELVPLSQYAADRRRSR

SEQ ID NO: 36299 - protein, 47 aa, Oryza sativa
MLCKSSPACPNCKFVQPSVPAPAMPRTPPRRRLEATVKPLETLSLLH

SEQ ID NO: 36300 - protein, 86 aa, Oryza sativa
MRWLHFDSAAPAGKGADVTAAPTTASFDWSASDTAILLEQQQHQIHLLSPIIEERGSESLDSLGSARRDQRQPPHAFKTYGSIEFP

SEQ ID NO: 36301 - protein, 102 aa, Oryza sativa
MGGSGGGGGGGRGRIRRQSVVVASVTAAASLLLSVAVVALGGSGGSGGSGEWIRRRWRQPRAIRQQSVVVASVMAVGGSGGGGGGRGWIRSPFFSPEFVSFS

SEQ ID NO: 36302 - protein, 391 aa, Oryza sativa
MATSPAAAPPRRVVICGGGVVGACTAYFLSTHAASPTVPTLVEKSSPACAASGKAGGFLALDWCDKTPALSALARASFALHRRLAATLDGGSAYGFRPVHTLSICLPTDPDPAAAAAAAASPLLPAWVDPAASAAPPRELGTTDTTAQVHPGFFTKAVLAASGAEVVIGEAERVVVRDGRVAGVVVRGRGEVDADAVVLALVPWSGRFEMVREVFDVSGLKAHSIVLRPREPENITPHALFLSYQPEPGAKMLDPEVYPRPTGEVYICGMTKDEEVPDDPETITGEPDSIAMLHKIAGRVSGQLKREEGAEVVAEQACYLPCTDDGLPVIGEMPGVKGCYVATGHSCWGILNAPATGAALAELILDGDAKIVDLAPFSPARFLKKKSKRGV

SEQ ID NO: 36303 - protein, 203 aa, Oryza sativa
MAGEALKEAGATPAAANAGEEKAVIPAASTSPVISKTDDDTEPPADDSKALVVFVEKVADKPHAEKATATATPTRTSNDRDIALAKVETDKRESLIKAWEENEKAKAENRASKKLLDIISWENTKKAVIKTQLKKKEEELERKKAEYAEKAKNKEAIVHKEAEEKRAMVMARRGEEVIKAEEIAAKYRATGVTPKKHIGCFGA

SEQ ID NO: 36304 - protein, 31 aa, Oryza sativa
MLEHVLVEAKDKKTINRQAIDDYDEEKEEEE

SEQ ID NO: 36305 - protein, 63 aa, Oryza sativa
MALPGGEEFPIQMLHKEPKRPPHCRAATGAPISRIRLQRHRRNGAEARLGVPQEHAERRMLGI

SEQ ID NO: 36306 - protein, 138 aa, Oryza sativa
MGMSIAQAVAALMGTCARRLSRAARRLHLRPREGIAASFSSRAIVPFLGGGGGGKKAISSSRRRRKAGAELSFRAEDGVWRKEILMGERCQPLDFSGVIYYDVEGRRLEQPPPPRSPLRSPLPSSIKLAANAGGGGGY

SEQ ID NO: 36307 - protein, 125 aa, Oryza sativa
MRSSPSTVPPSSPPTPMTGLSLAFGLPTSMTSTFCRAMGADVQGEDRGGEGGGDKADTRGGGNTGGSLEGLLKGETLLRWRHRWARGYHAGCPYPWGEGDRGSHRCQDLQRCNYPPFGLMDGALR

SEQ ID NO: 36308 - protein, 90 aa, Oryza sativa
MAQPAFLSALRSRLRSPQPQAPALPHLQPPRRGFHVELGAREKALLEEDTALKRFKSYKNSVKQVSKVGNILTGVVLFACAYEIVALANS

SEQ ID NO: 36309 - protein, 61 aa, Oryza sativa
MLNGELDEEIYMDIKTAFLNRELNEEIYMDQHQMDIKTAFLNGELDEEIYMDQPDGFVVKG

SEQ ID NO: 36310 - protein, 141 aa, Oryza sativa
MDSAEELVDRDVAAGRVRATGTHSNNLVRVKRGIELKRALFQLMLAQLQQQRPGGGGVSFDGVVSMAYAAVFARYHDKNVQSTVADSICAIPVKSISDFFATINETDESAAAEMQKYIDAANGIISYIDELFASRGVSADF

SEQ ID NO: 36311 - protein, 16 aa, Oryza sativa
MHKSRRIWTFHGSFMG

SEQ ID NO: 36312 - protein, 140 aa, Oryza sativa
MDRKMRNMQRLVALPRRSCPRSSTCSPSSSRRAGGGGGCADQAPDGRARPEKERLPRRGIGEEAERPDPSRISGCDVRTARETDETRARVKASSKEKKKQDTAAYDNDRVGPPATSSLPIQMQMCASVSNVKIYEKIKIS

SEQ ID NO: 36313 - protein, 104 aa, Oryza sativa
MAKAVALAVLVVAVAAALLAVAPAPARAVCNMSNDEFMKCQPAAAATSNPTTNPSAGCCSALSHADLNCLCSYKNSPWLSIYNIDPNRAMQLPAKCGLTMPANC

SEQ ID NO: 36314 - protein, 69 aa, Oryza sativa
MSSGGGVCGGGDRGPGAQRQPAGELGGHMHAVPRLLPANQRIRRCLLPHRRHPHVPRHLGRLLYPQALA

SEQ ID NO: 36315 - protein, 31 aa, Oryza sativa
MTSSSIPLLRWSSSGGDDALSKRLWRCPPPP

SEQ ID NO: 36316 - protein, 191 aa, Oryza sativa
MFMFDWFYGILGYLGLYHKNAKILFLGLDNAGKTTLLHMLKDDRVAVHEPTLHPNSEELIIGKLRLRTFDLGGHETARRLWRDYFATVDGVVFVVDALDRERFPESKRELDTLLGYDELANVPFLVLGNKIDVPRAASEDELRQALGLYETYGKEARGDRDPNIRPIELYMCSVVRRMGYADGFRWMAQFL

SEQ ID NO: 36317 - protein, 118 aa, Oryza sativa; identical to SEQ ID NO: 34213

SEQ ID NO: 36318 - protein, 116 aa, Oryza sativa
MARPAIVAAPALLLLALLIALATGGADAAPGEVPLSWELGVVGADDAFGFPGEEAADSATAVVRRVLQQGSYISYGALRRDTTPCSVRGASYYNCQPGAEANPYSRGCSAITQCRG

SEQ ID NO: 36319 - protein, 157 aa, Oryza sativa
MYAVQCCECHKWRKVPTKDEFETIRENFTEEPWHCSRRPDCSCEDPADIEYDSSRIWVLDKPNIPKPPAGTERLVIMRGDLSKMDTYYVMPNGKRVRCTAEVDKFLEANPQYKDRFSVESFSFTTPKIVEETVSHNSVWKSGKAKKQDKINALSNNN

SEQ ID NO: 36320 - protein, 79 aa, Oryza sativa
MALGIIAETFPAATAEEVRRMVTREMQELEGASLEVEDVARAAVFLASDEAKFITGHNLVVDGGFTVGKVLVRDPPGSA

SEQ ID NO: 36321 - protein, 36 aa, Oryza sativa
MCLSVFSICSGLKHQFSAQFKGEGKIFCYLLLFSIE

SEQ ID NO: 36322 - protein, 17 aa, Oryza sativa
MRRRPCRPWDGSDADGK

SEQ ID NO: 36323 - protein, 61 aa, Oryza sativa
MMREAMTFRRLCMYWPMSMSCSRSTGSLSPRLRRHRLYKLVTVMTICPDSRLRSFEMRSLR

SEQ ID NO: 36324 - protein, 10 aa, Oryza sativa
MGKILYKLKK

SEQ ID NO: 36325 - protein, 268 aa, Oryza sativa
MEASPSRSDSFSHGWLRRKARPAAAAASFERLVGGEGDAVDVDGDLGHSFNGSVVSFIDMDPAELFSMRWTSLTAAAEEEEDHDDDDFDFGMPCVAGAQCSSPLLVGAGRALSDGHHHHLLLPCEPGVVVARDRTASYADAPSPSPSSPLFHSALSTPASVITTASSRRAGAGSGKARAPLLATRRILLRYLRFLVPLCRKVRSLPLRVLSPRSAKGSLAAASSSASPARRSTSSSYASAAEYWCHGNADTAVRDAILYCKKSIGQDM

SEQ ID NO: 36326 - protein, 103 aa, Oryza sativa
MLEVLSGRRAICRWKEDHGDGDGDSPMDSLVNHALPLIDAGQVLHLLDRRPAEEPTPRQLEAADLVARTAAHCLQENGDDRPAMSDVVTRLQAALELVRCDDE

SEQ ID NO: 36327 - protein, 48 aa, Oryza sativa
MAVAPFAGSGGGPLIQIRWRKREEAVLCTDNFCCVIFPLVVEYVMKYD

SEQ ID NO: 36328 - protein, 78 aa, Oryza sativa
MSCGGSCNCGSCGCGGGCGKMYPDLAEKITTTTTTATTVLGVAPEKGHSEGVGKAAESGEAAHGCSCGSSCRCNPCNC

SEQ ID NO: 36329 - protein, 47 aa, Oryza sativa
MLNNIILPVMEVALSCALESPDERSTMRDALCRLKRIKEAFLKNHSF

SEQ ID NO: 36330 - protein, 56 aa, Oryza sativa
MVAAGGVEGRGRRIQLRLGLGLRLRLGLGRRRRRGRRGRHRGVVLVAGASLLMISG

SEQ ID NO: 36331 - protein, 32 aa, Oryza sativa; identical to SEQ ID NO: 34281

SEQ ID NO: 36332 - protein, 147 aa, Oryza sativa
MDDRRSTSGYCVFVGGNLVSWRSKKQAMVARSTAEAEYRAMALSLSEMLWMRSLLTELRVLRSDTVMLHCDNKSAINIGNNLVQHDRTKHVEIDRFFIKEKIDSGVLMLEYIKSCEQLADCLTKGLGPSEIQSICNKMGMIDIFYPS

SEQ ID NO: 36333 - protein, 122 aa, Oryza sativa
MQRPRPCASLRRHRLCGVLLPSPSSSCSRRGAHQALRQDGIPSATCCLAPPSFPFSSASSSSVCGNSGGRPRRRRRRGGETLGTAFSCLLALVNLVYGYSVPDLWPSCLLFLFYPPYNRFMF

SEQ ID NO: 36334 - protein, 66 aa, Oryza sativa
MVTRWSEKGPGLKILWIWTLGTAGIMITNVVRTRVNDMQKILQEEDEAAAAAAPMASGERVLKDDE

SEQ ID NO: 36335 - protein, 170 aa, Oryza sativa; identical to SEQ ID NO: 33767

SEQ ID NO: 36336 - protein, 160 aa, Oryza sativa
MSGGIARGRLAEERKAWRKNHPHGFVAKPETMADGSANLMIWHCTIPGKQGTDWEGGYYPLTLHFSEDYPSKPPKCKFPQGFFHPNVYPSGTVCLSILNEDSGWRPAITVKQILVGIQDLLDQPNPADPAQTDGYHIFIQDKPEYKRRVRVQAKQYPALL

SEQ ID NO: 36337 - protein, 60 aa, Oryza sativa
MRMGELGLETRTRRARGWRRTPATGGLRISAVSACIQVGNSIRRWPWLFRPRGGGAFDPY

SEQ ID NO: 36338 - protein, 65 aa, Oryza sativa
MRGRRRRARHRPGMRAWRRRKASLAADAEEGATAARSEGSGGVLGGSLFFPFFLCYFSFFFCVDL

SEQ ID NO: 36339 - protein, 155 aa, Oryza sativa
MAAKLTQEQVDECREIFDLFDSDEDGRIAAGELVTALRSLGQNVDEAEARRFLADATASGGGGGGGGDIDFAAFLSVAARKMRRGATEKELAACLDVFDDARSGVIPAEQLRQAMVSHGDRLTEEEADEMVRKADPAGEGRVEYKEFVKVLMNNK

SEQ ID NO: 36340 - protein, 146 aa, Oryza sativa; identical to SEQ ID NO: 36280

SEQ ID NO: 36341 - protein, 21 aa, Oryza sativa
MCFSRYSYLPCCHAGVYQLQR

SEQ ID NO: 36342 - protein, 79 aa, Oryza sativa
MLGRKKGSSSRLSDPINTTVTTDNGQEMAASHFISQQASQLDEAARKRLQRMNERLKLLEMQMETLEAGVAKASNDSYE

SEQ ID NO: 36343 - protein, 211 aa, Oryza sativa
MATEIEAYYDDGSGTYLLSFDEDFFDATLTKSGGKVESWLGETYRIHRSCGHPLVVGLDVEWRPAAPVPGPVAVLQLCVDRRCLVFQILHADYVPDALSRFLADPRFTFVGVGVRDDAARLRVGYGLEVPRAVDLRALAADTLGRPDLRRAWLRALVREVMGVQMDKPHHVRVSAWDKRNLSEDQFKYACADAFASREVGRRLYTCNCDGA

SEQ ID NO: 36344 - protein, 427 aa, Oryza sativa
MLQLLLISTLPAFTLMLVAPAATHKHCKLVRELGLVALLLVRELLHHSASAACAWGGEGGGSSNKERERERGVRIMPSKAKPEPALAAREEGEEGTEAELNAAALPLLDLPELALERVLEELEPPSLAAMACVCVALRDRCSADTLWGRHVNRKWGRVLGAAARKEWEAELAARRSSGALPRPARRRSLADSLACAWPFSWITCRWLKGNAVAAEPAAATPSPLPSPATDTVAAWYRAVECGEFSFPAQVYNREDGHVGFVLSCYDAHLRYDRRTDTFTARYPPHGRKPAKEESGVQWSRVRSPPVSTPAHDLHASGCLGDLRPGDHFEIQWRKNKDFPYGWWYGVVGHQETCNANEHLCRCHEDDMVVLEFKHYAAGSRWRQTTVSRKDHREKGDETDGFYGGIRKLQTSDEISTWRKFWPVDVLN

SEQ ID NO: 36345 - protein, 428 aa, Oryza sativa
MGEEAAAATVTAAAAAAASGGAPHLLLICFPGQGHVNPMLRLAKRIAAKGLVVTFSSTSAIGAKLVESSGVSVGGDGVPLGGGRIRFEFLEDGFDGSDLDELMRHLGTAGPAAFAELLARQEAAGRPVACVVGNPFIPWAVDVAAAAGILSAVLWVQSCAVFSLYYHRVHGLVEFPPEDDLDARLTLPGLPAMSVADVPSFLLPSNPYMSLTEAIQQQIRTIDKATWVFVNSFTELERDVVDALRGVATSPPPPPLIPVGPLIELEGDAAVRGDMIRAADDCVGWLDEHPPRSVVYASLGSVVVLSAGEVAEMAHGLASTGRPFLWVVRPDSRALLPEGFLDAVAGRGMVVPWSPQEQVLVHPAVACFLTHCGWNSTLETVAAGVPVVAFPQWGDQCTDAMFLVDELGMGVRHVEAFVEEVKARAAKA

SEQ ID NO: 36346 - protein, 182 aa, Oryza sativa
MKSVAASRRRRAPRRDGVERPLVPAEEEAMAAGVVPHLVRPRPPAALQQLPRLHGAAVAQPHPLHAGRLHPRRPLPRPLVPLHPLRPLARHHAADLLPEQHPLHARALRRRRRAPLQAVEQRRVVVERLVEPLLERAAVVVRLLLRHHHDLRGQRPHRRQEAPQLWRRRRRVRRRCCCGGVG

SEQ ID NO: 36347 - protein, 212 aa, Oryza sativa
MDPQLLERALEASGDDIDSAIKSLNELCLESAAVGDSNSVLPAALKLSAEGVVNNGHLDVLTENPHATENFQTNHHGSEWVELFVREMMSASDIDDARARASRALEALEKSIMERAGTEAVHNLHKENVMLKEQLAIYLRENAVLKRAVAIQHERQKEFDERTQEVHSLKQLVLQYQEQIKTLEINNYALRVHLKQAQQNNSMPGRFPPDVF

SEQ ID NO: 36348 - protein, 343 aa, Oryza sativa
MAAAATGPVPFKDADDDGTLAAAEARSPLPKEEFGDLVAALPRKEQYLDGRLYEGFWLPEHYAPGIIAFRRRFTPRADDVVLASYPKCGTTWLKALAFAAMTRAAYPADEHPLLRLNPHDVIPFVEDVFTDGHEAKLDMLPSPRLINTHTPYQLLPESVVAGDGGGGCKVVYICRDPKDMVVSLYHFMRRLQPDLSLAGVVESVADGTVPFGPMWDHILGYWRASVSRPDRVLLLRYEDLLRDGAAGEHVRAMARFMGRPFSAAEEAAGAVASVVELCSFERMKALEVNRRGTAGSYKSMPRDAFFRKGVAGDWANHMSPETAARLDGIFREKFRGTGLTIVP

SEQ ID NO: 36349 - protein, 199 aa, Oryza sativa
MSDRRHDREKPRDRDRERGRDGERDRELDRPRDRDHRDRDRDKERDRDRDRDRERRRGERDRKRSRSPSADRSHRRHSHSHSHRGRSSPSPDAGRHKRRRDGSPAAAATDHKDDKKPEAPVVPKSAAGDGVAPGDGDVDVEELEMMKMMGIPVGFDSTKGKHVPDADVSGVRVVTKRQPRQYMNRRGGFNRPLPPERNR

SEQ ID NO: 36350 - protein, 476 aa, Oryza sativa
MAELKRLSESRDLTRIERIGAHSHIRGLGLDSSLEARGSSEGMVGQLPARRAAGLILQLIRQGKIAGRAVLLAGQPGTGKTALAMGIAKSLGAETPFASVAASELFSLDLSKTEALTQAFRRSIGVRIKEEAEIIEGEVVEISIDRPVSAAAAAGSSAPSGVAAAGKTGRLTLKTTDMETVYELGGKMIEALGKEKVQSGDVVALDKASGKVTKLGRSIGRSRDYDAVGPHTKFVKCPEGELQKRKEVVHCVTLHEIDVINSRTQGFLALFTGDTGEIRAEVREQIDTKVAEWREEGKAEIVPGVLFIDEVHMLDIECFSFLNRALENDMAPILVIATNRGITSIRGTNYRSPHGIPPDFLDRLLIITTQPYTEDDIRKILDIRCDEEDVEMSADAKVLLTKIGVETSLRYAIHLITSAALACQKRKGKVVEMEDISRVYQLFLDVKRSTQYLMEYQSQYMFNEVPGEAGDDAMQS

SEQ ID NO: 36351 - protein, 301 aa, Oryza sativa
MAAAAAARLPRTEARVLSGHEGAVLAVRFNRDGNYCLSCGKDRIIRLWNPHTGALVKPYKSHGREVRDVNSSSDNAKLVSCGGDRQVFYWDVASARVIRKFRGHNSEINSVKFNEFNTVVVSAGYDRTVRAFDCRSQSSDPIQTIDTFQDSVMSVNLTNTEIIAGSVDGTIRTFDIRMGRETVDNLGHPVNCISLSNDRNCLLANCLDSTVRLLDKSTGELLQEYKGHICKSFKMDCCLTNDDAFVVGGSEDGYIFFWELVDAPVVSSFRAHSSVVTSVSYHPTRACMLTSSVDGTIRVWT

SEQ ID NO: 36352 - protein, 711 aa, Oryza sativa
MGGPLGAIIGRHPAAAGGGGEDELGGGGGGGDGGGIIRHNRRCRDLAFLVLFAAFWVAMIVNSSFGFNQGNPLRLTYELDYKGNICGSRHGDPDLHELDVRYWMNPNQVYQSGVKDNKINLADAKAICLMECPIPAADGLNFVCDYPEGDIRLSIDDWINRDYDYFEFLAPDMRNSSLQLQGPCYPVIFPSVNVYWSCQFIARASNVSLKHWQQMGGINIDENILIDKTIHKAINSKSSVLKRYVADIGKSWPVLIVCGGLLPLFLSVIWLLLIRYFVAAMPWITVVLFNALVISVTMFFYIKAGWLGNDPLTVVIGESDPYVHITGREISHLHAATVVMTVVMIIAFLSSIAIIRRILIATPVLKVAAKVIGEVQALIIFPVVPYFIFAIFYMFWFSATLHLFSSGQVLRNDCNTDCCSYDLKLGKVNCDNCCGYSIHYTPHIGIAILFHLFGCYWATQFFIACSSTVIAGSVASYYWARGEISHDIPFVTVVSSLKRLLRYSLGSVAIGSLVVSAVEWVRFILECLRRKLKLFDSARESCFGKMTSSSSQCCLGCIDWTLKSVNRNAYIMIAITGKGFFKASVLATGLIMNNILRIGKVNVIGDVILFLGKLCVSLFCALFAFLMLDTHKYKSAHNKISSPLVPVVVSWALGFIVAKLFFQVVEMSIDTIILSFCQDSEEHQGNAQYAPPLLVETLDEQSELHRLTQGP

SEQ ID NO: 36353 - protein, 90 aa, Oryza sativa
MAFSSEGGVPAERVAAAVNDLVEVRDGLVRLRGFLPPPPQAEQSSSRPPCAAELMDATMSKLMSAMATLGGSGDIAGEVDAPLTRESPQH

SEQ ID NO: 36354 - protein, 58 aa, Oryza sativa
MHPPPPTPRSSLVLQVQVGEWGIRTAVVLLLEHFSEKASQQSFEPITRQWAPRLPIAL

SEQ ID NO: 36355 - protein, 185 aa, Oryza sativa
MSETIDLTGDRCILKTVIRRAKDDATAPSDSLPIVDVHYEGTLAENGEVFDTTHEDNSVFSFEIGEGTVIKAWDIAVKTMKVGEVAKITCKPEYAYGAAGSPPEIPPDATLTFEVELIACRPRKGSSVESVSEEKARLEELKKQREIAAAAKEEEKRKREEAKAAAAARVQAKLEAKKGKGKKAK

SEQ ID NO: 36356 - protein, 127 aa, Oryza sativa
MSLSGWSSTATAEETSTRSDAARPRRWLQAKLVAAKNRHATTVAEIPPLKSTVELTNDAIVARMEAGKKRAVVEVLHRRIDRERDDPRRLRSEVALEQMVLVRHQVAHALQLAERAVAAETHGLALA

SEQ ID NO: 36357 - protein, 636 aa, Oryza sativa
MVENGVQLTLTSTVKTNGKIRINGEVLNGSHLKEKHEAGSNGALHPSNGQAKQPPSPPQKQKQKLLCTTCGKGHTCQAVIARTRQMRAMIDARRPHQAHSAFRHLVDDGHRPSLVTYTTLLAALTSQRAFDTIPWLLAEVEDAGLRPDSIFFNALINALVEARRMGEATNTFLRMGHSGCRPTASTFNTLIKGYGIAGRPEESQRVFDMMASGGAGGEAAVRPNLTTYNILVKAWCDAGRLEEAWRVVARMRASGADPDVVTYNTLASAYAKNDETWRAEELVVEMAQQAGLRTSERTWGIIVGGYCREGRLGEALRCVRQMKDSGVLPNVIVFNTLLKGFLDANDMAAVDDVLGLMEQFGIKPDIVTYSHQLNALSSMGHMAKCMKVFDKMIEAGIEPDPQVYSILAKGYVRAQQPEKAEELLRQMGRLGVRPNVVTFTTVISGWCSVADMGNAVRVYAAMRDAGVRPNLRTFETLIWGYSELKQPWKAEEVLQMMQDAGVRPKQTTYCLVADAWKAVGLVENANRALGSSSSSGDLLDADDDEEPYFPDNHGDDKLQSFERTNGHAKSDASRSMQVTRASMSLKTARSSSPSLSLLRRSCRLPVRSTWLCRKQLQMQCGVYGQSISSLKMVFLS

SEQ ID NO: 36358 - protein, 424 aa, Oryza sativa
MFRLPPLHRAAAVFLRLRLASPRATFSSKPANPRTSSVASAAAPAAAAVSDAIVRLVAAGGRSLEADLDRLDPALSHPIVSATLRALTDRGLPAARFFDWLALRRGFSPSAHAHNLLVENAGSLADYRAMSRAMESMSTRRVPLTERAFAFLNTSQGSARDTAIAILATLDEVGGPCRASGVFSLVKALASIGEFDAAMSVIQETARGARYYNALIAVKCKTGDFHGAREVFDEMRRSGFGPNSNSWNYLLGCLLKNGRVAEACELVEAMERSEHNDIPNSLTYEILAYHACKAGRMDSAMRILDQMFLEKLTPRITIHTAFIKGYLYAGRIDDACRYVSAMSTRDRRSVNRNYSLLAKLLCKAGMIVDAGRILYELMEKEALLPDHSAYIRVIKDLHKIGKGDLAAELNLILQKLSVHAESAG

SEQ ID NO: 36359 - protein, 275 aa, Oryza sativa
MAREPSPEIDDELFNEVYGKAYSGPVATTTNNVTPRVNDEKRPLEREKSDEEDGPPDPNAVPTDFTSREAKVWEAKAKATERNWKKRKEEEMICKICGESGHFTQGCPSTLGANRRNADFFERVPARDKQVRDLFTERTISQIEKDVGCKIKMDEKFLFVSGKDRLILAKGVDAVHKIIQEGKGKNTSSSPKRDRLRSPVRTTSDIRPRHTDSRWSHSPRSAPRSQSKGYYNERPLDGRSHDDMPKFSKESPQGRALKHTRLIIVVSANIRSQAF

SEQ ID NO: 36360 - protein, 244 aa, Oryza sativa
MKTVSLGAARPSSVKFRMPTRDNLVPIRVDVEVDGQRYRDAFTWNPCDPDSEIISFAKRTAKDLKLPANFVPQMLHSIQGQLTEFRSYEGEEMQIREKIVPLKIDLRINNTVIRDQFLWDIGNLDSDPEEFARTLCDDLNITDPEVGPAIAVSIREQLYEIASQSVSAMREAARVSKKGRRAPEFASNSKAMNNSLDLFKYFGSKGSVVRKRKEWYLYEPVVDVITNEEVGVTDATEEINSRNA

SEQ ID NO: 36361 - protein, 471 aa, Oryza sativa
MAILREFGTIEGMENLLPEDVLSNIIHRLAPRYLAISRCVCKTWCTIIEAHNLLHVDLLPRPLCGIFINFNELSMSEFFSRPSKGPTVSGNFDYLPCSSCIIDHCNGLLLFHKYVVNPATRQSAPLPPCPYMVVEHIFHREYLVFDPTLSPHFEVFMIPEIRRSNVWYNMLNSDDKLDPAIEELEWPPSPCILHVFSSRTKVWEERSFVREGEAAGNVSDMRLDHPYVPDTSVYVPDTSVYCRGVLYVYCQNKYVMRISLSNGKYQVIKPPSDCEGMAYTNLYLGKSMKGVYCAVRHLASRFLIYILDESSDRMEWVCKDSCSIQPCQIIDGPGPWTLQDINNQERGFEYEDGNNEAVVEDRFEWDSDNDNVIETNSRGSGGYINFLVDTTRRGRYNSGGYIDFLGFHPYKEVIFLSDSLRRGLAYHLNSSKIQDLGSLRPTNYGTEVGIQPFIQKFFPYSPWMGRFPEDN

SEQ ID NO: 36362 - protein, 404 aa, Oryza sativa
MAEAFSGSITQEYASNAVESSKQQETNPFLLQPDTYGAHRANDIDDLPKVDFANLHRVELKFDVHPINRETTITSDVLICPRLSDKKSNSPFQQSSQPSFQVEGIKNHEKVEVKENVTDMISREITNQVSHRKAEIENFKSKDDIDAEDMPECHFQGLDNEKLHQSGSSKHTSPSLKNSTGSKAPSQVFPPITQKSYTPLEVEDISSGHDPNMPSGCLNIPRDQVSFPRHPPPAQGDQRLAARHPPVLADQGYVPRLPPPVLEDQGLASRCPPPALAGQGFVPRHPPPVLPNQGFFPRRCPPFAGQDLYPWRPPFHANQGPFPRHAPPHPCPPFTPGHVRPPSNFAPPGPWRPVLHPGQEHHHHHYGHPGRSNGPSGSGNKPGYHNPSYGNGPGGCRPQHQAQG

SEQ ID NO: 36363 - protein, 679 aa, Oryza sativa
MGYLSCRADSSVATCRSITAISPLPLSRRSGVGGRRRALPAAAREGDGGEASSAAATIERFAYDELEAATSHFADAALLGRGSHGAVYKAVLASGRAVAVKRPSPRRPEVDNEIRILSSVRGPRLVNLLGFSDSGAGAGADQQQQQHRPRLLVVEYMPNGTLYELLHSNPRPPGWPRRVRLALQTARALRALHDADPPVIHRDVKSANVLLDANLDARLGDFGLALRVPKRLPGDAAANAAATPAPAGTLGYLDPAYVTPESLSTKTDVFSFGILLLEIMSGRKAIDVQHSPPSVVEWAVPLLRKGKVASLFDPRVAPPRDPVTRRDLAALAASCVRSCRERRPSMADIVDRLVVLSKAVSGKMWNGLAVVGNPCAVVDVQKTIAKRAAAAAAGDRAASQRELTSALAFDDDEKKEEEDAPNAGALEEDEVPLVGAKKAPRPLKNGKMFSEPGARERRNLLELMARIDGVAGQRFGITRARTVRAASESIEKDAAVLLLRRNQTVKVLGSEALSKADIFSSLDAKIKHELGKEQQEEAGKIKHELVKEQQEKAGNIKQELVKEQQEKAGNIKQESGEEQEKAGKTKHDAGKGHVEKAVGINLEAGKEQEKVEKNQEKEMKIQEKLGEIFDKAMKSEEKTGQNPGIEKKIQDTAEKKQEHDARVVQDKVEKIQDEAKKIQ

SEQ ID NO: 36364 - protein, 523 aa, Oryza sativa
MLMMLGAASQWILAAAAAAAVAALLWLAVSTLEWAWWTPRRLERALRAQGIRGNRYRLFTGDVPENVRLNREARKKPLPLGCHDIIPRVLPMFSKAVEEHGKPSFTWFGPTPRVMISDPESIREVMSNKFGHYGKPKPTRLGKLLASGVVSYEGEKWAKHRRILNPAFHHEKIKRMLPVFSNCCTEMITRWENSMSIEGMSEVDVWPEFQNLTGDVISKTAFGSSYEEGRRIFQLQAESAERIIQAFRTIFIPGYWFLPTKNNRRLREIEREVSKLLRGIIGKRERAIKNGETSNGDLLGLLVESNMRESNGKAELGMTTDEIIEECKLFYFAGMETTSVLLTWTLIVLSMHPEWQERAREEVLHHFGRTTPDYDSLSRLKIVTMILYEVLRLYPPVVFLTRRTYKEMELGGIKYPAEVTLMLPILFIHHDPDIWGKDAGEFNPGRFADGISNATKYQTSFFPFGWGPRICIGQNFALLEAKMAICTILQRFSFELSPSYIHAPFTVITLHPQHGAQIKLKKI

SEQ ID NO: 36365 - protein, 466 aa, Oryza sativa
MADHPRPPPCVLLERVVRFVEAAGLTSGGASRDPDVAAIIEVGGWSWSTVQMMGSVEEMERLMAPSVKPVAFLGDPPQVSSLHMLLPPPASLDLLGIGEISSTHKGIVVIYADKCYLLYDASNNHLTAIPPIPDSVTSAPIFLPLGRGAVLVSAAGADDDDYIFADIVTSPSTRGINPALPKATIFARVKNGGEWIQSSIPPLPLPPHLCGPTYFFHIDTAFSFAGTIFWVDLLKGILICDDILSSPQGPRLAFVPLPHCIDAHDKPRHCFSPNEHRSIGRVSGAIKFLALIGYCEASCPENEVKLKTWSLSPDFKHWKEETTLTVGDIWASESFNQMGLPHVLPFSPVLSVNEDGIMYAVLNDVKKEPIPRLNEFGDSLGMQLVPKANYMIRFDMLQNKVLSSTKISKKATSRWLTNTFLATDFSAYLQDRQNAEAAGKVGASAKGKRKRMSSRQAGRSKCQGQA

SEQ ID NO: 36366 - protein, 405 aa, Oryza sativa
MRSMPFQLKNGHHHHGAMEGKPPVTPMQQQQQHAPPPRVSRFRRLLVRVSASERLAGDGKERGEKEAEKVSASAAGGEVEAGSVGLDRMVLSFMEDSAAVERPQRGRCNCFNGSNYEESDDEEGFFLPSDHSSASAPAAAGDALESLKGLVQSASVAERNLLADASRIAERCCKGSKGKAECRRAVADGLRALGYDAAVCRSRWEKTSSYPAGEHEYIDAVVGEEVRLIVEVDFRSEFEVARSTKAYRAALQALPPLFVGTPDRLGQIVAVVAEAARQSLKKKGLHFPPWRKPEYMRAKWLSPHVRSGDKAAAAAKTVTSTTSATATPVSAASFSGAFELLFDRKQSGEIPAAEKITVVVSPSPWRPTEEASKKKPPPSPSPPQLWQQHQQPPKAKVVTGLAAVL

SEQ ID NO: 36367 - protein, 396 aa, Oryza sativa
MDAMRQSTPRAMLLLCAVLMLAVAPPGAATAAAVAGCECGNAAAAAVAGEDARGALRLKLVAIASILAAGAAGVLVPVLGRSFAALRPDGDVFFAVKAFAAGVILATGMVHILPAAFDALASPCGGGRGGGGGFPFAGLVAMAAAMATMMIDSVAAGYYRRSHFKKPRPVDDPADAARAAGVEEGGAEHAGHVHVHTHATHGHAHGHVHSHGHGHGHSHGSAPAAATSPEDASVAETIRHRVVSQVLELGILVHSVIIGVSLGASLRPSSIRPLVGALSFHQFFEGIGLGGCIVQANFKAKATVIMATFFSLTAPVGIALGIAISSSYSKHSSTALVVEGVFNSAAAGILIYMSLVDLLAADFNNPKLQTNTKLQLAVYLALFLGAGMMSLLAIWA

SEQ ID NO: 36368 - protein, 612 aa, Oryza sativa
MPPSTTGFPRRRSPPVDADLLPRLRLAAGQSSPWRVLLQSLALVVTSGLSASASHSHRGRALSSRLLNSLLPHAPRRLLPALLRLLPGDHLTLLLLVSSKHHSHSLPAASALHALAVSSGHLPSDLRIANSLLSLYLSLGSPASARRLLADIPRPDAVTWNTLLRACLRLGLLPAARRLFDEMPERDVVSYNSMVAGYVAEGDLAGARNLFDGMARRDVVTWNSMISGYSRHGDMENARKMFDAMPERDVVSWNSMLDGYAQAGDVEMARLVFDGMPKRSIVSWNVILALYAKLRDWRECLGLFDVMIAEGNTVPNEKTFVSVLTACANLGDLEKGRWVHDLVQERWDRLVPDVLLLTTLLTMYAKCGVMETAREIFNSMGEKSVPSWNSMIIGYGLHGQSEKALELFLEMERDGPRPNETTFICVLSSCAHGGLVLEGWWCFDRMVRFYSIEPKSEHFGCMMDLLGRAGLLEQSENLIENLQGKVSEALWGILMSASQTQNNIKLGEFVGKKLIEMRPTEVGPYILLSNIYAAEGRWDDVEKVRKVMEEKGVEKDAGLSLVGSREGGHFINESGASAPRNDVMLCMLGEMSVHMKQPSEGSNCRKRSPSAP

SEQ ID NO: 36369 - protein, 304 aa, Oryza sativa
MPCCSAVLSAAAAAAAASRTPPWLHRLHAKGGLSFPSNLHIDDLLYGQHHALPHPPPPPPPPQPAKEPPPPTKPKHPKPKQQQHPPPPPPQKPPQGSTNLSLPNPSGSGSGNGNPPPSPQLQLSTVIADVFVTPSSAPPLIAPIKAFRKQNHPRPRPDKASRPSKENKDKASKVKVKKRRRSDRAADGDGERCSRTEVTVIDTSTDGWKAAKLLLRRGAVWKVRDKASGVSEPEDPTKMKRRAGLVSKIQRDREKQKQKEKEATSSGNIHASSGDGMKEPDGPIQALKRSRGPEPEPEIIALLH

SEQ ID NO: 36370 - protein, 490 aa, Oryza sativa
MAPAMASSAATVVLIPFCVSGHLTPMLEVGKRMLRSRCCGDDDDGRPAMSLTVLLAQLPESHRAPEIDEIIRREAAGASEHSGFDVRFHCLPAEELPDFRGGEDFISRFMQQHASHAREAIAGLESRVAAVVLDWFCTTLLDVTRDLGLPGYVFFTSAASMLSLLLRLPALDKEVAVDFEEMGGAVDLPGLPPVPAALLPTPVMKKGCNYEWLVYHGSRFMEAAGIIVNTVAELEPAVLEAIADGRCVPGRRVPAIYTVGPVLSFKTPPEKPHECVRWLDAQPRASVVFLCFGSMGSFAPPQVLEIAAGLERSGHRFLWVLRGRPPAGSPYPTDADADELLPEGFLERTKGRGMVWPTWAPQKDILAHAAVGGFVTHGGWNSTLESLWHGVPMAPWPLYAEQHLNAFELVRDMGVAVEMEVDRKRGNLVEAAELERAVRCLMDEGSEEGRMAREKAAAAKAACRNAVDGGGSSIAALRKLTQEMAHMSSI
